United States Patent Application Publication US 2015/0232836 A1 - sequence listing, part 18

SEQ ID NO: 627200 - DNA, 15 bp, Homo sapiens
cacacagtagagtca

SEQ ID NO: 627201 - DNA, 15 bp, Homo sapiens
acacagtagagtcac

SEQ ID NO: 627202 - DNA, 15 bp, Homo sapiens
cacagtagagtcact

SEQ ID NO: 627203 - DNA, 15 bp, Homo sapiens
acagtagagtcactt

SEQ ID NO: 627204 - DNA, 15 bp, Homo sapiens
cagtagagtcacttt

SEQ ID NO: 627205 - DNA, 15 bp, Homo sapiens
agtagagtcactttt

SEQ ID NO: 627206 - DNA, 15 bp, Homo sapiens
gtagagtcacttttt

SEQ ID NO: 627207 - DNA, 15 bp, Homo sapiens
tagagtcactttttt

SEQ ID NO: 627208 - DNA, 15 bp, Homo sapiens
agagtcacttttttg

SEQ ID NO: 627209 - DNA, 15 bp, Homo sapiens
gagtcacttttttgg

SEQ ID NO: 627210 - DNA, 15 bp, Homo sapiens
agtcacttttttggt

SEQ ID NO: 627211 - DNA, 15 bp, Homo sapiens
gtcacttttttggtt

SEQ ID NO: 627212 - DNA, 15 bp, Homo sapiens
tcacttttttggttt

SEQ ID NO: 627213 - DNA, 15 bp, Homo sapiens
cacttttttggtttg

SEQ ID NO: 627214 - DNA, 15 bp, Homo sapiens
acttttttggtttgt

SEQ ID NO: 627215 - DNA, 15 bp, Homo sapiens
cttttttggtttgtt

SEQ ID NO: 627216 - DNA, 15 bp, Homo sapiens
ttttttggtttgttt

SEQ ID NO: 627217 - DNA, 15 bp, Homo sapiens
tttttggtttgtttt

SEQ ID NO: 627218 - DNA, 15 bp, Homo sapiens
ttttggtttgttttt

SEQ ID NO: 627219 - DNA, 15 bp, Homo sapiens
tttggtttgtttttt

SEQ ID NO: 627220 - DNA, 15 bp, Homo sapiens
ttggtttgtttttta

SEQ ID NO: 627221 - DNA, 15 bp, Homo sapiens
tggtttgttttttag

SEQ ID NO: 627222 - DNA, 15 bp, Homo sapiens
ggtttgttttttaga

SEQ ID NO: 627223 - DNA, 15 bp, Homo sapiens
gtttgttttttagag

SEQ ID NO: 627224 - DNA, 15 bp, Homo sapiens
tttgttttttagaga

SEQ ID NO: 627225 - DNA, 15 bp, Homo sapiens
ttgttttttagagac

SEQ ID NO: 627226 - DNA, 15 bp, Homo sapiens
tgttttttagagaca

SEQ ID NO: 627227 - DNA, 15 bp, Homo sapiens
gttttttagagacag

SEQ ID NO: 627228 - DNA, 15 bp, Homo sapiens
ttttttagagacagg

SEQ ID NO: 627229 - DNA, 15 bp, Homo sapiens
tttagagacagggtc

SEQ ID NO: 627230 - DNA, 15 bp, Homo sapiens
ttagagacagggtct

SEQ ID NO: 627231 - DNA, 15 bp, Homo sapiens
tagagacagggtctt

SEQ ID NO: 627232 - DNA, 15 bp, Homo sapiens
agagacagggtcttc

SEQ ID NO: 627233 - DNA, 15 bp, Homo sapiens
gagacagggtcttcc

SEQ ID NO: 627234 - DNA, 15 bp, Homo sapiens
agacagggtcttcct

SEQ ID NO: 627235 - DNA, 15 bp, Homo sapiens
gacagggtcttcctc

SEQ ID NO: 627236 - DNA, 15 bp, Homo sapiens
acagggtcttcctct

SEQ ID NO: 627237 - DNA, 15 bp, Homo sapiens
cagggtcttcctctg

SEQ ID NO: 627238 - DNA, 15 bp, Homo sapiens
agggtcttcctctgt

SEQ ID NO: 627239 - DNA, 15 bp, Homo sapiens
gggtcttcctctgtt

SEQ ID NO: 627240 - DNA, 15 bp, Homo sapiens
ggtcttcctctgttg

SEQ ID NO: 627241 - DNA, 15 bp, Homo sapiens
gtcttcctctgttgc

SEQ ID NO: 627242 - DNA, 15 bp, Homo sapiens
tcttcctctgttgct

SEQ ID NO: 627243 - DNA, 15 bp, Homo sapiens
cttcctctgttgctg

SEQ ID NO: 627244 - DNA, 15 bp, Homo sapiens
ttcctctgttgctga

SEQ ID NO: 627245 - DNA, 15 bp, Homo sapiens
tcctctgttgctgag

SEQ ID NO: 627246 - DNA, 15 bp, Homo sapiens
cctctgttgctgagg

SEQ ID NO: 627247 - DNA, 15 bp, Homo sapiens
ctctgttgctgaggc

SEQ ID NO: 627248 - DNA, 15 bp, Homo sapiens
tctgttgctgaggct

SEQ ID NO: 627249 - DNA, 15 bp, Homo sapiens
ctgttgctgaggctg

SEQ ID NO: 627250 - DNA, 15 bp, Homo sapiens
tgttgctgaggctgg

SEQ ID NO: 627251 - DNA, 15 bp, Homo sapiens
gttgctgaggctgga

SEQ ID NO: 627252 - DNA, 15 bp, Homo sapiens
ttgctgaggctggag

SEQ ID NO: 627253 - DNA, 15 bp, Homo sapiens
tgctgaggctggagt

SEQ ID NO: 627254 - DNA, 15 bp, Homo sapiens
gctgaggctggagtg

SEQ ID NO: 627255 - DNA, 15 bp, Homo sapiens
ctgaggctggagtgc

SEQ ID NO: 627256 - DNA, 15 bp, Homo sapiens
tgaggctggagtgca

SEQ ID NO: 627257 - DNA, 15 bp, Homo sapiens
gaggctggagtgcag

SEQ ID NO: 627258 - DNA, 15 bp, Homo sapiens
ggctggagtgcagtg

SEQ ID NO: 627259 - DNA, 15 bp, Homo sapiens
gctggagtgcagtgg

SEQ ID NO: 627260 - DNA, 15 bp, Homo sapiens
ctggagtgcagtggt

SEQ ID NO: 627261 - DNA, 15 bp, Homo sapiens
tggagtgcagtggtg

SEQ ID NO: 627262 - DNA, 15 bp, Homo sapiens
ggagtgcagtggtgc

SEQ ID NO: 627263 - DNA, 15 bp, Homo sapiens
gagtgcagtggtgca

SEQ ID NO: 627264 - DNA, 15 bp, Homo sapiens
agtgcagtggtgcag

SEQ ID NO: 627265 - DNA, 15 bp, Homo sapiens
gtgcagtggtgcagt

SEQ ID NO: 627266 - DNA, 15 bp, Homo sapiens
tgcagtggtgcagtc

SEQ ID NO: 627267 - DNA, 15 bp, Homo sapiens
gcagtggtgcagtca

SEQ ID NO: 627268 - DNA, 15 bp, Homo sapiens
cagtggtgcagtcat

SEQ ID NO: 627269 - DNA, 15 bp, Homo sapiens
agtggtgcagtcata

SEQ ID NO: 627270 - DNA, 15 bp, Homo sapiens
gtggtgcagtcatag

SEQ ID NO: 627271 - DNA, 15 bp, Homo sapiens
tggtgcagtcatagt

SEQ ID NO: 627272 - DNA, 15 bp, Homo sapiens
ggtgcagtcatagtt

SEQ ID NO: 627273 - DNA, 15 bp, Homo sapiens
gtgcagtcatagttc

SEQ ID NO: 627274 - DNA, 15 bp, Homo sapiens
tgcagtcatagttca

SEQ ID NO: 627275 - DNA, 15 bp, Homo sapiens
gcagtcatagttcac

SEQ ID NO: 627276 - DNA, 15 bp, Homo sapiens
cagtcatagttcact

SEQ ID NO: 627277 - DNA, 15 bp, Homo sapiens
agtcatagttcactg

SEQ ID NO: 627278 - DNA, 15 bp, Homo sapiens
gtcatagttcactgc

SEQ ID NO: 627279 - DNA, 15 bp, Homo sapiens
tcatagttcactgca

SEQ ID NO: 627280 - DNA, 15 bp, Homo sapiens
catagttcactgcag

SEQ ID NO: 627281 - DNA, 15 bp, Homo sapiens
atagttcactgcagc

SEQ ID NO: 627282 - DNA, 15 bp, Homo sapiens
tagttcactgcagcc

SEQ ID NO: 627283 - DNA, 15 bp, Homo sapiens
agttcactgcagcct

SEQ ID NO: 627284 - DNA, 15 bp, Homo sapiens
gttcactgcagcctc

SEQ ID NO: 627285 - DNA, 15 bp, Homo sapiens
ttcactgcagcctca

SEQ ID NO: 627286 - DNA, 15 bp, Homo sapiens
tcactgcagcctcaa

SEQ ID NO: 627287 - DNA, 15 bp, Homo sapiens
cactgcagcctcaac

SEQ ID NO: 627288 - DNA, 15 bp, Homo sapiens
actgcagcctcaacc

SEQ ID NO: 627289 - DNA, 15 bp, Homo sapiens
ctgcagcctcaacct

SEQ ID NO: 627290 - DNA, 15 bp, Homo sapiens
tgcagcctcaacctc

SEQ ID NO: 627291 - DNA, 15 bp, Homo sapiens
gcagcctcaacctcc

SEQ ID NO: 627292 - DNA, 15 bp, Homo sapiens
cagcctcaacctcct

SEQ ID NO: 627293 - DNA, 15 bp, Homo sapiens
agcctcaacctcctg

SEQ ID NO: 627294 - DNA, 15 bp, Homo sapiens
gcctcaacctcctgt

SEQ ID NO: 627295 - DNA, 15 bp, Homo sapiens
cctcaacctcctgtg

SEQ ID NO: 627296 - DNA, 15 bp, Homo sapiens
ctcaacctcctgtgc

SEQ ID NO: 627297 - DNA, 15 bp, Homo sapiens
tcaacctcctgtgct

SEQ ID NO: 627298 - DNA, 15 bp, Homo sapiens
caacctcctgtgctc

SEQ ID NO: 627299 - DNA, 15 bp, Homo sapiens
aacctcctgtgctca

SEQ ID NO: 627300 - DNA, 15 bp, Homo sapiens
acctcctgtgctcaa

SEQ ID NO: 627301 - DNA, 15 bp, Homo sapiens
cctcctgtgctcaag

SEQ ID NO: 627302 - DNA, 15 bp, Homo sapiens
ctcctgtgctcaagc

SEQ ID NO: 627303 - DNA, 15 bp, Homo sapiens
tcctgtgctcaagca

SEQ ID NO: 627304 - DNA, 15 bp, Homo sapiens
cctgtgctcaagcaa

SEQ ID NO: 627305 - DNA, 15 bp, Homo sapiens
ctgtgctcaagcaat

SEQ ID NO: 627306 - DNA, 15 bp, Homo sapiens
tgtgctcaagcaatc

SEQ ID NO: 627307 - DNA, 15 bp, Homo sapiens
gtgctcaagcaatcc

SEQ ID NO: 627308 - DNA, 15 bp, Homo sapiens
tgctcaagcaatcct

SEQ ID NO: 627309 - DNA, 15 bp, Homo sapiens
gctcaagcaatcctc

SEQ ID NO: 627310 - DNA, 15 bp, Homo sapiens
ctcaagcaatcctcc

SEQ ID NO: 627311 - DNA, 15 bp, Homo sapiens
tcaagcaatcctccc

SEQ ID NO: 627312 - DNA, 15 bp, Homo sapiens
caagcaatcctccca

SEQ ID NO: 627313 - DNA, 15 bp, Homo sapiens
aagcaatcctcccac

SEQ ID NO: 627314 - DNA, 15 bp, Homo sapiens
agcaatcctcccacc

SEQ ID NO: 627315 - DNA, 15 bp, Homo sapiens
gcaatcctcccacct

SEQ ID NO: 627316 - DNA, 15 bp, Homo sapiens
caatcctcccacctc

SEQ ID NO: 627317 - DNA, 15 bp, Homo sapiens
aatcctcccacctca

SEQ ID NO: 627318 - DNA, 15 bp, Homo sapiens
atcctcccacctcag

SEQ ID NO: 627319 - DNA, 15 bp, Homo sapiens
tcctcccacctcagc

SEQ ID NO: 627320 - DNA, 15 bp, Homo sapiens
cctcccacctcagcg

SEQ ID NO: 627321 - DNA, 15 bp, Homo sapiens
ctcccacctcagcgt

SEQ ID NO: 627322 - DNA, 15 bp, Homo sapiens
tcccacctcagcgtc

SEQ ID NO: 627323 - DNA, 15 bp, Homo sapiens
cccacctcagcgtcc

SEQ ID NO: 627324 - DNA, 15 bp, Homo sapiens
ccacctcagcgtccc

SEQ ID NO: 627325 - DNA, 15 bp, Homo sapiens
cacctcagcgtccca

SEQ ID NO: 627326 - DNA, 15 bp, Homo sapiens
acctcagcgtcccaa

SEQ ID NO: 627327 - DNA, 15 bp, Homo sapiens
cctcagcgtcccaag

SEQ ID NO: 627328 - DNA, 15 bp, Homo sapiens
ctcagcgtcccaagt

SEQ ID NO: 627329 - DNA, 15 bp, Homo sapiens
tcagcgtcccaagta

SEQ ID NO: 627330 - DNA, 15 bp, Homo sapiens
cagcgtcccaagtag

SEQ ID NO: 627331 - DNA, 15 bp, Homo sapiens
agcgtcccaagtagc

SEQ ID NO: 627332 - DNA, 15 bp, Homo sapiens
gcgtcccaagtagct

SEQ ID NO: 627333 - DNA, 15 bp, Homo sapiens
cgtcccaagtagctg

SEQ ID NO: 627334 - DNA, 15 bp, Homo sapiens
gtcccaagtagctgg

SEQ ID NO: 627335 - DNA, 15 bp, Homo sapiens
caagtagctgggaca

SEQ ID NO: 627336 - DNA, 15 bp, Homo sapiens
aagtagctgggacag

SEQ ID NO: 627337 - DNA, 15 bp, Homo sapiens
agtagctgggacagc

SEQ ID NO: 627338 - DNA, 15 bp, Homo sapiens
gtagctgggacagca

SEQ ID NO: 627339 - DNA, 15 bp, Homo sapiens
tagctgggacagcag

SEQ ID NO: 627340 - DNA, 15 bp, Homo sapiens
agctgggacagcagg

SEQ ID NO: 627341 - DNA, 15 bp, Homo sapiens
gctgggacagcaggc

SEQ ID NO: 627342 - DNA, 15 bp, Homo sapiens
ctgggacagcaggca

SEQ ID NO: 627343 - DNA, 15 bp, Homo sapiens
tgggacagcaggcac

SEQ ID NO: 627344 - DNA, 15 bp, Homo sapiens
gggacagcaggcaca

SEQ ID NO: 627345 - DNA, 15 bp, Homo sapiens
ggacagcaggcacat

SEQ ID NO: 627346 - DNA, 15 bp, Homo sapiens
gacagcaggcacatg

SEQ ID NO: 627347 - DNA, 15 bp, Homo sapiens
acagcaggcacatgc

SEQ ID NO: 627348 - DNA, 15 bp, Homo sapiens
cagcaggcacatgcc

SEQ ID NO: 627349 - DNA, 15 bp, Homo sapiens
agcaggcacatgcca

SEQ ID NO: 627350 - DNA, 15 bp, Homo sapiens
gcaggcacatgccac

SEQ ID NO: 627351 - DNA, 15 bp, Homo sapiens
caggcacatgccacg

SEQ ID NO: 627352 - DNA, 15 bp, Homo sapiens
aggcacatgccacgg

SEQ ID NO: 627353 - DNA, 15 bp, Homo sapiens
ggcacatgccacggg

SEQ ID NO: 627354 - DNA, 15 bp, Homo sapiens
gcacatgccacgggt

SEQ ID NO: 627355 - DNA, 15 bp, Homo sapiens
cacatgccacgggtt

SEQ ID NO: 627356 - DNA, 15 bp, Homo sapiens
acatgccacgggttg

SEQ ID NO: 627357 - DNA, 15 bp, Homo sapiens
catgccacgggttgg

SEQ ID NO: 627358 - DNA, 15 bp, Homo sapiens
atgccacgggttggg

SEQ ID NO: 627359 - DNA, 15 bp, Homo sapiens
tgccacgggttgggg

SEQ ID NO: 627360 - DNA, 15 bp, Homo sapiens
gccacgggttggggg

SEQ ID NO: 627361 - DNA, 15 bp, Homo sapiens
ccacgggttggggga

SEQ ID NO: 627362 - DNA, 15 bp, Homo sapiens
cacgggttgggggac

SEQ ID NO: 627363 - DNA, 15 bp, Homo sapiens
acgggttgggggacc

SEQ ID NO: 627364 - DNA, 15 bp, Homo sapiens
cgggttgggggacca

SEQ ID NO: 627365 - DNA, 15 bp, Homo sapiens
gggttgggggaccac

SEQ ID NO: 627366 - DNA, 15 bp, Homo sapiens
ggttgggggaccaca

SEQ ID NO: 627367 - DNA, 15 bp, Homo sapiens
gttgggggaccacag

SEQ ID NO: 627368 - DNA, 15 bp, Homo sapiens
ttgggggaccacagg

SEQ ID NO: 627369 - DNA, 15 bp, Homo sapiens
tgggggaccacaggc

SEQ ID NO: 627370 - DNA, 15 bp, Homo sapiens
gggggaccacaggca

SEQ ID NO: 627371 - DNA, 15 bp, Homo sapiens
ggggaccacaggcat

SEQ ID NO: 627372 - DNA, 15 bp, Homo sapiens
gggaccacaggcatg

SEQ ID NO: 627373 - DNA, 15 bp, Homo sapiens
ggaccacaggcatgg

SEQ ID NO: 627374 - DNA, 15 bp, Homo sapiens
gaccacaggcatggt

SEQ ID NO: 627375 - DNA, 15 bp, Homo sapiens
accacaggcatggtc

SEQ ID NO: 627376 - DNA, 15 bp, Homo sapiens
ccacaggcatggtca

SEQ ID NO: 627377 - DNA, 15 bp, Homo sapiens
cacaggcatggtcaa

SEQ ID NO: 627378 - DNA, 15 bp, Homo sapiens
acaggcatggtcaag

SEQ ID NO: 627379 - DNA, 15 bp, Homo sapiens
caggcatggtcaagg

SEQ ID NO: 627380 - DNA, 15 bp, Homo sapiens
aggcatggtcaaggg

SEQ ID NO: 627381 - DNA, 15 bp, Homo sapiens
ggcatggtcaagggg

SEQ ID NO: 627382 - DNA, 15 bp, Homo sapiens
gcatggtcaaggggc

SEQ ID NO: 627383 - DNA, 15 bp, Homo sapiens
catggtcaaggggct

SEQ ID NO: 627384 - DNA, 15 bp, Homo sapiens
atggtcaaggggctg

SEQ ID NO: 627385 - DNA, 15 bp, Homo sapiens
tggtcaaggggctgg

SEQ ID NO: 627386 - DNA, 15 bp, Homo sapiens
ggtcaaggggctggc

SEQ ID NO: 627387 - DNA, 15 bp, Homo sapiens
gtcaaggggctggca

SEQ ID NO: 627388 - DNA, 15 bp, Homo sapiens
tcaaggggctggcag

SEQ ID NO: 627389 - DNA, 15 bp, Homo sapiens
caaggggctggcagt

SEQ ID NO: 627390 - DNA, 15 bp, Homo sapiens
aaggggctggcagtc

SEQ ID NO: 627391 - DNA, 15 bp, Homo sapiens
aggggctggcagtca

SEQ ID NO: 627392 - DNA, 15 bp, Homo sapiens
ggggctggcagtcaa

SEQ ID NO: 627393 - DNA, 15 bp, Homo sapiens
gggctggcagtcaag

SEQ ID NO: 627394 - DNA, 15 bp, Homo sapiens
ggctggcagtcaagc

SEQ ID NO: 627395 - DNA, 15 bp, Homo sapiens
gctggcagtcaagca

SEQ ID NO: 627396 - DNA, 15 bp, Homo sapiens
ctggcagtcaagcaa

SEQ ID NO: 627397 - DNA, 15 bp, Homo sapiens
tggcagtcaagcaag

SEQ ID NO: 627398 - DNA, 15 bp, Homo sapiens
ggcagtcaagcaagt

SEQ ID NO: 627399 - DNA, 15 bp, Homo sapiens
gcagtcaagcaagtg

SEQ ID NO: 627400 - DNA, 15 bp, Homo sapiens
cagtcaagcaagtgt

SEQ ID NO: 627401 - DNA, 15 bp, Homo sapiens
agtcaagcaagtgtt

SEQ ID NO: 627402 - DNA, 15 bp, Homo sapiens
gtcaagcaagtgttt

SEQ ID NO: 627403 - DNA, 15 bp, Homo sapiens
tcaagcaagtgtttc

SEQ ID NO: 627404 - DNA, 15 bp, Homo sapiens
caagcaagtgtttca

SEQ ID NO: 627405 - DNA, 15 bp, Homo sapiens
aagcaagtgtttcat

SEQ ID NO: 627406 - DNA, 15 bp, Homo sapiens
agcaagtgtttcatg

SEQ ID NO: 627407 - DNA, 15 bp, Homo sapiens
gcaagtgtttcatga

SEQ ID NO: 627408 - DNA, 15 bp, Homo sapiens
caagtgtttcatgag

SEQ ID NO: 627409 - DNA, 15 bp, Homo sapiens
aagtgtttcatgaga

SEQ ID NO: 627410 - DNA, 15 bp, Homo sapiens
agtgtttcatgagaa

SEQ ID NO: 627411 - DNA, 15 bp, Homo sapiens
gtgtttcatgagaaa

SEQ ID NO: 627412 - DNA, 15 bp, Homo sapiens
tgtttcatgagaaag

SEQ ID NO: 627413 - DNA, 15 bp, Homo sapiens
gtttcatgagaaagt

SEQ ID NO: 627414 - DNA, 15 bp, Homo sapiens
tttcatgagaaagtg

SEQ ID NO: 627415 - DNA, 15 bp, Homo sapiens
ttcatgagaaagtga

SEQ ID NO: 627416 - DNA, 15 bp, Homo sapiens
tcatgagaaagtgac

SEQ ID NO: 627417 - DNA, 15 bp, Homo sapiens
catgagaaagtgaca

SEQ ID NO: 627418 - DNA, 15 bp, Homo sapiens
atgagaaagtgacag

SEQ ID NO: 627419 - DNA, 15 bp, Homo sapiens
tgagaaagtgacagt

SEQ ID NO: 627420 - DNA, 15 bp, Homo sapiens
gagaaagtgacagtt

SEQ ID NO: 627421 - DNA, 15 bp, Homo sapiens
agaaagtgacagttg

SEQ ID NO: 627422 - DNA, 15 bp, Homo sapiens
gaaagtgacagttga

SEQ ID NO: 627423 - DNA, 15 bp, Homo sapiens
aaagtgacagttgac

SEQ ID NO: 627424 - DNA, 15 bp, Homo sapiens
aagtgacagttgacc

SEQ ID NO: 627425 - DNA, 15 bp, Homo sapiens
agtgacagttgacct

SEQ ID NO: 627426 - DNA, 15 bp, Homo sapiens
gtgacagttgacctt

SEQ ID NO: 627427 - DNA, 15 bp, Homo sapiens
tgacagttgaccttc

SEQ ID NO: 627428 - DNA, 15 bp, Homo sapiens
gacagttgaccttcg

SEQ ID NO: 627429 - DNA, 15 bp, Homo sapiens
acagttgaccttcgt

SEQ ID NO: 627430 - DNA, 15 bp, Homo sapiens
cagttgaccttcgtc

SEQ ID NO: 627431 - DNA, 15 bp, Homo sapiens
agttgaccttcgtct

SEQ ID NO: 627432 - DNA, 15 bp, Homo sapiens
gttgaccttcgtctt

SEQ ID NO: 627433 - DNA, 15 bp, Homo sapiens
ttgaccttcgtcttg

SEQ ID NO: 627434 - DNA, 15 bp, Homo sapiens
tgaccttcgtcttgg

SEQ ID NO: 627435 - DNA, 15 bp, Homo sapiens
gaccttcgtcttgga

SEQ ID NO: 627436 - DNA, 15 bp, Homo sapiens
accttcgtcttggag

SEQ ID NO: 627437 - DNA, 15 bp, Homo sapiens
ccttcgtcttggagg

SEQ ID NO: 627438 - DNA, 15 bp, Homo sapiens
cttcgtcttggaggg

SEQ ID NO: 627439 - DNA, 15 bp, Homo sapiens
ttcgtcttggagggt

SEQ ID NO: 627440 - DNA, 15 bp, Homo sapiens
tcgtcttggagggtg

SEQ ID NO: 627441 - DNA, 15 bp, Homo sapiens
cgtcttggagggtga

SEQ ID NO: 627442 - DNA, 15 bp, Homo sapiens
gtcttggagggtgag

SEQ ID NO: 627443 - DNA, 15 bp, Homo sapiens
tcttggagggtgaga

SEQ ID NO: 627444 - DNA, 15 bp, Homo sapiens
cttggagggtgagag

SEQ ID NO: 627445 - DNA, 15 bp, Homo sapiens
ttggagggtgagaga

SEQ ID NO: 627446 - DNA, 15 bp, Homo sapiens
tggagggtgagagat

SEQ ID NO: 627447 - DNA, 15 bp, Homo sapiens
ggagggtgagagatg

SEQ ID NO: 627448 - DNA, 15 bp, Homo sapiens
gagggtgagagatgg

SEQ ID NO: 627449 - DNA, 15 bp, Homo sapiens
agggtgagagatgga

SEQ ID NO: 627450 - DNA, 15 bp, Homo sapiens
gggtgagagatggag

SEQ ID NO: 627451 - DNA, 15 bp, Homo sapiens
ggtgagagatggagg

SEQ ID NO: 627452 - DNA, 15 bp, Homo sapiens
gtgagagatggaggc

SEQ ID NO: 627453 - DNA, 15 bp, Homo sapiens
tgagagatggaggca

SEQ ID NO: 627454 - DNA, 15 bp, Homo sapiens
gagagatggaggcag

SEQ ID NO: 627455 - DNA, 15 bp, Homo sapiens
agagatggaggcagc

SEQ ID NO: 627456 - DNA, 15 bp, Homo sapiens
gagatggaggcagca

SEQ ID NO: 627457 - DNA, 15 bp, Homo sapiens
agatggaggcagcaa

SEQ ID NO: 627458 - DNA, 15 bp, Homo sapiens
gatggaggcagcaaa

SEQ ID NO: 627459 - DNA, 15 bp, Homo sapiens
atggaggcagcaaag

SEQ ID NO: 627460 - DNA, 15 bp, Homo sapiens
tggaggcagcaaaga

SEQ ID NO: 627461 - DNA, 15 bp, Homo sapiens
ggaggcagcaaagac

SEQ ID NO: 627462 - DNA, 15 bp, Homo sapiens
gaggcagcaaagacc

SEQ ID NO: 627463 - DNA, 15 bp, Homo sapiens
aggcagcaaagacct

SEQ ID NO: 627464 - DNA, 15 bp, Homo sapiens
ggcagcaaagaccta

SEQ ID NO: 627465 - DNA, 15 bp, Homo sapiens
gcagcaaagacctaa

SEQ ID NO: 627466 - DNA, 15 bp, Homo sapiens
cagcaaagacctaag

SEQ ID NO: 627467 - DNA, 15 bp, Homo sapiens
agcaaagacctaagg

SEQ ID NO: 627468 - DNA, 15 bp, Homo sapiens
gcaaagacctaagga

SEQ ID NO: 627469 - DNA, 15 bp, Homo sapiens
caaagacctaaggag

SEQ ID NO: 627470 - DNA, 15 bp, Homo sapiens
aaagacctaaggaga

SEQ ID NO: 627471 - DNA, 15 bp, Homo sapiens
aagacctaaggagag

SEQ ID NO: 627472 - DNA, 15 bp, Homo sapiens
agacctaaggagagg

SEQ ID NO: 627473 - DNA, 15 bp, Homo sapiens
gacctaaggagagga

SEQ ID NO: 627474 - DNA, 15 bp, Homo sapiens
acctaaggagaggac

SEQ ID NO: 627475 - DNA, 15 bp, Homo sapiens
cctaaggagaggaca

SEQ ID NO: 627476 - DNA, 15 bp, Homo sapiens
ctaaggagaggacaa

SEQ ID NO: 627477 - DNA, 15 bp, Homo sapiens
taaggagaggacaag

SEQ ID NO: 627478 - DNA, 15 bp, Homo sapiens
aaggagaggacaagc

SEQ ID NO: 627479 - DNA, 15 bp, Homo sapiens
aggagaggacaagcc

SEQ ID NO: 627480 - DNA, 15 bp, Homo sapiens
ggagaggacaagcca

SEQ ID NO: 627481 - DNA, 15 bp, Homo sapiens
gagaggacaagccag

SEQ ID NO: 627482 - DNA, 15 bp, Homo sapiens
agaggacaagccagc

SEQ ID NO: 627483 - DNA, 15 bp, Homo sapiens
gaggacaagccagca

SEQ ID NO: 627484 - DNA, 15 bp, Homo sapiens
aggacaagccagcat

SEQ ID NO: 627485 - DNA, 15 bp, Homo sapiens
ggacaagccagcata

SEQ ID NO: 627486 - DNA, 15 bp, Homo sapiens
gacaagccagcatag

SEQ ID NO: 627487 - DNA, 15 bp, Homo sapiens
acaagccagcatagc

SEQ ID NO: 627488 - DNA, 15 bp, Homo sapiens
caagccagcatagcc

SEQ ID NO: 627489 - DNA, 15 bp, Homo sapiens
aagccagcatagccc

SEQ ID NO: 627490 - DNA, 15 bp, Homo sapiens
agccagcatagccca

SEQ ID NO: 627491 - DNA, 15 bp, Homo sapiens
gccagcatagcccag

SEQ ID NO: 627492 - DNA, 15 bp, Homo sapiens
ccagcatagcccagg

SEQ ID NO: 627493 - DNA, 15 bp, Homo sapiens
cagcatagcccaggg

SEQ ID NO: 627494 - DNA, 15 bp, Homo sapiens
agcatagcccagggt

SEQ ID NO: 627495 - DNA, 15 bp, Homo sapiens
gcatagcccagggtc

SEQ ID NO: 627496 - DNA, 15 bp, Homo sapiens
catagcccagggtca

SEQ ID NO: 627497 - DNA, 15 bp, Homo sapiens
atagcccagggtcag

SEQ ID NO: 627498 - DNA, 15 bp, Homo sapiens
tagcccagggtcagg

SEQ ID NO: 627499 - DNA, 15 bp, Homo sapiens
agcccagggtcaggc

SEQ ID NO: 627500 - DNA, 15 bp, Homo sapiens
gcccagggtcaggct

SEQ ID NO: 627501 - DNA, 15 bp, Homo sapiens
cccagggtcaggctg

SEQ ID NO: 627502 - DNA, 15 bp, Homo sapiens
ccagggtcaggctga

SEQ ID NO: 627503 - DNA, 15 bp, Homo sapiens
cagggtcaggctgaa

SEQ ID NO: 627504 - DNA, 15 bp, Homo sapiens
agggtcaggctgaac

SEQ ID NO: 627505 - DNA, 15 bp, Homo sapiens
gggtcaggctgaaca

SEQ ID NO: 627506 - DNA, 15 bp, Homo sapiens
ggtcaggctgaacaa

SEQ ID NO: 627507 - DNA, 15 bp, Homo sapiens
gtcaggctgaacaag

SEQ ID NO: 627508 - DNA, 15 bp, Homo sapiens
tcaggctgaacaaga

SEQ ID NO: 627509 - DNA, 15 bp, Homo sapiens
caggctgaacaagag

SEQ ID NO: 627510 - DNA, 15 bp, Homo sapiens
aggctgaacaagagg

SEQ ID NO: 627511 - DNA, 15 bp, Homo sapiens
ggctgaacaagagga

SEQ ID NO: 627512 - DNA, 15 bp, Homo sapiens
gctgaacaagaggag

SEQ ID NO: 627513 - DNA, 15 bp, Homo sapiens
ctgaacaagaggaga

SEQ ID NO: 627514 - DNA, 15 bp, Homo sapiens
tgaacaagaggagat

SEQ ID NO: 627515 - DNA, 15 bp, Homo sapiens
gaacaagaggagatg

SEQ ID NO: 627516 - DNA, 15 bp, Homo sapiens
aacaagaggagatgg

SEQ ID NO: 627517 - DNA, 15 bp, Homo sapiens
acaagaggagatggt

SEQ ID NO: 627518 - DNA, 15 bp, Homo sapiens
caagaggagatggtg

SEQ ID NO: 627519 - DNA, 15 bp, Homo sapiens
aagaggagatggtgg

SEQ ID NO: 627520 - DNA, 15 bp, Homo sapiens
agaggagatggtggg

SEQ ID NO: 627521 - DNA, 15 bp, Homo sapiens
gaggagatggtggga

SEQ ID NO: 627522 - DNA, 15 bp, Homo sapiens
aggagatggtgggac

SEQ ID NO: 627523 - DNA, 15 bp, Homo sapiens
ggagatggtgggact

SEQ ID NO: 627524 - DNA, 15 bp, Homo sapiens
gagatggtgggactt

SEQ ID NO: 627525 - DNA, 15 bp, Homo sapiens
agatggtgggacttg

SEQ ID NO: 627526 - DNA, 15 bp, Homo sapiens
gatggtgggacttgg

SEQ ID NO: 627527 - DNA, 15 bp, Homo sapiens
atggtgggacttggg

SEQ ID NO: 627528 - DNA, 15 bp, Homo sapiens
tggtgggacttgggg

SEQ ID NO: 627529 - DNA, 15 bp, Homo sapiens
ggtgggacttgggga

SEQ ID NO: 627530 - DNA, 15 bp, Homo sapiens
gtgggacttggggat

SEQ ID NO: 627531 - DNA, 15 bp, Homo sapiens
tgggacttggggata

SEQ ID NO: 627532 - DNA, 15 bp, Homo sapiens
gggacttggggataa

SEQ ID NO: 627533 - DNA, 15 bp, Homo sapiens
ggacttggggataag

SEQ ID NO: 627534 - DNA, 15 bp, Homo sapiens
gacttggggataagg

SEQ ID NO: 627535 - DNA, 15 bp, Homo sapiens
acttggggataaggc

SEQ ID NO: 627536 - DNA, 15 bp, Homo sapiens
cttggggataaggct

SEQ ID NO: 627537 - DNA, 15 bp, Homo sapiens
ttggggataaggctg

SEQ ID NO: 627538 - DNA, 15 bp, Homo sapiens
tggggataaggctga

SEQ ID NO: 627539 - DNA, 15 bp, Homo sapiens
ggggataaggctgag

SEQ ID NO: 627540 - DNA, 15 bp, Homo sapiens
gggataaggctgagg

SEQ ID NO: 627541 - DNA, 15 bp, Homo sapiens
ggataaggctgaggg

SEQ ID NO: 627542 - DNA, 15 bp, Homo sapiens
gataaggctgagggg

SEQ ID NO: 627543 - DNA, 15 bp, Homo sapiens
ataaggctgaggggt

SEQ ID NO: 627544 - DNA, 15 bp, Homo sapiens
taaggctgaggggtg

SEQ ID NO: 627545 - DNA, 15 bp, Homo sapiens
aaggctgaggggtgg

SEQ ID NO: 627546 - DNA, 15 bp, Homo sapiens
aggctgaggggtggg

SEQ ID NO: 627547 - DNA, 15 bp, Homo sapiens
ggctgaggggtgggc

SEQ ID NO: 627548 - DNA, 15 bp, Homo sapiens
gctgaggggtgggca

SEQ ID NO: 627549 - DNA, 15 bp, Homo sapiens
ctgaggggtgggcag

SEQ ID NO: 627550 - DNA, 15 bp, Homo sapiens
tgaggggtgggcagt

SEQ ID NO: 627551 - DNA, 15 bp, Homo sapiens
gaggggtgggcagtc

SEQ ID NO: 627552 - DNA, 15 bp, Homo sapiens
aggggtgggcagtcc

SEQ ID NO: 627553 - DNA, 15 bp, Homo sapiens
ggggtgggcagtccc

SEQ ID NO: 627554 - DNA, 15 bp, Homo sapiens
gggtgggcagtccct

SEQ ID NO: 627555 - DNA, 15 bp, Homo sapiens
ggtgggcagtcccta

SEQ ID NO: 627556 - DNA, 15 bp, Homo sapiens
gtgggcagtccctaa

SEQ ID NO: 627557 - DNA, 15 bp, Homo sapiens
tgggcagtccctaag

SEQ ID NO: 627558 - DNA, 15 bp, Homo sapiens
gggcagtccctaagt

SEQ ID NO: 627559 - DNA, 15 bp, Homo sapiens
ggcagtccctaagtc

SEQ ID NO: 627560 - DNA, 15 bp, Homo sapiens
gcagtccctaagtct

SEQ ID NO: 627561 - DNA, 15 bp, Homo sapiens
cagtccctaagtctt

SEQ ID NO: 627562 - DNA, 15 bp, Homo sapiens
agtccctaagtcttg

SEQ ID NO: 627563 - DNA, 15 bp, Homo sapiens
gtccctaagtcttgt

SEQ ID NO: 627564 - DNA, 15 bp, Homo sapiens
tccctaagtcttgtg

SEQ ID NO: 627565 - DNA, 15 bp, Homo sapiens
ccctaagtcttgtgg

SEQ ID NO: 627566 - DNA, 15 bp, Homo sapiens
cctaagtcttgtggg

SEQ ID NO: 627567 - DNA, 15 bp, Homo sapiens
ctaagtcttgtgggc

SEQ ID NO: 627568 - DNA, 15 bp, Homo sapiens
taagtcttgtgggca

SEQ ID NO: 627569 - DNA, 15 bp, Homo sapiens
aagtcttgtgggcaa

SEQ ID NO: 627570 - DNA, 15 bp, Homo sapiens
agtcttgtgggcaac

SEQ ID NO: 627571 - DNA, 15 bp, Homo sapiens
gtcttgtgggcaacc

SEQ ID NO: 627572 - DNA, 15 bp, Homo sapiens
tcttgtgggcaacca

SEQ ID NO: 627573 - DNA, 15 bp, Homo sapiens
cttgtgggcaaccat

SEQ ID NO: 627574 - DNA, 15 bp, Homo sapiens
ttgtgggcaaccatg

SEQ ID NO: 627575 - DNA, 15 bp, Homo sapiens
tgtgggcaaccatgc

SEQ ID NO: 627576 - DNA, 15 bp, Homo sapiens
gtgggcaaccatgca

SEQ ID NO: 627577 - DNA, 15 bp, Homo sapiens
tgggcaaccatgcag

SEQ ID NO: 627578 - DNA, 15 bp, Homo sapiens
gggcaaccatgcaga

SEQ ID NO: 627579 - DNA, 15 bp, Homo sapiens
ggcaaccatgcagac

SEQ ID NO: 627580 - DNA, 15 bp, Homo sapiens
gcaaccatgcagaca

SEQ ID NO: 627581 - DNA, 15 bp, Homo sapiens
caaccatgcagacac

SEQ ID NO: 627582 - DNA, 15 bp, Homo sapiens
aaccatgcagacact

SEQ ID NO: 627583 - DNA, 15 bp, Homo sapiens
accatgcagacactg

SEQ ID NO: 627584 - DNA, 15 bp, Homo sapiens
ccatgcagacactga

SEQ ID NO: 627585 - DNA, 15 bp, Homo sapiens
catgcagacactgat

SEQ ID NO: 627586 - DNA, 15 bp, Homo sapiens
atgcagacactgatt

SEQ ID NO: 627587 - DNA, 15 bp, Homo sapiens
tgcagacactgattt

SEQ ID NO: 627588 - DNA, 15 bp, Homo sapiens
gcagacactgatttt

SEQ ID NO: 627589 - DNA, 15 bp, Homo sapiens
cagacactgattttt

SEQ ID NO: 627590 - DNA, 15 bp, Homo sapiens
agacactgatttttc

SEQ ID NO: 627591 - DNA, 15 bp, Homo sapiens
gacactgatttttcc

SEQ ID NO: 627592 - DNA, 15 bp, Homo sapiens
acactgatttttcct

SEQ ID NO: 627593 - DNA, 15 bp, Homo sapiens
cactgatttttcctt

SEQ ID NO: 627594 - DNA, 15 bp, Homo sapiens
actgatttttccttg

SEQ ID NO: 627595 - DNA, 15 bp, Homo sapiens
ctgatttttccttgg

SEQ ID NO: 627596 - DNA, 15 bp, Homo sapiens
tgatttttccttgga

SEQ ID NO: 627597 - DNA, 15 bp, Homo sapiens
gatttttccttggaa

SEQ ID NO: 627598 - DNA, 15 bp, Homo sapiens
atttttccttggaat

SEQ ID NO: 627599 - DNA, 15 bp, Homo sapiens
tttttccttggaata

SEQ ID NO: 627600 - DNA, 15 bp, Homo sapiens
ttttccttggaataa

SEQ ID NO: 627601 - DNA, 15 bp, Homo sapiens
tttccttggaataaa

SEQ ID NO: 627602 - DNA, 15 bp, Homo sapiens
ttccttggaataaag

SEQ ID NO: 627603 - DNA, 15 bp, Homo sapiens
tccttggaataaaga

SEQ ID NO: 627604 - DNA, 15 bp, Homo sapiens
ccttggaataaagag

SEQ ID NO: 627605 - DNA, 15 bp, Homo sapiens
cttggaataaagagg

SEQ ID NO: 627606 - DNA, 15 bp, Homo sapiens
ttggaataaagagga

SEQ ID NO: 627607 - DNA, 15 bp, Homo sapiens
tggaataaagaggaa

SEQ ID NO: 627608 - DNA, 15 bp, Homo sapiens
ggaataaagaggaag

SEQ ID NO: 627609 - DNA, 15 bp, Homo sapiens
gaataaagaggaagc

SEQ ID NO: 627610 - DNA, 15 bp, Homo sapiens
aataaagaggaagcc

SEQ ID NO: 627611 - DNA, 15 bp, Homo sapiens
ataaagaggaagccc

SEQ ID NO: 627612 - DNA, 15 bp, Homo sapiens
taaagaggaagcccc

SEQ ID NO: 627613 - DNA, 15 bp, Homo sapiens
aaagaggaagccccc

SEQ ID NO: 627614 - DNA, 15 bp, Homo sapiens
aagaggaagccccca

SEQ ID NO: 627615 - DNA, 15 bp, Homo sapiens
agaggaagcccccat

SEQ ID NO: 627616 - DNA, 15 bp, Homo sapiens
gaggaagcccccata

SEQ ID NO: 627617 - DNA, 15 bp, Homo sapiens
aggaagcccccataa

SEQ ID NO: 627618 - DNA, 15 bp, Homo sapiens
ggaagcccccataag

SEQ ID NO: 627619 - DNA, 15 bp, Homo sapiens
gaagcccccataagc

SEQ ID NO: 627620 - DNA, 15 bp, Homo sapiens
aagcccccataagct

SEQ ID NO: 627621 - DNA, 15 bp, Homo sapiens
agcccccataagctt

SEQ ID NO: 627622 - DNA, 15 bp, Homo sapiens
gcccccataagcttt

SEQ ID NO: 627623 - DNA, 15 bp, Homo sapiens
cccccataagctttt

SEQ ID NO: 627624 - DNA, 15 bp, Homo sapiens
ccccataagcttttt

SEQ ID NO: 627625 - DNA, 15 bp, Homo sapiens
cccataagctttttt

SEQ ID NO: 627626 - DNA, 15 bp, Homo sapiens
ccataagcttttttt

SEQ ID NO: 627627 - DNA, 15 bp, Homo sapiens
cataagctttttttt

SEQ ID NO: 627628 - DNA, 15 bp, Homo sapiens
ataagcttttttttt

SEQ ID NO: 627629 - DNA, 15 bp, Homo sapiens
taagctttttttttt

SEQ ID NO: 627630 - DNA, 15 bp, Homo sapiens
aagcttttttttttt

SEQ ID NO: 627631 - DNA, 15 bp, Homo sapiens
agctttttttttttt

SEQ ID NO: 627632 - DNA, 15 bp, Homo sapiens
gcttttttttttttt

SEQ ID NO: 627633 - DNA, 15 bp, Homo sapiens
tttttttttttttct

SEQ ID NO: 627634 - DNA, 15 bp, Homo sapiens
ttttttttttttctg

SEQ ID NO: 627635 - DNA, 15 bp, Homo sapiens
tttttttttttctga

SEQ ID NO: 627636 - DNA, 15 bp, Homo sapiens
ttttttttttctgag

SEQ ID NO: 627637 - DNA, 15 bp, Homo sapiens
tttttttttctgaga

SEQ ID NO: 627638 - DNA, 15 bp, Homo sapiens
ttttttttctgagat

SEQ ID NO: 627639 - DNA, 15 bp, Homo sapiens
tttttttctgagata

SEQ ID NO: 627640 - DNA, 15 bp, Homo sapiens
ttttttctgagatag

SEQ ID NO: 627641 - DNA, 15 bp, Homo sapiens
tttttctgagatagg

SEQ ID NO: 627642 - DNA, 15 bp, Homo sapiens
ttttctgagataggg

SEQ ID NO: 627643 - DNA, 15 bp, Homo sapiens
tttctgagatagggt

SEQ ID NO: 627644 - DNA, 15 bp, Homo sapiens
ttctgagatagggtc

SEQ ID NO: 627645 - DNA, 15 bp, Homo sapiens
tctgagatagggtct

SEQ ID NO: 627646 - DNA, 15 bp, Homo sapiens
ctgagatagggtctc

SEQ ID NO: 627647 - DNA, 15 bp, Homo sapiens
tgagatagggtctcg

SEQ ID NO: 627648 - DNA, 15 bp, Homo sapiens
gagatagggtctcgc

SEQ ID NO: 627649 - DNA, 15 bp, Homo sapiens
agatagggtctcgct

SEQ ID NO: 627650 - DNA, 15 bp, Homo sapiens
gatagggtctcgctc

SEQ ID NO: 627651 - DNA, 15 bp, Homo sapiens
atagggtctcgctct

SEQ ID NO: 627652 - DNA, 15 bp, Homo sapiens
tagggtctcgctctg

SEQ ID NO: 627653 - DNA, 15 bp, Homo sapiens
agggtctcgctctgt

SEQ ID NO: 627654 - DNA, 15 bp, Homo sapiens
gggtctcgctctgtc

SEQ ID NO: 627655 - DNA, 15 bp, Homo sapiens
ggtctcgctctgtcg

SEQ ID NO: 627656 - DNA, 15 bp, Homo sapiens
gtctcgctctgtcgt

SEQ ID NO: 627657 - DNA, 15 bp, Homo sapiens
tctcgctctgtcgtt

SEQ ID NO: 627658 - DNA, 15 bp, Homo sapiens
ctcgctctgtcgttc

SEQ ID NO: 627659 - DNA, 15 bp, Homo sapiens
tcgctctgtcgttca

SEQ ID NO: 627660 - DNA, 15 bp, Homo sapiens
cgctctgtcgttcag

SEQ ID NO: 627661 - DNA, 15 bp, Homo sapiens
gctctgtcgttcagg

SEQ ID NO: 627662 - DNA, 15 bp, Homo sapiens
ctctgtcgttcaggc

SEQ ID NO: 627663 - DNA, 15 bp, Homo sapiens
tctgtcgttcaggct

SEQ ID NO: 627664 - DNA, 15 bp, Homo sapiens
ctgtcgttcaggctg

SEQ ID NO: 627665 - DNA, 15 bp, Homo sapiens
tgtcgttcaggctgg

SEQ ID NO: 627666 - DNA, 15 bp, Homo sapiens
gtcgttcaggctggt

SEQ ID NO: 627667 - DNA, 15 bp, Homo sapiens
tcgttcaggctggtg

SEQ ID NO: 627668 - DNA, 15 bp, Homo sapiens
cgttcaggctggtgt

SEQ ID NO: 627669 - DNA, 15 bp, Homo sapiens
gttcaggctggtgtg

SEQ ID NO: 627670 - DNA, 15 bp, Homo sapiens
ttcaggctggtgtgc

SEQ ID NO: 627671 - DNA, 15 bp, Homo sapiens
tcaggctggtgtgca

SEQ ID NO: 627672 - DNA, 15 bp, Homo sapiens
caggctggtgtgcag

SEQ ID NO: 627673 - DNA, 15 bp, Homo sapiens
aggctggtgtgcagt

SEQ ID NO: 627674 - DNA, 15 bp, Homo sapiens
ggctggtgtgcagtg

SEQ ID NO: 627675 - DNA, 15 bp, Homo sapiens
gctggtgtgcagtgg

SEQ ID NO: 627676 - DNA, 15 bp, Homo sapiens
ctggtgtgcagtggc

SEQ ID NO: 627677 - DNA, 15 bp, Homo sapiens
tggtgtgcagtggca

SEQ ID NO: 627678 - DNA, 15 bp, Homo sapiens
ggtgtgcagtggcat

SEQ ID NO: 627679 - DNA, 15 bp, Homo sapiens
gtgtgcagtggcatc

SEQ ID NO: 627680 - DNA, 15 bp, Homo sapiens
tgtgcagtggcatca

SEQ ID NO: 627681 - DNA, 15 bp, Homo sapiens
gtgcagtggcatcat

SEQ ID NO: 627682 - DNA, 15 bp, Homo sapiens
tgcagtggcatcatc

SEQ ID NO: 627683 - DNA, 15 bp, Homo sapiens
gcagtggcatcatct

SEQ ID NO: 627684 - DNA, 15 bp, Homo sapiens
cagtggcatcatctg

SEQ ID NO: 627685 - DNA, 15 bp, Homo sapiens
agtggcatcatctgg

SEQ ID NO: 627686 - DNA, 15 bp, Homo sapiens
gtggcatcatctggg

SEQ ID NO: 627687 - DNA, 15 bp, Homo sapiens
tggcatcatctgggc

SEQ ID NO: 627688 - DNA, 15 bp, Homo sapiens
ggcatcatctgggct

SEQ ID NO: 627689 - DNA, 15 bp, Homo sapiens
gcatcatctgggctc

SEQ ID NO: 627690 - DNA, 15 bp, Homo sapiens
catcatctgggctca

SEQ ID NO: 627691 - DNA, 15 bp, Homo sapiens
atcatctgggctcac

SEQ ID NO: 627692 - DNA, 15 bp, Homo sapiens
tcatctgggctcact

SEQ ID NO: 627693 - DNA, 15 bp, Homo sapiens
catctgggctcactg

SEQ ID NO: 627694 - DNA, 15 bp, Homo sapiens
atctgggctcactgc

SEQ ID NO: 627695 - DNA, 15 bp, Homo sapiens
tctgggctcactgca

SEQ ID NO: 627696 - DNA, 15 bp, Homo sapiens
ctgggctcactgcaa

SEQ ID NO: 627697 - DNA, 15 bp, Homo sapiens
tgggctcactgcaac

SEQ ID NO: 627698 - DNA, 15 bp, Homo sapiens
gggctcactgcaacc

SEQ ID NO: 627699 - DNA, 15 bp, Homo sapiens
ggctcactgcaacct

SEQ ID NO: 627700 - DNA, 15 bp, Homo sapiens
ctcactgcaacctcc

SEQ ID NO: 627701 - DNA, 15 bp, Homo sapiens
tcactgcaacctccg

SEQ ID NO: 627702 - DNA, 15 bp, Homo sapiens
cactgcaacctccgc

SEQ ID NO: 627703 - DNA, 15 bp, Homo sapiens
actgcaacctccgcc

SEQ ID NO: 627704 - DNA, 15 bp, Homo sapiens
ctgcaacctccgcct

SEQ ID NO: 627705 - DNA, 15 bp, Homo sapiens
tgcaacctccgcctc

SEQ ID NO: 627706 - DNA, 15 bp, Homo sapiens
gcaacctccgcctcc

SEQ ID NO: 627707 - DNA, 15 bp, Homo sapiens
caacctccgcctccc

SEQ ID NO: 627708 - DNA, 15 bp, Homo sapiens
aacctccgcctcccg

SEQ ID NO: 627709 - DNA, 15 bp, Homo sapiens
acctccgcctcccgg

SEQ ID NO: 627710 - DNA, 15 bp, Homo sapiens
cctccgcctcccggg

SEQ ID NO: 627711 - DNA, 15 bp, Homo sapiens
ctccgcctcccgggt

SEQ ID NO: 627712 - DNA, 15 bp, Homo sapiens
tccgcctcccgggtt

SEQ ID NO: 627713 - DNA, 15 bp, Homo sapiens
ccgcctcccgggttc

SEQ ID NO: 627714 - DNA, 15 bp, Homo sapiens
cgcctcccgggttca

SEQ ID NO: 627715 - DNA, 15 bp, Homo sapiens
gcctcccgggttcaa

SEQ ID NO: 627716 - DNA, 15 bp, Homo sapiens
cctcccgggttcaag

SEQ ID NO: 627717 - DNA, 15 bp, Homo sapiens
ctcccgggttcaagc

SEQ ID NO: 627718 - DNA, 15 bp, Homo sapiens
tcccgggttcaagca

SEQ ID NO: 627719 - DNA, 15 bp, Homo sapiens
cccgggttcaagcaa

SEQ ID NO: 627720 - DNA, 15 bp, Homo sapiens
ccgggttcaagcaat

SEQ ID NO: 627721 - DNA, 15 bp, Homo sapiens
cgggttcaagcaatt

SEQ ID NO: 627722 - DNA, 15 bp, Homo sapiens
ttcaagcaattctcc

SEQ ID NO: 627723 - DNA, 15 bp, Homo sapiens
tcaagcaattctcct

SEQ ID NO: 627724 - DNA, 15 bp, Homo sapiens
caagcaattctcctg

SEQ ID NO: 627725 - DNA, 15 bp, Homo sapiens
aagcaattctcctgc

SEQ ID NO: 627726 - DNA, 15 bp, Homo sapiens
agcaattctcctgcc

SEQ ID NO: 627727 - DNA, 15 bp, Homo sapiens
gcaattctcctgcct

SEQ ID NO: 627728 - DNA, 15 bp, Homo sapiens
caattctcctgcctc

SEQ ID NO: 627729 - DNA, 15 bp, Homo sapiens
aattctcctgcctca

SEQ ID NO: 627730 - DNA, 15 bp, Homo sapiens
ttctcctgcctcagc

SEQ ID NO: 627731 - DNA, 15 bp, Homo sapiens
tctcctgcctcagct

SEQ ID NO: 627732 - DNA, 15 bp, Homo sapiens
ctcctgcctcagctt

SEQ ID NO: 627733 - DNA, 15 bp, Homo sapiens
tcctgcctcagcttc

SEQ ID NO: 627734 - DNA, 15 bp, Homo sapiens
cctgcctcagcttcc

SEQ ID NO: 627735 - DNA, 15 bp, Homo sapiens
ctgcctcagcttccc

SEQ ID NO: 627736 - DNA, 15 bp, Homo sapiens
tgcctcagcttcccg

SEQ ID NO: 627737 - DNA, 15 bp, Homo sapiens
gcctcagcttcccga

SEQ ID NO: 627738 - DNA, 15 bp, Homo sapiens
cctcagcttcccgag

SEQ ID NO: 627739 - DNA, 15 bp, Homo sapiens
ctcagcttcccgagc

SEQ ID NO: 627740 - DNA, 15 bp, Homo sapiens
tcagcttcccgagca

SEQ ID NO: 627741 - DNA, 15 bp, Homo sapiens
cagcttcccgagcag

SEQ ID NO: 627742 - DNA, 15 bp, Homo sapiens
agcttcccgagcagc

SEQ ID NO: 627743 - DNA, 15 bp, Homo sapiens
gcttcccgagcagct

SEQ ID NO: 627744 - DNA, 15 bp, Homo sapiens
cttcccgagcagctg

SEQ ID NO: 627745 - DNA, 15 bp, Homo sapiens
ttcccgagcagctgg

SEQ ID NO: 627746 - DNA, 15 bp, Homo sapiens
tcccgagcagctggg

SEQ ID NO: 627747 - DNA, 15 bp, Homo sapiens
cccgagcagctggga

SEQ ID NO: 627748 - DNA, 15 bp, Homo sapiens
ccgagcagctgggat

SEQ ID NO: 627749 - DNA, 15 bp, Homo sapiens
cgagcagctgggatt

SEQ ID NO: 627750 - DNA, 15 bp, Homo sapiens
gagcagctgggatta

SEQ ID NO: 627751 - DNA, 15 bp, Homo sapiens
agcagctgggattac

SEQ ID NO: 627752 - DNA, 15 bp, Homo sapiens
gcagctgggattaca

SEQ ID NO: 627753 - DNA, 15 bp, Homo sapiens
cagctgggattacag

SEQ ID NO: 627754 - DNA, 15 bp, Homo sapiens
agctgggattacagg

SEQ ID NO: 627755 - DNA, 15 bp, Homo sapiens
tgggattacaggcgg

SEQ ID NO: 627756 - DNA, 15 bp, Homo sapiens
gggattacaggcggc

SEQ ID NO: 627757 - DNA, 15 bp, Homo sapiens
ggattacaggcggct

SEQ ID NO: 627758 - DNA, 15 bp, Homo sapiens
gattacaggcggctg

SEQ ID NO: 627759 - DNA, 15 bp, Homo sapiens
attacaggcggctgc

SEQ ID NO: 627760 - DNA, 15 bp, Homo sapiens
ttacaggcggctgcc

SEQ ID NO: 627761 - DNA, 15 bp, Homo sapiens
tacaggcggctgcca

SEQ ID NO: 627762 - DNA, 15 bp, Homo sapiens
acaggcggctgccac

SEQ ID NO: 627763 - DNA, 15 bp, Homo sapiens
caggcggctgccacc

SEQ ID NO: 627764 - DNA, 15 bp, Homo sapiens
aggcggctgccacca

SEQ ID NO: 627765 - DNA, 15 bp, Homo sapiens
ggcggctgccaccac

SEQ ID NO: 627766 - DNA, 15 bp, Homo sapiens
gcggctgccaccacg

SEQ ID NO: 627767 - DNA, 15 bp, Homo sapiens
cggctgccaccacgc

SEQ ID NO: 627768 - DNA, 15 bp, Homo sapiens
ggctgccaccacgcc

SEQ ID NO: 627769 - DNA, 15 bp, Homo sapiens
gctgccaccacgccc

SEQ ID NO: 627770 - DNA, 15 bp, Homo sapiens
ctgccaccacgcccg

SEQ ID NO: 627771 - DNA, 15 bp, Homo sapiens
tgccaccacgcccgg

SEQ ID NO: 627772 - DNA, 15 bp, Homo sapiens
gccaccacgcccggc

SEQ ID NO: 627773 - DNA, 15 bp, Homo sapiens
ccaccacgcccggct

SEQ ID NO: 627774 - DNA, 15 bp, Homo sapiens
caccacgcccggcta

SEQ ID NO: 627775 - DNA, 15 bp, Homo sapiens
accacgcccggctaa

SEQ ID NO: 627776 - DNA, 15 bp, Homo sapiens
ccacgcccggctaat

SEQ ID NO: 627777 - DNA, 15 bp, Homo sapiens
cacgcccggctaatt

SEQ ID NO: 627778 - DNA, 15 bp, Homo sapiens
acgcccggctaattt

SEQ ID NO: 627779 - DNA, 15 bp, Homo sapiens
cgcccggctaatttt

SEQ ID NO: 627780 - DNA, 15 bp, Homo sapiens
gcccggctaattttt

SEQ ID NO: 627781 - DNA, 15 bp, Homo sapiens
cccggctaatttttg

SEQ ID NO: 627782 - DNA, 15 bp, Homo sapiens
ccggctaatttttgt

SEQ ID NO: 627783 - DNA, 15 bp, Homo sapiens
cggctaatttttgtt

SEQ ID NO: 627784 - DNA, 15 bp, Homo sapiens
ggctaatttttgttt

SEQ ID NO: 627785 - DNA, 15 bp, Homo sapiens
gctaatttttgtttt

SEQ ID NO: 627786 - DNA, 15 bp, Homo sapiens
ctaatttttgttttt

SEQ ID NO: 627787 - DNA, 15 bp, Homo sapiens
taatttttgtttttt

SEQ ID NO: 627788 - DNA, 15 bp, Homo sapiens
aatttttgttttttt

SEQ ID NO: 627789 - DNA, 15 bp, Homo sapiens
atttttgttttttta

SEQ ID NO: 627790 - DNA, 15 bp, Homo sapiens
tttttgtttttttag

SEQ ID NO: 627791 - DNA, 15 bp, Homo sapiens
ttttgtttttttagt

SEQ ID NO: 627792 - DNA, 15 bp, Homo sapiens
tttgtttttttagta

SEQ ID NO: 627793 - DNA, 15 bp, Homo sapiens
ttgtttttttagtag

SEQ ID NO: 627794 - DNA, 15 bp, Homo sapiens
tgtttttttagtaga

SEQ ID NO: 627795 - DNA, 15 bp, Homo sapiens
gtttttttagtagag

SEQ ID NO: 627796 - DNA, 15 bp, Homo sapiens
tttttttagtagaga

SEQ ID NO: 627797 - DNA, 15 bp, Homo sapiens
ttttttagtagagac

SEQ ID NO: 627798 - DNA, 15 bp, Homo sapiens
tttttagtagagaca

SEQ ID NO: 627799 - DNA, 15 bp, Homo sapiens
ttttagtagagacag

SEQ ID NO: 627800 - DNA, 15 bp, Homo sapiens
tttagtagagacagg

SEQ ID NO: 627801 - DNA, 15 bp, Homo sapiens
ttagtagagacaggg

SEQ ID NO: 627802 - DNA, 15 bp, Homo sapiens
tagtagagacagggt

SEQ ID NO: 627803 - DNA, 15 bp, Homo sapiens
agtagagacagggtt

SEQ ID NO: 627804 - DNA, 15 bp, Homo sapiens
gtagagacagggttt

SEQ ID NO: 627805 - DNA, 15 bp, Homo sapiens
agacagggtttcacc

SEQ ID NO: 627806 - DNA, 15 bp, Homo sapiens
gacagggtttcacca

SEQ ID NO: 627807 - DNA, 15 bp, Homo sapiens
acagggtttcaccat

SEQ ID NO: 627808 - DNA, 15 bp, Homo sapiens
cagggtttcaccatg

SEQ ID NO: 627809 - DNA, 15 bp, Homo sapiens
agggtttcaccatgt

SEQ ID NO: 627810 - DNA, 15 bp, Homo sapiens
accatgttggccaga

SEQ ID NO: 627811 - DNA, 15 bp, Homo sapiens
ccatgttggccagac

SEQ ID NO: 627812 - DNA, 15 bp, Homo sapiens
catgttggccagact

SEQ ID NO: 627813 - DNA, 15 bp, Homo sapiens
atgttggccagactg

SEQ ID NO: 627814 - DNA, 15 bp, Homo sapiens
tgttggccagactgg

SEQ ID NO: 627815 - DNA, 15 bp, Homo sapiens
gttggccagactggt

SEQ ID NO: 627816 - DNA, 15 bp, Homo sapiens
ttggccagactggtc

SEQ ID NO: 627817 - DNA, 15 bp, Homo sapiens
tggccagactggtct

SEQ ID NO: 627818 - DNA, 15 bp, Homo sapiens
ggccagactggtctt

SEQ ID NO: 627819 - DNA, 15 bp, Homo sapiens
gccagactggtcttg

SEQ ID NO: 627820 - DNA, 15 bp, Homo sapiens
ccagactggtcttga

SEQ ID NO: 627821 - DNA, 15 bp, Homo sapiens
cagactggtcttgaa

SEQ ID NO: 627822 - DNA, 15 bp, Homo sapiens
agactggtcttgaac

SEQ ID NO: 627823 - DNA, 15 bp, Homo sapiens
gactggtcttgaact

SEQ ID NO: 627824 - DNA, 15 bp, Homo sapiens
actggtcttgaactc

SEQ ID NO: 627825 - DNA, 15 bp, Homo sapiens
ctggtcttgaactcc

SEQ ID NO: 627826 - DNA, 15 bp, Homo sapiens
tggtcttgaactcct

SEQ ID NO: 627827 - DNA, 15 bp, Homo sapiens
ggtcttgaactcctg

SEQ ID NO: 627828 - DNA, 15 bp, Homo sapiens
gtcttgaactcctga

SEQ ID NO: 627829 - DNA, 15 bp, Homo sapiens
tcttgaactcctgac

SEQ ID NO: 627830 - DNA, 15 bp, Homo sapiens
cttgaactcctgacc

SEQ ID NO: 627831 - DNA, 15 bp, Homo sapiens
ttgaactcctgacct

SEQ ID NO: 627832 - DNA, 15 bp, Homo sapiens
tgaactcctgacctc

SEQ ID NO: 627833 - DNA, 15 bp, Homo sapiens
gaactcctgacctca

SEQ ID NO: 627834 - DNA, 15 bp, Homo sapiens
aactcctgacctcag

SEQ ID NO: 627835 - DNA, 15 bp, Homo sapiens
actcctgacctcagg

SEQ ID NO: 627836 - DNA, 15 bp, Homo sapiens
ctcctgacctcaggt

SEQ ID NO: 627837 - DNA, 15 bp, Homo sapiens
tcctgacctcaggtg

SEQ ID NO: 627838 - DNA, 15 bp, Homo sapiens
cctgacctcaggtga

SEQ ID NO: 627839 - DNA, 15 bp, Homo sapiens
ctgacctcaggtgat

SEQ ID NO: 627840 - DNA, 15 bp, Homo sapiens
tgacctcaggtgatt

SEQ ID NO: 627841 - DNA, 15 bp, Homo sapiens
gacctcaggtgattc

SEQ ID NO: 627842 - DNA, 15 bp, Homo sapiens
acctcaggtgattct

SEQ ID NO: 627843 - DNA, 15 bp, Homo sapiens
cctcaggtgattctc

SEQ ID NO: 627844 - DNA, 15 bp, Homo sapiens
ctcaggtgattctcc

SEQ ID NO: 627845 - DNA, 15 bp, Homo sapiens
tcaggtgattctccc

SEQ ID NO: 627846 - DNA, 15 bp, Homo sapiens
caggtgattctccca

SEQ ID NO: 627847 - DNA, 15 bp, Homo sapiens
aggtgattctcccac

SEQ ID NO: 627848 - DNA, 15 bp, Homo sapiens
ggtgattctcccacc

SEQ ID NO: 627849 - DNA, 15 bp, Homo sapiens
gtgattctcccacct

SEQ ID NO: 627850 - DNA, 15 bp, Homo sapiens
tgattctcccacctc

SEQ ID NO: 627851 - DNA, 15 bp, Homo sapiens
gattctcccacctcg

SEQ ID NO: 627852 - DNA, 15 bp, Homo sapiens
attctcccacctcgg

SEQ ID NO: 627853 - DNA, 15 bp, Homo sapiens
ttctcccacctcggc

SEQ ID NO: 627854 - DNA, 15 bp, Homo sapiens
tctcccacctcggct

SEQ ID NO: 627855 - DNA, 15 bp, Homo sapiens
ctcccacctcggctt

SEQ ID NO: 627856 - DNA, 15 bp, Homo sapiens
tcccacctcggcttc

SEQ ID NO: 627857 - DNA, 15 bp, Homo sapiens
cccacctcggcttcc

SEQ ID NO: 627858 - DNA, 15 bp, Homo sapiens
ccacctcggcttccc

SEQ ID NO: 627859 - DNA, 15 bp, Homo sapiens
cacctcggcttccca

SEQ ID NO: 627860 - DNA, 15 bp, Homo sapiens
acctcggcttcccaa

SEQ ID NO: 627861 - DNA, 15 bp, Homo sapiens
cctcggcttcccaaa

SEQ ID NO: 627862 - DNA, 15 bp, Homo sapiens
ctcggcttcccaaag

SEQ ID NO: 627863 - DNA, 15 bp, Homo sapiens
tcggcttcccaaagt

SEQ ID NO: 627864 - DNA, 15 bp, Homo sapiens
cggcttcccaaagtg

SEQ ID NO: 627865 - DNA, 15 bp, Homo sapiens
ggcttcccaaagtgc

SEQ ID NO: 627866 - DNA, 15 bp, Homo sapiens
gcttcccaaagtgct

SEQ ID NO: 627867 - DNA, 15 bp, Homo sapiens
cttcccaaagtgctg

SEQ ID NO: 627868 - DNA, 15 bp, Homo sapiens
ttcccaaagtgctgg

SEQ ID NO: 627869 - DNA, 15 bp, Homo sapiens
caggcgtgagccact

SEQ ID NO: 627870 - DNA, 15 bp, Homo sapiens
aggcgtgagccactg

SEQ ID NO: 627871 - DNA, 15 bp, Homo sapiens
ggcgtgagccactgc

SEQ ID NO: 627872 - DNA, 15 bp, Homo sapiens
gcgtgagccactgcg

SEQ ID NO: 627873 - DNA, 15 bp, Homo sapiens
cgtgagccactgcgc

SEQ ID NO: 627874 - DNA, 15 bp, Homo sapiens
gtgagccactgcgcc

SEQ ID NO: 627875 - DNA, 15 bp, Homo sapiens
tgagccactgcgccc

SEQ ID NO: 627876 - DNA, 15 bp, Homo sapiens
gagccactgcgccca

SEQ ID NO: 627877 - DNA, 15 bp, Homo sapiens
agccactgcgcccag

SEQ ID NO: 627878 - DNA, 15 bp, Homo sapiens
gccactgcgcccagc

SEQ ID NO: 627879 - DNA, 15 bp, Homo sapiens
ccactgcgcccagcc

SEQ ID NO: 627880 - DNA, 15 bp, Homo sapiens
cactgcgcccagcct

SEQ ID NO: 627881 - DNA, 15 bp, Homo sapiens
actgcgcccagcctc

SEQ ID NO: 627882 - DNA, 15 bp, Homo sapiens
ctgcgcccagcctcc

SEQ ID NO: 627883 - DNA, 15 bp, Homo sapiens
tgcgcccagcctcct

SEQ ID NO: 627884 - DNA, 15 bp, Homo sapiens
gcgcccagcctcctg

SEQ ID NO: 627885 - DNA, 15 bp, Homo sapiens
cgcccagcctcctgt

SEQ ID NO: 627886 - DNA, 15 bp, Homo sapiens
gcccagcctcctgta

SEQ ID NO: 627887 - DNA, 15 bp, Homo sapiens
cccagcctcctgtag

SEQ ID NO: 627888 - DNA, 15 bp, Homo sapiens
ccagcctcctgtagg

SEQ ID NO: 627889 - DNA, 15 bp, Homo sapiens
cagcctcctgtaggt

SEQ ID NO: 627890 - DNA, 15 bp, Homo sapiens
agcctcctgtaggtt

SEQ ID NO: 627891 - DNA, 15 bp, Homo sapiens
gcctcctgtaggttt

SEQ ID NO: 627892 - DNA, 15 bp, Homo sapiens
cctcctgtaggtttt

SEQ ID NO: 627893 - DNA, 15 bp, Homo sapiens
ctcctgtaggttttt

SEQ ID NO: 627894 - DNA, 15 bp, Homo sapiens
tcctgtaggttttta

SEQ ID NO: 627895 - DNA, 15 bp, Homo sapiens
cctgtaggtttttaa

SEQ ID NO: 627896 - DNA, 15 bp, Homo sapiens
ctgtaggtttttaaa

SEQ ID NO: 627897 - DNA, 15 bp, Homo sapiens
tgtaggtttttaaaa

SEQ ID NO: 627898 - DNA, 15 bp, Homo sapiens
gtaggtttttaaaat

SEQ ID NO: 627899 - DNA, 15 bp, Homo sapiens
taggtttttaaaatg

SEQ ID NO: 627900 - DNA, 15 bp, Homo sapiens
aggtttttaaaatgg

SEQ ID NO: 627901 - DNA, 15 bp, Homo sapiens
ggtttttaaaatgga

SEQ ID NO: 627902 - DNA, 15 bp, Homo sapiens
gtttttaaaatggag

SEQ ID NO: 627903 - DNA, 15 bp, Homo sapiens
tttttaaaatggaga

SEQ ID NO: 627904 - DNA, 15 bp, Homo sapiens
ttttaaaatggagaa

SEQ ID NO: 627905 - DNA, 15 bp, Homo sapiens
tttaaaatggagaaa

SEQ ID NO: 627906 - DNA, 15 bp, Homo sapiens
ttaaaatggagaaaa

SEQ ID NO: 627907 - DNA, 15 bp, Homo sapiens
taaaatggagaaaac

SEQ ID NO: 627908 - DNA, 15 bp, Homo sapiens
aaaatggagaaaacc

SEQ ID NO: 627909 - DNA, 15 bp, Homo sapiens
aaatggagaaaacca

SEQ ID NO: 627910 - DNA, 15 bp, Homo sapiens
aatggagaaaaccac

SEQ ID NO: 627911 - DNA, 15 bp, Homo sapiens
atggagaaaaccaca

SEQ ID NO: 627912 - DNA, 15 bp, Homo sapiens
tggagaaaaccacaa

SEQ ID NO: 627913 - DNA, 15 bp, Homo sapiens
ggagaaaaccacaat

SEQ ID NO: 627914 - DNA, 15 bp, Homo sapiens
gagaaaaccacaatc

SEQ ID NO: 627915 - DNA, 15 bp, Homo sapiens
agaaaaccacaatct

SEQ ID NO: 627916 - DNA, 15 bp, Homo sapiens
gaaaaccacaatctc

SEQ ID NO: 627917 - DNA, 15 bp, Homo sapiens
aaaaccacaatctca

SEQ ID NO: 627918 - DNA, 15 bp, Homo sapiens
aaaccacaatctcac

SEQ ID NO: 627919 - DNA, 15 bp, Homo sapiens
aaccacaatctcact

SEQ ID NO: 627920 - DNA, 15 bp, Homo sapiens
accacaatctcactg

SEQ ID NO: 627921 - DNA, 15 bp, Homo sapiens
ccacaatctcactgg

SEQ ID NO: 627922 - DNA, 15 bp, Homo sapiens
cacaatctcactggc

SEQ ID NO: 627923 - DNA, 15 bp, Homo sapiens
acaatctcactggcc

SEQ ID NO: 627924 - DNA, 15 bp, Homo sapiens
caatctcactggcca

SEQ ID NO: 627925 - DNA, 15 bp, Homo sapiens
aatctcactggccat

SEQ ID NO: 627926 - DNA, 15 bp, Homo sapiens
atctcactggccatg

SEQ ID NO: 627927 - DNA, 15 bp, Homo sapiens
tctcactggccatgt

SEQ ID NO: 627928 - DNA, 15 bp, Homo sapiens
ctcactggccatgtt

SEQ ID NO: 627929 - DNA, 15 bp, Homo sapiens
tcactggccatgttt

SEQ ID NO: 627930 - DNA, 15 bp, Homo sapiens
cactggccatgtttt

SEQ ID NO: 627931 - DNA, 15 bp, Homo sapiens
actggccatgtttta

SEQ ID NO: 627932 - DNA, 15 bp, Homo sapiens
ctggccatgttttaa

SEQ ID NO: 627933 - DNA, 15 bp, Homo sapiens
tggccatgttttaaa

SEQ ID NO: 627934 - DNA, 15 bp, Homo sapiens
ggccatgttttaaaa

SEQ ID NO: 627935 - DNA, 15 bp, Homo sapiens
gccatgttttaaaaa

SEQ ID NO: 627936 - DNA, 15 bp, Homo sapiens
ccatgttttaaaaaa

SEQ ID NO: 627937 - DNA, 15 bp, Homo sapiens
catgttttaaaaaac

SEQ ID NO: 627938 - DNA, 15 bp, Homo sapiens
atgttttaaaaaact

SEQ ID NO: 627939 - DNA, 15 bp, Homo sapiens
tgttttaaaaaactt

SEQ ID NO: 627940 - DNA, 15 bp, Homo sapiens
gttttaaaaaactta

SEQ ID NO: 627941 - DNA, 15 bp, Homo sapiens
ttttaaaaaacttaa

SEQ ID NO: 627942 - DNA, 15 bp, Homo sapiens
tttaaaaaacttaat

SEQ ID NO: 627943 - DNA, 15 bp, Homo sapiens
ttaaaaaacttaatc

SEQ ID NO: 627944 - DNA, 15 bp, Homo sapiens
taaaaaacttaatct

SEQ ID NO: 627945 - DNA, 15 bp, Homo sapiens
aaaaaacttaatctg

SEQ ID NO: 627946 - DNA, 15 bp, Homo sapiens
aaaaacttaatctgc

SEQ ID NO: 627947 - DNA, 15 bp, Homo sapiens
aaaacttaatctgcc

SEQ ID NO: 627948 - DNA, 15 bp, Homo sapiens
aaacttaatctgcca

SEQ ID NO: 627949 - DNA, 15 bp, Homo sapiens
aacttaatctgccag

SEQ ID NO: 627950 - DNA, 15 bp, Homo sapiens
acttaatctgccagt

SEQ ID NO: 627951 - DNA, 15 bp, Homo sapiens
cttaatctgccagtc

SEQ ID NO: 627952 - DNA, 15 bp, Homo sapiens
ttaatctgccagtca

SEQ ID NO: 627953 - DNA, 15 bp, Homo sapiens
taatctgccagtcag

SEQ ID NO: 627954 - DNA, 15 bp, Homo sapiens
aatctgccagtcagg

SEQ ID NO: 627955 - DNA, 15 bp, Homo sapiens
atctgccagtcaggc

SEQ ID NO: 627956 - DNA, 15 bp, Homo sapiens
tctgccagtcaggca

SEQ ID NO: 627957 - DNA, 15 bp, Homo sapiens
ctgccagtcaggcac

SEQ ID NO: 627958 - DNA, 15 bp, Homo sapiens
tgccagtcaggcacc

SEQ ID NO: 627959 - DNA, 15 bp, Homo sapiens
gccagtcaggcacca

SEQ ID NO: 627960 - DNA, 15 bp, Homo sapiens
ccagtcaggcaccat

SEQ ID NO: 627961 - DNA, 15 bp, Homo sapiens
cagtcaggcaccatg

SEQ ID NO: 627962 - DNA, 15 bp, Homo sapiens
agtcaggcaccatgg

SEQ ID NO: 627963 - DNA, 15 bp, Homo sapiens
gtcaggcaccatggc

SEQ ID NO: 627964 - DNA, 15 bp, Homo sapiens
tcaggcaccatggct

SEQ ID NO: 627965 - DNA, 15 bp, Homo sapiens
caggcaccatggctc

SEQ ID NO: 627966 - DNA, 15 bp, Homo sapiens
aggcaccatggctca

SEQ ID NO: 627967 - DNA, 15 bp, Homo sapiens
ggcaccatggctcac

SEQ ID NO: 627968 - DNA, 15 bp, Homo sapiens
gcaccatggctcaca

SEQ ID NO: 627969 - DNA, 15 bp, Homo sapiens
caccatggctcacac

SEQ ID NO: 627970 - DNA, 15 bp, Homo sapiens
accatggctcacacc

SEQ ID NO: 627971 - DNA, 15 bp, Homo sapiens
ccatggctcacacct

SEQ ID NO: 627972 - DNA, 15 bp, Homo sapiens
catggctcacacctg

SEQ ID NO: 627973 - DNA, 15 bp, Homo sapiens
atggctcacacctgt

SEQ ID NO: 627974 - DNA, 15 bp, Homo sapiens
tggctcacacctgta

SEQ ID NO: 627975 - DNA, 15 bp, Homo sapiens
ggctcacacctgtaa

SEQ ID NO: 627976 - DNA, 15 bp, Homo sapiens
gctcacacctgtaat

SEQ ID NO: 627977 - DNA, 15 bp, Homo sapiens
ctcacacctgtaatc

SEQ ID NO: 627978 - DNA, 15 bp, Homo sapiens
tcacacctgtaatcc

SEQ ID NO: 627979 - DNA, 15 bp, Homo sapiens
cacacctgtaatccc

SEQ ID NO: 627980 - DNA, 15 bp, Homo sapiens
acacctgtaatccca

SEQ ID NO: 627981 - DNA, 15 bp, Homo sapiens
cacctgtaatcccag

SEQ ID NO: 627982 - DNA, 15 bp, Homo sapiens
acctgtaatcccaga

SEQ ID NO: 627983 - DNA, 15 bp, Homo sapiens
cctgtaatcccagag

SEQ ID NO: 627984 - DNA, 15 bp, Homo sapiens
ctgtaatcccagagt

SEQ ID NO: 627985 - DNA, 15 bp, Homo sapiens
tgtaatcccagagtt

SEQ ID NO: 627986 - DNA, 15 bp, Homo sapiens
gtaatcccagagttt

SEQ ID NO: 627987 - DNA, 15 bp, Homo sapiens
taatcccagagtttt

SEQ ID NO: 627988 - DNA, 15 bp, Homo sapiens
aatcccagagttttg

SEQ ID NO: 627989 - DNA, 15 bp, Homo sapiens
atcccagagttttgg

SEQ ID NO: 627990 - DNA, 15 bp, Homo sapiens
tcccagagttttggg

SEQ ID NO: 627991 - DNA, 15 bp, Homo sapiens
cccagagttttggga

SEQ ID NO: 627992 - DNA, 15 bp, Homo sapiens
ccagagttttgggag

SEQ ID NO: 627993 - DNA, 15 bp, Homo sapiens
cagagttttgggagg

SEQ ID NO: 627994 - DNA, 15 bp, Homo sapiens
agagttttgggaggc

SEQ ID NO: 627995 - DNA, 15 bp, Homo sapiens
gagttttgggaggcc

SEQ ID NO: 627996 - DNA, 15 bp, Homo sapiens
agttttgggaggcca

SEQ ID NO: 627997 - DNA, 15 bp, Homo sapiens
gttttgggaggccaa

SEQ ID NO: 627998 - DNA, 15 bp, Homo sapiens
ttttgggaggccaag

SEQ ID NO: 627999 - DNA, 15 bp, Homo sapiens
tttgggaggccaagg

SEQ ID NO: 628000 - DNA, 15 bp, Homo sapiens
ttgggaggccaaggt

SEQ ID NO: 628001 - DNA, 15 bp, Homo sapiens
tgggaggccaaggta

SEQ ID NO: 628002 - DNA, 15 bp, Homo sapiens
gggaggccaaggtag

SEQ ID NO: 628003 - DNA, 15 bp, Homo sapiens
ggaggccaaggtagg

SEQ ID NO: 628004 - DNA, 15 bp, Homo sapiens
gaggccaaggtagga

SEQ ID NO: 628005 - DNA, 15 bp, Homo sapiens
aggccaaggtaggaa

SEQ ID NO: 628006 - DNA, 15 bp, Homo sapiens
ggccaaggtaggaag

SEQ ID NO: 628007 - DNA, 15 bp, Homo sapiens
gccaaggtaggaaga

SEQ ID NO: 628008 - DNA, 15 bp, Homo sapiens
ccaaggtaggaagat

SEQ ID NO: 628009 - DNA, 15 bp, Homo sapiens
caaggtaggaagatc

SEQ ID NO: 628010 - DNA, 15 bp, Homo sapiens
aaggtaggaagatca

SEQ ID NO: 628011 - DNA, 15 bp, Homo sapiens
aggtaggaagatcag

SEQ ID NO: 628012 - DNA, 15 bp, Homo sapiens
ggtaggaagatcagt

SEQ ID NO: 628013 - DNA, 15 bp, Homo sapiens
gtaggaagatcagtt

SEQ ID NO: 628014 - DNA, 15 bp, Homo sapiens
taggaagatcagttg

SEQ ID NO: 628015 - DNA, 15 bp, Homo sapiens
aggaagatcagttga

SEQ ID NO: 628016 - DNA, 15 bp, Homo sapiens
ggaagatcagttgag

SEQ ID NO: 628017 - DNA, 15 bp, Homo sapiens
gaagatcagttgagc

SEQ ID NO: 628018 - DNA, 15 bp, Homo sapiens
aagatcagttgagcc

SEQ ID NO: 628019 - DNA, 15 bp, Homo sapiens
agatcagttgagccc

SEQ ID NO: 628020 - DNA, 15 bp, Homo sapiens
gatcagttgagccca

SEQ ID NO: 628021 - DNA, 15 bp, Homo sapiens
atcagttgagcccag

SEQ ID NO: 628022 - DNA, 15 bp, Homo sapiens
tcagttgagcccagg

SEQ ID NO: 628023 - DNA, 15 bp, Homo sapiens
cagttgagcccagga

SEQ ID NO: 628024 - DNA, 15 bp, Homo sapiens
agttgagcccaggag

SEQ ID NO: 628025 - DNA, 15 bp, Homo sapiens
gttgagcccaggagt

SEQ ID NO: 628026 - DNA, 15 bp, Homo sapiens
tgagcccaggagttc

SEQ ID NO: 628027 - DNA, 15 bp, Homo sapiens
gagcccaggagttca

SEQ ID NO: 628028 - DNA, 15 bp, Homo sapiens
agcccaggagttcaa

SEQ ID NO: 628029 - DNA, 15 bp, Homo sapiens
gcccaggagttcaag

SEQ ID NO: 628030 - DNA, 15 bp, Homo sapiens
cccaggagttcaaga

SEQ ID NO: 628031 - DNA, 15 bp, Homo sapiens
ccaggagttcaagac

SEQ ID NO: 628032 - DNA, 15 bp, Homo sapiens
caggagttcaagacc

SEQ ID NO: 628033 - DNA, 15 bp, Homo sapiens
aggagttcaagacca

SEQ ID NO: 628034 - DNA, 15 bp, Homo sapiens
ggagttcaagaccag

SEQ ID NO: 628035 - DNA, 15 bp, Homo sapiens
gagttcaagaccagc

SEQ ID NO: 628036 - DNA, 15 bp, Homo sapiens
agttcaagaccagct

SEQ ID NO: 628037 - DNA, 15 bp, Homo sapiens
gttcaagaccagctt

SEQ ID NO: 628038 - DNA, 15 bp, Homo sapiens
ttcaagaccagcttg

SEQ ID NO: 628039 - DNA, 15 bp, Homo sapiens
tcaagaccagcttgg

SEQ ID NO: 628040 - DNA, 15 bp, Homo sapiens
caagaccagcttggg

SEQ ID NO: 628041 - DNA, 15 bp, Homo sapiens
aagaccagcttgggc

SEQ ID NO: 628042 - DNA, 15 bp, Homo sapiens
agaccagcttgggca

SEQ ID NO: 628043 - DNA, 15 bp, Homo sapiens
gaccagcttgggcaa

SEQ ID NO: 628044 - DNA, 15 bp, Homo sapiens
accagcttgggcaac

SEQ ID NO: 628045 - DNA, 15 bp, Homo sapiens
ccagcttgggcaaca

SEQ ID NO: 628046 - DNA, 15 bp, Homo sapiens
cagcttgggcaacac

SEQ ID NO: 628047 - DNA, 15 bp, Homo sapiens
agcttgggcaacaca

SEQ ID NO: 628048 - DNA, 15 bp, Homo sapiens
gcttgggcaacacaa

SEQ ID NO: 628049 - DNA, 15 bp, Homo sapiens
cttgggcaacacaac

SEQ ID NO: 628050 - DNA, 15 bp, Homo sapiens
ttgggcaacacaacc

SEQ ID NO: 628051 - DNA, 15 bp, Homo sapiens
tgggcaacacaacca

SEQ ID NO: 628052 - DNA, 15 bp, Homo sapiens
gggcaacacaaccag

SEQ ID NO: 628053 - DNA, 15 bp, Homo sapiens
ggcaacacaaccaga

SEQ ID NO: 628054 - DNA, 15 bp, Homo sapiens
gcaacacaaccagac

SEQ ID NO: 628055 - DNA, 15 bp, Homo sapiens
caacacaaccagacc

SEQ ID NO: 628056 - DNA, 15 bp, Homo sapiens
aacacaaccagaccc

SEQ ID NO: 628057 - DNA, 15 bp, Homo sapiens
acacaaccagacccc

SEQ ID NO: 628058 - DNA, 15 bp, Homo sapiens
cacaaccagacccca

SEQ ID NO: 628059 - DNA, 15 bp, Homo sapiens
acaaccagaccccac

SEQ ID NO: 628060 - DNA, 15 bp, Homo sapiens
caaccagaccccacc

SEQ ID NO: 628061 - DNA, 15 bp, Homo sapiens
aaccagaccccacct

SEQ ID NO: 628062 - DNA, 15 bp, Homo sapiens
accagaccccacctc

SEQ ID NO: 628063 - DNA, 15 bp, Homo sapiens
ccagaccccacctct

SEQ ID NO: 628064 - DNA, 15 bp, Homo sapiens
cagaccccacctcta

SEQ ID NO: 628065 - DNA, 15 bp, Homo sapiens
agaccccacctctac

SEQ ID NO: 628066 - DNA, 15 bp, Homo sapiens
gaccccacctctaca

SEQ ID NO: 628067 - DNA, 15 bp, Homo sapiens
accccacctctacaa

SEQ ID NO: 628068 - DNA, 15 bp, Homo sapiens
ccccacctctacaaa

SEQ ID NO: 628069 - DNA, 15 bp, Homo sapiens
cccacctctacaaaa

SEQ ID NO: 628070 - DNA, 15 bp, Homo sapiens
ccacctctacaaaaa

SEQ ID NO: 628071 - DNA, 15 bp, Homo sapiens
cacctctacaaaaaa

SEQ ID NO: 628072 - DNA, 15 bp, Homo sapiens
acctctacaaaaaat

SEQ ID NO: 628073 - DNA, 15 bp, Homo sapiens
cctctacaaaaaatt

SEQ ID NO: 628074 - DNA, 15 bp, Homo sapiens
ctctacaaaaaatta

SEQ ID NO: 628075 - DNA, 15 bp, Homo sapiens
tctacaaaaaattaa

SEQ ID NO: 628076 - DNA, 15 bp, Homo sapiens
ctacaaaaaattaaa

SEQ ID NO: 628077 - DNA, 15 bp, Homo sapiens
tacaaaaaattaaaa

SEQ ID NO: 628078 - DNA, 15 bp, Homo sapiens
acaaaaaattaaaaa

SEQ ID NO: 628079 - DNA, 15 bp, Homo sapiens
caaaaaattaaaaaa

SEQ ID NO: 628080 - DNA, 15 bp, Homo sapiens
aaaaaattaaaaaat

SEQ ID NO: 628081 - DNA, 15 bp, Homo sapiens
aaaaattaaaaaatt

SEQ ID NO: 628082 - DNA, 15 bp, Homo sapiens
aaaattaaaaaatta

SEQ ID NO: 628083 - DNA, 15 bp, Homo sapiens
aaattaaaaaattag

SEQ ID NO: 628084 - DNA, 15 bp, Homo sapiens
aattaaaaaattagc

SEQ ID NO: 628085 - DNA, 15 bp, Homo sapiens
attaaaaaattagcc

SEQ ID NO: 628086 - DNA, 15 bp, Homo sapiens
ttaaaaaattagccg

SEQ ID NO: 628087 - DNA, 15 bp, Homo sapiens
taaaaaattagccgg

SEQ ID NO: 628088 - DNA, 15 bp, Homo sapiens
aaaaaattagccggg

SEQ ID NO: 628089 - DNA, 15 bp, Homo sapiens
aaaaattagccgggt

SEQ ID NO: 628090 - DNA, 15 bp, Homo sapiens
aaaattagccgggtg

SEQ ID NO: 628091 - DNA, 15 bp, Homo sapiens
aaattagccgggtgt

SEQ ID NO: 628092 - DNA, 15 bp, Homo sapiens
aattagccgggtgtg

SEQ ID NO: 628093 - DNA, 15 bp, Homo sapiens
attagccgggtgtgg

SEQ ID NO: 628094 - DNA, 15 bp, Homo sapiens
ttagccgggtgtggt

SEQ ID NO: 628095 - DNA, 15 bp, Homo sapiens
tagccgggtgtggtg

SEQ ID NO: 628096 - DNA, 15 bp, Homo sapiens
agccgggtgtggtgg

SEQ ID NO: 628097 - DNA, 15 bp, Homo sapiens
gccgggtgtggtggc

SEQ ID NO: 628098 - DNA, 15 bp, Homo sapiens
ccgggtgtggtggcg

SEQ ID NO: 628099 - DNA, 15 bp, Homo sapiens
cgggtgtggtggcgt

SEQ ID NO: 628100 - DNA, 15 bp, Homo sapiens
gggtgtggtggcgtg

SEQ ID NO: 628101 - DNA, 15 bp, Homo sapiens
ggtgtggtggcgtgc

SEQ ID NO: 628102 - DNA, 15 bp, Homo sapiens
gtgtggtggcgtgca

SEQ ID NO: 628103 - DNA, 15 bp, Homo sapiens
tgtggtggcgtgcac

SEQ ID NO: 628104 - DNA, 15 bp, Homo sapiens
gtggtggcgtgcacc

SEQ ID NO: 628105 - DNA, 15 bp, Homo sapiens
tggtggcgtgcacct

SEQ ID NO: 628106 - DNA, 15 bp, Homo sapiens
ggtggcgtgcacctg

SEQ ID NO: 628107 - DNA, 15 bp, Homo sapiens
gtggcgtgcacctgc

SEQ ID NO: 628108 - DNA, 15 bp, Homo sapiens
tggcgtgcacctgct

SEQ ID NO: 628109 - DNA, 15 bp, Homo sapiens
ggcgtgcacctgctg

SEQ ID NO: 628110 - DNA, 15 bp, Homo sapiens
gcgtgcacctgctgt

SEQ ID NO: 628111 - DNA, 15 bp, Homo sapiens
cgtgcacctgctgtc

SEQ ID NO: 628112 - DNA, 15 bp, Homo sapiens
gtgcacctgctgtcc

SEQ ID NO: 628113 - DNA, 15 bp, Homo sapiens
tgcacctgctgtccc

SEQ ID NO: 628114 - DNA, 15 bp, Homo sapiens
gcacctgctgtccca

SEQ ID NO: 628115 - DNA, 15 bp, Homo sapiens
cacctgctgtcccag

SEQ ID NO: 628116 - DNA, 15 bp, Homo sapiens
acctgctgtcccagc

SEQ ID NO: 628117 - DNA, 15 bp, Homo sapiens
cctgctgtcccagct

SEQ ID NO: 628118 - DNA, 15 bp, Homo sapiens
ctgctgtcccagcta

SEQ ID NO: 628119 - DNA, 15 bp, Homo sapiens
tgctgtcccagctac

SEQ ID NO: 628120 - DNA, 15 bp, Homo sapiens
gctgtcccagctact

SEQ ID NO: 628121 - DNA, 15 bp, Homo sapiens
ctgtcccagctactc

SEQ ID NO: 628122 - DNA, 15 bp, Homo sapiens
tgtcccagctactcg

SEQ ID NO: 628123 - DNA, 15 bp, Homo sapiens
gtcccagctactcgg

SEQ ID NO: 628124 - DNA, 15 bp, Homo sapiens
ccagctactcgggaa

SEQ ID NO: 628125 - DNA, 15 bp, Homo sapiens
cagctactcgggaag

SEQ ID NO: 628126 - DNA, 15 bp, Homo sapiens
agctactcgggaagc

SEQ ID NO: 628127 - DNA, 15 bp, Homo sapiens
gctactcgggaagct

SEQ ID NO: 628128 - DNA, 15 bp, Homo sapiens
ctactcgggaagctg

SEQ ID NO: 628129 - DNA, 15 bp, Homo sapiens
tactcgggaagctga

SEQ ID NO: 628130 - DNA, 15 bp, Homo sapiens
actcgggaagctgag

SEQ ID NO: 628131 - DNA, 15 bp, Homo sapiens
ctcgggaagctgagg

SEQ ID NO: 628132 - DNA, 15 bp, Homo sapiens
tcgggaagctgaggc

SEQ ID NO: 628133 - DNA, 15 bp, Homo sapiens
cgggaagctgaggcg

SEQ ID NO: 628134 - DNA, 15 bp, Homo sapiens
gggaagctgaggcgg

SEQ ID NO: 628135 - DNA, 15 bp, Homo sapiens
ggaagctgaggcggg

SEQ ID NO: 628136 - DNA, 15 bp, Homo sapiens
gaagctgaggcggga

SEQ ID NO: 628137 - DNA, 15 bp, Homo sapiens
aagctgaggcgggag

SEQ ID NO: 628138 - DNA, 15 bp, Homo sapiens
agctgaggcgggagc

SEQ ID NO: 628139 - DNA, 15 bp, Homo sapiens
gctgaggcgggagca

SEQ ID NO: 628140 - DNA, 15 bp, Homo sapiens
ctgaggcgggagcat

SEQ ID NO: 628141 - DNA, 15 bp, Homo sapiens
tgaggcgggagcatc

SEQ ID NO: 628142 - DNA, 15 bp, Homo sapiens
gaggcgggagcatcg

SEQ ID NO: 628143 - DNA, 15 bp, Homo sapiens
aggcgggagcatcgc

SEQ ID NO: 628144 - DNA, 15 bp, Homo sapiens
ggcgggagcatcgct

SEQ ID NO: 628145 - DNA, 15 bp, Homo sapiens
gcgggagcatcgctt

SEQ ID NO: 628146 - DNA, 15 bp, Homo sapiens
cgggagcatcgcttg

SEQ ID NO: 628147 - DNA, 15 bp, Homo sapiens
gggagcatcgcttga

SEQ ID NO: 628148 - DNA, 15 bp, Homo sapiens
ggagcatcgcttgag

SEQ ID NO: 628149 - DNA, 15 bp, Homo sapiens
gagcatcgcttgagc

SEQ ID NO: 628150 - DNA, 15 bp, Homo sapiens
agcatcgcttgagca

SEQ ID NO: 628151 - DNA, 15 bp, Homo sapiens
gcatcgcttgagcac

SEQ ID NO: 628152 - DNA, 15 bp, Homo sapiens
catcgcttgagcaca

SEQ ID NO: 628153 - DNA, 15 bp, Homo sapiens
atcgcttgagcacag

SEQ ID NO: 628154 - DNA, 15 bp, Homo sapiens
tcgcttgagcacagg

SEQ ID NO: 628155 - DNA, 15 bp, Homo sapiens
cgcttgagcacagga

SEQ ID NO: 628156 - DNA, 15 bp, Homo sapiens
gcttgagcacaggag

SEQ ID NO: 628157 - DNA, 15 bp, Homo sapiens
cttgagcacaggagg

SEQ ID NO: 628158 - DNA, 15 bp, Homo sapiens
ttgagcacaggaggt

SEQ ID NO: 628159 - DNA, 15 bp, Homo sapiens
tgagcacaggaggtc

SEQ ID NO: 628160 - DNA, 15 bp, Homo sapiens
gagcacaggaggtca

SEQ ID NO: 628161 - DNA, 15 bp, Homo sapiens
agcacaggaggtcaa

SEQ ID NO: 628162 - DNA, 15 bp, Homo sapiens
gcacaggaggtcaag

SEQ ID NO: 628163 - DNA, 15 bp, Homo sapiens
cacaggaggtcaagg

SEQ ID NO: 628164 - DNA, 15 bp, Homo sapiens
acaggaggtcaaggc

SEQ ID NO: 628165 - DNA, 15 bp, Homo sapiens
caggaggtcaaggct

SEQ ID NO: 628166 - DNA, 15 bp, Homo sapiens
aggaggtcaaggctg

SEQ ID NO: 628167 - DNA, 15 bp, Homo sapiens
ggaggtcaaggctgc

SEQ ID NO: 628168 - DNA, 15 bp, Homo sapiens
gaggtcaaggctgca

SEQ ID NO: 628169 - DNA, 15 bp, Homo sapiens
aggtcaaggctgcag

SEQ ID NO: 628170 - DNA, 15 bp, Homo sapiens
ggtcaaggctgcagg

SEQ ID NO: 628171 - DNA, 15 bp, Homo sapiens
gtcaaggctgcaggg

SEQ ID NO: 628172 - DNA, 15 bp, Homo sapiens
tcaaggctgcaggga

SEQ ID NO: 628173 - DNA, 15 bp, Homo sapiens
caaggctgcagggag

SEQ ID NO: 628174 - DNA, 15 bp, Homo sapiens
aaggctgcagggagc

SEQ ID NO: 628175 - DNA, 15 bp, Homo sapiens
aggctgcagggagct

SEQ ID NO: 628176 - DNA, 15 bp, Homo sapiens
ggctgcagggagcta

SEQ ID NO: 628177 - DNA, 15 bp, Homo sapiens
gctgcagggagctat

SEQ ID NO: 628178 - DNA, 15 bp, Homo sapiens
ctgcagggagctatg

SEQ ID NO: 628179 - DNA, 15 bp, Homo sapiens
tgcagggagctatga

SEQ ID NO: 628180 - DNA, 15 bp, Homo sapiens
gcagggagctatgac

SEQ ID NO: 628181 - DNA, 15 bp, Homo sapiens
cagggagctatgact

SEQ ID NO: 628182 - DNA, 15 bp, Homo sapiens
agggagctatgactg

SEQ ID NO: 628183 - DNA, 15 bp, Homo sapiens
gggagctatgactgt

SEQ ID NO: 628184 - DNA, 15 bp, Homo sapiens
ggagctatgactgtg

SEQ ID NO: 628185 - DNA, 15 bp, Homo sapiens
gagctatgactgtgc

SEQ ID NO: 628186 - DNA, 15 bp, Homo sapiens
agctatgactgtgcc

SEQ ID NO: 628187 - DNA, 15 bp, Homo sapiens
gctatgactgtgcca

SEQ ID NO: 628188 - DNA, 15 bp, Homo sapiens
ctatgactgtgccac

SEQ ID NO: 628189 - DNA, 15 bp, Homo sapiens
tatgactgtgccact

SEQ ID NO: 628190 - DNA, 15 bp, Homo sapiens
atgactgtgccactg

SEQ ID NO: 628191 - DNA, 15 bp, Homo sapiens
tgactgtgccactgc

SEQ ID NO: 628192 - DNA, 15 bp, Homo sapiens
gactgtgccactgca

SEQ ID NO: 628193 - DNA, 15 bp, Homo sapiens
actgtgccactgcac

SEQ ID NO: 628194 - DNA, 15 bp, Homo sapiens
ctgtgccactgcact

SEQ ID NO: 628195 - DNA, 15 bp, Homo sapiens
tgtgccactgcactc

SEQ ID NO: 628196 - DNA, 15 bp, Homo sapiens
gtgccactgcactct

SEQ ID NO: 628197 - DNA, 15 bp, Homo sapiens
tgccactgcactctg

SEQ ID NO: 628198 - DNA, 15 bp, Homo sapiens
gccactgcactctgg

SEQ ID NO: 628199 - DNA, 15 bp, Homo sapiens
ccactgcactctggc

SEQ ID NO: 628200 - DNA, 15 bp, Homo sapiens
cactgcactctggcc

SEQ ID NO: 628201 - DNA, 15 bp, Homo sapiens
actgcactctggcct

SEQ ID NO: 628202 - DNA, 15 bp, Homo sapiens
ctgcactctggcctg

SEQ ID NO: 628203 - DNA, 15 bp, Homo sapiens
tgcactctggcctgg

SEQ ID NO: 628204 - DNA, 15 bp, Homo sapiens
gcactctggcctggg

SEQ ID NO: 628205 - DNA, 15 bp, Homo sapiens
cactctggcctgggc

SEQ ID NO: 628206 - DNA, 15 bp, Homo sapiens
actctggcctgggca

SEQ ID NO: 628207 - DNA, 15 bp, Homo sapiens
ctctggcctgggcaa

SEQ ID NO: 628208 - DNA, 15 bp, Homo sapiens
tctggcctgggcaac

SEQ ID NO: 628209 - DNA, 15 bp, Homo sapiens
ctggcctgggcaaca

SEQ ID NO: 628210 - DNA, 15 bp, Homo sapiens
tggcctgggcaacag

SEQ ID NO: 628211 - DNA, 15 bp, Homo sapiens
ggcctgggcaacaga

SEQ ID NO: 628212 - DNA, 15 bp, Homo sapiens
gcctgggcaacagag

SEQ ID NO: 628213 - DNA, 15 bp, Homo sapiens
cctgggcaacagagg

SEQ ID NO: 628214 - DNA, 15 bp, Homo sapiens
ctgggcaacagagga

SEQ ID NO: 628215 - DNA, 15 bp, Homo sapiens
tgggcaacagaggaa

SEQ ID NO: 628216 - DNA, 15 bp, Homo sapiens
gggcaacagaggaag

SEQ ID NO: 628217 - DNA, 15 bp, Homo sapiens
ggcaacagaggaaga

SEQ ID NO: 628218 - DNA, 15 bp, Homo sapiens
gcaacagaggaagac

SEQ ID NO: 628219 - DNA, 15 bp, Homo sapiens
caacagaggaagact

SEQ ID NO: 628220 - DNA, 15 bp, Homo sapiens
aacagaggaagactc

SEQ ID NO: 628221 - DNA, 15 bp, Homo sapiens
acagaggaagactct

SEQ ID NO: 628222 - DNA, 15 bp, Homo sapiens
cagaggaagactctg

SEQ ID NO: 628223 - DNA, 15 bp, Homo sapiens
agaggaagactctgt

SEQ ID NO: 628224 - DNA, 15 bp, Homo sapiens
gaggaagactctgtc

SEQ ID NO: 628225 - DNA, 15 bp, Homo sapiens
aggaagactctgtct

SEQ ID NO: 628226 - DNA, 15 bp, Homo sapiens
ggaagactctgtcta

SEQ ID NO: 628227 - DNA, 15 bp, Homo sapiens
gaagactctgtctaa

SEQ ID NO: 628228 - DNA, 15 bp, Homo sapiens
aagactctgtctaaa

SEQ ID NO: 628229 - DNA, 15 bp, Homo sapiens
agactctgtctaaaa

SEQ ID NO: 628230 - DNA, 15 bp, Homo sapiens
gactctgtctaaaaa

SEQ ID NO: 628231 - DNA, 15 bp, Homo sapiens
actctgtctaaaaaa

SEQ ID NO: 628232 - DNA, 15 bp, Homo sapiens
ctctgtctaaaaaac

SEQ ID NO: 628233 - DNA, 15 bp, Homo sapiens
tctgtctaaaaaaca

SEQ ID NO: 628234 - DNA, 15 bp, Homo sapiens
ctgtctaaaaaacaa

SEQ ID NO: 628235 - DNA, 15 bp, Homo sapiens
tgtctaaaaaacaaa

SEQ ID NO: 628236 - DNA, 15 bp, Homo sapiens
gtctaaaaaacaaac

SEQ ID NO: 628237 - DNA, 15 bp, Homo sapiens
tctaaaaaacaaaca

SEQ ID NO: 628238 - DNA, 15 bp, Homo sapiens
ctaaaaaacaaacaa

SEQ ID NO: 628239 - DNA, 15 bp, Homo sapiens
taaaaaacaaacaaa

SEQ ID NO: 628240 - DNA, 15 bp, Homo sapiens
aaaaaacaaacaaaa

SEQ ID NO: 628241 - DNA, 15 bp, Homo sapiens
aaaaacaaacaaaaa

SEQ ID NO: 628242 - DNA, 15 bp, Homo sapiens
aaaacaaacaaaaaa

SEQ ID NO: 628243 - DNA, 15 bp, Homo sapiens
aaacaaacaaaaaaa

SEQ ID NO: 628244 - DNA, 15 bp, Homo sapiens
aacaaacaaaaaaag

SEQ ID NO: 628245 - DNA, 15 bp, Homo sapiens
acaaacaaaaaaagt

SEQ ID NO: 628246 - DNA, 15 bp, Homo sapiens
caaacaaaaaaagtg

SEQ ID NO: 628247 - DNA, 15 bp, Homo sapiens
aaacaaaaaaagtga

SEQ ID NO: 628248 - DNA, 15 bp, Homo sapiens
aacaaaaaaagtgac

SEQ ID NO: 628249 - DNA, 15 bp, Homo sapiens
acaaaaaaagtgact

SEQ ID NO: 628250 - DNA, 15 bp, Homo sapiens
caaaaaaagtgactc

SEQ ID NO: 628251 - DNA, 15 bp, Homo sapiens
aaaaaaagtgactct

SEQ ID NO: 628252 - DNA, 15 bp, Homo sapiens
aaaaaagtgactctg

SEQ ID NO: 628253 - DNA, 15 bp, Homo sapiens
aaaaagtgactctgc

SEQ ID NO: 628254 - DNA, 15 bp, Homo sapiens
aaaagtgactctgct

SEQ ID NO: 628255 - DNA, 15 bp, Homo sapiens
aaagtgactctgctg

SEQ ID NO: 628256 - DNA, 15 bp, Homo sapiens
aagtgactctgctgt

SEQ ID NO: 628257 - DNA, 15 bp, Homo sapiens
agtgactctgctgtg

SEQ ID NO: 628258 - DNA, 15 bp, Homo sapiens
gtgactctgctgtgt

SEQ ID NO: 628259 - DNA, 15 bp, Homo sapiens
tgactctgctgtgtg

SEQ ID NO: 628260 - DNA, 15 bp, Homo sapiens
gactctgctgtgtgg

SEQ ID NO: 628261 - DNA, 15 bp, Homo sapiens
actctgctgtgtggc

SEQ ID NO: 628262 - DNA, 15 bp, Homo sapiens
ctctgctgtgtggca

SEQ ID NO: 628263 - DNA, 15 bp, Homo sapiens
tctgctgtgtggcaa

SEQ ID NO: 628264 - DNA, 15 bp, Homo sapiens
ctgctgtgtggcaaa

SEQ ID NO: 628265 - DNA, 15 bp, Homo sapiens
tgctgtgtggcaaat

SEQ ID NO: 628266 - DNA, 15 bp, Homo sapiens
gtatcatcatgtatt

SEQ ID NO: 628267 - DNA, 15 bp, Homo sapiens
tatcatcatgtattg

SEQ ID NO: 628268 - DNA, 15 bp, Homo sapiens
atcatcatgtattga

SEQ ID NO: 628269 - DNA, 15 bp, Homo sapiens
tcatcatgtattgag

SEQ ID NO: 628270 - DNA, 15 bp, Homo sapiens
catcatgtattgagc

SEQ ID NO: 628271 - DNA, 15 bp, Homo sapiens
atcatgtattgagcc

SEQ ID NO: 628272 - DNA, 15 bp, Homo sapiens
tcatgtattgagcca

SEQ ID NO: 628273 - DNA, 15 bp, Homo sapiens
catgtattgagccaa

SEQ ID NO: 628274 - DNA, 15 bp, Homo sapiens
atgtattgagccaag

SEQ ID NO: 628275 - DNA, 15 bp, Homo sapiens
tgtattgagccaagc

SEQ ID NO: 628276 - DNA, 15 bp, Homo sapiens
gtattgagccaagct

SEQ ID NO: 628277 - DNA, 15 bp, Homo sapiens
tattgagccaagctc

SEQ ID NO: 628278 - DNA, 15 bp, Homo sapiens
attgagccaagctct

SEQ ID NO: 628279 - DNA, 15 bp, Homo sapiens
ttgagccaagctcta

SEQ ID NO: 628280 - DNA, 15 bp, Homo sapiens
tgagccaagctctat

SEQ ID NO: 628281 - DNA, 15 bp, Homo sapiens
gagccaagctctatg

SEQ ID NO: 628282 - DNA, 15 bp, Homo sapiens
agccaagctctatgc

SEQ ID NO: 628283 - DNA, 15 bp, Homo sapiens
gccaagctctatgct

SEQ ID NO: 628284 - DNA, 15 bp, Homo sapiens
ccaagctctatgcta

SEQ ID NO: 628285 - DNA, 15 bp, Homo sapiens
caagctctatgctag

SEQ ID NO: 628286 - DNA, 15 bp, Homo sapiens
aagctctatgctagg

SEQ ID NO: 628287 - DNA, 15 bp, Homo sapiens
agctctatgctaggc

SEQ ID NO: 628288 - DNA, 15 bp, Homo sapiens
gctctatgctaggca

SEQ ID NO: 628289 - DNA, 15 bp, Homo sapiens
ctctatgctaggcac

SEQ ID NO: 628290 - DNA, 15 bp, Homo sapiens
tctatgctaggcact

SEQ ID NO: 628291 - DNA, 15 bp, Homo sapiens
ctatgctaggcactt

SEQ ID NO: 628292 - DNA, 15 bp, Homo sapiens
tatgctaggcacttt

SEQ ID NO: 628293 - DNA, 15 bp, Homo sapiens
atgctaggcactttt

SEQ ID NO: 628294 - DNA, 15 bp, Homo sapiens
tgctaggcacttttg

SEQ ID NO: 628295 - DNA, 15 bp, Homo sapiens
gctaggcacttttgc

SEQ ID NO: 628296 - DNA, 15 bp, Homo sapiens
ctaggcacttttgca

SEQ ID NO: 628297 - DNA, 15 bp, Homo sapiens
taggcacttttgcat

SEQ ID NO: 628298 - DNA, 15 bp, Homo sapiens
aggcacttttgcata

SEQ ID NO: 628299 - DNA, 15 bp, Homo sapiens
ggcacttttgcatat

SEQ ID NO: 628300 - DNA, 15 bp, Homo sapiens
gcacttttgcatata

SEQ ID NO: 628301 - DNA, 15 bp, Homo sapiens
cacttttgcatatat

SEQ ID NO: 628302 - DNA, 15 bp, Homo sapiens
acttttgcatatatt

SEQ ID NO: 628303 - DNA, 15 bp, Homo sapiens
cttttgcatatatta

SEQ ID NO: 628304 - DNA, 15 bp, Homo sapiens
ttttgcatatattat

SEQ ID NO: 628305 - DNA, 15 bp, Homo sapiens
tttgcatatattatt

SEQ ID NO: 628306 - DNA, 15 bp, Homo sapiens
ttgcatatattattt

SEQ ID NO: 628307 - DNA, 15 bp, Homo sapiens
tgcatatattatttt

SEQ ID NO: 628308 - DNA, 15 bp, Homo sapiens
gcatatattattttg

SEQ ID NO: 628309 - DNA, 15 bp, Homo sapiens
catatattattttgt

SEQ ID NO: 628310 - DNA, 15 bp, Homo sapiens
atatattattttgtt

SEQ ID NO: 628311 - DNA, 15 bp, Homo sapiens
tatattattttgttt

SEQ ID NO: 628312 - DNA, 15 bp, Homo sapiens
atattattttgttta

SEQ ID NO: 628313 - DNA, 15 bp, Homo sapiens
tattattttgtttaa

SEQ ID NO: 628314 - DNA, 15 bp, Homo sapiens
attattttgtttaat

SEQ ID NO: 628315 - DNA, 15 bp, Homo sapiens
ttattttgtttaatc

SEQ ID NO: 628316 - DNA, 15 bp, Homo sapiens
tattttgtttaatct

SEQ ID NO: 628317 - DNA, 15 bp, Homo sapiens
attttgtttaatctt

SEQ ID NO: 628318 - DNA, 15 bp, Homo sapiens
ttttgtttaatcttc

SEQ ID NO: 628319 - DNA, 15 bp, Homo sapiens
tttgtttaatcttca

SEQ ID NO: 628320 - DNA, 15 bp, Homo sapiens
ttgtttaatcttcac

SEQ ID NO: 628321 - DNA, 15 bp, Homo sapiens
tgtttaatcttcacc

SEQ ID NO: 628322 - DNA, 15 bp, Homo sapiens
gtttaatcttcacca

SEQ ID NO: 628323 - DNA, 15 bp, Homo sapiens
tttaatcttcaccac

SEQ ID NO: 628324 - DNA, 15 bp, Homo sapiens
ttaatcttcaccaca

SEQ ID NO: 628325 - DNA, 15 bp, Homo sapiens
taatcttcaccacac

SEQ ID NO: 628326 - DNA, 15 bp, Homo sapiens
aatcttcaccacact

SEQ ID NO: 628327 - DNA, 15 bp, Homo sapiens
atcttcaccacactc

SEQ ID NO: 628328 - DNA, 15 bp, Homo sapiens
tcttcaccacactct

SEQ ID NO: 628329 - DNA, 15 bp, Homo sapiens
cttcaccacactctg

SEQ ID NO: 628330 - DNA, 15 bp, Homo sapiens
ttcaccacactctgt

SEQ ID NO: 628331 - DNA, 15 bp, Homo sapiens
tcaccacactctgtg

SEQ ID NO: 628332 - DNA, 15 bp, Homo sapiens
caccacactctgtga

SEQ ID NO: 628333 - DNA, 15 bp, Homo sapiens
accacactctgtgac

SEQ ID NO: 628334 - DNA, 15 bp, Homo sapiens
ccacactctgtgaca

SEQ ID NO: 628335 - DNA, 15 bp, Homo sapiens
cacactctgtgacag

SEQ ID NO: 628336 - DNA, 15 bp, Homo sapiens
acactctgtgacaga

SEQ ID NO: 628337 - DNA, 15 bp, Homo sapiens
cactctgtgacagag

SEQ ID NO: 628338 - DNA, 15 bp, Homo sapiens
actctgtgacagaga

SEQ ID NO: 628339 - DNA, 15 bp, Homo sapiens
ctctgtgacagagat

SEQ ID NO: 628340 - DNA, 15 bp, Homo sapiens
tctgtgacagagata

SEQ ID NO: 628341 - DNA, 15 bp, Homo sapiens
ctgtgacagagatat

SEQ ID NO: 628342 - DNA, 15 bp, Homo sapiens
tgtgacagagatatt

SEQ ID NO: 628343 - DNA, 15 bp, Homo sapiens
gtgacagagatatta

SEQ ID NO: 628344 - DNA, 15 bp, Homo sapiens
tgacagagatattaa

SEQ ID NO: 628345 - DNA, 15 bp, Homo sapiens
gacagagatattaac

SEQ ID NO: 628346 - DNA, 15 bp, Homo sapiens
acagagatattaacc

SEQ ID NO: 628347 - DNA, 15 bp, Homo sapiens
cagagatattaacct

SEQ ID NO: 628348 - DNA, 15 bp, Homo sapiens
agagatattaacctc

SEQ ID NO: 628349 - DNA, 15 bp, Homo sapiens
gagatattaacctca

SEQ ID NO: 628350 - DNA, 15 bp, Homo sapiens
agatattaacctcat

SEQ ID NO: 628351 - DNA, 15 bp, Homo sapiens
gatattaacctcatt

SEQ ID NO: 628352 - DNA, 15 bp, Homo sapiens
atattaacctcattt

SEQ ID NO: 628353 - DNA, 15 bp, Homo sapiens
tattaacctcatttg

SEQ ID NO: 628354 - DNA, 15 bp, Homo sapiens
attaacctcatttga

SEQ ID NO: 628355 - DNA, 15 bp, Homo sapiens
ttaacctcatttgac

SEQ ID NO: 628356 - DNA, 15 bp, Homo sapiens
taacctcatttgacg

SEQ ID NO: 628357 - DNA, 15 bp, Homo sapiens
aacctcatttgacgt

SEQ ID NO: 628358 - DNA, 15 bp, Homo sapiens
acctcatttgacgta

SEQ ID NO: 628359 - DNA, 15 bp, Homo sapiens
cctcatttgacgtat

SEQ ID NO: 628360 - DNA, 15 bp, Homo sapiens
ctcatttgacgtata

SEQ ID NO: 628361 - DNA, 15 bp, Homo sapiens
tcatttgacgtataa

SEQ ID NO: 628362 - DNA, 15 bp, Homo sapiens
catttgacgtataag

SEQ ID NO: 628363 - DNA, 15 bp, Homo sapiens
atttgacgtataaga

SEQ ID NO: 628364 - DNA, 15 bp, Homo sapiens
tttgacgtataagaa

SEQ ID NO: 628365 - DNA, 15 bp, Homo sapiens
ttgacgtataagaaa

SEQ ID NO: 628366 - DNA, 15 bp, Homo sapiens
tgacgtataagaaac

SEQ ID NO: 628367 - DNA, 15 bp, Homo sapiens
gacgtataagaaacc

SEQ ID NO: 628368 - DNA, 15 bp, Homo sapiens
acgtataagaaacca

SEQ ID NO: 628369 - DNA, 15 bp, Homo sapiens
cgtataagaaaccaa

SEQ ID NO: 628370 - DNA, 15 bp, Homo sapiens
gtataagaaaccaag

SEQ ID NO: 628371 - DNA, 15 bp, Homo sapiens
tataagaaaccaagc

SEQ ID NO: 628372 - DNA, 15 bp, Homo sapiens
ataagaaaccaagca

SEQ ID NO: 628373 - DNA, 15 bp, Homo sapiens
taagaaaccaagcac

SEQ ID NO: 628374 - DNA, 15 bp, Homo sapiens
aagaaaccaagcacg

SEQ ID NO: 628375 - DNA, 15 bp, Homo sapiens
agaaaccaagcacgc

SEQ ID NO: 628376 - DNA, 15 bp, Homo sapiens
gaaaccaagcacgca

SEQ ID NO: 628377 - DNA, 15 bp, Homo sapiens
aaaccaagcacgcag

SEQ ID NO: 628378 - DNA, 15 bp, Homo sapiens
aaccaagcacgcagg

SEQ ID NO: 628379 - DNA, 15 bp, Homo sapiens
accaagcacgcaggg

SEQ ID NO: 628380 - DNA, 15 bp, Homo sapiens
ccaagcacgcaggga

SEQ ID NO: 628381 - DNA, 15 bp, Homo sapiens
caagcacgcagggac

SEQ ID NO: 628382 - DNA, 15 bp, Homo sapiens
aagcacgcagggacc

SEQ ID NO: 628383 - DNA, 15 bp, Homo sapiens
agcacgcagggacca

SEQ ID NO: 628384 - DNA, 15 bp, Homo sapiens
gcacgcagggaccaa

SEQ ID NO: 628385 - DNA, 15 bp, Homo sapiens
cacgcagggaccaag

SEQ ID NO: 628386 - DNA, 15 bp, Homo sapiens
acgcagggaccaagg

SEQ ID NO: 628387 - DNA, 15 bp, Homo sapiens
cgcagggaccaagga

SEQ ID NO: 628388 - DNA, 15 bp, Homo sapiens
gcagggaccaaggat

SEQ ID NO: 628389 - DNA, 15 bp, Homo sapiens
cagggaccaaggatc

SEQ ID NO: 628390 - DNA, 15 bp, Homo sapiens
agggaccaaggatct

SEQ ID NO: 628391 - DNA, 15 bp, Homo sapiens
gggaccaaggatctt

SEQ ID NO: 628392 - DNA, 15 bp, Homo sapiens
ggaccaaggatcttg

SEQ ID NO: 628393 - DNA, 15 bp, Homo sapiens
gaccaaggatcttgc

SEQ ID NO: 628394 - DNA, 15 bp, Homo sapiens
accaaggatcttgcc

SEQ ID NO: 628395 - DNA, 15 bp, Homo sapiens
ccaaggatcttgccc

SEQ ID NO: 628396 - DNA, 15 bp, Homo sapiens
caaggatcttgccca

SEQ ID NO: 628397 - DNA, 15 bp, Homo sapiens
aaggatcttgcccaa

SEQ ID NO: 628398 - DNA, 15 bp, Homo sapiens
aggatcttgcccaaa

SEQ ID NO: 628399 - DNA, 15 bp, Homo sapiens
ggatcttgcccaaag

SEQ ID NO: 628400 - DNA, 15 bp, Homo sapiens
gatcttgcccaaagt

SEQ ID NO: 628401 - DNA, 15 bp, Homo sapiens
atcttgcccaaagtc

SEQ ID NO: 628402 - DNA, 15 bp, Homo sapiens
tcttgcccaaagtca

SEQ ID NO: 628403 - DNA, 15 bp, Homo sapiens
cttgcccaaagtcaa

SEQ ID NO: 628404 - DNA, 15 bp, Homo sapiens
ttgcccaaagtcaaa

SEQ ID NO: 628405 - DNA, 15 bp, Homo sapiens
tgcccaaagtcaaaa

SEQ ID NO: 628406 - DNA, 15 bp, Homo sapiens
gcccaaagtcaaaat

SEQ ID NO: 628407 - DNA, 15 bp, Homo sapiens
cccaaagtcaaaatg

SEQ ID NO: 628408 - DNA, 15 bp, Homo sapiens
ccaaagtcaaaatgc

SEQ ID NO: 628409 - DNA, 15 bp, Homo sapiens
caaagtcaaaatgct

SEQ ID NO: 628410 - DNA, 15 bp, Homo sapiens
aaagtcaaaatgcta

SEQ ID NO: 628411 - DNA, 15 bp, Homo sapiens
aagtcaaaatgctat

SEQ ID NO: 628412 - DNA, 15 bp, Homo sapiens
agtcaaaatgctata

SEQ ID NO: 628413 - DNA, 15 bp, Homo sapiens
gtcaaaatgctataa

SEQ ID NO: 628414 - DNA, 15 bp, Homo sapiens
tcaaaatgctataat

SEQ ID NO: 628415 - DNA, 15 bp, Homo sapiens
caaaatgctataata

SEQ ID NO: 628416 - DNA, 15 bp, Homo sapiens
aaaatgctataatag

SEQ ID NO: 628417 - DNA, 15 bp, Homo sapiens
aaatgctataatagt

SEQ ID NO: 628418 - DNA, 15 bp, Homo sapiens
aatgctataatagtg

SEQ ID NO: 628419 - DNA, 15 bp, Homo sapiens
atgctataatagtgg

SEQ ID NO: 628420 - DNA, 15 bp, Homo sapiens
tgctataatagtggg

SEQ ID NO: 628421 - DNA, 15 bp, Homo sapiens
gctataatagtgggg

SEQ ID NO: 628422 - DNA, 15 bp, Homo sapiens
ctataatagtgggga

SEQ ID NO: 628423 - DNA, 15 bp, Homo sapiens
tataatagtggggaa

SEQ ID NO: 628424 - DNA, 15 bp, Homo sapiens
ataatagtggggaac

SEQ ID NO: 628425 - DNA, 15 bp, Homo sapiens
taatagtggggaacc

SEQ ID NO: 628426 - DNA, 15 bp, Homo sapiens
aatagtggggaaccc

SEQ ID NO: 628427 - DNA, 15 bp, Homo sapiens
atagtggggaaccca

SEQ ID NO: 628428 - DNA, 15 bp, Homo sapiens
tagtggggaacccag

SEQ ID NO: 628429 - DNA, 15 bp, Homo sapiens
agtggggaacccagg

SEQ ID NO: 628430 - DNA, 15 bp, Homo sapiens
gtggggaacccagga

SEQ ID NO: 628431 - DNA, 15 bp, Homo sapiens
tggggaacccaggat

SEQ ID NO: 628432 - DNA, 15 bp, Homo sapiens
ggggaacccaggatt

SEQ ID NO: 628433 - DNA, 15 bp, Homo sapiens
gggaacccaggattt

SEQ ID NO: 628434 - DNA, 15 bp, Homo sapiens
ggaacccaggatttg

SEQ ID NO: 628435 - DNA, 15 bp, Homo sapiens
gaacccaggatttga

SEQ ID NO: 628436 - DNA, 15 bp, Homo sapiens
aacccaggatttgaa

SEQ ID NO: 628437 - DNA, 15 bp, Homo sapiens
acccaggatttgaac

SEQ ID NO: 628438 - DNA, 15 bp, Homo sapiens
cccaggatttgaact

SEQ ID NO: 628439 - DNA, 15 bp, Homo sapiens
ccaggatttgaactc

SEQ ID NO: 628440 - DNA, 15 bp, Homo sapiens
caggatttgaactca

SEQ ID NO: 628441 - DNA, 15 bp, Homo sapiens
aggatttgaactcag

SEQ ID NO: 628442 - DNA, 15 bp, Homo sapiens
ggatttgaactcagt

SEQ ID NO: 628443 - DNA, 15 bp, Homo sapiens
gatttgaactcagtc

SEQ ID NO: 628444 - DNA, 15 bp, Homo sapiens
atttgaactcagtcc

SEQ ID NO: 628445 - DNA, 15 bp, Homo sapiens
tttgaactcagtcca

SEQ ID NO: 628446 - DNA, 15 bp, Homo sapiens
ttgaactcagtccaa

SEQ ID NO: 628447 - DNA, 15 bp, Homo sapiens
tgaactcagtccaaa

SEQ ID NO: 628448 - DNA, 15 bp, Homo sapiens
gaactcagtccaaag

SEQ ID NO: 628449 - DNA, 15 bp, Homo sapiens
aactcagtccaaagc

SEQ ID NO: 628450 - DNA, 15 bp, Homo sapiens
actcagtccaaagcc

SEQ ID NO: 628451 - DNA, 15 bp, Homo sapiens
ctcagtccaaagccc

SEQ ID NO: 628452 - DNA, 15 bp, Homo sapiens
tcagtccaaagccca

SEQ ID NO: 628453 - DNA, 15 bp, Homo sapiens
cagtccaaagcccat

SEQ ID NO: 628454 - DNA, 15 bp, Homo sapiens
agtccaaagcccata

SEQ ID NO: 628455 - DNA, 15 bp, Homo sapiens
gtccaaagcccatac

SEQ ID NO: 628456 - DNA, 15 bp, Homo sapiens
tccaaagcccataca

SEQ ID NO: 628457 - DNA, 15 bp, Homo sapiens
ccaaagcccatacat

SEQ ID NO: 628458 - DNA, 15 bp, Homo sapiens
caaagcccatacatc

SEQ ID NO: 628459 - DNA, 15 bp, Homo sapiens
aaagcccatacatcc

SEQ ID NO: 628460 - DNA, 15 bp, Homo sapiens
aagcccatacatccc

SEQ ID NO: 628461 - DNA, 15 bp, Homo sapiens
agcccatacatccct

SEQ ID NO: 628462 - DNA, 15 bp, Homo sapiens
gcccatacatccctt

SEQ ID NO: 628463 - DNA, 15 bp, Homo sapiens
cccatacatcccttt

SEQ ID NO: 628464 - DNA, 15 bp, Homo sapiens
ccatacatccctttt

SEQ ID NO: 628465 - DNA, 15 bp, Homo sapiens
catacatcccttttc

SEQ ID NO: 628466 - DNA, 15 bp, Homo sapiens
atacatcccttttcc

SEQ ID NO: 628467 - DNA, 15 bp, Homo sapiens
tacatcccttttcca

SEQ ID NO: 628468 - DNA, 15 bp, Homo sapiens
acatcccttttccat

SEQ ID NO: 628469 - DNA, 15 bp, Homo sapiens
catcccttttccatt

SEQ ID NO: 628470 - DNA, 15 bp, Homo sapiens
atcccttttccatta

SEQ ID NO: 628471 - DNA, 15 bp, Homo sapiens
tcccttttccattac

SEQ ID NO: 628472 - DNA, 15 bp, Homo sapiens
cccttttccattaca

SEQ ID NO: 628473 - DNA, 15 bp, Homo sapiens
ccttttccattacag

SEQ ID NO: 628474 - DNA, 15 bp, Homo sapiens
cttttccattacagc

SEQ ID NO: 628475 - DNA, 15 bp, Homo sapiens
ttttccattacagcc

SEQ ID NO: 628476 - DNA, 15 bp, Homo sapiens
tttccattacagcct

SEQ ID NO: 628477 - DNA, 15 bp, Homo sapiens
ttccattacagcctg

SEQ ID NO: 628478 - DNA, 15 bp, Homo sapiens
tccattacagcctgc

SEQ ID NO: 628479 - DNA, 15 bp, Homo sapiens
ccattacagcctgct

SEQ ID NO: 628480 - DNA, 15 bp, Homo sapiens
cattacagcctgctg

SEQ ID NO: 628481 - DNA, 15 bp, Homo sapiens
attacagcctgctgc

SEQ ID NO: 628482 - DNA, 15 bp, Homo sapiens
ttacagcctgctgcc

SEQ ID NO: 628483 - DNA, 15 bp, Homo sapiens
tacagcctgctgcct

SEQ ID NO: 628484 - DNA, 15 bp, Homo sapiens
acagcctgctgcctc

SEQ ID NO: 628485 - DNA, 15 bp, Homo sapiens
cagcctgctgcctct

SEQ ID NO: 628486 - DNA, 15 bp, Homo sapiens
agcctgctgcctctc

SEQ ID NO: 628487 - DNA, 15 bp, Homo sapiens
gcctgctgcctctcc

SEQ ID NO: 628488 - DNA, 15 bp, Homo sapiens
cctgctgcctctcca

SEQ ID NO: 628489 - DNA, 15 bp, Homo sapiens
ctgctgcctctccag

SEQ ID NO: 628490 - DNA, 15 bp, Homo sapiens
tgctgcctctccagg

SEQ ID NO: 628491 - DNA, 15 bp, Homo sapiens
gctgcctctccagga

SEQ ID NO: 628492 - DNA, 15 bp, Homo sapiens
ctgcctctccaggat

SEQ ID NO: 628493 - DNA, 15 bp, Homo sapiens
tgcctctccaggata

SEQ ID NO: 628494 - DNA, 15 bp, Homo sapiens
gcctctccaggataa

SEQ ID NO: 628495 - DNA, 15 bp, Homo sapiens
cctctccaggataaa

SEQ ID NO: 628496 - DNA, 15 bp, Homo sapiens
ctctccaggataaag

SEQ ID NO: 628497 - DNA, 15 bp, Homo sapiens
tctccaggataaaga

SEQ ID NO: 628498 - DNA, 15 bp, Homo sapiens
ctccaggataaagag

SEQ ID NO: 628499 - DNA, 15 bp, Homo sapiens
tccaggataaagagg

SEQ ID NO: 628500 - DNA, 15 bp, Homo sapiens
ccaggataaagaggg

SEQ ID NO: 628501 - DNA, 15 bp, Homo sapiens
caggataaagaggga

SEQ ID NO: 628502 - DNA, 15 bp, Homo sapiens
aggataaagagggaa

SEQ ID NO: 628503 - DNA, 15 bp, Homo sapiens
ggataaagagggaag

SEQ ID NO: 628504 - DNA, 15 bp, Homo sapiens
gataaagagggaaga

SEQ ID NO: 628505 - DNA, 15 bp, Homo sapiens
ataaagagggaagac

SEQ ID NO: 628506 - DNA, 15 bp, Homo sapiens
taaagagggaagaca

SEQ ID NO: 628507 - DNA, 15 bp, Homo sapiens
aaagagggaagacag

SEQ ID NO: 628508 - DNA, 15 bp, Homo sapiens
aagagggaagacagg

SEQ ID NO: 628509 - DNA, 15 bp, Homo sapiens
agagggaagacaggg

SEQ ID NO: 628510 - DNA, 15 bp, Homo sapiens
gagggaagacaggga

SEQ ID NO: 628511 - DNA, 15 bp, Homo sapiens
agggaagacagggaa

SEQ ID NO: 628512 - DNA, 15 bp, Homo sapiens
gggaagacagggaaa

SEQ ID NO: 628513 - DNA, 15 bp, Homo sapiens
ggaagacagggaaag

SEQ ID NO: 628514 - DNA, 15 bp, Homo sapiens
gaagacagggaaagt

SEQ ID NO: 628515 - DNA, 15 bp, Homo sapiens
aagacagggaaagta

SEQ ID NO: 628516 - DNA, 15 bp, Homo sapiens
agacagggaaagtag

SEQ ID NO: 628517 - DNA, 15 bp, Homo sapiens
gacagggaaagtagg

SEQ ID NO: 628518 - DNA, 15 bp, Homo sapiens
acagggaaagtaggg

SEQ ID NO: 628519 - DNA, 15 bp, Homo sapiens
cagggaaagtaggga

SEQ ID NO: 628520 - DNA, 15 bp, Homo sapiens
agggaaagtagggaa

SEQ ID NO: 628521 - DNA, 15 bp, Homo sapiens
gggaaagtagggaag

SEQ ID NO: 628522 - DNA, 15 bp, Homo sapiens
ggaaagtagggaagt

SEQ ID NO: 628523 - DNA, 15 bp, Homo sapiens
gaaagtagggaagta

SEQ ID NO: 628524 - DNA, 15 bp, Homo sapiens
aaagtagggaagtat

SEQ ID NO: 628525 - DNA, 15 bp, Homo sapiens
aagtagggaagtatg

SEQ ID NO: 628526 - DNA, 15 bp, Homo sapiens
agtagggaagtatgg

SEQ ID NO: 628527 - DNA, 15 bp, Homo sapiens
gtagggaagtatgga

SEQ ID NO: 628528 - DNA, 15 bp, Homo sapiens
tagggaagtatggac

SEQ ID NO: 628529 - DNA, 15 bp, Homo sapiens
agggaagtatggact

SEQ ID NO: 628530 - DNA, 15 bp, Homo sapiens
gggaagtatggactt

SEQ ID NO: 628531 - DNA, 15 bp, Homo sapiens
ggaagtatggacttc

SEQ ID NO: 628532 - DNA, 15 bp, Homo sapiens
gaagtatggacttca

SEQ ID NO: 628533 - DNA, 15 bp, Homo sapiens
aagtatggacttcac

SEQ ID NO: 628534 - DNA, 15 bp, Homo sapiens
agtatggacttcaca

SEQ ID NO: 628535 - DNA, 15 bp, Homo sapiens
gtatggacttcacaa

SEQ ID NO: 628536 - DNA, 15 bp, Homo sapiens
tatggacttcacaaa

SEQ ID NO: 628537 - DNA, 15 bp, Homo sapiens
atggacttcacaaat

SEQ ID NO: 628538 - DNA, 15 bp, Homo sapiens
tggacttcacaaatt

SEQ ID NO: 628539 - DNA, 15 bp, Homo sapiens
ggacttcacaaattc

SEQ ID NO: 628540 - DNA, 15 bp, Homo sapiens
gacttcacaaattca

SEQ ID NO: 628541 - DNA, 15 bp, Homo sapiens
acttcacaaattcat

SEQ ID NO: 628542 - DNA, 15 bp, Homo sapiens
cttcacaaattcata

SEQ ID NO: 628543 - DNA, 15 bp, Homo sapiens
ttcacaaattcatac

SEQ ID NO: 628544 - DNA, 15 bp, Homo sapiens
tcacaaattcataca

SEQ ID NO: 628545 - DNA, 15 bp, Homo sapiens
cacaaattcatacat

SEQ ID NO: 628546 - DNA, 15 bp, Homo sapiens
acaaattcatacatg

SEQ ID NO: 628547 - DNA, 15 bp, Homo sapiens
caaattcatacatgc

SEQ ID NO: 628548 - DNA, 15 bp, Homo sapiens
aaattcatacatgct

SEQ ID NO: 628549 - DNA, 15 bp, Homo sapiens
aattcatacatgcta

SEQ ID NO: 628550 - DNA, 15 bp, Homo sapiens
attcatacatgctaa

SEQ ID NO: 628551 - DNA, 15 bp, Homo sapiens
ttcatacatgctaaa

SEQ ID NO: 628552 - DNA, 15 bp, Homo sapiens
tcatacatgctaaaa

SEQ ID NO: 628553 - DNA, 15 bp, Homo sapiens
catacatgctaaaat

SEQ ID NO: 628554 - DNA, 15 bp, Homo sapiens
atacatgctaaaatt

SEQ ID NO: 628555 - DNA, 15 bp, Homo sapiens
tacatgctaaaatta

SEQ ID NO: 628556 - DNA, 15 bp, Homo sapiens
acatgctaaaattat

SEQ ID NO: 628557 - DNA, 15 bp, Homo sapiens
catgctaaaattata

SEQ ID NO: 628558 - DNA, 15 bp, Homo sapiens
atgctaaaattataa

SEQ ID NO: 628559 - DNA, 15 bp, Homo sapiens
tgctaaaattataac

SEQ ID NO: 628560 - DNA, 15 bp, Homo sapiens
gctaaaattataaca

SEQ ID NO: 628561 - DNA, 15 bp, Homo sapiens
ctaaaattataacag

SEQ ID NO: 628562 - DNA, 15 bp, Homo sapiens
taaaattataacagc

SEQ ID NO: 628563 - DNA, 15 bp, Homo sapiens
aaaattataacagct

SEQ ID NO: 628564 - DNA, 15 bp, Homo sapiens
aaattataacagcta

SEQ ID NO: 628565 - DNA, 15 bp, Homo sapiens
aattataacagctac

SEQ ID NO: 628566 - DNA, 15 bp, Homo sapiens
attataacagctact

SEQ ID NO: 628567 - DNA, 15 bp, Homo sapiens
ttataacagctactg

SEQ ID NO: 628568 - DNA, 15 bp, Homo sapiens
tataacagctactgt

SEQ ID NO: 628569 - DNA, 15 bp, Homo sapiens
ataacagctactgtt

SEQ ID NO: 628570 - DNA, 15 bp, Homo sapiens
taacagctactgttt

SEQ ID NO: 628571 - DNA, 15 bp, Homo sapiens
aacagctactgtttc

SEQ ID NO: 628572 - DNA, 15 bp, Homo sapiens
acagctactgtttct

SEQ ID NO: 628573 - DNA, 15 bp, Homo sapiens
cagctactgtttctt

SEQ ID NO: 628574 - DNA, 15 bp, Homo sapiens
agctactgtttcttg

SEQ ID NO: 628575 - DNA, 15 bp, Homo sapiens
gctactgtttcttga

SEQ ID NO: 628576 - DNA, 15 bp, Homo sapiens
ctactgtttcttgag

SEQ ID NO: 628577 - DNA, 15 bp, Homo sapiens
tactgtttcttgagc

SEQ ID NO: 628578 - DNA, 15 bp, Homo sapiens
actgtttcttgagca

SEQ ID NO: 628579 - DNA, 15 bp, Homo sapiens
ctgtttcttgagcac

SEQ ID NO: 628580 - DNA, 15 bp, Homo sapiens
tgtttcttgagcacc

SEQ ID NO: 628581 - DNA, 15 bp, Homo sapiens
gtttcttgagcacct

SEQ ID NO: 628582 - DNA, 15 bp, Homo sapiens
tttcttgagcaccta

SEQ ID NO: 628583 - DNA, 15 bp, Homo sapiens
ttcttgagcacctat

SEQ ID NO: 628584 - DNA, 15 bp, Homo sapiens
tcttgagcacctatt

SEQ ID NO: 628585 - DNA, 15 bp, Homo sapiens
cttgagcacctatta

SEQ ID NO: 628586 - DNA, 15 bp, Homo sapiens
ttgagcacctattat

SEQ ID NO: 628587 - DNA, 15 bp, Homo sapiens
tgagcacctattatg

SEQ ID NO: 628588 - DNA, 15 bp, Homo sapiens
gagcacctattatgt

SEQ ID NO: 628589 - DNA, 15 bp, Homo sapiens
agcacctattatgtg

SEQ ID NO: 628590 - DNA, 15 bp, Homo sapiens
gcacctattatgtgg

SEQ ID NO: 628591 - DNA, 15 bp, Homo sapiens
cacctattatgtggc

SEQ ID NO: 628592 - DNA, 15 bp, Homo sapiens
acctattatgtggca

SEQ ID NO: 628593 - DNA, 15 bp, Homo sapiens
cctattatgtggcaa

SEQ ID NO: 628594 - DNA, 15 bp, Homo sapiens
ctattatgtggcaaa

SEQ ID NO: 628595 - DNA, 15 bp, Homo sapiens
tattatgtggcaaat

SEQ ID NO: 628596 - DNA, 15 bp, Homo sapiens
attatgtggcaaata

SEQ ID NO: 628597 - DNA, 15 bp, Homo sapiens
ttatgtggcaaatac

SEQ ID NO: 628598 - DNA, 15 bp, Homo sapiens
tatgtggcaaatact

SEQ ID NO: 628599 - DNA, 15 bp, Homo sapiens
atgtggcaaatacta

SEQ ID NO: 628600 - DNA, 15 bp, Homo sapiens
tgtggcaaatactat

SEQ ID NO: 628601 - DNA, 15 bp, Homo sapiens
gtggcaaatactata

SEQ ID NO: 628602 - DNA, 15 bp, Homo sapiens
tggcaaatactatat

SEQ ID NO: 628603 - DNA, 15 bp, Homo sapiens
ggcaaatactatatg

SEQ ID NO: 628604 - DNA, 15 bp, Homo sapiens
gcaaatactatatga

SEQ ID NO: 628605 - DNA, 15 bp, Homo sapiens
caaatactatatgag

SEQ ID NO: 628606 - DNA, 15 bp, Homo sapiens
aaatactatatgagg

SEQ ID NO: 628607 - DNA, 15 bp, Homo sapiens
aatactatatgaggt

SEQ ID NO: 628608 - DNA, 15 bp, Homo sapiens
atactatatgaggta

SEQ ID NO: 628609 - DNA, 15 bp, Homo sapiens
tactatatgaggtac

SEQ ID NO: 628610 - DNA, 15 bp, Homo sapiens
actatatgaggtact

SEQ ID NO: 628611 - DNA, 15 bp, Homo sapiens
ctatatgaggtactt

SEQ ID NO: 628612 - DNA, 15 bp, Homo sapiens
tatatgaggtacttt

SEQ ID NO: 628613 - DNA, 15 bp, Homo sapiens
atatgaggtacttta

SEQ ID NO: 628614 - DNA, 15 bp, Homo sapiens
tatgaggtactttac

SEQ ID NO: 628615 - DNA, 15 bp, Homo sapiens
atgaggtactttaca

SEQ ID NO: 628616 - DNA, 15 bp, Homo sapiens
tgaggtactttacat

SEQ ID NO: 628617 - DNA, 15 bp, Homo sapiens
gaggtactttacata

SEQ ID NO: 628618 - DNA, 15 bp, Homo sapiens
aggtactttacataa

SEQ ID NO: 628619 - DNA, 15 bp, Homo sapiens
ggtactttacataaa

SEQ ID NO: 628620 - DNA, 15 bp, Homo sapiens
gtactttacataaat

SEQ ID NO: 628621 - DNA, 15 bp, Homo sapiens
tactttacataaatg

SEQ ID NO: 628622 - DNA, 15 bp, Homo sapiens
actttacataaatga

SEQ ID NO: 628623 - DNA, 15 bp, Homo sapiens
ctttacataaatgat

SEQ ID NO: 628624 - DNA, 15 bp, Homo sapiens
tttacataaatgatt

SEQ ID NO: 628625 - DNA, 15 bp, Homo sapiens
ttacataaatgattt

SEQ ID NO: 628626 - DNA, 15 bp, Homo sapiens
tacataaatgatttt

SEQ ID NO: 628627 - DNA, 15 bp, Homo sapiens
acataaatgattttt

SEQ ID NO: 628628 - DNA, 15 bp, Homo sapiens
cataaatgattttta

SEQ ID NO: 628629 - DNA, 15 bp, Homo sapiens
ataaatgatttttag

SEQ ID NO: 628630 - DNA, 15 bp, Homo sapiens
taaatgatttttaga

SEQ ID NO: 628631 - DNA, 15 bp, Homo sapiens
aaatgatttttagaa

SEQ ID NO: 628632 - DNA, 15 bp, Homo sapiens
aatgatttttagaat

SEQ ID NO: 628633 - DNA, 15 bp, Homo sapiens
atgatttttagaatt

SEQ ID NO: 628634 - DNA, 15 bp, Homo sapiens
tgatttttagaattc

SEQ ID NO: 628635 - DNA, 15 bp, Homo sapiens
gatttttagaattct

SEQ ID NO: 628636 - DNA, 15 bp, Homo sapiens
atttttagaattctc

SEQ ID NO: 628637 - DNA, 15 bp, Homo sapiens
tttttagaattctcg

SEQ ID NO: 628638 - DNA, 15 bp, Homo sapiens
ttttagaattctcgt

SEQ ID NO: 628639 - DNA, 15 bp, Homo sapiens
tttagaattctcgta

SEQ ID NO: 628640 - DNA, 15 bp, Homo sapiens
ttagaattctcgtaa

SEQ ID NO: 628641 - DNA, 15 bp, Homo sapiens
tagaattctcgtaaa

SEQ ID NO: 628642 - DNA, 15 bp, Homo sapiens
agaattctcgtaaaa

SEQ ID NO: 628643 - DNA, 15 bp, Homo sapiens
gaattctcgtaaaac

SEQ ID NO: 628644 - DNA, 15 bp, Homo sapiens
aattctcgtaaaact

SEQ ID NO: 628645 - DNA, 15 bp, Homo sapiens
attctcgtaaaactc

SEQ ID NO: 628646 - DNA, 15 bp, Homo sapiens
ttctcgtaaaactct

SEQ ID NO: 628647 - DNA, 15 bp, Homo sapiens
tctcgtaaaactctt

SEQ ID NO: 628648 - DNA, 15 bp, Homo sapiens
ctcgtaaaactcttc

SEQ ID NO: 628649 - DNA, 15 bp, Homo sapiens
tcgtaaaactcttca

SEQ ID NO: 628650 - DNA, 15 bp, Homo sapiens
cgtaaaactcttcat

SEQ ID NO: 628651 - DNA, 15 bp, Homo sapiens
gtaaaactcttcatg

SEQ ID NO: 628652 - DNA, 15 bp, Homo sapiens
taaaactcttcatgg

SEQ ID NO: 628653 - DNA, 15 bp, Homo sapiens
aaaactcttcatggc

SEQ ID NO: 628654 - DNA, 15 bp, Homo sapiens
aaactcttcatggca

SEQ ID NO: 628655 - DNA, 15 bp, Homo sapiens
aactcttcatggcag

SEQ ID NO: 628656 - DNA, 15 bp, Homo sapiens
actcttcatggcagt

SEQ ID NO: 628657 - DNA, 15 bp, Homo sapiens
ctcttcatggcagta

SEQ ID NO: 628658 - DNA, 15 bp, Homo sapiens
tcttcatggcagtag

SEQ ID NO: 628659 - DNA, 15 bp, Homo sapiens
cttcatggcagtagt

SEQ ID NO: 628660 - DNA, 15 bp, Homo sapiens
ttcatggcagtagtt

SEQ ID NO: 628661 - DNA, 15 bp, Homo sapiens
tcatggcagtagtta

SEQ ID NO: 628662 - DNA, 15 bp, Homo sapiens
catggcagtagttat

SEQ ID NO: 628663 - DNA, 15 bp, Homo sapiens
atggcagtagttatt

SEQ ID NO: 628664 - DNA, 15 bp, Homo sapiens
tggcagtagttatta

SEQ ID NO: 628665 - DNA, 15 bp, Homo sapiens
ggcagtagttattat

SEQ ID NO: 628666 - DNA, 15 bp, Homo sapiens
gcagtagttattatt

SEQ ID NO: 628667 - DNA, 15 bp, Homo sapiens
cagtagttattattc

SEQ ID NO: 628668 - DNA, 15 bp, Homo sapiens
agtagttattattct

SEQ ID NO: 628669 - DNA, 15 bp, Homo sapiens
gtagttattattctc

SEQ ID NO: 628670 - DNA, 15 bp, Homo sapiens
tagttattattctct

SEQ ID NO: 628671 - DNA, 15 bp, Homo sapiens
agttattattctctc

SEQ ID NO: 628672 - DNA, 15 bp, Homo sapiens
gttattattctctct

SEQ ID NO: 628673 - DNA, 15 bp, Homo sapiens
ttattattctctctc

SEQ ID NO: 628674 - DNA, 15 bp, Homo sapiens
tattattctctctct

SEQ ID NO: 628675 - DNA, 15 bp, Homo sapiens
attattctctctctc

SEQ ID NO: 628676 - DNA, 15 bp, Homo sapiens
ttattctctctctct

SEQ ID NO: 628677 - DNA, 15 bp, Homo sapiens
tattctctctctctc

SEQ ID NO: 628678 - DNA, 15 bp, Homo sapiens
attctctctctctct

SEQ ID NO: 628679 - DNA, 15 bp, Homo sapiens
ttctctctctctctc

SEQ ID NO: 628680 - DNA, 15 bp, Homo sapiens
tctctctctctctct

SEQ ID NO: 628681 - DNA, 15 bp, Homo sapiens
ctctctctctctctt

SEQ ID NO: 628682 - DNA, 15 bp, Homo sapiens
tctctctctctcttt

SEQ ID NO: 628683 - DNA, 15 bp, Homo sapiens
ctctctctctctttt

SEQ ID NO: 628684 - DNA, 15 bp, Homo sapiens
tctctctctcttttt

SEQ ID NO: 628685 - DNA, 15 bp, Homo sapiens
ctctctctctttttc

SEQ ID NO: 628686 - DNA, 15 bp, Homo sapiens
tctctctctttttct

SEQ ID NO: 628687 - DNA, 15 bp, Homo sapiens
ctctctctttttctt

SEQ ID NO: 628688 - DNA, 15 bp, Homo sapiens
tctctctttttcttt

SEQ ID NO: 628689 - DNA, 15 bp, Homo sapiens
ctctctttttctttt

SEQ ID NO: 628690 - DNA, 15 bp, Homo sapiens
tctctttttcttttt

SEQ ID NO: 628691 - DNA, 15 bp, Homo sapiens
ctctttttctttttt

SEQ ID NO: 628692 - DNA, 15 bp, Homo sapiens
tctttttcttttttc

SEQ ID NO: 628693 - DNA, 15 bp, Homo sapiens
ctttttcttttttct

SEQ ID NO: 628694 - DNA, 15 bp, Homo sapiens
tttttcttttttctt

SEQ ID NO: 628695 - DNA, 15 bp, Homo sapiens
ttttcttttttcttg

SEQ ID NO: 628696 - DNA, 15 bp, Homo sapiens
tttcttttttcttga

SEQ ID NO: 628697 - DNA, 15 bp, Homo sapiens
ttcttttttcttgag

SEQ ID NO: 628698 - DNA, 15 bp, Homo sapiens
tcttttttcttgaga

SEQ ID NO: 628699 - DNA, 15 bp, Homo sapiens
cttttttcttgagac

SEQ ID NO: 628700 - DNA, 15 bp, Homo sapiens
ttttttcttgagaca

SEQ ID NO: 628701 - DNA, 15 bp, Homo sapiens
tttttcttgagacag

SEQ ID NO: 628702 - DNA, 15 bp, Homo sapiens
ttttcttgagacagg

SEQ ID NO: 628703 - DNA, 15 bp, Homo sapiens
tttcttgagacagga

SEQ ID NO: 628704 - DNA, 15 bp, Homo sapiens
ttcttgagacaggat

SEQ ID NO: 628705 - DNA, 15 bp, Homo sapiens
tcttgagacaggata

SEQ ID NO: 628706 - DNA, 15 bp, Homo sapiens
cttgagacaggatat

SEQ ID NO: 628707 - DNA, 15 bp, Homo sapiens
ttgagacaggatatt

SEQ ID NO: 628708 - DNA, 15 bp, Homo sapiens
tgagacaggatattt

SEQ ID NO: 628709 - DNA, 15 bp, Homo sapiens
gagacaggatatttc

SEQ ID NO: 628710 - DNA, 15 bp, Homo sapiens
agacaggatatttct

SEQ ID NO: 628711 - DNA, 15 bp, Homo sapiens
gacaggatatttctc

SEQ ID NO: 628712 - DNA, 15 bp, Homo sapiens
acaggatatttctct

SEQ ID NO: 628713 - DNA, 15 bp, Homo sapiens
caggatatttctctg

SEQ ID NO: 628714 - DNA, 15 bp, Homo sapiens
aggatatttctctgt

SEQ ID NO: 628715 - DNA, 15 bp, Homo sapiens
ggatatttctctgtt

SEQ ID NO: 628716 - DNA, 15 bp, Homo sapiens
gatatttctctgttg

SEQ ID NO: 628717 - DNA, 15 bp, Homo sapiens
atatttctctgttgc

SEQ ID NO: 628718 - DNA, 15 bp, Homo sapiens
tatttctctgttgcc

SEQ ID NO: 628719 - DNA, 15 bp, Homo sapiens
atttctctgttgccc

SEQ ID NO: 628720 - DNA, 15 bp, Homo sapiens
tttctctgttgccca

SEQ ID NO: 628721 - DNA, 15 bp, Homo sapiens
ttctctgttgcccag

SEQ ID NO: 628722 - DNA, 15 bp, Homo sapiens
tctctgttgcccagg

SEQ ID NO: 628723 - DNA, 15 bp, Homo sapiens
tggagtgcagtggca

SEQ ID NO: 628724 - DNA, 15 bp, Homo sapiens
ggagtgcagtggcac

SEQ ID NO: 628725 - DNA, 15 bp, Homo sapiens
gagtgcagtggcaca

SEQ ID NO: 628726 - DNA, 15 bp, Homo sapiens
agtgcagtggcacag

SEQ ID NO: 628727 - DNA, 15 bp, Homo sapiens
gtgcagtggcacagt

SEQ ID NO: 628728 - DNA, 15 bp, Homo sapiens
tgcagtggcacagtc

SEQ ID NO: 628729 - DNA, 15 bp, Homo sapiens
gcagtggcacagtct

SEQ ID NO: 628730 - DNA, 15 bp, Homo sapiens
cagtggcacagtctt

SEQ ID NO: 628731 - DNA, 15 bp, Homo sapiens
agtggcacagtcttg

SEQ ID NO: 628732 - DNA, 15 bp, Homo sapiens
gtggcacagtcttgg

SEQ ID NO: 628733 - DNA, 15 bp, Homo sapiens
tggcacagtcttggc

SEQ ID NO: 628734 - DNA, 15 bp, Homo sapiens
ggcacagtcttggct

SEQ ID NO: 628735 - DNA, 15 bp, Homo sapiens
gcacagtcttggctc

SEQ ID NO: 628736 - DNA, 15 bp, Homo sapiens
cacagtcttggctca

SEQ ID NO: 628737 - DNA, 15 bp, Homo sapiens
acagtcttggctcac

SEQ ID NO: 628738 - DNA, 15 bp, Homo sapiens
cagtcttggctcact

SEQ ID NO: 628739 - DNA, 15 bp, Homo sapiens
agtcttggctcactg

SEQ ID NO: 628740 - DNA, 15 bp, Homo sapiens
gtcttggctcactgc

SEQ ID NO: 628741 - DNA, 15 bp, Homo sapiens
gctcactgcagcctg

SEQ ID NO: 628742 - DNA, 15 bp, Homo sapiens
ctcactgcagcctgg

SEQ ID NO: 628743 - DNA, 15 bp, Homo sapiens
tcactgcagcctgga

SEQ ID NO: 628744 - DNA, 15 bp, Homo sapiens
cactgcagcctggac

SEQ ID NO: 628745 - DNA, 15 bp, Homo sapiens
actgcagcctggacc

SEQ ID NO: 628746 - DNA, 15 bp, Homo sapiens
ctgcagcctggacct

SEQ ID NO: 628747 - DNA, 15 bp, Homo sapiens
tgcagcctggacctc

SEQ ID NO: 628748 - DNA, 15 bp, Homo sapiens
gcagcctggacctcc

SEQ ID NO: 628749 - DNA, 15 bp, Homo sapiens
cagcctggacctcct

SEQ ID NO: 628750 - DNA, 15 bp, Homo sapiens
agcctggacctcctg

SEQ ID NO: 628751 - DNA, 15 bp, Homo sapiens
gcctggacctcctgg

SEQ ID NO: 628752 - DNA, 15 bp, Homo sapiens
cctggacctcctggg

SEQ ID NO: 628753 - DNA, 15 bp, Homo sapiens
ctggacctcctgggc

SEQ ID NO: 628754 - DNA, 15 bp, Homo sapiens
tggacctcctgggct

SEQ ID NO: 628755 - DNA, 15 bp, Homo sapiens
ggacctcctgggctc

SEQ ID NO: 628756 - DNA, 15 bp, Homo sapiens
gacctcctgggctca

SEQ ID NO: 628757 - DNA, 15 bp, Homo sapiens
acctcctgggctcaa

SEQ ID NO: 628758 - DNA, 15 bp, Homo sapiens
cctcctgggctcaag

SEQ ID NO: 628759 - DNA, 15 bp, Homo sapiens
ctcctgggctcaagc

SEQ ID NO: 628760 - DNA, 15 bp, Homo sapiens
tcctgggctcaagcc

SEQ ID NO: 628761 - DNA, 15 bp, Homo sapiens
cctgggctcaagcca

SEQ ID NO: 628762 - DNA, 15 bp, Homo sapiens
ctgggctcaagccat

SEQ ID NO: 628763 - DNA, 15 bp, Homo sapiens
tgggctcaagccatc

SEQ ID NO: 628764 - DNA, 15 bp, Homo sapiens
gggctcaagccatcc

SEQ ID NO: 628765 - DNA, 15 bp, Homo sapiens
ggctcaagccatcct

SEQ ID NO: 628766 - DNA, 15 bp, Homo sapiens
gctcaagccatcctc

SEQ ID NO: 628767 - DNA, 15 bp, Homo sapiens
ctcaagccatcctcc

SEQ ID NO: 628768 - DNA, 15 bp, Homo sapiens
tcaagccatcctccc

SEQ ID NO: 628769 - DNA, 15 bp, Homo sapiens
caagccatcctccca

SEQ ID NO: 628770 - DNA, 15 bp, Homo sapiens
aagccatcctcccac

SEQ ID NO: 628771 - DNA, 15 bp, Homo sapiens
agccatcctcccacc

SEQ ID NO: 628772 - DNA, 15 bp, Homo sapiens
gccatcctcccacct

SEQ ID NO: 628773 - DNA, 15 bp, Homo sapiens
ccatcctcccacctc

SEQ ID NO: 628774 - DNA, 15 bp, Homo sapiens
catcctcccacctca

SEQ ID NO: 628775 - DNA, 15 bp, Homo sapiens
atcctcccacctcag

SEQ ID NO: 628776 - DNA, 15 bp, Homo sapiens
tcctcccacctcagc

SEQ ID NO: 628777 - DNA, 15 bp, Homo sapiens
cctcccacctcagcc

SEQ ID NO: 628778 - DNA, 15 bp, Homo sapiens
ctcccacctcagcct

SEQ ID NO: 628779 - DNA, 15 bp, Homo sapiens
tcccacctcagcctc

SEQ ID NO: 628780 - DNA, 15 bp, Homo sapiens
cccacctcagcctcc

SEQ ID NO: 628781 - DNA, 15 bp, Homo sapiens
ccacctcagcctccc

SEQ ID NO: 628782 - DNA, 15 bp, Homo sapiens
cacctcagcctccca

SEQ ID NO: 628783 - DNA, 15 bp, Homo sapiens
acctcagcctcccaa

SEQ ID NO: 628784 - DNA, 15 bp, Homo sapiens
cctcagcctcccaag

SEQ ID NO: 628785 - DNA, 15 bp, Homo sapiens
ctcagcctcccaagt

SEQ ID NO: 628786 - DNA, 15 bp, Homo sapiens
tcagcctcccaagta

SEQ ID NO: 628787 - DNA, 15 bp, Homo sapiens
cagcctcccaagtag

SEQ ID NO: 628788 - DNA, 15 bp, Homo sapiens
agcctcccaagtagc

SEQ ID NO: 628789 - DNA, 15 bp, Homo sapiens
gcctcccaagtagct

SEQ ID NO: 628790 - DNA, 15 bp, Homo sapiens
cctcccaagtagctg

SEQ ID NO: 628791 - DNA, 15 bp, Homo sapiens
ctcccaagtagctgg

SEQ ID NO: 628792 - DNA, 15 bp, Homo sapiens
tcccaagtagctggg

SEQ ID NO: 628793 - DNA, 15 bp, Homo sapiens
cccaagtagctgggg

SEQ ID NO: 628794 - DNA, 15 bp, Homo sapiens
ccaagtagctggggc

SEQ ID NO: 628795 - DNA, 15 bp, Homo sapiens
caagtagctggggct

SEQ ID NO: 628796 - DNA, 15 bp, Homo sapiens
aagtagctggggcta

SEQ ID NO: 628797 - DNA, 15 bp, Homo sapiens
agtagctggggctac

SEQ ID NO: 628798 - DNA, 15 bp, Homo sapiens
gtagctggggctaca

SEQ ID NO: 628799 - DNA, 15 bp, Homo sapiens
tagctggggctacag

SEQ ID NO: 628800 - DNA, 15 bp, Homo sapiens
agctggggctacagg

SEQ ID NO: 628801 - DNA, 15 bp, Homo sapiens
gctggggctacaggc

SEQ ID NO: 628802 - DNA, 15 bp, Homo sapiens
ctggggctacaggca

SEQ ID NO: 628803 - DNA, 15 bp, Homo sapiens
tggggctacaggcac

SEQ ID NO: 628804 - DNA, 15 bp, Homo sapiens
ggggctacaggcaca

SEQ ID NO: 628805 - DNA, 15 bp, Homo sapiens
gggctacaggcacat

SEQ ID NO: 628806 - DNA, 15 bp, Homo sapiens
ggctacaggcacatg

SEQ ID NO: 628807 - DNA, 15 bp, Homo sapiens
gctacaggcacatgg

SEQ ID NO: 628808 - DNA, 15 bp, Homo sapiens
ctacaggcacatggc

SEQ ID NO: 628809 - DNA, 15 bp, Homo sapiens
tacaggcacatggcc

SEQ ID NO: 628810 - DNA, 15 bp, Homo sapiens
acaggcacatggcca

SEQ ID NO: 628811 - DNA, 15 bp, Homo sapiens
caggcacatggccac

SEQ ID NO: 628812 - DNA, 15 bp, Homo sapiens
aggcacatggccacc

SEQ ID NO: 628813 - DNA, 15 bp, Homo sapiens
ggcacatggccacca

SEQ ID NO: 628814 - DNA, 15 bp, Homo sapiens
gcacatggccaccag

SEQ ID NO: 628815 - DNA, 15 bp, Homo sapiens
cacatggccaccagg

SEQ ID NO: 628816 - DNA, 15 bp, Homo sapiens
acatggccaccaggc

SEQ ID NO: 628817 - DNA, 15 bp, Homo sapiens
catggccaccaggcc

SEQ ID NO: 628818 - DNA, 15 bp, Homo sapiens
atggccaccaggccc

SEQ ID NO: 628819 - DNA, 15 bp, Homo sapiens
tggccaccaggccca

SEQ ID NO: 628820 - DNA, 15 bp, Homo sapiens
ggccaccaggcccag

SEQ ID NO: 628821 - DNA, 15 bp, Homo sapiens
gccaccaggcccaga

SEQ ID NO: 628822 - DNA, 15 bp, Homo sapiens
ccaccaggcccagat

SEQ ID NO: 628823 - DNA, 15 bp, Homo sapiens
caccaggcccagata

SEQ ID NO: 628824 - DNA, 15 bp, Homo sapiens
accaggcccagataa

SEQ ID NO: 628825 - DNA, 15 bp, Homo sapiens
ccaggcccagataat

SEQ ID NO: 628826 - DNA, 15 bp, Homo sapiens
caggcccagataatt

SEQ ID NO: 628827 - DNA, 15 bp, Homo sapiens
aggcccagataattt

SEQ ID NO: 628828 - DNA, 15 bp, Homo sapiens
ggcccagataatttt

SEQ ID NO: 628829 - DNA, 15 bp, Homo sapiens
gcccagataattttt

SEQ ID NO: 628830 - DNA, 15 bp, Homo sapiens
cccagataatttttc

SEQ ID NO: 628831 - DNA, 15 bp, Homo sapiens
ccagataatttttca

SEQ ID NO: 628832 - DNA, 15 bp, Homo sapiens
cagataatttttcat

SEQ ID NO: 628833 - DNA, 15 bp, Homo sapiens
agataatttttcatt

SEQ ID NO: 628834 - DNA, 15 bp, Homo sapiens
gataatttttcattt

SEQ ID NO: 628835 - DNA, 15 bp, Homo sapiens
ataatttttcatttt

SEQ ID NO: 628836 - DNA, 15 bp, Homo sapiens
taatttttcattttt

SEQ ID NO: 628837 - DNA, 15 bp, Homo sapiens
aatttttcatttttg

SEQ ID NO: 628838 - DNA, 15 bp, Homo sapiens
atttttcatttttgt

SEQ ID NO: 628839 - DNA, 15 bp, Homo sapiens
tttttcatttttgta

SEQ ID NO: 628840 - DNA, 15 bp, Homo sapiens
ttttcatttttgtag

SEQ ID NO: 628841 - DNA, 15 bp, Homo sapiens
tttcatttttgtaga

SEQ ID NO: 628842 - DNA, 15 bp, Homo sapiens
ttcatttttgtagag

SEQ ID NO: 628843 - DNA, 15 bp, Homo sapiens
tcatttttgtagaga

SEQ ID NO: 628844 - DNA, 15 bp, Homo sapiens
catttttgtagagac

SEQ ID NO: 628845 - DNA, 15 bp, Homo sapiens
atttttgtagagact

SEQ ID NO: 628846 - DNA, 15 bp, Homo sapiens
tttttgtagagactg

SEQ ID NO: 628847 - DNA, 15 bp, Homo sapiens
ttttgtagagactga

SEQ ID NO: 628848 - DNA, 15 bp, Homo sapiens
tttgtagagactgag

SEQ ID NO: 628849 - DNA, 15 bp, Homo sapiens
ttgtagagactgagt

SEQ ID NO: 628850 - DNA, 15 bp, Homo sapiens
tgtagagactgagtc

SEQ ID NO: 628851 - DNA, 15 bp, Homo sapiens
gtagagactgagtct

SEQ ID NO: 628852 - DNA, 15 bp, Homo sapiens
tagagactgagtctc

SEQ ID NO: 628853 - DNA, 15 bp, Homo sapiens
agagactgagtctca

SEQ ID NO: 628854 - DNA, 15 bp, Homo sapiens
gagactgagtctcac

SEQ ID NO: 628855 - DNA, 15 bp, Homo sapiens
agactgagtctcacc

SEQ ID NO: 628856 - DNA, 15 bp, Homo sapiens
gactgagtctcacca

SEQ ID NO: 628857 - DNA, 15 bp, Homo sapiens
actgagtctcaccat

SEQ ID NO: 628858 - DNA, 15 bp, Homo sapiens
ctgagtctcaccatg

SEQ ID NO: 628859 - DNA, 15 bp, Homo sapiens
tgagtctcaccatgt

SEQ ID NO: 628860 - DNA, 15 bp, Homo sapiens
gagtctcaccatgtt

SEQ ID NO: 628861 - DNA, 15 bp, Homo sapiens
agtctcaccatgtta

SEQ ID NO: 628862 - DNA, 15 bp, Homo sapiens
gtctcaccatgttac

SEQ ID NO: 628863 - DNA, 15 bp, Homo sapiens
tctcaccatgttacc

SEQ ID NO: 628864 - DNA, 15 bp, Homo sapiens
ctcaccatgttaccc

SEQ ID NO: 628865 - DNA, 15 bp, Homo sapiens
tcaccatgttaccca

SEQ ID NO: 628866 - DNA, 15 bp, Homo sapiens
caccatgttacccag

SEQ ID NO: 628867 - DNA, 15 bp, Homo sapiens
accatgttacccagg

SEQ ID NO: 628868 - DNA, 15 bp, Homo sapiens
ccatgttacccaggt

SEQ ID NO: 628869 - DNA, 15 bp, Homo sapiens
catgttacccaggtt

SEQ ID NO: 628870 - DNA, 15 bp, Homo sapiens
atgttacccaggttt

SEQ ID NO: 628871 - DNA, 15 bp, Homo sapiens
tgttacccaggttta

SEQ ID NO: 628872 - DNA, 15 bp, Homo sapiens
gttacccaggtttat

SEQ ID NO: 628873 - DNA, 15 bp, Homo sapiens
ttacccaggtttatt

SEQ ID NO: 628874 - DNA, 15 bp, Homo sapiens
tacccaggtttatta

SEQ ID NO: 628875 - DNA, 15 bp, Homo sapiens
acccaggtttattat

SEQ ID NO: 628876 - DNA, 15 bp, Homo sapiens
cccaggtttattatt

SEQ ID NO: 628877 - DNA, 15 bp, Homo sapiens
ccaggtttattattc

SEQ ID NO: 628878 - DNA, 15 bp, Homo sapiens
caggtttattattct

SEQ ID NO: 628879 - DNA, 15 bp, Homo sapiens
aggtttattattctc

SEQ ID NO: 628880 - DNA, 15 bp, Homo sapiens
ggtttattattctca

SEQ ID NO: 628881 - DNA, 15 bp, Homo sapiens
gtttattattctcat

SEQ ID NO: 628882 - DNA, 15 bp, Homo sapiens
tttattattctcatt

SEQ ID NO: 628883 - DNA, 15 bp, Homo sapiens
ttattattctcattt

SEQ ID NO: 628884 - DNA, 15 bp, Homo sapiens
tattattctcatttt

SEQ ID NO: 628885 - DNA, 15 bp, Homo sapiens
attattctcattttt

SEQ ID NO: 628886 - DNA, 15 bp, Homo sapiens
ttattctcatttttt

SEQ ID NO: 628887 - DNA, 15 bp, Homo sapiens
tattctcatttttta

SEQ ID NO: 628888 - DNA, 15 bp, Homo sapiens
attctcattttttag

SEQ ID NO: 628889 - DNA, 15 bp, Homo sapiens
ttctcattttttaga

SEQ ID NO: 628890 - DNA, 15 bp, Homo sapiens
tctcattttttagat

SEQ ID NO: 628891 - DNA, 15 bp, Homo sapiens
ctcattttttagatg

SEQ ID NO: 628892 - DNA, 15 bp, Homo sapiens
tcattttttagatga

SEQ ID NO: 628893 - DNA, 15 bp, Homo sapiens
cattttttagatgaa

SEQ ID NO: 628894 - DNA, 15 bp, Homo sapiens
attttttagatgaag

SEQ ID NO: 628895 - DNA, 15 bp, Homo sapiens
ttttttagatgaaga

SEQ ID NO: 628896 - DNA, 15 bp, Homo sapiens
tttttagatgaagag

SEQ ID NO: 628897 - DNA, 15 bp, Homo sapiens
ttttagatgaagaga

SEQ ID NO: 628898 - DNA, 15 bp, Homo sapiens
tttagatgaagagac

SEQ ID NO: 628899 - DNA, 15 bp, Homo sapiens
ttagatgaagagact

SEQ ID NO: 628900 - DNA, 15 bp, Homo sapiens
tagatgaagagactg

SEQ ID NO: 628901 - DNA, 15 bp, Homo sapiens
agatgaagagactga

SEQ ID NO: 628902 - DNA, 15 bp, Homo sapiens
gatgaagagactgag

SEQ ID NO: 628903 - DNA, 15 bp, Homo sapiens
atgaagagactgagg

SEQ ID NO: 628904 - DNA, 15 bp, Homo sapiens
tgaagagactgaggt

SEQ ID NO: 628905 - DNA, 15 bp, Homo sapiens
gaagagactgaggtc

SEQ ID NO: 628906 - DNA, 15 bp, Homo sapiens
aagagactgaggtcc

SEQ ID NO: 628907 - DNA, 15 bp, Homo sapiens
agagactgaggtcca

SEQ ID NO: 628908 - DNA, 15 bp, Homo sapiens
gagactgaggtccag

SEQ ID NO: 628909 - DNA, 15 bp, Homo sapiens
agactgaggtccaga

SEQ ID NO: 628910 - DNA, 15 bp, Homo sapiens
gactgaggtccagag

SEQ ID NO: 628911 - DNA, 15 bp, Homo sapiens
actgaggtccagaga

SEQ ID NO: 628912 - DNA, 15 bp, Homo sapiens
ctgaggtccagagaa

SEQ ID NO: 628913 - DNA, 15 bp, Homo sapiens
tgaggtccagagaag

SEQ ID NO: 628914 - DNA, 15 bp, Homo sapiens
gaggtccagagaagc

SEQ ID NO: 628915 - DNA, 15 bp, Homo sapiens
aggtccagagaagct

SEQ ID NO: 628916 - DNA, 15 bp, Homo sapiens
ggtccagagaagctc

SEQ ID NO: 628917 - DNA, 15 bp, Homo sapiens
gtccagagaagctca

SEQ ID NO: 628918 - DNA, 15 bp, Homo sapiens
tccagagaagctcaa

SEQ ID NO: 628919 - DNA, 15 bp, Homo sapiens
ccagagaagctcaat

SEQ ID NO: 628920 - DNA, 15 bp, Homo sapiens
cagagaagctcaatg

SEQ ID NO: 628921 - DNA, 15 bp, Homo sapiens
agagaagctcaatga

SEQ ID NO: 628922 - DNA, 15 bp, Homo sapiens
gagaagctcaatgac

SEQ ID NO: 628923 - DNA, 15 bp, Homo sapiens
agaagctcaatgact

SEQ ID NO: 628924 - DNA, 15 bp, Homo sapiens
gaagctcaatgactt

SEQ ID NO: 628925 - DNA, 15 bp, Homo sapiens
aagctcaatgacttg

SEQ ID NO: 628926 - DNA, 15 bp, Homo sapiens
agctcaatgacttgc

SEQ ID NO: 628927 - DNA, 15 bp, Homo sapiens
gctcaatgacttgcc

SEQ ID NO: 628928 - DNA, 15 bp, Homo sapiens
ctcaatgacttgcct

SEQ ID NO: 628929 - DNA, 15 bp, Homo sapiens
tcaatgacttgccta

SEQ ID NO: 628930 - DNA, 15 bp, Homo sapiens
caatgacttgcctag

SEQ ID NO: 628931 - DNA, 15 bp, Homo sapiens
aatgacttgcctagt

SEQ ID NO: 628932 - DNA, 15 bp, Homo sapiens
atgacttgcctagtt

SEQ ID NO: 628933 - DNA, 15 bp, Homo sapiens
tgacttgcctagttt

SEQ ID NO: 628934 - DNA, 15 bp, Homo sapiens
gacttgcctagtttt

SEQ ID NO: 628935 - DNA, 15 bp, Homo sapiens
acttgcctagtttta

SEQ ID NO: 628936 - DNA, 15 bp, Homo sapiens
cttgcctagttttac

SEQ ID NO: 628937 - DNA, 15 bp, Homo sapiens
ttgcctagttttaca

SEQ ID NO: 628938 - DNA, 15 bp, Homo sapiens
tgcctagttttacaa

SEQ ID NO: 628939 - DNA, 15 bp, Homo sapiens
gcctagttttacaaa

SEQ ID NO: 628940 - DNA, 15 bp, Homo sapiens
cctagttttacaaat

SEQ ID NO: 628941 - DNA, 15 bp, Homo sapiens
ctagttttacaaatc

SEQ ID NO: 628942 - DNA, 15 bp, Homo sapiens
tagttttacaaatct

SEQ ID NO: 628943 - DNA, 15 bp, Homo sapiens
agttttacaaatctc

SEQ ID NO: 628944 - DNA, 15 bp, Homo sapiens
gttttacaaatctcc

SEQ ID NO: 628945 - DNA, 15 bp, Homo sapiens
ttttacaaatctcct

SEQ ID NO: 628946 - DNA, 15 bp, Homo sapiens
tttacaaatctcctg

SEQ ID NO: 628947 - DNA, 15 bp, Homo sapiens
ttacaaatctcctgc

SEQ ID NO: 628948 - DNA, 15 bp, Homo sapiens
tacaaatctcctgcc

SEQ ID NO: 628949 - DNA, 15 bp, Homo sapiens
acaaatctcctgcca

SEQ ID NO: 628950 - DNA, 15 bp, Homo sapiens
caaatctcctgccat

SEQ ID NO: 628951 - DNA, 15 bp, Homo sapiens
aaatctcctgccatc

SEQ ID NO: 628952 - DNA, 15 bp, Homo sapiens
aatctcctgccatca

SEQ ID NO: 628953 - DNA, 15 bp, Homo sapiens
atctcctgccatcac

SEQ ID NO: 628954 - DNA, 15 bp, Homo sapiens
tctcctgccatcaca

SEQ ID NO: 628955 - DNA, 15 bp, Homo sapiens
ctcctgccatcacat

SEQ ID NO: 628956 - DNA, 15 bp, Homo sapiens
tcctgccatcacata

SEQ ID NO: 628957 - DNA, 15 bp, Homo sapiens
cctgccatcacatac

SEQ ID NO: 628958 - DNA, 15 bp, Homo sapiens
ctgccatcacatacc

SEQ ID NO: 628959 - DNA, 15 bp, Homo sapiens
tgccatcacataccc

SEQ ID NO: 628960 - DNA, 15 bp, Homo sapiens
gccatcacatacccc

SEQ ID NO: 628961 - DNA, 15 bp, Homo sapiens
ccatcacatacccct

SEQ ID NO: 628962 - DNA, 15 bp, Homo sapiens
catcacatacccctc

SEQ ID NO: 628963 - DNA, 15 bp, Homo sapiens
atcacatacccctca

SEQ ID NO: 628964 - DNA, 15 bp, Homo sapiens
tcacatacccctcag

SEQ ID NO: 628965 - DNA, 15 bp, Homo sapiens
cacatacccctcagc

SEQ ID NO: 628966 - DNA, 15 bp, Homo sapiens
acatacccctcagcg

SEQ ID NO: 628967 - DNA, 15 bp, Homo sapiens
catacccctcagcgt

SEQ ID NO: 628968 - DNA, 15 bp, Homo sapiens
atacccctcagcgtc

SEQ ID NO: 628969 - DNA, 15 bp, Homo sapiens
tacccctcagcgtcc

SEQ ID NO: 628970 - DNA, 15 bp, Homo sapiens
acccctcagcgtcct

SEQ ID NO: 628971 - DNA, 15 bp, Homo sapiens
cccctcagcgtcctt

SEQ ID NO: 628972 - DNA, 15 bp, Homo sapiens
ccctcagcgtcctta

SEQ ID NO: 628973 - DNA, 15 bp, Homo sapiens
cctcagcgtccttaa

SEQ ID NO: 628974 - DNA, 15 bp, Homo sapiens
ctcagcgtccttaat

SEQ ID NO: 628975 - DNA, 15 bp, Homo sapiens
tcagcgtccttaata

SEQ ID NO: 628976 - DNA, 15 bp, Homo sapiens
cagcgtccttaataa

SEQ ID NO: 628977 - DNA, 15 bp, Homo sapiens
agcgtccttaataag

SEQ ID NO: 628978 - DNA, 15 bp, Homo sapiens
gcgtccttaataaga

SEQ ID NO: 628979 - DNA, 15 bp, Homo sapiens
cgtccttaataagag

SEQ ID NO: 628980 - DNA, 15 bp, Homo sapiens
gtccttaataagagg

SEQ ID NO: 628981 - DNA, 15 bp, Homo sapiens
tccttaataagaggg

SEQ ID NO: 628982 - DNA, 15 bp, Homo sapiens
ccttaataagaggga

SEQ ID NO: 628983 - DNA, 15 bp, Homo sapiens
cttaataagagggag

SEQ ID NO: 628984 - DNA, 15 bp, Homo sapiens
ttaataagagggagg

SEQ ID NO: 628985 - DNA, 15 bp, Homo sapiens
taataagagggaggc

SEQ ID NO: 628986 - DNA, 15 bp, Homo sapiens
aataagagggaggcc

SEQ ID NO: 628987 - DNA, 15 bp, Homo sapiens
ataagagggaggcca

SEQ ID NO: 628988 - DNA, 15 bp, Homo sapiens
taagagggaggccac

SEQ ID NO: 628989 - DNA, 15 bp, Homo sapiens
aagagggaggccacc

SEQ ID NO: 628990 - DNA, 15 bp, Homo sapiens
agagggaggccacca

SEQ ID NO: 628991 - DNA, 15 bp, Homo sapiens
gagggaggccaccaa

SEQ ID NO: 628992 - DNA, 15 bp, Homo sapiens
agggaggccaccaac

SEQ ID NO: 628993 - DNA, 15 bp, Homo sapiens
gggaggccaccaact

SEQ ID NO: 628994 - DNA, 15 bp, Homo sapiens
ggaggccaccaacta

SEQ ID NO: 628995 - DNA, 15 bp, Homo sapiens
gaggccaccaactat

SEQ ID NO: 628996 - DNA, 15 bp, Homo sapiens
aggccaccaactatg

SEQ ID NO: 628997 - DNA, 15 bp, Homo sapiens
ggccaccaactatgt

SEQ ID NO: 628998 - DNA, 15 bp, Homo sapiens
gccaccaactatgtg

SEQ ID NO: 628999 - DNA, 15 bp, Homo sapiens
ccaccaactatgtgc

SEQ ID NO: 629000 - DNA, 15 bp, Homo sapiens
caccaactatgtgct

SEQ ID NO: 629001 - DNA, 15 bp, Homo sapiens
accaactatgtgctg

SEQ ID NO: 629002 - DNA, 15 bp, Homo sapiens
ccaactatgtgctgg

SEQ ID NO: 629003 - DNA, 15 bp, Homo sapiens
caactatgtgctggg

SEQ ID NO: 629004 - DNA, 15 bp, Homo sapiens
aactatgtgctgggc

SEQ ID NO: 629005 - DNA, 15 bp, Homo sapiens
actatgtgctgggca

SEQ ID NO: 629006 - DNA, 15 bp, Homo sapiens
ctatgtgctgggcac

SEQ ID NO: 629007 - DNA, 15 bp, Homo sapiens
tatgtgctgggcact

SEQ ID NO: 629008 - DNA, 15 bp, Homo sapiens
atgtgctgggcactg

SEQ ID NO: 629009 - DNA, 15 bp, Homo sapiens
tgtgctgggcactgt

SEQ ID NO: 629010 - DNA, 15 bp, Homo sapiens
gtgctgggcactgtg

SEQ ID NO: 629011 - DNA, 15 bp, Homo sapiens
tgctgggcactgtgg

SEQ ID NO: 629012 - DNA, 15 bp, Homo sapiens
gctgggcactgtggt

SEQ ID NO: 629013 - DNA, 15 bp, Homo sapiens
ctgggcactgtggtg

SEQ ID NO: 629014 - DNA, 15 bp, Homo sapiens
tgggcactgtggtgg

SEQ ID NO: 629015 - DNA, 15 bp, Homo sapiens
gggcactgtggtgga

SEQ ID NO: 629016 - DNA, 15 bp, Homo sapiens
ggcactgtggtggat

SEQ ID NO: 629017 - DNA, 15 bp, Homo sapiens
gcactgtggtggatg

SEQ ID NO: 629018 - DNA, 15 bp, Homo sapiens
cactgtggtggatgc

SEQ ID NO: 629019 - DNA, 15 bp, Homo sapiens
actgtggtggatgct

SEQ ID NO: 629020 - DNA, 15 bp, Homo sapiens
ctgtggtggatgctg

SEQ ID NO: 629021 - DNA, 15 bp, Homo sapiens
tgtggtggatgctgg

SEQ ID NO: 629022 - DNA, 15 bp, Homo sapiens
gtggtggatgctgga

SEQ ID NO: 629023 - DNA, 15 bp, Homo sapiens
tggtggatgctggag

SEQ ID NO: 629024 - DNA, 15 bp, Homo sapiens
ggtggatgctggagc

SEQ ID NO: 629025 - DNA, 15 bp, Homo sapiens
gtggatgctggagct

SEQ ID NO: 629026 - DNA, 15 bp, Homo sapiens
tggatgctggagcta

SEQ ID NO: 629027 - DNA, 15 bp, Homo sapiens
ggatgctggagctat

SEQ ID NO: 629028 - DNA, 15 bp, Homo sapiens
gatgctggagctata

SEQ ID NO: 629029 - DNA, 15 bp, Homo sapiens
atgctggagctatag

SEQ ID NO: 629030 - DNA, 15 bp, Homo sapiens
tgctggagctatagg

SEQ ID NO: 629031 - DNA, 15 bp, Homo sapiens
gctggagctataggg

SEQ ID NO: 629032 - DNA, 15 bp, Homo sapiens
ctggagctatagggt

SEQ ID NO: 629033 - DNA, 15 bp, Homo sapiens
tggagctatagggtt

SEQ ID NO: 629034 - DNA, 15 bp, Homo sapiens
ggagctatagggttg

SEQ ID NO: 629035 - DNA, 15 bp, Homo sapiens
gagctatagggttga

SEQ ID NO: 629036 - DNA, 15 bp, Homo sapiens
agctatagggttgag

SEQ ID NO: 629037 - DNA, 15 bp, Homo sapiens
gctatagggttgagt

SEQ ID NO: 629038 - DNA, 15 bp, Homo sapiens
ctatagggttgagta

SEQ ID NO: 629039 - DNA, 15 bp, Homo sapiens
tatagggttgagtat

SEQ ID NO: 629040 - DNA, 15 bp, Homo sapiens
atagggttgagtata

SEQ ID NO: 629041 - DNA, 15 bp, Homo sapiens
tagggttgagtatat

SEQ ID NO: 629042 - DNA, 15 bp, Homo sapiens
agggttgagtatata

SEQ ID NO: 629043 - DNA, 15 bp, Homo sapiens
gggttgagtatataa

SEQ ID NO: 629044 - DNA, 15 bp, Homo sapiens
ggttgagtatataag

SEQ ID NO: 629045 - DNA, 15 bp, Homo sapiens
gttgagtatataaga

SEQ ID NO: 629046 - DNA, 15 bp, Homo sapiens
ttgagtatataagaa

SEQ ID NO: 629047 - DNA, 15 bp, Homo sapiens
tgagtatataagaaa

SEQ ID NO: 629048 - DNA, 15 bp, Homo sapiens
gagtatataagaaat

SEQ ID NO: 629049 - DNA, 15 bp, Homo sapiens
agtatataagaaatg

SEQ ID NO: 629050 - DNA, 15 bp, Homo sapiens
gtatataagaaatgg

SEQ ID NO: 629051 - DNA, 15 bp, Homo sapiens
tatataagaaatggt

SEQ ID NO: 629052 - DNA, 15 bp, Homo sapiens
atataagaaatggtg

SEQ ID NO: 629053 - DNA, 15 bp, Homo sapiens
tataagaaatggtgt

SEQ ID NO: 629054 - DNA, 15 bp, Homo sapiens
ataagaaatggtgtt

SEQ ID NO: 629055 - DNA, 15 bp, Homo sapiens
taagaaatggtgttg

SEQ ID NO: 629056 - DNA, 15 bp, Homo sapiens
aagaaatggtgttgc

SEQ ID NO: 629057 - DNA, 15 bp, Homo sapiens
agaaatggtgttgct

SEQ ID NO: 629058 - DNA, 15 bp, Homo sapiens
gaaatggtgttgctg

SEQ ID NO: 629059 - DNA, 15 bp, Homo sapiens
aaatggtgttgctgg

SEQ ID NO: 629060 - DNA, 15 bp, Homo sapiens
aatggtgttgctgga

SEQ ID NO: 629061 - DNA, 15 bp, Homo sapiens
atggtgttgctggag

SEQ ID NO: 629062 - DNA, 15 bp, Homo sapiens
tggtgttgctggagc

SEQ ID NO: 629063 - DNA, 15 bp, Homo sapiens
ggtgttgctggagca

SEQ ID NO: 629064 - DNA, 15 bp, Homo sapiens
gtgttgctggagcaa

SEQ ID NO: 629065 - DNA, 15 bp, Homo sapiens
tgttgctggagcaac

SEQ ID NO: 629066 - DNA, 15 bp, Homo sapiens
gttgctggagcaact

SEQ ID NO: 629067 - DNA, 15 bp, Homo sapiens
ttgctggagcaactg

SEQ ID NO: 629068 - DNA, 15 bp, Homo sapiens
tgctggagcaactgt

SEQ ID NO: 629069 - DNA, 15 bp, Homo sapiens
gctggagcaactgtt

SEQ ID NO: 629070 - DNA, 15 bp, Homo sapiens
ctggagcaactgttg

SEQ ID NO: 629071 - DNA, 15 bp, Homo sapiens
tggagcaactgttgc

SEQ ID NO: 629072 - DNA, 15 bp, Homo sapiens
ggagcaactgttgct

SEQ ID NO: 629073 - DNA, 15 bp, Homo sapiens
gagcaactgttgctt

SEQ ID NO: 629074 - DNA, 15 bp, Homo sapiens
agcaactgttgcttg

SEQ ID NO: 629075 - DNA, 15 bp, Homo sapiens
gcaactgttgcttgc

SEQ ID NO: 629076 - DNA, 15 bp, Homo sapiens
caactgttgcttgct

SEQ ID NO: 629077 - DNA, 15 bp, Homo sapiens
aactgttgcttgctt

SEQ ID NO: 629078 - DNA, 15 bp, Homo sapiens
actgttgcttgctta

SEQ ID NO: 629079 - DNA, 15 bp, Homo sapiens
ctgttgcttgcttac

SEQ ID NO: 629080 - DNA, 15 bp, Homo sapiens
tgttgcttgcttacc

SEQ ID NO: 629081 - DNA, 15 bp, Homo sapiens
gttgcttgcttacct

SEQ ID NO: 629082 - DNA, 15 bp, Homo sapiens
ttgcttgcttacctg

SEQ ID NO: 629083 - DNA, 15 bp, Homo sapiens
tgcttgcttacctga

SEQ ID NO: 629084 - DNA, 15 bp, Homo sapiens
gcttgcttacctgac

SEQ ID NO: 629085 - DNA, 15 bp, Homo sapiens
cttgcttacctgacc

SEQ ID NO: 629086 - DNA, 15 bp, Homo sapiens
ttgcttacctgacct

SEQ ID NO: 629087 - DNA, 15 bp, Homo sapiens
tgcttacctgaccta

SEQ ID NO: 629088 - DNA, 15 bp, Homo sapiens
gcttacctgacctat

SEQ ID NO: 629089 - DNA, 15 bp, Homo sapiens
cttacctgacctatc

SEQ ID NO: 629090 - DNA, 15 bp, Homo sapiens
ttacctgacctatct

SEQ ID NO: 629091 - DNA, 15 bp, Homo sapiens
tacctgacctatctg

SEQ ID NO: 629092 - DNA, 15 bp, Homo sapiens
acctgacctatctga

SEQ ID NO: 629093 - DNA, 15 bp, Homo sapiens
cctgacctatctgag

SEQ ID NO: 629094 - DNA, 15 bp, Homo sapiens
ctgacctatctgaga

SEQ ID NO: 629095 - DNA, 15 bp, Homo sapiens
tgacctatctgagaa

SEQ ID NO: 629096 - DNA, 15 bp, Homo sapiens
gacctatctgagaat

SEQ ID NO: 629097 - DNA, 15 bp, Homo sapiens
acctatctgagaatt

SEQ ID NO: 629098 - DNA, 15 bp, Homo sapiens
cctatctgagaatta

SEQ ID NO: 629099 - DNA, 15 bp, Homo sapiens
ctatctgagaattaa

SEQ ID NO: 629100 - DNA, 15 bp, Homo sapiens
tatctgagaattaat

SEQ ID NO: 629101 - DNA, 15 bp, Homo sapiens
atctgagaattaatt

SEQ ID NO: 629102 - DNA, 15 bp, Homo sapiens
tctgagaattaatta

SEQ ID NO: 629103 - DNA, 15 bp, Homo sapiens
ctgagaattaattag

SEQ ID NO: 629104 - DNA, 15 bp, Homo sapiens
tgagaattaattagc

SEQ ID NO: 629105 - DNA, 15 bp, Homo sapiens
gagaattaattagca

SEQ ID NO: 629106 - DNA, 15 bp, Homo sapiens
agaattaattagcag

SEQ ID NO: 629107 - DNA, 15 bp, Homo sapiens
gaattaattagcagg

SEQ ID NO: 629108 - DNA, 15 bp, Homo sapiens
aattaattagcaggg

SEQ ID NO: 629109 - DNA, 15 bp, Homo sapiens
attaattagcagggg

SEQ ID NO: 629110 - DNA, 15 bp, Homo sapiens
ttaattagcagggga

SEQ ID NO: 629111 - DNA, 15 bp, Homo sapiens
taattagcaggggaa

SEQ ID NO: 629112 - DNA, 15 bp, Homo sapiens
aattagcaggggaac

SEQ ID NO: 629113 - DNA, 15 bp, Homo sapiens
attagcaggggaaca

SEQ ID NO: 629114 - DNA, 15 bp, Homo sapiens
ttagcaggggaacat

SEQ ID NO: 629115 - DNA, 15 bp, Homo sapiens
tagcaggggaacata

SEQ ID NO: 629116 - DNA, 15 bp, Homo sapiens
agcaggggaacatat

SEQ ID NO: 629117 - DNA, 15 bp, Homo sapiens
gcaggggaacatatt

SEQ ID NO: 629118 - DNA, 15 bp, Homo sapiens
caggggaacatattt

SEQ ID NO: 629119 - DNA, 15 bp, Homo sapiens
aggggaacatatttt

SEQ ID NO: 629120 - DNA, 15 bp, Homo sapiens
ggggaacatattttt

SEQ ID NO: 629121 - DNA, 15 bp, Homo sapiens
gggaacatatttttg

SEQ ID NO: 629122 - DNA, 15 bp, Homo sapiens
ggaacatatttttgt

SEQ ID NO: 629123 - DNA, 15 bp, Homo sapiens
gaacatatttttgtt

SEQ ID NO: 629124 - DNA, 15 bp, Homo sapiens
aacatatttttgttt

SEQ ID NO: 629125 - DNA, 15 bp, Homo sapiens
acatatttttgtttt

SEQ ID NO: 629126 - DNA, 15 bp, Homo sapiens
catatttttgttttc

SEQ ID NO: 629127 - DNA, 15 bp, Homo sapiens
atatttttgttttca

SEQ ID NO: 629128 - DNA, 15 bp, Homo sapiens
tatttttgttttcag

SEQ ID NO: 629129 - DNA, 15 bp, Homo sapiens
atttttgttttcaga

SEQ ID NO: 629130 - DNA, 15 bp, Homo sapiens
tttttgttttcagat

SEQ ID NO: 629131 - DNA, 15 bp, Homo sapiens
ttttgttttcagatt

SEQ ID NO: 629132 - DNA, 15 bp, Homo sapiens
tttgttttcagattc

SEQ ID NO: 629133 - DNA, 15 bp, Homo sapiens
ttgttttcagattca

SEQ ID NO: 629134 - DNA, 15 bp, Homo sapiens
tgttttcagattcaa

SEQ ID NO: 629135 - DNA, 15 bp, Homo sapiens
gttttcagattcaat

SEQ ID NO: 629136 - DNA, 15 bp, Homo sapiens
ttttcagattcaata

SEQ ID NO: 629137 - DNA, 15 bp, Homo sapiens
tttcagattcaatat

SEQ ID NO: 629138 - DNA, 15 bp, Homo sapiens
ttcagattcaatata

SEQ ID NO: 629139 - DNA, 15 bp, Homo sapiens
tcagattcaatataa

SEQ ID NO: 629140 - DNA, 15 bp, Homo sapiens
cagattcaatataag

SEQ ID NO: 629141 - DNA, 15 bp, Homo sapiens
agattcaatataaga

SEQ ID NO: 629142 - DNA, 15 bp, Homo sapiens
gattcaatataagaa

SEQ ID NO: 629143 - DNA, 15 bp, Homo sapiens
attcaatataagaac

SEQ ID NO: 629144 - DNA, 15 bp, Homo sapiens
ttcaatataagaact

SEQ ID NO: 629145 - DNA, 15 bp, Homo sapiens
tcaatataagaactt

SEQ ID NO: 629146 - DNA, 15 bp, Homo sapiens
caatataagaacttg

SEQ ID NO: 629147 - DNA, 15 bp, Homo sapiens
aatataagaacttgt

SEQ ID NO: 629148 - DNA, 15 bp, Homo sapiens
atataagaacttgtg

SEQ ID NO: 629149 - DNA, 15 bp, Homo sapiens
tataagaacttgtgt

SEQ ID NO: 629150 - DNA, 15 bp, Homo sapiens
ataagaacttgtgtg

SEQ ID NO: 629151 - DNA, 15 bp, Homo sapiens
taagaacttgtgtgg

SEQ ID NO: 629152 - DNA, 15 bp, Homo sapiens
aagaacttgtgtggg

SEQ ID NO: 629153 - DNA, 15 bp, Homo sapiens
agaacttgtgtgggc

SEQ ID NO: 629154 - DNA, 15 bp, Homo sapiens
gaacttgtgtgggca

SEQ ID NO: 629155 - DNA, 15 bp, Homo sapiens
aacttgtgtgggcaa

SEQ ID NO: 629156 - DNA, 15 bp, Homo sapiens
acttgtgtgggcaaa

SEQ ID NO: 629157 - DNA, 15 bp, Homo sapiens
cttgtgtgggcaaaa

SEQ ID NO: 629158 - DNA, 15 bp, Homo sapiens
ttgtgtgggcaaaaa

SEQ ID NO: 629159 - DNA, 15 bp, Homo sapiens
tgtgtgggcaaaaat

SEQ ID NO: 629160 - DNA, 15 bp, Homo sapiens
gtgtgggcaaaaata

SEQ ID NO: 629161 - DNA, 15 bp, Homo sapiens
tgtgggcaaaaataa

SEQ ID NO: 629162 - DNA, 15 bp, Homo sapiens
gtgggcaaaaataaa

SEQ ID NO: 629163 - DNA, 15 bp, Homo sapiens
tgggcaaaaataaag

SEQ ID NO: 629164 - DNA, 15 bp, Homo sapiens
gggcaaaaataaaga

SEQ ID NO: 629165 - DNA, 15 bp, Homo sapiens
ggcaaaaataaagat

SEQ ID NO: 629166 - DNA, 15 bp, Homo sapiens
gcaaaaataaagatc

SEQ ID NO: 629167 - DNA, 15 bp, Homo sapiens
caaaaataaagatca

SEQ ID NO: 629168 - DNA, 15 bp, Homo sapiens
aaaaataaagatcag

SEQ ID NO: 629169 - DNA, 15 bp, Homo sapiens
aaaataaagatcagt

SEQ ID NO: 629170 - DNA, 15 bp, Homo sapiens
aaataaagatcagta

SEQ ID NO: 629171 - DNA, 15 bp, Homo sapiens
aataaagatcagtag

SEQ ID NO: 629172 - DNA, 15 bp, Homo sapiens
ataaagatcagtagt

SEQ ID NO: 629173 - DNA, 15 bp, Homo sapiens
taaagatcagtagta

SEQ ID NO: 629174 - DNA, 15 bp, Homo sapiens
aaagatcagtagtaa

SEQ ID NO: 629175 - DNA, 15 bp, Homo sapiens
aagatcagtagtaat

SEQ ID NO: 629176 - DNA, 15 bp, Homo sapiens
agatcagtagtaata

SEQ ID NO: 629177 - DNA, 15 bp, Homo sapiens
gatcagtagtaataa

SEQ ID NO: 629178 - DNA, 15 bp, Homo sapiens
atcagtagtaataac

SEQ ID NO: 629179 - DNA, 15 bp, Homo sapiens
tcagtagtaataaca

SEQ ID NO: 629180 - DNA, 15 bp, Homo sapiens
cagtagtaataacag

SEQ ID NO: 629181 - DNA, 15 bp, Homo sapiens
agtagtaataacagt

SEQ ID NO: 629182 - DNA, 15 bp, Homo sapiens
gtagtaataacagta

SEQ ID NO: 629183 - DNA, 15 bp, Homo sapiens
tagtaataacagtag

SEQ ID NO: 629184 - DNA, 15 bp, Homo sapiens
agtaataacagtagt

SEQ ID NO: 629185 - DNA, 15 bp, Homo sapiens
gtaataacagtagtt

SEQ ID NO: 629186 - DNA, 15 bp, Homo sapiens
taataacagtagttc

SEQ ID NO: 629187 - DNA, 15 bp, Homo sapiens
aataacagtagttcc

SEQ ID NO: 629188 - DNA, 15 bp, Homo sapiens
ataacagtagttccc

SEQ ID NO: 629189 - DNA, 15 bp, Homo sapiens
taacagtagttccca

SEQ ID NO: 629190 - DNA, 15 bp, Homo sapiens
aacagtagttcccat

SEQ ID NO: 629191 - DNA, 15 bp, Homo sapiens
acagtagttcccatt

SEQ ID NO: 629192 - DNA, 15 bp, Homo sapiens
cagtagttcccattt

SEQ ID NO: 629193 - DNA, 15 bp, Homo sapiens
agtagttcccatttg

SEQ ID NO: 629194 - DNA, 15 bp, Homo sapiens
gtagttcccatttgc

SEQ ID NO: 629195 - DNA, 15 bp, Homo sapiens
tagttcccatttgct

SEQ ID NO: 629196 - DNA, 15 bp, Homo sapiens
agttcccatttgctg

SEQ ID NO: 629197 - DNA, 15 bp, Homo sapiens
gttcccatttgctga

SEQ ID NO: 629198 - DNA, 15 bp, Homo sapiens
ttcccatttgctgac

SEQ ID NO: 629199 - DNA, 15 bp, Homo sapiens
tcccatttgctgact

SEQ ID NO: 629200 - DNA, 15 bp, Homo sapiens
cccatttgctgactg

SEQ ID NO: 629201 - DNA, 15 bp, Homo sapiens
ccatttgctgactgt

SEQ ID NO: 629202 - DNA, 15 bp, Homo sapiens
catttgctgactgta

SEQ ID NO: 629203 - DNA, 15 bp, Homo sapiens
atttgctgactgtac

SEQ ID NO: 629204 - DNA, 15 bp, Homo sapiens
tttgctgactgtact

SEQ ID NO: 629205 - DNA, 15 bp, Homo sapiens
ttgctgactgtactg

SEQ ID NO: 629206 - DNA, 15 bp, Homo sapiens
tgctgactgtactgt

SEQ ID NO: 629207 - DNA, 15 bp, Homo sapiens
gctgactgtactgtc

SEQ ID NO: 629208 - DNA, 15 bp, Homo sapiens
ctgactgtactgtcc

SEQ ID NO: 629209 - DNA, 15 bp, Homo sapiens
tgactgtactgtcct

SEQ ID NO: 629210 - DNA, 15 bp, Homo sapiens
gactgtactgtccta

SEQ ID NO: 629211 - DNA, 15 bp, Homo sapiens
actgtactgtcctaa

SEQ ID NO: 629212 - DNA, 15 bp, Homo sapiens
ctgtactgtcctaag

SEQ ID NO: 629213 - DNA, 15 bp, Homo sapiens
tgtactgtcctaagt

SEQ ID NO: 629214 - DNA, 15 bp, Homo sapiens
gtactgtcctaagtg

SEQ ID NO: 629215 - DNA, 15 bp, Homo sapiens
tactgtcctaagtgc

SEQ ID NO: 629216 - DNA, 15 bp, Homo sapiens
actgtcctaagtgca

SEQ ID NO: 629217 - DNA, 15 bp, Homo sapiens
ctgtcctaagtgcat

SEQ ID NO: 629218 - DNA, 15 bp, Homo sapiens
tgtcctaagtgcata

SEQ ID NO: 629219 - DNA, 15 bp, Homo sapiens
gtcctaagtgcatat

SEQ ID NO: 629220 - DNA, 15 bp, Homo sapiens
tcctaagtgcatata

SEQ ID NO: 629221 - DNA, 15 bp, Homo sapiens
cctaagtgcatatat

SEQ ID NO: 629222 - DNA, 15 bp, Homo sapiens
ctaagtgcatatata

SEQ ID NO: 629223 - DNA, 15 bp, Homo sapiens
taagtgcatatatat

SEQ ID NO: 629224 - DNA, 15 bp, Homo sapiens
aagtgcatatatata

SEQ ID NO: 629225 - DNA, 15 bp, Homo sapiens
agtgcatatatatat

SEQ ID NO: 629226 - DNA, 15 bp, Homo sapiens
gtgcatatatatata

SEQ ID NO: 629227 - DNA, 15 bp, Homo sapiens
tgcatatatatatac

SEQ ID NO: 629228 - DNA, 15 bp, Homo sapiens
gcatatatatataca

SEQ ID NO: 629229 - DNA, 15 bp, Homo sapiens
catatatatatacat

SEQ ID NO: 629230 - DNA, 15 bp, Homo sapiens
atatatatatacata

SEQ ID NO: 629231 - DNA, 15 bp, Homo sapiens
tatatatatacatac

SEQ ID NO: 629232 - DNA, 15 bp, Homo sapiens
atatatatacataca

SEQ ID NO: 629233 - DNA, 15 bp, Homo sapiens
tatatatacatacac

SEQ ID NO: 629234 - DNA, 15 bp, Homo sapiens
atatatacatacaca

SEQ ID NO: 629235 - DNA, 15 bp, Homo sapiens
tatatacatacacac

SEQ ID NO: 629236 - DNA, 15 bp, Homo sapiens
atatacatacacaca

SEQ ID NO: 629237 - DNA, 15 bp, Homo sapiens
tatacatacacacac

SEQ ID NO: 629238 - DNA, 15 bp, Homo sapiens
atacatacacacacg

SEQ ID NO: 629239 - DNA, 15 bp, Homo sapiens
tacatacacacacgc

SEQ ID NO: 629240 - DNA, 15 bp, Homo sapiens
acatacacacacgca

SEQ ID NO: 629241 - DNA, 15 bp, Homo sapiens
catacacacacgcat

SEQ ID NO: 629242 - DNA, 15 bp, Homo sapiens
atacacacacgcata

SEQ ID NO: 629243 - DNA, 15 bp, Homo sapiens
tacacacacgcatac

SEQ ID NO: 629244 - DNA, 15 bp, Homo sapiens
acacacacgcatacc

SEQ ID NO: 629245 - DNA, 15 bp, Homo sapiens
cacacacgcatacct

SEQ ID NO: 629246 - DNA, 15 bp, Homo sapiens
acacacgcataccta

SEQ ID NO: 629247 - DNA, 15 bp, Homo sapiens
cacacgcatacctat

SEQ ID NO: 629248 - DNA, 15 bp, Homo sapiens
acacgcatacctata

SEQ ID NO: 629249 - DNA, 15 bp, Homo sapiens
cacgcatacctatac

SEQ ID NO: 629250 - DNA, 15 bp, Homo sapiens
acgcatacctatact

SEQ ID NO: 629251 - DNA, 15 bp, Homo sapiens
cgcatacctatactc

SEQ ID NO: 629252 - DNA, 15 bp, Homo sapiens
gcatacctatactcc

SEQ ID NO: 629253 - DNA, 15 bp, Homo sapiens
catacctatactcct

SEQ ID NO: 629254 - DNA, 15 bp, Homo sapiens
atacctatactcctc

SEQ ID NO: 629255 - DNA, 15 bp, Homo sapiens
tacctatactcctct

SEQ ID NO: 629256 - DNA, 15 bp, Homo sapiens
acctatactcctcta

SEQ ID NO: 629257 - DNA, 15 bp, Homo sapiens
cctatactcctctaa

SEQ ID NO: 629258 - DNA, 15 bp, Homo sapiens
ctatactcctctaat

SEQ ID NO: 629259 - DNA, 15 bp, Homo sapiens
tatactcctctaata

SEQ ID NO: 629260 - DNA, 15 bp, Homo sapiens
atactcctctaatac

SEQ ID NO: 629261 - DNA, 15 bp, Homo sapiens
tactcctctaatact

SEQ ID NO: 629262 - DNA, 15 bp, Homo sapiens
actcctctaatactc

SEQ ID NO: 629263 - DNA, 15 bp, Homo sapiens
ctcctctaatactca

SEQ ID NO: 629264 - DNA, 15 bp, Homo sapiens
tcctctaatactcaa

SEQ ID NO: 629265 - DNA, 15 bp, Homo sapiens
cctctaatactcaaa

SEQ ID NO: 629266 - DNA, 15 bp, Homo sapiens
ctctaatactcaaaa

SEQ ID NO: 629267 - DNA, 15 bp, Homo sapiens
tctaatactcaaaat

SEQ ID NO: 629268 - DNA, 15 bp, Homo sapiens
ctaatactcaaaatg

SEQ ID NO: 629269 - DNA, 15 bp, Homo sapiens
taatactcaaaatga

SEQ ID NO: 629270 - DNA, 15 bp, Homo sapiens
aatactcaaaatgat

SEQ ID NO: 629271 - DNA, 15 bp, Homo sapiens
atactcaaaatgatc

SEQ ID NO: 629272 - DNA, 15 bp, Homo sapiens
tactcaaaatgatcc

SEQ ID NO: 629273 - DNA, 15 bp, Homo sapiens
actcaaaatgatcct

SEQ ID NO: 629274 - DNA, 15 bp, Homo sapiens
ctcaaaatgatcctg

SEQ ID NO: 629275 - DNA, 15 bp, Homo sapiens
tcaaaatgatcctgt

SEQ ID NO: 629276 - DNA, 15 bp, Homo sapiens
caaaatgatcctgtt

SEQ ID NO: 629277 - DNA, 15 bp, Homo sapiens
aaaatgatcctgttt

SEQ ID NO: 629278 - DNA, 15 bp, Homo sapiens
aaatgatcctgttta

SEQ ID NO: 629279 - DNA, 15 bp, Homo sapiens
aatgatcctgtttat

SEQ ID NO: 629280 - DNA, 15 bp, Homo sapiens
atgatcctgtttatg

SEQ ID NO: 629281 - DNA, 15 bp, Homo sapiens
tgatcctgtttatgt

SEQ ID NO: 629282 - DNA, 15 bp, Homo sapiens
gatcctgtttatgta

SEQ ID NO: 629283 - DNA, 15 bp, Homo sapiens
atcctgtttatgtat

SEQ ID NO: 629284 - DNA, 15 bp, Homo sapiens
tcctgtttatgtatt

SEQ ID NO: 629285 - DNA, 15 bp, Homo sapiens
cctgtttatgtattg

SEQ ID NO: 629286 - DNA, 15 bp, Homo sapiens
ctgtttatgtattgt

SEQ ID NO: 629287 - DNA, 15 bp, Homo sapiens
tgtttatgtattgtt

SEQ ID NO: 629288 - DNA, 15 bp, Homo sapiens
gtttatgtattgtta

SEQ ID NO: 629289 - DNA, 15 bp, Homo sapiens
tttatgtattgttaa

SEQ ID NO: 629290 - DNA, 15 bp, Homo sapiens
ttatgtattgttaat

SEQ ID NO: 629291 - DNA, 15 bp, Homo sapiens
tatgtattgttaata

SEQ ID NO: 629292 - DNA, 15 bp, Homo sapiens
atgtattgttaatat

SEQ ID NO: 629293 - DNA, 15 bp, Homo sapiens
tgtattgttaatatg

SEQ ID NO: 629294 - DNA, 15 bp, Homo sapiens
gtattgttaatatgc

SEQ ID NO: 629295 - DNA, 15 bp, Homo sapiens
tattgttaatatgct

SEQ ID NO: 629296 - DNA, 15 bp, Homo sapiens
attgttaatatgctc

SEQ ID NO: 629297 - DNA, 15 bp, Homo sapiens
ttgttaatatgctca

SEQ ID NO: 629298 - DNA, 15 bp, Homo sapiens
tgttaatatgctcat

SEQ ID NO: 629299 - DNA, 15 bp, Homo sapiens
gttaatatgctcatt

SEQ ID NO: 629300 - DNA, 15 bp, Homo sapiens
ttaatatgctcattt

SEQ ID NO: 629301 - DNA, 15 bp, Homo sapiens
taatatgctcatttt

SEQ ID NO: 629302 - DNA, 15 bp, Homo sapiens
aatatgctcatttta

SEQ ID NO: 629303 - DNA, 15 bp, Homo sapiens
atatgctcattttat

SEQ ID NO: 629304 - DNA, 15 bp, Homo sapiens
tatgctcattttatt

SEQ ID NO: 629305 - DNA, 15 bp, Homo sapiens
atgctcattttattt

SEQ ID NO: 629306 - DNA, 15 bp, Homo sapiens
tgctcattttatttt

SEQ ID NO: 629307 - DNA, 15 bp, Homo sapiens
gctcattttattttt

SEQ ID NO: 629308 - DNA, 15 bp, Homo sapiens
ctcattttattttta

SEQ ID NO: 629309 - DNA, 15 bp, Homo sapiens
tcattttatttttaa

SEQ ID NO: 629310 - DNA, 15 bp, Homo sapiens
cattttatttttaaa

SEQ ID NO: 629311 - DNA, 15 bp, Homo sapiens
attttatttttaaat

SEQ ID NO: 629312 - DNA, 15 bp, Homo sapiens
ttttatttttaaatt

SEQ ID NO: 629313 - DNA, 15 bp, Homo sapiens
tttatttttaaattt

SEQ ID NO: 629314 - DNA, 15 bp, Homo sapiens
ttatttttaaatttt

SEQ ID NO: 629315 - DNA, 15 bp, Homo sapiens
tatttttaaattttt

SEQ ID NO: 629316 - DNA, 15 bp, Homo sapiens
atttttaaattttta

SEQ ID NO: 629317 - DNA, 15 bp, Homo sapiens
tttttaaatttttat

SEQ ID NO: 629318 - DNA, 15 bp, Homo sapiens
ttttaaatttttatt

SEQ ID NO: 629319 - DNA, 15 bp, Homo sapiens
tttaaatttttattt

SEQ ID NO: 629320 - DNA, 15 bp, Homo sapiens
ttaaatttttattta

SEQ ID NO: 629321 - DNA, 15 bp, Homo sapiens
taaatttttatttat

SEQ ID NO: 629322 - DNA, 15 bp, Homo sapiens
aaatttttatttatt

SEQ ID NO: 629323 - DNA, 15 bp, Homo sapiens
aatttttatttattt

SEQ ID NO: 629324 - DNA, 15 bp, Homo sapiens
atttttatttatttt

SEQ ID NO: 629325 - DNA, 15 bp, Homo sapiens
tttttatttattttt

SEQ ID NO: 629326 - DNA, 15 bp, Homo sapiens
ttttatttattttta

SEQ ID NO: 629327 - DNA, 15 bp, Homo sapiens
tttatttatttttat

SEQ ID NO: 629328 - DNA, 15 bp, Homo sapiens
ttatttatttttatt

SEQ ID NO: 629329 - DNA, 15 bp, Homo sapiens
tatttatttttattt

SEQ ID NO: 629330 - DNA, 15 bp, Homo sapiens
atttatttttatttt

SEQ ID NO: 629331 - DNA, 15 bp, Homo sapiens
ttatttttattttta

SEQ ID NO: 629332 - DNA, 15 bp, Homo sapiens
tatttttatttttat

SEQ ID NO: 629333 - DNA, 15 bp, Homo sapiens
atttttatttttatt

SEQ ID NO: 629334 - DNA, 15 bp, Homo sapiens
ttttatttttattta

SEQ ID NO: 629335 - DNA, 15 bp, Homo sapiens
tttatttttatttat

SEQ ID NO: 629336 - DNA, 15 bp, Homo sapiens
ttatttttatttatt

SEQ ID NO: 629337 - DNA, 15 bp, Homo sapiens
tatttttatttattt

SEQ ID NO: 629338 - DNA, 15 bp, Homo sapiens
ttttatttatttttg

SEQ ID NO: 629339 - DNA, 15 bp, Homo sapiens
tttatttatttttga

SEQ ID NO: 629340 - DNA, 15 bp, Homo sapiens
ttatttatttttgag

SEQ ID NO: 629341 - DNA, 15 bp, Homo sapiens
tatttatttttgaga

SEQ ID NO: 629342 - DNA, 15 bp, Homo sapiens
atttatttttgagac

SEQ ID NO: 629343 - DNA, 15 bp, Homo sapiens
tttatttttgagacg

SEQ ID NO: 629344 - DNA, 15 bp, Homo sapiens
ttatttttgagacgg

SEQ ID NO: 629345 - DNA, 15 bp, Homo sapiens
tatttttgagacgga

SEQ ID NO: 629346 - DNA, 15 bp, Homo sapiens
atttttgagacggag

SEQ ID NO: 629347 - DNA, 15 bp, Homo sapiens
tttttgagacggagt

SEQ ID NO: 629348 - DNA, 15 bp, Homo sapiens
ttttgagacggagtc

SEQ ID NO: 629349 - DNA, 15 bp, Homo sapiens
tttgagacggagtct

SEQ ID NO: 629350 - DNA, 15 bp, Homo sapiens
ttgagacggagtctc

SEQ ID NO: 629351 - DNA, 15 bp, Homo sapiens
tgagacggagtctca

SEQ ID NO: 629352 - DNA, 15 bp, Homo sapiens
gagacggagtctcat

SEQ ID NO: 629353 - DNA, 15 bp, Homo sapiens
agacggagtctcatt

SEQ ID NO: 629354 - DNA, 15 bp, Homo sapiens
gacggagtctcattc

SEQ ID NO: 629355 - DNA, 15 bp, Homo sapiens
acggagtctcattct

SEQ ID NO: 629356 - DNA, 15 bp, Homo sapiens
cggagtctcattctg

SEQ ID NO: 629357 - DNA, 15 bp, Homo sapiens
ggagtctcattctgt

SEQ ID NO: 629358 - DNA, 15 bp, Homo sapiens
gagtctcattctgtc

SEQ ID NO: 629359 - DNA, 15 bp, Homo sapiens
agtctcattctgtcg

SEQ ID NO: 629360 - DNA, 15 bp, Homo sapiens
gtctcattctgtcgc

SEQ ID NO: 629361 - DNA, 15 bp, Homo sapiens
tctcattctgtcgcg

SEQ ID NO: 629362 - DNA, 15 bp, Homo sapiens
ctcattctgtcgcgg

SEQ ID NO: 629363 - DNA, 15 bp, Homo sapiens
tcattctgtcgcgga

SEQ ID NO: 629364 - DNA, 15 bp, Homo sapiens
cattctgtcgcggag

SEQ ID NO: 629365 - DNA, 15 bp, Homo sapiens
attctgtcgcggagg

SEQ ID NO: 629366 - DNA, 15 bp, Homo sapiens
ttctgtcgcggaggc

SEQ ID NO: 629367 - DNA, 15 bp, Homo sapiens
tctgtcgcggaggct

SEQ ID NO: 629368 - DNA, 15 bp, Homo sapiens
ctgtcgcggaggctg

SEQ ID NO: 629369 - DNA, 15 bp, Homo sapiens
tgtcgcggaggctga

SEQ ID NO: 629370 - DNA, 15 bp, Homo sapiens
gtcgcggaggctgaa

SEQ ID NO: 629371 - DNA, 15 bp, Homo sapiens
tcgcggaggctgaag

SEQ ID NO: 629372 - DNA, 15 bp, Homo sapiens
cgcggaggctgaagt

SEQ ID NO: 629373 - DNA, 15 bp, Homo sapiens
gcggaggctgaagtg

SEQ ID NO: 629374 - DNA, 15 bp, Homo sapiens
cggaggctgaagtgc

SEQ ID NO: 629375 - DNA, 15 bp, Homo sapiens
ggaggctgaagtgca

SEQ ID NO: 629376 - DNA, 15 bp, Homo sapiens
gaggctgaagtgcag

SEQ ID NO: 629377 - DNA, 15 bp, Homo sapiens
aggctgaagtgcagt

SEQ ID NO: 629378 - DNA, 15 bp, Homo sapiens
ggctgaagtgcagtg

SEQ ID NO: 629379 - DNA, 15 bp, Homo sapiens
gctgaagtgcagtgg

SEQ ID NO: 629380 - DNA, 15 bp, Homo sapiens
ctgaagtgcagtggt

SEQ ID NO: 629381 - DNA, 15 bp, Homo sapiens
tgaagtgcagtggtg

SEQ ID NO: 629382 - DNA, 15 bp, Homo sapiens
gaagtgcagtggtgc

SEQ ID NO: 629383 - DNA, 15 bp, Homo sapiens
aagtgcagtggtgcg

SEQ ID NO: 629384 - DNA, 15 bp, Homo sapiens
agtgcagtggtgcga

SEQ ID NO: 629385 - DNA, 15 bp, Homo sapiens
gtgcagtggtgcgat

SEQ ID NO: 629386 - DNA, 15 bp, Homo sapiens
tgcagtggtgcgatc

SEQ ID NO: 629387 - DNA, 15 bp, Homo sapiens
gcagtggtgcgatct

SEQ ID NO: 629388 - DNA, 15 bp, Homo sapiens
cagtggtgcgatctc

SEQ ID NO: 629389 - DNA, 15 bp, Homo sapiens
agtggtgcgatctca

SEQ ID NO: 629390 - DNA, 15 bp, Homo sapiens
gtggtgcgatctcag

SEQ ID NO: 629391 - DNA, 15 bp, Homo sapiens
tggtgcgatctcagc

SEQ ID NO: 629392 - DNA, 15 bp, Homo sapiens
ggtgcgatctcagct

SEQ ID NO: 629393 - DNA, 15 bp, Homo sapiens
gtgcgatctcagctc

SEQ ID NO: 629394 - DNA, 15 bp, Homo sapiens
tgcgatctcagctca

SEQ ID NO: 629395 - DNA, 15 bp, Homo sapiens
gcgatctcagctcag

SEQ ID NO: 629396 - DNA, 15 bp, Homo sapiens
cgatctcagctcagt

SEQ ID NO: 629397 - DNA, 15 bp, Homo sapiens
gatctcagctcagtg

SEQ ID NO: 629398 - DNA, 15 bp, Homo sapiens
atctcagctcagtgc

SEQ ID NO: 629399 - DNA, 15 bp, Homo sapiens
tctcagctcagtgcg

SEQ ID NO: 629400 - DNA, 15 bp, Homo sapiens
ctcagctcagtgcga

SEQ ID NO: 629401 - DNA, 15 bp, Homo sapiens
tcagctcagtgcgac

SEQ ID NO: 629402 - DNA, 15 bp, Homo sapiens
cagctcagtgcgacc

SEQ ID NO: 629403 - DNA, 15 bp, Homo sapiens
agctcagtgcgacct

SEQ ID NO: 629404 - DNA, 15 bp, Homo sapiens
gctcagtgcgacctc

SEQ ID NO: 629405 - DNA, 15 bp, Homo sapiens
ctcagtgcgacctcc

SEQ ID NO: 629406 - DNA, 15 bp, Homo sapiens
tcagtgcgacctccg

SEQ ID NO: 629407 - DNA, 15 bp, Homo sapiens
cagtgcgacctccgc

SEQ ID NO: 629408 - DNA, 15 bp, Homo sapiens
agtgcgacctccgcc

SEQ ID NO: 629409 - DNA, 15 bp, Homo sapiens
gtgcgacctccgcct

SEQ ID NO: 629410 - DNA, 15 bp, Homo sapiens
tgcgacctccgcctc

SEQ ID NO: 629411 - DNA, 15 bp, Homo sapiens
gcgacctccgcctcc

SEQ ID NO: 629412 - DNA, 15 bp, Homo sapiens
cgacctccgcctccc

SEQ ID NO: 629413 - DNA, 15 bp, Homo sapiens
gacctccgcctcccg

SEQ ID NO: 629414 - DNA, 15 bp, Homo sapiens
ctcccgggttcaagt

SEQ ID NO: 629415 - DNA, 15 bp, Homo sapiens
tcccgggttcaagtg

SEQ ID NO: 629416 - DNA, 15 bp, Homo sapiens
cccgggttcaagtga

SEQ ID NO: 629417 - DNA, 15 bp, Homo sapiens
ccgggttcaagtgat

SEQ ID NO: 629418 - DNA, 15 bp, Homo sapiens
cgggttcaagtgatt

SEQ ID NO: 629419 - DNA, 15 bp, Homo sapiens
gggttcaagtgattc

SEQ ID NO: 629420 - DNA, 15 bp, Homo sapiens
ggttcaagtgattct

SEQ ID NO: 629421 - DNA, 15 bp, Homo sapiens
gttcaagtgattctc

SEQ ID NO: 629422 - DNA, 15 bp, Homo sapiens
ttcaagtgattctcc

SEQ ID NO: 629423 - DNA, 15 bp, Homo sapiens
tcaagtgattctcct

SEQ ID NO: 629424 - DNA, 15 bp, Homo sapiens
caagtgattctcctg

SEQ ID NO: 629425 - DNA, 15 bp, Homo sapiens
aagtgattctcctgc

SEQ ID NO: 629426 - DNA, 15 bp, Homo sapiens
agtgattctcctgcc

SEQ ID NO: 629427 - DNA, 15 bp, Homo sapiens
gtgattctcctgcct

SEQ ID NO: 629428 - DNA, 15 bp, Homo sapiens
tgattctcctgcctc

SEQ ID NO: 629429 - DNA, 15 bp, Homo sapiens
ctgcctcagcctccg

SEQ ID NO: 629430 - DNA, 15 bp, Homo sapiens
tgcctcagcctccgg

SEQ ID NO: 629431 - DNA, 15 bp, Homo sapiens
gcctcagcctccgga

SEQ ID NO: 629432 - DNA, 15 bp, Homo sapiens
cctcagcctccggac

SEQ ID NO: 629433 - DNA, 15 bp, Homo sapiens
ctcagcctccggact

SEQ ID NO: 629434 - DNA, 15 bp, Homo sapiens
tcagcctccggacta

SEQ ID NO: 629435 - DNA, 15 bp, Homo sapiens
cagcctccggactag

SEQ ID NO: 629436 - DNA, 15 bp, Homo sapiens
agcctccggactagc

SEQ ID NO: 629437 - DNA, 15 bp, Homo sapiens
gcctccggactagct

SEQ ID NO: 629438 - DNA, 15 bp, Homo sapiens
cctccggactagctg

SEQ ID NO: 629439 - DNA, 15 bp, Homo sapiens
ctccggactagctgg

SEQ ID NO: 629440 - DNA, 15 bp, Homo sapiens
tccggactagctggg

SEQ ID NO: 629441 - DNA, 15 bp, Homo sapiens
ccggactagctggga

SEQ ID NO: 629442 - DNA, 15 bp, Homo sapiens
cggactagctgggat

SEQ ID NO: 629443 - DNA, 15 bp, Homo sapiens
ggactagctgggatt

SEQ ID NO: 629444 - DNA, 15 bp, Homo sapiens
gactagctgggatta

SEQ ID NO: 629445 - DNA, 15 bp, Homo sapiens
actagctgggattac

SEQ ID NO: 629446 - DNA, 15 bp, Homo sapiens
ctagctgggattaca

SEQ ID NO: 629447 - DNA, 15 bp, Homo sapiens
tacaggcgcccgcct

SEQ ID NO: 629448 - DNA, 15 bp, Homo sapiens
acaggcgcccgcctc

SEQ ID NO: 629449 - DNA, 15 bp, Homo sapiens
caggcgcccgcctcc

SEQ ID NO: 629450 - DNA, 15 bp, Homo sapiens
aggcgcccgcctcca

SEQ ID NO: 629451 - DNA, 15 bp, Homo sapiens
ggcgcccgcctccac

SEQ ID NO: 629452 - DNA, 15 bp, Homo sapiens
gcgcccgcctccacg

SEQ ID NO: 629453 - DNA, 15 bp, Homo sapiens
cgcccgcctccacgc

SEQ ID NO: 629454 - DNA, 15 bp, Homo sapiens
gcccgcctccacgcc

SEQ ID NO: 629455 - DNA, 15 bp, Homo sapiens
cccgcctccacgccc

SEQ ID NO: 629456 - DNA, 15 bp, Homo sapiens
ccgcctccacgccca

SEQ ID NO: 629457 - DNA, 15 bp, Homo sapiens
cgcctccacgcccag

SEQ ID NO: 629458 - DNA, 15 bp, Homo sapiens
gcctccacgcccagc

SEQ ID NO: 629459 - DNA, 15 bp, Homo sapiens
cctccacgcccagct

SEQ ID NO: 629460 - DNA, 15 bp, Homo sapiens
ctccacgcccagcta

SEQ ID NO: 629461 - DNA, 15 bp, Homo sapiens
tccacgcccagctaa

SEQ ID NO: 629462 - DNA, 15 bp, Homo sapiens
cccagctaatttttg

SEQ ID NO: 629463 - DNA, 15 bp, Homo sapiens
ccagctaatttttgt

SEQ ID NO: 629464 - DNA, 15 bp, Homo sapiens
cagctaatttttgta

SEQ ID NO: 629465 - DNA, 15 bp, Homo sapiens
agctaatttttgtat

SEQ ID NO: 629466 - DNA, 15 bp, Homo sapiens
gctaatttttgtatt

SEQ ID NO: 629467 - DNA, 15 bp, Homo sapiens
ctaatttttgtattt

SEQ ID NO: 629468 - DNA, 15 bp, Homo sapiens
taatttttgtatttt

SEQ ID NO: 629469 - DNA, 15 bp, Homo sapiens
aatttttgtattttt

SEQ ID NO: 629470 - DNA, 15 bp, Homo sapiens
atttttgtattttta

SEQ ID NO: 629471 - DNA, 15 bp, Homo sapiens
agagatggggtttcg

SEQ ID NO: 629472 - DNA, 15 bp, Homo sapiens
gagatggggtttcgc

SEQ ID NO: 629473 - DNA, 15 bp, Homo sapiens
agatggggtttcgcc

SEQ ID NO: 629474 - DNA, 15 bp, Homo sapiens
gatggggtttcgcca

SEQ ID NO: 629475 - DNA, 15 bp, Homo sapiens
atggggtttcgccat

SEQ ID NO: 629476 - DNA, 15 bp, Homo sapiens
tggggtttcgccatg

SEQ ID NO: 629477 - DNA, 15 bp, Homo sapiens
ggggtttcgccatgt

SEQ ID NO: 629478 - DNA, 15 bp, Homo sapiens
ccaggctggtctcgt

SEQ ID NO: 629479 - DNA, 15 bp, Homo sapiens
caggctggtctcgta

SEQ ID NO: 629480 - DNA, 15 bp, Homo sapiens
aggctggtctcgtac

SEQ ID NO: 629481 - DNA, 15 bp, Homo sapiens
ggctggtctcgtact

SEQ ID NO: 629482 - DNA, 15 bp, Homo sapiens
gctggtctcgtactc

SEQ ID NO: 629483 - DNA, 15 bp, Homo sapiens
ctggtctcgtactcc

SEQ ID NO: 629484 - DNA, 15 bp, Homo sapiens
tggtctcgtactcct

SEQ ID NO: 629485 - DNA, 15 bp, Homo sapiens
ggtctcgtactcctg

SEQ ID NO: 629486 - DNA, 15 bp, Homo sapiens
gtctcgtactcctga

SEQ ID NO: 629487 - DNA, 15 bp, Homo sapiens
tctcgtactcctgac

SEQ ID NO: 629488 - DNA, 15 bp, Homo sapiens
ctcgtactcctgacc

SEQ ID NO: 629489 - DNA, 15 bp, Homo sapiens
tcgtactcctgacct

SEQ ID NO: 629490 - DNA, 15 bp, Homo sapiens
cgtactcctgacctt

SEQ ID NO: 629491 - DNA, 15 bp, Homo sapiens
gtactcctgaccttg

SEQ ID NO: 629492 - DNA, 15 bp, Homo sapiens
tactcctgaccttga

SEQ ID NO: 629493 - DNA, 15 bp, Homo sapiens
actcctgaccttgag

SEQ ID NO: 629494 - DNA, 15 bp, Homo sapiens
ctcctgaccttgagt

SEQ ID NO: 629495 - DNA, 15 bp, Homo sapiens
tcctgaccttgagtg

SEQ ID NO: 629496 - DNA, 15 bp, Homo sapiens
cctgaccttgagtga

SEQ ID NO: 629497 - DNA, 15 bp, Homo sapiens
ctgaccttgagtgat

SEQ ID NO: 629498 - DNA, 15 bp, Homo sapiens
tgaccttgagtgatc

SEQ ID NO: 629499 - DNA, 15 bp, Homo sapiens
gaccttgagtgatcc

SEQ ID NO: 629500 - DNA, 15 bp, Homo sapiens
accttgagtgatcca

SEQ ID NO: 629501 - DNA, 15 bp, Homo sapiens
ccttgagtgatccac

SEQ ID NO: 629502 - DNA, 15 bp, Homo sapiens
cttgagtgatccacc

SEQ ID NO: 629503 - DNA, 15 bp, Homo sapiens
ttgagtgatccacct

SEQ ID NO: 629504 - DNA, 15 bp, Homo sapiens
tgagtgatccacctg

SEQ ID NO: 629505 - DNA, 15 bp, Homo sapiens
gagtgatccacctgc

SEQ ID NO: 629506 - DNA, 15 bp, Homo sapiens
agtgatccacctgcc

SEQ ID NO: 629507 - DNA, 15 bp, Homo sapiens
gtgatccacctgcct

SEQ ID NO: 629508 - DNA, 15 bp, Homo sapiens
tgatccacctgcctc

SEQ ID NO: 629509 - DNA, 15 bp, Homo sapiens
gatccacctgcctcg

SEQ ID NO: 629510 - DNA, 15 bp, Homo sapiens
atccacctgcctcgg

SEQ ID NO: 629511 - DNA, 15 bp, Homo sapiens
tccacctgcctcggc

SEQ ID NO: 629512 - DNA, 15 bp, Homo sapiens
ccacctgcctcggcc

SEQ ID NO: 629513 - DNA, 15 bp, Homo sapiens
cacctgcctcggcct

SEQ ID NO: 629514 - DNA, 15 bp, Homo sapiens
acctgcctcggcctc

SEQ ID NO: 629515 - DNA, 15 bp, Homo sapiens
caggcatgagccacc

SEQ ID NO: 629516 - DNA, 15 bp, Homo sapiens
aggcatgagccaccg

SEQ ID NO: 629517 - DNA, 15 bp, Homo sapiens
ggcatgagccaccgc

SEQ ID NO: 629518 - DNA, 15 bp, Homo sapiens
gcatgagccaccgcg

SEQ ID NO: 629519 - DNA, 15 bp, Homo sapiens
catgagccaccgcgc

SEQ ID NO: 629520 - DNA, 15 bp, Homo sapiens
atgagccaccgcgcc

SEQ ID NO: 629521 - DNA, 15 bp, Homo sapiens
tgagccaccgcgccg

SEQ ID NO: 629522 - DNA, 15 bp, Homo sapiens
gagccaccgcgccgg

SEQ ID NO: 629523 - DNA, 15 bp, Homo sapiens
agccaccgcgccggg

SEQ ID NO: 629524 - DNA, 15 bp, Homo sapiens
gccaccgcgccgggc

SEQ ID NO: 629525 - DNA, 15 bp, Homo sapiens
ccaccgcgccgggct

SEQ ID NO: 629526 - DNA, 15 bp, Homo sapiens
caccgcgccgggcta

SEQ ID NO: 629527 - DNA, 15 bp, Homo sapiens
accgcgccgggctaa

SEQ ID NO: 629528 - DNA, 15 bp, Homo sapiens
ccgcgccgggctaat

SEQ ID NO: 629529 - DNA, 15 bp, Homo sapiens
cgcgccgggctaata

SEQ ID NO: 629530 - DNA, 15 bp, Homo sapiens
gcgccgggctaatat

SEQ ID NO: 629531 - DNA, 15 bp, Homo sapiens
cgccgggctaatatg

SEQ ID NO: 629532 - DNA, 15 bp, Homo sapiens
gccgggctaatatgc

SEQ ID NO: 629533 - DNA, 15 bp, Homo sapiens
ccgggctaatatgct

SEQ ID NO: 629534 - DNA, 15 bp, Homo sapiens
cgggctaatatgctc

SEQ ID NO: 629535 - DNA, 15 bp, Homo sapiens
gggctaatatgctca

SEQ ID NO: 629536 - DNA, 15 bp, Homo sapiens
ggctaatatgctcat

SEQ ID NO: 629537 - DNA, 15 bp, Homo sapiens
gctaatatgctcatt

SEQ ID NO: 629538 - DNA, 15 bp, Homo sapiens
ctaatatgctcattt

SEQ ID NO: 629539 - DNA, 15 bp, Homo sapiens
atatgctcattttag

SEQ ID NO: 629540 - DNA, 15 bp, Homo sapiens
tatgctcattttagt

SEQ ID NO: 629541 - DNA, 15 bp, Homo sapiens
atgctcattttagtg

SEQ ID NO: 629542 - DNA, 15 bp, Homo sapiens
tgctcattttagtga

SEQ ID NO: 629543 - DNA, 15 bp, Homo sapiens
gctcattttagtgag

SEQ ID NO: 629544 - DNA, 15 bp, Homo sapiens
ctcattttagtgagg

SEQ ID NO: 629545 - DNA, 15 bp, Homo sapiens
tcattttagtgaggc

SEQ ID NO: 629546 - DNA, 15 bp, Homo sapiens
cattttagtgaggca

SEQ ID NO: 629547 - DNA, 15 bp, Homo sapiens
attttagtgaggcaa

SEQ ID NO: 629548 - DNA, 15 bp, Homo sapiens
ttttagtgaggcaaa

SEQ ID NO: 629549 - DNA, 15 bp, Homo sapiens
tttagtgaggcaaaa

SEQ ID NO: 629550 - DNA, 15 bp, Homo sapiens
ttagtgaggcaaaaa

SEQ ID NO: 629551 - DNA, 15 bp, Homo sapiens
tagtgaggcaaaaat

SEQ ID NO: 629552 - DNA, 15 bp, Homo sapiens
agtgaggcaaaaata

SEQ ID NO: 629553 - DNA, 15 bp, Homo sapiens
gtgaggcaaaaatag

SEQ ID NO: 629554 - DNA, 15 bp, Homo sapiens
tgaggcaaaaataga

SEQ ID NO: 629555 - DNA, 15 bp, Homo sapiens
gaggcaaaaatagag

SEQ ID NO: 629556 - DNA, 15 bp, Homo sapiens
aggcaaaaatagagg

SEQ ID NO: 629557 - DNA, 15 bp, Homo sapiens
ggcaaaaatagaggc

SEQ ID NO: 629558 - DNA, 15 bp, Homo sapiens
gcaaaaatagaggct

SEQ ID NO: 629559 - DNA, 15 bp, Homo sapiens
caaaaatagaggctc

SEQ ID NO: 629560 - DNA, 15 bp, Homo sapiens
aaaaatagaggctca

SEQ ID NO: 629561 - DNA, 15 bp, Homo sapiens
aaaatagaggctcag

SEQ ID NO: 629562 - DNA, 15 bp, Homo sapiens
aaatagaggctcaga

SEQ ID NO: 629563 - DNA, 15 bp, Homo sapiens
aatagaggctcagag

SEQ ID NO: 629564 - DNA, 15 bp, Homo sapiens
atagaggctcagagt

SEQ ID NO: 629565 - DNA, 15 bp, Homo sapiens
tagaggctcagagtc

SEQ ID NO: 629566 - DNA, 15 bp, Homo sapiens
agaggctcagagtct

SEQ ID NO: 629567 - DNA, 15 bp, Homo sapiens
gaggctcagagtctg

SEQ ID NO: 629568 - DNA, 15 bp, Homo sapiens
aggctcagagtctga

SEQ ID NO: 629569 - DNA, 15 bp, Homo sapiens
ggctcagagtctgat

SEQ ID NO: 629570 - DNA, 15 bp, Homo sapiens
gctcagagtctgatt

SEQ ID NO: 629571 - DNA, 15 bp, Homo sapiens
ctcagagtctgattt

SEQ ID NO: 629572 - DNA, 15 bp, Homo sapiens
tcagagtctgatttg

SEQ ID NO: 629573 - DNA, 15 bp, Homo sapiens
cagagtctgatttgt

SEQ ID NO: 629574 - DNA, 15 bp, Homo sapiens
agagtctgatttgta

SEQ ID NO: 629575 - DNA, 15 bp, Homo sapiens
gagtctgatttgtac

SEQ ID NO: 629576 - DNA, 15 bp, Homo sapiens
agtctgatttgtaca

SEQ ID NO: 629577 - DNA, 15 bp, Homo sapiens
gtctgatttgtacaa

SEQ ID NO: 629578 - DNA, 15 bp, Homo sapiens
tctgatttgtacaaa

SEQ ID NO: 629579 - DNA, 15 bp, Homo sapiens
ctgatttgtacaaaa

SEQ ID NO: 629580 - DNA, 15 bp, Homo sapiens
tgatttgtacaaaac

SEQ ID NO: 629581 - DNA, 15 bp, Homo sapiens
gatttgtacaaaact

SEQ ID NO: 629582 - DNA, 15 bp, Homo sapiens
atttgtacaaaacta

SEQ ID NO: 629583 - DNA, 15 bp, Homo sapiens
tttgtacaaaactac

SEQ ID NO: 629584 - DNA, 15 bp, Homo sapiens
ttgtacaaaactaca

SEQ ID NO: 629585 - DNA, 15 bp, Homo sapiens
tgtacaaaactacag

SEQ ID NO: 629586 - DNA, 15 bp, Homo sapiens
gtacaaaactacaga

SEQ ID NO: 629587 - DNA, 15 bp, Homo sapiens
tacaaaactacagag

SEQ ID NO: 629588 - DNA, 15 bp, Homo sapiens
acaaaactacagagc

SEQ ID NO: 629589 - DNA, 15 bp, Homo sapiens
caaaactacagagca

SEQ ID NO: 629590 - DNA, 15 bp, Homo sapiens
aaaactacagagcag

SEQ ID NO: 629591 - DNA, 15 bp, Homo sapiens
aaactacagagcagt

SEQ ID NO: 629592 - DNA, 15 bp, Homo sapiens
aactacagagcagtt

SEQ ID NO: 629593 - DNA, 15 bp, Homo sapiens
actacagagcagtta

SEQ ID NO: 629594 - DNA, 15 bp, Homo sapiens
ctacagagcagttaa

SEQ ID NO: 629595 - DNA, 15 bp, Homo sapiens
tacagagcagttaag

SEQ ID NO: 629596 - DNA, 15 bp, Homo sapiens
acagagcagttaagt

SEQ ID NO: 629597 - DNA, 15 bp, Homo sapiens
cagagcagttaagtg

SEQ ID NO: 629598 - DNA, 15 bp, Homo sapiens
agagcagttaagtgt

SEQ ID NO: 629599 - DNA, 15 bp, Homo sapiens
gagcagttaagtgtc

SEQ ID NO: 629600 - DNA, 15 bp, Homo sapiens
agcagttaagtgtcc

SEQ ID NO: 629601 - DNA, 15 bp, Homo sapiens
gcagttaagtgtcct

SEQ ID NO: 629602 - DNA, 15 bp, Homo sapiens
cagttaagtgtcctc

SEQ ID NO: 629603 - DNA, 15 bp, Homo sapiens
agttaagtgtcctct

SEQ ID NO: 629604 - DNA, 15 bp, Homo sapiens
gttaagtgtcctctc

SEQ ID NO: 629605 - DNA, 15 bp, Homo sapiens
ttaagtgtcctctca

SEQ ID NO: 629606 - DNA, 15 bp, Homo sapiens
taagtgtcctctcag

SEQ ID NO: 629607 - DNA, 15 bp, Homo sapiens
aagtgtcctctcaga

SEQ ID NO: 629608 - DNA, 15 bp, Homo sapiens
agtgtcctctcagat

SEQ ID NO: 629609 - DNA, 15 bp, Homo sapiens
gtgtcctctcagatg

SEQ ID NO: 629610 - DNA, 15 bp, Homo sapiens
tgtcctctcagatgt

SEQ ID NO: 629611 - DNA, 15 bp, Homo sapiens
gtcctctcagatgtg

SEQ ID NO: 629612 - DNA, 15 bp, Homo sapiens
tcctctcagatgtgt

SEQ ID NO: 629613 - DNA, 15 bp, Homo sapiens
cctctcagatgtgta

SEQ ID NO: 629614 - DNA, 15 bp, Homo sapiens
ctctcagatgtgtac

SEQ ID NO: 629615 - DNA, 15 bp, Homo sapiens
tctcagatgtgtacc

SEQ ID NO: 629616 - DNA, 15 bp, Homo sapiens
ctcagatgtgtaccc

SEQ ID NO: 629617 - DNA, 15 bp, Homo sapiens
tcagatgtgtaccct

SEQ ID NO: 629618 - DNA, 15 bp, Homo sapiens
cagatgtgtaccctg

SEQ ID NO: 629619 - DNA, 15 bp, Homo sapiens
agatgtgtaccctga

SEQ ID NO: 629620 - DNA, 15 bp, Homo sapiens
gatgtgtaccctgat

SEQ ID NO: 629621 - DNA, 15 bp, Homo sapiens
atgtgtaccctgatc

SEQ ID NO: 629622 - DNA, 15 bp, Homo sapiens
tgtgtaccctgatct

SEQ ID NO: 629623 - DNA, 15 bp, Homo sapiens
gtgtaccctgatctg

SEQ ID NO: 629624 - DNA, 15 bp, Homo sapiens
tgtaccctgatctgg

SEQ ID NO: 629625 - DNA, 15 bp, Homo sapiens
gtaccctgatctggg

SEQ ID NO: 629626 - DNA, 15 bp, Homo sapiens
taccctgatctgggt

SEQ ID NO: 629627 - DNA, 15 bp, Homo sapiens
accctgatctgggtg

SEQ ID NO: 629628 - DNA, 15 bp, Homo sapiens
ccctgatctgggtga

SEQ ID NO: 629629 - DNA, 15 bp, Homo sapiens
cctgatctgggtgac

SEQ ID NO: 629630 - DNA, 15 bp, Homo sapiens
ctgatctgggtgact

SEQ ID NO: 629631 - DNA, 15 bp, Homo sapiens
tgatctgggtgactc

SEQ ID NO: 629632 - DNA, 15 bp, Homo sapiens
gatctgggtgactct

SEQ ID NO: 629633 - DNA, 15 bp, Homo sapiens
atctgggtgactcta

SEQ ID NO: 629634 - DNA, 15 bp, Homo sapiens
tctgggtgactctag

SEQ ID NO: 629635 - DNA, 15 bp, Homo sapiens
ctgggtgactctagg

SEQ ID NO: 629636 - DNA, 15 bp, Homo sapiens
tgggtgactctagga

SEQ ID NO: 629637 - DNA, 15 bp, Homo sapiens
gggtgactctaggac

SEQ ID NO: 629638 - DNA, 15 bp, Homo sapiens
ggtgactctaggact

SEQ ID NO: 629639 - DNA, 15 bp, Homo sapiens
gtgactctaggactc

SEQ ID NO: 629640 - DNA, 15 bp, Homo sapiens
tgactctaggactct

SEQ ID NO: 629641 - DNA, 15 bp, Homo sapiens
gactctaggactcta

SEQ ID NO: 629642 - DNA, 15 bp, Homo sapiens
actctaggactctag

SEQ ID NO: 629643 - DNA, 15 bp, Homo sapiens
ctctaggactctagg

SEQ ID NO: 629644 - DNA, 15 bp, Homo sapiens
tctaggactctaggt

SEQ ID NO: 629645 - DNA, 15 bp, Homo sapiens
ctaggactctaggtc

SEQ ID NO: 629646 - DNA, 15 bp, Homo sapiens
taggactctaggtct

SEQ ID NO: 629647 - DNA, 15 bp, Homo sapiens
aggactctaggtctc

SEQ ID NO: 629648 - DNA, 15 bp, Homo sapiens
ggactctaggtctca

SEQ ID NO: 629649 - DNA, 15 bp, Homo sapiens
gactctaggtctcaa

SEQ ID NO: 629650 - DNA, 15 bp, Homo sapiens
actctaggtctcaac

SEQ ID NO: 629651 - DNA, 15 bp, Homo sapiens
ctctaggtctcaact

SEQ ID NO: 629652 - DNA, 15 bp, Homo sapiens
tctaggtctcaactg

SEQ ID NO: 629653 - DNA, 15 bp, Homo sapiens
ctaggtctcaactgt

SEQ ID NO: 629654 - DNA, 15 bp, Homo sapiens
taggtctcaactgtt

SEQ ID NO: 629655 - DNA, 15 bp, Homo sapiens
aggtctcaactgtta

SEQ ID NO: 629656 - DNA, 15 bp, Homo sapiens
ggtctcaactgttac

SEQ ID NO: 629657 - DNA, 15 bp, Homo sapiens
gtctcaactgttaca

SEQ ID NO: 629658 - DNA, 15 bp, Homo sapiens
tctcaactgttacaa

SEQ ID NO: 629659 - DNA, 15 bp, Homo sapiens
ctcaactgttacaac

SEQ ID NO: 629660 - DNA, 15 bp, Homo sapiens
tcaactgttacaacc

SEQ ID NO: 629661 - DNA, 15 bp, Homo sapiens
caactgttacaacca

SEQ ID NO: 629662 - DNA, 15 bp, Homo sapiens
aactgttacaaccag

SEQ ID NO: 629663 - DNA, 15 bp, Homo sapiens
actgttacaaccagt

SEQ ID NO: 629664 - DNA, 15 bp, Homo sapiens
ctgttacaaccagtt

SEQ ID NO: 629665 - DNA, 15 bp, Homo sapiens
tgttacaaccagtta

SEQ ID NO: 629666 - DNA, 15 bp, Homo sapiens
gttacaaccagttaa

SEQ ID NO: 629667 - DNA, 15 bp, Homo sapiens
ttacaaccagttaag

SEQ ID NO: 629668 - DNA, 15 bp, Homo sapiens
tacaaccagttaagg

SEQ ID NO: 629669 - DNA, 15 bp, Homo sapiens
acaaccagttaaggg

SEQ ID NO: 629670 - DNA, 15 bp, Homo sapiens
caaccagttaagggt

SEQ ID NO: 629671 - DNA, 15 bp, Homo sapiens
aaccagttaagggtt

SEQ ID NO: 629672 - DNA, 15 bp, Homo sapiens
accagttaagggttt

SEQ ID NO: 629673 - DNA, 15 bp, Homo sapiens
ccagttaagggtttg

SEQ ID NO: 629674 - DNA, 15 bp, Homo sapiens
cagttaagggtttgg

SEQ ID NO: 629675 - DNA, 15 bp, Homo sapiens
agttaagggtttggg

SEQ ID NO: 629676 - DNA, 15 bp, Homo sapiens
gttaagggtttgggg

SEQ ID NO: 629677 - DNA, 15 bp, Homo sapiens
ttaagggtttgggga

SEQ ID NO: 629678 - DNA, 15 bp, Homo sapiens
taagggtttggggaa

SEQ ID NO: 629679 - DNA, 15 bp, Homo sapiens
aagggtttggggaag

SEQ ID NO: 629680 - DNA, 15 bp, Homo sapiens
agggtttggggaagc

SEQ ID NO: 629681 - DNA, 15 bp, Homo sapiens
gggtttggggaagca

SEQ ID NO: 629682 - DNA, 15 bp, Homo sapiens
ggtttggggaagcac

SEQ ID NO: 629683 - DNA, 15 bp, Homo sapiens
gtttggggaagcact

SEQ ID NO: 629684 - DNA, 15 bp, Homo sapiens
tttggggaagcactg

SEQ ID NO: 629685 - DNA, 15 bp, Homo sapiens
ttggggaagcactgg

SEQ ID NO: 629686 - DNA, 15 bp, Homo sapiens
tggggaagcactggg

SEQ ID NO: 629687 - DNA, 15 bp, Homo sapiens
ggggaagcactgggc

SEQ ID NO: 629688 - DNA, 15 bp, Homo sapiens
gggaagcactgggcc

SEQ ID NO: 629689 - DNA, 15 bp, Homo sapiens
ggaagcactgggcca

SEQ ID NO: 629690 - DNA, 15 bp, Homo sapiens
gaagcactgggccaa

SEQ ID NO: 629691 - DNA, 15 bp, Homo sapiens
aagcactgggccaag

SEQ ID NO: 629692 - DNA, 15 bp, Homo sapiens
agcactgggccaaga

SEQ ID NO: 629693 - DNA, 15 bp, Homo sapiens
gcactgggccaagag

SEQ ID NO: 629694 - DNA, 15 bp, Homo sapiens
cactgggccaagagt

SEQ ID NO: 629695 - DNA, 15 bp, Homo sapiens
actgggccaagagtc

SEQ ID NO: 629696 - DNA, 15 bp, Homo sapiens
ctgggccaagagtca

SEQ ID NO: 629697 - DNA, 15 bp, Homo sapiens
tgggccaagagtcag

SEQ ID NO: 629698 - DNA, 15 bp, Homo sapiens
gggccaagagtcagg

SEQ ID NO: 629699 - DNA, 15 bp, Homo sapiens
ggccaagagtcagga

SEQ ID NO: 629700 - DNA, 15 bp, Homo sapiens
gccaagagtcaggaa

SEQ ID NO: 629701 - DNA, 15 bp, Homo sapiens
ccaagagtcaggaaa

SEQ ID NO: 629702 - DNA, 15 bp, Homo sapiens
caagagtcaggaaaa

SEQ ID NO: 629703 - DNA, 15 bp, Homo sapiens
aagagtcaggaaaat

SEQ ID NO: 629704 - DNA, 15 bp, Homo sapiens
agagtcaggaaaatg

SEQ ID NO: 629705 - DNA, 15 bp, Homo sapiens
gagtcaggaaaatgg

SEQ ID NO: 629706 - DNA, 15 bp, Homo sapiens
agtcaggaaaatgga

SEQ ID NO: 629707 - DNA, 15 bp, Homo sapiens
gtcaggaaaatggaa

SEQ ID NO: 629708 - DNA, 15 bp, Homo sapiens
tcaggaaaatggaag

SEQ ID NO: 629709 - DNA, 15 bp, Homo sapiens
caggaaaatggaagc

SEQ ID NO: 629710 - DNA, 15 bp, Homo sapiens
aggaaaatggaagcc

SEQ ID NO: 629711 - DNA, 15 bp, Homo sapiens
ggaaaatggaagcca

SEQ ID NO: 629712 - DNA, 15 bp, Homo sapiens
gaaaatggaagccac

SEQ ID NO: 629713 - DNA, 15 bp, Homo sapiens
aaaatggaagccaca

SEQ ID NO: 629714 - DNA, 15 bp, Homo sapiens
aaatggaagccacag

SEQ ID NO: 629715 - DNA, 15 bp, Homo sapiens
aatggaagccacagg

SEQ ID NO: 629716 - DNA, 15 bp, Homo sapiens
atggaagccacaggt

SEQ ID NO: 629717 - DNA, 15 bp, Homo sapiens
tggaagccacaggta

SEQ ID NO: 629718 - DNA, 15 bp, Homo sapiens
ggaagccacaggtag

SEQ ID NO: 629719 - DNA, 15 bp, Homo sapiens
gaagccacaggtagt

SEQ ID NO: 629720 - DNA, 15 bp, Homo sapiens
aagccacaggtagtg

SEQ ID NO: 629721 - DNA, 15 bp, Homo sapiens
agccacaggtagtgc

SEQ ID NO: 629722 - DNA, 15 bp, Homo sapiens
gccacaggtagtgca

SEQ ID NO: 629723 - DNA, 15 bp, Homo sapiens
ccacaggtagtgcaa

SEQ ID NO: 629724 - DNA, 15 bp, Homo sapiens
cacaggtagtgcaag

SEQ ID NO: 629725 - DNA, 15 bp, Homo sapiens
acaggtagtgcaagg

SEQ ID NO: 629726 - DNA, 15 bp, Homo sapiens
caggtagtgcaaggt

SEQ ID NO: 629727 - DNA, 15 bp, Homo sapiens
aggtagtgcaaggtc

SEQ ID NO: 629728 - DNA, 15 bp, Homo sapiens
ggtagtgcaaggtct

SEQ ID NO: 629729 - DNA, 15 bp, Homo sapiens
gtagtgcaaggtctt

SEQ ID NO: 629730 - DNA, 15 bp, Homo sapiens
tagtgcaaggtcttg

SEQ ID NO: 629731 - DNA, 15 bp, Homo sapiens
agtgcaaggtcttgg

SEQ ID NO: 629732 - DNA, 15 bp, Homo sapiens
gtgcaaggtcttggg

SEQ ID NO: 629733 - DNA, 15 bp, Homo sapiens
tgcaaggtcttggga

SEQ ID NO: 629734 - DNA, 15 bp, Homo sapiens
gcaaggtcttgggaa

SEQ ID NO: 629735 - DNA, 15 bp, Homo sapiens
caaggtcttgggaat

SEQ ID NO: 629736 - DNA, 15 bp, Homo sapiens
aaggtcttgggaatg

SEQ ID NO: 629737 - DNA, 15 bp, Homo sapiens
aggtcttgggaatgg

SEQ ID NO: 629738 - DNA, 15 bp, Homo sapiens
ggtcttgggaatggg

SEQ ID NO: 629739 - DNA, 15 bp, Homo sapiens
gtcttgggaatggga

SEQ ID NO: 629740 - DNA, 15 bp, Homo sapiens
tcttgggaatgggac

SEQ ID NO: 629741 - DNA, 15 bp, Homo sapiens
cttgggaatgggacg

SEQ ID NO: 629742 - DNA, 15 bp, Homo sapiens
ttgggaatgggacgt

SEQ ID NO: 629743 - DNA, 15 bp, Homo sapiens
tgggaatgggacgtc

SEQ ID NO: 629744 - DNA, 15 bp, Homo sapiens
gggaatgggacgtct

SEQ ID NO: 629745 - DNA, 15 bp, Homo sapiens
ggaatgggacgtctg

SEQ ID NO: 629746 - DNA, 15 bp, Homo sapiens
gaatgggacgtctgg

SEQ ID NO: 629747 - DNA, 15 bp, Homo sapiens
aatgggacgtctggt

SEQ ID NO: 629748 - DNA, 15 bp, Homo sapiens
atgggacgtctggtc

SEQ ID NO: 629749 - DNA, 15 bp, Homo sapiens
tgggacgtctggtcc

SEQ ID NO: 629750 - DNA, 15 bp, Homo sapiens
gggacgtctggtcca

SEQ ID NO: 629751 - DNA, 15 bp, Homo sapiens
ggacgtctggtccaa

SEQ ID NO: 629752 - DNA, 15 bp, Homo sapiens
gacgtctggtccaag

SEQ ID NO: 629753 - DNA, 15 bp, Homo sapiens
acgtctggtccaagg

SEQ ID NO: 629754 - DNA, 15 bp, Homo sapiens
cgtctggtccaagga

SEQ ID NO: 629755 - DNA, 15 bp, Homo sapiens
gtctggtccaaggat

SEQ ID NO: 629756 - DNA, 15 bp, Homo sapiens
tctggtccaaggatt

SEQ ID NO: 629757 - DNA, 15 bp, Homo sapiens
ctggtccaaggattc

SEQ ID NO: 629758 - DNA, 15 bp, Homo sapiens
tggtccaaggattca

SEQ ID NO: 629759 - DNA, 15 bp, Homo sapiens
ggtccaaggattcac

SEQ ID NO: 629760 - DNA, 15 bp, Homo sapiens
gtccaaggattcacg

SEQ ID NO: 629761 - DNA, 15 bp, Homo sapiens
tccaaggattcacgc

SEQ ID NO: 629762 - DNA, 15 bp, Homo sapiens
ccaaggattcacgcg

SEQ ID NO: 629763 - DNA, 15 bp, Homo sapiens
caaggattcacgcga

SEQ ID NO: 629764 - DNA, 15 bp, Homo sapiens
aaggattcacgcgat

SEQ ID NO: 629765 - DNA, 15 bp, Homo sapiens
aggattcacgcgatg

SEQ ID NO: 629766 - DNA, 15 bp, Homo sapiens
ggattcacgcgatga

SEQ ID NO: 629767 - DNA, 15 bp, Homo sapiens
gattcacgcgatgac

SEQ ID NO: 629768 - DNA, 15 bp, Homo sapiens
attcacgcgatgact

SEQ ID NO: 629769 - DNA, 15 bp, Homo sapiens
ttcacgcgatgactg

SEQ ID NO: 629770 - DNA, 15 bp, Homo sapiens
tcacgcgatgactgg

SEQ ID NO: 629771 - DNA, 15 bp, Homo sapiens
cacgcgatgactgga

SEQ ID NO: 629772 - DNA, 15 bp, Homo sapiens
acgcgatgactggaa

SEQ ID NO: 629773 - DNA, 15 bp, Homo sapiens
cgcgatgactggaac

SEQ ID NO: 629774 - DNA, 15 bp, Homo sapiens
gcgatgactggaacc

SEQ ID NO: 629775 - DNA, 15 bp, Homo sapiens
cgatgactggaaccc

SEQ ID NO: 629776 - DNA, 15 bp, Homo sapiens
gatgactggaacccg

SEQ ID NO: 629777 - DNA, 15 bp, Homo sapiens
atgactggaacccga

SEQ ID NO: 629778 - DNA, 15 bp, Homo sapiens
tgactggaacccgaa

SEQ ID NO: 629779 - DNA, 15 bp, Homo sapiens
gactggaacccgaag

SEQ ID NO: 629780 - DNA, 15 bp, Homo sapiens
actggaacccgaaga

SEQ ID NO: 629781 - DNA, 15 bp, Homo sapiens
ctggaacccgaagag

SEQ ID NO: 629782 - DNA, 15 bp, Homo sapiens
tggaacccgaagagc

SEQ ID NO: 629783 - DNA, 15 bp, Homo sapiens
ggaacccgaagagcc

SEQ ID NO: 629784 - DNA, 15 bp, Homo sapiens
gaacccgaagagccg

SEQ ID NO: 629785 - DNA, 15 bp, Homo sapiens
aacccgaagagccgg

SEQ ID NO: 629786 - DNA, 15 bp, Homo sapiens
acccgaagagccggg

SEQ ID NO: 629787 - DNA, 15 bp, Homo sapiens
cccgaagagccgggg

SEQ ID NO: 629788 - DNA, 15 bp, Homo sapiens
ccgaagagccggggc

SEQ ID NO: 629789 - DNA, 15 bp, Homo sapiens
cgaagagccggggcc

SEQ ID NO: 629790 - DNA, 15 bp, Homo sapiens
gaagagccggggccc

SEQ ID NO: 629791 - DNA, 15 bp, Homo sapiens
aagagccggggcccg

SEQ ID NO: 629792 - DNA, 15 bp, Homo sapiens
agagccggggcccgg

SEQ ID NO: 629793 - DNA, 15 bp, Homo sapiens
gagccggggcccggt

SEQ ID NO: 629794 - DNA, 15 bp, Homo sapiens
agccggggcccggtt

SEQ ID NO: 629795 - DNA, 15 bp, Homo sapiens
gccggggcccggttt

SEQ ID NO: 629796 - DNA, 15 bp, Homo sapiens
ccggggcccggttta

SEQ ID NO: 629797 - DNA, 15 bp, Homo sapiens
cggggcccggtttac

SEQ ID NO: 629798 - DNA, 15 bp, Homo sapiens
ggggcccggtttacg

SEQ ID NO: 629799 - DNA, 15 bp, Homo sapiens
gggcccggtttacgg

SEQ ID NO: 629800 - DNA, 15 bp, Homo sapiens
ggcccggtttacggc

SEQ ID NO: 629801 - DNA, 15 bp, Homo sapiens
gcccggtttacggcc

SEQ ID NO: 629802 - DNA, 15 bp, Homo sapiens
cccggtttacggccg

SEQ ID NO: 629803 - DNA, 15 bp, Homo sapiens
ccggtttacggccgc

SEQ ID NO: 629804 - DNA, 15 bp, Homo sapiens
cggtttacggccgcc

SEQ ID NO: 629805 - DNA, 15 bp, Homo sapiens
ggtttacggccgcca

SEQ ID NO: 629806 - DNA, 15 bp, Homo sapiens
gtttacggccgccat

SEQ ID NO: 629807 - DNA, 15 bp, Homo sapiens
tttacggccgccatg

SEQ ID NO: 629808 - DNA, 15 bp, Homo sapiens
ttacggccgccatga

SEQ ID NO: 629809 - DNA, 15 bp, Homo sapiens
tacggccgccatgaa

SEQ ID NO: 629810 - DNA, 15 bp, Homo sapiens
acggccgccatgaag

SEQ ID NO: 629811 - DNA, 15 bp, Homo sapiens
cggccgccatgaagc

SEQ ID NO: 629812 - DNA, 15 bp, Homo sapiens
ggccgccatgaagca

SEQ ID NO: 629813 - DNA, 15 bp, Homo sapiens
gccgccatgaagcaa

SEQ ID NO: 629814 - DNA, 15 bp, Homo sapiens
ccgccatgaagcaac

SEQ ID NO: 629815 - DNA, 15 bp, Homo sapiens
cgccatgaagcaacg

SEQ ID NO: 629816 - DNA, 15 bp, Homo sapiens
gccatgaagcaacgc

SEQ ID NO: 629817 - DNA, 15 bp, Homo sapiens
ccatgaagcaacgcg

SEQ ID NO: 629818 - DNA, 15 bp, Homo sapiens
catgaagcaacgcgc

SEQ ID NO: 629819 - DNA, 15 bp, Homo sapiens
atgaagcaacgcgcg

SEQ ID NO: 629820 - DNA, 15 bp, Homo sapiens
tgaagcaacgcgcgc

SEQ ID NO: 629821 - DNA, 15 bp, Homo sapiens
gaagcaacgcgcgcc

SEQ ID NO: 629822 - DNA, 15 bp, Homo sapiens
aagcaacgcgcgccg

SEQ ID NO: 629823 - DNA, 15 bp, Homo sapiens
agcaacgcgcgccgg

SEQ ID NO: 629824 - DNA, 15 bp, Homo sapiens
gcaacgcgcgccggt

SEQ ID NO: 629825 - DNA, 15 bp, Homo sapiens
caacgcgcgccggta

SEQ ID NO: 629826 - DNA, 15 bp, Homo sapiens
aacgcgcgccggtag

SEQ ID NO: 629827 - DNA, 15 bp, Homo sapiens
acgcgcgccggtagg

SEQ ID NO: 629828 - DNA, 15 bp, Homo sapiens
cgcgcgccggtaggt

SEQ ID NO: 629829 - DNA, 15 bp, Homo sapiens
gcgcgccggtaggtt

SEQ ID NO: 629830 - DNA, 15 bp, Homo sapiens
cgcgccggtaggttt

SEQ ID NO: 629831 - DNA, 15 bp, Homo sapiens
gcgccggtaggtttg

SEQ ID NO: 629832 - DNA, 15 bp, Homo sapiens
cgccggtaggtttgg

SEQ ID NO: 629833 - DNA, 15 bp, Homo sapiens
gccggtaggtttggg

SEQ ID NO: 629834 - DNA, 15 bp, Homo sapiens
ccggtaggtttggga

SEQ ID NO: 629835 - DNA, 15 bp, Homo sapiens
cggtaggtttgggaa

SEQ ID NO: 629836 - DNA, 15 bp, Homo sapiens
ggtaggtttgggaat

SEQ ID NO: 629837 - DNA, 15 bp, Homo sapiens
gtaggtttgggaatc

SEQ ID NO: 629838 - DNA, 15 bp, Homo sapiens
taggtttgggaatca

SEQ ID NO: 629839 - DNA, 15 bp, Homo sapiens
aggtttgggaatcag

SEQ ID NO: 629840 - DNA, 15 bp, Homo sapiens
ggtttgggaatcagg

SEQ ID NO: 629841 - DNA, 15 bp, Homo sapiens
gtttgggaatcaggg

SEQ ID NO: 629842 - DNA, 15 bp, Homo sapiens
tttgggaatcaggga

SEQ ID NO: 629843 - DNA, 15 bp, Homo sapiens
ttgggaatcagggag

SEQ ID NO: 629844 - DNA, 15 bp, Homo sapiens
tgggaatcagggagc

SEQ ID NO: 629845 - DNA, 15 bp, Homo sapiens
gggaatcagggagcc

SEQ ID NO: 629846 - DNA, 15 bp, Homo sapiens
ggaatcagggagccc

SEQ ID NO: 629847 - DNA, 15 bp, Homo sapiens
gaatcagggagccct

SEQ ID NO: 629848 - DNA, 15 bp, Homo sapiens
aatcagggagccctc

SEQ ID NO: 629849 - DNA, 15 bp, Homo sapiens
atcagggagccctct

SEQ ID NO: 629850 - DNA, 15 bp, Homo sapiens
tcagggagccctctg

SEQ ID NO: 629851 - DNA, 15 bp, Homo sapiens
cagggagccctctga

SEQ ID NO: 629852 - DNA, 15 bp, Homo sapiens
agggagccctctgaa

SEQ ID NO: 629853 - DNA, 15 bp, Homo sapiens
gggagccctctgaat

SEQ ID NO: 629854 - DNA, 15 bp, Homo sapiens
ggagccctctgaata

SEQ ID NO: 629855 - DNA, 15 bp, Homo sapiens
gagccctctgaatag

SEQ ID NO: 629856 - DNA, 15 bp, Homo sapiens
agccctctgaatagg

SEQ ID NO: 629857 - DNA, 15 bp, Homo sapiens
gccctctgaatagga

SEQ ID NO: 629858 - DNA, 15 bp, Homo sapiens
ccctctgaataggag

SEQ ID NO: 629859 - DNA, 15 bp, Homo sapiens
cctctgaataggaga

SEQ ID NO: 629860 - DNA, 15 bp, Homo sapiens
ctctgaataggagac

SEQ ID NO: 629861 - DNA, 15 bp, Homo sapiens
tctgaataggagact

SEQ ID NO: 629862 - DNA, 15 bp, Homo sapiens
ctgaataggagactg

SEQ ID NO: 629863 - DNA, 15 bp, Homo sapiens
tgaataggagactga

SEQ ID NO: 629864 - DNA, 15 bp, Homo sapiens
gaataggagactgag

SEQ ID NO: 629865 - DNA, 15 bp, Homo sapiens
aataggagactgagt

SEQ ID NO: 629866 - DNA, 15 bp, Homo sapiens
ataggagactgagtt

SEQ ID NO: 629867 - DNA, 15 bp, Homo sapiens
taggagactgagttg

SEQ ID NO: 629868 - DNA, 15 bp, Homo sapiens
aggagactgagttgg

SEQ ID NO: 629869 - DNA, 15 bp, Homo sapiens
ggagactgagttggg

SEQ ID NO: 629870 - DNA, 15 bp, Homo sapiens
gagactgagttggga

SEQ ID NO: 629871 - DNA, 15 bp, Homo sapiens
agactgagttgggag

SEQ ID NO: 629872 - DNA, 15 bp, Homo sapiens
gactgagttgggagg

SEQ ID NO: 629873 - DNA, 15 bp, Homo sapiens
actgagttgggaggg

SEQ ID NO: 629874 - DNA, 15 bp, Homo sapiens
ctgagttgggaggga

SEQ ID NO: 629875 - DNA, 15 bp, Homo sapiens
tgagttgggagggaa

SEQ ID NO: 629876 - DNA, 15 bp, Homo sapiens
gagttgggagggaaa

SEQ ID NO: 629877 - DNA, 15 bp, Homo sapiens
agttgggagggaaag

SEQ ID NO: 629878 - DNA, 15 bp, Homo sapiens
gttgggagggaaagg

SEQ ID NO: 629879 - DNA, 15 bp, Homo sapiens
ttgggagggaaaggg

SEQ ID NO: 629880 - DNA, 15 bp, Homo sapiens
tgggagggaaagggg

SEQ ID NO: 629881 - DNA, 15 bp, Homo sapiens
gggagggaaaggggc

SEQ ID NO: 629882 - DNA, 15 bp, Homo sapiens
ggagggaaaggggct

SEQ ID NO: 629883 - DNA, 15 bp, Homo sapiens
gagggaaaggggctt

SEQ ID NO: 629884 - DNA, 15 bp, Homo sapiens
agggaaaggggcttc

SEQ ID NO: 629885 - DNA, 15 bp, Homo sapiens
gggaaaggggcttcg

SEQ ID NO: 629886 - DNA, 15 bp, Homo sapiens
ggaaaggggcttcgc

SEQ ID NO: 629887 - DNA, 15 bp, Homo sapiens
gaaaggggcttcgct

SEQ ID NO: 629888 - DNA, 15 bp, Homo sapiens
aaaggggcttcgctg

SEQ ID NO: 629889 - DNA, 15 bp, Homo sapiens
aaggggcttcgctgg

SEQ ID NO: 629890 - DNA, 15 bp, Homo sapiens
aggggcttcgctggg

SEQ ID NO: 629891 - DNA, 15 bp, Homo sapiens
ggggcttcgctgggg

SEQ ID NO: 629892 - DNA, 15 bp, Homo sapiens
gggcttcgctggggg

SEQ ID NO: 629893 - DNA, 15 bp, Homo sapiens
ggcttcgctggggga

SEQ ID NO: 629894 - DNA, 15 bp, Homo sapiens
gcttcgctgggggag

SEQ ID NO: 629895 - DNA, 15 bp, Homo sapiens
cttcgctgggggagc

SEQ ID NO: 629896 - DNA, 15 bp, Homo sapiens
ttcgctgggggagcc

SEQ ID NO: 629897 - DNA, 15 bp, Homo sapiens
tcgctgggggagcct

SEQ ID NO: 629898 - DNA, 15 bp, Homo sapiens
cgctgggggagcctc

SEQ ID NO: 629899 - DNA, 15 bp, Homo sapiens
gctgggggagcctcg

SEQ ID NO: 629900 - DNA, 15 bp, Homo sapiens
ctgggggagcctcgg

SEQ ID NO: 629901 - DNA, 15 bp, Homo sapiens
tgggggagcctcggc

SEQ ID NO: 629902 - DNA, 15 bp, Homo sapiens
gggggagcctcggct

SEQ ID NO: 629903 - DNA, 15 bp, Homo sapiens
ggggagcctcggctt

SEQ ID NO: 629904 - DNA, 15 bp, Homo sapiens
gggagcctcggcttc

SEQ ID NO: 629905 - DNA, 15 bp, Homo sapiens
ggagcctcggcttct

SEQ ID NO: 629906 - DNA, 15 bp, Homo sapiens
gagcctcggcttctt

SEQ ID NO: 629907 - DNA, 15 bp, Homo sapiens
agcctcggcttcttc

SEQ ID NO: 629908 - DNA, 15 bp, Homo sapiens
gcctcggcttcttct

SEQ ID NO: 629909 - DNA, 15 bp, Homo sapiens
cctcggcttcttctg

SEQ ID NO: 629910 - DNA, 15 bp, Homo sapiens
ctcggcttcttctgg

SEQ ID NO: 629911 - DNA, 15 bp, Homo sapiens
tcggcttcttctggg

SEQ ID NO: 629912 - DNA, 15 bp, Homo sapiens
cggcttcttctggga

SEQ ID NO: 629913 - DNA, 15 bp, Homo sapiens
ggcttcttctgggag

SEQ ID NO: 629914 - DNA, 15 bp, Homo sapiens
gcttcttctgggaga

SEQ ID NO: 629915 - DNA, 15 bp, Homo sapiens
cttcttctgggagaa

SEQ ID NO: 629916 - DNA, 15 bp, Homo sapiens
ttcttctgggagaaa

SEQ ID NO: 629917 - DNA, 15 bp, Homo sapiens
tcttctgggagaaaa

SEQ ID NO: 629918 - DNA, 15 bp, Homo sapiens
cttctgggagaaaat

SEQ ID NO: 629919 - DNA, 15 bp, Homo sapiens
ttctgggagaaaatt

SEQ ID NO: 629920 - DNA, 15 bp, Homo sapiens
tctgggagaaaattc

SEQ ID NO: 629921 - DNA, 15 bp, Homo sapiens
ctgggagaaaattcc

SEQ ID NO: 629922 - DNA, 15 bp, Homo sapiens
tgggagaaaattccc

SEQ ID NO: 629923 - DNA, 15 bp, Homo sapiens
gggagaaaattccca

SEQ ID NO: 629924 - DNA, 15 bp, Homo sapiens
ggagaaaattcccac

SEQ ID NO: 629925 - DNA, 15 bp, Homo sapiens
gagaaaattcccacg

SEQ ID NO: 629926 - DNA, 15 bp, Homo sapiens
agaaaattcccacgg

SEQ ID NO: 629927 - DNA, 15 bp, Homo sapiens
gaaaattcccacggc

SEQ ID NO: 629928 - DNA, 15 bp, Homo sapiens
aaaattcccacggct

SEQ ID NO: 629929 - DNA, 15 bp, Homo sapiens
aaattcccacggcta

SEQ ID NO: 629930 - DNA, 15 bp, Homo sapiens
aattcccacggctac

SEQ ID NO: 629931 - DNA, 15 bp, Homo sapiens
attcccacggctacc

SEQ ID NO: 629932 - DNA, 15 bp, Homo sapiens
ttcccacggctacct

SEQ ID NO: 629933 - DNA, 15 bp, Homo sapiens
tcccacggctaccta

SEQ ID NO: 629934 - DNA, 15 bp, Homo sapiens
cccacggctacctag

SEQ ID NO: 629935 - DNA, 15 bp, Homo sapiens
ccacggctacctagt

SEQ ID NO: 629936 - DNA, 15 bp, Homo sapiens
cacggctacctagtg

SEQ ID NO: 629937 - DNA, 15 bp, Homo sapiens
acggctacctagtga

SEQ ID NO: 629938 - DNA, 15 bp, Homo sapiens
cggctacctagtgag

SEQ ID NO: 629939 - DNA, 15 bp, Homo sapiens
ggctacctagtgagc

SEQ ID NO: 629940 - DNA, 15 bp, Homo sapiens
gctacctagtgagcc

SEQ ID NO: 629941 - DNA, 15 bp, Homo sapiens
ctacctagtgagcct

SEQ ID NO: 629942 - DNA, 15 bp, Homo sapiens
tacctagtgagcctg

SEQ ID NO: 629943 - DNA, 15 bp, Homo sapiens
acctagtgagcctgc

SEQ ID NO: 629944 - DNA, 15 bp, Homo sapiens
cctagtgagcctgca

SEQ ID NO: 629945 - DNA, 15 bp, Homo sapiens
ctagtgagcctgcaa

SEQ ID NO: 629946 - DNA, 15 bp, Homo sapiens
tagtgagcctgcaaa

SEQ ID NO: 629947 - DNA, 15 bp, Homo sapiens
agtgagcctgcaaac

SEQ ID NO: 629948 - DNA, 15 bp, Homo sapiens
gtgagcctgcaaact

SEQ ID NO: 629949 - DNA, 15 bp, Homo sapiens
tgagcctgcaaactg

SEQ ID NO: 629950 - DNA, 15 bp, Homo sapiens
gagcctgcaaactgg

SEQ ID NO: 629951 - DNA, 15 bp, Homo sapiens
agcctgcaaactggt

SEQ ID NO: 629952 - DNA, 15 bp, Homo sapiens
gcctgcaaactggta

SEQ ID NO: 629953 - DNA, 15 bp, Homo sapiens
cctgcaaactggtag

SEQ ID NO: 629954 - DNA, 15 bp, Homo sapiens
ctgcaaactggtagg

SEQ ID NO: 629955 - DNA, 15 bp, Homo sapiens
tgcaaactggtaggc

SEQ ID NO: 629956 - DNA, 15 bp, Homo sapiens
gcaaactggtaggcg

SEQ ID NO: 629957 - DNA, 15 bp, Homo sapiens
caaactggtaggcgc

SEQ ID NO: 629958 - DNA, 15 bp, Homo sapiens
aaactggtaggcgcc

SEQ ID NO: 629959 - DNA, 15 bp, Homo sapiens
aactggtaggcgccg

SEQ ID NO: 629960 - DNA, 15 bp, Homo sapiens
actggtaggcgccgg

SEQ ID NO: 629961 - DNA, 15 bp, Homo sapiens
ctggtaggcgccggc

SEQ ID NO: 629962 - DNA, 15 bp, Homo sapiens
tggtaggcgccggcg

SEQ ID NO: 629963 - DNA, 15 bp, Homo sapiens
ggtaggcgccggcgt

SEQ ID NO: 629964 - DNA, 15 bp, Homo sapiens
gtaggcgccggcgta

SEQ ID NO: 629965 - DNA, 15 bp, Homo sapiens
taggcgccggcgtag

SEQ ID NO: 629966 - DNA, 15 bp, Homo sapiens
aggcgccggcgtagg

SEQ ID NO: 629967 - DNA, 15 bp, Homo sapiens
ggcgccggcgtaggc

SEQ ID NO: 629968 - DNA, 15 bp, Homo sapiens
gcgccggcgtaggcg

SEQ ID NO: 629969 - DNA, 15 bp, Homo sapiens
cgccggcgtaggcgc

SEQ ID NO: 629970 - DNA, 15 bp, Homo sapiens
gccggcgtaggcgcg

SEQ ID NO: 629971 - DNA, 15 bp, Homo sapiens
ccggcgtaggcgcgc

SEQ ID NO: 629972 - DNA, 15 bp, Homo sapiens
cggcgtaggcgcgcg

SEQ ID NO: 629973 - DNA, 15 bp, Homo sapiens
ggcgtaggcgcgcgg

SEQ ID NO: 629974 - DNA, 15 bp, Homo sapiens
gcgtaggcgcgcggg

SEQ ID NO: 629975 - DNA, 15 bp, Homo sapiens
cgtaggcgcgcgggc

SEQ ID NO: 629976 - DNA, 15 bp, Homo sapiens
gtaggcgcgcgggcg

SEQ ID NO: 629977 - DNA, 15 bp, Homo sapiens
taggcgcgcgggcgg

SEQ ID NO: 629978 - DNA, 15 bp, Homo sapiens
aggcgcgcgggcggg

SEQ ID NO: 629979 - DNA, 15 bp, Homo sapiens
ggcgcgcgggcgggg

SEQ ID NO: 629980 - DNA, 15 bp, Homo sapiens
gcgcgcgggcggggc

SEQ ID NO: 629981 - DNA, 15 bp, Homo sapiens
cgcgcgggcggggcc

SEQ ID NO: 629982 - DNA, 15 bp, Homo sapiens
gcgcgggcggggccg

SEQ ID NO: 629983 - DNA, 15 bp, Homo sapiens
cgcgggcggggccgg

SEQ ID NO: 629984 - DNA, 15 bp, Homo sapiens
gcgggcggggccggg

SEQ ID NO: 629985 - DNA, 15 bp, Homo sapiens
cgggcggggccgggg

SEQ ID NO: 629986 - DNA, 15 bp, Homo sapiens
gggcggggccggggg

SEQ ID NO: 629987 - DNA, 15 bp, Homo sapiens
ggcggggccgggggc

SEQ ID NO: 629988 - DNA, 15 bp, Homo sapiens
gcggggccgggggcg

SEQ ID NO: 629989 - DNA, 15 bp, Homo sapiens
cggggccgggggcgg

SEQ ID NO: 629990 - DNA, 15 bp, Homo sapiens
ggggccgggggcggg

SEQ ID NO: 629991 - DNA, 15 bp, Homo sapiens
gggccgggggcgggg

SEQ ID NO: 629992 - DNA, 15 bp, Homo sapiens
ggccgggggcggggc

SEQ ID NO: 629993 - DNA, 15 bp, Homo sapiens
gccgggggcggggcc

SEQ ID NO: 629994 - DNA, 15 bp, Homo sapiens
ccgggggcggggcct

SEQ ID NO: 629995 - DNA, 15 bp, Homo sapiens
cgggggcggggcctg

SEQ ID NO: 629996 - DNA, 15 bp, Homo sapiens
gggggcggggcctgc

SEQ ID NO: 629997 - DNA, 15 bp, Homo sapiens
ggggcggggcctgcg

SEQ ID NO: 629998 - DNA, 15 bp, Homo sapiens
gggcggggcctgcgg

SEQ ID NO: 629999 - DNA, 15 bp, Homo sapiens
ggcggggcctgcggg

SEQ ID NO: 630000 - DNA, 15 bp, Homo sapiens
gcggggcctgcgggg

SEQ ID NO: 630001 - DNA, 15 bp, Homo sapiens
cggggcctgcggggc

SEQ ID NO: 630002 - DNA, 15 bp, Homo sapiens
ggggcctgcggggcg

SEQ ID NO: 630003 - DNA, 15 bp, Homo sapiens
gggcctgcggggcgt

SEQ ID NO: 630004 - DNA, 15 bp, Homo sapiens
ggcctgcggggcgtg

SEQ ID NO: 630005 - DNA, 15 bp, Homo sapiens
gcctgcggggcgtgg

SEQ ID NO: 630006 - DNA, 15 bp, Homo sapiens
cctgcggggcgtggc

SEQ ID NO: 630007 - DNA, 15 bp, Homo sapiens
ctgcggggcgtggcg

SEQ ID NO: 630008 - DNA, 15 bp, Homo sapiens
tgcggggcgtggcgg

SEQ ID NO: 630009 - DNA, 15 bp, Homo sapiens
gcggggcgtggcggg

SEQ ID NO: 630010 - DNA, 15 bp, Homo sapiens
cggggcgtggcgggg

SEQ ID NO: 630011 - DNA, 15 bp, Homo sapiens
ggggcgtggcggggc

SEQ ID NO: 630012 - DNA, 15 bp, Homo sapiens
gggcgtggcggggcg

SEQ ID NO: 630013 - DNA, 15 bp, Homo sapiens
ggcgtggcggggcgg

SEQ ID NO: 630014 - DNA, 15 bp, Homo sapiens
gcgtggcggggcggg

SEQ ID NO: 630015 - DNA, 15 bp, Homo sapiens
cgtggcggggcgggc

SEQ ID NO: 630016 - DNA, 15 bp, Homo sapiens
gtggcggggcgggca

SEQ ID NO: 630017 - DNA, 15 bp, Homo sapiens
tggcggggcgggcag

SEQ ID NO: 630018 - DNA, 15 bp, Homo sapiens
ggcggggcgggcaga

SEQ ID NO: 630019 - DNA, 15 bp, Homo sapiens
gcggggcgggcagag

SEQ ID NO: 630020 - DNA, 15 bp, Homo sapiens
cggggcgggcagagg

SEQ ID NO: 630021 - DNA, 15 bp, Homo sapiens
ggggcgggcagaggg

SEQ ID NO: 630022 - DNA, 15 bp, Homo sapiens
gggcgggcagagggc

SEQ ID NO: 630023 - DNA, 15 bp, Homo sapiens
ggcgggcagagggcg

SEQ ID NO: 630024 - DNA, 15 bp, Homo sapiens
gcgggcagagggcgg

SEQ ID NO: 630025 - DNA, 15 bp, Homo sapiens
cgggcagagggcggg

SEQ ID NO: 630026 - DNA, 15 bp, Homo sapiens
gggcagagggcgggg

SEQ ID NO: 630027 - DNA, 15 bp, Homo sapiens
ggcagagggcggggc

SEQ ID NO: 630028 - DNA, 15 bp, Homo sapiens
gcagagggcggggcc

SEQ ID NO: 630029 - DNA, 15 bp, Homo sapiens
cagagggcggggcct

SEQ ID NO: 630030 - DNA, 15 bp, Homo sapiens
agagggcggggcctg

SEQ ID NO: 630031 - DNA, 15 bp, Homo sapiens
gagggcggggcctgc

SEQ ID NO: 630032 - DNA, 15 bp, Homo sapiens
agggcggggcctgct

SEQ ID NO: 630033 - DNA, 15 bp, Homo sapiens
gggcggggcctgctt

SEQ ID NO: 630034 - DNA, 15 bp, Homo sapiens
ggcggggcctgcttc

SEQ ID NO: 630035 - DNA, 15 bp, Homo sapiens
gcggggcctgcttct

SEQ ID NO: 630036 - DNA, 15 bp, Homo sapiens
cggggcctgcttctc

SEQ ID NO: 630037 - DNA, 15 bp, Homo sapiens
ggggcctgcttctcc

SEQ ID NO: 630038 - DNA, 15 bp, Homo sapiens
gggcctgcttctcct

SEQ ID NO: 630039 - DNA, 15 bp, Homo sapiens
ggcctgcttctcctc

SEQ ID NO: 630040 - DNA, 15 bp, Homo sapiens
gcctgcttctcctca

SEQ ID NO: 630041 - DNA, 15 bp, Homo sapiens
cctgcttctcctcag

SEQ ID NO: 630042 - DNA, 15 bp, Homo sapiens
ctgcttctcctcagc

SEQ ID NO: 630043 - DNA, 15 bp, Homo sapiens
tgcttctcctcagct

SEQ ID NO: 630044 - DNA, 15 bp, Homo sapiens
gcttctcctcagctt

SEQ ID NO: 630045 - DNA, 15 bp, Homo sapiens
cttctcctcagcttc

SEQ ID NO: 630046 - DNA, 15 bp, Homo sapiens
ttctcctcagcttca

SEQ ID NO: 630047 - DNA, 15 bp, Homo sapiens
tctcctcagcttcag

SEQ ID NO: 630048 - DNA, 15 bp, Homo sapiens
ctcctcagcttcagg

SEQ ID NO: 630049 - DNA, 15 bp, Homo sapiens
tcctcagcttcaggc

SEQ ID NO: 630050 - DNA, 15 bp, Homo sapiens
cctcagcttcaggcg

SEQ ID NO: 630051 - DNA, 15 bp, Homo sapiens
ctcagcttcaggcgg

SEQ ID NO: 630052 - DNA, 15 bp, Homo sapiens
tcagcttcaggcggc

SEQ ID NO: 630053 - DNA, 15 bp, Homo sapiens
cagcttcaggcggct

SEQ ID NO: 630054 - DNA, 15 bp, Homo sapiens
agcttcaggcggctg

SEQ ID NO: 630055 - DNA, 15 bp, Homo sapiens
gcttcaggcggctgc

SEQ ID NO: 630056 - DNA, 15 bp, Homo sapiens
cttcaggcggctgcg

SEQ ID NO: 630057 - DNA, 15 bp, Homo sapiens
ttcaggcggctgcga

SEQ ID NO: 630058 - DNA, 15 bp, Homo sapiens
tcaggcggctgcgac

SEQ ID NO: 630059 - DNA, 15 bp, Homo sapiens
caggcggctgcgacg

SEQ ID NO: 630060 - DNA, 15 bp, Homo sapiens
aggcggctgcgacga

SEQ ID NO: 630061 - DNA, 15 bp, Homo sapiens
ggcggctgcgacgag

SEQ ID NO: 630062 - DNA, 15 bp, Homo sapiens
gcggctgcgacgagc

SEQ ID NO: 630063 - DNA, 15 bp, Homo sapiens
cggctgcgacgagcc

SEQ ID NO: 630064 - DNA, 15 bp, Homo sapiens
ggctgcgacgagccc

SEQ ID NO: 630065 - DNA, 15 bp, Homo sapiens
gctgcgacgagccct

SEQ ID NO: 630066 - DNA, 15 bp, Homo sapiens
ctgcgacgagccctc

SEQ ID NO: 630067 - DNA, 15 bp, Homo sapiens
tgcgacgagccctca

SEQ ID NO: 630068 - DNA, 15 bp, Homo sapiens
gcgacgagccctcag

SEQ ID NO: 630069 - DNA, 15 bp, Homo sapiens
cgacgagccctcagg

SEQ ID NO: 630070 - DNA, 15 bp, Homo sapiens
gacgagccctcaggc

SEQ ID NO: 630071 - DNA, 15 bp, Homo sapiens
acgagccctcaggcg

SEQ ID NO: 630072 - DNA, 15 bp, Homo sapiens
cgagccctcaggcga

SEQ ID NO: 630073 - DNA, 15 bp, Homo sapiens
gagccctcaggcgaa

SEQ ID NO: 630074 - DNA, 15 bp, Homo sapiens
agccctcaggcgaac

SEQ ID NO: 630075 - DNA, 15 bp, Homo sapiens
gccctcaggcgaacc

SEQ ID NO: 630076 - DNA, 15 bp, Homo sapiens
ccctcaggcgaacct

SEQ ID NO: 630077 - DNA, 15 bp, Homo sapiens
cctcaggcgaacctc

SEQ ID NO: 630078 - DNA, 15 bp, Homo sapiens
ctcaggcgaacctct

SEQ ID NO: 630079 - DNA, 15 bp, Homo sapiens
tcaggcgaacctctc

SEQ ID NO: 630080 - DNA, 15 bp, Homo sapiens
caggcgaacctctcg

SEQ ID NO: 630081 - DNA, 15 bp, Homo sapiens
aggcgaacctctcgg

SEQ ID NO: 630082 - DNA, 15 bp, Homo sapiens
ggcgaacctctcggc

SEQ ID NO: 630083 - DNA, 15 bp, Homo sapiens
gcgaacctctcggct

SEQ ID NO: 630084 - DNA, 15 bp, Homo sapiens
cgaacctctcggctt

SEQ ID NO: 630085 - DNA, 15 bp, Homo sapiens
gaacctctcggcttt

SEQ ID NO: 630086 - DNA, 15 bp, Homo sapiens
aacctctcggctttc

SEQ ID NO: 630087 - DNA, 15 bp, Homo sapiens
acctctcggctttcc

SEQ ID NO: 630088 - DNA, 15 bp, Homo sapiens
cctctcggctttccc

SEQ ID NO: 630089 - DNA, 15 bp, Homo sapiens
ctctcggctttcccg

SEQ ID NO: 630090 - DNA, 15 bp, Homo sapiens
tctcggctttcccgc

SEQ ID NO: 630091 - DNA, 15 bp, Homo sapiens
ctcggctttcccgcg

SEQ ID NO: 630092 - DNA, 15 bp, Homo sapiens
tcggctttcccgcgc

SEQ ID NO: 630093 - DNA, 15 bp, Homo sapiens
cggctttcccgcgcg

SEQ ID NO: 630094 - DNA, 15 bp, Homo sapiens
ggctttcccgcgcgg

SEQ ID NO: 630095 - DNA, 15 bp, Homo sapiens
gctttcccgcgcggc

SEQ ID NO: 630096 - DNA, 15 bp, Homo sapiens
ctttcccgcgcggcg

SEQ ID NO: 630097 - DNA, 15 bp, Homo sapiens
tttcccgcgcggcgc

SEQ ID NO: 630098 - DNA, 15 bp, Homo sapiens
ttcccgcgcggcgcc

SEQ ID NO: 630099 - DNA, 15 bp, Homo sapiens
tcccgcgcggcgccg

SEQ ID NO: 630100 - DNA, 15 bp, Homo sapiens
cccgcgcggcgccgc

SEQ ID NO: 630101 - DNA, 15 bp, Homo sapiens
ccgcgcggcgccgcc

SEQ ID NO: 630102 - DNA, 15 bp, Homo sapiens
cgcgcggcgccgcct

SEQ ID NO: 630103 - DNA, 15 bp, Homo sapiens
gcgcggcgccgcctc

SEQ ID NO: 630104 - DNA, 15 bp, Homo sapiens
cgcggcgccgcctct

SEQ ID NO: 630105 - DNA, 15 bp, Homo sapiens
gcggcgccgcctctt

SEQ ID NO: 630106 - DNA, 15 bp, Homo sapiens
cggcgccgcctcttg

SEQ ID NO: 630107 - DNA, 15 bp, Homo sapiens
ggcgccgcctcttgc

SEQ ID NO: 630108 - DNA, 15 bp, Homo sapiens
gcgccgcctcttgct

SEQ ID NO: 630109 - DNA, 15 bp, Homo sapiens
cgccgcctcttgctg

SEQ ID NO: 630110 - DNA, 15 bp, Homo sapiens
gccgcctcttgctgc

SEQ ID NO: 630111 - DNA, 15 bp, Homo sapiens
ccgcctcttgctgcg

SEQ ID NO: 630112 - DNA, 15 bp, Homo sapiens
cgcctcttgctgcgc

SEQ ID NO: 630113 - DNA, 15 bp, Homo sapiens
gcctcttgctgcgcc

SEQ ID NO: 630114 - DNA, 15 bp, Homo sapiens
cctcttgctgcgcct

SEQ ID NO: 630115 - DNA, 15 bp, Homo sapiens
ctcttgctgcgcctc

SEQ ID NO: 630116 - DNA, 15 bp, Homo sapiens
tcttgctgcgcctcc

SEQ ID NO: 630117 - DNA, 15 bp, Homo sapiens
cttgctgcgcctccg

SEQ ID NO: 630118 - DNA, 15 bp, Homo sapiens
ttgctgcgcctccgc

SEQ ID NO: 630119 - DNA, 15 bp, Homo sapiens
tgctgcgcctccgcc

SEQ ID NO: 630120 - DNA, 15 bp, Homo sapiens
gctgcgcctccgcct

SEQ ID NO: 630121 - DNA, 15 bp, Homo sapiens
ctgcgcctccgcctc

SEQ ID NO: 630122 - DNA, 15 bp, Homo sapiens
tgcgcctccgcctcc

SEQ ID NO: 630123 - DNA, 15 bp, Homo sapiens
gcgcctccgcctcct

SEQ ID NO: 630124 - DNA, 15 bp, Homo sapiens
cgcctccgcctcctc

SEQ ID NO: 630125 - DNA, 15 bp, Homo sapiens
gcctccgcctcctcc

SEQ ID NO: 630126 - DNA, 15 bp, Homo sapiens
cctccgcctcctcct

SEQ ID NO: 630127 - DNA, 15 bp, Homo sapiens
ctccgcctcctcctc

SEQ ID NO: 630128 - DNA, 15 bp, Homo sapiens
tccgcctcctcctct

SEQ ID NO: 630129 - DNA, 15 bp, Homo sapiens
ccgcctcctcctctg

SEQ ID NO: 630130 - DNA, 15 bp, Homo sapiens
cgcctcctcctctgc

SEQ ID NO: 630131 - DNA, 15 bp, Homo sapiens
gcctcctcctctgct

SEQ ID NO: 630132 - DNA, 15 bp, Homo sapiens
cctcctcctctgctc

SEQ ID NO: 630133 - DNA, 15 bp, Homo sapiens
ctcctcctctgctcc

SEQ ID NO: 630134 - DNA, 15 bp, Homo sapiens
tcctcctctgctccg

SEQ ID NO: 630135 - DNA, 15 bp, Homo sapiens
cctcctctgctccgc

SEQ ID NO: 630136 - DNA, 15 bp, Homo sapiens
ctcctctgctccgcc

SEQ ID NO: 630137 - DNA, 15 bp, Homo sapiens
tcctctgctccgcca

SEQ ID NO: 630138 - DNA, 15 bp, Homo sapiens
cctctgctccgccac

SEQ ID NO: 630139 - DNA, 15 bp, Homo sapiens
ctctgctccgccacc

SEQ ID NO: 630140 - DNA, 15 bp, Homo sapiens
tctgctccgccaccg

SEQ ID NO: 630141 - DNA, 15 bp, Homo sapiens
ctgctccgccaccgg

SEQ ID NO: 630142 - DNA, 15 bp, Homo sapiens
tgctccgccaccggc

SEQ ID NO: 630143 - DNA, 15 bp, Homo sapiens
gctccgccaccggct

SEQ ID NO: 630144 - DNA, 15 bp, Homo sapiens
ctccgccaccggctt

SEQ ID NO: 630145 - DNA, 15 bp, Homo sapiens
tccgccaccggcttc

SEQ ID NO: 630146 - DNA, 15 bp, Homo sapiens
ccgccaccggcttcc

SEQ ID NO: 630147 - DNA, 15 bp, Homo sapiens
cgccaccggcttcct

SEQ ID NO: 630148 - DNA, 15 bp, Homo sapiens
gccaccggcttcctc

SEQ ID NO: 630149 - DNA, 15 bp, Homo sapiens
ccaccggcttcctcc

SEQ ID NO: 630150 - DNA, 15 bp, Homo sapiens
caccggcttcctcct

SEQ ID NO: 630151 - DNA, 15 bp, Homo sapiens
accggcttcctcctc

SEQ ID NO: 630152 - DNA, 15 bp, Homo sapiens
ccggcttcctcctcc

SEQ ID NO: 630153 - DNA, 15 bp, Homo sapiens
cggcttcctcctcct

SEQ ID NO: 630154 - DNA, 15 bp, Homo sapiens
ggcttcctcctcctg

SEQ ID NO: 630155 - DNA, 15 bp, Homo sapiens
gcttcctcctcctga

SEQ ID NO: 630156 - DNA, 15 bp, Homo sapiens
cttcctcctcctgag

SEQ ID NO: 630157 - DNA, 15 bp, Homo sapiens
ttcctcctcctgagc

SEQ ID NO: 630158 - DNA, 15 bp, Homo sapiens
tcctcctcctgagca

SEQ ID NO: 630159 - DNA, 15 bp, Homo sapiens
cctcctcctgagcag

SEQ ID NO: 630160 - DNA, 15 bp, Homo sapiens
ctcctcctgagcagt

SEQ ID NO: 630161 - DNA, 15 bp, Homo sapiens
tcctcctgagcagtc

SEQ ID NO: 630162 - DNA, 15 bp, Homo sapiens
cctcctgagcagtca

SEQ ID NO: 630163 - DNA, 15 bp, Homo sapiens
ctcctgagcagtcag

SEQ ID NO: 630164 - DNA, 15 bp, Homo sapiens
tcctgagcagtcagc

SEQ ID NO: 630165 - DNA, 15 bp, Homo sapiens
cctgagcagtcagcc

SEQ ID NO: 630166 - DNA, 15 bp, Homo sapiens
ctgagcagtcagccc

SEQ ID NO: 630167 - DNA, 15 bp, Homo sapiens
tgagcagtcagcccg

SEQ ID NO: 630168 - DNA, 15 bp, Homo sapiens
gagcagtcagcccgc

SEQ ID NO: 630169 - DNA, 15 bp, Homo sapiens
agcagtcagcccgcg

SEQ ID NO: 630170 - DNA, 15 bp, Homo sapiens
gcagtcagcccgcgc

SEQ ID NO: 630171 - DNA, 15 bp, Homo sapiens
cagtcagcccgcgcg

SEQ ID NO: 630172 - DNA, 15 bp, Homo sapiens
agtcagcccgcgcgc

SEQ ID NO: 630173 - DNA, 15 bp, Homo sapiens
gtcagcccgcgcgcc

SEQ ID NO: 630174 - DNA, 15 bp, Homo sapiens
tcagcccgcgcgccg

SEQ ID NO: 630175 - DNA, 15 bp, Homo sapiens
cagcccgcgcgccgg

SEQ ID NO: 630176 - DNA, 15 bp, Homo sapiens
agcccgcgcgccggc

SEQ ID NO: 630177 - DNA, 15 bp, Homo sapiens
gcccgcgcgccggcc

SEQ ID NO: 630178 - DNA, 15 bp, Homo sapiens
cccgcgcgccggccg

SEQ ID NO: 630179 - DNA, 15 bp, Homo sapiens
ccgcgcgccggccgg

SEQ ID NO: 630180 - DNA, 15 bp, Homo sapiens
cgcgcgccggccggc

SEQ ID NO: 630181 - DNA, 15 bp, Homo sapiens
gcgcgccggccggct

SEQ ID NO: 630182 - DNA, 15 bp, Homo sapiens
cgcgccggccggctc

SEQ ID NO: 630183 - DNA, 15 bp, Homo sapiens
gcgccggccggctcc

SEQ ID NO: 630184 - DNA, 15 bp, Homo sapiens
cgccggccggctccg

SEQ ID NO: 630185 - DNA, 15 bp, Homo sapiens
gccggccggctccgt

SEQ ID NO: 630186 - DNA, 15 bp, Homo sapiens
ccggccggctccgtt

SEQ ID NO: 630187 - DNA, 15 bp, Homo sapiens
cggccggctccgtta

SEQ ID NO: 630188 - DNA, 15 bp, Homo sapiens
ggccggctccgttat

SEQ ID NO: 630189 - DNA, 15 bp, Homo sapiens
gccggctccgttatg

SEQ ID NO: 630190 - DNA, 15 bp, Homo sapiens
ccggctccgttatgg

SEQ ID NO: 630191 - DNA, 15 bp, Homo sapiens
cggctccgttatggc

SEQ ID NO: 630192 - DNA, 15 bp, Homo sapiens
ggctccgttatggcg

SEQ ID NO: 630193 - DNA, 15 bp, Homo sapiens
gctccgttatggcga

SEQ ID NO: 630194 - DNA, 15 bp, Homo sapiens
ctccgttatggcgac

SEQ ID NO: 630195 - DNA, 15 bp, Homo sapiens
tccgttatggcgacc

SEQ ID NO: 630196 - DNA, 15 bp, Homo sapiens
ccgttatggcgaccc

SEQ ID NO: 630197 - DNA, 15 bp, Homo sapiens
cgttatggcgacccg

SEQ ID NO: 630198 - DNA, 15 bp, Homo sapiens
gttatggcgacccgc

SEQ ID NO: 630199 - DNA, 15 bp, Homo sapiens
ttatggcgacccgca

SEQ ID NO: 630200 - DNA, 15 bp, Homo sapiens
tatggcgacccgcag

SEQ ID NO: 630201 - DNA, 15 bp, Homo sapiens
atggcgacccgcagc

SEQ ID NO: 630202 - DNA, 15 bp, Homo sapiens
tggcgacccgcagcc

SEQ ID NO: 630203 - DNA, 15 bp, Homo sapiens
ggcgacccgcagccc

SEQ ID NO: 630204 - DNA, 15 bp, Homo sapiens
gcgacccgcagccct

SEQ ID NO: 630205 - DNA, 15 bp, Homo sapiens
cgacccgcagccctg

SEQ ID NO: 630206 - DNA, 15 bp, Homo sapiens
gacccgcagccctgg

SEQ ID NO: 630207 - DNA, 15 bp, Homo sapiens
acccgcagccctggc

SEQ ID NO: 630208 - DNA, 15 bp, Homo sapiens
cccgcagccctggcg

SEQ ID NO: 630209 - DNA, 15 bp, Homo sapiens
ccgcagccctggcgt

SEQ ID NO: 630210 - DNA, 15 bp, Homo sapiens
cgcagccctggcgtc

SEQ ID NO: 630211 - DNA, 15 bp, Homo sapiens
gcagccctggcgtcg

SEQ ID NO: 630212 - DNA, 15 bp, Homo sapiens
cagccctggcgtcgt

SEQ ID NO: 630213 - DNA, 15 bp, Homo sapiens
agccctggcgtcgtg

SEQ ID NO: 630214 - DNA, 15 bp, Homo sapiens
gccctggcgtcgtgg

SEQ ID NO: 630215 - DNA, 15 bp, Homo sapiens
ccctggcgtcgtggt

SEQ ID NO: 630216 - DNA, 15 bp, Homo sapiens
cctggcgtcgtggtg

SEQ ID NO: 630217 - DNA, 15 bp, Homo sapiens
ctggcgtcgtggtga

SEQ ID NO: 630218 - DNA, 15 bp, Homo sapiens
tggcgtcgtggtgag

SEQ ID NO: 630219 - DNA, 15 bp, Homo sapiens
ggcgtcgtggtgagc

SEQ ID NO: 630220 - DNA, 15 bp, Homo sapiens
gcgtcgtggtgagca

SEQ ID NO: 630221 - DNA, 15 bp, Homo sapiens
cgtcgtggtgagcag

SEQ ID NO: 630222 - DNA, 15 bp, Homo sapiens
gtcgtggtgagcagc

SEQ ID NO: 630223 - DNA, 15 bp, Homo sapiens
tcgtggtgagcagct

SEQ ID NO: 630224 - DNA, 15 bp, Homo sapiens
cgtggtgagcagctc

SEQ ID NO: 630225 - DNA, 15 bp, Homo sapiens
gtggtgagcagctcg

SEQ ID NO: 630226 - DNA, 15 bp, Homo sapiens
tggtgagcagctcgg

SEQ ID NO: 630227 - DNA, 15 bp, Homo sapiens
ggtgagcagctcggc

SEQ ID NO: 630228 - DNA, 15 bp, Homo sapiens
gtgagcagctcggcc

SEQ ID NO: 630229 - DNA, 15 bp, Homo sapiens
tgagcagctcggcct

SEQ ID NO: 630230 - DNA, 15 bp, Homo sapiens
gagcagctcggcctg

SEQ ID NO: 630231 - DNA, 15 bp, Homo sapiens
agcagctcggcctgc

SEQ ID NO: 630232 - DNA, 15 bp, Homo sapiens
gcagctcggcctgcc

SEQ ID NO: 630233 - DNA, 15 bp, Homo sapiens
cagctcggcctgccg

SEQ ID NO: 630234 - DNA, 15 bp, Homo sapiens
agctcggcctgccgg

SEQ ID NO: 630235 - DNA, 15 bp, Homo sapiens
gctcggcctgccggc

SEQ ID NO: 630236 - DNA, 15 bp, Homo sapiens
ctcggcctgccggcc

SEQ ID NO: 630237 - DNA, 15 bp, Homo sapiens
tcggcctgccggccc

SEQ ID NO: 630238 - DNA, 15 bp, Homo sapiens
cggcctgccggccct

SEQ ID NO: 630239 - DNA, 15 bp, Homo sapiens
ggcctgccggccctg

SEQ ID NO: 630240 - DNA, 15 bp, Homo sapiens
gcctgccggccctgg

SEQ ID NO: 630241 - DNA, 15 bp, Homo sapiens
cctgccggccctggc

SEQ ID NO: 630242 - DNA, 15 bp, Homo sapiens
ctgccggccctggcc

SEQ ID NO: 630243 - DNA, 15 bp, Homo sapiens
tgccggccctggccg

SEQ ID NO: 630244 - DNA, 15 bp, Homo sapiens
gccggccctggccgg

SEQ ID NO: 630245 - DNA, 15 bp, Homo sapiens
ccggccctggccggt

SEQ ID NO: 630246 - DNA, 15 bp, Homo sapiens
cggccctggccggtt

SEQ ID NO: 630247 - DNA, 15 bp, Homo sapiens
ggccctggccggttc

SEQ ID NO: 630248 - DNA, 15 bp, Homo sapiens
gccctggccggttca

SEQ ID NO: 630249 - DNA, 15 bp, Homo sapiens
ccctggccggttcag

SEQ ID NO: 630250 - DNA, 15 bp, Homo sapiens
cctggccggttcagg

SEQ ID NO: 630251 - DNA, 15 bp, Homo sapiens
ctggccggttcaggc

SEQ ID NO: 630252 - DNA, 15 bp, Homo sapiens
tggccggttcaggcc

SEQ ID NO: 630253 - DNA, 15 bp, Homo sapiens
ggccggttcaggccc

SEQ ID NO: 630254 - DNA, 15 bp, Homo sapiens
gccggttcaggccca

SEQ ID NO: 630255 - DNA, 15 bp, Homo sapiens
ccggttcaggcccac

SEQ ID NO: 630256 - DNA, 15 bp, Homo sapiens
cggttcaggcccacg

SEQ ID NO: 630257 - DNA, 15 bp, Homo sapiens
ggttcaggcccacgc

SEQ ID NO: 630258 - DNA, 15 bp, Homo sapiens
gttcaggcccacgcg

SEQ ID NO: 630259 - DNA, 15 bp, Homo sapiens
ttcaggcccacgcgg

SEQ ID NO: 630260 - DNA, 15 bp, Homo sapiens
tcaggcccacgcggc

SEQ ID NO: 630261 - DNA, 15 bp, Homo sapiens
caggcccacgcggca

SEQ ID NO: 630262 - DNA, 15 bp, Homo sapiens
aggcccacgcggcag

SEQ ID NO: 630263 - DNA, 15 bp, Homo sapiens
ggcccacgcggcagg

SEQ ID NO: 630264 - DNA, 15 bp, Homo sapiens
gcccacgcggcaggt

SEQ ID NO: 630265 - DNA, 15 bp, Homo sapiens
cccacgcggcaggtg

SEQ ID NO: 630266 - DNA, 15 bp, Homo sapiens
ccacgcggcaggtgg

SEQ ID NO: 630267 - DNA, 15 bp, Homo sapiens
cacgcggcaggtggc

SEQ ID NO: 630268 - DNA, 15 bp, Homo sapiens
acgcggcaggtggcg

SEQ ID NO: 630269 - DNA, 15 bp, Homo sapiens
cgcggcaggtggcgg

SEQ ID NO: 630270 - DNA, 15 bp, Homo sapiens
gcggcaggtggcggc

SEQ ID NO: 630271 - DNA, 15 bp, Homo sapiens
cggcaggtggcggcc

SEQ ID NO: 630272 - DNA, 15 bp, Homo sapiens
ggcaggtggcggccg

SEQ ID NO: 630273 - DNA, 15 bp, Homo sapiens
gcaggtggcggccgg

SEQ ID NO: 630274 - DNA, 15 bp, Homo sapiens
caggtggcggccggg

SEQ ID NO: 630275 - DNA, 15 bp, Homo sapiens
aggtggcggccgggc

SEQ ID NO: 630276 - DNA, 15 bp, Homo sapiens
ggtggcggccgggcc

SEQ ID NO: 630277 - DNA, 15 bp, Homo sapiens
gtggcggccgggccc

SEQ ID NO: 630278 - DNA, 15 bp, Homo sapiens
tggcggccgggccct

SEQ ID NO: 630279 - DNA, 15 bp, Homo sapiens
ggcggccgggccctg

SEQ ID NO: 630280 - DNA, 15 bp, Homo sapiens
gcggccgggccctga

SEQ ID NO: 630281 - DNA, 15 bp, Homo sapiens
cggccgggccctgag

SEQ ID NO: 630282 - DNA, 15 bp, Homo sapiens
ggccgggccctgagg

SEQ ID NO: 630283 - DNA, 15 bp, Homo sapiens
gccgggccctgaggc

SEQ ID NO: 630284 - DNA, 15 bp, Homo sapiens
ccgggccctgaggcg

SEQ ID NO: 630285 - DNA, 15 bp, Homo sapiens
cgggccctgaggcgc

SEQ ID NO: 630286 - DNA, 15 bp, Homo sapiens
gggccctgaggcgcg

SEQ ID NO: 630287 - DNA, 15 bp, Homo sapiens
ggccctgaggcgcgg

SEQ ID NO: 630288 - DNA, 15 bp, Homo sapiens
gccctgaggcgcggg

SEQ ID NO: 630289 - DNA, 15 bp, Homo sapiens
ccctgaggcgcggga

SEQ ID NO: 630290 - DNA, 15 bp, Homo sapiens
cctgaggcgcgggat

SEQ ID NO: 630291 - DNA, 15 bp, Homo sapiens
ctgaggcgcgggatc

SEQ ID NO: 630292 - DNA, 15 bp, Homo sapiens
tgaggcgcgggatcc

SEQ ID NO: 630293 - DNA, 15 bp, Homo sapiens
gaggcgcgggatccg

SEQ ID NO: 630294 - DNA, 15 bp, Homo sapiens
aggcgcgggatccgc

SEQ ID NO: 630295 - DNA, 15 bp, Homo sapiens
ggcgcgggatccgca

SEQ ID NO: 630296 - DNA, 15 bp, Homo sapiens
gcgcgggatccgcag

SEQ ID NO: 630297 - DNA, 15 bp, Homo sapiens
cgcgggatccgcagt

SEQ ID NO: 630298 - DNA, 15 bp, Homo sapiens
gcgggatccgcagtg

SEQ ID NO: 630299 - DNA, 15 bp, Homo sapiens
cgggatccgcagtgc

SEQ ID NO: 630300 - DNA, 15 bp, Homo sapiens
gggatccgcagtgcg

SEQ ID NO: 630301 - DNA, 15 bp, Homo sapiens
ggatccgcagtgcgg

SEQ ID NO: 630302 - DNA, 15 bp, Homo sapiens
gatccgcagtgcggg

SEQ ID NO: 630303 - DNA, 15 bp, Homo sapiens
atccgcagtgcgggc

SEQ ID NO: 630304 - DNA, 15 bp, Homo sapiens
tccgcagtgcgggct

SEQ ID NO: 630305 - DNA, 15 bp, Homo sapiens
ccgcagtgcgggctc

SEQ ID NO: 630306 - DNA, 15 bp, Homo sapiens
cgcagtgcgggctcg

SEQ ID NO: 630307 - DNA, 15 bp, Homo sapiens
gcagtgcgggctcgg

SEQ ID NO: 630308 - DNA, 15 bp, Homo sapiens
cagtgcgggctcggg

SEQ ID NO: 630309 - DNA, 15 bp, Homo sapiens
agtgcgggctcgggc

SEQ ID NO: 630310 - DNA, 15 bp, Homo sapiens
gtgcgggctcgggcg

SEQ ID NO: 630311 - DNA, 15 bp, Homo sapiens
tgcgggctcgggcgg

SEQ ID NO: 630312 - DNA, 15 bp, Homo sapiens
gcgggctcgggcggc

SEQ ID NO: 630313 - DNA, 15 bp, Homo sapiens
cgggctcgggcggcc

SEQ ID NO: 630314 - DNA, 15 bp, Homo sapiens
gggctcgggcggccg

SEQ ID NO: 630315 - DNA, 15 bp, Homo sapiens
ggctcgggcggccgg

SEQ ID NO: 630316 - DNA, 15 bp, Homo sapiens
gctcgggcggccggg

SEQ ID NO: 630317 - DNA, 15 bp, Homo sapiens
ctcgggcggccgggc

SEQ ID NO: 630318 - DNA, 15 bp, Homo sapiens
tcgggcggccgggcc

SEQ ID NO: 630319 - DNA, 15 bp, Homo sapiens
cgggcggccgggccc

SEQ ID NO: 630320 - DNA, 15 bp, Homo sapiens
gggcggccgggccca

SEQ ID NO: 630321 - DNA, 15 bp, Homo sapiens
ggcggccgggcccag

SEQ ID NO: 630322 - DNA, 15 bp, Homo sapiens
gcggccgggcccagg

SEQ ID NO: 630323 - DNA, 15 bp, Homo sapiens
cggccgggcccaggg

SEQ ID NO: 630324 - DNA, 15 bp, Homo sapiens
ggccgggcccaggga

SEQ ID NO: 630325 - DNA, 15 bp, Homo sapiens
gccgggcccagggaa

SEQ ID NO: 630326 - DNA, 15 bp, Homo sapiens
ccgggcccagggaac

SEQ ID NO: 630327 - DNA, 15 bp, Homo sapiens
cgggcccagggaacc

SEQ ID NO: 630328 - DNA, 15 bp, Homo sapiens
gggcccagggaaccc

SEQ ID NO: 630329 - DNA, 15 bp, Homo sapiens
ggcccagggaacccc

SEQ ID NO: 630330 - DNA, 15 bp, Homo sapiens
gcccagggaaccccg

SEQ ID NO: 630331 - DNA, 15 bp, Homo sapiens
cccagggaaccccgc

SEQ ID NO: 630332 - DNA, 15 bp, Homo sapiens
ccagggaaccccgca

SEQ ID NO: 630333 - DNA, 15 bp, Homo sapiens
cagggaaccccgcag

SEQ ID NO: 630334 - DNA, 15 bp, Homo sapiens
agggaaccccgcagg

SEQ ID NO: 630335 - DNA, 15 bp, Homo sapiens
gggaaccccgcaggc

SEQ ID NO: 630336 - DNA, 15 bp, Homo sapiens
ggaaccccgcaggcg

SEQ ID NO: 630337 - DNA, 15 bp, Homo sapiens
gaaccccgcaggcgg

SEQ ID NO: 630338 - DNA, 15 bp, Homo sapiens
aaccccgcaggcggg

SEQ ID NO: 630339 - DNA, 15 bp, Homo sapiens
accccgcaggcgggg

SEQ ID NO: 630340 - DNA, 15 bp, Homo sapiens
ccccgcaggcggggg

SEQ ID NO: 630341 - DNA, 15 bp, Homo sapiens
cccgcaggcgggggc

SEQ ID NO: 630342 - DNA, 15 bp, Homo sapiens
ccgcaggcgggggcg

SEQ ID NO: 630343 - DNA, 15 bp, Homo sapiens
cgcaggcgggggcgg

SEQ ID NO: 630344 - DNA, 15 bp, Homo sapiens
gcaggcgggggcggc

SEQ ID NO: 630345 - DNA, 15 bp, Homo sapiens
caggcgggggcggcc

SEQ ID NO: 630346 - DNA, 15 bp, Homo sapiens
aggcgggggcggcca

SEQ ID NO: 630347 - DNA, 15 bp, Homo sapiens
ggcgggggcggccag

SEQ ID NO: 630348 - DNA, 15 bp, Homo sapiens
gcgggggcggccagt

SEQ ID NO: 630349 - DNA, 15 bp, Homo sapiens
cgggggcggccagtt

SEQ ID NO: 630350 - DNA, 15 bp, Homo sapiens
gggggcggccagttt

SEQ ID NO: 630351 - DNA, 15 bp, Homo sapiens
ggggcggccagtttc

SEQ ID NO: 630352 - DNA, 15 bp, Homo sapiens
gggcggccagtttcc

SEQ ID NO: 630353 - DNA, 15 bp, Homo sapiens
ggcggccagtttccc

SEQ ID NO: 630354 - DNA, 15 bp, Homo sapiens
gcggccagtttcccg

SEQ ID NO: 630355 - DNA, 15 bp, Homo sapiens
cggccagtttcccgg

SEQ ID NO: 630356 - DNA, 15 bp, Homo sapiens
ggccagtttcccggg

SEQ ID NO: 630357 - DNA, 15 bp, Homo sapiens
gccagtttcccgggt

SEQ ID NO: 630358 - DNA, 15 bp, Homo sapiens
ccagtttcccgggtt

SEQ ID NO: 630359 - DNA, 15 bp, Homo sapiens
cagtttcccgggttc

SEQ ID NO: 630360 - DNA, 15 bp, Homo sapiens
agtttcccgggttcg

SEQ ID NO: 630361 - DNA, 15 bp, Homo sapiens
gtttcccgggttcgg

SEQ ID NO: 630362 - DNA, 15 bp, Homo sapiens
tttcccgggttcggc

SEQ ID NO: 630363 - DNA, 15 bp, Homo sapiens
ttcccgggttcggct

SEQ ID NO: 630364 - DNA, 15 bp, Homo sapiens
tcccgggttcggctt

SEQ ID NO: 630365 - DNA, 15 bp, Homo sapiens
cccgggttcggcttt

SEQ ID NO: 630366 - DNA, 15 bp, Homo sapiens
ccgggttcggcttta

SEQ ID NO: 630367 - DNA, 15 bp, Homo sapiens
cgggttcggctttac

SEQ ID NO: 630368 - DNA, 15 bp, Homo sapiens
gggttcggctttacg

SEQ ID NO: 630369 - DNA, 15 bp, Homo sapiens
ggttcggctttacgt

SEQ ID NO: 630370 - DNA, 15 bp, Homo sapiens
gttcggctttacgtc

SEQ ID NO: 630371 - DNA, 15 bp, Homo sapiens
ttcggctttacgtca

SEQ ID NO: 630372 - DNA, 15 bp, Homo sapiens
tcggctttacgtcac

SEQ ID NO: 630373 - DNA, 15 bp, Homo sapiens
cggctttacgtcacg

SEQ ID NO: 630374 - DNA, 15 bp, Homo sapiens
ggctttacgtcacgc

SEQ ID NO: 630375 - DNA, 15 bp, Homo sapiens
gctttacgtcacgcg

SEQ ID NO: 630376 - DNA, 15 bp, Homo sapiens
ctttacgtcacgcga

SEQ ID NO: 630377 - DNA, 15 bp, Homo sapiens
tttacgtcacgcgag

SEQ ID NO: 630378 - DNA, 15 bp, Homo sapiens
ttacgtcacgcgagg

SEQ ID NO: 630379 - DNA, 15 bp, Homo sapiens
tacgtcacgcgaggg

SEQ ID NO: 630380 - DNA, 15 bp, Homo sapiens
acgtcacgcgagggc

SEQ ID NO: 630381 - DNA, 15 bp, Homo sapiens
cgtcacgcgagggcg

SEQ ID NO: 630382 - DNA, 15 bp, Homo sapiens
gtcacgcgagggcgg

SEQ ID NO: 630383 - DNA, 15 bp, Homo sapiens
tcacgcgagggcggc

SEQ ID NO: 630384 - DNA, 15 bp, Homo sapiens
cacgcgagggcggca

SEQ ID NO: 630385 - DNA, 15 bp, Homo sapiens
acgcgagggcggcag

SEQ ID NO: 630386 - DNA, 15 bp, Homo sapiens
cgcgagggcggcagg

SEQ ID NO: 630387 - DNA, 15 bp, Homo sapiens
gcgagggcggcaggg

SEQ ID NO: 630388 - DNA, 15 bp, Homo sapiens
cgagggcggcaggga

SEQ ID NO: 630389 - DNA, 15 bp, Homo sapiens
gagggcggcagggag

SEQ ID NO: 630390 - DNA, 15 bp, Homo sapiens
agggcggcagggagg

SEQ ID NO: 630391 - DNA, 15 bp, Homo sapiens
gggcggcagggagga

SEQ ID NO: 630392 - DNA, 15 bp, Homo sapiens
ggcggcagggaggac

SEQ ID NO: 630393 - DNA, 15 bp, Homo sapiens
gcggcagggaggacg

SEQ ID NO: 630394 - DNA, 15 bp, Homo sapiens
cggcagggaggacgg

SEQ ID NO: 630395 - DNA, 15 bp, Homo sapiens
ggcagggaggacgga

SEQ ID NO: 630396 - DNA, 15 bp, Homo sapiens
gcagggaggacggaa

SEQ ID NO: 630397 - DNA, 15 bp, Homo sapiens
cagggaggacggaat

SEQ ID NO: 630398 - DNA, 15 bp, Homo sapiens
agggaggacggaatg

SEQ ID NO: 630399 - DNA, 15 bp, Homo sapiens
gggaggacggaatgg

SEQ ID NO: 630400 - DNA, 15 bp, Homo sapiens
ggaggacggaatggc

SEQ ID NO: 630401 - DNA, 15 bp, Homo sapiens
gaggacggaatggcg

SEQ ID NO: 630402 - DNA, 15 bp, Homo sapiens
aggacggaatggcgg

SEQ ID NO: 630403 - DNA, 15 bp, Homo sapiens
ggacggaatggcggg

SEQ ID NO: 630404 - DNA, 15 bp, Homo sapiens
gacggaatggcgggg

SEQ ID NO: 630405 - DNA, 15 bp, Homo sapiens
acggaatggcggggt

SEQ ID NO: 630406 - DNA, 15 bp, Homo sapiens
cggaatggcggggtt

SEQ ID NO: 630407 - DNA, 15 bp, Homo sapiens
ggaatggcggggttt

SEQ ID NO: 630408 - DNA, 15 bp, Homo sapiens
gaatggcggggtttg

SEQ ID NO: 630409 - DNA, 15 bp, Homo sapiens
aatggcggggtttgg

SEQ ID NO: 630410 - DNA, 15 bp, Homo sapiens
atggcggggtttggg

SEQ ID NO: 630411 - DNA, 15 bp, Homo sapiens
tggcggggtttgggg

SEQ ID NO: 630412 - DNA, 15 bp, Homo sapiens
ggcggggtttggggt

SEQ ID NO: 630413 - DNA, 15 bp, Homo sapiens
gcggggtttggggtg

SEQ ID NO: 630414 - DNA, 15 bp, Homo sapiens
cggggtttggggtgg

SEQ ID NO: 630415 - DNA, 15 bp, Homo sapiens
ggggtttggggtggg

SEQ ID NO: 630416 - DNA, 15 bp, Homo sapiens
gggtttggggtgggt

SEQ ID NO: 630417 - DNA, 15 bp, Homo sapiens
ggtttggggtgggtc

SEQ ID NO: 630418 - DNA, 15 bp, Homo sapiens
gtttggggtgggtcc

SEQ ID NO: 630419 - DNA, 15 bp, Homo sapiens
tttggggtgggtccc

SEQ ID NO: 630420 - DNA, 15 bp, Homo sapiens
ttggggtgggtccct

SEQ ID NO: 630421 - DNA, 15 bp, Homo sapiens
tggggtgggtccctc

SEQ ID NO: 630422 - DNA, 15 bp, Homo sapiens
ggggtgggtccctcc

SEQ ID NO: 630423 - DNA, 15 bp, Homo sapiens
gggtgggtccctcct

SEQ ID NO: 630424 - DNA, 15 bp, Homo sapiens
ggtgggtccctcctc

SEQ ID NO: 630425 - DNA, 15 bp, Homo sapiens
gtgggtccctcctcg

SEQ ID NO: 630426 - DNA, 15 bp, Homo sapiens
tgggtccctcctcgg

SEQ ID NO: 630427 - DNA, 15 bp, Homo sapiens
gggtccctcctcggg

SEQ ID NO: 630428 - DNA, 15 bp, Homo sapiens
ggtccctcctcgggg

SEQ ID NO: 630429 - DNA, 15 bp, Homo sapiens
gtccctcctcggggg

SEQ ID NO: 630430 - DNA, 15 bp, Homo sapiens
tccctcctcggggga

SEQ ID NO: 630431 - DNA, 15 bp, Homo sapiens
ccctcctcgggggag

SEQ ID NO: 630432 - DNA, 15 bp, Homo sapiens
cctcctcgggggagc

SEQ ID NO: 630433 - DNA, 15 bp, Homo sapiens
ctcctcgggggagcc

SEQ ID NO: 630434 - DNA, 15 bp, Homo sapiens
tcctcgggggagccc

SEQ ID NO: 630435 - DNA, 15 bp, Homo sapiens
cctcgggggagccct

SEQ ID NO: 630436 - DNA, 15 bp, Homo sapiens
ctcgggggagccctg

SEQ ID NO: 630437 - DNA, 15 bp, Homo sapiens
tcgggggagccctgg

SEQ ID NO: 630438 - DNA, 15 bp, Homo sapiens
cgggggagccctggg

SEQ ID NO: 630439 - DNA, 15 bp, Homo sapiens
gggggagccctggga

SEQ ID NO: 630440 - DNA, 15 bp, Homo sapiens
ggggagccctgggaa

SEQ ID NO: 630441 - DNA, 15 bp, Homo sapiens
gggagccctgggaaa

SEQ ID NO: 630442 - DNA, 15 bp, Homo sapiens
ggagccctgggaaaa

SEQ ID NO: 630443 - DNA, 15 bp, Homo sapiens
gagccctgggaaaag

SEQ ID NO: 630444 - DNA, 15 bp, Homo sapiens
agccctgggaaaaga

SEQ ID NO: 630445 - DNA, 15 bp, Homo sapiens
gccctgggaaaagag

SEQ ID NO: 630446 - DNA, 15 bp, Homo sapiens
ccctgggaaaagagg

SEQ ID NO: 630447 - DNA, 15 bp, Homo sapiens
cctgggaaaagagga

SEQ ID NO: 630448 - DNA, 15 bp, Homo sapiens
ctgggaaaagaggac

SEQ ID NO: 630449 - DNA, 15 bp, Homo sapiens
tgggaaaagaggact

SEQ ID NO: 630450 - DNA, 15 bp, Homo sapiens
gggaaaagaggactg

SEQ ID NO: 630451 - DNA, 15 bp, Homo sapiens
ggaaaagaggactgc

SEQ ID NO: 630452 - DNA, 15 bp, Homo sapiens
gaaaagaggactgcg

SEQ ID NO: 630453 - DNA, 15 bp, Homo sapiens
aaaagaggactgcgt

SEQ ID NO: 630454 - DNA, 15 bp, Homo sapiens
aaagaggactgcgtg

SEQ ID NO: 630455 - DNA, 15 bp, Homo sapiens
aagaggactgcgtgt

SEQ ID NO: 630456 - DNA, 15 bp, Homo sapiens
agaggactgcgtgtg

SEQ ID NO: 630457 - DNA, 15 bp, Homo sapiens
gaggactgcgtgtgg

SEQ ID NO: 630458 - DNA, 15 bp, Homo sapiens
aggactgcgtgtggg

SEQ ID NO: 630459 - DNA, 15 bp, Homo sapiens
ggactgcgtgtggga

SEQ ID NO: 630460 - DNA, 15 bp, Homo sapiens
gactgcgtgtgggaa

SEQ ID NO: 630461 - DNA, 15 bp, Homo sapiens
actgcgtgtgggaag

SEQ ID NO: 630462 - DNA, 15 bp, Homo sapiens
ctgcgtgtgggaaga

SEQ ID NO: 630463 - DNA, 15 bp, Homo sapiens
tgcgtgtgggaagag

SEQ ID NO: 630464 - DNA, 15 bp, Homo sapiens
gcgtgtgggaagaga

SEQ ID NO: 630465 - DNA, 15 bp, Homo sapiens
cgtgtgggaagagaa

SEQ ID NO: 630466 - DNA, 15 bp, Homo sapiens
gtgtgggaagagaag

SEQ ID NO: 630467 - DNA, 15 bp, Homo sapiens
tgtgggaagagaagg

SEQ ID NO: 630468 - DNA, 15 bp, Homo sapiens
gtgggaagagaaggt

SEQ ID NO: 630469 - DNA, 15 bp, Homo sapiens
tgggaagagaaggtg

SEQ ID NO: 630470 - DNA, 15 bp, Homo sapiens
gggaagagaaggtgg

SEQ ID NO: 630471 - DNA, 15 bp, Homo sapiens
ggaagagaaggtgga

SEQ ID NO: 630472 - DNA, 15 bp, Homo sapiens
gaagagaaggtggaa

SEQ ID NO: 630473 - DNA, 15 bp, Homo sapiens
aagagaaggtggaaa

SEQ ID NO: 630474 - DNA, 15 bp, Homo sapiens
agagaaggtggaaat

SEQ ID NO: 630475 - DNA, 15 bp, Homo sapiens
gagaaggtggaaatg

SEQ ID NO: 630476 - DNA, 15 bp, Homo sapiens
agaaggtggaaatgg

SEQ ID NO: 630477 - DNA, 15 bp, Homo sapiens
gaaggtggaaatggc

SEQ ID NO: 630478 - DNA, 15 bp, Homo sapiens
aaggtggaaatggcg

SEQ ID NO: 630479 - DNA, 15 bp, Homo sapiens
aggtggaaatggcgt

SEQ ID NO: 630480 - DNA, 15 bp, Homo sapiens
ggtggaaatggcgtt

SEQ ID NO: 630481 - DNA, 15 bp, Homo sapiens
gtggaaatggcgttt

SEQ ID NO: 630482 - DNA, 15 bp, Homo sapiens
tggaaatggcgtttt

SEQ ID NO: 630483 - DNA, 15 bp, Homo sapiens
ggaaatggcgttttg

SEQ ID NO: 630484 - DNA, 15 bp, Homo sapiens
gaaatggcgttttgg

SEQ ID NO: 630485 - DNA, 15 bp, Homo sapiens
aaatggcgttttggt

SEQ ID NO: 630486 - DNA, 15 bp, Homo sapiens
aatggcgttttggtt

SEQ ID NO: 630487 - DNA, 15 bp, Homo sapiens
atggcgttttggttg

SEQ ID NO: 630488 - DNA, 15 bp, Homo sapiens
tggcgttttggttga

SEQ ID NO: 630489 - DNA, 15 bp, Homo sapiens
ggcgttttggttgac

SEQ ID NO: 630490 - DNA, 15 bp, Homo sapiens
gcgttttggttgaca

SEQ ID NO: 630491 - DNA, 15 bp, Homo sapiens
cgttttggttgacat

SEQ ID NO: 630492 - DNA, 15 bp, Homo sapiens
gttttggttgacatg

SEQ ID NO: 630493 - DNA, 15 bp, Homo sapiens
ttttggttgacatgt

SEQ ID NO: 630494 - DNA, 15 bp, Homo sapiens
tttggttgacatgtg

SEQ ID NO: 630495 - DNA, 15 bp, Homo sapiens
ttggttgacatgtgc

SEQ ID NO: 630496 - DNA, 15 bp, Homo sapiens
tggttgacatgtgcc

SEQ ID NO: 630497 - DNA, 15 bp, Homo sapiens
ggttgacatgtgccg

SEQ ID NO: 630498 - DNA, 15 bp, Homo sapiens
gttgacatgtgccgc

SEQ ID NO: 630499 - DNA, 15 bp, Homo sapiens
ttgacatgtgccgcc

SEQ ID NO: 630500 - DNA, 15 bp, Homo sapiens
tgacatgtgccgcct

SEQ ID NO: 630501 - DNA, 15 bp, Homo sapiens
gacatgtgccgcctg

SEQ ID NO: 630502 - DNA, 15 bp, Homo sapiens
acatgtgccgcctgc

SEQ ID NO: 630503 - DNA, 15 bp, Homo sapiens
catgtgccgcctgcg

SEQ ID NO: 630504 - DNA, 15 bp, Homo sapiens
atgtgccgcctgcga

SEQ ID NO: 630505 - DNA, 15 bp, Homo sapiens
tgtgccgcctgcgag

SEQ ID NO: 630506 - DNA, 15 bp, Homo sapiens
gtgccgcctgcgagc

SEQ ID NO: 630507 - DNA, 15 bp, Homo sapiens
tgccgcctgcgagcg

SEQ ID NO: 630508 - DNA, 15 bp, Homo sapiens
gccgcctgcgagcgt

SEQ ID NO: 630509 - DNA, 15 bp, Homo sapiens
ccgcctgcgagcgtg

SEQ ID NO: 630510 - DNA, 15 bp, Homo sapiens
cgcctgcgagcgtgc

SEQ ID NO: 630511 - DNA, 15 bp, Homo sapiens
gcctgcgagcgtgct

SEQ ID NO: 630512 - DNA, 15 bp, Homo sapiens
cctgcgagcgtgctg

SEQ ID NO: 630513 - DNA, 15 bp, Homo sapiens
ctgcgagcgtgctgc

SEQ ID NO: 630514 - DNA, 15 bp, Homo sapiens
tgcgagcgtgctgcg

SEQ ID NO: 630515 - DNA, 15 bp, Homo sapiens
gcgagcgtgctgcgg

SEQ ID NO: 630516 - DNA, 15 bp, Homo sapiens
cgagcgtgctgcggg

SEQ ID NO: 630517 - DNA, 15 bp, Homo sapiens
gagcgtgctgcgggg

SEQ ID NO: 630518 - DNA, 15 bp, Homo sapiens
agcgtgctgcgggga

SEQ ID NO: 630519 - DNA, 15 bp, Homo sapiens
gcgtgctgcggggag

SEQ ID NO: 630520 - DNA, 15 bp, Homo sapiens
cgtgctgcggggagg

SEQ ID NO: 630521 - DNA, 15 bp, Homo sapiens
gtgctgcggggaggg

SEQ ID NO: 630522 - DNA, 15 bp, Homo sapiens
tgctgcggggagggg

SEQ ID NO: 630523 - DNA, 15 bp, Homo sapiens
gctgcggggaggggc

SEQ ID NO: 630524 - DNA, 15 bp, Homo sapiens
ctgcggggaggggcc

SEQ ID NO: 630525 - DNA, 15 bp, Homo sapiens
tgcggggaggggccg

SEQ ID NO: 630526 - DNA, 15 bp, Homo sapiens
gcggggaggggccga

SEQ ID NO: 630527 - DNA, 15 bp, Homo sapiens
cggggaggggccgag

SEQ ID NO: 630528 - DNA, 15 bp, Homo sapiens
ggggaggggccgagg

SEQ ID NO: 630529 - DNA, 15 bp, Homo sapiens
gggaggggccgaggg

SEQ ID NO: 630530 - DNA, 15 bp, Homo sapiens
ggaggggccgagggc

SEQ ID NO: 630531 - DNA, 15 bp, Homo sapiens
gaggggccgagggca

SEQ ID NO: 630532 - DNA, 15 bp, Homo sapiens
aggggccgagggcag

SEQ ID NO: 630533 - DNA, 15 bp, Homo sapiens
ggggccgagggcaga

SEQ ID NO: 630534 - DNA, 15 bp, Homo sapiens
gggccgagggcagat

SEQ ID NO: 630535 - DNA, 15 bp, Homo sapiens
ggccgagggcagatt

SEQ ID NO: 630536 - DNA, 15 bp, Homo sapiens
gccgagggcagattc

SEQ ID NO: 630537 - DNA, 15 bp, Homo sapiens
ccgagggcagattcg

SEQ ID NO: 630538 - DNA, 15 bp, Homo sapiens
cgagggcagattcgg

SEQ ID NO: 630539 - DNA, 15 bp, Homo sapiens
gagggcagattcggg

SEQ ID NO: 630540 - DNA, 15 bp, Homo sapiens
agggcagattcggga

SEQ ID NO: 630541 - DNA, 15 bp, Homo sapiens
gggcagattcgggaa

SEQ ID NO: 630542 - DNA, 15 bp, Homo sapiens
ggcagattcgggaat

SEQ ID NO: 630543 - DNA, 15 bp, Homo sapiens
gcagattcgggaatg

SEQ ID NO: 630544 - DNA, 15 bp, Homo sapiens
cagattcgggaatga

SEQ ID NO: 630545 - DNA, 15 bp, Homo sapiens
agattcgggaatgat

SEQ ID NO: 630546 - DNA, 15 bp, Homo sapiens
gattcgggaatgatg

SEQ ID NO: 630547 - DNA, 15 bp, Homo sapiens
attcgggaatgatgg

SEQ ID NO: 630548 - DNA, 15 bp, Homo sapiens
ttcgggaatgatggc

SEQ ID NO: 630549 - DNA, 15 bp, Homo sapiens
tcgggaatgatggcg

SEQ ID NO: 630550 - DNA, 15 bp, Homo sapiens
cgggaatgatggcgc

SEQ ID NO: 630551 - DNA, 15 bp, Homo sapiens
gggaatgatggcgcg

SEQ ID NO: 630552 - DNA, 15 bp, Homo sapiens
ggaatgatggcgcgg

SEQ ID NO: 630553 - DNA, 15 bp, Homo sapiens
gaatgatggcgcggg

SEQ ID NO: 630554 - DNA, 15 bp, Homo sapiens
aatgatggcgcgggg

SEQ ID NO: 630555 - DNA, 15 bp, Homo sapiens
atgatggcgcggggt

SEQ ID NO: 630556 - DNA, 15 bp, Homo sapiens
tgatggcgcggggtg

SEQ ID NO: 630557 - DNA, 15 bp, Homo sapiens
gatggcgcggggtgg

SEQ ID NO: 630558 - DNA, 15 bp, Homo sapiens
atggcgcggggtggg

SEQ ID NO: 630559 - DNA, 15 bp, Homo sapiens
tggcgcggggtgggg

SEQ ID NO: 630560 - DNA, 15 bp, Homo sapiens
ggcgcggggtggggg

SEQ ID NO: 630561 - DNA, 15 bp, Homo sapiens
gcgcggggtgggggc

SEQ ID NO: 630562 - DNA, 15 bp, Homo sapiens
cgcggggtgggggcg

SEQ ID NO: 630563 - DNA, 15 bp, Homo sapiens
gcggggtgggggcgt

SEQ ID NO: 630564 - DNA, 15 bp, Homo sapiens
cggggtgggggcgtg

SEQ ID NO: 630565 - DNA, 15 bp, Homo sapiens
ggggtgggggcgtgg

SEQ ID NO: 630566 - DNA, 15 bp, Homo sapiens
gggtgggggcgtggg

SEQ ID NO: 630567 - DNA, 15 bp, Homo sapiens
ggtgggggcgtgggg

SEQ ID NO: 630568 - DNA, 15 bp, Homo sapiens
gtgggggcgtggggg

SEQ ID NO: 630569 - DNA, 15 bp, Homo sapiens
tgggggcgtgggggc

SEQ ID NO: 630570 - DNA, 15 bp, Homo sapiens
gggggcgtgggggct

SEQ ID NO: 630571 - DNA, 15 bp, Homo sapiens
ggggcgtgggggctt

SEQ ID NO: 630572 - DNA, 15 bp, Homo sapiens
gggcgtgggggcttt

SEQ ID NO: 630573 - DNA, 15 bp, Homo sapiens
ggcgtgggggctttc

SEQ ID NO: 630574 - DNA, 15 bp, Homo sapiens
gcgtgggggctttct

SEQ ID NO: 630575 - DNA, 15 bp, Homo sapiens
cgtgggggctttctc

SEQ ID NO: 630576 - DNA, 15 bp, Homo sapiens
gtgggggctttctcg

SEQ ID NO: 630577 - DNA, 15 bp, Homo sapiens
tgggggctttctcgg

SEQ ID NO: 630578 - DNA, 15 bp, Homo sapiens
gggggctttctcggg

SEQ ID NO: 630579 - DNA, 15 bp, Homo sapiens
ggggctttctcggga

SEQ ID NO: 630580 - DNA, 15 bp, Homo sapiens
gggctttctcgggag

SEQ ID NO: 630581 - DNA, 15 bp, Homo sapiens
ggctttctcgggaga

SEQ ID NO: 630582 - DNA, 15 bp, Homo sapiens
gctttctcgggagag

SEQ ID NO: 630583 - DNA, 15 bp, Homo sapiens
ctttctcgggagagg

SEQ ID NO: 630584 - DNA, 15 bp, Homo sapiens
tttctcgggagaggc

SEQ ID NO: 630585 - DNA, 15 bp, Homo sapiens
ttctcgggagaggcc

SEQ ID NO: 630586 - DNA, 15 bp, Homo sapiens
tctcgggagaggccc

SEQ ID NO: 630587 - DNA, 15 bp, Homo sapiens
ctcgggagaggccct

SEQ ID NO: 630588 - DNA, 15 bp, Homo sapiens
tcgggagaggccctt

SEQ ID NO: 630589 - DNA, 15 bp, Homo sapiens
cgggagaggcccttc

SEQ ID NO: 630590 - DNA, 15 bp, Homo sapiens
gggagaggcccttcc

SEQ ID NO: 630591 - DNA, 15 bp, Homo sapiens
ggagaggcccttccc

SEQ ID NO: 630592 - DNA, 15 bp, Homo sapiens
gagaggcccttccct

SEQ ID NO: 630593 - DNA, 15 bp, Homo sapiens
agaggcccttccctg

SEQ ID NO: 630594 - DNA, 15 bp, Homo sapiens
gaggcccttccctgg

SEQ ID NO: 630595 - DNA, 15 bp, Homo sapiens
aggcccttccctgga

SEQ ID NO: 630596 - DNA, 15 bp, Homo sapiens
ggcccttccctggaa

SEQ ID NO: 630597 - DNA, 15 bp, Homo sapiens
gcccttccctggaag

SEQ ID NO: 630598 - DNA, 15 bp, Homo sapiens
cccttccctggaagt

SEQ ID NO: 630599 - DNA, 15 bp, Homo sapiens
ccttccctggaagtt

SEQ ID NO: 630600 - DNA, 15 bp, Homo sapiens
cttccctggaagttt

SEQ ID NO: 630601 - DNA, 15 bp, Homo sapiens
ttccctggaagtttg

SEQ ID NO: 630602 - DNA, 15 bp, Homo sapiens
tccctggaagtttgg

SEQ ID NO: 630603 - DNA, 15 bp, Homo sapiens
ccctggaagtttggg

SEQ ID NO: 630604 - DNA, 15 bp, Homo sapiens
cctggaagtttgggg

SEQ ID NO: 630605 - DNA, 15 bp, Homo sapiens
ctggaagtttggggt

SEQ ID NO: 630606 - DNA, 15 bp, Homo sapiens
tggaagtttggggtg

SEQ ID NO: 630607 - DNA, 15 bp, Homo sapiens
ggaagtttggggtgc

SEQ ID NO: 630608 - DNA, 15 bp, Homo sapiens
gaagtttggggtgcg

SEQ ID NO: 630609 - DNA, 15 bp, Homo sapiens
aagtttggggtgcga

SEQ ID NO: 630610 - DNA, 15 bp, Homo sapiens
agtttggggtgcgat

SEQ ID NO: 630611 - DNA, 15 bp, Homo sapiens
gtttggggtgcgatg

SEQ ID NO: 630612 - DNA, 15 bp, Homo sapiens
tttggggtgcgatgg

SEQ ID NO: 630613 - DNA, 15 bp, Homo sapiens
ttggggtgcgatggt

SEQ ID NO: 630614 - DNA, 15 bp, Homo sapiens
tggggtgcgatggtg

SEQ ID NO: 630615 - DNA, 15 bp, Homo sapiens
ggggtgcgatggtga

SEQ ID NO: 630616 - DNA, 15 bp, Homo sapiens
gggtgcgatggtgag

SEQ ID NO: 630617 - DNA, 15 bp, Homo sapiens
ggtgcgatggtgagg

SEQ ID NO: 630618 - DNA, 15 bp, Homo sapiens
gtgcgatggtgaggt

SEQ ID NO: 630619 - DNA, 15 bp, Homo sapiens
tgcgatggtgaggtt

SEQ ID NO: 630620 - DNA, 15 bp, Homo sapiens
gcgatggtgaggttc

SEQ ID NO: 630621 - DNA, 15 bp, Homo sapiens
cgatggtgaggttct

SEQ ID NO: 630622 - DNA, 15 bp, Homo sapiens
gatggtgaggttctc

SEQ ID NO: 630623 - DNA, 15 bp, Homo sapiens
atggtgaggttctcg

SEQ ID NO: 630624 - DNA, 15 bp, Homo sapiens
tggtgaggttctcgg

SEQ ID NO: 630625 - DNA, 15 bp, Homo sapiens
ggtgaggttctcggg

SEQ ID NO: 630626 - DNA, 15 bp, Homo sapiens
gtgaggttctcgggg

SEQ ID NO: 630627 - DNA, 15 bp, Homo sapiens
tgaggttctcggggc

SEQ ID NO: 630628 - DNA, 15 bp, Homo sapiens
gaggttctcggggca

SEQ ID NO: 630629 - DNA, 15 bp, Homo sapiens
aggttctcggggcac

SEQ ID NO: 630630 - DNA, 15 bp, Homo sapiens
ggttctcggggcacc

SEQ ID NO: 630631 - DNA, 15 bp, Homo sapiens
gttctcggggcacct

SEQ ID NO: 630632 - DNA, 15 bp, Homo sapiens
ttctcggggcacctc

SEQ ID NO: 630633 - DNA, 15 bp, Homo sapiens
tctcggggcacctct

SEQ ID NO: 630634 - DNA, 15 bp, Homo sapiens
ctcggggcacctctg

SEQ ID NO: 630635 - DNA, 15 bp, Homo sapiens
tcggggcacctctgg

SEQ ID NO: 630636 - DNA, 15 bp, Homo sapiens
cggggcacctctgga

SEQ ID NO: 630637 - DNA, 15 bp, Homo sapiens
ggggcacctctggag

SEQ ID NO: 630638 - DNA, 15 bp, Homo sapiens
gggcacctctggagg

SEQ ID NO: 630639 - DNA, 15 bp, Homo sapiens
ggcacctctggaggg

SEQ ID NO: 630640 - DNA, 15 bp, Homo sapiens
gcacctctggagggg

SEQ ID NO: 630641 - DNA, 15 bp, Homo sapiens
cacctctggaggggc

SEQ ID NO: 630642 - DNA, 15 bp, Homo sapiens
acctctggaggggcc

SEQ ID NO: 630643 - DNA, 15 bp, Homo sapiens
cctctggaggggcct

SEQ ID NO: 630644 - DNA, 15 bp, Homo sapiens
ctctggaggggcctc

SEQ ID NO: 630645 - DNA, 15 bp, Homo sapiens
tctggaggggcctcg

SEQ ID NO: 630646 - DNA, 15 bp, Homo sapiens
ctggaggggcctcgg

SEQ ID NO: 630647 - DNA, 15 bp, Homo sapiens
tggaggggcctcggc

SEQ ID NO: 630648 - DNA, 15 bp, Homo sapiens
ggaggggcctcggca

SEQ ID NO: 630649 - DNA, 15 bp, Homo sapiens
gaggggcctcggcac

SEQ ID NO: 630650 - DNA, 15 bp, Homo sapiens
aggggcctcggcacg

SEQ ID NO: 630651 - DNA, 15 bp, Homo sapiens
ggggcctcggcacgg

SEQ ID NO: 630652 - DNA, 15 bp, Homo sapiens
gggcctcggcacgga

SEQ ID NO: 630653 - DNA, 15 bp, Homo sapiens
ggcctcggcacggaa

SEQ ID NO: 630654 - DNA, 15 bp, Homo sapiens
gcctcggcacggaaa

SEQ ID NO: 630655 - DNA, 15 bp, Homo sapiens
cctcggcacggaaag

SEQ ID NO: 630656 - DNA, 15 bp, Homo sapiens
ctcggcacggaaagc

SEQ ID NO: 630657 - DNA, 15 bp, Homo sapiens
tcggcacggaaagcg

SEQ ID NO: 630658 - DNA, 15 bp, Homo sapiens
cggcacggaaagcga

SEQ ID NO: 630659 - DNA, 15 bp, Homo sapiens
ggcacggaaagcgac

SEQ ID NO: 630660 - DNA, 15 bp, Homo sapiens
gcacggaaagcgacc

SEQ ID NO: 630661 - DNA, 15 bp, Homo sapiens
cacggaaagcgacca

SEQ ID NO: 630662 - DNA, 15 bp, Homo sapiens
acggaaagcgaccac

SEQ ID NO: 630663 - DNA, 15 bp, Homo sapiens
cggaaagcgaccacc

SEQ ID NO: 630664 - DNA, 15 bp, Homo sapiens
ggaaagcgaccacct

SEQ ID NO: 630665 - DNA, 15 bp, Homo sapiens
gaaagcgaccacctg

SEQ ID NO: 630666 - DNA, 15 bp, Homo sapiens
aaagcgaccacctgg

SEQ ID NO: 630667 - DNA, 15 bp, Homo sapiens
aagcgaccacctggg

SEQ ID NO: 630668 - DNA, 15 bp, Homo sapiens
agcgaccacctggga

SEQ ID NO: 630669 - DNA, 15 bp, Homo sapiens
gcgaccacctgggag

SEQ ID NO: 630670 - DNA, 15 bp, Homo sapiens
cgaccacctgggagg

SEQ ID NO: 630671 - DNA, 15 bp, Homo sapiens
gaccacctgggaggg

SEQ ID NO: 630672 - DNA, 15 bp, Homo sapiens
accacctgggagggc

SEQ ID NO: 630673 - DNA, 15 bp, Homo sapiens
ccacctgggagggcg

SEQ ID NO: 630674 - DNA, 15 bp, Homo sapiens
cacctgggagggcgt

SEQ ID NO: 630675 - DNA, 15 bp, Homo sapiens
acctgggagggcgtg

SEQ ID NO: 630676 - DNA, 15 bp, Homo sapiens
cctgggagggcgtgt

SEQ ID NO: 630677 - DNA, 15 bp, Homo sapiens
ctgggagggcgtgtg

SEQ ID NO: 630678 - DNA, 15 bp, Homo sapiens
tgggagggcgtgtgg

SEQ ID NO: 630679 - DNA, 15 bp, Homo sapiens
gggagggcgtgtggg

SEQ ID NO: 630680 - DNA, 15 bp, Homo sapiens
ggagggcgtgtgggg

SEQ ID NO: 630681 - DNA, 15 bp, Homo sapiens
gagggcgtgtgggga

SEQ ID NO: 630682 - DNA, 15 bp, Homo sapiens
agggcgtgtggggac

SEQ ID NO: 630683 - DNA, 15 bp, Homo sapiens
gggcgtgtggggacc

SEQ ID NO: 630684 - DNA, 15 bp, Homo sapiens
ggcgtgtggggacca

SEQ ID NO: 630685 - DNA, 15 bp, Homo sapiens
gcgtgtggggaccag

SEQ ID NO: 630686 - DNA, 15 bp, Homo sapiens
cgtgtggggaccagg

SEQ ID NO: 630687 - DNA, 15 bp, Homo sapiens
gtgtggggaccaggt

SEQ ID NO: 630688 - DNA, 15 bp, Homo sapiens
tgtggggaccaggtt

SEQ ID NO: 630689 - DNA, 15 bp, Homo sapiens
gtggggaccaggttt

SEQ ID NO: 630690 - DNA, 15 bp, Homo sapiens
tggggaccaggtttt

SEQ ID NO: 630691 - DNA, 15 bp, Homo sapiens
ggggaccaggttttg

SEQ ID NO: 630692 - DNA, 15 bp, Homo sapiens
gggaccaggttttgc

SEQ ID NO: 630693 - DNA, 15 bp, Homo sapiens
ggaccaggttttgcc

SEQ ID NO: 630694 - DNA, 15 bp, Homo sapiens
gaccaggttttgcct

SEQ ID NO: 630695 - DNA, 15 bp, Homo sapiens
accaggttttgcctt

SEQ ID NO: 630696 - DNA, 15 bp, Homo sapiens
ccaggttttgccttt

SEQ ID NO: 630697 - DNA, 15 bp, Homo sapiens
caggttttgccttta

SEQ ID NO: 630698 - DNA, 15 bp, Homo sapiens
aggttttgcctttag

SEQ ID NO: 630699 - DNA, 15 bp, Homo sapiens
ggttttgcctttagt

SEQ ID NO: 630700 - DNA, 15 bp, Homo sapiens
gttttgcctttagtt

SEQ ID NO: 630701 - DNA, 15 bp, Homo sapiens
ttttgcctttagttt

SEQ ID NO: 630702 - DNA, 15 bp, Homo sapiens
tttgcctttagtttt

SEQ ID NO: 630703 - DNA, 15 bp, Homo sapiens
ttgcctttagttttg

SEQ ID NO: 630704 - DNA, 15 bp, Homo sapiens
tgcctttagttttgc

SEQ ID NO: 630705 - DNA, 15 bp, Homo sapiens
gcctttagttttgca

SEQ ID NO: 630706 - DNA, 15 bp, Homo sapiens
cctttagttttgcac

SEQ ID NO: 630707 - DNA, 15 bp, Homo sapiens
ctttagttttgcaca

SEQ ID NO: 630708 - DNA, 15 bp, Homo sapiens
tttagttttgcacac

SEQ ID NO: 630709 - DNA, 15 bp, Homo sapiens
ttagttttgcacaca

SEQ ID NO: 630710 - DNA, 15 bp, Homo sapiens
tagttttgcacacac

SEQ ID NO: 630711 - DNA, 15 bp, Homo sapiens
agttttgcacacact

SEQ ID NO: 630712 - DNA, 15 bp, Homo sapiens
gttttgcacacactg

SEQ ID NO: 630713 - DNA, 15 bp, Homo sapiens
ttttgcacacactgt

SEQ ID NO: 630714 - DNA, 15 bp, Homo sapiens
tttgcacacactgta

SEQ ID NO: 630715 - DNA, 15 bp, Homo sapiens
ttgcacacactgtag

SEQ ID NO: 630716 - DNA, 15 bp, Homo sapiens
tgcacacactgtagt

SEQ ID NO: 630717 - DNA, 15 bp, Homo sapiens
gcacacactgtagtt

SEQ ID NO: 630718 - DNA, 15 bp, Homo sapiens
cacacactgtagttc

SEQ ID NO: 630719 - DNA, 15 bp, Homo sapiens
acacactgtagttca

SEQ ID NO: 630720 - DNA, 15 bp, Homo sapiens
cacactgtagttcat

SEQ ID NO: 630721 - DNA, 15 bp, Homo sapiens
acactgtagttcatc

SEQ ID NO: 630722 - DNA, 15 bp, Homo sapiens
cactgtagttcatct

SEQ ID NO: 630723 - DNA, 15 bp, Homo sapiens
actgtagttcatctt

SEQ ID NO: 630724 - DNA, 15 bp, Homo sapiens
ctgtagttcatcttt

SEQ ID NO: 630725 - DNA, 15 bp, Homo sapiens
tgtagttcatcttta

SEQ ID NO: 630726 - DNA, 15 bp, Homo sapiens
gtagttcatctttat

SEQ ID NO: 630727 - DNA, 15 bp, Homo sapiens
tagttcatctttatg

SEQ ID NO: 630728 - DNA, 15 bp, Homo sapiens
agttcatctttatgg

SEQ ID NO: 630729 - DNA, 15 bp, Homo sapiens
gttcatctttatgga

SEQ ID NO: 630730 - DNA, 15 bp, Homo sapiens
ttcatctttatggag

SEQ ID NO: 630731 - DNA, 15 bp, Homo sapiens
tcatctttatggaga

SEQ ID NO: 630732 - DNA, 15 bp, Homo sapiens
catctttatggagat

SEQ ID NO: 630733 - DNA, 15 bp, Homo sapiens
atctttatggagatg

SEQ ID NO: 630734 - DNA, 15 bp, Homo sapiens
tctttatggagatgc

SEQ ID NO: 630735 - DNA, 15 bp, Homo sapiens
ctttatggagatgct

SEQ ID NO: 630736 - DNA, 15 bp, Homo sapiens
tttatggagatgctc

SEQ ID NO: 630737 - DNA, 15 bp, Homo sapiens
ttatggagatgctca

SEQ ID NO: 630738 - DNA, 15 bp, Homo sapiens
tatggagatgctcat

SEQ ID NO: 630739 - DNA, 15 bp, Homo sapiens
atggagatgctcatg

SEQ ID NO: 630740 - DNA, 15 bp, Homo sapiens
tggagatgctcatgg

SEQ ID NO: 630741 - DNA, 15 bp, Homo sapiens
ggagatgctcatggc

SEQ ID NO: 630742 - DNA, 15 bp, Homo sapiens
gagatgctcatggcc

SEQ ID NO: 630743 - DNA, 15 bp, Homo sapiens
agatgctcatggcct

SEQ ID NO: 630744 - DNA, 15 bp, Homo sapiens
gatgctcatggcctc

SEQ ID NO: 630745 - DNA, 15 bp, Homo sapiens
atgctcatggcctca

SEQ ID NO: 630746 - DNA, 15 bp, Homo sapiens
tgctcatggcctcat

SEQ ID NO: 630747 - DNA, 15 bp, Homo sapiens
gctcatggcctcatt

SEQ ID NO: 630748 - DNA, 15 bp, Homo sapiens
ctcatggcctcattg

SEQ ID NO: 630749 - DNA, 15 bp, Homo sapiens
tcatggcctcattga

SEQ ID NO: 630750 - DNA, 15 bp, Homo sapiens
catggcctcattgaa

SEQ ID NO: 630751 - DNA, 15 bp, Homo sapiens
atggcctcattgaag

SEQ ID NO: 630752 - DNA, 15 bp, Homo sapiens
tggcctcattgaagc

SEQ ID NO: 630753 - DNA, 15 bp, Homo sapiens
ggcctcattgaagcc

SEQ ID NO: 630754 - DNA, 15 bp, Homo sapiens
gcctcattgaagccc

SEQ ID NO: 630755 - DNA, 15 bp, Homo sapiens
cctcattgaagcccc

SEQ ID NO: 630756 - DNA, 15 bp, Homo sapiens
ctcattgaagcccca

SEQ ID NO: 630757 - DNA, 15 bp, Homo sapiens
tcattgaagccccac

SEQ ID NO: 630758 - DNA, 15 bp, Homo sapiens
cattgaagccccact

SEQ ID NO: 630759 - DNA, 15 bp, Homo sapiens
attgaagccccacta

SEQ ID NO: 630760 - DNA, 15 bp, Homo sapiens
ttgaagccccactac

SEQ ID NO: 630761 - DNA, 15 bp, Homo sapiens
tgaagccccactaca

SEQ ID NO: 630762 - DNA, 15 bp, Homo sapiens
gaagccccactacag

SEQ ID NO: 630763 - DNA, 15 bp, Homo sapiens
aagccccactacagc

SEQ ID NO: 630764 - DNA, 15 bp, Homo sapiens
agccccactacagct

SEQ ID NO: 630765 - DNA, 15 bp, Homo sapiens
gccccactacagctc

SEQ ID NO: 630766 - DNA, 15 bp, Homo sapiens
ccccactacagctct

SEQ ID NO: 630767 - DNA, 15 bp, Homo sapiens
cccactacagctctg

SEQ ID NO: 630768 - DNA, 15 bp, Homo sapiens
ccactacagctctgg

SEQ ID NO: 630769 - DNA, 15 bp, Homo sapiens
cactacagctctggt

SEQ ID NO: 630770 - DNA, 15 bp, Homo sapiens
actacagctctggta

SEQ ID NO: 630771 - DNA, 15 bp, Homo sapiens
ctacagctctggtag

SEQ ID NO: 630772 - DNA, 15 bp, Homo sapiens
tacagctctggtagc

SEQ ID NO: 630773 - DNA, 15 bp, Homo sapiens
acagctctggtagcg

SEQ ID NO: 630774 - DNA, 15 bp, Homo sapiens
cagctctggtagcgg

SEQ ID NO: 630775 - DNA, 15 bp, Homo sapiens
agctctggtagcggt

SEQ ID NO: 630776 - DNA, 15 bp, Homo sapiens
gctctggtagcggta

SEQ ID NO: 630777 - DNA, 15 bp, Homo sapiens
ctctggtagcggtaa

SEQ ID NO: 630778 - DNA, 15 bp, Homo sapiens
tctggtagcggtaac

SEQ ID NO: 630779 - DNA, 15 bp, Homo sapiens
ctggtagcggtaacc

SEQ ID NO: 630780 - DNA, 15 bp, Homo sapiens
tggtagcggtaacca

SEQ ID NO: 630781 - DNA, 15 bp, Homo sapiens
ggtagcggtaaccat

SEQ ID NO: 630782 - DNA, 15 bp, Homo sapiens
gtagcggtaaccatg

SEQ ID NO: 630783 - DNA, 15 bp, Homo sapiens
tagcggtaaccatgc

SEQ ID NO: 630784 - DNA, 15 bp, Homo sapiens
agcggtaaccatgcg

SEQ ID NO: 630785 - DNA, 15 bp, Homo sapiens
gcggtaaccatgcgt

SEQ ID NO: 630786 - DNA, 15 bp, Homo sapiens
cggtaaccatgcgta

SEQ ID NO: 630787 - DNA, 15 bp, Homo sapiens
ggtaaccatgcgtat

SEQ ID NO: 630788 - DNA, 15 bp, Homo sapiens
gtaaccatgcgtatt

SEQ ID NO: 630789 - DNA, 15 bp, Homo sapiens
taaccatgcgtattt

SEQ ID NO: 630790 - DNA, 15 bp, Homo sapiens
aaccatgcgtatttg

SEQ ID NO: 630791 - DNA, 15 bp, Homo sapiens
accatgcgtatttga

SEQ ID NO: 630792 - DNA, 15 bp, Homo sapiens
ccatgcgtatttgac

SEQ ID NO: 630793 - DNA, 15 bp, Homo sapiens
catgcgtatttgaca

SEQ ID NO: 630794 - DNA, 15 bp, Homo sapiens
atgcgtatttgacac

SEQ ID NO: 630795 - DNA, 15 bp, Homo sapiens
tgcgtatttgacaca

SEQ ID NO: 630796 - DNA, 15 bp, Homo sapiens
gcgtatttgacacac

SEQ ID NO: 630797 - DNA, 15 bp, Homo sapiens
cgtatttgacacacg

SEQ ID NO: 630798 - DNA, 15 bp, Homo sapiens
gtatttgacacacga

SEQ ID NO: 630799 - DNA, 15 bp, Homo sapiens
tatttgacacacgaa

SEQ ID NO: 630800 - DNA, 15 bp, Homo sapiens
atttgacacacgaag

SEQ ID NO: 630801 - DNA, 15 bp, Homo sapiens
tttgacacacgaagg

SEQ ID NO: 630802 - DNA, 15 bp, Homo sapiens
ttgacacacgaagga

SEQ ID NO: 630803 - DNA, 15 bp, Homo sapiens
tgacacacgaaggaa

SEQ ID NO: 630804 - DNA, 15 bp, Homo sapiens
gacacacgaaggaac

SEQ ID NO: 630805 - DNA, 15 bp, Homo sapiens
acacacgaaggaact

SEQ ID NO: 630806 - DNA, 15 bp, Homo sapiens
cacacgaaggaacta

SEQ ID NO: 630807 - DNA, 15 bp, Homo sapiens
acacgaaggaactag

SEQ ID NO: 630808 - DNA, 15 bp, Homo sapiens
cacgaaggaactagg

SEQ ID NO: 630809 - DNA, 15 bp, Homo sapiens
acgaaggaactaggg

SEQ ID NO: 630810 - DNA, 15 bp, Homo sapiens
cgaaggaactaggga

SEQ ID NO: 630811 - DNA, 15 bp, Homo sapiens
gaaggaactagggaa

SEQ ID NO: 630812 - DNA, 15 bp, Homo sapiens
aaggaactagggaaa

SEQ ID NO: 630813 - DNA, 15 bp, Homo sapiens
aggaactagggaaaa

SEQ ID NO: 630814 - DNA, 15 bp, Homo sapiens
ggaactagggaaaag

SEQ ID NO: 630815 - DNA, 15 bp, Homo sapiens
gaactagggaaaagg

SEQ ID NO: 630816 - DNA, 15 bp, Homo sapiens
aactagggaaaaggc

SEQ ID NO: 630817 - DNA, 15 bp, Homo sapiens
actagggaaaaggca

SEQ ID NO: 630818 - DNA, 15 bp, Homo sapiens
ctagggaaaaggcat

SEQ ID NO: 630819 - DNA, 15 bp, Homo sapiens
tagggaaaaggcatt

SEQ ID NO: 630820 - DNA, 15 bp, Homo sapiens
agggaaaaggcatta

SEQ ID NO: 630821 - DNA, 15 bp, Homo sapiens
gggaaaaggcattag

SEQ ID NO: 630822 - DNA, 15 bp, Homo sapiens
ggaaaaggcattagg

SEQ ID NO: 630823 - DNA, 15 bp, Homo sapiens
gaaaaggcattaggt

SEQ ID NO: 630824 - DNA, 15 bp, Homo sapiens
aaaaggcattaggtc

SEQ ID NO: 630825 - DNA, 15 bp, Homo sapiens
aaaggcattaggtca

SEQ ID NO: 630826 - DNA, 15 bp, Homo sapiens
aaggcattaggtcat

SEQ ID NO: 630827 - DNA, 15 bp, Homo sapiens
aggcattaggtcatt

SEQ ID NO: 630828 - DNA, 15 bp, Homo sapiens
ggcattaggtcattt

SEQ ID NO: 630829 - DNA, 15 bp, Homo sapiens
gcattaggtcatttc

SEQ ID NO: 630830 - DNA, 15 bp, Homo sapiens
cattaggtcatttca

SEQ ID NO: 630831 - DNA, 15 bp, Homo sapiens
attaggtcatttcaa

SEQ ID NO: 630832 - DNA, 15 bp, Homo sapiens
ttaggtcatttcaag

SEQ ID NO: 630833 - DNA, 15 bp, Homo sapiens
taggtcatttcaagc

SEQ ID NO: 630834 - DNA, 15 bp, Homo sapiens
aggtcatttcaagcc

SEQ ID NO: 630835 - DNA, 15 bp, Homo sapiens
ggtcatttcaagccg

SEQ ID NO: 630836 - DNA, 15 bp, Homo sapiens
gtcatttcaagccga

SEQ ID NO: 630837 - DNA, 15 bp, Homo sapiens
tcatttcaagccgaa

SEQ ID NO: 630838 - DNA, 15 bp, Homo sapiens
catttcaagccgaaa

SEQ ID NO: 630839 - DNA, 15 bp, Homo sapiens
atttcaagccgaaat

SEQ ID NO: 630840 - DNA, 15 bp, Homo sapiens
tttcaagccgaaatt

SEQ ID NO: 630841 - DNA, 15 bp, Homo sapiens
ttcaagccgaaattc

SEQ ID NO: 630842 - DNA, 15 bp, Homo sapiens
tcaagccgaaattca

SEQ ID NO: 630843 - DNA, 15 bp, Homo sapiens
caagccgaaattcac

SEQ ID NO: 630844 - DNA, 15 bp, Homo sapiens
aagccgaaattcaca

SEQ ID NO: 630845 - DNA, 15 bp, Homo sapiens
agccgaaattcacat

SEQ ID NO: 630846 - DNA, 15 bp, Homo sapiens
gccgaaattcacatg

SEQ ID NO: 630847 - DNA, 15 bp, Homo sapiens
ccgaaattcacatgt

SEQ ID NO: 630848 - DNA, 15 bp, Homo sapiens
cgaaattcacatgtg

SEQ ID NO: 630849 - DNA, 15 bp, Homo sapiens
gaaattcacatgtgc

SEQ ID NO: 630850 - DNA, 15 bp, Homo sapiens
aaattcacatgtgct

SEQ ID NO: 630851 - DNA, 15 bp, Homo sapiens
aattcacatgtgcta

SEQ ID NO: 630852 - DNA, 15 bp, Homo sapiens
attcacatgtgctag

SEQ ID NO: 630853 - DNA, 15 bp, Homo sapiens
ttcacatgtgctaga

SEQ ID NO: 630854 - DNA, 15 bp, Homo sapiens
tcacatgtgctagaa

SEQ ID NO: 630855 - DNA, 15 bp, Homo sapiens
cacatgtgctagaat

SEQ ID NO: 630856 - DNA, 15 bp, Homo sapiens
acatgtgctagaatc

SEQ ID NO: 630857 - DNA, 15 bp, Homo sapiens
catgtgctagaatcc

SEQ ID NO: 630858 - DNA, 15 bp, Homo sapiens
atgtgctagaatcca

SEQ ID NO: 630859 - DNA, 15 bp, Homo sapiens
tgtgctagaatccag

SEQ ID NO: 630860 - DNA, 15 bp, Homo sapiens
gtgctagaatccaga

SEQ ID NO: 630861 - DNA, 15 bp, Homo sapiens
tgctagaatccagat

SEQ ID NO: 630862 - DNA, 15 bp, Homo sapiens
gctagaatccagatt

SEQ ID NO: 630863 - DNA, 15 bp, Homo sapiens
ctagaatccagattc

SEQ ID NO: 630864 - DNA, 15 bp, Homo sapiens
tagaatccagattcc

SEQ ID NO: 630865 - DNA, 15 bp, Homo sapiens
agaatccagattcca

SEQ ID NO: 630866 - DNA, 15 bp, Homo sapiens
gaatccagattccat

SEQ ID NO: 630867 - DNA, 15 bp, Homo sapiens
aatccagattccatg

SEQ ID NO: 630868 - DNA, 15 bp, Homo sapiens
atccagattccatgc

SEQ ID NO: 630869 - DNA, 15 bp, Homo sapiens
tccagattccatgct

SEQ ID NO: 630870 - DNA, 15 bp, Homo sapiens
ccagattccatgctg

SEQ ID NO: 630871 - DNA, 15 bp, Homo sapiens
cagattccatgctga

SEQ ID NO: 630872 - DNA, 15 bp, Homo sapiens
agattccatgctgac

SEQ ID NO: 630873 - DNA, 15 bp, Homo sapiens
gattccatgctgacc

SEQ ID NO: 630874 - DNA, 15 bp, Homo sapiens
attccatgctgaccg

SEQ ID NO: 630875 - DNA, 15 bp, Homo sapiens
ttccatgctgaccga

SEQ ID NO: 630876 - DNA, 15 bp, Homo sapiens
tccatgctgaccgat

SEQ ID NO: 630877 - DNA, 15 bp, Homo sapiens
ccatgctgaccgatg

SEQ ID NO: 630878 - DNA, 15 bp, Homo sapiens
catgctgaccgatgc

SEQ ID NO: 630879 - DNA, 15 bp, Homo sapiens
atgctgaccgatgcc

SEQ ID NO: 630880 - DNA, 15 bp, Homo sapiens
tgctgaccgatgccc

SEQ ID NO: 630881 - DNA, 15 bp, Homo sapiens
gctgaccgatgcccc

SEQ ID NO: 630882 - DNA, 15 bp, Homo sapiens
ctgaccgatgcccca

SEQ ID NO: 630883 - DNA, 15 bp, Homo sapiens
tgaccgatgccccag

SEQ ID NO: 630884 - DNA, 15 bp, Homo sapiens
gaccgatgccccagg

SEQ ID NO: 630885 - DNA, 15 bp, Homo sapiens
accgatgccccagga

SEQ ID NO: 630886 - DNA, 15 bp, Homo sapiens
ccgatgccccaggat

SEQ ID NO: 630887 - DNA, 15 bp, Homo sapiens
cgatgccccaggata

SEQ ID NO: 630888 - DNA, 15 bp, Homo sapiens
gatgccccaggatat

SEQ ID NO: 630889 - DNA, 15 bp, Homo sapiens
atgccccaggatata

SEQ ID NO: 630890 - DNA, 15 bp, Homo sapiens
tgccccaggatatag

SEQ ID NO: 630891 - DNA, 15 bp, Homo sapiens
gccccaggatataga

SEQ ID NO: 630892 - DNA, 15 bp, Homo sapiens
ccccaggatatagaa

SEQ ID NO: 630893 - DNA, 15 bp, Homo sapiens
cccaggatatagaaa

SEQ ID NO: 630894 - DNA, 15 bp, Homo sapiens
ccaggatatagaaaa

SEQ ID NO: 630895 - DNA, 15 bp, Homo sapiens
caggatatagaaaat

SEQ ID NO: 630896 - DNA, 15 bp, Homo sapiens
aggatatagaaaatg

SEQ ID NO: 630897 - DNA, 15 bp, Homo sapiens
ggatatagaaaatga

SEQ ID NO: 630898 - DNA, 15 bp, Homo sapiens
gatatagaaaatgag

SEQ ID NO: 630899 - DNA, 15 bp, Homo sapiens
atatagaaaatgaga

SEQ ID NO: 630900 - DNA, 15 bp, Homo sapiens
tatagaaaatgagaa

SEQ ID NO: 630901 - DNA, 15 bp, Homo sapiens
atagaaaatgagaat

SEQ ID NO: 630902 - DNA, 15 bp, Homo sapiens
tagaaaatgagaatc

SEQ ID NO: 630903 - DNA, 15 bp, Homo sapiens
agaaaatgagaatct

SEQ ID NO: 630904 - DNA, 15 bp, Homo sapiens
gaaaatgagaatctg

SEQ ID NO: 630905 - DNA, 15 bp, Homo sapiens
aaaatgagaatctgg

SEQ ID NO: 630906 - DNA, 15 bp, Homo sapiens
aaatgagaatctggt

SEQ ID NO: 630907 - DNA, 15 bp, Homo sapiens
aatgagaatctggtc

SEQ ID NO: 630908 - DNA, 15 bp, Homo sapiens
atgagaatctggtcc

SEQ ID NO: 630909 - DNA, 15 bp, Homo sapiens
tgagaatctggtcct

SEQ ID NO: 630910 - DNA, 15 bp, Homo sapiens
gagaatctggtcctt

SEQ ID NO: 630911 - DNA, 15 bp, Homo sapiens
agaatctggtcctta

SEQ ID NO: 630912 - DNA, 15 bp, Homo sapiens
gaatctggtccttac

SEQ ID NO: 630913 - DNA, 15 bp, Homo sapiens
aatctggtccttacc

SEQ ID NO: 630914 - DNA, 15 bp, Homo sapiens
atctggtccttacct

SEQ ID NO: 630915 - DNA, 15 bp, Homo sapiens
tctggtccttacctt

SEQ ID NO: 630916 - DNA, 15 bp, Homo sapiens
ctggtccttaccttc

SEQ ID NO: 630917 - DNA, 15 bp, Homo sapiens
tggtccttaccttca

SEQ ID NO: 630918 - DNA, 15 bp, Homo sapiens
ggtccttaccttcaa

SEQ ID NO: 630919 - DNA, 15 bp, Homo sapiens
gtccttaccttcaag

SEQ ID NO: 630920 - DNA, 15 bp, Homo sapiens
tccttaccttcaaga

SEQ ID NO: 630921 - DNA, 15 bp, Homo sapiens
ccttaccttcaagaa

SEQ ID NO: 630922 - DNA, 15 bp, Homo sapiens
cttaccttcaagaac

SEQ ID NO: 630923 - DNA, 15 bp, Homo sapiens
ttaccttcaagaaca

SEQ ID NO: 630924 - DNA, 15 bp, Homo sapiens
taccttcaagaacat

SEQ ID NO: 630925 - DNA, 15 bp, Homo sapiens
accttcaagaacatt

SEQ ID NO: 630926 - DNA, 15 bp, Homo sapiens
ccttcaagaacattc

SEQ ID NO: 630927 - DNA, 15 bp, Homo sapiens
cttcaagaacattct

SEQ ID NO: 630928 - DNA, 15 bp, Homo sapiens
ttcaagaacattctt

SEQ ID NO: 630929 - DNA, 15 bp, Homo sapiens
tcaagaacattctta

SEQ ID NO: 630930 - DNA, 15 bp, Homo sapiens
caagaacattcttaa

SEQ ID NO: 630931 - DNA, 15 bp, Homo sapiens
aagaacattcttaac

SEQ ID NO: 630932 - DNA, 15 bp, Homo sapiens
agaacattcttaacc

SEQ ID NO: 630933 - DNA, 15 bp, Homo sapiens
gaacattcttaaccg

SEQ ID NO: 630934 - DNA, 15 bp, Homo sapiens
aacattcttaaccgt

SEQ ID NO: 630935 - DNA, 15 bp, Homo sapiens
acattcttaaccgta

SEQ ID NO: 630936 - DNA, 15 bp, Homo sapiens
cattcttaaccgtaa

SEQ ID NO: 630937 - DNA, 15 bp, Homo sapiens
attcttaaccgtaat

SEQ ID NO: 630938 - DNA, 15 bp, Homo sapiens
ttcttaaccgtaatc

SEQ ID NO: 630939 - DNA, 15 bp, Homo sapiens
tcttaaccgtaatca

SEQ ID NO: 630940 - DNA, 15 bp, Homo sapiens
cttaaccgtaatcag

SEQ ID NO: 630941 - DNA, 15 bp, Homo sapiens
ttaaccgtaatcagc

SEQ ID NO: 630942 - DNA, 15 bp, Homo sapiens
taaccgtaatcagcc

SEQ ID NO: 630943 - DNA, 15 bp, Homo sapiens
aaccgtaatcagcct

SEQ ID NO: 630944 - DNA, 15 bp, Homo sapiens
accgtaatcagcctc

SEQ ID NO: 630945 - DNA, 15 bp, Homo sapiens
ccgtaatcagcctct

SEQ ID NO: 630946 - DNA, 15 bp, Homo sapiens
cgtaatcagcctctg

SEQ ID NO: 630947 - DNA, 15 bp, Homo sapiens
gtaatcagcctctgg

SEQ ID NO: 630948 - DNA, 15 bp, Homo sapiens
taatcagcctctggt

SEQ ID NO: 630949 - DNA, 15 bp, Homo sapiens
aatcagcctctggta

SEQ ID NO: 630950 - DNA, 15 bp, Homo sapiens
atcagcctctggtat

SEQ ID NO: 630951 - DNA, 15 bp, Homo sapiens
tcagcctctggtatc

SEQ ID NO: 630952 - DNA, 15 bp, Homo sapiens
cagcctctggtatct

SEQ ID NO: 630953 - DNA, 15 bp, Homo sapiens
agcctctggtatctt

SEQ ID NO: 630954 - DNA, 15 bp, Homo sapiens
gcctctggtatctta

SEQ ID NO: 630955 - DNA, 15 bp, Homo sapiens
cctctggtatcttag

SEQ ID NO: 630956 - DNA, 15 bp, Homo sapiens
ctctggtatcttagc

SEQ ID NO: 630957 - DNA, 15 bp, Homo sapiens
tctggtatcttagct

SEQ ID NO: 630958 - DNA, 15 bp, Homo sapiens
ctggtatcttagctc

SEQ ID NO: 630959 - DNA, 15 bp, Homo sapiens
tggtatcttagctcc

SEQ ID NO: 630960 - DNA, 15 bp, Homo sapiens
ggtatcttagctcca

SEQ ID NO: 630961 - DNA, 15 bp, Homo sapiens
gtatcttagctccac

SEQ ID NO: 630962 - DNA, 15 bp, Homo sapiens
tatcttagctccacc

SEQ ID NO: 630963 - DNA, 15 bp, Homo sapiens
atcttagctccaccc

SEQ ID NO: 630964 - DNA, 15 bp, Homo sapiens
tcttagctccaccct

SEQ ID NO: 630965 - DNA, 15 bp, Homo sapiens
cttagctccaccctc

SEQ ID NO: 630966 - DNA, 15 bp, Homo sapiens
ttagctccaccctca

SEQ ID NO: 630967 - DNA, 15 bp, Homo sapiens
tagctccaccctcac

SEQ ID NO: 630968 - DNA, 15 bp, Homo sapiens
agctccaccctcact

SEQ ID NO: 630969 - DNA, 15 bp, Homo sapiens
gctccaccctcactg

SEQ ID NO: 630970 - DNA, 15 bp, Homo sapiens
ctccaccctcactgg

SEQ ID NO: 630971 - DNA, 15 bp, Homo sapiens
tccaccctcactggt

SEQ ID NO: 630972 - DNA, 15 bp, Homo sapiens
ccaccctcactggtt

SEQ ID NO: 630973 - DNA, 15 bp, Homo sapiens
caccctcactggttt

SEQ ID NO: 630974 - DNA, 15 bp, Homo sapiens
accctcactggtttt

SEQ ID NO: 630975 - DNA, 15 bp, Homo sapiens
ccctcactggttttt

SEQ ID NO: 630976 - DNA, 15 bp, Homo sapiens
cctcactggtttttt

SEQ ID NO: 630977 - DNA, 15 bp, Homo sapiens
ctcactggttttttc

SEQ ID NO: 630978 - DNA, 15 bp, Homo sapiens
tcactggttttttct

SEQ ID NO: 630979 - DNA, 15 bp, Homo sapiens
cactggttttttctt

SEQ ID NO: 630980 - DNA, 15 bp, Homo sapiens
actggttttttcttg

SEQ ID NO: 630981 - DNA, 15 bp, Homo sapiens
ctggttttttcttgt

SEQ ID NO: 630982 - DNA, 15 bp, Homo sapiens
tggttttttcttgtt

SEQ ID NO: 630983 - DNA, 15 bp, Homo sapiens
ggttttttcttgttt

SEQ ID NO: 630984 - DNA, 15 bp, Homo sapiens
gttttttcttgtttg

SEQ ID NO: 630985 - DNA, 15 bp, Homo sapiens
ttttttcttgtttgt

SEQ ID NO: 630986 - DNA, 15 bp, Homo sapiens
tttttcttgtttgtt

SEQ ID NO: 630987 - DNA, 15 bp, Homo sapiens
ttttcttgtttgttg

SEQ ID NO: 630988 - DNA, 15 bp, Homo sapiens
tttcttgtttgttga

SEQ ID NO: 630989 - DNA, 15 bp, Homo sapiens
ttcttgtttgttgaa

SEQ ID NO: 630990 - DNA, 15 bp, Homo sapiens
tcttgtttgttgaac

SEQ ID NO: 630991 - DNA, 15 bp, Homo sapiens
cttgtttgttgaacc

SEQ ID NO: 630992 - DNA, 15 bp, Homo sapiens
ttgtttgttgaaccg

SEQ ID NO: 630993 - DNA, 15 bp, Homo sapiens
tgtttgttgaaccgg

SEQ ID NO: 630994 - DNA, 15 bp, Homo sapiens
gtttgttgaaccggc

SEQ ID NO: 630995 - DNA, 15 bp, Homo sapiens
tttgttgaaccggcc

SEQ ID NO: 630996 - DNA, 15 bp, Homo sapiens
ttgttgaaccggcca

SEQ ID NO: 630997 - DNA, 15 bp, Homo sapiens
tgttgaaccggccaa

SEQ ID NO: 630998 - DNA, 15 bp, Homo sapiens
gttgaaccggccaag

SEQ ID NO: 630999 - DNA, 15 bp, Homo sapiens
ttgaaccggccaagc

SEQ ID NO: 631000 - DNA, 15 bp, Homo sapiens
tgaaccggccaagct

SEQ ID NO: 631001 - DNA, 15 bp, Homo sapiens
gaaccggccaagctg

SEQ ID NO: 631002 - DNA, 15 bp, Homo sapiens
aaccggccaagctgc

SEQ ID NO: 631003 - DNA, 15 bp, Homo sapiens
accggccaagctgct

SEQ ID NO: 631004 - DNA, 15 bp, Homo sapiens
ccggccaagctgctg

SEQ ID NO: 631005 - DNA, 15 bp, Homo sapiens
cggccaagctgctgg

SEQ ID NO: 631006 - DNA, 15 bp, Homo sapiens
ggccaagctgctggc

SEQ ID NO: 631007 - DNA, 15 bp, Homo sapiens
gccaagctgctggcc

SEQ ID NO: 631008 - DNA, 15 bp, Homo sapiens
ccaagctgctggcct

SEQ ID NO: 631009 - DNA, 15 bp, Homo sapiens
caagctgctggcctc

SEQ ID NO: 631010 - DNA, 15 bp, Homo sapiens
aagctgctggcctcc

SEQ ID NO: 631011 - DNA, 15 bp, Homo sapiens
agctgctggcctccc

SEQ ID NO: 631012 - DNA, 15 bp, Homo sapiens
gctgctggcctccct

SEQ ID NO: 631013 - DNA, 15 bp, Homo sapiens
ctgctggcctccctc

SEQ ID NO: 631014 - DNA, 15 bp, Homo sapiens
tgctggcctccctcc

SEQ ID NO: 631015 - DNA, 15 bp, Homo sapiens
gctggcctccctcct

SEQ ID NO: 631016 - DNA, 15 bp, Homo sapiens
ctggcctccctcctc

SEQ ID NO: 631017 - DNA, 15 bp, Homo sapiens
tggcctccctcctca

SEQ ID NO: 631018 - DNA, 15 bp, Homo sapiens
ggcctccctcctcaa

SEQ ID NO: 631019 - DNA, 15 bp, Homo sapiens
gcctccctcctcaac

SEQ ID NO: 631020 - DNA, 15 bp, Homo sapiens
cctccctcctcaacc

SEQ ID NO: 631021 - DNA, 15 bp, Homo sapiens
ctccctcctcaaccg

SEQ ID NO: 631022 - DNA, 15 bp, Homo sapiens
tccctcctcaaccgt

SEQ ID NO: 631023 - DNA, 15 bp, Homo sapiens
ccctcctcaaccgtt

SEQ ID NO: 631024 - DNA, 15 bp, Homo sapiens
cctcctcaaccgttc

SEQ ID NO: 631025 - DNA, 15 bp, Homo sapiens
ctcctcaaccgttct

SEQ ID NO: 631026 - DNA, 15 bp, Homo sapiens
tcctcaaccgttctg

SEQ ID NO: 631027 - DNA, 15 bp, Homo sapiens
cctcaaccgttctga

SEQ ID NO: 631028 - DNA, 15 bp, Homo sapiens
ctcaaccgttctgat

SEQ ID NO: 631029 - DNA, 15 bp, Homo sapiens
tcaaccgttctgatc

SEQ ID NO: 631030 - DNA, 15 bp, Homo sapiens
caaccgttctgatca

SEQ ID NO: 631031 - DNA, 15 bp, Homo sapiens
aaccgttctgatcat

SEQ ID NO: 631032 - DNA, 15 bp, Homo sapiens
accgttctgatcatg

SEQ ID NO: 631033 - DNA, 15 bp, Homo sapiens
ccgttctgatcatgc

SEQ ID NO: 631034 - DNA, 15 bp, Homo sapiens
cgttctgatcatgct

SEQ ID NO: 631035 - DNA, 15 bp, Homo sapiens
gttctgatcatgctt

SEQ ID NO: 631036 - DNA, 15 bp, Homo sapiens
ttctgatcatgcttg

SEQ ID NO: 631037 - DNA, 15 bp, Homo sapiens
tctgatcatgcttgc

SEQ ID NO: 631038 - DNA, 15 bp, Homo sapiens
ctgatcatgcttgct

SEQ ID NO: 631039 - DNA, 15 bp, Homo sapiens
tgatcatgcttgcta

SEQ ID NO: 631040 - DNA, 15 bp, Homo sapiens
gatcatgcttgctaa

SEQ ID NO: 631041 - DNA, 15 bp, Homo sapiens
atcatgcttgctaaa

SEQ ID NO: 631042 - DNA, 15 bp, Homo sapiens
tcatgcttgctaaaa

SEQ ID NO: 631043 - DNA, 15 bp, Homo sapiens
catgcttgctaaaat

SEQ ID NO: 631044 - DNA, 15 bp, Homo sapiens
atgcttgctaaaata

SEQ ID NO: 631045 - DNA, 15 bp, Homo sapiens
tgcttgctaaaatag

SEQ ID NO: 631046 - DNA, 15 bp, Homo sapiens
gcttgctaaaatagt

SEQ ID NO: 631047 - DNA, 15 bp, Homo sapiens
cttgctaaaatagtc

SEQ ID NO: 631048 - DNA, 15 bp, Homo sapiens
ttgctaaaatagtca

SEQ ID NO: 631049 - DNA, 15 bp, Homo sapiens
tgctaaaatagtcaa

SEQ ID NO: 631050 - DNA, 15 bp, Homo sapiens
gctaaaatagtcaaa

SEQ ID NO: 631051 - DNA, 15 bp, Homo sapiens
ctaaaatagtcaaaa

SEQ ID NO: 631052 - DNA, 15 bp, Homo sapiens
taaaatagtcaaaac

SEQ ID NO: 631053 - DNA, 15 bp, Homo sapiens
aaaatagtcaaaacc

SEQ ID NO: 631054 - DNA, 15 bp, Homo sapiens
aaatagtcaaaaccc

SEQ ID NO: 631055 - DNA, 15 bp, Homo sapiens
aatagtcaaaacccc

SEQ ID NO: 631056 - DNA, 15 bp, Homo sapiens
atagtcaaaaccccg

SEQ ID NO: 631057 - DNA, 15 bp, Homo sapiens
tagtcaaaaccccgg

SEQ ID NO: 631058 - DNA, 15 bp, Homo sapiens
agtcaaaaccccggc

SEQ ID NO: 631059 - DNA, 15 bp, Homo sapiens
gtcaaaaccccggcc

SEQ ID NO: 631060 - DNA, 15 bp, Homo sapiens
tcaaaaccccggcca

SEQ ID NO: 631061 - DNA, 15 bp, Homo sapiens
caaaaccccggccag

SEQ ID NO: 631062 - DNA, 15 bp, Homo sapiens
aaaaccccggccagt

SEQ ID NO: 631063 - DNA, 15 bp, Homo sapiens
aaaccccggccagtt

SEQ ID NO: 631064 - DNA, 15 bp, Homo sapiens
aaccccggccagtta

SEQ ID NO: 631065 - DNA, 15 bp, Homo sapiens
accccggccagttaa

SEQ ID NO: 631066 - DNA, 15 bp, Homo sapiens
ccccggccagttaaa

SEQ ID NO: 631067 - DNA, 15 bp, Homo sapiens
cccggccagttaaat

SEQ ID NO: 631068 - DNA, 15 bp, Homo sapiens
ccggccagttaaata

SEQ ID NO: 631069 - DNA, 15 bp, Homo sapiens
cggccagttaaatat

SEQ ID NO: 631070 - DNA, 15 bp, Homo sapiens
ggccagttaaatatg

SEQ ID NO: 631071 - DNA, 15 bp, Homo sapiens
gccagttaaatatgc

SEQ ID NO: 631072 - DNA, 15 bp, Homo sapiens
ccagttaaatatgct

SEQ ID NO: 631073 - DNA, 15 bp, Homo sapiens
cagttaaatatgctt

SEQ ID NO: 631074 - DNA, 15 bp, Homo sapiens
agttaaatatgcttt

SEQ ID NO: 631075 - DNA, 15 bp, Homo sapiens
gttaaatatgcttta

SEQ ID NO: 631076 - DNA, 15 bp, Homo sapiens
ttaaatatgctttag

SEQ ID NO: 631077 - DNA, 15 bp, Homo sapiens
taaatatgctttagc

SEQ ID NO: 631078 - DNA, 15 bp, Homo sapiens
aaatatgctttagcc

SEQ ID NO: 631079 - DNA, 15 bp, Homo sapiens
aatatgctttagcct

SEQ ID NO: 631080 - DNA, 15 bp, Homo sapiens
atatgctttagcctg

SEQ ID NO: 631081 - DNA, 15 bp, Homo sapiens
tatgctttagcctgc

SEQ ID NO: 631082 - DNA, 15 bp, Homo sapiens
atgctttagcctgct

SEQ ID NO: 631083 - DNA, 15 bp, Homo sapiens
tgctttagcctgctt

SEQ ID NO: 631084 - DNA, 15 bp, Homo sapiens
gctttagcctgcttt

SEQ ID NO: 631085 - DNA, 15 bp, Homo sapiens
ctttagcctgcttta

SEQ ID NO: 631086 - DNA, 15 bp, Homo sapiens
tttagcctgctttat

SEQ ID NO: 631087 - DNA, 15 bp, Homo sapiens
ttagcctgctttatt

SEQ ID NO: 631088 - DNA, 15 bp, Homo sapiens
tagcctgctttatta

SEQ ID NO: 631089 - DNA, 15 bp, Homo sapiens
agcctgctttattat

SEQ ID NO: 631090 - DNA, 15 bp, Homo sapiens
gcctgctttattatg

SEQ ID NO: 631091 - DNA, 15 bp, Homo sapiens
cctgctttattatga

SEQ ID NO: 631092 - DNA, 15 bp, Homo sapiens
ctgctttattatgat

SEQ ID NO: 631093 - DNA, 15 bp, Homo sapiens
tgctttattatgatt

SEQ ID NO: 631094 - DNA, 15 bp, Homo sapiens
gctttattatgatta

SEQ ID NO: 631095 - DNA, 15 bp, Homo sapiens
ctttattatgattat

SEQ ID NO: 631096 - DNA, 15 bp, Homo sapiens
tttattatgattatt

SEQ ID NO: 631097 - DNA, 15 bp, Homo sapiens
ttattatgattattt

SEQ ID NO: 631098 - DNA, 15 bp, Homo sapiens
tattatgattatttt

SEQ ID NO: 631099 - DNA, 15 bp, Homo sapiens
attatgattattttt

SEQ ID NO: 631100 - DNA, 15 bp, Homo sapiens
ttatgattatttttg

SEQ ID NO: 631101 - DNA, 15 bp, Homo sapiens
tatgattatttttgt

SEQ ID NO: 631102 - DNA, 15 bp, Homo sapiens
atgattatttttgtt

SEQ ID NO: 631103 - DNA, 15 bp, Homo sapiens
tgattatttttgttg

SEQ ID NO: 631104 - DNA, 15 bp, Homo sapiens
gattatttttgttgt

SEQ ID NO: 631105 - DNA, 15 bp, Homo sapiens
attatttttgttgtt

SEQ ID NO: 631106 - DNA, 15 bp, Homo sapiens
ttatttttgttgttt

SEQ ID NO: 631107 - DNA, 15 bp, Homo sapiens
tatttttgttgtttt

SEQ ID NO: 631108 - DNA, 15 bp, Homo sapiens
atttttgttgttttg

SEQ ID NO: 631109 - DNA, 15 bp, Homo sapiens
tttttgttgttttgg

SEQ ID NO: 631110 - DNA, 15 bp, Homo sapiens
ttttgttgttttggc

SEQ ID NO: 631111 - DNA, 15 bp, Homo sapiens
tttgttgttttggca

SEQ ID NO: 631112 - DNA, 15 bp, Homo sapiens
ttgttgttttggcaa

SEQ ID NO: 631113 - DNA, 15 bp, Homo sapiens
tgttgttttggcaat

SEQ ID NO: 631114 - DNA, 15 bp, Homo sapiens
gttgttttggcaatg

SEQ ID NO: 631115 - DNA, 15 bp, Homo sapiens
ttgttttggcaatga

SEQ ID NO: 631116 - DNA, 15 bp, Homo sapiens
tgttttggcaatgac

SEQ ID NO: 631117 - DNA, 15 bp, Homo sapiens
gttttggcaatgacc

SEQ ID NO: 631118 - DNA, 15 bp, Homo sapiens
ttttggcaatgacct

SEQ ID NO: 631119 - DNA, 15 bp, Homo sapiens
tttggcaatgacctg

SEQ ID NO: 631120 - DNA, 15 bp, Homo sapiens
ttggcaatgacctgg

SEQ ID NO: 631121 - DNA, 15 bp, Homo sapiens
tggcaatgacctggt

SEQ ID NO: 631122 - DNA, 15 bp, Homo sapiens
ggcaatgacctggtt

SEQ ID NO: 631123 - DNA, 15 bp, Homo sapiens
gcaatgacctggtta

SEQ ID NO: 631124 - DNA, 15 bp, Homo sapiens
caatgacctggttac

SEQ ID NO: 631125 - DNA, 15 bp, Homo sapiens
aatgacctggttacc

SEQ ID NO: 631126 - DNA, 15 bp, Homo sapiens
atgacctggttacct

SEQ ID NO: 631127 - DNA, 15 bp, Homo sapiens
tgacctggttacctg

SEQ ID NO: 631128 - DNA, 15 bp, Homo sapiens
gacctggttacctgt

SEQ ID NO: 631129 - DNA, 15 bp, Homo sapiens
acctggttacctgtt

SEQ ID NO: 631130 - DNA, 15 bp, Homo sapiens
cctggttacctgttg

SEQ ID NO: 631131 - DNA, 15 bp, Homo sapiens
ctggttacctgttgt

SEQ ID NO: 631132 - DNA, 15 bp, Homo sapiens
tggttacctgttgtt

SEQ ID NO: 631133 - DNA, 15 bp, Homo sapiens
ggttacctgttgttt

SEQ ID NO: 631134 - DNA, 15 bp, Homo sapiens
gttacctgttgtttc

SEQ ID NO: 631135 - DNA, 15 bp, Homo sapiens
ttacctgttgtttct

SEQ ID NO: 631136 - DNA, 15 bp, Homo sapiens
tacctgttgtttctc

SEQ ID NO: 631137 - DNA, 15 bp, Homo sapiens
acctgttgtttctcc

SEQ ID NO: 631138 - DNA, 15 bp, Homo sapiens
cctgttgtttctccc

SEQ ID NO: 631139 - DNA, 15 bp, Homo sapiens
ctgttgtttctccca

SEQ ID NO: 631140 - DNA, 15 bp, Homo sapiens
tgttgtttctcccac

SEQ ID NO: 631141 - DNA, 15 bp, Homo sapiens
gttgtttctcccact

SEQ ID NO: 631142 - DNA, 15 bp, Homo sapiens
ttgtttctcccacta

SEQ ID NO: 631143 - DNA, 15 bp, Homo sapiens
tgtttctcccactaa

SEQ ID NO: 631144 - DNA, 15 bp, Homo sapiens
gtttctcccactaaa

SEQ ID NO: 631145 - DNA, 15 bp, Homo sapiens
tttctcccactaaaa

SEQ ID NO: 631146 - DNA, 15 bp, Homo sapiens
ttctcccactaaaac

SEQ ID NO: 631147 - DNA, 15 bp, Homo sapiens
tctcccactaaaact

SEQ ID NO: 631148 - DNA, 15 bp, Homo sapiens
ctcccactaaaactt

SEQ ID NO: 631149 - DNA, 15 bp, Homo sapiens
tcccactaaaacttt

SEQ ID NO: 631150 - DNA, 15 bp, Homo sapiens
cccactaaaactttt

SEQ ID NO: 631151 - DNA, 15 bp, Homo sapiens
ccactaaaacttttt

SEQ ID NO: 631152 - DNA, 15 bp, Homo sapiens
cactaaaacttttta

SEQ ID NO: 631153 - DNA, 15 bp, Homo sapiens
actaaaactttttaa

SEQ ID NO: 631154 - DNA, 15 bp, Homo sapiens
ctaaaactttttaag

SEQ ID NO: 631155 - DNA, 15 bp, Homo sapiens
taaaactttttaagg

SEQ ID NO: 631156 - DNA, 15 bp, Homo sapiens
aaaactttttaaggg

SEQ ID NO: 631157 - DNA, 15 bp, Homo sapiens
aaactttttaagggc

SEQ ID NO: 631158 - DNA, 15 bp, Homo sapiens
aactttttaagggca

SEQ ID NO: 631159 - DNA, 15 bp, Homo sapiens
actttttaagggcag

SEQ ID NO: 631160 - DNA, 15 bp, Homo sapiens
ctttttaagggcagg

SEQ ID NO: 631161 - DNA, 15 bp, Homo sapiens
tttttaagggcagga

SEQ ID NO: 631162 - DNA, 15 bp, Homo sapiens
ttttaagggcaggaa

SEQ ID NO: 631163 - DNA, 15 bp, Homo sapiens
tttaagggcaggaat

SEQ ID NO: 631164 - DNA, 15 bp, Homo sapiens
ttaagggcaggaatc

SEQ ID NO: 631165 - DNA, 15 bp, Homo sapiens
taagggcaggaatca

SEQ ID NO: 631166 - DNA, 15 bp, Homo sapiens
aagggcaggaatcac

SEQ ID NO: 631167 - DNA, 15 bp, Homo sapiens
agggcaggaatcacc

SEQ ID NO: 631168 - DNA, 15 bp, Homo sapiens
gggcaggaatcaccg

SEQ ID NO: 631169 - DNA, 15 bp, Homo sapiens
ggcaggaatcaccgc

SEQ ID NO: 631170 - DNA, 15 bp, Homo sapiens
gcaggaatcaccgcc

SEQ ID NO: 631171 - DNA, 15 bp, Homo sapiens
caggaatcaccgccg

SEQ ID NO: 631172 - DNA, 15 bp, Homo sapiens
aggaatcaccgccgt

SEQ ID NO: 631173 - DNA, 15 bp, Homo sapiens
ggaatcaccgccgta

SEQ ID NO: 631174 - DNA, 15 bp, Homo sapiens
gaatcaccgccgtaa

SEQ ID NO: 631175 - DNA, 15 bp, Homo sapiens
aatcaccgccgtaac

SEQ ID NO: 631176 - DNA, 15 bp, Homo sapiens
atcaccgccgtaact

SEQ ID NO: 631177 - DNA, 15 bp, Homo sapiens
tcaccgccgtaactc

SEQ ID NO: 631178 - DNA, 15 bp, Homo sapiens
caccgccgtaactct

SEQ ID NO: 631179 - DNA, 15 bp, Homo sapiens
accgccgtaactcta

SEQ ID NO: 631180 - DNA, 15 bp, Homo sapiens
ccgccgtaactctag

SEQ ID NO: 631181 - DNA, 15 bp, Homo sapiens
cgccgtaactctagc

SEQ ID NO: 631182 - DNA, 15 bp, Homo sapiens
gccgtaactctagca

SEQ ID NO: 631183 - DNA, 15 bp, Homo sapiens
ccgtaactctagcac

SEQ ID NO: 631184 - DNA, 15 bp, Homo sapiens
cgtaactctagcact

SEQ ID NO: 631185 - DNA, 15 bp, Homo sapiens
gtaactctagcactt

SEQ ID NO: 631186 - DNA, 15 bp, Homo sapiens
taactctagcactta

SEQ ID NO: 631187 - DNA, 15 bp, Homo sapiens
aactctagcacttag

SEQ ID NO: 631188 - DNA, 15 bp, Homo sapiens
actctagcacttagc

SEQ ID NO: 631189 - DNA, 15 bp, Homo sapiens
ctctagcacttagca

SEQ ID NO: 631190 - DNA, 15 bp, Homo sapiens
tctagcacttagcac

SEQ ID NO: 631191 - DNA, 15 bp, Homo sapiens
ctagcacttagcaca

SEQ ID NO: 631192 - DNA, 15 bp, Homo sapiens
tagcacttagcacag

SEQ ID NO: 631193 - DNA, 15 bp, Homo sapiens
agcacttagcacagt

SEQ ID NO: 631194 - DNA, 15 bp, Homo sapiens
gcacttagcacagta

SEQ ID NO: 631195 - DNA, 15 bp, Homo sapiens
cacttagcacagtac

SEQ ID NO: 631196 - DNA, 15 bp, Homo sapiens
acttagcacagtact

SEQ ID NO: 631197 - DNA, 15 bp, Homo sapiens
cttagcacagtactt

SEQ ID NO: 631198 - DNA, 15 bp, Homo sapiens
ttagcacagtacttg

SEQ ID NO: 631199 - DNA, 15 bp, Homo sapiens
tagcacagtacttgg

SEQ ID NO: 631200 - DNA, 15 bp, Homo sapiens
agcacagtacttggc

SEQ ID NO: 631201 - DNA, 15 bp, Homo sapiens
gcacagtacttggct

SEQ ID NO: 631202 - DNA, 15 bp, Homo sapiens
cacagtacttggctt

SEQ ID NO: 631203 - DNA, 15 bp, Homo sapiens
acagtacttggcttg

SEQ ID NO: 631204 - DNA, 15 bp, Homo sapiens
cagtacttggcttgt

SEQ ID NO: 631205 - DNA, 15 bp, Homo sapiens
agtacttggcttgta

SEQ ID NO: 631206 - DNA, 15 bp, Homo sapiens
gtacttggcttgtaa

SEQ ID NO: 631207 - DNA, 15 bp, Homo sapiens
tacttggcttgtaag

SEQ ID NO: 631208 - DNA, 15 bp, Homo sapiens
acttggcttgtaaga

SEQ ID NO: 631209 - DNA, 15 bp, Homo sapiens
cttggcttgtaagag

SEQ ID NO: 631210 - DNA, 15 bp, Homo sapiens
ttggcttgtaagagg

SEQ ID NO: 631211 - DNA, 15 bp, Homo sapiens
tggcttgtaagaggt

SEQ ID NO: 631212 - DNA, 15 bp, Homo sapiens
ggcttgtaagaggtc

SEQ ID NO: 631213 - DNA, 15 bp, Homo sapiens
gcttgtaagaggtcc

SEQ ID NO: 631214 - DNA, 15 bp, Homo sapiens
cttgtaagaggtcct

SEQ ID NO: 631215 - DNA, 15 bp, Homo sapiens
ttgtaagaggtcctc

SEQ ID NO: 631216 - DNA, 15 bp, Homo sapiens
tgtaagaggtcctcg

SEQ ID NO: 631217 - DNA, 15 bp, Homo sapiens
gtaagaggtcctcga

SEQ ID NO: 631218 - DNA, 15 bp, Homo sapiens
taagaggtcctcgat

SEQ ID NO: 631219 - DNA, 15 bp, Homo sapiens
aagaggtcctcgatg

SEQ ID NO: 631220 - DNA, 15 bp, Homo sapiens
agaggtcctcgatga

SEQ ID NO: 631221 - DNA, 15 bp, Homo sapiens
gaggtcctcgatgat

SEQ ID NO: 631222 - DNA, 15 bp, Homo sapiens
aggtcctcgatgatg

SEQ ID NO: 631223 - DNA, 15 bp, Homo sapiens
ggtcctcgatgatgg

SEQ ID NO: 631224 - DNA, 15 bp, Homo sapiens
gtcctcgatgatggt

SEQ ID NO: 631225 - DNA, 15 bp, Homo sapiens
tcctcgatgatggtt

SEQ ID NO: 631226 - DNA, 15 bp, Homo sapiens
cctcgatgatggttt

SEQ ID NO: 631227 - DNA, 15 bp, Homo sapiens
ctcgatgatggtttg

SEQ ID NO: 631228 - DNA, 15 bp, Homo sapiens
tcgatgatggtttgt

SEQ ID NO: 631229 - DNA, 15 bp, Homo sapiens
cgatgatggtttgtt

SEQ ID NO: 631230 - DNA, 15 bp, Homo sapiens
gatgatggtttgttg

SEQ ID NO: 631231 - DNA, 15 bp, Homo sapiens
atgatggtttgttga

SEQ ID NO: 631232 - DNA, 15 bp, Homo sapiens
tgatggtttgttgaa

SEQ ID NO: 631233 - DNA, 15 bp, Homo sapiens
gatggtttgttgaat

SEQ ID NO: 631234 - DNA, 15 bp, Homo sapiens
atggtttgttgaatg

SEQ ID NO: 631235 - DNA, 15 bp, Homo sapiens
tggtttgttgaatga

SEQ ID NO: 631236 - DNA, 15 bp, Homo sapiens
ggtttgttgaatgaa

SEQ ID NO: 631237 - DNA, 15 bp, Homo sapiens
gtttgttgaatgaat

SEQ ID NO: 631238 - DNA, 15 bp, Homo sapiens
tttgttgaatgaata

SEQ ID NO: 631239 - DNA, 15 bp, Homo sapiens
ttgttgaatgaatac

SEQ ID NO: 631240 - DNA, 15 bp, Homo sapiens
tgttgaatgaataca

SEQ ID NO: 631241 - DNA, 15 bp, Homo sapiens
gttgaatgaatacat

SEQ ID NO: 631242 - DNA, 15 bp, Homo sapiens
ttgaatgaatacatt

SEQ ID NO: 631243 - DNA, 15 bp, Homo sapiens
tgaatgaatacatta

SEQ ID NO: 631244 - DNA, 15 bp, Homo sapiens
gaatgaatacattaa

SEQ ID NO: 631245 - DNA, 15 bp, Homo sapiens
aatgaatacattaaa

SEQ ID NO: 631246 - DNA, 15 bp, Homo sapiens
atgaatacattaaat

SEQ ID NO: 631247 - DNA, 15 bp, Homo sapiens
tgaatacattaaata

SEQ ID NO: 631248 - DNA, 15 bp, Homo sapiens
gaatacattaaataa

SEQ ID NO: 631249 - DNA, 15 bp, Homo sapiens
aatacattaaataat

SEQ ID NO: 631250 - DNA, 15 bp, Homo sapiens
atacattaaataatt

SEQ ID NO: 631251 - DNA, 15 bp, Homo sapiens
tacattaaataatta

SEQ ID NO: 631252 - DNA, 15 bp, Homo sapiens
acattaaataattaa

SEQ ID NO: 631253 - DNA, 15 bp, Homo sapiens
cattaaataattaac

SEQ ID NO: 631254 - DNA, 15 bp, Homo sapiens
attaaataattaacc

SEQ ID NO: 631255 - DNA, 15 bp, Homo sapiens
ttaaataattaacca

SEQ ID NO: 631256 - DNA, 15 bp, Homo sapiens
taaataattaaccac

SEQ ID NO: 631257 - DNA, 15 bp, Homo sapiens
aaataattaaccact

SEQ ID NO: 631258 - DNA, 15 bp, Homo sapiens
aataattaaccactt

SEQ ID NO: 631259 - DNA, 15 bp, Homo sapiens
ataattaaccacttg

SEQ ID NO: 631260 - DNA, 15 bp, Homo sapiens
taattaaccacttga

SEQ ID NO: 631261 - DNA, 15 bp, Homo sapiens
aattaaccacttgaa

SEQ ID NO: 631262 - DNA, 15 bp, Homo sapiens
attaaccacttgaac

SEQ ID NO: 631263 - DNA, 15 bp, Homo sapiens
ttaaccacttgaacc

SEQ ID NO: 631264 - DNA, 15 bp, Homo sapiens
taaccacttgaaccc

SEQ ID NO: 631265 - DNA, 15 bp, Homo sapiens
aaccacttgaaccct

SEQ ID NO: 631266 - DNA, 15 bp, Homo sapiens
accacttgaacccta

SEQ ID NO: 631267 - DNA, 15 bp, Homo sapiens
ccacttgaaccctaa

SEQ ID NO: 631268 - DNA, 15 bp, Homo sapiens
cacttgaaccctaag

SEQ ID NO: 631269 - DNA, 15 bp, Homo sapiens
acttgaaccctaaga

SEQ ID NO: 631270 - DNA, 15 bp, Homo sapiens
cttgaaccctaagaa

SEQ ID NO: 631271 - DNA, 15 bp, Homo sapiens
ttgaaccctaagaaa

SEQ ID NO: 631272 - DNA, 15 bp, Homo sapiens
tgaaccctaagaaag

SEQ ID NO: 631273 - DNA, 15 bp, Homo sapiens
gaaccctaagaaaga

SEQ ID NO: 631274 - DNA, 15 bp, Homo sapiens
aaccctaagaaagaa

SEQ ID NO: 631275 - DNA, 15 bp, Homo sapiens
accctaagaaagaag

SEQ ID NO: 631276 - DNA, 15 bp, Homo sapiens
ccctaagaaagaagc

SEQ ID NO: 631277 - DNA, 15 bp, Homo sapiens
cctaagaaagaagcg

SEQ ID NO: 631278 - DNA, 15 bp, Homo sapiens
ctaagaaagaagcga

SEQ ID NO: 631279 - DNA, 15 bp, Homo sapiens
taagaaagaagcgat

SEQ ID NO: 631280 - DNA, 15 bp, Homo sapiens
aagaaagaagcgatt

SEQ ID NO: 631281 - DNA, 15 bp, Homo sapiens
agaaagaagcgattc

SEQ ID NO: 631282 - DNA, 15 bp, Homo sapiens
gaaagaagcgattct

SEQ ID NO: 631283 - DNA, 15 bp, Homo sapiens
aaagaagcgattcta

SEQ ID NO: 631284 - DNA, 15 bp, Homo sapiens
aagaagcgattctat

SEQ ID NO: 631285 - DNA, 15 bp, Homo sapiens
agaagcgattctatt

SEQ ID NO: 631286 - DNA, 15 bp, Homo sapiens
gaagcgattctattt

SEQ ID NO: 631287 - DNA, 15 bp, Homo sapiens
aagcgattctatttc

SEQ ID NO: 631288 - DNA, 15 bp, Homo sapiens
agcgattctatttca

SEQ ID NO: 631289 - DNA, 15 bp, Homo sapiens
gcgattctatttcat

SEQ ID NO: 631290 - DNA, 15 bp, Homo sapiens
cgattctatttcata

SEQ ID NO: 631291 - DNA, 15 bp, Homo sapiens
gattctatttcatat

SEQ ID NO: 631292 - DNA, 15 bp, Homo sapiens
attctatttcatatt

SEQ ID NO: 631293 - DNA, 15 bp, Homo sapiens
ttctatttcatatta

SEQ ID NO: 631294 - DNA, 15 bp, Homo sapiens
tctatttcatattag

SEQ ID NO: 631295 - DNA, 15 bp, Homo sapiens
ctatttcatattagg

SEQ ID NO: 631296 - DNA, 15 bp, Homo sapiens
tatttcatattaggc

SEQ ID NO: 631297 - DNA, 15 bp, Homo sapiens
atttcatattaggca

SEQ ID NO: 631298 - DNA, 15 bp, Homo sapiens
tttcatattaggcat

SEQ ID NO: 631299 - DNA, 15 bp, Homo sapiens
ttcatattaggcatt

SEQ ID NO: 631300 - DNA, 15 bp, Homo sapiens
tcatattaggcattg

SEQ ID NO: 631301 - DNA, 15 bp, Homo sapiens
catattaggcattgt

SEQ ID NO: 631302 - DNA, 15 bp, Homo sapiens
atattaggcattgta

SEQ ID NO: 631303 - DNA, 15 bp, Homo sapiens
tattaggcattgtaa

SEQ ID NO: 631304 - DNA, 15 bp, Homo sapiens
attaggcattgtaat

SEQ ID NO: 631305 - DNA, 15 bp, Homo sapiens
ttaggcattgtaatg

SEQ ID NO: 631306 - DNA, 15 bp, Homo sapiens
taggcattgtaatga

SEQ ID NO: 631307 - DNA, 15 bp, Homo sapiens
aggcattgtaatgac

SEQ ID NO: 631308 - DNA, 15 bp, Homo sapiens
ggcattgtaatgact

SEQ ID NO: 631309 - DNA, 15 bp, Homo sapiens
gcattgtaatgactt

SEQ ID NO: 631310 - DNA, 15 bp, Homo sapiens
cattgtaatgactta

SEQ ID NO: 631311 - DNA, 15 bp, Homo sapiens
attgtaatgacttaa

SEQ ID NO: 631312 - DNA, 15 bp, Homo sapiens
ttgtaatgacttaag

SEQ ID NO: 631313 - DNA, 15 bp, Homo sapiens
tgtaatgacttaagg

SEQ ID NO: 631314 - DNA, 15 bp, Homo sapiens
gtaatgacttaaggt

SEQ ID NO: 631315 - DNA, 15 bp, Homo sapiens
taatgacttaaggta

SEQ ID NO: 631316 - DNA, 15 bp, Homo sapiens
aatgacttaaggtaa

SEQ ID NO: 631317 - DNA, 15 bp, Homo sapiens
atgacttaaggtaaa

SEQ ID NO: 631318 - DNA, 15 bp, Homo sapiens
tgacttaaggtaaag

SEQ ID NO: 631319 - DNA, 15 bp, Homo sapiens
gacttaaggtaaaga

SEQ ID NO: 631320 - DNA, 15 bp, Homo sapiens
acttaaggtaaagag

SEQ ID NO: 631321 - DNA, 15 bp, Homo sapiens
cttaaggtaaagagc

SEQ ID NO: 631322 - DNA, 15 bp, Homo sapiens
ttaaggtaaagagca

SEQ ID NO: 631323 - DNA, 15 bp, Homo sapiens
taaggtaaagagcag

SEQ ID NO: 631324 - DNA, 15 bp, Homo sapiens
aaggtaaagagcagt

SEQ ID NO: 631325 - DNA, 15 bp, Homo sapiens
aggtaaagagcagtg

SEQ ID NO: 631326 - DNA, 15 bp, Homo sapiens
ggtaaagagcagtgc

SEQ ID NO: 631327 - DNA, 15 bp, Homo sapiens
gtaaagagcagtgct

SEQ ID NO: 631328 - DNA, 15 bp, Homo sapiens
taaagagcagtgcta

SEQ ID NO: 631329 - DNA, 15 bp, Homo sapiens
aaagagcagtgctat

SEQ ID NO: 631330 - DNA, 15 bp, Homo sapiens
aagagcagtgctatt

SEQ ID NO: 631331 - DNA, 15 bp, Homo sapiens
agagcagtgctatta

SEQ ID NO: 631332 - DNA, 15 bp, Homo sapiens
gagcagtgctattaa

SEQ ID NO: 631333 - DNA, 15 bp, Homo sapiens
agcagtgctattaac

SEQ ID NO: 631334 - DNA, 15 bp, Homo sapiens
gcagtgctattaacg

SEQ ID NO: 631335 - DNA, 15 bp, Homo sapiens
cagtgctattaacgg

SEQ ID NO: 631336 - DNA, 15 bp, Homo sapiens
agtgctattaacgga

SEQ ID NO: 631337 - DNA, 15 bp, Homo sapiens
gtgctattaacggag

SEQ ID NO: 631338 - DNA, 15 bp, Homo sapiens
tgctattaacggagt

SEQ ID NO: 631339 - DNA, 15 bp, Homo sapiens
gctattaacggagtc

SEQ ID NO: 631340 - DNA, 15 bp, Homo sapiens
ctattaacggagtct

SEQ ID NO: 631341 - DNA, 15 bp, Homo sapiens
tattaacggagtcta

SEQ ID NO: 631342 - DNA, 15 bp, Homo sapiens
attaacggagtctaa

SEQ ID NO: 631343 - DNA, 15 bp, Homo sapiens
ttaacggagtctaac

SEQ ID NO: 631344 - DNA, 15 bp, Homo sapiens
taacggagtctaact

SEQ ID NO: 631345 - DNA, 15 bp, Homo sapiens
aacggagtctaactg

SEQ ID NO: 631346 - DNA, 15 bp, Homo sapiens
acggagtctaactgg

SEQ ID NO: 631347 - DNA, 15 bp, Homo sapiens
cggagtctaactggg

SEQ ID NO: 631348 - DNA, 15 bp, Homo sapiens
ggagtctaactggga

SEQ ID NO: 631349 - DNA, 15 bp, Homo sapiens
gagtctaactgggaa

SEQ ID NO: 631350 - DNA, 15 bp, Homo sapiens
agtctaactgggaat

SEQ ID NO: 631351 - DNA, 15 bp, Homo sapiens
gtctaactgggaatc

SEQ ID NO: 631352 - DNA, 15 bp, Homo sapiens
tctaactgggaatcc

SEQ ID NO: 631353 - DNA, 15 bp, Homo sapiens
ctaactgggaatcca

SEQ ID NO: 631354 - DNA, 15 bp, Homo sapiens
taactgggaatccag

SEQ ID NO: 631355 - DNA, 15 bp, Homo sapiens
aactgggaatccagc

SEQ ID NO: 631356 - DNA, 15 bp, Homo sapiens
actgggaatccagct

SEQ ID NO: 631357 - DNA, 15 bp, Homo sapiens
ctgggaatccagctt

SEQ ID NO: 631358 - DNA, 15 bp, Homo sapiens
tgggaatccagcttg

SEQ ID NO: 631359 - DNA, 15 bp, Homo sapiens
gggaatccagcttgt

SEQ ID NO: 631360 - DNA, 15 bp, Homo sapiens
ggaatccagcttgtt

SEQ ID NO: 631361 - DNA, 15 bp, Homo sapiens
gaatccagcttgttt

SEQ ID NO: 631362 - DNA, 15 bp, Homo sapiens
aatccagcttgtttg

SEQ ID NO: 631363 - DNA, 15 bp, Homo sapiens
atccagcttgtttgg

SEQ ID NO: 631364 - DNA, 15 bp, Homo sapiens
tccagcttgtttggg

SEQ ID NO: 631365 - DNA, 15 bp, Homo sapiens
ccagcttgtttgggc

SEQ ID NO: 631366 - DNA, 15 bp, Homo sapiens
cagcttgtttgggct

SEQ ID NO: 631367 - DNA, 15 bp, Homo sapiens
agcttgtttgggcta

SEQ ID NO: 631368 - DNA, 15 bp, Homo sapiens
gcttgtttgggctat

SEQ ID NO: 631369 - DNA, 15 bp, Homo sapiens
cttgtttgggctatt

SEQ ID NO: 631370 - DNA, 15 bp, Homo sapiens
ttgtttgggctattt

SEQ ID NO: 631371 - DNA, 15 bp, Homo sapiens
tgtttgggctattta

SEQ ID NO: 631372 - DNA, 15 bp, Homo sapiens
gtttgggctatttac

SEQ ID NO: 631373 - DNA, 15 bp, Homo sapiens
tttgggctatttact

SEQ ID NO: 631374 - DNA, 15 bp, Homo sapiens
ttgggctatttacta

SEQ ID NO: 631375 - DNA, 15 bp, Homo sapiens
tgggctatttactag

SEQ ID NO: 631376 - DNA, 15 bp, Homo sapiens
gggctatttactagt

SEQ ID NO: 631377 - DNA, 15 bp, Homo sapiens
ggctatttactagtt

SEQ ID NO: 631378 - DNA, 15 bp, Homo sapiens
gctatttactagttg

SEQ ID NO: 631379 - DNA, 15 bp, Homo sapiens
ctatttactagttgt

SEQ ID NO: 631380 - DNA, 15 bp, Homo sapiens
tatttactagttgtg

SEQ ID NO: 631381 - DNA, 15 bp, Homo sapiens
atttactagttgtgt

SEQ ID NO: 631382 - DNA, 15 bp, Homo sapiens
tttactagttgtgtg

SEQ ID NO: 631383 - DNA, 15 bp, Homo sapiens
ttactagttgtgtgg

SEQ ID NO: 631384 - DNA, 15 bp, Homo sapiens
tactagttgtgtggc

SEQ ID NO: 631385 - DNA, 15 bp, Homo sapiens
actagttgtgtggct

SEQ ID NO: 631386 - DNA, 15 bp, Homo sapiens
ctagttgtgtggctg

SEQ ID NO: 631387 - DNA, 15 bp, Homo sapiens
tagttgtgtggctgt

SEQ ID NO: 631388 - DNA, 15 bp, Homo sapiens
agttgtgtggctgtg

SEQ ID NO: 631389 - DNA, 15 bp, Homo sapiens
gttgtgtggctgtgg

SEQ ID NO: 631390 - DNA, 15 bp, Homo sapiens
ttgtgtggctgtggg

SEQ ID NO: 631391 - DNA, 15 bp, Homo sapiens
tgtgtggctgtgggc

SEQ ID NO: 631392 - DNA, 15 bp, Homo sapiens
gtgtggctgtgggca

SEQ ID NO: 631393 - DNA, 15 bp, Homo sapiens
tgtggctgtgggcaa

SEQ ID NO: 631394 - DNA, 15 bp, Homo sapiens
gtggctgtgggcaac

SEQ ID NO: 631395 - DNA, 15 bp, Homo sapiens
tggctgtgggcaact

SEQ ID NO: 631396 - DNA, 15 bp, Homo sapiens
ggctgtgggcaactt

SEQ ID NO: 631397 - DNA, 15 bp, Homo sapiens
gctgtgggcaactta

SEQ ID NO: 631398 - DNA, 15 bp, Homo sapiens
ctgtgggcaacttac

SEQ ID NO: 631399 - DNA, 15 bp, Homo sapiens
tgtgggcaacttact

SEQ ID NO: 631400 - DNA, 15 bp, Homo sapiens
gtgggcaacttactt

SEQ ID NO: 631401 - DNA, 15 bp, Homo sapiens
tgggcaacttacttc

SEQ ID NO: 631402 - DNA, 15 bp, Homo sapiens
gggcaacttacttca

SEQ ID NO: 631403 - DNA, 15 bp, Homo sapiens
ggcaacttacttcac

SEQ ID NO: 631404 - DNA, 15 bp, Homo sapiens
gcaacttacttcacc

SEQ ID NO: 631405 - DNA, 15 bp, Homo sapiens
caacttacttcacct

SEQ ID NO: 631406 - DNA, 15 bp, Homo sapiens
aacttacttcacctc

SEQ ID NO: 631407 - DNA, 15 bp, Homo sapiens
acttacttcacctct

SEQ ID NO: 631408 - DNA, 15 bp, Homo sapiens
cttacttcacctctc

SEQ ID NO: 631409 - DNA, 15 bp, Homo sapiens
ttacttcacctctct

SEQ ID NO: 631410 - DNA, 15 bp, Homo sapiens
tacttcacctctctg

SEQ ID NO: 631411 - DNA, 15 bp, Homo sapiens
acttcacctctctgg

SEQ ID NO: 631412 - DNA, 15 bp, Homo sapiens
cttcacctctctggg

SEQ ID NO: 631413 - DNA, 15 bp, Homo sapiens
ttcacctctctgggc

SEQ ID NO: 631414 - DNA, 15 bp, Homo sapiens
tcacctctctgggct

SEQ ID NO: 631415 - DNA, 15 bp, Homo sapiens
cacctctctgggctt

SEQ ID NO: 631416 - DNA, 15 bp, Homo sapiens
acctctctgggctta

SEQ ID NO: 631417 - DNA, 15 bp, Homo sapiens
cctctctgggcttaa

SEQ ID NO: 631418 - DNA, 15 bp, Homo sapiens
ctctctgggcttaag

SEQ ID NO: 631419 - DNA, 15 bp, Homo sapiens
tctctgggcttaagt

SEQ ID NO: 631420 - DNA, 15 bp, Homo sapiens
ctctgggcttaagtc

SEQ ID NO: 631421 - DNA, 15 bp, Homo sapiens
tctgggcttaagtca

SEQ ID NO: 631422 - DNA, 15 bp, Homo sapiens
ctgggcttaagtcat

SEQ ID NO: 631423 - DNA, 15 bp, Homo sapiens
tgggcttaagtcatt

SEQ ID NO: 631424 - DNA, 15 bp, Homo sapiens
gggcttaagtcattt

SEQ ID NO: 631425 - DNA, 15 bp, Homo sapiens
ggcttaagtcatttt

SEQ ID NO: 631426 - DNA, 15 bp, Homo sapiens
gcttaagtcatttta

SEQ ID NO: 631427 - DNA, 15 bp, Homo sapiens
cttaagtcattttat

SEQ ID NO: 631428 - DNA, 15 bp, Homo sapiens
ttaagtcattttatg

SEQ ID NO: 631429 - DNA, 15 bp, Homo sapiens
taagtcattttatgt

SEQ ID NO: 631430 - DNA, 15 bp, Homo sapiens
aagtcattttatgta

SEQ ID NO: 631431 - DNA, 15 bp, Homo sapiens
agtcattttatgtat

SEQ ID NO: 631432 - DNA, 15 bp, Homo sapiens
gtcattttatgtata

SEQ ID NO: 631433 - DNA, 15 bp, Homo sapiens
tcattttatgtatat

SEQ ID NO: 631434 - DNA, 15 bp, Homo sapiens
cattttatgtatatc

SEQ ID NO: 631435 - DNA, 15 bp, Homo sapiens
attttatgtatatct

SEQ ID NO: 631436 - DNA, 15 bp, Homo sapiens
ttttatgtatatctg

SEQ ID NO: 631437 - DNA, 15 bp, Homo sapiens
tttatgtatatctga

SEQ ID NO: 631438 - DNA, 15 bp, Homo sapiens
ttatgtatatctgag

SEQ ID NO: 631439 - DNA, 15 bp, Homo sapiens
tatgtatatctgagg

SEQ ID NO: 631440 - DNA, 15 bp, Homo sapiens
atgtatatctgaggt

SEQ ID NO: 631441 - DNA, 15 bp, Homo sapiens
tgtatatctgaggtg

SEQ ID NO: 631442 - DNA, 15 bp, Homo sapiens
gtatatctgaggtgc

SEQ ID NO: 631443 - DNA, 15 bp, Homo sapiens
tatatctgaggtgct

SEQ ID NO: 631444 - DNA, 15 bp, Homo sapiens
atatctgaggtgctg

SEQ ID NO: 631445 - DNA, 15 bp, Homo sapiens
tatctgaggtgctgg

SEQ ID NO: 631446 - DNA, 15 bp, Homo sapiens
atctgaggtgctggc

SEQ ID NO: 631447 - DNA, 15 bp, Homo sapiens
tctgaggtgctggct

SEQ ID NO: 631448 - DNA, 15 bp, Homo sapiens
ctgaggtgctggcta

SEQ ID NO: 631449 - DNA, 15 bp, Homo sapiens
tgaggtgctggctac

SEQ ID NO: 631450 - DNA, 15 bp, Homo sapiens
gaggtgctggctacc

SEQ ID NO: 631451 - DNA, 15 bp, Homo sapiens
aggtgctggctacct

SEQ ID NO: 631452 - DNA, 15 bp, Homo sapiens
ggtgctggctacctc

SEQ ID NO: 631453 - DNA, 15 bp, Homo sapiens
gtgctggctacctct

SEQ ID NO: 631454 - DNA, 15 bp, Homo sapiens
tgctggctacctctt

SEQ ID NO: 631455 - DNA, 15 bp, Homo sapiens
gctggctacctcttg

SEQ ID NO: 631456 - DNA, 15 bp, Homo sapiens
ctggctacctcttgg

SEQ ID NO: 631457 - DNA, 15 bp, Homo sapiens
tggctacctcttgga

SEQ ID NO: 631458 - DNA, 15 bp, Homo sapiens
ggctacctcttggag

SEQ ID NO: 631459 - DNA, 15 bp, Homo sapiens
gctacctcttggagt

SEQ ID NO: 631460 - DNA, 15 bp, Homo sapiens
ctacctcttggagtt

SEQ ID NO: 631461 - DNA, 15 bp, Homo sapiens
tacctcttggagtta

SEQ ID NO: 631462 - DNA, 15 bp, Homo sapiens
acctcttggagttat

SEQ ID NO: 631463 - DNA, 15 bp, Homo sapiens
cctcttggagttatt

SEQ ID NO: 631464 - DNA, 15 bp, Homo sapiens
ctcttggagttattg

SEQ ID NO: 631465 - DNA, 15 bp, Homo sapiens
tcttggagttattga

SEQ ID NO: 631466 - DNA, 15 bp, Homo sapiens
cttggagttattgag

SEQ ID NO: 631467 - DNA, 15 bp, Homo sapiens
ttggagttattgaga

SEQ ID NO: 631468 - DNA, 15 bp, Homo sapiens
tggagttattgagag

SEQ ID NO: 631469 - DNA, 15 bp, Homo sapiens
ggagttattgagagg

SEQ ID NO: 631470 - DNA, 15 bp, Homo sapiens
gagttattgagagga

SEQ ID NO: 631471 - DNA, 15 bp, Homo sapiens
agttattgagaggat

SEQ ID NO: 631472 - DNA, 15 bp, Homo sapiens
gttattgagaggatt

SEQ ID NO: 631473 - DNA, 15 bp, Homo sapiens
ttattgagaggatta

SEQ ID NO: 631474 - DNA, 15 bp, Homo sapiens
tattgagaggattat

SEQ ID NO: 631475 - DNA, 15 bp, Homo sapiens
attgagaggattata

SEQ ID NO: 631476 - DNA, 15 bp, Homo sapiens
ttgagaggattataa

SEQ ID NO: 631477 - DNA, 15 bp, Homo sapiens
tgagaggattataag

SEQ ID NO: 631478 - DNA, 15 bp, Homo sapiens
gagaggattataaga

SEQ ID NO: 631479 - DNA, 15 bp, Homo sapiens
agaggattataagac

SEQ ID NO: 631480 - DNA, 15 bp, Homo sapiens
gaggattataagaca

SEQ ID NO: 631481 - DNA, 15 bp, Homo sapiens
aggattataagacag

SEQ ID NO: 631482 - DNA, 15 bp, Homo sapiens
ggattataagacagt

SEQ ID NO: 631483 - DNA, 15 bp, Homo sapiens
gattataagacagtc

SEQ ID NO: 631484 - DNA, 15 bp, Homo sapiens
attataagacagtct

SEQ ID NO: 631485 - DNA, 15 bp, Homo sapiens
ttataagacagtcta

SEQ ID NO: 631486 - DNA, 15 bp, Homo sapiens
tataagacagtctat

SEQ ID NO: 631487 - DNA, 15 bp, Homo sapiens
ataagacagtctatg

SEQ ID NO: 631488 - DNA, 15 bp, Homo sapiens
taagacagtctatgt

SEQ ID NO: 631489 - DNA, 15 bp, Homo sapiens
aagacagtctatgtg

SEQ ID NO: 631490 - DNA, 15 bp, Homo sapiens
agacagtctatgtga

SEQ ID NO: 631491 - DNA, 15 bp, Homo sapiens
gacagtctatgtgaa

SEQ ID NO: 631492 - DNA, 15 bp, Homo sapiens
acagtctatgtgaat

SEQ ID NO: 631493 - DNA, 15 bp, Homo sapiens
cagtctatgtgaatc

SEQ ID NO: 631494 - DNA, 15 bp, Homo sapiens
agtctatgtgaatca

SEQ ID NO: 631495 - DNA, 15 bp, Homo sapiens
gtctatgtgaatcag

SEQ ID NO: 631496 - DNA, 15 bp, Homo sapiens
tctatgtgaatcagc

SEQ ID NO: 631497 - DNA, 15 bp, Homo sapiens
ctatgtgaatcagca

SEQ ID NO: 631498 - DNA, 15 bp, Homo sapiens
tatgtgaatcagcaa

SEQ ID NO: 631499 - DNA, 15 bp, Homo sapiens
atgtgaatcagcaac

SEQ ID NO: 631500 - DNA, 15 bp, Homo sapiens
tgtgaatcagcaacc

SEQ ID NO: 631501 - DNA, 15 bp, Homo sapiens
gtgaatcagcaaccc

SEQ ID NO: 631502 - DNA, 15 bp, Homo sapiens
tgaatcagcaaccct

SEQ ID NO: 631503 - DNA, 15 bp, Homo sapiens
gaatcagcaaccctt

SEQ ID NO: 631504 - DNA, 15 bp, Homo sapiens
aatcagcaacccttg

SEQ ID NO: 631505 - DNA, 15 bp, Homo sapiens
atcagcaacccttgc

SEQ ID NO: 631506 - DNA, 15 bp, Homo sapiens
tcagcaacccttgca

SEQ ID NO: 631507 - DNA, 15 bp, Homo sapiens
cagcaacccttgcat

SEQ ID NO: 631508 - DNA, 15 bp, Homo sapiens
agcaacccttgcatg

SEQ ID NO: 631509 - DNA, 15 bp, Homo sapiens
gcaacccttgcatgg

SEQ ID NO: 631510 - DNA, 15 bp, Homo sapiens
caacccttgcatggc

SEQ ID NO: 631511 - DNA, 15 bp, Homo sapiens
aacccttgcatggcc

SEQ ID NO: 631512 - DNA, 15 bp, Homo sapiens
acccttgcatggccc

SEQ ID NO: 631513 - DNA, 15 bp, Homo sapiens
cccttgcatggcccc

SEQ ID NO: 631514 - DNA, 15 bp, Homo sapiens
ccttgcatggcccct

SEQ ID NO: 631515 - DNA, 15 bp, Homo sapiens
cttgcatggcccctg

SEQ ID NO: 631516 - DNA, 15 bp, Homo sapiens
ttgcatggcccctgg

SEQ ID NO: 631517 - DNA, 15 bp, Homo sapiens
tgcatggcccctggc

SEQ ID NO: 631518 - DNA, 15 bp, Homo sapiens
gcatggcccctggcg

SEQ ID NO: 631519 - DNA, 15 bp, Homo sapiens
catggcccctggcgg

SEQ ID NO: 631520 - DNA, 15 bp, Homo sapiens
atggcccctggcggg

SEQ ID NO: 631521 - DNA, 15 bp, Homo sapiens
tggcccctggcgggg

SEQ ID NO: 631522 - DNA, 15 bp, Homo sapiens
ggcccctggcgggga

SEQ ID NO: 631523 - DNA, 15 bp, Homo sapiens
gcccctggcggggaa

SEQ ID NO: 631524 - DNA, 15 bp, Homo sapiens
cccctggcggggaac

SEQ ID NO: 631525 - DNA, 15 bp, Homo sapiens
ccctggcggggaaca

SEQ ID NO: 631526 - DNA, 15 bp, Homo sapiens
cctggcggggaacag

SEQ ID NO: 631527 - DNA, 15 bp, Homo sapiens
ctggcggggaacagt

SEQ ID NO: 631528 - DNA, 15 bp, Homo sapiens
tggcggggaacagta

SEQ ID NO: 631529 - DNA, 15 bp, Homo sapiens
ggcggggaacagtaa

SEQ ID NO: 631530 - DNA, 15 bp, Homo sapiens
gcggggaacagtaat

SEQ ID NO: 631531 - DNA, 15 bp, Homo sapiens
cggggaacagtaata

SEQ ID NO: 631532 - DNA, 15 bp, Homo sapiens
ggggaacagtaataa

SEQ ID NO: 631533 - DNA, 15 bp, Homo sapiens
gggaacagtaataat

SEQ ID NO: 631534 - DNA, 15 bp, Homo sapiens
ggaacagtaataata

SEQ ID NO: 631535 - DNA, 15 bp, Homo sapiens
gaacagtaataatag

SEQ ID NO: 631536 - DNA, 15 bp, Homo sapiens
aacagtaataatagc

SEQ ID NO: 631537 - DNA, 15 bp, Homo sapiens
acagtaataatagcc

SEQ ID NO: 631538 - DNA, 15 bp, Homo sapiens
cagtaataatagcca

SEQ ID NO: 631539 - DNA, 15 bp, Homo sapiens
agtaataatagccat

SEQ ID NO: 631540 - DNA, 15 bp, Homo sapiens
gtaataatagccatc

SEQ ID NO: 631541 - DNA, 15 bp, Homo sapiens
taataatagccatca

SEQ ID NO: 631542 - DNA, 15 bp, Homo sapiens
aataatagccatcat

SEQ ID NO: 631543 - DNA, 15 bp, Homo sapiens
ataatagccatcatc

SEQ ID NO: 631544 - DNA, 15 bp, Homo sapiens
taatagccatcatca

SEQ ID NO: 631545 - DNA, 15 bp, Homo sapiens
aatagccatcatcat

SEQ ID NO: 631546 - DNA, 15 bp, Homo sapiens
atagccatcatcatg

SEQ ID NO: 631547 - DNA, 15 bp, Homo sapiens
tagccatcatcatgt

SEQ ID NO: 631548 - DNA, 15 bp, Homo sapiens
agccatcatcatgtt

SEQ ID NO: 631549 - DNA, 15 bp, Homo sapiens
gccatcatcatgttt

SEQ ID NO: 631550 - DNA, 15 bp, Homo sapiens
ccatcatcatgttta

SEQ ID NO: 631551 - DNA, 15 bp, Homo sapiens
catcatcatgtttac

SEQ ID NO: 631552 - DNA, 15 bp, Homo sapiens
atcatcatgtttact

SEQ ID NO: 631553 - DNA, 15 bp, Homo sapiens
tcatcatgtttactt

SEQ ID NO: 631554 - DNA, 15 bp, Homo sapiens
catcatgtttactta

SEQ ID NO: 631555 - DNA, 15 bp, Homo sapiens
atcatgtttacttac

SEQ ID NO: 631556 - DNA, 15 bp, Homo sapiens
tcatgtttacttaca

SEQ ID NO: 631557 - DNA, 15 bp, Homo sapiens
catgtttacttacat

SEQ ID NO: 631558 - DNA, 15 bp, Homo sapiens
atgtttacttacata

SEQ ID NO: 631559 - DNA, 15 bp, Homo sapiens
tgtttacttacatag

SEQ ID NO: 631560 - DNA, 15 bp, Homo sapiens
gtttacttacatagt

SEQ ID NO: 631561 - DNA, 15 bp, Homo sapiens
tttacttacatagtc

SEQ ID NO: 631562 - DNA, 15 bp, Homo sapiens
ttacttacatagtcc

SEQ ID NO: 631563 - DNA, 15 bp, Homo sapiens
tacttacatagtcct

SEQ ID NO: 631564 - DNA, 15 bp, Homo sapiens
acttacatagtccta

SEQ ID NO: 631565 - DNA, 15 bp, Homo sapiens
cttacatagtcctaa

SEQ ID NO: 631566 - DNA, 15 bp, Homo sapiens
ttacatagtcctaat

SEQ ID NO: 631567 - DNA, 15 bp, Homo sapiens
tacatagtcctaatt

SEQ ID NO: 631568 - DNA, 15 bp, Homo sapiens
acatagtcctaatta

SEQ ID NO: 631569 - DNA, 15 bp, Homo sapiens
catagtcctaattag

SEQ ID NO: 631570 - DNA, 15 bp, Homo sapiens
atagtcctaattagt

SEQ ID NO: 631571 - DNA, 15 bp, Homo sapiens
tagtcctaattagtc

SEQ ID NO: 631572 - DNA, 15 bp, Homo sapiens
agtcctaattagtct

SEQ ID NO: 631573 - DNA, 15 bp, Homo sapiens
gtcctaattagtctt

SEQ ID NO: 631574 - DNA, 15 bp, Homo sapiens
tcctaattagtcttc

SEQ ID NO: 631575 - DNA, 15 bp, Homo sapiens
cctaattagtcttca

SEQ ID NO: 631576 - DNA, 15 bp, Homo sapiens
ctaattagtcttcaa

SEQ ID NO: 631577 - DNA, 15 bp, Homo sapiens
taattagtcttcaaa

SEQ ID NO: 631578 - DNA, 15 bp, Homo sapiens
aattagtcttcaaaa

SEQ ID NO: 631579 - DNA, 15 bp, Homo sapiens
attagtcttcaaaac

SEQ ID NO: 631580 - DNA, 15 bp, Homo sapiens
ttagtcttcaaaaca

SEQ ID NO: 631581 - DNA, 15 bp, Homo sapiens
tagtcttcaaaacag

SEQ ID NO: 631582 - DNA, 15 bp, Homo sapiens
agtcttcaaaacagc

SEQ ID NO: 631583 - DNA, 15 bp, Homo sapiens
gtcttcaaaacagcc

SEQ ID NO: 631584 - DNA, 15 bp, Homo sapiens
tcttcaaaacagccc

SEQ ID NO: 631585 - DNA, 15 bp, Homo sapiens
cttcaaaacagccct

SEQ ID NO: 631586 - DNA, 15 bp, Homo sapiens
ttcaaaacagccctg

SEQ ID NO: 631587 - DNA, 15 bp, Homo sapiens
tcaaaacagccctgt

SEQ ID NO: 631588 - DNA, 15 bp, Homo sapiens
caaaacagccctgta

SEQ ID NO: 631589 - DNA, 15 bp, Homo sapiens
aaaacagccctgtag

SEQ ID NO: 631590 - DNA, 15 bp, Homo sapiens
aaacagccctgtagc

SEQ ID NO: 631591 - DNA, 15 bp, Homo sapiens
aacagccctgtagca

SEQ ID NO: 631592 - DNA, 15 bp, Homo sapiens
acagccctgtagcaa

SEQ ID NO: 631593 - DNA, 15 bp, Homo sapiens
cagccctgtagcaat

SEQ ID NO: 631594 - DNA, 15 bp, Homo sapiens
agccctgtagcaatg

SEQ ID NO: 631595 - DNA, 15 bp, Homo sapiens
gccctgtagcaatgg

SEQ ID NO: 631596 - DNA, 15 bp, Homo sapiens
ccctgtagcaatggt

SEQ ID NO: 631597 - DNA, 15 bp, Homo sapiens
cctgtagcaatggta

SEQ ID NO: 631598 - DNA, 15 bp, Homo sapiens
ctgtagcaatggtat

SEQ ID NO: 631599 - DNA, 15 bp, Homo sapiens
tgtagcaatggtatg

SEQ ID NO: 631600 - DNA, 15 bp, Homo sapiens
gtagcaatggtatga

SEQ ID NO: 631601 - DNA, 15 bp, Homo sapiens
tagcaatggtatgat

SEQ ID NO: 631602 - DNA, 15 bp, Homo sapiens
agcaatggtatgatt

SEQ ID NO: 631603 - DNA, 15 bp, Homo sapiens
gcaatggtatgatta

SEQ ID NO: 631604 - DNA, 15 bp, Homo sapiens
caatggtatgattat

SEQ ID NO: 631605 - DNA, 15 bp, Homo sapiens
aatggtatgattatt

SEQ ID NO: 631606 - DNA, 15 bp, Homo sapiens
atggtatgattatta

SEQ ID NO: 631607 - DNA, 15 bp, Homo sapiens
tggtatgattattac

SEQ ID NO: 631608 - DNA, 15 bp, Homo sapiens
ggtatgattattacc

SEQ ID NO: 631609 - DNA, 15 bp, Homo sapiens
gtatgattattacca

SEQ ID NO: 631610 - DNA, 15 bp, Homo sapiens
tatgattattaccat

SEQ ID NO: 631611 - DNA, 15 bp, Homo sapiens
atgattattaccatt

SEQ ID NO: 631612 - DNA, 15 bp, Homo sapiens
tgattattaccattt

SEQ ID NO: 631613 - DNA, 15 bp, Homo sapiens
gattattaccatttt

SEQ ID NO: 631614 - DNA, 15 bp, Homo sapiens
attattaccatttta

SEQ ID NO: 631615 - DNA, 15 bp, Homo sapiens
ttattaccattttac

SEQ ID NO: 631616 - DNA, 15 bp, Homo sapiens
tattaccattttaca

SEQ ID NO: 631617 - DNA, 15 bp, Homo sapiens
attaccattttacag

SEQ ID NO: 631618 - DNA, 15 bp, Homo sapiens
ttaccattttacaga

SEQ ID NO: 631619 - DNA, 15 bp, Homo sapiens
taccattttacagat

SEQ ID NO: 631620 - DNA, 15 bp, Homo sapiens
accattttacagatg

SEQ ID NO: 631621 - DNA, 15 bp, Homo sapiens
ccattttacagatga

SEQ ID NO: 631622 - DNA, 15 bp, Homo sapiens
cattttacagatgag

SEQ ID NO: 631623 - DNA, 15 bp, Homo sapiens
attttacagatgagg

SEQ ID NO: 631624 - DNA, 15 bp, Homo sapiens
ttttacagatgagga

SEQ ID NO: 631625 - DNA, 15 bp, Homo sapiens
tttacagatgaggaa

SEQ ID NO: 631626 - DNA, 15 bp, Homo sapiens
ttacagatgaggaac

SEQ ID NO: 631627 - DNA, 15 bp, Homo sapiens
tacagatgaggaacc

SEQ ID NO: 631628 - DNA, 15 bp, Homo sapiens
acagatgaggaacct

SEQ ID NO: 631629 - DNA, 15 bp, Homo sapiens
cagatgaggaacctt

SEQ ID NO: 631630 - DNA, 15 bp, Homo sapiens
agatgaggaaccttt

SEQ ID NO: 631631 - DNA, 15 bp, Homo sapiens
gatgaggaacctttg

SEQ ID NO: 631632 - DNA, 15 bp, Homo sapiens
atgaggaacctttga

SEQ ID NO: 631633 - DNA, 15 bp, Homo sapiens
tgaggaacctttgaa

SEQ ID NO: 631634 - DNA, 15 bp, Homo sapiens
gaggaacctttgaag

SEQ ID NO: 631635 - DNA, 15 bp, Homo sapiens
aggaacctttgaagc

SEQ ID NO: 631636 - DNA, 15 bp, Homo sapiens
ggaacctttgaagcc

SEQ ID NO: 631637 - DNA, 15 bp, Homo sapiens
gaacctttgaagcct

SEQ ID NO: 631638 - DNA, 15 bp, Homo sapiens
aacctttgaagcctc

SEQ ID NO: 631639 - DNA, 15 bp, Homo sapiens
acctttgaagcctca

SEQ ID NO: 631640 - DNA, 15 bp, Homo sapiens
cctttgaagcctcag

SEQ ID NO: 631641 - DNA, 15 bp, Homo sapiens
ctttgaagcctcaga

SEQ ID NO: 631642 - DNA, 15 bp, Homo sapiens
tttgaagcctcagag

SEQ ID NO: 631643 - DNA, 15 bp, Homo sapiens
ttgaagcctcagaga

SEQ ID NO: 631644 - DNA, 15 bp, Homo sapiens
tgaagcctcagagag

SEQ ID NO: 631645 - DNA, 15 bp, Homo sapiens
gaagcctcagagagg

SEQ ID NO: 631646 - DNA, 15 bp, Homo sapiens
aagcctcagagaggc

SEQ ID NO: 631647 - DNA, 15 bp, Homo sapiens
agcctcagagaggct

SEQ ID NO: 631648 - DNA, 15 bp, Homo sapiens
gcctcagagaggcta

SEQ ID NO: 631649 - DNA, 15 bp, Homo sapiens
cctcagagaggctaa

SEQ ID NO: 631650 - DNA, 15 bp, Homo sapiens
ctcagagaggctaac

SEQ ID NO: 631651 - DNA, 15 bp, Homo sapiens
tcagagaggctaaca

SEQ ID NO: 631652 - DNA, 15 bp, Homo sapiens
cagagaggctaacag

SEQ ID NO: 631653 - DNA, 15 bp, Homo sapiens
agagaggctaacaga

SEQ ID NO: 631654 - DNA, 15 bp, Homo sapiens
gagaggctaacagac

SEQ ID NO: 631655 - DNA, 15 bp, Homo sapiens
agaggctaacagaca

SEQ ID NO: 631656 - DNA, 15 bp, Homo sapiens
gaggctaacagacat

SEQ ID NO: 631657 - DNA, 15 bp, Homo sapiens
aggctaacagacata

SEQ ID NO: 631658 - DNA, 15 bp, Homo sapiens
ggctaacagacatac

SEQ ID NO: 631659 - DNA, 15 bp, Homo sapiens
gctaacagacatacc

SEQ ID NO: 631660 - DNA, 15 bp, Homo sapiens
ctaacagacataccc

SEQ ID NO: 631661 - DNA, 15 bp, Homo sapiens
taacagacataccct

SEQ ID NO: 631662 - DNA, 15 bp, Homo sapiens
aacagacatacccta

SEQ ID NO: 631663 - DNA, 15 bp, Homo sapiens
acagacataccctag

SEQ ID NO: 631664 - DNA, 15 bp, Homo sapiens
cagacataccctagg

SEQ ID NO: 631665 - DNA, 15 bp, Homo sapiens
agacataccctaggt

SEQ ID NO: 631666 - DNA, 15 bp, Homo sapiens
gacataccctaggtc

SEQ ID NO: 631667 - DNA, 15 bp, Homo sapiens
acataccctaggtca

SEQ ID NO: 631668 - DNA, 15 bp, Homo sapiens
cataccctaggtcat

SEQ ID NO: 631669 - DNA, 15 bp, Homo sapiens
ataccctaggtcata

SEQ ID NO: 631670 - DNA, 15 bp, Homo sapiens
taccctaggtcatac

SEQ ID NO: 631671 - DNA, 15 bp, Homo sapiens
accctaggtcataca

SEQ ID NO: 631672 - DNA, 15 bp, Homo sapiens
ccctaggtcatacag

SEQ ID NO: 631673 - DNA, 15 bp, Homo sapiens
cctaggtcatacagt

SEQ ID NO: 631674 - DNA, 15 bp, Homo sapiens
ctaggtcatacagtt

SEQ ID NO: 631675 - DNA, 15 bp, Homo sapiens
taggtcatacagtta

SEQ ID NO: 631676 - DNA, 15 bp, Homo sapiens
aggtcatacagttat

SEQ ID NO: 631677 - DNA, 15 bp, Homo sapiens
ggtcatacagttatt

SEQ ID NO: 631678 - DNA, 15 bp, Homo sapiens
gtcatacagttatta

SEQ ID NO: 631679 - DNA, 15 bp, Homo sapiens
tcatacagttattaa

SEQ ID NO: 631680 - DNA, 15 bp, Homo sapiens
catacagttattaag

SEQ ID NO: 631681 - DNA, 15 bp, Homo sapiens
atacagttattaaga

SEQ ID NO: 631682 - DNA, 15 bp, Homo sapiens
tacagttattaagag

SEQ ID NO: 631683 - DNA, 15 bp, Homo sapiens
acagttattaagaga

SEQ ID NO: 631684 - DNA, 15 bp, Homo sapiens
cagttattaagagaa

SEQ ID NO: 631685 - DNA, 15 bp, Homo sapiens
agttattaagagaag

SEQ ID NO: 631686 - DNA, 15 bp, Homo sapiens
gttattaagagaagg

SEQ ID NO: 631687 - DNA, 15 bp, Homo sapiens
ttattaagagaagga

SEQ ID NO: 631688 - DNA, 15 bp, Homo sapiens
tattaagagaaggag

SEQ ID NO: 631689 - DNA, 15 bp, Homo sapiens
attaagagaaggagc

SEQ ID NO: 631690 - DNA, 15 bp, Homo sapiens
ttaagagaaggagct

SEQ ID NO: 631691 - DNA, 15 bp, Homo sapiens
taagagaaggagctc

SEQ ID NO: 631692 - DNA, 15 bp, Homo sapiens
aagagaaggagctct

SEQ ID NO: 631693 - DNA, 15 bp, Homo sapiens
agagaaggagctctg

SEQ ID NO: 631694 - DNA, 15 bp, Homo sapiens
gagaaggagctctgt

SEQ ID NO: 631695 - DNA, 15 bp, Homo sapiens
agaaggagctctgtc

SEQ ID NO: 631696 - DNA, 15 bp, Homo sapiens
gaaggagctctgtct

SEQ ID NO: 631697 - DNA, 15 bp, Homo sapiens
aaggagctctgtctc

SEQ ID NO: 631698 - DNA, 15 bp, Homo sapiens
aggagctctgtctcg

SEQ ID NO: 631699 - DNA, 15 bp, Homo sapiens
ggagctctgtctcga

SEQ ID NO: 631700 - DNA, 15 bp, Homo sapiens
gagctctgtctcgaa

SEQ ID NO: 631701 - DNA, 15 bp, Homo sapiens
agctctgtctcgaac

SEQ ID NO: 631702 - DNA, 15 bp, Homo sapiens
gctctgtctcgaacc

SEQ ID NO: 631703 - DNA, 15 bp, Homo sapiens
ctctgtctcgaacct

SEQ ID NO: 631704 - DNA, 15 bp, Homo sapiens
tctgtctcgaaccta

SEQ ID NO: 631705 - DNA, 15 bp, Homo sapiens
ctgtctcgaacctag

SEQ ID NO: 631706 - DNA, 15 bp, Homo sapiens
tgtctcgaacctagc

SEQ ID NO: 631707 - DNA, 15 bp, Homo sapiens
gtctcgaacctagct

SEQ ID NO: 631708 - DNA, 15 bp, Homo sapiens
tctcgaacctagctc

SEQ ID NO: 631709 - DNA, 15 bp, Homo sapiens
ctcgaacctagctct

SEQ ID NO: 631710 - DNA, 15 bp, Homo sapiens
tcgaacctagctctc

SEQ ID NO: 631711 - DNA, 15 bp, Homo sapiens
cgaacctagctctct

SEQ ID NO: 631712 - DNA, 15 bp, Homo sapiens
gaacctagctctctc

SEQ ID NO: 631713 - DNA, 15 bp, Homo sapiens
aacctagctctctct

SEQ ID NO: 631714 - DNA, 15 bp, Homo sapiens
acctagctctctctc

SEQ ID NO: 631715 - DNA, 15 bp, Homo sapiens
cctagctctctctct

SEQ ID NO: 631716 - DNA, 15 bp, Homo sapiens
ctagctctctctctc

SEQ ID NO: 631717 - DNA, 15 bp, Homo sapiens
tagctctctctctct

SEQ ID NO: 631718 - DNA, 15 bp, Homo sapiens
agctctctctctctc

SEQ ID NO: 631719 - DNA, 15 bp, Homo sapiens
gctctctctctctcg

SEQ ID NO: 631720 - DNA, 15 bp, Homo sapiens
ctctctctctctcga

SEQ ID NO: 631721 - DNA, 15 bp, Homo sapiens
tctctctctctcgag

SEQ ID NO: 631722 - DNA, 15 bp, Homo sapiens
ctctctctctcgagt

SEQ ID NO: 631723 - DNA, 15 bp, Homo sapiens
tctctctctcgagta

SEQ ID NO: 631724 - DNA, 15 bp, Homo sapiens
ctctctctcgagtaa

SEQ ID NO: 631725 - DNA, 15 bp, Homo sapiens
tctctctcgagtaat

SEQ ID NO: 631726 - DNA, 15 bp, Homo sapiens
ctctctcgagtaata

SEQ ID NO: 631727 - DNA, 15 bp, Homo sapiens
tctctcgagtaatac

SEQ ID NO: 631728 - DNA, 15 bp, Homo sapiens
ctctcgagtaatacc

SEQ ID NO: 631729 - DNA, 15 bp, Homo sapiens
tctcgagtaatacca

SEQ ID NO: 631730 - DNA, 15 bp, Homo sapiens
ctcgagtaataccag

SEQ ID NO: 631731 - DNA, 15 bp, Homo sapiens
tcgagtaataccagt

SEQ ID NO: 631732 - DNA, 15 bp, Homo sapiens
cgagtaataccagtt

SEQ ID NO: 631733 - DNA, 15 bp, Homo sapiens
gagtaataccagtta

SEQ ID NO: 631734 - DNA, 15 bp, Homo sapiens
agtaataccagttaa

SEQ ID NO: 631735 - DNA, 15 bp, Homo sapiens
gtaataccagttaaa

SEQ ID NO: 631736 - DNA, 15 bp, Homo sapiens
taataccagttaaaa

SEQ ID NO: 631737 - DNA, 15 bp, Homo sapiens
aataccagttaaaaa

SEQ ID NO: 631738 - DNA, 15 bp, Homo sapiens
ataccagttaaaaaa

SEQ ID NO: 631739 - DNA, 15 bp, Homo sapiens
taccagttaaaaaat

SEQ ID NO: 631740 - DNA, 15 bp, Homo sapiens
accagttaaaaaata

SEQ ID NO: 631741 - DNA, 15 bp, Homo sapiens
ccagttaaaaaatag

SEQ ID NO: 631742 - DNA, 15 bp, Homo sapiens
cagttaaaaaatagg

SEQ ID NO: 631743 - DNA, 15 bp, Homo sapiens
agttaaaaaataggc

SEQ ID NO: 631744 - DNA, 15 bp, Homo sapiens
gttaaaaaataggct

SEQ ID NO: 631745 - DNA, 15 bp, Homo sapiens
ttaaaaaataggcta

SEQ ID NO: 631746 - DNA, 15 bp, Homo sapiens
taaaaaataggctac

SEQ ID NO: 631747 - DNA, 15 bp, Homo sapiens
aaaaaataggctaca

SEQ ID NO: 631748 - DNA, 15 bp, Homo sapiens
aaaaataggctacaa

SEQ ID NO: 631749 - DNA, 15 bp, Homo sapiens
aaaataggctacaaa

SEQ ID NO: 631750 - DNA, 15 bp, Homo sapiens
aaataggctacaaat

SEQ ID NO: 631751 - DNA, 15 bp, Homo sapiens
aataggctacaaata

SEQ ID NO: 631752 - DNA, 15 bp, Homo sapiens
ataggctacaaatag

SEQ ID NO: 631753 - DNA, 15 bp, Homo sapiens
taggctacaaatagg

SEQ ID NO: 631754 - DNA, 15 bp, Homo sapiens
aggctacaaataggt

SEQ ID NO: 631755 - DNA, 15 bp, Homo sapiens
ggctacaaataggta

SEQ ID NO: 631756 - DNA, 15 bp, Homo sapiens
gctacaaataggtac

SEQ ID NO: 631757 - DNA, 15 bp, Homo sapiens
ctacaaataggtact

SEQ ID NO: 631758 - DNA, 15 bp, Homo sapiens
tacaaataggtactc

SEQ ID NO: 631759 - DNA, 15 bp, Homo sapiens
acaaataggtactca

SEQ ID NO: 631760 - DNA, 15 bp, Homo sapiens
caaataggtactcaa

SEQ ID NO: 631761 - DNA, 15 bp, Homo sapiens
aaataggtactcaaa

SEQ ID NO: 631762 - DNA, 15 bp, Homo sapiens
aataggtactcaaaa

SEQ ID NO: 631763 - DNA, 15 bp, Homo sapiens
ataggtactcaaaaa

SEQ ID NO: 631764 - DNA, 15 bp, Homo sapiens
taggtactcaaaaaa

SEQ ID NO: 631765 - DNA, 15 bp, Homo sapiens
aggtactcaaaaaaa

SEQ ID NO: 631766 - DNA, 15 bp, Homo sapiens
ggtactcaaaaaaat

SEQ ID NO: 631767 - DNA, 15 bp, Homo sapiens
gtactcaaaaaaatg

SEQ ID NO: 631768 - DNA, 15 bp, Homo sapiens
tactcaaaaaaatgg

SEQ ID NO: 631769 - DNA, 15 bp, Homo sapiens
actcaaaaaaatggt

SEQ ID NO: 631770 - DNA, 15 bp, Homo sapiens
ctcaaaaaaatggta

SEQ ID NO: 631771 - DNA, 15 bp, Homo sapiens
tcaaaaaaatggtag

SEQ ID NO: 631772 - DNA, 15 bp, Homo sapiens
caaaaaaatggtagt

SEQ ID NO: 631773 - DNA, 15 bp, Homo sapiens
aaaaaaatggtagtg

SEQ ID NO: 631774 - DNA, 15 bp, Homo sapiens
aaaaaatggtagtgg

SEQ ID NO: 631775 - DNA, 15 bp, Homo sapiens
aaaaatggtagtggc

SEQ ID NO: 631776 - DNA, 15 bp, Homo sapiens
aaaatggtagtggct

SEQ ID NO: 631777 - DNA, 15 bp, Homo sapiens
aaatggtagtggctg

SEQ ID NO: 631778 - DNA, 15 bp, Homo sapiens
aatggtagtggctgt

SEQ ID NO: 631779 - DNA, 15 bp, Homo sapiens
atggtagtggctgtt

SEQ ID NO: 631780 - DNA, 15 bp, Homo sapiens
tggtagtggctgttg

SEQ ID NO: 631781 - DNA, 15 bp, Homo sapiens
ggtagtggctgttgt

SEQ ID NO: 631782 - DNA, 15 bp, Homo sapiens
gtagtggctgttgtt

SEQ ID NO: 631783 - DNA, 15 bp, Homo sapiens
tagtggctgttgttt

SEQ ID NO: 631784 - DNA, 15 bp, Homo sapiens
agtggctgttgtttt

SEQ ID NO: 631785 - DNA, 15 bp, Homo sapiens
gtggctgttgttttt

SEQ ID NO: 631786 - DNA, 15 bp, Homo sapiens
tggctgttgttttta

SEQ ID NO: 631787 - DNA, 15 bp, Homo sapiens
ggctgttgtttttat

SEQ ID NO: 631788 - DNA, 15 bp, Homo sapiens
gctgttgtttttatt

SEQ ID NO: 631789 - DNA, 15 bp, Homo sapiens
ctgttgtttttattc

SEQ ID NO: 631790 - DNA, 15 bp, Homo sapiens
tgttgtttttattca

SEQ ID NO: 631791 - DNA, 15 bp, Homo sapiens
gttgtttttattcag

SEQ ID NO: 631792 - DNA, 15 bp, Homo sapiens
ttgtttttattcagt

SEQ ID NO: 631793 - DNA, 15 bp, Homo sapiens
tgtttttattcagtt

SEQ ID NO: 631794 - DNA, 15 bp, Homo sapiens
gtttttattcagttg

SEQ ID NO: 631795 - DNA, 15 bp, Homo sapiens
tttttattcagttgc

SEQ ID NO: 631796 - DNA, 15 bp, Homo sapiens
ttttattcagttgct

SEQ ID NO: 631797 - DNA, 15 bp, Homo sapiens
tttattcagttgctg

SEQ ID NO: 631798 - DNA, 15 bp, Homo sapiens
ttattcagttgctga

SEQ ID NO: 631799 - DNA, 15 bp, Homo sapiens
tattcagttgctgag

SEQ ID NO: 631800 - DNA, 15 bp, Homo sapiens
attcagttgctgagg

SEQ ID NO: 631801 - DNA, 15 bp, Homo sapiens
ttcagttgctgagga

SEQ ID NO: 631802 - DNA, 15 bp, Homo sapiens
tcagttgctgaggaa

SEQ ID NO: 631803 - DNA, 15 bp, Homo sapiens
cagttgctgaggaaa

SEQ ID NO: 631804 - DNA, 15 bp, Homo sapiens
agttgctgaggaaaa

SEQ ID NO: 631805 - DNA, 15 bp, Homo sapiens
gttgctgaggaaaaa

SEQ ID NO: 631806 - DNA, 15 bp, Homo sapiens
ttgctgaggaaaaaa

SEQ ID NO: 631807 - DNA, 15 bp, Homo sapiens
tgctgaggaaaaaat

SEQ ID NO: 631808 - DNA, 15 bp, Homo sapiens
gctgaggaaaaaatg

SEQ ID NO: 631809 - DNA, 15 bp, Homo sapiens
ctgaggaaaaaatgt

SEQ ID NO: 631810 - DNA, 15 bp, Homo sapiens
tgaggaaaaaatgtt

SEQ ID NO: 631811 - DNA, 15 bp, Homo sapiens
gaggaaaaaatgttg

SEQ ID NO: 631812 - DNA, 15 bp, Homo sapiens
aggaaaaaatgttga

SEQ ID NO: 631813 - DNA, 15 bp, Homo sapiens
ggaaaaaatgttgat

SEQ ID NO: 631814 - DNA, 15 bp, Homo sapiens
gaaaaaatgttgatt

SEQ ID NO: 631815 - DNA, 15 bp, Homo sapiens
aaaaaatgttgattt

SEQ ID NO: 631816 - DNA, 15 bp, Homo sapiens
aaaaatgttgatttt

SEQ ID NO: 631817 - DNA, 15 bp, Homo sapiens
aaaatgttgattttt

SEQ ID NO: 631818 - DNA, 15 bp, Homo sapiens
aaatgttgatttttc

SEQ ID NO: 631819 - DNA, 15 bp, Homo sapiens
aatgttgatttttca

SEQ ID NO: 631820 - DNA, 15 bp, Homo sapiens
atgttgatttttcat

SEQ ID NO: 631821 - DNA, 15 bp, Homo sapiens
tgttgatttttcatc

SEQ ID NO: 631822 - DNA, 15 bp, Homo sapiens
gttgatttttcatct

SEQ ID NO: 631823 - DNA, 15 bp, Homo sapiens
ttgatttttcatctc

SEQ ID NO: 631824 - DNA, 15 bp, Homo sapiens
tgatttttcatctct

SEQ ID NO: 631825 - DNA, 15 bp, Homo sapiens
gatttttcatctcta

SEQ ID NO: 631826 - DNA, 15 bp, Homo sapiens
atttttcatctctaa

SEQ ID NO: 631827 - DNA, 15 bp, Homo sapiens
tttttcatctctaaa

SEQ ID NO: 631828 - DNA, 15 bp, Homo sapiens
ttttcatctctaaac

SEQ ID NO: 631829 - DNA, 15 bp, Homo sapiens
tttcatctctaaaca

SEQ ID NO: 631830 - DNA, 15 bp, Homo sapiens
ttcatctctaaacat

SEQ ID NO: 631831 - DNA, 15 bp, Homo sapiens
tcatctctaaacatc

SEQ ID NO: 631832 - DNA, 15 bp, Homo sapiens
catctctaaacatca

SEQ ID NO: 631833 - DNA, 15 bp, Homo sapiens
atctctaaacatcaa

SEQ ID NO: 631834 - DNA, 15 bp, Homo sapiens
tctctaaacatcaac

SEQ ID NO: 631835 - DNA, 15 bp, Homo sapiens
ctctaaacatcaact

SEQ ID NO: 631836 - DNA, 15 bp, Homo sapiens
tctaaacatcaactt

SEQ ID NO: 631837 - DNA, 15 bp, Homo sapiens
ctaaacatcaactta

SEQ ID NO: 631838 - DNA, 15 bp, Homo sapiens
taaacatcaacttac

SEQ ID NO: 631839 - DNA, 15 bp, Homo sapiens
aaacatcaacttact

SEQ ID NO: 631840 - DNA, 15 bp, Homo sapiens
aacatcaacttactt

SEQ ID NO: 631841 - DNA, 15 bp, Homo sapiens
acatcaacttactta

SEQ ID NO: 631842 - DNA, 15 bp, Homo sapiens
catcaacttacttaa

SEQ ID NO: 631843 - DNA, 15 bp, Homo sapiens
atcaacttacttaat

SEQ ID NO: 631844 - DNA, 15 bp, Homo sapiens
tcaacttacttaatt

SEQ ID NO: 631845 - DNA, 15 bp, Homo sapiens
caacttacttaattc

SEQ ID NO: 631846 - DNA, 15 bp, Homo sapiens
aacttacttaattct

SEQ ID NO: 631847 - DNA, 15 bp, Homo sapiens
acttacttaattctg

SEQ ID NO: 631848 - DNA, 15 bp, Homo sapiens
cttacttaattctgc

SEQ ID NO: 631849 - DNA, 15 bp, Homo sapiens
ttacttaattctgcc

SEQ ID NO: 631850 - DNA, 15 bp, Homo sapiens
tacttaattctgcca

SEQ ID NO: 631851 - DNA, 15 bp, Homo sapiens
acttaattctgccaa

SEQ ID NO: 631852 - DNA, 15 bp, Homo sapiens
cttaattctgccaat

SEQ ID NO: 631853 - DNA, 15 bp, Homo sapiens
ttaattctgccaatt

SEQ ID NO: 631854 - DNA, 15 bp, Homo sapiens
taattctgccaattt

SEQ ID NO: 631855 - DNA, 15 bp, Homo sapiens
aattctgccaatttc

SEQ ID NO: 631856 - DNA, 15 bp, Homo sapiens
attctgccaatttct

SEQ ID NO: 631857 - DNA, 15 bp, Homo sapiens
ttctgccaatttctt

SEQ ID NO: 631858 - DNA, 15 bp, Homo sapiens
tctgccaatttcttt

SEQ ID NO: 631859 - DNA, 15 bp, Homo sapiens
ctgccaatttctttt

SEQ ID NO: 631860 - DNA, 15 bp, Homo sapiens
tgccaatttcttttt

SEQ ID NO: 631861 - DNA, 15 bp, Homo sapiens
gccaatttctttttt

SEQ ID NO: 631862 - DNA, 15 bp, Homo sapiens
ccaatttcttttttt

SEQ ID NO: 631863 - DNA, 15 bp, Homo sapiens
caatttctttttttt

SEQ ID NO: 631864 - DNA, 15 bp, Homo sapiens
aatttcttttttttg

SEQ ID NO: 631865 - DNA, 15 bp, Homo sapiens
atttcttttttttga

SEQ ID NO: 631866 - DNA, 15 bp, Homo sapiens
tttcttttttttgag

SEQ ID NO: 631867 - DNA, 15 bp, Homo sapiens
ttcttttttttgaga

SEQ ID NO: 631868 - DNA, 15 bp, Homo sapiens
tcttttttttgagac

SEQ ID NO: 631869 - DNA, 15 bp, Homo sapiens
cttttttttgagaca

SEQ ID NO: 631870 - DNA, 15 bp, Homo sapiens
ttttttttgagacag

SEQ ID NO: 631871 - DNA, 15 bp, Homo sapiens
tttttttgagacagg

SEQ ID NO: 631872 - DNA, 15 bp, Homo sapiens
ttttttgagacaggg

SEQ ID NO: 631873 - DNA, 15 bp, Homo sapiens
tttttgagacagggt

SEQ ID NO: 631874 - DNA, 15 bp, Homo sapiens
ttttgagacagggtc

SEQ ID NO: 631875 - DNA, 15 bp, Homo sapiens
tttgagacagggtct

SEQ ID NO: 631876 - DNA, 15 bp, Homo sapiens
ttgagacagggtctc

SEQ ID NO: 631877 - DNA, 15 bp, Homo sapiens
tgagacagggtctca

SEQ ID NO: 631878 - DNA, 15 bp, Homo sapiens
gagacagggtctcac

SEQ ID NO: 631879 - DNA, 15 bp, Homo sapiens
agacagggtctcact

SEQ ID NO: 631880 - DNA, 15 bp, Homo sapiens
gacagggtctcactc

SEQ ID NO: 631881 - DNA, 15 bp, Homo sapiens
acagggtctcactct

SEQ ID NO: 631882 - DNA, 15 bp, Homo sapiens
cagggtctcactctg

SEQ ID NO: 631883 - DNA, 15 bp, Homo sapiens
agggtctcactctgt

SEQ ID NO: 631884 - DNA, 15 bp, Homo sapiens
gggtctcactctgtc

SEQ ID NO: 631885 - DNA, 15 bp, Homo sapiens
ggtctcactctgtca

SEQ ID NO: 631886 - DNA, 15 bp, Homo sapiens
gtctcactctgtcac

SEQ ID NO: 631887 - DNA, 15 bp, Homo sapiens
tctcactctgtcacc

SEQ ID NO: 631888 - DNA, 15 bp, Homo sapiens
ctcactctgtcacct

SEQ ID NO: 631889 - DNA, 15 bp, Homo sapiens
tcactctgtcaccta

SEQ ID NO: 631890 - DNA, 15 bp, Homo sapiens
cactctgtcacctag

SEQ ID NO: 631891 - DNA, 15 bp, Homo sapiens
actctgtcacctagg

SEQ ID NO: 631892 - DNA, 15 bp, Homo sapiens
ctctgtcacctagga

SEQ ID NO: 631893 - DNA, 15 bp, Homo sapiens
tctgtcacctaggat

SEQ ID NO: 631894 - DNA, 15 bp, Homo sapiens
ctgtcacctaggatg

SEQ ID NO: 631895 - DNA, 15 bp, Homo sapiens
tgtcacctaggatgg

SEQ ID NO: 631896 - DNA, 15 bp, Homo sapiens
gtcacctaggatgga

SEQ ID NO: 631897 - DNA, 15 bp, Homo sapiens
tcacctaggatggag

SEQ ID NO: 631898 - DNA, 15 bp, Homo sapiens
cacctaggatggagt

SEQ ID NO: 631899 - DNA, 15 bp, Homo sapiens
acctaggatggagtg

SEQ ID NO: 631900 - DNA, 15 bp, Homo sapiens
cctaggatggagtgc

SEQ ID NO: 631901 - DNA, 15 bp, Homo sapiens
ctaggatggagtgca

SEQ ID NO: 631902 - DNA, 15 bp, Homo sapiens
taggatggagtgcag

SEQ ID NO: 631903 - DNA, 15 bp, Homo sapiens
aggatggagtgcagt

SEQ ID NO: 631904 - DNA, 15 bp, Homo sapiens
ggatggagtgcagtg

SEQ ID NO: 631905 - DNA, 15 bp, Homo sapiens
gatggagtgcagtgg

SEQ ID NO: 631906 - DNA, 15 bp, Homo sapiens
atggagtgcagtggc

SEQ ID NO: 631907 - DNA, 15 bp, Homo sapiens
agtgcagtggcacaa

SEQ ID NO: 631908 - DNA, 15 bp, Homo sapiens
gtgcagtggcacaat

SEQ ID NO: 631909 - DNA, 15 bp, Homo sapiens
tgcagtggcacaatc

SEQ ID NO: 631910 - DNA, 15 bp, Homo sapiens
gcagtggcacaatca

SEQ ID NO: 631911 - DNA, 15 bp, Homo sapiens
cagtggcacaatcac

SEQ ID NO: 631912 - DNA, 15 bp, Homo sapiens
agtggcacaatcact

SEQ ID NO: 631913 - DNA, 15 bp, Homo sapiens
gtggcacaatcactg

SEQ ID NO: 631914 - DNA, 15 bp, Homo sapiens
tggcacaatcactgc

SEQ ID NO: 631915 - DNA, 15 bp, Homo sapiens
ggcacaatcactgct

SEQ ID NO: 631916 - DNA, 15 bp, Homo sapiens
gcacaatcactgctc

SEQ ID NO: 631917 - DNA, 15 bp, Homo sapiens
cacaatcactgctca

SEQ ID NO: 631918 - DNA, 15 bp, Homo sapiens
acaatcactgctcac

SEQ ID NO: 631919 - DNA, 15 bp, Homo sapiens
caatcactgctcact

SEQ ID NO: 631920 - DNA, 15 bp, Homo sapiens
aatcactgctcactg

SEQ ID NO: 631921 - DNA, 15 bp, Homo sapiens
atcactgctcactgc

SEQ ID NO: 631922 - DNA, 15 bp, Homo sapiens
tcactgctcactgca

SEQ ID NO: 631923 - DNA, 15 bp, Homo sapiens
cactgctcactgcag

SEQ ID NO: 631924 - DNA, 15 bp, Homo sapiens
actgctcactgcagc

SEQ ID NO: 631925 - DNA, 15 bp, Homo sapiens
ctgctcactgcagcc

SEQ ID NO: 631926 - DNA, 15 bp, Homo sapiens
tgctcactgcagcct

SEQ ID NO: 631927 - DNA, 15 bp, Homo sapiens
ctcactgcagcctcg

SEQ ID NO: 631928 - DNA, 15 bp, Homo sapiens
tcactgcagcctcga

SEQ ID NO: 631929 - DNA, 15 bp, Homo sapiens
cactgcagcctcgac

SEQ ID NO: 631930 - DNA, 15 bp, Homo sapiens
actgcagcctcgact

SEQ ID NO: 631931 - DNA, 15 bp, Homo sapiens
ctgcagcctcgactt

SEQ ID NO: 631932 - DNA, 15 bp, Homo sapiens
tgcagcctcgacttc

SEQ ID NO: 631933 - DNA, 15 bp, Homo sapiens
gcagcctcgacttcc

SEQ ID NO: 631934 - DNA, 15 bp, Homo sapiens
cagcctcgacttccc

SEQ ID NO: 631935 - DNA, 15 bp, Homo sapiens
agcctcgacttcccg

SEQ ID NO: 631936 - DNA, 15 bp, Homo sapiens
gcctcgacttcccgg

SEQ ID NO: 631937 - DNA, 15 bp, Homo sapiens
cctcgacttcccggg

SEQ ID NO: 631938 - DNA, 15 bp, Homo sapiens
ctcgacttcccgggc

SEQ ID NO: 631939 - DNA, 15 bp, Homo sapiens
tcgacttcccgggct

SEQ ID NO: 631940 - DNA, 15 bp, Homo sapiens
cgacttcccgggctc

SEQ ID NO: 631941 - DNA, 15 bp, Homo sapiens
gacttcccgggctcg

SEQ ID NO: 631942 - DNA, 15 bp, Homo sapiens
acttcccgggctcgg

SEQ ID NO: 631943 - DNA, 15 bp, Homo sapiens
cttcccgggctcggg

SEQ ID NO: 631944 - DNA, 15 bp, Homo sapiens
ttcccgggctcgggt

SEQ ID NO: 631945 - DNA, 15 bp, Homo sapiens
tcccgggctcgggtg

SEQ ID NO: 631946 - DNA, 15 bp, Homo sapiens
cccgggctcgggtga

SEQ ID NO: 631947 - DNA, 15 bp, Homo sapiens
ccgggctcgggtgat

SEQ ID NO: 631948 - DNA, 15 bp, Homo sapiens
cgggctcgggtgatt

SEQ ID NO: 631949 - DNA, 15 bp, Homo sapiens
gggctcgggtgattc

SEQ ID NO: 631950 - DNA, 15 bp, Homo sapiens
ggctcgggtgattct

SEQ ID NO: 631951 - DNA, 15 bp, Homo sapiens
gctcgggtgattctc

SEQ ID NO: 631952 - DNA, 15 bp, Homo sapiens
ctcgggtgattctcc

SEQ ID NO: 631953 - DNA, 15 bp, Homo sapiens
tcgggtgattctccc

SEQ ID NO: 631954 - DNA, 15 bp, Homo sapiens
cgggtgattctcccc

SEQ ID NO: 631955 - DNA, 15 bp, Homo sapiens
gggtgattctcccca

SEQ ID NO: 631956 - DNA, 15 bp, Homo sapiens
ggtgattctccccag

SEQ ID NO: 631957 - DNA, 15 bp, Homo sapiens
gtgattctccccagg

SEQ ID NO: 631958 - DNA, 15 bp, Homo sapiens
tgattctccccaggc

SEQ ID NO: 631959 - DNA, 15 bp, Homo sapiens
gattctccccaggct

SEQ ID NO: 631960 - DNA, 15 bp, Homo sapiens
attctccccaggctc

SEQ ID NO: 631961 - DNA, 15 bp, Homo sapiens
ttctccccaggctca

SEQ ID NO: 631962 - DNA, 15 bp, Homo sapiens
tctccccaggctcag

SEQ ID NO: 631963 - DNA, 15 bp, Homo sapiens
ctccccaggctcagg

SEQ ID NO: 631964 - DNA, 15 bp, Homo sapiens
tccccaggctcaggg

SEQ ID NO: 631965 - DNA, 15 bp, Homo sapiens
ccccaggctcagggg

SEQ ID NO: 631966 - DNA, 15 bp, Homo sapiens
cccaggctcagggga

SEQ ID NO: 631967 - DNA, 15 bp, Homo sapiens
ccaggctcaggggat

SEQ ID NO: 631968 - DNA, 15 bp, Homo sapiens
caggctcaggggatt

SEQ ID NO: 631969 - DNA, 15 bp, Homo sapiens
aggctcaggggattc

SEQ ID NO: 631970 - DNA, 15 bp, Homo sapiens
ggctcaggggattct

SEQ ID NO: 631971 - DNA, 15 bp, Homo sapiens
gctcaggggattctc

SEQ ID NO: 631972 - DNA, 15 bp, Homo sapiens
ctcaggggattctcc

SEQ ID NO: 631973 - DNA, 15 bp, Homo sapiens
tcaggggattctccc

SEQ ID NO: 631974 - DNA, 15 bp, Homo sapiens
caggggattctccca

SEQ ID NO: 631975 - DNA, 15 bp, Homo sapiens
aggggattctcccac

SEQ ID NO: 631976 - DNA, 15 bp, Homo sapiens
ggggattctcccact

SEQ ID NO: 631977 - DNA, 15 bp, Homo sapiens
gggattctcccactt

SEQ ID NO: 631978 - DNA, 15 bp, Homo sapiens
ggattctcccacttc

SEQ ID NO: 631979 - DNA, 15 bp, Homo sapiens
gattctcccacttca

SEQ ID NO: 631980 - DNA, 15 bp, Homo sapiens
attctcccacttcag

SEQ ID NO: 631981 - DNA, 15 bp, Homo sapiens
ttctcccacttcagc

SEQ ID NO: 631982 - DNA, 15 bp, Homo sapiens
tctcccacttcagcc

SEQ ID NO: 631983 - DNA, 15 bp, Homo sapiens
ctcccacttcagcct

SEQ ID NO: 631984 - DNA, 15 bp, Homo sapiens
tcccacttcagcctc

SEQ ID NO: 631985 - DNA, 15 bp, Homo sapiens
cccacttcagcctcc

SEQ ID NO: 631986 - DNA, 15 bp, Homo sapiens
ccacttcagcctccc

SEQ ID NO: 631987 - DNA, 15 bp, Homo sapiens
cacttcagcctccca

SEQ ID NO: 631988 - DNA, 15 bp, Homo sapiens
acttcagcctcccaa

SEQ ID NO: 631989 - DNA, 15 bp, Homo sapiens
cttcagcctcccaag

SEQ ID NO: 631990 - DNA, 15 bp, Homo sapiens
ttcagcctcccaagt

SEQ ID NO: 631991 - DNA, 15 bp, Homo sapiens
cccaagtagctggga

SEQ ID NO: 631992 - DNA, 15 bp, Homo sapiens
ccaagtagctgggac

SEQ ID NO: 631993 - DNA, 15 bp, Homo sapiens
caagtagctgggact

SEQ ID NO: 631994 - DNA, 15 bp, Homo sapiens
aagtagctgggacta

SEQ ID NO: 631995 - DNA, 15 bp, Homo sapiens
agtagctgggactac

SEQ ID NO: 631996 - DNA, 15 bp, Homo sapiens
gtagctgggactaca

SEQ ID NO: 631997 - DNA, 15 bp, Homo sapiens
tagctgggactacag

SEQ ID NO: 631998 - DNA, 15 bp, Homo sapiens
agctgggactacagg

SEQ ID NO: 631999 - DNA, 15 bp, Homo sapiens
gctgggactacaggt

SEQ ID NO: 632000 - DNA, 15 bp, Homo sapiens
ctgggactacaggtg

SEQ ID NO: 632001 - DNA, 15 bp, Homo sapiens
tgggactacaggtgc

SEQ ID NO: 632002 - DNA, 15 bp, Homo sapiens
gggactacaggtgcg

SEQ ID NO: 632003 - DNA, 15 bp, Homo sapiens
ggactacaggtgcgc

SEQ ID NO: 632004 - DNA, 15 bp, Homo sapiens
gactacaggtgcgca

SEQ ID NO: 632005 - DNA, 15 bp, Homo sapiens
actacaggtgcgcac

SEQ ID NO: 632006 - DNA, 15 bp, Homo sapiens
ctacaggtgcgcacc

SEQ ID NO: 632007 - DNA, 15 bp, Homo sapiens
tacaggtgcgcacca

SEQ ID NO: 632008 - DNA, 15 bp, Homo sapiens
acaggtgcgcaccac

SEQ ID NO: 632009 - DNA, 15 bp, Homo sapiens
caggtgcgcaccacc

SEQ ID NO: 632010 - DNA, 15 bp, Homo sapiens
aggtgcgcaccacca

SEQ ID NO: 632011 - DNA, 15 bp, Homo sapiens
ggtgcgcaccaccat

SEQ ID NO: 632012 - DNA, 15 bp, Homo sapiens
gtgcgcaccaccatc

SEQ ID NO: 632013 - DNA, 15 bp, Homo sapiens
tgcgcaccaccatcc

SEQ ID NO: 632014 - DNA, 15 bp, Homo sapiens
gcgcaccaccatccc

SEQ ID NO: 632015 - DNA, 15 bp, Homo sapiens
cgcaccaccatccct

SEQ ID NO: 632016 - DNA, 15 bp, Homo sapiens
gcaccaccatccctg

SEQ ID NO: 632017 - DNA, 15 bp, Homo sapiens
caccaccatccctgg

SEQ ID NO: 632018 - DNA, 15 bp, Homo sapiens
accaccatccctggc

SEQ ID NO: 632019 - DNA, 15 bp, Homo sapiens
ccaccatccctggct

SEQ ID NO: 632020 - DNA, 15 bp, Homo sapiens
caccatccctggcta

SEQ ID NO: 632021 - DNA, 15 bp, Homo sapiens
accatccctggctaa

SEQ ID NO: 632022 - DNA, 15 bp, Homo sapiens
ccatccctggctaat

SEQ ID NO: 632023 - DNA, 15 bp, Homo sapiens
catccctggctaata

SEQ ID NO: 632024 - DNA, 15 bp, Homo sapiens
atccctggctaatat

SEQ ID NO: 632025 - DNA, 15 bp, Homo sapiens
tccctggctaatatt

SEQ ID NO: 632026 - DNA, 15 bp, Homo sapiens
ccctggctaatattt

SEQ ID NO: 632027 - DNA, 15 bp, Homo sapiens
cctggctaatatttg

SEQ ID NO: 632028 - DNA, 15 bp, Homo sapiens
ctggctaatatttgt

SEQ ID NO: 632029 - DNA, 15 bp, Homo sapiens
tggctaatatttgta

SEQ ID NO: 632030 - DNA, 15 bp, Homo sapiens
ggctaatatttgtac

SEQ ID NO: 632031 - DNA, 15 bp, Homo sapiens
gctaatatttgtact

SEQ ID NO: 632032 - DNA, 15 bp, Homo sapiens
ctaatatttgtactt

SEQ ID NO: 632033 - DNA, 15 bp, Homo sapiens
taatatttgtacttt

SEQ ID NO: 632034 - DNA, 15 bp, Homo sapiens
aatatttgtacttta

SEQ ID NO: 632035 - DNA, 15 bp, Homo sapiens
atatttgtactttat

SEQ ID NO: 632036 - DNA, 15 bp, Homo sapiens
tatttgtactttatt

SEQ ID NO: 632037 - DNA, 15 bp, Homo sapiens
atttgtactttattt

SEQ ID NO: 632038 - DNA, 15 bp, Homo sapiens
tttgtactttatttt

SEQ ID NO: 632039 - DNA, 15 bp, Homo sapiens
ttgtactttatttta

SEQ ID NO: 632040 - DNA, 15 bp, Homo sapiens
tgtactttattttat

SEQ ID NO: 632041 - DNA, 15 bp, Homo sapiens
gtactttattttatt

SEQ ID NO: 632042 - DNA, 15 bp, Homo sapiens
tactttattttattt

SEQ ID NO: 632043 - DNA, 15 bp, Homo sapiens
actttattttattta

SEQ ID NO: 632044 - DNA, 15 bp, Homo sapiens
ctttattttatttat

SEQ ID NO: 632045 - DNA, 15 bp, Homo sapiens
tttattttatttatt

SEQ ID NO: 632046 - DNA, 15 bp, Homo sapiens
ttattttatttattt

SEQ ID NO: 632047 - DNA, 15 bp, Homo sapiens
tattttatttattta

SEQ ID NO: 632048 - DNA, 15 bp, Homo sapiens
attttatttatttat

SEQ ID NO: 632049 - DNA, 15 bp, Homo sapiens
ttttatttatttatt

SEQ ID NO: 632050 - DNA, 15 bp, Homo sapiens
tttatttatttattt

SEQ ID NO: 632051 - DNA, 15 bp, Homo sapiens
ttatttatttattta

SEQ ID NO: 632052 - DNA, 15 bp, Homo sapiens
tatttatttatttat

SEQ ID NO: 632053 - DNA, 15 bp, Homo sapiens
atttatttatttatt

SEQ ID NO: 632054 - DNA, 15 bp, Homo sapiens
ttatttatttatttt

SEQ ID NO: 632055 - DNA, 15 bp, Homo sapiens
tatttatttattttt

SEQ ID NO: 632056 - DNA, 15 bp, Homo sapiens
atttatttatttttt

SEQ ID NO: 632057 - DNA, 15 bp, Homo sapiens
tttatttattttttg

SEQ ID NO: 632058 - DNA, 15 bp, Homo sapiens
ttatttattttttga

SEQ ID NO: 632059 - DNA, 15 bp, Homo sapiens
tatttattttttgag

SEQ ID NO: 632060 - DNA, 15 bp, Homo sapiens
atttattttttgaga

SEQ ID NO: 632061 - DNA, 15 bp, Homo sapiens
tttattttttgagat

SEQ ID NO: 632062 - DNA, 15 bp, Homo sapiens
ttattttttgagatg

SEQ ID NO: 632063 - DNA, 15 bp, Homo sapiens
tattttttgagatgg

SEQ ID NO: 632064 - DNA, 15 bp, Homo sapiens
attttttgagatgga

SEQ ID NO: 632065 - DNA, 15 bp, Homo sapiens
ttttttgagatggag

SEQ ID NO: 632066 - DNA, 15 bp, Homo sapiens
tttttgagatggagt

SEQ ID NO: 632067 - DNA, 15 bp, Homo sapiens
ttttgagatggagtt

SEQ ID NO: 632068 - DNA, 15 bp, Homo sapiens
tttgagatggagttt

SEQ ID NO: 632069 - DNA, 15 bp, Homo sapiens
ttgagatggagtttc

SEQ ID NO: 632070 - DNA, 15 bp, Homo sapiens
tgagatggagtttcg

SEQ ID NO: 632071 - DNA, 15 bp, Homo sapiens
gagatggagtttcgc

SEQ ID NO: 632072 - DNA, 15 bp, Homo sapiens
agatggagtttcgct

SEQ ID NO: 632073 - DNA, 15 bp, Homo sapiens
gatggagtttcgctc

SEQ ID NO: 632074 - DNA, 15 bp, Homo sapiens
atggagtttcgctct

SEQ ID NO: 632075 - DNA, 15 bp, Homo sapiens
tggagtttcgctctt

SEQ ID NO: 632076 - DNA, 15 bp, Homo sapiens
ggagtttcgctcttg

SEQ ID NO: 632077 - DNA, 15 bp, Homo sapiens
gagtttcgctcttgt

SEQ ID NO: 632078 - DNA, 15 bp, Homo sapiens
agtttcgctcttgtt

SEQ ID NO: 632079 - DNA, 15 bp, Homo sapiens
gtttcgctcttgttg

SEQ ID NO: 632080 - DNA, 15 bp, Homo sapiens
tttcgctcttgttgc

SEQ ID NO: 632081 - DNA, 15 bp, Homo sapiens
ttcgctcttgttgcc

SEQ ID NO: 632082 - DNA, 15 bp, Homo sapiens
tcgctcttgttgccc

SEQ ID NO: 632083 - DNA, 15 bp, Homo sapiens
cgctcttgttgcccg

SEQ ID NO: 632084 - DNA, 15 bp, Homo sapiens
gctcttgttgcccgg

SEQ ID NO: 632085 - DNA, 15 bp, Homo sapiens
ctcttgttgcccggg

SEQ ID NO: 632086 - DNA, 15 bp, Homo sapiens
tcttgttgcccgggc

SEQ ID NO: 632087 - DNA, 15 bp, Homo sapiens
cttgttgcccgggct

SEQ ID NO: 632088 - DNA, 15 bp, Homo sapiens
ttgttgcccgggctg

SEQ ID NO: 632089 - DNA, 15 bp, Homo sapiens
tgttgcccgggctgg

SEQ ID NO: 632090 - DNA, 15 bp, Homo sapiens
gttgcccgggctgga

SEQ ID NO: 632091 - DNA, 15 bp, Homo sapiens
ttgcccgggctggag

SEQ ID NO: 632092 - DNA, 15 bp, Homo sapiens
tgcccgggctggagt

SEQ ID NO: 632093 - DNA, 15 bp, Homo sapiens
gcccgggctggagta

SEQ ID NO: 632094 - DNA, 15 bp, Homo sapiens
cccgggctggagtac

SEQ ID NO: 632095 - DNA, 15 bp, Homo sapiens
ccgggctggagtaca

SEQ ID NO: 632096 - DNA, 15 bp, Homo sapiens
cgggctggagtacag

SEQ ID NO: 632097 - DNA, 15 bp, Homo sapiens
gggctggagtacagt

SEQ ID NO: 632098 - DNA, 15 bp, Homo sapiens
ggctggagtacagtg

SEQ ID NO: 632099 - DNA, 15 bp, Homo sapiens
gctggagtacagtgg

SEQ ID NO: 632100 - DNA, 15 bp, Homo sapiens
ctggagtacagtggc

SEQ ID NO: 632101 - DNA, 15 bp, Homo sapiens
tggagtacagtggca

SEQ ID NO: 632102 - DNA, 15 bp, Homo sapiens
ggagtacagtggcat

SEQ ID NO: 632103 - DNA, 15 bp, Homo sapiens
gagtacagtggcatg

SEQ ID NO: 632104 - DNA, 15 bp, Homo sapiens
agtacagtggcatga

SEQ ID NO: 632105 - DNA, 15 bp, Homo sapiens
gtacagtggcatgat

SEQ ID NO: 632106 - DNA, 15 bp, Homo sapiens
tacagtggcatgatc

SEQ ID NO: 632107 - DNA, 15 bp, Homo sapiens
acagtggcatgatct

SEQ ID NO: 632108 - DNA, 15 bp, Homo sapiens
cagtggcatgatctc

SEQ ID NO: 632109 - DNA, 15 bp, Homo sapiens
agtggcatgatctcg

SEQ ID NO: 632110 - DNA, 15 bp, Homo sapiens
gtggcatgatctcgg

SEQ ID NO: 632111 - DNA, 15 bp, Homo sapiens
tggcatgatctcggc

SEQ ID NO: 632112 - DNA, 15 bp, Homo sapiens
ggcatgatctcggct

SEQ ID NO: 632113 - DNA, 15 bp, Homo sapiens
gcatgatctcggctc

SEQ ID NO: 632114 - DNA, 15 bp, Homo sapiens
catgatctcggctca

SEQ ID NO: 632115 - DNA, 15 bp, Homo sapiens
atgatctcggctcag

SEQ ID NO: 632116 - DNA, 15 bp, Homo sapiens
tgatctcggctcagt

SEQ ID NO: 632117 - DNA, 15 bp, Homo sapiens
gatctcggctcagtg

SEQ ID NO: 632118 - DNA, 15 bp, Homo sapiens
atctcggctcagtgc

SEQ ID NO: 632119 - DNA, 15 bp, Homo sapiens
tctcggctcagtgca

SEQ ID NO: 632120 - DNA, 15 bp, Homo sapiens
ctcggctcagtgcaa

SEQ ID NO: 632121 - DNA, 15 bp, Homo sapiens
tcggctcagtgcaac

SEQ ID NO: 632122 - DNA, 15 bp, Homo sapiens
cggctcagtgcaacc

SEQ ID NO: 632123 - DNA, 15 bp, Homo sapiens
ggctcagtgcaacct

SEQ ID NO: 632124 - DNA, 15 bp, Homo sapiens
gctcagtgcaacctc

SEQ ID NO: 632125 - DNA, 15 bp, Homo sapiens
ctcagtgcaacctct

SEQ ID NO: 632126 - DNA, 15 bp, Homo sapiens
tcagtgcaacctctg

SEQ ID NO: 632127 - DNA, 15 bp, Homo sapiens
cagtgcaacctctgc

SEQ ID NO: 632128 - DNA, 15 bp, Homo sapiens
agtgcaacctctgcc

SEQ ID NO: 632129 - DNA, 15 bp, Homo sapiens
gtgcaacctctgcct

SEQ ID NO: 632130 - DNA, 15 bp, Homo sapiens
caagcgattctccta

SEQ ID NO: 632131 - DNA, 15 bp, Homo sapiens
aagcgattctcctac

SEQ ID NO: 632132 - DNA, 15 bp, Homo sapiens
agcgattctcctacc

SEQ ID NO: 632133 - DNA, 15 bp, Homo sapiens
gcgattctcctacct

SEQ ID NO: 632134 - DNA, 15 bp, Homo sapiens
cgattctcctacctc

SEQ ID NO: 632135 - DNA, 15 bp, Homo sapiens
gattctcctacctca

SEQ ID NO: 632136 - DNA, 15 bp, Homo sapiens
attctcctacctcat

SEQ ID NO: 632137 - DNA, 15 bp, Homo sapiens
ttctcctacctcatc

SEQ ID NO: 632138 - DNA, 15 bp, Homo sapiens
tctcctacctcatcc

SEQ ID NO: 632139 - DNA, 15 bp, Homo sapiens
ctcctacctcatccc

SEQ ID NO: 632140 - DNA, 15 bp, Homo sapiens
tcctacctcatcccc

SEQ ID NO: 632141 - DNA, 15 bp, Homo sapiens
cctacctcatccccc

SEQ ID NO: 632142 - DNA, 15 bp, Homo sapiens
ctacctcatccccct

SEQ ID NO: 632143 - DNA, 15 bp, Homo sapiens
tacctcatccccctg

SEQ ID NO: 632144 - DNA, 15 bp, Homo sapiens
acctcatccccctga

SEQ ID NO: 632145 - DNA, 15 bp, Homo sapiens
cctcatccccctgag

SEQ ID NO: 632146 - DNA, 15 bp, Homo sapiens
ctcatccccctgagt

SEQ ID NO: 632147 - DNA, 15 bp, Homo sapiens
tcatccccctgagta

SEQ ID NO: 632148 - DNA, 15 bp, Homo sapiens
catccccctgagtag

SEQ ID NO: 632149 - DNA, 15 bp, Homo sapiens
atccccctgagtagc

SEQ ID NO: 632150 - DNA, 15 bp, Homo sapiens
tccccctgagtagct

SEQ ID NO: 632151 - DNA, 15 bp, Homo sapiens
ccccctgagtagctg

SEQ ID NO: 632152 - DNA, 15 bp, Homo sapiens
cccctgagtagctgg

SEQ ID NO: 632153 - DNA, 15 bp, Homo sapiens
ccctgagtagctggg

SEQ ID NO: 632154 - DNA, 15 bp, Homo sapiens
cctgagtagctggga

SEQ ID NO: 632155 - DNA, 15 bp, Homo sapiens
ctgagtagctgggat

SEQ ID NO: 632156 - DNA, 15 bp, Homo sapiens
tgagtagctgggatt

SEQ ID NO: 632157 - DNA, 15 bp, Homo sapiens
ggattacaggcgcct

SEQ ID NO: 632158 - DNA, 15 bp, Homo sapiens
gattacaggcgcctg

SEQ ID NO: 632159 - DNA, 15 bp, Homo sapiens
attacaggcgcctgc

SEQ ID NO: 632160 - DNA, 15 bp, Homo sapiens
ttacaggcgcctgcc

SEQ ID NO: 632161 - DNA, 15 bp, Homo sapiens
tacaggcgcctgcca

SEQ ID NO: 632162 - DNA, 15 bp, Homo sapiens
acaggcgcctgccac

SEQ ID NO: 632163 - DNA, 15 bp, Homo sapiens
caggcgcctgccacc

SEQ ID NO: 632164 - DNA, 15 bp, Homo sapiens
aggcgcctgccacca

SEQ ID NO: 632165 - DNA, 15 bp, Homo sapiens
ggcgcctgccaccat

SEQ ID NO: 632166 - DNA, 15 bp, Homo sapiens
gcgcctgccaccatg

SEQ ID NO: 632167 - DNA, 15 bp, Homo sapiens
cgcctgccaccatgc

SEQ ID NO: 632168 - DNA, 15 bp, Homo sapiens
gcctgccaccatgcc

SEQ ID NO: 632169 - DNA, 15 bp, Homo sapiens
cctgccaccatgcct

SEQ ID NO: 632170 - DNA, 15 bp, Homo sapiens
ctgccaccatgcctg

SEQ ID NO: 632171 - DNA, 15 bp, Homo sapiens
tttttgtatttttaa

SEQ ID NO: 632172 - DNA, 15 bp, Homo sapiens
ttttgtatttttaat

SEQ ID NO: 632173 - DNA, 15 bp, Homo sapiens
tttgtatttttaata

SEQ ID NO: 632174 - DNA, 15 bp, Homo sapiens
ttgtatttttaatag

SEQ ID NO: 632175 - DNA, 15 bp, Homo sapiens
tgtatttttaataga

SEQ ID NO: 632176 - DNA, 15 bp, Homo sapiens
gtatttttaatagag

SEQ ID NO: 632177 - DNA, 15 bp, Homo sapiens
tatttttaatagaga

SEQ ID NO: 632178 - DNA, 15 bp, Homo sapiens
atttttaatagagac

SEQ ID NO: 632179 - DNA, 15 bp, Homo sapiens
tttttaatagagacg

SEQ ID NO: 632180 - DNA, 15 bp, Homo sapiens
ttttaatagagacga

SEQ ID NO: 632181 - DNA, 15 bp, Homo sapiens
tttaatagagacgag

SEQ ID NO: 632182 - DNA, 15 bp, Homo sapiens
ttaatagagacgagg

SEQ ID NO: 632183 - DNA, 15 bp, Homo sapiens
taatagagacgaggt

SEQ ID NO: 632184 - DNA, 15 bp, Homo sapiens
aatagagacgaggtt

SEQ ID NO: 632185 - DNA, 15 bp, Homo sapiens
atagagacgaggttt

SEQ ID NO: 632186 - DNA, 15 bp, Homo sapiens
tagagacgaggtttc

SEQ ID NO: 632187 - DNA, 15 bp, Homo sapiens
agagacgaggtttca

SEQ ID NO: 632188 - DNA, 15 bp, Homo sapiens
gagacgaggtttcac

SEQ ID NO: 632189 - DNA, 15 bp, Homo sapiens
agacgaggtttcacc

SEQ ID NO: 632190 - DNA, 15 bp, Homo sapiens
gacgaggtttcacca

SEQ ID NO: 632191 - DNA, 15 bp, Homo sapiens
acgaggtttcaccat

SEQ ID NO: 632192 - DNA, 15 bp, Homo sapiens
cgaggtttcaccatg

SEQ ID NO: 632193 - DNA, 15 bp, Homo sapiens
gaggtttcaccatgt

SEQ ID NO: 632194 - DNA, 15 bp, Homo sapiens
aggtttcaccatgtt

SEQ ID NO: 632195 - DNA, 15 bp, Homo sapiens
atgttggccaggcta

SEQ ID NO: 632196 - DNA, 15 bp, Homo sapiens
tgttggccaggctac

SEQ ID NO: 632197 - DNA, 15 bp, Homo sapiens
gttggccaggctact

SEQ ID NO: 632198 - DNA, 15 bp, Homo sapiens
ttggccaggctactc

SEQ ID NO: 632199 - DNA, 15 bp, Homo sapiens
tggccaggctactct

SEQ ID NO: 632200 - DNA, 15 bp, Homo sapiens
ggccaggctactctc

SEQ ID NO: 632201 - DNA, 15 bp, Homo sapiens
gccaggctactctcg

SEQ ID NO: 632202 - DNA, 15 bp, Homo sapiens
ccaggctactctcga

SEQ ID NO: 632203 - DNA, 15 bp, Homo sapiens
caggctactctcgaa

SEQ ID NO: 632204 - DNA, 15 bp, Homo sapiens
aggctactctcgaac

SEQ ID NO: 632205 - DNA, 15 bp, Homo sapiens
ggctactctcgaact

SEQ ID NO: 632206 - DNA, 15 bp, Homo sapiens
gctactctcgaactc

SEQ ID NO: 632207 - DNA, 15 bp, Homo sapiens
ctactctcgaactcc

SEQ ID NO: 632208 - DNA, 15 bp, Homo sapiens
tactctcgaactcct

SEQ ID NO: 632209 - DNA, 15 bp, Homo sapiens
actctcgaactcctg

SEQ ID NO: 632210 - DNA, 15 bp, Homo sapiens
ctctcgaactcctga

SEQ ID NO: 632211 - DNA, 15 bp, Homo sapiens
tctcgaactcctgat

SEQ ID NO: 632212 - DNA, 15 bp, Homo sapiens
ctcgaactcctgatc

SEQ ID NO: 632213 - DNA, 15 bp, Homo sapiens
tcgaactcctgatct

SEQ ID NO: 632214 - DNA, 15 bp, Homo sapiens
cgaactcctgatctc

SEQ ID NO: 632215 - DNA, 15 bp, Homo sapiens
gaactcctgatctca

SEQ ID NO: 632216 - DNA, 15 bp, Homo sapiens
aactcctgatctcag

SEQ ID NO: 632217 - DNA, 15 bp, Homo sapiens
actcctgatctcagg

SEQ ID NO: 632218 - DNA, 15 bp, Homo sapiens
ctcctgatctcaggt

SEQ ID NO: 632219 - DNA, 15 bp, Homo sapiens
tcctgatctcaggtg

SEQ ID NO: 632220 - DNA, 15 bp, Homo sapiens
cctgatctcaggtga

SEQ ID NO: 632221 - DNA, 15 bp, Homo sapiens
ctgatctcaggtgat

SEQ ID NO: 632222 - DNA, 15 bp, Homo sapiens
tgatctcaggtgatc

SEQ ID NO: 632223 - DNA, 15 bp, Homo sapiens
gatctcaggtgatcc

SEQ ID NO: 632224 - DNA, 15 bp, Homo sapiens
atctcaggtgatcca

SEQ ID NO: 632225 - DNA, 15 bp, Homo sapiens
tctcaggtgatccac

SEQ ID NO: 632226 - DNA, 15 bp, Homo sapiens
ctcaggtgatccacc

SEQ ID NO: 632227 - DNA, 15 bp, Homo sapiens
tcaggtgatccaccc

SEQ ID NO: 632228 - DNA, 15 bp, Homo sapiens
caggtgatccacccg

SEQ ID NO: 632229 - DNA, 15 bp, Homo sapiens
aggtgatccacccgc

SEQ ID NO: 632230 - DNA, 15 bp, Homo sapiens
ggtgatccacccgcc

SEQ ID NO: 632231 - DNA, 15 bp, Homo sapiens
gtgatccacccgcct

SEQ ID NO: 632232 - DNA, 15 bp, Homo sapiens
tgatccacccgcctt

SEQ ID NO: 632233 - DNA, 15 bp, Homo sapiens
gatccacccgccttg

SEQ ID NO: 632234 - DNA, 15 bp, Homo sapiens
atccacccgccttgg

SEQ ID NO: 632235 - DNA, 15 bp, Homo sapiens
tccacccgccttggc

SEQ ID NO: 632236 - DNA, 15 bp, Homo sapiens
ccacccgccttggcc

SEQ ID NO: 632237 - DNA, 15 bp, Homo sapiens
cacccgccttggcct

SEQ ID NO: 632238 - DNA, 15 bp, Homo sapiens
acccgccttggcctc

SEQ ID NO: 632239 - DNA, 15 bp, Homo sapiens
cccgccttggcctcc

SEQ ID NO: 632240 - DNA, 15 bp, Homo sapiens
ccgccttggcctccc

SEQ ID NO: 632241 - DNA, 15 bp, Homo sapiens
cgccttggcctccca

SEQ ID NO: 632242 - DNA, 15 bp, Homo sapiens
tgggattacaggcgt

SEQ ID NO: 632243 - DNA, 15 bp, Homo sapiens
gggattacaggcgtg

SEQ ID NO: 632244 - DNA, 15 bp, Homo sapiens
ggattacaggcgtga

SEQ ID NO: 632245 - DNA, 15 bp, Homo sapiens
gattacaggcgtgag

SEQ ID NO: 632246 - DNA, 15 bp, Homo sapiens
attacaggcgtgagc

SEQ ID NO: 632247 - DNA, 15 bp, Homo sapiens
ttacaggcgtgagcc

SEQ ID NO: 632248 - DNA, 15 bp, Homo sapiens
tacaggcgtgagcca

SEQ ID NO: 632249 - DNA, 15 bp, Homo sapiens
acaggcgtgagccac

SEQ ID NO: 632250 - DNA, 15 bp, Homo sapiens
caggcgtgagccact

SEQ ID NO: 632251 - DNA, 15 bp, Homo sapiens
aggcgtgagccactg

SEQ ID NO: 632252 - DNA, 15 bp, Homo sapiens
ggcgtgagccactgc

SEQ ID NO: 632253 - DNA, 15 bp, Homo sapiens
gcgtgagccactgcg

SEQ ID NO: 632254 - DNA, 15 bp, Homo sapiens
cgtgagccactgcgc

SEQ ID NO: 632255 - DNA, 15 bp, Homo sapiens
gtgagccactgcgcc

SEQ ID NO: 632256 - DNA, 15 bp, Homo sapiens
tgagccactgcgccc

SEQ ID NO: 632257 - DNA, 15 bp, Homo sapiens
gagccactgcgcccg

SEQ ID NO: 632258 - DNA, 15 bp, Homo sapiens
agccactgcgcccgg

SEQ ID NO: 632259 - DNA, 15 bp, Homo sapiens
gccactgcgcccggc

SEQ ID NO: 632260 - DNA, 15 bp, Homo sapiens
ccactgcgcccggcc

SEQ ID NO: 632261 - DNA, 15 bp, Homo sapiens
cactgcgcccggcct

SEQ ID NO: 632262 - DNA, 15 bp, Homo sapiens
actgcgcccggccta

SEQ ID NO: 632263 - DNA, 15 bp, Homo sapiens
ctgcgcccggcctaa

SEQ ID NO: 632264 - DNA, 15 bp, Homo sapiens
tgcgcccggcctaat

SEQ ID NO: 632265 - DNA, 15 bp, Homo sapiens
gcgcccggcctaata

SEQ ID NO: 632266 - DNA, 15 bp, Homo sapiens
cgcccggcctaatat

SEQ ID NO: 632267 - DNA, 15 bp, Homo sapiens
gcccggcctaatatt

SEQ ID NO: 632268 - DNA, 15 bp, Homo sapiens
cccggcctaatattt

SEQ ID NO: 632269 - DNA, 15 bp, Homo sapiens
ccggcctaatatttg

SEQ ID NO: 632270 - DNA, 15 bp, Homo sapiens
cggcctaatatttgt

SEQ ID NO: 632271 - DNA, 15 bp, Homo sapiens
ggcctaatatttgta

SEQ ID NO: 632272 - DNA, 15 bp, Homo sapiens
gcctaatatttgtat

SEQ ID NO: 632273 - DNA, 15 bp, Homo sapiens
cctaatatttgtatt

SEQ ID NO: 632274 - DNA, 15 bp, Homo sapiens
ctaatatttgtattt

SEQ ID NO: 632275 - DNA, 15 bp, Homo sapiens
taatatttgtatttt

SEQ ID NO: 632276 - DNA, 15 bp, Homo sapiens
aatatttgtattttt

SEQ ID NO: 632277 - DNA, 15 bp, Homo sapiens
atatttgtatttttt

SEQ ID NO: 632278 - DNA, 15 bp, Homo sapiens
tatttgtattttttg

SEQ ID NO: 632279 - DNA, 15 bp, Homo sapiens
atttgtattttttgt

SEQ ID NO: 632280 - DNA, 15 bp, Homo sapiens
tttgtattttttgta

SEQ ID NO: 632281 - DNA, 15 bp, Homo sapiens
ttgtattttttgtag

SEQ ID NO: 632282 - DNA, 15 bp, Homo sapiens
tgtattttttgtaga

SEQ ID NO: 632283 - DNA, 15 bp, Homo sapiens
gtattttttgtagag

SEQ ID NO: 632284 - DNA, 15 bp, Homo sapiens
tattttttgtagaga

SEQ ID NO: 632285 - DNA, 15 bp, Homo sapiens
attttttgtagagat

SEQ ID NO: 632286 - DNA, 15 bp, Homo sapiens
ttttttgtagagatg

SEQ ID NO: 632287 - DNA, 15 bp, Homo sapiens
tttttgtagagatgg

SEQ ID NO: 632288 - DNA, 15 bp, Homo sapiens
ttttgtagagatggt

SEQ ID NO: 632289 - DNA, 15 bp, Homo sapiens
tttgtagagatggtg

SEQ ID NO: 632290 - DNA, 15 bp, Homo sapiens
ttgtagagatggtgt

SEQ ID NO: 632291 - DNA, 15 bp, Homo sapiens
tgtagagatggtgtt

SEQ ID NO: 632292 - DNA, 15 bp, Homo sapiens
gtagagatggtgttt

SEQ ID NO: 632293 - DNA, 15 bp, Homo sapiens
tagagatggtgtttt

SEQ ID NO: 632294 - DNA, 15 bp, Homo sapiens
agagatggtgttttg

SEQ ID NO: 632295 - DNA, 15 bp, Homo sapiens
gagatggtgttttgc

SEQ ID NO: 632296 - DNA, 15 bp, Homo sapiens
agatggtgttttgcc

SEQ ID NO: 632297 - DNA, 15 bp, Homo sapiens
gatggtgttttgcca

SEQ ID NO: 632298 - DNA, 15 bp, Homo sapiens
atggtgttttgccat

SEQ ID NO: 632299 - DNA, 15 bp, Homo sapiens
tggtgttttgccatg

SEQ ID NO: 632300 - DNA, 15 bp, Homo sapiens
ggtgttttgccatgt

SEQ ID NO: 632301 - DNA, 15 bp, Homo sapiens
gtgttttgccatgtt

SEQ ID NO: 632302 - DNA, 15 bp, Homo sapiens
tgttttgccatgttg

SEQ ID NO: 632303 - DNA, 15 bp, Homo sapiens
gttttgccatgttgt

SEQ ID NO: 632304 - DNA, 15 bp, Homo sapiens
ttttgccatgttgtc

SEQ ID NO: 632305 - DNA, 15 bp, Homo sapiens
tttgccatgttgtcc

SEQ ID NO: 632306 - DNA, 15 bp, Homo sapiens
ttgccatgttgtcca

SEQ ID NO: 632307 - DNA, 15 bp, Homo sapiens
tgccatgttgtccag

SEQ ID NO: 632308 - DNA, 15 bp, Homo sapiens
gccatgttgtccagg

SEQ ID NO: 632309 - DNA, 15 bp, Homo sapiens
ccatgttgtccaggc

SEQ ID NO: 632310 - DNA, 15 bp, Homo sapiens
catgttgtccaggct

SEQ ID NO: 632311 - DNA, 15 bp, Homo sapiens
atgttgtccaggctg

SEQ ID NO: 632312 - DNA, 15 bp, Homo sapiens
tgttgtccaggctgg

SEQ ID NO: 632313 - DNA, 15 bp, Homo sapiens
gttgtccaggctggt

SEQ ID NO: 632314 - DNA, 15 bp, Homo sapiens
ttgtccaggctggtc

SEQ ID NO: 632315 - DNA, 15 bp, Homo sapiens
tgtccaggctggtct

SEQ ID NO: 632316 - DNA, 15 bp, Homo sapiens
gtccaggctggtctt

SEQ ID NO: 632317 - DNA, 15 bp, Homo sapiens
tccaggctggtcttg

SEQ ID NO: 632318 - DNA, 15 bp, Homo sapiens
ctggtcttgaactcc

SEQ ID NO: 632319 - DNA, 15 bp, Homo sapiens
tggtcttgaactcct

SEQ ID NO: 632320 - DNA, 15 bp, Homo sapiens
ggtcttgaactcctg

SEQ ID NO: 632321 - DNA, 15 bp, Homo sapiens
gtcttgaactcctga

SEQ ID NO: 632322 - DNA, 15 bp, Homo sapiens
tcttgaactcctgag

SEQ ID NO: 632323 - DNA, 15 bp, Homo sapiens
cttgaactcctgagc

SEQ ID NO: 632324 - DNA, 15 bp, Homo sapiens
ttgaactcctgagct

SEQ ID NO: 632325 - DNA, 15 bp, Homo sapiens
tgaactcctgagctc

SEQ ID NO: 632326 - DNA, 15 bp, Homo sapiens
gaactcctgagctca

SEQ ID NO: 632327 - DNA, 15 bp, Homo sapiens
aactcctgagctcaa

SEQ ID NO: 632328 - DNA, 15 bp, Homo sapiens
actcctgagctcaag

SEQ ID NO: 632329 - DNA, 15 bp, Homo sapiens
ctcctgagctcaagc

SEQ ID NO: 632330 - DNA, 15 bp, Homo sapiens
tcctgagctcaagcg

SEQ ID NO: 632331 - DNA, 15 bp, Homo sapiens
cctgagctcaagcga

SEQ ID NO: 632332 - DNA, 15 bp, Homo sapiens
ctgagctcaagcgat

SEQ ID NO: 632333 - DNA, 15 bp, Homo sapiens
tgagctcaagcgatc

SEQ ID NO: 632334 - DNA, 15 bp, Homo sapiens
gagctcaagcgatct

SEQ ID NO: 632335 - DNA, 15 bp, Homo sapiens
agctcaagcgatctg

SEQ ID NO: 632336 - DNA, 15 bp, Homo sapiens
gctcaagcgatctgc

SEQ ID NO: 632337 - DNA, 15 bp, Homo sapiens
ctcaagcgatctgcc

SEQ ID NO: 632338 - DNA, 15 bp, Homo sapiens
tcaagcgatctgccc

SEQ ID NO: 632339 - DNA, 15 bp, Homo sapiens
caagcgatctgcccg

SEQ ID NO: 632340 - DNA, 15 bp, Homo sapiens
aagcgatctgcccgc

SEQ ID NO: 632341 - DNA, 15 bp, Homo sapiens
agcgatctgcccgcc

SEQ ID NO: 632342 - DNA, 15 bp, Homo sapiens
gcgatctgcccgcct

SEQ ID NO: 632343 - DNA, 15 bp, Homo sapiens
cgatctgcccgcctc

SEQ ID NO: 632344 - DNA, 15 bp, Homo sapiens
gatctgcccgcctct

SEQ ID NO: 632345 - DNA, 15 bp, Homo sapiens
atctgcccgcctctg

SEQ ID NO: 632346 - DNA, 15 bp, Homo sapiens
tctgcccgcctctgc

SEQ ID NO: 632347 - DNA, 15 bp, Homo sapiens
ctgcccgcctctgct

SEQ ID NO: 632348 - DNA, 15 bp, Homo sapiens
tgcccgcctctgctt

SEQ ID NO: 632349 - DNA, 15 bp, Homo sapiens
gcccgcctctgcttc

SEQ ID NO: 632350 - DNA, 15 bp, Homo sapiens
cccgcctctgcttcc

SEQ ID NO: 632351 - DNA, 15 bp, Homo sapiens
ccgcctctgcttccc

SEQ ID NO: 632352 - DNA, 15 bp, Homo sapiens
cgcctctgcttccca

SEQ ID NO: 632353 - DNA, 15 bp, Homo sapiens
gcctctgcttcccaa

SEQ ID NO: 632354 - DNA, 15 bp, Homo sapiens
cctctgcttcccaaa

SEQ ID NO: 632355 - DNA, 15 bp, Homo sapiens
ctctgcttcccaaag

SEQ ID NO: 632356 - DNA, 15 bp, Homo sapiens
tctgcttcccaaagt

SEQ ID NO: 632357 - DNA, 15 bp, Homo sapiens
ctgcttcccaaagtg

SEQ ID NO: 632358 - DNA, 15 bp, Homo sapiens
tgcttcccaaagtgc

SEQ ID NO: 632359 - DNA, 15 bp, Homo sapiens
gcttcccaaagtgct

SEQ ID NO: 632360 - DNA, 15 bp, Homo sapiens
cttcccaaagtgctg

SEQ ID NO: 632361 - DNA, 15 bp, Homo sapiens
ttcccaaagtgctgg

SEQ ID NO: 632362 - DNA, 15 bp, Homo sapiens
ggcatgagccaccgt

SEQ ID NO: 632363 - DNA, 15 bp, Homo sapiens
gcatgagccaccgtg

SEQ ID NO: 632364 - DNA, 15 bp, Homo sapiens
catgagccaccgtgc

SEQ ID NO: 632365 - DNA, 15 bp, Homo sapiens
atgagccaccgtgcc

SEQ ID NO: 632366 - DNA, 15 bp, Homo sapiens
tgagccaccgtgcct

SEQ ID NO: 632367 - DNA, 15 bp, Homo sapiens
gagccaccgtgcctg

SEQ ID NO: 632368 - DNA, 15 bp, Homo sapiens
agccaccgtgcctgg

SEQ ID NO: 632369 - DNA, 15 bp, Homo sapiens
gccaccgtgcctggc

SEQ ID NO: 632370 - DNA, 15 bp, Homo sapiens
ccaccgtgcctggcc

SEQ ID NO: 632371 - DNA, 15 bp, Homo sapiens
caccgtgcctggcct

SEQ ID NO: 632372 - DNA, 15 bp, Homo sapiens
accgtgcctggccta

SEQ ID NO: 632373 - DNA, 15 bp, Homo sapiens
ccgtgcctggcctag

SEQ ID NO: 632374 - DNA, 15 bp, Homo sapiens
cgtgcctggcctagg

SEQ ID NO: 632375 - DNA, 15 bp, Homo sapiens
gtgcctggcctaggt

SEQ ID NO: 632376 - DNA, 15 bp, Homo sapiens
tgcctggcctaggta

SEQ ID NO: 632377 - DNA, 15 bp, Homo sapiens
gcctggcctaggtag

SEQ ID NO: 632378 - DNA, 15 bp, Homo sapiens
cctggcctaggtaga

SEQ ID NO: 632379 - DNA, 15 bp, Homo sapiens
ctggcctaggtagac

SEQ ID NO: 632380 - DNA, 15 bp, Homo sapiens
tggcctaggtagacg

SEQ ID NO: 632381 - DNA, 15 bp, Homo sapiens
ggcctaggtagacgc

SEQ ID NO: 632382 - DNA, 15 bp, Homo sapiens
gcctaggtagacgct

SEQ ID NO: 632383 - DNA, 15 bp, Homo sapiens
cctaggtagacgctt

SEQ ID NO: 632384 - DNA, 15 bp, Homo sapiens
ctaggtagacgcttt

SEQ ID NO: 632385 - DNA, 15 bp, Homo sapiens
taggtagacgctttt

SEQ ID NO: 632386 - DNA, 15 bp, Homo sapiens
aggtagacgctttta

SEQ ID NO: 632387 - DNA, 15 bp, Homo sapiens
ggtagacgcttttag

SEQ ID NO: 632388 - DNA, 15 bp, Homo sapiens
gtagacgcttttagc

SEQ ID NO: 632389 - DNA, 15 bp, Homo sapiens
tagacgcttttagct

SEQ ID NO: 632390 - DNA, 15 bp, Homo sapiens
agacgcttttagctt

SEQ ID NO: 632391 - DNA, 15 bp, Homo sapiens
gacgcttttagcttt

SEQ ID NO: 632392 - DNA, 15 bp, Homo sapiens
acgcttttagctttg

SEQ ID NO: 632393 - DNA, 15 bp, Homo sapiens
cgcttttagctttgg

SEQ ID NO: 632394 - DNA, 15 bp, Homo sapiens
gcttttagctttggg

SEQ ID NO: 632395 - DNA, 15 bp, Homo sapiens
cttttagctttgggg

SEQ ID NO: 632396 - DNA, 15 bp, Homo sapiens
ttttagctttggggt

SEQ ID NO: 632397 - DNA, 15 bp, Homo sapiens
tttagctttggggtg

SEQ ID NO: 632398 - DNA, 15 bp, Homo sapiens
ttagctttggggtgt

SEQ ID NO: 632399 - DNA, 15 bp, Homo sapiens
tagctttggggtgtg

SEQ ID NO: 632400 - DNA, 15 bp, Homo sapiens
agctttggggtgtga

SEQ ID NO: 632401 - DNA, 15 bp, Homo sapiens
gctttggggtgtgat

SEQ ID NO: 632402 - DNA, 15 bp, Homo sapiens
ctttggggtgtgatg

SEQ ID NO: 632403 - DNA, 15 bp, Homo sapiens
tttggggtgtgatgc

SEQ ID NO: 632404 - DNA, 15 bp, Homo sapiens
ttggggtgtgatgcc

SEQ ID NO: 632405 - DNA, 15 bp, Homo sapiens
tggggtgtgatgcct

SEQ ID NO: 632406 - DNA, 15 bp, Homo sapiens
ggggtgtgatgcctg

SEQ ID NO: 632407 - DNA, 15 bp, Homo sapiens
gggtgtgatgcctgc

SEQ ID NO: 632408 - DNA, 15 bp, Homo sapiens
ggtgtgatgcctgcc

SEQ ID NO: 632409 - DNA, 15 bp, Homo sapiens
gtgtgatgcctgccc

SEQ ID NO: 632410 - DNA, 15 bp, Homo sapiens
tgtgatgcctgcccc

SEQ ID NO: 632411 - DNA, 15 bp, Homo sapiens
gtgatgcctgcccca

SEQ ID NO: 632412 - DNA, 15 bp, Homo sapiens
tgatgcctgccccag

SEQ ID NO: 632413 - DNA, 15 bp, Homo sapiens
gatgcctgccccagt

SEQ ID NO: 632414 - DNA, 15 bp, Homo sapiens
atgcctgccccagta

SEQ ID NO: 632415 - DNA, 15 bp, Homo sapiens
tgcctgccccagtat

SEQ ID NO: 632416 - DNA, 15 bp, Homo sapiens
gcctgccccagtata

SEQ ID NO: 632417 - DNA, 15 bp, Homo sapiens
cctgccccagtatat

SEQ ID NO: 632418 - DNA, 15 bp, Homo sapiens
ctgccccagtatata

SEQ ID NO: 632419 - DNA, 15 bp, Homo sapiens
tgccccagtatatag

SEQ ID NO: 632420 - DNA, 15 bp, Homo sapiens
gccccagtatatagt

SEQ ID NO: 632421 - DNA, 15 bp, Homo sapiens
ccccagtatatagtg

SEQ ID NO: 632422 - DNA, 15 bp, Homo sapiens
cccagtatatagtga

SEQ ID NO: 632423 - DNA, 15 bp, Homo sapiens
ccagtatatagtgaa

SEQ ID NO: 632424 - DNA, 15 bp, Homo sapiens
cagtatatagtgaat

SEQ ID NO: 632425 - DNA, 15 bp, Homo sapiens
agtatatagtgaatt

SEQ ID NO: 632426 - DNA, 15 bp, Homo sapiens
gtatatagtgaattt

SEQ ID NO: 632427 - DNA, 15 bp, Homo sapiens
tatatagtgaattta

SEQ ID NO: 632428 - DNA, 15 bp, Homo sapiens
atatagtgaatttaa

SEQ ID NO: 632429 - DNA, 15 bp, Homo sapiens
tatagtgaatttaat

SEQ ID NO: 632430 - DNA, 15 bp, Homo sapiens
atagtgaatttaatt

SEQ ID NO: 632431 - DNA, 15 bp, Homo sapiens
tagtgaatttaatta

SEQ ID NO: 632432 - DNA, 15 bp, Homo sapiens
agtgaatttaattat

SEQ ID NO: 632433 - DNA, 15 bp, Homo sapiens
gtgaatttaattatt

SEQ ID NO: 632434 - DNA, 15 bp, Homo sapiens
tgaatttaattattg

SEQ ID NO: 632435 - DNA, 15 bp, Homo sapiens
gaatttaattattgc

SEQ ID NO: 632436 - DNA, 15 bp, Homo sapiens
aatttaattattgct

SEQ ID NO: 632437 - DNA, 15 bp, Homo sapiens
atttaattattgcta

SEQ ID NO: 632438 - DNA, 15 bp, Homo sapiens
tttaattattgctag

SEQ ID NO: 632439 - DNA, 15 bp, Homo sapiens
ttaattattgctaga

SEQ ID NO: 632440 - DNA, 15 bp, Homo sapiens
taattattgctagag

SEQ ID NO: 632441 - DNA, 15 bp, Homo sapiens
aattattgctagagc

SEQ ID NO: 632442 - DNA, 15 bp, Homo sapiens
attattgctagagct

SEQ ID NO: 632443 - DNA, 15 bp, Homo sapiens
ttattgctagagctg

SEQ ID NO: 632444 - DNA, 15 bp, Homo sapiens
tattgctagagctgg

SEQ ID NO: 632445 - DNA, 15 bp, Homo sapiens
attgctagagctggc

SEQ ID NO: 632446 - DNA, 15 bp, Homo sapiens
ttgctagagctggct

SEQ ID NO: 632447 - DNA, 15 bp, Homo sapiens
tgctagagctggctg

SEQ ID NO: 632448 - DNA, 15 bp, Homo sapiens
gctagagctggctgt

SEQ ID NO: 632449 - DNA, 15 bp, Homo sapiens
ctagagctggctgtt

SEQ ID NO: 632450 - DNA, 15 bp, Homo sapiens
tagagctggctgttt

SEQ ID NO: 632451 - DNA, 15 bp, Homo sapiens
agagctggctgtttg

SEQ ID NO: 632452 - DNA, 15 bp, Homo sapiens
gagctggctgtttgt

SEQ ID NO: 632453 - DNA, 15 bp, Homo sapiens
agctggctgtttgtt

SEQ ID NO: 632454 - DNA, 15 bp, Homo sapiens
gctggctgtttgtta

SEQ ID NO: 632455 - DNA, 15 bp, Homo sapiens
ctggctgtttgttag

SEQ ID NO: 632456 - DNA, 15 bp, Homo sapiens
tggctgtttgttagt

SEQ ID NO: 632457 - DNA, 15 bp, Homo sapiens
ggctgtttgttagtt

SEQ ID NO: 632458 - DNA, 15 bp, Homo sapiens
gctgtttgttagttt

SEQ ID NO: 632459 - DNA, 15 bp, Homo sapiens
ctgtttgttagtttt

SEQ ID NO: 632460 - DNA, 15 bp, Homo sapiens
tgtttgttagttttc

SEQ ID NO: 632461 - DNA, 15 bp, Homo sapiens
gtttgttagttttct

SEQ ID NO: 632462 - DNA, 15 bp, Homo sapiens
tttgttagttttctt

SEQ ID NO: 632463 - DNA, 15 bp, Homo sapiens
ttgttagttttcttt

SEQ ID NO: 632464 - DNA, 15 bp, Homo sapiens
tgttagttttctttg

SEQ ID NO: 632465 - DNA, 15 bp, Homo sapiens
gttagttttctttga

SEQ ID NO: 632466 - DNA, 15 bp, Homo sapiens
ttagttttctttgaa

SEQ ID NO: 632467 - DNA, 15 bp, Homo sapiens
tagttttctttgaac

SEQ ID NO: 632468 - DNA, 15 bp, Homo sapiens
agttttctttgaaca

SEQ ID NO: 632469 - DNA, 15 bp, Homo sapiens
gttttctttgaacat

SEQ ID NO: 632470 - DNA, 15 bp, Homo sapiens
ttttctttgaacata

SEQ ID NO: 632471 - DNA, 15 bp, Homo sapiens
tttctttgaacataa

SEQ ID NO: 632472 - DNA, 15 bp, Homo sapiens
ttctttgaacataag

SEQ ID NO: 632473 - DNA, 15 bp, Homo sapiens
tctttgaacataaga

SEQ ID NO: 632474 - DNA, 15 bp, Homo sapiens
ctttgaacataagat

SEQ ID NO: 632475 - DNA, 15 bp, Homo sapiens
tttgaacataagata

SEQ ID NO: 632476 - DNA, 15 bp, Homo sapiens
ttgaacataagatac

SEQ ID NO: 632477 - DNA, 15 bp, Homo sapiens
tgaacataagatact

SEQ ID NO: 632478 - DNA, 15 bp, Homo sapiens
gaacataagatactc

SEQ ID NO: 632479 - DNA, 15 bp, Homo sapiens
aacataagatactca

SEQ ID NO: 632480 - DNA, 15 bp, Homo sapiens
acataagatactcat

SEQ ID NO: 632481 - DNA, 15 bp, Homo sapiens
cataagatactcatt

SEQ ID NO: 632482 - DNA, 15 bp, Homo sapiens
ataagatactcattg

SEQ ID NO: 632483 - DNA, 15 bp, Homo sapiens
taagatactcattgt

SEQ ID NO: 632484 - DNA, 15 bp, Homo sapiens
aagatactcattgtt

SEQ ID NO: 632485 - DNA, 15 bp, Homo sapiens
agatactcattgttt

SEQ ID NO: 632486 - DNA, 15 bp, Homo sapiens
gatactcattgtttt

SEQ ID NO: 632487 - DNA, 15 bp, Homo sapiens
atactcattgttttt

SEQ ID NO: 632488 - DNA, 15 bp, Homo sapiens
tactcattgttttta

SEQ ID NO: 632489 - DNA, 15 bp, Homo sapiens
actcattgtttttag

SEQ ID NO: 632490 - DNA, 15 bp, Homo sapiens
ctcattgtttttagt

SEQ ID NO: 632491 - DNA, 15 bp, Homo sapiens
tcattgtttttagtt

SEQ ID NO: 632492 - DNA, 15 bp, Homo sapiens
cattgtttttagttt

SEQ ID NO: 632493 - DNA, 15 bp, Homo sapiens
attgtttttagtttg

SEQ ID NO: 632494 - DNA, 15 bp, Homo sapiens
ttgtttttagtttgc

SEQ ID NO: 632495 - DNA, 15 bp, Homo sapiens
tgtttttagtttgca

SEQ ID NO: 632496 - DNA, 15 bp, Homo sapiens
gtttttagtttgcaa

SEQ ID NO: 632497 - DNA, 15 bp, Homo sapiens
tttttagtttgcaaa

SEQ ID NO: 632498 - DNA, 15 bp, Homo sapiens
ttttagtttgcaaat

SEQ ID NO: 632499 - DNA, 15 bp, Homo sapiens
tttagtttgcaaatc

SEQ ID NO: 632500 - DNA, 15 bp, Homo sapiens
ttagtttgcaaatcc

SEQ ID NO: 632501 - DNA, 15 bp, Homo sapiens
tagtttgcaaatccc

SEQ ID NO: 632502 - DNA, 15 bp, Homo sapiens
agtttgcaaatccct

SEQ ID NO: 632503 - DNA, 15 bp, Homo sapiens
gtttgcaaatccctc

SEQ ID NO: 632504 - DNA, 15 bp, Homo sapiens
tttgcaaatccctct

SEQ ID NO: 632505 - DNA, 15 bp, Homo sapiens
ttgcaaatccctctt

SEQ ID NO: 632506 - DNA, 15 bp, Homo sapiens
tgcaaatccctcttc

SEQ ID NO: 632507 - DNA, 15 bp, Homo sapiens
gcaaatccctcttcc

SEQ ID NO: 632508 - DNA, 15 bp, Homo sapiens
caaatccctcttcct

SEQ ID NO: 632509 - DNA, 15 bp, Homo sapiens
aaatccctcttcctt

SEQ ID NO: 632510 - DNA, 15 bp, Homo sapiens
aatccctcttccttt

SEQ ID NO: 632511 - DNA, 15 bp, Homo sapiens
atccctcttcctttt

SEQ ID NO: 632512 - DNA, 15 bp, Homo sapiens
tccctcttccttttt

SEQ ID NO: 632513 - DNA, 15 bp, Homo sapiens
ccctcttccttttta

SEQ ID NO: 632514 - DNA, 15 bp, Homo sapiens
cctcttcctttttaa

SEQ ID NO: 632515 - DNA, 15 bp, Homo sapiens
ctcttcctttttaaa

SEQ ID NO: 632516 - DNA, 15 bp, Homo sapiens
tcttcctttttaaaa

SEQ ID NO: 632517 - DNA, 15 bp, Homo sapiens
cttcctttttaaaaa

SEQ ID NO: 632518 - DNA, 15 bp, Homo sapiens
ttcctttttaaaaaa

SEQ ID NO: 632519 - DNA, 15 bp, Homo sapiens
tcctttttaaaaaat

SEQ ID NO: 632520 - DNA, 15 bp, Homo sapiens
cctttttaaaaaatt

SEQ ID NO: 632521 - DNA, 15 bp, Homo sapiens
ctttttaaaaaattt

SEQ ID NO: 632522 - DNA, 15 bp, Homo sapiens
tttttaaaaaatttc

SEQ ID NO: 632523 - DNA, 15 bp, Homo sapiens
ttttaaaaaatttct

SEQ ID NO: 632524 - DNA, 15 bp, Homo sapiens
tttaaaaaatttctt

SEQ ID NO: 632525 - DNA, 15 bp, Homo sapiens
ttaaaaaatttcttt

SEQ ID NO: 632526 - DNA, 15 bp, Homo sapiens
taaaaaatttctttc

SEQ ID NO: 632527 - DNA, 15 bp, Homo sapiens
aaaaaatttctttcc

SEQ ID NO: 632528 - DNA, 15 bp, Homo sapiens
aaaaatttctttccc

SEQ ID NO: 632529 - DNA, 15 bp, Homo sapiens
aaaatttctttccct

SEQ ID NO: 632530 - DNA, 15 bp, Homo sapiens
aaatttctttccctt

SEQ ID NO: 632531 - DNA, 15 bp, Homo sapiens
aatttctttccctta

SEQ ID NO: 632532 - DNA, 15 bp, Homo sapiens
atttctttcccttaa

SEQ ID NO: 632533 - DNA, 15 bp, Homo sapiens
tttctttcccttaaa

SEQ ID NO: 632534 - DNA, 15 bp, Homo sapiens
ttctttcccttaaat

SEQ ID NO: 632535 - DNA, 15 bp, Homo sapiens
tctttcccttaaatt

SEQ ID NO: 632536 - DNA, 15 bp, Homo sapiens
ctttcccttaaattg

SEQ ID NO: 632537 - DNA, 15 bp, Homo sapiens
tttcccttaaattgt

SEQ ID NO: 632538 - DNA, 15 bp, Homo sapiens
ttcccttaaattgtt

SEQ ID NO: 632539 - DNA, 15 bp, Homo sapiens
tcccttaaattgttt

SEQ ID NO: 632540 - DNA, 15 bp, Homo sapiens
cccttaaattgtttg

SEQ ID NO: 632541 - DNA, 15 bp, Homo sapiens
ccttaaattgtttgc

SEQ ID NO: 632542 - DNA, 15 bp, Homo sapiens
cttaaattgtttgca

SEQ ID NO: 632543 - DNA, 15 bp, Homo sapiens
ttaaattgtttgcat

SEQ ID NO: 632544 - DNA, 15 bp, Homo sapiens
taaattgtttgcatg

SEQ ID NO: 632545 - DNA, 15 bp, Homo sapiens
aaattgtttgcatgt

SEQ ID NO: 632546 - DNA, 15 bp, Homo sapiens
aattgtttgcatgtt

SEQ ID NO: 632547 - DNA, 15 bp, Homo sapiens
attgtttgcatgtta

SEQ ID NO: 632548 - DNA, 15 bp, Homo sapiens
ttgtttgcatgttag

SEQ ID NO: 632549 - DNA, 15 bp, Homo sapiens
tgtttgcatgttagc

SEQ ID NO: 632550 - DNA, 15 bp, Homo sapiens
gtttgcatgttagca

SEQ ID NO: 632551 - DNA, 15 bp, Homo sapiens
tttgcatgttagcaa

SEQ ID NO: 632552 - DNA, 15 bp, Homo sapiens
ttgcatgttagcaat

SEQ ID NO: 632553 - DNA, 15 bp, Homo sapiens
tgcatgttagcaata

SEQ ID NO: 632554 - DNA, 15 bp, Homo sapiens
gcatgttagcaataa

SEQ ID NO: 632555 - DNA, 15 bp, Homo sapiens
catgttagcaataac

SEQ ID NO: 632556 - DNA, 15 bp, Homo sapiens
atgttagcaataaca

SEQ ID NO: 632557 - DNA, 15 bp, Homo sapiens
tgttagcaataacaa

SEQ ID NO: 632558 - DNA, 15 bp, Homo sapiens
gttagcaataacaaa

SEQ ID NO: 632559 - DNA, 15 bp, Homo sapiens
ttagcaataacaaat

SEQ ID NO: 632560 - DNA, 15 bp, Homo sapiens
tagcaataacaaatg

SEQ ID NO: 632561 - DNA, 15 bp, Homo sapiens
agcaataacaaatgc

SEQ ID NO: 632562 - DNA, 15 bp, Homo sapiens
gcaataacaaatgct

SEQ ID NO: 632563 - DNA, 15 bp, Homo sapiens
caataacaaatgctt

SEQ ID NO: 632564 - DNA, 15 bp, Homo sapiens
aataacaaatgctta

SEQ ID NO: 632565 - DNA, 15 bp, Homo sapiens
ataacaaatgcttaa

SEQ ID NO: 632566 - DNA, 15 bp, Homo sapiens
taacaaatgcttaaa

SEQ ID NO: 632567 - DNA, 15 bp, Homo sapiens
aacaaatgcttaaat

SEQ ID NO: 632568 - DNA, 15 bp, Homo sapiens
acaaatgcttaaatg

SEQ ID NO: 632569 - DNA, 15 bp, Homo sapiens
caaatgcttaaatgg

SEQ ID NO: 632570 - DNA, 15 bp, Homo sapiens
aaatgcttaaatggt

SEQ ID NO: 632571 - DNA, 15 bp, Homo sapiens
aatgcttaaatggtg

SEQ ID NO: 632572 - DNA, 15 bp, Homo sapiens
atgcttaaatggtgc

SEQ ID NO: 632573 - DNA, 15 bp, Homo sapiens
tgcttaaatggtgct

SEQ ID NO: 632574 - DNA, 15 bp, Homo sapiens
gcttaaatggtgcta

SEQ ID NO: 632575 - DNA, 15 bp, Homo sapiens
cttaaatggtgctat

SEQ ID NO: 632576 - DNA, 15 bp, Homo sapiens
ttaaatggtgctatg

SEQ ID NO: 632577 - DNA, 15 bp, Homo sapiens
taaatggtgctatgt

SEQ ID NO: 632578 - DNA, 15 bp, Homo sapiens
aaatggtgctatgtg

SEQ ID NO: 632579 - DNA, 15 bp, Homo sapiens
aatggtgctatgtgc

SEQ ID NO: 632580 - DNA, 15 bp, Homo sapiens
atggtgctatgtgct

SEQ ID NO: 632581 - DNA, 15 bp, Homo sapiens
tggtgctatgtgcta

SEQ ID NO: 632582 - DNA, 15 bp, Homo sapiens
ggtgctatgtgctag

SEQ ID NO: 632583 - DNA, 15 bp, Homo sapiens
gtgctatgtgctaga

SEQ ID NO: 632584 - DNA, 15 bp, Homo sapiens
tgctatgtgctagat

SEQ ID NO: 632585 - DNA, 15 bp, Homo sapiens
gctatgtgctagata

SEQ ID NO: 632586 - DNA, 15 bp, Homo sapiens
ctatgtgctagatac

SEQ ID NO: 632587 - DNA, 15 bp, Homo sapiens
tatgtgctagatact

SEQ ID NO: 632588 - DNA, 15 bp, Homo sapiens
atgtgctagatactc

SEQ ID NO: 632589 - DNA, 15 bp, Homo sapiens
tgtgctagatactct

SEQ ID NO: 632590 - DNA, 15 bp, Homo sapiens
gtgctagatactctt

SEQ ID NO: 632591 - DNA, 15 bp, Homo sapiens
tgctagatactcttc

SEQ ID NO: 632592 - DNA, 15 bp, Homo sapiens
gctagatactcttct

SEQ ID NO: 632593 - DNA, 15 bp, Homo sapiens
ctagatactcttcta

SEQ ID NO: 632594 - DNA, 15 bp, Homo sapiens
tagatactcttctaa

SEQ ID NO: 632595 - DNA, 15 bp, Homo sapiens
agatactcttctaag

SEQ ID NO: 632596 - DNA, 15 bp, Homo sapiens
gatactcttctaagc

SEQ ID NO: 632597 - DNA, 15 bp, Homo sapiens
atactcttctaagcc

SEQ ID NO: 632598 - DNA, 15 bp, Homo sapiens
tactcttctaagccc

SEQ ID NO: 632599 - DNA, 15 bp, Homo sapiens
actcttctaagccct

SEQ ID NO: 632600 - DNA, 15 bp, Homo sapiens
ctcttctaagccctg

SEQ ID NO: 632601 - DNA, 15 bp, Homo sapiens
tcttctaagccctgt

SEQ ID NO: 632602 - DNA, 15 bp, Homo sapiens
cttctaagccctgtt

SEQ ID NO: 632603 - DNA, 15 bp, Homo sapiens
ttctaagccctgtta

SEQ ID NO: 632604 - DNA, 15 bp, Homo sapiens
tctaagccctgttat

SEQ ID NO: 632605 - DNA, 15 bp, Homo sapiens
ctaagccctgttatg

SEQ ID NO: 632606 - DNA, 15 bp, Homo sapiens
taagccctgttatgt

SEQ ID NO: 632607 - DNA, 15 bp, Homo sapiens
aagccctgttatgta

SEQ ID NO: 632608 - DNA, 15 bp, Homo sapiens
agccctgttatgtat

SEQ ID NO: 632609 - DNA, 15 bp, Homo sapiens
gccctgttatgtata

SEQ ID NO: 632610 - DNA, 15 bp, Homo sapiens
ccctgttatgtatat

SEQ ID NO: 632611 - DNA, 15 bp, Homo sapiens
cctgttatgtatatt

SEQ ID NO: 632612 - DNA, 15 bp, Homo sapiens
ctgttatgtatatta

SEQ ID NO: 632613 - DNA, 15 bp, Homo sapiens
tgttatgtatattaa

SEQ ID NO: 632614 - DNA, 15 bp, Homo sapiens
gttatgtatattaac

SEQ ID NO: 632615 - DNA, 15 bp, Homo sapiens
ttatgtatattaact

SEQ ID NO: 632616 - DNA, 15 bp, Homo sapiens
tatgtatattaacta

SEQ ID NO: 632617 - DNA, 15 bp, Homo sapiens
atgtatattaactaa

SEQ ID NO: 632618 - DNA, 15 bp, Homo sapiens
tgtatattaactaat

SEQ ID NO: 632619 - DNA, 15 bp, Homo sapiens
gtatattaactaatt

SEQ ID NO: 632620 - DNA, 15 bp, Homo sapiens
tatattaactaattt

SEQ ID NO: 632621 - DNA, 15 bp, Homo sapiens
atattaactaatttt

SEQ ID NO: 632622 - DNA, 15 bp, Homo sapiens
tattaactaattttt

SEQ ID NO: 632623 - DNA, 15 bp, Homo sapiens
attaactaatttttt

SEQ ID NO: 632624 - DNA, 15 bp, Homo sapiens
ttaactaatttttta

SEQ ID NO: 632625 - DNA, 15 bp, Homo sapiens
taactaattttttaa

SEQ ID NO: 632626 - DNA, 15 bp, Homo sapiens
aactaattttttaaa

SEQ ID NO: 632627 - DNA, 15 bp, Homo sapiens
actaattttttaaat

SEQ ID NO: 632628 - DNA, 15 bp, Homo sapiens
ctaattttttaaatt

SEQ ID NO: 632629 - DNA, 15 bp, Homo sapiens
taattttttaaatta

SEQ ID NO: 632630 - DNA, 15 bp, Homo sapiens
aattttttaaattac

SEQ ID NO: 632631 - DNA, 15 bp, Homo sapiens
attttttaaattaca

SEQ ID NO: 632632 - DNA, 15 bp, Homo sapiens
ttttttaaattacac

SEQ ID NO: 632633 - DNA, 15 bp, Homo sapiens
tttttaaattacaca

SEQ ID NO: 632634 - DNA, 15 bp, Homo sapiens
ttttaaattacacaa

SEQ ID NO: 632635 - DNA, 15 bp, Homo sapiens
tttaaattacacaaa

SEQ ID NO: 632636 - DNA, 15 bp, Homo sapiens
ttaaattacacaaat

SEQ ID NO: 632637 - DNA, 15 bp, Homo sapiens
taaattacacaaatc

SEQ ID NO: 632638 - DNA, 15 bp, Homo sapiens
aaattacacaaatca

SEQ ID NO: 632639 - DNA, 15 bp, Homo sapiens
aattacacaaatcag

SEQ ID NO: 632640 - DNA, 15 bp, Homo sapiens
attacacaaatcaga

SEQ ID NO: 632641 - DNA, 15 bp, Homo sapiens
ttacacaaatcagag

SEQ ID NO: 632642 - DNA, 15 bp, Homo sapiens
tacacaaatcagaga

SEQ ID NO: 632643 - DNA, 15 bp, Homo sapiens
acacaaatcagagag

SEQ ID NO: 632644 - DNA, 15 bp, Homo sapiens
cacaaatcagagagg

SEQ ID NO: 632645 - DNA, 15 bp, Homo sapiens
acaaatcagagaggt

SEQ ID NO: 632646 - DNA, 15 bp, Homo sapiens
caaatcagagaggtt

SEQ ID NO: 632647 - DNA, 15 bp, Homo sapiens
aaatcagagaggtta

SEQ ID NO: 632648 - DNA, 15 bp, Homo sapiens
aatcagagaggttaa

SEQ ID NO: 632649 - DNA, 15 bp, Homo sapiens
atcagagaggttaag

SEQ ID NO: 632650 - DNA, 15 bp, Homo sapiens
tcagagaggttaagt

SEQ ID NO: 632651 - DNA, 15 bp, Homo sapiens
cagagaggttaagta

SEQ ID NO: 632652 - DNA, 15 bp, Homo sapiens
agagaggttaagtaa

SEQ ID NO: 632653 - DNA, 15 bp, Homo sapiens
gagaggttaagtaac

SEQ ID NO: 632654 - DNA, 15 bp, Homo sapiens
agaggttaagtaact

SEQ ID NO: 632655 - DNA, 15 bp, Homo sapiens
gaggttaagtaactt

SEQ ID NO: 632656 - DNA, 15 bp, Homo sapiens
aggttaagtaacttg

SEQ ID NO: 632657 - DNA, 15 bp, Homo sapiens
ggttaagtaacttgc

SEQ ID NO: 632658 - DNA, 15 bp, Homo sapiens
gttaagtaacttgcc

SEQ ID NO: 632659 - DNA, 15 bp, Homo sapiens
ttaagtaacttgccc

SEQ ID NO: 632660 - DNA, 15 bp, Homo sapiens
taagtaacttgccca

SEQ ID NO: 632661 - DNA, 15 bp, Homo sapiens
aagtaacttgcccaa

SEQ ID NO: 632662 - DNA, 15 bp, Homo sapiens
agtaacttgcccaag

SEQ ID NO: 632663 - DNA, 15 bp, Homo sapiens
gtaacttgcccaaga

SEQ ID NO: 632664 - DNA, 15 bp, Homo sapiens
taacttgcccaagat

SEQ ID NO: 632665 - DNA, 15 bp, Homo sapiens
aacttgcccaagatt

SEQ ID NO: 632666 - DNA, 15 bp, Homo sapiens
acttgcccaagatta

SEQ ID NO: 632667 - DNA, 15 bp, Homo sapiens
cttgcccaagattac

SEQ ID NO: 632668 - DNA, 15 bp, Homo sapiens
ttgcccaagattacc

SEQ ID NO: 632669 - DNA, 15 bp, Homo sapiens
tgcccaagattaccc

SEQ ID NO: 632670 - DNA, 15 bp, Homo sapiens
gcccaagattaccca

SEQ ID NO: 632671 - DNA, 15 bp, Homo sapiens
cccaagattacccaa

SEQ ID NO: 632672 - DNA, 15 bp, Homo sapiens
ccaagattacccaac

SEQ ID NO: 632673 - DNA, 15 bp, Homo sapiens
caagattacccaaca

SEQ ID NO: 632674 - DNA, 15 bp, Homo sapiens
aagattacccaacaa

SEQ ID NO: 632675 - DNA, 15 bp, Homo sapiens
agattacccaacaat

SEQ ID NO: 632676 - DNA, 15 bp, Homo sapiens
gattacccaacaata

SEQ ID NO: 632677 - DNA, 15 bp, Homo sapiens
attacccaacaatac

SEQ ID NO: 632678 - DNA, 15 bp, Homo sapiens
ttacccaacaatact

SEQ ID NO: 632679 - DNA, 15 bp, Homo sapiens
tacccaacaatacta

SEQ ID NO: 632680 - DNA, 15 bp, Homo sapiens
acccaacaatactag

SEQ ID NO: 632681 - DNA, 15 bp, Homo sapiens
cccaacaatactagg

SEQ ID NO: 632682 - DNA, 15 bp, Homo sapiens
ccaacaatactagga

SEQ ID NO: 632683 - DNA, 15 bp, Homo sapiens
caacaatactaggat

SEQ ID NO: 632684 - DNA, 15 bp, Homo sapiens
aacaatactaggatt

SEQ ID NO: 632685 - DNA, 15 bp, Homo sapiens
acaatactaggattt

SEQ ID NO: 632686 - DNA, 15 bp, Homo sapiens
caatactaggatttg

SEQ ID NO: 632687 - DNA, 15 bp, Homo sapiens
aatactaggatttga

SEQ ID NO: 632688 - DNA, 15 bp, Homo sapiens
atactaggatttgaa

SEQ ID NO: 632689 - DNA, 15 bp, Homo sapiens
tactaggatttgaac

SEQ ID NO: 632690 - DNA, 15 bp, Homo sapiens
actaggatttgaacc

SEQ ID NO: 632691 - DNA, 15 bp, Homo sapiens
ctaggatttgaacct

SEQ ID NO: 632692 - DNA, 15 bp, Homo sapiens
taggatttgaaccta

SEQ ID NO: 632693 - DNA, 15 bp, Homo sapiens
aggatttgaacctaa

SEQ ID NO: 632694 - DNA, 15 bp, Homo sapiens
ggatttgaacctaag

SEQ ID NO: 632695 - DNA, 15 bp, Homo sapiens
gatttgaacctaagt

SEQ ID NO: 632696 - DNA, 15 bp, Homo sapiens
atttgaacctaagtt

SEQ ID NO: 632697 - DNA, 15 bp, Homo sapiens
tttgaacctaagttt

SEQ ID NO: 632698 - DNA, 15 bp, Homo sapiens
ttgaacctaagtttg

SEQ ID NO: 632699 - DNA, 15 bp, Homo sapiens
tgaacctaagtttgt

SEQ ID NO: 632700 - DNA, 15 bp, Homo sapiens
gaacctaagtttgtc

SEQ ID NO: 632701 - DNA, 15 bp, Homo sapiens
aacctaagtttgtct

SEQ ID NO: 632702 - DNA, 15 bp, Homo sapiens
acctaagtttgtctc

SEQ ID NO: 632703 - DNA, 15 bp, Homo sapiens
cctaagtttgtctca

SEQ ID NO: 632704 - DNA, 15 bp, Homo sapiens
ctaagtttgtctcac

SEQ ID NO: 632705 - DNA, 15 bp, Homo sapiens
taagtttgtctcacc

SEQ ID NO: 632706 - DNA, 15 bp, Homo sapiens
aagtttgtctcaccc

SEQ ID NO: 632707 - DNA, 15 bp, Homo sapiens
agtttgtctcacccc

SEQ ID NO: 632708 - DNA, 15 bp, Homo sapiens
gtttgtctcacccca

SEQ ID NO: 632709 - DNA, 15 bp, Homo sapiens
tttgtctcaccccag

SEQ ID NO: 632710 - DNA, 15 bp, Homo sapiens
ttgtctcaccccaga

SEQ ID NO: 632711 - DNA, 15 bp, Homo sapiens
tgtctcaccccagat

SEQ ID NO: 632712 - DNA, 15 bp, Homo sapiens
gtctcaccccagatt

SEQ ID NO: 632713 - DNA, 15 bp, Homo sapiens
tctcaccccagattc

SEQ ID NO: 632714 - DNA, 15 bp, Homo sapiens
ctcaccccagattct

SEQ ID NO: 632715 - DNA, 15 bp, Homo sapiens
tcaccccagattctg

SEQ ID NO: 632716 - DNA, 15 bp, Homo sapiens
caccccagattctgc

SEQ ID NO: 632717 - DNA, 15 bp, Homo sapiens
accccagattctgct

SEQ ID NO: 632718 - DNA, 15 bp, Homo sapiens
ccccagattctgctc

SEQ ID NO: 632719 - DNA, 15 bp, Homo sapiens
cccagattctgctct

SEQ ID NO: 632720 - DNA, 15 bp, Homo sapiens
ccagattctgctctt

SEQ ID NO: 632721 - DNA, 15 bp, Homo sapiens
cagattctgctctta

SEQ ID NO: 632722 - DNA, 15 bp, Homo sapiens
agattctgctcttaa

SEQ ID NO: 632723 - DNA, 15 bp, Homo sapiens
gattctgctcttaat

SEQ ID NO: 632724 - DNA, 15 bp, Homo sapiens
attctgctcttaatc

SEQ ID NO: 632725 - DNA, 15 bp, Homo sapiens
ttctgctcttaatct

SEQ ID NO: 632726 - DNA, 15 bp, Homo sapiens
tctgctcttaatctc

SEQ ID NO: 632727 - DNA, 15 bp, Homo sapiens
ctgctcttaatctct

SEQ ID NO: 632728 - DNA, 15 bp, Homo sapiens
tgctcttaatctcta

SEQ ID NO: 632729 - DNA, 15 bp, Homo sapiens
gctcttaatctctaa

SEQ ID NO: 632730 - DNA, 15 bp, Homo sapiens
ctcttaatctctaaa

SEQ ID NO: 632731 - DNA, 15 bp, Homo sapiens
tcttaatctctaaac

SEQ ID NO: 632732 - DNA, 15 bp, Homo sapiens
cttaatctctaaact

SEQ ID NO: 632733 - DNA, 15 bp, Homo sapiens
ttaatctctaaactt

SEQ ID NO: 632734 - DNA, 15 bp, Homo sapiens
taatctctaaacttt

SEQ ID NO: 632735 - DNA, 15 bp, Homo sapiens
aatctctaaactttt

SEQ ID NO: 632736 - DNA, 15 bp, Homo sapiens
atctctaaactttta

SEQ ID NO: 632737 - DNA, 15 bp, Homo sapiens
tctctaaacttttaa

SEQ ID NO: 632738 - DNA, 15 bp, Homo sapiens
ctctaaacttttaag

SEQ ID NO: 632739 - DNA, 15 bp, Homo sapiens
tctaaacttttaagt

SEQ ID NO: 632740 - DNA, 15 bp, Homo sapiens
ctaaacttttaagtt

SEQ ID NO: 632741 - DNA, 15 bp, Homo sapiens
taaacttttaagtta

SEQ ID NO: 632742 - DNA, 15 bp, Homo sapiens
aaacttttaagttag

SEQ ID NO: 632743 - DNA, 15 bp, Homo sapiens
aacttttaagttagt

SEQ ID NO: 632744 - DNA, 15 bp, Homo sapiens
acttttaagttagta

SEQ ID NO: 632745 - DNA, 15 bp, Homo sapiens
cttttaagttagtag

SEQ ID NO: 632746 - DNA, 15 bp, Homo sapiens
ttttaagttagtagt

SEQ ID NO: 632747 - DNA, 15 bp, Homo sapiens
tttaagttagtagtg

SEQ ID NO: 632748 - DNA, 15 bp, Homo sapiens
ttaagttagtagtga

SEQ ID NO: 632749 - DNA, 15 bp, Homo sapiens
taagttagtagtgac

SEQ ID NO: 632750 - DNA, 15 bp, Homo sapiens
aagttagtagtgaca

SEQ ID NO: 632751 - DNA, 15 bp, Homo sapiens
agttagtagtgacaa

SEQ ID NO: 632752 - DNA, 15 bp, Homo sapiens
gttagtagtgacaat

SEQ ID NO: 632753 - DNA, 15 bp, Homo sapiens
ttagtagtgacaata

SEQ ID NO: 632754 - DNA, 15 bp, Homo sapiens
tagtagtgacaatag

SEQ ID NO: 632755 - DNA, 15 bp, Homo sapiens
agtagtgacaatagt

SEQ ID NO: 632756 - DNA, 15 bp, Homo sapiens
gtagtgacaatagta

SEQ ID NO: 632757 - DNA, 15 bp, Homo sapiens
tagtgacaatagtag

SEQ ID NO: 632758 - DNA, 15 bp, Homo sapiens
agtgacaatagtagg

SEQ ID NO: 632759 - DNA, 15 bp, Homo sapiens
gtgacaatagtaggt

SEQ ID NO: 632760 - DNA, 15 bp, Homo sapiens
tgacaatagtaggta

SEQ ID NO: 632761 - DNA, 15 bp, Homo sapiens
gacaatagtaggtat

SEQ ID NO: 632762 - DNA, 15 bp, Homo sapiens
acaatagtaggtatt

SEQ ID NO: 632763 - DNA, 15 bp, Homo sapiens
caatagtaggtattt

SEQ ID NO: 632764 - DNA, 15 bp, Homo sapiens
aatagtaggtattta

SEQ ID NO: 632765 - DNA, 15 bp, Homo sapiens
atagtaggtatttat

SEQ ID NO: 632766 - DNA, 15 bp, Homo sapiens
tagtaggtatttatt

SEQ ID NO: 632767 - DNA, 15 bp, Homo sapiens
agtaggtatttattg

SEQ ID NO: 632768 - DNA, 15 bp, Homo sapiens
gtaggtatttattga

SEQ ID NO: 632769 - DNA, 15 bp, Homo sapiens
taggtatttattgaa

SEQ ID NO: 632770 - DNA, 15 bp, Homo sapiens
aggtatttattgaat

SEQ ID NO: 632771 - DNA, 15 bp, Homo sapiens
ggtatttattgaata

SEQ ID NO: 632772 - DNA, 15 bp, Homo sapiens
gtatttattgaatac

SEQ ID NO: 632773 - DNA, 15 bp, Homo sapiens
tatttattgaatact

SEQ ID NO: 632774 - DNA, 15 bp, Homo sapiens
atttattgaatactt

SEQ ID NO: 632775 - DNA, 15 bp, Homo sapiens
tttattgaatactta

SEQ ID NO: 632776 - DNA, 15 bp, Homo sapiens
ttattgaatacttaa

SEQ ID NO: 632777 - DNA, 15 bp, Homo sapiens
tattgaatacttaac

SEQ ID NO: 632778 - DNA, 15 bp, Homo sapiens
attgaatacttaact

SEQ ID NO: 632779 - DNA, 15 bp, Homo sapiens
ttgaatacttaacta

SEQ ID NO: 632780 - DNA, 15 bp, Homo sapiens
tgaatacttaactat

SEQ ID NO: 632781 - DNA, 15 bp, Homo sapiens
gaatacttaactatg

SEQ ID NO: 632782 - DNA, 15 bp, Homo sapiens
aatacttaactatgt

SEQ ID NO: 632783 - DNA, 15 bp, Homo sapiens
atacttaactatgtt

SEQ ID NO: 632784 - DNA, 15 bp, Homo sapiens
tacttaactatgttt

SEQ ID NO: 632785 - DNA, 15 bp, Homo sapiens
acttaactatgtttt

SEQ ID NO: 632786 - DNA, 15 bp, Homo sapiens
cttaactatgtttta

SEQ ID NO: 632787 - DNA, 15 bp, Homo sapiens
ttaactatgttttag

SEQ ID NO: 632788 - DNA, 15 bp, Homo sapiens
taactatgttttagg

SEQ ID NO: 632789 - DNA, 15 bp, Homo sapiens
aactatgttttaggc

SEQ ID NO: 632790 - DNA, 15 bp, Homo sapiens
actatgttttaggcg

SEQ ID NO: 632791 - DNA, 15 bp, Homo sapiens
ctatgttttaggcgt

SEQ ID NO: 632792 - DNA, 15 bp, Homo sapiens
tatgttttaggcgtt

SEQ ID NO: 632793 - DNA, 15 bp, Homo sapiens
atgttttaggcgttg

SEQ ID NO: 632794 - DNA, 15 bp, Homo sapiens
tgttttaggcgttga

SEQ ID NO: 632795 - DNA, 15 bp, Homo sapiens
gttttaggcgttgaa

SEQ ID NO: 632796 - DNA, 15 bp, Homo sapiens
ttttaggcgttgaag

SEQ ID NO: 632797 - DNA, 15 bp, Homo sapiens
tttaggcgttgaagt

SEQ ID NO: 632798 - DNA, 15 bp, Homo sapiens
ttaggcgttgaagta

SEQ ID NO: 632799 - DNA, 15 bp, Homo sapiens
taggcgttgaagtaa

SEQ ID NO: 632800 - DNA, 15 bp, Homo sapiens
aggcgttgaagtaaa

SEQ ID NO: 632801 - DNA, 15 bp, Homo sapiens
ggcgttgaagtaaat

SEQ ID NO: 632802 - DNA, 15 bp, Homo sapiens
gcgttgaagtaaata

SEQ ID NO: 632803 - DNA, 15 bp, Homo sapiens
cgttgaagtaaatat

SEQ ID NO: 632804 - DNA, 15 bp, Homo sapiens
gttgaagtaaatatt

SEQ ID NO: 632805 - DNA, 15 bp, Homo sapiens
ttgaagtaaatattt

SEQ ID NO: 632806 - DNA, 15 bp, Homo sapiens
tgaagtaaatatttt

SEQ ID NO: 632807 - DNA, 15 bp, Homo sapiens
gaagtaaatattttg

SEQ ID NO: 632808 - DNA, 15 bp, Homo sapiens
aagtaaatattttgc

SEQ ID NO: 632809 - DNA, 15 bp, Homo sapiens
agtaaatattttgca

SEQ ID NO: 632810 - DNA, 15 bp, Homo sapiens
gtaaatattttgcag

SEQ ID NO: 632811 - DNA, 15 bp, Homo sapiens
taaatattttgcagg

SEQ ID NO: 632812 - DNA, 15 bp, Homo sapiens
aaatattttgcaggc

SEQ ID NO: 632813 - DNA, 15 bp, Homo sapiens
aatattttgcaggca

SEQ ID NO: 632814 - DNA, 15 bp, Homo sapiens
atattttgcaggcat

SEQ ID NO: 632815 - DNA, 15 bp, Homo sapiens
tattttgcaggcatt

SEQ ID NO: 632816 - DNA, 15 bp, Homo sapiens
attttgcaggcatta

SEQ ID NO: 632817 - DNA, 15 bp, Homo sapiens
ttttgcaggcattat

SEQ ID NO: 632818 - DNA, 15 bp, Homo sapiens
tttgcaggcattatc

SEQ ID NO: 632819 - DNA, 15 bp, Homo sapiens
ttgcaggcattatct

SEQ ID NO: 632820 - DNA, 15 bp, Homo sapiens
tgcaggcattatcta

SEQ ID NO: 632821 - DNA, 15 bp, Homo sapiens
gcaggcattatctaa

SEQ ID NO: 632822 - DNA, 15 bp, Homo sapiens
caggcattatctaat

SEQ ID NO: 632823 - DNA, 15 bp, Homo sapiens
aggcattatctaatg

SEQ ID NO: 632824 - DNA, 15 bp, Homo sapiens
ggcattatctaatgt

SEQ ID NO: 632825 - DNA, 15 bp, Homo sapiens
gcattatctaatgta

SEQ ID NO: 632826 - DNA, 15 bp, Homo sapiens
cattatctaatgtaa

SEQ ID NO: 632827 - DNA, 15 bp, Homo sapiens
attatctaatgtaaa

SEQ ID NO: 632828 - DNA, 15 bp, Homo sapiens
ttatctaatgtaaac

SEQ ID NO: 632829 - DNA, 15 bp, Homo sapiens
tatctaatgtaaaca

SEQ ID NO: 632830 - DNA, 15 bp, Homo sapiens
atctaatgtaaacac

SEQ ID NO: 632831 - DNA, 15 bp, Homo sapiens
tctaatgtaaacacc

SEQ ID NO: 632832 - DNA, 15 bp, Homo sapiens
ctaatgtaaacaccc

SEQ ID NO: 632833 - DNA, 15 bp, Homo sapiens
taatgtaaacaccct

SEQ ID NO: 632834 - DNA, 15 bp, Homo sapiens
aatgtaaacacccta

SEQ ID NO: 632835 - DNA, 15 bp, Homo sapiens
atgtaaacaccctaa

SEQ ID NO: 632836 - DNA, 15 bp, Homo sapiens
tgtaaacaccctaaa

SEQ ID NO: 632837 - DNA, 15 bp, Homo sapiens
gtaaacaccctaaag

SEQ ID NO: 632838 - DNA, 15 bp, Homo sapiens
taaacaccctaaagt

SEQ ID NO: 632839 - DNA, 15 bp, Homo sapiens
aaacaccctaaagtt

SEQ ID NO: 632840 - DNA, 15 bp, Homo sapiens
aacaccctaaagtta

SEQ ID NO: 632841 - DNA, 15 bp, Homo sapiens
acaccctaaagttac

SEQ ID NO: 632842 - DNA, 15 bp, Homo sapiens
caccctaaagttaca

SEQ ID NO: 632843 - DNA, 15 bp, Homo sapiens
accctaaagttacat

SEQ ID NO: 632844 - DNA, 15 bp, Homo sapiens
ccctaaagttacata

SEQ ID NO: 632845 - DNA, 15 bp, Homo sapiens
cctaaagttacataa

SEQ ID NO: 632846 - DNA, 15 bp, Homo sapiens
ctaaagttacataac

SEQ ID NO: 632847 - DNA, 15 bp, Homo sapiens
taaagttacataaca

SEQ ID NO: 632848 - DNA, 15 bp, Homo sapiens
aaagttacataacag

SEQ ID NO: 632849 - DNA, 15 bp, Homo sapiens
aagttacataacagg

SEQ ID NO: 632850 - DNA, 15 bp, Homo sapiens
agttacataacaggt

SEQ ID NO: 632851 - DNA, 15 bp, Homo sapiens
gttacataacaggta

SEQ ID NO: 632852 - DNA, 15 bp, Homo sapiens
ttacataacaggtac

SEQ ID NO: 632853 - DNA, 15 bp, Homo sapiens
tacataacaggtacc

SEQ ID NO: 632854 - DNA, 15 bp, Homo sapiens
acataacaggtaccc

SEQ ID NO: 632855 - DNA, 15 bp, Homo sapiens
cataacaggtaccct

SEQ ID NO: 632856 - DNA, 15 bp, Homo sapiens
ataacaggtaccctt

SEQ ID NO: 632857 - DNA, 15 bp, Homo sapiens
taacaggtacccttt

SEQ ID NO: 632858 - DNA, 15 bp, Homo sapiens
aacaggtacccttta

SEQ ID NO: 632859 - DNA, 15 bp, Homo sapiens
acaggtaccctttag

SEQ ID NO: 632860 - DNA, 15 bp, Homo sapiens
caggtaccctttagg

SEQ ID NO: 632861 - DNA, 15 bp, Homo sapiens
aggtaccctttaggt

SEQ ID NO: 632862 - DNA, 15 bp, Homo sapiens
ggtaccctttaggta

SEQ ID NO: 632863 - DNA, 15 bp, Homo sapiens
gtaccctttaggtaa

SEQ ID NO: 632864 - DNA, 15 bp, Homo sapiens
taccctttaggtaaa

SEQ ID NO: 632865 - DNA, 15 bp, Homo sapiens
accctttaggtaaat

SEQ ID NO: 632866 - DNA, 15 bp, Homo sapiens
ccctttaggtaaata

SEQ ID NO: 632867 - DNA, 15 bp, Homo sapiens
cctttaggtaaataa

SEQ ID NO: 632868 - DNA, 15 bp, Homo sapiens
ctttaggtaaataaa

SEQ ID NO: 632869 - DNA, 15 bp, Homo sapiens
tttaggtaaataaac

SEQ ID NO: 632870 - DNA, 15 bp, Homo sapiens
ttaggtaaataaaca

SEQ ID NO: 632871 - DNA, 15 bp, Homo sapiens
taggtaaataaacac

SEQ ID NO: 632872 - DNA, 15 bp, Homo sapiens
aggtaaataaacact

SEQ ID NO: 632873 - DNA, 15 bp, Homo sapiens
ggtaaataaacacta

SEQ ID NO: 632874 - DNA, 15 bp, Homo sapiens
gtaaataaacactag

SEQ ID NO: 632875 - DNA, 15 bp, Homo sapiens
taaataaacactagt

SEQ ID NO: 632876 - DNA, 15 bp, Homo sapiens
aaataaacactagta

SEQ ID NO: 632877 - DNA, 15 bp, Homo sapiens
aataaacactagtat

SEQ ID NO: 632878 - DNA, 15 bp, Homo sapiens
ataaacactagtatg

SEQ ID NO: 632879 - DNA, 15 bp, Homo sapiens
taaacactagtatga

SEQ ID NO: 632880 - DNA, 15 bp, Homo sapiens
aaacactagtatgac

SEQ ID NO: 632881 - DNA, 15 bp, Homo sapiens
aacactagtatgacc

SEQ ID NO: 632882 - DNA, 15 bp, Homo sapiens
acactagtatgacct

SEQ ID NO: 632883 - DNA, 15 bp, Homo sapiens
cactagtatgacctt

SEQ ID NO: 632884 - DNA, 15 bp, Homo sapiens
actagtatgaccttg

SEQ ID NO: 632885 - DNA, 15 bp, Homo sapiens
ctagtatgaccttgg

SEQ ID NO: 632886 - DNA, 15 bp, Homo sapiens
tagtatgaccttgga

SEQ ID NO: 632887 - DNA, 15 bp, Homo sapiens
agtatgaccttggag

SEQ ID NO: 632888 - DNA, 15 bp, Homo sapiens
gtatgaccttggagg

SEQ ID NO: 632889 - DNA, 15 bp, Homo sapiens
tatgaccttggaggc

SEQ ID NO: 632890 - DNA, 15 bp, Homo sapiens
atgaccttggaggca

SEQ ID NO: 632891 - DNA, 15 bp, Homo sapiens
tgaccttggaggcac

SEQ ID NO: 632892 - DNA, 15 bp, Homo sapiens
gaccttggaggcaca

SEQ ID NO: 632893 - DNA, 15 bp, Homo sapiens
accttggaggcacag

SEQ ID NO: 632894 - DNA, 15 bp, Homo sapiens
ccttggaggcacaga

SEQ ID NO: 632895 - DNA, 15 bp, Homo sapiens
cttggaggcacagat

SEQ ID NO: 632896 - DNA, 15 bp, Homo sapiens
ttggaggcacagata

SEQ ID NO: 632897 - DNA, 15 bp, Homo sapiens
tggaggcacagatag

SEQ ID NO: 632898 - DNA, 15 bp, Homo sapiens
ggaggcacagatagt

SEQ ID NO: 632899 - DNA, 15 bp, Homo sapiens
gaggcacagatagtt

SEQ ID NO: 632900 - DNA, 15 bp, Homo sapiens
aggcacagatagttg

SEQ ID NO: 632901 - DNA, 15 bp, Homo sapiens
ggcacagatagttga

SEQ ID NO: 632902 - DNA, 15 bp, Homo sapiens
gcacagatagttgaa

SEQ ID NO: 632903 - DNA, 15 bp, Homo sapiens
cacagatagttgaag

SEQ ID NO: 632904 - DNA, 15 bp, Homo sapiens
acagatagttgaagt

SEQ ID NO: 632905 - DNA, 15 bp, Homo sapiens
cagatagttgaagta

SEQ ID NO: 632906 - DNA, 15 bp, Homo sapiens
agatagttgaagtaa

SEQ ID NO: 632907 - DNA, 15 bp, Homo sapiens
gatagttgaagtaac

SEQ ID NO: 632908 - DNA, 15 bp, Homo sapiens
atagttgaagtaact

SEQ ID NO: 632909 - DNA, 15 bp, Homo sapiens
tagttgaagtaactt

SEQ ID NO: 632910 - DNA, 15 bp, Homo sapiens
agttgaagtaacttg

SEQ ID NO: 632911 - DNA, 15 bp, Homo sapiens
gttgaagtaacttgc

SEQ ID NO: 632912 - DNA, 15 bp, Homo sapiens
ttgaagtaacttgcc

SEQ ID NO: 632913 - DNA, 15 bp, Homo sapiens
tgaagtaacttgccc

SEQ ID NO: 632914 - DNA, 15 bp, Homo sapiens
gaagtaacttgccca

SEQ ID NO: 632915 - DNA, 15 bp, Homo sapiens
agtaacttgcccaat

SEQ ID NO: 632916 - DNA, 15 bp, Homo sapiens
gtaacttgcccaata

SEQ ID NO: 632917 - DNA, 15 bp, Homo sapiens
taacttgcccaatat

SEQ ID NO: 632918 - DNA, 15 bp, Homo sapiens
aacttgcccaatatc

SEQ ID NO: 632919 - DNA, 15 bp, Homo sapiens
acttgcccaatatca

SEQ ID NO: 632920 - DNA, 15 bp, Homo sapiens
cttgcccaatatcac

SEQ ID NO: 632921 - DNA, 15 bp, Homo sapiens
ttgcccaatatcact

SEQ ID NO: 632922 - DNA, 15 bp, Homo sapiens
tgcccaatatcactt

SEQ ID NO: 632923 - DNA, 15 bp, Homo sapiens
gcccaatatcactta

SEQ ID NO: 632924 - DNA, 15 bp, Homo sapiens
cccaatatcacttac

SEQ ID NO: 632925 - DNA, 15 bp, Homo sapiens
ccaatatcacttaca

SEQ ID NO: 632926 - DNA, 15 bp, Homo sapiens
caatatcacttacat

SEQ ID NO: 632927 - DNA, 15 bp, Homo sapiens
aatatcacttacatg

SEQ ID NO: 632928 - DNA, 15 bp, Homo sapiens
atatcacttacatga

SEQ ID NO: 632929 - DNA, 15 bp, Homo sapiens
tatcacttacatgaa

SEQ ID NO: 632930 - DNA, 15 bp, Homo sapiens
atcacttacatgaaa

SEQ ID NO: 632931 - DNA, 15 bp, Homo sapiens
tcacttacatgaaat

SEQ ID NO: 632932 - DNA, 15 bp, Homo sapiens
cacttacatgaaatt

SEQ ID NO: 632933 - DNA, 15 bp, Homo sapiens
acttacatgaaattg

SEQ ID NO: 632934 - DNA, 15 bp, Homo sapiens
cttacatgaaattgg

SEQ ID NO: 632935 - DNA, 15 bp, Homo sapiens
ttacatgaaattggc

SEQ ID NO: 632936 - DNA, 15 bp, Homo sapiens
tacatgaaattggcc

SEQ ID NO: 632937 - DNA, 15 bp, Homo sapiens
acatgaaattggccc

SEQ ID NO: 632938 - DNA, 15 bp, Homo sapiens
catgaaattggccct

SEQ ID NO: 632939 - DNA, 15 bp, Homo sapiens
atgaaattggccctc

SEQ ID NO: 632940 - DNA, 15 bp, Homo sapiens
tgaaattggccctca

SEQ ID NO: 632941 - DNA, 15 bp, Homo sapiens
gaaattggccctcaa

SEQ ID NO: 632942 - DNA, 15 bp, Homo sapiens
aaattggccctcaaa

SEQ ID NO: 632943 - DNA, 15 bp, Homo sapiens
aattggccctcaaat

SEQ ID NO: 632944 - DNA, 15 bp, Homo sapiens
attggccctcaaatg

SEQ ID NO: 632945 - DNA, 15 bp, Homo sapiens
ttggccctcaaatgt

SEQ ID NO: 632946 - DNA, 15 bp, Homo sapiens
tggccctcaaatgtg

SEQ ID NO: 632947 - DNA, 15 bp, Homo sapiens
ggccctcaaatgtgt

SEQ ID NO: 632948 - DNA, 15 bp, Homo sapiens
gccctcaaatgtgtc

SEQ ID NO: 632949 - DNA, 15 bp, Homo sapiens
ccctcaaatgtgtct

SEQ ID NO: 632950 - DNA, 15 bp, Homo sapiens
cctcaaatgtgtctg

SEQ ID NO: 632951 - DNA, 15 bp, Homo sapiens
ctcaaatgtgtctga

SEQ ID NO: 632952 - DNA, 15 bp, Homo sapiens
tcaaatgtgtctgat

SEQ ID NO: 632953 - DNA, 15 bp, Homo sapiens
caaatgtgtctgata

SEQ ID NO: 632954 - DNA, 15 bp, Homo sapiens
aaatgtgtctgatac

SEQ ID NO: 632955 - DNA, 15 bp, Homo sapiens
aatgtgtctgataca

SEQ ID NO: 632956 - DNA, 15 bp, Homo sapiens
atgtgtctgatacaa

SEQ ID NO: 632957 - DNA, 15 bp, Homo sapiens
tgtgtctgatacaac

SEQ ID NO: 632958 - DNA, 15 bp, Homo sapiens
gtgtctgatacaacc

SEQ ID NO: 632959 - DNA, 15 bp, Homo sapiens
tgtctgatacaaccc

SEQ ID NO: 632960 - DNA, 15 bp, Homo sapiens
gtctgatacaaccca

SEQ ID NO: 632961 - DNA, 15 bp, Homo sapiens
tctgatacaacccat

SEQ ID NO: 632962 - DNA, 15 bp, Homo sapiens
ctgatacaacccatg

SEQ ID NO: 632963 - DNA, 15 bp, Homo sapiens
tgatacaacccatgc

SEQ ID NO: 632964 - DNA, 15 bp, Homo sapiens
gatacaacccatgct

SEQ ID NO: 632965 - DNA, 15 bp, Homo sapiens
atacaacccatgctg

SEQ ID NO: 632966 - DNA, 15 bp, Homo sapiens
tacaacccatgctgc

SEQ ID NO: 632967 - DNA, 15 bp, Homo sapiens
acaacccatgctgct

SEQ ID NO: 632968 - DNA, 15 bp, Homo sapiens
caacccatgctgctt

SEQ ID NO: 632969 - DNA, 15 bp, Homo sapiens
aacccatgctgcttg

SEQ ID NO: 632970 - DNA, 15 bp, Homo sapiens
acccatgctgcttgt

SEQ ID NO: 632971 - DNA, 15 bp, Homo sapiens
cccatgctgcttgta

SEQ ID NO: 632972 - DNA, 15 bp, Homo sapiens
ccatgctgcttgtaa

SEQ ID NO: 632973 - DNA, 15 bp, Homo sapiens
catgctgcttgtaac

SEQ ID NO: 632974 - DNA, 15 bp, Homo sapiens
atgctgcttgtaact

SEQ ID NO: 632975 - DNA, 15 bp, Homo sapiens
tgctgcttgtaacta

SEQ ID NO: 632976 - DNA, 15 bp, Homo sapiens
gctgcttgtaactat

SEQ ID NO: 632977 - DNA, 15 bp, Homo sapiens
ctgcttgtaactatc

SEQ ID NO: 632978 - DNA, 15 bp, Homo sapiens
tgcttgtaactatcg

SEQ ID NO: 632979 - DNA, 15 bp, Homo sapiens
gcttgtaactatcgt

SEQ ID NO: 632980 - DNA, 15 bp, Homo sapiens
cttgtaactatcgtt

SEQ ID NO: 632981 - DNA, 15 bp, Homo sapiens
ttgtaactatcgttt

SEQ ID NO: 632982 - DNA, 15 bp, Homo sapiens
tgtaactatcgtttt

SEQ ID NO: 632983 - DNA, 15 bp, Homo sapiens
gtaactatcgtttta

SEQ ID NO: 632984 - DNA, 15 bp, Homo sapiens
taactatcgttttaa

SEQ ID NO: 632985 - DNA, 15 bp, Homo sapiens
aactatcgttttaaa

SEQ ID NO: 632986 - DNA, 15 bp, Homo sapiens
actatcgttttaaac

SEQ ID NO: 632987 - DNA, 15 bp, Homo sapiens
ctatcgttttaaact

SEQ ID NO: 632988 - DNA, 15 bp, Homo sapiens
tatcgttttaaactg

SEQ ID NO: 632989 - DNA, 15 bp, Homo sapiens
atcgttttaaactgc

SEQ ID NO: 632990 - DNA, 15 bp, Homo sapiens
tcgttttaaactgcc

SEQ ID NO: 632991 - DNA, 15 bp, Homo sapiens
cgttttaaactgcca

SEQ ID NO: 632992 - DNA, 15 bp, Homo sapiens
gttttaaactgccag

SEQ ID NO: 632993 - DNA, 15 bp, Homo sapiens
ttttaaactgccagg

SEQ ID NO: 632994 - DNA, 15 bp, Homo sapiens
tttaaactgccaggg

SEQ ID NO: 632995 - DNA, 15 bp, Homo sapiens
ttaaactgccagggt

SEQ ID NO: 632996 - DNA, 15 bp, Homo sapiens
taaactgccagggta

SEQ ID NO: 632997 - DNA, 15 bp, Homo sapiens
aaactgccagggtaa

SEQ ID NO: 632998 - DNA, 15 bp, Homo sapiens
aactgccagggtaaa

SEQ ID NO: 632999 - DNA, 15 bp, Homo sapiens
actgccagggtaaac

SEQ ID NO: 633000 - DNA, 15 bp, Homo sapiens
ctgccagggtaaact

SEQ ID NO: 633001 - DNA, 15 bp, Homo sapiens
tgccagggtaaactt

SEQ ID NO: 633002 - DNA, 15 bp, Homo sapiens
gccagggtaaacttg

SEQ ID NO: 633003 - DNA, 15 bp, Homo sapiens
ccagggtaaacttgg

SEQ ID NO: 633004 - DNA, 15 bp, Homo sapiens
cagggtaaacttgga

SEQ ID NO: 633005 - DNA, 15 bp, Homo sapiens
agggtaaacttggac

SEQ ID NO: 633006 - DNA, 15 bp, Homo sapiens
gggtaaacttggaca

SEQ ID NO: 633007 - DNA, 15 bp, Homo sapiens
ggtaaacttggacac

SEQ ID NO: 633008 - DNA, 15 bp, Homo sapiens
gtaaacttggacaca

SEQ ID NO: 633009 - DNA, 15 bp, Homo sapiens
taaacttggacacac

SEQ ID NO: 633010 - DNA, 15 bp, Homo sapiens
aaacttggacacact

SEQ ID NO: 633011 - DNA, 15 bp, Homo sapiens
aacttggacacactt

SEQ ID NO: 633012 - DNA, 15 bp, Homo sapiens
acttggacacacttg

SEQ ID NO: 633013 - DNA, 15 bp, Homo sapiens
cttggacacacttga

SEQ ID NO: 633014 - DNA, 15 bp, Homo sapiens
ttggacacacttgag

SEQ ID NO: 633015 - DNA, 15 bp, Homo sapiens
tggacacacttgagc

SEQ ID NO: 633016 - DNA, 15 bp, Homo sapiens
ggacacacttgagct

SEQ ID NO: 633017 - DNA, 15 bp, Homo sapiens
gacacacttgagcta

SEQ ID NO: 633018 - DNA, 15 bp, Homo sapiens
acacacttgagctaa

SEQ ID NO: 633019 - DNA, 15 bp, Homo sapiens
cacacttgagctaag

SEQ ID NO: 633020 - DNA, 15 bp, Homo sapiens
acacttgagctaaga

SEQ ID NO: 633021 - DNA, 15 bp, Homo sapiens
cacttgagctaagaa

SEQ ID NO: 633022 - DNA, 15 bp, Homo sapiens
acttgagctaagaaa

SEQ ID NO: 633023 - DNA, 15 bp, Homo sapiens
cttgagctaagaaaa

SEQ ID NO: 633024 - DNA, 15 bp, Homo sapiens
ttgagctaagaaaaa

SEQ ID NO: 633025 - DNA, 15 bp, Homo sapiens
tgagctaagaaaaag

SEQ ID NO: 633026 - DNA, 15 bp, Homo sapiens
gagctaagaaaaagc

SEQ ID NO: 633027 - DNA, 15 bp, Homo sapiens
agctaagaaaaagct

SEQ ID NO: 633028 - DNA, 15 bp, Homo sapiens
gctaagaaaaagctt

SEQ ID NO: 633029 - DNA, 15 bp, Homo sapiens
ctaagaaaaagcttt

SEQ ID NO: 633030 - DNA, 15 bp, Homo sapiens
taagaaaaagctttt

SEQ ID NO: 633031 - DNA, 15 bp, Homo sapiens
aagaaaaagctttta

SEQ ID NO: 633032 - DNA, 15 bp, Homo sapiens
agaaaaagcttttag

SEQ ID NO: 633033 - DNA, 15 bp, Homo sapiens
gaaaaagcttttaga

SEQ ID NO: 633034 - DNA, 15 bp, Homo sapiens
aaaaagcttttagat

SEQ ID NO: 633035 - DNA, 15 bp, Homo sapiens
aaaagcttttagatt

SEQ ID NO: 633036 - DNA, 15 bp, Homo sapiens
aaagcttttagattt

SEQ ID NO: 633037 - DNA, 15 bp, Homo sapiens
aagcttttagatttt

SEQ ID NO: 633038 - DNA, 15 bp, Homo sapiens
agcttttagattttt

SEQ ID NO: 633039 - DNA, 15 bp, Homo sapiens
gcttttagatttttg

SEQ ID NO: 633040 - DNA, 15 bp, Homo sapiens
cttttagatttttgc

SEQ ID NO: 633041 - DNA, 15 bp, Homo sapiens
ttttagatttttgca

SEQ ID NO: 633042 - DNA, 15 bp, Homo sapiens
tttagatttttgcaa

SEQ ID NO: 633043 - DNA, 15 bp, Homo sapiens
ttagatttttgcaaa

SEQ ID NO: 633044 - DNA, 15 bp, Homo sapiens
tagatttttgcaaat

SEQ ID NO: 633045 - DNA, 15 bp, Homo sapiens
agatttttgcaaatt

SEQ ID NO: 633046 - DNA, 15 bp, Homo sapiens
gatttttgcaaatta

SEQ ID NO: 633047 - DNA, 15 bp, Homo sapiens
atttttgcaaattaa

SEQ ID NO: 633048 - DNA, 15 bp, Homo sapiens
tttttgcaaattaat

SEQ ID NO: 633049 - DNA, 15 bp, Homo sapiens
ttttgcaaattaatg

SEQ ID NO: 633050 - DNA, 15 bp, Homo sapiens
tttgcaaattaatgt

SEQ ID NO: 633051 - DNA, 15 bp, Homo sapiens
ttgcaaattaatgtg

SEQ ID NO: 633052 - DNA, 15 bp, Homo sapiens
tgcaaattaatgtga

SEQ ID NO: 633053 - DNA, 15 bp, Homo sapiens
gcaaattaatgtgaa

SEQ ID NO: 633054 - DNA, 15 bp, Homo sapiens
caaattaatgtgaaa

SEQ ID NO: 633055 - DNA, 15 bp, Homo sapiens
aaattaatgtgaaag

SEQ ID NO: 633056 - DNA, 15 bp, Homo sapiens
aattaatgtgaaaga

SEQ ID NO: 633057 - DNA, 15 bp, Homo sapiens
attaatgtgaaagat

SEQ ID NO: 633058 - DNA, 15 bp, Homo sapiens
ttaatgtgaaagata

SEQ ID NO: 633059 - DNA, 15 bp, Homo sapiens
taatgtgaaagatat

SEQ ID NO: 633060 - DNA, 15 bp, Homo sapiens
aatgtgaaagatatg

SEQ ID NO: 633061 - DNA, 15 bp, Homo sapiens
atgtgaaagatatgc

SEQ ID NO: 633062 - DNA, 15 bp, Homo sapiens
tgtgaaagatatgct

SEQ ID NO: 633063 - DNA, 15 bp, Homo sapiens
gtgaaagatatgctt

SEQ ID NO: 633064 - DNA, 15 bp, Homo sapiens
tgaaagatatgcttt

SEQ ID NO: 633065 - DNA, 15 bp, Homo sapiens
gaaagatatgcttta

SEQ ID NO: 633066 - DNA, 15 bp, Homo sapiens
aaagatatgctttat

SEQ ID NO: 633067 - DNA, 15 bp, Homo sapiens
aagatatgctttatg

SEQ ID NO: 633068 - DNA, 15 bp, Homo sapiens
agatatgctttatgt

SEQ ID NO: 633069 - DNA, 15 bp, Homo sapiens
gatatgctttatgtg

SEQ ID NO: 633070 - DNA, 15 bp, Homo sapiens
atatgctttatgtgg

SEQ ID NO: 633071 - DNA, 15 bp, Homo sapiens
tatgctttatgtgga

SEQ ID NO: 633072 - DNA, 15 bp, Homo sapiens
atgctttatgtggat

SEQ ID NO: 633073 - DNA, 15 bp, Homo sapiens
tgctttatgtggata

SEQ ID NO: 633074 - DNA, 15 bp, Homo sapiens
gctttatgtggatat

SEQ ID NO: 633075 - DNA, 15 bp, Homo sapiens
ctttatgtggatata

SEQ ID NO: 633076 - DNA, 15 bp, Homo sapiens
tttatgtggatataa

SEQ ID NO: 633077 - DNA, 15 bp, Homo sapiens
ttatgtggatataat

SEQ ID NO: 633078 - DNA, 15 bp, Homo sapiens
tatgtggatataata

SEQ ID NO: 633079 - DNA, 15 bp, Homo sapiens
atgtggatataatat

SEQ ID NO: 633080 - DNA, 15 bp, Homo sapiens
tgtggatataatatc

SEQ ID NO: 633081 - DNA, 15 bp, Homo sapiens
gtggatataatatct

SEQ ID NO: 633082 - DNA, 15 bp, Homo sapiens
tggatataatatctt

SEQ ID NO: 633083 - DNA, 15 bp, Homo sapiens
ggatataatatcttc

SEQ ID NO: 633084 - DNA, 15 bp, Homo sapiens
gatataatatcttct

SEQ ID NO: 633085 - DNA, 15 bp, Homo sapiens
atataatatcttcta

SEQ ID NO: 633086 - DNA, 15 bp, Homo sapiens
tataatatcttctaa

SEQ ID NO: 633087 - DNA, 15 bp, Homo sapiens
ataatatcttctaaa

SEQ ID NO: 633088 - DNA, 15 bp, Homo sapiens
taatatcttctaaat

SEQ ID NO: 633089 - DNA, 15 bp, Homo sapiens
aatatcttctaaatt

SEQ ID NO: 633090 - DNA, 15 bp, Homo sapiens
atatcttctaaattt

SEQ ID NO: 633091 - DNA, 15 bp, Homo sapiens
tatcttctaaatttc

SEQ ID NO: 633092 - DNA, 15 bp, Homo sapiens
atcttctaaatttcg

SEQ ID NO: 633093 - DNA, 15 bp, Homo sapiens
tcttctaaatttcgg

SEQ ID NO: 633094 - DNA, 15 bp, Homo sapiens
cttctaaatttcggg

SEQ ID NO: 633095 - DNA, 15 bp, Homo sapiens
ttctaaatttcgggg

SEQ ID NO: 633096 - DNA, 15 bp, Homo sapiens
tctaaatttcgggga

SEQ ID NO: 633097 - DNA, 15 bp, Homo sapiens
ctaaatttcggggat

SEQ ID NO: 633098 - DNA, 15 bp, Homo sapiens
taaatttcggggatg

SEQ ID NO: 633099 - DNA, 15 bp, Homo sapiens
aaatttcggggatgg

SEQ ID NO: 633100 - DNA, 15 bp, Homo sapiens
aatttcggggatggt

SEQ ID NO: 633101 - DNA, 15 bp, Homo sapiens
atttcggggatggta

SEQ ID NO: 633102 - DNA, 15 bp, Homo sapiens
tttcggggatggtag

SEQ ID NO: 633103 - DNA, 15 bp, Homo sapiens
ttcggggatggtagt

SEQ ID NO: 633104 - DNA, 15 bp, Homo sapiens
tcggggatggtagtc

SEQ ID NO: 633105 - DNA, 15 bp, Homo sapiens
cggggatggtagtcc

SEQ ID NO: 633106 - DNA, 15 bp, Homo sapiens
ggggatggtagtcct

SEQ ID NO: 633107 - DNA, 15 bp, Homo sapiens
gggatggtagtccta

SEQ ID NO: 633108 - DNA, 15 bp, Homo sapiens
ggatggtagtcctag

SEQ ID NO: 633109 - DNA, 15 bp, Homo sapiens
gatggtagtcctaga

SEQ ID NO: 633110 - DNA, 15 bp, Homo sapiens
atggtagtcctagaa

SEQ ID NO: 633111 - DNA, 15 bp, Homo sapiens
tggtagtcctagaaa

SEQ ID NO: 633112 - DNA, 15 bp, Homo sapiens
ggtagtcctagaaat

SEQ ID NO: 633113 - DNA, 15 bp, Homo sapiens
gtagtcctagaaatg

SEQ ID NO: 633114 - DNA, 15 bp, Homo sapiens
tagtcctagaaatgt

SEQ ID NO: 633115 - DNA, 15 bp, Homo sapiens
agtcctagaaatgta

SEQ ID NO: 633116 - DNA, 15 bp, Homo sapiens
gtcctagaaatgtaa

SEQ ID NO: 633117 - DNA, 15 bp, Homo sapiens
tcctagaaatgtaat

SEQ ID NO: 633118 - DNA, 15 bp, Homo sapiens
cctagaaatgtaatc

SEQ ID NO: 633119 - DNA, 15 bp, Homo sapiens
ctagaaatgtaatcc

SEQ ID NO: 633120 - DNA, 15 bp, Homo sapiens
tagaaatgtaatcct

SEQ ID NO: 633121 - DNA, 15 bp, Homo sapiens
agaaatgtaatcctg

SEQ ID NO: 633122 - DNA, 15 bp, Homo sapiens
gaaatgtaatcctgc

SEQ ID NO: 633123 - DNA, 15 bp, Homo sapiens
aaatgtaatcctgcc

SEQ ID NO: 633124 - DNA, 15 bp, Homo sapiens
aatgtaatcctgccc

SEQ ID NO: 633125 - DNA, 15 bp, Homo sapiens
atgtaatcctgccct

SEQ ID NO: 633126 - DNA, 15 bp, Homo sapiens
tgtaatcctgcccta

SEQ ID NO: 633127 - DNA, 15 bp, Homo sapiens
gtaatcctgccctag

SEQ ID NO: 633128 - DNA, 15 bp, Homo sapiens
tttataaagctgtac

SEQ ID NO: 633129 - DNA, 15 bp, Homo sapiens
ttataaagctgtact

SEQ ID NO: 633130 - DNA, 15 bp, Homo sapiens
tataaagctgtactc

SEQ ID NO: 633131 - DNA, 15 bp, Homo sapiens
ataaagctgtactca

SEQ ID NO: 633132 - DNA, 15 bp, Homo sapiens
taaagctgtactcat

SEQ ID NO: 633133 - DNA, 15 bp, Homo sapiens
aaagctgtactcata

SEQ ID NO: 633134 - DNA, 15 bp, Homo sapiens
aagctgtactcatag

SEQ ID NO: 633135 - DNA, 15 bp, Homo sapiens
agctgtactcatagt

SEQ ID NO: 633136 - DNA, 15 bp, Homo sapiens
gctgtactcatagta

SEQ ID NO: 633137 - DNA, 15 bp, Homo sapiens
ctgtactcatagtac

SEQ ID NO: 633138 - DNA, 15 bp, Homo sapiens
tgtactcatagtaca

SEQ ID NO: 633139 - DNA, 15 bp, Homo sapiens
gtactcatagtacat

SEQ ID NO: 633140 - DNA, 15 bp, Homo sapiens
tactcatagtacatt

SEQ ID NO: 633141 - DNA, 15 bp, Homo sapiens
actcatagtacattt

SEQ ID NO: 633142 - DNA, 15 bp, Homo sapiens
ctcatagtacatttt

SEQ ID NO: 633143 - DNA, 15 bp, Homo sapiens
tcatagtacattttc

SEQ ID NO: 633144 - DNA, 15 bp, Homo sapiens
catagtacattttca

SEQ ID NO: 633145 - DNA, 15 bp, Homo sapiens
atagtacattttcac

SEQ ID NO: 633146 - DNA, 15 bp, Homo sapiens
tagtacattttcaca

SEQ ID NO: 633147 - DNA, 15 bp, Homo sapiens
agtacattttcacat

SEQ ID NO: 633148 - DNA, 15 bp, Homo sapiens
gtacattttcacatc

SEQ ID NO: 633149 - DNA, 15 bp, Homo sapiens
tacattttcacatca

SEQ ID NO: 633150 - DNA, 15 bp, Homo sapiens
acattttcacatcac

SEQ ID NO: 633151 - DNA, 15 bp, Homo sapiens
cattttcacatcaca

SEQ ID NO: 633152 - DNA, 15 bp, Homo sapiens
attttcacatcacag

SEQ ID NO: 633153 - DNA, 15 bp, Homo sapiens
ttttcacatcacagg

SEQ ID NO: 633154 - DNA, 15 bp, Homo sapiens
tttcacatcacaggt

SEQ ID NO: 633155 - DNA, 15 bp, Homo sapiens
ttcacatcacaggta

SEQ ID NO: 633156 - DNA, 15 bp, Homo sapiens
tcacatcacaggtac

SEQ ID NO: 633157 - DNA, 15 bp, Homo sapiens
cacatcacaggtacc

SEQ ID NO: 633158 - DNA, 15 bp, Homo sapiens
acatcacaggtacca

SEQ ID NO: 633159 - DNA, 15 bp, Homo sapiens
catcacaggtaccat

SEQ ID NO: 633160 - DNA, 15 bp, Homo sapiens
atcacaggtaccata

SEQ ID NO: 633161 - DNA, 15 bp, Homo sapiens
tcacaggtaccatat

SEQ ID NO: 633162 - DNA, 15 bp, Homo sapiens
cacaggtaccatatc

SEQ ID NO: 633163 - DNA, 15 bp, Homo sapiens
acaggtaccatatca

SEQ ID NO: 633164 - DNA, 15 bp, Homo sapiens
caggtaccatatcag

SEQ ID NO: 633165 - DNA, 15 bp, Homo sapiens
aggtaccatatcagt

SEQ ID NO: 633166 - DNA, 15 bp, Homo sapiens
ggtaccatatcagtg

SEQ ID NO: 633167 - DNA, 15 bp, Homo sapiens
gtaccatatcagtgt

SEQ ID NO: 633168 - DNA, 15 bp, Homo sapiens
taccatatcagtgtt

SEQ ID NO: 633169 - DNA, 15 bp, Homo sapiens
accatatcagtgtta

SEQ ID NO: 633170 - DNA, 15 bp, Homo sapiens
ccatatcagtgttat

SEQ ID NO: 633171 - DNA, 15 bp, Homo sapiens
catatcagtgttatt

SEQ ID NO: 633172 - DNA, 15 bp, Homo sapiens
atatcagtgttatta

SEQ ID NO: 633173 - DNA, 15 bp, Homo sapiens
tatcagtgttattaa

SEQ ID NO: 633174 - DNA, 15 bp, Homo sapiens
atcagtgttattaaa

SEQ ID NO: 633175 - DNA, 15 bp, Homo sapiens
tcagtgttattaaat

SEQ ID NO: 633176 - DNA, 15 bp, Homo sapiens
cagtgttattaaata

SEQ ID NO: 633177 - DNA, 15 bp, Homo sapiens
agtgttattaaatat

SEQ ID NO: 633178 - DNA, 15 bp, Homo sapiens
gtgttattaaatatt

SEQ ID NO: 633179 - DNA, 15 bp, Homo sapiens
tgttattaaatattt

SEQ ID NO: 633180 - DNA, 15 bp, Homo sapiens
gttattaaatatttt

SEQ ID NO: 633181 - DNA, 15 bp, Homo sapiens
ttattaaatattttg

SEQ ID NO: 633182 - DNA, 15 bp, Homo sapiens
tattaaatattttgt

SEQ ID NO: 633183 - DNA, 15 bp, Homo sapiens
attaaatattttgta

SEQ ID NO: 633184 - DNA, 15 bp, Homo sapiens
ttaaatattttgtat

SEQ ID NO: 633185 - DNA, 15 bp, Homo sapiens
taaatattttgtatg

SEQ ID NO: 633186 - DNA, 15 bp, Homo sapiens
aaatattttgtatgc

SEQ ID NO: 633187 - DNA, 15 bp, Homo sapiens
aatattttgtatgcc

SEQ ID NO: 633188 - DNA, 15 bp, Homo sapiens
atattttgtatgcca

SEQ ID NO: 633189 - DNA, 15 bp, Homo sapiens
tattttgtatgccag

SEQ ID NO: 633190 - DNA, 15 bp, Homo sapiens
attttgtatgccagg

SEQ ID NO: 633191 - DNA, 15 bp, Homo sapiens
ttttgtatgccaggg

SEQ ID NO: 633192 - DNA, 15 bp, Homo sapiens
tttgtatgccagggg

SEQ ID NO: 633193 - DNA, 15 bp, Homo sapiens
ttgtatgccaggggc

SEQ ID NO: 633194 - DNA, 15 bp, Homo sapiens
tgtatgccaggggct

SEQ ID NO: 633195 - DNA, 15 bp, Homo sapiens
gtatgccaggggcta

SEQ ID NO: 633196 - DNA, 15 bp, Homo sapiens
tatgccaggggctag

SEQ ID NO: 633197 - DNA, 15 bp, Homo sapiens
atgccaggggctaga

SEQ ID NO: 633198 - DNA, 15 bp, Homo sapiens
tgccaggggctagac

SEQ ID NO: 633199 - DNA, 15 bp, Homo sapiens
gccaggggctagaca

SEQ ID NO: 633200 - DNA, 15 bp, Homo sapiens
ccaggggctagacat

SEQ ID NO: 633201 - DNA, 15 bp, Homo sapiens
caggggctagacata

SEQ ID NO: 633202 - DNA, 15 bp, Homo sapiens
aggggctagacatac

SEQ ID NO: 633203 - DNA, 15 bp, Homo sapiens
ggggctagacatacc

SEQ ID NO: 633204 - DNA, 15 bp, Homo sapiens
gggctagacatacca

SEQ ID NO: 633205 - DNA, 15 bp, Homo sapiens
ggctagacataccaa

SEQ ID NO: 633206 - DNA, 15 bp, Homo sapiens
gctagacataccaag

SEQ ID NO: 633207 - DNA, 15 bp, Homo sapiens
ctagacataccaaga

SEQ ID NO: 633208 - DNA, 15 bp, Homo sapiens
tagacataccaagac

SEQ ID NO: 633209 - DNA, 15 bp, Homo sapiens
agacataccaagaca

SEQ ID NO: 633210 - DNA, 15 bp, Homo sapiens
gacataccaagacaa

SEQ ID NO: 633211 - DNA, 15 bp, Homo sapiens
acataccaagacaac

SEQ ID NO: 633212 - DNA, 15 bp, Homo sapiens
cataccaagacaacc

SEQ ID NO: 633213 - DNA, 15 bp, Homo sapiens
ataccaagacaacca

SEQ ID NO: 633214 - DNA, 15 bp, Homo sapiens
taccaagacaaccaa

SEQ ID NO: 633215 - DNA, 15 bp, Homo sapiens
accaagacaaccaat

SEQ ID NO: 633216 - DNA, 15 bp, Homo sapiens
ccaagacaaccaata

SEQ ID NO: 633217 - DNA, 15 bp, Homo sapiens
caagacaaccaatat

SEQ ID NO: 633218 - DNA, 15 bp, Homo sapiens
aagacaaccaatatg

SEQ ID NO: 633219 - DNA, 15 bp, Homo sapiens
agacaaccaatatgt

SEQ ID NO: 633220 - DNA, 15 bp, Homo sapiens
gacaaccaatatgtg

SEQ ID NO: 633221 - DNA, 15 bp, Homo sapiens
acaaccaatatgtgg

SEQ ID NO: 633222 - DNA, 15 bp, Homo sapiens
caaccaatatgtggt

SEQ ID NO: 633223 - DNA, 15 bp, Homo sapiens
aaccaatatgtggtt

SEQ ID NO: 633224 - DNA, 15 bp, Homo sapiens
accaatatgtggttc

SEQ ID NO: 633225 - DNA, 15 bp, Homo sapiens
ccaatatgtggttct

SEQ ID NO: 633226 - DNA, 15 bp, Homo sapiens
caatatgtggttcta

SEQ ID NO: 633227 - DNA, 15 bp, Homo sapiens
aatatgtggttctac

SEQ ID NO: 633228 - DNA, 15 bp, Homo sapiens
atatgtggttctact

SEQ ID NO: 633229 - DNA, 15 bp, Homo sapiens
tatgtggttctactt

SEQ ID NO: 633230 - DNA, 15 bp, Homo sapiens
atgtggttctactta

SEQ ID NO: 633231 - DNA, 15 bp, Homo sapiens
tgtggttctacttaa

SEQ ID NO: 633232 - DNA, 15 bp, Homo sapiens
gtggttctacttaaa

SEQ ID NO: 633233 - DNA, 15 bp, Homo sapiens
tggttctacttaaat

SEQ ID NO: 633234 - DNA, 15 bp, Homo sapiens
ggttctacttaaata

SEQ ID NO: 633235 - DNA, 15 bp, Homo sapiens
gttctacttaaataa

SEQ ID NO: 633236 - DNA, 15 bp, Homo sapiens
ttctacttaaataat

SEQ ID NO: 633237 - DNA, 15 bp, Homo sapiens
tctacttaaataata

SEQ ID NO: 633238 - DNA, 15 bp, Homo sapiens
ctacttaaataatat

SEQ ID NO: 633239 - DNA, 15 bp, Homo sapiens
tacttaaataatatt

SEQ ID NO: 633240 - DNA, 15 bp, Homo sapiens
acttaaataatatta

SEQ ID NO: 633241 - DNA, 15 bp, Homo sapiens
cttaaataatattag

SEQ ID NO: 633242 - DNA, 15 bp, Homo sapiens
ttaaataatattaga

SEQ ID NO: 633243 - DNA, 15 bp, Homo sapiens
taaataatattagag

SEQ ID NO: 633244 - DNA, 15 bp, Homo sapiens
aaataatattagagt

SEQ ID NO: 633245 - DNA, 15 bp, Homo sapiens
aataatattagagta

SEQ ID NO: 633246 - DNA, 15 bp, Homo sapiens
ataatattagagtat

SEQ ID NO: 633247 - DNA, 15 bp, Homo sapiens
taatattagagtatc

SEQ ID NO: 633248 - DNA, 15 bp, Homo sapiens
aatattagagtatct

SEQ ID NO: 633249 - DNA, 15 bp, Homo sapiens
atattagagtatctt

SEQ ID NO: 633250 - DNA, 15 bp, Homo sapiens
tattagagtatcttt

SEQ ID NO: 633251 - DNA, 15 bp, Homo sapiens
attagagtatctttt

SEQ ID NO: 633252 - DNA, 15 bp, Homo sapiens
ttagagtatctttta

SEQ ID NO: 633253 - DNA, 15 bp, Homo sapiens
tagagtatcttttat

SEQ ID NO: 633254 - DNA, 15 bp, Homo sapiens
agagtatcttttatg

SEQ ID NO: 633255 - DNA, 15 bp, Homo sapiens
gagtatcttttatga

SEQ ID NO: 633256 - DNA, 15 bp, Homo sapiens
agtatcttttatgat

SEQ ID NO: 633257 - DNA, 15 bp, Homo sapiens
gtatcttttatgatg

SEQ ID NO: 633258 - DNA, 15 bp, Homo sapiens
tatcttttatgatga

SEQ ID NO: 633259 - DNA, 15 bp, Homo sapiens
atcttttatgatgac

SEQ ID NO: 633260 - DNA, 15 bp, Homo sapiens
tcttttatgatgaca

SEQ ID NO: 633261 - DNA, 15 bp, Homo sapiens
cttttatgatgacac

SEQ ID NO: 633262 - DNA, 15 bp, Homo sapiens
ttttatgatgacact

SEQ ID NO: 633263 - DNA, 15 bp, Homo sapiens
tttatgatgacactt

SEQ ID NO: 633264 - DNA, 15 bp, Homo sapiens
ttatgatgacacttc

SEQ ID NO: 633265 - DNA, 15 bp, Homo sapiens
tatgatgacacttca

SEQ ID NO: 633266 - DNA, 15 bp, Homo sapiens
atgatgacacttcat

SEQ ID NO: 633267 - DNA, 15 bp, Homo sapiens
tgatgacacttcatg

SEQ ID NO: 633268 - DNA, 15 bp, Homo sapiens
gatgacacttcatga

SEQ ID NO: 633269 - DNA, 15 bp, Homo sapiens
atgacacttcatgag

SEQ ID NO: 633270 - DNA, 15 bp, Homo sapiens
tgacacttcatgagt

SEQ ID NO: 633271 - DNA, 15 bp, Homo sapiens
gacacttcatgagtt

SEQ ID NO: 633272 - DNA, 15 bp, Homo sapiens
acacttcatgagttg

SEQ ID NO: 633273 - DNA, 15 bp, Homo sapiens
cacttcatgagttga

SEQ ID NO: 633274 - DNA, 15 bp, Homo sapiens
acttcatgagttgac

SEQ ID NO: 633275 - DNA, 15 bp, Homo sapiens
cttcatgagttgact

SEQ ID NO: 633276 - DNA, 15 bp, Homo sapiens
ttcatgagttgacta

SEQ ID NO: 633277 - DNA, 15 bp, Homo sapiens
tcatgagttgactat

SEQ ID NO: 633278 - DNA, 15 bp, Homo sapiens
catgagttgactata

SEQ ID NO: 633279 - DNA, 15 bp, Homo sapiens
atgagttgactataa

SEQ ID NO: 633280 - DNA, 15 bp, Homo sapiens
tgagttgactataat

SEQ ID NO: 633281 - DNA, 15 bp, Homo sapiens
gagttgactataata

SEQ ID NO: 633282 - DNA, 15 bp, Homo sapiens
agttgactataataa

SEQ ID NO: 633283 - DNA, 15 bp, Homo sapiens
gttgactataataat

SEQ ID NO: 633284 - DNA, 15 bp, Homo sapiens
ttgactataataatc

SEQ ID NO: 633285 - DNA, 15 bp, Homo sapiens
tgactataataatct

SEQ ID NO: 633286 - DNA, 15 bp, Homo sapiens
gactataataatctt

SEQ ID NO: 633287 - DNA, 15 bp, Homo sapiens
actataataatctta

SEQ ID NO: 633288 - DNA, 15 bp, Homo sapiens
ctataataatcttag

SEQ ID NO: 633289 - DNA, 15 bp, Homo sapiens
tataataatcttaga

SEQ ID NO: 633290 - DNA, 15 bp, Homo sapiens
ataataatcttagac

SEQ ID NO: 633291 - DNA, 15 bp, Homo sapiens
taataatcttagact

SEQ ID NO: 633292 - DNA, 15 bp, Homo sapiens
aataatcttagactt

SEQ ID NO: 633293 - DNA, 15 bp, Homo sapiens
ataatcttagacttc

SEQ ID NO: 633294 - DNA, 15 bp, Homo sapiens
taatcttagacttct

SEQ ID NO: 633295 - DNA, 15 bp, Homo sapiens
aatcttagacttcta

SEQ ID NO: 633296 - DNA, 15 bp, Homo sapiens
atcttagacttctaa

SEQ ID NO: 633297 - DNA, 15 bp, Homo sapiens
tcttagacttctaag

SEQ ID NO: 633298 - DNA, 15 bp, Homo sapiens
cttagacttctaaga

SEQ ID NO: 633299 - DNA, 15 bp, Homo sapiens
ttagacttctaagag

SEQ ID NO: 633300 - DNA, 15 bp, Homo sapiens
tagacttctaagagt

SEQ ID NO: 633301 - DNA, 15 bp, Homo sapiens
agacttctaagagtt

SEQ ID NO: 633302 - DNA, 15 bp, Homo sapiens
gacttctaagagttt

SEQ ID NO: 633303 - DNA, 15 bp, Homo sapiens
acttctaagagtttg

SEQ ID NO: 633304 - DNA, 15 bp, Homo sapiens
cttctaagagtttgg

SEQ ID NO: 633305 - DNA, 15 bp, Homo sapiens
ttctaagagtttggg

SEQ ID NO: 633306 - DNA, 15 bp, Homo sapiens
tctaagagtttgggt

SEQ ID NO: 633307 - DNA, 15 bp, Homo sapiens
ctaagagtttgggtt

SEQ ID NO: 633308 - DNA, 15 bp, Homo sapiens
taagagtttgggttt

SEQ ID NO: 633309 - DNA, 15 bp, Homo sapiens
aagagtttgggtttt

SEQ ID NO: 633310 - DNA, 15 bp, Homo sapiens
agagtttgggttttc

SEQ ID NO: 633311 - DNA, 15 bp, Homo sapiens
gagtttgggttttca

SEQ ID NO: 633312 - DNA, 15 bp, Homo sapiens
agtttgggttttcaa

SEQ ID NO: 633313 - DNA, 15 bp, Homo sapiens
gtttgggttttcaaa

SEQ ID NO: 633314 - DNA, 15 bp, Homo sapiens
tttgggttttcaaaa

SEQ ID NO: 633315 - DNA, 15 bp, Homo sapiens
ttgggttttcaaaag

SEQ ID NO: 633316 - DNA, 15 bp, Homo sapiens
tgggttttcaaaaga

SEQ ID NO: 633317 - DNA, 15 bp, Homo sapiens
gggttttcaaaagat

SEQ ID NO: 633318 - DNA, 15 bp, Homo sapiens
ggttttcaaaagatc

SEQ ID NO: 633319 - DNA, 15 bp, Homo sapiens
gttttcaaaagatca

SEQ ID NO: 633320 - DNA, 15 bp, Homo sapiens
ttttcaaaagatcac

SEQ ID NO: 633321 - DNA, 15 bp, Homo sapiens
tttcaaaagatcact

SEQ ID NO: 633322 - DNA, 15 bp, Homo sapiens
ttcaaaagatcactt

SEQ ID NO: 633323 - DNA, 15 bp, Homo sapiens
tcaaaagatcactta

SEQ ID NO: 633324 - DNA, 15 bp, Homo sapiens
caaaagatcacttag

SEQ ID NO: 633325 - DNA, 15 bp, Homo sapiens
aaaagatcacttagc

SEQ ID NO: 633326 - DNA, 15 bp, Homo sapiens
aaagatcacttagct

SEQ ID NO: 633327 - DNA, 15 bp, Homo sapiens
aagatcacttagctt

SEQ ID NO: 633328 - DNA, 15 bp, Homo sapiens
agatcacttagcttt

SEQ ID NO: 633329 - DNA, 15 bp, Homo sapiens
gatcacttagctttt

SEQ ID NO: 633330 - DNA, 15 bp, Homo sapiens
atcacttagcttttt

SEQ ID NO: 633331 - DNA, 15 bp, Homo sapiens
tcacttagctttttt

SEQ ID NO: 633332 - DNA, 15 bp, Homo sapiens
cacttagcttttttg

SEQ ID NO: 633333 - DNA, 15 bp, Homo sapiens
acttagcttttttgg

SEQ ID NO: 633334 - DNA, 15 bp, Homo sapiens
cttagcttttttggg

SEQ ID NO: 633335 - DNA, 15 bp, Homo sapiens
ttagcttttttgggt

SEQ ID NO: 633336 - DNA, 15 bp, Homo sapiens
tagcttttttgggtg

SEQ ID NO: 633337 - DNA, 15 bp, Homo sapiens
agcttttttgggtga

SEQ ID NO: 633338 - DNA, 15 bp, Homo sapiens
gcttttttgggtgat

SEQ ID NO: 633339 - DNA, 15 bp, Homo sapiens
cttttttgggtgatt

SEQ ID NO: 633340 - DNA, 15 bp, Homo sapiens
ttttttgggtgattt

SEQ ID NO: 633341 - DNA, 15 bp, Homo sapiens
tttttgggtgatttt

SEQ ID NO: 633342 - DNA, 15 bp, Homo sapiens
ttttgggtgattttt

SEQ ID NO: 633343 - DNA, 15 bp, Homo sapiens
tttgggtgatttttc

SEQ ID NO: 633344 - DNA, 15 bp, Homo sapiens
ttgggtgatttttcc

SEQ ID NO: 633345 - DNA, 15 bp, Homo sapiens
tgggtgatttttccc

SEQ ID NO: 633346 - DNA, 15 bp, Homo sapiens
gggtgatttttcccc

SEQ ID NO: 633347 - DNA, 15 bp, Homo sapiens
ggtgatttttccccc

SEQ ID NO: 633348 - DNA, 15 bp, Homo sapiens
gtgatttttccccct

SEQ ID NO: 633349 - DNA, 15 bp, Homo sapiens
tgatttttccccctt

SEQ ID NO: 633350 - DNA, 15 bp, Homo sapiens
gatttttccccctta

SEQ ID NO: 633351 - DNA, 15 bp, Homo sapiens
atttttcccccttac

SEQ ID NO: 633352 - DNA, 15 bp, Homo sapiens
tttttcccccttact

SEQ ID NO: 633353 - DNA, 15 bp, Homo sapiens
ttttcccccttactg

SEQ ID NO: 633354 - DNA, 15 bp, Homo sapiens
tttcccccttactgt

SEQ ID NO: 633355 - DNA, 15 bp, Homo sapiens
ttcccccttactgtg

SEQ ID NO: 633356 - DNA, 15 bp, Homo sapiens
tcccccttactgtga

SEQ ID NO: 633357 - DNA, 15 bp, Homo sapiens
cccccttactgtgag

SEQ ID NO: 633358 - DNA, 15 bp, Homo sapiens
ccccttactgtgaga

SEQ ID NO: 633359 - DNA, 15 bp, Homo sapiens
cccttactgtgagat

SEQ ID NO: 633360 - DNA, 15 bp, Homo sapiens
ccttactgtgagatg

SEQ ID NO: 633361 - DNA, 15 bp, Homo sapiens
cttactgtgagatga

SEQ ID NO: 633362 - DNA, 15 bp, Homo sapiens
ttactgtgagatgag

SEQ ID NO: 633363 - DNA, 15 bp, Homo sapiens
tactgtgagatgaga

SEQ ID NO: 633364 - DNA, 15 bp, Homo sapiens
actgtgagatgagag

SEQ ID NO: 633365 - DNA, 15 bp, Homo sapiens
ctgtgagatgagaga

SEQ ID NO: 633366 - DNA, 15 bp, Homo sapiens
tgtgagatgagagag

SEQ ID NO: 633367 - DNA, 15 bp, Homo sapiens
gtgagatgagagagg

SEQ ID NO: 633368 - DNA, 15 bp, Homo sapiens
tgagatgagagaggc

SEQ ID NO: 633369 - DNA, 15 bp, Homo sapiens
gagatgagagaggct

SEQ ID NO: 633370 - DNA, 15 bp, Homo sapiens
agatgagagaggctg

SEQ ID NO: 633371 - DNA, 15 bp, Homo sapiens
gatgagagaggctgt

SEQ ID NO: 633372 - DNA, 15 bp, Homo sapiens
atgagagaggctgtt

SEQ ID NO: 633373 - DNA, 15 bp, Homo sapiens
tgagagaggctgttt

SEQ ID NO: 633374 - DNA, 15 bp, Homo sapiens
gagagaggctgtttg

SEQ ID NO: 633375 - DNA, 15 bp, Homo sapiens
agagaggctgtttgg

SEQ ID NO: 633376 - DNA, 15 bp, Homo sapiens
gagaggctgtttgga

SEQ ID NO: 633377 - DNA, 15 bp, Homo sapiens
agaggctgtttggat

SEQ ID NO: 633378 - DNA, 15 bp, Homo sapiens
gaggctgtttggatt

SEQ ID NO: 633379 - DNA, 15 bp, Homo sapiens
aggctgtttggattt

SEQ ID NO: 633380 - DNA, 15 bp, Homo sapiens
ggctgtttggatttg

SEQ ID NO: 633381 - DNA, 15 bp, Homo sapiens
gctgtttggatttgg

SEQ ID NO: 633382 - DNA, 15 bp, Homo sapiens
ctgtttggatttggg

SEQ ID NO: 633383 - DNA, 15 bp, Homo sapiens
tgtttggatttggga

SEQ ID NO: 633384 - DNA, 15 bp, Homo sapiens
gtttggatttgggat

SEQ ID NO: 633385 - DNA, 15 bp, Homo sapiens
tttggatttgggatt

SEQ ID NO: 633386 - DNA, 15 bp, Homo sapiens
ttggatttgggattg

SEQ ID NO: 633387 - DNA, 15 bp, Homo sapiens
tggatttgggattgg

SEQ ID NO: 633388 - DNA, 15 bp, Homo sapiens
ggatttgggattggg

SEQ ID NO: 633389 - DNA, 15 bp, Homo sapiens
gatttgggattgggg

SEQ ID NO: 633390 - DNA, 15 bp, Homo sapiens
atttgggattggggt

SEQ ID NO: 633391 - DNA, 15 bp, Homo sapiens
tttgggattggggta

SEQ ID NO: 633392 - DNA, 15 bp, Homo sapiens
ttgggattggggtag

SEQ ID NO: 633393 - DNA, 15 bp, Homo sapiens
tgggattggggtagc

SEQ ID NO: 633394 - DNA, 15 bp, Homo sapiens
gggattggggtagcg

SEQ ID NO: 633395 - DNA, 15 bp, Homo sapiens
ggattggggtagcgg

SEQ ID NO: 633396 - DNA, 15 bp, Homo sapiens
gattggggtagcggg

SEQ ID NO: 633397 - DNA, 15 bp, Homo sapiens
attggggtagcgggg

SEQ ID NO: 633398 - DNA, 15 bp, Homo sapiens
ttggggtagcgggga

SEQ ID NO: 633399 - DNA, 15 bp, Homo sapiens
tggggtagcggggac

SEQ ID NO: 633400 - DNA, 15 bp, Homo sapiens
ggggtagcggggaca

SEQ ID NO: 633401 - DNA, 15 bp, Homo sapiens
gggtagcggggacag

SEQ ID NO: 633402 - DNA, 15 bp, Homo sapiens
ggtagcggggacagc

SEQ ID NO: 633403 - DNA, 15 bp, Homo sapiens
gtagcggggacagca

SEQ ID NO: 633404 - DNA, 15 bp, Homo sapiens
tagcggggacagcaa

SEQ ID NO: 633405 - DNA, 15 bp, Homo sapiens
agcggggacagcaac

SEQ ID NO: 633406 - DNA, 15 bp, Homo sapiens
gcggggacagcaact

SEQ ID NO: 633407 - DNA, 15 bp, Homo sapiens
cggggacagcaactt

SEQ ID NO: 633408 - DNA, 15 bp, Homo sapiens
ggggacagcaacttt

SEQ ID NO: 633409 - DNA, 15 bp, Homo sapiens
gggacagcaactttt

SEQ ID NO: 633410 - DNA, 15 bp, Homo sapiens
ggacagcaacttttc

SEQ ID NO: 633411 - DNA, 15 bp, Homo sapiens
gacagcaacttttct

SEQ ID NO: 633412 - DNA, 15 bp, Homo sapiens
acagcaacttttctt

SEQ ID NO: 633413 - DNA, 15 bp, Homo sapiens
cagcaacttttcttt

SEQ ID NO: 633414 - DNA, 15 bp, Homo sapiens
agcaacttttctttt

SEQ ID NO: 633415 - DNA, 15 bp, Homo sapiens
gcaacttttcttttc

SEQ ID NO: 633416 - DNA, 15 bp, Homo sapiens
caacttttcttttct

SEQ ID NO: 633417 - DNA, 15 bp, Homo sapiens
aacttttcttttctt

SEQ ID NO: 633418 - DNA, 15 bp, Homo sapiens
acttttcttttcttt

SEQ ID NO: 633419 - DNA, 15 bp, Homo sapiens
cttttcttttctttt

SEQ ID NO: 633420 - DNA, 15 bp, Homo sapiens
ttttcttttcttttt

SEQ ID NO: 633421 - DNA, 15 bp, Homo sapiens
tttcttttctttttc

SEQ ID NO: 633422 - DNA, 15 bp, Homo sapiens
ttcttttctttttct

SEQ ID NO: 633423 - DNA, 15 bp, Homo sapiens
tcttttctttttctt

SEQ ID NO: 633424 - DNA, 15 bp, Homo sapiens
cttttctttttcttt

SEQ ID NO: 633425 - DNA, 15 bp, Homo sapiens
ttttctttttctttt

SEQ ID NO: 633426 - DNA, 15 bp, Homo sapiens
tttctttttcttttt

SEQ ID NO: 633427 - DNA, 15 bp, Homo sapiens
ttctttttctttttt

SEQ ID NO: 633428 - DNA, 15 bp, Homo sapiens
tctttttctttttta

SEQ ID NO: 633429 - DNA, 15 bp, Homo sapiens
ctttttcttttttat

SEQ ID NO: 633430 - DNA, 15 bp, Homo sapiens
tttttcttttttatt

SEQ ID NO: 633431 - DNA, 15 bp, Homo sapiens
ttttcttttttattt

SEQ ID NO: 633432 - DNA, 15 bp, Homo sapiens
tttcttttttatttt

SEQ ID NO: 633433 - DNA, 15 bp, Homo sapiens
ttcttttttattttg

SEQ ID NO: 633434 - DNA, 15 bp, Homo sapiens
tcttttttattttga

SEQ ID NO: 633435 - DNA, 15 bp, Homo sapiens
cttttttattttgag

SEQ ID NO: 633436 - DNA, 15 bp, Homo sapiens
ttttttattttgagg

SEQ ID NO: 633437 - DNA, 15 bp, Homo sapiens
tttttattttgaggt

SEQ ID NO: 633438 - DNA, 15 bp, Homo sapiens
ttttattttgaggta

SEQ ID NO: 633439 - DNA, 15 bp, Homo sapiens
tttattttgaggtag

SEQ ID NO: 633440 - DNA, 15 bp, Homo sapiens
ttattttgaggtagg

SEQ ID NO: 633441 - DNA, 15 bp, Homo sapiens
tattttgaggtaggg

SEQ ID NO: 633442 - DNA, 15 bp, Homo sapiens
attttgaggtagggt

SEQ ID NO: 633443 - DNA, 15 bp, Homo sapiens
ttttgaggtagggta

SEQ ID NO: 633444 - DNA, 15 bp, Homo sapiens
tttgaggtagggtat

SEQ ID NO: 633445 - DNA, 15 bp, Homo sapiens
ttgaggtagggtatt

SEQ ID NO: 633446 - DNA, 15 bp, Homo sapiens
tgaggtagggtattg

SEQ ID NO: 633447 - DNA, 15 bp, Homo sapiens
gaggtagggtattgc

SEQ ID NO: 633448 - DNA, 15 bp, Homo sapiens
aggtagggtattgct

SEQ ID NO: 633449 - DNA, 15 bp, Homo sapiens
ggtagggtattgctg

SEQ ID NO: 633450 - DNA, 15 bp, Homo sapiens
gtagggtattgctgt

SEQ ID NO: 633451 - DNA, 15 bp, Homo sapiens
tagggtattgctgtg

SEQ ID NO: 633452 - DNA, 15 bp, Homo sapiens
agggtattgctgtgt

SEQ ID NO: 633453 - DNA, 15 bp, Homo sapiens
gggtattgctgtgtc

SEQ ID NO: 633454 - DNA, 15 bp, Homo sapiens
ggtattgctgtgtca

SEQ ID NO: 633455 - DNA, 15 bp, Homo sapiens
gtattgctgtgtcac

SEQ ID NO: 633456 - DNA, 15 bp, Homo sapiens
tattgctgtgtcacc

SEQ ID NO: 633457 - DNA, 15 bp, Homo sapiens
attgctgtgtcaccc

SEQ ID NO: 633458 - DNA, 15 bp, Homo sapiens
ttgctgtgtcaccca

SEQ ID NO: 633459 - DNA, 15 bp, Homo sapiens
tgctgtgtcacccag

SEQ ID NO: 633460 - DNA, 15 bp, Homo sapiens
gctgtgtcacccagg

SEQ ID NO: 633461 - DNA, 15 bp, Homo sapiens
ctgtgtcacccaggc

SEQ ID NO: 633462 - DNA, 15 bp, Homo sapiens
tgtgtcacccaggct

SEQ ID NO: 633463 - DNA, 15 bp, Homo sapiens
gtgtcacccaggctg

SEQ ID NO: 633464 - DNA, 15 bp, Homo sapiens
tgtcacccaggctgg

SEQ ID NO: 633465 - DNA, 15 bp, Homo sapiens
gtcacccaggctgga

SEQ ID NO: 633466 - DNA, 15 bp, Homo sapiens
tcacccaggctggag

SEQ ID NO: 633467 - DNA, 15 bp, Homo sapiens
ggagtgcagtggtgt

SEQ ID NO: 633468 - DNA, 15 bp, Homo sapiens
gagtgcagtggtgtg

SEQ ID NO: 633469 - DNA, 15 bp, Homo sapiens
agtgcagtggtgtga

SEQ ID NO: 633470 - DNA, 15 bp, Homo sapiens
gtgcagtggtgtgat

SEQ ID NO: 633471 - DNA, 15 bp, Homo sapiens
tgcagtggtgtgatc

SEQ ID NO: 633472 - DNA, 15 bp, Homo sapiens
gcagtggtgtgatct

SEQ ID NO: 633473 - DNA, 15 bp, Homo sapiens
cagtggtgtgatctc

SEQ ID NO: 633474 - DNA, 15 bp, Homo sapiens
agtggtgtgatctcg

SEQ ID NO: 633475 - DNA, 15 bp, Homo sapiens
gtggtgtgatctcgg

SEQ ID NO: 633476 - DNA, 15 bp, Homo sapiens
tggtgtgatctcggc

SEQ ID NO: 633477 - DNA, 15 bp, Homo sapiens
ggtgtgatctcggct

SEQ ID NO: 633478 - DNA, 15 bp, Homo sapiens
gtgtgatctcggctc

SEQ ID NO: 633479 - DNA, 15 bp, Homo sapiens
tgtgatctcggctca

SEQ ID NO: 633480 - DNA, 15 bp, Homo sapiens
gtgatctcggctcac

SEQ ID NO: 633481 - DNA, 15 bp, Homo sapiens
tcactgcaacctcca

SEQ ID NO: 633482 - DNA, 15 bp, Homo sapiens
cactgcaacctccac

SEQ ID NO: 633483 - DNA, 15 bp, Homo sapiens
actgcaacctccacc

SEQ ID NO: 633484 - DNA, 15 bp, Homo sapiens
ctgcaacctccacct

SEQ ID NO: 633485 - DNA, 15 bp, Homo sapiens
tgcaacctccacctc

SEQ ID NO: 633486 - DNA, 15 bp, Homo sapiens
gcaacctccacctcc

SEQ ID NO: 633487 - DNA, 15 bp, Homo sapiens
caacctccacctccc

SEQ ID NO: 633488 - DNA, 15 bp, Homo sapiens
aacctccacctcccg

SEQ ID NO: 633489 - DNA, 15 bp, Homo sapiens
acctccacctcccgg

SEQ ID NO: 633490 - DNA, 15 bp, Homo sapiens
cctccacctcccggg

SEQ ID NO: 633491 - DNA, 15 bp, Homo sapiens
ctccacctcccgggc

SEQ ID NO: 633492 - DNA, 15 bp, Homo sapiens
tccacctcccgggct

SEQ ID NO: 633493 - DNA, 15 bp, Homo sapiens
ccacctcccgggctc

SEQ ID NO: 633494 - DNA, 15 bp, Homo sapiens
cacctcccgggctca

SEQ ID NO: 633495 - DNA, 15 bp, Homo sapiens
acctcccgggctcag

SEQ ID NO: 633496 - DNA, 15 bp, Homo sapiens
cctcccgggctcagg

SEQ ID NO: 633497 - DNA, 15 bp, Homo sapiens
ctcccgggctcaggt

SEQ ID NO: 633498 - DNA, 15 bp, Homo sapiens
tcccgggctcaggtg

SEQ ID NO: 633499 - DNA, 15 bp, Homo sapiens
cccgggctcaggtga

SEQ ID NO: 633500 - DNA, 15 bp, Homo sapiens
ccgggctcaggtgat

SEQ ID NO: 633501 - DNA, 15 bp, Homo sapiens
cgggctcaggtgatc

SEQ ID NO: 633502 - DNA, 15 bp, Homo sapiens
gggctcaggtgatcc

SEQ ID NO: 633503 - DNA, 15 bp, Homo sapiens
ggctcaggtgatcct

SEQ ID NO: 633504 - DNA, 15 bp, Homo sapiens
gctcaggtgatcctc

SEQ ID NO: 633505 - DNA, 15 bp, Homo sapiens
ctcaggtgatcctcc

SEQ ID NO: 633506 - DNA, 15 bp, Homo sapiens
tcaggtgatcctcct

SEQ ID NO: 633507 - DNA, 15 bp, Homo sapiens
caggtgatcctcctg

SEQ ID NO: 633508 - DNA, 15 bp, Homo sapiens
aggtgatcctcctgc

SEQ ID NO: 633509 - DNA, 15 bp, Homo sapiens
ggtgatcctcctgct

SEQ ID NO: 633510 - DNA, 15 bp, Homo sapiens
gtgatcctcctgctt

SEQ ID NO: 633511 - DNA, 15 bp, Homo sapiens
tgatcctcctgcttc

SEQ ID NO: 633512 - DNA, 15 bp, Homo sapiens
gatcctcctgcttca

SEQ ID NO: 633513 - DNA, 15 bp, Homo sapiens
atcctcctgcttcag

SEQ ID NO: 633514 - DNA, 15 bp, Homo sapiens
tcctcctgcttcagc

SEQ ID NO: 633515 - DNA, 15 bp, Homo sapiens
cctcctgcttcagcc

SEQ ID NO: 633516 - DNA, 15 bp, Homo sapiens
ctcctgcttcagcct

SEQ ID NO: 633517 - DNA, 15 bp, Homo sapiens
tcctgcttcagcctc

SEQ ID NO: 633518 - DNA, 15 bp, Homo sapiens
cctgcttcagcctcc

SEQ ID NO: 633519 - DNA, 15 bp, Homo sapiens
ctgcttcagcctccc

SEQ ID NO: 633520 - DNA, 15 bp, Homo sapiens
tgcttcagcctcccc

SEQ ID NO: 633521 - DNA, 15 bp, Homo sapiens
gcttcagcctcccca

SEQ ID NO: 633522 - DNA, 15 bp, Homo sapiens
cttcagcctccccag

SEQ ID NO: 633523 - DNA, 15 bp, Homo sapiens
ttcagcctccccagt

SEQ ID NO: 633524 - DNA, 15 bp, Homo sapiens
tcagcctccccagta

SEQ ID NO: 633525 - DNA, 15 bp, Homo sapiens
cagcctccccagtaa

SEQ ID NO: 633526 - DNA, 15 bp, Homo sapiens
agcctccccagtaac

SEQ ID NO: 633527 - DNA, 15 bp, Homo sapiens
gcctccccagtaact

SEQ ID NO: 633528 - DNA, 15 bp, Homo sapiens
cctccccagtaactg

SEQ ID NO: 633529 - DNA, 15 bp, Homo sapiens
ctccccagtaactgg

SEQ ID NO: 633530 - DNA, 15 bp, Homo sapiens
tccccagtaactggg

SEQ ID NO: 633531 - DNA, 15 bp, Homo sapiens
ccccagtaactggga

SEQ ID NO: 633532 - DNA, 15 bp, Homo sapiens
cccagtaactgggac

SEQ ID NO: 633533 - DNA, 15 bp, Homo sapiens
ccagtaactgggact

SEQ ID NO: 633534 - DNA, 15 bp, Homo sapiens
cagtaactgggacta

SEQ ID NO: 633535 - DNA, 15 bp, Homo sapiens
ctgggactacaggcg

SEQ ID NO: 633536 - DNA, 15 bp, Homo sapiens
tgggactacaggcgc

SEQ ID NO: 633537 - DNA, 15 bp, Homo sapiens
gggactacaggcgcg

SEQ ID NO: 633538 - DNA, 15 bp, Homo sapiens
ggactacaggcgcgt

SEQ ID NO: 633539 - DNA, 15 bp, Homo sapiens
gactacaggcgcgtg

SEQ ID NO: 633540 - DNA, 15 bp, Homo sapiens
actacaggcgcgtgc

SEQ ID NO: 633541 - DNA, 15 bp, Homo sapiens
ctacaggcgcgtgcc

SEQ ID NO: 633542 - DNA, 15 bp, Homo sapiens
tacaggcgcgtgcca

SEQ ID NO: 633543 - DNA, 15 bp, Homo sapiens
acaggcgcgtgccac

SEQ ID NO: 633544 - DNA, 15 bp, Homo sapiens
caggcgcgtgccaca

SEQ ID NO: 633545 - DNA, 15 bp, Homo sapiens
aggcgcgtgccacat

SEQ ID NO: 633546 - DNA, 15 bp, Homo sapiens
ggcgcgtgccacatg

SEQ ID NO: 633547 - DNA, 15 bp, Homo sapiens
gcgcgtgccacatgc

SEQ ID NO: 633548 - DNA, 15 bp, Homo sapiens
cgcgtgccacatgcc

SEQ ID NO: 633549 - DNA, 15 bp, Homo sapiens
gcgtgccacatgcct

SEQ ID NO: 633550 - DNA, 15 bp, Homo sapiens
cgtgccacatgcctg

SEQ ID NO: 633551 - DNA, 15 bp, Homo sapiens
gtgccacatgcctgg

SEQ ID NO: 633552 - DNA, 15 bp, Homo sapiens
tgccacatgcctggc

SEQ ID NO: 633553 - DNA, 15 bp, Homo sapiens
gccacatgcctggct

SEQ ID NO: 633554 - DNA, 15 bp, Homo sapiens
ccacatgcctggcta

SEQ ID NO: 633555 - DNA, 15 bp, Homo sapiens
cacatgcctggctaa

SEQ ID NO: 633556 - DNA, 15 bp, Homo sapiens
acatgcctggctaat

SEQ ID NO: 633557 - DNA, 15 bp, Homo sapiens
gcctggctaattttg

SEQ ID NO: 633558 - DNA, 15 bp, Homo sapiens
cctggctaattttgt

SEQ ID NO: 633559 - DNA, 15 bp, Homo sapiens
ctggctaattttgta

SEQ ID NO: 633560 - DNA, 15 bp, Homo sapiens
tggctaattttgtat

SEQ ID NO: 633561 - DNA, 15 bp, Homo sapiens
gccaggctggtctct

SEQ ID NO: 633562 - DNA, 15 bp, Homo sapiens
ccaggctggtctcta

SEQ ID NO: 633563 - DNA, 15 bp, Homo sapiens
caggctggtctctaa

SEQ ID NO: 633564 - DNA, 15 bp, Homo sapiens
aggctggtctctaac

SEQ ID NO: 633565 - DNA, 15 bp, Homo sapiens
ggctggtctctaact

SEQ ID NO: 633566 - DNA, 15 bp, Homo sapiens
gctggtctctaactc

SEQ ID NO: 633567 - DNA, 15 bp, Homo sapiens
ctggtctctaactcc

SEQ ID NO: 633568 - DNA, 15 bp, Homo sapiens
tggtctctaactcct

SEQ ID NO: 633569 - DNA, 15 bp, Homo sapiens
ggtctctaactcctg

SEQ ID NO: 633570 - DNA, 15 bp, Homo sapiens
gtctctaactcctga

SEQ ID NO: 633571 - DNA, 15 bp, Homo sapiens
tctctaactcctgac

SEQ ID NO: 633572 - DNA, 15 bp, Homo sapiens
ctctaactcctgacc

SEQ ID NO: 633573 - DNA, 15 bp, Homo sapiens
tctaactcctgacct

SEQ ID NO: 633574 - DNA, 15 bp, Homo sapiens
ctaactcctgacctc

SEQ ID NO: 633575 - DNA, 15 bp, Homo sapiens
taactcctgacctca

SEQ ID NO: 633576 - DNA, 15 bp, Homo sapiens
actcctgacctcagg

SEQ ID NO: 633577 - DNA, 15 bp, Homo sapiens
ctcctgacctcaggt

SEQ ID NO: 633578 - DNA, 15 bp, Homo sapiens
tcctgacctcaggtg

SEQ ID NO: 633579 - DNA, 15 bp, Homo sapiens
cctgacctcaggtga

SEQ ID NO: 633580 - DNA, 15 bp, Homo sapiens
ctgacctcaggtgat

SEQ ID NO: 633581 - DNA, 15 bp, Homo sapiens
tgacctcaggtgata

SEQ ID NO: 633582 - DNA, 15 bp, Homo sapiens
gacctcaggtgatac

SEQ ID NO: 633583 - DNA, 15 bp, Homo sapiens
acctcaggtgatacg

SEQ ID NO: 633584 - DNA, 15 bp, Homo sapiens
cctcaggtgatacgc

SEQ ID NO: 633585 - DNA, 15 bp, Homo sapiens
ctcaggtgatacgcc

SEQ ID NO: 633586 - DNA, 15 bp, Homo sapiens
tcaggtgatacgccc

SEQ ID NO: 633587 - DNA, 15 bp, Homo sapiens
caggtgatacgccca

SEQ ID NO: 633588 - DNA, 15 bp, Homo sapiens
aggtgatacgcccac

SEQ ID NO: 633589 - DNA, 15 bp, Homo sapiens
ggtgatacgcccacc

SEQ ID NO: 633590 - DNA, 15 bp, Homo sapiens
gtgatacgcccacct

SEQ ID NO: 633591 - DNA, 15 bp, Homo sapiens
tgatacgcccacctg

SEQ ID NO: 633592 - DNA, 15 bp, Homo sapiens
gatacgcccacctgg

SEQ ID NO: 633593 - DNA, 15 bp, Homo sapiens
atacgcccacctggg

SEQ ID NO: 633594 - DNA, 15 bp, Homo sapiens
tacgcccacctgggc

SEQ ID NO: 633595 - DNA, 15 bp, Homo sapiens
acgcccacctgggcc

SEQ ID NO: 633596 - DNA, 15 bp, Homo sapiens
cgcccacctgggcct

SEQ ID NO: 633597 - DNA, 15 bp, Homo sapiens
gcccacctgggcctc

SEQ ID NO: 633598 - DNA, 15 bp, Homo sapiens
cccacctgggcctcc

SEQ ID NO: 633599 - DNA, 15 bp, Homo sapiens
ccacctgggcctccc

SEQ ID NO: 633600 - DNA, 15 bp, Homo sapiens
cacctgggcctccca

SEQ ID NO: 633601 - DNA, 15 bp, Homo sapiens
acctgggcctcccaa

SEQ ID NO: 633602 - DNA, 15 bp, Homo sapiens
cctgggcctcccaaa

SEQ ID NO: 633603 - DNA, 15 bp, Homo sapiens
ctgggcctcccaaaa

SEQ ID NO: 633604 - DNA, 15 bp, Homo sapiens
tgggcctcccaaaat

SEQ ID NO: 633605 - DNA, 15 bp, Homo sapiens
gggcctcccaaaata

SEQ ID NO: 633606 - DNA, 15 bp, Homo sapiens
ggcctcccaaaatac

SEQ ID NO: 633607 - DNA, 15 bp, Homo sapiens
gcctcccaaaatact

SEQ ID NO: 633608 - DNA, 15 bp, Homo sapiens
cctcccaaaatactg

SEQ ID NO: 633609 - DNA, 15 bp, Homo sapiens
ctcccaaaatactgg

SEQ ID NO: 633610 - DNA, 15 bp, Homo sapiens
tcccaaaatactggg

SEQ ID NO: 633611 - DNA, 15 bp, Homo sapiens
cccaaaatactggga

SEQ ID NO: 633612 - DNA, 15 bp, Homo sapiens
ccaaaatactgggat

SEQ ID NO: 633613 - DNA, 15 bp, Homo sapiens
caaaatactgggatt

SEQ ID NO: 633614 - DNA, 15 bp, Homo sapiens
aaaatactgggatta

SEQ ID NO: 633615 - DNA, 15 bp, Homo sapiens
aaatactgggattac

SEQ ID NO: 633616 - DNA, 15 bp, Homo sapiens
aatactgggattaca

SEQ ID NO: 633617 - DNA, 15 bp, Homo sapiens
atactgggattacag

SEQ ID NO: 633618 - DNA, 15 bp, Homo sapiens
tactgggattacagg

SEQ ID NO: 633619 - DNA, 15 bp, Homo sapiens
actgggattacaggc

SEQ ID NO: 633620 - DNA, 15 bp, Homo sapiens
tacaggcatgagccg

SEQ ID NO: 633621 - DNA, 15 bp, Homo sapiens
acaggcatgagccgc

SEQ ID NO: 633622 - DNA, 15 bp, Homo sapiens
caggcatgagccgct

SEQ ID NO: 633623 - DNA, 15 bp, Homo sapiens
aggcatgagccgctg

SEQ ID NO: 633624 - DNA, 15 bp, Homo sapiens
ggcatgagccgctgc

SEQ ID NO: 633625 - DNA, 15 bp, Homo sapiens
gcatgagccgctgca

SEQ ID NO: 633626 - DNA, 15 bp, Homo sapiens
catgagccgctgcat

SEQ ID NO: 633627 - DNA, 15 bp, Homo sapiens
atgagccgctgcatc

SEQ ID NO: 633628 - DNA, 15 bp, Homo sapiens
tgagccgctgcatca

SEQ ID NO: 633629 - DNA, 15 bp, Homo sapiens
gagccgctgcatcag

SEQ ID NO: 633630 - DNA, 15 bp, Homo sapiens
agccgctgcatcagc

SEQ ID NO: 633631 - DNA, 15 bp, Homo sapiens
gccgctgcatcagcc

SEQ ID NO: 633632 - DNA, 15 bp, Homo sapiens
ccgctgcatcagcca

SEQ ID NO: 633633 - DNA, 15 bp, Homo sapiens
cgctgcatcagccag

SEQ ID NO: 633634 - DNA, 15 bp, Homo sapiens
gctgcatcagccagc

SEQ ID NO: 633635 - DNA, 15 bp, Homo sapiens
ctgcatcagccagca

SEQ ID NO: 633636 - DNA, 15 bp, Homo sapiens
tgcatcagccagcag

SEQ ID NO: 633637 - DNA, 15 bp, Homo sapiens
gcatcagccagcagt

SEQ ID NO: 633638 - DNA, 15 bp, Homo sapiens
catcagccagcagtt

SEQ ID NO: 633639 - DNA, 15 bp, Homo sapiens
atcagccagcagttt

SEQ ID NO: 633640 - DNA, 15 bp, Homo sapiens
tcagccagcagtttt

SEQ ID NO: 633641 - DNA, 15 bp, Homo sapiens
cagccagcagttttt

SEQ ID NO: 633642 - DNA, 15 bp, Homo sapiens
agccagcagtttttc

SEQ ID NO: 633643 - DNA, 15 bp, Homo sapiens
gccagcagtttttct

SEQ ID NO: 633644 - DNA, 15 bp, Homo sapiens
ccagcagtttttctt

SEQ ID NO: 633645 - DNA, 15 bp, Homo sapiens
cagcagtttttcttg

SEQ ID NO: 633646 - DNA, 15 bp, Homo sapiens
agcagtttttcttgt

SEQ ID NO: 633647 - DNA, 15 bp, Homo sapiens
gcagtttttcttgtg

SEQ ID NO: 633648 - DNA, 15 bp, Homo sapiens
cagtttttcttgtgg

SEQ ID NO: 633649 - DNA, 15 bp, Homo sapiens
agtttttcttgtggt

SEQ ID NO: 633650 - DNA, 15 bp, Homo sapiens
gtttttcttgtggtt

SEQ ID NO: 633651 - DNA, 15 bp, Homo sapiens
tttttcttgtggttt

SEQ ID NO: 633652 - DNA, 15 bp, Homo sapiens
ttttcttgtggtttt

SEQ ID NO: 633653 - DNA, 15 bp, Homo sapiens
tttcttgtggttttt

SEQ ID NO: 633654 - DNA, 15 bp, Homo sapiens
ttcttgtggtttttt

SEQ ID NO: 633655 - DNA, 15 bp, Homo sapiens
tcttgtggttttttt

SEQ ID NO: 633656 - DNA, 15 bp, Homo sapiens
cttgtggtttttttt

SEQ ID NO: 633657 - DNA, 15 bp, Homo sapiens
ttgtggttttttttg

SEQ ID NO: 633658 - DNA, 15 bp, Homo sapiens
tgtggttttttttgt

SEQ ID NO: 633659 - DNA, 15 bp, Homo sapiens
gtggttttttttgtt

SEQ ID NO: 633660 - DNA, 15 bp, Homo sapiens
tggttttttttgttt

SEQ ID NO: 633661 - DNA, 15 bp, Homo sapiens
gtttgttttgttttg

SEQ ID NO: 633662 - DNA, 15 bp, Homo sapiens
ttttgttttgttttg

SEQ ID NO: 633663 - DNA, 15 bp, Homo sapiens
tttgttttgtttttg

SEQ ID NO: 633664 - DNA, 15 bp, Homo sapiens
ttgttttgtttttga

SEQ ID NO: 633665 - DNA, 15 bp, Homo sapiens
tgttttgtttttgag

SEQ ID NO: 633666 - DNA, 15 bp, Homo sapiens
gttttgtttttgaga

SEQ ID NO: 633667 - DNA, 15 bp, Homo sapiens
ttttgtttttgagat

SEQ ID NO: 633668 - DNA, 15 bp, Homo sapiens
tttgtttttgagata

SEQ ID NO: 633669 - DNA, 15 bp, Homo sapiens
ttgtttttgagatag

SEQ ID NO: 633670 - DNA, 15 bp, Homo sapiens
tgtttttgagatagg

SEQ ID NO: 633671 - DNA, 15 bp, Homo sapiens
gtttttgagataggg

SEQ ID NO: 633672 - DNA, 15 bp, Homo sapiens
tttttgagatagggt

SEQ ID NO: 633673 - DNA, 15 bp, Homo sapiens
ttttgagatagggtc

SEQ ID NO: 633674 - DNA, 15 bp, Homo sapiens
tttgagatagggtct

SEQ ID NO: 633675 - DNA, 15 bp, Homo sapiens
ttgagatagggtctt

SEQ ID NO: 633676 - DNA, 15 bp, Homo sapiens
tgagatagggtctta

SEQ ID NO: 633677 - DNA, 15 bp, Homo sapiens
gagatagggtcttac

SEQ ID NO: 633678 - DNA, 15 bp, Homo sapiens
agatagggtcttact

SEQ ID NO: 633679 - DNA, 15 bp, Homo sapiens
gatagggtcttactc

SEQ ID NO: 633680 - DNA, 15 bp, Homo sapiens
atagggtcttactct

SEQ ID NO: 633681 - DNA, 15 bp, Homo sapiens
tagggtcttactctg

SEQ ID NO: 633682 - DNA, 15 bp, Homo sapiens
agggtcttactctgt

SEQ ID NO: 633683 - DNA, 15 bp, Homo sapiens
gggtcttactctgtt

SEQ ID NO: 633684 - DNA, 15 bp, Homo sapiens
ggtcttactctgttg

SEQ ID NO: 633685 - DNA, 15 bp, Homo sapiens
gtcttactctgttgt

SEQ ID NO: 633686 - DNA, 15 bp, Homo sapiens
tcttactctgttgtc

SEQ ID NO: 633687 - DNA, 15 bp, Homo sapiens
cttactctgttgtcc

SEQ ID NO: 633688 - DNA, 15 bp, Homo sapiens
ttactctgttgtcca

SEQ ID NO: 633689 - DNA, 15 bp, Homo sapiens
tactctgttgtccac

SEQ ID NO: 633690 - DNA, 15 bp, Homo sapiens
actctgttgtccacg

SEQ ID NO: 633691 - DNA, 15 bp, Homo sapiens
ctctgttgtccacgc

SEQ ID NO: 633692 - DNA, 15 bp, Homo sapiens
tctgttgtccacgct

SEQ ID NO: 633693 - DNA, 15 bp, Homo sapiens
ctgttgtccacgctg

SEQ ID NO: 633694 - DNA, 15 bp, Homo sapiens
tgttgtccacgctgg

SEQ ID NO: 633695 - DNA, 15 bp, Homo sapiens
gttgtccacgctgga

SEQ ID NO: 633696 - DNA, 15 bp, Homo sapiens
ttgtccacgctggag

SEQ ID NO: 633697 - DNA, 15 bp, Homo sapiens
tgtccacgctggagt

SEQ ID NO: 633698 - DNA, 15 bp, Homo sapiens
gtccacgctggagtg

SEQ ID NO: 633699 - DNA, 15 bp, Homo sapiens
tccacgctggagtgc

SEQ ID NO: 633700 - DNA, 15 bp, Homo sapiens
ccacgctggagtgct

SEQ ID NO: 633701 - DNA, 15 bp, Homo sapiens
cacgctggagtgctg

SEQ ID NO: 633702 - DNA, 15 bp, Homo sapiens
acgctggagtgctgt

SEQ ID NO: 633703 - DNA, 15 bp, Homo sapiens
cgctggagtgctgtg

SEQ ID NO: 633704 - DNA, 15 bp, Homo sapiens
gctggagtgctgtgg

SEQ ID NO: 633705 - DNA, 15 bp, Homo sapiens
ctggagtgctgtggt

SEQ ID NO: 633706 - DNA, 15 bp, Homo sapiens
tggagtgctgtggta

SEQ ID NO: 633707 - DNA, 15 bp, Homo sapiens
ggagtgctgtggtat

SEQ ID NO: 633708 - DNA, 15 bp, Homo sapiens
gagtgctgtggtatg

SEQ ID NO: 633709 - DNA, 15 bp, Homo sapiens
agtgctgtggtatga

SEQ ID NO: 633710 - DNA, 15 bp, Homo sapiens
gtgctgtggtatgat

SEQ ID NO: 633711 - DNA, 15 bp, Homo sapiens
tgctgtggtatgatc

SEQ ID NO: 633712 - DNA, 15 bp, Homo sapiens
gctgtggtatgatcg

SEQ ID NO: 633713 - DNA, 15 bp, Homo sapiens
ctgtggtatgatcgt

SEQ ID NO: 633714 - DNA, 15 bp, Homo sapiens
tgtggtatgatcgta

SEQ ID NO: 633715 - DNA, 15 bp, Homo sapiens
gtggtatgatcgtag

SEQ ID NO: 633716 - DNA, 15 bp, Homo sapiens
tggtatgatcgtagc

SEQ ID NO: 633717 - DNA, 15 bp, Homo sapiens
ggtatgatcgtagct

SEQ ID NO: 633718 - DNA, 15 bp, Homo sapiens
gtatgatcgtagctc

SEQ ID NO: 633719 - DNA, 15 bp, Homo sapiens
tatgatcgtagctca

SEQ ID NO: 633720 - DNA, 15 bp, Homo sapiens
atgatcgtagctcac

SEQ ID NO: 633721 - DNA, 15 bp, Homo sapiens
tgatcgtagctcact

SEQ ID NO: 633722 - DNA, 15 bp, Homo sapiens
gatcgtagctcactg

SEQ ID NO: 633723 - DNA, 15 bp, Homo sapiens
atcgtagctcactgc

SEQ ID NO: 633724 - DNA, 15 bp, Homo sapiens
tcgtagctcactgca

SEQ ID NO: 633725 - DNA, 15 bp, Homo sapiens
cgtagctcactgcag

SEQ ID NO: 633726 - DNA, 15 bp, Homo sapiens
gtagctcactgcagc

SEQ ID NO: 633727 - DNA, 15 bp, Homo sapiens
tagctcactgcagcc

SEQ ID NO: 633728 - DNA, 15 bp, Homo sapiens
agctcactgcagcct

SEQ ID NO: 633729 - DNA, 15 bp, Homo sapiens
ctcactgcagcctca

SEQ ID NO: 633730 - DNA, 15 bp, Homo sapiens
tcactgcagcctcaa

SEQ ID NO: 633731 - DNA, 15 bp, Homo sapiens
cactgcagcctcaaa

SEQ ID NO: 633732 - DNA, 15 bp, Homo sapiens
actgcagcctcaaac

SEQ ID NO: 633733 - DNA, 15 bp, Homo sapiens
ctgcagcctcaaact

SEQ ID NO: 633734 - DNA, 15 bp, Homo sapiens
tgcagcctcaaactc

SEQ ID NO: 633735 - DNA, 15 bp, Homo sapiens
gcagcctcaaactcc

SEQ ID NO: 633736 - DNA, 15 bp, Homo sapiens
cagcctcaaactcct

SEQ ID NO: 633737 - DNA, 15 bp, Homo sapiens
agcctcaaactcctg

SEQ ID NO: 633738 - DNA, 15 bp, Homo sapiens
gcctcaaactcctgg

SEQ ID NO: 633739 - DNA, 15 bp, Homo sapiens
cctcaaactcctggg

SEQ ID NO: 633740 - DNA, 15 bp, Homo sapiens
ctcaaactcctgggc

SEQ ID NO: 633741 - DNA, 15 bp, Homo sapiens
tcaaactcctgggct

SEQ ID NO: 633742 - DNA, 15 bp, Homo sapiens
caaactcctgggctc

SEQ ID NO: 633743 - DNA, 15 bp, Homo sapiens
aaactcctgggctca

SEQ ID NO: 633744 - DNA, 15 bp, Homo sapiens
aactcctgggctcaa

SEQ ID NO: 633745 - DNA, 15 bp, Homo sapiens
actcctgggctcaag

SEQ ID NO: 633746 - DNA, 15 bp, Homo sapiens
ctcctgggctcaagt

SEQ ID NO: 633747 - DNA, 15 bp, Homo sapiens
tcctgggctcaagtg

SEQ ID NO: 633748 - DNA, 15 bp, Homo sapiens
cctgggctcaagtga

SEQ ID NO: 633749 - DNA, 15 bp, Homo sapiens
ctgggctcaagtgat

SEQ ID NO: 633750 - DNA, 15 bp, Homo sapiens
tgggctcaagtgatt

SEQ ID NO: 633751 - DNA, 15 bp, Homo sapiens
gggctcaagtgattc

SEQ ID NO: 633752 - DNA, 15 bp, Homo sapiens
ggctcaagtgattcc

SEQ ID NO: 633753 - DNA, 15 bp, Homo sapiens
gctcaagtgattcct

SEQ ID NO: 633754 - DNA, 15 bp, Homo sapiens
ctcaagtgattcctt

SEQ ID NO: 633755 - DNA, 15 bp, Homo sapiens
tcaagtgattccttc

SEQ ID NO: 633756 - DNA, 15 bp, Homo sapiens
caagtgattccttct

SEQ ID NO: 633757 - DNA, 15 bp, Homo sapiens
aagtgattccttctg

SEQ ID NO: 633758 - DNA, 15 bp, Homo sapiens
agtgattccttctgc

SEQ ID NO: 633759 - DNA, 15 bp, Homo sapiens
gtgattccttctgcc

SEQ ID NO: 633760 - DNA, 15 bp, Homo sapiens
tgattccttctgcct

SEQ ID NO: 633761 - DNA, 15 bp, Homo sapiens
gattccttctgcctc

SEQ ID NO: 633762 - DNA, 15 bp, Homo sapiens
attccttctgcctcc

SEQ ID NO: 633763 - DNA, 15 bp, Homo sapiens
ttccttctgcctccg

SEQ ID NO: 633764 - DNA, 15 bp, Homo sapiens
tccttctgcctccgc

SEQ ID NO: 633765 - DNA, 15 bp, Homo sapiens
ccttctgcctccgcc

SEQ ID NO: 633766 - DNA, 15 bp, Homo sapiens
cttctgcctccgcct

SEQ ID NO: 633767 - DNA, 15 bp, Homo sapiens
ttctgcctccgcctc

SEQ ID NO: 633768 - DNA, 15 bp, Homo sapiens
tctgcctccgcctcc

SEQ ID NO: 633769 - DNA, 15 bp, Homo sapiens
ctgcctccgcctccc

SEQ ID NO: 633770 - DNA, 15 bp, Homo sapiens
tgcctccgcctcccg

SEQ ID NO: 633771 - DNA, 15 bp, Homo sapiens
gcctccgcctcccga

SEQ ID NO: 633772 - DNA, 15 bp, Homo sapiens
cctccgcctcccgag

SEQ ID NO: 633773 - DNA, 15 bp, Homo sapiens
ctccgcctcccgagt

SEQ ID NO: 633774 - DNA, 15 bp, Homo sapiens
tccgcctcccgagta

SEQ ID NO: 633775 - DNA, 15 bp, Homo sapiens
ccgcctcccgagtag

SEQ ID NO: 633776 - DNA, 15 bp, Homo sapiens
cgcctcccgagtagc

SEQ ID NO: 633777 - DNA, 15 bp, Homo sapiens
ccgagtagctgggac

SEQ ID NO: 633778 - DNA, 15 bp, Homo sapiens
cgagtagctgggact

SEQ ID NO: 633779 - DNA, 15 bp, Homo sapiens
gagtagctgggacta

SEQ ID NO: 633780 - DNA, 15 bp, Homo sapiens
ctgggactacaggta

SEQ ID NO: 633781 - DNA, 15 bp, Homo sapiens
tgggactacaggtat

SEQ ID NO: 633782 - DNA, 15 bp, Homo sapiens
gggactacaggtatg

SEQ ID NO: 633783 - DNA, 15 bp, Homo sapiens
ggactacaggtatgc

SEQ ID NO: 633784 - DNA, 15 bp, Homo sapiens
gactacaggtatgca

SEQ ID NO: 633785 - DNA, 15 bp, Homo sapiens
actacaggtatgcac

SEQ ID NO: 633786 - DNA, 15 bp, Homo sapiens
ctacaggtatgcacc

SEQ ID NO: 633787 - DNA, 15 bp, Homo sapiens
tacaggtatgcacca

SEQ ID NO: 633788 - DNA, 15 bp, Homo sapiens
acaggtatgcaccac

SEQ ID NO: 633789 - DNA, 15 bp, Homo sapiens
caggtatgcaccacc

SEQ ID NO: 633790 - DNA, 15 bp, Homo sapiens
aggtatgcaccacca

SEQ ID NO: 633791 - DNA, 15 bp, Homo sapiens
ggtatgcaccaccat

SEQ ID NO: 633792 - DNA, 15 bp, Homo sapiens
gtatgcaccaccata

SEQ ID NO: 633793 - DNA, 15 bp, Homo sapiens
tatgcaccaccatac

SEQ ID NO: 633794 - DNA, 15 bp, Homo sapiens
atgcaccaccatacc

SEQ ID NO: 633795 - DNA, 15 bp, Homo sapiens
tgcaccaccatacct

SEQ ID NO: 633796 - DNA, 15 bp, Homo sapiens
gcaccaccatacctg

SEQ ID NO: 633797 - DNA, 15 bp, Homo sapiens
caccaccatacctgg

SEQ ID NO: 633798 - DNA, 15 bp, Homo sapiens
accaccatacctggc

SEQ ID NO: 633799 - DNA, 15 bp, Homo sapiens
ccaccatacctggca

SEQ ID NO: 633800 - DNA, 15 bp, Homo sapiens
caccatacctggcaa

SEQ ID NO: 633801 - DNA, 15 bp, Homo sapiens
accatacctggcaaa

SEQ ID NO: 633802 - DNA, 15 bp, Homo sapiens
ccatacctggcaaat

SEQ ID NO: 633803 - DNA, 15 bp, Homo sapiens
catacctggcaaatt

SEQ ID NO: 633804 - DNA, 15 bp, Homo sapiens
atacctggcaaattt

SEQ ID NO: 633805 - DNA, 15 bp, Homo sapiens
tacctggcaaatttt

SEQ ID NO: 633806 - DNA, 15 bp, Homo sapiens
acctggcaaattttt

SEQ ID NO: 633807 - DNA, 15 bp, Homo sapiens
cctggcaaattttta

SEQ ID NO: 633808 - DNA, 15 bp, Homo sapiens
ctggcaaatttttac

SEQ ID NO: 633809 - DNA, 15 bp, Homo sapiens
tggcaaatttttaca

SEQ ID NO: 633810 - DNA, 15 bp, Homo sapiens
ggcaaatttttacaa

SEQ ID NO: 633811 - DNA, 15 bp, Homo sapiens
gcaaatttttacaaa

SEQ ID NO: 633812 - DNA, 15 bp, Homo sapiens
caaatttttacaaag

SEQ ID NO: 633813 - DNA, 15 bp, Homo sapiens
aaatttttacaaagt

SEQ ID NO: 633814 - DNA, 15 bp, Homo sapiens
aatttttacaaagtt

SEQ ID NO: 633815 - DNA, 15 bp, Homo sapiens
atttttacaaagttt

SEQ ID NO: 633816 - DNA, 15 bp, Homo sapiens
tttttacaaagtttt

SEQ ID NO: 633817 - DNA, 15 bp, Homo sapiens
ttttacaaagttttt

SEQ ID NO: 633818 - DNA, 15 bp, Homo sapiens
tttacaaagtttttt

SEQ ID NO: 633819 - DNA, 15 bp, Homo sapiens
ttacaaagttttttg

SEQ ID NO: 633820 - DNA, 15 bp, Homo sapiens
tacaaagttttttgt

SEQ ID NO: 633821 - DNA, 15 bp, Homo sapiens
acaaagttttttgta

SEQ ID NO: 633822 - DNA, 15 bp, Homo sapiens
caaagttttttgtag

SEQ ID NO: 633823 - DNA, 15 bp, Homo sapiens
aaagttttttgtagg

SEQ ID NO: 633824 - DNA, 15 bp, Homo sapiens
aagttttttgtaggg

SEQ ID NO: 633825 - DNA, 15 bp, Homo sapiens
agttttttgtaggga

SEQ ID NO: 633826 - DNA, 15 bp, Homo sapiens
gttttttgtagggac

SEQ ID NO: 633827 - DNA, 15 bp, Homo sapiens
ttttttgtagggacg

SEQ ID NO: 633828 - DNA, 15 bp, Homo sapiens
tttttgtagggacgg

SEQ ID NO: 633829 - DNA, 15 bp, Homo sapiens
ttttgtagggacggg

SEQ ID NO: 633830 - DNA, 15 bp, Homo sapiens
tttgtagggacgggg

SEQ ID NO: 633831 - DNA, 15 bp, Homo sapiens
ttgtagggacggggt

SEQ ID NO: 633832 - DNA, 15 bp, Homo sapiens
tgtagggacggggtc

SEQ ID NO: 633833 - DNA, 15 bp, Homo sapiens
gtagggacggggtct

SEQ ID NO: 633834 - DNA, 15 bp, Homo sapiens
tagggacggggtctt

SEQ ID NO: 633835 - DNA, 15 bp, Homo sapiens
agggacggggtcttg

SEQ ID NO: 633836 - DNA, 15 bp, Homo sapiens
gggacggggtcttgc

SEQ ID NO: 633837 - DNA, 15 bp, Homo sapiens
ggacggggtcttgct

SEQ ID NO: 633838 - DNA, 15 bp, Homo sapiens
gacggggtcttgcta

SEQ ID NO: 633839 - DNA, 15 bp, Homo sapiens
acggggtcttgctac

SEQ ID NO: 633840 - DNA, 15 bp, Homo sapiens
cggggtcttgctaca

SEQ ID NO: 633841 - DNA, 15 bp, Homo sapiens
ggggtcttgctacat

SEQ ID NO: 633842 - DNA, 15 bp, Homo sapiens
gggtcttgctacatt

SEQ ID NO: 633843 - DNA, 15 bp, Homo sapiens
ggtcttgctacattc

SEQ ID NO: 633844 - DNA, 15 bp, Homo sapiens
gtcttgctacattcc

SEQ ID NO: 633845 - DNA, 15 bp, Homo sapiens
tcttgctacattccc

SEQ ID NO: 633846 - DNA, 15 bp, Homo sapiens
cttgctacattcccc

SEQ ID NO: 633847 - DNA, 15 bp, Homo sapiens
ttgctacattcccca

SEQ ID NO: 633848 - DNA, 15 bp, Homo sapiens
tgctacattccccat

SEQ ID NO: 633849 - DNA, 15 bp, Homo sapiens
gctacattccccatg

SEQ ID NO: 633850 - DNA, 15 bp, Homo sapiens
ctacattccccatgt

SEQ ID NO: 633851 - DNA, 15 bp, Homo sapiens
tacattccccatgtc

SEQ ID NO: 633852 - DNA, 15 bp, Homo sapiens
acattccccatgtcg

SEQ ID NO: 633853 - DNA, 15 bp, Homo sapiens
cattccccatgtcgg

SEQ ID NO: 633854 - DNA, 15 bp, Homo sapiens
attccccatgtcggt

SEQ ID NO: 633855 - DNA, 15 bp, Homo sapiens
ttccccatgtcggtc

SEQ ID NO: 633856 - DNA, 15 bp, Homo sapiens
tccccatgtcggtct

SEQ ID NO: 633857 - DNA, 15 bp, Homo sapiens
ccccatgtcggtctt

SEQ ID NO: 633858 - DNA, 15 bp, Homo sapiens
cccatgtcggtcttg

SEQ ID NO: 633859 - DNA, 15 bp, Homo sapiens
ccatgtcggtcttga

SEQ ID NO: 633860 - DNA, 15 bp, Homo sapiens
catgtcggtcttgaa

SEQ ID NO: 633861 - DNA, 15 bp, Homo sapiens
atgtcggtcttgaac

SEQ ID NO: 633862 - DNA, 15 bp, Homo sapiens
tgtcggtcttgaact

SEQ ID NO: 633863 - DNA, 15 bp, Homo sapiens
gtcggtcttgaactc

SEQ ID NO: 633864 - DNA, 15 bp, Homo sapiens
tcggtcttgaactcc

SEQ ID NO: 633865 - DNA, 15 bp, Homo sapiens
cggtcttgaactcct

SEQ ID NO: 633866 - DNA, 15 bp, Homo sapiens
gtcttgaactcctgg

SEQ ID NO: 633867 - DNA, 15 bp, Homo sapiens
tcttgaactcctggc

SEQ ID NO: 633868 - DNA, 15 bp, Homo sapiens
cttgaactcctggcc

SEQ ID NO: 633869 - DNA, 15 bp, Homo sapiens
ttgaactcctggcct

SEQ ID NO: 633870 - DNA, 15 bp, Homo sapiens
tgaactcctggcctc

SEQ ID NO: 633871 - DNA, 15 bp, Homo sapiens
gaactcctggcctca

SEQ ID NO: 633872 - DNA, 15 bp, Homo sapiens
aactcctggcctcaa

SEQ ID NO: 633873 - DNA, 15 bp, Homo sapiens
actcctggcctcaag

SEQ ID NO: 633874 - DNA, 15 bp, Homo sapiens
ctcctggcctcaagc

SEQ ID NO: 633875 - DNA, 15 bp, Homo sapiens
tcctggcctcaagca

SEQ ID NO: 633876 - DNA, 15 bp, Homo sapiens
cctggcctcaagcaa

SEQ ID NO: 633877 - DNA, 15 bp, Homo sapiens
ctggcctcaagcaac

SEQ ID NO: 633878 - DNA, 15 bp, Homo sapiens
tggcctcaagcaact

SEQ ID NO: 633879 - DNA, 15 bp, Homo sapiens
ggcctcaagcaactc

SEQ ID NO: 633880 - DNA, 15 bp, Homo sapiens
gcctcaagcaactct

SEQ ID NO: 633881 - DNA, 15 bp, Homo sapiens
cctcaagcaactctc

SEQ ID NO: 633882 - DNA, 15 bp, Homo sapiens
ctcaagcaactctcc

SEQ ID NO: 633883 - DNA, 15 bp, Homo sapiens
tcaagcaactctcct

SEQ ID NO: 633884 - DNA, 15 bp, Homo sapiens
caagcaactctcctg

SEQ ID NO: 633885 - DNA, 15 bp, Homo sapiens
aagcaactctcctgt

SEQ ID NO: 633886 - DNA, 15 bp, Homo sapiens
agcaactctcctgtc

SEQ ID NO: 633887 - DNA, 15 bp, Homo sapiens
gcaactctcctgtct

SEQ ID NO: 633888 - DNA, 15 bp, Homo sapiens
caactctcctgtctc

SEQ ID NO: 633889 - DNA, 15 bp, Homo sapiens
aactctcctgtctca

SEQ ID NO: 633890 - DNA, 15 bp, Homo sapiens
actctcctgtctcag

SEQ ID NO: 633891 - DNA, 15 bp, Homo sapiens
ctctcctgtctcagc

SEQ ID NO: 633892 - DNA, 15 bp, Homo sapiens
ctgtctcagcctccc

SEQ ID NO: 633893 - DNA, 15 bp, Homo sapiens
tgtctcagcctccca

SEQ ID NO: 633894 - DNA, 15 bp, Homo sapiens
gtctcagcctcccaa

SEQ ID NO: 633895 - DNA, 15 bp, Homo sapiens
tctcagcctcccaaa

SEQ ID NO: 633896 - DNA, 15 bp, Homo sapiens
tcagcctcccaaagc

SEQ ID NO: 633897 - DNA, 15 bp, Homo sapiens
cagcctcccaaagca

SEQ ID NO: 633898 - DNA, 15 bp, Homo sapiens
agcctcccaaagcac

SEQ ID NO: 633899 - DNA, 15 bp, Homo sapiens
gcctcccaaagcact

SEQ ID NO: 633900 - DNA, 15 bp, Homo sapiens
cctcccaaagcactg

SEQ ID NO: 633901 - DNA, 15 bp, Homo sapiens
ctcccaaagcactgg

SEQ ID NO: 633902 - DNA, 15 bp, Homo sapiens
tcccaaagcactggg

SEQ ID NO: 633903 - DNA, 15 bp, Homo sapiens
cccaaagcactggga

SEQ ID NO: 633904 - DNA, 15 bp, Homo sapiens
ccaaagcactgggat

SEQ ID NO: 633905 - DNA, 15 bp, Homo sapiens
caaagcactgggatt

SEQ ID NO: 633906 - DNA, 15 bp, Homo sapiens
aaagcactgggatta

SEQ ID NO: 633907 - DNA, 15 bp, Homo sapiens
aagcactgggattac

SEQ ID NO: 633908 - DNA, 15 bp, Homo sapiens
agcactgggattaca

SEQ ID NO: 633909 - DNA, 15 bp, Homo sapiens
gcactgggattacaa

SEQ ID NO: 633910 - DNA, 15 bp, Homo sapiens
cactgggattacaag

SEQ ID NO: 633911 - DNA, 15 bp, Homo sapiens
actgggattacaagt

SEQ ID NO: 633912 - DNA, 15 bp, Homo sapiens
ctgggattacaagtg

SEQ ID NO: 633913 - DNA, 15 bp, Homo sapiens
tgggattacaagtgt

SEQ ID NO: 633914 - DNA, 15 bp, Homo sapiens
gggattacaagtgtg

SEQ ID NO: 633915 - DNA, 15 bp, Homo sapiens
ggattacaagtgtga

SEQ ID NO: 633916 - DNA, 15 bp, Homo sapiens
gattacaagtgtgag

SEQ ID NO: 633917 - DNA, 15 bp, Homo sapiens
attacaagtgtgagc

SEQ ID NO: 633918 - DNA, 15 bp, Homo sapiens
ttacaagtgtgagcc

SEQ ID NO: 633919 - DNA, 15 bp, Homo sapiens
tacaagtgtgagcca

SEQ ID NO: 633920 - DNA, 15 bp, Homo sapiens
acaagtgtgagccac

SEQ ID NO: 633921 - DNA, 15 bp, Homo sapiens
caagtgtgagccacc

SEQ ID NO: 633922 - DNA, 15 bp, Homo sapiens
aagtgtgagccacca

SEQ ID NO: 633923 - DNA, 15 bp, Homo sapiens
agtgtgagccaccac

SEQ ID NO: 633924 - DNA, 15 bp, Homo sapiens
gtgtgagccaccaca

SEQ ID NO: 633925 - DNA, 15 bp, Homo sapiens
tgtgagccaccacac

SEQ ID NO: 633926 - DNA, 15 bp, Homo sapiens
tgagccaccacacca

SEQ ID NO: 633927 - DNA, 15 bp, Homo sapiens
gagccaccacaccat

SEQ ID NO: 633928 - DNA, 15 bp, Homo sapiens
agccaccacaccatg

SEQ ID NO: 633929 - DNA, 15 bp, Homo sapiens
gccaccacaccatgc

SEQ ID NO: 633930 - DNA, 15 bp, Homo sapiens
ccaccacaccatgcc

SEQ ID NO: 633931 - DNA, 15 bp, Homo sapiens
caccacaccatgcca

SEQ ID NO: 633932 - DNA, 15 bp, Homo sapiens
accacaccatgccag

SEQ ID NO: 633933 - DNA, 15 bp, Homo sapiens
ccacaccatgccagt

SEQ ID NO: 633934 - DNA, 15 bp, Homo sapiens
cacaccatgccagtt

SEQ ID NO: 633935 - DNA, 15 bp, Homo sapiens
acaccatgccagttt

SEQ ID NO: 633936 - DNA, 15 bp, Homo sapiens
caccatgccagtttt

SEQ ID NO: 633937 - DNA, 15 bp, Homo sapiens
accatgccagttttt

SEQ ID NO: 633938 - DNA, 15 bp, Homo sapiens
ccatgccagtttttc

SEQ ID NO: 633939 - DNA, 15 bp, Homo sapiens
catgccagtttttcc

SEQ ID NO: 633940 - DNA, 15 bp, Homo sapiens
atgccagtttttcct

SEQ ID NO: 633941 - DNA, 15 bp, Homo sapiens
tgccagtttttcctg

SEQ ID NO: 633942 - DNA, 15 bp, Homo sapiens
gccagtttttcctgt

SEQ ID NO: 633943 - DNA, 15 bp, Homo sapiens
ccagtttttcctgtt

SEQ ID NO: 633944 - DNA, 15 bp, Homo sapiens
cagtttttcctgttc

SEQ ID NO: 633945 - DNA, 15 bp, Homo sapiens
agtttttcctgttca

SEQ ID NO: 633946 - DNA, 15 bp, Homo sapiens
gtttttcctgttcag

SEQ ID NO: 633947 - DNA, 15 bp, Homo sapiens
tttttcctgttcagt

SEQ ID NO: 633948 - DNA, 15 bp, Homo sapiens
ttttcctgttcagtg

SEQ ID NO: 633949 - DNA, 15 bp, Homo sapiens
tttcctgttcagtgt

SEQ ID NO: 633950 - DNA, 15 bp, Homo sapiens
ttcctgttcagtgtg

SEQ ID NO: 633951 - DNA, 15 bp, Homo sapiens
tcctgttcagtgtga

SEQ ID NO: 633952 - DNA, 15 bp, Homo sapiens
cctgttcagtgtgat

SEQ ID NO: 633953 - DNA, 15 bp, Homo sapiens
ctgttcagtgtgata

SEQ ID NO: 633954 - DNA, 15 bp, Homo sapiens
tgttcagtgtgatat

SEQ ID NO: 633955 - DNA, 15 bp, Homo sapiens
gttcagtgtgatatt

SEQ ID NO: 633956 - DNA, 15 bp, Homo sapiens
ttcagtgtgatattt

SEQ ID NO: 633957 - DNA, 15 bp, Homo sapiens
tcagtgtgatatttt

SEQ ID NO: 633958 - DNA, 15 bp, Homo sapiens
cagtgtgatatttta

SEQ ID NO: 633959 - DNA, 15 bp, Homo sapiens
agtgtgatattttat

SEQ ID NO: 633960 - DNA, 15 bp, Homo sapiens
gtgtgatattttatc

SEQ ID NO: 633961 - DNA, 15 bp, Homo sapiens
tgtgatattttatct

SEQ ID NO: 633962 - DNA, 15 bp, Homo sapiens
gtgatattttatctt

SEQ ID NO: 633963 - DNA, 15 bp, Homo sapiens
tgatattttatcttg

SEQ ID NO: 633964 - DNA, 15 bp, Homo sapiens
gatattttatcttgt

SEQ ID NO: 633965 - DNA, 15 bp, Homo sapiens
atattttatcttgtt

SEQ ID NO: 633966 - DNA, 15 bp, Homo sapiens
tattttatcttgtta

SEQ ID NO: 633967 - DNA, 15 bp, Homo sapiens
attttatcttgttag

SEQ ID NO: 633968 - DNA, 15 bp, Homo sapiens
ttttatcttgttaga

SEQ ID NO: 633969 - DNA, 15 bp, Homo sapiens
tttatcttgttagac

SEQ ID NO: 633970 - DNA, 15 bp, Homo sapiens
ttatcttgttagact

SEQ ID NO: 633971 - DNA, 15 bp, Homo sapiens
tatcttgttagacta

SEQ ID NO: 633972 - DNA, 15 bp, Homo sapiens
atcttgttagactac

SEQ ID NO: 633973 - DNA, 15 bp, Homo sapiens
tcttgttagactaca

SEQ ID NO: 633974 - DNA, 15 bp, Homo sapiens
cttgttagactacag

SEQ ID NO: 633975 - DNA, 15 bp, Homo sapiens
ttgttagactacagt

SEQ ID NO: 633976 - DNA, 15 bp, Homo sapiens
tgttagactacagtg

SEQ ID NO: 633977 - DNA, 15 bp, Homo sapiens
gttagactacagtgt

SEQ ID NO: 633978 - DNA, 15 bp, Homo sapiens
ttagactacagtgtg

SEQ ID NO: 633979 - DNA, 15 bp, Homo sapiens
tagactacagtgtgt

SEQ ID NO: 633980 - DNA, 15 bp, Homo sapiens
agactacagtgtgtt

SEQ ID NO: 633981 - DNA, 15 bp, Homo sapiens
gactacagtgtgtta

SEQ ID NO: 633982 - DNA, 15 bp, Homo sapiens
actacagtgtgttaa

SEQ ID NO: 633983 - DNA, 15 bp, Homo sapiens
ctacagtgtgttaaa

SEQ ID NO: 633984 - DNA, 15 bp, Homo sapiens
tacagtgtgttaaaa

SEQ ID NO: 633985 - DNA, 15 bp, Homo sapiens
acagtgtgttaaaac

SEQ ID NO: 633986 - DNA, 15 bp, Homo sapiens
cagtgtgttaaaact

SEQ ID NO: 633987 - DNA, 15 bp, Homo sapiens
agtgtgttaaaactt

SEQ ID NO: 633988 - DNA, 15 bp, Homo sapiens
gtgtgttaaaacttg

SEQ ID NO: 633989 - DNA, 15 bp, Homo sapiens
tgtgttaaaacttgt

SEQ ID NO: 633990 - DNA, 15 bp, Homo sapiens
gtgttaaaacttgtt

SEQ ID NO: 633991 - DNA, 15 bp, Homo sapiens
tgttaaaacttgttt

SEQ ID NO: 633992 - DNA, 15 bp, Homo sapiens
gttaaaacttgtttt

SEQ ID NO: 633993 - DNA, 15 bp, Homo sapiens
ttaaaacttgtttta

SEQ ID NO: 633994 - DNA, 15 bp, Homo sapiens
taaaacttgttttac

SEQ ID NO: 633995 - DNA, 15 bp, Homo sapiens
aaaacttgttttact

SEQ ID NO: 633996 - DNA, 15 bp, Homo sapiens
aaacttgttttacta

SEQ ID NO: 633997 - DNA, 15 bp, Homo sapiens
aacttgttttactaa

SEQ ID NO: 633998 - DNA, 15 bp, Homo sapiens
acttgttttactaaa

SEQ ID NO: 633999 - DNA, 15 bp, Homo sapiens
cttgttttactaaat

SEQ ID NO: 634000 - DNA, 15 bp, Homo sapiens
ttgttttactaaatt

SEQ ID NO: 634001 - DNA, 15 bp, Homo sapiens
tgttttactaaattt

SEQ ID NO: 634002 - DNA, 15 bp, Homo sapiens
gttttactaaatttt

SEQ ID NO: 634003 - DNA, 15 bp, Homo sapiens
ttttactaaattttc

SEQ ID NO: 634004 - DNA, 15 bp, Homo sapiens
tttactaaattttca

SEQ ID NO: 634005 - DNA, 15 bp, Homo sapiens
ttactaaattttcaa

SEQ ID NO: 634006 - DNA, 15 bp, Homo sapiens
tactaaattttcaaa

SEQ ID NO: 634007 - DNA, 15 bp, Homo sapiens
actaaattttcaaac

SEQ ID NO: 634008 - DNA, 15 bp, Homo sapiens
ctaaattttcaaaca

SEQ ID NO: 634009 - DNA, 15 bp, Homo sapiens
taaattttcaaacat

SEQ ID NO: 634010 - DNA, 15 bp, Homo sapiens
aaattttcaaacata

SEQ ID NO: 634011 - DNA, 15 bp, Homo sapiens
aattttcaaacatac

SEQ ID NO: 634012 - DNA, 15 bp, Homo sapiens
attttcaaacatact

SEQ ID NO: 634013 - DNA, 15 bp, Homo sapiens
ttttcaaacatactc

SEQ ID NO: 634014 - DNA, 15 bp, Homo sapiens
tttcaaacatactca

SEQ ID NO: 634015 - DNA, 15 bp, Homo sapiens
ttcaaacatactcaa

SEQ ID NO: 634016 - DNA, 15 bp, Homo sapiens
tcaaacatactcaaa

SEQ ID NO: 634017 - DNA, 15 bp, Homo sapiens
caaacatactcaaaa

SEQ ID NO: 634018 - DNA, 15 bp, Homo sapiens
aaacatactcaaaag

SEQ ID NO: 634019 - DNA, 15 bp, Homo sapiens
aacatactcaaaagt

SEQ ID NO: 634020 - DNA, 15 bp, Homo sapiens
acatactcaaaagtg

SEQ ID NO: 634021 - DNA, 15 bp, Homo sapiens
catactcaaaagtgg

SEQ ID NO: 634022 - DNA, 15 bp, Homo sapiens
atactcaaaagtgga

SEQ ID NO: 634023 - DNA, 15 bp, Homo sapiens
tactcaaaagtggag

SEQ ID NO: 634024 - DNA, 15 bp, Homo sapiens
actcaaaagtggaga

SEQ ID NO: 634025 - DNA, 15 bp, Homo sapiens
ctcaaaagtggagag

SEQ ID NO: 634026 - DNA, 15 bp, Homo sapiens
tcaaaagtggagaga

SEQ ID NO: 634027 - DNA, 15 bp, Homo sapiens
caaaagtggagagaa

SEQ ID NO: 634028 - DNA, 15 bp, Homo sapiens
aaaagtggagagaat

SEQ ID NO: 634029 - DNA, 15 bp, Homo sapiens
aaagtggagagaata

SEQ ID NO: 634030 - DNA, 15 bp, Homo sapiens
aagtggagagaatag

SEQ ID NO: 634031 - DNA, 15 bp, Homo sapiens
agtggagagaatagt

SEQ ID NO: 634032 - DNA, 15 bp, Homo sapiens
gtggagagaatagta

SEQ ID NO: 634033 - DNA, 15 bp, Homo sapiens
tggagagaatagtat

SEQ ID NO: 634034 - DNA, 15 bp, Homo sapiens
ggagagaatagtata

SEQ ID NO: 634035 - DNA, 15 bp, Homo sapiens
gagagaatagtataa

SEQ ID NO: 634036 - DNA, 15 bp, Homo sapiens
agagaatagtataat

SEQ ID NO: 634037 - DNA, 15 bp, Homo sapiens
gagaatagtataatg

SEQ ID NO: 634038 - DNA, 15 bp, Homo sapiens
agaatagtataatga

SEQ ID NO: 634039 - DNA, 15 bp, Homo sapiens
gaatagtataatgaa

SEQ ID NO: 634040 - DNA, 15 bp, Homo sapiens
aatagtataatgaat

SEQ ID NO: 634041 - DNA, 15 bp, Homo sapiens
atagtataatgaata

SEQ ID NO: 634042 - DNA, 15 bp, Homo sapiens
tagtataatgaatac

SEQ ID NO: 634043 - DNA, 15 bp, Homo sapiens
agtataatgaatacc

SEQ ID NO: 634044 - DNA, 15 bp, Homo sapiens
gtataatgaataccc

SEQ ID NO: 634045 - DNA, 15 bp, Homo sapiens
tataatgaatacccg

SEQ ID NO: 634046 - DNA, 15 bp, Homo sapiens
ataatgaatacccgt

SEQ ID NO: 634047 - DNA, 15 bp, Homo sapiens
taatgaatacccgta

SEQ ID NO: 634048 - DNA, 15 bp, Homo sapiens
aatgaatacccgtat

SEQ ID NO: 634049 - DNA, 15 bp, Homo sapiens
atgaatacccgtatg

SEQ ID NO: 634050 - DNA, 15 bp, Homo sapiens
tgaatacccgtatgt

SEQ ID NO: 634051 - DNA, 15 bp, Homo sapiens
gaatacccgtatgtt

SEQ ID NO: 634052 - DNA, 15 bp, Homo sapiens
aatacccgtatgttc

SEQ ID NO: 634053 - DNA, 15 bp, Homo sapiens
atacccgtatgttca

SEQ ID NO: 634054 - DNA, 15 bp, Homo sapiens
tacccgtatgttcat

SEQ ID NO: 634055 - DNA, 15 bp, Homo sapiens
acccgtatgttcatc

SEQ ID NO: 634056 - DNA, 15 bp, Homo sapiens
cccgtatgttcatca

SEQ ID NO: 634057 - DNA, 15 bp, Homo sapiens
ccgtatgttcatcac

SEQ ID NO: 634058 - DNA, 15 bp, Homo sapiens
cgtatgttcatcacc

SEQ ID NO: 634059 - DNA, 15 bp, Homo sapiens
gtatgttcatcaccc

SEQ ID NO: 634060 - DNA, 15 bp, Homo sapiens
tatgttcatcaccca

SEQ ID NO: 634061 - DNA, 15 bp, Homo sapiens
atgttcatcacccat

SEQ ID NO: 634062 - DNA, 15 bp, Homo sapiens
tgttcatcacccatg

SEQ ID NO: 634063 - DNA, 15 bp, Homo sapiens
gttcatcacccatgt

SEQ ID NO: 634064 - DNA, 15 bp, Homo sapiens
ttcatcacccatgtt

SEQ ID NO: 634065 - DNA, 15 bp, Homo sapiens
tcatcacccatgttt

SEQ ID NO: 634066 - DNA, 15 bp, Homo sapiens
catcacccatgttta

SEQ ID NO: 634067 - DNA, 15 bp, Homo sapiens
atcacccatgtttag

SEQ ID NO: 634068 - DNA, 15 bp, Homo sapiens
tcacccatgtttaga

SEQ ID NO: 634069 - DNA, 15 bp, Homo sapiens
cacccatgtttagaa

SEQ ID NO: 634070 - DNA, 15 bp, Homo sapiens
acccatgtttagaat

SEQ ID NO: 634071 - DNA, 15 bp, Homo sapiens
cccatgtttagaata

SEQ ID NO: 634072 - DNA, 15 bp, Homo sapiens
ccatgtttagaatat

SEQ ID NO: 634073 - DNA, 15 bp, Homo sapiens
catgtttagaatatt

SEQ ID NO: 634074 - DNA, 15 bp, Homo sapiens
atgtttagaatatta

SEQ ID NO: 634075 - DNA, 15 bp, Homo sapiens
tgtttagaatattat

SEQ ID NO: 634076 - DNA, 15 bp, Homo sapiens
gtttagaatattatt

SEQ ID NO: 634077 - DNA, 15 bp, Homo sapiens
tttagaatattatta

SEQ ID NO: 634078 - DNA, 15 bp, Homo sapiens
ttagaatattattaa

SEQ ID NO: 634079 - DNA, 15 bp, Homo sapiens
tagaatattattaaa

SEQ ID NO: 634080 - DNA, 15 bp, Homo sapiens
agaatattattaaat

SEQ ID NO: 634081 - DNA, 15 bp, Homo sapiens
gaatattattaaata

SEQ ID NO: 634082 - DNA, 15 bp, Homo sapiens
aatattattaaatat

SEQ ID NO: 634083 - DNA, 15 bp, Homo sapiens
atattattaaatata

SEQ ID NO: 634084 - DNA, 15 bp, Homo sapiens
tattattaaatataa

SEQ ID NO: 634085 - DNA, 15 bp, Homo sapiens
attattaaatataaa

SEQ ID NO: 634086 - DNA, 15 bp, Homo sapiens
ttattaaatataaag

SEQ ID NO: 634087 - DNA, 15 bp, Homo sapiens
tattaaatataaaga

SEQ ID NO: 634088 - DNA, 15 bp, Homo sapiens
attaaatataaagat

SEQ ID NO: 634089 - DNA, 15 bp, Homo sapiens
ttaaatataaagatt

SEQ ID NO: 634090 - DNA, 15 bp, Homo sapiens
taaatataaagattt

SEQ ID NO: 634091 - DNA, 15 bp, Homo sapiens
aaatataaagatttt

SEQ ID NO: 634092 - DNA, 15 bp, Homo sapiens
aatataaagattttg

SEQ ID NO: 634093 - DNA, 15 bp, Homo sapiens
atataaagattttgc

SEQ ID NO: 634094 - DNA, 15 bp, Homo sapiens
tataaagattttgct

SEQ ID NO: 634095 - DNA, 15 bp, Homo sapiens
ataaagattttgctg

SEQ ID NO: 634096 - DNA, 15 bp, Homo sapiens
taaagattttgctgc

SEQ ID NO: 634097 - DNA, 15 bp, Homo sapiens
aaagattttgctgcg

SEQ ID NO: 634098 - DNA, 15 bp, Homo sapiens
aagattttgctgcgt

SEQ ID NO: 634099 - DNA, 15 bp, Homo sapiens
agattttgctgcgtt

SEQ ID NO: 634100 - DNA, 15 bp, Homo sapiens
gattttgctgcgttt

SEQ ID NO: 634101 - DNA, 15 bp, Homo sapiens
attttgctgcgtttg

SEQ ID NO: 634102 - DNA, 15 bp, Homo sapiens
ttttgctgcgtttgt

SEQ ID NO: 634103 - DNA, 15 bp, Homo sapiens
tttgctgcgtttgtc

SEQ ID NO: 634104 - DNA, 15 bp, Homo sapiens
ttgctgcgtttgtct

SEQ ID NO: 634105 - DNA, 15 bp, Homo sapiens
tgctgcgtttgtctt

SEQ ID NO: 634106 - DNA, 15 bp, Homo sapiens
gctgcgtttgtctta

SEQ ID NO: 634107 - DNA, 15 bp, Homo sapiens
ctgcgtttgtcttag

SEQ ID NO: 634108 - DNA, 15 bp, Homo sapiens
tgcgtttgtcttagc

SEQ ID NO: 634109 - DNA, 15 bp, Homo sapiens
gcgtttgtcttagct

SEQ ID NO: 634110 - DNA, 15 bp, Homo sapiens
cgtttgtcttagctc

SEQ ID NO: 634111 - DNA, 15 bp, Homo sapiens
gtttgtcttagctct

SEQ ID NO: 634112 - DNA, 15 bp, Homo sapiens
tttgtcttagctctt

SEQ ID NO: 634113 - DNA, 15 bp, Homo sapiens
ttgtcttagctcttt

SEQ ID NO: 634114 - DNA, 15 bp, Homo sapiens
tgtcttagctcttta

SEQ ID NO: 634115 - DNA, 15 bp, Homo sapiens
gtcttagctctttaa

SEQ ID NO: 634116 - DNA, 15 bp, Homo sapiens
tcttagctctttaaa

SEQ ID NO: 634117 - DNA, 15 bp, Homo sapiens
cttagctctttaaaa

SEQ ID NO: 634118 - DNA, 15 bp, Homo sapiens
ttagctctttaaaat

SEQ ID NO: 634119 - DNA, 15 bp, Homo sapiens
tagctctttaaaatt

SEQ ID NO: 634120 - DNA, 15 bp, Homo sapiens
agctctttaaaattt

SEQ ID NO: 634121 - DNA, 15 bp, Homo sapiens
gctctttaaaatttt

SEQ ID NO: 634122 - DNA, 15 bp, Homo sapiens
ctctttaaaattttt

SEQ ID NO: 634123 - DNA, 15 bp, Homo sapiens
tctttaaaatttttc

SEQ ID NO: 634124 - DNA, 15 bp, Homo sapiens
ctttaaaatttttct

SEQ ID NO: 634125 - DNA, 15 bp, Homo sapiens
tttaaaatttttctt

SEQ ID NO: 634126 - DNA, 15 bp, Homo sapiens
ttaaaatttttcttt

SEQ ID NO: 634127 - DNA, 15 bp, Homo sapiens
taaaatttttctttt

SEQ ID NO: 634128 - DNA, 15 bp, Homo sapiens
aaaatttttcttttt

SEQ ID NO: 634129 - DNA, 15 bp, Homo sapiens
aaatttttctttttc

SEQ ID NO: 634130 - DNA, 15 bp, Homo sapiens
aatttttctttttct

SEQ ID NO: 634131 - DNA, 15 bp, Homo sapiens
atttttctttttctc

SEQ ID NO: 634132 - DNA, 15 bp, Homo sapiens
tttttctttttctct

SEQ ID NO: 634133 - DNA, 15 bp, Homo sapiens
ttttctttttctctt

SEQ ID NO: 634134 - DNA, 15 bp, Homo sapiens
tttctttttctcttt

SEQ ID NO: 634135 - DNA, 15 bp, Homo sapiens
ttctttttctctttg

SEQ ID NO: 634136 - DNA, 15 bp, Homo sapiens
tctttttctctttgt

SEQ ID NO: 634137 - DNA, 15 bp, Homo sapiens
ctttttctctttgtg

SEQ ID NO: 634138 - DNA, 15 bp, Homo sapiens
tttttctctttgtga

SEQ ID NO: 634139 - DNA, 15 bp, Homo sapiens
ttttctctttgtgac

SEQ ID NO: 634140 - DNA, 15 bp, Homo sapiens
tttctctttgtgacc

SEQ ID NO: 634141 - DNA, 15 bp, Homo sapiens
ttctctttgtgacct

SEQ ID NO: 634142 - DNA, 15 bp, Homo sapiens
tctctttgtgaccta

SEQ ID NO: 634143 - DNA, 15 bp, Homo sapiens
ctctttgtgacctaa

SEQ ID NO: 634144 - DNA, 15 bp, Homo sapiens
tctttgtgacctaaa

SEQ ID NO: 634145 - DNA, 15 bp, Homo sapiens
ctttgtgacctaaag

SEQ ID NO: 634146 - DNA, 15 bp, Homo sapiens
tttgtgacctaaagg

SEQ ID NO: 634147 - DNA, 15 bp, Homo sapiens
ttgtgacctaaagga

SEQ ID NO: 634148 - DNA, 15 bp, Homo sapiens
tgtgacctaaaggaa

SEQ ID NO: 634149 - DNA, 15 bp, Homo sapiens
gtgacctaaaggaaa

SEQ ID NO: 634150 - DNA, 15 bp, Homo sapiens
tgacctaaaggaaat

SEQ ID NO: 634151 - DNA, 15 bp, Homo sapiens
gacctaaaggaaatt

SEQ ID NO: 634152 - DNA, 15 bp, Homo sapiens
acctaaaggaaattc

SEQ ID NO: 634153 - DNA, 15 bp, Homo sapiens
cctaaaggaaattcc

SEQ ID NO: 634154 - DNA, 15 bp, Homo sapiens
ctaaaggaaattcca

SEQ ID NO: 634155 - DNA, 15 bp, Homo sapiens
taaaggaaattccat

SEQ ID NO: 634156 - DNA, 15 bp, Homo sapiens
aaaggaaattccata

SEQ ID NO: 634157 - DNA, 15 bp, Homo sapiens
aaggaaattccatat

SEQ ID NO: 634158 - DNA, 15 bp, Homo sapiens
aggaaattccatatc

SEQ ID NO: 634159 - DNA, 15 bp, Homo sapiens
ggaaattccatatct

SEQ ID NO: 634160 - DNA, 15 bp, Homo sapiens
gaaattccatatctt

SEQ ID NO: 634161 - DNA, 15 bp, Homo sapiens
aaattccatatctta

SEQ ID NO: 634162 - DNA, 15 bp, Homo sapiens
aattccatatcttat

SEQ ID NO: 634163 - DNA, 15 bp, Homo sapiens
attccatatcttatc

SEQ ID NO: 634164 - DNA, 15 bp, Homo sapiens
ttccatatcttatca

SEQ ID NO: 634165 - DNA, 15 bp, Homo sapiens
tccatatcttatcac

SEQ ID NO: 634166 - DNA, 15 bp, Homo sapiens
ccatatcttatcact

SEQ ID NO: 634167 - DNA, 15 bp, Homo sapiens
catatcttatcactt

SEQ ID NO: 634168 - DNA, 15 bp, Homo sapiens
atatcttatcacttt

SEQ ID NO: 634169 - DNA, 15 bp, Homo sapiens
tatcttatcacttta

SEQ ID NO: 634170 - DNA, 15 bp, Homo sapiens
atcttatcactttac

SEQ ID NO: 634171 - DNA, 15 bp, Homo sapiens
tcttatcactttact

SEQ ID NO: 634172 - DNA, 15 bp, Homo sapiens
cttatcactttactt

SEQ ID NO: 634173 - DNA, 15 bp, Homo sapiens
ttatcactttacttc

SEQ ID NO: 634174 - DNA, 15 bp, Homo sapiens
tatcactttacttct

SEQ ID NO: 634175 - DNA, 15 bp, Homo sapiens
atcactttacttcta

SEQ ID NO: 634176 - DNA, 15 bp, Homo sapiens
tcactttacttctac

SEQ ID NO: 634177 - DNA, 15 bp, Homo sapiens
cactttacttctaca

SEQ ID NO: 634178 - DNA, 15 bp, Homo sapiens
actttacttctacat

SEQ ID NO: 634179 - DNA, 15 bp, Homo sapiens
ctttacttctacatt

SEQ ID NO: 634180 - DNA, 15 bp, Homo sapiens
tttacttctacattc

SEQ ID NO: 634181 - DNA, 15 bp, Homo sapiens
ttacttctacattct

SEQ ID NO: 634182 - DNA, 15 bp, Homo sapiens
tacttctacattctt

SEQ ID NO: 634183 - DNA, 15 bp, Homo sapiens
acttctacattcttg

SEQ ID NO: 634184 - DNA, 15 bp, Homo sapiens
cttctacattcttga

SEQ ID NO: 634185 - DNA, 15 bp, Homo sapiens
ttctacattcttgac

SEQ ID NO: 634186 - DNA, 15 bp, Homo sapiens
tctacattcttgact

SEQ ID NO: 634187 - DNA, 15 bp, Homo sapiens
ctacattcttgacta

SEQ ID NO: 634188 - DNA, 15 bp, Homo sapiens
tacattcttgactaa

SEQ ID NO: 634189 - DNA, 15 bp, Homo sapiens
acattcttgactaag

SEQ ID NO: 634190 - DNA, 15 bp, Homo sapiens
cattcttgactaaga

SEQ ID NO: 634191 - DNA, 15 bp, Homo sapiens
attcttgactaagat

SEQ ID NO: 634192 - DNA, 15 bp, Homo sapiens
ttcttgactaagatg

SEQ ID NO: 634193 - DNA, 15 bp, Homo sapiens
tcttgactaagatga

SEQ ID NO: 634194 - DNA, 15 bp, Homo sapiens
cttgactaagatgac

SEQ ID NO: 634195 - DNA, 15 bp, Homo sapiens
ttgactaagatgact

SEQ ID NO: 634196 - DNA, 15 bp, Homo sapiens
tgactaagatgacta

SEQ ID NO: 634197 - DNA, 15 bp, Homo sapiens
gactaagatgactaa

SEQ ID NO: 634198 - DNA, 15 bp, Homo sapiens
actaagatgactaag

SEQ ID NO: 634199 - DNA, 15 bp, Homo sapiens
ctaagatgactaaga

SEQ ID NO: 634200 - DNA, 15 bp, Homo sapiens
taagatgactaagac

SEQ ID NO: 634201 - DNA, 15 bp, Homo sapiens
aagatgactaagaca

SEQ ID NO: 634202 - DNA, 15 bp, Homo sapiens
agatgactaagacat

SEQ ID NO: 634203 - DNA, 15 bp, Homo sapiens
gatgactaagacata

SEQ ID NO: 634204 - DNA, 15 bp, Homo sapiens
atgactaagacatat

SEQ ID NO: 634205 - DNA, 15 bp, Homo sapiens
tgactaagacatata

SEQ ID NO: 634206 - DNA, 15 bp, Homo sapiens
gactaagacatatag

SEQ ID NO: 634207 - DNA, 15 bp, Homo sapiens
actaagacatatagt

SEQ ID NO: 634208 - DNA, 15 bp, Homo sapiens
ctaagacatatagtt

SEQ ID NO: 634209 - DNA, 15 bp, Homo sapiens
taagacatatagtta

SEQ ID NO: 634210 - DNA, 15 bp, Homo sapiens
aagacatatagttac

SEQ ID NO: 634211 - DNA, 15 bp, Homo sapiens
agacatatagttaca

SEQ ID NO: 634212 - DNA, 15 bp, Homo sapiens
gacatatagttacat

SEQ ID NO: 634213 - DNA, 15 bp, Homo sapiens
acatatagttacatg

SEQ ID NO: 634214 - DNA, 15 bp, Homo sapiens
catatagttacatgg

SEQ ID NO: 634215 - DNA, 15 bp, Homo sapiens
atatagttacatggt

SEQ ID NO: 634216 - DNA, 15 bp, Homo sapiens
tatagttacatggtt

SEQ ID NO: 634217 - DNA, 15 bp, Homo sapiens
atagttacatggttt

SEQ ID NO: 634218 - DNA, 15 bp, Homo sapiens
tagttacatggtttt

SEQ ID NO: 634219 - DNA, 15 bp, Homo sapiens
agttacatggttttt

SEQ ID NO: 634220 - DNA, 15 bp, Homo sapiens
gttacatggtttttt

SEQ ID NO: 634221 - DNA, 15 bp, Homo sapiens
ttacatggttttttg

SEQ ID NO: 634222 - DNA, 15 bp, Homo sapiens
tacatggttttttgt

SEQ ID NO: 634223 - DNA, 15 bp, Homo sapiens
acatggttttttgtt

SEQ ID NO: 634224 - DNA, 15 bp, Homo sapiens
catggttttttgttt

SEQ ID NO: 634225 - DNA, 15 bp, Homo sapiens
atggttttttgtttt

SEQ ID NO: 634226 - DNA, 15 bp, Homo sapiens
tggttttttgttttg

SEQ ID NO: 634227 - DNA, 15 bp, Homo sapiens
ggttttttgttttgt

SEQ ID NO: 634228 - DNA, 15 bp, Homo sapiens
gttttttgttttgtt

SEQ ID NO: 634229 - DNA, 15 bp, Homo sapiens
ttttttgttttgttt

SEQ ID NO: 634230 - DNA, 15 bp, Homo sapiens
tttttgttttgtttt

SEQ ID NO: 634231 - DNA, 15 bp, Homo sapiens
tgttttgttttttgt

SEQ ID NO: 634232 - DNA, 15 bp, Homo sapiens
gttttgttttttgtt

SEQ ID NO: 634233 - DNA, 15 bp, Homo sapiens
ttttgttttttgttt

SEQ ID NO: 634234 - DNA, 15 bp, Homo sapiens
tttgttttttgtttt

SEQ ID NO: 634235 - DNA, 15 bp, Homo sapiens
ttgttttttgttttt

SEQ ID NO: 634236 - DNA, 15 bp, Homo sapiens
tgttttttgtttttt

SEQ ID NO: 634237 - DNA, 15 bp, Homo sapiens
gttttttgtttttta

SEQ ID NO: 634238 - DNA, 15 bp, Homo sapiens
ttttttgttttttaa

SEQ ID NO: 634239 - DNA, 15 bp, Homo sapiens
tttttgttttttaaa

SEQ ID NO: 634240 - DNA, 15 bp, Homo sapiens
ttttgttttttaaag

SEQ ID NO: 634241 - DNA, 15 bp, Homo sapiens
tttgttttttaaaga

SEQ ID NO: 634242 - DNA, 15 bp, Homo sapiens
ttgttttttaaagac

SEQ ID NO: 634243 - DNA, 15 bp, Homo sapiens
tgttttttaaagacg

SEQ ID NO: 634244 - DNA, 15 bp, Homo sapiens
gttttttaaagacga

SEQ ID NO: 634245 - DNA, 15 bp, Homo sapiens
ttttttaaagacgaa

SEQ ID NO: 634246 - DNA, 15 bp, Homo sapiens
tttttaaagacgaaa

SEQ ID NO: 634247 - DNA, 15 bp, Homo sapiens
ttttaaagacgaaat

SEQ ID NO: 634248 - DNA, 15 bp, Homo sapiens
tttaaagacgaaatc

SEQ ID NO: 634249 - DNA, 15 bp, Homo sapiens
ttaaagacgaaatct

SEQ ID NO: 634250 - DNA, 15 bp, Homo sapiens
taaagacgaaatctc

SEQ ID NO: 634251 - DNA, 15 bp, Homo sapiens
aaagacgaaatctcg

SEQ ID NO: 634252 - DNA, 15 bp, Homo sapiens
aagacgaaatctcgc

SEQ ID NO: 634253 - DNA, 15 bp, Homo sapiens
agacgaaatctcgct

SEQ ID NO: 634254 - DNA, 15 bp, Homo sapiens
gacgaaatctcgctc

SEQ ID NO: 634255 - DNA, 15 bp, Homo sapiens
acgaaatctcgctct

SEQ ID NO: 634256 - DNA, 15 bp, Homo sapiens
cgaaatctcgctctt

SEQ ID NO: 634257 - DNA, 15 bp, Homo sapiens
gaaatctcgctcttg

SEQ ID NO: 634258 - DNA, 15 bp, Homo sapiens
aaatctcgctcttgt

SEQ ID NO: 634259 - DNA, 15 bp, Homo sapiens
aatctcgctcttgtc

SEQ ID NO: 634260 - DNA, 15 bp, Homo sapiens
atctcgctcttgtcc

SEQ ID NO: 634261 - DNA, 15 bp, Homo sapiens
tctcgctcttgtccc

SEQ ID NO: 634262 - DNA, 15 bp, Homo sapiens
ctcgctcttgtcccc

SEQ ID NO: 634263 - DNA, 15 bp, Homo sapiens
tcgctcttgtccccc

SEQ ID NO: 634264 - DNA, 15 bp, Homo sapiens
cgctcttgtccccca

SEQ ID NO: 634265 - DNA, 15 bp, Homo sapiens
gctcttgtcccccag

SEQ ID NO: 634266 - DNA, 15 bp, Homo sapiens
ctcttgtcccccagg

SEQ ID NO: 634267 - DNA, 15 bp, Homo sapiens
tcttgtcccccaggc

SEQ ID NO: 634268 - DNA, 15 bp, Homo sapiens
cttgtcccccaggct

SEQ ID NO: 634269 - DNA, 15 bp, Homo sapiens
ttgtcccccaggctg

SEQ ID NO: 634270 - DNA, 15 bp, Homo sapiens
tgtcccccaggctgg

SEQ ID NO: 634271 - DNA, 15 bp, Homo sapiens
gtcccccaggctgga

SEQ ID NO: 634272 - DNA, 15 bp, Homo sapiens
tcccccaggctggag

SEQ ID NO: 634273 - DNA, 15 bp, Homo sapiens
cccccaggctggagt

SEQ ID NO: 634274 - DNA, 15 bp, Homo sapiens
ccccaggctggagtg

SEQ ID NO: 634275 - DNA, 15 bp, Homo sapiens
gagtgcaatggtgcc

SEQ ID NO: 634276 - DNA, 15 bp, Homo sapiens
agtgcaatggtgcca

SEQ ID NO: 634277 - DNA, 15 bp, Homo sapiens
gtgcaatggtgccat

SEQ ID NO: 634278 - DNA, 15 bp, Homo sapiens
tgcaatggtgccatc

SEQ ID NO: 634279 - DNA, 15 bp, Homo sapiens
gcaatggtgccatct

SEQ ID NO: 634280 - DNA, 15 bp, Homo sapiens
caatggtgccatctc

SEQ ID NO: 634281 - DNA, 15 bp, Homo sapiens
aatggtgccatctca

SEQ ID NO: 634282 - DNA, 15 bp, Homo sapiens
atggtgccatctcag

SEQ ID NO: 634283 - DNA, 15 bp, Homo sapiens
tggtgccatctcagc

SEQ ID NO: 634284 - DNA, 15 bp, Homo sapiens
ggtgccatctcagct

SEQ ID NO: 634285 - DNA, 15 bp, Homo sapiens
gtgccatctcagctc

SEQ ID NO: 634286 - DNA, 15 bp, Homo sapiens
tgccatctcagctca

SEQ ID NO: 634287 - DNA, 15 bp, Homo sapiens
gccatctcagctcag

SEQ ID NO: 634288 - DNA, 15 bp, Homo sapiens
ccatctcagctcagt

SEQ ID NO: 634289 - DNA, 15 bp, Homo sapiens
catctcagctcagtg

SEQ ID NO: 634290 - DNA, 15 bp, Homo sapiens
tctcagctcagtgca

SEQ ID NO: 634291 - DNA, 15 bp, Homo sapiens
ctcagctcagtgcaa

SEQ ID NO: 634292 - DNA, 15 bp, Homo sapiens
tcagctcagtgcaac

SEQ ID NO: 634293 - DNA, 15 bp, Homo sapiens
cagctcagtgcaacc

SEQ ID NO: 634294 - DNA, 15 bp, Homo sapiens
agctcagtgcaacct

SEQ ID NO: 634295 - DNA, 15 bp, Homo sapiens
tgcaacctctgcctt

SEQ ID NO: 634296 - DNA, 15 bp, Homo sapiens
gcaacctctgccttc

SEQ ID NO: 634297 - DNA, 15 bp, Homo sapiens
caacctctgccttct

SEQ ID NO: 634298 - DNA, 15 bp, Homo sapiens
aacctctgccttctg

SEQ ID NO: 634299 - DNA, 15 bp, Homo sapiens
acctctgccttctgg

SEQ ID NO: 634300 - DNA, 15 bp, Homo sapiens
cctctgccttctggg

SEQ ID NO: 634301 - DNA, 15 bp, Homo sapiens
ctctgccttctgggt

SEQ ID NO: 634302 - DNA, 15 bp, Homo sapiens
tctgccttctgggta

SEQ ID NO: 634303 - DNA, 15 bp, Homo sapiens
ctgccttctgggtac

SEQ ID NO: 634304 - DNA, 15 bp, Homo sapiens
tgccttctgggtaca

SEQ ID NO: 634305 - DNA, 15 bp, Homo sapiens
gccttctgggtacaa

SEQ ID NO: 634306 - DNA, 15 bp, Homo sapiens
ccttctgggtacaag

SEQ ID NO: 634307 - DNA, 15 bp, Homo sapiens
cttctgggtacaagc

SEQ ID NO: 634308 - DNA, 15 bp, Homo sapiens
ttctgggtacaagcg

SEQ ID NO: 634309 - DNA, 15 bp, Homo sapiens
tctgggtacaagcga

SEQ ID NO: 634310 - DNA, 15 bp, Homo sapiens
ctgggtacaagcgat

SEQ ID NO: 634311 - DNA, 15 bp, Homo sapiens
tgggtacaagcgatt

SEQ ID NO: 634312 - DNA, 15 bp, Homo sapiens
gggtacaagcgattc

SEQ ID NO: 634313 - DNA, 15 bp, Homo sapiens
ggtacaagcgattct

SEQ ID NO: 634314 - DNA, 15 bp, Homo sapiens
gtacaagcgattctc

SEQ ID NO: 634315 - DNA, 15 bp, Homo sapiens
tacaagcgattctcc

SEQ ID NO: 634316 - DNA, 15 bp, Homo sapiens
acaagcgattctcct

SEQ ID NO: 634317 - DNA, 15 bp, Homo sapiens
tgcctcagcctccca

SEQ ID NO: 634318 - DNA, 15 bp, Homo sapiens
ccaagtagctgggat

SEQ ID NO: 634319 - DNA, 15 bp, Homo sapiens
caagtagctgggatt

SEQ ID NO: 634320 - DNA, 15 bp, Homo sapiens
aagtagctgggatta

SEQ ID NO: 634321 - DNA, 15 bp, Homo sapiens
ctgggattacaggct

SEQ ID NO: 634322 - DNA, 15 bp, Homo sapiens
tgggattacaggctc

SEQ ID NO: 634323 - DNA, 15 bp, Homo sapiens
gggattacaggctcc

SEQ ID NO: 634324 - DNA, 15 bp, Homo sapiens
ggattacaggctcct

SEQ ID NO: 634325 - DNA, 15 bp, Homo sapiens
gattacaggctcctg

SEQ ID NO: 634326 - DNA, 15 bp, Homo sapiens
attacaggctcctgc

SEQ ID NO: 634327 - DNA, 15 bp, Homo sapiens
ttacaggctcctgcc

SEQ ID NO: 634328 - DNA, 15 bp, Homo sapiens
tacaggctcctgcca

SEQ ID NO: 634329 - DNA, 15 bp, Homo sapiens
acaggctcctgccac

SEQ ID NO: 634330 - DNA, 15 bp, Homo sapiens
caggctcctgccacc

SEQ ID NO: 634331 - DNA, 15 bp, Homo sapiens
aggctcctgccacca

SEQ ID NO: 634332 - DNA, 15 bp, Homo sapiens
ggctcctgccaccac

SEQ ID NO: 634333 - DNA, 15 bp, Homo sapiens
gctcctgccaccacg

SEQ ID NO: 634334 - DNA, 15 bp, Homo sapiens
ctcctgccaccacgc

SEQ ID NO: 634335 - DNA, 15 bp, Homo sapiens
tcctgccaccacgcc

SEQ ID NO: 634336 - DNA, 15 bp, Homo sapiens
cctgccaccacgcct

SEQ ID NO: 634337 - DNA, 15 bp, Homo sapiens
ctgccaccacgcctg

SEQ ID NO: 634338 - DNA, 15 bp, Homo sapiens
tgccaccacgcctgg

SEQ ID NO: 634339 - DNA, 15 bp, Homo sapiens
gccaccacgcctggc

SEQ ID NO: 634340 - DNA, 15 bp, Homo sapiens
ccaccacgcctggct

SEQ ID NO: 634341 - DNA, 15 bp, Homo sapiens
caccacgcctggcta

SEQ ID NO: 634342 - DNA, 15 bp, Homo sapiens
accacgcctggctaa

SEQ ID NO: 634343 - DNA, 15 bp, Homo sapiens
ccacgcctggctaat

SEQ ID NO: 634344 - DNA, 15 bp, Homo sapiens
cacgcctggctaatt

SEQ ID NO: 634345 - DNA, 15 bp, Homo sapiens
acgcctggctaattt

SEQ ID NO: 634346 - DNA, 15 bp, Homo sapiens
cgcctggctaatttt

SEQ ID NO: 634347 - DNA, 15 bp, Homo sapiens
cctggctaatttttg

SEQ ID NO: 634348 - DNA, 15 bp, Homo sapiens
ctggctaatttttgt

SEQ ID NO: 634349 - DNA, 15 bp, Homo sapiens
tggctaatttttgta

SEQ ID NO: 634350 - DNA, 15 bp, Homo sapiens
tttagtagagacggc

SEQ ID NO: 634351 - DNA, 15 bp, Homo sapiens
ttagtagagacggcg

SEQ ID NO: 634352 - DNA, 15 bp, Homo sapiens
tagtagagacggcgg

SEQ ID NO: 634353 - DNA, 15 bp, Homo sapiens
agtagagacggcggg

SEQ ID NO: 634354 - DNA, 15 bp, Homo sapiens
gtagagacggcgggg

SEQ ID NO: 634355 - DNA, 15 bp, Homo sapiens
tagagacggcggggg

SEQ ID NO: 634356 - DNA, 15 bp, Homo sapiens
agagacggcgggggg

SEQ ID NO: 634357 - DNA, 15 bp, Homo sapiens
gagacggcgggggga

SEQ ID NO: 634358 - DNA, 15 bp, Homo sapiens
agacggcggggggag

SEQ ID NO: 634359 - DNA, 15 bp, Homo sapiens
gacggcggggggagg

SEQ ID NO: 634360 - DNA, 15 bp, Homo sapiens
acggcggggggaggt

SEQ ID NO: 634361 - DNA, 15 bp, Homo sapiens
cggcggggggaggtt

SEQ ID NO: 634362 - DNA, 15 bp, Homo sapiens
ggcggggggaggttt

SEQ ID NO: 634363 - DNA, 15 bp, Homo sapiens
gcggggggaggtttc

SEQ ID NO: 634364 - DNA, 15 bp, Homo sapiens
cggggggaggtttca

SEQ ID NO: 634365 - DNA, 15 bp, Homo sapiens
ggggggaggtttcac

SEQ ID NO: 634366 - DNA, 15 bp, Homo sapiens
gggggaggtttcacc

SEQ ID NO: 634367 - DNA, 15 bp, Homo sapiens
ggggaggtttcacca

SEQ ID NO: 634368 - DNA, 15 bp, Homo sapiens
gggaggtttcaccat

SEQ ID NO: 634369 - DNA, 15 bp, Homo sapiens
ggaggtttcaccatg

SEQ ID NO: 634370 - DNA, 15 bp, Homo sapiens
gtttcaccatgttga

SEQ ID NO: 634371 - DNA, 15 bp, Homo sapiens
tttcaccatgttgac

SEQ ID NO: 634372 - DNA, 15 bp, Homo sapiens
ttcaccatgttgaca

SEQ ID NO: 634373 - DNA, 15 bp, Homo sapiens
tcaccatgttgacaa

SEQ ID NO: 634374 - DNA, 15 bp, Homo sapiens
caccatgttgacaag

SEQ ID NO: 634375 - DNA, 15 bp, Homo sapiens
accatgttgacaagg

SEQ ID NO: 634376 - DNA, 15 bp, Homo sapiens
ccatgttgacaaggc

SEQ ID NO: 634377 - DNA, 15 bp, Homo sapiens
catgttgacaaggct

SEQ ID NO: 634378 - DNA, 15 bp, Homo sapiens
atgttgacaaggctg

SEQ ID NO: 634379 - DNA, 15 bp, Homo sapiens
tgttgacaaggctgg

SEQ ID NO: 634380 - DNA, 15 bp, Homo sapiens
gttgacaaggctggt

SEQ ID NO: 634381 - DNA, 15 bp, Homo sapiens
ttgacaaggctggtc

SEQ ID NO: 634382 - DNA, 15 bp, Homo sapiens
tgacaaggctggtct

SEQ ID NO: 634383 - DNA, 15 bp, Homo sapiens
gacaaggctggtctg

SEQ ID NO: 634384 - DNA, 15 bp, Homo sapiens
acaaggctggtctgg

SEQ ID NO: 634385 - DNA, 15 bp, Homo sapiens
caaggctggtctgga

SEQ ID NO: 634386 - DNA, 15 bp, Homo sapiens
aaggctggtctggaa

SEQ ID NO: 634387 - DNA, 15 bp, Homo sapiens
aggctggtctggaac

SEQ ID NO: 634388 - DNA, 15 bp, Homo sapiens
ggctggtctggaact

SEQ ID NO: 634389 - DNA, 15 bp, Homo sapiens
gctggtctggaactc

SEQ ID NO: 634390 - DNA, 15 bp, Homo sapiens
ctggtctggaactcc

SEQ ID NO: 634391 - DNA, 15 bp, Homo sapiens
tggtctggaactcct

SEQ ID NO: 634392 - DNA, 15 bp, Homo sapiens
ggtctggaactcctg

SEQ ID NO: 634393 - DNA, 15 bp, Homo sapiens
gtctggaactcctga

SEQ ID NO: 634394 - DNA, 15 bp, Homo sapiens
tctggaactcctgac

SEQ ID NO: 634395 - DNA, 15 bp, Homo sapiens
ctggaactcctgacc

SEQ ID NO: 634396 - DNA, 15 bp, Homo sapiens
tggaactcctgacct

SEQ ID NO: 634397 - DNA, 15 bp, Homo sapiens
ggaactcctgacctc

SEQ ID NO: 634398 - DNA, 15 bp, Homo sapiens
tgacctcaggtgatc

SEQ ID NO: 634399 - DNA, 15 bp, Homo sapiens
gacctcaggtgatcc

SEQ ID NO: 634400 - DNA, 15 bp, Homo sapiens
acctcaggtgatcca

SEQ ID NO: 634401 - DNA, 15 bp, Homo sapiens
gatccacccgcctcg

SEQ ID NO: 634402 - DNA, 15 bp, Homo sapiens
atccacccgcctcgg

SEQ ID NO: 634403 - DNA, 15 bp, Homo sapiens
tccacccgcctcggc

SEQ ID NO: 634404 - DNA, 15 bp, Homo sapiens
ccacccgcctcggcc

SEQ ID NO: 634405 - DNA, 15 bp, Homo sapiens
cacccgcctcggcct

SEQ ID NO: 634406 - DNA, 15 bp, Homo sapiens
acccgcctcggcctc

SEQ ID NO: 634407 - DNA, 15 bp, Homo sapiens
cccgcctcggcctcc

SEQ ID NO: 634408 - DNA, 15 bp, Homo sapiens
ccgcctcggcctccc

SEQ ID NO: 634409 - DNA, 15 bp, Homo sapiens
cgcctcggcctccca

SEQ ID NO: 634410 - DNA, 15 bp, Homo sapiens
tgagccaccgcgccc

SEQ ID NO: 634411 - DNA, 15 bp, Homo sapiens
gagccaccgcgccca

SEQ ID NO: 634412 - DNA, 15 bp, Homo sapiens
agccaccgcgcccag

SEQ ID NO: 634413 - DNA, 15 bp, Homo sapiens
gccaccgcgcccagc

SEQ ID NO: 634414 - DNA, 15 bp, Homo sapiens
ccaccgcgcccagcc

SEQ ID NO: 634415 - DNA, 15 bp, Homo sapiens
caccgcgcccagcct

SEQ ID NO: 634416 - DNA, 15 bp, Homo sapiens
accgcgcccagcctg

SEQ ID NO: 634417 - DNA, 15 bp, Homo sapiens
ccgcgcccagcctgt

SEQ ID NO: 634418 - DNA, 15 bp, Homo sapiens
cgcgcccagcctgtt

SEQ ID NO: 634419 - DNA, 15 bp, Homo sapiens
gcgcccagcctgttt

SEQ ID NO: 634420 - DNA, 15 bp, Homo sapiens
cgcccagcctgtttt

SEQ ID NO: 634421 - DNA, 15 bp, Homo sapiens
gcccagcctgttttt

SEQ ID NO: 634422 - DNA, 15 bp, Homo sapiens
cccagcctgtttttt

SEQ ID NO: 634423 - DNA, 15 bp, Homo sapiens
ccagcctgttttttt

SEQ ID NO: 634424 - DNA, 15 bp, Homo sapiens
cagcctgtttttttg

SEQ ID NO: 634425 - DNA, 15 bp, Homo sapiens
agcctgtttttttgt

SEQ ID NO: 634426 - DNA, 15 bp, Homo sapiens
gcctgtttttttgtt

SEQ ID NO: 634427 - DNA, 15 bp, Homo sapiens
cctgtttttttgttt

SEQ ID NO: 634428 - DNA, 15 bp, Homo sapiens
ctgtttttttgtttg

SEQ ID NO: 634429 - DNA, 15 bp, Homo sapiens
tgtttttttgtttgt

SEQ ID NO: 634430 - DNA, 15 bp, Homo sapiens
gtttttttgtttgtt

SEQ ID NO: 634431 - DNA, 15 bp, Homo sapiens
ttttttgtttgtttg

SEQ ID NO: 634432 - DNA, 15 bp, Homo sapiens
tttttgtttgtttgt

SEQ ID NO: 634433 - DNA, 15 bp, Homo sapiens
ttttgtttgtttgtt

SEQ ID NO: 634434 - DNA, 15 bp, Homo sapiens
tttgtttgtttgttt

SEQ ID NO: 634435 - DNA, 15 bp, Homo sapiens
ttgtttgtttgtttt

SEQ ID NO: 634436 - DNA, 15 bp, Homo sapiens
tgtttgtttgttttg

SEQ ID NO: 634437 - DNA, 15 bp, Homo sapiens
gtttgtttgttttgt

SEQ ID NO: 634438 - DNA, 15 bp, Homo sapiens
ttgttttgttttttt

SEQ ID NO: 634439 - DNA, 15 bp, Homo sapiens
tgttttgtttttttt

SEQ ID NO: 634440 - DNA, 15 bp, Homo sapiens
gttttgttttttttg

SEQ ID NO: 634441 - DNA, 15 bp, Homo sapiens
ttttgttttttttga

SEQ ID NO: 634442 - DNA, 15 bp, Homo sapiens
tgttttttttgagac

SEQ ID NO: 634443 - DNA, 15 bp, Homo sapiens
gttttttttgagaca

SEQ ID NO: 634444 - DNA, 15 bp, Homo sapiens
tttttttgagacaga

SEQ ID NO: 634445 - DNA, 15 bp, Homo sapiens
ttgagacagagtctt

SEQ ID NO: 634446 - DNA, 15 bp, Homo sapiens
tgagacagagtcttg

SEQ ID NO: 634447 - DNA, 15 bp, Homo sapiens
gagacagagtcttgc

SEQ ID NO: 634448 - DNA, 15 bp, Homo sapiens
agacagagtcttgct

SEQ ID NO: 634449 - DNA, 15 bp, Homo sapiens
gacagagtcttgctc

SEQ ID NO: 634450 - DNA, 15 bp, Homo sapiens
acagagtcttgctct

SEQ ID NO: 634451 - DNA, 15 bp, Homo sapiens
cagagtcttgctctg

SEQ ID NO: 634452 - DNA, 15 bp, Homo sapiens
agagtcttgctctgt

SEQ ID NO: 634453 - DNA, 15 bp, Homo sapiens
gagtcttgctctgtt

SEQ ID NO: 634454 - DNA, 15 bp, Homo sapiens
agtcttgctctgttt

SEQ ID NO: 634455 - DNA, 15 bp, Homo sapiens
gtcttgctctgtttc

SEQ ID NO: 634456 - DNA, 15 bp, Homo sapiens
tcttgctctgtttcc

SEQ ID NO: 634457 - DNA, 15 bp, Homo sapiens
cttgctctgtttccc

SEQ ID NO: 634458 - DNA, 15 bp, Homo sapiens
ttgctctgtttccca

SEQ ID NO: 634459 - DNA, 15 bp, Homo sapiens
tgctctgtttcccag

SEQ ID NO: 634460 - DNA, 15 bp, Homo sapiens
gctctgtttcccagg

SEQ ID NO: 634461 - DNA, 15 bp, Homo sapiens
ctctgtttcccaggc

SEQ ID NO: 634462 - DNA, 15 bp, Homo sapiens
tctgtttcccaggct

SEQ ID NO: 634463 - DNA, 15 bp, Homo sapiens
ctgtttcccaggctg

SEQ ID NO: 634464 - DNA, 15 bp, Homo sapiens
tgtttcccaggctgg

SEQ ID NO: 634465 - DNA, 15 bp, Homo sapiens
gtttcccaggctgga

SEQ ID NO: 634466 - DNA, 15 bp, Homo sapiens
tttcccaggctggag

SEQ ID NO: 634467 - DNA, 15 bp, Homo sapiens
ttcccaggctggagt

SEQ ID NO: 634468 - DNA, 15 bp, Homo sapiens
tcccaggctggagtg

SEQ ID NO: 634469 - DNA, 15 bp, Homo sapiens
cccaggctggagtga

SEQ ID NO: 634470 - DNA, 15 bp, Homo sapiens
ccaggctggagtgaa

SEQ ID NO: 634471 - DNA, 15 bp, Homo sapiens
caggctggagtgaag

SEQ ID NO: 634472 - DNA, 15 bp, Homo sapiens
aggctggagtgaagt

SEQ ID NO: 634473 - DNA, 15 bp, Homo sapiens
ggctggagtgaagtg

SEQ ID NO: 634474 - DNA, 15 bp, Homo sapiens
gctggagtgaagtgg

SEQ ID NO: 634475 - DNA, 15 bp, Homo sapiens
ctggagtgaagtggc

SEQ ID NO: 634476 - DNA, 15 bp, Homo sapiens
tggagtgaagtggcg

SEQ ID NO: 634477 - DNA, 15 bp, Homo sapiens
ggagtgaagtggcgc

SEQ ID NO: 634478 - DNA, 15 bp, Homo sapiens
gagtgaagtggcgca

SEQ ID NO: 634479 - DNA, 15 bp, Homo sapiens
agtgaagtggcgcat

SEQ ID NO: 634480 - DNA, 15 bp, Homo sapiens
gtgaagtggcgcatt

SEQ ID NO: 634481 - DNA, 15 bp, Homo sapiens
tgaagtggcgcattc

SEQ ID NO: 634482 - DNA, 15 bp, Homo sapiens
gaagtggcgcattct

SEQ ID NO: 634483 - DNA, 15 bp, Homo sapiens
aagtggcgcattctt

SEQ ID NO: 634484 - DNA, 15 bp, Homo sapiens
agtggcgcattcttg

SEQ ID NO: 634485 - DNA, 15 bp, Homo sapiens
gtggcgcattcttgg

SEQ ID NO: 634486 - DNA, 15 bp, Homo sapiens
tggcgcattcttggc

SEQ ID NO: 634487 - DNA, 15 bp, Homo sapiens
ggcgcattcttggct

SEQ ID NO: 634488 - DNA, 15 bp, Homo sapiens
gcgcattcttggctc

SEQ ID NO: 634489 - DNA, 15 bp, Homo sapiens
cgcattcttggctca

SEQ ID NO: 634490 - DNA, 15 bp, Homo sapiens
gcattcttggctcac

SEQ ID NO: 634491 - DNA, 15 bp, Homo sapiens
cattcttggctcact

SEQ ID NO: 634492 - DNA, 15 bp, Homo sapiens
attcttggctcactg

SEQ ID NO: 634493 - DNA, 15 bp, Homo sapiens
ttcttggctcactgc

SEQ ID NO: 634494 - DNA, 15 bp, Homo sapiens
cttggctcactgcaa

SEQ ID NO: 634495 - DNA, 15 bp, Homo sapiens
ttggctcactgcaac

SEQ ID NO: 634496 - DNA, 15 bp, Homo sapiens
tggctcactgcaacc

SEQ ID NO: 634497 - DNA, 15 bp, Homo sapiens
gctcactgcaacctt

SEQ ID NO: 634498 - DNA, 15 bp, Homo sapiens
ctcactgcaaccttc

SEQ ID NO: 634499 - DNA, 15 bp, Homo sapiens
tcactgcaaccttca

SEQ ID NO: 634500 - DNA, 15 bp, Homo sapiens
cactgcaaccttcac

SEQ ID NO: 634501 - DNA, 15 bp, Homo sapiens
actgcaaccttcacc

SEQ ID NO: 634502 - DNA, 15 bp, Homo sapiens
ctgcaaccttcacct

SEQ ID NO: 634503 - DNA, 15 bp, Homo sapiens
tgcaaccttcacctc

SEQ ID NO: 634504 - DNA, 15 bp, Homo sapiens
gcaaccttcacctcc

SEQ ID NO: 634505 - DNA, 15 bp, Homo sapiens
caaccttcacctccc

SEQ ID NO: 634506 - DNA, 15 bp, Homo sapiens
aaccttcacctccca

SEQ ID NO: 634507 - DNA, 15 bp, Homo sapiens
accttcacctcccag

SEQ ID NO: 634508 - DNA, 15 bp, Homo sapiens
ccttcacctcccagg

SEQ ID NO: 634509 - DNA, 15 bp, Homo sapiens
cttcacctcccaggt

SEQ ID NO: 634510 - DNA, 15 bp, Homo sapiens
ttcacctcccaggtt

SEQ ID NO: 634511 - DNA, 15 bp, Homo sapiens
tcacctcccaggttc

SEQ ID NO: 634512 - DNA, 15 bp, Homo sapiens
cacctcccaggttca

SEQ ID NO: 634513 - DNA, 15 bp, Homo sapiens
acctcccaggttcaa

SEQ ID NO: 634514 - DNA, 15 bp, Homo sapiens
cctcccaggttcaag

SEQ ID NO: 634515 - DNA, 15 bp, Homo sapiens
ctcccaggttcaagt

SEQ ID NO: 634516 - DNA, 15 bp, Homo sapiens
tcccaggttcaagtg

SEQ ID NO: 634517 - DNA, 15 bp, Homo sapiens
cccaggttcaagtga

SEQ ID NO: 634518 - DNA, 15 bp, Homo sapiens
ccaggttcaagtgat

SEQ ID NO: 634519 - DNA, 15 bp, Homo sapiens
caggttcaagtgatt

SEQ ID NO: 634520 - DNA, 15 bp, Homo sapiens
aggttcaagtgattc

SEQ ID NO: 634521 - DNA, 15 bp, Homo sapiens
gctgggactacaggc

SEQ ID NO: 634522 - DNA, 15 bp, Homo sapiens
tgggactacaggcat

SEQ ID NO: 634523 - DNA, 15 bp, Homo sapiens
gggactacaggcatg

SEQ ID NO: 634524 - DNA, 15 bp, Homo sapiens
ggactacaggcatgt

SEQ ID NO: 634525 - DNA, 15 bp, Homo sapiens
gactacaggcatgtg

SEQ ID NO: 634526 - DNA, 15 bp, Homo sapiens
actacaggcatgtgt

SEQ ID NO: 634527 - DNA, 15 bp, Homo sapiens
ctacaggcatgtgtc

SEQ ID NO: 634528 - DNA, 15 bp, Homo sapiens
tacaggcatgtgtca

SEQ ID NO: 634529 - DNA, 15 bp, Homo sapiens
acaggcatgtgtcac

SEQ ID NO: 634530 - DNA, 15 bp, Homo sapiens
caggcatgtgtcacc

SEQ ID NO: 634531 - DNA, 15 bp, Homo sapiens
aggcatgtgtcacca

SEQ ID NO: 634532 - DNA, 15 bp, Homo sapiens
ggcatgtgtcaccac

SEQ ID NO: 634533 - DNA, 15 bp, Homo sapiens
gcatgtgtcaccaca

SEQ ID NO: 634534 - DNA, 15 bp, Homo sapiens
catgtgtcaccacac

SEQ ID NO: 634535 - DNA, 15 bp, Homo sapiens
atgtgtcaccacacc

SEQ ID NO: 634536 - DNA, 15 bp, Homo sapiens
tgtgtcaccacaccc

SEQ ID NO: 634537 - DNA, 15 bp, Homo sapiens
gtgtcaccacacccg

SEQ ID NO: 634538 - DNA, 15 bp, Homo sapiens
tgtcaccacacccgg

SEQ ID NO: 634539 - DNA, 15 bp, Homo sapiens
gtcaccacacccggc

SEQ ID NO: 634540 - DNA, 15 bp, Homo sapiens
tcaccacacccggct

SEQ ID NO: 634541 - DNA, 15 bp, Homo sapiens
cccggctaatttttt

SEQ ID NO: 634542 - DNA, 15 bp, Homo sapiens
ccggctaattttttt

SEQ ID NO: 634543 - DNA, 15 bp, Homo sapiens
cggctaatttttttg

SEQ ID NO: 634544 - DNA, 15 bp, Homo sapiens
ggctaatttttttgt

SEQ ID NO: 634545 - DNA, 15 bp, Homo sapiens
gctaatttttttgta

SEQ ID NO: 634546 - DNA, 15 bp, Homo sapiens
ctaatttttttgtat

SEQ ID NO: 634547 - DNA, 15 bp, Homo sapiens
taatttttttgtatt

SEQ ID NO: 634548 - DNA, 15 bp, Homo sapiens
aatttttttgtattt

SEQ ID NO: 634549 - DNA, 15 bp, Homo sapiens
atttttttgtatttt

SEQ ID NO: 634550 - DNA, 15 bp, Homo sapiens
ttagtagagacggga

SEQ ID NO: 634551 - DNA, 15 bp, Homo sapiens
tagtagagacgggat

SEQ ID NO: 634552 - DNA, 15 bp, Homo sapiens
agtagagacgggatt

SEQ ID NO: 634553 - DNA, 15 bp, Homo sapiens
gtagagacgggattt

SEQ ID NO: 634554 - DNA, 15 bp, Homo sapiens
tagagacgggatttc

SEQ ID NO: 634555 - DNA, 15 bp, Homo sapiens
agagacgggatttca

SEQ ID NO: 634556 - DNA, 15 bp, Homo sapiens
gagacgggatttcac

SEQ ID NO: 634557 - DNA, 15 bp, Homo sapiens
agacgggatttcacc

SEQ ID NO: 634558 - DNA, 15 bp, Homo sapiens
gacgggatttcaccg

SEQ ID NO: 634559 - DNA, 15 bp, Homo sapiens
acgggatttcaccgt

SEQ ID NO: 634560 - DNA, 15 bp, Homo sapiens
cgggatttcaccgtg

SEQ ID NO: 634561 - DNA, 15 bp, Homo sapiens
gggatttcaccgtgt

SEQ ID NO: 634562 - DNA, 15 bp, Homo sapiens
atttcaccgtgttgc

SEQ ID NO: 634563 - DNA, 15 bp, Homo sapiens
tttcaccgtgttgcc

SEQ ID NO: 634564 - DNA, 15 bp, Homo sapiens
ttcaccgtgttgccc

SEQ ID NO: 634565 - DNA, 15 bp, Homo sapiens
tcaccgtgttgccca

SEQ ID NO: 634566 - DNA, 15 bp, Homo sapiens
caccgtgttgcccag

SEQ ID NO: 634567 - DNA, 15 bp, Homo sapiens
accgtgttgcccagg

SEQ ID NO: 634568 - DNA, 15 bp, Homo sapiens
ccgtgttgcccaggc

SEQ ID NO: 634569 - DNA, 15 bp, Homo sapiens
cgtgttgcccaggct

SEQ ID NO: 634570 - DNA, 15 bp, Homo sapiens
gtgttgcccaggctg

SEQ ID NO: 634571 - DNA, 15 bp, Homo sapiens
gcccaggctggtctc

SEQ ID NO: 634572 - DNA, 15 bp, Homo sapiens
cccaggctggtctcg

SEQ ID NO: 634573 - DNA, 15 bp, Homo sapiens
tctcgaactcctgag

SEQ ID NO: 634574 - DNA, 15 bp, Homo sapiens
ctcgaactcctgagc

SEQ ID NO: 634575 - DNA, 15 bp, Homo sapiens
tcgaactcctgagct

SEQ ID NO: 634576 - DNA, 15 bp, Homo sapiens
cgaactcctgagctc

SEQ ID NO: 634577 - DNA, 15 bp, Homo sapiens
aactcctgagctcag

SEQ ID NO: 634578 - DNA, 15 bp, Homo sapiens
actcctgagctcagg

SEQ ID NO: 634579 - DNA, 15 bp, Homo sapiens
ctcctgagctcaggc

SEQ ID NO: 634580 - DNA, 15 bp, Homo sapiens
tcctgagctcaggca

SEQ ID NO: 634581 - DNA, 15 bp, Homo sapiens
cctgagctcaggcag

SEQ ID NO: 634582 - DNA, 15 bp, Homo sapiens
ctgagctcaggcagt

SEQ ID NO: 634583 - DNA, 15 bp, Homo sapiens
tgagctcaggcagtc

SEQ ID NO: 634584 - DNA, 15 bp, Homo sapiens
gagctcaggcagtct

SEQ ID NO: 634585 - DNA, 15 bp, Homo sapiens
agctcaggcagtctg

SEQ ID NO: 634586 - DNA, 15 bp, Homo sapiens
gctcaggcagtctgc

SEQ ID NO: 634587 - DNA, 15 bp, Homo sapiens
ctcaggcagtctgcc

SEQ ID NO: 634588 - DNA, 15 bp, Homo sapiens
tcaggcagtctgcct

SEQ ID NO: 634589 - DNA, 15 bp, Homo sapiens
caggcagtctgcctg

SEQ ID NO: 634590 - DNA, 15 bp, Homo sapiens
aggcagtctgcctgc

SEQ ID NO: 634591 - DNA, 15 bp, Homo sapiens
ggcagtctgcctgcc

SEQ ID NO: 634592 - DNA, 15 bp, Homo sapiens
gcagtctgcctgcct

SEQ ID NO: 634593 - DNA, 15 bp, Homo sapiens
cagtctgcctgcctc

SEQ ID NO: 634594 - DNA, 15 bp, Homo sapiens
agtctgcctgcctca

SEQ ID NO: 634595 - DNA, 15 bp, Homo sapiens
gtctgcctgcctcag

SEQ ID NO: 634596 - DNA, 15 bp, Homo sapiens
tctgcctgcctcagc

SEQ ID NO: 634597 - DNA, 15 bp, Homo sapiens
ctgcctgcctcagcc

SEQ ID NO: 634598 - DNA, 15 bp, Homo sapiens
tgcctgcctcagcct

SEQ ID NO: 634599 - DNA, 15 bp, Homo sapiens
gcctgcctcagcctc

SEQ ID NO: 634600 - DNA, 15 bp, Homo sapiens
gtgctgggattacac

SEQ ID NO: 634601 - DNA, 15 bp, Homo sapiens
tgctgggattacacg

SEQ ID NO: 634602 - DNA, 15 bp, Homo sapiens
gctgggattacacgt

SEQ ID NO: 634603 - DNA, 15 bp, Homo sapiens
ctgggattacacgtg

SEQ ID NO: 634604 - DNA, 15 bp, Homo sapiens
tgggattacacgtgt

SEQ ID NO: 634605 - DNA, 15 bp, Homo sapiens
gggattacacgtgtg

SEQ ID NO: 634606 - DNA, 15 bp, Homo sapiens
ggattacacgtgtga

SEQ ID NO: 634607 - DNA, 15 bp, Homo sapiens
gattacacgtgtgaa

SEQ ID NO: 634608 - DNA, 15 bp, Homo sapiens
attacacgtgtgaac

SEQ ID NO: 634609 - DNA, 15 bp, Homo sapiens
ttacacgtgtgaacc

SEQ ID NO: 634610 - DNA, 15 bp, Homo sapiens
tacacgtgtgaacca

SEQ ID NO: 634611 - DNA, 15 bp, Homo sapiens
acacgtgtgaaccaa

SEQ ID NO: 634612 - DNA, 15 bp, Homo sapiens
cacgtgtgaaccaac

SEQ ID NO: 634613 - DNA, 15 bp, Homo sapiens
acgtgtgaaccaacc

SEQ ID NO: 634614 - DNA, 15 bp, Homo sapiens
cgtgtgaaccaaccc

SEQ ID NO: 634615 - DNA, 15 bp, Homo sapiens
gtgtgaaccaacccg

SEQ ID NO: 634616 - DNA, 15 bp, Homo sapiens
tgtgaaccaacccgc

SEQ ID NO: 634617 - DNA, 15 bp, Homo sapiens
gtgaaccaacccgcc

SEQ ID NO: 634618 - DNA, 15 bp, Homo sapiens
tgaaccaacccgccc

SEQ ID NO: 634619 - DNA, 15 bp, Homo sapiens
gaaccaacccgcccg

SEQ ID NO: 634620 - DNA, 15 bp, Homo sapiens
aaccaacccgcccgg

SEQ ID NO: 634621 - DNA, 15 bp, Homo sapiens
accaacccgcccggc

SEQ ID NO: 634622 - DNA, 15 bp, Homo sapiens
ccaacccgcccggcc

SEQ ID NO: 634623 - DNA, 15 bp, Homo sapiens
caacccgcccggcct

SEQ ID NO: 634624 - DNA, 15 bp, Homo sapiens
aacccgcccggcctg

SEQ ID NO: 634625 - DNA, 15 bp, Homo sapiens
acccgcccggcctgt

SEQ ID NO: 634626 - DNA, 15 bp, Homo sapiens
cccgcccggcctgtt

SEQ ID NO: 634627 - DNA, 15 bp, Homo sapiens
ccgcccggcctgttg

SEQ ID NO: 634628 - DNA, 15 bp, Homo sapiens
cgcccggcctgttgt

SEQ ID NO: 634629 - DNA, 15 bp, Homo sapiens
gcccggcctgttgtt

SEQ ID NO: 634630 - DNA, 15 bp, Homo sapiens
cccggcctgttgttt

SEQ ID NO: 634631 - DNA, 15 bp, Homo sapiens
ccggcctgttgtttt

SEQ ID NO: 634632 - DNA, 15 bp, Homo sapiens
cggcctgttgttttc

SEQ ID NO: 634633 - DNA, 15 bp, Homo sapiens
ggcctgttgttttct

SEQ ID NO: 634634 - DNA, 15 bp, Homo sapiens
gcctgttgttttctt

SEQ ID NO: 634635 - DNA, 15 bp, Homo sapiens
cctgttgttttctta

SEQ ID NO: 634636 - DNA, 15 bp, Homo sapiens
ctgttgttttcttac

SEQ ID NO: 634637 - DNA, 15 bp, Homo sapiens
tgttgttttcttaca

SEQ ID NO: 634638 - DNA, 15 bp, Homo sapiens
gttgttttcttacat

SEQ ID NO: 634639 - DNA, 15 bp, Homo sapiens
ttgttttcttacata

SEQ ID NO: 634640 - DNA, 15 bp, Homo sapiens
tgttttcttacataa

SEQ ID NO: 634641 - DNA, 15 bp, Homo sapiens
gttttcttacataat

SEQ ID NO: 634642 - DNA, 15 bp, Homo sapiens
ttttcttacataatt

SEQ ID NO: 634643 - DNA, 15 bp, Homo sapiens
tttcttacataattc

SEQ ID NO: 634644 - DNA, 15 bp, Homo sapiens
ttcttacataattca

SEQ ID NO: 634645 - DNA, 15 bp, Homo sapiens
tcttacataattcat

SEQ ID NO: 634646 - DNA, 15 bp, Homo sapiens
cttacataattcatt

SEQ ID NO: 634647 - DNA, 15 bp, Homo sapiens
ttacataattcatta

SEQ ID NO: 634648 - DNA, 15 bp, Homo sapiens
tacataattcattat

SEQ ID NO: 634649 - DNA, 15 bp, Homo sapiens
acataattcattatc

SEQ ID NO: 634650 - DNA, 15 bp, Homo sapiens
cataattcattatca

SEQ ID NO: 634651 - DNA, 15 bp, Homo sapiens
ataattcattatcat

SEQ ID NO: 634652 - DNA, 15 bp, Homo sapiens
taattcattatcata

SEQ ID NO: 634653 - DNA, 15 bp, Homo sapiens
aattcattatcatac

SEQ ID NO: 634654 - DNA, 15 bp, Homo sapiens
attcattatcatacc

SEQ ID NO: 634655 - DNA, 15 bp, Homo sapiens
ttcattatcatacct

SEQ ID NO: 634656 - DNA, 15 bp, Homo sapiens
tcattatcataccta

SEQ ID NO: 634657 - DNA, 15 bp, Homo sapiens
cattatcatacctac

SEQ ID NO: 634658 - DNA, 15 bp, Homo sapiens
attatcatacctaca

SEQ ID NO: 634659 - DNA, 15 bp, Homo sapiens
ttatcatacctacaa

SEQ ID NO: 634660 - DNA, 15 bp, Homo sapiens
tatcatacctacaaa

SEQ ID NO: 634661 - DNA, 15 bp, Homo sapiens
atcatacctacaaag

SEQ ID NO: 634662 - DNA, 15 bp, Homo sapiens
tcatacctacaaagt

SEQ ID NO: 634663 - DNA, 15 bp, Homo sapiens
catacctacaaagtt

SEQ ID NO: 634664 - DNA, 15 bp, Homo sapiens
atacctacaaagtta

SEQ ID NO: 634665 - DNA, 15 bp, Homo sapiens
tacctacaaagttaa

SEQ ID NO: 634666 - DNA, 15 bp, Homo sapiens
acctacaaagttaac

SEQ ID NO: 634667 - DNA, 15 bp, Homo sapiens
cctacaaagttaaca

SEQ ID NO: 634668 - DNA, 15 bp, Homo sapiens
ctacaaagttaacag

SEQ ID NO: 634669 - DNA, 15 bp, Homo sapiens
tacaaagttaacagt

SEQ ID NO: 634670 - DNA, 15 bp, Homo sapiens
acaaagttaacagtt

SEQ ID NO: 634671 - DNA, 15 bp, Homo sapiens
caaagttaacagtta

SEQ ID NO: 634672 - DNA, 15 bp, Homo sapiens
aaagttaacagttac

SEQ ID NO: 634673 - DNA, 15 bp, Homo sapiens
aagttaacagttact

SEQ ID NO: 634674 - DNA, 15 bp, Homo sapiens
agttaacagttacta

SEQ ID NO: 634675 - DNA, 15 bp, Homo sapiens
gttaacagttactaa

SEQ ID NO: 634676 - DNA, 15 bp, Homo sapiens
ttaacagttactaat

SEQ ID NO: 634677 - DNA, 15 bp, Homo sapiens
taacagttactaata

SEQ ID NO: 634678 - DNA, 15 bp, Homo sapiens
aacagttactaatat

SEQ ID NO: 634679 - DNA, 15 bp, Homo sapiens
acagttactaatatc

SEQ ID NO: 634680 - DNA, 15 bp, Homo sapiens
cagttactaatatca

SEQ ID NO: 634681 - DNA, 15 bp, Homo sapiens
agttactaatatcat

SEQ ID NO: 634682 - DNA, 15 bp, Homo sapiens
gttactaatatcatc

SEQ ID NO: 634683 - DNA, 15 bp, Homo sapiens
ttactaatatcatct

SEQ ID NO: 634684 - DNA, 15 bp, Homo sapiens
tactaatatcatctt

SEQ ID NO: 634685 - DNA, 15 bp, Homo sapiens
actaatatcatctta

SEQ ID NO: 634686 - DNA, 15 bp, Homo sapiens
ctaatatcatcttac

SEQ ID NO: 634687 - DNA, 15 bp, Homo sapiens
taatatcatcttaca

SEQ ID NO: 634688 - DNA, 15 bp, Homo sapiens
aatatcatcttacac

SEQ ID NO: 634689 - DNA, 15 bp, Homo sapiens
atatcatcttacacc

SEQ ID NO: 634690 - DNA, 15 bp, Homo sapiens
tatcatcttacacct

SEQ ID NO: 634691 - DNA, 15 bp, Homo sapiens
atcatcttacaccta

SEQ ID NO: 634692 - DNA, 15 bp, Homo sapiens
tcatcttacacctaa

SEQ ID NO: 634693 - DNA, 15 bp, Homo sapiens
catcttacacctaaa

SEQ ID NO: 634694 - DNA, 15 bp, Homo sapiens
atcttacacctaaat

SEQ ID NO: 634695 - DNA, 15 bp, Homo sapiens
tcttacacctaaatt

SEQ ID NO: 634696 - DNA, 15 bp, Homo sapiens
cttacacctaaattt

SEQ ID NO: 634697 - DNA, 15 bp, Homo sapiens
ttacacctaaatttc

SEQ ID NO: 634698 - DNA, 15 bp, Homo sapiens
tacacctaaatttct

SEQ ID NO: 634699 - DNA, 15 bp, Homo sapiens
acacctaaatttctc

SEQ ID NO: 634700 - DNA, 15 bp, Homo sapiens
cacctaaatttctct

SEQ ID NO: 634701 - DNA, 15 bp, Homo sapiens
acctaaatttctctg

SEQ ID NO: 634702 - DNA, 15 bp, Homo sapiens
cctaaatttctctga

SEQ ID NO: 634703 - DNA, 15 bp, Homo sapiens
ctaaatttctctgat

SEQ ID NO: 634704 - DNA, 15 bp, Homo sapiens
taaatttctctgata

SEQ ID NO: 634705 - DNA, 15 bp, Homo sapiens
aaatttctctgatag

SEQ ID NO: 634706 - DNA, 15 bp, Homo sapiens
aatttctctgataga

SEQ ID NO: 634707 - DNA, 15 bp, Homo sapiens
atttctctgatagac

SEQ ID NO: 634708 - DNA, 15 bp, Homo sapiens
tttctctgatagact

SEQ ID NO: 634709 - DNA, 15 bp, Homo sapiens
ttctctgatagacta

SEQ ID NO: 634710 - DNA, 15 bp, Homo sapiens
tctctgatagactaa

SEQ ID NO: 634711 - DNA, 15 bp, Homo sapiens
ctctgatagactaag

SEQ ID NO: 634712 - DNA, 15 bp, Homo sapiens
tctgatagactaagg

SEQ ID NO: 634713 - DNA, 15 bp, Homo sapiens
ctgatagactaaggt

SEQ ID NO: 634714 - DNA, 15 bp, Homo sapiens
tgatagactaaggtt

SEQ ID NO: 634715 - DNA, 15 bp, Homo sapiens
gatagactaaggtta

SEQ ID NO: 634716 - DNA, 15 bp, Homo sapiens
atagactaaggttat

SEQ ID NO: 634717 - DNA, 15 bp, Homo sapiens
tagactaaggttatt

SEQ ID NO: 634718 - DNA, 15 bp, Homo sapiens
agactaaggttattt

SEQ ID NO: 634719 - DNA, 15 bp, Homo sapiens
gactaaggttatttt

SEQ ID NO: 634720 - DNA, 15 bp, Homo sapiens
actaaggttattttt

SEQ ID NO: 634721 - DNA, 15 bp, Homo sapiens
ctaaggttatttttt

SEQ ID NO: 634722 - DNA, 15 bp, Homo sapiens
taaggttatttttta

SEQ ID NO: 634723 - DNA, 15 bp, Homo sapiens
aaggttattttttaa

SEQ ID NO: 634724 - DNA, 15 bp, Homo sapiens
aggttattttttaac

SEQ ID NO: 634725 - DNA, 15 bp, Homo sapiens
ggttattttttaaca

SEQ ID NO: 634726 - DNA, 15 bp, Homo sapiens
gttattttttaacat

SEQ ID NO: 634727 - DNA, 15 bp, Homo sapiens
ttattttttaacatc

SEQ ID NO: 634728 - DNA, 15 bp, Homo sapiens
tattttttaacatct

SEQ ID NO: 634729 - DNA, 15 bp, Homo sapiens
attttttaacatctt

SEQ ID NO: 634730 - DNA, 15 bp, Homo sapiens
ttttttaacatctta

SEQ ID NO: 634731 - DNA, 15 bp, Homo sapiens
tttttaacatcttaa

SEQ ID NO: 634732 - DNA, 15 bp, Homo sapiens
ttttaacatcttaat

SEQ ID NO: 634733 - DNA, 15 bp, Homo sapiens
tttaacatcttaatc

SEQ ID NO: 634734 - DNA, 15 bp, Homo sapiens
ttaacatcttaatcc

SEQ ID NO: 634735 - DNA, 15 bp, Homo sapiens
taacatcttaatcca

SEQ ID NO: 634736 - DNA, 15 bp, Homo sapiens
aacatcttaatccaa

SEQ ID NO: 634737 - DNA, 15 bp, Homo sapiens
acatcttaatccaat

SEQ ID NO: 634738 - DNA, 15 bp, Homo sapiens
catcttaatccaatc

SEQ ID NO: 634739 - DNA, 15 bp, Homo sapiens
atcttaatccaatca

SEQ ID NO: 634740 - DNA, 15 bp, Homo sapiens
tcttaatccaatcaa

SEQ ID NO: 634741 - DNA, 15 bp, Homo sapiens
cttaatccaatcaaa

SEQ ID NO: 634742 - DNA, 15 bp, Homo sapiens
ttaatccaatcaaat

SEQ ID NO: 634743 - DNA, 15 bp, Homo sapiens
taatccaatcaaatg

SEQ ID NO: 634744 - DNA, 15 bp, Homo sapiens
aatccaatcaaatgt

SEQ ID NO: 634745 - DNA, 15 bp, Homo sapiens
atccaatcaaatgtt

SEQ ID NO: 634746 - DNA, 15 bp, Homo sapiens
tccaatcaaatgttt

SEQ ID NO: 634747 - DNA, 15 bp, Homo sapiens
ccaatcaaatgtttg

SEQ ID NO: 634748 - DNA, 15 bp, Homo sapiens
caatcaaatgtttgt

SEQ ID NO: 634749 - DNA, 15 bp, Homo sapiens
aatcaaatgtttgta

SEQ ID NO: 634750 - DNA, 15 bp, Homo sapiens
atcaaatgtttgtat

SEQ ID NO: 634751 - DNA, 15 bp, Homo sapiens
tcaaatgtttgtatc

SEQ ID NO: 634752 - DNA, 15 bp, Homo sapiens
caaatgtttgtatcc

SEQ ID NO: 634753 - DNA, 15 bp, Homo sapiens
aaatgtttgtatcct

SEQ ID NO: 634754 - DNA, 15 bp, Homo sapiens
aatgtttgtatcctg

SEQ ID NO: 634755 - DNA, 15 bp, Homo sapiens
atgtttgtatcctgt

SEQ ID NO: 634756 - DNA, 15 bp, Homo sapiens
tgtttgtatcctgta

SEQ ID NO: 634757 - DNA, 15 bp, Homo sapiens
gtttgtatcctgtaa

SEQ ID NO: 634758 - DNA, 15 bp, Homo sapiens
tttgtatcctgtaat

SEQ ID NO: 634759 - DNA, 15 bp, Homo sapiens
ttgtatcctgtaatg

SEQ ID NO: 634760 - DNA, 15 bp, Homo sapiens
tgtatcctgtaatgc

SEQ ID NO: 634761 - DNA, 15 bp, Homo sapiens
gtatcctgtaatgct

SEQ ID NO: 634762 - DNA, 15 bp, Homo sapiens
tatcctgtaatgctc

SEQ ID NO: 634763 - DNA, 15 bp, Homo sapiens
atcctgtaatgctct

SEQ ID NO: 634764 - DNA, 15 bp, Homo sapiens
tcctgtaatgctctc

SEQ ID NO: 634765 - DNA, 15 bp, Homo sapiens
cctgtaatgctctca

SEQ ID NO: 634766 - DNA, 15 bp, Homo sapiens
ctgtaatgctctcat

SEQ ID NO: 634767 - DNA, 15 bp, Homo sapiens
tgtaatgctctcatt

SEQ ID NO: 634768 - DNA, 15 bp, Homo sapiens
gtaatgctctcattg

SEQ ID NO: 634769 - DNA, 15 bp, Homo sapiens
taatgctctcattga

SEQ ID NO: 634770 - DNA, 15 bp, Homo sapiens
aatgctctcattgaa

SEQ ID NO: 634771 - DNA, 15 bp, Homo sapiens
atgctctcattgaaa

SEQ ID NO: 634772 - DNA, 15 bp, Homo sapiens
tgctctcattgaaac

SEQ ID NO: 634773 - DNA, 15 bp, Homo sapiens
gctctcattgaaaca

SEQ ID NO: 634774 - DNA, 15 bp, Homo sapiens
ctctcattgaaacag

SEQ ID NO: 634775 - DNA, 15 bp, Homo sapiens
tctcattgaaacagc

SEQ ID NO: 634776 - DNA, 15 bp, Homo sapiens
ctcattgaaacagct

SEQ ID NO: 634777 - DNA, 15 bp, Homo sapiens
tcattgaaacagcta

SEQ ID NO: 634778 - DNA, 15 bp, Homo sapiens
cattgaaacagctat

SEQ ID NO: 634779 - DNA, 15 bp, Homo sapiens
attgaaacagctata

SEQ ID NO: 634780 - DNA, 15 bp, Homo sapiens
ttgaaacagctatat

SEQ ID NO: 634781 - DNA, 15 bp, Homo sapiens
tgaaacagctatatt

SEQ ID NO: 634782 - DNA, 15 bp, Homo sapiens
gaaacagctatattt

SEQ ID NO: 634783 - DNA, 15 bp, Homo sapiens
aaacagctatatttc

SEQ ID NO: 634784 - DNA, 15 bp, Homo sapiens
aacagctatatttct

SEQ ID NO: 634785 - DNA, 15 bp, Homo sapiens
acagctatatttctt

SEQ ID NO: 634786 - DNA, 15 bp, Homo sapiens
cagctatatttcttt

SEQ ID NO: 634787 - DNA, 15 bp, Homo sapiens
agctatatttctttt

SEQ ID NO: 634788 - DNA, 15 bp, Homo sapiens
gctatatttcttttt

SEQ ID NO: 634789 - DNA, 15 bp, Homo sapiens
ctatatttctttttc

SEQ ID NO: 634790 - DNA, 15 bp, Homo sapiens
tatatttctttttca

SEQ ID NO: 634791 - DNA, 15 bp, Homo sapiens
atatttctttttcag

SEQ ID NO: 634792 - DNA, 15 bp, Homo sapiens
tatttctttttcaga

SEQ ID NO: 634793 - DNA, 15 bp, Homo sapiens
atttctttttcagat

SEQ ID NO: 634794 - DNA, 15 bp, Homo sapiens
tttctttttcagatt

SEQ ID NO: 634795 - DNA, 15 bp, Homo sapiens
ttctttttcagatta

SEQ ID NO: 634796 - DNA, 15 bp, Homo sapiens
tctttttcagattag

SEQ ID NO: 634797 - DNA, 15 bp, Homo sapiens
ctttttcagattagt

SEQ ID NO: 634798 - DNA, 15 bp, Homo sapiens
tttttcagattagtg

SEQ ID NO: 634799 - DNA, 15 bp, Homo sapiens
ttttcagattagtga

SEQ ID NO: 634800 - DNA, 15 bp, Homo sapiens
tttcagattagtgat

SEQ ID NO: 634801 - DNA, 15 bp, Homo sapiens
ttcagattagtgatg

SEQ ID NO: 634802 - DNA, 15 bp, Homo sapiens
tcagattagtgatga

SEQ ID NO: 634803 - DNA, 15 bp, Homo sapiens
cagattagtgatgat

SEQ ID NO: 634804 - DNA, 15 bp, Homo sapiens
agattagtgatgatg

SEQ ID NO: 634805 - DNA, 15 bp, Homo sapiens
gattagtgatgatga

SEQ ID NO: 634806 - DNA, 15 bp, Homo sapiens
attagtgatgatgaa

SEQ ID NO: 634807 - DNA, 15 bp, Homo sapiens
ttagtgatgatgaac

SEQ ID NO: 634808 - DNA, 15 bp, Homo sapiens
tagtgatgatgaacc

SEQ ID NO: 634809 - DNA, 15 bp, Homo sapiens
agtgatgatgaacca

SEQ ID NO: 634810 - DNA, 15 bp, Homo sapiens
gtgatgatgaaccag

SEQ ID NO: 634811 - DNA, 15 bp, Homo sapiens
tgatgatgaaccagg

SEQ ID NO: 634812 - DNA, 15 bp, Homo sapiens
gatgatgaaccaggt

SEQ ID NO: 634813 - DNA, 15 bp, Homo sapiens
atgatgaaccaggtt

SEQ ID NO: 634814 - DNA, 15 bp, Homo sapiens
tgatgaaccaggtta

SEQ ID NO: 634815 - DNA, 15 bp, Homo sapiens
gatgaaccaggttat

SEQ ID NO: 634816 - DNA, 15 bp, Homo sapiens
atgaaccaggttatg

SEQ ID NO: 634817 - DNA, 15 bp, Homo sapiens
tgaaccaggttatga

SEQ ID NO: 634818 - DNA, 15 bp, Homo sapiens
gaaccaggttatgac

SEQ ID NO: 634819 - DNA, 15 bp, Homo sapiens
aaccaggttatgacc

SEQ ID NO: 634820 - DNA, 15 bp, Homo sapiens
accaggttatgacct

SEQ ID NO: 634821 - DNA, 15 bp, Homo sapiens
ccaggttatgacctt

SEQ ID NO: 634822 - DNA, 15 bp, Homo sapiens
caggttatgaccttg

SEQ ID NO: 634823 - DNA, 15 bp, Homo sapiens
aggttatgaccttga

SEQ ID NO: 634824 - DNA, 15 bp, Homo sapiens
ggttatgaccttgat

SEQ ID NO: 634825 - DNA, 15 bp, Homo sapiens
gttatgaccttgatt

SEQ ID NO: 634826 - DNA, 15 bp, Homo sapiens
ttatgaccttgattt

SEQ ID NO: 634827 - DNA, 15 bp, Homo sapiens
tatgaccttgattta

SEQ ID NO: 634828 - DNA, 15 bp, Homo sapiens
atgaccttgatttat

SEQ ID NO: 634829 - DNA, 15 bp, Homo sapiens
tgaccttgatttatt

SEQ ID NO: 634830 - DNA, 15 bp, Homo sapiens
gaccttgatttattt

SEQ ID NO: 634831 - DNA, 15 bp, Homo sapiens
accttgatttatttt

SEQ ID NO: 634832 - DNA, 15 bp, Homo sapiens
ccttgatttattttg

SEQ ID NO: 634833 - DNA, 15 bp, Homo sapiens
cttgatttattttgc

SEQ ID NO: 634834 - DNA, 15 bp, Homo sapiens
ttgatttattttgca

SEQ ID NO: 634835 - DNA, 15 bp, Homo sapiens
tgatttattttgcat

SEQ ID NO: 634836 - DNA, 15 bp, Homo sapiens
gatttattttgcata

SEQ ID NO: 634837 - DNA, 15 bp, Homo sapiens
atttattttgcatac

SEQ ID NO: 634838 - DNA, 15 bp, Homo sapiens
tttattttgcatacc

SEQ ID NO: 634839 - DNA, 15 bp, Homo sapiens
ttattttgcatacct

SEQ ID NO: 634840 - DNA, 15 bp, Homo sapiens
tattttgcataccta

SEQ ID NO: 634841 - DNA, 15 bp, Homo sapiens
attttgcatacctaa

SEQ ID NO: 634842 - DNA, 15 bp, Homo sapiens
ttttgcatacctaat

SEQ ID NO: 634843 - DNA, 15 bp, Homo sapiens
tttgcatacctaatc

SEQ ID NO: 634844 - DNA, 15 bp, Homo sapiens
ttgcatacctaatca

SEQ ID NO: 634845 - DNA, 15 bp, Homo sapiens
tgcatacctaatcat

SEQ ID NO: 634846 - DNA, 15 bp, Homo sapiens
gcatacctaatcatt

SEQ ID NO: 634847 - DNA, 15 bp, Homo sapiens
catacctaatcatta

SEQ ID NO: 634848 - DNA, 15 bp, Homo sapiens
atacctaatcattat

SEQ ID NO: 634849 - DNA, 15 bp, Homo sapiens
tacctaatcattatg

SEQ ID NO: 634850 - DNA, 15 bp, Homo sapiens
acctaatcattatgc

SEQ ID NO: 634851 - DNA, 15 bp, Homo sapiens
cctaatcattatgct

SEQ ID NO: 634852 - DNA, 15 bp, Homo sapiens
ctaatcattatgctg

SEQ ID NO: 634853 - DNA, 15 bp, Homo sapiens
taatcattatgctga

SEQ ID NO: 634854 - DNA, 15 bp, Homo sapiens
aatcattatgctgag

SEQ ID NO: 634855 - DNA, 15 bp, Homo sapiens
atcattatgctgagg

SEQ ID NO: 634856 - DNA, 15 bp, Homo sapiens
tcattatgctgagga

SEQ ID NO: 634857 - DNA, 15 bp, Homo sapiens
cattatgctgaggat

SEQ ID NO: 634858 - DNA, 15 bp, Homo sapiens
attatgctgaggatt

SEQ ID NO: 634859 - DNA, 15 bp, Homo sapiens
ttatgctgaggattt

SEQ ID NO: 634860 - DNA, 15 bp, Homo sapiens
tatgctgaggatttg

SEQ ID NO: 634861 - DNA, 15 bp, Homo sapiens
atgctgaggatttgg

SEQ ID NO: 634862 - DNA, 15 bp, Homo sapiens
tgctgaggatttgga

SEQ ID NO: 634863 - DNA, 15 bp, Homo sapiens
gctgaggatttggaa

SEQ ID NO: 634864 - DNA, 15 bp, Homo sapiens
ctgaggatttggaaa

SEQ ID NO: 634865 - DNA, 15 bp, Homo sapiens
tgaggatttggaaag

SEQ ID NO: 634866 - DNA, 15 bp, Homo sapiens
gaggatttggaaagg

SEQ ID NO: 634867 - DNA, 15 bp, Homo sapiens
aggatttggaaaggg

SEQ ID NO: 634868 - DNA, 15 bp, Homo sapiens
ggatttggaaagggt

SEQ ID NO: 634869 - DNA, 15 bp, Homo sapiens
gatttggaaagggtg

SEQ ID NO: 634870 - DNA, 15 bp, Homo sapiens
atttggaaagggtgt

SEQ ID NO: 634871 - DNA, 15 bp, Homo sapiens
tttggaaagggtgtt

SEQ ID NO: 634872 - DNA, 15 bp, Homo sapiens
ttggaaagggtgttt

SEQ ID NO: 634873 - DNA, 15 bp, Homo sapiens
tggaaagggtgttta

SEQ ID NO: 634874 - DNA, 15 bp, Homo sapiens
ggaaagggtgtttat

SEQ ID NO: 634875 - DNA, 15 bp, Homo sapiens
gaaagggtgtttatt

SEQ ID NO: 634876 - DNA, 15 bp, Homo sapiens
aaagggtgtttattc

SEQ ID NO: 634877 - DNA, 15 bp, Homo sapiens
aagggtgtttattcc

SEQ ID NO: 634878 - DNA, 15 bp, Homo sapiens
agggtgtttattcct

SEQ ID NO: 634879 - DNA, 15 bp, Homo sapiens
gggtgtttattcctc

SEQ ID NO: 634880 - DNA, 15 bp, Homo sapiens
ggtgtttattcctca

SEQ ID NO: 634881 - DNA, 15 bp, Homo sapiens
gtgtttattcctcat

SEQ ID NO: 634882 - DNA, 15 bp, Homo sapiens
tgtttattcctcatg

SEQ ID NO: 634883 - DNA, 15 bp, Homo sapiens
gtttattcctcatgg

SEQ ID NO: 634884 - DNA, 15 bp, Homo sapiens
tttattcctcatgga

SEQ ID NO: 634885 - DNA, 15 bp, Homo sapiens
ttattcctcatggac

SEQ ID NO: 634886 - DNA, 15 bp, Homo sapiens
tattcctcatggact

SEQ ID NO: 634887 - DNA, 15 bp, Homo sapiens
attcctcatggacta

SEQ ID NO: 634888 - DNA, 15 bp, Homo sapiens
ttcctcatggactaa

SEQ ID NO: 634889 - DNA, 15 bp, Homo sapiens
tcctcatggactaat

SEQ ID NO: 634890 - DNA, 15 bp, Homo sapiens
cctcatggactaatt

SEQ ID NO: 634891 - DNA, 15 bp, Homo sapiens
ctcatggactaatta

SEQ ID NO: 634892 - DNA, 15 bp, Homo sapiens
tcatggactaattat

SEQ ID NO: 634893 - DNA, 15 bp, Homo sapiens
catggactaattatg

SEQ ID NO: 634894 - DNA, 15 bp, Homo sapiens
atggactaattatgg

SEQ ID NO: 634895 - DNA, 15 bp, Homo sapiens
tggactaattatgga

SEQ ID NO: 634896 - DNA, 15 bp, Homo sapiens
ggactaattatggac

SEQ ID NO: 634897 - DNA, 15 bp, Homo sapiens
gactaattatggaca

SEQ ID NO: 634898 - DNA, 15 bp, Homo sapiens
actaattatggacag

SEQ ID NO: 634899 - DNA, 15 bp, Homo sapiens
ctaattatggacagg

SEQ ID NO: 634900 - DNA, 15 bp, Homo sapiens
taattatggacaggt

SEQ ID NO: 634901 - DNA, 15 bp, Homo sapiens
aattatggacaggta

SEQ ID NO: 634902 - DNA, 15 bp, Homo sapiens
attatggacaggtaa

SEQ ID NO: 634903 - DNA, 15 bp, Homo sapiens
ttatggacaggtaag

SEQ ID NO: 634904 - DNA, 15 bp, Homo sapiens
tatggacaggtaagt

SEQ ID NO: 634905 - DNA, 15 bp, Homo sapiens
atggacaggtaagta

SEQ ID NO: 634906 - DNA, 15 bp, Homo sapiens
tggacaggtaagtaa

SEQ ID NO: 634907 - DNA, 15 bp, Homo sapiens
ggacaggtaagtaag

SEQ ID NO: 634908 - DNA, 15 bp, Homo sapiens
gacaggtaagtaaga

SEQ ID NO: 634909 - DNA, 15 bp, Homo sapiens
acaggtaagtaagat

SEQ ID NO: 634910 - DNA, 15 bp, Homo sapiens
caggtaagtaagatc

SEQ ID NO: 634911 - DNA, 15 bp, Homo sapiens
aggtaagtaagatct

SEQ ID NO: 634912 - DNA, 15 bp, Homo sapiens
ggtaagtaagatctt

SEQ ID NO: 634913 - DNA, 15 bp, Homo sapiens
gtaagtaagatctta

SEQ ID NO: 634914 - DNA, 15 bp, Homo sapiens
taagtaagatcttaa

SEQ ID NO: 634915 - DNA, 15 bp, Homo sapiens
aagtaagatcttaaa

SEQ ID NO: 634916 - DNA, 15 bp, Homo sapiens
agtaagatcttaaaa

SEQ ID NO: 634917 - DNA, 15 bp, Homo sapiens
gtaagatcttaaaat

SEQ ID NO: 634918 - DNA, 15 bp, Homo sapiens
taagatcttaaaatg

SEQ ID NO: 634919 - DNA, 15 bp, Homo sapiens
aagatcttaaaatga

SEQ ID NO: 634920 - DNA, 15 bp, Homo sapiens
agatcttaaaatgag

SEQ ID NO: 634921 - DNA, 15 bp, Homo sapiens
gatcttaaaatgagg

SEQ ID NO: 634922 - DNA, 15 bp, Homo sapiens
atcttaaaatgaggt

SEQ ID NO: 634923 - DNA, 15 bp, Homo sapiens
tcttaaaatgaggtt

SEQ ID NO: 634924 - DNA, 15 bp, Homo sapiens
cttaaaatgaggttt

SEQ ID NO: 634925 - DNA, 15 bp, Homo sapiens
ttaaaatgaggtttt

SEQ ID NO: 634926 - DNA, 15 bp, Homo sapiens
taaaatgaggttttt

SEQ ID NO: 634927 - DNA, 15 bp, Homo sapiens
aaaatgaggtttttt

SEQ ID NO: 634928 - DNA, 15 bp, Homo sapiens
aaatgaggtttttta

SEQ ID NO: 634929 - DNA, 15 bp, Homo sapiens
aatgaggttttttac

SEQ ID NO: 634930 - DNA, 15 bp, Homo sapiens
atgaggttttttact

SEQ ID NO: 634931 - DNA, 15 bp, Homo sapiens
tgaggttttttactt

SEQ ID NO: 634932 - DNA, 15 bp, Homo sapiens
gaggttttttacttt

SEQ ID NO: 634933 - DNA, 15 bp, Homo sapiens
aggttttttactttt

SEQ ID NO: 634934 - DNA, 15 bp, Homo sapiens
ggttttttacttttt

SEQ ID NO: 634935 - DNA, 15 bp, Homo sapiens
gttttttactttttc

SEQ ID NO: 634936 - DNA, 15 bp, Homo sapiens
ttttttactttttct

SEQ ID NO: 634937 - DNA, 15 bp, Homo sapiens
tttttactttttctt

SEQ ID NO: 634938 - DNA, 15 bp, Homo sapiens
ttttactttttcttg

SEQ ID NO: 634939 - DNA, 15 bp, Homo sapiens
tttactttttcttgt

SEQ ID NO: 634940 - DNA, 15 bp, Homo sapiens
ttactttttcttgtg

SEQ ID NO: 634941 - DNA, 15 bp, Homo sapiens
tactttttcttgtgt

SEQ ID NO: 634942 - DNA, 15 bp, Homo sapiens
actttttcttgtgtt

SEQ ID NO: 634943 - DNA, 15 bp, Homo sapiens
ctttttcttgtgtta

SEQ ID NO: 634944 - DNA, 15 bp, Homo sapiens
tttttcttgtgttaa

SEQ ID NO: 634945 - DNA, 15 bp, Homo sapiens
ttttcttgtgttaat

SEQ ID NO: 634946 - DNA, 15 bp, Homo sapiens
tttcttgtgttaatt

SEQ ID NO: 634947 - DNA, 15 bp, Homo sapiens
ttcttgtgttaattt

SEQ ID NO: 634948 - DNA, 15 bp, Homo sapiens
tcttgtgttaatttc

SEQ ID NO: 634949 - DNA, 15 bp, Homo sapiens
cttgtgttaatttca

SEQ ID NO: 634950 - DNA, 15 bp, Homo sapiens
ttgtgttaatttcaa

SEQ ID NO: 634951 - DNA, 15 bp, Homo sapiens
tgtgttaatttcaaa

SEQ ID NO: 634952 - DNA, 15 bp, Homo sapiens
gtgttaatttcaaac

SEQ ID NO: 634953 - DNA, 15 bp, Homo sapiens
tgttaatttcaaaca

SEQ ID NO: 634954 - DNA, 15 bp, Homo sapiens
gttaatttcaaacat

SEQ ID NO: 634955 - DNA, 15 bp, Homo sapiens
ttaatttcaaacatc

SEQ ID NO: 634956 - DNA, 15 bp, Homo sapiens
taatttcaaacatca

SEQ ID NO: 634957 - DNA, 15 bp, Homo sapiens
aatttcaaacatcag

SEQ ID NO: 634958 - DNA, 15 bp, Homo sapiens
atttcaaacatcagc

SEQ ID NO: 634959 - DNA, 15 bp, Homo sapiens
tttcaaacatcagca

SEQ ID NO: 634960 - DNA, 15 bp, Homo sapiens
ttcaaacatcagcag

SEQ ID NO: 634961 - DNA, 15 bp, Homo sapiens
tcaaacatcagcagc

SEQ ID NO: 634962 - DNA, 15 bp, Homo sapiens
caaacatcagcagct

SEQ ID NO: 634963 - DNA, 15 bp, Homo sapiens
aaacatcagcagctg

SEQ ID NO: 634964 - DNA, 15 bp, Homo sapiens
aacatcagcagctgt

SEQ ID NO: 634965 - DNA, 15 bp, Homo sapiens
acatcagcagctgtt

SEQ ID NO: 634966 - DNA, 15 bp, Homo sapiens
catcagcagctgttc

SEQ ID NO: 634967 - DNA, 15 bp, Homo sapiens
atcagcagctgttct

SEQ ID NO: 634968 - DNA, 15 bp, Homo sapiens
tcagcagctgttctg

SEQ ID NO: 634969 - DNA, 15 bp, Homo sapiens
cagcagctgttctga

SEQ ID NO: 634970 - DNA, 15 bp, Homo sapiens
agcagctgttctgag

SEQ ID NO: 634971 - DNA, 15 bp, Homo sapiens
gcagctgttctgagt

SEQ ID NO: 634972 - DNA, 15 bp, Homo sapiens
cagctgttctgagta

SEQ ID NO: 634973 - DNA, 15 bp, Homo sapiens
agctgttctgagtac

SEQ ID NO: 634974 - DNA, 15 bp, Homo sapiens
gctgttctgagtact

SEQ ID NO: 634975 - DNA, 15 bp, Homo sapiens
ctgttctgagtactt

SEQ ID NO: 634976 - DNA, 15 bp, Homo sapiens
tgttctgagtacttg

SEQ ID NO: 634977 - DNA, 15 bp, Homo sapiens
gttctgagtacttgc

SEQ ID NO: 634978 - DNA, 15 bp, Homo sapiens
ttctgagtacttgct

SEQ ID NO: 634979 - DNA, 15 bp, Homo sapiens
tctgagtacttgcta

SEQ ID NO: 634980 - DNA, 15 bp, Homo sapiens
ctgagtacttgctat

SEQ ID NO: 634981 - DNA, 15 bp, Homo sapiens
tgagtacttgctatt

SEQ ID NO: 634982 - DNA, 15 bp, Homo sapiens
gagtacttgctattt

SEQ ID NO: 634983 - DNA, 15 bp, Homo sapiens
agtacttgctatttg

SEQ ID NO: 634984 - DNA, 15 bp, Homo sapiens
gtacttgctatttga

SEQ ID NO: 634985 - DNA, 15 bp, Homo sapiens
tacttgctatttgaa

SEQ ID NO: 634986 - DNA, 15 bp, Homo sapiens
acttgctatttgaac

SEQ ID NO: 634987 - DNA, 15 bp, Homo sapiens
cttgctatttgaaca

SEQ ID NO: 634988 - DNA, 15 bp, Homo sapiens
ttgctatttgaacat

SEQ ID NO: 634989 - DNA, 15 bp, Homo sapiens
tgctatttgaacata

SEQ ID NO: 634990 - DNA, 15 bp, Homo sapiens
gctatttgaacataa

SEQ ID NO: 634991 - DNA, 15 bp, Homo sapiens
ctatttgaacataaa

SEQ ID NO: 634992 - DNA, 15 bp, Homo sapiens
tatttgaacataaac

SEQ ID NO: 634993 - DNA, 15 bp, Homo sapiens
atttgaacataaact

SEQ ID NO: 634994 - DNA, 15 bp, Homo sapiens
tttgaacataaacta

SEQ ID NO: 634995 - DNA, 15 bp, Homo sapiens
ttgaacataaactag

SEQ ID NO: 634996 - DNA, 15 bp, Homo sapiens
tgaacataaactagg

SEQ ID NO: 634997 - DNA, 15 bp, Homo sapiens
gaacataaactaggc

SEQ ID NO: 634998 - DNA, 15 bp, Homo sapiens
aacataaactaggcc

SEQ ID NO: 634999 - DNA, 15 bp, Homo sapiens
acataaactaggcca

SEQ ID NO: 635000 - DNA, 15 bp, Homo sapiens
cataaactaggccaa

SEQ ID NO: 635001 - DNA, 15 bp, Homo sapiens
ataaactaggccaac

SEQ ID NO: 635002 - DNA, 15 bp, Homo sapiens
taaactaggccaact

SEQ ID NO: 635003 - DNA, 15 bp, Homo sapiens
aaactaggccaactt

SEQ ID NO: 635004 - DNA, 15 bp, Homo sapiens
aactaggccaactta

SEQ ID NO: 635005 - DNA, 15 bp, Homo sapiens
actaggccaacttat

SEQ ID NO: 635006 - DNA, 15 bp, Homo sapiens
ctaggccaacttatt

SEQ ID NO: 635007 - DNA, 15 bp, Homo sapiens
taggccaacttatta

SEQ ID NO: 635008 - DNA, 15 bp, Homo sapiens
aggccaacttattaa

SEQ ID NO: 635009 - DNA, 15 bp, Homo sapiens
ggccaacttattaaa

SEQ ID NO: 635010 - DNA, 15 bp, Homo sapiens
gccaacttattaaat

SEQ ID NO: 635011 - DNA, 15 bp, Homo sapiens
ccaacttattaaata

SEQ ID NO: 635012 - DNA, 15 bp, Homo sapiens
caacttattaaataa

SEQ ID NO: 635013 - DNA, 15 bp, Homo sapiens
aacttattaaataac

SEQ ID NO: 635014 - DNA, 15 bp, Homo sapiens
acttattaaataact

SEQ ID NO: 635015 - DNA, 15 bp, Homo sapiens
cttattaaataactg

SEQ ID NO: 635016 - DNA, 15 bp, Homo sapiens
ttattaaataactga

SEQ ID NO: 635017 - DNA, 15 bp, Homo sapiens
tattaaataactgat

SEQ ID NO: 635018 - DNA, 15 bp, Homo sapiens
attaaataactgatg

SEQ ID NO: 635019 - DNA, 15 bp, Homo sapiens
ttaaataactgatgc

SEQ ID NO: 635020 - DNA, 15 bp, Homo sapiens
taaataactgatgct

SEQ ID NO: 635021 - DNA, 15 bp, Homo sapiens
aaataactgatgctt

SEQ ID NO: 635022 - DNA, 15 bp, Homo sapiens
aataactgatgcttt

SEQ ID NO: 635023 - DNA, 15 bp, Homo sapiens
ataactgatgctttc

SEQ ID NO: 635024 - DNA, 15 bp, Homo sapiens
taactgatgctttct

SEQ ID NO: 635025 - DNA, 15 bp, Homo sapiens
aactgatgctttcta

SEQ ID NO: 635026 - DNA, 15 bp, Homo sapiens
actgatgctttctaa

SEQ ID NO: 635027 - DNA, 15 bp, Homo sapiens
ctgatgctttctaaa

SEQ ID NO: 635028 - DNA, 15 bp, Homo sapiens
tgatgctttctaaaa

SEQ ID NO: 635029 - DNA, 15 bp, Homo sapiens
gatgctttctaaaat

SEQ ID NO: 635030 - DNA, 15 bp, Homo sapiens
atgctttctaaaatc

SEQ ID NO: 635031 - DNA, 15 bp, Homo sapiens
tgctttctaaaatct

SEQ ID NO: 635032 - DNA, 15 bp, Homo sapiens
gctttctaaaatctt

SEQ ID NO: 635033 - DNA, 15 bp, Homo sapiens
ctttctaaaatcttc

SEQ ID NO: 635034 - DNA, 15 bp, Homo sapiens
tttctaaaatcttct

SEQ ID NO: 635035 - DNA, 15 bp, Homo sapiens
ttctaaaatcttctt

SEQ ID NO: 635036 - DNA, 15 bp, Homo sapiens
tctaaaatcttcttt

SEQ ID NO: 635037 - DNA, 15 bp, Homo sapiens
ctaaaatcttcttta

SEQ ID NO: 635038 - DNA, 15 bp, Homo sapiens
taaaatcttctttat

SEQ ID NO: 635039 - DNA, 15 bp, Homo sapiens
aaaatcttctttatt

SEQ ID NO: 635040 - DNA, 15 bp, Homo sapiens
aaatcttctttatta

SEQ ID NO: 635041 - DNA, 15 bp, Homo sapiens
aatcttctttattaa

SEQ ID NO: 635042 - DNA, 15 bp, Homo sapiens
atcttctttattaaa

SEQ ID NO: 635043 - DNA, 15 bp, Homo sapiens
tcttctttattaaaa

SEQ ID NO: 635044 - DNA, 15 bp, Homo sapiens
cttctttattaaaaa

SEQ ID NO: 635045 - DNA, 15 bp, Homo sapiens
ttctttattaaaaat

SEQ ID NO: 635046 - DNA, 15 bp, Homo sapiens
tctttattaaaaata

SEQ ID NO: 635047 - DNA, 15 bp, Homo sapiens
ctttattaaaaataa

SEQ ID NO: 635048 - DNA, 15 bp, Homo sapiens
tttattaaaaataaa

SEQ ID NO: 635049 - DNA, 15 bp, Homo sapiens
ttattaaaaataaaa

SEQ ID NO: 635050 - DNA, 15 bp, Homo sapiens
tattaaaaataaaag

SEQ ID NO: 635051 - DNA, 15 bp, Homo sapiens
attaaaaataaaaga

SEQ ID NO: 635052 - DNA, 15 bp, Homo sapiens
ttaaaaataaaagag

SEQ ID NO: 635053 - DNA, 15 bp, Homo sapiens
taaaaataaaagagg

SEQ ID NO: 635054 - DNA, 15 bp, Homo sapiens
aaaaataaaagagga

SEQ ID NO: 635055 - DNA, 15 bp, Homo sapiens
aaaataaaagaggag

SEQ ID NO: 635056 - DNA, 15 bp, Homo sapiens
aaataaaagaggagg

SEQ ID NO: 635057 - DNA, 15 bp, Homo sapiens
aataaaagaggaggg

SEQ ID NO: 635058 - DNA, 15 bp, Homo sapiens
ataaaagaggagggc

SEQ ID NO: 635059 - DNA, 15 bp, Homo sapiens
taaaagaggagggcc

SEQ ID NO: 635060 - DNA, 15 bp, Homo sapiens
aaaagaggagggcct

SEQ ID NO: 635061 - DNA, 15 bp, Homo sapiens
aaagaggagggcctt

SEQ ID NO: 635062 - DNA, 15 bp, Homo sapiens
aagaggagggcctta

SEQ ID NO: 635063 - DNA, 15 bp, Homo sapiens
agaggagggccttac

SEQ ID NO: 635064 - DNA, 15 bp, Homo sapiens
gaggagggccttact

SEQ ID NO: 635065 - DNA, 15 bp, Homo sapiens
aggagggccttacta

SEQ ID NO: 635066 - DNA, 15 bp, Homo sapiens
ggagggccttactaa

SEQ ID NO: 635067 - DNA, 15 bp, Homo sapiens
gagggccttactaat

SEQ ID NO: 635068 - DNA, 15 bp, Homo sapiens
agggccttactaatt

SEQ ID NO: 635069 - DNA, 15 bp, Homo sapiens
gggccttactaatta

SEQ ID NO: 635070 - DNA, 15 bp, Homo sapiens
ggccttactaattac

SEQ ID NO: 635071 - DNA, 15 bp, Homo sapiens
gccttactaattact

SEQ ID NO: 635072 - DNA, 15 bp, Homo sapiens
ccttactaattactt

SEQ ID NO: 635073 - DNA, 15 bp, Homo sapiens
cttactaattactta

SEQ ID NO: 635074 - DNA, 15 bp, Homo sapiens
ttactaattacttag

SEQ ID NO: 635075 - DNA, 15 bp, Homo sapiens
tactaattacttagt

SEQ ID NO: 635076 - DNA, 15 bp, Homo sapiens
actaattacttagta

SEQ ID NO: 635077 - DNA, 15 bp, Homo sapiens
ctaattacttagtat

SEQ ID NO: 635078 - DNA, 15 bp, Homo sapiens
taattacttagtatc

SEQ ID NO: 635079 - DNA, 15 bp, Homo sapiens
aattacttagtatca

SEQ ID NO: 635080 - DNA, 15 bp, Homo sapiens
attacttagtatcag

SEQ ID NO: 635081 - DNA, 15 bp, Homo sapiens
ttacttagtatcagt

SEQ ID NO: 635082 - DNA, 15 bp, Homo sapiens
tacttagtatcagtt

SEQ ID NO: 635083 - DNA, 15 bp, Homo sapiens
acttagtatcagttg

SEQ ID NO: 635084 - DNA, 15 bp, Homo sapiens
cttagtatcagttgt

SEQ ID NO: 635085 - DNA, 15 bp, Homo sapiens
ttagtatcagttgtg

SEQ ID NO: 635086 - DNA, 15 bp, Homo sapiens
tagtatcagttgtgg

SEQ ID NO: 635087 - DNA, 15 bp, Homo sapiens
agtatcagttgtggt

SEQ ID NO: 635088 - DNA, 15 bp, Homo sapiens
gtatcagttgtggta

SEQ ID NO: 635089 - DNA, 15 bp, Homo sapiens
tatcagttgtggtat

SEQ ID NO: 635090 - DNA, 15 bp, Homo sapiens
atcagttgtggtata

SEQ ID NO: 635091 - DNA, 15 bp, Homo sapiens
tcagttgtggtatag

SEQ ID NO: 635092 - DNA, 15 bp, Homo sapiens
cagttgtggtatagt

SEQ ID NO: 635093 - DNA, 15 bp, Homo sapiens
agttgtggtatagtg

SEQ ID NO: 635094 - DNA, 15 bp, Homo sapiens
gttgtggtatagtgg

SEQ ID NO: 635095 - DNA, 15 bp, Homo sapiens
ttgtggtatagtggg

SEQ ID NO: 635096 - DNA, 15 bp, Homo sapiens
tgtggtatagtggga

SEQ ID NO: 635097 - DNA, 15 bp, Homo sapiens
gtggtatagtgggac

SEQ ID NO: 635098 - DNA, 15 bp, Homo sapiens
tggtatagtgggact

SEQ ID NO: 635099 - DNA, 15 bp, Homo sapiens
ggtatagtgggactc

SEQ ID NO: 635100 - DNA, 15 bp, Homo sapiens
gtatagtgggactct

SEQ ID NO: 635101 - DNA, 15 bp, Homo sapiens
tatagtgggactctg

SEQ ID NO: 635102 - DNA, 15 bp, Homo sapiens
atagtgggactctgt

SEQ ID NO: 635103 - DNA, 15 bp, Homo sapiens
tagtgggactctgta

SEQ ID NO: 635104 - DNA, 15 bp, Homo sapiens
agtgggactctgtag

SEQ ID NO: 635105 - DNA, 15 bp, Homo sapiens
gtgggactctgtagg

SEQ ID NO: 635106 - DNA, 15 bp, Homo sapiens
tgggactctgtaggg

SEQ ID NO: 635107 - DNA, 15 bp, Homo sapiens
gggactctgtaggga

SEQ ID NO: 635108 - DNA, 15 bp, Homo sapiens
ggactctgtagggac

SEQ ID NO: 635109 - DNA, 15 bp, Homo sapiens
gactctgtagggacc

SEQ ID NO: 635110 - DNA, 15 bp, Homo sapiens
actctgtagggacca

SEQ ID NO: 635111 - DNA, 15 bp, Homo sapiens
ctctgtagggaccag

SEQ ID NO: 635112 - DNA, 15 bp, Homo sapiens
tctgtagggaccaga

SEQ ID NO: 635113 - DNA, 15 bp, Homo sapiens
ctgtagggaccagaa

SEQ ID NO: 635114 - DNA, 15 bp, Homo sapiens
tgtagggaccagaac

SEQ ID NO: 635115 - DNA, 15 bp, Homo sapiens
gtagggaccagaaca

SEQ ID NO: 635116 - DNA, 15 bp, Homo sapiens
tagggaccagaacaa

SEQ ID NO: 635117 - DNA, 15 bp, Homo sapiens
agggaccagaacaaa

SEQ ID NO: 635118 - DNA, 15 bp, Homo sapiens
gggaccagaacaaag

SEQ ID NO: 635119 - DNA, 15 bp, Homo sapiens
ggaccagaacaaagt

SEQ ID NO: 635120 - DNA, 15 bp, Homo sapiens
gaccagaacaaagta

SEQ ID NO: 635121 - DNA, 15 bp, Homo sapiens
accagaacaaagtaa

SEQ ID NO: 635122 - DNA, 15 bp, Homo sapiens
ccagaacaaagtaaa

SEQ ID NO: 635123 - DNA, 15 bp, Homo sapiens
cagaacaaagtaaac

SEQ ID NO: 635124 - DNA, 15 bp, Homo sapiens
agaacaaagtaaaca

SEQ ID NO: 635125 - DNA, 15 bp, Homo sapiens
gaacaaagtaaacat

SEQ ID NO: 635126 - DNA, 15 bp, Homo sapiens
aacaaagtaaacatt

SEQ ID NO: 635127 - DNA, 15 bp, Homo sapiens
acaaagtaaacattg

SEQ ID NO: 635128 - DNA, 15 bp, Homo sapiens
caaagtaaacattga

SEQ ID NO: 635129 - DNA, 15 bp, Homo sapiens
aaagtaaacattgaa

SEQ ID NO: 635130 - DNA, 15 bp, Homo sapiens
aagtaaacattgaag

SEQ ID NO: 635131 - DNA, 15 bp, Homo sapiens
agtaaacattgaagg

SEQ ID NO: 635132 - DNA, 15 bp, Homo sapiens
gtaaacattgaaggg

SEQ ID NO: 635133 - DNA, 15 bp, Homo sapiens
taaacattgaaggga

SEQ ID NO: 635134 - DNA, 15 bp, Homo sapiens
aaacattgaagggag

SEQ ID NO: 635135 - DNA, 15 bp, Homo sapiens
aacattgaagggaga

SEQ ID NO: 635136 - DNA, 15 bp, Homo sapiens
acattgaagggagat

SEQ ID NO: 635137 - DNA, 15 bp, Homo sapiens
cattgaagggagatg

SEQ ID NO: 635138 - DNA, 15 bp, Homo sapiens
attgaagggagatgg

SEQ ID NO: 635139 - DNA, 15 bp, Homo sapiens
ttgaagggagatgga

SEQ ID NO: 635140 - DNA, 15 bp, Homo sapiens
tgaagggagatggaa

SEQ ID NO: 635141 - DNA, 15 bp, Homo sapiens
gaagggagatggaag

SEQ ID NO: 635142 - DNA, 15 bp, Homo sapiens
aagggagatggaaga

SEQ ID NO: 635143 - DNA, 15 bp, Homo sapiens
agggagatggaagaa

SEQ ID NO: 635144 - DNA, 15 bp, Homo sapiens
gggagatggaagaag

SEQ ID NO: 635145 - DNA, 15 bp, Homo sapiens
ggagatggaagaagg

SEQ ID NO: 635146 - DNA, 15 bp, Homo sapiens
gagatggaagaagga

SEQ ID NO: 635147 - DNA, 15 bp, Homo sapiens
agatggaagaaggaa

SEQ ID NO: 635148 - DNA, 15 bp, Homo sapiens
gatggaagaaggaac

SEQ ID NO: 635149 - DNA, 15 bp, Homo sapiens
atggaagaaggaact

SEQ ID NO: 635150 - DNA, 15 bp, Homo sapiens
tggaagaaggaactc

SEQ ID NO: 635151 - DNA, 15 bp, Homo sapiens
ggaagaaggaactct

SEQ ID NO: 635152 - DNA, 15 bp, Homo sapiens
gaagaaggaactcta

SEQ ID NO: 635153 - DNA, 15 bp, Homo sapiens
aagaaggaactctag

SEQ ID NO: 635154 - DNA, 15 bp, Homo sapiens
agaaggaactctagc

SEQ ID NO: 635155 - DNA, 15 bp, Homo sapiens
gaaggaactctagcc

SEQ ID NO: 635156 - DNA, 15 bp, Homo sapiens
aaggaactctagcca

SEQ ID NO: 635157 - DNA, 15 bp, Homo sapiens
aggaactctagccag

SEQ ID NO: 635158 - DNA, 15 bp, Homo sapiens
ggaactctagccaga

SEQ ID NO: 635159 - DNA, 15 bp, Homo sapiens
gaactctagccagag

SEQ ID NO: 635160 - DNA, 15 bp, Homo sapiens
aactctagccagagt

SEQ ID NO: 635161 - DNA, 15 bp, Homo sapiens
actctagccagagtc

SEQ ID NO: 635162 - DNA, 15 bp, Homo sapiens
ctctagccagagtct

SEQ ID NO: 635163 - DNA, 15 bp, Homo sapiens
tctagccagagtctt

SEQ ID NO: 635164 - DNA, 15 bp, Homo sapiens
ctagccagagtcttg

SEQ ID NO: 635165 - DNA, 15 bp, Homo sapiens
tagccagagtcttgc

SEQ ID NO: 635166 - DNA, 15 bp, Homo sapiens
agccagagtcttgca

SEQ ID NO: 635167 - DNA, 15 bp, Homo sapiens
gccagagtcttgcat

SEQ ID NO: 635168 - DNA, 15 bp, Homo sapiens
ccagagtcttgcatt

SEQ ID NO: 635169 - DNA, 15 bp, Homo sapiens
cagagtcttgcattt

SEQ ID NO: 635170 - DNA, 15 bp, Homo sapiens
agagtcttgcatttc

SEQ ID NO: 635171 - DNA, 15 bp, Homo sapiens
gagtcttgcatttct

SEQ ID NO: 635172 - DNA, 15 bp, Homo sapiens
agtcttgcatttctc

SEQ ID NO: 635173 - DNA, 15 bp, Homo sapiens
gtcttgcatttctca

SEQ ID NO: 635174 - DNA, 15 bp, Homo sapiens
tcttgcatttctcag

SEQ ID NO: 635175 - DNA, 15 bp, Homo sapiens
cttgcatttctcagt

SEQ ID NO: 635176 - DNA, 15 bp, Homo sapiens
ttgcatttctcagtc

SEQ ID NO: 635177 - DNA, 15 bp, Homo sapiens
tgcatttctcagtcc

SEQ ID NO: 635178 - DNA, 15 bp, Homo sapiens
gcatttctcagtcct

SEQ ID NO: 635179 - DNA, 15 bp, Homo sapiens
catttctcagtccta

SEQ ID NO: 635180 - DNA, 15 bp, Homo sapiens
atttctcagtcctaa

SEQ ID NO: 635181 - DNA, 15 bp, Homo sapiens
tttctcagtcctaaa

SEQ ID NO: 635182 - DNA, 15 bp, Homo sapiens
ttctcagtcctaaac

SEQ ID NO: 635183 - DNA, 15 bp, Homo sapiens
tctcagtcctaaaca

SEQ ID NO: 635184 - DNA, 15 bp, Homo sapiens
ctcagtcctaaacag

SEQ ID NO: 635185 - DNA, 15 bp, Homo sapiens
tcagtcctaaacagg

SEQ ID NO: 635186 - DNA, 15 bp, Homo sapiens
cagtcctaaacaggg

SEQ ID NO: 635187 - DNA, 15 bp, Homo sapiens
agtcctaaacagggt

SEQ ID NO: 635188 - DNA, 15 bp, Homo sapiens
gtcctaaacagggta

SEQ ID NO: 635189 - DNA, 15 bp, Homo sapiens
tcctaaacagggtaa

SEQ ID NO: 635190 - DNA, 15 bp, Homo sapiens
cctaaacagggtaat

SEQ ID NO: 635191 - DNA, 15 bp, Homo sapiens
ctaaacagggtaatg

SEQ ID NO: 635192 - DNA, 15 bp, Homo sapiens
taaacagggtaatgg

SEQ ID NO: 635193 - DNA, 15 bp, Homo sapiens
aaacagggtaatgga

SEQ ID NO: 635194 - DNA, 15 bp, Homo sapiens
aacagggtaatggac

SEQ ID NO: 635195 - DNA, 15 bp, Homo sapiens
acagggtaatggact

SEQ ID NO: 635196 - DNA, 15 bp, Homo sapiens
cagggtaatggactg

SEQ ID NO: 635197 - DNA, 15 bp, Homo sapiens
agggtaatggactgg

SEQ ID NO: 635198 - DNA, 15 bp, Homo sapiens
gggtaatggactggg

SEQ ID NO: 635199 - DNA, 15 bp, Homo sapiens
ggtaatggactgggg

SEQ ID NO: 635200 - DNA, 15 bp, Homo sapiens
gtaatggactggggc

SEQ ID NO: 635201 - DNA, 15 bp, Homo sapiens
taatggactggggct

SEQ ID NO: 635202 - DNA, 15 bp, Homo sapiens
aatggactggggctg

SEQ ID NO: 635203 - DNA, 15 bp, Homo sapiens
atggactggggctga

SEQ ID NO: 635204 - DNA, 15 bp, Homo sapiens
tggactggggctgaa

SEQ ID NO: 635205 - DNA, 15 bp, Homo sapiens
ggactggggctgaat

SEQ ID NO: 635206 - DNA, 15 bp, Homo sapiens
gactggggctgaatc

SEQ ID NO: 635207 - DNA, 15 bp, Homo sapiens
actggggctgaatca

SEQ ID NO: 635208 - DNA, 15 bp, Homo sapiens
ctggggctgaatcac

SEQ ID NO: 635209 - DNA, 15 bp, Homo sapiens
tggggctgaatcaca

SEQ ID NO: 635210 - DNA, 15 bp, Homo sapiens
ggggctgaatcacat

SEQ ID NO: 635211 - DNA, 15 bp, Homo sapiens
gggctgaatcacatg

SEQ ID NO: 635212 - DNA, 15 bp, Homo sapiens
ggctgaatcacatga

SEQ ID NO: 635213 - DNA, 15 bp, Homo sapiens
gctgaatcacatgaa

SEQ ID NO: 635214 - DNA, 15 bp, Homo sapiens
ctgaatcacatgaag

SEQ ID NO: 635215 - DNA, 15 bp, Homo sapiens
tgaatcacatgaagg

SEQ ID NO: 635216 - DNA, 15 bp, Homo sapiens
gaatcacatgaaggc

SEQ ID NO: 635217 - DNA, 15 bp, Homo sapiens
aatcacatgaaggca

SEQ ID NO: 635218 - DNA, 15 bp, Homo sapiens
atcacatgaaggcaa

SEQ ID NO: 635219 - DNA, 15 bp, Homo sapiens
tcacatgaaggcaag

SEQ ID NO: 635220 - DNA, 15 bp, Homo sapiens
cacatgaaggcaagg

SEQ ID NO: 635221 - DNA, 15 bp, Homo sapiens
acatgaaggcaaggt

SEQ ID NO: 635222 - DNA, 15 bp, Homo sapiens
catgaaggcaaggtc

SEQ ID NO: 635223 - DNA, 15 bp, Homo sapiens
atgaaggcaaggtca

SEQ ID NO: 635224 - DNA, 15 bp, Homo sapiens
tgaaggcaaggtcag

SEQ ID NO: 635225 - DNA, 15 bp, Homo sapiens
gaaggcaaggtcaga

SEQ ID NO: 635226 - DNA, 15 bp, Homo sapiens
aaggcaaggtcagat

SEQ ID NO: 635227 - DNA, 15 bp, Homo sapiens
aggcaaggtcagatt

SEQ ID NO: 635228 - DNA, 15 bp, Homo sapiens
ggcaaggtcagattt

SEQ ID NO: 635229 - DNA, 15 bp, Homo sapiens
gcaaggtcagatttt

SEQ ID NO: 635230 - DNA, 15 bp, Homo sapiens
caaggtcagattttt

SEQ ID NO: 635231 - DNA, 15 bp, Homo sapiens
aaggtcagattttta

SEQ ID NO: 635232 - DNA, 15 bp, Homo sapiens
aggtcagatttttat

SEQ ID NO: 635233 - DNA, 15 bp, Homo sapiens
ggtcagatttttatt

SEQ ID NO: 635234 - DNA, 15 bp, Homo sapiens
gtcagatttttatta

SEQ ID NO: 635235 - DNA, 15 bp, Homo sapiens
tcagatttttattat

SEQ ID NO: 635236 - DNA, 15 bp, Homo sapiens
cagatttttattatt

SEQ ID NO: 635237 - DNA, 15 bp, Homo sapiens
agatttttattatta

SEQ ID NO: 635238 - DNA, 15 bp, Homo sapiens
gatttttattattat

SEQ ID NO: 635239 - DNA, 15 bp, Homo sapiens
atttttattattatg

SEQ ID NO: 635240 - DNA, 15 bp, Homo sapiens
tttttattattatgc

SEQ ID NO: 635241 - DNA, 15 bp, Homo sapiens
ttttattattatgca

SEQ ID NO: 635242 - DNA, 15 bp, Homo sapiens
tttattattatgcac

SEQ ID NO: 635243 - DNA, 15 bp, Homo sapiens
ttattattatgcaca

SEQ ID NO: 635244 - DNA, 15 bp, Homo sapiens
tattattatgcacat

SEQ ID NO: 635245 - DNA, 15 bp, Homo sapiens
attattatgcacatc

SEQ ID NO: 635246 - DNA, 15 bp, Homo sapiens
ttattatgcacatct

SEQ ID NO: 635247 - DNA, 15 bp, Homo sapiens
tattatgcacatcta

SEQ ID NO: 635248 - DNA, 15 bp, Homo sapiens
attatgcacatctag

SEQ ID NO: 635249 - DNA, 15 bp, Homo sapiens
ttatgcacatctagc

SEQ ID NO: 635250 - DNA, 15 bp, Homo sapiens
tatgcacatctagct

SEQ ID NO: 635251 - DNA, 15 bp, Homo sapiens
atgcacatctagctt

SEQ ID NO: 635252 - DNA, 15 bp, Homo sapiens
tgcacatctagcttg

SEQ ID NO: 635253 - DNA, 15 bp, Homo sapiens
gcacatctagcttga

SEQ ID NO: 635254 - DNA, 15 bp, Homo sapiens
cacatctagcttgaa

SEQ ID NO: 635255 - DNA, 15 bp, Homo sapiens
acatctagcttgaaa

SEQ ID NO: 635256 - DNA, 15 bp, Homo sapiens
catctagcttgaaaa

SEQ ID NO: 635257 - DNA, 15 bp, Homo sapiens
atctagcttgaaaat

SEQ ID NO: 635258 - DNA, 15 bp, Homo sapiens
tctagcttgaaaatt

SEQ ID NO: 635259 - DNA, 15 bp, Homo sapiens
ctagcttgaaaattt

SEQ ID NO: 635260 - DNA, 15 bp, Homo sapiens
tagcttgaaaatttt

SEQ ID NO: 635261 - DNA, 15 bp, Homo sapiens
agcttgaaaattttc

SEQ ID NO: 635262 - DNA, 15 bp, Homo sapiens
gcttgaaaattttct

SEQ ID NO: 635263 - DNA, 15 bp, Homo sapiens
cttgaaaattttctg

SEQ ID NO: 635264 - DNA, 15 bp, Homo sapiens
ttgaaaattttctgt

SEQ ID NO: 635265 - DNA, 15 bp, Homo sapiens
tgaaaattttctgtt

SEQ ID NO: 635266 - DNA, 15 bp, Homo sapiens
gaaaattttctgtta

SEQ ID NO: 635267 - DNA, 15 bp, Homo sapiens
aaaattttctgttaa

SEQ ID NO: 635268 - DNA, 15 bp, Homo sapiens
aaattttctgttaag

SEQ ID NO: 635269 - DNA, 15 bp, Homo sapiens
aattttctgttaagt

SEQ ID NO: 635270 - DNA, 15 bp, Homo sapiens
attttctgttaagtc

SEQ ID NO: 635271 - DNA, 15 bp, Homo sapiens
ttttctgttaagtca

SEQ ID NO: 635272 - DNA, 15 bp, Homo sapiens
tttctgttaagtcaa

SEQ ID NO: 635273 - DNA, 15 bp, Homo sapiens
ttctgttaagtcaat

SEQ ID NO: 635274 - DNA, 15 bp, Homo sapiens
tctgttaagtcaatt

SEQ ID NO: 635275 - DNA, 15 bp, Homo sapiens
ctgttaagtcaatta

SEQ ID NO: 635276 - DNA, 15 bp, Homo sapiens
tgttaagtcaattac

SEQ ID NO: 635277 - DNA, 15 bp, Homo sapiens
gttaagtcaattaca

SEQ ID NO: 635278 - DNA, 15 bp, Homo sapiens
ttaagtcaattacag

SEQ ID NO: 635279 - DNA, 15 bp, Homo sapiens
taagtcaattacagt

SEQ ID NO: 635280 - DNA, 15 bp, Homo sapiens
aagtcaattacagtg

SEQ ID NO: 635281 - DNA, 15 bp, Homo sapiens
agtcaattacagtga

SEQ ID NO: 635282 - DNA, 15 bp, Homo sapiens
gtcaattacagtgaa

SEQ ID NO: 635283 - DNA, 15 bp, Homo sapiens
tcaattacagtgaaa

SEQ ID NO: 635284 - DNA, 15 bp, Homo sapiens
caattacagtgaaaa

SEQ ID NO: 635285 - DNA, 15 bp, Homo sapiens
aattacagtgaaaaa

SEQ ID NO: 635286 - DNA, 15 bp, Homo sapiens
attacagtgaaaaac

SEQ ID NO: 635287 - DNA, 15 bp, Homo sapiens
ttacagtgaaaaacc

SEQ ID NO: 635288 - DNA, 15 bp, Homo sapiens
tacagtgaaaaacct

SEQ ID NO: 635289 - DNA, 15 bp, Homo sapiens
acagtgaaaaacctt

SEQ ID NO: 635290 - DNA, 15 bp, Homo sapiens
cagtgaaaaacctta

SEQ ID NO: 635291 - DNA, 15 bp, Homo sapiens
agtgaaaaaccttac

SEQ ID NO: 635292 - DNA, 15 bp, Homo sapiens
gtgaaaaaccttacc

SEQ ID NO: 635293 - DNA, 15 bp, Homo sapiens
tgaaaaaccttacct

SEQ ID NO: 635294 - DNA, 15 bp, Homo sapiens
gaaaaaccttacctg

SEQ ID NO: 635295 - DNA, 15 bp, Homo sapiens
aaaaaccttacctgg

SEQ ID NO: 635296 - DNA, 15 bp, Homo sapiens
aaaaccttacctggt

SEQ ID NO: 635297 - DNA, 15 bp, Homo sapiens
aaaccttacctggta

SEQ ID NO: 635298 - DNA, 15 bp, Homo sapiens
aaccttacctggtat

SEQ ID NO: 635299 - DNA, 15 bp, Homo sapiens
accttacctggtatt

SEQ ID NO: 635300 - DNA, 15 bp, Homo sapiens
ccttacctggtattg

SEQ ID NO: 635301 - DNA, 15 bp, Homo sapiens
cttacctggtattga

SEQ ID NO: 635302 - DNA, 15 bp, Homo sapiens
ttacctggtattgaa

SEQ ID NO: 635303 - DNA, 15 bp, Homo sapiens
tacctggtattgaat

SEQ ID NO: 635304 - DNA, 15 bp, Homo sapiens
acctggtattgaatg

SEQ ID NO: 635305 - DNA, 15 bp, Homo sapiens
cctggtattgaatgc

SEQ ID NO: 635306 - DNA, 15 bp, Homo sapiens
ctggtattgaatgct

SEQ ID NO: 635307 - DNA, 15 bp, Homo sapiens
tggtattgaatgctt

SEQ ID NO: 635308 - DNA, 15 bp, Homo sapiens
ggtattgaatgcttg

SEQ ID NO: 635309 - DNA, 15 bp, Homo sapiens
gtattgaatgcttgc

SEQ ID NO: 635310 - DNA, 15 bp, Homo sapiens
tattgaatgcttgca

SEQ ID NO: 635311 - DNA, 15 bp, Homo sapiens
attgaatgcttgcat

SEQ ID NO: 635312 - DNA, 15 bp, Homo sapiens
ttgaatgcttgcatt

SEQ ID NO: 635313 - DNA, 15 bp, Homo sapiens
tgaatgcttgcattg

SEQ ID NO: 635314 - DNA, 15 bp, Homo sapiens
gaatgcttgcattgt

SEQ ID NO: 635315 - DNA, 15 bp, Homo sapiens
aatgcttgcattgta

SEQ ID NO: 635316 - DNA, 15 bp, Homo sapiens
atgcttgcattgtat

SEQ ID NO: 635317 - DNA, 15 bp, Homo sapiens
tgcttgcattgtatg

SEQ ID NO: 635318 - DNA, 15 bp, Homo sapiens
gcttgcattgtatgt

SEQ ID NO: 635319 - DNA, 15 bp, Homo sapiens
cttgcattgtatgtc

SEQ ID NO: 635320 - DNA, 15 bp, Homo sapiens
ttgcattgtatgtct

SEQ ID NO: 635321 - DNA, 15 bp, Homo sapiens
tgcattgtatgtctg

SEQ ID NO: 635322 - DNA, 15 bp, Homo sapiens
gcattgtatgtctgg

SEQ ID NO: 635323 - DNA, 15 bp, Homo sapiens
cattgtatgtctggc

SEQ ID NO: 635324 - DNA, 15 bp, Homo sapiens
attgtatgtctggct

SEQ ID NO: 635325 - DNA, 15 bp, Homo sapiens
ttgtatgtctggcta

SEQ ID NO: 635326 - DNA, 15 bp, Homo sapiens
tgtatgtctggctat

SEQ ID NO: 635327 - DNA, 15 bp, Homo sapiens
gtatgtctggctatt

SEQ ID NO: 635328 - DNA, 15 bp, Homo sapiens
tatgtctggctattc

SEQ ID NO: 635329 - DNA, 15 bp, Homo sapiens
atgtctggctattct

SEQ ID NO: 635330 - DNA, 15 bp, Homo sapiens
tgtctggctattctg

SEQ ID NO: 635331 - DNA, 15 bp, Homo sapiens
gtctggctattctgt

SEQ ID NO: 635332 - DNA, 15 bp, Homo sapiens
tctggctattctgtg

SEQ ID NO: 635333 - DNA, 15 bp, Homo sapiens
ctggctattctgtgt

SEQ ID NO: 635334 - DNA, 15 bp, Homo sapiens
tggctattctgtgtt

SEQ ID NO: 635335 - DNA, 15 bp, Homo sapiens
ggctattctgtgttt

SEQ ID NO: 635336 - DNA, 15 bp, Homo sapiens
gctattctgtgtttt

SEQ ID NO: 635337 - DNA, 15 bp, Homo sapiens
ctattctgtgttttt

SEQ ID NO: 635338 - DNA, 15 bp, Homo sapiens
tattctgtgttttta

SEQ ID NO: 635339 - DNA, 15 bp, Homo sapiens
attctgtgtttttat

SEQ ID NO: 635340 - DNA, 15 bp, Homo sapiens
ttctgtgtttttatt

SEQ ID NO: 635341 - DNA, 15 bp, Homo sapiens
tctgtgtttttattt

SEQ ID NO: 635342 - DNA, 15 bp, Homo sapiens
ctgtgtttttatttt

SEQ ID NO: 635343 - DNA, 15 bp, Homo sapiens
tgtgtttttatttta

SEQ ID NO: 635344 - DNA, 15 bp, Homo sapiens
gtgtttttattttaa

SEQ ID NO: 635345 - DNA, 15 bp, Homo sapiens
tgtttttattttaaa

SEQ ID NO: 635346 - DNA, 15 bp, Homo sapiens
gtttttattttaaaa

SEQ ID NO: 635347 - DNA, 15 bp, Homo sapiens
tttttattttaaaat

SEQ ID NO: 635348 - DNA, 15 bp, Homo sapiens
ttttattttaaaatt

SEQ ID NO: 635349 - DNA, 15 bp, Homo sapiens
tttattttaaaatta

SEQ ID NO: 635350 - DNA, 15 bp, Homo sapiens
ttattttaaaattat

SEQ ID NO: 635351 - DNA, 15 bp, Homo sapiens
tattttaaaattata

SEQ ID NO: 635352 - DNA, 15 bp, Homo sapiens
attttaaaattataa

SEQ ID NO: 635353 - DNA, 15 bp, Homo sapiens
ttttaaaattataat

SEQ ID NO: 635354 - DNA, 15 bp, Homo sapiens
tttaaaattataata

SEQ ID NO: 635355 - DNA, 15 bp, Homo sapiens
ttaaaattataatat

SEQ ID NO: 635356 - DNA, 15 bp, Homo sapiens
taaaattataatatc

SEQ ID NO: 635357 - DNA, 15 bp, Homo sapiens
aaaattataatatca

SEQ ID NO: 635358 - DNA, 15 bp, Homo sapiens
aaattataatatcaa

SEQ ID NO: 635359 - DNA, 15 bp, Homo sapiens
aattataatatcaaa

SEQ ID NO: 635360 - DNA, 15 bp, Homo sapiens
attataatatcaaaa

SEQ ID NO: 635361 - DNA, 15 bp, Homo sapiens
ttataatatcaaaat

SEQ ID NO: 635362 - DNA, 15 bp, Homo sapiens
tataatatcaaaata

SEQ ID NO: 635363 - DNA, 15 bp, Homo sapiens
ataatatcaaaatat

SEQ ID NO: 635364 - DNA, 15 bp, Homo sapiens
taatatcaaaatatt

SEQ ID NO: 635365 - DNA, 15 bp, Homo sapiens
aatatcaaaatattt

SEQ ID NO: 635366 - DNA, 15 bp, Homo sapiens
atatcaaaatatttg

SEQ ID NO: 635367 - DNA, 15 bp, Homo sapiens
tatcaaaatatttgt

SEQ ID NO: 635368 - DNA, 15 bp, Homo sapiens
atcaaaatatttgtg

SEQ ID NO: 635369 - DNA, 15 bp, Homo sapiens
tcaaaatatttgtgt

SEQ ID NO: 635370 - DNA, 15 bp, Homo sapiens
caaaatatttgtgtt

SEQ ID NO: 635371 - DNA, 15 bp, Homo sapiens
aaaatatttgtgtta

SEQ ID NO: 635372 - DNA, 15 bp, Homo sapiens
aaatatttgtgttat

SEQ ID NO: 635373 - DNA, 15 bp, Homo sapiens
aatatttgtgttata

SEQ ID NO: 635374 - DNA, 15 bp, Homo sapiens
atatttgtgttataa

SEQ ID NO: 635375 - DNA, 15 bp, Homo sapiens
tatttgtgttataaa

SEQ ID NO: 635376 - DNA, 15 bp, Homo sapiens
atttgtgttataaaa

SEQ ID NO: 635377 - DNA, 15 bp, Homo sapiens
tttgtgttataaaat

SEQ ID NO: 635378 - DNA, 15 bp, Homo sapiens
ttgtgttataaaata

SEQ ID NO: 635379 - DNA, 15 bp, Homo sapiens
tgtgttataaaatat

SEQ ID NO: 635380 - DNA, 15 bp, Homo sapiens
gtgttataaaatatt

SEQ ID NO: 635381 - DNA, 15 bp, Homo sapiens
tgttataaaatattc

SEQ ID NO: 635382 - DNA, 15 bp, Homo sapiens
gttataaaatattct

SEQ ID NO: 635383 - DNA, 15 bp, Homo sapiens
ttataaaatattcta

SEQ ID NO: 635384 - DNA, 15 bp, Homo sapiens
tataaaatattctaa

SEQ ID NO: 635385 - DNA, 15 bp, Homo sapiens
ataaaatattctaac

SEQ ID NO: 635386 - DNA, 15 bp, Homo sapiens
taaaatattctaact

SEQ ID NO: 635387 - DNA, 15 bp, Homo sapiens
aaaatattctaacta

SEQ ID NO: 635388 - DNA, 15 bp, Homo sapiens
aaatattctaactat

SEQ ID NO: 635389 - DNA, 15 bp, Homo sapiens
aatattctaactatg

SEQ ID NO: 635390 - DNA, 15 bp, Homo sapiens
atattctaactatgg

SEQ ID NO: 635391 - DNA, 15 bp, Homo sapiens
tattctaactatgga

SEQ ID NO: 635392 - DNA, 15 bp, Homo sapiens
attctaactatggag

SEQ ID NO: 635393 - DNA, 15 bp, Homo sapiens
ttctaactatggagg

SEQ ID NO: 635394 - DNA, 15 bp, Homo sapiens
tctaactatggaggc

SEQ ID NO: 635395 - DNA, 15 bp, Homo sapiens
ctaactatggaggcc

SEQ ID NO: 635396 - DNA, 15 bp, Homo sapiens
taactatggaggcca

SEQ ID NO: 635397 - DNA, 15 bp, Homo sapiens
aactatggaggccat

SEQ ID NO: 635398 - DNA, 15 bp, Homo sapiens
actatggaggccata

SEQ ID NO: 635399 - DNA, 15 bp, Homo sapiens
ctatggaggccataa

SEQ ID NO: 635400 - DNA, 15 bp, Homo sapiens
tatggaggccataaa

SEQ ID NO: 635401 - DNA, 15 bp, Homo sapiens
atggaggccataaac

SEQ ID NO: 635402 - DNA, 15 bp, Homo sapiens
tggaggccataaaca

SEQ ID NO: 635403 - DNA, 15 bp, Homo sapiens
ggaggccataaacaa

SEQ ID NO: 635404 - DNA, 15 bp, Homo sapiens
gaggccataaacaag

SEQ ID NO: 635405 - DNA, 15 bp, Homo sapiens
aggccataaacaaga

SEQ ID NO: 635406 - DNA, 15 bp, Homo sapiens
ggccataaacaagaa

SEQ ID NO: 635407 - DNA, 15 bp, Homo sapiens
gccataaacaagaag

SEQ ID NO: 635408 - DNA, 15 bp, Homo sapiens
ccataaacaagaaga

SEQ ID NO: 635409 - DNA, 15 bp, Homo sapiens
cataaacaagaagac

SEQ ID NO: 635410 - DNA, 15 bp, Homo sapiens
ataaacaagaagact

SEQ ID NO: 635411 - DNA, 15 bp, Homo sapiens
taaacaagaagacta

SEQ ID NO: 635412 - DNA, 15 bp, Homo sapiens
aaacaagaagactaa

SEQ ID NO: 635413 - DNA, 15 bp, Homo sapiens
aacaagaagactaaa

SEQ ID NO: 635414 - DNA, 15 bp, Homo sapiens
acaagaagactaaag

SEQ ID NO: 635415 - DNA, 15 bp, Homo sapiens
caagaagactaaagt

SEQ ID NO: 635416 - DNA, 15 bp, Homo sapiens
aagaagactaaagtt

SEQ ID NO: 635417 - DNA, 15 bp, Homo sapiens
agaagactaaagttc

SEQ ID NO: 635418 - DNA, 15 bp, Homo sapiens
gaagactaaagttct

SEQ ID NO: 635419 - DNA, 15 bp, Homo sapiens
aagactaaagttctc

SEQ ID NO: 635420 - DNA, 15 bp, Homo sapiens
agactaaagttctct

SEQ ID NO: 635421 - DNA, 15 bp, Homo sapiens
gactaaagttctctc

SEQ ID NO: 635422 - DNA, 15 bp, Homo sapiens
actaaagttctctcc

SEQ ID NO: 635423 - DNA, 15 bp, Homo sapiens
ctaaagttctctcct

SEQ ID NO: 635424 - DNA, 15 bp, Homo sapiens
taaagttctctcctt

SEQ ID NO: 635425 - DNA, 15 bp, Homo sapiens
aaagttctctccttt

SEQ ID NO: 635426 - DNA, 15 bp, Homo sapiens
aagttctctcctttc

SEQ ID NO: 635427 - DNA, 15 bp, Homo sapiens
agttctctcctttca

SEQ ID NO: 635428 - DNA, 15 bp, Homo sapiens
gttctctcctttcag

SEQ ID NO: 635429 - DNA, 15 bp, Homo sapiens
ttctctcctttcagc

SEQ ID NO: 635430 - DNA, 15 bp, Homo sapiens
tctctcctttcagcc

SEQ ID NO: 635431 - DNA, 15 bp, Homo sapiens
ctctcctttcagcct

SEQ ID NO: 635432 - DNA, 15 bp, Homo sapiens
tctcctttcagcctt

SEQ ID NO: 635433 - DNA, 15 bp, Homo sapiens
ctcctttcagccttc

SEQ ID NO: 635434 - DNA, 15 bp, Homo sapiens
tcctttcagccttct

SEQ ID NO: 635435 - DNA, 15 bp, Homo sapiens
cctttcagccttctg

SEQ ID NO: 635436 - DNA, 15 bp, Homo sapiens
ctttcagccttctgt

SEQ ID NO: 635437 - DNA, 15 bp, Homo sapiens
tttcagccttctgta

SEQ ID NO: 635438 - DNA, 15 bp, Homo sapiens
ttcagccttctgtac

SEQ ID NO: 635439 - DNA, 15 bp, Homo sapiens
tcagccttctgtaca

SEQ ID NO: 635440 - DNA, 15 bp, Homo sapiens
cagccttctgtacac

SEQ ID NO: 635441 - DNA, 15 bp, Homo sapiens
agccttctgtacaca

SEQ ID NO: 635442 - DNA, 15 bp, Homo sapiens
gccttctgtacacat

SEQ ID NO: 635443 - DNA, 15 bp, Homo sapiens
ccttctgtacacatt

SEQ ID NO: 635444 - DNA, 15 bp, Homo sapiens
cttctgtacacattt

SEQ ID NO: 635445 - DNA, 15 bp, Homo sapiens
ttctgtacacatttc

SEQ ID NO: 635446 - DNA, 15 bp, Homo sapiens
tctgtacacatttct

SEQ ID NO: 635447 - DNA, 15 bp, Homo sapiens
ctgtacacatttctt

SEQ ID NO: 635448 - DNA, 15 bp, Homo sapiens
tgtacacatttcttc

SEQ ID NO: 635449 - DNA, 15 bp, Homo sapiens
gtacacatttcttct

SEQ ID NO: 635450 - DNA, 15 bp, Homo sapiens
tacacatttcttctc

SEQ ID NO: 635451 - DNA, 15 bp, Homo sapiens
acacatttcttctca

SEQ ID NO: 635452 - DNA, 15 bp, Homo sapiens
cacatttcttctcaa

SEQ ID NO: 635453 - DNA, 15 bp, Homo sapiens
acatttcttctcaag

SEQ ID NO: 635454 - DNA, 15 bp, Homo sapiens
catttcttctcaagc

SEQ ID NO: 635455 - DNA, 15 bp, Homo sapiens
atttcttctcaagca

SEQ ID NO: 635456 - DNA, 15 bp, Homo sapiens
tttcttctcaagcac

SEQ ID NO: 635457 - DNA, 15 bp, Homo sapiens
ttcttctcaagcact

SEQ ID NO: 635458 - DNA, 15 bp, Homo sapiens
tcttctcaagcactg

SEQ ID NO: 635459 - DNA, 15 bp, Homo sapiens
cttctcaagcactgg

SEQ ID NO: 635460 - DNA, 15 bp, Homo sapiens
ttctcaagcactggc

SEQ ID NO: 635461 - DNA, 15 bp, Homo sapiens
tctcaagcactggct

SEQ ID NO: 635462 - DNA, 15 bp, Homo sapiens
ctcaagcactggcta

SEQ ID NO: 635463 - DNA, 15 bp, Homo sapiens
tcaagcactggctat

SEQ ID NO: 635464 - DNA, 15 bp, Homo sapiens
caagcactggctatg

SEQ ID NO: 635465 - DNA, 15 bp, Homo sapiens
aagcactggctatgc

SEQ ID NO: 635466 - DNA, 15 bp, Homo sapiens
agcactggctatgca

SEQ ID NO: 635467 - DNA, 15 bp, Homo sapiens
gcactggctatgcat

SEQ ID NO: 635468 - DNA, 15 bp, Homo sapiens
cactggctatgcatg

SEQ ID NO: 635469 - DNA, 15 bp, Homo sapiens
actggctatgcatgt

SEQ ID NO: 635470 - DNA, 15 bp, Homo sapiens
ctggctatgcatgta

SEQ ID NO: 635471 - DNA, 15 bp, Homo sapiens
tggctatgcatgtat

SEQ ID NO: 635472 - DNA, 15 bp, Homo sapiens
ggctatgcatgtata

SEQ ID NO: 635473 - DNA, 15 bp, Homo sapiens
gctatgcatgtatac

SEQ ID NO: 635474 - DNA, 15 bp, Homo sapiens
ctatgcatgtatact

SEQ ID NO: 635475 - DNA, 15 bp, Homo sapiens
tatgcatgtatacta

SEQ ID NO: 635476 - DNA, 15 bp, Homo sapiens
atgcatgtatactat

SEQ ID NO: 635477 - DNA, 15 bp, Homo sapiens
tgcatgtatactata

SEQ ID NO: 635478 - DNA, 15 bp, Homo sapiens
gcatgtatactatat

SEQ ID NO: 635479 - DNA, 15 bp, Homo sapiens
catgtatactatatg

SEQ ID NO: 635480 - DNA, 15 bp, Homo sapiens
atgtatactatatgc

SEQ ID NO: 635481 - DNA, 15 bp, Homo sapiens
tgtatactatatgca

SEQ ID NO: 635482 - DNA, 15 bp, Homo sapiens
gtatactatatgcaa

SEQ ID NO: 635483 - DNA, 15 bp, Homo sapiens
tatactatatgcaaa

SEQ ID NO: 635484 - DNA, 15 bp, Homo sapiens
atactatatgcaaaa

SEQ ID NO: 635485 - DNA, 15 bp, Homo sapiens
tactatatgcaaaag

SEQ ID NO: 635486 - DNA, 15 bp, Homo sapiens
actatatgcaaaagt

SEQ ID NO: 635487 - DNA, 15 bp, Homo sapiens
ctatatgcaaaagta

SEQ ID NO: 635488 - DNA, 15 bp, Homo sapiens
tatatgcaaaagtac

SEQ ID NO: 635489 - DNA, 15 bp, Homo sapiens
atatgcaaaagtaca

SEQ ID NO: 635490 - DNA, 15 bp, Homo sapiens
tatgcaaaagtacat

SEQ ID NO: 635491 - DNA, 15 bp, Homo sapiens
atgcaaaagtacata

SEQ ID NO: 635492 - DNA, 15 bp, Homo sapiens
tgcaaaagtacatat

SEQ ID NO: 635493 - DNA, 15 bp, Homo sapiens
gcaaaagtacatata

SEQ ID NO: 635494 - DNA, 15 bp, Homo sapiens
caaaagtacatatat

SEQ ID NO: 635495 - DNA, 15 bp, Homo sapiens
aaaagtacatatata

SEQ ID NO: 635496 - DNA, 15 bp, Homo sapiens
aaagtacatatatac

SEQ ID NO: 635497 - DNA, 15 bp, Homo sapiens
aagtacatatataca

SEQ ID NO: 635498 - DNA, 15 bp, Homo sapiens
agtacatatatacat

SEQ ID NO: 635499 - DNA, 15 bp, Homo sapiens
gtacatatatacatt

SEQ ID NO: 635500 - DNA, 15 bp, Homo sapiens
tacatatatacattt

SEQ ID NO: 635501 - DNA, 15 bp, Homo sapiens
acatatatacattta

SEQ ID NO: 635502 - DNA, 15 bp, Homo sapiens
catatatacatttat

SEQ ID NO: 635503 - DNA, 15 bp, Homo sapiens
atatatacatttata

SEQ ID NO: 635504 - DNA, 15 bp, Homo sapiens
tatatacatttatat

SEQ ID NO: 635505 - DNA, 15 bp, Homo sapiens
atatacatttatatt

SEQ ID NO: 635506 - DNA, 15 bp, Homo sapiens
tatacatttatattt

SEQ ID NO: 635507 - DNA, 15 bp, Homo sapiens
atacatttatatttt

SEQ ID NO: 635508 - DNA, 15 bp, Homo sapiens
tacatttatatttta

SEQ ID NO: 635509 - DNA, 15 bp, Homo sapiens
acatttatattttaa

SEQ ID NO: 635510 - DNA, 15 bp, Homo sapiens
catttatattttaac

SEQ ID NO: 635511 - DNA, 15 bp, Homo sapiens
atttatattttaacg

SEQ ID NO: 635512 - DNA, 15 bp, Homo sapiens
tttatattttaacgt

SEQ ID NO: 635513 - DNA, 15 bp, Homo sapiens
ttatattttaacgta

SEQ ID NO: 635514 - DNA, 15 bp, Homo sapiens
tatattttaacgtat

SEQ ID NO: 635515 - DNA, 15 bp, Homo sapiens
atattttaacgtatg

SEQ ID NO: 635516 - DNA, 15 bp, Homo sapiens
tattttaacgtatga

SEQ ID NO: 635517 - DNA, 15 bp, Homo sapiens
attttaacgtatgag

SEQ ID NO: 635518 - DNA, 15 bp, Homo sapiens
ttttaacgtatgagt

SEQ ID NO: 635519 - DNA, 15 bp, Homo sapiens
tttaacgtatgagta

SEQ ID NO: 635520 - DNA, 15 bp, Homo sapiens
ttaacgtatgagtat

SEQ ID NO: 635521 - DNA, 15 bp, Homo sapiens
taacgtatgagtata

SEQ ID NO: 635522 - DNA, 15 bp, Homo sapiens
aacgtatgagtatag

SEQ ID NO: 635523 - DNA, 15 bp, Homo sapiens
acgtatgagtatagt

SEQ ID NO: 635524 - DNA, 15 bp, Homo sapiens
cgtatgagtatagtt

SEQ ID NO: 635525 - DNA, 15 bp, Homo sapiens
gtatgagtatagttt

SEQ ID NO: 635526 - DNA, 15 bp, Homo sapiens
tatgagtatagtttt

SEQ ID NO: 635527 - DNA, 15 bp, Homo sapiens
atgagtatagtttta

SEQ ID NO: 635528 - DNA, 15 bp, Homo sapiens
tgagtatagttttaa

SEQ ID NO: 635529 - DNA, 15 bp, Homo sapiens
gagtatagttttaaa

SEQ ID NO: 635530 - DNA, 15 bp, Homo sapiens
agtatagttttaaat

SEQ ID NO: 635531 - DNA, 15 bp, Homo sapiens
gtatagttttaaatg

SEQ ID NO: 635532 - DNA, 15 bp, Homo sapiens
tatagttttaaatgt

SEQ ID NO: 635533 - DNA, 15 bp, Homo sapiens
atagttttaaatgtt

SEQ ID NO: 635534 - DNA, 15 bp, Homo sapiens
tagttttaaatgtta

SEQ ID NO: 635535 - DNA, 15 bp, Homo sapiens
agttttaaatgttat

SEQ ID NO: 635536 - DNA, 15 bp, Homo sapiens
gttttaaatgttatt

SEQ ID NO: 635537 - DNA, 15 bp, Homo sapiens
ttttaaatgttattg

SEQ ID NO: 635538 - DNA, 15 bp, Homo sapiens
tttaaatgttattgg

SEQ ID NO: 635539 - DNA, 15 bp, Homo sapiens
ttaaatgttattgga

SEQ ID NO: 635540 - DNA, 15 bp, Homo sapiens
taaatgttattggac

SEQ ID NO: 635541 - DNA, 15 bp, Homo sapiens
aaatgttattggaca

SEQ ID NO: 635542 - DNA, 15 bp, Homo sapiens
aatgttattggacac

SEQ ID NO: 635543 - DNA, 15 bp, Homo sapiens
atgttattggacact

SEQ ID NO: 635544 - DNA, 15 bp, Homo sapiens
tgttattggacactt

SEQ ID NO: 635545 - DNA, 15 bp, Homo sapiens
gttattggacacttt

SEQ ID NO: 635546 - DNA, 15 bp, Homo sapiens
ttattggacactttt

SEQ ID NO: 635547 - DNA, 15 bp, Homo sapiens
tattggacactttta

SEQ ID NO: 635548 - DNA, 15 bp, Homo sapiens
attggacacttttaa

SEQ ID NO: 635549 - DNA, 15 bp, Homo sapiens
ttggacacttttaat

SEQ ID NO: 635550 - DNA, 15 bp, Homo sapiens
tggacacttttaata

SEQ ID NO: 635551 - DNA, 15 bp, Homo sapiens
ggacacttttaatat

SEQ ID NO: 635552 - DNA, 15 bp, Homo sapiens
gacacttttaatatt

SEQ ID NO: 635553 - DNA, 15 bp, Homo sapiens
acacttttaatatta

SEQ ID NO: 635554 - DNA, 15 bp, Homo sapiens
cacttttaatattag

SEQ ID NO: 635555 - DNA, 15 bp, Homo sapiens
acttttaatattagt

SEQ ID NO: 635556 - DNA, 15 bp, Homo sapiens
cttttaatattagtg

SEQ ID NO: 635557 - DNA, 15 bp, Homo sapiens
ttttaatattagtgt

SEQ ID NO: 635558 - DNA, 15 bp, Homo sapiens
tttaatattagtgtg

SEQ ID NO: 635559 - DNA, 15 bp, Homo sapiens
ttaatattagtgtgt

SEQ ID NO: 635560 - DNA, 15 bp, Homo sapiens
taatattagtgtgtc

SEQ ID NO: 635561 - DNA, 15 bp, Homo sapiens
aatattagtgtgtct

SEQ ID NO: 635562 - DNA, 15 bp, Homo sapiens
atattagtgtgtcta

SEQ ID NO: 635563 - DNA, 15 bp, Homo sapiens
tattagtgtgtctag

SEQ ID NO: 635564 - DNA, 15 bp, Homo sapiens
attagtgtgtctaga

SEQ ID NO: 635565 - DNA, 15 bp, Homo sapiens
ttagtgtgtctagag

SEQ ID NO: 635566 - DNA, 15 bp, Homo sapiens
tagtgtgtctagagc

SEQ ID NO: 635567 - DNA, 15 bp, Homo sapiens
agtgtgtctagagct

SEQ ID NO: 635568 - DNA, 15 bp, Homo sapiens
gtgtgtctagagcta

SEQ ID NO: 635569 - DNA, 15 bp, Homo sapiens
tgtgtctagagctat

SEQ ID NO: 635570 - DNA, 15 bp, Homo sapiens
gtgtctagagctatc

SEQ ID NO: 635571 - DNA, 15 bp, Homo sapiens
tgtctagagctatct

SEQ ID NO: 635572 - DNA, 15 bp, Homo sapiens
gtctagagctatcta

SEQ ID NO: 635573 - DNA, 15 bp, Homo sapiens
tctagagctatctaa

SEQ ID NO: 635574 - DNA, 15 bp, Homo sapiens
ctagagctatctaat

SEQ ID NO: 635575 - DNA, 15 bp, Homo sapiens
tagagctatctaata

SEQ ID NO: 635576 - DNA, 15 bp, Homo sapiens
agagctatctaatat

SEQ ID NO: 635577 - DNA, 15 bp, Homo sapiens
gagctatctaatata

SEQ ID NO: 635578 - DNA, 15 bp, Homo sapiens
agctatctaatatat

SEQ ID NO: 635579 - DNA, 15 bp, Homo sapiens
gctatctaatatatt

SEQ ID NO: 635580 - DNA, 15 bp, Homo sapiens
ctatctaatatattt

SEQ ID NO: 635581 - DNA, 15 bp, Homo sapiens
tatctaatatatttt

SEQ ID NO: 635582 - DNA, 15 bp, Homo sapiens
atctaatatatttta

SEQ ID NO: 635583 - DNA, 15 bp, Homo sapiens
tctaatatattttaa

SEQ ID NO: 635584 - DNA, 15 bp, Homo sapiens
ctaatatattttaaa

SEQ ID NO: 635585 - DNA, 15 bp, Homo sapiens
taatatattttaaag

SEQ ID NO: 635586 - DNA, 15 bp, Homo sapiens
aatatattttaaagg

SEQ ID NO: 635587 - DNA, 15 bp, Homo sapiens
atatattttaaaggt

SEQ ID NO: 635588 - DNA, 15 bp, Homo sapiens
tatattttaaaggtt

SEQ ID NO: 635589 - DNA, 15 bp, Homo sapiens
atattttaaaggttg

SEQ ID NO: 635590 - DNA, 15 bp, Homo sapiens
tattttaaaggttgc

SEQ ID NO: 635591 - DNA, 15 bp, Homo sapiens
attttaaaggttgca

SEQ ID NO: 635592 - DNA, 15 bp, Homo sapiens
ttttaaaggttgcat

SEQ ID NO: 635593 - DNA, 15 bp, Homo sapiens
tttaaaggttgcata

SEQ ID NO: 635594 - DNA, 15 bp, Homo sapiens
ttaaaggttgcatag

SEQ ID NO: 635595 - DNA, 15 bp, Homo sapiens
taaaggttgcatagc

SEQ ID NO: 635596 - DNA, 15 bp, Homo sapiens
aaaggttgcatagca

SEQ ID NO: 635597 - DNA, 15 bp, Homo sapiens
aaggttgcatagcat

SEQ ID NO: 635598 - DNA, 15 bp, Homo sapiens
aggttgcatagcatt

SEQ ID NO: 635599 - DNA, 15 bp, Homo sapiens
ggttgcatagcattc

SEQ ID NO: 635600 - DNA, 15 bp, Homo sapiens
gttgcatagcattct

SEQ ID NO: 635601 - DNA, 15 bp, Homo sapiens
ttgcatagcattctg

SEQ ID NO: 635602 - DNA, 15 bp, Homo sapiens
tgcatagcattctgt

SEQ ID NO: 635603 - DNA, 15 bp, Homo sapiens
gcatagcattctgtc

SEQ ID NO: 635604 - DNA, 15 bp, Homo sapiens
catagcattctgtct

SEQ ID NO: 635605 - DNA, 15 bp, Homo sapiens
atagcattctgtctt

SEQ ID NO: 635606 - DNA, 15 bp, Homo sapiens
tagcattctgtctta

SEQ ID NO: 635607 - DNA, 15 bp, Homo sapiens
agcattctgtcttat

SEQ ID NO: 635608 - DNA, 15 bp, Homo sapiens
gcattctgtcttatg

SEQ ID NO: 635609 - DNA, 15 bp, Homo sapiens
cattctgtcttatgg

SEQ ID NO: 635610 - DNA, 15 bp, Homo sapiens
attctgtcttatgga

SEQ ID NO: 635611 - DNA, 15 bp, Homo sapiens
ttctgtcttatggag

SEQ ID NO: 635612 - DNA, 15 bp, Homo sapiens
tctgtcttatggaga

SEQ ID NO: 635613 - DNA, 15 bp, Homo sapiens
ctgtcttatggagat

SEQ ID NO: 635614 - DNA, 15 bp, Homo sapiens
tgtcttatggagata

SEQ ID NO: 635615 - DNA, 15 bp, Homo sapiens
gtcttatggagatac

SEQ ID NO: 635616 - DNA, 15 bp, Homo sapiens
tcttatggagatacc

SEQ ID NO: 635617 - DNA, 15 bp, Homo sapiens
cttatggagatacca

SEQ ID NO: 635618 - DNA, 15 bp, Homo sapiens
ttatggagataccat

SEQ ID NO: 635619 - DNA, 15 bp, Homo sapiens
tatggagataccata

SEQ ID NO: 635620 - DNA, 15 bp, Homo sapiens
atggagataccataa

SEQ ID NO: 635621 - DNA, 15 bp, Homo sapiens
tggagataccataac

SEQ ID NO: 635622 - DNA, 15 bp, Homo sapiens
ggagataccataact

SEQ ID NO: 635623 - DNA, 15 bp, Homo sapiens
gagataccataactg

SEQ ID NO: 635624 - DNA, 15 bp, Homo sapiens
agataccataactga

SEQ ID NO: 635625 - DNA, 15 bp, Homo sapiens
gataccataactgat

SEQ ID NO: 635626 - DNA, 15 bp, Homo sapiens
ataccataactgatt

SEQ ID NO: 635627 - DNA, 15 bp, Homo sapiens
taccataactgattt

SEQ ID NO: 635628 - DNA, 15 bp, Homo sapiens
accataactgattta

SEQ ID NO: 635629 - DNA, 15 bp, Homo sapiens
ccataactgatttaa

SEQ ID NO: 635630 - DNA, 15 bp, Homo sapiens
cataactgatttaac

SEQ ID NO: 635631 - DNA, 15 bp, Homo sapiens
ataactgatttaacc

SEQ ID NO: 635632 - DNA, 15 bp, Homo sapiens
taactgatttaacca

SEQ ID NO: 635633 - DNA, 15 bp, Homo sapiens
aactgatttaaccag

SEQ ID NO: 635634 - DNA, 15 bp, Homo sapiens
actgatttaaccagt

SEQ ID NO: 635635 - DNA, 15 bp, Homo sapiens
ctgatttaaccagtc

SEQ ID NO: 635636 - DNA, 15 bp, Homo sapiens
tgatttaaccagtcc

SEQ ID NO: 635637 - DNA, 15 bp, Homo sapiens
gatttaaccagtcca

SEQ ID NO: 635638 - DNA, 15 bp, Homo sapiens
atttaaccagtccac

SEQ ID NO: 635639 - DNA, 15 bp, Homo sapiens
tttaaccagtccact

SEQ ID NO: 635640 - DNA, 15 bp, Homo sapiens
ttaaccagtccacta

SEQ ID NO: 635641 - DNA, 15 bp, Homo sapiens
taaccagtccactat

SEQ ID NO: 635642 - DNA, 15 bp, Homo sapiens
aaccagtccactatt

SEQ ID NO: 635643 - DNA, 15 bp, Homo sapiens
accagtccactattg

SEQ ID NO: 635644 - DNA, 15 bp, Homo sapiens
ccagtccactattga

SEQ ID NO: 635645 - DNA, 15 bp, Homo sapiens
cagtccactattgat

SEQ ID NO: 635646 - DNA, 15 bp, Homo sapiens
agtccactattgata

SEQ ID NO: 635647 - DNA, 15 bp, Homo sapiens
gtccactattgatag

SEQ ID NO: 635648 - DNA, 15 bp, Homo sapiens
tccactattgataga

SEQ ID NO: 635649 - DNA, 15 bp, Homo sapiens
ccactattgatagac

SEQ ID NO: 635650 - DNA, 15 bp, Homo sapiens
cactattgatagaca

SEQ ID NO: 635651 - DNA, 15 bp, Homo sapiens
actattgatagacac

SEQ ID NO: 635652 - DNA, 15 bp, Homo sapiens
ctattgatagacact

SEQ ID NO: 635653 - DNA, 15 bp, Homo sapiens
tattgatagacacta

SEQ ID NO: 635654 - DNA, 15 bp, Homo sapiens
attgatagacactat

SEQ ID NO: 635655 - DNA, 15 bp, Homo sapiens
ttgatagacactatt

SEQ ID NO: 635656 - DNA, 15 bp, Homo sapiens
tgatagacactattt

SEQ ID NO: 635657 - DNA, 15 bp, Homo sapiens
gatagacactatttt

SEQ ID NO: 635658 - DNA, 15 bp, Homo sapiens
atagacactattttg

SEQ ID NO: 635659 - DNA, 15 bp, Homo sapiens
tagacactattttgt

SEQ ID NO: 635660 - DNA, 15 bp, Homo sapiens
agacactattttgtt

SEQ ID NO: 635661 - DNA, 15 bp, Homo sapiens
gacactattttgttc

SEQ ID NO: 635662 - DNA, 15 bp, Homo sapiens
acactattttgttct

SEQ ID NO: 635663 - DNA, 15 bp, Homo sapiens
cactattttgttctt

SEQ ID NO: 635664 - DNA, 15 bp, Homo sapiens
actattttgttctta

SEQ ID NO: 635665 - DNA, 15 bp, Homo sapiens
ctattttgttcttac

SEQ ID NO: 635666 - DNA, 15 bp, Homo sapiens
tattttgttcttacc

SEQ ID NO: 635667 - DNA, 15 bp, Homo sapiens
attttgttcttaccg

SEQ ID NO: 635668 - DNA, 15 bp, Homo sapiens
ttttgttcttaccga

SEQ ID NO: 635669 - DNA, 15 bp, Homo sapiens
tttgttcttaccgac

SEQ ID NO: 635670 - DNA, 15 bp, Homo sapiens
ttgttcttaccgact

SEQ ID NO: 635671 - DNA, 15 bp, Homo sapiens
tgttcttaccgactg

SEQ ID NO: 635672 - DNA, 15 bp, Homo sapiens
gttcttaccgactgt

SEQ ID NO: 635673 - DNA, 15 bp, Homo sapiens
ttcttaccgactgta

SEQ ID NO: 635674 - DNA, 15 bp, Homo sapiens
tcttaccgactgtac

SEQ ID NO: 635675 - DNA, 15 bp, Homo sapiens
cttaccgactgtact

SEQ ID NO: 635676 - DNA, 15 bp, Homo sapiens
ttaccgactgtacta

SEQ ID NO: 635677 - DNA, 15 bp, Homo sapiens
taccgactgtactag

SEQ ID NO: 635678 - DNA, 15 bp, Homo sapiens
accgactgtactaga

SEQ ID NO: 635679 - DNA, 15 bp, Homo sapiens
ccgactgtactagaa

SEQ ID NO: 635680 - DNA, 15 bp, Homo sapiens
cgactgtactagaag

SEQ ID NO: 635681 - DNA, 15 bp, Homo sapiens
gactgtactagaaga

SEQ ID NO: 635682 - DNA, 15 bp, Homo sapiens
actgtactagaagaa

SEQ ID NO: 635683 - DNA, 15 bp, Homo sapiens
ctgtactagaagaaa

SEQ ID NO: 635684 - DNA, 15 bp, Homo sapiens
tgtactagaagaaac

SEQ ID NO: 635685 - DNA, 15 bp, Homo sapiens
gtactagaagaaaca

SEQ ID NO: 635686 - DNA, 15 bp, Homo sapiens
tactagaagaaacat

SEQ ID NO: 635687 - DNA, 15 bp, Homo sapiens
actagaagaaacatt

SEQ ID NO: 635688 - DNA, 15 bp, Homo sapiens
ctagaagaaacattc

SEQ ID NO: 635689 - DNA, 15 bp, Homo sapiens
tagaagaaacattct

SEQ ID NO: 635690 - DNA, 15 bp, Homo sapiens
agaagaaacattctt

SEQ ID NO: 635691 - DNA, 15 bp, Homo sapiens
gaagaaacattcttt

SEQ ID NO: 635692 - DNA, 15 bp, Homo sapiens
aagaaacattctttt

SEQ ID NO: 635693 - DNA, 15 bp, Homo sapiens
agaaacattctttta

SEQ ID NO: 635694 - DNA, 15 bp, Homo sapiens
gaaacattcttttac

SEQ ID NO: 635695 - DNA, 15 bp, Homo sapiens
aaacattcttttaca

SEQ ID NO: 635696 - DNA, 15 bp, Homo sapiens
aacattcttttacat

SEQ ID NO: 635697 - DNA, 15 bp, Homo sapiens
acattcttttacatg

SEQ ID NO: 635698 - DNA, 15 bp, Homo sapiens
cattcttttacatgt

SEQ ID NO: 635699 - DNA, 15 bp, Homo sapiens
attcttttacatgtt

SEQ ID NO: 635700 - DNA, 15 bp, Homo sapiens
ttcttttacatgttt

SEQ ID NO: 635701 - DNA, 15 bp, Homo sapiens
tcttttacatgtttg

SEQ ID NO: 635702 - DNA, 15 bp, Homo sapiens
cttttacatgtttgg

SEQ ID NO: 635703 - DNA, 15 bp, Homo sapiens
ttttacatgtttggt

SEQ ID NO: 635704 - DNA, 15 bp, Homo sapiens
tttacatgtttggta

SEQ ID NO: 635705 - DNA, 15 bp, Homo sapiens
ttacatgtttggtac

SEQ ID NO: 635706 - DNA, 15 bp, Homo sapiens
tacatgtttggtact

SEQ ID NO: 635707 - DNA, 15 bp, Homo sapiens
acatgtttggtactt

SEQ ID NO: 635708 - DNA, 15 bp, Homo sapiens
catgtttggtacttg

SEQ ID NO: 635709 - DNA, 15 bp, Homo sapiens
atgtttggtacttgt

SEQ ID NO: 635710 - DNA, 15 bp, Homo sapiens
tgtttggtacttgtt

SEQ ID NO: 635711 - DNA, 15 bp, Homo sapiens
gtttggtacttgttc

SEQ ID NO: 635712 - DNA, 15 bp, Homo sapiens
tttggtacttgttca

SEQ ID NO: 635713 - DNA, 15 bp, Homo sapiens
ttggtacttgttcag

SEQ ID NO: 635714 - DNA, 15 bp, Homo sapiens
tggtacttgttcagc

SEQ ID NO: 635715 - DNA, 15 bp, Homo sapiens
ggtacttgttcagct

SEQ ID NO: 635716 - DNA, 15 bp, Homo sapiens
gtacttgttcagctt

SEQ ID NO: 635717 - DNA, 15 bp, Homo sapiens
tacttgttcagcttt

SEQ ID NO: 635718 - DNA, 15 bp, Homo sapiens
acttgttcagcttta

SEQ ID NO: 635719 - DNA, 15 bp, Homo sapiens
cttgttcagctttat

SEQ ID NO: 635720 - DNA, 15 bp, Homo sapiens
ttgttcagctttatt

SEQ ID NO: 635721 - DNA, 15 bp, Homo sapiens
tgttcagctttattc

SEQ ID NO: 635722 - DNA, 15 bp, Homo sapiens
gttcagctttattca

SEQ ID NO: 635723 - DNA, 15 bp, Homo sapiens
ttcagctttattcaa

SEQ ID NO: 635724 - DNA, 15 bp, Homo sapiens
tcagctttattcaag

SEQ ID NO: 635725 - DNA, 15 bp, Homo sapiens
cagctttattcaagt

SEQ ID NO: 635726 - DNA, 15 bp, Homo sapiens
agctttattcaagtg

SEQ ID NO: 635727 - DNA, 15 bp, Homo sapiens
gctttattcaagtgg

SEQ ID NO: 635728 - DNA, 15 bp, Homo sapiens
ctttattcaagtgga

SEQ ID NO: 635729 - DNA, 15 bp, Homo sapiens
tttattcaagtggaa

SEQ ID NO: 635730 - DNA, 15 bp, Homo sapiens
ttattcaagtggaat

SEQ ID NO: 635731 - DNA, 15 bp, Homo sapiens
tattcaagtggaatt

SEQ ID NO: 635732 - DNA, 15 bp, Homo sapiens
attcaagtggaattt

SEQ ID NO: 635733 - DNA, 15 bp, Homo sapiens
ttcaagtggaatttc

SEQ ID NO: 635734 - DNA, 15 bp, Homo sapiens
tcaagtggaatttct

SEQ ID NO: 635735 - DNA, 15 bp, Homo sapiens
caagtggaatttctg

SEQ ID NO: 635736 - DNA, 15 bp, Homo sapiens
aagtggaatttctgg

SEQ ID NO: 635737 - DNA, 15 bp, Homo sapiens
agtggaatttctggg

SEQ ID NO: 635738 - DNA, 15 bp, Homo sapiens
gtggaatttctgggt

SEQ ID NO: 635739 - DNA, 15 bp, Homo sapiens
tggaatttctgggtc

SEQ ID NO: 635740 - DNA, 15 bp, Homo sapiens
ggaatttctgggtca

SEQ ID NO: 635741 - DNA, 15 bp, Homo sapiens
gaatttctgggtcaa

SEQ ID NO: 635742 - DNA, 15 bp, Homo sapiens
aatttctgggtcaag

SEQ ID NO: 635743 - DNA, 15 bp, Homo sapiens
atttctgggtcaagg

SEQ ID NO: 635744 - DNA, 15 bp, Homo sapiens
tttctgggtcaaggg

SEQ ID NO: 635745 - DNA, 15 bp, Homo sapiens
ttctgggtcaagggg

SEQ ID NO: 635746 - DNA, 15 bp, Homo sapiens
tctgggtcaagggga

SEQ ID NO: 635747 - DNA, 15 bp, Homo sapiens
ctgggtcaaggggaa

SEQ ID NO: 635748 - DNA, 15 bp, Homo sapiens
tgggtcaaggggaaa

SEQ ID NO: 635749 - DNA, 15 bp, Homo sapiens
gggtcaaggggaaag

SEQ ID NO: 635750 - DNA, 15 bp, Homo sapiens
ggtcaaggggaaaga

SEQ ID NO: 635751 - DNA, 15 bp, Homo sapiens
gtcaaggggaaagag

SEQ ID NO: 635752 - DNA, 15 bp, Homo sapiens
tcaaggggaaagagt

SEQ ID NO: 635753 - DNA, 15 bp, Homo sapiens
caaggggaaagagtt

SEQ ID NO: 635754 - DNA, 15 bp, Homo sapiens
aaggggaaagagttt

SEQ ID NO: 635755 - DNA, 15 bp, Homo sapiens
aggggaaagagttta

SEQ ID NO: 635756 - DNA, 15 bp, Homo sapiens
ggggaaagagtttat

SEQ ID NO: 635757 - DNA, 15 bp, Homo sapiens
gggaaagagtttatt

SEQ ID NO: 635758 - DNA, 15 bp, Homo sapiens
ggaaagagtttattg

SEQ ID NO: 635759 - DNA, 15 bp, Homo sapiens
gaaagagtttattga

SEQ ID NO: 635760 - DNA, 15 bp, Homo sapiens
aaagagtttattgaa

SEQ ID NO: 635761 - DNA, 15 bp, Homo sapiens
aagagtttattgaat

SEQ ID NO: 635762 - DNA, 15 bp, Homo sapiens
agagtttattgaata

SEQ ID NO: 635763 - DNA, 15 bp, Homo sapiens
gagtttattgaatat

SEQ ID NO: 635764 - DNA, 15 bp, Homo sapiens
agtttattgaatatt

SEQ ID NO: 635765 - DNA, 15 bp, Homo sapiens
gtttattgaatattt

SEQ ID NO: 635766 - DNA, 15 bp, Homo sapiens
tttattgaatatttt

SEQ ID NO: 635767 - DNA, 15 bp, Homo sapiens
ttattgaatattttg

SEQ ID NO: 635768 - DNA, 15 bp, Homo sapiens
tattgaatattttgg

SEQ ID NO: 635769 - DNA, 15 bp, Homo sapiens
attgaatattttggt

SEQ ID NO: 635770 - DNA, 15 bp, Homo sapiens
ttgaatattttggta

SEQ ID NO: 635771 - DNA, 15 bp, Homo sapiens
tgaatattttggtat

SEQ ID NO: 635772 - DNA, 15 bp, Homo sapiens
gaatattttggtatt

SEQ ID NO: 635773 - DNA, 15 bp, Homo sapiens
aatattttggtattg

SEQ ID NO: 635774 - DNA, 15 bp, Homo sapiens
atattttggtattgc

SEQ ID NO: 635775 - DNA, 15 bp, Homo sapiens
tattttggtattgcc

SEQ ID NO: 635776 - DNA, 15 bp, Homo sapiens
attttggtattgcca

SEQ ID NO: 635777 - DNA, 15 bp, Homo sapiens
ttttggtattgccaa

SEQ ID NO: 635778 - DNA, 15 bp, Homo sapiens
tttggtattgccaaa

SEQ ID NO: 635779 - DNA, 15 bp, Homo sapiens
ttggtattgccaaat

SEQ ID NO: 635780 - DNA, 15 bp, Homo sapiens
tggtattgccaaatt

SEQ ID NO: 635781 - DNA, 15 bp, Homo sapiens
ggtattgccaaattt

SEQ ID NO: 635782 - DNA, 15 bp, Homo sapiens
gtattgccaaatttt

SEQ ID NO: 635783 - DNA, 15 bp, Homo sapiens
tgaatttgaatacag

SEQ ID NO: 635784 - DNA, 15 bp, Homo sapiens
gaatttgaatacaga

SEQ ID NO: 635785 - DNA, 15 bp, Homo sapiens
aatttgaatacagac

SEQ ID NO: 635786 - DNA, 15 bp, Homo sapiens
atttgaatacagacc

SEQ ID NO: 635787 - DNA, 15 bp, Homo sapiens
tttgaatacagacct

SEQ ID NO: 635788 - DNA, 15 bp, Homo sapiens
ttgaatacagacctg

SEQ ID NO: 635789 - DNA, 15 bp, Homo sapiens
tgaatacagacctga

SEQ ID NO: 635790 - DNA, 15 bp, Homo sapiens
gaatacagacctgac

SEQ ID NO: 635791 - DNA, 15 bp, Homo sapiens
aatacagacctgact

SEQ ID NO: 635792 - DNA, 15 bp, Homo sapiens
atacagacctgactc

SEQ ID NO: 635793 - DNA, 15 bp, Homo sapiens
tacagacctgactct

SEQ ID NO: 635794 - DNA, 15 bp, Homo sapiens
acagacctgactcta

SEQ ID NO: 635795 - DNA, 15 bp, Homo sapiens
cagacctgactctaa

SEQ ID NO: 635796 - DNA, 15 bp, Homo sapiens
agacctgactctaaa

SEQ ID NO: 635797 - DNA, 15 bp, Homo sapiens
gacctgactctaaag

SEQ ID NO: 635798 - DNA, 15 bp, Homo sapiens
acctgactctaaagc

SEQ ID NO: 635799 - DNA, 15 bp, Homo sapiens
cctgactctaaagct

SEQ ID NO: 635800 - DNA, 15 bp, Homo sapiens
ctgactctaaagctc

SEQ ID NO: 635801 - DNA, 15 bp, Homo sapiens
tgactctaaagctct

SEQ ID NO: 635802 - DNA, 15 bp, Homo sapiens
gactctaaagctctt

SEQ ID NO: 635803 - DNA, 15 bp, Homo sapiens
actctaaagctcttt

SEQ ID NO: 635804 - DNA, 15 bp, Homo sapiens
ctctaaagctctttt

SEQ ID NO: 635805 - DNA, 15 bp, Homo sapiens
tctaaagctcttttc

SEQ ID NO: 635806 - DNA, 15 bp, Homo sapiens
ctaaagctcttttct

SEQ ID NO: 635807 - DNA, 15 bp, Homo sapiens
taaagctcttttctt

SEQ ID NO: 635808 - DNA, 15 bp, Homo sapiens
aaagctcttttcttt

SEQ ID NO: 635809 - DNA, 15 bp, Homo sapiens
aagctcttttctttc

SEQ ID NO: 635810 - DNA, 15 bp, Homo sapiens
agctcttttctttct

SEQ ID NO: 635811 - DNA, 15 bp, Homo sapiens
gctcttttctttctt

SEQ ID NO: 635812 - DNA, 15 bp, Homo sapiens
ctcttttctttcttt

SEQ ID NO: 635813 - DNA, 15 bp, Homo sapiens
tcttttctttcttta

SEQ ID NO: 635814 - DNA, 15 bp, Homo sapiens
cttttctttctttag

SEQ ID NO: 635815 - DNA, 15 bp, Homo sapiens
ttttctttctttaga

SEQ ID NO: 635816 - DNA, 15 bp, Homo sapiens
tttctttctttagat

SEQ ID NO: 635817 - DNA, 15 bp, Homo sapiens
ttctttctttagatt

SEQ ID NO: 635818 - DNA, 15 bp, Homo sapiens
tctttctttagattt

SEQ ID NO: 635819 - DNA, 15 bp, Homo sapiens
ctttctttagatttt

SEQ ID NO: 635820 - DNA, 15 bp, Homo sapiens
tttctttagatttta

SEQ ID NO: 635821 - DNA, 15 bp, Homo sapiens
ttctttagattttag

SEQ ID NO: 635822 - DNA, 15 bp, Homo sapiens
tctttagattttagt

SEQ ID NO: 635823 - DNA, 15 bp, Homo sapiens
ctttagattttagtg

SEQ ID NO: 635824 - DNA, 15 bp, Homo sapiens
tttagattttagtgt

SEQ ID NO: 635825 - DNA, 15 bp, Homo sapiens
ttagattttagtgtt

SEQ ID NO: 635826 - DNA, 15 bp, Homo sapiens
tagattttagtgttc

SEQ ID NO: 635827 - DNA, 15 bp, Homo sapiens
agattttagtgttca

SEQ ID NO: 635828 - DNA, 15 bp, Homo sapiens
gattttagtgttcat

SEQ ID NO: 635829 - DNA, 15 bp, Homo sapiens
attttagtgttcatt

SEQ ID NO: 635830 - DNA, 15 bp, Homo sapiens
ttttagtgttcattg

SEQ ID NO: 635831 - DNA, 15 bp, Homo sapiens
tttagtgttcattgc

SEQ ID NO: 635832 - DNA, 15 bp, Homo sapiens
ttagtgttcattgct

SEQ ID NO: 635833 - DNA, 15 bp, Homo sapiens
tagtgttcattgctt

SEQ ID NO: 635834 - DNA, 15 bp, Homo sapiens
agtgttcattgctta

SEQ ID NO: 635835 - DNA, 15 bp, Homo sapiens
gtgttcattgcttac

SEQ ID NO: 635836 - DNA, 15 bp, Homo sapiens
tgttcattgcttact

SEQ ID NO: 635837 - DNA, 15 bp, Homo sapiens
gttcattgcttactt

SEQ ID NO: 635838 - DNA, 15 bp, Homo sapiens
ttcattgcttacttg

SEQ ID NO: 635839 - DNA, 15 bp, Homo sapiens
tcattgcttacttga

SEQ ID NO: 635840 - DNA, 15 bp, Homo sapiens
cattgcttacttgaa

SEQ ID NO: 635841 - DNA, 15 bp, Homo sapiens
attgcttacttgaat

SEQ ID NO: 635842 - DNA, 15 bp, Homo sapiens
ttgcttacttgaatg

SEQ ID NO: 635843 - DNA, 15 bp, Homo sapiens
tgcttacttgaatga

SEQ ID NO: 635844 - DNA, 15 bp, Homo sapiens
gcttacttgaatgag

SEQ ID NO: 635845 - DNA, 15 bp, Homo sapiens
cttacttgaatgagt

SEQ ID NO: 635846 - DNA, 15 bp, Homo sapiens
ttacttgaatgagta

SEQ ID NO: 635847 - DNA, 15 bp, Homo sapiens
tacttgaatgagtat

SEQ ID NO: 635848 - DNA, 15 bp, Homo sapiens
acttgaatgagtatc

SEQ ID NO: 635849 - DNA, 15 bp, Homo sapiens
cttgaatgagtatct

SEQ ID NO: 635850 - DNA, 15 bp, Homo sapiens
ttgaatgagtatcta

SEQ ID NO: 635851 - DNA, 15 bp, Homo sapiens
tgaatgagtatctat

SEQ ID NO: 635852 - DNA, 15 bp, Homo sapiens
gaatgagtatctata

SEQ ID NO: 635853 - DNA, 15 bp, Homo sapiens
aatgagtatctataa

SEQ ID NO: 635854 - DNA, 15 bp, Homo sapiens
atgagtatctataag

SEQ ID NO: 635855 - DNA, 15 bp, Homo sapiens
tgagtatctataaga

SEQ ID NO: 635856 - DNA, 15 bp, Homo sapiens
gagtatctataagaa

SEQ ID NO: 635857 - DNA, 15 bp, Homo sapiens
agtatctataagaaa

SEQ ID NO: 635858 - DNA, 15 bp, Homo sapiens
gtatctataagaaaa

SEQ ID NO: 635859 - DNA, 15 bp, Homo sapiens
tatctataagaaaac

SEQ ID NO: 635860 - DNA, 15 bp, Homo sapiens
atctataagaaaact

SEQ ID NO: 635861 - DNA, 15 bp, Homo sapiens
tctataagaaaactt

SEQ ID NO: 635862 - DNA, 15 bp, Homo sapiens
ctataagaaaacttt

SEQ ID NO: 635863 - DNA, 15 bp, Homo sapiens
tataagaaaacttta

SEQ ID NO: 635864 - DNA, 15 bp, Homo sapiens
ataagaaaactttaa

SEQ ID NO: 635865 - DNA, 15 bp, Homo sapiens
taagaaaactttaac

SEQ ID NO: 635866 - DNA, 15 bp, Homo sapiens
aagaaaactttaaca

SEQ ID NO: 635867 - DNA, 15 bp, Homo sapiens
agaaaactttaacat

SEQ ID NO: 635868 - DNA, 15 bp, Homo sapiens
gaaaactttaacatg

SEQ ID NO: 635869 - DNA, 15 bp, Homo sapiens
aaaactttaacatgt

SEQ ID NO: 635870 - DNA, 15 bp, Homo sapiens
aaactttaacatgta

SEQ ID NO: 635871 - DNA, 15 bp, Homo sapiens
aactttaacatgtaa

SEQ ID NO: 635872 - DNA, 15 bp, Homo sapiens
actttaacatgtaaa

SEQ ID NO: 635873 - DNA, 15 bp, Homo sapiens
ctttaacatgtaaaa

SEQ ID NO: 635874 - DNA, 15 bp, Homo sapiens
tttaacatgtaaaac

SEQ ID NO: 635875 - DNA, 15 bp, Homo sapiens
ttaacatgtaaaact

SEQ ID NO: 635876 - DNA, 15 bp, Homo sapiens
taacatgtaaaactt

SEQ ID NO: 635877 - DNA, 15 bp, Homo sapiens
aacatgtaaaacttc

SEQ ID NO: 635878 - DNA, 15 bp, Homo sapiens
acatgtaaaacttct

SEQ ID NO: 635879 - DNA, 15 bp, Homo sapiens
catgtaaaacttctg

SEQ ID NO: 635880 - DNA, 15 bp, Homo sapiens
atgtaaaacttctgt

SEQ ID NO: 635881 - DNA, 15 bp, Homo sapiens
tgtaaaacttctgtg

SEQ ID NO: 635882 - DNA, 15 bp, Homo sapiens
gtaaaacttctgtga

SEQ ID NO: 635883 - DNA, 15 bp, Homo sapiens
taaaacttctgtgaa

SEQ ID NO: 635884 - DNA, 15 bp, Homo sapiens
aaaacttctgtgaaa

SEQ ID NO: 635885 - DNA, 15 bp, Homo sapiens
aaacttctgtgaaat

SEQ ID NO: 635886 - DNA, 15 bp, Homo sapiens
aacttctgtgaaatt

SEQ ID NO: 635887 - DNA, 15 bp, Homo sapiens
acttctgtgaaatta

SEQ ID NO: 635888 - DNA, 15 bp, Homo sapiens
cttctgtgaaattat

SEQ ID NO: 635889 - DNA, 15 bp, Homo sapiens
ttctgtgaaattatc

SEQ ID NO: 635890 - DNA, 15 bp, Homo sapiens
tctgtgaaattatct

SEQ ID NO: 635891 - DNA, 15 bp, Homo sapiens
ctgtgaaattatctt

SEQ ID NO: 635892 - DNA, 15 bp, Homo sapiens
tgtgaaattatcttg

SEQ ID NO: 635893 - DNA, 15 bp, Homo sapiens
gtgaaattatcttgt

SEQ ID NO: 635894 - DNA, 15 bp, Homo sapiens
tgaaattatcttgtc

SEQ ID NO: 635895 - DNA, 15 bp, Homo sapiens
gaaattatcttgtcc

SEQ ID NO: 635896 - DNA, 15 bp, Homo sapiens
aaattatcttgtccc

SEQ ID NO: 635897 - DNA, 15 bp, Homo sapiens
aattatcttgtccca

SEQ ID NO: 635898 - DNA, 15 bp, Homo sapiens
attatcttgtcccat

SEQ ID NO: 635899 - DNA, 15 bp, Homo sapiens
ttatcttgtcccata

SEQ ID NO: 635900 - DNA, 15 bp, Homo sapiens
tatcttgtcccatat

SEQ ID NO: 635901 - DNA, 15 bp, Homo sapiens
atcttgtcccatatc

SEQ ID NO: 635902 - DNA, 15 bp, Homo sapiens
tcttgtcccatatca

SEQ ID NO: 635903 - DNA, 15 bp, Homo sapiens
cttgtcccatatcag

SEQ ID NO: 635904 - DNA, 15 bp, Homo sapiens
ttgtcccatatcagg

SEQ ID NO: 635905 - DNA, 15 bp, Homo sapiens
tgtcccatatcaggg

SEQ ID NO: 635906 - DNA, 15 bp, Homo sapiens
gtcccatatcagggt

SEQ ID NO: 635907 - DNA, 15 bp, Homo sapiens
tcccatatcagggtc

SEQ ID NO: 635908 - DNA, 15 bp, Homo sapiens
cccatatcagggtca

SEQ ID NO: 635909 - DNA, 15 bp, Homo sapiens
ccatatcagggtcat

SEQ ID NO: 635910 - DNA, 15 bp, Homo sapiens
catatcagggtcatg

SEQ ID NO: 635911 - DNA, 15 bp, Homo sapiens
atatcagggtcatgt

SEQ ID NO: 635912 - DNA, 15 bp, Homo sapiens
tatcagggtcatgtc

SEQ ID NO: 635913 - DNA, 15 bp, Homo sapiens
atcagggtcatgtca

SEQ ID NO: 635914 - DNA, 15 bp, Homo sapiens
tcagggtcatgtcaa

SEQ ID NO: 635915 - DNA, 15 bp, Homo sapiens
cagggtcatgtcaaa

SEQ ID NO: 635916 - DNA, 15 bp, Homo sapiens
agggtcatgtcaaac

SEQ ID NO: 635917 - DNA, 15 bp, Homo sapiens
gggtcatgtcaaact

SEQ ID NO: 635918 - DNA, 15 bp, Homo sapiens
ggtcatgtcaaacta

SEQ ID NO: 635919 - DNA, 15 bp, Homo sapiens
gtcatgtcaaactaa

SEQ ID NO: 635920 - DNA, 15 bp, Homo sapiens
tcatgtcaaactaat

SEQ ID NO: 635921 - DNA, 15 bp, Homo sapiens
catgtcaaactaatg

SEQ ID NO: 635922 - DNA, 15 bp, Homo sapiens
atgtcaaactaatgt

SEQ ID NO: 635923 - DNA, 15 bp, Homo sapiens
tgtcaaactaatgtc

SEQ ID NO: 635924 - DNA, 15 bp, Homo sapiens
gtcaaactaatgtcc

SEQ ID NO: 635925 - DNA, 15 bp, Homo sapiens
tcaaactaatgtcct

SEQ ID NO: 635926 - DNA, 15 bp, Homo sapiens
caaactaatgtcctc

SEQ ID NO: 635927 - DNA, 15 bp, Homo sapiens
aaactaatgtcctcc

SEQ ID NO: 635928 - DNA, 15 bp, Homo sapiens
aactaatgtcctcct

SEQ ID NO: 635929 - DNA, 15 bp, Homo sapiens
actaatgtcctcctc

SEQ ID NO: 635930 - DNA, 15 bp, Homo sapiens
ctaatgtcctcctca

SEQ ID NO: 635931 - DNA, 15 bp, Homo sapiens
tataccactgttaga

SEQ ID NO: 635932 - DNA, 15 bp, Homo sapiens
ataccactgttagac

SEQ ID NO: 635933 - DNA, 15 bp, Homo sapiens
taccactgttagacc

SEQ ID NO: 635934 - DNA, 15 bp, Homo sapiens
accactgttagacct

SEQ ID NO: 635935 - DNA, 15 bp, Homo sapiens
ccactgttagacctg

SEQ ID NO: 635936 - DNA, 15 bp, Homo sapiens
cactgttagacctgt

SEQ ID NO: 635937 - DNA, 15 bp, Homo sapiens
actgttagacctgtc

SEQ ID NO: 635938 - DNA, 15 bp, Homo sapiens
ctgttagacctgtcc

SEQ ID NO: 635939 - DNA, 15 bp, Homo sapiens
tgttagacctgtcct

SEQ ID NO: 635940 - DNA, 15 bp, Homo sapiens
gttagacctgtcctt

SEQ ID NO: 635941 - DNA, 15 bp, Homo sapiens
ttagacctgtccttc

SEQ ID NO: 635942 - DNA, 15 bp, Homo sapiens
tagacctgtccttcc

SEQ ID NO: 635943 - DNA, 15 bp, Homo sapiens
agacctgtccttccc

SEQ ID NO: 635944 - DNA, 15 bp, Homo sapiens
gacctgtccttccct

SEQ ID NO: 635945 - DNA, 15 bp, Homo sapiens
acctgtccttccctt

SEQ ID NO: 635946 - DNA, 15 bp, Homo sapiens
cctgtccttcccttt

SEQ ID NO: 635947 - DNA, 15 bp, Homo sapiens
ctgtccttccctttc

SEQ ID NO: 635948 - DNA, 15 bp, Homo sapiens
tgtccttccctttca

SEQ ID NO: 635949 - DNA, 15 bp, Homo sapiens
gtccttccctttcag

SEQ ID NO: 635950 - DNA, 15 bp, Homo sapiens
tccttccctttcagc

SEQ ID NO: 635951 - DNA, 15 bp, Homo sapiens
ccttccctttcagca

SEQ ID NO: 635952 - DNA, 15 bp, Homo sapiens
cttccctttcagcat

SEQ ID NO: 635953 - DNA, 15 bp, Homo sapiens
ttccctttcagcatg

SEQ ID NO: 635954 - DNA, 15 bp, Homo sapiens
tccctttcagcatgc

SEQ ID NO: 635955 - DNA, 15 bp, Homo sapiens
ccctttcagcatgct

SEQ ID NO: 635956 - DNA, 15 bp, Homo sapiens
cctttcagcatgctt

SEQ ID NO: 635957 - DNA, 15 bp, Homo sapiens
ctttcagcatgcttt

SEQ ID NO: 635958 - DNA, 15 bp, Homo sapiens
tttcagcatgctttg

SEQ ID NO: 635959 - DNA, 15 bp, Homo sapiens
ttcagcatgctttgt

SEQ ID NO: 635960 - DNA, 15 bp, Homo sapiens
tcagcatgctttgtc

SEQ ID NO: 635961 - DNA, 15 bp, Homo sapiens
cagcatgctttgtcc

SEQ ID NO: 635962 - DNA, 15 bp, Homo sapiens
agcatgctttgtcca

SEQ ID NO: 635963 - DNA, 15 bp, Homo sapiens
gcatgctttgtccat

SEQ ID NO: 635964 - DNA, 15 bp, Homo sapiens
catgctttgtccata

SEQ ID NO: 635965 - DNA, 15 bp, Homo sapiens
atgctttgtccatat

SEQ ID NO: 635966 - DNA, 15 bp, Homo sapiens
tgctttgtccatatt

SEQ ID NO: 635967 - DNA, 15 bp, Homo sapiens
gctttgtccatattt

SEQ ID NO: 635968 - DNA, 15 bp, Homo sapiens
ctttgtccatattta

SEQ ID NO: 635969 - DNA, 15 bp, Homo sapiens
tttgtccatatttag

SEQ ID NO: 635970 - DNA, 15 bp, Homo sapiens
ttgtccatatttaga

SEQ ID NO: 635971 - DNA, 15 bp, Homo sapiens
tgtccatatttagaa

SEQ ID NO: 635972 - DNA, 15 bp, Homo sapiens
gtccatatttagaag

SEQ ID NO: 635973 - DNA, 15 bp, Homo sapiens
tccatatttagaagc

SEQ ID NO: 635974 - DNA, 15 bp, Homo sapiens
ccatatttagaagct

SEQ ID NO: 635975 - DNA, 15 bp, Homo sapiens
catatttagaagctg

SEQ ID NO: 635976 - DNA, 15 bp, Homo sapiens
atatttagaagctgt

SEQ ID NO: 635977 - DNA, 15 bp, Homo sapiens
tatttagaagctgtt

SEQ ID NO: 635978 - DNA, 15 bp, Homo sapiens
atttagaagctgttg

SEQ ID NO: 635979 - DNA, 15 bp, Homo sapiens
tttagaagctgttga

SEQ ID NO: 635980 - DNA, 15 bp, Homo sapiens
ttagaagctgttgaa

SEQ ID NO: 635981 - DNA, 15 bp, Homo sapiens
tagaagctgttgaag

SEQ ID NO: 635982 - DNA, 15 bp, Homo sapiens
agaagctgttgaagc

SEQ ID NO: 635983 - DNA, 15 bp, Homo sapiens
gaagctgttgaagcc

SEQ ID NO: 635984 - DNA, 15 bp, Homo sapiens
aagctgttgaagcca

SEQ ID NO: 635985 - DNA, 15 bp, Homo sapiens
agctgttgaagccat

SEQ ID NO: 635986 - DNA, 15 bp, Homo sapiens
gctgttgaagccatt

SEQ ID NO: 635987 - DNA, 15 bp, Homo sapiens
ctgttgaagccatta

SEQ ID NO: 635988 - DNA, 15 bp, Homo sapiens
tgttgaagccattac

SEQ ID NO: 635989 - DNA, 15 bp, Homo sapiens
gttgaagccattact

SEQ ID NO: 635990 - DNA, 15 bp, Homo sapiens
ttgaagccattactt

SEQ ID NO: 635991 - DNA, 15 bp, Homo sapiens
tgaagccattacttg

SEQ ID NO: 635992 - DNA, 15 bp, Homo sapiens
gaagccattacttgt

SEQ ID NO: 635993 - DNA, 15 bp, Homo sapiens
aagccattacttgtc

SEQ ID NO: 635994 - DNA, 15 bp, Homo sapiens
agccattacttgtct

SEQ ID NO: 635995 - DNA, 15 bp, Homo sapiens
gccattacttgtctg

SEQ ID NO: 635996 - DNA, 15 bp, Homo sapiens
ccattacttgtctgg

SEQ ID NO: 635997 - DNA, 15 bp, Homo sapiens
cattacttgtctggt

SEQ ID NO: 635998 - DNA, 15 bp, Homo sapiens
attacttgtctggtc

SEQ ID NO: 635999 - DNA, 15 bp, Homo sapiens
ttacttgtctggtca

SEQ ID NO: 636000 - DNA, 15 bp, Homo sapiens
tacttgtctggtcag

SEQ ID NO: 636001 - DNA, 15 bp, Homo sapiens
acttgtctggtcagt

SEQ ID NO: 636002 - DNA, 15 bp, Homo sapiens
cttgtctggtcagtt

SEQ ID NO: 636003 - DNA, 15 bp, Homo sapiens
ttgtctggtcagttt

SEQ ID NO: 636004 - DNA, 15 bp, Homo sapiens
tgtctggtcagtttt

SEQ ID NO: 636005 - DNA, 15 bp, Homo sapiens
gtctggtcagttttt

SEQ ID NO: 636006 - DNA, 15 bp, Homo sapiens
tctggtcagttttta

SEQ ID NO: 636007 - DNA, 15 bp, Homo sapiens
ctggtcagtttttag

SEQ ID NO: 636008 - DNA, 15 bp, Homo sapiens
tggtcagtttttagt

SEQ ID NO: 636009 - DNA, 15 bp, Homo sapiens
ggtcagtttttagtg

SEQ ID NO: 636010 - DNA, 15 bp, Homo sapiens
gtcagtttttagtgc

SEQ ID NO: 636011 - DNA, 15 bp, Homo sapiens
tcagtttttagtgct

SEQ ID NO: 636012 - DNA, 15 bp, Homo sapiens
cagtttttagtgctg

SEQ ID NO: 636013 - DNA, 15 bp, Homo sapiens
agtttttagtgctgg

SEQ ID NO: 636014 - DNA, 15 bp, Homo sapiens
gtttttagtgctgga

SEQ ID NO: 636015 - DNA, 15 bp, Homo sapiens
tttttagtgctggaa

SEQ ID NO: 636016 - DNA, 15 bp, Homo sapiens
ttttagtgctggaat

SEQ ID NO: 636017 - DNA, 15 bp, Homo sapiens
tttagtgctggaatg

SEQ ID NO: 636018 - DNA, 15 bp, Homo sapiens
ttagtgctggaatgg

SEQ ID NO: 636019 - DNA, 15 bp, Homo sapiens
tagtgctggaatgga

SEQ ID NO: 636020 - DNA, 15 bp, Homo sapiens
agtgctggaatggac

SEQ ID NO: 636021 - DNA, 15 bp, Homo sapiens
gtgctggaatggacc

SEQ ID NO: 636022 - DNA, 15 bp, Homo sapiens
tgctggaatggacct

SEQ ID NO: 636023 - DNA, 15 bp, Homo sapiens
gctggaatggaccta

SEQ ID NO: 636024 - DNA, 15 bp, Homo sapiens
ctggaatggacctag

SEQ ID NO: 636025 - DNA, 15 bp, Homo sapiens
tggaatggacctagc

SEQ ID NO: 636026 - DNA, 15 bp, Homo sapiens
ggaatggacctagcc

SEQ ID NO: 636027 - DNA, 15 bp, Homo sapiens
gaatggacctagcct

SEQ ID NO: 636028 - DNA, 15 bp, Homo sapiens
aatggacctagcctt

SEQ ID NO: 636029 - DNA, 15 bp, Homo sapiens
atggacctagccttt

SEQ ID NO: 636030 - DNA, 15 bp, Homo sapiens
tggacctagcctttt

SEQ ID NO: 636031 - DNA, 15 bp, Homo sapiens
ggacctagcctttta

SEQ ID NO: 636032 - DNA, 15 bp, Homo sapiens
gacctagccttttag

SEQ ID NO: 636033 - DNA, 15 bp, Homo sapiens
acctagccttttagg

SEQ ID NO: 636034 - DNA, 15 bp, Homo sapiens
cctagccttttaggc

SEQ ID NO: 636035 - DNA, 15 bp, Homo sapiens
ctagccttttaggcc

SEQ ID NO: 636036 - DNA, 15 bp, Homo sapiens
tagccttttaggcct

SEQ ID NO: 636037 - DNA, 15 bp, Homo sapiens
agccttttaggcctt

SEQ ID NO: 636038 - DNA, 15 bp, Homo sapiens
gccttttaggccttc

SEQ ID NO: 636039 - DNA, 15 bp, Homo sapiens
ccttttaggccttct

SEQ ID NO: 636040 - DNA, 15 bp, Homo sapiens
cttttaggccttctg

SEQ ID NO: 636041 - DNA, 15 bp, Homo sapiens
ttttaggccttctga

SEQ ID NO: 636042 - DNA, 15 bp, Homo sapiens
tttaggccttctgag

SEQ ID NO: 636043 - DNA, 15 bp, Homo sapiens
ttaggccttctgaga

SEQ ID NO: 636044 - DNA, 15 bp, Homo sapiens
taggccttctgagat

SEQ ID NO: 636045 - DNA, 15 bp, Homo sapiens
aggccttctgagatt

SEQ ID NO: 636046 - DNA, 15 bp, Homo sapiens
ggccttctgagattt

SEQ ID NO: 636047 - DNA, 15 bp, Homo sapiens
gccttctgagattta

SEQ ID NO: 636048 - DNA, 15 bp, Homo sapiens
ccttctgagatttag

SEQ ID NO: 636049 - DNA, 15 bp, Homo sapiens
cttctgagatttagt

SEQ ID NO: 636050 - DNA, 15 bp, Homo sapiens
ttctgagatttagtt

SEQ ID NO: 636051 - DNA, 15 bp, Homo sapiens
tctgagatttagttt

SEQ ID NO: 636052 - DNA, 15 bp, Homo sapiens
ctgagatttagtttg

SEQ ID NO: 636053 - DNA, 15 bp, Homo sapiens
tgagatttagtttga

SEQ ID NO: 636054 - DNA, 15 bp, Homo sapiens
gagatttagtttgat

SEQ ID NO: 636055 - DNA, 15 bp, Homo sapiens
agatttagtttgatc

SEQ ID NO: 636056 - DNA, 15 bp, Homo sapiens
gatttagtttgatct

SEQ ID NO: 636057 - DNA, 15 bp, Homo sapiens
atttagtttgatctc

SEQ ID NO: 636058 - DNA, 15 bp, Homo sapiens
tttagtttgatctcg

SEQ ID NO: 636059 - DNA, 15 bp, Homo sapiens
ttagtttgatctcgt

SEQ ID NO: 636060 - DNA, 15 bp, Homo sapiens
tagtttgatctcgtc

SEQ ID NO: 636061 - DNA, 15 bp, Homo sapiens
agtttgatctcgtct

SEQ ID NO: 636062 - DNA, 15 bp, Homo sapiens
gtttgatctcgtctt

SEQ ID NO: 636063 - DNA, 15 bp, Homo sapiens
tttgatctcgtcttt

SEQ ID NO: 636064 - DNA, 15 bp, Homo sapiens
ttgatctcgtctttc

SEQ ID NO: 636065 - DNA, 15 bp, Homo sapiens
tgatctcgtctttcc

SEQ ID NO: 636066 - DNA, 15 bp, Homo sapiens
gatctcgtctttccc

SEQ ID NO: 636067 - DNA, 15 bp, Homo sapiens
atctcgtctttccca

SEQ ID NO: 636068 - DNA, 15 bp, Homo sapiens
tctcgtctttcccac

SEQ ID NO: 636069 - DNA, 15 bp, Homo sapiens
ctcgtctttcccacc

SEQ ID NO: 636070 - DNA, 15 bp, Homo sapiens
tcgtctttcccacct

SEQ ID NO: 636071 - DNA, 15 bp, Homo sapiens
cgtctttcccaccta

SEQ ID NO: 636072 - DNA, 15 bp, Homo sapiens
gtctttcccacctaa

SEQ ID NO: 636073 - DNA, 15 bp, Homo sapiens
tctttcccacctaat

SEQ ID NO: 636074 - DNA, 15 bp, Homo sapiens
ctttcccacctaatg

SEQ ID NO: 636075 - DNA, 15 bp, Homo sapiens
tttcccacctaatgg

SEQ ID NO: 636076 - DNA, 15 bp, Homo sapiens
ttcccacctaatggc

SEQ ID NO: 636077 - DNA, 15 bp, Homo sapiens
tcccacctaatggct

SEQ ID NO: 636078 - DNA, 15 bp, Homo sapiens
cccacctaatggctc

SEQ ID NO: 636079 - DNA, 15 bp, Homo sapiens
ccacctaatggctct

SEQ ID NO: 636080 - DNA, 15 bp, Homo sapiens
cacctaatggctctg

SEQ ID NO: 636081 - DNA, 15 bp, Homo sapiens
acctaatggctctgt

SEQ ID NO: 636082 - DNA, 15 bp, Homo sapiens
cctaatggctctgtt

SEQ ID NO: 636083 - DNA, 15 bp, Homo sapiens
ctaatggctctgttc

SEQ ID NO: 636084 - DNA, 15 bp, Homo sapiens
taatggctctgttct

SEQ ID NO: 636085 - DNA, 15 bp, Homo sapiens
aatggctctgttcta

SEQ ID NO: 636086 - DNA, 15 bp, Homo sapiens
atggctctgttctac

SEQ ID NO: 636087 - DNA, 15 bp, Homo sapiens
tggctctgttctact

SEQ ID NO: 636088 - DNA, 15 bp, Homo sapiens
ggctctgttctacta

SEQ ID NO: 636089 - DNA, 15 bp, Homo sapiens
gctctgttctactac

SEQ ID NO: 636090 - DNA, 15 bp, Homo sapiens
ctctgttctactaca

SEQ ID NO: 636091 - DNA, 15 bp, Homo sapiens
tctgttctactacat

SEQ ID NO: 636092 - DNA, 15 bp, Homo sapiens
ctgttctactacata

SEQ ID NO: 636093 - DNA, 15 bp, Homo sapiens
tgttctactacatag

SEQ ID NO: 636094 - DNA, 15 bp, Homo sapiens
gttctactacataga

SEQ ID NO: 636095 - DNA, 15 bp, Homo sapiens
ttctactacatagat

SEQ ID NO: 636096 - DNA, 15 bp, Homo sapiens
tctactacatagatt

SEQ ID NO: 636097 - DNA, 15 bp, Homo sapiens
ctactacatagattt

SEQ ID NO: 636098 - DNA, 15 bp, Homo sapiens
tactacatagatttg

SEQ ID NO: 636099 - DNA, 15 bp, Homo sapiens
actacatagatttga

SEQ ID NO: 636100 - DNA, 15 bp, Homo sapiens
ctacatagatttgat

SEQ ID NO: 636101 - DNA, 15 bp, Homo sapiens
tacatagatttgatc

SEQ ID NO: 636102 - DNA, 15 bp, Homo sapiens
acatagatttgatct

SEQ ID NO: 636103 - DNA, 15 bp, Homo sapiens
catagatttgatctg

SEQ ID NO: 636104 - DNA, 15 bp, Homo sapiens
atagatttgatctga

SEQ ID NO: 636105 - DNA, 15 bp, Homo sapiens
tagatttgatctgaa

SEQ ID NO: 636106 - DNA, 15 bp, Homo sapiens
agatttgatctgaaa

SEQ ID NO: 636107 - DNA, 15 bp, Homo sapiens
gatttgatctgaaac

SEQ ID NO: 636108 - DNA, 15 bp, Homo sapiens
atttgatctgaaaca

SEQ ID NO: 636109 - DNA, 15 bp, Homo sapiens
tttgatctgaaacag

SEQ ID NO: 636110 - DNA, 15 bp, Homo sapiens
ttgatctgaaacagt

SEQ ID NO: 636111 - DNA, 15 bp, Homo sapiens
tgatctgaaacagtt

SEQ ID NO: 636112 - DNA, 15 bp, Homo sapiens
gatctgaaacagttc

SEQ ID NO: 636113 - DNA, 15 bp, Homo sapiens
atctgaaacagttct

SEQ ID NO: 636114 - DNA, 15 bp, Homo sapiens
tctgaaacagttctc

SEQ ID NO: 636115 - DNA, 15 bp, Homo sapiens
ctgaaacagttctct

SEQ ID NO: 636116 - DNA, 15 bp, Homo sapiens
tgaaacagttctctg

SEQ ID NO: 636117 - DNA, 15 bp, Homo sapiens
gaaacagttctctgt

SEQ ID NO: 636118 - DNA, 15 bp, Homo sapiens
aaacagttctctgtt

SEQ ID NO: 636119 - DNA, 15 bp, Homo sapiens
aacagttctctgttt

SEQ ID NO: 636120 - DNA, 15 bp, Homo sapiens
acagttctctgtttc

SEQ ID NO: 636121 - DNA, 15 bp, Homo sapiens
cagttctctgtttct

SEQ ID NO: 636122 - DNA, 15 bp, Homo sapiens
agttctctgtttcta

SEQ ID NO: 636123 - DNA, 15 bp, Homo sapiens
gttctctgtttctaa

SEQ ID NO: 636124 - DNA, 15 bp, Homo sapiens
ttctctgtttctaaa

SEQ ID NO: 636125 - DNA, 15 bp, Homo sapiens
tctctgtttctaaaa

SEQ ID NO: 636126 - DNA, 15 bp, Homo sapiens
ctctgtttctaaaat

SEQ ID NO: 636127 - DNA, 15 bp, Homo sapiens
tctgtttctaaaata

SEQ ID NO: 636128 - DNA, 15 bp, Homo sapiens
ctgtttctaaaataa

SEQ ID NO: 636129 - DNA, 15 bp, Homo sapiens
tgtttctaaaataac

SEQ ID NO: 636130 - DNA, 15 bp, Homo sapiens
gtttctaaaataact

SEQ ID NO: 636131 - DNA, 15 bp, Homo sapiens
tttctaaaataactt

SEQ ID NO: 636132 - DNA, 15 bp, Homo sapiens
ttctaaaataacttt

SEQ ID NO: 636133 - DNA, 15 bp, Homo sapiens
tctaaaataactttc

SEQ ID NO: 636134 - DNA, 15 bp, Homo sapiens
ctaaaataactttct

SEQ ID NO: 636135 - DNA, 15 bp, Homo sapiens
taaaataactttctt

SEQ ID NO: 636136 - DNA, 15 bp, Homo sapiens
aaaataactttcttt

SEQ ID NO: 636137 - DNA, 15 bp, Homo sapiens
aaataactttctttt

SEQ ID NO: 636138 - DNA, 15 bp, Homo sapiens
aataactttcttttc

SEQ ID NO: 636139 - DNA, 15 bp, Homo sapiens
ataactttcttttca

SEQ ID NO: 636140 - DNA, 15 bp, Homo sapiens
taactttcttttcat

SEQ ID NO: 636141 - DNA, 15 bp, Homo sapiens
aactttcttttcatg

SEQ ID NO: 636142 - DNA, 15 bp, Homo sapiens
actttcttttcatga

SEQ ID NO: 636143 - DNA, 15 bp, Homo sapiens
ctttcttttcatgat

SEQ ID NO: 636144 - DNA, 15 bp, Homo sapiens
tttcttttcatgata

SEQ ID NO: 636145 - DNA, 15 bp, Homo sapiens
ttcttttcatgatag

SEQ ID NO: 636146 - DNA, 15 bp, Homo sapiens
tcttttcatgatagt

SEQ ID NO: 636147 - DNA, 15 bp, Homo sapiens
cttttcatgatagtc

SEQ ID NO: 636148 - DNA, 15 bp, Homo sapiens
ttttcatgatagtca

SEQ ID NO: 636149 - DNA, 15 bp, Homo sapiens
tttcatgatagtcac

SEQ ID NO: 636150 - DNA, 15 bp, Homo sapiens
ttcatgatagtcaca

SEQ ID NO: 636151 - DNA, 15 bp, Homo sapiens
tcatgatagtcacag

SEQ ID NO: 636152 - DNA, 15 bp, Homo sapiens
catgatagtcacagt

SEQ ID NO: 636153 - DNA, 15 bp, Homo sapiens
atgatagtcacagta

SEQ ID NO: 636154 - DNA, 15 bp, Homo sapiens
tgatagtcacagtaa

SEQ ID NO: 636155 - DNA, 15 bp, Homo sapiens
gatagtcacagtaaa

SEQ ID NO: 636156 - DNA, 15 bp, Homo sapiens
atagtcacagtaaag

SEQ ID NO: 636157 - DNA, 15 bp, Homo sapiens
tagtcacagtaaagt

SEQ ID NO: 636158 - DNA, 15 bp, Homo sapiens
agtcacagtaaagta

SEQ ID NO: 636159 - DNA, 15 bp, Homo sapiens
gtcacagtaaagtac

SEQ ID NO: 636160 - DNA, 15 bp, Homo sapiens
tcacagtaaagtaca

SEQ ID NO: 636161 - DNA, 15 bp, Homo sapiens
cacagtaaagtacat

SEQ ID NO: 636162 - DNA, 15 bp, Homo sapiens
acagtaaagtacatt

SEQ ID NO: 636163 - DNA, 15 bp, Homo sapiens
cagtaaagtacattt

SEQ ID NO: 636164 - DNA, 15 bp, Homo sapiens
agtaaagtacattta

SEQ ID NO: 636165 - DNA, 15 bp, Homo sapiens
gtaaagtacatttat

SEQ ID NO: 636166 - DNA, 15 bp, Homo sapiens
taaagtacatttatt

SEQ ID NO: 636167 - DNA, 15 bp, Homo sapiens
aaagtacatttatta

SEQ ID NO: 636168 - DNA, 15 bp, Homo sapiens
aagtacatttattat

SEQ ID NO: 636169 - DNA, 15 bp, Homo sapiens
agtacatttattatg

SEQ ID NO: 636170 - DNA, 15 bp, Homo sapiens
gtacatttattatgg

SEQ ID NO: 636171 - DNA, 15 bp, Homo sapiens
tacatttattatgga

SEQ ID NO: 636172 - DNA, 15 bp, Homo sapiens
acatttattatggaa

SEQ ID NO: 636173 - DNA, 15 bp, Homo sapiens
catttattatggaaa

SEQ ID NO: 636174 - DNA, 15 bp, Homo sapiens
atttattatggaaaa

SEQ ID NO: 636175 - DNA, 15 bp, Homo sapiens
tttattatggaaaaa

SEQ ID NO: 636176 - DNA, 15 bp, Homo sapiens
ttattatggaaaaat

SEQ ID NO: 636177 - DNA, 15 bp, Homo sapiens
tattatggaaaaatc

SEQ ID NO: 636178 - DNA, 15 bp, Homo sapiens
attatggaaaaatca

SEQ ID NO: 636179 - DNA, 15 bp, Homo sapiens
ttatggaaaaatcaa

SEQ ID NO: 636180 - DNA, 15 bp, Homo sapiens
tatggaaaaatcaat

SEQ ID NO: 636181 - DNA, 15 bp, Homo sapiens
atggaaaaatcaata

SEQ ID NO: 636182 - DNA, 15 bp, Homo sapiens
tggaaaaatcaataa

SEQ ID NO: 636183 - DNA, 15 bp, Homo sapiens
ggaaaaatcaataag

SEQ ID NO: 636184 - DNA, 15 bp, Homo sapiens
gaaaaatcaataagt

SEQ ID NO: 636185 - DNA, 15 bp, Homo sapiens
aaaaatcaataagta

SEQ ID NO: 636186 - DNA, 15 bp, Homo sapiens
aaaatcaataagtat

SEQ ID NO: 636187 - DNA, 15 bp, Homo sapiens
aaatcaataagtata

SEQ ID NO: 636188 - DNA, 15 bp, Homo sapiens
aatcaataagtataa

SEQ ID NO: 636189 - DNA, 15 bp, Homo sapiens
atcaataagtataac

SEQ ID NO: 636190 - DNA, 15 bp, Homo sapiens
tcaataagtataacg

SEQ ID NO: 636191 - DNA, 15 bp, Homo sapiens
caataagtataacga

SEQ ID NO: 636192 - DNA, 15 bp, Homo sapiens
aataagtataacgag

SEQ ID NO: 636193 - DNA, 15 bp, Homo sapiens
ataagtataacgagt

SEQ ID NO: 636194 - DNA, 15 bp, Homo sapiens
taagtataacgagtg

SEQ ID NO: 636195 - DNA, 15 bp, Homo sapiens
aagtataacgagtga

SEQ ID NO: 636196 - DNA, 15 bp, Homo sapiens
agtataacgagtgaa

SEQ ID NO: 636197 - DNA, 15 bp, Homo sapiens
gtataacgagtgaaa

SEQ ID NO: 636198 - DNA, 15 bp, Homo sapiens
tataacgagtgaaag

SEQ ID NO: 636199 - DNA, 15 bp, Homo sapiens
ataacgagtgaaagt

SEQ ID NO: 636200 - DNA, 15 bp, Homo sapiens
taacgagtgaaagtt

SEQ ID NO: 636201 - DNA, 15 bp, Homo sapiens
aacgagtgaaagtta

SEQ ID NO: 636202 - DNA, 15 bp, Homo sapiens
acgagtgaaagttat

SEQ ID NO: 636203 - DNA, 15 bp, Homo sapiens
cgagtgaaagttatt

SEQ ID NO: 636204 - DNA, 15 bp, Homo sapiens
gagtgaaagttattt

SEQ ID NO: 636205 - DNA, 15 bp, Homo sapiens
agtgaaagttatttc

SEQ ID NO: 636206 - DNA, 15 bp, Homo sapiens
gtgaaagttatttct

SEQ ID NO: 636207 - DNA, 15 bp, Homo sapiens
tgaaagttatttctt

SEQ ID NO: 636208 - DNA, 15 bp, Homo sapiens
gaaagttatttcttg

SEQ ID NO: 636209 - DNA, 15 bp, Homo sapiens
aaagttatttcttgg

SEQ ID NO: 636210 - DNA, 15 bp, Homo sapiens
aagttatttcttggt

SEQ ID NO: 636211 - DNA, 15 bp, Homo sapiens
agttatttcttggtg

SEQ ID NO: 636212 - DNA, 15 bp, Homo sapiens
gttatttcttggtgg

SEQ ID NO: 636213 - DNA, 15 bp, Homo sapiens
ttatttcttggtggt

SEQ ID NO: 636214 - DNA, 15 bp, Homo sapiens
tatttcttggtggta

SEQ ID NO: 636215 - DNA, 15 bp, Homo sapiens
atttcttggtggtaa

SEQ ID NO: 636216 - DNA, 15 bp, Homo sapiens
tttcttggtggtaag

SEQ ID NO: 636217 - DNA, 15 bp, Homo sapiens
ttcttggtggtaaga

SEQ ID NO: 636218 - DNA, 15 bp, Homo sapiens
tcttggtggtaagat

SEQ ID NO: 636219 - DNA, 15 bp, Homo sapiens
cttggtggtaagatt

SEQ ID NO: 636220 - DNA, 15 bp, Homo sapiens
ttggtggtaagatta

SEQ ID NO: 636221 - DNA, 15 bp, Homo sapiens
tggtggtaagattat

SEQ ID NO: 636222 - DNA, 15 bp, Homo sapiens
ggtggtaagattatg

SEQ ID NO: 636223 - DNA, 15 bp, Homo sapiens
gtggtaagattatgg

SEQ ID NO: 636224 - DNA, 15 bp, Homo sapiens
tggtaagattatggg

SEQ ID NO: 636225 - DNA, 15 bp, Homo sapiens
ggtaagattatggga

SEQ ID NO: 636226 - DNA, 15 bp, Homo sapiens
gtaagattatgggat

SEQ ID NO: 636227 - DNA, 15 bp, Homo sapiens
taagattatgggatt

SEQ ID NO: 636228 - DNA, 15 bp, Homo sapiens
aagattatgggatta

SEQ ID NO: 636229 - DNA, 15 bp, Homo sapiens
agattatgggattat

SEQ ID NO: 636230 - DNA, 15 bp, Homo sapiens
gattatgggattatt

SEQ ID NO: 636231 - DNA, 15 bp, Homo sapiens
attatgggattattt

SEQ ID NO: 636232 - DNA, 15 bp, Homo sapiens
ttatgggattatttg

SEQ ID NO: 636233 - DNA, 15 bp, Homo sapiens
tatgggattatttga

SEQ ID NO: 636234 - DNA, 15 bp, Homo sapiens
atgggattatttgaa

SEQ ID NO: 636235 - DNA, 15 bp, Homo sapiens
tgggattatttgaac

SEQ ID NO: 636236 - DNA, 15 bp, Homo sapiens
gggattatttgaact

SEQ ID NO: 636237 - DNA, 15 bp, Homo sapiens
ggattatttgaactt

SEQ ID NO: 636238 - DNA, 15 bp, Homo sapiens
gattatttgaacttt

SEQ ID NO: 636239 - DNA, 15 bp, Homo sapiens
attatttgaactttc

SEQ ID NO: 636240 - DNA, 15 bp, Homo sapiens
ttatttgaactttct

SEQ ID NO: 636241 - DNA, 15 bp, Homo sapiens
tatttgaactttctg

SEQ ID NO: 636242 - DNA, 15 bp, Homo sapiens
atttgaactttctgt

SEQ ID NO: 636243 - DNA, 15 bp, Homo sapiens
tttgaactttctgtt

SEQ ID NO: 636244 - DNA, 15 bp, Homo sapiens
ttgaactttctgttt

SEQ ID NO: 636245 - DNA, 15 bp, Homo sapiens
tgaactttctgtttc

SEQ ID NO: 636246 - DNA, 15 bp, Homo sapiens
gaactttctgtttca

SEQ ID NO: 636247 - DNA, 15 bp, Homo sapiens
aactttctgtttcat

SEQ ID NO: 636248 - DNA, 15 bp, Homo sapiens
actttctgtttcatt

SEQ ID NO: 636249 - DNA, 15 bp, Homo sapiens
ctttctgtttcattg

SEQ ID NO: 636250 - DNA, 15 bp, Homo sapiens
tttctgtttcattgt

SEQ ID NO: 636251 - DNA, 15 bp, Homo sapiens
ttctgtttcattgta

SEQ ID NO: 636252 - DNA, 15 bp, Homo sapiens
tctgtttcattgtat

SEQ ID NO: 636253 - DNA, 15 bp, Homo sapiens
ctgtttcattgtatt

SEQ ID NO: 636254 - DNA, 15 bp, Homo sapiens
tgtttcattgtattt

SEQ ID NO: 636255 - DNA, 15 bp, Homo sapiens
gtttcattgtatttt

SEQ ID NO: 636256 - DNA, 15 bp, Homo sapiens
tttcattgtatttta

SEQ ID NO: 636257 - DNA, 15 bp, Homo sapiens
ttcattgtattttat

SEQ ID NO: 636258 - DNA, 15 bp, Homo sapiens
tcattgtattttatt

SEQ ID NO: 636259 - DNA, 15 bp, Homo sapiens
cattgtattttattt

SEQ ID NO: 636260 - DNA, 15 bp, Homo sapiens
attgtattttattta

SEQ ID NO: 636261 - DNA, 15 bp, Homo sapiens
ttgtattttatttat

SEQ ID NO: 636262 - DNA, 15 bp, Homo sapiens
tgtattttatttatt

SEQ ID NO: 636263 - DNA, 15 bp, Homo sapiens
gtattttatttattt

SEQ ID NO: 636264 - DNA, 15 bp, Homo sapiens
atttatttatttttg

SEQ ID NO: 636265 - DNA, 15 bp, Homo sapiens
tttatttatttttgt

SEQ ID NO: 636266 - DNA, 15 bp, Homo sapiens
ttatttatttttgtg

SEQ ID NO: 636267 - DNA, 15 bp, Homo sapiens
tatttatttttgtga

SEQ ID NO: 636268 - DNA, 15 bp, Homo sapiens
atttatttttgtgat

SEQ ID NO: 636269 - DNA, 15 bp, Homo sapiens
tttatttttgtgatg

SEQ ID NO: 636270 - DNA, 15 bp, Homo sapiens
ttatttttgtgatgg

SEQ ID NO: 636271 - DNA, 15 bp, Homo sapiens
tatttttgtgatgga

SEQ ID NO: 636272 - DNA, 15 bp, Homo sapiens
atttttgtgatggag

SEQ ID NO: 636273 - DNA, 15 bp, Homo sapiens
tttttgtgatggagt

SEQ ID NO: 636274 - DNA, 15 bp, Homo sapiens
ttttgtgatggagtc

SEQ ID NO: 636275 - DNA, 15 bp, Homo sapiens
tttgtgatggagtct

SEQ ID NO: 636276 - DNA, 15 bp, Homo sapiens
ttgtgatggagtctc

SEQ ID NO: 636277 - DNA, 15 bp, Homo sapiens
tgtgatggagtctca

SEQ ID NO: 636278 - DNA, 15 bp, Homo sapiens
gtgatggagtctcac

SEQ ID NO: 636279 - DNA, 15 bp, Homo sapiens
tgatggagtctcact

SEQ ID NO: 636280 - DNA, 15 bp, Homo sapiens
gatggagtctcactc

SEQ ID NO: 636281 - DNA, 15 bp, Homo sapiens
atggagtctcactct

SEQ ID NO: 636282 - DNA, 15 bp, Homo sapiens
tggagtctcactctg

SEQ ID NO: 636283 - DNA, 15 bp, Homo sapiens
ggagtctcactctgc

SEQ ID NO: 636284 - DNA, 15 bp, Homo sapiens
gagtctcactctgct

SEQ ID NO: 636285 - DNA, 15 bp, Homo sapiens
agtctcactctgctg

SEQ ID NO: 636286 - DNA, 15 bp, Homo sapiens
gtctcactctgctgc

SEQ ID NO: 636287 - DNA, 15 bp, Homo sapiens
tctcactctgctgcc

SEQ ID NO: 636288 - DNA, 15 bp, Homo sapiens
ctcactctgctgccc

SEQ ID NO: 636289 - DNA, 15 bp, Homo sapiens
tcactctgctgccca

SEQ ID NO: 636290 - DNA, 15 bp, Homo sapiens
cactctgctgcccag

SEQ ID NO: 636291 - DNA, 15 bp, Homo sapiens
actctgctgcccagg

SEQ ID NO: 636292 - DNA, 15 bp, Homo sapiens
ctctgctgcccaggc

SEQ ID NO: 636293 - DNA, 15 bp, Homo sapiens
tctgctgcccaggct

SEQ ID NO: 636294 - DNA, 15 bp, Homo sapiens
ctgctgcccaggctg

SEQ ID NO: 636295 - DNA, 15 bp, Homo sapiens
tgctgcccaggctgg

SEQ ID NO: 636296 - DNA, 15 bp, Homo sapiens
gctgcccaggctgga

SEQ ID NO: 636297 - DNA, 15 bp, Homo sapiens
ctgcccaggctggag

SEQ ID NO: 636298 - DNA, 15 bp, Homo sapiens
ggctggagtgcagta

SEQ ID NO: 636299 - DNA, 15 bp, Homo sapiens
gctggagtgcagtag

SEQ ID NO: 636300 - DNA, 15 bp, Homo sapiens
ctggagtgcagtagt

SEQ ID NO: 636301 - DNA, 15 bp, Homo sapiens
tggagtgcagtagta

SEQ ID NO: 636302 - DNA, 15 bp, Homo sapiens
ggagtgcagtagtac

SEQ ID NO: 636303 - DNA, 15 bp, Homo sapiens
gagtgcagtagtacg

SEQ ID NO: 636304 - DNA, 15 bp, Homo sapiens
agtgcagtagtacga

SEQ ID NO: 636305 - DNA, 15 bp, Homo sapiens
gtgcagtagtacgat

SEQ ID NO: 636306 - DNA, 15 bp, Homo sapiens
tgcagtagtacgatc

SEQ ID NO: 636307 - DNA, 15 bp, Homo sapiens
gcagtagtacgatct

SEQ ID NO: 636308 - DNA, 15 bp, Homo sapiens
cagtagtacgatctt

SEQ ID NO: 636309 - DNA, 15 bp, Homo sapiens
agtagtacgatcttg

SEQ ID NO: 636310 - DNA, 15 bp, Homo sapiens
gtagtacgatcttgg

SEQ ID NO: 636311 - DNA, 15 bp, Homo sapiens
tagtacgatcttggc

SEQ ID NO: 636312 - DNA, 15 bp, Homo sapiens
agtacgatcttggct

SEQ ID NO: 636313 - DNA, 15 bp, Homo sapiens
gtacgatcttggctc

SEQ ID NO: 636314 - DNA, 15 bp, Homo sapiens
tacgatcttggctca

SEQ ID NO: 636315 - DNA, 15 bp, Homo sapiens
acgatcttggctcac

SEQ ID NO: 636316 - DNA, 15 bp, Homo sapiens
cgatcttggctcact

SEQ ID NO: 636317 - DNA, 15 bp, Homo sapiens
gatcttggctcactg

SEQ ID NO: 636318 - DNA, 15 bp, Homo sapiens
tcactgcaacctccc

SEQ ID NO: 636319 - DNA, 15 bp, Homo sapiens
cactgcaacctcccc

SEQ ID NO: 636320 - DNA, 15 bp, Homo sapiens
actgcaacctcccct

SEQ ID NO: 636321 - DNA, 15 bp, Homo sapiens
ctgcaacctcccctt

SEQ ID NO: 636322 - DNA, 15 bp, Homo sapiens
tgcaacctccccttc

SEQ ID NO: 636323 - DNA, 15 bp, Homo sapiens
gcaacctccccttcc

SEQ ID NO: 636324 - DNA, 15 bp, Homo sapiens
caacctccccttccc

SEQ ID NO: 636325 - DNA, 15 bp, Homo sapiens
aacctccccttccca

SEQ ID NO: 636326 - DNA, 15 bp, Homo sapiens
acctccccttcccag

SEQ ID NO: 636327 - DNA, 15 bp, Homo sapiens
cctccccttcccagt

SEQ ID NO: 636328 - DNA, 15 bp, Homo sapiens
ctccccttcccagtt

SEQ ID NO: 636329 - DNA, 15 bp, Homo sapiens
tccccttcccagttc

SEQ ID NO: 636330 - DNA, 15 bp, Homo sapiens
ccccttcccagttca

SEQ ID NO: 636331 - DNA, 15 bp, Homo sapiens
cccttcccagttcaa

SEQ ID NO: 636332 - DNA, 15 bp, Homo sapiens
ccttcccagttcaag

SEQ ID NO: 636333 - DNA, 15 bp, Homo sapiens
cttcccagttcaagt

SEQ ID NO: 636334 - DNA, 15 bp, Homo sapiens
ttcccagttcaagtg

SEQ ID NO: 636335 - DNA, 15 bp, Homo sapiens
tcccagttcaagtga

SEQ ID NO: 636336 - DNA, 15 bp, Homo sapiens
cccagttcaagtgat

SEQ ID NO: 636337 - DNA, 15 bp, Homo sapiens
ccagttcaagtgatt

SEQ ID NO: 636338 - DNA, 15 bp, Homo sapiens
cagttcaagtgattc

SEQ ID NO: 636339 - DNA, 15 bp, Homo sapiens
agttcaagtgattct

SEQ ID NO: 636340 - DNA, 15 bp, Homo sapiens
ttctcctgcctcaga

SEQ ID NO: 636341 - DNA, 15 bp, Homo sapiens
tctcctgcctcagac

SEQ ID NO: 636342 - DNA, 15 bp, Homo sapiens
ctcctgcctcagact

SEQ ID NO: 636343 - DNA, 15 bp, Homo sapiens
tcctgcctcagactc

SEQ ID NO: 636344 - DNA, 15 bp, Homo sapiens
cctgcctcagactcc

SEQ ID NO: 636345 - DNA, 15 bp, Homo sapiens
ctgcctcagactccc

SEQ ID NO: 636346 - DNA, 15 bp, Homo sapiens
tgcctcagactccca

SEQ ID NO: 636347 - DNA, 15 bp, Homo sapiens
gcctcagactcccaa

SEQ ID NO: 636348 - DNA, 15 bp, Homo sapiens
cctcagactcccaag

SEQ ID NO: 636349 - DNA, 15 bp, Homo sapiens
ctcagactcccaagt

SEQ ID NO: 636350 - DNA, 15 bp, Homo sapiens
tcagactcccaagta

SEQ ID NO: 636351 - DNA, 15 bp, Homo sapiens
cagactcccaagtag

SEQ ID NO: 636352 - DNA, 15 bp, Homo sapiens
agactcccaagtagc

SEQ ID NO: 636353 - DNA, 15 bp, Homo sapiens
gactcccaagtagct

SEQ ID NO: 636354 - DNA, 15 bp, Homo sapiens
actcccaagtagctg

SEQ ID NO: 636355 - DNA, 15 bp, Homo sapiens
gggattacaggcgca

SEQ ID NO: 636356 - DNA, 15 bp, Homo sapiens
ggattacaggcgcac

SEQ ID NO: 636357 - DNA, 15 bp, Homo sapiens
gattacaggcgcacg

SEQ ID NO: 636358 - DNA, 15 bp, Homo sapiens
attacaggcgcacgc

SEQ ID NO: 636359 - DNA, 15 bp, Homo sapiens
ttacaggcgcacgcc

SEQ ID NO: 636360 - DNA, 15 bp, Homo sapiens
tacaggcgcacgcca

SEQ ID NO: 636361 - DNA, 15 bp, Homo sapiens
acaggcgcacgccac

SEQ ID NO: 636362 - DNA, 15 bp, Homo sapiens
caggcgcacgccacc

SEQ ID NO: 636363 - DNA, 15 bp, Homo sapiens
aggcgcacgccacca

SEQ ID NO: 636364 - DNA, 15 bp, Homo sapiens
ggcgcacgccaccat

SEQ ID NO: 636365 - DNA, 15 bp, Homo sapiens
gcgcacgccaccatg

SEQ ID NO: 636366 - DNA, 15 bp, Homo sapiens
cgcacgccaccatgc

SEQ ID NO: 636367 - DNA, 15 bp, Homo sapiens
gcacgccaccatgcc

SEQ ID NO: 636368 - DNA, 15 bp, Homo sapiens
cacgccaccatgcct

SEQ ID NO: 636369 - DNA, 15 bp, Homo sapiens
acgccaccatgcctg

SEQ ID NO: 636370 - DNA, 15 bp, Homo sapiens
cgccaccatgcctgg

SEQ ID NO: 636371 - DNA, 15 bp, Homo sapiens
tggctaattttttta

SEQ ID NO: 636372 - DNA, 15 bp, Homo sapiens
ggctaatttttttat

SEQ ID NO: 636373 - DNA, 15 bp, Homo sapiens
gctaatttttttatc

SEQ ID NO: 636374 - DNA, 15 bp, Homo sapiens
ctaatttttttatct

SEQ ID NO: 636375 - DNA, 15 bp, Homo sapiens
taatttttttatctt

SEQ ID NO: 636376 - DNA, 15 bp, Homo sapiens
aatttttttatcttt

SEQ ID NO: 636377 - DNA, 15 bp, Homo sapiens
atttttttatcttta

SEQ ID NO: 636378 - DNA, 15 bp, Homo sapiens
tttttttatctttag

SEQ ID NO: 636379 - DNA, 15 bp, Homo sapiens
ttttttatctttagt

SEQ ID NO: 636380 - DNA, 15 bp, Homo sapiens
tttttatctttagta

SEQ ID NO: 636381 - DNA, 15 bp, Homo sapiens
ttttatctttagtag

SEQ ID NO: 636382 - DNA, 15 bp, Homo sapiens
tttatctttagtaga

SEQ ID NO: 636383 - DNA, 15 bp, Homo sapiens
ttatctttagtagag

SEQ ID NO: 636384 - DNA, 15 bp, Homo sapiens
tatctttagtagaga

SEQ ID NO: 636385 - DNA, 15 bp, Homo sapiens
atctttagtagagac

SEQ ID NO: 636386 - DNA, 15 bp, Homo sapiens
tctttagtagagaca

SEQ ID NO: 636387 - DNA, 15 bp, Homo sapiens
ctttagtagagacag

SEQ ID NO: 636388 - DNA, 15 bp, Homo sapiens
agagacagggtttca

SEQ ID NO: 636389 - DNA, 15 bp, Homo sapiens
gagacagggtttcac

SEQ ID NO: 636390 - DNA, 15 bp, Homo sapiens
agacagggtttcacc

SEQ ID NO: 636391 - DNA, 15 bp, Homo sapiens
gacagggtttcacca

SEQ ID NO: 636392 - DNA, 15 bp, Homo sapiens
acagggtttcaccat

SEQ ID NO: 636393 - DNA, 15 bp, Homo sapiens
cagggtttcaccatg

SEQ ID NO: 636394 - DNA, 15 bp, Homo sapiens
agggtttcaccatgt

SEQ ID NO: 636395 - DNA, 15 bp, Homo sapiens
ttcaccatgttgacc

SEQ ID NO: 636396 - DNA, 15 bp, Homo sapiens
tcaccatgttgacca

SEQ ID NO: 636397 - DNA, 15 bp, Homo sapiens
caccatgttgaccag

SEQ ID NO: 636398 - DNA, 15 bp, Homo sapiens
accatgttgaccagg

SEQ ID NO: 636399 - DNA, 15 bp, Homo sapiens
ccatgttgaccaggc

SEQ ID NO: 636400 - DNA, 15 bp, Homo sapiens
catgttgaccaggct

SEQ ID NO: 636401 - DNA, 15 bp, Homo sapiens
atgttgaccaggctg

SEQ ID NO: 636402 - DNA, 15 bp, Homo sapiens
tgttgaccaggctga

SEQ ID NO: 636403 - DNA, 15 bp, Homo sapiens
gttgaccaggctgat

SEQ ID NO: 636404 - DNA, 15 bp, Homo sapiens
ttgaccaggctgatc

SEQ ID NO: 636405 - DNA, 15 bp, Homo sapiens
tgaccaggctgatct

SEQ ID NO: 636406 - DNA, 15 bp, Homo sapiens
gaccaggctgatctc

SEQ ID NO: 636407 - DNA, 15 bp, Homo sapiens
accaggctgatctcc

SEQ ID NO: 636408 - DNA, 15 bp, Homo sapiens
ccaggctgatctcca

SEQ ID NO: 636409 - DNA, 15 bp, Homo sapiens
caggctgatctccaa

SEQ ID NO: 636410 - DNA, 15 bp, Homo sapiens
aggctgatctccaac

SEQ ID NO: 636411 - DNA, 15 bp, Homo sapiens
ggctgatctccaact

SEQ ID NO: 636412 - DNA, 15 bp, Homo sapiens
gctgatctccaactc

SEQ ID NO: 636413 - DNA, 15 bp, Homo sapiens
ctgatctccaactcc

SEQ ID NO: 636414 - DNA, 15 bp, Homo sapiens
tgatctccaactcct

SEQ ID NO: 636415 - DNA, 15 bp, Homo sapiens
gatctccaactcctg

SEQ ID NO: 636416 - DNA, 15 bp, Homo sapiens
atctccaactcctga

SEQ ID NO: 636417 - DNA, 15 bp, Homo sapiens
tctccaactcctgat

SEQ ID NO: 636418 - DNA, 15 bp, Homo sapiens
ctccaactcctgatc

SEQ ID NO: 636419 - DNA, 15 bp, Homo sapiens
tccaactcctgatct

SEQ ID NO: 636420 - DNA, 15 bp, Homo sapiens
ccaactcctgatctc

SEQ ID NO: 636421 - DNA, 15 bp, Homo sapiens
caactcctgatctca

SEQ ID NO: 636422 - DNA, 15 bp, Homo sapiens
tcctgatctcaggta

SEQ ID NO: 636423 - DNA, 15 bp, Homo sapiens
cctgatctcaggtat

SEQ ID NO: 636424 - DNA, 15 bp, Homo sapiens
ctgatctcaggtatc

SEQ ID NO: 636425 - DNA, 15 bp, Homo sapiens
tgatctcaggtatcc

SEQ ID NO: 636426 - DNA, 15 bp, Homo sapiens
gatctcaggtatcca

SEQ ID NO: 636427 - DNA, 15 bp, Homo sapiens
atctcaggtatccac

SEQ ID NO: 636428 - DNA, 15 bp, Homo sapiens
tctcaggtatccacc

SEQ ID NO: 636429 - DNA, 15 bp, Homo sapiens
ctcaggtatccacct

SEQ ID NO: 636430 - DNA, 15 bp, Homo sapiens
tcaggtatccacctg

SEQ ID NO: 636431 - DNA, 15 bp, Homo sapiens
caggtatccacctgc

SEQ ID NO: 636432 - DNA, 15 bp, Homo sapiens
aggtatccacctgcc

SEQ ID NO: 636433 - DNA, 15 bp, Homo sapiens
ggtatccacctgcct

SEQ ID NO: 636434 - DNA, 15 bp, Homo sapiens
gtatccacctgcctc

SEQ ID NO: 636435 - DNA, 15 bp, Homo sapiens
tatccacctgcctca

SEQ ID NO: 636436 - DNA, 15 bp, Homo sapiens
atccacctgcctcag

SEQ ID NO: 636437 - DNA, 15 bp, Homo sapiens
tccacctgcctcagc

SEQ ID NO: 636438 - DNA, 15 bp, Homo sapiens
ccacctgcctcagcc

SEQ ID NO: 636439 - DNA, 15 bp, Homo sapiens
cacctgcctcagcct

SEQ ID NO: 636440 - DNA, 15 bp, Homo sapiens
acctgcctcagcctc

SEQ ID NO: 636441 - DNA, 15 bp, Homo sapiens
cagcctcccaaagta

SEQ ID NO: 636442 - DNA, 15 bp, Homo sapiens
agcctcccaaagtac

SEQ ID NO: 636443 - DNA, 15 bp, Homo sapiens
gcctcccaaagtacc

SEQ ID NO: 636444 - DNA, 15 bp, Homo sapiens
cctcccaaagtaccg

SEQ ID NO: 636445 - DNA, 15 bp, Homo sapiens
ctcccaaagtaccgg

SEQ ID NO: 636446 - DNA, 15 bp, Homo sapiens
tcccaaagtaccggg

SEQ ID NO: 636447 - DNA, 15 bp, Homo sapiens
cccaaagtaccggga

SEQ ID NO: 636448 - DNA, 15 bp, Homo sapiens
ccaaagtaccgggat

SEQ ID NO: 636449 - DNA, 15 bp, Homo sapiens
caaagtaccgggatt

SEQ ID NO: 636450 - DNA, 15 bp, Homo sapiens
aaagtaccgggatta

SEQ ID NO: 636451 - DNA, 15 bp, Homo sapiens
aagtaccgggattac

SEQ ID NO: 636452 - DNA, 15 bp, Homo sapiens
agtaccgggattacg

SEQ ID NO: 636453 - DNA, 15 bp, Homo sapiens
gtaccgggattacgg

SEQ ID NO: 636454 - DNA, 15 bp, Homo sapiens
taccgggattacggg

SEQ ID NO: 636455 - DNA, 15 bp, Homo sapiens
accgggattacgggt

SEQ ID NO: 636456 - DNA, 15 bp, Homo sapiens
ccgggattacgggtg

SEQ ID NO: 636457 - DNA, 15 bp, Homo sapiens
cgggattacgggtgt

SEQ ID NO: 636458 - DNA, 15 bp, Homo sapiens
gggattacgggtgtg

SEQ ID NO: 636459 - DNA, 15 bp, Homo sapiens
ggattacgggtgtga

SEQ ID NO: 636460 - DNA, 15 bp, Homo sapiens
gattacgggtgtgag

SEQ ID NO: 636461 - DNA, 15 bp, Homo sapiens
attacgggtgtgagc

SEQ ID NO: 636462 - DNA, 15 bp, Homo sapiens
ttacgggtgtgagcc

SEQ ID NO: 636463 - DNA, 15 bp, Homo sapiens
tacgggtgtgagcca

SEQ ID NO: 636464 - DNA, 15 bp, Homo sapiens
acgggtgtgagccac

SEQ ID NO: 636465 - DNA, 15 bp, Homo sapiens
cgggtgtgagccacc

SEQ ID NO: 636466 - DNA, 15 bp, Homo sapiens
gggtgtgagccaccc

SEQ ID NO: 636467 - DNA, 15 bp, Homo sapiens
ggtgtgagccaccct

SEQ ID NO: 636468 - DNA, 15 bp, Homo sapiens
gtgtgagccaccctg

SEQ ID NO: 636469 - DNA, 15 bp, Homo sapiens
tgtgagccaccctgc

SEQ ID NO: 636470 - DNA, 15 bp, Homo sapiens
gtgagccaccctgcc

SEQ ID NO: 636471 - DNA, 15 bp, Homo sapiens
tgagccaccctgcct

SEQ ID NO: 636472 - DNA, 15 bp, Homo sapiens
gagccaccctgcctg

SEQ ID NO: 636473 - DNA, 15 bp, Homo sapiens
agccaccctgcctgg

SEQ ID NO: 636474 - DNA, 15 bp, Homo sapiens
gccaccctgcctggc

SEQ ID NO: 636475 - DNA, 15 bp, Homo sapiens
ccaccctgcctggcc

SEQ ID NO: 636476 - DNA, 15 bp, Homo sapiens
caccctgcctggcct

SEQ ID NO: 636477 - DNA, 15 bp, Homo sapiens
accctgcctggcctc

SEQ ID NO: 636478 - DNA, 15 bp, Homo sapiens
ccctgcctggcctca

SEQ ID NO: 636479 - DNA, 15 bp, Homo sapiens
cctgcctggcctcat

SEQ ID NO: 636480 - DNA, 15 bp, Homo sapiens
ctgcctggcctcatt

SEQ ID NO: 636481 - DNA, 15 bp, Homo sapiens
tgcctggcctcattt

SEQ ID NO: 636482 - DNA, 15 bp, Homo sapiens
gcctggcctcatttt

SEQ ID NO: 636483 - DNA, 15 bp, Homo sapiens
cctggcctcattttg

SEQ ID NO: 636484 - DNA, 15 bp, Homo sapiens
ctggcctcattttgt

SEQ ID NO: 636485 - DNA, 15 bp, Homo sapiens
tggcctcattttgtc

SEQ ID NO: 636486 - DNA, 15 bp, Homo sapiens
ggcctcattttgtct

SEQ ID NO: 636487 - DNA, 15 bp, Homo sapiens
gcctcattttgtctt

SEQ ID NO: 636488 - DNA, 15 bp, Homo sapiens
cctcattttgtcttt

SEQ ID NO: 636489 - DNA, 15 bp, Homo sapiens
ctcattttgtctttt

SEQ ID NO: 636490 - DNA, 15 bp, Homo sapiens
tcattttgtcttttg

SEQ ID NO: 636491 - DNA, 15 bp, Homo sapiens
cattttgtcttttgg

SEQ ID NO: 636492 - DNA, 15 bp, Homo sapiens
attttgtcttttggg

SEQ ID NO: 636493 - DNA, 15 bp, Homo sapiens
ttttgtcttttgggg

SEQ ID NO: 636494 - DNA, 15 bp, Homo sapiens
tttgtcttttggggg

SEQ ID NO: 636495 - DNA, 15 bp, Homo sapiens
ttgtcttttgggggt

SEQ ID NO: 636496 - DNA, 15 bp, Homo sapiens
tgtcttttgggggta

SEQ ID NO: 636497 - DNA, 15 bp, Homo sapiens
gtcttttgggggtat

SEQ ID NO: 636498 - DNA, 15 bp, Homo sapiens
tcttttgggggtatt

SEQ ID NO: 636499 - DNA, 15 bp, Homo sapiens
cttttgggggtattt

SEQ ID NO: 636500 - DNA, 15 bp, Homo sapiens
ttttgggggtatttt

SEQ ID NO: 636501 - DNA, 15 bp, Homo sapiens
tttgggggtattttt

SEQ ID NO: 636502 - DNA, 15 bp, Homo sapiens
ttgggggtatttttg

SEQ ID NO: 636503 - DNA, 15 bp, Homo sapiens
tgggggtatttttgt

SEQ ID NO: 636504 - DNA, 15 bp, Homo sapiens
gggggtatttttgtg

SEQ ID NO: 636505 - DNA, 15 bp, Homo sapiens
ggggtatttttgtgt

SEQ ID NO: 636506 - DNA, 15 bp, Homo sapiens
gggtatttttgtgtg

SEQ ID NO: 636507 - DNA, 15 bp, Homo sapiens
ggtatttttgtgtgc

SEQ ID NO: 636508 - DNA, 15 bp, Homo sapiens
gtatttttgtgtgca

SEQ ID NO: 636509 - DNA, 15 bp, Homo sapiens
tatttttgtgtgcag

SEQ ID NO: 636510 - DNA, 15 bp, Homo sapiens
atttttgtgtgcaga

SEQ ID NO: 636511 - DNA, 15 bp, Homo sapiens
tttttgtgtgcagat

SEQ ID NO: 636512 - DNA, 15 bp, Homo sapiens
ttttgtgtgcagata

SEQ ID NO: 636513 - DNA, 15 bp, Homo sapiens
tttgtgtgcagatat

SEQ ID NO: 636514 - DNA, 15 bp, Homo sapiens
ttgtgtgcagatata

SEQ ID NO: 636515 - DNA, 15 bp, Homo sapiens
tgtgtgcagatatat

SEQ ID NO: 636516 - DNA, 15 bp, Homo sapiens
gtgtgcagatatata

SEQ ID NO: 636517 - DNA, 15 bp, Homo sapiens
tgtgcagatatatat

SEQ ID NO: 636518 - DNA, 15 bp, Homo sapiens
gtgcagatatatatg

SEQ ID NO: 636519 - DNA, 15 bp, Homo sapiens
tgcagatatatatgt

SEQ ID NO: 636520 - DNA, 15 bp, Homo sapiens
gcagatatatatgta

SEQ ID NO: 636521 - DNA, 15 bp, Homo sapiens
cagatatatatgtat

SEQ ID NO: 636522 - DNA, 15 bp, Homo sapiens
agatatatatgtata

SEQ ID NO: 636523 - DNA, 15 bp, Homo sapiens
gatatatatgtatat

SEQ ID NO: 636524 - DNA, 15 bp, Homo sapiens
atatatatgtatata

SEQ ID NO: 636525 - DNA, 15 bp, Homo sapiens
tatatatgtatataa

SEQ ID NO: 636526 - DNA, 15 bp, Homo sapiens
atatatgtatataaa

SEQ ID NO: 636527 - DNA, 15 bp, Homo sapiens
tatatgtatataaat

SEQ ID NO: 636528 - DNA, 15 bp, Homo sapiens
atatgtatataaata

SEQ ID NO: 636529 - DNA, 15 bp, Homo sapiens
tatgtatataaatat

SEQ ID NO: 636530 - DNA, 15 bp, Homo sapiens
atgtatataaatatt

SEQ ID NO: 636531 - DNA, 15 bp, Homo sapiens
tgtatataaatattt

SEQ ID NO: 636532 - DNA, 15 bp, Homo sapiens
gtatataaatatttt

SEQ ID NO: 636533 - DNA, 15 bp, Homo sapiens
tatataaatattttt

SEQ ID NO: 636534 - DNA, 15 bp, Homo sapiens
atataaatatttttc

SEQ ID NO: 636535 - DNA, 15 bp, Homo sapiens
tataaatatttttcc

SEQ ID NO: 636536 - DNA, 15 bp, Homo sapiens
ataaatatttttccc

SEQ ID NO: 636537 - DNA, 15 bp, Homo sapiens
taaatatttttccct

SEQ ID NO: 636538 - DNA, 15 bp, Homo sapiens
aaatatttttccctc

SEQ ID NO: 636539 - DNA, 15 bp, Homo sapiens
aatatttttccctct

SEQ ID NO: 636540 - DNA, 15 bp, Homo sapiens
atatttttccctctt

SEQ ID NO: 636541 - DNA, 15 bp, Homo sapiens
tatttttccctcttt

SEQ ID NO: 636542 - DNA, 15 bp, Homo sapiens
atttttccctctttt

SEQ ID NO: 636543 - DNA, 15 bp, Homo sapiens
tttttccctcttttc

SEQ ID NO: 636544 - DNA, 15 bp, Homo sapiens
ttttccctcttttcc

SEQ ID NO: 636545 - DNA, 15 bp, Homo sapiens
tttccctcttttccc

SEQ ID NO: 636546 - DNA, 15 bp, Homo sapiens
ttccctcttttcccc

SEQ ID NO: 636547 - DNA, 15 bp, Homo sapiens
tccctcttttcccca

SEQ ID NO: 636548 - DNA, 15 bp, Homo sapiens
ccctcttttccccag

SEQ ID NO: 636549 - DNA, 15 bp, Homo sapiens
cctcttttccccagt

SEQ ID NO: 636550 - DNA, 15 bp, Homo sapiens
ctcttttccccagtt

SEQ ID NO: 636551 - DNA, 15 bp, Homo sapiens
tcttttccccagtta

SEQ ID NO: 636552 - DNA, 15 bp, Homo sapiens
cttttccccagttag

SEQ ID NO: 636553 - DNA, 15 bp, Homo sapiens
ttttccccagttagt

SEQ ID NO: 636554 - DNA, 15 bp, Homo sapiens
tttccccagttagta

SEQ ID NO: 636555 - DNA, 15 bp, Homo sapiens
ttccccagttagtat

SEQ ID NO: 636556 - DNA, 15 bp, Homo sapiens
tccccagttagtatt

SEQ ID NO: 636557 - DNA, 15 bp, Homo sapiens
ccccagttagtattt

SEQ ID NO: 636558 - DNA, 15 bp, Homo sapiens
cccagttagtatttg

SEQ ID NO: 636559 - DNA, 15 bp, Homo sapiens
ccagttagtatttga

SEQ ID NO: 636560 - DNA, 15 bp, Homo sapiens
cagttagtatttgag

SEQ ID NO: 636561 - DNA, 15 bp, Homo sapiens
agttagtatttgagc

SEQ ID NO: 636562 - DNA, 15 bp, Homo sapiens
gttagtatttgagca

SEQ ID NO: 636563 - DNA, 15 bp, Homo sapiens
ttagtatttgagcag

SEQ ID NO: 636564 - DNA, 15 bp, Homo sapiens
tagtatttgagcaga

SEQ ID NO: 636565 - DNA, 15 bp, Homo sapiens
agtatttgagcagat

SEQ ID NO: 636566 - DNA, 15 bp, Homo sapiens
gtatttgagcagatg

SEQ ID NO: 636567 - DNA, 15 bp, Homo sapiens
tatttgagcagatga

SEQ ID NO: 636568 - DNA, 15 bp, Homo sapiens
atttgagcagatgaa

SEQ ID NO: 636569 - DNA, 15 bp, Homo sapiens
tttgagcagatgaac

SEQ ID NO: 636570 - DNA, 15 bp, Homo sapiens
ttgagcagatgaact

SEQ ID NO: 636571 - DNA, 15 bp, Homo sapiens
tgagcagatgaactt

SEQ ID NO: 636572 - DNA, 15 bp, Homo sapiens
gagcagatgaacttt

SEQ ID NO: 636573 - DNA, 15 bp, Homo sapiens
agcagatgaactttg

SEQ ID NO: 636574 - DNA, 15 bp, Homo sapiens
gcagatgaactttgg

SEQ ID NO: 636575 - DNA, 15 bp, Homo sapiens
cagatgaactttgga

SEQ ID NO: 636576 - DNA, 15 bp, Homo sapiens
agatgaactttggac

SEQ ID NO: 636577 - DNA, 15 bp, Homo sapiens
gatgaactttggacc

SEQ ID NO: 636578 - DNA, 15 bp, Homo sapiens
atgaactttggaccc

SEQ ID NO: 636579 - DNA, 15 bp, Homo sapiens
tgaactttggacccg

SEQ ID NO: 636580 - DNA, 15 bp, Homo sapiens
gaactttggacccga

SEQ ID NO: 636581 - DNA, 15 bp, Homo sapiens
aactttggacccgaa

SEQ ID NO: 636582 - DNA, 15 bp, Homo sapiens
actttggacccgaat

SEQ ID NO: 636583 - DNA, 15 bp, Homo sapiens
ctttggacccgaata

SEQ ID NO: 636584 - DNA, 15 bp, Homo sapiens
tttggacccgaatac

SEQ ID NO: 636585 - DNA, 15 bp, Homo sapiens
ttggacccgaatacc

SEQ ID NO: 636586 - DNA, 15 bp, Homo sapiens
tggacccgaatacct

SEQ ID NO: 636587 - DNA, 15 bp, Homo sapiens
ggacccgaatacctg

SEQ ID NO: 636588 - DNA, 15 bp, Homo sapiens
gacccgaatacctgt

SEQ ID NO: 636589 - DNA, 15 bp, Homo sapiens
acccgaatacctgta

SEQ ID NO: 636590 - DNA, 15 bp, Homo sapiens
cccgaatacctgtat

SEQ ID NO: 636591 - DNA, 15 bp, Homo sapiens
ccgaatacctgtatt

SEQ ID NO: 636592 - DNA, 15 bp, Homo sapiens
cgaatacctgtattc

SEQ ID NO: 636593 - DNA, 15 bp, Homo sapiens
gaatacctgtattca

SEQ ID NO: 636594 - DNA, 15 bp, Homo sapiens
aatacctgtattcaa

SEQ ID NO: 636595 - DNA, 15 bp, Homo sapiens
atacctgtattcaag

SEQ ID NO: 636596 - DNA, 15 bp, Homo sapiens
tacctgtattcaagt

SEQ ID NO: 636597 - DNA, 15 bp, Homo sapiens
acctgtattcaagtc

SEQ ID NO: 636598 - DNA, 15 bp, Homo sapiens
cctgtattcaagtct

SEQ ID NO: 636599 - DNA, 15 bp, Homo sapiens
ctgtattcaagtctc

SEQ ID NO: 636600 - DNA, 15 bp, Homo sapiens
tgtattcaagtctct

SEQ ID NO: 636601 - DNA, 15 bp, Homo sapiens
gtattcaagtctcta

SEQ ID NO: 636602 - DNA, 15 bp, Homo sapiens
tattcaagtctctaa

SEQ ID NO: 636603 - DNA, 15 bp, Homo sapiens
attcaagtctctaat

SEQ ID NO: 636604 - DNA, 15 bp, Homo sapiens
ttcaagtctctaata

SEQ ID NO: 636605 - DNA, 15 bp, Homo sapiens
tcaagtctctaatac

SEQ ID NO: 636606 - DNA, 15 bp, Homo sapiens
caagtctctaatacc

SEQ ID NO: 636607 - DNA, 15 bp, Homo sapiens
aagtctctaatacca

SEQ ID NO: 636608 - DNA, 15 bp, Homo sapiens
agtctctaataccac

SEQ ID NO: 636609 - DNA, 15 bp, Homo sapiens
gtctctaataccact

SEQ ID NO: 636610 - DNA, 15 bp, Homo sapiens
tctctaataccactt

SEQ ID NO: 636611 - DNA, 15 bp, Homo sapiens
ctctaataccacttc

SEQ ID NO: 636612 - DNA, 15 bp, Homo sapiens
tctaataccacttct

SEQ ID NO: 636613 - DNA, 15 bp, Homo sapiens
ctaataccacttctt

SEQ ID NO: 636614 - DNA, 15 bp, Homo sapiens
taataccacttcttg

SEQ ID NO: 636615 - DNA, 15 bp, Homo sapiens
aataccacttcttgg

SEQ ID NO: 636616 - DNA, 15 bp, Homo sapiens
ataccacttcttggc

SEQ ID NO: 636617 - DNA, 15 bp, Homo sapiens
taccacttcttggct

SEQ ID NO: 636618 - DNA, 15 bp, Homo sapiens
accacttcttggcta

SEQ ID NO: 636619 - DNA, 15 bp, Homo sapiens
ccacttcttggctat

SEQ ID NO: 636620 - DNA, 15 bp, Homo sapiens
cacttcttggctatt

SEQ ID NO: 636621 - DNA, 15 bp, Homo sapiens
acttcttggctattt

SEQ ID NO: 636622 - DNA, 15 bp, Homo sapiens
cttcttggctatttt

SEQ ID NO: 636623 - DNA, 15 bp, Homo sapiens
ttcttggctattttc

SEQ ID NO: 636624 - DNA, 15 bp, Homo sapiens
tcttggctattttca

SEQ ID NO: 636625 - DNA, 15 bp, Homo sapiens
cttggctattttcat

SEQ ID NO: 636626 - DNA, 15 bp, Homo sapiens
ttggctattttcatt

SEQ ID NO: 636627 - DNA, 15 bp, Homo sapiens
tggctattttcattt

SEQ ID NO: 636628 - DNA, 15 bp, Homo sapiens
ggctattttcatttt

SEQ ID NO: 636629 - DNA, 15 bp, Homo sapiens
gctattttcatttta

SEQ ID NO: 636630 - DNA, 15 bp, Homo sapiens
ctattttcattttat

SEQ ID NO: 636631 - DNA, 15 bp, Homo sapiens
tattttcattttatc

SEQ ID NO: 636632 - DNA, 15 bp, Homo sapiens
attttcattttatca

SEQ ID NO: 636633 - DNA, 15 bp, Homo sapiens
ttttcattttatcaa

SEQ ID NO: 636634 - DNA, 15 bp, Homo sapiens
tttcattttatcaaa

SEQ ID NO: 636635 - DNA, 15 bp, Homo sapiens
ttcattttatcaaat

SEQ ID NO: 636636 - DNA, 15 bp, Homo sapiens
tcattttatcaaatg

SEQ ID NO: 636637 - DNA, 15 bp, Homo sapiens
cattttatcaaatgg

SEQ ID NO: 636638 - DNA, 15 bp, Homo sapiens
attttatcaaatggc

SEQ ID NO: 636639 - DNA, 15 bp, Homo sapiens
ttttatcaaatggcc

SEQ ID NO: 636640 - DNA, 15 bp, Homo sapiens
tttatcaaatggcct

SEQ ID NO: 636641 - DNA, 15 bp, Homo sapiens
ttatcaaatggcctc

SEQ ID NO: 636642 - DNA, 15 bp, Homo sapiens
tatcaaatggcctct

SEQ ID NO: 636643 - DNA, 15 bp, Homo sapiens
atcaaatggcctctt

SEQ ID NO: 636644 - DNA, 15 bp, Homo sapiens
tcaaatggcctctta

SEQ ID NO: 636645 - DNA, 15 bp, Homo sapiens
caaatggcctcttat

SEQ ID NO: 636646 - DNA, 15 bp, Homo sapiens
aaatggcctcttatc

SEQ ID NO: 636647 - DNA, 15 bp, Homo sapiens
aatggcctcttatcc

SEQ ID NO: 636648 - DNA, 15 bp, Homo sapiens
atggcctcttatcct

SEQ ID NO: 636649 - DNA, 15 bp, Homo sapiens
tggcctcttatcctc

SEQ ID NO: 636650 - DNA, 15 bp, Homo sapiens
ggcctcttatcctcg

SEQ ID NO: 636651 - DNA, 15 bp, Homo sapiens
gcctcttatcctcgt

SEQ ID NO: 636652 - DNA, 15 bp, Homo sapiens
cctcttatcctcgtt

SEQ ID NO: 636653 - DNA, 15 bp, Homo sapiens
ctcttatcctcgttt

SEQ ID NO: 636654 - DNA, 15 bp, Homo sapiens
tcttatcctcgtttt

SEQ ID NO: 636655 - DNA, 15 bp, Homo sapiens
cttatcctcgttttt

SEQ ID NO: 636656 - DNA, 15 bp, Homo sapiens
ttatcctcgtttttc

SEQ ID NO: 636657 - DNA, 15 bp, Homo sapiens
tatcctcgtttttct

SEQ ID NO: 636658 - DNA, 15 bp, Homo sapiens
atcctcgtttttctc

SEQ ID NO: 636659 - DNA, 15 bp, Homo sapiens
tcctcgtttttctca

SEQ ID NO: 636660 - DNA, 15 bp, Homo sapiens
cctcgtttttctcat

SEQ ID NO: 636661 - DNA, 15 bp, Homo sapiens
ctcgtttttctcatt

SEQ ID NO: 636662 - DNA, 15 bp, Homo sapiens
tcgtttttctcattt

SEQ ID NO: 636663 - DNA, 15 bp, Homo sapiens
cgtttttctcattta

SEQ ID NO: 636664 - DNA, 15 bp, Homo sapiens
gtttttctcatttat

SEQ ID NO: 636665 - DNA, 15 bp, Homo sapiens
tttttctcatttatt

SEQ ID NO: 636666 - DNA, 15 bp, Homo sapiens
ttttctcatttatta

SEQ ID NO: 636667 - DNA, 15 bp, Homo sapiens
tttctcatttattaa

SEQ ID NO: 636668 - DNA, 15 bp, Homo sapiens
ttctcatttattaag

SEQ ID NO: 636669 - DNA, 15 bp, Homo sapiens
tctcatttattaagt

SEQ ID NO: 636670 - DNA, 15 bp, Homo sapiens
ctcatttattaagta

SEQ ID NO: 636671 - DNA, 15 bp, Homo sapiens
tcatttattaagtag

SEQ ID NO: 636672 - DNA, 15 bp, Homo sapiens
catttattaagtaga

SEQ ID NO: 636673 - DNA, 15 bp, Homo sapiens
atttattaagtagag

SEQ ID NO: 636674 - DNA, 15 bp, Homo sapiens
tttattaagtagaga

SEQ ID NO: 636675 - DNA, 15 bp, Homo sapiens
ttattaagtagagat

SEQ ID NO: 636676 - DNA, 15 bp, Homo sapiens
tattaagtagagatg

SEQ ID NO: 636677 - DNA, 15 bp, Homo sapiens
attaagtagagatgt

SEQ ID NO: 636678 - DNA, 15 bp, Homo sapiens
ttaagtagagatgta

SEQ ID NO: 636679 - DNA, 15 bp, Homo sapiens
taagtagagatgtaa

SEQ ID NO: 636680 - DNA, 15 bp, Homo sapiens
aagtagagatgtaac

SEQ ID NO: 636681 - DNA, 15 bp, Homo sapiens
agtagagatgtaact

SEQ ID NO: 636682 - DNA, 15 bp, Homo sapiens
gtagagatgtaacta

SEQ ID NO: 636683 - DNA, 15 bp, Homo sapiens
tagagatgtaactac

SEQ ID NO: 636684 - DNA, 15 bp, Homo sapiens
agagatgtaactact

SEQ ID NO: 636685 - DNA, 15 bp, Homo sapiens
gagatgtaactactt

SEQ ID NO: 636686 - DNA, 15 bp, Homo sapiens
agatgtaactacttg

SEQ ID NO: 636687 - DNA, 15 bp, Homo sapiens
gatgtaactacttga

SEQ ID NO: 636688 - DNA, 15 bp, Homo sapiens
atgtaactacttgat

SEQ ID NO: 636689 - DNA, 15 bp, Homo sapiens
tgtaactacttgata

SEQ ID NO: 636690 - DNA, 15 bp, Homo sapiens
gtaactacttgatat

SEQ ID NO: 636691 - DNA, 15 bp, Homo sapiens
taactacttgatata

SEQ ID NO: 636692 - DNA, 15 bp, Homo sapiens
aactacttgatataa

SEQ ID NO: 636693 - DNA, 15 bp, Homo sapiens
actacttgatataat

SEQ ID NO: 636694 - DNA, 15 bp, Homo sapiens
ctacttgatataatt

SEQ ID NO: 636695 - DNA, 15 bp, Homo sapiens
tacttgatataattc

SEQ ID NO: 636696 - DNA, 15 bp, Homo sapiens
acttgatataattca

SEQ ID NO: 636697 - DNA, 15 bp, Homo sapiens
cttgatataattcaa

SEQ ID NO: 636698 - DNA, 15 bp, Homo sapiens
ttgatataattcaaa

SEQ ID NO: 636699 - DNA, 15 bp, Homo sapiens
tgatataattcaaaa

SEQ ID NO: 636700 - DNA, 15 bp, Homo sapiens
gatataattcaaaaa

SEQ ID NO: 636701 - DNA, 15 bp, Homo sapiens
atataattcaaaaac

SEQ ID NO: 636702 - DNA, 15 bp, Homo sapiens
tataattcaaaaact

SEQ ID NO: 636703 - DNA, 15 bp, Homo sapiens
ataattcaaaaactc

SEQ ID NO: 636704 - DNA, 15 bp, Homo sapiens
taattcaaaaactca

SEQ ID NO: 636705 - DNA, 15 bp, Homo sapiens
aattcaaaaactcaa

SEQ ID NO: 636706 - DNA, 15 bp, Homo sapiens
attcaaaaactcaat

SEQ ID NO: 636707 - DNA, 15 bp, Homo sapiens
ttcaaaaactcaata

SEQ ID NO: 636708 - DNA, 15 bp, Homo sapiens
tcaaaaactcaataa

SEQ ID NO: 636709 - DNA, 15 bp, Homo sapiens
caaaaactcaataat

SEQ ID NO: 636710 - DNA, 15 bp, Homo sapiens
aaaaactcaataatg

SEQ ID NO: 636711 - DNA, 15 bp, Homo sapiens
aaaactcaataatgg

SEQ ID NO: 636712 - DNA, 15 bp, Homo sapiens
aaactcaataatggc

SEQ ID NO: 636713 - DNA, 15 bp, Homo sapiens
aactcaataatggca

SEQ ID NO: 636714 - DNA, 15 bp, Homo sapiens
actcaataatggcat

SEQ ID NO: 636715 - DNA, 15 bp, Homo sapiens
ctcaataatggcatt

SEQ ID NO: 636716 - DNA, 15 bp, Homo sapiens
tcaataatggcattc

SEQ ID NO: 636717 - DNA, 15 bp, Homo sapiens
caataatggcattct

SEQ ID NO: 636718 - DNA, 15 bp, Homo sapiens
aataatggcattctt

SEQ ID NO: 636719 - DNA, 15 bp, Homo sapiens
ataatggcattcttt

SEQ ID NO: 636720 - DNA, 15 bp, Homo sapiens
taatggcattctttt

SEQ ID NO: 636721 - DNA, 15 bp, Homo sapiens
aatggcattcttttg

SEQ ID NO: 636722 - DNA, 15 bp, Homo sapiens
atggcattcttttgt

SEQ ID NO: 636723 - DNA, 15 bp, Homo sapiens
tggcattcttttgtt

SEQ ID NO: 636724 - DNA, 15 bp, Homo sapiens
ggcattcttttgttt

SEQ ID NO: 636725 - DNA, 15 bp, Homo sapiens
gcattcttttgtttt

SEQ ID NO: 636726 - DNA, 15 bp, Homo sapiens
cattcttttgttttt

SEQ ID NO: 636727 - DNA, 15 bp, Homo sapiens
attcttttgtttttt

SEQ ID NO: 636728 - DNA, 15 bp, Homo sapiens
ttcttttgtttttta

SEQ ID NO: 636729 - DNA, 15 bp, Homo sapiens
tcttttgttttttag

SEQ ID NO: 636730 - DNA, 15 bp, Homo sapiens
cttttgttttttaga

SEQ ID NO: 636731 - DNA, 15 bp, Homo sapiens
ttttgttttttagac

SEQ ID NO: 636732 - DNA, 15 bp, Homo sapiens
tttgttttttagact

SEQ ID NO: 636733 - DNA, 15 bp, Homo sapiens
ttgttttttagactc

SEQ ID NO: 636734 - DNA, 15 bp, Homo sapiens
tgttttttagactct

SEQ ID NO: 636735 - DNA, 15 bp, Homo sapiens
gttttttagactcta

SEQ ID NO: 636736 - DNA, 15 bp, Homo sapiens
ttttttagactctag

SEQ ID NO: 636737 - DNA, 15 bp, Homo sapiens
tttttagactctagt

SEQ ID NO: 636738 - DNA, 15 bp, Homo sapiens
ttttagactctagtg

SEQ ID NO: 636739 - DNA, 15 bp, Homo sapiens
tttagactctagtgt

SEQ ID NO: 636740 - DNA, 15 bp, Homo sapiens
ttagactctagtgtc

SEQ ID NO: 636741 - DNA, 15 bp, Homo sapiens
tagactctagtgtct

SEQ ID NO: 636742 - DNA, 15 bp, Homo sapiens
agactctagtgtctg

SEQ ID NO: 636743 - DNA, 15 bp, Homo sapiens
gactctagtgtctgt

SEQ ID NO: 636744 - DNA, 15 bp, Homo sapiens
actctagtgtctgta

SEQ ID NO: 636745 - DNA, 15 bp, Homo sapiens
ctctagtgtctgtac

SEQ ID NO: 636746 - DNA, 15 bp, Homo sapiens
tctagtgtctgtact

SEQ ID NO: 636747 - DNA, 15 bp, Homo sapiens
ctagtgtctgtactc

SEQ ID NO: 636748 - DNA, 15 bp, Homo sapiens
tagtgtctgtactcg

SEQ ID NO: 636749 - DNA, 15 bp, Homo sapiens
agtgtctgtactcgt

SEQ ID NO: 636750 - DNA, 15 bp, Homo sapiens
gtgtctgtactcgtt

SEQ ID NO: 636751 - DNA, 15 bp, Homo sapiens
tgtctgtactcgttg

SEQ ID NO: 636752 - DNA, 15 bp, Homo sapiens
gtctgtactcgttgt

SEQ ID NO: 636753 - DNA, 15 bp, Homo sapiens
tctgtactcgttgta

SEQ ID NO: 636754 - DNA, 15 bp, Homo sapiens
ctgtactcgttgtac

SEQ ID NO: 636755 - DNA, 15 bp, Homo sapiens
tgtactcgttgtacc

SEQ ID NO: 636756 - DNA, 15 bp, Homo sapiens
gtactcgttgtacca

SEQ ID NO: 636757 - DNA, 15 bp, Homo sapiens
tactcgttgtaccat

SEQ ID NO: 636758 - DNA, 15 bp, Homo sapiens
actcgttgtaccatg

SEQ ID NO: 636759 - DNA, 15 bp, Homo sapiens
ctcgttgtaccatgc

SEQ ID NO: 636760 - DNA, 15 bp, Homo sapiens
tcgttgtaccatgct

SEQ ID NO: 636761 - DNA, 15 bp, Homo sapiens
cgttgtaccatgctg

SEQ ID NO: 636762 - DNA, 15 bp, Homo sapiens
gttgtaccatgctgg

SEQ ID NO: 636763 - DNA, 15 bp, Homo sapiens
ttgtaccatgctggg

SEQ ID NO: 636764 - DNA, 15 bp, Homo sapiens
tgtaccatgctggga

SEQ ID NO: 636765 - DNA, 15 bp, Homo sapiens
gtaccatgctgggat

SEQ ID NO: 636766 - DNA, 15 bp, Homo sapiens
taccatgctgggatt

SEQ ID NO: 636767 - DNA, 15 bp, Homo sapiens
accatgctgggattc

SEQ ID NO: 636768 - DNA, 15 bp, Homo sapiens
ccatgctgggattca

SEQ ID NO: 636769 - DNA, 15 bp, Homo sapiens
catgctgggattcat

SEQ ID NO: 636770 - DNA, 15 bp, Homo sapiens
atgctgggattcatt

SEQ ID NO: 636771 - DNA, 15 bp, Homo sapiens
tgctgggattcattt

SEQ ID NO: 636772 - DNA, 15 bp, Homo sapiens
gctgggattcatttg

SEQ ID NO: 636773 - DNA, 15 bp, Homo sapiens
ctgggattcatttga

SEQ ID NO: 636774 - DNA, 15 bp, Homo sapiens
tgggattcatttgaa

SEQ ID NO: 636775 - DNA, 15 bp, Homo sapiens
gggattcatttgaac

SEQ ID NO: 636776 - DNA, 15 bp, Homo sapiens
ggattcatttgaaca

SEQ ID NO: 636777 - DNA, 15 bp, Homo sapiens
gattcatttgaacaa

SEQ ID NO: 636778 - DNA, 15 bp, Homo sapiens
attcatttgaacaat

SEQ ID NO: 636779 - DNA, 15 bp, Homo sapiens
ttcatttgaacaatt

SEQ ID NO: 636780 - DNA, 15 bp, Homo sapiens
tcatttgaacaattg

SEQ ID NO: 636781 - DNA, 15 bp, Homo sapiens
catttgaacaattgc

SEQ ID NO: 636782 - DNA, 15 bp, Homo sapiens
atttgaacaattgca

SEQ ID NO: 636783 - DNA, 15 bp, Homo sapiens
tttgaacaattgcat

SEQ ID NO: 636784 - DNA, 15 bp, Homo sapiens
ttgaacaattgcatg

SEQ ID NO: 636785 - DNA, 15 bp, Homo sapiens
tgaacaattgcatgg

SEQ ID NO: 636786 - DNA, 15 bp, Homo sapiens
gaacaattgcatggc

SEQ ID NO: 636787 - DNA, 15 bp, Homo sapiens
aacaattgcatggct

SEQ ID NO: 636788 - DNA, 15 bp, Homo sapiens
acaattgcatggctt

SEQ ID NO: 636789 - DNA, 15 bp, Homo sapiens
caattgcatggcttt

SEQ ID NO: 636790 - DNA, 15 bp, Homo sapiens
aattgcatggctttt

SEQ ID NO: 636791 - DNA, 15 bp, Homo sapiens
attgcatggcttttt

SEQ ID NO: 636792 - DNA, 15 bp, Homo sapiens
ttgcatggctttttt

SEQ ID NO: 636793 - DNA, 15 bp, Homo sapiens
tgcatggctttttta

SEQ ID NO: 636794 - DNA, 15 bp, Homo sapiens
gcatggcttttttag

SEQ ID NO: 636795 - DNA, 15 bp, Homo sapiens
catggcttttttagt

SEQ ID NO: 636796 - DNA, 15 bp, Homo sapiens
atggcttttttagtg

SEQ ID NO: 636797 - DNA, 15 bp, Homo sapiens
tggcttttttagtgt

SEQ ID NO: 636798 - DNA, 15 bp, Homo sapiens
ggcttttttagtgta

SEQ ID NO: 636799 - DNA, 15 bp, Homo sapiens
gcttttttagtgtat

SEQ ID NO: 636800 - DNA, 15 bp, Homo sapiens
cttttttagtgtatt

SEQ ID NO: 636801 - DNA, 15 bp, Homo sapiens
ttttttagtgtatta

SEQ ID NO: 636802 - DNA, 15 bp, Homo sapiens
tttttagtgtattat

SEQ ID NO: 636803 - DNA, 15 bp, Homo sapiens
ttttagtgtattatt

SEQ ID NO: 636804 - DNA, 15 bp, Homo sapiens
tttagtgtattatta

SEQ ID NO: 636805 - DNA, 15 bp, Homo sapiens
ttagtgtattattaa

SEQ ID NO: 636806 - DNA, 15 bp, Homo sapiens
tagtgtattattaaa

SEQ ID NO: 636807 - DNA, 15 bp, Homo sapiens
agtgtattattaaat

SEQ ID NO: 636808 - DNA, 15 bp, Homo sapiens
gtgtattattaaatt

SEQ ID NO: 636809 - DNA, 15 bp, Homo sapiens
tgtattattaaattt

SEQ ID NO: 636810 - DNA, 15 bp, Homo sapiens
gtattattaaatttg

SEQ ID NO: 636811 - DNA, 15 bp, Homo sapiens
tattattaaatttgc

SEQ ID NO: 636812 - DNA, 15 bp, Homo sapiens
attattaaatttgca

SEQ ID NO: 636813 - DNA, 15 bp, Homo sapiens
ttattaaatttgcag

SEQ ID NO: 636814 - DNA, 15 bp, Homo sapiens
tattaaatttgcagt

SEQ ID NO: 636815 - DNA, 15 bp, Homo sapiens
attaaatttgcagtt

SEQ ID NO: 636816 - DNA, 15 bp, Homo sapiens
ttaaatttgcagttt

SEQ ID NO: 636817 - DNA, 15 bp, Homo sapiens
taaatttgcagttta

SEQ ID NO: 636818 - DNA, 15 bp, Homo sapiens
aaatttgcagtttac

SEQ ID NO: 636819 - DNA, 15 bp, Homo sapiens
aatttgcagtttact

SEQ ID NO: 636820 - DNA, 15 bp, Homo sapiens
atttgcagtttactt

SEQ ID NO: 636821 - DNA, 15 bp, Homo sapiens
tttgcagtttactta

SEQ ID NO: 636822 - DNA, 15 bp, Homo sapiens
ttgcagtttacttag

SEQ ID NO: 636823 - DNA, 15 bp, Homo sapiens
tgcagtttacttaga

SEQ ID NO: 636824 - DNA, 15 bp, Homo sapiens
gcagtttacttagaa

SEQ ID NO: 636825 - DNA, 15 bp, Homo sapiens
cagtttacttagaat

SEQ ID NO: 636826 - DNA, 15 bp, Homo sapiens
agtttacttagaatt

SEQ ID NO: 636827 - DNA, 15 bp, Homo sapiens
gtttacttagaattt

SEQ ID NO: 636828 - DNA, 15 bp, Homo sapiens
tttacttagaattta

SEQ ID NO: 636829 - DNA, 15 bp, Homo sapiens
ttacttagaatttac

SEQ ID NO: 636830 - DNA, 15 bp, Homo sapiens
tacttagaatttact

SEQ ID NO: 636831 - DNA, 15 bp, Homo sapiens
acttagaatttactg

SEQ ID NO: 636832 - DNA, 15 bp, Homo sapiens
cttagaatttactgg

SEQ ID NO: 636833 - DNA, 15 bp, Homo sapiens
ttagaatttactggg

SEQ ID NO: 636834 - DNA, 15 bp, Homo sapiens
tagaatttactggga

SEQ ID NO: 636835 - DNA, 15 bp, Homo sapiens
agaatttactgggac

SEQ ID NO: 636836 - DNA, 15 bp, Homo sapiens
gaatttactgggacc

SEQ ID NO: 636837 - DNA, 15 bp, Homo sapiens
aatttactgggacct

SEQ ID NO: 636838 - DNA, 15 bp, Homo sapiens
atttactgggacctc

SEQ ID NO: 636839 - DNA, 15 bp, Homo sapiens
tttactgggacctca

SEQ ID NO: 636840 - DNA, 15 bp, Homo sapiens
ttactgggacctcat

SEQ ID NO: 636841 - DNA, 15 bp, Homo sapiens
tactgggacctcata

SEQ ID NO: 636842 - DNA, 15 bp, Homo sapiens
actgggacctcatac

SEQ ID NO: 636843 - DNA, 15 bp, Homo sapiens
ctgggacctcataca

SEQ ID NO: 636844 - DNA, 15 bp, Homo sapiens
tgggacctcatacaa

SEQ ID NO: 636845 - DNA, 15 bp, Homo sapiens
gggacctcatacaaa

SEQ ID NO: 636846 - DNA, 15 bp, Homo sapiens
ggacctcatacaaat

SEQ ID NO: 636847 - DNA, 15 bp, Homo sapiens
gacctcatacaaatg

SEQ ID NO: 636848 - DNA, 15 bp, Homo sapiens
acctcatacaaatgg

SEQ ID NO: 636849 - DNA, 15 bp, Homo sapiens
cctcatacaaatggg

SEQ ID NO: 636850 - DNA, 15 bp, Homo sapiens
ctcatacaaatggga

SEQ ID NO: 636851 - DNA, 15 bp, Homo sapiens
tcatacaaatgggaa

SEQ ID NO: 636852 - DNA, 15 bp, Homo sapiens
catacaaatgggaaa

SEQ ID NO: 636853 - DNA, 15 bp, Homo sapiens
atacaaatgggaaaa

SEQ ID NO: 636854 - DNA, 15 bp, Homo sapiens
tacaaatgggaaaaa

SEQ ID NO: 636855 - DNA, 15 bp, Homo sapiens
acaaatgggaaaaaa

SEQ ID NO: 636856 - DNA, 15 bp, Homo sapiens
caaatgggaaaaaaa

SEQ ID NO: 636857 - DNA, 15 bp, Homo sapiens
aaatgggaaaaaaac

SEQ ID NO: 636858 - DNA, 15 bp, Homo sapiens
aatgggaaaaaaaca

SEQ ID NO: 636859 - DNA, 15 bp, Homo sapiens
atgggaaaaaaacat

SEQ ID NO: 636860 - DNA, 15 bp, Homo sapiens
tgggaaaaaaacata

SEQ ID NO: 636861 - DNA, 15 bp, Homo sapiens
gggaaaaaaacataa

SEQ ID NO: 636862 - DNA, 15 bp, Homo sapiens
ggaaaaaaacataac

SEQ ID NO: 636863 - DNA, 15 bp, Homo sapiens
gaaaaaaacataact

SEQ ID NO: 636864 - DNA, 15 bp, Homo sapiens
aaaaaaacataactg

SEQ ID NO: 636865 - DNA, 15 bp, Homo sapiens
aaaaaacataactgt

SEQ ID NO: 636866 - DNA, 15 bp, Homo sapiens
aaaaacataactgtg

SEQ ID NO: 636867 - DNA, 15 bp, Homo sapiens
aaaacataactgtgt

SEQ ID NO: 636868 - DNA, 15 bp, Homo sapiens
aaacataactgtgtt

SEQ ID NO: 636869 - DNA, 15 bp, Homo sapiens
aacataactgtgtta

SEQ ID NO: 636870 - DNA, 15 bp, Homo sapiens
acataactgtgttac

SEQ ID NO: 636871 - DNA, 15 bp, Homo sapiens
cataactgtgttact

SEQ ID NO: 636872 - DNA, 15 bp, Homo sapiens
ataactgtgttactc

SEQ ID NO: 636873 - DNA, 15 bp, Homo sapiens
taactgtgttactca

SEQ ID NO: 636874 - DNA, 15 bp, Homo sapiens
aactgtgttactcat

SEQ ID NO: 636875 - DNA, 15 bp, Homo sapiens
actgtgttactcatt

SEQ ID NO: 636876 - DNA, 15 bp, Homo sapiens
ctgtgttactcattt

SEQ ID NO: 636877 - DNA, 15 bp, Homo sapiens
tgtgttactcatttg

SEQ ID NO: 636878 - DNA, 15 bp, Homo sapiens
gtgttactcatttgc

SEQ ID NO: 636879 - DNA, 15 bp, Homo sapiens
tgttactcatttgct

SEQ ID NO: 636880 - DNA, 15 bp, Homo sapiens
gttactcatttgctg

SEQ ID NO: 636881 - DNA, 15 bp, Homo sapiens
ttactcatttgctgt

SEQ ID NO: 636882 - DNA, 15 bp, Homo sapiens
tactcatttgctgtg

SEQ ID NO: 636883 - DNA, 15 bp, Homo sapiens
actcatttgctgtgt

SEQ ID NO: 636884 - DNA, 15 bp, Homo sapiens
ctcatttgctgtgtg

SEQ ID NO: 636885 - DNA, 15 bp, Homo sapiens
tcatttgctgtgtgc

SEQ ID NO: 636886 - DNA, 15 bp, Homo sapiens
catttgctgtgtgcc

SEQ ID NO: 636887 - DNA, 15 bp, Homo sapiens
atttgctgtgtgcct

SEQ ID NO: 636888 - DNA, 15 bp, Homo sapiens
tttgctgtgtgcctt

SEQ ID NO: 636889 - DNA, 15 bp, Homo sapiens
ttgctgtgtgccttt

SEQ ID NO: 636890 - DNA, 15 bp, Homo sapiens
tgctgtgtgcctttg

SEQ ID NO: 636891 - DNA, 15 bp, Homo sapiens
gctgtgtgcctttgg

SEQ ID NO: 636892 - DNA, 15 bp, Homo sapiens
ctgtgtgcctttgga

SEQ ID NO: 636893 - DNA, 15 bp, Homo sapiens
tgtgtgcctttggat

SEQ ID NO: 636894 - DNA, 15 bp, Homo sapiens
gtgtgcctttggatt

SEQ ID NO: 636895 - DNA, 15 bp, Homo sapiens
tgtgcctttggattg

SEQ ID NO: 636896 - DNA, 15 bp, Homo sapiens
gtgcctttggattga

SEQ ID NO: 636897 - DNA, 15 bp, Homo sapiens
tgcctttggattgac

SEQ ID NO: 636898 - DNA, 15 bp, Homo sapiens
gcctttggattgacc

SEQ ID NO: 636899 - DNA, 15 bp, Homo sapiens
cctttggattgaccc

SEQ ID NO: 636900 - DNA, 15 bp, Homo sapiens
ctttggattgaccct

SEQ ID NO: 636901 - DNA, 15 bp, Homo sapiens
tttggattgacccta

SEQ ID NO: 636902 - DNA, 15 bp, Homo sapiens
ttggattgaccctat

SEQ ID NO: 636903 - DNA, 15 bp, Homo sapiens
tggattgaccctatt

SEQ ID NO: 636904 - DNA, 15 bp, Homo sapiens
ggattgaccctattt

SEQ ID NO: 636905 - DNA, 15 bp, Homo sapiens
gattgaccctatttt

SEQ ID NO: 636906 - DNA, 15 bp, Homo sapiens
attgaccctattttt

SEQ ID NO: 636907 - DNA, 15 bp, Homo sapiens
ttgaccctatttttt

SEQ ID NO: 636908 - DNA, 15 bp, Homo sapiens
tgaccctattttttg

SEQ ID NO: 636909 - DNA, 15 bp, Homo sapiens
gaccctattttttgt

SEQ ID NO: 636910 - DNA, 15 bp, Homo sapiens
accctattttttgta

SEQ ID NO: 636911 - DNA, 15 bp, Homo sapiens
ccctattttttgtat

SEQ ID NO: 636912 - DNA, 15 bp, Homo sapiens
cctattttttgtatt

SEQ ID NO: 636913 - DNA, 15 bp, Homo sapiens
ctattttttgtattc

SEQ ID NO: 636914 - DNA, 15 bp, Homo sapiens
tattttttgtattca

SEQ ID NO: 636915 - DNA, 15 bp, Homo sapiens
attttttgtattcat

SEQ ID NO: 636916 - DNA, 15 bp, Homo sapiens
ttttttgtattcatt

SEQ ID NO: 636917 - DNA, 15 bp, Homo sapiens
tttttgtattcattt

SEQ ID NO: 636918 - DNA, 15 bp, Homo sapiens
ttttgtattcatttt

SEQ ID NO: 636919 - DNA, 15 bp, Homo sapiens
tttgtattcattttc

SEQ ID NO: 636920 - DNA, 15 bp, Homo sapiens
ttgtattcattttct

SEQ ID NO: 636921 - DNA, 15 bp, Homo sapiens
tgtattcattttctc

SEQ ID NO: 636922 - DNA, 15 bp, Homo sapiens
gtattcattttctcc

SEQ ID NO: 636923 - DNA, 15 bp, Homo sapiens
tattcattttctccc

SEQ ID NO: 636924 - DNA, 15 bp, Homo sapiens
attcattttctcccc

SEQ ID NO: 636925 - DNA, 15 bp, Homo sapiens
ttcattttctcccca

SEQ ID NO: 636926 - DNA, 15 bp, Homo sapiens
tcattttctccccat

SEQ ID NO: 636927 - DNA, 15 bp, Homo sapiens
cattttctccccatg

SEQ ID NO: 636928 - DNA, 15 bp, Homo sapiens
attttctccccatgt

SEQ ID NO: 636929 - DNA, 15 bp, Homo sapiens
ttttctccccatgtc

SEQ ID NO: 636930 - DNA, 15 bp, Homo sapiens
tttctccccatgtcc

SEQ ID NO: 636931 - DNA, 15 bp, Homo sapiens
ttctccccatgtcct

SEQ ID NO: 636932 - DNA, 15 bp, Homo sapiens
tctccccatgtcctg

SEQ ID NO: 636933 - DNA, 15 bp, Homo sapiens
ctccccatgtcctga

SEQ ID NO: 636934 - DNA, 15 bp, Homo sapiens
tccccatgtcctgag

SEQ ID NO: 636935 - DNA, 15 bp, Homo sapiens
ccccatgtcctgagt

SEQ ID NO: 636936 - DNA, 15 bp, Homo sapiens
cccatgtcctgagtt

SEQ ID NO: 636937 - DNA, 15 bp, Homo sapiens
ccatgtcctgagttc

SEQ ID NO: 636938 - DNA, 15 bp, Homo sapiens
catgtcctgagttcc

SEQ ID NO: 636939 - DNA, 15 bp, Homo sapiens
atgtcctgagttcca

SEQ ID NO: 636940 - DNA, 15 bp, Homo sapiens
tgtcctgagttccac

SEQ ID NO: 636941 - DNA, 15 bp, Homo sapiens
gtcctgagttccact

SEQ ID NO: 636942 - DNA, 15 bp, Homo sapiens
tcctgagttccactt

SEQ ID NO: 636943 - DNA, 15 bp, Homo sapiens
cctgagttccacttt

SEQ ID NO: 636944 - DNA, 15 bp, Homo sapiens
ctgagttccactttg

SEQ ID NO: 636945 - DNA, 15 bp, Homo sapiens
tgagttccactttga

SEQ ID NO: 636946 - DNA, 15 bp, Homo sapiens
gagttccactttgaa

SEQ ID NO: 636947 - DNA, 15 bp, Homo sapiens
agttccactttgaat

SEQ ID NO: 636948 - DNA, 15 bp, Homo sapiens
gttccactttgaata

SEQ ID NO: 636949 - DNA, 15 bp, Homo sapiens
ttccactttgaataa

SEQ ID NO: 636950 - DNA, 15 bp, Homo sapiens
tccactttgaataaa

SEQ ID NO: 636951 - DNA, 15 bp, Homo sapiens
ccactttgaataaaa

SEQ ID NO: 636952 - DNA, 15 bp, Homo sapiens
cactttgaataaaaa

SEQ ID NO: 636953 - DNA, 15 bp, Homo sapiens
actttgaataaaaag

SEQ ID NO: 636954 - DNA, 15 bp, Homo sapiens
ctttgaataaaaagt

SEQ ID NO: 636955 - DNA, 15 bp, Homo sapiens
tttgaataaaaagta

SEQ ID NO: 636956 - DNA, 15 bp, Homo sapiens
ttgaataaaaagtaa

SEQ ID NO: 636957 - DNA, 15 bp, Homo sapiens
tgaataaaaagtaat

SEQ ID NO: 636958 - DNA, 15 bp, Homo sapiens
gaataaaaagtaatt

SEQ ID NO: 636959 - DNA, 15 bp, Homo sapiens
aataaaaagtaattt

SEQ ID NO: 636960 - DNA, 15 bp, Homo sapiens
ataaaaagtaatttt

SEQ ID NO: 636961 - DNA, 15 bp, Homo sapiens
taaaaagtaattttt

SEQ ID NO: 636962 - DNA, 15 bp, Homo sapiens
aaaaagtaatttttt

SEQ ID NO: 636963 - DNA, 15 bp, Homo sapiens
aaaagtaattttttt

SEQ ID NO: 636964 - DNA, 15 bp, Homo sapiens
aaagtaatttttttc

SEQ ID NO: 636965 - DNA, 15 bp, Homo sapiens
aagtaatttttttcc

SEQ ID NO: 636966 - DNA, 15 bp, Homo sapiens
agtaatttttttcct

SEQ ID NO: 636967 - DNA, 15 bp, Homo sapiens
gtaatttttttcctg

SEQ ID NO: 636968 - DNA, 15 bp, Homo sapiens
taatttttttcctgc

SEQ ID NO: 636969 - DNA, 15 bp, Homo sapiens
aatttttttcctgcc

SEQ ID NO: 636970 - DNA, 15 bp, Homo sapiens
atttttttcctgcct

SEQ ID NO: 636971 - DNA, 15 bp, Homo sapiens
tttttttcctgcctg

SEQ ID NO: 636972 - DNA, 15 bp, Homo sapiens
ttttttcctgcctgt

SEQ ID NO: 636973 - DNA, 15 bp, Homo sapiens
tttttcctgcctgta

SEQ ID NO: 636974 - DNA, 15 bp, Homo sapiens
ttttcctgcctgtaa

SEQ ID NO: 636975 - DNA, 15 bp, Homo sapiens
tttcctgcctgtaaa

SEQ ID NO: 636976 - DNA, 15 bp, Homo sapiens
ttcctgcctgtaaaa

SEQ ID NO: 636977 - DNA, 15 bp, Homo sapiens
tcctgcctgtaaaat

SEQ ID NO: 636978 - DNA, 15 bp, Homo sapiens
cctgcctgtaaaata

SEQ ID NO: 636979 - DNA, 15 bp, Homo sapiens
ctgcctgtaaaatag

SEQ ID NO: 636980 - DNA, 15 bp, Homo sapiens
tgcctgtaaaatagg

SEQ ID NO: 636981 - DNA, 15 bp, Homo sapiens
gcctgtaaaataggc

SEQ ID NO: 636982 - DNA, 15 bp, Homo sapiens
cctgtaaaataggct

SEQ ID NO: 636983 - DNA, 15 bp, Homo sapiens
ctgtaaaataggcta

SEQ ID NO: 636984 - DNA, 15 bp, Homo sapiens
tgtaaaataggctac

SEQ ID NO: 636985 - DNA, 15 bp, Homo sapiens
gtaaaataggctacc

SEQ ID NO: 636986 - DNA, 15 bp, Homo sapiens
taaaataggctacca

SEQ ID NO: 636987 - DNA, 15 bp, Homo sapiens
aaaataggctaccaa

SEQ ID NO: 636988 - DNA, 15 bp, Homo sapiens
aaataggctaccaat

SEQ ID NO: 636989 - DNA, 15 bp, Homo sapiens
aataggctaccaata

SEQ ID NO: 636990 - DNA, 15 bp, Homo sapiens
ataggctaccaatag

SEQ ID NO: 636991 - DNA, 15 bp, Homo sapiens
taggctaccaatagg

SEQ ID NO: 636992 - DNA, 15 bp, Homo sapiens
aggctaccaataggc

SEQ ID NO: 636993 - DNA, 15 bp, Homo sapiens
ggctaccaataggct

SEQ ID NO: 636994 - DNA, 15 bp, Homo sapiens
gctaccaataggctg

SEQ ID NO: 636995 - DNA, 15 bp, Homo sapiens
ctaccaataggctgc

SEQ ID NO: 636996 - DNA, 15 bp, Homo sapiens
taccaataggctgca

SEQ ID NO: 636997 - DNA, 15 bp, Homo sapiens
accaataggctgcag

SEQ ID NO: 636998 - DNA, 15 bp, Homo sapiens
ccaataggctgcagt

SEQ ID NO: 636999 - DNA, 15 bp, Homo sapiens
caataggctgcagtt

SEQ ID NO: 637000 - DNA, 15 bp, Homo sapiens
aataggctgcagttg

SEQ ID NO: 637001 - DNA, 15 bp, Homo sapiens
ataggctgcagttgt

SEQ ID NO: 637002 - DNA, 15 bp, Homo sapiens
taggctgcagttgtc

SEQ ID NO: 637003 - DNA, 15 bp, Homo sapiens
aggctgcagttgtct

SEQ ID NO: 637004 - DNA, 15 bp, Homo sapiens
ggctgcagttgtcta

SEQ ID NO: 637005 - DNA, 15 bp, Homo sapiens
gctgcagttgtctat

SEQ ID NO: 637006 - DNA, 15 bp, Homo sapiens
ctgcagttgtctata

SEQ ID NO: 637007 - DNA, 15 bp, Homo sapiens
tgcagttgtctatag

SEQ ID NO: 637008 - DNA, 15 bp, Homo sapiens
gcagttgtctatagt

SEQ ID NO: 637009 - DNA, 15 bp, Homo sapiens
cagttgtctatagta

SEQ ID NO: 637010 - DNA, 15 bp, Homo sapiens
agttgtctatagtag

SEQ ID NO: 637011 - DNA, 15 bp, Homo sapiens
gttgtctatagtagc

SEQ ID NO: 637012 - DNA, 15 bp, Homo sapiens
ttgtctatagtagct

SEQ ID NO: 637013 - DNA, 15 bp, Homo sapiens
tgtctatagtagctg

SEQ ID NO: 637014 - DNA, 15 bp, Homo sapiens
gtctatagtagctgc

SEQ ID NO: 637015 - DNA, 15 bp, Homo sapiens
tctatagtagctgct

SEQ ID NO: 637016 - DNA, 15 bp, Homo sapiens
ctatagtagctgctt

SEQ ID NO: 637017 - DNA, 15 bp, Homo sapiens
tatagtagctgcttc

SEQ ID NO: 637018 - DNA, 15 bp, Homo sapiens
atagtagctgcttca

SEQ ID NO: 637019 - DNA, 15 bp, Homo sapiens
tagtagctgcttcac

SEQ ID NO: 637020 - DNA, 15 bp, Homo sapiens
agtagctgcttcact

SEQ ID NO: 637021 - DNA, 15 bp, Homo sapiens
gtagctgcttcactg

SEQ ID NO: 637022 - DNA, 15 bp, Homo sapiens
tagctgcttcactga

SEQ ID NO: 637023 - DNA, 15 bp, Homo sapiens
agctgcttcactgag

SEQ ID NO: 637024 - DNA, 15 bp, Homo sapiens
gctgcttcactgagg

SEQ ID NO: 637025 - DNA, 15 bp, Homo sapiens
ctgcttcactgagga

SEQ ID NO: 637026 - DNA, 15 bp, Homo sapiens
tgcttcactgaggag

SEQ ID NO: 637027 - DNA, 15 bp, Homo sapiens
gcttcactgaggaga

SEQ ID NO: 637028 - DNA, 15 bp, Homo sapiens
cttcactgaggagag

SEQ ID NO: 637029 - DNA, 15 bp, Homo sapiens
ttcactgaggagagc

SEQ ID NO: 637030 - DNA, 15 bp, Homo sapiens
tcactgaggagagct

SEQ ID NO: 637031 - DNA, 15 bp, Homo sapiens
cactgaggagagctc

SEQ ID NO: 637032 - DNA, 15 bp, Homo sapiens
actgaggagagctca

SEQ ID NO: 637033 - DNA, 15 bp, Homo sapiens
ctgaggagagctcag

SEQ ID NO: 637034 - DNA, 15 bp, Homo sapiens
tgaggagagctcagc

SEQ ID NO: 637035 - DNA, 15 bp, Homo sapiens
gaggagagctcagca

SEQ ID NO: 637036 - DNA, 15 bp, Homo sapiens
aggagagctcagcat

SEQ ID NO: 637037 - DNA, 15 bp, Homo sapiens
ggagagctcagcatg

SEQ ID NO: 637038 - DNA, 15 bp, Homo sapiens
gagagctcagcatga

SEQ ID NO: 637039 - DNA, 15 bp, Homo sapiens
agagctcagcatgag

SEQ ID NO: 637040 - DNA, 15 bp, Homo sapiens
gagctcagcatgaga

SEQ ID NO: 637041 - DNA, 15 bp, Homo sapiens
agctcagcatgagag

SEQ ID NO: 637042 - DNA, 15 bp, Homo sapiens
gctcagcatgagaga

SEQ ID NO: 637043 - DNA, 15 bp, Homo sapiens
ctcagcatgagagaa

SEQ ID NO: 637044 - DNA, 15 bp, Homo sapiens
tcagcatgagagaaa

SEQ ID NO: 637045 - DNA, 15 bp, Homo sapiens
cagcatgagagaaat

SEQ ID NO: 637046 - DNA, 15 bp, Homo sapiens
agcatgagagaaata

SEQ ID NO: 637047 - DNA, 15 bp, Homo sapiens
gcatgagagaaatag

SEQ ID NO: 637048 - DNA, 15 bp, Homo sapiens
catgagagaaatagt

SEQ ID NO: 637049 - DNA, 15 bp, Homo sapiens
atgagagaaatagta

SEQ ID NO: 637050 - DNA, 15 bp, Homo sapiens
tgagagaaatagtat

SEQ ID NO: 637051 - DNA, 15 bp, Homo sapiens
gagagaaatagtatg

SEQ ID NO: 637052 - DNA, 15 bp, Homo sapiens
agagaaatagtatga

SEQ ID NO: 637053 - DNA, 15 bp, Homo sapiens
gagaaatagtatgaa

SEQ ID NO: 637054 - DNA, 15 bp, Homo sapiens
agaaatagtatgaat

SEQ ID NO: 637055 - DNA, 15 bp, Homo sapiens
gaaatagtatgaatt

SEQ ID NO: 637056 - DNA, 15 bp, Homo sapiens
aaatagtatgaattg

SEQ ID NO: 637057 - DNA, 15 bp, Homo sapiens
aatagtatgaattgc

SEQ ID NO: 637058 - DNA, 15 bp, Homo sapiens
atagtatgaattgct

SEQ ID NO: 637059 - DNA, 15 bp, Homo sapiens
tagtatgaattgctt

SEQ ID NO: 637060 - DNA, 15 bp, Homo sapiens
agtatgaattgcttg

SEQ ID NO: 637061 - DNA, 15 bp, Homo sapiens
gtatgaattgcttgc

SEQ ID NO: 637062 - DNA, 15 bp, Homo sapiens
tatgaattgcttgcc

SEQ ID NO: 637063 - DNA, 15 bp, Homo sapiens
atgaattgcttgcca

SEQ ID NO: 637064 - DNA, 15 bp, Homo sapiens
tgaattgcttgccac

SEQ ID NO: 637065 - DNA, 15 bp, Homo sapiens
gaattgcttgccaca

SEQ ID NO: 637066 - DNA, 15 bp, Homo sapiens
aattgcttgccacaa

SEQ ID NO: 637067 - DNA, 15 bp, Homo sapiens
attgcttgccacaag

SEQ ID NO: 637068 - DNA, 15 bp, Homo sapiens
ttgcttgccacaagt

SEQ ID NO: 637069 - DNA, 15 bp, Homo sapiens
tgcttgccacaagtt

SEQ ID NO: 637070 - DNA, 15 bp, Homo sapiens
gcttgccacaagtta

SEQ ID NO: 637071 - DNA, 15 bp, Homo sapiens
cttgccacaagttat

SEQ ID NO: 637072 - DNA, 15 bp, Homo sapiens
ttgccacaagttatg

SEQ ID NO: 637073 - DNA, 15 bp, Homo sapiens
tgccacaagttatgg

SEQ ID NO: 637074 - DNA, 15 bp, Homo sapiens
gccacaagttatggg

SEQ ID NO: 637075 - DNA, 15 bp, Homo sapiens
ccacaagttatgggc

SEQ ID NO: 637076 - DNA, 15 bp, Homo sapiens
cacaagttatgggct

SEQ ID NO: 637077 - DNA, 15 bp, Homo sapiens
acaagttatgggcta

SEQ ID NO: 637078 - DNA, 15 bp, Homo sapiens
caagttatgggctag

SEQ ID NO: 637079 - DNA, 15 bp, Homo sapiens
aagttatgggctagc

SEQ ID NO: 637080 - DNA, 15 bp, Homo sapiens
agttatgggctagcc

SEQ ID NO: 637081 - DNA, 15 bp, Homo sapiens
gttatgggctagcct

SEQ ID NO: 637082 - DNA, 15 bp, Homo sapiens
ttatgggctagcctt

SEQ ID NO: 637083 - DNA, 15 bp, Homo sapiens
cctattgacatcgcc

SEQ ID NO: 637084 - DNA, 15 bp, Homo sapiens
ctattgacatcgcca

SEQ ID NO: 637085 - DNA, 15 bp, Homo sapiens
tattgacatcgccag

SEQ ID NO: 637086 - DNA, 15 bp, Homo sapiens
attgacatcgccagt

SEQ ID NO: 637087 - DNA, 15 bp, Homo sapiens
ttgacatcgccagta

SEQ ID NO: 637088 - DNA, 15 bp, Homo sapiens
tgacatcgccagtaa

SEQ ID NO: 637089 - DNA, 15 bp, Homo sapiens
gacatcgccagtaaa

SEQ ID NO: 637090 - DNA, 15 bp, Homo sapiens
acatcgccagtaaaa

SEQ ID NO: 637091 - DNA, 15 bp, Homo sapiens
catcgccagtaaaat

SEQ ID NO: 637092 - DNA, 15 bp, Homo sapiens
atcgccagtaaaatt

SEQ ID NO: 637093 - DNA, 15 bp, Homo sapiens
tcgccagtaaaatta

SEQ ID NO: 637094 - DNA, 15 bp, Homo sapiens
cgccagtaaaattat

SEQ ID NO: 637095 - DNA, 15 bp, Homo sapiens
gccagtaaaattatc

SEQ ID NO: 637096 - DNA, 15 bp, Homo sapiens
ccagtaaaattatca

SEQ ID NO: 637097 - DNA, 15 bp, Homo sapiens
cagtaaaattatcaa

SEQ ID NO: 637098 - DNA, 15 bp, Homo sapiens
agtaaaattatcaat

SEQ ID NO: 637099 - DNA, 15 bp, Homo sapiens
gtaaaattatcaatg

SEQ ID NO: 637100 - DNA, 15 bp, Homo sapiens
taaaattatcaatgt

SEQ ID NO: 637101 - DNA, 15 bp, Homo sapiens
aaaattatcaatgtt

SEQ ID NO: 637102 - DNA, 15 bp, Homo sapiens
aaattatcaatgttc

SEQ ID NO: 637103 - DNA, 15 bp, Homo sapiens
aattatcaatgttct

SEQ ID NO: 637104 - DNA, 15 bp, Homo sapiens
attatcaatgttcta

SEQ ID NO: 637105 - DNA, 15 bp, Homo sapiens
ttatcaatgttctag

SEQ ID NO: 637106 - DNA, 15 bp, Homo sapiens
tatcaatgttctagt

SEQ ID NO: 637107 - DNA, 15 bp, Homo sapiens
atcaatgttctagtt

SEQ ID NO: 637108 - DNA, 15 bp, Homo sapiens
tcaatgttctagttc

SEQ ID NO: 637109 - DNA, 15 bp, Homo sapiens
caatgttctagttct

SEQ ID NO: 637110 - DNA, 15 bp, Homo sapiens
aatgttctagttctg

SEQ ID NO: 637111 - DNA, 15 bp, Homo sapiens
atgttctagttctgt

SEQ ID NO: 637112 - DNA, 15 bp, Homo sapiens
tgttctagttctgtg

SEQ ID NO: 637113 - DNA, 15 bp, Homo sapiens
gttctagttctgtgg

SEQ ID NO: 637114 - DNA, 15 bp, Homo sapiens
ttctagttctgtggc

SEQ ID NO: 637115 - DNA, 15 bp, Homo sapiens
tctagttctgtggcc

SEQ ID NO: 637116 - DNA, 15 bp, Homo sapiens
ctagttctgtggcca

SEQ ID NO: 637117 - DNA, 15 bp, Homo sapiens
tagttctgtggccat

SEQ ID NO: 637118 - DNA, 15 bp, Homo sapiens
agttctgtggccatc

SEQ ID NO: 637119 - DNA, 15 bp, Homo sapiens
gttctgtggccatct

SEQ ID NO: 637120 - DNA, 15 bp, Homo sapiens
ttctgtggccatctg

SEQ ID NO: 637121 - DNA, 15 bp, Homo sapiens
tctgtggccatctgc

SEQ ID NO: 637122 - DNA, 15 bp, Homo sapiens
ctgtggccatctgct

SEQ ID NO: 637123 - DNA, 15 bp, Homo sapiens
tgtggccatctgctt

SEQ ID NO: 637124 - DNA, 15 bp, Homo sapiens
gtggccatctgctta

SEQ ID NO: 637125 - DNA, 15 bp, Homo sapiens
tggccatctgcttag

SEQ ID NO: 637126 - DNA, 15 bp, Homo sapiens
ggccatctgcttagt

SEQ ID NO: 637127 - DNA, 15 bp, Homo sapiens
gccatctgcttagta

SEQ ID NO: 637128 - DNA, 15 bp, Homo sapiens
ccatctgcttagtag

SEQ ID NO: 637129 - DNA, 15 bp, Homo sapiens
catctgcttagtaga

SEQ ID NO: 637130 - DNA, 15 bp, Homo sapiens
atctgcttagtagag

SEQ ID NO: 637131 - DNA, 15 bp, Homo sapiens
tctgcttagtagagc

SEQ ID NO: 637132 - DNA, 15 bp, Homo sapiens
ctgcttagtagagct

SEQ ID NO: 637133 - DNA, 15 bp, Homo sapiens
tgcttagtagagctt

SEQ ID NO: 637134 - DNA, 15 bp, Homo sapiens
gcttagtagagcttt

SEQ ID NO: 637135 - DNA, 15 bp, Homo sapiens
cttagtagagctttt

SEQ ID NO: 637136 - DNA, 15 bp, Homo sapiens
ttagtagagcttttt

SEQ ID NO: 637137 - DNA, 15 bp, Homo sapiens
tagtagagctttttg

SEQ ID NO: 637138 - DNA, 15 bp, Homo sapiens
agtagagctttttgc

SEQ ID NO: 637139 - DNA, 15 bp, Homo sapiens
gtagagctttttgca

SEQ ID NO: 637140 - DNA, 15 bp, Homo sapiens
tagagctttttgcat

SEQ ID NO: 637141 - DNA, 15 bp, Homo sapiens
agagctttttgcatg

SEQ ID NO: 637142 - DNA, 15 bp, Homo sapiens
gagctttttgcatgt

SEQ ID NO: 637143 - DNA, 15 bp, Homo sapiens
agctttttgcatgta

SEQ ID NO: 637144 - DNA, 15 bp, Homo sapiens
gctttttgcatgtat

SEQ ID NO: 637145 - DNA, 15 bp, Homo sapiens
ctttttgcatgtatc

SEQ ID NO: 637146 - DNA, 15 bp, Homo sapiens
tttttgcatgtatct

SEQ ID NO: 637147 - DNA, 15 bp, Homo sapiens
ttttgcatgtatctt

SEQ ID NO: 637148 - DNA, 15 bp, Homo sapiens
tttgcatgtatcttc

SEQ ID NO: 637149 - DNA, 15 bp, Homo sapiens
ttgcatgtatcttct

SEQ ID NO: 637150 - DNA, 15 bp, Homo sapiens
tgcatgtatcttcta

SEQ ID NO: 637151 - DNA, 15 bp, Homo sapiens
gcatgtatcttctaa

SEQ ID NO: 637152 - DNA, 15 bp, Homo sapiens
catgtatcttctaag

SEQ ID NO: 637153 - DNA, 15 bp, Homo sapiens
atgtatcttctaaga

SEQ ID NO: 637154 - DNA, 15 bp, Homo sapiens
tgtatcttctaagaa

SEQ ID NO: 637155 - DNA, 15 bp, Homo sapiens
gtatcttctaagaat

SEQ ID NO: 637156 - DNA, 15 bp, Homo sapiens
tatcttctaagaatt

SEQ ID NO: 637157 - DNA, 15 bp, Homo sapiens
atcttctaagaattt

SEQ ID NO: 637158 - DNA, 15 bp, Homo sapiens
aggctggagtgcaat

SEQ ID NO: 637159 - DNA, 15 bp, Homo sapiens
ggctggagtgcaatg

SEQ ID NO: 637160 - DNA, 15 bp, Homo sapiens
gctggagtgcaatgg

SEQ ID NO: 637161 - DNA, 15 bp, Homo sapiens
ctggagtgcaatggt

SEQ ID NO: 637162 - DNA, 15 bp, Homo sapiens
tggagtgcaatggtg

SEQ ID NO: 637163 - DNA, 15 bp, Homo sapiens
ggagtgcaatggtgc

SEQ ID NO: 637164 - DNA, 15 bp, Homo sapiens
gagtgcaatggtgca

SEQ ID NO: 637165 - DNA, 15 bp, Homo sapiens
agtgcaatggtgcaa

SEQ ID NO: 637166 - DNA, 15 bp, Homo sapiens
gtgcaatggtgcaat

SEQ ID NO: 637167 - DNA, 15 bp, Homo sapiens
tgcaatggtgcaatc

SEQ ID NO: 637168 - DNA, 15 bp, Homo sapiens
gcaatggtgcaatct

SEQ ID NO: 637169 - DNA, 15 bp, Homo sapiens
caatggtgcaatctt

SEQ ID NO: 637170 - DNA, 15 bp, Homo sapiens
aatggtgcaatcttg

SEQ ID NO: 637171 - DNA, 15 bp, Homo sapiens
atggtgcaatcttgg

SEQ ID NO: 637172 - DNA, 15 bp, Homo sapiens
tggtgcaatcttggc

SEQ ID NO: 637173 - DNA, 15 bp, Homo sapiens
ggtgcaatcttggct

SEQ ID NO: 637174 - DNA, 15 bp, Homo sapiens
gtgcaatcttggctc

SEQ ID NO: 637175 - DNA, 15 bp, Homo sapiens
tgcaatcttggctca

SEQ ID NO: 637176 - DNA, 15 bp, Homo sapiens
gcaatcttggctcac

SEQ ID NO: 637177 - DNA, 15 bp, Homo sapiens
caatcttggctcact

SEQ ID NO: 637178 - DNA, 15 bp, Homo sapiens
aatcttggctcactg

SEQ ID NO: 637179 - DNA, 15 bp, Homo sapiens
atcttggctcactgc

SEQ ID NO: 637180 - DNA, 15 bp, Homo sapiens
tcttggctcactgca

SEQ ID NO: 637181 - DNA, 15 bp, Homo sapiens
cttggctcactgcaa

SEQ ID NO: 637182 - DNA, 15 bp, Homo sapiens
ttggctcactgcaac

SEQ ID NO: 637183 - DNA, 15 bp, Homo sapiens
tggctcactgcaacc

SEQ ID NO: 637184 - DNA, 15 bp, Homo sapiens
gcaacctctgcctct

SEQ ID NO: 637185 - DNA, 15 bp, Homo sapiens
caacctctgcctctc

SEQ ID NO: 637186 - DNA, 15 bp, Homo sapiens
aacctctgcctctcg

SEQ ID NO: 637187 - DNA, 15 bp, Homo sapiens
acctctgcctctcgg

SEQ ID NO: 637188 - DNA, 15 bp, Homo sapiens
cctctgcctctcggg

SEQ ID NO: 637189 - DNA, 15 bp, Homo sapiens
ctctgcctctcgggc

SEQ ID NO: 637190 - DNA, 15 bp, Homo sapiens
tctgcctctcgggct

SEQ ID NO: 637191 - DNA, 15 bp, Homo sapiens
ctgcctctcgggctc

SEQ ID NO: 637192 - DNA, 15 bp, Homo sapiens
tgcctctcgggctca

SEQ ID NO: 637193 - DNA, 15 bp, Homo sapiens
gcctctcgggctcaa

SEQ ID NO: 637194 - DNA, 15 bp, Homo sapiens
cctctcgggctcaag

SEQ ID NO: 637195 - DNA, 15 bp, Homo sapiens
ctctcgggctcaagc

SEQ ID NO: 637196 - DNA, 15 bp, Homo sapiens
tctcgggctcaagca

SEQ ID NO: 637197 - DNA, 15 bp, Homo sapiens
ctcgggctcaagcaa

SEQ ID NO: 637198 - DNA, 15 bp, Homo sapiens
tcgggctcaagcaat

SEQ ID NO: 637199 - DNA, 15 bp, Homo sapiens
cgggctcaagcaatt

SEQ ID NO: 637200 - DNA, 15 bp, Homo sapiens
gggctcaagcaattc

SEQ ID NO: 637201 - DNA, 15 bp, Homo sapiens
ggctcaagcaattct

SEQ ID NO: 637202 - DNA, 15 bp, Homo sapiens
gctcaagcaattctc

SEQ ID NO: 637203 - DNA, 15 bp, Homo sapiens
ctcaagcaattctcc

SEQ ID NO: 637204 - DNA, 15 bp, Homo sapiens
tcaagcaattctcct

SEQ ID NO: 637205 - DNA, 15 bp, Homo sapiens
caagcaattctcctg

SEQ ID NO: 637206 - DNA, 15 bp, Homo sapiens
aagcaattctcctgc

SEQ ID NO: 637207 - DNA, 15 bp, Homo sapiens
agcaattctcctgcc

SEQ ID NO: 637208 - DNA, 15 bp, Homo sapiens
gcaattctcctgcct

SEQ ID NO: 637209 - DNA, 15 bp, Homo sapiens
caattctcctgcctc

SEQ ID NO: 637210 - DNA, 15 bp, Homo sapiens
aattctcctgcctca

SEQ ID NO: 637211 - DNA, 15 bp, Homo sapiens
ctcccgagtagctgg

SEQ ID NO: 637212 - DNA, 15 bp, Homo sapiens
tcccgagtagctggg

SEQ ID NO: 637213 - DNA, 15 bp, Homo sapiens
cccgagtagctggga

SEQ ID NO: 637214 - DNA, 15 bp, Homo sapiens
ccgagtagctgggat

SEQ ID NO: 637215 - DNA, 15 bp, Homo sapiens
cgagtagctgggatt

SEQ ID NO: 637216 - DNA, 15 bp, Homo sapiens
gagtagctgggatta

SEQ ID NO: 637217 - DNA, 15 bp, Homo sapiens
agtagctgggattac

SEQ ID NO: 637218 - DNA, 15 bp, Homo sapiens
gtagctgggattaca

SEQ ID NO: 637219 - DNA, 15 bp, Homo sapiens
tagctgggattacag

SEQ ID NO: 637220 - DNA, 15 bp, Homo sapiens
agctgggattacagg

SEQ ID NO: 637221 - DNA, 15 bp, Homo sapiens
ctgggattacaggca

SEQ ID NO: 637222 - DNA, 15 bp, Homo sapiens
tgggattacaggcac

SEQ ID NO: 637223 - DNA, 15 bp, Homo sapiens
gggattacaggcaca

SEQ ID NO: 637224 - DNA, 15 bp, Homo sapiens
ggattacaggcacat

SEQ ID NO: 637225 - DNA, 15 bp, Homo sapiens
gattacaggcacatg

SEQ ID NO: 637226 - DNA, 15 bp, Homo sapiens
attacaggcacatgc

SEQ ID NO: 637227 - DNA, 15 bp, Homo sapiens
ttacaggcacatgcc

SEQ ID NO: 637228 - DNA, 15 bp, Homo sapiens
tacaggcacatgcca

SEQ ID NO: 637229 - DNA, 15 bp, Homo sapiens
acaggcacatgccac

SEQ ID NO: 637230 - DNA, 15 bp, Homo sapiens
caggcacatgccacc

SEQ ID NO: 637231 - DNA, 15 bp, Homo sapiens
aggcacatgccacca

SEQ ID NO: 637232 - DNA, 15 bp, Homo sapiens
ggcacatgccaccat

SEQ ID NO: 637233 - DNA, 15 bp, Homo sapiens
gcacatgccaccatg

SEQ ID NO: 637234 - DNA, 15 bp, Homo sapiens
cacatgccaccatgc

SEQ ID NO: 637235 - DNA, 15 bp, Homo sapiens
acatgccaccatgcc

SEQ ID NO: 637236 - DNA, 15 bp, Homo sapiens
catgccaccatgccc

SEQ ID NO: 637237 - DNA, 15 bp, Homo sapiens
atgccaccatgccca

SEQ ID NO: 637238 - DNA, 15 bp, Homo sapiens
tgccaccatgcccag

SEQ ID NO: 637239 - DNA, 15 bp, Homo sapiens
gccaccatgcccagc

SEQ ID NO: 637240 - DNA, 15 bp, Homo sapiens
cccagctaatttttg

SEQ ID NO: 637241 - DNA, 15 bp, Homo sapiens
ccagctaatttttgt

SEQ ID NO: 637242 - DNA, 15 bp, Homo sapiens
cagctaatttttgta

SEQ ID NO: 637243 - DNA, 15 bp, Homo sapiens
agctaatttttgtat

SEQ ID NO: 637244 - DNA, 15 bp, Homo sapiens
gctaatttttgtatt

SEQ ID NO: 637245 - DNA, 15 bp, Homo sapiens
ctaatttttgtattt

SEQ ID NO: 637246 - DNA, 15 bp, Homo sapiens
taatttttgtatttt

SEQ ID NO: 637247 - DNA, 15 bp, Homo sapiens
aatttttgtattttc

SEQ ID NO: 637248 - DNA, 15 bp, Homo sapiens
atttttgtattttca

SEQ ID NO: 637249 - DNA, 15 bp, Homo sapiens
tttttgtattttcaa

SEQ ID NO: 637250 - DNA, 15 bp, Homo sapiens
ttttgtattttcaat

SEQ ID NO: 637251 - DNA, 15 bp, Homo sapiens
tttgtattttcaata

SEQ ID NO: 637252 - DNA, 15 bp, Homo sapiens
ttgtattttcaatag

SEQ ID NO: 637253 - DNA, 15 bp, Homo sapiens
tgtattttcaataga

SEQ ID NO: 637254 - DNA, 15 bp, Homo sapiens
gtattttcaatagag

SEQ ID NO: 637255 - DNA, 15 bp, Homo sapiens
tattttcaatagaga

SEQ ID NO: 637256 - DNA, 15 bp, Homo sapiens
attttcaatagagac

SEQ ID NO: 637257 - DNA, 15 bp, Homo sapiens
ttttcaatagagact

SEQ ID NO: 637258 - DNA, 15 bp, Homo sapiens
tttcaatagagactg

SEQ ID NO: 637259 - DNA, 15 bp, Homo sapiens
ttcaatagagactgg

SEQ ID NO: 637260 - DNA, 15 bp, Homo sapiens
tcaatagagactggg

SEQ ID NO: 637261 - DNA, 15 bp, Homo sapiens
caatagagactgggt

SEQ ID NO: 637262 - DNA, 15 bp, Homo sapiens
aatagagactgggtt

SEQ ID NO: 637263 - DNA, 15 bp, Homo sapiens
atagagactgggttt

SEQ ID NO: 637264 - DNA, 15 bp, Homo sapiens
tagagactgggtttc

SEQ ID NO: 637265 - DNA, 15 bp, Homo sapiens
agagactgggtttca

SEQ ID NO: 637266 - DNA, 15 bp, Homo sapiens
gagactgggtttcac

SEQ ID NO: 637267 - DNA, 15 bp, Homo sapiens
agactgggtttcacc

SEQ ID NO: 637268 - DNA, 15 bp, Homo sapiens
gactgggtttcacca

SEQ ID NO: 637269 - DNA, 15 bp, Homo sapiens
actgggtttcaccat

SEQ ID NO: 637270 - DNA, 15 bp, Homo sapiens
ctgggtttcaccatg

SEQ ID NO: 637271 - DNA, 15 bp, Homo sapiens
tgggtttcaccatgt

SEQ ID NO: 637272 - DNA, 15 bp, Homo sapiens
gggtttcaccatgtt

SEQ ID NO: 637273 - DNA, 15 bp, Homo sapiens
ggtttcaccatgttg

SEQ ID NO: 637274 - DNA, 15 bp, Homo sapiens
gtttcaccatgttgc

SEQ ID NO: 637275 - DNA, 15 bp, Homo sapiens
tttcaccatgttgcc

SEQ ID NO: 637276 - DNA, 15 bp, Homo sapiens
ttcaccatgttgccc

SEQ ID NO: 637277 - DNA, 15 bp, Homo sapiens
tcaccatgttgccca

SEQ ID NO: 637278 - DNA, 15 bp, Homo sapiens
caccatgttgcccag

SEQ ID NO: 637279 - DNA, 15 bp, Homo sapiens
accatgttgcccagg

SEQ ID NO: 637280 - DNA, 15 bp, Homo sapiens
ccatgttgcccaggc

SEQ ID NO: 637281 - DNA, 15 bp, Homo sapiens
catgttgcccaggct

SEQ ID NO: 637282 - DNA, 15 bp, Homo sapiens
atgttgcccaggctg

SEQ ID NO: 637283 - DNA, 15 bp, Homo sapiens
tgttgcccaggctgg

SEQ ID NO: 637284 - DNA, 15 bp, Homo sapiens
gttgcccaggctggt

SEQ ID NO: 637285 - DNA, 15 bp, Homo sapiens
ttgcccaggctggtc

SEQ ID NO: 637286 - DNA, 15 bp, Homo sapiens
tgcccaggctggtct

SEQ ID NO: 637287 - DNA, 15 bp, Homo sapiens
gcccaggctggtctt

SEQ ID NO: 637288 - DNA, 15 bp, Homo sapiens
cccaggctggtcttc

SEQ ID NO: 637289 - DNA, 15 bp, Homo sapiens
ccaggctggtcttca

SEQ ID NO: 637290 - DNA, 15 bp, Homo sapiens
caggctggtcttcaa

SEQ ID NO: 637291 - DNA, 15 bp, Homo sapiens
aggctggtcttcaac

SEQ ID NO: 637292 - DNA, 15 bp, Homo sapiens
ggctggtcttcaact

SEQ ID NO: 637293 - DNA, 15 bp, Homo sapiens
gctggtcttcaactc

SEQ ID NO: 637294 - DNA, 15 bp, Homo sapiens
ctggtcttcaactcc

SEQ ID NO: 637295 - DNA, 15 bp, Homo sapiens
tggtcttcaactcct

SEQ ID NO: 637296 - DNA, 15 bp, Homo sapiens
ggtcttcaactcctg

SEQ ID NO: 637297 - DNA, 15 bp, Homo sapiens
gtcttcaactcctga

SEQ ID NO: 637298 - DNA, 15 bp, Homo sapiens
tcttcaactcctgac

SEQ ID NO: 637299 - DNA, 15 bp, Homo sapiens
cttcaactcctgacc

SEQ ID NO: 637300 - DNA, 15 bp, Homo sapiens
ttcaactcctgacct

SEQ ID NO: 637301 - DNA, 15 bp, Homo sapiens
tcaactcctgacctc

SEQ ID NO: 637302 - DNA, 15 bp, Homo sapiens
caactcctgacctca

SEQ ID NO: 637303 - DNA, 15 bp, Homo sapiens
aactcctgacctcaa

SEQ ID NO: 637304 - DNA, 15 bp, Homo sapiens
actcctgacctcaag

SEQ ID NO: 637305 - DNA, 15 bp, Homo sapiens
ctcctgacctcaagt

SEQ ID NO: 637306 - DNA, 15 bp, Homo sapiens
tcctgacctcaagtg

SEQ ID NO: 637307 - DNA, 15 bp, Homo sapiens
cctgacctcaagtga

SEQ ID NO: 637308 - DNA, 15 bp, Homo sapiens
ctgacctcaagtgat

SEQ ID NO: 637309 - DNA, 15 bp, Homo sapiens
tgacctcaagtgatc

SEQ ID NO: 637310 - DNA, 15 bp, Homo sapiens
gacctcaagtgatcc

SEQ ID NO: 637311 - DNA, 15 bp, Homo sapiens
acctcaagtgatccg

SEQ ID NO: 637312 - DNA, 15 bp, Homo sapiens
cctcaagtgatccgc

SEQ ID NO: 637313 - DNA, 15 bp, Homo sapiens
ctcaagtgatccgcc

SEQ ID NO: 637314 - DNA, 15 bp, Homo sapiens
tcaagtgatccgccc

SEQ ID NO: 637315 - DNA, 15 bp, Homo sapiens
caagtgatccgccct

SEQ ID NO: 637316 - DNA, 15 bp, Homo sapiens
aagtgatccgccctc

SEQ ID NO: 637317 - DNA, 15 bp, Homo sapiens
agtgatccgccctcc

SEQ ID NO: 637318 - DNA, 15 bp, Homo sapiens
gtgatccgccctcct

SEQ ID NO: 637319 - DNA, 15 bp, Homo sapiens
tgatccgccctcctc

SEQ ID NO: 637320 - DNA, 15 bp, Homo sapiens
gatccgccctcctca

SEQ ID NO: 637321 - DNA, 15 bp, Homo sapiens
atccgccctcctcag

SEQ ID NO: 637322 - DNA, 15 bp, Homo sapiens
tccgccctcctcagc

SEQ ID NO: 637323 - DNA, 15 bp, Homo sapiens
ccgccctcctcagct

SEQ ID NO: 637324 - DNA, 15 bp, Homo sapiens
cgccctcctcagctt

SEQ ID NO: 637325 - DNA, 15 bp, Homo sapiens
gccctcctcagcttc

SEQ ID NO: 637326 - DNA, 15 bp, Homo sapiens
ccctcctcagcttcc

SEQ ID NO: 637327 - DNA, 15 bp, Homo sapiens
cctcctcagcttccc

SEQ ID NO: 637328 - DNA, 15 bp, Homo sapiens
ctcctcagcttccca

SEQ ID NO: 637329 - DNA, 15 bp, Homo sapiens
tcctcagcttcccaa

SEQ ID NO: 637330 - DNA, 15 bp, Homo sapiens
cctcagcttcccaaa

SEQ ID NO: 637331 - DNA, 15 bp, Homo sapiens
ctcagcttcccaaag

SEQ ID NO: 637332 - DNA, 15 bp, Homo sapiens
tcagcttcccaaagt

SEQ ID NO: 637333 - DNA, 15 bp, Homo sapiens
cagcttcccaaagtg

SEQ ID NO: 637334 - DNA, 15 bp, Homo sapiens
agcttcccaaagtgc

SEQ ID NO: 637335 - DNA, 15 bp, Homo sapiens
gcttcccaaagtgct

SEQ ID NO: 637336 - DNA, 15 bp, Homo sapiens
cttcccaaagtgctg

SEQ ID NO: 637337 - DNA, 15 bp, Homo sapiens
ttcccaaagtgctgg

SEQ ID NO: 637338 - DNA, 15 bp, Homo sapiens
tcccaaagtgctggg

SEQ ID NO: 637339 - DNA, 15 bp, Homo sapiens
cccaaagtgctggga

SEQ ID NO: 637340 - DNA, 15 bp, Homo sapiens
aggcgtgagccacca

SEQ ID NO: 637341 - DNA, 15 bp, Homo sapiens
ggcgtgagccaccac

SEQ ID NO: 637342 - DNA, 15 bp, Homo sapiens
gcgtgagccaccaca

SEQ ID NO: 637343 - DNA, 15 bp, Homo sapiens
cgtgagccaccacac

SEQ ID NO: 637344 - DNA, 15 bp, Homo sapiens
gtgagccaccacacc

SEQ ID NO: 637345 - DNA, 15 bp, Homo sapiens
tgagccaccacaccg

SEQ ID NO: 637346 - DNA, 15 bp, Homo sapiens
gagccaccacaccgg

SEQ ID NO: 637347 - DNA, 15 bp, Homo sapiens
agccaccacaccggg

SEQ ID NO: 637348 - DNA, 15 bp, Homo sapiens
gccaccacaccgggg

SEQ ID NO: 637349 - DNA, 15 bp, Homo sapiens
ccaccacaccggggg

SEQ ID NO: 637350 - DNA, 15 bp, Homo sapiens
caccacaccgggggg

SEQ ID NO: 637351 - DNA, 15 bp, Homo sapiens
accacaccggggggt

SEQ ID NO: 637352 - DNA, 15 bp, Homo sapiens
ccacaccggggggta

SEQ ID NO: 637353 - DNA, 15 bp, Homo sapiens
cacaccggggggtag

SEQ ID NO: 637354 - DNA, 15 bp, Homo sapiens
acaccggggggtagg

SEQ ID NO: 637355 - DNA, 15 bp, Homo sapiens
caccggggggtagga

SEQ ID NO: 637356 - DNA, 15 bp, Homo sapiens
accggggggtaggat

SEQ ID NO: 637357 - DNA, 15 bp, Homo sapiens
ccggggggtaggata

SEQ ID NO: 637358 - DNA, 15 bp, Homo sapiens
cggggggtaggatag

SEQ ID NO: 637359 - DNA, 15 bp, Homo sapiens
ggggggtaggataga

SEQ ID NO: 637360 - DNA, 15 bp, Homo sapiens
gggggtaggatagat

SEQ ID NO: 637361 - DNA, 15 bp, Homo sapiens
ggggtaggatagatt

SEQ ID NO: 637362 - DNA, 15 bp, Homo sapiens
gggtaggatagattt

SEQ ID NO: 637363 - DNA, 15 bp, Homo sapiens
ggtaggatagattta

SEQ ID NO: 637364 - DNA, 15 bp, Homo sapiens
gtaggatagatttag

SEQ ID NO: 637365 - DNA, 15 bp, Homo sapiens
taggatagatttagt

SEQ ID NO: 637366 - DNA, 15 bp, Homo sapiens
aggatagatttagtg

SEQ ID NO: 637367 - DNA, 15 bp, Homo sapiens
ggatagatttagtga

SEQ ID NO: 637368 - DNA, 15 bp, Homo sapiens
gatagatttagtgag

SEQ ID NO: 637369 - DNA, 15 bp, Homo sapiens
atagatttagtgaga

SEQ ID NO: 637370 - DNA, 15 bp, Homo sapiens
tagatttagtgagat

SEQ ID NO: 637371 - DNA, 15 bp, Homo sapiens
agatttagtgagatg

SEQ ID NO: 637372 - DNA, 15 bp, Homo sapiens
gatttagtgagatga

SEQ ID NO: 637373 - DNA, 15 bp, Homo sapiens
atttagtgagatgac

SEQ ID NO: 637374 - DNA, 15 bp, Homo sapiens
tttagtgagatgact

SEQ ID NO: 637375 - DNA, 15 bp, Homo sapiens
ttagtgagatgactg

SEQ ID NO: 637376 - DNA, 15 bp, Homo sapiens
tagtgagatgactgg

SEQ ID NO: 637377 - DNA, 15 bp, Homo sapiens
agtgagatgactgga

SEQ ID NO: 637378 - DNA, 15 bp, Homo sapiens
gtgagatgactggat

SEQ ID NO: 637379 - DNA, 15 bp, Homo sapiens
tgagatgactggata

SEQ ID NO: 637380 - DNA, 15 bp, Homo sapiens
gagatgactggataa

SEQ ID NO: 637381 - DNA, 15 bp, Homo sapiens
agatgactggataaa

SEQ ID NO: 637382 - DNA, 15 bp, Homo sapiens
gatgactggataaac

SEQ ID NO: 637383 - DNA, 15 bp, Homo sapiens
atgactggataaacg

SEQ ID NO: 637384 - DNA, 15 bp, Homo sapiens
tgactggataaacgg

SEQ ID NO: 637385 - DNA, 15 bp, Homo sapiens
gactggataaacgga

SEQ ID NO: 637386 - DNA, 15 bp, Homo sapiens
actggataaacggaa

SEQ ID NO: 637387 - DNA, 15 bp, Homo sapiens
ctggataaacggaat

SEQ ID NO: 637388 - DNA, 15 bp, Homo sapiens
tggataaacggaatc

SEQ ID NO: 637389 - DNA, 15 bp, Homo sapiens
ggataaacggaatca

SEQ ID NO: 637390 - DNA, 15 bp, Homo sapiens
gataaacggaatcaa

SEQ ID NO: 637391 - DNA, 15 bp, Homo sapiens
ataaacggaatcaag

SEQ ID NO: 637392 - DNA, 15 bp, Homo sapiens
taaacggaatcaaga

SEQ ID NO: 637393 - DNA, 15 bp, Homo sapiens
aaacggaatcaagaa

SEQ ID NO: 637394 - DNA, 15 bp, Homo sapiens
aacggaatcaagaaa

SEQ ID NO: 637395 - DNA, 15 bp, Homo sapiens
acggaatcaagaaaa

SEQ ID NO: 637396 - DNA, 15 bp, Homo sapiens
cggaatcaagaaaaa

SEQ ID NO: 637397 - DNA, 15 bp, Homo sapiens
ggaatcaagaaaaag

SEQ ID NO: 637398 - DNA, 15 bp, Homo sapiens
gaatcaagaaaaagc

SEQ ID NO: 637399 - DNA, 15 bp, Homo sapiens
aatcaagaaaaagct

SEQ ID NO: 637400 - DNA, 15 bp, Homo sapiens
atcaagaaaaagctt

SEQ ID NO: 637401 - DNA, 15 bp, Homo sapiens
tcaagaaaaagcttt

SEQ ID NO: 637402 - DNA, 15 bp, Homo sapiens
caagaaaaagctttg

SEQ ID NO: 637403 - DNA, 15 bp, Homo sapiens
aagaaaaagctttgt

SEQ ID NO: 637404 - DNA, 15 bp, Homo sapiens
agaaaaagctttgtc

SEQ ID NO: 637405 - DNA, 15 bp, Homo sapiens
gaaaaagctttgtca

SEQ ID NO: 637406 - DNA, 15 bp, Homo sapiens
aaaaagctttgtcaa

SEQ ID NO: 637407 - DNA, 15 bp, Homo sapiens
aaaagctttgtcaaa

SEQ ID NO: 637408 - DNA, 15 bp, Homo sapiens
aaagctttgtcaaaa

SEQ ID NO: 637409 - DNA, 15 bp, Homo sapiens
aagctttgtcaaaaa

SEQ ID NO: 637410 - DNA, 15 bp, Homo sapiens
agctttgtcaaaaac

SEQ ID NO: 637411 - DNA, 15 bp, Homo sapiens
gctttgtcaaaaact

SEQ ID NO: 637412 - DNA, 15 bp, Homo sapiens
ctttgtcaaaaactt

SEQ ID NO: 637413 - DNA, 15 bp, Homo sapiens
tttgtcaaaaactta

SEQ ID NO: 637414 - DNA, 15 bp, Homo sapiens
ttgtcaaaaacttat

SEQ ID NO: 637415 - DNA, 15 bp, Homo sapiens
tgtcaaaaacttatg

SEQ ID NO: 637416 - DNA, 15 bp, Homo sapiens
gtcaaaaacttatgc

SEQ ID NO: 637417 - DNA, 15 bp, Homo sapiens
tcaaaaacttatgct

SEQ ID NO: 637418 - DNA, 15 bp, Homo sapiens
caaaaacttatgctt

SEQ ID NO: 637419 - DNA, 15 bp, Homo sapiens
aaaaacttatgcttc

SEQ ID NO: 637420 - DNA, 15 bp, Homo sapiens
aaaacttatgcttct

SEQ ID NO: 637421 - DNA, 15 bp, Homo sapiens
aaacttatgcttctt

SEQ ID NO: 637422 - DNA, 15 bp, Homo sapiens
aacttatgcttctta

SEQ ID NO: 637423 - DNA, 15 bp, Homo sapiens
acttatgcttcttaa

SEQ ID NO: 637424 - DNA, 15 bp, Homo sapiens
cttatgcttcttaaa

SEQ ID NO: 637425 - DNA, 15 bp, Homo sapiens
ttatgcttcttaaaa

SEQ ID NO: 637426 - DNA, 15 bp, Homo sapiens
tatgcttcttaaaaa

SEQ ID NO: 637427 - DNA, 15 bp, Homo sapiens
atgcttcttaaaaac

SEQ ID NO: 637428 - DNA, 15 bp, Homo sapiens
tgcttcttaaaaact

SEQ ID NO: 637429 - DNA, 15 bp, Homo sapiens
gcttcttaaaaactt

SEQ ID NO: 637430 - DNA, 15 bp, Homo sapiens
cttcttaaaaactta

SEQ ID NO: 637431 - DNA, 15 bp, Homo sapiens
ttcttaaaaacttaa

SEQ ID NO: 637432 - DNA, 15 bp, Homo sapiens
tcttaaaaacttaat

SEQ ID NO: 637433 - DNA, 15 bp, Homo sapiens
cttaaaaacttaatc

SEQ ID NO: 637434 - DNA, 15 bp, Homo sapiens
ttaaaaacttaatcc

SEQ ID NO: 637435 - DNA, 15 bp, Homo sapiens
taaaaacttaatcct

SEQ ID NO: 637436 - DNA, 15 bp, Homo sapiens
aaaaacttaatcctg

SEQ ID NO: 637437 - DNA, 15 bp, Homo sapiens
aaaacttaatcctgg

SEQ ID NO: 637438 - DNA, 15 bp, Homo sapiens
aaacttaatcctggg

SEQ ID NO: 637439 - DNA, 15 bp, Homo sapiens
aacttaatcctggga

SEQ ID NO: 637440 - DNA, 15 bp, Homo sapiens
acttaatcctgggac

SEQ ID NO: 637441 - DNA, 15 bp, Homo sapiens
cttaatcctgggaca

SEQ ID NO: 637442 - DNA, 15 bp, Homo sapiens
ttaatcctgggacag

SEQ ID NO: 637443 - DNA, 15 bp, Homo sapiens
taatcctgggacaga

SEQ ID NO: 637444 - DNA, 15 bp, Homo sapiens
aatcctgggacagaa

SEQ ID NO: 637445 - DNA, 15 bp, Homo sapiens
atcctgggacagaat

SEQ ID NO: 637446 - DNA, 15 bp, Homo sapiens
tcctgggacagaatc

SEQ ID NO: 637447 - DNA, 15 bp, Homo sapiens
cctgggacagaatca

SEQ ID NO: 637448 - DNA, 15 bp, Homo sapiens
ctgggacagaatcat

SEQ ID NO: 637449 - DNA, 15 bp, Homo sapiens
tgggacagaatcatc

SEQ ID NO: 637450 - DNA, 15 bp, Homo sapiens
gggacagaatcatct

SEQ ID NO: 637451 - DNA, 15 bp, Homo sapiens
ggacagaatcatcta

SEQ ID NO: 637452 - DNA, 15 bp, Homo sapiens
gacagaatcatctaa

SEQ ID NO: 637453 - DNA, 15 bp, Homo sapiens
acagaatcatctaaa

SEQ ID NO: 637454 - DNA, 15 bp, Homo sapiens
cagaatcatctaaaa

SEQ ID NO: 637455 - DNA, 15 bp, Homo sapiens
agaatcatctaaaac

SEQ ID NO: 637456 - DNA, 15 bp, Homo sapiens
gaatcatctaaaacg

SEQ ID NO: 637457 - DNA, 15 bp, Homo sapiens
aatcatctaaaacgt

SEQ ID NO: 637458 - DNA, 15 bp, Homo sapiens
atcatctaaaacgtt

SEQ ID NO: 637459 - DNA, 15 bp, Homo sapiens
tcatctaaaacgttg

SEQ ID NO: 637460 - DNA, 15 bp, Homo sapiens
catctaaaacgttgt

SEQ ID NO: 637461 - DNA, 15 bp, Homo sapiens
atctaaaacgttgtt

SEQ ID NO: 637462 - DNA, 15 bp, Homo sapiens
tctaaaacgttgttc

SEQ ID NO: 637463 - DNA, 15 bp, Homo sapiens
ctaaaacgttgttcc

SEQ ID NO: 637464 - DNA, 15 bp, Homo sapiens
taaaacgttgttcca

SEQ ID NO: 637465 - DNA, 15 bp, Homo sapiens
aaaacgttgttccat

SEQ ID NO: 637466 - DNA, 15 bp, Homo sapiens
aaacgttgttccatg

SEQ ID NO: 637467 - DNA, 15 bp, Homo sapiens
aacgttgttccatgt

SEQ ID NO: 637468 - DNA, 15 bp, Homo sapiens
acgttgttccatgtc

SEQ ID NO: 637469 - DNA, 15 bp, Homo sapiens
cgttgttccatgtct

SEQ ID NO: 637470 - DNA, 15 bp, Homo sapiens
gttgttccatgtctt

SEQ ID NO: 637471 - DNA, 15 bp, Homo sapiens
ttgttccatgtcttc

SEQ ID NO: 637472 - DNA, 15 bp, Homo sapiens
tgttccatgtcttca

SEQ ID NO: 637473 - DNA, 15 bp, Homo sapiens
gttccatgtcttcac

SEQ ID NO: 637474 - DNA, 15 bp, Homo sapiens
ttccatgtcttcact

SEQ ID NO: 637475 - DNA, 15 bp, Homo sapiens
tccatgtcttcactt

SEQ ID NO: 637476 - DNA, 15 bp, Homo sapiens
ccatgtcttcacttt

SEQ ID NO: 637477 - DNA, 15 bp, Homo sapiens
catgtcttcactttg

SEQ ID NO: 637478 - DNA, 15 bp, Homo sapiens
atgtcttcactttga

SEQ ID NO: 637479 - DNA, 15 bp, Homo sapiens
tgtcttcactttgac

SEQ ID NO: 637480 - DNA, 15 bp, Homo sapiens
gtcttcactttgact

SEQ ID NO: 637481 - DNA, 15 bp, Homo sapiens
tcttcactttgactc

SEQ ID NO: 637482 - DNA, 15 bp, Homo sapiens
cttcactttgactca

SEQ ID NO: 637483 - DNA, 15 bp, Homo sapiens
ttcactttgactcac

SEQ ID NO: 637484 - DNA, 15 bp, Homo sapiens
tcactttgactcacc

SEQ ID NO: 637485 - DNA, 15 bp, Homo sapiens
cactttgactcaccc

SEQ ID NO: 637486 - DNA, 15 bp, Homo sapiens
actttgactcaccca

SEQ ID NO: 637487 - DNA, 15 bp, Homo sapiens
ctttgactcacccat

SEQ ID NO: 637488 - DNA, 15 bp, Homo sapiens
tttgactcacccata

SEQ ID NO: 637489 - DNA, 15 bp, Homo sapiens
ttgactcacccataa

SEQ ID NO: 637490 - DNA, 15 bp, Homo sapiens
tgactcacccataaa

SEQ ID NO: 637491 - DNA, 15 bp, Homo sapiens
gactcacccataaaa

SEQ ID NO: 637492 - DNA, 15 bp, Homo sapiens
actcacccataaaaa

SEQ ID NO: 637493 - DNA, 15 bp, Homo sapiens
ctcacccataaaaac

SEQ ID NO: 637494 - DNA, 15 bp, Homo sapiens
tcacccataaaaact

SEQ ID NO: 637495 - DNA, 15 bp, Homo sapiens
cacccataaaaactt

SEQ ID NO: 637496 - DNA, 15 bp, Homo sapiens
acccataaaaacttc

SEQ ID NO: 637497 - DNA, 15 bp, Homo sapiens
cccataaaaacttca

SEQ ID NO: 637498 - DNA, 15 bp, Homo sapiens
ccataaaaacttcaa

SEQ ID NO: 637499 - DNA, 15 bp, Homo sapiens
cataaaaacttcaag

SEQ ID NO: 637500 - DNA, 15 bp, Homo sapiens
ataaaaacttcaagt

SEQ ID NO: 637501 - DNA, 15 bp, Homo sapiens
taaaaacttcaagta

SEQ ID NO: 637502 - DNA, 15 bp, Homo sapiens
aaaaacttcaagtac

SEQ ID NO: 637503 - DNA, 15 bp, Homo sapiens
aaaacttcaagtaca

SEQ ID NO: 637504 - DNA, 15 bp, Homo sapiens
aaacttcaagtacaa

SEQ ID NO: 637505 - DNA, 15 bp, Homo sapiens
aacttcaagtacaaa

SEQ ID NO: 637506 - DNA, 15 bp, Homo sapiens
acttcaagtacaaag

SEQ ID NO: 637507 - DNA, 15 bp, Homo sapiens
cttcaagtacaaaga

SEQ ID NO: 637508 - DNA, 15 bp, Homo sapiens
ttcaagtacaaagaa

SEQ ID NO: 637509 - DNA, 15 bp, Homo sapiens
tcaagtacaaagaat

SEQ ID NO: 637510 - DNA, 15 bp, Homo sapiens
caagtacaaagaatg

SEQ ID NO: 637511 - DNA, 15 bp, Homo sapiens
aagtacaaagaatga

SEQ ID NO: 637512 - DNA, 15 bp, Homo sapiens
agtacaaagaatgaa

SEQ ID NO: 637513 - DNA, 15 bp, Homo sapiens
gtacaaagaatgaaa

SEQ ID NO: 637514 - DNA, 15 bp, Homo sapiens
tacaaagaatgaaaa

SEQ ID NO: 637515 - DNA, 15 bp, Homo sapiens
acaaagaatgaaaaa

SEQ ID NO: 637516 - DNA, 15 bp, Homo sapiens
caaagaatgaaaaat

SEQ ID NO: 637517 - DNA, 15 bp, Homo sapiens
aaagaatgaaaaata

SEQ ID NO: 637518 - DNA, 15 bp, Homo sapiens
aagaatgaaaaataa

SEQ ID NO: 637519 - DNA, 15 bp, Homo sapiens
agaatgaaaaataac

SEQ ID NO: 637520 - DNA, 15 bp, Homo sapiens
gaatgaaaaataacc

SEQ ID NO: 637521 - DNA, 15 bp, Homo sapiens
aatgaaaaataacca

SEQ ID NO: 637522 - DNA, 15 bp, Homo sapiens
atgaaaaataaccac

SEQ ID NO: 637523 - DNA, 15 bp, Homo sapiens
tgaaaaataaccaca

SEQ ID NO: 637524 - DNA, 15 bp, Homo sapiens
gaaaaataaccacat

SEQ ID NO: 637525 - DNA, 15 bp, Homo sapiens
aaaaataaccacata

SEQ ID NO: 637526 - DNA, 15 bp, Homo sapiens
aaaataaccacatat

SEQ ID NO: 637527 - DNA, 15 bp, Homo sapiens
aaataaccacatatt

SEQ ID NO: 637528 - DNA, 15 bp, Homo sapiens
aataaccacatattt

SEQ ID NO: 637529 - DNA, 15 bp, Homo sapiens
ataaccacatatttt

SEQ ID NO: 637530 - DNA, 15 bp, Homo sapiens
taaccacatattttc

SEQ ID NO: 637531 - DNA, 15 bp, Homo sapiens
aaccacatattttct

SEQ ID NO: 637532 - DNA, 15 bp, Homo sapiens
accacatattttcta

SEQ ID NO: 637533 - DNA, 15 bp, Homo sapiens
ccacatattttctaa

SEQ ID NO: 637534 - DNA, 15 bp, Homo sapiens
cacatattttctaat

SEQ ID NO: 637535 - DNA, 15 bp, Homo sapiens
acatattttctaatg

SEQ ID NO: 637536 - DNA, 15 bp, Homo sapiens
catattttctaatgc

SEQ ID NO: 637537 - DNA, 15 bp, Homo sapiens
atattttctaatgct

SEQ ID NO: 637538 - DNA, 15 bp, Homo sapiens
tattttctaatgctc

SEQ ID NO: 637539 - DNA, 15 bp, Homo sapiens
attttctaatgctca

SEQ ID NO: 637540 - DNA, 15 bp, Homo sapiens
ttttctaatgctcaa

SEQ ID NO: 637541 - DNA, 15 bp, Homo sapiens
tttctaatgctcaat

SEQ ID NO: 637542 - DNA, 15 bp, Homo sapiens
ttctaatgctcaata

SEQ ID NO: 637543 - DNA, 15 bp, Homo sapiens
tctaatgctcaatat

SEQ ID NO: 637544 - DNA, 15 bp, Homo sapiens
ctaatgctcaatatt

SEQ ID NO: 637545 - DNA, 15 bp, Homo sapiens
taatgctcaatattt

SEQ ID NO: 637546 - DNA, 15 bp, Homo sapiens
aatgctcaatatttt

SEQ ID NO: 637547 - DNA, 15 bp, Homo sapiens
atgctcaatatttta

SEQ ID NO: 637548 - DNA, 15 bp, Homo sapiens
tgctcaatattttat

SEQ ID NO: 637549 - DNA, 15 bp, Homo sapiens
gctcaatattttatt

SEQ ID NO: 637550 - DNA, 15 bp, Homo sapiens
ctcaatattttattt

SEQ ID NO: 637551 - DNA, 15 bp, Homo sapiens
tcaatattttatttg

SEQ ID NO: 637552 - DNA, 15 bp, Homo sapiens
caatattttatttgt

SEQ ID NO: 637553 - DNA, 15 bp, Homo sapiens
aatattttatttgta

SEQ ID NO: 637554 - DNA, 15 bp, Homo sapiens
atattttatttgtag

SEQ ID NO: 637555 - DNA, 15 bp, Homo sapiens
tattttatttgtagt

SEQ ID NO: 637556 - DNA, 15 bp, Homo sapiens
attttatttgtagtg

SEQ ID NO: 637557 - DNA, 15 bp, Homo sapiens
ttttatttgtagtgt

SEQ ID NO: 637558 - DNA, 15 bp, Homo sapiens
tttatttgtagtgtt

SEQ ID NO: 637559 - DNA, 15 bp, Homo sapiens
ttatttgtagtgttg

SEQ ID NO: 637560 - DNA, 15 bp, Homo sapiens
tatttgtagtgttgt

SEQ ID NO: 637561 - DNA, 15 bp, Homo sapiens
atttgtagtgttgtt

SEQ ID NO: 637562 - DNA, 15 bp, Homo sapiens
tttgtagtgttgttt

SEQ ID NO: 637563 - DNA, 15 bp, Homo sapiens
ttgtagtgttgtttt

SEQ ID NO: 637564 - DNA, 15 bp, Homo sapiens
tgtagtgttgttttc

SEQ ID NO: 637565 - DNA, 15 bp, Homo sapiens
gtagtgttgttttct

SEQ ID NO: 637566 - DNA, 15 bp, Homo sapiens
tagtgttgttttcta

SEQ ID NO: 637567 - DNA, 15 bp, Homo sapiens
agtgttgttttctat

SEQ ID NO: 637568 - DNA, 15 bp, Homo sapiens
gtgttgttttctata

SEQ ID NO: 637569 - DNA, 15 bp, Homo sapiens
tgttgttttctatat

SEQ ID NO: 637570 - DNA, 15 bp, Homo sapiens
gttgttttctatata

SEQ ID NO: 637571 - DNA, 15 bp, Homo sapiens
ttgttttctatatag

SEQ ID NO: 637572 - DNA, 15 bp, Homo sapiens
tgttttctatataga

SEQ ID NO: 637573 - DNA, 15 bp, Homo sapiens
gttttctatatagat

SEQ ID NO: 637574 - DNA, 15 bp, Homo sapiens
ttttctatatagata

SEQ ID NO: 637575 - DNA, 15 bp, Homo sapiens
tttctatatagatat

SEQ ID NO: 637576 - DNA, 15 bp, Homo sapiens
ttctatatagatatg

SEQ ID NO: 637577 - DNA, 15 bp, Homo sapiens
tctatatagatatga

SEQ ID NO: 637578 - DNA, 15 bp, Homo sapiens
ctatatagatatgat

SEQ ID NO: 637579 - DNA, 15 bp, Homo sapiens
tatatagatatgata

SEQ ID NO: 637580 - DNA, 15 bp, Homo sapiens
atatagatatgatag

SEQ ID NO: 637581 - DNA, 15 bp, Homo sapiens
tatagatatgatagg

SEQ ID NO: 637582 - DNA, 15 bp, Homo sapiens
atagatatgataggt

SEQ ID NO: 637583 - DNA, 15 bp, Homo sapiens
tagatatgataggtc

SEQ ID NO: 637584 - DNA, 15 bp, Homo sapiens
agatatgataggtct

SEQ ID NO: 637585 - DNA, 15 bp, Homo sapiens
gatatgataggtctt

SEQ ID NO: 637586 - DNA, 15 bp, Homo sapiens
atatgataggtcttc

SEQ ID NO: 637587 - DNA, 15 bp, Homo sapiens
tatgataggtcttca

SEQ ID NO: 637588 - DNA, 15 bp, Homo sapiens
atgataggtcttcat

SEQ ID NO: 637589 - DNA, 15 bp, Homo sapiens
tgataggtcttcatg

SEQ ID NO: 637590 - DNA, 15 bp, Homo sapiens
gataggtcttcatga

SEQ ID NO: 637591 - DNA, 15 bp, Homo sapiens
ataggtcttcatgat

SEQ ID NO: 637592 - DNA, 15 bp, Homo sapiens
taggtcttcatgatt

SEQ ID NO: 637593 - DNA, 15 bp, Homo sapiens
aggtcttcatgattt

SEQ ID NO: 637594 - DNA, 15 bp, Homo sapiens
ggtcttcatgatttt

SEQ ID NO: 637595 - DNA, 15 bp, Homo sapiens
gtcttcatgattttt

SEQ ID NO: 637596 - DNA, 15 bp, Homo sapiens
tcttcatgatttttt

SEQ ID NO: 637597 - DNA, 15 bp, Homo sapiens
cttcatgattttttg

SEQ ID NO: 637598 - DNA, 15 bp, Homo sapiens
ttcatgattttttgt

SEQ ID NO: 637599 - DNA, 15 bp, Homo sapiens
tcatgattttttgtt

SEQ ID NO: 637600 - DNA, 15 bp, Homo sapiens
catgattttttgttt

SEQ ID NO: 637601 - DNA, 15 bp, Homo sapiens
atgattttttgtttg

SEQ ID NO: 637602 - DNA, 15 bp, Homo sapiens
tgattttttgtttgt

SEQ ID NO: 637603 - DNA, 15 bp, Homo sapiens
gattttttgtttgtt

SEQ ID NO: 637604 - DNA, 15 bp, Homo sapiens
attttttgtttgttt

SEQ ID NO: 637605 - DNA, 15 bp, Homo sapiens
ttttttgtttgtttt

SEQ ID NO: 637606 - DNA, 15 bp, Homo sapiens
tttttgtttgttttc

SEQ ID NO: 637607 - DNA, 15 bp, Homo sapiens
ttttgtttgttttcc

SEQ ID NO: 637608 - DNA, 15 bp, Homo sapiens
tttgtttgttttcct

SEQ ID NO: 637609 - DNA, 15 bp, Homo sapiens
ttgtttgttttcctt

SEQ ID NO: 637610 - DNA, 15 bp, Homo sapiens
tgtttgttttccttg

SEQ ID NO: 637611 - DNA, 15 bp, Homo sapiens
gtttgttttccttga

SEQ ID NO: 637612 - DNA, 15 bp, Homo sapiens
tttgttttccttgaa

SEQ ID NO: 637613 - DNA, 15 bp, Homo sapiens
ttgttttccttgaac

SEQ ID NO: 637614 - DNA, 15 bp, Homo sapiens
tgttttccttgaact

SEQ ID NO: 637615 - DNA, 15 bp, Homo sapiens
gttttccttgaactg

SEQ ID NO: 637616 - DNA, 15 bp, Homo sapiens
ttttccttgaactga

SEQ ID NO: 637617 - DNA, 15 bp, Homo sapiens
tttccttgaactgat

SEQ ID NO: 637618 - DNA, 15 bp, Homo sapiens
ttccttgaactgatt

SEQ ID NO: 637619 - DNA, 15 bp, Homo sapiens
tccttgaactgattc

SEQ ID NO: 637620 - DNA, 15 bp, Homo sapiens
ccttgaactgattcc

SEQ ID NO: 637621 - DNA, 15 bp, Homo sapiens
cttgaactgattccc

SEQ ID NO: 637622 - DNA, 15 bp, Homo sapiens
ttgaactgattccca

SEQ ID NO: 637623 - DNA, 15 bp, Homo sapiens
tgaactgattcccaa

SEQ ID NO: 637624 - DNA, 15 bp, Homo sapiens
gaactgattcccaaa

SEQ ID NO: 637625 - DNA, 15 bp, Homo sapiens
aactgattcccaaag

SEQ ID NO: 637626 - DNA, 15 bp, Homo sapiens
actgattcccaaagt

SEQ ID NO: 637627 - DNA, 15 bp, Homo sapiens
ctgattcccaaagta

SEQ ID NO: 637628 - DNA, 15 bp, Homo sapiens
tgattcccaaagtat

SEQ ID NO: 637629 - DNA, 15 bp, Homo sapiens
gattcccaaagtatt

SEQ ID NO: 637630 - DNA, 15 bp, Homo sapiens
attcccaaagtatta

SEQ ID NO: 637631 - DNA, 15 bp, Homo sapiens
ttcccaaagtattag

SEQ ID NO: 637632 - DNA, 15 bp, Homo sapiens
tcccaaagtattagc

SEQ ID NO: 637633 - DNA, 15 bp, Homo sapiens
cccaaagtattagcc

SEQ ID NO: 637634 - DNA, 15 bp, Homo sapiens
ccaaagtattagcct

SEQ ID NO: 637635 - DNA, 15 bp, Homo sapiens
caaagtattagcctc

SEQ ID NO: 637636 - DNA, 15 bp, Homo sapiens
aaagtattagcctca

SEQ ID NO: 637637 - DNA, 15 bp, Homo sapiens
aagtattagcctcat

SEQ ID NO: 637638 - DNA, 15 bp, Homo sapiens
agtattagcctcatg

SEQ ID NO: 637639 - DNA, 15 bp, Homo sapiens
gtattagcctcatga

SEQ ID NO: 637640 - DNA, 15 bp, Homo sapiens
tattagcctcatgaa

SEQ ID NO: 637641 - DNA, 15 bp, Homo sapiens
attagcctcatgaat

SEQ ID NO: 637642 - DNA, 15 bp, Homo sapiens
ttagcctcatgaatc

SEQ ID NO: 637643 - DNA, 15 bp, Homo sapiens
tagcctcatgaatca

SEQ ID NO: 637644 - DNA, 15 bp, Homo sapiens
agcctcatgaatcat

SEQ ID NO: 637645 - DNA, 15 bp, Homo sapiens
gcctcatgaatcatg

SEQ ID NO: 637646 - DNA, 15 bp, Homo sapiens
cctcatgaatcatgt

SEQ ID NO: 637647 - DNA, 15 bp, Homo sapiens
ctcatgaatcatgta

SEQ ID NO: 637648 - DNA, 15 bp, Homo sapiens
tcatgaatcatgtag

SEQ ID NO: 637649 - DNA, 15 bp, Homo sapiens
catgaatcatgtagt

SEQ ID NO: 637650 - DNA, 15 bp, Homo sapiens
atgaatcatgtagtc

SEQ ID NO: 637651 - DNA, 15 bp, Homo sapiens
tgaatcatgtagtca

SEQ ID NO: 637652 - DNA, 15 bp, Homo sapiens
gaatcatgtagtcat

SEQ ID NO: 637653 - DNA, 15 bp, Homo sapiens
aatcatgtagtcata

SEQ ID NO: 637654 - DNA, 15 bp, Homo sapiens
atcatgtagtcataa

SEQ ID NO: 637655 - DNA, 15 bp, Homo sapiens
tcatgtagtcataag

SEQ ID NO: 637656 - DNA, 15 bp, Homo sapiens
catgtagtcataaga

SEQ ID NO: 637657 - DNA, 15 bp, Homo sapiens
atgtagtcataagaa

SEQ ID NO: 637658 - DNA, 15 bp, Homo sapiens
tgtagtcataagaaa

SEQ ID NO: 637659 - DNA, 15 bp, Homo sapiens
gtagtcataagaaac

SEQ ID NO: 637660 - DNA, 15 bp, Homo sapiens
tagtcataagaaaca

SEQ ID NO: 637661 - DNA, 15 bp, Homo sapiens
agtcataagaaacac

SEQ ID NO: 637662 - DNA, 15 bp, Homo sapiens
gtcataagaaacaca

SEQ ID NO: 637663 - DNA, 15 bp, Homo sapiens
tcataagaaacacag

SEQ ID NO: 637664 - DNA, 15 bp, Homo sapiens
cataagaaacacagt

SEQ ID NO: 637665 - DNA, 15 bp, Homo sapiens
ataagaaacacagtc

SEQ ID NO: 637666 - DNA, 15 bp, Homo sapiens
taagaaacacagtca

SEQ ID NO: 637667 - DNA, 15 bp, Homo sapiens
aagaaacacagtcat

SEQ ID NO: 637668 - DNA, 15 bp, Homo sapiens
agaaacacagtcatt

SEQ ID NO: 637669 - DNA, 15 bp, Homo sapiens
gaaacacagtcattg

SEQ ID NO: 637670 - DNA, 15 bp, Homo sapiens
aaacacagtcattgt

SEQ ID NO: 637671 - DNA, 15 bp, Homo sapiens
aacacagtcattgta

SEQ ID NO: 637672 - DNA, 15 bp, Homo sapiens
acacagtcattgtat

SEQ ID NO: 637673 - DNA, 15 bp, Homo sapiens
cacagtcattgtatt

SEQ ID NO: 637674 - DNA, 15 bp, Homo sapiens
acagtcattgtattc

SEQ ID NO: 637675 - DNA, 15 bp, Homo sapiens
cagtcattgtattct

SEQ ID NO: 637676 - DNA, 15 bp, Homo sapiens
agtcattgtattctc

SEQ ID NO: 637677 - DNA, 15 bp, Homo sapiens
gtcattgtattctct

SEQ ID NO: 637678 - DNA, 15 bp, Homo sapiens
tcattgtattctctt

SEQ ID NO: 637679 - DNA, 15 bp, Homo sapiens
cattgtattctcttt

SEQ ID NO: 637680 - DNA, 15 bp, Homo sapiens
attgtattctctttg

SEQ ID NO: 637681 - DNA, 15 bp, Homo sapiens
ttgtattctctttgc

SEQ ID NO: 637682 - DNA, 15 bp, Homo sapiens
tgtattctctttgct

SEQ ID NO: 637683 - DNA, 15 bp, Homo sapiens
gtattctctttgctg

SEQ ID NO: 637684 - DNA, 15 bp, Homo sapiens
tattctctttgctgt

SEQ ID NO: 637685 - DNA, 15 bp, Homo sapiens
attctctttgctgta

SEQ ID NO: 637686 - DNA, 15 bp, Homo sapiens
ttctctttgctgtat

SEQ ID NO: 637687 - DNA, 15 bp, Homo sapiens
tctctttgctgtata

SEQ ID NO: 637688 - DNA, 15 bp, Homo sapiens
ctctttgctgtataa

SEQ ID NO: 637689 - DNA, 15 bp, Homo sapiens
tctttgctgtataat

SEQ ID NO: 637690 - DNA, 15 bp, Homo sapiens
ctttgctgtataatt

SEQ ID NO: 637691 - DNA, 15 bp, Homo sapiens
tttgctgtataattt

SEQ ID NO: 637692 - DNA, 15 bp, Homo sapiens
ttgctgtataatttt

SEQ ID NO: 637693 - DNA, 15 bp, Homo sapiens
tgctgtataattttg

SEQ ID NO: 637694 - DNA, 15 bp, Homo sapiens
gctgtataattttgg

SEQ ID NO: 637695 - DNA, 15 bp, Homo sapiens
ctgtataattttggt

SEQ ID NO: 637696 - DNA, 15 bp, Homo sapiens
tgtataattttggtt

SEQ ID NO: 637697 - DNA, 15 bp, Homo sapiens
gtataattttggttt

SEQ ID NO: 637698 - DNA, 15 bp, Homo sapiens
tataattttggtttc

SEQ ID NO: 637699 - DNA, 15 bp, Homo sapiens
ataattttggtttca

SEQ ID NO: 637700 - DNA, 15 bp, Homo sapiens
taattttggtttcag

SEQ ID NO: 637701 - DNA, 15 bp, Homo sapiens
aattttggtttcagt

SEQ ID NO: 637702 - DNA, 15 bp, Homo sapiens
attttggtttcagtt

SEQ ID NO: 637703 - DNA, 15 bp, Homo sapiens
ttttggtttcagttt

SEQ ID NO: 637704 - DNA, 15 bp, Homo sapiens
tttggtttcagtttt

SEQ ID NO: 637705 - DNA, 15 bp, Homo sapiens
ttggtttcagttttc

SEQ ID NO: 637706 - DNA, 15 bp, Homo sapiens
tggtttcagttttcc

SEQ ID NO: 637707 - DNA, 15 bp, Homo sapiens
ggtttcagttttcct

SEQ ID NO: 637708 - DNA, 15 bp, Homo sapiens
gtttcagttttcctt

SEQ ID NO: 637709 - DNA, 15 bp, Homo sapiens
tttcagttttcctta

SEQ ID NO: 637710 - DNA, 15 bp, Homo sapiens
ttcagttttccttac

SEQ ID NO: 637711 - DNA, 15 bp, Homo sapiens
tcagttttccttaca

SEQ ID NO: 637712 - DNA, 15 bp, Homo sapiens
cagttttccttacat

SEQ ID NO: 637713 - DNA, 15 bp, Homo sapiens
agttttccttacatt

SEQ ID NO: 637714 - DNA, 15 bp, Homo sapiens
gttttccttacattt

SEQ ID NO: 637715 - DNA, 15 bp, Homo sapiens
ttttccttacatttc

SEQ ID NO: 637716 - DNA, 15 bp, Homo sapiens
tttccttacatttcc

SEQ ID NO: 637717 - DNA, 15 bp, Homo sapiens
ttccttacatttcct

SEQ ID NO: 637718 - DNA, 15 bp, Homo sapiens
tccttacatttccta

SEQ ID NO: 637719 - DNA, 15 bp, Homo sapiens
ccttacatttcctat

SEQ ID NO: 637720 - DNA, 15 bp, Homo sapiens
cttacatttcctatt

SEQ ID NO: 637721 - DNA, 15 bp, Homo sapiens
ttacatttcctattc

SEQ ID NO: 637722 - DNA, 15 bp, Homo sapiens
tacatttcctattca

SEQ ID NO: 637723 - DNA, 15 bp, Homo sapiens
acatttcctattcaa

SEQ ID NO: 637724 - DNA, 15 bp, Homo sapiens
catttcctattcaag

SEQ ID NO: 637725 - DNA, 15 bp, Homo sapiens
atttcctattcaagg

SEQ ID NO: 637726 - DNA, 15 bp, Homo sapiens
tttcctattcaagga

SEQ ID NO: 637727 - DNA, 15 bp, Homo sapiens
ttcctattcaaggaa

SEQ ID NO: 637728 - DNA, 15 bp, Homo sapiens
tcctattcaaggaac

SEQ ID NO: 637729 - DNA, 15 bp, Homo sapiens
cctattcaaggaaca

SEQ ID NO: 637730 - DNA, 15 bp, Homo sapiens
ctattcaaggaacat

SEQ ID NO: 637731 - DNA, 15 bp, Homo sapiens
tattcaaggaacatt

SEQ ID NO: 637732 - DNA, 15 bp, Homo sapiens
attcaaggaacattt

SEQ ID NO: 637733 - DNA, 15 bp, Homo sapiens
ttcaaggaacatttt

SEQ ID NO: 637734 - DNA, 15 bp, Homo sapiens
tcaaggaacattttc

SEQ ID NO: 637735 - DNA, 15 bp, Homo sapiens
caaggaacattttcc

SEQ ID NO: 637736 - DNA, 15 bp, Homo sapiens
aaggaacattttcct

SEQ ID NO: 637737 - DNA, 15 bp, Homo sapiens
aggaacattttcctg

SEQ ID NO: 637738 - DNA, 15 bp, Homo sapiens
ggaacattttcctgt

SEQ ID NO: 637739 - DNA, 15 bp, Homo sapiens
gaacattttcctgta

SEQ ID NO: 637740 - DNA, 15 bp, Homo sapiens
aacattttcctgtaa

SEQ ID NO: 637741 - DNA, 15 bp, Homo sapiens
acattttcctgtaaa

SEQ ID NO: 637742 - DNA, 15 bp, Homo sapiens
cattttcctgtaaaa

SEQ ID NO: 637743 - DNA, 15 bp, Homo sapiens
attttcctgtaaaat

SEQ ID NO: 637744 - DNA, 15 bp, Homo sapiens
ttttcctgtaaaatg

SEQ ID NO: 637745 - DNA, 15 bp, Homo sapiens
tttcctgtaaaatga

SEQ ID NO: 637746 - DNA, 15 bp, Homo sapiens
ttcctgtaaaatgac

SEQ ID NO: 637747 - DNA, 15 bp, Homo sapiens
tcctgtaaaatgaca

SEQ ID NO: 637748 - DNA, 15 bp, Homo sapiens
cctgtaaaatgacag

SEQ ID NO: 637749 - DNA, 15 bp, Homo sapiens
ctgtaaaatgacagg

SEQ ID NO: 637750 - DNA, 15 bp, Homo sapiens
tgtaaaatgacaggt

SEQ ID NO: 637751 - DNA, 15 bp, Homo sapiens
gtaaaatgacaggtt

SEQ ID NO: 637752 - DNA, 15 bp, Homo sapiens
taaaatgacaggttg

SEQ ID NO: 637753 - DNA, 15 bp, Homo sapiens
aaaatgacaggttga

SEQ ID NO: 637754 - DNA, 15 bp, Homo sapiens
aaatgacaggttgaa

SEQ ID NO: 637755 - DNA, 15 bp, Homo sapiens
aatgacaggttgaag

SEQ ID NO: 637756 - DNA, 15 bp, Homo sapiens
atgacaggttgaaga

SEQ ID NO: 637757 - DNA, 15 bp, Homo sapiens
tgacaggttgaagaa

SEQ ID NO: 637758 - DNA, 15 bp, Homo sapiens
gacaggttgaagaaa

SEQ ID NO: 637759 - DNA, 15 bp, Homo sapiens
acaggttgaagaaaa

SEQ ID NO: 637760 - DNA, 15 bp, Homo sapiens
caggttgaagaaaac

SEQ ID NO: 637761 - DNA, 15 bp, Homo sapiens
aggttgaagaaaaca

SEQ ID NO: 637762 - DNA, 15 bp, Homo sapiens
ggttgaagaaaacag

SEQ ID NO: 637763 - DNA, 15 bp, Homo sapiens
gttgaagaaaacagc

SEQ ID NO: 637764 - DNA, 15 bp, Homo sapiens
ttgaagaaaacagcc

SEQ ID NO: 637765 - DNA, 15 bp, Homo sapiens
tgaagaaaacagcca

SEQ ID NO: 637766 - DNA, 15 bp, Homo sapiens
gaagaaaacagccat

SEQ ID NO: 637767 - DNA, 15 bp, Homo sapiens
aagaaaacagccata

SEQ ID NO: 637768 - DNA, 15 bp, Homo sapiens
agaaaacagccataa

SEQ ID NO: 637769 - DNA, 15 bp, Homo sapiens
gaaaacagccataat

SEQ ID NO: 637770 - DNA, 15 bp, Homo sapiens
aaaacagccataatt

SEQ ID NO: 637771 - DNA, 15 bp, Homo sapiens
aaacagccataattt

SEQ ID NO: 637772 - DNA, 15 bp, Homo sapiens
aacagccataattta

SEQ ID NO: 637773 - DNA, 15 bp, Homo sapiens
acagccataatttag

SEQ ID NO: 637774 - DNA, 15 bp, Homo sapiens
cagccataatttagt

SEQ ID NO: 637775 - DNA, 15 bp, Homo sapiens
agccataatttagta

SEQ ID NO: 637776 - DNA, 15 bp, Homo sapiens
gccataatttagtag

SEQ ID NO: 637777 - DNA, 15 bp, Homo sapiens
ccataatttagtaga

SEQ ID NO: 637778 - DNA, 15 bp, Homo sapiens
cataatttagtagag

SEQ ID NO: 637779 - DNA, 15 bp, Homo sapiens
ataatttagtagaga

SEQ ID NO: 637780 - DNA, 15 bp, Homo sapiens
taatttagtagagaa

SEQ ID NO: 637781 - DNA, 15 bp, Homo sapiens
aatttagtagagaat

SEQ ID NO: 637782 - DNA, 15 bp, Homo sapiens
atttagtagagaata

SEQ ID NO: 637783 - DNA, 15 bp, Homo sapiens
tttagtagagaatag

SEQ ID NO: 637784 - DNA, 15 bp, Homo sapiens
ttagtagagaatagc

SEQ ID NO: 637785 - DNA, 15 bp, Homo sapiens
tagtagagaatagcg

SEQ ID NO: 637786 - DNA, 15 bp, Homo sapiens
agtagagaatagcgc

SEQ ID NO: 637787 - DNA, 15 bp, Homo sapiens
gtagagaatagcgcg

SEQ ID NO: 637788 - DNA, 15 bp, Homo sapiens
tagagaatagcgcga

SEQ ID NO: 637789 - DNA, 15 bp, Homo sapiens
agagaatagcgcgag

SEQ ID NO: 637790 - DNA, 15 bp, Homo sapiens
gagaatagcgcgaga

SEQ ID NO: 637791 - DNA, 15 bp, Homo sapiens
agaatagcgcgagag

SEQ ID NO: 637792 - DNA, 15 bp, Homo sapiens
gaatagcgcgagagc

SEQ ID NO: 637793 - DNA, 15 bp, Homo sapiens
aatagcgcgagagct

SEQ ID NO: 637794 - DNA, 15 bp, Homo sapiens
atagcgcgagagcta

SEQ ID NO: 637795 - DNA, 15 bp, Homo sapiens
tagcgcgagagctat

SEQ ID NO: 637796 - DNA, 15 bp, Homo sapiens
agcgcgagagctatt

SEQ ID NO: 637797 - DNA, 15 bp, Homo sapiens
gcgcgagagctattc

SEQ ID NO: 637798 - DNA, 15 bp, Homo sapiens
cgcgagagctattct

SEQ ID NO: 637799 - DNA, 15 bp, Homo sapiens
gcgagagctattcta

SEQ ID NO: 637800 - DNA, 15 bp, Homo sapiens
cgagagctattctag

SEQ ID NO: 637801 - DNA, 15 bp, Homo sapiens
gagagctattctaga

SEQ ID NO: 637802 - DNA, 15 bp, Homo sapiens
agagctattctagac

SEQ ID NO: 637803 - DNA, 15 bp, Homo sapiens
gagctattctagact

SEQ ID NO: 637804 - DNA, 15 bp, Homo sapiens
agctattctagactg

SEQ ID NO: 637805 - DNA, 15 bp, Homo sapiens
gctattctagactgt

SEQ ID NO: 637806 - DNA, 15 bp, Homo sapiens
ctattctagactgta

SEQ ID NO: 637807 - DNA, 15 bp, Homo sapiens
tattctagactgtaa

SEQ ID NO: 637808 - DNA, 15 bp, Homo sapiens
attctagactgtaac

SEQ ID NO: 637809 - DNA, 15 bp, Homo sapiens
ttctagactgtaacg

SEQ ID NO: 637810 - DNA, 15 bp, Homo sapiens
tctagactgtaacga

SEQ ID NO: 637811 - DNA, 15 bp, Homo sapiens
ctagactgtaacgaa

SEQ ID NO: 637812 - DNA, 15 bp, Homo sapiens
tagactgtaacgaaa

SEQ ID NO: 637813 - DNA, 15 bp, Homo sapiens
agactgtaacgaaag

SEQ ID NO: 637814 - DNA, 15 bp, Homo sapiens
gactgtaacgaaagc

SEQ ID NO: 637815 - DNA, 15 bp, Homo sapiens
actgtaacgaaagcc

SEQ ID NO: 637816 - DNA, 15 bp, Homo sapiens
ctgtaacgaaagcca

SEQ ID NO: 637817 - DNA, 15 bp, Homo sapiens
tgtaacgaaagccat

SEQ ID NO: 637818 - DNA, 15 bp, Homo sapiens
gtaacgaaagccata

SEQ ID NO: 637819 - DNA, 15 bp, Homo sapiens
taacgaaagccatat

SEQ ID NO: 637820 - DNA, 15 bp, Homo sapiens
aacgaaagccatatg

SEQ ID NO: 637821 - DNA, 15 bp, Homo sapiens
acgaaagccatatgc

SEQ ID NO: 637822 - DNA, 15 bp, Homo sapiens
cgaaagccatatgct

SEQ ID NO: 637823 - DNA, 15 bp, Homo sapiens
gaaagccatatgcta

SEQ ID NO: 637824 - DNA, 15 bp, Homo sapiens
aaagccatatgctat

SEQ ID NO: 637825 - DNA, 15 bp, Homo sapiens
aagccatatgctatc

SEQ ID NO: 637826 - DNA, 15 bp, Homo sapiens
agccatatgctatca

SEQ ID NO: 637827 - DNA, 15 bp, Homo sapiens
gccatatgctatcac

SEQ ID NO: 637828 - DNA, 15 bp, Homo sapiens
ccatatgctatcaca

SEQ ID NO: 637829 - DNA, 15 bp, Homo sapiens
catatgctatcacaa

SEQ ID NO: 637830 - DNA, 15 bp, Homo sapiens
atatgctatcacaat

SEQ ID NO: 637831 - DNA, 15 bp, Homo sapiens
tatgctatcacaatt

SEQ ID NO: 637832 - DNA, 15 bp, Homo sapiens
atgctatcacaattt

SEQ ID NO: 637833 - DNA, 15 bp, Homo sapiens
tgctatcacaattta

SEQ ID NO: 637834 - DNA, 15 bp, Homo sapiens
gctatcacaatttaa

SEQ ID NO: 637835 - DNA, 15 bp, Homo sapiens
ctatcacaatttaat

SEQ ID NO: 637836 - DNA, 15 bp, Homo sapiens
tatcacaatttaatt

SEQ ID NO: 637837 - DNA, 15 bp, Homo sapiens
atcacaatttaattt

SEQ ID NO: 637838 - DNA, 15 bp, Homo sapiens
tcacaatttaattta

SEQ ID NO: 637839 - DNA, 15 bp, Homo sapiens
cacaatttaatttat

SEQ ID NO: 637840 - DNA, 15 bp, Homo sapiens
acaatttaatttatt

SEQ ID NO: 637841 - DNA, 15 bp, Homo sapiens
caatttaatttattt

SEQ ID NO: 637842 - DNA, 15 bp, Homo sapiens
aatttaatttatttc

SEQ ID NO: 637843 - DNA, 15 bp, Homo sapiens
atttaatttatttca

SEQ ID NO: 637844 - DNA, 15 bp, Homo sapiens
tttaatttatttcaa

SEQ ID NO: 637845 - DNA, 15 bp, Homo sapiens
ttaatttatttcaag

SEQ ID NO: 637846 - DNA, 15 bp, Homo sapiens
taatttatttcaagt

SEQ ID NO: 637847 - DNA, 15 bp, Homo sapiens
aatttatttcaagta

SEQ ID NO: 637848 - DNA, 15 bp, Homo sapiens
atttatttcaagtac

SEQ ID NO: 637849 - DNA, 15 bp, Homo sapiens
tttatttcaagtact

SEQ ID NO: 637850 - DNA, 15 bp, Homo sapiens
ttatttcaagtacta

SEQ ID NO: 637851 - DNA, 15 bp, Homo sapiens
tatttcaagtactaa

SEQ ID NO: 637852 - DNA, 15 bp, Homo sapiens
atttcaagtactaat

SEQ ID NO: 637853 - DNA, 15 bp, Homo sapiens
tttcaagtactaata

SEQ ID NO: 637854 - DNA, 15 bp, Homo sapiens
ttcaagtactaataa

SEQ ID NO: 637855 - DNA, 15 bp, Homo sapiens
tcaagtactaataag

SEQ ID NO: 637856 - DNA, 15 bp, Homo sapiens
caagtactaataagc

SEQ ID NO: 637857 - DNA, 15 bp, Homo sapiens
aagtactaataagct

SEQ ID NO: 637858 - DNA, 15 bp, Homo sapiens
agtactaataagctg

SEQ ID NO: 637859 - DNA, 15 bp, Homo sapiens
gtactaataagctga

SEQ ID NO: 637860 - DNA, 15 bp, Homo sapiens
tactaataagctgat

SEQ ID NO: 637861 - DNA, 15 bp, Homo sapiens
actaataagctgatg

SEQ ID NO: 637862 - DNA, 15 bp, Homo sapiens
ctaataagctgatga

SEQ ID NO: 637863 - DNA, 15 bp, Homo sapiens
taataagctgatgac

SEQ ID NO: 637864 - DNA, 15 bp, Homo sapiens
aataagctgatgaca

SEQ ID NO: 637865 - DNA, 15 bp, Homo sapiens
ataagctgatgacaa

SEQ ID NO: 637866 - DNA, 15 bp, Homo sapiens
taagctgatgacaaa

SEQ ID NO: 637867 - DNA, 15 bp, Homo sapiens
aagctgatgacaaaa

SEQ ID NO: 637868 - DNA, 15 bp, Homo sapiens
agctgatgacaaaac

SEQ ID NO: 637869 - DNA, 15 bp, Homo sapiens
gctgatgacaaaaca

SEQ ID NO: 637870 - DNA, 15 bp, Homo sapiens
ctgatgacaaaacag

SEQ ID NO: 637871 - DNA, 15 bp, Homo sapiens
tgatgacaaaacagc

SEQ ID NO: 637872 - DNA, 15 bp, Homo sapiens
gatgacaaaacagcg

SEQ ID NO: 637873 - DNA, 15 bp, Homo sapiens
atgacaaaacagcga

SEQ ID NO: 637874 - DNA, 15 bp, Homo sapiens
tgacaaaacagcgat

SEQ ID NO: 637875 - DNA, 15 bp, Homo sapiens
gacaaaacagcgatg

SEQ ID NO: 637876 - DNA, 15 bp, Homo sapiens
acaaaacagcgatgt

SEQ ID NO: 637877 - DNA, 15 bp, Homo sapiens
caaaacagcgatgtc

SEQ ID NO: 637878 - DNA, 15 bp, Homo sapiens
aaaacagcgatgtct

SEQ ID NO: 637879 - DNA, 15 bp, Homo sapiens
aaacagcgatgtctt

SEQ ID NO: 637880 - DNA, 15 bp, Homo sapiens
aacagcgatgtcttt

SEQ ID NO: 637881 - DNA, 15 bp, Homo sapiens
acagcgatgtctttt

SEQ ID NO: 637882 - DNA, 15 bp, Homo sapiens
cagcgatgtctttta

SEQ ID NO: 637883 - DNA, 15 bp, Homo sapiens
agcgatgtcttttag

SEQ ID NO: 637884 - DNA, 15 bp, Homo sapiens
gcgatgtcttttagt

SEQ ID NO: 637885 - DNA, 15 bp, Homo sapiens
cgatgtcttttagtt

SEQ ID NO: 637886 - DNA, 15 bp, Homo sapiens
gatgtcttttagttt

SEQ ID NO: 637887 - DNA, 15 bp, Homo sapiens
atgtcttttagttta

SEQ ID NO: 637888 - DNA, 15 bp, Homo sapiens
tgtcttttagtttac

SEQ ID NO: 637889 - DNA, 15 bp, Homo sapiens
gtcttttagtttact

SEQ ID NO: 637890 - DNA, 15 bp, Homo sapiens
tcttttagtttactc

SEQ ID NO: 637891 - DNA, 15 bp, Homo sapiens
cttttagtttactca

SEQ ID NO: 637892 - DNA, 15 bp, Homo sapiens
ttttagtttactcac

SEQ ID NO: 637893 - DNA, 15 bp, Homo sapiens
tttagtttactcaca

SEQ ID NO: 637894 - DNA, 15 bp, Homo sapiens
ttagtttactcacac

SEQ ID NO: 637895 - DNA, 15 bp, Homo sapiens
tagtttactcacacg

SEQ ID NO: 637896 - DNA, 15 bp, Homo sapiens
agtttactcacacga

SEQ ID NO: 637897 - DNA, 15 bp, Homo sapiens
gtttactcacacgaa

SEQ ID NO: 637898 - DNA, 15 bp, Homo sapiens
tttactcacacgaac

SEQ ID NO: 637899 - DNA, 15 bp, Homo sapiens
ttactcacacgaact

SEQ ID NO: 637900 - DNA, 15 bp, Homo sapiens
tactcacacgaacta

SEQ ID NO: 637901 - DNA, 15 bp, Homo sapiens
actcacacgaactat

SEQ ID NO: 637902 - DNA, 15 bp, Homo sapiens
ctcacacgaactatt

SEQ ID NO: 637903 - DNA, 15 bp, Homo sapiens
tcacacgaactattt

SEQ ID NO: 637904 - DNA, 15 bp, Homo sapiens
cacacgaactatttc

SEQ ID NO: 637905 - DNA, 15 bp, Homo sapiens
acacgaactatttct

SEQ ID NO: 637906 - DNA, 15 bp, Homo sapiens
cacgaactatttctc

SEQ ID NO: 637907 - DNA, 15 bp, Homo sapiens
acgaactatttctct

SEQ ID NO: 637908 - DNA, 15 bp, Homo sapiens
cgaactatttctctt

SEQ ID NO: 637909 - DNA, 15 bp, Homo sapiens
gaactatttctcttt

SEQ ID NO: 637910 - DNA, 15 bp, Homo sapiens
aactatttctctttt

SEQ ID NO: 637911 - DNA, 15 bp, Homo sapiens
actatttctcttttc

SEQ ID NO: 637912 - DNA, 15 bp, Homo sapiens
ctatttctcttttct

SEQ ID NO: 637913 - DNA, 15 bp, Homo sapiens
tatttctcttttctc

SEQ ID NO: 637914 - DNA, 15 bp, Homo sapiens
atttctcttttctcc

SEQ ID NO: 637915 - DNA, 15 bp, Homo sapiens
tttctcttttctcct

SEQ ID NO: 637916 - DNA, 15 bp, Homo sapiens
ttctcttttctcctt

SEQ ID NO: 637917 - DNA, 15 bp, Homo sapiens
tctcttttctccttt

SEQ ID NO: 637918 - DNA, 15 bp, Homo sapiens
ctcttttctcctttt

SEQ ID NO: 637919 - DNA, 15 bp, Homo sapiens
tcttttctccttttg

SEQ ID NO: 637920 - DNA, 15 bp, Homo sapiens
cttttctccttttga

SEQ ID NO: 637921 - DNA, 15 bp, Homo sapiens
ttttctccttttgat

SEQ ID NO: 637922 - DNA, 15 bp, Homo sapiens
tttctccttttgatc

SEQ ID NO: 637923 - DNA, 15 bp, Homo sapiens
ttctccttttgatca

SEQ ID NO: 637924 - DNA, 15 bp, Homo sapiens
tctccttttgatcat

SEQ ID NO: 637925 - DNA, 15 bp, Homo sapiens
ctccttttgatcatc

SEQ ID NO: 637926 - DNA, 15 bp, Homo sapiens
tccttttgatcatct

SEQ ID NO: 637927 - DNA, 15 bp, Homo sapiens
ccttttgatcatcta

SEQ ID NO: 637928 - DNA, 15 bp, Homo sapiens
cttttgatcatctag

SEQ ID NO: 637929 - DNA, 15 bp, Homo sapiens
ttttgatcatctaga

SEQ ID NO: 637930 - DNA, 15 bp, Homo sapiens
tttgatcatctagag

SEQ ID NO: 637931 - DNA, 15 bp, Homo sapiens
ttgatcatctagagg

SEQ ID NO: 637932 - DNA, 15 bp, Homo sapiens
tgatcatctagagga

SEQ ID NO: 637933 - DNA, 15 bp, Homo sapiens
gatcatctagaggaa

SEQ ID NO: 637934 - DNA, 15 bp, Homo sapiens
atcatctagaggaac

SEQ ID NO: 637935 - DNA, 15 bp, Homo sapiens
tcatctagaggaacg

SEQ ID NO: 637936 - DNA, 15 bp, Homo sapiens
catctagaggaacgg

SEQ ID NO: 637937 - DNA, 15 bp, Homo sapiens
atctagaggaacggg

SEQ ID NO: 637938 - DNA, 15 bp, Homo sapiens
tctagaggaacgggc

SEQ ID NO: 637939 - DNA, 15 bp, Homo sapiens
ctagaggaacgggca

SEQ ID NO: 637940 - DNA, 15 bp, Homo sapiens
tagaggaacgggcaa

SEQ ID NO: 637941 - DNA, 15 bp, Homo sapiens
agaggaacgggcaac

SEQ ID NO: 637942 - DNA, 15 bp, Homo sapiens
gaggaacgggcaact

SEQ ID NO: 637943 - DNA, 15 bp, Homo sapiens
aggaacgggcaactt

SEQ ID NO: 637944 - DNA, 15 bp, Homo sapiens
ggaacgggcaacttg

SEQ ID NO: 637945 - DNA, 15 bp, Homo sapiens
gaacgggcaacttgg

SEQ ID NO: 637946 - DNA, 15 bp, Homo sapiens
aacgggcaacttggt

SEQ ID NO: 637947 - DNA, 15 bp, Homo sapiens
acgggcaacttggtt

SEQ ID NO: 637948 - DNA, 15 bp, Homo sapiens
cgggcaacttggttt

SEQ ID NO: 637949 - DNA, 15 bp, Homo sapiens
gggcaacttggtttc

SEQ ID NO: 637950 - DNA, 15 bp, Homo sapiens
ggcaacttggtttct

SEQ ID NO: 637951 - DNA, 15 bp, Homo sapiens
gcaacttggtttctt

SEQ ID NO: 637952 - DNA, 15 bp, Homo sapiens
caacttggtttcttc

SEQ ID NO: 637953 - DNA, 15 bp, Homo sapiens
aacttggtttcttct

SEQ ID NO: 637954 - DNA, 15 bp, Homo sapiens
acttggtttcttctt

SEQ ID NO: 637955 - DNA, 15 bp, Homo sapiens
cttggtttcttcttt

SEQ ID NO: 637956 - DNA, 15 bp, Homo sapiens
ttggtttcttcttta

SEQ ID NO: 637957 - DNA, 15 bp, Homo sapiens
tggtttcttctttag

SEQ ID NO: 637958 - DNA, 15 bp, Homo sapiens
ggtttcttctttagc

SEQ ID NO: 637959 - DNA, 15 bp, Homo sapiens
gtttcttctttagct

SEQ ID NO: 637960 - DNA, 15 bp, Homo sapiens
tttcttctttagctt

SEQ ID NO: 637961 - DNA, 15 bp, Homo sapiens
ttcttctttagcttc

SEQ ID NO: 637962 - DNA, 15 bp, Homo sapiens
tcttctttagcttcc

SEQ ID NO: 637963 - DNA, 15 bp, Homo sapiens
cttctttagcttcct

SEQ ID NO: 637964 - DNA, 15 bp, Homo sapiens
ttctttagcttcctt

SEQ ID NO: 637965 - DNA, 15 bp, Homo sapiens
tctttagcttccttg

SEQ ID NO: 637966 - DNA, 15 bp, Homo sapiens
ctttagcttccttgt

SEQ ID NO: 637967 - DNA, 15 bp, Homo sapiens
tttagcttccttgtt

SEQ ID NO: 637968 - DNA, 15 bp, Homo sapiens
ttagcttccttgttc

SEQ ID NO: 637969 - DNA, 15 bp, Homo sapiens
tagcttccttgttct

SEQ ID NO: 637970 - DNA, 15 bp, Homo sapiens
agcttccttgttctc

SEQ ID NO: 637971 - DNA, 15 bp, Homo sapiens
gcttccttgttctca

SEQ ID NO: 637972 - DNA, 15 bp, Homo sapiens
cttccttgttctcat

SEQ ID NO: 637973 - DNA, 15 bp, Homo sapiens
ttccttgttctcatt

SEQ ID NO: 637974 - DNA, 15 bp, Homo sapiens
tccttgttctcatta

SEQ ID NO: 637975 - DNA, 15 bp, Homo sapiens
ccttgttctcattaa

SEQ ID NO: 637976 - DNA, 15 bp, Homo sapiens
cttgttctcattaag

SEQ ID NO: 637977 - DNA, 15 bp, Homo sapiens
ttgttctcattaaga

SEQ ID NO: 637978 - DNA, 15 bp, Homo sapiens
tgttctcattaagat

SEQ ID NO: 637979 - DNA, 15 bp, Homo sapiens
gttctcattaagatt

SEQ ID NO: 637980 - DNA, 15 bp, Homo sapiens
ttctcattaagattg

SEQ ID NO: 637981 - DNA, 15 bp, Homo sapiens
tctcattaagattga

SEQ ID NO: 637982 - DNA, 15 bp, Homo sapiens
ctcattaagattgaa

SEQ ID NO: 637983 - DNA, 15 bp, Homo sapiens
tcattaagattgaac

SEQ ID NO: 637984 - DNA, 15 bp, Homo sapiens
cattaagattgaaca

SEQ ID NO: 637985 - DNA, 15 bp, Homo sapiens
attaagattgaacaa

SEQ ID NO: 637986 - DNA, 15 bp, Homo sapiens
ttaagattgaacaat

SEQ ID NO: 637987 - DNA, 15 bp, Homo sapiens
taagattgaacaatg

SEQ ID NO: 637988 - DNA, 15 bp, Homo sapiens
aagattgaacaatgc

SEQ ID NO: 637989 - DNA, 15 bp, Homo sapiens
agattgaacaatgcc

SEQ ID NO: 637990 - DNA, 15 bp, Homo sapiens
gattgaacaatgcct

SEQ ID NO: 637991 - DNA, 15 bp, Homo sapiens
attgaacaatgcctc

SEQ ID NO: 637992 - DNA, 15 bp, Homo sapiens
ttgaacaatgcctct

SEQ ID NO: 637993 - DNA, 15 bp, Homo sapiens
tgaacaatgcctcta

SEQ ID NO: 637994 - DNA, 15 bp, Homo sapiens
gaacaatgcctctaa

SEQ ID NO: 637995 - DNA, 15 bp, Homo sapiens
aacaatgcctctaaa

SEQ ID NO: 637996 - DNA, 15 bp, Homo sapiens
acaatgcctctaaag

SEQ ID NO: 637997 - DNA, 15 bp, Homo sapiens
caatgcctctaaagt

SEQ ID NO: 637998 - DNA, 15 bp, Homo sapiens
aatgcctctaaagtg

SEQ ID NO: 637999 - DNA, 15 bp, Homo sapiens
atgcctctaaagtga

SEQ ID NO: 638000 - DNA, 15 bp, Homo sapiens
tgcctctaaagtgaa

SEQ ID NO: 638001 - DNA, 15 bp, Homo sapiens
gcctctaaagtgaac

SEQ ID NO: 638002 - DNA, 15 bp, Homo sapiens
cctctaaagtgaacc

SEQ ID NO: 638003 - DNA, 15 bp, Homo sapiens
ctctaaagtgaacca

SEQ ID NO: 638004 - DNA, 15 bp, Homo sapiens
tctaaagtgaaccac

SEQ ID NO: 638005 - DNA, 15 bp, Homo sapiens
ctaaagtgaaccaca

SEQ ID NO: 638006 - DNA, 15 bp, Homo sapiens
taaagtgaaccacag

SEQ ID NO: 638007 - DNA, 15 bp, Homo sapiens
aaagtgaaccacaga

SEQ ID NO: 638008 - DNA, 15 bp, Homo sapiens
aagtgaaccacagac

SEQ ID NO: 638009 - DNA, 15 bp, Homo sapiens
agtgaaccacagact

SEQ ID NO: 638010 - DNA, 15 bp, Homo sapiens
gtgaaccacagactt

SEQ ID NO: 638011 - DNA, 15 bp, Homo sapiens
tgaaccacagacttg

SEQ ID NO: 638012 - DNA, 15 bp, Homo sapiens
gaaccacagacttgc

SEQ ID NO: 638013 - DNA, 15 bp, Homo sapiens
aaccacagacttgca

SEQ ID NO: 638014 - DNA, 15 bp, Homo sapiens
accacagacttgcat

SEQ ID NO: 638015 - DNA, 15 bp, Homo sapiens
ccacagacttgcatg

SEQ ID NO: 638016 - DNA, 15 bp, Homo sapiens
cacagacttgcatgc

SEQ ID NO: 638017 - DNA, 15 bp, Homo sapiens
acagacttgcatgca

SEQ ID NO: 638018 - DNA, 15 bp, Homo sapiens
cagacttgcatgcaa

SEQ ID NO: 638019 - DNA, 15 bp, Homo sapiens
agacttgcatgcaag

SEQ ID NO: 638020 - DNA, 15 bp, Homo sapiens
gacttgcatgcaagc

SEQ ID NO: 638021 - DNA, 15 bp, Homo sapiens
acttgcatgcaagct

SEQ ID NO: 638022 - DNA, 15 bp, Homo sapiens
cttgcatgcaagctg

SEQ ID NO: 638023 - DNA, 15 bp, Homo sapiens
ttgcatgcaagctga

SEQ ID NO: 638024 - DNA, 15 bp, Homo sapiens
tgcatgcaagctgaa

SEQ ID NO: 638025 - DNA, 15 bp, Homo sapiens
gcatgcaagctgaaa

SEQ ID NO: 638026 - DNA, 15 bp, Homo sapiens
catgcaagctgaaaa

SEQ ID NO: 638027 - DNA, 15 bp, Homo sapiens
atgcaagctgaaaac

SEQ ID NO: 638028 - DNA, 15 bp, Homo sapiens
tgcaagctgaaaacc

SEQ ID NO: 638029 - DNA, 15 bp, Homo sapiens
gcaagctgaaaacct

SEQ ID NO: 638030 - DNA, 15 bp, Homo sapiens
caagctgaaaacctt

SEQ ID NO: 638031 - DNA, 15 bp, Homo sapiens
aagctgaaaaccttt

SEQ ID NO: 638032 - DNA, 15 bp, Homo sapiens
agctgaaaaccttta

SEQ ID NO: 638033 - DNA, 15 bp, Homo sapiens
gctgaaaacctttac

SEQ ID NO: 638034 - DNA, 15 bp, Homo sapiens
ctgaaaacctttacc

SEQ ID NO: 638035 - DNA, 15 bp, Homo sapiens
tgaaaacctttacca

SEQ ID NO: 638036 - DNA, 15 bp, Homo sapiens
gaaaacctttaccaa

SEQ ID NO: 638037 - DNA, 15 bp, Homo sapiens
aaaacctttaccaaa

SEQ ID NO: 638038 - DNA, 15 bp, Homo sapiens
aaacctttaccaaat

SEQ ID NO: 638039 - DNA, 15 bp, Homo sapiens
aacctttaccaaatg

SEQ ID NO: 638040 - DNA, 15 bp, Homo sapiens
acctttaccaaatgc

SEQ ID NO: 638041 - DNA, 15 bp, Homo sapiens
cctttaccaaatgca

SEQ ID NO: 638042 - DNA, 15 bp, Homo sapiens
ctttaccaaatgcag

SEQ ID NO: 638043 - DNA, 15 bp, Homo sapiens
tttaccaaatgcagt

SEQ ID NO: 638044 - DNA, 15 bp, Homo sapiens
ttaccaaatgcagtc

SEQ ID NO: 638045 - DNA, 15 bp, Homo sapiens
taccaaatgcagtct

SEQ ID NO: 638046 - DNA, 15 bp, Homo sapiens
accaaatgcagtctt

SEQ ID NO: 638047 - DNA, 15 bp, Homo sapiens
ccaaatgcagtctta

SEQ ID NO: 638048 - DNA, 15 bp, Homo sapiens
caaatgcagtcttaa

SEQ ID NO: 638049 - DNA, 15 bp, Homo sapiens
aaatgcagtcttaat

SEQ ID NO: 638050 - DNA, 15 bp, Homo sapiens
aatgcagtcttaatt

SEQ ID NO: 638051 - DNA, 15 bp, Homo sapiens
atgcagtcttaattt

SEQ ID NO: 638052 - DNA, 15 bp, Homo sapiens
tgcagtcttaatttg

SEQ ID NO: 638053 - DNA, 15 bp, Homo sapiens
gcagtcttaatttgt

SEQ ID NO: 638054 - DNA, 15 bp, Homo sapiens
cagtcttaatttgta

SEQ ID NO: 638055 - DNA, 15 bp, Homo sapiens
agtcttaatttgtac

SEQ ID NO: 638056 - DNA, 15 bp, Homo sapiens
gtcttaatttgtact

SEQ ID NO: 638057 - DNA, 15 bp, Homo sapiens
tcttaatttgtactt

SEQ ID NO: 638058 - DNA, 15 bp, Homo sapiens
cttaatttgtacttt

SEQ ID NO: 638059 - DNA, 15 bp, Homo sapiens
ttaatttgtactttg

SEQ ID NO: 638060 - DNA, 15 bp, Homo sapiens
taatttgtactttga

SEQ ID NO: 638061 - DNA, 15 bp, Homo sapiens
aatttgtactttgag

SEQ ID NO: 638062 - DNA, 15 bp, Homo sapiens
atttgtactttgaga

SEQ ID NO: 638063 - DNA, 15 bp, Homo sapiens
tttgtactttgagaa

SEQ ID NO: 638064 - DNA, 15 bp, Homo sapiens
ttgtactttgagaaa

SEQ ID NO: 638065 - DNA, 15 bp, Homo sapiens
tgtactttgagaaaa

SEQ ID NO: 638066 - DNA, 15 bp, Homo sapiens
gtactttgagaaaaa

SEQ ID NO: 638067 - DNA, 15 bp, Homo sapiens
tactttgagaaaaac

SEQ ID NO: 638068 - DNA, 15 bp, Homo sapiens
actttgagaaaaaca

SEQ ID NO: 638069 - DNA, 15 bp, Homo sapiens
ctttgagaaaaacat

SEQ ID NO: 638070 - DNA, 15 bp, Homo sapiens
tttgagaaaaacatt

SEQ ID NO: 638071 - DNA, 15 bp, Homo sapiens
ttgagaaaaacattt

SEQ ID NO: 638072 - DNA, 15 bp, Homo sapiens
tgagaaaaacatttt

SEQ ID NO: 638073 - DNA, 15 bp, Homo sapiens
gagaaaaacattttc

SEQ ID NO: 638074 - DNA, 15 bp, Homo sapiens
agaaaaacattttca

SEQ ID NO: 638075 - DNA, 15 bp, Homo sapiens
gaaaaacattttcaa

SEQ ID NO: 638076 - DNA, 15 bp, Homo sapiens
aaaaacattttcaag

SEQ ID NO: 638077 - DNA, 15 bp, Homo sapiens
aaaacattttcaagg

SEQ ID NO: 638078 - DNA, 15 bp, Homo sapiens
aaacattttcaaggt

SEQ ID NO: 638079 - DNA, 15 bp, Homo sapiens
aacattttcaaggta

SEQ ID NO: 638080 - DNA, 15 bp, Homo sapiens
acattttcaaggtat

SEQ ID NO: 638081 - DNA, 15 bp, Homo sapiens
cattttcaaggtatt

SEQ ID NO: 638082 - DNA, 15 bp, Homo sapiens
attttcaaggtattt

SEQ ID NO: 638083 - DNA, 15 bp, Homo sapiens
ttttcaaggtatttt

SEQ ID NO: 638084 - DNA, 15 bp, Homo sapiens
tttcaaggtatttta

SEQ ID NO: 638085 - DNA, 15 bp, Homo sapiens
ttcaaggtattttat

SEQ ID NO: 638086 - DNA, 15 bp, Homo sapiens
tcaaggtattttatc

SEQ ID NO: 638087 - DNA, 15 bp, Homo sapiens
caaggtattttatcc

SEQ ID NO: 638088 - DNA, 15 bp, Homo sapiens
aaggtattttatcct

SEQ ID NO: 638089 - DNA, 15 bp, Homo sapiens
aggtattttatcctt

SEQ ID NO: 638090 - DNA, 15 bp, Homo sapiens
ggtattttatccttt

SEQ ID NO: 638091 - DNA, 15 bp, Homo sapiens
gtattttatcctttt

SEQ ID NO: 638092 - DNA, 15 bp, Homo sapiens
tattttatccttttc

SEQ ID NO: 638093 - DNA, 15 bp, Homo sapiens
attttatccttttct

SEQ ID NO: 638094 - DNA, 15 bp, Homo sapiens
ttttatccttttctc

SEQ ID NO: 638095 - DNA, 15 bp, Homo sapiens
tttatccttttctcc

SEQ ID NO: 638096 - DNA, 15 bp, Homo sapiens
ttatccttttctcca

SEQ ID NO: 638097 - DNA, 15 bp, Homo sapiens
tatccttttctccaa

SEQ ID NO: 638098 - DNA, 15 bp, Homo sapiens
atccttttctccaac

SEQ ID NO: 638099 - DNA, 15 bp, Homo sapiens
tccttttctccaact

SEQ ID NO: 638100 - DNA, 15 bp, Homo sapiens
ccttttctccaactt

SEQ ID NO: 638101 - DNA, 15 bp, Homo sapiens
cttttctccaacttt

SEQ ID NO: 638102 - DNA, 15 bp, Homo sapiens
ttttctccaactttt

SEQ ID NO: 638103 - DNA, 15 bp, Homo sapiens
tttctccaacttttg

SEQ ID NO: 638104 - DNA, 15 bp, Homo sapiens
ttctccaacttttga

SEQ ID NO: 638105 - DNA, 15 bp, Homo sapiens
tctccaacttttgac

SEQ ID NO: 638106 - DNA, 15 bp, Homo sapiens
ctccaacttttgaca

SEQ ID NO: 638107 - DNA, 15 bp, Homo sapiens
tccaacttttgacat

SEQ ID NO: 638108 - DNA, 15 bp, Homo sapiens
ccaacttttgacata

SEQ ID NO: 638109 - DNA, 15 bp, Homo sapiens
caacttttgacatat

SEQ ID NO: 638110 - DNA, 15 bp, Homo sapiens
aacttttgacatatt

SEQ ID NO: 638111 - DNA, 15 bp, Homo sapiens
acttttgacatatta

SEQ ID NO: 638112 - DNA, 15 bp, Homo sapiens
cttttgacatattac

SEQ ID NO: 638113 - DNA, 15 bp, Homo sapiens
ttttgacatattaca

SEQ ID NO: 638114 - DNA, 15 bp, Homo sapiens
tttgacatattacaa

SEQ ID NO: 638115 - DNA, 15 bp, Homo sapiens
ttgacatattacaaa

SEQ ID NO: 638116 - DNA, 15 bp, Homo sapiens
tgacatattacaaag

SEQ ID NO: 638117 - DNA, 15 bp, Homo sapiens
gacatattacaaagt

SEQ ID NO: 638118 - DNA, 15 bp, Homo sapiens
acatattacaaagta

SEQ ID NO: 638119 - DNA, 15 bp, Homo sapiens
catattacaaagtac

SEQ ID NO: 638120 - DNA, 15 bp, Homo sapiens
atattacaaagtacc

SEQ ID NO: 638121 - DNA, 15 bp, Homo sapiens
tattacaaagtaccc

SEQ ID NO: 638122 - DNA, 15 bp, Homo sapiens
attacaaagtaccca

SEQ ID NO: 638123 - DNA, 15 bp, Homo sapiens
ttacaaagtacccaa

SEQ ID NO: 638124 - DNA, 15 bp, Homo sapiens
tacaaagtacccaaa

SEQ ID NO: 638125 - DNA, 15 bp, Homo sapiens
acaaagtacccaaat

SEQ ID NO: 638126 - DNA, 15 bp, Homo sapiens
caaagtacccaaata

SEQ ID NO: 638127 - DNA, 15 bp, Homo sapiens
aaagtacccaaatat

SEQ ID NO: 638128 - DNA, 15 bp, Homo sapiens
aagtacccaaatatg

SEQ ID NO: 638129 - DNA, 15 bp, Homo sapiens
agtacccaaatatgc

SEQ ID NO: 638130 - DNA, 15 bp, Homo sapiens
gtacccaaatatgcc

SEQ ID NO: 638131 - DNA, 15 bp, Homo sapiens
tacccaaatatgcca

SEQ ID NO: 638132 - DNA, 15 bp, Homo sapiens
acccaaatatgccag

SEQ ID NO: 638133 - DNA, 15 bp, Homo sapiens
cccaaatatgccaga

SEQ ID NO: 638134 - DNA, 15 bp, Homo sapiens
ccaaatatgccagac

SEQ ID NO: 638135 - DNA, 15 bp, Homo sapiens
caaatatgccagact

SEQ ID NO: 638136 - DNA, 15 bp, Homo sapiens
aaatatgccagactg

SEQ ID NO: 638137 - DNA, 15 bp, Homo sapiens
aatatgccagactgt

SEQ ID NO: 638138 - DNA, 15 bp, Homo sapiens
atatgccagactgtt

SEQ ID NO: 638139 - DNA, 15 bp, Homo sapiens
tatgccagactgttg

SEQ ID NO: 638140 - DNA, 15 bp, Homo sapiens
atgccagactgttgc

SEQ ID NO: 638141 - DNA, 15 bp, Homo sapiens
tgccagactgttgcc

SEQ ID NO: 638142 - DNA, 15 bp, Homo sapiens
gccagactgttgcct

SEQ ID NO: 638143 - DNA, 15 bp, Homo sapiens
ccagactgttgcctc

SEQ ID NO: 638144 - DNA, 15 bp, Homo sapiens
cagactgttgcctca

SEQ ID NO: 638145 - DNA, 15 bp, Homo sapiens
agactgttgcctcat

SEQ ID NO: 638146 - DNA, 15 bp, Homo sapiens
gactgttgcctcatc

SEQ ID NO: 638147 - DNA, 15 bp, Homo sapiens
actgttgcctcatca

SEQ ID NO: 638148 - DNA, 15 bp, Homo sapiens
ctgttgcctcatcag

SEQ ID NO: 638149 - DNA, 15 bp, Homo sapiens
tgttgcctcatcagc

SEQ ID NO: 638150 - DNA, 15 bp, Homo sapiens
gttgcctcatcagcc

SEQ ID NO: 638151 - DNA, 15 bp, Homo sapiens
ttgcctcatcagccc

SEQ ID NO: 638152 - DNA, 15 bp, Homo sapiens
tgcctcatcagcccc

SEQ ID NO: 638153 - DNA, 15 bp, Homo sapiens
gcctcatcagccccc

SEQ ID NO: 638154 - DNA, 15 bp, Homo sapiens
cctcatcagcccccc

SEQ ID NO: 638155 - DNA, 15 bp, Homo sapiens
ctcatcagccccccg

SEQ ID NO: 638156 - DNA, 15 bp, Homo sapiens
tcatcagccccccgc

SEQ ID NO: 638157 - DNA, 15 bp, Homo sapiens
catcagccccccgca

SEQ ID NO: 638158 - DNA, 15 bp, Homo sapiens
atcagccccccgcag

SEQ ID NO: 638159 - DNA, 15 bp, Homo sapiens
tcagccccccgcagt

SEQ ID NO: 638160 - DNA, 15 bp, Homo sapiens
cagccccccgcagtc

SEQ ID NO: 638161 - DNA, 15 bp, Homo sapiens
agccccccgcagtca

SEQ ID NO: 638162 - DNA, 15 bp, Homo sapiens
gccccccgcagtcag

SEQ ID NO: 638163 - DNA, 15 bp, Homo sapiens
ccccccgcagtcagg

SEQ ID NO: 638164 - DNA, 15 bp, Homo sapiens
cccccgcagtcaggt

SEQ ID NO: 638165 - DNA, 15 bp, Homo sapiens
ccccgcagtcaggta

SEQ ID NO: 638166 - DNA, 15 bp, Homo sapiens
cccgcagtcaggtac

SEQ ID NO: 638167 - DNA, 15 bp, Homo sapiens
ccgcagtcaggtaca

SEQ ID NO: 638168 - DNA, 15 bp, Homo sapiens
cgcagtcaggtacag

SEQ ID NO: 638169 - DNA, 15 bp, Homo sapiens
gcagtcaggtacagt

SEQ ID NO: 638170 - DNA, 15 bp, Homo sapiens
cagtcaggtacagtt

SEQ ID NO: 638171 - DNA, 15 bp, Homo sapiens
agtcaggtacagtta

SEQ ID NO: 638172 - DNA, 15 bp, Homo sapiens
gtcaggtacagttag

SEQ ID NO: 638173 - DNA, 15 bp, Homo sapiens
tcaggtacagttaga

SEQ ID NO: 638174 - DNA, 15 bp, Homo sapiens
caggtacagttagat

SEQ ID NO: 638175 - DNA, 15 bp, Homo sapiens
aggtacagttagatg

SEQ ID NO: 638176 - DNA, 15 bp, Homo sapiens
ggtacagttagatgc

SEQ ID NO: 638177 - DNA, 15 bp, Homo sapiens
gtacagttagatgca

SEQ ID NO: 638178 - DNA, 15 bp, Homo sapiens
tacagttagatgcaa

SEQ ID NO: 638179 - DNA, 15 bp, Homo sapiens
acagttagatgcaag

SEQ ID NO: 638180 - DNA, 15 bp, Homo sapiens
cagttagatgcaagg

SEQ ID NO: 638181 - DNA, 15 bp, Homo sapiens
agttagatgcaaggc

SEQ ID NO: 638182 - DNA, 15 bp, Homo sapiens
gttagatgcaaggca

SEQ ID NO: 638183 - DNA, 15 bp, Homo sapiens
ttagatgcaaggcaa

SEQ ID NO: 638184 - DNA, 15 bp, Homo sapiens
tagatgcaaggcaat

SEQ ID NO: 638185 - DNA, 15 bp, Homo sapiens
agatgcaaggcaatc

SEQ ID NO: 638186 - DNA, 15 bp, Homo sapiens
gatgcaaggcaatct

SEQ ID NO: 638187 - DNA, 15 bp, Homo sapiens
atgcaaggcaatctt

SEQ ID NO: 638188 - DNA, 15 bp, Homo sapiens
tgcaaggcaatcttc

SEQ ID NO: 638189 - DNA, 15 bp, Homo sapiens
gcaaggcaatcttcc

SEQ ID NO: 638190 - DNA, 15 bp, Homo sapiens
caaggcaatcttcct

SEQ ID NO: 638191 - DNA, 15 bp, Homo sapiens
aaggcaatcttccta

SEQ ID NO: 638192 - DNA, 15 bp, Homo sapiens
aggcaatcttcctaa

SEQ ID NO: 638193 - DNA, 15 bp, Homo sapiens
ggcaatcttcctaaa

SEQ ID NO: 638194 - DNA, 15 bp, Homo sapiens
gcaatcttcctaaaa

SEQ ID NO: 638195 - DNA, 15 bp, Homo sapiens
caatcttcctaaaag

SEQ ID NO: 638196 - DNA, 15 bp, Homo sapiens
aatcttcctaaaagt

SEQ ID NO: 638197 - DNA, 15 bp, Homo sapiens
atcttcctaaaagtt

SEQ ID NO: 638198 - DNA, 15 bp, Homo sapiens
tcttcctaaaagtta

SEQ ID NO: 638199 - DNA, 15 bp, Homo sapiens
cttcctaaaagttac

SEQ ID NO: 638200 - DNA, 15 bp, Homo sapiens
ttcctaaaagttact

SEQ ID NO: 638201 - DNA, 15 bp, Homo sapiens
tcctaaaagttactt

SEQ ID NO: 638202 - DNA, 15 bp, Homo sapiens
cctaaaagttactta

SEQ ID NO: 638203 - DNA, 15 bp, Homo sapiens
ctaaaagttacttat

SEQ ID NO: 638204 - DNA, 15 bp, Homo sapiens
taaaagttacttatt

SEQ ID NO: 638205 - DNA, 15 bp, Homo sapiens
aaaagttacttatta

SEQ ID NO: 638206 - DNA, 15 bp, Homo sapiens
aaagttacttattag

SEQ ID NO: 638207 - DNA, 15 bp, Homo sapiens
aagttacttattaga

SEQ ID NO: 638208 - DNA, 15 bp, Homo sapiens
agttacttattagag

SEQ ID NO: 638209 - DNA, 15 bp, Homo sapiens
gttacttattagaga

SEQ ID NO: 638210 - DNA, 15 bp, Homo sapiens
ttacttattagagat

SEQ ID NO: 638211 - DNA, 15 bp, Homo sapiens
tacttattagagatg

SEQ ID NO: 638212 - DNA, 15 bp, Homo sapiens
acttattagagatgt

SEQ ID NO: 638213 - DNA, 15 bp, Homo sapiens
cttattagagatgtg

SEQ ID NO: 638214 - DNA, 15 bp, Homo sapiens
ttattagagatgtga

SEQ ID NO: 638215 - DNA, 15 bp, Homo sapiens
tattagagatgtgag

SEQ ID NO: 638216 - DNA, 15 bp, Homo sapiens
attagagatgtgaga

SEQ ID NO: 638217 - DNA, 15 bp, Homo sapiens
ttagagatgtgagaa

SEQ ID NO: 638218 - DNA, 15 bp, Homo sapiens
tagagatgtgagaag

SEQ ID NO: 638219 - DNA, 15 bp, Homo sapiens
agagatgtgagaagg

SEQ ID NO: 638220 - DNA, 15 bp, Homo sapiens
gagatgtgagaaggg

SEQ ID NO: 638221 - DNA, 15 bp, Homo sapiens
agatgtgagaagggc

SEQ ID NO: 638222 - DNA, 15 bp, Homo sapiens
gatgtgagaagggca

SEQ ID NO: 638223 - DNA, 15 bp, Homo sapiens
atgtgagaagggcaa

SEQ ID NO: 638224 - DNA, 15 bp, Homo sapiens
tgtgagaagggcaaa

SEQ ID NO: 638225 - DNA, 15 bp, Homo sapiens
gtgagaagggcaaat

SEQ ID NO: 638226 - DNA, 15 bp, Homo sapiens
tgagaagggcaaatg

SEQ ID NO: 638227 - DNA, 15 bp, Homo sapiens
gagaagggcaaatgc

SEQ ID NO: 638228 - DNA, 15 bp, Homo sapiens
agaagggcaaatgct

SEQ ID NO: 638229 - DNA, 15 bp, Homo sapiens
gaagggcaaatgcta

SEQ ID NO: 638230 - DNA, 15 bp, Homo sapiens
aagggcaaatgctat

SEQ ID NO: 638231 - DNA, 15 bp, Homo sapiens
agggcaaatgctatc

SEQ ID NO: 638232 - DNA, 15 bp, Homo sapiens
gggcaaatgctatca

SEQ ID NO: 638233 - DNA, 15 bp, Homo sapiens
ggcaaatgctatcat

SEQ ID NO: 638234 - DNA, 15 bp, Homo sapiens
gcaaatgctatcatt

SEQ ID NO: 638235 - DNA, 15 bp, Homo sapiens
caaatgctatcattg

SEQ ID NO: 638236 - DNA, 15 bp, Homo sapiens
aaatgctatcattgg

SEQ ID NO: 638237 - DNA, 15 bp, Homo sapiens
aatgctatcattgga

SEQ ID NO: 638238 - DNA, 15 bp, Homo sapiens
atgctatcattggaa

SEQ ID NO: 638239 - DNA, 15 bp, Homo sapiens
tgctatcattggaaa

SEQ ID NO: 638240 - DNA, 15 bp, Homo sapiens
gctatcattggaaaa

SEQ ID NO: 638241 - DNA, 15 bp, Homo sapiens
ctatcattggaaaaa

SEQ ID NO: 638242 - DNA, 15 bp, Homo sapiens
tatcattggaaaaac

SEQ ID NO: 638243 - DNA, 15 bp, Homo sapiens
atcattggaaaaact

SEQ ID NO: 638244 - DNA, 15 bp, Homo sapiens
tcattggaaaaactg

SEQ ID NO: 638245 - DNA, 15 bp, Homo sapiens
cattggaaaaactga

SEQ ID NO: 638246 - DNA, 15 bp, Homo sapiens
attggaaaaactgac

SEQ ID NO: 638247 - DNA, 15 bp, Homo sapiens
ttggaaaaactgaca

SEQ ID NO: 638248 - DNA, 15 bp, Homo sapiens
tggaaaaactgacaa

SEQ ID NO: 638249 - DNA, 15 bp, Homo sapiens
ggaaaaactgacaaa

SEQ ID NO: 638250 - DNA, 15 bp, Homo sapiens
gaaaaactgacaaaa

SEQ ID NO: 638251 - DNA, 15 bp, Homo sapiens
aaaaactgacaaaag

SEQ ID NO: 638252 - DNA, 15 bp, Homo sapiens
aaaactgacaaaagt

SEQ ID NO: 638253 - DNA, 15 bp, Homo sapiens
aaactgacaaaagtc

SEQ ID NO: 638254 - DNA, 15 bp, Homo sapiens
aactgacaaaagtcc

SEQ ID NO: 638255 - DNA, 15 bp, Homo sapiens
actgacaaaagtccc

SEQ ID NO: 638256 - DNA, 15 bp, Homo sapiens
ctgacaaaagtccca

SEQ ID NO: 638257 - DNA, 15 bp, Homo sapiens
tgacaaaagtcccaa

SEQ ID NO: 638258 - DNA, 15 bp, Homo sapiens
gacaaaagtcccaat

SEQ ID NO: 638259 - DNA, 15 bp, Homo sapiens
acaaaagtcccaata

SEQ ID NO: 638260 - DNA, 15 bp, Homo sapiens
caaaagtcccaatag

SEQ ID NO: 638261 - DNA, 15 bp, Homo sapiens
aaaagtcccaatagg

SEQ ID NO: 638262 - DNA, 15 bp, Homo sapiens
aaagtcccaatagga

SEQ ID NO: 638263 - DNA, 15 bp, Homo sapiens
aagtcccaataggaa

SEQ ID NO: 638264 - DNA, 15 bp, Homo sapiens
agtcccaataggaaa

SEQ ID NO: 638265 - DNA, 15 bp, Homo sapiens
gtcccaataggaaaa

SEQ ID NO: 638266 - DNA, 15 bp, Homo sapiens
tcccaataggaaaaa

SEQ ID NO: 638267 - DNA, 15 bp, Homo sapiens
cccaataggaaaaat

SEQ ID NO: 638268 - DNA, 15 bp, Homo sapiens
ccaataggaaaaata

SEQ ID NO: 638269 - DNA, 15 bp, Homo sapiens
caataggaaaaataa

SEQ ID NO: 638270 - DNA, 15 bp, Homo sapiens
aataggaaaaataag

SEQ ID NO: 638271 - DNA, 15 bp, Homo sapiens
ataggaaaaataagg

SEQ ID NO: 638272 - DNA, 15 bp, Homo sapiens
taggaaaaataagga

SEQ ID NO: 638273 - DNA, 15 bp, Homo sapiens
aggaaaaataaggaa

SEQ ID NO: 638274 - DNA, 15 bp, Homo sapiens
ggaaaaataaggaag

SEQ ID NO: 638275 - DNA, 15 bp, Homo sapiens
gaaaaataaggaagt

SEQ ID NO: 638276 - DNA, 15 bp, Homo sapiens
aaaaataaggaagtg

SEQ ID NO: 638277 - DNA, 15 bp, Homo sapiens
aaaataaggaagtgg

SEQ ID NO: 638278 - DNA, 15 bp, Homo sapiens
aaataaggaagtgga

SEQ ID NO: 638279 - DNA, 15 bp, Homo sapiens
aataaggaagtggag

SEQ ID NO: 638280 - DNA, 15 bp, Homo sapiens
ataaggaagtggaga

SEQ ID NO: 638281 - DNA, 15 bp, Homo sapiens
taaggaagtggagag

SEQ ID NO: 638282 - DNA, 15 bp, Homo sapiens
aaggaagtggagagt

SEQ ID NO: 638283 - DNA, 15 bp, Homo sapiens
aggaagtggagagtt

SEQ ID NO: 638284 - DNA, 15 bp, Homo sapiens
ggaagtggagagtta

SEQ ID NO: 638285 - DNA, 15 bp, Homo sapiens
gaagtggagagttac

SEQ ID NO: 638286 - DNA, 15 bp, Homo sapiens
aagtggagagttact

SEQ ID NO: 638287 - DNA, 15 bp, Homo sapiens
agtggagagttacta

SEQ ID NO: 638288 - DNA, 15 bp, Homo sapiens
gtggagagttactat

SEQ ID NO: 638289 - DNA, 15 bp, Homo sapiens
tggagagttactatg

SEQ ID NO: 638290 - DNA, 15 bp, Homo sapiens
ggagagttactatgt

SEQ ID NO: 638291 - DNA, 15 bp, Homo sapiens
gagagttactatgtt

SEQ ID NO: 638292 - DNA, 15 bp, Homo sapiens
agagttactatgttt

SEQ ID NO: 638293 - DNA, 15 bp, Homo sapiens
gagttactatgtttc

SEQ ID NO: 638294 - DNA, 15 bp, Homo sapiens
agttactatgtttct

SEQ ID NO: 638295 - DNA, 15 bp, Homo sapiens
gttactatgtttcta

SEQ ID NO: 638296 - DNA, 15 bp, Homo sapiens
ttactatgtttctaa

SEQ ID NO: 638297 - DNA, 15 bp, Homo sapiens
tactatgtttctaat

SEQ ID NO: 638298 - DNA, 15 bp, Homo sapiens
actatgtttctaatt

SEQ ID NO: 638299 - DNA, 15 bp, Homo sapiens
ctatgtttctaattt

SEQ ID NO: 638300 - DNA, 15 bp, Homo sapiens
tatgtttctaatttt

SEQ ID NO: 638301 - DNA, 15 bp, Homo sapiens
atgtttctaattttt

SEQ ID NO: 638302 - DNA, 15 bp, Homo sapiens
tgtttctaatttttc

SEQ ID NO: 638303 - DNA, 15 bp, Homo sapiens
gtttctaatttttca

SEQ ID NO: 638304 - DNA, 15 bp, Homo sapiens
tttctaatttttcat

SEQ ID NO: 638305 - DNA, 15 bp, Homo sapiens
ttctaatttttcatg

SEQ ID NO: 638306 - DNA, 15 bp, Homo sapiens
tctaatttttcatgt

SEQ ID NO: 638307 - DNA, 15 bp, Homo sapiens
ctaatttttcatgtg

SEQ ID NO: 638308 - DNA, 15 bp, Homo sapiens
taatttttcatgtgc

SEQ ID NO: 638309 - DNA, 15 bp, Homo sapiens
aatttttcatgtgct

SEQ ID NO: 638310 - DNA, 15 bp, Homo sapiens
atttttcatgtgctt

SEQ ID NO: 638311 - DNA, 15 bp, Homo sapiens
tttttcatgtgcttc

SEQ ID NO: 638312 - DNA, 15 bp, Homo sapiens
ttttcatgtgcttct

SEQ ID NO: 638313 - DNA, 15 bp, Homo sapiens
tttcatgtgcttcta

SEQ ID NO: 638314 - DNA, 15 bp, Homo sapiens
ttcatgtgcttctat

SEQ ID NO: 638315 - DNA, 15 bp, Homo sapiens
tcatgtgcttctatt

SEQ ID NO: 638316 - DNA, 15 bp, Homo sapiens
catgtgcttctattt

SEQ ID NO: 638317 - DNA, 15 bp, Homo sapiens
atgtgcttctatttt

SEQ ID NO: 638318 - DNA, 15 bp, Homo sapiens
tgtgcttctattttt

SEQ ID NO: 638319 - DNA, 15 bp, Homo sapiens
gtgcttctatttttt

SEQ ID NO: 638320 - DNA, 15 bp, Homo sapiens
tgcttctattttttt

SEQ ID NO: 638321 - DNA, 15 bp, Homo sapiens
gcttctatttttttc

SEQ ID NO: 638322 - DNA, 15 bp, Homo sapiens
cttctatttttttcc

SEQ ID NO: 638323 - DNA, 15 bp, Homo sapiens
ttctatttttttcct

SEQ ID NO: 638324 - DNA, 15 bp, Homo sapiens
tctatttttttccta

SEQ ID NO: 638325 - DNA, 15 bp, Homo sapiens
ctatttttttcctac

SEQ ID NO: 638326 - DNA, 15 bp, Homo sapiens
tatttttttcctact

SEQ ID NO: 638327 - DNA, 15 bp, Homo sapiens
atttttttcctactt

SEQ ID NO: 638328 - DNA, 15 bp, Homo sapiens
tttttttcctacttc

SEQ ID NO: 638329 - DNA, 15 bp, Homo sapiens
ttttttcctacttca

SEQ ID NO: 638330 - DNA, 15 bp, Homo sapiens
tttttcctacttcag

SEQ ID NO: 638331 - DNA, 15 bp, Homo sapiens
ttttcctacttcaga

SEQ ID NO: 638332 - DNA, 15 bp, Homo sapiens
tttcctacttcagag

SEQ ID NO: 638333 - DNA, 15 bp, Homo sapiens
ttcctacttcagagc

SEQ ID NO: 638334 - DNA, 15 bp, Homo sapiens
tcctacttcagagcc

SEQ ID NO: 638335 - DNA, 15 bp, Homo sapiens
cctacttcagagcca

SEQ ID NO: 638336 - DNA, 15 bp, Homo sapiens
ctacttcagagccat

SEQ ID NO: 638337 - DNA, 15 bp, Homo sapiens
tacttcagagccatt

SEQ ID NO: 638338 - DNA, 15 bp, Homo sapiens
acttcagagccattg

SEQ ID NO: 638339 - DNA, 15 bp, Homo sapiens
cttcagagccattga

SEQ ID NO: 638340 - DNA, 15 bp, Homo sapiens
ttcagagccattgac

SEQ ID NO: 638341 - DNA, 15 bp, Homo sapiens
tcagagccattgact

SEQ ID NO: 638342 - DNA, 15 bp, Homo sapiens
cagagccattgacta

SEQ ID NO: 638343 - DNA, 15 bp, Homo sapiens
agagccattgactaa

SEQ ID NO: 638344 - DNA, 15 bp, Homo sapiens
gagccattgactaat

SEQ ID NO: 638345 - DNA, 15 bp, Homo sapiens
agccattgactaata

SEQ ID NO: 638346 - DNA, 15 bp, Homo sapiens
gccattgactaatag

SEQ ID NO: 638347 - DNA, 15 bp, Homo sapiens
ccattgactaatagt

SEQ ID NO: 638348 - DNA, 15 bp, Homo sapiens
cattgactaatagtt

SEQ ID NO: 638349 - DNA, 15 bp, Homo sapiens
attgactaatagttg

SEQ ID NO: 638350 - DNA, 15 bp, Homo sapiens
ttgactaatagttga

SEQ ID NO: 638351 - DNA, 15 bp, Homo sapiens
tgactaatagttgag

SEQ ID NO: 638352 - DNA, 15 bp, Homo sapiens
gactaatagttgagt

SEQ ID NO: 638353 - DNA, 15 bp, Homo sapiens
actaatagttgagta

SEQ ID NO: 638354 - DNA, 15 bp, Homo sapiens
ctaatagttgagtat

SEQ ID NO: 638355 - DNA, 15 bp, Homo sapiens
taatagttgagtata

SEQ ID NO: 638356 - DNA, 15 bp, Homo sapiens
aatagttgagtataa

SEQ ID NO: 638357 - DNA, 15 bp, Homo sapiens
atagttgagtataac

SEQ ID NO: 638358 - DNA, 15 bp, Homo sapiens
tagttgagtataaca

SEQ ID NO: 638359 - DNA, 15 bp, Homo sapiens
agttgagtataacac

SEQ ID NO: 638360 - DNA, 15 bp, Homo sapiens
gttgagtataacaca

SEQ ID NO: 638361 - DNA, 15 bp, Homo sapiens
ttgagtataacacag

SEQ ID NO: 638362 - DNA, 15 bp, Homo sapiens
tgagtataacacagg

SEQ ID NO: 638363 - DNA, 15 bp, Homo sapiens
gagtataacacaggt

SEQ ID NO: 638364 - DNA, 15 bp, Homo sapiens
agtataacacaggtt

SEQ ID NO: 638365 - DNA, 15 bp, Homo sapiens
gtataacacaggttg

SEQ ID NO: 638366 - DNA, 15 bp, Homo sapiens
tataacacaggttgt

SEQ ID NO: 638367 - DNA, 15 bp, Homo sapiens
ataacacaggttgtg

SEQ ID NO: 638368 - DNA, 15 bp, Homo sapiens
taacacaggttgtgt

SEQ ID NO: 638369 - DNA, 15 bp, Homo sapiens
aacacaggttgtgtt

SEQ ID NO: 638370 - DNA, 15 bp, Homo sapiens
acacaggttgtgttt

SEQ ID NO: 638371 - DNA, 15 bp, Homo sapiens
cacaggttgtgtttc

SEQ ID NO: 638372 - DNA, 15 bp, Homo sapiens
acaggttgtgtttcc

SEQ ID NO: 638373 - DNA, 15 bp, Homo sapiens
caggttgtgtttccg

SEQ ID NO: 638374 - DNA, 15 bp, Homo sapiens
aggttgtgtttccgg

SEQ ID NO: 638375 - DNA, 15 bp, Homo sapiens
ggttgtgtttccggg

SEQ ID NO: 638376 - DNA, 15 bp, Homo sapiens
gttgtgtttccgggc

SEQ ID NO: 638377 - DNA, 15 bp, Homo sapiens
ttgtgtttccgggct

SEQ ID NO: 638378 - DNA, 15 bp, Homo sapiens
tgtgtttccgggctg

SEQ ID NO: 638379 - DNA, 15 bp, Homo sapiens
gtgtttccgggctgc

SEQ ID NO: 638380 - DNA, 15 bp, Homo sapiens
tgtttccgggctgct

SEQ ID NO: 638381 - DNA, 15 bp, Homo sapiens
gtttccgggctgctg

SEQ ID NO: 638382 - DNA, 15 bp, Homo sapiens
tttccgggctgctga

SEQ ID NO: 638383 - DNA, 15 bp, Homo sapiens
ttccgggctgctgaa

SEQ ID NO: 638384 - DNA, 15 bp, Homo sapiens
tccgggctgctgaaa

SEQ ID NO: 638385 - DNA, 15 bp, Homo sapiens
ccgggctgctgaaac

SEQ ID NO: 638386 - DNA, 15 bp, Homo sapiens
cgggctgctgaaaca

SEQ ID NO: 638387 - DNA, 15 bp, Homo sapiens
gggctgctgaaacat

SEQ ID NO: 638388 - DNA, 15 bp, Homo sapiens
ggctgctgaaacatg

SEQ ID NO: 638389 - DNA, 15 bp, Homo sapiens
gctgctgaaacatga

SEQ ID NO: 638390 - DNA, 15 bp, Homo sapiens
ctgctgaaacatgac

SEQ ID NO: 638391 - DNA, 15 bp, Homo sapiens
tgctgaaacatgaca

SEQ ID NO: 638392 - DNA, 15 bp, Homo sapiens
gctgaaacatgacac

SEQ ID NO: 638393 - DNA, 15 bp, Homo sapiens
ctgaaacatgacact

SEQ ID NO: 638394 - DNA, 15 bp, Homo sapiens
tgaaacatgacacta

SEQ ID NO: 638395 - DNA, 15 bp, Homo sapiens
gaaacatgacactaa

SEQ ID NO: 638396 - DNA, 15 bp, Homo sapiens
aaacatgacactaat

SEQ ID NO: 638397 - DNA, 15 bp, Homo sapiens
aacatgacactaata

SEQ ID NO: 638398 - DNA, 15 bp, Homo sapiens
acatgacactaatat

SEQ ID NO: 638399 - DNA, 15 bp, Homo sapiens
catgacactaatatt

SEQ ID NO: 638400 - DNA, 15 bp, Homo sapiens
atgacactaatattt

SEQ ID NO: 638401 - DNA, 15 bp, Homo sapiens
tgacactaatatttt

SEQ ID NO: 638402 - DNA, 15 bp, Homo sapiens
gacactaatattttc

SEQ ID NO: 638403 - DNA, 15 bp, Homo sapiens
acactaatattttca

SEQ ID NO: 638404 - DNA, 15 bp, Homo sapiens
cactaatattttcaa

SEQ ID NO: 638405 - DNA, 15 bp, Homo sapiens
actaatattttcaaa

SEQ ID NO: 638406 - DNA, 15 bp, Homo sapiens
ctaatattttcaaag

SEQ ID NO: 638407 - DNA, 15 bp, Homo sapiens
taatattttcaaaga

SEQ ID NO: 638408 - DNA, 15 bp, Homo sapiens
aatattttcaaagaa

SEQ ID NO: 638409 - DNA, 15 bp, Homo sapiens
atattttcaaagaac

SEQ ID NO: 638410 - DNA, 15 bp, Homo sapiens
tattttcaaagaact

SEQ ID NO: 638411 - DNA, 15 bp, Homo sapiens
attttcaaagaactg

SEQ ID NO: 638412 - DNA, 15 bp, Homo sapiens
ttttcaaagaactgt

SEQ ID NO: 638413 - DNA, 15 bp, Homo sapiens
tttcaaagaactgtg

SEQ ID NO: 638414 - DNA, 15 bp, Homo sapiens
ttcaaagaactgtgg

SEQ ID NO: 638415 - DNA, 15 bp, Homo sapiens
tcaaagaactgtgga

SEQ ID NO: 638416 - DNA, 15 bp, Homo sapiens
caaagaactgtggaa

SEQ ID NO: 638417 - DNA, 15 bp, Homo sapiens
aaagaactgtggaag

SEQ ID NO: 638418 - DNA, 15 bp, Homo sapiens
aagaactgtggaagc

SEQ ID NO: 638419 - DNA, 15 bp, Homo sapiens
agaactgtggaagcc

SEQ ID NO: 638420 - DNA, 15 bp, Homo sapiens
gaactgtggaagcct

SEQ ID NO: 638421 - DNA, 15 bp, Homo sapiens
aactgtggaagccta

SEQ ID NO: 638422 - DNA, 15 bp, Homo sapiens
actgtggaagcctaa

SEQ ID NO: 638423 - DNA, 15 bp, Homo sapiens
ctgtggaagcctaaa

SEQ ID NO: 638424 - DNA, 15 bp, Homo sapiens
tgtggaagcctaaaa

SEQ ID NO: 638425 - DNA, 15 bp, Homo sapiens
gtggaagcctaaaag

SEQ ID NO: 638426 - DNA, 15 bp, Homo sapiens
tggaagcctaaaagg

SEQ ID NO: 638427 - DNA, 15 bp, Homo sapiens
ggaagcctaaaagga

SEQ ID NO: 638428 - DNA, 15 bp, Homo sapiens
gaagcctaaaaggaa

SEQ ID NO: 638429 - DNA, 15 bp, Homo sapiens
aagcctaaaaggaag

SEQ ID NO: 638430 - DNA, 15 bp, Homo sapiens
agcctaaaaggaagc

SEQ ID NO: 638431 - DNA, 15 bp, Homo sapiens
gcctaaaaggaagcc

SEQ ID NO: 638432 - DNA, 15 bp, Homo sapiens
cctaaaaggaagcca

SEQ ID NO: 638433 - DNA, 15 bp, Homo sapiens
ctaaaaggaagccaa

SEQ ID NO: 638434 - DNA, 15 bp, Homo sapiens
taaaaggaagccaat

SEQ ID NO: 638435 - DNA, 15 bp, Homo sapiens
aaaaggaagccaatg

SEQ ID NO: 638436 - DNA, 15 bp, Homo sapiens
aaaggaagccaatga

SEQ ID NO: 638437 - DNA, 15 bp, Homo sapiens
aaggaagccaatgag

SEQ ID NO: 638438 - DNA, 15 bp, Homo sapiens
aggaagccaatgaga

SEQ ID NO: 638439 - DNA, 15 bp, Homo sapiens
ggaagccaatgagaa

SEQ ID NO: 638440 - DNA, 15 bp, Homo sapiens
gaagccaatgagaaa

SEQ ID NO: 638441 - DNA, 15 bp, Homo sapiens
aagccaatgagaaat

SEQ ID NO: 638442 - DNA, 15 bp, Homo sapiens
agccaatgagaaata

SEQ ID NO: 638443 - DNA, 15 bp, Homo sapiens
gccaatgagaaataa

SEQ ID NO: 638444 - DNA, 15 bp, Homo sapiens
ccaatgagaaataac

SEQ ID NO: 638445 - DNA, 15 bp, Homo sapiens
caatgagaaataact

SEQ ID NO: 638446 - DNA, 15 bp, Homo sapiens
aatgagaaataacta

SEQ ID NO: 638447 - DNA, 15 bp, Homo sapiens
atgagaaataactaa

SEQ ID NO: 638448 - DNA, 15 bp, Homo sapiens
tgagaaataactaaa

SEQ ID NO: 638449 - DNA, 15 bp, Homo sapiens
gagaaataactaaat

SEQ ID NO: 638450 - DNA, 15 bp, Homo sapiens
agaaataactaaatg

SEQ ID NO: 638451 - DNA, 15 bp, Homo sapiens
gaaataactaaatga

SEQ ID NO: 638452 - DNA, 15 bp, Homo sapiens
aaataactaaatgag

SEQ ID NO: 638453 - DNA, 15 bp, Homo sapiens
aataactaaatgaga

SEQ ID NO: 638454 - DNA, 15 bp, Homo sapiens
ataactaaatgagag

SEQ ID NO: 638455 - DNA, 15 bp, Homo sapiens
taactaaatgagagt

SEQ ID NO: 638456 - DNA, 15 bp, Homo sapiens
aactaaatgagagtt

SEQ ID NO: 638457 - DNA, 15 bp, Homo sapiens
actaaatgagagttt

SEQ ID NO: 638458 - DNA, 15 bp, Homo sapiens
ctaaatgagagttta

SEQ ID NO: 638459 - DNA, 15 bp, Homo sapiens
taaatgagagtttag

SEQ ID NO: 638460 - DNA, 15 bp, Homo sapiens
aaatgagagtttagg

SEQ ID NO: 638461 - DNA, 15 bp, Homo sapiens
aatgagagtttagga

SEQ ID NO: 638462 - DNA, 15 bp, Homo sapiens
atgagagtttaggac

SEQ ID NO: 638463 - DNA, 15 bp, Homo sapiens
tgagagtttaggact

SEQ ID NO: 638464 - DNA, 15 bp, Homo sapiens
gagagtttaggactg

SEQ ID NO: 638465 - DNA, 15 bp, Homo sapiens
agagtttaggactgc

SEQ ID NO: 638466 - DNA, 15 bp, Homo sapiens
gagtttaggactgca

SEQ ID NO: 638467 - DNA, 15 bp, Homo sapiens
agtttaggactgcag

SEQ ID NO: 638468 - DNA, 15 bp, Homo sapiens
gtttaggactgcagc

SEQ ID NO: 638469 - DNA, 15 bp, Homo sapiens
tttaggactgcagcc

SEQ ID NO: 638470 - DNA, 15 bp, Homo sapiens
ttaggactgcagcct

SEQ ID NO: 638471 - DNA, 15 bp, Homo sapiens
taggactgcagcctt

SEQ ID NO: 638472 - DNA, 15 bp, Homo sapiens
aggactgcagccttc

SEQ ID NO: 638473 - DNA, 15 bp, Homo sapiens
ggactgcagccttca

SEQ ID NO: 638474 - DNA, 15 bp, Homo sapiens
gactgcagccttcat

SEQ ID NO: 638475 - DNA, 15 bp, Homo sapiens
actgcagccttcatt

SEQ ID NO: 638476 - DNA, 15 bp, Homo sapiens
ctgcagccttcattt

SEQ ID NO: 638477 - DNA, 15 bp, Homo sapiens
tgcagccttcatttt

SEQ ID NO: 638478 - DNA, 15 bp, Homo sapiens
gcagccttcattttc

SEQ ID NO: 638479 - DNA, 15 bp, Homo sapiens
cagccttcattttca

SEQ ID NO: 638480 - DNA, 15 bp, Homo sapiens
agccttcattttcat

SEQ ID NO: 638481 - DNA, 15 bp, Homo sapiens
gccttcattttcatt

SEQ ID NO: 638482 - DNA, 15 bp, Homo sapiens
ccttcattttcattc

SEQ ID NO: 638483 - DNA, 15 bp, Homo sapiens
cttcattttcattca

SEQ ID NO: 638484 - DNA, 15 bp, Homo sapiens
ttcattttcattcaa

SEQ ID NO: 638485 - DNA, 15 bp, Homo sapiens
tcattttcattcaaa

SEQ ID NO: 638486 - DNA, 15 bp, Homo sapiens
cattttcattcaaag

SEQ ID NO: 638487 - DNA, 15 bp, Homo sapiens
attttcattcaaaga

SEQ ID NO: 638488 - DNA, 15 bp, Homo sapiens
ttttcattcaaagat

SEQ ID NO: 638489 - DNA, 15 bp, Homo sapiens
tttcattcaaagatt

SEQ ID NO: 638490 - DNA, 15 bp, Homo sapiens
ttcattcaaagattt

SEQ ID NO: 638491 - DNA, 15 bp, Homo sapiens
tcattcaaagattta

SEQ ID NO: 638492 - DNA, 15 bp, Homo sapiens
cattcaaagatttaa

SEQ ID NO: 638493 - DNA, 15 bp, Homo sapiens
attcaaagatttaaa

SEQ ID NO: 638494 - DNA, 15 bp, Homo sapiens
ttcaaagatttaaaa

SEQ ID NO: 638495 - DNA, 15 bp, Homo sapiens
tcaaagatttaaaag

SEQ ID NO: 638496 - DNA, 15 bp, Homo sapiens
caaagatttaaaagt

SEQ ID NO: 638497 - DNA, 15 bp, Homo sapiens
aaagatttaaaagtt

SEQ ID NO: 638498 - DNA, 15 bp, Homo sapiens
aagatttaaaagttt

SEQ ID NO: 638499 - DNA, 15 bp, Homo sapiens
agatttaaaagtttc

SEQ ID NO: 638500 - DNA, 15 bp, Homo sapiens
gatttaaaagtttcc

SEQ ID NO: 638501 - DNA, 15 bp, Homo sapiens
atttaaaagtttcca

SEQ ID NO: 638502 - DNA, 15 bp, Homo sapiens
tttaaaagtttccat

SEQ ID NO: 638503 - DNA, 15 bp, Homo sapiens
ttaaaagtttccata

SEQ ID NO: 638504 - DNA, 15 bp, Homo sapiens
taaaagtttccataa

SEQ ID NO: 638505 - DNA, 15 bp, Homo sapiens
aaaagtttccataaa

SEQ ID NO: 638506 - DNA, 15 bp, Homo sapiens
aaagtttccataaag

SEQ ID NO: 638507 - DNA, 15 bp, Homo sapiens
aagtttccataaagt

SEQ ID NO: 638508 - DNA, 15 bp, Homo sapiens
agtttccataaagta

SEQ ID NO: 638509 - DNA, 15 bp, Homo sapiens
gtttccataaagtaa

SEQ ID NO: 638510 - DNA, 15 bp, Homo sapiens
tttccataaagtaaa

SEQ ID NO: 638511 - DNA, 15 bp, Homo sapiens
ttccataaagtaaaa

SEQ ID NO: 638512 - DNA, 15 bp, Homo sapiens
tccataaagtaaaat

SEQ ID NO: 638513 - DNA, 15 bp, Homo sapiens
ccataaagtaaaatg

SEQ ID NO: 638514 - DNA, 15 bp, Homo sapiens
cataaagtaaaatgt

SEQ ID NO: 638515 - DNA, 15 bp, Homo sapiens
ataaagtaaaatgtt

SEQ ID NO: 638516 - DNA, 15 bp, Homo sapiens
taaagtaaaatgttc

SEQ ID NO: 638517 - DNA, 15 bp, Homo sapiens
aaagtaaaatgttct

SEQ ID NO: 638518 - DNA, 15 bp, Homo sapiens
aagtaaaatgttctt

SEQ ID NO: 638519 - DNA, 15 bp, Homo sapiens
agtaaaatgttcttc

SEQ ID NO: 638520 - DNA, 15 bp, Homo sapiens
gtaaaatgttcttct

SEQ ID NO: 638521 - DNA, 15 bp, Homo sapiens
taaaatgttcttctc

SEQ ID NO: 638522 - DNA, 15 bp, Homo sapiens
aaaatgttcttctcc

SEQ ID NO: 638523 - DNA, 15 bp, Homo sapiens
aaatgttcttctccg

SEQ ID NO: 638524 - DNA, 15 bp, Homo sapiens
aatgttcttctccgg

SEQ ID NO: 638525 - DNA, 15 bp, Homo sapiens
atgttcttctccggc

SEQ ID NO: 638526 - DNA, 15 bp, Homo sapiens
tgttcttctccggcc

SEQ ID NO: 638527 - DNA, 15 bp, Homo sapiens
gttcttctccggcca

SEQ ID NO: 638528 - DNA, 15 bp, Homo sapiens
ttcttctccggccac

SEQ ID NO: 638529 - DNA, 15 bp, Homo sapiens
tcttctccggccacc

SEQ ID NO: 638530 - DNA, 15 bp, Homo sapiens
cttctccggccacct

SEQ ID NO: 638531 - DNA, 15 bp, Homo sapiens
ttctccggccacctg

SEQ ID NO: 638532 - DNA, 15 bp, Homo sapiens
tctccggccacctgt

SEQ ID NO: 638533 - DNA, 15 bp, Homo sapiens
ctccggccacctgtt

SEQ ID NO: 638534 - DNA, 15 bp, Homo sapiens
tccggccacctgttt

SEQ ID NO: 638535 - DNA, 15 bp, Homo sapiens
ccggccacctgtttt

SEQ ID NO: 638536 - DNA, 15 bp, Homo sapiens
cggccacctgttttc

SEQ ID NO: 638537 - DNA, 15 bp, Homo sapiens
ggccacctgttttca

SEQ ID NO: 638538 - DNA, 15 bp, Homo sapiens
gccacctgttttcat

SEQ ID NO: 638539 - DNA, 15 bp, Homo sapiens
ccacctgttttcata

SEQ ID NO: 638540 - DNA, 15 bp, Homo sapiens
cacctgttttcatag

SEQ ID NO: 638541 - DNA, 15 bp, Homo sapiens
acctgttttcatagt

SEQ ID NO: 638542 - DNA, 15 bp, Homo sapiens
cctgttttcatagtt

SEQ ID NO: 638543 - DNA, 15 bp, Homo sapiens
ctgttttcatagttc

SEQ ID NO: 638544 - DNA, 15 bp, Homo sapiens
tgttttcatagttct

SEQ ID NO: 638545 - DNA, 15 bp, Homo sapiens
gttttcatagttctg

SEQ ID NO: 638546 - DNA, 15 bp, Homo sapiens
ttttcatagttctgt

SEQ ID NO: 638547 - DNA, 15 bp, Homo sapiens
tttcatagttctgtg

SEQ ID NO: 638548 - DNA, 15 bp, Homo sapiens
ttcatagttctgtgt

SEQ ID NO: 638549 - DNA, 15 bp, Homo sapiens
tcatagttctgtgtt

SEQ ID NO: 638550 - DNA, 15 bp, Homo sapiens
catagttctgtgttt

SEQ ID NO: 638551 - DNA, 15 bp, Homo sapiens
atagttctgtgtttt

SEQ ID NO: 638552 - DNA, 15 bp, Homo sapiens
tagttctgtgttttc

SEQ ID NO: 638553 - DNA, 15 bp, Homo sapiens
agttctgtgttttcc

SEQ ID NO: 638554 - DNA, 15 bp, Homo sapiens
gttctgtgttttcct

SEQ ID NO: 638555 - DNA, 15 bp, Homo sapiens
ttctgtgttttcctt

SEQ ID NO: 638556 - DNA, 15 bp, Homo sapiens
tctgtgttttccttc

SEQ ID NO: 638557 - DNA, 15 bp, Homo sapiens
ctgtgttttccttca

SEQ ID NO: 638558 - DNA, 15 bp, Homo sapiens
tgtgttttccttcag

SEQ ID NO: 638559 - DNA, 15 bp, Homo sapiens
gtgttttccttcagg

SEQ ID NO: 638560 - DNA, 15 bp, Homo sapiens
tgttttccttcaggc

SEQ ID NO: 638561 - DNA, 15 bp, Homo sapiens
gttttccttcaggcc

SEQ ID NO: 638562 - DNA, 15 bp, Homo sapiens
ttttccttcaggcct

SEQ ID NO: 638563 - DNA, 15 bp, Homo sapiens
tttccttcaggcctt

SEQ ID NO: 638564 - DNA, 15 bp, Homo sapiens
ttccttcaggccttt

SEQ ID NO: 638565 - DNA, 15 bp, Homo sapiens
tccttcaggcctttc

SEQ ID NO: 638566 - DNA, 15 bp, Homo sapiens
ccttcaggcctttct

SEQ ID NO: 638567 - DNA, 15 bp, Homo sapiens
cttcaggcctttctg

SEQ ID NO: 638568 - DNA, 15 bp, Homo sapiens
ttcaggcctttctgg

SEQ ID NO: 638569 - DNA, 15 bp, Homo sapiens
tcaggcctttctggc

SEQ ID NO: 638570 - DNA, 15 bp, Homo sapiens
caggcctttctggct

SEQ ID NO: 638571 - DNA, 15 bp, Homo sapiens
aggcctttctggctt

SEQ ID NO: 638572 - DNA, 15 bp, Homo sapiens
ggcctttctggcttc

SEQ ID NO: 638573 - DNA, 15 bp, Homo sapiens
gcctttctggcttcc

SEQ ID NO: 638574 - DNA, 15 bp, Homo sapiens
cctttctggcttcct

SEQ ID NO: 638575 - DNA, 15 bp, Homo sapiens
ctttctggcttccta

SEQ ID NO: 638576 - DNA, 15 bp, Homo sapiens
tttctggcttcctat

SEQ ID NO: 638577 - DNA, 15 bp, Homo sapiens
ttctggcttcctata

SEQ ID NO: 638578 - DNA, 15 bp, Homo sapiens
tctggcttcctatat

SEQ ID NO: 638579 - DNA, 15 bp, Homo sapiens
ctggcttcctatatg

SEQ ID NO: 638580 - DNA, 15 bp, Homo sapiens
tggcttcctatatgg

SEQ ID NO: 638581 - DNA, 15 bp, Homo sapiens
ggcttcctatatggc

SEQ ID NO: 638582 - DNA, 15 bp, Homo sapiens
gcttcctatatggca

SEQ ID NO: 638583 - DNA, 15 bp, Homo sapiens
cttcctatatggcag

SEQ ID NO: 638584 - DNA, 15 bp, Homo sapiens
ttcctatatggcagt

SEQ ID NO: 638585 - DNA, 15 bp, Homo sapiens
tcctatatggcagta

SEQ ID NO: 638586 - DNA, 15 bp, Homo sapiens
cctatatggcagtaa

SEQ ID NO: 638587 - DNA, 15 bp, Homo sapiens
ctatatggcagtaag

SEQ ID NO: 638588 - DNA, 15 bp, Homo sapiens
tatatggcagtaaga

SEQ ID NO: 638589 - DNA, 15 bp, Homo sapiens
atatggcagtaagaa

SEQ ID NO: 638590 - DNA, 15 bp, Homo sapiens
tatggcagtaagaaa

SEQ ID NO: 638591 - DNA, 15 bp, Homo sapiens
atggcagtaagaaaa

SEQ ID NO: 638592 - DNA, 15 bp, Homo sapiens
tggcagtaagaaaat

SEQ ID NO: 638593 - DNA, 15 bp, Homo sapiens
ggcagtaagaaaatg

SEQ ID NO: 638594 - DNA, 15 bp, Homo sapiens
gcagtaagaaaatga

SEQ ID NO: 638595 - DNA, 15 bp, Homo sapiens
cagtaagaaaatgat

SEQ ID NO: 638596 - DNA, 15 bp, Homo sapiens
agtaagaaaatgatg

SEQ ID NO: 638597 - DNA, 15 bp, Homo sapiens
gtaagaaaatgatgt

SEQ ID NO: 638598 - DNA, 15 bp, Homo sapiens
taagaaaatgatgtg

SEQ ID NO: 638599 - DNA, 15 bp, Homo sapiens
aagaaaatgatgtgc

SEQ ID NO: 638600 - DNA, 15 bp, Homo sapiens
agaaaatgatgtgct

SEQ ID NO: 638601 - DNA, 15 bp, Homo sapiens
gaaaatgatgtgctt

SEQ ID NO: 638602 - DNA, 15 bp, Homo sapiens
aaaatgatgtgctta

SEQ ID NO: 638603 - DNA, 15 bp, Homo sapiens
aaatgatgtgcttaa

SEQ ID NO: 638604 - DNA, 15 bp, Homo sapiens
aatgatgtgcttaat

SEQ ID NO: 638605 - DNA, 15 bp, Homo sapiens
atgatgtgcttaatg

SEQ ID NO: 638606 - DNA, 15 bp, Homo sapiens
tgatgtgcttaatga

SEQ ID NO: 638607 - DNA, 15 bp, Homo sapiens
gatgtgcttaatgat

SEQ ID NO: 638608 - DNA, 15 bp, Homo sapiens
atgtgcttaatgatt

SEQ ID NO: 638609 - DNA, 15 bp, Homo sapiens
tgtgcttaatgatta

SEQ ID NO: 638610 - DNA, 15 bp, Homo sapiens
gtgcttaatgattac

SEQ ID NO: 638611 - DNA, 15 bp, Homo sapiens
tgcttaatgattaca

SEQ ID NO: 638612 - DNA, 15 bp, Homo sapiens
gcttaatgattacaa

SEQ ID NO: 638613 - DNA, 15 bp, Homo sapiens
cttaatgattacaaa

SEQ ID NO: 638614 - DNA, 15 bp, Homo sapiens
ttaatgattacaaat

SEQ ID NO: 638615 - DNA, 15 bp, Homo sapiens
taatgattacaaatt

SEQ ID NO: 638616 - DNA, 15 bp, Homo sapiens
aatgattacaaattt

SEQ ID NO: 638617 - DNA, 15 bp, Homo sapiens
atgattacaaatttc

SEQ ID NO: 638618 - DNA, 15 bp, Homo sapiens
tgattacaaatttca

SEQ ID NO: 638619 - DNA, 15 bp, Homo sapiens
gattacaaatttcat

SEQ ID NO: 638620 - DNA, 15 bp, Homo sapiens
attacaaatttcata

SEQ ID NO: 638621 - DNA, 15 bp, Homo sapiens
ttacaaatttcatat

SEQ ID NO: 638622 - DNA, 15 bp, Homo sapiens
tacaaatttcatatg

SEQ ID NO: 638623 - DNA, 15 bp, Homo sapiens
acaaatttcatatgg

SEQ ID NO: 638624 - DNA, 15 bp, Homo sapiens
caaatttcatatgga

SEQ ID NO: 638625 - DNA, 15 bp, Homo sapiens
aaatttcatatggaa

SEQ ID NO: 638626 - DNA, 15 bp, Homo sapiens
aatttcatatggaat

SEQ ID NO: 638627 - DNA, 15 bp, Homo sapiens
atttcatatggaata

SEQ ID NO: 638628 - DNA, 15 bp, Homo sapiens
tttcatatggaatac

SEQ ID NO: 638629 - DNA, 15 bp, Homo sapiens
ttcatatggaatacg

SEQ ID NO: 638630 - DNA, 15 bp, Homo sapiens
tcatatggaatacga

SEQ ID NO: 638631 - DNA, 15 bp, Homo sapiens
catatggaatacgaa

SEQ ID NO: 638632 - DNA, 15 bp, Homo sapiens
atatggaatacgaac

SEQ ID NO: 638633 - DNA, 15 bp, Homo sapiens
tatggaatacgaact

SEQ ID NO: 638634 - DNA, 15 bp, Homo sapiens
atggaatacgaactt

SEQ ID NO: 638635 - DNA, 15 bp, Homo sapiens
tggaatacgaacttt

SEQ ID NO: 638636 - DNA, 15 bp, Homo sapiens
ggaatacgaactttc

SEQ ID NO: 638637 - DNA, 15 bp, Homo sapiens
gaatacgaactttca

SEQ ID NO: 638638 - DNA, 15 bp, Homo sapiens
aatacgaactttcag

SEQ ID NO: 638639 - DNA, 15 bp, Homo sapiens
atacgaactttcagt

SEQ ID NO: 638640 - DNA, 15 bp, Homo sapiens
tacgaactttcagtt

SEQ ID NO: 638641 - DNA, 15 bp, Homo sapiens
acgaactttcagttt

SEQ ID NO: 638642 - DNA, 15 bp, Homo sapiens
cgaactttcagtttg

SEQ ID NO: 638643 - DNA, 15 bp, Homo sapiens
gaactttcagtttgt

SEQ ID NO: 638644 - DNA, 15 bp, Homo sapiens
aactttcagtttgta

SEQ ID NO: 638645 - DNA, 15 bp, Homo sapiens
actttcagtttgtac

SEQ ID NO: 638646 - DNA, 15 bp, Homo sapiens
ctttcagtttgtaca

SEQ ID NO: 638647 - DNA, 15 bp, Homo sapiens
tttcagtttgtacat

SEQ ID NO: 638648 - DNA, 15 bp, Homo sapiens
ttcagtttgtacata

SEQ ID NO: 638649 - DNA, 15 bp, Homo sapiens
tcagtttgtacatat

SEQ ID NO: 638650 - DNA, 15 bp, Homo sapiens
cagtttgtacatatg

SEQ ID NO: 638651 - DNA, 15 bp, Homo sapiens
agtttgtacatatga

SEQ ID NO: 638652 - DNA, 15 bp, Homo sapiens
gtttgtacatatgat

SEQ ID NO: 638653 - DNA, 15 bp, Homo sapiens
tttgtacatatgatg

SEQ ID NO: 638654 - DNA, 15 bp, Homo sapiens
ttgtacatatgatgc

SEQ ID NO: 638655 - DNA, 15 bp, Homo sapiens
tgtacatatgatgca

SEQ ID NO: 638656 - DNA, 15 bp, Homo sapiens
gtacatatgatgcac

SEQ ID NO: 638657 - DNA, 15 bp, Homo sapiens
tacatatgatgcaca

SEQ ID NO: 638658 - DNA, 15 bp, Homo sapiens
acatatgatgcacag

SEQ ID NO: 638659 - DNA, 15 bp, Homo sapiens
catatgatgcacaga

SEQ ID NO: 638660 - DNA, 15 bp, Homo sapiens
atatgatgcacagag

SEQ ID NO: 638661 - DNA, 15 bp, Homo sapiens
tatgatgcacagaga

SEQ ID NO: 638662 - DNA, 15 bp, Homo sapiens
atgatgcacagagat

SEQ ID NO: 638663 - DNA, 15 bp, Homo sapiens
tgatgcacagagatg

SEQ ID NO: 638664 - DNA, 15 bp, Homo sapiens
gatgcacagagatgc

SEQ ID NO: 638665 - DNA, 15 bp, Homo sapiens
atgcacagagatgct

SEQ ID NO: 638666 - DNA, 15 bp, Homo sapiens
tgcacagagatgctt

SEQ ID NO: 638667 - DNA, 15 bp, Homo sapiens
gcacagagatgcttt

SEQ ID NO: 638668 - DNA, 15 bp, Homo sapiens
cacagagatgctttt

SEQ ID NO: 638669 - DNA, 15 bp, Homo sapiens
acagagatgcttttg

SEQ ID NO: 638670 - DNA, 15 bp, Homo sapiens
cagagatgcttttgt

SEQ ID NO: 638671 - DNA, 15 bp, Homo sapiens
agagatgcttttgtg

SEQ ID NO: 638672 - DNA, 15 bp, Homo sapiens
gagatgcttttgtgg

SEQ ID NO: 638673 - DNA, 15 bp, Homo sapiens
agatgcttttgtggt

SEQ ID NO: 638674 - DNA, 15 bp, Homo sapiens
gatgcttttgtggtt

SEQ ID NO: 638675 - DNA, 15 bp, Homo sapiens
atgcttttgtggttt

SEQ ID NO: 638676 - DNA, 15 bp, Homo sapiens
tgcttttgtggtttt

SEQ ID NO: 638677 - DNA, 15 bp, Homo sapiens
gcttttgtggtttta

SEQ ID NO: 638678 - DNA, 15 bp, Homo sapiens
cttttgtggttttat

SEQ ID NO: 638679 - DNA, 15 bp, Homo sapiens
ttttgtggttttatt

SEQ ID NO: 638680 - DNA, 15 bp, Homo sapiens
tttgtggttttattg

SEQ ID NO: 638681 - DNA, 15 bp, Homo sapiens
ttgtggttttattgg

SEQ ID NO: 638682 - DNA, 15 bp, Homo sapiens
tgtggttttattggt

SEQ ID NO: 638683 - DNA, 15 bp, Homo sapiens
gtggttttattggtt

SEQ ID NO: 638684 - DNA, 15 bp, Homo sapiens
tggttttattggttt

SEQ ID NO: 638685 - DNA, 15 bp, Homo sapiens
ggttttattggtttt

SEQ ID NO: 638686 - DNA, 15 bp, Homo sapiens
gttttattggttttc

SEQ ID NO: 638687 - DNA, 15 bp, Homo sapiens
ttttattggttttca

SEQ ID NO: 638688 - DNA, 15 bp, Homo sapiens
tttattggttttcat

SEQ ID NO: 638689 - DNA, 15 bp, Homo sapiens
ttattggttttcata

SEQ ID NO: 638690 - DNA, 15 bp, Homo sapiens
tattggttttcatat

SEQ ID NO: 638691 - DNA, 15 bp, Homo sapiens
attggttttcatatt

SEQ ID NO: 638692 - DNA, 15 bp, Homo sapiens
ttggttttcatatta

SEQ ID NO: 638693 - DNA, 15 bp, Homo sapiens
tggttttcatattac

SEQ ID NO: 638694 - DNA, 15 bp, Homo sapiens
ggttttcatattaca

SEQ ID NO: 638695 - DNA, 15 bp, Homo sapiens
gttttcatattacaa

SEQ ID NO: 638696 - DNA, 15 bp, Homo sapiens
ttttcatattacaaa

SEQ ID NO: 638697 - DNA, 15 bp, Homo sapiens
tttcatattacaaac

SEQ ID NO: 638698 - DNA, 15 bp, Homo sapiens
ttcatattacaaaca

SEQ ID NO: 638699 - DNA, 15 bp, Homo sapiens
tcatattacaaacaa

SEQ ID NO: 638700 - DNA, 15 bp, Homo sapiens
catattacaaacaaa

SEQ ID NO: 638701 - DNA, 15 bp, Homo sapiens
atattacaaacaaag

SEQ ID NO: 638702 - DNA, 15 bp, Homo sapiens
tattacaaacaaaga

SEQ ID NO: 638703 - DNA, 15 bp, Homo sapiens
attacaaacaaagaa

SEQ ID NO: 638704 - DNA, 15 bp, Homo sapiens
ttacaaacaaagaaa

SEQ ID NO: 638705 - DNA, 15 bp, Homo sapiens
tacaaacaaagaaac

SEQ ID NO: 638706 - DNA, 15 bp, Homo sapiens
acaaacaaagaaact

SEQ ID NO: 638707 - DNA, 15 bp, Homo sapiens
caaacaaagaaacta

SEQ ID NO: 638708 - DNA, 15 bp, Homo sapiens
aaacaaagaaactag

SEQ ID NO: 638709 - DNA, 15 bp, Homo sapiens
aacaaagaaactaga

SEQ ID NO: 638710 - DNA, 15 bp, Homo sapiens
acaaagaaactagaa

SEQ ID NO: 638711 - DNA, 15 bp, Homo sapiens
caaagaaactagaaa

SEQ ID NO: 638712 - DNA, 15 bp, Homo sapiens
aaagaaactagaaaa

SEQ ID NO: 638713 - DNA, 15 bp, Homo sapiens
aagaaactagaaaat

SEQ ID NO: 638714 - DNA, 15 bp, Homo sapiens
agaaactagaaaatg

SEQ ID NO: 638715 - DNA, 15 bp, Homo sapiens
gaaactagaaaatga

SEQ ID NO: 638716 - DNA, 15 bp, Homo sapiens
aaactagaaaatgaa

SEQ ID NO: 638717 - DNA, 15 bp, Homo sapiens
aactagaaaatgaaa

SEQ ID NO: 638718 - DNA, 15 bp, Homo sapiens
actagaaaatgaaac

SEQ ID NO: 638719 - DNA, 15 bp, Homo sapiens
ctagaaaatgaaacc

SEQ ID NO: 638720 - DNA, 15 bp, Homo sapiens
tagaaaatgaaacca

SEQ ID NO: 638721 - DNA, 15 bp, Homo sapiens
agaaaatgaaaccat

SEQ ID NO: 638722 - DNA, 15 bp, Homo sapiens
gaaaatgaaaccatt

SEQ ID NO: 638723 - DNA, 15 bp, Homo sapiens
aaaatgaaaccattc

SEQ ID NO: 638724 - DNA, 15 bp, Homo sapiens
aaatgaaaccattcc

SEQ ID NO: 638725 - DNA, 15 bp, Homo sapiens
aatgaaaccattcca

SEQ ID NO: 638726 - DNA, 15 bp, Homo sapiens
atgaaaccattccaa

SEQ ID NO: 638727 - DNA, 15 bp, Homo sapiens
tgaaaccattccaaa

SEQ ID NO: 638728 - DNA, 15 bp, Homo sapiens
gaaaccattccaaaa

SEQ ID NO: 638729 - DNA, 15 bp, Homo sapiens
aaaccattccaaaag

SEQ ID NO: 638730 - DNA, 15 bp, Homo sapiens
aaccattccaaaagt

SEQ ID NO: 638731 - DNA, 15 bp, Homo sapiens
accattccaaaagtg

SEQ ID NO: 638732 - DNA, 15 bp, Homo sapiens
ccattccaaaagtgg

SEQ ID NO: 638733 - DNA, 15 bp, Homo sapiens
cattccaaaagtgga

SEQ ID NO: 638734 - DNA, 15 bp, Homo sapiens
attccaaaagtggaa

SEQ ID NO: 638735 - DNA, 15 bp, Homo sapiens
ttccaaaagtggaag

SEQ ID NO: 638736 - DNA, 15 bp, Homo sapiens
tccaaaagtggaagt

SEQ ID NO: 638737 - DNA, 15 bp, Homo sapiens
ccaaaagtggaagta

SEQ ID NO: 638738 - DNA, 15 bp, Homo sapiens
caaaagtggaagtaa

SEQ ID NO: 638739 - DNA, 15 bp, Homo sapiens
aaaagtggaagtaat

SEQ ID NO: 638740 - DNA, 15 bp, Homo sapiens
aaagtggaagtaatt

SEQ ID NO: 638741 - DNA, 15 bp, Homo sapiens
aagtggaagtaattt

SEQ ID NO: 638742 - DNA, 15 bp, Homo sapiens
agtggaagtaatttc

SEQ ID NO: 638743 - DNA, 15 bp, Homo sapiens
gtggaagtaatttct

SEQ ID NO: 638744 - DNA, 15 bp, Homo sapiens
tggaagtaatttctc

SEQ ID NO: 638745 - DNA, 15 bp, Homo sapiens
ggaagtaatttctca

SEQ ID NO: 638746 - DNA, 15 bp, Homo sapiens
gaagtaatttctcac

SEQ ID NO: 638747 - DNA, 15 bp, Homo sapiens
aagtaatttctcact

SEQ ID NO: 638748 - DNA, 15 bp, Homo sapiens
agtaatttctcactg

SEQ ID NO: 638749 - DNA, 15 bp, Homo sapiens
gtaatttctcactgc

SEQ ID NO: 638750 - DNA, 15 bp, Homo sapiens
taatttctcactgcc

SEQ ID NO: 638751 - DNA, 15 bp, Homo sapiens
aatttctcactgccc

SEQ ID NO: 638752 - DNA, 15 bp, Homo sapiens
atttctcactgcccc

SEQ ID NO: 638753 - DNA, 15 bp, Homo sapiens
tttctcactgcccct

SEQ ID NO: 638754 - DNA, 15 bp, Homo sapiens
ttctcactgcccctg

SEQ ID NO: 638755 - DNA, 15 bp, Homo sapiens
tctcactgcccctgt

SEQ ID NO: 638756 - DNA, 15 bp, Homo sapiens
ctcactgcccctgtg

SEQ ID NO: 638757 - DNA, 15 bp, Homo sapiens
tcactgcccctgtga

SEQ ID NO: 638758 - DNA, 15 bp, Homo sapiens
cactgcccctgtgat

SEQ ID NO: 638759 - DNA, 15 bp, Homo sapiens
actgcccctgtgata

SEQ ID NO: 638760 - DNA, 15 bp, Homo sapiens
ctgcccctgtgataa

SEQ ID NO: 638761 - DNA, 15 bp, Homo sapiens
tgcccctgtgataaa

SEQ ID NO: 638762 - DNA, 15 bp, Homo sapiens
gcccctgtgataaac

SEQ ID NO: 638763 - DNA, 15 bp, Homo sapiens
cccctgtgataaact

SEQ ID NO: 638764 - DNA, 15 bp, Homo sapiens
ccctgtgataaactg

SEQ ID NO: 638765 - DNA, 15 bp, Homo sapiens
cctgtgataaactgt

SEQ ID NO: 638766 - DNA, 15 bp, Homo sapiens
ctgtgataaactgtg

SEQ ID NO: 638767 - DNA, 15 bp, Homo sapiens
tgtgataaactgtgg

SEQ ID NO: 638768 - DNA, 15 bp, Homo sapiens
gtgataaactgtggt

SEQ ID NO: 638769 - DNA, 15 bp, Homo sapiens
tgataaactgtggtc

SEQ ID NO: 638770 - DNA, 15 bp, Homo sapiens
gataaactgtggtca

SEQ ID NO: 638771 - DNA, 15 bp, Homo sapiens
ataaactgtggtcac

SEQ ID NO: 638772 - DNA, 15 bp, Homo sapiens
taaactgtggtcact

SEQ ID NO: 638773 - DNA, 15 bp, Homo sapiens
aaactgtggtcactg

SEQ ID NO: 638774 - DNA, 15 bp, Homo sapiens
aactgtggtcactgg

SEQ ID NO: 638775 - DNA, 15 bp, Homo sapiens
actgtggtcactggc

SEQ ID NO: 638776 - DNA, 15 bp, Homo sapiens
ctgtggtcactggct

SEQ ID NO: 638777 - DNA, 15 bp, Homo sapiens
tgtggtcactggctg

SEQ ID NO: 638778 - DNA, 15 bp, Homo sapiens
gtggtcactggctgt

SEQ ID NO: 638779 - DNA, 15 bp, Homo sapiens
tggtcactggctgtg

SEQ ID NO: 638780 - DNA, 15 bp, Homo sapiens
ggtcactggctgtgg

SEQ ID NO: 638781 - DNA, 15 bp, Homo sapiens
gtcactggctgtggc

SEQ ID NO: 638782 - DNA, 15 bp, Homo sapiens
tcactggctgtggca

SEQ ID NO: 638783 - DNA, 15 bp, Homo sapiens
cactggctgtggcag

SEQ ID NO: 638784 - DNA, 15 bp, Homo sapiens
actggctgtggcagc

SEQ ID NO: 638785 - DNA, 15 bp, Homo sapiens
ctggctgtggcagca

SEQ ID NO: 638786 - DNA, 15 bp, Homo sapiens
tggctgtggcagcaa

SEQ ID NO: 638787 - DNA, 15 bp, Homo sapiens
ggctgtggcagcaac

SEQ ID NO: 638788 - DNA, 15 bp, Homo sapiens
gctgtggcagcaact

SEQ ID NO: 638789 - DNA, 15 bp, Homo sapiens
ctgtggcagcaacta

SEQ ID NO: 638790 - DNA, 15 bp, Homo sapiens
tgtggcagcaactat

SEQ ID NO: 638791 - DNA, 15 bp, Homo sapiens
gtggcagcaactatt

SEQ ID NO: 638792 - DNA, 15 bp, Homo sapiens
tggcagcaactatta

SEQ ID NO: 638793 - DNA, 15 bp, Homo sapiens
ggcagcaactattat

SEQ ID NO: 638794 - DNA, 15 bp, Homo sapiens
gcagcaactattata

SEQ ID NO: 638795 - DNA, 15 bp, Homo sapiens
cagcaactattataa

SEQ ID NO: 638796 - DNA, 15 bp, Homo sapiens
agcaactattataag

SEQ ID NO: 638797 - DNA, 15 bp, Homo sapiens
gcaactattataaga

SEQ ID NO: 638798 - DNA, 15 bp, Homo sapiens
caactattataagat

SEQ ID NO: 638799 - DNA, 15 bp, Homo sapiens
aactattataagatg

SEQ ID NO: 638800 - DNA, 15 bp, Homo sapiens
actattataagatgc

SEQ ID NO: 638801 - DNA, 15 bp, Homo sapiens
ctattataagatgct

SEQ ID NO: 638802 - DNA, 15 bp, Homo sapiens
tattataagatgctc

SEQ ID NO: 638803 - DNA, 15 bp, Homo sapiens
attataagatgctct

SEQ ID NO: 638804 - DNA, 15 bp, Homo sapiens
ttataagatgctctg

SEQ ID NO: 638805 - DNA, 15 bp, Homo sapiens
tataagatgctctga

SEQ ID NO: 638806 - DNA, 15 bp, Homo sapiens
ataagatgctctgaa

SEQ ID NO: 638807 - DNA, 15 bp, Homo sapiens
taagatgctctgaaa

SEQ ID NO: 638808 - DNA, 15 bp, Homo sapiens
aagatgctctgaaaa

SEQ ID NO: 638809 - DNA, 15 bp, Homo sapiens
agatgctctgaaaac

SEQ ID NO: 638810 - DNA, 15 bp, Homo sapiens
gatgctctgaaaact

SEQ ID NO: 638811 - DNA, 15 bp, Homo sapiens
atgctctgaaaactc

SEQ ID NO: 638812 - DNA, 15 bp, Homo sapiens
tgctctgaaaactct

SEQ ID NO: 638813 - DNA, 15 bp, Homo sapiens
gctctgaaaactctt

SEQ ID NO: 638814 - DNA, 15 bp, Homo sapiens
ctctgaaaactcttc

SEQ ID NO: 638815 - DNA, 15 bp, Homo sapiens
tctgaaaactcttca

SEQ ID NO: 638816 - DNA, 15 bp, Homo sapiens
ctgaaaactcttcag

SEQ ID NO: 638817 - DNA, 15 bp, Homo sapiens
tgaaaactcttcaga

SEQ ID NO: 638818 - DNA, 15 bp, Homo sapiens
gaaaactcttcagac

SEQ ID NO: 638819 - DNA, 15 bp, Homo sapiens
aaaactcttcagaca

SEQ ID NO: 638820 - DNA, 15 bp, Homo sapiens
aaactcttcagacac

SEQ ID NO: 638821 - DNA, 15 bp, Homo sapiens
aactcttcagacact

SEQ ID NO: 638822 - DNA, 15 bp, Homo sapiens
actcttcagacactg

SEQ ID NO: 638823 - DNA, 15 bp, Homo sapiens
ctcttcagacactga

SEQ ID NO: 638824 - DNA, 15 bp, Homo sapiens
tcttcagacactgag

SEQ ID NO: 638825 - DNA, 15 bp, Homo sapiens
cttcagacactgagg

SEQ ID NO: 638826 - DNA, 15 bp, Homo sapiens
ttcagacactgaggg

SEQ ID NO: 638827 - DNA, 15 bp, Homo sapiens
tcagacactgagggg

SEQ ID NO: 638828 - DNA, 15 bp, Homo sapiens
cagacactgaggggc

SEQ ID NO: 638829 - DNA, 15 bp, Homo sapiens
agacactgaggggca

SEQ ID NO: 638830 - DNA, 15 bp, Homo sapiens
gacactgaggggcac

SEQ ID NO: 638831 - DNA, 15 bp, Homo sapiens
acactgaggggcacc

SEQ ID NO: 638832 - DNA, 15 bp, Homo sapiens
cactgaggggcacca

SEQ ID NO: 638833 - DNA, 15 bp, Homo sapiens
actgaggggcaccag

SEQ ID NO: 638834 - DNA, 15 bp, Homo sapiens
ctgaggggcaccaga

SEQ ID NO: 638835 - DNA, 15 bp, Homo sapiens
tgaggggcaccagag

SEQ ID NO: 638836 - DNA, 15 bp, Homo sapiens
gaggggcaccagagg

SEQ ID NO: 638837 - DNA, 15 bp, Homo sapiens
aggggcaccagagga

SEQ ID NO: 638838 - DNA, 15 bp, Homo sapiens
ggggcaccagaggag

SEQ ID NO: 638839 - DNA, 15 bp, Homo sapiens
gggcaccagaggagc

SEQ ID NO: 638840 - DNA, 15 bp, Homo sapiens
ggcaccagaggagca

SEQ ID NO: 638841 - DNA, 15 bp, Homo sapiens
gcaccagaggagcag

SEQ ID NO: 638842 - DNA, 15 bp, Homo sapiens
caccagaggagcaga

SEQ ID NO: 638843 - DNA, 15 bp, Homo sapiens
accagaggagcagac

SEQ ID NO: 638844 - DNA, 15 bp, Homo sapiens
ccagaggagcagact

SEQ ID NO: 638845 - DNA, 15 bp, Homo sapiens
cagaggagcagacta

SEQ ID NO: 638846 - DNA, 15 bp, Homo sapiens
agaggagcagactac

SEQ ID NO: 638847 - DNA, 15 bp, Homo sapiens
gaggagcagactaca

SEQ ID NO: 638848 - DNA, 15 bp, Homo sapiens
aggagcagactacaa

SEQ ID NO: 638849 - DNA, 15 bp, Homo sapiens
ggagcagactacaag

SEQ ID NO: 638850 - DNA, 15 bp, Homo sapiens
gagcagactacaaga

SEQ ID NO: 638851 - DNA, 15 bp, Homo sapiens
agcagactacaagaa

SEQ ID NO: 638852 - DNA, 15 bp, Homo sapiens
gcagactacaagaat

SEQ ID NO: 638853 - DNA, 15 bp, Homo sapiens
cagactacaagaatg

SEQ ID NO: 638854 - DNA, 15 bp, Homo sapiens
agactacaagaatgg

SEQ ID NO: 638855 - DNA, 15 bp, Homo sapiens
gactacaagaatggc

SEQ ID NO: 638856 - DNA, 15 bp, Homo sapiens
actacaagaatggca

SEQ ID NO: 638857 - DNA, 15 bp, Homo sapiens
ctacaagaatggcac

SEQ ID NO: 638858 - DNA, 15 bp, Homo sapiens
tacaagaatggcaca

SEQ ID NO: 638859 - DNA, 15 bp, Homo sapiens
acaagaatggcacac

SEQ ID NO: 638860 - DNA, 15 bp, Homo sapiens
caagaatggcacacg

SEQ ID NO: 638861 - DNA, 15 bp, Homo sapiens
aagaatggcacacgc

SEQ ID NO: 638862 - DNA, 15 bp, Homo sapiens
agaatggcacacgct

SEQ ID NO: 638863 - DNA, 15 bp, Homo sapiens
gaatggcacacgcta

SEQ ID NO: 638864 - DNA, 15 bp, Homo sapiens
aatggcacacgctat

SEQ ID NO: 638865 - DNA, 15 bp, Homo sapiens
atggcacacgctatg

SEQ ID NO: 638866 - DNA, 15 bp, Homo sapiens
tggcacacgctatgg

SEQ ID NO: 638867 - DNA, 15 bp, Homo sapiens
ggcacacgctatgga

SEQ ID NO: 638868 - DNA, 15 bp, Homo sapiens
gcacacgctatggaa

SEQ ID NO: 638869 - DNA, 15 bp, Homo sapiens
cacacgctatggaaa

SEQ ID NO: 638870 - DNA, 15 bp, Homo sapiens
acacgctatggaaaa

SEQ ID NO: 638871 - DNA, 15 bp, Homo sapiens
cacgctatggaaaac

SEQ ID NO: 638872 - DNA, 15 bp, Homo sapiens
acgctatggaaaact

SEQ ID NO: 638873 - DNA, 15 bp, Homo sapiens
cgctatggaaaactc

SEQ ID NO: 638874 - DNA, 15 bp, Homo sapiens
gctatggaaaactcc

SEQ ID NO: 638875 - DNA, 15 bp, Homo sapiens
ctatggaaaactcct

SEQ ID NO: 638876 - DNA, 15 bp, Homo sapiens
tatggaaaactcctg

SEQ ID NO: 638877 - DNA, 15 bp, Homo sapiens
atggaaaactcctgg

SEQ ID NO: 638878 - DNA, 15 bp, Homo sapiens
tggaaaactcctgga

SEQ ID NO: 638879 - DNA, 15 bp, Homo sapiens
ggaaaactcctggac

SEQ ID NO: 638880 - DNA, 15 bp, Homo sapiens
gaaaactcctggaca

SEQ ID NO: 638881 - DNA, 15 bp, Homo sapiens
aaaactcctggacaa

SEQ ID NO: 638882 - DNA, 15 bp, Homo sapiens
aaactcctggacaat

SEQ ID NO: 638883 - DNA, 15 bp, Homo sapiens
aactcctggacaatc

SEQ ID NO: 638884 - DNA, 15 bp, Homo sapiens
actcctggacaatca

SEQ ID NO: 638885 - DNA, 15 bp, Homo sapiens
ctcctggacaatcag

SEQ ID NO: 638886 - DNA, 15 bp, Homo sapiens
tcctggacaatcagt

SEQ ID NO: 638887 - DNA, 15 bp, Homo sapiens
cctggacaatcagta

SEQ ID NO: 638888 - DNA, 15 bp, Homo sapiens
ctggacaatcagtaa

SEQ ID NO: 638889 - DNA, 15 bp, Homo sapiens
tggacaatcagtaaa

SEQ ID NO: 638890 - DNA, 15 bp, Homo sapiens
ggacaatcagtaaag

SEQ ID NO: 638891 - DNA, 15 bp, Homo sapiens
gacaatcagtaaaga

SEQ ID NO: 638892 - DNA, 15 bp, Homo sapiens
acaatcagtaaagag

SEQ ID NO: 638893 - DNA, 15 bp, Homo sapiens
caatcagtaaagagt

SEQ ID NO: 638894 - DNA, 15 bp, Homo sapiens
aatcagtaaagagta

SEQ ID NO: 638895 - DNA, 15 bp, Homo sapiens
atcagtaaagagtac

SEQ ID NO: 638896 - DNA, 15 bp, Homo sapiens
tcagtaaagagtacc

SEQ ID NO: 638897 - DNA, 15 bp, Homo sapiens
cagtaaagagtacca

SEQ ID NO: 638898 - DNA, 15 bp, Homo sapiens
agtaaagagtaccat

SEQ ID NO: 638899 - DNA, 15 bp, Homo sapiens
gtaaagagtaccata

SEQ ID NO: 638900 - DNA, 15 bp, Homo sapiens
taaagagtaccatat

SEQ ID NO: 638901 - DNA, 15 bp, Homo sapiens
aaagagtaccatatt

SEQ ID NO: 638902 - DNA, 15 bp, Homo sapiens
aagagtaccatattg

SEQ ID NO: 638903 - DNA, 15 bp, Homo sapiens
agagtaccatattga

SEQ ID NO: 638904 - DNA, 15 bp, Homo sapiens
gagtaccatattgat

SEQ ID NO: 638905 - DNA, 15 bp, Homo sapiens
agtaccatattgatg

SEQ ID NO: 638906 - DNA, 15 bp, Homo sapiens
gtaccatattgatga

SEQ ID NO: 638907 - DNA, 15 bp, Homo sapiens
taccatattgatgaa

SEQ ID NO: 638908 - DNA, 15 bp, Homo sapiens
accatattgatgaag

SEQ ID NO: 638909 - DNA, 15 bp, Homo sapiens
ccatattgatgaaga

SEQ ID NO: 638910 - DNA, 15 bp, Homo sapiens
catattgatgaagaa

SEQ ID NO: 638911 - DNA, 15 bp, Homo sapiens
atattgatgaagaag

SEQ ID NO: 638912 - DNA, 15 bp, Homo sapiens
tattgatgaagaagt

SEQ ID NO: 638913 - DNA, 15 bp, Homo sapiens
attgatgaagaagtg

SEQ ID NO: 638914 - DNA, 15 bp, Homo sapiens
ttgatgaagaagtgg

SEQ ID NO: 638915 - DNA, 15 bp, Homo sapiens
tgatgaagaagtggg

SEQ ID NO: 638916 - DNA, 15 bp, Homo sapiens
gatgaagaagtgggc

SEQ ID NO: 638917 - DNA, 15 bp, Homo sapiens
atgaagaagtgggct

SEQ ID NO: 638918 - DNA, 15 bp, Homo sapiens
tgaagaagtgggctt

SEQ ID NO: 638919 - DNA, 15 bp, Homo sapiens
gaagaagtgggcttt

SEQ ID NO: 638920 - DNA, 15 bp, Homo sapiens
aagaagtgggctttg

SEQ ID NO: 638921 - DNA, 15 bp, Homo sapiens
agaagtgggctttgc

SEQ ID NO: 638922 - DNA, 15 bp, Homo sapiens
gaagtgggctttgct

SEQ ID NO: 638923 - DNA, 15 bp, Homo sapiens
aagtgggctttgctc

SEQ ID NO: 638924 - DNA, 15 bp, Homo sapiens
agtgggctttgctct

SEQ ID NO: 638925 - DNA, 15 bp, Homo sapiens
gtgggctttgctctg

SEQ ID NO: 638926 - DNA, 15 bp, Homo sapiens
tgggctttgctctgc

SEQ ID NO: 638927 - DNA, 15 bp, Homo sapiens
gggctttgctctgcc

SEQ ID NO: 638928 - DNA, 15 bp, Homo sapiens
ggctttgctctgcca

SEQ ID NO: 638929 - DNA, 15 bp, Homo sapiens
gctttgctctgccaa

SEQ ID NO: 638930 - DNA, 15 bp, Homo sapiens
ctttgctctgccaaa

SEQ ID NO: 638931 - DNA, 15 bp, Homo sapiens
tttgctctgccaaat

SEQ ID NO: 638932 - DNA, 15 bp, Homo sapiens
ttgctctgccaaatc

SEQ ID NO: 638933 - DNA, 15 bp, Homo sapiens
tgctctgccaaatcc

SEQ ID NO: 638934 - DNA, 15 bp, Homo sapiens
gctctgccaaatcca

SEQ ID NO: 638935 - DNA, 15 bp, Homo sapiens
ctctgccaaatccac

SEQ ID NO: 638936 - DNA, 15 bp, Homo sapiens
tctgccaaatccaca

SEQ ID NO: 638937 - DNA, 15 bp, Homo sapiens
ctgccaaatccacag

SEQ ID NO: 638938 - DNA, 15 bp, Homo sapiens
tgccaaatccacagg

SEQ ID NO: 638939 - DNA, 15 bp, Homo sapiens
gccaaatccacaggt

SEQ ID NO: 638940 - DNA, 15 bp, Homo sapiens
ccaaatccacaggta

SEQ ID NO: 638941 - DNA, 15 bp, Homo sapiens
caaatccacaggtaa

SEQ ID NO: 638942 - DNA, 15 bp, Homo sapiens
aaatccacaggtaag

SEQ ID NO: 638943 - DNA, 15 bp, Homo sapiens
aatccacaggtaaga

SEQ ID NO: 638944 - DNA, 15 bp, Homo sapiens
atccacaggtaagag

SEQ ID NO: 638945 - DNA, 15 bp, Homo sapiens
tccacaggtaagaga

SEQ ID NO: 638946 - DNA, 15 bp, Homo sapiens
ccacaggtaagagaa

SEQ ID NO: 638947 - DNA, 15 bp, Homo sapiens
cacaggtaagagaag

SEQ ID NO: 638948 - DNA, 15 bp, Homo sapiens
acaggtaagagaagg

SEQ ID NO: 638949 - DNA, 15 bp, Homo sapiens
caggtaagagaaggc

SEQ ID NO: 638950 - DNA, 15 bp, Homo sapiens
aggtaagagaaggca

SEQ ID NO: 638951 - DNA, 15 bp, Homo sapiens
ggtaagagaaggcag

SEQ ID NO: 638952 - DNA, 15 bp, Homo sapiens
gtaagagaaggcagt

SEQ ID NO: 638953 - DNA, 15 bp, Homo sapiens
taagagaaggcagta

SEQ ID NO: 638954 - DNA, 15 bp, Homo sapiens
aagagaaggcagtaa

SEQ ID NO: 638955 - DNA, 15 bp, Homo sapiens
agagaaggcagtaaa

SEQ ID NO: 638956 - DNA, 15 bp, Homo sapiens
gagaaggcagtaaaa

SEQ ID NO: 638957 - DNA, 15 bp, Homo sapiens
agaaggcagtaaaat

SEQ ID NO: 638958 - DNA, 15 bp, Homo sapiens
gaaggcagtaaaatg

SEQ ID NO: 638959 - DNA, 15 bp, Homo sapiens
aaggcagtaaaatgt

SEQ ID NO: 638960 - DNA, 15 bp, Homo sapiens
aggcagtaaaatgtg

SEQ ID NO: 638961 - DNA, 15 bp, Homo sapiens
ggcagtaaaatgtgg

SEQ ID NO: 638962 - DNA, 15 bp, Homo sapiens
gcagtaaaatgtggg

SEQ ID NO: 638963 - DNA, 15 bp, Homo sapiens
cagtaaaatgtggga

SEQ ID NO: 638964 - DNA, 15 bp, Homo sapiens
agtaaaatgtgggaa

SEQ ID NO: 638965 - DNA, 15 bp, Homo sapiens
gtaaaatgtgggaaa

SEQ ID NO: 638966 - DNA, 15 bp, Homo sapiens
taaaatgtgggaaaa

SEQ ID NO: 638967 - DNA, 15 bp, Homo sapiens
aaaatgtgggaaaat

SEQ ID NO: 638968 - DNA, 15 bp, Homo sapiens
aaatgtgggaaaatg

SEQ ID NO: 638969 - DNA, 15 bp, Homo sapiens
aatgtgggaaaatgc

SEQ ID NO: 638970 - DNA, 15 bp, Homo sapiens
atgtgggaaaatgca

SEQ ID NO: 638971 - DNA, 15 bp, Homo sapiens
tgtgggaaaatgcat

SEQ ID NO: 638972 - DNA, 15 bp, Homo sapiens
gtgggaaaatgcatt

SEQ ID NO: 638973 - DNA, 15 bp, Homo sapiens
tgggaaaatgcattc

SEQ ID NO: 638974 - DNA, 15 bp, Homo sapiens
gggaaaatgcattct

SEQ ID NO: 638975 - DNA, 15 bp, Homo sapiens
ggaaaatgcattctt

SEQ ID NO: 638976 - DNA, 15 bp, Homo sapiens
gaaaatgcattcttc

SEQ ID NO: 638977 - DNA, 15 bp, Homo sapiens
aaaatgcattcttct

SEQ ID NO: 638978 - DNA, 15 bp, Homo sapiens
aaatgcattcttctt

SEQ ID NO: 638979 - DNA, 15 bp, Homo sapiens
aatgcattcttcttc

SEQ ID NO: 638980 - DNA, 15 bp, Homo sapiens
atgcattcttcttct

SEQ ID NO: 638981 - DNA, 15 bp, Homo sapiens
tgcattcttcttctc

SEQ ID NO: 638982 - DNA, 15 bp, Homo sapiens
gcattcttcttctca

SEQ ID NO: 638983 - DNA, 15 bp, Homo sapiens
cattcttcttctcat

SEQ ID NO: 638984 - DNA, 15 bp, Homo sapiens
attcttcttctcatt

SEQ ID NO: 638985 - DNA, 15 bp, Homo sapiens
ttcttcttctcattc

SEQ ID NO: 638986 - DNA, 15 bp, Homo sapiens
tcttcttctcattcc

SEQ ID NO: 638987 - DNA, 15 bp, Homo sapiens
cttcttctcattcct

SEQ ID NO: 638988 - DNA, 15 bp, Homo sapiens
ttcttctcattcctt

SEQ ID NO: 638989 - DNA, 15 bp, Homo sapiens
tcttctcattcctta

SEQ ID NO: 638990 - DNA, 15 bp, Homo sapiens
cttctcattccttac

SEQ ID NO: 638991 - DNA, 15 bp, Homo sapiens
ttctcattccttacc

SEQ ID NO: 638992 - DNA, 15 bp, Homo sapiens
tctcattccttacct

SEQ ID NO: 638993 - DNA, 15 bp, Homo sapiens
ctcattccttacctg

SEQ ID NO: 638994 - DNA, 15 bp, Homo sapiens
tcattccttacctgg

SEQ ID NO: 638995 - DNA, 15 bp, Homo sapiens
cattccttacctggc

SEQ ID NO: 638996 - DNA, 15 bp, Homo sapiens
attccttacctggcc

SEQ ID NO: 638997 - DNA, 15 bp, Homo sapiens
ttccttacctggcca

SEQ ID NO: 638998 - DNA, 15 bp, Homo sapiens
tccttacctggccaa

SEQ ID NO: 638999 - DNA, 15 bp, Homo sapiens
ccttacctggccaag

SEQ ID NO: 639000 - DNA, 15 bp, Homo sapiens
cttacctggccaagt

SEQ ID NO: 639001 - DNA, 15 bp, Homo sapiens
ttacctggccaagtt

SEQ ID NO: 639002 - DNA, 15 bp, Homo sapiens
tacctggccaagtta

SEQ ID NO: 639003 - DNA, 15 bp, Homo sapiens
acctggccaagttaa

SEQ ID NO: 639004 - DNA, 15 bp, Homo sapiens
cctggccaagttaac

SEQ ID NO: 639005 - DNA, 15 bp, Homo sapiens
ctggccaagttaact

SEQ ID NO: 639006 - DNA, 15 bp, Homo sapiens
tggccaagttaactt

SEQ ID NO: 639007 - DNA, 15 bp, Homo sapiens
ggccaagttaacttc

SEQ ID NO: 639008 - DNA, 15 bp, Homo sapiens
gccaagttaacttct

SEQ ID NO: 639009 - DNA, 15 bp, Homo sapiens
ccaagttaacttcta

SEQ ID NO: 639010 - DNA, 15 bp, Homo sapiens
caagttaacttctac

SEQ ID NO: 639011 - DNA, 15 bp, Homo sapiens
aagttaacttctact

SEQ ID NO: 639012 - DNA, 15 bp, Homo sapiens
agttaacttctactg

SEQ ID NO: 639013 - DNA, 15 bp, Homo sapiens
gttaacttctactga

SEQ ID NO: 639014 - DNA, 15 bp, Homo sapiens
ttaacttctactgaa

SEQ ID NO: 639015 - DNA, 15 bp, Homo sapiens
taacttctactgaac

SEQ ID NO: 639016 - DNA, 15 bp, Homo sapiens
aacttctactgaaca

SEQ ID NO: 639017 - DNA, 15 bp, Homo sapiens
acttctactgaacaa

SEQ ID NO: 639018 - DNA, 15 bp, Homo sapiens
cttctactgaacaac

SEQ ID NO: 639019 - DNA, 15 bp, Homo sapiens
ttctactgaacaact

SEQ ID NO: 639020 - DNA, 15 bp, Homo sapiens
tctactgaacaactg

SEQ ID NO: 639021 - DNA, 15 bp, Homo sapiens
ctactgaacaactgt

SEQ ID NO: 639022 - DNA, 15 bp, Homo sapiens
tactgaacaactgtg

SEQ ID NO: 639023 - DNA, 15 bp, Homo sapiens
actgaacaactgtgg

SEQ ID NO: 639024 - DNA, 15 bp, Homo sapiens
ctgaacaactgtggt

SEQ ID NO: 639025 - DNA, 15 bp, Homo sapiens
tgaacaactgtggtt

SEQ ID NO: 639026 - DNA, 15 bp, Homo sapiens
gaacaactgtggttc

SEQ ID NO: 639027 - DNA, 15 bp, Homo sapiens
aacaactgtggttca

SEQ ID NO: 639028 - DNA, 15 bp, Homo sapiens
acaactgtggttcag

SEQ ID NO: 639029 - DNA, 15 bp, Homo sapiens
caactgtggttcagt

SEQ ID NO: 639030 - DNA, 15 bp, Homo sapiens
aactgtggttcagta

SEQ ID NO: 639031 - DNA, 15 bp, Homo sapiens
actgtggttcagtaa

SEQ ID NO: 639032 - DNA, 15 bp, Homo sapiens
ctgtggttcagtaac

SEQ ID NO: 639033 - DNA, 15 bp, Homo sapiens
tgtggttcagtaact

SEQ ID NO: 639034 - DNA, 15 bp, Homo sapiens
gtggttcagtaactt

SEQ ID NO: 639035 - DNA, 15 bp, Homo sapiens
tggttcagtaacttc

SEQ ID NO: 639036 - DNA, 15 bp, Homo sapiens
ggttcagtaacttct

SEQ ID NO: 639037 - DNA, 15 bp, Homo sapiens
gttcagtaacttcta

SEQ ID NO: 639038 - DNA, 15 bp, Homo sapiens
ttcagtaacttctag

SEQ ID NO: 639039 - DNA, 15 bp, Homo sapiens
tcagtaacttctagt

SEQ ID NO: 639040 - DNA, 15 bp, Homo sapiens
cagtaacttctagta

SEQ ID NO: 639041 - DNA, 15 bp, Homo sapiens
agtaacttctagtaa

SEQ ID NO: 639042 - DNA, 15 bp, Homo sapiens
gtaacttctagtaaa

SEQ ID NO: 639043 - DNA, 15 bp, Homo sapiens
taacttctagtaaac

SEQ ID NO: 639044 - DNA, 15 bp, Homo sapiens
aacttctagtaaaca

SEQ ID NO: 639045 - DNA, 15 bp, Homo sapiens
acttctagtaaacaa

SEQ ID NO: 639046 - DNA, 15 bp, Homo sapiens
cttctagtaaacaaa

SEQ ID NO: 639047 - DNA, 15 bp, Homo sapiens
ttctagtaaacaaac

SEQ ID NO: 639048 - DNA, 15 bp, Homo sapiens
tctagtaaacaaaca

SEQ ID NO: 639049 - DNA, 15 bp, Homo sapiens
ctagtaaacaaacac

SEQ ID NO: 639050 - DNA, 15 bp, Homo sapiens
tagtaaacaaacaca

SEQ ID NO: 639051 - DNA, 15 bp, Homo sapiens
agtaaacaaacacat

SEQ ID NO: 639052 - DNA, 15 bp, Homo sapiens
gtaaacaaacacata

SEQ ID NO: 639053 - DNA, 15 bp, Homo sapiens
taaacaaacacataa

SEQ ID NO: 639054 - DNA, 15 bp, Homo sapiens
aaacaaacacataaa

SEQ ID NO: 639055 - DNA, 15 bp, Homo sapiens
aacaaacacataaag

SEQ ID NO: 639056 - DNA, 15 bp, Homo sapiens
acaaacacataaagc

SEQ ID NO: 639057 - DNA, 15 bp, Homo sapiens
caaacacataaagct

SEQ ID NO: 639058 - DNA, 15 bp, Homo sapiens
aaacacataaagctg

SEQ ID NO: 639059 - DNA, 15 bp, Homo sapiens
aacacataaagctgt

SEQ ID NO: 639060 - DNA, 15 bp, Homo sapiens
acacataaagctgtg

SEQ ID NO: 639061 - DNA, 15 bp, Homo sapiens
cacataaagctgtgt

SEQ ID NO: 639062 - DNA, 15 bp, Homo sapiens
acataaagctgtgta

SEQ ID NO: 639063 - DNA, 15 bp, Homo sapiens
cataaagctgtgtaa

SEQ ID NO: 639064 - DNA, 15 bp, Homo sapiens
ataaagctgtgtaaa

SEQ ID NO: 639065 - DNA, 15 bp, Homo sapiens
taaagctgtgtaaaa

SEQ ID NO: 639066 - DNA, 15 bp, Homo sapiens
aaagctgtgtaaaaa

SEQ ID NO: 639067 - DNA, 15 bp, Homo sapiens
aagctgtgtaaaaat

SEQ ID NO: 639068 - DNA, 15 bp, Homo sapiens
agctgtgtaaaaatt

SEQ ID NO: 639069 - DNA, 15 bp, Homo sapiens
gctgtgtaaaaatta

SEQ ID NO: 639070 - DNA, 15 bp, Homo sapiens
ctgtgtaaaaattag

SEQ ID NO: 639071 - DNA, 15 bp, Homo sapiens
tgtgtaaaaattaga

SEQ ID NO: 639072 - DNA, 15 bp, Homo sapiens
gtgtaaaaattagag

SEQ ID NO: 639073 - DNA, 15 bp, Homo sapiens
tgtaaaaattagaga

SEQ ID NO: 639074 - DNA, 15 bp, Homo sapiens
gtaaaaattagagag

SEQ ID NO: 639075 - DNA, 15 bp, Homo sapiens
taaaaattagagagc

SEQ ID NO: 639076 - DNA, 15 bp, Homo sapiens
aaaaattagagagct

SEQ ID NO: 639077 - DNA, 15 bp, Homo sapiens
aaaattagagagctg

SEQ ID NO: 639078 - DNA, 15 bp, Homo sapiens
aaattagagagctgt

SEQ ID NO: 639079 - DNA, 15 bp, Homo sapiens
aattagagagctgta

SEQ ID NO: 639080 - DNA, 15 bp, Homo sapiens
attagagagctgtaa

SEQ ID NO: 639081 - DNA, 15 bp, Homo sapiens
ttagagagctgtaat

SEQ ID NO: 639082 - DNA, 15 bp, Homo sapiens
tagagagctgtaata

SEQ ID NO: 639083 - DNA, 15 bp, Homo sapiens
agagagctgtaataa

SEQ ID NO: 639084 - DNA, 15 bp, Homo sapiens
gagagctgtaataac

SEQ ID NO: 639085 - DNA, 15 bp, Homo sapiens
agagctgtaataact

SEQ ID NO: 639086 - DNA, 15 bp, Homo sapiens
gagctgtaataactg

SEQ ID NO: 639087 - DNA, 15 bp, Homo sapiens
agctgtaataactgc

SEQ ID NO: 639088 - DNA, 15 bp, Homo sapiens
gctgtaataactgca

SEQ ID NO: 639089 - DNA, 15 bp, Homo sapiens
ctgtaataactgcat

SEQ ID NO: 639090 - DNA, 15 bp, Homo sapiens
tgtaataactgcatc

SEQ ID NO: 639091 - DNA, 15 bp, Homo sapiens
gtaataactgcatct

SEQ ID NO: 639092 - DNA, 15 bp, Homo sapiens
taataactgcatctc

SEQ ID NO: 639093 - DNA, 15 bp, Homo sapiens
aataactgcatctca

SEQ ID NO: 639094 - DNA, 15 bp, Homo sapiens
ataactgcatctcac

SEQ ID NO: 639095 - DNA, 15 bp, Homo sapiens
taactgcatctcact

SEQ ID NO: 639096 - DNA, 15 bp, Homo sapiens
aactgcatctcactt

SEQ ID NO: 639097 - DNA, 15 bp, Homo sapiens
actgcatctcactta

SEQ ID NO: 639098 - DNA, 15 bp, Homo sapiens
ctgcatctcacttaa

SEQ ID NO: 639099 - DNA, 15 bp, Homo sapiens
tgcatctcacttaat

SEQ ID NO: 639100 - DNA, 15 bp, Homo sapiens
gcatctcacttaatt

SEQ ID NO: 639101 - DNA, 15 bp, Homo sapiens
catctcacttaattt

SEQ ID NO: 639102 - DNA, 15 bp, Homo sapiens
atctcacttaatttg

SEQ ID NO: 639103 - DNA, 15 bp, Homo sapiens
tctcacttaatttgt

SEQ ID NO: 639104 - DNA, 15 bp, Homo sapiens
ctcacttaatttgtc

SEQ ID NO: 639105 - DNA, 15 bp, Homo sapiens
tcacttaatttgtct

SEQ ID NO: 639106 - DNA, 15 bp, Homo sapiens
cacttaatttgtctt

SEQ ID NO: 639107 - DNA, 15 bp, Homo sapiens
acttaatttgtctta

SEQ ID NO: 639108 - DNA, 15 bp, Homo sapiens
cttaatttgtcttac

SEQ ID NO: 639109 - DNA, 15 bp, Homo sapiens
ttaatttgtcttaca

SEQ ID NO: 639110 - DNA, 15 bp, Homo sapiens
taatttgtcttacat

SEQ ID NO: 639111 - DNA, 15 bp, Homo sapiens
aatttgtcttacatt

SEQ ID NO: 639112 - DNA, 15 bp, Homo sapiens
atttgtcttacattt

SEQ ID NO: 639113 - DNA, 15 bp, Homo sapiens
tttgtcttacatttt

SEQ ID NO: 639114 - DNA, 15 bp, Homo sapiens
ttgtcttacattttc

SEQ ID NO: 639115 - DNA, 15 bp, Homo sapiens
tgtcttacattttct

SEQ ID NO: 639116 - DNA, 15 bp, Homo sapiens
gtcttacattttctc

SEQ ID NO: 639117 - DNA, 15 bp, Homo sapiens
tcttacattttctcc

SEQ ID NO: 639118 - DNA, 15 bp, Homo sapiens
cttacattttctccc

SEQ ID NO: 639119 - DNA, 15 bp, Homo sapiens
ttacattttctccct

SEQ ID NO: 639120 - DNA, 15 bp, Homo sapiens
tacattttctcccta

SEQ ID NO: 639121 - DNA, 15 bp, Homo sapiens
acattttctccctag

SEQ ID NO: 639122 - DNA, 15 bp, Homo sapiens
cattttctccctaga

SEQ ID NO: 639123 - DNA, 15 bp, Homo sapiens
attttctccctagaa

SEQ ID NO: 639124 - DNA, 15 bp, Homo sapiens
ttttctccctagaaa

SEQ ID NO: 639125 - DNA, 15 bp, Homo sapiens
tttctccctagaaat

SEQ ID NO: 639126 - DNA, 15 bp, Homo sapiens
ttctccctagaaatg

SEQ ID NO: 639127 - DNA, 15 bp, Homo sapiens
tctccctagaaatgg

SEQ ID NO: 639128 - DNA, 15 bp, Homo sapiens
ctccctagaaatgga

SEQ ID NO: 639129 - DNA, 15 bp, Homo sapiens
tccctagaaatggag

SEQ ID NO: 639130 - DNA, 15 bp, Homo sapiens
ccctagaaatggagt

SEQ ID NO: 639131 - DNA, 15 bp, Homo sapiens
cctagaaatggagtc

SEQ ID NO: 639132 - DNA, 15 bp, Homo sapiens
ctagaaatggagtca

SEQ ID NO: 639133 - DNA, 15 bp, Homo sapiens
tagaaatggagtcat

SEQ ID NO: 639134 - DNA, 15 bp, Homo sapiens
agaaatggagtcatc

SEQ ID NO: 639135 - DNA, 15 bp, Homo sapiens
gaaatggagtcatct

SEQ ID NO: 639136 - DNA, 15 bp, Homo sapiens
aaatggagtcatcta

SEQ ID NO: 639137 - DNA, 15 bp, Homo sapiens
aatggagtcatctat

SEQ ID NO: 639138 - DNA, 15 bp, Homo sapiens
atggagtcatctatg

SEQ ID NO: 639139 - DNA, 15 bp, Homo sapiens
tggagtcatctatgc

SEQ ID NO: 639140 - DNA, 15 bp, Homo sapiens
ggagtcatctatgca

SEQ ID NO: 639141 - DNA, 15 bp, Homo sapiens
gagtcatctatgcat

SEQ ID NO: 639142 - DNA, 15 bp, Homo sapiens
agtcatctatgcatt

SEQ ID NO: 639143 - DNA, 15 bp, Homo sapiens
gtcatctatgcattt

SEQ ID NO: 639144 - DNA, 15 bp, Homo sapiens
tcatctatgcatttc

SEQ ID NO: 639145 - DNA, 15 bp, Homo sapiens
catctatgcatttct

SEQ ID NO: 639146 - DNA, 15 bp, Homo sapiens
atctatgcatttctt

SEQ ID NO: 639147 - DNA, 15 bp, Homo sapiens
tctatgcatttctta

SEQ ID NO: 639148 - DNA, 15 bp, Homo sapiens
ctatgcatttcttac

SEQ ID NO: 639149 - DNA, 15 bp, Homo sapiens
tatgcatttcttact

SEQ ID NO: 639150 - DNA, 15 bp, Homo sapiens
atgcatttcttactt

SEQ ID NO: 639151 - DNA, 15 bp, Homo sapiens
tgcatttcttactta

SEQ ID NO: 639152 - DNA, 15 bp, Homo sapiens
gcatttcttacttac

SEQ ID NO: 639153 - DNA, 15 bp, Homo sapiens
catttcttacttacc

SEQ ID NO: 639154 - DNA, 15 bp, Homo sapiens
atttcttacttacct

SEQ ID NO: 639155 - DNA, 15 bp, Homo sapiens
tttcttacttaccta

SEQ ID NO: 639156 - DNA, 15 bp, Homo sapiens
ttcttacttacctaa

SEQ ID NO: 639157 - DNA, 15 bp, Homo sapiens
tcttacttacctaac

SEQ ID NO: 639158 - DNA, 15 bp, Homo sapiens
cttacttacctaaca

SEQ ID NO: 639159 - DNA, 15 bp, Homo sapiens
ttacttacctaacat

SEQ ID NO: 639160 - DNA, 15 bp, Homo sapiens
tacttacctaacatg

SEQ ID NO: 639161 - DNA, 15 bp, Homo sapiens
acttacctaacatgg

SEQ ID NO: 639162 - DNA, 15 bp, Homo sapiens
cttacctaacatgga

SEQ ID NO: 639163 - DNA, 15 bp, Homo sapiens
ttacctaacatggat

SEQ ID NO: 639164 - DNA, 15 bp, Homo sapiens
tacctaacatggata

SEQ ID NO: 639165 - DNA, 15 bp, Homo sapiens
acctaacatggatac

SEQ ID NO: 639166 - DNA, 15 bp, Homo sapiens
cctaacatggatacg

SEQ ID NO: 639167 - DNA, 15 bp, Homo sapiens
ctaacatggatacgg

SEQ ID NO: 639168 - DNA, 15 bp, Homo sapiens
taacatggatacgga

SEQ ID NO: 639169 - DNA, 15 bp, Homo sapiens
aacatggatacggag

SEQ ID NO: 639170 - DNA, 15 bp, Homo sapiens
acatggatacggaga

SEQ ID NO: 639171 - DNA, 15 bp, Homo sapiens
catggatacggagag

SEQ ID NO: 639172 - DNA, 15 bp, Homo sapiens
atggatacggagagt

SEQ ID NO: 639173 - DNA, 15 bp, Homo sapiens
tggatacggagagtg

SEQ ID NO: 639174 - DNA, 15 bp, Homo sapiens
ggatacggagagtgg

SEQ ID NO: 639175 - DNA, 15 bp, Homo sapiens
gatacggagagtggt

SEQ ID NO: 639176 - DNA, 15 bp, Homo sapiens
atacggagagtggtg

SEQ ID NO: 639177 - DNA, 15 bp, Homo sapiens
tacggagagtggtga

SEQ ID NO: 639178 - DNA, 15 bp, Homo sapiens
acggagagtggtgag

SEQ ID NO: 639179 - DNA, 15 bp, Homo sapiens
cggagagtggtgaga

SEQ ID NO: 639180 - DNA, 15 bp, Homo sapiens
ggagagtggtgagaa

SEQ ID NO: 639181 - DNA, 15 bp, Homo sapiens
gagagtggtgagaaa

SEQ ID NO: 639182 - DNA, 15 bp, Homo sapiens
agagtggtgagaaag

SEQ ID NO: 639183 - DNA, 15 bp, Homo sapiens
gagtggtgagaaagg

SEQ ID NO: 639184 - DNA, 15 bp, Homo sapiens
agtggtgagaaagga

SEQ ID NO: 639185 - DNA, 15 bp, Homo sapiens
gtggtgagaaaggaa

SEQ ID NO: 639186 - DNA, 15 bp, Homo sapiens
tggtgagaaaggaaa

SEQ ID NO: 639187 - DNA, 15 bp, Homo sapiens
ggtgagaaaggaaac

SEQ ID NO: 639188 - DNA, 15 bp, Homo sapiens
gtgagaaaggaaact

SEQ ID NO: 639189 - DNA, 15 bp, Homo sapiens
tgagaaaggaaacta

SEQ ID NO: 639190 - DNA, 15 bp, Homo sapiens
gagaaaggaaactat

SEQ ID NO: 639191 - DNA, 15 bp, Homo sapiens
agaaaggaaactata

SEQ ID NO: 639192 - DNA, 15 bp, Homo sapiens
gaaaggaaactatag

SEQ ID NO: 639193 - DNA, 15 bp, Homo sapiens
aaaggaaactataga

SEQ ID NO: 639194 - DNA, 15 bp, Homo sapiens
aaggaaactatagaa

SEQ ID NO: 639195 - DNA, 15 bp, Homo sapiens
aggaaactatagaaa

SEQ ID NO: 639196 - DNA, 15 bp, Homo sapiens
ggaaactatagaaag

SEQ ID NO: 639197 - DNA, 15 bp, Homo sapiens
gaaactatagaaagt

SEQ ID NO: 639198 - DNA, 15 bp, Homo sapiens
aaactatagaaagtg

SEQ ID NO: 639199 - DNA, 15 bp, Homo sapiens
aactatagaaagtgt

SEQ ID NO: 639200 - DNA, 15 bp, Homo sapiens
actatagaaagtgta

SEQ ID NO: 639201 - DNA, 15 bp, Homo sapiens
ctatagaaagtgtat

SEQ ID NO: 639202 - DNA, 15 bp, Homo sapiens
tatagaaagtgtatc

SEQ ID NO: 639203 - DNA, 15 bp, Homo sapiens
atagaaagtgtatca

SEQ ID NO: 639204 - DNA, 15 bp, Homo sapiens
tagaaagtgtatcag

SEQ ID NO: 639205 - DNA, 15 bp, Homo sapiens
agaaagtgtatcagc

SEQ ID NO: 639206 - DNA, 15 bp, Homo sapiens
gaaagtgtatcagct

SEQ ID NO: 639207 - DNA, 15 bp, Homo sapiens
aaagtgtatcagctt

SEQ ID NO: 639208 - DNA, 15 bp, Homo sapiens
aagtgtatcagcttt

SEQ ID NO: 639209 - DNA, 15 bp, Homo sapiens
agtgtatcagcttta

SEQ ID NO: 639210 - DNA, 15 bp, Homo sapiens
gtgtatcagctttac

SEQ ID NO: 639211 - DNA, 15 bp, Homo sapiens
tgtatcagctttaca

SEQ ID NO: 639212 - DNA, 15 bp, Homo sapiens
gtatcagctttacat

SEQ ID NO: 639213 - DNA, 15 bp, Homo sapiens
tatcagctttacata

SEQ ID NO: 639214 - DNA, 15 bp, Homo sapiens
atcagctttacataa

SEQ ID NO: 639215 - DNA, 15 bp, Homo sapiens
tcagctttacataag

SEQ ID NO: 639216 - DNA, 15 bp, Homo sapiens
cagctttacataaga

SEQ ID NO: 639217 - DNA, 15 bp, Homo sapiens
agctttacataagaa

SEQ ID NO: 639218 - DNA, 15 bp, Homo sapiens
gctttacataagaat

SEQ ID NO: 639219 - DNA, 15 bp, Homo sapiens
ctttacataagaatt

SEQ ID NO: 639220 - DNA, 15 bp, Homo sapiens
tttacataagaatta

SEQ ID NO: 639221 - DNA, 15 bp, Homo sapiens
ttacataagaattat

SEQ ID NO: 639222 - DNA, 15 bp, Homo sapiens
tacataagaattata

SEQ ID NO: 639223 - DNA, 15 bp, Homo sapiens
acataagaattatat

SEQ ID NO: 639224 - DNA, 15 bp, Homo sapiens
cataagaattatata

SEQ ID NO: 639225 - DNA, 15 bp, Homo sapiens
ataagaattatatag

SEQ ID NO: 639226 - DNA, 15 bp, Homo sapiens
taagaattatatagt

SEQ ID NO: 639227 - DNA, 15 bp, Homo sapiens
aagaattatatagta

SEQ ID NO: 639228 - DNA, 15 bp, Homo sapiens
agaattatatagtaa

SEQ ID NO: 639229 - DNA, 15 bp, Homo sapiens
gaattatatagtaaa

SEQ ID NO: 639230 - DNA, 15 bp, Homo sapiens
aattatatagtaaaa

SEQ ID NO: 639231 - DNA, 15 bp, Homo sapiens
attatatagtaaaat

SEQ ID NO: 639232 - DNA, 15 bp, Homo sapiens
ttatatagtaaaata

SEQ ID NO: 639233 - DNA, 15 bp, Homo sapiens
tatatagtaaaatac

SEQ ID NO: 639234 - DNA, 15 bp, Homo sapiens
atatagtaaaataca

SEQ ID NO: 639235 - DNA, 15 bp, Homo sapiens
tatagtaaaatacaa

SEQ ID NO: 639236 - DNA, 15 bp, Homo sapiens
atagtaaaatacaaa

SEQ ID NO: 639237 - DNA, 15 bp, Homo sapiens
tagtaaaatacaaac

SEQ ID NO: 639238 - DNA, 15 bp, Homo sapiens
agtaaaatacaaaca

SEQ ID NO: 639239 - DNA, 15 bp, Homo sapiens
gtaaaatacaaacaa

SEQ ID NO: 639240 - DNA, 15 bp, Homo sapiens
taaaatacaaacaat

SEQ ID NO: 639241 - DNA, 15 bp, Homo sapiens
aaaatacaaacaatg

SEQ ID NO: 639242 - DNA, 15 bp, Homo sapiens
aaatacaaacaatga

SEQ ID NO: 639243 - DNA, 15 bp, Homo sapiens
aatacaaacaatgag

SEQ ID NO: 639244 - DNA, 15 bp, Homo sapiens
atacaaacaatgagg

SEQ ID NO: 639245 - DNA, 15 bp, Homo sapiens
tacaaacaatgaggt

SEQ ID NO: 639246 - DNA, 15 bp, Homo sapiens
acaaacaatgaggtt

SEQ ID NO: 639247 - DNA, 15 bp, Homo sapiens
caaacaatgaggtta

SEQ ID NO: 639248 - DNA, 15 bp, Homo sapiens
aaacaatgaggttat

SEQ ID NO: 639249 - DNA, 15 bp, Homo sapiens
aacaatgaggttatt

SEQ ID NO: 639250 - DNA, 15 bp, Homo sapiens
acaatgaggttatta

SEQ ID NO: 639251 - DNA, 15 bp, Homo sapiens
caatgaggttattac

SEQ ID NO: 639252 - DNA, 15 bp, Homo sapiens
aatgaggttattaca

SEQ ID NO: 639253 - DNA, 15 bp, Homo sapiens
atgaggttattacag

SEQ ID NO: 639254 - DNA, 15 bp, Homo sapiens
tgaggttattacagt

SEQ ID NO: 639255 - DNA, 15 bp, Homo sapiens
gaggttattacagtt

SEQ ID NO: 639256 - DNA, 15 bp, Homo sapiens
aggttattacagttg

SEQ ID NO: 639257 - DNA, 15 bp, Homo sapiens
ggttattacagttgt

SEQ ID NO: 639258 - DNA, 15 bp, Homo sapiens
gttattacagttgta

SEQ ID NO: 639259 - DNA, 15 bp, Homo sapiens
ttattacagttgtat

SEQ ID NO: 639260 - DNA, 15 bp, Homo sapiens
tattacagttgtatt

SEQ ID NO: 639261 - DNA, 15 bp, Homo sapiens
attacagttgtattt

SEQ ID NO: 639262 - DNA, 15 bp, Homo sapiens
ttacagttgtatttt

SEQ ID NO: 639263 - DNA, 15 bp, Homo sapiens
tacagttgtattttg

SEQ ID NO: 639264 - DNA, 15 bp, Homo sapiens
acagttgtattttga

SEQ ID NO: 639265 - DNA, 15 bp, Homo sapiens
cagttgtattttgag

SEQ ID NO: 639266 - DNA, 15 bp, Homo sapiens
agttgtattttgaga

SEQ ID NO: 639267 - DNA, 15 bp, Homo sapiens
gttgtattttgagaa

SEQ ID NO: 639268 - DNA, 15 bp, Homo sapiens
ttgtattttgagaaa

SEQ ID NO: 639269 - DNA, 15 bp, Homo sapiens
tgtattttgagaaaa

SEQ ID NO: 639270 - DNA, 15 bp, Homo sapiens
gtattttgagaaaag

SEQ ID NO: 639271 - DNA, 15 bp, Homo sapiens
tattttgagaaaagg

SEQ ID NO: 639272 - DNA, 15 bp, Homo sapiens
attttgagaaaaggt

SEQ ID NO: 639273 - DNA, 15 bp, Homo sapiens
ttttgagaaaaggtg

SEQ ID NO: 639274 - DNA, 15 bp, Homo sapiens
tttgagaaaaggtgt

SEQ ID NO: 639275 - DNA, 15 bp, Homo sapiens
ttgagaaaaggtgtt

SEQ ID NO: 639276 - DNA, 15 bp, Homo sapiens
tgagaaaaggtgttt

SEQ ID NO: 639277 - DNA, 15 bp, Homo sapiens
gagaaaaggtgtttt

SEQ ID NO: 639278 - DNA, 15 bp, Homo sapiens
agaaaaggtgttttg

SEQ ID NO: 639279 - DNA, 15 bp, Homo sapiens
gaaaaggtgttttgc

SEQ ID NO: 639280 - DNA, 15 bp, Homo sapiens
aaaaggtgttttgca

SEQ ID NO: 639281 - DNA, 15 bp, Homo sapiens
aaaggtgttttgcaa

SEQ ID NO: 639282 - DNA, 15 bp, Homo sapiens
aaggtgttttgcaaa

SEQ ID NO: 639283 - DNA, 15 bp, Homo sapiens
aggtgttttgcaaaa

SEQ ID NO: 639284 - DNA, 15 bp, Homo sapiens
ggtgttttgcaaaag

SEQ ID NO: 639285 - DNA, 15 bp, Homo sapiens
gtgttttgcaaaagc

SEQ ID NO: 639286 - DNA, 15 bp, Homo sapiens
tgttttgcaaaagcc

SEQ ID NO: 639287 - DNA, 15 bp, Homo sapiens
gttttgcaaaagcca

SEQ ID NO: 639288 - DNA, 15 bp, Homo sapiens
ttttgcaaaagccag

SEQ ID NO: 639289 - DNA, 15 bp, Homo sapiens
tttgcaaaagccaga

SEQ ID NO: 639290 - DNA, 15 bp, Homo sapiens
ttgcaaaagccagag

SEQ ID NO: 639291 - DNA, 15 bp, Homo sapiens
tgcaaaagccagagt

SEQ ID NO: 639292 - DNA, 15 bp, Homo sapiens
gcaaaagccagagtt

SEQ ID NO: 639293 - DNA, 15 bp, Homo sapiens
caaaagccagagttt

SEQ ID NO: 639294 - DNA, 15 bp, Homo sapiens
aaaagccagagtttt

SEQ ID NO: 639295 - DNA, 15 bp, Homo sapiens
aaagccagagtttta

SEQ ID NO: 639296 - DNA, 15 bp, Homo sapiens
aagccagagttttaa

SEQ ID NO: 639297 - DNA, 15 bp, Homo sapiens
agccagagttttaaa

SEQ ID NO: 639298 - DNA, 15 bp, Homo sapiens
gccagagttttaaat

SEQ ID NO: 639299 - DNA, 15 bp, Homo sapiens
ccagagttttaaatg

SEQ ID NO: 639300 - DNA, 15 bp, Homo sapiens
cagagttttaaatga

SEQ ID NO: 639301 - DNA, 15 bp, Homo sapiens
agagttttaaatgag

SEQ ID NO: 639302 - DNA, 15 bp, Homo sapiens
gagttttaaatgagc

SEQ ID NO: 639303 - DNA, 15 bp, Homo sapiens
agttttaaatgagcc

SEQ ID NO: 639304 - DNA, 15 bp, Homo sapiens
gttttaaatgagcca

SEQ ID NO: 639305 - DNA, 15 bp, Homo sapiens
ttttaaatgagccat

SEQ ID NO: 639306 - DNA, 15 bp, Homo sapiens
tttaaatgagccatg

SEQ ID NO: 639307 - DNA, 15 bp, Homo sapiens
ttaaatgagccatga

SEQ ID NO: 639308 - DNA, 15 bp, Homo sapiens
taaatgagccatgag

SEQ ID NO: 639309 - DNA, 15 bp, Homo sapiens
aaatgagccatgagt

SEQ ID NO: 639310 - DNA, 15 bp, Homo sapiens
aatgagccatgagtc

SEQ ID NO: 639311 - DNA, 15 bp, Homo sapiens
atgagccatgagtca

SEQ ID NO: 639312 - DNA, 15 bp, Homo sapiens
tgagccatgagtcaa

SEQ ID NO: 639313 - DNA, 15 bp, Homo sapiens
gagccatgagtcaaa

SEQ ID NO: 639314 - DNA, 15 bp, Homo sapiens
agccatgagtcaaac

SEQ ID NO: 639315 - DNA, 15 bp, Homo sapiens
gccatgagtcaaaca

SEQ ID NO: 639316 - DNA, 15 bp, Homo sapiens
ccatgagtcaaacag

SEQ ID NO: 639317 - DNA, 15 bp, Homo sapiens
catgagtcaaacaga

SEQ ID NO: 639318 - DNA, 15 bp, Homo sapiens
atgagtcaaacagaa

SEQ ID NO: 639319 - DNA, 15 bp, Homo sapiens
tgagtcaaacagaaa

SEQ ID NO: 639320 - DNA, 15 bp, Homo sapiens
gagtcaaacagaaat

SEQ ID NO: 639321 - DNA, 15 bp, Homo sapiens
agtcaaacagaaatc

SEQ ID NO: 639322 - DNA, 15 bp, Homo sapiens
gtcaaacagaaatcc

SEQ ID NO: 639323 - DNA, 15 bp, Homo sapiens
tcaaacagaaatccc

SEQ ID NO: 639324 - DNA, 15 bp, Homo sapiens
caaacagaaatccct

SEQ ID NO: 639325 - DNA, 15 bp, Homo sapiens
aaacagaaatccctt

SEQ ID NO: 639326 - DNA, 15 bp, Homo sapiens
aacagaaatcccttt

SEQ ID NO: 639327 - DNA, 15 bp, Homo sapiens
acagaaatccctttc

SEQ ID NO: 639328 - DNA, 15 bp, Homo sapiens
cagaaatccctttct

SEQ ID NO: 639329 - DNA, 15 bp, Homo sapiens
agaaatccctttctc

SEQ ID NO: 639330 - DNA, 15 bp, Homo sapiens
gaaatccctttctct

SEQ ID NO: 639331 - DNA, 15 bp, Homo sapiens
aaatccctttctctt

SEQ ID NO: 639332 - DNA, 15 bp, Homo sapiens
aatccctttctctta

SEQ ID NO: 639333 - DNA, 15 bp, Homo sapiens
atccctttctcttag

SEQ ID NO: 639334 - DNA, 15 bp, Homo sapiens
tccctttctcttagg

SEQ ID NO: 639335 - DNA, 15 bp, Homo sapiens
ccctttctcttaggg

SEQ ID NO: 639336 - DNA, 15 bp, Homo sapiens
cctttctcttaggga

SEQ ID NO: 639337 - DNA, 15 bp, Homo sapiens
ctttctcttagggat

SEQ ID NO: 639338 - DNA, 15 bp, Homo sapiens
tttctcttagggata

SEQ ID NO: 639339 - DNA, 15 bp, Homo sapiens
ttctcttagggatat

SEQ ID NO: 639340 - DNA, 15 bp, Homo sapiens
tctcttagggatata

SEQ ID NO: 639341 - DNA, 15 bp, Homo sapiens
ctcttagggatataa

SEQ ID NO: 639342 - DNA, 15 bp, Homo sapiens
tcttagggatataac

SEQ ID NO: 639343 - DNA, 15 bp, Homo sapiens
cttagggatataact

SEQ ID NO: 639344 - DNA, 15 bp, Homo sapiens
ttagggatataactt

SEQ ID NO: 639345 - DNA, 15 bp, Homo sapiens
tagggatataactta

SEQ ID NO: 639346 - DNA, 15 bp, Homo sapiens
agggatataacttaa

SEQ ID NO: 639347 - DNA, 15 bp, Homo sapiens
gggatataacttaaa

SEQ ID NO: 639348 - DNA, 15 bp, Homo sapiens
ggatataacttaaat

SEQ ID NO: 639349 - DNA, 15 bp, Homo sapiens
gatataacttaaatt

SEQ ID NO: 639350 - DNA, 15 bp, Homo sapiens
atataacttaaatta

SEQ ID NO: 639351 - DNA, 15 bp, Homo sapiens
tataacttaaattat

SEQ ID NO: 639352 - DNA, 15 bp, Homo sapiens
ataacttaaattatg

SEQ ID NO: 639353 - DNA, 15 bp, Homo sapiens
taacttaaattatgc

SEQ ID NO: 639354 - DNA, 15 bp, Homo sapiens
aacttaaattatgca

SEQ ID NO: 639355 - DNA, 15 bp, Homo sapiens
acttaaattatgcaa

SEQ ID NO: 639356 - DNA, 15 bp, Homo sapiens
cttaaattatgcaaa

SEQ ID NO: 639357 - DNA, 15 bp, Homo sapiens
ttaaattatgcaaaa

SEQ ID NO: 639358 - DNA, 15 bp, Homo sapiens
taaattatgcaaaac

SEQ ID NO: 639359 - DNA, 15 bp, Homo sapiens
aaattatgcaaaaca

SEQ ID NO: 639360 - DNA, 15 bp, Homo sapiens
aattatgcaaaacat

SEQ ID NO: 639361 - DNA, 15 bp, Homo sapiens
attatgcaaaacatg

SEQ ID NO: 639362 - DNA, 15 bp, Homo sapiens
ttatgcaaaacatgt

SEQ ID NO: 639363 - DNA, 15 bp, Homo sapiens
tatgcaaaacatgtg

SEQ ID NO: 639364 - DNA, 15 bp, Homo sapiens
atgcaaaacatgtgt

SEQ ID NO: 639365 - DNA, 15 bp, Homo sapiens
tgcaaaacatgtgtt

SEQ ID NO: 639366 - DNA, 15 bp, Homo sapiens
gcaaaacatgtgttt

SEQ ID NO: 639367 - DNA, 15 bp, Homo sapiens
caaaacatgtgtttc

SEQ ID NO: 639368 - DNA, 15 bp, Homo sapiens
aaaacatgtgtttct

SEQ ID NO: 639369 - DNA, 15 bp, Homo sapiens
aaacatgtgtttcta

SEQ ID NO: 639370 - DNA, 15 bp, Homo sapiens
aacatgtgtttctaa

SEQ ID NO: 639371 - DNA, 15 bp, Homo sapiens
acatgtgtttctaat

SEQ ID NO: 639372 - DNA, 15 bp, Homo sapiens
catgtgtttctaatt

SEQ ID NO: 639373 - DNA, 15 bp, Homo sapiens
atgtgtttctaattt

SEQ ID NO: 639374 - DNA, 15 bp, Homo sapiens
tgtgtttctaatttg

SEQ ID NO: 639375 - DNA, 15 bp, Homo sapiens
gtgtttctaatttga

SEQ ID NO: 639376 - DNA, 15 bp, Homo sapiens
tgtttctaatttgat

SEQ ID NO: 639377 - DNA, 15 bp, Homo sapiens
gtttctaatttgatg

SEQ ID NO: 639378 - DNA, 15 bp, Homo sapiens
tttctaatttgatgg

SEQ ID NO: 639379 - DNA, 15 bp, Homo sapiens
ttctaatttgatggg

SEQ ID NO: 639380 - DNA, 15 bp, Homo sapiens
tctaatttgatgggg

SEQ ID NO: 639381 - DNA, 15 bp, Homo sapiens
ctaatttgatggggt

SEQ ID NO: 639382 - DNA, 15 bp, Homo sapiens
taatttgatggggtt

SEQ ID NO: 639383 - DNA, 15 bp, Homo sapiens
aatttgatggggttt

SEQ ID NO: 639384 - DNA, 15 bp, Homo sapiens
atttgatggggttta

SEQ ID NO: 639385 - DNA, 15 bp, Homo sapiens
tttgatggggtttat

SEQ ID NO: 639386 - DNA, 15 bp, Homo sapiens
ttgatggggtttatg

SEQ ID NO: 639387 - DNA, 15 bp, Homo sapiens
tgatggggtttatga

SEQ ID NO: 639388 - DNA, 15 bp, Homo sapiens
gatggggtttatgag

SEQ ID NO: 639389 - DNA, 15 bp, Homo sapiens
atggggtttatgaga

SEQ ID NO: 639390 - DNA, 15 bp, Homo sapiens
tggggtttatgagat

SEQ ID NO: 639391 - DNA, 15 bp, Homo sapiens
ggggtttatgagatt

SEQ ID NO: 639392 - DNA, 15 bp, Homo sapiens
gggtttatgagattg

SEQ ID NO: 639393 - DNA, 15 bp, Homo sapiens
ggtttatgagattgc

SEQ ID NO: 639394 - DNA, 15 bp, Homo sapiens
gtttatgagattgca

SEQ ID NO: 639395 - DNA, 15 bp, Homo sapiens
tttatgagattgcac

SEQ ID NO: 639396 - DNA, 15 bp, Homo sapiens
ttatgagattgcaca

SEQ ID NO: 639397 - DNA, 15 bp, Homo sapiens
tatgagattgcacat

SEQ ID NO: 639398 - DNA, 15 bp, Homo sapiens
atgagattgcacatc

SEQ ID NO: 639399 - DNA, 15 bp, Homo sapiens
tgagattgcacatca

SEQ ID NO: 639400 - DNA, 15 bp, Homo sapiens
gagattgcacatcaa

SEQ ID NO: 639401 - DNA, 15 bp, Homo sapiens
agattgcacatcaag

SEQ ID NO: 639402 - DNA, 15 bp, Homo sapiens
gattgcacatcaagc

SEQ ID NO: 639403 - DNA, 15 bp, Homo sapiens
attgcacatcaagca

SEQ ID NO: 639404 - DNA, 15 bp, Homo sapiens
ttgcacatcaagcac

SEQ ID NO: 639405 - DNA, 15 bp, Homo sapiens
tgcacatcaagcacc

SEQ ID NO: 639406 - DNA, 15 bp, Homo sapiens
gcacatcaagcacct

SEQ ID NO: 639407 - DNA, 15 bp, Homo sapiens
cacatcaagcacctt

SEQ ID NO: 639408 - DNA, 15 bp, Homo sapiens
acatcaagcaccttc

SEQ ID NO: 639409 - DNA, 15 bp, Homo sapiens
catcaagcaccttcc

SEQ ID NO: 639410 - DNA, 15 bp, Homo sapiens
atcaagcaccttcca

SEQ ID NO: 639411 - DNA, 15 bp, Homo sapiens
tcaagcaccttccat

SEQ ID NO: 639412 - DNA, 15 bp, Homo sapiens
caagcaccttccatg

SEQ ID NO: 639413 - DNA, 15 bp, Homo sapiens
aagcaccttccatgt

SEQ ID NO: 639414 - DNA, 15 bp, Homo sapiens
agcaccttccatgtt

SEQ ID NO: 639415 - DNA, 15 bp, Homo sapiens
gcaccttccatgtta

SEQ ID NO: 639416 - DNA, 15 bp, Homo sapiens
caccttccatgttat

SEQ ID NO: 639417 - DNA, 15 bp, Homo sapiens
accttccatgttata

SEQ ID NO: 639418 - DNA, 15 bp, Homo sapiens
ccttccatgttatat

SEQ ID NO: 639419 - DNA, 15 bp, Homo sapiens
cttccatgttatatt

SEQ ID NO: 639420 - DNA, 15 bp, Homo sapiens
ttccatgttatatta

SEQ ID NO: 639421 - DNA, 15 bp, Homo sapiens
tccatgttatattat

SEQ ID NO: 639422 - DNA, 15 bp, Homo sapiens
ccatgttatattatc

SEQ ID NO: 639423 - DNA, 15 bp, Homo sapiens
catgttatattatca

SEQ ID NO: 639424 - DNA, 15 bp, Homo sapiens
atgttatattatcat

SEQ ID NO: 639425 - DNA, 15 bp, Homo sapiens
tgttatattatcatt

SEQ ID NO: 639426 - DNA, 15 bp, Homo sapiens
gttatattatcattg

SEQ ID NO: 639427 - DNA, 15 bp, Homo sapiens
ttatattatcattgc

SEQ ID NO: 639428 - DNA, 15 bp, Homo sapiens
tatattatcattgct

SEQ ID NO: 639429 - DNA, 15 bp, Homo sapiens
atattatcattgctt

SEQ ID NO: 639430 - DNA, 15 bp, Homo sapiens
tattatcattgcttg

SEQ ID NO: 639431 - DNA, 15 bp, Homo sapiens
attatcattgcttgt

SEQ ID NO: 639432 - DNA, 15 bp, Homo sapiens
ttatcattgcttgtt

SEQ ID NO: 639433 - DNA, 15 bp, Homo sapiens
tatcattgcttgtta

SEQ ID NO: 639434 - DNA, 15 bp, Homo sapiens
atcattgcttgttat

SEQ ID NO: 639435 - DNA, 15 bp, Homo sapiens
tcattgcttgttatt

SEQ ID NO: 639436 - DNA, 15 bp, Homo sapiens
cattgcttgttattt

SEQ ID NO: 639437 - DNA, 15 bp, Homo sapiens
attgcttgttattta

SEQ ID NO: 639438 - DNA, 15 bp, Homo sapiens
ttgcttgttatttac

SEQ ID NO: 639439 - DNA, 15 bp, Homo sapiens
tgcttgttatttact

SEQ ID NO: 639440 - DNA, 15 bp, Homo sapiens
gcttgttatttactg

SEQ ID NO: 639441 - DNA, 15 bp, Homo sapiens
cttgttatttactga

SEQ ID NO: 639442 - DNA, 15 bp, Homo sapiens
ttgttatttactgag

SEQ ID NO: 639443 - DNA, 15 bp, Homo sapiens
tgttatttactgagc

SEQ ID NO: 639444 - DNA, 15 bp, Homo sapiens
gttatttactgagcg

SEQ ID NO: 639445 - DNA, 15 bp, Homo sapiens
ttatttactgagcgt

SEQ ID NO: 639446 - DNA, 15 bp, Homo sapiens
tatttactgagcgta

SEQ ID NO: 639447 - DNA, 15 bp, Homo sapiens
atttactgagcgtaa

SEQ ID NO: 639448 - DNA, 15 bp, Homo sapiens
tttactgagcgtaag

SEQ ID NO: 639449 - DNA, 15 bp, Homo sapiens
ttactgagcgtaaga

SEQ ID NO: 639450 - DNA, 15 bp, Homo sapiens
tactgagcgtaagat

SEQ ID NO: 639451 - DNA, 15 bp, Homo sapiens
actgagcgtaagatt

SEQ ID NO: 639452 - DNA, 15 bp, Homo sapiens
ctgagcgtaagattc

SEQ ID NO: 639453 - DNA, 15 bp, Homo sapiens
tgagcgtaagattca

SEQ ID NO: 639454 - DNA, 15 bp, Homo sapiens
gagcgtaagattcaa

SEQ ID NO: 639455 - DNA, 15 bp, Homo sapiens
agcgtaagattcaag

SEQ ID NO: 639456 - DNA, 15 bp, Homo sapiens
gcgtaagattcaagt

SEQ ID NO: 639457 - DNA, 15 bp, Homo sapiens
cgtaagattcaagtg

SEQ ID NO: 639458 - DNA, 15 bp, Homo sapiens
gtaagattcaagtga

SEQ ID NO: 639459 - DNA, 15 bp, Homo sapiens
taagattcaagtgag

SEQ ID NO: 639460 - DNA, 15 bp, Homo sapiens
aagattcaagtgaga

SEQ ID NO: 639461 - DNA, 15 bp, Homo sapiens
agattcaagtgagag

SEQ ID NO: 639462 - DNA, 15 bp, Homo sapiens
gattcaagtgagagt

SEQ ID NO: 639463 - DNA, 15 bp, Homo sapiens
attcaagtgagagtc

SEQ ID NO: 639464 - DNA, 15 bp, Homo sapiens
ttcaagtgagagtct

SEQ ID NO: 639465 - DNA, 15 bp, Homo sapiens
tcaagtgagagtctg

SEQ ID NO: 639466 - DNA, 15 bp, Homo sapiens
caagtgagagtctga

SEQ ID NO: 639467 - DNA, 15 bp, Homo sapiens
aagtgagagtctgaa

SEQ ID NO: 639468 - DNA, 15 bp, Homo sapiens
agtgagagtctgaac

SEQ ID NO: 639469 - DNA, 15 bp, Homo sapiens
gtgagagtctgaact

SEQ ID NO: 639470 - DNA, 15 bp, Homo sapiens
tgagagtctgaacta

SEQ ID NO: 639471 - DNA, 15 bp, Homo sapiens
gagagtctgaactac

SEQ ID NO: 639472 - DNA, 15 bp, Homo sapiens
agagtctgaactacc

SEQ ID NO: 639473 - DNA, 15 bp, Homo sapiens
gagtctgaactacct

SEQ ID NO: 639474 - DNA, 15 bp, Homo sapiens
agtctgaactacctt

SEQ ID NO: 639475 - DNA, 15 bp, Homo sapiens
gtctgaactaccttt

SEQ ID NO: 639476 - DNA, 15 bp, Homo sapiens
tctgaactacctttt

SEQ ID NO: 639477 - DNA, 15 bp, Homo sapiens
ctgaactaccttttt

SEQ ID NO: 639478 - DNA, 15 bp, Homo sapiens
tgaactacctttttt

SEQ ID NO: 639479 - DNA, 15 bp, Homo sapiens
gaactaccttttttc

SEQ ID NO: 639480 - DNA, 15 bp, Homo sapiens
aactaccttttttct

SEQ ID NO: 639481 - DNA, 15 bp, Homo sapiens
actaccttttttctt

SEQ ID NO: 639482 - DNA, 15 bp, Homo sapiens
ctaccttttttcttg

SEQ ID NO: 639483 - DNA, 15 bp, Homo sapiens
taccttttttcttgt

SEQ ID NO: 639484 - DNA, 15 bp, Homo sapiens
accttttttcttgtt

SEQ ID NO: 639485 - DNA, 15 bp, Homo sapiens
ccttttttcttgttt

SEQ ID NO: 639486 - DNA, 15 bp, Homo sapiens
cttttttcttgtttg

SEQ ID NO: 639487 - DNA, 15 bp, Homo sapiens
ttttttcttgtttgc

SEQ ID NO: 639488 - DNA, 15 bp, Homo sapiens
tttttcttgtttgca

SEQ ID NO: 639489 - DNA, 15 bp, Homo sapiens
ttttcttgtttgcaa

SEQ ID NO: 639490 - DNA, 15 bp, Homo sapiens
tttcttgtttgcaag

SEQ ID NO: 639491 - DNA, 15 bp, Homo sapiens
ttcttgtttgcaagt

SEQ ID NO: 639492 - DNA, 15 bp, Homo sapiens
tcttgtttgcaagtc

SEQ ID NO: 639493 - DNA, 15 bp, Homo sapiens
cttgtttgcaagtct

SEQ ID NO: 639494 - DNA, 15 bp, Homo sapiens
ttgtttgcaagtctt

SEQ ID NO: 639495 - DNA, 15 bp, Homo sapiens
tgtttgcaagtctta

SEQ ID NO: 639496 - DNA, 15 bp, Homo sapiens
gtttgcaagtcttac

SEQ ID NO: 639497 - DNA, 15 bp, Homo sapiens
tttgcaagtcttacc

SEQ ID NO: 639498 - DNA, 15 bp, Homo sapiens
ttgcaagtcttacct

SEQ ID NO: 639499 - DNA, 15 bp, Homo sapiens
tgcaagtcttaccta

SEQ ID NO: 639500 - DNA, 15 bp, Homo sapiens
gcaagtcttacctat

SEQ ID NO: 639501 - DNA, 15 bp, Homo sapiens
caagtcttacctata

SEQ ID NO: 639502 - DNA, 15 bp, Homo sapiens
aagtcttacctataa

SEQ ID NO: 639503 - DNA, 15 bp, Homo sapiens
agtcttacctataaa

SEQ ID NO: 639504 - DNA, 15 bp, Homo sapiens
gtcttacctataaag

SEQ ID NO: 639505 - DNA, 15 bp, Homo sapiens
tcttacctataaagt

SEQ ID NO: 639506 - DNA, 15 bp, Homo sapiens
cttacctataaagta

SEQ ID NO: 639507 - DNA, 15 bp, Homo sapiens
ttacctataaagtac

SEQ ID NO: 639508 - DNA, 15 bp, Homo sapiens
tacctataaagtaca

SEQ ID NO: 639509 - DNA, 15 bp, Homo sapiens
acctataaagtacaa

SEQ ID NO: 639510 - DNA, 15 bp, Homo sapiens
cctataaagtacaag

SEQ ID NO: 639511 - DNA, 15 bp, Homo sapiens
ctataaagtacaagg

SEQ ID NO: 639512 - DNA, 15 bp, Homo sapiens
tataaagtacaaggt

SEQ ID NO: 639513 - DNA, 15 bp, Homo sapiens
ataaagtacaaggta

SEQ ID NO: 639514 - DNA, 15 bp, Homo sapiens
taaagtacaaggtat

SEQ ID NO: 639515 - DNA, 15 bp, Homo sapiens
aaagtacaaggtatg

SEQ ID NO: 639516 - DNA, 15 bp, Homo sapiens
aagtacaaggtatgt

SEQ ID NO: 639517 - DNA, 15 bp, Homo sapiens
agtacaaggtatgtg

SEQ ID NO: 639518 - DNA, 15 bp, Homo sapiens
gtacaaggtatgtgg

SEQ ID NO: 639519 - DNA, 15 bp, Homo sapiens
tacaaggtatgtgga

SEQ ID NO: 639520 - DNA, 15 bp, Homo sapiens
acaaggtatgtggaa

SEQ ID NO: 639521 - DNA, 15 bp, Homo sapiens
caaggtatgtggaaa

SEQ ID NO: 639522 - DNA, 15 bp, Homo sapiens
aaggtatgtggaaaa

SEQ ID NO: 639523 - DNA, 15 bp, Homo sapiens
aggtatgtggaaaaa

SEQ ID NO: 639524 - DNA, 15 bp, Homo sapiens
ggtatgtggaaaaaa

SEQ ID NO: 639525 - DNA, 15 bp, Homo sapiens
gtatgtggaaaaaag

SEQ ID NO: 639526 - DNA, 15 bp, Homo sapiens
tatgtggaaaaaagg

SEQ ID NO: 639527 - DNA, 15 bp, Homo sapiens
atgtggaaaaaaggt

SEQ ID NO: 639528 - DNA, 15 bp, Homo sapiens
tgtggaaaaaaggtt

SEQ ID NO: 639529 - DNA, 15 bp, Homo sapiens
gtggaaaaaaggttt

SEQ ID NO: 639530 - DNA, 15 bp, Homo sapiens
tggaaaaaaggtttg

SEQ ID NO: 639531 - DNA, 15 bp, Homo sapiens
ggaaaaaaggtttgc

SEQ ID NO: 639532 - DNA, 15 bp, Homo sapiens
gaaaaaaggtttgcc

SEQ ID NO: 639533 - DNA, 15 bp, Homo sapiens
aaaaaaggtttgcct

SEQ ID NO: 639534 - DNA, 15 bp, Homo sapiens
aaaaaggtttgcctt

SEQ ID NO: 639535 - DNA, 15 bp, Homo sapiens
aaaaggtttgcctta

SEQ ID NO: 639536 - DNA, 15 bp, Homo sapiens
aaaggtttgccttaa

SEQ ID NO: 639537 - DNA, 15 bp, Homo sapiens
aaggtttgccttaaa

SEQ ID NO: 639538 - DNA, 15 bp, Homo sapiens
aggtttgccttaaaa

SEQ ID NO: 639539 - DNA, 15 bp, Homo sapiens
ggtttgccttaaaaa

SEQ ID NO: 639540 - DNA, 15 bp, Homo sapiens
gtttgccttaaaaac

SEQ ID NO: 639541 - DNA, 15 bp, Homo sapiens
tttgccttaaaaact

SEQ ID NO: 639542 - DNA, 15 bp, Homo sapiens
ttgccttaaaaacta

SEQ ID NO: 639543 - DNA, 15 bp, Homo sapiens
tgccttaaaaactac

SEQ ID NO: 639544 - DNA, 15 bp, Homo sapiens
gccttaaaaactaca

SEQ ID NO: 639545 - DNA, 15 bp, Homo sapiens
ccttaaaaactacat

SEQ ID NO: 639546 - DNA, 15 bp, Homo sapiens
cttaaaaactacatt

SEQ ID NO: 639547 - DNA, 15 bp, Homo sapiens
ttaaaaactacattt

SEQ ID NO: 639548 - DNA, 15 bp, Homo sapiens
taaaaactacatttt

SEQ ID NO: 639549 - DNA, 15 bp, Homo sapiens
aaaaactacattttc

SEQ ID NO: 639550 - DNA, 15 bp, Homo sapiens
aaaactacattttct

SEQ ID NO: 639551 - DNA, 15 bp, Homo sapiens
aaactacattttcta

SEQ ID NO: 639552 - DNA, 15 bp, Homo sapiens
aactacattttctag

SEQ ID NO: 639553 - DNA, 15 bp, Homo sapiens
actacattttctagt

SEQ ID NO: 639554 - DNA, 15 bp, Homo sapiens
ctacattttctagtc

SEQ ID NO: 639555 - DNA, 15 bp, Homo sapiens
tacattttctagtct

SEQ ID NO: 639556 - DNA, 15 bp, Homo sapiens
acattttctagtctg

SEQ ID NO: 639557 - DNA, 15 bp, Homo sapiens
cattttctagtctgt

SEQ ID NO: 639558 - DNA, 15 bp, Homo sapiens
attttctagtctgtc

SEQ ID NO: 639559 - DNA, 15 bp, Homo sapiens
ttttctagtctgtct

SEQ ID NO: 639560 - DNA, 15 bp, Homo sapiens
tttctagtctgtctt

SEQ ID NO: 639561 - DNA, 15 bp, Homo sapiens
ttctagtctgtcttc

SEQ ID NO: 639562 - DNA, 15 bp, Homo sapiens
tctagtctgtcttct

SEQ ID NO: 639563 - DNA, 15 bp, Homo sapiens
ctagtctgtcttcta

SEQ ID NO: 639564 - DNA, 15 bp, Homo sapiens
tagtctgtcttctaa

SEQ ID NO: 639565 - DNA, 15 bp, Homo sapiens
agtctgtcttctaac

SEQ ID NO: 639566 - DNA, 15 bp, Homo sapiens
gtctgtcttctaacg

SEQ ID NO: 639567 - DNA, 15 bp, Homo sapiens
tctgtcttctaacga

SEQ ID NO: 639568 - DNA, 15 bp, Homo sapiens
ctgtcttctaacgaa

SEQ ID NO: 639569 - DNA, 15 bp, Homo sapiens
tgtcttctaacgaat

SEQ ID NO: 639570 - DNA, 15 bp, Homo sapiens
gtcttctaacgaatg

SEQ ID NO: 639571 - DNA, 15 bp, Homo sapiens
tcttctaacgaatgc

SEQ ID NO: 639572 - DNA, 15 bp, Homo sapiens
cttctaacgaatgct

SEQ ID NO: 639573 - DNA, 15 bp, Homo sapiens
ttctaacgaatgcta

SEQ ID NO: 639574 - DNA, 15 bp, Homo sapiens
tctaacgaatgctat

SEQ ID NO: 639575 - DNA, 15 bp, Homo sapiens
ctaacgaatgctatg

SEQ ID NO: 639576 - DNA, 15 bp, Homo sapiens
taacgaatgctatgt

SEQ ID NO: 639577 - DNA, 15 bp, Homo sapiens
aacgaatgctatgta

SEQ ID NO: 639578 - DNA, 15 bp, Homo sapiens
acgaatgctatgtaa

SEQ ID NO: 639579 - DNA, 15 bp, Homo sapiens
cgaatgctatgtaaa

SEQ ID NO: 639580 - DNA, 15 bp, Homo sapiens
gaatgctatgtaaac

SEQ ID NO: 639581 - DNA, 15 bp, Homo sapiens
aatgctatgtaaacc

SEQ ID NO: 639582 - DNA, 15 bp, Homo sapiens
atgctatgtaaacca

SEQ ID NO: 639583 - DNA, 15 bp, Homo sapiens
tgctatgtaaaccaa

SEQ ID NO: 639584 - DNA, 15 bp, Homo sapiens
gctatgtaaaccaat

SEQ ID NO: 639585 - DNA, 15 bp, Homo sapiens
ctatgtaaaccaatt

SEQ ID NO: 639586 - DNA, 15 bp, Homo sapiens
tatgtaaaccaattt

SEQ ID NO: 639587 - DNA, 15 bp, Homo sapiens
atgtaaaccaattta

SEQ ID NO: 639588 - DNA, 15 bp, Homo sapiens
tgtaaaccaatttat

SEQ ID NO: 639589 - DNA, 15 bp, Homo sapiens
gtaaaccaatttatc

SEQ ID NO: 639590 - DNA, 15 bp, Homo sapiens
taaaccaatttatca

SEQ ID NO: 639591 - DNA, 15 bp, Homo sapiens
aaaccaatttatcat

SEQ ID NO: 639592 - DNA, 15 bp, Homo sapiens
aaccaatttatcatc

SEQ ID NO: 639593 - DNA, 15 bp, Homo sapiens
accaatttatcatca

SEQ ID NO: 639594 - DNA, 15 bp, Homo sapiens
ccaatttatcatcaa

SEQ ID NO: 639595 - DNA, 15 bp, Homo sapiens
caatttatcatcaat

SEQ ID NO: 639596 - DNA, 15 bp, Homo sapiens
aatttatcatcaata

SEQ ID NO: 639597 - DNA, 15 bp, Homo sapiens
atttatcatcaatat

SEQ ID NO: 639598 - DNA, 15 bp, Homo sapiens
tttatcatcaatatt

SEQ ID NO: 639599 - DNA, 15 bp, Homo sapiens
ttatcatcaatattt

SEQ ID NO: 639600 - DNA, 15 bp, Homo sapiens
tatcatcaatatttt

SEQ ID NO: 639601 - DNA, 15 bp, Homo sapiens
atcatcaatatttta

SEQ ID NO: 639602 - DNA, 15 bp, Homo sapiens
tcatcaatattttaa

SEQ ID NO: 639603 - DNA, 15 bp, Homo sapiens
catcaatattttaat

SEQ ID NO: 639604 - DNA, 15 bp, Homo sapiens
atcaatattttaatt

SEQ ID NO: 639605 - DNA, 15 bp, Homo sapiens
tcaatattttaatta

SEQ ID NO: 639606 - DNA, 15 bp, Homo sapiens
caatattttaattat

SEQ ID NO: 639607 - DNA, 15 bp, Homo sapiens
aatattttaattatc

SEQ ID NO: 639608 - DNA, 15 bp, Homo sapiens
atattttaattatca

SEQ ID NO: 639609 - DNA, 15 bp, Homo sapiens
tattttaattatcaa

SEQ ID NO: 639610 - DNA, 15 bp, Homo sapiens
attttaattatcaaa

SEQ ID NO: 639611 - DNA, 15 bp, Homo sapiens
ttttaattatcaaat

SEQ ID NO: 639612 - DNA, 15 bp, Homo sapiens
tttaattatcaaata

SEQ ID NO: 639613 - DNA, 15 bp, Homo sapiens
ttaattatcaaatac

SEQ ID NO: 639614 - DNA, 15 bp, Homo sapiens
taattatcaaataca

SEQ ID NO: 639615 - DNA, 15 bp, Homo sapiens
aattatcaaatacag

SEQ ID NO: 639616 - DNA, 15 bp, Homo sapiens
attatcaaatacagc

SEQ ID NO: 639617 - DNA, 15 bp, Homo sapiens
ttatcaaatacagca

SEQ ID NO: 639618 - DNA, 15 bp, Homo sapiens
tatcaaatacagcat

SEQ ID NO: 639619 - DNA, 15 bp, Homo sapiens
atcaaatacagcatt

SEQ ID NO: 639620 - DNA, 15 bp, Homo sapiens
tcaaatacagcattt

SEQ ID NO: 639621 - DNA, 15 bp, Homo sapiens
caaatacagcatttt

SEQ ID NO: 639622 - DNA, 15 bp, Homo sapiens
aaatacagcattttt

SEQ ID NO: 639623 - DNA, 15 bp, Homo sapiens
aatacagcatttttc

SEQ ID NO: 639624 - DNA, 15 bp, Homo sapiens
atacagcatttttct

SEQ ID NO: 639625 - DNA, 15 bp, Homo sapiens
tacagcatttttcta

SEQ ID NO: 639626 - DNA, 15 bp, Homo sapiens
acagcatttttctaa

SEQ ID NO: 639627 - DNA, 15 bp, Homo sapiens
cagcatttttctaag

SEQ ID NO: 639628 - DNA, 15 bp, Homo sapiens
agcatttttctaagc

SEQ ID NO: 639629 - DNA, 15 bp, Homo sapiens
gcatttttctaagca

SEQ ID NO: 639630 - DNA, 15 bp, Homo sapiens
catttttctaagcaa

SEQ ID NO: 639631 - DNA, 15 bp, Homo sapiens
atttttctaagcaat

SEQ ID NO: 639632 - DNA, 15 bp, Homo sapiens
tttttctaagcaatt

SEQ ID NO: 639633 - DNA, 15 bp, Homo sapiens
ttttctaagcaattt

SEQ ID NO: 639634 - DNA, 15 bp, Homo sapiens
tttctaagcaattta

SEQ ID NO: 639635 - DNA, 15 bp, Homo sapiens
ttctaagcaatttac

SEQ ID NO: 639636 - DNA, 15 bp, Homo sapiens
tctaagcaatttaca

SEQ ID NO: 639637 - DNA, 15 bp, Homo sapiens
ctaagcaatttacaa

SEQ ID NO: 639638 - DNA, 15 bp, Homo sapiens
taagcaatttacaaa

SEQ ID NO: 639639 - DNA, 15 bp, Homo sapiens
aagcaatttacaaat

SEQ ID NO: 639640 - DNA, 15 bp, Homo sapiens
agcaatttacaaatt

SEQ ID NO: 639641 - DNA, 15 bp, Homo sapiens
gcaatttacaaatta

SEQ ID NO: 639642 - DNA, 15 bp, Homo sapiens
caatttacaaattaa

SEQ ID NO: 639643 - DNA, 15 bp, Homo sapiens
aatttacaaattaac

SEQ ID NO: 639644 - DNA, 15 bp, Homo sapiens
atttacaaattaacc

SEQ ID NO: 639645 - DNA, 15 bp, Homo sapiens
tttacaaattaaccc

SEQ ID NO: 639646 - DNA, 15 bp, Homo sapiens
ttacaaattaaccct

SEQ ID NO: 639647 - DNA, 15 bp, Homo sapiens
tacaaattaaccctt

SEQ ID NO: 639648 - DNA, 15 bp, Homo sapiens
acaaattaacccttt

SEQ ID NO: 639649 - DNA, 15 bp, Homo sapiens
caaattaaccctttc

SEQ ID NO: 639650 - DNA, 15 bp, Homo sapiens
aaattaaccctttcc

SEQ ID NO: 639651 - DNA, 15 bp, Homo sapiens
aattaaccctttcca

SEQ ID NO: 639652 - DNA, 15 bp, Homo sapiens
attaaccctttccat

SEQ ID NO: 639653 - DNA, 15 bp, Homo sapiens
ttaaccctttccatt

SEQ ID NO: 639654 - DNA, 15 bp, Homo sapiens
taaccctttccattc

SEQ ID NO: 639655 - DNA, 15 bp, Homo sapiens
aaccctttccattct

SEQ ID NO: 639656 - DNA, 15 bp, Homo sapiens
accctttccattctc

SEQ ID NO: 639657 - DNA, 15 bp, Homo sapiens
ccctttccattctca

SEQ ID NO: 639658 - DNA, 15 bp, Homo sapiens
cctttccattctcat

SEQ ID NO: 639659 - DNA, 15 bp, Homo sapiens
ctttccattctcata

SEQ ID NO: 639660 - DNA, 15 bp, Homo sapiens
tttccattctcatag

SEQ ID NO: 639661 - DNA, 15 bp, Homo sapiens
ttccattctcatagc

SEQ ID NO: 639662 - DNA, 15 bp, Homo sapiens
tccattctcatagcc

SEQ ID NO: 639663 - DNA, 15 bp, Homo sapiens
ccattctcatagcca

SEQ ID NO: 639664 - DNA, 15 bp, Homo sapiens
cattctcatagccat

SEQ ID NO: 639665 - DNA, 15 bp, Homo sapiens
attctcatagccatc

SEQ ID NO: 639666 - DNA, 15 bp, Homo sapiens
ttctcatagccatcc

SEQ ID NO: 639667 - DNA, 15 bp, Homo sapiens
tctcatagccatccc

SEQ ID NO: 639668 - DNA, 15 bp, Homo sapiens
ctcatagccatccca

SEQ ID NO: 639669 - DNA, 15 bp, Homo sapiens
tcatagccatcccaa

SEQ ID NO: 639670 - DNA, 15 bp, Homo sapiens
catagccatcccaaa

SEQ ID NO: 639671 - DNA, 15 bp, Homo sapiens
atagccatcccaaaa

SEQ ID NO: 639672 - DNA, 15 bp, Homo sapiens
tagccatcccaaaag

SEQ ID NO: 639673 - DNA, 15 bp, Homo sapiens
agccatcccaaaagt

SEQ ID NO: 639674 - DNA, 15 bp, Homo sapiens
gccatcccaaaagtt

SEQ ID NO: 639675 - DNA, 15 bp, Homo sapiens
ccatcccaaaagtta

SEQ ID NO: 639676 - DNA, 15 bp, Homo sapiens
catcccaaaagttat

SEQ ID NO: 639677 - DNA, 15 bp, Homo sapiens
atcccaaaagttatg

SEQ ID NO: 639678 - DNA, 15 bp, Homo sapiens
tcccaaaagttatgt

SEQ ID NO: 639679 - DNA, 15 bp, Homo sapiens
cccaaaagttatgta

SEQ ID NO: 639680 - DNA, 15 bp, Homo sapiens
ccaaaagttatgtat

SEQ ID NO: 639681 - DNA, 15 bp, Homo sapiens
caaaagttatgtatg

SEQ ID NO: 639682 - DNA, 15 bp, Homo sapiens
aaaagttatgtatgt

SEQ ID NO: 639683 - DNA, 15 bp, Homo sapiens
aaagttatgtatgtt

SEQ ID NO: 639684 - DNA, 15 bp, Homo sapiens
aagttatgtatgtta

SEQ ID NO: 639685 - DNA, 15 bp, Homo sapiens
agttatgtatgttat

SEQ ID NO: 639686 - DNA, 15 bp, Homo sapiens
gttatgtatgttatt

SEQ ID NO: 639687 - DNA, 15 bp, Homo sapiens
ttatgtatgttattt

SEQ ID NO: 639688 - DNA, 15 bp, Homo sapiens
tatgtatgttattta

SEQ ID NO: 639689 - DNA, 15 bp, Homo sapiens
atgtatgttatttat

SEQ ID NO: 639690 - DNA, 15 bp, Homo sapiens
tgtatgttatttatt

SEQ ID NO: 639691 - DNA, 15 bp, Homo sapiens
gtatgttatttattt

SEQ ID NO: 639692 - DNA, 15 bp, Homo sapiens
tatgttatttattta

SEQ ID NO: 639693 - DNA, 15 bp, Homo sapiens
atgttatttatttat

SEQ ID NO: 639694 - DNA, 15 bp, Homo sapiens
tgttatttatttatt

SEQ ID NO: 639695 - DNA, 15 bp, Homo sapiens
gttatttatttatta

SEQ ID NO: 639696 - DNA, 15 bp, Homo sapiens
ttatttatttattat

SEQ ID NO: 639697 - DNA, 15 bp, Homo sapiens
tatttatttattatt

SEQ ID NO: 639698 - DNA, 15 bp, Homo sapiens
atttatttattatta

SEQ ID NO: 639699 - DNA, 15 bp, Homo sapiens
tttatttattattat

SEQ ID NO: 639700 - DNA, 15 bp, Homo sapiens
ttatttattattatt

SEQ ID NO: 639701 - DNA, 15 bp, Homo sapiens
tatttattattatta

SEQ ID NO: 639702 - DNA, 15 bp, Homo sapiens
ttattattttgagat

SEQ ID NO: 639703 - DNA, 15 bp, Homo sapiens
tattattttgagatg

SEQ ID NO: 639704 - DNA, 15 bp, Homo sapiens
attattttgagatgg

SEQ ID NO: 639705 - DNA, 15 bp, Homo sapiens
ttattttgagatgga

SEQ ID NO: 639706 - DNA, 15 bp, Homo sapiens
tattttgagatggag

SEQ ID NO: 639707 - DNA, 15 bp, Homo sapiens
attttgagatggagt

SEQ ID NO: 639708 - DNA, 15 bp, Homo sapiens
ttttgagatggagtc

SEQ ID NO: 639709 - DNA, 15 bp, Homo sapiens
tttgagatggagtct

SEQ ID NO: 639710 - DNA, 15 bp, Homo sapiens
ttgagatggagtctc

SEQ ID NO: 639711 - DNA, 15 bp, Homo sapiens
tgagatggagtctcg

SEQ ID NO: 639712 - DNA, 15 bp, Homo sapiens
gagatggagtctcgc

SEQ ID NO: 639713 - DNA, 15 bp, Homo sapiens
agatggagtctcgct

SEQ ID NO: 639714 - DNA, 15 bp, Homo sapiens
gatggagtctcgctc

SEQ ID NO: 639715 - DNA, 15 bp, Homo sapiens
atggagtctcgctct

SEQ ID NO: 639716 - DNA, 15 bp, Homo sapiens
tggagtctcgctctg

SEQ ID NO: 639717 - DNA, 15 bp, Homo sapiens
ggagtctcgctctgt

SEQ ID NO: 639718 - DNA, 15 bp, Homo sapiens
gagtctcgctctgtc

SEQ ID NO: 639719 - DNA, 15 bp, Homo sapiens
agtctcgctctgtca

SEQ ID NO: 639720 - DNA, 15 bp, Homo sapiens
gtctcgctctgtcac

SEQ ID NO: 639721 - DNA, 15 bp, Homo sapiens
tctcgctctgtcacc

SEQ ID NO: 639722 - DNA, 15 bp, Homo sapiens
ctcgctctgtcacct

SEQ ID NO: 639723 - DNA, 15 bp, Homo sapiens
tcgctctgtcacctg

SEQ ID NO: 639724 - DNA, 15 bp, Homo sapiens
cgctctgtcacctgg

SEQ ID NO: 639725 - DNA, 15 bp, Homo sapiens
gctctgtcacctggg

SEQ ID NO: 639726 - DNA, 15 bp, Homo sapiens
ctctgtcacctgggc

SEQ ID NO: 639727 - DNA, 15 bp, Homo sapiens
tctgtcacctgggct

SEQ ID NO: 639728 - DNA, 15 bp, Homo sapiens
ctgtcacctgggctg

SEQ ID NO: 639729 - DNA, 15 bp, Homo sapiens
tgtcacctgggctgg

SEQ ID NO: 639730 - DNA, 15 bp, Homo sapiens
gtcacctgggctgga

SEQ ID NO: 639731 - DNA, 15 bp, Homo sapiens
tcacctgggctggag

SEQ ID NO: 639732 - DNA, 15 bp, Homo sapiens
cacctgggctggagt

SEQ ID NO: 639733 - DNA, 15 bp, Homo sapiens
acctgggctggagtg

SEQ ID NO: 639734 - DNA, 15 bp, Homo sapiens
cctgggctggagtgc

SEQ ID NO: 639735 - DNA, 15 bp, Homo sapiens
ctgggctggagtgca

SEQ ID NO: 639736 - DNA, 15 bp, Homo sapiens
tgggctggagtgcag

SEQ ID NO: 639737 - DNA, 15 bp, Homo sapiens
gggctggagtgcagt

SEQ ID NO: 639738 - DNA, 15 bp, Homo sapiens
gagtgcagtggcacg

SEQ ID NO: 639739 - DNA, 15 bp, Homo sapiens
agtgcagtggcacga

SEQ ID NO: 639740 - DNA, 15 bp, Homo sapiens
gtgcagtggcacgat

SEQ ID NO: 639741 - DNA, 15 bp, Homo sapiens
tgcagtggcacgatc

SEQ ID NO: 639742 - DNA, 15 bp, Homo sapiens
gcagtggcacgatct

SEQ ID NO: 639743 - DNA, 15 bp, Homo sapiens
cagtggcacgatctc

SEQ ID NO: 639744 - DNA, 15 bp, Homo sapiens
agtggcacgatctca

SEQ ID NO: 639745 - DNA, 15 bp, Homo sapiens
gtggcacgatctcag

SEQ ID NO: 639746 - DNA, 15 bp, Homo sapiens
tggcacgatctcagc

SEQ ID NO: 639747 - DNA, 15 bp, Homo sapiens
ggcacgatctcagct

SEQ ID NO: 639748 - DNA, 15 bp, Homo sapiens
gcacgatctcagctc

SEQ ID NO: 639749 - DNA, 15 bp, Homo sapiens
cacgatctcagctca

SEQ ID NO: 639750 - DNA, 15 bp, Homo sapiens
acgatctcagctcac

SEQ ID NO: 639751 - DNA, 15 bp, Homo sapiens
cgatctcagctcact

SEQ ID NO: 639752 - DNA, 15 bp, Homo sapiens
gatctcagctcactg

SEQ ID NO: 639753 - DNA, 15 bp, Homo sapiens
atctcagctcactgc

SEQ ID NO: 639754 - DNA, 15 bp, Homo sapiens
tctcagctcactgca

SEQ ID NO: 639755 - DNA, 15 bp, Homo sapiens
ctcagctcactgcaa

SEQ ID NO: 639756 - DNA, 15 bp, Homo sapiens
tcagctcactgcaac

SEQ ID NO: 639757 - DNA, 15 bp, Homo sapiens
cagctcactgcaacc

SEQ ID NO: 639758 - DNA, 15 bp, Homo sapiens
agctcactgcaacct

SEQ ID NO: 639759 - DNA, 15 bp, Homo sapiens
caacctctgcctcct

SEQ ID NO: 639760 - DNA, 15 bp, Homo sapiens
aacctctgcctccta

SEQ ID NO: 639761 - DNA, 15 bp, Homo sapiens
acctctgcctcctag

SEQ ID NO: 639762 - DNA, 15 bp, Homo sapiens
cctctgcctcctagg

SEQ ID NO: 639763 - DNA, 15 bp, Homo sapiens
ctctgcctcctaggt

SEQ ID NO: 639764 - DNA, 15 bp, Homo sapiens
tctgcctcctaggtt

SEQ ID NO: 639765 - DNA, 15 bp, Homo sapiens
ctgcctcctaggttc

SEQ ID NO: 639766 - DNA, 15 bp, Homo sapiens
tgcctcctaggttca

SEQ ID NO: 639767 - DNA, 15 bp, Homo sapiens
gcctcctaggttcaa

SEQ ID NO: 639768 - DNA, 15 bp, Homo sapiens
cctcctaggttcaag

SEQ ID NO: 639769 - DNA, 15 bp, Homo sapiens
ctcctaggttcaagc

SEQ ID NO: 639770 - DNA, 15 bp, Homo sapiens
tcctaggttcaagcg

SEQ ID NO: 639771 - DNA, 15 bp, Homo sapiens
cctaggttcaagcga

SEQ ID NO: 639772 - DNA, 15 bp, Homo sapiens
ctaggttcaagcgat

SEQ ID NO: 639773 - DNA, 15 bp, Homo sapiens
taggttcaagcgatt

SEQ ID NO: 639774 - DNA, 15 bp, Homo sapiens
aggttcaagcgattc

SEQ ID NO: 639775 - DNA, 15 bp, Homo sapiens
tgcctcagcctccca

SEQ ID NO: 639776 - DNA, 15 bp, Homo sapiens
cctcagcctcccaag

SEQ ID NO: 639777 - DNA, 15 bp, Homo sapiens
ctcagcctcccaagt

SEQ ID NO: 639778 - DNA, 15 bp, Homo sapiens
tcagcctcccaagta

SEQ ID NO: 639779 - DNA, 15 bp, Homo sapiens
cagcctcccaagtag

SEQ ID NO: 639780 - DNA, 15 bp, Homo sapiens
agcctcccaagtagc

SEQ ID NO: 639781 - DNA, 15 bp, Homo sapiens
gcctcccaagtagct

SEQ ID NO: 639782 - DNA, 15 bp, Homo sapiens
cctcccaagtagctg

SEQ ID NO: 639783 - DNA, 15 bp, Homo sapiens
ctcccaagtagctgg

SEQ ID NO: 639784 - DNA, 15 bp, Homo sapiens
tcccaagtagctggg

SEQ ID NO: 639785 - DNA, 15 bp, Homo sapiens
cccaagtagctggga

SEQ ID NO: 639786 - DNA, 15 bp, Homo sapiens
ccaagtagctgggat

SEQ ID NO: 639787 - DNA, 15 bp, Homo sapiens
caagtagctgggatt

SEQ ID NO: 639788 - DNA, 15 bp, Homo sapiens
aagtagctgggatta

SEQ ID NO: 639789 - DNA, 15 bp, Homo sapiens
agtagctgggattat

SEQ ID NO: 639790 - DNA, 15 bp, Homo sapiens
gtagctgggattata

SEQ ID NO: 639791 - DNA, 15 bp, Homo sapiens
tagctgggattatag

SEQ ID NO: 639792 - DNA, 15 bp, Homo sapiens
agctgggattatagg

SEQ ID NO: 639793 - DNA, 15 bp, Homo sapiens
gctgggattataggc

SEQ ID NO: 639794 - DNA, 15 bp, Homo sapiens
ctgggattataggca

SEQ ID NO: 639795 - DNA, 15 bp, Homo sapiens
tgggattataggcac

SEQ ID NO: 639796 - DNA, 15 bp, Homo sapiens
gggattataggcacc

SEQ ID NO: 639797 - DNA, 15 bp, Homo sapiens
ggattataggcacct

SEQ ID NO: 639798 - DNA, 15 bp, Homo sapiens
gattataggcacctg

SEQ ID NO: 639799 - DNA, 15 bp, Homo sapiens
attataggcacctgc

SEQ ID NO: 639800 - DNA, 15 bp, Homo sapiens
ttataggcacctgcc

SEQ ID NO: 639801 - DNA, 15 bp, Homo sapiens
tataggcacctgcca

SEQ ID NO: 639802 - DNA, 15 bp, Homo sapiens
ataggcacctgccac

SEQ ID NO: 639803 - DNA, 15 bp, Homo sapiens
taggcacctgccacc

SEQ ID NO: 639804 - DNA, 15 bp, Homo sapiens
aggcacctgccacca

SEQ ID NO: 639805 - DNA, 15 bp, Homo sapiens
ggcacctgccaccac

SEQ ID NO: 639806 - DNA, 15 bp, Homo sapiens
gcacctgccaccaca

SEQ ID NO: 639807 - DNA, 15 bp, Homo sapiens
cacctgccaccacac

SEQ ID NO: 639808 - DNA, 15 bp, Homo sapiens
acctgccaccacacc

SEQ ID NO: 639809 - DNA, 15 bp, Homo sapiens
cctgccaccacaccc

SEQ ID NO: 639810 - DNA, 15 bp, Homo sapiens
ctgccaccacaccca

SEQ ID NO: 639811 - DNA, 15 bp, Homo sapiens
tgccaccacacccag

SEQ ID NO: 639812 - DNA, 15 bp, Homo sapiens
gccaccacacccagc

SEQ ID NO: 639813 - DNA, 15 bp, Homo sapiens
ccaccacacccagct

SEQ ID NO: 639814 - DNA, 15 bp, Homo sapiens
caccacacccagcta

SEQ ID NO: 639815 - DNA, 15 bp, Homo sapiens
accacacccagctac

SEQ ID NO: 639816 - DNA, 15 bp, Homo sapiens
ccacacccagctact

SEQ ID NO: 639817 - DNA, 15 bp, Homo sapiens
cacacccagctactt

SEQ ID NO: 639818 - DNA, 15 bp, Homo sapiens
acacccagctacttt

SEQ ID NO: 639819 - DNA, 15 bp, Homo sapiens
cacccagctactttt

SEQ ID NO: 639820 - DNA, 15 bp, Homo sapiens
acccagctacttttt

SEQ ID NO: 639821 - DNA, 15 bp, Homo sapiens
cccagctactttttt

SEQ ID NO: 639822 - DNA, 15 bp, Homo sapiens
ccagctacttttttg

SEQ ID NO: 639823 - DNA, 15 bp, Homo sapiens
cagctacttttttgt

SEQ ID NO: 639824 - DNA, 15 bp, Homo sapiens
agctacttttttgta

SEQ ID NO: 639825 - DNA, 15 bp, Homo sapiens
gctacttttttgtat

SEQ ID NO: 639826 - DNA, 15 bp, Homo sapiens
ctacttttttgtatt

SEQ ID NO: 639827 - DNA, 15 bp, Homo sapiens
tacttttttgtattt

SEQ ID NO: 639828 - DNA, 15 bp, Homo sapiens
acttttttgtatttt

SEQ ID NO: 639829 - DNA, 15 bp, Homo sapiens
cttttttgtattttt

SEQ ID NO: 639830 - DNA, 15 bp, Homo sapiens
ttttttgtattttta

SEQ ID NO: 639831 - DNA, 15 bp, Homo sapiens
tttttgtatttttag

SEQ ID NO: 639832 - DNA, 15 bp, Homo sapiens
ttttgtatttttagt

SEQ ID NO: 639833 - DNA, 15 bp, Homo sapiens
tttgtatttttagta

SEQ ID NO: 639834 - DNA, 15 bp, Homo sapiens
ttgtatttttagtag

SEQ ID NO: 639835 - DNA, 15 bp, Homo sapiens
tgtatttttagtaga

SEQ ID NO: 639836 - DNA, 15 bp, Homo sapiens
gtatttttagtagag

SEQ ID NO: 639837 - DNA, 15 bp, Homo sapiens
gacggggtttcacca

SEQ ID NO: 639838 - DNA, 15 bp, Homo sapiens
acggggtttcaccat

SEQ ID NO: 639839 - DNA, 15 bp, Homo sapiens
cggggtttcaccatg

SEQ ID NO: 639840 - DNA, 15 bp, Homo sapiens
ggggtttcaccatgt

SEQ ID NO: 639841 - DNA, 15 bp, Homo sapiens
gtttcaccatgttgg

SEQ ID NO: 639842 - DNA, 15 bp, Homo sapiens
tttcaccatgttggc

SEQ ID NO: 639843 - DNA, 15 bp, Homo sapiens
ttcaccatgttggcc

SEQ ID NO: 639844 - DNA, 15 bp, Homo sapiens
tcaccatgttggcca

SEQ ID NO: 639845 - DNA, 15 bp, Homo sapiens
caccatgttggccag

SEQ ID NO: 639846 - DNA, 15 bp, Homo sapiens
accatgttggccagg

SEQ ID NO: 639847 - DNA, 15 bp, Homo sapiens
catgttggccaggct

SEQ ID NO: 639848 - DNA, 15 bp, Homo sapiens
atgttggccaggctg

SEQ ID NO: 639849 - DNA, 15 bp, Homo sapiens
tgttggccaggctgg

SEQ ID NO: 639850 - DNA, 15 bp, Homo sapiens
gttggccaggctggt

SEQ ID NO: 639851 - DNA, 15 bp, Homo sapiens
ttggccaggctggtc

SEQ ID NO: 639852 - DNA, 15 bp, Homo sapiens
tggccaggctggtct

SEQ ID NO: 639853 - DNA, 15 bp, Homo sapiens
ggccaggctggtctc

SEQ ID NO: 639854 - DNA, 15 bp, Homo sapiens
gccaggctggtctcg

SEQ ID NO: 639855 - DNA, 15 bp, Homo sapiens
ccaggctggtctcga

SEQ ID NO: 639856 - DNA, 15 bp, Homo sapiens
caggctggtctcgaa

SEQ ID NO: 639857 - DNA, 15 bp, Homo sapiens
aggctggtctcgaac

SEQ ID NO: 639858 - DNA, 15 bp, Homo sapiens
ggctggtctcgaact

SEQ ID NO: 639859 - DNA, 15 bp, Homo sapiens
gctggtctcgaactc

SEQ ID NO: 639860 - DNA, 15 bp, Homo sapiens
ctggtctcgaactcc

SEQ ID NO: 639861 - DNA, 15 bp, Homo sapiens
tggtctcgaactcct

SEQ ID NO: 639862 - DNA, 15 bp, Homo sapiens
ggtctcgaactcctg

SEQ ID NO: 639863 - DNA, 15 bp, Homo sapiens
gtctcgaactcctga

SEQ ID NO: 639864 - DNA, 15 bp, Homo sapiens
tctcgaactcctgac

SEQ ID NO: 639865 - DNA, 15 bp, Homo sapiens
ctcgaactcctgacc

SEQ ID NO: 639866 - DNA, 15 bp, Homo sapiens
tcgaactcctgacct

SEQ ID NO: 639867 - DNA, 15 bp, Homo sapiens
cgaactcctgacctc

SEQ ID NO: 639868 - DNA, 15 bp, Homo sapiens
gaactcctgacctca

SEQ ID NO: 639869 - DNA, 15 bp, Homo sapiens
aactcctgacctcag

SEQ ID NO: 639870 - DNA, 15 bp, Homo sapiens
actcctgacctcagg

SEQ ID NO: 639871 - DNA, 15 bp, Homo sapiens
ctcctgacctcaggt

SEQ ID NO: 639872 - DNA, 15 bp, Homo sapiens
tcctgacctcaggtg

SEQ ID NO: 639873 - DNA, 15 bp, Homo sapiens
cctgacctcaggtga

SEQ ID NO: 639874 - DNA, 15 bp, Homo sapiens
ctgacctcaggtgat

SEQ ID NO: 639875 - DNA, 15 bp, Homo sapiens
tgacctcaggtgatc

SEQ ID NO: 639876 - DNA, 15 bp, Homo sapiens
gacctcaggtgatcc

SEQ ID NO: 639877 - DNA, 15 bp, Homo sapiens
acctcaggtgatcca

SEQ ID NO: 639878 - DNA, 15 bp, Homo sapiens
cctcaggtgatccac

SEQ ID NO: 639879 - DNA, 15 bp, Homo sapiens
ctcaggtgatccacc

SEQ ID NO: 639880 - DNA, 15 bp, Homo sapiens
tcaggtgatccaccg

SEQ ID NO: 639881 - DNA, 15 bp, Homo sapiens
caggtgatccaccga

SEQ ID NO: 639882 - DNA, 15 bp, Homo sapiens
aggtgatccaccgat

SEQ ID NO: 639883 - DNA, 15 bp, Homo sapiens
ggtgatccaccgatc

SEQ ID NO: 639884 - DNA, 15 bp, Homo sapiens
gtgatccaccgatct

SEQ ID NO: 639885 - DNA, 15 bp, Homo sapiens
tgatccaccgatctt

SEQ ID NO: 639886 - DNA, 15 bp, Homo sapiens
gatccaccgatcttg

SEQ ID NO: 639887 - DNA, 15 bp, Homo sapiens
atccaccgatcttgg

SEQ ID NO: 639888 - DNA, 15 bp, Homo sapiens
tccaccgatcttggc

SEQ ID NO: 639889 - DNA, 15 bp, Homo sapiens
ccaccgatcttggcc

SEQ ID NO: 639890 - DNA, 15 bp, Homo sapiens
caccgatcttggcct

SEQ ID NO: 639891 - DNA, 15 bp, Homo sapiens
accgatcttggcctc

SEQ ID NO: 639892 - DNA, 15 bp, Homo sapiens
ccgatcttggcctcc

SEQ ID NO: 639893 - DNA, 15 bp, Homo sapiens
cgatcttggcctccc

SEQ ID NO: 639894 - DNA, 15 bp, Homo sapiens
gatcttggcctccca

SEQ ID NO: 639895 - DNA, 15 bp, Homo sapiens
atcttggcctcccaa

SEQ ID NO: 639896 - DNA, 15 bp, Homo sapiens
tcttggcctcccaaa

SEQ ID NO: 639897 - DNA, 15 bp, Homo sapiens
cttggcctcccaaag

SEQ ID NO: 639898 - DNA, 15 bp, Homo sapiens
ttggcctcccaaagt

SEQ ID NO: 639899 - DNA, 15 bp, Homo sapiens
tggcctcccaaagtg

SEQ ID NO: 639900 - DNA, 15 bp, Homo sapiens
ggcctcccaaagtgc

SEQ ID NO: 639901 - DNA, 15 bp, Homo sapiens
gcctcccaaagtgct

SEQ ID NO: 639902 - DNA, 15 bp, Homo sapiens
cctcccaaagtgcta

SEQ ID NO: 639903 - DNA, 15 bp, Homo sapiens
ctcccaaagtgctag

SEQ ID NO: 639904 - DNA, 15 bp, Homo sapiens
tcccaaagtgctagg

SEQ ID NO: 639905 - DNA, 15 bp, Homo sapiens
cccaaagtgctagga

SEQ ID NO: 639906 - DNA, 15 bp, Homo sapiens
ccaaagtgctaggat

SEQ ID NO: 639907 - DNA, 15 bp, Homo sapiens
caaagtgctaggatt

SEQ ID NO: 639908 - DNA, 15 bp, Homo sapiens
aaagtgctaggatta

SEQ ID NO: 639909 - DNA, 15 bp, Homo sapiens
aagtgctaggattac

SEQ ID NO: 639910 - DNA, 15 bp, Homo sapiens
agtgctaggattaca

SEQ ID NO: 639911 - DNA, 15 bp, Homo sapiens
gtgctaggattacag

SEQ ID NO: 639912 - DNA, 15 bp, Homo sapiens
tgctaggattacagg

SEQ ID NO: 639913 - DNA, 15 bp, Homo sapiens
gctaggattacaggc

SEQ ID NO: 639914 - DNA, 15 bp, Homo sapiens
ctaggattacaggcg

SEQ ID NO: 639915 - DNA, 15 bp, Homo sapiens
taggattacaggcgt

SEQ ID NO: 639916 - DNA, 15 bp, Homo sapiens
aggattacaggcgtg

SEQ ID NO: 639917 - DNA, 15 bp, Homo sapiens
caggcgtgagccact

SEQ ID NO: 639918 - DNA, 15 bp, Homo sapiens
aggcgtgagccactg

SEQ ID NO: 639919 - DNA, 15 bp, Homo sapiens
ggcgtgagccactgc

SEQ ID NO: 639920 - DNA, 15 bp, Homo sapiens
gcgtgagccactgca

SEQ ID NO: 639921 - DNA, 15 bp, Homo sapiens
cgtgagccactgcac

SEQ ID NO: 639922 - DNA, 15 bp, Homo sapiens
gtgagccactgcacc

SEQ ID NO: 639923 - DNA, 15 bp, Homo sapiens
tgagccactgcaccc

SEQ ID NO: 639924 - DNA, 15 bp, Homo sapiens
gagccactgcacccg

SEQ ID NO: 639925 - DNA, 15 bp, Homo sapiens
agccactgcacccgg

SEQ ID NO: 639926 - DNA, 15 bp, Homo sapiens
gccactgcacccggc

SEQ ID NO: 639927 - DNA, 15 bp, Homo sapiens
ccactgcacccggcc

SEQ ID NO: 639928 - DNA, 15 bp, Homo sapiens
cactgcacccggcca

SEQ ID NO: 639929 - DNA, 15 bp, Homo sapiens
actgcacccggccag

SEQ ID NO: 639930 - DNA, 15 bp, Homo sapiens
ctgcacccggccaga

SEQ ID NO: 639931 - DNA, 15 bp, Homo sapiens
tgcacccggccagaa

SEQ ID NO: 639932 - DNA, 15 bp, Homo sapiens
gcacccggccagaaa

SEQ ID NO: 639933 - DNA, 15 bp, Homo sapiens
cacccggccagaaac

SEQ ID NO: 639934 - DNA, 15 bp, Homo sapiens
acccggccagaaacg

SEQ ID NO: 639935 - DNA, 15 bp, Homo sapiens
cccggccagaaacgt

SEQ ID NO: 639936 - DNA, 15 bp, Homo sapiens
ccggccagaaacgta

SEQ ID NO: 639937 - DNA, 15 bp, Homo sapiens
cggccagaaacgtat

SEQ ID NO: 639938 - DNA, 15 bp, Homo sapiens
ggccagaaacgtatg

SEQ ID NO: 639939 - DNA, 15 bp, Homo sapiens
gccagaaacgtatgt

SEQ ID NO: 639940 - DNA, 15 bp, Homo sapiens
ccagaaacgtatgtt

SEQ ID NO: 639941 - DNA, 15 bp, Homo sapiens
cagaaacgtatgtta

SEQ ID NO: 639942 - DNA, 15 bp, Homo sapiens
agaaacgtatgttat

SEQ ID NO: 639943 - DNA, 15 bp, Homo sapiens
gaaacgtatgttatt

SEQ ID NO: 639944 - DNA, 15 bp, Homo sapiens
aaacgtatgttatta

SEQ ID NO: 639945 - DNA, 15 bp, Homo sapiens
aacgtatgttattat

SEQ ID NO: 639946 - DNA, 15 bp, Homo sapiens
acgtatgttattatc

SEQ ID NO: 639947 - DNA, 15 bp, Homo sapiens
cgtatgttattatcc

SEQ ID NO: 639948 - DNA, 15 bp, Homo sapiens
gtatgttattatcct

SEQ ID NO: 639949 - DNA, 15 bp, Homo sapiens
tatgttattatcctc

SEQ ID NO: 639950 - DNA, 15 bp, Homo sapiens
atgttattatcctca

SEQ ID NO: 639951 - DNA, 15 bp, Homo sapiens
tgttattatcctcat

SEQ ID NO: 639952 - DNA, 15 bp, Homo sapiens
gttattatcctcatg

SEQ ID NO: 639953 - DNA, 15 bp, Homo sapiens
ttattatcctcatgt

SEQ ID NO: 639954 - DNA, 15 bp, Homo sapiens
tattatcctcatgtt

SEQ ID NO: 639955 - DNA, 15 bp, Homo sapiens
attatcctcatgttc

SEQ ID NO: 639956 - DNA, 15 bp, Homo sapiens
ttatcctcatgttcc

SEQ ID NO: 639957 - DNA, 15 bp, Homo sapiens
tatcctcatgttcct

SEQ ID NO: 639958 - DNA, 15 bp, Homo sapiens
atcctcatgttccta

SEQ ID NO: 639959 - DNA, 15 bp, Homo sapiens
tcctcatgttcctaa

SEQ ID NO: 639960 - DNA, 15 bp, Homo sapiens
cctcatgttcctaat

SEQ ID NO: 639961 - DNA, 15 bp, Homo sapiens
ctcatgttcctaatg

SEQ ID NO: 639962 - DNA, 15 bp, Homo sapiens
tcatgttcctaatga

SEQ ID NO: 639963 - DNA, 15 bp, Homo sapiens
catgttcctaatgag

SEQ ID NO: 639964 - DNA, 15 bp, Homo sapiens
atgttcctaatgaga

SEQ ID NO: 639965 - DNA, 15 bp, Homo sapiens
tgttcctaatgagaa

SEQ ID NO: 639966 - DNA, 15 bp, Homo sapiens
gttcctaatgagaag

SEQ ID NO: 639967 - DNA, 15 bp, Homo sapiens
ttcctaatgagaagt

SEQ ID NO: 639968 - DNA, 15 bp, Homo sapiens
tcctaatgagaagta

SEQ ID NO: 639969 - DNA, 15 bp, Homo sapiens
cctaatgagaagtat

SEQ ID NO: 639970 - DNA, 15 bp, Homo sapiens
ctaatgagaagtata

SEQ ID NO: 639971 - DNA, 15 bp, Homo sapiens
taatgagaagtataa

SEQ ID NO: 639972 - DNA, 15 bp, Homo sapiens
aatgagaagtataag

SEQ ID NO: 639973 - DNA, 15 bp, Homo sapiens
atgagaagtataagg

SEQ ID NO: 639974 - DNA, 15 bp, Homo sapiens
tgagaagtataaggc

SEQ ID NO: 639975 - DNA, 15 bp, Homo sapiens
gagaagtataaggca

SEQ ID NO: 639976 - DNA, 15 bp, Homo sapiens
agaagtataaggcat

SEQ ID NO: 639977 - DNA, 15 bp, Homo sapiens
gaagtataaggcatg

SEQ ID NO: 639978 - DNA, 15 bp, Homo sapiens
aagtataaggcatgc

SEQ ID NO: 639979 - DNA, 15 bp, Homo sapiens
agtataaggcatgca

SEQ ID NO: 639980 - DNA, 15 bp, Homo sapiens
gtataaggcatgcag

SEQ ID NO: 639981 - DNA, 15 bp, Homo sapiens
tataaggcatgcaga

SEQ ID NO: 639982 - DNA, 15 bp, Homo sapiens
ataaggcatgcagaa

SEQ ID NO: 639983 - DNA, 15 bp, Homo sapiens
taaggcatgcagaat

SEQ ID NO: 639984 - DNA, 15 bp, Homo sapiens
aaggcatgcagaatg

SEQ ID NO: 639985 - DNA, 15 bp, Homo sapiens
aggcatgcagaatgt

SEQ ID NO: 639986 - DNA, 15 bp, Homo sapiens
ggcatgcagaatgta

SEQ ID NO: 639987 - DNA, 15 bp, Homo sapiens
gcatgcagaatgtaa

SEQ ID NO: 639988 - DNA, 15 bp, Homo sapiens
catgcagaatgtaat

SEQ ID NO: 639989 - DNA, 15 bp, Homo sapiens
atgcagaatgtaatt

SEQ ID NO: 639990 - DNA, 15 bp, Homo sapiens
tgcagaatgtaatta

SEQ ID NO: 639991 - DNA, 15 bp, Homo sapiens
gcagaatgtaattat

SEQ ID NO: 639992 - DNA, 15 bp, Homo sapiens
cagaatgtaattatc

SEQ ID NO: 639993 - DNA, 15 bp, Homo sapiens
agaatgtaattatca

SEQ ID NO: 639994 - DNA, 15 bp, Homo sapiens
gaatgtaattatcaa

SEQ ID NO: 639995 - DNA, 15 bp, Homo sapiens
aatgtaattatcaaa

SEQ ID NO: 639996 - DNA, 15 bp, Homo sapiens
atgtaattatcaaac

SEQ ID NO: 639997 - DNA, 15 bp, Homo sapiens
tgtaattatcaaact

SEQ ID NO: 639998 - DNA, 15 bp, Homo sapiens
gtaattatcaaacta

SEQ ID NO: 639999 - DNA, 15 bp, Homo sapiens
taattatcaaactat

SEQ ID NO: 640000 - DNA, 15 bp, Homo sapiens
aattatcaaactatg

SEQ ID NO: 640001 - DNA, 15 bp, Homo sapiens
attatcaaactatgt

SEQ ID NO: 640002 - DNA, 15 bp, Homo sapiens
ttatcaaactatgta

SEQ ID NO: 640003 - DNA, 15 bp, Homo sapiens
tatcaaactatgtag

SEQ ID NO: 640004 - DNA, 15 bp, Homo sapiens
atcaaactatgtagc

SEQ ID NO: 640005 - DNA, 15 bp, Homo sapiens
tcaaactatgtagct

SEQ ID NO: 640006 - DNA, 15 bp, Homo sapiens
caaactatgtagcta

SEQ ID NO: 640007 - DNA, 15 bp, Homo sapiens
aaactatgtagctag

SEQ ID NO: 640008 - DNA, 15 bp, Homo sapiens
aactatgtagctagc

SEQ ID NO: 640009 - DNA, 15 bp, Homo sapiens
actatgtagctagca

SEQ ID NO: 640010 - DNA, 15 bp, Homo sapiens
ctatgtagctagcaa

SEQ ID NO: 640011 - DNA, 15 bp, Homo sapiens
tatgtagctagcaag

SEQ ID NO: 640012 - DNA, 15 bp, Homo sapiens
atgtagctagcaagt

SEQ ID NO: 640013 - DNA, 15 bp, Homo sapiens
tgtagctagcaagtg

SEQ ID NO: 640014 - DNA, 15 bp, Homo sapiens
gtagctagcaagtgc

SEQ ID NO: 640015 - DNA, 15 bp, Homo sapiens
tagctagcaagtgcc

SEQ ID NO: 640016 - DNA, 15 bp, Homo sapiens
agctagcaagtgcca

SEQ ID NO: 640017 - DNA, 15 bp, Homo sapiens
gctagcaagtgccag

SEQ ID NO: 640018 - DNA, 15 bp, Homo sapiens
ctagcaagtgccaga

SEQ ID NO: 640019 - DNA, 15 bp, Homo sapiens
tagcaagtgccagag

SEQ ID NO: 640020 - DNA, 15 bp, Homo sapiens
agcaagtgccagagg

SEQ ID NO: 640021 - DNA, 15 bp, Homo sapiens
gcaagtgccagaggc

SEQ ID NO: 640022 - DNA, 15 bp, Homo sapiens
caagtgccagaggcc

SEQ ID NO: 640023 - DNA, 15 bp, Homo sapiens
aagtgccagaggcca

SEQ ID NO: 640024 - DNA, 15 bp, Homo sapiens
agtgccagaggccag

SEQ ID NO: 640025 - DNA, 15 bp, Homo sapiens
gtgccagaggccagt

SEQ ID NO: 640026 - DNA, 15 bp, Homo sapiens
tgccagaggccagta

SEQ ID NO: 640027 - DNA, 15 bp, Homo sapiens
gccagaggccagtat

SEQ ID NO: 640028 - DNA, 15 bp, Homo sapiens
ccagaggccagtatg

SEQ ID NO: 640029 - DNA, 15 bp, Homo sapiens
cagaggccagtatga

SEQ ID NO: 640030 - DNA, 15 bp, Homo sapiens
agaggccagtatgag

SEQ ID NO: 640031 - DNA, 15 bp, Homo sapiens
gaggccagtatgagc

SEQ ID NO: 640032 - DNA, 15 bp, Homo sapiens
aggccagtatgagcc

SEQ ID NO: 640033 - DNA, 15 bp, Homo sapiens
ggccagtatgagcct

SEQ ID NO: 640034 - DNA, 15 bp, Homo sapiens
gccagtatgagccta

SEQ ID NO: 640035 - DNA, 15 bp, Homo sapiens
ccagtatgagcctaa

SEQ ID NO: 640036 - DNA, 15 bp, Homo sapiens
cagtatgagcctaag

SEQ ID NO: 640037 - DNA, 15 bp, Homo sapiens
agtatgagcctaagc

SEQ ID NO: 640038 - DNA, 15 bp, Homo sapiens
gtatgagcctaagca

SEQ ID NO: 640039 - DNA, 15 bp, Homo sapiens
tatgagcctaagcag

SEQ ID NO: 640040 - DNA, 15 bp, Homo sapiens
atgagcctaagcagc

SEQ ID NO: 640041 - DNA, 15 bp, Homo sapiens
tgagcctaagcagcc

SEQ ID NO: 640042 - DNA, 15 bp, Homo sapiens
gagcctaagcagcct

SEQ ID NO: 640043 - DNA, 15 bp, Homo sapiens
agcctaagcagcctg

SEQ ID NO: 640044 - DNA, 15 bp, Homo sapiens
gcctaagcagcctgt

SEQ ID NO: 640045 - DNA, 15 bp, Homo sapiens
cctaagcagcctgtc

SEQ ID NO: 640046 - DNA, 15 bp, Homo sapiens
ctaagcagcctgtct

SEQ ID NO: 640047 - DNA, 15 bp, Homo sapiens
taagcagcctgtctc

SEQ ID NO: 640048 - DNA, 15 bp, Homo sapiens
aagcagcctgtctcc

SEQ ID NO: 640049 - DNA, 15 bp, Homo sapiens
agcagcctgtctcca

SEQ ID NO: 640050 - DNA, 15 bp, Homo sapiens
gcagcctgtctccag

SEQ ID NO: 640051 - DNA, 15 bp, Homo sapiens
cagcctgtctccaga

SEQ ID NO: 640052 - DNA, 15 bp, Homo sapiens
agcctgtctccagag

SEQ ID NO: 640053 - DNA, 15 bp, Homo sapiens
gcctgtctccagagt

SEQ ID NO: 640054 - DNA, 15 bp, Homo sapiens
cctgtctccagagtc

SEQ ID NO: 640055 - DNA, 15 bp, Homo sapiens
ctgtctccagagtct

SEQ ID NO: 640056 - DNA, 15 bp, Homo sapiens
tgtctccagagtcta

SEQ ID NO: 640057 - DNA, 15 bp, Homo sapiens
gtctccagagtctat

SEQ ID NO: 640058 - DNA, 15 bp, Homo sapiens
tctccagagtctatg

SEQ ID NO: 640059 - DNA, 15 bp, Homo sapiens
ctccagagtctatga

SEQ ID NO: 640060 - DNA, 15 bp, Homo sapiens
tccagagtctatgat

SEQ ID NO: 640061 - DNA, 15 bp, Homo sapiens
ccagagtctatgatc

SEQ ID NO: 640062 - DNA, 15 bp, Homo sapiens
cagagtctatgatct

SEQ ID NO: 640063 - DNA, 15 bp, Homo sapiens
agagtctatgatctt

SEQ ID NO: 640064 - DNA, 15 bp, Homo sapiens
gagtctatgatctta

SEQ ID NO: 640065 - DNA, 15 bp, Homo sapiens
agtctatgatcttaa

SEQ ID NO: 640066 - DNA, 15 bp, Homo sapiens
gtctatgatcttaaa

SEQ ID NO: 640067 - DNA, 15 bp, Homo sapiens
tctatgatcttaaaa

SEQ ID NO: 640068 - DNA, 15 bp, Homo sapiens
ctatgatcttaaaac

SEQ ID NO: 640069 - DNA, 15 bp, Homo sapiens
tatgatcttaaaacc

SEQ ID NO: 640070 - DNA, 15 bp, Homo sapiens
atgatcttaaaacca

SEQ ID NO: 640071 - DNA, 15 bp, Homo sapiens
tgatcttaaaaccat

SEQ ID NO: 640072 - DNA, 15 bp, Homo sapiens
gatcttaaaaccatt

SEQ ID NO: 640073 - DNA, 15 bp, Homo sapiens
atcttaaaaccatta

SEQ ID NO: 640074 - DNA, 15 bp, Homo sapiens
tcttaaaaccattat

SEQ ID NO: 640075 - DNA, 15 bp, Homo sapiens
cttaaaaccattatt

SEQ ID NO: 640076 - DNA, 15 bp, Homo sapiens
ttaaaaccattattc

SEQ ID NO: 640077 - DNA, 15 bp, Homo sapiens
taaaaccattattcc

SEQ ID NO: 640078 - DNA, 15 bp, Homo sapiens
aaaaccattattcca

SEQ ID NO: 640079 - DNA, 15 bp, Homo sapiens
aaaccattattccac

SEQ ID NO: 640080 - DNA, 15 bp, Homo sapiens
aaccattattccaca

SEQ ID NO: 640081 - DNA, 15 bp, Homo sapiens
accattattccacac

SEQ ID NO: 640082 - DNA, 15 bp, Homo sapiens
ccattattccacact

SEQ ID NO: 640083 - DNA, 15 bp, Homo sapiens
cattattccacactg

SEQ ID NO: 640084 - DNA, 15 bp, Homo sapiens
attattccacactgc

SEQ ID NO: 640085 - DNA, 15 bp, Homo sapiens
ttattccacactgcc

SEQ ID NO: 640086 - DNA, 15 bp, Homo sapiens
tattccacactgcct

SEQ ID NO: 640087 - DNA, 15 bp, Homo sapiens
attccacactgcctc

SEQ ID NO: 640088 - DNA, 15 bp, Homo sapiens
ttccacactgcctct

SEQ ID NO: 640089 - DNA, 15 bp, Homo sapiens
tccacactgcctctc

SEQ ID NO: 640090 - DNA, 15 bp, Homo sapiens
ccacactgcctctct

SEQ ID NO: 640091 - DNA, 15 bp, Homo sapiens
cacactgcctctctt

SEQ ID NO: 640092 - DNA, 15 bp, Homo sapiens
acactgcctctctta

SEQ ID NO: 640093 - DNA, 15 bp, Homo sapiens
cactgcctctcttaa

SEQ ID NO: 640094 - DNA, 15 bp, Homo sapiens
actgcctctcttaag

SEQ ID NO: 640095 - DNA, 15 bp, Homo sapiens
ctgcctctcttaaga

SEQ ID NO: 640096 - DNA, 15 bp, Homo sapiens
tgcctctcttaagaa

SEQ ID NO: 640097 - DNA, 15 bp, Homo sapiens
gcctctcttaagaag

SEQ ID NO: 640098 - DNA, 15 bp, Homo sapiens
cctctcttaagaagg

SEQ ID NO: 640099 - DNA, 15 bp, Homo sapiens
ctctcttaagaaggg

SEQ ID NO: 640100 - DNA, 15 bp, Homo sapiens
tctcttaagaaggga

SEQ ID NO: 640101 - DNA, 15 bp, Homo sapiens
ctcttaagaagggat

SEQ ID NO: 640102 - DNA, 15 bp, Homo sapiens
tcttaagaagggata

SEQ ID NO: 640103 - DNA, 15 bp, Homo sapiens
cttaagaagggataa

SEQ ID NO: 640104 - DNA, 15 bp, Homo sapiens
ttaagaagggataat

SEQ ID NO: 640105 - DNA, 15 bp, Homo sapiens
taagaagggataata

SEQ ID NO: 640106 - DNA, 15 bp, Homo sapiens
aagaagggataataa

SEQ ID NO: 640107 - DNA, 15 bp, Homo sapiens
agaagggataataag

SEQ ID NO: 640108 - DNA, 15 bp, Homo sapiens
gaagggataataaga

SEQ ID NO: 640109 - DNA, 15 bp, Homo sapiens
aagggataataagac

SEQ ID NO: 640110 - DNA, 15 bp, Homo sapiens
agggataataagaca

SEQ ID NO: 640111 - DNA, 15 bp, Homo sapiens
gggataataagacat

SEQ ID NO: 640112 - DNA, 15 bp, Homo sapiens
ggataataagacatt

SEQ ID NO: 640113 - DNA, 15 bp, Homo sapiens
gataataagacattg

SEQ ID NO: 640114 - DNA, 15 bp, Homo sapiens
ataataagacattgc

SEQ ID NO: 640115 - DNA, 15 bp, Homo sapiens
taataagacattgct

SEQ ID NO: 640116 - DNA, 15 bp, Homo sapiens
aataagacattgctt

SEQ ID NO: 640117 - DNA, 15 bp, Homo sapiens
ataagacattgctta

SEQ ID NO: 640118 - DNA, 15 bp, Homo sapiens
taagacattgcttat

SEQ ID NO: 640119 - DNA, 15 bp, Homo sapiens
aagacattgcttatt

SEQ ID NO: 640120 - DNA, 15 bp, Homo sapiens
agacattgcttattt

SEQ ID NO: 640121 - DNA, 15 bp, Homo sapiens
gacattgcttatttt

SEQ ID NO: 640122 - DNA, 15 bp, Homo sapiens
acattgcttattttc

SEQ ID NO: 640123 - DNA, 15 bp, Homo sapiens
cattgcttattttct

SEQ ID NO: 640124 - DNA, 15 bp, Homo sapiens
attgcttattttctt

SEQ ID NO: 640125 - DNA, 15 bp, Homo sapiens
ttgcttattttcttt

SEQ ID NO: 640126 - DNA, 15 bp, Homo sapiens
tgcttattttctttc

SEQ ID NO: 640127 - DNA, 15 bp, Homo sapiens
gcttattttctttct

SEQ ID NO: 640128 - DNA, 15 bp, Homo sapiens
cttattttctttctt

SEQ ID NO: 640129 - DNA, 15 bp, Homo sapiens
ttattttctttcttt

SEQ ID NO: 640130 - DNA, 15 bp, Homo sapiens
tattttctttctttc

SEQ ID NO: 640131 - DNA, 15 bp, Homo sapiens
attttctttctttca

SEQ ID NO: 640132 - DNA, 15 bp, Homo sapiens
ttttctttctttcaa

SEQ ID NO: 640133 - DNA, 15 bp, Homo sapiens
tttctttctttcaat

SEQ ID NO: 640134 - DNA, 15 bp, Homo sapiens
ttctttctttcaatc

SEQ ID NO: 640135 - DNA, 15 bp, Homo sapiens
tctttctttcaatct

SEQ ID NO: 640136 - DNA, 15 bp, Homo sapiens
ctttctttcaatctt

SEQ ID NO: 640137 - DNA, 15 bp, Homo sapiens
tttctttcaatcttc

SEQ ID NO: 640138 - DNA, 15 bp, Homo sapiens
ttctttcaatcttca

SEQ ID NO: 640139 - DNA, 15 bp, Homo sapiens
tctttcaatcttcag

SEQ ID NO: 640140 - DNA, 15 bp, Homo sapiens
ctttcaatcttcagt

SEQ ID NO: 640141 - DNA, 15 bp, Homo sapiens
tttcaatcttcagtt

SEQ ID NO: 640142 - DNA, 15 bp, Homo sapiens
ttcaatcttcagttt

SEQ ID NO: 640143 - DNA, 15 bp, Homo sapiens
tcaatcttcagttta

SEQ ID NO: 640144 - DNA, 15 bp, Homo sapiens
caatcttcagtttaa

SEQ ID NO: 640145 - DNA, 15 bp, Homo sapiens
aatcttcagtttaac

SEQ ID NO: 640146 - DNA, 15 bp, Homo sapiens
atcttcagtttaaca

SEQ ID NO: 640147 - DNA, 15 bp, Homo sapiens
tcttcagtttaacaa

SEQ ID NO: 640148 - DNA, 15 bp, Homo sapiens
cttcagtttaacaag

SEQ ID NO: 640149 - DNA, 15 bp, Homo sapiens
ttcagtttaacaagg

SEQ ID NO: 640150 - DNA, 15 bp, Homo sapiens
tcagtttaacaaggt

SEQ ID NO: 640151 - DNA, 15 bp, Homo sapiens
cagtttaacaaggta

SEQ ID NO: 640152 - DNA, 15 bp, Homo sapiens
agtttaacaaggtac

SEQ ID NO: 640153 - DNA, 15 bp, Homo sapiens
gtttaacaaggtaca

SEQ ID NO: 640154 - DNA, 15 bp, Homo sapiens
tttaacaaggtacat

SEQ ID NO: 640155 - DNA, 15 bp, Homo sapiens
ttaacaaggtacatg

SEQ ID NO: 640156 - DNA, 15 bp, Homo sapiens
taacaaggtacatgg

SEQ ID NO: 640157 - DNA, 15 bp, Homo sapiens
aacaaggtacatggg

SEQ ID NO: 640158 - DNA, 15 bp, Homo sapiens
acaaggtacatggga

SEQ ID NO: 640159 - DNA, 15 bp, Homo sapiens
caaggtacatgggat

SEQ ID NO: 640160 - DNA, 15 bp, Homo sapiens
aaggtacatgggatt

SEQ ID NO: 640161 - DNA, 15 bp, Homo sapiens
aggtacatgggattc

SEQ ID NO: 640162 - DNA, 15 bp, Homo sapiens
ggtacatgggattcc

SEQ ID NO: 640163 - DNA, 15 bp, Homo sapiens
gtacatgggattcca

SEQ ID NO: 640164 - DNA, 15 bp, Homo sapiens
tacatgggattccag

SEQ ID NO: 640165 - DNA, 15 bp, Homo sapiens
acatgggattccagg

SEQ ID NO: 640166 - DNA, 15 bp, Homo sapiens
catgggattccagga

SEQ ID NO: 640167 - DNA, 15 bp, Homo sapiens
atgggattccaggag

SEQ ID NO: 640168 - DNA, 15 bp, Homo sapiens
tgggattccaggaga

SEQ ID NO: 640169 - DNA, 15 bp, Homo sapiens
gggattccaggagaa

SEQ ID NO: 640170 - DNA, 15 bp, Homo sapiens
ggattccaggagaag

SEQ ID NO: 640171 - DNA, 15 bp, Homo sapiens
gattccaggagaaga

SEQ ID NO: 640172 - DNA, 15 bp, Homo sapiens
attccaggagaagat

SEQ ID NO: 640173 - DNA, 15 bp, Homo sapiens
ttccaggagaagatt

SEQ ID NO: 640174 - DNA, 15 bp, Homo sapiens
tccaggagaagattt

SEQ ID NO: 640175 - DNA, 15 bp, Homo sapiens
ccaggagaagatttc

SEQ ID NO: 640176 - DNA, 15 bp, Homo sapiens
caggagaagatttct

SEQ ID NO: 640177 - DNA, 15 bp, Homo sapiens
aggagaagatttcta

SEQ ID NO: 640178 - DNA, 15 bp, Homo sapiens
ggagaagatttctat

SEQ ID NO: 640179 - DNA, 15 bp, Homo sapiens
gagaagatttctatg

SEQ ID NO: 640180 - DNA, 15 bp, Homo sapiens
agaagatttctatga

SEQ ID NO: 640181 - DNA, 15 bp, Homo sapiens
gaagatttctatgaa

SEQ ID NO: 640182 - DNA, 15 bp, Homo sapiens
aagatttctatgaac

SEQ ID NO: 640183 - DNA, 15 bp, Homo sapiens
agatttctatgaaca

SEQ ID NO: 640184 - DNA, 15 bp, Homo sapiens
gatttctatgaacat

SEQ ID NO: 640185 - DNA, 15 bp, Homo sapiens
atttctatgaacatg

SEQ ID NO: 640186 - DNA, 15 bp, Homo sapiens
tttctatgaacatgt

SEQ ID NO: 640187 - DNA, 15 bp, Homo sapiens
ttctatgaacatgtt

SEQ ID NO: 640188 - DNA, 15 bp, Homo sapiens
tctatgaacatgtta

SEQ ID NO: 640189 - DNA, 15 bp, Homo sapiens
ctatgaacatgttat

SEQ ID NO: 640190 - DNA, 15 bp, Homo sapiens
tatgaacatgttata

SEQ ID NO: 640191 - DNA, 15 bp, Homo sapiens
atgaacatgttataa

SEQ ID NO: 640192 - DNA, 15 bp, Homo sapiens
tgaacatgttataat

SEQ ID NO: 640193 - DNA, 15 bp, Homo sapiens
gaacatgttataata

SEQ ID NO: 640194 - DNA, 15 bp, Homo sapiens
aacatgttataataa

SEQ ID NO: 640195 - DNA, 15 bp, Homo sapiens
acatgttataataat

SEQ ID NO: 640196 - DNA, 15 bp, Homo sapiens
catgttataataatt

SEQ ID NO: 640197 - DNA, 15 bp, Homo sapiens
atgttataataattc

SEQ ID NO: 640198 - DNA, 15 bp, Homo sapiens
tgttataataattct

SEQ ID NO: 640199 - DNA, 15 bp, Homo sapiens
gttataataattctg

SEQ ID NO: 640200 - DNA, 15 bp, Homo sapiens
ttataataattctgt

SEQ ID NO: 640201 - DNA, 15 bp, Homo sapiens
tataataattctgta

SEQ ID NO: 640202 - DNA, 15 bp, Homo sapiens
ataataattctgtag

SEQ ID NO: 640203 - DNA, 15 bp, Homo sapiens
taataattctgtaga

SEQ ID NO: 640204 - DNA, 15 bp, Homo sapiens
aataattctgtagac

SEQ ID NO: 640205 - DNA, 15 bp, Homo sapiens
ataattctgtagacg

SEQ ID NO: 640206 - DNA, 15 bp, Homo sapiens
taattctgtagacga

SEQ ID NO: 640207 - DNA, 15 bp, Homo sapiens
aattctgtagacgag

SEQ ID NO: 640208 - DNA, 15 bp, Homo sapiens
attctgtagacgagt

SEQ ID NO: 640209 - DNA, 15 bp, Homo sapiens
ttctgtagacgagtg

SEQ ID NO: 640210 - DNA, 15 bp, Homo sapiens
tctgtagacgagtgt

SEQ ID NO: 640211 - DNA, 15 bp, Homo sapiens
ctgtagacgagtgta

SEQ ID NO: 640212 - DNA, 15 bp, Homo sapiens
tgtagacgagtgtat

SEQ ID NO: 640213 - DNA, 15 bp, Homo sapiens
gtagacgagtgtatt

SEQ ID NO: 640214 - DNA, 15 bp, Homo sapiens
tagacgagtgtattt

SEQ ID NO: 640215 - DNA, 15 bp, Homo sapiens
agacgagtgtatttt

SEQ ID NO: 640216 - DNA, 15 bp, Homo sapiens
gacgagtgtattttt

SEQ ID NO: 640217 - DNA, 15 bp, Homo sapiens
acgagtgtatttttg

SEQ ID NO: 640218 - DNA, 15 bp, Homo sapiens
cgagtgtatttttgt

SEQ ID NO: 640219 - DNA, 15 bp, Homo sapiens
gagtgtatttttgtt

SEQ ID NO: 640220 - DNA, 15 bp, Homo sapiens
agtgtatttttgttt

SEQ ID NO: 640221 - DNA, 15 bp, Homo sapiens
gtgtatttttgtttg

SEQ ID NO: 640222 - DNA, 15 bp, Homo sapiens
tgtatttttgtttgt

SEQ ID NO: 640223 - DNA, 15 bp, Homo sapiens
gtatttttgtttgta

SEQ ID NO: 640224 - DNA, 15 bp, Homo sapiens
tatttttgtttgtag

SEQ ID NO: 640225 - DNA, 15 bp, Homo sapiens
atttttgtttgtagc

SEQ ID NO: 640226 - DNA, 15 bp, Homo sapiens
tttttgtttgtagct

SEQ ID NO: 640227 - DNA, 15 bp, Homo sapiens
ttttgtttgtagctc

SEQ ID NO: 640228 - DNA, 15 bp, Homo sapiens
tttgtttgtagctca

SEQ ID NO: 640229 - DNA, 15 bp, Homo sapiens
ttgtttgtagctcaa

SEQ ID NO: 640230 - DNA, 15 bp, Homo sapiens
tgtttgtagctcaaa

SEQ ID NO: 640231 - DNA, 15 bp, Homo sapiens
gtttgtagctcaaac

SEQ ID NO: 640232 - DNA, 15 bp, Homo sapiens
tttgtagctcaaaca

SEQ ID NO: 640233 - DNA, 15 bp, Homo sapiens
ttgtagctcaaacag

SEQ ID NO: 640234 - DNA, 15 bp, Homo sapiens
tgtagctcaaacagt

SEQ ID NO: 640235 - DNA, 15 bp, Homo sapiens
gtagctcaaacagtt

SEQ ID NO: 640236 - DNA, 15 bp, Homo sapiens
tagctcaaacagtta

SEQ ID NO: 640237 - DNA, 15 bp, Homo sapiens
agctcaaacagttac

SEQ ID NO: 640238 - DNA, 15 bp, Homo sapiens
gctcaaacagttaca

SEQ ID NO: 640239 - DNA, 15 bp, Homo sapiens
ctcaaacagttacag

SEQ ID NO: 640240 - DNA, 15 bp, Homo sapiens
tcaaacagttacagt

SEQ ID NO: 640241 - DNA, 15 bp, Homo sapiens
caaacagttacagtc

SEQ ID NO: 640242 - DNA, 15 bp, Homo sapiens
aaacagttacagtcc

SEQ ID NO: 640243 - DNA, 15 bp, Homo sapiens
aacagttacagtcca

SEQ ID NO: 640244 - DNA, 15 bp, Homo sapiens
acagttacagtccac

SEQ ID NO: 640245 - DNA, 15 bp, Homo sapiens
cagttacagtccaca

SEQ ID NO: 640246 - DNA, 15 bp, Homo sapiens
agttacagtccacat

SEQ ID NO: 640247 - DNA, 15 bp, Homo sapiens
gttacagtccacata

SEQ ID NO: 640248 - DNA, 15 bp, Homo sapiens
ttacagtccacatac

SEQ ID NO: 640249 - DNA, 15 bp, Homo sapiens
tacagtccacatact

SEQ ID NO: 640250 - DNA, 15 bp, Homo sapiens
acagtccacatacta

SEQ ID NO: 640251 - DNA, 15 bp, Homo sapiens
cagtccacatactag

SEQ ID NO: 640252 - DNA, 15 bp, Homo sapiens
agtccacatactaga

SEQ ID NO: 640253 - DNA, 15 bp, Homo sapiens
gtccacatactagag

SEQ ID NO: 640254 - DNA, 15 bp, Homo sapiens
tccacatactagaga

SEQ ID NO: 640255 - DNA, 15 bp, Homo sapiens
ccacatactagagag

SEQ ID NO: 640256 - DNA, 15 bp, Homo sapiens
cacatactagagagc

SEQ ID NO: 640257 - DNA, 15 bp, Homo sapiens
acatactagagagca

SEQ ID NO: 640258 - DNA, 15 bp, Homo sapiens
catactagagagcac

SEQ ID NO: 640259 - DNA, 15 bp, Homo sapiens
atactagagagcacc

SEQ ID NO: 640260 - DNA, 15 bp, Homo sapiens
tactagagagcacct

SEQ ID NO: 640261 - DNA, 15 bp, Homo sapiens
actagagagcacctt

SEQ ID NO: 640262 - DNA, 15 bp, Homo sapiens
ctagagagcaccttt

SEQ ID NO: 640263 - DNA, 15 bp, Homo sapiens
tagagagcaccttta

SEQ ID NO: 640264 - DNA, 15 bp, Homo sapiens
agagagcacctttaa

SEQ ID NO: 640265 - DNA, 15 bp, Homo sapiens
gagagcacctttaaa

SEQ ID NO: 640266 - DNA, 15 bp, Homo sapiens
agagcacctttaaac

SEQ ID NO: 640267 - DNA, 15 bp, Homo sapiens
gagcacctttaaaca

SEQ ID NO: 640268 - DNA, 15 bp, Homo sapiens
agcacctttaaacac

SEQ ID NO: 640269 - DNA, 15 bp, Homo sapiens
gcacctttaaacaca

SEQ ID NO: 640270 - DNA, 15 bp, Homo sapiens
cacctttaaacacag

SEQ ID NO: 640271 - DNA, 15 bp, Homo sapiens
acctttaaacacagc

SEQ ID NO: 640272 - DNA, 15 bp, Homo sapiens
cctttaaacacagca

SEQ ID NO: 640273 - DNA, 15 bp, Homo sapiens
ctttaaacacagcaa

SEQ ID NO: 640274 - DNA, 15 bp, Homo sapiens
tttaaacacagcaaa

SEQ ID NO: 640275 - DNA, 15 bp, Homo sapiens
ttaaacacagcaaat

SEQ ID NO: 640276 - DNA, 15 bp, Homo sapiens
taaacacagcaaatg

SEQ ID NO: 640277 - DNA, 15 bp, Homo sapiens
aaacacagcaaatgt

SEQ ID NO: 640278 - DNA, 15 bp, Homo sapiens
aacacagcaaatgtt

SEQ ID NO: 640279 - DNA, 15 bp, Homo sapiens
acacagcaaatgttt

SEQ ID NO: 640280 - DNA, 15 bp, Homo sapiens
cacagcaaatgttta

SEQ ID NO: 640281 - DNA, 15 bp, Homo sapiens
acagcaaatgtttag

SEQ ID NO: 640282 - DNA, 15 bp, Homo sapiens
cagcaaatgtttagt

SEQ ID NO: 640283 - DNA, 15 bp, Homo sapiens
agcaaatgtttagtc

SEQ ID NO: 640284 - DNA, 15 bp, Homo sapiens
gcaaatgtttagtca

SEQ ID NO: 640285 - DNA, 15 bp, Homo sapiens
caaatgtttagtcag

SEQ ID NO: 640286 - DNA, 15 bp, Homo sapiens
aaatgtttagtcaga

SEQ ID NO: 640287 - DNA, 15 bp, Homo sapiens
aatgtttagtcagag

SEQ ID NO: 640288 - DNA, 15 bp, Homo sapiens
atgtttagtcagaga

SEQ ID NO: 640289 - DNA, 15 bp, Homo sapiens
tgtttagtcagagat

SEQ ID NO: 640290 - DNA, 15 bp, Homo sapiens
gtttagtcagagatt

SEQ ID NO: 640291 - DNA, 15 bp, Homo sapiens
tttagtcagagattt

SEQ ID NO: 640292 - DNA, 15 bp, Homo sapiens
ttagtcagagatttc

SEQ ID NO: 640293 - DNA, 15 bp, Homo sapiens
tagtcagagatttca

SEQ ID NO: 640294 - DNA, 15 bp, Homo sapiens
agtcagagatttcaa

SEQ ID NO: 640295 - DNA, 15 bp, Homo sapiens
gtcagagatttcaac

SEQ ID NO: 640296 - DNA, 15 bp, Homo sapiens
tcagagatttcaacc

SEQ ID NO: 640297 - DNA, 15 bp, Homo sapiens
cagagatttcaacct

SEQ ID NO: 640298 - DNA, 15 bp, Homo sapiens
agagatttcaaccta

SEQ ID NO: 640299 - DNA, 15 bp, Homo sapiens
gagatttcaacctaa

SEQ ID NO: 640300 - DNA, 15 bp, Homo sapiens
agatttcaacctaac

SEQ ID NO: 640301 - DNA, 15 bp, Homo sapiens
gatttcaacctaact

SEQ ID NO: 640302 - DNA, 15 bp, Homo sapiens
atttcaacctaactg

SEQ ID NO: 640303 - DNA, 15 bp, Homo sapiens
tttcaacctaactgt

SEQ ID NO: 640304 - DNA, 15 bp, Homo sapiens
ttcaacctaactgtg

SEQ ID NO: 640305 - DNA, 15 bp, Homo sapiens
tcaacctaactgtgc

SEQ ID NO: 640306 - DNA, 15 bp, Homo sapiens
caacctaactgtgct

SEQ ID NO: 640307 - DNA, 15 bp, Homo sapiens
aacctaactgtgctt

SEQ ID NO: 640308 - DNA, 15 bp, Homo sapiens
acctaactgtgctta

SEQ ID NO: 640309 - DNA, 15 bp, Homo sapiens
cctaactgtgcttag

SEQ ID NO: 640310 - DNA, 15 bp, Homo sapiens
ctaactgtgcttaga

SEQ ID NO: 640311 - DNA, 15 bp, Homo sapiens
taactgtgcttagaa

SEQ ID NO: 640312 - DNA, 15 bp, Homo sapiens
aactgtgcttagaaa

SEQ ID NO: 640313 - DNA, 15 bp, Homo sapiens
actgtgcttagaaat

SEQ ID NO: 640314 - DNA, 15 bp, Homo sapiens
ctgtgcttagaaatg

SEQ ID NO: 640315 - DNA, 15 bp, Homo sapiens
tgtgcttagaaatga

SEQ ID NO: 640316 - DNA, 15 bp, Homo sapiens
gtgcttagaaatgaa

SEQ ID NO: 640317 - DNA, 15 bp, Homo sapiens
tgcttagaaatgaaa

SEQ ID NO: 640318 - DNA, 15 bp, Homo sapiens
gcttagaaatgaaat

SEQ ID NO: 640319 - DNA, 15 bp, Homo sapiens
cttagaaatgaaatc

SEQ ID NO: 640320 - DNA, 15 bp, Homo sapiens
ttagaaatgaaatcc

SEQ ID NO: 640321 - DNA, 15 bp, Homo sapiens
tagaaatgaaatcct

SEQ ID NO: 640322 - DNA, 15 bp, Homo sapiens
agaaatgaaatcctg

SEQ ID NO: 640323 - DNA, 15 bp, Homo sapiens
gaaatgaaatcctgt

SEQ ID NO: 640324 - DNA, 15 bp, Homo sapiens
aaatgaaatcctgta

SEQ ID NO: 640325 - DNA, 15 bp, Homo sapiens
aatgaaatcctgtaa

SEQ ID NO: 640326 - DNA, 15 bp, Homo sapiens
atgaaatcctgtaaa

SEQ ID NO: 640327 - DNA, 15 bp, Homo sapiens
tgaaatcctgtaaac

SEQ ID NO: 640328 - DNA, 15 bp, Homo sapiens
gaaatcctgtaaaca

SEQ ID NO: 640329 - DNA, 15 bp, Homo sapiens
aaatcctgtaaacaa

SEQ ID NO: 640330 - DNA, 15 bp, Homo sapiens
aatcctgtaaacaat

SEQ ID NO: 640331 - DNA, 15 bp, Homo sapiens
atcctgtaaacaatt

SEQ ID NO: 640332 - DNA, 15 bp, Homo sapiens
tcctgtaaacaattt

SEQ ID NO: 640333 - DNA, 15 bp, Homo sapiens
cctgtaaacaatttg

SEQ ID NO: 640334 - DNA, 15 bp, Homo sapiens
ctgtaaacaatttgg

SEQ ID NO: 640335 - DNA, 15 bp, Homo sapiens
tgtaaacaatttggt

SEQ ID NO: 640336 - DNA, 15 bp, Homo sapiens
gtaaacaatttggtg

SEQ ID NO: 640337 - DNA, 15 bp, Homo sapiens
taaacaatttggtga

SEQ ID NO: 640338 - DNA, 15 bp, Homo sapiens
aaacaatttggtgat

SEQ ID NO: 640339 - DNA, 15 bp, Homo sapiens
aacaatttggtgata

SEQ ID NO: 640340 - DNA, 15 bp, Homo sapiens
acaatttggtgatac

SEQ ID NO: 640341 - DNA, 15 bp, Homo sapiens
caatttggtgatact

SEQ ID NO: 640342 - DNA, 15 bp, Homo sapiens
aatttggtgatactg

SEQ ID NO: 640343 - DNA, 15 bp, Homo sapiens
atttggtgatactgg

SEQ ID NO: 640344 - DNA, 15 bp, Homo sapiens
tttggtgatactggc

SEQ ID NO: 640345 - DNA, 15 bp, Homo sapiens
ttggtgatactggca

SEQ ID NO: 640346 - DNA, 15 bp, Homo sapiens
tggtgatactggcaa

SEQ ID NO: 640347 - DNA, 15 bp, Homo sapiens
ggtgatactggcaaa

SEQ ID NO: 640348 - DNA, 15 bp, Homo sapiens
gtgatactggcaaat

SEQ ID NO: 640349 - DNA, 15 bp, Homo sapiens
tgatactggcaaatt

SEQ ID NO: 640350 - DNA, 15 bp, Homo sapiens
gatactggcaaattt

SEQ ID NO: 640351 - DNA, 15 bp, Homo sapiens
atactggcaaattta

SEQ ID NO: 640352 - DNA, 15 bp, Homo sapiens
tactggcaaatttaa

SEQ ID NO: 640353 - DNA, 15 bp, Homo sapiens
actggcaaatttaaa

SEQ ID NO: 640354 - DNA, 15 bp, Homo sapiens
ctggcaaatttaaag

SEQ ID NO: 640355 - DNA, 15 bp, Homo sapiens
tggcaaatttaaagc

SEQ ID NO: 640356 - DNA, 15 bp, Homo sapiens
ggcaaatttaaagca

SEQ ID NO: 640357 - DNA, 15 bp, Homo sapiens
gcaaatttaaagcat

SEQ ID NO: 640358 - DNA, 15 bp, Homo sapiens
caaatttaaagcatc

SEQ ID NO: 640359 - DNA, 15 bp, Homo sapiens
aaatttaaagcatct

SEQ ID NO: 640360 - DNA, 15 bp, Homo sapiens
aatttaaagcatcta

SEQ ID NO: 640361 - DNA, 15 bp, Homo sapiens
atttaaagcatctac

SEQ ID NO: 640362 - DNA, 15 bp, Homo sapiens
tttaaagcatctacc

SEQ ID NO: 640363 - DNA, 15 bp, Homo sapiens
ttaaagcatctacct

SEQ ID NO: 640364 - DNA, 15 bp, Homo sapiens
taaagcatctacctc

SEQ ID NO: 640365 - DNA, 15 bp, Homo sapiens
aaagcatctacctcc

SEQ ID NO: 640366 - DNA, 15 bp, Homo sapiens
aagcatctacctcct

SEQ ID NO: 640367 - DNA, 15 bp, Homo sapiens
agcatctacctcctt

SEQ ID NO: 640368 - DNA, 15 bp, Homo sapiens
gcatctacctccttc

SEQ ID NO: 640369 - DNA, 15 bp, Homo sapiens
catctacctccttcc

SEQ ID NO: 640370 - DNA, 15 bp, Homo sapiens
atctacctccttcca

SEQ ID NO: 640371 - DNA, 15 bp, Homo sapiens
tctacctccttccaa

SEQ ID NO: 640372 - DNA, 15 bp, Homo sapiens
ctacctccttccaat

SEQ ID NO: 640373 - DNA, 15 bp, Homo sapiens
tacctccttccaatc

SEQ ID NO: 640374 - DNA, 15 bp, Homo sapiens
acctccttccaatct

SEQ ID NO: 640375 - DNA, 15 bp, Homo sapiens
cctccttccaatcta

SEQ ID NO: 640376 - DNA, 15 bp, Homo sapiens
ctccttccaatctaa

SEQ ID NO: 640377 - DNA, 15 bp, Homo sapiens
tccttccaatctaat

SEQ ID NO: 640378 - DNA, 15 bp, Homo sapiens
ccttccaatctaatt

SEQ ID NO: 640379 - DNA, 15 bp, Homo sapiens
cttccaatctaattt

SEQ ID NO: 640380 - DNA, 15 bp, Homo sapiens
ttccaatctaatttt

SEQ ID NO: 640381 - DNA, 15 bp, Homo sapiens
tccaatctaattttc

SEQ ID NO: 640382 - DNA, 15 bp, Homo sapiens
ccaatctaattttcc

SEQ ID NO: 640383 - DNA, 15 bp, Homo sapiens
caatctaattttcct

SEQ ID NO: 640384 - DNA, 15 bp, Homo sapiens
aatctaattttcctc

SEQ ID NO: 640385 - DNA, 15 bp, Homo sapiens
atctaattttcctct

SEQ ID NO: 640386 - DNA, 15 bp, Homo sapiens
tctaattttcctctt

SEQ ID NO: 640387 - DNA, 15 bp, Homo sapiens
ctaattttcctcttc

SEQ ID NO: 640388 - DNA, 15 bp, Homo sapiens
taattttcctcttca

SEQ ID NO: 640389 - DNA, 15 bp, Homo sapiens
aattttcctcttcag

SEQ ID NO: 640390 - DNA, 15 bp, Homo sapiens
attttcctcttcaga

SEQ ID NO: 640391 - DNA, 15 bp, Homo sapiens
ttttcctcttcagat

SEQ ID NO: 640392 - DNA, 15 bp, Homo sapiens
tttcctcttcagatt

SEQ ID NO: 640393 - DNA, 15 bp, Homo sapiens
ttcctcttcagattg

SEQ ID NO: 640394 - DNA, 15 bp, Homo sapiens
tcctcttcagattgt

SEQ ID NO: 640395 - DNA, 15 bp, Homo sapiens
cctcttcagattgtt

SEQ ID NO: 640396 - DNA, 15 bp, Homo sapiens
ctcttcagattgtta

SEQ ID NO: 640397 - DNA, 15 bp, Homo sapiens
tcttcagattgttaa

SEQ ID NO: 640398 - DNA, 15 bp, Homo sapiens
cttcagattgttaat

SEQ ID NO: 640399 - DNA, 15 bp, Homo sapiens
ttcagattgttaatt

SEQ ID NO: 640400 - DNA, 15 bp, Homo sapiens
tcagattgttaatta

SEQ ID NO: 640401 - DNA, 15 bp, Homo sapiens
cagattgttaattaa

SEQ ID NO: 640402 - DNA, 15 bp, Homo sapiens
agattgttaattaaa

SEQ ID NO: 640403 - DNA, 15 bp, Homo sapiens
gattgttaattaaag

SEQ ID NO: 640404 - DNA, 15 bp, Homo sapiens
attgttaattaaaga

SEQ ID NO: 640405 - DNA, 15 bp, Homo sapiens
ttgttaattaaagaa

SEQ ID NO: 640406 - DNA, 15 bp, Homo sapiens
tgttaattaaagaaa

SEQ ID NO: 640407 - DNA, 15 bp, Homo sapiens
gttaattaaagaaaa

SEQ ID NO: 640408 - DNA, 15 bp, Homo sapiens
ttaattaaagaaaat

SEQ ID NO: 640409 - DNA, 15 bp, Homo sapiens
taattaaagaaaatg

SEQ ID NO: 640410 - DNA, 15 bp, Homo sapiens
aattaaagaaaatga

SEQ ID NO: 640411 - DNA, 15 bp, Homo sapiens
attaaagaaaatgaa

SEQ ID NO: 640412 - DNA, 15 bp, Homo sapiens
ttaaagaaaatgaaa

SEQ ID NO: 640413 - DNA, 15 bp, Homo sapiens
taaagaaaatgaaaa

SEQ ID NO: 640414 - DNA, 15 bp, Homo sapiens
aaagaaaatgaaaag

SEQ ID NO: 640415 - DNA, 15 bp, Homo sapiens
aagaaaatgaaaagt

SEQ ID NO: 640416 - DNA, 15 bp, Homo sapiens
agaaaatgaaaagta

SEQ ID NO: 640417 - DNA, 15 bp, Homo sapiens
gaaaatgaaaagtat

SEQ ID NO: 640418 - DNA, 15 bp, Homo sapiens
aaaatgaaaagtata

SEQ ID NO: 640419 - DNA, 15 bp, Homo sapiens
aaatgaaaagtatac

SEQ ID NO: 640420 - DNA, 15 bp, Homo sapiens
aatgaaaagtatact

SEQ ID NO: 640421 - DNA, 15 bp, Homo sapiens
atgaaaagtatactt

SEQ ID NO: 640422 - DNA, 15 bp, Homo sapiens
tgaaaagtatacttt

SEQ ID NO: 640423 - DNA, 15 bp, Homo sapiens
gaaaagtatacttta

SEQ ID NO: 640424 - DNA, 15 bp, Homo sapiens
aaaagtatactttaa

SEQ ID NO: 640425 - DNA, 15 bp, Homo sapiens
aaagtatactttaat

SEQ ID NO: 640426 - DNA, 15 bp, Homo sapiens
aagtatactttaatt

SEQ ID NO: 640427 - DNA, 15 bp, Homo sapiens
agtatactttaattt

SEQ ID NO: 640428 - DNA, 15 bp, Homo sapiens
gtatactttaatttt

SEQ ID NO: 640429 - DNA, 15 bp, Homo sapiens
tatactttaatttta

SEQ ID NO: 640430 - DNA, 15 bp, Homo sapiens
atactttaattttat

SEQ ID NO: 640431 - DNA, 15 bp, Homo sapiens
tactttaattttatt

SEQ ID NO: 640432 - DNA, 15 bp, Homo sapiens
actttaattttattg

SEQ ID NO: 640433 - DNA, 15 bp, Homo sapiens
ctttaattttattgc

SEQ ID NO: 640434 - DNA, 15 bp, Homo sapiens
tttaattttattgcc

SEQ ID NO: 640435 - DNA, 15 bp, Homo sapiens
ttaattttattgcca

SEQ ID NO: 640436 - DNA, 15 bp, Homo sapiens
taattttattgccaa

SEQ ID NO: 640437 - DNA, 15 bp, Homo sapiens
aattttattgccaaa

SEQ ID NO: 640438 - DNA, 15 bp, Homo sapiens
attttattgccaaaa

SEQ ID NO: 640439 - DNA, 15 bp, Homo sapiens
ttttattgccaaaag

SEQ ID NO: 640440 - DNA, 15 bp, Homo sapiens
tttattgccaaaagc

SEQ ID NO: 640441 - DNA, 15 bp, Homo sapiens
ttattgccaaaagca

SEQ ID NO: 640442 - DNA, 15 bp, Homo sapiens
tattgccaaaagcac

SEQ ID NO: 640443 - DNA, 15 bp, Homo sapiens
attgccaaaagcact

SEQ ID NO: 640444 - DNA, 15 bp, Homo sapiens
ttgccaaaagcacta

SEQ ID NO: 640445 - DNA, 15 bp, Homo sapiens
tgccaaaagcactag

SEQ ID NO: 640446 - DNA, 15 bp, Homo sapiens
gccaaaagcactagt

SEQ ID NO: 640447 - DNA, 15 bp, Homo sapiens
ccaaaagcactagtt

SEQ ID NO: 640448 - DNA, 15 bp, Homo sapiens
caaaagcactagttt

SEQ ID NO: 640449 - DNA, 15 bp, Homo sapiens
aaaagcactagtttg

SEQ ID NO: 640450 - DNA, 15 bp, Homo sapiens
aaagcactagtttgc

SEQ ID NO: 640451 - DNA, 15 bp, Homo sapiens
aagcactagtttgct

SEQ ID NO: 640452 - DNA, 15 bp, Homo sapiens
agcactagtttgctt

SEQ ID NO: 640453 - DNA, 15 bp, Homo sapiens
gcactagtttgcttt

SEQ ID NO: 640454 - DNA, 15 bp, Homo sapiens
cactagtttgcttta

SEQ ID NO: 640455 - DNA, 15 bp, Homo sapiens
actagtttgctttat

SEQ ID NO: 640456 - DNA, 15 bp, Homo sapiens
ctagtttgctttatt

SEQ ID NO: 640457 - DNA, 15 bp, Homo sapiens
tagtttgctttattc

SEQ ID NO: 640458 - DNA, 15 bp, Homo sapiens
agtttgctttattca

SEQ ID NO: 640459 - DNA, 15 bp, Homo sapiens
gtttgctttattcat

SEQ ID NO: 640460 - DNA, 15 bp, Homo sapiens
tttgctttattcatg

SEQ ID NO: 640461 - DNA, 15 bp, Homo sapiens
ttgctttattcatgc

SEQ ID NO: 640462 - DNA, 15 bp, Homo sapiens
tgctttattcatgca

SEQ ID NO: 640463 - DNA, 15 bp, Homo sapiens
gctttattcatgcaa

SEQ ID NO: 640464 - DNA, 15 bp, Homo sapiens
ctttattcatgcaaa

SEQ ID NO: 640465 - DNA, 15 bp, Homo sapiens
tttattcatgcaaaa

SEQ ID NO: 640466 - DNA, 15 bp, Homo sapiens
ttattcatgcaaaac

SEQ ID NO: 640467 - DNA, 15 bp, Homo sapiens
tattcatgcaaaaca

SEQ ID NO: 640468 - DNA, 15 bp, Homo sapiens
attcatgcaaaacaa

SEQ ID NO: 640469 - DNA, 15 bp, Homo sapiens
ttcatgcaaaacaat

SEQ ID NO: 640470 - DNA, 15 bp, Homo sapiens
tcatgcaaaacaata

SEQ ID NO: 640471 - DNA, 15 bp, Homo sapiens
catgcaaaacaataa

SEQ ID NO: 640472 - DNA, 15 bp, Homo sapiens
atgcaaaacaataat

SEQ ID NO: 640473 - DNA, 15 bp, Homo sapiens
tgcaaaacaataata

SEQ ID NO: 640474 - DNA, 15 bp, Homo sapiens
gcaaaacaataatac

SEQ ID NO: 640475 - DNA, 15 bp, Homo sapiens
caaaacaataatact

SEQ ID NO: 640476 - DNA, 15 bp, Homo sapiens
aaaacaataatactc

SEQ ID NO: 640477 - DNA, 15 bp, Homo sapiens
aaacaataatactca

SEQ ID NO: 640478 - DNA, 15 bp, Homo sapiens
aacaataatactcaa

SEQ ID NO: 640479 - DNA, 15 bp, Homo sapiens
acaataatactcaaa

SEQ ID NO: 640480 - DNA, 15 bp, Homo sapiens
caataatactcaaac

SEQ ID NO: 640481 - DNA, 15 bp, Homo sapiens
aataatactcaaact

SEQ ID NO: 640482 - DNA, 15 bp, Homo sapiens
ataatactcaaactt

SEQ ID NO: 640483 - DNA, 15 bp, Homo sapiens
taatactcaaacttg

SEQ ID NO: 640484 - DNA, 15 bp, Homo sapiens
aatactcaaacttgc

SEQ ID NO: 640485 - DNA, 15 bp, Homo sapiens
atactcaaacttgct

SEQ ID NO: 640486 - DNA, 15 bp, Homo sapiens
tactcaaacttgcta

SEQ ID NO: 640487 - DNA, 15 bp, Homo sapiens
actcaaacttgctat

SEQ ID NO: 640488 - DNA, 15 bp, Homo sapiens
ctcaaacttgctatt

SEQ ID NO: 640489 - DNA, 15 bp, Homo sapiens
tcaaacttgctattt

SEQ ID NO: 640490 - DNA, 15 bp, Homo sapiens
caaacttgctatttg

SEQ ID NO: 640491 - DNA, 15 bp, Homo sapiens
aaacttgctatttgc

SEQ ID NO: 640492 - DNA, 15 bp, Homo sapiens
aacttgctatttgcc

SEQ ID NO: 640493 - DNA, 15 bp, Homo sapiens
acttgctatttgccc

SEQ ID NO: 640494 - DNA, 15 bp, Homo sapiens
cttgctatttgcccg

SEQ ID NO: 640495 - DNA, 15 bp, Homo sapiens
ttgctatttgcccgc

SEQ ID NO: 640496 - DNA, 15 bp, Homo sapiens
tgctatttgcccgca

SEQ ID NO: 640497 - DNA, 15 bp, Homo sapiens
gctatttgcccgcag

SEQ ID NO: 640498 - DNA, 15 bp, Homo sapiens
ctatttgcccgcaga

SEQ ID NO: 640499 - DNA, 15 bp, Homo sapiens
tatttgcccgcagat

SEQ ID NO: 640500 - DNA, 15 bp, Homo sapiens
atttgcccgcagatc

SEQ ID NO: 640501 - DNA, 15 bp, Homo sapiens
tttgcccgcagatct

SEQ ID NO: 640502 - DNA, 15 bp, Homo sapiens
ttgcccgcagatcta

SEQ ID NO: 640503 - DNA, 15 bp, Homo sapiens
tgcccgcagatctac

SEQ ID NO: 640504 - DNA, 15 bp, Homo sapiens
gcccgcagatctaca

SEQ ID NO: 640505 - DNA, 15 bp, Homo sapiens
cccgcagatctacaa

SEQ ID NO: 640506 - DNA, 15 bp, Homo sapiens
ccgcagatctacaaa

SEQ ID NO: 640507 - DNA, 15 bp, Homo sapiens
cgcagatctacaaaa

SEQ ID NO: 640508 - DNA, 15 bp, Homo sapiens
gcagatctacaaaaa

SEQ ID NO: 640509 - DNA, 15 bp, Homo sapiens
cagatctacaaaaat

SEQ ID NO: 640510 - DNA, 15 bp, Homo sapiens
agatctacaaaaatg

SEQ ID NO: 640511 - DNA, 15 bp, Homo sapiens
gatctacaaaaatgc

SEQ ID NO: 640512 - DNA, 15 bp, Homo sapiens
atctacaaaaatgct

SEQ ID NO: 640513 - DNA, 15 bp, Homo sapiens
tctacaaaaatgctg

SEQ ID NO: 640514 - DNA, 15 bp, Homo sapiens
ctacaaaaatgctgg

SEQ ID NO: 640515 - DNA, 15 bp, Homo sapiens
tacaaaaatgctggg

SEQ ID NO: 640516 - DNA, 15 bp, Homo sapiens
acaaaaatgctggga

SEQ ID NO: 640517 - DNA, 15 bp, Homo sapiens
caaaaatgctgggac

SEQ ID NO: 640518 - DNA, 15 bp, Homo sapiens
aaaaatgctgggact

SEQ ID NO: 640519 - DNA, 15 bp, Homo sapiens
aaaatgctgggactg

SEQ ID NO: 640520 - DNA, 15 bp, Homo sapiens
aaatgctgggactgg

SEQ ID NO: 640521 - DNA, 15 bp, Homo sapiens
aatgctgggactgga

SEQ ID NO: 640522 - DNA, 15 bp, Homo sapiens
atgctgggactggat

SEQ ID NO: 640523 - DNA, 15 bp, Homo sapiens
tgctgggactggatg

SEQ ID NO: 640524 - DNA, 15 bp, Homo sapiens
gctgggactggatga

SEQ ID NO: 640525 - DNA, 15 bp, Homo sapiens
ctgggactggatgat

SEQ ID NO: 640526 - DNA, 15 bp, Homo sapiens
tgggactggatgatt

SEQ ID NO: 640527 - DNA, 15 bp, Homo sapiens
gggactggatgattt

SEQ ID NO: 640528 - DNA, 15 bp, Homo sapiens
ggactggatgatttc

SEQ ID NO: 640529 - DNA, 15 bp, Homo sapiens
gactggatgatttca

SEQ ID NO: 640530 - DNA, 15 bp, Homo sapiens
actggatgatttcaa

SEQ ID NO: 640531 - DNA, 15 bp, Homo sapiens
ctggatgatttcaag

SEQ ID NO: 640532 - DNA, 15 bp, Homo sapiens
tggatgatttcaagg

SEQ ID NO: 640533 - DNA, 15 bp, Homo sapiens
ggatgatttcaagga

SEQ ID NO: 640534 - DNA, 15 bp, Homo sapiens
gatgatttcaaggat

SEQ ID NO: 640535 - DNA, 15 bp, Homo sapiens
atgatttcaaggatg

SEQ ID NO: 640536 - DNA, 15 bp, Homo sapiens
tgatttcaaggatgt

SEQ ID NO: 640537 - DNA, 15 bp, Homo sapiens
gatttcaaggatgta

SEQ ID NO: 640538 - DNA, 15 bp, Homo sapiens
atttcaaggatgtac

SEQ ID NO: 640539 - DNA, 15 bp, Homo sapiens
tttcaaggatgtact

SEQ ID NO: 640540 - DNA, 15 bp, Homo sapiens
ttcaaggatgtactt

SEQ ID NO: 640541 - DNA, 15 bp, Homo sapiens
tcaaggatgtactta

SEQ ID NO: 640542 - DNA, 15 bp, Homo sapiens
caaggatgtacttat

SEQ ID NO: 640543 - DNA, 15 bp, Homo sapiens
aaggatgtacttatc

SEQ ID NO: 640544 - DNA, 15 bp, Homo sapiens
aggatgtacttatca

SEQ ID NO: 640545 - DNA, 15 bp, Homo sapiens
ggatgtacttatcaa

SEQ ID NO: 640546 - DNA, 15 bp, Homo sapiens
gatgtacttatcaat

SEQ ID NO: 640547 - DNA, 15 bp, Homo sapiens
atgtacttatcaatg

SEQ ID NO: 640548 - DNA, 15 bp, Homo sapiens
tgtacttatcaatgg

SEQ ID NO: 640549 - DNA, 15 bp, Homo sapiens
gtacttatcaatggt

SEQ ID NO: 640550 - DNA, 15 bp, Homo sapiens
tacttatcaatggta

SEQ ID NO: 640551 - DNA, 15 bp, Homo sapiens
acttatcaatggtac

SEQ ID NO: 640552 - DNA, 15 bp, Homo sapiens
cttatcaatggtaca

SEQ ID NO: 640553 - DNA, 15 bp, Homo sapiens
ttatcaatggtacaa

SEQ ID NO: 640554 - DNA, 15 bp, Homo sapiens
tatcaatggtacaat

SEQ ID NO: 640555 - DNA, 15 bp, Homo sapiens
atcaatggtacaata

SEQ ID NO: 640556 - DNA, 15 bp, Homo sapiens
tcaatggtacaataa

SEQ ID NO: 640557 - DNA, 15 bp, Homo sapiens
caatggtacaataaa

SEQ ID NO: 640558 - DNA, 15 bp, Homo sapiens
aatggtacaataaaa

SEQ ID NO: 640559 - DNA, 15 bp, Homo sapiens
atggtacaataaaac

SEQ ID NO: 640560 - DNA, 15 bp, Homo sapiens
tggtacaataaaacc

SEQ ID NO: 640561 - DNA, 15 bp, Homo sapiens
ggtacaataaaacca

SEQ ID NO: 640562 - DNA, 15 bp, Homo sapiens
gtacaataaaaccat

SEQ ID NO: 640563 - DNA, 15 bp, Homo sapiens
tacaataaaaccatc

SEQ ID NO: 640564 - DNA, 15 bp, Homo sapiens
acaataaaaccatct

SEQ ID NO: 640565 - DNA, 15 bp, Homo sapiens
caataaaaccatctt

SEQ ID NO: 640566 - DNA, 15 bp, Homo sapiens
aataaaaccatcttt

SEQ ID NO: 640567 - DNA, 15 bp, Homo sapiens
ataaaaccatctttt

SEQ ID NO: 640568 - DNA, 15 bp, Homo sapiens
taaaaccatcttttt

SEQ ID NO: 640569 - DNA, 15 bp, Homo sapiens
aaaaccatctttttc

SEQ ID NO: 640570 - DNA, 15 bp, Homo sapiens
aaaccatctttttca

SEQ ID NO: 640571 - DNA, 15 bp, Homo sapiens
aaccatctttttcag

SEQ ID NO: 640572 - DNA, 15 bp, Homo sapiens
accatctttttcaga

SEQ ID NO: 640573 - DNA, 15 bp, Homo sapiens
ccatctttttcagaa

SEQ ID NO: 640574 - DNA, 15 bp, Homo sapiens
catctttttcagaaa

SEQ ID NO: 640575 - DNA, 15 bp, Homo sapiens
atctttttcagaaac

SEQ ID NO: 640576 - DNA, 15 bp, Homo sapiens
tctttttcagaaact

SEQ ID NO: 640577 - DNA, 15 bp, Homo sapiens
ctttttcagaaacta

SEQ ID NO: 640578 - DNA, 15 bp, Homo sapiens
tttttcagaaactac

SEQ ID NO: 640579 - DNA, 15 bp, Homo sapiens
ttttcagaaactact

SEQ ID NO: 640580 - DNA, 15 bp, Homo sapiens
tttcagaaactacta

SEQ ID NO: 640581 - DNA, 15 bp, Homo sapiens
ttcagaaactactaa

SEQ ID NO: 640582 - DNA, 15 bp, Homo sapiens
tcagaaactactaaa

SEQ ID NO: 640583 - DNA, 15 bp, Homo sapiens
cagaaactactaaac

SEQ ID NO: 640584 - DNA, 15 bp, Homo sapiens
agaaactactaaact

SEQ ID NO: 640585 - DNA, 15 bp, Homo sapiens
gaaactactaaactt

SEQ ID NO: 640586 - DNA, 15 bp, Homo sapiens
aaactactaaacttt

SEQ ID NO: 640587 - DNA, 15 bp, Homo sapiens
aactactaaactttg

SEQ ID NO: 640588 - DNA, 15 bp, Homo sapiens
actactaaactttgt

SEQ ID NO: 640589 - DNA, 15 bp, Homo sapiens
ctactaaactttgta

SEQ ID NO: 640590 - DNA, 15 bp, Homo sapiens
tactaaactttgtat

SEQ ID NO: 640591 - DNA, 15 bp, Homo sapiens
actaaactttgtatc

SEQ ID NO: 640592 - DNA, 15 bp, Homo sapiens
ctaaactttgtatca

SEQ ID NO: 640593 - DNA, 15 bp, Homo sapiens
taaactttgtatcat

SEQ ID NO: 640594 - DNA, 15 bp, Homo sapiens
aaactttgtatcatg

SEQ ID NO: 640595 - DNA, 15 bp, Homo sapiens
aactttgtatcatgg

SEQ ID NO: 640596 - DNA, 15 bp, Homo sapiens
actttgtatcatggg

SEQ ID NO: 640597 - DNA, 15 bp, Homo sapiens
ctttgtatcatgggt

SEQ ID NO: 640598 - DNA, 15 bp, Homo sapiens
tttgtatcatgggtt

SEQ ID NO: 640599 - DNA, 15 bp, Homo sapiens
ttgtatcatgggttt

SEQ ID NO: 640600 - DNA, 15 bp, Homo sapiens
tgtatcatgggtttt

SEQ ID NO: 640601 - DNA, 15 bp, Homo sapiens
gtatcatgggttttg

SEQ ID NO: 640602 - DNA, 15 bp, Homo sapiens
tatcatgggttttgt

SEQ ID NO: 640603 - DNA, 15 bp, Homo sapiens
atcatgggttttgtt

SEQ ID NO: 640604 - DNA, 15 bp, Homo sapiens
tcatgggttttgttt

SEQ ID NO: 640605 - DNA, 15 bp, Homo sapiens
catgggttttgtttc

SEQ ID NO: 640606 - DNA, 15 bp, Homo sapiens
atgggttttgtttct

SEQ ID NO: 640607 - DNA, 15 bp, Homo sapiens
tgggttttgtttctc

SEQ ID NO: 640608 - DNA, 15 bp, Homo sapiens
gggttttgtttctca

SEQ ID NO: 640609 - DNA, 15 bp, Homo sapiens
ggttttgtttctcag

SEQ ID NO: 640610 - DNA, 15 bp, Homo sapiens
gttttgtttctcaga

SEQ ID NO: 640611 - DNA, 15 bp, Homo sapiens
ttttgtttctcagat

SEQ ID NO: 640612 - DNA, 15 bp, Homo sapiens
tttgtttctcagata

SEQ ID NO: 640613 - DNA, 15 bp, Homo sapiens
ttgtttctcagatat

SEQ ID NO: 640614 - DNA, 15 bp, Homo sapiens
tgtttctcagatatt

SEQ ID NO: 640615 - DNA, 15 bp, Homo sapiens
gtttctcagatattc

SEQ ID NO: 640616 - DNA, 15 bp, Homo sapiens
tttctcagatattcg

SEQ ID NO: 640617 - DNA, 15 bp, Homo sapiens
ttctcagatattcga

SEQ ID NO: 640618 - DNA, 15 bp, Homo sapiens
tctcagatattcgat

SEQ ID NO: 640619 - DNA, 15 bp, Homo sapiens
ctcagatattcgatt

SEQ ID NO: 640620 - DNA, 15 bp, Homo sapiens
tcagatattcgattc

SEQ ID NO: 640621 - DNA, 15 bp, Homo sapiens
cagatattcgattct

SEQ ID NO: 640622 - DNA, 15 bp, Homo sapiens
agatattcgattctc

SEQ ID NO: 640623 - DNA, 15 bp, Homo sapiens
gatattcgattctcc

SEQ ID NO: 640624 - DNA, 15 bp, Homo sapiens
atattcgattctcct

SEQ ID NO: 640625 - DNA, 15 bp, Homo sapiens
tattcgattctcctt

SEQ ID NO: 640626 - DNA, 15 bp, Homo sapiens
attcgattctcctta

SEQ ID NO: 640627 - DNA, 15 bp, Homo sapiens
ttcgattctccttaa

SEQ ID NO: 640628 - DNA, 15 bp, Homo sapiens
tcgattctccttaaa

SEQ ID NO: 640629 - DNA, 15 bp, Homo sapiens
cgattctccttaaaa

SEQ ID NO: 640630 - DNA, 15 bp, Homo sapiens
gattctccttaaaaa

SEQ ID NO: 640631 - DNA, 15 bp, Homo sapiens
attctccttaaaaat

SEQ ID NO: 640632 - DNA, 15 bp, Homo sapiens
ttctccttaaaaatg

SEQ ID NO: 640633 - DNA, 15 bp, Homo sapiens
tctccttaaaaatgc

SEQ ID NO: 640634 - DNA, 15 bp, Homo sapiens
ctccttaaaaatgca

SEQ ID NO: 640635 - DNA, 15 bp, Homo sapiens
tccttaaaaatgcaa

SEQ ID NO: 640636 - DNA, 15 bp, Homo sapiens
ccttaaaaatgcaac

SEQ ID NO: 640637 - DNA, 15 bp, Homo sapiens
cttaaaaatgcaaca

SEQ ID NO: 640638 - DNA, 15 bp, Homo sapiens
ttaaaaatgcaacaa

SEQ ID NO: 640639 - DNA, 15 bp, Homo sapiens
taaaaatgcaacaac

SEQ ID NO: 640640 - DNA, 15 bp, Homo sapiens
aaaaatgcaacaact

SEQ ID NO: 640641 - DNA, 15 bp, Homo sapiens
aaaatgcaacaactg

SEQ ID NO: 640642 - DNA, 15 bp, Homo sapiens
aaatgcaacaactgt

SEQ ID NO: 640643 - DNA, 15 bp, Homo sapiens
aatgcaacaactgtg

SEQ ID NO: 640644 - DNA, 15 bp, Homo sapiens
atgcaacaactgtga

SEQ ID NO: 640645 - DNA, 15 bp, Homo sapiens
tgcaacaactgtgat

SEQ ID NO: 640646 - DNA, 15 bp, Homo sapiens
gcaacaactgtgata

SEQ ID NO: 640647 - DNA, 15 bp, Homo sapiens
caacaactgtgataa

SEQ ID NO: 640648 - DNA, 15 bp, Homo sapiens
aacaactgtgataat

SEQ ID NO: 640649 - DNA, 15 bp, Homo sapiens
acaactgtgataatt

SEQ ID NO: 640650 - DNA, 15 bp, Homo sapiens
caactgtgataatta

SEQ ID NO: 640651 - DNA, 15 bp, Homo sapiens
aactgtgataattat

SEQ ID NO: 640652 - DNA, 15 bp, Homo sapiens
actgtgataattatg

SEQ ID NO: 640653 - DNA, 15 bp, Homo sapiens
ctgtgataattatga

SEQ ID NO: 640654 - DNA, 15 bp, Homo sapiens
tgtgataattatgaa

SEQ ID NO: 640655 - DNA, 15 bp, Homo sapiens
gtgataattatgaat

SEQ ID NO: 640656 - DNA, 15 bp, Homo sapiens
tgataattatgaata

SEQ ID NO: 640657 - DNA, 15 bp, Homo sapiens
gataattatgaatac

SEQ ID NO: 640658 - DNA, 15 bp, Homo sapiens
ataattatgaatacc

SEQ ID NO: 640659 - DNA, 15 bp, Homo sapiens
taattatgaatacct

SEQ ID NO: 640660 - DNA, 15 bp, Homo sapiens
aattatgaatacctg

SEQ ID NO: 640661 - DNA, 15 bp, Homo sapiens
attatgaatacctgt

SEQ ID NO: 640662 - DNA, 15 bp, Homo sapiens
ttatgaatacctgta

SEQ ID NO: 640663 - DNA, 15 bp, Homo sapiens
tatgaatacctgtag

SEQ ID NO: 640664 - DNA, 15 bp, Homo sapiens
atgaatacctgtaga

SEQ ID NO: 640665 - DNA, 15 bp, Homo sapiens
tgaatacctgtagaa

SEQ ID NO: 640666 - DNA, 15 bp, Homo sapiens
gaatacctgtagaac

SEQ ID NO: 640667 - DNA, 15 bp, Homo sapiens
aatacctgtagaaca

SEQ ID NO: 640668 - DNA, 15 bp, Homo sapiens
atacctgtagaacag

SEQ ID NO: 640669 - DNA, 15 bp, Homo sapiens
tacctgtagaacaga

SEQ ID NO: 640670 - DNA, 15 bp, Homo sapiens
acctgtagaacagat

SEQ ID NO: 640671 - DNA, 15 bp, Homo sapiens
cctgtagaacagatt

SEQ ID NO: 640672 - DNA, 15 bp, Homo sapiens
ctgtagaacagattc

SEQ ID NO: 640673 - DNA, 15 bp, Homo sapiens
tgtagaacagattcc

SEQ ID NO: 640674 - DNA, 15 bp, Homo sapiens
gtagaacagattcca

SEQ ID NO: 640675 - DNA, 15 bp, Homo sapiens
tagaacagattccaa

SEQ ID NO: 640676 - DNA, 15 bp, Homo sapiens
agaacagattccaag

SEQ ID NO: 640677 - DNA, 15 bp, Homo sapiens
gaacagattccaagg

SEQ ID NO: 640678 - DNA, 15 bp, Homo sapiens
aacagattccaagga

SEQ ID NO: 640679 - DNA, 15 bp, Homo sapiens
acagattccaaggag

SEQ ID NO: 640680 - DNA, 15 bp, Homo sapiens
cagattccaaggagt

SEQ ID NO: 640681 - DNA, 15 bp, Homo sapiens
agattccaaggagta

SEQ ID NO: 640682 - DNA, 15 bp, Homo sapiens
gattccaaggagtaa

SEQ ID NO: 640683 - DNA, 15 bp, Homo sapiens
attccaaggagtaaa

SEQ ID NO: 640684 - DNA, 15 bp, Homo sapiens
ttccaaggagtaaag

SEQ ID NO: 640685 - DNA, 15 bp, Homo sapiens
tccaaggagtaaagc

SEQ ID NO: 640686 - DNA, 15 bp, Homo sapiens
ccaaggagtaaagca

SEQ ID NO: 640687 - DNA, 15 bp, Homo sapiens
caaggagtaaagcaa

SEQ ID NO: 640688 - DNA, 15 bp, Homo sapiens
aaggagtaaagcaaa

SEQ ID NO: 640689 - DNA, 15 bp, Homo sapiens
aggagtaaagcaaaa

SEQ ID NO: 640690 - DNA, 15 bp, Homo sapiens
ggagtaaagcaaaac

SEQ ID NO: 640691 - DNA, 15 bp, Homo sapiens
gagtaaagcaaaacc

SEQ ID NO: 640692 - DNA, 15 bp, Homo sapiens
agtaaagcaaaaccc

SEQ ID NO: 640693 - DNA, 15 bp, Homo sapiens
gtaaagcaaaacccc

SEQ ID NO: 640694 - DNA, 15 bp, Homo sapiens
taaagcaaaacccca

SEQ ID NO: 640695 - DNA, 15 bp, Homo sapiens
aaagcaaaaccccaa

SEQ ID NO: 640696 - DNA, 15 bp, Homo sapiens
aagcaaaaccccaaa

SEQ ID NO: 640697 - DNA, 15 bp, Homo sapiens
agcaaaaccccaaaa

SEQ ID NO: 640698 - DNA, 15 bp, Homo sapiens
gcaaaaccccaaaag

SEQ ID NO: 640699 - DNA, 15 bp, Homo sapiens
caaaaccccaaaaga

SEQ ID NO: 640700 - DNA, 15 bp, Homo sapiens
aaaaccccaaaagaa

SEQ ID NO: 640701 - DNA, 15 bp, Homo sapiens
aaaccccaaaagaaa

SEQ ID NO: 640702 - DNA, 15 bp, Homo sapiens
aaccccaaaagaaaa

SEQ ID NO: 640703 - DNA, 15 bp, Homo sapiens
accccaaaagaaaac

SEQ ID NO: 640704 - DNA, 15 bp, Homo sapiens
ccccaaaagaaaaca

SEQ ID NO: 640705 - DNA, 15 bp, Homo sapiens
cccaaaagaaaacaa

SEQ ID NO: 640706 - DNA, 15 bp, Homo sapiens
ccaaaagaaaacaaa

SEQ ID NO: 640707 - DNA, 15 bp, Homo sapiens
caaaagaaaacaaac

SEQ ID NO: 640708 - DNA, 15 bp, Homo sapiens
aaaagaaaacaaacg

SEQ ID NO: 640709 - DNA, 15 bp, Homo sapiens
aaagaaaacaaacga

SEQ ID NO: 640710 - DNA, 15 bp, Homo sapiens
aagaaaacaaacgaa

SEQ ID NO: 640711 - DNA, 15 bp, Homo sapiens
agaaaacaaacgaaa

SEQ ID NO: 640712 - DNA, 15 bp, Homo sapiens
gaaaacaaacgaaac

SEQ ID NO: 640713 - DNA, 15 bp, Homo sapiens
aaaacaaacgaaact

SEQ ID NO: 640714 - DNA, 15 bp, Homo sapiens
aaacaaacgaaactc

SEQ ID NO: 640715 - DNA, 15 bp, Homo sapiens
aacaaacgaaactct

SEQ ID NO: 640716 - DNA, 15 bp, Homo sapiens
acaaacgaaactctt

SEQ ID NO: 640717 - DNA, 15 bp, Homo sapiens
caaacgaaactcttc

SEQ ID NO: 640718 - DNA, 15 bp, Homo sapiens
aaacgaaactcttcc

SEQ ID NO: 640719 - DNA, 15 bp, Homo sapiens
aacgaaactcttcct

SEQ ID NO: 640720 - DNA, 15 bp, Homo sapiens
acgaaactcttcctt

SEQ ID NO: 640721 - DNA, 15 bp, Homo sapiens
cgaaactcttcctta

SEQ ID NO: 640722 - DNA, 15 bp, Homo sapiens
gaaactcttccttag

SEQ ID NO: 640723 - DNA, 15 bp, Homo sapiens
aaactcttccttagc

SEQ ID NO: 640724 - DNA, 15 bp, Homo sapiens
aactcttccttagct

SEQ ID NO: 640725 - DNA, 15 bp, Homo sapiens
actcttccttagcta

SEQ ID NO: 640726 - DNA, 15 bp, Homo sapiens
ctcttccttagctac

SEQ ID NO: 640727 - DNA, 15 bp, Homo sapiens
tcttccttagctact

SEQ ID NO: 640728 - DNA, 15 bp, Homo sapiens
cttccttagctactt

SEQ ID NO: 640729 - DNA, 15 bp, Homo sapiens
ttccttagctactta

SEQ ID NO: 640730 - DNA, 15 bp, Homo sapiens
tccttagctacttaa

SEQ ID NO: 640731 - DNA, 15 bp, Homo sapiens
ccttagctacttaaa

SEQ ID NO: 640732 - DNA, 15 bp, Homo sapiens
cttagctacttaaaa

SEQ ID NO: 640733 - DNA, 15 bp, Homo sapiens
ttagctacttaaaaa

SEQ ID NO: 640734 - DNA, 15 bp, Homo sapiens
tagctacttaaaaaa

SEQ ID NO: 640735 - DNA, 15 bp, Homo sapiens
agctacttaaaaaaa

SEQ ID NO: 640736 - DNA, 15 bp, Homo sapiens
gctacttaaaaaaaa

SEQ ID NO: 640737 - DNA, 15 bp, Homo sapiens
ctacttaaaaaaaag

SEQ ID NO: 640738 - DNA, 15 bp, Homo sapiens
tacttaaaaaaaaga

SEQ ID NO: 640739 - DNA, 15 bp, Homo sapiens
acttaaaaaaaagat

SEQ ID NO: 640740 - DNA, 15 bp, Homo sapiens
cttaaaaaaaagatt

SEQ ID NO: 640741 - DNA, 15 bp, Homo sapiens
ttaaaaaaaagattc

SEQ ID NO: 640742 - DNA, 15 bp, Homo sapiens
taaaaaaaagattct

SEQ ID NO: 640743 - DNA, 15 bp, Homo sapiens
aaaaaaaagattctc

SEQ ID NO: 640744 - DNA, 15 bp, Homo sapiens
aaaaaaagattctcg

SEQ ID NO: 640745 - DNA, 15 bp, Homo sapiens
aaaaaagattctcgg

SEQ ID NO: 640746 - DNA, 15 bp, Homo sapiens
aaaaagattctcggc

SEQ ID NO: 640747 - DNA, 15 bp, Homo sapiens
aaaagattctcggct

SEQ ID NO: 640748 - DNA, 15 bp, Homo sapiens
aaagattctcggctg

SEQ ID NO: 640749 - DNA, 15 bp, Homo sapiens
aagattctcggctgg

SEQ ID NO: 640750 - DNA, 15 bp, Homo sapiens
agattctcggctggg

SEQ ID NO: 640751 - DNA, 15 bp, Homo sapiens
gattctcggctgggg

SEQ ID NO: 640752 - DNA, 15 bp, Homo sapiens
attctcggctgggga

SEQ ID NO: 640753 - DNA, 15 bp, Homo sapiens
ttctcggctggggac

SEQ ID NO: 640754 - DNA, 15 bp, Homo sapiens
tctcggctggggacg

SEQ ID NO: 640755 - DNA, 15 bp, Homo sapiens
ctcggctggggacgg

SEQ ID NO: 640756 - DNA, 15 bp, Homo sapiens
tcggctggggacggg

SEQ ID NO: 640757 - DNA, 15 bp, Homo sapiens
cggctggggacgggt

SEQ ID NO: 640758 - DNA, 15 bp, Homo sapiens
ggctggggacgggtg

SEQ ID NO: 640759 - DNA, 15 bp, Homo sapiens
gctggggacgggtgg

SEQ ID NO: 640760 - DNA, 15 bp, Homo sapiens
ctggggacgggtggc

SEQ ID NO: 640761 - DNA, 15 bp, Homo sapiens
tggggacgggtggct

SEQ ID NO: 640762 - DNA, 15 bp, Homo sapiens
ggggacgggtggctc

SEQ ID NO: 640763 - DNA, 15 bp, Homo sapiens
gggacgggtggctca

SEQ ID NO: 640764 - DNA, 15 bp, Homo sapiens
ggacgggtggctcac

SEQ ID NO: 640765 - DNA, 15 bp, Homo sapiens
gacgggtggctcacg

SEQ ID NO: 640766 - DNA, 15 bp, Homo sapiens
acgggtggctcacgc

SEQ ID NO: 640767 - DNA, 15 bp, Homo sapiens
cgggtggctcacgcc

SEQ ID NO: 640768 - DNA, 15 bp, Homo sapiens
gggtggctcacgcct

SEQ ID NO: 640769 - DNA, 15 bp, Homo sapiens
tgtaatcccagcact

SEQ ID NO: 640770 - DNA, 15 bp, Homo sapiens
gtaatcccagcactt

SEQ ID NO: 640771 - DNA, 15 bp, Homo sapiens
taatcccagcacttt

SEQ ID NO: 640772 - DNA, 15 bp, Homo sapiens
aatcccagcactttg

SEQ ID NO: 640773 - DNA, 15 bp, Homo sapiens
atcccagcactttgg

SEQ ID NO: 640774 - DNA, 15 bp, Homo sapiens
tcccagcactttggg

SEQ ID NO: 640775 - DNA, 15 bp, Homo sapiens
cccagcactttggga

SEQ ID NO: 640776 - DNA, 15 bp, Homo sapiens
ccagcactttgggag

SEQ ID NO: 640777 - DNA, 15 bp, Homo sapiens
cagcactttgggaga

SEQ ID NO: 640778 - DNA, 15 bp, Homo sapiens
agcactttgggagac

SEQ ID NO: 640779 - DNA, 15 bp, Homo sapiens
gcactttgggagacg

SEQ ID NO: 640780 - DNA, 15 bp, Homo sapiens
cactttgggagacgg

SEQ ID NO: 640781 - DNA, 15 bp, Homo sapiens
actttgggagacgga

SEQ ID NO: 640782 - DNA, 15 bp, Homo sapiens
ctttgggagacggag

SEQ ID NO: 640783 - DNA, 15 bp, Homo sapiens
tttgggagacggagg

SEQ ID NO: 640784 - DNA, 15 bp, Homo sapiens
ttgggagacggaggc

SEQ ID NO: 640785 - DNA, 15 bp, Homo sapiens
tgggagacggaggcg

SEQ ID NO: 640786 - DNA, 15 bp, Homo sapiens
gggagacggaggcgg

SEQ ID NO: 640787 - DNA, 15 bp, Homo sapiens
ggagacggaggcggg

SEQ ID NO: 640788 - DNA, 15 bp, Homo sapiens
gagacggaggcgggt

SEQ ID NO: 640789 - DNA, 15 bp, Homo sapiens
agacggaggcgggtg

SEQ ID NO: 640790 - DNA, 15 bp, Homo sapiens
gacggaggcgggtgg

SEQ ID NO: 640791 - DNA, 15 bp, Homo sapiens
acggaggcgggtgga

SEQ ID NO: 640792 - DNA, 15 bp, Homo sapiens
cggaggcgggtggat

SEQ ID NO: 640793 - DNA, 15 bp, Homo sapiens
ggaggcgggtggatc

SEQ ID NO: 640794 - DNA, 15 bp, Homo sapiens
gaggcgggtggatca

SEQ ID NO: 640795 - DNA, 15 bp, Homo sapiens
aggcgggtggatcat

SEQ ID NO: 640796 - DNA, 15 bp, Homo sapiens
ggcgggtggatcatg

SEQ ID NO: 640797 - DNA, 15 bp, Homo sapiens
gcgggtggatcatga

SEQ ID NO: 640798 - DNA, 15 bp, Homo sapiens
cgggtggatcatgag

SEQ ID NO: 640799 - DNA, 15 bp, Homo sapiens
gggtggatcatgagg

SEQ ID NO: 640800 - DNA, 15 bp, Homo sapiens
ggtggatcatgaggt

SEQ ID NO: 640801 - DNA, 15 bp, Homo sapiens
gtggatcatgaggtc

SEQ ID NO: 640802 - DNA, 15 bp, Homo sapiens
tggatcatgaggtca

SEQ ID NO: 640803 - DNA, 15 bp, Homo sapiens
ggatcatgaggtcag

SEQ ID NO: 640804 - DNA, 15 bp, Homo sapiens
gatcatgaggtcagg

SEQ ID NO: 640805 - DNA, 15 bp, Homo sapiens
atcatgaggtcagga

SEQ ID NO: 640806 - DNA, 15 bp, Homo sapiens
tcatgaggtcaggag

SEQ ID NO: 640807 - DNA, 15 bp, Homo sapiens
catgaggtcaggagt

SEQ ID NO: 640808 - DNA, 15 bp, Homo sapiens
atgaggtcaggagtt

SEQ ID NO: 640809 - DNA, 15 bp, Homo sapiens
tgaggtcaggagttc

SEQ ID NO: 640810 - DNA, 15 bp, Homo sapiens
gaggtcaggagttcg

SEQ ID NO: 640811 - DNA, 15 bp, Homo sapiens
ccagcctggccaatg

SEQ ID NO: 640812 - DNA, 15 bp, Homo sapiens
cagcctggccaatgt

SEQ ID NO: 640813 - DNA, 15 bp, Homo sapiens
agcctggccaatgtg

SEQ ID NO: 640814 - DNA, 15 bp, Homo sapiens
gcctggccaatgtgg

SEQ ID NO: 640815 - DNA, 15 bp, Homo sapiens
cctggccaatgtggt

SEQ ID NO: 640816 - DNA, 15 bp, Homo sapiens
ctggccaatgtggtg

SEQ ID NO: 640817 - DNA, 15 bp, Homo sapiens
tggccaatgtggtga

SEQ ID NO: 640818 - DNA, 15 bp, Homo sapiens
ggccaatgtggtgaa

SEQ ID NO: 640819 - DNA, 15 bp, Homo sapiens
gccaatgtggtgaaa

SEQ ID NO: 640820 - DNA, 15 bp, Homo sapiens
ccaatgtggtgaaac

SEQ ID NO: 640821 - DNA, 15 bp, Homo sapiens
caatgtggtgaaacc

SEQ ID NO: 640822 - DNA, 15 bp, Homo sapiens
aatgtggtgaaaccc

SEQ ID NO: 640823 - DNA, 15 bp, Homo sapiens
atgtggtgaaacccc

SEQ ID NO: 640824 - DNA, 15 bp, Homo sapiens
tgtggtgaaaccccg

SEQ ID NO: 640825 - DNA, 15 bp, Homo sapiens
gtggtgaaaccccgt

SEQ ID NO: 640826 - DNA, 15 bp, Homo sapiens
tggtgaaaccccgtc

SEQ ID NO: 640827 - DNA, 15 bp, Homo sapiens
gtctctactaaaaaa

SEQ ID NO: 640828 - DNA, 15 bp, Homo sapiens
tctctactaaaaaaa

SEQ ID NO: 640829 - DNA, 15 bp, Homo sapiens
ctctactaaaaaaat

SEQ ID NO: 640830 - DNA, 15 bp, Homo sapiens
tctactaaaaaaata

SEQ ID NO: 640831 - DNA, 15 bp, Homo sapiens
ctactaaaaaaatac

SEQ ID NO: 640832 - DNA, 15 bp, Homo sapiens
tactaaaaaaataca

SEQ ID NO: 640833 - DNA, 15 bp, Homo sapiens
actaaaaaaatacaa

SEQ ID NO: 640834 - DNA, 15 bp, Homo sapiens
ctaaaaaaatacaaa

SEQ ID NO: 640835 - DNA, 15 bp, Homo sapiens
taaaaaaatacaaaa

SEQ ID NO: 640836 - DNA, 15 bp, Homo sapiens
aaaaaaatacaaaaa

SEQ ID NO: 640837 - DNA, 15 bp, Homo sapiens
aaaaaatacaaaaat

SEQ ID NO: 640838 - DNA, 15 bp, Homo sapiens
aaaatacaaaaattc

SEQ ID NO: 640839 - DNA, 15 bp, Homo sapiens
aaatacaaaaattcg

SEQ ID NO: 640840 - DNA, 15 bp, Homo sapiens
aatacaaaaattcgc

SEQ ID NO: 640841 - DNA, 15 bp, Homo sapiens
atacaaaaattcgca

SEQ ID NO: 640842 - DNA, 15 bp, Homo sapiens
tacaaaaattcgcag

SEQ ID NO: 640843 - DNA, 15 bp, Homo sapiens
acaaaaattcgcagg

SEQ ID NO: 640844 - DNA, 15 bp, Homo sapiens
caaaaattcgcaggg

SEQ ID NO: 640845 - DNA, 15 bp, Homo sapiens
aaaaattcgcagggc

SEQ ID NO: 640846 - DNA, 15 bp, Homo sapiens
aaaattcgcagggca

SEQ ID NO: 640847 - DNA, 15 bp, Homo sapiens
aaattcgcagggcat

SEQ ID NO: 640848 - DNA, 15 bp, Homo sapiens
aattcgcagggcata

SEQ ID NO: 640849 - DNA, 15 bp, Homo sapiens
attcgcagggcatag

SEQ ID NO: 640850 - DNA, 15 bp, Homo sapiens
ttcgcagggcatagt

SEQ ID NO: 640851 - DNA, 15 bp, Homo sapiens
tcgcagggcatagtg

SEQ ID NO: 640852 - DNA, 15 bp, Homo sapiens
cgcagggcatagtgg

SEQ ID NO: 640853 - DNA, 15 bp, Homo sapiens
gcagggcatagtggc

SEQ ID NO: 640854 - DNA, 15 bp, Homo sapiens
cagggcatagtggca

SEQ ID NO: 640855 - DNA, 15 bp, Homo sapiens
agggcatagtggcat

SEQ ID NO: 640856 - DNA, 15 bp, Homo sapiens
gggcatagtggcata

SEQ ID NO: 640857 - DNA, 15 bp, Homo sapiens
ggcatagtggcatac

SEQ ID NO: 640858 - DNA, 15 bp, Homo sapiens
gcatagtggcataca

SEQ ID NO: 640859 - DNA, 15 bp, Homo sapiens
catagtggcatacac

SEQ ID NO: 640860 - DNA, 15 bp, Homo sapiens
atagtggcatacacc

SEQ ID NO: 640861 - DNA, 15 bp, Homo sapiens
tagtggcatacacct

SEQ ID NO: 640862 - DNA, 15 bp, Homo sapiens
agtggcatacacctg

SEQ ID NO: 640863 - DNA, 15 bp, Homo sapiens
gtggcatacacctgt

SEQ ID NO: 640864 - DNA, 15 bp, Homo sapiens
tggcatacacctgta

SEQ ID NO: 640865 - DNA, 15 bp, Homo sapiens
ggcatacacctgtaa

SEQ ID NO: 640866 - DNA, 15 bp, Homo sapiens
gcatacacctgtaat

SEQ ID NO: 640867 - DNA, 15 bp, Homo sapiens
catacacctgtaatc

SEQ ID NO: 640868 - DNA, 15 bp, Homo sapiens
atacacctgtaatcc

SEQ ID NO: 640869 - DNA, 15 bp, Homo sapiens
tacacctgtaatcct

SEQ ID NO: 640870 - DNA, 15 bp, Homo sapiens
acacctgtaatcctc

SEQ ID NO: 640871 - DNA, 15 bp, Homo sapiens
cacctgtaatcctcg

SEQ ID NO: 640872 - DNA, 15 bp, Homo sapiens
acctgtaatcctcgc

SEQ ID NO: 640873 - DNA, 15 bp, Homo sapiens
cctgtaatcctcgct

SEQ ID NO: 640874 - DNA, 15 bp, Homo sapiens
ctgtaatcctcgcta

SEQ ID NO: 640875 - DNA, 15 bp, Homo sapiens
tgtaatcctcgctac

SEQ ID NO: 640876 - DNA, 15 bp, Homo sapiens
gtaatcctcgctact

SEQ ID NO: 640877 - DNA, 15 bp, Homo sapiens
taatcctcgctactc

SEQ ID NO: 640878 - DNA, 15 bp, Homo sapiens
aatcctcgctactca

SEQ ID NO: 640879 - DNA, 15 bp, Homo sapiens
atcctcgctactcag

SEQ ID NO: 640880 - DNA, 15 bp, Homo sapiens
tcctcgctactcagg

SEQ ID NO: 640881 - DNA, 15 bp, Homo sapiens
cctcgctactcagga

SEQ ID NO: 640882 - DNA, 15 bp, Homo sapiens
ctcgctactcaggag

SEQ ID NO: 640883 - DNA, 15 bp, Homo sapiens
tcgctactcaggagg

SEQ ID NO: 640884 - DNA, 15 bp, Homo sapiens
cgctactcaggaggc

SEQ ID NO: 640885 - DNA, 15 bp, Homo sapiens
gaggcaggagaatcg

SEQ ID NO: 640886 - DNA, 15 bp, Homo sapiens
aggcaggagaatcgc

SEQ ID NO: 640887 - DNA, 15 bp, Homo sapiens
ggcaggagaatcgct

SEQ ID NO: 640888 - DNA, 15 bp, Homo sapiens
gcaggagaatcgctt

SEQ ID NO: 640889 - DNA, 15 bp, Homo sapiens
caggagaatcgcttg

SEQ ID NO: 640890 - DNA, 15 bp, Homo sapiens
aggagaatcgcttga

SEQ ID NO: 640891 - DNA, 15 bp, Homo sapiens
ggagaatcgcttgaa

SEQ ID NO: 640892 - DNA, 15 bp, Homo sapiens
gagaatcgcttgaac

SEQ ID NO: 640893 - DNA, 15 bp, Homo sapiens
agaatcgcttgaacc

SEQ ID NO: 640894 - DNA, 15 bp, Homo sapiens
gaatcgcttgaacct

SEQ ID NO: 640895 - DNA, 15 bp, Homo sapiens
aatcgcttgaacctg

SEQ ID NO: 640896 - DNA, 15 bp, Homo sapiens
atcgcttgaacctgg

SEQ ID NO: 640897 - DNA, 15 bp, Homo sapiens
tcgcttgaacctggg

SEQ ID NO: 640898 - DNA, 15 bp, Homo sapiens
cgcttgaacctggga

SEQ ID NO: 640899 - DNA, 15 bp, Homo sapiens
gcttgaacctgggag

SEQ ID NO: 640900 - DNA, 15 bp, Homo sapiens
cttgaacctgggagt

SEQ ID NO: 640901 - DNA, 15 bp, Homo sapiens
ttgaacctgggagtc

SEQ ID NO: 640902 - DNA, 15 bp, Homo sapiens
tgaacctgggagtcg

SEQ ID NO: 640903 - DNA, 15 bp, Homo sapiens
gaacctgggagtcgg

SEQ ID NO: 640904 - DNA, 15 bp, Homo sapiens
aacctgggagtcgga

SEQ ID NO: 640905 - DNA, 15 bp, Homo sapiens
acctgggagtcggag

SEQ ID NO: 640906 - DNA, 15 bp, Homo sapiens
cctgggagtcggagg

SEQ ID NO: 640907 - DNA, 15 bp, Homo sapiens
ctgggagtcggaggt

SEQ ID NO: 640908 - DNA, 15 bp, Homo sapiens
tgggagtcggaggtt

SEQ ID NO: 640909 - DNA, 15 bp, Homo sapiens
gggagtcggaggttg

SEQ ID NO: 640910 - DNA, 15 bp, Homo sapiens
ggagtcggaggttgc

SEQ ID NO: 640911 - DNA, 15 bp, Homo sapiens
gagtcggaggttgca

SEQ ID NO: 640912 - DNA, 15 bp, Homo sapiens
agtcggaggttgcag

SEQ ID NO: 640913 - DNA, 15 bp, Homo sapiens
gtcggaggttgcagt

SEQ ID NO: 640914 - DNA, 15 bp, Homo sapiens
tcggaggttgcagtg

SEQ ID NO: 640915 - DNA, 15 bp, Homo sapiens
cggaggttgcagtga

SEQ ID NO: 640916 - DNA, 15 bp, Homo sapiens
aggttgcagtgagct

SEQ ID NO: 640917 - DNA, 15 bp, Homo sapiens
ggttgcagtgagctg

SEQ ID NO: 640918 - DNA, 15 bp, Homo sapiens
gttgcagtgagctga

SEQ ID NO: 640919 - DNA, 15 bp, Homo sapiens
ttgcagtgagctgag

SEQ ID NO: 640920 - DNA, 15 bp, Homo sapiens
tgcagtgagctgaga

SEQ ID NO: 640921 - DNA, 15 bp, Homo sapiens
gcagtgagctgagat

SEQ ID NO: 640922 - DNA, 15 bp, Homo sapiens
cagtgagctgagatc

SEQ ID NO: 640923 - DNA, 15 bp, Homo sapiens
agtgagctgagatca

SEQ ID NO: 640924 - DNA, 15 bp, Homo sapiens
gtgagctgagatcac

SEQ ID NO: 640925 - DNA, 15 bp, Homo sapiens
tgagctgagatcacg

SEQ ID NO: 640926 - DNA, 15 bp, Homo sapiens
gagctgagatcacgc

SEQ ID NO: 640927 - DNA, 15 bp, Homo sapiens
agctgagatcacgcc

SEQ ID NO: 640928 - DNA, 15 bp, Homo sapiens
gctgagatcacgcca

SEQ ID NO: 640929 - DNA, 15 bp, Homo sapiens
ctgagatcacgccac

SEQ ID NO: 640930 - DNA, 15 bp, Homo sapiens
tgagatcacgccacc

SEQ ID NO: 640931 - DNA, 15 bp, Homo sapiens
gagatcacgccaccg

SEQ ID NO: 640932 - DNA, 15 bp, Homo sapiens
agatcacgccaccgc

SEQ ID NO: 640933 - DNA, 15 bp, Homo sapiens
gatcacgccaccgca

SEQ ID NO: 640934 - DNA, 15 bp, Homo sapiens
atcacgccaccgcac

SEQ ID NO: 640935 - DNA, 15 bp, Homo sapiens
tcacgccaccgcact

SEQ ID NO: 640936 - DNA, 15 bp, Homo sapiens
cacgccaccgcactc

SEQ ID NO: 640937 - DNA, 15 bp, Homo sapiens
acgccaccgcactcc

SEQ ID NO: 640938 - DNA, 15 bp, Homo sapiens
cgccaccgcactcca

SEQ ID NO: 640939 - DNA, 15 bp, Homo sapiens
gccaccgcactccag

SEQ ID NO: 640940 - DNA, 15 bp, Homo sapiens
ccaccgcactccagc

SEQ ID NO: 640941 - DNA, 15 bp, Homo sapiens
caccgcactccagcc

SEQ ID NO: 640942 - DNA, 15 bp, Homo sapiens
accgcactccagcct

SEQ ID NO: 640943 - DNA, 15 bp, Homo sapiens
ccgcactccagcctg

SEQ ID NO: 640944 - DNA, 15 bp, Homo sapiens
cgcactccagcctgg

SEQ ID NO: 640945 - DNA, 15 bp, Homo sapiens
cactccagcctgggt

SEQ ID NO: 640946 - DNA, 15 bp, Homo sapiens
actccagcctgggtg

SEQ ID NO: 640947 - DNA, 15 bp, Homo sapiens
ctccagcctgggtga

SEQ ID NO: 640948 - DNA, 15 bp, Homo sapiens
tccagcctgggtgac

SEQ ID NO: 640949 - DNA, 15 bp, Homo sapiens
ccagcctgggtgaca

SEQ ID NO: 640950 - DNA, 15 bp, Homo sapiens
cagcctgggtgacag

SEQ ID NO: 640951 - DNA, 15 bp, Homo sapiens
agcctgggtgacaga

SEQ ID NO: 640952 - DNA, 15 bp, Homo sapiens
gcctgggtgacagag

SEQ ID NO: 640953 - DNA, 15 bp, Homo sapiens
cctgggtgacagagc

SEQ ID NO: 640954 - DNA, 15 bp, Homo sapiens
ctgggtgacagagcg

SEQ ID NO: 640955 - DNA, 15 bp, Homo sapiens
tgggtgacagagcga

SEQ ID NO: 640956 - DNA, 15 bp, Homo sapiens
gggtgacagagcgag

SEQ ID NO: 640957 - DNA, 15 bp, Homo sapiens
ggtgacagagcgaga

SEQ ID NO: 640958 - DNA, 15 bp, Homo sapiens
gtgacagagcgagac

SEQ ID NO: 640959 - DNA, 15 bp, Homo sapiens
tgacagagcgagact

SEQ ID NO: 640960 - DNA, 15 bp, Homo sapiens
cagagcgagactcca

SEQ ID NO: 640961 - DNA, 15 bp, Homo sapiens
agagcgagactccat

SEQ ID NO: 640962 - DNA, 15 bp, Homo sapiens
gagcgagactccatc

SEQ ID NO: 640963 - DNA, 15 bp, Homo sapiens
agcgagactccatct

SEQ ID NO: 640964 - DNA, 15 bp, Homo sapiens
gcgagactccatctc

SEQ ID NO: 640965 - DNA, 15 bp, Homo sapiens
cgagactccatctca

SEQ ID NO: 640966 - DNA, 15 bp, Homo sapiens
gagactccatctcag

SEQ ID NO: 640967 - DNA, 15 bp, Homo sapiens
agactccatctcagg

SEQ ID NO: 640968 - DNA, 15 bp, Homo sapiens
gactccatctcagga

SEQ ID NO: 640969 - DNA, 15 bp, Homo sapiens
actccatctcaggaa

SEQ ID NO: 640970 - DNA, 15 bp, Homo sapiens
ctccatctcaggaaa

SEQ ID NO: 640971 - DNA, 15 bp, Homo sapiens
tccatctcaggaaat

SEQ ID NO: 640972 - DNA, 15 bp, Homo sapiens
ccatctcaggaaata

SEQ ID NO: 640973 - DNA, 15 bp, Homo sapiens
catctcaggaaataa

SEQ ID NO: 640974 - DNA, 15 bp, Homo sapiens
atctcaggaaataat

SEQ ID NO: 640975 - DNA, 15 bp, Homo sapiens
tctcaggaaataata

SEQ ID NO: 640976 - DNA, 15 bp, Homo sapiens
ctcaggaaataataa

SEQ ID NO: 640977 - DNA, 15 bp, Homo sapiens
tcaggaaataataat

SEQ ID NO: 640978 - DNA, 15 bp, Homo sapiens
caggaaataataata

SEQ ID NO: 640979 - DNA, 15 bp, Homo sapiens
aggaaataataataa

SEQ ID NO: 640980 - DNA, 15 bp, Homo sapiens
ggaaataataataat

SEQ ID NO: 640981 - DNA, 15 bp, Homo sapiens
gaaataataataata

SEQ ID NO: 640982 - DNA, 15 bp, Homo sapiens
aaataataataataa

SEQ ID NO: 640983 - DNA, 15 bp, Homo sapiens
aataataataataat

SEQ ID NO: 640984 - DNA, 15 bp, Homo sapiens
ataataataataata

SEQ ID NO: 640985 - DNA, 15 bp, Homo sapiens
taataataataatag

SEQ ID NO: 640986 - DNA, 15 bp, Homo sapiens
aataataataatagt

SEQ ID NO: 640987 - DNA, 15 bp, Homo sapiens
ataataataatagta

SEQ ID NO: 640988 - DNA, 15 bp, Homo sapiens
taataataatagtaa

SEQ ID NO: 640989 - DNA, 15 bp, Homo sapiens
aataataatagtaat

SEQ ID NO: 640990 - DNA, 15 bp, Homo sapiens
ataataatagtaatt

SEQ ID NO: 640991 - DNA, 15 bp, Homo sapiens
taataatagtaattc

SEQ ID NO: 640992 - DNA, 15 bp, Homo sapiens
aataatagtaattct

SEQ ID NO: 640993 - DNA, 15 bp, Homo sapiens
ataatagtaattctg

SEQ ID NO: 640994 - DNA, 15 bp, Homo sapiens
taatagtaattctga

SEQ ID NO: 640995 - DNA, 15 bp, Homo sapiens
aatagtaattctgac

SEQ ID NO: 640996 - DNA, 15 bp, Homo sapiens
atagtaattctgaca

SEQ ID NO: 640997 - DNA, 15 bp, Homo sapiens
tagtaattctgacaa

SEQ ID NO: 640998 - DNA, 15 bp, Homo sapiens
agtaattctgacaag

SEQ ID NO: 640999 - DNA, 15 bp, Homo sapiens
gtaattctgacaagg

SEQ ID NO: 641000 - DNA, 15 bp, Homo sapiens
taattctgacaaggt

SEQ ID NO: 641001 - DNA, 15 bp, Homo sapiens
aattctgacaaggtg

SEQ ID NO: 641002 - DNA, 15 bp, Homo sapiens
attctgacaaggtgc

SEQ ID NO: 641003 - DNA, 15 bp, Homo sapiens
ttctgacaaggtgca

SEQ ID NO: 641004 - DNA, 15 bp, Homo sapiens
tctgacaaggtgcag

SEQ ID NO: 641005 - DNA, 15 bp, Homo sapiens
ctgacaaggtgcagt

SEQ ID NO: 641006 - DNA, 15 bp, Homo sapiens
tgacaaggtgcagtg

SEQ ID NO: 641007 - DNA, 15 bp, Homo sapiens
gacaaggtgcagtgg

SEQ ID NO: 641008 - DNA, 15 bp, Homo sapiens
acaaggtgcagtggc

SEQ ID NO: 641009 - DNA, 15 bp, Homo sapiens
caaggtgcagtggct

SEQ ID NO: 641010 - DNA, 15 bp, Homo sapiens
aaggtgcagtggctt

SEQ ID NO: 641011 - DNA, 15 bp, Homo sapiens
aggtgcagtggctta

SEQ ID NO: 641012 - DNA, 15 bp, Homo sapiens
ggtgcagtggcttac

SEQ ID NO: 641013 - DNA, 15 bp, Homo sapiens
gtgcagtggcttaca

SEQ ID NO: 641014 - DNA, 15 bp, Homo sapiens
tgcagtggcttacac

SEQ ID NO: 641015 - DNA, 15 bp, Homo sapiens
gcagtggcttacacc

SEQ ID NO: 641016 - DNA, 15 bp, Homo sapiens
cagtggcttacacct

SEQ ID NO: 641017 - DNA, 15 bp, Homo sapiens
agtggcttacacctg

SEQ ID NO: 641018 - DNA, 15 bp, Homo sapiens
gtggcttacacctgt

SEQ ID NO: 641019 - DNA, 15 bp, Homo sapiens
tggcttacacctgta

SEQ ID NO: 641020 - DNA, 15 bp, Homo sapiens
ggcttacacctgtaa

SEQ ID NO: 641021 - DNA, 15 bp, Homo sapiens
gcttacacctgtaat

SEQ ID NO: 641022 - DNA, 15 bp, Homo sapiens
cttacacctgtaatc

SEQ ID NO: 641023 - DNA, 15 bp, Homo sapiens
ttacacctgtaatcc

SEQ ID NO: 641024 - DNA, 15 bp, Homo sapiens
tacacctgtaatccc

SEQ ID NO: 641025 - DNA, 15 bp, Homo sapiens
acacctgtaatccca

SEQ ID NO: 641026 - DNA, 15 bp, Homo sapiens
cacctgtaatcccag

SEQ ID NO: 641027 - DNA, 15 bp, Homo sapiens
acctgtaatcccagc

SEQ ID NO: 641028 - DNA, 15 bp, Homo sapiens
catcattgtgcagaa

SEQ ID NO: 641029 - DNA, 15 bp, Homo sapiens
atcattgtgcagaac

SEQ ID NO: 641030 - DNA, 15 bp, Homo sapiens
tcattgtgcagaaca

SEQ ID NO: 641031 - DNA, 15 bp, Homo sapiens
cattgtgcagaacaa

SEQ ID NO: 641032 - DNA, 15 bp, Homo sapiens
attgtgcagaacaaa

SEQ ID NO: 641033 - DNA, 15 bp, Homo sapiens
ttgtgcagaacaaaa

SEQ ID NO: 641034 - DNA, 15 bp, Homo sapiens
tgtgcagaacaaaaa

SEQ ID NO: 641035 - DNA, 15 bp, Homo sapiens
gtgcagaacaaaaaa

SEQ ID NO: 641036 - DNA, 15 bp, Homo sapiens
tgcagaacaaaaaag

SEQ ID NO: 641037 - DNA, 15 bp, Homo sapiens
gcagaacaaaaaagt

SEQ ID NO: 641038 - DNA, 15 bp, Homo sapiens
cagaacaaaaaagta

SEQ ID NO: 641039 - DNA, 15 bp, Homo sapiens
agaacaaaaaagtat

SEQ ID NO: 641040 - DNA, 15 bp, Homo sapiens
gaacaaaaaagtatt

SEQ ID NO: 641041 - DNA, 15 bp, Homo sapiens
aacaaaaaagtattc

SEQ ID NO: 641042 - DNA, 15 bp, Homo sapiens
acaaaaaagtattct

SEQ ID NO: 641043 - DNA, 15 bp, Homo sapiens
caaaaaagtattctg

SEQ ID NO: 641044 - DNA, 15 bp, Homo sapiens
aaaaaagtattctgt

SEQ ID NO: 641045 - DNA, 15 bp, Homo sapiens
aaaaagtattctgtt

SEQ ID NO: 641046 - DNA, 15 bp, Homo sapiens
aaaagtattctgtta

SEQ ID NO: 641047 - DNA, 15 bp, Homo sapiens
aaagtattctgttat

SEQ ID NO: 641048 - DNA, 15 bp, Homo sapiens
aagtattctgttatt

SEQ ID NO: 641049 - DNA, 15 bp, Homo sapiens
agtattctgttattt

SEQ ID NO: 641050 - DNA, 15 bp, Homo sapiens
gtattctgttatttg

SEQ ID NO: 641051 - DNA, 15 bp, Homo sapiens
tattctgttatttgg

SEQ ID NO: 641052 - DNA, 15 bp, Homo sapiens
attctgttatttgga

SEQ ID NO: 641053 - DNA, 15 bp, Homo sapiens
ttctgttatttggag

SEQ ID NO: 641054 - DNA, 15 bp, Homo sapiens
tctgttatttggaga

SEQ ID NO: 641055 - DNA, 15 bp, Homo sapiens
ctgttatttggagaa

SEQ ID NO: 641056 - DNA, 15 bp, Homo sapiens
tgttatttggagaaa

SEQ ID NO: 641057 - DNA, 15 bp, Homo sapiens
gttatttggagaaaa

SEQ ID NO: 641058 - DNA, 15 bp, Homo sapiens
ttatttggagaaaat

SEQ ID NO: 641059 - DNA, 15 bp, Homo sapiens
tatttggagaaaatc

SEQ ID NO: 641060 - DNA, 15 bp, Homo sapiens
atttggagaaaatca

SEQ ID NO: 641061 - DNA, 15 bp, Homo sapiens
tttggagaaaatcac

SEQ ID NO: 641062 - DNA, 15 bp, Homo sapiens
ttggagaaaatcaca

SEQ ID NO: 641063 - DNA, 15 bp, Homo sapiens
tggagaaaatcacaa

SEQ ID NO: 641064 - DNA, 15 bp, Homo sapiens
ggagaaaatcacaac

SEQ ID NO: 641065 - DNA, 15 bp, Homo sapiens
gagaaaatcacaaca

SEQ ID NO: 641066 - DNA, 15 bp, Homo sapiens
agaaaatcacaacaa

SEQ ID NO: 641067 - DNA, 15 bp, Homo sapiens
gaaaatcacaacaac

SEQ ID NO: 641068 - DNA, 15 bp, Homo sapiens
aaaatcacaacaacc

SEQ ID NO: 641069 - DNA, 15 bp, Homo sapiens
aaatcacaacaacca

SEQ ID NO: 641070 - DNA, 15 bp, Homo sapiens
aatcacaacaaccaa

SEQ ID NO: 641071 - DNA, 15 bp, Homo sapiens
atcacaacaaccaaa

SEQ ID NO: 641072 - DNA, 15 bp, Homo sapiens
tcacaacaaccaaaa

SEQ ID NO: 641073 - DNA, 15 bp, Homo sapiens
cacaacaaccaaaaa

SEQ ID NO: 641074 - DNA, 15 bp, Homo sapiens
acaacaaccaaaaaa

SEQ ID NO: 641075 - DNA, 15 bp, Homo sapiens
caacaaccaaaaaaa

SEQ ID NO: 641076 - DNA, 15 bp, Homo sapiens
aacaaccaaaaaaat

SEQ ID NO: 641077 - DNA, 15 bp, Homo sapiens
acaaccaaaaaaata

SEQ ID NO: 641078 - DNA, 15 bp, Homo sapiens
caaccaaaaaaataa

SEQ ID NO: 641079 - DNA, 15 bp, Homo sapiens
aaccaaaaaaataag

SEQ ID NO: 641080 - DNA, 15 bp, Homo sapiens
accaaaaaaataaga

SEQ ID NO: 641081 - DNA, 15 bp, Homo sapiens
ccaaaaaaataagat

SEQ ID NO: 641082 - DNA, 15 bp, Homo sapiens
caaaaaaataagatg

SEQ ID NO: 641083 - DNA, 15 bp, Homo sapiens
aaaaaaataagatgt

SEQ ID NO: 641084 - DNA, 15 bp, Homo sapiens
aaaaaataagatgta

SEQ ID NO: 641085 - DNA, 15 bp, Homo sapiens
aaaaataagatgtac

SEQ ID NO: 641086 - DNA, 15 bp, Homo sapiens
aaaataagatgtact

SEQ ID NO: 641087 - DNA, 15 bp, Homo sapiens
aaataagatgtacta

SEQ ID NO: 641088 - DNA, 15 bp, Homo sapiens
aataagatgtactag

SEQ ID NO: 641089 - DNA, 15 bp, Homo sapiens
ataagatgtactaga

SEQ ID NO: 641090 - DNA, 15 bp, Homo sapiens
taagatgtactagat

SEQ ID NO: 641091 - DNA, 15 bp, Homo sapiens
aagatgtactagatg

SEQ ID NO: 641092 - DNA, 15 bp, Homo sapiens
agatgtactagatgg

SEQ ID NO: 641093 - DNA, 15 bp, Homo sapiens
gatgtactagatggt

SEQ ID NO: 641094 - DNA, 15 bp, Homo sapiens
atgtactagatggtg

SEQ ID NO: 641095 - DNA, 15 bp, Homo sapiens
tgtactagatggtga

SEQ ID NO: 641096 - DNA, 15 bp, Homo sapiens
gtactagatggtgaa

SEQ ID NO: 641097 - DNA, 15 bp, Homo sapiens
tactagatggtgaaa

SEQ ID NO: 641098 - DNA, 15 bp, Homo sapiens
actagatggtgaaac

SEQ ID NO: 641099 - DNA, 15 bp, Homo sapiens
ctagatggtgaaaca

SEQ ID NO: 641100 - DNA, 15 bp, Homo sapiens
tagatggtgaaacat

SEQ ID NO: 641101 - DNA, 15 bp, Homo sapiens
agatggtgaaacata

SEQ ID NO: 641102 - DNA, 15 bp, Homo sapiens
gatggtgaaacatag

SEQ ID NO: 641103 - DNA, 15 bp, Homo sapiens
atggtgaaacataga

SEQ ID NO: 641104 - DNA, 15 bp, Homo sapiens
tggtgaaacatagaa

SEQ ID NO: 641105 - DNA, 15 bp, Homo sapiens
ggtgaaacatagaat

SEQ ID NO: 641106 - DNA, 15 bp, Homo sapiens
gtgaaacatagaata

SEQ ID NO: 641107 - DNA, 15 bp, Homo sapiens
tgaaacatagaataa

SEQ ID NO: 641108 - DNA, 15 bp, Homo sapiens
gaaacatagaataaa

SEQ ID NO: 641109 - DNA, 15 bp, Homo sapiens
aaacatagaataaaa

SEQ ID NO: 641110 - DNA, 15 bp, Homo sapiens
aacatagaataaaaa

SEQ ID NO: 641111 - DNA, 15 bp, Homo sapiens
acatagaataaaaac

SEQ ID NO: 641112 - DNA, 15 bp, Homo sapiens
catagaataaaaaca

SEQ ID NO: 641113 - DNA, 15 bp, Homo sapiens
atagaataaaaacaa

SEQ ID NO: 641114 - DNA, 15 bp, Homo sapiens
tagaataaaaacaac

SEQ ID NO: 641115 - DNA, 15 bp, Homo sapiens
agaataaaaacaaca

SEQ ID NO: 641116 - DNA, 15 bp, Homo sapiens
gaataaaaacaacaa

SEQ ID NO: 641117 - DNA, 15 bp, Homo sapiens
aataaaaacaacaaa

SEQ ID NO: 641118 - DNA, 15 bp, Homo sapiens
ataaaaacaacaaaa

SEQ ID NO: 641119 - DNA, 15 bp, Homo sapiens
taaaaacaacaaaaa

SEQ ID NO: 641120 - DNA, 15 bp, Homo sapiens
aaaaacaacaaaaat

SEQ ID NO: 641121 - DNA, 15 bp, Homo sapiens
aaaacaacaaaaata

SEQ ID NO: 641122 - DNA, 15 bp, Homo sapiens
aaacaacaaaaatac

SEQ ID NO: 641123 - DNA, 15 bp, Homo sapiens
aacaacaaaaataca

SEQ ID NO: 641124 - DNA, 15 bp, Homo sapiens
acaacaaaaatacat

SEQ ID NO: 641125 - DNA, 15 bp, Homo sapiens
caacaaaaatacatt

SEQ ID NO: 641126 - DNA, 15 bp, Homo sapiens
aacaaaaatacattt

SEQ ID NO: 641127 - DNA, 15 bp, Homo sapiens
acaaaaatacattta

SEQ ID NO: 641128 - DNA, 15 bp, Homo sapiens
caaaaatacatttat

SEQ ID NO: 641129 - DNA, 15 bp, Homo sapiens
aaaaatacatttatt

SEQ ID NO: 641130 - DNA, 15 bp, Homo sapiens
aaaatacatttatta

SEQ ID NO: 641131 - DNA, 15 bp, Homo sapiens
aaatacatttattac

SEQ ID NO: 641132 - DNA, 15 bp, Homo sapiens
aatacatttattaca

SEQ ID NO: 641133 - DNA, 15 bp, Homo sapiens
atacatttattacat

SEQ ID NO: 641134 - DNA, 15 bp, Homo sapiens
tacatttattacatt

SEQ ID NO: 641135 - DNA, 15 bp, Homo sapiens
acatttattacattt

SEQ ID NO: 641136 - DNA, 15 bp, Homo sapiens
catttattacatttc

SEQ ID NO: 641137 - DNA, 15 bp, Homo sapiens
atttattacatttct

SEQ ID NO: 641138 - DNA, 15 bp, Homo sapiens
tttattacatttctt

SEQ ID NO: 641139 - DNA, 15 bp, Homo sapiens
ttattacatttcttt

SEQ ID NO: 641140 - DNA, 15 bp, Homo sapiens
tattacatttctttt

SEQ ID NO: 641141 - DNA, 15 bp, Homo sapiens
attacatttcttttg

SEQ ID NO: 641142 - DNA, 15 bp, Homo sapiens
ttacatttcttttga

SEQ ID NO: 641143 - DNA, 15 bp, Homo sapiens
tacatttcttttgaa

SEQ ID NO: 641144 - DNA, 15 bp, Homo sapiens
acatttcttttgaaa

SEQ ID NO: 641145 - DNA, 15 bp, Homo sapiens
catttcttttgaaag

SEQ ID NO: 641146 - DNA, 15 bp, Homo sapiens
atttcttttgaaagt

SEQ ID NO: 641147 - DNA, 15 bp, Homo sapiens
tttcttttgaaagtt

SEQ ID NO: 641148 - DNA, 15 bp, Homo sapiens
ttcttttgaaagttg

SEQ ID NO: 641149 - DNA, 15 bp, Homo sapiens
tcttttgaaagttgg

SEQ ID NO: 641150 - DNA, 15 bp, Homo sapiens
cttttgaaagttgga

SEQ ID NO: 641151 - DNA, 15 bp, Homo sapiens
ttttgaaagttggaa

SEQ ID NO: 641152 - DNA, 15 bp, Homo sapiens
tttgaaagttggaaa

SEQ ID NO: 641153 - DNA, 15 bp, Homo sapiens
ttgaaagttggaaac

SEQ ID NO: 641154 - DNA, 15 bp, Homo sapiens
tgaaagttggaaact

SEQ ID NO: 641155 - DNA, 15 bp, Homo sapiens
gaaagttggaaactt

SEQ ID NO: 641156 - DNA, 15 bp, Homo sapiens
aaagttggaaacttc

SEQ ID NO: 641157 - DNA, 15 bp, Homo sapiens
aagttggaaacttca

SEQ ID NO: 641158 - DNA, 15 bp, Homo sapiens
agttggaaacttcac

SEQ ID NO: 641159 - DNA, 15 bp, Homo sapiens
gttggaaacttcaca

SEQ ID NO: 641160 - DNA, 15 bp, Homo sapiens
ttggaaacttcacaa

SEQ ID NO: 641161 - DNA, 15 bp, Homo sapiens
tggaaacttcacaat

SEQ ID NO: 641162 - DNA, 15 bp, Homo sapiens
ggaaacttcacaata

SEQ ID NO: 641163 - DNA, 15 bp, Homo sapiens
gaaacttcacaataa

SEQ ID NO: 641164 - DNA, 15 bp, Homo sapiens
aaacttcacaataaa

SEQ ID NO: 641165 - DNA, 15 bp, Homo sapiens
aacttcacaataaac

SEQ ID NO: 641166 - DNA, 15 bp, Homo sapiens
acttcacaataaact

SEQ ID NO: 641167 - DNA, 15 bp, Homo sapiens
cttcacaataaactc

SEQ ID NO: 641168 - DNA, 15 bp, Homo sapiens
ttcacaataaactcg

SEQ ID NO: 641169 - DNA, 15 bp, Homo sapiens
tcacaataaactcga

SEQ ID NO: 641170 - DNA, 15 bp, Homo sapiens
cacaataaactcgat

SEQ ID NO: 641171 - DNA, 15 bp, Homo sapiens
acaataaactcgata

SEQ ID NO: 641172 - DNA, 15 bp, Homo sapiens
caataaactcgatat

SEQ ID NO: 641173 - DNA, 15 bp, Homo sapiens
aataaactcgatata

SEQ ID NO: 641174 - DNA, 15 bp, Homo sapiens
ataaactcgatatac

SEQ ID NO: 641175 - DNA, 15 bp, Homo sapiens
taaactcgatataca

SEQ ID NO: 641176 - DNA, 15 bp, Homo sapiens
aaactcgatatacaa

SEQ ID NO: 641177 - DNA, 15 bp, Homo sapiens
aactcgatatacaaa

SEQ ID NO: 641178 - DNA, 15 bp, Homo sapiens
actcgatatacaaaa

SEQ ID NO: 641179 - DNA, 15 bp, Homo sapiens
ctcgatatacaaaaa

SEQ ID NO: 641180 - DNA, 15 bp, Homo sapiens
tcgatatacaaaaat

SEQ ID NO: 641181 - DNA, 15 bp, Homo sapiens
cgatatacaaaaatc

SEQ ID NO: 641182 - DNA, 15 bp, Homo sapiens
gatatacaaaaatcg

SEQ ID NO: 641183 - DNA, 15 bp, Homo sapiens
atatacaaaaatcgt

SEQ ID NO: 641184 - DNA, 15 bp, Homo sapiens
tatacaaaaatcgtt

SEQ ID NO: 641185 - DNA, 15 bp, Homo sapiens
atacaaaaatcgtta

SEQ ID NO: 641186 - DNA, 15 bp, Homo sapiens
tacaaaaatcgttat

SEQ ID NO: 641187 - DNA, 15 bp, Homo sapiens
acaaaaatcgttatg

SEQ ID NO: 641188 - DNA, 15 bp, Homo sapiens
caaaaatcgttatgt

SEQ ID NO: 641189 - DNA, 15 bp, Homo sapiens
aaaaatcgttatgta

SEQ ID NO: 641190 - DNA, 15 bp, Homo sapiens
aaaatcgttatgtaa

SEQ ID NO: 641191 - DNA, 15 bp, Homo sapiens
aaatcgttatgtaaa

SEQ ID NO: 641192 - DNA, 15 bp, Homo sapiens
aatcgttatgtaaac

SEQ ID NO: 641193 - DNA, 15 bp, Homo sapiens
atcgttatgtaaact

SEQ ID NO: 641194 - DNA, 15 bp, Homo sapiens
tcgttatgtaaactg

SEQ ID NO: 641195 - DNA, 15 bp, Homo sapiens
cgttatgtaaactgt

SEQ ID NO: 641196 - DNA, 15 bp, Homo sapiens
gttatgtaaactgta

SEQ ID NO: 641197 - DNA, 15 bp, Homo sapiens
ttatgtaaactgtat

SEQ ID NO: 641198 - DNA, 15 bp, Homo sapiens
tatgtaaactgtata

SEQ ID NO: 641199 - DNA, 15 bp, Homo sapiens
atgtaaactgtataa

SEQ ID NO: 641200 - DNA, 15 bp, Homo sapiens
tgtaaactgtataag

SEQ ID NO: 641201 - DNA, 15 bp, Homo sapiens
gtaaactgtataagc

SEQ ID NO: 641202 - DNA, 15 bp, Homo sapiens
taaactgtataagcc

SEQ ID NO: 641203 - DNA, 15 bp, Homo sapiens
aaactgtataagcct

SEQ ID NO: 641204 - DNA, 15 bp, Homo sapiens
aactgtataagcctg

SEQ ID NO: 641205 - DNA, 15 bp, Homo sapiens
actgtataagcctgg

SEQ ID NO: 641206 - DNA, 15 bp, Homo sapiens
ctgtataagcctggg

SEQ ID NO: 641207 - DNA, 15 bp, Homo sapiens
tgtataagcctgggt

SEQ ID NO: 641208 - DNA, 15 bp, Homo sapiens
gtataagcctgggtt

SEQ ID NO: 641209 - DNA, 15 bp, Homo sapiens
tataagcctgggttt

SEQ ID NO: 641210 - DNA, 15 bp, Homo sapiens
ataagcctgggtttc

SEQ ID NO: 641211 - DNA, 15 bp, Homo sapiens
taagcctgggtttcc

SEQ ID NO: 641212 - DNA, 15 bp, Homo sapiens
aagcctgggtttcct

SEQ ID NO: 641213 - DNA, 15 bp, Homo sapiens
agcctgggtttcctt

SEQ ID NO: 641214 - DNA, 15 bp, Homo sapiens
gcctgggtttcctta

SEQ ID NO: 641215 - DNA, 15 bp, Homo sapiens
cctgggtttccttat

SEQ ID NO: 641216 - DNA, 15 bp, Homo sapiens
ctgggtttccttatt

SEQ ID NO: 641217 - DNA, 15 bp, Homo sapiens
tgggtttccttattt

SEQ ID NO: 641218 - DNA, 15 bp, Homo sapiens
gggtttccttattta

SEQ ID NO: 641219 - DNA, 15 bp, Homo sapiens
ggtttccttatttat

SEQ ID NO: 641220 - DNA, 15 bp, Homo sapiens
gtttccttatttatg

SEQ ID NO: 641221 - DNA, 15 bp, Homo sapiens
tttccttatttatga

SEQ ID NO: 641222 - DNA, 15 bp, Homo sapiens
ttccttatttatgat

SEQ ID NO: 641223 - DNA, 15 bp, Homo sapiens
tccttatttatgata

SEQ ID NO: 641224 - DNA, 15 bp, Homo sapiens
ccttatttatgatac

SEQ ID NO: 641225 - DNA, 15 bp, Homo sapiens
cttatttatgataca

SEQ ID NO: 641226 - DNA, 15 bp, Homo sapiens
ttatttatgatacag

SEQ ID NO: 641227 - DNA, 15 bp, Homo sapiens
tatttatgatacaga

SEQ ID NO: 641228 - DNA, 15 bp, Homo sapiens
atttatgatacagag

SEQ ID NO: 641229 - DNA, 15 bp, Homo sapiens
tttatgatacagaga

SEQ ID NO: 641230 - DNA, 15 bp, Homo sapiens
ttatgatacagagat

SEQ ID NO: 641231 - DNA, 15 bp, Homo sapiens
tatgatacagagata

SEQ ID NO: 641232 - DNA, 15 bp, Homo sapiens
atgatacagagataa

SEQ ID NO: 641233 - DNA, 15 bp, Homo sapiens
tgatacagagataac

SEQ ID NO: 641234 - DNA, 15 bp, Homo sapiens
gatacagagataact

SEQ ID NO: 641235 - DNA, 15 bp, Homo sapiens
atacagagataactt

SEQ ID NO: 641236 - DNA, 15 bp, Homo sapiens
tacagagataacttc

SEQ ID NO: 641237 - DNA, 15 bp, Homo sapiens
acagagataacttct

SEQ ID NO: 641238 - DNA, 15 bp, Homo sapiens
cagagataacttctt

SEQ ID NO: 641239 - DNA, 15 bp, Homo sapiens
agagataacttcttg

SEQ ID NO: 641240 - DNA, 15 bp, Homo sapiens
gagataacttcttgg

SEQ ID NO: 641241 - DNA, 15 bp, Homo sapiens
agataacttcttggg

SEQ ID NO: 641242 - DNA, 15 bp, Homo sapiens
gataacttcttgggc

SEQ ID NO: 641243 - DNA, 15 bp, Homo sapiens
ataacttcttgggcc

SEQ ID NO: 641244 - DNA, 15 bp, Homo sapiens
taacttcttgggcca

SEQ ID NO: 641245 - DNA, 15 bp, Homo sapiens
aacttcttgggccat

SEQ ID NO: 641246 - DNA, 15 bp, Homo sapiens
acttcttgggccatt

SEQ ID NO: 641247 - DNA, 15 bp, Homo sapiens
cttcttgggccatta

SEQ ID NO: 641248 - DNA, 15 bp, Homo sapiens
ttcttgggccattac

SEQ ID NO: 641249 - DNA, 15 bp, Homo sapiens
tcttgggccattaca

SEQ ID NO: 641250 - DNA, 15 bp, Homo sapiens
cttgggccattacaa

SEQ ID NO: 641251 - DNA, 15 bp, Homo sapiens
ttgggccattacaat

SEQ ID NO: 641252 - DNA, 15 bp, Homo sapiens
tgggccattacaata

SEQ ID NO: 641253 - DNA, 15 bp, Homo sapiens
gggccattacaataa

SEQ ID NO: 641254 - DNA, 15 bp, Homo sapiens
ggccattacaataat

SEQ ID NO: 641255 - DNA, 15 bp, Homo sapiens
gccattacaataatt

SEQ ID NO: 641256 - DNA, 15 bp, Homo sapiens
ccattacaataatta

SEQ ID NO: 641257 - DNA, 15 bp, Homo sapiens
cattacaataattaa

SEQ ID NO: 641258 - DNA, 15 bp, Homo sapiens
attacaataattaaa

SEQ ID NO: 641259 - DNA, 15 bp, Homo sapiens
ttacaataattaaat

SEQ ID NO: 641260 - DNA, 15 bp, Homo sapiens
tacaataattaaata

SEQ ID NO: 641261 - DNA, 15 bp, Homo sapiens
acaataattaaatat

SEQ ID NO: 641262 - DNA, 15 bp, Homo sapiens
caataattaaatatg

SEQ ID NO: 641263 - DNA, 15 bp, Homo sapiens
aataattaaatatgt

SEQ ID NO: 641264 - DNA, 15 bp, Homo sapiens
ataattaaatatgta

SEQ ID NO: 641265 - DNA, 15 bp, Homo sapiens
taattaaatatgtat

SEQ ID NO: 641266 - DNA, 15 bp, Homo sapiens
aattaaatatgtatc

SEQ ID NO: 641267 - DNA, 15 bp, Homo sapiens
attaaatatgtatct

SEQ ID NO: 641268 - DNA, 15 bp, Homo sapiens
ttaaatatgtatctt

SEQ ID NO: 641269 - DNA, 15 bp, Homo sapiens
taaatatgtatcttt

SEQ ID NO: 641270 - DNA, 15 bp, Homo sapiens
aaatatgtatctttt

SEQ ID NO: 641271 - DNA, 15 bp, Homo sapiens
aatatgtatctttta

SEQ ID NO: 641272 - DNA, 15 bp, Homo sapiens
atatgtatcttttat

SEQ ID NO: 641273 - DNA, 15 bp, Homo sapiens
tatgtatcttttata

SEQ ID NO: 641274 - DNA, 15 bp, Homo sapiens
atgtatcttttatat

SEQ ID NO: 641275 - DNA, 15 bp, Homo sapiens
tgtatcttttatata

SEQ ID NO: 641276 - DNA, 15 bp, Homo sapiens
gtatcttttatatat

SEQ ID NO: 641277 - DNA, 15 bp, Homo sapiens
tatcttttatatata

SEQ ID NO: 641278 - DNA, 15 bp, Homo sapiens
atcttttatatatat

SEQ ID NO: 641279 - DNA, 15 bp, Homo sapiens
tcttttatatatatg

SEQ ID NO: 641280 - DNA, 15 bp, Homo sapiens
cttttatatatatga

SEQ ID NO: 641281 - DNA, 15 bp, Homo sapiens
ttttatatatatgaa

SEQ ID NO: 641282 - DNA, 15 bp, Homo sapiens
tttatatatatgaaa

SEQ ID NO: 641283 - DNA, 15 bp, Homo sapiens
ttatatatatgaaat

SEQ ID NO: 641284 - DNA, 15 bp, Homo sapiens
tatatatatgaaatt

SEQ ID NO: 641285 - DNA, 15 bp, Homo sapiens
atatatatgaaatta

SEQ ID NO: 641286 - DNA, 15 bp, Homo sapiens
tatatatgaaattat

SEQ ID NO: 641287 - DNA, 15 bp, Homo sapiens
atatatgaaattatc

SEQ ID NO: 641288 - DNA, 15 bp, Homo sapiens
tatatgaaattatcg

SEQ ID NO: 641289 - DNA, 15 bp, Homo sapiens
atatgaaattatcga

SEQ ID NO: 641290 - DNA, 15 bp, Homo sapiens
tatgaaattatcgag

SEQ ID NO: 641291 - DNA, 15 bp, Homo sapiens
atgaaattatcgagc

SEQ ID NO: 641292 - DNA, 15 bp, Homo sapiens
tgaaattatcgagca

SEQ ID NO: 641293 - DNA, 15 bp, Homo sapiens
gaaattatcgagcag

SEQ ID NO: 641294 - DNA, 15 bp, Homo sapiens
aaattatcgagcaga

SEQ ID NO: 641295 - DNA, 15 bp, Homo sapiens
aattatcgagcagag

SEQ ID NO: 641296 - DNA, 15 bp, Homo sapiens
attatcgagcagagt

SEQ ID NO: 641297 - DNA, 15 bp, Homo sapiens
ttatcgagcagagtg

SEQ ID NO: 641298 - DNA, 15 bp, Homo sapiens
tatcgagcagagtgc

SEQ ID NO: 641299 - DNA, 15 bp, Homo sapiens
atcgagcagagtgcc

SEQ ID NO: 641300 - DNA, 15 bp, Homo sapiens
tcgagcagagtgcct

SEQ ID NO: 641301 - DNA, 15 bp, Homo sapiens
cgagcagagtgccta

SEQ ID NO: 641302 - DNA, 15 bp, Homo sapiens
gagcagagtgcctag

SEQ ID NO: 641303 - DNA, 15 bp, Homo sapiens
agcagagtgcctagt

SEQ ID NO: 641304 - DNA, 15 bp, Homo sapiens
gcagagtgcctagtc

SEQ ID NO: 641305 - DNA, 15 bp, Homo sapiens
cagagtgcctagtcc

SEQ ID NO: 641306 - DNA, 15 bp, Homo sapiens
agagtgcctagtcca

SEQ ID NO: 641307 - DNA, 15 bp, Homo sapiens
gagtgcctagtccac

SEQ ID NO: 641308 - DNA, 15 bp, Homo sapiens
agtgcctagtccact

SEQ ID NO: 641309 - DNA, 15 bp, Homo sapiens
gtgcctagtccacta

SEQ ID NO: 641310 - DNA, 15 bp, Homo sapiens
tgcctagtccactat

SEQ ID NO: 641311 - DNA, 15 bp, Homo sapiens
gcctagtccactatt

SEQ ID NO: 641312 - DNA, 15 bp, Homo sapiens
cctagtccactattg

SEQ ID NO: 641313 - DNA, 15 bp, Homo sapiens
ctagtccactattga

SEQ ID NO: 641314 - DNA, 15 bp, Homo sapiens
tagtccactattgac

SEQ ID NO: 641315 - DNA, 15 bp, Homo sapiens
agtccactattgaca

SEQ ID NO: 641316 - DNA, 15 bp, Homo sapiens
gtccactattgacat

SEQ ID NO: 641317 - DNA, 15 bp, Homo sapiens
tccactattgacatt

SEQ ID NO: 641318 - DNA, 15 bp, Homo sapiens
ccactattgacattt

SEQ ID NO: 641319 - DNA, 15 bp, Homo sapiens
cactattgacattta

SEQ ID NO: 641320 - DNA, 15 bp, Homo sapiens
actattgacatttaa

SEQ ID NO: 641321 - DNA, 15 bp, Homo sapiens
ctattgacatttaaa

SEQ ID NO: 641322 - DNA, 15 bp, Homo sapiens
tattgacatttaaaa

SEQ ID NO: 641323 - DNA, 15 bp, Homo sapiens
attgacatttaaaac

SEQ ID NO: 641324 - DNA, 15 bp, Homo sapiens
ttgacatttaaaaca

SEQ ID NO: 641325 - DNA, 15 bp, Homo sapiens
tgacatttaaaacat

SEQ ID NO: 641326 - DNA, 15 bp, Homo sapiens
gacatttaaaacatc

SEQ ID NO: 641327 - DNA, 15 bp, Homo sapiens
acatttaaaacatct

SEQ ID NO: 641328 - DNA, 15 bp, Homo sapiens
catttaaaacatctc

SEQ ID NO: 641329 - DNA, 15 bp, Homo sapiens
atttaaaacatctca

SEQ ID NO: 641330 - DNA, 15 bp, Homo sapiens
tttaaaacatctcat

SEQ ID NO: 641331 - DNA, 15 bp, Homo sapiens
ttaaaacatctcatt

SEQ ID NO: 641332 - DNA, 15 bp, Homo sapiens
taaaacatctcattt

SEQ ID NO: 641333 - DNA, 15 bp, Homo sapiens
aaaacatctcatttt

SEQ ID NO: 641334 - DNA, 15 bp, Homo sapiens
aaacatctcattttc

SEQ ID NO: 641335 - DNA, 15 bp, Homo sapiens
aacatctcattttcc

SEQ ID NO: 641336 - DNA, 15 bp, Homo sapiens
acatctcattttcct

SEQ ID NO: 641337 - DNA, 15 bp, Homo sapiens
catctcattttcctt

SEQ ID NO: 641338 - DNA, 15 bp, Homo sapiens
atctcattttccttc

SEQ ID NO: 641339 - DNA, 15 bp, Homo sapiens
tctcattttccttcc

SEQ ID NO: 641340 - DNA, 15 bp, Homo sapiens
ctcattttccttcca

SEQ ID NO: 641341 - DNA, 15 bp, Homo sapiens
tcattttccttccat

SEQ ID NO: 641342 - DNA, 15 bp, Homo sapiens
cattttccttccatt

SEQ ID NO: 641343 - DNA, 15 bp, Homo sapiens
attttccttccattc

SEQ ID NO: 641344 - DNA, 15 bp, Homo sapiens
ttttccttccattca

SEQ ID NO: 641345 - DNA, 15 bp, Homo sapiens
tttccttccattcaa

SEQ ID NO: 641346 - DNA, 15 bp, Homo sapiens
ttccttccattcaaa

SEQ ID NO: 641347 - DNA, 15 bp, Homo sapiens
tccttccattcaaag

SEQ ID NO: 641348 - DNA, 15 bp, Homo sapiens
ccttccattcaaaga

SEQ ID NO: 641349 - DNA, 15 bp, Homo sapiens
cttccattcaaagaa

SEQ ID NO: 641350 - DNA, 15 bp, Homo sapiens
ttccattcaaagaac

SEQ ID NO: 641351 - DNA, 15 bp, Homo sapiens
tccattcaaagaact

SEQ ID NO: 641352 - DNA, 15 bp, Homo sapiens
ccattcaaagaactt

SEQ ID NO: 641353 - DNA, 15 bp, Homo sapiens
cattcaaagaactta

SEQ ID NO: 641354 - DNA, 15 bp, Homo sapiens
attcaaagaacttaa

SEQ ID NO: 641355 - DNA, 15 bp, Homo sapiens
ttcaaagaacttaaa

SEQ ID NO: 641356 - DNA, 15 bp, Homo sapiens
tcaaagaacttaaaa

SEQ ID NO: 641357 - DNA, 15 bp, Homo sapiens
caaagaacttaaaat

SEQ ID NO: 641358 - DNA, 15 bp, Homo sapiens
aaagaacttaaaatc

SEQ ID NO: 641359 - DNA, 15 bp, Homo sapiens
aagaacttaaaatct

SEQ ID NO: 641360 - DNA, 15 bp, Homo sapiens
agaacttaaaatcta

SEQ ID NO: 641361 - DNA, 15 bp, Homo sapiens
gaacttaaaatctag

SEQ ID NO: 641362 - DNA, 15 bp, Homo sapiens
aacttaaaatctagc

SEQ ID NO: 641363 - DNA, 15 bp, Homo sapiens
acttaaaatctagcc

SEQ ID NO: 641364 - DNA, 15 bp, Homo sapiens
cttaaaatctagcca

SEQ ID NO: 641365 - DNA, 15 bp, Homo sapiens
ttaaaatctagccaa

SEQ ID NO: 641366 - DNA, 15 bp, Homo sapiens
taaaatctagccaag

SEQ ID NO: 641367 - DNA, 15 bp, Homo sapiens
aaaatctagccaaga

SEQ ID NO: 641368 - DNA, 15 bp, Homo sapiens
aaatctagccaagat

SEQ ID NO: 641369 - DNA, 15 bp, Homo sapiens
aatctagccaagata

SEQ ID NO: 641370 - DNA, 15 bp, Homo sapiens
atctagccaagataa

SEQ ID NO: 641371 - DNA, 15 bp, Homo sapiens
tctagccaagataaa

SEQ ID NO: 641372 - DNA, 15 bp, Homo sapiens
ctagccaagataaac

SEQ ID NO: 641373 - DNA, 15 bp, Homo sapiens
tagccaagataaacc

SEQ ID NO: 641374 - DNA, 15 bp, Homo sapiens
agccaagataaacca

SEQ ID NO: 641375 - DNA, 15 bp, Homo sapiens
gccaagataaaccaa

SEQ ID NO: 641376 - DNA, 15 bp, Homo sapiens
ccaagataaaccaaa

SEQ ID NO: 641377 - DNA, 15 bp, Homo sapiens
caagataaaccaaag

SEQ ID NO: 641378 - DNA, 15 bp, Homo sapiens
aagataaaccaaagt

SEQ ID NO: 641379 - DNA, 15 bp, Homo sapiens
agataaaccaaagta

SEQ ID NO: 641380 - DNA, 15 bp, Homo sapiens
gataaaccaaagtag

SEQ ID NO: 641381 - DNA, 15 bp, Homo sapiens
ataaaccaaagtagg

SEQ ID NO: 641382 - DNA, 15 bp, Homo sapiens
taaaccaaagtaggc

SEQ ID NO: 641383 - DNA, 15 bp, Homo sapiens
aaaccaaagtaggcc

SEQ ID NO: 641384 - DNA, 15 bp, Homo sapiens
aaccaaagtaggcca

SEQ ID NO: 641385 - DNA, 15 bp, Homo sapiens
accaaagtaggccag

SEQ ID NO: 641386 - DNA, 15 bp, Homo sapiens
ccaaagtaggccagg

SEQ ID NO: 641387 - DNA, 15 bp, Homo sapiens
caaagtaggccaggc

SEQ ID NO: 641388 - DNA, 15 bp, Homo sapiens
aaagtaggccaggcg

SEQ ID NO: 641389 - DNA, 15 bp, Homo sapiens
aagtaggccaggcgc

SEQ ID NO: 641390 - DNA, 15 bp, Homo sapiens
agtaggccaggcgca

SEQ ID NO: 641391 - DNA, 15 bp, Homo sapiens
gtaggccaggcgcag

SEQ ID NO: 641392 - DNA, 15 bp, Homo sapiens
taggccaggcgcagt

SEQ ID NO: 641393 - DNA, 15 bp, Homo sapiens
aggccaggcgcagtg

SEQ ID NO: 641394 - DNA, 15 bp, Homo sapiens
ggccaggcgcagtgg

SEQ ID NO: 641395 - DNA, 15 bp, Homo sapiens
gccaggcgcagtggc

SEQ ID NO: 641396 - DNA, 15 bp, Homo sapiens
ccaggcgcagtggct

SEQ ID NO: 641397 - DNA, 15 bp, Homo sapiens
caggcgcagtggctc

SEQ ID NO: 641398 - DNA, 15 bp, Homo sapiens
aggcgcagtggctca

SEQ ID NO: 641399 - DNA, 15 bp, Homo sapiens
ggcgcagtggctcat

SEQ ID NO: 641400 - DNA, 15 bp, Homo sapiens
gcgcagtggctcatg

SEQ ID NO: 641401 - DNA, 15 bp, Homo sapiens
cgcagtggctcatgc

SEQ ID NO: 641402 - DNA, 15 bp, Homo sapiens
gcagtggctcatgcc

SEQ ID NO: 641403 - DNA, 15 bp, Homo sapiens
tgcctgtaatcccag

SEQ ID NO: 641404 - DNA, 15 bp, Homo sapiens
gcactttgggaggcc

SEQ ID NO: 641405 - DNA, 15 bp, Homo sapiens
cactttgggaggccg

SEQ ID NO: 641406 - DNA, 15 bp, Homo sapiens
tgggaggccgaggca

SEQ ID NO: 641407 - DNA, 15 bp, Homo sapiens
gggaggccgaggcag

SEQ ID NO: 641408 - DNA, 15 bp, Homo sapiens
ggaggccgaggcagg

SEQ ID NO: 641409 - DNA, 15 bp, Homo sapiens
gaggccgaggcaggc

SEQ ID NO: 641410 - DNA, 15 bp, Homo sapiens
aggccgaggcaggca

SEQ ID NO: 641411 - DNA, 15 bp, Homo sapiens
ggccgaggcaggcag

SEQ ID NO: 641412 - DNA, 15 bp, Homo sapiens
gccgaggcaggcaga

SEQ ID NO: 641413 - DNA, 15 bp, Homo sapiens
ccgaggcaggcagat

SEQ ID NO: 641414 - DNA, 15 bp, Homo sapiens
cgaggcaggcagatc

SEQ ID NO: 641415 - DNA, 15 bp, Homo sapiens
gaggcaggcagatca

SEQ ID NO: 641416 - DNA, 15 bp, Homo sapiens
aggcaggcagatcac

SEQ ID NO: 641417 - DNA, 15 bp, Homo sapiens
ggcaggcagatcacc

SEQ ID NO: 641418 - DNA, 15 bp, Homo sapiens
gcaggcagatcacct

SEQ ID NO: 641419 - DNA, 15 bp, Homo sapiens
caggcagatcacctg

SEQ ID NO: 641420 - DNA, 15 bp, Homo sapiens
aggcagatcacctga

SEQ ID NO: 641421 - DNA, 15 bp, Homo sapiens
ggcagatcacctgag

SEQ ID NO: 641422 - DNA, 15 bp, Homo sapiens
gcagatcacctgagg

SEQ ID NO: 641423 - DNA, 15 bp, Homo sapiens
cagatcacctgaggt

SEQ ID NO: 641424 - DNA, 15 bp, Homo sapiens
agatcacctgaggtt

SEQ ID NO: 641425 - DNA, 15 bp, Homo sapiens
gatcacctgaggtta

SEQ ID NO: 641426 - DNA, 15 bp, Homo sapiens
atcacctgaggttag

SEQ ID NO: 641427 - DNA, 15 bp, Homo sapiens
tcacctgaggttagg

SEQ ID NO: 641428 - DNA, 15 bp, Homo sapiens
cacctgaggttagga

SEQ ID NO: 641429 - DNA, 15 bp, Homo sapiens
acctgaggttaggag

SEQ ID NO: 641430 - DNA, 15 bp, Homo sapiens
cctgaggttaggagg

SEQ ID NO: 641431 - DNA, 15 bp, Homo sapiens
ctgaggttaggaggt

SEQ ID NO: 641432 - DNA, 15 bp, Homo sapiens
tgaggttaggaggtc

SEQ ID NO: 641433 - DNA, 15 bp, Homo sapiens
gaggttaggaggtcg

SEQ ID NO: 641434 - DNA, 15 bp, Homo sapiens
aggttaggaggtcga

SEQ ID NO: 641435 - DNA, 15 bp, Homo sapiens
ggttaggaggtcgag

SEQ ID NO: 641436 - DNA, 15 bp, Homo sapiens
gttaggaggtcgaga

SEQ ID NO: 641437 - DNA, 15 bp, Homo sapiens
ttaggaggtcgagac

SEQ ID NO: 641438 - DNA, 15 bp, Homo sapiens
taggaggtcgagacc

SEQ ID NO: 641439 - DNA, 15 bp, Homo sapiens
aggaggtcgagacca

SEQ ID NO: 641440 - DNA, 15 bp, Homo sapiens
ggaggtcgagaccaa

SEQ ID NO: 641441 - DNA, 15 bp, Homo sapiens
gaggtcgagaccaac

SEQ ID NO: 641442 - DNA, 15 bp, Homo sapiens
aggtcgagaccaact

SEQ ID NO: 641443 - DNA, 15 bp, Homo sapiens
ggtcgagaccaactt

SEQ ID NO: 641444 - DNA, 15 bp, Homo sapiens
gtcgagaccaacttg

SEQ ID NO: 641445 - DNA, 15 bp, Homo sapiens
tcgagaccaacttgg

SEQ ID NO: 641446 - DNA, 15 bp, Homo sapiens
cgagaccaacttggc

SEQ ID NO: 641447 - DNA, 15 bp, Homo sapiens
gagaccaacttggcc

SEQ ID NO: 641448 - DNA, 15 bp, Homo sapiens
agaccaacttggcca

SEQ ID NO: 641449 - DNA, 15 bp, Homo sapiens
gaccaacttggccaa

SEQ ID NO: 641450 - DNA, 15 bp, Homo sapiens
accaacttggccaac

SEQ ID NO: 641451 - DNA, 15 bp, Homo sapiens
ccaacttggccaaca

SEQ ID NO: 641452 - DNA, 15 bp, Homo sapiens
caacttggccaacat

SEQ ID NO: 641453 - DNA, 15 bp, Homo sapiens
aacttggccaacatg

SEQ ID NO: 641454 - DNA, 15 bp, Homo sapiens
acttggccaacatgg

SEQ ID NO: 641455 - DNA, 15 bp, Homo sapiens
cttggccaacatggc

SEQ ID NO: 641456 - DNA, 15 bp, Homo sapiens
ttggccaacatggca

SEQ ID NO: 641457 - DNA, 15 bp, Homo sapiens
tggccaacatggcaa

SEQ ID NO: 641458 - DNA, 15 bp, Homo sapiens
ggccaacatggcaaa

SEQ ID NO: 641459 - DNA, 15 bp, Homo sapiens
gccaacatggcaaaa

SEQ ID NO: 641460 - DNA, 15 bp, Homo sapiens
ccaacatggcaaaac

SEQ ID NO: 641461 - DNA, 15 bp, Homo sapiens
caacatggcaaaacc

SEQ ID NO: 641462 - DNA, 15 bp, Homo sapiens
aacatggcaaaaccc

SEQ ID NO: 641463 - DNA, 15 bp, Homo sapiens
acatggcaaaacccc

SEQ ID NO: 641464 - DNA, 15 bp, Homo sapiens
catggcaaaacccca

SEQ ID NO: 641465 - DNA, 15 bp, Homo sapiens
atggcaaaaccccat

SEQ ID NO: 641466 - DNA, 15 bp, Homo sapiens
tggcaaaaccccatc

SEQ ID NO: 641467 - DNA, 15 bp, Homo sapiens
ggcaaaaccccatct

SEQ ID NO: 641468 - DNA, 15 bp, Homo sapiens
gcaaaaccccatctc

SEQ ID NO: 641469 - DNA, 15 bp, Homo sapiens
caaaaccccatctct

SEQ ID NO: 641470 - DNA, 15 bp, Homo sapiens
aaaaccccatctcta

SEQ ID NO: 641471 - DNA, 15 bp, Homo sapiens
aaaccccatctctac

SEQ ID NO: 641472 - DNA, 15 bp, Homo sapiens
aaccccatctctact

SEQ ID NO: 641473 - DNA, 15 bp, Homo sapiens
accccatctctacta

SEQ ID NO: 641474 - DNA, 15 bp, Homo sapiens
ccccatctctactaa

SEQ ID NO: 641475 - DNA, 15 bp, Homo sapiens
cccatctctactaaa

SEQ ID NO: 641476 - DNA, 15 bp, Homo sapiens
ccatctctactaaaa

SEQ ID NO: 641477 - DNA, 15 bp, Homo sapiens
catctctactaaaaa

SEQ ID NO: 641478 - DNA, 15 bp, Homo sapiens
atctctactaaaaat

SEQ ID NO: 641479 - DNA, 15 bp, Homo sapiens
atacaaaaattagcc

SEQ ID NO: 641480 - DNA, 15 bp, Homo sapiens
tacaaaaattagcca

SEQ ID NO: 641481 - DNA, 15 bp, Homo sapiens
acaaaaattagccag

SEQ ID NO: 641482 - DNA, 15 bp, Homo sapiens
caaaaattagccagg

SEQ ID NO: 641483 - DNA, 15 bp, Homo sapiens
aaaaattagccaggc

SEQ ID NO: 641484 - DNA, 15 bp, Homo sapiens
aaaattagccaggca

SEQ ID NO: 641485 - DNA, 15 bp, Homo sapiens
aaattagccaggcat

SEQ ID NO: 641486 - DNA, 15 bp, Homo sapiens
aattagccaggcatg

SEQ ID NO: 641487 - DNA, 15 bp, Homo sapiens
attagccaggcatgg

SEQ ID NO: 641488 - DNA, 15 bp, Homo sapiens
ttagccaggcatggt

SEQ ID NO: 641489 - DNA, 15 bp, Homo sapiens
tagccaggcatggtg

SEQ ID NO: 641490 - DNA, 15 bp, Homo sapiens
agccaggcatggtgg

SEQ ID NO: 641491 - DNA, 15 bp, Homo sapiens
gccaggcatggtggc

SEQ ID NO: 641492 - DNA, 15 bp, Homo sapiens
ccaggcatggtggct

SEQ ID NO: 641493 - DNA, 15 bp, Homo sapiens
caggcatggtggctc

SEQ ID NO: 641494 - DNA, 15 bp, Homo sapiens
aggcatggtggctca

SEQ ID NO: 641495 - DNA, 15 bp, Homo sapiens
ggcatggtggctcat

SEQ ID NO: 641496 - DNA, 15 bp, Homo sapiens
gcatggtggctcatg

SEQ ID NO: 641497 - DNA, 15 bp, Homo sapiens
catggtggctcatgc

SEQ ID NO: 641498 - DNA, 15 bp, Homo sapiens
atggtggctcatgcc

SEQ ID NO: 641499 - DNA, 15 bp, Homo sapiens
tggtggctcatgcct

SEQ ID NO: 641500 - DNA, 15 bp, Homo sapiens
ggtggctcatgcctg

SEQ ID NO: 641501 - DNA, 15 bp, Homo sapiens
cctgtaatcccagct

SEQ ID NO: 641502 - DNA, 15 bp, Homo sapiens
ctgtaatcccagcta

SEQ ID NO: 641503 - DNA, 15 bp, Homo sapiens
tgtaatcccagctac

SEQ ID NO: 641504 - DNA, 15 bp, Homo sapiens
gtaatcccagctact

SEQ ID NO: 641505 - DNA, 15 bp, Homo sapiens
taatcccagctactt

SEQ ID NO: 641506 - DNA, 15 bp, Homo sapiens
aatcccagctacttg

SEQ ID NO: 641507 - DNA, 15 bp, Homo sapiens
atcccagctacttgg

SEQ ID NO: 641508 - DNA, 15 bp, Homo sapiens
tgaggcaggagaatt

SEQ ID NO: 641509 - DNA, 15 bp, Homo sapiens
gaggcaggagaattg

SEQ ID NO: 641510 - DNA, 15 bp, Homo sapiens
aggcaggagaattgc

SEQ ID NO: 641511 - DNA, 15 bp, Homo sapiens
ggcaggagaattgct

SEQ ID NO: 641512 - DNA, 15 bp, Homo sapiens
gcaggagaattgctt

SEQ ID NO: 641513 - DNA, 15 bp, Homo sapiens
caggagaattgcttg

SEQ ID NO: 641514 - DNA, 15 bp, Homo sapiens
aggagaattgcttga

SEQ ID NO: 641515 - DNA, 15 bp, Homo sapiens
ggagaattgcttgaa

SEQ ID NO: 641516 - DNA, 15 bp, Homo sapiens
gagaattgcttgaac

SEQ ID NO: 641517 - DNA, 15 bp, Homo sapiens
agaattgcttgaacc

SEQ ID NO: 641518 - DNA, 15 bp, Homo sapiens
gaattgcttgaaccc

SEQ ID NO: 641519 - DNA, 15 bp, Homo sapiens
aattgcttgaaccca

SEQ ID NO: 641520 - DNA, 15 bp, Homo sapiens
attgcttgaacccag

SEQ ID NO: 641521 - DNA, 15 bp, Homo sapiens
ttgcttgaacccagg

SEQ ID NO: 641522 - DNA, 15 bp, Homo sapiens
tgcttgaacccagga

SEQ ID NO: 641523 - DNA, 15 bp, Homo sapiens
gcttgaacccaggag

SEQ ID NO: 641524 - DNA, 15 bp, Homo sapiens
cttgaacccaggaga

SEQ ID NO: 641525 - DNA, 15 bp, Homo sapiens
ttgaacccaggagac

SEQ ID NO: 641526 - DNA, 15 bp, Homo sapiens
tgaacccaggagaca

SEQ ID NO: 641527 - DNA, 15 bp, Homo sapiens
gaacccaggagacag

SEQ ID NO: 641528 - DNA, 15 bp, Homo sapiens
aacccaggagacaga

SEQ ID NO: 641529 - DNA, 15 bp, Homo sapiens
acccaggagacagaa

SEQ ID NO: 641530 - DNA, 15 bp, Homo sapiens
cccaggagacagaag

SEQ ID NO: 641531 - DNA, 15 bp, Homo sapiens
ccaggagacagaagt

SEQ ID NO: 641532 - DNA, 15 bp, Homo sapiens
caggagacagaagtt

SEQ ID NO: 641533 - DNA, 15 bp, Homo sapiens
aggagacagaagttg

SEQ ID NO: 641534 - DNA, 15 bp, Homo sapiens
ggagacagaagttgt

SEQ ID NO: 641535 - DNA, 15 bp, Homo sapiens
gagacagaagttgta

SEQ ID NO: 641536 - DNA, 15 bp, Homo sapiens
agacagaagttgtag

SEQ ID NO: 641537 - DNA, 15 bp, Homo sapiens
gacagaagttgtagt

SEQ ID NO: 641538 - DNA, 15 bp, Homo sapiens
acagaagttgtagtg

SEQ ID NO: 641539 - DNA, 15 bp, Homo sapiens
cagaagttgtagtga

SEQ ID NO: 641540 - DNA, 15 bp, Homo sapiens
agaagttgtagtgag

SEQ ID NO: 641541 - DNA, 15 bp, Homo sapiens
gaagttgtagtgagc

SEQ ID NO: 641542 - DNA, 15 bp, Homo sapiens
aagttgtagtgagcc

SEQ ID NO: 641543 - DNA, 15 bp, Homo sapiens
agttgtagtgagcca

SEQ ID NO: 641544 - DNA, 15 bp, Homo sapiens
gttgtagtgagccaa

SEQ ID NO: 641545 - DNA, 15 bp, Homo sapiens
ttgtagtgagccaag

SEQ ID NO: 641546 - DNA, 15 bp, Homo sapiens
tgtagtgagccaaga

SEQ ID NO: 641547 - DNA, 15 bp, Homo sapiens
gtagtgagccaagat

SEQ ID NO: 641548 - DNA, 15 bp, Homo sapiens
tagtgagccaagatt

SEQ ID NO: 641549 - DNA, 15 bp, Homo sapiens
agtgagccaagattg

SEQ ID NO: 641550 - DNA, 15 bp, Homo sapiens
gtgagccaagattgc

SEQ ID NO: 641551 - DNA, 15 bp, Homo sapiens
tgagccaagattgcg

SEQ ID NO: 641552 - DNA, 15 bp, Homo sapiens
gagccaagattgcgc

SEQ ID NO: 641553 - DNA, 15 bp, Homo sapiens
agccaagattgcgcc

SEQ ID NO: 641554 - DNA, 15 bp, Homo sapiens
gccaagattgcgcca

SEQ ID NO: 641555 - DNA, 15 bp, Homo sapiens
ccaagattgcgccac

SEQ ID NO: 641556 - DNA, 15 bp, Homo sapiens
caagattgcgccact

SEQ ID NO: 641557 - DNA, 15 bp, Homo sapiens
aagattgcgccactg

SEQ ID NO: 641558 - DNA, 15 bp, Homo sapiens
actccagcctgggca

SEQ ID NO: 641559 - DNA, 15 bp, Homo sapiens
ctccagcctgggcaa

SEQ ID NO: 641560 - DNA, 15 bp, Homo sapiens
tccagcctgggcaac

SEQ ID NO: 641561 - DNA, 15 bp, Homo sapiens
ccagcctgggcaaca

SEQ ID NO: 641562 - DNA, 15 bp, Homo sapiens
cagcctgggcaacag

SEQ ID NO: 641563 - DNA, 15 bp, Homo sapiens
agcctgggcaacaga

SEQ ID NO: 641564 - DNA, 15 bp, Homo sapiens
gcctgggcaacagag

SEQ ID NO: 641565 - DNA, 15 bp, Homo sapiens
cctgggcaacagagt

SEQ ID NO: 641566 - DNA, 15 bp, Homo sapiens
ctgggcaacagagtg

SEQ ID NO: 641567 - DNA, 15 bp, Homo sapiens
tgggcaacagagtga

SEQ ID NO: 641568 - DNA, 15 bp, Homo sapiens
gggcaacagagtgag

SEQ ID NO: 641569 - DNA, 15 bp, Homo sapiens
ggcaacagagtgaga

SEQ ID NO: 641570 - DNA, 15 bp, Homo sapiens
gcaacagagtgagac

SEQ ID NO: 641571 - DNA, 15 bp, Homo sapiens
caacagagtgagact

SEQ ID NO: 641572 - DNA, 15 bp, Homo sapiens
aacagagtgagactc

SEQ ID NO: 641573 - DNA, 15 bp, Homo sapiens
acagagtgagactcc

SEQ ID NO: 641574 - DNA, 15 bp, Homo sapiens
cagagtgagactcca

SEQ ID NO: 641575 - DNA, 15 bp, Homo sapiens
agagtgagactccaa

SEQ ID NO: 641576 - DNA, 15 bp, Homo sapiens
gagtgagactccaat

SEQ ID NO: 641577 - DNA, 15 bp, Homo sapiens
agtgagactccaatt

SEQ ID NO: 641578 - DNA, 15 bp, Homo sapiens
gtgagactccaattc

SEQ ID NO: 641579 - DNA, 15 bp, Homo sapiens
tgagactccaattca

SEQ ID NO: 641580 - DNA, 15 bp, Homo sapiens
gagactccaattcaa

SEQ ID NO: 641581 - DNA, 15 bp, Homo sapiens
agactccaattcaaa

SEQ ID NO: 641582 - DNA, 15 bp, Homo sapiens
gactccaattcaaaa

SEQ ID NO: 641583 - DNA, 15 bp, Homo sapiens
actccaattcaaaaa

SEQ ID NO: 641584 - DNA, 15 bp, Homo sapiens
ctccaattcaaaaaa

SEQ ID NO: 641585 - DNA, 15 bp, Homo sapiens
tccaattcaaaaaag

SEQ ID NO: 641586 - DNA, 15 bp, Homo sapiens
ccaattcaaaaaaga

SEQ ID NO: 641587 - DNA, 15 bp, Homo sapiens
caattcaaaaaagaa

SEQ ID NO: 641588 - DNA, 15 bp, Homo sapiens
aattcaaaaaagaaa

SEQ ID NO: 641589 - DNA, 15 bp, Homo sapiens
attcaaaaaagaaaa

SEQ ID NO: 641590 - DNA, 15 bp, Homo sapiens
ttcaaaaaagaaaag

SEQ ID NO: 641591 - DNA, 15 bp, Homo sapiens
tcaaaaaagaaaaga

SEQ ID NO: 641592 - DNA, 15 bp, Homo sapiens
caaaaaagaaaagaa

SEQ ID NO: 641593 - DNA, 15 bp, Homo sapiens
aaaaaagaaaagaaa

SEQ ID NO: 641594 - DNA, 15 bp, Homo sapiens
aaaaagaaaagaaaa

SEQ ID NO: 641595 - DNA, 15 bp, Homo sapiens
aaaagaaaagaaaag

SEQ ID NO: 641596 - DNA, 15 bp, Homo sapiens
aaagaaaagaaaaga

SEQ ID NO: 641597 - DNA, 15 bp, Homo sapiens
aagaaaagaaaagaa

SEQ ID NO: 641598 - DNA, 15 bp, Homo sapiens
agaaaagaaaagaaa

SEQ ID NO: 641599 - DNA, 15 bp, Homo sapiens
gaaaagaaaagaaaa

SEQ ID NO: 641600 - DNA, 15 bp, Homo sapiens
aaaagaaaagaaaaa

SEQ ID NO: 641601 - DNA, 15 bp, Homo sapiens
aaagaaaagaaaaac

SEQ ID NO: 641602 - DNA, 15 bp, Homo sapiens
aagaaaagaaaaacc

SEQ ID NO: 641603 - DNA, 15 bp, Homo sapiens
agaaaagaaaaacca

SEQ ID NO: 641604 - DNA, 15 bp, Homo sapiens
gaaaagaaaaaccaa

SEQ ID NO: 641605 - DNA, 15 bp, Homo sapiens
aaaagaaaaaccaaa

SEQ ID NO: 641606 - DNA, 15 bp, Homo sapiens
aaagaaaaaccaaag

SEQ ID NO: 641607 - DNA, 15 bp, Homo sapiens
aagaaaaaccaaagc

SEQ ID NO: 641608 - DNA, 15 bp, Homo sapiens
agaaaaaccaaagca

SEQ ID NO: 641609 - DNA, 15 bp, Homo sapiens
gaaaaaccaaagcag

SEQ ID NO: 641610 - DNA, 15 bp, Homo sapiens
aaaaaccaaagcagc

SEQ ID NO: 641611 - DNA, 15 bp, Homo sapiens
aaaaccaaagcagca

SEQ ID NO: 641612 - DNA, 15 bp, Homo sapiens
aaaccaaagcagcag

SEQ ID NO: 641613 - DNA, 15 bp, Homo sapiens
aaccaaagcagcaga

SEQ ID NO: 641614 - DNA, 15 bp, Homo sapiens
accaaagcagcagat

SEQ ID NO: 641615 - DNA, 15 bp, Homo sapiens
ccaaagcagcagata

SEQ ID NO: 641616 - DNA, 15 bp, Homo sapiens
caaagcagcagataa

SEQ ID NO: 641617 - DNA, 15 bp, Homo sapiens
aaagcagcagataat

SEQ ID NO: 641618 - DNA, 15 bp, Homo sapiens
aagcagcagataata

SEQ ID NO: 641619 - DNA, 15 bp, Homo sapiens
agcagcagataataa

SEQ ID NO: 641620 - DNA, 15 bp, Homo sapiens
gcagcagataataat

SEQ ID NO: 641621 - DNA, 15 bp, Homo sapiens
cagcagataataatt

SEQ ID NO: 641622 - DNA, 15 bp, Homo sapiens
agcagataataattg

SEQ ID NO: 641623 - DNA, 15 bp, Homo sapiens
gcagataataattgt

SEQ ID NO: 641624 - DNA, 15 bp, Homo sapiens
cagataataattgtt

SEQ ID NO: 641625 - DNA, 15 bp, Homo sapiens
agataataattgttt

SEQ ID NO: 641626 - DNA, 15 bp, Homo sapiens
gataataattgttta

SEQ ID NO: 641627 - DNA, 15 bp, Homo sapiens
ataataattgtttaa

SEQ ID NO: 641628 - DNA, 15 bp, Homo sapiens
taataattgtttaac

SEQ ID NO: 641629 - DNA, 15 bp, Homo sapiens
aataattgtttaaca

SEQ ID NO: 641630 - DNA, 15 bp, Homo sapiens
ataattgtttaacaa

SEQ ID NO: 641631 - DNA, 15 bp, Homo sapiens
taattgtttaacaat

SEQ ID NO: 641632 - DNA, 15 bp, Homo sapiens
aattgtttaacaatt

SEQ ID NO: 641633 - DNA, 15 bp, Homo sapiens
attgtttaacaattt

SEQ ID NO: 641634 - DNA, 15 bp, Homo sapiens
ttgtttaacaatttg

SEQ ID NO: 641635 - DNA, 15 bp, Homo sapiens
tgtttaacaatttga

SEQ ID NO: 641636 - DNA, 15 bp, Homo sapiens
gtttaacaatttgaa

SEQ ID NO: 641637 - DNA, 15 bp, Homo sapiens
tttaacaatttgaaa

SEQ ID NO: 641638 - DNA, 15 bp, Homo sapiens
ttaacaatttgaaaa

SEQ ID NO: 641639 - DNA, 15 bp, Homo sapiens
taacaatttgaaaag

SEQ ID NO: 641640 - DNA, 15 bp, Homo sapiens
aacaatttgaaaagg

SEQ ID NO: 641641 - DNA, 15 bp, Homo sapiens
acaatttgaaaaggc

SEQ ID NO: 641642 - DNA, 15 bp, Homo sapiens
caatttgaaaaggca

SEQ ID NO: 641643 - DNA, 15 bp, Homo sapiens
aatttgaaaaggcat

SEQ ID NO: 641644 - DNA, 15 bp, Homo sapiens
atttgaaaaggcata

SEQ ID NO: 641645 - DNA, 15 bp, Homo sapiens
tttgaaaaggcataa

SEQ ID NO: 641646 - DNA, 15 bp, Homo sapiens
ttgaaaaggcataat

SEQ ID NO: 641647 - DNA, 15 bp, Homo sapiens
tgaaaaggcataatc

SEQ ID NO: 641648 - DNA, 15 bp, Homo sapiens
gaaaaggcataatcc

SEQ ID NO: 641649 - DNA, 15 bp, Homo sapiens
aaaaggcataatcca

SEQ ID NO: 641650 - DNA, 15 bp, Homo sapiens
aaaggcataatccat

SEQ ID NO: 641651 - DNA, 15 bp, Homo sapiens
aaggcataatccata

SEQ ID NO: 641652 - DNA, 15 bp, Homo sapiens
aggcataatccatag

SEQ ID NO: 641653 - DNA, 15 bp, Homo sapiens
ggcataatccataga

SEQ ID NO: 641654 - DNA, 15 bp, Homo sapiens
gcataatccatagaa

SEQ ID NO: 641655 - DNA, 15 bp, Homo sapiens
cataatccatagaat

SEQ ID NO: 641656 - DNA, 15 bp, Homo sapiens
ataatccatagaatt

SEQ ID NO: 641657 - DNA, 15 bp, Homo sapiens
taatccatagaattt

SEQ ID NO: 641658 - DNA, 15 bp, Homo sapiens
aatccatagaattta

SEQ ID NO: 641659 - DNA, 15 bp, Homo sapiens
atccatagaatttat

SEQ ID NO: 641660 - DNA, 15 bp, Homo sapiens
tccatagaatttata

SEQ ID NO: 641661 - DNA, 15 bp, Homo sapiens
ccatagaatttatag

SEQ ID NO: 641662 - DNA, 15 bp, Homo sapiens
catagaatttatagt

SEQ ID NO: 641663 - DNA, 15 bp, Homo sapiens
atagaatttatagtg

SEQ ID NO: 641664 - DNA, 15 bp, Homo sapiens
tagaatttatagtgg

SEQ ID NO: 641665 - DNA, 15 bp, Homo sapiens
agaatttatagtgga

SEQ ID NO: 641666 - DNA, 15 bp, Homo sapiens
gaatttatagtggag

SEQ ID NO: 641667 - DNA, 15 bp, Homo sapiens
aatttatagtggagg

SEQ ID NO: 641668 - DNA, 15 bp, Homo sapiens
atttatagtggagga

SEQ ID NO: 641669 - DNA, 15 bp, Homo sapiens
tttatagtggaggag

SEQ ID NO: 641670 - DNA, 15 bp, Homo sapiens
ttatagtggaggaga

SEQ ID NO: 641671 - DNA, 15 bp, Homo sapiens
tatagtggaggagat

SEQ ID NO: 641672 - DNA, 15 bp, Homo sapiens
atagtggaggagatt

SEQ ID NO: 641673 - DNA, 15 bp, Homo sapiens
tagtggaggagattg

SEQ ID NO: 641674 - DNA, 15 bp, Homo sapiens
agtggaggagattgg

SEQ ID NO: 641675 - DNA, 15 bp, Homo sapiens
gtggaggagattggt

SEQ ID NO: 641676 - DNA, 15 bp, Homo sapiens
tggaggagattggtt

SEQ ID NO: 641677 - DNA, 15 bp, Homo sapiens
ggaggagattggttt

SEQ ID NO: 641678 - DNA, 15 bp, Homo sapiens
gaggagattggtttc

SEQ ID NO: 641679 - DNA, 15 bp, Homo sapiens
aggagattggtttca

SEQ ID NO: 641680 - DNA, 15 bp, Homo sapiens
ggagattggtttcaa

SEQ ID NO: 641681 - DNA, 15 bp, Homo sapiens
gagattggtttcaaa

SEQ ID NO: 641682 - DNA, 15 bp, Homo sapiens
agattggtttcaaat

SEQ ID NO: 641683 - DNA, 15 bp, Homo sapiens
gattggtttcaaata

SEQ ID NO: 641684 - DNA, 15 bp, Homo sapiens
attggtttcaaatag

SEQ ID NO: 641685 - DNA, 15 bp, Homo sapiens
ttggtttcaaataga

SEQ ID NO: 641686 - DNA, 15 bp, Homo sapiens
tggtttcaaatagag

SEQ ID NO: 641687 - DNA, 15 bp, Homo sapiens
ggtttcaaatagagt

SEQ ID NO: 641688 - DNA, 15 bp, Homo sapiens
gtttcaaatagagta

SEQ ID NO: 641689 - DNA, 15 bp, Homo sapiens
tttcaaatagagtag

SEQ ID NO: 641690 - DNA, 15 bp, Homo sapiens
ttcaaatagagtagt

SEQ ID NO: 641691 - DNA, 15 bp, Homo sapiens
tcaaatagagtagtc

SEQ ID NO: 641692 - DNA, 15 bp, Homo sapiens
caaatagagtagtca

SEQ ID NO: 641693 - DNA, 15 bp, Homo sapiens
aaatagagtagtcag

SEQ ID NO: 641694 - DNA, 15 bp, Homo sapiens
aatagagtagtcagg

SEQ ID NO: 641695 - DNA, 15 bp, Homo sapiens
atagagtagtcagga

SEQ ID NO: 641696 - DNA, 15 bp, Homo sapiens
tagagtagtcaggag

SEQ ID NO: 641697 - DNA, 15 bp, Homo sapiens
agagtagtcaggagg

SEQ ID NO: 641698 - DNA, 15 bp, Homo sapiens
gagtagtcaggagga

SEQ ID NO: 641699 - DNA, 15 bp, Homo sapiens
agtagtcaggaggat

SEQ ID NO: 641700 - DNA, 15 bp, Homo sapiens
gtagtcaggaggatt

SEQ ID NO: 641701 - DNA, 15 bp, Homo sapiens
tagtcaggaggattt

SEQ ID NO: 641702 - DNA, 15 bp, Homo sapiens
agtcaggaggatttt

SEQ ID NO: 641703 - DNA, 15 bp, Homo sapiens
gtcaggaggatttta

SEQ ID NO: 641704 - DNA, 15 bp, Homo sapiens
tcaggaggattttag

SEQ ID NO: 641705 - DNA, 15 bp, Homo sapiens
caggaggattttagt

SEQ ID NO: 641706 - DNA, 15 bp, Homo sapiens
aggaggattttagtg

SEQ ID NO: 641707 - DNA, 15 bp, Homo sapiens
ggaggattttagtga

SEQ ID NO: 641708 - DNA, 15 bp, Homo sapiens
gaggattttagtgaa

SEQ ID NO: 641709 - DNA, 15 bp, Homo sapiens
aggattttagtgaaa

SEQ ID NO: 641710 - DNA, 15 bp, Homo sapiens
ggattttagtgaaac

SEQ ID NO: 641711 - DNA, 15 bp, Homo sapiens
gattttagtgaaacc

SEQ ID NO: 641712 - DNA, 15 bp, Homo sapiens
attttagtgaaacct

SEQ ID NO: 641713 - DNA, 15 bp, Homo sapiens
ttttagtgaaacctt

SEQ ID NO: 641714 - DNA, 15 bp, Homo sapiens
tttagtgaaaccttt

SEQ ID NO: 641715 - DNA, 15 bp, Homo sapiens
ttagtgaaacctttg

SEQ ID NO: 641716 - DNA, 15 bp, Homo sapiens
tagtgaaacctttga

SEQ ID NO: 641717 - DNA, 15 bp, Homo sapiens
agtgaaacctttgag

SEQ ID NO: 641718 - DNA, 15 bp, Homo sapiens
gtgaaacctttgagg

SEQ ID NO: 641719 - DNA, 15 bp, Homo sapiens
tgaaacctttgaggt

SEQ ID NO: 641720 - DNA, 15 bp, Homo sapiens
gaaacctttgaggtg

SEQ ID NO: 641721 - DNA, 15 bp, Homo sapiens
aaacctttgaggtga

SEQ ID NO: 641722 - DNA, 15 bp, Homo sapiens
aacctttgaggtgaa

SEQ ID NO: 641723 - DNA, 15 bp, Homo sapiens
acctttgaggtgaac

SEQ ID NO: 641724 - DNA, 15 bp, Homo sapiens
cctttgaggtgaact

SEQ ID NO: 641725 - DNA, 15 bp, Homo sapiens
ctttgaggtgaactt

SEQ ID NO: 641726 - DNA, 15 bp, Homo sapiens
tttgaggtgaacttt

SEQ ID NO: 641727 - DNA, 15 bp, Homo sapiens
ttgaggtgaactttg

SEQ ID NO: 641728 - DNA, 15 bp, Homo sapiens
tgaggtgaactttga

SEQ ID NO: 641729 - DNA, 15 bp, Homo sapiens
gaggtgaactttgaa

SEQ ID NO: 641730 - DNA, 15 bp, Homo sapiens
aggtgaactttgaaa

SEQ ID NO: 641731 - DNA, 15 bp, Homo sapiens
ggtgaactttgaaaa

SEQ ID NO: 641732 - DNA, 15 bp, Homo sapiens
gtgaactttgaaaag

SEQ ID NO: 641733 - DNA, 15 bp, Homo sapiens
tgaactttgaaaagc

SEQ ID NO: 641734 - DNA, 15 bp, Homo sapiens
gaactttgaaaagct

SEQ ID NO: 641735 - DNA, 15 bp, Homo sapiens
aactttgaaaagctg

SEQ ID NO: 641736 - DNA, 15 bp, Homo sapiens
actttgaaaagctgc

SEQ ID NO: 641737 - DNA, 15 bp, Homo sapiens
ctttgaaaagctgca

SEQ ID NO: 641738 - DNA, 15 bp, Homo sapiens
tttgaaaagctgcaa

SEQ ID NO: 641739 - DNA, 15 bp, Homo sapiens
ttgaaaagctgcaaa

SEQ ID NO: 641740 - DNA, 15 bp, Homo sapiens
tgaaaagctgcaaat

SEQ ID NO: 641741 - DNA, 15 bp, Homo sapiens
gaaaagctgcaaatg

SEQ ID NO: 641742 - DNA, 15 bp, Homo sapiens
aaaagctgcaaatgg

SEQ ID NO: 641743 - DNA, 15 bp, Homo sapiens
aaagctgcaaatggc

SEQ ID NO: 641744 - DNA, 15 bp, Homo sapiens
aagctgcaaatggca

SEQ ID NO: 641745 - DNA, 15 bp, Homo sapiens
agctgcaaatggcag

SEQ ID NO: 641746 - DNA, 15 bp, Homo sapiens
gctgcaaatggcagt

SEQ ID NO: 641747 - DNA, 15 bp, Homo sapiens
ctgcaaatggcagtg

SEQ ID NO: 641748 - DNA, 15 bp, Homo sapiens
tgcaaatggcagtgt

SEQ ID NO: 641749 - DNA, 15 bp, Homo sapiens
gcaaatggcagtgtt

SEQ ID NO: 641750 - DNA, 15 bp, Homo sapiens
caaatggcagtgttt

SEQ ID NO: 641751 - DNA, 15 bp, Homo sapiens
aaatggcagtgtttg

SEQ ID NO: 641752 - DNA, 15 bp, Homo sapiens
aatggcagtgtttga

SEQ ID NO: 641753 - DNA, 15 bp, Homo sapiens
atggcagtgtttgaa

SEQ ID NO: 641754 - DNA, 15 bp, Homo sapiens
tggcagtgtttgaag

SEQ ID NO: 641755 - DNA, 15 bp, Homo sapiens
ggcagtgtttgaaga

SEQ ID NO: 641756 - DNA, 15 bp, Homo sapiens
gcagtgtttgaagag

SEQ ID NO: 641757 - DNA, 15 bp, Homo sapiens
cagtgtttgaagaga

SEQ ID NO: 641758 - DNA, 15 bp, Homo sapiens
agtgtttgaagagag

SEQ ID NO: 641759 - DNA, 15 bp, Homo sapiens
gtgtttgaagagaga

SEQ ID NO: 641760 - DNA, 15 bp, Homo sapiens
tgtttgaagagagag

SEQ ID NO: 641761 - DNA, 15 bp, Homo sapiens
gtttgaagagagagg

SEQ ID NO: 641762 - DNA, 15 bp, Homo sapiens
tttgaagagagagga

SEQ ID NO: 641763 - DNA, 15 bp, Homo sapiens
ttgaagagagaggaa

SEQ ID NO: 641764 - DNA, 15 bp, Homo sapiens
tgaagagagaggaag

SEQ ID NO: 641765 - DNA, 15 bp, Homo sapiens
gaagagagaggaaga

SEQ ID NO: 641766 - DNA, 15 bp, Homo sapiens
aagagagaggaagag

SEQ ID NO: 641767 - DNA, 15 bp, Homo sapiens
agagagaggaagagg

SEQ ID NO: 641768 - DNA, 15 bp, Homo sapiens
gagagaggaagaggt

SEQ ID NO: 641769 - DNA, 15 bp, Homo sapiens
agagaggaagaggtg

SEQ ID NO: 641770 - DNA, 15 bp, Homo sapiens
gagaggaagaggtgg

SEQ ID NO: 641771 - DNA, 15 bp, Homo sapiens
agaggaagaggtgga

SEQ ID NO: 641772 - DNA, 15 bp, Homo sapiens
gaggaagaggtggaa

SEQ ID NO: 641773 - DNA, 15 bp, Homo sapiens
aggaagaggtggaac

SEQ ID NO: 641774 - DNA, 15 bp, Homo sapiens
ggaagaggtggaaca

SEQ ID NO: 641775 - DNA, 15 bp, Homo sapiens
gaagaggtggaacac

SEQ ID NO: 641776 - DNA, 15 bp, Homo sapiens
aagaggtggaacaca

SEQ ID NO: 641777 - DNA, 15 bp, Homo sapiens
agaggtggaacacag

SEQ ID NO: 641778 - DNA, 15 bp, Homo sapiens
gaggtggaacacaga

SEQ ID NO: 641779 - DNA, 15 bp, Homo sapiens
aggtggaacacagag

SEQ ID NO: 641780 - DNA, 15 bp, Homo sapiens
ggtggaacacagaga

SEQ ID NO: 641781 - DNA, 15 bp, Homo sapiens
gtggaacacagagag

SEQ ID NO: 641782 - DNA, 15 bp, Homo sapiens
tggaacacagagagg

SEQ ID NO: 641783 - DNA, 15 bp, Homo sapiens
ggaacacagagaggg

SEQ ID NO: 641784 - DNA, 15 bp, Homo sapiens
gaacacagagagggt

SEQ ID NO: 641785 - DNA, 15 bp, Homo sapiens
aacacagagagggtc

SEQ ID NO: 641786 - DNA, 15 bp, Homo sapiens
acacagagagggtct

SEQ ID NO: 641787 - DNA, 15 bp, Homo sapiens
cacagagagggtctt

SEQ ID NO: 641788 - DNA, 15 bp, Homo sapiens
acagagagggtcttc

SEQ ID NO: 641789 - DNA, 15 bp, Homo sapiens
cagagagggtcttca

SEQ ID NO: 641790 - DNA, 15 bp, Homo sapiens
agagagggtcttcag

SEQ ID NO: 641791 - DNA, 15 bp, Homo sapiens
gagagggtcttcagc

SEQ ID NO: 641792 - DNA, 15 bp, Homo sapiens
agagggtcttcagcc

SEQ ID NO: 641793 - DNA, 15 bp, Homo sapiens
gagggtcttcagccc

SEQ ID NO: 641794 - DNA, 15 bp, Homo sapiens
agggtcttcagccct

SEQ ID NO: 641795 - DNA, 15 bp, Homo sapiens
gggtcttcagccctg

SEQ ID NO: 641796 - DNA, 15 bp, Homo sapiens
ggtcttcagccctgc

SEQ ID NO: 641797 - DNA, 15 bp, Homo sapiens
gtcttcagccctgcg

SEQ ID NO: 641798 - DNA, 15 bp, Homo sapiens
tcttcagccctgcgt

SEQ ID NO: 641799 - DNA, 15 bp, Homo sapiens
cttcagccctgcgtg

SEQ ID NO: 641800 - DNA, 15 bp, Homo sapiens
ttcagccctgcgtgt

SEQ ID NO: 641801 - DNA, 15 bp, Homo sapiens
tcagccctgcgtgtg

SEQ ID NO: 641802 - DNA, 15 bp, Homo sapiens
cagccctgcgtgtgc

SEQ ID NO: 641803 - DNA, 15 bp, Homo sapiens
agccctgcgtgtgca

SEQ ID NO: 641804 - DNA, 15 bp, Homo sapiens
gccctgcgtgtgcag

SEQ ID NO: 641805 - DNA, 15 bp, Homo sapiens
ccctgcgtgtgcaga

SEQ ID NO: 641806 - DNA, 15 bp, Homo sapiens
cctgcgtgtgcagat

SEQ ID NO: 641807 - DNA, 15 bp, Homo sapiens
ctgcgtgtgcagatg

SEQ ID NO: 641808 - DNA, 15 bp, Homo sapiens
tgcgtgtgcagatga

SEQ ID NO: 641809 - DNA, 15 bp, Homo sapiens
gcgtgtgcagatgac

SEQ ID NO: 641810 - DNA, 15 bp, Homo sapiens
cgtgtgcagatgaca

SEQ ID NO: 641811 - DNA, 15 bp, Homo sapiens
gtgtgcagatgacaa

SEQ ID NO: 641812 - DNA, 15 bp, Homo sapiens
tgtgcagatgacaag

SEQ ID NO: 641813 - DNA, 15 bp, Homo sapiens
gtgcagatgacaaga

SEQ ID NO: 641814 - DNA, 15 bp, Homo sapiens
tgcagatgacaagac

SEQ ID NO: 641815 - DNA, 15 bp, Homo sapiens
gcagatgacaagaca

SEQ ID NO: 641816 - DNA, 15 bp, Homo sapiens
cagatgacaagacag

SEQ ID NO: 641817 - DNA, 15 bp, Homo sapiens
agatgacaagacaga

SEQ ID NO: 641818 - DNA, 15 bp, Homo sapiens
gatgacaagacagag

SEQ ID NO: 641819 - DNA, 15 bp, Homo sapiens
atgacaagacagagg

SEQ ID NO: 641820 - DNA, 15 bp, Homo sapiens
tgacaagacagaggc

SEQ ID NO: 641821 - DNA, 15 bp, Homo sapiens
gacaagacagaggct

SEQ ID NO: 641822 - DNA, 15 bp, Homo sapiens
acaagacagaggctg

SEQ ID NO: 641823 - DNA, 15 bp, Homo sapiens
caagacagaggctgg

SEQ ID NO: 641824 - DNA, 15 bp, Homo sapiens
aagacagaggctggt

SEQ ID NO: 641825 - DNA, 15 bp, Homo sapiens
agacagaggctggtg

SEQ ID NO: 641826 - DNA, 15 bp, Homo sapiens
gacagaggctggtgt

SEQ ID NO: 641827 - DNA, 15 bp, Homo sapiens
acagaggctggtgtt

SEQ ID NO: 641828 - DNA, 15 bp, Homo sapiens
cagaggctggtgttt

SEQ ID NO: 641829 - DNA, 15 bp, Homo sapiens
agaggctggtgtttc

SEQ ID NO: 641830 - DNA, 15 bp, Homo sapiens
gaggctggtgtttcc

SEQ ID NO: 641831 - DNA, 15 bp, Homo sapiens
aggctggtgtttcca

SEQ ID NO: 641832 - DNA, 15 bp, Homo sapiens
ggctggtgtttccag

SEQ ID NO: 641833 - DNA, 15 bp, Homo sapiens
gctggtgtttccaga

SEQ ID NO: 641834 - DNA, 15 bp, Homo sapiens
ctggtgtttccagac

SEQ ID NO: 641835 - DNA, 15 bp, Homo sapiens
tggtgtttccagaca

SEQ ID NO: 641836 - DNA, 15 bp, Homo sapiens
ggtgtttccagacag

SEQ ID NO: 641837 - DNA, 15 bp, Homo sapiens
gtgtttccagacagg

SEQ ID NO: 641838 - DNA, 15 bp, Homo sapiens
tgtttccagacaggt

SEQ ID NO: 641839 - DNA, 15 bp, Homo sapiens
gtttccagacaggta

SEQ ID NO: 641840 - DNA, 15 bp, Homo sapiens
tttccagacaggtaa

SEQ ID NO: 641841 - DNA, 15 bp, Homo sapiens
ttccagacaggtaag

SEQ ID NO: 641842 - DNA, 15 bp, Homo sapiens
tccagacaggtaagc

SEQ ID NO: 641843 - DNA, 15 bp, Homo sapiens
ccagacaggtaagcc

SEQ ID NO: 641844 - DNA, 15 bp, Homo sapiens
cagacaggtaagcca

SEQ ID NO: 641845 - DNA, 15 bp, Homo sapiens
agacaggtaagccat

SEQ ID NO: 641846 - DNA, 15 bp, Homo sapiens
gacaggtaagccata

SEQ ID NO: 641847 - DNA, 15 bp, Homo sapiens
acaggtaagccatat

SEQ ID NO: 641848 - DNA, 15 bp, Homo sapiens
caggtaagccatatg

SEQ ID NO: 641849 - DNA, 15 bp, Homo sapiens
aggtaagccatatgc

SEQ ID NO: 641850 - DNA, 15 bp, Homo sapiens
ggtaagccatatgcc

SEQ ID NO: 641851 - DNA, 15 bp, Homo sapiens
gtaagccatatgcca

SEQ ID NO: 641852 - DNA, 15 bp, Homo sapiens
taagccatatgccag

SEQ ID NO: 641853 - DNA, 15 bp, Homo sapiens
aagccatatgccagg

SEQ ID NO: 641854 - DNA, 15 bp, Homo sapiens
agccatatgccaggg

SEQ ID NO: 641855 - DNA, 15 bp, Homo sapiens
gccatatgccagggc

SEQ ID NO: 641856 - DNA, 15 bp, Homo sapiens
ccatatgccagggca

SEQ ID NO: 641857 - DNA, 15 bp, Homo sapiens
catatgccagggcaa

SEQ ID NO: 641858 - DNA, 15 bp, Homo sapiens
atatgccagggcaac

SEQ ID NO: 641859 - DNA, 15 bp, Homo sapiens
tatgccagggcaaca

SEQ ID NO: 641860 - DNA, 15 bp, Homo sapiens
atgccagggcaacat

SEQ ID NO: 641861 - DNA, 15 bp, Homo sapiens
tgccagggcaacatt

SEQ ID NO: 641862 - DNA, 15 bp, Homo sapiens
gccagggcaacattg

SEQ ID NO: 641863 - DNA, 15 bp, Homo sapiens
ccagggcaacattgc

SEQ ID NO: 641864 - DNA, 15 bp, Homo sapiens
cagggcaacattgca

SEQ ID NO: 641865 - DNA, 15 bp, Homo sapiens
agggcaacattgcac

SEQ ID NO: 641866 - DNA, 15 bp, Homo sapiens
gggcaacattgcaca

SEQ ID NO: 641867 - DNA, 15 bp, Homo sapiens
ggcaacattgcacag

SEQ ID NO: 641868 - DNA, 15 bp, Homo sapiens
gcaacattgcacaga

SEQ ID NO: 641869 - DNA, 15 bp, Homo sapiens
caacattgcacagaa

SEQ ID NO: 641870 - DNA, 15 bp, Homo sapiens
aacattgcacagaat

SEQ ID NO: 641871 - DNA, 15 bp, Homo sapiens
acattgcacagaatg

SEQ ID NO: 641872 - DNA, 15 bp, Homo sapiens
cattgcacagaatgg

SEQ ID NO: 641873 - DNA, 15 bp, Homo sapiens
attgcacagaatgga

SEQ ID NO: 641874 - DNA, 15 bp, Homo sapiens
ttgcacagaatggat

SEQ ID NO: 641875 - DNA, 15 bp, Homo sapiens
tgcacagaatggatg

SEQ ID NO: 641876 - DNA, 15 bp, Homo sapiens
gcacagaatggatgt

SEQ ID NO: 641877 - DNA, 15 bp, Homo sapiens
cacagaatggatgtg

SEQ ID NO: 641878 - DNA, 15 bp, Homo sapiens
acagaatggatgtga

SEQ ID NO: 641879 - DNA, 15 bp, Homo sapiens
cagaatggatgtgaa

SEQ ID NO: 641880 - DNA, 15 bp, Homo sapiens
agaatggatgtgaag

SEQ ID NO: 641881 - DNA, 15 bp, Homo sapiens
gaatggatgtgaagg

SEQ ID NO: 641882 - DNA, 15 bp, Homo sapiens
aatggatgtgaaggc

SEQ ID NO: 641883 - DNA, 15 bp, Homo sapiens
atggatgtgaaggca

SEQ ID NO: 641884 - DNA, 15 bp, Homo sapiens
tggatgtgaaggcaa

SEQ ID NO: 641885 - DNA, 15 bp, Homo sapiens
ggatgtgaaggcaag

SEQ ID NO: 641886 - DNA, 15 bp, Homo sapiens
gatgtgaaggcaagg

SEQ ID NO: 641887 - DNA, 15 bp, Homo sapiens
atgtgaaggcaaggc

SEQ ID NO: 641888 - DNA, 15 bp, Homo sapiens
tgtgaaggcaaggca

SEQ ID NO: 641889 - DNA, 15 bp, Homo sapiens
gtgaaggcaaggcat

SEQ ID NO: 641890 - DNA, 15 bp, Homo sapiens
tgaaggcaaggcata

SEQ ID NO: 641891 - DNA, 15 bp, Homo sapiens
gaaggcaaggcatac

SEQ ID NO: 641892 - DNA, 15 bp, Homo sapiens
aaggcaaggcatact

SEQ ID NO: 641893 - DNA, 15 bp, Homo sapiens
aggcaaggcatacta

SEQ ID NO: 641894 - DNA, 15 bp, Homo sapiens
ggcaaggcatactat

SEQ ID NO: 641895 - DNA, 15 bp, Homo sapiens
gcaaggcatactatc

SEQ ID NO: 641896 - DNA, 15 bp, Homo sapiens
caaggcatactatca

SEQ ID NO: 641897 - DNA, 15 bp, Homo sapiens
aaggcatactatcag

SEQ ID NO: 641898 - DNA, 15 bp, Homo sapiens
aggcatactatcagt

SEQ ID NO: 641899 - DNA, 15 bp, Homo sapiens
ggcatactatcagtg

SEQ ID NO: 641900 - DNA, 15 bp, Homo sapiens
gcatactatcagtgg

SEQ ID NO: 641901 - DNA, 15 bp, Homo sapiens
catactatcagtggg

SEQ ID NO: 641902 - DNA, 15 bp, Homo sapiens
atactatcagtggga

SEQ ID NO: 641903 - DNA, 15 bp, Homo sapiens
tactatcagtgggaa

SEQ ID NO: 641904 - DNA, 15 bp, Homo sapiens
actatcagtgggaag

SEQ ID NO: 641905 - DNA, 15 bp, Homo sapiens
ctatcagtgggaagc

SEQ ID NO: 641906 - DNA, 15 bp, Homo sapiens
tatcagtgggaagcc

SEQ ID NO: 641907 - DNA, 15 bp, Homo sapiens
atcagtgggaagcca

SEQ ID NO: 641908 - DNA, 15 bp, Homo sapiens
tcagtgggaagccaa

SEQ ID NO: 641909 - DNA, 15 bp, Homo sapiens
cagtgggaagccaaa

SEQ ID NO: 641910 - DNA, 15 bp, Homo sapiens
agtgggaagccaaat

SEQ ID NO: 641911 - DNA, 15 bp, Homo sapiens
gtgggaagccaaatc

SEQ ID NO: 641912 - DNA, 15 bp, Homo sapiens
tgggaagccaaatct

SEQ ID NO: 641913 - DNA, 15 bp, Homo sapiens
gggaagccaaatcta

SEQ ID NO: 641914 - DNA, 15 bp, Homo sapiens
ggaagccaaatctac

SEQ ID NO: 641915 - DNA, 15 bp, Homo sapiens
gaagccaaatctaca

SEQ ID NO: 641916 - DNA, 15 bp, Homo sapiens
aagccaaatctacaa

SEQ ID NO: 641917 - DNA, 15 bp, Homo sapiens
agccaaatctacaat

SEQ ID NO: 641918 - DNA, 15 bp, Homo sapiens
gccaaatctacaata

SEQ ID NO: 641919 - DNA, 15 bp, Homo sapiens
ccaaatctacaataa

SEQ ID NO: 641920 - DNA, 15 bp, Homo sapiens
caaatctacaataac

SEQ ID NO: 641921 - DNA, 15 bp, Homo sapiens
aaatctacaataact

SEQ ID NO: 641922 - DNA, 15 bp, Homo sapiens
aatctacaataactg

SEQ ID NO: 641923 - DNA, 15 bp, Homo sapiens
atctacaataactgc

SEQ ID NO: 641924 - DNA, 15 bp, Homo sapiens
tctacaataactgct

SEQ ID NO: 641925 - DNA, 15 bp, Homo sapiens
ctacaataactgcta

SEQ ID NO: 641926 - DNA, 15 bp, Homo sapiens
tacaataactgctac

SEQ ID NO: 641927 - DNA, 15 bp, Homo sapiens
acaataactgctact

SEQ ID NO: 641928 - DNA, 15 bp, Homo sapiens
caataactgctacta

SEQ ID NO: 641929 - DNA, 15 bp, Homo sapiens
aataactgctactac

SEQ ID NO: 641930 - DNA, 15 bp, Homo sapiens
ataactgctactact

SEQ ID NO: 641931 - DNA, 15 bp, Homo sapiens
taactgctactacta

SEQ ID NO: 641932 - DNA, 15 bp, Homo sapiens
aactgctactactaa

SEQ ID NO: 641933 - DNA, 15 bp, Homo sapiens
actgctactactaaa

SEQ ID NO: 641934 - DNA, 15 bp, Homo sapiens
ctgctactactaaat

SEQ ID NO: 641935 - DNA, 15 bp, Homo sapiens
tgctactactaaata

SEQ ID NO: 641936 - DNA, 15 bp, Homo sapiens
gctactactaaataa

SEQ ID NO: 641937 - DNA, 15 bp, Homo sapiens
ctactactaaataaa

SEQ ID NO: 641938 - DNA, 15 bp, Homo sapiens
tactactaaataaag

SEQ ID NO: 641939 - DNA, 15 bp, Homo sapiens
actactaaataaaga

SEQ ID NO: 641940 - DNA, 15 bp, Homo sapiens
ctactaaataaagat

SEQ ID NO: 641941 - DNA, 15 bp, Homo sapiens
tactaaataaagatc

SEQ ID NO: 641942 - DNA, 15 bp, Homo sapiens
actaaataaagatct

SEQ ID NO: 641943 - DNA, 15 bp, Homo sapiens
ctaaataaagatctt

SEQ ID NO: 641944 - DNA, 15 bp, Homo sapiens
taaataaagatcttt

SEQ ID NO: 641945 - DNA, 15 bp, Homo sapiens
aaataaagatctttt

SEQ ID NO: 641946 - DNA, 15 bp, Homo sapiens
aataaagatcttttt

SEQ ID NO: 641947 - DNA, 15 bp, Homo sapiens
ataaagatctttttt

SEQ ID NO: 641948 - DNA, 15 bp, Homo sapiens
taaagatcttttttt

SEQ ID NO: 641949 - DNA, 15 bp, Homo sapiens
aaagatctttttttt

SEQ ID NO: 641950 - DNA, 15 bp, Homo sapiens
aagatcttttttttt

SEQ ID NO: 641951 - DNA, 15 bp, Homo sapiens
agatctttttttttt

SEQ ID NO: 641952 - DNA, 15 bp, Homo sapiens
gatcttttttttttt

SEQ ID NO: 641953 - DNA, 15 bp, Homo sapiens
atctttttttttttt

SEQ ID NO: 641954 - DNA, 15 bp, Homo sapiens
tcttttttttttttc

SEQ ID NO: 641955 - DNA, 15 bp, Homo sapiens
cttttttttttttca

SEQ ID NO: 641956 - DNA, 15 bp, Homo sapiens
ttttttttttttcaa

SEQ ID NO: 641957 - DNA, 15 bp, Homo sapiens
tttttttttttcaag

SEQ ID NO: 641958 - DNA, 15 bp, Homo sapiens
ttttttttttcaagg

SEQ ID NO: 641959 - DNA, 15 bp, Homo sapiens
tttttttttcaagga

SEQ ID NO: 641960 - DNA, 15 bp, Homo sapiens
ttttttttcaaggaa

SEQ ID NO: 641961 - DNA, 15 bp, Homo sapiens
tttttttcaaggaaa

SEQ ID NO: 641962 - DNA, 15 bp, Homo sapiens
ttttttcaaggaaaa

SEQ ID NO: 641963 - DNA, 15 bp, Homo sapiens
tttttcaaggaaaat

SEQ ID NO: 641964 - DNA, 15 bp, Homo sapiens
ttttcaaggaaaatc

SEQ ID NO: 641965 - DNA, 15 bp, Homo sapiens
tttcaaggaaaatct

SEQ ID NO: 641966 - DNA, 15 bp, Homo sapiens
ttcaaggaaaatcta

SEQ ID NO: 641967 - DNA, 15 bp, Homo sapiens
tcaaggaaaatctac

SEQ ID NO: 641968 - DNA, 15 bp, Homo sapiens
caaggaaaatctacc

SEQ ID NO: 641969 - DNA, 15 bp, Homo sapiens
aaggaaaatctacct

SEQ ID NO: 641970 - DNA, 15 bp, Homo sapiens
aggaaaatctacctg

SEQ ID NO: 641971 - DNA, 15 bp, Homo sapiens
ggaaaatctacctga

SEQ ID NO: 641972 - DNA, 15 bp, Homo sapiens
gaaaatctacctgat

SEQ ID NO: 641973 - DNA, 15 bp, Homo sapiens
aaaatctacctgatt

SEQ ID NO: 641974 - DNA, 15 bp, Homo sapiens
aaatctacctgattt

SEQ ID NO: 641975 - DNA, 15 bp, Homo sapiens
aatctacctgatttt

SEQ ID NO: 641976 - DNA, 15 bp, Homo sapiens
atctacctgattttt

SEQ ID NO: 641977 - DNA, 15 bp, Homo sapiens
tctacctgattttta

SEQ ID NO: 641978 - DNA, 15 bp, Homo sapiens
ctacctgatttttat

SEQ ID NO: 641979 - DNA, 15 bp, Homo sapiens
tacctgatttttata

SEQ ID NO: 641980 - DNA, 15 bp, Homo sapiens
acctgatttttataa

SEQ ID NO: 641981 - DNA, 15 bp, Homo sapiens
cctgatttttataat

SEQ ID NO: 641982 - DNA, 15 bp, Homo sapiens
ctgatttttataatg

SEQ ID NO: 641983 - DNA, 15 bp, Homo sapiens
tgatttttataatga

SEQ ID NO: 641984 - DNA, 15 bp, Homo sapiens
gatttttataatgac

SEQ ID NO: 641985 - DNA, 15 bp, Homo sapiens
atttttataatgact

SEQ ID NO: 641986 - DNA, 15 bp, Homo sapiens
tttttataatgactg

SEQ ID NO: 641987 - DNA, 15 bp, Homo sapiens
ttttataatgactgg

SEQ ID NO: 641988 - DNA, 15 bp, Homo sapiens
tttataatgactgga

SEQ ID NO: 641989 - DNA, 15 bp, Homo sapiens
ttataatgactggat

SEQ ID NO: 641990 - DNA, 15 bp, Homo sapiens
tataatgactggatg

SEQ ID NO: 641991 - DNA, 15 bp, Homo sapiens
ataatgactggatgt

SEQ ID NO: 641992 - DNA, 15 bp, Homo sapiens
taatgactggatgtt

SEQ ID NO: 641993 - DNA, 15 bp, Homo sapiens
aatgactggatgttc

SEQ ID NO: 641994 - DNA, 15 bp, Homo sapiens
atgactggatgttca

SEQ ID NO: 641995 - DNA, 15 bp, Homo sapiens
tgactggatgttcat

SEQ ID NO: 641996 - DNA, 15 bp, Homo sapiens
gactggatgttcatt

SEQ ID NO: 641997 - DNA, 15 bp, Homo sapiens
actggatgttcattg

SEQ ID NO: 641998 - DNA, 15 bp, Homo sapiens
ctggatgttcattgc

SEQ ID NO: 641999 - DNA, 15 bp, Homo sapiens
tggatgttcattgct

SEQ ID NO: 642000 - DNA, 15 bp, Homo sapiens
ggatgttcattgcta

SEQ ID NO: 642001 - DNA, 15 bp, Homo sapiens
gatgttcattgctaa

SEQ ID NO: 642002 - DNA, 15 bp, Homo sapiens
atgttcattgctaaa

SEQ ID NO: 642003 - DNA, 15 bp, Homo sapiens
tgttcattgctaaac

SEQ ID NO: 642004 - DNA, 15 bp, Homo sapiens
gttcattgctaaaca

SEQ ID NO: 642005 - DNA, 15 bp, Homo sapiens
ttcattgctaaacat

SEQ ID NO: 642006 - DNA, 15 bp, Homo sapiens
tcattgctaaacatc

SEQ ID NO: 642007 - DNA, 15 bp, Homo sapiens
cattgctaaacatct

SEQ ID NO: 642008 - DNA, 15 bp, Homo sapiens
attgctaaacatctg

SEQ ID NO: 642009 - DNA, 15 bp, Homo sapiens
ttgctaaacatctgc

SEQ ID NO: 642010 - DNA, 15 bp, Homo sapiens
tgctaaacatctgcc

SEQ ID NO: 642011 - DNA, 15 bp, Homo sapiens
gctaaacatctgcct

SEQ ID NO: 642012 - DNA, 15 bp, Homo sapiens
ctaaacatctgcctg

SEQ ID NO: 642013 - DNA, 15 bp, Homo sapiens
taaacatctgcctga

SEQ ID NO: 642014 - DNA, 15 bp, Homo sapiens
aaacatctgcctgat

SEQ ID NO: 642015 - DNA, 15 bp, Homo sapiens
aacatctgcctgatc

SEQ ID NO: 642016 - DNA, 15 bp, Homo sapiens
acatctgcctgatct

SEQ ID NO: 642017 - DNA, 15 bp, Homo sapiens
catctgcctgatctc

SEQ ID NO: 642018 - DNA, 15 bp, Homo sapiens
atctgcctgatctca

SEQ ID NO: 642019 - DNA, 15 bp, Homo sapiens
tctgcctgatctcat

SEQ ID NO: 642020 - DNA, 15 bp, Homo sapiens
ctgcctgatctcata

SEQ ID NO: 642021 - DNA, 15 bp, Homo sapiens
tgcctgatctcatag

SEQ ID NO: 642022 - DNA, 15 bp, Homo sapiens
gcctgatctcataga

SEQ ID NO: 642023 - DNA, 15 bp, Homo sapiens
cctgatctcatagag

SEQ ID NO: 642024 - DNA, 15 bp, Homo sapiens
ctgatctcatagagt

SEQ ID NO: 642025 - DNA, 15 bp, Homo sapiens
tgatctcatagagtc

SEQ ID NO: 642026 - DNA, 15 bp, Homo sapiens
gatctcatagagtct

SEQ ID NO: 642027 - DNA, 15 bp, Homo sapiens
atctcatagagtctg

SEQ ID NO: 642028 - DNA, 15 bp, Homo sapiens
tctcatagagtctgg

SEQ ID NO: 642029 - DNA, 15 bp, Homo sapiens
ctcatagagtctggc

SEQ ID NO: 642030 - DNA, 15 bp, Homo sapiens
tcatagagtctggcc

SEQ ID NO: 642031 - DNA, 15 bp, Homo sapiens
catagagtctggcca

SEQ ID NO: 642032 - DNA, 15 bp, Homo sapiens
atagagtctggccag

SEQ ID NO: 642033 - DNA, 15 bp, Homo sapiens
tagagtctggccagc

SEQ ID NO: 642034 - DNA, 15 bp, Homo sapiens
agagtctggccagct

SEQ ID NO: 642035 - DNA, 15 bp, Homo sapiens
gagtctggccagctt

SEQ ID NO: 642036 - DNA, 15 bp, Homo sapiens
agtctggccagcttc

SEQ ID NO: 642037 - DNA, 15 bp, Homo sapiens
gtctggccagcttcg

SEQ ID NO: 642038 - DNA, 15 bp, Homo sapiens
tctggccagcttcga

SEQ ID NO: 642039 - DNA, 15 bp, Homo sapiens
ctggccagcttcgag

SEQ ID NO: 642040 - DNA, 15 bp, Homo sapiens
tggccagcttcgaga

SEQ ID NO: 642041 - DNA, 15 bp, Homo sapiens
ggccagcttcgagaa

SEQ ID NO: 642042 - DNA, 15 bp, Homo sapiens
gccagcttcgagaaa

SEQ ID NO: 642043 - DNA, 15 bp, Homo sapiens
ccagcttcgagaaag

SEQ ID NO: 642044 - DNA, 15 bp, Homo sapiens
cagcttcgagaaaga

SEQ ID NO: 642045 - DNA, 15 bp, Homo sapiens
agcttcgagaaagag

SEQ ID NO: 642046 - DNA, 15 bp, Homo sapiens
gcttcgagaaagagt

SEQ ID NO: 642047 - DNA, 15 bp, Homo sapiens
cttcgagaaagagtt

SEQ ID NO: 642048 - DNA, 15 bp, Homo sapiens
ttcgagaaagagttg

SEQ ID NO: 642049 - DNA, 15 bp, Homo sapiens
tcgagaaagagttga

SEQ ID NO: 642050 - DNA, 15 bp, Homo sapiens
cgagaaagagttgag

SEQ ID NO: 642051 - DNA, 15 bp, Homo sapiens
gagaaagagttgaga

SEQ ID NO: 642052 - DNA, 15 bp, Homo sapiens
agaaagagttgagaa

SEQ ID NO: 642053 - DNA, 15 bp, Homo sapiens
gaaagagttgagaag

SEQ ID NO: 642054 - DNA, 15 bp, Homo sapiens
aaagagttgagaagg

SEQ ID NO: 642055 - DNA, 15 bp, Homo sapiens
aagagttgagaaggt

SEQ ID NO: 642056 - DNA, 15 bp, Homo sapiens
agagttgagaaggtt

SEQ ID NO: 642057 - DNA, 15 bp, Homo sapiens
gagttgagaaggttt

SEQ ID NO: 642058 - DNA, 15 bp, Homo sapiens
agttgagaaggtttg

SEQ ID NO: 642059 - DNA, 15 bp, Homo sapiens
gttgagaaggtttga

SEQ ID NO: 642060 - DNA, 15 bp, Homo sapiens
ttgagaaggtttgac

SEQ ID NO: 642061 - DNA, 15 bp, Homo sapiens
tgagaaggtttgaca

SEQ ID NO: 642062 - DNA, 15 bp, Homo sapiens
gagaaggtttgacat

SEQ ID NO: 642063 - DNA, 15 bp, Homo sapiens
agaaggtttgacata

SEQ ID NO: 642064 - DNA, 15 bp, Homo sapiens
gaaggtttgacatat

SEQ ID NO: 642065 - DNA, 15 bp, Homo sapiens
aaggtttgacatatg

SEQ ID NO: 642066 - DNA, 15 bp, Homo sapiens
aggtttgacatatgt

SEQ ID NO: 642067 - DNA, 15 bp, Homo sapiens
ggtttgacatatgta

SEQ ID NO: 642068 - DNA, 15 bp, Homo sapiens
gtttgacatatgtat

SEQ ID NO: 642069 - DNA, 15 bp, Homo sapiens
tttgacatatgtatt

SEQ ID NO: 642070 - DNA, 15 bp, Homo sapiens
ttgacatatgtatta

SEQ ID NO: 642071 - DNA, 15 bp, Homo sapiens
tgacatatgtattac

SEQ ID NO: 642072 - DNA, 15 bp, Homo sapiens
gacatatgtattaca

SEQ ID NO: 642073 - DNA, 15 bp, Homo sapiens
acatatgtattacat

SEQ ID NO: 642074 - DNA, 15 bp, Homo sapiens
catatgtattacatt

SEQ ID NO: 642075 - DNA, 15 bp, Homo sapiens
atatgtattacattt

SEQ ID NO: 642076 - DNA, 15 bp, Homo sapiens
tatgtattacatttg

SEQ ID NO: 642077 - DNA, 15 bp, Homo sapiens
atgtattacatttgt

SEQ ID NO: 642078 - DNA, 15 bp, Homo sapiens
tgtattacatttgtc

SEQ ID NO: 642079 - DNA, 15 bp, Homo sapiens
gtattacatttgtct

SEQ ID NO: 642080 - DNA, 15 bp, Homo sapiens
tattacatttgtctt

SEQ ID NO: 642081 - DNA, 15 bp, Homo sapiens
attacatttgtcttc

SEQ ID NO: 642082 - DNA, 15 bp, Homo sapiens
ttacatttgtcttct

SEQ ID NO: 642083 - DNA, 15 bp, Homo sapiens
tacatttgtcttctt

SEQ ID NO: 642084 - DNA, 15 bp, Homo sapiens
acatttgtcttcttg

SEQ ID NO: 642085 - DNA, 15 bp, Homo sapiens
catttgtcttcttgt

SEQ ID NO: 642086 - DNA, 15 bp, Homo sapiens
atttgtcttcttgta

SEQ ID NO: 642087 - DNA, 15 bp, Homo sapiens
tttgtcttcttgtat

SEQ ID NO: 642088 - DNA, 15 bp, Homo sapiens
ttgtcttcttgtata

SEQ ID NO: 642089 - DNA, 15 bp, Homo sapiens
tgtcttcttgtatag

SEQ ID NO: 642090 - DNA, 15 bp, Homo sapiens
gtcttcttgtatagc

SEQ ID NO: 642091 - DNA, 15 bp, Homo sapiens
tcttcttgtatagct

SEQ ID NO: 642092 - DNA, 15 bp, Homo sapiens
cttcttgtatagctt

SEQ ID NO: 642093 - DNA, 15 bp, Homo sapiens
ttcttgtatagcttc

SEQ ID NO: 642094 - DNA, 15 bp, Homo sapiens
tcttgtatagcttct

SEQ ID NO: 642095 - DNA, 15 bp, Homo sapiens
cttgtatagcttctt

SEQ ID NO: 642096 - DNA, 15 bp, Homo sapiens
ttgtatagcttctta

SEQ ID NO: 642097 - DNA, 15 bp, Homo sapiens
tgtatagcttcttaa

SEQ ID NO: 642098 - DNA, 15 bp, Homo sapiens
gtatagcttcttaac

SEQ ID NO: 642099 - DNA, 15 bp, Homo sapiens
tatagcttcttaaca

SEQ ID NO: 642100 - DNA, 15 bp, Homo sapiens
atagcttcttaacat

SEQ ID NO: 642101 - DNA, 15 bp, Homo sapiens
tagcttcttaacatt

SEQ ID NO: 642102 - DNA, 15 bp, Homo sapiens
agcttcttaacattg

SEQ ID NO: 642103 - DNA, 15 bp, Homo sapiens
gcttcttaacattgt

SEQ ID NO: 642104 - DNA, 15 bp, Homo sapiens
cttcttaacattgtt

SEQ ID NO: 642105 - DNA, 15 bp, Homo sapiens
ttcttaacattgtta

SEQ ID NO: 642106 - DNA, 15 bp, Homo sapiens
tcttaacattgttaa

SEQ ID NO: 642107 - DNA, 15 bp, Homo sapiens
cttaacattgttaac

SEQ ID NO: 642108 - DNA, 15 bp, Homo sapiens
ttaacattgttaact

SEQ ID NO: 642109 - DNA, 15 bp, Homo sapiens
taacattgttaactt

SEQ ID NO: 642110 - DNA, 15 bp, Homo sapiens
aacattgttaacttg

SEQ ID NO: 642111 - DNA, 15 bp, Homo sapiens
acattgttaacttgg

SEQ ID NO: 642112 - DNA, 15 bp, Homo sapiens
cattgttaacttggt

SEQ ID NO: 642113 - DNA, 15 bp, Homo sapiens
attgttaacttggtt

SEQ ID NO: 642114 - DNA, 15 bp, Homo sapiens
ttgttaacttggttt

SEQ ID NO: 642115 - DNA, 15 bp, Homo sapiens
tgttaacttggtttt

SEQ ID NO: 642116 - DNA, 15 bp, Homo sapiens
gttaacttggttttg

SEQ ID NO: 642117 - DNA, 15 bp, Homo sapiens
ttaacttggttttga

SEQ ID NO: 642118 - DNA, 15 bp, Homo sapiens
taacttggttttgaa

SEQ ID NO: 642119 - DNA, 15 bp, Homo sapiens
aacttggttttgaag

SEQ ID NO: 642120 - DNA, 15 bp, Homo sapiens
acttggttttgaagc

SEQ ID NO: 642121 - DNA, 15 bp, Homo sapiens
cttggttttgaagca

SEQ ID NO: 642122 - DNA, 15 bp, Homo sapiens
ttggttttgaagcat

SEQ ID NO: 642123 - DNA, 15 bp, Homo sapiens
tggttttgaagcata

SEQ ID NO: 642124 - DNA, 15 bp, Homo sapiens
ggttttgaagcataa

SEQ ID NO: 642125 - DNA, 15 bp, Homo sapiens
gttttgaagcataaa

SEQ ID NO: 642126 - DNA, 15 bp, Homo sapiens
ttttgaagcataaaa

SEQ ID NO: 642127 - DNA, 15 bp, Homo sapiens
tttgaagcataaaac

SEQ ID NO: 642128 - DNA, 15 bp, Homo sapiens
ttgaagcataaaaca

SEQ ID NO: 642129 - DNA, 15 bp, Homo sapiens
tgaagcataaaacat

SEQ ID NO: 642130 - DNA, 15 bp, Homo sapiens
gaagcataaaacatt

SEQ ID NO: 642131 - DNA, 15 bp, Homo sapiens
aagcataaaacatta

SEQ ID NO: 642132 - DNA, 15 bp, Homo sapiens
agcataaaacattac

SEQ ID NO: 642133 - DNA, 15 bp, Homo sapiens
gcataaaacattact

SEQ ID NO: 642134 - DNA, 15 bp, Homo sapiens
cataaaacattactg

SEQ ID NO: 642135 - DNA, 15 bp, Homo sapiens
ataaaacattactga

SEQ ID NO: 642136 - DNA, 15 bp, Homo sapiens
taaaacattactgag

SEQ ID NO: 642137 - DNA, 15 bp, Homo sapiens
aaaacattactgaga

SEQ ID NO: 642138 - DNA, 15 bp, Homo sapiens
aaacattactgagat

SEQ ID NO: 642139 - DNA, 15 bp, Homo sapiens
aacattactgagatt

SEQ ID NO: 642140 - DNA, 15 bp, Homo sapiens
acattactgagattg

SEQ ID NO: 642141 - DNA, 15 bp, Homo sapiens
cattactgagattga

SEQ ID NO: 642142 - DNA, 15 bp, Homo sapiens
attactgagattgat

SEQ ID NO: 642143 - DNA, 15 bp, Homo sapiens
ttactgagattgatt

SEQ ID NO: 642144 - DNA, 15 bp, Homo sapiens
tactgagattgattt

SEQ ID NO: 642145 - DNA, 15 bp, Homo sapiens
actgagattgatttg

SEQ ID NO: 642146 - DNA, 15 bp, Homo sapiens
ctgagattgatttga

SEQ ID NO: 642147 - DNA, 15 bp, Homo sapiens
tgagattgatttgag

SEQ ID NO: 642148 - DNA, 15 bp, Homo sapiens
gagattgatttgagt

SEQ ID NO: 642149 - DNA, 15 bp, Homo sapiens
agattgatttgagtc

SEQ ID NO: 642150 - DNA, 15 bp, Homo sapiens
gattgatttgagtca

SEQ ID NO: 642151 - DNA, 15 bp, Homo sapiens
attgatttgagtcaa

SEQ ID NO: 642152 - DNA, 15 bp, Homo sapiens
ttgatttgagtcaat

SEQ ID NO: 642153 - DNA, 15 bp, Homo sapiens
tgatttgagtcaatt

SEQ ID NO: 642154 - DNA, 15 bp, Homo sapiens
gatttgagtcaattg

SEQ ID NO: 642155 - DNA, 15 bp, Homo sapiens
atttgagtcaattgc

SEQ ID NO: 642156 - DNA, 15 bp, Homo sapiens
tttgagtcaattgct

SEQ ID NO: 642157 - DNA, 15 bp, Homo sapiens
ttgagtcaattgctc

SEQ ID NO: 642158 - DNA, 15 bp, Homo sapiens
tgagtcaattgctcc

SEQ ID NO: 642159 - DNA, 15 bp, Homo sapiens
gagtcaattgctcca

SEQ ID NO: 642160 - DNA, 15 bp, Homo sapiens
agtcaattgctccat

SEQ ID NO: 642161 - DNA, 15 bp, Homo sapiens
gtcaattgctccatt

SEQ ID NO: 642162 - DNA, 15 bp, Homo sapiens
tcaattgctccattt

SEQ ID NO: 642163 - DNA, 15 bp, Homo sapiens
caattgctccatttg

SEQ ID NO: 642164 - DNA, 15 bp, Homo sapiens
aattgctccatttgt

SEQ ID NO: 642165 - DNA, 15 bp, Homo sapiens
attgctccatttgtt

SEQ ID NO: 642166 - DNA, 15 bp, Homo sapiens
ttgctccatttgttt

SEQ ID NO: 642167 - DNA, 15 bp, Homo sapiens
tgctccatttgtttt

SEQ ID NO: 642168 - DNA, 15 bp, Homo sapiens
gctccatttgttttc

SEQ ID NO: 642169 - DNA, 15 bp, Homo sapiens
ctccatttgttttca

SEQ ID NO: 642170 - DNA, 15 bp, Homo sapiens
tccatttgttttcag

SEQ ID NO: 642171 - DNA, 15 bp, Homo sapiens
ccatttgttttcagt

SEQ ID NO: 642172 - DNA, 15 bp, Homo sapiens
catttgttttcagtt

SEQ ID NO: 642173 - DNA, 15 bp, Homo sapiens
atttgttttcagtta

SEQ ID NO: 642174 - DNA, 15 bp, Homo sapiens
tttgttttcagttaa

SEQ ID NO: 642175 - DNA, 15 bp, Homo sapiens
ttgttttcagttaaa

SEQ ID NO: 642176 - DNA, 15 bp, Homo sapiens
tgttttcagttaaac

SEQ ID NO: 642177 - DNA, 15 bp, Homo sapiens
gttttcagttaaaca

SEQ ID NO: 642178 - DNA, 15 bp, Homo sapiens
ttttcagttaaacat

SEQ ID NO: 642179 - DNA, 15 bp, Homo sapiens
tttcagttaaacatg

SEQ ID NO: 642180 - DNA, 15 bp, Homo sapiens
ttcagttaaacatgc

SEQ ID NO: 642181 - DNA, 15 bp, Homo sapiens
tcagttaaacatgct

SEQ ID NO: 642182 - DNA, 15 bp, Homo sapiens
cagttaaacatgctc

SEQ ID NO: 642183 - DNA, 15 bp, Homo sapiens
agttaaacatgctca

SEQ ID NO: 642184 - DNA, 15 bp, Homo sapiens
gttaaacatgctcag

SEQ ID NO: 642185 - DNA, 15 bp, Homo sapiens
ttaaacatgctcagc

SEQ ID NO: 642186 - DNA, 15 bp, Homo sapiens
taaacatgctcagca

SEQ ID NO: 642187 - DNA, 15 bp, Homo sapiens
aaacatgctcagcat

SEQ ID NO: 642188 - DNA, 15 bp, Homo sapiens
aacatgctcagcatt

SEQ ID NO: 642189 - DNA, 15 bp, Homo sapiens
acatgctcagcattg

SEQ ID NO: 642190 - DNA, 15 bp, Homo sapiens
catgctcagcattga

SEQ ID NO: 642191 - DNA, 15 bp, Homo sapiens
atgctcagcattgat

SEQ ID NO: 642192 - DNA, 15 bp, Homo sapiens
tgctcagcattgatc

SEQ ID NO: 642193 - DNA, 15 bp, Homo sapiens
gctcagcattgatca

SEQ ID NO: 642194 - DNA, 15 bp, Homo sapiens
ctcagcattgatcat

SEQ ID NO: 642195 - DNA, 15 bp, Homo sapiens
tcagcattgatcatc

SEQ ID NO: 642196 - DNA, 15 bp, Homo sapiens
cagcattgatcatct

SEQ ID NO: 642197 - DNA, 15 bp, Homo sapiens
agcattgatcatctc

SEQ ID NO: 642198 - DNA, 15 bp, Homo sapiens
gcattgatcatctca

SEQ ID NO: 642199 - DNA, 15 bp, Homo sapiens
cattgatcatctcac

SEQ ID NO: 642200 - DNA, 15 bp, Homo sapiens
attgatcatctcaca

SEQ ID NO: 642201 - DNA, 15 bp, Homo sapiens
ttgatcatctcacag

SEQ ID NO: 642202 - DNA, 15 bp, Homo sapiens
tgatcatctcacaga

SEQ ID NO: 642203 - DNA, 15 bp, Homo sapiens
gatcatctcacagac

SEQ ID NO: 642204 - DNA, 15 bp, Homo sapiens
atcatctcacagacc

SEQ ID NO: 642205 - DNA, 15 bp, Homo sapiens
tcatctcacagacca

SEQ ID NO: 642206 - DNA, 15 bp, Homo sapiens
catctcacagaccac

SEQ ID NO: 642207 - DNA, 15 bp, Homo sapiens
atctcacagaccaca

SEQ ID NO: 642208 - DNA, 15 bp, Homo sapiens
tctcacagaccacaa

SEQ ID NO: 642209 - DNA, 15 bp, Homo sapiens
ctcacagaccacaag

SEQ ID NO: 642210 - DNA, 15 bp, Homo sapiens
tcacagaccacaagt

SEQ ID NO: 642211 - DNA, 15 bp, Homo sapiens
cacagaccacaagtc

SEQ ID NO: 642212 - DNA, 15 bp, Homo sapiens
acagaccacaagtca

SEQ ID NO: 642213 - DNA, 15 bp, Homo sapiens
cagaccacaagtcac

SEQ ID NO: 642214 - DNA, 15 bp, Homo sapiens
agaccacaagtcaca

SEQ ID NO: 642215 - DNA, 15 bp, Homo sapiens
gaccacaagtcacag

SEQ ID NO: 642216 - DNA, 15 bp, Homo sapiens
accacaagtcacagc

SEQ ID NO: 642217 - DNA, 15 bp, Homo sapiens
ccacaagtcacagcg

SEQ ID NO: 642218 - DNA, 15 bp, Homo sapiens
cacaagtcacagcgc

SEQ ID NO: 642219 - DNA, 15 bp, Homo sapiens
acaagtcacagcgcc

SEQ ID NO: 642220 - DNA, 15 bp, Homo sapiens
caagtcacagcgcct

SEQ ID NO: 642221 - DNA, 15 bp, Homo sapiens
aagtcacagcgcctt

SEQ ID NO: 642222 - DNA, 15 bp, Homo sapiens
agtcacagcgccttg

SEQ ID NO: 642223 - DNA, 15 bp, Homo sapiens
gtcacagcgccttgc

SEQ ID NO: 642224 - DNA, 15 bp, Homo sapiens
tcacagcgccttgca

SEQ ID NO: 642225 - DNA, 15 bp, Homo sapiens
cacagcgccttgcac

SEQ ID NO: 642226 - DNA, 15 bp, Homo sapiens
acagcgccttgcacg

SEQ ID NO: 642227 - DNA, 15 bp, Homo sapiens
cagcgccttgcacgt

SEQ ID NO: 642228 - DNA, 15 bp, Homo sapiens
agcgccttgcacgtc

SEQ ID NO: 642229 - DNA, 15 bp, Homo sapiens
gcgccttgcacgtct

SEQ ID NO: 642230 - DNA, 15 bp, Homo sapiens
cgccttgcacgtcta

SEQ ID NO: 642231 - DNA, 15 bp, Homo sapiens
gccttgcacgtctag

SEQ ID NO: 642232 - DNA, 15 bp, Homo sapiens
ccttgcacgtctagt

SEQ ID NO: 642233 - DNA, 15 bp, Homo sapiens
cttgcacgtctagtt

SEQ ID NO: 642234 - DNA, 15 bp, Homo sapiens
ttgcacgtctagttc

SEQ ID NO: 642235 - DNA, 15 bp, Homo sapiens
tgcacgtctagttct

SEQ ID NO: 642236 - DNA, 15 bp, Homo sapiens
gcacgtctagttctg

SEQ ID NO: 642237 - DNA, 15 bp, Homo sapiens
cacgtctagttctgg

SEQ ID NO: 642238 - DNA, 15 bp, Homo sapiens
acgtctagttctggg

SEQ ID NO: 642239 - DNA, 15 bp, Homo sapiens
cgtctagttctggga

SEQ ID NO: 642240 - DNA, 15 bp, Homo sapiens
gtctagttctgggat

SEQ ID NO: 642241 - DNA, 15 bp, Homo sapiens
tctagttctgggatg

SEQ ID NO: 642242 - DNA, 15 bp, Homo sapiens
ctagttctgggatgc

SEQ ID NO: 642243 - DNA, 15 bp, Homo sapiens
tagttctgggatgca

SEQ ID NO: 642244 - DNA, 15 bp, Homo sapiens
agttctgggatgcat

SEQ ID NO: 642245 - DNA, 15 bp, Homo sapiens
gttctgggatgcatc

SEQ ID NO: 642246 - DNA, 15 bp, Homo sapiens
ttctgggatgcatca

SEQ ID NO: 642247 - DNA, 15 bp, Homo sapiens
tctgggatgcatcac

SEQ ID NO: 642248 - DNA, 15 bp, Homo sapiens
ctgggatgcatcacc

SEQ ID NO: 642249 - DNA, 15 bp, Homo sapiens
tgggatgcatcacca

SEQ ID NO: 642250 - DNA, 15 bp, Homo sapiens
gggatgcatcaccat

SEQ ID NO: 642251 - DNA, 15 bp, Homo sapiens
ggatgcatcaccatg

SEQ ID NO: 642252 - DNA, 15 bp, Homo sapiens
gatgcatcaccatgg

SEQ ID NO: 642253 - DNA, 15 bp, Homo sapiens
atgcatcaccatggc

SEQ ID NO: 642254 - DNA, 15 bp, Homo sapiens
tgcatcaccatggca

SEQ ID NO: 642255 - DNA, 15 bp, Homo sapiens
gcatcaccatggcat

SEQ ID NO: 642256 - DNA, 15 bp, Homo sapiens
catcaccatggcata

SEQ ID NO: 642257 - DNA, 15 bp, Homo sapiens
atcaccatggcatat

SEQ ID NO: 642258 - DNA, 15 bp, Homo sapiens
tcaccatggcatatg

SEQ ID NO: 642259 - DNA, 15 bp, Homo sapiens
caccatggcatatgt

SEQ ID NO: 642260 - DNA, 15 bp, Homo sapiens
accatggcatatgtg

SEQ ID NO: 642261 - DNA, 15 bp, Homo sapiens
ccatggcatatgtgt

SEQ ID NO: 642262 - DNA, 15 bp, Homo sapiens
catggcatatgtgtg

SEQ ID NO: 642263 - DNA, 15 bp, Homo sapiens
atggcatatgtgtgg

SEQ ID NO: 642264 - DNA, 15 bp, Homo sapiens
tggcatatgtgtggg

SEQ ID NO: 642265 - DNA, 15 bp, Homo sapiens
ggcatatgtgtgggg

SEQ ID NO: 642266 - DNA, 15 bp, Homo sapiens
gcatatgtgtggggc

SEQ ID NO: 642267 - DNA, 15 bp, Homo sapiens
catatgtgtggggca

SEQ ID NO: 642268 - DNA, 15 bp, Homo sapiens
atatgtgtggggcaa

SEQ ID NO: 642269 - DNA, 15 bp, Homo sapiens
tatgtgtggggcaaa

SEQ ID NO: 642270 - DNA, 15 bp, Homo sapiens
atgtgtggggcaaag

SEQ ID NO: 642271 - DNA, 15 bp, Homo sapiens
tgtgtggggcaaagg

SEQ ID NO: 642272 - DNA, 15 bp, Homo sapiens
gtgtggggcaaaggt

SEQ ID NO: 642273 - DNA, 15 bp, Homo sapiens
tgtggggcaaaggtc

SEQ ID NO: 642274 - DNA, 15 bp, Homo sapiens
gtggggcaaaggtca

SEQ ID NO: 642275 - DNA, 15 bp, Homo sapiens
tggggcaaaggtcat

SEQ ID NO: 642276 - DNA, 15 bp, Homo sapiens
ggggcaaaggtcatg

SEQ ID NO: 642277 - DNA, 15 bp, Homo sapiens
gggcaaaggtcatgg

SEQ ID NO: 642278 - DNA, 15 bp, Homo sapiens
ggcaaaggtcatgga

SEQ ID NO: 642279 - DNA, 15 bp, Homo sapiens
gcaaaggtcatggag

SEQ ID NO: 642280 - DNA, 15 bp, Homo sapiens
caaaggtcatggaga

SEQ ID NO: 642281 - DNA, 15 bp, Homo sapiens
aaaggtcatggagat

SEQ ID NO: 642282 - DNA, 15 bp, Homo sapiens
aaggtcatggagatg

SEQ ID NO: 642283 - DNA, 15 bp, Homo sapiens
aggtcatggagatgt

SEQ ID NO: 642284 - DNA, 15 bp, Homo sapiens
ggtcatggagatgtc

SEQ ID NO: 642285 - DNA, 15 bp, Homo sapiens
gtcatggagatgtcc

SEQ ID NO: 642286 - DNA, 15 bp, Homo sapiens
tcatggagatgtccg

SEQ ID NO: 642287 - DNA, 15 bp, Homo sapiens
catggagatgtccgt

SEQ ID NO: 642288 - DNA, 15 bp, Homo sapiens
atggagatgtccgta

SEQ ID NO: 642289 - DNA, 15 bp, Homo sapiens
tggagatgtccgtaa

SEQ ID NO: 642290 - DNA, 15 bp, Homo sapiens
ggagatgtccgtaag

SEQ ID NO: 642291 - DNA, 15 bp, Homo sapiens
gagatgtccgtaagg

SEQ ID NO: 642292 - DNA, 15 bp, Homo sapiens
agatgtccgtaaggt

SEQ ID NO: 642293 - DNA, 15 bp, Homo sapiens
gatgtccgtaaggtt

SEQ ID NO: 642294 - DNA, 15 bp, Homo sapiens
atgtccgtaaggttt

SEQ ID NO: 642295 - DNA, 15 bp, Homo sapiens
tgtccgtaaggtttg

SEQ ID NO: 642296 - DNA, 15 bp, Homo sapiens
gtccgtaaggtttgg

SEQ ID NO: 642297 - DNA, 15 bp, Homo sapiens
tccgtaaggtttgga

SEQ ID NO: 642298 - DNA, 15 bp, Homo sapiens
ccgtaaggtttggag

SEQ ID NO: 642299 - DNA, 15 bp, Homo sapiens
cgtaaggtttggaga

SEQ ID NO: 642300 - DNA, 15 bp, Homo sapiens
gtaaggtttggagat

SEQ ID NO: 642301 - DNA, 15 bp, Homo sapiens
taaggtttggagatt

SEQ ID NO: 642302 - DNA, 15 bp, Homo sapiens
aaggtttggagattt

SEQ ID NO: 642303 - DNA, 15 bp, Homo sapiens
aggtttggagatttt

SEQ ID NO: 642304 - DNA, 15 bp, Homo sapiens
ggtttggagattttc

SEQ ID NO: 642305 - DNA, 15 bp, Homo sapiens
gtttggagattttct

SEQ ID NO: 642306 - DNA, 15 bp, Homo sapiens
tttggagattttctc

SEQ ID NO: 642307 - DNA, 15 bp, Homo sapiens
ttggagattttctca

SEQ ID NO: 642308 - DNA, 15 bp, Homo sapiens
tggagattttctcag

SEQ ID NO: 642309 - DNA, 15 bp, Homo sapiens
ggagattttctcaga

SEQ ID NO: 642310 - DNA, 15 bp, Homo sapiens
gagattttctcagat

SEQ ID NO: 642311 - DNA, 15 bp, Homo sapiens
agattttctcagatt

SEQ ID NO: 642312 - DNA, 15 bp, Homo sapiens
gattttctcagattt

SEQ ID NO: 642313 - DNA, 15 bp, Homo sapiens
attttctcagatttc

SEQ ID NO: 642314 - DNA, 15 bp, Homo sapiens
ttttctcagatttct

SEQ ID NO: 642315 - DNA, 15 bp, Homo sapiens
tttctcagatttctt

SEQ ID NO: 642316 - DNA, 15 bp, Homo sapiens
ttctcagatttctta

SEQ ID NO: 642317 - DNA, 15 bp, Homo sapiens
tctcagatttcttat

SEQ ID NO: 642318 - DNA, 15 bp, Homo sapiens
ctcagatttcttatg

SEQ ID NO: 642319 - DNA, 15 bp, Homo sapiens
tcagatttcttatgc

SEQ ID NO: 642320 - DNA, 15 bp, Homo sapiens
cagatttcttatgct

SEQ ID NO: 642321 - DNA, 15 bp, Homo sapiens
agatttcttatgcta

SEQ ID NO: 642322 - DNA, 15 bp, Homo sapiens
gatttcttatgctat

SEQ ID NO: 642323 - DNA, 15 bp, Homo sapiens
atttcttatgctatg

SEQ ID NO: 642324 - DNA, 15 bp, Homo sapiens
tttcttatgctatgt

SEQ ID NO: 642325 - DNA, 15 bp, Homo sapiens
ttcttatgctatgtg

SEQ ID NO: 642326 - DNA, 15 bp, Homo sapiens
tcttatgctatgtga

SEQ ID NO: 642327 - DNA, 15 bp, Homo sapiens
cttatgctatgtgac

SEQ ID NO: 642328 - DNA, 15 bp, Homo sapiens
ttatgctatgtgaca

SEQ ID NO: 642329 - DNA, 15 bp, Homo sapiens
tatgctatgtgacag

SEQ ID NO: 642330 - DNA, 15 bp, Homo sapiens
atgctatgtgacaga

SEQ ID NO: 642331 - DNA, 15 bp, Homo sapiens
tgctatgtgacagat

SEQ ID NO: 642332 - DNA, 15 bp, Homo sapiens
gctatgtgacagatt

SEQ ID NO: 642333 - DNA, 15 bp, Homo sapiens
ctatgtgacagattt

SEQ ID NO: 642334 - DNA, 15 bp, Homo sapiens
tatgtgacagatttt

SEQ ID NO: 642335 - DNA, 15 bp, Homo sapiens
atgtgacagattttc

SEQ ID NO: 642336 - DNA, 15 bp, Homo sapiens
tgtgacagattttca

SEQ ID NO: 642337 - DNA, 15 bp, Homo sapiens
gtgacagattttcat

SEQ ID NO: 642338 - DNA, 15 bp, Homo sapiens
tgacagattttcatc

SEQ ID NO: 642339 - DNA, 15 bp, Homo sapiens
gacagattttcatct

SEQ ID NO: 642340 - DNA, 15 bp, Homo sapiens
acagattttcatcta

SEQ ID NO: 642341 - DNA, 15 bp, Homo sapiens
cagattttcatctaa

SEQ ID NO: 642342 - DNA, 15 bp, Homo sapiens
agattttcatctaat

SEQ ID NO: 642343 - DNA, 15 bp, Homo sapiens
gattttcatctaatt

SEQ ID NO: 642344 - DNA, 15 bp, Homo sapiens
attttcatctaattt

SEQ ID NO: 642345 - DNA, 15 bp, Homo sapiens
ttttcatctaattta

SEQ ID NO: 642346 - DNA, 15 bp, Homo sapiens
tttcatctaatttac

SEQ ID NO: 642347 - DNA, 15 bp, Homo sapiens
ttcatctaatttaca

SEQ ID NO: 642348 - DNA, 15 bp, Homo sapiens
tcatctaatttacat

SEQ ID NO: 642349 - DNA, 15 bp, Homo sapiens
catctaatttacatt

SEQ ID NO: 642350 - DNA, 15 bp, Homo sapiens
atctaatttacattt

SEQ ID NO: 642351 - DNA, 15 bp, Homo sapiens
tctaatttacattta

SEQ ID NO: 642352 - DNA, 15 bp, Homo sapiens
ctaatttacatttaa

SEQ ID NO: 642353 - DNA, 15 bp, Homo sapiens
taatttacatttaac

SEQ ID NO: 642354 - DNA, 15 bp, Homo sapiens
aatttacatttaact

SEQ ID NO: 642355 - DNA, 15 bp, Homo sapiens
atttacatttaactt

SEQ ID NO: 642356 - DNA, 15 bp, Homo sapiens
tttacatttaacttt

SEQ ID NO: 642357 - DNA, 15 bp, Homo sapiens
ttacatttaactttc

SEQ ID NO: 642358 - DNA, 15 bp, Homo sapiens
tacatttaactttcc

SEQ ID NO: 642359 - DNA, 15 bp, Homo sapiens
acatttaactttcca

SEQ ID NO: 642360 - DNA, 15 bp, Homo sapiens
catttaactttccaa

SEQ ID NO: 642361 - DNA, 15 bp, Homo sapiens
atttaactttccaaa

SEQ ID NO: 642362 - DNA, 15 bp, Homo sapiens
tttaactttccaaaa

SEQ ID NO: 642363 - DNA, 15 bp, Homo sapiens
ttaactttccaaaaa

SEQ ID NO: 642364 - DNA, 15 bp, Homo sapiens
taactttccaaaaat

SEQ ID NO: 642365 - DNA, 15 bp, Homo sapiens
aactttccaaaaatt

SEQ ID NO: 642366 - DNA, 15 bp, Homo sapiens
actttccaaaaattt

SEQ ID NO: 642367 - DNA, 15 bp, Homo sapiens
ctttccaaaaatttt

SEQ ID NO: 642368 - DNA, 15 bp, Homo sapiens
tttccaaaaattttc

SEQ ID NO: 642369 - DNA, 15 bp, Homo sapiens
ttccaaaaattttct

SEQ ID NO: 642370 - DNA, 15 bp, Homo sapiens
tccaaaaattttcta

SEQ ID NO: 642371 - DNA, 15 bp, Homo sapiens
ccaaaaattttctaa

SEQ ID NO: 642372 - DNA, 15 bp, Homo sapiens
caaaaattttctaaa

SEQ ID NO: 642373 - DNA, 15 bp, Homo sapiens
aaaaattttctaaaa

SEQ ID NO: 642374 - DNA, 15 bp, Homo sapiens
aaaattttctaaaag

SEQ ID NO: 642375 - DNA, 15 bp, Homo sapiens
aaattttctaaaagc

SEQ ID NO: 642376 - DNA, 15 bp, Homo sapiens
aattttctaaaagca

SEQ ID NO: 642377 - DNA, 15 bp, Homo sapiens
attttctaaaagcat

SEQ ID NO: 642378 - DNA, 15 bp, Homo sapiens
ttttctaaaagcatt

SEQ ID NO: 642379 - DNA, 15 bp, Homo sapiens
tttctaaaagcatta

SEQ ID NO: 642380 - DNA, 15 bp, Homo sapiens
ttctaaaagcattat

SEQ ID NO: 642381 - DNA, 15 bp, Homo sapiens
tctaaaagcattata

SEQ ID NO: 642382 - DNA, 15 bp, Homo sapiens
ctaaaagcattataa

SEQ ID NO: 642383 - DNA, 15 bp, Homo sapiens
taaaagcattataac

SEQ ID NO: 642384 - DNA, 15 bp, Homo sapiens
aaaagcattataact

SEQ ID NO: 642385 - DNA, 15 bp, Homo sapiens
aaagcattataactg

SEQ ID NO: 642386 - DNA, 15 bp, Homo sapiens
aagcattataactgc

SEQ ID NO: 642387 - DNA, 15 bp, Homo sapiens
agcattataactgca

SEQ ID NO: 642388 - DNA, 15 bp, Homo sapiens
gcattataactgcat

SEQ ID NO: 642389 - DNA, 15 bp, Homo sapiens
cattataactgcatc

SEQ ID NO: 642390 - DNA, 15 bp, Homo sapiens
attataactgcatca

SEQ ID NO: 642391 - DNA, 15 bp, Homo sapiens
ttataactgcatcat

SEQ ID NO: 642392 - DNA, 15 bp, Homo sapiens
tataactgcatcatg

SEQ ID NO: 642393 - DNA, 15 bp, Homo sapiens
ataactgcatcatgc

SEQ ID NO: 642394 - DNA, 15 bp, Homo sapiens
taactgcatcatgca

SEQ ID NO: 642395 - DNA, 15 bp, Homo sapiens
aactgcatcatgcaa

SEQ ID NO: 642396 - DNA, 15 bp, Homo sapiens
actgcatcatgcaaa

SEQ ID NO: 642397 - DNA, 15 bp, Homo sapiens
ctgcatcatgcaaag

SEQ ID NO: 642398 - DNA, 15 bp, Homo sapiens
tgcatcatgcaaagt

SEQ ID NO: 642399 - DNA, 15 bp, Homo sapiens
gcatcatgcaaagtt

SEQ ID NO: 642400 - DNA, 15 bp, Homo sapiens
catcatgcaaagttt

SEQ ID NO: 642401 - DNA, 15 bp, Homo sapiens
atcatgcaaagttta

SEQ ID NO: 642402 - DNA, 15 bp, Homo sapiens
tcatgcaaagtttag

SEQ ID NO: 642403 - DNA, 15 bp, Homo sapiens
catgcaaagtttaga

SEQ ID NO: 642404 - DNA, 15 bp, Homo sapiens
atgcaaagtttagat

SEQ ID NO: 642405 - DNA, 15 bp, Homo sapiens
tgcaaagtttagata

SEQ ID NO: 642406 - DNA, 15 bp, Homo sapiens
gcaaagtttagataa

SEQ ID NO: 642407 - DNA, 15 bp, Homo sapiens
caaagtttagataac

SEQ ID NO: 642408 - DNA, 15 bp, Homo sapiens
aaagtttagataaca

SEQ ID NO: 642409 - DNA, 15 bp, Homo sapiens
aagtttagataacac

SEQ ID NO: 642410 - DNA, 15 bp, Homo sapiens
agtttagataacacg

SEQ ID NO: 642411 - DNA, 15 bp, Homo sapiens
gtttagataacacga

SEQ ID NO: 642412 - DNA, 15 bp, Homo sapiens
tttagataacacgac

SEQ ID NO: 642413 - DNA, 15 bp, Homo sapiens
ttagataacacgaca

SEQ ID NO: 642414 - DNA, 15 bp, Homo sapiens
tagataacacgacaa

SEQ ID NO: 642415 - DNA, 15 bp, Homo sapiens
agataacacgacaaa

SEQ ID NO: 642416 - DNA, 15 bp, Homo sapiens
gataacacgacaaaa

SEQ ID NO: 642417 - DNA, 15 bp, Homo sapiens
ataacacgacaaaat

SEQ ID NO: 642418 - DNA, 15 bp, Homo sapiens
taacacgacaaaatg

SEQ ID NO: 642419 - DNA, 15 bp, Homo sapiens
aacacgacaaaatga

SEQ ID NO: 642420 - DNA, 15 bp, Homo sapiens
acacgacaaaatgat

SEQ ID NO: 642421 - DNA, 15 bp, Homo sapiens
cacgacaaaatgata

SEQ ID NO: 642422 - DNA, 15 bp, Homo sapiens
acgacaaaatgataa

SEQ ID NO: 642423 - DNA, 15 bp, Homo sapiens
cgacaaaatgataaa

SEQ ID NO: 642424 - DNA, 15 bp, Homo sapiens
gacaaaatgataaag

SEQ ID NO: 642425 - DNA, 15 bp, Homo sapiens
acaaaatgataaaga

SEQ ID NO: 642426 - DNA, 15 bp, Homo sapiens
caaaatgataaagaa

SEQ ID NO: 642427 - DNA, 15 bp, Homo sapiens
aaaatgataaagaaa

SEQ ID NO: 642428 - DNA, 15 bp, Homo sapiens
aaatgataaagaaaa

SEQ ID NO: 642429 - DNA, 15 bp, Homo sapiens
aatgataaagaaaat

SEQ ID NO: 642430 - DNA, 15 bp, Homo sapiens
atgataaagaaaata

SEQ ID NO: 642431 - DNA, 15 bp, Homo sapiens
tgataaagaaaatat

SEQ ID NO: 642432 - DNA, 15 bp, Homo sapiens
gataaagaaaatatg

SEQ ID NO: 642433 - DNA, 15 bp, Homo sapiens
ataaagaaaatatgc

SEQ ID NO: 642434 - DNA, 15 bp, Homo sapiens
taaagaaaatatgcc

SEQ ID NO: 642435 - DNA, 15 bp, Homo sapiens
aaagaaaatatgccc

SEQ ID NO: 642436 - DNA, 15 bp, Homo sapiens
aagaaaatatgccct

SEQ ID NO: 642437 - DNA, 15 bp, Homo sapiens
agaaaatatgccctg

SEQ ID NO: 642438 - DNA, 15 bp, Homo sapiens
gaaaatatgccctgg

SEQ ID NO: 642439 - DNA, 15 bp, Homo sapiens
aaaatatgccctggc

SEQ ID NO: 642440 - DNA, 15 bp, Homo sapiens
aaatatgccctggct

SEQ ID NO: 642441 - DNA, 15 bp, Homo sapiens
aatatgccctggctt

SEQ ID NO: 642442 - DNA, 15 bp, Homo sapiens
atatgccctggcttg

SEQ ID NO: 642443 - DNA, 15 bp, Homo sapiens
tatgccctggcttga

SEQ ID NO: 642444 - DNA, 15 bp, Homo sapiens
atgccctggcttgac

SEQ ID NO: 642445 - DNA, 15 bp, Homo sapiens
tgccctggcttgaca

SEQ ID NO: 642446 - DNA, 15 bp, Homo sapiens
gccctggcttgacat

SEQ ID NO: 642447 - DNA, 15 bp, Homo sapiens
ccctggcttgacatg

SEQ ID NO: 642448 - DNA, 15 bp, Homo sapiens
cctggcttgacatgt

SEQ ID NO: 642449 - DNA, 15 bp, Homo sapiens
ctggcttgacatgtc

SEQ ID NO: 642450 - DNA, 15 bp, Homo sapiens
tggcttgacatgtcc

SEQ ID NO: 642451 - DNA, 15 bp, Homo sapiens
ggcttgacatgtcca

SEQ ID NO: 642452 - DNA, 15 bp, Homo sapiens
gcttgacatgtccac

SEQ ID NO: 642453 - DNA, 15 bp, Homo sapiens
cttgacatgtccact

SEQ ID NO: 642454 - DNA, 15 bp, Homo sapiens
ttgacatgtccactg

SEQ ID NO: 642455 - DNA, 15 bp, Homo sapiens
tgacatgtccactgt

SEQ ID NO: 642456 - DNA, 15 bp, Homo sapiens
gacatgtccactgtt

SEQ ID NO: 642457 - DNA, 15 bp, Homo sapiens
acatgtccactgtta

SEQ ID NO: 642458 - DNA, 15 bp, Homo sapiens
catgtccactgttat

SEQ ID NO: 642459 - DNA, 15 bp, Homo sapiens
atgtccactgttatc

SEQ ID NO: 642460 - DNA, 15 bp, Homo sapiens
tgtccactgttatca

SEQ ID NO: 642461 - DNA, 15 bp, Homo sapiens
gtccactgttatcat

SEQ ID NO: 642462 - DNA, 15 bp, Homo sapiens
tccactgttatcatt

SEQ ID NO: 642463 - DNA, 15 bp, Homo sapiens
ccactgttatcatta

SEQ ID NO: 642464 - DNA, 15 bp, Homo sapiens
cactgttatcattat

SEQ ID NO: 642465 - DNA, 15 bp, Homo sapiens
actgttatcattatt

SEQ ID NO: 642466 - DNA, 15 bp, Homo sapiens
ctgttatcattatta

SEQ ID NO: 642467 - DNA, 15 bp, Homo sapiens
tgttatcattattat

SEQ ID NO: 642468 - DNA, 15 bp, Homo sapiens
gttatcattattata

SEQ ID NO: 642469 - DNA, 15 bp, Homo sapiens
ttatcattattatat

SEQ ID NO: 642470 - DNA, 15 bp, Homo sapiens
tatcattattatatt

SEQ ID NO: 642471 - DNA, 15 bp, Homo sapiens
atcattattatattt

SEQ ID NO: 642472 - DNA, 15 bp, Homo sapiens
tcattattatatttt

SEQ ID NO: 642473 - DNA, 15 bp, Homo sapiens
cattattatattttt

SEQ ID NO: 642474 - DNA, 15 bp, Homo sapiens
attattatattttta

SEQ ID NO: 642475 - DNA, 15 bp, Homo sapiens
ttattatatttttag

SEQ ID NO: 642476 - DNA, 15 bp, Homo sapiens
tattatatttttagt

SEQ ID NO: 642477 - DNA, 15 bp, Homo sapiens
attatatttttagtc

SEQ ID NO: 642478 - DNA, 15 bp, Homo sapiens
ttatatttttagtct

SEQ ID NO: 642479 - DNA, 15 bp, Homo sapiens
tatatttttagtctt

SEQ ID NO: 642480 - DNA, 15 bp, Homo sapiens
atatttttagtcttt

SEQ ID NO: 642481 - DNA, 15 bp, Homo sapiens
tatttttagtctttt

SEQ ID NO: 642482 - DNA, 15 bp, Homo sapiens
atttttagtctttta

SEQ ID NO: 642483 - DNA, 15 bp, Homo sapiens
tttttagtcttttac

SEQ ID NO: 642484 - DNA, 15 bp, Homo sapiens
ttttagtcttttact

SEQ ID NO: 642485 - DNA, 15 bp, Homo sapiens
tttagtcttttactt

SEQ ID NO: 642486 - DNA, 15 bp, Homo sapiens
ttagtcttttacttc

SEQ ID NO: 642487 - DNA, 15 bp, Homo sapiens
tagtcttttacttca

SEQ ID NO: 642488 - DNA, 15 bp, Homo sapiens
agtcttttacttcat

SEQ ID NO: 642489 - DNA, 15 bp, Homo sapiens
gtcttttacttcatt

SEQ ID NO: 642490 - DNA, 15 bp, Homo sapiens
tcttttacttcattt

SEQ ID NO: 642491 - DNA, 15 bp, Homo sapiens
cttttacttcatttt

SEQ ID NO: 642492 - DNA, 15 bp, Homo sapiens
ttttacttcattttt

SEQ ID NO: 642493 - DNA, 15 bp, Homo sapiens
tttacttcatttttc

SEQ ID NO: 642494 - DNA, 15 bp, Homo sapiens
ttacttcatttttca

SEQ ID NO: 642495 - DNA, 15 bp, Homo sapiens
tacttcatttttcat

SEQ ID NO: 642496 - DNA, 15 bp, Homo sapiens
acttcatttttcatc

SEQ ID NO: 642497 - DNA, 15 bp, Homo sapiens
cttcatttttcatcc

SEQ ID NO: 642498 - DNA, 15 bp, Homo sapiens
ttcatttttcatcct

SEQ ID NO: 642499 - DNA, 15 bp, Homo sapiens
tcatttttcatcctg

SEQ ID NO: 642500 - DNA, 15 bp, Homo sapiens
catttttcatcctgt

SEQ ID NO: 642501 - DNA, 15 bp, Homo sapiens
atttttcatcctgta

SEQ ID NO: 642502 - DNA, 15 bp, Homo sapiens
tttttcatcctgtat

SEQ ID NO: 642503 - DNA, 15 bp, Homo sapiens
ttttcatcctgtatt

SEQ ID NO: 642504 - DNA, 15 bp, Homo sapiens
tttcatcctgtattt

SEQ ID NO: 642505 - DNA, 15 bp, Homo sapiens
ttcatcctgtatttt

SEQ ID NO: 642506 - DNA, 15 bp, Homo sapiens
tcatcctgtatttta

SEQ ID NO: 642507 - DNA, 15 bp, Homo sapiens
catcctgtattttat

SEQ ID NO: 642508 - DNA, 15 bp, Homo sapiens
atcctgtattttatc

SEQ ID NO: 642509 - DNA, 15 bp, Homo sapiens
tcctgtattttatct

SEQ ID NO: 642510 - DNA, 15 bp, Homo sapiens
cctgtattttatctg

SEQ ID NO: 642511 - DNA, 15 bp, Homo sapiens
ctgtattttatctgg

SEQ ID NO: 642512 - DNA, 15 bp, Homo sapiens
tgtattttatctggc

SEQ ID NO: 642513 - DNA, 15 bp, Homo sapiens
gtattttatctggca

SEQ ID NO: 642514 - DNA, 15 bp, Homo sapiens
tattttatctggcaa

SEQ ID NO: 642515 - DNA, 15 bp, Homo sapiens
attttatctggcaac

SEQ ID NO: 642516 - DNA, 15 bp, Homo sapiens
ttttatctggcaacc

SEQ ID NO: 642517 - DNA, 15 bp, Homo sapiens
tttatctggcaaccc

SEQ ID NO: 642518 - DNA, 15 bp, Homo sapiens
ttatctggcaaccct

SEQ ID NO: 642519 - DNA, 15 bp, Homo sapiens
tatctggcaacccta

SEQ ID NO: 642520 - DNA, 15 bp, Homo sapiens
atctggcaaccctaa

SEQ ID NO: 642521 - DNA, 15 bp, Homo sapiens
tctggcaaccctaat

SEQ ID NO: 642522 - DNA, 15 bp, Homo sapiens
ctggcaaccctaatt

SEQ ID NO: 642523 - DNA, 15 bp, Homo sapiens
tggcaaccctaatta

SEQ ID NO: 642524 - DNA, 15 bp, Homo sapiens
ggcaaccctaattac

SEQ ID NO: 642525 - DNA, 15 bp, Homo sapiens
gcaaccctaattaca

SEQ ID NO: 642526 - DNA, 15 bp, Homo sapiens
caaccctaattacat

SEQ ID NO: 642527 - DNA, 15 bp, Homo sapiens
aaccctaattacata

SEQ ID NO: 642528 - DNA, 15 bp, Homo sapiens
accctaattacataa

SEQ ID NO: 642529 - DNA, 15 bp, Homo sapiens
ccctaattacataaa

SEQ ID NO: 642530 - DNA, 15 bp, Homo sapiens
cctaattacataaaa

SEQ ID NO: 642531 - DNA, 15 bp, Homo sapiens
ctaattacataaaac

SEQ ID NO: 642532 - DNA, 15 bp, Homo sapiens
taattacataaaact

SEQ ID NO: 642533 - DNA, 15 bp, Homo sapiens
aattacataaaacta

SEQ ID NO: 642534 - DNA, 15 bp, Homo sapiens
attacataaaactaa

SEQ ID NO: 642535 - DNA, 15 bp, Homo sapiens
ttacataaaactaat

SEQ ID NO: 642536 - DNA, 15 bp, Homo sapiens
tacataaaactaata

SEQ ID NO: 642537 - DNA, 15 bp, Homo sapiens
acataaaactaatac

SEQ ID NO: 642538 - DNA, 15 bp, Homo sapiens
cataaaactaataca

SEQ ID NO: 642539 - DNA, 15 bp, Homo sapiens
ataaaactaatacag

SEQ ID NO: 642540 - DNA, 15 bp, Homo sapiens
taaaactaatacaga

SEQ ID NO: 642541 - DNA, 15 bp, Homo sapiens
aaaactaatacagac

SEQ ID NO: 642542 - DNA, 15 bp, Homo sapiens
aaactaatacagact

SEQ ID NO: 642543 - DNA, 15 bp, Homo sapiens
aactaatacagactg

SEQ ID NO: 642544 - DNA, 15 bp, Homo sapiens
actaatacagactgc

SEQ ID NO: 642545 - DNA, 15 bp, Homo sapiens
ctaatacagactgca

SEQ ID NO: 642546 - DNA, 15 bp, Homo sapiens
taatacagactgcaa

SEQ ID NO: 642547 - DNA, 15 bp, Homo sapiens
aatacagactgcaat

SEQ ID NO: 642548 - DNA, 15 bp, Homo sapiens
atacagactgcaata

SEQ ID NO: 642549 - DNA, 15 bp, Homo sapiens
tacagactgcaatat

SEQ ID NO: 642550 - DNA, 15 bp, Homo sapiens
acagactgcaatatc

SEQ ID NO: 642551 - DNA, 15 bp, Homo sapiens
cagactgcaatatct

SEQ ID NO: 642552 - DNA, 15 bp, Homo sapiens
agactgcaatatcta

SEQ ID NO: 642553 - DNA, 15 bp, Homo sapiens
gactgcaatatctaa

SEQ ID NO: 642554 - DNA, 15 bp, Homo sapiens
actgcaatatctaac

SEQ ID NO: 642555 - DNA, 15 bp, Homo sapiens
ctgcaatatctaacc

SEQ ID NO: 642556 - DNA, 15 bp, Homo sapiens
tgcaatatctaacct

SEQ ID NO: 642557 - DNA, 15 bp, Homo sapiens
gcaatatctaacctt

SEQ ID NO: 642558 - DNA, 15 bp, Homo sapiens
caatatctaaccttt

SEQ ID NO: 642559 - DNA, 15 bp, Homo sapiens
aatatctaaccttta

SEQ ID NO: 642560 - DNA, 15 bp, Homo sapiens
atatctaacctttaa

SEQ ID NO: 642561 - DNA, 15 bp, Homo sapiens
tatctaacctttaaa

SEQ ID NO: 642562 - DNA, 15 bp, Homo sapiens
atctaacctttaaaa

SEQ ID NO: 642563 - DNA, 15 bp, Homo sapiens
tctaacctttaaaac

SEQ ID NO: 642564 - DNA, 15 bp, Homo sapiens
ctaacctttaaaaca

SEQ ID NO: 642565 - DNA, 15 bp, Homo sapiens
taacctttaaaacac

SEQ ID NO: 642566 - DNA, 15 bp, Homo sapiens
aacctttaaaacaca

SEQ ID NO: 642567 - DNA, 15 bp, Homo sapiens
acctttaaaacacac

SEQ ID NO: 642568 - DNA, 15 bp, Homo sapiens
cctttaaaacacaca

SEQ ID NO: 642569 - DNA, 15 bp, Homo sapiens
ctttaaaacacacat

SEQ ID NO: 642570 - DNA, 15 bp, Homo sapiens
tttaaaacacacatg

SEQ ID NO: 642571 - DNA, 15 bp, Homo sapiens
ttaaaacacacatgg

SEQ ID NO: 642572 - DNA, 15 bp, Homo sapiens
taaaacacacatggg

SEQ ID NO: 642573 - DNA, 15 bp, Homo sapiens
aaaacacacatgggc

SEQ ID NO: 642574 - DNA, 15 bp, Homo sapiens
aaacacacatgggcc

SEQ ID NO: 642575 - DNA, 15 bp, Homo sapiens
aacacacatgggcct

SEQ ID NO: 642576 - DNA, 15 bp, Homo sapiens
acacacatgggcctc

SEQ ID NO: 642577 - DNA, 15 bp, Homo sapiens
cacacatgggcctcc

SEQ ID NO: 642578 - DNA, 15 bp, Homo sapiens
acacatgggcctccc

SEQ ID NO: 642579 - DNA, 15 bp, Homo sapiens
cacatgggcctccca

SEQ ID NO: 642580 - DNA, 15 bp, Homo sapiens
acatgggcctcccag

SEQ ID NO: 642581 - DNA, 15 bp, Homo sapiens
catgggcctcccagc

SEQ ID NO: 642582 - DNA, 15 bp, Homo sapiens
atgggcctcccagca

SEQ ID NO: 642583 - DNA, 15 bp, Homo sapiens
tgggcctcccagcac

SEQ ID NO: 642584 - DNA, 15 bp, Homo sapiens
gggcctcccagcact

SEQ ID NO: 642585 - DNA, 15 bp, Homo sapiens
ggcctcccagcactt

SEQ ID NO: 642586 - DNA, 15 bp, Homo sapiens
gcctcccagcacttt

SEQ ID NO: 642587 - DNA, 15 bp, Homo sapiens
cctcccagcactttg

SEQ ID NO: 642588 - DNA, 15 bp, Homo sapiens
ctcccagcactttga

SEQ ID NO: 642589 - DNA, 15 bp, Homo sapiens
tcccagcactttgag

SEQ ID NO: 642590 - DNA, 15 bp, Homo sapiens
cccagcactttgaga

SEQ ID NO: 642591 - DNA, 15 bp, Homo sapiens
ccagcactttgagag

SEQ ID NO: 642592 - DNA, 15 bp, Homo sapiens
cagcactttgagagg

SEQ ID NO: 642593 - DNA, 15 bp, Homo sapiens
agcactttgagaggc

SEQ ID NO: 642594 - DNA, 15 bp, Homo sapiens
gcactttgagaggcc

SEQ ID NO: 642595 - DNA, 15 bp, Homo sapiens
cactttgagaggcca

SEQ ID NO: 642596 - DNA, 15 bp, Homo sapiens
actttgagaggccaa

SEQ ID NO: 642597 - DNA, 15 bp, Homo sapiens
ctttgagaggccaag

SEQ ID NO: 642598 - DNA, 15 bp, Homo sapiens
tttgagaggccaagg

SEQ ID NO: 642599 - DNA, 15 bp, Homo sapiens
tgagaggccaaggcc

SEQ ID NO: 642600 - DNA, 15 bp, Homo sapiens
gagaggccaaggccg

SEQ ID NO: 642601 - DNA, 15 bp, Homo sapiens
agaggccaaggccgg

SEQ ID NO: 642602 - DNA, 15 bp, Homo sapiens
gaggccaaggccgga

SEQ ID NO: 642603 - DNA, 15 bp, Homo sapiens
aggccaaggccggag

SEQ ID NO: 642604 - DNA, 15 bp, Homo sapiens
ggccaaggccggagg

SEQ ID NO: 642605 - DNA, 15 bp, Homo sapiens
gccaaggccggagga

SEQ ID NO: 642606 - DNA, 15 bp, Homo sapiens
ccaaggccggaggat

SEQ ID NO: 642607 - DNA, 15 bp, Homo sapiens
caaggccggaggatc

SEQ ID NO: 642608 - DNA, 15 bp, Homo sapiens
aaggccggaggatca

SEQ ID NO: 642609 - DNA, 15 bp, Homo sapiens
aggccggaggatcac

SEQ ID NO: 642610 - DNA, 15 bp, Homo sapiens
ggccggaggatcacc

SEQ ID NO: 642611 - DNA, 15 bp, Homo sapiens
gccggaggatcacct

SEQ ID NO: 642612 - DNA, 15 bp, Homo sapiens
ccggaggatcacctg

SEQ ID NO: 642613 - DNA, 15 bp, Homo sapiens
cggaggatcacctga

SEQ ID NO: 642614 - DNA, 15 bp, Homo sapiens
ggaggatcacctgag

SEQ ID NO: 642615 - DNA, 15 bp, Homo sapiens
gaggatcacctgagg

SEQ ID NO: 642616 - DNA, 15 bp, Homo sapiens
aggatcacctgaggt

SEQ ID NO: 642617 - DNA, 15 bp, Homo sapiens
cacctgaggtcagga

SEQ ID NO: 642618 - DNA, 15 bp, Homo sapiens
acctgaggtcaggag

SEQ ID NO: 642619 - DNA, 15 bp, Homo sapiens
cctgaggtcaggagt

SEQ ID NO: 642620 - DNA, 15 bp, Homo sapiens
ctgaggtcaggagtt

SEQ ID NO: 642621 - DNA, 15 bp, Homo sapiens
gaggtcaggagttca

SEQ ID NO: 642622 - DNA, 15 bp, Homo sapiens
aggtcaggagttcaa

SEQ ID NO: 642623 - DNA, 15 bp, Homo sapiens
ggtcaggagttcaag

SEQ ID NO: 642624 - DNA, 15 bp, Homo sapiens
gtcaggagttcaaga

SEQ ID NO: 642625 - DNA, 15 bp, Homo sapiens
tcaggagttcaagac

SEQ ID NO: 642626 - DNA, 15 bp, Homo sapiens
caggagttcaagacc

SEQ ID NO: 642627 - DNA, 15 bp, Homo sapiens
aggagttcaagacca

SEQ ID NO: 642628 - DNA, 15 bp, Homo sapiens
ggagttcaagaccaa

SEQ ID NO: 642629 - DNA, 15 bp, Homo sapiens
gagttcaagaccaac

SEQ ID NO: 642630 - DNA, 15 bp, Homo sapiens
agttcaagaccaact

SEQ ID NO: 642631 - DNA, 15 bp, Homo sapiens
gttcaagaccaactt

SEQ ID NO: 642632 - DNA, 15 bp, Homo sapiens
ttcaagaccaacttg

SEQ ID NO: 642633 - DNA, 15 bp, Homo sapiens
tcaagaccaacttgg

SEQ ID NO: 642634 - DNA, 15 bp, Homo sapiens
caagaccaacttggc

SEQ ID NO: 642635 - DNA, 15 bp, Homo sapiens
aagaccaacttggct

SEQ ID NO: 642636 - DNA, 15 bp, Homo sapiens
agaccaacttggcta

SEQ ID NO: 642637 - DNA, 15 bp, Homo sapiens
gaccaacttggctaa

SEQ ID NO: 642638 - DNA, 15 bp, Homo sapiens
accaacttggctaac

SEQ ID NO: 642639 - DNA, 15 bp, Homo sapiens
ccaacttggctaaca

SEQ ID NO: 642640 - DNA, 15 bp, Homo sapiens
caacttggctaacat

SEQ ID NO: 642641 - DNA, 15 bp, Homo sapiens
aacttggctaacata

SEQ ID NO: 642642 - DNA, 15 bp, Homo sapiens
acttggctaacatag

SEQ ID NO: 642643 - DNA, 15 bp, Homo sapiens
cttggctaacatagt

SEQ ID NO: 642644 - DNA, 15 bp, Homo sapiens
ttggctaacatagtg

SEQ ID NO: 642645 - DNA, 15 bp, Homo sapiens
tggctaacatagtga

SEQ ID NO: 642646 - DNA, 15 bp, Homo sapiens
ggctaacatagtgaa

SEQ ID NO: 642647 - DNA, 15 bp, Homo sapiens
gctaacatagtgaaa

SEQ ID NO: 642648 - DNA, 15 bp, Homo sapiens
ctaacatagtgaaac

SEQ ID NO: 642649 - DNA, 15 bp, Homo sapiens
taacatagtgaaacc

SEQ ID NO: 642650 - DNA, 15 bp, Homo sapiens
acatagtgaaacccc

SEQ ID NO: 642651 - DNA, 15 bp, Homo sapiens
catagtgaaacccca

SEQ ID NO: 642652 - DNA, 15 bp, Homo sapiens
atagtgaaaccccat

SEQ ID NO: 642653 - DNA, 15 bp, Homo sapiens
tagtgaaaccccatc

SEQ ID NO: 642654 - DNA, 15 bp, Homo sapiens
agtgaaaccccatct

SEQ ID NO: 642655 - DNA, 15 bp, Homo sapiens
tgaaaccccatctct

SEQ ID NO: 642656 - DNA, 15 bp, Homo sapiens
gaaaccccatctcta

SEQ ID NO: 642657 - DNA, 15 bp, Homo sapiens
aaaatacaaaaaata

SEQ ID NO: 642658 - DNA, 15 bp, Homo sapiens
aaatacaaaaaatag

SEQ ID NO: 642659 - DNA, 15 bp, Homo sapiens
aatacaaaaaatagc

SEQ ID NO: 642660 - DNA, 15 bp, Homo sapiens
atacaaaaaatagcc

SEQ ID NO: 642661 - DNA, 15 bp, Homo sapiens
tacaaaaaatagcca

SEQ ID NO: 642662 - DNA, 15 bp, Homo sapiens
acaaaaaatagccag

SEQ ID NO: 642663 - DNA, 15 bp, Homo sapiens
caaaaaatagccagg

SEQ ID NO: 642664 - DNA, 15 bp, Homo sapiens
aaaaaatagccaggc

SEQ ID NO: 642665 - DNA, 15 bp, Homo sapiens
aaaaatagccaggca

SEQ ID NO: 642666 - DNA, 15 bp, Homo sapiens
aaaatagccaggcat

SEQ ID NO: 642667 - DNA, 15 bp, Homo sapiens
aaatagccaggcatg

SEQ ID NO: 642668 - DNA, 15 bp, Homo sapiens
aatagccaggcatgg

SEQ ID NO: 642669 - DNA, 15 bp, Homo sapiens
atagccaggcatggt

SEQ ID NO: 642670 - DNA, 15 bp, Homo sapiens
ccaggcatggtggca

SEQ ID NO: 642671 - DNA, 15 bp, Homo sapiens
caggcatggtggcag

SEQ ID NO: 642672 - DNA, 15 bp, Homo sapiens
aggcatggtggcagg

SEQ ID NO: 642673 - DNA, 15 bp, Homo sapiens
ggcatggtggcaggt

SEQ ID NO: 642674 - DNA, 15 bp, Homo sapiens
ggtggcaggtgccta

SEQ ID NO: 642675 - DNA, 15 bp, Homo sapiens
gtggcaggtgcctat

SEQ ID NO: 642676 - DNA, 15 bp, Homo sapiens
tggcaggtgcctata

SEQ ID NO: 642677 - DNA, 15 bp, Homo sapiens
ggcaggtgcctataa

SEQ ID NO: 642678 - DNA, 15 bp, Homo sapiens
gcaggtgcctataat

SEQ ID NO: 642679 - DNA, 15 bp, Homo sapiens
caggtgcctataatc

SEQ ID NO: 642680 - DNA, 15 bp, Homo sapiens
aggtgcctataatcc

SEQ ID NO: 642681 - DNA, 15 bp, Homo sapiens
ggtgcctataatccc

SEQ ID NO: 642682 - DNA, 15 bp, Homo sapiens
gtgcctataatccca

SEQ ID NO: 642683 - DNA, 15 bp, Homo sapiens
tgcctataatcccag

SEQ ID NO: 642684 - DNA, 15 bp, Homo sapiens
gcctataatcccagc

SEQ ID NO: 642685 - DNA, 15 bp, Homo sapiens
cctataatcccagct

SEQ ID NO: 642686 - DNA, 15 bp, Homo sapiens
ctataatcccagcta

SEQ ID NO: 642687 - DNA, 15 bp, Homo sapiens
tataatcccagctac

SEQ ID NO: 642688 - DNA, 15 bp, Homo sapiens
ataatcccagctact

SEQ ID NO: 642689 - DNA, 15 bp, Homo sapiens
taatcccagctactc

SEQ ID NO: 642690 - DNA, 15 bp, Homo sapiens
aatcccagctactcg

SEQ ID NO: 642691 - DNA, 15 bp, Homo sapiens
atcccagctactcgg

SEQ ID NO: 642692 - DNA, 15 bp, Homo sapiens
tcccagctactcggg

SEQ ID NO: 642693 - DNA, 15 bp, Homo sapiens
cccagctactcggga

SEQ ID NO: 642694 - DNA, 15 bp, Homo sapiens
ccagctactcgggag

SEQ ID NO: 642695 - DNA, 15 bp, Homo sapiens
tcgggaggctgaggt

SEQ ID NO: 642696 - DNA, 15 bp, Homo sapiens
cgggaggctgaggtg

SEQ ID NO: 642697 - DNA, 15 bp, Homo sapiens
gggaggctgaggtgg

SEQ ID NO: 642698 - DNA, 15 bp, Homo sapiens
ggaggctgaggtggg

SEQ ID NO: 642699 - DNA, 15 bp, Homo sapiens
gaggctgaggtggga

SEQ ID NO: 642700 - DNA, 15 bp, Homo sapiens
aggctgaggtgggag

SEQ ID NO: 642701 - DNA, 15 bp, Homo sapiens
ggctgaggtgggaga

SEQ ID NO: 642702 - DNA, 15 bp, Homo sapiens
gctgaggtgggagaa

SEQ ID NO: 642703 - DNA, 15 bp, Homo sapiens
ctgaggtgggagaat

SEQ ID NO: 642704 - DNA, 15 bp, Homo sapiens
tgaggtgggagaatc

SEQ ID NO: 642705 - DNA, 15 bp, Homo sapiens
gaggtgggagaatca

SEQ ID NO: 642706 - DNA, 15 bp, Homo sapiens
aggtgggagaatcac

SEQ ID NO: 642707 - DNA, 15 bp, Homo sapiens
ggtgggagaatcact

SEQ ID NO: 642708 - DNA, 15 bp, Homo sapiens
gtgggagaatcactt

SEQ ID NO: 642709 - DNA, 15 bp, Homo sapiens
tgggagaatcacttg

SEQ ID NO: 642710 - DNA, 15 bp, Homo sapiens
gggagaatcacttga

SEQ ID NO: 642711 - DNA, 15 bp, Homo sapiens
gaatcacttgaacct

SEQ ID NO: 642712 - DNA, 15 bp, Homo sapiens
aatcacttgaacctg

SEQ ID NO: 642713 - DNA, 15 bp, Homo sapiens
atcacttgaacctgg

SEQ ID NO: 642714 - DNA, 15 bp, Homo sapiens
tcacttgaacctggg

SEQ ID NO: 642715 - DNA, 15 bp, Homo sapiens
cacttgaacctggga

SEQ ID NO: 642716 - DNA, 15 bp, Homo sapiens
acttgaacctgggag

SEQ ID NO: 642717 - DNA, 15 bp, Homo sapiens
cttgaacctgggagg

SEQ ID NO: 642718 - DNA, 15 bp, Homo sapiens
tgaacctgggaggca

SEQ ID NO: 642719 - DNA, 15 bp, Homo sapiens
gaacctgggaggcag

SEQ ID NO: 642720 - DNA, 15 bp, Homo sapiens
aacctgggaggcaga

SEQ ID NO: 642721 - DNA, 15 bp, Homo sapiens
acctgggaggcagag

SEQ ID NO: 642722 - DNA, 15 bp, Homo sapiens
cctgggaggcagagg

SEQ ID NO: 642723 - DNA, 15 bp, Homo sapiens
ctgggaggcagaggt

SEQ ID NO: 642724 - DNA, 15 bp, Homo sapiens
tgggaggcagaggtt

SEQ ID NO: 642725 - DNA, 15 bp, Homo sapiens
gggaggcagaggttg

SEQ ID NO: 642726 - DNA, 15 bp, Homo sapiens
ggaggcagaggttgc

SEQ ID NO: 642727 - DNA, 15 bp, Homo sapiens
gaggcagaggttgca

SEQ ID NO: 642728 - DNA, 15 bp, Homo sapiens
aggcagaggttgcag

SEQ ID NO: 642729 - DNA, 15 bp, Homo sapiens
ggcagaggttgcagt

SEQ ID NO: 642730 - DNA, 15 bp, Homo sapiens
gcagaggttgcagtg

SEQ ID NO: 642731 - DNA, 15 bp, Homo sapiens
cagaggttgcagtga

SEQ ID NO: 642732 - DNA, 15 bp, Homo sapiens
agaggttgcagtgag

SEQ ID NO: 642733 - DNA, 15 bp, Homo sapiens
gtgagccgagatcct

SEQ ID NO: 642734 - DNA, 15 bp, Homo sapiens
tgagccgagatcctg

SEQ ID NO: 642735 - DNA, 15 bp, Homo sapiens
gagccgagatcctgc

SEQ ID NO: 642736 - DNA, 15 bp, Homo sapiens
agccgagatcctgcc

SEQ ID NO: 642737 - DNA, 15 bp, Homo sapiens
gccgagatcctgcca

SEQ ID NO: 642738 - DNA, 15 bp, Homo sapiens
ccgagatcctgccac

SEQ ID NO: 642739 - DNA, 15 bp, Homo sapiens
cgagatcctgccact

SEQ ID NO: 642740 - DNA, 15 bp, Homo sapiens
gagatcctgccactg

SEQ ID NO: 642741 - DNA, 15 bp, Homo sapiens
agatcctgccactgc

SEQ ID NO: 642742 - DNA, 15 bp, Homo sapiens
gatcctgccactgcg

SEQ ID NO: 642743 - DNA, 15 bp, Homo sapiens
atcctgccactgcgc

SEQ ID NO: 642744 - DNA, 15 bp, Homo sapiens
tcctgccactgcgct

SEQ ID NO: 642745 - DNA, 15 bp, Homo sapiens
cctgccactgcgctc

SEQ ID NO: 642746 - DNA, 15 bp, Homo sapiens
ctgccactgcgctcc

SEQ ID NO: 642747 - DNA, 15 bp, Homo sapiens
tgccactgcgctcca

SEQ ID NO: 642748 - DNA, 15 bp, Homo sapiens
gccactgcgctccag

SEQ ID NO: 642749 - DNA, 15 bp, Homo sapiens
ccactgcgctccagc

SEQ ID NO: 642750 - DNA, 15 bp, Homo sapiens
cactgcgctccagcc

SEQ ID NO: 642751 - DNA, 15 bp, Homo sapiens
actgcgctccagcct

SEQ ID NO: 642752 - DNA, 15 bp, Homo sapiens
ctgcgctccagcctg

SEQ ID NO: 642753 - DNA, 15 bp, Homo sapiens
tgcgctccagcctgg

SEQ ID NO: 642754 - DNA, 15 bp, Homo sapiens
gcgctccagcctggg

SEQ ID NO: 642755 - DNA, 15 bp, Homo sapiens
cgctccagcctgggg

SEQ ID NO: 642756 - DNA, 15 bp, Homo sapiens
gctccagcctggggg

SEQ ID NO: 642757 - DNA, 15 bp, Homo sapiens
ctccagcctggggga

SEQ ID NO: 642758 - DNA, 15 bp, Homo sapiens
tccagcctgggggac

SEQ ID NO: 642759 - DNA, 15 bp, Homo sapiens
ccagcctgggggaca

SEQ ID NO: 642760 - DNA, 15 bp, Homo sapiens
cagcctgggggacag

SEQ ID NO: 642761 - DNA, 15 bp, Homo sapiens
agcctgggggacagg

SEQ ID NO: 642762 - DNA, 15 bp, Homo sapiens
gcctgggggacagga

SEQ ID NO: 642763 - DNA, 15 bp, Homo sapiens
cctgggggacaggag

SEQ ID NO: 642764 - DNA, 15 bp, Homo sapiens
ctgggggacaggagc

SEQ ID NO: 642765 - DNA, 15 bp, Homo sapiens
tgggggacaggagca

SEQ ID NO: 642766 - DNA, 15 bp, Homo sapiens
gggggacaggagcaa

SEQ ID NO: 642767 - DNA, 15 bp, Homo sapiens
ggggacaggagcaag

SEQ ID NO: 642768 - DNA, 15 bp, Homo sapiens
gggacaggagcaaga

SEQ ID NO: 642769 - DNA, 15 bp, Homo sapiens
ggacaggagcaagac

SEQ ID NO: 642770 - DNA, 15 bp, Homo sapiens
gacaggagcaagact

SEQ ID NO: 642771 - DNA, 15 bp, Homo sapiens
acaggagcaagactc

SEQ ID NO: 642772 - DNA, 15 bp, Homo sapiens
caggagcaagactcc

SEQ ID NO: 642773 - DNA, 15 bp, Homo sapiens
aggagcaagactcca

SEQ ID NO: 642774 - DNA, 15 bp, Homo sapiens
ggagcaagactccat

SEQ ID NO: 642775 - DNA, 15 bp, Homo sapiens
gagcaagactccatc

SEQ ID NO: 642776 - DNA, 15 bp, Homo sapiens
agcaagactccatct

SEQ ID NO: 642777 - DNA, 15 bp, Homo sapiens
gcaagactccatctc

SEQ ID NO: 642778 - DNA, 15 bp, Homo sapiens
caagactccatctca

SEQ ID NO: 642779 - DNA, 15 bp, Homo sapiens
aagactccatctcaa

SEQ ID NO: 642780 - DNA, 15 bp, Homo sapiens
agactccatctcaaa

SEQ ID NO: 642781 - DNA, 15 bp, Homo sapiens
gactccatctcaaaa

SEQ ID NO: 642782 - DNA, 15 bp, Homo sapiens
actccatctcaaaaa

SEQ ID NO: 642783 - DNA, 15 bp, Homo sapiens
ctccatctcaaaaaa

SEQ ID NO: 642784 - DNA, 15 bp, Homo sapiens
tccatctcaaaaaaa

SEQ ID NO: 642785 - DNA, 15 bp, Homo sapiens
ccatctcaaaaaaaa

SEQ ID NO: 642786 - DNA, 15 bp, Homo sapiens
catctcaaaaaaaaa

SEQ ID NO: 642787 - DNA, 15 bp, Homo sapiens
atctcaaaaaaaaaa

SEQ ID NO: 642788 - DNA, 15 bp, Homo sapiens
aaaaaaaaaaaaaac

SEQ ID NO: 642789 - DNA, 15 bp, Homo sapiens
aaaaaaaaaaaaaca

SEQ ID NO: 642790 - DNA, 15 bp, Homo sapiens
aaaaaaaaaaaacaa

SEQ ID NO: 642791 - DNA, 15 bp, Homo sapiens
aaaaaaaaaaacaac

SEQ ID NO: 642792 - DNA, 15 bp, Homo sapiens
aaaaaaaaaacaaca

SEQ ID NO: 642793 - DNA, 15 bp, Homo sapiens
aaaaaaaaacaacaa

SEQ ID NO: 642794 - DNA, 15 bp, Homo sapiens
aaaaaaaacaacaac

SEQ ID NO: 642795 - DNA, 15 bp, Homo sapiens
aaaaaaacaacaaca

SEQ ID NO: 642796 - DNA, 15 bp, Homo sapiens
aaaaaacaacaacaa

SEQ ID NO: 642797 - DNA, 15 bp, Homo sapiens
aaaaacaacaacaac

SEQ ID NO: 642798 - DNA, 15 bp, Homo sapiens
aaaacaacaacaaca

SEQ ID NO: 642799 - DNA, 15 bp, Homo sapiens
aaacaacaacaacaa

SEQ ID NO: 642800 - DNA, 15 bp, Homo sapiens
aacaacaacaacaac

SEQ ID NO: 642801 - DNA, 15 bp, Homo sapiens
acaacaacaacaaca

SEQ ID NO: 642802 - DNA, 15 bp, Homo sapiens
caacaacaacaacaa

SEQ ID NO: 642803 - DNA, 15 bp, Homo sapiens
aacaacaacaacaaa

SEQ ID NO: 642804 - DNA, 15 bp, Homo sapiens
acaacaacaacaaaa

SEQ ID NO: 642805 - DNA, 15 bp, Homo sapiens
caacaacaacaaaaa

SEQ ID NO: 642806 - DNA, 15 bp, Homo sapiens
aacaacaacaaaaaa

SEQ ID NO: 642807 - DNA, 15 bp, Homo sapiens
acaacaacaaaaaac

SEQ ID NO: 642808 - DNA, 15 bp, Homo sapiens
caacaacaaaaaacc

SEQ ID NO: 642809 - DNA, 15 bp, Homo sapiens
aacaacaaaaaacct

SEQ ID NO: 642810 - DNA, 15 bp, Homo sapiens
acaacaaaaaaccta

SEQ ID NO: 642811 - DNA, 15 bp, Homo sapiens
caacaaaaaacctaa

SEQ ID NO: 642812 - DNA, 15 bp, Homo sapiens
aacaaaaaacctaac

SEQ ID NO: 642813 - DNA, 15 bp, Homo sapiens
acaaaaaacctaact

SEQ ID NO: 642814 - DNA, 15 bp, Homo sapiens
caaaaaacctaacta

SEQ ID NO: 642815 - DNA, 15 bp, Homo sapiens
aaaaaacctaactac

SEQ ID NO: 642816 - DNA, 15 bp, Homo sapiens
aaaaacctaactact

SEQ ID NO: 642817 - DNA, 15 bp, Homo sapiens
aaaacctaactactg

SEQ ID NO: 642818 - DNA, 15 bp, Homo sapiens
aaacctaactactgt

SEQ ID NO: 642819 - DNA, 15 bp, Homo sapiens
aacctaactactgta

SEQ ID NO: 642820 - DNA, 15 bp, Homo sapiens
acctaactactgtat

SEQ ID NO: 642821 - DNA, 15 bp, Homo sapiens
cctaactactgtatt

SEQ ID NO: 642822 - DNA, 15 bp, Homo sapiens
ctaactactgtattt

SEQ ID NO: 642823 - DNA, 15 bp, Homo sapiens
taactactgtatttt

SEQ ID NO: 642824 - DNA, 15 bp, Homo sapiens
aactactgtatttta

SEQ ID NO: 642825 - DNA, 15 bp, Homo sapiens
actactgtattttaa

SEQ ID NO: 642826 - DNA, 15 bp, Homo sapiens
ctactgtattttaat

SEQ ID NO: 642827 - DNA, 15 bp, Homo sapiens
tactgtattttaatc

SEQ ID NO: 642828 - DNA, 15 bp, Homo sapiens
actgtattttaatca

SEQ ID NO: 642829 - DNA, 15 bp, Homo sapiens
ctgtattttaatcag

SEQ ID NO: 642830 - DNA, 15 bp, Homo sapiens
tgtattttaatcagg

SEQ ID NO: 642831 - DNA, 15 bp, Homo sapiens
gtattttaatcaggt

SEQ ID NO: 642832 - DNA, 15 bp, Homo sapiens
tattttaatcaggtc

SEQ ID NO: 642833 - DNA, 15 bp, Homo sapiens
attttaatcaggtct

SEQ ID NO: 642834 - DNA, 15 bp, Homo sapiens
ttttaatcaggtctt

SEQ ID NO: 642835 - DNA, 15 bp, Homo sapiens
tttaatcaggtcttg

SEQ ID NO: 642836 - DNA, 15 bp, Homo sapiens
ttaatcaggtcttgc

SEQ ID NO: 642837 - DNA, 15 bp, Homo sapiens
taatcaggtcttgcc

SEQ ID NO: 642838 - DNA, 15 bp, Homo sapiens
aatcaggtcttgcca

SEQ ID NO: 642839 - DNA, 15 bp, Homo sapiens
atcaggtcttgccaa

SEQ ID NO: 642840 - DNA, 15 bp, Homo sapiens
tcaggtcttgccaag

SEQ ID NO: 642841 - DNA, 15 bp, Homo sapiens
caggtcttgccaaga

SEQ ID NO: 642842 - DNA, 15 bp, Homo sapiens
aggtcttgccaagaa

SEQ ID NO: 642843 - DNA, 15 bp, Homo sapiens
ggtcttgccaagaaa

SEQ ID NO: 642844 - DNA, 15 bp, Homo sapiens
gtcttgccaagaaat

SEQ ID NO: 642845 - DNA, 15 bp, Homo sapiens
tcttgccaagaaata

SEQ ID NO: 642846 - DNA, 15 bp, Homo sapiens
cttgccaagaaatat

SEQ ID NO: 642847 - DNA, 15 bp, Homo sapiens
ttgccaagaaatatt

SEQ ID NO: 642848 - DNA, 15 bp, Homo sapiens
tgccaagaaatattg

SEQ ID NO: 642849 - DNA, 15 bp, Homo sapiens
gccaagaaatattgc

SEQ ID NO: 642850 - DNA, 15 bp, Homo sapiens
ccaagaaatattgct

SEQ ID NO: 642851 - DNA, 15 bp, Homo sapiens
caagaaatattgctg

SEQ ID NO: 642852 - DNA, 15 bp, Homo sapiens
aagaaatattgctgt

SEQ ID NO: 642853 - DNA, 15 bp, Homo sapiens
agaaatattgctgtt

SEQ ID NO: 642854 - DNA, 15 bp, Homo sapiens
gaaatattgctgttc

SEQ ID NO: 642855 - DNA, 15 bp, Homo sapiens
aaatattgctgttcc

SEQ ID NO: 642856 - DNA, 15 bp, Homo sapiens
aatattgctgttcct

SEQ ID NO: 642857 - DNA, 15 bp, Homo sapiens
atattgctgttcctt

SEQ ID NO: 642858 - DNA, 15 bp, Homo sapiens
tattgctgttcctta

SEQ ID NO: 642859 - DNA, 15 bp, Homo sapiens
attgctgttccttac

SEQ ID NO: 642860 - DNA, 15 bp, Homo sapiens
ttgctgttccttact

SEQ ID NO: 642861 - DNA, 15 bp, Homo sapiens
tgctgttccttactg

SEQ ID NO: 642862 - DNA, 15 bp, Homo sapiens
gctgttccttactgc

SEQ ID NO: 642863 - DNA, 15 bp, Homo sapiens
ctgttccttactgcc

SEQ ID NO: 642864 - DNA, 15 bp, Homo sapiens
tgttccttactgcca

SEQ ID NO: 642865 - DNA, 15 bp, Homo sapiens
gttccttactgccaa

SEQ ID NO: 642866 - DNA, 15 bp, Homo sapiens
ttccttactgccaac

SEQ ID NO: 642867 - DNA, 15 bp, Homo sapiens
tccttactgccaact

SEQ ID NO: 642868 - DNA, 15 bp, Homo sapiens
ccttactgccaactc

SEQ ID NO: 642869 - DNA, 15 bp, Homo sapiens
cttactgccaactct

SEQ ID NO: 642870 - DNA, 15 bp, Homo sapiens
ttactgccaactctc

SEQ ID NO: 642871 - DNA, 15 bp, Homo sapiens
tactgccaactctcc

SEQ ID NO: 642872 - DNA, 15 bp, Homo sapiens
actgccaactctcca

SEQ ID NO: 642873 - DNA, 15 bp, Homo sapiens
ctgccaactctccaa

SEQ ID NO: 642874 - DNA, 15 bp, Homo sapiens
tgccaactctccaag

SEQ ID NO: 642875 - DNA, 15 bp, Homo sapiens
gccaactctccaaga

SEQ ID NO: 642876 - DNA, 15 bp, Homo sapiens
ccaactctccaagaa

SEQ ID NO: 642877 - DNA, 15 bp, Homo sapiens
caactctccaagaaa

SEQ ID NO: 642878 - DNA, 15 bp, Homo sapiens
aactctccaagaaac

SEQ ID NO: 642879 - DNA, 15 bp, Homo sapiens
actctccaagaaact

SEQ ID NO: 642880 - DNA, 15 bp, Homo sapiens
ctctccaagaaactg

SEQ ID NO: 642881 - DNA, 15 bp, Homo sapiens
tctccaagaaactgg

SEQ ID NO: 642882 - DNA, 15 bp, Homo sapiens
ctccaagaaactgga

SEQ ID NO: 642883 - DNA, 15 bp, Homo sapiens
tccaagaaactggaa

SEQ ID NO: 642884 - DNA, 15 bp, Homo sapiens
ccaagaaactggaac

SEQ ID NO: 642885 - DNA, 15 bp, Homo sapiens
caagaaactggaact

SEQ ID NO: 642886 - DNA, 15 bp, Homo sapiens
aagaaactggaactg

SEQ ID NO: 642887 - DNA, 15 bp, Homo sapiens
agaaactggaactgc

SEQ ID NO: 642888 - DNA, 15 bp, Homo sapiens
gaaactggaactgcc

SEQ ID NO: 642889 - DNA, 15 bp, Homo sapiens
aaactggaactgcct

SEQ ID NO: 642890 - DNA, 15 bp, Homo sapiens
aactggaactgcctc

SEQ ID NO: 642891 - DNA, 15 bp, Homo sapiens
actggaactgcctcc

SEQ ID NO: 642892 - DNA, 15 bp, Homo sapiens
ctggaactgcctcct

SEQ ID NO: 642893 - DNA, 15 bp, Homo sapiens
tggaactgcctccta

SEQ ID NO: 642894 - DNA, 15 bp, Homo sapiens
ggaactgcctcctat

SEQ ID NO: 642895 - DNA, 15 bp, Homo sapiens
gaactgcctcctatt

SEQ ID NO: 642896 - DNA, 15 bp, Homo sapiens
aactgcctcctattt

SEQ ID NO: 642897 - DNA, 15 bp, Homo sapiens
actgcctcctatttt

SEQ ID NO: 642898 - DNA, 15 bp, Homo sapiens
ctgcctcctattttg

SEQ ID NO: 642899 - DNA, 15 bp, Homo sapiens
tgcctcctattttgg

SEQ ID NO: 642900 - DNA, 15 bp, Homo sapiens
gcctcctattttggt

SEQ ID NO: 642901 - DNA, 15 bp, Homo sapiens
cctcctattttggtt

SEQ ID NO: 642902 - DNA, 15 bp, Homo sapiens
ctcctattttggttt

SEQ ID NO: 642903 - DNA, 15 bp, Homo sapiens
tcctattttggttta

SEQ ID NO: 642904 - DNA, 15 bp, Homo sapiens
cctattttggtttat

SEQ ID NO: 642905 - DNA, 15 bp, Homo sapiens
ctattttggtttatg

SEQ ID NO: 642906 - DNA, 15 bp, Homo sapiens
tattttggtttatgc

SEQ ID NO: 642907 - DNA, 15 bp, Homo sapiens
attttggtttatgca

SEQ ID NO: 642908 - DNA, 15 bp, Homo sapiens
ttttggtttatgcag

SEQ ID NO: 642909 - DNA, 15 bp, Homo sapiens
tttggtttatgcaga

SEQ ID NO: 642910 - DNA, 15 bp, Homo sapiens
ttggtttatgcagac

SEQ ID NO: 642911 - DNA, 15 bp, Homo sapiens
tggtttatgcagact

SEQ ID NO: 642912 - DNA, 15 bp, Homo sapiens
ggtttatgcagactg

SEQ ID NO: 642913 - DNA, 15 bp, Homo sapiens
gtttatgcagactgt

SEQ ID NO: 642914 - DNA, 15 bp, Homo sapiens
tttatgcagactgtg

SEQ ID NO: 642915 - DNA, 15 bp, Homo sapiens
ttatgcagactgtgt

SEQ ID NO: 642916 - DNA, 15 bp, Homo sapiens
tatgcagactgtgtc

SEQ ID NO: 642917 - DNA, 15 bp, Homo sapiens
atgcagactgtgtct

SEQ ID NO: 642918 - DNA, 15 bp, Homo sapiens
tgcagactgtgtctt

SEQ ID NO: 642919 - DNA, 15 bp, Homo sapiens
gcagactgtgtcttg

SEQ ID NO: 642920 - DNA, 15 bp, Homo sapiens
cagactgtgtcttgg

SEQ ID NO: 642921 - DNA, 15 bp, Homo sapiens
agactgtgtcttggc

SEQ ID NO: 642922 - DNA, 15 bp, Homo sapiens
gactgtgtcttggca

SEQ ID NO: 642923 - DNA, 15 bp, Homo sapiens
actgtgtcttggcaa

SEQ ID NO: 642924 - DNA, 15 bp, Homo sapiens
ctgtgtcttggcaaa

SEQ ID NO: 642925 - DNA, 15 bp, Homo sapiens
tgtgtcttggcaaac

SEQ ID NO: 642926 - DNA, 15 bp, Homo sapiens
gtgtcttggcaaact

SEQ ID NO: 642927 - DNA, 15 bp, Homo sapiens
tgtcttggcaaactg

SEQ ID NO: 642928 - DNA, 15 bp, Homo sapiens
gtcttggcaaactgg

SEQ ID NO: 642929 - DNA, 15 bp, Homo sapiens
tcttggcaaactgga

SEQ ID NO: 642930 - DNA, 15 bp, Homo sapiens
cttggcaaactggaa

SEQ ID NO: 642931 - DNA, 15 bp, Homo sapiens
ttggcaaactggaag

SEQ ID NO: 642932 - DNA, 15 bp, Homo sapiens
tggcaaactggaaga

SEQ ID NO: 642933 - DNA, 15 bp, Homo sapiens
ggcaaactggaagaa

SEQ ID NO: 642934 - DNA, 15 bp, Homo sapiens
gcaaactggaagaaa

SEQ ID NO: 642935 - DNA, 15 bp, Homo sapiens
caaactggaagaaaa

SEQ ID NO: 642936 - DNA, 15 bp, Homo sapiens
aaactggaagaaaaa

SEQ ID NO: 642937 - DNA, 15 bp, Homo sapiens
aactggaagaaaaag

SEQ ID NO: 642938 - DNA, 15 bp, Homo sapiens
actggaagaaaaagg

SEQ ID NO: 642939 - DNA, 15 bp, Homo sapiens
ctggaagaaaaagga

SEQ ID NO: 642940 - DNA, 15 bp, Homo sapiens
tggaagaaaaaggat

SEQ ID NO: 642941 - DNA, 15 bp, Homo sapiens
ggaagaaaaaggatc

SEQ ID NO: 642942 - DNA, 15 bp, Homo sapiens
gaagaaaaaggatcc

SEQ ID NO: 642943 - DNA, 15 bp, Homo sapiens
aagaaaaaggatcct

SEQ ID NO: 642944 - DNA, 15 bp, Homo sapiens
agaaaaaggatccta

SEQ ID NO: 642945 - DNA, 15 bp, Homo sapiens
gaaaaaggatcctaa

SEQ ID NO: 642946 - DNA, 15 bp, Homo sapiens
aaaaaggatcctaat

SEQ ID NO: 642947 - DNA, 15 bp, Homo sapiens
aaaaggatcctaata

SEQ ID NO: 642948 - DNA, 15 bp, Homo sapiens
aaaggatcctaataa

SEQ ID NO: 642949 - DNA, 15 bp, Homo sapiens
aaggatcctaataag

SEQ ID NO: 642950 - DNA, 15 bp, Homo sapiens
aggatcctaataagt

SEQ ID NO: 642951 - DNA, 15 bp, Homo sapiens
ggatcctaataagta

SEQ ID NO: 642952 - DNA, 15 bp, Homo sapiens
gatcctaataagtat

SEQ ID NO: 642953 - DNA, 15 bp, Homo sapiens
atcctaataagtatg

SEQ ID NO: 642954 - DNA, 15 bp, Homo sapiens
tcctaataagtatgt

SEQ ID NO: 642955 - DNA, 15 bp, Homo sapiens
cctaataagtatgta

SEQ ID NO: 642956 - DNA, 15 bp, Homo sapiens
ctaataagtatgtaa

SEQ ID NO: 642957 - DNA, 15 bp, Homo sapiens
taataagtatgtaaa

SEQ ID NO: 642958 - DNA, 15 bp, Homo sapiens
aataagtatgtaaac

SEQ ID NO: 642959 - DNA, 15 bp, Homo sapiens
ataagtatgtaaaca

SEQ ID NO: 642960 - DNA, 15 bp, Homo sapiens
taagtatgtaaacag

SEQ ID NO: 642961 - DNA, 15 bp, Homo sapiens
aagtatgtaaacagt

SEQ ID NO: 642962 - DNA, 15 bp, Homo sapiens
agtatgtaaacagtg

SEQ ID NO: 642963 - DNA, 15 bp, Homo sapiens
gtatgtaaacagtga

SEQ ID NO: 642964 - DNA, 15 bp, Homo sapiens
tatgtaaacagtgat

SEQ ID NO: 642965 - DNA, 15 bp, Homo sapiens
atgtaaacagtgata

SEQ ID NO: 642966 - DNA, 15 bp, Homo sapiens
tgtaaacagtgataa

SEQ ID NO: 642967 - DNA, 15 bp, Homo sapiens
gtaaacagtgataac

SEQ ID NO: 642968 - DNA, 15 bp, Homo sapiens
taaacagtgataaca

SEQ ID NO: 642969 - DNA, 15 bp, Homo sapiens
aaacagtgataacaa

SEQ ID NO: 642970 - DNA, 15 bp, Homo sapiens
aacagtgataacaac

SEQ ID NO: 642971 - DNA, 15 bp, Homo sapiens
acagtgataacaaca

SEQ ID NO: 642972 - DNA, 15 bp, Homo sapiens
cagtgataacaacag

SEQ ID NO: 642973 - DNA, 15 bp, Homo sapiens
agtgataacaacagg

SEQ ID NO: 642974 - DNA, 15 bp, Homo sapiens
gtgataacaacagga

SEQ ID NO: 642975 - DNA, 15 bp, Homo sapiens
tgataacaacaggaa

SEQ ID NO: 642976 - DNA, 15 bp, Homo sapiens
gataacaacaggaat

SEQ ID NO: 642977 - DNA, 15 bp, Homo sapiens
ataacaacaggaatt

SEQ ID NO: 642978 - DNA, 15 bp, Homo sapiens
taacaacaggaattt

SEQ ID NO: 642979 - DNA, 15 bp, Homo sapiens
aacaacaggaatttt

SEQ ID NO: 642980 - DNA, 15 bp, Homo sapiens
acaacaggaattttt

SEQ ID NO: 642981 - DNA, 15 bp, Homo sapiens
caacaggaatttttg

SEQ ID NO: 642982 - DNA, 15 bp, Homo sapiens
aacaggaatttttgg

SEQ ID NO: 642983 - DNA, 15 bp, Homo sapiens
acaggaatttttgga

SEQ ID NO: 642984 - DNA, 15 bp, Homo sapiens
caggaatttttggag

SEQ ID NO: 642985 - DNA, 15 bp, Homo sapiens
aggaatttttggagt

SEQ ID NO: 642986 - DNA, 15 bp, Homo sapiens
ggaatttttggagtg

SEQ ID NO: 642987 - DNA, 15 bp, Homo sapiens
gaatttttggagtgt

SEQ ID NO: 642988 - DNA, 15 bp, Homo sapiens
aatttttggagtgtg

SEQ ID NO: 642989 - DNA, 15 bp, Homo sapiens
atttttggagtgtgt

SEQ ID NO: 642990 - DNA, 15 bp, Homo sapiens
tttttggagtgtgtg

SEQ ID NO: 642991 - DNA, 15 bp, Homo sapiens
ttttggagtgtgtgc

SEQ ID NO: 642992 - DNA, 15 bp, Homo sapiens
tttggagtgtgtgcc

SEQ ID NO: 642993 - DNA, 15 bp, Homo sapiens
ttggagtgtgtgccg

SEQ ID NO: 642994 - DNA, 15 bp, Homo sapiens
tggagtgtgtgccga

SEQ ID NO: 642995 - DNA, 15 bp, Homo sapiens
ggagtgtgtgccgat

SEQ ID NO: 642996 - DNA, 15 bp, Homo sapiens
gagtgtgtgccgatt

SEQ ID NO: 642997 - DNA, 15 bp, Homo sapiens
agtgtgtgccgatta

SEQ ID NO: 642998 - DNA, 15 bp, Homo sapiens
gtgtgtgccgattaa

SEQ ID NO: 642999 - DNA, 15 bp, Homo sapiens
tgtgtgccgattaaa

SEQ ID NO: 643000 - DNA, 15 bp, Homo sapiens
gtgtgccgattaaat

SEQ ID NO: 643001 - DNA, 15 bp, Homo sapiens
tgtgccgattaaata

SEQ ID NO: 643002 - DNA, 15 bp, Homo sapiens
gtgccgattaaataa

SEQ ID NO: 643003 - DNA, 15 bp, Homo sapiens
tgccgattaaataaa

SEQ ID NO: 643004 - DNA, 15 bp, Homo sapiens
gccgattaaataaaa

SEQ ID NO: 643005 - DNA, 15 bp, Homo sapiens
ccgattaaataaaac

SEQ ID NO: 643006 - DNA, 15 bp, Homo sapiens
cgattaaataaaaca

SEQ ID NO: 643007 - DNA, 15 bp, Homo sapiens
gattaaataaaacag

SEQ ID NO: 643008 - DNA, 15 bp, Homo sapiens
attaaataaaacagg

SEQ ID NO: 643009 - DNA, 15 bp, Homo sapiens
ttaaataaaacaggg

SEQ ID NO: 643010 - DNA, 15 bp, Homo sapiens
taaataaaacagggg

SEQ ID NO: 643011 - DNA, 15 bp, Homo sapiens
aaataaaacaggggt

SEQ ID NO: 643012 - DNA, 15 bp, Homo sapiens
aataaaacaggggtt

SEQ ID NO: 643013 - DNA, 15 bp, Homo sapiens
ataaaacaggggttg

SEQ ID NO: 643014 - DNA, 15 bp, Homo sapiens
taaaacaggggttgt

SEQ ID NO: 643015 - DNA, 15 bp, Homo sapiens
aaaacaggggttgtt

SEQ ID NO: 643016 - DNA, 15 bp, Homo sapiens
aaacaggggttgttc

SEQ ID NO: 643017 - DNA, 15 bp, Homo sapiens
aacaggggttgttca

SEQ ID NO: 643018 - DNA, 15 bp, Homo sapiens
acaggggttgttcat

SEQ ID NO: 643019 - DNA, 15 bp, Homo sapiens
caggggttgttcatt

SEQ ID NO: 643020 - DNA, 15 bp, Homo sapiens
aggggttgttcattg

SEQ ID NO: 643021 - DNA, 15 bp, Homo sapiens
ggggttgttcattgg

SEQ ID NO: 643022 - DNA, 15 bp, Homo sapiens
gggttgttcattggc

SEQ ID NO: 643023 - DNA, 15 bp, Homo sapiens
ggttgttcattggct

SEQ ID NO: 643024 - DNA, 15 bp, Homo sapiens
gttgttcattggctt

SEQ ID NO: 643025 - DNA, 15 bp, Homo sapiens
ttgttcattggctta

SEQ ID NO: 643026 - DNA, 15 bp, Homo sapiens
tgttcattggcttaa

SEQ ID NO: 643027 - DNA, 15 bp, Homo sapiens
gttcattggcttaat

SEQ ID NO: 643028 - DNA, 15 bp, Homo sapiens
ttcattggcttaatt

SEQ ID NO: 643029 - DNA, 15 bp, Homo sapiens
tcattggcttaattt

SEQ ID NO: 643030 - DNA, 15 bp, Homo sapiens
cattggcttaatttt

SEQ ID NO: 643031 - DNA, 15 bp, Homo sapiens
attggcttaattttg

SEQ ID NO: 643032 - DNA, 15 bp, Homo sapiens
ttggcttaattttgg

SEQ ID NO: 643033 - DNA, 15 bp, Homo sapiens
tggcttaattttggg

SEQ ID NO: 643034 - DNA, 15 bp, Homo sapiens
ggcttaattttgggc

SEQ ID NO: 643035 - DNA, 15 bp, Homo sapiens
gcttaattttgggca

SEQ ID NO: 643036 - DNA, 15 bp, Homo sapiens
cttaattttgggcag

SEQ ID NO: 643037 - DNA, 15 bp, Homo sapiens
ttaattttgggcagc

SEQ ID NO: 643038 - DNA, 15 bp, Homo sapiens
taattttgggcagcg

SEQ ID NO: 643039 - DNA, 15 bp, Homo sapiens
aattttgggcagcgc

SEQ ID NO: 643040 - DNA, 15 bp, Homo sapiens
attttgggcagcgca

SEQ ID NO: 643041 - DNA, 15 bp, Homo sapiens
ttttgggcagcgcag

SEQ ID NO: 643042 - DNA, 15 bp, Homo sapiens
tttgggcagcgcagc

SEQ ID NO: 643043 - DNA, 15 bp, Homo sapiens
ttgggcagcgcagct

SEQ ID NO: 643044 - DNA, 15 bp, Homo sapiens
tgggcagcgcagctt

SEQ ID NO: 643045 - DNA, 15 bp, Homo sapiens
gggcagcgcagcttt

SEQ ID NO: 643046 - DNA, 15 bp, Homo sapiens
ggcagcgcagctttc

SEQ ID NO: 643047 - DNA, 15 bp, Homo sapiens
gcagcgcagctttcc

SEQ ID NO: 643048 - DNA, 15 bp, Homo sapiens
cagcgcagctttcct

SEQ ID NO: 643049 - DNA, 15 bp, Homo sapiens
agcgcagctttcctc

SEQ ID NO: 643050 - DNA, 15 bp, Homo sapiens
gcgcagctttcctct

SEQ ID NO: 643051 - DNA, 15 bp, Homo sapiens
cgcagctttcctctc

SEQ ID NO: 643052 - DNA, 15 bp, Homo sapiens
gcagctttcctctca

SEQ ID NO: 643053 - DNA, 15 bp, Homo sapiens
cagctttcctctcag

SEQ ID NO: 643054 - DNA, 15 bp, Homo sapiens
agctttcctctcagc

SEQ ID NO: 643055 - DNA, 15 bp, Homo sapiens
gctttcctctcagct

SEQ ID NO: 643056 - DNA, 15 bp, Homo sapiens
ctttcctctcagctg

SEQ ID NO: 643057 - DNA, 15 bp, Homo sapiens
tttcctctcagctgg

SEQ ID NO: 643058 - DNA, 15 bp, Homo sapiens
ttcctctcagctggg

SEQ ID NO: 643059 - DNA, 15 bp, Homo sapiens
tcctctcagctgggt

SEQ ID NO: 643060 - DNA, 15 bp, Homo sapiens
cctctcagctgggta

SEQ ID NO: 643061 - DNA, 15 bp, Homo sapiens
ctctcagctgggtat

SEQ ID NO: 643062 - DNA, 15 bp, Homo sapiens
tctcagctgggtatg

SEQ ID NO: 643063 - DNA, 15 bp, Homo sapiens
ctcagctgggtatgg

SEQ ID NO: 643064 - DNA, 15 bp, Homo sapiens
tcagctgggtatggt

SEQ ID NO: 643065 - DNA, 15 bp, Homo sapiens
cagctgggtatggtt

SEQ ID NO: 643066 - DNA, 15 bp, Homo sapiens
agctgggtatggttc

SEQ ID NO: 643067 - DNA, 15 bp, Homo sapiens
gctgggtatggttcc

SEQ ID NO: 643068 - DNA, 15 bp, Homo sapiens
ctgggtatggttcct

SEQ ID NO: 643069 - DNA, 15 bp, Homo sapiens
tgggtatggttcctc

SEQ ID NO: 643070 - DNA, 15 bp, Homo sapiens
gggtatggttcctct

SEQ ID NO: 643071 - DNA, 15 bp, Homo sapiens
ggtatggttcctctc

SEQ ID NO: 643072 - DNA, 15 bp, Homo sapiens
gtatggttcctctca

SEQ ID NO: 643073 - DNA, 15 bp, Homo sapiens
tatggttcctctcag

SEQ ID NO: 643074 - DNA, 15 bp, Homo sapiens
atggttcctctcagt

SEQ ID NO: 643075 - DNA, 15 bp, Homo sapiens
tggttcctctcagtt

SEQ ID NO: 643076 - DNA, 15 bp, Homo sapiens
ggttcctctcagttc

SEQ ID NO: 643077 - DNA, 15 bp, Homo sapiens
gttcctctcagttcc

SEQ ID NO: 643078 - DNA, 15 bp, Homo sapiens
ttcctctcagttcct

SEQ ID NO: 643079 - DNA, 15 bp, Homo sapiens
tcctctcagttcctc

SEQ ID NO: 643080 - DNA, 15 bp, Homo sapiens
cctctcagttcctcg

SEQ ID NO: 643081 - DNA, 15 bp, Homo sapiens
ctctcagttcctcgg

SEQ ID NO: 643082 - DNA, 15 bp, Homo sapiens
tctcagttcctcggc

SEQ ID NO: 643083 - DNA, 15 bp, Homo sapiens
ctcagttcctcggct

SEQ ID NO: 643084 - DNA, 15 bp, Homo sapiens
tcagttcctcggctg

SEQ ID NO: 643085 - DNA, 15 bp, Homo sapiens
cagttcctcggctgg

SEQ ID NO: 643086 - DNA, 15 bp, Homo sapiens
agttcctcggctggg

SEQ ID NO: 643087 - DNA, 15 bp, Homo sapiens
gttcctcggctgggt

SEQ ID NO: 643088 - DNA, 15 bp, Homo sapiens
ttcctcggctgggta

SEQ ID NO: 643089 - DNA, 15 bp, Homo sapiens
tcctcggctgggtac

SEQ ID NO: 643090 - DNA, 15 bp, Homo sapiens
cctcggctgggtacg

SEQ ID NO: 643091 - DNA, 15 bp, Homo sapiens
ctcggctgggtacgg

SEQ ID NO: 643092 - DNA, 15 bp, Homo sapiens
tcggctgggtacggt

SEQ ID NO: 643093 - DNA, 15 bp, Homo sapiens
cggctgggtacggtt

SEQ ID NO: 643094 - DNA, 15 bp, Homo sapiens
ggctgggtacggttt

SEQ ID NO: 643095 - DNA, 15 bp, Homo sapiens
gctgggtacggtttc

SEQ ID NO: 643096 - DNA, 15 bp, Homo sapiens
ctgggtacggtttct

SEQ ID NO: 643097 - DNA, 15 bp, Homo sapiens
tgggtacggtttctt

SEQ ID NO: 643098 - DNA, 15 bp, Homo sapiens
gggtacggtttcttg

SEQ ID NO: 643099 - DNA, 15 bp, Homo sapiens
ggtacggtttcttgg

SEQ ID NO: 643100 - DNA, 15 bp, Homo sapiens
gtacggtttcttgga

SEQ ID NO: 643101 - DNA, 15 bp, Homo sapiens
tacggtttcttggac

SEQ ID NO: 643102 - DNA, 15 bp, Homo sapiens
acggtttcttggact

SEQ ID NO: 643103 - DNA, 15 bp, Homo sapiens
cggtttcttggactg

SEQ ID NO: 643104 - DNA, 15 bp, Homo sapiens
ggtttcttggactgc

SEQ ID NO: 643105 - DNA, 15 bp, Homo sapiens
gtttcttggactgct

SEQ ID NO: 643106 - DNA, 15 bp, Homo sapiens
tttcttggactgctg

SEQ ID NO: 643107 - DNA, 15 bp, Homo sapiens
ttcttggactgctgt

SEQ ID NO: 643108 - DNA, 15 bp, Homo sapiens
tcttggactgctgtg

SEQ ID NO: 643109 - DNA, 15 bp, Homo sapiens
cttggactgctgtgt

SEQ ID NO: 643110 - DNA, 15 bp, Homo sapiens
ttggactgctgtgtc

SEQ ID NO: 643111 - DNA, 15 bp, Homo sapiens
tggactgctgtgtct

SEQ ID NO: 643112 - DNA, 15 bp, Homo sapiens
ggactgctgtgtcta

SEQ ID NO: 643113 - DNA, 15 bp, Homo sapiens
gactgctgtgtctac

SEQ ID NO: 643114 - DNA, 15 bp, Homo sapiens
actgctgtgtctacc

SEQ ID NO: 643115 - DNA, 15 bp, Homo sapiens
ctgctgtgtctacca

SEQ ID NO: 643116 - DNA, 15 bp, Homo sapiens
tgctgtgtctaccac

SEQ ID NO: 643117 - DNA, 15 bp, Homo sapiens
gctgtgtctaccact

SEQ ID NO: 643118 - DNA, 15 bp, Homo sapiens
ctgtgtctaccacta

SEQ ID NO: 643119 - DNA, 15 bp, Homo sapiens
tgtgtctaccactac

SEQ ID NO: 643120 - DNA, 15 bp, Homo sapiens
gtgtctaccactaca

SEQ ID NO: 643121 - DNA, 15 bp, Homo sapiens
tgtctaccactacaa

SEQ ID NO: 643122 - DNA, 15 bp, Homo sapiens
gtctaccactacaaa

SEQ ID NO: 643123 - DNA, 15 bp, Homo sapiens
tctaccactacaaat

SEQ ID NO: 643124 - DNA, 15 bp, Homo sapiens
ctaccactacaaatg

SEQ ID NO: 643125 - DNA, 15 bp, Homo sapiens
taccactacaaatgt

SEQ ID NO: 643126 - DNA, 15 bp, Homo sapiens
accactacaaatgta

SEQ ID NO: 643127 - DNA, 15 bp, Homo sapiens
ccactacaaatgtac

SEQ ID NO: 643128 - DNA, 15 bp, Homo sapiens
cactacaaatgtaca

SEQ ID NO: 643129 - DNA, 15 bp, Homo sapiens
actacaaatgtacac

SEQ ID NO: 643130 - DNA, 15 bp, Homo sapiens
ctacaaatgtacaca

SEQ ID NO: 643131 - DNA, 15 bp, Homo sapiens
tacaaatgtacacat

SEQ ID NO: 643132 - DNA, 15 bp, Homo sapiens
acaaatgtacacata

SEQ ID NO: 643133 - DNA, 15 bp, Homo sapiens
caaatgtacacatat

SEQ ID NO: 643134 - DNA, 15 bp, Homo sapiens
aaatgtacacatatg

SEQ ID NO: 643135 - DNA, 15 bp, Homo sapiens
aatgtacacatatgt

SEQ ID NO: 643136 - DNA, 15 bp, Homo sapiens
atgtacacatatgtg

SEQ ID NO: 643137 - DNA, 15 bp, Homo sapiens
tgtacacatatgtga

SEQ ID NO: 643138 - DNA, 15 bp, Homo sapiens
gtacacatatgtgac

SEQ ID NO: 643139 - DNA, 15 bp, Homo sapiens
tacacatatgtgaca

SEQ ID NO: 643140 - DNA, 15 bp, Homo sapiens
acacatatgtgacag

SEQ ID NO: 643141 - DNA, 15 bp, Homo sapiens
cacatatgtgacagg

SEQ ID NO: 643142 - DNA, 15 bp, Homo sapiens
acatatgtgacaggt

SEQ ID NO: 643143 - DNA, 15 bp, Homo sapiens
catatgtgacaggtg

SEQ ID NO: 643144 - DNA, 15 bp, Homo sapiens
atatgtgacaggtgt

SEQ ID NO: 643145 - DNA, 15 bp, Homo sapiens
tatgtgacaggtgta

SEQ ID NO: 643146 - DNA, 15 bp, Homo sapiens
atgtgacaggtgtat

SEQ ID NO: 643147 - DNA, 15 bp, Homo sapiens
tgtgacaggtgtata

SEQ ID NO: 643148 - DNA, 15 bp, Homo sapiens
gtgacaggtgtatag

SEQ ID NO: 643149 - DNA, 15 bp, Homo sapiens
tgacaggtgtatagt

SEQ ID NO: 643150 - DNA, 15 bp, Homo sapiens
gacaggtgtatagtt

SEQ ID NO: 643151 - DNA, 15 bp, Homo sapiens
acaggtgtatagtta

SEQ ID NO: 643152 - DNA, 15 bp, Homo sapiens
caggtgtatagttaa

SEQ ID NO: 643153 - DNA, 15 bp, Homo sapiens
aggtgtatagttaac

SEQ ID NO: 643154 - DNA, 15 bp, Homo sapiens
ggtgtatagttaaca

SEQ ID NO: 643155 - DNA, 15 bp, Homo sapiens
gtgtatagttaacac

SEQ ID NO: 643156 - DNA, 15 bp, Homo sapiens
tgtatagttaacaca

SEQ ID NO: 643157 - DNA, 15 bp, Homo sapiens
gtatagttaacacag

SEQ ID NO: 643158 - DNA, 15 bp, Homo sapiens
tatagttaacacagt

SEQ ID NO: 643159 - DNA, 15 bp, Homo sapiens
atagttaacacagta

SEQ ID NO: 643160 - DNA, 15 bp, Homo sapiens
tagttaacacagtaa

SEQ ID NO: 643161 - DNA, 15 bp, Homo sapiens
agttaacacagtaaa

SEQ ID NO: 643162 - DNA, 15 bp, Homo sapiens
gttaacacagtaaaa

SEQ ID NO: 643163 - DNA, 15 bp, Homo sapiens
ttaacacagtaaaat

SEQ ID NO: 643164 - DNA, 15 bp, Homo sapiens
taacacagtaaaatg

SEQ ID NO: 643165 - DNA, 15 bp, Homo sapiens
aacacagtaaaatgc

SEQ ID NO: 643166 - DNA, 15 bp, Homo sapiens
acacagtaaaatgca

SEQ ID NO: 643167 - DNA, 15 bp, Homo sapiens
cacagtaaaatgcac

SEQ ID NO: 643168 - DNA, 15 bp, Homo sapiens
acagtaaaatgcaca

SEQ ID NO: 643169 - DNA, 15 bp, Homo sapiens
cagtaaaatgcacaa

SEQ ID NO: 643170 - DNA, 15 bp, Homo sapiens
agtaaaatgcacaaa

SEQ ID NO: 643171 - DNA, 15 bp, Homo sapiens
gtaaaatgcacaaat

SEQ ID NO: 643172 - DNA, 15 bp, Homo sapiens
taaaatgcacaaatc

SEQ ID NO: 643173 - DNA, 15 bp, Homo sapiens
aaaatgcacaaatct

SEQ ID NO: 643174 - DNA, 15 bp, Homo sapiens
aaatgcacaaatctt

SEQ ID NO: 643175 - DNA, 15 bp, Homo sapiens
aatgcacaaatctta

SEQ ID NO: 643176 - DNA, 15 bp, Homo sapiens
atgcacaaatcttaa

SEQ ID NO: 643177 - DNA, 15 bp, Homo sapiens
tgcacaaatcttaag

SEQ ID NO: 643178 - DNA, 15 bp, Homo sapiens
gcacaaatcttaagt

SEQ ID NO: 643179 - DNA, 15 bp, Homo sapiens
cacaaatcttaagtg

SEQ ID NO: 643180 - DNA, 15 bp, Homo sapiens
acaaatcttaagtgt

SEQ ID NO: 643181 - DNA, 15 bp, Homo sapiens
caaatcttaagtgtt

SEQ ID NO: 643182 - DNA, 15 bp, Homo sapiens
aaatcttaagtgttc

SEQ ID NO: 643183 - DNA, 15 bp, Homo sapiens
aatcttaagtgttca

SEQ ID NO: 643184 - DNA, 15 bp, Homo sapiens
atcttaagtgttcag

SEQ ID NO: 643185 - DNA, 15 bp, Homo sapiens
tcttaagtgttcagc

SEQ ID NO: 643186 - DNA, 15 bp, Homo sapiens
cttaagtgttcagct

SEQ ID NO: 643187 - DNA, 15 bp, Homo sapiens
ttaagtgttcagctt

SEQ ID NO: 643188 - DNA, 15 bp, Homo sapiens
taagtgttcagcttg

SEQ ID NO: 643189 - DNA, 15 bp, Homo sapiens
aagtgttcagcttga

SEQ ID NO: 643190 - DNA, 15 bp, Homo sapiens
agtgttcagcttgaa

SEQ ID NO: 643191 - DNA, 15 bp, Homo sapiens
gtgttcagcttgaat

SEQ ID NO: 643192 - DNA, 15 bp, Homo sapiens
tgttcagcttgaatt

SEQ ID NO: 643193 - DNA, 15 bp, Homo sapiens
gttcagcttgaattt

SEQ ID NO: 643194 - DNA, 15 bp, Homo sapiens
ttcagcttgaattta

SEQ ID NO: 643195 - DNA, 15 bp, Homo sapiens
tcagcttgaatttaa

SEQ ID NO: 643196 - DNA, 15 bp, Homo sapiens
cagcttgaatttaac

SEQ ID NO: 643197 - DNA, 15 bp, Homo sapiens
agcttgaatttaact

SEQ ID NO: 643198 - DNA, 15 bp, Homo sapiens
gcttgaatttaacta

SEQ ID NO: 643199 - DNA, 15 bp, Homo sapiens
cttgaatttaactat

SEQ ID NO: 643200 - DNA, 15 bp, Homo sapiens
ttgaatttaactatt

SEQ ID NO: 643201 - DNA, 15 bp, Homo sapiens
tgaatttaactatta

SEQ ID NO: 643202 - DNA, 15 bp, Homo sapiens
gaatttaactattat

SEQ ID NO: 643203 - DNA, 15 bp, Homo sapiens
aatttaactattata

SEQ ID NO: 643204 - DNA, 15 bp, Homo sapiens
atttaactattatat

SEQ ID NO: 643205 - DNA, 15 bp, Homo sapiens
tttaactattatata

SEQ ID NO: 643206 - DNA, 15 bp, Homo sapiens
ttaactattatatac

SEQ ID NO: 643207 - DNA, 15 bp, Homo sapiens
taactattatataca

SEQ ID NO: 643208 - DNA, 15 bp, Homo sapiens
aactattatatacat

SEQ ID NO: 643209 - DNA, 15 bp, Homo sapiens
actattatatacata

SEQ ID NO: 643210 - DNA, 15 bp, Homo sapiens
ctattatatacatac

SEQ ID NO: 643211 - DNA, 15 bp, Homo sapiens
tattatatacataca

SEQ ID NO: 643212 - DNA, 15 bp, Homo sapiens
attatatacatacat

SEQ ID NO: 643213 - DNA, 15 bp, Homo sapiens
ttatatacatacata

SEQ ID NO: 643214 - DNA, 15 bp, Homo sapiens
tatatacatacatac

SEQ ID NO: 643215 - DNA, 15 bp, Homo sapiens
atatacatacataca

SEQ ID NO: 643216 - DNA, 15 bp, Homo sapiens
tatacatacatacac

SEQ ID NO: 643217 - DNA, 15 bp, Homo sapiens
atacatacatacacc

SEQ ID NO: 643218 - DNA, 15 bp, Homo sapiens
tacatacatacaccc

SEQ ID NO: 643219 - DNA, 15 bp, Homo sapiens
acatacatacaccca

SEQ ID NO: 643220 - DNA, 15 bp, Homo sapiens
catacatacacccac

SEQ ID NO: 643221 - DNA, 15 bp, Homo sapiens
atacatacacccacc

SEQ ID NO: 643222 - DNA, 15 bp, Homo sapiens
tacatacacccacca

SEQ ID NO: 643223 - DNA, 15 bp, Homo sapiens
acatacacccaccat

SEQ ID NO: 643224 - DNA, 15 bp, Homo sapiens
catacacccaccatt

SEQ ID NO: 643225 - DNA, 15 bp, Homo sapiens
atacacccaccattc

SEQ ID NO: 643226 - DNA, 15 bp, Homo sapiens
tacacccaccattct

SEQ ID NO: 643227 - DNA, 15 bp, Homo sapiens
acacccaccattctc

SEQ ID NO: 643228 - DNA, 15 bp, Homo sapiens
cacccaccattctca

SEQ ID NO: 643229 - DNA, 15 bp, Homo sapiens
acccaccattctcag

SEQ ID NO: 643230 - DNA, 15 bp, Homo sapiens
cccaccattctcagt

SEQ ID NO: 643231 - DNA, 15 bp, Homo sapiens
ccaccattctcagta

SEQ ID NO: 643232 - DNA, 15 bp, Homo sapiens
caccattctcagtaa

SEQ ID NO: 643233 - DNA, 15 bp, Homo sapiens
accattctcagtaag

SEQ ID NO: 643234 - DNA, 15 bp, Homo sapiens
ccattctcagtaaga

SEQ ID NO: 643235 - DNA, 15 bp, Homo sapiens
cattctcagtaagat

SEQ ID NO: 643236 - DNA, 15 bp, Homo sapiens
attctcagtaagata

SEQ ID NO: 643237 - DNA, 15 bp, Homo sapiens
ttctcagtaagatac

SEQ ID NO: 643238 - DNA, 15 bp, Homo sapiens
tctcagtaagataca

SEQ ID NO: 643239 - DNA, 15 bp, Homo sapiens
ctcagtaagatacag

SEQ ID NO: 643240 - DNA, 15 bp, Homo sapiens
tcagtaagatacaga

SEQ ID NO: 643241 - DNA, 15 bp, Homo sapiens
cagtaagatacagaa

SEQ ID NO: 643242 - DNA, 15 bp, Homo sapiens
agtaagatacagaat

SEQ ID NO: 643243 - DNA, 15 bp, Homo sapiens
gtaagatacagaatt

SEQ ID NO: 643244 - DNA, 15 bp, Homo sapiens
taagatacagaattt

SEQ ID NO: 643245 - DNA, 15 bp, Homo sapiens
aagatacagaatttt

SEQ ID NO: 643246 - DNA, 15 bp, Homo sapiens
agatacagaattttt

SEQ ID NO: 643247 - DNA, 15 bp, Homo sapiens
gatacagaatttttt

SEQ ID NO: 643248 - DNA, 15 bp, Homo sapiens
atacagaatttttta

SEQ ID NO: 643249 - DNA, 15 bp, Homo sapiens
tacagaattttttat

SEQ ID NO: 643250 - DNA, 15 bp, Homo sapiens
acagaattttttatc

SEQ ID NO: 643251 - DNA, 15 bp, Homo sapiens
cagaattttttatca

SEQ ID NO: 643252 - DNA, 15 bp, Homo sapiens
agaattttttatcac

SEQ ID NO: 643253 - DNA, 15 bp, Homo sapiens
gaattttttatcacc

SEQ ID NO: 643254 - DNA, 15 bp, Homo sapiens
aattttttatcacct

SEQ ID NO: 643255 - DNA, 15 bp, Homo sapiens
attttttatcacctc

SEQ ID NO: 643256 - DNA, 15 bp, Homo sapiens
ttttttatcacctca

SEQ ID NO: 643257 - DNA, 15 bp, Homo sapiens
tttttatcacctcag

SEQ ID NO: 643258 - DNA, 15 bp, Homo sapiens
ttttatcacctcaga

SEQ ID NO: 643259 - DNA, 15 bp, Homo sapiens
tttatcacctcagaa

SEQ ID NO: 643260 - DNA, 15 bp, Homo sapiens
ttatcacctcagaaa

SEQ ID NO: 643261 - DNA, 15 bp, Homo sapiens
tatcacctcagaaaa

SEQ ID NO: 643262 - DNA, 15 bp, Homo sapiens
atcacctcagaaaat

SEQ ID NO: 643263 - DNA, 15 bp, Homo sapiens
tcacctcagaaaatt

SEQ ID NO: 643264 - DNA, 15 bp, Homo sapiens
cacctcagaaaattt

SEQ ID NO: 643265 - DNA, 15 bp, Homo sapiens
acctcagaaaatttc

SEQ ID NO: 643266 - DNA, 15 bp, Homo sapiens
cctcagaaaatttct

SEQ ID NO: 643267 - DNA, 15 bp, Homo sapiens
ctcagaaaatttctt

SEQ ID NO: 643268 - DNA, 15 bp, Homo sapiens
tcagaaaatttcttt

SEQ ID NO: 643269 - DNA, 15 bp, Homo sapiens
cagaaaatttctttg

SEQ ID NO: 643270 - DNA, 15 bp, Homo sapiens
agaaaatttctttgt

SEQ ID NO: 643271 - DNA, 15 bp, Homo sapiens
gaaaatttctttgtg

SEQ ID NO: 643272 - DNA, 15 bp, Homo sapiens
aaaatttctttgtgc

SEQ ID NO: 643273 - DNA, 15 bp, Homo sapiens
aaatttctttgtgcc

SEQ ID NO: 643274 - DNA, 15 bp, Homo sapiens
aatttctttgtgcct

SEQ ID NO: 643275 - DNA, 15 bp, Homo sapiens
atttctttgtgcctc

SEQ ID NO: 643276 - DNA, 15 bp, Homo sapiens
tttctttgtgcctct

SEQ ID NO: 643277 - DNA, 15 bp, Homo sapiens
ttctttgtgcctctt

SEQ ID NO: 643278 - DNA, 15 bp, Homo sapiens
tctttgtgcctcttt

SEQ ID NO: 643279 - DNA, 15 bp, Homo sapiens
ctttgtgcctctttc

SEQ ID NO: 643280 - DNA, 15 bp, Homo sapiens
tttgtgcctctttca

SEQ ID NO: 643281 - DNA, 15 bp, Homo sapiens
ttgtgcctctttcaa

SEQ ID NO: 643282 - DNA, 15 bp, Homo sapiens
tgtgcctctttcaat

SEQ ID NO: 643283 - DNA, 15 bp, Homo sapiens
gtgcctctttcaatt

SEQ ID NO: 643284 - DNA, 15 bp, Homo sapiens
tgcctctttcaattc

SEQ ID NO: 643285 - DNA, 15 bp, Homo sapiens
gcctctttcaattcc

SEQ ID NO: 643286 - DNA, 15 bp, Homo sapiens
cctctttcaattccc

SEQ ID NO: 643287 - DNA, 15 bp, Homo sapiens
ctctttcaattccct

SEQ ID NO: 643288 - DNA, 15 bp, Homo sapiens
tctttcaattccctt

SEQ ID NO: 643289 - DNA, 15 bp, Homo sapiens
ctttcaattcccttt

SEQ ID NO: 643290 - DNA, 15 bp, Homo sapiens
tttcaattccctttc

SEQ ID NO: 643291 - DNA, 15 bp, Homo sapiens
ttcaattccctttcc

SEQ ID NO: 643292 - DNA, 15 bp, Homo sapiens
tcaattccctttcct

SEQ ID NO: 643293 - DNA, 15 bp, Homo sapiens
caattccctttcctg

SEQ ID NO: 643294 - DNA, 15 bp, Homo sapiens
aattccctttcctgc

SEQ ID NO: 643295 - DNA, 15 bp, Homo sapiens
attccctttcctgcc

SEQ ID NO: 643296 - DNA, 15 bp, Homo sapiens
ttccctttcctgcca

SEQ ID NO: 643297 - DNA, 15 bp, Homo sapiens
tccctttcctgccac

SEQ ID NO: 643298 - DNA, 15 bp, Homo sapiens
ccctttcctgccaca

SEQ ID NO: 643299 - DNA, 15 bp, Homo sapiens
cctttcctgccacag

SEQ ID NO: 643300 - DNA, 15 bp, Homo sapiens
ctttcctgccacaga

SEQ ID NO: 643301 - DNA, 15 bp, Homo sapiens
tttcctgccacagac

SEQ ID NO: 643302 - DNA, 15 bp, Homo sapiens
ttcctgccacagaca

SEQ ID NO: 643303 - DNA, 15 bp, Homo sapiens
tcctgccacagacaa

SEQ ID NO: 643304 - DNA, 15 bp, Homo sapiens
cctgccacagacaaa

SEQ ID NO: 643305 - DNA, 15 bp, Homo sapiens
ctgccacagacaaat

SEQ ID NO: 643306 - DNA, 15 bp, Homo sapiens
tgccacagacaaata

SEQ ID NO: 643307 - DNA, 15 bp, Homo sapiens
gccacagacaaatat

SEQ ID NO: 643308 - DNA, 15 bp, Homo sapiens
ccacagacaaatata

SEQ ID NO: 643309 - DNA, 15 bp, Homo sapiens
cacagacaaatatat

SEQ ID NO: 643310 - DNA, 15 bp, Homo sapiens
acagacaaatatatt

SEQ ID NO: 643311 - DNA, 15 bp, Homo sapiens
cagacaaatatattt

SEQ ID NO: 643312 - DNA, 15 bp, Homo sapiens
agacaaatatatttt

SEQ ID NO: 643313 - DNA, 15 bp, Homo sapiens
gacaaatatattttt

SEQ ID NO: 643314 - DNA, 15 bp, Homo sapiens
acaaatatattttta

SEQ ID NO: 643315 - DNA, 15 bp, Homo sapiens
caaatatatttttat

SEQ ID NO: 643316 - DNA, 15 bp, Homo sapiens
aaatatatttttatt

SEQ ID NO: 643317 - DNA, 15 bp, Homo sapiens
aatatatttttattt

SEQ ID NO: 643318 - DNA, 15 bp, Homo sapiens
atatatttttatttg

SEQ ID NO: 643319 - DNA, 15 bp, Homo sapiens
tatatttttatttgc

SEQ ID NO: 643320 - DNA, 15 bp, Homo sapiens
atatttttatttgcc

SEQ ID NO: 643321 - DNA, 15 bp, Homo sapiens
tatttttatttgcct

SEQ ID NO: 643322 - DNA, 15 bp, Homo sapiens
atttttatttgcctt

SEQ ID NO: 643323 - DNA, 15 bp, Homo sapiens
tttttatttgcctta

SEQ ID NO: 643324 - DNA, 15 bp, Homo sapiens
ttttatttgccttat

SEQ ID NO: 643325 - DNA, 15 bp, Homo sapiens
tttatttgccttatc

SEQ ID NO: 643326 - DNA, 15 bp, Homo sapiens
ttatttgccttatca

SEQ ID NO: 643327 - DNA, 15 bp, Homo sapiens
tatttgccttatcaa

SEQ ID NO: 643328 - DNA, 15 bp, Homo sapiens
atttgccttatcaaa

SEQ ID NO: 643329 - DNA, 15 bp, Homo sapiens
tttgccttatcaaaa

SEQ ID NO: 643330 - DNA, 15 bp, Homo sapiens
ttgccttatcaaaaa

SEQ ID NO: 643331 - DNA, 15 bp, Homo sapiens
tgccttatcaaaaat

SEQ ID NO: 643332 - DNA, 15 bp, Homo sapiens
gccttatcaaaaatt

SEQ ID NO: 643333 - DNA, 15 bp, Homo sapiens
ccttatcaaaaatta

SEQ ID NO: 643334 - DNA, 15 bp, Homo sapiens
cttatcaaaaattag

SEQ ID NO: 643335 - DNA, 15 bp, Homo sapiens
ttatcaaaaattaga

SEQ ID NO: 643336 - DNA, 15 bp, Homo sapiens
tatcaaaaattagat

SEQ ID NO: 643337 - DNA, 15 bp, Homo sapiens
atcaaaaattagatg

SEQ ID NO: 643338 - DNA, 15 bp, Homo sapiens
tcaaaaattagatga

SEQ ID NO: 643339 - DNA, 15 bp, Homo sapiens
caaaaattagatgat

SEQ ID NO: 643340 - DNA, 15 bp, Homo sapiens
aaaaattagatgatt

SEQ ID NO: 643341 - DNA, 15 bp, Homo sapiens
aaaattagatgattt

SEQ ID NO: 643342 - DNA, 15 bp, Homo sapiens
aaattagatgatttt

SEQ ID NO: 643343 - DNA, 15 bp, Homo sapiens
aattagatgattttt

SEQ ID NO: 643344 - DNA, 15 bp, Homo sapiens
attagatgatttttg

SEQ ID NO: 643345 - DNA, 15 bp, Homo sapiens
ttagatgatttttgt

SEQ ID NO: 643346 - DNA, 15 bp, Homo sapiens
tagatgatttttgtt

SEQ ID NO: 643347 - DNA, 15 bp, Homo sapiens
agatgatttttgtta

SEQ ID NO: 643348 - DNA, 15 bp, Homo sapiens
gatgatttttgttat

SEQ ID NO: 643349 - DNA, 15 bp, Homo sapiens
atgatttttgttatt

SEQ ID NO: 643350 - DNA, 15 bp, Homo sapiens
tgatttttgttattg

SEQ ID NO: 643351 - DNA, 15 bp, Homo sapiens
gatttttgttattgg

SEQ ID NO: 643352 - DNA, 15 bp, Homo sapiens
atttttgttattggg

SEQ ID NO: 643353 - DNA, 15 bp, Homo sapiens
tttttgttattgggt

SEQ ID NO: 643354 - DNA, 15 bp, Homo sapiens
ttttgttattgggtt

SEQ ID NO: 643355 - DNA, 15 bp, Homo sapiens
tttgttattgggttt

SEQ ID NO: 643356 - DNA, 15 bp, Homo sapiens
ttgttattgggtttc

SEQ ID NO: 643357 - DNA, 15 bp, Homo sapiens
tgttattgggtttca

SEQ ID NO: 643358 - DNA, 15 bp, Homo sapiens
gttattgggtttcat

SEQ ID NO: 643359 - DNA, 15 bp, Homo sapiens
ttattgggtttcata

SEQ ID NO: 643360 - DNA, 15 bp, Homo sapiens
tattgggtttcatat

SEQ ID NO: 643361 - DNA, 15 bp, Homo sapiens
attgggtttcatatc

SEQ ID NO: 643362 - DNA, 15 bp, Homo sapiens
ttgggtttcatatca

SEQ ID NO: 643363 - DNA, 15 bp, Homo sapiens
tgggtttcatatcaa

SEQ ID NO: 643364 - DNA, 15 bp, Homo sapiens
gggtttcatatcaat

SEQ ID NO: 643365 - DNA, 15 bp, Homo sapiens
ggtttcatatcaatg

SEQ ID NO: 643366 - DNA, 15 bp, Homo sapiens
gtttcatatcaatga

SEQ ID NO: 643367 - DNA, 15 bp, Homo sapiens
tttcatatcaatgaa

SEQ ID NO: 643368 - DNA, 15 bp, Homo sapiens
ttcatatcaatgaaa

SEQ ID NO: 643369 - DNA, 15 bp, Homo sapiens
tcatatcaatgaaac

SEQ ID NO: 643370 - DNA, 15 bp, Homo sapiens
catatcaatgaaacc

SEQ ID NO: 643371 - DNA, 15 bp, Homo sapiens
atatcaatgaaacca

SEQ ID NO: 643372 - DNA, 15 bp, Homo sapiens
tatcaatgaaaccac

SEQ ID NO: 643373 - DNA, 15 bp, Homo sapiens
atcaatgaaaccaca

SEQ ID NO: 643374 - DNA, 15 bp, Homo sapiens
tcaatgaaaccacag

SEQ ID NO: 643375 - DNA, 15 bp, Homo sapiens
caatgaaaccacaga

SEQ ID NO: 643376 - DNA, 15 bp, Homo sapiens
aatgaaaccacagag

SEQ ID NO: 643377 - DNA, 15 bp, Homo sapiens
atgaaaccacagagt

SEQ ID NO: 643378 - DNA, 15 bp, Homo sapiens
tgaaaccacagagta

SEQ ID NO: 643379 - DNA, 15 bp, Homo sapiens
gaaaccacagagtat

SEQ ID NO: 643380 - DNA, 15 bp, Homo sapiens
aaaccacagagtata

SEQ ID NO: 643381 - DNA, 15 bp, Homo sapiens
aaccacagagtatag

SEQ ID NO: 643382 - DNA, 15 bp, Homo sapiens
accacagagtataga

SEQ ID NO: 643383 - DNA, 15 bp, Homo sapiens
ccacagagtatagac

SEQ ID NO: 643384 - DNA, 15 bp, Homo sapiens
cacagagtatagact

SEQ ID NO: 643385 - DNA, 15 bp, Homo sapiens
acagagtatagactc

SEQ ID NO: 643386 - DNA, 15 bp, Homo sapiens
cagagtatagactct

SEQ ID NO: 643387 - DNA, 15 bp, Homo sapiens
agagtatagactctt

SEQ ID NO: 643388 - DNA, 15 bp, Homo sapiens
gagtatagactcttg

SEQ ID NO: 643389 - DNA, 15 bp, Homo sapiens
agtatagactcttgt

SEQ ID NO: 643390 - DNA, 15 bp, Homo sapiens
gtatagactcttgtg

SEQ ID NO: 643391 - DNA, 15 bp, Homo sapiens
tatagactcttgtgt

SEQ ID NO: 643392 - DNA, 15 bp, Homo sapiens
atagactcttgtgtc

SEQ ID NO: 643393 - DNA, 15 bp, Homo sapiens
tagactcttgtgtct

SEQ ID NO: 643394 - DNA, 15 bp, Homo sapiens
agactcttgtgtctg

SEQ ID NO: 643395 - DNA, 15 bp, Homo sapiens
gactcttgtgtctgg

SEQ ID NO: 643396 - DNA, 15 bp, Homo sapiens
actcttgtgtctggc

SEQ ID NO: 643397 - DNA, 15 bp, Homo sapiens
ctcttgtgtctggct

SEQ ID NO: 643398 - DNA, 15 bp, Homo sapiens
tcttgtgtctggctt

SEQ ID NO: 643399 - DNA, 15 bp, Homo sapiens
cttgtgtctggcttc

SEQ ID NO: 643400 - DNA, 15 bp, Homo sapiens
ttgtgtctggcttct

SEQ ID NO: 643401 - DNA, 15 bp, Homo sapiens
tgtgtctggcttctt

SEQ ID NO: 643402 - DNA, 15 bp, Homo sapiens
gtgtctggcttcttt

SEQ ID NO: 643403 - DNA, 15 bp, Homo sapiens
tgtctggcttctttt

SEQ ID NO: 643404 - DNA, 15 bp, Homo sapiens
gtctggcttcttttg

SEQ ID NO: 643405 - DNA, 15 bp, Homo sapiens
tctggcttcttttga

SEQ ID NO: 643406 - DNA, 15 bp, Homo sapiens
ctggcttcttttgat

SEQ ID NO: 643407 - DNA, 15 bp, Homo sapiens
tggcttcttttgatg

SEQ ID NO: 643408 - DNA, 15 bp, Homo sapiens
ggcttcttttgatga

SEQ ID NO: 643409 - DNA, 15 bp, Homo sapiens
gcttcttttgatgag

SEQ ID NO: 643410 - DNA, 15 bp, Homo sapiens
cttcttttgatgagc

SEQ ID NO: 643411 - DNA, 15 bp, Homo sapiens
ttcttttgatgagca

SEQ ID NO: 643412 - DNA, 15 bp, Homo sapiens
tcttttgatgagcat

SEQ ID NO: 643413 - DNA, 15 bp, Homo sapiens
cttttgatgagcatg

SEQ ID NO: 643414 - DNA, 15 bp, Homo sapiens
ttttgatgagcatgt

SEQ ID NO: 643415 - DNA, 15 bp, Homo sapiens
tttgatgagcatgtc

SEQ ID NO: 643416 - DNA, 15 bp, Homo sapiens
ttgatgagcatgtct

SEQ ID NO: 643417 - DNA, 15 bp, Homo sapiens
tgatgagcatgtctt

SEQ ID NO: 643418 - DNA, 15 bp, Homo sapiens
gatgagcatgtcttt

SEQ ID NO: 643419 - DNA, 15 bp, Homo sapiens
atgagcatgtctttg

SEQ ID NO: 643420 - DNA, 15 bp, Homo sapiens
tgagcatgtctttga

SEQ ID NO: 643421 - DNA, 15 bp, Homo sapiens
gagcatgtctttgag

SEQ ID NO: 643422 - DNA, 15 bp, Homo sapiens
agcatgtctttgaga

SEQ ID NO: 643423 - DNA, 15 bp, Homo sapiens
gcatgtctttgagat

SEQ ID NO: 643424 - DNA, 15 bp, Homo sapiens
catgtctttgagatt

SEQ ID NO: 643425 - DNA, 15 bp, Homo sapiens
atgtctttgagattc

SEQ ID NO: 643426 - DNA, 15 bp, Homo sapiens
tgtctttgagattct

SEQ ID NO: 643427 - DNA, 15 bp, Homo sapiens
gtctttgagattcta

SEQ ID NO: 643428 - DNA, 15 bp, Homo sapiens
tctttgagattctat

SEQ ID NO: 643429 - DNA, 15 bp, Homo sapiens
ctttgagattctatt

SEQ ID NO: 643430 - DNA, 15 bp, Homo sapiens
tttgagattctatta

SEQ ID NO: 643431 - DNA, 15 bp, Homo sapiens
ttgagattctattaa

SEQ ID NO: 643432 - DNA, 15 bp, Homo sapiens
tgagattctattaat

SEQ ID NO: 643433 - DNA, 15 bp, Homo sapiens
gagattctattaatt

SEQ ID NO: 643434 - DNA, 15 bp, Homo sapiens
agattctattaattt

SEQ ID NO: 643435 - DNA, 15 bp, Homo sapiens
gattctattaattta

SEQ ID NO: 643436 - DNA, 15 bp, Homo sapiens
attctattaatttaa

SEQ ID NO: 643437 - DNA, 15 bp, Homo sapiens
ttctattaatttaat

SEQ ID NO: 643438 - DNA, 15 bp, Homo sapiens
tctattaatttaatt

SEQ ID NO: 643439 - DNA, 15 bp, Homo sapiens
ctattaatttaattt

SEQ ID NO: 643440 - DNA, 15 bp, Homo sapiens
tattaatttaatttt

SEQ ID NO: 643441 - DNA, 15 bp, Homo sapiens
attaatttaattttt

SEQ ID NO: 643442 - DNA, 15 bp, Homo sapiens
ttaatttaatttttt

SEQ ID NO: 643443 - DNA, 15 bp, Homo sapiens
taatttaatttttta

SEQ ID NO: 643444 - DNA, 15 bp, Homo sapiens
aatttaattttttag

SEQ ID NO: 643445 - DNA, 15 bp, Homo sapiens
atttaattttttagc

SEQ ID NO: 643446 - DNA, 15 bp, Homo sapiens
tttaattttttagca

SEQ ID NO: 643447 - DNA, 15 bp, Homo sapiens
ttaattttttagcag

SEQ ID NO: 643448 - DNA, 15 bp, Homo sapiens
taattttttagcagc

SEQ ID NO: 643449 - DNA, 15 bp, Homo sapiens
aattttttagcagcc

SEQ ID NO: 643450 - DNA, 15 bp, Homo sapiens
attttttagcagcca

SEQ ID NO: 643451 - DNA, 15 bp, Homo sapiens
ttttttagcagccaa

SEQ ID NO: 643452 - DNA, 15 bp, Homo sapiens
tttttagcagccaat

SEQ ID NO: 643453 - DNA, 15 bp, Homo sapiens
ttttagcagccaatt

SEQ ID NO: 643454 - DNA, 15 bp, Homo sapiens
tttagcagccaattg

SEQ ID NO: 643455 - DNA, 15 bp, Homo sapiens
ttagcagccaattgt

SEQ ID NO: 643456 - DNA, 15 bp, Homo sapiens
tagcagccaattgtg

SEQ ID NO: 643457 - DNA, 15 bp, Homo sapiens
agcagccaattgtgg

SEQ ID NO: 643458 - DNA, 15 bp, Homo sapiens
gcagccaattgtggt

SEQ ID NO: 643459 - DNA, 15 bp, Homo sapiens
cagccaattgtggtt

SEQ ID NO: 643460 - DNA, 15 bp, Homo sapiens
agccaattgtggtta

SEQ ID NO: 643461 - DNA, 15 bp, Homo sapiens
gccaattgtggttaa

SEQ ID NO: 643462 - DNA, 15 bp, Homo sapiens
ccaattgtggttaag

SEQ ID NO: 643463 - DNA, 15 bp, Homo sapiens
caattgtggttaaga

SEQ ID NO: 643464 - DNA, 15 bp, Homo sapiens
aattgtggttaagag

SEQ ID NO: 643465 - DNA, 15 bp, Homo sapiens
attgtggttaagagt

SEQ ID NO: 643466 - DNA, 15 bp, Homo sapiens
ttgtggttaagagtc

SEQ ID NO: 643467 - DNA, 15 bp, Homo sapiens
tgtggttaagagtca

SEQ ID NO: 643468 - DNA, 15 bp, Homo sapiens
gtggttaagagtcaa

SEQ ID NO: 643469 - DNA, 15 bp, Homo sapiens
tggttaagagtcaac

SEQ ID NO: 643470 - DNA, 15 bp, Homo sapiens
ggttaagagtcaaca

SEQ ID NO: 643471 - DNA, 15 bp, Homo sapiens
gttaagagtcaacac

SEQ ID NO: 643472 - DNA, 15 bp, Homo sapiens
ttaagagtcaacaca

SEQ ID NO: 643473 - DNA, 15 bp, Homo sapiens
taagagtcaacacat

SEQ ID NO: 643474 - DNA, 15 bp, Homo sapiens
aagagtcaacacatc

SEQ ID NO: 643475 - DNA, 15 bp, Homo sapiens
agagtcaacacatct

SEQ ID NO: 643476 - DNA, 15 bp, Homo sapiens
gagtcaacacatctt

SEQ ID NO: 643477 - DNA, 15 bp, Homo sapiens
agtcaacacatcttt

SEQ ID NO: 643478 - DNA, 15 bp, Homo sapiens
gtcaacacatcttta

SEQ ID NO: 643479 - DNA, 15 bp, Homo sapiens
tcaacacatctttaa

SEQ ID NO: 643480 - DNA, 15 bp, Homo sapiens
caacacatctttaat

SEQ ID NO: 643481 - DNA, 15 bp, Homo sapiens
aacacatctttaatt

SEQ ID NO: 643482 - DNA, 15 bp, Homo sapiens
acacatctttaatta

SEQ ID NO: 643483 - DNA, 15 bp, Homo sapiens
cacatctttaattac

SEQ ID NO: 643484 - DNA, 15 bp, Homo sapiens
acatctttaattaca

SEQ ID NO: 643485 - DNA, 15 bp, Homo sapiens
catctttaattacag

SEQ ID NO: 643486 - DNA, 15 bp, Homo sapiens
atctttaattacagg

SEQ ID NO: 643487 - DNA, 15 bp, Homo sapiens
tctttaattacaggc

SEQ ID NO: 643488 - DNA, 15 bp, Homo sapiens
ctttaattacaggca

SEQ ID NO: 643489 - DNA, 15 bp, Homo sapiens
tttaattacaggcag

SEQ ID NO: 643490 - DNA, 15 bp, Homo sapiens
ttaattacaggcagc

SEQ ID NO: 643491 - DNA, 15 bp, Homo sapiens
taattacaggcagca

SEQ ID NO: 643492 - DNA, 15 bp, Homo sapiens
aattacaggcagcaa

SEQ ID NO: 643493 - DNA, 15 bp, Homo sapiens
attacaggcagcaat

SEQ ID NO: 643494 - DNA, 15 bp, Homo sapiens
ttacaggcagcaatg

SEQ ID NO: 643495 - DNA, 15 bp, Homo sapiens
tacaggcagcaatga

SEQ ID NO: 643496 - DNA, 15 bp, Homo sapiens
acaggcagcaatgac

SEQ ID NO: 643497 - DNA, 15 bp, Homo sapiens
caggcagcaatgact

SEQ ID NO: 643498 - DNA, 15 bp, Homo sapiens
aggcagcaatgactg

SEQ ID NO: 643499 - DNA, 15 bp, Homo sapiens
ggcagcaatgactgg

SEQ ID NO: 643500 - DNA, 15 bp, Homo sapiens
gcagcaatgactggt

SEQ ID NO: 643501 - DNA, 15 bp, Homo sapiens
cagcaatgactggtt

SEQ ID NO: 643502 - DNA, 15 bp, Homo sapiens
agcaatgactggttt

SEQ ID NO: 643503 - DNA, 15 bp, Homo sapiens
gcaatgactggtttc

SEQ ID NO: 643504 - DNA, 15 bp, Homo sapiens
caatgactggtttct

SEQ ID NO: 643505 - DNA, 15 bp, Homo sapiens
aatgactggtttctc

SEQ ID NO: 643506 - DNA, 15 bp, Homo sapiens
atgactggtttctca

SEQ ID NO: 643507 - DNA, 15 bp, Homo sapiens
tgactggtttctcag

SEQ ID NO: 643508 - DNA, 15 bp, Homo sapiens
gactggtttctcaga

SEQ ID NO: 643509 - DNA, 15 bp, Homo sapiens
actggtttctcagag

SEQ ID NO: 643510 - DNA, 15 bp, Homo sapiens
ctggtttctcagagc

SEQ ID NO: 643511 - DNA, 15 bp, Homo sapiens
tggtttctcagagca

SEQ ID NO: 643512 - DNA, 15 bp, Homo sapiens
ggtttctcagagcag

SEQ ID NO: 643513 - DNA, 15 bp, Homo sapiens
gtttctcagagcagt

SEQ ID NO: 643514 - DNA, 15 bp, Homo sapiens
tttctcagagcagtc

SEQ ID NO: 643515 - DNA, 15 bp, Homo sapiens
ttctcagagcagtct

SEQ ID NO: 643516 - DNA, 15 bp, Homo sapiens
tctcagagcagtctg

SEQ ID NO: 643517 - DNA, 15 bp, Homo sapiens
ctcagagcagtctgc

SEQ ID NO: 643518 - DNA, 15 bp, Homo sapiens
tcagagcagtctgct

SEQ ID NO: 643519 - DNA, 15 bp, Homo sapiens
cagagcagtctgctc

SEQ ID NO: 643520 - DNA, 15 bp, Homo sapiens
agagcagtctgctca

SEQ ID NO: 643521 - DNA, 15 bp, Homo sapiens
gagcagtctgctcag

SEQ ID NO: 643522 - DNA, 15 bp, Homo sapiens
agcagtctgctcagg

SEQ ID NO: 643523 - DNA, 15 bp, Homo sapiens
gcagtctgctcagga

SEQ ID NO: 643524 - DNA, 15 bp, Homo sapiens
cagtctgctcaggat

SEQ ID NO: 643525 - DNA, 15 bp, Homo sapiens
agtctgctcaggata

SEQ ID NO: 643526 - DNA, 15 bp, Homo sapiens
gtctgctcaggatat

SEQ ID NO: 643527 - DNA, 15 bp, Homo sapiens
tctgctcaggatata

SEQ ID NO: 643528 - DNA, 15 bp, Homo sapiens
ctgctcaggatatag

SEQ ID NO: 643529 - DNA, 15 bp, Homo sapiens
tgctcaggatatagg

SEQ ID NO: 643530 - DNA, 15 bp, Homo sapiens
gctcaggatataggt

SEQ ID NO: 643531 - DNA, 15 bp, Homo sapiens
ctcaggatataggtg

SEQ ID NO: 643532 - DNA, 15 bp, Homo sapiens
tcaggatataggtga

SEQ ID NO: 643533 - DNA, 15 bp, Homo sapiens
caggatataggtgat

SEQ ID NO: 643534 - DNA, 15 bp, Homo sapiens
aggatataggtgatt

SEQ ID NO: 643535 - DNA, 15 bp, Homo sapiens
ggatataggtgattt

SEQ ID NO: 643536 - DNA, 15 bp, Homo sapiens
gatataggtgatttt

SEQ ID NO: 643537 - DNA, 15 bp, Homo sapiens
atataggtgattttt

SEQ ID NO: 643538 - DNA, 15 bp, Homo sapiens
tataggtgattttta

SEQ ID NO: 643539 - DNA, 15 bp, Homo sapiens
ataggtgatttttac

SEQ ID NO: 643540 - DNA, 15 bp, Homo sapiens
taggtgatttttacc

SEQ ID NO: 643541 - DNA, 15 bp, Homo sapiens
aggtgatttttaccc

SEQ ID NO: 643542 - DNA, 15 bp, Homo sapiens
ggtgatttttaccca

SEQ ID NO: 643543 - DNA, 15 bp, Homo sapiens
gtgatttttacccat

SEQ ID NO: 643544 - DNA, 15 bp, Homo sapiens
tgatttttacccatt

SEQ ID NO: 643545 - DNA, 15 bp, Homo sapiens
gatttttacccattt

SEQ ID NO: 643546 - DNA, 15 bp, Homo sapiens
atttttacccattta

SEQ ID NO: 643547 - DNA, 15 bp, Homo sapiens
tttttacccatttag

SEQ ID NO: 643548 - DNA, 15 bp, Homo sapiens
ttttacccatttagg

SEQ ID NO: 643549 - DNA, 15 bp, Homo sapiens
tttacccatttaggc

SEQ ID NO: 643550 - DNA, 15 bp, Homo sapiens
ttacccatttaggca

SEQ ID NO: 643551 - DNA, 15 bp, Homo sapiens
tacccatttaggcat

SEQ ID NO: 643552 - DNA, 15 bp, Homo sapiens
acccatttaggcata

SEQ ID NO: 643553 - DNA, 15 bp, Homo sapiens
cccatttaggcataa

SEQ ID NO: 643554 - DNA, 15 bp, Homo sapiens
ccatttaggcataag

SEQ ID NO: 643555 - DNA, 15 bp, Homo sapiens
catttaggcataaga

SEQ ID NO: 643556 - DNA, 15 bp, Homo sapiens
atttaggcataagat

SEQ ID NO: 643557 - DNA, 15 bp, Homo sapiens
tttaggcataagatc

SEQ ID NO: 643558 - DNA, 15 bp, Homo sapiens
ttaggcataagatct

SEQ ID NO: 643559 - DNA, 15 bp, Homo sapiens
taggcataagatctg

SEQ ID NO: 643560 - DNA, 15 bp, Homo sapiens
aggcataagatctgc

SEQ ID NO: 643561 - DNA, 15 bp, Homo sapiens
ggcataagatctgct

SEQ ID NO: 643562 - DNA, 15 bp, Homo sapiens
gcataagatctgcta

SEQ ID NO: 643563 - DNA, 15 bp, Homo sapiens
cataagatctgctac

SEQ ID NO: 643564 - DNA, 15 bp, Homo sapiens
ataagatctgctaca

SEQ ID NO: 643565 - DNA, 15 bp, Homo sapiens
taagatctgctacaa

SEQ ID NO: 643566 - DNA, 15 bp, Homo sapiens
aagatctgctacaat

SEQ ID NO: 643567 - DNA, 15 bp, Homo sapiens
agatctgctacaata

SEQ ID NO: 643568 - DNA, 15 bp, Homo sapiens
gatctgctacaataa

SEQ ID NO: 643569 - DNA, 15 bp, Homo sapiens
atctgctacaataaa

SEQ ID NO: 643570 - DNA, 15 bp, Homo sapiens
tctgctacaataaag

SEQ ID NO: 643571 - DNA, 15 bp, Homo sapiens
ctgctacaataaagg

SEQ ID NO: 643572 - DNA, 15 bp, Homo sapiens
tgctacaataaagga

SEQ ID NO: 643573 - DNA, 15 bp, Homo sapiens
gctacaataaaggaa

SEQ ID NO: 643574 - DNA, 15 bp, Homo sapiens
ctacaataaaggaaa

SEQ ID NO: 643575 - DNA, 15 bp, Homo sapiens
tacaataaaggaaag

SEQ ID NO: 643576 - DNA, 15 bp, Homo sapiens
acaataaaggaaagg

SEQ ID NO: 643577 - DNA, 15 bp, Homo sapiens
caataaaggaaaggg

SEQ ID NO: 643578 - DNA, 15 bp, Homo sapiens
aataaaggaaaggga

SEQ ID NO: 643579 - DNA, 15 bp, Homo sapiens
ataaaggaaagggag

SEQ ID NO: 643580 - DNA, 15 bp, Homo sapiens
taaaggaaagggaga

SEQ ID NO: 643581 - DNA, 15 bp, Homo sapiens
aaaggaaagggagaa

SEQ ID NO: 643582 - DNA, 15 bp, Homo sapiens
aaggaaagggagaac

SEQ ID NO: 643583 - DNA, 15 bp, Homo sapiens
aggaaagggagaacc

SEQ ID NO: 643584 - DNA, 15 bp, Homo sapiens
ggaaagggagaacca

SEQ ID NO: 643585 - DNA, 15 bp, Homo sapiens
gaaagggagaaccaa

SEQ ID NO: 643586 - DNA, 15 bp, Homo sapiens
aaagggagaaccaaa

SEQ ID NO: 643587 - DNA, 15 bp, Homo sapiens
aagggagaaccaaag

SEQ ID NO: 643588 - DNA, 15 bp, Homo sapiens
agggagaaccaaagc

SEQ ID NO: 643589 - DNA, 15 bp, Homo sapiens
gggagaaccaaagcc

SEQ ID NO: 643590 - DNA, 15 bp, Homo sapiens
ggagaaccaaagccc

SEQ ID NO: 643591 - DNA, 15 bp, Homo sapiens
gagaaccaaagccca

SEQ ID NO: 643592 - DNA, 15 bp, Homo sapiens
agaaccaaagcccac

SEQ ID NO: 643593 - DNA, 15 bp, Homo sapiens
gaaccaaagcccacg

SEQ ID NO: 643594 - DNA, 15 bp, Homo sapiens
aaccaaagcccacgt

SEQ ID NO: 643595 - DNA, 15 bp, Homo sapiens
accaaagcccacgtc

SEQ ID NO: 643596 - DNA, 15 bp, Homo sapiens
ccaaagcccacgtct

SEQ ID NO: 643597 - DNA, 15 bp, Homo sapiens
caaagcccacgtctc

SEQ ID NO: 643598 - DNA, 15 bp, Homo sapiens
aaagcccacgtctct

SEQ ID NO: 643599 - DNA, 15 bp, Homo sapiens
aagcccacgtctctg

SEQ ID NO: 643600 - DNA, 15 bp, Homo sapiens
agcccacgtctctgg

SEQ ID NO: 643601 - DNA, 15 bp, Homo sapiens
gcccacgtctctggg

SEQ ID NO: 643602 - DNA, 15 bp, Homo sapiens
cccacgtctctgggt

SEQ ID NO: 643603 - DNA, 15 bp, Homo sapiens
ccacgtctctgggtg

SEQ ID NO: 643604 - DNA, 15 bp, Homo sapiens
cacgtctctgggtgt

SEQ ID NO: 643605 - DNA, 15 bp, Homo sapiens
acgtctctgggtgtg

SEQ ID NO: 643606 - DNA, 15 bp, Homo sapiens
cgtctctgggtgtgt

SEQ ID NO: 643607 - DNA, 15 bp, Homo sapiens
gtctctgggtgtgtg

SEQ ID NO: 643608 - DNA, 15 bp, Homo sapiens
tctctgggtgtgtgc

SEQ ID NO: 643609 - DNA, 15 bp, Homo sapiens
ctctgggtgtgtgcc

SEQ ID NO: 643610 - DNA, 15 bp, Homo sapiens
tctgggtgtgtgcct

SEQ ID NO: 643611 - DNA, 15 bp, Homo sapiens
ctgggtgtgtgcctg

SEQ ID NO: 643612 - DNA, 15 bp, Homo sapiens
tgggtgtgtgcctgt

SEQ ID NO: 643613 - DNA, 15 bp, Homo sapiens
gggtgtgtgcctgta

SEQ ID NO: 643614 - DNA, 15 bp, Homo sapiens
ggtgtgtgcctgtag

SEQ ID NO: 643615 - DNA, 15 bp, Homo sapiens
gtgtgtgcctgtaga

SEQ ID NO: 643616 - DNA, 15 bp, Homo sapiens
tgtgtgcctgtagaa

SEQ ID NO: 643617 - DNA, 15 bp, Homo sapiens
gtgtgcctgtagaaa

SEQ ID NO: 643618 - DNA, 15 bp, Homo sapiens
tgtgcctgtagaaaa

SEQ ID NO: 643619 - DNA, 15 bp, Homo sapiens
gtgcctgtagaaaaa

SEQ ID NO: 643620 - DNA, 15 bp, Homo sapiens
tgcctgtagaaaaat

SEQ ID NO: 643621 - DNA, 15 bp, Homo sapiens
gcctgtagaaaaata

SEQ ID NO: 643622 - DNA, 15 bp, Homo sapiens
cctgtagaaaaatat

SEQ ID NO: 643623 - DNA, 15 bp, Homo sapiens
ctgtagaaaaatatt

SEQ ID NO: 643624 - DNA, 15 bp, Homo sapiens
tgtagaaaaatattc

SEQ ID NO: 643625 - DNA, 15 bp, Homo sapiens
gtagaaaaatattct

SEQ ID NO: 643626 - DNA, 15 bp, Homo sapiens
tagaaaaatattctg

SEQ ID NO: 643627 - DNA, 15 bp, Homo sapiens
agaaaaatattctgc

SEQ ID NO: 643628 - DNA, 15 bp, Homo sapiens
gaaaaatattctgca

SEQ ID NO: 643629 - DNA, 15 bp, Homo sapiens
aaaaatattctgcaa

SEQ ID NO: 643630 - DNA, 15 bp, Homo sapiens
aaaatattctgcaaa

SEQ ID NO: 643631 - DNA, 15 bp, Homo sapiens
aaatattctgcaaat

SEQ ID NO: 643632 - DNA, 15 bp, Homo sapiens
aatattctgcaaatg

SEQ ID NO: 643633 - DNA, 15 bp, Homo sapiens
atattctgcaaatgg

SEQ ID NO: 643634 - DNA, 15 bp, Homo sapiens
tattctgcaaatggg

SEQ ID NO: 643635 - DNA, 15 bp, Homo sapiens
attctgcaaatggga

SEQ ID NO: 643636 - DNA, 15 bp, Homo sapiens
ttctgcaaatgggaa

SEQ ID NO: 643637 - DNA, 15 bp, Homo sapiens
tctgcaaatgggaat

SEQ ID NO: 643638 - DNA, 15 bp, Homo sapiens
ctgcaaatgggaata

SEQ ID NO: 643639 - DNA, 15 bp, Homo sapiens
tgcaaatgggaatat

SEQ ID NO: 643640 - DNA, 15 bp, Homo sapiens
gcaaatgggaatatc

SEQ ID NO: 643641 - DNA, 15 bp, Homo sapiens
caaatgggaatatca

SEQ ID NO: 643642 - DNA, 15 bp, Homo sapiens
aaatgggaatatcat

SEQ ID NO: 643643 - DNA, 15 bp, Homo sapiens
aatgggaatatcata

SEQ ID NO: 643644 - DNA, 15 bp, Homo sapiens
atgggaatatcataa

SEQ ID NO: 643645 - DNA, 15 bp, Homo sapiens
tgggaatatcataaa

SEQ ID NO: 643646 - DNA, 15 bp, Homo sapiens
gggaatatcataaaa

SEQ ID NO: 643647 - DNA, 15 bp, Homo sapiens
ggaatatcataaaat

SEQ ID NO: 643648 - DNA, 15 bp, Homo sapiens
gaatatcataaaatg

SEQ ID NO: 643649 - DNA, 15 bp, Homo sapiens
aatatcataaaatga

SEQ ID NO: 643650 - DNA, 15 bp, Homo sapiens
atatcataaaatgaa

SEQ ID NO: 643651 - DNA, 15 bp, Homo sapiens
tatcataaaatgaaa

SEQ ID NO: 643652 - DNA, 15 bp, Homo sapiens
atcataaaatgaaag

SEQ ID NO: 643653 - DNA, 15 bp, Homo sapiens
tcataaaatgaaagg

SEQ ID NO: 643654 - DNA, 15 bp, Homo sapiens
cataaaatgaaagga

SEQ ID NO: 643655 - DNA, 15 bp, Homo sapiens
ataaaatgaaaggat

SEQ ID NO: 643656 - DNA, 15 bp, Homo sapiens
taaaatgaaaggatt

SEQ ID NO: 643657 - DNA, 15 bp, Homo sapiens
aaaatgaaaggattc

SEQ ID NO: 643658 - DNA, 15 bp, Homo sapiens
aaatgaaaggattca

SEQ ID NO: 643659 - DNA, 15 bp, Homo sapiens
aatgaaaggattcaa

SEQ ID NO: 643660 - DNA, 15 bp, Homo sapiens
atgaaaggattcaat

SEQ ID NO: 643661 - DNA, 15 bp, Homo sapiens
tgaaaggattcaatc

SEQ ID NO: 643662 - DNA, 15 bp, Homo sapiens
gaaaggattcaatct

SEQ ID NO: 643663 - DNA, 15 bp, Homo sapiens
aaaggattcaatcta

SEQ ID NO: 643664 - DNA, 15 bp, Homo sapiens
aaggattcaatctag

SEQ ID NO: 643665 - DNA, 15 bp, Homo sapiens
aggattcaatctaga

SEQ ID NO: 643666 - DNA, 15 bp, Homo sapiens
ggattcaatctagaa

SEQ ID NO: 643667 - DNA, 15 bp, Homo sapiens
gattcaatctagaaa

SEQ ID NO: 643668 - DNA, 15 bp, Homo sapiens
attcaatctagaaag

SEQ ID NO: 643669 - DNA, 15 bp, Homo sapiens
ttcaatctagaaagt

SEQ ID NO: 643670 - DNA, 15 bp, Homo sapiens
tcaatctagaaagtt

SEQ ID NO: 643671 - DNA, 15 bp, Homo sapiens
caatctagaaagttt

SEQ ID NO: 643672 - DNA, 15 bp, Homo sapiens
aatctagaaagtttc

SEQ ID NO: 643673 - DNA, 15 bp, Homo sapiens
atctagaaagtttct

SEQ ID NO: 643674 - DNA, 15 bp, Homo sapiens
tctagaaagtttctt

SEQ ID NO: 643675 - DNA, 15 bp, Homo sapiens
ctagaaagtttcttc

SEQ ID NO: 643676 - DNA, 15 bp, Homo sapiens
tagaaagtttcttct

SEQ ID NO: 643677 - DNA, 15 bp, Homo sapiens
agaaagtttcttctt

SEQ ID NO: 643678 - DNA, 15 bp, Homo sapiens
gaaagtttcttctta

SEQ ID NO: 643679 - DNA, 15 bp, Homo sapiens
aaagtttcttcttat

SEQ ID NO: 643680 - DNA, 15 bp, Homo sapiens
aagtttcttcttatt

SEQ ID NO: 643681 - DNA, 15 bp, Homo sapiens
agtttcttcttatta

SEQ ID NO: 643682 - DNA, 15 bp, Homo sapiens
gtttcttcttattaa

SEQ ID NO: 643683 - DNA, 15 bp, Homo sapiens
tttcttcttattaaa

SEQ ID NO: 643684 - DNA, 15 bp, Homo sapiens
ttcttcttattaaaa

SEQ ID NO: 643685 - DNA, 15 bp, Homo sapiens
tcttcttattaaaaa

SEQ ID NO: 643686 - DNA, 15 bp, Homo sapiens
cttcttattaaaaat

SEQ ID NO: 643687 - DNA, 15 bp, Homo sapiens
ttcttattaaaaatt

SEQ ID NO: 643688 - DNA, 15 bp, Homo sapiens
tcttattaaaaatta

SEQ ID NO: 643689 - DNA, 15 bp, Homo sapiens
cttattaaaaattag

SEQ ID NO: 643690 - DNA, 15 bp, Homo sapiens
ttattaaaaattagt

SEQ ID NO: 643691 - DNA, 15 bp, Homo sapiens
tattaaaaattagtt

SEQ ID NO: 643692 - DNA, 15 bp, Homo sapiens
attaaaaattagttt

SEQ ID NO: 643693 - DNA, 15 bp, Homo sapiens
ttaaaaattagtttt

SEQ ID NO: 643694 - DNA, 15 bp, Homo sapiens
taaaaattagttttt

SEQ ID NO: 643695 - DNA, 15 bp, Homo sapiens
aaaaattagtttttt

SEQ ID NO: 643696 - DNA, 15 bp, Homo sapiens
aaaattagttttttt

SEQ ID NO: 643697 - DNA, 15 bp, Homo sapiens
aaattagttttttta

SEQ ID NO: 643698 - DNA, 15 bp, Homo sapiens
aattagtttttttaa

SEQ ID NO: 643699 - DNA, 15 bp, Homo sapiens
attagtttttttaaa

SEQ ID NO: 643700 - DNA, 15 bp, Homo sapiens
ttagtttttttaaaa

SEQ ID NO: 643701 - DNA, 15 bp, Homo sapiens
tagtttttttaaaaa

SEQ ID NO: 643702 - DNA, 15 bp, Homo sapiens
agtttttttaaaaaa

SEQ ID NO: 643703 - DNA, 15 bp, Homo sapiens
gtttttttaaaaaaa

SEQ ID NO: 643704 - DNA, 15 bp, Homo sapiens
tttttttaaaaaaaa

SEQ ID NO: 643705 - DNA, 15 bp, Homo sapiens
ttttttaaaaaaaaa

SEQ ID NO: 643706 - DNA, 15 bp, Homo sapiens
tttttaaaaaaaaat

SEQ ID NO: 643707 - DNA, 15 bp, Homo sapiens
ttttaaaaaaaaatt

SEQ ID NO: 643708 - DNA, 15 bp, Homo sapiens
tttaaaaaaaaattc

SEQ ID NO: 643709 - DNA, 15 bp, Homo sapiens
ttaaaaaaaaattca

SEQ ID NO: 643710 - DNA, 15 bp, Homo sapiens
taaaaaaaaattcac

SEQ ID NO: 643711 - DNA, 15 bp, Homo sapiens
aaaaaaaaattcacc

SEQ ID NO: 643712 - DNA, 15 bp, Homo sapiens
aaaaaaaattcaccg

SEQ ID NO: 643713 - DNA, 15 bp, Homo sapiens
aaaaaaattcaccgg

SEQ ID NO: 643714 - DNA, 15 bp, Homo sapiens
aaaaaattcaccggg

SEQ ID NO: 643715 - DNA, 15 bp, Homo sapiens
aaaaattcaccggga

SEQ ID NO: 643716 - DNA, 15 bp, Homo sapiens
aaaattcaccgggaa

SEQ ID NO: 643717 - DNA, 15 bp, Homo sapiens
aaattcaccgggaat

SEQ ID NO: 643718 - DNA, 15 bp, Homo sapiens
aattcaccgggaatg

SEQ ID NO: 643719 - DNA, 15 bp, Homo sapiens
attcaccgggaatgg

SEQ ID NO: 643720 - DNA, 15 bp, Homo sapiens
ttcaccgggaatggt

SEQ ID NO: 643721 - DNA, 15 bp, Homo sapiens
tcaccgggaatggtg

SEQ ID NO: 643722 - DNA, 15 bp, Homo sapiens
caccgggaatggtgg

SEQ ID NO: 643723 - DNA, 15 bp, Homo sapiens
accgggaatggtggc

SEQ ID NO: 643724 - DNA, 15 bp, Homo sapiens
ccgggaatggtggcg

SEQ ID NO: 643725 - DNA, 15 bp, Homo sapiens
cgggaatggtggcgt

SEQ ID NO: 643726 - DNA, 15 bp, Homo sapiens
gggaatggtggcgta

SEQ ID NO: 643727 - DNA, 15 bp, Homo sapiens
ggaatggtggcgtat

SEQ ID NO: 643728 - DNA, 15 bp, Homo sapiens
gaatggtggcgtatg

SEQ ID NO: 643729 - DNA, 15 bp, Homo sapiens
aatggtggcgtatgt

SEQ ID NO: 643730 - DNA, 15 bp, Homo sapiens
atggtggcgtatgtc

SEQ ID NO: 643731 - DNA, 15 bp, Homo sapiens
tggtggcgtatgtct

SEQ ID NO: 643732 - DNA, 15 bp, Homo sapiens
ggtggcgtatgtctg

SEQ ID NO: 643733 - DNA, 15 bp, Homo sapiens
gtggcgtatgtctgt

SEQ ID NO: 643734 - DNA, 15 bp, Homo sapiens
tggcgtatgtctgtg

SEQ ID NO: 643735 - DNA, 15 bp, Homo sapiens
ggcgtatgtctgtgg

SEQ ID NO: 643736 - DNA, 15 bp, Homo sapiens
gcgtatgtctgtggt

SEQ ID NO: 643737 - DNA, 15 bp, Homo sapiens
cgtatgtctgtggtc

SEQ ID NO: 643738 - DNA, 15 bp, Homo sapiens
gtatgtctgtggtcc

SEQ ID NO: 643739 - DNA, 15 bp, Homo sapiens
tatgtctgtggtccc

SEQ ID NO: 643740 - DNA, 15 bp, Homo sapiens
atgtctgtggtccca

SEQ ID NO: 643741 - DNA, 15 bp, Homo sapiens
tgtctgtggtcccag

SEQ ID NO: 643742 - DNA, 15 bp, Homo sapiens
gtctgtggtcccagc

SEQ ID NO: 643743 - DNA, 15 bp, Homo sapiens
tctgtggtcccagct

SEQ ID NO: 643744 - DNA, 15 bp, Homo sapiens
ctgtggtcccagcta

SEQ ID NO: 643745 - DNA, 15 bp, Homo sapiens
tgtggtcccagctac

SEQ ID NO: 643746 - DNA, 15 bp, Homo sapiens
gtggtcccagctaca

SEQ ID NO: 643747 - DNA, 15 bp, Homo sapiens
tggtcccagctacac

SEQ ID NO: 643748 - DNA, 15 bp, Homo sapiens
ggtcccagctacaca

SEQ ID NO: 643749 - DNA, 15 bp, Homo sapiens
gtcccagctacacag

SEQ ID NO: 643750 - DNA, 15 bp, Homo sapiens
tcccagctacacagg

SEQ ID NO: 643751 - DNA, 15 bp, Homo sapiens
cccagctacacaggg

SEQ ID NO: 643752 - DNA, 15 bp, Homo sapiens
ccagctacacaggga

SEQ ID NO: 643753 - DNA, 15 bp, Homo sapiens
cagctacacagggag

SEQ ID NO: 643754 - DNA, 15 bp, Homo sapiens
agctacacagggagt

SEQ ID NO: 643755 - DNA, 15 bp, Homo sapiens
gctacacagggagtt

SEQ ID NO: 643756 - DNA, 15 bp, Homo sapiens
ctacacagggagtta

SEQ ID NO: 643757 - DNA, 15 bp, Homo sapiens
tacacagggagttaa

SEQ ID NO: 643758 - DNA, 15 bp, Homo sapiens
acacagggagttaag

SEQ ID NO: 643759 - DNA, 15 bp, Homo sapiens
cacagggagttaagg

SEQ ID NO: 643760 - DNA, 15 bp, Homo sapiens
acagggagttaaggc

SEQ ID NO: 643761 - DNA, 15 bp, Homo sapiens
cagggagttaaggca

SEQ ID NO: 643762 - DNA, 15 bp, Homo sapiens
agggagttaaggcag

SEQ ID NO: 643763 - DNA, 15 bp, Homo sapiens
gggagttaaggcagg

SEQ ID NO: 643764 - DNA, 15 bp, Homo sapiens
ggagttaaggcagga

SEQ ID NO: 643765 - DNA, 15 bp, Homo sapiens
gagttaaggcaggag

SEQ ID NO: 643766 - DNA, 15 bp, Homo sapiens
agttaaggcaggagg

SEQ ID NO: 643767 - DNA, 15 bp, Homo sapiens
gttaaggcaggagga

SEQ ID NO: 643768 - DNA, 15 bp, Homo sapiens
ttaaggcaggaggat

SEQ ID NO: 643769 - DNA, 15 bp, Homo sapiens
taaggcaggaggatc

SEQ ID NO: 643770 - DNA, 15 bp, Homo sapiens
aaggcaggaggatca

SEQ ID NO: 643771 - DNA, 15 bp, Homo sapiens
aggcaggaggatcac

SEQ ID NO: 643772 - DNA, 15 bp, Homo sapiens
ggcaggaggatcact

SEQ ID NO: 643773 - DNA, 15 bp, Homo sapiens
gcaggaggatcactt

SEQ ID NO: 643774 - DNA, 15 bp, Homo sapiens
caggaggatcacttc

SEQ ID NO: 643775 - DNA, 15 bp, Homo sapiens
aggaggatcacttca

SEQ ID NO: 643776 - DNA, 15 bp, Homo sapiens
ggaggatcacttcag

SEQ ID NO: 643777 - DNA, 15 bp, Homo sapiens
gaggatcacttcagc

SEQ ID NO: 643778 - DNA, 15 bp, Homo sapiens
aggatcacttcagcc

SEQ ID NO: 643779 - DNA, 15 bp, Homo sapiens
ggatcacttcagccc

SEQ ID NO: 643780 - DNA, 15 bp, Homo sapiens
gatcacttcagccca

SEQ ID NO: 643781 - DNA, 15 bp, Homo sapiens
atcacttcagcccaa

SEQ ID NO: 643782 - DNA, 15 bp, Homo sapiens
tcacttcagcccaag

SEQ ID NO: 643783 - DNA, 15 bp, Homo sapiens
cacttcagcccaaga

SEQ ID NO: 643784 - DNA, 15 bp, Homo sapiens
acttcagcccaagaa

SEQ ID NO: 643785 - DNA, 15 bp, Homo sapiens
cttcagcccaagaag

SEQ ID NO: 643786 - DNA, 15 bp, Homo sapiens
ttcagcccaagaagt

SEQ ID NO: 643787 - DNA, 15 bp, Homo sapiens
tcagcccaagaagtt

SEQ ID NO: 643788 - DNA, 15 bp, Homo sapiens
cagcccaagaagttg

SEQ ID NO: 643789 - DNA, 15 bp, Homo sapiens
agcccaagaagttga

SEQ ID NO: 643790 - DNA, 15 bp, Homo sapiens
gcccaagaagttgag

SEQ ID NO: 643791 - DNA, 15 bp, Homo sapiens
cccaagaagttgagg

SEQ ID NO: 643792 - DNA, 15 bp, Homo sapiens
ccaagaagttgaggc

SEQ ID NO: 643793 - DNA, 15 bp, Homo sapiens
caagaagttgaggct

SEQ ID NO: 643794 - DNA, 15 bp, Homo sapiens
aagaagttgaggctg

SEQ ID NO: 643795 - DNA, 15 bp, Homo sapiens
agaagttgaggctgc

SEQ ID NO: 643796 - DNA, 15 bp, Homo sapiens
gaagttgaggctgca

SEQ ID NO: 643797 - DNA, 15 bp, Homo sapiens
aagttgaggctgcag

SEQ ID NO: 643798 - DNA, 15 bp, Homo sapiens
agttgaggctgcagt

SEQ ID NO: 643799 - DNA, 15 bp, Homo sapiens
gttgaggctgcagtg

SEQ ID NO: 643800 - DNA, 15 bp, Homo sapiens
ttgaggctgcagtga

SEQ ID NO: 643801 - DNA, 15 bp, Homo sapiens
tgaggctgcagtgag

SEQ ID NO: 643802 - DNA, 15 bp, Homo sapiens
gaggctgcagtgagc

SEQ ID NO: 643803 - DNA, 15 bp, Homo sapiens
aggctgcagtgagcc

SEQ ID NO: 643804 - DNA, 15 bp, Homo sapiens
ggctgcagtgagcca

SEQ ID NO: 643805 - DNA, 15 bp, Homo sapiens
gctgcagtgagccat

SEQ ID NO: 643806 - DNA, 15 bp, Homo sapiens
ctgcagtgagccatg

SEQ ID NO: 643807 - DNA, 15 bp, Homo sapiens
tgcagtgagccatgt

SEQ ID NO: 643808 - DNA, 15 bp, Homo sapiens
gcagtgagccatgtt

SEQ ID NO: 643809 - DNA, 15 bp, Homo sapiens
cagtgagccatgttc

SEQ ID NO: 643810 - DNA, 15 bp, Homo sapiens
agtgagccatgttcg

SEQ ID NO: 643811 - DNA, 15 bp, Homo sapiens
gtgagccatgttcgt

SEQ ID NO: 643812 - DNA, 15 bp, Homo sapiens
tgagccatgttcgtg

SEQ ID NO: 643813 - DNA, 15 bp, Homo sapiens
gagccatgttcgtgc

SEQ ID NO: 643814 - DNA, 15 bp, Homo sapiens
agccatgttcgtgcc

SEQ ID NO: 643815 - DNA, 15 bp, Homo sapiens
gccatgttcgtgcca

SEQ ID NO: 643816 - DNA, 15 bp, Homo sapiens
ccatgttcgtgccac

SEQ ID NO: 643817 - DNA, 15 bp, Homo sapiens
catgttcgtgccact

SEQ ID NO: 643818 - DNA, 15 bp, Homo sapiens
atgttcgtgccactg

SEQ ID NO: 643819 - DNA, 15 bp, Homo sapiens
tgttcgtgccactgc

SEQ ID NO: 643820 - DNA, 15 bp, Homo sapiens
gttcgtgccactgca

SEQ ID NO: 643821 - DNA, 15 bp, Homo sapiens
ttcgtgccactgcac

SEQ ID NO: 643822 - DNA, 15 bp, Homo sapiens
tcgtgccactgcaca

SEQ ID NO: 643823 - DNA, 15 bp, Homo sapiens
cgtgccactgcacac

SEQ ID NO: 643824 - DNA, 15 bp, Homo sapiens
gtgccactgcacacc

SEQ ID NO: 643825 - DNA, 15 bp, Homo sapiens
tgccactgcacacca

SEQ ID NO: 643826 - DNA, 15 bp, Homo sapiens
gccactgcacaccag

SEQ ID NO: 643827 - DNA, 15 bp, Homo sapiens
ccactgcacaccagc

SEQ ID NO: 643828 - DNA, 15 bp, Homo sapiens
cactgcacaccagcc

SEQ ID NO: 643829 - DNA, 15 bp, Homo sapiens
actgcacaccagcct

SEQ ID NO: 643830 - DNA, 15 bp, Homo sapiens
ctgcacaccagcctg

SEQ ID NO: 643831 - DNA, 15 bp, Homo sapiens
tgcacaccagcctgg

SEQ ID NO: 643832 - DNA, 15 bp, Homo sapiens
gcacaccagcctggg

SEQ ID NO: 643833 - DNA, 15 bp, Homo sapiens
cacaccagcctgggt

SEQ ID NO: 643834 - DNA, 15 bp, Homo sapiens
acaccagcctgggtg

SEQ ID NO: 643835 - DNA, 15 bp, Homo sapiens
caccagcctgggtga

SEQ ID NO: 643836 - DNA, 15 bp, Homo sapiens
accagcctgggtgac

SEQ ID NO: 643837 - DNA, 15 bp, Homo sapiens
gcctgggtgacagaa

SEQ ID NO: 643838 - DNA, 15 bp, Homo sapiens
cctgggtgacagaat

SEQ ID NO: 643839 - DNA, 15 bp, Homo sapiens
ctgggtgacagaatg

SEQ ID NO: 643840 - DNA, 15 bp, Homo sapiens
tgggtgacagaatga

SEQ ID NO: 643841 - DNA, 15 bp, Homo sapiens
gggtgacagaatgag

SEQ ID NO: 643842 - DNA, 15 bp, Homo sapiens
ggtgacagaatgaga

SEQ ID NO: 643843 - DNA, 15 bp, Homo sapiens
gtgacagaatgagac

SEQ ID NO: 643844 - DNA, 15 bp, Homo sapiens
tgacagaatgagacc

SEQ ID NO: 643845 - DNA, 15 bp, Homo sapiens
gacagaatgagaccc

SEQ ID NO: 643846 - DNA, 15 bp, Homo sapiens
acagaatgagaccct

SEQ ID NO: 643847 - DNA, 15 bp, Homo sapiens
cagaatgagaccctg

SEQ ID NO: 643848 - DNA, 15 bp, Homo sapiens
agaatgagaccctgt

SEQ ID NO: 643849 - DNA, 15 bp, Homo sapiens
gaatgagaccctgtc

SEQ ID NO: 643850 - DNA, 15 bp, Homo sapiens
aatgagaccctgtct

SEQ ID NO: 643851 - DNA, 15 bp, Homo sapiens
atgagaccctgtctc

SEQ ID NO: 643852 - DNA, 15 bp, Homo sapiens
tgagaccctgtctca

SEQ ID NO: 643853 - DNA, 15 bp, Homo sapiens
gagaccctgtctcaa

SEQ ID NO: 643854 - DNA, 15 bp, Homo sapiens
agaccctgtctcaaa

SEQ ID NO: 643855 - DNA, 15 bp, Homo sapiens
gaccctgtctcaaaa

SEQ ID NO: 643856 - DNA, 15 bp, Homo sapiens
accctgtctcaaaaa

SEQ ID NO: 643857 - DNA, 15 bp, Homo sapiens
ccctgtctcaaaaaa

SEQ ID NO: 643858 - DNA, 15 bp, Homo sapiens
cctgtctcaaaaaaa

SEQ ID NO: 643859 - DNA, 15 bp, Homo sapiens
ctgtctcaaaaaaat

SEQ ID NO: 643860 - DNA, 15 bp, Homo sapiens
tgtctcaaaaaaata

SEQ ID NO: 643861 - DNA, 15 bp, Homo sapiens
gtctcaaaaaaataa

SEQ ID NO: 643862 - DNA, 15 bp, Homo sapiens
tctcaaaaaaataaa

SEQ ID NO: 643863 - DNA, 15 bp, Homo sapiens
ctcaaaaaaataaaa

SEQ ID NO: 643864 - DNA, 15 bp, Homo sapiens
tcaaaaaaataaaaa

SEQ ID NO: 643865 - DNA, 15 bp, Homo sapiens
caaaaaaataaaaat

SEQ ID NO: 643866 - DNA, 15 bp, Homo sapiens
aaaaaaataaaaata

SEQ ID NO: 643867 - DNA, 15 bp, Homo sapiens
aaaataaaaataaaa

SEQ ID NO: 643868 - DNA, 15 bp, Homo sapiens
aaataaaaataaaac

SEQ ID NO: 643869 - DNA, 15 bp, Homo sapiens
aataaaaataaaaca

SEQ ID NO: 643870 - DNA, 15 bp, Homo sapiens
ataaaaataaaacaa

SEQ ID NO: 643871 - DNA, 15 bp, Homo sapiens
taaaaataaaacaac

SEQ ID NO: 643872 - DNA, 15 bp, Homo sapiens
aaaaataaaacaact

SEQ ID NO: 643873 - DNA, 15 bp, Homo sapiens
aaaataaaacaacta

SEQ ID NO: 643874 - DNA, 15 bp, Homo sapiens
aaataaaacaactag

SEQ ID NO: 643875 - DNA, 15 bp, Homo sapiens
aataaaacaactagt

SEQ ID NO: 643876 - DNA, 15 bp, Homo sapiens
ataaaacaactagtt

SEQ ID NO: 643877 - DNA, 15 bp, Homo sapiens
taaaacaactagttt

SEQ ID NO: 643878 - DNA, 15 bp, Homo sapiens
aaaacaactagtttt

SEQ ID NO: 643879 - DNA, 15 bp, Homo sapiens
aaacaactagttttg

SEQ ID NO: 643880 - DNA, 15 bp, Homo sapiens
aacaactagttttga

SEQ ID NO: 643881 - DNA, 15 bp, Homo sapiens
acaactagttttgac

SEQ ID NO: 643882 - DNA, 15 bp, Homo sapiens
caactagttttgact

SEQ ID NO: 643883 - DNA, 15 bp, Homo sapiens
aactagttttgactg

SEQ ID NO: 643884 - DNA, 15 bp, Homo sapiens
actagttttgactgt

SEQ ID NO: 643885 - DNA, 15 bp, Homo sapiens
ctagttttgactgtc

SEQ ID NO: 643886 - DNA, 15 bp, Homo sapiens
tagttttgactgtcc

SEQ ID NO: 643887 - DNA, 15 bp, Homo sapiens
agttttgactgtcca

SEQ ID NO: 643888 - DNA, 15 bp, Homo sapiens
gttttgactgtccat

SEQ ID NO: 643889 - DNA, 15 bp, Homo sapiens
ttttgactgtccatg

SEQ ID NO: 643890 - DNA, 15 bp, Homo sapiens
tttgactgtccatgt

SEQ ID NO: 643891 - DNA, 15 bp, Homo sapiens
ttgactgtccatgtg

SEQ ID NO: 643892 - DNA, 15 bp, Homo sapiens
tgactgtccatgtgt

SEQ ID NO: 643893 - DNA, 15 bp, Homo sapiens
gactgtccatgtgtg

SEQ ID NO: 643894 - DNA, 15 bp, Homo sapiens
actgtccatgtgtgt

SEQ ID NO: 643895 - DNA, 15 bp, Homo sapiens
ctgtccatgtgtgtt

SEQ ID NO: 643896 - DNA, 15 bp, Homo sapiens
tgtccatgtgtgttc

SEQ ID NO: 643897 - DNA, 15 bp, Homo sapiens
gtccatgtgtgttcc

SEQ ID NO: 643898 - DNA, 15 bp, Homo sapiens
tccatgtgtgttcct

SEQ ID NO: 643899 - DNA, 15 bp, Homo sapiens
ccatgtgtgttcctt

SEQ ID NO: 643900 - DNA, 15 bp, Homo sapiens
catgtgtgttccttg

SEQ ID NO: 643901 - DNA, 15 bp, Homo sapiens
atgtgtgttccttgc

SEQ ID NO: 643902 - DNA, 15 bp, Homo sapiens
tgtgtgttccttgca

SEQ ID NO: 643903 - DNA, 15 bp, Homo sapiens
gtgtgttccttgcat

SEQ ID NO: 643904 - DNA, 15 bp, Homo sapiens
tgtgttccttgcata

SEQ ID NO: 643905 - DNA, 15 bp, Homo sapiens
gtgttccttgcatat

SEQ ID NO: 643906 - DNA, 15 bp, Homo sapiens
tgttccttgcatatt

SEQ ID NO: 643907 - DNA, 15 bp, Homo sapiens
gttccttgcatattt

SEQ ID NO: 643908 - DNA, 15 bp, Homo sapiens
ttccttgcatattta

SEQ ID NO: 643909 - DNA, 15 bp, Homo sapiens
tccttgcatatttaa

SEQ ID NO: 643910 - DNA, 15 bp, Homo sapiens
ccttgcatatttaat

SEQ ID NO: 643911 - DNA, 15 bp, Homo sapiens
cttgcatatttaatt

SEQ ID NO: 643912 - DNA, 15 bp, Homo sapiens
ttgcatatttaatta

SEQ ID NO: 643913 - DNA, 15 bp, Homo sapiens
tgcatatttaattat

SEQ ID NO: 643914 - DNA, 15 bp, Homo sapiens
gcatatttaattatt

SEQ ID NO: 643915 - DNA, 15 bp, Homo sapiens
catatttaattattt

SEQ ID NO: 643916 - DNA, 15 bp, Homo sapiens
atatttaattatttc

SEQ ID NO: 643917 - DNA, 15 bp, Homo sapiens
tatttaattatttca

SEQ ID NO: 643918 - DNA, 15 bp, Homo sapiens
atttaattatttcat

SEQ ID NO: 643919 - DNA, 15 bp, Homo sapiens
tttaattatttcatt

SEQ ID NO: 643920 - DNA, 15 bp, Homo sapiens
ttaattatttcattc

SEQ ID NO: 643921 - DNA, 15 bp, Homo sapiens
taattatttcattca

SEQ ID NO: 643922 - DNA, 15 bp, Homo sapiens
aattatttcattcat

SEQ ID NO: 643923 - DNA, 15 bp, Homo sapiens
attatttcattcatt

SEQ ID NO: 643924 - DNA, 15 bp, Homo sapiens
ttatttcattcattt

SEQ ID NO: 643925 - DNA, 15 bp, Homo sapiens
tatttcattcatttg

SEQ ID NO: 643926 - DNA, 15 bp, Homo sapiens
atttcattcatttgt

SEQ ID NO: 643927 - DNA, 15 bp, Homo sapiens
tttcattcatttgta

SEQ ID NO: 643928 - DNA, 15 bp, Homo sapiens
ttcattcatttgtaa

SEQ ID NO: 643929 - DNA, 15 bp, Homo sapiens
tcattcatttgtaag

SEQ ID NO: 643930 - DNA, 15 bp, Homo sapiens
cattcatttgtaagt

SEQ ID NO: 643931 - DNA, 15 bp, Homo sapiens
attcatttgtaagtt

SEQ ID NO: 643932 - DNA, 15 bp, Homo sapiens
ttcatttgtaagtta

SEQ ID NO: 643933 - DNA, 15 bp, Homo sapiens
tcatttgtaagttat

SEQ ID NO: 643934 - DNA, 15 bp, Homo sapiens
catttgtaagttatt

SEQ ID NO: 643935 - DNA, 15 bp, Homo sapiens
atttgtaagttatta

SEQ ID NO: 643936 - DNA, 15 bp, Homo sapiens
tttgtaagttattaa

SEQ ID NO: 643937 - DNA, 15 bp, Homo sapiens
ttgtaagttattaag

SEQ ID NO: 643938 - DNA, 15 bp, Homo sapiens
tgtaagttattaagt

SEQ ID NO: 643939 - DNA, 15 bp, Homo sapiens
gtaagttattaagtt

SEQ ID NO: 643940 - DNA, 15 bp, Homo sapiens
taagttattaagtta

SEQ ID NO: 643941 - DNA, 15 bp, Homo sapiens
aagttattaagttaa

SEQ ID NO: 643942 - DNA, 15 bp, Homo sapiens
agttattaagttaaa

SEQ ID NO: 643943 - DNA, 15 bp, Homo sapiens
gttattaagttaaat

SEQ ID NO: 643944 - DNA, 15 bp, Homo sapiens
ttattaagttaaatg

SEQ ID NO: 643945 - DNA, 15 bp, Homo sapiens
tattaagttaaatgt

SEQ ID NO: 643946 - DNA, 15 bp, Homo sapiens
attaagttaaatgta

SEQ ID NO: 643947 - DNA, 15 bp, Homo sapiens
ttaagttaaatgtaa

SEQ ID NO: 643948 - DNA, 15 bp, Homo sapiens
taagttaaatgtaat

SEQ ID NO: 643949 - DNA, 15 bp, Homo sapiens
aagttaaatgtaatg

SEQ ID NO: 643950 - DNA, 15 bp, Homo sapiens
agttaaatgtaatgc

SEQ ID NO: 643951 - DNA, 15 bp, Homo sapiens
gttaaatgtaatgcc

SEQ ID NO: 643952 - DNA, 15 bp, Homo sapiens
ttaaatgtaatgcct

SEQ ID NO: 643953 - DNA, 15 bp, Homo sapiens
taaatgtaatgccta

SEQ ID NO: 643954 - DNA, 15 bp, Homo sapiens
aaatgtaatgcctac

SEQ ID NO: 643955 - DNA, 15 bp, Homo sapiens
aatgtaatgcctact

SEQ ID NO: 643956 - DNA, 15 bp, Homo sapiens
atgtaatgcctactg

SEQ ID NO: 643957 - DNA, 15 bp, Homo sapiens
tgtaatgcctactga

SEQ ID NO: 643958 - DNA, 15 bp, Homo sapiens
gtaatgcctactgaa

SEQ ID NO: 643959 - DNA, 15 bp, Homo sapiens
taatgcctactgaag

SEQ ID NO: 643960 - DNA, 15 bp, Homo sapiens
aatgcctactgaaga

SEQ ID NO: 643961 - DNA, 15 bp, Homo sapiens
atgcctactgaagaa

SEQ ID NO: 643962 - DNA, 15 bp, Homo sapiens
tgcctactgaagaaa

SEQ ID NO: 643963 - DNA, 15 bp, Homo sapiens
gcctactgaagaaac

SEQ ID NO: 643964 - DNA, 15 bp, Homo sapiens
cctactgaagaaaca

SEQ ID NO: 643965 - DNA, 15 bp, Homo sapiens
ctactgaagaaacat

SEQ ID NO: 643966 - DNA, 15 bp, Homo sapiens
tactgaagaaacatt

SEQ ID NO: 643967 - DNA, 15 bp, Homo sapiens
actgaagaaacattt

SEQ ID NO: 643968 - DNA, 15 bp, Homo sapiens
ctgaagaaacatttt

SEQ ID NO: 643969 - DNA, 15 bp, Homo sapiens
tgaagaaacatttta

SEQ ID NO: 643970 - DNA, 15 bp, Homo sapiens
gaagaaacattttaa

SEQ ID NO: 643971 - DNA, 15 bp, Homo sapiens
aagaaacattttaat

SEQ ID NO: 643972 - DNA, 15 bp, Homo sapiens
agaaacattttaata

SEQ ID NO: 643973 - DNA, 15 bp, Homo sapiens
gaaacattttaataa

SEQ ID NO: 643974 - DNA, 15 bp, Homo sapiens
aaacattttaataag

SEQ ID NO: 643975 - DNA, 15 bp, Homo sapiens
aacattttaataagc

SEQ ID NO: 643976 - DNA, 15 bp, Homo sapiens
acattttaataagct

SEQ ID NO: 643977 - DNA, 15 bp, Homo sapiens
cattttaataagctt

SEQ ID NO: 643978 - DNA, 15 bp, Homo sapiens
attttaataagcttt

SEQ ID NO: 643979 - DNA, 15 bp, Homo sapiens
ttttaataagctttt

SEQ ID NO: 643980 - DNA, 15 bp, Homo sapiens
tttaataagcttttt

SEQ ID NO: 643981 - DNA, 15 bp, Homo sapiens
ggcctcctaaagtgc

SEQ ID NO: 643982 - DNA, 15 bp, Homo sapiens
gcctcctaaagtgcc

SEQ ID NO: 643983 - DNA, 15 bp, Homo sapiens
cctcctaaagtgccg

SEQ ID NO: 643984 - DNA, 15 bp, Homo sapiens
ctcctaaagtgccgg

SEQ ID NO: 643985 - DNA, 15 bp, Homo sapiens
tcctaaagtgccgga

SEQ ID NO: 643986 - DNA, 15 bp, Homo sapiens
cctaaagtgccggaa

SEQ ID NO: 643987 - DNA, 15 bp, Homo sapiens
ctaaagtgccggaat

SEQ ID NO: 643988 - DNA, 15 bp, Homo sapiens
taaagtgccggaatt

SEQ ID NO: 643989 - DNA, 15 bp, Homo sapiens
aaagtgccggaatta

SEQ ID NO: 643990 - DNA, 15 bp, Homo sapiens
aagtgccggaattac

SEQ ID NO: 643991 - DNA, 15 bp, Homo sapiens
agtgccggaattaca

SEQ ID NO: 643992 - DNA, 15 bp, Homo sapiens
gtgccggaattacag

SEQ ID NO: 643993 - DNA, 15 bp, Homo sapiens
tgccggaattacaga

SEQ ID NO: 643994 - DNA, 15 bp, Homo sapiens
gccggaattacagat

SEQ ID NO: 643995 - DNA, 15 bp, Homo sapiens
ccggaattacagata

SEQ ID NO: 643996 - DNA, 15 bp, Homo sapiens
cggaattacagatac

SEQ ID NO: 643997 - DNA, 15 bp, Homo sapiens
ggaattacagataca

SEQ ID NO: 643998 - DNA, 15 bp, Homo sapiens
gaattacagatacag

SEQ ID NO: 643999 - DNA, 15 bp, Homo sapiens
aattacagatacaga

SEQ ID NO: 644000 - DNA, 15 bp, Homo sapiens
attacagatacagat

SEQ ID NO: 644001 - DNA, 15 bp, Homo sapiens
ttacagatacagatg

SEQ ID NO: 644002 - DNA, 15 bp, Homo sapiens
tacagatacagatgt

SEQ ID NO: 644003 - DNA, 15 bp, Homo sapiens
acagatacagatgtg

SEQ ID NO: 644004 - DNA, 15 bp, Homo sapiens
cagatacagatgtga

SEQ ID NO: 644005 - DNA, 15 bp, Homo sapiens
agatacagatgtgaa

SEQ ID NO: 644006 - DNA, 15 bp, Homo sapiens
gatacagatgtgaac

SEQ ID NO: 644007 - DNA, 15 bp, Homo sapiens
atacagatgtgaact

SEQ ID NO: 644008 - DNA, 15 bp, Homo sapiens
tacagatgtgaacta

SEQ ID NO: 644009 - DNA, 15 bp, Homo sapiens
acagatgtgaactac

SEQ ID NO: 644010 - DNA, 15 bp, Homo sapiens
cagatgtgaactacc

SEQ ID NO: 644011 - DNA, 15 bp, Homo sapiens
agatgtgaactacca

SEQ ID NO: 644012 - DNA, 15 bp, Homo sapiens
gatgtgaactaccat

SEQ ID NO: 644013 - DNA, 15 bp, Homo sapiens
atgtgaactaccatg

SEQ ID NO: 644014 - DNA, 15 bp, Homo sapiens
tgtgaactaccatgc

SEQ ID NO: 644015 - DNA, 15 bp, Homo sapiens
gtgaactaccatgcc

SEQ ID NO: 644016 - DNA, 15 bp, Homo sapiens
tgaactaccatgccc

SEQ ID NO: 644017 - DNA, 15 bp, Homo sapiens
gaactaccatgcccg

SEQ ID NO: 644018 - DNA, 15 bp, Homo sapiens
aactaccatgcccgg

SEQ ID NO: 644019 - DNA, 15 bp, Homo sapiens
actaccatgcccggc

SEQ ID NO: 644020 - DNA, 15 bp, Homo sapiens
ctaccatgcccggcc

SEQ ID NO: 644021 - DNA, 15 bp, Homo sapiens
taccatgcccggccc

SEQ ID NO: 644022 - DNA, 15 bp, Homo sapiens
accatgcccggccct

SEQ ID NO: 644023 - DNA, 15 bp, Homo sapiens
ccatgcccggcccta

SEQ ID NO: 644024 - DNA, 15 bp, Homo sapiens
catgcccggccctag

SEQ ID NO: 644025 - DNA, 15 bp, Homo sapiens
atgcccggccctagt

SEQ ID NO: 644026 - DNA, 15 bp, Homo sapiens
tgcccggccctagtt

SEQ ID NO: 644027 - DNA, 15 bp, Homo sapiens
gcccggccctagttc

SEQ ID NO: 644028 - DNA, 15 bp, Homo sapiens
cccggccctagttct

SEQ ID NO: 644029 - DNA, 15 bp, Homo sapiens
ccggccctagttctg

SEQ ID NO: 644030 - DNA, 15 bp, Homo sapiens
cggccctagttctga

SEQ ID NO: 644031 - DNA, 15 bp, Homo sapiens
ggccctagttctgag

SEQ ID NO: 644032 - DNA, 15 bp, Homo sapiens
gccctagttctgagt

SEQ ID NO: 644033 - DNA, 15 bp, Homo sapiens
ccctagttctgagtt

SEQ ID NO: 644034 - DNA, 15 bp, Homo sapiens
cctagttctgagttc

SEQ ID NO: 644035 - DNA, 15 bp, Homo sapiens
ctagttctgagttct

SEQ ID NO: 644036 - DNA, 15 bp, Homo sapiens
tagttctgagttcta

SEQ ID NO: 644037 - DNA, 15 bp, Homo sapiens
agttctgagttctaa

SEQ ID NO: 644038 - DNA, 15 bp, Homo sapiens
gttctgagttctaat

SEQ ID NO: 644039 - DNA, 15 bp, Homo sapiens
ttctgagttctaata

SEQ ID NO: 644040 - DNA, 15 bp, Homo sapiens
tctgagttctaatat

SEQ ID NO: 644041 - DNA, 15 bp, Homo sapiens
ctgagttctaatatg

SEQ ID NO: 644042 - DNA, 15 bp, Homo sapiens
tgagttctaatatga

SEQ ID NO: 644043 - DNA, 15 bp, Homo sapiens
gagttctaatatgaa

SEQ ID NO: 644044 - DNA, 15 bp, Homo sapiens
agttctaatatgaaa

SEQ ID NO: 644045 - DNA, 15 bp, Homo sapiens
gttctaatatgaaac

SEQ ID NO: 644046 - DNA, 15 bp, Homo sapiens
ttctaatatgaaact

SEQ ID NO: 644047 - DNA, 15 bp, Homo sapiens
tctaatatgaaactt

SEQ ID NO: 644048 - DNA, 15 bp, Homo sapiens
ctaatatgaaacttt

SEQ ID NO: 644049 - DNA, 15 bp, Homo sapiens
taatatgaaacttta

SEQ ID NO: 644050 - DNA, 15 bp, Homo sapiens
aatatgaaactttag

SEQ ID NO: 644051 - DNA, 15 bp, Homo sapiens
atatgaaactttagg

SEQ ID NO: 644052 - DNA, 15 bp, Homo sapiens
tatgaaactttaggt

SEQ ID NO: 644053 - DNA, 15 bp, Homo sapiens
atgaaactttaggtc

SEQ ID NO: 644054 - DNA, 15 bp, Homo sapiens
tgaaactttaggtct

SEQ ID NO: 644055 - DNA, 15 bp, Homo sapiens
gaaactttaggtctc

SEQ ID NO: 644056 - DNA, 15 bp, Homo sapiens
aaactttaggtctca

SEQ ID NO: 644057 - DNA, 15 bp, Homo sapiens
aactttaggtctcag

SEQ ID NO: 644058 - DNA, 15 bp, Homo sapiens
actttaggtctcagt

SEQ ID NO: 644059 - DNA, 15 bp, Homo sapiens
ctttaggtctcagtt

SEQ ID NO: 644060 - DNA, 15 bp, Homo sapiens
tttaggtctcagttt

SEQ ID NO: 644061 - DNA, 15 bp, Homo sapiens
ttaggtctcagttta

SEQ ID NO: 644062 - DNA, 15 bp, Homo sapiens
taggtctcagtttaa

SEQ ID NO: 644063 - DNA, 15 bp, Homo sapiens
aggtctcagtttaac

SEQ ID NO: 644064 - DNA, 15 bp, Homo sapiens
ggtctcagtttaacc

SEQ ID NO: 644065 - DNA, 15 bp, Homo sapiens
gtctcagtttaacct

SEQ ID NO: 644066 - DNA, 15 bp, Homo sapiens
tctcagtttaaccta

SEQ ID NO: 644067 - DNA, 15 bp, Homo sapiens
ctcagtttaacctac

SEQ ID NO: 644068 - DNA, 15 bp, Homo sapiens
tcagtttaacctact

SEQ ID NO: 644069 - DNA, 15 bp, Homo sapiens
cagtttaacctactt

SEQ ID NO: 644070 - DNA, 15 bp, Homo sapiens
agtttaacctactta

SEQ ID NO: 644071 - DNA, 15 bp, Homo sapiens
gtttaacctacttac

SEQ ID NO: 644072 - DNA, 15 bp, Homo sapiens
tttaacctacttact

SEQ ID NO: 644073 - DNA, 15 bp, Homo sapiens
ttaacctacttacta

SEQ ID NO: 644074 - DNA, 15 bp, Homo sapiens
taacctacttactat

SEQ ID NO: 644075 - DNA, 15 bp, Homo sapiens
aacctacttactatt

SEQ ID NO: 644076 - DNA, 15 bp, Homo sapiens
acctacttactatta

SEQ ID NO: 644077 - DNA, 15 bp, Homo sapiens
cctacttactattaa

SEQ ID NO: 644078 - DNA, 15 bp, Homo sapiens
ctacttactattaat

SEQ ID NO: 644079 - DNA, 15 bp, Homo sapiens
tacttactattaatt

SEQ ID NO: 644080 - DNA, 15 bp, Homo sapiens
acttactattaatta

SEQ ID NO: 644081 - DNA, 15 bp, Homo sapiens
cttactattaattat

SEQ ID NO: 644082 - DNA, 15 bp, Homo sapiens
ttactattaattata

SEQ ID NO: 644083 - DNA, 15 bp, Homo sapiens
tactattaattatat

SEQ ID NO: 644084 - DNA, 15 bp, Homo sapiens
actattaattatatg

SEQ ID NO: 644085 - DNA, 15 bp, Homo sapiens
ctattaattatatga

SEQ ID NO: 644086 - DNA, 15 bp, Homo sapiens
tattaattatatgat

SEQ ID NO: 644087 - DNA, 15 bp, Homo sapiens
attaattatatgatc

SEQ ID NO: 644088 - DNA, 15 bp, Homo sapiens
ttaattatatgatct

SEQ ID NO: 644089 - DNA, 15 bp, Homo sapiens
taattatatgatctt

SEQ ID NO: 644090 - DNA, 15 bp, Homo sapiens
aattatatgatcttg

SEQ ID NO: 644091 - DNA, 15 bp, Homo sapiens
attatatgatcttgg

SEQ ID NO: 644092 - DNA, 15 bp, Homo sapiens
ttatatgatcttgga

SEQ ID NO: 644093 - DNA, 15 bp, Homo sapiens
tatatgatcttggac

SEQ ID NO: 644094 - DNA, 15 bp, Homo sapiens
atatgatcttggaca

SEQ ID NO: 644095 - DNA, 15 bp, Homo sapiens
tatgatcttggacaa

SEQ ID NO: 644096 - DNA, 15 bp, Homo sapiens
atgatcttggacaat

SEQ ID NO: 644097 - DNA, 15 bp, Homo sapiens
tgatcttggacaatg

SEQ ID NO: 644098 - DNA, 15 bp, Homo sapiens
gatcttggacaatgg

SEQ ID NO: 644099 - DNA, 15 bp, Homo sapiens
atcttggacaatggg

SEQ ID NO: 644100 - DNA, 15 bp, Homo sapiens
tcttggacaatgggc

SEQ ID NO: 644101 - DNA, 15 bp, Homo sapiens
cttggacaatgggcc

SEQ ID NO: 644102 - DNA, 15 bp, Homo sapiens
ttggacaatgggcct

SEQ ID NO: 644103 - DNA, 15 bp, Homo sapiens
tggacaatgggccta

SEQ ID NO: 644104 - DNA, 15 bp, Homo sapiens
ggacaatgggcctaa

SEQ ID NO: 644105 - DNA, 15 bp, Homo sapiens
gacaatgggcctaaa

SEQ ID NO: 644106 - DNA, 15 bp, Homo sapiens
acaatgggcctaaaa

SEQ ID NO: 644107 - DNA, 15 bp, Homo sapiens
caatgggcctaaaaa

SEQ ID NO: 644108 - DNA, 15 bp, Homo sapiens
aatgggcctaaaaaa

SEQ ID NO: 644109 - DNA, 15 bp, Homo sapiens
atgggcctaaaaaag

SEQ ID NO: 644110 - DNA, 15 bp, Homo sapiens
tgggcctaaaaaagg

SEQ ID NO: 644111 - DNA, 15 bp, Homo sapiens
gggcctaaaaaagga

SEQ ID NO: 644112 - DNA, 15 bp, Homo sapiens
ggcctaaaaaaggag

SEQ ID NO: 644113 - DNA, 15 bp, Homo sapiens
gcctaaaaaaggagt

SEQ ID NO: 644114 - DNA, 15 bp, Homo sapiens
cctaaaaaaggagtc

SEQ ID NO: 644115 - DNA, 15 bp, Homo sapiens
ctaaaaaaggagtct

SEQ ID NO: 644116 - DNA, 15 bp, Homo sapiens
taaaaaaggagtctt

SEQ ID NO: 644117 - DNA, 15 bp, Homo sapiens
aaaaaaggagtctta

SEQ ID NO: 644118 - DNA, 15 bp, Homo sapiens
aaaaaggagtcttaa

SEQ ID NO: 644119 - DNA, 15 bp, Homo sapiens
aaaaggagtcttaat

SEQ ID NO: 644120 - DNA, 15 bp, Homo sapiens
aaaggagtcttaata

SEQ ID NO: 644121 - DNA, 15 bp, Homo sapiens
aaggagtcttaatat

SEQ ID NO: 644122 - DNA, 15 bp, Homo sapiens
aggagtcttaatatt

SEQ ID NO: 644123 - DNA, 15 bp, Homo sapiens
ggagtcttaatattc

SEQ ID NO: 644124 - DNA, 15 bp, Homo sapiens
gagtcttaatattcc

SEQ ID NO: 644125 - DNA, 15 bp, Homo sapiens
agtcttaatattccc

SEQ ID NO: 644126 - DNA, 15 bp, Homo sapiens
gtcttaatattccca

SEQ ID NO: 644127 - DNA, 15 bp, Homo sapiens
tcttaatattcccaa

SEQ ID NO: 644128 - DNA, 15 bp, Homo sapiens
cttaatattcccaac

SEQ ID NO: 644129 - DNA, 15 bp, Homo sapiens
ttaatattcccaact

SEQ ID NO: 644130 - DNA, 15 bp, Homo sapiens
taatattcccaacta

SEQ ID NO: 644131 - DNA, 15 bp, Homo sapiens
aatattcccaactac

SEQ ID NO: 644132 - DNA, 15 bp, Homo sapiens
atattcccaactaca

SEQ ID NO: 644133 - DNA, 15 bp, Homo sapiens
tattcccaactacat

SEQ ID NO: 644134 - DNA, 15 bp, Homo sapiens
attcccaactacata

SEQ ID NO: 644135 - DNA, 15 bp, Homo sapiens
ttcccaactacataa

SEQ ID NO: 644136 - DNA, 15 bp, Homo sapiens
tcccaactacataat

SEQ ID NO: 644137 - DNA, 15 bp, Homo sapiens
cccaactacataatg

SEQ ID NO: 644138 - DNA, 15 bp, Homo sapiens
ccaactacataatgg

SEQ ID NO: 644139 - DNA, 15 bp, Homo sapiens
caactacataatgga

SEQ ID NO: 644140 - DNA, 15 bp, Homo sapiens
aactacataatggag

SEQ ID NO: 644141 - DNA, 15 bp, Homo sapiens
actacataatggaga

SEQ ID NO: 644142 - DNA, 15 bp, Homo sapiens
ctacataatggagat

SEQ ID NO: 644143 - DNA, 15 bp, Homo sapiens
tacataatggagata

SEQ ID NO: 644144 - DNA, 15 bp, Homo sapiens
acataatggagatag

SEQ ID NO: 644145 - DNA, 15 bp, Homo sapiens
cataatggagatagt

SEQ ID NO: 644146 - DNA, 15 bp, Homo sapiens
ataatggagatagta

SEQ ID NO: 644147 - DNA, 15 bp, Homo sapiens
taatggagatagtaa

SEQ ID NO: 644148 - DNA, 15 bp, Homo sapiens
aatggagatagtaag

SEQ ID NO: 644149 - DNA, 15 bp, Homo sapiens
atggagatagtaagg

SEQ ID NO: 644150 - DNA, 15 bp, Homo sapiens
tggagatagtaaggc

SEQ ID NO: 644151 - DNA, 15 bp, Homo sapiens
ggagatagtaaggcc

SEQ ID NO: 644152 - DNA, 15 bp, Homo sapiens
gagatagtaaggcct

SEQ ID NO: 644153 - DNA, 15 bp, Homo sapiens
agatagtaaggcctg

SEQ ID NO: 644154 - DNA, 15 bp, Homo sapiens
gatagtaaggcctgc

SEQ ID NO: 644155 - DNA, 15 bp, Homo sapiens
atagtaaggcctgcc

SEQ ID NO: 644156 - DNA, 15 bp, Homo sapiens
tagtaaggcctgcca

SEQ ID NO: 644157 - DNA, 15 bp, Homo sapiens
agtaaggcctgccac

SEQ ID NO: 644158 - DNA, 15 bp, Homo sapiens
gtaaggcctgccaca

SEQ ID NO: 644159 - DNA, 15 bp, Homo sapiens
taaggcctgccacac

SEQ ID NO: 644160 - DNA, 15 bp, Homo sapiens
aaggcctgccacacc

SEQ ID NO: 644161 - DNA, 15 bp, Homo sapiens
aggcctgccacacct

SEQ ID NO: 644162 - DNA, 15 bp, Homo sapiens
ggcctgccacacctc

SEQ ID NO: 644163 - DNA, 15 bp, Homo sapiens
gcctgccacacctct

SEQ ID NO: 644164 - DNA, 15 bp, Homo sapiens
cctgccacacctctc

SEQ ID NO: 644165 - DNA, 15 bp, Homo sapiens
ctgccacacctctct

SEQ ID NO: 644166 - DNA, 15 bp, Homo sapiens
tgccacacctctctc

SEQ ID NO: 644167 - DNA, 15 bp, Homo sapiens
gccacacctctctca

SEQ ID NO: 644168 - DNA, 15 bp, Homo sapiens
ccacacctctctcat

SEQ ID NO: 644169 - DNA, 15 bp, Homo sapiens
cacacctctctcata

SEQ ID NO: 644170 - DNA, 15 bp, Homo sapiens
acacctctctcataa

SEQ ID NO: 644171 - DNA, 15 bp, Homo sapiens
cacctctctcataaa

SEQ ID NO: 644172 - DNA, 15 bp, Homo sapiens
acctctctcataaaa

SEQ ID NO: 644173 - DNA, 15 bp, Homo sapiens
cctctctcataaaat

SEQ ID NO: 644174 - DNA, 15 bp, Homo sapiens
ctctctcataaaatt

SEQ ID NO: 644175 - DNA, 15 bp, Homo sapiens
tctctcataaaatta

SEQ ID NO: 644176 - DNA, 15 bp, Homo sapiens
ctctcataaaattat

SEQ ID NO: 644177 - DNA, 15 bp, Homo sapiens
tctcataaaattatg

SEQ ID NO: 644178 - DNA, 15 bp, Homo sapiens
ctcataaaattatgt

SEQ ID NO: 644179 - DNA, 15 bp, Homo sapiens
tcataaaattatgtt

SEQ ID NO: 644180 - DNA, 15 bp, Homo sapiens
cataaaattatgttg

SEQ ID NO: 644181 - DNA, 15 bp, Homo sapiens
ataaaattatgttga

SEQ ID NO: 644182 - DNA, 15 bp, Homo sapiens
taaaattatgttgaa

SEQ ID NO: 644183 - DNA, 15 bp, Homo sapiens
aaaattatgttgaaa

SEQ ID NO: 644184 - DNA, 15 bp, Homo sapiens
aaattatgttgaaac

SEQ ID NO: 644185 - DNA, 15 bp, Homo sapiens
aattatgttgaaact

SEQ ID NO: 644186 - DNA, 15 bp, Homo sapiens
attatgttgaaacta

SEQ ID NO: 644187 - DNA, 15 bp, Homo sapiens
ttatgttgaaactaa

SEQ ID NO: 644188 - DNA, 15 bp, Homo sapiens
tatgttgaaactaaa

SEQ ID NO: 644189 - DNA, 15 bp, Homo sapiens
atgttgaaactaaaa

SEQ ID NO: 644190 - DNA, 15 bp, Homo sapiens
tgttgaaactaaaat

SEQ ID NO: 644191 - DNA, 15 bp, Homo sapiens
gttgaaactaaaata

SEQ ID NO: 644192 - DNA, 15 bp, Homo sapiens
ttgaaactaaaatag

SEQ ID NO: 644193 - DNA, 15 bp, Homo sapiens
tgaaactaaaatagc

SEQ ID NO: 644194 - DNA, 15 bp, Homo sapiens
gaaactaaaatagca

SEQ ID NO: 644195 - DNA, 15 bp, Homo sapiens
aaactaaaatagcat

SEQ ID NO: 644196 - DNA, 15 bp, Homo sapiens
aactaaaatagcata

SEQ ID NO: 644197 - DNA, 15 bp, Homo sapiens
actaaaatagcataa

SEQ ID NO: 644198 - DNA, 15 bp, Homo sapiens
ctaaaatagcataaa

SEQ ID NO: 644199 - DNA, 15 bp, Homo sapiens
taaaatagcataaat

SEQ ID NO: 644200 - DNA, 15 bp, Homo sapiens
aaaatagcataaata

SEQ ID NO: 644201 - DNA, 15 bp, Homo sapiens
aaatagcataaataa

SEQ ID NO: 644202 - DNA, 15 bp, Homo sapiens
aatagcataaataaa

SEQ ID NO: 644203 - DNA, 15 bp, Homo sapiens
atagcataaataaaa

SEQ ID NO: 644204 - DNA, 15 bp, Homo sapiens
tagcataaataaaaa

SEQ ID NO: 644205 - DNA, 15 bp, Homo sapiens
agcataaataaaaat

SEQ ID NO: 644206 - DNA, 15 bp, Homo sapiens
gcataaataaaaatg

SEQ ID NO: 644207 - DNA, 15 bp, Homo sapiens
cataaataaaaatgt

SEQ ID NO: 644208 - DNA, 15 bp, Homo sapiens
ataaataaaaatgtc

SEQ ID NO: 644209 - DNA, 15 bp, Homo sapiens
taaataaaaatgtca

SEQ ID NO: 644210 - DNA, 15 bp, Homo sapiens
aaataaaaatgtcaa

SEQ ID NO: 644211 - DNA, 15 bp, Homo sapiens
aataaaaatgtcaaa

SEQ ID NO: 644212 - DNA, 15 bp, Homo sapiens
ataaaaatgtcaaaa

SEQ ID NO: 644213 - DNA, 15 bp, Homo sapiens
taaaaatgtcaaaaa

SEQ ID NO: 644214 - DNA, 15 bp, Homo sapiens
aaaaatgtcaaaaaa

SEQ ID NO: 644215 - DNA, 15 bp, Homo sapiens
aaaatgtcaaaaaat

SEQ ID NO: 644216 - DNA, 15 bp, Homo sapiens
aaatgtcaaaaaata

SEQ ID NO: 644217 - DNA, 15 bp, Homo sapiens
aatgtcaaaaaatat

SEQ ID NO: 644218 - DNA, 15 bp, Homo sapiens
atgtcaaaaaatatc

SEQ ID NO: 644219 - DNA, 15 bp, Homo sapiens
tgtcaaaaaatatcc

SEQ ID NO: 644220 - DNA, 15 bp, Homo sapiens
gtcaaaaaatatccc

SEQ ID NO: 644221 - DNA, 15 bp, Homo sapiens
tcaaaaaatatccca

SEQ ID NO: 644222 - DNA, 15 bp, Homo sapiens
caaaaaatatcccat

SEQ ID NO: 644223 - DNA, 15 bp, Homo sapiens
aaaaaatatcccata

SEQ ID NO: 644224 - DNA, 15 bp, Homo sapiens
aaaaatatcccataa

SEQ ID NO: 644225 - DNA, 15 bp, Homo sapiens
aaaatatcccataat

SEQ ID NO: 644226 - DNA, 15 bp, Homo sapiens
aaatatcccataatt

SEQ ID NO: 644227 - DNA, 15 bp, Homo sapiens
aatatcccataattt

SEQ ID NO: 644228 - DNA, 15 bp, Homo sapiens
atatcccataatttt

SEQ ID NO: 644229 - DNA, 15 bp, Homo sapiens
tatcccataattttt

SEQ ID NO: 644230 - DNA, 15 bp, Homo sapiens
atcccataatttttg

SEQ ID NO: 644231 - DNA, 15 bp, Homo sapiens
tcccataatttttgc

SEQ ID NO: 644232 - DNA, 15 bp, Homo sapiens
cccataatttttgct

SEQ ID NO: 644233 - DNA, 15 bp, Homo sapiens
ccataatttttgcta

SEQ ID NO: 644234 - DNA, 15 bp, Homo sapiens
cataatttttgctaa

SEQ ID NO: 644235 - DNA, 15 bp, Homo sapiens
ataatttttgctaaa

SEQ ID NO: 644236 - DNA, 15 bp, Homo sapiens
taatttttgctaaac

SEQ ID NO: 644237 - DNA, 15 bp, Homo sapiens
aatttttgctaaact

SEQ ID NO: 644238 - DNA, 15 bp, Homo sapiens
atttttgctaaactt

SEQ ID NO: 644239 - DNA, 15 bp, Homo sapiens
tttttgctaaacttc

SEQ ID NO: 644240 - DNA, 15 bp, Homo sapiens
ttttgctaaacttct

SEQ ID NO: 644241 - DNA, 15 bp, Homo sapiens
tttgctaaacttctt

SEQ ID NO: 644242 - DNA, 15 bp, Homo sapiens
ttgctaaacttcttg

SEQ ID NO: 644243 - DNA, 15 bp, Homo sapiens
tgctaaacttcttgc

SEQ ID NO: 644244 - DNA, 15 bp, Homo sapiens
gctaaacttcttgcc

SEQ ID NO: 644245 - DNA, 15 bp, Homo sapiens
ctaaacttcttgcct

SEQ ID NO: 644246 - DNA, 15 bp, Homo sapiens
taaacttcttgcctt

SEQ ID NO: 644247 - DNA, 15 bp, Homo sapiens
aaacttcttgccttc

SEQ ID NO: 644248 - DNA, 15 bp, Homo sapiens
aacttcttgccttcc

SEQ ID NO: 644249 - DNA, 15 bp, Homo sapiens
acttcttgccttcct

SEQ ID NO: 644250 - DNA, 15 bp, Homo sapiens
cttcttgccttcctt

SEQ ID NO: 644251 - DNA, 15 bp, Homo sapiens
ttcttgccttcctta

SEQ ID NO: 644252 - DNA, 15 bp, Homo sapiens
tcttgccttccttat

SEQ ID NO: 644253 - DNA, 15 bp, Homo sapiens
cttgccttccttatc

SEQ ID NO: 644254 - DNA, 15 bp, Homo sapiens
ttgccttccttatcc

SEQ ID NO: 644255 - DNA, 15 bp, Homo sapiens
tgccttccttatcca

SEQ ID NO: 644256 - DNA, 15 bp, Homo sapiens
gccttccttatccaa

SEQ ID NO: 644257 - DNA, 15 bp, Homo sapiens
ccttccttatccaat

SEQ ID NO: 644258 - DNA, 15 bp, Homo sapiens
cttccttatccaatt

SEQ ID NO: 644259 - DNA, 15 bp, Homo sapiens
ttccttatccaattt

SEQ ID NO: 644260 - DNA, 15 bp, Homo sapiens
tccttatccaatttc

SEQ ID NO: 644261 - DNA, 15 bp, Homo sapiens
ccttatccaatttcc

SEQ ID NO: 644262 - DNA, 15 bp, Homo sapiens
cttatccaatttcct

SEQ ID NO: 644263 - DNA, 15 bp, Homo sapiens
ttatccaatttcctc

SEQ ID NO: 644264 - DNA, 15 bp, Homo sapiens
tatccaatttcctca

SEQ ID NO: 644265 - DNA, 15 bp, Homo sapiens
atccaatttcctcag

SEQ ID NO: 644266 - DNA, 15 bp, Homo sapiens
tccaatttcctcagg

SEQ ID NO: 644267 - DNA, 15 bp, Homo sapiens
ccaatttcctcagga

SEQ ID NO: 644268 - DNA, 15 bp, Homo sapiens
caatttcctcaggaa

SEQ ID NO: 644269 - DNA, 15 bp, Homo sapiens
aatttcctcaggaac

SEQ ID NO: 644270 - DNA, 15 bp, Homo sapiens
atttcctcaggaaca

SEQ ID NO: 644271 - DNA, 15 bp, Homo sapiens
tttcctcaggaacat

SEQ ID NO: 644272 - DNA, 15 bp, Homo sapiens
ttcctcaggaacatg

SEQ ID NO: 644273 - DNA, 15 bp, Homo sapiens
tcctcaggaacatgg

SEQ ID NO: 644274 - DNA, 15 bp, Homo sapiens
cctcaggaacatgga

SEQ ID NO: 644275 - DNA, 15 bp, Homo sapiens
ctcaggaacatggac

SEQ ID NO: 644276 - DNA, 15 bp, Homo sapiens
tcaggaacatggacg

SEQ ID NO: 644277 - DNA, 15 bp, Homo sapiens
caggaacatggacgt

SEQ ID NO: 644278 - DNA, 15 bp, Homo sapiens
aggaacatggacgtt

SEQ ID NO: 644279 - DNA, 15 bp, Homo sapiens
ggaacatggacgttt

SEQ ID NO: 644280 - DNA, 15 bp, Homo sapiens
gaacatggacgtttt

SEQ ID NO: 644281 - DNA, 15 bp, Homo sapiens
aacatggacgttttg

SEQ ID NO: 644282 - DNA, 15 bp, Homo sapiens
acatggacgttttgt

SEQ ID NO: 644283 - DNA, 15 bp, Homo sapiens
catggacgttttgtt

SEQ ID NO: 644284 - DNA, 15 bp, Homo sapiens
atggacgttttgttc

SEQ ID NO: 644285 - DNA, 15 bp, Homo sapiens
tggacgttttgttct

SEQ ID NO: 644286 - DNA, 15 bp, Homo sapiens
ggacgttttgttctc

SEQ ID NO: 644287 - DNA, 15 bp, Homo sapiens
gacgttttgttctca

SEQ ID NO: 644288 - DNA, 15 bp, Homo sapiens
acgttttgttctcat

SEQ ID NO: 644289 - DNA, 15 bp, Homo sapiens
cgttttgttctcatt

SEQ ID NO: 644290 - DNA, 15 bp, Homo sapiens
gttttgttctcattt

SEQ ID NO: 644291 - DNA, 15 bp, Homo sapiens
ttttgttctcatttc

SEQ ID NO: 644292 - DNA, 15 bp, Homo sapiens
tttgttctcatttcg

SEQ ID NO: 644293 - DNA, 15 bp, Homo sapiens
ttgttctcatttcgt

SEQ ID NO: 644294 - DNA, 15 bp, Homo sapiens
tgttctcatttcgtg

SEQ ID NO: 644295 - DNA, 15 bp, Homo sapiens
gttctcatttcgtga

SEQ ID NO: 644296 - DNA, 15 bp, Homo sapiens
ttctcatttcgtgat

SEQ ID NO: 644297 - DNA, 15 bp, Homo sapiens
tctcatttcgtgatg

SEQ ID NO: 644298 - DNA, 15 bp, Homo sapiens
ctcatttcgtgatgg

SEQ ID NO: 644299 - DNA, 15 bp, Homo sapiens
tcatttcgtgatgga

SEQ ID NO: 644300 - DNA, 15 bp, Homo sapiens
catttcgtgatggag

SEQ ID NO: 644301 - DNA, 15 bp, Homo sapiens
atttcgtgatggaga

SEQ ID NO: 644302 - DNA, 15 bp, Homo sapiens
tttcgtgatggagac

SEQ ID NO: 644303 - DNA, 15 bp, Homo sapiens
ttcgtgatggagact

SEQ ID NO: 644304 - DNA, 15 bp, Homo sapiens
tcgtgatggagactg

SEQ ID NO: 644305 - DNA, 15 bp, Homo sapiens
cgtgatggagactgc

SEQ ID NO: 644306 - DNA, 15 bp, Homo sapiens
gtgatggagactgca

SEQ ID NO: 644307 - DNA, 15 bp, Homo sapiens
tgatggagactgcag

SEQ ID NO: 644308 - DNA, 15 bp, Homo sapiens
gatggagactgcagt

SEQ ID NO: 644309 - DNA, 15 bp, Homo sapiens
atggagactgcagta

SEQ ID NO: 644310 - DNA, 15 bp, Homo sapiens
tggagactgcagtaa

SEQ ID NO: 644311 - DNA, 15 bp, Homo sapiens
ggagactgcagtaaa

SEQ ID NO: 644312 - DNA, 15 bp, Homo sapiens
gagactgcagtaaag

SEQ ID NO: 644313 - DNA, 15 bp, Homo sapiens
agactgcagtaaagg

SEQ ID NO: 644314 - DNA, 15 bp, Homo sapiens
gactgcagtaaagga

SEQ ID NO: 644315 - DNA, 15 bp, Homo sapiens
actgcagtaaaggat

SEQ ID NO: 644316 - DNA, 15 bp, Homo sapiens
ctgcagtaaaggatt

SEQ ID NO: 644317 - DNA, 15 bp, Homo sapiens
tgcagtaaaggattc

SEQ ID NO: 644318 - DNA, 15 bp, Homo sapiens
gcagtaaaggattct

SEQ ID NO: 644319 - DNA, 15 bp, Homo sapiens
cagtaaaggattctt

SEQ ID NO: 644320 - DNA, 15 bp, Homo sapiens
agtaaaggattcttc

SEQ ID NO: 644321 - DNA, 15 bp, Homo sapiens
gtaaaggattcttcc

SEQ ID NO: 644322 - DNA, 15 bp, Homo sapiens
taaaggattcttcct

SEQ ID NO: 644323 - DNA, 15 bp, Homo sapiens
aaaggattcttcctg

SEQ ID NO: 644324 - DNA, 15 bp, Homo sapiens
aaggattcttcctgg

SEQ ID NO: 644325 - DNA, 15 bp, Homo sapiens
aggattcttcctggt

SEQ ID NO: 644326 - DNA, 15 bp, Homo sapiens
ggattcttcctggtc

SEQ ID NO: 644327 - DNA, 15 bp, Homo sapiens
gattcttcctggtct

SEQ ID NO: 644328 - DNA, 15 bp, Homo sapiens
attcttcctggtctc

SEQ ID NO: 644329 - DNA, 15 bp, Homo sapiens
ttcttcctggtctct

SEQ ID NO: 644330 - DNA, 15 bp, Homo sapiens
tcttcctggtctctc

SEQ ID NO: 644331 - DNA, 15 bp, Homo sapiens
cttcctggtctctct

SEQ ID NO: 644332 - DNA, 15 bp, Homo sapiens
ttcctggtctctcta

SEQ ID NO: 644333 - DNA, 15 bp, Homo sapiens
tcctggtctctctat

SEQ ID NO: 644334 - DNA, 15 bp, Homo sapiens
cctggtctctctatt

SEQ ID NO: 644335 - DNA, 15 bp, Homo sapiens
ctggtctctctattg

SEQ ID NO: 644336 - DNA, 15 bp, Homo sapiens
tggtctctctattgg

SEQ ID NO: 644337 - DNA, 15 bp, Homo sapiens
ggtctctctattggt

SEQ ID NO: 644338 - DNA, 15 bp, Homo sapiens
gtctctctattggtg

SEQ ID NO: 644339 - DNA, 15 bp, Homo sapiens
tctctctattggtgg

SEQ ID NO: 644340 - DNA, 15 bp, Homo sapiens
ctctctattggtgga

SEQ ID NO: 644341 - DNA, 15 bp, Homo sapiens
tctctattggtggaa

SEQ ID NO: 644342 - DNA, 15 bp, Homo sapiens
ctctattggtggaaa

SEQ ID NO: 644343 - DNA, 15 bp, Homo sapiens
tctattggtggaaat

SEQ ID NO: 644344 - DNA, 15 bp, Homo sapiens
ctattggtggaaata

SEQ ID NO: 644345 - DNA, 15 bp, Homo sapiens
tattggtggaaatag

SEQ ID NO: 644346 - DNA, 15 bp, Homo sapiens
attggtggaaatagc

SEQ ID NO: 644347 - DNA, 15 bp, Homo sapiens
ttggtggaaatagca

SEQ ID NO: 644348 - DNA, 15 bp, Homo sapiens
tggtggaaatagcag

SEQ ID NO: 644349 - DNA, 15 bp, Homo sapiens
ggtggaaatagcagc

SEQ ID NO: 644350 - DNA, 15 bp, Homo sapiens
gtggaaatagcagct

SEQ ID NO: 644351 - DNA, 15 bp, Homo sapiens
tggaaatagcagctg

SEQ ID NO: 644352 - DNA, 15 bp, Homo sapiens
ggaaatagcagctgc

SEQ ID NO: 644353 - DNA, 15 bp, Homo sapiens
gaaatagcagctgct

SEQ ID NO: 644354 - DNA, 15 bp, Homo sapiens
aaatagcagctgctt

SEQ ID NO: 644355 - DNA, 15 bp, Homo sapiens
aatagcagctgcttc

SEQ ID NO: 644356 - DNA, 15 bp, Homo sapiens
atagcagctgcttct

SEQ ID NO: 644357 - DNA, 15 bp, Homo sapiens
tagcagctgcttctg

SEQ ID NO: 644358 - DNA, 15 bp, Homo sapiens
agcagctgcttctgc

SEQ ID NO: 644359 - DNA, 15 bp, Homo sapiens
gcagctgcttctgca

SEQ ID NO: 644360 - DNA, 15 bp, Homo sapiens
cagctgcttctgcaa

SEQ ID NO: 644361 - DNA, 15 bp, Homo sapiens
agctgcttctgcaat

SEQ ID NO: 644362 - DNA, 15 bp, Homo sapiens
gctgcttctgcaatc

SEQ ID NO: 644363 - DNA, 15 bp, Homo sapiens
ctgcttctgcaatca

SEQ ID NO: 644364 - DNA, 15 bp, Homo sapiens
tgcttctgcaatcaa

SEQ ID NO: 644365 - DNA, 15 bp, Homo sapiens
gcttctgcaatcaaa

SEQ ID NO: 644366 - DNA, 15 bp, Homo sapiens
cttctgcaatcaaag

SEQ ID NO: 644367 - DNA, 15 bp, Homo sapiens
ttctgcaatcaaagt

SEQ ID NO: 644368 - DNA, 15 bp, Homo sapiens
tctgcaatcaaagta

SEQ ID NO: 644369 - DNA, 15 bp, Homo sapiens
ctgcaatcaaagtac

SEQ ID NO: 644370 - DNA, 15 bp, Homo sapiens
tgcaatcaaagtacg

SEQ ID NO: 644371 - DNA, 15 bp, Homo sapiens
gcaatcaaagtacgt

SEQ ID NO: 644372 - DNA, 15 bp, Homo sapiens
caatcaaagtacgtc

SEQ ID NO: 644373 - DNA, 15 bp, Homo sapiens
aatcaaagtacgtct

SEQ ID NO: 644374 - DNA, 15 bp, Homo sapiens
atcaaagtacgtcta

SEQ ID NO: 644375 - DNA, 15 bp, Homo sapiens
tcaaagtacgtctat

SEQ ID NO: 644376 - DNA, 15 bp, Homo sapiens
caaagtacgtctatc

SEQ ID NO: 644377 - DNA, 15 bp, Homo sapiens
aaagtacgtctatcc

SEQ ID NO: 644378 - DNA, 15 bp, Homo sapiens
aagtacgtctatcct

SEQ ID NO: 644379 - DNA, 15 bp, Homo sapiens
agtacgtctatcctc

SEQ ID NO: 644380 - DNA, 15 bp, Homo sapiens
gtacgtctatcctca

SEQ ID NO: 644381 - DNA, 15 bp, Homo sapiens
tacgtctatcctcac

SEQ ID NO: 644382 - DNA, 15 bp, Homo sapiens
acgtctatcctcact

SEQ ID NO: 644383 - DNA, 15 bp, Homo sapiens
cgtctatcctcactt

SEQ ID NO: 644384 - DNA, 15 bp, Homo sapiens
gtctatcctcacttc

SEQ ID NO: 644385 - DNA, 15 bp, Homo sapiens
tctatcctcacttca

SEQ ID NO: 644386 - DNA, 15 bp, Homo sapiens
ctatcctcacttcaa

SEQ ID NO: 644387 - DNA, 15 bp, Homo sapiens
tatcctcacttcaaa

SEQ ID NO: 644388 - DNA, 15 bp, Homo sapiens
atcctcacttcaaaa

SEQ ID NO: 644389 - DNA, 15 bp, Homo sapiens
tcctcacttcaaaat

SEQ ID NO: 644390 - DNA, 15 bp, Homo sapiens
cctcacttcaaaatt

SEQ ID NO: 644391 - DNA, 15 bp, Homo sapiens
ctcacttcaaaattt

SEQ ID NO: 644392 - DNA, 15 bp, Homo sapiens
tcacttcaaaattta

SEQ ID NO: 644393 - DNA, 15 bp, Homo sapiens
cacttcaaaatttat

SEQ ID NO: 644394 - DNA, 15 bp, Homo sapiens
acttcaaaatttata

SEQ ID NO: 644395 - DNA, 15 bp, Homo sapiens
cttcaaaatttatat

SEQ ID NO: 644396 - DNA, 15 bp, Homo sapiens
ttcaaaatttatatg

SEQ ID NO: 644397 - DNA, 15 bp, Homo sapiens
tcaaaatttatatgt

SEQ ID NO: 644398 - DNA, 15 bp, Homo sapiens
caaaatttatatgtc

SEQ ID NO: 644399 - DNA, 15 bp, Homo sapiens
aaaatttatatgtca

SEQ ID NO: 644400 - DNA, 15 bp, Homo sapiens
aaatttatatgtcaa

SEQ ID NO: 644401 - DNA, 15 bp, Homo sapiens
aatttatatgtcaat

SEQ ID NO: 644402 - DNA, 15 bp, Homo sapiens
atttatatgtcaatt

SEQ ID NO: 644403 - DNA, 15 bp, Homo sapiens
tttatatgtcaattt

SEQ ID NO: 644404 - DNA, 15 bp, Homo sapiens
ttatatgtcaattta

SEQ ID NO: 644405 - DNA, 15 bp, Homo sapiens
tatatgtcaatttac

SEQ ID NO: 644406 - DNA, 15 bp, Homo sapiens
atatgtcaatttacg

SEQ ID NO: 644407 - DNA, 15 bp, Homo sapiens
tatgtcaatttacgt

SEQ ID NO: 644408 - DNA, 15 bp, Homo sapiens
atgtcaatttacgta

SEQ ID NO: 644409 - DNA, 15 bp, Homo sapiens
tgtcaatttacgtaa

SEQ ID NO: 644410 - DNA, 15 bp, Homo sapiens
gtcaatttacgtaag

SEQ ID NO: 644411 - DNA, 15 bp, Homo sapiens
tcaatttacgtaagc

SEQ ID NO: 644412 - DNA, 15 bp, Homo sapiens
caatttacgtaagca

SEQ ID NO: 644413 - DNA, 15 bp, Homo sapiens
aatttacgtaagcag

SEQ ID NO: 644414 - DNA, 15 bp, Homo sapiens
atttacgtaagcaga

SEQ ID NO: 644415 - DNA, 15 bp, Homo sapiens
tttacgtaagcagag

SEQ ID NO: 644416 - DNA, 15 bp, Homo sapiens
ttacgtaagcagagc

SEQ ID NO: 644417 - DNA, 15 bp, Homo sapiens
tacgtaagcagagca

SEQ ID NO: 644418 - DNA, 15 bp, Homo sapiens
acgtaagcagagcaa

SEQ ID NO: 644419 - DNA, 15 bp, Homo sapiens
cgtaagcagagcaat

SEQ ID NO: 644420 - DNA, 15 bp, Homo sapiens
gtaagcagagcaatc

SEQ ID NO: 644421 - DNA, 15 bp, Homo sapiens
taagcagagcaatca

SEQ ID NO: 644422 - DNA, 15 bp, Homo sapiens
aagcagagcaatcac

SEQ ID NO: 644423 - DNA, 15 bp, Homo sapiens
agcagagcaatcact

SEQ ID NO: 644424 - DNA, 15 bp, Homo sapiens
gcagagcaatcactt

SEQ ID NO: 644425 - DNA, 15 bp, Homo sapiens
cagagcaatcacttc

SEQ ID NO: 644426 - DNA, 15 bp, Homo sapiens
agagcaatcacttcg

SEQ ID NO: 644427 - DNA, 15 bp, Homo sapiens
gagcaatcacttcgg

SEQ ID NO: 644428 - DNA, 15 bp, Homo sapiens
agcaatcacttcgga

SEQ ID NO: 644429 - DNA, 15 bp, Homo sapiens
gcaatcacttcggag

SEQ ID NO: 644430 - DNA, 15 bp, Homo sapiens
caatcacttcggagc

SEQ ID NO: 644431 - DNA, 15 bp, Homo sapiens
aatcacttcggagcc

SEQ ID NO: 644432 - DNA, 15 bp, Homo sapiens
atcacttcggagcct

SEQ ID NO: 644433 - DNA, 15 bp, Homo sapiens
tcacttcggagccta

SEQ ID NO: 644434 - DNA, 15 bp, Homo sapiens
cacttcggagcctaa

SEQ ID NO: 644435 - DNA, 15 bp, Homo sapiens
acttcggagcctaaa

SEQ ID NO: 644436 - DNA, 15 bp, Homo sapiens
cttcggagcctaaac

SEQ ID NO: 644437 - DNA, 15 bp, Homo sapiens
ttcggagcctaaact

SEQ ID NO: 644438 - DNA, 15 bp, Homo sapiens
tcggagcctaaacta

SEQ ID NO: 644439 - DNA, 15 bp, Homo sapiens
cggagcctaaactat

SEQ ID NO: 644440 - DNA, 15 bp, Homo sapiens
ggagcctaaactata

SEQ ID NO: 644441 - DNA, 15 bp, Homo sapiens
gagcctaaactatac

SEQ ID NO: 644442 - DNA, 15 bp, Homo sapiens
agcctaaactatact

SEQ ID NO: 644443 - DNA, 15 bp, Homo sapiens
gcctaaactatacta

SEQ ID NO: 644444 - DNA, 15 bp, Homo sapiens
cctaaactatactaa

SEQ ID NO: 644445 - DNA, 15 bp, Homo sapiens
ctaaactatactaag

SEQ ID NO: 644446 - DNA, 15 bp, Homo sapiens
taaactatactaagc

SEQ ID NO: 644447 - DNA, 15 bp, Homo sapiens
aaactatactaagca

SEQ ID NO: 644448 - DNA, 15 bp, Homo sapiens
aactatactaagcat

SEQ ID NO: 644449 - DNA, 15 bp, Homo sapiens
actatactaagcatg

SEQ ID NO: 644450 - DNA, 15 bp, Homo sapiens
ctatactaagcatga

SEQ ID NO: 644451 - DNA, 15 bp, Homo sapiens
tatactaagcatgag

SEQ ID NO: 644452 - DNA, 15 bp, Homo sapiens
atactaagcatgagt

SEQ ID NO: 644453 - DNA, 15 bp, Homo sapiens
tactaagcatgagtt

SEQ ID NO: 644454 - DNA, 15 bp, Homo sapiens
actaagcatgagtta

SEQ ID NO: 644455 - DNA, 15 bp, Homo sapiens
ctaagcatgagttaa

SEQ ID NO: 644456 - DNA, 15 bp, Homo sapiens
taagcatgagttaac

SEQ ID NO: 644457 - DNA, 15 bp, Homo sapiens
aagcatgagttaact

SEQ ID NO: 644458 - DNA, 15 bp, Homo sapiens
agcatgagttaactt

SEQ ID NO: 644459 - DNA, 15 bp, Homo sapiens
gcatgagttaacttt

SEQ ID NO: 644460 - DNA, 15 bp, Homo sapiens
catgagttaacttta

SEQ ID NO: 644461 - DNA, 15 bp, Homo sapiens
atgagttaactttat

SEQ ID NO: 644462 - DNA, 15 bp, Homo sapiens
tgagttaactttatc

SEQ ID NO: 644463 - DNA, 15 bp, Homo sapiens
gagttaactttatcc

SEQ ID NO: 644464 - DNA, 15 bp, Homo sapiens
agttaactttatcct

SEQ ID NO: 644465 - DNA, 15 bp, Homo sapiens
gttaactttatcctt

SEQ ID NO: 644466 - DNA, 15 bp, Homo sapiens
ttaactttatcctta

SEQ ID NO: 644467 - DNA, 15 bp, Homo sapiens
taactttatccttaa

SEQ ID NO: 644468 - DNA, 15 bp, Homo sapiens
aactttatccttaac

SEQ ID NO: 644469 - DNA, 15 bp, Homo sapiens
actttatccttaaca

SEQ ID NO: 644470 - DNA, 15 bp, Homo sapiens
ctttatccttaacaa

SEQ ID NO: 644471 - DNA, 15 bp, Homo sapiens
tttatccttaacaag

SEQ ID NO: 644472 - DNA, 15 bp, Homo sapiens
ttatccttaacaagt

SEQ ID NO: 644473 - DNA, 15 bp, Homo sapiens
tatccttaacaagta

SEQ ID NO: 644474 - DNA, 15 bp, Homo sapiens
atccttaacaagtac

SEQ ID NO: 644475 - DNA, 15 bp, Homo sapiens
tccttaacaagtaca

SEQ ID NO: 644476 - DNA, 15 bp, Homo sapiens
ccttaacaagtacaa

SEQ ID NO: 644477 - DNA, 15 bp, Homo sapiens
cttaacaagtacaac

SEQ ID NO: 644478 - DNA, 15 bp, Homo sapiens
ttaacaagtacaaca

SEQ ID NO: 644479 - DNA, 15 bp, Homo sapiens
taacaagtacaacat

SEQ ID NO: 644480 - DNA, 15 bp, Homo sapiens
aacaagtacaacatg

SEQ ID NO: 644481 - DNA, 15 bp, Homo sapiens
acaagtacaacatgg

SEQ ID NO: 644482 - DNA, 15 bp, Homo sapiens
caagtacaacatggg

SEQ ID NO: 644483 - DNA, 15 bp, Homo sapiens
aagtacaacatggga

SEQ ID NO: 644484 - DNA, 15 bp, Homo sapiens
agtacaacatgggat

SEQ ID NO: 644485 - DNA, 15 bp, Homo sapiens
gtacaacatgggatc

SEQ ID NO: 644486 - DNA, 15 bp, Homo sapiens
tacaacatgggatca

SEQ ID NO: 644487 - DNA, 15 bp, Homo sapiens
acaacatgggatcat

SEQ ID NO: 644488 - DNA, 15 bp, Homo sapiens
caacatgggatcatt

SEQ ID NO: 644489 - DNA, 15 bp, Homo sapiens
aacatgggatcattt

SEQ ID NO: 644490 - DNA, 15 bp, Homo sapiens
acatgggatcattta

SEQ ID NO: 644491 - DNA, 15 bp, Homo sapiens
catgggatcatttaa

SEQ ID NO: 644492 - DNA, 15 bp, Homo sapiens
atgggatcatttaat

SEQ ID NO: 644493 - DNA, 15 bp, Homo sapiens
tgggatcatttaatt

SEQ ID NO: 644494 - DNA, 15 bp, Homo sapiens
gggatcatttaattg

SEQ ID NO: 644495 - DNA, 15 bp, Homo sapiens
ggatcatttaattgg

SEQ ID NO: 644496 - DNA, 15 bp, Homo sapiens
gatcatttaattggg

SEQ ID NO: 644497 - DNA, 15 bp, Homo sapiens
atcatttaattgggg

SEQ ID NO: 644498 - DNA, 15 bp, Homo sapiens
tcatttaattggggg

SEQ ID NO: 644499 - DNA, 15 bp, Homo sapiens
catttaattgggggt

SEQ ID NO: 644500 - DNA, 15 bp, Homo sapiens
atttaattgggggta

SEQ ID NO: 644501 - DNA, 15 bp, Homo sapiens
tttaattgggggtaa

SEQ ID NO: 644502 - DNA, 15 bp, Homo sapiens
ttaattgggggtaaa

SEQ ID NO: 644503 - DNA, 15 bp, Homo sapiens
taattgggggtaaag

SEQ ID NO: 644504 - DNA, 15 bp, Homo sapiens
aattgggggtaaagg

SEQ ID NO: 644505 - DNA, 15 bp, Homo sapiens
attgggggtaaagga

SEQ ID NO: 644506 - DNA, 15 bp, Homo sapiens
ttgggggtaaaggat

SEQ ID NO: 644507 - DNA, 15 bp, Homo sapiens
tgggggtaaaggatc

SEQ ID NO: 644508 - DNA, 15 bp, Homo sapiens
gggggtaaaggatca

SEQ ID NO: 644509 - DNA, 15 bp, Homo sapiens
ggggtaaaggatcaa

SEQ ID NO: 644510 - DNA, 15 bp, Homo sapiens
gggtaaaggatcaat

SEQ ID NO: 644511 - DNA, 15 bp, Homo sapiens
ggtaaaggatcaatt

SEQ ID NO: 644512 - DNA, 15 bp, Homo sapiens
gtaaaggatcaatta

SEQ ID NO: 644513 - DNA, 15 bp, Homo sapiens
taaaggatcaattat

SEQ ID NO: 644514 - DNA, 15 bp, Homo sapiens
aaaggatcaattatt

SEQ ID NO: 644515 - DNA, 15 bp, Homo sapiens
aaggatcaattattt

SEQ ID NO: 644516 - DNA, 15 bp, Homo sapiens
aggatcaattattta

SEQ ID NO: 644517 - DNA, 15 bp, Homo sapiens
ggatcaattatttat

SEQ ID NO: 644518 - DNA, 15 bp, Homo sapiens
gatcaattatttatt

SEQ ID NO: 644519 - DNA, 15 bp, Homo sapiens
atcaattatttattt

SEQ ID NO: 644520 - DNA, 15 bp, Homo sapiens
tcaattatttatttt

SEQ ID NO: 644521 - DNA, 15 bp, Homo sapiens
caattatttattttt

SEQ ID NO: 644522 - DNA, 15 bp, Homo sapiens
aattatttatttttg

SEQ ID NO: 644523 - DNA, 15 bp, Homo sapiens
attatttatttttgt

SEQ ID NO: 644524 - DNA, 15 bp, Homo sapiens
ttatttatttttgtg

SEQ ID NO: 644525 - DNA, 15 bp, Homo sapiens
tatttatttttgtgt

SEQ ID NO: 644526 - DNA, 15 bp, Homo sapiens
atttatttttgtgta

SEQ ID NO: 644527 - DNA, 15 bp, Homo sapiens
tttatttttgtgtat

SEQ ID NO: 644528 - DNA, 15 bp, Homo sapiens
ttatttttgtgtatt

SEQ ID NO: 644529 - DNA, 15 bp, Homo sapiens
tatttttgtgtatta

SEQ ID NO: 644530 - DNA, 15 bp, Homo sapiens
atttttgtgtattac

SEQ ID NO: 644531 - DNA, 15 bp, Homo sapiens
tttttgtgtattacc

SEQ ID NO: 644532 - DNA, 15 bp, Homo sapiens
ttttgtgtattacct

SEQ ID NO: 644533 - DNA, 15 bp, Homo sapiens
tttgtgtattaccta

SEQ ID NO: 644534 - DNA, 15 bp, Homo sapiens
ttgtgtattacctaa

SEQ ID NO: 644535 - DNA, 15 bp, Homo sapiens
tgtgtattacctaaa

SEQ ID NO: 644536 - DNA, 15 bp, Homo sapiens
gtgtattacctaaaa

SEQ ID NO: 644537 - DNA, 15 bp, Homo sapiens
tgtattacctaaaat

SEQ ID NO: 644538 - DNA, 15 bp, Homo sapiens
gtattacctaaaata

SEQ ID NO: 644539 - DNA, 15 bp, Homo sapiens
tattacctaaaatat

SEQ ID NO: 644540 - DNA, 15 bp, Homo sapiens
attacctaaaatata

SEQ ID NO: 644541 - DNA, 15 bp, Homo sapiens
ttacctaaaatataa

SEQ ID NO: 644542 - DNA, 15 bp, Homo sapiens
tacctaaaatataaa

SEQ ID NO: 644543 - DNA, 15 bp, Homo sapiens
acctaaaatataaaa

SEQ ID NO: 644544 - DNA, 15 bp, Homo sapiens
cctaaaatataaaat

SEQ ID NO: 644545 - DNA, 15 bp, Homo sapiens
ctaaaatataaaatc

SEQ ID NO: 644546 - DNA, 15 bp, Homo sapiens
taaaatataaaatct

SEQ ID NO: 644547 - DNA, 15 bp, Homo sapiens
aaaatataaaatctc

SEQ ID NO: 644548 - DNA, 15 bp, Homo sapiens
aaatataaaatctca

SEQ ID NO: 644549 - DNA, 15 bp, Homo sapiens
aatataaaatctcag

SEQ ID NO: 644550 - DNA, 15 bp, Homo sapiens
atataaaatctcaga

SEQ ID NO: 644551 - DNA, 15 bp, Homo sapiens
tataaaatctcagag

SEQ ID NO: 644552 - DNA, 15 bp, Homo sapiens
ataaaatctcagagc

SEQ ID NO: 644553 - DNA, 15 bp, Homo sapiens
taaaatctcagagcc

SEQ ID NO: 644554 - DNA, 15 bp, Homo sapiens
aaaatctcagagcca

SEQ ID NO: 644555 - DNA, 15 bp, Homo sapiens
aaatctcagagccat

SEQ ID NO: 644556 - DNA, 15 bp, Homo sapiens
aatctcagagccata

SEQ ID NO: 644557 - DNA, 15 bp, Homo sapiens
atctcagagccatat

SEQ ID NO: 644558 - DNA, 15 bp, Homo sapiens
tctcagagccatata

SEQ ID NO: 644559 - DNA, 15 bp, Homo sapiens
ctcagagccatatac

SEQ ID NO: 644560 - DNA, 15 bp, Homo sapiens
tcagagccatatact

SEQ ID NO: 644561 - DNA, 15 bp, Homo sapiens
cagagccatatactt

SEQ ID NO: 644562 - DNA, 15 bp, Homo sapiens
agagccatatactta

SEQ ID NO: 644563 - DNA, 15 bp, Homo sapiens
gagccatatacttaa

SEQ ID NO: 644564 - DNA, 15 bp, Homo sapiens
agccatatacttaaa

SEQ ID NO: 644565 - DNA, 15 bp, Homo sapiens
gccatatacttaaaa

SEQ ID NO: 644566 - DNA, 15 bp, Homo sapiens
ccatatacttaaaat

SEQ ID NO: 644567 - DNA, 15 bp, Homo sapiens
catatacttaaaatc

SEQ ID NO: 644568 - DNA, 15 bp, Homo sapiens
atatacttaaaatcc

SEQ ID NO: 644569 - DNA, 15 bp, Homo sapiens
tatacttaaaatcca

SEQ ID NO: 644570 - DNA, 15 bp, Homo sapiens
atacttaaaatccaa

SEQ ID NO: 644571 - DNA, 15 bp, Homo sapiens
tacttaaaatccaac

SEQ ID NO: 644572 - DNA, 15 bp, Homo sapiens
acttaaaatccaact

SEQ ID NO: 644573 - DNA, 15 bp, Homo sapiens
cttaaaatccaactt

SEQ ID NO: 644574 - DNA, 15 bp, Homo sapiens
ttaaaatccaacttg

SEQ ID NO: 644575 - DNA, 15 bp, Homo sapiens
taaaatccaacttga

SEQ ID NO: 644576 - DNA, 15 bp, Homo sapiens
aaaatccaacttgaa

SEQ ID NO: 644577 - DNA, 15 bp, Homo sapiens
aaatccaacttgaaa

SEQ ID NO: 644578 - DNA, 15 bp, Homo sapiens
aatccaacttgaaac

SEQ ID NO: 644579 - DNA, 15 bp, Homo sapiens
atccaacttgaaacc

SEQ ID NO: 644580 - DNA, 15 bp, Homo sapiens
tccaacttgaaacct

SEQ ID NO: 644581 - DNA, 15 bp, Homo sapiens
ccaacttgaaacctc

SEQ ID NO: 644582 - DNA, 15 bp, Homo sapiens
caacttgaaacctct

SEQ ID NO: 644583 - DNA, 15 bp, Homo sapiens
aacttgaaacctctg

SEQ ID NO: 644584 - DNA, 15 bp, Homo sapiens
acttgaaacctctgt

SEQ ID NO: 644585 - DNA, 15 bp, Homo sapiens
cttgaaacctctgta

SEQ ID NO: 644586 - DNA, 15 bp, Homo sapiens
ttgaaacctctgtag

SEQ ID NO: 644587 - DNA, 15 bp, Homo sapiens
tgaaacctctgtagg

SEQ ID NO: 644588 - DNA, 15 bp, Homo sapiens
gaaacctctgtagga

SEQ ID NO: 644589 - DNA, 15 bp, Homo sapiens
aaacctctgtaggag

SEQ ID NO: 644590 - DNA, 15 bp, Homo sapiens
aacctctgtaggaga

SEQ ID NO: 644591 - DNA, 15 bp, Homo sapiens
acctctgtaggagat

SEQ ID NO: 644592 - DNA, 15 bp, Homo sapiens
cctctgtaggagata

SEQ ID NO: 644593 - DNA, 15 bp, Homo sapiens
ctctgtaggagataa

SEQ ID NO: 644594 - DNA, 15 bp, Homo sapiens
tctgtaggagataaa

SEQ ID NO: 644595 - DNA, 15 bp, Homo sapiens
ctgtaggagataaaa

SEQ ID NO: 644596 - DNA, 15 bp, Homo sapiens
tgtaggagataaaaa

SEQ ID NO: 644597 - DNA, 15 bp, Homo sapiens
gtaggagataaaaat

SEQ ID NO: 644598 - DNA, 15 bp, Homo sapiens
taggagataaaaatt

SEQ ID NO: 644599 - DNA, 15 bp, Homo sapiens
aggagataaaaattt

SEQ ID NO: 644600 - DNA, 15 bp, Homo sapiens
ggagataaaaatttt

SEQ ID NO: 644601 - DNA, 15 bp, Homo sapiens
gagataaaaattttc

SEQ ID NO: 644602 - DNA, 15 bp, Homo sapiens
agataaaaattttca

SEQ ID NO: 644603 - DNA, 15 bp, Homo sapiens
gataaaaattttcaa

SEQ ID NO: 644604 - DNA, 15 bp, Homo sapiens
ataaaaattttcaat

SEQ ID NO: 644605 - DNA, 15 bp, Homo sapiens
taaaaattttcaata

SEQ ID NO: 644606 - DNA, 15 bp, Homo sapiens
aaaaattttcaataa

SEQ ID NO: 644607 - DNA, 15 bp, Homo sapiens
aaaattttcaataaa

SEQ ID NO: 644608 - DNA, 15 bp, Homo sapiens
aaattttcaataaaa

SEQ ID NO: 644609 - DNA, 15 bp, Homo sapiens
aattttcaataaaat

SEQ ID NO: 644610 - DNA, 15 bp, Homo sapiens
attttcaataaaatc

SEQ ID NO: 644611 - DNA, 15 bp, Homo sapiens
ttttcaataaaatct

SEQ ID NO: 644612 - DNA, 15 bp, Homo sapiens
tttcaataaaatctg

SEQ ID NO: 644613 - DNA, 15 bp, Homo sapiens
ttcaataaaatctgg

SEQ ID NO: 644614 - DNA, 15 bp, Homo sapiens
tcaataaaatctggc

SEQ ID NO: 644615 - DNA, 15 bp, Homo sapiens
caataaaatctggct

SEQ ID NO: 644616 - DNA, 15 bp, Homo sapiens
aataaaatctggctt

SEQ ID NO: 644617 - DNA, 15 bp, Homo sapiens
ataaaatctggcttt

SEQ ID NO: 644618 - DNA, 15 bp, Homo sapiens
taaaatctggctttg

SEQ ID NO: 644619 - DNA, 15 bp, Homo sapiens
aaaatctggctttgg

SEQ ID NO: 644620 - DNA, 15 bp, Homo sapiens
aaatctggctttgga

SEQ ID NO: 644621 - DNA, 15 bp, Homo sapiens
aatctggctttggaa

SEQ ID NO: 644622 - DNA, 15 bp, Homo sapiens
atctggctttggaac

SEQ ID NO: 644623 - DNA, 15 bp, Homo sapiens
tctggctttggaact

SEQ ID NO: 644624 - DNA, 15 bp, Homo sapiens
ctggctttggaacta

SEQ ID NO: 644625 - DNA, 15 bp, Homo sapiens
tggctttggaactat

SEQ ID NO: 644626 - DNA, 15 bp, Homo sapiens
ggctttggaactatg

SEQ ID NO: 644627 - DNA, 15 bp, Homo sapiens
gctttggaactatga

SEQ ID NO: 644628 - DNA, 15 bp, Homo sapiens
ctttggaactatgat

SEQ ID NO: 644629 - DNA, 15 bp, Homo sapiens
tttggaactatgata

SEQ ID NO: 644630 - DNA, 15 bp, Homo sapiens
ttggaactatgatac

SEQ ID NO: 644631 - DNA, 15 bp, Homo sapiens
tggaactatgataca

SEQ ID NO: 644632 - DNA, 15 bp, Homo sapiens
ggaactatgatacag

SEQ ID NO: 644633 - DNA, 15 bp, Homo sapiens
gaactatgatacagt

SEQ ID NO: 644634 - DNA, 15 bp, Homo sapiens
aactatgatacagtg

SEQ ID NO: 644635 - DNA, 15 bp, Homo sapiens
actatgatacagtgt

SEQ ID NO: 644636 - DNA, 15 bp, Homo sapiens
ctatgatacagtgtc

SEQ ID NO: 644637 - DNA, 15 bp, Homo sapiens
tatgatacagtgtca

SEQ ID NO: 644638 - DNA, 15 bp, Homo sapiens
atgatacagtgtcat

SEQ ID NO: 644639 - DNA, 15 bp, Homo sapiens
tgatacagtgtcata

SEQ ID NO: 644640 - DNA, 15 bp, Homo sapiens
gatacagtgtcataa

SEQ ID NO: 644641 - DNA, 15 bp, Homo sapiens
atacagtgtcataaa

SEQ ID NO: 644642 - DNA, 15 bp, Homo sapiens
tacagtgtcataaat

SEQ ID NO: 644643 - DNA, 15 bp, Homo sapiens
acagtgtcataaatt

SEQ ID NO: 644644 - DNA, 15 bp, Homo sapiens
cagtgtcataaattc

SEQ ID NO: 644645 - DNA, 15 bp, Homo sapiens
agtgtcataaattca

SEQ ID NO: 644646 - DNA, 15 bp, Homo sapiens
gtgtcataaattcaa

SEQ ID NO: 644647 - DNA, 15 bp, Homo sapiens
tgtcataaattcaat

SEQ ID NO: 644648 - DNA, 15 bp, Homo sapiens
gtcataaattcaata

SEQ ID NO: 644649 - DNA, 15 bp, Homo sapiens
tcataaattcaatag

SEQ ID NO: 644650 - DNA, 15 bp, Homo sapiens
cataaattcaatagt

SEQ ID NO: 644651 - DNA, 15 bp, Homo sapiens
ataaattcaatagtt

SEQ ID NO: 644652 - DNA, 15 bp, Homo sapiens
taaattcaatagttt

SEQ ID NO: 644653 - DNA, 15 bp, Homo sapiens
aaattcaatagtttt

SEQ ID NO: 644654 - DNA, 15 bp, Homo sapiens
aattcaatagttttg

SEQ ID NO: 644655 - DNA, 15 bp, Homo sapiens
attcaatagttttga

SEQ ID NO: 644656 - DNA, 15 bp, Homo sapiens
ttcaatagttttgat

SEQ ID NO: 644657 - DNA, 15 bp, Homo sapiens
tcaatagttttgatt

SEQ ID NO: 644658 - DNA, 15 bp, Homo sapiens
caatagttttgatta

SEQ ID NO: 644659 - DNA, 15 bp, Homo sapiens
aatagttttgattat

SEQ ID NO: 644660 - DNA, 15 bp, Homo sapiens
atagttttgattatc

SEQ ID NO: 644661 - DNA, 15 bp, Homo sapiens
tagttttgattatca

SEQ ID NO: 644662 - DNA, 15 bp, Homo sapiens
agttttgattatcaa

SEQ ID NO: 644663 - DNA, 15 bp, Homo sapiens
gttttgattatcaaa

SEQ ID NO: 644664 - DNA, 15 bp, Homo sapiens
ttttgattatcaaaa

SEQ ID NO: 644665 - DNA, 15 bp, Homo sapiens
tttgattatcaaaaa

SEQ ID NO: 644666 - DNA, 15 bp, Homo sapiens
ttgattatcaaaaat

SEQ ID NO: 644667 - DNA, 15 bp, Homo sapiens
tgattatcaaaaata

SEQ ID NO: 644668 - DNA, 15 bp, Homo sapiens
gattatcaaaaatag

SEQ ID NO: 644669 - DNA, 15 bp, Homo sapiens
attatcaaaaataga

SEQ ID NO: 644670 - DNA, 15 bp, Homo sapiens
ttatcaaaaatagaa

SEQ ID NO: 644671 - DNA, 15 bp, Homo sapiens
tatcaaaaatagaaa

SEQ ID NO: 644672 - DNA, 15 bp, Homo sapiens
atcaaaaatagaaat

SEQ ID NO: 644673 - DNA, 15 bp, Homo sapiens
tcaaaaatagaaatg

SEQ ID NO: 644674 - DNA, 15 bp, Homo sapiens
caaaaatagaaatga

SEQ ID NO: 644675 - DNA, 15 bp, Homo sapiens
aaaaatagaaatgaa

SEQ ID NO: 644676 - DNA, 15 bp, Homo sapiens
aaaatagaaatgaaa

SEQ ID NO: 644677 - DNA, 15 bp, Homo sapiens
aaatagaaatgaaac

SEQ ID NO: 644678 - DNA, 15 bp, Homo sapiens
aatagaaatgaaaca

SEQ ID NO: 644679 - DNA, 15 bp, Homo sapiens
atagaaatgaaacat

SEQ ID NO: 644680 - DNA, 15 bp, Homo sapiens
tagaaatgaaacata

SEQ ID NO: 644681 - DNA, 15 bp, Homo sapiens
agaaatgaaacatat

SEQ ID NO: 644682 - DNA, 15 bp, Homo sapiens
gaaatgaaacatata

SEQ ID NO: 644683 - DNA, 15 bp, Homo sapiens
aaatgaaacatatac

SEQ ID NO: 644684 - DNA, 15 bp, Homo sapiens
aatgaaacatataca

SEQ ID NO: 644685 - DNA, 15 bp, Homo sapiens
atgaaacatatacaa

SEQ ID NO: 644686 - DNA, 15 bp, Homo sapiens
tgaaacatatacaac

SEQ ID NO: 644687 - DNA, 15 bp, Homo sapiens
gaaacatatacaact

SEQ ID NO: 644688 - DNA, 15 bp, Homo sapiens
aaacatatacaacta

SEQ ID NO: 644689 - DNA, 15 bp, Homo sapiens
aacatatacaactat

SEQ ID NO: 644690 - DNA, 15 bp, Homo sapiens
acatatacaactata

SEQ ID NO: 644691 - DNA, 15 bp, Homo sapiens
catatacaactatat

SEQ ID NO: 644692 - DNA, 15 bp, Homo sapiens
atatacaactatata

SEQ ID NO: 644693 - DNA, 15 bp, Homo sapiens
tatacaactatataa

SEQ ID NO: 644694 - DNA, 15 bp, Homo sapiens
atacaactatataaa

SEQ ID NO: 644695 - DNA, 15 bp, Homo sapiens
tacaactatataaat

SEQ ID NO: 644696 - DNA, 15 bp, Homo sapiens
acaactatataaata

SEQ ID NO: 644697 - DNA, 15 bp, Homo sapiens
caactatataaatat

SEQ ID NO: 644698 - DNA, 15 bp, Homo sapiens
aactatataaatatc

SEQ ID NO: 644699 - DNA, 15 bp, Homo sapiens
actatataaatatct

SEQ ID NO: 644700 - DNA, 15 bp, Homo sapiens
ctatataaatatctt

SEQ ID NO: 644701 - DNA, 15 bp, Homo sapiens
tatataaatatcttt

SEQ ID NO: 644702 - DNA, 15 bp, Homo sapiens
atataaatatcttta

SEQ ID NO: 644703 - DNA, 15 bp, Homo sapiens
tataaatatctttaa

SEQ ID NO: 644704 - DNA, 15 bp, Homo sapiens
ataaatatctttaaa

SEQ ID NO: 644705 - DNA, 15 bp, Homo sapiens
taaatatctttaaat

SEQ ID NO: 644706 - DNA, 15 bp, Homo sapiens
aaatatctttaaatt

SEQ ID NO: 644707 - DNA, 15 bp, Homo sapiens
aatatctttaaatta

SEQ ID NO: 644708 - DNA, 15 bp, Homo sapiens
atatctttaaattaa

SEQ ID NO: 644709 - DNA, 15 bp, Homo sapiens
tatctttaaattaaa

SEQ ID NO: 644710 - DNA, 15 bp, Homo sapiens
atctttaaattaaat

SEQ ID NO: 644711 - DNA, 15 bp, Homo sapiens
tctttaaattaaatg

SEQ ID NO: 644712 - DNA, 15 bp, Homo sapiens
ctttaaattaaatgc

SEQ ID NO: 644713 - DNA, 15 bp, Homo sapiens
tttaaattaaatgct

SEQ ID NO: 644714 - DNA, 15 bp, Homo sapiens
ttaaattaaatgcta

SEQ ID NO: 644715 - DNA, 15 bp, Homo sapiens
taaattaaatgctat

SEQ ID NO: 644716 - DNA, 15 bp, Homo sapiens
aaattaaatgctatg

SEQ ID NO: 644717 - DNA, 15 bp, Homo sapiens
aattaaatgctatgt

SEQ ID NO: 644718 - DNA, 15 bp, Homo sapiens
attaaatgctatgtg

SEQ ID NO: 644719 - DNA, 15 bp, Homo sapiens
ttaaatgctatgtga

SEQ ID NO: 644720 - DNA, 15 bp, Homo sapiens
taaatgctatgtgaa

SEQ ID NO: 644721 - DNA, 15 bp, Homo sapiens
aaatgctatgtgaat

SEQ ID NO: 644722 - DNA, 15 bp, Homo sapiens
aatgctatgtgaata

SEQ ID NO: 644723 - DNA, 15 bp, Homo sapiens
atgctatgtgaataa

SEQ ID NO: 644724 - DNA, 15 bp, Homo sapiens
tgctatgtgaataaa

SEQ ID NO: 644725 - DNA, 15 bp, Homo sapiens
gctatgtgaataaaa

SEQ ID NO: 644726 - DNA, 15 bp, Homo sapiens
ctatgtgaataaaaa

SEQ ID NO: 644727 - DNA, 15 bp, Homo sapiens
tatgtgaataaaaac

SEQ ID NO: 644728 - DNA, 15 bp, Homo sapiens
atgtgaataaaaaca

SEQ ID NO: 644729 - DNA, 15 bp, Homo sapiens
tgtgaataaaaacaa

SEQ ID NO: 644730 - DNA, 15 bp, Homo sapiens
gtgaataaaaacaaa

SEQ ID NO: 644731 - DNA, 15 bp, Homo sapiens
tgaataaaaacaaat

SEQ ID NO: 644732 - DNA, 15 bp, Homo sapiens
gaataaaaacaaatc

SEQ ID NO: 644733 - DNA, 15 bp, Homo sapiens
aataaaaacaaatcc

SEQ ID NO: 644734 - DNA, 15 bp, Homo sapiens
ataaaaacaaatcca

SEQ ID NO: 644735 - DNA, 15 bp, Homo sapiens
taaaaacaaatccaa

SEQ ID NO: 644736 - DNA, 15 bp, Homo sapiens
aaaaacaaatccaag

SEQ ID NO: 644737 - DNA, 15 bp, Homo sapiens
aaaacaaatccaagc

SEQ ID NO: 644738 - DNA, 15 bp, Homo sapiens
aaacaaatccaagct

SEQ ID NO: 644739 - DNA, 15 bp, Homo sapiens
aacaaatccaagctt

SEQ ID NO: 644740 - DNA, 15 bp, Homo sapiens
acaaatccaagcttc

SEQ ID NO: 644741 - DNA, 15 bp, Homo sapiens
caaatccaagcttct

SEQ ID NO: 644742 - DNA, 15 bp, Homo sapiens
aaatccaagcttcta

SEQ ID NO: 644743 - DNA, 15 bp, Homo sapiens
aatccaagcttctat

SEQ ID NO: 644744 - DNA, 15 bp, Homo sapiens
atccaagcttctata

SEQ ID NO: 644745 - DNA, 15 bp, Homo sapiens
tccaagcttctataa

SEQ ID NO: 644746 - DNA, 15 bp, Homo sapiens
ccaagcttctataaa

SEQ ID NO: 644747 - DNA, 15 bp, Homo sapiens
caagcttctataaat

SEQ ID NO: 644748 - DNA, 15 bp, Homo sapiens
aagcttctataaatg

SEQ ID NO: 644749 - DNA, 15 bp, Homo sapiens
agcttctataaatgt

SEQ ID NO: 644750 - DNA, 15 bp, Homo sapiens
gcttctataaatgta

SEQ ID NO: 644751 - DNA, 15 bp, Homo sapiens
cttctataaatgtaa

SEQ ID NO: 644752 - DNA, 15 bp, Homo sapiens
ttctataaatgtaag

SEQ ID NO: 644753 - DNA, 15 bp, Homo sapiens
tctataaatgtaagg

SEQ ID NO: 644754 - DNA, 15 bp, Homo sapiens
ctataaatgtaagga

SEQ ID NO: 644755 - DNA, 15 bp, Homo sapiens
tataaatgtaaggaa

SEQ ID NO: 644756 - DNA, 15 bp, Homo sapiens
ataaatgtaaggaaa

SEQ ID NO: 644757 - DNA, 15 bp, Homo sapiens
taaatgtaaggaaat

SEQ ID NO: 644758 - DNA, 15 bp, Homo sapiens
aaatgtaaggaaatt

SEQ ID NO: 644759 - DNA, 15 bp, Homo sapiens
aatgtaaggaaatta

SEQ ID NO: 644760 - DNA, 15 bp, Homo sapiens
atgtaaggaaattag

SEQ ID NO: 644761 - DNA, 15 bp, Homo sapiens
tgtaaggaaattagt

SEQ ID NO: 644762 - DNA, 15 bp, Homo sapiens
gtaaggaaattagtc

SEQ ID NO: 644763 - DNA, 15 bp, Homo sapiens
taaggaaattagtca

SEQ ID NO: 644764 - DNA, 15 bp, Homo sapiens
aaggaaattagtcaa

SEQ ID NO: 644765 - DNA, 15 bp, Homo sapiens
aggaaattagtcaaa

SEQ ID NO: 644766 - DNA, 15 bp, Homo sapiens
ggaaattagtcaaat

SEQ ID NO: 644767 - DNA, 15 bp, Homo sapiens
gaaattagtcaaata

SEQ ID NO: 644768 - DNA, 15 bp, Homo sapiens
aaattagtcaaatag

SEQ ID NO: 644769 - DNA, 15 bp, Homo sapiens
aattagtcaaataga

SEQ ID NO: 644770 - DNA, 15 bp, Homo sapiens
attagtcaaatagag

SEQ ID NO: 644771 - DNA, 15 bp, Homo sapiens
ttagtcaaatagagt

SEQ ID NO: 644772 - DNA, 15 bp, Homo sapiens
tagtcaaatagagtg

SEQ ID NO: 644773 - DNA, 15 bp, Homo sapiens
agtcaaatagagtgt

SEQ ID NO: 644774 - DNA, 15 bp, Homo sapiens
gtcaaatagagtgtc

SEQ ID NO: 644775 - DNA, 15 bp, Homo sapiens
tcaaatagagtgtcc

SEQ ID NO: 644776 - DNA, 15 bp, Homo sapiens
caaatagagtgtcca

SEQ ID NO: 644777 - DNA, 15 bp, Homo sapiens
aaatagagtgtccag

SEQ ID NO: 644778 - DNA, 15 bp, Homo sapiens
aatagagtgtccagc

SEQ ID NO: 644779 - DNA, 15 bp, Homo sapiens
atagagtgtccagcc

SEQ ID NO: 644780 - DNA, 15 bp, Homo sapiens
tagagtgtccagccc

SEQ ID NO: 644781 - DNA, 15 bp, Homo sapiens
agagtgtccagccca

SEQ ID NO: 644782 - DNA, 15 bp, Homo sapiens
gagtgtccagcccag

SEQ ID NO: 644783 - DNA, 15 bp, Homo sapiens
agtgtccagcccagg

SEQ ID NO: 644784 - DNA, 15 bp, Homo sapiens
gtgtccagcccagga

SEQ ID NO: 644785 - DNA, 15 bp, Homo sapiens
tgtccagcccaggaa

SEQ ID NO: 644786 - DNA, 15 bp, Homo sapiens
gtccagcccaggaaa

SEQ ID NO: 644787 - DNA, 15 bp, Homo sapiens
tccagcccaggaaag

SEQ ID NO: 644788 - DNA, 15 bp, Homo sapiens
ccagcccaggaaaga

SEQ ID NO: 644789 - DNA, 15 bp, Homo sapiens
cagcccaggaaagaa

SEQ ID NO: 644790 - DNA, 15 bp, Homo sapiens
agcccaggaaagaaa

SEQ ID NO: 644791 - DNA, 15 bp, Homo sapiens
gcccaggaaagaaat

SEQ ID NO: 644792 - DNA, 15 bp, Homo sapiens
cccaggaaagaaatg

SEQ ID NO: 644793 - DNA, 15 bp, Homo sapiens
ccaggaaagaaatgt

SEQ ID NO: 644794 - DNA, 15 bp, Homo sapiens
caggaaagaaatgta

SEQ ID NO: 644795 - DNA, 15 bp, Homo sapiens
aggaaagaaatgtaa

SEQ ID NO: 644796 - DNA, 15 bp, Homo sapiens
ggaaagaaatgtaaa

SEQ ID NO: 644797 - DNA, 15 bp, Homo sapiens
gaaagaaatgtaaaa

SEQ ID NO: 644798 - DNA, 15 bp, Homo sapiens
aaagaaatgtaaaaa

SEQ ID NO: 644799 - DNA, 15 bp, Homo sapiens
aagaaatgtaaaaat

SEQ ID NO: 644800 - DNA, 15 bp, Homo sapiens
agaaatgtaaaaatc

SEQ ID NO: 644801 - DNA, 15 bp, Homo sapiens
gaaatgtaaaaatcc

SEQ ID NO: 644802 - DNA, 15 bp, Homo sapiens
aaatgtaaaaatccc

SEQ ID NO: 644803 - DNA, 15 bp, Homo sapiens
aatgtaaaaatccca

SEQ ID NO: 644804 - DNA, 15 bp, Homo sapiens
atgtaaaaatcccaa

SEQ ID NO: 644805 - DNA, 15 bp, Homo sapiens
tgtaaaaatcccaaa

SEQ ID NO: 644806 - DNA, 15 bp, Homo sapiens
gtaaaaatcccaaat

SEQ ID NO: 644807 - DNA, 15 bp, Homo sapiens
taaaaatcccaaatt

SEQ ID NO: 644808 - DNA, 15 bp, Homo sapiens
aaaaatcccaaattt

SEQ ID NO: 644809 - DNA, 15 bp, Homo sapiens
aaaatcccaaattta

SEQ ID NO: 644810 - DNA, 15 bp, Homo sapiens
aaatcccaaatttaa

SEQ ID NO: 644811 - DNA, 15 bp, Homo sapiens
aatcccaaatttaat

SEQ ID NO: 644812 - DNA, 15 bp, Homo sapiens
atcccaaatttaatt

SEQ ID NO: 644813 - DNA, 15 bp, Homo sapiens
tcccaaatttaattt

SEQ ID NO: 644814 - DNA, 15 bp, Homo sapiens
cccaaatttaattta

SEQ ID NO: 644815 - DNA, 15 bp, Homo sapiens
ccaaatttaatttat

SEQ ID NO: 644816 - DNA, 15 bp, Homo sapiens
caaatttaatttatg

SEQ ID NO: 644817 - DNA, 15 bp, Homo sapiens
aaatttaatttatgg

SEQ ID NO: 644818 - DNA, 15 bp, Homo sapiens
aatttaatttatgga

SEQ ID NO: 644819 - DNA, 15 bp, Homo sapiens
atttaatttatggat

SEQ ID NO: 644820 - DNA, 15 bp, Homo sapiens
tttaatttatggatt

SEQ ID NO: 644821 - DNA, 15 bp, Homo sapiens
ttaatttatggatta

SEQ ID NO: 644822 - DNA, 15 bp, Homo sapiens
taatttatggattaa

SEQ ID NO: 644823 - DNA, 15 bp, Homo sapiens
aatttatggattaag

SEQ ID NO: 644824 - DNA, 15 bp, Homo sapiens
atttatggattaaga

SEQ ID NO: 644825 - DNA, 15 bp, Homo sapiens
tttatggattaagac

SEQ ID NO: 644826 - DNA, 15 bp, Homo sapiens
ttatggattaagacg

SEQ ID NO: 644827 - DNA, 15 bp, Homo sapiens
tatggattaagacgg

SEQ ID NO: 644828 - DNA, 15 bp, Homo sapiens
atggattaagacggg

SEQ ID NO: 644829 - DNA, 15 bp, Homo sapiens
tggattaagacgggg

SEQ ID NO: 644830 - DNA, 15 bp, Homo sapiens
ggattaagacggggg

SEQ ID NO: 644831 - DNA, 15 bp, Homo sapiens
gattaagacggggga

SEQ ID NO: 644832 - DNA, 15 bp, Homo sapiens
attaagacgggggaa

SEQ ID NO: 644833 - DNA, 15 bp, Homo sapiens
ttaagacgggggaat

SEQ ID NO: 644834 - DNA, 15 bp, Homo sapiens
taagacgggggaatt

SEQ ID NO: 644835 - DNA, 15 bp, Homo sapiens
aagacgggggaattt

SEQ ID NO: 644836 - DNA, 15 bp, Homo sapiens
agacgggggaatttg

SEQ ID NO: 644837 - DNA, 15 bp, Homo sapiens
gacgggggaatttgg

SEQ ID NO: 644838 - DNA, 15 bp, Homo sapiens
acgggggaatttggc

SEQ ID NO: 644839 - DNA, 15 bp, Homo sapiens
cgggggaatttggca

SEQ ID NO: 644840 - DNA, 15 bp, Homo sapiens
gggggaatttggcag

SEQ ID NO: 644841 - DNA, 15 bp, Homo sapiens
ggggaatttggcagg

SEQ ID NO: 644842 - DNA, 15 bp, Homo sapiens
gggaatttggcaggg

SEQ ID NO: 644843 - DNA, 15 bp, Homo sapiens
ggaatttggcagggc

SEQ ID NO: 644844 - DNA, 15 bp, Homo sapiens
gaatttggcagggca

SEQ ID NO: 644845 - DNA, 15 bp, Homo sapiens
aatttggcagggcac

SEQ ID NO: 644846 - DNA, 15 bp, Homo sapiens
atttggcagggcaca

SEQ ID NO: 644847 - DNA, 15 bp, Homo sapiens
tttggcagggcacag

SEQ ID NO: 644848 - DNA, 15 bp, Homo sapiens
ttggcagggcacagt

SEQ ID NO: 644849 - DNA, 15 bp, Homo sapiens
tggcagggcacagtg

SEQ ID NO: 644850 - DNA, 15 bp, Homo sapiens
ggcagggcacagtgg

SEQ ID NO: 644851 - DNA, 15 bp, Homo sapiens
gcagggcacagtggc

SEQ ID NO: 644852 - DNA, 15 bp, Homo sapiens
cagggcacagtggct

SEQ ID NO: 644853 - DNA, 15 bp, Homo sapiens
agggcacagtggctc

SEQ ID NO: 644854 - DNA, 15 bp, Homo sapiens
ggcacagtggctcac

SEQ ID NO: 644855 - DNA, 15 bp, Homo sapiens
gcacagtggctcaca

SEQ ID NO: 644856 - DNA, 15 bp, Homo sapiens
cacagtggctcacac

SEQ ID NO: 644857 - DNA, 15 bp, Homo sapiens
acagtggctcacacc

SEQ ID NO: 644858 - DNA, 15 bp, Homo sapiens
cagtggctcacacct

SEQ ID NO: 644859 - DNA, 15 bp, Homo sapiens
agtggctcacacctg

SEQ ID NO: 644860 - DNA, 15 bp, Homo sapiens
gtggctcacacctgt

SEQ ID NO: 644861 - DNA, 15 bp, Homo sapiens
tggctcacacctgta

SEQ ID NO: 644862 - DNA, 15 bp, Homo sapiens
ggctcacacctgtaa

SEQ ID NO: 644863 - DNA, 15 bp, Homo sapiens
gctcacacctgtaat

SEQ ID NO: 644864 - DNA, 15 bp, Homo sapiens
ctcacacctgtaatc

SEQ ID NO: 644865 - DNA, 15 bp, Homo sapiens
tcacacctgtaatcc

SEQ ID NO: 644866 - DNA, 15 bp, Homo sapiens
cacacctgtaatccc

SEQ ID NO: 644867 - DNA, 15 bp, Homo sapiens
cactttgggaggctg

SEQ ID NO: 644868 - DNA, 15 bp, Homo sapiens
actttgggaggctga

SEQ ID NO: 644869 - DNA, 15 bp, Homo sapiens
ctttgggaggctgaa

SEQ ID NO: 644870 - DNA, 15 bp, Homo sapiens
tttgggaggctgaag

SEQ ID NO: 644871 - DNA, 15 bp, Homo sapiens
ttgggaggctgaagt

SEQ ID NO: 644872 - DNA, 15 bp, Homo sapiens
tgggaggctgaagtg

SEQ ID NO: 644873 - DNA, 15 bp, Homo sapiens
gggaggctgaagtgg

SEQ ID NO: 644874 - DNA, 15 bp, Homo sapiens
ggaggctgaagtggg

SEQ ID NO: 644875 - DNA, 15 bp, Homo sapiens
gaggctgaagtgggc

SEQ ID NO: 644876 - DNA, 15 bp, Homo sapiens
aggctgaagtgggcg

SEQ ID NO: 644877 - DNA, 15 bp, Homo sapiens
ggctgaagtgggcgg

SEQ ID NO: 644878 - DNA, 15 bp, Homo sapiens
gctgaagtgggcgga

SEQ ID NO: 644879 - DNA, 15 bp, Homo sapiens
ctgaagtgggcggat

SEQ ID NO: 644880 - DNA, 15 bp, Homo sapiens
tgaagtgggcggatc

SEQ ID NO: 644881 - DNA, 15 bp, Homo sapiens
gaagtgggcggatca

SEQ ID NO: 644882 - DNA, 15 bp, Homo sapiens
aagtgggcggatcac

SEQ ID NO: 644883 - DNA, 15 bp, Homo sapiens
agtgggcggatcact

SEQ ID NO: 644884 - DNA, 15 bp, Homo sapiens
gtgggcggatcactt

SEQ ID NO: 644885 - DNA, 15 bp, Homo sapiens
tgggcggatcacttg

SEQ ID NO: 644886 - DNA, 15 bp, Homo sapiens
gggcggatcacttga

SEQ ID NO: 644887 - DNA, 15 bp, Homo sapiens
ggcggatcacttgaa

SEQ ID NO: 644888 - DNA, 15 bp, Homo sapiens
gcggatcacttgaag

SEQ ID NO: 644889 - DNA, 15 bp, Homo sapiens
cggatcacttgaagt

SEQ ID NO: 644890 - DNA, 15 bp, Homo sapiens
ggatcacttgaagtc

SEQ ID NO: 644891 - DNA, 15 bp, Homo sapiens
gatcacttgaagtca

SEQ ID NO: 644892 - DNA, 15 bp, Homo sapiens
atcacttgaagtcag

SEQ ID NO: 644893 - DNA, 15 bp, Homo sapiens
tcacttgaagtcagg

SEQ ID NO: 644894 - DNA, 15 bp, Homo sapiens
cacttgaagtcagga

SEQ ID NO: 644895 - DNA, 15 bp, Homo sapiens
acttgaagtcaggag

SEQ ID NO: 644896 - DNA, 15 bp, Homo sapiens
cttgaagtcaggagt

SEQ ID NO: 644897 - DNA, 15 bp, Homo sapiens
ttgaagtcaggagtt

SEQ ID NO: 644898 - DNA, 15 bp, Homo sapiens
tgaagtcaggagttc

SEQ ID NO: 644899 - DNA, 15 bp, Homo sapiens
gaagtcaggagttcg

SEQ ID NO: 644900 - DNA, 15 bp, Homo sapiens
aagtcaggagttcga

SEQ ID NO: 644901 - DNA, 15 bp, Homo sapiens
agtcaggagttcgag

SEQ ID NO: 644902 - DNA, 15 bp, Homo sapiens
cctggccaacatggc

SEQ ID NO: 644903 - DNA, 15 bp, Homo sapiens
ctggccaacatggcg

SEQ ID NO: 644904 - DNA, 15 bp, Homo sapiens
tggccaacatggcga

SEQ ID NO: 644905 - DNA, 15 bp, Homo sapiens
ggccaacatggcgaa

SEQ ID NO: 644906 - DNA, 15 bp, Homo sapiens
gccaacatggcgaaa

SEQ ID NO: 644907 - DNA, 15 bp, Homo sapiens
ccaacatggcgaaac

SEQ ID NO: 644908 - DNA, 15 bp, Homo sapiens
caacatggcgaaacc

SEQ ID NO: 644909 - DNA, 15 bp, Homo sapiens
aacatggcgaaaccc

SEQ ID NO: 644910 - DNA, 15 bp, Homo sapiens
acatggcgaaacccc

SEQ ID NO: 644911 - DNA, 15 bp, Homo sapiens
catggcgaaaccccg

SEQ ID NO: 644912 - DNA, 15 bp, Homo sapiens
atggcgaaaccccgt

SEQ ID NO: 644913 - DNA, 15 bp, Homo sapiens
tggcgaaaccccgtc

SEQ ID NO: 644914 - DNA, 15 bp, Homo sapiens
ggcgaaaccccgtct

SEQ ID NO: 644915 - DNA, 15 bp, Homo sapiens
gcgaaaccccgtctc

SEQ ID NO: 644916 - DNA, 15 bp, Homo sapiens
cgaaaccccgtctct

SEQ ID NO: 644917 - DNA, 15 bp, Homo sapiens
ctctactaaaaatat

SEQ ID NO: 644918 - DNA, 15 bp, Homo sapiens
tctactaaaaatata

SEQ ID NO: 644919 - DNA, 15 bp, Homo sapiens
ctactaaaaatataa

SEQ ID NO: 644920 - DNA, 15 bp, Homo sapiens
tactaaaaatataaa

SEQ ID NO: 644921 - DNA, 15 bp, Homo sapiens
actaaaaatataaaa

SEQ ID NO: 644922 - DNA, 15 bp, Homo sapiens
ctaaaaatataaaaa

SEQ ID NO: 644923 - DNA, 15 bp, Homo sapiens
taaaaatataaaaat

SEQ ID NO: 644924 - DNA, 15 bp, Homo sapiens
aaaaatataaaaatt

SEQ ID NO: 644925 - DNA, 15 bp, Homo sapiens
aaaatataaaaatta

SEQ ID NO: 644926 - DNA, 15 bp, Homo sapiens
aaatataaaaattag

SEQ ID NO: 644927 - DNA, 15 bp, Homo sapiens
aatataaaaattagc

SEQ ID NO: 644928 - DNA, 15 bp, Homo sapiens
atataaaaattagcc

SEQ ID NO: 644929 - DNA, 15 bp, Homo sapiens
tataaaaattagccg

SEQ ID NO: 644930 - DNA, 15 bp, Homo sapiens
ataaaaattagccgg

SEQ ID NO: 644931 - DNA, 15 bp, Homo sapiens
taaaaattagccggg

SEQ ID NO: 644932 - DNA, 15 bp, Homo sapiens
aaaattagccgggca

SEQ ID NO: 644933 - DNA, 15 bp, Homo sapiens
aaattagccgggcat

SEQ ID NO: 644934 - DNA, 15 bp, Homo sapiens
aattagccgggcatg

SEQ ID NO: 644935 - DNA, 15 bp, Homo sapiens
attagccgggcatgg

SEQ ID NO: 644936 - DNA, 15 bp, Homo sapiens
ttagccgggcatggt

SEQ ID NO: 644937 - DNA, 15 bp, Homo sapiens
tagccgggcatggtg

SEQ ID NO: 644938 - DNA, 15 bp, Homo sapiens
agccgggcatggtgg

SEQ ID NO: 644939 - DNA, 15 bp, Homo sapiens
gccgggcatggtggt

SEQ ID NO: 644940 - DNA, 15 bp, Homo sapiens
ccgggcatggtggtg

SEQ ID NO: 644941 - DNA, 15 bp, Homo sapiens
cgggcatggtggtgg

SEQ ID NO: 644942 - DNA, 15 bp, Homo sapiens
gggcatggtggtggg

SEQ ID NO: 644943 - DNA, 15 bp, Homo sapiens
ggcatggtggtgggc

SEQ ID NO: 644944 - DNA, 15 bp, Homo sapiens
gcatggtggtgggca

SEQ ID NO: 644945 - DNA, 15 bp, Homo sapiens
catggtggtgggcac

SEQ ID NO: 644946 - DNA, 15 bp, Homo sapiens
atggtggtgggcacc

SEQ ID NO: 644947 - DNA, 15 bp, Homo sapiens
tggtggtgggcacct

SEQ ID NO: 644948 - DNA, 15 bp, Homo sapiens
ggtggtgggcacctg

SEQ ID NO: 644949 - DNA, 15 bp, Homo sapiens
gtggtgggcacctgt

SEQ ID NO: 644950 - DNA, 15 bp, Homo sapiens
tggtgggcacctgta

SEQ ID NO: 644951 - DNA, 15 bp, Homo sapiens
ggtgggcacctgtag

SEQ ID NO: 644952 - DNA, 15 bp, Homo sapiens
gtgggcacctgtagt

SEQ ID NO: 644953 - DNA, 15 bp, Homo sapiens
tgggcacctgtagtc

SEQ ID NO: 644954 - DNA, 15 bp, Homo sapiens
gggcacctgtagtcc

SEQ ID NO: 644955 - DNA, 15 bp, Homo sapiens
ggcacctgtagtccc

SEQ ID NO: 644956 - DNA, 15 bp, Homo sapiens
gcacctgtagtccca

SEQ ID NO: 644957 - DNA, 15 bp, Homo sapiens
cacctgtagtcccag

SEQ ID NO: 644958 - DNA, 15 bp, Homo sapiens
acctgtagtcccagc

SEQ ID NO: 644959 - DNA, 15 bp, Homo sapiens
tagtcccagctactc

SEQ ID NO: 644960 - DNA, 15 bp, Homo sapiens
agtcccagctactca

SEQ ID NO: 644961 - DNA, 15 bp, Homo sapiens
gtcccagctactcag

SEQ ID NO: 644962 - DNA, 15 bp, Homo sapiens
tcccagctactcagg

SEQ ID NO: 644963 - DNA, 15 bp, Homo sapiens
cccagctactcagga

SEQ ID NO: 644964 - DNA, 15 bp, Homo sapiens
ccagctactcaggag

SEQ ID NO: 644965 - DNA, 15 bp, Homo sapiens
agcttgcagtgagct

SEQ ID NO: 644966 - DNA, 15 bp, Homo sapiens
gcttgcagtgagctg

SEQ ID NO: 644967 - DNA, 15 bp, Homo sapiens
cttgcagtgagctga

SEQ ID NO: 644968 - DNA, 15 bp, Homo sapiens
agtgagctgagatcg

SEQ ID NO: 644969 - DNA, 15 bp, Homo sapiens
gtgagctgagatcgc

SEQ ID NO: 644970 - DNA, 15 bp, Homo sapiens
tgagctgagatcgcg

SEQ ID NO: 644971 - DNA, 15 bp, Homo sapiens
gagctgagatcgcgc

SEQ ID NO: 644972 - DNA, 15 bp, Homo sapiens
agctgagatcgcgcc

SEQ ID NO: 644973 - DNA, 15 bp, Homo sapiens
gctgagatcgcgcca

SEQ ID NO: 644974 - DNA, 15 bp, Homo sapiens
ctgagatcgcgccac

SEQ ID NO: 644975 - DNA, 15 bp, Homo sapiens
tgagatcgcgccact

SEQ ID NO: 644976 - DNA, 15 bp, Homo sapiens
gagatcgcgccactg

SEQ ID NO: 644977 - DNA, 15 bp, Homo sapiens
agatcgcgccactgc

SEQ ID NO: 644978 - DNA, 15 bp, Homo sapiens
gatcgcgccactgca

SEQ ID NO: 644979 - DNA, 15 bp, Homo sapiens
atcgcgccactgcac

SEQ ID NO: 644980 - DNA, 15 bp, Homo sapiens
tcgcgccactgcacc

SEQ ID NO: 644981 - DNA, 15 bp, Homo sapiens
cgcgccactgcaccc

SEQ ID NO: 644982 - DNA, 15 bp, Homo sapiens
gcgccactgcacccc

SEQ ID NO: 644983 - DNA, 15 bp, Homo sapiens
cgccactgcacccca

SEQ ID NO: 644984 - DNA, 15 bp, Homo sapiens
gccactgcaccccag

SEQ ID NO: 644985 - DNA, 15 bp, Homo sapiens
ccactgcaccccagc

SEQ ID NO: 644986 - DNA, 15 bp, Homo sapiens
cactgcaccccagcc

SEQ ID NO: 644987 - DNA, 15 bp, Homo sapiens
actgcaccccagcct

SEQ ID NO: 644988 - DNA, 15 bp, Homo sapiens
ctgcaccccagcctg

SEQ ID NO: 644989 - DNA, 15 bp, Homo sapiens
tgcaccccagcctgg

SEQ ID NO: 644990 - DNA, 15 bp, Homo sapiens
gcaccccagcctgga

SEQ ID NO: 644991 - DNA, 15 bp, Homo sapiens
caccccagcctggac

SEQ ID NO: 644992 - DNA, 15 bp, Homo sapiens
accccagcctggaca

SEQ ID NO: 644993 - DNA, 15 bp, Homo sapiens
ccccagcctggacaa

SEQ ID NO: 644994 - DNA, 15 bp, Homo sapiens
cccagcctggacaac

SEQ ID NO: 644995 - DNA, 15 bp, Homo sapiens
ccagcctggacaact

SEQ ID NO: 644996 - DNA, 15 bp, Homo sapiens
cagcctggacaactg

SEQ ID NO: 644997 - DNA, 15 bp, Homo sapiens
agcctggacaactga

SEQ ID NO: 644998 - DNA, 15 bp, Homo sapiens
gcctggacaactgag

SEQ ID NO: 644999 - DNA, 15 bp, Homo sapiens
cctggacaactgagc

SEQ ID NO: 645000 - DNA, 15 bp, Homo sapiens
ctggacaactgagcg

SEQ ID NO: 645001 - DNA, 15 bp, Homo sapiens
tggacaactgagcga

SEQ ID NO: 645002 - DNA, 15 bp, Homo sapiens
ggacaactgagcgag

SEQ ID NO: 645003 - DNA, 15 bp, Homo sapiens
gacaactgagcgaga

SEQ ID NO: 645004 - DNA, 15 bp, Homo sapiens
acaactgagcgagac

SEQ ID NO: 645005 - DNA, 15 bp, Homo sapiens
caactgagcgagact

SEQ ID NO: 645006 - DNA, 15 bp, Homo sapiens
aactgagcgagactc

SEQ ID NO: 645007 - DNA, 15 bp, Homo sapiens
actgagcgagactcc

SEQ ID NO: 645008 - DNA, 15 bp, Homo sapiens
ctgagcgagactccg

SEQ ID NO: 645009 - DNA, 15 bp, Homo sapiens
tgagcgagactccgt

SEQ ID NO: 645010 - DNA, 15 bp, Homo sapiens
aaaaaaaaaagaaag

SEQ ID NO: 645011 - DNA, 15 bp, Homo sapiens
aaaaaaaaagaaaga

SEQ ID NO: 645012 - DNA, 15 bp, Homo sapiens
aaaaaaaagaaagaa

SEQ ID NO: 645013 - DNA, 15 bp, Homo sapiens
aaaaaaagaaagaaa

SEQ ID NO: 645014 - DNA, 15 bp, Homo sapiens
aaaaaagaaagaaag

SEQ ID NO: 645015 - DNA, 15 bp, Homo sapiens
aaaaagaaagaaaga

SEQ ID NO: 645016 - DNA, 15 bp, Homo sapiens
aaaagaaagaaagaa

SEQ ID NO: 645017 - DNA, 15 bp, Homo sapiens
aaagaaagaaagaaa

SEQ ID NO: 645018 - DNA, 15 bp, Homo sapiens
aagaaagaaagaaaa

SEQ ID NO: 645019 - DNA, 15 bp, Homo sapiens
agaaagaaagaaaac

SEQ ID NO: 645020 - DNA, 15 bp, Homo sapiens
gaaagaaagaaaacc

SEQ ID NO: 645021 - DNA, 15 bp, Homo sapiens
aaagaaagaaaacct

SEQ ID NO: 645022 - DNA, 15 bp, Homo sapiens
aagaaagaaaacctt

SEQ ID NO: 645023 - DNA, 15 bp, Homo sapiens
agaaagaaaacctta

SEQ ID NO: 645024 - DNA, 15 bp, Homo sapiens
gaaagaaaaccttaa

SEQ ID NO: 645025 - DNA, 15 bp, Homo sapiens
aaagaaaaccttaaa

SEQ ID NO: 645026 - DNA, 15 bp, Homo sapiens
aagaaaaccttaaat

SEQ ID NO: 645027 - DNA, 15 bp, Homo sapiens
agaaaaccttaaatg

SEQ ID NO: 645028 - DNA, 15 bp, Homo sapiens
gaaaaccttaaatgt

SEQ ID NO: 645029 - DNA, 15 bp, Homo sapiens
aaaaccttaaatgtt

SEQ ID NO: 645030 - DNA, 15 bp, Homo sapiens
aaaccttaaatgttt

SEQ ID NO: 645031 - DNA, 15 bp, Homo sapiens
aaccttaaatgtttg

SEQ ID NO: 645032 - DNA, 15 bp, Homo sapiens
accttaaatgtttgt

SEQ ID NO: 645033 - DNA, 15 bp, Homo sapiens
ccttaaatgtttgtg

SEQ ID NO: 645034 - DNA, 15 bp, Homo sapiens
cttaaatgtttgtgt

SEQ ID NO: 645035 - DNA, 15 bp, Homo sapiens
ttaaatgtttgtgtt

SEQ ID NO: 645036 - DNA, 15 bp, Homo sapiens
taaatgtttgtgttt

SEQ ID NO: 645037 - DNA, 15 bp, Homo sapiens
aaatgtttgtgtttt

SEQ ID NO: 645038 - DNA, 15 bp, Homo sapiens
aatgtttgtgttttg

SEQ ID NO: 645039 - DNA, 15 bp, Homo sapiens
atgtttgtgttttgt

SEQ ID NO: 645040 - DNA, 15 bp, Homo sapiens
tgtttgtgttttgtt

SEQ ID NO: 645041 - DNA, 15 bp, Homo sapiens
gtttgtgttttgttt

SEQ ID NO: 645042 - DNA, 15 bp, Homo sapiens
tttgtgttttgtttg

SEQ ID NO: 645043 - DNA, 15 bp, Homo sapiens
ttgtgttttgtttgt

SEQ ID NO: 645044 - DNA, 15 bp, Homo sapiens
tgtgttttgtttgtt

SEQ ID NO: 645045 - DNA, 15 bp, Homo sapiens
gtgttttgtttgttt

SEQ ID NO: 645046 - DNA, 15 bp, Homo sapiens
tgttttgtttgtttg

SEQ ID NO: 645047 - DNA, 15 bp, Homo sapiens
gttttgtttgtttgt

SEQ ID NO: 645048 - DNA, 15 bp, Homo sapiens
ttttgtttgtttgtt

SEQ ID NO: 645049 - DNA, 15 bp, Homo sapiens
tttgtttgtttgttt

SEQ ID NO: 645050 - DNA, 15 bp, Homo sapiens
ttgtttgtttgtttt

SEQ ID NO: 645051 - DNA, 15 bp, Homo sapiens
tgtttgtttgtttta

SEQ ID NO: 645052 - DNA, 15 bp, Homo sapiens
gtttgtttgttttag

SEQ ID NO: 645053 - DNA, 15 bp, Homo sapiens
tttgtttgttttagg

SEQ ID NO: 645054 - DNA, 15 bp, Homo sapiens
ttgtttgttttaggt

SEQ ID NO: 645055 - DNA, 15 bp, Homo sapiens
tgtttgttttaggta

SEQ ID NO: 645056 - DNA, 15 bp, Homo sapiens
gtttgttttaggtaa

SEQ ID NO: 645057 - DNA, 15 bp, Homo sapiens
tttgttttaggtaat

SEQ ID NO: 645058 - DNA, 15 bp, Homo sapiens
ttgttttaggtaatt

SEQ ID NO: 645059 - DNA, 15 bp, Homo sapiens
tgttttaggtaattc

SEQ ID NO: 645060 - DNA, 15 bp, Homo sapiens
gttttaggtaattcc

SEQ ID NO: 645061 - DNA, 15 bp, Homo sapiens
ttttaggtaattcct

SEQ ID NO: 645062 - DNA, 15 bp, Homo sapiens
tttaggtaattccta

SEQ ID NO: 645063 - DNA, 15 bp, Homo sapiens
ttaggtaattcctac

SEQ ID NO: 645064 - DNA, 15 bp, Homo sapiens
taggtaattcctact

SEQ ID NO: 645065 - DNA, 15 bp, Homo sapiens
aggtaattcctactg

SEQ ID NO: 645066 - DNA, 15 bp, Homo sapiens
ggtaattcctactgt

SEQ ID NO: 645067 - DNA, 15 bp, Homo sapiens
gtaattcctactgta

SEQ ID NO: 645068 - DNA, 15 bp, Homo sapiens
taattcctactgtat

SEQ ID NO: 645069 - DNA, 15 bp, Homo sapiens
aattcctactgtatt

SEQ ID NO: 645070 - DNA, 15 bp, Homo sapiens
attcctactgtattc

SEQ ID NO: 645071 - DNA, 15 bp, Homo sapiens
ttcctactgtattca

SEQ ID NO: 645072 - DNA, 15 bp, Homo sapiens
tcctactgtattcaa

SEQ ID NO: 645073 - DNA, 15 bp, Homo sapiens
cctactgtattcaag

SEQ ID NO: 645074 - DNA, 15 bp, Homo sapiens
ctactgtattcaagg

SEQ ID NO: 645075 - DNA, 15 bp, Homo sapiens
tactgtattcaaggc

SEQ ID NO: 645076 - DNA, 15 bp, Homo sapiens
actgtattcaaggca

SEQ ID NO: 645077 - DNA, 15 bp, Homo sapiens
ctgtattcaaggcaa

SEQ ID NO: 645078 - DNA, 15 bp, Homo sapiens
tgtattcaaggcaat

SEQ ID NO: 645079 - DNA, 15 bp, Homo sapiens
gtattcaaggcaatg

SEQ ID NO: 645080 - DNA, 15 bp, Homo sapiens
tattcaaggcaatgc

SEQ ID NO: 645081 - DNA, 15 bp, Homo sapiens
attcaaggcaatgca

SEQ ID NO: 645082 - DNA, 15 bp, Homo sapiens
ttcaaggcaatgcaa

SEQ ID NO: 645083 - DNA, 15 bp, Homo sapiens
tcaaggcaatgcaaa

SEQ ID NO: 645084 - DNA, 15 bp, Homo sapiens
caaggcaatgcaaat

SEQ ID NO: 645085 - DNA, 15 bp, Homo sapiens
aaggcaatgcaaatg

SEQ ID NO: 645086 - DNA, 15 bp, Homo sapiens
aggcaatgcaaatgc

SEQ ID NO: 645087 - DNA, 15 bp, Homo sapiens
ggcaatgcaaatgca

SEQ ID NO: 645088 - DNA, 15 bp, Homo sapiens
gcaatgcaaatgcaa

SEQ ID NO: 645089 - DNA, 15 bp, Homo sapiens
caatgcaaatgcaag

SEQ ID NO: 645090 - DNA, 15 bp, Homo sapiens
aatgcaaatgcaaga

SEQ ID NO: 645091 - DNA, 15 bp, Homo sapiens
atgcaaatgcaagaa

SEQ ID NO: 645092 - DNA, 15 bp, Homo sapiens
tgcaaatgcaagaac

SEQ ID NO: 645093 - DNA, 15 bp, Homo sapiens
gcaaatgcaagaacg

SEQ ID NO: 645094 - DNA, 15 bp, Homo sapiens
caaatgcaagaacgg

SEQ ID NO: 645095 - DNA, 15 bp, Homo sapiens
aaatgcaagaacggg

SEQ ID NO: 645096 - DNA, 15 bp, Homo sapiens
aatgcaagaacggga

SEQ ID NO: 645097 - DNA, 15 bp, Homo sapiens
atgcaagaacgggac

SEQ ID NO: 645098 - DNA, 15 bp, Homo sapiens
tgcaagaacgggaca

SEQ ID NO: 645099 - DNA, 15 bp, Homo sapiens
gcaagaacgggacac

SEQ ID NO: 645100 - DNA, 15 bp, Homo sapiens
caagaacgggacact

SEQ ID NO: 645101 - DNA, 15 bp, Homo sapiens
aagaacgggacactt

SEQ ID NO: 645102 - DNA, 15 bp, Homo sapiens
agaacgggacacttt

SEQ ID NO: 645103 - DNA, 15 bp, Homo sapiens
gaacgggacactttg

SEQ ID NO: 645104 - DNA, 15 bp, Homo sapiens
aacgggacactttgc

SEQ ID NO: 645105 - DNA, 15 bp, Homo sapiens
acgggacactttgct

SEQ ID NO: 645106 - DNA, 15 bp, Homo sapiens
cgggacactttgcta

SEQ ID NO: 645107 - DNA, 15 bp, Homo sapiens
gggacactttgctaa

SEQ ID NO: 645108 - DNA, 15 bp, Homo sapiens
ggacactttgctaaa

SEQ ID NO: 645109 - DNA, 15 bp, Homo sapiens
gacactttgctaaag

SEQ ID NO: 645110 - DNA, 15 bp, Homo sapiens
acactttgctaaagg

SEQ ID NO: 645111 - DNA, 15 bp, Homo sapiens
cactttgctaaaggc

SEQ ID NO: 645112 - DNA, 15 bp, Homo sapiens
actttgctaaaggcg

SEQ ID NO: 645113 - DNA, 15 bp, Homo sapiens
ctttgctaaaggcgc

SEQ ID NO: 645114 - DNA, 15 bp, Homo sapiens
tttgctaaaggcgct

SEQ ID NO: 645115 - DNA, 15 bp, Homo sapiens
ttgctaaaggcgctg

SEQ ID NO: 645116 - DNA, 15 bp, Homo sapiens
tgctaaaggcgctgt

SEQ ID NO: 645117 - DNA, 15 bp, Homo sapiens
gctaaaggcgctgtt

SEQ ID NO: 645118 - DNA, 15 bp, Homo sapiens
ctaaaggcgctgttg

SEQ ID NO: 645119 - DNA, 15 bp, Homo sapiens
taaaggcgctgttgg

SEQ ID NO: 645120 - DNA, 15 bp, Homo sapiens
aaaggcgctgttgga

SEQ ID NO: 645121 - DNA, 15 bp, Homo sapiens
aaggcgctgttggaa

SEQ ID NO: 645122 - DNA, 15 bp, Homo sapiens
aggcgctgttggaaa

SEQ ID NO: 645123 - DNA, 15 bp, Homo sapiens
ggcgctgttggaaat

SEQ ID NO: 645124 - DNA, 15 bp, Homo sapiens
gcgctgttggaaata

SEQ ID NO: 645125 - DNA, 15 bp, Homo sapiens
cgctgttggaaatag

SEQ ID NO: 645126 - DNA, 15 bp, Homo sapiens
gctgttggaaatagc

SEQ ID NO: 645127 - DNA, 15 bp, Homo sapiens
ctgttggaaatagct

SEQ ID NO: 645128 - DNA, 15 bp, Homo sapiens
tgttggaaatagctt

SEQ ID NO: 645129 - DNA, 15 bp, Homo sapiens
gttggaaatagcttc

SEQ ID NO: 645130 - DNA, 15 bp, Homo sapiens
ttggaaatagcttct

SEQ ID NO: 645131 - DNA, 15 bp, Homo sapiens
tggaaatagcttctt

SEQ ID NO: 645132 - DNA, 15 bp, Homo sapiens
ggaaatagcttcttg

SEQ ID NO: 645133 - DNA, 15 bp, Homo sapiens
gaaatagcttcttgc

SEQ ID NO: 645134 - DNA, 15 bp, Homo sapiens
aaatagcttcttgct

SEQ ID NO: 645135 - DNA, 15 bp, Homo sapiens
aatagcttcttgctt

SEQ ID NO: 645136 - DNA, 15 bp, Homo sapiens
atagcttcttgcttg

SEQ ID NO: 645137 - DNA, 15 bp, Homo sapiens
tagcttcttgcttgg

SEQ ID NO: 645138 - DNA, 15 bp, Homo sapiens
agcttcttgcttgga

SEQ ID NO: 645139 - DNA, 15 bp, Homo sapiens
gcttcttgcttggag

SEQ ID NO: 645140 - DNA, 15 bp, Homo sapiens
cttcttgcttggaga

SEQ ID NO: 645141 - DNA, 15 bp, Homo sapiens
ttcttgcttggagaa

SEQ ID NO: 645142 - DNA, 15 bp, Homo sapiens
tcttgcttggagaaa

SEQ ID NO: 645143 - DNA, 15 bp, Homo sapiens
cttgcttggagaaag

SEQ ID NO: 645144 - DNA, 15 bp, Homo sapiens
ttgcttggagaaagc

SEQ ID NO: 645145 - DNA, 15 bp, Homo sapiens
tgcttggagaaagcc

SEQ ID NO: 645146 - DNA, 15 bp, Homo sapiens
gcttggagaaagccc

SEQ ID NO: 645147 - DNA, 15 bp, Homo sapiens
cttggagaaagccct

SEQ ID NO: 645148 - DNA, 15 bp, Homo sapiens
ttggagaaagccctt

SEQ ID NO: 645149 - DNA, 15 bp, Homo sapiens
tggagaaagcccttc

SEQ ID NO: 645150 - DNA, 15 bp, Homo sapiens
ggagaaagcccttca

SEQ ID NO: 645151 - DNA, 15 bp, Homo sapiens
gagaaagcccttcaa

SEQ ID NO: 645152 - DNA, 15 bp, Homo sapiens
agaaagcccttcaag

SEQ ID NO: 645153 - DNA, 15 bp, Homo sapiens
gaaagcccttcaagt

SEQ ID NO: 645154 - DNA, 15 bp, Homo sapiens
aaagcccttcaagtg

SEQ ID NO: 645155 - DNA, 15 bp, Homo sapiens
aagcccttcaagtgt

SEQ ID NO: 645156 - DNA, 15 bp, Homo sapiens
agcccttcaagtgtt

SEQ ID NO: 645157 - DNA, 15 bp, Homo sapiens
gcccttcaagtgttt

SEQ ID NO: 645158 - DNA, 15 bp, Homo sapiens
cccttcaagtgtttc

SEQ ID NO: 645159 - DNA, 15 bp, Homo sapiens
ccttcaagtgtttca

SEQ ID NO: 645160 - DNA, 15 bp, Homo sapiens
cttcaagtgtttcac

SEQ ID NO: 645161 - DNA, 15 bp, Homo sapiens
ttcaagtgtttcacc

SEQ ID NO: 645162 - DNA, 15 bp, Homo sapiens
tcaagtgtttcacca

SEQ ID NO: 645163 - DNA, 15 bp, Homo sapiens
caagtgtttcaccaa

SEQ ID NO: 645164 - DNA, 15 bp, Homo sapiens
aagtgtttcaccaaa

SEQ ID NO: 645165 - DNA, 15 bp, Homo sapiens
agtgtttcaccaaat

SEQ ID NO: 645166 - DNA, 15 bp, Homo sapiens
gtgtttcaccaaatc

SEQ ID NO: 645167 - DNA, 15 bp, Homo sapiens
tgtttcaccaaatcc

SEQ ID NO: 645168 - DNA, 15 bp, Homo sapiens
gtttcaccaaatcca

SEQ ID NO: 645169 - DNA, 15 bp, Homo sapiens
tttcaccaaatccac

SEQ ID NO: 645170 - DNA, 15 bp, Homo sapiens
ttcaccaaatccacg

SEQ ID NO: 645171 - DNA, 15 bp, Homo sapiens
tcaccaaatccacgg

SEQ ID NO: 645172 - DNA, 15 bp, Homo sapiens
caccaaatccacggc

SEQ ID NO: 645173 - DNA, 15 bp, Homo sapiens
accaaatccacggca

SEQ ID NO: 645174 - DNA, 15 bp, Homo sapiens
ccaaatccacggcaa

SEQ ID NO: 645175 - DNA, 15 bp, Homo sapiens
caaatccacggcaag

SEQ ID NO: 645176 - DNA, 15 bp, Homo sapiens
aaatccacggcaagt

SEQ ID NO: 645177 - DNA, 15 bp, Homo sapiens
aatccacggcaagtg

SEQ ID NO: 645178 - DNA, 15 bp, Homo sapiens
atccacggcaagtgt

SEQ ID NO: 645179 - DNA, 15 bp, Homo sapiens
tccacggcaagtgtt

SEQ ID NO: 645180 - DNA, 15 bp, Homo sapiens
ccacggcaagtgttg

SEQ ID NO: 645181 - DNA, 15 bp, Homo sapiens
cacggcaagtgttgt

SEQ ID NO: 645182 - DNA, 15 bp, Homo sapiens
acggcaagtgttgtg

SEQ ID NO: 645183 - DNA, 15 bp, Homo sapiens
cggcaagtgttgtgt

SEQ ID NO: 645184 - DNA, 15 bp, Homo sapiens
ggcaagtgttgtgtg

SEQ ID NO: 645185 - DNA, 15 bp, Homo sapiens
gcaagtgttgtgtgc

SEQ ID NO: 645186 - DNA, 15 bp, Homo sapiens
caagtgttgtgtgca

SEQ ID NO: 645187 - DNA, 15 bp, Homo sapiens
aagtgttgtgtgcag

SEQ ID NO: 645188 - DNA, 15 bp, Homo sapiens
agtgttgtgtgcagt

SEQ ID NO: 645189 - DNA, 15 bp, Homo sapiens
gtgttgtgtgcagtg

SEQ ID NO: 645190 - DNA, 15 bp, Homo sapiens
tgttgtgtgcagtgc

SEQ ID NO: 645191 - DNA, 15 bp, Homo sapiens
gttgtgtgcagtgca

SEQ ID NO: 645192 - DNA, 15 bp, Homo sapiens
ttgtgtgcagtgcaa

SEQ ID NO: 645193 - DNA, 15 bp, Homo sapiens
tgtgtgcagtgcaat

SEQ ID NO: 645194 - DNA, 15 bp, Homo sapiens
gtgtgcagtgcaata

SEQ ID NO: 645195 - DNA, 15 bp, Homo sapiens
tgtgcagtgcaatag

SEQ ID NO: 645196 - DNA, 15 bp, Homo sapiens
gtgcagtgcaatagt

SEQ ID NO: 645197 - DNA, 15 bp, Homo sapiens
tgcagtgcaatagtc

SEQ ID NO: 645198 - DNA, 15 bp, Homo sapiens
gcagtgcaatagtct

SEQ ID NO: 645199 - DNA, 15 bp, Homo sapiens
cagtgcaatagtcta

SEQ ID NO: 645200 - DNA, 15 bp, Homo sapiens
agtgcaatagtctag

SEQ ID NO: 645201 - DNA, 15 bp, Homo sapiens
gtgcaatagtctagg

SEQ ID NO: 645202 - DNA, 15 bp, Homo sapiens
tgcaatagtctaggc

SEQ ID NO: 645203 - DNA, 15 bp, Homo sapiens
gcaatagtctaggct

SEQ ID NO: 645204 - DNA, 15 bp, Homo sapiens
caatagtctaggctg

SEQ ID NO: 645205 - DNA, 15 bp, Homo sapiens
aatagtctaggctga

SEQ ID NO: 645206 - DNA, 15 bp, Homo sapiens
atagtctaggctgac

SEQ ID NO: 645207 - DNA, 15 bp, Homo sapiens
tagtctaggctgaca

SEQ ID NO: 645208 - DNA, 15 bp, Homo sapiens
agtctaggctgacaa

SEQ ID NO: 645209 - DNA, 15 bp, Homo sapiens
gtctaggctgacaag

SEQ ID NO: 645210 - DNA, 15 bp, Homo sapiens
tctaggctgacaagt

SEQ ID NO: 645211 - DNA, 15 bp, Homo sapiens
ctaggctgacaagtc

SEQ ID NO: 645212 - DNA, 15 bp, Homo sapiens
taggctgacaagtca

SEQ ID NO: 645213 - DNA, 15 bp, Homo sapiens
aggctgacaagtcaa

SEQ ID NO: 645214 - DNA, 15 bp, Homo sapiens
ggctgacaagtcaaa

SEQ ID NO: 645215 - DNA, 15 bp, Homo sapiens
gctgacaagtcaaat

SEQ ID NO: 645216 - DNA, 15 bp, Homo sapiens
ctgacaagtcaaatg

SEQ ID NO: 645217 - DNA, 15 bp, Homo sapiens
tgacaagtcaaatgt

SEQ ID NO: 645218 - DNA, 15 bp, Homo sapiens
gacaagtcaaatgtt

SEQ ID NO: 645219 - DNA, 15 bp, Homo sapiens
acaagtcaaatgttc

SEQ ID NO: 645220 - DNA, 15 bp, Homo sapiens
caagtcaaatgttcc

SEQ ID NO: 645221 - DNA, 15 bp, Homo sapiens
aagtcaaatgttcca

SEQ ID NO: 645222 - DNA, 15 bp, Homo sapiens
agtcaaatgttccag

SEQ ID NO: 645223 - DNA, 15 bp, Homo sapiens
gtcaaatgttccagg

SEQ ID NO: 645224 - DNA, 15 bp, Homo sapiens
tcaaatgttccaggt

SEQ ID NO: 645225 - DNA, 15 bp, Homo sapiens
caaatgttccaggtg

SEQ ID NO: 645226 - DNA, 15 bp, Homo sapiens
aaatgttccaggtgt

SEQ ID NO: 645227 - DNA, 15 bp, Homo sapiens
aatgttccaggtgta

SEQ ID NO: 645228 - DNA, 15 bp, Homo sapiens
atgttccaggtgtag

SEQ ID NO: 645229 - DNA, 15 bp, Homo sapiens
tgttccaggtgtaga

SEQ ID NO: 645230 - DNA, 15 bp, Homo sapiens
gttccaggtgtagaa

SEQ ID NO: 645231 - DNA, 15 bp, Homo sapiens
ttccaggtgtagaat

SEQ ID NO: 645232 - DNA, 15 bp, Homo sapiens
tccaggtgtagaata

SEQ ID NO: 645233 - DNA, 15 bp, Homo sapiens
ccaggtgtagaatag

SEQ ID NO: 645234 - DNA, 15 bp, Homo sapiens
caggtgtagaatagt

SEQ ID NO: 645235 - DNA, 15 bp, Homo sapiens
aggtgtagaatagtt

SEQ ID NO: 645236 - DNA, 15 bp, Homo sapiens
ggtgtagaatagttg

SEQ ID NO: 645237 - DNA, 15 bp, Homo sapiens
gtgtagaatagttga

SEQ ID NO: 645238 - DNA, 15 bp, Homo sapiens
tgtagaatagttgaa

SEQ ID NO: 645239 - DNA, 15 bp, Homo sapiens
gtagaatagttgaaa

SEQ ID NO: 645240 - DNA, 15 bp, Homo sapiens
tagaatagttgaaaa

SEQ ID NO: 645241 - DNA, 15 bp, Homo sapiens
agaatagttgaaaaa

SEQ ID NO: 645242 - DNA, 15 bp, Homo sapiens
gaatagttgaaaaaa

SEQ ID NO: 645243 - DNA, 15 bp, Homo sapiens
aatagttgaaaaaag

SEQ ID NO: 645244 - DNA, 15 bp, Homo sapiens
atagttgaaaaaagg

SEQ ID NO: 645245 - DNA, 15 bp, Homo sapiens
tagttgaaaaaaggg

SEQ ID NO: 645246 - DNA, 15 bp, Homo sapiens
agttgaaaaaaggga

SEQ ID NO: 645247 - DNA, 15 bp, Homo sapiens
gttgaaaaaagggaa

SEQ ID NO: 645248 - DNA, 15 bp, Homo sapiens
ttgaaaaaagggaag

SEQ ID NO: 645249 - DNA, 15 bp, Homo sapiens
tgaaaaaagggaagc

SEQ ID NO: 645250 - DNA, 15 bp, Homo sapiens
gaaaaaagggaagca

SEQ ID NO: 645251 - DNA, 15 bp, Homo sapiens
aaaaaagggaagcaa

SEQ ID NO: 645252 - DNA, 15 bp, Homo sapiens
aaaaagggaagcaaa

SEQ ID NO: 645253 - DNA, 15 bp, Homo sapiens
aaaagggaagcaaaa

SEQ ID NO: 645254 - DNA, 15 bp, Homo sapiens
aaagggaagcaaaaa

SEQ ID NO: 645255 - DNA, 15 bp, Homo sapiens
aagggaagcaaaaag

SEQ ID NO: 645256 - DNA, 15 bp, Homo sapiens
agggaagcaaaaagc

SEQ ID NO: 645257 - DNA, 15 bp, Homo sapiens
gggaagcaaaaagca

SEQ ID NO: 645258 - DNA, 15 bp, Homo sapiens
ggaagcaaaaagcaa

SEQ ID NO: 645259 - DNA, 15 bp, Homo sapiens
gaagcaaaaagcaac

SEQ ID NO: 645260 - DNA, 15 bp, Homo sapiens
aagcaaaaagcaact

SEQ ID NO: 645261 - DNA, 15 bp, Homo sapiens
agcaaaaagcaacta

SEQ ID NO: 645262 - DNA, 15 bp, Homo sapiens
gcaaaaagcaactat

SEQ ID NO: 645263 - DNA, 15 bp, Homo sapiens
caaaaagcaactatc

SEQ ID NO: 645264 - DNA, 15 bp, Homo sapiens
aaaaagcaactatca

SEQ ID NO: 645265 - DNA, 15 bp, Homo sapiens
aaaagcaactatcac

SEQ ID NO: 645266 - DNA, 15 bp, Homo sapiens
aaagcaactatcact

SEQ ID NO: 645267 - DNA, 15 bp, Homo sapiens
aagcaactatcactt

SEQ ID NO: 645268 - DNA, 15 bp, Homo sapiens
agcaactatcactta

SEQ ID NO: 645269 - DNA, 15 bp, Homo sapiens
gcaactatcacttag

SEQ ID NO: 645270 - DNA, 15 bp, Homo sapiens
caactatcacttagt

SEQ ID NO: 645271 - DNA, 15 bp, Homo sapiens
aactatcacttagta

SEQ ID NO: 645272 - DNA, 15 bp, Homo sapiens
actatcacttagtat

SEQ ID NO: 645273 - DNA, 15 bp, Homo sapiens
ctatcacttagtatg

SEQ ID NO: 645274 - DNA, 15 bp, Homo sapiens
tatcacttagtatgt

SEQ ID NO: 645275 - DNA, 15 bp, Homo sapiens
atcacttagtatgtt

SEQ ID NO: 645276 - DNA, 15 bp, Homo sapiens
tcacttagtatgttt

SEQ ID NO: 645277 - DNA, 15 bp, Homo sapiens
cacttagtatgtttt

SEQ ID NO: 645278 - DNA, 15 bp, Homo sapiens
acttagtatgttttc

SEQ ID NO: 645279 - DNA, 15 bp, Homo sapiens
cttagtatgttttca

SEQ ID NO: 645280 - DNA, 15 bp, Homo sapiens
ttagtatgttttcac

SEQ ID NO: 645281 - DNA, 15 bp, Homo sapiens
tagtatgttttcact

SEQ ID NO: 645282 - DNA, 15 bp, Homo sapiens
agtatgttttcactt

SEQ ID NO: 645283 - DNA, 15 bp, Homo sapiens
gtatgttttcacttt

SEQ ID NO: 645284 - DNA, 15 bp, Homo sapiens
tatgttttcacttta

SEQ ID NO: 645285 - DNA, 15 bp, Homo sapiens
atgttttcactttag

SEQ ID NO: 645286 - DNA, 15 bp, Homo sapiens
tgttttcactttagg

SEQ ID NO: 645287 - DNA, 15 bp, Homo sapiens
gttttcactttaggt

SEQ ID NO: 645288 - DNA, 15 bp, Homo sapiens
ttttcactttaggta

SEQ ID NO: 645289 - DNA, 15 bp, Homo sapiens
tttcactttaggtat

SEQ ID NO: 645290 - DNA, 15 bp, Homo sapiens
ttcactttaggtatt

SEQ ID NO: 645291 - DNA, 15 bp, Homo sapiens
tcactttaggtattt

SEQ ID NO: 645292 - DNA, 15 bp, Homo sapiens
cactttaggtatttt

SEQ ID NO: 645293 - DNA, 15 bp, Homo sapiens
actttaggtatttta

SEQ ID NO: 645294 - DNA, 15 bp, Homo sapiens
ctttaggtattttat

SEQ ID NO: 645295 - DNA, 15 bp, Homo sapiens
tttaggtattttatc

SEQ ID NO: 645296 - DNA, 15 bp, Homo sapiens
ttaggtattttatct

SEQ ID NO: 645297 - DNA, 15 bp, Homo sapiens
taggtattttatctt

SEQ ID NO: 645298 - DNA, 15 bp, Homo sapiens
aggtattttatctta

SEQ ID NO: 645299 - DNA, 15 bp, Homo sapiens
ggtattttatcttac

SEQ ID NO: 645300 - DNA, 15 bp, Homo sapiens
gtattttatcttact

SEQ ID NO: 645301 - DNA, 15 bp, Homo sapiens
tattttatcttacta

SEQ ID NO: 645302 - DNA, 15 bp, Homo sapiens
attttatcttactaa

SEQ ID NO: 645303 - DNA, 15 bp, Homo sapiens
ttttatcttactaaa

SEQ ID NO: 645304 - DNA, 15 bp, Homo sapiens
tttatcttactaaac

SEQ ID NO: 645305 - DNA, 15 bp, Homo sapiens
ttatcttactaaacc

SEQ ID NO: 645306 - DNA, 15 bp, Homo sapiens
tatcttactaaacca

SEQ ID NO: 645307 - DNA, 15 bp, Homo sapiens
atcttactaaaccat

SEQ ID NO: 645308 - DNA, 15 bp, Homo sapiens
tcttactaaaccatt

SEQ ID NO: 645309 - DNA, 15 bp, Homo sapiens
cttactaaaccattc

SEQ ID NO: 645310 - DNA, 15 bp, Homo sapiens
ttactaaaccattcc

SEQ ID NO: 645311 - DNA, 15 bp, Homo sapiens
tactaaaccattcca

SEQ ID NO: 645312 - DNA, 15 bp, Homo sapiens
actaaaccattccac

SEQ ID NO: 645313 - DNA, 15 bp, Homo sapiens
ctaaaccattccact

SEQ ID NO: 645314 - DNA, 15 bp, Homo sapiens
taaaccattccactt

SEQ ID NO: 645315 - DNA, 15 bp, Homo sapiens
aaaccattccacttt

SEQ ID NO: 645316 - DNA, 15 bp, Homo sapiens
aaccattccactttc

SEQ ID NO: 645317 - DNA, 15 bp, Homo sapiens
accattccactttct

SEQ ID NO: 645318 - DNA, 15 bp, Homo sapiens
ccattccactttcta

SEQ ID NO: 645319 - DNA, 15 bp, Homo sapiens
cattccactttctat

SEQ ID NO: 645320 - DNA, 15 bp, Homo sapiens
attccactttctatg

SEQ ID NO: 645321 - DNA, 15 bp, Homo sapiens
ttccactttctatgt

SEQ ID NO: 645322 - DNA, 15 bp, Homo sapiens
tccactttctatgtg

SEQ ID NO: 645323 - DNA, 15 bp, Homo sapiens
ccactttctatgtgg

SEQ ID NO: 645324 - DNA, 15 bp, Homo sapiens
cactttctatgtggt

SEQ ID NO: 645325 - DNA, 15 bp, Homo sapiens
actttctatgtggta

SEQ ID NO: 645326 - DNA, 15 bp, Homo sapiens
ctttctatgtggtag

SEQ ID NO: 645327 - DNA, 15 bp, Homo sapiens
tttctatgtggtagg

SEQ ID NO: 645328 - DNA, 15 bp, Homo sapiens
ttctatgtggtaggt

SEQ ID NO: 645329 - DNA, 15 bp, Homo sapiens
tctatgtggtaggtt

SEQ ID NO: 645330 - DNA, 15 bp, Homo sapiens
ctatgtggtaggttt

SEQ ID NO: 645331 - DNA, 15 bp, Homo sapiens
tatgtggtaggtttc

SEQ ID NO: 645332 - DNA, 15 bp, Homo sapiens
atgtggtaggtttca

SEQ ID NO: 645333 - DNA, 15 bp, Homo sapiens
tgtggtaggtttcat

SEQ ID NO: 645334 - DNA, 15 bp, Homo sapiens
gtggtaggtttcatt

SEQ ID NO: 645335 - DNA, 15 bp, Homo sapiens
tggtaggtttcatta

SEQ ID NO: 645336 - DNA, 15 bp, Homo sapiens
ggtaggtttcattat

SEQ ID NO: 645337 - DNA, 15 bp, Homo sapiens
gtaggtttcattatc

SEQ ID NO: 645338 - DNA, 15 bp, Homo sapiens
taggtttcattatct

SEQ ID NO: 645339 - DNA, 15 bp, Homo sapiens
aggtttcattatctc

SEQ ID NO: 645340 - DNA, 15 bp, Homo sapiens
ggtttcattatctcc

SEQ ID NO: 645341 - DNA, 15 bp, Homo sapiens
gtttcattatctcca

SEQ ID NO: 645342 - DNA, 15 bp, Homo sapiens
tttcattatctccat

SEQ ID NO: 645343 - DNA, 15 bp, Homo sapiens
ttcattatctccatt

SEQ ID NO: 645344 - DNA, 15 bp, Homo sapiens
tcattatctccattt

SEQ ID NO: 645345 - DNA, 15 bp, Homo sapiens
cattatctccatttt

SEQ ID NO: 645346 - DNA, 15 bp, Homo sapiens
attatctccatttta

SEQ ID NO: 645347 - DNA, 15 bp, Homo sapiens
ttatctccattttat

SEQ ID NO: 645348 - DNA, 15 bp, Homo sapiens
tatctccattttata

SEQ ID NO: 645349 - DNA, 15 bp, Homo sapiens
atctccattttataa

SEQ ID NO: 645350 - DNA, 15 bp, Homo sapiens
tctccattttataag

SEQ ID NO: 645351 - DNA, 15 bp, Homo sapiens
ctccattttataagt

SEQ ID NO: 645352 - DNA, 15 bp, Homo sapiens
tccattttataagta

SEQ ID NO: 645353 - DNA, 15 bp, Homo sapiens
ccattttataagtaa

SEQ ID NO: 645354 - DNA, 15 bp, Homo sapiens
cattttataagtaaa

SEQ ID NO: 645355 - DNA, 15 bp, Homo sapiens
attttataagtaaag

SEQ ID NO: 645356 - DNA, 15 bp, Homo sapiens
ttttataagtaaagt

SEQ ID NO: 645357 - DNA, 15 bp, Homo sapiens
tttataagtaaagtc

SEQ ID NO: 645358 - DNA, 15 bp, Homo sapiens
ttataagtaaagtca

SEQ ID NO: 645359 - DNA, 15 bp, Homo sapiens
tataagtaaagtcat

SEQ ID NO: 645360 - DNA, 15 bp, Homo sapiens
ataagtaaagtcatc

SEQ ID NO: 645361 - DNA, 15 bp, Homo sapiens
taagtaaagtcatct

SEQ ID NO: 645362 - DNA, 15 bp, Homo sapiens
aagtaaagtcatcta

SEQ ID NO: 645363 - DNA, 15 bp, Homo sapiens
agtaaagtcatctaa

SEQ ID NO: 645364 - DNA, 15 bp, Homo sapiens
gtaaagtcatctaaa

SEQ ID NO: 645365 - DNA, 15 bp, Homo sapiens
taaagtcatctaaat

SEQ ID NO: 645366 - DNA, 15 bp, Homo sapiens
aaagtcatctaaatt

SEQ ID NO: 645367 - DNA, 15 bp, Homo sapiens
aagtcatctaaattc

SEQ ID NO: 645368 - DNA, 15 bp, Homo sapiens
agtcatctaaattca

SEQ ID NO: 645369 - DNA, 15 bp, Homo sapiens
gtcatctaaattcag

SEQ ID NO: 645370 - DNA, 15 bp, Homo sapiens
tcatctaaattcaga

SEQ ID NO: 645371 - DNA, 15 bp, Homo sapiens
catctaaattcagaa

SEQ ID NO: 645372 - DNA, 15 bp, Homo sapiens
atctaaattcagaaa

SEQ ID NO: 645373 - DNA, 15 bp, Homo sapiens
tctaaattcagaaag

SEQ ID NO: 645374 - DNA, 15 bp, Homo sapiens
ctaaattcagaaaga

SEQ ID NO: 645375 - DNA, 15 bp, Homo sapiens
taaattcagaaagac

SEQ ID NO: 645376 - DNA, 15 bp, Homo sapiens
aaattcagaaagaca

SEQ ID NO: 645377 - DNA, 15 bp, Homo sapiens
aattcagaaagacag

SEQ ID NO: 645378 - DNA, 15 bp, Homo sapiens
attcagaaagacagg

SEQ ID NO: 645379 - DNA, 15 bp, Homo sapiens
ttcagaaagacaggg

SEQ ID NO: 645380 - DNA, 15 bp, Homo sapiens
tcagaaagacagggt

SEQ ID NO: 645381 - DNA, 15 bp, Homo sapiens
cagaaagacagggta

SEQ ID NO: 645382 - DNA, 15 bp, Homo sapiens
agaaagacagggtaa

SEQ ID NO: 645383 - DNA, 15 bp, Homo sapiens
gaaagacagggtaaa

SEQ ID NO: 645384 - DNA, 15 bp, Homo sapiens
aaagacagggtaaat

SEQ ID NO: 645385 - DNA, 15 bp, Homo sapiens
aagacagggtaaatg

SEQ ID NO: 645386 - DNA, 15 bp, Homo sapiens
agacagggtaaatga

SEQ ID NO: 645387 - DNA, 15 bp, Homo sapiens
gacagggtaaatgac

SEQ ID NO: 645388 - DNA, 15 bp, Homo sapiens
acagggtaaatgact

SEQ ID NO: 645389 - DNA, 15 bp, Homo sapiens
cagggtaaatgactt

SEQ ID NO: 645390 - DNA, 15 bp, Homo sapiens
agggtaaatgacttc

SEQ ID NO: 645391 - DNA, 15 bp, Homo sapiens
gggtaaatgacttca

SEQ ID NO: 645392 - DNA, 15 bp, Homo sapiens
ggtaaatgacttcag

SEQ ID NO: 645393 - DNA, 15 bp, Homo sapiens
gtaaatgacttcaga

SEQ ID NO: 645394 - DNA, 15 bp, Homo sapiens
taaatgacttcagat

SEQ ID NO: 645395 - DNA, 15 bp, Homo sapiens
aaatgacttcagatt

SEQ ID NO: 645396 - DNA, 15 bp, Homo sapiens
aatgacttcagattc

SEQ ID NO: 645397 - DNA, 15 bp, Homo sapiens
atgacttcagattcc

SEQ ID NO: 645398 - DNA, 15 bp, Homo sapiens
tgacttcagattcca

SEQ ID NO: 645399 - DNA, 15 bp, Homo sapiens
gacttcagattccac

SEQ ID NO: 645400 - DNA, 15 bp, Homo sapiens
acttcagattccaca

SEQ ID NO: 645401 - DNA, 15 bp, Homo sapiens
cttcagattccacag

SEQ ID NO: 645402 - DNA, 15 bp, Homo sapiens
ttcagattccacagg

SEQ ID NO: 645403 - DNA, 15 bp, Homo sapiens
tcagattccacaggc

SEQ ID NO: 645404 - DNA, 15 bp, Homo sapiens
cagattccacaggcg

SEQ ID NO: 645405 - DNA, 15 bp, Homo sapiens
agattccacaggcgg

SEQ ID NO: 645406 - DNA, 15 bp, Homo sapiens
gattccacaggcggt

SEQ ID NO: 645407 - DNA, 15 bp, Homo sapiens
attccacaggcggtg

SEQ ID NO: 645408 - DNA, 15 bp, Homo sapiens
ttccacaggcggtga

SEQ ID NO: 645409 - DNA, 15 bp, Homo sapiens
tccacaggcggtgaa

SEQ ID NO: 645410 - DNA, 15 bp, Homo sapiens
ccacaggcggtgaag

SEQ ID NO: 645411 - DNA, 15 bp, Homo sapiens
cacaggcggtgaagc

SEQ ID NO: 645412 - DNA, 15 bp, Homo sapiens
acaggcggtgaagcc

SEQ ID NO: 645413 - DNA, 15 bp, Homo sapiens
caggcggtgaagcca

SEQ ID NO: 645414 - DNA, 15 bp, Homo sapiens
aggcggtgaagccag

SEQ ID NO: 645415 - DNA, 15 bp, Homo sapiens
ggcggtgaagccaga

SEQ ID NO: 645416 - DNA, 15 bp, Homo sapiens
gcggtgaagccagag

SEQ ID NO: 645417 - DNA, 15 bp, Homo sapiens
cggtgaagccagagt

SEQ ID NO: 645418 - DNA, 15 bp, Homo sapiens
ggtgaagccagagtt

SEQ ID NO: 645419 - DNA, 15 bp, Homo sapiens
gtgaagccagagttc

SEQ ID NO: 645420 - DNA, 15 bp, Homo sapiens
tgaagccagagttcc

SEQ ID NO: 645421 - DNA, 15 bp, Homo sapiens
gaagccagagttcca

SEQ ID NO: 645422 - DNA, 15 bp, Homo sapiens
aagccagagttccaa

SEQ ID NO: 645423 - DNA, 15 bp, Homo sapiens
agccagagttccaag

SEQ ID NO: 645424 - DNA, 15 bp, Homo sapiens
gccagagttccaagc

SEQ ID NO: 645425 - DNA, 15 bp, Homo sapiens
ccagagttccaagct

SEQ ID NO: 645426 - DNA, 15 bp, Homo sapiens
cagagttccaagctg

SEQ ID NO: 645427 - DNA, 15 bp, Homo sapiens
agagttccaagctgg

SEQ ID NO: 645428 - DNA, 15 bp, Homo sapiens
gagttccaagctggg

SEQ ID NO: 645429 - DNA, 15 bp, Homo sapiens
agttccaagctgggt

SEQ ID NO: 645430 - DNA, 15 bp, Homo sapiens
gttccaagctgggtc

SEQ ID NO: 645431 - DNA, 15 bp, Homo sapiens
ttccaagctgggtct

SEQ ID NO: 645432 - DNA, 15 bp, Homo sapiens
tccaagctgggtcta

SEQ ID NO: 645433 - DNA, 15 bp, Homo sapiens
ccaagctgggtctat

SEQ ID NO: 645434 - DNA, 15 bp, Homo sapiens
caagctgggtctatt

SEQ ID NO: 645435 - DNA, 15 bp, Homo sapiens
aagctgggtctattt

SEQ ID NO: 645436 - DNA, 15 bp, Homo sapiens
agctgggtctattta

SEQ ID NO: 645437 - DNA, 15 bp, Homo sapiens
gctgggtctatttaa

SEQ ID NO: 645438 - DNA, 15 bp, Homo sapiens
ctgggtctatttaac

SEQ ID NO: 645439 - DNA, 15 bp, Homo sapiens
tgggtctatttaaca

SEQ ID NO: 645440 - DNA, 15 bp, Homo sapiens
gggtctatttaacac

SEQ ID NO: 645441 - DNA, 15 bp, Homo sapiens
ggtctatttaacact

SEQ ID NO: 645442 - DNA, 15 bp, Homo sapiens
gtctatttaacacta

SEQ ID NO: 645443 - DNA, 15 bp, Homo sapiens
tctatttaacactaa

SEQ ID NO: 645444 - DNA, 15 bp, Homo sapiens
ctatttaacactaag

SEQ ID NO: 645445 - DNA, 15 bp, Homo sapiens
tatttaacactaagg

SEQ ID NO: 645446 - DNA, 15 bp, Homo sapiens
atttaacactaagga

SEQ ID NO: 645447 - DNA, 15 bp, Homo sapiens
tttaacactaaggaa

SEQ ID NO: 645448 - DNA, 15 bp, Homo sapiens
ttaacactaaggaac

SEQ ID NO: 645449 - DNA, 15 bp, Homo sapiens
taacactaaggaact

SEQ ID NO: 645450 - DNA, 15 bp, Homo sapiens
aacactaaggaactt

SEQ ID NO: 645451 - DNA, 15 bp, Homo sapiens
acactaaggaacttc

SEQ ID NO: 645452 - DNA, 15 bp, Homo sapiens
cactaaggaacttcc

SEQ ID NO: 645453 - DNA, 15 bp, Homo sapiens
actaaggaacttcct

SEQ ID NO: 645454 - DNA, 15 bp, Homo sapiens
ctaaggaacttcctt

SEQ ID NO: 645455 - DNA, 15 bp, Homo sapiens
taaggaacttccttg

SEQ ID NO: 645456 - DNA, 15 bp, Homo sapiens
aaggaacttccttgc

SEQ ID NO: 645457 - DNA, 15 bp, Homo sapiens
aggaacttccttgcc

SEQ ID NO: 645458 - DNA, 15 bp, Homo sapiens
ggaacttccttgcct

SEQ ID NO: 645459 - DNA, 15 bp, Homo sapiens
gaacttccttgcctc

SEQ ID NO: 645460 - DNA, 15 bp, Homo sapiens
aacttccttgcctcc

SEQ ID NO: 645461 - DNA, 15 bp, Homo sapiens
acttccttgcctccc

SEQ ID NO: 645462 - DNA, 15 bp, Homo sapiens
cttccttgcctcccg

SEQ ID NO: 645463 - DNA, 15 bp, Homo sapiens
ttccttgcctcccgc

SEQ ID NO: 645464 - DNA, 15 bp, Homo sapiens
tccttgcctcccgct

SEQ ID NO: 645465 - DNA, 15 bp, Homo sapiens
ccttgcctcccgcta

SEQ ID NO: 645466 - DNA, 15 bp, Homo sapiens
cttgcctcccgctaa

SEQ ID NO: 645467 - DNA, 15 bp, Homo sapiens
ttgcctcccgctaaa

SEQ ID NO: 645468 - DNA, 15 bp, Homo sapiens
tgcctcccgctaaaa

SEQ ID NO: 645469 - DNA, 15 bp, Homo sapiens
gcctcccgctaaaaa

SEQ ID NO: 645470 - DNA, 15 bp, Homo sapiens
cctcccgctaaaaac

SEQ ID NO: 645471 - DNA, 15 bp, Homo sapiens
ctcccgctaaaaacc

SEQ ID NO: 645472 - DNA, 15 bp, Homo sapiens
tcccgctaaaaacct

SEQ ID NO: 645473 - DNA, 15 bp, Homo sapiens
cccgctaaaaacctt

SEQ ID NO: 645474 - DNA, 15 bp, Homo sapiens
ccgctaaaaacctta

SEQ ID NO: 645475 - DNA, 15 bp, Homo sapiens
cgctaaaaaccttag

SEQ ID NO: 645476 - DNA, 15 bp, Homo sapiens
gctaaaaaccttaga

SEQ ID NO: 645477 - DNA, 15 bp, Homo sapiens
ctaaaaaccttagag

SEQ ID NO: 645478 - DNA, 15 bp, Homo sapiens
taaaaaccttagaga

SEQ ID NO: 645479 - DNA, 15 bp, Homo sapiens
aaaaaccttagagaa

SEQ ID NO: 645480 - DNA, 15 bp, Homo sapiens
aaaaccttagagaaa

SEQ ID NO: 645481 - DNA, 15 bp, Homo sapiens
aaaccttagagaaac

SEQ ID NO: 645482 - DNA, 15 bp, Homo sapiens
aaccttagagaaact

SEQ ID NO: 645483 - DNA, 15 bp, Homo sapiens
accttagagaaactt

SEQ ID NO: 645484 - DNA, 15 bp, Homo sapiens
ccttagagaaacttt

SEQ ID NO: 645485 - DNA, 15 bp, Homo sapiens
cttagagaaactttc

SEQ ID NO: 645486 - DNA, 15 bp, Homo sapiens
ttagagaaactttcc

SEQ ID NO: 645487 - DNA, 15 bp, Homo sapiens
tagagaaactttcca

SEQ ID NO: 645488 - DNA, 15 bp, Homo sapiens
agagaaactttccac

SEQ ID NO: 645489 - DNA, 15 bp, Homo sapiens
gagaaactttccaca

SEQ ID NO: 645490 - DNA, 15 bp, Homo sapiens
agaaactttccacat

SEQ ID NO: 645491 - DNA, 15 bp, Homo sapiens
gaaactttccacatg

SEQ ID NO: 645492 - DNA, 15 bp, Homo sapiens
aaactttccacatgg

SEQ ID NO: 645493 - DNA, 15 bp, Homo sapiens
aactttccacatggg

SEQ ID NO: 645494 - DNA, 15 bp, Homo sapiens
actttccacatggga

SEQ ID NO: 645495 - DNA, 15 bp, Homo sapiens
ctttccacatgggag

SEQ ID NO: 645496 - DNA, 15 bp, Homo sapiens
tttccacatgggagg

SEQ ID NO: 645497 - DNA, 15 bp, Homo sapiens
ttccacatgggaggg

SEQ ID NO: 645498 - DNA, 15 bp, Homo sapiens
tccacatgggagggt

SEQ ID NO: 645499 - DNA, 15 bp, Homo sapiens
ccacatgggagggtg

SEQ ID NO: 645500 - DNA, 15 bp, Homo sapiens
cacatgggagggtgg

SEQ ID NO: 645501 - DNA, 15 bp, Homo sapiens
acatgggagggtggt

SEQ ID NO: 645502 - DNA, 15 bp, Homo sapiens
catgggagggtggtt

SEQ ID NO: 645503 - DNA, 15 bp, Homo sapiens
atgggagggtggttt

SEQ ID NO: 645504 - DNA, 15 bp, Homo sapiens
tgggagggtggtttt

SEQ ID NO: 645505 - DNA, 15 bp, Homo sapiens
gggagggtggtttta

SEQ ID NO: 645506 - DNA, 15 bp, Homo sapiens
ggagggtggttttaa

SEQ ID NO: 645507 - DNA, 15 bp, Homo sapiens
gagggtggttttaag

SEQ ID NO: 645508 - DNA, 15 bp, Homo sapiens
agggtggttttaagt

SEQ ID NO: 645509 - DNA, 15 bp, Homo sapiens
gggtggttttaagtc

SEQ ID NO: 645510 - DNA, 15 bp, Homo sapiens
ggtggttttaagtcc

SEQ ID NO: 645511 - DNA, 15 bp, Homo sapiens
gtggttttaagtccc

SEQ ID NO: 645512 - DNA, 15 bp, Homo sapiens
tggttttaagtcccg

SEQ ID NO: 645513 - DNA, 15 bp, Homo sapiens
ggttttaagtcccga

SEQ ID NO: 645514 - DNA, 15 bp, Homo sapiens
gttttaagtcccgaa

SEQ ID NO: 645515 - DNA, 15 bp, Homo sapiens
ttttaagtcccgaaa

SEQ ID NO: 645516 - DNA, 15 bp, Homo sapiens
tttaagtcccgaaaa

SEQ ID NO: 645517 - DNA, 15 bp, Homo sapiens
ttaagtcccgaaaaa

SEQ ID NO: 645518 - DNA, 15 bp, Homo sapiens
taagtcccgaaaaaa

SEQ ID NO: 645519 - DNA, 15 bp, Homo sapiens
aagtcccgaaaaaaa

SEQ ID NO: 645520 - DNA, 15 bp, Homo sapiens
agtcccgaaaaaaaa

SEQ ID NO: 645521 - DNA, 15 bp, Homo sapiens
gtcccgaaaaaaaaa

SEQ ID NO: 645522 - DNA, 15 bp, Homo sapiens
tcccgaaaaaaaaaa

SEQ ID NO: 645523 - DNA, 15 bp, Homo sapiens
cccgaaaaaaaaaaa

SEQ ID NO: 645524 - DNA, 15 bp, Homo sapiens
ccgaaaaaaaaaaaa

SEQ ID NO: 645525 - DNA, 15 bp, Homo sapiens
cgaaaaaaaaaaaat

SEQ ID NO: 645526 - DNA, 15 bp, Homo sapiens
gaaaaaaaaaaaata

SEQ ID NO: 645527 - DNA, 15 bp, Homo sapiens
aaaaaaaaaaaatag

SEQ ID NO: 645528 - DNA, 15 bp, Homo sapiens
aaaaaaaaaaatagc

SEQ ID NO: 645529 - DNA, 15 bp, Homo sapiens
aaaaaaaaaatagct

SEQ ID NO: 645530 - DNA, 15 bp, Homo sapiens
aaaaaaaaatagctt

SEQ ID NO: 645531 - DNA, 15 bp, Homo sapiens
aaaaaaaatagcttc

SEQ ID NO: 645532 - DNA, 15 bp, Homo sapiens
aaaaaaatagcttct

SEQ ID NO: 645533 - DNA, 15 bp, Homo sapiens
aaaaaatagcttctg

SEQ ID NO: 645534 - DNA, 15 bp, Homo sapiens
aaaaatagcttctgc

SEQ ID NO: 645535 - DNA, 15 bp, Homo sapiens
aaaatagcttctgct

SEQ ID NO: 645536 - DNA, 15 bp, Homo sapiens
aaatagcttctgctt

SEQ ID NO: 645537 - DNA, 15 bp, Homo sapiens
aatagcttctgcttg

SEQ ID NO: 645538 - DNA, 15 bp, Homo sapiens
atagcttctgcttga

SEQ ID NO: 645539 - DNA, 15 bp, Homo sapiens
tagcttctgcttgat

SEQ ID NO: 645540 - DNA, 15 bp, Homo sapiens
agcttctgcttgata

SEQ ID NO: 645541 - DNA, 15 bp, Homo sapiens
gcttctgcttgataa

SEQ ID NO: 645542 - DNA, 15 bp, Homo sapiens
cttctgcttgataag

SEQ ID NO: 645543 - DNA, 15 bp, Homo sapiens
ttctgcttgataaga

SEQ ID NO: 645544 - DNA, 15 bp, Homo sapiens
tctgcttgataagaa

SEQ ID NO: 645545 - DNA, 15 bp, Homo sapiens
ctgcttgataagaac

SEQ ID NO: 645546 - DNA, 15 bp, Homo sapiens
tgcttgataagaact

SEQ ID NO: 645547 - DNA, 15 bp, Homo sapiens
gcttgataagaactc

SEQ ID NO: 645548 - DNA, 15 bp, Homo sapiens
cttgataagaactcc

SEQ ID NO: 645549 - DNA, 15 bp, Homo sapiens
ttgataagaactcct

SEQ ID NO: 645550 - DNA, 15 bp, Homo sapiens
tgataagaactcctt

SEQ ID NO: 645551 - DNA, 15 bp, Homo sapiens
gataagaactccttc

SEQ ID NO: 645552 - DNA, 15 bp, Homo sapiens
ataagaactccttcc

SEQ ID NO: 645553 - DNA, 15 bp, Homo sapiens
taagaactccttcct

SEQ ID NO: 645554 - DNA, 15 bp, Homo sapiens
aagaactccttccta

SEQ ID NO: 645555 - DNA, 15 bp, Homo sapiens
agaactccttcctaa

SEQ ID NO: 645556 - DNA, 15 bp, Homo sapiens
gaactccttcctaat

SEQ ID NO: 645557 - DNA, 15 bp, Homo sapiens
aactccttcctaatt

SEQ ID NO: 645558 - DNA, 15 bp, Homo sapiens
actccttcctaattc

SEQ ID NO: 645559 - DNA, 15 bp, Homo sapiens
ctccttcctaattct

SEQ ID NO: 645560 - DNA, 15 bp, Homo sapiens
tccttcctaattctg

SEQ ID NO: 645561 - DNA, 15 bp, Homo sapiens
ccttcctaattctgt

SEQ ID NO: 645562 - DNA, 15 bp, Homo sapiens
cttcctaattctgtt

SEQ ID NO: 645563 - DNA, 15 bp, Homo sapiens
ttcctaattctgttt

SEQ ID NO: 645564 - DNA, 15 bp, Homo sapiens
tcctaattctgtttt

SEQ ID NO: 645565 - DNA, 15 bp, Homo sapiens
cctaattctgttttt

SEQ ID NO: 645566 - DNA, 15 bp, Homo sapiens
ctaattctgtttttt

SEQ ID NO: 645567 - DNA, 15 bp, Homo sapiens
taattctgttttttt

SEQ ID NO: 645568 - DNA, 15 bp, Homo sapiens
aattctgttttttta

SEQ ID NO: 645569 - DNA, 15 bp, Homo sapiens
attctgtttttttac

SEQ ID NO: 645570 - DNA, 15 bp, Homo sapiens
ttctgtttttttaca

SEQ ID NO: 645571 - DNA, 15 bp, Homo sapiens
tctgtttttttacaa

SEQ ID NO: 645572 - DNA, 15 bp, Homo sapiens
ctgtttttttacaaa

SEQ ID NO: 645573 - DNA, 15 bp, Homo sapiens
tgtttttttacaaat

SEQ ID NO: 645574 - DNA, 15 bp, Homo sapiens
gtttttttacaaatt

SEQ ID NO: 645575 - DNA, 15 bp, Homo sapiens
tttttttacaaatta

SEQ ID NO: 645576 - DNA, 15 bp, Homo sapiens
ttttttacaaattaa

SEQ ID NO: 645577 - DNA, 15 bp, Homo sapiens
tttttacaaattaag

SEQ ID NO: 645578 - DNA, 15 bp, Homo sapiens
ttttacaaattaaga

SEQ ID NO: 645579 - DNA, 15 bp, Homo sapiens
tttacaaattaagaa

SEQ ID NO: 645580 - DNA, 15 bp, Homo sapiens
ttacaaattaagaaa

SEQ ID NO: 645581 - DNA, 15 bp, Homo sapiens
tacaaattaagaaac

SEQ ID NO: 645582 - DNA, 15 bp, Homo sapiens
acaaattaagaaaca

SEQ ID NO: 645583 - DNA, 15 bp, Homo sapiens
caaattaagaaacaa

SEQ ID NO: 645584 - DNA, 15 bp, Homo sapiens
aaattaagaaacaat

SEQ ID NO: 645585 - DNA, 15 bp, Homo sapiens
aattaagaaacaata

SEQ ID NO: 645586 - DNA, 15 bp, Homo sapiens
attaagaaacaatac

SEQ ID NO: 645587 - DNA, 15 bp, Homo sapiens
ttaagaaacaataca

SEQ ID NO: 645588 - DNA, 15 bp, Homo sapiens
taagaaacaatacag

SEQ ID NO: 645589 - DNA, 15 bp, Homo sapiens
aagaaacaatacaga

SEQ ID NO: 645590 - DNA, 15 bp, Homo sapiens
agaaacaatacagaa

SEQ ID NO: 645591 - DNA, 15 bp, Homo sapiens
gaaacaatacagaaa

SEQ ID NO: 645592 - DNA, 15 bp, Homo sapiens
aaacaatacagaaaa

SEQ ID NO: 645593 - DNA, 15 bp, Homo sapiens
aacaatacagaaaag

SEQ ID NO: 645594 - DNA, 15 bp, Homo sapiens
acaatacagaaaagt

SEQ ID NO: 645595 - DNA, 15 bp, Homo sapiens
caatacagaaaagtc

SEQ ID NO: 645596 - DNA, 15 bp, Homo sapiens
aatacagaaaagtca

SEQ ID NO: 645597 - DNA, 15 bp, Homo sapiens
atacagaaaagtcat

SEQ ID NO: 645598 - DNA, 15 bp, Homo sapiens
tacagaaaagtcatt

SEQ ID NO: 645599 - DNA, 15 bp, Homo sapiens
acagaaaagtcattg

SEQ ID NO: 645600 - DNA, 15 bp, Homo sapiens
cagaaaagtcattga

SEQ ID NO: 645601 - DNA, 15 bp, Homo sapiens
agaaaagtcattgag

SEQ ID NO: 645602 - DNA, 15 bp, Homo sapiens
gaaaagtcattgagg

SEQ ID NO: 645603 - DNA, 15 bp, Homo sapiens
aaaagtcattgaggt

SEQ ID NO: 645604 - DNA, 15 bp, Homo sapiens
aaagtcattgaggtc

SEQ ID NO: 645605 - DNA, 15 bp, Homo sapiens
aagtcattgaggtca

SEQ ID NO: 645606 - DNA, 15 bp, Homo sapiens
agtcattgaggtcaa

SEQ ID NO: 645607 - DNA, 15 bp, Homo sapiens
gtcattgaggtcaaa

SEQ ID NO: 645608 - DNA, 15 bp, Homo sapiens
tcattgaggtcaaaa

SEQ ID NO: 645609 - DNA, 15 bp, Homo sapiens
cattgaggtcaaaag

SEQ ID NO: 645610 - DNA, 15 bp, Homo sapiens
attgaggtcaaaagt

SEQ ID NO: 645611 - DNA, 15 bp, Homo sapiens
ttgaggtcaaaagtt

SEQ ID NO: 645612 - DNA, 15 bp, Homo sapiens
tgaggtcaaaagttg

SEQ ID NO: 645613 - DNA, 15 bp, Homo sapiens
gaggtcaaaagttgt

SEQ ID NO: 645614 - DNA, 15 bp, Homo sapiens
aggtcaaaagttgtt

SEQ ID NO: 645615 - DNA, 15 bp, Homo sapiens
ggtcaaaagttgttg

SEQ ID NO: 645616 - DNA, 15 bp, Homo sapiens
gtcaaaagttgttgc

SEQ ID NO: 645617 - DNA, 15 bp, Homo sapiens
tcaaaagttgttgca

SEQ ID NO: 645618 - DNA, 15 bp, Homo sapiens
caaaagttgttgcaa

SEQ ID NO: 645619 - DNA, 15 bp, Homo sapiens
aaaagttgttgcaaa

SEQ ID NO: 645620 - DNA, 15 bp, Homo sapiens
aaagttgttgcaaaa

SEQ ID NO: 645621 - DNA, 15 bp, Homo sapiens
aagttgttgcaaaat

SEQ ID NO: 645622 - DNA, 15 bp, Homo sapiens
agttgttgcaaaatt

SEQ ID NO: 645623 - DNA, 15 bp, Homo sapiens
gttgttgcaaaatta

SEQ ID NO: 645624 - DNA, 15 bp, Homo sapiens
ttgttgcaaaattaa

SEQ ID NO: 645625 - DNA, 15 bp, Homo sapiens
tgttgcaaaattaac

SEQ ID NO: 645626 - DNA, 15 bp, Homo sapiens
gttgcaaaattaaca

SEQ ID NO: 645627 - DNA, 15 bp, Homo sapiens
ttgcaaaattaacag

SEQ ID NO: 645628 - DNA, 15 bp, Homo sapiens
tgcaaaattaacagc

SEQ ID NO: 645629 - DNA, 15 bp, Homo sapiens
gcaaaattaacagct

SEQ ID NO: 645630 - DNA, 15 bp, Homo sapiens
caaaattaacagcta

SEQ ID NO: 645631 - DNA, 15 bp, Homo sapiens
aaaattaacagctaa

SEQ ID NO: 645632 - DNA, 15 bp, Homo sapiens
aaattaacagctaaa

SEQ ID NO: 645633 - DNA, 15 bp, Homo sapiens
aattaacagctaaaa

SEQ ID NO: 645634 - DNA, 15 bp, Homo sapiens
attaacagctaaaaa

SEQ ID NO: 645635 - DNA, 15 bp, Homo sapiens
ttaacagctaaaaaa

SEQ ID NO: 645636 - DNA, 15 bp, Homo sapiens
taacagctaaaaaac

SEQ ID NO: 645637 - DNA, 15 bp, Homo sapiens
aacagctaaaaaact

SEQ ID NO: 645638 - DNA, 15 bp, Homo sapiens
acagctaaaaaacta

SEQ ID NO: 645639 - DNA, 15 bp, Homo sapiens
cagctaaaaaactac

SEQ ID NO: 645640 - DNA, 15 bp, Homo sapiens
agctaaaaaactacc

SEQ ID NO: 645641 - DNA, 15 bp, Homo sapiens
gctaaaaaactaccc

SEQ ID NO: 645642 - DNA, 15 bp, Homo sapiens
ctaaaaaactaccca

SEQ ID NO: 645643 - DNA, 15 bp, Homo sapiens
taaaaaactacccac

SEQ ID NO: 645644 - DNA, 15 bp, Homo sapiens
aaaaaactacccaca

SEQ ID NO: 645645 - DNA, 15 bp, Homo sapiens
aaaaactacccacaa

SEQ ID NO: 645646 - DNA, 15 bp, Homo sapiens
aaaactacccacaaa

SEQ ID NO: 645647 - DNA, 15 bp, Homo sapiens
aaactacccacaaaa

SEQ ID NO: 645648 - DNA, 15 bp, Homo sapiens
aactacccacaaaaa

SEQ ID NO: 645649 - DNA, 15 bp, Homo sapiens
actacccacaaaaaa

SEQ ID NO: 645650 - DNA, 15 bp, Homo sapiens
ctacccacaaaaaaa

SEQ ID NO: 645651 - DNA, 15 bp, Homo sapiens
tacccacaaaaaaac

SEQ ID NO: 645652 - DNA, 15 bp, Homo sapiens
acccacaaaaaaaca

SEQ ID NO: 645653 - DNA, 15 bp, Homo sapiens
cccacaaaaaaacac

SEQ ID NO: 645654 - DNA, 15 bp, Homo sapiens
ccacaaaaaaacaca

SEQ ID NO: 645655 - DNA, 15 bp, Homo sapiens
cacaaaaaaacacac

SEQ ID NO: 645656 - DNA, 15 bp, Homo sapiens
acaaaaaaacacaca

SEQ ID NO: 645657 - DNA, 15 bp, Homo sapiens
caaaaaaacacacaa

SEQ ID NO: 645658 - DNA, 15 bp, Homo sapiens
aaaaaaacacacaaa

SEQ ID NO: 645659 - DNA, 15 bp, Homo sapiens
aaaaaacacacaaaa

SEQ ID NO: 645660 - DNA, 15 bp, Homo sapiens
aaaaacacacaaaaa

SEQ ID NO: 645661 - DNA, 15 bp, Homo sapiens
aaaacacacaaaaaa

SEQ ID NO: 645662 - DNA, 15 bp, Homo sapiens
aaacacacaaaaaag

SEQ ID NO: 645663 - DNA, 15 bp, Homo sapiens
aacacacaaaaaagt

SEQ ID NO: 645664 - DNA, 15 bp, Homo sapiens
acacacaaaaaagtg

SEQ ID NO: 645665 - DNA, 15 bp, Homo sapiens
cacacaaaaaagtgc

SEQ ID NO: 645666 - DNA, 15 bp, Homo sapiens
acacaaaaaagtgca

SEQ ID NO: 645667 - DNA, 15 bp, Homo sapiens
cacaaaaaagtgcat

SEQ ID NO: 645668 - DNA, 15 bp, Homo sapiens
acaaaaaagtgcata

SEQ ID NO: 645669 - DNA, 15 bp, Homo sapiens
caaaaaagtgcataa

SEQ ID NO: 645670 - DNA, 15 bp, Homo sapiens
aaaaaagtgcataag

SEQ ID NO: 645671 - DNA, 15 bp, Homo sapiens
aaaaagtgcataagc

SEQ ID NO: 645672 - DNA, 15 bp, Homo sapiens
aaaagtgcataagca

SEQ ID NO: 645673 - DNA, 15 bp, Homo sapiens
aaagtgcataagcag

SEQ ID NO: 645674 - DNA, 15 bp, Homo sapiens
aagtgcataagcagt

SEQ ID NO: 645675 - DNA, 15 bp, Homo sapiens
agtgcataagcagta

SEQ ID NO: 645676 - DNA, 15 bp, Homo sapiens
gtgcataagcagtaa

SEQ ID NO: 645677 - DNA, 15 bp, Homo sapiens
tgcataagcagtaat

SEQ ID NO: 645678 - DNA, 15 bp, Homo sapiens
gcataagcagtaatt

SEQ ID NO: 645679 - DNA, 15 bp, Homo sapiens
cataagcagtaattt

SEQ ID NO: 645680 - DNA, 15 bp, Homo sapiens
ataagcagtaatttg

SEQ ID NO: 645681 - DNA, 15 bp, Homo sapiens
taagcagtaatttgc

SEQ ID NO: 645682 - DNA, 15 bp, Homo sapiens
aagcagtaatttgca

SEQ ID NO: 645683 - DNA, 15 bp, Homo sapiens
agcagtaatttgcaa

SEQ ID NO: 645684 - DNA, 15 bp, Homo sapiens
gcagtaatttgcaat

SEQ ID NO: 645685 - DNA, 15 bp, Homo sapiens
cagtaatttgcaata

SEQ ID NO: 645686 - DNA, 15 bp, Homo sapiens
agtaatttgcaatag

SEQ ID NO: 645687 - DNA, 15 bp, Homo sapiens
gtaatttgcaatagg

SEQ ID NO: 645688 - DNA, 15 bp, Homo sapiens
taatttgcaatagga

SEQ ID NO: 645689 - DNA, 15 bp, Homo sapiens
aatttgcaataggaa

SEQ ID NO: 645690 - DNA, 15 bp, Homo sapiens
atttgcaataggaaa

SEQ ID NO: 645691 - DNA, 15 bp, Homo sapiens
tttgcaataggaaat

SEQ ID NO: 645692 - DNA, 15 bp, Homo sapiens
ttgcaataggaaatc

SEQ ID NO: 645693 - DNA, 15 bp, Homo sapiens
tgcaataggaaatct

SEQ ID NO: 645694 - DNA, 15 bp, Homo sapiens
gcaataggaaatctg

SEQ ID NO: 645695 - DNA, 15 bp, Homo sapiens
caataggaaatctgc

SEQ ID NO: 645696 - DNA, 15 bp, Homo sapiens
aataggaaatctgcc

SEQ ID NO: 645697 - DNA, 15 bp, Homo sapiens
ataggaaatctgccc

SEQ ID NO: 645698 - DNA, 15 bp, Homo sapiens
taggaaatctgccct

SEQ ID NO: 645699 - DNA, 15 bp, Homo sapiens
aggaaatctgcccta

SEQ ID NO: 645700 - DNA, 15 bp, Homo sapiens
ggaaatctgccctac

SEQ ID NO: 645701 - DNA, 15 bp, Homo sapiens
gaaatctgccctact

SEQ ID NO: 645702 - DNA, 15 bp, Homo sapiens
aaatctgccctactg

SEQ ID NO: 645703 - DNA, 15 bp, Homo sapiens
aatctgccctactga

SEQ ID NO: 645704 - DNA, 15 bp, Homo sapiens
atctgccctactgaa

SEQ ID NO: 645705 - DNA, 15 bp, Homo sapiens
tctgccctactgaac

SEQ ID NO: 645706 - DNA, 15 bp, Homo sapiens
ctgccctactgaaca

SEQ ID NO: 645707 - DNA, 15 bp, Homo sapiens
tgccctactgaacag

SEQ ID NO: 645708 - DNA, 15 bp, Homo sapiens
gccctactgaacaga

SEQ ID NO: 645709 - DNA, 15 bp, Homo sapiens
ccctactgaacagac

SEQ ID NO: 645710 - DNA, 15 bp, Homo sapiens
cctactgaacagact

SEQ ID NO: 645711 - DNA, 15 bp, Homo sapiens
ctactgaacagactc

SEQ ID NO: 645712 - DNA, 15 bp, Homo sapiens
tactgaacagactca

SEQ ID NO: 645713 - DNA, 15 bp, Homo sapiens
actgaacagactcaa

SEQ ID NO: 645714 - DNA, 15 bp, Homo sapiens
ctgaacagactcaac

SEQ ID NO: 645715 - DNA, 15 bp, Homo sapiens
tgaacagactcaaca

SEQ ID NO: 645716 - DNA, 15 bp, Homo sapiens
gaacagactcaacaa

SEQ ID NO: 645717 - DNA, 15 bp, Homo sapiens
aacagactcaacaaa

SEQ ID NO: 645718 - DNA, 15 bp, Homo sapiens
acagactcaacaaat

SEQ ID NO: 645719 - DNA, 15 bp, Homo sapiens
cagactcaacaaata

SEQ ID NO: 645720 - DNA, 15 bp, Homo sapiens
agactcaacaaatac

SEQ ID NO: 645721 - DNA, 15 bp, Homo sapiens
gactcaacaaatact

SEQ ID NO: 645722 - DNA, 15 bp, Homo sapiens
actcaacaaatactt

SEQ ID NO: 645723 - DNA, 15 bp, Homo sapiens
ctcaacaaatacttg

SEQ ID NO: 645724 - DNA, 15 bp, Homo sapiens
tcaacaaatacttga

SEQ ID NO: 645725 - DNA, 15 bp, Homo sapiens
caacaaatacttgat

SEQ ID NO: 645726 - DNA, 15 bp, Homo sapiens
aacaaatacttgatt

SEQ ID NO: 645727 - DNA, 15 bp, Homo sapiens
acaaatacttgattg

SEQ ID NO: 645728 - DNA, 15 bp, Homo sapiens
caaatacttgattgt

SEQ ID NO: 645729 - DNA, 15 bp, Homo sapiens
aaatacttgattgtt

SEQ ID NO: 645730 - DNA, 15 bp, Homo sapiens
aatacttgattgttt

SEQ ID NO: 645731 - DNA, 15 bp, Homo sapiens
atacttgattgtttc

SEQ ID NO: 645732 - DNA, 15 bp, Homo sapiens
tacttgattgtttct

SEQ ID NO: 645733 - DNA, 15 bp, Homo sapiens
acttgattgtttctc

SEQ ID NO: 645734 - DNA, 15 bp, Homo sapiens
cttgattgtttctct

SEQ ID NO: 645735 - DNA, 15 bp, Homo sapiens
ttgattgtttctctc

SEQ ID NO: 645736 - DNA, 15 bp, Homo sapiens
tgattgtttctctct

SEQ ID NO: 645737 - DNA, 15 bp, Homo sapiens
gattgtttctctctg

SEQ ID NO: 645738 - DNA, 15 bp, Homo sapiens
attgtttctctctgg

SEQ ID NO: 645739 - DNA, 15 bp, Homo sapiens
ttgtttctctctggg

SEQ ID NO: 645740 - DNA, 15 bp, Homo sapiens
tgtttctctctgggt

SEQ ID NO: 645741 - DNA, 15 bp, Homo sapiens
gtttctctctgggtt

SEQ ID NO: 645742 - DNA, 15 bp, Homo sapiens
tttctctctgggttt

SEQ ID NO: 645743 - DNA, 15 bp, Homo sapiens
ttctctctgggtttt

SEQ ID NO: 645744 - DNA, 15 bp, Homo sapiens
tctctctgggttttg

SEQ ID NO: 645745 - DNA, 15 bp, Homo sapiens
ctctctgggttttga

SEQ ID NO: 645746 - DNA, 15 bp, Homo sapiens
tctctgggttttgag

SEQ ID NO: 645747 - DNA, 15 bp, Homo sapiens
ctctgggttttgagt

SEQ ID NO: 645748 - DNA, 15 bp, Homo sapiens
tctgggttttgagtt

SEQ ID NO: 645749 - DNA, 15 bp, Homo sapiens
ctgggttttgagtta

SEQ ID NO: 645750 - DNA, 15 bp, Homo sapiens
tgggttttgagttat

SEQ ID NO: 645751 - DNA, 15 bp, Homo sapiens
gggttttgagttatt

SEQ ID NO: 645752 - DNA, 15 bp, Homo sapiens
ggttttgagttattg

SEQ ID NO: 645753 - DNA, 15 bp, Homo sapiens
gttttgagttattgc

SEQ ID NO: 645754 - DNA, 15 bp, Homo sapiens
ttttgagttattgct

SEQ ID NO: 645755 - DNA, 15 bp, Homo sapiens
tttgagttattgctg

SEQ ID NO: 645756 - DNA, 15 bp, Homo sapiens
ttgagttattgctgt

SEQ ID NO: 645757 - DNA, 15 bp, Homo sapiens
tgagttattgctgtt

SEQ ID NO: 645758 - DNA, 15 bp, Homo sapiens
gagttattgctgttt

SEQ ID NO: 645759 - DNA, 15 bp, Homo sapiens
agttattgctgttta

SEQ ID NO: 645760 - DNA, 15 bp, Homo sapiens
gttattgctgtttag

SEQ ID NO: 645761 - DNA, 15 bp, Homo sapiens
ttattgctgtttagt

SEQ ID NO: 645762 - DNA, 15 bp, Homo sapiens
tattgctgtttagtc

SEQ ID NO: 645763 - DNA, 15 bp, Homo sapiens
attgctgtttagtcc

SEQ ID NO: 645764 - DNA, 15 bp, Homo sapiens
ttgctgtttagtcct

SEQ ID NO: 645765 - DNA, 15 bp, Homo sapiens
tgctgtttagtcctt

SEQ ID NO: 645766 - DNA, 15 bp, Homo sapiens
gctgtttagtccttg

SEQ ID NO: 645767 - DNA, 15 bp, Homo sapiens
ctgtttagtccttgg

SEQ ID NO: 645768 - DNA, 15 bp, Homo sapiens
tgtttagtccttggc

SEQ ID NO: 645769 - DNA, 15 bp, Homo sapiens
gtttagtccttggca

SEQ ID NO: 645770 - DNA, 15 bp, Homo sapiens
tttagtccttggcaa

SEQ ID NO: 645771 - DNA, 15 bp, Homo sapiens
ttagtccttggcaag

SEQ ID NO: 645772 - DNA, 15 bp, Homo sapiens
tagtccttggcaaga

SEQ ID NO: 645773 - DNA, 15 bp, Homo sapiens
agtccttggcaagaa

SEQ ID NO: 645774 - DNA, 15 bp, Homo sapiens
gtccttggcaagaag

SEQ ID NO: 645775 - DNA, 15 bp, Homo sapiens
tccttggcaagaagc

SEQ ID NO: 645776 - DNA, 15 bp, Homo sapiens
ccttggcaagaagct

SEQ ID NO: 645777 - DNA, 15 bp, Homo sapiens
cttggcaagaagcta

SEQ ID NO: 645778 - DNA, 15 bp, Homo sapiens
ttggcaagaagctag

SEQ ID NO: 645779 - DNA, 15 bp, Homo sapiens
tggcaagaagctaga

SEQ ID NO: 645780 - DNA, 15 bp, Homo sapiens
ggcaagaagctagat

SEQ ID NO: 645781 - DNA, 15 bp, Homo sapiens
gcaagaagctagatt

SEQ ID NO: 645782 - DNA, 15 bp, Homo sapiens
caagaagctagattt

SEQ ID NO: 645783 - DNA, 15 bp, Homo sapiens
aagaagctagatttt

SEQ ID NO: 645784 - DNA, 15 bp, Homo sapiens
agaagctagattttc

SEQ ID NO: 645785 - DNA, 15 bp, Homo sapiens
gaagctagattttca

SEQ ID NO: 645786 - DNA, 15 bp, Homo sapiens
aagctagattttcaa

SEQ ID NO: 645787 - DNA, 15 bp, Homo sapiens
agctagattttcaaa

SEQ ID NO: 645788 - DNA, 15 bp, Homo sapiens
gctagattttcaaat

SEQ ID NO: 645789 - DNA, 15 bp, Homo sapiens
ctagattttcaaatc

SEQ ID NO: 645790 - DNA, 15 bp, Homo sapiens
tagattttcaaatca

SEQ ID NO: 645791 - DNA, 15 bp, Homo sapiens
agattttcaaatcaa

SEQ ID NO: 645792 - DNA, 15 bp, Homo sapiens
gattttcaaatcaag

SEQ ID NO: 645793 - DNA, 15 bp, Homo sapiens
attttcaaatcaagt

SEQ ID NO: 645794 - DNA, 15 bp, Homo sapiens
ttttcaaatcaagta

SEQ ID NO: 645795 - DNA, 15 bp, Homo sapiens
tttcaaatcaagtag

SEQ ID NO: 645796 - DNA, 15 bp, Homo sapiens
ttcaaatcaagtagg

SEQ ID NO: 645797 - DNA, 15 bp, Homo sapiens
tcaaatcaagtaggg

SEQ ID NO: 645798 - DNA, 15 bp, Homo sapiens
caaatcaagtagggt

SEQ ID NO: 645799 - DNA, 15 bp, Homo sapiens
aaatcaagtagggta

SEQ ID NO: 645800 - DNA, 15 bp, Homo sapiens
aatcaagtagggtag

SEQ ID NO: 645801 - DNA, 15 bp, Homo sapiens
atcaagtagggtagg

SEQ ID NO: 645802 - DNA, 15 bp, Homo sapiens
tcaagtagggtagga

SEQ ID NO: 645803 - DNA, 15 bp, Homo sapiens
caagtagggtaggag

SEQ ID NO: 645804 - DNA, 15 bp, Homo sapiens
aagtagggtaggaga

SEQ ID NO: 645805 - DNA, 15 bp, Homo sapiens
agtagggtaggagac

SEQ ID NO: 645806 - DNA, 15 bp, Homo sapiens
gtagggtaggagact

SEQ ID NO: 645807 - DNA, 15 bp, Homo sapiens
tagggtaggagactg

SEQ ID NO: 645808 - DNA, 15 bp, Homo sapiens
agggtaggagactga

SEQ ID NO: 645809 - DNA, 15 bp, Homo sapiens
gggtaggagactgag

SEQ ID NO: 645810 - DNA, 15 bp, Homo sapiens
ggtaggagactgagt

SEQ ID NO: 645811 - DNA, 15 bp, Homo sapiens
gtaggagactgagtg

SEQ ID NO: 645812 - DNA, 15 bp, Homo sapiens
taggagactgagtgc

SEQ ID NO: 645813 - DNA, 15 bp, Homo sapiens
aggagactgagtgcg

SEQ ID NO: 645814 - DNA, 15 bp, Homo sapiens
ggagactgagtgcgg

SEQ ID NO: 645815 - DNA, 15 bp, Homo sapiens
gagactgagtgcggt

SEQ ID NO: 645816 - DNA, 15 bp, Homo sapiens
agactgagtgcggtg

SEQ ID NO: 645817 - DNA, 15 bp, Homo sapiens
gactgagtgcggtgg

SEQ ID NO: 645818 - DNA, 15 bp, Homo sapiens
actgagtgcggtggc

SEQ ID NO: 645819 - DNA, 15 bp, Homo sapiens
ctgagtgcggtggct

SEQ ID NO: 645820 - DNA, 15 bp, Homo sapiens
tgagtgcggtggctc

SEQ ID NO: 645821 - DNA, 15 bp, Homo sapiens
gagtgcggtggctca

SEQ ID NO: 645822 - DNA, 15 bp, Homo sapiens
agtgcggtggctcat

SEQ ID NO: 645823 - DNA, 15 bp, Homo sapiens
gtgcggtggctcata

SEQ ID NO: 645824 - DNA, 15 bp, Homo sapiens
tgcggtggctcatat

SEQ ID NO: 645825 - DNA, 15 bp, Homo sapiens
gcggtggctcatatg

SEQ ID NO: 645826 - DNA, 15 bp, Homo sapiens
cggtggctcatatgt

SEQ ID NO: 645827 - DNA, 15 bp, Homo sapiens
ggtggctcatatgtg

SEQ ID NO: 645828 - DNA, 15 bp, Homo sapiens
gtggctcatatgtgt

SEQ ID NO: 645829 - DNA, 15 bp, Homo sapiens
tggctcatatgtgta

SEQ ID NO: 645830 - DNA, 15 bp, Homo sapiens
ggctcatatgtgtag

SEQ ID NO: 645831 - DNA, 15 bp, Homo sapiens
gctcatatgtgtagt

SEQ ID NO: 645832 - DNA, 15 bp, Homo sapiens
ctcatatgtgtagtt

SEQ ID NO: 645833 - DNA, 15 bp, Homo sapiens
tcatatgtgtagttt

SEQ ID NO: 645834 - DNA, 15 bp, Homo sapiens
catatgtgtagtttc

SEQ ID NO: 645835 - DNA, 15 bp, Homo sapiens
atatgtgtagtttcc

SEQ ID NO: 645836 - DNA, 15 bp, Homo sapiens
tatgtgtagtttcca

SEQ ID NO: 645837 - DNA, 15 bp, Homo sapiens
atgtgtagtttccag

SEQ ID NO: 645838 - DNA, 15 bp, Homo sapiens
tgtgtagtttccagc

SEQ ID NO: 645839 - DNA, 15 bp, Homo sapiens
gtgtagtttccagct

SEQ ID NO: 645840 - DNA, 15 bp, Homo sapiens
tgtagtttccagcta

SEQ ID NO: 645841 - DNA, 15 bp, Homo sapiens
gtagtttccagctac

SEQ ID NO: 645842 - DNA, 15 bp, Homo sapiens
tagtttccagctact

SEQ ID NO: 645843 - DNA, 15 bp, Homo sapiens
agtttccagctactt

SEQ ID NO: 645844 - DNA, 15 bp, Homo sapiens
gtttccagctacttg

SEQ ID NO: 645845 - DNA, 15 bp, Homo sapiens
tttccagctacttgg

SEQ ID NO: 645846 - DNA, 15 bp, Homo sapiens
ttccagctacttggg

SEQ ID NO: 645847 - DNA, 15 bp, Homo sapiens
tccagctacttggga

SEQ ID NO: 645848 - DNA, 15 bp, Homo sapiens
ttgggaggctgaggt

SEQ ID NO: 645849 - DNA, 15 bp, Homo sapiens
tgggaggctgaggtg

SEQ ID NO: 645850 - DNA, 15 bp, Homo sapiens
aggctgaggtgggaa

SEQ ID NO: 645851 - DNA, 15 bp, Homo sapiens
ggctgaggtgggaag

SEQ ID NO: 645852 - DNA, 15 bp, Homo sapiens
gctgaggtgggaaga

SEQ ID NO: 645853 - DNA, 15 bp, Homo sapiens
ctgaggtgggaagat

SEQ ID NO: 645854 - DNA, 15 bp, Homo sapiens
tgaggtgggaagatt

SEQ ID NO: 645855 - DNA, 15 bp, Homo sapiens
gaggtgggaagattg

SEQ ID NO: 645856 - DNA, 15 bp, Homo sapiens
aggtgggaagattgc

SEQ ID NO: 645857 - DNA, 15 bp, Homo sapiens
ggtgggaagattgct

SEQ ID NO: 645858 - DNA, 15 bp, Homo sapiens
gtgggaagattgctt

SEQ ID NO: 645859 - DNA, 15 bp, Homo sapiens
tgggaagattgcttg

SEQ ID NO: 645860 - DNA, 15 bp, Homo sapiens
gggaagattgcttga

SEQ ID NO: 645861 - DNA, 15 bp, Homo sapiens
ggaagattgcttgag

SEQ ID NO: 645862 - DNA, 15 bp, Homo sapiens
gaagattgcttgagc

SEQ ID NO: 645863 - DNA, 15 bp, Homo sapiens
aagattgcttgagcc

SEQ ID NO: 645864 - DNA, 15 bp, Homo sapiens
agattgcttgagccc

SEQ ID NO: 645865 - DNA, 15 bp, Homo sapiens
gattgcttgagccca

SEQ ID NO: 645866 - DNA, 15 bp, Homo sapiens
attgcttgagcccag

SEQ ID NO: 645867 - DNA, 15 bp, Homo sapiens
ttgcttgagcccagg

SEQ ID NO: 645868 - DNA, 15 bp, Homo sapiens
tgcttgagcccagga

SEQ ID NO: 645869 - DNA, 15 bp, Homo sapiens
gcttgagcccaggag

SEQ ID NO: 645870 - DNA, 15 bp, Homo sapiens
cttgagcccaggagt

SEQ ID NO: 645871 - DNA, 15 bp, Homo sapiens
ttgagcccaggagtt

SEQ ID NO: 645872 - DNA, 15 bp, Homo sapiens
tgagcccaggagttg

SEQ ID NO: 645873 - DNA, 15 bp, Homo sapiens
gagcccaggagttgg

SEQ ID NO: 645874 - DNA, 15 bp, Homo sapiens
agcccaggagttggg

SEQ ID NO: 645875 - DNA, 15 bp, Homo sapiens
gcccaggagttgggg

SEQ ID NO: 645876 - DNA, 15 bp, Homo sapiens
cccaggagttggggc

SEQ ID NO: 645877 - DNA, 15 bp, Homo sapiens
ccaggagttggggct

SEQ ID NO: 645878 - DNA, 15 bp, Homo sapiens
caggagttggggctg

SEQ ID NO: 645879 - DNA, 15 bp, Homo sapiens
aggagttggggctgc

SEQ ID NO: 645880 - DNA, 15 bp, Homo sapiens
ggagttggggctgca

SEQ ID NO: 645881 - DNA, 15 bp, Homo sapiens
gagttggggctgcag

SEQ ID NO: 645882 - DNA, 15 bp, Homo sapiens
agttggggctgcagt

SEQ ID NO: 645883 - DNA, 15 bp, Homo sapiens
gttggggctgcagtg

SEQ ID NO: 645884 - DNA, 15 bp, Homo sapiens
ttggggctgcagtga

SEQ ID NO: 645885 - DNA, 15 bp, Homo sapiens
tggggctgcagtgag

SEQ ID NO: 645886 - DNA, 15 bp, Homo sapiens
ggggctgcagtgagc

SEQ ID NO: 645887 - DNA, 15 bp, Homo sapiens
gggctgcagtgagct

SEQ ID NO: 645888 - DNA, 15 bp, Homo sapiens
ggctgcagtgagcta

SEQ ID NO: 645889 - DNA, 15 bp, Homo sapiens
gctgcagtgagctat

SEQ ID NO: 645890 - DNA, 15 bp, Homo sapiens
ctgcagtgagctatg

SEQ ID NO: 645891 - DNA, 15 bp, Homo sapiens
tgcagtgagctatga

SEQ ID NO: 645892 - DNA, 15 bp, Homo sapiens
gcagtgagctatgat

SEQ ID NO: 645893 - DNA, 15 bp, Homo sapiens
cagtgagctatgatc

SEQ ID NO: 645894 - DNA, 15 bp, Homo sapiens
agtgagctatgatca

SEQ ID NO: 645895 - DNA, 15 bp, Homo sapiens
gtgagctatgatcaa

SEQ ID NO: 645896 - DNA, 15 bp, Homo sapiens
tgagctatgatcaat

SEQ ID NO: 645897 - DNA, 15 bp, Homo sapiens
gagctatgatcaata

SEQ ID NO: 645898 - DNA, 15 bp, Homo sapiens
agctatgatcaatac

SEQ ID NO: 645899 - DNA, 15 bp, Homo sapiens
gctatgatcaataca

SEQ ID NO: 645900 - DNA, 15 bp, Homo sapiens
ctatgatcaatacat

SEQ ID NO: 645901 - DNA, 15 bp, Homo sapiens
tatgatcaatacatt

SEQ ID NO: 645902 - DNA, 15 bp, Homo sapiens
atgatcaatacattc

SEQ ID NO: 645903 - DNA, 15 bp, Homo sapiens
tgatcaatacattcc

SEQ ID NO: 645904 - DNA, 15 bp, Homo sapiens
gatcaatacattcca

SEQ ID NO: 645905 - DNA, 15 bp, Homo sapiens
atcaatacattccag

SEQ ID NO: 645906 - DNA, 15 bp, Homo sapiens
tcaatacattccagc

SEQ ID NO: 645907 - DNA, 15 bp, Homo sapiens
caatacattccagcc

SEQ ID NO: 645908 - DNA, 15 bp, Homo sapiens
aatacattccagcct

SEQ ID NO: 645909 - DNA, 15 bp, Homo sapiens
atacattccagcctg

SEQ ID NO: 645910 - DNA, 15 bp, Homo sapiens
tacattccagcctga

SEQ ID NO: 645911 - DNA, 15 bp, Homo sapiens
acattccagcctgag

SEQ ID NO: 645912 - DNA, 15 bp, Homo sapiens
cattccagcctgagt

SEQ ID NO: 645913 - DNA, 15 bp, Homo sapiens
attccagcctgagtg

SEQ ID NO: 645914 - DNA, 15 bp, Homo sapiens
ttccagcctgagtga

SEQ ID NO: 645915 - DNA, 15 bp, Homo sapiens
tccagcctgagtgat

SEQ ID NO: 645916 - DNA, 15 bp, Homo sapiens
ccagcctgagtgatg

SEQ ID NO: 645917 - DNA, 15 bp, Homo sapiens
cagcctgagtgatga

SEQ ID NO: 645918 - DNA, 15 bp, Homo sapiens
agcctgagtgatgaa

SEQ ID NO: 645919 - DNA, 15 bp, Homo sapiens
gcctgagtgatgaag

SEQ ID NO: 645920 - DNA, 15 bp, Homo sapiens
cctgagtgatgaagt

SEQ ID NO: 645921 - DNA, 15 bp, Homo sapiens
ctgagtgatgaagtg

SEQ ID NO: 645922 - DNA, 15 bp, Homo sapiens
tgagtgatgaagtga

SEQ ID NO: 645923 - DNA, 15 bp, Homo sapiens
gagtgatgaagtgag

SEQ ID NO: 645924 - DNA, 15 bp, Homo sapiens
agtgatgaagtgaga

SEQ ID NO: 645925 - DNA, 15 bp, Homo sapiens
gtgatgaagtgagac

SEQ ID NO: 645926 - DNA, 15 bp, Homo sapiens
tgatgaagtgagacc

SEQ ID NO: 645927 - DNA, 15 bp, Homo sapiens
gatgaagtgagaccc

SEQ ID NO: 645928 - DNA, 15 bp, Homo sapiens
atgaagtgagaccct

SEQ ID NO: 645929 - DNA, 15 bp, Homo sapiens
tgaagtgagaccctg

SEQ ID NO: 645930 - DNA, 15 bp, Homo sapiens
gaagtgagaccctgt

SEQ ID NO: 645931 - DNA, 15 bp, Homo sapiens
aagtgagaccctgtc

SEQ ID NO: 645932 - DNA, 15 bp, Homo sapiens
agtgagaccctgtct

SEQ ID NO: 645933 - DNA, 15 bp, Homo sapiens
gtgagaccctgtctc

SEQ ID NO: 645934 - DNA, 15 bp, Homo sapiens
tgagaccctgtctcc

SEQ ID NO: 645935 - DNA, 15 bp, Homo sapiens
gagaccctgtctcca

SEQ ID NO: 645936 - DNA, 15 bp, Homo sapiens
agaccctgtctccaa

SEQ ID NO: 645937 - DNA, 15 bp, Homo sapiens
gaccctgtctccaaa

SEQ ID NO: 645938 - DNA, 15 bp, Homo sapiens
accctgtctccaaac

SEQ ID NO: 645939 - DNA, 15 bp, Homo sapiens
ccctgtctccaaaca

SEQ ID NO: 645940 - DNA, 15 bp, Homo sapiens
cctgtctccaaacaa

SEQ ID NO: 645941 - DNA, 15 bp, Homo sapiens
ctgtctccaaacaat

SEQ ID NO: 645942 - DNA, 15 bp, Homo sapiens
tgtctccaaacaatt

SEQ ID NO: 645943 - DNA, 15 bp, Homo sapiens
gtctccaaacaattt

SEQ ID NO: 645944 - DNA, 15 bp, Homo sapiens
tctccaaacaatttt

SEQ ID NO: 645945 - DNA, 15 bp, Homo sapiens
ctccaaacaattttt

SEQ ID NO: 645946 - DNA, 15 bp, Homo sapiens
tccaaacaattttta

SEQ ID NO: 645947 - DNA, 15 bp, Homo sapiens
ccaaacaatttttaa

SEQ ID NO: 645948 - DNA, 15 bp, Homo sapiens
caaacaatttttaaa

SEQ ID NO: 645949 - DNA, 15 bp, Homo sapiens
aaacaatttttaaaa

SEQ ID NO: 645950 - DNA, 15 bp, Homo sapiens
aacaatttttaaaaa

SEQ ID NO: 645951 - DNA, 15 bp, Homo sapiens
acaatttttaaaaat

SEQ ID NO: 645952 - DNA, 15 bp, Homo sapiens
caatttttaaaaatt

SEQ ID NO: 645953 - DNA, 15 bp, Homo sapiens
aatttttaaaaattt

SEQ ID NO: 645954 - DNA, 15 bp, Homo sapiens
atttttaaaaatttt

SEQ ID NO: 645955 - DNA, 15 bp, Homo sapiens
tttttaaaaatttta

SEQ ID NO: 645956 - DNA, 15 bp, Homo sapiens
ttttaaaaattttaa

SEQ ID NO: 645957 - DNA, 15 bp, Homo sapiens
tttaaaaattttaaa

SEQ ID NO: 645958 - DNA, 15 bp, Homo sapiens
ttaaaaattttaaaa

SEQ ID NO: 645959 - DNA, 15 bp, Homo sapiens
taaaaattttaaaaa

SEQ ID NO: 645960 - DNA, 15 bp, Homo sapiens
aaaaattttaaaaat

SEQ ID NO: 645961 - DNA, 15 bp, Homo sapiens
aaaattttaaaaata

SEQ ID NO: 645962 - DNA, 15 bp, Homo sapiens
aaattttaaaaatag

SEQ ID NO: 645963 - DNA, 15 bp, Homo sapiens
aattttaaaaataga

SEQ ID NO: 645964 - DNA, 15 bp, Homo sapiens
attttaaaaatagag

SEQ ID NO: 645965 - DNA, 15 bp, Homo sapiens
ttttaaaaatagaga

SEQ ID NO: 645966 - DNA, 15 bp, Homo sapiens
tttaaaaatagagag

SEQ ID NO: 645967 - DNA, 15 bp, Homo sapiens
ttaaaaatagagagg

SEQ ID NO: 645968 - DNA, 15 bp, Homo sapiens
taaaaatagagaggg

SEQ ID NO: 645969 - DNA, 15 bp, Homo sapiens
aaaaatagagaggga

SEQ ID NO: 645970 - DNA, 15 bp, Homo sapiens
aaaatagagagggaa

SEQ ID NO: 645971 - DNA, 15 bp, Homo sapiens
aaatagagagggaaa

SEQ ID NO: 645972 - DNA, 15 bp, Homo sapiens
aatagagagggaaat

SEQ ID NO: 645973 - DNA, 15 bp, Homo sapiens
atagagagggaaatc

SEQ ID NO: 645974 - DNA, 15 bp, Homo sapiens
tagagagggaaatct

SEQ ID NO: 645975 - DNA, 15 bp, Homo sapiens
agagagggaaatcta

SEQ ID NO: 645976 - DNA, 15 bp, Homo sapiens
gagagggaaatctag

SEQ ID NO: 645977 - DNA, 15 bp, Homo sapiens
agagggaaatctagt

SEQ ID NO: 645978 - DNA, 15 bp, Homo sapiens
gagggaaatctagtt

SEQ ID NO: 645979 - DNA, 15 bp, Homo sapiens
agggaaatctagttt

SEQ ID NO: 645980 - DNA, 15 bp, Homo sapiens
gggaaatctagtttc

SEQ ID NO: 645981 - DNA, 15 bp, Homo sapiens
ggaaatctagtttct

SEQ ID NO: 645982 - DNA, 15 bp, Homo sapiens
gaaatctagtttcta

SEQ ID NO: 645983 - DNA, 15 bp, Homo sapiens
aaatctagtttctag

SEQ ID NO: 645984 - DNA, 15 bp, Homo sapiens
aatctagtttctagg

SEQ ID NO: 645985 - DNA, 15 bp, Homo sapiens
atctagtttctaggg

SEQ ID NO: 645986 - DNA, 15 bp, Homo sapiens
tctagtttctagggt

SEQ ID NO: 645987 - DNA, 15 bp, Homo sapiens
ctagtttctagggtt

SEQ ID NO: 645988 - DNA, 15 bp, Homo sapiens
tagtttctagggttt

SEQ ID NO: 645989 - DNA, 15 bp, Homo sapiens
agtttctagggtttt

SEQ ID NO: 645990 - DNA, 15 bp, Homo sapiens
gtttctagggttttg

SEQ ID NO: 645991 - DNA, 15 bp, Homo sapiens
tttctagggttttgt

SEQ ID NO: 645992 - DNA, 15 bp, Homo sapiens
ttctagggttttgtt

SEQ ID NO: 645993 - DNA, 15 bp, Homo sapiens
tctagggttttgttt

SEQ ID NO: 645994 - DNA, 15 bp, Homo sapiens
ctagggttttgtttt

SEQ ID NO: 645995 - DNA, 15 bp, Homo sapiens
tagggttttgttttg

SEQ ID NO: 645996 - DNA, 15 bp, Homo sapiens
agggttttgttttgg

SEQ ID NO: 645997 - DNA, 15 bp, Homo sapiens
gggttttgttttggt

SEQ ID NO: 645998 - DNA, 15 bp, Homo sapiens
ggttttgttttggtt

SEQ ID NO: 645999 - DNA, 15 bp, Homo sapiens
gttttgttttggttt

SEQ ID NO: 646000 - DNA, 15 bp, Homo sapiens
ttttgttttggtttg

SEQ ID NO: 646001 - DNA, 15 bp, Homo sapiens
tttgttttggtttgt

SEQ ID NO: 646002 - DNA, 15 bp, Homo sapiens
ttgttttggtttgtt

SEQ ID NO: 646003 - DNA, 15 bp, Homo sapiens
tgttttggtttgttt

SEQ ID NO: 646004 - DNA, 15 bp, Homo sapiens
gttttggtttgtttt

SEQ ID NO: 646005 - DNA, 15 bp, Homo sapiens
ttttggtttgttttg

SEQ ID NO: 646006 - DNA, 15 bp, Homo sapiens
tttggtttgttttga

SEQ ID NO: 646007 - DNA, 15 bp, Homo sapiens
ttggtttgttttgat

SEQ ID NO: 646008 - DNA, 15 bp, Homo sapiens
tggtttgttttgatt

SEQ ID NO: 646009 - DNA, 15 bp, Homo sapiens
ggtttgttttgattt

SEQ ID NO: 646010 - DNA, 15 bp, Homo sapiens
gtttgttttgatttg

SEQ ID NO: 646011 - DNA, 15 bp, Homo sapiens
tttgttttgatttgt

SEQ ID NO: 646012 - DNA, 15 bp, Homo sapiens
ttgttttgatttgtt

SEQ ID NO: 646013 - DNA, 15 bp, Homo sapiens
tgttttgatttgttt

SEQ ID NO: 646014 - DNA, 15 bp, Homo sapiens
gttttgatttgtttt

SEQ ID NO: 646015 - DNA, 15 bp, Homo sapiens
ttttgatttgttttt

SEQ ID NO: 646016 - DNA, 15 bp, Homo sapiens
tttgatttgtttttt

SEQ ID NO: 646017 - DNA, 15 bp, Homo sapiens
ttgatttgttttttt

SEQ ID NO: 646018 - DNA, 15 bp, Homo sapiens
tgatttgtttttttt

SEQ ID NO: 646019 - DNA, 15 bp, Homo sapiens
gatttgttttttttt

SEQ ID NO: 646020 - DNA, 15 bp, Homo sapiens
atttgtttttttttg

SEQ ID NO: 646021 - DNA, 15 bp, Homo sapiens
tttgtttttttttgt

SEQ ID NO: 646022 - DNA, 15 bp, Homo sapiens
ttgtttttttttgtc

SEQ ID NO: 646023 - DNA, 15 bp, Homo sapiens
tgtttttttttgtct

SEQ ID NO: 646024 - DNA, 15 bp, Homo sapiens
gtttttttttgtctt

SEQ ID NO: 646025 - DNA, 15 bp, Homo sapiens
tttttttttgtcttt

SEQ ID NO: 646026 - DNA, 15 bp, Homo sapiens
ttttttttgtctttg

SEQ ID NO: 646027 - DNA, 15 bp, Homo sapiens
tttttttgtctttgg

SEQ ID NO: 646028 - DNA, 15 bp, Homo sapiens
ttttttgtctttggt

SEQ ID NO: 646029 - DNA, 15 bp, Homo sapiens
tttttgtctttggtt

SEQ ID NO: 646030 - DNA, 15 bp, Homo sapiens
ttttgtctttggttt

SEQ ID NO: 646031 - DNA, 15 bp, Homo sapiens
tttgtctttggtttg

SEQ ID NO: 646032 - DNA, 15 bp, Homo sapiens
ttgtctttggtttgt

SEQ ID NO: 646033 - DNA, 15 bp, Homo sapiens
tgtctttggtttgtt

SEQ ID NO: 646034 - DNA, 15 bp, Homo sapiens
gtctttggtttgttt

SEQ ID NO: 646035 - DNA, 15 bp, Homo sapiens
tctttggtttgtttc

SEQ ID NO: 646036 - DNA, 15 bp, Homo sapiens
ctttggtttgtttct

SEQ ID NO: 646037 - DNA, 15 bp, Homo sapiens
tttggtttgtttctt

SEQ ID NO: 646038 - DNA, 15 bp, Homo sapiens
ttggtttgtttcttt

SEQ ID NO: 646039 - DNA, 15 bp, Homo sapiens
tggtttgtttcttta

SEQ ID NO: 646040 - DNA, 15 bp, Homo sapiens
ggtttgtttctttat

SEQ ID NO: 646041 - DNA, 15 bp, Homo sapiens
gtttgtttctttatg

SEQ ID NO: 646042 - DNA, 15 bp, Homo sapiens
tttgtttctttatgt

SEQ ID NO: 646043 - DNA, 15 bp, Homo sapiens
ttgtttctttatgta

SEQ ID NO: 646044 - DNA, 15 bp, Homo sapiens
tgtttctttatgtaa

SEQ ID NO: 646045 - DNA, 15 bp, Homo sapiens
gtttctttatgtaaa

SEQ ID NO: 646046 - DNA, 15 bp, Homo sapiens
tttctttatgtaaac

SEQ ID NO: 646047 - DNA, 15 bp, Homo sapiens
ttctttatgtaaaca

SEQ ID NO: 646048 - DNA, 15 bp, Homo sapiens
tctttatgtaaacag

SEQ ID NO: 646049 - DNA, 15 bp, Homo sapiens
ctttatgtaaacagt

SEQ ID NO: 646050 - DNA, 15 bp, Homo sapiens
tttatgtaaacagtt

SEQ ID NO: 646051 - DNA, 15 bp, Homo sapiens
ttatgtaaacagttt

SEQ ID NO: 646052 - DNA, 15 bp, Homo sapiens
tatgtaaacagttta

SEQ ID NO: 646053 - DNA, 15 bp, Homo sapiens
atgtaaacagtttac

SEQ ID NO: 646054 - DNA, 15 bp, Homo sapiens
tgtaaacagtttact

SEQ ID NO: 646055 - DNA, 15 bp, Homo sapiens
gtaaacagtttactt

SEQ ID NO: 646056 - DNA, 15 bp, Homo sapiens
taaacagtttacttg

SEQ ID NO: 646057 - DNA, 15 bp, Homo sapiens
aaacagtttacttgt

SEQ ID NO: 646058 - DNA, 15 bp, Homo sapiens
aacagtttacttgtt

SEQ ID NO: 646059 - DNA, 15 bp, Homo sapiens
acagtttacttgtta

SEQ ID NO: 646060 - DNA, 15 bp, Homo sapiens
cagtttacttgttac

SEQ ID NO: 646061 - DNA, 15 bp, Homo sapiens
agtttacttgttacg

SEQ ID NO: 646062 - DNA, 15 bp, Homo sapiens
gtttacttgttacgt

SEQ ID NO: 646063 - DNA, 15 bp, Homo sapiens
tttacttgttacgtc

SEQ ID NO: 646064 - DNA, 15 bp, Homo sapiens
ttacttgttacgtca

SEQ ID NO: 646065 - DNA, 15 bp, Homo sapiens
tacttgttacgtcag

SEQ ID NO: 646066 - DNA, 15 bp, Homo sapiens
acttgttacgtcagt

SEQ ID NO: 646067 - DNA, 15 bp, Homo sapiens
cttgttacgtcagta

SEQ ID NO: 646068 - DNA, 15 bp, Homo sapiens
ttgttacgtcagtaa

SEQ ID NO: 646069 - DNA, 15 bp, Homo sapiens
tgttacgtcagtaag

SEQ ID NO: 646070 - DNA, 15 bp, Homo sapiens
gttacgtcagtaagc

SEQ ID NO: 646071 - DNA, 15 bp, Homo sapiens
ttacgtcagtaagca

SEQ ID NO: 646072 - DNA, 15 bp, Homo sapiens
tacgtcagtaagcac

SEQ ID NO: 646073 - DNA, 15 bp, Homo sapiens
acgtcagtaagcacg

SEQ ID NO: 646074 - DNA, 15 bp, Homo sapiens
cgtcagtaagcacgt

SEQ ID NO: 646075 - DNA, 15 bp, Homo sapiens
gtcagtaagcacgta

SEQ ID NO: 646076 - DNA, 15 bp, Homo sapiens
tcagtaagcacgtaa

SEQ ID NO: 646077 - DNA, 15 bp, Homo sapiens
cagtaagcacgtaaa

SEQ ID NO: 646078 - DNA, 15 bp, Homo sapiens
agtaagcacgtaaag

SEQ ID NO: 646079 - DNA, 15 bp, Homo sapiens
gtaagcacgtaaagt

SEQ ID NO: 646080 - DNA, 15 bp, Homo sapiens
taagcacgtaaagta

SEQ ID NO: 646081 - DNA, 15 bp, Homo sapiens
aagcacgtaaagtaa

SEQ ID NO: 646082 - DNA, 15 bp, Homo sapiens
agcacgtaaagtaaa

SEQ ID NO: 646083 - DNA, 15 bp, Homo sapiens
gcacgtaaagtaaag

SEQ ID NO: 646084 - DNA, 15 bp, Homo sapiens
cacgtaaagtaaagt

SEQ ID NO: 646085 - DNA, 15 bp, Homo sapiens
acgtaaagtaaagta

SEQ ID NO: 646086 - DNA, 15 bp, Homo sapiens
cgtaaagtaaagtag

SEQ ID NO: 646087 - DNA, 15 bp, Homo sapiens
gtaaagtaaagtagt

SEQ ID NO: 646088 - DNA, 15 bp, Homo sapiens
taaagtaaagtagtg

SEQ ID NO: 646089 - DNA, 15 bp, Homo sapiens
aaagtaaagtagtgc

SEQ ID NO: 646090 - DNA, 15 bp, Homo sapiens
aagtaaagtagtgct

SEQ ID NO: 646091 - DNA, 15 bp, Homo sapiens
agtaaagtagtgcta

SEQ ID NO: 646092 - DNA, 15 bp, Homo sapiens
gtaaagtagtgctaa

SEQ ID NO: 646093 - DNA, 15 bp, Homo sapiens
taaagtagtgctaaa

SEQ ID NO: 646094 - DNA, 15 bp, Homo sapiens
aaagtagtgctaaat

SEQ ID NO: 646095 - DNA, 15 bp, Homo sapiens
aagtagtgctaaata

SEQ ID NO: 646096 - DNA, 15 bp, Homo sapiens
agtagtgctaaataa

SEQ ID NO: 646097 - DNA, 15 bp, Homo sapiens
gtagtgctaaataaa

SEQ ID NO: 646098 - DNA, 15 bp, Homo sapiens
tagtgctaaataaat

SEQ ID NO: 646099 - DNA, 15 bp, Homo sapiens
agtgctaaataaata

SEQ ID NO: 646100 - DNA, 15 bp, Homo sapiens
gtgctaaataaatag

SEQ ID NO: 646101 - DNA, 15 bp, Homo sapiens
tgctaaataaataga

SEQ ID NO: 646102 - DNA, 15 bp, Homo sapiens
gctaaataaatagat

SEQ ID NO: 646103 - DNA, 15 bp, Homo sapiens
ctaaataaatagata

SEQ ID NO: 646104 - DNA, 15 bp, Homo sapiens
taaataaatagatac

SEQ ID NO: 646105 - DNA, 15 bp, Homo sapiens
aaataaatagataca

SEQ ID NO: 646106 - DNA, 15 bp, Homo sapiens
aataaatagatacag

SEQ ID NO: 646107 - DNA, 15 bp, Homo sapiens
ataaatagatacagt

SEQ ID NO: 646108 - DNA, 15 bp, Homo sapiens
taaatagatacagtt

SEQ ID NO: 646109 - DNA, 15 bp, Homo sapiens
aaatagatacagttt

SEQ ID NO: 646110 - DNA, 15 bp, Homo sapiens
aatagatacagttta

SEQ ID NO: 646111 - DNA, 15 bp, Homo sapiens
atagatacagtttaa

SEQ ID NO: 646112 - DNA, 15 bp, Homo sapiens
tagatacagtttaat

SEQ ID NO: 646113 - DNA, 15 bp, Homo sapiens
agatacagtttaatg

SEQ ID NO: 646114 - DNA, 15 bp, Homo sapiens
gatacagtttaatgg

SEQ ID NO: 646115 - DNA, 15 bp, Homo sapiens
atacagtttaatggg

SEQ ID NO: 646116 - DNA, 15 bp, Homo sapiens
tacagtttaatgggc

SEQ ID NO: 646117 - DNA, 15 bp, Homo sapiens
acagtttaatgggct

SEQ ID NO: 646118 - DNA, 15 bp, Homo sapiens
cagtttaatgggctt

SEQ ID NO: 646119 - DNA, 15 bp, Homo sapiens
agtttaatgggcttc

SEQ ID NO: 646120 - DNA, 15 bp, Homo sapiens
gtttaatgggcttcc

SEQ ID NO: 646121 - DNA, 15 bp, Homo sapiens
tttaatgggcttcct

SEQ ID NO: 646122 - DNA, 15 bp, Homo sapiens
ttaatgggcttcctg

SEQ ID NO: 646123 - DNA, 15 bp, Homo sapiens
taatgggcttcctgg

SEQ ID NO: 646124 - DNA, 15 bp, Homo sapiens
aatgggcttcctgga

SEQ ID NO: 646125 - DNA, 15 bp, Homo sapiens
atgggcttcctggaa

SEQ ID NO: 646126 - DNA, 15 bp, Homo sapiens
tgggcttcctggaag

SEQ ID NO: 646127 - DNA, 15 bp, Homo sapiens
gggcttcctggaaga

SEQ ID NO: 646128 - DNA, 15 bp, Homo sapiens
ggcttcctggaagag

SEQ ID NO: 646129 - DNA, 15 bp, Homo sapiens
gcttcctggaagagg

SEQ ID NO: 646130 - DNA, 15 bp, Homo sapiens
cttcctggaagaggg

SEQ ID NO: 646131 - DNA, 15 bp, Homo sapiens
ttcctggaagagggt

SEQ ID NO: 646132 - DNA, 15 bp, Homo sapiens
tcctggaagagggta

SEQ ID NO: 646133 - DNA, 15 bp, Homo sapiens
cctggaagagggtag

SEQ ID NO: 646134 - DNA, 15 bp, Homo sapiens
ctggaagagggtagg

SEQ ID NO: 646135 - DNA, 15 bp, Homo sapiens
tggaagagggtagga

SEQ ID NO: 646136 - DNA, 15 bp, Homo sapiens
ggaagagggtaggaa

SEQ ID NO: 646137 - DNA, 15 bp, Homo sapiens
gaagagggtaggaaa

SEQ ID NO: 646138 - DNA, 15 bp, Homo sapiens
aagagggtaggaaag

SEQ ID NO: 646139 - DNA, 15 bp, Homo sapiens
agagggtaggaaagt

SEQ ID NO: 646140 - DNA, 15 bp, Homo sapiens
gagggtaggaaagtg

SEQ ID NO: 646141 - DNA, 15 bp, Homo sapiens
agggtaggaaagtga

SEQ ID NO: 646142 - DNA, 15 bp, Homo sapiens
gggtaggaaagtgaa

SEQ ID NO: 646143 - DNA, 15 bp, Homo sapiens
ggtaggaaagtgaat

SEQ ID NO: 646144 - DNA, 15 bp, Homo sapiens
gtaggaaagtgaatg

SEQ ID NO: 646145 - DNA, 15 bp, Homo sapiens
taggaaagtgaatgc

SEQ ID NO: 646146 - DNA, 15 bp, Homo sapiens
aggaaagtgaatgct

SEQ ID NO: 646147 - DNA, 15 bp, Homo sapiens
ggaaagtgaatgctt

SEQ ID NO: 646148 - DNA, 15 bp, Homo sapiens
gaaagtgaatgctta

SEQ ID NO: 646149 - DNA, 15 bp, Homo sapiens
aaagtgaatgcttat

SEQ ID NO: 646150 - DNA, 15 bp, Homo sapiens
aagtgaatgcttatc

SEQ ID NO: 646151 - DNA, 15 bp, Homo sapiens
agtgaatgcttatct

SEQ ID NO: 646152 - DNA, 15 bp, Homo sapiens
gtgaatgcttatctg

SEQ ID NO: 646153 - DNA, 15 bp, Homo sapiens
tgaatgcttatctgc

SEQ ID NO: 646154 - DNA, 15 bp, Homo sapiens
gaatgcttatctgca

SEQ ID NO: 646155 - DNA, 15 bp, Homo sapiens
aatgcttatctgcag

SEQ ID NO: 646156 - DNA, 15 bp, Homo sapiens
atgcttatctgcagg

SEQ ID NO: 646157 - DNA, 15 bp, Homo sapiens
tgcttatctgcaggg

SEQ ID NO: 646158 - DNA, 15 bp, Homo sapiens
gcttatctgcagggg

SEQ ID NO: 646159 - DNA, 15 bp, Homo sapiens
cttatctgcaggggc

SEQ ID NO: 646160 - DNA, 15 bp, Homo sapiens
ttatctgcaggggct

SEQ ID NO: 646161 - DNA, 15 bp, Homo sapiens
tatctgcaggggctt

SEQ ID NO: 646162 - DNA, 15 bp, Homo sapiens
atctgcaggggcttt

SEQ ID NO: 646163 - DNA, 15 bp, Homo sapiens
tctgcaggggctttg

SEQ ID NO: 646164 - DNA, 15 bp, Homo sapiens
ctgcaggggctttgt

SEQ ID NO: 646165 - DNA, 15 bp, Homo sapiens
tgcaggggctttgtt

SEQ ID NO: 646166 - DNA, 15 bp, Homo sapiens
gcaggggctttgttt

SEQ ID NO: 646167 - DNA, 15 bp, Homo sapiens
caggggctttgttta

SEQ ID NO: 646168 - DNA, 15 bp, Homo sapiens
aggggctttgtttag

SEQ ID NO: 646169 - DNA, 15 bp, Homo sapiens
ggggctttgtttagc

SEQ ID NO: 646170 - DNA, 15 bp, Homo sapiens
gggctttgtttagca

SEQ ID NO: 646171 - DNA, 15 bp, Homo sapiens
ggctttgtttagcat

SEQ ID NO: 646172 - DNA, 15 bp, Homo sapiens
gctttgtttagcata

SEQ ID NO: 646173 - DNA, 15 bp, Homo sapiens
ctttgtttagcatag

SEQ ID NO: 646174 - DNA, 15 bp, Homo sapiens
tttgtttagcataga

SEQ ID NO: 646175 - DNA, 15 bp, Homo sapiens
ttgtttagcatagac

SEQ ID NO: 646176 - DNA, 15 bp, Homo sapiens
tgtttagcatagact

SEQ ID NO: 646177 - DNA, 15 bp, Homo sapiens
gtttagcatagactg

SEQ ID NO: 646178 - DNA, 15 bp, Homo sapiens
tttagcatagactga

SEQ ID NO: 646179 - DNA, 15 bp, Homo sapiens
ttagcatagactgac

SEQ ID NO: 646180 - DNA, 15 bp, Homo sapiens
tagcatagactgacc

SEQ ID NO: 646181 - DNA, 15 bp, Homo sapiens
agcatagactgacct

SEQ ID NO: 646182 - DNA, 15 bp, Homo sapiens
gcatagactgaccta

SEQ ID NO: 646183 - DNA, 15 bp, Homo sapiens
catagactgacctaa

SEQ ID NO: 646184 - DNA, 15 bp, Homo sapiens
atagactgacctaat

SEQ ID NO: 646185 - DNA, 15 bp, Homo sapiens
tagactgacctaatg

SEQ ID NO: 646186 - DNA, 15 bp, Homo sapiens
agactgacctaatgc

SEQ ID NO: 646187 - DNA, 15 bp, Homo sapiens
gactgacctaatgcc

SEQ ID NO: 646188 - DNA, 15 bp, Homo sapiens
actgacctaatgcct

SEQ ID NO: 646189 - DNA, 15 bp, Homo sapiens
ctgacctaatgcctt

SEQ ID NO: 646190 - DNA, 15 bp, Homo sapiens
tgacctaatgccttt

SEQ ID NO: 646191 - DNA, 15 bp, Homo sapiens
gacctaatgcctttt

SEQ ID NO: 646192 - DNA, 15 bp, Homo sapiens
acctaatgccttttc

SEQ ID NO: 646193 - DNA, 15 bp, Homo sapiens
cctaatgccttttcc

SEQ ID NO: 646194 - DNA, 15 bp, Homo sapiens
ctaatgccttttcct

SEQ ID NO: 646195 - DNA, 15 bp, Homo sapiens
taatgccttttcctg

SEQ ID NO: 646196 - DNA, 15 bp, Homo sapiens
aatgccttttcctgc

SEQ ID NO: 646197 - DNA, 15 bp, Homo sapiens
atgccttttcctgca

SEQ ID NO: 646198 - DNA, 15 bp, Homo sapiens
tgccttttcctgcag

SEQ ID NO: 646199 - DNA, 15 bp, Homo sapiens
gccttttcctgcagc

SEQ ID NO: 646200 - DNA, 15 bp, Homo sapiens
ccttttcctgcagcc

SEQ ID NO: 646201 - DNA, 15 bp, Homo sapiens
cttttcctgcagcct

SEQ ID NO: 646202 - DNA, 15 bp, Homo sapiens
ttttcctgcagcctg

SEQ ID NO: 646203 - DNA, 15 bp, Homo sapiens
tttcctgcagcctgt

SEQ ID NO: 646204 - DNA, 15 bp, Homo sapiens
ttcctgcagcctgtg

SEQ ID NO: 646205 - DNA, 15 bp, Homo sapiens
tcctgcagcctgtgc

SEQ ID NO: 646206 - DNA, 15 bp, Homo sapiens
cctgcagcctgtgcc

SEQ ID NO: 646207 - DNA, 15 bp, Homo sapiens
ctgcagcctgtgcca

SEQ ID NO: 646208 - DNA, 15 bp, Homo sapiens
tgcagcctgtgccaa

SEQ ID NO: 646209 - DNA, 15 bp, Homo sapiens
gcagcctgtgccaaa

SEQ ID NO: 646210 - DNA, 15 bp, Homo sapiens
cagcctgtgccaaaa

SEQ ID NO: 646211 - DNA, 15 bp, Homo sapiens
agcctgtgccaaaat

SEQ ID NO: 646212 - DNA, 15 bp, Homo sapiens
gcctgtgccaaaatc

SEQ ID NO: 646213 - DNA, 15 bp, Homo sapiens
cctgtgccaaaatcc

SEQ ID NO: 646214 - DNA, 15 bp, Homo sapiens
ctgtgccaaaatcca

SEQ ID NO: 646215 - DNA, 15 bp, Homo sapiens
tgtgccaaaatccat

SEQ ID NO: 646216 - DNA, 15 bp, Homo sapiens
gtgccaaaatccatt

SEQ ID NO: 646217 - DNA, 15 bp, Homo sapiens
tgccaaaatccatta

SEQ ID NO: 646218 - DNA, 15 bp, Homo sapiens
gccaaaatccattat

SEQ ID NO: 646219 - DNA, 15 bp, Homo sapiens
ccaaaatccattatc

SEQ ID NO: 646220 - DNA, 15 bp, Homo sapiens
caaaatccattatca

SEQ ID NO: 646221 - DNA, 15 bp, Homo sapiens
aaaatccattatcag

SEQ ID NO: 646222 - DNA, 15 bp, Homo sapiens
aaatccattatcagt

SEQ ID NO: 646223 - DNA, 15 bp, Homo sapiens
aatccattatcagtt

SEQ ID NO: 646224 - DNA, 15 bp, Homo sapiens
atccattatcagttg

SEQ ID NO: 646225 - DNA, 15 bp, Homo sapiens
tccattatcagttgt

SEQ ID NO: 646226 - DNA, 15 bp, Homo sapiens
ccattatcagttgta

SEQ ID NO: 646227 - DNA, 15 bp, Homo sapiens
cattatcagttgtac

SEQ ID NO: 646228 - DNA, 15 bp, Homo sapiens
attatcagttgtaca

SEQ ID NO: 646229 - DNA, 15 bp, Homo sapiens
ttatcagttgtacac

SEQ ID NO: 646230 - DNA, 15 bp, Homo sapiens
tatcagttgtacaca

SEQ ID NO: 646231 - DNA, 15 bp, Homo sapiens
atcagttgtacacaa

SEQ ID NO: 646232 - DNA, 15 bp, Homo sapiens
tcagttgtacacaac

SEQ ID NO: 646233 - DNA, 15 bp, Homo sapiens
cagttgtacacaaca

SEQ ID NO: 646234 - DNA, 15 bp, Homo sapiens
agttgtacacaacac

SEQ ID NO: 646235 - DNA, 15 bp, Homo sapiens
gttgtacacaacacc

SEQ ID NO: 646236 - DNA, 15 bp, Homo sapiens
ttgtacacaacacct

SEQ ID NO: 646237 - DNA, 15 bp, Homo sapiens
tgtacacaacacctt

SEQ ID NO: 646238 - DNA, 15 bp, Homo sapiens
gtacacaacaccttg

SEQ ID NO: 646239 - DNA, 15 bp, Homo sapiens
tacacaacaccttga

SEQ ID NO: 646240 - DNA, 15 bp, Homo sapiens
acacaacaccttgat

SEQ ID NO: 646241 - DNA, 15 bp, Homo sapiens
cacaacaccttgatt

SEQ ID NO: 646242 - DNA, 15 bp, Homo sapiens
acaacaccttgattt

SEQ ID NO: 646243 - DNA, 15 bp, Homo sapiens
caacaccttgatttc

SEQ ID NO: 646244 - DNA, 15 bp, Homo sapiens
aacaccttgatttcc

SEQ ID NO: 646245 - DNA, 15 bp, Homo sapiens
acaccttgatttccc

SEQ ID NO: 646246 - DNA, 15 bp, Homo sapiens
caccttgatttccct

SEQ ID NO: 646247 - DNA, 15 bp, Homo sapiens
accttgatttccctg

SEQ ID NO: 646248 - DNA, 15 bp, Homo sapiens
ccttgatttccctgt

SEQ ID NO: 646249 - DNA, 15 bp, Homo sapiens
cttgatttccctgta

SEQ ID NO: 646250 - DNA, 15 bp, Homo sapiens
ttgatttccctgtat

SEQ ID NO: 646251 - DNA, 15 bp, Homo sapiens
tgatttccctgtata

SEQ ID NO: 646252 - DNA, 15 bp, Homo sapiens
gatttccctgtatac

SEQ ID NO: 646253 - DNA, 15 bp, Homo sapiens
atttccctgtatacc

SEQ ID NO: 646254 - DNA, 15 bp, Homo sapiens
tttccctgtatacct

SEQ ID NO: 646255 - DNA, 15 bp, Homo sapiens
ttccctgtatacctc

SEQ ID NO: 646256 - DNA, 15 bp, Homo sapiens
tccctgtatacctct

SEQ ID NO: 646257 - DNA, 15 bp, Homo sapiens
ccctgtatacctctg

SEQ ID NO: 646258 - DNA, 15 bp, Homo sapiens
cctgtatacctctga

SEQ ID NO: 646259 - DNA, 15 bp, Homo sapiens
ctgtatacctctgat

SEQ ID NO: 646260 - DNA, 15 bp, Homo sapiens
tgtatacctctgatg

SEQ ID NO: 646261 - DNA, 15 bp, Homo sapiens
gtatacctctgatgc

SEQ ID NO: 646262 - DNA, 15 bp, Homo sapiens
tatacctctgatgct

SEQ ID NO: 646263 - DNA, 15 bp, Homo sapiens
atacctctgatgctg

SEQ ID NO: 646264 - DNA, 15 bp, Homo sapiens
tacctctgatgctgc

SEQ ID NO: 646265 - DNA, 15 bp, Homo sapiens
acctctgatgctgct

SEQ ID NO: 646266 - DNA, 15 bp, Homo sapiens
cctctgatgctgctt

SEQ ID NO: 646267 - DNA, 15 bp, Homo sapiens
ctctgatgctgctta

SEQ ID NO: 646268 - DNA, 15 bp, Homo sapiens
tctgatgctgcttaa

SEQ ID NO: 646269 - DNA, 15 bp, Homo sapiens
ctgatgctgcttaat

SEQ ID NO: 646270 - DNA, 15 bp, Homo sapiens
tgatgctgcttaatt

SEQ ID NO: 646271 - DNA, 15 bp, Homo sapiens
gatgctgcttaatta

SEQ ID NO: 646272 - DNA, 15 bp, Homo sapiens
atgctgcttaattaa

SEQ ID NO: 646273 - DNA, 15 bp, Homo sapiens
tgctgcttaattaaa

SEQ ID NO: 646274 - DNA, 15 bp, Homo sapiens
gctgcttaattaaac

SEQ ID NO: 646275 - DNA, 15 bp, Homo sapiens
ctgcttaattaaaca

SEQ ID NO: 646276 - DNA, 15 bp, Homo sapiens
tgcttaattaaacat

SEQ ID NO: 646277 - DNA, 15 bp, Homo sapiens
gcttaattaaacata

SEQ ID NO: 646278 - DNA, 15 bp, Homo sapiens
cttaattaaacatat

SEQ ID NO: 646279 - DNA, 15 bp, Homo sapiens
ttaattaaacatatt

SEQ ID NO: 646280 - DNA, 15 bp, Homo sapiens
taattaaacatattc

SEQ ID NO: 646281 - DNA, 15 bp, Homo sapiens
aattaaacatattcc

SEQ ID NO: 646282 - DNA, 15 bp, Homo sapiens
attaaacatattcca

SEQ ID NO: 646283 - DNA, 15 bp, Homo sapiens
ttaaacatattccat

SEQ ID NO: 646284 - DNA, 15 bp, Homo sapiens
taaacatattccatc

SEQ ID NO: 646285 - DNA, 15 bp, Homo sapiens
aaacatattccatct

SEQ ID NO: 646286 - DNA, 15 bp, Homo sapiens
aacatattccatctt

SEQ ID NO: 646287 - DNA, 15 bp, Homo sapiens
acatattccatcttt

SEQ ID NO: 646288 - DNA, 15 bp, Homo sapiens
catattccatctttt

SEQ ID NO: 646289 - DNA, 15 bp, Homo sapiens
atattccatcttttt

SEQ ID NO: 646290 - DNA, 15 bp, Homo sapiens
tattccatcttttta

SEQ ID NO: 646291 - DNA, 15 bp, Homo sapiens
attccatctttttac

SEQ ID NO: 646292 - DNA, 15 bp, Homo sapiens
ttccatctttttaca

SEQ ID NO: 646293 - DNA, 15 bp, Homo sapiens
tccatctttttacag

SEQ ID NO: 646294 - DNA, 15 bp, Homo sapiens
ccatctttttacaga

SEQ ID NO: 646295 - DNA, 15 bp, Homo sapiens
catctttttacagat

SEQ ID NO: 646296 - DNA, 15 bp, Homo sapiens
atctttttacagatc

SEQ ID NO: 646297 - DNA, 15 bp, Homo sapiens
tctttttacagatca

SEQ ID NO: 646298 - DNA, 15 bp, Homo sapiens
ctttttacagatcat

SEQ ID NO: 646299 - DNA, 15 bp, Homo sapiens
tttttacagatcatg

SEQ ID NO: 646300 - DNA, 15 bp, Homo sapiens
ttttacagatcatgt

SEQ ID NO: 646301 - DNA, 15 bp, Homo sapiens
tttacagatcatgtg

SEQ ID NO: 646302 - DNA, 15 bp, Homo sapiens
ttacagatcatgtga

SEQ ID NO: 646303 - DNA, 15 bp, Homo sapiens
tacagatcatgtgaa

SEQ ID NO: 646304 - DNA, 15 bp, Homo sapiens
acagatcatgtgaac

SEQ ID NO: 646305 - DNA, 15 bp, Homo sapiens
cagatcatgtgaacc

SEQ ID NO: 646306 - DNA, 15 bp, Homo sapiens
agatcatgtgaaccc

SEQ ID NO: 646307 - DNA, 15 bp, Homo sapiens
gatcatgtgaaccca

SEQ ID NO: 646308 - DNA, 15 bp, Homo sapiens
atcatgtgaacccaa

SEQ ID NO: 646309 - DNA, 15 bp, Homo sapiens
tcatgtgaacccaaa

SEQ ID NO: 646310 - DNA, 15 bp, Homo sapiens
catgtgaacccaaaa

SEQ ID NO: 646311 - DNA, 15 bp, Homo sapiens
atgtgaacccaaaag

SEQ ID NO: 646312 - DNA, 15 bp, Homo sapiens
tgtgaacccaaaagc

SEQ ID NO: 646313 - DNA, 15 bp, Homo sapiens
gtgaacccaaaagca

SEQ ID NO: 646314 - DNA, 15 bp, Homo sapiens
tgaacccaaaagcat

SEQ ID NO: 646315 - DNA, 15 bp, Homo sapiens
gaacccaaaagcatt

SEQ ID NO: 646316 - DNA, 15 bp, Homo sapiens
aacccaaaagcattt

SEQ ID NO: 646317 - DNA, 15 bp, Homo sapiens
acccaaaagcatttt

SEQ ID NO: 646318 - DNA, 15 bp, Homo sapiens
cccaaaagcattttt

SEQ ID NO: 646319 - DNA, 15 bp, Homo sapiens
ccaaaagcatttttc

SEQ ID NO: 646320 - DNA, 15 bp, Homo sapiens
caaaagcatttttca

SEQ ID NO: 646321 - DNA, 15 bp, Homo sapiens
aaaagcatttttcag

SEQ ID NO: 646322 - DNA, 15 bp, Homo sapiens
aaagcatttttcagt

SEQ ID NO: 646323 - DNA, 15 bp, Homo sapiens
aagcatttttcagtg

SEQ ID NO: 646324 - DNA, 15 bp, Homo sapiens
agcatttttcagtgt

SEQ ID NO: 646325 - DNA, 15 bp, Homo sapiens
gcatttttcagtgtt

SEQ ID NO: 646326 - DNA, 15 bp, Homo sapiens
catttttcagtgttc

SEQ ID NO: 646327 - DNA, 15 bp, Homo sapiens
atttttcagtgttct

SEQ ID NO: 646328 - DNA, 15 bp, Homo sapiens
tttttcagtgttctt

SEQ ID NO: 646329 - DNA, 15 bp, Homo sapiens
ttttcagtgttcttc

SEQ ID NO: 646330 - DNA, 15 bp, Homo sapiens
tttcagtgttcttcg

SEQ ID NO: 646331 - DNA, 15 bp, Homo sapiens
ttcagtgttcttcgc

SEQ ID NO: 646332 - DNA, 15 bp, Homo sapiens
tcagtgttcttcgca

SEQ ID NO: 646333 - DNA, 15 bp, Homo sapiens
cagtgttcttcgcat

SEQ ID NO: 646334 - DNA, 15 bp, Homo sapiens
agtgttcttcgcata

SEQ ID NO: 646335 - DNA, 15 bp, Homo sapiens
gtgttcttcgcatat

SEQ ID NO: 646336 - DNA, 15 bp, Homo sapiens
tgttcttcgcatata

SEQ ID NO: 646337 - DNA, 15 bp, Homo sapiens
gttcttcgcatatat

SEQ ID NO: 646338 - DNA, 15 bp, Homo sapiens
ttcttcgcatatatt

SEQ ID NO: 646339 - DNA, 15 bp, Homo sapiens
tcttcgcatatattt

SEQ ID NO: 646340 - DNA, 15 bp, Homo sapiens
cttcgcatatatttg

SEQ ID NO: 646341 - DNA, 15 bp, Homo sapiens
ttcgcatatatttgt

SEQ ID NO: 646342 - DNA, 15 bp, Homo sapiens
tcgcatatatttgtc

SEQ ID NO: 646343 - DNA, 15 bp, Homo sapiens
cgcatatatttgtct

SEQ ID NO: 646344 - DNA, 15 bp, Homo sapiens
gcatatatttgtctg

SEQ ID NO: 646345 - DNA, 15 bp, Homo sapiens
catatatttgtctgg

SEQ ID NO: 646346 - DNA, 15 bp, Homo sapiens
atatatttgtctggg

SEQ ID NO: 646347 - DNA, 15 bp, Homo sapiens
tatatttgtctgggt

SEQ ID NO: 646348 - DNA, 15 bp, Homo sapiens
atatttgtctgggta

SEQ ID NO: 646349 - DNA, 15 bp, Homo sapiens
tatttgtctgggtat

SEQ ID NO: 646350 - DNA, 15 bp, Homo sapiens
atttgtctgggtatg

SEQ ID NO: 646351 - DNA, 15 bp, Homo sapiens
tttgtctgggtatgt

SEQ ID NO: 646352 - DNA, 15 bp, Homo sapiens
ttgtctgggtatgta

SEQ ID NO: 646353 - DNA, 15 bp, Homo sapiens
tgtctgggtatgtag

SEQ ID NO: 646354 - DNA, 15 bp, Homo sapiens
gtctgggtatgtagt

SEQ ID NO: 646355 - DNA, 15 bp, Homo sapiens
tctgggtatgtagtc

SEQ ID NO: 646356 - DNA, 15 bp, Homo sapiens
ctgggtatgtagtct

SEQ ID NO: 646357 - DNA, 15 bp, Homo sapiens
tgggtatgtagtctt

SEQ ID NO: 646358 - DNA, 15 bp, Homo sapiens
gggtatgtagtctta

SEQ ID NO: 646359 - DNA, 15 bp, Homo sapiens
ggtatgtagtcttat

SEQ ID NO: 646360 - DNA, 15 bp, Homo sapiens
gtatgtagtcttatg

SEQ ID NO: 646361 - DNA, 15 bp, Homo sapiens
tatgtagtcttatgt

SEQ ID NO: 646362 - DNA, 15 bp, Homo sapiens
atgtagtcttatgtt

SEQ ID NO: 646363 - DNA, 15 bp, Homo sapiens
tgtagtcttatgttt

SEQ ID NO: 646364 - DNA, 15 bp, Homo sapiens
gtagtcttatgtttg

SEQ ID NO: 646365 - DNA, 15 bp, Homo sapiens
tagtcttatgtttga

SEQ ID NO: 646366 - DNA, 15 bp, Homo sapiens
agtcttatgtttgaa

SEQ ID NO: 646367 - DNA, 15 bp, Homo sapiens
gtcttatgtttgaat

SEQ ID NO: 646368 - DNA, 15 bp, Homo sapiens
tcttatgtttgaatt

SEQ ID NO: 646369 - DNA, 15 bp, Homo sapiens
cttatgtttgaattt

SEQ ID NO: 646370 - DNA, 15 bp, Homo sapiens
ttatgtttgaatttg

SEQ ID NO: 646371 - DNA, 15 bp, Homo sapiens
tatgtttgaatttgt

SEQ ID NO: 646372 - DNA, 15 bp, Homo sapiens
atgtttgaatttgtt

SEQ ID NO: 646373 - DNA, 15 bp, Homo sapiens
tgtttgaatttgttt

SEQ ID NO: 646374 - DNA, 15 bp, Homo sapiens
gtttgaatttgtttg

SEQ ID NO: 646375 - DNA, 15 bp, Homo sapiens
tttgaatttgtttgc

SEQ ID NO: 646376 - DNA, 15 bp, Homo sapiens
ttgaatttgtttgct

SEQ ID NO: 646377 - DNA, 15 bp, Homo sapiens
tgaatttgtttgctc

SEQ ID NO: 646378 - DNA, 15 bp, Homo sapiens
gaatttgtttgctct

SEQ ID NO: 646379 - DNA, 15 bp, Homo sapiens
aatttgtttgctctc

SEQ ID NO: 646380 - DNA, 15 bp, Homo sapiens
atttgtttgctctca

SEQ ID NO: 646381 - DNA, 15 bp, Homo sapiens
tttgtttgctctcac

SEQ ID NO: 646382 - DNA, 15 bp, Homo sapiens
ttgtttgctctcact

SEQ ID NO: 646383 - DNA, 15 bp, Homo sapiens
tgtttgctctcactt

SEQ ID NO: 646384 - DNA, 15 bp, Homo sapiens
gtttgctctcactta

SEQ ID NO: 646385 - DNA, 15 bp, Homo sapiens
tttgctctcacttaa

SEQ ID NO: 646386 - DNA, 15 bp, Homo sapiens
ttgctctcacttaac

SEQ ID NO: 646387 - DNA, 15 bp, Homo sapiens
tgctctcacttaaca

SEQ ID NO: 646388 - DNA, 15 bp, Homo sapiens
gctctcacttaacaa

SEQ ID NO: 646389 - DNA, 15 bp, Homo sapiens
ctctcacttaacaaa

SEQ ID NO: 646390 - DNA, 15 bp, Homo sapiens
tctcacttaacaaag

SEQ ID NO: 646391 - DNA, 15 bp, Homo sapiens
ctcacttaacaaaga

SEQ ID NO: 646392 - DNA, 15 bp, Homo sapiens
tcacttaacaaagaa

SEQ ID NO: 646393 - DNA, 15 bp, Homo sapiens
cacttaacaaagaac

SEQ ID NO: 646394 - DNA, 15 bp, Homo sapiens
acttaacaaagaaca

SEQ ID NO: 646395 - DNA, 15 bp, Homo sapiens
cttaacaaagaacac

SEQ ID NO: 646396 - DNA, 15 bp, Homo sapiens
ttaacaaagaacacc

SEQ ID NO: 646397 - DNA, 15 bp, Homo sapiens
taacaaagaacacca

SEQ ID NO: 646398 - DNA, 15 bp, Homo sapiens
aacaaagaacaccac

SEQ ID NO: 646399 - DNA, 15 bp, Homo sapiens
acaaagaacaccacc

SEQ ID NO: 646400 - DNA, 15 bp, Homo sapiens
caaagaacaccacca

SEQ ID NO: 646401 - DNA, 15 bp, Homo sapiens
aaagaacaccaccaa

SEQ ID NO: 646402 - DNA, 15 bp, Homo sapiens
aagaacaccaccaaa

SEQ ID NO: 646403 - DNA, 15 bp, Homo sapiens
agaacaccaccaaat

SEQ ID NO: 646404 - DNA, 15 bp, Homo sapiens
gaacaccaccaaatt

SEQ ID NO: 646405 - DNA, 15 bp, Homo sapiens
aacaccaccaaattc

SEQ ID NO: 646406 - DNA, 15 bp, Homo sapiens
acaccaccaaattct

SEQ ID NO: 646407 - DNA, 15 bp, Homo sapiens
caccaccaaattctc

SEQ ID NO: 646408 - DNA, 15 bp, Homo sapiens
accaccaaattctct

SEQ ID NO: 646409 - DNA, 15 bp, Homo sapiens
ccaccaaattctctt

SEQ ID NO: 646410 - DNA, 15 bp, Homo sapiens
caccaaattctcttg

SEQ ID NO: 646411 - DNA, 15 bp, Homo sapiens
accaaattctcttgg

SEQ ID NO: 646412 - DNA, 15 bp, Homo sapiens
ccaaattctcttggt

SEQ ID NO: 646413 - DNA, 15 bp, Homo sapiens
caaattctcttggtt

SEQ ID NO: 646414 - DNA, 15 bp, Homo sapiens
aaattctcttggttg

SEQ ID NO: 646415 - DNA, 15 bp, Homo sapiens
aattctcttggttgg

SEQ ID NO: 646416 - DNA, 15 bp, Homo sapiens
attctcttggttggt

SEQ ID NO: 646417 - DNA, 15 bp, Homo sapiens
ttctcttggttggtc

SEQ ID NO: 646418 - DNA, 15 bp, Homo sapiens
tctcttggttggtcc

SEQ ID NO: 646419 - DNA, 15 bp, Homo sapiens
ctcttggttggtccc

SEQ ID NO: 646420 - DNA, 15 bp, Homo sapiens
tcttggttggtccct

SEQ ID NO: 646421 - DNA, 15 bp, Homo sapiens
cttggttggtcccta

SEQ ID NO: 646422 - DNA, 15 bp, Homo sapiens
ttggttggtccctaa

SEQ ID NO: 646423 - DNA, 15 bp, Homo sapiens
tggttggtccctaat

SEQ ID NO: 646424 - DNA, 15 bp, Homo sapiens
ggttggtccctaata

SEQ ID NO: 646425 - DNA, 15 bp, Homo sapiens
gttggtccctaatat

SEQ ID NO: 646426 - DNA, 15 bp, Homo sapiens
ttggtccctaatatc

SEQ ID NO: 646427 - DNA, 15 bp, Homo sapiens
tggtccctaatatcc

SEQ ID NO: 646428 - DNA, 15 bp, Homo sapiens
ggtccctaatatcca

SEQ ID NO: 646429 - DNA, 15 bp, Homo sapiens
gtccctaatatccat

SEQ ID NO: 646430 - DNA, 15 bp, Homo sapiens
tccctaatatccatt

SEQ ID NO: 646431 - DNA, 15 bp, Homo sapiens
ccctaatatccattg

SEQ ID NO: 646432 - DNA, 15 bp, Homo sapiens
cctaatatccattgg

SEQ ID NO: 646433 - DNA, 15 bp, Homo sapiens
ctaatatccattggg

SEQ ID NO: 646434 - DNA, 15 bp, Homo sapiens
taatatccattgggt

SEQ ID NO: 646435 - DNA, 15 bp, Homo sapiens
aatatccattgggtt

SEQ ID NO: 646436 - DNA, 15 bp, Homo sapiens
atatccattgggttt

SEQ ID NO: 646437 - DNA, 15 bp, Homo sapiens
tatccattgggtttg

SEQ ID NO: 646438 - DNA, 15 bp, Homo sapiens
atccattgggtttgg

SEQ ID NO: 646439 - DNA, 15 bp, Homo sapiens
tccattgggtttggc

SEQ ID NO: 646440 - DNA, 15 bp, Homo sapiens
ccattgggtttggct

SEQ ID NO: 646441 - DNA, 15 bp, Homo sapiens
cattgggtttggcta

SEQ ID NO: 646442 - DNA, 15 bp, Homo sapiens
attgggtttggctaa

SEQ ID NO: 646443 - DNA, 15 bp, Homo sapiens
ttgggtttggctaac

SEQ ID NO: 646444 - DNA, 15 bp, Homo sapiens
tgggtttggctaaca

SEQ ID NO: 646445 - DNA, 15 bp, Homo sapiens
gggtttggctaacaa

SEQ ID NO: 646446 - DNA, 15 bp, Homo sapiens
ggtttggctaacaat

SEQ ID NO: 646447 - DNA, 15 bp, Homo sapiens
gtttggctaacaatt

SEQ ID NO: 646448 - DNA, 15 bp, Homo sapiens
tttggctaacaattt

SEQ ID NO: 646449 - DNA, 15 bp, Homo sapiens
ttggctaacaattta

SEQ ID NO: 646450 - DNA, 15 bp, Homo sapiens
tggctaacaatttac

SEQ ID NO: 646451 - DNA, 15 bp, Homo sapiens
ggctaacaatttaca

SEQ ID NO: 646452 - DNA, 15 bp, Homo sapiens
gctaacaatttacat

SEQ ID NO: 646453 - DNA, 15 bp, Homo sapiens
ctaacaatttacatc

SEQ ID NO: 646454 - DNA, 15 bp, Homo sapiens
taacaatttacatcc

SEQ ID NO: 646455 - DNA, 15 bp, Homo sapiens
aacaatttacatcca

SEQ ID NO: 646456 - DNA, 15 bp, Homo sapiens
acaatttacatccaa

SEQ ID NO: 646457 - DNA, 15 bp, Homo sapiens
caatttacatccaaa

SEQ ID NO: 646458 - DNA, 15 bp, Homo sapiens
aatttacatccaaaa

SEQ ID NO: 646459 - DNA, 15 bp, Homo sapiens
atttacatccaaaaa

SEQ ID NO: 646460 - DNA, 15 bp, Homo sapiens
tttacatccaaaaat

SEQ ID NO: 646461 - DNA, 15 bp, Homo sapiens
ttacatccaaaaatt

SEQ ID NO: 646462 - DNA, 15 bp, Homo sapiens
tacatccaaaaattc

SEQ ID NO: 646463 - DNA, 15 bp, Homo sapiens
acatccaaaaattca

SEQ ID NO: 646464 - DNA, 15 bp, Homo sapiens
catccaaaaattcac

SEQ ID NO: 646465 - DNA, 15 bp, Homo sapiens
atccaaaaattcaca

SEQ ID NO: 646466 - DNA, 15 bp, Homo sapiens
tccaaaaattcacat

SEQ ID NO: 646467 - DNA, 15 bp, Homo sapiens
ccaaaaattcacatg

SEQ ID NO: 646468 - DNA, 15 bp, Homo sapiens
caaaaattcacatgg

SEQ ID NO: 646469 - DNA, 15 bp, Homo sapiens
aaaaattcacatggt

SEQ ID NO: 646470 - DNA, 15 bp, Homo sapiens
aaaattcacatggta

SEQ ID NO: 646471 - DNA, 15 bp, Homo sapiens
aaattcacatggtag

SEQ ID NO: 646472 - DNA, 15 bp, Homo sapiens
aattcacatggtaga

SEQ ID NO: 646473 - DNA, 15 bp, Homo sapiens
attcacatggtagaa

SEQ ID NO: 646474 - DNA, 15 bp, Homo sapiens
ttcacatggtagaaa

SEQ ID NO: 646475 - DNA, 15 bp, Homo sapiens
tcacatggtagaaaa

SEQ ID NO: 646476 - DNA, 15 bp, Homo sapiens
cacatggtagaaaaa

SEQ ID NO: 646477 - DNA, 15 bp, Homo sapiens
acatggtagaaaaat

SEQ ID NO: 646478 - DNA, 15 bp, Homo sapiens
catggtagaaaaata

SEQ ID NO: 646479 - DNA, 15 bp, Homo sapiens
atggtagaaaaatac

SEQ ID NO: 646480 - DNA, 15 bp, Homo sapiens
tggtagaaaaatact

SEQ ID NO: 646481 - DNA, 15 bp, Homo sapiens
ggtagaaaaatacta

SEQ ID NO: 646482 - DNA, 15 bp, Homo sapiens
gtagaaaaatactag

SEQ ID NO: 646483 - DNA, 15 bp, Homo sapiens
tagaaaaatactaga

SEQ ID NO: 646484 - DNA, 15 bp, Homo sapiens
agaaaaatactagac

SEQ ID NO: 646485 - DNA, 15 bp, Homo sapiens
gaaaaatactagact

SEQ ID NO: 646486 - DNA, 15 bp, Homo sapiens
aaaaatactagactg

SEQ ID NO: 646487 - DNA, 15 bp, Homo sapiens
aaaatactagactgt

SEQ ID NO: 646488 - DNA, 15 bp, Homo sapiens
aaatactagactgtt

SEQ ID NO: 646489 - DNA, 15 bp, Homo sapiens
aatactagactgttc

SEQ ID NO: 646490 - DNA, 15 bp, Homo sapiens
atactagactgttct

SEQ ID NO: 646491 - DNA, 15 bp, Homo sapiens
tactagactgttctg

SEQ ID NO: 646492 - DNA, 15 bp, Homo sapiens
actagactgttctgt

SEQ ID NO: 646493 - DNA, 15 bp, Homo sapiens
ctagactgttctgtt

SEQ ID NO: 646494 - DNA, 15 bp, Homo sapiens
tagactgttctgtta

SEQ ID NO: 646495 - DNA, 15 bp, Homo sapiens
agactgttctgttat

SEQ ID NO: 646496 - DNA, 15 bp, Homo sapiens
gactgttctgttatc

SEQ ID NO: 646497 - DNA, 15 bp, Homo sapiens
actgttctgttatca

SEQ ID NO: 646498 - DNA, 15 bp, Homo sapiens
ctgttctgttatcac

SEQ ID NO: 646499 - DNA, 15 bp, Homo sapiens
tgttctgttatcact

SEQ ID NO: 646500 - DNA, 15 bp, Homo sapiens
gttctgttatcactt

SEQ ID NO: 646501 - DNA, 15 bp, Homo sapiens
ttctgttatcacttg

SEQ ID NO: 646502 - DNA, 15 bp, Homo sapiens
tctgttatcacttgg

SEQ ID NO: 646503 - DNA, 15 bp, Homo sapiens
ctgttatcacttggc

SEQ ID NO: 646504 - DNA, 15 bp, Homo sapiens
tgttatcacttggcc

SEQ ID NO: 646505 - DNA, 15 bp, Homo sapiens
gttatcacttggcca

SEQ ID NO: 646506 - DNA, 15 bp, Homo sapiens
ttatcacttggccag

SEQ ID NO: 646507 - DNA, 15 bp, Homo sapiens
tatcacttggccagg

SEQ ID NO: 646508 - DNA, 15 bp, Homo sapiens
atcacttggccagga

SEQ ID NO: 646509 - DNA, 15 bp, Homo sapiens
tcacttggccaggaa

SEQ ID NO: 646510 - DNA, 15 bp, Homo sapiens
cacttggccaggaat

SEQ ID NO: 646511 - DNA, 15 bp, Homo sapiens
acttggccaggaatg

SEQ ID NO: 646512 - DNA, 15 bp, Homo sapiens
cttggccaggaatgt

SEQ ID NO: 646513 - DNA, 15 bp, Homo sapiens
ttggccaggaatgta

SEQ ID NO: 646514 - DNA, 15 bp, Homo sapiens
tggccaggaatgtac

SEQ ID NO: 646515 - DNA, 15 bp, Homo sapiens
ggccaggaatgtact

SEQ ID NO: 646516 - DNA, 15 bp, Homo sapiens
gccaggaatgtactg

SEQ ID NO: 646517 - DNA, 15 bp, Homo sapiens
ccaggaatgtactgg

SEQ ID NO: 646518 - DNA, 15 bp, Homo sapiens
caggaatgtactgga

SEQ ID NO: 646519 - DNA, 15 bp, Homo sapiens
aggaatgtactggag

SEQ ID NO: 646520 - DNA, 15 bp, Homo sapiens
ggaatgtactggagt

SEQ ID NO: 646521 - DNA, 15 bp, Homo sapiens
gaatgtactggagtg

SEQ ID NO: 646522 - DNA, 15 bp, Homo sapiens
aatgtactggagtgg

SEQ ID NO: 646523 - DNA, 15 bp, Homo sapiens
atgtactggagtggg

SEQ ID NO: 646524 - DNA, 15 bp, Homo sapiens
tgtactggagtgggg

SEQ ID NO: 646525 - DNA, 15 bp, Homo sapiens
gtactggagtggggg

SEQ ID NO: 646526 - DNA, 15 bp, Homo sapiens
tactggagtggggga

SEQ ID NO: 646527 - DNA, 15 bp, Homo sapiens
actggagtgggggac

SEQ ID NO: 646528 - DNA, 15 bp, Homo sapiens
ctggagtgggggaca

SEQ ID NO: 646529 - DNA, 15 bp, Homo sapiens
tggagtgggggacag

SEQ ID NO: 646530 - DNA, 15 bp, Homo sapiens
ggagtgggggacagg

SEQ ID NO: 646531 - DNA, 15 bp, Homo sapiens
gagtgggggacagga

SEQ ID NO: 646532 - DNA, 15 bp, Homo sapiens
agtgggggacaggaa

SEQ ID NO: 646533 - DNA, 15 bp, Homo sapiens
gtgggggacaggaaa

SEQ ID NO: 646534 - DNA, 15 bp, Homo sapiens
tgggggacaggaaag

SEQ ID NO: 646535 - DNA, 15 bp, Homo sapiens
gggggacaggaaagc

SEQ ID NO: 646536 - DNA, 15 bp, Homo sapiens
ggggacaggaaagct

SEQ ID NO: 646537 - DNA, 15 bp, Homo sapiens
gggacaggaaagcta

SEQ ID NO: 646538 - DNA, 15 bp, Homo sapiens
ggacaggaaagctag

SEQ ID NO: 646539 - DNA, 15 bp, Homo sapiens
gacaggaaagctagt

SEQ ID NO: 646540 - DNA, 15 bp, Homo sapiens
acaggaaagctagtt

SEQ ID NO: 646541 - DNA, 15 bp, Homo sapiens
caggaaagctagtta

SEQ ID NO: 646542 - DNA, 15 bp, Homo sapiens
aggaaagctagttat

SEQ ID NO: 646543 - DNA, 15 bp, Homo sapiens
ggaaagctagttatt

SEQ ID NO: 646544 - DNA, 15 bp, Homo sapiens
gaaagctagttattt

SEQ ID NO: 646545 - DNA, 15 bp, Homo sapiens
aaagctagttatttt

SEQ ID NO: 646546 - DNA, 15 bp, Homo sapiens
aagctagttatttta

SEQ ID NO: 646547 - DNA, 15 bp, Homo sapiens
agctagttattttaa

SEQ ID NO: 646548 - DNA, 15 bp, Homo sapiens
gctagttattttaaa

SEQ ID NO: 646549 - DNA, 15 bp, Homo sapiens
ctagttattttaaaa

SEQ ID NO: 646550 - DNA, 15 bp, Homo sapiens
tagttattttaaaaa

SEQ ID NO: 646551 - DNA, 15 bp, Homo sapiens
agttattttaaaaag

SEQ ID NO: 646552 - DNA, 15 bp, Homo sapiens
gttattttaaaaaga

SEQ ID NO: 646553 - DNA, 15 bp, Homo sapiens
ttattttaaaaagag

SEQ ID NO: 646554 - DNA, 15 bp, Homo sapiens
tattttaaaaagagt

SEQ ID NO: 646555 - DNA, 15 bp, Homo sapiens
attttaaaaagagtg

SEQ ID NO: 646556 - DNA, 15 bp, Homo sapiens
ttttaaaaagagtgg

SEQ ID NO: 646557 - DNA, 15 bp, Homo sapiens
tttaaaaagagtggt

SEQ ID NO: 646558 - DNA, 15 bp, Homo sapiens
ttaaaaagagtggtc

SEQ ID NO: 646559 - DNA, 15 bp, Homo sapiens
taaaaagagtggtct

SEQ ID NO: 646560 - DNA, 15 bp, Homo sapiens
aaaaagagtggtctg

SEQ ID NO: 646561 - DNA, 15 bp, Homo sapiens
aaaagagtggtctgt

SEQ ID NO: 646562 - DNA, 15 bp, Homo sapiens
aaagagtggtctgtg

SEQ ID NO: 646563 - DNA, 15 bp, Homo sapiens
aagagtggtctgtgc

SEQ ID NO: 646564 - DNA, 15 bp, Homo sapiens
agagtggtctgtgct

SEQ ID NO: 646565 - DNA, 15 bp, Homo sapiens
gagtggtctgtgcta

SEQ ID NO: 646566 - DNA, 15 bp, Homo sapiens
agtggtctgtgctag

SEQ ID NO: 646567 - DNA, 15 bp, Homo sapiens
gtggtctgtgctagt

SEQ ID NO: 646568 - DNA, 15 bp, Homo sapiens
tggtctgtgctagta

SEQ ID NO: 646569 - DNA, 15 bp, Homo sapiens
ggtctgtgctagtac

SEQ ID NO: 646570 - DNA, 15 bp, Homo sapiens
gtctgtgctagtaca

SEQ ID NO: 646571 - DNA, 15 bp, Homo sapiens
tctgtgctagtacaa

SEQ ID NO: 646572 - DNA, 15 bp, Homo sapiens
ctgtgctagtacaaa

SEQ ID NO: 646573 - DNA, 15 bp, Homo sapiens
tgtgctagtacaaag

SEQ ID NO: 646574 - DNA, 15 bp, Homo sapiens
gtgctagtacaaagg

SEQ ID NO: 646575 - DNA, 15 bp, Homo sapiens
tgctagtacaaaggt

SEQ ID NO: 646576 - DNA, 15 bp, Homo sapiens
gctagtacaaaggta

SEQ ID NO: 646577 - DNA, 15 bp, Homo sapiens
ctagtacaaaggtaa

SEQ ID NO: 646578 - DNA, 15 bp, Homo sapiens
tagtacaaaggtaag

SEQ ID NO: 646579 - DNA, 15 bp, Homo sapiens
agtacaaaggtaaga

SEQ ID NO: 646580 - DNA, 15 bp, Homo sapiens
gtacaaaggtaagat

SEQ ID NO: 646581 - DNA, 15 bp, Homo sapiens
tacaaaggtaagatt

SEQ ID NO: 646582 - DNA, 15 bp, Homo sapiens
acaaaggtaagattc

SEQ ID NO: 646583 - DNA, 15 bp, Homo sapiens
caaaggtaagattcc

SEQ ID NO: 646584 - DNA, 15 bp, Homo sapiens
aaaggtaagattcca

SEQ ID NO: 646585 - DNA, 15 bp, Homo sapiens
aaggtaagattccat

SEQ ID NO: 646586 - DNA, 15 bp, Homo sapiens
aggtaagattccatt

SEQ ID NO: 646587 - DNA, 15 bp, Homo sapiens
ggtaagattccattc

SEQ ID NO: 646588 - DNA, 15 bp, Homo sapiens
gtaagattccattcc

SEQ ID NO: 646589 - DNA, 15 bp, Homo sapiens
taagattccattcct

SEQ ID NO: 646590 - DNA, 15 bp, Homo sapiens
aagattccattccta

SEQ ID NO: 646591 - DNA, 15 bp, Homo sapiens
agattccattcctag

SEQ ID NO: 646592 - DNA, 15 bp, Homo sapiens
gattccattcctaga

SEQ ID NO: 646593 - DNA, 15 bp, Homo sapiens
attccattcctagaa

SEQ ID NO: 646594 - DNA, 15 bp, Homo sapiens
ttccattcctagaat

SEQ ID NO: 646595 - DNA, 15 bp, Homo sapiens
tccattcctagaata

SEQ ID NO: 646596 - DNA, 15 bp, Homo sapiens
ccattcctagaatag

SEQ ID NO: 646597 - DNA, 15 bp, Homo sapiens
cattcctagaatagt

SEQ ID NO: 646598 - DNA, 15 bp, Homo sapiens
attcctagaatagtt

SEQ ID NO: 646599 - DNA, 15 bp, Homo sapiens
ttcctagaatagtta

SEQ ID NO: 646600 - DNA, 15 bp, Homo sapiens
tcctagaatagttat

SEQ ID NO: 646601 - DNA, 15 bp, Homo sapiens
cctagaatagttatg

SEQ ID NO: 646602 - DNA, 15 bp, Homo sapiens
ctagaatagttatgc

SEQ ID NO: 646603 - DNA, 15 bp, Homo sapiens
tagaatagttatgcc

SEQ ID NO: 646604 - DNA, 15 bp, Homo sapiens
agaatagttatgcca

SEQ ID NO: 646605 - DNA, 15 bp, Homo sapiens
gaatagttatgccaa

SEQ ID NO: 646606 - DNA, 15 bp, Homo sapiens
aatagttatgccaaa

SEQ ID NO: 646607 - DNA, 15 bp, Homo sapiens
atagttatgccaaat

SEQ ID NO: 646608 - DNA, 15 bp, Homo sapiens
tagttatgccaaatc

SEQ ID NO: 646609 - DNA, 15 bp, Homo sapiens
agttatgccaaatct

SEQ ID NO: 646610 - DNA, 15 bp, Homo sapiens
gttatgccaaatctg

SEQ ID NO: 646611 - DNA, 15 bp, Homo sapiens
ttatgccaaatctgc

SEQ ID NO: 646612 - DNA, 15 bp, Homo sapiens
tatgccaaatctgct

SEQ ID NO: 646613 - DNA, 15 bp, Homo sapiens
atgccaaatctgctc

SEQ ID NO: 646614 - DNA, 15 bp, Homo sapiens
tgccaaatctgctca

SEQ ID NO: 646615 - DNA, 15 bp, Homo sapiens
gccaaatctgctcag

SEQ ID NO: 646616 - DNA, 15 bp, Homo sapiens
ccaaatctgctcagg

SEQ ID NO: 646617 - DNA, 15 bp, Homo sapiens
caaatctgctcagga

SEQ ID NO: 646618 - DNA, 15 bp, Homo sapiens
aaatctgctcaggat

SEQ ID NO: 646619 - DNA, 15 bp, Homo sapiens
aatctgctcaggatt

SEQ ID NO: 646620 - DNA, 15 bp, Homo sapiens
atctgctcaggatta

SEQ ID NO: 646621 - DNA, 15 bp, Homo sapiens
tctgctcaggattat

SEQ ID NO: 646622 - DNA, 15 bp, Homo sapiens
ctgctcaggattata

SEQ ID NO: 646623 - DNA, 15 bp, Homo sapiens
tgctcaggattatat

SEQ ID NO: 646624 - DNA, 15 bp, Homo sapiens
gctcaggattatatt

SEQ ID NO: 646625 - DNA, 15 bp, Homo sapiens
ctcaggattatatta

SEQ ID NO: 646626 - DNA, 15 bp, Homo sapiens
tcaggattatattat

SEQ ID NO: 646627 - DNA, 15 bp, Homo sapiens
caggattatattatt

SEQ ID NO: 646628 - DNA, 15 bp, Homo sapiens
aggattatattattt

SEQ ID NO: 646629 - DNA, 15 bp, Homo sapiens
ggattatattattta

SEQ ID NO: 646630 - DNA, 15 bp, Homo sapiens
gattatattatttac

SEQ ID NO: 646631 - DNA, 15 bp, Homo sapiens
attatattatttact

SEQ ID NO: 646632 - DNA, 15 bp, Homo sapiens
ttatattatttacta

SEQ ID NO: 646633 - DNA, 15 bp, Homo sapiens
tatattatttactat

SEQ ID NO: 646634 - DNA, 15 bp, Homo sapiens
atattatttactatt

SEQ ID NO: 646635 - DNA, 15 bp, Homo sapiens
tattatttactattc

SEQ ID NO: 646636 - DNA, 15 bp, Homo sapiens
attatttactattct

SEQ ID NO: 646637 - DNA, 15 bp, Homo sapiens
ttatttactattctc

SEQ ID NO: 646638 - DNA, 15 bp, Homo sapiens
tatttactattctca

SEQ ID NO: 646639 - DNA, 15 bp, Homo sapiens
atttactattctcat

SEQ ID NO: 646640 - DNA, 15 bp, Homo sapiens
tttactattctcatg

SEQ ID NO: 646641 - DNA, 15 bp, Homo sapiens
ttactattctcatgc

SEQ ID NO: 646642 - DNA, 15 bp, Homo sapiens
tactattctcatgct

SEQ ID NO: 646643 - DNA, 15 bp, Homo sapiens
actattctcatgctt

SEQ ID NO: 646644 - DNA, 15 bp, Homo sapiens
ctattctcatgcttg

SEQ ID NO: 646645 - DNA, 15 bp, Homo sapiens
tattctcatgcttga

SEQ ID NO: 646646 - DNA, 15 bp, Homo sapiens
attctcatgcttgaa

SEQ ID NO: 646647 - DNA, 15 bp, Homo sapiens
ttctcatgcttgaaa

SEQ ID NO: 646648 - DNA, 15 bp, Homo sapiens
tctcatgcttgaaaa

SEQ ID NO: 646649 - DNA, 15 bp, Homo sapiens
ctcatgcttgaaaat

SEQ ID NO: 646650 - DNA, 15 bp, Homo sapiens
tcatgcttgaaaatg

SEQ ID NO: 646651 - DNA, 15 bp, Homo sapiens
catgcttgaaaatga

SEQ ID NO: 646652 - DNA, 15 bp, Homo sapiens
atgcttgaaaatgag

SEQ ID NO: 646653 - DNA, 15 bp, Homo sapiens
tgcttgaaaatgagc

SEQ ID NO: 646654 - DNA, 15 bp, Homo sapiens
gcttgaaaatgagca

SEQ ID NO: 646655 - DNA, 15 bp, Homo sapiens
cttgaaaatgagcag

SEQ ID NO: 646656 - DNA, 15 bp, Homo sapiens
ttgaaaatgagcagg

SEQ ID NO: 646657 - DNA, 15 bp, Homo sapiens
tgaaaatgagcaggg

SEQ ID NO: 646658 - DNA, 15 bp, Homo sapiens
gaaaatgagcagggg

SEQ ID NO: 646659 - DNA, 15 bp, Homo sapiens
aaaatgagcaggggc

SEQ ID NO: 646660 - DNA, 15 bp, Homo sapiens
aaatgagcaggggca

SEQ ID NO: 646661 - DNA, 15 bp, Homo sapiens
aatgagcaggggcaa

SEQ ID NO: 646662 - DNA, 15 bp, Homo sapiens
atgagcaggggcaag

SEQ ID NO: 646663 - DNA, 15 bp, Homo sapiens
tgagcaggggcaagg

SEQ ID NO: 646664 - DNA, 15 bp, Homo sapiens
gagcaggggcaaggg

SEQ ID NO: 646665 - DNA, 15 bp, Homo sapiens
agcaggggcaagggg

SEQ ID NO: 646666 - DNA, 15 bp, Homo sapiens
gcaggggcaaggggg

SEQ ID NO: 646667 - DNA, 15 bp, Homo sapiens
caggggcaagggggt

SEQ ID NO: 646668 - DNA, 15 bp, Homo sapiens
aggggcaagggggta

SEQ ID NO: 646669 - DNA, 15 bp, Homo sapiens
ggggcaagggggtat

SEQ ID NO: 646670 - DNA, 15 bp, Homo sapiens
gggcaagggggtatg

SEQ ID NO: 646671 - DNA, 15 bp, Homo sapiens
ggcaagggggtatga

SEQ ID NO: 646672 - DNA, 15 bp, Homo sapiens
gcaagggggtatgaa

SEQ ID NO: 646673 - DNA, 15 bp, Homo sapiens
caagggggtatgaaa

SEQ ID NO: 646674 - DNA, 15 bp, Homo sapiens
aagggggtatgaaaa

SEQ ID NO: 646675 - DNA, 15 bp, Homo sapiens
agggggtatgaaaaa

SEQ ID NO: 646676 - DNA, 15 bp, Homo sapiens
gggggtatgaaaaaa

SEQ ID NO: 646677 - DNA, 15 bp, Homo sapiens
ggggtatgaaaaaag

SEQ ID NO: 646678 - DNA, 15 bp, Homo sapiens
gggtatgaaaaaagg

SEQ ID NO: 646679 - DNA, 15 bp, Homo sapiens
ggtatgaaaaaagga

SEQ ID NO: 646680 - DNA, 15 bp, Homo sapiens
gtatgaaaaaaggat

SEQ ID NO: 646681 - DNA, 15 bp, Homo sapiens
tatgaaaaaaggatc

SEQ ID NO: 646682 - DNA, 15 bp, Homo sapiens
atgaaaaaaggatca

SEQ ID NO: 646683 - DNA, 15 bp, Homo sapiens
tgaaaaaaggatcat

SEQ ID NO: 646684 - DNA, 15 bp, Homo sapiens
gaaaaaaggatcatg

SEQ ID NO: 646685 - DNA, 15 bp, Homo sapiens
aaaaaaggatcatga

SEQ ID NO: 646686 - DNA, 15 bp, Homo sapiens
aaaaaggatcatgaa

SEQ ID NO: 646687 - DNA, 15 bp, Homo sapiens
aaaaggatcatgaaa

SEQ ID NO: 646688 - DNA, 15 bp, Homo sapiens
aaaggatcatgaaat

SEQ ID NO: 646689 - DNA, 15 bp, Homo sapiens
aaggatcatgaaatc

SEQ ID NO: 646690 - DNA, 15 bp, Homo sapiens
aggatcatgaaatcc

SEQ ID NO: 646691 - DNA, 15 bp, Homo sapiens
ggatcatgaaatcca

SEQ ID NO: 646692 - DNA, 15 bp, Homo sapiens
gatcatgaaatccat

SEQ ID NO: 646693 - DNA, 15 bp, Homo sapiens
atcatgaaatccatc

SEQ ID NO: 646694 - DNA, 15 bp, Homo sapiens
tcatgaaatccatct

SEQ ID NO: 646695 - DNA, 15 bp, Homo sapiens
catgaaatccatctc

SEQ ID NO: 646696 - DNA, 15 bp, Homo sapiens
atgaaatccatctct

SEQ ID NO: 646697 - DNA, 15 bp, Homo sapiens
tgaaatccatctctt

SEQ ID NO: 646698 - DNA, 15 bp, Homo sapiens
gaaatccatctcttg

SEQ ID NO: 646699 - DNA, 15 bp, Homo sapiens
aaatccatctcttgt

SEQ ID NO: 646700 - DNA, 15 bp, Homo sapiens
aatccatctcttgtc

SEQ ID NO: 646701 - DNA, 15 bp, Homo sapiens
atccatctcttgtca

SEQ ID NO: 646702 - DNA, 15 bp, Homo sapiens
tccatctcttgtcac

SEQ ID NO: 646703 - DNA, 15 bp, Homo sapiens
ccatctcttgtcacc

SEQ ID NO: 646704 - DNA, 15 bp, Homo sapiens
catctcttgtcacct

SEQ ID NO: 646705 - DNA, 15 bp, Homo sapiens
atctcttgtcacctt

SEQ ID NO: 646706 - DNA, 15 bp, Homo sapiens
tctcttgtcaccttc

SEQ ID NO: 646707 - DNA, 15 bp, Homo sapiens
ctcttgtcaccttct

SEQ ID NO: 646708 - DNA, 15 bp, Homo sapiens
tcttgtcaccttctg

SEQ ID NO: 646709 - DNA, 15 bp, Homo sapiens
cttgtcaccttctgt

SEQ ID NO: 646710 - DNA, 15 bp, Homo sapiens
ttgtcaccttctgtt

SEQ ID NO: 646711 - DNA, 15 bp, Homo sapiens
tgtcaccttctgttc

SEQ ID NO: 646712 - DNA, 15 bp, Homo sapiens
gtcaccttctgttca

SEQ ID NO: 646713 - DNA, 15 bp, Homo sapiens
tcaccttctgttcag

SEQ ID NO: 646714 - DNA, 15 bp, Homo sapiens
caccttctgttcagc

SEQ ID NO: 646715 - DNA, 15 bp, Homo sapiens
accttctgttcagca

SEQ ID NO: 646716 - DNA, 15 bp, Homo sapiens
ccttctgttcagcac

SEQ ID NO: 646717 - DNA, 15 bp, Homo sapiens
cttctgttcagcact

SEQ ID NO: 646718 - DNA, 15 bp, Homo sapiens
ttctgttcagcacta

SEQ ID NO: 646719 - DNA, 15 bp, Homo sapiens
tctgttcagcactag

SEQ ID NO: 646720 - DNA, 15 bp, Homo sapiens
ctgttcagcactagt

SEQ ID NO: 646721 - DNA, 15 bp, Homo sapiens
tgttcagcactagtg

SEQ ID NO: 646722 - DNA, 15 bp, Homo sapiens
gttcagcactagtgc

SEQ ID NO: 646723 - DNA, 15 bp, Homo sapiens
ttcagcactagtgca

SEQ ID NO: 646724 - DNA, 15 bp, Homo sapiens
tcagcactagtgcaa

SEQ ID NO: 646725 - DNA, 15 bp, Homo sapiens
cagcactagtgcaag

SEQ ID NO: 646726 - DNA, 15 bp, Homo sapiens
agcactagtgcaaga

SEQ ID NO: 646727 - DNA, 15 bp, Homo sapiens
gcactagtgcaagat

SEQ ID NO: 646728 - DNA, 15 bp, Homo sapiens
cactagtgcaagatt

SEQ ID NO: 646729 - DNA, 15 bp, Homo sapiens
actagtgcaagattt

SEQ ID NO: 646730 - DNA, 15 bp, Homo sapiens
ctagtgcaagatttg

SEQ ID NO: 646731 - DNA, 15 bp, Homo sapiens
tagtgcaagatttgg

SEQ ID NO: 646732 - DNA, 15 bp, Homo sapiens
agtgcaagatttggt

SEQ ID NO: 646733 - DNA, 15 bp, Homo sapiens
gtgcaagatttggta

SEQ ID NO: 646734 - DNA, 15 bp, Homo sapiens
tgcaagatttggtac

SEQ ID NO: 646735 - DNA, 15 bp, Homo sapiens
gcaagatttggtacc

SEQ ID NO: 646736 - DNA, 15 bp, Homo sapiens
caagatttggtacct

SEQ ID NO: 646737 - DNA, 15 bp, Homo sapiens
aagatttggtacctg

SEQ ID NO: 646738 - DNA, 15 bp, Homo sapiens
agatttggtacctga

SEQ ID NO: 646739 - DNA, 15 bp, Homo sapiens
gatttggtacctgaa

SEQ ID NO: 646740 - DNA, 15 bp, Homo sapiens
atttggtacctgaaa

SEQ ID NO: 646741 - DNA, 15 bp, Homo sapiens
tttggtacctgaaaa

SEQ ID NO: 646742 - DNA, 15 bp, Homo sapiens
ttggtacctgaaaat

SEQ ID NO: 646743 - DNA, 15 bp, Homo sapiens
tggtacctgaaaatt

SEQ ID NO: 646744 - DNA, 15 bp, Homo sapiens
ggtacctgaaaatta

SEQ ID NO: 646745 - DNA, 15 bp, Homo sapiens
gtacctgaaaattag

SEQ ID NO: 646746 - DNA, 15 bp, Homo sapiens
tacctgaaaattagc

SEQ ID NO: 646747 - DNA, 15 bp, Homo sapiens
acctgaaaattagca

SEQ ID NO: 646748 - DNA, 15 bp, Homo sapiens
cctgaaaattagcaa

SEQ ID NO: 646749 - DNA, 15 bp, Homo sapiens
ctgaaaattagcaat

SEQ ID NO: 646750 - DNA, 15 bp, Homo sapiens
tgaaaattagcaatt

SEQ ID NO: 646751 - DNA, 15 bp, Homo sapiens
gaaaattagcaatta

SEQ ID NO: 646752 - DNA, 15 bp, Homo sapiens
aaaattagcaattaa

SEQ ID NO: 646753 - DNA, 15 bp, Homo sapiens
aaattagcaattaac

SEQ ID NO: 646754 - DNA, 15 bp, Homo sapiens
aattagcaattaacc

SEQ ID NO: 646755 - DNA, 15 bp, Homo sapiens
attagcaattaacct

SEQ ID NO: 646756 - DNA, 15 bp, Homo sapiens
ttagcaattaaccta

SEQ ID NO: 646757 - DNA, 15 bp, Homo sapiens
tagcaattaacctaa

SEQ ID NO: 646758 - DNA, 15 bp, Homo sapiens
agcaattaacctaaa

SEQ ID NO: 646759 - DNA, 15 bp, Homo sapiens
gcaattaacctaaag

SEQ ID NO: 646760 - DNA, 15 bp, Homo sapiens
caattaacctaaaga

SEQ ID NO: 646761 - DNA, 15 bp, Homo sapiens
aattaacctaaagaa

SEQ ID NO: 646762 - DNA, 15 bp, Homo sapiens
attaacctaaagaat

SEQ ID NO: 646763 - DNA, 15 bp, Homo sapiens
ttaacctaaagaatg

SEQ ID NO: 646764 - DNA, 15 bp, Homo sapiens
taacctaaagaatga

SEQ ID NO: 646765 - DNA, 15 bp, Homo sapiens
aacctaaagaatgat

SEQ ID NO: 646766 - DNA, 15 bp, Homo sapiens
acctaaagaatgatt

SEQ ID NO: 646767 - DNA, 15 bp, Homo sapiens
cctaaagaatgattt

SEQ ID NO: 646768 - DNA, 15 bp, Homo sapiens
ctaaagaatgatttt

SEQ ID NO: 646769 - DNA, 15 bp, Homo sapiens
taaagaatgattttt

SEQ ID NO: 646770 - DNA, 15 bp, Homo sapiens
aaagaatgatttttc

SEQ ID NO: 646771 - DNA, 15 bp, Homo sapiens
aagaatgatttttct

SEQ ID NO: 646772 - DNA, 15 bp, Homo sapiens
agaatgatttttctt

SEQ ID NO: 646773 - DNA, 15 bp, Homo sapiens
gaatgatttttcttt

SEQ ID NO: 646774 - DNA, 15 bp, Homo sapiens
aatgatttttctttt

SEQ ID NO: 646775 - DNA, 15 bp, Homo sapiens
atgatttttcttttt

SEQ ID NO: 646776 - DNA, 15 bp, Homo sapiens
tgatttttctttttt

SEQ ID NO: 646777 - DNA, 15 bp, Homo sapiens
gatttttcttttttt

SEQ ID NO: 646778 - DNA, 15 bp, Homo sapiens
atttttctttttttc

SEQ ID NO: 646779 - DNA, 15 bp, Homo sapiens
tttttctttttttct

SEQ ID NO: 646780 - DNA, 15 bp, Homo sapiens
ttttctttttttctt

SEQ ID NO: 646781 - DNA, 15 bp, Homo sapiens
tttctttttttcttt

SEQ ID NO: 646782 - DNA, 15 bp, Homo sapiens
ttctttttttctttc

SEQ ID NO: 646783 - DNA, 15 bp, Homo sapiens
tctttttttctttct

SEQ ID NO: 646784 - DNA, 15 bp, Homo sapiens
ctttttttctttctt

SEQ ID NO: 646785 - DNA, 15 bp, Homo sapiens
tttttttctttcttt

SEQ ID NO: 646786 - DNA, 15 bp, Homo sapiens
tttttctttctttcc

SEQ ID NO: 646787 - DNA, 15 bp, Homo sapiens
ttttctttctttcct

SEQ ID NO: 646788 - DNA, 15 bp, Homo sapiens
tttctttctttcctc

SEQ ID NO: 646789 - DNA, 15 bp, Homo sapiens
ttctttctttcctct

SEQ ID NO: 646790 - DNA, 15 bp, Homo sapiens
tctttctttcctctg

SEQ ID NO: 646791 - DNA, 15 bp, Homo sapiens
ctttctttcctctga

SEQ ID NO: 646792 - DNA, 15 bp, Homo sapiens
tttctttcctctgat

SEQ ID NO: 646793 - DNA, 15 bp, Homo sapiens
ttctttcctctgata

SEQ ID NO: 646794 - DNA, 15 bp, Homo sapiens
tctttcctctgatag

SEQ ID NO: 646795 - DNA, 15 bp, Homo sapiens
ctttcctctgatagc

SEQ ID NO: 646796 - DNA, 15 bp, Homo sapiens
tttcctctgatagct

SEQ ID NO: 646797 - DNA, 15 bp, Homo sapiens
ttcctctgatagctg

SEQ ID NO: 646798 - DNA, 15 bp, Homo sapiens
tcctctgatagctgg

SEQ ID NO: 646799 - DNA, 15 bp, Homo sapiens
cctctgatagctgga

SEQ ID NO: 646800 - DNA, 15 bp, Homo sapiens
ctctgatagctggaa

SEQ ID NO: 646801 - DNA, 15 bp, Homo sapiens
tctgatagctggaaa

SEQ ID NO: 646802 - DNA, 15 bp, Homo sapiens
ctgatagctggaaag

SEQ ID NO: 646803 - DNA, 15 bp, Homo sapiens
tgatagctggaaagg

SEQ ID NO: 646804 - DNA, 15 bp, Homo sapiens
gatagctggaaaggc

SEQ ID NO: 646805 - DNA, 15 bp, Homo sapiens
atagctggaaaggca

SEQ ID NO: 646806 - DNA, 15 bp, Homo sapiens
tagctggaaaggcaa

SEQ ID NO: 646807 - DNA, 15 bp, Homo sapiens
agctggaaaggcaac

SEQ ID NO: 646808 - DNA, 15 bp, Homo sapiens
gctggaaaggcaacc

SEQ ID NO: 646809 - DNA, 15 bp, Homo sapiens
ctggaaaggcaaccc

SEQ ID NO: 646810 - DNA, 15 bp, Homo sapiens
tggaaaggcaacccc

SEQ ID NO: 646811 - DNA, 15 bp, Homo sapiens
ggaaaggcaaccccc

SEQ ID NO: 646812 - DNA, 15 bp, Homo sapiens
gaaaggcaaccccca

SEQ ID NO: 646813 - DNA, 15 bp, Homo sapiens
aaaggcaacccccag

SEQ ID NO: 646814 - DNA, 15 bp, Homo sapiens
aaggcaacccccagc

SEQ ID NO: 646815 - DNA, 15 bp, Homo sapiens
aggcaacccccagct

SEQ ID NO: 646816 - DNA, 15 bp, Homo sapiens
ggcaacccccagcta

SEQ ID NO: 646817 - DNA, 15 bp, Homo sapiens
gcaacccccagctat

SEQ ID NO: 646818 - DNA, 15 bp, Homo sapiens
caacccccagctatc

SEQ ID NO: 646819 - DNA, 15 bp, Homo sapiens
aacccccagctatca

SEQ ID NO: 646820 - DNA, 15 bp, Homo sapiens
acccccagctatcag

SEQ ID NO: 646821 - DNA, 15 bp, Homo sapiens
cccccagctatcaga

SEQ ID NO: 646822 - DNA, 15 bp, Homo sapiens
ccccagctatcagac

SEQ ID NO: 646823 - DNA, 15 bp, Homo sapiens
cccagctatcagacg

SEQ ID NO: 646824 - DNA, 15 bp, Homo sapiens
ccagctatcagacgg

SEQ ID NO: 646825 - DNA, 15 bp, Homo sapiens
cagctatcagacggt

SEQ ID NO: 646826 - DNA, 15 bp, Homo sapiens
agctatcagacggtc

SEQ ID NO: 646827 - DNA, 15 bp, Homo sapiens
gctatcagacggtct

SEQ ID NO: 646828 - DNA, 15 bp, Homo sapiens
ctatcagacggtctg

SEQ ID NO: 646829 - DNA, 15 bp, Homo sapiens
tatcagacggtctgg

SEQ ID NO: 646830 - DNA, 15 bp, Homo sapiens
atcagacggtctggt

SEQ ID NO: 646831 - DNA, 15 bp, Homo sapiens
tcagacggtctggtg

SEQ ID NO: 646832 - DNA, 15 bp, Homo sapiens
cagacggtctggtgt

SEQ ID NO: 646833 - DNA, 15 bp, Homo sapiens
agacggtctggtgta

SEQ ID NO: 646834 - DNA, 15 bp, Homo sapiens
gacggtctggtgtat

SEQ ID NO: 646835 - DNA, 15 bp, Homo sapiens
acggtctggtgtatg

SEQ ID NO: 646836 - DNA, 15 bp, Homo sapiens
cggtctggtgtatga

SEQ ID NO: 646837 - DNA, 15 bp, Homo sapiens
ggtctggtgtatgaa

SEQ ID NO: 646838 - DNA, 15 bp, Homo sapiens
gtctggtgtatgaag

SEQ ID NO: 646839 - DNA, 15 bp, Homo sapiens
tctggtgtatgaagg

SEQ ID NO: 646840 - DNA, 15 bp, Homo sapiens
ctggtgtatgaaggg

SEQ ID NO: 646841 - DNA, 15 bp, Homo sapiens
tggtgtatgaagggt

SEQ ID NO: 646842 - DNA, 15 bp, Homo sapiens
ggtgtatgaagggtt

SEQ ID NO: 646843 - DNA, 15 bp, Homo sapiens
gtgtatgaagggttc

SEQ ID NO: 646844 - DNA, 15 bp, Homo sapiens
tgtatgaagggttct

SEQ ID NO: 646845 - DNA, 15 bp, Homo sapiens
gtatgaagggttctg

SEQ ID NO: 646846 - DNA, 15 bp, Homo sapiens
tatgaagggttctgg

SEQ ID NO: 646847 - DNA, 15 bp, Homo sapiens
atgaagggttctggg

SEQ ID NO: 646848 - DNA, 15 bp, Homo sapiens
tgaagggttctggga

SEQ ID NO: 646849 - DNA, 15 bp, Homo sapiens
gaagggttctgggaa

SEQ ID NO: 646850 - DNA, 15 bp, Homo sapiens
aagggttctgggaag

SEQ ID NO: 646851 - DNA, 15 bp, Homo sapiens
agggttctgggaaga

SEQ ID NO: 646852 - DNA, 15 bp, Homo sapiens
gggttctgggaagac

SEQ ID NO: 646853 - DNA, 15 bp, Homo sapiens
ggttctgggaagacc

SEQ ID NO: 646854 - DNA, 15 bp, Homo sapiens
gttctgggaagaccc

SEQ ID NO: 646855 - DNA, 15 bp, Homo sapiens
ttctgggaagaccca

SEQ ID NO: 646856 - DNA, 15 bp, Homo sapiens
tctgggaagacccaa

SEQ ID NO: 646857 - DNA, 15 bp, Homo sapiens
ctgggaagacccaaa

SEQ ID NO: 646858 - DNA, 15 bp, Homo sapiens
tgggaagacccaaag

SEQ ID NO: 646859 - DNA, 15 bp, Homo sapiens
gggaagacccaaagg

SEQ ID NO: 646860 - DNA, 15 bp, Homo sapiens
ggaagacccaaagga

SEQ ID NO: 646861 - DNA, 15 bp, Homo sapiens
gaagacccaaaggag

SEQ ID NO: 646862 - DNA, 15 bp, Homo sapiens
aagacccaaaggagt

SEQ ID NO: 646863 - DNA, 15 bp, Homo sapiens
agacccaaaggagtt

SEQ ID NO: 646864 - DNA, 15 bp, Homo sapiens
gacccaaaggagttt

SEQ ID NO: 646865 - DNA, 15 bp, Homo sapiens
acccaaaggagtttg

SEQ ID NO: 646866 - DNA, 15 bp, Homo sapiens
cccaaaggagtttgc

SEQ ID NO: 646867 - DNA, 15 bp, Homo sapiens
ccaaaggagtttgca

SEQ ID NO: 646868 - DNA, 15 bp, Homo sapiens
caaaggagtttgcag

SEQ ID NO: 646869 - DNA, 15 bp, Homo sapiens
aaaggagtttgcagg

SEQ ID NO: 646870 - DNA, 15 bp, Homo sapiens
aaggagtttgcaggg

SEQ ID NO: 646871 - DNA, 15 bp, Homo sapiens
aggagtttgcagggg

SEQ ID NO: 646872 - DNA, 15 bp, Homo sapiens
ggagtttgcaggggg

SEQ ID NO: 646873 - DNA, 15 bp, Homo sapiens
gagtttgcagggggc

SEQ ID NO: 646874 - DNA, 15 bp, Homo sapiens
agtttgcagggggca

SEQ ID NO: 646875 - DNA, 15 bp, Homo sapiens
gtttgcagggggcag

SEQ ID NO: 646876 - DNA, 15 bp, Homo sapiens
tttgcagggggcagt

SEQ ID NO: 646877 - DNA, 15 bp, Homo sapiens
ttgcagggggcagtg

SEQ ID NO: 646878 - DNA, 15 bp, Homo sapiens
tgcagggggcagtgc

SEQ ID NO: 646879 - DNA, 15 bp, Homo sapiens
gcagggggcagtgca

SEQ ID NO: 646880 - DNA, 15 bp, Homo sapiens
cagggggcagtgcag

SEQ ID NO: 646881 - DNA, 15 bp, Homo sapiens
agggggcagtgcagg

SEQ ID NO: 646882 - DNA, 15 bp, Homo sapiens
gggggcagtgcaggc

SEQ ID NO: 646883 - DNA, 15 bp, Homo sapiens
ggggcagtgcaggcc

SEQ ID NO: 646884 - DNA, 15 bp, Homo sapiens
gggcagtgcaggcca

SEQ ID NO: 646885 - DNA, 15 bp, Homo sapiens
ggcagtgcaggccaa

SEQ ID NO: 646886 - DNA, 15 bp, Homo sapiens
gcagtgcaggccaaa

SEQ ID NO: 646887 - DNA, 15 bp, Homo sapiens
cagtgcaggccaaag

SEQ ID NO: 646888 - DNA, 15 bp, Homo sapiens
agtgcaggccaaagc

SEQ ID NO: 646889 - DNA, 15 bp, Homo sapiens
gtgcaggccaaagca

SEQ ID NO: 646890 - DNA, 15 bp, Homo sapiens
tgcaggccaaagcag

SEQ ID NO: 646891 - DNA, 15 bp, Homo sapiens
gcaggccaaagcagc

SEQ ID NO: 646892 - DNA, 15 bp, Homo sapiens
caggccaaagcagcg

SEQ ID NO: 646893 - DNA, 15 bp, Homo sapiens
aggccaaagcagcgt

SEQ ID NO: 646894 - DNA, 15 bp, Homo sapiens
ggccaaagcagcgtc

SEQ ID NO: 646895 - DNA, 15 bp, Homo sapiens
gccaaagcagcgtct

SEQ ID NO: 646896 - DNA, 15 bp, Homo sapiens
ccaaagcagcgtctt

SEQ ID NO: 646897 - DNA, 15 bp, Homo sapiens
caaagcagcgtcttt

SEQ ID NO: 646898 - DNA, 15 bp, Homo sapiens
aaagcagcgtctttc

SEQ ID NO: 646899 - DNA, 15 bp, Homo sapiens
aagcagcgtctttca

SEQ ID NO: 646900 - DNA, 15 bp, Homo sapiens
agcagcgtctttcag

SEQ ID NO: 646901 - DNA, 15 bp, Homo sapiens
gcagcgtctttcagt

SEQ ID NO: 646902 - DNA, 15 bp, Homo sapiens
cagcgtctttcagtg

SEQ ID NO: 646903 - DNA, 15 bp, Homo sapiens
agcgtctttcagtgc

SEQ ID NO: 646904 - DNA, 15 bp, Homo sapiens
gcgtctttcagtgct

SEQ ID NO: 646905 - DNA, 15 bp, Homo sapiens
cgtctttcagtgctt

SEQ ID NO: 646906 - DNA, 15 bp, Homo sapiens
gtctttcagtgcttt

SEQ ID NO: 646907 - DNA, 15 bp, Homo sapiens
tctttcagtgctttg

SEQ ID NO: 646908 - DNA, 15 bp, Homo sapiens
ctttcagtgctttga

SEQ ID NO: 646909 - DNA, 15 bp, Homo sapiens
tttcagtgctttgac

SEQ ID NO: 646910 - DNA, 15 bp, Homo sapiens
ttcagtgctttgacg

SEQ ID NO: 646911 - DNA, 15 bp, Homo sapiens
tcagtgctttgacgt

SEQ ID NO: 646912 - DNA, 15 bp, Homo sapiens
cagtgctttgacgtc

SEQ ID NO: 646913 - DNA, 15 bp, Homo sapiens
agtgctttgacgtcc

SEQ ID NO: 646914 - DNA, 15 bp, Homo sapiens
gtgctttgacgtcct

SEQ ID NO: 646915 - DNA, 15 bp, Homo sapiens
tgctttgacgtcctg

SEQ ID NO: 646916 - DNA, 15 bp, Homo sapiens
gctttgacgtcctgc

SEQ ID NO: 646917 - DNA, 15 bp, Homo sapiens
ctttgacgtcctgct

SEQ ID NO: 646918 - DNA, 15 bp, Homo sapiens
tttgacgtcctgctg

SEQ ID NO: 646919 - DNA, 15 bp, Homo sapiens
ttgacgtcctgctgg

SEQ ID NO: 646920 - DNA, 15 bp, Homo sapiens
tgacgtcctgctggg

SEQ ID NO: 646921 - DNA, 15 bp, Homo sapiens
gacgtcctgctgggc

SEQ ID NO: 646922 - DNA, 15 bp, Homo sapiens
acgtcctgctgggca

SEQ ID NO: 646923 - DNA, 15 bp, Homo sapiens
cgtcctgctgggcat

SEQ ID NO: 646924 - DNA, 15 bp, Homo sapiens
gtcctgctgggcatc

SEQ ID NO: 646925 - DNA, 15 bp, Homo sapiens
tcctgctgggcatcc

SEQ ID NO: 646926 - DNA, 15 bp, Homo sapiens
cctgctgggcatcca

SEQ ID NO: 646927 - DNA, 15 bp, Homo sapiens
ctgctgggcatccag

SEQ ID NO: 646928 - DNA, 15 bp, Homo sapiens
tgctgggcatccagc

SEQ ID NO: 646929 - DNA, 15 bp, Homo sapiens
gctgggcatccagca

SEQ ID NO: 646930 - DNA, 15 bp, Homo sapiens
ctgggcatccagcag

SEQ ID NO: 646931 - DNA, 15 bp, Homo sapiens
tgggcatccagcaga

SEQ ID NO: 646932 - DNA, 15 bp, Homo sapiens
gggcatccagcagac

SEQ ID NO: 646933 - DNA, 15 bp, Homo sapiens
ggcatccagcagact

SEQ ID NO: 646934 - DNA, 15 bp, Homo sapiens
gcatccagcagactg

SEQ ID NO: 646935 - DNA, 15 bp, Homo sapiens
catccagcagactgc

SEQ ID NO: 646936 - DNA, 15 bp, Homo sapiens
atccagcagactgct

SEQ ID NO: 646937 - DNA, 15 bp, Homo sapiens
tccagcagactgctg

SEQ ID NO: 646938 - DNA, 15 bp, Homo sapiens
ccagcagactgctgg

SEQ ID NO: 646939 - DNA, 15 bp, Homo sapiens
cagcagactgctggt

SEQ ID NO: 646940 - DNA, 15 bp, Homo sapiens
agcagactgctggtg

SEQ ID NO: 646941 - DNA, 15 bp, Homo sapiens
gcagactgctggtgg

SEQ ID NO: 646942 - DNA, 15 bp, Homo sapiens
cagactgctggtgga

SEQ ID NO: 646943 - DNA, 15 bp, Homo sapiens
agactgctggtggag

SEQ ID NO: 646944 - DNA, 15 bp, Homo sapiens
gactgctggtggagg

SEQ ID NO: 646945 - DNA, 15 bp, Homo sapiens
actgctggtggaggt

SEQ ID NO: 646946 - DNA, 15 bp, Homo sapiens
ctgctggtggaggtg

SEQ ID NO: 646947 - DNA, 15 bp, Homo sapiens
tgctggtggaggtga

SEQ ID NO: 646948 - DNA, 15 bp, Homo sapiens
gctggtggaggtgag

SEQ ID NO: 646949 - DNA, 15 bp, Homo sapiens
ctggtggaggtgagt

SEQ ID NO: 646950 - DNA, 15 bp, Homo sapiens
tggtggaggtgagtg

SEQ ID NO: 646951 - DNA, 15 bp, Homo sapiens
ggtggaggtgagtgg

SEQ ID NO: 646952 - DNA, 15 bp, Homo sapiens
gtggaggtgagtgga

SEQ ID NO: 646953 - DNA, 15 bp, Homo sapiens
tggaggtgagtggaa

SEQ ID NO: 646954 - DNA, 15 bp, Homo sapiens
ggaggtgagtggaaa

SEQ ID NO: 646955 - DNA, 15 bp, Homo sapiens
gaggtgagtggaaaa

SEQ ID NO: 646956 - DNA, 15 bp, Homo sapiens
aggtgagtggaaaat

SEQ ID NO: 646957 - DNA, 15 bp, Homo sapiens
ggtgagtggaaaata

SEQ ID NO: 646958 - DNA, 15 bp, Homo sapiens
gtgagtggaaaataa

SEQ ID NO: 646959 - DNA, 15 bp, Homo sapiens
tgagtggaaaataac

SEQ ID NO: 646960 - DNA, 15 bp, Homo sapiens
gagtggaaaataaca

SEQ ID NO: 646961 - DNA, 15 bp, Homo sapiens
agtggaaaataacaa

SEQ ID NO: 646962 - DNA, 15 bp, Homo sapiens
gtggaaaataacaag

SEQ ID NO: 646963 - DNA, 15 bp, Homo sapiens
tggaaaataacaaga

SEQ ID NO: 646964 - DNA, 15 bp, Homo sapiens
ggaaaataacaagaa

SEQ ID NO: 646965 - DNA, 15 bp, Homo sapiens
gaaaataacaagaaa

SEQ ID NO: 646966 - DNA, 15 bp, Homo sapiens
aaaataacaagaaat

SEQ ID NO: 646967 - DNA, 15 bp, Homo sapiens
aaataacaagaaata

SEQ ID NO: 646968 - DNA, 15 bp, Homo sapiens
aataacaagaaataa

SEQ ID NO: 646969 - DNA, 15 bp, Homo sapiens
ataacaagaaataat

SEQ ID NO: 646970 - DNA, 15 bp, Homo sapiens
taacaagaaataatt

SEQ ID NO: 646971 - DNA, 15 bp, Homo sapiens
aacaagaaataatta

SEQ ID NO: 646972 - DNA, 15 bp, Homo sapiens
acaagaaataattat

SEQ ID NO: 646973 - DNA, 15 bp, Homo sapiens
caagaaataattatc

SEQ ID NO: 646974 - DNA, 15 bp, Homo sapiens
aagaaataattatct

SEQ ID NO: 646975 - DNA, 15 bp, Homo sapiens
agaaataattatctc

SEQ ID NO: 646976 - DNA, 15 bp, Homo sapiens
gaaataattatctct

SEQ ID NO: 646977 - DNA, 15 bp, Homo sapiens
aaataattatctctt

SEQ ID NO: 646978 - DNA, 15 bp, Homo sapiens
aataattatctctta

SEQ ID NO: 646979 - DNA, 15 bp, Homo sapiens
ataattatctcttat

SEQ ID NO: 646980 - DNA, 15 bp, Homo sapiens
taattatctcttatg

SEQ ID NO: 646981 - DNA, 15 bp, Homo sapiens
aattatctcttatgt

SEQ ID NO: 646982 - DNA, 15 bp, Homo sapiens
attatctcttatgtg

SEQ ID NO: 646983 - DNA, 15 bp, Homo sapiens
ttatctcttatgtga

SEQ ID NO: 646984 - DNA, 15 bp, Homo sapiens
tatctcttatgtgaa

SEQ ID NO: 646985 - DNA, 15 bp, Homo sapiens
atctcttatgtgaat

SEQ ID NO: 646986 - DNA, 15 bp, Homo sapiens
tctcttatgtgaata

SEQ ID NO: 646987 - DNA, 15 bp, Homo sapiens
ctcttatgtgaatac

SEQ ID NO: 646988 - DNA, 15 bp, Homo sapiens
tcttatgtgaataca

SEQ ID NO: 646989 - DNA, 15 bp, Homo sapiens
cttatgtgaatacaa

SEQ ID NO: 646990 - DNA, 15 bp, Homo sapiens
ttatgtgaatacaat

SEQ ID NO: 646991 - DNA, 15 bp, Homo sapiens
tatgtgaatacaata

SEQ ID NO: 646992 - DNA, 15 bp, Homo sapiens
atgtgaatacaatag

SEQ ID NO: 646993 - DNA, 15 bp, Homo sapiens
tgtgaatacaatagt

SEQ ID NO: 646994 - DNA, 15 bp, Homo sapiens
gtgaatacaatagta

SEQ ID NO: 646995 - DNA, 15 bp, Homo sapiens
tgaatacaatagtat

SEQ ID NO: 646996 - DNA, 15 bp, Homo sapiens
gaatacaatagtatt

SEQ ID NO: 646997 - DNA, 15 bp, Homo sapiens
aatacaatagtattt

SEQ ID NO: 646998 - DNA, 15 bp, Homo sapiens
atacaatagtatttg

SEQ ID NO: 646999 - DNA, 15 bp, Homo sapiens
tacaatagtatttgg

SEQ ID NO: 647000 - DNA, 15 bp, Homo sapiens
acaatagtatttgga

SEQ ID NO: 647001 - DNA, 15 bp, Homo sapiens
caatagtatttggat

SEQ ID NO: 647002 - DNA, 15 bp, Homo sapiens
aatagtatttggata

SEQ ID NO: 647003 - DNA, 15 bp, Homo sapiens
atagtatttggatat

SEQ ID NO: 647004 - DNA, 15 bp, Homo sapiens
tagtatttggatatc

SEQ ID NO: 647005 - DNA, 15 bp, Homo sapiens
agtatttggatatct

SEQ ID NO: 647006 - DNA, 15 bp, Homo sapiens
gtatttggatatcta

SEQ ID NO: 647007 - DNA, 15 bp, Homo sapiens
tatttggatatctac

SEQ ID NO: 647008 - DNA, 15 bp, Homo sapiens
atttggatatctaca

SEQ ID NO: 647009 - DNA, 15 bp, Homo sapiens
tttggatatctacaa

SEQ ID NO: 647010 - DNA, 15 bp, Homo sapiens
ttggatatctacaaa

SEQ ID NO: 647011 - DNA, 15 bp, Homo sapiens
tggatatctacaaag

SEQ ID NO: 647012 - DNA, 15 bp, Homo sapiens
ggatatctacaaagc

SEQ ID NO: 647013 - DNA, 15 bp, Homo sapiens
gatatctacaaagca

SEQ ID NO: 647014 - DNA, 15 bp, Homo sapiens
atatctacaaagcac

SEQ ID NO: 647015 - DNA, 15 bp, Homo sapiens
tatctacaaagcacc

SEQ ID NO: 647016 - DNA, 15 bp, Homo sapiens
atctacaaagcacct

SEQ ID NO: 647017 - DNA, 15 bp, Homo sapiens
tctacaaagcacctt

SEQ ID NO: 647018 - DNA, 15 bp, Homo sapiens
ctacaaagcaccttc

SEQ ID NO: 647019 - DNA, 15 bp, Homo sapiens
tacaaagcaccttcc

SEQ ID NO: 647020 - DNA, 15 bp, Homo sapiens
acaaagcaccttccc

SEQ ID NO: 647021 - DNA, 15 bp, Homo sapiens
caaagcaccttccca

SEQ ID NO: 647022 - DNA, 15 bp, Homo sapiens
aaagcaccttcccat

SEQ ID NO: 647023 - DNA, 15 bp, Homo sapiens
aagcaccttcccatc

SEQ ID NO: 647024 - DNA, 15 bp, Homo sapiens
agcaccttcccatca

SEQ ID NO: 647025 - DNA, 15 bp, Homo sapiens
gcaccttcccatcag

SEQ ID NO: 647026 - DNA, 15 bp, Homo sapiens
caccttcccatcagc

SEQ ID NO: 647027 - DNA, 15 bp, Homo sapiens
accttcccatcagca

SEQ ID NO: 647028 - DNA, 15 bp, Homo sapiens
ccttcccatcagcat

SEQ ID NO: 647029 - DNA, 15 bp, Homo sapiens
cttcccatcagcatc

SEQ ID NO: 647030 - DNA, 15 bp, Homo sapiens
ttcccatcagcatct

SEQ ID NO: 647031 - DNA, 15 bp, Homo sapiens
tcccatcagcatctt

SEQ ID NO: 647032 - DNA, 15 bp, Homo sapiens
cccatcagcatctta

SEQ ID NO: 647033 - DNA, 15 bp, Homo sapiens
ccatcagcatcttat

SEQ ID NO: 647034 - DNA, 15 bp, Homo sapiens
catcagcatcttatc

SEQ ID NO: 647035 - DNA, 15 bp, Homo sapiens
atcagcatcttatct

SEQ ID NO: 647036 - DNA, 15 bp, Homo sapiens
tcagcatcttatctg

SEQ ID NO: 647037 - DNA, 15 bp, Homo sapiens
cagcatcttatctga

SEQ ID NO: 647038 - DNA, 15 bp, Homo sapiens
agcatcttatctgag

SEQ ID NO: 647039 - DNA, 15 bp, Homo sapiens
gcatcttatctgagc

SEQ ID NO: 647040 - DNA, 15 bp, Homo sapiens
catcttatctgagct

SEQ ID NO: 647041 - DNA, 15 bp, Homo sapiens
atcttatctgagctt

SEQ ID NO: 647042 - DNA, 15 bp, Homo sapiens
tcttatctgagctta

SEQ ID NO: 647043 - DNA, 15 bp, Homo sapiens
cttatctgagcttat

SEQ ID NO: 647044 - DNA, 15 bp, Homo sapiens
ttatctgagcttatc

SEQ ID NO: 647045 - DNA, 15 bp, Homo sapiens
tatctgagcttatct

SEQ ID NO: 647046 - DNA, 15 bp, Homo sapiens
atctgagcttatctg

SEQ ID NO: 647047 - DNA, 15 bp, Homo sapiens
tctgagcttatctga

SEQ ID NO: 647048 - DNA, 15 bp, Homo sapiens
ctgagcttatctgat

SEQ ID NO: 647049 - DNA, 15 bp, Homo sapiens
tgagcttatctgata

SEQ ID NO: 647050 - DNA, 15 bp, Homo sapiens
gagcttatctgatag

SEQ ID NO: 647051 - DNA, 15 bp, Homo sapiens
agcttatctgatagt

SEQ ID NO: 647052 - DNA, 15 bp, Homo sapiens
gcttatctgatagtt

SEQ ID NO: 647053 - DNA, 15 bp, Homo sapiens
cttatctgatagttt

SEQ ID NO: 647054 - DNA, 15 bp, Homo sapiens
ttatctgatagtttt

SEQ ID NO: 647055 - DNA, 15 bp, Homo sapiens
tatctgatagtttta

SEQ ID NO: 647056 - DNA, 15 bp, Homo sapiens
atctgatagttttag

SEQ ID NO: 647057 - DNA, 15 bp, Homo sapiens
tctgatagttttagc

SEQ ID NO: 647058 - DNA, 15 bp, Homo sapiens
ctgatagttttagca

SEQ ID NO: 647059 - DNA, 15 bp, Homo sapiens
tgatagttttagcag

SEQ ID NO: 647060 - DNA, 15 bp, Homo sapiens
gatagttttagcaga

SEQ ID NO: 647061 - DNA, 15 bp, Homo sapiens
atagttttagcagaa

SEQ ID NO: 647062 - DNA, 15 bp, Homo sapiens
tagttttagcagaat

SEQ ID NO: 647063 - DNA, 15 bp, Homo sapiens
agttttagcagaatc

SEQ ID NO: 647064 - DNA, 15 bp, Homo sapiens
gttttagcagaatca

SEQ ID NO: 647065 - DNA, 15 bp, Homo sapiens
ttttagcagaatcag

SEQ ID NO: 647066 - DNA, 15 bp, Homo sapiens
tttagcagaatcagg

SEQ ID NO: 647067 - DNA, 15 bp, Homo sapiens
ttagcagaatcaggc

SEQ ID NO: 647068 - DNA, 15 bp, Homo sapiens
tagcagaatcaggca

SEQ ID NO: 647069 - DNA, 15 bp, Homo sapiens
tgctatgaacgcaac

SEQ ID NO: 647070 - DNA, 15 bp, Homo sapiens
gctatgaacgcaaca

SEQ ID NO: 647071 - DNA, 15 bp, Homo sapiens
ctatgaacgcaacaa

SEQ ID NO: 647072 - DNA, 15 bp, Homo sapiens
tatgaacgcaacaaa

SEQ ID NO: 647073 - DNA, 15 bp, Homo sapiens
atgaacgcaacaaag

SEQ ID NO: 647074 - DNA, 15 bp, Homo sapiens
tgaacgcaacaaaga

SEQ ID NO: 647075 - DNA, 15 bp, Homo sapiens
gaacgcaacaaagaa

SEQ ID NO: 647076 - DNA, 15 bp, Homo sapiens
aacgcaacaaagaag

SEQ ID NO: 647077 - DNA, 15 bp, Homo sapiens
acgcaacaaagaagg

SEQ ID NO: 647078 - DNA, 15 bp, Homo sapiens
cgcaacaaagaaggg

SEQ ID NO: 647079 - DNA, 15 bp, Homo sapiens
gcaacaaagaaggga

SEQ ID NO: 647080 - DNA, 15 bp, Homo sapiens
caacaaagaagggag

SEQ ID NO: 647081 - DNA, 15 bp, Homo sapiens
aacaaagaagggagg

SEQ ID NO: 647082 - DNA, 15 bp, Homo sapiens
acaaagaagggaggg

SEQ ID NO: 647083 - DNA, 15 bp, Homo sapiens
caaagaagggagggg

SEQ ID NO: 647084 - DNA, 15 bp, Homo sapiens
aaagaagggaggggt

SEQ ID NO: 647085 - DNA, 15 bp, Homo sapiens
aagaagggaggggtg

SEQ ID NO: 647086 - DNA, 15 bp, Homo sapiens
agaagggaggggtgg

SEQ ID NO: 647087 - DNA, 15 bp, Homo sapiens
gaagggaggggtgga

SEQ ID NO: 647088 - DNA, 15 bp, Homo sapiens
aagggaggggtggag

SEQ ID NO: 647089 - DNA, 15 bp, Homo sapiens
agggaggggtggaga

SEQ ID NO: 647090 - DNA, 15 bp, Homo sapiens
gggaggggtggagaa

SEQ ID NO: 647091 - DNA, 15 bp, Homo sapiens
ggaggggtggagaaa

SEQ ID NO: 647092 - DNA, 15 bp, Homo sapiens
gaggggtggagaaat

SEQ ID NO: 647093 - DNA, 15 bp, Homo sapiens
aggggtggagaaata

SEQ ID NO: 647094 - DNA, 15 bp, Homo sapiens
ggggtggagaaatag

SEQ ID NO: 647095 - DNA, 15 bp, Homo sapiens
gggtggagaaatagg

SEQ ID NO: 647096 - DNA, 15 bp, Homo sapiens
ggtggagaaatagga

SEQ ID NO: 647097 - DNA, 15 bp, Homo sapiens
gtggagaaataggat

SEQ ID NO: 647098 - DNA, 15 bp, Homo sapiens
tggagaaataggatt

SEQ ID NO: 647099 - DNA, 15 bp, Homo sapiens
ggagaaataggattc

SEQ ID NO: 647100 - DNA, 15 bp, Homo sapiens
gagaaataggattcg

SEQ ID NO: 647101 - DNA, 15 bp, Homo sapiens
agaaataggattcgg

SEQ ID NO: 647102 - DNA, 15 bp, Homo sapiens
gaaataggattcggt

SEQ ID NO: 647103 - DNA, 15 bp, Homo sapiens
aaataggattcggta

SEQ ID NO: 647104 - DNA, 15 bp, Homo sapiens
aataggattcggtag

SEQ ID NO: 647105 - DNA, 15 bp, Homo sapiens
ataggattcggtaga

SEQ ID NO: 647106 - DNA, 15 bp, Homo sapiens
taggattcggtagaa

SEQ ID NO: 647107 - DNA, 15 bp, Homo sapiens
aggattcggtagaat

SEQ ID NO: 647108 - DNA, 15 bp, Homo sapiens
ggattcggtagaata

SEQ ID NO: 647109 - DNA, 15 bp, Homo sapiens
gattcggtagaataa

SEQ ID NO: 647110 - DNA, 15 bp, Homo sapiens
attcggtagaataac

SEQ ID NO: 647111 - DNA, 15 bp, Homo sapiens
ttcggtagaataaca

SEQ ID NO: 647112 - DNA, 15 bp, Homo sapiens
tcggtagaataacat

SEQ ID NO: 647113 - DNA, 15 bp, Homo sapiens
cggtagaataacata

SEQ ID NO: 647114 - DNA, 15 bp, Homo sapiens
ggtagaataacatac

SEQ ID NO: 647115 - DNA, 15 bp, Homo sapiens
gtagaataacatact

SEQ ID NO: 647116 - DNA, 15 bp, Homo sapiens
tagaataacatactt

SEQ ID NO: 647117 - DNA, 15 bp, Homo sapiens
agaataacatacttt

SEQ ID NO: 647118 - DNA, 15 bp, Homo sapiens
gaataacatactttc

SEQ ID NO: 647119 - DNA, 15 bp, Homo sapiens
aataacatactttct

SEQ ID NO: 647120 - DNA, 15 bp, Homo sapiens
ataacatactttcta

SEQ ID NO: 647121 - DNA, 15 bp, Homo sapiens
taacatactttctag

SEQ ID NO: 647122 - DNA, 15 bp, Homo sapiens
aacatactttctaga

SEQ ID NO: 647123 - DNA, 15 bp, Homo sapiens
acatactttctagaa

SEQ ID NO: 647124 - DNA, 15 bp, Homo sapiens
catactttctagaac

SEQ ID NO: 647125 - DNA, 15 bp, Homo sapiens
atactttctagaact

SEQ ID NO: 647126 - DNA, 15 bp, Homo sapiens
tactttctagaactg

SEQ ID NO: 647127 - DNA, 15 bp, Homo sapiens
actttctagaactgg

SEQ ID NO: 647128 - DNA, 15 bp, Homo sapiens
ctttctagaactggc

SEQ ID NO: 647129 - DNA, 15 bp, Homo sapiens
tttctagaactggcc

SEQ ID NO: 647130 - DNA, 15 bp, Homo sapiens
ttctagaactggccc

SEQ ID NO: 647131 - DNA, 15 bp, Homo sapiens
tctagaactggccca

SEQ ID NO: 647132 - DNA, 15 bp, Homo sapiens
ctagaactggcccat

SEQ ID NO: 647133 - DNA, 15 bp, Homo sapiens
tagaactggcccatt

SEQ ID NO: 647134 - DNA, 15 bp, Homo sapiens
agaactggcccattc

SEQ ID NO: 647135 - DNA, 15 bp, Homo sapiens
gaactggcccattcc

SEQ ID NO: 647136 - DNA, 15 bp, Homo sapiens
aactggcccattccc

SEQ ID NO: 647137 - DNA, 15 bp, Homo sapiens
actggcccattcccg

SEQ ID NO: 647138 - DNA, 15 bp, Homo sapiens
ctggcccattcccgc

SEQ ID NO: 647139 - DNA, 15 bp, Homo sapiens
tggcccattcccgca

SEQ ID NO: 647140 - DNA, 15 bp, Homo sapiens
ggcccattcccgcag

SEQ ID NO: 647141 - DNA, 15 bp, Homo sapiens
gcccattcccgcagt

SEQ ID NO: 647142 - DNA, 15 bp, Homo sapiens
cccattcccgcagtg

SEQ ID NO: 647143 - DNA, 15 bp, Homo sapiens
ccattcccgcagtgt

SEQ ID NO: 647144 - DNA, 15 bp, Homo sapiens
cattcccgcagtgtg

SEQ ID NO: 647145 - DNA, 15 bp, Homo sapiens
attcccgcagtgtgg

SEQ ID NO: 647146 - DNA, 15 bp, Homo sapiens
ttcccgcagtgtggg

SEQ ID NO: 647147 - DNA, 15 bp, Homo sapiens
tcccgcagtgtgggg

SEQ ID NO: 647148 - DNA, 15 bp, Homo sapiens
cccgcagtgtggggg

SEQ ID NO: 647149 - DNA, 15 bp, Homo sapiens
ccgcagtgtgggggt

SEQ ID NO: 647150 - DNA, 15 bp, Homo sapiens
cgcagtgtgggggta

SEQ ID NO: 647151 - DNA, 15 bp, Homo sapiens
gcagtgtgggggtat

SEQ ID NO: 647152 - DNA, 15 bp, Homo sapiens
cagtgtgggggtatg

SEQ ID NO: 647153 - DNA, 15 bp, Homo sapiens
agtgtgggggtatgc

SEQ ID NO: 647154 - DNA, 15 bp, Homo sapiens
gtgtgggggtatgct

SEQ ID NO: 647155 - DNA, 15 bp, Homo sapiens
tgtgggggtatgctc

SEQ ID NO: 647156 - DNA, 15 bp, Homo sapiens
gtgggggtatgctct

SEQ ID NO: 647157 - DNA, 15 bp, Homo sapiens
tgggggtatgctctg

SEQ ID NO: 647158 - DNA, 15 bp, Homo sapiens
gggggtatgctctgc

SEQ ID NO: 647159 - DNA, 15 bp, Homo sapiens
ggggtatgctctgca

SEQ ID NO: 647160 - DNA, 15 bp, Homo sapiens
gggtatgctctgcaa

SEQ ID NO: 647161 - DNA, 15 bp, Homo sapiens
ggtatgctctgcaag

SEQ ID NO: 647162 - DNA, 15 bp, Homo sapiens
gtatgctctgcaaga

SEQ ID NO: 647163 - DNA, 15 bp, Homo sapiens
tatgctctgcaagat

SEQ ID NO: 647164 - DNA, 15 bp, Homo sapiens
atgctctgcaagatc

SEQ ID NO: 647165 - DNA, 15 bp, Homo sapiens
tgctctgcaagatca

SEQ ID NO: 647166 - DNA, 15 bp, Homo sapiens
gctctgcaagatcaa

SEQ ID NO: 647167 - DNA, 15 bp, Homo sapiens
ctctgcaagatcaat

SEQ ID NO: 647168 - DNA, 15 bp, Homo sapiens
tctgcaagatcaatc

SEQ ID NO: 647169 - DNA, 15 bp, Homo sapiens
ctgcaagatcaatca

SEQ ID NO: 647170 - DNA, 15 bp, Homo sapiens
tgcaagatcaatcac

SEQ ID NO: 647171 - DNA, 15 bp, Homo sapiens
gcaagatcaatcaca

SEQ ID NO: 647172 - DNA, 15 bp, Homo sapiens
caagatcaatcacag

SEQ ID NO: 647173 - DNA, 15 bp, Homo sapiens
aagatcaatcacagg

SEQ ID NO: 647174 - DNA, 15 bp, Homo sapiens
agatcaatcacaggt

SEQ ID NO: 647175 - DNA, 15 bp, Homo sapiens
gatcaatcacaggtt

SEQ ID NO: 647176 - DNA, 15 bp, Homo sapiens
atcaatcacaggttt

SEQ ID NO: 647177 - DNA, 15 bp, Homo sapiens
tcaatcacaggtttg

SEQ ID NO: 647178 - DNA, 15 bp, Homo sapiens
caatcacaggtttgt

SEQ ID NO: 647179 - DNA, 15 bp, Homo sapiens
aatcacaggtttgtt

SEQ ID NO: 647180 - DNA, 15 bp, Homo sapiens
atcacaggtttgttc

SEQ ID NO: 647181 - DNA, 15 bp, Homo sapiens
tcacaggtttgttct

SEQ ID NO: 647182 - DNA, 15 bp, Homo sapiens
cacaggtttgttctt

SEQ ID NO: 647183 - DNA, 15 bp, Homo sapiens
acaggtttgttcttt

SEQ ID NO: 647184 - DNA, 15 bp, Homo sapiens
caggtttgttctttt

SEQ ID NO: 647185 - DNA, 15 bp, Homo sapiens
aggtttgttcttttg

SEQ ID NO: 647186 - DNA, 15 bp, Homo sapiens
ggtttgttcttttga

SEQ ID NO: 647187 - DNA, 15 bp, Homo sapiens
gtttgttcttttgaa

SEQ ID NO: 647188 - DNA, 15 bp, Homo sapiens
tttgttcttttgaaa

SEQ ID NO: 647189 - DNA, 15 bp, Homo sapiens
ttgttcttttgaaaa

SEQ ID NO: 647190 - DNA, 15 bp, Homo sapiens
tgttcttttgaaaaa

SEQ ID NO: 647191 - DNA, 15 bp, Homo sapiens
gttcttttgaaaaat

SEQ ID NO: 647192 - DNA, 15 bp, Homo sapiens
ttcttttgaaaaatg

SEQ ID NO: 647193 - DNA, 15 bp, Homo sapiens
tcttttgaaaaatgc

SEQ ID NO: 647194 - DNA, 15 bp, Homo sapiens
cttttgaaaaatgcc

SEQ ID NO: 647195 - DNA, 15 bp, Homo sapiens
ttttgaaaaatgcca

SEQ ID NO: 647196 - DNA, 15 bp, Homo sapiens
tttgaaaaatgccac

SEQ ID NO: 647197 - DNA, 15 bp, Homo sapiens
ttgaaaaatgccacg

SEQ ID NO: 647198 - DNA, 15 bp, Homo sapiens
tgaaaaatgccacga

SEQ ID NO: 647199 - DNA, 15 bp, Homo sapiens
gaaaaatgccacgag

SEQ ID NO: 647200 - DNA, 15 bp, Homo sapiens
aaaaatgccacgagg

SEQ ID NO: 647201 - DNA, 15 bp, Homo sapiens
aaaatgccacgaggt

SEQ ID NO: 647202 - DNA, 15 bp, Homo sapiens
aaatgccacgaggtc

SEQ ID NO: 647203 - DNA, 15 bp, Homo sapiens
aatgccacgaggtcc

SEQ ID NO: 647204 - DNA, 15 bp, Homo sapiens
atgccacgaggtcca

SEQ ID NO: 647205 - DNA, 15 bp, Homo sapiens
tgccacgaggtccag

SEQ ID NO: 647206 - DNA, 15 bp, Homo sapiens
gccacgaggtccagg

SEQ ID NO: 647207 - DNA, 15 bp, Homo sapiens
ccacgaggtccaggt

SEQ ID NO: 647208 - DNA, 15 bp, Homo sapiens
cacgaggtccaggtg

SEQ ID NO: 647209 - DNA, 15 bp, Homo sapiens
acgaggtccaggtgg

SEQ ID NO: 647210 - DNA, 15 bp, Homo sapiens
cgaggtccaggtggg

SEQ ID NO: 647211 - DNA, 15 bp, Homo sapiens
gaggtccaggtgggt

SEQ ID NO: 647212 - DNA, 15 bp, Homo sapiens
aggtccaggtgggtt

SEQ ID NO: 647213 - DNA, 15 bp, Homo sapiens
ggtccaggtgggttg

SEQ ID NO: 647214 - DNA, 15 bp, Homo sapiens
gtccaggtgggttgg

SEQ ID NO: 647215 - DNA, 15 bp, Homo sapiens
tccaggtgggttgga

SEQ ID NO: 647216 - DNA, 15 bp, Homo sapiens
ccaggtgggttggat

SEQ ID NO: 647217 - DNA, 15 bp, Homo sapiens
caggtgggttggatt

SEQ ID NO: 647218 - DNA, 15 bp, Homo sapiens
aggtgggttggattt

SEQ ID NO: 647219 - DNA, 15 bp, Homo sapiens
ggtgggttggatttg

SEQ ID NO: 647220 - DNA, 15 bp, Homo sapiens
gtgggttggatttgt

SEQ ID NO: 647221 - DNA, 15 bp, Homo sapiens
tgggttggatttgtt

SEQ ID NO: 647222 - DNA, 15 bp, Homo sapiens
gggttggatttgttg

SEQ ID NO: 647223 - DNA, 15 bp, Homo sapiens
ggttggatttgttga

SEQ ID NO: 647224 - DNA, 15 bp, Homo sapiens
gttggatttgttgag

SEQ ID NO: 647225 - DNA, 15 bp, Homo sapiens
ttggatttgttgagg

SEQ ID NO: 647226 - DNA, 15 bp, Homo sapiens
tggatttgttgaggt

SEQ ID NO: 647227 - DNA, 15 bp, Homo sapiens
ggatttgttgaggtt

SEQ ID NO: 647228 - DNA, 15 bp, Homo sapiens
gatttgttgaggttt

SEQ ID NO: 647229 - DNA, 15 bp, Homo sapiens
atttgttgaggtttc

SEQ ID NO: 647230 - DNA, 15 bp, Homo sapiens
tttgttgaggtttcc

SEQ ID NO: 647231 - DNA, 15 bp, Homo sapiens
ttgttgaggtttcca

SEQ ID NO: 647232 - DNA, 15 bp, Homo sapiens
tgttgaggtttccaa

SEQ ID NO: 647233 - DNA, 15 bp, Homo sapiens
gttgaggtttccaat

SEQ ID NO: 647234 - DNA, 15 bp, Homo sapiens
ttgaggtttccaatg

SEQ ID NO: 647235 - DNA, 15 bp, Homo sapiens
tgaggtttccaatgg

SEQ ID NO: 647236 - DNA, 15 bp, Homo sapiens
gaggtttccaatgga

SEQ ID NO: 647237 - DNA, 15 bp, Homo sapiens
aggtttccaatggaa

SEQ ID NO: 647238 - DNA, 15 bp, Homo sapiens
ggtttccaatggaaa

SEQ ID NO: 647239 - DNA, 15 bp, Homo sapiens
gtttccaatggaaat

SEQ ID NO: 647240 - DNA, 15 bp, Homo sapiens
tttccaatggaaata

SEQ ID NO: 647241 - DNA, 15 bp, Homo sapiens
ttccaatggaaatat

SEQ ID NO: 647242 - DNA, 15 bp, Homo sapiens
tccaatggaaatatt

SEQ ID NO: 647243 - DNA, 15 bp, Homo sapiens
ccaatggaaatattg

SEQ ID NO: 647244 - DNA, 15 bp, Homo sapiens
caatggaaatattga

SEQ ID NO: 647245 - DNA, 15 bp, Homo sapiens
aatggaaatattgaa

SEQ ID NO: 647246 - DNA, 15 bp, Homo sapiens
atggaaatattgaac

SEQ ID NO: 647247 - DNA, 15 bp, Homo sapiens
tggaaatattgaaca

SEQ ID NO: 647248 - DNA, 15 bp, Homo sapiens
ggaaatattgaacag

SEQ ID NO: 647249 - DNA, 15 bp, Homo sapiens
gaaatattgaacagg

SEQ ID NO: 647250 - DNA, 15 bp, Homo sapiens
aaatattgaacagga

SEQ ID NO: 647251 - DNA, 15 bp, Homo sapiens
aatattgaacaggaa

SEQ ID NO: 647252 - DNA, 15 bp, Homo sapiens
atattgaacaggaaa

SEQ ID NO: 647253 - DNA, 15 bp, Homo sapiens
tattgaacaggaaaa

SEQ ID NO: 647254 - DNA, 15 bp, Homo sapiens
attgaacaggaaaac

SEQ ID NO: 647255 - DNA, 15 bp, Homo sapiens
ttgaacaggaaaacc

SEQ ID NO: 647256 - DNA, 15 bp, Homo sapiens
tgaacaggaaaaccc

SEQ ID NO: 647257 - DNA, 15 bp, Homo sapiens
gaacaggaaaacccc

SEQ ID NO: 647258 - DNA, 15 bp, Homo sapiens
aacaggaaaacccca

SEQ ID NO: 647259 - DNA, 15 bp, Homo sapiens
acaggaaaaccccac

SEQ ID NO: 647260 - DNA, 15 bp, Homo sapiens
caggaaaaccccact

SEQ ID NO: 647261 - DNA, 15 bp, Homo sapiens
aggaaaaccccacta

SEQ ID NO: 647262 - DNA, 15 bp, Homo sapiens
ggaaaaccccactaa

SEQ ID NO: 647263 - DNA, 15 bp, Homo sapiens
gaaaaccccactaat

SEQ ID NO: 647264 - DNA, 15 bp, Homo sapiens
aaaaccccactaatt

SEQ ID NO: 647265 - DNA, 15 bp, Homo sapiens
aaaccccactaattt

SEQ ID NO: 647266 - DNA, 15 bp, Homo sapiens
aaccccactaatttt

SEQ ID NO: 647267 - DNA, 15 bp, Homo sapiens
accccactaatttta

SEQ ID NO: 647268 - DNA, 15 bp, Homo sapiens
ccccactaattttac

SEQ ID NO: 647269 - DNA, 15 bp, Homo sapiens
cccactaattttaca

SEQ ID NO: 647270 - DNA, 15 bp, Homo sapiens
ccactaattttacaa

SEQ ID NO: 647271 - DNA, 15 bp, Homo sapiens
cactaattttacaac

SEQ ID NO: 647272 - DNA, 15 bp, Homo sapiens
actaattttacaacc

SEQ ID NO: 647273 - DNA, 15 bp, Homo sapiens
ctaattttacaacca

SEQ ID NO: 647274 - DNA, 15 bp, Homo sapiens
taattttacaaccaa

SEQ ID NO: 647275 - DNA, 15 bp, Homo sapiens
aattttacaaccaaa

SEQ ID NO: 647276 - DNA, 15 bp, Homo sapiens
attttacaaccaaaa

SEQ ID NO: 647277 - DNA, 15 bp, Homo sapiens
ttttacaaccaaaaa

SEQ ID NO: 647278 - DNA, 15 bp, Homo sapiens
tttacaaccaaaaaa

SEQ ID NO: 647279 - DNA, 15 bp, Homo sapiens
ttacaaccaaaaaaa

SEQ ID NO: 647280 - DNA, 15 bp, Homo sapiens
tacaaccaaaaaaaa

SEQ ID NO: 647281 - DNA, 15 bp, Homo sapiens
acaaccaaaaaaaaa

SEQ ID NO: 647282 - DNA, 15 bp, Homo sapiens
caaccaaaaaaaaaa

SEQ ID NO: 647283 - DNA, 15 bp, Homo sapiens
aaccaaaaaaaaaaa

SEQ ID NO: 647284 - DNA, 15 bp, Homo sapiens
accaaaaaaaaaaaa

SEQ ID NO: 647285 - DNA, 15 bp, Homo sapiens
ccaaaaaaaaaaaaa

SEQ ID NO: 647286 - DNA, 15 bp, Homo sapiens
aaaaaaaaaaaaaat

SEQ ID NO: 647287 - DNA, 15 bp, Homo sapiens
aaaaaaaaaaaaatg

SEQ ID NO: 647288 - DNA, 15 bp, Homo sapiens
aaaaaaaaaaaatga

SEQ ID NO: 647289 - DNA, 15 bp, Homo sapiens
aaaaaaaaaaatgag

SEQ ID NO: 647290 - DNA, 15 bp, Homo sapiens
aaaaaaaaaatgaga

SEQ ID NO: 647291 - DNA, 15 bp, Homo sapiens
aaaaaaaaatgagaa

SEQ ID NO: 647292 - DNA, 15 bp, Homo sapiens
aaaaaaaatgagaac

SEQ ID NO: 647293 - DNA, 15 bp, Homo sapiens
aaaaaaatgagaact

SEQ ID NO: 647294 - DNA, 15 bp, Homo sapiens
aaaaaatgagaactg

SEQ ID NO: 647295 - DNA, 15 bp, Homo sapiens
aaaaatgagaactgg

SEQ ID NO: 647296 - DNA, 15 bp, Homo sapiens
aaaatgagaactgga

SEQ ID NO: 647297 - DNA, 15 bp, Homo sapiens
aaatgagaactggat

SEQ ID NO: 647298 - DNA, 15 bp, Homo sapiens
aatgagaactggatg

SEQ ID NO: 647299 - DNA, 15 bp, Homo sapiens
atgagaactggatga

SEQ ID NO: 647300 - DNA, 15 bp, Homo sapiens
tgagaactggatgat

SEQ ID NO: 647301 - DNA, 15 bp, Homo sapiens
gagaactggatgata

SEQ ID NO: 647302 - DNA, 15 bp, Homo sapiens
agaactggatgataa

SEQ ID NO: 647303 - DNA, 15 bp, Homo sapiens
gaactggatgataac

SEQ ID NO: 647304 - DNA, 15 bp, Homo sapiens
aactggatgataaca

SEQ ID NO: 647305 - DNA, 15 bp, Homo sapiens
actggatgataacat

SEQ ID NO: 647306 - DNA, 15 bp, Homo sapiens
ctggatgataacatg

SEQ ID NO: 647307 - DNA, 15 bp, Homo sapiens
tggatgataacatgc

SEQ ID NO: 647308 - DNA, 15 bp, Homo sapiens
ggatgataacatgct

SEQ ID NO: 647309 - DNA, 15 bp, Homo sapiens
gatgataacatgctt

SEQ ID NO: 647310 - DNA, 15 bp, Homo sapiens
atgataacatgcttc

SEQ ID NO: 647311 - DNA, 15 bp, Homo sapiens
tgataacatgcttct

SEQ ID NO: 647312 - DNA, 15 bp, Homo sapiens
gataacatgcttctt

SEQ ID NO: 647313 - DNA, 15 bp, Homo sapiens
ataacatgcttcttc

SEQ ID NO: 647314 - DNA, 15 bp, Homo sapiens
taacatgcttcttcc

SEQ ID NO: 647315 - DNA, 15 bp, Homo sapiens
aacatgcttcttcca

SEQ ID NO: 647316 - DNA, 15 bp, Homo sapiens
acatgcttcttccag

SEQ ID NO: 647317 - DNA, 15 bp, Homo sapiens
catgcttcttccagt

SEQ ID NO: 647318 - DNA, 15 bp, Homo sapiens
atgcttcttccagtc

SEQ ID NO: 647319 - DNA, 15 bp, Homo sapiens
tgcttcttccagtcc

SEQ ID NO: 647320 - DNA, 15 bp, Homo sapiens
gcttcttccagtccc

SEQ ID NO: 647321 - DNA, 15 bp, Homo sapiens
cttcttccagtccca

SEQ ID NO: 647322 - DNA, 15 bp, Homo sapiens
ttcttccagtcccag

SEQ ID NO: 647323 - DNA, 15 bp, Homo sapiens
tcttccagtcccagt

SEQ ID NO: 647324 - DNA, 15 bp, Homo sapiens
cttccagtcccagtg

SEQ ID NO: 647325 - DNA, 15 bp, Homo sapiens
ttccagtcccagtgt

SEQ ID NO: 647326 - DNA, 15 bp, Homo sapiens
tccagtcccagtgtt

SEQ ID NO: 647327 - DNA, 15 bp, Homo sapiens
ccagtcccagtgttt

SEQ ID NO: 647328 - DNA, 15 bp, Homo sapiens
cagtcccagtgtttt

SEQ ID NO: 647329 - DNA, 15 bp, Homo sapiens
agtcccagtgttttg

SEQ ID NO: 647330 - DNA, 15 bp, Homo sapiens
gtcccagtgttttgg

SEQ ID NO: 647331 - DNA, 15 bp, Homo sapiens
tcccagtgttttggg

SEQ ID NO: 647332 - DNA, 15 bp, Homo sapiens
cccagtgttttgggc

SEQ ID NO: 647333 - DNA, 15 bp, Homo sapiens
ccagtgttttgggct

SEQ ID NO: 647334 - DNA, 15 bp, Homo sapiens
cagtgttttgggcta

SEQ ID NO: 647335 - DNA, 15 bp, Homo sapiens
agtgttttgggctat

SEQ ID NO: 647336 - DNA, 15 bp, Homo sapiens
gtgttttgggctatg

SEQ ID NO: 647337 - DNA, 15 bp, Homo sapiens
tgttttgggctatgt

SEQ ID NO: 647338 - DNA, 15 bp, Homo sapiens
gttttgggctatgta

SEQ ID NO: 647339 - DNA, 15 bp, Homo sapiens
ttttgggctatgtag

SEQ ID NO: 647340 - DNA, 15 bp, Homo sapiens
tttgggctatgtagg

SEQ ID NO: 647341 - DNA, 15 bp, Homo sapiens
ttgggctatgtaggg

SEQ ID NO: 647342 - DNA, 15 bp, Homo sapiens
tgggctatgtagggg

SEQ ID NO: 647343 - DNA, 15 bp, Homo sapiens
gggctatgtaggggg

SEQ ID NO: 647344 - DNA, 15 bp, Homo sapiens
ggctatgtagggggt

SEQ ID NO: 647345 - DNA, 15 bp, Homo sapiens
gctatgtagggggtg

SEQ ID NO: 647346 - DNA, 15 bp, Homo sapiens
ctatgtagggggtgg

SEQ ID NO: 647347 - DNA, 15 bp, Homo sapiens
tatgtagggggtgga

SEQ ID NO: 647348 - DNA, 15 bp, Homo sapiens
atgtagggggtggaa

SEQ ID NO: 647349 - DNA, 15 bp, Homo sapiens
tgtagggggtggaag

SEQ ID NO: 647350 - DNA, 15 bp, Homo sapiens
gtagggggtggaaga

SEQ ID NO: 647351 - DNA, 15 bp, Homo sapiens
tagggggtggaagat

SEQ ID NO: 647352 - DNA, 15 bp, Homo sapiens
agggggtggaagatt

SEQ ID NO: 647353 - DNA, 15 bp, Homo sapiens
gggggtggaagattt

SEQ ID NO: 647354 - DNA, 15 bp, Homo sapiens
ggggtggaagatttc

SEQ ID NO: 647355 - DNA, 15 bp, Homo sapiens
gggtggaagatttcc

SEQ ID NO: 647356 - DNA, 15 bp, Homo sapiens
ggtggaagatttcca

SEQ ID NO: 647357 - DNA, 15 bp, Homo sapiens
gtggaagatttccat

SEQ ID NO: 647358 - DNA, 15 bp, Homo sapiens
tggaagatttccatg

SEQ ID NO: 647359 - DNA, 15 bp, Homo sapiens
ggaagatttccatgc

SEQ ID NO: 647360 - DNA, 15 bp, Homo sapiens
gaagatttccatgcg

SEQ ID NO: 647361 - DNA, 15 bp, Homo sapiens
aagatttccatgcgg

SEQ ID NO: 647362 - DNA, 15 bp, Homo sapiens
agatttccatgcgga

SEQ ID NO: 647363 - DNA, 15 bp, Homo sapiens
gatttccatgcggag

SEQ ID NO: 647364 - DNA, 15 bp, Homo sapiens
atttccatgcggaga

SEQ ID NO: 647365 - DNA, 15 bp, Homo sapiens
tttccatgcggagat

SEQ ID NO: 647366 - DNA, 15 bp, Homo sapiens
ttccatgcggagatc

SEQ ID NO: 647367 - DNA, 15 bp, Homo sapiens
tccatgcggagatct

SEQ ID NO: 647368 - DNA, 15 bp, Homo sapiens
ccatgcggagatctt

SEQ ID NO: 647369 - DNA, 15 bp, Homo sapiens
catgcggagatcttg

SEQ ID NO: 647370 - DNA, 15 bp, Homo sapiens
atgcggagatcttgt

SEQ ID NO: 647371 - DNA, 15 bp, Homo sapiens
tgcggagatcttgtt

SEQ ID NO: 647372 - DNA, 15 bp, Homo sapiens
gcggagatcttgttg

SEQ ID NO: 647373 - DNA, 15 bp, Homo sapiens
cggagatcttgttga

SEQ ID NO: 647374 - DNA, 15 bp, Homo sapiens
ggagatcttgttgag

SEQ ID NO: 647375 - DNA, 15 bp, Homo sapiens
gagatcttgttgaga

SEQ ID NO: 647376 - DNA, 15 bp, Homo sapiens
agatcttgttgagaa

SEQ ID NO: 647377 - DNA, 15 bp, Homo sapiens
gatcttgttgagaaa

SEQ ID NO: 647378 - DNA, 15 bp, Homo sapiens
atcttgttgagaaaa

SEQ ID NO: 647379 - DNA, 15 bp, Homo sapiens
tcttgttgagaaaaa

SEQ ID NO: 647380 - DNA, 15 bp, Homo sapiens
cttgttgagaaaaat

SEQ ID NO: 647381 - DNA, 15 bp, Homo sapiens
ttgttgagaaaaatg

SEQ ID NO: 647382 - DNA, 15 bp, Homo sapiens
tgttgagaaaaatgc

SEQ ID NO: 647383 - DNA, 15 bp, Homo sapiens
gttgagaaaaatgca

SEQ ID NO: 647384 - DNA, 15 bp, Homo sapiens
ttgagaaaaatgcag

SEQ ID NO: 647385 - DNA, 15 bp, Homo sapiens
tgagaaaaatgcagt

SEQ ID NO: 647386 - DNA, 15 bp, Homo sapiens
gagaaaaatgcagta

SEQ ID NO: 647387 - DNA, 15 bp, Homo sapiens
agaaaaatgcagtaa

SEQ ID NO: 647388 - DNA, 15 bp, Homo sapiens
gaaaaatgcagtaaa

SEQ ID NO: 647389 - DNA, 15 bp, Homo sapiens
aaaaatgcagtaaat

SEQ ID NO: 647390 - DNA, 15 bp, Homo sapiens
aaaatgcagtaaatg

SEQ ID NO: 647391 - DNA, 15 bp, Homo sapiens
aaatgcagtaaatgt

SEQ ID NO: 647392 - DNA, 15 bp, Homo sapiens
aatgcagtaaatgtt

SEQ ID NO: 647393 - DNA, 15 bp, Homo sapiens
atgcagtaaatgttc

SEQ ID NO: 647394 - DNA, 15 bp, Homo sapiens
tgcagtaaatgttca

SEQ ID NO: 647395 - DNA, 15 bp, Homo sapiens
gcagtaaatgttcag

SEQ ID NO: 647396 - DNA, 15 bp, Homo sapiens
cagtaaatgttcagt

SEQ ID NO: 647397 - DNA, 15 bp, Homo sapiens
agtaaatgttcagtt

SEQ ID NO: 647398 - DNA, 15 bp, Homo sapiens
gtaaatgttcagttg

SEQ ID NO: 647399 - DNA, 15 bp, Homo sapiens
taaatgttcagttga

SEQ ID NO: 647400 - DNA, 15 bp, Homo sapiens
aaatgttcagttgag

SEQ ID NO: 647401 - DNA, 15 bp, Homo sapiens
aatgttcagttgagc

SEQ ID NO: 647402 - DNA, 15 bp, Homo sapiens
atgttcagttgagct

SEQ ID NO: 647403 - DNA, 15 bp, Homo sapiens
tgttcagttgagctt

SEQ ID NO: 647404 - DNA, 15 bp, Homo sapiens
gttcagttgagcttt

SEQ ID NO: 647405 - DNA, 15 bp, Homo sapiens
ttcagttgagctttt

SEQ ID NO: 647406 - DNA, 15 bp, Homo sapiens
tcagttgagctttta

SEQ ID NO: 647407 - DNA, 15 bp, Homo sapiens
cagttgagcttttac

SEQ ID NO: 647408 - DNA, 15 bp, Homo sapiens
agttgagcttttacc

SEQ ID NO: 647409 - DNA, 15 bp, Homo sapiens
gttgagcttttacct

SEQ ID NO: 647410 - DNA, 15 bp, Homo sapiens
ttgagcttttacctc

SEQ ID NO: 647411 - DNA, 15 bp, Homo sapiens
tgagcttttacctcc

SEQ ID NO: 647412 - DNA, 15 bp, Homo sapiens
gagcttttacctcct

SEQ ID NO: 647413 - DNA, 15 bp, Homo sapiens
agcttttacctcctc

SEQ ID NO: 647414 - DNA, 15 bp, Homo sapiens
gcttttacctcctct

SEQ ID NO: 647415 - DNA, 15 bp, Homo sapiens
cttttacctcctctt

SEQ ID NO: 647416 - DNA, 15 bp, Homo sapiens
ttttacctcctcttc

SEQ ID NO: 647417 - DNA, 15 bp, Homo sapiens
tttacctcctcttct

SEQ ID NO: 647418 - DNA, 15 bp, Homo sapiens
ttacctcctcttcta

SEQ ID NO: 647419 - DNA, 15 bp, Homo sapiens
tacctcctcttctat

SEQ ID NO: 647420 - DNA, 15 bp, Homo sapiens
acctcctcttctatt

SEQ ID NO: 647421 - DNA, 15 bp, Homo sapiens
cctcctcttctattt

SEQ ID NO: 647422 - DNA, 15 bp, Homo sapiens
ctcctcttctatttt

SEQ ID NO: 647423 - DNA, 15 bp, Homo sapiens
tcctcttctatttta

SEQ ID NO: 647424 - DNA, 15 bp, Homo sapiens
cctcttctattttat

SEQ ID NO: 647425 - DNA, 15 bp, Homo sapiens
ctcttctattttatg

SEQ ID NO: 647426 - DNA, 15 bp, Homo sapiens
tcttctattttatgt

SEQ ID NO: 647427 - DNA, 15 bp, Homo sapiens
cttctattttatgtc

SEQ ID NO: 647428 - DNA, 15 bp, Homo sapiens
ttctattttatgtcc

SEQ ID NO: 647429 - DNA, 15 bp, Homo sapiens
tctattttatgtcca

SEQ ID NO: 647430 - DNA, 15 bp, Homo sapiens
ctattttatgtccat

SEQ ID NO: 647431 - DNA, 15 bp, Homo sapiens
tattttatgtccatt

SEQ ID NO: 647432 - DNA, 15 bp, Homo sapiens
attttatgtccatta

SEQ ID NO: 647433 - DNA, 15 bp, Homo sapiens
ttttatgtccattat

SEQ ID NO: 647434 - DNA, 15 bp, Homo sapiens
tttatgtccattatt

SEQ ID NO: 647435 - DNA, 15 bp, Homo sapiens
ttatgtccattattt

SEQ ID NO: 647436 - DNA, 15 bp, Homo sapiens
tatgtccattattta

SEQ ID NO: 647437 - DNA, 15 bp, Homo sapiens
atgtccattatttat

SEQ ID NO: 647438 - DNA, 15 bp, Homo sapiens
tgtccattatttatg

SEQ ID NO: 647439 - DNA, 15 bp, Homo sapiens
gtccattatttatga

SEQ ID NO: 647440 - DNA, 15 bp, Homo sapiens
tccattatttatgat

SEQ ID NO: 647441 - DNA, 15 bp, Homo sapiens
ccattatttatgatc

SEQ ID NO: 647442 - DNA, 15 bp, Homo sapiens
cattatttatgatca

SEQ ID NO: 647443 - DNA, 15 bp, Homo sapiens
attatttatgatcat

SEQ ID NO: 647444 - DNA, 15 bp, Homo sapiens
ttatttatgatcatt

SEQ ID NO: 647445 - DNA, 15 bp, Homo sapiens
tatttatgatcattt

SEQ ID NO: 647446 - DNA, 15 bp, Homo sapiens
atttatgatcatttg

SEQ ID NO: 647447 - DNA, 15 bp, Homo sapiens
tttatgatcatttgc

SEQ ID NO: 647448 - DNA, 15 bp, Homo sapiens
ttatgatcatttgca

SEQ ID NO: 647449 - DNA, 15 bp, Homo sapiens
tatgatcatttgcaa

SEQ ID NO: 647450 - DNA, 15 bp, Homo sapiens
atgatcatttgcaaa

SEQ ID NO: 647451 - DNA, 15 bp, Homo sapiens
tgatcatttgcaaat

SEQ ID NO: 647452 - DNA, 15 bp, Homo sapiens
gatcatttgcaaata

SEQ ID NO: 647453 - DNA, 15 bp, Homo sapiens
atcatttgcaaatag

SEQ ID NO: 647454 - DNA, 15 bp, Homo sapiens
tcatttgcaaataga

SEQ ID NO: 647455 - DNA, 15 bp, Homo sapiens
catttgcaaatagag

SEQ ID NO: 647456 - DNA, 15 bp, Homo sapiens
atttgcaaatagagg

SEQ ID NO: 647457 - DNA, 15 bp, Homo sapiens
tttgcaaatagaggg

SEQ ID NO: 647458 - DNA, 15 bp, Homo sapiens
ttgcaaatagagggc

SEQ ID NO: 647459 - DNA, 15 bp, Homo sapiens
tgcaaatagagggcg

SEQ ID NO: 647460 - DNA, 15 bp, Homo sapiens
gcaaatagagggcgc

SEQ ID NO: 647461 - DNA, 15 bp, Homo sapiens
caaatagagggcgct

SEQ ID NO: 647462 - DNA, 15 bp, Homo sapiens
aaatagagggcgctt

SEQ ID NO: 647463 - DNA, 15 bp, Homo sapiens
aatagagggcgcttt

SEQ ID NO: 647464 - DNA, 15 bp, Homo sapiens
atagagggcgctttt

SEQ ID NO: 647465 - DNA, 15 bp, Homo sapiens
tagagggcgcttttc

SEQ ID NO: 647466 - DNA, 15 bp, Homo sapiens
agagggcgcttttca

SEQ ID NO: 647467 - DNA, 15 bp, Homo sapiens
gagggcgcttttcat

SEQ ID NO: 647468 - DNA, 15 bp, Homo sapiens
agggcgcttttcatc

SEQ ID NO: 647469 - DNA, 15 bp, Homo sapiens
gggcgcttttcatct

SEQ ID NO: 647470 - DNA, 15 bp, Homo sapiens
ggcgcttttcatctt

SEQ ID NO: 647471 - DNA, 15 bp, Homo sapiens
gcgcttttcatcttc

SEQ ID NO: 647472 - DNA, 15 bp, Homo sapiens
cgcttttcatcttca

SEQ ID NO: 647473 - DNA, 15 bp, Homo sapiens
gcttttcatcttcaa

SEQ ID NO: 647474 - DNA, 15 bp, Homo sapiens
cttttcatcttcaac

SEQ ID NO: 647475 - DNA, 15 bp, Homo sapiens
ttttcatcttcaact

SEQ ID NO: 647476 - DNA, 15 bp, Homo sapiens
tttcatcttcaactg

SEQ ID NO: 647477 - DNA, 15 bp, Homo sapiens
ttcatcttcaactgc

SEQ ID NO: 647478 - DNA, 15 bp, Homo sapiens
tcatcttcaactgct

SEQ ID NO: 647479 - DNA, 15 bp, Homo sapiens
catcttcaactgctt

SEQ ID NO: 647480 - DNA, 15 bp, Homo sapiens
atcttcaactgcttt

SEQ ID NO: 647481 - DNA, 15 bp, Homo sapiens
tcttcaactgcttta

SEQ ID NO: 647482 - DNA, 15 bp, Homo sapiens
cttcaactgctttac

SEQ ID NO: 647483 - DNA, 15 bp, Homo sapiens
ttcaactgctttaca

SEQ ID NO: 647484 - DNA, 15 bp, Homo sapiens
tcaactgctttacaa

SEQ ID NO: 647485 - DNA, 15 bp, Homo sapiens
caactgctttacaac

SEQ ID NO: 647486 - DNA, 15 bp, Homo sapiens
aactgctttacaacc

SEQ ID NO: 647487 - DNA, 15 bp, Homo sapiens
actgctttacaacca

SEQ ID NO: 647488 - DNA, 15 bp, Homo sapiens
ctgctttacaaccat

SEQ ID NO: 647489 - DNA, 15 bp, Homo sapiens
tgctttacaaccatt

SEQ ID NO: 647490 - DNA, 15 bp, Homo sapiens
gctttacaaccatta

SEQ ID NO: 647491 - DNA, 15 bp, Homo sapiens
ctttacaaccattaa

SEQ ID NO: 647492 - DNA, 15 bp, Homo sapiens
tttacaaccattaac

SEQ ID NO: 647493 - DNA, 15 bp, Homo sapiens
ttacaaccattaact

SEQ ID NO: 647494 - DNA, 15 bp, Homo sapiens
tacaaccattaactg

SEQ ID NO: 647495 - DNA, 15 bp, Homo sapiens
acaaccattaactga

SEQ ID NO: 647496 - DNA, 15 bp, Homo sapiens
caaccattaactgaa

SEQ ID NO: 647497 - DNA, 15 bp, Homo sapiens
aaccattaactgaat

SEQ ID NO: 647498 - DNA, 15 bp, Homo sapiens
accattaactgaata

SEQ ID NO: 647499 - DNA, 15 bp, Homo sapiens
ccattaactgaatat

SEQ ID NO: 647500 - DNA, 15 bp, Homo sapiens
cattaactgaatatt

SEQ ID NO: 647501 - DNA, 15 bp, Homo sapiens
attaactgaatattt

SEQ ID NO: 647502 - DNA, 15 bp, Homo sapiens
ttaactgaatattta

SEQ ID NO: 647503 - DNA, 15 bp, Homo sapiens
taactgaatatttat

SEQ ID NO: 647504 - DNA, 15 bp, Homo sapiens
aactgaatatttata

SEQ ID NO: 647505 - DNA, 15 bp, Homo sapiens
actgaatatttatat

SEQ ID NO: 647506 - DNA, 15 bp, Homo sapiens
ctgaatatttatatt

SEQ ID NO: 647507 - DNA, 15 bp, Homo sapiens
tgaatatttatattt

SEQ ID NO: 647508 - DNA, 15 bp, Homo sapiens
gaatatttatatttt

SEQ ID NO: 647509 - DNA, 15 bp, Homo sapiens
aatatttatattttg

SEQ ID NO: 647510 - DNA, 15 bp, Homo sapiens
atatttatattttgt

SEQ ID NO: 647511 - DNA, 15 bp, Homo sapiens
tatttatattttgtt

SEQ ID NO: 647512 - DNA, 15 bp, Homo sapiens
atttatattttgtta

SEQ ID NO: 647513 - DNA, 15 bp, Homo sapiens
tttatattttgttaa

SEQ ID NO: 647514 - DNA, 15 bp, Homo sapiens
ttatattttgttaac

SEQ ID NO: 647515 - DNA, 15 bp, Homo sapiens
tatattttgttaacg

SEQ ID NO: 647516 - DNA, 15 bp, Homo sapiens
atattttgttaacga

SEQ ID NO: 647517 - DNA, 15 bp, Homo sapiens
tattttgttaacgag

SEQ ID NO: 647518 - DNA, 15 bp, Homo sapiens
attttgttaacgaga

SEQ ID NO: 647519 - DNA, 15 bp, Homo sapiens
ttttgttaacgagag

SEQ ID NO: 647520 - DNA, 15 bp, Homo sapiens
tttgttaacgagaga

SEQ ID NO: 647521 - DNA, 15 bp, Homo sapiens
ttgttaacgagagac

SEQ ID NO: 647522 - DNA, 15 bp, Homo sapiens
tgttaacgagagaca

SEQ ID NO: 647523 - DNA, 15 bp, Homo sapiens
gttaacgagagacag

SEQ ID NO: 647524 - DNA, 15 bp, Homo sapiens
ttaacgagagacagg

SEQ ID NO: 647525 - DNA, 15 bp, Homo sapiens
taacgagagacaggg

SEQ ID NO: 647526 - DNA, 15 bp, Homo sapiens
aacgagagacagggg

SEQ ID NO: 647527 - DNA, 15 bp, Homo sapiens
acgagagacaggggt

SEQ ID NO: 647528 - DNA, 15 bp, Homo sapiens
cgagagacaggggtt

SEQ ID NO: 647529 - DNA, 15 bp, Homo sapiens
gagagacaggggttt

SEQ ID NO: 647530 - DNA, 15 bp, Homo sapiens
agagacaggggtttt

SEQ ID NO: 647531 - DNA, 15 bp, Homo sapiens
gagacaggggttttg

SEQ ID NO: 647532 - DNA, 15 bp, Homo sapiens
agacaggggttttgg

SEQ ID NO: 647533 - DNA, 15 bp, Homo sapiens
gacaggggttttggt

SEQ ID NO: 647534 - DNA, 15 bp, Homo sapiens
acaggggttttggtt

SEQ ID NO: 647535 - DNA, 15 bp, Homo sapiens
caggggttttggttt

SEQ ID NO: 647536 - DNA, 15 bp, Homo sapiens
aggggttttggtttt

SEQ ID NO: 647537 - DNA, 15 bp, Homo sapiens
ggggttttggttttt

SEQ ID NO: 647538 - DNA, 15 bp, Homo sapiens
gggttttggtttttt

SEQ ID NO: 647539 - DNA, 15 bp, Homo sapiens
ggttttggttttttt

SEQ ID NO: 647540 - DNA, 15 bp, Homo sapiens
gttttggtttttttt

SEQ ID NO: 647541 - DNA, 15 bp, Homo sapiens
ttttggttttttttt

SEQ ID NO: 647542 - DNA, 15 bp, Homo sapiens
tttggtttttttttt

SEQ ID NO: 647543 - DNA, 15 bp, Homo sapiens
ttggttttttttttt

SEQ ID NO: 647544 - DNA, 15 bp, Homo sapiens
tggtttttttttttt

SEQ ID NO: 647545 - DNA, 15 bp, Homo sapiens
ggttttttttttttt

SEQ ID NO: 647546 - DNA, 15 bp, Homo sapiens
gtttttttttttttt

SEQ ID NO: 647547 - DNA, 15 bp, Homo sapiens
ttttttttttttttc

SEQ ID NO: 647548 - DNA, 15 bp, Homo sapiens
tttttttttttttcc

SEQ ID NO: 647549 - DNA, 15 bp, Homo sapiens
ttttttttttttcct

SEQ ID NO: 647550 - DNA, 15 bp, Homo sapiens
tttttttttttcctc

SEQ ID NO: 647551 - DNA, 15 bp, Homo sapiens
ttttttttttcctca

SEQ ID NO: 647552 - DNA, 15 bp, Homo sapiens
tttttttttcctcag

SEQ ID NO: 647553 - DNA, 15 bp, Homo sapiens
ttttttttcctcagt

SEQ ID NO: 647554 - DNA, 15 bp, Homo sapiens
tttttttcctcagtt

SEQ ID NO: 647555 - DNA, 15 bp, Homo sapiens
ttttttcctcagttg

SEQ ID NO: 647556 - DNA, 15 bp, Homo sapiens
tttttcctcagttgc

SEQ ID NO: 647557 - DNA, 15 bp, Homo sapiens
ttttcctcagttgct

SEQ ID NO: 647558 - DNA, 15 bp, Homo sapiens
tttcctcagttgctg

SEQ ID NO: 647559 - DNA, 15 bp, Homo sapiens
ttcctcagttgctga

SEQ ID NO: 647560 - DNA, 15 bp, Homo sapiens
tcctcagttgctgag

SEQ ID NO: 647561 - DNA, 15 bp, Homo sapiens
cctcagttgctgagg

SEQ ID NO: 647562 - DNA, 15 bp, Homo sapiens
ctcagttgctgaggt

SEQ ID NO: 647563 - DNA, 15 bp, Homo sapiens
tcagttgctgaggtg

SEQ ID NO: 647564 - DNA, 15 bp, Homo sapiens
cagttgctgaggtga

SEQ ID NO: 647565 - DNA, 15 bp, Homo sapiens
agttgctgaggtgaa

SEQ ID NO: 647566 - DNA, 15 bp, Homo sapiens
gttgctgaggtgaag

SEQ ID NO: 647567 - DNA, 15 bp, Homo sapiens
ttgctgaggtgaagg

SEQ ID NO: 647568 - DNA, 15 bp, Homo sapiens
tgctgaggtgaaggt

SEQ ID NO: 647569 - DNA, 15 bp, Homo sapiens
gctgaggtgaaggtc

SEQ ID NO: 647570 - DNA, 15 bp, Homo sapiens
ctgaggtgaaggtct

SEQ ID NO: 647571 - DNA, 15 bp, Homo sapiens
tgaggtgaaggtctg

SEQ ID NO: 647572 - DNA, 15 bp, Homo sapiens
gaggtgaaggtctga

SEQ ID NO: 647573 - DNA, 15 bp, Homo sapiens
aggtgaaggtctgac

SEQ ID NO: 647574 - DNA, 15 bp, Homo sapiens
ggtgaaggtctgact

SEQ ID NO: 647575 - DNA, 15 bp, Homo sapiens
gtgaaggtctgacta

SEQ ID NO: 647576 - DNA, 15 bp, Homo sapiens
tgaaggtctgactac

SEQ ID NO: 647577 - DNA, 15 bp, Homo sapiens
gaaggtctgactaca

SEQ ID NO: 647578 - DNA, 15 bp, Homo sapiens
aaggtctgactacaa

SEQ ID NO: 647579 - DNA, 15 bp, Homo sapiens
aggtctgactacaaa

SEQ ID NO: 647580 - DNA, 15 bp, Homo sapiens
ggtctgactacaaaa

SEQ ID NO: 647581 - DNA, 15 bp, Homo sapiens
gtctgactacaaaaa

SEQ ID NO: 647582 - DNA, 15 bp, Homo sapiens
tctgactacaaaaaa

SEQ ID NO: 647583 - DNA, 15 bp, Homo sapiens
ctgactacaaaaaat

SEQ ID NO: 647584 - DNA, 15 bp, Homo sapiens
tgactacaaaaaatg

SEQ ID NO: 647585 - DNA, 15 bp, Homo sapiens
gactacaaaaaatgg

SEQ ID NO: 647586 - DNA, 15 bp, Homo sapiens
actacaaaaaatgga

SEQ ID NO: 647587 - DNA, 15 bp, Homo sapiens
ctacaaaaaatggaa

SEQ ID NO: 647588 - DNA, 15 bp, Homo sapiens
tacaaaaaatggaaa

SEQ ID NO: 647589 - DNA, 15 bp, Homo sapiens
acaaaaaatggaaat

SEQ ID NO: 647590 - DNA, 15 bp, Homo sapiens
caaaaaatggaaatc

SEQ ID NO: 647591 - DNA, 15 bp, Homo sapiens
aaaaaatggaaatca

SEQ ID NO: 647592 - DNA, 15 bp, Homo sapiens
aaaaatggaaatcat

SEQ ID NO: 647593 - DNA, 15 bp, Homo sapiens
aaaatggaaatcatc

SEQ ID NO: 647594 - DNA, 15 bp, Homo sapiens
aaatggaaatcatca

SEQ ID NO: 647595 - DNA, 15 bp, Homo sapiens
aatggaaatcatcat

SEQ ID NO: 647596 - DNA, 15 bp, Homo sapiens
atggaaatcatcatt

SEQ ID NO: 647597 - DNA, 15 bp, Homo sapiens
tggaaatcatcatta

SEQ ID NO: 647598 - DNA, 15 bp, Homo sapiens
ggaaatcatcattag

SEQ ID NO: 647599 - DNA, 15 bp, Homo sapiens
gaaatcatcattaga

SEQ ID NO: 647600 - DNA, 15 bp, Homo sapiens
aaatcatcattagaa

SEQ ID NO: 647601 - DNA, 15 bp, Homo sapiens
aatcatcattagaat

SEQ ID NO: 647602 - DNA, 15 bp, Homo sapiens
atcatcattagaatg

SEQ ID NO: 647603 - DNA, 15 bp, Homo sapiens
tcatcattagaatga

SEQ ID NO: 647604 - DNA, 15 bp, Homo sapiens
catcattagaatgat

SEQ ID NO: 647605 - DNA, 15 bp, Homo sapiens
atcattagaatgatg

SEQ ID NO: 647606 - DNA, 15 bp, Homo sapiens
tcattagaatgatgg

SEQ ID NO: 647607 - DNA, 15 bp, Homo sapiens
cattagaatgatggg

SEQ ID NO: 647608 - DNA, 15 bp, Homo sapiens
attagaatgatgggg

SEQ ID NO: 647609 - DNA, 15 bp, Homo sapiens
ttagaatgatgggga

SEQ ID NO: 647610 - DNA, 15 bp, Homo sapiens
tagaatgatggggaa

SEQ ID NO: 647611 - DNA, 15 bp, Homo sapiens
agaatgatggggaaa

SEQ ID NO: 647612 - DNA, 15 bp, Homo sapiens
gaatgatggggaaaa

SEQ ID NO: 647613 - DNA, 15 bp, Homo sapiens
aatgatggggaaaat

SEQ ID NO: 647614 - DNA, 15 bp, Homo sapiens
atgatggggaaaatt

SEQ ID NO: 647615 - DNA, 15 bp, Homo sapiens
tgatggggaaaattt

SEQ ID NO: 647616 - DNA, 15 bp, Homo sapiens
gatggggaaaatttt

SEQ ID NO: 647617 - DNA, 15 bp, Homo sapiens
atggggaaaattttg

SEQ ID NO: 647618 - DNA, 15 bp, Homo sapiens
tggggaaaattttgc

SEQ ID NO: 647619 - DNA, 15 bp, Homo sapiens
ggggaaaattttgcc

SEQ ID NO: 647620 - DNA, 15 bp, Homo sapiens
gggaaaattttgcca

SEQ ID NO: 647621 - DNA, 15 bp, Homo sapiens
ggaaaattttgccac

SEQ ID NO: 647622 - DNA, 15 bp, Homo sapiens
gaaaattttgccact

SEQ ID NO: 647623 - DNA, 15 bp, Homo sapiens
aaaattttgccactg

SEQ ID NO: 647624 - DNA, 15 bp, Homo sapiens
aaattttgccactga

SEQ ID NO: 647625 - DNA, 15 bp, Homo sapiens
aattttgccactgat

SEQ ID NO: 647626 - DNA, 15 bp, Homo sapiens
attttgccactgata

SEQ ID NO: 647627 - DNA, 15 bp, Homo sapiens
ttttgccactgatat

SEQ ID NO: 647628 - DNA, 15 bp, Homo sapiens
tttgccactgatata

SEQ ID NO: 647629 - DNA, 15 bp, Homo sapiens
ttgccactgatatag

SEQ ID NO: 647630 - DNA, 15 bp, Homo sapiens
tgccactgatataga

SEQ ID NO: 647631 - DNA, 15 bp, Homo sapiens
gccactgatatagag

SEQ ID NO: 647632 - DNA, 15 bp, Homo sapiens
ccactgatatagagc

SEQ ID NO: 647633 - DNA, 15 bp, Homo sapiens
cactgatatagagcc

SEQ ID NO: 647634 - DNA, 15 bp, Homo sapiens
actgatatagagcca

SEQ ID NO: 647635 - DNA, 15 bp, Homo sapiens
ctgatatagagccac

SEQ ID NO: 647636 - DNA, 15 bp, Homo sapiens
tgatatagagccact

SEQ ID NO: 647637 - DNA, 15 bp, Homo sapiens
gatatagagccacta

SEQ ID NO: 647638 - DNA, 15 bp, Homo sapiens
atatagagccactaa

SEQ ID NO: 647639 - DNA, 15 bp, Homo sapiens
tatagagccactaaa

SEQ ID NO: 647640 - DNA, 15 bp, Homo sapiens
atagagccactaaat

SEQ ID NO: 647641 - DNA, 15 bp, Homo sapiens
tagagccactaaatt

SEQ ID NO: 647642 - DNA, 15 bp, Homo sapiens
agagccactaaattg

SEQ ID NO: 647643 - DNA, 15 bp, Homo sapiens
gagccactaaattga

SEQ ID NO: 647644 - DNA, 15 bp, Homo sapiens
agccactaaattgag

SEQ ID NO: 647645 - DNA, 15 bp, Homo sapiens
gccactaaattgaga

SEQ ID NO: 647646 - DNA, 15 bp, Homo sapiens
ccactaaattgagag

SEQ ID NO: 647647 - DNA, 15 bp, Homo sapiens
cactaaattgagagt

SEQ ID NO: 647648 - DNA, 15 bp, Homo sapiens
actaaattgagagtc

SEQ ID NO: 647649 - DNA, 15 bp, Homo sapiens
ctaaattgagagtcc

SEQ ID NO: 647650 - DNA, 15 bp, Homo sapiens
taaattgagagtcca

SEQ ID NO: 647651 - DNA, 15 bp, Homo sapiens
aaattgagagtccat

SEQ ID NO: 647652 - DNA, 15 bp, Homo sapiens
aattgagagtccatg

SEQ ID NO: 647653 - DNA, 15 bp, Homo sapiens
attgagagtccatgg

SEQ ID NO: 647654 - DNA, 15 bp, Homo sapiens
ttgagagtccatgga

SEQ ID NO: 647655 - DNA, 15 bp, Homo sapiens
tgagagtccatggag

SEQ ID NO: 647656 - DNA, 15 bp, Homo sapiens
gagagtccatggagg

SEQ ID NO: 647657 - DNA, 15 bp, Homo sapiens
agagtccatggaggg

SEQ ID NO: 647658 - DNA, 15 bp, Homo sapiens
gagtccatggagggc

SEQ ID NO: 647659 - DNA, 15 bp, Homo sapiens
agtccatggagggca

SEQ ID NO: 647660 - DNA, 15 bp, Homo sapiens
gtccatggagggcaa

SEQ ID NO: 647661 - DNA, 15 bp, Homo sapiens
tccatggagggcaag

SEQ ID NO: 647662 - DNA, 15 bp, Homo sapiens
ccatggagggcaagg

SEQ ID NO: 647663 - DNA, 15 bp, Homo sapiens
catggagggcaagga

SEQ ID NO: 647664 - DNA, 15 bp, Homo sapiens
atggagggcaaggag

SEQ ID NO: 647665 - DNA, 15 bp, Homo sapiens
tggagggcaaggagg

SEQ ID NO: 647666 - DNA, 15 bp, Homo sapiens
ggagggcaaggaggg

SEQ ID NO: 647667 - DNA, 15 bp, Homo sapiens
gagggcaaggagggt

SEQ ID NO: 647668 - DNA, 15 bp, Homo sapiens
agggcaaggagggta

SEQ ID NO: 647669 - DNA, 15 bp, Homo sapiens
gggcaaggagggtag

SEQ ID NO: 647670 - DNA, 15 bp, Homo sapiens
ggcaaggagggtagt

SEQ ID NO: 647671 - DNA, 15 bp, Homo sapiens
gcaaggagggtagtc

SEQ ID NO: 647672 - DNA, 15 bp, Homo sapiens
caaggagggtagtca

SEQ ID NO: 647673 - DNA, 15 bp, Homo sapiens
aaggagggtagtcag

SEQ ID NO: 647674 - DNA, 15 bp, Homo sapiens
aggagggtagtcaga

SEQ ID NO: 647675 - DNA, 15 bp, Homo sapiens
ggagggtagtcagaa

SEQ ID NO: 647676 - DNA, 15 bp, Homo sapiens
gagggtagtcagaaa

SEQ ID NO: 647677 - DNA, 15 bp, Homo sapiens
agggtagtcagaaaa

SEQ ID NO: 647678 - DNA, 15 bp, Homo sapiens
gggtagtcagaaaat

SEQ ID NO: 647679 - DNA, 15 bp, Homo sapiens
ggtagtcagaaaata

SEQ ID NO: 647680 - DNA, 15 bp, Homo sapiens
gtagtcagaaaataa

SEQ ID NO: 647681 - DNA, 15 bp, Homo sapiens
tagtcagaaaataaa

SEQ ID NO: 647682 - DNA, 15 bp, Homo sapiens
agtcagaaaataaat

SEQ ID NO: 647683 - DNA, 15 bp, Homo sapiens
gtcagaaaataaatg

SEQ ID NO: 647684 - DNA, 15 bp, Homo sapiens
tcagaaaataaatga

SEQ ID NO: 647685 - DNA, 15 bp, Homo sapiens
cagaaaataaatgac

SEQ ID NO: 647686 - DNA, 15 bp, Homo sapiens
agaaaataaatgact

SEQ ID NO: 647687 - DNA, 15 bp, Homo sapiens
gaaaataaatgactg

SEQ ID NO: 647688 - DNA, 15 bp, Homo sapiens
aaaataaatgactgt

SEQ ID NO: 647689 - DNA, 15 bp, Homo sapiens
aaataaatgactgtt

SEQ ID NO: 647690 - DNA, 15 bp, Homo sapiens
aataaatgactgttt

SEQ ID NO: 647691 - DNA, 15 bp, Homo sapiens
ataaatgactgtttc

SEQ ID NO: 647692 - DNA, 15 bp, Homo sapiens
taaatgactgtttct

SEQ ID NO: 647693 - DNA, 15 bp, Homo sapiens
aaatgactgtttctc

SEQ ID NO: 647694 - DNA, 15 bp, Homo sapiens
aatgactgtttctcc

SEQ ID NO: 647695 - DNA, 15 bp, Homo sapiens
atgactgtttctcca

SEQ ID NO: 647696 - DNA, 15 bp, Homo sapiens
tgactgtttctccaa

SEQ ID NO: 647697 - DNA, 15 bp, Homo sapiens
gactgtttctccaaa

SEQ ID NO: 647698 - DNA, 15 bp, Homo sapiens
actgtttctccaaaa

SEQ ID NO: 647699 - DNA, 15 bp, Homo sapiens
ctgtttctccaaaag

SEQ ID NO: 647700 - DNA, 15 bp, Homo sapiens
tgtttctccaaaagt

SEQ ID NO: 647701 - DNA, 15 bp, Homo sapiens
gtttctccaaaagtg

SEQ ID NO: 647702 - DNA, 15 bp, Homo sapiens
tttctccaaaagtga

SEQ ID NO: 647703 - DNA, 15 bp, Homo sapiens
ttctccaaaagtgat

SEQ ID NO: 647704 - DNA, 15 bp, Homo sapiens
tctccaaaagtgatg

SEQ ID NO: 647705 - DNA, 15 bp, Homo sapiens
ctccaaaagtgatgg

SEQ ID NO: 647706 - DNA, 15 bp, Homo sapiens
tccaaaagtgatggg

SEQ ID NO: 647707 - DNA, 15 bp, Homo sapiens
ccaaaagtgatgggg

SEQ ID NO: 647708 - DNA, 15 bp, Homo sapiens
caaaagtgatggggt

SEQ ID NO: 647709 - DNA, 15 bp, Homo sapiens
aaaagtgatggggtt

SEQ ID NO: 647710 - DNA, 15 bp, Homo sapiens
aaagtgatggggttg

SEQ ID NO: 647711 - DNA, 15 bp, Homo sapiens
aagtgatggggttga

SEQ ID NO: 647712 - DNA, 15 bp, Homo sapiens
agtgatggggttgaa

SEQ ID NO: 647713 - DNA, 15 bp, Homo sapiens
gtgatggggttgaat

SEQ ID NO: 647714 - DNA, 15 bp, Homo sapiens
tgatggggttgaatg

SEQ ID NO: 647715 - DNA, 15 bp, Homo sapiens
gatggggttgaatgg

SEQ ID NO: 647716 - DNA, 15 bp, Homo sapiens
atggggttgaatgga

SEQ ID NO: 647717 - DNA, 15 bp, Homo sapiens
tggggttgaatggac

SEQ ID NO: 647718 - DNA, 15 bp, Homo sapiens
ggggttgaatggacc

SEQ ID NO: 647719 - DNA, 15 bp, Homo sapiens
gggttgaatggacct

SEQ ID NO: 647720 - DNA, 15 bp, Homo sapiens
ggttgaatggacctg

SEQ ID NO: 647721 - DNA, 15 bp, Homo sapiens
gttgaatggacctgc

SEQ ID NO: 647722 - DNA, 15 bp, Homo sapiens
ttgaatggacctgcc

SEQ ID NO: 647723 - DNA, 15 bp, Homo sapiens
tgaatggacctgcca

SEQ ID NO: 647724 - DNA, 15 bp, Homo sapiens
gaatggacctgccac

SEQ ID NO: 647725 - DNA, 15 bp, Homo sapiens
aatggacctgccact

SEQ ID NO: 647726 - DNA, 15 bp, Homo sapiens
atggacctgccacta

SEQ ID NO: 647727 - DNA, 15 bp, Homo sapiens
tggacctgccactac

SEQ ID NO: 647728 - DNA, 15 bp, Homo sapiens
ggacctgccactact

SEQ ID NO: 647729 - DNA, 15 bp, Homo sapiens
gacctgccactactc

SEQ ID NO: 647730 - DNA, 15 bp, Homo sapiens
acctgccactactct

SEQ ID NO: 647731 - DNA, 15 bp, Homo sapiens
cctgccactactctg

SEQ ID NO: 647732 - DNA, 15 bp, Homo sapiens
ctgccactactctga

SEQ ID NO: 647733 - DNA, 15 bp, Homo sapiens
tgccactactctgag

SEQ ID NO: 647734 - DNA, 15 bp, Homo sapiens
gccactactctgagg

SEQ ID NO: 647735 - DNA, 15 bp, Homo sapiens
ccactactctgaggt

SEQ ID NO: 647736 - DNA, 15 bp, Homo sapiens
cactactctgaggtt

SEQ ID NO: 647737 - DNA, 15 bp, Homo sapiens
actactctgaggttc

SEQ ID NO: 647738 - DNA, 15 bp, Homo sapiens
ctactctgaggttca

SEQ ID NO: 647739 - DNA, 15 bp, Homo sapiens
tactctgaggttcaa

SEQ ID NO: 647740 - DNA, 15 bp, Homo sapiens
actctgaggttcaaa

SEQ ID NO: 647741 - DNA, 15 bp, Homo sapiens
ctctgaggttcaaaa

SEQ ID NO: 647742 - DNA, 15 bp, Homo sapiens
tctgaggttcaaaaa

SEQ ID NO: 647743 - DNA, 15 bp, Homo sapiens
ctgaggttcaaaaaa

SEQ ID NO: 647744 - DNA, 15 bp, Homo sapiens
tgaggttcaaaaaaa

SEQ ID NO: 647745 - DNA, 15 bp, Homo sapiens
gaggttcaaaaaaaa

SEQ ID NO: 647746 - DNA, 15 bp, Homo sapiens
aggttcaaaaaaaat

SEQ ID NO: 647747 - DNA, 15 bp, Homo sapiens
ggttcaaaaaaaatg

SEQ ID NO: 647748 - DNA, 15 bp, Homo sapiens
gttcaaaaaaaatgc

SEQ ID NO: 647749 - DNA, 15 bp, Homo sapiens
ttcaaaaaaaatgct

SEQ ID NO: 647750 - DNA, 15 bp, Homo sapiens
tcaaaaaaaatgctc

SEQ ID NO: 647751 - DNA, 15 bp, Homo sapiens
caaaaaaaatgctct

SEQ ID NO: 647752 - DNA, 15 bp, Homo sapiens
aaaaaaaatgctctt

SEQ ID NO: 647753 - DNA, 15 bp, Homo sapiens
aaaaaaatgctcttc

SEQ ID NO: 647754 - DNA, 15 bp, Homo sapiens
aaaaaatgctcttct

SEQ ID NO: 647755 - DNA, 15 bp, Homo sapiens
aaaaatgctcttctt

SEQ ID NO: 647756 - DNA, 15 bp, Homo sapiens
aaaatgctcttctta

SEQ ID NO: 647757 - DNA, 15 bp, Homo sapiens
aaatgctcttcttat

SEQ ID NO: 647758 - DNA, 15 bp, Homo sapiens
aatgctcttcttata

SEQ ID NO: 647759 - DNA, 15 bp, Homo sapiens
atgctcttcttataa

SEQ ID NO: 647760 - DNA, 15 bp, Homo sapiens
tgctcttcttataat

SEQ ID NO: 647761 - DNA, 15 bp, Homo sapiens
gctcttcttataatt

SEQ ID NO: 647762 - DNA, 15 bp, Homo sapiens
ctcttcttataatta

SEQ ID NO: 647763 - DNA, 15 bp, Homo sapiens
tcttcttataattat

SEQ ID NO: 647764 - DNA, 15 bp, Homo sapiens
cttcttataattata

SEQ ID NO: 647765 - DNA, 15 bp, Homo sapiens
ttcttataattatag

SEQ ID NO: 647766 - DNA, 15 bp, Homo sapiens
tcttataattatagc

SEQ ID NO: 647767 - DNA, 15 bp, Homo sapiens
cttataattatagct

SEQ ID NO: 647768 - DNA, 15 bp, Homo sapiens
ttataattatagctt

SEQ ID NO: 647769 - DNA, 15 bp, Homo sapiens
tataattatagcttc

SEQ ID NO: 647770 - DNA, 15 bp, Homo sapiens
ataattatagcttcc

SEQ ID NO: 647771 - DNA, 15 bp, Homo sapiens
taattatagcttcca

SEQ ID NO: 647772 - DNA, 15 bp, Homo sapiens
aattatagcttccag

SEQ ID NO: 647773 - DNA, 15 bp, Homo sapiens
attatagcttccagc

SEQ ID NO: 647774 - DNA, 15 bp, Homo sapiens
ttatagcttccagca

SEQ ID NO: 647775 - DNA, 15 bp, Homo sapiens
tatagcttccagcat

SEQ ID NO: 647776 - DNA, 15 bp, Homo sapiens
atagcttccagcatg

SEQ ID NO: 647777 - DNA, 15 bp, Homo sapiens
tagcttccagcatga

SEQ ID NO: 647778 - DNA, 15 bp, Homo sapiens
agcttccagcatgac

SEQ ID NO: 647779 - DNA, 15 bp, Homo sapiens
gcttccagcatgact

SEQ ID NO: 647780 - DNA, 15 bp, Homo sapiens
cttccagcatgactc

SEQ ID NO: 647781 - DNA, 15 bp, Homo sapiens
ttccagcatgactcc

SEQ ID NO: 647782 - DNA, 15 bp, Homo sapiens
tccagcatgactcca

SEQ ID NO: 647783 - DNA, 15 bp, Homo sapiens
ccagcatgactccac

SEQ ID NO: 647784 - DNA, 15 bp, Homo sapiens
cagcatgactccaca

SEQ ID NO: 647785 - DNA, 15 bp, Homo sapiens
agcatgactccacaa

SEQ ID NO: 647786 - DNA, 15 bp, Homo sapiens
gcatgactccacaac

SEQ ID NO: 647787 - DNA, 15 bp, Homo sapiens
catgactccacaacc

SEQ ID NO: 647788 - DNA, 15 bp, Homo sapiens
atgactccacaaccc

SEQ ID NO: 647789 - DNA, 15 bp, Homo sapiens
tgactccacaaccct

SEQ ID NO: 647790 - DNA, 15 bp, Homo sapiens
gactccacaaccctt

SEQ ID NO: 647791 - DNA, 15 bp, Homo sapiens
actccacaacccttt

SEQ ID NO: 647792 - DNA, 15 bp, Homo sapiens
ctccacaaccctttt

SEQ ID NO: 647793 - DNA, 15 bp, Homo sapiens
tccacaaccctttta

SEQ ID NO: 647794 - DNA, 15 bp, Homo sapiens
ccacaacccttttaa

SEQ ID NO: 647795 - DNA, 15 bp, Homo sapiens
cacaacccttttaat

SEQ ID NO: 647796 - DNA, 15 bp, Homo sapiens
acaacccttttaata

SEQ ID NO: 647797 - DNA, 15 bp, Homo sapiens
caacccttttaatag

SEQ ID NO: 647798 - DNA, 15 bp, Homo sapiens
aacccttttaatagc

SEQ ID NO: 647799 - DNA, 15 bp, Homo sapiens
acccttttaatagcg

SEQ ID NO: 647800 - DNA, 15 bp, Homo sapiens
cccttttaatagcgc

SEQ ID NO: 647801 - DNA, 15 bp, Homo sapiens
ccttttaatagcgcc

SEQ ID NO: 647802 - DNA, 15 bp, Homo sapiens
cttttaatagcgccc

SEQ ID NO: 647803 - DNA, 15 bp, Homo sapiens
ttttaatagcgcccc

SEQ ID NO: 647804 - DNA, 15 bp, Homo sapiens
tttaatagcgcccct

SEQ ID NO: 647805 - DNA, 15 bp, Homo sapiens
ttaatagcgcccctc

SEQ ID NO: 647806 - DNA, 15 bp, Homo sapiens
taatagcgcccctca

SEQ ID NO: 647807 - DNA, 15 bp, Homo sapiens
aatagcgcccctcac

SEQ ID NO: 647808 - DNA, 15 bp, Homo sapiens
atagcgcccctcacc

SEQ ID NO: 647809 - DNA, 15 bp, Homo sapiens
tagcgcccctcacct

SEQ ID NO: 647810 - DNA, 15 bp, Homo sapiens
agcgcccctcaccta

SEQ ID NO: 647811 - DNA, 15 bp, Homo sapiens
gcgcccctcacctaa

SEQ ID NO: 647812 - DNA, 15 bp, Homo sapiens
cgcccctcacctaac

SEQ ID NO: 647813 - DNA, 15 bp, Homo sapiens
gcccctcacctaaca

SEQ ID NO: 647814 - DNA, 15 bp, Homo sapiens
cccctcacctaacac

SEQ ID NO: 647815 - DNA, 15 bp, Homo sapiens
ccctcacctaacacc

SEQ ID NO: 647816 - DNA, 15 bp, Homo sapiens
cctcacctaacaccc

SEQ ID NO: 647817 - DNA, 15 bp, Homo sapiens
ctcacctaacaccct

SEQ ID NO: 647818 - DNA, 15 bp, Homo sapiens
tcacctaacaccctg

SEQ ID NO: 647819 - DNA, 15 bp, Homo sapiens
cacctaacaccctgt

SEQ ID NO: 647820 - DNA, 15 bp, Homo sapiens
acctaacaccctgtc

SEQ ID NO: 647821 - DNA, 15 bp, Homo sapiens
cctaacaccctgtca

SEQ ID NO: 647822 - DNA, 15 bp, Homo sapiens
ctaacaccctgtcag

SEQ ID NO: 647823 - DNA, 15 bp, Homo sapiens
taacaccctgtcagg

SEQ ID NO: 647824 - DNA, 15 bp, Homo sapiens
aacaccctgtcaggg

SEQ ID NO: 647825 - DNA, 15 bp, Homo sapiens
acaccctgtcaggga

SEQ ID NO: 647826 - DNA, 15 bp, Homo sapiens
caccctgtcagggac

SEQ ID NO: 647827 - DNA, 15 bp, Homo sapiens
accctgtcagggact

SEQ ID NO: 647828 - DNA, 15 bp, Homo sapiens
ccctgtcagggactc

SEQ ID NO: 647829 - DNA, 15 bp, Homo sapiens
cctgtcagggactct

SEQ ID NO: 647830 - DNA, 15 bp, Homo sapiens
ctgtcagggactctt

SEQ ID NO: 647831 - DNA, 15 bp, Homo sapiens
tgtcagggactcttc

SEQ ID NO: 647832 - DNA, 15 bp, Homo sapiens
gtcagggactcttcc

SEQ ID NO: 647833 - DNA, 15 bp, Homo sapiens
tcagggactcttccc

SEQ ID NO: 647834 - DNA, 15 bp, Homo sapiens
cagggactcttccca

SEQ ID NO: 647835 - DNA, 15 bp, Homo sapiens
agggactcttcccat

SEQ ID NO: 647836 - DNA, 15 bp, Homo sapiens
gggactcttcccatg

SEQ ID NO: 647837 - DNA, 15 bp, Homo sapiens
ggactcttcccatga

SEQ ID NO: 647838 - DNA, 15 bp, Homo sapiens
gactcttcccatgat

SEQ ID NO: 647839 - DNA, 15 bp, Homo sapiens
actcttcccatgatg

SEQ ID NO: 647840 - DNA, 15 bp, Homo sapiens
ctcttcccatgatgc

SEQ ID NO: 647841 - DNA, 15 bp, Homo sapiens
tcttcccatgatgct

SEQ ID NO: 647842 - DNA, 15 bp, Homo sapiens
cttcccatgatgctg

SEQ ID NO: 647843 - DNA, 15 bp, Homo sapiens
ttcccatgatgctga

SEQ ID NO: 647844 - DNA, 15 bp, Homo sapiens
tcccatgatgctgaa

SEQ ID NO: 647845 - DNA, 15 bp, Homo sapiens
cccatgatgctgaaa

SEQ ID NO: 647846 - DNA, 15 bp, Homo sapiens
ccatgatgctgaaag

SEQ ID NO: 647847 - DNA, 15 bp, Homo sapiens
catgatgctgaaagt

SEQ ID NO: 647848 - DNA, 15 bp, Homo sapiens
atgatgctgaaagta

SEQ ID NO: 647849 - DNA, 15 bp, Homo sapiens
tgatgctgaaagtag

SEQ ID NO: 647850 - DNA, 15 bp, Homo sapiens
gatgctgaaagtaga

SEQ ID NO: 647851 - DNA, 15 bp, Homo sapiens
atgctgaaagtagat

SEQ ID NO: 647852 - DNA, 15 bp, Homo sapiens
tgctgaaagtagatg

SEQ ID NO: 647853 - DNA, 15 bp, Homo sapiens
gctgaaagtagatgc

SEQ ID NO: 647854 - DNA, 15 bp, Homo sapiens
ctgaaagtagatgca

SEQ ID NO: 647855 - DNA, 15 bp, Homo sapiens
tgaaagtagatgcat

SEQ ID NO: 647856 - DNA, 15 bp, Homo sapiens
gaaagtagatgcatc

SEQ ID NO: 647857 - DNA, 15 bp, Homo sapiens
aaagtagatgcatct

SEQ ID NO: 647858 - DNA, 15 bp, Homo sapiens
aagtagatgcatctg

SEQ ID NO: 647859 - DNA, 15 bp, Homo sapiens
agtagatgcatctga

SEQ ID NO: 647860 - DNA, 15 bp, Homo sapiens
gtagatgcatctgag

SEQ ID NO: 647861 - DNA, 15 bp, Homo sapiens
tagatgcatctgaga

SEQ ID NO: 647862 - DNA, 15 bp, Homo sapiens
agatgcatctgagag

SEQ ID NO: 647863 - DNA, 15 bp, Homo sapiens
gatgcatctgagaga

SEQ ID NO: 647864 - DNA, 15 bp, Homo sapiens
atgcatctgagagaa

SEQ ID NO: 647865 - DNA, 15 bp, Homo sapiens
tgcatctgagagaag

SEQ ID NO: 647866 - DNA, 15 bp, Homo sapiens
gcatctgagagaagt

SEQ ID NO: 647867 - DNA, 15 bp, Homo sapiens
catctgagagaagtg

SEQ ID NO: 647868 - DNA, 15 bp, Homo sapiens
atctgagagaagtga

SEQ ID NO: 647869 - DNA, 15 bp, Homo sapiens
tctgagagaagtgaa

SEQ ID NO: 647870 - DNA, 15 bp, Homo sapiens
ctgagagaagtgaag

SEQ ID NO: 647871 - DNA, 15 bp, Homo sapiens
tgagagaagtgaagc

SEQ ID NO: 647872 - DNA, 15 bp, Homo sapiens
gagagaagtgaagcc

SEQ ID NO: 647873 - DNA, 15 bp, Homo sapiens
agagaagtgaagcca

SEQ ID NO: 647874 - DNA, 15 bp, Homo sapiens
gagaagtgaagccac

SEQ ID NO: 647875 - DNA, 15 bp, Homo sapiens
agaagtgaagccact

SEQ ID NO: 647876 - DNA, 15 bp, Homo sapiens
gaagtgaagccactc

SEQ ID NO: 647877 - DNA, 15 bp, Homo sapiens
aagtgaagccactca

SEQ ID NO: 647878 - DNA, 15 bp, Homo sapiens
agtgaagccactcac

SEQ ID NO: 647879 - DNA, 15 bp, Homo sapiens
gtgaagccactcacc

SEQ ID NO: 647880 - DNA, 15 bp, Homo sapiens
tgaagccactcacct

SEQ ID NO: 647881 - DNA, 15 bp, Homo sapiens
gaagccactcacctt

SEQ ID NO: 647882 - DNA, 15 bp, Homo sapiens
aagccactcaccttg

SEQ ID NO: 647883 - DNA, 15 bp, Homo sapiens
agccactcaccttga

SEQ ID NO: 647884 - DNA, 15 bp, Homo sapiens
gccactcaccttgag

SEQ ID NO: 647885 - DNA, 15 bp, Homo sapiens
ccactcaccttgaga

SEQ ID NO: 647886 - DNA, 15 bp, Homo sapiens
cactcaccttgagag

SEQ ID NO: 647887 - DNA, 15 bp, Homo sapiens
actcaccttgagagg

SEQ ID NO: 647888 - DNA, 15 bp, Homo sapiens
ctcaccttgagaggc

SEQ ID NO: 647889 - DNA, 15 bp, Homo sapiens
tcaccttgagaggct

SEQ ID NO: 647890 - DNA, 15 bp, Homo sapiens
caccttgagaggctt

SEQ ID NO: 647891 - DNA, 15 bp, Homo sapiens
accttgagaggcttc

SEQ ID NO: 647892 - DNA, 15 bp, Homo sapiens
ccttgagaggcttct

SEQ ID NO: 647893 - DNA, 15 bp, Homo sapiens
cttgagaggcttctt

SEQ ID NO: 647894 - DNA, 15 bp, Homo sapiens
ttgagaggcttcttg

SEQ ID NO: 647895 - DNA, 15 bp, Homo sapiens
tgagaggcttcttgg

SEQ ID NO: 647896 - DNA, 15 bp, Homo sapiens
gagaggcttcttgga

SEQ ID NO: 647897 - DNA, 15 bp, Homo sapiens
agaggcttcttggaa

SEQ ID NO: 647898 - DNA, 15 bp, Homo sapiens
gaggcttcttggaaa

SEQ ID NO: 647899 - DNA, 15 bp, Homo sapiens
aggcttcttggaaaa

SEQ ID NO: 647900 - DNA, 15 bp, Homo sapiens
ggcttcttggaaaaa

SEQ ID NO: 647901 - DNA, 15 bp, Homo sapiens
gcttcttggaaaaag

SEQ ID NO: 647902 - DNA, 15 bp, Homo sapiens
cttcttggaaaaagc

SEQ ID NO: 647903 - DNA, 15 bp, Homo sapiens
ttcttggaaaaagcc

SEQ ID NO: 647904 - DNA, 15 bp, Homo sapiens
tcttggaaaaagcca

SEQ ID NO: 647905 - DNA, 15 bp, Homo sapiens
cttggaaaaagccac

SEQ ID NO: 647906 - DNA, 15 bp, Homo sapiens
ttggaaaaagccaca

SEQ ID NO: 647907 - DNA, 15 bp, Homo sapiens
tggaaaaagccacat

SEQ ID NO: 647908 - DNA, 15 bp, Homo sapiens
ggaaaaagccacatc

SEQ ID NO: 647909 - DNA, 15 bp, Homo sapiens
gaaaaagccacatct

SEQ ID NO: 647910 - DNA, 15 bp, Homo sapiens
aaaaagccacatctt

SEQ ID NO: 647911 - DNA, 15 bp, Homo sapiens
aaaagccacatcttt

SEQ ID NO: 647912 - DNA, 15 bp, Homo sapiens
aaagccacatctttg

SEQ ID NO: 647913 - DNA, 15 bp, Homo sapiens
aagccacatctttgt

SEQ ID NO: 647914 - DNA, 15 bp, Homo sapiens
agccacatctttgtg

SEQ ID NO: 647915 - DNA, 15 bp, Homo sapiens
gccacatctttgtgc

SEQ ID NO: 647916 - DNA, 15 bp, Homo sapiens
ccacatctttgtgcc

SEQ ID NO: 647917 - DNA, 15 bp, Homo sapiens
cacatctttgtgcca

SEQ ID NO: 647918 - DNA, 15 bp, Homo sapiens
acatctttgtgccac

SEQ ID NO: 647919 - DNA, 15 bp, Homo sapiens
catctttgtgccaca

SEQ ID NO: 647920 - DNA, 15 bp, Homo sapiens
atctttgtgccacaa

SEQ ID NO: 647921 - DNA, 15 bp, Homo sapiens
tctttgtgccacaag

SEQ ID NO: 647922 - DNA, 15 bp, Homo sapiens
ctttgtgccacaagt

SEQ ID NO: 647923 - DNA, 15 bp, Homo sapiens
tttgtgccacaagta

SEQ ID NO: 647924 - DNA, 15 bp, Homo sapiens
ttgtgccacaagtaa

SEQ ID NO: 647925 - DNA, 15 bp, Homo sapiens
tgtgccacaagtaac

SEQ ID NO: 647926 - DNA, 15 bp, Homo sapiens
gtgccacaagtaaca

SEQ ID NO: 647927 - DNA, 15 bp, Homo sapiens
tgccacaagtaacaa

SEQ ID NO: 647928 - DNA, 15 bp, Homo sapiens
gccacaagtaacaat

SEQ ID NO: 647929 - DNA, 15 bp, Homo sapiens
ccacaagtaacaata

SEQ ID NO: 647930 - DNA, 15 bp, Homo sapiens
cacaagtaacaatat

SEQ ID NO: 647931 - DNA, 15 bp, Homo sapiens
acaagtaacaatatg

SEQ ID NO: 647932 - DNA, 15 bp, Homo sapiens
caagtaacaatatgg

SEQ ID NO: 647933 - DNA, 15 bp, Homo sapiens
aagtaacaatatgga

SEQ ID NO: 647934 - DNA, 15 bp, Homo sapiens
agtaacaatatggaa

SEQ ID NO: 647935 - DNA, 15 bp, Homo sapiens
gtaacaatatggaaa

SEQ ID NO: 647936 - DNA, 15 bp, Homo sapiens
taacaatatggaaaa

SEQ ID NO: 647937 - DNA, 15 bp, Homo sapiens
aacaatatggaaaaa

SEQ ID NO: 647938 - DNA, 15 bp, Homo sapiens
acaatatggaaaaac

SEQ ID NO: 647939 - DNA, 15 bp, Homo sapiens
caatatggaaaaact

SEQ ID NO: 647940 - DNA, 15 bp, Homo sapiens
aatatggaaaaactt

SEQ ID NO: 647941 - DNA, 15 bp, Homo sapiens
atatggaaaaactta

SEQ ID NO: 647942 - DNA, 15 bp, Homo sapiens
tatggaaaaacttaa

SEQ ID NO: 647943 - DNA, 15 bp, Homo sapiens
atggaaaaacttaat

SEQ ID NO: 647944 - DNA, 15 bp, Homo sapiens
tggaaaaacttaatg

SEQ ID NO: 647945 - DNA, 15 bp, Homo sapiens
ggaaaaacttaatga

SEQ ID NO: 647946 - DNA, 15 bp, Homo sapiens
gaaaaacttaatgat

SEQ ID NO: 647947 - DNA, 15 bp, Homo sapiens
aaaaacttaatgatc

SEQ ID NO: 647948 - DNA, 15 bp, Homo sapiens
aaaacttaatgatca

SEQ ID NO: 647949 - DNA, 15 bp, Homo sapiens
aaacttaatgatcat

SEQ ID NO: 647950 - DNA, 15 bp, Homo sapiens
aacttaatgatcatc

SEQ ID NO: 647951 - DNA, 15 bp, Homo sapiens
acttaatgatcatct

SEQ ID NO: 647952 - DNA, 15 bp, Homo sapiens
cttaatgatcatctt

SEQ ID NO: 647953 - DNA, 15 bp, Homo sapiens
ttaatgatcatctta

SEQ ID NO: 647954 - DNA, 15 bp, Homo sapiens
taatgatcatcttag

SEQ ID NO: 647955 - DNA, 15 bp, Homo sapiens
aatgatcatcttagc

SEQ ID NO: 647956 - DNA, 15 bp, Homo sapiens
atgatcatcttagca

SEQ ID NO: 647957 - DNA, 15 bp, Homo sapiens
tgatcatcttagcat

SEQ ID NO: 647958 - DNA, 15 bp, Homo sapiens
gatcatcttagcatg

SEQ ID NO: 647959 - DNA, 15 bp, Homo sapiens
atcatcttagcatgg

SEQ ID NO: 647960 - DNA, 15 bp, Homo sapiens
tcatcttagcatggt

SEQ ID NO: 647961 - DNA, 15 bp, Homo sapiens
catcttagcatggtt

SEQ ID NO: 647962 - DNA, 15 bp, Homo sapiens
atcttagcatggttt

SEQ ID NO: 647963 - DNA, 15 bp, Homo sapiens
tcttagcatggtttc

SEQ ID NO: 647964 - DNA, 15 bp, Homo sapiens
cttagcatggtttct

SEQ ID NO: 647965 - DNA, 15 bp, Homo sapiens
ttagcatggtttcta

SEQ ID NO: 647966 - DNA, 15 bp, Homo sapiens
tagcatggtttctac

SEQ ID NO: 647967 - DNA, 15 bp, Homo sapiens
agcatggtttctact

SEQ ID NO: 647968 - DNA, 15 bp, Homo sapiens
gcatggtttctacta

SEQ ID NO: 647969 - DNA, 15 bp, Homo sapiens
catggtttctactac

SEQ ID NO: 647970 - DNA, 15 bp, Homo sapiens
atggtttctactact

SEQ ID NO: 647971 - DNA, 15 bp, Homo sapiens
tggtttctactactt

SEQ ID NO: 647972 - DNA, 15 bp, Homo sapiens
ggtttctactactta

SEQ ID NO: 647973 - DNA, 15 bp, Homo sapiens
gtttctactacttag

SEQ ID NO: 647974 - DNA, 15 bp, Homo sapiens
tttctactacttaga

SEQ ID NO: 647975 - DNA, 15 bp, Homo sapiens
ttctactacttagag

SEQ ID NO: 647976 - DNA, 15 bp, Homo sapiens
tctactacttagagt

SEQ ID NO: 647977 - DNA, 15 bp, Homo sapiens
ctactacttagagtg

SEQ ID NO: 647978 - DNA, 15 bp, Homo sapiens
tactacttagagtga

SEQ ID NO: 647979 - DNA, 15 bp, Homo sapiens
actacttagagtgag

SEQ ID NO: 647980 - DNA, 15 bp, Homo sapiens
ctacttagagtgagg

SEQ ID NO: 647981 - DNA, 15 bp, Homo sapiens
tacttagagtgagga

SEQ ID NO: 647982 - DNA, 15 bp, Homo sapiens
acttagagtgaggat

SEQ ID NO: 647983 - DNA, 15 bp, Homo sapiens
cttagagtgaggatg

SEQ ID NO: 647984 - DNA, 15 bp, Homo sapiens
ttagagtgaggatga

SEQ ID NO: 647985 - DNA, 15 bp, Homo sapiens
tagagtgaggatgaa

SEQ ID NO: 647986 - DNA, 15 bp, Homo sapiens
agagtgaggatgaag

SEQ ID NO: 647987 - DNA, 15 bp, Homo sapiens
gagtgaggatgaaga

SEQ ID NO: 647988 - DNA, 15 bp, Homo sapiens
agtgaggatgaagac

SEQ ID NO: 647989 - DNA, 15 bp, Homo sapiens
gtgaggatgaagact

SEQ ID NO: 647990 - DNA, 15 bp, Homo sapiens
tgaggatgaagactt

SEQ ID NO: 647991 - DNA, 15 bp, Homo sapiens
gaggatgaagacttg

SEQ ID NO: 647992 - DNA, 15 bp, Homo sapiens
aggatgaagacttga

SEQ ID NO: 647993 - DNA, 15 bp, Homo sapiens
ggatgaagacttgag

SEQ ID NO: 647994 - DNA, 15 bp, Homo sapiens
gatgaagacttgagc

SEQ ID NO: 647995 - DNA, 15 bp, Homo sapiens
atgaagacttgagcc

SEQ ID NO: 647996 - DNA, 15 bp, Homo sapiens
tgaagacttgagcca

SEQ ID NO: 647997 - DNA, 15 bp, Homo sapiens
gaagacttgagccac

SEQ ID NO: 647998 - DNA, 15 bp, Homo sapiens
aagacttgagccaca

SEQ ID NO: 647999 - DNA, 15 bp, Homo sapiens
agacttgagccacag

SEQ ID NO: 648000 - DNA, 15 bp, Homo sapiens
gacttgagccacagg

SEQ ID NO: 648001 - DNA, 15 bp, Homo sapiens
acttgagccacagga

SEQ ID NO: 648002 - DNA, 15 bp, Homo sapiens
cttgagccacaggac

SEQ ID NO: 648003 - DNA, 15 bp, Homo sapiens
ttgagccacaggact

SEQ ID NO: 648004 - DNA, 15 bp, Homo sapiens
tgagccacaggactg

SEQ ID NO: 648005 - DNA, 15 bp, Homo sapiens
gagccacaggactgc

SEQ ID NO: 648006 - DNA, 15 bp, Homo sapiens
agccacaggactgct

SEQ ID NO: 648007 - DNA, 15 bp, Homo sapiens
gccacaggactgctg

SEQ ID NO: 648008 - DNA, 15 bp, Homo sapiens
ccacaggactgctgc

SEQ ID NO: 648009 - DNA, 15 bp, Homo sapiens
cacaggactgctgct

SEQ ID NO: 648010 - DNA, 15 bp, Homo sapiens
acaggactgctgctt

SEQ ID NO: 648011 - DNA, 15 bp, Homo sapiens
caggactgctgcttt

SEQ ID NO: 648012 - DNA, 15 bp, Homo sapiens
aggactgctgctttt

SEQ ID NO: 648013 - DNA, 15 bp, Homo sapiens
ggactgctgcttttg

SEQ ID NO: 648014 - DNA, 15 bp, Homo sapiens
gactgctgcttttgg

SEQ ID NO: 648015 - DNA, 15 bp, Homo sapiens
actgctgcttttggc

SEQ ID NO: 648016 - DNA, 15 bp, Homo sapiens
ctgctgcttttggca

SEQ ID NO: 648017 - DNA, 15 bp, Homo sapiens
tgctgcttttggcaa

SEQ ID NO: 648018 - DNA, 15 bp, Homo sapiens
gctgcttttggcaag

SEQ ID NO: 648019 - DNA, 15 bp, Homo sapiens
ctgcttttggcaagg

SEQ ID NO: 648020 - DNA, 15 bp, Homo sapiens
tgcttttggcaaggc

SEQ ID NO: 648021 - DNA, 15 bp, Homo sapiens
gcttttggcaaggct

SEQ ID NO: 648022 - DNA, 15 bp, Homo sapiens
cttttggcaaggctg

SEQ ID NO: 648023 - DNA, 15 bp, Homo sapiens
ttttggcaaggctgc

SEQ ID NO: 648024 - DNA, 15 bp, Homo sapiens
tttggcaaggctgcc

SEQ ID NO: 648025 - DNA, 15 bp, Homo sapiens
ttggcaaggctgccg

SEQ ID NO: 648026 - DNA, 15 bp, Homo sapiens
tggcaaggctgccgt

SEQ ID NO: 648027 - DNA, 15 bp, Homo sapiens
ggcaaggctgccgtt

SEQ ID NO: 648028 - DNA, 15 bp, Homo sapiens
gcaaggctgccgttt

SEQ ID NO: 648029 - DNA, 15 bp, Homo sapiens
caaggctgccgtttg

SEQ ID NO: 648030 - DNA, 15 bp, Homo sapiens
aaggctgccgtttgg

SEQ ID NO: 648031 - DNA, 15 bp, Homo sapiens
aggctgccgtttggc

SEQ ID NO: 648032 - DNA, 15 bp, Homo sapiens
ggctgccgtttggca

SEQ ID NO: 648033 - DNA, 15 bp, Homo sapiens
gctgccgtttggcag

SEQ ID NO: 648034 - DNA, 15 bp, Homo sapiens
ctgccgtttggcagt

SEQ ID NO: 648035 - DNA, 15 bp, Homo sapiens
tgccgtttggcagtc

SEQ ID NO: 648036 - DNA, 15 bp, Homo sapiens
gccgtttggcagtct

SEQ ID NO: 648037 - DNA, 15 bp, Homo sapiens
ccgtttggcagtcta

SEQ ID NO: 648038 - DNA, 15 bp, Homo sapiens
cgtttggcagtctat

SEQ ID NO: 648039 - DNA, 15 bp, Homo sapiens
gtttggcagtctatc

SEQ ID NO: 648040 - DNA, 15 bp, Homo sapiens
tttggcagtctatca

SEQ ID NO: 648041 - DNA, 15 bp, Homo sapiens
ttggcagtctatcat

SEQ ID NO: 648042 - DNA, 15 bp, Homo sapiens
tggcagtctatcatt

SEQ ID NO: 648043 - DNA, 15 bp, Homo sapiens
ggcagtctatcattg

SEQ ID NO: 648044 - DNA, 15 bp, Homo sapiens
gcagtctatcattga

SEQ ID NO: 648045 - DNA, 15 bp, Homo sapiens
cagtctatcattgac

SEQ ID NO: 648046 - DNA, 15 bp, Homo sapiens
agtctatcattgact

SEQ ID NO: 648047 - DNA, 15 bp, Homo sapiens
gtctatcattgacta

SEQ ID NO: 648048 - DNA, 15 bp, Homo sapiens
tctatcattgactaa

SEQ ID NO: 648049 - DNA, 15 bp, Homo sapiens
ctatcattgactaag

SEQ ID NO: 648050 - DNA, 15 bp, Homo sapiens
tatcattgactaagt

SEQ ID NO: 648051 - DNA, 15 bp, Homo sapiens
atcattgactaagtc

SEQ ID NO: 648052 - DNA, 15 bp, Homo sapiens
tcattgactaagtca

SEQ ID NO: 648053 - DNA, 15 bp, Homo sapiens
cattgactaagtcat

SEQ ID NO: 648054 - DNA, 15 bp, Homo sapiens
attgactaagtcatg

SEQ ID NO: 648055 - DNA, 15 bp, Homo sapiens
ttgactaagtcatgc

SEQ ID NO: 648056 - DNA, 15 bp, Homo sapiens
tgactaagtcatgcc

SEQ ID NO: 648057 - DNA, 15 bp, Homo sapiens
gactaagtcatgcca

SEQ ID NO: 648058 - DNA, 15 bp, Homo sapiens
actaagtcatgccaa

SEQ ID NO: 648059 - DNA, 15 bp, Homo sapiens
ctaagtcatgccaac

SEQ ID NO: 648060 - DNA, 15 bp, Homo sapiens
taagtcatgccaacc

SEQ ID NO: 648061 - DNA, 15 bp, Homo sapiens
aagtcatgccaacca

SEQ ID NO: 648062 - DNA, 15 bp, Homo sapiens
agtcatgccaaccag

SEQ ID NO: 648063 - DNA, 15 bp, Homo sapiens
gtcatgccaaccagg

SEQ ID NO: 648064 - DNA, 15 bp, Homo sapiens
tcatgccaaccaggg

SEQ ID NO: 648065 - DNA, 15 bp, Homo sapiens
catgccaaccagggg

SEQ ID NO: 648066 - DNA, 15 bp, Homo sapiens
atgccaaccaggggt

SEQ ID NO: 648067 - DNA, 15 bp, Homo sapiens
tgccaaccaggggtc

SEQ ID NO: 648068 - DNA, 15 bp, Homo sapiens
gccaaccaggggtcc

SEQ ID NO: 648069 - DNA, 15 bp, Homo sapiens
ccaaccaggggtccc

SEQ ID NO: 648070 - DNA, 15 bp, Homo sapiens
caaccaggggtccct

SEQ ID NO: 648071 - DNA, 15 bp, Homo sapiens
aaccaggggtccctt

SEQ ID NO: 648072 - DNA, 15 bp, Homo sapiens
accaggggtcccttg

SEQ ID NO: 648073 - DNA, 15 bp, Homo sapiens
ccaggggtcccttgg

SEQ ID NO: 648074 - DNA, 15 bp, Homo sapiens
caggggtcccttggt

SEQ ID NO: 648075 - DNA, 15 bp, Homo sapiens
aggggtcccttggta

SEQ ID NO: 648076 - DNA, 15 bp, Homo sapiens
ggggtcccttggtat

SEQ ID NO: 648077 - DNA, 15 bp, Homo sapiens
gggtcccttggtata

SEQ ID NO: 648078 - DNA, 15 bp, Homo sapiens
ggtcccttggtatat

SEQ ID NO: 648079 - DNA, 15 bp, Homo sapiens
gtcccttggtatatt

SEQ ID NO: 648080 - DNA, 15 bp, Homo sapiens
tcccttggtatattt

SEQ ID NO: 648081 - DNA, 15 bp, Homo sapiens
cccttggtatatttt

SEQ ID NO: 648082 - DNA, 15 bp, Homo sapiens
ccttggtatattttg

SEQ ID NO: 648083 - DNA, 15 bp, Homo sapiens
cttggtatattttgc

SEQ ID NO: 648084 - DNA, 15 bp, Homo sapiens
ttggtatattttgct

SEQ ID NO: 648085 - DNA, 15 bp, Homo sapiens
tggtatattttgcta

SEQ ID NO: 648086 - DNA, 15 bp, Homo sapiens
ggtatattttgctat

SEQ ID NO: 648087 - DNA, 15 bp, Homo sapiens
gtatattttgctata

SEQ ID NO: 648088 - DNA, 15 bp, Homo sapiens
tatattttgctataa

SEQ ID NO: 648089 - DNA, 15 bp, Homo sapiens
atattttgctataaa

SEQ ID NO: 648090 - DNA, 15 bp, Homo sapiens
tattttgctataaaa

SEQ ID NO: 648091 - DNA, 15 bp, Homo sapiens
attttgctataaaat

SEQ ID NO: 648092 - DNA, 15 bp, Homo sapiens
ttttgctataaaata

SEQ ID NO: 648093 - DNA, 15 bp, Homo sapiens
tttgctataaaatag

SEQ ID NO: 648094 - DNA, 15 bp, Homo sapiens
ttgctataaaataga

SEQ ID NO: 648095 - DNA, 15 bp, Homo sapiens
tgctataaaatagat

SEQ ID NO: 648096 - DNA, 15 bp, Homo sapiens
gctataaaatagata

SEQ ID NO: 648097 - DNA, 15 bp, Homo sapiens
ctataaaatagatac

SEQ ID NO: 648098 - DNA, 15 bp, Homo sapiens
tataaaatagataca

SEQ ID NO: 648099 - DNA, 15 bp, Homo sapiens
ataaaatagatacag

SEQ ID NO: 648100 - DNA, 15 bp, Homo sapiens
taaaatagatacagt

SEQ ID NO: 648101 - DNA, 15 bp, Homo sapiens
aaaatagatacagtg

SEQ ID NO: 648102 - DNA, 15 bp, Homo sapiens
aaatagatacagtga

SEQ ID NO: 648103 - DNA, 15 bp, Homo sapiens
aatagatacagtgac

SEQ ID NO: 648104 - DNA, 15 bp, Homo sapiens
atagatacagtgaca

SEQ ID NO: 648105 - DNA, 15 bp, Homo sapiens
tagatacagtgacac

SEQ ID NO: 648106 - DNA, 15 bp, Homo sapiens
agatacagtgacaca

SEQ ID NO: 648107 - DNA, 15 bp, Homo sapiens
gatacagtgacacat

SEQ ID NO: 648108 - DNA, 15 bp, Homo sapiens
atacagtgacacata

SEQ ID NO: 648109 - DNA, 15 bp, Homo sapiens
tacagtgacacataa

SEQ ID NO: 648110 - DNA, 15 bp, Homo sapiens
acagtgacacataag

SEQ ID NO: 648111 - DNA, 15 bp, Homo sapiens
cagtgacacataagt

SEQ ID NO: 648112 - DNA, 15 bp, Homo sapiens
agtgacacataagtc

SEQ ID NO: 648113 - DNA, 15 bp, Homo sapiens
gtgacacataagtcc

SEQ ID NO: 648114 - DNA, 15 bp, Homo sapiens
tgacacataagtccc

SEQ ID NO: 648115 - DNA, 15 bp, Homo sapiens
gacacataagtccct

SEQ ID NO: 648116 - DNA, 15 bp, Homo sapiens
acacataagtccctc

SEQ ID NO: 648117 - DNA, 15 bp, Homo sapiens
cacataagtccctcc

SEQ ID NO: 648118 - DNA, 15 bp, Homo sapiens
acataagtccctcca

SEQ ID NO: 648119 - DNA, 15 bp, Homo sapiens
cataagtccctccaa

SEQ ID NO: 648120 - DNA, 15 bp, Homo sapiens
ataagtccctccaag

SEQ ID NO: 648121 - DNA, 15 bp, Homo sapiens
taagtccctccaaga

SEQ ID NO: 648122 - DNA, 15 bp, Homo sapiens
aagtccctccaagag

SEQ ID NO: 648123 - DNA, 15 bp, Homo sapiens
agtccctccaagaga

SEQ ID NO: 648124 - DNA, 15 bp, Homo sapiens
gtccctccaagagat

SEQ ID NO: 648125 - DNA, 15 bp, Homo sapiens
tccctccaagagatg

SEQ ID NO: 648126 - DNA, 15 bp, Homo sapiens
ccctccaagagatga

SEQ ID NO: 648127 - DNA, 15 bp, Homo sapiens
cctccaagagatgaa

SEQ ID NO: 648128 - DNA, 15 bp, Homo sapiens
ctccaagagatgaag

SEQ ID NO: 648129 - DNA, 15 bp, Homo sapiens
tccaagagatgaagc

SEQ ID NO: 648130 - DNA, 15 bp, Homo sapiens
ccaagagatgaagcc

SEQ ID NO: 648131 - DNA, 15 bp, Homo sapiens
caagagatgaagcca

SEQ ID NO: 648132 - DNA, 15 bp, Homo sapiens
aagagatgaagccat

SEQ ID NO: 648133 - DNA, 15 bp, Homo sapiens
agagatgaagccata

SEQ ID NO: 648134 - DNA, 15 bp, Homo sapiens
gagatgaagccataa

SEQ ID NO: 648135 - DNA, 15 bp, Homo sapiens
agatgaagccataat

SEQ ID NO: 648136 - DNA, 15 bp, Homo sapiens
gatgaagccataatt

SEQ ID NO: 648137 - DNA, 15 bp, Homo sapiens
atgaagccataattc

SEQ ID NO: 648138 - DNA, 15 bp, Homo sapiens
tgaagccataattcc

SEQ ID NO: 648139 - DNA, 15 bp, Homo sapiens
gaagccataattcct

SEQ ID NO: 648140 - DNA, 15 bp, Homo sapiens
aagccataattcctg

SEQ ID NO: 648141 - DNA, 15 bp, Homo sapiens
agccataattcctgt

SEQ ID NO: 648142 - DNA, 15 bp, Homo sapiens
gccataattcctgtg

SEQ ID NO: 648143 - DNA, 15 bp, Homo sapiens
ccataattcctgtga

SEQ ID NO: 648144 - DNA, 15 bp, Homo sapiens
cataattcctgtgac

SEQ ID NO: 648145 - DNA, 15 bp, Homo sapiens
ataattcctgtgact

SEQ ID NO: 648146 - DNA, 15 bp, Homo sapiens
taattcctgtgacta

SEQ ID NO: 648147 - DNA, 15 bp, Homo sapiens
aattcctgtgactaa

SEQ ID NO: 648148 - DNA, 15 bp, Homo sapiens
attcctgtgactaaa

SEQ ID NO: 648149 - DNA, 15 bp, Homo sapiens
ttcctgtgactaaaa

SEQ ID NO: 648150 - DNA, 15 bp, Homo sapiens
tcctgtgactaaaaa

SEQ ID NO: 648151 - DNA, 15 bp, Homo sapiens
cctgtgactaaaaat

SEQ ID NO: 648152 - DNA, 15 bp, Homo sapiens
ctgtgactaaaaata

SEQ ID NO: 648153 - DNA, 15 bp, Homo sapiens
tgtgactaaaaataa

SEQ ID NO: 648154 - DNA, 15 bp, Homo sapiens
gtgactaaaaataaa

SEQ ID NO: 648155 - DNA, 15 bp, Homo sapiens
tgactaaaaataaaa

SEQ ID NO: 648156 - DNA, 15 bp, Homo sapiens
gactaaaaataaaat

SEQ ID NO: 648157 - DNA, 15 bp, Homo sapiens
actaaaaataaaata

SEQ ID NO: 648158 - DNA, 15 bp, Homo sapiens
ctaaaaataaaataa

SEQ ID NO: 648159 - DNA, 15 bp, Homo sapiens
taaaaataaaataaa

SEQ ID NO: 648160 - DNA, 15 bp, Homo sapiens
aaaaataaaataaaa

SEQ ID NO: 648161 - DNA, 15 bp, Homo sapiens
aaaataaaataaaag

SEQ ID NO: 648162 - DNA, 15 bp, Homo sapiens
aaataaaataaaaga

SEQ ID NO: 648163 - DNA, 15 bp, Homo sapiens
aataaaataaaagat

SEQ ID NO: 648164 - DNA, 15 bp, Homo sapiens
ataaaataaaagatt

SEQ ID NO: 648165 - DNA, 15 bp, Homo sapiens
taaaataaaagattt

SEQ ID NO: 648166 - DNA, 15 bp, Homo sapiens
aaaataaaagatttt

SEQ ID NO: 648167 - DNA, 15 bp, Homo sapiens
aaataaaagattttt

SEQ ID NO: 648168 - DNA, 15 bp, Homo sapiens
aataaaagatttttg

SEQ ID NO: 648169 - DNA, 15 bp, Homo sapiens
ataaaagatttttgc

SEQ ID NO: 648170 - DNA, 15 bp, Homo sapiens
taaaagatttttgcc

SEQ ID NO: 648171 - DNA, 15 bp, Homo sapiens
aaaagatttttgcca

SEQ ID NO: 648172 - DNA, 15 bp, Homo sapiens
aaagatttttgccag

SEQ ID NO: 648173 - DNA, 15 bp, Homo sapiens
aagatttttgccagt

SEQ ID NO: 648174 - DNA, 15 bp, Homo sapiens
agatttttgccagtt

SEQ ID NO: 648175 - DNA, 15 bp, Homo sapiens
gatttttgccagttt

SEQ ID NO: 648176 - DNA, 15 bp, Homo sapiens
atttttgccagtttg

SEQ ID NO: 648177 - DNA, 15 bp, Homo sapiens
tttttgccagtttga

SEQ ID NO: 648178 - DNA, 15 bp, Homo sapiens
ttttgccagtttgag

SEQ ID NO: 648179 - DNA, 15 bp, Homo sapiens
tttgccagtttgagc

SEQ ID NO: 648180 - DNA, 15 bp, Homo sapiens
ttgccagtttgagcc

SEQ ID NO: 648181 - DNA, 15 bp, Homo sapiens
tgccagtttgagccc

SEQ ID NO: 648182 - DNA, 15 bp, Homo sapiens
gccagtttgagccca

SEQ ID NO: 648183 - DNA, 15 bp, Homo sapiens
ccagtttgagcccag

SEQ ID NO: 648184 - DNA, 15 bp, Homo sapiens
cagtttgagcccagt

SEQ ID NO: 648185 - DNA, 15 bp, Homo sapiens
agtttgagcccagtg

SEQ ID NO: 648186 - DNA, 15 bp, Homo sapiens
gtttgagcccagtgc

SEQ ID NO: 648187 - DNA, 15 bp, Homo sapiens
tttgagcccagtgcc

SEQ ID NO: 648188 - DNA, 15 bp, Homo sapiens
ttgagcccagtgccc

SEQ ID NO: 648189 - DNA, 15 bp, Homo sapiens
tgagcccagtgccct

SEQ ID NO: 648190 - DNA, 15 bp, Homo sapiens
gagcccagtgcccta

SEQ ID NO: 648191 - DNA, 15 bp, Homo sapiens
agcccagtgccctat

SEQ ID NO: 648192 - DNA, 15 bp, Homo sapiens
gcccagtgccctata

SEQ ID NO: 648193 - DNA, 15 bp, Homo sapiens
cccagtgccctatac

SEQ ID NO: 648194 - DNA, 15 bp, Homo sapiens
ccagtgccctataca

SEQ ID NO: 648195 - DNA, 15 bp, Homo sapiens
cagtgccctatacac

SEQ ID NO: 648196 - DNA, 15 bp, Homo sapiens
agtgccctatacaca

SEQ ID NO: 648197 - DNA, 15 bp, Homo sapiens
gtgccctatacacag

SEQ ID NO: 648198 - DNA, 15 bp, Homo sapiens
tgccctatacacaga

SEQ ID NO: 648199 - DNA, 15 bp, Homo sapiens
gccctatacacagaa

SEQ ID NO: 648200 - DNA, 15 bp, Homo sapiens
ccctatacacagaag

SEQ ID NO: 648201 - DNA, 15 bp, Homo sapiens
cctatacacagaagg

SEQ ID NO: 648202 - DNA, 15 bp, Homo sapiens
ctatacacagaaggg

SEQ ID NO: 648203 - DNA, 15 bp, Homo sapiens
tatacacagaaggga

SEQ ID NO: 648204 - DNA, 15 bp, Homo sapiens
atacacagaagggat

SEQ ID NO: 648205 - DNA, 15 bp, Homo sapiens
tacacagaagggatt

SEQ ID NO: 648206 - DNA, 15 bp, Homo sapiens
acacagaagggattc

SEQ ID NO: 648207 - DNA, 15 bp, Homo sapiens
cacagaagggattct

SEQ ID NO: 648208 - DNA, 15 bp, Homo sapiens
acagaagggattctc

SEQ ID NO: 648209 - DNA, 15 bp, Homo sapiens
cagaagggattctca

SEQ ID NO: 648210 - DNA, 15 bp, Homo sapiens
agaagggattctcaa

SEQ ID NO: 648211 - DNA, 15 bp, Homo sapiens
gaagggattctcaac

SEQ ID NO: 648212 - DNA, 15 bp, Homo sapiens
aagggattctcaaca

SEQ ID NO: 648213 - DNA, 15 bp, Homo sapiens
agggattctcaacac

SEQ ID NO: 648214 - DNA, 15 bp, Homo sapiens
gggattctcaacacg

SEQ ID NO: 648215 - DNA, 15 bp, Homo sapiens
ggattctcaacacgt

SEQ ID NO: 648216 - DNA, 15 bp, Homo sapiens
gattctcaacacgtg

SEQ ID NO: 648217 - DNA, 15 bp, Homo sapiens
attctcaacacgtgt

SEQ ID NO: 648218 - DNA, 15 bp, Homo sapiens
ttctcaacacgtgtt

SEQ ID NO: 648219 - DNA, 15 bp, Homo sapiens
tctcaacacgtgttg

SEQ ID NO: 648220 - DNA, 15 bp, Homo sapiens
ctcaacacgtgttga

SEQ ID NO: 648221 - DNA, 15 bp, Homo sapiens
tcaacacgtgttgat

SEQ ID NO: 648222 - DNA, 15 bp, Homo sapiens
caacacgtgttgatt

SEQ ID NO: 648223 - DNA, 15 bp, Homo sapiens
aacacgtgttgattt

SEQ ID NO: 648224 - DNA, 15 bp, Homo sapiens
acacgtgttgatttg

SEQ ID NO: 648225 - DNA, 15 bp, Homo sapiens
cacgtgttgatttga

SEQ ID NO: 648226 - DNA, 15 bp, Homo sapiens
acgtgttgatttgat

SEQ ID NO: 648227 - DNA, 15 bp, Homo sapiens
cgtgttgatttgata

SEQ ID NO: 648228 - DNA, 15 bp, Homo sapiens
gtgttgatttgatat

SEQ ID NO: 648229 - DNA, 15 bp, Homo sapiens
tgttgatttgatatt

SEQ ID NO: 648230 - DNA, 15 bp, Homo sapiens
gttgatttgatattg

SEQ ID NO: 648231 - DNA, 15 bp, Homo sapiens
ttgatttgatattgg

SEQ ID NO: 648232 - DNA, 15 bp, Homo sapiens
tgatttgatattgga

SEQ ID NO: 648233 - DNA, 15 bp, Homo sapiens
gatttgatattggac

SEQ ID NO: 648234 - DNA, 15 bp, Homo sapiens
atttgatattggact

SEQ ID NO: 648235 - DNA, 15 bp, Homo sapiens
tttgatattggactt

SEQ ID NO: 648236 - DNA, 15 bp, Homo sapiens
ttgatattggacttg

SEQ ID NO: 648237 - DNA, 15 bp, Homo sapiens
tgatattggacttga

SEQ ID NO: 648238 - DNA, 15 bp, Homo sapiens
gatattggacttgag

SEQ ID NO: 648239 - DNA, 15 bp, Homo sapiens
atattggacttgagg

SEQ ID NO: 648240 - DNA, 15 bp, Homo sapiens
tattggacttgaggc

SEQ ID NO: 648241 - DNA, 15 bp, Homo sapiens
attggacttgaggcc

SEQ ID NO: 648242 - DNA, 15 bp, Homo sapiens
ttggacttgaggcca

SEQ ID NO: 648243 - DNA, 15 bp, Homo sapiens
tggacttgaggccag

SEQ ID NO: 648244 - DNA, 15 bp, Homo sapiens
ggacttgaggccagg

SEQ ID NO: 648245 - DNA, 15 bp, Homo sapiens
gacttgaggccaggg

SEQ ID NO: 648246 - DNA, 15 bp, Homo sapiens
acttgaggccaggga

SEQ ID NO: 648247 - DNA, 15 bp, Homo sapiens
cttgaggccagggac

SEQ ID NO: 648248 - DNA, 15 bp, Homo sapiens
ttgaggccagggact

SEQ ID NO: 648249 - DNA, 15 bp, Homo sapiens
tgaggccagggactt

SEQ ID NO: 648250 - DNA, 15 bp, Homo sapiens
gaggccagggacttt

SEQ ID NO: 648251 - DNA, 15 bp, Homo sapiens
aggccagggacttta

SEQ ID NO: 648252 - DNA, 15 bp, Homo sapiens
ggccagggactttag

SEQ ID NO: 648253 - DNA, 15 bp, Homo sapiens
gccagggactttaga

SEQ ID NO: 648254 - DNA, 15 bp, Homo sapiens
ccagggactttagaa

SEQ ID NO: 648255 - DNA, 15 bp, Homo sapiens
cagggactttagaat

SEQ ID NO: 648256 - DNA, 15 bp, Homo sapiens
agggactttagaata

SEQ ID NO: 648257 - DNA, 15 bp, Homo sapiens
gggactttagaatac

SEQ ID NO: 648258 - DNA, 15 bp, Homo sapiens
ggactttagaataca

SEQ ID NO: 648259 - DNA, 15 bp, Homo sapiens
gactttagaatacag

SEQ ID NO: 648260 - DNA, 15 bp, Homo sapiens
actttagaatacagg

SEQ ID NO: 648261 - DNA, 15 bp, Homo sapiens
ctttagaatacagga

SEQ ID NO: 648262 - DNA, 15 bp, Homo sapiens
tttagaatacaggag

SEQ ID NO: 648263 - DNA, 15 bp, Homo sapiens
ttagaatacaggagt

SEQ ID NO: 648264 - DNA, 15 bp, Homo sapiens
tagaatacaggagtg

SEQ ID NO: 648265 - DNA, 15 bp, Homo sapiens
agaatacaggagtgg

SEQ ID NO: 648266 - DNA, 15 bp, Homo sapiens
gaatacaggagtggt

SEQ ID NO: 648267 - DNA, 15 bp, Homo sapiens
aatacaggagtggtt

SEQ ID NO: 648268 - DNA, 15 bp, Homo sapiens
atacaggagtggttt

SEQ ID NO: 648269 - DNA, 15 bp, Homo sapiens
tacaggagtggtttc

SEQ ID NO: 648270 - DNA, 15 bp, Homo sapiens
acaggagtggtttct

SEQ ID NO: 648271 - DNA, 15 bp, Homo sapiens
caggagtggtttcta

SEQ ID NO: 648272 - DNA, 15 bp, Homo sapiens
aggagtggtttctat

SEQ ID NO: 648273 - DNA, 15 bp, Homo sapiens
ggagtggtttctatt

SEQ ID NO: 648274 - DNA, 15 bp, Homo sapiens
gagtggtttctattt

SEQ ID NO: 648275 - DNA, 15 bp, Homo sapiens
agtggtttctatttg

SEQ ID NO: 648276 - DNA, 15 bp, Homo sapiens
gtggtttctatttga

SEQ ID NO: 648277 - DNA, 15 bp, Homo sapiens
tggtttctatttgag

SEQ ID NO: 648278 - DNA, 15 bp, Homo sapiens
ggtttctatttgagc

SEQ ID NO: 648279 - DNA, 15 bp, Homo sapiens
gtttctatttgagcc

SEQ ID NO: 648280 - DNA, 15 bp, Homo sapiens
tttctatttgagcca

SEQ ID NO: 648281 - DNA, 15 bp, Homo sapiens
ttctatttgagccaa

SEQ ID NO: 648282 - DNA, 15 bp, Homo sapiens
tctatttgagccaat

SEQ ID NO: 648283 - DNA, 15 bp, Homo sapiens
ctatttgagccaatt

SEQ ID NO: 648284 - DNA, 15 bp, Homo sapiens
tatttgagccaattt

SEQ ID NO: 648285 - DNA, 15 bp, Homo sapiens
atttgagccaatttc

SEQ ID NO: 648286 - DNA, 15 bp, Homo sapiens
tttgagccaatttca

SEQ ID NO: 648287 - DNA, 15 bp, Homo sapiens
ttgagccaatttcat

SEQ ID NO: 648288 - DNA, 15 bp, Homo sapiens
tgagccaatttcatt

SEQ ID NO: 648289 - DNA, 15 bp, Homo sapiens
gagccaatttcattc

SEQ ID NO: 648290 - DNA, 15 bp, Homo sapiens
agccaatttcattct

SEQ ID NO: 648291 - DNA, 15 bp, Homo sapiens
gccaatttcattctt

SEQ ID NO: 648292 - DNA, 15 bp, Homo sapiens
ccaatttcattcttc

SEQ ID NO: 648293 - DNA, 15 bp, Homo sapiens
caatttcattcttcg

SEQ ID NO: 648294 - DNA, 15 bp, Homo sapiens
aatttcattcttcga

SEQ ID NO: 648295 - DNA, 15 bp, Homo sapiens
atttcattcttcgat

SEQ ID NO: 648296 - DNA, 15 bp, Homo sapiens
tttcattcttcgatt

SEQ ID NO: 648297 - DNA, 15 bp, Homo sapiens
ttcattcttcgattc

SEQ ID NO: 648298 - DNA, 15 bp, Homo sapiens
tcattcttcgattct

SEQ ID NO: 648299 - DNA, 15 bp, Homo sapiens
cattcttcgattctc

SEQ ID NO: 648300 - DNA, 15 bp, Homo sapiens
attcttcgattctca

SEQ ID NO: 648301 - DNA, 15 bp, Homo sapiens
ttcttcgattctcat

SEQ ID NO: 648302 - DNA, 15 bp, Homo sapiens
tcttcgattctcata

SEQ ID NO: 648303 - DNA, 15 bp, Homo sapiens
cttcgattctcatat

SEQ ID NO: 648304 - DNA, 15 bp, Homo sapiens
ttcgattctcatatt

SEQ ID NO: 648305 - DNA, 15 bp, Homo sapiens
tcgattctcatattt

SEQ ID NO: 648306 - DNA, 15 bp, Homo sapiens
cgattctcatatttt

SEQ ID NO: 648307 - DNA, 15 bp, Homo sapiens
gattctcatattttt

SEQ ID NO: 648308 - DNA, 15 bp, Homo sapiens
attctcatatttttt

SEQ ID NO: 648309 - DNA, 15 bp, Homo sapiens
ttctcatattttttt

SEQ ID NO: 648310 - DNA, 15 bp, Homo sapiens
tctcatatttttttc

SEQ ID NO: 648311 - DNA, 15 bp, Homo sapiens
ctcatatttttttct

SEQ ID NO: 648312 - DNA, 15 bp, Homo sapiens
tcatatttttttctg

SEQ ID NO: 648313 - DNA, 15 bp, Homo sapiens
catatttttttctgt

SEQ ID NO: 648314 - DNA, 15 bp, Homo sapiens
atatttttttctgtt

SEQ ID NO: 648315 - DNA, 15 bp, Homo sapiens
tatttttttctgttt

SEQ ID NO: 648316 - DNA, 15 bp, Homo sapiens
atttttttctgtttc

SEQ ID NO: 648317 - DNA, 15 bp, Homo sapiens
tttttttctgtttct

SEQ ID NO: 648318 - DNA, 15 bp, Homo sapiens
ttttttctgtttctg

SEQ ID NO: 648319 - DNA, 15 bp, Homo sapiens
tttttctgtttctgt

SEQ ID NO: 648320 - DNA, 15 bp, Homo sapiens
ttttctgtttctgtt

SEQ ID NO: 648321 - DNA, 15 bp, Homo sapiens
tttctgtttctgtta

SEQ ID NO: 648322 - DNA, 15 bp, Homo sapiens
ttctgtttctgttat

SEQ ID NO: 648323 - DNA, 15 bp, Homo sapiens
tctgtttctgttatt

SEQ ID NO: 648324 - DNA, 15 bp, Homo sapiens
ctgtttctgttattt

SEQ ID NO: 648325 - DNA, 15 bp, Homo sapiens
tgtttctgttatttt

SEQ ID NO: 648326 - DNA, 15 bp, Homo sapiens
gtttctgttattttc

SEQ ID NO: 648327 - DNA, 15 bp, Homo sapiens
tttctgttattttct

SEQ ID NO: 648328 - DNA, 15 bp, Homo sapiens
ttctgttattttctt

SEQ ID NO: 648329 - DNA, 15 bp, Homo sapiens
tctgttattttcttc

SEQ ID NO: 648330 - DNA, 15 bp, Homo sapiens
ctgttattttcttct

SEQ ID NO: 648331 - DNA, 15 bp, Homo sapiens
tgttattttcttcta

SEQ ID NO: 648332 - DNA, 15 bp, Homo sapiens
gttattttcttctat

SEQ ID NO: 648333 - DNA, 15 bp, Homo sapiens
ttattttcttctatt

SEQ ID NO: 648334 - DNA, 15 bp, Homo sapiens
tattttcttctattt

SEQ ID NO: 648335 - DNA, 15 bp, Homo sapiens
attttcttctatttg

SEQ ID NO: 648336 - DNA, 15 bp, Homo sapiens
ttttcttctatttgt

SEQ ID NO: 648337 - DNA, 15 bp, Homo sapiens
tttcttctatttgtg

SEQ ID NO: 648338 - DNA, 15 bp, Homo sapiens
ttcttctatttgtgg

SEQ ID NO: 648339 - DNA, 15 bp, Homo sapiens
tcttctatttgtggt

SEQ ID NO: 648340 - DNA, 15 bp, Homo sapiens
cttctatttgtggtt

SEQ ID NO: 648341 - DNA, 15 bp, Homo sapiens
ttctatttgtggttg

SEQ ID NO: 648342 - DNA, 15 bp, Homo sapiens
tctatttgtggttgt

SEQ ID NO: 648343 - DNA, 15 bp, Homo sapiens
ctatttgtggttgtg

SEQ ID NO: 648344 - DNA, 15 bp, Homo sapiens
tatttgtggttgtgt

SEQ ID NO: 648345 - DNA, 15 bp, Homo sapiens
atttgtggttgtgtc

SEQ ID NO: 648346 - DNA, 15 bp, Homo sapiens
tttgtggttgtgtca

SEQ ID NO: 648347 - DNA, 15 bp, Homo sapiens
ttgtggttgtgtcaa

SEQ ID NO: 648348 - DNA, 15 bp, Homo sapiens
tgtggttgtgtcaac

SEQ ID NO: 648349 - DNA, 15 bp, Homo sapiens
gtggttgtgtcaact

SEQ ID NO: 648350 - DNA, 15 bp, Homo sapiens
tggttgtgtcaactg

SEQ ID NO: 648351 - DNA, 15 bp, Homo sapiens
ggttgtgtcaactgc

SEQ ID NO: 648352 - DNA, 15 bp, Homo sapiens
gttgtgtcaactgct

SEQ ID NO: 648353 - DNA, 15 bp, Homo sapiens
ttgtgtcaactgctg

SEQ ID NO: 648354 - DNA, 15 bp, Homo sapiens
tgtgtcaactgctga

SEQ ID NO: 648355 - DNA, 15 bp, Homo sapiens
gtgtcaactgctgat

SEQ ID NO: 648356 - DNA, 15 bp, Homo sapiens
tgtcaactgctgata

SEQ ID NO: 648357 - DNA, 15 bp, Homo sapiens
gtcaactgctgatat

SEQ ID NO: 648358 - DNA, 15 bp, Homo sapiens
tcaactgctgatatg

SEQ ID NO: 648359 - DNA, 15 bp, Homo sapiens
caactgctgatatgc

SEQ ID NO: 648360 - DNA, 15 bp, Homo sapiens
aactgctgatatgcc

SEQ ID NO: 648361 - DNA, 15 bp, Homo sapiens
actgctgatatgccc

SEQ ID NO: 648362 - DNA, 15 bp, Homo sapiens
ctgctgatatgcccc

SEQ ID NO: 648363 - DNA, 15 bp, Homo sapiens
tgctgatatgcccca

SEQ ID NO: 648364 - DNA, 15 bp, Homo sapiens
gctgatatgccccag

SEQ ID NO: 648365 - DNA, 15 bp, Homo sapiens
ctgatatgccccagg

SEQ ID NO: 648366 - DNA, 15 bp, Homo sapiens
tgatatgccccaggt

SEQ ID NO: 648367 - DNA, 15 bp, Homo sapiens
gatatgccccaggta

SEQ ID NO: 648368 - DNA, 15 bp, Homo sapiens
atatgccccaggtaa

SEQ ID NO: 648369 - DNA, 15 bp, Homo sapiens
tatgccccaggtaag

SEQ ID NO: 648370 - DNA, 15 bp, Homo sapiens
atgccccaggtaagg

SEQ ID NO: 648371 - DNA, 15 bp, Homo sapiens
tgccccaggtaagga

SEQ ID NO: 648372 - DNA, 15 bp, Homo sapiens
gccccaggtaaggaa

SEQ ID NO: 648373 - DNA, 15 bp, Homo sapiens
ccccaggtaaggaat

SEQ ID NO: 648374 - DNA, 15 bp, Homo sapiens
cccaggtaaggaatc

SEQ ID NO: 648375 - DNA, 15 bp, Homo sapiens
ccaggtaaggaatca

SEQ ID NO: 648376 - DNA, 15 bp, Homo sapiens
caggtaaggaatcag

SEQ ID NO: 648377 - DNA, 15 bp, Homo sapiens
aggtaaggaatcagt

SEQ ID NO: 648378 - DNA, 15 bp, Homo sapiens
ggtaaggaatcagtc

SEQ ID NO: 648379 - DNA, 15 bp, Homo sapiens
gtaaggaatcagtct

SEQ ID NO: 648380 - DNA, 15 bp, Homo sapiens
taaggaatcagtctc

SEQ ID NO: 648381 - DNA, 15 bp, Homo sapiens
aaggaatcagtctct

SEQ ID NO: 648382 - DNA, 15 bp, Homo sapiens
aggaatcagtctctc

SEQ ID NO: 648383 - DNA, 15 bp, Homo sapiens
ggaatcagtctctct

SEQ ID NO: 648384 - DNA, 15 bp, Homo sapiens
gaatcagtctctctc

SEQ ID NO: 648385 - DNA, 15 bp, Homo sapiens
aatcagtctctctct

SEQ ID NO: 648386 - DNA, 15 bp, Homo sapiens
atcagtctctctctc

SEQ ID NO: 648387 - DNA, 15 bp, Homo sapiens
tcagtctctctctct

SEQ ID NO: 648388 - DNA, 15 bp, Homo sapiens
cagtctctctctctc

SEQ ID NO: 648389 - DNA, 15 bp, Homo sapiens
agtctctctctctct

SEQ ID NO: 648390 - DNA, 15 bp, Homo sapiens
gtctctctctctctc

SEQ ID NO: 648391 - DNA, 15 bp, Homo sapiens
tctctctctctctct

SEQ ID NO: 648392 - DNA, 15 bp, Homo sapiens
ctctctctctctctc

SEQ ID NO: 648393 - DNA, 15 bp, Homo sapiens
tctctctctctctca

SEQ ID NO: 648394 - DNA, 15 bp, Homo sapiens
ctctctctctctcat

SEQ ID NO: 648395 - DNA, 15 bp, Homo sapiens
tctctctctctcata

SEQ ID NO: 648396 - DNA, 15 bp, Homo sapiens
ctctctctctcatat

SEQ ID NO: 648397 - DNA, 15 bp, Homo sapiens
tctctctctcatatt

SEQ ID NO: 648398 - DNA, 15 bp, Homo sapiens
ctctctctcatattg

SEQ ID NO: 648399 - DNA, 15 bp, Homo sapiens
tctctctcatattga

SEQ ID NO: 648400 - DNA, 15 bp, Homo sapiens
ctctctcatattgag

SEQ ID NO: 648401 - DNA, 15 bp, Homo sapiens
tctctcatattgagg

SEQ ID NO: 648402 - DNA, 15 bp, Homo sapiens
ctctcatattgagga

SEQ ID NO: 648403 - DNA, 15 bp, Homo sapiens
tctcatattgaggaa

SEQ ID NO: 648404 - DNA, 15 bp, Homo sapiens
ctcatattgaggaaa

SEQ ID NO: 648405 - DNA, 15 bp, Homo sapiens
tcatattgaggaaac

SEQ ID NO: 648406 - DNA, 15 bp, Homo sapiens
catattgaggaaaca

SEQ ID NO: 648407 - DNA, 15 bp, Homo sapiens
atattgaggaaacaa

SEQ ID NO: 648408 - DNA, 15 bp, Homo sapiens
tattgaggaaacaaa

SEQ ID NO: 648409 - DNA, 15 bp, Homo sapiens
attgaggaaacaaaa

SEQ ID NO: 648410 - DNA, 15 bp, Homo sapiens
ttgaggaaacaaaac

SEQ ID NO: 648411 - DNA, 15 bp, Homo sapiens
tgaggaaacaaaaca

SEQ ID NO: 648412 - DNA, 15 bp, Homo sapiens
gaggaaacaaaacaa

SEQ ID NO: 648413 - DNA, 15 bp, Homo sapiens
aggaaacaaaacaaa

SEQ ID NO: 648414 - DNA, 15 bp, Homo sapiens
ggaaacaaaacaaaa

SEQ ID NO: 648415 - DNA, 15 bp, Homo sapiens
gaaacaaaacaaaaa

SEQ ID NO: 648416 - DNA, 15 bp, Homo sapiens
aaacaaaacaaaaac

SEQ ID NO: 648417 - DNA, 15 bp, Homo sapiens
aacaaaacaaaaaca

SEQ ID NO: 648418 - DNA, 15 bp, Homo sapiens
acaaaacaaaaacaa

SEQ ID NO: 648419 - DNA, 15 bp, Homo sapiens
caaaacaaaaacaaa

SEQ ID NO: 648420 - DNA, 15 bp, Homo sapiens
aaaacaaaaacaaaa

SEQ ID NO: 648421 - DNA, 15 bp, Homo sapiens
aaacaaaaacaaaac

SEQ ID NO: 648422 - DNA, 15 bp, Homo sapiens
aacaaaaacaaaacc

SEQ ID NO: 648423 - DNA, 15 bp, Homo sapiens
acaaaaacaaaaccc

SEQ ID NO: 648424 - DNA, 15 bp, Homo sapiens
caaaaacaaaaccct

SEQ ID NO: 648425 - DNA, 15 bp, Homo sapiens
aaaaacaaaaccctg

SEQ ID NO: 648426 - DNA, 15 bp, Homo sapiens
aaaacaaaaccctgt

SEQ ID NO: 648427 - DNA, 15 bp, Homo sapiens
aaacaaaaccctgtg

SEQ ID NO: 648428 - DNA, 15 bp, Homo sapiens
aacaaaaccctgtga

SEQ ID NO: 648429 - DNA, 15 bp, Homo sapiens
acaaaaccctgtgat

SEQ ID NO: 648430 - DNA, 15 bp, Homo sapiens
caaaaccctgtgatg

SEQ ID NO: 648431 - DNA, 15 bp, Homo sapiens
aaaaccctgtgatga

SEQ ID NO: 648432 - DNA, 15 bp, Homo sapiens
aaaccctgtgatgat

SEQ ID NO: 648433 - DNA, 15 bp, Homo sapiens
aaccctgtgatgata

SEQ ID NO: 648434 - DNA, 15 bp, Homo sapiens
accctgtgatgatat

SEQ ID NO: 648435 - DNA, 15 bp, Homo sapiens
ccctgtgatgatata

SEQ ID NO: 648436 - DNA, 15 bp, Homo sapiens
cctgtgatgatatat

SEQ ID NO: 648437 - DNA, 15 bp, Homo sapiens
ctgtgatgatatata

SEQ ID NO: 648438 - DNA, 15 bp, Homo sapiens
tgtgatgatatatag

SEQ ID NO: 648439 - DNA, 15 bp, Homo sapiens
gtgatgatatatagt

SEQ ID NO: 648440 - DNA, 15 bp, Homo sapiens
tgatgatatatagta

SEQ ID NO: 648441 - DNA, 15 bp, Homo sapiens
gatgatatatagtat

SEQ ID NO: 648442 - DNA, 15 bp, Homo sapiens
atgatatatagtatt

SEQ ID NO: 648443 - DNA, 15 bp, Homo sapiens
tgatatatagtattg

SEQ ID NO: 648444 - DNA, 15 bp, Homo sapiens
gatatatagtattgt

SEQ ID NO: 648445 - DNA, 15 bp, Homo sapiens
atatatagtattgtc

SEQ ID NO: 648446 - DNA, 15 bp, Homo sapiens
tatatagtattgtca

SEQ ID NO: 648447 - DNA, 15 bp, Homo sapiens
atatagtattgtcaa

SEQ ID NO: 648448 - DNA, 15 bp, Homo sapiens
tatagtattgtcaaa

SEQ ID NO: 648449 - DNA, 15 bp, Homo sapiens
atagtattgtcaaaa

SEQ ID NO: 648450 - DNA, 15 bp, Homo sapiens
tagtattgtcaaaag

SEQ ID NO: 648451 - DNA, 15 bp, Homo sapiens
agtattgtcaaaagc

SEQ ID NO: 648452 - DNA, 15 bp, Homo sapiens
gtattgtcaaaagcc

SEQ ID NO: 648453 - DNA, 15 bp, Homo sapiens
tattgtcaaaagcca

SEQ ID NO: 648454 - DNA, 15 bp, Homo sapiens
attgtcaaaagccat

SEQ ID NO: 648455 - DNA, 15 bp, Homo sapiens
ttgtcaaaagccatt

SEQ ID NO: 648456 - DNA, 15 bp, Homo sapiens
tgtcaaaagccattt

SEQ ID NO: 648457 - DNA, 15 bp, Homo sapiens
gtcaaaagccatttt

SEQ ID NO: 648458 - DNA, 15 bp, Homo sapiens
tcaaaagccattttt

SEQ ID NO: 648459 - DNA, 15 bp, Homo sapiens
caaaagccatttttt

SEQ ID NO: 648460 - DNA, 15 bp, Homo sapiens
aaaagccattttttg

SEQ ID NO: 648461 - DNA, 15 bp, Homo sapiens
aaagccattttttgg

SEQ ID NO: 648462 - DNA, 15 bp, Homo sapiens
aagccattttttggc

SEQ ID NO: 648463 - DNA, 15 bp, Homo sapiens
agccattttttggcc

SEQ ID NO: 648464 - DNA, 15 bp, Homo sapiens
gccattttttggcca

SEQ ID NO: 648465 - DNA, 15 bp, Homo sapiens
ccattttttggccat

SEQ ID NO: 648466 - DNA, 15 bp, Homo sapiens
cattttttggccata

SEQ ID NO: 648467 - DNA, 15 bp, Homo sapiens
attttttggccatag

SEQ ID NO: 648468 - DNA, 15 bp, Homo sapiens
ttttttggccatagt

SEQ ID NO: 648469 - DNA, 15 bp, Homo sapiens
tttttggccatagta

SEQ ID NO: 648470 - DNA, 15 bp, Homo sapiens
ttttggccatagtaa

SEQ ID NO: 648471 - DNA, 15 bp, Homo sapiens
tttggccatagtaaa

SEQ ID NO: 648472 - DNA, 15 bp, Homo sapiens
ttggccatagtaaat

SEQ ID NO: 648473 - DNA, 15 bp, Homo sapiens
tggccatagtaaatt

SEQ ID NO: 648474 - DNA, 15 bp, Homo sapiens
ggccatagtaaatta

SEQ ID NO: 648475 - DNA, 15 bp, Homo sapiens
gccatagtaaattat

SEQ ID NO: 648476 - DNA, 15 bp, Homo sapiens
ccatagtaaattatt

SEQ ID NO: 648477 - DNA, 15 bp, Homo sapiens
catagtaaattattt

SEQ ID NO: 648478 - DNA, 15 bp, Homo sapiens
atagtaaattatttt

SEQ ID NO: 648479 - DNA, 15 bp, Homo sapiens
tagtaaattattttt

SEQ ID NO: 648480 - DNA, 15 bp, Homo sapiens
agtaaattattttta

SEQ ID NO: 648481 - DNA, 15 bp, Homo sapiens
gtaaattatttttag

SEQ ID NO: 648482 - DNA, 15 bp, Homo sapiens
taaattatttttagt

SEQ ID NO: 648483 - DNA, 15 bp, Homo sapiens
aaattatttttagtc

SEQ ID NO: 648484 - DNA, 15 bp, Homo sapiens
aattatttttagtca

SEQ ID NO: 648485 - DNA, 15 bp, Homo sapiens
attatttttagtcaa

SEQ ID NO: 648486 - DNA, 15 bp, Homo sapiens
ttatttttagtcaaa

SEQ ID NO: 648487 - DNA, 15 bp, Homo sapiens
tatttttagtcaaaa

SEQ ID NO: 648488 - DNA, 15 bp, Homo sapiens
atttttagtcaaaaa

SEQ ID NO: 648489 - DNA, 15 bp, Homo sapiens
tttttagtcaaaaat

SEQ ID NO: 648490 - DNA, 15 bp, Homo sapiens
ttttagtcaaaaata

SEQ ID NO: 648491 - DNA, 15 bp, Homo sapiens
tttagtcaaaaatag

SEQ ID NO: 648492 - DNA, 15 bp, Homo sapiens
ttagtcaaaaatagg

SEQ ID NO: 648493 - DNA, 15 bp, Homo sapiens
tagtcaaaaataggg

SEQ ID NO: 648494 - DNA, 15 bp, Homo sapiens
agtcaaaaataggga

SEQ ID NO: 648495 - DNA, 15 bp, Homo sapiens
gtcaaaaatagggaa

SEQ ID NO: 648496 - DNA, 15 bp, Homo sapiens
tcaaaaatagggaat

SEQ ID NO: 648497 - DNA, 15 bp, Homo sapiens
caaaaatagggaatg

SEQ ID NO: 648498 - DNA, 15 bp, Homo sapiens
aaaaatagggaatga

SEQ ID NO: 648499 - DNA, 15 bp, Homo sapiens
aaaatagggaatgat

SEQ ID NO: 648500 - DNA, 15 bp, Homo sapiens
aaatagggaatgatg

SEQ ID NO: 648501 - DNA, 15 bp, Homo sapiens
aatagggaatgatgt

SEQ ID NO: 648502 - DNA, 15 bp, Homo sapiens
atagggaatgatgtt

SEQ ID NO: 648503 - DNA, 15 bp, Homo sapiens
tagggaatgatgttt

SEQ ID NO: 648504 - DNA, 15 bp, Homo sapiens
agggaatgatgtttt

SEQ ID NO: 648505 - DNA, 15 bp, Homo sapiens
gggaatgatgttttg

SEQ ID NO: 648506 - DNA, 15 bp, Homo sapiens
ggaatgatgttttgg

SEQ ID NO: 648507 - DNA, 15 bp, Homo sapiens
gaatgatgttttggt

SEQ ID NO: 648508 - DNA, 15 bp, Homo sapiens
aatgatgttttggtt

SEQ ID NO: 648509 - DNA, 15 bp, Homo sapiens
atgatgttttggtta

SEQ ID NO: 648510 - DNA, 15 bp, Homo sapiens
tgatgttttggttaa

SEQ ID NO: 648511 - DNA, 15 bp, Homo sapiens
gatgttttggttaaa

SEQ ID NO: 648512 - DNA, 15 bp, Homo sapiens
atgttttggttaaaa

SEQ ID NO: 648513 - DNA, 15 bp, Homo sapiens
tgttttggttaaaaa

SEQ ID NO: 648514 - DNA, 15 bp, Homo sapiens
gttttggttaaaaat

SEQ ID NO: 648515 - DNA, 15 bp, Homo sapiens
ttttggttaaaaata

SEQ ID NO: 648516 - DNA, 15 bp, Homo sapiens
tttggttaaaaatat

SEQ ID NO: 648517 - DNA, 15 bp, Homo sapiens
ttggttaaaaatatt

SEQ ID NO: 648518 - DNA, 15 bp, Homo sapiens
tggttaaaaatattc

SEQ ID NO: 648519 - DNA, 15 bp, Homo sapiens
ggttaaaaatattct

SEQ ID NO: 648520 - DNA, 15 bp, Homo sapiens
gttaaaaatattctg

SEQ ID NO: 648521 - DNA, 15 bp, Homo sapiens
ttaaaaatattctgc

SEQ ID NO: 648522 - DNA, 15 bp, Homo sapiens
taaaaatattctgct

SEQ ID NO: 648523 - DNA, 15 bp, Homo sapiens
aaaaatattctgctc

SEQ ID NO: 648524 - DNA, 15 bp, Homo sapiens
aaaatattctgctca

SEQ ID NO: 648525 - DNA, 15 bp, Homo sapiens
aaatattctgctcaa

SEQ ID NO: 648526 - DNA, 15 bp, Homo sapiens
aatattctgctcaat

SEQ ID NO: 648527 - DNA, 15 bp, Homo sapiens
atattctgctcaata

SEQ ID NO: 648528 - DNA, 15 bp, Homo sapiens
tattctgctcaataa

SEQ ID NO: 648529 - DNA, 15 bp, Homo sapiens
attctgctcaataat

SEQ ID NO: 648530 - DNA, 15 bp, Homo sapiens
ttctgctcaataatg

SEQ ID NO: 648531 - DNA, 15 bp, Homo sapiens
tctgctcaataatga

SEQ ID NO: 648532 - DNA, 15 bp, Homo sapiens
ctgctcaataatgaa

SEQ ID NO: 648533 - DNA, 15 bp, Homo sapiens
tgctcaataatgaat

SEQ ID NO: 648534 - DNA, 15 bp, Homo sapiens
gctcaataatgaatg

SEQ ID NO: 648535 - DNA, 15 bp, Homo sapiens
ctcaataatgaatgc

SEQ ID NO: 648536 - DNA, 15 bp, Homo sapiens
tcaataatgaatgca

SEQ ID NO: 648537 - DNA, 15 bp, Homo sapiens
caataatgaatgcat

SEQ ID NO: 648538 - DNA, 15 bp, Homo sapiens
aataatgaatgcata

SEQ ID NO: 648539 - DNA, 15 bp, Homo sapiens
ataatgaatgcatat

SEQ ID NO: 648540 - DNA, 15 bp, Homo sapiens
taatgaatgcatata

SEQ ID NO: 648541 - DNA, 15 bp, Homo sapiens
aatgaatgcatatac

SEQ ID NO: 648542 - DNA, 15 bp, Homo sapiens
atgaatgcatatacc

SEQ ID NO: 648543 - DNA, 15 bp, Homo sapiens
tgaatgcatatacca

SEQ ID NO: 648544 - DNA, 15 bp, Homo sapiens
gaatgcatataccat

SEQ ID NO: 648545 - DNA, 15 bp, Homo sapiens
aatgcatataccatc

SEQ ID NO: 648546 - DNA, 15 bp, Homo sapiens
atgcatataccatct

SEQ ID NO: 648547 - DNA, 15 bp, Homo sapiens
tgcatataccatcta

SEQ ID NO: 648548 - DNA, 15 bp, Homo sapiens
gcatataccatctat

SEQ ID NO: 648549 - DNA, 15 bp, Homo sapiens
catataccatctatg

SEQ ID NO: 648550 - DNA, 15 bp, Homo sapiens
atataccatctatgg

SEQ ID NO: 648551 - DNA, 15 bp, Homo sapiens
tataccatctatgga

SEQ ID NO: 648552 - DNA, 15 bp, Homo sapiens
ataccatctatggat

SEQ ID NO: 648553 - DNA, 15 bp, Homo sapiens
taccatctatggatg

SEQ ID NO: 648554 - DNA, 15 bp, Homo sapiens
accatctatggatgg

SEQ ID NO: 648555 - DNA, 15 bp, Homo sapiens
ccatctatggatggc

SEQ ID NO: 648556 - DNA, 15 bp, Homo sapiens
catctatggatggcc

SEQ ID NO: 648557 - DNA, 15 bp, Homo sapiens
atctatggatggcca

SEQ ID NO: 648558 - DNA, 15 bp, Homo sapiens
tctatggatggccaa

SEQ ID NO: 648559 - DNA, 15 bp, Homo sapiens
ctatggatggccaat

SEQ ID NO: 648560 - DNA, 15 bp, Homo sapiens
tatggatggccaata

SEQ ID NO: 648561 - DNA, 15 bp, Homo sapiens
atggatggccaatat

SEQ ID NO: 648562 - DNA, 15 bp, Homo sapiens
tggatggccaatatt

SEQ ID NO: 648563 - DNA, 15 bp, Homo sapiens
ggatggccaatattg

SEQ ID NO: 648564 - DNA, 15 bp, Homo sapiens
gatggccaatattga

SEQ ID NO: 648565 - DNA, 15 bp, Homo sapiens
atggccaatattgag

SEQ ID NO: 648566 - DNA, 15 bp, Homo sapiens
tggccaatattgaga

SEQ ID NO: 648567 - DNA, 15 bp, Homo sapiens
ggccaatattgagag

SEQ ID NO: 648568 - DNA, 15 bp, Homo sapiens
gccaatattgagaga

SEQ ID NO: 648569 - DNA, 15 bp, Homo sapiens
ccaatattgagagaa

SEQ ID NO: 648570 - DNA, 15 bp, Homo sapiens
caatattgagagaat

SEQ ID NO: 648571 - DNA, 15 bp, Homo sapiens
aatattgagagaatt

SEQ ID NO: 648572 - DNA, 15 bp, Homo sapiens
atattgagagaattt

SEQ ID NO: 648573 - DNA, 15 bp, Homo sapiens
tattgagagaattta

SEQ ID NO: 648574 - DNA, 15 bp, Homo sapiens
attgagagaatttaa

SEQ ID NO: 648575 - DNA, 15 bp, Homo sapiens
ttgagagaatttaaa

SEQ ID NO: 648576 - DNA, 15 bp, Homo sapiens
tgagagaatttaaat

SEQ ID NO: 648577 - DNA, 15 bp, Homo sapiens
gagagaatttaaatt

SEQ ID NO: 648578 - DNA, 15 bp, Homo sapiens
agagaatttaaatta

SEQ ID NO: 648579 - DNA, 15 bp, Homo sapiens
gagaatttaaattaa

SEQ ID NO: 648580 - DNA, 15 bp, Homo sapiens
agaatttaaattaac

SEQ ID NO: 648581 - DNA, 15 bp, Homo sapiens
gaatttaaattaaca

SEQ ID NO: 648582 - DNA, 15 bp, Homo sapiens
aatttaaattaacaa

SEQ ID NO: 648583 - DNA, 15 bp, Homo sapiens
atttaaattaacaaa

SEQ ID NO: 648584 - DNA, 15 bp, Homo sapiens
tttaaattaacaaaa

SEQ ID NO: 648585 - DNA, 15 bp, Homo sapiens
ttaaattaacaaaac

SEQ ID NO: 648586 - DNA, 15 bp, Homo sapiens
taaattaacaaaact

SEQ ID NO: 648587 - DNA, 15 bp, Homo sapiens
aaattaacaaaactt

SEQ ID NO: 648588 - DNA, 15 bp, Homo sapiens
aattaacaaaactta

SEQ ID NO: 648589 - DNA, 15 bp, Homo sapiens
attaacaaaacttat

SEQ ID NO: 648590 - DNA, 15 bp, Homo sapiens
ttaacaaaacttatt

SEQ ID NO: 648591 - DNA, 15 bp, Homo sapiens
taacaaaacttattt

SEQ ID NO: 648592 - DNA, 15 bp, Homo sapiens
aacaaaacttatttg

SEQ ID NO: 648593 - DNA, 15 bp, Homo sapiens
acaaaacttatttgg

SEQ ID NO: 648594 - DNA, 15 bp, Homo sapiens
caaaacttatttggc

SEQ ID NO: 648595 - DNA, 15 bp, Homo sapiens
aaaacttatttggcc

SEQ ID NO: 648596 - DNA, 15 bp, Homo sapiens
aaacttatttggccc

SEQ ID NO: 648597 - DNA, 15 bp, Homo sapiens
aacttatttggcccc

SEQ ID NO: 648598 - DNA, 15 bp, Homo sapiens
acttatttggcccca

SEQ ID NO: 648599 - DNA, 15 bp, Homo sapiens
cttatttggccccaa

SEQ ID NO: 648600 - DNA, 15 bp, Homo sapiens
ttatttggccccaaa

SEQ ID NO: 648601 - DNA, 15 bp, Homo sapiens
tatttggccccaaat

SEQ ID NO: 648602 - DNA, 15 bp, Homo sapiens
atttggccccaaatc

SEQ ID NO: 648603 - DNA, 15 bp, Homo sapiens
tttggccccaaatct

SEQ ID NO: 648604 - DNA, 15 bp, Homo sapiens
ttggccccaaatctg

SEQ ID NO: 648605 - DNA, 15 bp, Homo sapiens
tggccccaaatctgt

SEQ ID NO: 648606 - DNA, 15 bp, Homo sapiens
ggccccaaatctgta

SEQ ID NO: 648607 - DNA, 15 bp, Homo sapiens
gccccaaatctgtac

SEQ ID NO: 648608 - DNA, 15 bp, Homo sapiens
ccccaaatctgtact

SEQ ID NO: 648609 - DNA, 15 bp, Homo sapiens
cccaaatctgtactg

SEQ ID NO: 648610 - DNA, 15 bp, Homo sapiens
ccaaatctgtactga

SEQ ID NO: 648611 - DNA, 15 bp, Homo sapiens
caaatctgtactgag

SEQ ID NO: 648612 - DNA, 15 bp, Homo sapiens
aaatctgtactgagc

SEQ ID NO: 648613 - DNA, 15 bp, Homo sapiens
aatctgtactgagca

SEQ ID NO: 648614 - DNA, 15 bp, Homo sapiens
atctgtactgagcac

SEQ ID NO: 648615 - DNA, 15 bp, Homo sapiens
tctgtactgagcaca

SEQ ID NO: 648616 - DNA, 15 bp, Homo sapiens
ctgtactgagcacaa

SEQ ID NO: 648617 - DNA, 15 bp, Homo sapiens
tgtactgagcacaat

SEQ ID NO: 648618 - DNA, 15 bp, Homo sapiens
gtactgagcacaatt

SEQ ID NO: 648619 - DNA, 15 bp, Homo sapiens
tactgagcacaattt

SEQ ID NO: 648620 - DNA, 15 bp, Homo sapiens
actgagcacaattta

SEQ ID NO: 648621 - DNA, 15 bp, Homo sapiens
ctgagcacaatttaa

SEQ ID NO: 648622 - DNA, 15 bp, Homo sapiens
tgagcacaatttaac

SEQ ID NO: 648623 - DNA, 15 bp, Homo sapiens
gagcacaatttaacc

SEQ ID NO: 648624 - DNA, 15 bp, Homo sapiens
agcacaatttaacct

SEQ ID NO: 648625 - DNA, 15 bp, Homo sapiens
gcacaatttaacctt

SEQ ID NO: 648626 - DNA, 15 bp, Homo sapiens
cacaatttaaccttt

SEQ ID NO: 648627 - DNA, 15 bp, Homo sapiens
acaatttaacctttg

SEQ ID NO: 648628 - DNA, 15 bp, Homo sapiens
caatttaacctttga

SEQ ID NO: 648629 - DNA, 15 bp, Homo sapiens
aatttaacctttgat

SEQ ID NO: 648630 - DNA, 15 bp, Homo sapiens
atttaacctttgata

SEQ ID NO: 648631 - DNA, 15 bp, Homo sapiens
tttaacctttgataa

SEQ ID NO: 648632 - DNA, 15 bp, Homo sapiens
ttaacctttgataat

SEQ ID NO: 648633 - DNA, 15 bp, Homo sapiens
taacctttgataatt

SEQ ID NO: 648634 - DNA, 15 bp, Homo sapiens
aacctttgataattc

SEQ ID NO: 648635 - DNA, 15 bp, Homo sapiens
acctttgataattca

SEQ ID NO: 648636 - DNA, 15 bp, Homo sapiens
cctttgataattcaa

SEQ ID NO: 648637 - DNA, 15 bp, Homo sapiens
ctttgataattcaaa

SEQ ID NO: 648638 - DNA, 15 bp, Homo sapiens
tttgataattcaaaa

SEQ ID NO: 648639 - DNA, 15 bp, Homo sapiens
ttgataattcaaaag

SEQ ID NO: 648640 - DNA, 15 bp, Homo sapiens
tgataattcaaaagt

SEQ ID NO: 648641 - DNA, 15 bp, Homo sapiens
gataattcaaaagtt

SEQ ID NO: 648642 - DNA, 15 bp, Homo sapiens
ataattcaaaagttc

SEQ ID NO: 648643 - DNA, 15 bp, Homo sapiens
taattcaaaagttct

SEQ ID NO: 648644 - DNA, 15 bp, Homo sapiens
aattcaaaagttcta

SEQ ID NO: 648645 - DNA, 15 bp, Homo sapiens
attcaaaagttctac

SEQ ID NO: 648646 - DNA, 15 bp, Homo sapiens
ttcaaaagttctacc

SEQ ID NO: 648647 - DNA, 15 bp, Homo sapiens
tcaaaagttctacca

SEQ ID NO: 648648 - DNA, 15 bp, Homo sapiens
caaaagttctaccag

SEQ ID NO: 648649 - DNA, 15 bp, Homo sapiens
aaaagttctaccagg

SEQ ID NO: 648650 - DNA, 15 bp, Homo sapiens
aaagttctaccaggg

SEQ ID NO: 648651 - DNA, 15 bp, Homo sapiens
aagttctaccagggt

SEQ ID NO: 648652 - DNA, 15 bp, Homo sapiens
agttctaccagggtc

SEQ ID NO: 648653 - DNA, 15 bp, Homo sapiens
gttctaccagggtct

SEQ ID NO: 648654 - DNA, 15 bp, Homo sapiens
ttctaccagggtctc

SEQ ID NO: 648655 - DNA, 15 bp, Homo sapiens
tctaccagggtctca

SEQ ID NO: 648656 - DNA, 15 bp, Homo sapiens
ctaccagggtctcag

SEQ ID NO: 648657 - DNA, 15 bp, Homo sapiens
taccagggtctcaga

SEQ ID NO: 648658 - DNA, 15 bp, Homo sapiens
accagggtctcagag

SEQ ID NO: 648659 - DNA, 15 bp, Homo sapiens
ccagggtctcagagt

SEQ ID NO: 648660 - DNA, 15 bp, Homo sapiens
cagggtctcagagtg

SEQ ID NO: 648661 - DNA, 15 bp, Homo sapiens
agggtctcagagtga

SEQ ID NO: 648662 - DNA, 15 bp, Homo sapiens
gggtctcagagtgat

SEQ ID NO: 648663 - DNA, 15 bp, Homo sapiens
ggtctcagagtgata

SEQ ID NO: 648664 - DNA, 15 bp, Homo sapiens
gtctcagagtgatat

SEQ ID NO: 648665 - DNA, 15 bp, Homo sapiens
tctcagagtgatatg

SEQ ID NO: 648666 - DNA, 15 bp, Homo sapiens
ctcagagtgatatgg

SEQ ID NO: 648667 - DNA, 15 bp, Homo sapiens
tcagagtgatatggg

SEQ ID NO: 648668 - DNA, 15 bp, Homo sapiens
cagagtgatatggga

SEQ ID NO: 648669 - DNA, 15 bp, Homo sapiens
agagtgatatgggat

SEQ ID NO: 648670 - DNA, 15 bp, Homo sapiens
gagtgatatgggatc

SEQ ID NO: 648671 - DNA, 15 bp, Homo sapiens
agtgatatgggatcc

SEQ ID NO: 648672 - DNA, 15 bp, Homo sapiens
gtgatatgggatccc

SEQ ID NO: 648673 - DNA, 15 bp, Homo sapiens
tgatatgggatccca

SEQ ID NO: 648674 - DNA, 15 bp, Homo sapiens
gatatgggatcccac

SEQ ID NO: 648675 - DNA, 15 bp, Homo sapiens
atatgggatcccact

SEQ ID NO: 648676 - DNA, 15 bp, Homo sapiens
tatgggatcccactg

SEQ ID NO: 648677 - DNA, 15 bp, Homo sapiens
atgggatcccactgt

SEQ ID NO: 648678 - DNA, 15 bp, Homo sapiens
tgggatcccactgta

SEQ ID NO: 648679 - DNA, 15 bp, Homo sapiens
gggatcccactgtaa

SEQ ID NO: 648680 - DNA, 15 bp, Homo sapiens
ggatcccactgtaat

SEQ ID NO: 648681 - DNA, 15 bp, Homo sapiens
gatcccactgtaata

SEQ ID NO: 648682 - DNA, 15 bp, Homo sapiens
atcccactgtaataa

SEQ ID NO: 648683 - DNA, 15 bp, Homo sapiens
tcccactgtaataat

SEQ ID NO: 648684 - DNA, 15 bp, Homo sapiens
cccactgtaataata

SEQ ID NO: 648685 - DNA, 15 bp, Homo sapiens
ccactgtaataatag

SEQ ID NO: 648686 - DNA, 15 bp, Homo sapiens
cactgtaataatagc

SEQ ID NO: 648687 - DNA, 15 bp, Homo sapiens
actgtaataatagca

SEQ ID NO: 648688 - DNA, 15 bp, Homo sapiens
ctgtaataatagcat

SEQ ID NO: 648689 - DNA, 15 bp, Homo sapiens
tgtaataatagcatc

SEQ ID NO: 648690 - DNA, 15 bp, Homo sapiens
gtaataatagcatct

SEQ ID NO: 648691 - DNA, 15 bp, Homo sapiens
taataatagcatctt

SEQ ID NO: 648692 - DNA, 15 bp, Homo sapiens
aataatagcatcttt

SEQ ID NO: 648693 - DNA, 15 bp, Homo sapiens
ataatagcatctttc

SEQ ID NO: 648694 - DNA, 15 bp, Homo sapiens
taatagcatctttca

SEQ ID NO: 648695 - DNA, 15 bp, Homo sapiens
aatagcatctttcat

SEQ ID NO: 648696 - DNA, 15 bp, Homo sapiens
atagcatctttcatt

SEQ ID NO: 648697 - DNA, 15 bp, Homo sapiens
tagcatctttcattt

SEQ ID NO: 648698 - DNA, 15 bp, Homo sapiens
agcatctttcatttc

SEQ ID NO: 648699 - DNA, 15 bp, Homo sapiens
gcatctttcatttcc

SEQ ID NO: 648700 - DNA, 15 bp, Homo sapiens
catctttcatttccg

SEQ ID NO: 648701 - DNA, 15 bp, Homo sapiens
atctttcatttccgt

SEQ ID NO: 648702 - DNA, 15 bp, Homo sapiens
tctttcatttccgta

SEQ ID NO: 648703 - DNA, 15 bp, Homo sapiens
ctttcatttccgtag

SEQ ID NO: 648704 - DNA, 15 bp, Homo sapiens
tttcatttccgtagt

SEQ ID NO: 648705 - DNA, 15 bp, Homo sapiens
ttcatttccgtagta

SEQ ID NO: 648706 - DNA, 15 bp, Homo sapiens
tcatttccgtagtaa

SEQ ID NO: 648707 - DNA, 15 bp, Homo sapiens
catttccgtagtaaa

SEQ ID NO: 648708 - DNA, 15 bp, Homo sapiens
atttccgtagtaaac

SEQ ID NO: 648709 - DNA, 15 bp, Homo sapiens
tttccgtagtaaacg

SEQ ID NO: 648710 - DNA, 15 bp, Homo sapiens
ttccgtagtaaacgt

SEQ ID NO: 648711 - DNA, 15 bp, Homo sapiens
tccgtagtaaacgtt

SEQ ID NO: 648712 - DNA, 15 bp, Homo sapiens
ccgtagtaaacgttt

SEQ ID NO: 648713 - DNA, 15 bp, Homo sapiens
cgtagtaaacgtttc

SEQ ID NO: 648714 - DNA, 15 bp, Homo sapiens
gtagtaaacgtttct

SEQ ID NO: 648715 - DNA, 15 bp, Homo sapiens
tagtaaacgtttcta

SEQ ID NO: 648716 - DNA, 15 bp, Homo sapiens
agtaaacgtttctag

SEQ ID NO: 648717 - DNA, 15 bp, Homo sapiens
gtaaacgtttctaga

SEQ ID NO: 648718 - DNA, 15 bp, Homo sapiens
taaacgtttctagat

SEQ ID NO: 648719 - DNA, 15 bp, Homo sapiens
aaacgtttctagata

SEQ ID NO: 648720 - DNA, 15 bp, Homo sapiens
aacgtttctagatat

SEQ ID NO: 648721 - DNA, 15 bp, Homo sapiens
acgtttctagatatt

SEQ ID NO: 648722 - DNA, 15 bp, Homo sapiens
cgtttctagatattt

SEQ ID NO: 648723 - DNA, 15 bp, Homo sapiens
gtttctagatatttt

SEQ ID NO: 648724 - DNA, 15 bp, Homo sapiens
tttctagatattttg

SEQ ID NO: 648725 - DNA, 15 bp, Homo sapiens
ttctagatattttgt

SEQ ID NO: 648726 - DNA, 15 bp, Homo sapiens
tctagatattttgtc

SEQ ID NO: 648727 - DNA, 15 bp, Homo sapiens
ctagatattttgtct

SEQ ID NO: 648728 - DNA, 15 bp, Homo sapiens
tagatattttgtctc

SEQ ID NO: 648729 - DNA, 15 bp, Homo sapiens
agatattttgtctca

SEQ ID NO: 648730 - DNA, 15 bp, Homo sapiens
gatattttgtctcaa

SEQ ID NO: 648731 - DNA, 15 bp, Homo sapiens
atattttgtctcaat

SEQ ID NO: 648732 - DNA, 15 bp, Homo sapiens
tattttgtctcaatt

SEQ ID NO: 648733 - DNA, 15 bp, Homo sapiens
attttgtctcaattc

SEQ ID NO: 648734 - DNA, 15 bp, Homo sapiens
ttttgtctcaattca

SEQ ID NO: 648735 - DNA, 15 bp, Homo sapiens
tttgtctcaattcat

SEQ ID NO: 648736 - DNA, 15 bp, Homo sapiens
ttgtctcaattcatt

SEQ ID NO: 648737 - DNA, 15 bp, Homo sapiens
tgtctcaattcattg

SEQ ID NO: 648738 - DNA, 15 bp, Homo sapiens
gtctcaattcattga

SEQ ID NO: 648739 - DNA, 15 bp, Homo sapiens
tctcaattcattgaa

SEQ ID NO: 648740 - DNA, 15 bp, Homo sapiens
ctcaattcattgaaa

SEQ ID NO: 648741 - DNA, 15 bp, Homo sapiens
tcaattcattgaaat

SEQ ID NO: 648742 - DNA, 15 bp, Homo sapiens
caattcattgaaata

SEQ ID NO: 648743 - DNA, 15 bp, Homo sapiens
aattcattgaaatag

SEQ ID NO: 648744 - DNA, 15 bp, Homo sapiens
attcattgaaatagg

SEQ ID NO: 648745 - DNA, 15 bp, Homo sapiens
ttcattgaaatagga

SEQ ID NO: 648746 - DNA, 15 bp, Homo sapiens
tcattgaaataggaa

SEQ ID NO: 648747 - DNA, 15 bp, Homo sapiens
cattgaaataggaac

SEQ ID NO: 648748 - DNA, 15 bp, Homo sapiens
attgaaataggaacc

SEQ ID NO: 648749 - DNA, 15 bp, Homo sapiens
ttgaaataggaaccc

SEQ ID NO: 648750 - DNA, 15 bp, Homo sapiens
tgaaataggaaccca

SEQ ID NO: 648751 - DNA, 15 bp, Homo sapiens
gaaataggaacccat

SEQ ID NO: 648752 - DNA, 15 bp, Homo sapiens
aaataggaacccata

SEQ ID NO: 648753 - DNA, 15 bp, Homo sapiens
aataggaacccataa

SEQ ID NO: 648754 - DNA, 15 bp, Homo sapiens
ataggaacccataaa

SEQ ID NO: 648755 - DNA, 15 bp, Homo sapiens
taggaacccataaag

SEQ ID NO: 648756 - DNA, 15 bp, Homo sapiens
aggaacccataaaga

SEQ ID NO: 648757 - DNA, 15 bp, Homo sapiens
ggaacccataaagaa

SEQ ID NO: 648758 - DNA, 15 bp, Homo sapiens
gaacccataaagaaa

SEQ ID NO: 648759 - DNA, 15 bp, Homo sapiens
aacccataaagaaag

SEQ ID NO: 648760 - DNA, 15 bp, Homo sapiens
acccataaagaaagg

SEQ ID NO: 648761 - DNA, 15 bp, Homo sapiens
cccataaagaaaggg

SEQ ID NO: 648762 - DNA, 15 bp, Homo sapiens
ccataaagaaagggt

SEQ ID NO: 648763 - DNA, 15 bp, Homo sapiens
cataaagaaagggtt

SEQ ID NO: 648764 - DNA, 15 bp, Homo sapiens
ataaagaaagggttc

SEQ ID NO: 648765 - DNA, 15 bp, Homo sapiens
taaagaaagggttca

SEQ ID NO: 648766 - DNA, 15 bp, Homo sapiens
aaagaaagggttcag

SEQ ID NO: 648767 - DNA, 15 bp, Homo sapiens
aagaaagggttcagg

SEQ ID NO: 648768 - DNA, 15 bp, Homo sapiens
agaaagggttcaggg

SEQ ID NO: 648769 - DNA, 15 bp, Homo sapiens
gaaagggttcaggga

SEQ ID NO: 648770 - DNA, 15 bp, Homo sapiens
aaagggttcagggag

SEQ ID NO: 648771 - DNA, 15 bp, Homo sapiens
aagggttcagggagg

SEQ ID NO: 648772 - DNA, 15 bp, Homo sapiens
agggttcagggagga

SEQ ID NO: 648773 - DNA, 15 bp, Homo sapiens
gggttcagggaggac

SEQ ID NO: 648774 - DNA, 15 bp, Homo sapiens
ggttcagggaggact

SEQ ID NO: 648775 - DNA, 15 bp, Homo sapiens
gttcagggaggactc

SEQ ID NO: 648776 - DNA, 15 bp, Homo sapiens
ttcagggaggactcc

SEQ ID NO: 648777 - DNA, 15 bp, Homo sapiens
tcagggaggactcct

SEQ ID NO: 648778 - DNA, 15 bp, Homo sapiens
cagggaggactcctc

SEQ ID NO: 648779 - DNA, 15 bp, Homo sapiens
agggaggactcctcc

SEQ ID NO: 648780 - DNA, 15 bp, Homo sapiens
gggaggactcctcca

SEQ ID NO: 648781 - DNA, 15 bp, Homo sapiens
ggaggactcctccaa

SEQ ID NO: 648782 - DNA, 15 bp, Homo sapiens
gaggactcctccaaa

SEQ ID NO: 648783 - DNA, 15 bp, Homo sapiens
aggactcctccaaag

SEQ ID NO: 648784 - DNA, 15 bp, Homo sapiens
ggactcctccaaaga

SEQ ID NO: 648785 - DNA, 15 bp, Homo sapiens
gactcctccaaagat

SEQ ID NO: 648786 - DNA, 15 bp, Homo sapiens
actcctccaaagatc

SEQ ID NO: 648787 - DNA, 15 bp, Homo sapiens
ctcctccaaagatcc

SEQ ID NO: 648788 - DNA, 15 bp, Homo sapiens
tcctccaaagatcca

SEQ ID NO: 648789 - DNA, 15 bp, Homo sapiens
cctccaaagatccac

SEQ ID NO: 648790 - DNA, 15 bp, Homo sapiens
ctccaaagatccaca

SEQ ID NO: 648791 - DNA, 15 bp, Homo sapiens
tccaaagatccacag

SEQ ID NO: 648792 - DNA, 15 bp, Homo sapiens
ccaaagatccacagt

SEQ ID NO: 648793 - DNA, 15 bp, Homo sapiens
caaagatccacagta

SEQ ID NO: 648794 - DNA, 15 bp, Homo sapiens
aaagatccacagtag

SEQ ID NO: 648795 - DNA, 15 bp, Homo sapiens
aagatccacagtagc

SEQ ID NO: 648796 - DNA, 15 bp, Homo sapiens
agatccacagtagcc

SEQ ID NO: 648797 - DNA, 15 bp, Homo sapiens
gatccacagtagcca

SEQ ID NO: 648798 - DNA, 15 bp, Homo sapiens
atccacagtagccag

SEQ ID NO: 648799 - DNA, 15 bp, Homo sapiens
tccacagtagccagg

SEQ ID NO: 648800 - DNA, 15 bp, Homo sapiens
ccacagtagccaggg

SEQ ID NO: 648801 - DNA, 15 bp, Homo sapiens
cacagtagccagggg

SEQ ID NO: 648802 - DNA, 15 bp, Homo sapiens
acagtagccagggga

SEQ ID NO: 648803 - DNA, 15 bp, Homo sapiens
cagtagccaggggaa

SEQ ID NO: 648804 - DNA, 15 bp, Homo sapiens
agtagccaggggaat

SEQ ID NO: 648805 - DNA, 15 bp, Homo sapiens
gtagccaggggaata

SEQ ID NO: 648806 - DNA, 15 bp, Homo sapiens
tagccaggggaataa

SEQ ID NO: 648807 - DNA, 15 bp, Homo sapiens
agccaggggaataaa

SEQ ID NO: 648808 - DNA, 15 bp, Homo sapiens
gccaggggaataaac

SEQ ID NO: 648809 - DNA, 15 bp, Homo sapiens
ccaggggaataaaca

SEQ ID NO: 648810 - DNA, 15 bp, Homo sapiens
caggggaataaacac

SEQ ID NO: 648811 - DNA, 15 bp, Homo sapiens
aggggaataaacaca

SEQ ID NO: 648812 - DNA, 15 bp, Homo sapiens
ggggaataaacacag

SEQ ID NO: 648813 - DNA, 15 bp, Homo sapiens
gggaataaacacagg

SEQ ID NO: 648814 - DNA, 15 bp, Homo sapiens
ggaataaacacaggt

SEQ ID NO: 648815 - DNA, 15 bp, Homo sapiens
gaataaacacaggtt

SEQ ID NO: 648816 - DNA, 15 bp, Homo sapiens
aataaacacaggttg

SEQ ID NO: 648817 - DNA, 15 bp, Homo sapiens
ataaacacaggttgt

SEQ ID NO: 648818 - DNA, 15 bp, Homo sapiens
taaacacaggttgtt

SEQ ID NO: 648819 - DNA, 15 bp, Homo sapiens
aaacacaggttgttg

SEQ ID NO: 648820 - DNA, 15 bp, Homo sapiens
aacacaggttgttgg

SEQ ID NO: 648821 - DNA, 15 bp, Homo sapiens
acacaggttgttgga

SEQ ID NO: 648822 - DNA, 15 bp, Homo sapiens
cacaggttgttggat

SEQ ID NO: 648823 - DNA, 15 bp, Homo sapiens
acaggttgttggatg

SEQ ID NO: 648824 - DNA, 15 bp, Homo sapiens
caggttgttggatgc

SEQ ID NO: 648825 - DNA, 15 bp, Homo sapiens
aggttgttggatgcc

SEQ ID NO: 648826 - DNA, 15 bp, Homo sapiens
ggttgttggatgccg

SEQ ID NO: 648827 - DNA, 15 bp, Homo sapiens
gttgttggatgccga

SEQ ID NO: 648828 - DNA, 15 bp, Homo sapiens
ttgttggatgccgag

SEQ ID NO: 648829 - DNA, 15 bp, Homo sapiens
tgttggatgccgaga

SEQ ID NO: 648830 - DNA, 15 bp, Homo sapiens
gttggatgccgagac

SEQ ID NO: 648831 - DNA, 15 bp, Homo sapiens
ttggatgccgagaca

SEQ ID NO: 648832 - DNA, 15 bp, Homo sapiens
tggatgccgagacac

SEQ ID NO: 648833 - DNA, 15 bp, Homo sapiens
ggatgccgagacacg

SEQ ID NO: 648834 - DNA, 15 bp, Homo sapiens
gatgccgagacacgc

SEQ ID NO: 648835 - DNA, 15 bp, Homo sapiens
atgccgagacacgct

SEQ ID NO: 648836 - DNA, 15 bp, Homo sapiens
tgccgagacacgctc

SEQ ID NO: 648837 - DNA, 15 bp, Homo sapiens
gccgagacacgctcc

SEQ ID NO: 648838 - DNA, 15 bp, Homo sapiens
ccgagacacgctcca

SEQ ID NO: 648839 - DNA, 15 bp, Homo sapiens
cgagacacgctccat

SEQ ID NO: 648840 - DNA, 15 bp, Homo sapiens
gagacacgctccatc

SEQ ID NO: 648841 - DNA, 15 bp, Homo sapiens
agacacgctccatcc

SEQ ID NO: 648842 - DNA, 15 bp, Homo sapiens
gacacgctccatcca

SEQ ID NO: 648843 - DNA, 15 bp, Homo sapiens
acacgctccatccac

SEQ ID NO: 648844 - DNA, 15 bp, Homo sapiens
cacgctccatccaca

SEQ ID NO: 648845 - DNA, 15 bp, Homo sapiens
acgctccatccacaa

SEQ ID NO: 648846 - DNA, 15 bp, Homo sapiens
cgctccatccacaac

SEQ ID NO: 648847 - DNA, 15 bp, Homo sapiens
gctccatccacaact

SEQ ID NO: 648848 - DNA, 15 bp, Homo sapiens
ctccatccacaactc

SEQ ID NO: 648849 - DNA, 15 bp, Homo sapiens
tccatccacaactcc

SEQ ID NO: 648850 - DNA, 15 bp, Homo sapiens
ccatccacaactccc

SEQ ID NO: 648851 - DNA, 15 bp, Homo sapiens
catccacaactccct

SEQ ID NO: 648852 - DNA, 15 bp, Homo sapiens
atccacaactccctc

SEQ ID NO: 648853 - DNA, 15 bp, Homo sapiens
tccacaactccctct

SEQ ID NO: 648854 - DNA, 15 bp, Homo sapiens
ccacaactccctctg

SEQ ID NO: 648855 - DNA, 15 bp, Homo sapiens
cacaactccctctgg

SEQ ID NO: 648856 - DNA, 15 bp, Homo sapiens
acaactccctctggg

SEQ ID NO: 648857 - DNA, 15 bp, Homo sapiens
caactccctctgggt

SEQ ID NO: 648858 - DNA, 15 bp, Homo sapiens
aactccctctgggtt

SEQ ID NO: 648859 - DNA, 15 bp, Homo sapiens
actccctctgggttc

SEQ ID NO: 648860 - DNA, 15 bp, Homo sapiens
ctccctctgggttct

SEQ ID NO: 648861 - DNA, 15 bp, Homo sapiens
tccctctgggttctc

SEQ ID NO: 648862 - DNA, 15 bp, Homo sapiens
ccctctgggttctca

SEQ ID NO: 648863 - DNA, 15 bp, Homo sapiens
cctctgggttctcat

SEQ ID NO: 648864 - DNA, 15 bp, Homo sapiens
ctctgggttctcatg

SEQ ID NO: 648865 - DNA, 15 bp, Homo sapiens
tctgggttctcatgt

SEQ ID NO: 648866 - DNA, 15 bp, Homo sapiens
ctgggttctcatgta

SEQ ID NO: 648867 - DNA, 15 bp, Homo sapiens
tgggttctcatgtac

SEQ ID NO: 648868 - DNA, 15 bp, Homo sapiens
gggttctcatgtact

SEQ ID NO: 648869 - DNA, 15 bp, Homo sapiens
ggttctcatgtactc

SEQ ID NO: 648870 - DNA, 15 bp, Homo sapiens
gttctcatgtactct

SEQ ID NO: 648871 - DNA, 15 bp, Homo sapiens
ttctcatgtactcta

SEQ ID NO: 648872 - DNA, 15 bp, Homo sapiens
tctcatgtactctat

SEQ ID NO: 648873 - DNA, 15 bp, Homo sapiens
ctcatgtactctatt

SEQ ID NO: 648874 - DNA, 15 bp, Homo sapiens
tcatgtactctattg

SEQ ID NO: 648875 - DNA, 15 bp, Homo sapiens
catgtactctattgg

SEQ ID NO: 648876 - DNA, 15 bp, Homo sapiens
atgtactctattggc

SEQ ID NO: 648877 - DNA, 15 bp, Homo sapiens
tgtactctattggct

SEQ ID NO: 648878 - DNA, 15 bp, Homo sapiens
gtactctattggctt

SEQ ID NO: 648879 - DNA, 15 bp, Homo sapiens
tactctattggcttc

SEQ ID NO: 648880 - DNA, 15 bp, Homo sapiens
actctattggcttct

SEQ ID NO: 648881 - DNA, 15 bp, Homo sapiens
ctctattggcttctg

SEQ ID NO: 648882 - DNA, 15 bp, Homo sapiens
tctattggcttctgt

SEQ ID NO: 648883 - DNA, 15 bp, Homo sapiens
ctattggcttctgtg

SEQ ID NO: 648884 - DNA, 15 bp, Homo sapiens
tattggcttctgtgc

SEQ ID NO: 648885 - DNA, 15 bp, Homo sapiens
attggcttctgtgct

SEQ ID NO: 648886 - DNA, 15 bp, Homo sapiens
ttggcttctgtgctg

SEQ ID NO: 648887 - DNA, 15 bp, Homo sapiens
tggcttctgtgctgg

SEQ ID NO: 648888 - DNA, 15 bp, Homo sapiens
ggcttctgtgctggg

SEQ ID NO: 648889 - DNA, 15 bp, Homo sapiens
gcttctgtgctgggt

SEQ ID NO: 648890 - DNA, 15 bp, Homo sapiens
cttctgtgctgggta

SEQ ID NO: 648891 - DNA, 15 bp, Homo sapiens
ttctgtgctgggtag

SEQ ID NO: 648892 - DNA, 15 bp, Homo sapiens
tctgtgctgggtagt

SEQ ID NO: 648893 - DNA, 15 bp, Homo sapiens
ctgtgctgggtagtc

SEQ ID NO: 648894 - DNA, 15 bp, Homo sapiens
tgtgctgggtagtcc

SEQ ID NO: 648895 - DNA, 15 bp, Homo sapiens
gtgctgggtagtcct

SEQ ID NO: 648896 - DNA, 15 bp, Homo sapiens
tgctgggtagtcctg

SEQ ID NO: 648897 - DNA, 15 bp, Homo sapiens
gctgggtagtcctga

SEQ ID NO: 648898 - DNA, 15 bp, Homo sapiens
ctgggtagtcctgat

SEQ ID NO: 648899 - DNA, 15 bp, Homo sapiens
tgggtagtcctgatt

SEQ ID NO: 648900 - DNA, 15 bp, Homo sapiens
gggtagtcctgatta

SEQ ID NO: 648901 - DNA, 15 bp, Homo sapiens
ggtagtcctgattaa

SEQ ID NO: 648902 - DNA, 15 bp, Homo sapiens
gtagtcctgattaat

SEQ ID NO: 648903 - DNA, 15 bp, Homo sapiens
tagtcctgattaatg

SEQ ID NO: 648904 - DNA, 15 bp, Homo sapiens
agtcctgattaatga

SEQ ID NO: 648905 - DNA, 15 bp, Homo sapiens
gtcctgattaatgac

SEQ ID NO: 648906 - DNA, 15 bp, Homo sapiens
tcctgattaatgaca

SEQ ID NO: 648907 - DNA, 15 bp, Homo sapiens
cctgattaatgacag

SEQ ID NO: 648908 - DNA, 15 bp, Homo sapiens
ctgattaatgacagt

SEQ ID NO: 648909 - DNA, 15 bp, Homo sapiens
tgattaatgacagtc

SEQ ID NO: 648910 - DNA, 15 bp, Homo sapiens
gattaatgacagtcg

SEQ ID NO: 648911 - DNA, 15 bp, Homo sapiens
attaatgacagtcgt

SEQ ID NO: 648912 - DNA, 15 bp, Homo sapiens
ttaatgacagtcgtg

SEQ ID NO: 648913 - DNA, 15 bp, Homo sapiens
taatgacagtcgtgg

SEQ ID NO: 648914 - DNA, 15 bp, Homo sapiens
aatgacagtcgtgga

SEQ ID NO: 648915 - DNA, 15 bp, Homo sapiens
atgacagtcgtggaa

SEQ ID NO: 648916 - DNA, 15 bp, Homo sapiens
tgacagtcgtggaat

SEQ ID NO: 648917 - DNA, 15 bp, Homo sapiens
gacagtcgtggaatc

SEQ ID NO: 648918 - DNA, 15 bp, Homo sapiens
acagtcgtggaatcg

SEQ ID NO: 648919 - DNA, 15 bp, Homo sapiens
cagtcgtggaatcgt

SEQ ID NO: 648920 - DNA, 15 bp, Homo sapiens
agtcgtggaatcgtg

SEQ ID NO: 648921 - DNA, 15 bp, Homo sapiens
gtcgtggaatcgtgg

SEQ ID NO: 648922 - DNA, 15 bp, Homo sapiens
tcgtggaatcgtggg

SEQ ID NO: 648923 - DNA, 15 bp, Homo sapiens
cgtggaatcgtggga

SEQ ID NO: 648924 - DNA, 15 bp, Homo sapiens
gtggaatcgtgggag

SEQ ID NO: 648925 - DNA, 15 bp, Homo sapiens
tggaatcgtgggagt

SEQ ID NO: 648926 - DNA, 15 bp, Homo sapiens
ggaatcgtgggagtc

SEQ ID NO: 648927 - DNA, 15 bp, Homo sapiens
gaatcgtgggagtca

SEQ ID NO: 648928 - DNA, 15 bp, Homo sapiens
aatcgtgggagtcaa

SEQ ID NO: 648929 - DNA, 15 bp, Homo sapiens
atcgtgggagtcaat

SEQ ID NO: 648930 - DNA, 15 bp, Homo sapiens
tcgtgggagtcaatg

SEQ ID NO: 648931 - DNA, 15 bp, Homo sapiens
cgtgggagtcaatgc

SEQ ID NO: 648932 - DNA, 15 bp, Homo sapiens
gtgggagtcaatgca

SEQ ID NO: 648933 - DNA, 15 bp, Homo sapiens
tgggagtcaatgcac

SEQ ID NO: 648934 - DNA, 15 bp, Homo sapiens
gggagtcaatgcact

SEQ ID NO: 648935 - DNA, 15 bp, Homo sapiens
ggagtcaatgcactt

SEQ ID NO: 648936 - DNA, 15 bp, Homo sapiens
gagtcaatgcacttc

SEQ ID NO: 648937 - DNA, 15 bp, Homo sapiens
agtcaatgcacttct

SEQ ID NO: 648938 - DNA, 15 bp, Homo sapiens
gtcaatgcacttctg

SEQ ID NO: 648939 - DNA, 15 bp, Homo sapiens
tcaatgcacttctgt

SEQ ID NO: 648940 - DNA, 15 bp, Homo sapiens
caatgcacttctgtc

SEQ ID NO: 648941 - DNA, 15 bp, Homo sapiens
aatgcacttctgtcc

SEQ ID NO: 648942 - DNA, 15 bp, Homo sapiens
atgcacttctgtccc

SEQ ID NO: 648943 - DNA, 15 bp, Homo sapiens
tgcacttctgtccca

SEQ ID NO: 648944 - DNA, 15 bp, Homo sapiens
gcacttctgtcccac

SEQ ID NO: 648945 - DNA, 15 bp, Homo sapiens
cacttctgtcccacc

SEQ ID NO: 648946 - DNA, 15 bp, Homo sapiens
acttctgtcccaccc

SEQ ID NO: 648947 - DNA, 15 bp, Homo sapiens
cttctgtcccacccc

SEQ ID NO: 648948 - DNA, 15 bp, Homo sapiens
ttctgtcccacccca

SEQ ID NO: 648949 - DNA, 15 bp, Homo sapiens
tctgtcccaccccac

SEQ ID NO: 648950 - DNA, 15 bp, Homo sapiens
ctgtcccaccccact

SEQ ID NO: 648951 - DNA, 15 bp, Homo sapiens
tgtcccaccccactc

SEQ ID NO: 648952 - DNA, 15 bp, Homo sapiens
gtcccaccccactcc

SEQ ID NO: 648953 - DNA, 15 bp, Homo sapiens
tcccaccccactccc

SEQ ID NO: 648954 - DNA, 15 bp, Homo sapiens
cccaccccactcccc

SEQ ID NO: 648955 - DNA, 15 bp, Homo sapiens
ccaccccactcccct

SEQ ID NO: 648956 - DNA, 15 bp, Homo sapiens
caccccactcccctt

SEQ ID NO: 648957 - DNA, 15 bp, Homo sapiens
accccactccccttg

SEQ ID NO: 648958 - DNA, 15 bp, Homo sapiens
ccccactccccttgc

SEQ ID NO: 648959 - DNA, 15 bp, Homo sapiens
cccactccccttgca

SEQ ID NO: 648960 - DNA, 15 bp, Homo sapiens
ccactccccttgcaa

SEQ ID NO: 648961 - DNA, 15 bp, Homo sapiens
cactccccttgcaag

SEQ ID NO: 648962 - DNA, 15 bp, Homo sapiens
actccccttgcaagg

SEQ ID NO: 648963 - DNA, 15 bp, Homo sapiens
ctccccttgcaagga

SEQ ID NO: 648964 - DNA, 15 bp, Homo sapiens
tccccttgcaaggat

SEQ ID NO: 648965 - DNA, 15 bp, Homo sapiens
ccccttgcaaggatc

SEQ ID NO: 648966 - DNA, 15 bp, Homo sapiens
cccttgcaaggatca

SEQ ID NO: 648967 - DNA, 15 bp, Homo sapiens
ccttgcaaggatcaa

SEQ ID NO: 648968 - DNA, 15 bp, Homo sapiens
cttgcaaggatcaag

SEQ ID NO: 648969 - DNA, 15 bp, Homo sapiens
ttgcaaggatcaagg

SEQ ID NO: 648970 - DNA, 15 bp, Homo sapiens
tgcaaggatcaagga

SEQ ID NO: 648971 - DNA, 15 bp, Homo sapiens
gcaaggatcaaggag

SEQ ID NO: 648972 - DNA, 15 bp, Homo sapiens
caaggatcaaggagg

SEQ ID NO: 648973 - DNA, 15 bp, Homo sapiens
aaggatcaaggagga

SEQ ID NO: 648974 - DNA, 15 bp, Homo sapiens
aggatcaaggaggaa

SEQ ID NO: 648975 - DNA, 15 bp, Homo sapiens
ggatcaaggaggaaa

SEQ ID NO: 648976 - DNA, 15 bp, Homo sapiens
gatcaaggaggaaac

SEQ ID NO: 648977 - DNA, 15 bp, Homo sapiens
atcaaggaggaaacc

SEQ ID NO: 648978 - DNA, 15 bp, Homo sapiens
tcaaggaggaaacct

SEQ ID NO: 648979 - DNA, 15 bp, Homo sapiens
caaggaggaaacctg

SEQ ID NO: 648980 - DNA, 15 bp, Homo sapiens
aaggaggaaacctga

SEQ ID NO: 648981 - DNA, 15 bp, Homo sapiens
aggaggaaacctgac

SEQ ID NO: 648982 - DNA, 15 bp, Homo sapiens
ggaggaaacctgacc

SEQ ID NO: 648983 - DNA, 15 bp, Homo sapiens
gaggaaacctgaccc

SEQ ID NO: 648984 - DNA, 15 bp, Homo sapiens
aggaaacctgaccct

SEQ ID NO: 648985 - DNA, 15 bp, Homo sapiens
ggaaacctgaccctc

SEQ ID NO: 648986 - DNA, 15 bp, Homo sapiens
gaaacctgaccctcc

SEQ ID NO: 648987 - DNA, 15 bp, Homo sapiens
aaacctgaccctccc

SEQ ID NO: 648988 - DNA, 15 bp, Homo sapiens
aacctgaccctccct

SEQ ID NO: 648989 - DNA, 15 bp, Homo sapiens
acctgaccctccctc

SEQ ID NO: 648990 - DNA, 15 bp, Homo sapiens
cctgaccctccctct

SEQ ID NO: 648991 - DNA, 15 bp, Homo sapiens
ctgaccctccctctg

SEQ ID NO: 648992 - DNA, 15 bp, Homo sapiens
tgaccctccctctgt

SEQ ID NO: 648993 - DNA, 15 bp, Homo sapiens
gaccctccctctgtt

SEQ ID NO: 648994 - DNA, 15 bp, Homo sapiens
accctccctctgttt

SEQ ID NO: 648995 - DNA, 15 bp, Homo sapiens
ccctccctctgtttc

SEQ ID NO: 648996 - DNA, 15 bp, Homo sapiens
cctccctctgtttct

SEQ ID NO: 648997 - DNA, 15 bp, Homo sapiens
ctccctctgtttctt

SEQ ID NO: 648998 - DNA, 15 bp, Homo sapiens
tccctctgtttcttg

SEQ ID NO: 648999 - DNA, 15 bp, Homo sapiens
ccctctgtttcttgg

SEQ ID NO: 649000 - DNA, 15 bp, Homo sapiens
cctctgtttcttggg

SEQ ID NO: 649001 - DNA, 15 bp, Homo sapiens
ctctgtttcttgggc

SEQ ID NO: 649002 - DNA, 15 bp, Homo sapiens
tctgtttcttgggca

SEQ ID NO: 649003 - DNA, 15 bp, Homo sapiens
ctgtttcttgggcag

SEQ ID NO: 649004 - DNA, 15 bp, Homo sapiens
tgtttcttgggcagg

SEQ ID NO: 649005 - DNA, 15 bp, Homo sapiens
gtttcttgggcaggt

SEQ ID NO: 649006 - DNA, 15 bp, Homo sapiens
tttcttgggcaggtg

SEQ ID NO: 649007 - DNA, 15 bp, Homo sapiens
ttcttgggcaggtga

SEQ ID NO: 649008 - DNA, 15 bp, Homo sapiens
tcttgggcaggtgaa

SEQ ID NO: 649009 - DNA, 15 bp, Homo sapiens
cttgggcaggtgaag

SEQ ID NO: 649010 - DNA, 15 bp, Homo sapiens
ttgggcaggtgaaga

SEQ ID NO: 649011 - DNA, 15 bp, Homo sapiens
tgggcaggtgaagat

SEQ ID NO: 649012 - DNA, 15 bp, Homo sapiens
gggcaggtgaagatg

SEQ ID NO: 649013 - DNA, 15 bp, Homo sapiens
ggcaggtgaagatgc

SEQ ID NO: 649014 - DNA, 15 bp, Homo sapiens
gcaggtgaagatgca

SEQ ID NO: 649015 - DNA, 15 bp, Homo sapiens
caggtgaagatgcac

SEQ ID NO: 649016 - DNA, 15 bp, Homo sapiens
aggtgaagatgcaca

SEQ ID NO: 649017 - DNA, 15 bp, Homo sapiens
ggtgaagatgcacac

SEQ ID NO: 649018 - DNA, 15 bp, Homo sapiens
gtgaagatgcacacc

SEQ ID NO: 649019 - DNA, 15 bp, Homo sapiens
tgaagatgcacacca

SEQ ID NO: 649020 - DNA, 15 bp, Homo sapiens
gaagatgcacaccat

SEQ ID NO: 649021 - DNA, 15 bp, Homo sapiens
aagatgcacaccatg

SEQ ID NO: 649022 - DNA, 15 bp, Homo sapiens
agatgcacaccatgt

SEQ ID NO: 649023 - DNA, 15 bp, Homo sapiens
gatgcacaccatgtc

SEQ ID NO: 649024 - DNA, 15 bp, Homo sapiens
atgcacaccatgtcc

SEQ ID NO: 649025 - DNA, 15 bp, Homo sapiens
tgcacaccatgtcct

SEQ ID NO: 649026 - DNA, 15 bp, Homo sapiens
gcacaccatgtcctc

SEQ ID NO: 649027 - DNA, 15 bp, Homo sapiens
cacaccatgtcctcc

SEQ ID NO: 649028 - DNA, 15 bp, Homo sapiens
acaccatgtcctcct

SEQ ID NO: 649029 - DNA, 15 bp, Homo sapiens
caccatgtcctcctc

SEQ ID NO: 649030 - DNA, 15 bp, Homo sapiens
accatgtcctcctcg

SEQ ID NO: 649031 - DNA, 15 bp, Homo sapiens
ccatgtcctcctcgc

SEQ ID NO: 649032 - DNA, 15 bp, Homo sapiens
catgtcctcctcgca

SEQ ID NO: 649033 - DNA, 15 bp, Homo sapiens
atgtcctcctcgcat

SEQ ID NO: 649034 - DNA, 15 bp, Homo sapiens
tgtcctcctcgcatc

SEQ ID NO: 649035 - DNA, 15 bp, Homo sapiens
gtcctcctcgcatct

SEQ ID NO: 649036 - DNA, 15 bp, Homo sapiens
tcctcctcgcatctc

SEQ ID NO: 649037 - DNA, 15 bp, Homo sapiens
cctcctcgcatctct

SEQ ID NO: 649038 - DNA, 15 bp, Homo sapiens
ctcctcgcatctctt

SEQ ID NO: 649039 - DNA, 15 bp, Homo sapiens
tcctcgcatctcttc

SEQ ID NO: 649040 - DNA, 15 bp, Homo sapiens
cctcgcatctcttct

SEQ ID NO: 649041 - DNA, 15 bp, Homo sapiens
ctcgcatctcttcta

SEQ ID NO: 649042 - DNA, 15 bp, Homo sapiens
tcgcatctcttctac

SEQ ID NO: 649043 - DNA, 15 bp, Homo sapiens
cgcatctcttctacc

SEQ ID NO: 649044 - DNA, 15 bp, Homo sapiens
gcatctcttctacct

SEQ ID NO: 649045 - DNA, 15 bp, Homo sapiens
catctcttctacctg

SEQ ID NO: 649046 - DNA, 15 bp, Homo sapiens
atctcttctacctgg

SEQ ID NO: 649047 - DNA, 15 bp, Homo sapiens
tctcttctacctggc

SEQ ID NO: 649048 - DNA, 15 bp, Homo sapiens
ctcttctacctggcg

SEQ ID NO: 649049 - DNA, 15 bp, Homo sapiens
tcttctacctggcgc

SEQ ID NO: 649050 - DNA, 15 bp, Homo sapiens
cttctacctggcgct

SEQ ID NO: 649051 - DNA, 15 bp, Homo sapiens
ttctacctggcgctg

SEQ ID NO: 649052 - DNA, 15 bp, Homo sapiens
tctacctggcgctgt

SEQ ID NO: 649053 - DNA, 15 bp, Homo sapiens
ctacctggcgctgtg

SEQ ID NO: 649054 - DNA, 15 bp, Homo sapiens
tacctggcgctgtgc

SEQ ID NO: 649055 - DNA, 15 bp, Homo sapiens
acctggcgctgtgcc

SEQ ID NO: 649056 - DNA, 15 bp, Homo sapiens
cctggcgctgtgcct

SEQ ID NO: 649057 - DNA, 15 bp, Homo sapiens
ctggcgctgtgcctg

SEQ ID NO: 649058 - DNA, 15 bp, Homo sapiens
tggcgctgtgcctgc

SEQ ID NO: 649059 - DNA, 15 bp, Homo sapiens
ggcgctgtgcctgct

SEQ ID NO: 649060 - DNA, 15 bp, Homo sapiens
gcgctgtgcctgctc

SEQ ID NO: 649061 - DNA, 15 bp, Homo sapiens
cgctgtgcctgctca

SEQ ID NO: 649062 - DNA, 15 bp, Homo sapiens
gctgtgcctgctcac

SEQ ID NO: 649063 - DNA, 15 bp, Homo sapiens
ctgtgcctgctcacc

SEQ ID NO: 649064 - DNA, 15 bp, Homo sapiens
tgtgcctgctcacct

SEQ ID NO: 649065 - DNA, 15 bp, Homo sapiens
gtgcctgctcacctt

SEQ ID NO: 649066 - DNA, 15 bp, Homo sapiens
tgcctgctcaccttc

SEQ ID NO: 649067 - DNA, 15 bp, Homo sapiens
gcctgctcaccttca

SEQ ID NO: 649068 - DNA, 15 bp, Homo sapiens
cctgctcaccttcac

SEQ ID NO: 649069 - DNA, 15 bp, Homo sapiens
ctgctcaccttcacc

SEQ ID NO: 649070 - DNA, 15 bp, Homo sapiens
tgctcaccttcacca

SEQ ID NO: 649071 - DNA, 15 bp, Homo sapiens
gctcaccttcaccag

SEQ ID NO: 649072 - DNA, 15 bp, Homo sapiens
ctcaccttcaccagc

SEQ ID NO: 649073 - DNA, 15 bp, Homo sapiens
tcaccttcaccagct

SEQ ID NO: 649074 - DNA, 15 bp, Homo sapiens
caccttcaccagctc

SEQ ID NO: 649075 - DNA, 15 bp, Homo sapiens
accttcaccagctct

SEQ ID NO: 649076 - DNA, 15 bp, Homo sapiens
ccttcaccagctctg

SEQ ID NO: 649077 - DNA, 15 bp, Homo sapiens
cttcaccagctctgc

SEQ ID NO: 649078 - DNA, 15 bp, Homo sapiens
ttcaccagctctgcc

SEQ ID NO: 649079 - DNA, 15 bp, Homo sapiens
tcaccagctctgcca

SEQ ID NO: 649080 - DNA, 15 bp, Homo sapiens
caccagctctgccac

SEQ ID NO: 649081 - DNA, 15 bp, Homo sapiens
accagctctgccacg

SEQ ID NO: 649082 - DNA, 15 bp, Homo sapiens
ccagctctgccacgg

SEQ ID NO: 649083 - DNA, 15 bp, Homo sapiens
cagctctgccacggc

SEQ ID NO: 649084 - DNA, 15 bp, Homo sapiens
agctctgccacggct

SEQ ID NO: 649085 - DNA, 15 bp, Homo sapiens
gctctgccacggctg

SEQ ID NO: 649086 - DNA, 15 bp, Homo sapiens
ctctgccacggctgg

SEQ ID NO: 649087 - DNA, 15 bp, Homo sapiens
tctgccacggctgga

SEQ ID NO: 649088 - DNA, 15 bp, Homo sapiens
ctgccacggctggac

SEQ ID NO: 649089 - DNA, 15 bp, Homo sapiens
tgccacggctggacc

SEQ ID NO: 649090 - DNA, 15 bp, Homo sapiens
gccacggctggaccg

SEQ ID NO: 649091 - DNA, 15 bp, Homo sapiens
ccacggctggaccgg

SEQ ID NO: 649092 - DNA, 15 bp, Homo sapiens
cacggctggaccgga

SEQ ID NO: 649093 - DNA, 15 bp, Homo sapiens
acggctggaccggag

SEQ ID NO: 649094 - DNA, 15 bp, Homo sapiens
cggctggaccggaga

SEQ ID NO: 649095 - DNA, 15 bp, Homo sapiens
ggctggaccggagac

SEQ ID NO: 649096 - DNA, 15 bp, Homo sapiens
gctggaccggagacg

SEQ ID NO: 649097 - DNA, 15 bp, Homo sapiens
ctggaccggagacgc

SEQ ID NO: 649098 - DNA, 15 bp, Homo sapiens
tggaccggagacgct

SEQ ID NO: 649099 - DNA, 15 bp, Homo sapiens
ggaccggagacgctc

SEQ ID NO: 649100 - DNA, 15 bp, Homo sapiens
gaccggagacgctct

SEQ ID NO: 649101 - DNA, 15 bp, Homo sapiens
accggagacgctctg

SEQ ID NO: 649102 - DNA, 15 bp, Homo sapiens
ccggagacgctctgc

SEQ ID NO: 649103 - DNA, 15 bp, Homo sapiens
cggagacgctctgcg

SEQ ID NO: 649104 - DNA, 15 bp, Homo sapiens
ggagacgctctgcgg

SEQ ID NO: 649105 - DNA, 15 bp, Homo sapiens
gagacgctctgcggg

SEQ ID NO: 649106 - DNA, 15 bp, Homo sapiens
agacgctctgcgggg

SEQ ID NO: 649107 - DNA, 15 bp, Homo sapiens
gacgctctgcggggc

SEQ ID NO: 649108 - DNA, 15 bp, Homo sapiens
acgctctgcggggct

SEQ ID NO: 649109 - DNA, 15 bp, Homo sapiens
cgctctgcggggctg

SEQ ID NO: 649110 - DNA, 15 bp, Homo sapiens
gctctgcggggctga

SEQ ID NO: 649111 - DNA, 15 bp, Homo sapiens
ctctgcggggctgag

SEQ ID NO: 649112 - DNA, 15 bp, Homo sapiens
tctgcggggctgagc

SEQ ID NO: 649113 - DNA, 15 bp, Homo sapiens
ctgcggggctgagct

SEQ ID NO: 649114 - DNA, 15 bp, Homo sapiens
tgcggggctgagctg

SEQ ID NO: 649115 - DNA, 15 bp, Homo sapiens
gcggggctgagctgg

SEQ ID NO: 649116 - DNA, 15 bp, Homo sapiens
cggggctgagctggt

SEQ ID NO: 649117 - DNA, 15 bp, Homo sapiens
ggggctgagctggtg

SEQ ID NO: 649118 - DNA, 15 bp, Homo sapiens
gggctgagctggtgg

SEQ ID NO: 649119 - DNA, 15 bp, Homo sapiens
ggctgagctggtgga

SEQ ID NO: 649120 - DNA, 15 bp, Homo sapiens
gctgagctggtggat

SEQ ID NO: 649121 - DNA, 15 bp, Homo sapiens
ctgagctggtggatg

SEQ ID NO: 649122 - DNA, 15 bp, Homo sapiens
tgagctggtggatgc

SEQ ID NO: 649123 - DNA, 15 bp, Homo sapiens
gagctggtggatgct

SEQ ID NO: 649124 - DNA, 15 bp, Homo sapiens
agctggtggatgctc

SEQ ID NO: 649125 - DNA, 15 bp, Homo sapiens
gctggtggatgctct

SEQ ID NO: 649126 - DNA, 15 bp, Homo sapiens
ctggtggatgctctt

SEQ ID NO: 649127 - DNA, 15 bp, Homo sapiens
tggtggatgctcttc

SEQ ID NO: 649128 - DNA, 15 bp, Homo sapiens
ggtggatgctcttca

SEQ ID NO: 649129 - DNA, 15 bp, Homo sapiens
gtggatgctcttcag

SEQ ID NO: 649130 - DNA, 15 bp, Homo sapiens
tggatgctcttcagt

SEQ ID NO: 649131 - DNA, 15 bp, Homo sapiens
ggatgctcttcagtt

SEQ ID NO: 649132 - DNA, 15 bp, Homo sapiens
gatgctcttcagttc

SEQ ID NO: 649133 - DNA, 15 bp, Homo sapiens
atgctcttcagttcg

SEQ ID NO: 649134 - DNA, 15 bp, Homo sapiens
tgctcttcagttcgt

SEQ ID NO: 649135 - DNA, 15 bp, Homo sapiens
gctcttcagttcgtg

SEQ ID NO: 649136 - DNA, 15 bp, Homo sapiens
ctcttcagttcgtgt

SEQ ID NO: 649137 - DNA, 15 bp, Homo sapiens
tcttcagttcgtgtg

SEQ ID NO: 649138 - DNA, 15 bp, Homo sapiens
cttcagttcgtgtgt

SEQ ID NO: 649139 - DNA, 15 bp, Homo sapiens
ttcagttcgtgtgtg

SEQ ID NO: 649140 - DNA, 15 bp, Homo sapiens
tcagttcgtgtgtgg

SEQ ID NO: 649141 - DNA, 15 bp, Homo sapiens
cagttcgtgtgtgga

SEQ ID NO: 649142 - DNA, 15 bp, Homo sapiens
agttcgtgtgtggag

SEQ ID NO: 649143 - DNA, 15 bp, Homo sapiens
gttcgtgtgtggaga

SEQ ID NO: 649144 - DNA, 15 bp, Homo sapiens
ttcgtgtgtggagac

SEQ ID NO: 649145 - DNA, 15 bp, Homo sapiens
tcgtgtgtggagaca

SEQ ID NO: 649146 - DNA, 15 bp, Homo sapiens
cgtgtgtggagacag

SEQ ID NO: 649147 - DNA, 15 bp, Homo sapiens
gtgtgtggagacagg

SEQ ID NO: 649148 - DNA, 15 bp, Homo sapiens
tgtgtggagacaggg

SEQ ID NO: 649149 - DNA, 15 bp, Homo sapiens
gtgtggagacagggg

SEQ ID NO: 649150 - DNA, 15 bp, Homo sapiens
tgtggagacaggggc

SEQ ID NO: 649151 - DNA, 15 bp, Homo sapiens
gtggagacaggggct

SEQ ID NO: 649152 - DNA, 15 bp, Homo sapiens
tggagacaggggctt

SEQ ID NO: 649153 - DNA, 15 bp, Homo sapiens
ggagacaggggcttt

SEQ ID NO: 649154 - DNA, 15 bp, Homo sapiens
gagacaggggctttt

SEQ ID NO: 649155 - DNA, 15 bp, Homo sapiens
agacaggggctttta

SEQ ID NO: 649156 - DNA, 15 bp, Homo sapiens
gacaggggcttttat

SEQ ID NO: 649157 - DNA, 15 bp, Homo sapiens
acaggggcttttatt

SEQ ID NO: 649158 - DNA, 15 bp, Homo sapiens
caggggcttttattt

SEQ ID NO: 649159 - DNA, 15 bp, Homo sapiens
aggggcttttatttc

SEQ ID NO: 649160 - DNA, 15 bp, Homo sapiens
ggggcttttatttca

SEQ ID NO: 649161 - DNA, 15 bp, Homo sapiens
gggcttttatttcag

SEQ ID NO: 649162 - DNA, 15 bp, Homo sapiens
ggcttttatttcagt

SEQ ID NO: 649163 - DNA, 15 bp, Homo sapiens
gcttttatttcagta

SEQ ID NO: 649164 - DNA, 15 bp, Homo sapiens
cttttatttcagtaa

SEQ ID NO: 649165 - DNA, 15 bp, Homo sapiens
ttttatttcagtaag

SEQ ID NO: 649166 - DNA, 15 bp, Homo sapiens
tttatttcagtaagt

SEQ ID NO: 649167 - DNA, 15 bp, Homo sapiens
ttatttcagtaagta

SEQ ID NO: 649168 - DNA, 15 bp, Homo sapiens
tatttcagtaagtag

SEQ ID NO: 649169 - DNA, 15 bp, Homo sapiens
atttcagtaagtagc

SEQ ID NO: 649170 - DNA, 15 bp, Homo sapiens
tttcagtaagtagcc

SEQ ID NO: 649171 - DNA, 15 bp, Homo sapiens
ttcagtaagtagccc

SEQ ID NO: 649172 - DNA, 15 bp, Homo sapiens
tcagtaagtagccct

SEQ ID NO: 649173 - DNA, 15 bp, Homo sapiens
cagtaagtagccctc

SEQ ID NO: 649174 - DNA, 15 bp, Homo sapiens
agtaagtagccctcc

SEQ ID NO: 649175 - DNA, 15 bp, Homo sapiens
gtaagtagccctccc

SEQ ID NO: 649176 - DNA, 15 bp, Homo sapiens
taagtagccctccct

SEQ ID NO: 649177 - DNA, 15 bp, Homo sapiens
aagtagccctccctc

SEQ ID NO: 649178 - DNA, 15 bp, Homo sapiens
agtagccctccctct

SEQ ID NO: 649179 - DNA, 15 bp, Homo sapiens
gtagccctccctctc

SEQ ID NO: 649180 - DNA, 15 bp, Homo sapiens
tagccctccctctca

SEQ ID NO: 649181 - DNA, 15 bp, Homo sapiens
agccctccctctcaa

SEQ ID NO: 649182 - DNA, 15 bp, Homo sapiens
gccctccctctcaat

SEQ ID NO: 649183 - DNA, 15 bp, Homo sapiens
ccctccctctcaatg

SEQ ID NO: 649184 - DNA, 15 bp, Homo sapiens
cctccctctcaatgt

SEQ ID NO: 649185 - DNA, 15 bp, Homo sapiens
ctccctctcaatgtg

SEQ ID NO: 649186 - DNA, 15 bp, Homo sapiens
tccctctcaatgtgc

SEQ ID NO: 649187 - DNA, 15 bp, Homo sapiens
ccctctcaatgtgct

SEQ ID NO: 649188 - DNA, 15 bp, Homo sapiens
cctctcaatgtgctg

SEQ ID NO: 649189 - DNA, 15 bp, Homo sapiens
ctctcaatgtgctgc

SEQ ID NO: 649190 - DNA, 15 bp, Homo sapiens
tctcaatgtgctgct

SEQ ID NO: 649191 - DNA, 15 bp, Homo sapiens
ctcaatgtgctgctc

SEQ ID NO: 649192 - DNA, 15 bp, Homo sapiens
tcaatgtgctgctca

SEQ ID NO: 649193 - DNA, 15 bp, Homo sapiens
caatgtgctgctcaa

SEQ ID NO: 649194 - DNA, 15 bp, Homo sapiens
aatgtgctgctcaag

SEQ ID NO: 649195 - DNA, 15 bp, Homo sapiens
atgtgctgctcaagt

SEQ ID NO: 649196 - DNA, 15 bp, Homo sapiens
tgtgctgctcaagtc

SEQ ID NO: 649197 - DNA, 15 bp, Homo sapiens
gtgctgctcaagtct

SEQ ID NO: 649198 - DNA, 15 bp, Homo sapiens
tgctgctcaagtcta

SEQ ID NO: 649199 - DNA, 15 bp, Homo sapiens
gctgctcaagtctaa

SEQ ID NO: 649200 - DNA, 15 bp, Homo sapiens
ctgctcaagtctaaa

SEQ ID NO: 649201 - DNA, 15 bp, Homo sapiens
tgctcaagtctaaag

SEQ ID NO: 649202 - DNA, 15 bp, Homo sapiens
gctcaagtctaaagt

SEQ ID NO: 649203 - DNA, 15 bp, Homo sapiens
ctcaagtctaaagtg

SEQ ID NO: 649204 - DNA, 15 bp, Homo sapiens
tcaagtctaaagtgt

SEQ ID NO: 649205 - DNA, 15 bp, Homo sapiens
caagtctaaagtgta

SEQ ID NO: 649206 - DNA, 15 bp, Homo sapiens
aagtctaaagtgtac

SEQ ID NO: 649207 - DNA, 15 bp, Homo sapiens
agtctaaagtgtaca

SEQ ID NO: 649208 - DNA, 15 bp, Homo sapiens
gtctaaagtgtacag

SEQ ID NO: 649209 - DNA, 15 bp, Homo sapiens
tctaaagtgtacagc

SEQ ID NO: 649210 - DNA, 15 bp, Homo sapiens
ctaaagtgtacagct

SEQ ID NO: 649211 - DNA, 15 bp, Homo sapiens
taaagtgtacagctc

SEQ ID NO: 649212 - DNA, 15 bp, Homo sapiens
aaagtgtacagctct

SEQ ID NO: 649213 - DNA, 15 bp, Homo sapiens
aagtgtacagctctg

SEQ ID NO: 649214 - DNA, 15 bp, Homo sapiens
agtgtacagctctgt

SEQ ID NO: 649215 - DNA, 15 bp, Homo sapiens
gtgtacagctctgtg

SEQ ID NO: 649216 - DNA, 15 bp, Homo sapiens
tgtacagctctgtgg

SEQ ID NO: 649217 - DNA, 15 bp, Homo sapiens
gtacagctctgtgga

SEQ ID NO: 649218 - DNA, 15 bp, Homo sapiens
tacagctctgtggat

SEQ ID NO: 649219 - DNA, 15 bp, Homo sapiens
acagctctgtggatt

SEQ ID NO: 649220 - DNA, 15 bp, Homo sapiens
cagctctgtggattt

SEQ ID NO: 649221 - DNA, 15 bp, Homo sapiens
agctctgtggattta

SEQ ID NO: 649222 - DNA, 15 bp, Homo sapiens
gctctgtggatttac

SEQ ID NO: 649223 - DNA, 15 bp, Homo sapiens
ctctgtggatttaca

SEQ ID NO: 649224 - DNA, 15 bp, Homo sapiens
tctgtggatttacaa

SEQ ID NO: 649225 - DNA, 15 bp, Homo sapiens
ctgtggatttacaac

SEQ ID NO: 649226 - DNA, 15 bp, Homo sapiens
tgtggatttacaacc

SEQ ID NO: 649227 - DNA, 15 bp, Homo sapiens
gtggatttacaaccg

SEQ ID NO: 649228 - DNA, 15 bp, Homo sapiens
tggatttacaaccgc

SEQ ID NO: 649229 - DNA, 15 bp, Homo sapiens
ggatttacaaccgca

SEQ ID NO: 649230 - DNA, 15 bp, Homo sapiens
gatttacaaccgcag

SEQ ID NO: 649231 - DNA, 15 bp, Homo sapiens
atttacaaccgcagg

SEQ ID NO: 649232 - DNA, 15 bp, Homo sapiens
tttacaaccgcaggg

SEQ ID NO: 649233 - DNA, 15 bp, Homo sapiens
ttacaaccgcaggga

SEQ ID NO: 649234 - DNA, 15 bp, Homo sapiens
tacaaccgcagggag

SEQ ID NO: 649235 - DNA, 15 bp, Homo sapiens
acaaccgcagggagt

SEQ ID NO: 649236 - DNA, 15 bp, Homo sapiens
caaccgcagggagtg

SEQ ID NO: 649237 - DNA, 15 bp, Homo sapiens
aaccgcagggagtgt

SEQ ID NO: 649238 - DNA, 15 bp, Homo sapiens
accgcagggagtgtg

SEQ ID NO: 649239 - DNA, 15 bp, Homo sapiens
ccgcagggagtgtgt

SEQ ID NO: 649240 - DNA, 15 bp, Homo sapiens
cgcagggagtgtgtg

SEQ ID NO: 649241 - DNA, 15 bp, Homo sapiens
gcagggagtgtgtga

SEQ ID NO: 649242 - DNA, 15 bp, Homo sapiens
cagggagtgtgtgaa

SEQ ID NO: 649243 - DNA, 15 bp, Homo sapiens
agggagtgtgtgaat

SEQ ID NO: 649244 - DNA, 15 bp, Homo sapiens
gggagtgtgtgaata

SEQ ID NO: 649245 - DNA, 15 bp, Homo sapiens
ggagtgtgtgaataa

SEQ ID NO: 649246 - DNA, 15 bp, Homo sapiens
gagtgtgtgaataac

SEQ ID NO: 649247 - DNA, 15 bp, Homo sapiens
agtgtgtgaataact

SEQ ID NO: 649248 - DNA, 15 bp, Homo sapiens
gtgtgtgaataactg

SEQ ID NO: 649249 - DNA, 15 bp, Homo sapiens
tgtgtgaataactga

SEQ ID NO: 649250 - DNA, 15 bp, Homo sapiens
gtgtgaataactgaa

SEQ ID NO: 649251 - DNA, 15 bp, Homo sapiens
tgtgaataactgaat

SEQ ID NO: 649252 - DNA, 15 bp, Homo sapiens
gtgaataactgaatg

SEQ ID NO: 649253 - DNA, 15 bp, Homo sapiens
tgaataactgaatga

SEQ ID NO: 649254 - DNA, 15 bp, Homo sapiens
gaataactgaatgag

SEQ ID NO: 649255 - DNA, 15 bp, Homo sapiens
aataactgaatgagt

SEQ ID NO: 649256 - DNA, 15 bp, Homo sapiens
ataactgaatgagtg

SEQ ID NO: 649257 - DNA, 15 bp, Homo sapiens
taactgaatgagtgc

SEQ ID NO: 649258 - DNA, 15 bp, Homo sapiens
aactgaatgagtgcc

SEQ ID NO: 649259 - DNA, 15 bp, Homo sapiens
actgaatgagtgccc

SEQ ID NO: 649260 - DNA, 15 bp, Homo sapiens
ctgaatgagtgcccg

SEQ ID NO: 649261 - DNA, 15 bp, Homo sapiens
tgaatgagtgcccgt

SEQ ID NO: 649262 - DNA, 15 bp, Homo sapiens
gaatgagtgcccgta

SEQ ID NO: 649263 - DNA, 15 bp, Homo sapiens
aatgagtgcccgtat

SEQ ID NO: 649264 - DNA, 15 bp, Homo sapiens
atgagtgcccgtatc

SEQ ID NO: 649265 - DNA, 15 bp, Homo sapiens
tgagtgcccgtatct

SEQ ID NO: 649266 - DNA, 15 bp, Homo sapiens
gagtgcccgtatctg

SEQ ID NO: 649267 - DNA, 15 bp, Homo sapiens
agtgcccgtatctgg

SEQ ID NO: 649268 - DNA, 15 bp, Homo sapiens
gtgcccgtatctggc

SEQ ID NO: 649269 - DNA, 15 bp, Homo sapiens
tgcccgtatctggca

SEQ ID NO: 649270 - DNA, 15 bp, Homo sapiens
gcccgtatctggcag

SEQ ID NO: 649271 - DNA, 15 bp, Homo sapiens
cccgtatctggcagc

SEQ ID NO: 649272 - DNA, 15 bp, Homo sapiens
ccgtatctggcagcc

SEQ ID NO: 649273 - DNA, 15 bp, Homo sapiens
cgtatctggcagcca

SEQ ID NO: 649274 - DNA, 15 bp, Homo sapiens
gtatctggcagccat

SEQ ID NO: 649275 - DNA, 15 bp, Homo sapiens
tatctggcagccatc

SEQ ID NO: 649276 - DNA, 15 bp, Homo sapiens
atctggcagccatcc

SEQ ID NO: 649277 - DNA, 15 bp, Homo sapiens
tctggcagccatcct

SEQ ID NO: 649278 - DNA, 15 bp, Homo sapiens
ctggcagccatccta

SEQ ID NO: 649279 - DNA, 15 bp, Homo sapiens
tggcagccatcctag

SEQ ID NO: 649280 - DNA, 15 bp, Homo sapiens
ggcagccatcctagg

SEQ ID NO: 649281 - DNA, 15 bp, Homo sapiens
gcagccatcctaggc

SEQ ID NO: 649282 - DNA, 15 bp, Homo sapiens
cagccatcctaggcc

SEQ ID NO: 649283 - DNA, 15 bp, Homo sapiens
agccatcctaggcct

SEQ ID NO: 649284 - DNA, 15 bp, Homo sapiens
gccatcctaggcctc

SEQ ID NO: 649285 - DNA, 15 bp, Homo sapiens
ccatcctaggcctct

SEQ ID NO: 649286 - DNA, 15 bp, Homo sapiens
catcctaggcctctg

SEQ ID NO: 649287 - DNA, 15 bp, Homo sapiens
atcctaggcctctga

SEQ ID NO: 649288 - DNA, 15 bp, Homo sapiens
tcctaggcctctgag

SEQ ID NO: 649289 - DNA, 15 bp, Homo sapiens
cctaggcctctgaga

SEQ ID NO: 649290 - DNA, 15 bp, Homo sapiens
ctaggcctctgagat

SEQ ID NO: 649291 - DNA, 15 bp, Homo sapiens
taggcctctgagatt

SEQ ID NO: 649292 - DNA, 15 bp, Homo sapiens
aggcctctgagattc

SEQ ID NO: 649293 - DNA, 15 bp, Homo sapiens
ggcctctgagattcc

SEQ ID NO: 649294 - DNA, 15 bp, Homo sapiens
gcctctgagattcct

SEQ ID NO: 649295 - DNA, 15 bp, Homo sapiens
cctctgagattcctc

SEQ ID NO: 649296 - DNA, 15 bp, Homo sapiens
ctctgagattcctca

SEQ ID NO: 649297 - DNA, 15 bp, Homo sapiens
tctgagattcctcac

SEQ ID NO: 649298 - DNA, 15 bp, Homo sapiens
ctgagattcctcacc

SEQ ID NO: 649299 - DNA, 15 bp, Homo sapiens
tgagattcctcacct

SEQ ID NO: 649300 - DNA, 15 bp, Homo sapiens
gagattcctcacctt

SEQ ID NO: 649301 - DNA, 15 bp, Homo sapiens
agattcctcacctta

SEQ ID NO: 649302 - DNA, 15 bp, Homo sapiens
gattcctcaccttaa

SEQ ID NO: 649303 - DNA, 15 bp, Homo sapiens
attcctcaccttaaa

SEQ ID NO: 649304 - DNA, 15 bp, Homo sapiens
ttcctcaccttaaag

SEQ ID NO: 649305 - DNA, 15 bp, Homo sapiens
tcctcaccttaaagt

SEQ ID NO: 649306 - DNA, 15 bp, Homo sapiens
cctcaccttaaagta

SEQ ID NO: 649307 - DNA, 15 bp, Homo sapiens
ctcaccttaaagtaa

SEQ ID NO: 649308 - DNA, 15 bp, Homo sapiens
tcaccttaaagtaag

SEQ ID NO: 649309 - DNA, 15 bp, Homo sapiens
caccttaaagtaagc

SEQ ID NO: 649310 - DNA, 15 bp, Homo sapiens
accttaaagtaagca

SEQ ID NO: 649311 - DNA, 15 bp, Homo sapiens
ccttaaagtaagcat

SEQ ID NO: 649312 - DNA, 15 bp, Homo sapiens
cttaaagtaagcata

SEQ ID NO: 649313 - DNA, 15 bp, Homo sapiens
ttaaagtaagcatag

SEQ ID NO: 649314 - DNA, 15 bp, Homo sapiens
taaagtaagcatagt

SEQ ID NO: 649315 - DNA, 15 bp, Homo sapiens
aaagtaagcatagtg

SEQ ID NO: 649316 - DNA, 15 bp, Homo sapiens
aagtaagcatagtgt

SEQ ID NO: 649317 - DNA, 15 bp, Homo sapiens
agtaagcatagtgtt

SEQ ID NO: 649318 - DNA, 15 bp, Homo sapiens
gtaagcatagtgttt

SEQ ID NO: 649319 - DNA, 15 bp, Homo sapiens
taagcatagtgtttt

SEQ ID NO: 649320 - DNA, 15 bp, Homo sapiens
aagcatagtgttttg

SEQ ID NO: 649321 - DNA, 15 bp, Homo sapiens
agcatagtgttttgg

SEQ ID NO: 649322 - DNA, 15 bp, Homo sapiens
gcatagtgttttggc

SEQ ID NO: 649323 - DNA, 15 bp, Homo sapiens
catagtgttttggcg

SEQ ID NO: 649324 - DNA, 15 bp, Homo sapiens
atagtgttttggcgg

SEQ ID NO: 649325 - DNA, 15 bp, Homo sapiens
tagtgttttggcggg

SEQ ID NO: 649326 - DNA, 15 bp, Homo sapiens
agtgttttggcggga

SEQ ID NO: 649327 - DNA, 15 bp, Homo sapiens
gtgttttggcgggac

SEQ ID NO: 649328 - DNA, 15 bp, Homo sapiens
tgttttggcgggact

SEQ ID NO: 649329 - DNA, 15 bp, Homo sapiens
gttttggcgggactt

SEQ ID NO: 649330 - DNA, 15 bp, Homo sapiens
ttttggcgggacttt

SEQ ID NO: 649331 - DNA, 15 bp, Homo sapiens
tttggcgggactttg

SEQ ID NO: 649332 - DNA, 15 bp, Homo sapiens
ttggcgggactttgg

SEQ ID NO: 649333 - DNA, 15 bp, Homo sapiens
tggcgggactttggc

SEQ ID NO: 649334 - DNA, 15 bp, Homo sapiens
ggcgggactttggca

SEQ ID NO: 649335 - DNA, 15 bp, Homo sapiens
gcgggactttggcag

SEQ ID NO: 649336 - DNA, 15 bp, Homo sapiens
cgggactttggcagg

SEQ ID NO: 649337 - DNA, 15 bp, Homo sapiens
gggactttggcaggt

SEQ ID NO: 649338 - DNA, 15 bp, Homo sapiens
ggactttggcaggtt

SEQ ID NO: 649339 - DNA, 15 bp, Homo sapiens
gactttggcaggttt

SEQ ID NO: 649340 - DNA, 15 bp, Homo sapiens
actttggcaggtttt

SEQ ID NO: 649341 - DNA, 15 bp, Homo sapiens
ctttggcaggttttg

SEQ ID NO: 649342 - DNA, 15 bp, Homo sapiens
tttggcaggttttgc

SEQ ID NO: 649343 - DNA, 15 bp, Homo sapiens
ttggcaggttttgca

SEQ ID NO: 649344 - DNA, 15 bp, Homo sapiens
tggcaggttttgcag

SEQ ID NO: 649345 - DNA, 15 bp, Homo sapiens
ggcaggttttgcaga

SEQ ID NO: 649346 - DNA, 15 bp, Homo sapiens
gcaggttttgcagat

SEQ ID NO: 649347 - DNA, 15 bp, Homo sapiens
caggttttgcagatc

SEQ ID NO: 649348 - DNA, 15 bp, Homo sapiens
aggttttgcagatct

SEQ ID NO: 649349 - DNA, 15 bp, Homo sapiens
ggttttgcagatcta

SEQ ID NO: 649350 - DNA, 15 bp, Homo sapiens
gttttgcagatctag

SEQ ID NO: 649351 - DNA, 15 bp, Homo sapiens
ttttgcagatctagg

SEQ ID NO: 649352 - DNA, 15 bp, Homo sapiens
tttgcagatctagga

SEQ ID NO: 649353 - DNA, 15 bp, Homo sapiens
ttgcagatctaggat

SEQ ID NO: 649354 - DNA, 15 bp, Homo sapiens
tgcagatctaggatg

SEQ ID NO: 649355 - DNA, 15 bp, Homo sapiens
gcagatctaggatgg

SEQ ID NO: 649356 - DNA, 15 bp, Homo sapiens
cagatctaggatgga

SEQ ID NO: 649357 - DNA, 15 bp, Homo sapiens
agatctaggatggaa

SEQ ID NO: 649358 - DNA, 15 bp, Homo sapiens
gatctaggatggaat

SEQ ID NO: 649359 - DNA, 15 bp, Homo sapiens
atctaggatggaatt

SEQ ID NO: 649360 - DNA, 15 bp, Homo sapiens
tctaggatggaattt

SEQ ID NO: 649361 - DNA, 15 bp, Homo sapiens
ctaggatggaatttt

SEQ ID NO: 649362 - DNA, 15 bp, Homo sapiens
taggatggaattttc

SEQ ID NO: 649363 - DNA, 15 bp, Homo sapiens
aggatggaattttcc

SEQ ID NO: 649364 - DNA, 15 bp, Homo sapiens
ggatggaattttcct

SEQ ID NO: 649365 - DNA, 15 bp, Homo sapiens
gatggaattttcctc

SEQ ID NO: 649366 - DNA, 15 bp, Homo sapiens
atggaattttcctcc

SEQ ID NO: 649367 - DNA, 15 bp, Homo sapiens
tggaattttcctcct

SEQ ID NO: 649368 - DNA, 15 bp, Homo sapiens
ggaattttcctcctt

SEQ ID NO: 649369 - DNA, 15 bp, Homo sapiens
gaattttcctcctta

SEQ ID NO: 649370 - DNA, 15 bp, Homo sapiens
aattttcctccttaa

SEQ ID NO: 649371 - DNA, 15 bp, Homo sapiens
attttcctccttaac

SEQ ID NO: 649372 - DNA, 15 bp, Homo sapiens
ttttcctccttaaca

SEQ ID NO: 649373 - DNA, 15 bp, Homo sapiens
tttcctccttaacaa

SEQ ID NO: 649374 - DNA, 15 bp, Homo sapiens
ttcctccttaacaat

SEQ ID NO: 649375 - DNA, 15 bp, Homo sapiens
tcctccttaacaatt

SEQ ID NO: 649376 - DNA, 15 bp, Homo sapiens
cctccttaacaattc

SEQ ID NO: 649377 - DNA, 15 bp, Homo sapiens
ctccttaacaattcg

SEQ ID NO: 649378 - DNA, 15 bp, Homo sapiens
tccttaacaattcgt

SEQ ID NO: 649379 - DNA, 15 bp, Homo sapiens
ccttaacaattcgtc

SEQ ID NO: 649380 - DNA, 15 bp, Homo sapiens
cttaacaattcgtct

SEQ ID NO: 649381 - DNA, 15 bp, Homo sapiens
ttaacaattcgtctt

SEQ ID NO: 649382 - DNA, 15 bp, Homo sapiens
taacaattcgtcttt

SEQ ID NO: 649383 - DNA, 15 bp, Homo sapiens
aacaattcgtcttta

SEQ ID NO: 649384 - DNA, 15 bp, Homo sapiens
acaattcgtctttaa

SEQ ID NO: 649385 - DNA, 15 bp, Homo sapiens
caattcgtctttaac

SEQ ID NO: 649386 - DNA, 15 bp, Homo sapiens
aattcgtctttaact

SEQ ID NO: 649387 - DNA, 15 bp, Homo sapiens
attcgtctttaacta

SEQ ID NO: 649388 - DNA, 15 bp, Homo sapiens
ttcgtctttaactac

SEQ ID NO: 649389 - DNA, 15 bp, Homo sapiens
tcgtctttaactact

SEQ ID NO: 649390 - DNA, 15 bp, Homo sapiens
cgtctttaactactt

SEQ ID NO: 649391 - DNA, 15 bp, Homo sapiens
gtctttaactacttc

SEQ ID NO: 649392 - DNA, 15 bp, Homo sapiens
tctttaactacttcc

SEQ ID NO: 649393 - DNA, 15 bp, Homo sapiens
ctttaactacttcct

SEQ ID NO: 649394 - DNA, 15 bp, Homo sapiens
tttaactacttcctg

SEQ ID NO: 649395 - DNA, 15 bp, Homo sapiens
ttaactacttcctgc

SEQ ID NO: 649396 - DNA, 15 bp, Homo sapiens
taactacttcctgct

SEQ ID NO: 649397 - DNA, 15 bp, Homo sapiens
aactacttcctgcta

SEQ ID NO: 649398 - DNA, 15 bp, Homo sapiens
actacttcctgctaa

SEQ ID NO: 649399 - DNA, 15 bp, Homo sapiens
ctacttcctgctaag

SEQ ID NO: 649400 - DNA, 15 bp, Homo sapiens
tacttcctgctaagc

SEQ ID NO: 649401 - DNA, 15 bp, Homo sapiens
acttcctgctaagcc

SEQ ID NO: 649402 - DNA, 15 bp, Homo sapiens
cttcctgctaagcct

SEQ ID NO: 649403 - DNA, 15 bp, Homo sapiens
ttcctgctaagcctt

SEQ ID NO: 649404 - DNA, 15 bp, Homo sapiens
tcctgctaagccttc

SEQ ID NO: 649405 - DNA, 15 bp, Homo sapiens
cctgctaagccttct

SEQ ID NO: 649406 - DNA, 15 bp, Homo sapiens
ctgctaagccttctt

SEQ ID NO: 649407 - DNA, 15 bp, Homo sapiens
tgctaagccttcttt

SEQ ID NO: 649408 - DNA, 15 bp, Homo sapiens
gctaagccttctttc

SEQ ID NO: 649409 - DNA, 15 bp, Homo sapiens
ctaagccttctttca

SEQ ID NO: 649410 - DNA, 15 bp, Homo sapiens
taagccttctttcaa

SEQ ID NO: 649411 - DNA, 15 bp, Homo sapiens
aagccttctttcaac

SEQ ID NO: 649412 - DNA, 15 bp, Homo sapiens
agccttctttcaact

SEQ ID NO: 649413 - DNA, 15 bp, Homo sapiens
gccttctttcaacta

SEQ ID NO: 649414 - DNA, 15 bp, Homo sapiens
ccttctttcaactat

SEQ ID NO: 649415 - DNA, 15 bp, Homo sapiens
cttctttcaactatt

SEQ ID NO: 649416 - DNA, 15 bp, Homo sapiens
ttctttcaactatta

SEQ ID NO: 649417 - DNA, 15 bp, Homo sapiens
tctttcaactattat

SEQ ID NO: 649418 - DNA, 15 bp, Homo sapiens
ctttcaactattatg

SEQ ID NO: 649419 - DNA, 15 bp, Homo sapiens
tttcaactattatga

SEQ ID NO: 649420 - DNA, 15 bp, Homo sapiens
ttcaactattatgat

SEQ ID NO: 649421 - DNA, 15 bp, Homo sapiens
tcaactattatgatc

SEQ ID NO: 649422 - DNA, 15 bp, Homo sapiens
caactattatgatcc

SEQ ID NO: 649423 - DNA, 15 bp, Homo sapiens
aactattatgatcca

SEQ ID NO: 649424 - DNA, 15 bp, Homo sapiens
actattatgatccac

SEQ ID NO: 649425 - DNA, 15 bp, Homo sapiens
ctattatgatccacc

SEQ ID NO: 649426 - DNA, 15 bp, Homo sapiens
tattatgatccacct

SEQ ID NO: 649427 - DNA, 15 bp, Homo sapiens
attatgatccacctc

SEQ ID NO: 649428 - DNA, 15 bp, Homo sapiens
ttatgatccacctca

SEQ ID NO: 649429 - DNA, 15 bp, Homo sapiens
tatgatccacctcac

SEQ ID NO: 649430 - DNA, 15 bp, Homo sapiens
atgatccacctcact

SEQ ID NO: 649431 - DNA, 15 bp, Homo sapiens
tgatccacctcacta

SEQ ID NO: 649432 - DNA, 15 bp, Homo sapiens
gatccacctcactat

SEQ ID NO: 649433 - DNA, 15 bp, Homo sapiens
atccacctcactatt

SEQ ID NO: 649434 - DNA, 15 bp, Homo sapiens
tccacctcactattc

SEQ ID NO: 649435 - DNA, 15 bp, Homo sapiens
ccacctcactattcc

SEQ ID NO: 649436 - DNA, 15 bp, Homo sapiens
cacctcactattcca

SEQ ID NO: 649437 - DNA, 15 bp, Homo sapiens
acctcactattccat

SEQ ID NO: 649438 - DNA, 15 bp, Homo sapiens
cctcactattccatt

SEQ ID NO: 649439 - DNA, 15 bp, Homo sapiens
ctcactattccattc

SEQ ID NO: 649440 - DNA, 15 bp, Homo sapiens
tcactattccattcc

SEQ ID NO: 649441 - DNA, 15 bp, Homo sapiens
cactattccattcct

SEQ ID NO: 649442 - DNA, 15 bp, Homo sapiens
actattccattcctt

SEQ ID NO: 649443 - DNA, 15 bp, Homo sapiens
ctattccattccttt

SEQ ID NO: 649444 - DNA, 15 bp, Homo sapiens
tattccattcctttc

SEQ ID NO: 649445 - DNA, 15 bp, Homo sapiens
attccattcctttca

SEQ ID NO: 649446 - DNA, 15 bp, Homo sapiens
ttccattcctttcaa

SEQ ID NO: 649447 - DNA, 15 bp, Homo sapiens
tccattcctttcaat

SEQ ID NO: 649448 - DNA, 15 bp, Homo sapiens
ccattcctttcaatg

SEQ ID NO: 649449 - DNA, 15 bp, Homo sapiens
cattcctttcaatga

SEQ ID NO: 649450 - DNA, 15 bp, Homo sapiens
attcctttcaatgaa

SEQ ID NO: 649451 - DNA, 15 bp, Homo sapiens
ttcctttcaatgaaa

SEQ ID NO: 649452 - DNA, 15 bp, Homo sapiens
tcctttcaatgaaag

SEQ ID NO: 649453 - DNA, 15 bp, Homo sapiens
cctttcaatgaaagg

SEQ ID NO: 649454 - DNA, 15 bp, Homo sapiens
ctttcaatgaaagga

SEQ ID NO: 649455 - DNA, 15 bp, Homo sapiens
tttcaatgaaaggac

SEQ ID NO: 649456 - DNA, 15 bp, Homo sapiens
ttcaatgaaaggaca

SEQ ID NO: 649457 - DNA, 15 bp, Homo sapiens
tcaatgaaaggacag

SEQ ID NO: 649458 - DNA, 15 bp, Homo sapiens
caatgaaaggacagg

SEQ ID NO: 649459 - DNA, 15 bp, Homo sapiens
aatgaaaggacagga

SEQ ID NO: 649460 - DNA, 15 bp, Homo sapiens
atgaaaggacaggac

SEQ ID NO: 649461 - DNA, 15 bp, Homo sapiens
tgaaaggacaggaca

SEQ ID NO: 649462 - DNA, 15 bp, Homo sapiens
gaaaggacaggacaa

SEQ ID NO: 649463 - DNA, 15 bp, Homo sapiens
aaaggacaggacaaa

SEQ ID NO: 649464 - DNA, 15 bp, Homo sapiens
aaggacaggacaaaa

SEQ ID NO: 649465 - DNA, 15 bp, Homo sapiens
aggacaggacaaaat

SEQ ID NO: 649466 - DNA, 15 bp, Homo sapiens
ggacaggacaaaata

SEQ ID NO: 649467 - DNA, 15 bp, Homo sapiens
gacaggacaaaataa

SEQ ID NO: 649468 - DNA, 15 bp, Homo sapiens
acaggacaaaataac

SEQ ID NO: 649469 - DNA, 15 bp, Homo sapiens
caggacaaaataacc

SEQ ID NO: 649470 - DNA, 15 bp, Homo sapiens
aggacaaaataaccc

SEQ ID NO: 649471 - DNA, 15 bp, Homo sapiens
ggacaaaataaccct

SEQ ID NO: 649472 - DNA, 15 bp, Homo sapiens
gacaaaataaccctg

SEQ ID NO: 649473 - DNA, 15 bp, Homo sapiens
acaaaataaccctga

SEQ ID NO: 649474 - DNA, 15 bp, Homo sapiens
caaaataaccctgag

SEQ ID NO: 649475 - DNA, 15 bp, Homo sapiens
aaaataaccctgagg

SEQ ID NO: 649476 - DNA, 15 bp, Homo sapiens
aaataaccctgaggt

SEQ ID NO: 649477 - DNA, 15 bp, Homo sapiens
aataaccctgaggta

SEQ ID NO: 649478 - DNA, 15 bp, Homo sapiens
ataaccctgaggtat

SEQ ID NO: 649479 - DNA, 15 bp, Homo sapiens
taaccctgaggtatt

SEQ ID NO: 649480 - DNA, 15 bp, Homo sapiens
aaccctgaggtattg

SEQ ID NO: 649481 - DNA, 15 bp, Homo sapiens
accctgaggtattga

SEQ ID NO: 649482 - DNA, 15 bp, Homo sapiens
ccctgaggtattgat

SEQ ID NO: 649483 - DNA, 15 bp, Homo sapiens
cctgaggtattgatg

SEQ ID NO: 649484 - DNA, 15 bp, Homo sapiens
ctgaggtattgatgt

SEQ ID NO: 649485 - DNA, 15 bp, Homo sapiens
tgaggtattgatgtt

SEQ ID NO: 649486 - DNA, 15 bp, Homo sapiens
gaggtattgatgttt

SEQ ID NO: 649487 - DNA, 15 bp, Homo sapiens
aggtattgatgtttt

SEQ ID NO: 649488 - DNA, 15 bp, Homo sapiens
ggtattgatgttttt

SEQ ID NO: 649489 - DNA, 15 bp, Homo sapiens
gtattgatgtttttg

SEQ ID NO: 649490 - DNA, 15 bp, Homo sapiens
tattgatgtttttgt

SEQ ID NO: 649491 - DNA, 15 bp, Homo sapiens
attgatgtttttgtt

SEQ ID NO: 649492 - DNA, 15 bp, Homo sapiens
ttgatgtttttgttt

SEQ ID NO: 649493 - DNA, 15 bp, Homo sapiens
tgatgtttttgtttt

SEQ ID NO: 649494 - DNA, 15 bp, Homo sapiens
gatgtttttgttttc

SEQ ID NO: 649495 - DNA, 15 bp, Homo sapiens
atgtttttgttttca

SEQ ID NO: 649496 - DNA, 15 bp, Homo sapiens
tgtttttgttttcaa

SEQ ID NO: 649497 - DNA, 15 bp, Homo sapiens
gtttttgttttcaaa

SEQ ID NO: 649498 - DNA, 15 bp, Homo sapiens
tttttgttttcaaaa

SEQ ID NO: 649499 - DNA, 15 bp, Homo sapiens
ttttgttttcaaaac

SEQ ID NO: 649500 - DNA, 15 bp, Homo sapiens
tttgttttcaaaacc

SEQ ID NO: 649501 - DNA, 15 bp, Homo sapiens
ttgttttcaaaacct

SEQ ID NO: 649502 - DNA, 15 bp, Homo sapiens
tgttttcaaaaccta

SEQ ID NO: 649503 - DNA, 15 bp, Homo sapiens
gttttcaaaacctat

SEQ ID NO: 649504 - DNA, 15 bp, Homo sapiens
ttttcaaaacctatg

SEQ ID NO: 649505 - DNA, 15 bp, Homo sapiens
tttcaaaacctatgg

SEQ ID NO: 649506 - DNA, 15 bp, Homo sapiens
ttcaaaacctatggg

SEQ ID NO: 649507 - DNA, 15 bp, Homo sapiens
tcaaaacctatgggc

SEQ ID NO: 649508 - DNA, 15 bp, Homo sapiens
caaaacctatgggcg

SEQ ID NO: 649509 - DNA, 15 bp, Homo sapiens
aaaacctatgggcgc

SEQ ID NO: 649510 - DNA, 15 bp, Homo sapiens
aaacctatgggcgca

SEQ ID NO: 649511 - DNA, 15 bp, Homo sapiens
aacctatgggcgcac

SEQ ID NO: 649512 - DNA, 15 bp, Homo sapiens
acctatgggcgcaca

SEQ ID NO: 649513 - DNA, 15 bp, Homo sapiens
cctatgggcgcacat

SEQ ID NO: 649514 - DNA, 15 bp, Homo sapiens
ctatgggcgcacata

SEQ ID NO: 649515 - DNA, 15 bp, Homo sapiens
tatgggcgcacatat

SEQ ID NO: 649516 - DNA, 15 bp, Homo sapiens
atgggcgcacatata

SEQ ID NO: 649517 - DNA, 15 bp, Homo sapiens
tgggcgcacatataa

SEQ ID NO: 649518 - DNA, 15 bp, Homo sapiens
gggcgcacatataaa

SEQ ID NO: 649519 - DNA, 15 bp, Homo sapiens
ggcgcacatataaac

SEQ ID NO: 649520 - DNA, 15 bp, Homo sapiens
gcgcacatataaaca

SEQ ID NO: 649521 - DNA, 15 bp, Homo sapiens
cgcacatataaacat

SEQ ID NO: 649522 - DNA, 15 bp, Homo sapiens
gcacatataaacata

SEQ ID NO: 649523 - DNA, 15 bp, Homo sapiens
cacatataaacatat

SEQ ID NO: 649524 - DNA, 15 bp, Homo sapiens
acatataaacatatg

SEQ ID NO: 649525 - DNA, 15 bp, Homo sapiens
catataaacatatgg

SEQ ID NO: 649526 - DNA, 15 bp, Homo sapiens
atataaacatatgga

SEQ ID NO: 649527 - DNA, 15 bp, Homo sapiens
tataaacatatggaa

SEQ ID NO: 649528 - DNA, 15 bp, Homo sapiens
ataaacatatggaac

SEQ ID NO: 649529 - DNA, 15 bp, Homo sapiens
taaacatatggaaca

SEQ ID NO: 649530 - DNA, 15 bp, Homo sapiens
aaacatatggaacac

SEQ ID NO: 649531 - DNA, 15 bp, Homo sapiens
aacatatggaacaca

SEQ ID NO: 649532 - DNA, 15 bp, Homo sapiens
acatatggaacacat

SEQ ID NO: 649533 - DNA, 15 bp, Homo sapiens
catatggaacacatg

SEQ ID NO: 649534 - DNA, 15 bp, Homo sapiens
atatggaacacatgc

SEQ ID NO: 649535 - DNA, 15 bp, Homo sapiens
tatggaacacatgca

SEQ ID NO: 649536 - DNA, 15 bp, Homo sapiens
atggaacacatgcag

SEQ ID NO: 649537 - DNA, 15 bp, Homo sapiens
tggaacacatgcagg

SEQ ID NO: 649538 - DNA, 15 bp, Homo sapiens
ggaacacatgcaggg

SEQ ID NO: 649539 - DNA, 15 bp, Homo sapiens
gaacacatgcagggc

SEQ ID NO: 649540 - DNA, 15 bp, Homo sapiens
aacacatgcagggct

SEQ ID NO: 649541 - DNA, 15 bp, Homo sapiens
acacatgcagggctg

SEQ ID NO: 649542 - DNA, 15 bp, Homo sapiens
cacatgcagggctgc

SEQ ID NO: 649543 - DNA, 15 bp, Homo sapiens
acatgcagggctgct

SEQ ID NO: 649544 - DNA, 15 bp, Homo sapiens
catgcagggctgctt

SEQ ID NO: 649545 - DNA, 15 bp, Homo sapiens
atgcagggctgcttt

SEQ ID NO: 649546 - DNA, 15 bp, Homo sapiens
tgcagggctgcttta

SEQ ID NO: 649547 - DNA, 15 bp, Homo sapiens
gcagggctgctttaa

SEQ ID NO: 649548 - DNA, 15 bp, Homo sapiens
cagggctgctttaag

SEQ ID NO: 649549 - DNA, 15 bp, Homo sapiens
agggctgctttaagt

SEQ ID NO: 649550 - DNA, 15 bp, Homo sapiens
gggctgctttaagtg

SEQ ID NO: 649551 - DNA, 15 bp, Homo sapiens
ggctgctttaagtgc

SEQ ID NO: 649552 - DNA, 15 bp, Homo sapiens
gctgctttaagtgct

SEQ ID NO: 649553 - DNA, 15 bp, Homo sapiens
ctgctttaagtgcta

SEQ ID NO: 649554 - DNA, 15 bp, Homo sapiens
tgctttaagtgctat

SEQ ID NO: 649555 - DNA, 15 bp, Homo sapiens
gctttaagtgctatg

SEQ ID NO: 649556 - DNA, 15 bp, Homo sapiens
ctttaagtgctatgt

SEQ ID NO: 649557 - DNA, 15 bp, Homo sapiens
tttaagtgctatgtg

SEQ ID NO: 649558 - DNA, 15 bp, Homo sapiens
ttaagtgctatgtga

SEQ ID NO: 649559 - DNA, 15 bp, Homo sapiens
taagtgctatgtgat

SEQ ID NO: 649560 - DNA, 15 bp, Homo sapiens
aagtgctatgtgatt

SEQ ID NO: 649561 - DNA, 15 bp, Homo sapiens
agtgctatgtgattt

SEQ ID NO: 649562 - DNA, 15 bp, Homo sapiens
gtgctatgtgatttg

SEQ ID NO: 649563 - DNA, 15 bp, Homo sapiens
tgctatgtgatttgg

SEQ ID NO: 649564 - DNA, 15 bp, Homo sapiens
gctatgtgatttgga

SEQ ID NO: 649565 - DNA, 15 bp, Homo sapiens
ctatgtgatttggag

SEQ ID NO: 649566 - DNA, 15 bp, Homo sapiens
tatgtgatttggagt

SEQ ID NO: 649567 - DNA, 15 bp, Homo sapiens
atgtgatttggagta

SEQ ID NO: 649568 - DNA, 15 bp, Homo sapiens
tgtgatttggagtaa

SEQ ID NO: 649569 - DNA, 15 bp, Homo sapiens
gtgatttggagtaaa

SEQ ID NO: 649570 - DNA, 15 bp, Homo sapiens
tgatttggagtaaaa

SEQ ID NO: 649571 - DNA, 15 bp, Homo sapiens
gatttggagtaaaat

SEQ ID NO: 649572 - DNA, 15 bp, Homo sapiens
atttggagtaaaata

SEQ ID NO: 649573 - DNA, 15 bp, Homo sapiens
tttggagtaaaatag

SEQ ID NO: 649574 - DNA, 15 bp, Homo sapiens
ttggagtaaaatagt

SEQ ID NO: 649575 - DNA, 15 bp, Homo sapiens
tggagtaaaatagta

SEQ ID NO: 649576 - DNA, 15 bp, Homo sapiens
ggagtaaaatagtaa

SEQ ID NO: 649577 - DNA, 15 bp, Homo sapiens
gagtaaaatagtaag

SEQ ID NO: 649578 - DNA, 15 bp, Homo sapiens
agtaaaatagtaagg

SEQ ID NO: 649579 - DNA, 15 bp, Homo sapiens
gtaaaatagtaagga

SEQ ID NO: 649580 - DNA, 15 bp, Homo sapiens
taaaatagtaaggac

SEQ ID NO: 649581 - DNA, 15 bp, Homo sapiens
aaaatagtaaggact

SEQ ID NO: 649582 - DNA, 15 bp, Homo sapiens
aaatagtaaggactc

SEQ ID NO: 649583 - DNA, 15 bp, Homo sapiens
aatagtaaggactct

SEQ ID NO: 649584 - DNA, 15 bp, Homo sapiens
atagtaaggactctc

SEQ ID NO: 649585 - DNA, 15 bp, Homo sapiens
tagtaaggactctcc

SEQ ID NO: 649586 - DNA, 15 bp, Homo sapiens
agtaaggactctcca

SEQ ID NO: 649587 - DNA, 15 bp, Homo sapiens
gtaaggactctccag

SEQ ID NO: 649588 - DNA, 15 bp, Homo sapiens
taaggactctccagt

SEQ ID NO: 649589 - DNA, 15 bp, Homo sapiens
aaggactctccagtc

SEQ ID NO: 649590 - DNA, 15 bp, Homo sapiens
aggactctccagtca

SEQ ID NO: 649591 - DNA, 15 bp, Homo sapiens
ggactctccagtcat

SEQ ID NO: 649592 - DNA, 15 bp, Homo sapiens
gactctccagtcatg

SEQ ID NO: 649593 - DNA, 15 bp, Homo sapiens
actctccagtcatgt

SEQ ID NO: 649594 - DNA, 15 bp, Homo sapiens
ctctccagtcatgtg

SEQ ID NO: 649595 - DNA, 15 bp, Homo sapiens
tctccagtcatgtgg

SEQ ID NO: 649596 - DNA, 15 bp, Homo sapiens
ctccagtcatgtgga

SEQ ID NO: 649597 - DNA, 15 bp, Homo sapiens
tccagtcatgtggat

SEQ ID NO: 649598 - DNA, 15 bp, Homo sapiens
ccagtcatgtggatc

SEQ ID NO: 649599 - DNA, 15 bp, Homo sapiens
cagtcatgtggatct

SEQ ID NO: 649600 - DNA, 15 bp, Homo sapiens
agtcatgtggatctg

SEQ ID NO: 649601 - DNA, 15 bp, Homo sapiens
gtcatgtggatctgg

SEQ ID NO: 649602 - DNA, 15 bp, Homo sapiens
tcatgtggatctggg

SEQ ID NO: 649603 - DNA, 15 bp, Homo sapiens
catgtggatctggga

SEQ ID NO: 649604 - DNA, 15 bp, Homo sapiens
atgtggatctgggaa

SEQ ID NO: 649605 - DNA, 15 bp, Homo sapiens
tgtggatctgggaaa

SEQ ID NO: 649606 - DNA, 15 bp, Homo sapiens
gtggatctgggaaaa

SEQ ID NO: 649607 - DNA, 15 bp, Homo sapiens
tggatctgggaaaaa

SEQ ID NO: 649608 - DNA, 15 bp, Homo sapiens
ggatctgggaaaaaa

SEQ ID NO: 649609 - DNA, 15 bp, Homo sapiens
gatctgggaaaaaaa

SEQ ID NO: 649610 - DNA, 15 bp, Homo sapiens
atctgggaaaaaaaa

SEQ ID NO: 649611 - DNA, 15 bp, Homo sapiens
tctgggaaaaaaaat

SEQ ID NO: 649612 - DNA, 15 bp, Homo sapiens
ctgggaaaaaaaata

SEQ ID NO: 649613 - DNA, 15 bp, Homo sapiens
tgggaaaaaaaatat

SEQ ID NO: 649614 - DNA, 15 bp, Homo sapiens
gggaaaaaaaatatt

SEQ ID NO: 649615 - DNA, 15 bp, Homo sapiens
ggaaaaaaaatatta

SEQ ID NO: 649616 - DNA, 15 bp, Homo sapiens
gaaaaaaaatattaa

SEQ ID NO: 649617 - DNA, 15 bp, Homo sapiens
aaaaaaaatattaaa

SEQ ID NO: 649618 - DNA, 15 bp, Homo sapiens
aaaaaaatattaaag

SEQ ID NO: 649619 - DNA, 15 bp, Homo sapiens
aaaaaatattaaagg

SEQ ID NO: 649620 - DNA, 15 bp, Homo sapiens
aaaaatattaaaggg

SEQ ID NO: 649621 - DNA, 15 bp, Homo sapiens
aaaatattaaagggc

SEQ ID NO: 649622 - DNA, 15 bp, Homo sapiens
aaatattaaagggca

SEQ ID NO: 649623 - DNA, 15 bp, Homo sapiens
aatattaaagggcat

SEQ ID NO: 649624 - DNA, 15 bp, Homo sapiens
atattaaagggcata

SEQ ID NO: 649625 - DNA, 15 bp, Homo sapiens
tattaaagggcatat

SEQ ID NO: 649626 - DNA, 15 bp, Homo sapiens
attaaagggcatatc

SEQ ID NO: 649627 - DNA, 15 bp, Homo sapiens
ttaaagggcatatcc

SEQ ID NO: 649628 - DNA, 15 bp, Homo sapiens
taaagggcatatcct

SEQ ID NO: 649629 - DNA, 15 bp, Homo sapiens
aaagggcatatccta

SEQ ID NO: 649630 - DNA, 15 bp, Homo sapiens
aagggcatatcctag

SEQ ID NO: 649631 - DNA, 15 bp, Homo sapiens
agggcatatcctaga

SEQ ID NO: 649632 - DNA, 15 bp, Homo sapiens
gggcatatcctagat

SEQ ID NO: 649633 - DNA, 15 bp, Homo sapiens
ggcatatcctagatg

SEQ ID NO: 649634 - DNA, 15 bp, Homo sapiens
gcatatcctagatgt

SEQ ID NO: 649635 - DNA, 15 bp, Homo sapiens
catatcctagatgtc

SEQ ID NO: 649636 - DNA, 15 bp, Homo sapiens
atatcctagatgtct

SEQ ID NO: 649637 - DNA, 15 bp, Homo sapiens
tatcctagatgtctc

SEQ ID NO: 649638 - DNA, 15 bp, Homo sapiens
atcctagatgtctcc

SEQ ID NO: 649639 - DNA, 15 bp, Homo sapiens
tcctagatgtctcca

SEQ ID NO: 649640 - DNA, 15 bp, Homo sapiens
cctagatgtctccat

SEQ ID NO: 649641 - DNA, 15 bp, Homo sapiens
ctagatgtctccatt

SEQ ID NO: 649642 - DNA, 15 bp, Homo sapiens
tagatgtctccattc

SEQ ID NO: 649643 - DNA, 15 bp, Homo sapiens
agatgtctccattca

SEQ ID NO: 649644 - DNA, 15 bp, Homo sapiens
gatgtctccattcaa

SEQ ID NO: 649645 - DNA, 15 bp, Homo sapiens
atgtctccattcaat

SEQ ID NO: 649646 - DNA, 15 bp, Homo sapiens
tgtctccattcaata

SEQ ID NO: 649647 - DNA, 15 bp, Homo sapiens
gtctccattcaatat

SEQ ID NO: 649648 - DNA, 15 bp, Homo sapiens
tctccattcaatatg

SEQ ID NO: 649649 - DNA, 15 bp, Homo sapiens
ctccattcaatatga

SEQ ID NO: 649650 - DNA, 15 bp, Homo sapiens
tccattcaatatgaa

SEQ ID NO: 649651 - DNA, 15 bp, Homo sapiens
ccattcaatatgaaa

SEQ ID NO: 649652 - DNA, 15 bp, Homo sapiens
cattcaatatgaaat

SEQ ID NO: 649653 - DNA, 15 bp, Homo sapiens
attcaatatgaaatc

SEQ ID NO: 649654 - DNA, 15 bp, Homo sapiens
ttcaatatgaaatca

SEQ ID NO: 649655 - DNA, 15 bp, Homo sapiens
tcaatatgaaatcac

SEQ ID NO: 649656 - DNA, 15 bp, Homo sapiens
caatatgaaatcacc

SEQ ID NO: 649657 - DNA, 15 bp, Homo sapiens
aatatgaaatcacca

SEQ ID NO: 649658 - DNA, 15 bp, Homo sapiens
atatgaaatcaccat

SEQ ID NO: 649659 - DNA, 15 bp, Homo sapiens
tatgaaatcaccatg

SEQ ID NO: 649660 - DNA, 15 bp, Homo sapiens
atgaaatcaccatga

SEQ ID NO: 649661 - DNA, 15 bp, Homo sapiens
tgaaatcaccatgaa

SEQ ID NO: 649662 - DNA, 15 bp, Homo sapiens
gaaatcaccatgaac

SEQ ID NO: 649663 - DNA, 15 bp, Homo sapiens
aaatcaccatgaaca

SEQ ID NO: 649664 - DNA, 15 bp, Homo sapiens
aatcaccatgaacag

SEQ ID NO: 649665 - DNA, 15 bp, Homo sapiens
atcaccatgaacaga

SEQ ID NO: 649666 - DNA, 15 bp, Homo sapiens
tcaccatgaacagac

SEQ ID NO: 649667 - DNA, 15 bp, Homo sapiens
caccatgaacagaca

SEQ ID NO: 649668 - DNA, 15 bp, Homo sapiens
accatgaacagacag

SEQ ID NO: 649669 - DNA, 15 bp, Homo sapiens
ccatgaacagacaga

SEQ ID NO: 649670 - DNA, 15 bp, Homo sapiens
catgaacagacagaa

SEQ ID NO: 649671 - DNA, 15 bp, Homo sapiens
atgaacagacagaag

SEQ ID NO: 649672 - DNA, 15 bp, Homo sapiens
tgaacagacagaagg

SEQ ID NO: 649673 - DNA, 15 bp, Homo sapiens
gaacagacagaaggt

SEQ ID NO: 649674 - DNA, 15 bp, Homo sapiens
aacagacagaaggtt

SEQ ID NO: 649675 - DNA, 15 bp, Homo sapiens
acagacagaaggtta

SEQ ID NO: 649676 - DNA, 15 bp, Homo sapiens
cagacagaaggttaa

SEQ ID NO: 649677 - DNA, 15 bp, Homo sapiens
agacagaaggttaac

SEQ ID NO: 649678 - DNA, 15 bp, Homo sapiens
gacagaaggttaact

SEQ ID NO: 649679 - DNA, 15 bp, Homo sapiens
acagaaggttaactc

SEQ ID NO: 649680 - DNA, 15 bp, Homo sapiens
cagaaggttaactcc

SEQ ID NO: 649681 - DNA, 15 bp, Homo sapiens
agaaggttaactccc

SEQ ID NO: 649682 - DNA, 15 bp, Homo sapiens
gaaggttaactcccc

SEQ ID NO: 649683 - DNA, 15 bp, Homo sapiens
aaggttaactcccct

SEQ ID NO: 649684 - DNA, 15 bp, Homo sapiens
aggttaactcccctt

SEQ ID NO: 649685 - DNA, 15 bp, Homo sapiens
ggttaactcccctta

SEQ ID NO: 649686 - DNA, 15 bp, Homo sapiens
gttaactccccttaa

SEQ ID NO: 649687 - DNA, 15 bp, Homo sapiens
ttaactccccttaaa

SEQ ID NO: 649688 - DNA, 15 bp, Homo sapiens
taactccccttaaag

SEQ ID NO: 649689 - DNA, 15 bp, Homo sapiens
aactccccttaaagg

SEQ ID NO: 649690 - DNA, 15 bp, Homo sapiens
actccccttaaaggc

SEQ ID NO: 649691 - DNA, 15 bp, Homo sapiens
ctccccttaaaggca

SEQ ID NO: 649692 - DNA, 15 bp, Homo sapiens
tccccttaaaggcag

SEQ ID NO: 649693 - DNA, 15 bp, Homo sapiens
ccccttaaaggcagg

SEQ ID NO: 649694 - DNA, 15 bp, Homo sapiens
cccttaaaggcaggc

SEQ ID NO: 649695 - DNA, 15 bp, Homo sapiens
ccttaaaggcaggcc

SEQ ID NO: 649696 - DNA, 15 bp, Homo sapiens
cttaaaggcaggcct

SEQ ID NO: 649697 - DNA, 15 bp, Homo sapiens
ttaaaggcaggcctg

SEQ ID NO: 649698 - DNA, 15 bp, Homo sapiens
taaaggcaggcctgt

SEQ ID NO: 649699 - DNA, 15 bp, Homo sapiens
aaaggcaggcctgtt

SEQ ID NO: 649700 - DNA, 15 bp, Homo sapiens
aaggcaggcctgttt

SEQ ID NO: 649701 - DNA, 15 bp, Homo sapiens
aggcaggcctgtttg

SEQ ID NO: 649702 - DNA, 15 bp, Homo sapiens
ggcaggcctgtttgc

SEQ ID NO: 649703 - DNA, 15 bp, Homo sapiens
gcaggcctgtttgca

SEQ ID NO: 649704 - DNA, 15 bp, Homo sapiens
caggcctgtttgcaa

SEQ ID NO: 649705 - DNA, 15 bp, Homo sapiens
aggcctgtttgcaaa

SEQ ID NO: 649706 - DNA, 15 bp, Homo sapiens
ggcctgtttgcaaat

SEQ ID NO: 649707 - DNA, 15 bp, Homo sapiens
gcctgtttgcaaata

SEQ ID NO: 649708 - DNA, 15 bp, Homo sapiens
cctgtttgcaaatac

SEQ ID NO: 649709 - DNA, 15 bp, Homo sapiens
ctgtttgcaaataca

SEQ ID NO: 649710 - DNA, 15 bp, Homo sapiens
tgtttgcaaatacac

SEQ ID NO: 649711 - DNA, 15 bp, Homo sapiens
gtttgcaaatacaca

SEQ ID NO: 649712 - DNA, 15 bp, Homo sapiens
tttgcaaatacacag

SEQ ID NO: 649713 - DNA, 15 bp, Homo sapiens
ttgcaaatacacaga

SEQ ID NO: 649714 - DNA, 15 bp, Homo sapiens
tgcaaatacacagac

SEQ ID NO: 649715 - DNA, 15 bp, Homo sapiens
gcaaatacacagact

SEQ ID NO: 649716 - DNA, 15 bp, Homo sapiens
caaatacacagactg

SEQ ID NO: 649717 - DNA, 15 bp, Homo sapiens
aaatacacagactgt

SEQ ID NO: 649718 - DNA, 15 bp, Homo sapiens
aatacacagactgtc

SEQ ID NO: 649719 - DNA, 15 bp, Homo sapiens
atacacagactgtct

SEQ ID NO: 649720 - DNA, 15 bp, Homo sapiens
tacacagactgtctc

SEQ ID NO: 649721 - DNA, 15 bp, Homo sapiens
acacagactgtctct

SEQ ID NO: 649722 - DNA, 15 bp, Homo sapiens
cacagactgtctcta

SEQ ID NO: 649723 - DNA, 15 bp, Homo sapiens
acagactgtctctaa

SEQ ID NO: 649724 - DNA, 15 bp, Homo sapiens
cagactgtctctaaa

SEQ ID NO: 649725 - DNA, 15 bp, Homo sapiens
agactgtctctaaat

SEQ ID NO: 649726 - DNA, 15 bp, Homo sapiens
gactgtctctaaatg

SEQ ID NO: 649727 - DNA, 15 bp, Homo sapiens
actgtctctaaatgc

SEQ ID NO: 649728 - DNA, 15 bp, Homo sapiens
ctgtctctaaatgca

SEQ ID NO: 649729 - DNA, 15 bp, Homo sapiens
tgtctctaaatgcaa

SEQ ID NO: 649730 - DNA, 15 bp, Homo sapiens
gtctctaaatgcaaa

SEQ ID NO: 649731 - DNA, 15 bp, Homo sapiens
tctctaaatgcaaac

SEQ ID NO: 649732 - DNA, 15 bp, Homo sapiens
ctctaaatgcaaact

SEQ ID NO: 649733 - DNA, 15 bp, Homo sapiens
tctaaatgcaaactg

SEQ ID NO: 649734 - DNA, 15 bp, Homo sapiens
ctaaatgcaaactga

SEQ ID NO: 649735 - DNA, 15 bp, Homo sapiens
taaatgcaaactgaa

SEQ ID NO: 649736 - DNA, 15 bp, Homo sapiens
aaatgcaaactgaaa

SEQ ID NO: 649737 - DNA, 15 bp, Homo sapiens
aatgcaaactgaaat

SEQ ID NO: 649738 - DNA, 15 bp, Homo sapiens
atgcaaactgaaatg

SEQ ID NO: 649739 - DNA, 15 bp, Homo sapiens
tgcaaactgaaatgc

SEQ ID NO: 649740 - DNA, 15 bp, Homo sapiens
gcaaactgaaatgcc

SEQ ID NO: 649741 - DNA, 15 bp, Homo sapiens
caaactgaaatgcca

SEQ ID NO: 649742 - DNA, 15 bp, Homo sapiens
aaactgaaatgccat

SEQ ID NO: 649743 - DNA, 15 bp, Homo sapiens
aactgaaatgccata

SEQ ID NO: 649744 - DNA, 15 bp, Homo sapiens
actgaaatgccatac

SEQ ID NO: 649745 - DNA, 15 bp, Homo sapiens
ctgaaatgccatact

SEQ ID NO: 649746 - DNA, 15 bp, Homo sapiens
tgaaatgccatactg

SEQ ID NO: 649747 - DNA, 15 bp, Homo sapiens
gaaatgccatactga

SEQ ID NO: 649748 - DNA, 15 bp, Homo sapiens
aaatgccatactgat

SEQ ID NO: 649749 - DNA, 15 bp, Homo sapiens
aatgccatactgatt

SEQ ID NO: 649750 - DNA, 15 bp, Homo sapiens
atgccatactgattt

SEQ ID NO: 649751 - DNA, 15 bp, Homo sapiens
tgccatactgatttg

SEQ ID NO: 649752 - DNA, 15 bp, Homo sapiens
gccatactgatttgc

SEQ ID NO: 649753 - DNA, 15 bp, Homo sapiens
ccatactgatttgcc

SEQ ID NO: 649754 - DNA, 15 bp, Homo sapiens
catactgatttgccc

SEQ ID NO: 649755 - DNA, 15 bp, Homo sapiens
atactgatttgccct

SEQ ID NO: 649756 - DNA, 15 bp, Homo sapiens
tactgatttgccctc

SEQ ID NO: 649757 - DNA, 15 bp, Homo sapiens
actgatttgccctct

SEQ ID NO: 649758 - DNA, 15 bp, Homo sapiens
ctgatttgccctcta

SEQ ID NO: 649759 - DNA, 15 bp, Homo sapiens
tgatttgccctctat

SEQ ID NO: 649760 - DNA, 15 bp, Homo sapiens
gatttgccctctatg

SEQ ID NO: 649761 - DNA, 15 bp, Homo sapiens
atttgccctctatgc

SEQ ID NO: 649762 - DNA, 15 bp, Homo sapiens
tttgccctctatgcc

SEQ ID NO: 649763 - DNA, 15 bp, Homo sapiens
ttgccctctatgcca

SEQ ID NO: 649764 - DNA, 15 bp, Homo sapiens
tgccctctatgccac

SEQ ID NO: 649765 - DNA, 15 bp, Homo sapiens
gccctctatgccact

SEQ ID NO: 649766 - DNA, 15 bp, Homo sapiens
ccctctatgccactt

SEQ ID NO: 649767 - DNA, 15 bp, Homo sapiens
cctctatgccacttg

SEQ ID NO: 649768 - DNA, 15 bp, Homo sapiens
ctctatgccacttga

SEQ ID NO: 649769 - DNA, 15 bp, Homo sapiens
tctatgccacttgac

SEQ ID NO: 649770 - DNA, 15 bp, Homo sapiens
ctatgccacttgacc

SEQ ID NO: 649771 - DNA, 15 bp, Homo sapiens
tatgccacttgacct

SEQ ID NO: 649772 - DNA, 15 bp, Homo sapiens
atgccacttgacctt

SEQ ID NO: 649773 - DNA, 15 bp, Homo sapiens
tgccacttgaccttg

SEQ ID NO: 649774 - DNA, 15 bp, Homo sapiens
gccacttgaccttga

SEQ ID NO: 649775 - DNA, 15 bp, Homo sapiens
ccacttgaccttgat

SEQ ID NO: 649776 - DNA, 15 bp, Homo sapiens
cacttgaccttgatt

SEQ ID NO: 649777 - DNA, 15 bp, Homo sapiens
acttgaccttgattt

SEQ ID NO: 649778 - DNA, 15 bp, Homo sapiens
cttgaccttgatttt

SEQ ID NO: 649779 - DNA, 15 bp, Homo sapiens
ttgaccttgattttt

SEQ ID NO: 649780 - DNA, 15 bp, Homo sapiens
tgaccttgatttttt

SEQ ID NO: 649781 - DNA, 15 bp, Homo sapiens
gaccttgattttttt

SEQ ID NO: 649782 - DNA, 15 bp, Homo sapiens
accttgatttttttg

SEQ ID NO: 649783 - DNA, 15 bp, Homo sapiens
ccttgatttttttgt

SEQ ID NO: 649784 - DNA, 15 bp, Homo sapiens
cttgatttttttgtt

SEQ ID NO: 649785 - DNA, 15 bp, Homo sapiens
ttgatttttttgttg

SEQ ID NO: 649786 - DNA, 15 bp, Homo sapiens
tgatttttttgttgt

SEQ ID NO: 649787 - DNA, 15 bp, Homo sapiens
gatttttttgttgtt

SEQ ID NO: 649788 - DNA, 15 bp, Homo sapiens
atttttttgttgttg

SEQ ID NO: 649789 - DNA, 15 bp, Homo sapiens
tttttttgttgttgc

SEQ ID NO: 649790 - DNA, 15 bp, Homo sapiens
ttttttgttgttgct

SEQ ID NO: 649791 - DNA, 15 bp, Homo sapiens
tttttgttgttgctc

SEQ ID NO: 649792 - DNA, 15 bp, Homo sapiens
ttttgttgttgctct

SEQ ID NO: 649793 - DNA, 15 bp, Homo sapiens
tttgttgttgctctc

SEQ ID NO: 649794 - DNA, 15 bp, Homo sapiens
ttgttgttgctctct

SEQ ID NO: 649795 - DNA, 15 bp, Homo sapiens
tgttgttgctctctt

SEQ ID NO: 649796 - DNA, 15 bp, Homo sapiens
gttgttgctctcttt

SEQ ID NO: 649797 - DNA, 15 bp, Homo sapiens
ttgttgctctctttt

SEQ ID NO: 649798 - DNA, 15 bp, Homo sapiens
tgttgctctcttttg

SEQ ID NO: 649799 - DNA, 15 bp, Homo sapiens
gttgctctcttttgg

SEQ ID NO: 649800 - DNA, 15 bp, Homo sapiens
ttgctctcttttggc

SEQ ID NO: 649801 - DNA, 15 bp, Homo sapiens
tgctctcttttggca

SEQ ID NO: 649802 - DNA, 15 bp, Homo sapiens
gctctcttttggcat

SEQ ID NO: 649803 - DNA, 15 bp, Homo sapiens
ctctcttttggcata

SEQ ID NO: 649804 - DNA, 15 bp, Homo sapiens
tctcttttggcatag

SEQ ID NO: 649805 - DNA, 15 bp, Homo sapiens
ctcttttggcatagt

SEQ ID NO: 649806 - DNA, 15 bp, Homo sapiens
tcttttggcatagtt

SEQ ID NO: 649807 - DNA, 15 bp, Homo sapiens
cttttggcatagttc

SEQ ID NO: 649808 - DNA, 15 bp, Homo sapiens
ttttggcatagttct

SEQ ID NO: 649809 - DNA, 15 bp, Homo sapiens
tttggcatagttctt

SEQ ID NO: 649810 - DNA, 15 bp, Homo sapiens
ttggcatagttcttc

SEQ ID NO: 649811 - DNA, 15 bp, Homo sapiens
tggcatagttcttct

SEQ ID NO: 649812 - DNA, 15 bp, Homo sapiens
ggcatagttcttctc

SEQ ID NO: 649813 - DNA, 15 bp, Homo sapiens
gcatagttcttctcc

SEQ ID NO: 649814 - DNA, 15 bp, Homo sapiens
catagttcttctccg

SEQ ID NO: 649815 - DNA, 15 bp, Homo sapiens
atagttcttctccgg

SEQ ID NO: 649816 - DNA, 15 bp, Homo sapiens
tagttcttctccggg

SEQ ID NO: 649817 - DNA, 15 bp, Homo sapiens
agttcttctccggga

SEQ ID NO: 649818 - DNA, 15 bp, Homo sapiens
gttcttctccgggac

SEQ ID NO: 649819 - DNA, 15 bp, Homo sapiens
ttcttctccgggacc

SEQ ID NO: 649820 - DNA, 15 bp, Homo sapiens
tcttctccgggaccc

SEQ ID NO: 649821 - DNA, 15 bp, Homo sapiens
cttctccgggaccca

SEQ ID NO: 649822 - DNA, 15 bp, Homo sapiens
ttctccgggacccat

SEQ ID NO: 649823 - DNA, 15 bp, Homo sapiens
tctccgggacccatc

SEQ ID NO: 649824 - DNA, 15 bp, Homo sapiens
ctccgggacccatca

SEQ ID NO: 649825 - DNA, 15 bp, Homo sapiens
tccgggacccatcaa

SEQ ID NO: 649826 - DNA, 15 bp, Homo sapiens
ccgggacccatcaat

SEQ ID NO: 649827 - DNA, 15 bp, Homo sapiens
cgggacccatcaatg

SEQ ID NO: 649828 - DNA, 15 bp, Homo sapiens
gggacccatcaatga

SEQ ID NO: 649829 - DNA, 15 bp, Homo sapiens
ggacccatcaatgat

SEQ ID NO: 649830 - DNA, 15 bp, Homo sapiens
gacccatcaatgata

SEQ ID NO: 649831 - DNA, 15 bp, Homo sapiens
acccatcaatgatat

SEQ ID NO: 649832 - DNA, 15 bp, Homo sapiens
cccatcaatgatatc

SEQ ID NO: 649833 - DNA, 15 bp, Homo sapiens
ccatcaatgatatca

SEQ ID NO: 649834 - DNA, 15 bp, Homo sapiens
catcaatgatatcac

SEQ ID NO: 649835 - DNA, 15 bp, Homo sapiens
atcaatgatatcacc

SEQ ID NO: 649836 - DNA, 15 bp, Homo sapiens
tcaatgatatcacca

SEQ ID NO: 649837 - DNA, 15 bp, Homo sapiens
caatgatatcaccat

SEQ ID NO: 649838 - DNA, 15 bp, Homo sapiens
aatgatatcaccatc

SEQ ID NO: 649839 - DNA, 15 bp, Homo sapiens
atgatatcaccatct

SEQ ID NO: 649840 - DNA, 15 bp, Homo sapiens
tgatatcaccatctg

SEQ ID NO: 649841 - DNA, 15 bp, Homo sapiens
gatatcaccatctgg

SEQ ID NO: 649842 - DNA, 15 bp, Homo sapiens
atatcaccatctgga

SEQ ID NO: 649843 - DNA, 15 bp, Homo sapiens
tatcaccatctggaa

SEQ ID NO: 649844 - DNA, 15 bp, Homo sapiens
atcaccatctggaaa

SEQ ID NO: 649845 - DNA, 15 bp, Homo sapiens
tcaccatctggaaaa

SEQ ID NO: 649846 - DNA, 15 bp, Homo sapiens
caccatctggaaaag

SEQ ID NO: 649847 - DNA, 15 bp, Homo sapiens
accatctggaaaagg

SEQ ID NO: 649848 - DNA, 15 bp, Homo sapiens
ccatctggaaaaggg

SEQ ID NO: 649849 - DNA, 15 bp, Homo sapiens
catctggaaaagggt

SEQ ID NO: 649850 - DNA, 15 bp, Homo sapiens
atctggaaaagggtc

SEQ ID NO: 649851 - DNA, 15 bp, Homo sapiens
tctggaaaagggtct

SEQ ID NO: 649852 - DNA, 15 bp, Homo sapiens
ctggaaaagggtctc

SEQ ID NO: 649853 - DNA, 15 bp, Homo sapiens
tggaaaagggtctct

SEQ ID NO: 649854 - DNA, 15 bp, Homo sapiens
ggaaaagggtctctg

SEQ ID NO: 649855 - DNA, 15 bp, Homo sapiens
gaaaagggtctctga

SEQ ID NO: 649856 - DNA, 15 bp, Homo sapiens
aaaagggtctctgac

SEQ ID NO: 649857 - DNA, 15 bp, Homo sapiens
aaagggtctctgaca

SEQ ID NO: 649858 - DNA, 15 bp, Homo sapiens
aagggtctctgacaa

SEQ ID NO: 649859 - DNA, 15 bp, Homo sapiens
agggtctctgacaag

SEQ ID NO: 649860 - DNA, 15 bp, Homo sapiens
gggtctctgacaagt

SEQ ID NO: 649861 - DNA, 15 bp, Homo sapiens
ggtctctgacaagta

SEQ ID NO: 649862 - DNA, 15 bp, Homo sapiens
gtctctgacaagtac

SEQ ID NO: 649863 - DNA, 15 bp, Homo sapiens
tctctgacaagtaca

SEQ ID NO: 649864 - DNA, 15 bp, Homo sapiens
ctctgacaagtacag

SEQ ID NO: 649865 - DNA, 15 bp, Homo sapiens
tctgacaagtacaga

SEQ ID NO: 649866 - DNA, 15 bp, Homo sapiens
ctgacaagtacagaa

SEQ ID NO: 649867 - DNA, 15 bp, Homo sapiens
tgacaagtacagaat

SEQ ID NO: 649868 - DNA, 15 bp, Homo sapiens
gacaagtacagaatc

SEQ ID NO: 649869 - DNA, 15 bp, Homo sapiens
acaagtacagaatca

SEQ ID NO: 649870 - DNA, 15 bp, Homo sapiens
caagtacagaatcac

SEQ ID NO: 649871 - DNA, 15 bp, Homo sapiens
aagtacagaatcact

SEQ ID NO: 649872 - DNA, 15 bp, Homo sapiens
agtacagaatcactt

SEQ ID NO: 649873 - DNA, 15 bp, Homo sapiens
gtacagaatcactta

SEQ ID NO: 649874 - DNA, 15 bp, Homo sapiens
tacagaatcacttat

SEQ ID NO: 649875 - DNA, 15 bp, Homo sapiens
acagaatcacttatc

SEQ ID NO: 649876 - DNA, 15 bp, Homo sapiens
cagaatcacttatct

SEQ ID NO: 649877 - DNA, 15 bp, Homo sapiens
agaatcacttatctc

SEQ ID NO: 649878 - DNA, 15 bp, Homo sapiens
gaatcacttatctct

SEQ ID NO: 649879 - DNA, 15 bp, Homo sapiens
aatcacttatctctt

SEQ ID NO: 649880 - DNA, 15 bp, Homo sapiens
atcacttatctctta

SEQ ID NO: 649881 - DNA, 15 bp, Homo sapiens
tcacttatctcttaa

SEQ ID NO: 649882 - DNA, 15 bp, Homo sapiens
cacttatctcttaaa

SEQ ID NO: 649883 - DNA, 15 bp, Homo sapiens
acttatctcttaaat

SEQ ID NO: 649884 - DNA, 15 bp, Homo sapiens
cttatctcttaaata

SEQ ID NO: 649885 - DNA, 15 bp, Homo sapiens
ttatctcttaaatag

SEQ ID NO: 649886 - DNA, 15 bp, Homo sapiens
tatctcttaaatagc

SEQ ID NO: 649887 - DNA, 15 bp, Homo sapiens
atctcttaaatagct

SEQ ID NO: 649888 - DNA, 15 bp, Homo sapiens
tctcttaaatagctc

SEQ ID NO: 649889 - DNA, 15 bp, Homo sapiens
ctcttaaatagctct

SEQ ID NO: 649890 - DNA, 15 bp, Homo sapiens
tcttaaatagctctt

SEQ ID NO: 649891 - DNA, 15 bp, Homo sapiens
cttaaatagctctta

SEQ ID NO: 649892 - DNA, 15 bp, Homo sapiens
ttaaatagctcttag

SEQ ID NO: 649893 - DNA, 15 bp, Homo sapiens
taaatagctcttagg

SEQ ID NO: 649894 - DNA, 15 bp, Homo sapiens
aaatagctcttaggt

SEQ ID NO: 649895 - DNA, 15 bp, Homo sapiens
aatagctcttaggtg

SEQ ID NO: 649896 - DNA, 15 bp, Homo sapiens
atagctcttaggtga

SEQ ID NO: 649897 - DNA, 15 bp, Homo sapiens
tagctcttaggtgat

SEQ ID NO: 649898 - DNA, 15 bp, Homo sapiens
agctcttaggtgatt

SEQ ID NO: 649899 - DNA, 15 bp, Homo sapiens
gctcttaggtgatta

SEQ ID NO: 649900 - DNA, 15 bp, Homo sapiens
ctcttaggtgattag

SEQ ID NO: 649901 - DNA, 15 bp, Homo sapiens
tcttaggtgattaga

SEQ ID NO: 649902 - DNA, 15 bp, Homo sapiens
cttaggtgattagaa

SEQ ID NO: 649903 - DNA, 15 bp, Homo sapiens
ttaggtgattagaaa

SEQ ID NO: 649904 - DNA, 15 bp, Homo sapiens
taggtgattagaaag

SEQ ID NO: 649905 - DNA, 15 bp, Homo sapiens
aggtgattagaaagt

SEQ ID NO: 649906 - DNA, 15 bp, Homo sapiens
ggtgattagaaagtc

SEQ ID NO: 649907 - DNA, 15 bp, Homo sapiens
gtgattagaaagtca

SEQ ID NO: 649908 - DNA, 15 bp, Homo sapiens
tgattagaaagtcaa

SEQ ID NO: 649909 - DNA, 15 bp, Homo sapiens
gattagaaagtcaac

SEQ ID NO: 649910 - DNA, 15 bp, Homo sapiens
attagaaagtcaaca

SEQ ID NO: 649911 - DNA, 15 bp, Homo sapiens
ttagaaagtcaacag

SEQ ID NO: 649912 - DNA, 15 bp, Homo sapiens
tagaaagtcaacagc

SEQ ID NO: 649913 - DNA, 15 bp, Homo sapiens
agaaagtcaacagcc

SEQ ID NO: 649914 - DNA, 15 bp, Homo sapiens
gaaagtcaacagcca

SEQ ID NO: 649915 - DNA, 15 bp, Homo sapiens
aaagtcaacagccag

SEQ ID NO: 649916 - DNA, 15 bp, Homo sapiens
aagtcaacagccagt

SEQ ID NO: 649917 - DNA, 15 bp, Homo sapiens
agtcaacagccagta

SEQ ID NO: 649918 - DNA, 15 bp, Homo sapiens
gtcaacagccagtaa

SEQ ID NO: 649919 - DNA, 15 bp, Homo sapiens
tcaacagccagtaaa

SEQ ID NO: 649920 - DNA, 15 bp, Homo sapiens
caacagccagtaaaa

SEQ ID NO: 649921 - DNA, 15 bp, Homo sapiens
aacagccagtaaaaa

SEQ ID NO: 649922 - DNA, 15 bp, Homo sapiens
acagccagtaaaaag

SEQ ID NO: 649923 - DNA, 15 bp, Homo sapiens
cagccagtaaaaagt

SEQ ID NO: 649924 - DNA, 15 bp, Homo sapiens
agccagtaaaaagta

SEQ ID NO: 649925 - DNA, 15 bp, Homo sapiens
gccagtaaaaagtag

SEQ ID NO: 649926 - DNA, 15 bp, Homo sapiens
ccagtaaaaagtaga

SEQ ID NO: 649927 - DNA, 15 bp, Homo sapiens
cagtaaaaagtagac

SEQ ID NO: 649928 - DNA, 15 bp, Homo sapiens
agtaaaaagtagaca

SEQ ID NO: 649929 - DNA, 15 bp, Homo sapiens
gtaaaaagtagacag

SEQ ID NO: 649930 - DNA, 15 bp, Homo sapiens
taaaaagtagacagc

SEQ ID NO: 649931 - DNA, 15 bp, Homo sapiens
aaaaagtagacagcc

SEQ ID NO: 649932 - DNA, 15 bp, Homo sapiens
aaaagtagacagcca

SEQ ID NO: 649933 - DNA, 15 bp, Homo sapiens
aaagtagacagccaa

SEQ ID NO: 649934 - DNA, 15 bp, Homo sapiens
aagtagacagccaag

SEQ ID NO: 649935 - DNA, 15 bp, Homo sapiens
agtagacagccaagt

SEQ ID NO: 649936 - DNA, 15 bp, Homo sapiens
gtagacagccaagtc

SEQ ID NO: 649937 - DNA, 15 bp, Homo sapiens
tagacagccaagtca

SEQ ID NO: 649938 - DNA, 15 bp, Homo sapiens
agacagccaagtcaa

SEQ ID NO: 649939 - DNA, 15 bp, Homo sapiens
gacagccaagtcaag

SEQ ID NO: 649940 - DNA, 15 bp, Homo sapiens
acagccaagtcaagg

SEQ ID NO: 649941 - DNA, 15 bp, Homo sapiens
cagccaagtcaaggc

SEQ ID NO: 649942 - DNA, 15 bp, Homo sapiens
agccaagtcaaggcg

SEQ ID NO: 649943 - DNA, 15 bp, Homo sapiens
gccaagtcaaggcgt

SEQ ID NO: 649944 - DNA, 15 bp, Homo sapiens
ccaagtcaaggcgta

SEQ ID NO: 649945 - DNA, 15 bp, Homo sapiens
caagtcaaggcgtat

SEQ ID NO: 649946 - DNA, 15 bp, Homo sapiens
aagtcaaggcgtata

SEQ ID NO: 649947 - DNA, 15 bp, Homo sapiens
agtcaaggcgtataa

SEQ ID NO: 649948 - DNA, 15 bp, Homo sapiens
gtcaaggcgtataaa

SEQ ID NO: 649949 - DNA, 15 bp, Homo sapiens
tcaaggcgtataaat

SEQ ID NO: 649950 - DNA, 15 bp, Homo sapiens
caaggcgtataaata

SEQ ID NO: 649951 - DNA, 15 bp, Homo sapiens
aaggcgtataaataa

SEQ ID NO: 649952 - DNA, 15 bp, Homo sapiens
aggcgtataaataat

SEQ ID NO: 649953 - DNA, 15 bp, Homo sapiens
ggcgtataaataata

SEQ ID NO: 649954 - DNA, 15 bp, Homo sapiens
gcgtataaataatac

SEQ ID NO: 649955 - DNA, 15 bp, Homo sapiens
cgtataaataataca

SEQ ID NO: 649956 - DNA, 15 bp, Homo sapiens
gtataaataatacac

SEQ ID NO: 649957 - DNA, 15 bp, Homo sapiens
tataaataatacaca

SEQ ID NO: 649958 - DNA, 15 bp, Homo sapiens
ataaataatacacac

SEQ ID NO: 649959 - DNA, 15 bp, Homo sapiens
taaataatacacaca

SEQ ID NO: 649960 - DNA, 15 bp, Homo sapiens
aaataatacacacaa

SEQ ID NO: 649961 - DNA, 15 bp, Homo sapiens
aataatacacacaag

SEQ ID NO: 649962 - DNA, 15 bp, Homo sapiens
ataatacacacaagc

SEQ ID NO: 649963 - DNA, 15 bp, Homo sapiens
taatacacacaagca

SEQ ID NO: 649964 - DNA, 15 bp, Homo sapiens
aatacacacaagcaa

SEQ ID NO: 649965 - DNA, 15 bp, Homo sapiens
atacacacaagcaaa

SEQ ID NO: 649966 - DNA, 15 bp, Homo sapiens
tacacacaagcaaaa

SEQ ID NO: 649967 - DNA, 15 bp, Homo sapiens
acacacaagcaaaag

SEQ ID NO: 649968 - DNA, 15 bp, Homo sapiens
cacacaagcaaaagt

SEQ ID NO: 649969 - DNA, 15 bp, Homo sapiens
acacaagcaaaagtc

SEQ ID NO: 649970 - DNA, 15 bp, Homo sapiens
cacaagcaaaagtca

SEQ ID NO: 649971 - DNA, 15 bp, Homo sapiens
acaagcaaaagtcaa

SEQ ID NO: 649972 - DNA, 15 bp, Homo sapiens
caagcaaaagtcaat

SEQ ID NO: 649973 - DNA, 15 bp, Homo sapiens
aagcaaaagtcaatg

SEQ ID NO: 649974 - DNA, 15 bp, Homo sapiens
agcaaaagtcaatga

SEQ ID NO: 649975 - DNA, 15 bp, Homo sapiens
gcaaaagtcaatgat

SEQ ID NO: 649976 - DNA, 15 bp, Homo sapiens
caaaagtcaatgatt

SEQ ID NO: 649977 - DNA, 15 bp, Homo sapiens
aaaagtcaatgattc

SEQ ID NO: 649978 - DNA, 15 bp, Homo sapiens
aaagtcaatgattcc

SEQ ID NO: 649979 - DNA, 15 bp, Homo sapiens
aagtcaatgattcct

SEQ ID NO: 649980 - DNA, 15 bp, Homo sapiens
agtcaatgattcctg

SEQ ID NO: 649981 - DNA, 15 bp, Homo sapiens
gtcaatgattcctgt

SEQ ID NO: 649982 - DNA, 15 bp, Homo sapiens
tcaatgattcctgtg

SEQ ID NO: 649983 - DNA, 15 bp, Homo sapiens
caatgattcctgtgg

SEQ ID NO: 649984 - DNA, 15 bp, Homo sapiens
aatgattcctgtggg

SEQ ID NO: 649985 - DNA, 15 bp, Homo sapiens
atgattcctgtggga

SEQ ID NO: 649986 - DNA, 15 bp, Homo sapiens
tgattcctgtgggaa

SEQ ID NO: 649987 - DNA, 15 bp, Homo sapiens
gattcctgtgggaac

SEQ ID NO: 649988 - DNA, 15 bp, Homo sapiens
attcctgtgggaact

SEQ ID NO: 649989 - DNA, 15 bp, Homo sapiens
ttcctgtgggaactg

SEQ ID NO: 649990 - DNA, 15 bp, Homo sapiens
tcctgtgggaactga

SEQ ID NO: 649991 - DNA, 15 bp, Homo sapiens
cctgtgggaactgat

SEQ ID NO: 649992 - DNA, 15 bp, Homo sapiens
ctgtgggaactgatc

SEQ ID NO: 649993 - DNA, 15 bp, Homo sapiens
tgtgggaactgatca

SEQ ID NO: 649994 - DNA, 15 bp, Homo sapiens
gtgggaactgatcac

SEQ ID NO: 649995 - DNA, 15 bp, Homo sapiens
tgggaactgatcact

SEQ ID NO: 649996 - DNA, 15 bp, Homo sapiens
gggaactgatcactt

SEQ ID NO: 649997 - DNA, 15 bp, Homo sapiens
ggaactgatcactta

SEQ ID NO: 649998 - DNA, 15 bp, Homo sapiens
gaactgatcacttaa

SEQ ID NO: 649999 - DNA, 15 bp, Homo sapiens
aactgatcacttaaa

SEQ ID NO: 650000 - DNA, 15 bp, Homo sapiens
actgatcacttaaag

SEQ ID NO: 650001 - DNA, 15 bp, Homo sapiens
ctgatcacttaaaga

SEQ ID NO: 650002 - DNA, 15 bp, Homo sapiens
tgatcacttaaagaa

SEQ ID NO: 650003 - DNA, 15 bp, Homo sapiens
gatcacttaaagaat

SEQ ID NO: 650004 - DNA, 15 bp, Homo sapiens
atcacttaaagaatc

SEQ ID NO: 650005 - DNA, 15 bp, Homo sapiens
tcacttaaagaatct

SEQ ID NO: 650006 - DNA, 15 bp, Homo sapiens
cacttaaagaatcta

SEQ ID NO: 650007 - DNA, 15 bp, Homo sapiens
acttaaagaatctag

SEQ ID NO: 650008 - DNA, 15 bp, Homo sapiens
cttaaagaatctagc

SEQ ID NO: 650009 - DNA, 15 bp, Homo sapiens
ttaaagaatctagct

SEQ ID NO: 650010 - DNA, 15 bp, Homo sapiens
taaagaatctagctc

SEQ ID NO: 650011 - DNA, 15 bp, Homo sapiens
aaagaatctagctcc

SEQ ID NO: 650012 - DNA, 15 bp, Homo sapiens
aagaatctagctccc

SEQ ID NO: 650013 - DNA, 15 bp, Homo sapiens
agaatctagctccca

SEQ ID NO: 650014 - DNA, 15 bp, Homo sapiens
gaatctagctcccat

SEQ ID NO: 650015 - DNA, 15 bp, Homo sapiens
aatctagctcccatg

SEQ ID NO: 650016 - DNA, 15 bp, Homo sapiens
atctagctcccatgc

SEQ ID NO: 650017 - DNA, 15 bp, Homo sapiens
tctagctcccatgca

SEQ ID NO: 650018 - DNA, 15 bp, Homo sapiens
ctagctcccatgcat

SEQ ID NO: 650019 - DNA, 15 bp, Homo sapiens
tagctcccatgcatc

SEQ ID NO: 650020 - DNA, 15 bp, Homo sapiens
agctcccatgcatct

SEQ ID NO: 650021 - DNA, 15 bp, Homo sapiens
gctcccatgcatcta

SEQ ID NO: 650022 - DNA, 15 bp, Homo sapiens
ctcccatgcatctat

SEQ ID NO: 650023 - DNA, 15 bp, Homo sapiens
tcccatgcatctatc

SEQ ID NO: 650024 - DNA, 15 bp, Homo sapiens
cccatgcatctatct

SEQ ID NO: 650025 - DNA, 15 bp, Homo sapiens
ccatgcatctatctc

SEQ ID NO: 650026 - DNA, 15 bp, Homo sapiens
catgcatctatctca

SEQ ID NO: 650027 - DNA, 15 bp, Homo sapiens
atgcatctatctcac

SEQ ID NO: 650028 - DNA, 15 bp, Homo sapiens
tgcatctatctcact

SEQ ID NO: 650029 - DNA, 15 bp, Homo sapiens
gcatctatctcactg

SEQ ID NO: 650030 - DNA, 15 bp, Homo sapiens
catctatctcactgt

SEQ ID NO: 650031 - DNA, 15 bp, Homo sapiens
atctatctcactgta

SEQ ID NO: 650032 - DNA, 15 bp, Homo sapiens
tctatctcactgtat

SEQ ID NO: 650033 - DNA, 15 bp, Homo sapiens
ctatctcactgtata

SEQ ID NO: 650034 - DNA, 15 bp, Homo sapiens
tatctcactgtatat

SEQ ID NO: 650035 - DNA, 15 bp, Homo sapiens
atctcactgtatatt

SEQ ID NO: 650036 - DNA, 15 bp, Homo sapiens
tctcactgtatatta

SEQ ID NO: 650037 - DNA, 15 bp, Homo sapiens
ctcactgtatattat

SEQ ID NO: 650038 - DNA, 15 bp, Homo sapiens
tcactgtatattata

SEQ ID NO: 650039 - DNA, 15 bp, Homo sapiens
cactgtatattatag

SEQ ID NO: 650040 - DNA, 15 bp, Homo sapiens
actgtatattatagg

SEQ ID NO: 650041 - DNA, 15 bp, Homo sapiens
ctgtatattatagga

SEQ ID NO: 650042 - DNA, 15 bp, Homo sapiens
tgtatattataggac

SEQ ID NO: 650043 - DNA, 15 bp, Homo sapiens
gtatattataggaca

SEQ ID NO: 650044 - DNA, 15 bp, Homo sapiens
tatattataggacag

SEQ ID NO: 650045 - DNA, 15 bp, Homo sapiens
atattataggacaga

SEQ ID NO: 650046 - DNA, 15 bp, Homo sapiens
tattataggacagag

SEQ ID NO: 650047 - DNA, 15 bp, Homo sapiens
attataggacagaga

SEQ ID NO: 650048 - DNA, 15 bp, Homo sapiens
ttataggacagagaa

SEQ ID NO: 650049 - DNA, 15 bp, Homo sapiens
tataggacagagaaa

SEQ ID NO: 650050 - DNA, 15 bp, Homo sapiens
ataggacagagaaag

SEQ ID NO: 650051 - DNA, 15 bp, Homo sapiens
taggacagagaaaga

SEQ ID NO: 650052 - DNA, 15 bp, Homo sapiens
aggacagagaaagat

SEQ ID NO: 650053 - DNA, 15 bp, Homo sapiens
ggacagagaaagatt

SEQ ID NO: 650054 - DNA, 15 bp, Homo sapiens
gacagagaaagattt

SEQ ID NO: 650055 - DNA, 15 bp, Homo sapiens
acagagaaagattta

SEQ ID NO: 650056 - DNA, 15 bp, Homo sapiens
cagagaaagatttaa

SEQ ID NO: 650057 - DNA, 15 bp, Homo sapiens
agagaaagatttaaa

SEQ ID NO: 650058 - DNA, 15 bp, Homo sapiens
gagaaagatttaaag

SEQ ID NO: 650059 - DNA, 15 bp, Homo sapiens
agaaagatttaaagc

SEQ ID NO: 650060 - DNA, 15 bp, Homo sapiens
gaaagatttaaagcc

SEQ ID NO: 650061 - DNA, 15 bp, Homo sapiens
aaagatttaaagcca

SEQ ID NO: 650062 - DNA, 15 bp, Homo sapiens
aagatttaaagccag

SEQ ID NO: 650063 - DNA, 15 bp, Homo sapiens
agatttaaagccaga

SEQ ID NO: 650064 - DNA, 15 bp, Homo sapiens
gatttaaagccagat

SEQ ID NO: 650065 - DNA, 15 bp, Homo sapiens
atttaaagccagatg

SEQ ID NO: 650066 - DNA, 15 bp, Homo sapiens
tttaaagccagatgc

SEQ ID NO: 650067 - DNA, 15 bp, Homo sapiens
ttaaagccagatgct

SEQ ID NO: 650068 - DNA, 15 bp, Homo sapiens
taaagccagatgctt

SEQ ID NO: 650069 - DNA, 15 bp, Homo sapiens
aaagccagatgcttg

SEQ ID NO: 650070 - DNA, 15 bp, Homo sapiens
aagccagatgcttgt

SEQ ID NO: 650071 - DNA, 15 bp, Homo sapiens
agccagatgcttgtt

SEQ ID NO: 650072 - DNA, 15 bp, Homo sapiens
gccagatgcttgttc

SEQ ID NO: 650073 - DNA, 15 bp, Homo sapiens
ccagatgcttgttcc

SEQ ID NO: 650074 - DNA, 15 bp, Homo sapiens
cagatgcttgttcct

SEQ ID NO: 650075 - DNA, 15 bp, Homo sapiens
agatgcttgttcctt

SEQ ID NO: 650076 - DNA, 15 bp, Homo sapiens
gatgcttgttcctta

SEQ ID NO: 650077 - DNA, 15 bp, Homo sapiens
atgcttgttccttat

SEQ ID NO: 650078 - DNA, 15 bp, Homo sapiens
tgcttgttccttata

SEQ ID NO: 650079 - DNA, 15 bp, Homo sapiens
gcttgttccttataa

SEQ ID NO: 650080 - DNA, 15 bp, Homo sapiens
cttgttccttataat

SEQ ID NO: 650081 - DNA, 15 bp, Homo sapiens
ttgttccttataatt

SEQ ID NO: 650082 - DNA, 15 bp, Homo sapiens
tgttccttataattc

SEQ ID NO: 650083 - DNA, 15 bp, Homo sapiens
gttccttataattct

SEQ ID NO: 650084 - DNA, 15 bp, Homo sapiens
ttccttataattctt

SEQ ID NO: 650085 - DNA, 15 bp, Homo sapiens
tccttataattcttt

SEQ ID NO: 650086 - DNA, 15 bp, Homo sapiens
ccttataattctttg

SEQ ID NO: 650087 - DNA, 15 bp, Homo sapiens
cttataattctttgg

SEQ ID NO: 650088 - DNA, 15 bp, Homo sapiens
ttataattctttgga

SEQ ID NO: 650089 - DNA, 15 bp, Homo sapiens
tataattctttggag

SEQ ID NO: 650090 - DNA, 15 bp, Homo sapiens
ataattctttggagt

SEQ ID NO: 650091 - DNA, 15 bp, Homo sapiens
taattctttggagtt

SEQ ID NO: 650092 - DNA, 15 bp, Homo sapiens
aattctttggagttt

SEQ ID NO: 650093 - DNA, 15 bp, Homo sapiens
attctttggagtttt

SEQ ID NO: 650094 - DNA, 15 bp, Homo sapiens
ttctttggagtttta

SEQ ID NO: 650095 - DNA, 15 bp, Homo sapiens
tctttggagttttag

SEQ ID NO: 650096 - DNA, 15 bp, Homo sapiens
ctttggagttttaga

SEQ ID NO: 650097 - DNA, 15 bp, Homo sapiens
tttggagttttagag

SEQ ID NO: 650098 - DNA, 15 bp, Homo sapiens
ttggagttttagaga

SEQ ID NO: 650099 - DNA, 15 bp, Homo sapiens
tggagttttagagag

SEQ ID NO: 650100 - DNA, 15 bp, Homo sapiens
ggagttttagagagt

SEQ ID NO: 650101 - DNA, 15 bp, Homo sapiens
gagttttagagagtt

SEQ ID NO: 650102 - DNA, 15 bp, Homo sapiens
agttttagagagttc

SEQ ID NO: 650103 - DNA, 15 bp, Homo sapiens
gttttagagagttcc

SEQ ID NO: 650104 - DNA, 15 bp, Homo sapiens
ttttagagagttcca

SEQ ID NO: 650105 - DNA, 15 bp, Homo sapiens
tttagagagttccag

SEQ ID NO: 650106 - DNA, 15 bp, Homo sapiens
ttagagagttccagg

SEQ ID NO: 650107 - DNA, 15 bp, Homo sapiens
tagagagttccagga

SEQ ID NO: 650108 - DNA, 15 bp, Homo sapiens
agagagttccaggaa

SEQ ID NO: 650109 - DNA, 15 bp, Homo sapiens
gagagttccaggaaa

SEQ ID NO: 650110 - DNA, 15 bp, Homo sapiens
agagttccaggaaac

SEQ ID NO: 650111 - DNA, 15 bp, Homo sapiens
gagttccaggaaact

SEQ ID NO: 650112 - DNA, 15 bp, Homo sapiens
agttccaggaaactg

SEQ ID NO: 650113 - DNA, 15 bp, Homo sapiens
gttccaggaaactga

SEQ ID NO: 650114 - DNA, 15 bp, Homo sapiens
ttccaggaaactgag

SEQ ID NO: 650115 - DNA, 15 bp, Homo sapiens
tccaggaaactgagc

SEQ ID NO: 650116 - DNA, 15 bp, Homo sapiens
ccaggaaactgagca

SEQ ID NO: 650117 - DNA, 15 bp, Homo sapiens
caggaaactgagcat

SEQ ID NO: 650118 - DNA, 15 bp, Homo sapiens
aggaaactgagcatg

SEQ ID NO: 650119 - DNA, 15 bp, Homo sapiens
ggaaactgagcatga

SEQ ID NO: 650120 - DNA, 15 bp, Homo sapiens
gaaactgagcatgag

SEQ ID NO: 650121 - DNA, 15 bp, Homo sapiens
aaactgagcatgagt

SEQ ID NO: 650122 - DNA, 15 bp, Homo sapiens
aactgagcatgagtc

SEQ ID NO: 650123 - DNA, 15 bp, Homo sapiens
actgagcatgagtca

SEQ ID NO: 650124 - DNA, 15 bp, Homo sapiens
ctgagcatgagtcat

SEQ ID NO: 650125 - DNA, 15 bp, Homo sapiens
tgagcatgagtcatt

SEQ ID NO: 650126 - DNA, 15 bp, Homo sapiens
gagcatgagtcattc

SEQ ID NO: 650127 - DNA, 15 bp, Homo sapiens
agcatgagtcattct

SEQ ID NO: 650128 - DNA, 15 bp, Homo sapiens
gcatgagtcattctt

SEQ ID NO: 650129 - DNA, 15 bp, Homo sapiens
catgagtcattctta

SEQ ID NO: 650130 - DNA, 15 bp, Homo sapiens
atgagtcattcttaa

SEQ ID NO: 650131 - DNA, 15 bp, Homo sapiens
tgagtcattcttaaa

SEQ ID NO: 650132 - DNA, 15 bp, Homo sapiens
gagtcattcttaaag

SEQ ID NO: 650133 - DNA, 15 bp, Homo sapiens
agtcattcttaaagg

SEQ ID NO: 650134 - DNA, 15 bp, Homo sapiens
gtcattcttaaaggt

SEQ ID NO: 650135 - DNA, 15 bp, Homo sapiens
tcattcttaaaggtt

SEQ ID NO: 650136 - DNA, 15 bp, Homo sapiens
cattcttaaaggttc

SEQ ID NO: 650137 - DNA, 15 bp, Homo sapiens
attcttaaaggttca

SEQ ID NO: 650138 - DNA, 15 bp, Homo sapiens
ttcttaaaggttcat

SEQ ID NO: 650139 - DNA, 15 bp, Homo sapiens
tcttaaaggttcata

SEQ ID NO: 650140 - DNA, 15 bp, Homo sapiens
cttaaaggttcatat

SEQ ID NO: 650141 - DNA, 15 bp, Homo sapiens
ttaaaggttcatatc

SEQ ID NO: 650142 - DNA, 15 bp, Homo sapiens
taaaggttcatatca

SEQ ID NO: 650143 - DNA, 15 bp, Homo sapiens
aaaggttcatatcac

SEQ ID NO: 650144 - DNA, 15 bp, Homo sapiens
aaggttcatatcact

SEQ ID NO: 650145 - DNA, 15 bp, Homo sapiens
aggttcatatcactc

SEQ ID NO: 650146 - DNA, 15 bp, Homo sapiens
ggttcatatcactcc

SEQ ID NO: 650147 - DNA, 15 bp, Homo sapiens
gttcatatcactcca

SEQ ID NO: 650148 - DNA, 15 bp, Homo sapiens
ttcatatcactccag

SEQ ID NO: 650149 - DNA, 15 bp, Homo sapiens
tcatatcactccagt

SEQ ID NO: 650150 - DNA, 15 bp, Homo sapiens
catatcactccagtg

SEQ ID NO: 650151 - DNA, 15 bp, Homo sapiens
atatcactccagtgt

SEQ ID NO: 650152 - DNA, 15 bp, Homo sapiens
tatcactccagtgta

SEQ ID NO: 650153 - DNA, 15 bp, Homo sapiens
atcactccagtgtag

SEQ ID NO: 650154 - DNA, 15 bp, Homo sapiens
tcactccagtgtaga

SEQ ID NO: 650155 - DNA, 15 bp, Homo sapiens
cactccagtgtagac

SEQ ID NO: 650156 - DNA, 15 bp, Homo sapiens
actccagtgtagaca

SEQ ID NO: 650157 - DNA, 15 bp, Homo sapiens
ctccagtgtagacag

SEQ ID NO: 650158 - DNA, 15 bp, Homo sapiens
tccagtgtagacagc

SEQ ID NO: 650159 - DNA, 15 bp, Homo sapiens
ccagtgtagacagct

SEQ ID NO: 650160 - DNA, 15 bp, Homo sapiens
cagtgtagacagctt

SEQ ID NO: 650161 - DNA, 15 bp, Homo sapiens
agtgtagacagctta

SEQ ID NO: 650162 - DNA, 15 bp, Homo sapiens
gtgtagacagcttac

SEQ ID NO: 650163 - DNA, 15 bp, Homo sapiens
tgtagacagcttacc

SEQ ID NO: 650164 - DNA, 15 bp, Homo sapiens
gtagacagcttacct

SEQ ID NO: 650165 - DNA, 15 bp, Homo sapiens
tagacagcttacctc

SEQ ID NO: 650166 - DNA, 15 bp, Homo sapiens
agacagcttacctca

SEQ ID NO: 650167 - DNA, 15 bp, Homo sapiens
gacagcttacctcag

SEQ ID NO: 650168 - DNA, 15 bp, Homo sapiens
acagcttacctcagt

SEQ ID NO: 650169 - DNA, 15 bp, Homo sapiens
cagcttacctcagtt

SEQ ID NO: 650170 - DNA, 15 bp, Homo sapiens
agcttacctcagtta

SEQ ID NO: 650171 - DNA, 15 bp, Homo sapiens
gcttacctcagttac

SEQ ID NO: 650172 - DNA, 15 bp, Homo sapiens
cttacctcagttacc

SEQ ID NO: 650173 - DNA, 15 bp, Homo sapiens
ttacctcagttaccc

SEQ ID NO: 650174 - DNA, 15 bp, Homo sapiens
tacctcagttaccca

SEQ ID NO: 650175 - DNA, 15 bp, Homo sapiens
acctcagttacccac

SEQ ID NO: 650176 - DNA, 15 bp, Homo sapiens
cctcagttacccact

SEQ ID NO: 650177 - DNA, 15 bp, Homo sapiens
ctcagttacccacta

SEQ ID NO: 650178 - DNA, 15 bp, Homo sapiens
tcagttacccactat

SEQ ID NO: 650179 - DNA, 15 bp, Homo sapiens
cagttacccactatg

SEQ ID NO: 650180 - DNA, 15 bp, Homo sapiens
agttacccactatgc

SEQ ID NO: 650181 - DNA, 15 bp, Homo sapiens
gttacccactatgct

SEQ ID NO: 650182 - DNA, 15 bp, Homo sapiens
ttacccactatgctt

SEQ ID NO: 650183 - DNA, 15 bp, Homo sapiens
tacccactatgcttt

SEQ ID NO: 650184 - DNA, 15 bp, Homo sapiens
acccactatgctttg

SEQ ID NO: 650185 - DNA, 15 bp, Homo sapiens
cccactatgctttga

SEQ ID NO: 650186 - DNA, 15 bp, Homo sapiens
ccactatgctttgaa

SEQ ID NO: 650187 - DNA, 15 bp, Homo sapiens
cactatgctttgaat

SEQ ID NO: 650188 - DNA, 15 bp, Homo sapiens
actatgctttgaata

SEQ ID NO: 650189 - DNA, 15 bp, Homo sapiens
ctatgctttgaatag

SEQ ID NO: 650190 - DNA, 15 bp, Homo sapiens
tatgctttgaatagc

SEQ ID NO: 650191 - DNA, 15 bp, Homo sapiens
atgctttgaatagct

SEQ ID NO: 650192 - DNA, 15 bp, Homo sapiens
tgctttgaatagctc

SEQ ID NO: 650193 - DNA, 15 bp, Homo sapiens
gctttgaatagctcc

SEQ ID NO: 650194 - DNA, 15 bp, Homo sapiens
ctttgaatagctcct

SEQ ID NO: 650195 - DNA, 15 bp, Homo sapiens
tttgaatagctcctg

SEQ ID NO: 650196 - DNA, 15 bp, Homo sapiens
ttgaatagctcctgt

SEQ ID NO: 650197 - DNA, 15 bp, Homo sapiens
tgaatagctcctgtg

SEQ ID NO: 650198 - DNA, 15 bp, Homo sapiens
gaatagctcctgtga

SEQ ID NO: 650199 - DNA, 15 bp, Homo sapiens
aatagctcctgtgat

SEQ ID NO: 650200 - DNA, 15 bp, Homo sapiens
atagctcctgtgatg

SEQ ID NO: 650201 - DNA, 15 bp, Homo sapiens
tagctcctgtgatga

SEQ ID NO: 650202 - DNA, 15 bp, Homo sapiens
agctcctgtgatgac

SEQ ID NO: 650203 - DNA, 15 bp, Homo sapiens
gctcctgtgatgact

SEQ ID NO: 650204 - DNA, 15 bp, Homo sapiens
ctcctgtgatgactc

SEQ ID NO: 650205 - DNA, 15 bp, Homo sapiens
tcctgtgatgactca

SEQ ID NO: 650206 - DNA, 15 bp, Homo sapiens
cctgtgatgactcac

SEQ ID NO: 650207 - DNA, 15 bp, Homo sapiens
ctgtgatgactcaca

SEQ ID NO: 650208 - DNA, 15 bp, Homo sapiens
tgtgatgactcacac

SEQ ID NO: 650209 - DNA, 15 bp, Homo sapiens
gtgatgactcacaca

SEQ ID NO: 650210 - DNA, 15 bp, Homo sapiens
tgatgactcacacac

SEQ ID NO: 650211 - DNA, 15 bp, Homo sapiens
gatgactcacacact

SEQ ID NO: 650212 - DNA, 15 bp, Homo sapiens
atgactcacacactt

SEQ ID NO: 650213 - DNA, 15 bp, Homo sapiens
tgactcacacacttg

SEQ ID NO: 650214 - DNA, 15 bp, Homo sapiens
gactcacacacttga

SEQ ID NO: 650215 - DNA, 15 bp, Homo sapiens
actcacacacttgaa

SEQ ID NO: 650216 - DNA, 15 bp, Homo sapiens
ctcacacacttgaag

SEQ ID NO: 650217 - DNA, 15 bp, Homo sapiens
tcacacacttgaagt

SEQ ID NO: 650218 - DNA, 15 bp, Homo sapiens
cacacacttgaagtc

SEQ ID NO: 650219 - DNA, 15 bp, Homo sapiens
acacacttgaagtct

SEQ ID NO: 650220 - DNA, 15 bp, Homo sapiens
cacacttgaagtctc

SEQ ID NO: 650221 - DNA, 15 bp, Homo sapiens
acacttgaagtctct

SEQ ID NO: 650222 - DNA, 15 bp, Homo sapiens
cacttgaagtctctc

SEQ ID NO: 650223 - DNA, 15 bp, Homo sapiens
acttgaagtctctct

SEQ ID NO: 650224 - DNA, 15 bp, Homo sapiens
cttgaagtctctctc

SEQ ID NO: 650225 - DNA, 15 bp, Homo sapiens
ttgaagtctctctca

SEQ ID NO: 650226 - DNA, 15 bp, Homo sapiens
tgaagtctctctcat

SEQ ID NO: 650227 - DNA, 15 bp, Homo sapiens
gaagtctctctcatc

SEQ ID NO: 650228 - DNA, 15 bp, Homo sapiens
aagtctctctcatcc

SEQ ID NO: 650229 - DNA, 15 bp, Homo sapiens
agtctctctcatcct

SEQ ID NO: 650230 - DNA, 15 bp, Homo sapiens
gtctctctcatcctt

SEQ ID NO: 650231 - DNA, 15 bp, Homo sapiens
tctctctcatccttc

SEQ ID NO: 650232 - DNA, 15 bp, Homo sapiens
ctctctcatccttcc

SEQ ID NO: 650233 - DNA, 15 bp, Homo sapiens
tctctcatccttccc

SEQ ID NO: 650234 - DNA, 15 bp, Homo sapiens
ctctcatccttccca

SEQ ID NO: 650235 - DNA, 15 bp, Homo sapiens
tctcatccttcccaa

SEQ ID NO: 650236 - DNA, 15 bp, Homo sapiens
ctcatccttcccaaa

SEQ ID NO: 650237 - DNA, 15 bp, Homo sapiens
tcatccttcccaaat

SEQ ID NO: 650238 - DNA, 15 bp, Homo sapiens
catccttcccaaatg

SEQ ID NO: 650239 - DNA, 15 bp, Homo sapiens
atccttcccaaatgt

SEQ ID NO: 650240 - DNA, 15 bp, Homo sapiens
tccttcccaaatgtc

SEQ ID NO: 650241 - DNA, 15 bp, Homo sapiens
ccttcccaaatgtca

SEQ ID NO: 650242 - DNA, 15 bp, Homo sapiens
cttcccaaatgtcag

SEQ ID NO: 650243 - DNA, 15 bp, Homo sapiens
ttcccaaatgtcagc

SEQ ID NO: 650244 - DNA, 15 bp, Homo sapiens
tcccaaatgtcagcc

SEQ ID NO: 650245 - DNA, 15 bp, Homo sapiens
cccaaatgtcagcct

SEQ ID NO: 650246 - DNA, 15 bp, Homo sapiens
ccaaatgtcagcctc

SEQ ID NO: 650247 - DNA, 15 bp, Homo sapiens
caaatgtcagcctct

SEQ ID NO: 650248 - DNA, 15 bp, Homo sapiens
aaatgtcagcctctc

SEQ ID NO: 650249 - DNA, 15 bp, Homo sapiens
aatgtcagcctctct

SEQ ID NO: 650250 - DNA, 15 bp, Homo sapiens
atgtcagcctctctc

SEQ ID NO: 650251 - DNA, 15 bp, Homo sapiens
tgtcagcctctctct

SEQ ID NO: 650252 - DNA, 15 bp, Homo sapiens
gtcagcctctctcta

SEQ ID NO: 650253 - DNA, 15 bp, Homo sapiens
tcagcctctctctag

SEQ ID NO: 650254 - DNA, 15 bp, Homo sapiens
cagcctctctctagg

SEQ ID NO: 650255 - DNA, 15 bp, Homo sapiens
agcctctctctaggc

SEQ ID NO: 650256 - DNA, 15 bp, Homo sapiens
gcctctctctaggca

SEQ ID NO: 650257 - DNA, 15 bp, Homo sapiens
cctctctctaggcag

SEQ ID NO: 650258 - DNA, 15 bp, Homo sapiens
ctctctctaggcagg

SEQ ID NO: 650259 - DNA, 15 bp, Homo sapiens
tctctctaggcaggt

SEQ ID NO: 650260 - DNA, 15 bp, Homo sapiens
ctctctaggcaggtg

SEQ ID NO: 650261 - DNA, 15 bp, Homo sapiens
tctctaggcaggtgg

SEQ ID NO: 650262 - DNA, 15 bp, Homo sapiens
ctctaggcaggtggg

SEQ ID NO: 650263 - DNA, 15 bp, Homo sapiens
tctaggcaggtgggg

SEQ ID NO: 650264 - DNA, 15 bp, Homo sapiens
ctaggcaggtggggt

SEQ ID NO: 650265 - DNA, 15 bp, Homo sapiens
taggcaggtggggta

SEQ ID NO: 650266 - DNA, 15 bp, Homo sapiens
aggcaggtggggtat

SEQ ID NO: 650267 - DNA, 15 bp, Homo sapiens
ggcaggtggggtatg

SEQ ID NO: 650268 - DNA, 15 bp, Homo sapiens
gcaggtggggtatgt

SEQ ID NO: 650269 - DNA, 15 bp, Homo sapiens
caggtggggtatgtg

SEQ ID NO: 650270 - DNA, 15 bp, Homo sapiens
aggtggggtatgtgt

SEQ ID NO: 650271 - DNA, 15 bp, Homo sapiens
ggtggggtatgtgtg

SEQ ID NO: 650272 - DNA, 15 bp, Homo sapiens
gtggggtatgtgtgt

SEQ ID NO: 650273 - DNA, 15 bp, Homo sapiens
tggggtatgtgtgtg

SEQ ID NO: 650274 - DNA, 15 bp, Homo sapiens
ggggtatgtgtgtgt

SEQ ID NO: 650275 - DNA, 15 bp, Homo sapiens
gggtatgtgtgtgta

SEQ ID NO: 650276 - DNA, 15 bp, Homo sapiens
ggtatgtgtgtgtat

SEQ ID NO: 650277 - DNA, 15 bp, Homo sapiens
gtatgtgtgtgtatg

SEQ ID NO: 650278 - DNA, 15 bp, Homo sapiens
tatgtgtgtgtatga

SEQ ID NO: 650279 - DNA, 15 bp, Homo sapiens
atgtgtgtgtatgac

SEQ ID NO: 650280 - DNA, 15 bp, Homo sapiens
tgtgtgtgtatgact

SEQ ID NO: 650281 - DNA, 15 bp, Homo sapiens
gtgtgtgtatgactg

SEQ ID NO: 650282 - DNA, 15 bp, Homo sapiens
tgtgtgtatgactgg

SEQ ID NO: 650283 - DNA, 15 bp, Homo sapiens
gtgtgtatgactggc

SEQ ID NO: 650284 - DNA, 15 bp, Homo sapiens
tgtgtatgactggca

SEQ ID NO: 650285 - DNA, 15 bp, Homo sapiens
gtgtatgactggcag

SEQ ID NO: 650286 - DNA, 15 bp, Homo sapiens
tgtatgactggcagg

SEQ ID NO: 650287 - DNA, 15 bp, Homo sapiens
gtatgactggcaggg

SEQ ID NO: 650288 - DNA, 15 bp, Homo sapiens
tatgactggcagggt

SEQ ID NO: 650289 - DNA, 15 bp, Homo sapiens
atgactggcagggta

SEQ ID NO: 650290 - DNA, 15 bp, Homo sapiens
tgactggcagggtag

SEQ ID NO: 650291 - DNA, 15 bp, Homo sapiens
gactggcagggtaga

SEQ ID NO: 650292 - DNA, 15 bp, Homo sapiens
actggcagggtagag

SEQ ID NO: 650293 - DNA, 15 bp, Homo sapiens
ctggcagggtagagg

SEQ ID NO: 650294 - DNA, 15 bp, Homo sapiens
tggcagggtagaggg

SEQ ID NO: 650295 - DNA, 15 bp, Homo sapiens
ggcagggtagagggt

SEQ ID NO: 650296 - DNA, 15 bp, Homo sapiens
gcagggtagagggtg

SEQ ID NO: 650297 - DNA, 15 bp, Homo sapiens
cagggtagagggtgg

SEQ ID NO: 650298 - DNA, 15 bp, Homo sapiens
agggtagagggtggc

SEQ ID NO: 650299 - DNA, 15 bp, Homo sapiens
gggtagagggtggcc

SEQ ID NO: 650300 - DNA, 15 bp, Homo sapiens
ggtagagggtggcct

SEQ ID NO: 650301 - DNA, 15 bp, Homo sapiens
gtagagggtggcctg

SEQ ID NO: 650302 - DNA, 15 bp, Homo sapiens
tagagggtggcctgt

SEQ ID NO: 650303 - DNA, 15 bp, Homo sapiens
agagggtggcctgtg

SEQ ID NO: 650304 - DNA, 15 bp, Homo sapiens
gagggtggcctgtgt

SEQ ID NO: 650305 - DNA, 15 bp, Homo sapiens
agggtggcctgtgta

SEQ ID NO: 650306 - DNA, 15 bp, Homo sapiens
gggtggcctgtgtat

SEQ ID NO: 650307 - DNA, 15 bp, Homo sapiens
ggtggcctgtgtata

SEQ ID NO: 650308 - DNA, 15 bp, Homo sapiens
gtggcctgtgtatac

SEQ ID NO: 650309 - DNA, 15 bp, Homo sapiens
tggcctgtgtatacc

SEQ ID NO: 650310 - DNA, 15 bp, Homo sapiens
ggcctgtgtatacca

SEQ ID NO: 650311 - DNA, 15 bp, Homo sapiens
gcctgtgtataccag

SEQ ID NO: 650312 - DNA, 15 bp, Homo sapiens
cctgtgtataccagt

SEQ ID NO: 650313 - DNA, 15 bp, Homo sapiens
ctgtgtataccagtc

SEQ ID NO: 650314 - DNA, 15 bp, Homo sapiens
tgtgtataccagtct

SEQ ID NO: 650315 - DNA, 15 bp, Homo sapiens
gtgtataccagtctg

SEQ ID NO: 650316 - DNA, 15 bp, Homo sapiens
tgtataccagtctgg

SEQ ID NO: 650317 - DNA, 15 bp, Homo sapiens
gtataccagtctgga

SEQ ID NO: 650318 - DNA, 15 bp, Homo sapiens
tataccagtctggag

SEQ ID NO: 650319 - DNA, 15 bp, Homo sapiens
ataccagtctggaga

SEQ ID NO: 650320 - DNA, 15 bp, Homo sapiens
taccagtctggagat

SEQ ID NO: 650321 - DNA, 15 bp, Homo sapiens
accagtctggagatc

SEQ ID NO: 650322 - DNA, 15 bp, Homo sapiens
ccagtctggagatca

SEQ ID NO: 650323 - DNA, 15 bp, Homo sapiens
cagtctggagatcag

SEQ ID NO: 650324 - DNA, 15 bp, Homo sapiens
agtctggagatcagt

SEQ ID NO: 650325 - DNA, 15 bp, Homo sapiens
gtctggagatcagta

SEQ ID NO: 650326 - DNA, 15 bp, Homo sapiens
tctggagatcagtaa

SEQ ID NO: 650327 - DNA, 15 bp, Homo sapiens
ctggagatcagtaag

SEQ ID NO: 650328 - DNA, 15 bp, Homo sapiens
tggagatcagtaagg

SEQ ID NO: 650329 - DNA, 15 bp, Homo sapiens
ggagatcagtaaggg

SEQ ID NO: 650330 - DNA, 15 bp, Homo sapiens
gagatcagtaaggga

SEQ ID NO: 650331 - DNA, 15 bp, Homo sapiens
agatcagtaagggag

SEQ ID NO: 650332 - DNA, 15 bp, Homo sapiens
gatcagtaagggaga

SEQ ID NO: 650333 - DNA, 15 bp, Homo sapiens
atcagtaagggagat

SEQ ID NO: 650334 - DNA, 15 bp, Homo sapiens
tcagtaagggagatg

SEQ ID NO: 650335 - DNA, 15 bp, Homo sapiens
cagtaagggagatgg

SEQ ID NO: 650336 - DNA, 15 bp, Homo sapiens
agtaagggagatggg

SEQ ID NO: 650337 - DNA, 15 bp, Homo sapiens
gtaagggagatggga

SEQ ID NO: 650338 - DNA, 15 bp, Homo sapiens
taagggagatgggaa

SEQ ID NO: 650339 - DNA, 15 bp, Homo sapiens
aagggagatgggaag

SEQ ID NO: 650340 - DNA, 15 bp, Homo sapiens
agggagatgggaaga

SEQ ID NO: 650341 - DNA, 15 bp, Homo sapiens
gggagatgggaagaa

SEQ ID NO: 650342 - DNA, 15 bp, Homo sapiens
ggagatgggaagaaa

SEQ ID NO: 650343 - DNA, 15 bp, Homo sapiens
gagatgggaagaaag

SEQ ID NO: 650344 - DNA, 15 bp, Homo sapiens
agatgggaagaaaga

SEQ ID NO: 650345 - DNA, 15 bp, Homo sapiens
gatgggaagaaagag

SEQ ID NO: 650346 - DNA, 15 bp, Homo sapiens
atgggaagaaagagg

SEQ ID NO: 650347 - DNA, 15 bp, Homo sapiens
tgggaagaaagaggc

SEQ ID NO: 650348 - DNA, 15 bp, Homo sapiens
gggaagaaagaggct

SEQ ID NO: 650349 - DNA, 15 bp, Homo sapiens
ggaagaaagaggctt

SEQ ID NO: 650350 - DNA, 15 bp, Homo sapiens
gaagaaagaggcttg

SEQ ID NO: 650351 - DNA, 15 bp, Homo sapiens
aagaaagaggcttgt

SEQ ID NO: 650352 - DNA, 15 bp, Homo sapiens
agaaagaggcttgtg

SEQ ID NO: 650353 - DNA, 15 bp, Homo sapiens
gaaagaggcttgtga

SEQ ID NO: 650354 - DNA, 15 bp, Homo sapiens
aaagaggcttgtgag

SEQ ID NO: 650355 - DNA, 15 bp, Homo sapiens
aagaggcttgtgagg

SEQ ID NO: 650356 - DNA, 15 bp, Homo sapiens
agaggcttgtgaggg

SEQ ID NO: 650357 - DNA, 15 bp, Homo sapiens
gaggcttgtgagggt

SEQ ID NO: 650358 - DNA, 15 bp, Homo sapiens
aggcttgtgagggta

SEQ ID NO: 650359 - DNA, 15 bp, Homo sapiens
ggcttgtgagggtat

SEQ ID NO: 650360 - DNA, 15 bp, Homo sapiens
gcttgtgagggtatt

SEQ ID NO: 650361 - DNA, 15 bp, Homo sapiens
cttgtgagggtattg

SEQ ID NO: 650362 - DNA, 15 bp, Homo sapiens
ttgtgagggtattgg

SEQ ID NO: 650363 - DNA, 15 bp, Homo sapiens
tgtgagggtattggc

SEQ ID NO: 650364 - DNA, 15 bp, Homo sapiens
gtgagggtattggcg

SEQ ID NO: 650365 - DNA, 15 bp, Homo sapiens
tgagggtattggcga

SEQ ID NO: 650366 - DNA, 15 bp, Homo sapiens
gagggtattggcgat

SEQ ID NO: 650367 - DNA, 15 bp, Homo sapiens
agggtattggcgatc

SEQ ID NO: 650368 - DNA, 15 bp, Homo sapiens
gggtattggcgatca

SEQ ID NO: 650369 - DNA, 15 bp, Homo sapiens
ggtattggcgatcag

SEQ ID NO: 650370 - DNA, 15 bp, Homo sapiens
gtattggcgatcagt

SEQ ID NO: 650371 - DNA, 15 bp, Homo sapiens
tattggcgatcagta

SEQ ID NO: 650372 - DNA, 15 bp, Homo sapiens
attggcgatcagtac

SEQ ID NO: 650373 - DNA, 15 bp, Homo sapiens
ttggcgatcagtact

SEQ ID NO: 650374 - DNA, 15 bp, Homo sapiens
tggcgatcagtactt

SEQ ID NO: 650375 - DNA, 15 bp, Homo sapiens
ggcgatcagtactta

SEQ ID NO: 650376 - DNA, 15 bp, Homo sapiens
gcgatcagtacttac

SEQ ID NO: 650377 - DNA, 15 bp, Homo sapiens
cgatcagtacttaca

SEQ ID NO: 650378 - DNA, 15 bp, Homo sapiens
gatcagtacttacag

SEQ ID NO: 650379 - DNA, 15 bp, Homo sapiens
atcagtacttacagt

SEQ ID NO: 650380 - DNA, 15 bp, Homo sapiens
tcagtacttacagtg

SEQ ID NO: 650381 - DNA, 15 bp, Homo sapiens
cagtacttacagtgg

SEQ ID NO: 650382 - DNA, 15 bp, Homo sapiens
agtacttacagtgga

SEQ ID NO: 650383 - DNA, 15 bp, Homo sapiens
gtacttacagtggat

SEQ ID NO: 650384 - DNA, 15 bp, Homo sapiens
tacttacagtggatt

SEQ ID NO: 650385 - DNA, 15 bp, Homo sapiens
acttacagtggattt

SEQ ID NO: 650386 - DNA, 15 bp, Homo sapiens
cttacagtggatttg

SEQ ID NO: 650387 - DNA, 15 bp, Homo sapiens
ttacagtggatttgg

SEQ ID NO: 650388 - DNA, 15 bp, Homo sapiens
tacagtggatttggc

SEQ ID NO: 650389 - DNA, 15 bp, Homo sapiens
acagtggatttggca

SEQ ID NO: 650390 - DNA, 15 bp, Homo sapiens
cagtggatttggcaa

SEQ ID NO: 650391 - DNA, 15 bp, Homo sapiens
agtggatttggcaac

SEQ ID NO: 650392 - DNA, 15 bp, Homo sapiens
gtggatttggcaaca

SEQ ID NO: 650393 - DNA, 15 bp, Homo sapiens
tggatttggcaacaa

SEQ ID NO: 650394 - DNA, 15 bp, Homo sapiens
ggatttggcaacaaa

SEQ ID NO: 650395 - DNA, 15 bp, Homo sapiens
gatttggcaacaaat

SEQ ID NO: 650396 - DNA, 15 bp, Homo sapiens
atttggcaacaaata

SEQ ID NO: 650397 - DNA, 15 bp, Homo sapiens
tttggcaacaaatag

SEQ ID NO: 650398 - DNA, 15 bp, Homo sapiens
ttggcaacaaatagt

SEQ ID NO: 650399 - DNA, 15 bp, Homo sapiens
tggcaacaaatagtt

SEQ ID NO: 650400 - DNA, 15 bp, Homo sapiens
ggcaacaaatagttt

SEQ ID NO: 650401 - DNA, 15 bp, Homo sapiens
gcaacaaatagtttt

SEQ ID NO: 650402 - DNA, 15 bp, Homo sapiens
caacaaatagttttt

SEQ ID NO: 650403 - DNA, 15 bp, Homo sapiens
aacaaatagttttta

SEQ ID NO: 650404 - DNA, 15 bp, Homo sapiens
acaaatagtttttaa

SEQ ID NO: 650405 - DNA, 15 bp, Homo sapiens
caaatagtttttaaa

SEQ ID NO: 650406 - DNA, 15 bp, Homo sapiens
aaatagtttttaaat

SEQ ID NO: 650407 - DNA, 15 bp, Homo sapiens
aatagtttttaaatc

SEQ ID NO: 650408 - DNA, 15 bp, Homo sapiens
atagtttttaaatca

SEQ ID NO: 650409 - DNA, 15 bp, Homo sapiens
tagtttttaaatcac

SEQ ID NO: 650410 - DNA, 15 bp, Homo sapiens
agtttttaaatcact

SEQ ID NO: 650411 - DNA, 15 bp, Homo sapiens
gtttttaaatcacta

SEQ ID NO: 650412 - DNA, 15 bp, Homo sapiens
tttttaaatcactag

SEQ ID NO: 650413 - DNA, 15 bp, Homo sapiens
ttttaaatcactagt

SEQ ID NO: 650414 - DNA, 15 bp, Homo sapiens
tttaaatcactagtg

SEQ ID NO: 650415 - DNA, 15 bp, Homo sapiens
ttaaatcactagtga

SEQ ID NO: 650416 - DNA, 15 bp, Homo sapiens
taaatcactagtgac

SEQ ID NO: 650417 - DNA, 15 bp, Homo sapiens
aaatcactagtgaca

SEQ ID NO: 650418 - DNA, 15 bp, Homo sapiens
aatcactagtgacaa

SEQ ID NO: 650419 - DNA, 15 bp, Homo sapiens
atcactagtgacaaa

SEQ ID NO: 650420 - DNA, 15 bp, Homo sapiens
tcactagtgacaaag

SEQ ID NO: 650421 - DNA, 15 bp, Homo sapiens
cactagtgacaaaga

SEQ ID NO: 650422 - DNA, 15 bp, Homo sapiens
actagtgacaaagaa

SEQ ID NO: 650423 - DNA, 15 bp, Homo sapiens
ctagtgacaaagaat

SEQ ID NO: 650424 - DNA, 15 bp, Homo sapiens
tagtgacaaagaatc

SEQ ID NO: 650425 - DNA, 15 bp, Homo sapiens
agtgacaaagaatca

SEQ ID NO: 650426 - DNA, 15 bp, Homo sapiens
gtgacaaagaatcag

SEQ ID NO: 650427 - DNA, 15 bp, Homo sapiens
tgacaaagaatcaga

SEQ ID NO: 650428 - DNA, 15 bp, Homo sapiens
gacaaagaatcagaa

SEQ ID NO: 650429 - DNA, 15 bp, Homo sapiens
acaaagaatcagaag

SEQ ID NO: 650430 - DNA, 15 bp, Homo sapiens
caaagaatcagaagt

SEQ ID NO: 650431 - DNA, 15 bp, Homo sapiens
aaagaatcagaagtg

SEQ ID NO: 650432 - DNA, 15 bp, Homo sapiens
aagaatcagaagtgc

SEQ ID NO: 650433 - DNA, 15 bp, Homo sapiens
agaatcagaagtgcc

SEQ ID NO: 650434 - DNA, 15 bp, Homo sapiens
gaatcagaagtgcct

SEQ ID NO: 650435 - DNA, 15 bp, Homo sapiens
aatcagaagtgcctt

SEQ ID NO: 650436 - DNA, 15 bp, Homo sapiens
atcagaagtgccttc

SEQ ID NO: 650437 - DNA, 15 bp, Homo sapiens
tcagaagtgccttct

SEQ ID NO: 650438 - DNA, 15 bp, Homo sapiens
cagaagtgccttcta

SEQ ID NO: 650439 - DNA, 15 bp, Homo sapiens
agaagtgccttctac

SEQ ID NO: 650440 - DNA, 15 bp, Homo sapiens
gaagtgccttctact

SEQ ID NO: 650441 - DNA, 15 bp, Homo sapiens
aagtgccttctacta

SEQ ID NO: 650442 - DNA, 15 bp, Homo sapiens
agtgccttctactat

SEQ ID NO: 650443 - DNA, 15 bp, Homo sapiens
gtgccttctactatt

SEQ ID NO: 650444 - DNA, 15 bp, Homo sapiens
tgccttctactattt

SEQ ID NO: 650445 - DNA, 15 bp, Homo sapiens
gccttctactatttg

SEQ ID NO: 650446 - DNA, 15 bp, Homo sapiens
ccttctactatttga

SEQ ID NO: 650447 - DNA, 15 bp, Homo sapiens
cttctactatttgaa

SEQ ID NO: 650448 - DNA, 15 bp, Homo sapiens
ttctactatttgaat

SEQ ID NO: 650449 - DNA, 15 bp, Homo sapiens
tctactatttgaata

SEQ ID NO: 650450 - DNA, 15 bp, Homo sapiens
ctactatttgaatag

SEQ ID NO: 650451 - DNA, 15 bp, Homo sapiens
tactatttgaatagg

SEQ ID NO: 650452 - DNA, 15 bp, Homo sapiens
actatttgaataggc

SEQ ID NO: 650453 - DNA, 15 bp, Homo sapiens
ctatttgaataggca

SEQ ID NO: 650454 - DNA, 15 bp, Homo sapiens
tatttgaataggcaa

SEQ ID NO: 650455 - DNA, 15 bp, Homo sapiens
atttgaataggcaaa

SEQ ID NO: 650456 - DNA, 15 bp, Homo sapiens
tttgaataggcaaat

SEQ ID NO: 650457 - DNA, 15 bp, Homo sapiens
ttgaataggcaaatt

SEQ ID NO: 650458 - DNA, 15 bp, Homo sapiens
tgaataggcaaattc

SEQ ID NO: 650459 - DNA, 15 bp, Homo sapiens
gaataggcaaattcc

SEQ ID NO: 650460 - DNA, 15 bp, Homo sapiens
aataggcaaattccc

SEQ ID NO: 650461 - DNA, 15 bp, Homo sapiens
ataggcaaattccca

SEQ ID NO: 650462 - DNA, 15 bp, Homo sapiens
taggcaaattcccac

SEQ ID NO: 650463 - DNA, 15 bp, Homo sapiens
aggcaaattcccact

SEQ ID NO: 650464 - DNA, 15 bp, Homo sapiens
ggcaaattcccacta

SEQ ID NO: 650465 - DNA, 15 bp, Homo sapiens
gcaaattcccactat

SEQ ID NO: 650466 - DNA, 15 bp, Homo sapiens
caaattcccactatt

SEQ ID NO: 650467 - DNA, 15 bp, Homo sapiens
aaattcccactattt

SEQ ID NO: 650468 - DNA, 15 bp, Homo sapiens
aattcccactatttg

SEQ ID NO: 650469 - DNA, 15 bp, Homo sapiens
attcccactatttgc

SEQ ID NO: 650470 - DNA, 15 bp, Homo sapiens
ttcccactatttgct

SEQ ID NO: 650471 - DNA, 15 bp, Homo sapiens
tcccactatttgctt

SEQ ID NO: 650472 - DNA, 15 bp, Homo sapiens
cccactatttgcttc

SEQ ID NO: 650473 - DNA, 15 bp, Homo sapiens
ccactatttgcttcc

SEQ ID NO: 650474 - DNA, 15 bp, Homo sapiens
cactatttgcttcca

SEQ ID NO: 650475 - DNA, 15 bp, Homo sapiens
actatttgcttccag

SEQ ID NO: 650476 - DNA, 15 bp, Homo sapiens
ctatttgcttccagc

SEQ ID NO: 650477 - DNA, 15 bp, Homo sapiens
tatttgcttccagcc

SEQ ID NO: 650478 - DNA, 15 bp, Homo sapiens
atttgcttccagcca

SEQ ID NO: 650479 - DNA, 15 bp, Homo sapiens
tttgcttccagccag

SEQ ID NO: 650480 - DNA, 15 bp, Homo sapiens
ttgcttccagccagt

SEQ ID NO: 650481 - DNA, 15 bp, Homo sapiens
tgcttccagccagtc

SEQ ID NO: 650482 - DNA, 15 bp, Homo sapiens
gcttccagccagtcc

SEQ ID NO: 650483 - DNA, 15 bp, Homo sapiens
cttccagccagtcct

SEQ ID NO: 650484 - DNA, 15 bp, Homo sapiens
ttccagccagtcctt

SEQ ID NO: 650485 - DNA, 15 bp, Homo sapiens
tccagccagtccttt

SEQ ID NO: 650486 - DNA, 15 bp, Homo sapiens
ccagccagtccttta

SEQ ID NO: 650487 - DNA, 15 bp, Homo sapiens
cagccagtcctttaa

SEQ ID NO: 650488 - DNA, 15 bp, Homo sapiens
agccagtcctttaat

SEQ ID NO: 650489 - DNA, 15 bp, Homo sapiens
gccagtcctttaatt

SEQ ID NO: 650490 - DNA, 15 bp, Homo sapiens
ccagtcctttaattg

SEQ ID NO: 650491 - DNA, 15 bp, Homo sapiens
cagtcctttaattga

SEQ ID NO: 650492 - DNA, 15 bp, Homo sapiens
agtcctttaattgaa

SEQ ID NO: 650493 - DNA, 15 bp, Homo sapiens
gtcctttaattgaac

SEQ ID NO: 650494 - DNA, 15 bp, Homo sapiens
tcctttaattgaacg

SEQ ID NO: 650495 - DNA, 15 bp, Homo sapiens
cctttaattgaacga

SEQ ID NO: 650496 - DNA, 15 bp, Homo sapiens
ctttaattgaacgaa

SEQ ID NO: 650497 - DNA, 15 bp, Homo sapiens
tttaattgaacgaac

SEQ ID NO: 650498 - DNA, 15 bp, Homo sapiens
ttaattgaacgaact

SEQ ID NO: 650499 - DNA, 15 bp, Homo sapiens
taattgaacgaactc

SEQ ID NO: 650500 - DNA, 15 bp, Homo sapiens
aattgaacgaactca

SEQ ID NO: 650501 - DNA, 15 bp, Homo sapiens
attgaacgaactcat

SEQ ID NO: 650502 - DNA, 15 bp, Homo sapiens
ttgaacgaactcatt

SEQ ID NO: 650503 - DNA, 15 bp, Homo sapiens
tgaacgaactcattt

SEQ ID NO: 650504 - DNA, 15 bp, Homo sapiens
gaacgaactcattta

SEQ ID NO: 650505 - DNA, 15 bp, Homo sapiens
aacgaactcatttat

SEQ ID NO: 650506 - DNA, 15 bp, Homo sapiens
acgaactcatttatt

SEQ ID NO: 650507 - DNA, 15 bp, Homo sapiens
cgaactcatttattt

SEQ ID NO: 650508 - DNA, 15 bp, Homo sapiens
gaactcatttatttt

SEQ ID NO: 650509 - DNA, 15 bp, Homo sapiens
aactcatttattttt

SEQ ID NO: 650510 - DNA, 15 bp, Homo sapiens
actcatttatttttc

SEQ ID NO: 650511 - DNA, 15 bp, Homo sapiens
ctcatttatttttct

SEQ ID NO: 650512 - DNA, 15 bp, Homo sapiens
tcatttatttttctg

SEQ ID NO: 650513 - DNA, 15 bp, Homo sapiens
catttatttttctgg

SEQ ID NO: 650514 - DNA, 15 bp, Homo sapiens
atttatttttctggc

SEQ ID NO: 650515 - DNA, 15 bp, Homo sapiens
tttatttttctggca

SEQ ID NO: 650516 - DNA, 15 bp, Homo sapiens
ttatttttctggcaa

SEQ ID NO: 650517 - DNA, 15 bp, Homo sapiens
tatttttctggcaat

SEQ ID NO: 650518 - DNA, 15 bp, Homo sapiens
atttttctggcaata

SEQ ID NO: 650519 - DNA, 15 bp, Homo sapiens
tttttctggcaataa

SEQ ID NO: 650520 - DNA, 15 bp, Homo sapiens
ttttctggcaataaa

SEQ ID NO: 650521 - DNA, 15 bp, Homo sapiens
tttctggcaataaag

SEQ ID NO: 650522 - DNA, 15 bp, Homo sapiens
ttctggcaataaagc

SEQ ID NO: 650523 - DNA, 15 bp, Homo sapiens
tctggcaataaagca

SEQ ID NO: 650524 - DNA, 15 bp, Homo sapiens
ctggcaataaagcaa

SEQ ID NO: 650525 - DNA, 15 bp, Homo sapiens
tggcaataaagcaat

SEQ ID NO: 650526 - DNA, 15 bp, Homo sapiens
ggcaataaagcaatt

SEQ ID NO: 650527 - DNA, 15 bp, Homo sapiens
gcaataaagcaattc

SEQ ID NO: 650528 - DNA, 15 bp, Homo sapiens
caataaagcaattct

SEQ ID NO: 650529 - DNA, 15 bp, Homo sapiens
aataaagcaattcta

SEQ ID NO: 650530 - DNA, 15 bp, Homo sapiens
ataaagcaattctat

SEQ ID NO: 650531 - DNA, 15 bp, Homo sapiens
taaagcaattctatc

SEQ ID NO: 650532 - DNA, 15 bp, Homo sapiens
aaagcaattctatcc

SEQ ID NO: 650533 - DNA, 15 bp, Homo sapiens
aagcaattctatcca

SEQ ID NO: 650534 - DNA, 15 bp, Homo sapiens
agcaattctatccag

SEQ ID NO: 650535 - DNA, 15 bp, Homo sapiens
gcaattctatccagt

SEQ ID NO: 650536 - DNA, 15 bp, Homo sapiens
caattctatccagtt

SEQ ID NO: 650537 - DNA, 15 bp, Homo sapiens
aattctatccagttc

SEQ ID NO: 650538 - DNA, 15 bp, Homo sapiens
attctatccagttct

SEQ ID NO: 650539 - DNA, 15 bp, Homo sapiens
ttctatccagttctc

SEQ ID NO: 650540 - DNA, 15 bp, Homo sapiens
tctatccagttctct

SEQ ID NO: 650541 - DNA, 15 bp, Homo sapiens
ctatccagttctctg

SEQ ID NO: 650542 - DNA, 15 bp, Homo sapiens
tatccagttctctgt

SEQ ID NO: 650543 - DNA, 15 bp, Homo sapiens
atccagttctctgtt

SEQ ID NO: 650544 - DNA, 15 bp, Homo sapiens
tccagttctctgttg

SEQ ID NO: 650545 - DNA, 15 bp, Homo sapiens
ccagttctctgttgc

SEQ ID NO: 650546 - DNA, 15 bp, Homo sapiens
cagttctctgttgca

SEQ ID NO: 650547 - DNA, 15 bp, Homo sapiens
agttctctgttgcag

SEQ ID NO: 650548 - DNA, 15 bp, Homo sapiens
gttctctgttgcaga

SEQ ID NO: 650549 - DNA, 15 bp, Homo sapiens
ttctctgttgcagag

SEQ ID NO: 650550 - DNA, 15 bp, Homo sapiens
tctctgttgcagagc

SEQ ID NO: 650551 - DNA, 15 bp, Homo sapiens
ctctgttgcagagca

SEQ ID NO: 650552 - DNA, 15 bp, Homo sapiens
tctgttgcagagcag

SEQ ID NO: 650553 - DNA, 15 bp, Homo sapiens
ctgttgcagagcaga

SEQ ID NO: 650554 - DNA, 15 bp, Homo sapiens
tgttgcagagcagat

SEQ ID NO: 650555 - DNA, 15 bp, Homo sapiens
gttgcagagcagatg

SEQ ID NO: 650556 - DNA, 15 bp, Homo sapiens
ttgcagagcagatga

SEQ ID NO: 650557 - DNA, 15 bp, Homo sapiens
tgcagagcagatgaa

SEQ ID NO: 650558 - DNA, 15 bp, Homo sapiens
gcagagcagatgaat

SEQ ID NO: 650559 - DNA, 15 bp, Homo sapiens
cagagcagatgaatg

SEQ ID NO: 650560 - DNA, 15 bp, Homo sapiens
agagcagatgaatga

SEQ ID NO: 650561 - DNA, 15 bp, Homo sapiens
gagcagatgaatgag

SEQ ID NO: 650562 - DNA, 15 bp, Homo sapiens
agcagatgaatgagt

SEQ ID NO: 650563 - DNA, 15 bp, Homo sapiens
gcagatgaatgagtg

SEQ ID NO: 650564 - DNA, 15 bp, Homo sapiens
cagatgaatgagtgc

SEQ ID NO: 650565 - DNA, 15 bp, Homo sapiens
agatgaatgagtgca

SEQ ID NO: 650566 - DNA, 15 bp, Homo sapiens
gatgaatgagtgcat

SEQ ID NO: 650567 - DNA, 15 bp, Homo sapiens
atgaatgagtgcatt

SEQ ID NO: 650568 - DNA, 15 bp, Homo sapiens
tgaatgagtgcattg

SEQ ID NO: 650569 - DNA, 15 bp, Homo sapiens
gaatgagtgcattgg

SEQ ID NO: 650570 - DNA, 15 bp, Homo sapiens
aatgagtgcattggg

SEQ ID NO: 650571 - DNA, 15 bp, Homo sapiens
atgagtgcattgggt

SEQ ID NO: 650572 - DNA, 15 bp, Homo sapiens
tgagtgcattgggtg

SEQ ID NO: 650573 - DNA, 15 bp, Homo sapiens
gagtgcattgggtga

SEQ ID NO: 650574 - DNA, 15 bp, Homo sapiens
agtgcattgggtgag

SEQ ID NO: 650575 - DNA, 15 bp, Homo sapiens
gtgcattgggtgagt

SEQ ID NO: 650576 - DNA, 15 bp, Homo sapiens
tgcattgggtgagtg

SEQ ID NO: 650577 - DNA, 15 bp, Homo sapiens
gcattgggtgagtga

SEQ ID NO: 650578 - DNA, 15 bp, Homo sapiens
cattgggtgagtgat

SEQ ID NO: 650579 - DNA, 15 bp, Homo sapiens
attgggtgagtgatt

SEQ ID NO: 650580 - DNA, 15 bp, Homo sapiens
ttgggtgagtgattt

SEQ ID NO: 650581 - DNA, 15 bp, Homo sapiens
tgggtgagtgatttt

SEQ ID NO: 650582 - DNA, 15 bp, Homo sapiens
gggtgagtgattttc

SEQ ID NO: 650583 - DNA, 15 bp, Homo sapiens
ggtgagtgattttcc

SEQ ID NO: 650584 - DNA, 15 bp, Homo sapiens
gtgagtgattttcca

SEQ ID NO: 650585 - DNA, 15 bp, Homo sapiens
tgagtgattttccaa

SEQ ID NO: 650586 - DNA, 15 bp, Homo sapiens
gagtgattttccaat

SEQ ID NO: 650587 - DNA, 15 bp, Homo sapiens
agtgattttccaata

SEQ ID NO: 650588 - DNA, 15 bp, Homo sapiens
gtgattttccaatag

SEQ ID NO: 650589 - DNA, 15 bp, Homo sapiens
tgattttccaatagc

SEQ ID NO: 650590 - DNA, 15 bp, Homo sapiens
gattttccaatagca

SEQ ID NO: 650591 - DNA, 15 bp, Homo sapiens
attttccaatagcag

SEQ ID NO: 650592 - DNA, 15 bp, Homo sapiens
ttttccaatagcaga

SEQ ID NO: 650593 - DNA, 15 bp, Homo sapiens
tttccaatagcagac

SEQ ID NO: 650594 - DNA, 15 bp, Homo sapiens
ttccaatagcagact

SEQ ID NO: 650595 - DNA, 15 bp, Homo sapiens
tccaatagcagactt

SEQ ID NO: 650596 - DNA, 15 bp, Homo sapiens
ccaatagcagacttg

SEQ ID NO: 650597 - DNA, 15 bp, Homo sapiens
caatagcagacttgt

SEQ ID NO: 650598 - DNA, 15 bp, Homo sapiens
aatagcagacttgtt

SEQ ID NO: 650599 - DNA, 15 bp, Homo sapiens
atagcagacttgttt

SEQ ID NO: 650600 - DNA, 15 bp, Homo sapiens
tagcagacttgtttt

SEQ ID NO: 650601 - DNA, 15 bp, Homo sapiens
agcagacttgtttta

SEQ ID NO: 650602 - DNA, 15 bp, Homo sapiens
gcagacttgttttac

SEQ ID NO: 650603 - DNA, 15 bp, Homo sapiens
cagacttgttttacc

SEQ ID NO: 650604 - DNA, 15 bp, Homo sapiens
agacttgttttacct

SEQ ID NO: 650605 - DNA, 15 bp, Homo sapiens
gacttgttttacctt

SEQ ID NO: 650606 - DNA, 15 bp, Homo sapiens
acttgttttaccttt

SEQ ID NO: 650607 - DNA, 15 bp, Homo sapiens
cttgttttaccttta

SEQ ID NO: 650608 - DNA, 15 bp, Homo sapiens
ttgttttacctttaa

SEQ ID NO: 650609 - DNA, 15 bp, Homo sapiens
tgttttacctttaaa

SEQ ID NO: 650610 - DNA, 15 bp, Homo sapiens
gttttacctttaaaa

SEQ ID NO: 650611 - DNA, 15 bp, Homo sapiens
ttttacctttaaaat

SEQ ID NO: 650612 - DNA, 15 bp, Homo sapiens
tttacctttaaaata

SEQ ID NO: 650613 - DNA, 15 bp, Homo sapiens
ttacctttaaaatat

SEQ ID NO: 650614 - DNA, 15 bp, Homo sapiens
tacctttaaaatatc

SEQ ID NO: 650615 - DNA, 15 bp, Homo sapiens
acctttaaaatatcc

SEQ ID NO: 650616 - DNA, 15 bp, Homo sapiens
cctttaaaatatcct

SEQ ID NO: 650617 - DNA, 15 bp, Homo sapiens
ctttaaaatatcctg

SEQ ID NO: 650618 - DNA, 15 bp, Homo sapiens
tttaaaatatcctgt

SEQ ID NO: 650619 - DNA, 15 bp, Homo sapiens
ttaaaatatcctgtg

SEQ ID NO: 650620 - DNA, 15 bp, Homo sapiens
taaaatatcctgtgg

SEQ ID NO: 650621 - DNA, 15 bp, Homo sapiens
aaaatatcctgtgga

SEQ ID NO: 650622 - DNA, 15 bp, Homo sapiens
aaatatcctgtggaa

SEQ ID NO: 650623 - DNA, 15 bp, Homo sapiens
aatatcctgtggaag

SEQ ID NO: 650624 - DNA, 15 bp, Homo sapiens
atatcctgtggaaga

SEQ ID NO: 650625 - DNA, 15 bp, Homo sapiens
tatcctgtggaagat

SEQ ID NO: 650626 - DNA, 15 bp, Homo sapiens
atcctgtggaagata

SEQ ID NO: 650627 - DNA, 15 bp, Homo sapiens
tcctgtggaagataa

SEQ ID NO: 650628 - DNA, 15 bp, Homo sapiens
cctgtggaagataac

SEQ ID NO: 650629 - DNA, 15 bp, Homo sapiens
ctgtggaagataact

SEQ ID NO: 650630 - DNA, 15 bp, Homo sapiens
tgtggaagataactg

SEQ ID NO: 650631 - DNA, 15 bp, Homo sapiens
gtggaagataactgt

SEQ ID NO: 650632 - DNA, 15 bp, Homo sapiens
tggaagataactgtg

SEQ ID NO: 650633 - DNA, 15 bp, Homo sapiens
ggaagataactgtgg

SEQ ID NO: 650634 - DNA, 15 bp, Homo sapiens
gaagataactgtggg

SEQ ID NO: 650635 - DNA, 15 bp, Homo sapiens
aagataactgtggga

SEQ ID NO: 650636 - DNA, 15 bp, Homo sapiens
agataactgtgggac

SEQ ID NO: 650637 - DNA, 15 bp, Homo sapiens
gataactgtgggaca

SEQ ID NO: 650638 - DNA, 15 bp, Homo sapiens
ataactgtgggacat

SEQ ID NO: 650639 - DNA, 15 bp, Homo sapiens
taactgtgggacatc

SEQ ID NO: 650640 - DNA, 15 bp, Homo sapiens
aactgtgggacatca

SEQ ID NO: 650641 - DNA, 15 bp, Homo sapiens
actgtgggacatcac

SEQ ID NO: 650642 - DNA, 15 bp, Homo sapiens
ctgtgggacatcaca

SEQ ID NO: 650643 - DNA, 15 bp, Homo sapiens
tgtgggacatcacat

SEQ ID NO: 650644 - DNA, 15 bp, Homo sapiens
gtgggacatcacatg

SEQ ID NO: 650645 - DNA, 15 bp, Homo sapiens
tgggacatcacatga

SEQ ID NO: 650646 - DNA, 15 bp, Homo sapiens
gggacatcacatgat

SEQ ID NO: 650647 - DNA, 15 bp, Homo sapiens
ggacatcacatgatc

SEQ ID NO: 650648 - DNA, 15 bp, Homo sapiens
gacatcacatgatcc

SEQ ID NO: 650649 - DNA, 15 bp, Homo sapiens
acatcacatgatcca

SEQ ID NO: 650650 - DNA, 15 bp, Homo sapiens
catcacatgatccaa

SEQ ID NO: 650651 - DNA, 15 bp, Homo sapiens
atcacatgatccaac

SEQ ID NO: 650652 - DNA, 15 bp, Homo sapiens
tcacatgatccaaca

SEQ ID NO: 650653 - DNA, 15 bp, Homo sapiens
cacatgatccaacag

SEQ ID NO: 650654 - DNA, 15 bp, Homo sapiens
acatgatccaacagt

SEQ ID NO: 650655 - DNA, 15 bp, Homo sapiens
catgatccaacagtg

SEQ ID NO: 650656 - DNA, 15 bp, Homo sapiens
atgatccaacagtgg

SEQ ID NO: 650657 - DNA, 15 bp, Homo sapiens
tgatccaacagtggg

SEQ ID NO: 650658 - DNA, 15 bp, Homo sapiens
gatccaacagtgggt

SEQ ID NO: 650659 - DNA, 15 bp, Homo sapiens
atccaacagtgggtc

SEQ ID NO: 650660 - DNA, 15 bp, Homo sapiens
tccaacagtgggtca

SEQ ID NO: 650661 - DNA, 15 bp, Homo sapiens
ccaacagtgggtcat

SEQ ID NO: 650662 - DNA, 15 bp, Homo sapiens
caacagtgggtcata

SEQ ID NO: 650663 - DNA, 15 bp, Homo sapiens
aacagtgggtcataa

SEQ ID NO: 650664 - DNA, 15 bp, Homo sapiens
acagtgggtcataat

SEQ ID NO: 650665 - DNA, 15 bp, Homo sapiens
cagtgggtcataatt

SEQ ID NO: 650666 - DNA, 15 bp, Homo sapiens
agtgggtcataatta

SEQ ID NO: 650667 - DNA, 15 bp, Homo sapiens
gtgggtcataattat

SEQ ID NO: 650668 - DNA, 15 bp, Homo sapiens
tgggtcataattatt

SEQ ID NO: 650669 - DNA, 15 bp, Homo sapiens
gggtcataattattc

SEQ ID NO: 650670 - DNA, 15 bp, Homo sapiens
ggtcataattattct

SEQ ID NO: 650671 - DNA, 15 bp, Homo sapiens
gtcataattattcta

SEQ ID NO: 650672 - DNA, 15 bp, Homo sapiens
tcataattattctat

SEQ ID NO: 650673 - DNA, 15 bp, Homo sapiens
cataattattctata

SEQ ID NO: 650674 - DNA, 15 bp, Homo sapiens
ataattattctataa

SEQ ID NO: 650675 - DNA, 15 bp, Homo sapiens
taattattctataat

SEQ ID NO: 650676 - DNA, 15 bp, Homo sapiens
aattattctataatt

SEQ ID NO: 650677 - DNA, 15 bp, Homo sapiens
attattctataattt

SEQ ID NO: 650678 - DNA, 15 bp, Homo sapiens
ttattctataatttg

SEQ ID NO: 650679 - DNA, 15 bp, Homo sapiens
tattctataatttgc

SEQ ID NO: 650680 - DNA, 15 bp, Homo sapiens
attctataatttgca

SEQ ID NO: 650681 - DNA, 15 bp, Homo sapiens
ttctataatttgcag

SEQ ID NO: 650682 - DNA, 15 bp, Homo sapiens
tctataatttgcagc

SEQ ID NO: 650683 - DNA, 15 bp, Homo sapiens
ctataatttgcagct

SEQ ID NO: 650684 - DNA, 15 bp, Homo sapiens
tataatttgcagcta

SEQ ID NO: 650685 - DNA, 15 bp, Homo sapiens
ataatttgcagctac

SEQ ID NO: 650686 - DNA, 15 bp, Homo sapiens
taatttgcagctact

SEQ ID NO: 650687 - DNA, 15 bp, Homo sapiens
aatttgcagctactg

SEQ ID NO: 650688 - DNA, 15 bp, Homo sapiens
atttgcagctactga

SEQ ID NO: 650689 - DNA, 15 bp, Homo sapiens
tttgcagctactgat

SEQ ID NO: 650690 - DNA, 15 bp, Homo sapiens
ttgcagctactgatc

SEQ ID NO: 650691 - DNA, 15 bp, Homo sapiens
tgcagctactgatcc

SEQ ID NO: 650692 - DNA, 15 bp, Homo sapiens
gcagctactgatcct

SEQ ID NO: 650693 - DNA, 15 bp, Homo sapiens
cagctactgatcctc

SEQ ID NO: 650694 - DNA, 15 bp, Homo sapiens
agctactgatcctca

SEQ ID NO: 650695 - DNA, 15 bp, Homo sapiens
gctactgatcctcat

SEQ ID NO: 650696 - DNA, 15 bp, Homo sapiens
ctactgatcctcatt

SEQ ID NO: 650697 - DNA, 15 bp, Homo sapiens
tactgatcctcattt

SEQ ID NO: 650698 - DNA, 15 bp, Homo sapiens
actgatcctcatttt

SEQ ID NO: 650699 - DNA, 15 bp, Homo sapiens
ctgatcctcattttt

SEQ ID NO: 650700 - DNA, 15 bp, Homo sapiens
tgatcctcatttttt

SEQ ID NO: 650701 - DNA, 15 bp, Homo sapiens
gatcctcatttttta

SEQ ID NO: 650702 - DNA, 15 bp, Homo sapiens
atcctcattttttaa

SEQ ID NO: 650703 - DNA, 15 bp, Homo sapiens
tcctcattttttaaa

SEQ ID NO: 650704 - DNA, 15 bp, Homo sapiens
cctcattttttaaag

SEQ ID NO: 650705 - DNA, 15 bp, Homo sapiens
ctcattttttaaaga

SEQ ID NO: 650706 - DNA, 15 bp, Homo sapiens
tcattttttaaagaa

SEQ ID NO: 650707 - DNA, 15 bp, Homo sapiens
cattttttaaagaaa

SEQ ID NO: 650708 - DNA, 15 bp, Homo sapiens
attttttaaagaaat

SEQ ID NO: 650709 - DNA, 15 bp, Homo sapiens
ttttttaaagaaatg

SEQ ID NO: 650710 - DNA, 15 bp, Homo sapiens
tttttaaagaaatga

SEQ ID NO: 650711 - DNA, 15 bp, Homo sapiens
ttttaaagaaatgaa

SEQ ID NO: 650712 - DNA, 15 bp, Homo sapiens
tttaaagaaatgaaa

SEQ ID NO: 650713 - DNA, 15 bp, Homo sapiens
ttaaagaaatgaaaa

SEQ ID NO: 650714 - DNA, 15 bp, Homo sapiens
taaagaaatgaaaaa

SEQ ID NO: 650715 - DNA, 15 bp, Homo sapiens
aaagaaatgaaaaag

SEQ ID NO: 650716 - DNA, 15 bp, Homo sapiens
aagaaatgaaaaagt

SEQ ID NO: 650717 - DNA, 15 bp, Homo sapiens
agaaatgaaaaagtg

SEQ ID NO: 650718 - DNA, 15 bp, Homo sapiens
gaaatgaaaaagtgg

SEQ ID NO: 650719 - DNA, 15 bp, Homo sapiens
aaatgaaaaagtggt

SEQ ID NO: 650720 - DNA, 15 bp, Homo sapiens
aatgaaaaagtggtt

SEQ ID NO: 650721 - DNA, 15 bp, Homo sapiens
atgaaaaagtggttc

SEQ ID NO: 650722 - DNA, 15 bp, Homo sapiens
tgaaaaagtggttct

SEQ ID NO: 650723 - DNA, 15 bp, Homo sapiens
gaaaaagtggttctc

SEQ ID NO: 650724 - DNA, 15 bp, Homo sapiens
aaaaagtggttctca

SEQ ID NO: 650725 - DNA, 15 bp, Homo sapiens
aaaagtggttctcac

SEQ ID NO: 650726 - DNA, 15 bp, Homo sapiens
aaagtggttctcact

SEQ ID NO: 650727 - DNA, 15 bp, Homo sapiens
aagtggttctcactt

SEQ ID NO: 650728 - DNA, 15 bp, Homo sapiens
agtggttctcactta

SEQ ID NO: 650729 - DNA, 15 bp, Homo sapiens
gtggttctcacttat

SEQ ID NO: 650730 - DNA, 15 bp, Homo sapiens
tggttctcacttatt

SEQ ID NO: 650731 - DNA, 15 bp, Homo sapiens
ggttctcacttatta

SEQ ID NO: 650732 - DNA, 15 bp, Homo sapiens
gttctcacttattat

SEQ ID NO: 650733 - DNA, 15 bp, Homo sapiens
ttctcacttattatg

SEQ ID NO: 650734 - DNA, 15 bp, Homo sapiens
tctcacttattatgc

SEQ ID NO: 650735 - DNA, 15 bp, Homo sapiens
ctcacttattatgcc

SEQ ID NO: 650736 - DNA, 15 bp, Homo sapiens
tcacttattatgccc

SEQ ID NO: 650737 - DNA, 15 bp, Homo sapiens
cacttattatgccca

SEQ ID NO: 650738 - DNA, 15 bp, Homo sapiens
acttattatgcccaa

SEQ ID NO: 650739 - DNA, 15 bp, Homo sapiens
cttattatgcccaag

SEQ ID NO: 650740 - DNA, 15 bp, Homo sapiens
ttattatgcccaagg

SEQ ID NO: 650741 - DNA, 15 bp, Homo sapiens
tattatgcccaaggg

SEQ ID NO: 650742 - DNA, 15 bp, Homo sapiens
attatgcccaagggg

SEQ ID NO: 650743 - DNA, 15 bp, Homo sapiens
ttatgcccaagggga

SEQ ID NO: 650744 - DNA, 15 bp, Homo sapiens
tatgcccaaggggac

SEQ ID NO: 650745 - DNA, 15 bp, Homo sapiens
atgcccaaggggact

SEQ ID NO: 650746 - DNA, 15 bp, Homo sapiens
tgcccaaggggactt

SEQ ID NO: 650747 - DNA, 15 bp, Homo sapiens
gcccaaggggacttt

SEQ ID NO: 650748 - DNA, 15 bp, Homo sapiens
cccaaggggactttt

SEQ ID NO: 650749 - DNA, 15 bp, Homo sapiens
ccaaggggacttttt

SEQ ID NO: 650750 - DNA, 15 bp, Homo sapiens
caaggggactttttt

SEQ ID NO: 650751 - DNA, 15 bp, Homo sapiens
aaggggacttttttt

SEQ ID NO: 650752 - DNA, 15 bp, Homo sapiens
aggggactttttttt

SEQ ID NO: 650753 - DNA, 15 bp, Homo sapiens
ggggacttttttttt

SEQ ID NO: 650754 - DNA, 15 bp, Homo sapiens
gggactttttttttc

SEQ ID NO: 650755 - DNA, 15 bp, Homo sapiens
ggactttttttttcc

SEQ ID NO: 650756 - DNA, 15 bp, Homo sapiens
gactttttttttcct

SEQ ID NO: 650757 - DNA, 15 bp, Homo sapiens
actttttttttcctt

SEQ ID NO: 650758 - DNA, 15 bp, Homo sapiens
ctttttttttccttg

SEQ ID NO: 650759 - DNA, 15 bp, Homo sapiens
tttttttttccttga

SEQ ID NO: 650760 - DNA, 15 bp, Homo sapiens
ttttttttccttgat

SEQ ID NO: 650761 - DNA, 15 bp, Homo sapiens
tttttttccttgata

SEQ ID NO: 650762 - DNA, 15 bp, Homo sapiens
ttttttccttgataa

SEQ ID NO: 650763 - DNA, 15 bp, Homo sapiens
tttttccttgataat

SEQ ID NO: 650764 - DNA, 15 bp, Homo sapiens
ttttccttgataatc

SEQ ID NO: 650765 - DNA, 15 bp, Homo sapiens
tttccttgataatcc

SEQ ID NO: 650766 - DNA, 15 bp, Homo sapiens
ttccttgataatcca

SEQ ID NO: 650767 - DNA, 15 bp, Homo sapiens
tccttgataatccat

SEQ ID NO: 650768 - DNA, 15 bp, Homo sapiens
ccttgataatccatt

SEQ ID NO: 650769 - DNA, 15 bp, Homo sapiens
cttgataatccattt

SEQ ID NO: 650770 - DNA, 15 bp, Homo sapiens
ttgataatccatttg

SEQ ID NO: 650771 - DNA, 15 bp, Homo sapiens
tgataatccatttgt

SEQ ID NO: 650772 - DNA, 15 bp, Homo sapiens
gataatccatttgtg

SEQ ID NO: 650773 - DNA, 15 bp, Homo sapiens
ataatccatttgtgc

SEQ ID NO: 650774 - DNA, 15 bp, Homo sapiens
taatccatttgtgca

SEQ ID NO: 650775 - DNA, 15 bp, Homo sapiens
aatccatttgtgcaa

SEQ ID NO: 650776 - DNA, 15 bp, Homo sapiens
atccatttgtgcaat

SEQ ID NO: 650777 - DNA, 15 bp, Homo sapiens
tccatttgtgcaatt

SEQ ID NO: 650778 - DNA, 15 bp, Homo sapiens
ccatttgtgcaattt

SEQ ID NO: 650779 - DNA, 15 bp, Homo sapiens
catttgtgcaatttc

SEQ ID NO: 650780 - DNA, 15 bp, Homo sapiens
atttgtgcaatttcc

SEQ ID NO: 650781 - DNA, 15 bp, Homo sapiens
tttgtgcaatttcct

SEQ ID NO: 650782 - DNA, 15 bp, Homo sapiens
ttgtgcaatttcctt

SEQ ID NO: 650783 - DNA, 15 bp, Homo sapiens
tgtgcaatttccttt

SEQ ID NO: 650784 - DNA, 15 bp, Homo sapiens
gtgcaatttcctttg

SEQ ID NO: 650785 - DNA, 15 bp, Homo sapiens
tgcaatttcctttga

SEQ ID NO: 650786 - DNA, 15 bp, Homo sapiens
gcaatttcctttgat

SEQ ID NO: 650787 - DNA, 15 bp, Homo sapiens
caatttcctttgatc

SEQ ID NO: 650788 - DNA, 15 bp, Homo sapiens
aatttcctttgatcc

SEQ ID NO: 650789 - DNA, 15 bp, Homo sapiens
atttcctttgatcca

SEQ ID NO: 650790 - DNA, 15 bp, Homo sapiens
tttcctttgatccag

SEQ ID NO: 650791 - DNA, 15 bp, Homo sapiens
ttcctttgatccagt

SEQ ID NO: 650792 - DNA, 15 bp, Homo sapiens
tcctttgatccagtt

SEQ ID NO: 650793 - DNA, 15 bp, Homo sapiens
cctttgatccagttc

SEQ ID NO: 650794 - DNA, 15 bp, Homo sapiens
ctttgatccagttca

SEQ ID NO: 650795 - DNA, 15 bp, Homo sapiens
tttgatccagttcac

SEQ ID NO: 650796 - DNA, 15 bp, Homo sapiens
ttgatccagttcact

SEQ ID NO: 650797 - DNA, 15 bp, Homo sapiens
tgatccagttcacta

SEQ ID NO: 650798 - DNA, 15 bp, Homo sapiens
gatccagttcactag

SEQ ID NO: 650799 - DNA, 15 bp, Homo sapiens
atccagttcactagg

SEQ ID NO: 650800 - DNA, 15 bp, Homo sapiens
tccagttcactaggt

SEQ ID NO: 650801 - DNA, 15 bp, Homo sapiens
ccagttcactaggta

SEQ ID NO: 650802 - DNA, 15 bp, Homo sapiens
cagttcactaggtaa

SEQ ID NO: 650803 - DNA, 15 bp, Homo sapiens
agttcactaggtaat

SEQ ID NO: 650804 - DNA, 15 bp, Homo sapiens
gttcactaggtaatt

SEQ ID NO: 650805 - DNA, 15 bp, Homo sapiens
ttcactaggtaattg

SEQ ID NO: 650806 - DNA, 15 bp, Homo sapiens
tcactaggtaattgc

SEQ ID NO: 650807 - DNA, 15 bp, Homo sapiens
cactaggtaattgcc

SEQ ID NO: 650808 - DNA, 15 bp, Homo sapiens
actaggtaattgcca

SEQ ID NO: 650809 - DNA, 15 bp, Homo sapiens
ctaggtaattgccaa

SEQ ID NO: 650810 - DNA, 15 bp, Homo sapiens
taggtaattgccaag

SEQ ID NO: 650811 - DNA, 15 bp, Homo sapiens
aggtaattgccaagc

SEQ ID NO: 650812 - DNA, 15 bp, Homo sapiens
ggtaattgccaagcc

SEQ ID NO: 650813 - DNA, 15 bp, Homo sapiens
gtaattgccaagcct

SEQ ID NO: 650814 - DNA, 15 bp, Homo sapiens
taattgccaagccta

SEQ ID NO: 650815 - DNA, 15 bp, Homo sapiens
aattgccaagcctag

SEQ ID NO: 650816 - DNA, 15 bp, Homo sapiens
attgccaagcctaga

SEQ ID NO: 650817 - DNA, 15 bp, Homo sapiens
ttgccaagcctagaa

SEQ ID NO: 650818 - DNA, 15 bp, Homo sapiens
tgccaagcctagaag

SEQ ID NO: 650819 - DNA, 15 bp, Homo sapiens
gccaagcctagaagt

SEQ ID NO: 650820 - DNA, 15 bp, Homo sapiens
ccaagcctagaagtg

SEQ ID NO: 650821 - DNA, 15 bp, Homo sapiens
caagcctagaagtgt

SEQ ID NO: 650822 - DNA, 15 bp, Homo sapiens
aagcctagaagtgtc

SEQ ID NO: 650823 - DNA, 15 bp, Homo sapiens
agcctagaagtgtcc

SEQ ID NO: 650824 - DNA, 15 bp, Homo sapiens
gcctagaagtgtcct

SEQ ID NO: 650825 - DNA, 15 bp, Homo sapiens
cctagaagtgtcctc

SEQ ID NO: 650826 - DNA, 15 bp, Homo sapiens
ctagaagtgtcctct

SEQ ID NO: 650827 - DNA, 15 bp, Homo sapiens
tagaagtgtcctctg

SEQ ID NO: 650828 - DNA, 15 bp, Homo sapiens
agaagtgtcctctgt

SEQ ID NO: 650829 - DNA, 15 bp, Homo sapiens
gaagtgtcctctgtt

SEQ ID NO: 650830 - DNA, 15 bp, Homo sapiens
aagtgtcctctgtta

SEQ ID NO: 650831 - DNA, 15 bp, Homo sapiens
agtgtcctctgttac

SEQ ID NO: 650832 - DNA, 15 bp, Homo sapiens
gtgtcctctgttacg

SEQ ID NO: 650833 - DNA, 15 bp, Homo sapiens
tgtcctctgttacgt

SEQ ID NO: 650834 - DNA, 15 bp, Homo sapiens
gtcctctgttacgtg

SEQ ID NO: 650835 - DNA, 15 bp, Homo sapiens
tcctctgttacgtgc

SEQ ID NO: 650836 - DNA, 15 bp, Homo sapiens
cctctgttacgtgcc

SEQ ID NO: 650837 - DNA, 15 bp, Homo sapiens
ctctgttacgtgcca

SEQ ID NO: 650838 - DNA, 15 bp, Homo sapiens
tctgttacgtgccag

SEQ ID NO: 650839 - DNA, 15 bp, Homo sapiens
ctgttacgtgccagg

SEQ ID NO: 650840 - DNA, 15 bp, Homo sapiens
tgttacgtgccaggt

SEQ ID NO: 650841 - DNA, 15 bp, Homo sapiens
gttacgtgccaggtt

SEQ ID NO: 650842 - DNA, 15 bp, Homo sapiens
ttacgtgccaggttg

SEQ ID NO: 650843 - DNA, 15 bp, Homo sapiens
tacgtgccaggttga

SEQ ID NO: 650844 - DNA, 15 bp, Homo sapiens
acgtgccaggttgaa

SEQ ID NO: 650845 - DNA, 15 bp, Homo sapiens
cgtgccaggttgaat

SEQ ID NO: 650846 - DNA, 15 bp, Homo sapiens
gtgccaggttgaatt

SEQ ID NO: 650847 - DNA, 15 bp, Homo sapiens
tgccaggttgaattg

SEQ ID NO: 650848 - DNA, 15 bp, Homo sapiens
gccaggttgaattgt

SEQ ID NO: 650849 - DNA, 15 bp, Homo sapiens
ccaggttgaattgtg

SEQ ID NO: 650850 - DNA, 15 bp, Homo sapiens
caggttgaattgtga

SEQ ID NO: 650851 - DNA, 15 bp, Homo sapiens
aggttgaattgtgat

SEQ ID NO: 650852 - DNA, 15 bp, Homo sapiens
ggttgaattgtgatg

SEQ ID NO: 650853 - DNA, 15 bp, Homo sapiens
gttgaattgtgatgt

SEQ ID NO: 650854 - DNA, 15 bp, Homo sapiens
ttgaattgtgatgtt

SEQ ID NO: 650855 - DNA, 15 bp, Homo sapiens
tgaattgtgatgttc

SEQ ID NO: 650856 - DNA, 15 bp, Homo sapiens
gaattgtgatgttca

SEQ ID NO: 650857 - DNA, 15 bp, Homo sapiens
aattgtgatgttcaa

SEQ ID NO: 650858 - DNA, 15 bp, Homo sapiens
attgtgatgttcaac

SEQ ID NO: 650859 - DNA, 15 bp, Homo sapiens
ttgtgatgttcaaca

SEQ ID NO: 650860 - DNA, 15 bp, Homo sapiens
tgtgatgttcaacac

SEQ ID NO: 650861 - DNA, 15 bp, Homo sapiens
gtgatgttcaacacg

SEQ ID NO: 650862 - DNA, 15 bp, Homo sapiens
tgatgttcaacacga

SEQ ID NO: 650863 - DNA, 15 bp, Homo sapiens
gatgttcaacacgac

SEQ ID NO: 650864 - DNA, 15 bp, Homo sapiens
atgttcaacacgaca

SEQ ID NO: 650865 - DNA, 15 bp, Homo sapiens
tgttcaacacgacat

SEQ ID NO: 650866 - DNA, 15 bp, Homo sapiens
gttcaacacgacatt

SEQ ID NO: 650867 - DNA, 15 bp, Homo sapiens
ttcaacacgacattg

SEQ ID NO: 650868 - DNA, 15 bp, Homo sapiens
tcaacacgacattgc

SEQ ID NO: 650869 - DNA, 15 bp, Homo sapiens
caacacgacattgct

SEQ ID NO: 650870 - DNA, 15 bp, Homo sapiens
aacacgacattgctc

SEQ ID NO: 650871 - DNA, 15 bp, Homo sapiens
acacgacattgctcc

SEQ ID NO: 650872 - DNA, 15 bp, Homo sapiens
cacgacattgctcca

SEQ ID NO: 650873 - DNA, 15 bp, Homo sapiens
acgacattgctccag

SEQ ID NO: 650874 - DNA, 15 bp, Homo sapiens
cgacattgctccaga

SEQ ID NO: 650875 - DNA, 15 bp, Homo sapiens
gacattgctccagaa

SEQ ID NO: 650876 - DNA, 15 bp, Homo sapiens
acattgctccagaat

SEQ ID NO: 650877 - DNA, 15 bp, Homo sapiens
cattgctccagaatt

SEQ ID NO: 650878 - DNA, 15 bp, Homo sapiens
attgctccagaattt

SEQ ID NO: 650879 - DNA, 15 bp, Homo sapiens
ttgctccagaatttc

SEQ ID NO: 650880 - DNA, 15 bp, Homo sapiens
tgctccagaatttcc

SEQ ID NO: 650881 - DNA, 15 bp, Homo sapiens
gctccagaatttcca

SEQ ID NO: 650882 - DNA, 15 bp, Homo sapiens
ctccagaatttccat

SEQ ID NO: 650883 - DNA, 15 bp, Homo sapiens
tccagaatttccatg

SEQ ID NO: 650884 - DNA, 15 bp, Homo sapiens
ccagaatttccatgc

SEQ ID NO: 650885 - DNA, 15 bp, Homo sapiens
cagaatttccatgca

SEQ ID NO: 650886 - DNA, 15 bp, Homo sapiens
agaatttccatgcac

SEQ ID NO: 650887 - DNA, 15 bp, Homo sapiens
gaatttccatgcaca

SEQ ID NO: 650888 - DNA, 15 bp, Homo sapiens
aatttccatgcacag

SEQ ID NO: 650889 - DNA, 15 bp, Homo sapiens
atttccatgcacagt

SEQ ID NO: 650890 - DNA, 15 bp, Homo sapiens
tttccatgcacagtg

SEQ ID NO: 650891 - DNA, 15 bp, Homo sapiens
ttccatgcacagtgc

SEQ ID NO: 650892 - DNA, 15 bp, Homo sapiens
tccatgcacagtgca

SEQ ID NO: 650893 - DNA, 15 bp, Homo sapiens
ccatgcacagtgcat

SEQ ID NO: 650894 - DNA, 15 bp, Homo sapiens
catgcacagtgcatg

SEQ ID NO: 650895 - DNA, 15 bp, Homo sapiens
atgcacagtgcatga

SEQ ID NO: 650896 - DNA, 15 bp, Homo sapiens
tgcacagtgcatgaa

SEQ ID NO: 650897 - DNA, 15 bp, Homo sapiens
gcacagtgcatgaaa

SEQ ID NO: 650898 - DNA, 15 bp, Homo sapiens
cacagtgcatgaaaa

SEQ ID NO: 650899 - DNA, 15 bp, Homo sapiens
acagtgcatgaaaac

SEQ ID NO: 650900 - DNA, 15 bp, Homo sapiens
cagtgcatgaaaact

SEQ ID NO: 650901 - DNA, 15 bp, Homo sapiens
agtgcatgaaaactg

SEQ ID NO: 650902 - DNA, 15 bp, Homo sapiens
gtgcatgaaaactgg

SEQ ID NO: 650903 - DNA, 15 bp, Homo sapiens
tgcatgaaaactgga

SEQ ID NO: 650904 - DNA, 15 bp, Homo sapiens
gcatgaaaactggat

SEQ ID NO: 650905 - DNA, 15 bp, Homo sapiens
catgaaaactggatc

SEQ ID NO: 650906 - DNA, 15 bp, Homo sapiens
atgaaaactggatct

SEQ ID NO: 650907 - DNA, 15 bp, Homo sapiens
tgaaaactggatctt

SEQ ID NO: 650908 - DNA, 15 bp, Homo sapiens
gaaaactggatcttt

SEQ ID NO: 650909 - DNA, 15 bp, Homo sapiens
aaaactggatctttc

SEQ ID NO: 650910 - DNA, 15 bp, Homo sapiens
aaactggatctttct

SEQ ID NO: 650911 - DNA, 15 bp, Homo sapiens
aactggatctttcta

SEQ ID NO: 650912 - DNA, 15 bp, Homo sapiens
actggatctttctat

SEQ ID NO: 650913 - DNA, 15 bp, Homo sapiens
ctggatctttctatg

SEQ ID NO: 650914 - DNA, 15 bp, Homo sapiens
tggatctttctatgc

SEQ ID NO: 650915 - DNA, 15 bp, Homo sapiens
ggatctttctatgcc

SEQ ID NO: 650916 - DNA, 15 bp, Homo sapiens
gatctttctatgcct

SEQ ID NO: 650917 - DNA, 15 bp, Homo sapiens
atctttctatgccta

SEQ ID NO: 650918 - DNA, 15 bp, Homo sapiens
tctttctatgcctat

SEQ ID NO: 650919 - DNA, 15 bp, Homo sapiens
ctttctatgcctatg

SEQ ID NO: 650920 - DNA, 15 bp, Homo sapiens
tttctatgcctatga

SEQ ID NO: 650921 - DNA, 15 bp, Homo sapiens
ttctatgcctatgat

SEQ ID NO: 650922 - DNA, 15 bp, Homo sapiens
tctatgcctatgatg

SEQ ID NO: 650923 - DNA, 15 bp, Homo sapiens
ctatgcctatgatgt

SEQ ID NO: 650924 - DNA, 15 bp, Homo sapiens
tatgcctatgatgtt

SEQ ID NO: 650925 - DNA, 15 bp, Homo sapiens
atgcctatgatgttt

SEQ ID NO: 650926 - DNA, 15 bp, Homo sapiens
tgcctatgatgtttg

SEQ ID NO: 650927 - DNA, 15 bp, Homo sapiens
gcctatgatgtttgc

SEQ ID NO: 650928 - DNA, 15 bp, Homo sapiens
cctatgatgtttgca

SEQ ID NO: 650929 - DNA, 15 bp, Homo sapiens
ctatgatgtttgcat

SEQ ID NO: 650930 - DNA, 15 bp, Homo sapiens
tatgatgtttgcatt

SEQ ID NO: 650931 - DNA, 15 bp, Homo sapiens
atgatgtttgcatta

SEQ ID NO: 650932 - DNA, 15 bp, Homo sapiens
tgatgtttgcattaa

SEQ ID NO: 650933 - DNA, 15 bp, Homo sapiens
gatgtttgcattaaa

SEQ ID NO: 650934 - DNA, 15 bp, Homo sapiens
atgtttgcattaaat

SEQ ID NO: 650935 - DNA, 15 bp, Homo sapiens
tgtttgcattaaatg

SEQ ID NO: 650936 - DNA, 15 bp, Homo sapiens
gtttgcattaaatga

SEQ ID NO: 650937 - DNA, 15 bp, Homo sapiens
tttgcattaaatgat

SEQ ID NO: 650938 - DNA, 15 bp, Homo sapiens
ttgcattaaatgatg

SEQ ID NO: 650939 - DNA, 15 bp, Homo sapiens
tgcattaaatgatga

SEQ ID NO: 650940 - DNA, 15 bp, Homo sapiens
gcattaaatgatgaa

SEQ ID NO: 650941 - DNA, 15 bp, Homo sapiens
cattaaatgatgaaa

SEQ ID NO: 650942 - DNA, 15 bp, Homo sapiens
attaaatgatgaaaa

SEQ ID NO: 650943 - DNA, 15 bp, Homo sapiens
ttaaatgatgaaaaa

SEQ ID NO: 650944 - DNA, 15 bp, Homo sapiens
taaatgatgaaaaat

SEQ ID NO: 650945 - DNA, 15 bp, Homo sapiens
aaatgatgaaaaatt

SEQ ID NO: 650946 - DNA, 15 bp, Homo sapiens
aatgatgaaaaatta

SEQ ID NO: 650947 - DNA, 15 bp, Homo sapiens
atgatgaaaaattag

SEQ ID NO: 650948 - DNA, 15 bp, Homo sapiens
tgatgaaaaattaga

SEQ ID NO: 650949 - DNA, 15 bp, Homo sapiens
gatgaaaaattagaa

SEQ ID NO: 650950 - DNA, 15 bp, Homo sapiens
atgaaaaattagaat

SEQ ID NO: 650951 - DNA, 15 bp, Homo sapiens
tgaaaaattagaatg

SEQ ID NO: 650952 - DNA, 15 bp, Homo sapiens
gaaaaattagaatgg

SEQ ID NO: 650953 - DNA, 15 bp, Homo sapiens
aaaaattagaatgga

SEQ ID NO: 650954 - DNA, 15 bp, Homo sapiens
aaaattagaatggaa

SEQ ID NO: 650955 - DNA, 15 bp, Homo sapiens
aaattagaatggaaa

SEQ ID NO: 650956 - DNA, 15 bp, Homo sapiens
aattagaatggaaaa

SEQ ID NO: 650957 - DNA, 15 bp, Homo sapiens
attagaatggaaaaa

SEQ ID NO: 650958 - DNA, 15 bp, Homo sapiens
ttagaatggaaaaaa

SEQ ID NO: 650959 - DNA, 15 bp, Homo sapiens
tagaatggaaaaaat

SEQ ID NO: 650960 - DNA, 15 bp, Homo sapiens
agaatggaaaaaatg

SEQ ID NO: 650961 - DNA, 15 bp, Homo sapiens
gaatggaaaaaatga

SEQ ID NO: 650962 - DNA, 15 bp, Homo sapiens
aatggaaaaaatgat

SEQ ID NO: 650963 - DNA, 15 bp, Homo sapiens
atggaaaaaatgatt

SEQ ID NO: 650964 - DNA, 15 bp, Homo sapiens
tggaaaaaatgattg

SEQ ID NO: 650965 - DNA, 15 bp, Homo sapiens
ggaaaaaatgattgt

SEQ ID NO: 650966 - DNA, 15 bp, Homo sapiens
gaaaaaatgattgtt

SEQ ID NO: 650967 - DNA, 15 bp, Homo sapiens
aaaaaatgattgttc

SEQ ID NO: 650968 - DNA, 15 bp, Homo sapiens
aaaaatgattgttcc

SEQ ID NO: 650969 - DNA, 15 bp, Homo sapiens
aaaatgattgttcct

SEQ ID NO: 650970 - DNA, 15 bp, Homo sapiens
aaatgattgttccta

SEQ ID NO: 650971 - DNA, 15 bp, Homo sapiens
aatgattgttcctaa

SEQ ID NO: 650972 - DNA, 15 bp, Homo sapiens
atgattgttcctaag

SEQ ID NO: 650973 - DNA, 15 bp, Homo sapiens
tgattgttcctaagt

SEQ ID NO: 650974 - DNA, 15 bp, Homo sapiens
gattgttcctaagta

SEQ ID NO: 650975 - DNA, 15 bp, Homo sapiens
attgttcctaagtaa

SEQ ID NO: 650976 - DNA, 15 bp, Homo sapiens
ttgttcctaagtaac

SEQ ID NO: 650977 - DNA, 15 bp, Homo sapiens
tgttcctaagtaact

SEQ ID NO: 650978 - DNA, 15 bp, Homo sapiens
gttcctaagtaactg

SEQ ID NO: 650979 - DNA, 15 bp, Homo sapiens
ttcctaagtaactgt

SEQ ID NO: 650980 - DNA, 15 bp, Homo sapiens
tcctaagtaactgta

SEQ ID NO: 650981 - DNA, 15 bp, Homo sapiens
cctaagtaactgtat

SEQ ID NO: 650982 - DNA, 15 bp, Homo sapiens
ctaagtaactgtatg

SEQ ID NO: 650983 - DNA, 15 bp, Homo sapiens
taagtaactgtatga

SEQ ID NO: 650984 - DNA, 15 bp, Homo sapiens
aagtaactgtatgat

SEQ ID NO: 650985 - DNA, 15 bp, Homo sapiens
agtaactgtatgata

SEQ ID NO: 650986 - DNA, 15 bp, Homo sapiens
gtaactgtatgatac

SEQ ID NO: 650987 - DNA, 15 bp, Homo sapiens
taactgtatgatact

SEQ ID NO: 650988 - DNA, 15 bp, Homo sapiens
aactgtatgatactt

SEQ ID NO: 650989 - DNA, 15 bp, Homo sapiens
actgtatgatactta

SEQ ID NO: 650990 - DNA, 15 bp, Homo sapiens
ctgtatgatacttat

SEQ ID NO: 650991 - DNA, 15 bp, Homo sapiens
tgtatgatacttata

SEQ ID NO: 650992 - DNA, 15 bp, Homo sapiens
gtatgatacttataa

SEQ ID NO: 650993 - DNA, 15 bp, Homo sapiens
tatgatacttataag

SEQ ID NO: 650994 - DNA, 15 bp, Homo sapiens
atgatacttataagt

SEQ ID NO: 650995 - DNA, 15 bp, Homo sapiens
tgatacttataagtg

SEQ ID NO: 650996 - DNA, 15 bp, Homo sapiens
gatacttataagtgt

SEQ ID NO: 650997 - DNA, 15 bp, Homo sapiens
atacttataagtgtt

SEQ ID NO: 650998 - DNA, 15 bp, Homo sapiens
tacttataagtgttt

SEQ ID NO: 650999 - DNA, 15 bp, Homo sapiens
acttataagtgtttg

SEQ ID NO: 651000 - DNA, 15 bp, Homo sapiens
cttataagtgtttgc

SEQ ID NO: 651001 - DNA, 15 bp, Homo sapiens
ttataagtgtttgca

SEQ ID NO: 651002 - DNA, 15 bp, Homo sapiens
tataagtgtttgcac

SEQ ID NO: 651003 - DNA, 15 bp, Homo sapiens
ataagtgtttgcaca

SEQ ID NO: 651004 - DNA, 15 bp, Homo sapiens
taagtgtttgcacag

SEQ ID NO: 651005 - DNA, 15 bp, Homo sapiens
aagtgtttgcacaga

SEQ ID NO: 651006 - DNA, 15 bp, Homo sapiens
agtgtttgcacagac

SEQ ID NO: 651007 - DNA, 15 bp, Homo sapiens
gtgtttgcacagaca

SEQ ID NO: 651008 - DNA, 15 bp, Homo sapiens
tgtttgcacagacac

SEQ ID NO: 651009 - DNA, 15 bp, Homo sapiens
gtttgcacagacact

SEQ ID NO: 651010 - DNA, 15 bp, Homo sapiens
tttgcacagacactt

SEQ ID NO: 651011 - DNA, 15 bp, Homo sapiens
ttgcacagacactta

SEQ ID NO: 651012 - DNA, 15 bp, Homo sapiens
tgcacagacacttaa

SEQ ID NO: 651013 - DNA, 15 bp, Homo sapiens
gcacagacacttaag

SEQ ID NO: 651014 - DNA, 15 bp, Homo sapiens
cacagacacttaagg

SEQ ID NO: 651015 - DNA, 15 bp, Homo sapiens
acagacacttaagga

SEQ ID NO: 651016 - DNA, 15 bp, Homo sapiens
cagacacttaaggat

SEQ ID NO: 651017 - DNA, 15 bp, Homo sapiens
agacacttaaggata

SEQ ID NO: 651018 - DNA, 15 bp, Homo sapiens
gacacttaaggatat

SEQ ID NO: 651019 - DNA, 15 bp, Homo sapiens
acacttaaggatatt

SEQ ID NO: 651020 - DNA, 15 bp, Homo sapiens
cacttaaggatattg

SEQ ID NO: 651021 - DNA, 15 bp, Homo sapiens
acttaaggatattgg

SEQ ID NO: 651022 - DNA, 15 bp, Homo sapiens
cttaaggatattgga

SEQ ID NO: 651023 - DNA, 15 bp, Homo sapiens
ttaaggatattggac

SEQ ID NO: 651024 - DNA, 15 bp, Homo sapiens
taaggatattggaca

SEQ ID NO: 651025 - DNA, 15 bp, Homo sapiens
aaggatattggacaa

SEQ ID NO: 651026 - DNA, 15 bp, Homo sapiens
aggatattggacaac

SEQ ID NO: 651027 - DNA, 15 bp, Homo sapiens
ggatattggacaact

SEQ ID NO: 651028 - DNA, 15 bp, Homo sapiens
gatattggacaacta

SEQ ID NO: 651029 - DNA, 15 bp, Homo sapiens
atattggacaactaa

SEQ ID NO: 651030 - DNA, 15 bp, Homo sapiens
tattggacaactaaa

SEQ ID NO: 651031 - DNA, 15 bp, Homo sapiens
attggacaactaaaa

SEQ ID NO: 651032 - DNA, 15 bp, Homo sapiens
ttggacaactaaaat

SEQ ID NO: 651033 - DNA, 15 bp, Homo sapiens
tggacaactaaaatg

SEQ ID NO: 651034 - DNA, 15 bp, Homo sapiens
ggacaactaaaatgg

SEQ ID NO: 651035 - DNA, 15 bp, Homo sapiens
gacaactaaaatgga

SEQ ID NO: 651036 - DNA, 15 bp, Homo sapiens
acaactaaaatggaa

SEQ ID NO: 651037 - DNA, 15 bp, Homo sapiens
caactaaaatggaaa

SEQ ID NO: 651038 - DNA, 15 bp, Homo sapiens
aactaaaatggaaac

SEQ ID NO: 651039 - DNA, 15 bp, Homo sapiens
actaaaatggaaacc

SEQ ID NO: 651040 - DNA, 15 bp, Homo sapiens
ctaaaatggaaacca

SEQ ID NO: 651041 - DNA, 15 bp, Homo sapiens
taaaatggaaaccaa

SEQ ID NO: 651042 - DNA, 15 bp, Homo sapiens
aaaatggaaaccaat

SEQ ID NO: 651043 - DNA, 15 bp, Homo sapiens
aaatggaaaccaatt

SEQ ID NO: 651044 - DNA, 15 bp, Homo sapiens
aatggaaaccaattt

SEQ ID NO: 651045 - DNA, 15 bp, Homo sapiens
atggaaaccaatttc

SEQ ID NO: 651046 - DNA, 15 bp, Homo sapiens
tggaaaccaatttcc

SEQ ID NO: 651047 - DNA, 15 bp, Homo sapiens
ggaaaccaatttcca

SEQ ID NO: 651048 - DNA, 15 bp, Homo sapiens
gaaaccaatttccag

SEQ ID NO: 651049 - DNA, 15 bp, Homo sapiens
aaaccaatttccagg

SEQ ID NO: 651050 - DNA, 15 bp, Homo sapiens
aaccaatttccaggt

SEQ ID NO: 651051 - DNA, 15 bp, Homo sapiens
accaatttccaggtt

SEQ ID NO: 651052 - DNA, 15 bp, Homo sapiens
ccaatttccaggttc

SEQ ID NO: 651053 - DNA, 15 bp, Homo sapiens
caatttccaggttct

SEQ ID NO: 651054 - DNA, 15 bp, Homo sapiens
aatttccaggttctc

SEQ ID NO: 651055 - DNA, 15 bp, Homo sapiens
atttccaggttctct

SEQ ID NO: 651056 - DNA, 15 bp, Homo sapiens
tttccaggttctctt

SEQ ID NO: 651057 - DNA, 15 bp, Homo sapiens
ttccaggttctctta

SEQ ID NO: 651058 - DNA, 15 bp, Homo sapiens
tccaggttctcttat

SEQ ID NO: 651059 - DNA, 15 bp, Homo sapiens
ccaggttctcttatt

SEQ ID NO: 651060 - DNA, 15 bp, Homo sapiens
caggttctcttattc

SEQ ID NO: 651061 - DNA, 15 bp, Homo sapiens
aggttctcttattct

SEQ ID NO: 651062 - DNA, 15 bp, Homo sapiens
ggttctcttattctg

SEQ ID NO: 651063 - DNA, 15 bp, Homo sapiens
gttctcttattctgt

SEQ ID NO: 651064 - DNA, 15 bp, Homo sapiens
ttctcttattctgtt

SEQ ID NO: 651065 - DNA, 15 bp, Homo sapiens
tctcttattctgtta

SEQ ID NO: 651066 - DNA, 15 bp, Homo sapiens
ctcttattctgttac

SEQ ID NO: 651067 - DNA, 15 bp, Homo sapiens
tcttattctgttact

SEQ ID NO: 651068 - DNA, 15 bp, Homo sapiens
cttattctgttactg

SEQ ID NO: 651069 - DNA, 15 bp, Homo sapiens
ttattctgttactgc

SEQ ID NO: 651070 - DNA, 15 bp, Homo sapiens
tattctgttactgca

SEQ ID NO: 651071 - DNA, 15 bp, Homo sapiens
attctgttactgcaa

SEQ ID NO: 651072 - DNA, 15 bp, Homo sapiens
ttctgttactgcaac

SEQ ID NO: 651073 - DNA, 15 bp, Homo sapiens
tctgttactgcaaca

SEQ ID NO: 651074 - DNA, 15 bp, Homo sapiens
ctgttactgcaacaa

SEQ ID NO: 651075 - DNA, 15 bp, Homo sapiens
tgttactgcaacaat

SEQ ID NO: 651076 - DNA, 15 bp, Homo sapiens
gttactgcaacaatc

SEQ ID NO: 651077 - DNA, 15 bp, Homo sapiens
ttactgcaacaatca

SEQ ID NO: 651078 - DNA, 15 bp, Homo sapiens
tactgcaacaatcaa

SEQ ID NO: 651079 - DNA, 15 bp, Homo sapiens
actgcaacaatcaaa

SEQ ID NO: 651080 - DNA, 15 bp, Homo sapiens
ctgcaacaatcaaat

SEQ ID NO: 651081 - DNA, 15 bp, Homo sapiens
tgcaacaatcaaatt

SEQ ID NO: 651082 - DNA, 15 bp, Homo sapiens
gcaacaatcaaattt

SEQ ID NO: 651083 - DNA, 15 bp, Homo sapiens
caacaatcaaatttc

SEQ ID NO: 651084 - DNA, 15 bp, Homo sapiens
aacaatcaaatttca

SEQ ID NO: 651085 - DNA, 15 bp, Homo sapiens
acaatcaaatttcag

SEQ ID NO: 651086 - DNA, 15 bp, Homo sapiens
caatcaaatttcagc

SEQ ID NO: 651087 - DNA, 15 bp, Homo sapiens
aatcaaatttcagca

SEQ ID NO: 651088 - DNA, 15 bp, Homo sapiens
atcaaatttcagcaa

SEQ ID NO: 651089 - DNA, 15 bp, Homo sapiens
tcaaatttcagcaaa

SEQ ID NO: 651090 - DNA, 15 bp, Homo sapiens
caaatttcagcaaat

SEQ ID NO: 651091 - DNA, 15 bp, Homo sapiens
aaatttcagcaaatt

SEQ ID NO: 651092 - DNA, 15 bp, Homo sapiens
aatttcagcaaattt

SEQ ID NO: 651093 - DNA, 15 bp, Homo sapiens
atttcagcaaatttt

SEQ ID NO: 651094 - DNA, 15 bp, Homo sapiens
tttcagcaaattttt

SEQ ID NO: 651095 - DNA, 15 bp, Homo sapiens
ttcagcaaattttta

SEQ ID NO: 651096 - DNA, 15 bp, Homo sapiens
tcagcaaatttttaa

SEQ ID NO: 651097 - DNA, 15 bp, Homo sapiens
cagcaaatttttaaa

SEQ ID NO: 651098 - DNA, 15 bp, Homo sapiens
agcaaatttttaaaa

SEQ ID NO: 651099 - DNA, 15 bp, Homo sapiens
gcaaatttttaaaaa

SEQ ID NO: 651100 - DNA, 15 bp, Homo sapiens
caaatttttaaaaat

SEQ ID NO: 651101 - DNA, 15 bp, Homo sapiens
aaatttttaaaaatt

SEQ ID NO: 651102 - DNA, 15 bp, Homo sapiens
aatttttaaaaattg

SEQ ID NO: 651103 - DNA, 15 bp, Homo sapiens
atttttaaaaattgt

SEQ ID NO: 651104 - DNA, 15 bp, Homo sapiens
tttttaaaaattgta

SEQ ID NO: 651105 - DNA, 15 bp, Homo sapiens
ttttaaaaattgtat

SEQ ID NO: 651106 - DNA, 15 bp, Homo sapiens
tttaaaaattgtatc

SEQ ID NO: 651107 - DNA, 15 bp, Homo sapiens
ttaaaaattgtatct

SEQ ID NO: 651108 - DNA, 15 bp, Homo sapiens
taaaaattgtatctc

SEQ ID NO: 651109 - DNA, 15 bp, Homo sapiens
aaaaattgtatctca

SEQ ID NO: 651110 - DNA, 15 bp, Homo sapiens
aaaattgtatctcaa

SEQ ID NO: 651111 - DNA, 15 bp, Homo sapiens
aaattgtatctcaat

SEQ ID NO: 651112 - DNA, 15 bp, Homo sapiens
aattgtatctcaata

SEQ ID NO: 651113 - DNA, 15 bp, Homo sapiens
attgtatctcaataa

SEQ ID NO: 651114 - DNA, 15 bp, Homo sapiens
ttgtatctcaataac

SEQ ID NO: 651115 - DNA, 15 bp, Homo sapiens
tgtatctcaataact

SEQ ID NO: 651116 - DNA, 15 bp, Homo sapiens
gtatctcaataactt

SEQ ID NO: 651117 - DNA, 15 bp, Homo sapiens
tatctcaataacttg

SEQ ID NO: 651118 - DNA, 15 bp, Homo sapiens
atctcaataacttga

SEQ ID NO: 651119 - DNA, 15 bp, Homo sapiens
tctcaataacttgaa

SEQ ID NO: 651120 - DNA, 15 bp, Homo sapiens
ctcaataacttgaaa

SEQ ID NO: 651121 - DNA, 15 bp, Homo sapiens
tcaataacttgaaaa

SEQ ID NO: 651122 - DNA, 15 bp, Homo sapiens
caataacttgaaaag

SEQ ID NO: 651123 - DNA, 15 bp, Homo sapiens
aataacttgaaaagg

SEQ ID NO: 651124 - DNA, 15 bp, Homo sapiens
ataacttgaaaagga

SEQ ID NO: 651125 - DNA, 15 bp, Homo sapiens
taacttgaaaaggaa

SEQ ID NO: 651126 - DNA, 15 bp, Homo sapiens
aacttgaaaaggaaa

SEQ ID NO: 651127 - DNA, 15 bp, Homo sapiens
acttgaaaaggaaat

SEQ ID NO: 651128 - DNA, 15 bp, Homo sapiens
cttgaaaaggaaatg

SEQ ID NO: 651129 - DNA, 15 bp, Homo sapiens
ttgaaaaggaaatgt

SEQ ID NO: 651130 - DNA, 15 bp, Homo sapiens
tgaaaaggaaatgtt

SEQ ID NO: 651131 - DNA, 15 bp, Homo sapiens
gaaaaggaaatgtta

SEQ ID NO: 651132 - DNA, 15 bp, Homo sapiens
aaaaggaaatgttat

SEQ ID NO: 651133 - DNA, 15 bp, Homo sapiens
aaaggaaatgttata

SEQ ID NO: 651134 - DNA, 15 bp, Homo sapiens
aaggaaatgttatat

SEQ ID NO: 651135 - DNA, 15 bp, Homo sapiens
aggaaatgttatata

SEQ ID NO: 651136 - DNA, 15 bp, Homo sapiens
ggaaatgttatatat

SEQ ID NO: 651137 - DNA, 15 bp, Homo sapiens
gaaatgttatatata

SEQ ID NO: 651138 - DNA, 15 bp, Homo sapiens
aaatgttatatatag

SEQ ID NO: 651139 - DNA, 15 bp, Homo sapiens
aatgttatatatagc

SEQ ID NO: 651140 - DNA, 15 bp, Homo sapiens
atgttatatatagca

SEQ ID NO: 651141 - DNA, 15 bp, Homo sapiens
tgttatatatagcaa

SEQ ID NO: 651142 - DNA, 15 bp, Homo sapiens
gttatatatagcaaa

SEQ ID NO: 651143 - DNA, 15 bp, Homo sapiens
ttatatatagcaaat

SEQ ID NO: 651144 - DNA, 15 bp, Homo sapiens
tatatatagcaaatc

SEQ ID NO: 651145 - DNA, 15 bp, Homo sapiens
atatatagcaaatct

SEQ ID NO: 651146 - DNA, 15 bp, Homo sapiens
tatatagcaaatctt

SEQ ID NO: 651147 - DNA, 15 bp, Homo sapiens
atatagcaaatcttg

SEQ ID NO: 651148 - DNA, 15 bp, Homo sapiens
tatagcaaatcttga

SEQ ID NO: 651149 - DNA, 15 bp, Homo sapiens
atagcaaatcttgat

SEQ ID NO: 651150 - DNA, 15 bp, Homo sapiens
tagcaaatcttgatt

SEQ ID NO: 651151 - DNA, 15 bp, Homo sapiens
agcaaatcttgattc

SEQ ID NO: 651152 - DNA, 15 bp, Homo sapiens
gcaaatcttgattct

SEQ ID NO: 651153 - DNA, 15 bp, Homo sapiens
caaatcttgattctt

SEQ ID NO: 651154 - DNA, 15 bp, Homo sapiens
aaatcttgattctta

SEQ ID NO: 651155 - DNA, 15 bp, Homo sapiens
aatcttgattcttac

SEQ ID NO: 651156 - DNA, 15 bp, Homo sapiens
atcttgattcttact

SEQ ID NO: 651157 - DNA, 15 bp, Homo sapiens
tcttgattcttacta

SEQ ID NO: 651158 - DNA, 15 bp, Homo sapiens
cttgattcttactat

SEQ ID NO: 651159 - DNA, 15 bp, Homo sapiens
ttgattcttactata

SEQ ID NO: 651160 - DNA, 15 bp, Homo sapiens
tgattcttactatat

SEQ ID NO: 651161 - DNA, 15 bp, Homo sapiens
gattcttactatatg

SEQ ID NO: 651162 - DNA, 15 bp, Homo sapiens
attcttactatatga

SEQ ID NO: 651163 - DNA, 15 bp, Homo sapiens
ttcttactatatgac

SEQ ID NO: 651164 - DNA, 15 bp, Homo sapiens
tcttactatatgact

SEQ ID NO: 651165 - DNA, 15 bp, Homo sapiens
cttactatatgactt

SEQ ID NO: 651166 - DNA, 15 bp, Homo sapiens
ttactatatgacttt

SEQ ID NO: 651167 - DNA, 15 bp, Homo sapiens
tactatatgacttta

SEQ ID NO: 651168 - DNA, 15 bp, Homo sapiens
actatatgactttag

SEQ ID NO: 651169 - DNA, 15 bp, Homo sapiens
ctatatgactttagc

SEQ ID NO: 651170 - DNA, 15 bp, Homo sapiens
tatatgactttagct

SEQ ID NO: 651171 - DNA, 15 bp, Homo sapiens
atatgactttagcta

SEQ ID NO: 651172 - DNA, 15 bp, Homo sapiens
tatgactttagctag

SEQ ID NO: 651173 - DNA, 15 bp, Homo sapiens
atgactttagctaga

SEQ ID NO: 651174 - DNA, 15 bp, Homo sapiens
tgactttagctagaa

SEQ ID NO: 651175 - DNA, 15 bp, Homo sapiens
gactttagctagaaa

SEQ ID NO: 651176 - DNA, 15 bp, Homo sapiens
actttagctagaaag

SEQ ID NO: 651177 - DNA, 15 bp, Homo sapiens
ctttagctagaaagt

SEQ ID NO: 651178 - DNA, 15 bp, Homo sapiens
tttagctagaaagtg

SEQ ID NO: 651179 - DNA, 15 bp, Homo sapiens
ttagctagaaagtgg

SEQ ID NO: 651180 - DNA, 15 bp, Homo sapiens
tagctagaaagtggc

SEQ ID NO: 651181 - DNA, 15 bp, Homo sapiens
agctagaaagtggct

SEQ ID NO: 651182 - DNA, 15 bp, Homo sapiens
gctagaaagtggctt

SEQ ID NO: 651183 - DNA, 15 bp, Homo sapiens
ctagaaagtggcttt

SEQ ID NO: 651184 - DNA, 15 bp, Homo sapiens
tagaaagtggctttg

SEQ ID NO: 651185 - DNA, 15 bp, Homo sapiens
agaaagtggctttgt

SEQ ID NO: 651186 - DNA, 15 bp, Homo sapiens
gaaagtggctttgta

SEQ ID NO: 651187 - DNA, 15 bp, Homo sapiens
aaagtggctttgtaa

SEQ ID NO: 651188 - DNA, 15 bp, Homo sapiens
aagtggctttgtaaa

SEQ ID NO: 651189 - DNA, 15 bp, Homo sapiens
agtggctttgtaaat

SEQ ID NO: 651190 - DNA, 15 bp, Homo sapiens
gtggctttgtaaatc

SEQ ID NO: 651191 - DNA, 15 bp, Homo sapiens
tggctttgtaaatca

SEQ ID NO: 651192 - DNA, 15 bp, Homo sapiens
ggctttgtaaatcat

SEQ ID NO: 651193 - DNA, 15 bp, Homo sapiens
gctttgtaaatcata

SEQ ID NO: 651194 - DNA, 15 bp, Homo sapiens
ctttgtaaatcatat

SEQ ID NO: 651195 - DNA, 15 bp, Homo sapiens
tttgtaaatcatatg

SEQ ID NO: 651196 - DNA, 15 bp, Homo sapiens
ttgtaaatcatatgt

SEQ ID NO: 651197 - DNA, 15 bp, Homo sapiens
tgtaaatcatatgtt

SEQ ID NO: 651198 - DNA, 15 bp, Homo sapiens
gtaaatcatatgttc

SEQ ID NO: 651199 - DNA, 15 bp, Homo sapiens
taaatcatatgttct

SEQ ID NO: 651200 - DNA, 15 bp, Homo sapiens
aaatcatatgttctt

SEQ ID NO: 651201 - DNA, 15 bp, Homo sapiens
aatcatatgttcttg

SEQ ID NO: 651202 - DNA, 15 bp, Homo sapiens
atcatatgttcttgt

SEQ ID NO: 651203 - DNA, 15 bp, Homo sapiens
tcatatgttcttgtc

SEQ ID NO: 651204 - DNA, 15 bp, Homo sapiens
catatgttcttgtca

SEQ ID NO: 651205 - DNA, 15 bp, Homo sapiens
atatgttcttgtcag

SEQ ID NO: 651206 - DNA, 15 bp, Homo sapiens
tatgttcttgtcagt

SEQ ID NO: 651207 - DNA, 15 bp, Homo sapiens
atgttcttgtcagta

SEQ ID NO: 651208 - DNA, 15 bp, Homo sapiens
tgttcttgtcagtat

SEQ ID NO: 651209 - DNA, 15 bp, Homo sapiens
gttcttgtcagtatt

SEQ ID NO: 651210 - DNA, 15 bp, Homo sapiens
ttcttgtcagtattg

SEQ ID NO: 651211 - DNA, 15 bp, Homo sapiens
tcttgtcagtattgt

SEQ ID NO: 651212 - DNA, 15 bp, Homo sapiens
cttgtcagtattgtc

SEQ ID NO: 651213 - DNA, 15 bp, Homo sapiens
ttgtcagtattgtca

SEQ ID NO: 651214 - DNA, 15 bp, Homo sapiens
tgtcagtattgtcat

SEQ ID NO: 651215 - DNA, 15 bp, Homo sapiens
gtcagtattgtcatt

SEQ ID NO: 651216 - DNA, 15 bp, Homo sapiens
tcagtattgtcattg

SEQ ID NO: 651217 - DNA, 15 bp, Homo sapiens
cagtattgtcattga

SEQ ID NO: 651218 - DNA, 15 bp, Homo sapiens
agtattgtcattgaa

SEQ ID NO: 651219 - DNA, 15 bp, Homo sapiens
gtattgtcattgaaa

SEQ ID NO: 651220 - DNA, 15 bp, Homo sapiens
tattgtcattgaaaa

SEQ ID NO: 651221 - DNA, 15 bp, Homo sapiens
attgtcattgaaaat

SEQ ID NO: 651222 - DNA, 15 bp, Homo sapiens
ttgtcattgaaaata

SEQ ID NO: 651223 - DNA, 15 bp, Homo sapiens
tgtcattgaaaatat

SEQ ID NO: 651224 - DNA, 15 bp, Homo sapiens
gtcattgaaaatatg

SEQ ID NO: 651225 - DNA, 15 bp, Homo sapiens
tcattgaaaatatgt

SEQ ID NO: 651226 - DNA, 15 bp, Homo sapiens
cattgaaaatatgtg

SEQ ID NO: 651227 - DNA, 15 bp, Homo sapiens
attgaaaatatgtgt

SEQ ID NO: 651228 - DNA, 15 bp, Homo sapiens
ttgaaaatatgtgtg

SEQ ID NO: 651229 - DNA, 15 bp, Homo sapiens
tgaaaatatgtgtgt

SEQ ID NO: 651230 - DNA, 15 bp, Homo sapiens
gaaaatatgtgtgtc

SEQ ID NO: 651231 - DNA, 15 bp, Homo sapiens
aaaatatgtgtgtca

SEQ ID NO: 651232 - DNA, 15 bp, Homo sapiens
aaatatgtgtgtcat

SEQ ID NO: 651233 - DNA, 15 bp, Homo sapiens
aatatgtgtgtcatg

SEQ ID NO: 651234 - DNA, 15 bp, Homo sapiens
atatgtgtgtcatga

SEQ ID NO: 651235 - DNA, 15 bp, Homo sapiens
tatgtgtgtcatgag

SEQ ID NO: 651236 - DNA, 15 bp, Homo sapiens
atgtgtgtcatgagt

SEQ ID NO: 651237 - DNA, 15 bp, Homo sapiens
tgtgtgtcatgagtt

SEQ ID NO: 651238 - DNA, 15 bp, Homo sapiens
gtgtgtcatgagttt

SEQ ID NO: 651239 - DNA, 15 bp, Homo sapiens
tgtgtcatgagtttt

SEQ ID NO: 651240 - DNA, 15 bp, Homo sapiens
gtgtcatgagttttg

SEQ ID NO: 651241 - DNA, 15 bp, Homo sapiens
tgtcatgagttttgc

SEQ ID NO: 651242 - DNA, 15 bp, Homo sapiens
gtcatgagttttgcc

SEQ ID NO: 651243 - DNA, 15 bp, Homo sapiens
tcatgagttttgcct

SEQ ID NO: 651244 - DNA, 15 bp, Homo sapiens
catgagttttgcctt

SEQ ID NO: 651245 - DNA, 15 bp, Homo sapiens
atgagttttgcctta

SEQ ID NO: 651246 - DNA, 15 bp, Homo sapiens
tgagttttgccttat

SEQ ID NO: 651247 - DNA, 15 bp, Homo sapiens
gagttttgccttata

SEQ ID NO: 651248 - DNA, 15 bp, Homo sapiens
agttttgccttatag

SEQ ID NO: 651249 - DNA, 15 bp, Homo sapiens
gttttgccttataga

SEQ ID NO: 651250 - DNA, 15 bp, Homo sapiens
ttttgccttatagaa

SEQ ID NO: 651251 - DNA, 15 bp, Homo sapiens
tttgccttatagaat

SEQ ID NO: 651252 - DNA, 15 bp, Homo sapiens
ttgccttatagaatt

SEQ ID NO: 651253 - DNA, 15 bp, Homo sapiens
tgccttatagaattc

SEQ ID NO: 651254 - DNA, 15 bp, Homo sapiens
gccttatagaattcc

SEQ ID NO: 651255 - DNA, 15 bp, Homo sapiens
ccttatagaattcca

SEQ ID NO: 651256 - DNA, 15 bp, Homo sapiens
cttatagaattccat

SEQ ID NO: 651257 - DNA, 15 bp, Homo sapiens
ttatagaattccatg

SEQ ID NO: 651258 - DNA, 15 bp, Homo sapiens
tatagaattccatga

SEQ ID NO: 651259 - DNA, 15 bp, Homo sapiens
atagaattccatgac

SEQ ID NO: 651260 - DNA, 15 bp, Homo sapiens
tagaattccatgact

SEQ ID NO: 651261 - DNA, 15 bp, Homo sapiens
agaattccatgactt

SEQ ID NO: 651262 - DNA, 15 bp, Homo sapiens
gaattccatgactta

SEQ ID NO: 651263 - DNA, 15 bp, Homo sapiens
aattccatgacttat

SEQ ID NO: 651264 - DNA, 15 bp, Homo sapiens
attccatgacttatg

SEQ ID NO: 651265 - DNA, 15 bp, Homo sapiens
ttccatgacttatgt

SEQ ID NO: 651266 - DNA, 15 bp, Homo sapiens
tccatgacttatgtt

SEQ ID NO: 651267 - DNA, 15 bp, Homo sapiens
ccatgacttatgtta

SEQ ID NO: 651268 - DNA, 15 bp, Homo sapiens
catgacttatgttaa

SEQ ID NO: 651269 - DNA, 15 bp, Homo sapiens
atgacttatgttaat

SEQ ID NO: 651270 - DNA, 15 bp, Homo sapiens
tgacttatgttaatc

SEQ ID NO: 651271 - DNA, 15 bp, Homo sapiens
gacttatgttaatcc

SEQ ID NO: 651272 - DNA, 15 bp, Homo sapiens
acttatgttaatccg

SEQ ID NO: 651273 - DNA, 15 bp, Homo sapiens
cttatgttaatccga

SEQ ID NO: 651274 - DNA, 15 bp, Homo sapiens
ttatgttaatccgac

SEQ ID NO: 651275 - DNA, 15 bp, Homo sapiens
tatgttaatccgaca

SEQ ID NO: 651276 - DNA, 15 bp, Homo sapiens
atgttaatccgacat

SEQ ID NO: 651277 - DNA, 15 bp, Homo sapiens
tgttaatccgacata

SEQ ID NO: 651278 - DNA, 15 bp, Homo sapiens
gttaatccgacatac

SEQ ID NO: 651279 - DNA, 15 bp, Homo sapiens
ttaatccgacatacc

SEQ ID NO: 651280 - DNA, 15 bp, Homo sapiens
taatccgacataccc

SEQ ID NO: 651281 - DNA, 15 bp, Homo sapiens
aatccgacataccct

SEQ ID NO: 651282 - DNA, 15 bp, Homo sapiens
atccgacataccctc

SEQ ID NO: 651283 - DNA, 15 bp, Homo sapiens
tccgacataccctca

SEQ ID NO: 651284 - DNA, 15 bp, Homo sapiens
ccgacataccctcat

SEQ ID NO: 651285 - DNA, 15 bp, Homo sapiens
cgacataccctcatg

SEQ ID NO: 651286 - DNA, 15 bp, Homo sapiens
gacataccctcatgc

SEQ ID NO: 651287 - DNA, 15 bp, Homo sapiens
acataccctcatgca

SEQ ID NO: 651288 - DNA, 15 bp, Homo sapiens
cataccctcatgcac

SEQ ID NO: 651289 - DNA, 15 bp, Homo sapiens
ataccctcatgcaca

SEQ ID NO: 651290 - DNA, 15 bp, Homo sapiens
taccctcatgcacag

SEQ ID NO: 651291 - DNA, 15 bp, Homo sapiens
accctcatgcacaga

SEQ ID NO: 651292 - DNA, 15 bp, Homo sapiens
ccctcatgcacagaa

SEQ ID NO: 651293 - DNA, 15 bp, Homo sapiens
cctcatgcacagaag

SEQ ID NO: 651294 - DNA, 15 bp, Homo sapiens
ctcatgcacagaagt

SEQ ID NO: 651295 - DNA, 15 bp, Homo sapiens
tcatgcacagaagtg

SEQ ID NO: 651296 - DNA, 15 bp, Homo sapiens
catgcacagaagtgt

SEQ ID NO: 651297 - DNA, 15 bp, Homo sapiens
atgcacagaagtgtc

SEQ ID NO: 651298 - DNA, 15 bp, Homo sapiens
tgcacagaagtgtcc

SEQ ID NO: 651299 - DNA, 15 bp, Homo sapiens
gcacagaagtgtcca

SEQ ID NO: 651300 - DNA, 15 bp, Homo sapiens
cacagaagtgtccaa

SEQ ID NO: 651301 - DNA, 15 bp, Homo sapiens
acagaagtgtccaac

SEQ ID NO: 651302 - DNA, 15 bp, Homo sapiens
cagaagtgtccaaca

SEQ ID NO: 651303 - DNA, 15 bp, Homo sapiens
agaagtgtccaacat

SEQ ID NO: 651304 - DNA, 15 bp, Homo sapiens
gaagtgtccaacata

SEQ ID NO: 651305 - DNA, 15 bp, Homo sapiens
aagtgtccaacatac

SEQ ID NO: 651306 - DNA, 15 bp, Homo sapiens
agtgtccaacatacc

SEQ ID NO: 651307 - DNA, 15 bp, Homo sapiens
gtgtccaacatacct

SEQ ID NO: 651308 - DNA, 15 bp, Homo sapiens
tgtccaacatacctt

SEQ ID NO: 651309 - DNA, 15 bp, Homo sapiens
gtccaacataccttc

SEQ ID NO: 651310 - DNA, 15 bp, Homo sapiens
tccaacataccttca

SEQ ID NO: 651311 - DNA, 15 bp, Homo sapiens
ccaacataccttcat

SEQ ID NO: 651312 - DNA, 15 bp, Homo sapiens
caacataccttcatg

SEQ ID NO: 651313 - DNA, 15 bp, Homo sapiens
aacataccttcatgc

SEQ ID NO: 651314 - DNA, 15 bp, Homo sapiens
acataccttcatgcc

SEQ ID NO: 651315 - DNA, 15 bp, Homo sapiens
cataccttcatgccc

SEQ ID NO: 651316 - DNA, 15 bp, Homo sapiens
ataccttcatgccca

SEQ ID NO: 651317 - DNA, 15 bp, Homo sapiens
taccttcatgcccaa

SEQ ID NO: 651318 - DNA, 15 bp, Homo sapiens
accttcatgcccaaa

SEQ ID NO: 651319 - DNA, 15 bp, Homo sapiens
ccttcatgcccaaaa

SEQ ID NO: 651320 - DNA, 15 bp, Homo sapiens
cttcatgcccaaaag

SEQ ID NO: 651321 - DNA, 15 bp, Homo sapiens
ttcatgcccaaaagt

SEQ ID NO: 651322 - DNA, 15 bp, Homo sapiens
tcatgcccaaaagta

SEQ ID NO: 651323 - DNA, 15 bp, Homo sapiens
catgcccaaaagtat

SEQ ID NO: 651324 - DNA, 15 bp, Homo sapiens
atgcccaaaagtatt

SEQ ID NO: 651325 - DNA, 15 bp, Homo sapiens
tgcccaaaagtattc

SEQ ID NO: 651326 - DNA, 15 bp, Homo sapiens
gcccaaaagtattct

SEQ ID NO: 651327 - DNA, 15 bp, Homo sapiens
cccaaaagtattctt

SEQ ID NO: 651328 - DNA, 15 bp, Homo sapiens
ccaaaagtattcttg

SEQ ID NO: 651329 - DNA, 15 bp, Homo sapiens
caaaagtattcttgc

SEQ ID NO: 651330 - DNA, 15 bp, Homo sapiens
aaaagtattcttgct

SEQ ID NO: 651331 - DNA, 15 bp, Homo sapiens
aaagtattcttgcta

SEQ ID NO: 651332 - DNA, 15 bp, Homo sapiens
aagtattcttgctaa

SEQ ID NO: 651333 - DNA, 15 bp, Homo sapiens
agtattcttgctaac

SEQ ID NO: 651334 - DNA, 15 bp, Homo sapiens
gtattcttgctaact

SEQ ID NO: 651335 - DNA, 15 bp, Homo sapiens
tattcttgctaactt

SEQ ID NO: 651336 - DNA, 15 bp, Homo sapiens
attcttgctaacttt

SEQ ID NO: 651337 - DNA, 15 bp, Homo sapiens
ttcttgctaactttc

SEQ ID NO: 651338 - DNA, 15 bp, Homo sapiens
tcttgctaactttct

SEQ ID NO: 651339 - DNA, 15 bp, Homo sapiens
cttgctaactttcta

SEQ ID NO: 651340 - DNA, 15 bp, Homo sapiens
ttgctaactttctag

SEQ ID NO: 651341 - DNA, 15 bp, Homo sapiens
tgctaactttctagt

SEQ ID NO: 651342 - DNA, 15 bp, Homo sapiens
gctaactttctagtc

SEQ ID NO: 651343 - DNA, 15 bp, Homo sapiens
ctaactttctagtca

SEQ ID NO: 651344 - DNA, 15 bp, Homo sapiens
taactttctagtcaa

SEQ ID NO: 651345 - DNA, 15 bp, Homo sapiens
aactttctagtcaac

SEQ ID NO: 651346 - DNA, 15 bp, Homo sapiens
actttctagtcaact

SEQ ID NO: 651347 - DNA, 15 bp, Homo sapiens
ctttctagtcaactg

SEQ ID NO: 651348 - DNA, 15 bp, Homo sapiens
tttctagtcaactgg

SEQ ID NO: 651349 - DNA, 15 bp, Homo sapiens
ttctagtcaactgga

SEQ ID NO: 651350 - DNA, 15 bp, Homo sapiens
tctagtcaactggac

SEQ ID NO: 651351 - DNA, 15 bp, Homo sapiens
ctagtcaactggaca

SEQ ID NO: 651352 - DNA, 15 bp, Homo sapiens
tagtcaactggacaa

SEQ ID NO: 651353 - DNA, 15 bp, Homo sapiens
agtcaactggacaat

SEQ ID NO: 651354 - DNA, 15 bp, Homo sapiens
gtcaactggacaatc

SEQ ID NO: 651355 - DNA, 15 bp, Homo sapiens
tcaactggacaatct

SEQ ID NO: 651356 - DNA, 15 bp, Homo sapiens
caactggacaatctt

SEQ ID NO: 651357 - DNA, 15 bp, Homo sapiens
aactggacaatctta

SEQ ID NO: 651358 - DNA, 15 bp, Homo sapiens
actggacaatcttat

SEQ ID NO: 651359 - DNA, 15 bp, Homo sapiens
ctggacaatcttatt

SEQ ID NO: 651360 - DNA, 15 bp, Homo sapiens
tggacaatcttattt

SEQ ID NO: 651361 - DNA, 15 bp, Homo sapiens
ggacaatcttatttg

SEQ ID NO: 651362 - DNA, 15 bp, Homo sapiens
gacaatcttatttgc

SEQ ID NO: 651363 - DNA, 15 bp, Homo sapiens
acaatcttatttgcc

SEQ ID NO: 651364 - DNA, 15 bp, Homo sapiens
caatcttatttgccc

SEQ ID NO: 651365 - DNA, 15 bp, Homo sapiens
aatcttatttgccca

SEQ ID NO: 651366 - DNA, 15 bp, Homo sapiens
atcttatttgcccaa

SEQ ID NO: 651367 - DNA, 15 bp, Homo sapiens
tcttatttgcccaaa

SEQ ID NO: 651368 - DNA, 15 bp, Homo sapiens
cttatttgcccaaaa

SEQ ID NO: 651369 - DNA, 15 bp, Homo sapiens
ttatttgcccaaaag

SEQ ID NO: 651370 - DNA, 15 bp, Homo sapiens
tatttgcccaaaaga

SEQ ID NO: 651371 - DNA, 15 bp, Homo sapiens
atttgcccaaaagaa

SEQ ID NO: 651372 - DNA, 15 bp, Homo sapiens
tttgcccaaaagaaa

SEQ ID NO: 651373 - DNA, 15 bp, Homo sapiens
ttgcccaaaagaaat

SEQ ID NO: 651374 - DNA, 15 bp, Homo sapiens
tgcccaaaagaaatt

SEQ ID NO: 651375 - DNA, 15 bp, Homo sapiens
gcccaaaagaaatta

SEQ ID NO: 651376 - DNA, 15 bp, Homo sapiens
cccaaaagaaattag

SEQ ID NO: 651377 - DNA, 15 bp, Homo sapiens
ccaaaagaaattagt

SEQ ID NO: 651378 - DNA, 15 bp, Homo sapiens
caaaagaaattagtc

SEQ ID NO: 651379 - DNA, 15 bp, Homo sapiens
aaaagaaattagtcc

SEQ ID NO: 651380 - DNA, 15 bp, Homo sapiens
aaagaaattagtcca

SEQ ID NO: 651381 - DNA, 15 bp, Homo sapiens
aagaaattagtccat

SEQ ID NO: 651382 - DNA, 15 bp, Homo sapiens
agaaattagtccatt

SEQ ID NO: 651383 - DNA, 15 bp, Homo sapiens
gaaattagtccattt

SEQ ID NO: 651384 - DNA, 15 bp, Homo sapiens
aaattagtccattta

SEQ ID NO: 651385 - DNA, 15 bp, Homo sapiens
aattagtccatttag

SEQ ID NO: 651386 - DNA, 15 bp, Homo sapiens
attagtccatttaga

SEQ ID NO: 651387 - DNA, 15 bp, Homo sapiens
ttagtccatttagat

SEQ ID NO: 651388 - DNA, 15 bp, Homo sapiens
tagtccatttagatt

SEQ ID NO: 651389 - DNA, 15 bp, Homo sapiens
agtccatttagatta

SEQ ID NO: 651390 - DNA, 15 bp, Homo sapiens
gtccatttagattat

SEQ ID NO: 651391 - DNA, 15 bp, Homo sapiens
tccatttagattatt

SEQ ID NO: 651392 - DNA, 15 bp, Homo sapiens
ccatttagattattt

SEQ ID NO: 651393 - DNA, 15 bp, Homo sapiens
catttagattatttt

SEQ ID NO: 651394 - DNA, 15 bp, Homo sapiens
atttagattattttc

SEQ ID NO: 651395 - DNA, 15 bp, Homo sapiens
tttagattattttca

SEQ ID NO: 651396 - DNA, 15 bp, Homo sapiens
ttagattattttcat

SEQ ID NO: 651397 - DNA, 15 bp, Homo sapiens
tagattattttcatg

SEQ ID NO: 651398 - DNA, 15 bp, Homo sapiens
agattattttcatgt

SEQ ID NO: 651399 - DNA, 15 bp, Homo sapiens
gattattttcatgta

SEQ ID NO: 651400 - DNA, 15 bp, Homo sapiens
attattttcatgtaa

SEQ ID NO: 651401 - DNA, 15 bp, Homo sapiens
ttattttcatgtaat

SEQ ID NO: 651402 - DNA, 15 bp, Homo sapiens
tattttcatgtaatt

SEQ ID NO: 651403 - DNA, 15 bp, Homo sapiens
attttcatgtaattc

SEQ ID NO: 651404 - DNA, 15 bp, Homo sapiens
ttttcatgtaattca

SEQ ID NO: 651405 - DNA, 15 bp, Homo sapiens
tttcatgtaattcaa

SEQ ID NO: 651406 - DNA, 15 bp, Homo sapiens
ttcatgtaattcaaa

SEQ ID NO: 651407 - DNA, 15 bp, Homo sapiens
tcatgtaattcaaaa

SEQ ID NO: 651408 - DNA, 15 bp, Homo sapiens
catgtaattcaaaac

SEQ ID NO: 651409 - DNA, 15 bp, Homo sapiens
atgtaattcaaaaca

SEQ ID NO: 651410 - DNA, 15 bp, Homo sapiens
tgtaattcaaaacat

SEQ ID NO: 651411 - DNA, 15 bp, Homo sapiens
gtaattcaaaacatt

SEQ ID NO: 651412 - DNA, 15 bp, Homo sapiens
taattcaaaacattg

SEQ ID NO: 651413 - DNA, 15 bp, Homo sapiens
aattcaaaacattga

SEQ ID NO: 651414 - DNA, 15 bp, Homo sapiens
attcaaaacattgat

SEQ ID NO: 651415 - DNA, 15 bp, Homo sapiens
ttcaaaacattgatg

SEQ ID NO: 651416 - DNA, 15 bp, Homo sapiens
tcaaaacattgatgg

SEQ ID NO: 651417 - DNA, 15 bp, Homo sapiens
caaaacattgatgga

SEQ ID NO: 651418 - DNA, 15 bp, Homo sapiens
aaaacattgatggag

SEQ ID NO: 651419 - DNA, 15 bp, Homo sapiens
aaacattgatggagc

SEQ ID NO: 651420 - DNA, 15 bp, Homo sapiens
aacattgatggagca

SEQ ID NO: 651421 - DNA, 15 bp, Homo sapiens
acattgatggagcat

SEQ ID NO: 651422 - DNA, 15 bp, Homo sapiens
cattgatggagcatc

SEQ ID NO: 651423 - DNA, 15 bp, Homo sapiens
attgatggagcatct

SEQ ID NO: 651424 - DNA, 15 bp, Homo sapiens
ttgatggagcatctg

SEQ ID NO: 651425 - DNA, 15 bp, Homo sapiens
tgatggagcatctgt

SEQ ID NO: 651426 - DNA, 15 bp, Homo sapiens
gatggagcatctgtt

SEQ ID NO: 651427 - DNA, 15 bp, Homo sapiens
atggagcatctgtta

SEQ ID NO: 651428 - DNA, 15 bp, Homo sapiens
tggagcatctgttat

SEQ ID NO: 651429 - DNA, 15 bp, Homo sapiens
ggagcatctgttatg

SEQ ID NO: 651430 - DNA, 15 bp, Homo sapiens
gagcatctgttatgt

SEQ ID NO: 651431 - DNA, 15 bp, Homo sapiens
agcatctgttatgtg

SEQ ID NO: 651432 - DNA, 15 bp, Homo sapiens
gcatctgttatgtgt

SEQ ID NO: 651433 - DNA, 15 bp, Homo sapiens
catctgttatgtgta

SEQ ID NO: 651434 - DNA, 15 bp, Homo sapiens
atctgttatgtgtaa

SEQ ID NO: 651435 - DNA, 15 bp, Homo sapiens
tctgttatgtgtaag

SEQ ID NO: 651436 - DNA, 15 bp, Homo sapiens
ctgttatgtgtaagc

SEQ ID NO: 651437 - DNA, 15 bp, Homo sapiens
tgttatgtgtaagca

SEQ ID NO: 651438 - DNA, 15 bp, Homo sapiens
gttatgtgtaagcat

SEQ ID NO: 651439 - DNA, 15 bp, Homo sapiens
ttatgtgtaagcatt

SEQ ID NO: 651440 - DNA, 15 bp, Homo sapiens
tatgtgtaagcattg

SEQ ID NO: 651441 - DNA, 15 bp, Homo sapiens
atgtgtaagcattga

SEQ ID NO: 651442 - DNA, 15 bp, Homo sapiens
tgtgtaagcattgaa

SEQ ID NO: 651443 - DNA, 15 bp, Homo sapiens
gtgtaagcattgaat

SEQ ID NO: 651444 - DNA, 15 bp, Homo sapiens
tgtaagcattgaatg

SEQ ID NO: 651445 - DNA, 15 bp, Homo sapiens
gtaagcattgaatga

SEQ ID NO: 651446 - DNA, 15 bp, Homo sapiens
taagcattgaatgag

SEQ ID NO: 651447 - DNA, 15 bp, Homo sapiens
aagcattgaatgaga

SEQ ID NO: 651448 - DNA, 15 bp, Homo sapiens
agcattgaatgagat

SEQ ID NO: 651449 - DNA, 15 bp, Homo sapiens
gcattgaatgagata

SEQ ID NO: 651450 - DNA, 15 bp, Homo sapiens
cattgaatgagatat

SEQ ID NO: 651451 - DNA, 15 bp, Homo sapiens
attgaatgagatatg

SEQ ID NO: 651452 - DNA, 15 bp, Homo sapiens
ttgaatgagatatga

SEQ ID NO: 651453 - DNA, 15 bp, Homo sapiens
tgaatgagatatgaa

SEQ ID NO: 651454 - DNA, 15 bp, Homo sapiens
gaatgagatatgaat

SEQ ID NO: 651455 - DNA, 15 bp, Homo sapiens
aatgagatatgaatg

SEQ ID NO: 651456 - DNA, 15 bp, Homo sapiens
atgagatatgaatga

SEQ ID NO: 651457 - DNA, 15 bp, Homo sapiens
tgagatatgaatgag

SEQ ID NO: 651458 - DNA, 15 bp, Homo sapiens
gagatatgaatgaga

SEQ ID NO: 651459 - DNA, 15 bp, Homo sapiens
agatatgaatgagat

SEQ ID NO: 651460 - DNA, 15 bp, Homo sapiens
gatatgaatgagatg

SEQ ID NO: 651461 - DNA, 15 bp, Homo sapiens
atatgaatgagatgc

SEQ ID NO: 651462 - DNA, 15 bp, Homo sapiens
tatgaatgagatgcc

SEQ ID NO: 651463 - DNA, 15 bp, Homo sapiens
atgaatgagatgcct

SEQ ID NO: 651464 - DNA, 15 bp, Homo sapiens
tgaatgagatgccta

SEQ ID NO: 651465 - DNA, 15 bp, Homo sapiens
gaatgagatgcctag

SEQ ID NO: 651466 - DNA, 15 bp, Homo sapiens
aatgagatgcctaga

SEQ ID NO: 651467 - DNA, 15 bp, Homo sapiens
atgagatgcctagaa

SEQ ID NO: 651468 - DNA, 15 bp, Homo sapiens
tgagatgcctagaaa

SEQ ID NO: 651469 - DNA, 15 bp, Homo sapiens
gagatgcctagaaat

SEQ ID NO: 651470 - DNA, 15 bp, Homo sapiens
agatgcctagaaatg

SEQ ID NO: 651471 - DNA, 15 bp, Homo sapiens
gatgcctagaaatga

SEQ ID NO: 651472 - DNA, 15 bp, Homo sapiens
atgcctagaaatgaa

SEQ ID NO: 651473 - DNA, 15 bp, Homo sapiens
tgcctagaaatgaat

SEQ ID NO: 651474 - DNA, 15 bp, Homo sapiens
gcctagaaatgaatg

SEQ ID NO: 651475 - DNA, 15 bp, Homo sapiens
cctagaaatgaatga

SEQ ID NO: 651476 - DNA, 15 bp, Homo sapiens
ctagaaatgaatgag

SEQ ID NO: 651477 - DNA, 15 bp, Homo sapiens
tagaaatgaatgaga

SEQ ID NO: 651478 - DNA, 15 bp, Homo sapiens
agaaatgaatgagag

SEQ ID NO: 651479 - DNA, 15 bp, Homo sapiens
gaaatgaatgagaga

SEQ ID NO: 651480 - DNA, 15 bp, Homo sapiens
aaatgaatgagagat

SEQ ID NO: 651481 - DNA, 15 bp, Homo sapiens
aatgaatgagagatt

SEQ ID NO: 651482 - DNA, 15 bp, Homo sapiens
atgaatgagagattg

SEQ ID NO: 651483 - DNA, 15 bp, Homo sapiens
tgaatgagagattga

SEQ ID NO: 651484 - DNA, 15 bp, Homo sapiens
gaatgagagattgac

SEQ ID NO: 651485 - DNA, 15 bp, Homo sapiens
aatgagagattgacc

SEQ ID NO: 651486 - DNA, 15 bp, Homo sapiens
atgagagattgacct

SEQ ID NO: 651487 - DNA, 15 bp, Homo sapiens
tgagagattgacctt

SEQ ID NO: 651488 - DNA, 15 bp, Homo sapiens
gagagattgaccttg

SEQ ID NO: 651489 - DNA, 15 bp, Homo sapiens
agagattgaccttgt

SEQ ID NO: 651490 - DNA, 15 bp, Homo sapiens
gagattgaccttgtt

SEQ ID NO: 651491 - DNA, 15 bp, Homo sapiens
agattgaccttgttt

SEQ ID NO: 651492 - DNA, 15 bp, Homo sapiens
gattgaccttgtttt

SEQ ID NO: 651493 - DNA, 15 bp, Homo sapiens
attgaccttgttttc

SEQ ID NO: 651494 - DNA, 15 bp, Homo sapiens
ttgaccttgttttca

SEQ ID NO: 651495 - DNA, 15 bp, Homo sapiens
tgaccttgttttcaa

SEQ ID NO: 651496 - DNA, 15 bp, Homo sapiens
gaccttgttttcaag

SEQ ID NO: 651497 - DNA, 15 bp, Homo sapiens
accttgttttcaagg

SEQ ID NO: 651498 - DNA, 15 bp, Homo sapiens
ccttgttttcaaggg

SEQ ID NO: 651499 - DNA, 15 bp, Homo sapiens
cttgttttcaagggg

SEQ ID NO: 651500 - DNA, 15 bp, Homo sapiens
ttgttttcaaggggc

SEQ ID NO: 651501 - DNA, 15 bp, Homo sapiens
tgttttcaaggggct

SEQ ID NO: 651502 - DNA, 15 bp, Homo sapiens
gttttcaaggggctt

SEQ ID NO: 651503 - DNA, 15 bp, Homo sapiens
ttttcaaggggctta

SEQ ID NO: 651504 - DNA, 15 bp, Homo sapiens
tttcaaggggcttac

SEQ ID NO: 651505 - DNA, 15 bp, Homo sapiens
ttcaaggggcttaca

SEQ ID NO: 651506 - DNA, 15 bp, Homo sapiens
tcaaggggcttacag

SEQ ID NO: 651507 - DNA, 15 bp, Homo sapiens
caaggggcttacagt

SEQ ID NO: 651508 - DNA, 15 bp, Homo sapiens
aaggggcttacagtt

SEQ ID NO: 651509 - DNA, 15 bp, Homo sapiens
aggggcttacagttg

SEQ ID NO: 651510 - DNA, 15 bp, Homo sapiens
ggggcttacagttga

SEQ ID NO: 651511 - DNA, 15 bp, Homo sapiens
gggcttacagttgag

SEQ ID NO: 651512 - DNA, 15 bp, Homo sapiens
ggcttacagttgagt

SEQ ID NO: 651513 - DNA, 15 bp, Homo sapiens
gcttacagttgagtg

SEQ ID NO: 651514 - DNA, 15 bp, Homo sapiens
cttacagttgagtgg

SEQ ID NO: 651515 - DNA, 15 bp, Homo sapiens
ttacagttgagtggt

SEQ ID NO: 651516 - DNA, 15 bp, Homo sapiens
tacagttgagtggta

SEQ ID NO: 651517 - DNA, 15 bp, Homo sapiens
acagttgagtggtaa

SEQ ID NO: 651518 - DNA, 15 bp, Homo sapiens
cagttgagtggtaaa

SEQ ID NO: 651519 - DNA, 15 bp, Homo sapiens
agttgagtggtaaaa

SEQ ID NO: 651520 - DNA, 15 bp, Homo sapiens
gttgagtggtaaaag

SEQ ID NO: 651521 - DNA, 15 bp, Homo sapiens
ttgagtggtaaaaga

SEQ ID NO: 651522 - DNA, 15 bp, Homo sapiens
tgagtggtaaaagaa

SEQ ID NO: 651523 - DNA, 15 bp, Homo sapiens
gagtggtaaaagaaa

SEQ ID NO: 651524 - DNA, 15 bp, Homo sapiens
agtggtaaaagaaaa

SEQ ID NO: 651525 - DNA, 15 bp, Homo sapiens
gtggtaaaagaaaaa

SEQ ID NO: 651526 - DNA, 15 bp, Homo sapiens
tggtaaaagaaaaat

SEQ ID NO: 651527 - DNA, 15 bp, Homo sapiens
ggtaaaagaaaaatg

SEQ ID NO: 651528 - DNA, 15 bp, Homo sapiens
gtaaaagaaaaatgc

SEQ ID NO: 651529 - DNA, 15 bp, Homo sapiens
taaaagaaaaatgca

SEQ ID NO: 651530 - DNA, 15 bp, Homo sapiens
aaaagaaaaatgcaa

SEQ ID NO: 651531 - DNA, 15 bp, Homo sapiens
aaagaaaaatgcaac

SEQ ID NO: 651532 - DNA, 15 bp, Homo sapiens
aagaaaaatgcaact

SEQ ID NO: 651533 - DNA, 15 bp, Homo sapiens
agaaaaatgcaacta

SEQ ID NO: 651534 - DNA, 15 bp, Homo sapiens
gaaaaatgcaactaa

SEQ ID NO: 651535 - DNA, 15 bp, Homo sapiens
aaaaatgcaactaag

SEQ ID NO: 651536 - DNA, 15 bp, Homo sapiens
aaaatgcaactaagt

SEQ ID NO: 651537 - DNA, 15 bp, Homo sapiens
aaatgcaactaagta

SEQ ID NO: 651538 - DNA, 15 bp, Homo sapiens
aatgcaactaagtat

SEQ ID NO: 651539 - DNA, 15 bp, Homo sapiens
atgcaactaagtatt

SEQ ID NO: 651540 - DNA, 15 bp, Homo sapiens
tgcaactaagtatta

SEQ ID NO: 651541 - DNA, 15 bp, Homo sapiens
gcaactaagtattat

SEQ ID NO: 651542 - DNA, 15 bp, Homo sapiens
caactaagtattatt

SEQ ID NO: 651543 - DNA, 15 bp, Homo sapiens
aactaagtattattg

SEQ ID NO: 651544 - DNA, 15 bp, Homo sapiens
actaagtattattgt

SEQ ID NO: 651545 - DNA, 15 bp, Homo sapiens
ctaagtattattgtc

SEQ ID NO: 651546 - DNA, 15 bp, Homo sapiens
taagtattattgtca

SEQ ID NO: 651547 - DNA, 15 bp, Homo sapiens
aagtattattgtcat

SEQ ID NO: 651548 - DNA, 15 bp, Homo sapiens
agtattattgtcata

SEQ ID NO: 651549 - DNA, 15 bp, Homo sapiens
gtattattgtcataa

SEQ ID NO: 651550 - DNA, 15 bp, Homo sapiens
tattattgtcataag

SEQ ID NO: 651551 - DNA, 15 bp, Homo sapiens
attattgtcataaga

SEQ ID NO: 651552 - DNA, 15 bp, Homo sapiens
ttattgtcataagag

SEQ ID NO: 651553 - DNA, 15 bp, Homo sapiens
tattgtcataagaga

SEQ ID NO: 651554 - DNA, 15 bp, Homo sapiens
attgtcataagagaa

SEQ ID NO: 651555 - DNA, 15 bp, Homo sapiens
ttgtcataagagaaa

SEQ ID NO: 651556 - DNA, 15 bp, Homo sapiens
tgtcataagagaaaa

SEQ ID NO: 651557 - DNA, 15 bp, Homo sapiens
gtcataagagaaaaa

SEQ ID NO: 651558 - DNA, 15 bp, Homo sapiens
tcataagagaaaaat

SEQ ID NO: 651559 - DNA, 15 bp, Homo sapiens
cataagagaaaaata

SEQ ID NO: 651560 - DNA, 15 bp, Homo sapiens
ataagagaaaaataa

SEQ ID NO: 651561 - DNA, 15 bp, Homo sapiens
taagagaaaaataac

SEQ ID NO: 651562 - DNA, 15 bp, Homo sapiens
aagagaaaaataacc

SEQ ID NO: 651563 - DNA, 15 bp, Homo sapiens
agagaaaaataacca

SEQ ID NO: 651564 - DNA, 15 bp, Homo sapiens
gagaaaaataaccat

SEQ ID NO: 651565 - DNA, 15 bp, Homo sapiens
agaaaaataaccatg

SEQ ID NO: 651566 - DNA, 15 bp, Homo sapiens
gaaaaataaccatgg

SEQ ID NO: 651567 - DNA, 15 bp, Homo sapiens
aaaaataaccatgga

SEQ ID NO: 651568 - DNA, 15 bp, Homo sapiens
aaaataaccatggag

SEQ ID NO: 651569 - DNA, 15 bp, Homo sapiens
aaataaccatggaga

SEQ ID NO: 651570 - DNA, 15 bp, Homo sapiens
aataaccatggagaa

SEQ ID NO: 651571 - DNA, 15 bp, Homo sapiens
ataaccatggagaat

SEQ ID NO: 651572 - DNA, 15 bp, Homo sapiens
taaccatggagaata

SEQ ID NO: 651573 - DNA, 15 bp, Homo sapiens
aaccatggagaataa

SEQ ID NO: 651574 - DNA, 15 bp, Homo sapiens
accatggagaataaa

SEQ ID NO: 651575 - DNA, 15 bp, Homo sapiens
ccatggagaataaat

SEQ ID NO: 651576 - DNA, 15 bp, Homo sapiens
catggagaataaatt

SEQ ID NO: 651577 - DNA, 15 bp, Homo sapiens
atggagaataaatta

SEQ ID NO: 651578 - DNA, 15 bp, Homo sapiens
tggagaataaattat

SEQ ID NO: 651579 - DNA, 15 bp, Homo sapiens
ggagaataaattata

SEQ ID NO: 651580 - DNA, 15 bp, Homo sapiens
gagaataaattatat

SEQ ID NO: 651581 - DNA, 15 bp, Homo sapiens
agaataaattatatc

SEQ ID NO: 651582 - DNA, 15 bp, Homo sapiens
gaataaattatatcc

SEQ ID NO: 651583 - DNA, 15 bp, Homo sapiens
aataaattatatcct

SEQ ID NO: 651584 - DNA, 15 bp, Homo sapiens
ataaattatatcctt

SEQ ID NO: 651585 - DNA, 15 bp, Homo sapiens
taaattatatccttt

SEQ ID NO: 651586 - DNA, 15 bp, Homo sapiens
aaattatatccttta

SEQ ID NO: 651587 - DNA, 15 bp, Homo sapiens
aattatatcctttat

SEQ ID NO: 651588 - DNA, 15 bp, Homo sapiens
attatatcctttatg

SEQ ID NO: 651589 - DNA, 15 bp, Homo sapiens
ttatatcctttatgt

SEQ ID NO: 651590 - DNA, 15 bp, Homo sapiens
tatatcctttatgtt

SEQ ID NO: 651591 - DNA, 15 bp, Homo sapiens
atatcctttatgttt

SEQ ID NO: 651592 - DNA, 15 bp, Homo sapiens
tatcctttatgtttt

SEQ ID NO: 651593 - DNA, 15 bp, Homo sapiens
atcctttatgttttt

SEQ ID NO: 651594 - DNA, 15 bp, Homo sapiens
tcctttatgtttttc

SEQ ID NO: 651595 - DNA, 15 bp, Homo sapiens
cctttatgtttttct

SEQ ID NO: 651596 - DNA, 15 bp, Homo sapiens
ctttatgtttttctt

SEQ ID NO: 651597 - DNA, 15 bp, Homo sapiens
tttatgtttttcttg

SEQ ID NO: 651598 - DNA, 15 bp, Homo sapiens
ttatgtttttcttga

SEQ ID NO: 651599 - DNA, 15 bp, Homo sapiens
tatgtttttcttgaa

SEQ ID NO: 651600 - DNA, 15 bp, Homo sapiens
atgtttttcttgaat

SEQ ID NO: 651601 - DNA, 15 bp, Homo sapiens
tgtttttcttgaata

SEQ ID NO: 651602 - DNA, 15 bp, Homo sapiens
gtttttcttgaatat

SEQ ID NO: 651603 - DNA, 15 bp, Homo sapiens
tttttcttgaatatt

SEQ ID NO: 651604 - DNA, 15 bp, Homo sapiens
ttttcttgaatattt

SEQ ID NO: 651605 - DNA, 15 bp, Homo sapiens
tttcttgaatatttt

SEQ ID NO: 651606 - DNA, 15 bp, Homo sapiens
ttcttgaatattttg

SEQ ID NO: 651607 - DNA, 15 bp, Homo sapiens
tcttgaatattttgg

SEQ ID NO: 651608 - DNA, 15 bp, Homo sapiens
cttgaatattttggt

SEQ ID NO: 651609 - DNA, 15 bp, Homo sapiens
ttgaatattttggtc

SEQ ID NO: 651610 - DNA, 15 bp, Homo sapiens
tgaatattttggtct

SEQ ID NO: 651611 - DNA, 15 bp, Homo sapiens
gaatattttggtcta

SEQ ID NO: 651612 - DNA, 15 bp, Homo sapiens
aatattttggtctac

SEQ ID NO: 651613 - DNA, 15 bp, Homo sapiens
atattttggtctacc

SEQ ID NO: 651614 - DNA, 15 bp, Homo sapiens
tattttggtctaccc

SEQ ID NO: 651615 - DNA, 15 bp, Homo sapiens
attttggtctaccct

SEQ ID NO: 651616 - DNA, 15 bp, Homo sapiens
ttttggtctaccctg

SEQ ID NO: 651617 - DNA, 15 bp, Homo sapiens
tttggtctaccctgc

SEQ ID NO: 651618 - DNA, 15 bp, Homo sapiens
ttggtctaccctgcc

SEQ ID NO: 651619 - DNA, 15 bp, Homo sapiens
tggtctaccctgcca

SEQ ID NO: 651620 - DNA, 15 bp, Homo sapiens
ggtctaccctgccaa

SEQ ID NO: 651621 - DNA, 15 bp, Homo sapiens
gtctaccctgccaag

SEQ ID NO: 651622 - DNA, 15 bp, Homo sapiens
tctaccctgccaaga

SEQ ID NO: 651623 - DNA, 15 bp, Homo sapiens
ctaccctgccaagaa

SEQ ID NO: 651624 - DNA, 15 bp, Homo sapiens
taccctgccaagaat

SEQ ID NO: 651625 - DNA, 15 bp, Homo sapiens
accctgccaagaata

SEQ ID NO: 651626 - DNA, 15 bp, Homo sapiens
ccctgccaagaataa

SEQ ID NO: 651627 - DNA, 15 bp, Homo sapiens
cctgccaagaataat

SEQ ID NO: 651628 - DNA, 15 bp, Homo sapiens
ctgccaagaataata

SEQ ID NO: 651629 - DNA, 15 bp, Homo sapiens
tgccaagaataatac

SEQ ID NO: 651630 - DNA, 15 bp, Homo sapiens
gccaagaataatacc

SEQ ID NO: 651631 - DNA, 15 bp, Homo sapiens
ccaagaataataccc

SEQ ID NO: 651632 - DNA, 15 bp, Homo sapiens
caagaataataccct

SEQ ID NO: 651633 - DNA, 15 bp, Homo sapiens
aagaataataccctg

SEQ ID NO: 651634 - DNA, 15 bp, Homo sapiens
agaataataccctgt

SEQ ID NO: 651635 - DNA, 15 bp, Homo sapiens
gaataataccctgtc

SEQ ID NO: 651636 - DNA, 15 bp, Homo sapiens
aataataccctgtca

SEQ ID NO: 651637 - DNA, 15 bp, Homo sapiens
ataataccctgtcaa

SEQ ID NO: 651638 - DNA, 15 bp, Homo sapiens
taataccctgtcaat

SEQ ID NO: 651639 - DNA, 15 bp, Homo sapiens
aataccctgtcaatg

SEQ ID NO: 651640 - DNA, 15 bp, Homo sapiens
ataccctgtcaatgg

SEQ ID NO: 651641 - DNA, 15 bp, Homo sapiens
taccctgtcaatggg

SEQ ID NO: 651642 - DNA, 15 bp, Homo sapiens
accctgtcaatgggc

SEQ ID NO: 651643 - DNA, 15 bp, Homo sapiens
ccctgtcaatgggct

SEQ ID NO: 651644 - DNA, 15 bp, Homo sapiens
cctgtcaatgggctt

SEQ ID NO: 651645 - DNA, 15 bp, Homo sapiens
ctgtcaatgggcttc

SEQ ID NO: 651646 - DNA, 15 bp, Homo sapiens
tgtcaatgggcttct

SEQ ID NO: 651647 - DNA, 15 bp, Homo sapiens
gtcaatgggcttctt

SEQ ID NO: 651648 - DNA, 15 bp, Homo sapiens
tcaatgggcttcttg

SEQ ID NO: 651649 - DNA, 15 bp, Homo sapiens
caatgggcttcttga

SEQ ID NO: 651650 - DNA, 15 bp, Homo sapiens
aatgggcttcttgat

SEQ ID NO: 651651 - DNA, 15 bp, Homo sapiens
atgggcttcttgatg

SEQ ID NO: 651652 - DNA, 15 bp, Homo sapiens
tgggcttcttgatgc

SEQ ID NO: 651653 - DNA, 15 bp, Homo sapiens
gggcttcttgatgcc

SEQ ID NO: 651654 - DNA, 15 bp, Homo sapiens
ggcttcttgatgcca

SEQ ID NO: 651655 - DNA, 15 bp, Homo sapiens
gcttcttgatgccaa

SEQ ID NO: 651656 - DNA, 15 bp, Homo sapiens
cttcttgatgccaaa

SEQ ID NO: 651657 - DNA, 15 bp, Homo sapiens
ttcttgatgccaaag

SEQ ID NO: 651658 - DNA, 15 bp, Homo sapiens
tcttgatgccaaagg

SEQ ID NO: 651659 - DNA, 15 bp, Homo sapiens
cttgatgccaaagga

SEQ ID NO: 651660 - DNA, 15 bp, Homo sapiens
ttgatgccaaaggac

SEQ ID NO: 651661 - DNA, 15 bp, Homo sapiens
tgatgccaaaggaca

SEQ ID NO: 651662 - DNA, 15 bp, Homo sapiens
gatgccaaaggacat

SEQ ID NO: 651663 - DNA, 15 bp, Homo sapiens
atgccaaaggacata

SEQ ID NO: 651664 - DNA, 15 bp, Homo sapiens
tgccaaaggacatat

SEQ ID NO: 651665 - DNA, 15 bp, Homo sapiens
gccaaaggacatatt

SEQ ID NO: 651666 - DNA, 15 bp, Homo sapiens
ccaaaggacatattt

SEQ ID NO: 651667 - DNA, 15 bp, Homo sapiens
caaaggacatattta

SEQ ID NO: 651668 - DNA, 15 bp, Homo sapiens
aaaggacatatttat

SEQ ID NO: 651669 - DNA, 15 bp, Homo sapiens
aaggacatatttatt

SEQ ID NO: 651670 - DNA, 15 bp, Homo sapiens
aggacatatttattt

SEQ ID NO: 651671 - DNA, 15 bp, Homo sapiens
ggacatatttattta

SEQ ID NO: 651672 - DNA, 15 bp, Homo sapiens
gacatatttatttac

SEQ ID NO: 651673 - DNA, 15 bp, Homo sapiens
acatatttatttaca

SEQ ID NO: 651674 - DNA, 15 bp, Homo sapiens
catatttatttacat

SEQ ID NO: 651675 - DNA, 15 bp, Homo sapiens
atatttatttacatt

SEQ ID NO: 651676 - DNA, 15 bp, Homo sapiens
tatttatttacattt

SEQ ID NO: 651677 - DNA, 15 bp, Homo sapiens
atttatttacatttg

SEQ ID NO: 651678 - DNA, 15 bp, Homo sapiens
tttatttacatttga

SEQ ID NO: 651679 - DNA, 15 bp, Homo sapiens
ttatttacatttgaa

SEQ ID NO: 651680 - DNA, 15 bp, Homo sapiens
tatttacatttgaat

SEQ ID NO: 651681 - DNA, 15 bp, Homo sapiens
atttacatttgaatc

SEQ ID NO: 651682 - DNA, 15 bp, Homo sapiens
tttacatttgaatcc

SEQ ID NO: 651683 - DNA, 15 bp, Homo sapiens
ttacatttgaatcca

SEQ ID NO: 651684 - DNA, 15 bp, Homo sapiens
tacatttgaatccaa

SEQ ID NO: 651685 - DNA, 15 bp, Homo sapiens
acatttgaatccaag

SEQ ID NO: 651686 - DNA, 15 bp, Homo sapiens
catttgaatccaagt

SEQ ID NO: 651687 - DNA, 15 bp, Homo sapiens
atttgaatccaagtg

SEQ ID NO: 651688 - DNA, 15 bp, Homo sapiens
tttgaatccaagtgt

SEQ ID NO: 651689 - DNA, 15 bp, Homo sapiens
ttgaatccaagtgtc

SEQ ID NO: 651690 - DNA, 15 bp, Homo sapiens
tgaatccaagtgtct

SEQ ID NO: 651691 - DNA, 15 bp, Homo sapiens
gaatccaagtgtcta

SEQ ID NO: 651692 - DNA, 15 bp, Homo sapiens
aatccaagtgtctag

SEQ ID NO: 651693 - DNA, 15 bp, Homo sapiens
atccaagtgtctagc

SEQ ID NO: 651694 - DNA, 15 bp, Homo sapiens
tccaagtgtctagct

SEQ ID NO: 651695 - DNA, 15 bp, Homo sapiens
ccaagtgtctagctc

SEQ ID NO: 651696 - DNA, 15 bp, Homo sapiens
caagtgtctagctca

SEQ ID NO: 651697 - DNA, 15 bp, Homo sapiens
aagtgtctagctcat

SEQ ID NO: 651698 - DNA, 15 bp, Homo sapiens
agtgtctagctcata

SEQ ID NO: 651699 - DNA, 15 bp, Homo sapiens
gtgtctagctcatag

SEQ ID NO: 651700 - DNA, 15 bp, Homo sapiens
tgtctagctcatagc

SEQ ID NO: 651701 - DNA, 15 bp, Homo sapiens
gtctagctcatagcc

SEQ ID NO: 651702 - DNA, 15 bp, Homo sapiens
tctagctcatagcct

SEQ ID NO: 651703 - DNA, 15 bp, Homo sapiens
ctagctcatagcctg

SEQ ID NO: 651704 - DNA, 15 bp, Homo sapiens
tagctcatagcctgg

SEQ ID NO: 651705 - DNA, 15 bp, Homo sapiens
agctcatagcctgga

SEQ ID NO: 651706 - DNA, 15 bp, Homo sapiens
gctcatagcctggat

SEQ ID NO: 651707 - DNA, 15 bp, Homo sapiens
ctcatagcctggatg

SEQ ID NO: 651708 - DNA, 15 bp, Homo sapiens
tcatagcctggatgc

SEQ ID NO: 651709 - DNA, 15 bp, Homo sapiens
catagcctggatgct

SEQ ID NO: 651710 - DNA, 15 bp, Homo sapiens
atagcctggatgcta

SEQ ID NO: 651711 - DNA, 15 bp, Homo sapiens
tagcctggatgctat

SEQ ID NO: 651712 - DNA, 15 bp, Homo sapiens
agcctggatgctata

SEQ ID NO: 651713 - DNA, 15 bp, Homo sapiens
gcctggatgctatag

SEQ ID NO: 651714 - DNA, 15 bp, Homo sapiens
cctggatgctatagt

SEQ ID NO: 651715 - DNA, 15 bp, Homo sapiens
ctggatgctatagta

SEQ ID NO: 651716 - DNA, 15 bp, Homo sapiens
tggatgctatagtag

SEQ ID NO: 651717 - DNA, 15 bp, Homo sapiens
ggatgctatagtagc

SEQ ID NO: 651718 - DNA, 15 bp, Homo sapiens
gatgctatagtagct

SEQ ID NO: 651719 - DNA, 15 bp, Homo sapiens
atgctatagtagctg

SEQ ID NO: 651720 - DNA, 15 bp, Homo sapiens
tgctatagtagctgc

SEQ ID NO: 651721 - DNA, 15 bp, Homo sapiens
gctatagtagctgcc

SEQ ID NO: 651722 - DNA, 15 bp, Homo sapiens
ctatagtagctgccc

SEQ ID NO: 651723 - DNA, 15 bp, Homo sapiens
tatagtagctgccca

SEQ ID NO: 651724 - DNA, 15 bp, Homo sapiens
atagtagctgcccat

SEQ ID NO: 651725 - DNA, 15 bp, Homo sapiens
tagtagctgcccata

SEQ ID NO: 651726 - DNA, 15 bp, Homo sapiens
agtagctgcccatat

SEQ ID NO: 651727 - DNA, 15 bp, Homo sapiens
gtagctgcccatatt

SEQ ID NO: 651728 - DNA, 15 bp, Homo sapiens
tagctgcccatattt

SEQ ID NO: 651729 - DNA, 15 bp, Homo sapiens
agctgcccatatttg

SEQ ID NO: 651730 - DNA, 15 bp, Homo sapiens
gctgcccatatttga

SEQ ID NO: 651731 - DNA, 15 bp, Homo sapiens
ctgcccatatttgat

SEQ ID NO: 651732 - DNA, 15 bp, Homo sapiens
tgcccatatttgatt

SEQ ID NO: 651733 - DNA, 15 bp, Homo sapiens
gcccatatttgattg

SEQ ID NO: 651734 - DNA, 15 bp, Homo sapiens
cccatatttgattgt

SEQ ID NO: 651735 - DNA, 15 bp, Homo sapiens
ccatatttgattgtt

SEQ ID NO: 651736 - DNA, 15 bp, Homo sapiens
catatttgattgttg

SEQ ID NO: 651737 - DNA, 15 bp, Homo sapiens
atatttgattgttga

SEQ ID NO: 651738 - DNA, 15 bp, Homo sapiens
tatttgattgttgaa

SEQ ID NO: 651739 - DNA, 15 bp, Homo sapiens
atttgattgttgaac

SEQ ID NO: 651740 - DNA, 15 bp, Homo sapiens
tttgattgttgaact

SEQ ID NO: 651741 - DNA, 15 bp, Homo sapiens
ttgattgttgaactg

SEQ ID NO: 651742 - DNA, 15 bp, Homo sapiens
tgattgttgaactga

SEQ ID NO: 651743 - DNA, 15 bp, Homo sapiens
gattgttgaactgac

SEQ ID NO: 651744 - DNA, 15 bp, Homo sapiens
attgttgaactgaca

SEQ ID NO: 651745 - DNA, 15 bp, Homo sapiens
ttgttgaactgacag

SEQ ID NO: 651746 - DNA, 15 bp, Homo sapiens
tgttgaactgacagg

SEQ ID NO: 651747 - DNA, 15 bp, Homo sapiens
gttgaactgacagga

SEQ ID NO: 651748 - DNA, 15 bp, Homo sapiens
ttgaactgacaggat

SEQ ID NO: 651749 - DNA, 15 bp, Homo sapiens
tgaactgacaggatt

SEQ ID NO: 651750 - DNA, 15 bp, Homo sapiens
gaactgacaggattg

SEQ ID NO: 651751 - DNA, 15 bp, Homo sapiens
aactgacaggattga

SEQ ID NO: 651752 - DNA, 15 bp, Homo sapiens
actgacaggattgaa

SEQ ID NO: 651753 - DNA, 15 bp, Homo sapiens
ctgacaggattgaat

SEQ ID NO: 651754 - DNA, 15 bp, Homo sapiens
tgacaggattgaatt

SEQ ID NO: 651755 - DNA, 15 bp, Homo sapiens
gacaggattgaattg

SEQ ID NO: 651756 - DNA, 15 bp, Homo sapiens
acaggattgaattga

SEQ ID NO: 651757 - DNA, 15 bp, Homo sapiens
caggattgaattgaa

SEQ ID NO: 651758 - DNA, 15 bp, Homo sapiens
aggattgaattgaat

SEQ ID NO: 651759 - DNA, 15 bp, Homo sapiens
ggattgaattgaatt

SEQ ID NO: 651760 - DNA, 15 bp, Homo sapiens
gattgaattgaattg

SEQ ID NO: 651761 - DNA, 15 bp, Homo sapiens
attgaattgaattga

SEQ ID NO: 651762 - DNA, 15 bp, Homo sapiens
ttgaattgaattgaa

SEQ ID NO: 651763 - DNA, 15 bp, Homo sapiens
tgaattgaattgaat

SEQ ID NO: 651764 - DNA, 15 bp, Homo sapiens
gaattgaattgaatt

SEQ ID NO: 651765 - DNA, 15 bp, Homo sapiens
aattgaattgaattg

SEQ ID NO: 651766 - DNA, 15 bp, Homo sapiens
ttgaattgaattgag

SEQ ID NO: 651767 - DNA, 15 bp, Homo sapiens
tgaattgaattgagt

SEQ ID NO: 651768 - DNA, 15 bp, Homo sapiens
gaattgaattgagtc

SEQ ID NO: 651769 - DNA, 15 bp, Homo sapiens
aattgaattgagtct

SEQ ID NO: 651770 - DNA, 15 bp, Homo sapiens
attgaattgagtcta

SEQ ID NO: 651771 - DNA, 15 bp, Homo sapiens
ttgaattgagtctag

SEQ ID NO: 651772 - DNA, 15 bp, Homo sapiens
tgaattgagtctagt

SEQ ID NO: 651773 - DNA, 15 bp, Homo sapiens
gaattgagtctagtt

SEQ ID NO: 651774 - DNA, 15 bp, Homo sapiens
aattgagtctagttg

SEQ ID NO: 651775 - DNA, 15 bp, Homo sapiens
attgagtctagttga

SEQ ID NO: 651776 - DNA, 15 bp, Homo sapiens
ttgagtctagttgaa

SEQ ID NO: 651777 - DNA, 15 bp, Homo sapiens
tgagtctagttgaat

SEQ ID NO: 651778 - DNA, 15 bp, Homo sapiens
gagtctagttgaatc

SEQ ID NO: 651779 - DNA, 15 bp, Homo sapiens
agtctagttgaatcc

SEQ ID NO: 651780 - DNA, 15 bp, Homo sapiens
gtctagttgaatcca

SEQ ID NO: 651781 - DNA, 15 bp, Homo sapiens
tctagttgaatccaa

SEQ ID NO: 651782 - DNA, 15 bp, Homo sapiens
ctagttgaatccaat

SEQ ID NO: 651783 - DNA, 15 bp, Homo sapiens
tagttgaatccaatc

SEQ ID NO: 651784 - DNA, 15 bp, Homo sapiens
agttgaatccaatcg

SEQ ID NO: 651785 - DNA, 15 bp, Homo sapiens
gttgaatccaatcga

SEQ ID NO: 651786 - DNA, 15 bp, Homo sapiens
ttgaatccaatcgaa

SEQ ID NO: 651787 - DNA, 15 bp, Homo sapiens
tgaatccaatcgaat

SEQ ID NO: 651788 - DNA, 15 bp, Homo sapiens
gaatccaatcgaata

SEQ ID NO: 651789 - DNA, 15 bp, Homo sapiens
aatccaatcgaatag

SEQ ID NO: 651790 - DNA, 15 bp, Homo sapiens
atccaatcgaataga

SEQ ID NO: 651791 - DNA, 15 bp, Homo sapiens
tccaatcgaatagaa

SEQ ID NO: 651792 - DNA, 15 bp, Homo sapiens
ccaatcgaatagaat

SEQ ID NO: 651793 - DNA, 15 bp, Homo sapiens
caatcgaatagaatg

SEQ ID NO: 651794 - DNA, 15 bp, Homo sapiens
aatcgaatagaatgg

SEQ ID NO: 651795 - DNA, 15 bp, Homo sapiens
atcgaatagaatgga

SEQ ID NO: 651796 - DNA, 15 bp, Homo sapiens
tcgaatagaatggaa

SEQ ID NO: 651797 - DNA, 15 bp, Homo sapiens
cgaatagaatggaat

SEQ ID NO: 651798 - DNA, 15 bp, Homo sapiens
gaatagaatggaatt

SEQ ID NO: 651799 - DNA, 15 bp, Homo sapiens
aatagaatggaatta

SEQ ID NO: 651800 - DNA, 15 bp, Homo sapiens
atagaatggaattac

SEQ ID NO: 651801 - DNA, 15 bp, Homo sapiens
tagaatggaattact

SEQ ID NO: 651802 - DNA, 15 bp, Homo sapiens
agaatggaattactt

SEQ ID NO: 651803 - DNA, 15 bp, Homo sapiens
gaatggaattacttg

SEQ ID NO: 651804 - DNA, 15 bp, Homo sapiens
aatggaattacttgt

SEQ ID NO: 651805 - DNA, 15 bp, Homo sapiens
atggaattacttgtt

SEQ ID NO: 651806 - DNA, 15 bp, Homo sapiens
tggaattacttgttt

SEQ ID NO: 651807 - DNA, 15 bp, Homo sapiens
ggaattacttgtttg

SEQ ID NO: 651808 - DNA, 15 bp, Homo sapiens
gaattacttgtttgg

SEQ ID NO: 651809 - DNA, 15 bp, Homo sapiens
aattacttgtttggg

SEQ ID NO: 651810 - DNA, 15 bp, Homo sapiens
attacttgtttggga

SEQ ID NO: 651811 - DNA, 15 bp, Homo sapiens
ttacttgtttgggat

SEQ ID NO: 651812 - DNA, 15 bp, Homo sapiens
tacttgtttgggatc

SEQ ID NO: 651813 - DNA, 15 bp, Homo sapiens
acttgtttgggatct

SEQ ID NO: 651814 - DNA, 15 bp, Homo sapiens
cttgtttgggatctt

SEQ ID NO: 651815 - DNA, 15 bp, Homo sapiens
ttgtttgggatcttg

SEQ ID NO: 651816 - DNA, 15 bp, Homo sapiens
tgtttgggatcttgg

SEQ ID NO: 651817 - DNA, 15 bp, Homo sapiens
gtttgggatcttggt

SEQ ID NO: 651818 - DNA, 15 bp, Homo sapiens
tttgggatcttggtc

SEQ ID NO: 651819 - DNA, 15 bp, Homo sapiens
ttgggatcttggtct

SEQ ID NO: 651820 - DNA, 15 bp, Homo sapiens
tgggatcttggtctt

SEQ ID NO: 651821 - DNA, 15 bp, Homo sapiens
gggatcttggtctta

SEQ ID NO: 651822 - DNA, 15 bp, Homo sapiens
ggatcttggtcttaa

SEQ ID NO: 651823 - DNA, 15 bp, Homo sapiens
gatcttggtcttaag

SEQ ID NO: 651824 - DNA, 15 bp, Homo sapiens
atcttggtcttaaga

SEQ ID NO: 651825 - DNA, 15 bp, Homo sapiens
tcttggtcttaagaa

SEQ ID NO: 651826 - DNA, 15 bp, Homo sapiens
cttggtcttaagaac

SEQ ID NO: 651827 - DNA, 15 bp, Homo sapiens
ttggtcttaagaacc

SEQ ID NO: 651828 - DNA, 15 bp, Homo sapiens
tggtcttaagaacca

SEQ ID NO: 651829 - DNA, 15 bp, Homo sapiens
ggtcttaagaaccat

SEQ ID NO: 651830 - DNA, 15 bp, Homo sapiens
gtcttaagaaccatc

SEQ ID NO: 651831 - DNA, 15 bp, Homo sapiens
tcttaagaaccatca

SEQ ID NO: 651832 - DNA, 15 bp, Homo sapiens
cttaagaaccatcaa

SEQ ID NO: 651833 - DNA, 15 bp, Homo sapiens
ttaagaaccatcaag

SEQ ID NO: 651834 - DNA, 15 bp, Homo sapiens
taagaaccatcaaga

SEQ ID NO: 651835 - DNA, 15 bp, Homo sapiens
aagaaccatcaagaa

SEQ ID NO: 651836 - DNA, 15 bp, Homo sapiens
agaaccatcaagaat

SEQ ID NO: 651837 - DNA, 15 bp, Homo sapiens
gaaccatcaagaatt

SEQ ID NO: 651838 - DNA, 15 bp, Homo sapiens
aaccatcaagaatta

SEQ ID NO: 651839 - DNA, 15 bp, Homo sapiens
accatcaagaattaa

SEQ ID NO: 651840 - DNA, 15 bp, Homo sapiens
ccatcaagaattaag

SEQ ID NO: 651841 - DNA, 15 bp, Homo sapiens
catcaagaattaagg

SEQ ID NO: 651842 - DNA, 15 bp, Homo sapiens
atcaagaattaaggt

SEQ ID NO: 651843 - DNA, 15 bp, Homo sapiens
tcaagaattaaggtt

SEQ ID NO: 651844 - DNA, 15 bp, Homo sapiens
caagaattaaggttg

SEQ ID NO: 651845 - DNA, 15 bp, Homo sapiens
aagaattaaggttgt

SEQ ID NO: 651846 - DNA, 15 bp, Homo sapiens
agaattaaggttgtc

SEQ ID NO: 651847 - DNA, 15 bp, Homo sapiens
gaattaaggttgtca

SEQ ID NO: 651848 - DNA, 15 bp, Homo sapiens
aattaaggttgtcaa

SEQ ID NO: 651849 - DNA, 15 bp, Homo sapiens
attaaggttgtcaag

SEQ ID NO: 651850 - DNA, 15 bp, Homo sapiens
ttaaggttgtcaagt

SEQ ID NO: 651851 - DNA, 15 bp, Homo sapiens
taaggttgtcaagta

SEQ ID NO: 651852 - DNA, 15 bp, Homo sapiens
aaggttgtcaagtac

SEQ ID NO: 651853 - DNA, 15 bp, Homo sapiens
aggttgtcaagtact

SEQ ID NO: 651854 - DNA, 15 bp, Homo sapiens
ggttgtcaagtactg

SEQ ID NO: 651855 - DNA, 15 bp, Homo sapiens
gttgtcaagtactgt

SEQ ID NO: 651856 - DNA, 15 bp, Homo sapiens
ttgtcaagtactgtg

SEQ ID NO: 651857 - DNA, 15 bp, Homo sapiens
tgtcaagtactgtgg

SEQ ID NO: 651858 - DNA, 15 bp, Homo sapiens
gtcaagtactgtgga

SEQ ID NO: 651859 - DNA, 15 bp, Homo sapiens
tcaagtactgtggac

SEQ ID NO: 651860 - DNA, 15 bp, Homo sapiens
caagtactgtggaca

SEQ ID NO: 651861 - DNA, 15 bp, Homo sapiens
aagtactgtggacaa

SEQ ID NO: 651862 - DNA, 15 bp, Homo sapiens
agtactgtggacaat

SEQ ID NO: 651863 - DNA, 15 bp, Homo sapiens
gtactgtggacaata

SEQ ID NO: 651864 - DNA, 15 bp, Homo sapiens
tactgtggacaatac

SEQ ID NO: 651865 - DNA, 15 bp, Homo sapiens
actgtggacaatact

SEQ ID NO: 651866 - DNA, 15 bp, Homo sapiens
ctgtggacaatactt

SEQ ID NO: 651867 - DNA, 15 bp, Homo sapiens
tgtggacaatacttc

SEQ ID NO: 651868 - DNA, 15 bp, Homo sapiens
gtggacaatacttct

SEQ ID NO: 651869 - DNA, 15 bp, Homo sapiens
tggacaatacttctc

SEQ ID NO: 651870 - DNA, 15 bp, Homo sapiens
ggacaatacttctca

SEQ ID NO: 651871 - DNA, 15 bp, Homo sapiens
gacaatacttctcac

SEQ ID NO: 651872 - DNA, 15 bp, Homo sapiens
acaatacttctcacc

SEQ ID NO: 651873 - DNA, 15 bp, Homo sapiens
caatacttctcacct

SEQ ID NO: 651874 - DNA, 15 bp, Homo sapiens
aatacttctcacctc

SEQ ID NO: 651875 - DNA, 15 bp, Homo sapiens
atacttctcacctca

SEQ ID NO: 651876 - DNA, 15 bp, Homo sapiens
tacttctcacctcat

SEQ ID NO: 651877 - DNA, 15 bp, Homo sapiens
acttctcacctcatg

SEQ ID NO: 651878 - DNA, 15 bp, Homo sapiens
cttctcacctcatgg

SEQ ID NO: 651879 - DNA, 15 bp, Homo sapiens
ttctcacctcatggt

SEQ ID NO: 651880 - DNA, 15 bp, Homo sapiens
tctcacctcatggtt

SEQ ID NO: 651881 - DNA, 15 bp, Homo sapiens
ctcacctcatggtta

SEQ ID NO: 651882 - DNA, 15 bp, Homo sapiens
tcacctcatggttat

SEQ ID NO: 651883 - DNA, 15 bp, Homo sapiens
cacctcatggttatc

SEQ ID NO: 651884 - DNA, 15 bp, Homo sapiens
acctcatggttatct

SEQ ID NO: 651885 - DNA, 15 bp, Homo sapiens
cctcatggttatcta

SEQ ID NO: 651886 - DNA, 15 bp, Homo sapiens
ctcatggttatctag

SEQ ID NO: 651887 - DNA, 15 bp, Homo sapiens
tcatggttatctagt

SEQ ID NO: 651888 - DNA, 15 bp, Homo sapiens
catggttatctagtt

SEQ ID NO: 651889 - DNA, 15 bp, Homo sapiens
atggttatctagtta

SEQ ID NO: 651890 - DNA, 15 bp, Homo sapiens
tggttatctagttat

SEQ ID NO: 651891 - DNA, 15 bp, Homo sapiens
ggttatctagttatt

SEQ ID NO: 651892 - DNA, 15 bp, Homo sapiens
gttatctagttattt

SEQ ID NO: 651893 - DNA, 15 bp, Homo sapiens
ttatctagttattta

SEQ ID NO: 651894 - DNA, 15 bp, Homo sapiens
tatctagttatttaa

SEQ ID NO: 651895 - DNA, 15 bp, Homo sapiens
atctagttatttaat

SEQ ID NO: 651896 - DNA, 15 bp, Homo sapiens
tctagttatttaata

SEQ ID NO: 651897 - DNA, 15 bp, Homo sapiens
ctagttatttaataa

SEQ ID NO: 651898 - DNA, 15 bp, Homo sapiens
tagttatttaataaa

SEQ ID NO: 651899 - DNA, 15 bp, Homo sapiens
agttatttaataaaa

SEQ ID NO: 651900 - DNA, 15 bp, Homo sapiens
gttatttaataaaac

SEQ ID NO: 651901 - DNA, 15 bp, Homo sapiens
ttatttaataaaact

SEQ ID NO: 651902 - DNA, 15 bp, Homo sapiens
tatttaataaaactg

SEQ ID NO: 651903 - DNA, 15 bp, Homo sapiens
atttaataaaactgc

SEQ ID NO: 651904 - DNA, 15 bp, Homo sapiens
tttaataaaactgct

SEQ ID NO: 651905 - DNA, 15 bp, Homo sapiens
ttaataaaactgctt

SEQ ID NO: 651906 - DNA, 15 bp, Homo sapiens
taataaaactgcttt

SEQ ID NO: 651907 - DNA, 15 bp, Homo sapiens
aataaaactgctttt

SEQ ID NO: 651908 - DNA, 15 bp, Homo sapiens
ataaaactgctttta

SEQ ID NO: 651909 - DNA, 15 bp, Homo sapiens
taaaactgcttttat

SEQ ID NO: 651910 - DNA, 15 bp, Homo sapiens
aaaactgcttttatt

SEQ ID NO: 651911 - DNA, 15 bp, Homo sapiens
aaactgcttttattt

SEQ ID NO: 651912 - DNA, 15 bp, Homo sapiens
aactgcttttatttt

SEQ ID NO: 651913 - DNA, 15 bp, Homo sapiens
actgcttttattttt

SEQ ID NO: 651914 - DNA, 15 bp, Homo sapiens
ctgcttttatttttt

SEQ ID NO: 651915 - DNA, 15 bp, Homo sapiens
tgcttttattttttt

SEQ ID NO: 651916 - DNA, 15 bp, Homo sapiens
gcttttatttttttt

SEQ ID NO: 651917 - DNA, 15 bp, Homo sapiens
cttttattttttttt

SEQ ID NO: 651918 - DNA, 15 bp, Homo sapiens
ttttatttttttttg

SEQ ID NO: 651919 - DNA, 15 bp, Homo sapiens
tttatttttttttga

SEQ ID NO: 651920 - DNA, 15 bp, Homo sapiens
ttatttttttttgaa

SEQ ID NO: 651921 - DNA, 15 bp, Homo sapiens
tatttttttttgaac

SEQ ID NO: 651922 - DNA, 15 bp, Homo sapiens
atttttttttgaact

SEQ ID NO: 651923 - DNA, 15 bp, Homo sapiens
tttttttttgaactg

SEQ ID NO: 651924 - DNA, 15 bp, Homo sapiens
ttttttttgaactga

SEQ ID NO: 651925 - DNA, 15 bp, Homo sapiens
tttttttgaactgaa

SEQ ID NO: 651926 - DNA, 15 bp, Homo sapiens
ttttttgaactgaaa

SEQ ID NO: 651927 - DNA, 15 bp, Homo sapiens
tttttgaactgaaaa

SEQ ID NO: 651928 - DNA, 15 bp, Homo sapiens
ttttgaactgaaaaa

SEQ ID NO: 651929 - DNA, 15 bp, Homo sapiens
tttgaactgaaaaaa

SEQ ID NO: 651930 - DNA, 15 bp, Homo sapiens
ttgaactgaaaaaat

SEQ ID NO: 651931 - DNA, 15 bp, Homo sapiens
tgaactgaaaaaata

SEQ ID NO: 651932 - DNA, 15 bp, Homo sapiens
gaactgaaaaaatat

SEQ ID NO: 651933 - DNA, 15 bp, Homo sapiens
aactgaaaaaatata

SEQ ID NO: 651934 - DNA, 15 bp, Homo sapiens
actgaaaaaatatat

SEQ ID NO: 651935 - DNA, 15 bp, Homo sapiens
ctgaaaaaatatata

SEQ ID NO: 651936 - DNA, 15 bp, Homo sapiens
tgaaaaaatatatac

SEQ ID NO: 651937 - DNA, 15 bp, Homo sapiens
gaaaaaatatatact

SEQ ID NO: 651938 - DNA, 15 bp, Homo sapiens
aaaaaatatatacta

SEQ ID NO: 651939 - DNA, 15 bp, Homo sapiens
aaaaatatatactaa

SEQ ID NO: 651940 - DNA, 15 bp, Homo sapiens
aaaatatatactaac

SEQ ID NO: 651941 - DNA, 15 bp, Homo sapiens
aaatatatactaaca

SEQ ID NO: 651942 - DNA, 15 bp, Homo sapiens
aatatatactaacaa

SEQ ID NO: 651943 - DNA, 15 bp, Homo sapiens
atatatactaacaat

SEQ ID NO: 651944 - DNA, 15 bp, Homo sapiens
tatatactaacaatg

SEQ ID NO: 651945 - DNA, 15 bp, Homo sapiens
atatactaacaatga

SEQ ID NO: 651946 - DNA, 15 bp, Homo sapiens
tatactaacaatgac

SEQ ID NO: 651947 - DNA, 15 bp, Homo sapiens
atactaacaatgact

SEQ ID NO: 651948 - DNA, 15 bp, Homo sapiens
tactaacaatgactt

SEQ ID NO: 651949 - DNA, 15 bp, Homo sapiens
actaacaatgactta

SEQ ID NO: 651950 - DNA, 15 bp, Homo sapiens
ctaacaatgacttag

SEQ ID NO: 651951 - DNA, 15 bp, Homo sapiens
taacaatgacttaga

SEQ ID NO: 651952 - DNA, 15 bp, Homo sapiens
aacaatgacttagag

SEQ ID NO: 651953 - DNA, 15 bp, Homo sapiens
acaatgacttagagg

SEQ ID NO: 651954 - DNA, 15 bp, Homo sapiens
caatgacttagaggc

SEQ ID NO: 651955 - DNA, 15 bp, Homo sapiens
aatgacttagaggct

SEQ ID NO: 651956 - DNA, 15 bp, Homo sapiens
atgacttagaggctg

SEQ ID NO: 651957 - DNA, 15 bp, Homo sapiens
tgacttagaggctgc

SEQ ID NO: 651958 - DNA, 15 bp, Homo sapiens
gacttagaggctgct

SEQ ID NO: 651959 - DNA, 15 bp, Homo sapiens
acttagaggctgctg

SEQ ID NO: 651960 - DNA, 15 bp, Homo sapiens
cttagaggctgctgc

SEQ ID NO: 651961 - DNA, 15 bp, Homo sapiens
ttagaggctgctgca

SEQ ID NO: 651962 - DNA, 15 bp, Homo sapiens
tagaggctgctgcat

SEQ ID NO: 651963 - DNA, 15 bp, Homo sapiens
agaggctgctgcatt

SEQ ID NO: 651964 - DNA, 15 bp, Homo sapiens
gaggctgctgcattt

SEQ ID NO: 651965 - DNA, 15 bp, Homo sapiens
aggctgctgcatttt

SEQ ID NO: 651966 - DNA, 15 bp, Homo sapiens
ggctgctgcattttg

SEQ ID NO: 651967 - DNA, 15 bp, Homo sapiens
gctgctgcattttgg

SEQ ID NO: 651968 - DNA, 15 bp, Homo sapiens
ctgctgcattttggt

SEQ ID NO: 651969 - DNA, 15 bp, Homo sapiens
tgctgcattttggtc

SEQ ID NO: 651970 - DNA, 15 bp, Homo sapiens
gctgcattttggtca

SEQ ID NO: 651971 - DNA, 15 bp, Homo sapiens
ctgcattttggtcat

SEQ ID NO: 651972 - DNA, 15 bp, Homo sapiens
tgcattttggtcatc

SEQ ID NO: 651973 - DNA, 15 bp, Homo sapiens
gcattttggtcatcc

SEQ ID NO: 651974 - DNA, 15 bp, Homo sapiens
cattttggtcatccc

SEQ ID NO: 651975 - DNA, 15 bp, Homo sapiens
attttggtcatcccc

SEQ ID NO: 651976 - DNA, 15 bp, Homo sapiens
ttttggtcatcccca

SEQ ID NO: 651977 - DNA, 15 bp, Homo sapiens
tttggtcatccccag

SEQ ID NO: 651978 - DNA, 15 bp, Homo sapiens
ttggtcatccccagg

SEQ ID NO: 651979 - DNA, 15 bp, Homo sapiens
tggtcatccccaggc

SEQ ID NO: 651980 - DNA, 15 bp, Homo sapiens
ggtcatccccaggct

SEQ ID NO: 651981 - DNA, 15 bp, Homo sapiens
gtcatccccaggcta

SEQ ID NO: 651982 - DNA, 15 bp, Homo sapiens
tcatccccaggctac

SEQ ID NO: 651983 - DNA, 15 bp, Homo sapiens
catccccaggctaca

SEQ ID NO: 651984 - DNA, 15 bp, Homo sapiens
atccccaggctacat

SEQ ID NO: 651985 - DNA, 15 bp, Homo sapiens
tccccaggctacatt

SEQ ID NO: 651986 - DNA, 15 bp, Homo sapiens
ccccaggctacattg

SEQ ID NO: 651987 - DNA, 15 bp, Homo sapiens
cccaggctacattga

SEQ ID NO: 651988 - DNA, 15 bp, Homo sapiens
ccaggctacattgat

SEQ ID NO: 651989 - DNA, 15 bp, Homo sapiens
caggctacattgatg

SEQ ID NO: 651990 - DNA, 15 bp, Homo sapiens
aggctacattgatgt

SEQ ID NO: 651991 - DNA, 15 bp, Homo sapiens
ggctacattgatgtc

SEQ ID NO: 651992 - DNA, 15 bp, Homo sapiens
gctacattgatgtct

SEQ ID NO: 651993 - DNA, 15 bp, Homo sapiens
ctacattgatgtctg

SEQ ID NO: 651994 - DNA, 15 bp, Homo sapiens
tacattgatgtctgt

SEQ ID NO: 651995 - DNA, 15 bp, Homo sapiens
acattgatgtctgtt

SEQ ID NO: 651996 - DNA, 15 bp, Homo sapiens
cattgatgtctgttt

SEQ ID NO: 651997 - DNA, 15 bp, Homo sapiens
attgatgtctgtttt

SEQ ID NO: 651998 - DNA, 15 bp, Homo sapiens
ttgatgtctgttttg

SEQ ID NO: 651999 - DNA, 15 bp, Homo sapiens
tgatgtctgttttgt

SEQ ID NO: 652000 - DNA, 15 bp, Homo sapiens
gatgtctgttttgtg

SEQ ID NO: 652001 - DNA, 15 bp, Homo sapiens
atgtctgttttgtgt

SEQ ID NO: 652002 - DNA, 15 bp, Homo sapiens
tgtctgttttgtgtc

SEQ ID NO: 652003 - DNA, 15 bp, Homo sapiens
gtctgttttgtgtct

SEQ ID NO: 652004 - DNA, 15 bp, Homo sapiens
tctgttttgtgtctg

SEQ ID NO: 652005 - DNA, 15 bp, Homo sapiens
ctgttttgtgtctga

SEQ ID NO: 652006 - DNA, 15 bp, Homo sapiens
tgttttgtgtctgag

SEQ ID NO: 652007 - DNA, 15 bp, Homo sapiens
gttttgtgtctgagc

SEQ ID NO: 652008 - DNA, 15 bp, Homo sapiens
ttttgtgtctgagcc

SEQ ID NO: 652009 - DNA, 15 bp, Homo sapiens
tttgtgtctgagcca

SEQ ID NO: 652010 - DNA, 15 bp, Homo sapiens
ttgtgtctgagccaa

SEQ ID NO: 652011 - DNA, 15 bp, Homo sapiens
tgtgtctgagccaat

SEQ ID NO: 652012 - DNA, 15 bp, Homo sapiens
gtgtctgagccaatt

SEQ ID NO: 652013 - DNA, 15 bp, Homo sapiens
tgtctgagccaatta

SEQ ID NO: 652014 - DNA, 15 bp, Homo sapiens
gtctgagccaattat

SEQ ID NO: 652015 - DNA, 15 bp, Homo sapiens
tctgagccaattatt

SEQ ID NO: 652016 - DNA, 15 bp, Homo sapiens
ctgagccaattattc

SEQ ID NO: 652017 - DNA, 15 bp, Homo sapiens
tgagccaattattcc

SEQ ID NO: 652018 - DNA, 15 bp, Homo sapiens
gagccaattattcct

SEQ ID NO: 652019 - DNA, 15 bp, Homo sapiens
agccaattattccta

SEQ ID NO: 652020 - DNA, 15 bp, Homo sapiens
gccaattattcctac

SEQ ID NO: 652021 - DNA, 15 bp, Homo sapiens
ccaattattcctaca

SEQ ID NO: 652022 - DNA, 15 bp, Homo sapiens
caattattcctacag

SEQ ID NO: 652023 - DNA, 15 bp, Homo sapiens
aattattcctacagg

SEQ ID NO: 652024 - DNA, 15 bp, Homo sapiens
attattcctacaggc

SEQ ID NO: 652025 - DNA, 15 bp, Homo sapiens
ttattcctacaggca

SEQ ID NO: 652026 - DNA, 15 bp, Homo sapiens
tattcctacaggcat

SEQ ID NO: 652027 - DNA, 15 bp, Homo sapiens
attcctacaggcatc

SEQ ID NO: 652028 - DNA, 15 bp, Homo sapiens
ttcctacaggcatca

SEQ ID NO: 652029 - DNA, 15 bp, Homo sapiens
tcctacaggcatcaa

SEQ ID NO: 652030 - DNA, 15 bp, Homo sapiens
cctacaggcatcaat

SEQ ID NO: 652031 - DNA, 15 bp, Homo sapiens
ctacaggcatcaatt

SEQ ID NO: 652032 - DNA, 15 bp, Homo sapiens
tacaggcatcaattg

SEQ ID NO: 652033 - DNA, 15 bp, Homo sapiens
acaggcatcaattgt

SEQ ID NO: 652034 - DNA, 15 bp, Homo sapiens
caggcatcaattgtt

SEQ ID NO: 652035 - DNA, 15 bp, Homo sapiens
aggcatcaattgttg

SEQ ID NO: 652036 - DNA, 15 bp, Homo sapiens
ggcatcaattgttgt

SEQ ID NO: 652037 - DNA, 15 bp, Homo sapiens
gcatcaattgttgtc

SEQ ID NO: 652038 - DNA, 15 bp, Homo sapiens
catcaattgttgtca

SEQ ID NO: 652039 - DNA, 15 bp, Homo sapiens
atcaattgttgtcaa

SEQ ID NO: 652040 - DNA, 15 bp, Homo sapiens
tcaattgttgtcaac

SEQ ID NO: 652041 - DNA, 15 bp, Homo sapiens
caattgttgtcaaca

SEQ ID NO: 652042 - DNA, 15 bp, Homo sapiens
aattgttgtcaacaa

SEQ ID NO: 652043 - DNA, 15 bp, Homo sapiens
attgttgtcaacaaa

SEQ ID NO: 652044 - DNA, 15 bp, Homo sapiens
ttgttgtcaacaaat

SEQ ID NO: 652045 - DNA, 15 bp, Homo sapiens
tgttgtcaacaaatt

SEQ ID NO: 652046 - DNA, 15 bp, Homo sapiens
gttgtcaacaaattt

SEQ ID NO: 652047 - DNA, 15 bp, Homo sapiens
ttgtcaacaaatttc

SEQ ID NO: 652048 - DNA, 15 bp, Homo sapiens
tgtcaacaaatttca

SEQ ID NO: 652049 - DNA, 15 bp, Homo sapiens
gtcaacaaatttcat

SEQ ID NO: 652050 - DNA, 15 bp, Homo sapiens
tcaacaaatttcatt

SEQ ID NO: 652051 - DNA, 15 bp, Homo sapiens
caacaaatttcattc

SEQ ID NO: 652052 - DNA, 15 bp, Homo sapiens
aacaaatttcattca

SEQ ID NO: 652053 - DNA, 15 bp, Homo sapiens
acaaatttcattcag

SEQ ID NO: 652054 - DNA, 15 bp, Homo sapiens
caaatttcattcagt

SEQ ID NO: 652055 - DNA, 15 bp, Homo sapiens
aaatttcattcagtt

SEQ ID NO: 652056 - DNA, 15 bp, Homo sapiens
aatttcattcagttt

SEQ ID NO: 652057 - DNA, 15 bp, Homo sapiens
atttcattcagtttc

SEQ ID NO: 652058 - DNA, 15 bp, Homo sapiens
tttcattcagtttcc

SEQ ID NO: 652059 - DNA, 15 bp, Homo sapiens
ttcattcagtttcct

SEQ ID NO: 652060 - DNA, 15 bp, Homo sapiens
tcattcagtttcctt

SEQ ID NO: 652061 - DNA, 15 bp, Homo sapiens
cattcagtttccttt

SEQ ID NO: 652062 - DNA, 15 bp, Homo sapiens
attcagtttcctttt

SEQ ID NO: 652063 - DNA, 15 bp, Homo sapiens
ttcagtttccttttc

SEQ ID NO: 652064 - DNA, 15 bp, Homo sapiens
tcagtttccttttca

SEQ ID NO: 652065 - DNA, 15 bp, Homo sapiens
cagtttccttttcat

SEQ ID NO: 652066 - DNA, 15 bp, Homo sapiens
agtttccttttcatc

SEQ ID NO: 652067 - DNA, 15 bp, Homo sapiens
gtttccttttcatcc

SEQ ID NO: 652068 - DNA, 15 bp, Homo sapiens
tttccttttcatccg

SEQ ID NO: 652069 - DNA, 15 bp, Homo sapiens
ttccttttcatccgc

SEQ ID NO: 652070 - DNA, 15 bp, Homo sapiens
tccttttcatccgct

SEQ ID NO: 652071 - DNA, 15 bp, Homo sapiens
ccttttcatccgctg

SEQ ID NO: 652072 - DNA, 15 bp, Homo sapiens
cttttcatccgctga

SEQ ID NO: 652073 - DNA, 15 bp, Homo sapiens
ttttcatccgctgag

SEQ ID NO: 652074 - DNA, 15 bp, Homo sapiens
tttcatccgctgaga

SEQ ID NO: 652075 - DNA, 15 bp, Homo sapiens
ttcatccgctgagat

SEQ ID NO: 652076 - DNA, 15 bp, Homo sapiens
tcatccgctgagatt

SEQ ID NO: 652077 - DNA, 15 bp, Homo sapiens
catccgctgagattt

SEQ ID NO: 652078 - DNA, 15 bp, Homo sapiens
atccgctgagattta

SEQ ID NO: 652079 - DNA, 15 bp, Homo sapiens
tccgctgagatttac

SEQ ID NO: 652080 - DNA, 15 bp, Homo sapiens
ccgctgagatttact

SEQ ID NO: 652081 - DNA, 15 bp, Homo sapiens
cgctgagatttactg

SEQ ID NO: 652082 - DNA, 15 bp, Homo sapiens
gctgagatttactgt

SEQ ID NO: 652083 - DNA, 15 bp, Homo sapiens
ctgagatttactgtg

SEQ ID NO: 652084 - DNA, 15 bp, Homo sapiens
tgagatttactgtgt

SEQ ID NO: 652085 - DNA, 15 bp, Homo sapiens
gagatttactgtgtg

SEQ ID NO: 652086 - DNA, 15 bp, Homo sapiens
agatttactgtgtgt

SEQ ID NO: 652087 - DNA, 15 bp, Homo sapiens
gatttactgtgtgtg

SEQ ID NO: 652088 - DNA, 15 bp, Homo sapiens
atttactgtgtgtgg

SEQ ID NO: 652089 - DNA, 15 bp, Homo sapiens
tttactgtgtgtgga

SEQ ID NO: 652090 - DNA, 15 bp, Homo sapiens
ttactgtgtgtggag

SEQ ID NO: 652091 - DNA, 15 bp, Homo sapiens
tactgtgtgtggaga

SEQ ID NO: 652092 - DNA, 15 bp, Homo sapiens
actgtgtgtggagaa

SEQ ID NO: 652093 - DNA, 15 bp, Homo sapiens
ctgtgtgtggagaag

SEQ ID NO: 652094 - DNA, 15 bp, Homo sapiens
tgtgtgtggagaagt

SEQ ID NO: 652095 - DNA, 15 bp, Homo sapiens
gtgtgtggagaagtc

SEQ ID NO: 652096 - DNA, 15 bp, Homo sapiens
tgtgtggagaagtca

SEQ ID NO: 652097 - DNA, 15 bp, Homo sapiens
gtgtggagaagtcag

SEQ ID NO: 652098 - DNA, 15 bp, Homo sapiens
tgtggagaagtcagc

SEQ ID NO: 652099 - DNA, 15 bp, Homo sapiens
gtggagaagtcagct

SEQ ID NO: 652100 - DNA, 15 bp, Homo sapiens
tggagaagtcagctc

SEQ ID NO: 652101 - DNA, 15 bp, Homo sapiens
ggagaagtcagctct

SEQ ID NO: 652102 - DNA, 15 bp, Homo sapiens
gagaagtcagctcta

SEQ ID NO: 652103 - DNA, 15 bp, Homo sapiens
agaagtcagctctaa

SEQ ID NO: 652104 - DNA, 15 bp, Homo sapiens
gaagtcagctctaag

SEQ ID NO: 652105 - DNA, 15 bp, Homo sapiens
aagtcagctctaagc

SEQ ID NO: 652106 - DNA, 15 bp, Homo sapiens
agtcagctctaagca

SEQ ID NO: 652107 - DNA, 15 bp, Homo sapiens
gtcagctctaagcac

SEQ ID NO: 652108 - DNA, 15 bp, Homo sapiens
tcagctctaagcaca

SEQ ID NO: 652109 - DNA, 15 bp, Homo sapiens
cagctctaagcacat

SEQ ID NO: 652110 - DNA, 15 bp, Homo sapiens
agctctaagcacata

SEQ ID NO: 652111 - DNA, 15 bp, Homo sapiens
gctctaagcacatag

SEQ ID NO: 652112 - DNA, 15 bp, Homo sapiens
ctctaagcacatagt

SEQ ID NO: 652113 - DNA, 15 bp, Homo sapiens
tctaagcacatagtc

SEQ ID NO: 652114 - DNA, 15 bp, Homo sapiens
ctaagcacatagtct

SEQ ID NO: 652115 - DNA, 15 bp, Homo sapiens
taagcacatagtctt

SEQ ID NO: 652116 - DNA, 15 bp, Homo sapiens
aagcacatagtcttt

SEQ ID NO: 652117 - DNA, 15 bp, Homo sapiens
agcacatagtctttg

SEQ ID NO: 652118 - DNA, 15 bp, Homo sapiens
gcacatagtctttga

SEQ ID NO: 652119 - DNA, 15 bp, Homo sapiens
cacatagtctttgaa

SEQ ID NO: 652120 - DNA, 15 bp, Homo sapiens
acatagtctttgaaa

SEQ ID NO: 652121 - DNA, 15 bp, Homo sapiens
catagtctttgaaat

SEQ ID NO: 652122 - DNA, 15 bp, Homo sapiens
atagtctttgaaata

SEQ ID NO: 652123 - DNA, 15 bp, Homo sapiens
tagtctttgaaatac

SEQ ID NO: 652124 - DNA, 15 bp, Homo sapiens
agtctttgaaatact

SEQ ID NO: 652125 - DNA, 15 bp, Homo sapiens
gtctttgaaatactt

SEQ ID NO: 652126 - DNA, 15 bp, Homo sapiens
tctttgaaatacttt

SEQ ID NO: 652127 - DNA, 15 bp, Homo sapiens
ctttgaaatactttt

SEQ ID NO: 652128 - DNA, 15 bp, Homo sapiens
tttgaaatacttttt

SEQ ID NO: 652129 - DNA, 15 bp, Homo sapiens
ttgaaatacttttta

SEQ ID NO: 652130 - DNA, 15 bp, Homo sapiens
tgaaatactttttag

SEQ ID NO: 652131 - DNA, 15 bp, Homo sapiens
gaaatactttttaga

SEQ ID NO: 652132 - DNA, 15 bp, Homo sapiens
aaatactttttagag

SEQ ID NO: 652133 - DNA, 15 bp, Homo sapiens
aatactttttagagg

SEQ ID NO: 652134 - DNA, 15 bp, Homo sapiens
atactttttagaggg

SEQ ID NO: 652135 - DNA, 15 bp, Homo sapiens
tactttttagaggga

SEQ ID NO: 652136 - DNA, 15 bp, Homo sapiens
actttttagagggaa

SEQ ID NO: 652137 - DNA, 15 bp, Homo sapiens
ctttttagagggaag

SEQ ID NO: 652138 - DNA, 15 bp, Homo sapiens
tttttagagggaagc

SEQ ID NO: 652139 - DNA, 15 bp, Homo sapiens
ttttagagggaagca

SEQ ID NO: 652140 - DNA, 15 bp, Homo sapiens
tttagagggaagcat

SEQ ID NO: 652141 - DNA, 15 bp, Homo sapiens
ttagagggaagcatt

SEQ ID NO: 652142 - DNA, 15 bp, Homo sapiens
tagagggaagcattc

SEQ ID NO: 652143 - DNA, 15 bp, Homo sapiens
agagggaagcattct

SEQ ID NO: 652144 - DNA, 15 bp, Homo sapiens
gagggaagcattctt

SEQ ID NO: 652145 - DNA, 15 bp, Homo sapiens
agggaagcattcttc

SEQ ID NO: 652146 - DNA, 15 bp, Homo sapiens
gggaagcattcttcc

SEQ ID NO: 652147 - DNA, 15 bp, Homo sapiens
ggaagcattcttccc

SEQ ID NO: 652148 - DNA, 15 bp, Homo sapiens
gaagcattcttcccc

SEQ ID NO: 652149 - DNA, 15 bp, Homo sapiens
aagcattcttcccca

SEQ ID NO: 652150 - DNA, 15 bp, Homo sapiens
agcattcttccccac

SEQ ID NO: 652151 - DNA, 15 bp, Homo sapiens
gcattcttccccacc

SEQ ID NO: 652152 - DNA, 15 bp, Homo sapiens
cattcttccccacct

SEQ ID NO: 652153 - DNA, 15 bp, Homo sapiens
attcttccccacctc

SEQ ID NO: 652154 - DNA, 15 bp, Homo sapiens
ttcttccccacctct

SEQ ID NO: 652155 - DNA, 15 bp, Homo sapiens
tcttccccacctcta

SEQ ID NO: 652156 - DNA, 15 bp, Homo sapiens
cttccccacctctat

SEQ ID NO: 652157 - DNA, 15 bp, Homo sapiens
ttccccacctctata

SEQ ID NO: 652158 - DNA, 15 bp, Homo sapiens
tccccacctctatac

SEQ ID NO: 652159 - DNA, 15 bp, Homo sapiens
ccccacctctataca

SEQ ID NO: 652160 - DNA, 15 bp, Homo sapiens
cccacctctatacac

SEQ ID NO: 652161 - DNA, 15 bp, Homo sapiens
ccacctctatacact

SEQ ID NO: 652162 - DNA, 15 bp, Homo sapiens
cacctctatacactg

SEQ ID NO: 652163 - DNA, 15 bp, Homo sapiens
acctctatacactgt

SEQ ID NO: 652164 - DNA, 15 bp, Homo sapiens
cctctatacactgtc

SEQ ID NO: 652165 - DNA, 15 bp, Homo sapiens
ctctatacactgtca

SEQ ID NO: 652166 - DNA, 15 bp, Homo sapiens
tctatacactgtcag

SEQ ID NO: 652167 - DNA, 15 bp, Homo sapiens
ctatacactgtcagt

SEQ ID NO: 652168 - DNA, 15 bp, Homo sapiens
tatacactgtcagtt

SEQ ID NO: 652169 - DNA, 15 bp, Homo sapiens
atacactgtcagttg

SEQ ID NO: 652170 - DNA, 15 bp, Homo sapiens
tacactgtcagttga

SEQ ID NO: 652171 - DNA, 15 bp, Homo sapiens
acactgtcagttgac

SEQ ID NO: 652172 - DNA, 15 bp, Homo sapiens
cactgtcagttgact

SEQ ID NO: 652173 - DNA, 15 bp, Homo sapiens
actgtcagttgactc

SEQ ID NO: 652174 - DNA, 15 bp, Homo sapiens
ctgtcagttgactcc

SEQ ID NO: 652175 - DNA, 15 bp, Homo sapiens
tgtcagttgactcct

SEQ ID NO: 652176 - DNA, 15 bp, Homo sapiens
gtcagttgactccta

SEQ ID NO: 652177 - DNA, 15 bp, Homo sapiens
tcagttgactcctat

SEQ ID NO: 652178 - DNA, 15 bp, Homo sapiens
cagttgactcctatt

SEQ ID NO: 652179 - DNA, 15 bp, Homo sapiens
agttgactcctatta

SEQ ID NO: 652180 - DNA, 15 bp, Homo sapiens
gttgactcctattat

SEQ ID NO: 652181 - DNA, 15 bp, Homo sapiens
ttgactcctattatt

SEQ ID NO: 652182 - DNA, 15 bp, Homo sapiens
tgactcctattattc

SEQ ID NO: 652183 - DNA, 15 bp, Homo sapiens
gactcctattattct

SEQ ID NO: 652184 - DNA, 15 bp, Homo sapiens
actcctattattctc

SEQ ID NO: 652185 - DNA, 15 bp, Homo sapiens
ctcctattattctct

SEQ ID NO: 652186 - DNA, 15 bp, Homo sapiens
tcctattattctctt

SEQ ID NO: 652187 - DNA, 15 bp, Homo sapiens
cctattattctcttt

SEQ ID NO: 652188 - DNA, 15 bp, Homo sapiens
ctattattctcttta

SEQ ID NO: 652189 - DNA, 15 bp, Homo sapiens
tattattctctttac

SEQ ID NO: 652190 - DNA, 15 bp, Homo sapiens
attattctctttaca

SEQ ID NO: 652191 - DNA, 15 bp, Homo sapiens
ttattctctttacac

SEQ ID NO: 652192 - DNA, 15 bp, Homo sapiens
tattctctttacact

SEQ ID NO: 652193 - DNA, 15 bp, Homo sapiens
attctctttacactt

SEQ ID NO: 652194 - DNA, 15 bp, Homo sapiens
ttctctttacactta

SEQ ID NO: 652195 - DNA, 15 bp, Homo sapiens
tctctttacacttat

SEQ ID NO: 652196 - DNA, 15 bp, Homo sapiens
ctctttacacttatt

SEQ ID NO: 652197 - DNA, 15 bp, Homo sapiens
tctttacacttattt

SEQ ID NO: 652198 - DNA, 15 bp, Homo sapiens
ctttacacttatttt

SEQ ID NO: 652199 - DNA, 15 bp, Homo sapiens
tttacacttattttc

SEQ ID NO: 652200 - DNA, 15 bp, Homo sapiens
ttacacttattttca

SEQ ID NO: 652201 - DNA, 15 bp, Homo sapiens
tacacttattttcaa

SEQ ID NO: 652202 - DNA, 15 bp, Homo sapiens
acacttattttcaaa

SEQ ID NO: 652203 - DNA, 15 bp, Homo sapiens
cacttattttcaaag

SEQ ID NO: 652204 - DNA, 15 bp, Homo sapiens
acttattttcaaagt

SEQ ID NO: 652205 - DNA, 15 bp, Homo sapiens
cttattttcaaagtt

SEQ ID NO: 652206 - DNA, 15 bp, Homo sapiens
ttattttcaaagttt

SEQ ID NO: 652207 - DNA, 15 bp, Homo sapiens
tattttcaaagtttt

SEQ ID NO: 652208 - DNA, 15 bp, Homo sapiens
attttcaaagtttta

SEQ ID NO: 652209 - DNA, 15 bp, Homo sapiens
ttttcaaagttttat

SEQ ID NO: 652210 - DNA, 15 bp, Homo sapiens
tttcaaagttttatt

SEQ ID NO: 652211 - DNA, 15 bp, Homo sapiens
ttcaaagttttattg

SEQ ID NO: 652212 - DNA, 15 bp, Homo sapiens
tcaaagttttattgt

SEQ ID NO: 652213 - DNA, 15 bp, Homo sapiens
caaagttttattgtg

SEQ ID NO: 652214 - DNA, 15 bp, Homo sapiens
aaagttttattgtgg

SEQ ID NO: 652215 - DNA, 15 bp, Homo sapiens
aagttttattgtggc

SEQ ID NO: 652216 - DNA, 15 bp, Homo sapiens
agttttattgtggct

SEQ ID NO: 652217 - DNA, 15 bp, Homo sapiens
gttttattgtggctg

SEQ ID NO: 652218 - DNA, 15 bp, Homo sapiens
ttttattgtggctgt

SEQ ID NO: 652219 - DNA, 15 bp, Homo sapiens
tttattgtggctgtg

SEQ ID NO: 652220 - DNA, 15 bp, Homo sapiens
ttattgtggctgtga

SEQ ID NO: 652221 - DNA, 15 bp, Homo sapiens
tattgtggctgtgac

SEQ ID NO: 652222 - DNA, 15 bp, Homo sapiens
attgtggctgtgact

SEQ ID NO: 652223 - DNA, 15 bp, Homo sapiens
ttgtggctgtgactt

SEQ ID NO: 652224 - DNA, 15 bp, Homo sapiens
tgtggctgtgacttt

SEQ ID NO: 652225 - DNA, 15 bp, Homo sapiens
gtggctgtgactttt

SEQ ID NO: 652226 - DNA, 15 bp, Homo sapiens
tggctgtgactttta

SEQ ID NO: 652227 - DNA, 15 bp, Homo sapiens
ggctgtgacttttat

SEQ ID NO: 652228 - DNA, 15 bp, Homo sapiens
gctgtgacttttatt

SEQ ID NO: 652229 - DNA, 15 bp, Homo sapiens
ctgtgacttttattt

SEQ ID NO: 652230 - DNA, 15 bp, Homo sapiens
tgtgacttttatttt

SEQ ID NO: 652231 - DNA, 15 bp, Homo sapiens
gtgacttttatttta

SEQ ID NO: 652232 - DNA, 15 bp, Homo sapiens
tgacttttattttaa

SEQ ID NO: 652233 - DNA, 15 bp, Homo sapiens
gacttttattttaaa

SEQ ID NO: 652234 - DNA, 15 bp, Homo sapiens
acttttattttaaac

SEQ ID NO: 652235 - DNA, 15 bp, Homo sapiens
cttttattttaaact

SEQ ID NO: 652236 - DNA, 15 bp, Homo sapiens
ttttattttaaactg

SEQ ID NO: 652237 - DNA, 15 bp, Homo sapiens
tttattttaaactgc

SEQ ID NO: 652238 - DNA, 15 bp, Homo sapiens
ttattttaaactgct

SEQ ID NO: 652239 - DNA, 15 bp, Homo sapiens
tattttaaactgctt

SEQ ID NO: 652240 - DNA, 15 bp, Homo sapiens
attttaaactgcttc

SEQ ID NO: 652241 - DNA, 15 bp, Homo sapiens
ttttaaactgcttca

SEQ ID NO: 652242 - DNA, 15 bp, Homo sapiens
tttaaactgcttcaa

SEQ ID NO: 652243 - DNA, 15 bp, Homo sapiens
ttaaactgcttcaaa

SEQ ID NO: 652244 - DNA, 15 bp, Homo sapiens
taaactgcttcaaat

SEQ ID NO: 652245 - DNA, 15 bp, Homo sapiens
aaactgcttcaaatc

SEQ ID NO: 652246 - DNA, 15 bp, Homo sapiens
aactgcttcaaatcc

SEQ ID NO: 652247 - DNA, 15 bp, Homo sapiens
actgcttcaaatcca

SEQ ID NO: 652248 - DNA, 15 bp, Homo sapiens
ctgcttcaaatccat

SEQ ID NO: 652249 - DNA, 15 bp, Homo sapiens
tgcttcaaatccatt

SEQ ID NO: 652250 - DNA, 15 bp, Homo sapiens
gcttcaaatccattt

SEQ ID NO: 652251 - DNA, 15 bp, Homo sapiens
cttcaaatccatttt

SEQ ID NO: 652252 - DNA, 15 bp, Homo sapiens
ttcaaatccattttg

SEQ ID NO: 652253 - DNA, 15 bp, Homo sapiens
tcaaatccattttgg

SEQ ID NO: 652254 - DNA, 15 bp, Homo sapiens
caaatccattttgga

SEQ ID NO: 652255 - DNA, 15 bp, Homo sapiens
aaatccattttggaa

SEQ ID NO: 652256 - DNA, 15 bp, Homo sapiens
aatccattttggaag

SEQ ID NO: 652257 - DNA, 15 bp, Homo sapiens
atccattttggaagt

SEQ ID NO: 652258 - DNA, 15 bp, Homo sapiens
tccattttggaagta

SEQ ID NO: 652259 - DNA, 15 bp, Homo sapiens
ccattttggaagtac

SEQ ID NO: 652260 - DNA, 15 bp, Homo sapiens
cattttggaagtaca

SEQ ID NO: 652261 - DNA, 15 bp, Homo sapiens
attttggaagtacaa

SEQ ID NO: 652262 - DNA, 15 bp, Homo sapiens
ttttggaagtacaat

SEQ ID NO: 652263 - DNA, 15 bp, Homo sapiens
tttggaagtacaatt

SEQ ID NO: 652264 - DNA, 15 bp, Homo sapiens
ttggaagtacaattt

SEQ ID NO: 652265 - DNA, 15 bp, Homo sapiens
tggaagtacaatttt

SEQ ID NO: 652266 - DNA, 15 bp, Homo sapiens
ggaagtacaattttt

SEQ ID NO: 652267 - DNA, 15 bp, Homo sapiens
gaagtacaatttttt

SEQ ID NO: 652268 - DNA, 15 bp, Homo sapiens
aagtacaattttttt

SEQ ID NO: 652269 - DNA, 15 bp, Homo sapiens
agtacaattttttta

SEQ ID NO: 652270 - DNA, 15 bp, Homo sapiens
gtacaatttttttag

SEQ ID NO: 652271 - DNA, 15 bp, Homo sapiens
tacaatttttttagt

SEQ ID NO: 652272 - DNA, 15 bp, Homo sapiens
acaatttttttagta

SEQ ID NO: 652273 - DNA, 15 bp, Homo sapiens
caatttttttagtag

SEQ ID NO: 652274 - DNA, 15 bp, Homo sapiens
aatttttttagtagt

SEQ ID NO: 652275 - DNA, 15 bp, Homo sapiens
atttttttagtagta

SEQ ID NO: 652276 - DNA, 15 bp, Homo sapiens
tttttttagtagtag

SEQ ID NO: 652277 - DNA, 15 bp, Homo sapiens
ttttttagtagtaga

SEQ ID NO: 652278 - DNA, 15 bp, Homo sapiens
tttttagtagtagaa

SEQ ID NO: 652279 - DNA, 15 bp, Homo sapiens
ttttagtagtagaag

SEQ ID NO: 652280 - DNA, 15 bp, Homo sapiens
tttagtagtagaagg

SEQ ID NO: 652281 - DNA, 15 bp, Homo sapiens
ttagtagtagaaggc

SEQ ID NO: 652282 - DNA, 15 bp, Homo sapiens
tagtagtagaaggca

SEQ ID NO: 652283 - DNA, 15 bp, Homo sapiens
agtagtagaaggcag

SEQ ID NO: 652284 - DNA, 15 bp, Homo sapiens
gtagtagaaggcagt

SEQ ID NO: 652285 - DNA, 15 bp, Homo sapiens
tagtagaaggcagtt

SEQ ID NO: 652286 - DNA, 15 bp, Homo sapiens
agtagaaggcagttt

SEQ ID NO: 652287 - DNA, 15 bp, Homo sapiens
gtagaaggcagtttc

SEQ ID NO: 652288 - DNA, 15 bp, Homo sapiens
tagaaggcagtttct

SEQ ID NO: 652289 - DNA, 15 bp, Homo sapiens
agaaggcagtttctg

SEQ ID NO: 652290 - DNA, 15 bp, Homo sapiens
gaaggcagtttctga

SEQ ID NO: 652291 - DNA, 15 bp, Homo sapiens
aaggcagtttctgat

SEQ ID NO: 652292 - DNA, 15 bp, Homo sapiens
aggcagtttctgatt

SEQ ID NO: 652293 - DNA, 15 bp, Homo sapiens
ggcagtttctgattt

SEQ ID NO: 652294 - DNA, 15 bp, Homo sapiens
gcagtttctgatttt

SEQ ID NO: 652295 - DNA, 15 bp, Homo sapiens
cagtttctgatttta

SEQ ID NO: 652296 - DNA, 15 bp, Homo sapiens
agtttctgattttag

SEQ ID NO: 652297 - DNA, 15 bp, Homo sapiens
gtttctgattttagt

SEQ ID NO: 652298 - DNA, 15 bp, Homo sapiens
tttctgattttagtt

SEQ ID NO: 652299 - DNA, 15 bp, Homo sapiens
ttctgattttagttt

SEQ ID NO: 652300 - DNA, 15 bp, Homo sapiens
tctgattttagtttg

SEQ ID NO: 652301 - DNA, 15 bp, Homo sapiens
ctgattttagtttga

SEQ ID NO: 652302 - DNA, 15 bp, Homo sapiens
tgattttagtttgaa

SEQ ID NO: 652303 - DNA, 15 bp, Homo sapiens
gattttagtttgaaa

SEQ ID NO: 652304 - DNA, 15 bp, Homo sapiens
attttagtttgaaat

SEQ ID NO: 652305 - DNA, 15 bp, Homo sapiens
ttttagtttgaaatt

SEQ ID NO: 652306 - DNA, 15 bp, Homo sapiens
tttagtttgaaattc

SEQ ID NO: 652307 - DNA, 15 bp, Homo sapiens
ttagtttgaaattca

SEQ ID NO: 652308 - DNA, 15 bp, Homo sapiens
tagtttgaaattcaa

SEQ ID NO: 652309 - DNA, 15 bp, Homo sapiens
agtttgaaattcaaa

SEQ ID NO: 652310 - DNA, 15 bp, Homo sapiens
gtttgaaattcaaac

SEQ ID NO: 652311 - DNA, 15 bp, Homo sapiens
tttgaaattcaaaca

SEQ ID NO: 652312 - DNA, 15 bp, Homo sapiens
ttgaaattcaaacat

SEQ ID NO: 652313 - DNA, 15 bp, Homo sapiens
tgaaattcaaacatc

SEQ ID NO: 652314 - DNA, 15 bp, Homo sapiens
gaaattcaaacatct

SEQ ID NO: 652315 - DNA, 15 bp, Homo sapiens
aaattcaaacatcta

SEQ ID NO: 652316 - DNA, 15 bp, Homo sapiens
aattcaaacatctaa

SEQ ID NO: 652317 - DNA, 15 bp, Homo sapiens
attcaaacatctaaa

SEQ ID NO: 652318 - DNA, 15 bp, Homo sapiens
ttcaaacatctaaaa

SEQ ID NO: 652319 - DNA, 15 bp, Homo sapiens
tcaaacatctaaaag

SEQ ID NO: 652320 - DNA, 15 bp, Homo sapiens
caaacatctaaaaga

SEQ ID NO: 652321 - DNA, 15 bp, Homo sapiens
aaacatctaaaagaa

SEQ ID NO: 652322 - DNA, 15 bp, Homo sapiens
aacatctaaaagaaa

SEQ ID NO: 652323 - DNA, 15 bp, Homo sapiens
acatctaaaagaaaa

SEQ ID NO: 652324 - DNA, 15 bp, Homo sapiens
catctaaaagaaaat

SEQ ID NO: 652325 - DNA, 15 bp, Homo sapiens
atctaaaagaaaatt

SEQ ID NO: 652326 - DNA, 15 bp, Homo sapiens
tctaaaagaaaattg

SEQ ID NO: 652327 - DNA, 15 bp, Homo sapiens
ctaaaagaaaattgc

SEQ ID NO: 652328 - DNA, 15 bp, Homo sapiens
taaaagaaaattgcc

SEQ ID NO: 652329 - DNA, 15 bp, Homo sapiens
aaaagaaaattgcct

SEQ ID NO: 652330 - DNA, 15 bp, Homo sapiens
aaagaaaattgcctc

SEQ ID NO: 652331 - DNA, 15 bp, Homo sapiens
aagaaaattgcctcc

SEQ ID NO: 652332 - DNA, 15 bp, Homo sapiens
agaaaattgcctcca

SEQ ID NO: 652333 - DNA, 15 bp, Homo sapiens
gaaaattgcctccat

SEQ ID NO: 652334 - DNA, 15 bp, Homo sapiens
aaaattgcctccata

SEQ ID NO: 652335 - DNA, 15 bp, Homo sapiens
aaattgcctccatat

SEQ ID NO: 652336 - DNA, 15 bp, Homo sapiens
aattgcctccatatc

SEQ ID NO: 652337 - DNA, 15 bp, Homo sapiens
attgcctccatatct

SEQ ID NO: 652338 - DNA, 15 bp, Homo sapiens
ttgcctccatatcta

SEQ ID NO: 652339 - DNA, 15 bp, Homo sapiens
tgcctccatatctat

SEQ ID NO: 652340 - DNA, 15 bp, Homo sapiens
gcctccatatctatc

SEQ ID NO: 652341 - DNA, 15 bp, Homo sapiens
cctccatatctatca

SEQ ID NO: 652342 - DNA, 15 bp, Homo sapiens
ctccatatctatcat

SEQ ID NO: 652343 - DNA, 15 bp, Homo sapiens
tccatatctatcatt

SEQ ID NO: 652344 - DNA, 15 bp, Homo sapiens
ccatatctatcattt

SEQ ID NO: 652345 - DNA, 15 bp, Homo sapiens
catatctatcatttt

SEQ ID NO: 652346 - DNA, 15 bp, Homo sapiens
atatctatcattttt

SEQ ID NO: 652347 - DNA, 15 bp, Homo sapiens
tatctatcatttttg

SEQ ID NO: 652348 - DNA, 15 bp, Homo sapiens
atctatcatttttgt

SEQ ID NO: 652349 - DNA, 15 bp, Homo sapiens
tctatcatttttgtc

SEQ ID NO: 652350 - DNA, 15 bp, Homo sapiens
ctatcatttttgtca

SEQ ID NO: 652351 - DNA, 15 bp, Homo sapiens
tatcatttttgtcaa

SEQ ID NO: 652352 - DNA, 15 bp, Homo sapiens
atcatttttgtcaat

SEQ ID NO: 652353 - DNA, 15 bp, Homo sapiens
tcatttttgtcaatc

SEQ ID NO: 652354 - DNA, 15 bp, Homo sapiens
catttttgtcaatct

SEQ ID NO: 652355 - DNA, 15 bp, Homo sapiens
atttttgtcaatctg

SEQ ID NO: 652356 - DNA, 15 bp, Homo sapiens
tttttgtcaatctgc

SEQ ID NO: 652357 - DNA, 15 bp, Homo sapiens
ttttgtcaatctgca

SEQ ID NO: 652358 - DNA, 15 bp, Homo sapiens
tttgtcaatctgcaa

SEQ ID NO: 652359 - DNA, 15 bp, Homo sapiens
ttgtcaatctgcaat

SEQ ID NO: 652360 - DNA, 15 bp, Homo sapiens
tgtcaatctgcaata

SEQ ID NO: 652361 - DNA, 15 bp, Homo sapiens
gtcaatctgcaatat

SEQ ID NO: 652362 - DNA, 15 bp, Homo sapiens
tcaatctgcaatatt

SEQ ID NO: 652363 - DNA, 15 bp, Homo sapiens
caatctgcaatattt

SEQ ID NO: 652364 - DNA, 15 bp, Homo sapiens
aatctgcaatattta

SEQ ID NO: 652365 - DNA, 15 bp, Homo sapiens
atctgcaatatttaa

SEQ ID NO: 652366 - DNA, 15 bp, Homo sapiens
tctgcaatatttaac

SEQ ID NO: 652367 - DNA, 15 bp, Homo sapiens
ctgcaatatttaaca

SEQ ID NO: 652368 - DNA, 15 bp, Homo sapiens
tgcaatatttaacaa

SEQ ID NO: 652369 - DNA, 15 bp, Homo sapiens
gcaatatttaacaag

SEQ ID NO: 652370 - DNA, 15 bp, Homo sapiens
caatatttaacaagg

SEQ ID NO: 652371 - DNA, 15 bp, Homo sapiens
aatatttaacaagga

SEQ ID NO: 652372 - DNA, 15 bp, Homo sapiens
atatttaacaaggag

SEQ ID NO: 652373 - DNA, 15 bp, Homo sapiens
tatttaacaaggaga

SEQ ID NO: 652374 - DNA, 15 bp, Homo sapiens
atttaacaaggagag

SEQ ID NO: 652375 - DNA, 15 bp, Homo sapiens
tttaacaaggagagt

SEQ ID NO: 652376 - DNA, 15 bp, Homo sapiens
ttaacaaggagagtt

SEQ ID NO: 652377 - DNA, 15 bp, Homo sapiens
taacaaggagagttt

SEQ ID NO: 652378 - DNA, 15 bp, Homo sapiens
aacaaggagagtttt

SEQ ID NO: 652379 - DNA, 15 bp, Homo sapiens
acaaggagagttttt

SEQ ID NO: 652380 - DNA, 15 bp, Homo sapiens
caaggagagtttttt

SEQ ID NO: 652381 - DNA, 15 bp, Homo sapiens
aaggagagttttttt

SEQ ID NO: 652382 - DNA, 15 bp, Homo sapiens
aggagagtttttttt

SEQ ID NO: 652383 - DNA, 15 bp, Homo sapiens
ggagagttttttttt

SEQ ID NO: 652384 - DNA, 15 bp, Homo sapiens
gagagttttttttta

SEQ ID NO: 652385 - DNA, 15 bp, Homo sapiens
agagtttttttttaa

SEQ ID NO: 652386 - DNA, 15 bp, Homo sapiens
gagtttttttttaac

SEQ ID NO: 652387 - DNA, 15 bp, Homo sapiens
agtttttttttaact

SEQ ID NO: 652388 - DNA, 15 bp, Homo sapiens
gtttttttttaactc

SEQ ID NO: 652389 - DNA, 15 bp, Homo sapiens
tttttttttaactct

SEQ ID NO: 652390 - DNA, 15 bp, Homo sapiens
ttttttttaactcta

SEQ ID NO: 652391 - DNA, 15 bp, Homo sapiens
tttttttaactctat

SEQ ID NO: 652392 - DNA, 15 bp, Homo sapiens
ttttttaactctatt

SEQ ID NO: 652393 - DNA, 15 bp, Homo sapiens
tttttaactctatta

SEQ ID NO: 652394 - DNA, 15 bp, Homo sapiens
ttttaactctattag

SEQ ID NO: 652395 - DNA, 15 bp, Homo sapiens
tttaactctattaga

SEQ ID NO: 652396 - DNA, 15 bp, Homo sapiens
ttaactctattagaa

SEQ ID NO: 652397 - DNA, 15 bp, Homo sapiens
taactctattagaac

SEQ ID NO: 652398 - DNA, 15 bp, Homo sapiens
aactctattagaact

SEQ ID NO: 652399 - DNA, 15 bp, Homo sapiens
actctattagaactg

SEQ ID NO: 652400 - DNA, 15 bp, Homo sapiens
ctctattagaactgt

SEQ ID NO: 652401 - DNA, 15 bp, Homo sapiens
tctattagaactgtt

SEQ ID NO: 652402 - DNA, 15 bp, Homo sapiens
ctattagaactgttc

SEQ ID NO: 652403 - DNA, 15 bp, Homo sapiens
tattagaactgttct

SEQ ID NO: 652404 - DNA, 15 bp, Homo sapiens
attagaactgttctg

SEQ ID NO: 652405 - DNA, 15 bp, Homo sapiens
ttagaactgttctga

SEQ ID NO: 652406 - DNA, 15 bp, Homo sapiens
tagaactgttctgaa

SEQ ID NO: 652407 - DNA, 15 bp, Homo sapiens
agaactgttctgaat

SEQ ID NO: 652408 - DNA, 15 bp, Homo sapiens
gaactgttctgaata

SEQ ID NO: 652409 - DNA, 15 bp, Homo sapiens
aactgttctgaataa

SEQ ID NO: 652410 - DNA, 15 bp, Homo sapiens
actgttctgaataaa

SEQ ID NO: 652411 - DNA, 15 bp, Homo sapiens
ctgttctgaataaaa

SEQ ID NO: 652412 - DNA, 15 bp, Homo sapiens
tgttctgaataaaat

SEQ ID NO: 652413 - DNA, 15 bp, Homo sapiens
gttctgaataaaata

SEQ ID NO: 652414 - DNA, 15 bp, Homo sapiens
ttctgaataaaatat

SEQ ID NO: 652415 - DNA, 15 bp, Homo sapiens
tctgaataaaatatt

SEQ ID NO: 652416 - DNA, 15 bp, Homo sapiens
ctgaataaaatattt

SEQ ID NO: 652417 - DNA, 15 bp, Homo sapiens
tgaataaaatatttt

SEQ ID NO: 652418 - DNA, 15 bp, Homo sapiens
gaataaaatattttg

SEQ ID NO: 652419 - DNA, 15 bp, Homo sapiens
aataaaatattttgt

SEQ ID NO: 652420 - DNA, 15 bp, Homo sapiens
ataaaatattttgta

SEQ ID NO: 652421 - DNA, 15 bp, Homo sapiens
taaaatattttgtaa

SEQ ID NO: 652422 - DNA, 15 bp, Homo sapiens
aaaatattttgtaat

SEQ ID NO: 652423 - DNA, 15 bp, Homo sapiens
aaatattttgtaatg

SEQ ID NO: 652424 - DNA, 15 bp, Homo sapiens
aatattttgtaatgc

SEQ ID NO: 652425 - DNA, 15 bp, Homo sapiens
atattttgtaatgct

SEQ ID NO: 652426 - DNA, 15 bp, Homo sapiens
tattttgtaatgctt

SEQ ID NO: 652427 - DNA, 15 bp, Homo sapiens
attttgtaatgctta

SEQ ID NO: 652428 - DNA, 15 bp, Homo sapiens
ttttgtaatgcttac

SEQ ID NO: 652429 - DNA, 15 bp, Homo sapiens
tttgtaatgcttact

SEQ ID NO: 652430 - DNA, 15 bp, Homo sapiens
ttgtaatgcttactg

SEQ ID NO: 652431 - DNA, 15 bp, Homo sapiens
tgtaatgcttactgt

SEQ ID NO: 652432 - DNA, 15 bp, Homo sapiens
gtaatgcttactgtg

SEQ ID NO: 652433 - DNA, 15 bp, Homo sapiens
taatgcttactgtgt

SEQ ID NO: 652434 - DNA, 15 bp, Homo sapiens
aatgcttactgtgtg

SEQ ID NO: 652435 - DNA, 15 bp, Homo sapiens
atgcttactgtgtgt

SEQ ID NO: 652436 - DNA, 15 bp, Homo sapiens
tgcttactgtgtgta

SEQ ID NO: 652437 - DNA, 15 bp, Homo sapiens
gcttactgtgtgtag

SEQ ID NO: 652438 - DNA, 15 bp, Homo sapiens
cttactgtgtgtaga

SEQ ID NO: 652439 - DNA, 15 bp, Homo sapiens
ttactgtgtgtagat

SEQ ID NO: 652440 - DNA, 15 bp, Homo sapiens
tactgtgtgtagatt

SEQ ID NO: 652441 - DNA, 15 bp, Homo sapiens
actgtgtgtagattg

SEQ ID NO: 652442 - DNA, 15 bp, Homo sapiens
ctgtgtgtagattga

SEQ ID NO: 652443 - DNA, 15 bp, Homo sapiens
tgtgtgtagattgac

SEQ ID NO: 652444 - DNA, 15 bp, Homo sapiens
gtgtgtagattgacc

SEQ ID NO: 652445 - DNA, 15 bp, Homo sapiens
tgtgtagattgaccc

SEQ ID NO: 652446 - DNA, 15 bp, Homo sapiens
gtgtagattgaccca

SEQ ID NO: 652447 - DNA, 15 bp, Homo sapiens
tgtagattgacccaa

SEQ ID NO: 652448 - DNA, 15 bp, Homo sapiens
gtagattgacccaat

SEQ ID NO: 652449 - DNA, 15 bp, Homo sapiens
tagattgacccaatg

SEQ ID NO: 652450 - DNA, 15 bp, Homo sapiens
agattgacccaatga

SEQ ID NO: 652451 - DNA, 15 bp, Homo sapiens
gattgacccaatgat

SEQ ID NO: 652452 - DNA, 15 bp, Homo sapiens
attgacccaatgatg

SEQ ID NO: 652453 - DNA, 15 bp, Homo sapiens
ttgacccaatgatgt

SEQ ID NO: 652454 - DNA, 15 bp, Homo sapiens
tgacccaatgatgtg

SEQ ID NO: 652455 - DNA, 15 bp, Homo sapiens
gacccaatgatgtga

SEQ ID NO: 652456 - DNA, 15 bp, Homo sapiens
acccaatgatgtgaa

SEQ ID NO: 652457 - DNA, 15 bp, Homo sapiens
cccaatgatgtgaat

SEQ ID NO: 652458 - DNA, 15 bp, Homo sapiens
ccaatgatgtgaatt

SEQ ID NO: 652459 - DNA, 15 bp, Homo sapiens
caatgatgtgaattg

SEQ ID NO: 652460 - DNA, 15 bp, Homo sapiens
aatgatgtgaattga

SEQ ID NO: 652461 - DNA, 15 bp, Homo sapiens
atgatgtgaattgag

SEQ ID NO: 652462 - DNA, 15 bp, Homo sapiens
tgatgtgaattgagc

SEQ ID NO: 652463 - DNA, 15 bp, Homo sapiens
gatgtgaattgagct

SEQ ID NO: 652464 - DNA, 15 bp, Homo sapiens
atgtgaattgagctc

SEQ ID NO: 652465 - DNA, 15 bp, Homo sapiens
tgtgaattgagctca

SEQ ID NO: 652466 - DNA, 15 bp, Homo sapiens
gtgaattgagctcat

SEQ ID NO: 652467 - DNA, 15 bp, Homo sapiens
tgaattgagctcata

SEQ ID NO: 652468 - DNA, 15 bp, Homo sapiens
gaattgagctcatat

SEQ ID NO: 652469 - DNA, 15 bp, Homo sapiens
aattgagctcatatt

SEQ ID NO: 652470 - DNA, 15 bp, Homo sapiens
attgagctcatattc

SEQ ID NO: 652471 - DNA, 15 bp, Homo sapiens
ttgagctcatattcc

SEQ ID NO: 652472 - DNA, 15 bp, Homo sapiens
tgagctcatattccc

SEQ ID NO: 652473 - DNA, 15 bp, Homo sapiens
gagctcatattcccc

SEQ ID NO: 652474 - DNA, 15 bp, Homo sapiens
agctcatattcccct

SEQ ID NO: 652475 - DNA, 15 bp, Homo sapiens
gctcatattcccctt

SEQ ID NO: 652476 - DNA, 15 bp, Homo sapiens
ctcatattccccttc

SEQ ID NO: 652477 - DNA, 15 bp, Homo sapiens
tcatattccccttca

SEQ ID NO: 652478 - DNA, 15 bp, Homo sapiens
catattccccttcaa

SEQ ID NO: 652479 - DNA, 15 bp, Homo sapiens
atattccccttcaag

SEQ ID NO: 652480 - DNA, 15 bp, Homo sapiens
tattccccttcaagc

SEQ ID NO: 652481 - DNA, 15 bp, Homo sapiens
attccccttcaagcc

SEQ ID NO: 652482 - DNA, 15 bp, Homo sapiens
ttccccttcaagccc

SEQ ID NO: 652483 - DNA, 15 bp, Homo sapiens
tccccttcaagccca

SEQ ID NO: 652484 - DNA, 15 bp, Homo sapiens
ccccttcaagcccaa

SEQ ID NO: 652485 - DNA, 15 bp, Homo sapiens
cccttcaagcccaag

SEQ ID NO: 652486 - DNA, 15 bp, Homo sapiens
ccttcaagcccaagt

SEQ ID NO: 652487 - DNA, 15 bp, Homo sapiens
cttcaagcccaagtt

SEQ ID NO: 652488 - DNA, 15 bp, Homo sapiens
ttcaagcccaagttc

SEQ ID NO: 652489 - DNA, 15 bp, Homo sapiens
tcaagcccaagttcc

SEQ ID NO: 652490 - DNA, 15 bp, Homo sapiens
caagcccaagttcca

SEQ ID NO: 652491 - DNA, 15 bp, Homo sapiens
aagcccaagttccac

SEQ ID NO: 652492 - DNA, 15 bp, Homo sapiens
agcccaagttccact

SEQ ID NO: 652493 - DNA, 15 bp, Homo sapiens
gcccaagttccacta

SEQ ID NO: 652494 - DNA, 15 bp, Homo sapiens
cccaagttccactac

SEQ ID NO: 652495 - DNA, 15 bp, Homo sapiens
ccaagttccactaca

SEQ ID NO: 652496 - DNA, 15 bp, Homo sapiens
caagttccactacag

SEQ ID NO: 652497 - DNA, 15 bp, Homo sapiens
aagttccactacagc

SEQ ID NO: 652498 - DNA, 15 bp, Homo sapiens
agttccactacagca

SEQ ID NO: 652499 - DNA, 15 bp, Homo sapiens
gttccactacagcaa

SEQ ID NO: 652500 - DNA, 15 bp, Homo sapiens
ttccactacagcaag

SEQ ID NO: 652501 - DNA, 15 bp, Homo sapiens
tccactacagcaagt

SEQ ID NO: 652502 - DNA, 15 bp, Homo sapiens
ccactacagcaagtg

SEQ ID NO: 652503 - DNA, 15 bp, Homo sapiens
cactacagcaagtga

SEQ ID NO: 652504 - DNA, 15 bp, Homo sapiens
actacagcaagtgaa

SEQ ID NO: 652505 - DNA, 15 bp, Homo sapiens
ctacagcaagtgaaa

SEQ ID NO: 652506 - DNA, 15 bp, Homo sapiens
tacagcaagtgaaag

SEQ ID NO: 652507 - DNA, 15 bp, Homo sapiens
acagcaagtgaaagc

SEQ ID NO: 652508 - DNA, 15 bp, Homo sapiens
cagcaagtgaaagca

SEQ ID NO: 652509 - DNA, 15 bp, Homo sapiens
agcaagtgaaagcaa

SEQ ID NO: 652510 - DNA, 15 bp, Homo sapiens
gcaagtgaaagcaac

SEQ ID NO: 652511 - DNA, 15 bp, Homo sapiens
caagtgaaagcaacc

SEQ ID NO: 652512 - DNA, 15 bp, Homo sapiens
aagtgaaagcaacct

SEQ ID NO: 652513 - DNA, 15 bp, Homo sapiens
agtgaaagcaacctt

SEQ ID NO: 652514 - DNA, 15 bp, Homo sapiens
gtgaaagcaaccttc

SEQ ID NO: 652515 - DNA, 15 bp, Homo sapiens
tgaaagcaaccttct

SEQ ID NO: 652516 - DNA, 15 bp, Homo sapiens
gaaagcaaccttcta

SEQ ID NO: 652517 - DNA, 15 bp, Homo sapiens
aaagcaaccttctag

SEQ ID NO: 652518 - DNA, 15 bp, Homo sapiens
aagcaaccttctaga

SEQ ID NO: 652519 - DNA, 15 bp, Homo sapiens
agcaaccttctagat

SEQ ID NO: 652520 - DNA, 15 bp, Homo sapiens
gcaaccttctagatt

SEQ ID NO: 652521 - DNA, 15 bp, Homo sapiens
caaccttctagatta

SEQ ID NO: 652522 - DNA, 15 bp, Homo sapiens
aaccttctagattat

SEQ ID NO: 652523 - DNA, 15 bp, Homo sapiens
accttctagattatc

SEQ ID NO: 652524 - DNA, 15 bp, Homo sapiens
ccttctagattatct

SEQ ID NO: 652525 - DNA, 15 bp, Homo sapiens
cttctagattatctg

SEQ ID NO: 652526 - DNA, 15 bp, Homo sapiens
ttctagattatctgt

SEQ ID NO: 652527 - DNA, 15 bp, Homo sapiens
tctagattatctgtt

SEQ ID NO: 652528 - DNA, 15 bp, Homo sapiens
ctagattatctgttt

SEQ ID NO: 652529 - DNA, 15 bp, Homo sapiens
tagattatctgtttg

SEQ ID NO: 652530 - DNA, 15 bp, Homo sapiens
agattatctgtttgt

SEQ ID NO: 652531 - DNA, 15 bp, Homo sapiens
gattatctgtttgtg

SEQ ID NO: 652532 - DNA, 15 bp, Homo sapiens
attatctgtttgtga

SEQ ID NO: 652533 - DNA, 15 bp, Homo sapiens
ttatctgtttgtgaa

SEQ ID NO: 652534 - DNA, 15 bp, Homo sapiens
tatctgtttgtgaac

SEQ ID NO: 652535 - DNA, 15 bp, Homo sapiens
atctgtttgtgaaca

SEQ ID NO: 652536 - DNA, 15 bp, Homo sapiens
tctgtttgtgaacat

SEQ ID NO: 652537 - DNA, 15 bp, Homo sapiens
ctgtttgtgaacatt

SEQ ID NO: 652538 - DNA, 15 bp, Homo sapiens
tgtttgtgaacatta

SEQ ID NO: 652539 - DNA, 15 bp, Homo sapiens
gtttgtgaacattat

SEQ ID NO: 652540 - DNA, 15 bp, Homo sapiens
tttgtgaacattatc

SEQ ID NO: 652541 - DNA, 15 bp, Homo sapiens
ttgtgaacattatcc

SEQ ID NO: 652542 - DNA, 15 bp, Homo sapiens
tgtgaacattatccc

SEQ ID NO: 652543 - DNA, 15 bp, Homo sapiens
gtgaacattatccca

SEQ ID NO: 652544 - DNA, 15 bp, Homo sapiens
tgaacattatcccat

SEQ ID NO: 652545 - DNA, 15 bp, Homo sapiens
gaacattatcccatc

SEQ ID NO: 652546 - DNA, 15 bp, Homo sapiens
aacattatcccatca

SEQ ID NO: 652547 - DNA, 15 bp, Homo sapiens
acattatcccatcat

SEQ ID NO: 652548 - DNA, 15 bp, Homo sapiens
cattatcccatcata

SEQ ID NO: 652549 - DNA, 15 bp, Homo sapiens
attatcccatcataa

SEQ ID NO: 652550 - DNA, 15 bp, Homo sapiens
ttatcccatcataaa

SEQ ID NO: 652551 - DNA, 15 bp, Homo sapiens
tatcccatcataaat

SEQ ID NO: 652552 - DNA, 15 bp, Homo sapiens
atcccatcataaatg

SEQ ID NO: 652553 - DNA, 15 bp, Homo sapiens
tcccatcataaatgg

SEQ ID NO: 652554 - DNA, 15 bp, Homo sapiens
cccatcataaatgga

SEQ ID NO: 652555 - DNA, 15 bp, Homo sapiens
ccatcataaatggaa

SEQ ID NO: 652556 - DNA, 15 bp, Homo sapiens
catcataaatggaac

SEQ ID NO: 652557 - DNA, 15 bp, Homo sapiens
atcataaatggaaca

SEQ ID NO: 652558 - DNA, 15 bp, Homo sapiens
tcataaatggaacag

SEQ ID NO: 652559 - DNA, 15 bp, Homo sapiens
cataaatggaacagt

SEQ ID NO: 652560 - DNA, 15 bp, Homo sapiens
ataaatggaacagtt

SEQ ID NO: 652561 - DNA, 15 bp, Homo sapiens
taaatggaacagttc

SEQ ID NO: 652562 - DNA, 15 bp, Homo sapiens
aaatggaacagttca

SEQ ID NO: 652563 - DNA, 15 bp, Homo sapiens
aatggaacagttcat

SEQ ID NO: 652564 - DNA, 15 bp, Homo sapiens
atggaacagttcatg

SEQ ID NO: 652565 - DNA, 15 bp, Homo sapiens
tggaacagttcatgt

SEQ ID NO: 652566 - DNA, 15 bp, Homo sapiens
ggaacagttcatgta

SEQ ID NO: 652567 - DNA, 15 bp, Homo sapiens
gaacagttcatgtat

SEQ ID NO: 652568 - DNA, 15 bp, Homo sapiens
aacagttcatgtata

SEQ ID NO: 652569 - DNA, 15 bp, Homo sapiens
acagttcatgtataa

SEQ ID NO: 652570 - DNA, 15 bp, Homo sapiens
cagttcatgtataat

SEQ ID NO: 652571 - DNA, 15 bp, Homo sapiens
agttcatgtataatt

SEQ ID NO: 652572 - DNA, 15 bp, Homo sapiens
gttcatgtataatta

SEQ ID NO: 652573 - DNA, 15 bp, Homo sapiens
ttcatgtataattaa

SEQ ID NO: 652574 - DNA, 15 bp, Homo sapiens
tcatgtataattaat

SEQ ID NO: 652575 - DNA, 15 bp, Homo sapiens
catgtataattaatg

SEQ ID NO: 652576 - DNA, 15 bp, Homo sapiens
atgtataattaatgc

SEQ ID NO: 652577 - DNA, 15 bp, Homo sapiens
tgtataattaatgca

SEQ ID NO: 652578 - DNA, 15 bp, Homo sapiens
gtataattaatgcag

SEQ ID NO: 652579 - DNA, 15 bp, Homo sapiens
tataattaatgcagc

SEQ ID NO: 652580 - DNA, 15 bp, Homo sapiens
ataattaatgcagct

SEQ ID NO: 652581 - DNA, 15 bp, Homo sapiens
taattaatgcagctt

SEQ ID NO: 652582 - DNA, 15 bp, Homo sapiens
aattaatgcagcttc

SEQ ID NO: 652583 - DNA, 15 bp, Homo sapiens
attaatgcagcttcc

SEQ ID NO: 652584 - DNA, 15 bp, Homo sapiens
ttaatgcagcttccc

SEQ ID NO: 652585 - DNA, 15 bp, Homo sapiens
taatgcagcttccct

SEQ ID NO: 652586 - DNA, 15 bp, Homo sapiens
aatgcagcttcccta

SEQ ID NO: 652587 - DNA, 15 bp, Homo sapiens
atgcagcttccctag

SEQ ID NO: 652588 - DNA, 15 bp, Homo sapiens
tgcagcttccctaga

SEQ ID NO: 652589 - DNA, 15 bp, Homo sapiens
gcagcttccctagac

SEQ ID NO: 652590 - DNA, 15 bp, Homo sapiens
cagcttccctagaca

SEQ ID NO: 652591 - DNA, 15 bp, Homo sapiens
agcttccctagacat

SEQ ID NO: 652592 - DNA, 15 bp, Homo sapiens
gcttccctagacatt

SEQ ID NO: 652593 - DNA, 15 bp, Homo sapiens
cttccctagacattt

SEQ ID NO: 652594 - DNA, 15 bp, Homo sapiens
ttccctagacatttt

SEQ ID NO: 652595 - DNA, 15 bp, Homo sapiens
tccctagacatttta

SEQ ID NO: 652596 - DNA, 15 bp, Homo sapiens
ccctagacattttat

SEQ ID NO: 652597 - DNA, 15 bp, Homo sapiens
cctagacattttatg

SEQ ID NO: 652598 - DNA, 15 bp, Homo sapiens
ctagacattttatga

SEQ ID NO: 652599 - DNA, 15 bp, Homo sapiens
tagacattttatgaa

SEQ ID NO: 652600 - DNA, 15 bp, Homo sapiens
agacattttatgaaa

SEQ ID NO: 652601 - DNA, 15 bp, Homo sapiens
gacattttatgaaat

SEQ ID NO: 652602 - DNA, 15 bp, Homo sapiens
acattttatgaaatg

SEQ ID NO: 652603 - DNA, 15 bp, Homo sapiens
cattttatgaaatga

SEQ ID NO: 652604 - DNA, 15 bp, Homo sapiens
attttatgaaatgaa

SEQ ID NO: 652605 - DNA, 15 bp, Homo sapiens
ttttatgaaatgaaa

SEQ ID NO: 652606 - DNA, 15 bp, Homo sapiens
tttatgaaatgaaag

SEQ ID NO: 652607 - DNA, 15 bp, Homo sapiens
ttatgaaatgaaaga

SEQ ID NO: 652608 - DNA, 15 bp, Homo sapiens
tatgaaatgaaagac

SEQ ID NO: 652609 - DNA, 15 bp, Homo sapiens
atgaaatgaaagacc

SEQ ID NO: 652610 - DNA, 15 bp, Homo sapiens
tgaaatgaaagaccc

SEQ ID NO: 652611 - DNA, 15 bp, Homo sapiens
gaaatgaaagaccca

SEQ ID NO: 652612 - DNA, 15 bp, Homo sapiens
aaatgaaagacccaa

SEQ ID NO: 652613 - DNA, 15 bp, Homo sapiens
aatgaaagacccaat

SEQ ID NO: 652614 - DNA, 15 bp, Homo sapiens
atgaaagacccaatg

SEQ ID NO: 652615 - DNA, 15 bp, Homo sapiens
tgaaagacccaatga

SEQ ID NO: 652616 - DNA, 15 bp, Homo sapiens
gaaagacccaatgaa

SEQ ID NO: 652617 - DNA, 15 bp, Homo sapiens
aaagacccaatgaag

SEQ ID NO: 652618 - DNA, 15 bp, Homo sapiens
aagacccaatgaaga

SEQ ID NO: 652619 - DNA, 15 bp, Homo sapiens
agacccaatgaagag

SEQ ID NO: 652620 - DNA, 15 bp, Homo sapiens
gacccaatgaagagc

SEQ ID NO: 652621 - DNA, 15 bp, Homo sapiens
acccaatgaagagct

SEQ ID NO: 652622 - DNA, 15 bp, Homo sapiens
cccaatgaagagcta

SEQ ID NO: 652623 - DNA, 15 bp, Homo sapiens
ccaatgaagagctaa

SEQ ID NO: 652624 - DNA, 15 bp, Homo sapiens
caatgaagagctaat

SEQ ID NO: 652625 - DNA, 15 bp, Homo sapiens
aatgaagagctaatt

SEQ ID NO: 652626 - DNA, 15 bp, Homo sapiens
atgaagagctaatta

SEQ ID NO: 652627 - DNA, 15 bp, Homo sapiens
tgaagagctaattac

SEQ ID NO: 652628 - DNA, 15 bp, Homo sapiens
gaagagctaattact

SEQ ID NO: 652629 - DNA, 15 bp, Homo sapiens
aagagctaattactc

SEQ ID NO: 652630 - DNA, 15 bp, Homo sapiens
agagctaattactca

SEQ ID NO: 652631 - DNA, 15 bp, Homo sapiens
gagctaattactcat

SEQ ID NO: 652632 - DNA, 15 bp, Homo sapiens
agctaattactcatt

SEQ ID NO: 652633 - DNA, 15 bp, Homo sapiens
gctaattactcattc

SEQ ID NO: 652634 - DNA, 15 bp, Homo sapiens
ctaattactcattct

SEQ ID NO: 652635 - DNA, 15 bp, Homo sapiens
taattactcattctt

SEQ ID NO: 652636 - DNA, 15 bp, Homo sapiens
aattactcattcttt

SEQ ID NO: 652637 - DNA, 15 bp, Homo sapiens
attactcattctttc

SEQ ID NO: 652638 - DNA, 15 bp, Homo sapiens
ttactcattctttcc

SEQ ID NO: 652639 - DNA, 15 bp, Homo sapiens
tactcattctttcct

SEQ ID NO: 652640 - DNA, 15 bp, Homo sapiens
actcattctttccta

SEQ ID NO: 652641 - DNA, 15 bp, Homo sapiens
ctcattctttcctat

SEQ ID NO: 652642 - DNA, 15 bp, Homo sapiens
tcattctttcctatg

SEQ ID NO: 652643 - DNA, 15 bp, Homo sapiens
cattctttcctatgc

SEQ ID NO: 652644 - DNA, 15 bp, Homo sapiens
attctttcctatgca

SEQ ID NO: 652645 - DNA, 15 bp, Homo sapiens
ttctttcctatgcat

SEQ ID NO: 652646 - DNA, 15 bp, Homo sapiens
tctttcctatgcatc

SEQ ID NO: 652647 - DNA, 15 bp, Homo sapiens
ctttcctatgcatca

SEQ ID NO: 652648 - DNA, 15 bp, Homo sapiens
tttcctatgcatcat

SEQ ID NO: 652649 - DNA, 15 bp, Homo sapiens
ttcctatgcatcata

SEQ ID NO: 652650 - DNA, 15 bp, Homo sapiens
tcctatgcatcatag

SEQ ID NO: 652651 - DNA, 15 bp, Homo sapiens
cctatgcatcatagg

SEQ ID NO: 652652 - DNA, 15 bp, Homo sapiens
ctatgcatcataggg

SEQ ID NO: 652653 - DNA, 15 bp, Homo sapiens
tatgcatcataggga

SEQ ID NO: 652654 - DNA, 15 bp, Homo sapiens
atgcatcatagggaa

SEQ ID NO: 652655 - DNA, 15 bp, Homo sapiens
tgcatcatagggaag

SEQ ID NO: 652656 - DNA, 15 bp, Homo sapiens
gcatcatagggaaga

SEQ ID NO: 652657 - DNA, 15 bp, Homo sapiens
catcatagggaagat

SEQ ID NO: 652658 - DNA, 15 bp, Homo sapiens
atcatagggaagata

SEQ ID NO: 652659 - DNA, 15 bp, Homo sapiens
tcatagggaagatag

SEQ ID NO: 652660 - DNA, 15 bp, Homo sapiens
catagggaagatagg

SEQ ID NO: 652661 - DNA, 15 bp, Homo sapiens
atagggaagatagga

SEQ ID NO: 652662 - DNA, 15 bp, Homo sapiens
tagggaagataggag

SEQ ID NO: 652663 - DNA, 15 bp, Homo sapiens
agggaagataggaga

SEQ ID NO: 652664 - DNA, 15 bp, Homo sapiens
gggaagataggagag

SEQ ID NO: 652665 - DNA, 15 bp, Homo sapiens
ggaagataggagagc

SEQ ID NO: 652666 - DNA, 15 bp, Homo sapiens
gaagataggagagcc

SEQ ID NO: 652667 - DNA, 15 bp, Homo sapiens
aagataggagagcct

SEQ ID NO: 652668 - DNA, 15 bp, Homo sapiens
agataggagagccta

SEQ ID NO: 652669 - DNA, 15 bp, Homo sapiens
gataggagagcctat

SEQ ID NO: 652670 - DNA, 15 bp, Homo sapiens
ataggagagcctatc

SEQ ID NO: 652671 - DNA, 15 bp, Homo sapiens
taggagagcctatca

SEQ ID NO: 652672 - DNA, 15 bp, Homo sapiens
aggagagcctatcag

SEQ ID NO: 652673 - DNA, 15 bp, Homo sapiens
ggagagcctatcagc

SEQ ID NO: 652674 - DNA, 15 bp, Homo sapiens
gagagcctatcagcc

SEQ ID NO: 652675 - DNA, 15 bp, Homo sapiens
agagcctatcagcca

SEQ ID NO: 652676 - DNA, 15 bp, Homo sapiens
gagcctatcagccag

SEQ ID NO: 652677 - DNA, 15 bp, Homo sapiens
agcctatcagccagc

SEQ ID NO: 652678 - DNA, 15 bp, Homo sapiens
gcctatcagccagcc

SEQ ID NO: 652679 - DNA, 15 bp, Homo sapiens
cctatcagccagcct

SEQ ID NO: 652680 - DNA, 15 bp, Homo sapiens
ctatcagccagcctt

SEQ ID NO: 652681 - DNA, 15 bp, Homo sapiens
tatcagccagccttg

SEQ ID NO: 652682 - DNA, 15 bp, Homo sapiens
atcagccagccttgt

SEQ ID NO: 652683 - DNA, 15 bp, Homo sapiens
tcagccagccttgtg

SEQ ID NO: 652684 - DNA, 15 bp, Homo sapiens
cagccagccttgtgt

SEQ ID NO: 652685 - DNA, 15 bp, Homo sapiens
agccagccttgtgtt

SEQ ID NO: 652686 - DNA, 15 bp, Homo sapiens
gccagccttgtgttc

SEQ ID NO: 652687 - DNA, 15 bp, Homo sapiens
ccagccttgtgttct

SEQ ID NO: 652688 - DNA, 15 bp, Homo sapiens
cagccttgtgttctt

SEQ ID NO: 652689 - DNA, 15 bp, Homo sapiens
agccttgtgttcttg

SEQ ID NO: 652690 - DNA, 15 bp, Homo sapiens
gccttgtgttcttgc

SEQ ID NO: 652691 - DNA, 15 bp, Homo sapiens
ccttgtgttcttgca

SEQ ID NO: 652692 - DNA, 15 bp, Homo sapiens
cttgtgttcttgcag

SEQ ID NO: 652693 - DNA, 15 bp, Homo sapiens
ttgtgttcttgcagt

SEQ ID NO: 652694 - DNA, 15 bp, Homo sapiens
tgtgttcttgcagtc

SEQ ID NO: 652695 - DNA, 15 bp, Homo sapiens
gtgttcttgcagtcc

SEQ ID NO: 652696 - DNA, 15 bp, Homo sapiens
tgttcttgcagtcct

SEQ ID NO: 652697 - DNA, 15 bp, Homo sapiens
gttcttgcagtcctg

SEQ ID NO: 652698 - DNA, 15 bp, Homo sapiens
ttcttgcagtcctgt

SEQ ID NO: 652699 - DNA, 15 bp, Homo sapiens
tcttgcagtcctgtg

SEQ ID NO: 652700 - DNA, 15 bp, Homo sapiens
cttgcagtcctgtga

SEQ ID NO: 652701 - DNA, 15 bp, Homo sapiens
ttgcagtcctgtgag

SEQ ID NO: 652702 - DNA, 15 bp, Homo sapiens
tgcagtcctgtgaga

SEQ ID NO: 652703 - DNA, 15 bp, Homo sapiens
gcagtcctgtgagaa

SEQ ID NO: 652704 - DNA, 15 bp, Homo sapiens
cagtcctgtgagaaa

SEQ ID NO: 652705 - DNA, 15 bp, Homo sapiens
agtcctgtgagaaaa

SEQ ID NO: 652706 - DNA, 15 bp, Homo sapiens
gtcctgtgagaaaaa

SEQ ID NO: 652707 - DNA, 15 bp, Homo sapiens
tcctgtgagaaaaat

SEQ ID NO: 652708 - DNA, 15 bp, Homo sapiens
cctgtgagaaaaatg

SEQ ID NO: 652709 - DNA, 15 bp, Homo sapiens
ctgtgagaaaaatgg

SEQ ID NO: 652710 - DNA, 15 bp, Homo sapiens
tgtgagaaaaatggt

SEQ ID NO: 652711 - DNA, 15 bp, Homo sapiens
gtgagaaaaatggtg

SEQ ID NO: 652712 - DNA, 15 bp, Homo sapiens
tgagaaaaatggtgg

SEQ ID NO: 652713 - DNA, 15 bp, Homo sapiens
gagaaaaatggtggc

SEQ ID NO: 652714 - DNA, 15 bp, Homo sapiens
agaaaaatggtggca

SEQ ID NO: 652715 - DNA, 15 bp, Homo sapiens
gaaaaatggtggcat

SEQ ID NO: 652716 - DNA, 15 bp, Homo sapiens
aaaaatggtggcata

SEQ ID NO: 652717 - DNA, 15 bp, Homo sapiens
aaaatggtggcataa

SEQ ID NO: 652718 - DNA, 15 bp, Homo sapiens
aaatggtggcataat

SEQ ID NO: 652719 - DNA, 15 bp, Homo sapiens
aatggtggcataatg

SEQ ID NO: 652720 - DNA, 15 bp, Homo sapiens
atggtggcataatgg

SEQ ID NO: 652721 - DNA, 15 bp, Homo sapiens
tggtggcataatgga

SEQ ID NO: 652722 - DNA, 15 bp, Homo sapiens
ggtggcataatggag

SEQ ID NO: 652723 - DNA, 15 bp, Homo sapiens
gtggcataatggaga

SEQ ID NO: 652724 - DNA, 15 bp, Homo sapiens
tggcataatggagat

SEQ ID NO: 652725 - DNA, 15 bp, Homo sapiens
ggcataatggagatg

SEQ ID NO: 652726 - DNA, 15 bp, Homo sapiens
gcataatggagatga

SEQ ID NO: 652727 - DNA, 15 bp, Homo sapiens
cataatggagatgaa

SEQ ID NO: 652728 - DNA, 15 bp, Homo sapiens
ataatggagatgaaa

SEQ ID NO: 652729 - DNA, 15 bp, Homo sapiens
taatggagatgaaag

SEQ ID NO: 652730 - DNA, 15 bp, Homo sapiens
aatggagatgaaagc

SEQ ID NO: 652731 - DNA, 15 bp, Homo sapiens
atggagatgaaagca

SEQ ID NO: 652732 - DNA, 15 bp, Homo sapiens
tggagatgaaagcac

SEQ ID NO: 652733 - DNA, 15 bp, Homo sapiens
ggagatgaaagcaca

SEQ ID NO: 652734 - DNA, 15 bp, Homo sapiens
gagatgaaagcacat

SEQ ID NO: 652735 - DNA, 15 bp, Homo sapiens
agatgaaagcacatt

SEQ ID NO: 652736 - DNA, 15 bp, Homo sapiens
gatgaaagcacattg

SEQ ID NO: 652737 - DNA, 15 bp, Homo sapiens
atgaaagcacattgg

SEQ ID NO: 652738 - DNA, 15 bp, Homo sapiens
tgaaagcacattggg

SEQ ID NO: 652739 - DNA, 15 bp, Homo sapiens
gaaagcacattggga

SEQ ID NO: 652740 - DNA, 15 bp, Homo sapiens
aaagcacattgggaa

SEQ ID NO: 652741 - DNA, 15 bp, Homo sapiens
aagcacattgggaag

SEQ ID NO: 652742 - DNA, 15 bp, Homo sapiens
agcacattgggaagg

SEQ ID NO: 652743 - DNA, 15 bp, Homo sapiens
gcacattgggaagga

SEQ ID NO: 652744 - DNA, 15 bp, Homo sapiens
cacattgggaaggag

SEQ ID NO: 652745 - DNA, 15 bp, Homo sapiens
acattgggaaggagc

SEQ ID NO: 652746 - DNA, 15 bp, Homo sapiens
cattgggaaggagct

SEQ ID NO: 652747 - DNA, 15 bp, Homo sapiens
attgggaaggagcta

SEQ ID NO: 652748 - DNA, 15 bp, Homo sapiens
ttgggaaggagctag

SEQ ID NO: 652749 - DNA, 15 bp, Homo sapiens
tgggaaggagctagc

SEQ ID NO: 652750 - DNA, 15 bp, Homo sapiens
gggaaggagctagcg

SEQ ID NO: 652751 - DNA, 15 bp, Homo sapiens
ggaaggagctagcga

SEQ ID NO: 652752 - DNA, 15 bp, Homo sapiens
gaaggagctagcgat

SEQ ID NO: 652753 - DNA, 15 bp, Homo sapiens
aaggagctagcgatt

SEQ ID NO: 652754 - DNA, 15 bp, Homo sapiens
aggagctagcgattt

SEQ ID NO: 652755 - DNA, 15 bp, Homo sapiens
ggagctagcgatttt

SEQ ID NO: 652756 - DNA, 15 bp, Homo sapiens
gagctagcgattttc

SEQ ID NO: 652757 - DNA, 15 bp, Homo sapiens
agctagcgattttct

SEQ ID NO: 652758 - DNA, 15 bp, Homo sapiens
gctagcgattttctt

SEQ ID NO: 652759 - DNA, 15 bp, Homo sapiens
ctagcgattttctta

SEQ ID NO: 652760 - DNA, 15 bp, Homo sapiens
tagcgattttcttac

SEQ ID NO: 652761 - DNA, 15 bp, Homo sapiens
agcgattttcttact

SEQ ID NO: 652762 - DNA, 15 bp, Homo sapiens
gcgattttcttacta

SEQ ID NO: 652763 - DNA, 15 bp, Homo sapiens
cgattttcttactag

SEQ ID NO: 652764 - DNA, 15 bp, Homo sapiens
gattttcttactaga

SEQ ID NO: 652765 - DNA, 15 bp, Homo sapiens
attttcttactagat

SEQ ID NO: 652766 - DNA, 15 bp, Homo sapiens
ttttcttactagatt

SEQ ID NO: 652767 - DNA, 15 bp, Homo sapiens
tttcttactagattg

SEQ ID NO: 652768 - DNA, 15 bp, Homo sapiens
ttcttactagattga

SEQ ID NO: 652769 - DNA, 15 bp, Homo sapiens
tcttactagattgat

SEQ ID NO: 652770 - DNA, 15 bp, Homo sapiens
cttactagattgatg

SEQ ID NO: 652771 - DNA, 15 bp, Homo sapiens
ttactagattgatgg

SEQ ID NO: 652772 - DNA, 15 bp, Homo sapiens
tactagattgatgga

SEQ ID NO: 652773 - DNA, 15 bp, Homo sapiens
actagattgatggag

SEQ ID NO: 652774 - DNA, 15 bp, Homo sapiens
ctagattgatggagc

SEQ ID NO: 652775 - DNA, 15 bp, Homo sapiens
tagattgatggagcc

SEQ ID NO: 652776 - DNA, 15 bp, Homo sapiens
agattgatggagccc

SEQ ID NO: 652777 - DNA, 15 bp, Homo sapiens
gattgatggagccct

SEQ ID NO: 652778 - DNA, 15 bp, Homo sapiens
attgatggagccctt

SEQ ID NO: 652779 - DNA, 15 bp, Homo sapiens
ttgatggagccctta

SEQ ID NO: 652780 - DNA, 15 bp, Homo sapiens
tgatggagcccttat

SEQ ID NO: 652781 - DNA, 15 bp, Homo sapiens
gatggagcccttata

SEQ ID NO: 652782 - DNA, 15 bp, Homo sapiens
atggagcccttataa

SEQ ID NO: 652783 - DNA, 15 bp, Homo sapiens
tggagcccttataaa

SEQ ID NO: 652784 - DNA, 15 bp, Homo sapiens
ggagcccttataaag

SEQ ID NO: 652785 - DNA, 15 bp, Homo sapiens
gagcccttataaagg

SEQ ID NO: 652786 - DNA, 15 bp, Homo sapiens
agcccttataaaggg

SEQ ID NO: 652787 - DNA, 15 bp, Homo sapiens
gcccttataaagggt

SEQ ID NO: 652788 - DNA, 15 bp, Homo sapiens
cccttataaagggtg

SEQ ID NO: 652789 - DNA, 15 bp, Homo sapiens
ccttataaagggtgg

SEQ ID NO: 652790 - DNA, 15 bp, Homo sapiens
cttataaagggtggc

SEQ ID NO: 652791 - DNA, 15 bp, Homo sapiens
ttataaagggtggct

SEQ ID NO: 652792 - DNA, 15 bp, Homo sapiens
tataaagggtggctc

SEQ ID NO: 652793 - DNA, 15 bp, Homo sapiens
ataaagggtggctca

SEQ ID NO: 652794 - DNA, 15 bp, Homo sapiens
taaagggtggctcat

SEQ ID NO: 652795 - DNA, 15 bp, Homo sapiens
aaagggtggctcatt

SEQ ID NO: 652796 - DNA, 15 bp, Homo sapiens
aagggtggctcatta

SEQ ID NO: 652797 - DNA, 15 bp, Homo sapiens
agggtggctcattac

SEQ ID NO: 652798 - DNA, 15 bp, Homo sapiens
gggtggctcattaca

SEQ ID NO: 652799 - DNA, 15 bp, Homo sapiens
ggtggctcattacaa

SEQ ID NO: 652800 - DNA, 15 bp, Homo sapiens
gtggctcattacaac

SEQ ID NO: 652801 - DNA, 15 bp, Homo sapiens
tggctcattacaacc

SEQ ID NO: 652802 - DNA, 15 bp, Homo sapiens
ggctcattacaacct

SEQ ID NO: 652803 - DNA, 15 bp, Homo sapiens
gctcattacaacctc

SEQ ID NO: 652804 - DNA, 15 bp, Homo sapiens
ctcattacaacctca

SEQ ID NO: 652805 - DNA, 15 bp, Homo sapiens
tcattacaacctcat

SEQ ID NO: 652806 - DNA, 15 bp, Homo sapiens
cattacaacctcatt

SEQ ID NO: 652807 - DNA, 15 bp, Homo sapiens
attacaacctcattt

SEQ ID NO: 652808 - DNA, 15 bp, Homo sapiens
ttacaacctcatttt

SEQ ID NO: 652809 - DNA, 15 bp, Homo sapiens
tacaacctcattttg

SEQ ID NO: 652810 - DNA, 15 bp, Homo sapiens
acaacctcattttgc

SEQ ID NO: 652811 - DNA, 15 bp, Homo sapiens
caacctcattttgca

SEQ ID NO: 652812 - DNA, 15 bp, Homo sapiens
aacctcattttgcat

SEQ ID NO: 652813 - DNA, 15 bp, Homo sapiens
acctcattttgcatg

SEQ ID NO: 652814 - DNA, 15 bp, Homo sapiens
cctcattttgcatga

SEQ ID NO: 652815 - DNA, 15 bp, Homo sapiens
ctcattttgcatgaa

SEQ ID NO: 652816 - DNA, 15 bp, Homo sapiens
tcattttgcatgaaa

SEQ ID NO: 652817 - DNA, 15 bp, Homo sapiens
cattttgcatgaaaa

SEQ ID NO: 652818 - DNA, 15 bp, Homo sapiens
attttgcatgaaaaa

SEQ ID NO: 652819 - DNA, 15 bp, Homo sapiens
ttttgcatgaaaaac

SEQ ID NO: 652820 - DNA, 15 bp, Homo sapiens
tttgcatgaaaaaca

SEQ ID NO: 652821 - DNA, 15 bp, Homo sapiens
ttgcatgaaaaacac

SEQ ID NO: 652822 - DNA, 15 bp, Homo sapiens
tgcatgaaaaacacc

SEQ ID NO: 652823 - DNA, 15 bp, Homo sapiens
gcatgaaaaacacca

SEQ ID NO: 652824 - DNA, 15 bp, Homo sapiens
catgaaaaacaccaa

SEQ ID NO: 652825 - DNA, 15 bp, Homo sapiens
atgaaaaacaccaag

SEQ ID NO: 652826 - DNA, 15 bp, Homo sapiens
tgaaaaacaccaaga

SEQ ID NO: 652827 - DNA, 15 bp, Homo sapiens
gaaaaacaccaagag

SEQ ID NO: 652828 - DNA, 15 bp, Homo sapiens
aaaaacaccaagaga

SEQ ID NO: 652829 - DNA, 15 bp, Homo sapiens
aaaacaccaagagaa

SEQ ID NO: 652830 - DNA, 15 bp, Homo sapiens
aaacaccaagagaaa

SEQ ID NO: 652831 - DNA, 15 bp, Homo sapiens
aacaccaagagaaaa

SEQ ID NO: 652832 - DNA, 15 bp, Homo sapiens
acaccaagagaaaaa

SEQ ID NO: 652833 - DNA, 15 bp, Homo sapiens
caccaagagaaaaag

SEQ ID NO: 652834 - DNA, 15 bp, Homo sapiens
accaagagaaaaaga

SEQ ID NO: 652835 - DNA, 15 bp, Homo sapiens
ccaagagaaaaagag

SEQ ID NO: 652836 - DNA, 15 bp, Homo sapiens
caagagaaaaagagc

SEQ ID NO: 652837 - DNA, 15 bp, Homo sapiens
aagagaaaaagagct

SEQ ID NO: 652838 - DNA, 15 bp, Homo sapiens
agagaaaaagagctt

SEQ ID NO: 652839 - DNA, 15 bp, Homo sapiens
gagaaaaagagcttc

SEQ ID NO: 652840 - DNA, 15 bp, Homo sapiens
agaaaaagagcttca

SEQ ID NO: 652841 - DNA, 15 bp, Homo sapiens
gaaaaagagcttcaa

SEQ ID NO: 652842 - DNA, 15 bp, Homo sapiens
aaaaagagcttcaaa

SEQ ID NO: 652843 - DNA, 15 bp, Homo sapiens
aaaagagcttcaaat

SEQ ID NO: 652844 - DNA, 15 bp, Homo sapiens
aaagagcttcaaatg

SEQ ID NO: 652845 - DNA, 15 bp, Homo sapiens
aagagcttcaaatga

SEQ ID NO: 652846 - DNA, 15 bp, Homo sapiens
agagcttcaaatgaa

SEQ ID NO: 652847 - DNA, 15 bp, Homo sapiens
gagcttcaaatgaaa

SEQ ID NO: 652848 - DNA, 15 bp, Homo sapiens
agcttcaaatgaaat

SEQ ID NO: 652849 - DNA, 15 bp, Homo sapiens
gcttcaaatgaaata

SEQ ID NO: 652850 - DNA, 15 bp, Homo sapiens
cttcaaatgaaatag

SEQ ID NO: 652851 - DNA, 15 bp, Homo sapiens
ttcaaatgaaatagg

SEQ ID NO: 652852 - DNA, 15 bp, Homo sapiens
tcaaatgaaatagga

SEQ ID NO: 652853 - DNA, 15 bp, Homo sapiens
caaatgaaataggag

SEQ ID NO: 652854 - DNA, 15 bp, Homo sapiens
aaatgaaataggaga

SEQ ID NO: 652855 - DNA, 15 bp, Homo sapiens
aatgaaataggagaa

SEQ ID NO: 652856 - DNA, 15 bp, Homo sapiens
atgaaataggagaag

SEQ ID NO: 652857 - DNA, 15 bp, Homo sapiens
tgaaataggagaagt

SEQ ID NO: 652858 - DNA, 15 bp, Homo sapiens
gaaataggagaagtg

SEQ ID NO: 652859 - DNA, 15 bp, Homo sapiens
aaataggagaagtga

SEQ ID NO: 652860 - DNA, 15 bp, Homo sapiens
aataggagaagtgaa

SEQ ID NO: 652861 - DNA, 15 bp, Homo sapiens
ataggagaagtgaag

SEQ ID NO: 652862 - DNA, 15 bp, Homo sapiens
taggagaagtgaagc

SEQ ID NO: 652863 - DNA, 15 bp, Homo sapiens
aggagaagtgaagct

SEQ ID NO: 652864 - DNA, 15 bp, Homo sapiens
ggagaagtgaagctt

SEQ ID NO: 652865 - DNA, 15 bp, Homo sapiens
gagaagtgaagctta

SEQ ID NO: 652866 - DNA, 15 bp, Homo sapiens
agaagtgaagcttac

SEQ ID NO: 652867 - DNA, 15 bp, Homo sapiens
gaagtgaagcttacc

SEQ ID NO: 652868 - DNA, 15 bp, Homo sapiens
aagtgaagcttacca

SEQ ID NO: 652869 - DNA, 15 bp, Homo sapiens
agtgaagcttaccat

SEQ ID NO: 652870 - DNA, 15 bp, Homo sapiens
gtgaagcttaccata

SEQ ID NO: 652871 - DNA, 15 bp, Homo sapiens
tgaagcttaccatag

SEQ ID NO: 652872 - DNA, 15 bp, Homo sapiens
gaagcttaccataga

SEQ ID NO: 652873 - DNA, 15 bp, Homo sapiens
aagcttaccatagat

SEQ ID NO: 652874 - DNA, 15 bp, Homo sapiens
agcttaccatagata

SEQ ID NO: 652875 - DNA, 15 bp, Homo sapiens
gcttaccatagatat

SEQ ID NO: 652876 - DNA, 15 bp, Homo sapiens
cttaccatagatata

SEQ ID NO: 652877 - DNA, 15 bp, Homo sapiens
ttaccatagatataa

SEQ ID NO: 652878 - DNA, 15 bp, Homo sapiens
taccatagatataat

SEQ ID NO: 652879 - DNA, 15 bp, Homo sapiens
accatagatataatt

SEQ ID NO: 652880 - DNA, 15 bp, Homo sapiens
ccatagatataattt

SEQ ID NO: 652881 - DNA, 15 bp, Homo sapiens
catagatataatttt

SEQ ID NO: 652882 - DNA, 15 bp, Homo sapiens
atagatataattttt

SEQ ID NO: 652883 - DNA, 15 bp, Homo sapiens
tagatataatttttg

SEQ ID NO: 652884 - DNA, 15 bp, Homo sapiens
agatataatttttga

SEQ ID NO: 652885 - DNA, 15 bp, Homo sapiens
gatataatttttgac

SEQ ID NO: 652886 - DNA, 15 bp, Homo sapiens
atataatttttgaca

SEQ ID NO: 652887 - DNA, 15 bp, Homo sapiens
tataatttttgacag

SEQ ID NO: 652888 - DNA, 15 bp, Homo sapiens
ataatttttgacagc

SEQ ID NO: 652889 - DNA, 15 bp, Homo sapiens
taatttttgacagcc

SEQ ID NO: 652890 - DNA, 15 bp, Homo sapiens
aatttttgacagcca

SEQ ID NO: 652891 - DNA, 15 bp, Homo sapiens
atttttgacagccat

SEQ ID NO: 652892 - DNA, 15 bp, Homo sapiens
tttttgacagccatg

SEQ ID NO: 652893 - DNA, 15 bp, Homo sapiens
ttttgacagccatgg

SEQ ID NO: 652894 - DNA, 15 bp, Homo sapiens
tttgacagccatggt

SEQ ID NO: 652895 - DNA, 15 bp, Homo sapiens
ttgacagccatggtg

SEQ ID NO: 652896 - DNA, 15 bp, Homo sapiens
tgacagccatggtga

SEQ ID NO: 652897 - DNA, 15 bp, Homo sapiens
gacagccatggtgat

SEQ ID NO: 652898 - DNA, 15 bp, Homo sapiens
acagccatggtgatt

SEQ ID NO: 652899 - DNA, 15 bp, Homo sapiens
cagccatggtgatta

SEQ ID NO: 652900 - DNA, 15 bp, Homo sapiens
agccatggtgattaa

SEQ ID NO: 652901 - DNA, 15 bp, Homo sapiens
gccatggtgattaac

SEQ ID NO: 652902 - DNA, 15 bp, Homo sapiens
ccatggtgattaacc

SEQ ID NO: 652903 - DNA, 15 bp, Homo sapiens
catggtgattaacca

SEQ ID NO: 652904 - DNA, 15 bp, Homo sapiens
atggtgattaaccat

SEQ ID NO: 652905 - DNA, 15 bp, Homo sapiens
tggtgattaaccatt

SEQ ID NO: 652906 - DNA, 15 bp, Homo sapiens
ggtgattaaccattt

SEQ ID NO: 652907 - DNA, 15 bp, Homo sapiens
gtgattaaccatttt

SEQ ID NO: 652908 - DNA, 15 bp, Homo sapiens
tgattaaccatttta

SEQ ID NO: 652909 - DNA, 15 bp, Homo sapiens
gattaaccattttaa

SEQ ID NO: 652910 - DNA, 15 bp, Homo sapiens
attaaccattttaac

SEQ ID NO: 652911 - DNA, 15 bp, Homo sapiens
ttaaccattttaaca

SEQ ID NO: 652912 - DNA, 15 bp, Homo sapiens
taaccattttaacat

SEQ ID NO: 652913 - DNA, 15 bp, Homo sapiens
aaccattttaacatg

SEQ ID NO: 652914 - DNA, 15 bp, Homo sapiens
accattttaacatgc

SEQ ID NO: 652915 - DNA, 15 bp, Homo sapiens
ccattttaacatgct

SEQ ID NO: 652916 - DNA, 15 bp, Homo sapiens
cattttaacatgctg

SEQ ID NO: 652917 - DNA, 15 bp, Homo sapiens
attttaacatgctgc

SEQ ID NO: 652918 - DNA, 15 bp, Homo sapiens
ttttaacatgctgct

SEQ ID NO: 652919 - DNA, 15 bp, Homo sapiens
tttaacatgctgcta

SEQ ID NO: 652920 - DNA, 15 bp, Homo sapiens
ttaacatgctgctat

SEQ ID NO: 652921 - DNA, 15 bp, Homo sapiens
taacatgctgctatg

SEQ ID NO: 652922 - DNA, 15 bp, Homo sapiens
aacatgctgctatgg

SEQ ID NO: 652923 - DNA, 15 bp, Homo sapiens
acatgctgctatggg

SEQ ID NO: 652924 - DNA, 15 bp, Homo sapiens
catgctgctatgggc

SEQ ID NO: 652925 - DNA, 15 bp, Homo sapiens
atgctgctatgggcc

SEQ ID NO: 652926 - DNA, 15 bp, Homo sapiens
tgctgctatgggcct

SEQ ID NO: 652927 - DNA, 15 bp, Homo sapiens
gctgctatgggcctg

SEQ ID NO: 652928 - DNA, 15 bp, Homo sapiens
ctgctatgggcctgt

SEQ ID NO: 652929 - DNA, 15 bp, Homo sapiens
tgctatgggcctgtg

SEQ ID NO: 652930 - DNA, 15 bp, Homo sapiens
gctatgggcctgtgg

SEQ ID NO: 652931 - DNA, 15 bp, Homo sapiens
ctatgggcctgtgga

SEQ ID NO: 652932 - DNA, 15 bp, Homo sapiens
tatgggcctgtggaa

SEQ ID NO: 652933 - DNA, 15 bp, Homo sapiens
atgggcctgtggaat

SEQ ID NO: 652934 - DNA, 15 bp, Homo sapiens
tgggcctgtggaatt

SEQ ID NO: 652935 - DNA, 15 bp, Homo sapiens
gggcctgtggaattt

SEQ ID NO: 652936 - DNA, 15 bp, Homo sapiens
ggcctgtggaatttc

SEQ ID NO: 652937 - DNA, 15 bp, Homo sapiens
gcctgtggaatttct

SEQ ID NO: 652938 - DNA, 15 bp, Homo sapiens
cctgtggaatttctc

SEQ ID NO: 652939 - DNA, 15 bp, Homo sapiens
ctgtggaatttctct

SEQ ID NO: 652940 - DNA, 15 bp, Homo sapiens
tgtggaatttctctc

SEQ ID NO: 652941 - DNA, 15 bp, Homo sapiens
gtggaatttctctcc

SEQ ID NO: 652942 - DNA, 15 bp, Homo sapiens
tggaatttctctcct

SEQ ID NO: 652943 - DNA, 15 bp, Homo sapiens
ggaatttctctcctt

SEQ ID NO: 652944 - DNA, 15 bp, Homo sapiens
gaatttctctccttg

SEQ ID NO: 652945 - DNA, 15 bp, Homo sapiens
aatttctctccttgg

SEQ ID NO: 652946 - DNA, 15 bp, Homo sapiens
atttctctccttgga

SEQ ID NO: 652947 - DNA, 15 bp, Homo sapiens
tttctctccttggag

SEQ ID NO: 652948 - DNA, 15 bp, Homo sapiens
ttctctccttggaga

SEQ ID NO: 652949 - DNA, 15 bp, Homo sapiens
tctctccttggagat

SEQ ID NO: 652950 - DNA, 15 bp, Homo sapiens
ctctccttggagatt

SEQ ID NO: 652951 - DNA, 15 bp, Homo sapiens
tctccttggagattc

SEQ ID NO: 652952 - DNA, 15 bp, Homo sapiens
ctccttggagattct

SEQ ID NO: 652953 - DNA, 15 bp, Homo sapiens
tccttggagattctt

SEQ ID NO: 652954 - DNA, 15 bp, Homo sapiens
ccttggagattctta

SEQ ID NO: 652955 - DNA, 15 bp, Homo sapiens
cttggagattcttaa

SEQ ID NO: 652956 - DNA, 15 bp, Homo sapiens
ttggagattcttaaa

SEQ ID NO: 652957 - DNA, 15 bp, Homo sapiens
tggagattcttaaaa

SEQ ID NO: 652958 - DNA, 15 bp, Homo sapiens
ggagattcttaaaaa

SEQ ID NO: 652959 - DNA, 15 bp, Homo sapiens
gagattcttaaaaaa

SEQ ID NO: 652960 - DNA, 15 bp, Homo sapiens
agattcttaaaaaat

SEQ ID NO: 652961 - DNA, 15 bp, Homo sapiens
gattcttaaaaaatt

SEQ ID NO: 652962 - DNA, 15 bp, Homo sapiens
attcttaaaaaattg

SEQ ID NO: 652963 - DNA, 15 bp, Homo sapiens
ttcttaaaaaattga

SEQ ID NO: 652964 - DNA, 15 bp, Homo sapiens
tcttaaaaaattgac

SEQ ID NO: 652965 - DNA, 15 bp, Homo sapiens
cttaaaaaattgaca

SEQ ID NO: 652966 - DNA, 15 bp, Homo sapiens
ttaaaaaattgacag

SEQ ID NO: 652967 - DNA, 15 bp, Homo sapiens
taaaaaattgacaga

SEQ ID NO: 652968 - DNA, 15 bp, Homo sapiens
aaaaaattgacagac

SEQ ID NO: 652969 - DNA, 15 bp, Homo sapiens
aaaaattgacagaca

SEQ ID NO: 652970 - DNA, 15 bp, Homo sapiens
aaaattgacagacaa

SEQ ID NO: 652971 - DNA, 15 bp, Homo sapiens
aaattgacagacaac

SEQ ID NO: 652972 - DNA, 15 bp, Homo sapiens
aattgacagacaacc

SEQ ID NO: 652973 - DNA, 15 bp, Homo sapiens
attgacagacaacca

SEQ ID NO: 652974 - DNA, 15 bp, Homo sapiens
ttgacagacaaccaa

SEQ ID NO: 652975 - DNA, 15 bp, Homo sapiens
tgacagacaaccaac

SEQ ID NO: 652976 - DNA, 15 bp, Homo sapiens
gacagacaaccaacc

SEQ ID NO: 652977 - DNA, 15 bp, Homo sapiens
acagacaaccaacca

SEQ ID NO: 652978 - DNA, 15 bp, Homo sapiens
cagacaaccaaccat

SEQ ID NO: 652979 - DNA, 15 bp, Homo sapiens
agacaaccaaccatc

SEQ ID NO: 652980 - DNA, 15 bp, Homo sapiens
gacaaccaaccatct

SEQ ID NO: 652981 - DNA, 15 bp, Homo sapiens
acaaccaaccatctt

SEQ ID NO: 652982 - DNA, 15 bp, Homo sapiens
caaccaaccatcttg

SEQ ID NO: 652983 - DNA, 15 bp, Homo sapiens
aaccaaccatcttgg

SEQ ID NO: 652984 - DNA, 15 bp, Homo sapiens
accaaccatcttgga

SEQ ID NO: 652985 - DNA, 15 bp, Homo sapiens
ccaaccatcttggat

SEQ ID NO: 652986 - DNA, 15 bp, Homo sapiens
caaccatcttggatg

SEQ ID NO: 652987 - DNA, 15 bp, Homo sapiens
aaccatcttggatgg

SEQ ID NO: 652988 - DNA, 15 bp, Homo sapiens
accatcttggatggt

SEQ ID NO: 652989 - DNA, 15 bp, Homo sapiens
ccatcttggatggtt

SEQ ID NO: 652990 - DNA, 15 bp, Homo sapiens
catcttggatggttt

SEQ ID NO: 652991 - DNA, 15 bp, Homo sapiens
atcttggatggtttc

SEQ ID NO: 652992 - DNA, 15 bp, Homo sapiens
tcttggatggtttca

SEQ ID NO: 652993 - DNA, 15 bp, Homo sapiens
cttggatggtttcaa

SEQ ID NO: 652994 - DNA, 15 bp, Homo sapiens
ttggatggtttcaat

SEQ ID NO: 652995 - DNA, 15 bp, Homo sapiens
tggatggtttcaatt

SEQ ID NO: 652996 - DNA, 15 bp, Homo sapiens
ggatggtttcaatta

SEQ ID NO: 652997 - DNA, 15 bp, Homo sapiens
gatggtttcaattaa

SEQ ID NO: 652998 - DNA, 15 bp, Homo sapiens
atggtttcaattaag

SEQ ID NO: 652999 - DNA, 15 bp, Homo sapiens
tggtttcaattaaga

SEQ ID NO: 653000 - DNA, 15 bp, Homo sapiens
ggtttcaattaagag

SEQ ID NO: 653001 - DNA, 15 bp, Homo sapiens
gtttcaattaagagc

SEQ ID NO: 653002 - DNA, 15 bp, Homo sapiens
tttcaattaagagca

SEQ ID NO: 653003 - DNA, 15 bp, Homo sapiens
ttcaattaagagcaa

SEQ ID NO: 653004 - DNA, 15 bp, Homo sapiens
tcaattaagagcaac

SEQ ID NO: 653005 - DNA, 15 bp, Homo sapiens
caattaagagcaact

SEQ ID NO: 653006 - DNA, 15 bp, Homo sapiens
aattaagagcaactg

SEQ ID NO: 653007 - DNA, 15 bp, Homo sapiens
attaagagcaactga

SEQ ID NO: 653008 - DNA, 15 bp, Homo sapiens
ttaagagcaactgaa

SEQ ID NO: 653009 - DNA, 15 bp, Homo sapiens
taagagcaactgaaa

SEQ ID NO: 653010 - DNA, 15 bp, Homo sapiens
aagagcaactgaaag

SEQ ID NO: 653011 - DNA, 15 bp, Homo sapiens
agagcaactgaaaga

SEQ ID NO: 653012 - DNA, 15 bp, Homo sapiens
gagcaactgaaagaa

SEQ ID NO: 653013 - DNA, 15 bp, Homo sapiens
agcaactgaaagaaa

SEQ ID NO: 653014 - DNA, 15 bp, Homo sapiens
gcaactgaaagaaag

SEQ ID NO: 653015 - DNA, 15 bp, Homo sapiens
caactgaaagaaaga

SEQ ID NO: 653016 - DNA, 15 bp, Homo sapiens
aactgaaagaaagag

SEQ ID NO: 653017 - DNA, 15 bp, Homo sapiens
actgaaagaaagaga

SEQ ID NO: 653018 - DNA, 15 bp, Homo sapiens
ctgaaagaaagagag

SEQ ID NO: 653019 - DNA, 15 bp, Homo sapiens
tgaaagaaagagagt

SEQ ID NO: 653020 - DNA, 15 bp, Homo sapiens
gaaagaaagagagtt

SEQ ID NO: 653021 - DNA, 15 bp, Homo sapiens
aaagaaagagagttt

SEQ ID NO: 653022 - DNA, 15 bp, Homo sapiens
aagaaagagagtttc

SEQ ID NO: 653023 - DNA, 15 bp, Homo sapiens
agaaagagagtttct

SEQ ID NO: 653024 - DNA, 15 bp, Homo sapiens
gaaagagagtttctg

SEQ ID NO: 653025 - DNA, 15 bp, Homo sapiens
aaagagagtttctgg

SEQ ID NO: 653026 - DNA, 15 bp, Homo sapiens
aagagagtttctggg

SEQ ID NO: 653027 - DNA, 15 bp, Homo sapiens
agagagtttctgggg

SEQ ID NO: 653028 - DNA, 15 bp, Homo sapiens
gagagtttctggggt

SEQ ID NO: 653029 - DNA, 15 bp, Homo sapiens
agagtttctggggtc

SEQ ID NO: 653030 - DNA, 15 bp, Homo sapiens
gagtttctggggtct

SEQ ID NO: 653031 - DNA, 15 bp, Homo sapiens
agtttctggggtctt

SEQ ID NO: 653032 - DNA, 15 bp, Homo sapiens
gtttctggggtcttt

SEQ ID NO: 653033 - DNA, 15 bp, Homo sapiens
tttctggggtctttt

SEQ ID NO: 653034 - DNA, 15 bp, Homo sapiens
ttctggggtcttttt

SEQ ID NO: 653035 - DNA, 15 bp, Homo sapiens
tctggggtcttttta

SEQ ID NO: 653036 - DNA, 15 bp, Homo sapiens
ctggggtctttttaa

SEQ ID NO: 653037 - DNA, 15 bp, Homo sapiens
tggggtctttttaag

SEQ ID NO: 653038 - DNA, 15 bp, Homo sapiens
ggggtctttttaagt

SEQ ID NO: 653039 - DNA, 15 bp, Homo sapiens
gggtctttttaagtt

SEQ ID NO: 653040 - DNA, 15 bp, Homo sapiens
ggtctttttaagttt

SEQ ID NO: 653041 - DNA, 15 bp, Homo sapiens
gtctttttaagtttt

SEQ ID NO: 653042 - DNA, 15 bp, Homo sapiens
tctttttaagtttta

SEQ ID NO: 653043 - DNA, 15 bp, Homo sapiens
ctttttaagttttaa

SEQ ID NO: 653044 - DNA, 15 bp, Homo sapiens
tttttaagttttaag

SEQ ID NO: 653045 - DNA, 15 bp, Homo sapiens
ttttaagttttaaga

SEQ ID NO: 653046 - DNA, 15 bp, Homo sapiens
tttaagttttaagag

SEQ ID NO: 653047 - DNA, 15 bp, Homo sapiens
ttaagttttaagagt

SEQ ID NO: 653048 - DNA, 15 bp, Homo sapiens
taagttttaagagtc

SEQ ID NO: 653049 - DNA, 15 bp, Homo sapiens
aagttttaagagtct

SEQ ID NO: 653050 - DNA, 15 bp, Homo sapiens
agttttaagagtcta

SEQ ID NO: 653051 - DNA, 15 bp, Homo sapiens
gttttaagagtctat

SEQ ID NO: 653052 - DNA, 15 bp, Homo sapiens
ttttaagagtctata

SEQ ID NO: 653053 - DNA, 15 bp, Homo sapiens
tttaagagtctataa

SEQ ID NO: 653054 - DNA, 15 bp, Homo sapiens
ttaagagtctataaa

SEQ ID NO: 653055 - DNA, 15 bp, Homo sapiens
taagagtctataaac

SEQ ID NO: 653056 - DNA, 15 bp, Homo sapiens
aagagtctataaaca

SEQ ID NO: 653057 - DNA, 15 bp, Homo sapiens
agagtctataaacag

SEQ ID NO: 653058 - DNA, 15 bp, Homo sapiens
gagtctataaacagt

SEQ ID NO: 653059 - DNA, 15 bp, Homo sapiens
agtctataaacagtc

SEQ ID NO: 653060 - DNA, 15 bp, Homo sapiens
gtctataaacagtcc

SEQ ID NO: 653061 - DNA, 15 bp, Homo sapiens
tctataaacagtccc

SEQ ID NO: 653062 - DNA, 15 bp, Homo sapiens
ctataaacagtccct

SEQ ID NO: 653063 - DNA, 15 bp, Homo sapiens
tataaacagtccctt

SEQ ID NO: 653064 - DNA, 15 bp, Homo sapiens
ataaacagtccctta

SEQ ID NO: 653065 - DNA, 15 bp, Homo sapiens
taaacagtcccttaa

SEQ ID NO: 653066 - DNA, 15 bp, Homo sapiens
aaacagtcccttaaa

SEQ ID NO: 653067 - DNA, 15 bp, Homo sapiens
aacagtcccttaaat

SEQ ID NO: 653068 - DNA, 15 bp, Homo sapiens
acagtcccttaaata

SEQ ID NO: 653069 - DNA, 15 bp, Homo sapiens
cagtcccttaaataa

SEQ ID NO: 653070 - DNA, 15 bp, Homo sapiens
agtcccttaaataaa

SEQ ID NO: 653071 - DNA, 15 bp, Homo sapiens
gtcccttaaataaac

SEQ ID NO: 653072 - DNA, 15 bp, Homo sapiens
tcccttaaataaact

SEQ ID NO: 653073 - DNA, 15 bp, Homo sapiens
cccttaaataaactg

SEQ ID NO: 653074 - DNA, 15 bp, Homo sapiens
ccttaaataaactgt

SEQ ID NO: 653075 - DNA, 15 bp, Homo sapiens
cttaaataaactgta

SEQ ID NO: 653076 - DNA, 15 bp, Homo sapiens
ttaaataaactgtat

SEQ ID NO: 653077 - DNA, 15 bp, Homo sapiens
taaataaactgtata

SEQ ID NO: 653078 - DNA, 15 bp, Homo sapiens
aaataaactgtatat

SEQ ID NO: 653079 - DNA, 15 bp, Homo sapiens
aataaactgtatatg

SEQ ID NO: 653080 - DNA, 15 bp, Homo sapiens
ataaactgtatatgc

SEQ ID NO: 653081 - DNA, 15 bp, Homo sapiens
taaactgtatatgct

SEQ ID NO: 653082 - DNA, 15 bp, Homo sapiens
aaactgtatatgctt

SEQ ID NO: 653083 - DNA, 15 bp, Homo sapiens
aactgtatatgcttt

SEQ ID NO: 653084 - DNA, 15 bp, Homo sapiens
actgtatatgcttta

SEQ ID NO: 653085 - DNA, 15 bp, Homo sapiens
ctgtatatgctttac

SEQ ID NO: 653086 - DNA, 15 bp, Homo sapiens
tgtatatgctttacc

SEQ ID NO: 653087 - DNA, 15 bp, Homo sapiens
gtatatgctttacct

SEQ ID NO: 653088 - DNA, 15 bp, Homo sapiens
tatatgctttacctt

SEQ ID NO: 653089 - DNA, 15 bp, Homo sapiens
atatgctttaccttg

SEQ ID NO: 653090 - DNA, 15 bp, Homo sapiens
tatgctttaccttgg

SEQ ID NO: 653091 - DNA, 15 bp, Homo sapiens
atgctttaccttggc

SEQ ID NO: 653092 - DNA, 15 bp, Homo sapiens
tgctttaccttggcg

SEQ ID NO: 653093 - DNA, 15 bp, Homo sapiens
gctttaccttggcgg

SEQ ID NO: 653094 - DNA, 15 bp, Homo sapiens
ctttaccttggcggt

SEQ ID NO: 653095 - DNA, 15 bp, Homo sapiens
tttaccttggcggtc

SEQ ID NO: 653096 - DNA, 15 bp, Homo sapiens
ttaccttggcggtct

SEQ ID NO: 653097 - DNA, 15 bp, Homo sapiens
taccttggcggtctg

SEQ ID NO: 653098 - DNA, 15 bp, Homo sapiens
accttggcggtctgg

SEQ ID NO: 653099 - DNA, 15 bp, Homo sapiens
ccttggcggtctggg

SEQ ID NO: 653100 - DNA, 15 bp, Homo sapiens
cttggcggtctgggg

SEQ ID NO: 653101 - DNA, 15 bp, Homo sapiens
ttggcggtctgggga

SEQ ID NO: 653102 - DNA, 15 bp, Homo sapiens
tggcggtctggggaa

SEQ ID NO: 653103 - DNA, 15 bp, Homo sapiens
ggcggtctggggaaa

SEQ ID NO: 653104 - DNA, 15 bp, Homo sapiens
gcggtctggggaaat

SEQ ID NO: 653105 - DNA, 15 bp, Homo sapiens
cggtctggggaaatg

SEQ ID NO: 653106 - DNA, 15 bp, Homo sapiens
ggtctggggaaatgg

SEQ ID NO: 653107 - DNA, 15 bp, Homo sapiens
gtctggggaaatgga

SEQ ID NO: 653108 - DNA, 15 bp, Homo sapiens
tctggggaaatggag

SEQ ID NO: 653109 - DNA, 15 bp, Homo sapiens
ctggggaaatggaga

SEQ ID NO: 653110 - DNA, 15 bp, Homo sapiens
tggggaaatggagaa

SEQ ID NO: 653111 - DNA, 15 bp, Homo sapiens
ggggaaatggagaag

SEQ ID NO: 653112 - DNA, 15 bp, Homo sapiens
gggaaatggagaagt

SEQ ID NO: 653113 - DNA, 15 bp, Homo sapiens
ggaaatggagaagta

SEQ ID NO: 653114 - DNA, 15 bp, Homo sapiens
gaaatggagaagtaa

SEQ ID NO: 653115 - DNA, 15 bp, Homo sapiens
aaatggagaagtaaa

SEQ ID NO: 653116 - DNA, 15 bp, Homo sapiens
aatggagaagtaaat

SEQ ID NO: 653117 - DNA, 15 bp, Homo sapiens
atggagaagtaaatc

SEQ ID NO: 653118 - DNA, 15 bp, Homo sapiens
tggagaagtaaatca

SEQ ID NO: 653119 - DNA, 15 bp, Homo sapiens
ggagaagtaaatcaa

SEQ ID NO: 653120 - DNA, 15 bp, Homo sapiens
gagaagtaaatcaat

SEQ ID NO: 653121 - DNA, 15 bp, Homo sapiens
agaagtaaatcaatt

SEQ ID NO: 653122 - DNA, 15 bp, Homo sapiens
gaagtaaatcaatta

SEQ ID NO: 653123 - DNA, 15 bp, Homo sapiens
aagtaaatcaattag

SEQ ID NO: 653124 - DNA, 15 bp, Homo sapiens
agtaaatcaattaga

SEQ ID NO: 653125 - DNA, 15 bp, Homo sapiens
gtaaatcaattagaa

SEQ ID NO: 653126 - DNA, 15 bp, Homo sapiens
taaatcaattagaaa

SEQ ID NO: 653127 - DNA, 15 bp, Homo sapiens
aaatcaattagaaaa

SEQ ID NO: 653128 - DNA, 15 bp, Homo sapiens
aatcaattagaaaag

SEQ ID NO: 653129 - DNA, 15 bp, Homo sapiens
atcaattagaaaagc

SEQ ID NO: 653130 - DNA, 15 bp, Homo sapiens
tcaattagaaaagcc

SEQ ID NO: 653131 - DNA, 15 bp, Homo sapiens
caattagaaaagcca

SEQ ID NO: 653132 - DNA, 15 bp, Homo sapiens
aattagaaaagccaa

SEQ ID NO: 653133 - DNA, 15 bp, Homo sapiens
attagaaaagccaag

SEQ ID NO: 653134 - DNA, 15 bp, Homo sapiens
ttagaaaagccaagt

SEQ ID NO: 653135 - DNA, 15 bp, Homo sapiens
tagaaaagccaagtt

SEQ ID NO: 653136 - DNA, 15 bp, Homo sapiens
agaaaagccaagttg

SEQ ID NO: 653137 - DNA, 15 bp, Homo sapiens
gaaaagccaagttgg

SEQ ID NO: 653138 - DNA, 15 bp, Homo sapiens
aaaagccaagttgga

SEQ ID NO: 653139 - DNA, 15 bp, Homo sapiens
aaagccaagttggat

SEQ ID NO: 653140 - DNA, 15 bp, Homo sapiens
aagccaagttggata

SEQ ID NO: 653141 - DNA, 15 bp, Homo sapiens
agccaagttggatat

SEQ ID NO: 653142 - DNA, 15 bp, Homo sapiens
gccaagttggatatt

SEQ ID NO: 653143 - DNA, 15 bp, Homo sapiens
ccaagttggatattc

SEQ ID NO: 653144 - DNA, 15 bp, Homo sapiens
caagttggatattct

SEQ ID NO: 653145 - DNA, 15 bp, Homo sapiens
aagttggatattctt

SEQ ID NO: 653146 - DNA, 15 bp, Homo sapiens
agttggatattcttt

SEQ ID NO: 653147 - DNA, 15 bp, Homo sapiens
gttggatattctttc

SEQ ID NO: 653148 - DNA, 15 bp, Homo sapiens
ttggatattctttca

SEQ ID NO: 653149 - DNA, 15 bp, Homo sapiens
tggatattctttcag

SEQ ID NO: 653150 - DNA, 15 bp, Homo sapiens
ggatattctttcagc

SEQ ID NO: 653151 - DNA, 15 bp, Homo sapiens
gatattctttcagct

SEQ ID NO: 653152 - DNA, 15 bp, Homo sapiens
atattctttcagctc

SEQ ID NO: 653153 - DNA, 15 bp, Homo sapiens
tattctttcagctct

SEQ ID NO: 653154 - DNA, 15 bp, Homo sapiens
attctttcagctctt

SEQ ID NO: 653155 - DNA, 15 bp, Homo sapiens
ttctttcagctcttc

SEQ ID NO: 653156 - DNA, 15 bp, Homo sapiens
tctttcagctcttca

SEQ ID NO: 653157 - DNA, 15 bp, Homo sapiens
ctttcagctcttcag

SEQ ID NO: 653158 - DNA, 15 bp, Homo sapiens
tttcagctcttcagg

SEQ ID NO: 653159 - DNA, 15 bp, Homo sapiens
ttcagctcttcagga

SEQ ID NO: 653160 - DNA, 15 bp, Homo sapiens
tcagctcttcaggat

SEQ ID NO: 653161 - DNA, 15 bp, Homo sapiens
cagctcttcaggatt

SEQ ID NO: 653162 - DNA, 15 bp, Homo sapiens
agctcttcaggattt

SEQ ID NO: 653163 - DNA, 15 bp, Homo sapiens
gctcttcaggattta

SEQ ID NO: 653164 - DNA, 15 bp, Homo sapiens
ctcttcaggatttat

SEQ ID NO: 653165 - DNA, 15 bp, Homo sapiens
tcttcaggatttata

SEQ ID NO: 653166 - DNA, 15 bp, Homo sapiens
cttcaggatttatag

SEQ ID NO: 653167 - DNA, 15 bp, Homo sapiens
ttcaggatttatagc

SEQ ID NO: 653168 - DNA, 15 bp, Homo sapiens
tcaggatttatagct

SEQ ID NO: 653169 - DNA, 15 bp, Homo sapiens
caggatttatagctt

SEQ ID NO: 653170 - DNA, 15 bp, Homo sapiens
aggatttatagcttt

SEQ ID NO: 653171 - DNA, 15 bp, Homo sapiens
ggatttatagctttt

SEQ ID NO: 653172 - DNA, 15 bp, Homo sapiens
gatttatagcttttg

SEQ ID NO: 653173 - DNA, 15 bp, Homo sapiens
atttatagcttttgt

SEQ ID NO: 653174 - DNA, 15 bp, Homo sapiens
tttatagcttttgta

SEQ ID NO: 653175 - DNA, 15 bp, Homo sapiens
ttatagcttttgtaa

SEQ ID NO: 653176 - DNA, 15 bp, Homo sapiens
tatagcttttgtaaa

SEQ ID NO: 653177 - DNA, 15 bp, Homo sapiens
atagcttttgtaaaa

SEQ ID NO: 653178 - DNA, 15 bp, Homo sapiens
tagcttttgtaaaac

SEQ ID NO: 653179 - DNA, 15 bp, Homo sapiens
agcttttgtaaaaca

SEQ ID NO: 653180 - DNA, 15 bp, Homo sapiens
gcttttgtaaaacat

SEQ ID NO: 653181 - DNA, 15 bp, Homo sapiens
cttttgtaaaacata

SEQ ID NO: 653182 - DNA, 15 bp, Homo sapiens
ttttgtaaaacatac

SEQ ID NO: 653183 - DNA, 15 bp, Homo sapiens
tttgtaaaacatact

SEQ ID NO: 653184 - DNA, 15 bp, Homo sapiens
ttgtaaaacatactt

SEQ ID NO: 653185 - DNA, 15 bp, Homo sapiens
tgtaaaacatacttc

SEQ ID NO: 653186 - DNA, 15 bp, Homo sapiens
gtaaaacatacttcc

SEQ ID NO: 653187 - DNA, 15 bp, Homo sapiens
taaaacatacttcca

SEQ ID NO: 653188 - DNA, 15 bp, Homo sapiens
aaaacatacttccaa

SEQ ID NO: 653189 - DNA, 15 bp, Homo sapiens
aaacatacttccaat

SEQ ID NO: 653190 - DNA, 15 bp, Homo sapiens
aacatacttccaatg

SEQ ID NO: 653191 - DNA, 15 bp, Homo sapiens
acatacttccaatgt

SEQ ID NO: 653192 - DNA, 15 bp, Homo sapiens
catacttccaatgta

SEQ ID NO: 653193 - DNA, 15 bp, Homo sapiens
atacttccaatgtat

SEQ ID NO: 653194 - DNA, 15 bp, Homo sapiens
tacttccaatgtata

SEQ ID NO: 653195 - DNA, 15 bp, Homo sapiens
acttccaatgtatag

SEQ ID NO: 653196 - DNA, 15 bp, Homo sapiens
cttccaatgtatagt

SEQ ID NO: 653197 - DNA, 15 bp, Homo sapiens
ttccaatgtatagtt

SEQ ID NO: 653198 - DNA, 15 bp, Homo sapiens
tccaatgtatagtta

SEQ ID NO: 653199 - DNA, 15 bp, Homo sapiens
ccaatgtatagttat

SEQ ID NO: 653200 - DNA, 15 bp, Homo sapiens
caatgtatagttatt

SEQ ID NO: 653201 - DNA, 15 bp, Homo sapiens
aatgtatagttatta

SEQ ID NO: 653202 - DNA, 15 bp, Homo sapiens
atgtatagttattaa

SEQ ID NO: 653203 - DNA, 15 bp, Homo sapiens
tgtatagttattaag

SEQ ID NO: 653204 - DNA, 15 bp, Homo sapiens
gtatagttattaaga

SEQ ID NO: 653205 - DNA, 15 bp, Homo sapiens
tatagttattaagaa

SEQ ID NO: 653206 - DNA, 15 bp, Homo sapiens
atagttattaagaac

SEQ ID NO: 653207 - DNA, 15 bp, Homo sapiens
tagttattaagaaca

SEQ ID NO: 653208 - DNA, 15 bp, Homo sapiens
agttattaagaacag

SEQ ID NO: 653209 - DNA, 15 bp, Homo sapiens
gttattaagaacagg

SEQ ID NO: 653210 - DNA, 15 bp, Homo sapiens
ttattaagaacaggt

SEQ ID NO: 653211 - DNA, 15 bp, Homo sapiens
tattaagaacaggtc

SEQ ID NO: 653212 - DNA, 15 bp, Homo sapiens
attaagaacaggtct

SEQ ID NO: 653213 - DNA, 15 bp, Homo sapiens
ttaagaacaggtctg

SEQ ID NO: 653214 - DNA, 15 bp, Homo sapiens
taagaacaggtctga

SEQ ID NO: 653215 - DNA, 15 bp, Homo sapiens
aagaacaggtctgaa

SEQ ID NO: 653216 - DNA, 15 bp, Homo sapiens
agaacaggtctgaat

SEQ ID NO: 653217 - DNA, 15 bp, Homo sapiens
gaacaggtctgaata

SEQ ID NO: 653218 - DNA, 15 bp, Homo sapiens
aacaggtctgaataa

SEQ ID NO: 653219 - DNA, 15 bp, Homo sapiens
acaggtctgaataaa

SEQ ID NO: 653220 - DNA, 15 bp, Homo sapiens
caggtctgaataaac

SEQ ID NO: 653221 - DNA, 15 bp, Homo sapiens
aggtctgaataaacg

SEQ ID NO: 653222 - DNA, 15 bp, Homo sapiens
ggtctgaataaacga

SEQ ID NO: 653223 - DNA, 15 bp, Homo sapiens
gtctgaataaacgaa

SEQ ID NO: 653224 - DNA, 15 bp, Homo sapiens
tctgaataaacgaat

SEQ ID NO: 653225 - DNA, 15 bp, Homo sapiens
ctgaataaacgaatg

SEQ ID NO: 653226 - DNA, 15 bp, Homo sapiens
tgaataaacgaatgg

SEQ ID NO: 653227 - DNA, 15 bp, Homo sapiens
gaataaacgaatggc

SEQ ID NO: 653228 - DNA, 15 bp, Homo sapiens
aataaacgaatggca

SEQ ID NO: 653229 - DNA, 15 bp, Homo sapiens
ataaacgaatggcat

SEQ ID NO: 653230 - DNA, 15 bp, Homo sapiens
taaacgaatggcatt

SEQ ID NO: 653231 - DNA, 15 bp, Homo sapiens
aaacgaatggcattc

SEQ ID NO: 653232 - DNA, 15 bp, Homo sapiens
aacgaatggcattct

SEQ ID NO: 653233 - DNA, 15 bp, Homo sapiens
acgaatggcattctt

SEQ ID NO: 653234 - DNA, 15 bp, Homo sapiens
cgaatggcattcttc

SEQ ID NO: 653235 - DNA, 15 bp, Homo sapiens
gaatggcattcttca

SEQ ID NO: 653236 - DNA, 15 bp, Homo sapiens
aatggcattcttcat

SEQ ID NO: 653237 - DNA, 15 bp, Homo sapiens
atggcattcttcatg

SEQ ID NO: 653238 - DNA, 15 bp, Homo sapiens
tggcattcttcatgg

SEQ ID NO: 653239 - DNA, 15 bp, Homo sapiens
ggcattcttcatggg

SEQ ID NO: 653240 - DNA, 15 bp, Homo sapiens
gcattcttcatgggt

SEQ ID NO: 653241 - DNA, 15 bp, Homo sapiens
cattcttcatgggtt

SEQ ID NO: 653242 - DNA, 15 bp, Homo sapiens
attcttcatgggtta

SEQ ID NO: 653243 - DNA, 15 bp, Homo sapiens
ttcttcatgggttaa

SEQ ID NO: 653244 - DNA, 15 bp, Homo sapiens
tcttcatgggttaaa

SEQ ID NO: 653245 - DNA, 15 bp, Homo sapiens
cttcatgggttaaaa

SEQ ID NO: 653246 - DNA, 15 bp, Homo sapiens
ttcatgggttaaaac

SEQ ID NO: 653247 - DNA, 15 bp, Homo sapiens
tcatgggttaaaaca

SEQ ID NO: 653248 - DNA, 15 bp, Homo sapiens
catgggttaaaacag

SEQ ID NO: 653249 - DNA, 15 bp, Homo sapiens
atgggttaaaacaga

SEQ ID NO: 653250 - DNA, 15 bp, Homo sapiens
tgggttaaaacagac

SEQ ID NO: 653251 - DNA, 15 bp, Homo sapiens
gggttaaaacagact

SEQ ID NO: 653252 - DNA, 15 bp, Homo sapiens
ggttaaaacagactg

SEQ ID NO: 653253 - DNA, 15 bp, Homo sapiens
gttaaaacagactgt

SEQ ID NO: 653254 - DNA, 15 bp, Homo sapiens
ttaaaacagactgtt

SEQ ID NO: 653255 - DNA, 15 bp, Homo sapiens
taaaacagactgttt

SEQ ID NO: 653256 - DNA, 15 bp, Homo sapiens
aaaacagactgtttt

SEQ ID NO: 653257 - DNA, 15 bp, Homo sapiens
aaacagactgttttg

SEQ ID NO: 653258 - DNA, 15 bp, Homo sapiens
aacagactgttttgt

SEQ ID NO: 653259 - DNA, 15 bp, Homo sapiens
acagactgttttgta

SEQ ID NO: 653260 - DNA, 15 bp, Homo sapiens
cagactgttttgtaa

SEQ ID NO: 653261 - DNA, 15 bp, Homo sapiens
agactgttttgtaag

SEQ ID NO: 653262 - DNA, 15 bp, Homo sapiens
gactgttttgtaaga

SEQ ID NO: 653263 - DNA, 15 bp, Homo sapiens
actgttttgtaagag

SEQ ID NO: 653264 - DNA, 15 bp, Homo sapiens
ctgttttgtaagagc

SEQ ID NO: 653265 - DNA, 15 bp, Homo sapiens
tgttttgtaagagct

SEQ ID NO: 653266 - DNA, 15 bp, Homo sapiens
gttttgtaagagctt

SEQ ID NO: 653267 - DNA, 15 bp, Homo sapiens
ttttgtaagagcttt

SEQ ID NO: 653268 - DNA, 15 bp, Homo sapiens
tttgtaagagcttta

SEQ ID NO: 653269 - DNA, 15 bp, Homo sapiens
ttgtaagagctttaa

SEQ ID NO: 653270 - DNA, 15 bp, Homo sapiens
tgtaagagctttaag

SEQ ID NO: 653271 - DNA, 15 bp, Homo sapiens
gtaagagctttaagt

SEQ ID NO: 653272 - DNA, 15 bp, Homo sapiens
taagagctttaagtg

SEQ ID NO: 653273 - DNA, 15 bp, Homo sapiens
aagagctttaagtga

SEQ ID NO: 653274 - DNA, 15 bp, Homo sapiens
agagctttaagtgaa

SEQ ID NO: 653275 - DNA, 15 bp, Homo sapiens
gagctttaagtgaaa

SEQ ID NO: 653276 - DNA, 15 bp, Homo sapiens
agctttaagtgaaac

SEQ ID NO: 653277 - DNA, 15 bp, Homo sapiens
gctttaagtgaaact

SEQ ID NO: 653278 - DNA, 15 bp, Homo sapiens
ctttaagtgaaactt

SEQ ID NO: 653279 - DNA, 15 bp, Homo sapiens
tttaagtgaaacttt

SEQ ID NO: 653280 - DNA, 15 bp, Homo sapiens
ttaagtgaaacttta

SEQ ID NO: 653281 - DNA, 15 bp, Homo sapiens
taagtgaaactttac

SEQ ID NO: 653282 - DNA, 15 bp, Homo sapiens
aagtgaaactttaca

SEQ ID NO: 653283 - DNA, 15 bp, Homo sapiens
agtgaaactttacaa

SEQ ID NO: 653284 - DNA, 15 bp, Homo sapiens
gtgaaactttacaat

SEQ ID NO: 653285 - DNA, 15 bp, Homo sapiens
tgaaactttacaatg

SEQ ID NO: 653286 - DNA, 15 bp, Homo sapiens
gaaactttacaatga

SEQ ID NO: 653287 - DNA, 15 bp, Homo sapiens
aaactttacaatgaa

SEQ ID NO: 653288 - DNA, 15 bp, Homo sapiens
aactttacaatgaac

SEQ ID NO: 653289 - DNA, 15 bp, Homo sapiens
actttacaatgaact

SEQ ID NO: 653290 - DNA, 15 bp, Homo sapiens
ctttacaatgaactt

SEQ ID NO: 653291 - DNA, 15 bp, Homo sapiens
tttacaatgaacttt

SEQ ID NO: 653292 - DNA, 15 bp, Homo sapiens
ttacaatgaactttc

SEQ ID NO: 653293 - DNA, 15 bp, Homo sapiens
tacaatgaactttca

SEQ ID NO: 653294 - DNA, 15 bp, Homo sapiens
acaatgaactttcat

SEQ ID NO: 653295 - DNA, 15 bp, Homo sapiens
caatgaactttcatt

SEQ ID NO: 653296 - DNA, 15 bp, Homo sapiens
aatgaactttcattg

SEQ ID NO: 653297 - DNA, 15 bp, Homo sapiens
atgaactttcattgt

SEQ ID NO: 653298 - DNA, 15 bp, Homo sapiens
tgaactttcattgtt

SEQ ID NO: 653299 - DNA, 15 bp, Homo sapiens
gaactttcattgtta

SEQ ID NO: 653300 - DNA, 15 bp, Homo sapiens
aactttcattgttat

SEQ ID NO: 653301 - DNA, 15 bp, Homo sapiens
actttcattgttatt

SEQ ID NO: 653302 - DNA, 15 bp, Homo sapiens
ctttcattgttattg

SEQ ID NO: 653303 - DNA, 15 bp, Homo sapiens
tttcattgttattga

SEQ ID NO: 653304 - DNA, 15 bp, Homo sapiens
ttcattgttattgat

SEQ ID NO: 653305 - DNA, 15 bp, Homo sapiens
tcattgttattgatt

SEQ ID NO: 653306 - DNA, 15 bp, Homo sapiens
cattgttattgattg

SEQ ID NO: 653307 - DNA, 15 bp, Homo sapiens
attgttattgattgc

SEQ ID NO: 653308 - DNA, 15 bp, Homo sapiens
ttgttattgattgca

SEQ ID NO: 653309 - DNA, 15 bp, Homo sapiens
tgttattgattgcaa

SEQ ID NO: 653310 - DNA, 15 bp, Homo sapiens
gttattgattgcaac

SEQ ID NO: 653311 - DNA, 15 bp, Homo sapiens
ttattgattgcaaca

SEQ ID NO: 653312 - DNA, 15 bp, Homo sapiens
tattgattgcaacaa

SEQ ID NO: 653313 - DNA, 15 bp, Homo sapiens
attgattgcaacaac

SEQ ID NO: 653314 - DNA, 15 bp, Homo sapiens
ttgattgcaacaacc

SEQ ID NO: 653315 - DNA, 15 bp, Homo sapiens
tgattgcaacaacct

SEQ ID NO: 653316 - DNA, 15 bp, Homo sapiens
gattgcaacaacctt

SEQ ID NO: 653317 - DNA, 15 bp, Homo sapiens
attgcaacaaccttc

SEQ ID NO: 653318 - DNA, 15 bp, Homo sapiens
ttgcaacaaccttct

SEQ ID NO: 653319 - DNA, 15 bp, Homo sapiens
tgcaacaaccttctt

SEQ ID NO: 653320 - DNA, 15 bp, Homo sapiens
gcaacaaccttctta

SEQ ID NO: 653321 - DNA, 15 bp, Homo sapiens
caacaaccttcttag

SEQ ID NO: 653322 - DNA, 15 bp, Homo sapiens
aacaaccttcttaga

SEQ ID NO: 653323 - DNA, 15 bp, Homo sapiens
acaaccttcttagat

SEQ ID NO: 653324 - DNA, 15 bp, Homo sapiens
caaccttcttagatc

SEQ ID NO: 653325 - DNA, 15 bp, Homo sapiens
aaccttcttagatct

SEQ ID NO: 653326 - DNA, 15 bp, Homo sapiens
accttcttagatcta

SEQ ID NO: 653327 - DNA, 15 bp, Homo sapiens
ccttcttagatctag

SEQ ID NO: 653328 - DNA, 15 bp, Homo sapiens
cttcttagatctagg

SEQ ID NO: 653329 - DNA, 15 bp, Homo sapiens
ttcttagatctaggt

SEQ ID NO: 653330 - DNA, 15 bp, Homo sapiens
tcttagatctaggtt

SEQ ID NO: 653331 - DNA, 15 bp, Homo sapiens
cttagatctaggtta

SEQ ID NO: 653332 - DNA, 15 bp, Homo sapiens
ttagatctaggttat

SEQ ID NO: 653333 - DNA, 15 bp, Homo sapiens
tagatctaggttatt

SEQ ID NO: 653334 - DNA, 15 bp, Homo sapiens
agatctaggttatta

SEQ ID NO: 653335 - DNA, 15 bp, Homo sapiens
gatctaggttattat

SEQ ID NO: 653336 - DNA, 15 bp, Homo sapiens
atctaggttattatt

SEQ ID NO: 653337 - DNA, 15 bp, Homo sapiens
tctaggttattatta

SEQ ID NO: 653338 - DNA, 15 bp, Homo sapiens
ctaggttattattat

SEQ ID NO: 653339 - DNA, 15 bp, Homo sapiens
taggttattattatt

SEQ ID NO: 653340 - DNA, 15 bp, Homo sapiens
aggttattattatta

SEQ ID NO: 653341 - DNA, 15 bp, Homo sapiens
ggttattattattaa

SEQ ID NO: 653342 - DNA, 15 bp, Homo sapiens
gttattattattaag

SEQ ID NO: 653343 - DNA, 15 bp, Homo sapiens
ttattattattaagt

SEQ ID NO: 653344 - DNA, 15 bp, Homo sapiens
tattattattaagtc

SEQ ID NO: 653345 - DNA, 15 bp, Homo sapiens
attattattaagtca

SEQ ID NO: 653346 - DNA, 15 bp, Homo sapiens
ttattattaagtcaa

SEQ ID NO: 653347 - DNA, 15 bp, Homo sapiens
tattattaagtcaag

SEQ ID NO: 653348 - DNA, 15 bp, Homo sapiens
attattaagtcaagc

SEQ ID NO: 653349 - DNA, 15 bp, Homo sapiens
ttattaagtcaagct

SEQ ID NO: 653350 - DNA, 15 bp, Homo sapiens
tattaagtcaagctt

SEQ ID NO: 653351 - DNA, 15 bp, Homo sapiens
attaagtcaagcttc

SEQ ID NO: 653352 - DNA, 15 bp, Homo sapiens
ttaagtcaagcttct

SEQ ID NO: 653353 - DNA, 15 bp, Homo sapiens
taagtcaagcttctt

SEQ ID NO: 653354 - DNA, 15 bp, Homo sapiens
aagtcaagcttcttt

SEQ ID NO: 653355 - DNA, 15 bp, Homo sapiens
agtcaagcttctttc

SEQ ID NO: 653356 - DNA, 15 bp, Homo sapiens
gtcaagcttctttcc

SEQ ID NO: 653357 - DNA, 15 bp, Homo sapiens
tcaagcttctttcct

SEQ ID NO: 653358 - DNA, 15 bp, Homo sapiens
caagcttctttcctt

SEQ ID NO: 653359 - DNA, 15 bp, Homo sapiens
aagcttctttccttt

SEQ ID NO: 653360 - DNA, 15 bp, Homo sapiens
agcttctttcctttg

SEQ ID NO: 653361 - DNA, 15 bp, Homo sapiens
gcttctttcctttga

SEQ ID NO: 653362 - DNA, 15 bp, Homo sapiens
cttctttcctttgat

SEQ ID NO: 653363 - DNA, 15 bp, Homo sapiens
ttctttcctttgata

SEQ ID NO: 653364 - DNA, 15 bp, Homo sapiens
tctttcctttgatat

SEQ ID NO: 653365 - DNA, 15 bp, Homo sapiens
ctttcctttgatata

SEQ ID NO: 653366 - DNA, 15 bp, Homo sapiens
tttcctttgatatat

SEQ ID NO: 653367 - DNA, 15 bp, Homo sapiens
ttcctttgatatata

SEQ ID NO: 653368 - DNA, 15 bp, Homo sapiens
tcctttgatatatac

SEQ ID NO: 653369 - DNA, 15 bp, Homo sapiens
cctttgatatatact

SEQ ID NO: 653370 - DNA, 15 bp, Homo sapiens
ctttgatatatactg

SEQ ID NO: 653371 - DNA, 15 bp, Homo sapiens
tttgatatatactgc

SEQ ID NO: 653372 - DNA, 15 bp, Homo sapiens
ttgatatatactgcc

SEQ ID NO: 653373 - DNA, 15 bp, Homo sapiens
tgatatatactgccc

SEQ ID NO: 653374 - DNA, 15 bp, Homo sapiens
gatatatactgccca

SEQ ID NO: 653375 - DNA, 15 bp, Homo sapiens
atatatactgcccag

SEQ ID NO: 653376 - DNA, 15 bp, Homo sapiens
tatatactgcccaga

SEQ ID NO: 653377 - DNA, 15 bp, Homo sapiens
atatactgcccagaa

SEQ ID NO: 653378 - DNA, 15 bp, Homo sapiens
tatactgcccagaaa

SEQ ID NO: 653379 - DNA, 15 bp, Homo sapiens
atactgcccagaaaa

SEQ ID NO: 653380 - DNA, 15 bp, Homo sapiens
tactgcccagaaaac

SEQ ID NO: 653381 - DNA, 15 bp, Homo sapiens
actgcccagaaaact

SEQ ID NO: 653382 - DNA, 15 bp, Homo sapiens
ctgcccagaaaacta

SEQ ID NO: 653383 - DNA, 15 bp, Homo sapiens
tgcccagaaaactac

SEQ ID NO: 653384 - DNA, 15 bp, Homo sapiens
gcccagaaaactact

SEQ ID NO: 653385 - DNA, 15 bp, Homo sapiens
cccagaaaactactc

SEQ ID NO: 653386 - DNA, 15 bp, Homo sapiens
ccagaaaactactcc

SEQ ID NO: 653387 - DNA, 15 bp, Homo sapiens
cagaaaactactccc

SEQ ID NO: 653388 - DNA, 15 bp, Homo sapiens
agaaaactactccca

SEQ ID NO: 653389 - DNA, 15 bp, Homo sapiens
gaaaactactcccag

SEQ ID NO: 653390 - DNA, 15 bp, Homo sapiens
aaaactactcccaga

SEQ ID NO: 653391 - DNA, 15 bp, Homo sapiens
aaactactcccagac

SEQ ID NO: 653392 - DNA, 15 bp, Homo sapiens
aactactcccagacc

SEQ ID NO: 653393 - DNA, 15 bp, Homo sapiens
actactcccagacct

SEQ ID NO: 653394 - DNA, 15 bp, Homo sapiens
ctactcccagacctg

SEQ ID NO: 653395 - DNA, 15 bp, Homo sapiens
tactcccagacctgt

SEQ ID NO: 653396 - DNA, 15 bp, Homo sapiens
actcccagacctgtc

SEQ ID NO: 653397 - DNA, 15 bp, Homo sapiens
ctcccagacctgtcg

SEQ ID NO: 653398 - DNA, 15 bp, Homo sapiens
tcccagacctgtcgt

SEQ ID NO: 653399 - DNA, 15 bp, Homo sapiens
cccagacctgtcgtt

SEQ ID NO: 653400 - DNA, 15 bp, Homo sapiens
ccagacctgtcgttc

SEQ ID NO: 653401 - DNA, 15 bp, Homo sapiens
cagacctgtcgttca

SEQ ID NO: 653402 - DNA, 15 bp, Homo sapiens
agacctgtcgttcat

SEQ ID NO: 653403 - DNA, 15 bp, Homo sapiens
gacctgtcgttcatt

SEQ ID NO: 653404 - DNA, 15 bp, Homo sapiens
acctgtcgttcatta

SEQ ID NO: 653405 - DNA, 15 bp, Homo sapiens
cctgtcgttcattag

SEQ ID NO: 653406 - DNA, 15 bp, Homo sapiens
ctgtcgttcattagt

SEQ ID NO: 653407 - DNA, 15 bp, Homo sapiens
tgtcgttcattagtt

SEQ ID NO: 653408 - DNA, 15 bp, Homo sapiens
gtcgttcattagttg

SEQ ID NO: 653409 - DNA, 15 bp, Homo sapiens
tcgttcattagttgt

SEQ ID NO: 653410 - DNA, 15 bp, Homo sapiens
cgttcattagttgta

SEQ ID NO: 653411 - DNA, 15 bp, Homo sapiens
gttcattagttgtag

SEQ ID NO: 653412 - DNA, 15 bp, Homo sapiens
ttcattagttgtagg

SEQ ID NO: 653413 - DNA, 15 bp, Homo sapiens
tcattagttgtagga

SEQ ID NO: 653414 - DNA, 15 bp, Homo sapiens
cattagttgtaggag

SEQ ID NO: 653415 - DNA, 15 bp, Homo sapiens
attagttgtaggagt

SEQ ID NO: 653416 - DNA, 15 bp, Homo sapiens
ttagttgtaggagtt

SEQ ID NO: 653417 - DNA, 15 bp, Homo sapiens
tagttgtaggagttt

SEQ ID NO: 653418 - DNA, 15 bp, Homo sapiens
agttgtaggagtttg

SEQ ID NO: 653419 - DNA, 15 bp, Homo sapiens
gttgtaggagtttgg

SEQ ID NO: 653420 - DNA, 15 bp, Homo sapiens
ttgtaggagtttggc

SEQ ID NO: 653421 - DNA, 15 bp, Homo sapiens
tgtaggagtttggca

SEQ ID NO: 653422 - DNA, 15 bp, Homo sapiens
gtaggagtttggcag

SEQ ID NO: 653423 - DNA, 15 bp, Homo sapiens
taggagtttggcagg

SEQ ID NO: 653424 - DNA, 15 bp, Homo sapiens
aggagtttggcaggc

SEQ ID NO: 653425 - DNA, 15 bp, Homo sapiens
ggagtttggcaggca

SEQ ID NO: 653426 - DNA, 15 bp, Homo sapiens
gagtttggcaggcat

SEQ ID NO: 653427 - DNA, 15 bp, Homo sapiens
agtttggcaggcatt

SEQ ID NO: 653428 - DNA, 15 bp, Homo sapiens
gtttggcaggcattt

SEQ ID NO: 653429 - DNA, 15 bp, Homo sapiens
tttggcaggcattta

SEQ ID NO: 653430 - DNA, 15 bp, Homo sapiens
ttggcaggcatttaa

SEQ ID NO: 653431 - DNA, 15 bp, Homo sapiens
tggcaggcatttaaa

SEQ ID NO: 653432 - DNA, 15 bp, Homo sapiens
ggcaggcatttaaac

SEQ ID NO: 653433 - DNA, 15 bp, Homo sapiens
gcaggcatttaaact

SEQ ID NO: 653434 - DNA, 15 bp, Homo sapiens
caggcatttaaactt

SEQ ID NO: 653435 - DNA, 15 bp, Homo sapiens
aggcatttaaacttc

SEQ ID NO: 653436 - DNA, 15 bp, Homo sapiens
ggcatttaaacttcc

SEQ ID NO: 653437 - DNA, 15 bp, Homo sapiens
gcatttaaacttcct

SEQ ID NO: 653438 - DNA, 15 bp, Homo sapiens
catttaaacttcctg

SEQ ID NO: 653439 - DNA, 15 bp, Homo sapiens
atttaaacttcctgg

SEQ ID NO: 653440 - DNA, 15 bp, Homo sapiens
tttaaacttcctggg

SEQ ID NO: 653441 - DNA, 15 bp, Homo sapiens
ttaaacttcctgggt

SEQ ID NO: 653442 - DNA, 15 bp, Homo sapiens
taaacttcctgggtc

SEQ ID NO: 653443 - DNA, 15 bp, Homo sapiens
aaacttcctgggtct

SEQ ID NO: 653444 - DNA, 15 bp, Homo sapiens
aacttcctgggtcta

SEQ ID NO: 653445 - DNA, 15 bp, Homo sapiens
acttcctgggtctaa

SEQ ID NO: 653446 - DNA, 15 bp, Homo sapiens
cttcctgggtctaaa

SEQ ID NO: 653447 - DNA, 15 bp, Homo sapiens
ttcctgggtctaaac

SEQ ID NO: 653448 - DNA, 15 bp, Homo sapiens
tcctgggtctaaacg

SEQ ID NO: 653449 - DNA, 15 bp, Homo sapiens
cctgggtctaaacgt

SEQ ID NO: 653450 - DNA, 15 bp, Homo sapiens
ctgggtctaaacgtc

SEQ ID NO: 653451 - DNA, 15 bp, Homo sapiens
tgggtctaaacgtcc

SEQ ID NO: 653452 - DNA, 15 bp, Homo sapiens
gggtctaaacgtcct

SEQ ID NO: 653453 - DNA, 15 bp, Homo sapiens
ggtctaaacgtcctt

SEQ ID NO: 653454 - DNA, 15 bp, Homo sapiens
gtctaaacgtccttg

SEQ ID NO: 653455 - DNA, 15 bp, Homo sapiens
tctaaacgtccttgt

SEQ ID NO: 653456 - DNA, 15 bp, Homo sapiens
ctaaacgtccttgtc

SEQ ID NO: 653457 - DNA, 15 bp, Homo sapiens
taaacgtccttgtcc

SEQ ID NO: 653458 - DNA, 15 bp, Homo sapiens
aaacgtccttgtcca

SEQ ID NO: 653459 - DNA, 15 bp, Homo sapiens
aacgtccttgtccat

SEQ ID NO: 653460 - DNA, 15 bp, Homo sapiens
acgtccttgtccata

SEQ ID NO: 653461 - DNA, 15 bp, Homo sapiens
cgtccttgtccatag

SEQ ID NO: 653462 - DNA, 15 bp, Homo sapiens
gtccttgtccataga

SEQ ID NO: 653463 - DNA, 15 bp, Homo sapiens
tccttgtccatagaa

SEQ ID NO: 653464 - DNA, 15 bp, Homo sapiens
ccttgtccatagaac

SEQ ID NO: 653465 - DNA, 15 bp, Homo sapiens
cttgtccatagaaca

SEQ ID NO: 653466 - DNA, 15 bp, Homo sapiens
ttgtccatagaacaa

SEQ ID NO: 653467 - DNA, 15 bp, Homo sapiens
tgtccatagaacaag

SEQ ID NO: 653468 - DNA, 15 bp, Homo sapiens
gtccatagaacaagg

SEQ ID NO: 653469 - DNA, 15 bp, Homo sapiens
tccatagaacaaggg

SEQ ID NO: 653470 - DNA, 15 bp, Homo sapiens
ccatagaacaaggga

SEQ ID NO: 653471 - DNA, 15 bp, Homo sapiens
catagaacaagggaa

SEQ ID NO: 653472 - DNA, 15 bp, Homo sapiens
atagaacaagggaat

SEQ ID NO: 653473 - DNA, 15 bp, Homo sapiens
tagaacaagggaatt

SEQ ID NO: 653474 - DNA, 15 bp, Homo sapiens
agaacaagggaattt

SEQ ID NO: 653475 - DNA, 15 bp, Homo sapiens
gaacaagggaatttt

SEQ ID NO: 653476 - DNA, 15 bp, Homo sapiens
aacaagggaatttta

SEQ ID NO: 653477 - DNA, 15 bp, Homo sapiens
acaagggaattttat

SEQ ID NO: 653478 - DNA, 15 bp, Homo sapiens
caagggaattttatt

SEQ ID NO: 653479 - DNA, 15 bp, Homo sapiens
aagggaattttatta

SEQ ID NO: 653480 - DNA, 15 bp, Homo sapiens
agggaattttattaa

SEQ ID NO: 653481 - DNA, 15 bp, Homo sapiens
gggaattttattaaa

SEQ ID NO: 653482 - DNA, 15 bp, Homo sapiens
ggaattttattaaaa

SEQ ID NO: 653483 - DNA, 15 bp, Homo sapiens
gaattttattaaaat

SEQ ID NO: 653484 - DNA, 15 bp, Homo sapiens
aattttattaaaata

SEQ ID NO: 653485 - DNA, 15 bp, Homo sapiens
attttattaaaataa

SEQ ID NO: 653486 - DNA, 15 bp, Homo sapiens
ttttattaaaataaa

SEQ ID NO: 653487 - DNA, 15 bp, Homo sapiens
tttattaaaataaat

SEQ ID NO: 653488 - DNA, 15 bp, Homo sapiens
ttattaaaataaatg

SEQ ID NO: 653489 - DNA, 15 bp, Homo sapiens
tattaaaataaatga

SEQ ID NO: 653490 - DNA, 15 bp, Homo sapiens
attaaaataaatgac

SEQ ID NO: 653491 - DNA, 15 bp, Homo sapiens
ttaaaataaatgacc

SEQ ID NO: 653492 - DNA, 15 bp, Homo sapiens
taaaataaatgacct

SEQ ID NO: 653493 - DNA, 15 bp, Homo sapiens
aaaataaatgacctc

SEQ ID NO: 653494 - DNA, 15 bp, Homo sapiens
aaataaatgacctct

SEQ ID NO: 653495 - DNA, 15 bp, Homo sapiens
aataaatgacctctt

SEQ ID NO: 653496 - DNA, 15 bp, Homo sapiens
ataaatgacctcttc

SEQ ID NO: 653497 - DNA, 15 bp, Homo sapiens
taaatgacctcttct

SEQ ID NO: 653498 - DNA, 15 bp, Homo sapiens
aaatgacctcttcta

SEQ ID NO: 653499 - DNA, 15 bp, Homo sapiens
aatgacctcttctag

SEQ ID NO: 653500 - DNA, 15 bp, Homo sapiens
atgacctcttctagc

SEQ ID NO: 653501 - DNA, 15 bp, Homo sapiens
tgacctcttctagct

SEQ ID NO: 653502 - DNA, 15 bp, Homo sapiens
gacctcttctagctt

SEQ ID NO: 653503 - DNA, 15 bp, Homo sapiens
acctcttctagcttt

SEQ ID NO: 653504 - DNA, 15 bp, Homo sapiens
cctcttctagcttta

SEQ ID NO: 653505 - DNA, 15 bp, Homo sapiens
ctcttctagctttaa

SEQ ID NO: 653506 - DNA, 15 bp, Homo sapiens
tcttctagctttaac

SEQ ID NO: 653507 - DNA, 15 bp, Homo sapiens
cttctagctttaaca

SEQ ID NO: 653508 - DNA, 15 bp, Homo sapiens
ttctagctttaacag

SEQ ID NO: 653509 - DNA, 15 bp, Homo sapiens
tctagctttaacaga

SEQ ID NO: 653510 - DNA, 15 bp, Homo sapiens
ctagctttaacagac

SEQ ID NO: 653511 - DNA, 15 bp, Homo sapiens
tagctttaacagact

SEQ ID NO: 653512 - DNA, 15 bp, Homo sapiens
agctttaacagactc

SEQ ID NO: 653513 - DNA, 15 bp, Homo sapiens
gctttaacagactca

SEQ ID NO: 653514 - DNA, 15 bp, Homo sapiens
ctttaacagactcat

SEQ ID NO: 653515 - DNA, 15 bp, Homo sapiens
tttaacagactcata

SEQ ID NO: 653516 - DNA, 15 bp, Homo sapiens
ttaacagactcatag

SEQ ID NO: 653517 - DNA, 15 bp, Homo sapiens
taacagactcatagt

SEQ ID NO: 653518 - DNA, 15 bp, Homo sapiens
aacagactcatagtc

SEQ ID NO: 653519 - DNA, 15 bp, Homo sapiens
acagactcatagtct

SEQ ID NO: 653520 - DNA, 15 bp, Homo sapiens
cagactcatagtcta

SEQ ID NO: 653521 - DNA, 15 bp, Homo sapiens
agactcatagtctag

SEQ ID NO: 653522 - DNA, 15 bp, Homo sapiens
gactcatagtctagg

SEQ ID NO: 653523 - DNA, 15 bp, Homo sapiens
actcatagtctaggt

SEQ ID NO: 653524 - DNA, 15 bp, Homo sapiens
ctcatagtctaggtt

SEQ ID NO: 653525 - DNA, 15 bp, Homo sapiens
tcatagtctaggttg

SEQ ID NO: 653526 - DNA, 15 bp, Homo sapiens
catagtctaggttgt

SEQ ID NO: 653527 - DNA, 15 bp, Homo sapiens
atagtctaggttgta

SEQ ID NO: 653528 - DNA, 15 bp, Homo sapiens
tagtctaggttgtat

SEQ ID NO: 653529 - DNA, 15 bp, Homo sapiens
agtctaggttgtatt

SEQ ID NO: 653530 - DNA, 15 bp, Homo sapiens
gtctaggttgtattt

SEQ ID NO: 653531 - DNA, 15 bp, Homo sapiens
tctaggttgtattta

SEQ ID NO: 653532 - DNA, 15 bp, Homo sapiens
ctaggttgtatttaa

SEQ ID NO: 653533 - DNA, 15 bp, Homo sapiens
taggttgtatttaac

SEQ ID NO: 653534 - DNA, 15 bp, Homo sapiens
aggttgtatttaaca

SEQ ID NO: 653535 - DNA, 15 bp, Homo sapiens
ggttgtatttaacaa

SEQ ID NO: 653536 - DNA, 15 bp, Homo sapiens
gttgtatttaacaaa

SEQ ID NO: 653537 - DNA, 15 bp, Homo sapiens
ttgtatttaacaaag

SEQ ID NO: 653538 - DNA, 15 bp, Homo sapiens
tgtatttaacaaagc

SEQ ID NO: 653539 - DNA, 15 bp, Homo sapiens
gtatttaacaaagct

SEQ ID NO: 653540 - DNA, 15 bp, Homo sapiens
tatttaacaaagctc

SEQ ID NO: 653541 - DNA, 15 bp, Homo sapiens
atttaacaaagctct

SEQ ID NO: 653542 - DNA, 15 bp, Homo sapiens
tttaacaaagctctg

SEQ ID NO: 653543 - DNA, 15 bp, Homo sapiens
ttaacaaagctctgg

SEQ ID NO: 653544 - DNA, 15 bp, Homo sapiens
taacaaagctctggt

SEQ ID NO: 653545 - DNA, 15 bp, Homo sapiens
aacaaagctctggtg

SEQ ID NO: 653546 - DNA, 15 bp, Homo sapiens
acaaagctctggtgc

SEQ ID NO: 653547 - DNA, 15 bp, Homo sapiens
caaagctctggtgct

SEQ ID NO: 653548 - DNA, 15 bp, Homo sapiens
aaagctctggtgcta

SEQ ID NO: 653549 - DNA, 15 bp, Homo sapiens
aagctctggtgctat

SEQ ID NO: 653550 - DNA, 15 bp, Homo sapiens
agctctggtgctatt

SEQ ID NO: 653551 - DNA, 15 bp, Homo sapiens
gctctggtgctattc

SEQ ID NO: 653552 - DNA, 15 bp, Homo sapiens
ctctggtgctattca

SEQ ID NO: 653553 - DNA, 15 bp, Homo sapiens
tctggtgctattcaa

SEQ ID NO: 653554 - DNA, 15 bp, Homo sapiens
ctggtgctattcaag

SEQ ID NO: 653555 - DNA, 15 bp, Homo sapiens
tggtgctattcaaga

SEQ ID NO: 653556 - DNA, 15 bp, Homo sapiens
ggtgctattcaagaa

SEQ ID NO: 653557 - DNA, 15 bp, Homo sapiens
gtgctattcaagaaa

SEQ ID NO: 653558 - DNA, 15 bp, Homo sapiens
tgctattcaagaaag

SEQ ID NO: 653559 - DNA, 15 bp, Homo sapiens
gctattcaagaaaga

SEQ ID NO: 653560 - DNA, 15 bp, Homo sapiens
ctattcaagaaagaa

SEQ ID NO: 653561 - DNA, 15 bp, Homo sapiens
tattcaagaaagaac

SEQ ID NO: 653562 - DNA, 15 bp, Homo sapiens
attcaagaaagaaca

SEQ ID NO: 653563 - DNA, 15 bp, Homo sapiens
ttcaagaaagaacaa

SEQ ID NO: 653564 - DNA, 15 bp, Homo sapiens
tcaagaaagaacaac

SEQ ID NO: 653565 - DNA, 15 bp, Homo sapiens
caagaaagaacaacc

SEQ ID NO: 653566 - DNA, 15 bp, Homo sapiens
aagaaagaacaacct

SEQ ID NO: 653567 - DNA, 15 bp, Homo sapiens
agaaagaacaacctt

SEQ ID NO: 653568 - DNA, 15 bp, Homo sapiens
gaaagaacaaccttg

SEQ ID NO: 653569 - DNA, 15 bp, Homo sapiens
aaagaacaaccttgg

SEQ ID NO: 653570 - DNA, 15 bp, Homo sapiens
aagaacaaccttgga

SEQ ID NO: 653571 - DNA, 15 bp, Homo sapiens
agaacaaccttggat

SEQ ID NO: 653572 - DNA, 15 bp, Homo sapiens
gaacaaccttggatt

SEQ ID NO: 653573 - DNA, 15 bp, Homo sapiens
aacaaccttggattt

SEQ ID NO: 653574 - DNA, 15 bp, Homo sapiens
acaaccttggattta

SEQ ID NO: 653575 - DNA, 15 bp, Homo sapiens
caaccttggatttaa

SEQ ID NO: 653576 - DNA, 15 bp, Homo sapiens
aaccttggatttaag

SEQ ID NO: 653577 - DNA, 15 bp, Homo sapiens
accttggatttaagt

SEQ ID NO: 653578 - DNA, 15 bp, Homo sapiens
ccttggatttaagta

SEQ ID NO: 653579 - DNA, 15 bp, Homo sapiens
cttggatttaagtag

SEQ ID NO: 653580 - DNA, 15 bp, Homo sapiens
ttggatttaagtagt

SEQ ID NO: 653581 - DNA, 15 bp, Homo sapiens
tggatttaagtagtg

SEQ ID NO: 653582 - DNA, 15 bp, Homo sapiens
ggatttaagtagtga

SEQ ID NO: 653583 - DNA, 15 bp, Homo sapiens
gatttaagtagtgac

SEQ ID NO: 653584 - DNA, 15 bp, Homo sapiens
atttaagtagtgacc

SEQ ID NO: 653585 - DNA, 15 bp, Homo sapiens
tttaagtagtgacca

SEQ ID NO: 653586 - DNA, 15 bp, Homo sapiens
ttaagtagtgaccaa

SEQ ID NO: 653587 - DNA, 15 bp, Homo sapiens
taagtagtgaccaaa

SEQ ID NO: 653588 - DNA, 15 bp, Homo sapiens
aagtagtgaccaaat

SEQ ID NO: 653589 - DNA, 15 bp, Homo sapiens
agtagtgaccaaata

SEQ ID NO: 653590 - DNA, 15 bp, Homo sapiens
gtagtgaccaaataa

SEQ ID NO: 653591 - DNA, 15 bp, Homo sapiens
tagtgaccaaataac

SEQ ID NO: 653592 - DNA, 15 bp, Homo sapiens
agtgaccaaataaca

SEQ ID NO: 653593 - DNA, 15 bp, Homo sapiens
gtgaccaaataacat

SEQ ID NO: 653594 - DNA, 15 bp, Homo sapiens
tgaccaaataacatt

SEQ ID NO: 653595 - DNA, 15 bp, Homo sapiens
gaccaaataacattt

SEQ ID NO: 653596 - DNA, 15 bp, Homo sapiens
accaaataacattta

SEQ ID NO: 653597 - DNA, 15 bp, Homo sapiens
ccaaataacatttag

SEQ ID NO: 653598 - DNA, 15 bp, Homo sapiens
caaataacatttagt

SEQ ID NO: 653599 - DNA, 15 bp, Homo sapiens
aaataacatttagtc

SEQ ID NO: 653600 - DNA, 15 bp, Homo sapiens
aataacatttagtct

SEQ ID NO: 653601 - DNA, 15 bp, Homo sapiens
ataacatttagtctc

SEQ ID NO: 653602 - DNA, 15 bp, Homo sapiens
taacatttagtctct

SEQ ID NO: 653603 - DNA, 15 bp, Homo sapiens
aacatttagtctctt

SEQ ID NO: 653604 - DNA, 15 bp, Homo sapiens
acatttagtctcttt

SEQ ID NO: 653605 - DNA, 15 bp, Homo sapiens
catttagtctctttt

SEQ ID NO: 653606 - DNA, 15 bp, Homo sapiens
atttagtctctttta

SEQ ID NO: 653607 - DNA, 15 bp, Homo sapiens
tttagtctcttttat

SEQ ID NO: 653608 - DNA, 15 bp, Homo sapiens
ttagtctcttttatc

SEQ ID NO: 653609 - DNA, 15 bp, Homo sapiens
tagtctcttttatct

SEQ ID NO: 653610 - DNA, 15 bp, Homo sapiens
agtctcttttatctt

SEQ ID NO: 653611 - DNA, 15 bp, Homo sapiens
gtctcttttatctta

SEQ ID NO: 653612 - DNA, 15 bp, Homo sapiens
tctcttttatcttat

SEQ ID NO: 653613 - DNA, 15 bp, Homo sapiens
ctcttttatcttatt

SEQ ID NO: 653614 - DNA, 15 bp, Homo sapiens
tcttttatcttattt

SEQ ID NO: 653615 - DNA, 15 bp, Homo sapiens
cttttatcttattta

SEQ ID NO: 653616 - DNA, 15 bp, Homo sapiens
ttttatcttatttac

SEQ ID NO: 653617 - DNA, 15 bp, Homo sapiens
tttatcttatttaca

SEQ ID NO: 653618 - DNA, 15 bp, Homo sapiens
ttatcttatttacat

SEQ ID NO: 653619 - DNA, 15 bp, Homo sapiens
tatcttatttacata

SEQ ID NO: 653620 - DNA, 15 bp, Homo sapiens
atcttatttacatag

SEQ ID NO: 653621 - DNA, 15 bp, Homo sapiens
tcttatttacatagt

SEQ ID NO: 653622 - DNA, 15 bp, Homo sapiens
cttatttacatagtt

SEQ ID NO: 653623 - DNA, 15 bp, Homo sapiens
ttatttacatagttt

SEQ ID NO: 653624 - DNA, 15 bp, Homo sapiens
tatttacatagtttc

SEQ ID NO: 653625 - DNA, 15 bp, Homo sapiens
atttacatagtttct

SEQ ID NO: 653626 - DNA, 15 bp, Homo sapiens
tttacatagtttctg

SEQ ID NO: 653627 - DNA, 15 bp, Homo sapiens
ttacatagtttctgt

SEQ ID NO: 653628 - DNA, 15 bp, Homo sapiens
tacatagtttctgtt

SEQ ID NO: 653629 - DNA, 15 bp, Homo sapiens
acatagtttctgttg

SEQ ID NO: 653630 - DNA, 15 bp, Homo sapiens
catagtttctgttgg

SEQ ID NO: 653631 - DNA, 15 bp, Homo sapiens
atagtttctgttggt

SEQ ID NO: 653632 - DNA, 15 bp, Homo sapiens
tagtttctgttggtc

SEQ ID NO: 653633 - DNA, 15 bp, Homo sapiens
agtttctgttggtcc

SEQ ID NO: 653634 - DNA, 15 bp, Homo sapiens
gtttctgttggtccc

SEQ ID NO: 653635 - DNA, 15 bp, Homo sapiens
tttctgttggtcccc

SEQ ID NO: 653636 - DNA, 15 bp, Homo sapiens
ttctgttggtcccca

SEQ ID NO: 653637 - DNA, 15 bp, Homo sapiens
tctgttggtccccag

SEQ ID NO: 653638 - DNA, 15 bp, Homo sapiens
ctgttggtccccaga

SEQ ID NO: 653639 - DNA, 15 bp, Homo sapiens
tgttggtccccagag

SEQ ID NO: 653640 - DNA, 15 bp, Homo sapiens
gttggtccccagaga

SEQ ID NO: 653641 - DNA, 15 bp, Homo sapiens
ttggtccccagagat

SEQ ID NO: 653642 - DNA, 15 bp, Homo sapiens
tggtccccagagata

SEQ ID NO: 653643 - DNA, 15 bp, Homo sapiens
ggtccccagagatag

SEQ ID NO: 653644 - DNA, 15 bp, Homo sapiens
gtccccagagatagg

SEQ ID NO: 653645 - DNA, 15 bp, Homo sapiens
tccccagagatagga

SEQ ID NO: 653646 - DNA, 15 bp, Homo sapiens
ccccagagataggag

SEQ ID NO: 653647 - DNA, 15 bp, Homo sapiens
cccagagataggaga

SEQ ID NO: 653648 - DNA, 15 bp, Homo sapiens
ccagagataggagat

SEQ ID NO: 653649 - DNA, 15 bp, Homo sapiens
cagagataggagatt

SEQ ID NO: 653650 - DNA, 15 bp, Homo sapiens
agagataggagattc

SEQ ID NO: 653651 - DNA, 15 bp, Homo sapiens
gagataggagattcc

SEQ ID NO: 653652 - DNA, 15 bp, Homo sapiens
agataggagattcca

SEQ ID NO: 653653 - DNA, 15 bp, Homo sapiens
gataggagattccac

SEQ ID NO: 653654 - DNA, 15 bp, Homo sapiens
ataggagattccacc

SEQ ID NO: 653655 - DNA, 15 bp, Homo sapiens
taggagattccaccc

SEQ ID NO: 653656 - DNA, 15 bp, Homo sapiens
aggagattccaccca

SEQ ID NO: 653657 - DNA, 15 bp, Homo sapiens
ggagattccacccag

SEQ ID NO: 653658 - DNA, 15 bp, Homo sapiens
gagattccacccagt

SEQ ID NO: 653659 - DNA, 15 bp, Homo sapiens
agattccacccagtt

SEQ ID NO: 653660 - DNA, 15 bp, Homo sapiens
gattccacccagtta

SEQ ID NO: 653661 - DNA, 15 bp, Homo sapiens
attccacccagttaa

SEQ ID NO: 653662 - DNA, 15 bp, Homo sapiens
ttccacccagttaaa

SEQ ID NO: 653663 - DNA, 15 bp, Homo sapiens
tccacccagttaaag

SEQ ID NO: 653664 - DNA, 15 bp, Homo sapiens
ccacccagttaaagt

SEQ ID NO: 653665 - DNA, 15 bp, Homo sapiens
cacccagttaaagta

SEQ ID NO: 653666 - DNA, 15 bp, Homo sapiens
acccagttaaagtaa

SEQ ID NO: 653667 - DNA, 15 bp, Homo sapiens
cccagttaaagtaag

SEQ ID NO: 653668 - DNA, 15 bp, Homo sapiens
ccagttaaagtaaga

SEQ ID NO: 653669 - DNA, 15 bp, Homo sapiens
cagttaaagtaagag

SEQ ID NO: 653670 - DNA, 15 bp, Homo sapiens
agttaaagtaagagg

SEQ ID NO: 653671 - DNA, 15 bp, Homo sapiens
gttaaagtaagagga

SEQ ID NO: 653672 - DNA, 15 bp, Homo sapiens
ttaaagtaagaggag

SEQ ID NO: 653673 - DNA, 15 bp, Homo sapiens
taaagtaagaggagc

SEQ ID NO: 653674 - DNA, 15 bp, Homo sapiens
aaagtaagaggagcc

SEQ ID NO: 653675 - DNA, 15 bp, Homo sapiens
aagtaagaggagcca

SEQ ID NO: 653676 - DNA, 15 bp, Homo sapiens
agtaagaggagccag

SEQ ID NO: 653677 - DNA, 15 bp, Homo sapiens
gtaagaggagccaga

SEQ ID NO: 653678 - DNA, 15 bp, Homo sapiens
taagaggagccagat

SEQ ID NO: 653679 - DNA, 15 bp, Homo sapiens
aagaggagccagatt

SEQ ID NO: 653680 - DNA, 15 bp, Homo sapiens
agaggagccagattc

SEQ ID NO: 653681 - DNA, 15 bp, Homo sapiens
gaggagccagattct

SEQ ID NO: 653682 - DNA, 15 bp, Homo sapiens
aggagccagattctt

SEQ ID NO: 653683 - DNA, 15 bp, Homo sapiens
ggagccagattcttc

SEQ ID NO: 653684 - DNA, 15 bp, Homo sapiens
gagccagattcttcg

SEQ ID NO: 653685 - DNA, 15 bp, Homo sapiens
agccagattcttcgt

SEQ ID NO: 653686 - DNA, 15 bp, Homo sapiens
gccagattcttcgtt

SEQ ID NO: 653687 - DNA, 15 bp, Homo sapiens
ccagattcttcgttt

SEQ ID NO: 653688 - DNA, 15 bp, Homo sapiens
cagattcttcgtttt

SEQ ID NO: 653689 - DNA, 15 bp, Homo sapiens
agattcttcgttttg

SEQ ID NO: 653690 - DNA, 15 bp, Homo sapiens
gattcttcgttttgt

SEQ ID NO: 653691 - DNA, 15 bp, Homo sapiens
attcttcgttttgtt

SEQ ID NO: 653692 - DNA, 15 bp, Homo sapiens
ttcttcgttttgttt

SEQ ID NO: 653693 - DNA, 15 bp, Homo sapiens
tcttcgttttgtttt

SEQ ID NO: 653694 - DNA, 15 bp, Homo sapiens
cttcgttttgttttg

SEQ ID NO: 653695 - DNA, 15 bp, Homo sapiens
ttcgttttgttttgc

SEQ ID NO: 653696 - DNA, 15 bp, Homo sapiens
tcgttttgttttgct

SEQ ID NO: 653697 - DNA, 15 bp, Homo sapiens
cgttttgttttgctt

SEQ ID NO: 653698 - DNA, 15 bp, Homo sapiens
gttttgttttgcttt

SEQ ID NO: 653699 - DNA, 15 bp, Homo sapiens
ttttgttttgcttta

SEQ ID NO: 653700 - DNA, 15 bp, Homo sapiens
tttgttttgctttaa

SEQ ID NO: 653701 - DNA, 15 bp, Homo sapiens
ttgttttgctttaag

SEQ ID NO: 653702 - DNA, 15 bp, Homo sapiens
tgttttgctttaagc

SEQ ID NO: 653703 - DNA, 15 bp, Homo sapiens
gttttgctttaagct

SEQ ID NO: 653704 - DNA, 15 bp, Homo sapiens
ttttgctttaagctg

SEQ ID NO: 653705 - DNA, 15 bp, Homo sapiens
tttgctttaagctgg

SEQ ID NO: 653706 - DNA, 15 bp, Homo sapiens
ttgctttaagctgga

SEQ ID NO: 653707 - DNA, 15 bp, Homo sapiens
tgctttaagctggat

SEQ ID NO: 653708 - DNA, 15 bp, Homo sapiens
gctttaagctggatt

SEQ ID NO: 653709 - DNA, 15 bp, Homo sapiens
ctttaagctggattt

SEQ ID NO: 653710 - DNA, 15 bp, Homo sapiens
tttaagctggatttc

SEQ ID NO: 653711 - DNA, 15 bp, Homo sapiens
ttaagctggatttca

SEQ ID NO: 653712 - DNA, 15 bp, Homo sapiens
taagctggatttcaa

SEQ ID NO: 653713 - DNA, 15 bp, Homo sapiens
aagctggatttcaac

SEQ ID NO: 653714 - DNA, 15 bp, Homo sapiens
agctggatttcaacc

SEQ ID NO: 653715 - DNA, 15 bp, Homo sapiens
gctggatttcaaccc

SEQ ID NO: 653716 - DNA, 15 bp, Homo sapiens
ctggatttcaacccc

SEQ ID NO: 653717 - DNA, 15 bp, Homo sapiens
tggatttcaacccct

SEQ ID NO: 653718 - DNA, 15 bp, Homo sapiens
ggatttcaacccctc

SEQ ID NO: 653719 - DNA, 15 bp, Homo sapiens
gatttcaacccctcg

SEQ ID NO: 653720 - DNA, 15 bp, Homo sapiens
atttcaacccctcgg

SEQ ID NO: 653721 - DNA, 15 bp, Homo sapiens
tttcaacccctcggg

SEQ ID NO: 653722 - DNA, 15 bp, Homo sapiens
ttcaacccctcgggg

SEQ ID NO: 653723 - DNA, 15 bp, Homo sapiens
tcaacccctcgggga

SEQ ID NO: 653724 - DNA, 15 bp, Homo sapiens
caacccctcggggat

SEQ ID NO: 653725 - DNA, 15 bp, Homo sapiens
aacccctcggggatg

SEQ ID NO: 653726 - DNA, 15 bp, Homo sapiens
acccctcggggatgg

SEQ ID NO: 653727 - DNA, 15 bp, Homo sapiens
cccctcggggatgga

SEQ ID NO: 653728 - DNA, 15 bp, Homo sapiens
ccctcggggatggaa

SEQ ID NO: 653729 - DNA, 15 bp, Homo sapiens
cctcggggatggaat

SEQ ID NO: 653730 - DNA, 15 bp, Homo sapiens
ctcggggatggaata

SEQ ID NO: 653731 - DNA, 15 bp, Homo sapiens
tcggggatggaatag

SEQ ID NO: 653732 - DNA, 15 bp, Homo sapiens
cggggatggaataga

SEQ ID NO: 653733 - DNA, 15 bp, Homo sapiens
ggggatggaatagaa

SEQ ID NO: 653734 - DNA, 15 bp, Homo sapiens
gggatggaatagaag

SEQ ID NO: 653735 - DNA, 15 bp, Homo sapiens
ggatggaatagaagc

SEQ ID NO: 653736 - DNA, 15 bp, Homo sapiens
gatggaatagaagct

SEQ ID NO: 653737 - DNA, 15 bp, Homo sapiens
atggaatagaagctt

SEQ ID NO: 653738 - DNA, 15 bp, Homo sapiens
tggaatagaagctta

SEQ ID NO: 653739 - DNA, 15 bp, Homo sapiens
ggaatagaagcttag

SEQ ID NO: 653740 - DNA, 15 bp, Homo sapiens
gaatagaagcttaga

SEQ ID NO: 653741 - DNA, 15 bp, Homo sapiens
aatagaagcttagat

SEQ ID NO: 653742 - DNA, 15 bp, Homo sapiens
atagaagcttagata

SEQ ID NO: 653743 - DNA, 15 bp, Homo sapiens
tagaagcttagatat

SEQ ID NO: 653744 - DNA, 15 bp, Homo sapiens
agaagcttagatatg

SEQ ID NO: 653745 - DNA, 15 bp, Homo sapiens
gaagcttagatatga

SEQ ID NO: 653746 - DNA, 15 bp, Homo sapiens
aagcttagatatgac

SEQ ID NO: 653747 - DNA, 15 bp, Homo sapiens
agcttagatatgacc

SEQ ID NO: 653748 - DNA, 15 bp, Homo sapiens
gcttagatatgacca

SEQ ID NO: 653749 - DNA, 15 bp, Homo sapiens
cttagatatgaccaa

SEQ ID NO: 653750 - DNA, 15 bp, Homo sapiens
ttagatatgaccaaa

SEQ ID NO: 653751 - DNA, 15 bp, Homo sapiens
tagatatgaccaaat

SEQ ID NO: 653752 - DNA, 15 bp, Homo sapiens
agatatgaccaaata

SEQ ID NO: 653753 - DNA, 15 bp, Homo sapiens
gatatgaccaaatac

SEQ ID NO: 653754 - DNA, 15 bp, Homo sapiens
atatgaccaaataca

SEQ ID NO: 653755 - DNA, 15 bp, Homo sapiens
tatgaccaaatacat

SEQ ID NO: 653756 - DNA, 15 bp, Homo sapiens
atgaccaaatacatg

SEQ ID NO: 653757 - DNA, 15 bp, Homo sapiens
tgaccaaatacatgc

SEQ ID NO: 653758 - DNA, 15 bp, Homo sapiens
gaccaaatacatgca

SEQ ID NO: 653759 - DNA, 15 bp, Homo sapiens
accaaatacatgcag

SEQ ID NO: 653760 - DNA, 15 bp, Homo sapiens
ccaaatacatgcagg

SEQ ID NO: 653761 - DNA, 15 bp, Homo sapiens
caaatacatgcaggt

SEQ ID NO: 653762 - DNA, 15 bp, Homo sapiens
aaatacatgcaggtc

SEQ ID NO: 653763 - DNA, 15 bp, Homo sapiens
aatacatgcaggtct

SEQ ID NO: 653764 - DNA, 15 bp, Homo sapiens
atacatgcaggtctt

SEQ ID NO: 653765 - DNA, 15 bp, Homo sapiens
tacatgcaggtcttt

SEQ ID NO: 653766 - DNA, 15 bp, Homo sapiens
acatgcaggtctttt

SEQ ID NO: 653767 - DNA, 15 bp, Homo sapiens
catgcaggtcttttg

SEQ ID NO: 653768 - DNA, 15 bp, Homo sapiens
atgcaggtcttttgg

SEQ ID NO: 653769 - DNA, 15 bp, Homo sapiens
tgcaggtcttttgga

SEQ ID NO: 653770 - DNA, 15 bp, Homo sapiens
gcaggtcttttggac

SEQ ID NO: 653771 - DNA, 15 bp, Homo sapiens
caggtcttttggact

SEQ ID NO: 653772 - DNA, 15 bp, Homo sapiens
aggtcttttggacta

SEQ ID NO: 653773 - DNA, 15 bp, Homo sapiens
ggtcttttggactaa

SEQ ID NO: 653774 - DNA, 15 bp, Homo sapiens
gtcttttggactaag

SEQ ID NO: 653775 - DNA, 15 bp, Homo sapiens
tcttttggactaagg

SEQ ID NO: 653776 - DNA, 15 bp, Homo sapiens
cttttggactaagga

SEQ ID NO: 653777 - DNA, 15 bp, Homo sapiens
ttttggactaaggag

SEQ ID NO: 653778 - DNA, 15 bp, Homo sapiens
tttggactaaggagc

SEQ ID NO: 653779 - DNA, 15 bp, Homo sapiens
ttggactaaggagcc

SEQ ID NO: 653780 - DNA, 15 bp, Homo sapiens
tggactaaggagcca

SEQ ID NO: 653781 - DNA, 15 bp, Homo sapiens
ggactaaggagccaa

SEQ ID NO: 653782 - DNA, 15 bp, Homo sapiens
gactaaggagccaaa

SEQ ID NO: 653783 - DNA, 15 bp, Homo sapiens
actaaggagccaaag

SEQ ID NO: 653784 - DNA, 15 bp, Homo sapiens
ctaaggagccaaaga

SEQ ID NO: 653785 - DNA, 15 bp, Homo sapiens
taaggagccaaagaa

SEQ ID NO: 653786 - DNA, 15 bp, Homo sapiens
aaggagccaaagaag

SEQ ID NO: 653787 - DNA, 15 bp, Homo sapiens
aggagccaaagaagc

SEQ ID NO: 653788 - DNA, 15 bp, Homo sapiens
ggagccaaagaagca

SEQ ID NO: 653789 - DNA, 15 bp, Homo sapiens
gagccaaagaagcac

SEQ ID NO: 653790 - DNA, 15 bp, Homo sapiens
agccaaagaagcaca

SEQ ID NO: 653791 - DNA, 15 bp, Homo sapiens
gccaaagaagcacac

SEQ ID NO: 653792 - DNA, 15 bp, Homo sapiens
ccaaagaagcacacg

SEQ ID NO: 653793 - DNA, 15 bp, Homo sapiens
caaagaagcacacgc

SEQ ID NO: 653794 - DNA, 15 bp, Homo sapiens
aaagaagcacacgct

SEQ ID NO: 653795 - DNA, 15 bp, Homo sapiens
aagaagcacacgctt

SEQ ID NO: 653796 - DNA, 15 bp, Homo sapiens
agaagcacacgcttc

SEQ ID NO: 653797 - DNA, 15 bp, Homo sapiens
gaagcacacgcttca

SEQ ID NO: 653798 - DNA, 15 bp, Homo sapiens
aagcacacgcttcat

SEQ ID NO: 653799 - DNA, 15 bp, Homo sapiens
agcacacgcttcatg

SEQ ID NO: 653800 - DNA, 15 bp, Homo sapiens
gcacacgcttcatga

SEQ ID NO: 653801 - DNA, 15 bp, Homo sapiens
cacacgcttcatgaa

SEQ ID NO: 653802 - DNA, 15 bp, Homo sapiens
acacgcttcatgaaa

SEQ ID NO: 653803 - DNA, 15 bp, Homo sapiens
cacgcttcatgaaaa

SEQ ID NO: 653804 - DNA, 15 bp, Homo sapiens
acgcttcatgaaaac

SEQ ID NO: 653805 - DNA, 15 bp, Homo sapiens
cgcttcatgaaaaca

SEQ ID NO: 653806 - DNA, 15 bp, Homo sapiens
gcttcatgaaaacag

SEQ ID NO: 653807 - DNA, 15 bp, Homo sapiens
cttcatgaaaacaga

SEQ ID NO: 653808 - DNA, 15 bp, Homo sapiens
ttcatgaaaacagac

SEQ ID NO: 653809 - DNA, 15 bp, Homo sapiens
tcatgaaaacagact

SEQ ID NO: 653810 - DNA, 15 bp, Homo sapiens
catgaaaacagactg

SEQ ID NO: 653811 - DNA, 15 bp, Homo sapiens
atgaaaacagactgt

SEQ ID NO: 653812 - DNA, 15 bp, Homo sapiens
tgaaaacagactgtc

SEQ ID NO: 653813 - DNA, 15 bp, Homo sapiens
gaaaacagactgtca

SEQ ID NO: 653814 - DNA, 15 bp, Homo sapiens
aaaacagactgtcat

SEQ ID NO: 653815 - DNA, 15 bp, Homo sapiens
aaacagactgtcatt

SEQ ID NO: 653816 - DNA, 15 bp, Homo sapiens
aacagactgtcattt

SEQ ID NO: 653817 - DNA, 15 bp, Homo sapiens
acagactgtcatttt

SEQ ID NO: 653818 - DNA, 15 bp, Homo sapiens
cagactgtcattttt

SEQ ID NO: 653819 - DNA, 15 bp, Homo sapiens
agactgtcatttttc

SEQ ID NO: 653820 - DNA, 15 bp, Homo sapiens
gactgtcatttttct

SEQ ID NO: 653821 - DNA, 15 bp, Homo sapiens
actgtcatttttctt

SEQ ID NO: 653822 - DNA, 15 bp, Homo sapiens
ctgtcatttttcttt

SEQ ID NO: 653823 - DNA, 15 bp, Homo sapiens
tgtcatttttctttg

SEQ ID NO: 653824 - DNA, 15 bp, Homo sapiens
gtcatttttctttgt

SEQ ID NO: 653825 - DNA, 15 bp, Homo sapiens
tcatttttctttgtt

SEQ ID NO: 653826 - DNA, 15 bp, Homo sapiens
catttttctttgtta

SEQ ID NO: 653827 - DNA, 15 bp, Homo sapiens
atttttctttgttag

SEQ ID NO: 653828 - DNA, 15 bp, Homo sapiens
tttttctttgttagg

SEQ ID NO: 653829 - DNA, 15 bp, Homo sapiens
ttttctttgttagga

SEQ ID NO: 653830 - DNA, 15 bp, Homo sapiens
tttctttgttaggat

SEQ ID NO: 653831 - DNA, 15 bp, Homo sapiens
ttctttgttaggata

SEQ ID NO: 653832 - DNA, 15 bp, Homo sapiens
tctttgttaggatag

SEQ ID NO: 653833 - DNA, 15 bp, Homo sapiens
ctttgttaggataga

SEQ ID NO: 653834 - DNA, 15 bp, Homo sapiens
tttgttaggatagac

SEQ ID NO: 653835 - DNA, 15 bp, Homo sapiens
ttgttaggatagacc

SEQ ID NO: 653836 - DNA, 15 bp, Homo sapiens
tgttaggatagaccc

SEQ ID NO: 653837 - DNA, 15 bp, Homo sapiens
gttaggatagaccca

SEQ ID NO: 653838 - DNA, 15 bp, Homo sapiens
ttaggatagacccac

SEQ ID NO: 653839 - DNA, 15 bp, Homo sapiens
taggatagacccact

SEQ ID NO: 653840 - DNA, 15 bp, Homo sapiens
aggatagacccactg

SEQ ID NO: 653841 - DNA, 15 bp, Homo sapiens
ggatagacccactga

SEQ ID NO: 653842 - DNA, 15 bp, Homo sapiens
gatagacccactgac

SEQ ID NO: 653843 - DNA, 15 bp, Homo sapiens
atagacccactgaca

SEQ ID NO: 653844 - DNA, 15 bp, Homo sapiens
tagacccactgacag

SEQ ID NO: 653845 - DNA, 15 bp, Homo sapiens
agacccactgacagt

SEQ ID NO: 653846 - DNA, 15 bp, Homo sapiens
gacccactgacagtt

SEQ ID NO: 653847 - DNA, 15 bp, Homo sapiens
acccactgacagttc

SEQ ID NO: 653848 - DNA, 15 bp, Homo sapiens
cccactgacagttct

SEQ ID NO: 653849 - DNA, 15 bp, Homo sapiens
ccactgacagttctc

SEQ ID NO: 653850 - DNA, 15 bp, Homo sapiens
cactgacagttctca

SEQ ID NO: 653851 - DNA, 15 bp, Homo sapiens
actgacagttctcat

SEQ ID NO: 653852 - DNA, 15 bp, Homo sapiens
ctgacagttctcatc

SEQ ID NO: 653853 - DNA, 15 bp, Homo sapiens
tgacagttctcatct

SEQ ID NO: 653854 - DNA, 15 bp, Homo sapiens
gacagttctcatctt

SEQ ID NO: 653855 - DNA, 15 bp, Homo sapiens
acagttctcatcttt

SEQ ID NO: 653856 - DNA, 15 bp, Homo sapiens
cagttctcatcttta

SEQ ID NO: 653857 - DNA, 15 bp, Homo sapiens
agttctcatctttac

SEQ ID NO: 653858 - DNA, 15 bp, Homo sapiens
gttctcatctttaca

SEQ ID NO: 653859 - DNA, 15 bp, Homo sapiens
ttctcatctttacat

SEQ ID NO: 653860 - DNA, 15 bp, Homo sapiens
tctcatctttacatt

SEQ ID NO: 653861 - DNA, 15 bp, Homo sapiens
ctcatctttacattc

SEQ ID NO: 653862 - DNA, 15 bp, Homo sapiens
tcatctttacattct

SEQ ID NO: 653863 - DNA, 15 bp, Homo sapiens
catctttacattctc

SEQ ID NO: 653864 - DNA, 15 bp, Homo sapiens
atctttacattctct

SEQ ID NO: 653865 - DNA, 15 bp, Homo sapiens
tctttacattctctc

SEQ ID NO: 653866 - DNA, 15 bp, Homo sapiens
ctttacattctctca

SEQ ID NO: 653867 - DNA, 15 bp, Homo sapiens
tttacattctctcac

SEQ ID NO: 653868 - DNA, 15 bp, Homo sapiens
ttacattctctcact

SEQ ID NO: 653869 - DNA, 15 bp, Homo sapiens
tacattctctcactc

SEQ ID NO: 653870 - DNA, 15 bp, Homo sapiens
acattctctcactct

SEQ ID NO: 653871 - DNA, 15 bp, Homo sapiens
cattctctcactctc

SEQ ID NO: 653872 - DNA, 15 bp, Homo sapiens
attctctcactctcc

SEQ ID NO: 653873 - DNA, 15 bp, Homo sapiens
ttctctcactctcct

SEQ ID NO: 653874 - DNA, 15 bp, Homo sapiens
tctctcactctcctg

SEQ ID NO: 653875 - DNA, 15 bp, Homo sapiens
ctctcactctcctga

SEQ ID NO: 653876 - DNA, 15 bp, Homo sapiens
tctcactctcctgac

SEQ ID NO: 653877 - DNA, 15 bp, Homo sapiens
ctcactctcctgact

SEQ ID NO: 653878 - DNA, 15 bp, Homo sapiens
tcactctcctgactg

SEQ ID NO: 653879 - DNA, 15 bp, Homo sapiens
cactctcctgactgt

SEQ ID NO: 653880 - DNA, 15 bp, Homo sapiens
actctcctgactgtg

SEQ ID NO: 653881 - DNA, 15 bp, Homo sapiens
ctctcctgactgtga

SEQ ID NO: 653882 - DNA, 15 bp, Homo sapiens
tctcctgactgtgag

SEQ ID NO: 653883 - DNA, 15 bp, Homo sapiens
ctcctgactgtgagg

SEQ ID NO: 653884 - DNA, 15 bp, Homo sapiens
tcctgactgtgaggt

SEQ ID NO: 653885 - DNA, 15 bp, Homo sapiens
cctgactgtgaggtc

SEQ ID NO: 653886 - DNA, 15 bp, Homo sapiens
ctgactgtgaggtca

SEQ ID NO: 653887 - DNA, 15 bp, Homo sapiens
tgactgtgaggtcaa

SEQ ID NO: 653888 - DNA, 15 bp, Homo sapiens
gactgtgaggtcaag

SEQ ID NO: 653889 - DNA, 15 bp, Homo sapiens
actgtgaggtcaagt

SEQ ID NO: 653890 - DNA, 15 bp, Homo sapiens
ctgtgaggtcaagtg

SEQ ID NO: 653891 - DNA, 15 bp, Homo sapiens
tgtgaggtcaagtga

SEQ ID NO: 653892 - DNA, 15 bp, Homo sapiens
gtgaggtcaagtgag

SEQ ID NO: 653893 - DNA, 15 bp, Homo sapiens
tgaggtcaagtgagt

SEQ ID NO: 653894 - DNA, 15 bp, Homo sapiens
gaggtcaagtgagta

SEQ ID NO: 653895 - DNA, 15 bp, Homo sapiens
aggtcaagtgagtat

SEQ ID NO: 653896 - DNA, 15 bp, Homo sapiens
ggtcaagtgagtatg

SEQ ID NO: 653897 - DNA, 15 bp, Homo sapiens
gtcaagtgagtatgt

SEQ ID NO: 653898 - DNA, 15 bp, Homo sapiens
tcaagtgagtatgta

SEQ ID NO: 653899 - DNA, 15 bp, Homo sapiens
caagtgagtatgtac

SEQ ID NO: 653900 - DNA, 15 bp, Homo sapiens
aagtgagtatgtaca

SEQ ID NO: 653901 - DNA, 15 bp, Homo sapiens
agtgagtatgtacat

SEQ ID NO: 653902 - DNA, 15 bp, Homo sapiens
gtgagtatgtacatt

SEQ ID NO: 653903 - DNA, 15 bp, Homo sapiens
tgagtatgtacattt

SEQ ID NO: 653904 - DNA, 15 bp, Homo sapiens
gagtatgtacatttt

SEQ ID NO: 653905 - DNA, 15 bp, Homo sapiens
agtatgtacattttt

SEQ ID NO: 653906 - DNA, 15 bp, Homo sapiens
gtatgtacattttta

SEQ ID NO: 653907 - DNA, 15 bp, Homo sapiens
tatgtacatttttag

SEQ ID NO: 653908 - DNA, 15 bp, Homo sapiens
atgtacatttttaga

SEQ ID NO: 653909 - DNA, 15 bp, Homo sapiens
tgtacatttttagat

SEQ ID NO: 653910 - DNA, 15 bp, Homo sapiens
gtacatttttagatg

SEQ ID NO: 653911 - DNA, 15 bp, Homo sapiens
tacatttttagatgc

SEQ ID NO: 653912 - DNA, 15 bp, Homo sapiens
acatttttagatgcc

SEQ ID NO: 653913 - DNA, 15 bp, Homo sapiens
catttttagatgccc

SEQ ID NO: 653914 - DNA, 15 bp, Homo sapiens
atttttagatgccct

SEQ ID NO: 653915 - DNA, 15 bp, Homo sapiens
tttttagatgccctt

SEQ ID NO: 653916 - DNA, 15 bp, Homo sapiens
ttttagatgcccttt

SEQ ID NO: 653917 - DNA, 15 bp, Homo sapiens
tttagatgcccttta

SEQ ID NO: 653918 - DNA, 15 bp, Homo sapiens
ttagatgccctttat

SEQ ID NO: 653919 - DNA, 15 bp, Homo sapiens
tagatgccctttatt

SEQ ID NO: 653920 - DNA, 15 bp, Homo sapiens
agatgccctttatta

SEQ ID NO: 653921 - DNA, 15 bp, Homo sapiens
gatgccctttattaa

SEQ ID NO: 653922 - DNA, 15 bp, Homo sapiens
atgccctttattaaa

SEQ ID NO: 653923 - DNA, 15 bp, Homo sapiens
tgccctttattaaat

SEQ ID NO: 653924 - DNA, 15 bp, Homo sapiens
gccctttattaaatt

SEQ ID NO: 653925 - DNA, 15 bp, Homo sapiens
ccctttattaaatta

SEQ ID NO: 653926 - DNA, 15 bp, Homo sapiens
cctttattaaattag

SEQ ID NO: 653927 - DNA, 15 bp, Homo sapiens
ctttattaaattaga

SEQ ID NO: 653928 - DNA, 15 bp, Homo sapiens
tttattaaattagag

SEQ ID NO: 653929 - DNA, 15 bp, Homo sapiens
ttattaaattagagg

SEQ ID NO: 653930 - DNA, 15 bp, Homo sapiens
tattaaattagaggg

SEQ ID NO: 653931 - DNA, 15 bp, Homo sapiens
attaaattagagggg

SEQ ID NO: 653932 - DNA, 15 bp, Homo sapiens
ttaaattagagggga

SEQ ID NO: 653933 - DNA, 15 bp, Homo sapiens
taaattagaggggac

SEQ ID NO: 653934 - DNA, 15 bp, Homo sapiens
aaattagaggggaca

SEQ ID NO: 653935 - DNA, 15 bp, Homo sapiens
aattagaggggacaa

SEQ ID NO: 653936 - DNA, 15 bp, Homo sapiens
attagaggggacaaa

SEQ ID NO: 653937 - DNA, 15 bp, Homo sapiens
ttagaggggacaaat

SEQ ID NO: 653938 - DNA, 15 bp, Homo sapiens
tagaggggacaaata

SEQ ID NO: 653939 - DNA, 15 bp, Homo sapiens
agaggggacaaataa

SEQ ID NO: 653940 - DNA, 15 bp, Homo sapiens
gaggggacaaataag

SEQ ID NO: 653941 - DNA, 15 bp, Homo sapiens
aggggacaaataaga

SEQ ID NO: 653942 - DNA, 15 bp, Homo sapiens
ggggacaaataagaa

SEQ ID NO: 653943 - DNA, 15 bp, Homo sapiens
gggacaaataagaat

SEQ ID NO: 653944 - DNA, 15 bp, Homo sapiens
ggacaaataagaatc

SEQ ID NO: 653945 - DNA, 15 bp, Homo sapiens
gacaaataagaatct

SEQ ID NO: 653946 - DNA, 15 bp, Homo sapiens
acaaataagaatcta

SEQ ID NO: 653947 - DNA, 15 bp, Homo sapiens
caaataagaatctac

SEQ ID NO: 653948 - DNA, 15 bp, Homo sapiens
aaataagaatctaca

SEQ ID NO: 653949 - DNA, 15 bp, Homo sapiens
aataagaatctacag

SEQ ID NO: 653950 - DNA, 15 bp, Homo sapiens
ataagaatctacagg

SEQ ID NO: 653951 - DNA, 15 bp, Homo sapiens
taagaatctacaggt

SEQ ID NO: 653952 - DNA, 15 bp, Homo sapiens
aagaatctacaggtt

SEQ ID NO: 653953 - DNA, 15 bp, Homo sapiens
agaatctacaggttt

SEQ ID NO: 653954 - DNA, 15 bp, Homo sapiens
gaatctacaggtttc

SEQ ID NO: 653955 - DNA, 15 bp, Homo sapiens
aatctacaggtttct

SEQ ID NO: 653956 - DNA, 15 bp, Homo sapiens
atctacaggtttcta

SEQ ID NO: 653957 - DNA, 15 bp, Homo sapiens
tctacaggtttctaa

SEQ ID NO: 653958 - DNA, 15 bp, Homo sapiens
ctacaggtttctaaa

SEQ ID NO: 653959 - DNA, 15 bp, Homo sapiens
tacaggtttctaaac

SEQ ID NO: 653960 - DNA, 15 bp, Homo sapiens
acaggtttctaaacc

SEQ ID NO: 653961 - DNA, 15 bp, Homo sapiens
caggtttctaaacct

SEQ ID NO: 653962 - DNA, 15 bp, Homo sapiens
aggtttctaaacctt

SEQ ID NO: 653963 - DNA, 15 bp, Homo sapiens
ggtttctaaaccttc

SEQ ID NO: 653964 - DNA, 15 bp, Homo sapiens
gtttctaaaccttca

SEQ ID NO: 653965 - DNA, 15 bp, Homo sapiens
tttctaaaccttcac

SEQ ID NO: 653966 - DNA, 15 bp, Homo sapiens
ttctaaaccttcacc

SEQ ID NO: 653967 - DNA, 15 bp, Homo sapiens
tctaaaccttcacca

SEQ ID NO: 653968 - DNA, 15 bp, Homo sapiens
ctaaaccttcaccaa

SEQ ID NO: 653969 - DNA, 15 bp, Homo sapiens
taaaccttcaccaaa

SEQ ID NO: 653970 - DNA, 15 bp, Homo sapiens
aaaccttcaccaaaa

SEQ ID NO: 653971 - DNA, 15 bp, Homo sapiens
aaccttcaccaaaag

SEQ ID NO: 653972 - DNA, 15 bp, Homo sapiens
accttcaccaaaagc

SEQ ID NO: 653973 - DNA, 15 bp, Homo sapiens
ccttcaccaaaagcc

SEQ ID NO: 653974 - DNA, 15 bp, Homo sapiens
cttcaccaaaagcct

SEQ ID NO: 653975 - DNA, 15 bp, Homo sapiens
ttcaccaaaagcctc

SEQ ID NO: 653976 - DNA, 15 bp, Homo sapiens
tcaccaaaagcctct

SEQ ID NO: 653977 - DNA, 15 bp, Homo sapiens
caccaaaagcctctt

SEQ ID NO: 653978 - DNA, 15 bp, Homo sapiens
accaaaagcctcttc

SEQ ID NO: 653979 - DNA, 15 bp, Homo sapiens
ccaaaagcctcttcc

SEQ ID NO: 653980 - DNA, 15 bp, Homo sapiens
caaaagcctcttccc

SEQ ID NO: 653981 - DNA, 15 bp, Homo sapiens
aaaagcctcttccca

SEQ ID NO: 653982 - DNA, 15 bp, Homo sapiens
aaagcctcttcccag

SEQ ID NO: 653983 - DNA, 15 bp, Homo sapiens
aagcctcttcccagc

SEQ ID NO: 653984 - DNA, 15 bp, Homo sapiens
agcctcttcccagcc

SEQ ID NO: 653985 - DNA, 15 bp, Homo sapiens
gcctcttcccagcct

SEQ ID NO: 653986 - DNA, 15 bp, Homo sapiens
cctcttcccagccta

SEQ ID NO: 653987 - DNA, 15 bp, Homo sapiens
ctcttcccagcctat

SEQ ID NO: 653988 - DNA, 15 bp, Homo sapiens
tcttcccagcctatt

SEQ ID NO: 653989 - DNA, 15 bp, Homo sapiens
cttcccagcctatta

SEQ ID NO: 653990 - DNA, 15 bp, Homo sapiens
ttcccagcctattac

SEQ ID NO: 653991 - DNA, 15 bp, Homo sapiens
tcccagcctattacc

SEQ ID NO: 653992 - DNA, 15 bp, Homo sapiens
cccagcctattacct

SEQ ID NO: 653993 - DNA, 15 bp, Homo sapiens
ccagcctattacctt

SEQ ID NO: 653994 - DNA, 15 bp, Homo sapiens
cagcctattaccttt

SEQ ID NO: 653995 - DNA, 15 bp, Homo sapiens
agcctattacctttt

SEQ ID NO: 653996 - DNA, 15 bp, Homo sapiens
gcctattaccttttc

SEQ ID NO: 653997 - DNA, 15 bp, Homo sapiens
cctattaccttttca

SEQ ID NO: 653998 - DNA, 15 bp, Homo sapiens
ctattaccttttcaa

SEQ ID NO: 653999 - DNA, 15 bp, Homo sapiens
tattaccttttcaat

SEQ ID NO: 654000 - DNA, 15 bp, Homo sapiens
attaccttttcaatt

SEQ ID NO: 654001 - DNA, 15 bp, Homo sapiens
ttaccttttcaatta

SEQ ID NO: 654002 - DNA, 15 bp, Homo sapiens
taccttttcaattaa

SEQ ID NO: 654003 - DNA, 15 bp, Homo sapiens
accttttcaattaaa

SEQ ID NO: 654004 - DNA, 15 bp, Homo sapiens
ccttttcaattaaag

SEQ ID NO: 654005 - DNA, 15 bp, Homo sapiens
cttttcaattaaaga

SEQ ID NO: 654006 - DNA, 15 bp, Homo sapiens
ttttcaattaaagaa

SEQ ID NO: 654007 - DNA, 15 bp, Homo sapiens
tttcaattaaagaag

SEQ ID NO: 654008 - DNA, 15 bp, Homo sapiens
ttcaattaaagaaga

SEQ ID NO: 654009 - DNA, 15 bp, Homo sapiens
tcaattaaagaagag

SEQ ID NO: 654010 - DNA, 15 bp, Homo sapiens
caattaaagaagaga

SEQ ID NO: 654011 - DNA, 15 bp, Homo sapiens
aattaaagaagagag

SEQ ID NO: 654012 - DNA, 15 bp, Homo sapiens
attaaagaagagagt

SEQ ID NO: 654013 - DNA, 15 bp, Homo sapiens
ttaaagaagagagtg

SEQ ID NO: 654014 - DNA, 15 bp, Homo sapiens
taaagaagagagtgt

SEQ ID NO: 654015 - DNA, 15 bp, Homo sapiens
aaagaagagagtgta

SEQ ID NO: 654016 - DNA, 15 bp, Homo sapiens
aagaagagagtgtat

SEQ ID NO: 654017 - DNA, 15 bp, Homo sapiens
agaagagagtgtata

SEQ ID NO: 654018 - DNA, 15 bp, Homo sapiens
gaagagagtgtataa

SEQ ID NO: 654019 - DNA, 15 bp, Homo sapiens
aagagagtgtataat

SEQ ID NO: 654020 - DNA, 15 bp, Homo sapiens
agagagtgtataatt

SEQ ID NO: 654021 - DNA, 15 bp, Homo sapiens
gagagtgtataattg

SEQ ID NO: 654022 - DNA, 15 bp, Homo sapiens
agagtgtataattgg

SEQ ID NO: 654023 - DNA, 15 bp, Homo sapiens
gagtgtataattggt

SEQ ID NO: 654024 - DNA, 15 bp, Homo sapiens
agtgtataattggtg

SEQ ID NO: 654025 - DNA, 15 bp, Homo sapiens
gtgtataattggtga

SEQ ID NO: 654026 - DNA, 15 bp, Homo sapiens
tgtataattggtgaa

SEQ ID NO: 654027 - DNA, 15 bp, Homo sapiens
gtataattggtgaat

SEQ ID NO: 654028 - DNA, 15 bp, Homo sapiens
tataattggtgaatt

SEQ ID NO: 654029 - DNA, 15 bp, Homo sapiens
ataattggtgaattt

SEQ ID NO: 654030 - DNA, 15 bp, Homo sapiens
taattggtgaatttg

SEQ ID NO: 654031 - DNA, 15 bp, Homo sapiens
aattggtgaatttga

SEQ ID NO: 654032 - DNA, 15 bp, Homo sapiens
attggtgaatttgac

SEQ ID NO: 654033 - DNA, 15 bp, Homo sapiens
ttggtgaatttgaca

SEQ ID NO: 654034 - DNA, 15 bp, Homo sapiens
tggtgaatttgacat

SEQ ID NO: 654035 - DNA, 15 bp, Homo sapiens
ggtgaatttgacatc

SEQ ID NO: 654036 - DNA, 15 bp, Homo sapiens
gtgaatttgacatca

SEQ ID NO: 654037 - DNA, 15 bp, Homo sapiens
tgaatttgacatcac

SEQ ID NO: 654038 - DNA, 15 bp, Homo sapiens
gaatttgacatcaca

SEQ ID NO: 654039 - DNA, 15 bp, Homo sapiens
aatttgacatcacac

SEQ ID NO: 654040 - DNA, 15 bp, Homo sapiens
atttgacatcacact

SEQ ID NO: 654041 - DNA, 15 bp, Homo sapiens
tttgacatcacactc

SEQ ID NO: 654042 - DNA, 15 bp, Homo sapiens
ttgacatcacactca

SEQ ID NO: 654043 - DNA, 15 bp, Homo sapiens
tgacatcacactcac

SEQ ID NO: 654044 - DNA, 15 bp, Homo sapiens
gacatcacactcacc

SEQ ID NO: 654045 - DNA, 15 bp, Homo sapiens
acatcacactcaccc

SEQ ID NO: 654046 - DNA, 15 bp, Homo sapiens
catcacactcaccca

SEQ ID NO: 654047 - DNA, 15 bp, Homo sapiens
atcacactcacccac

SEQ ID NO: 654048 - DNA, 15 bp, Homo sapiens
tcacactcacccacc

SEQ ID NO: 654049 - DNA, 15 bp, Homo sapiens
cacactcacccacca

SEQ ID NO: 654050 - DNA, 15 bp, Homo sapiens
acactcacccaccat

SEQ ID NO: 654051 - DNA, 15 bp, Homo sapiens
cactcacccaccatt

SEQ ID NO: 654052 - DNA, 15 bp, Homo sapiens
actcacccaccatta

SEQ ID NO: 654053 - DNA, 15 bp, Homo sapiens
ctcacccaccattag

SEQ ID NO: 654054 - DNA, 15 bp, Homo sapiens
tcacccaccattagc

SEQ ID NO: 654055 - DNA, 15 bp, Homo sapiens
cacccaccattagca

SEQ ID NO: 654056 - DNA, 15 bp, Homo sapiens
acccaccattagcat

SEQ ID NO: 654057 - DNA, 15 bp, Homo sapiens
cccaccattagcatt

SEQ ID NO: 654058 - DNA, 15 bp, Homo sapiens
ccaccattagcattg

SEQ ID NO: 654059 - DNA, 15 bp, Homo sapiens
caccattagcattgt

SEQ ID NO: 654060 - DNA, 15 bp, Homo sapiens
accattagcattgtt

SEQ ID NO: 654061 - DNA, 15 bp, Homo sapiens
ccattagcattgttt

SEQ ID NO: 654062 - DNA, 15 bp, Homo sapiens
cattagcattgtttt

SEQ ID NO: 654063 - DNA, 15 bp, Homo sapiens
attagcattgttttg

SEQ ID NO: 654064 - DNA, 15 bp, Homo sapiens
ttagcattgttttga

SEQ ID NO: 654065 - DNA, 15 bp, Homo sapiens
tagcattgttttgag

SEQ ID NO: 654066 - DNA, 15 bp, Homo sapiens
agcattgttttgagt

SEQ ID NO: 654067 - DNA, 15 bp, Homo sapiens
gcattgttttgagtg

SEQ ID NO: 654068 - DNA, 15 bp, Homo sapiens
cattgttttgagtgg

SEQ ID NO: 654069 - DNA, 15 bp, Homo sapiens
attgttttgagtggg

SEQ ID NO: 654070 - DNA, 15 bp, Homo sapiens
ttgttttgagtgggg

SEQ ID NO: 654071 - DNA, 15 bp, Homo sapiens
tgttttgagtggggc

SEQ ID NO: 654072 - DNA, 15 bp, Homo sapiens
gttttgagtggggct

SEQ ID NO: 654073 - DNA, 15 bp, Homo sapiens
ttttgagtggggctg

SEQ ID NO: 654074 - DNA, 15 bp, Homo sapiens
tttgagtggggctgg

SEQ ID NO: 654075 - DNA, 15 bp, Homo sapiens
ttgagtggggctgga

SEQ ID NO: 654076 - DNA, 15 bp, Homo sapiens
tgagtggggctggat

SEQ ID NO: 654077 - DNA, 15 bp, Homo sapiens
gagtggggctggatt

SEQ ID NO: 654078 - DNA, 15 bp, Homo sapiens
agtggggctggattt

SEQ ID NO: 654079 - DNA, 15 bp, Homo sapiens
gtggggctggatttg

SEQ ID NO: 654080 - DNA, 15 bp, Homo sapiens
tggggctggatttga

SEQ ID NO: 654081 - DNA, 15 bp, Homo sapiens
ggggctggatttgag

SEQ ID NO: 654082 - DNA, 15 bp, Homo sapiens
gggctggatttgagt

SEQ ID NO: 654083 - DNA, 15 bp, Homo sapiens
ggctggatttgagtt

SEQ ID NO: 654084 - DNA, 15 bp, Homo sapiens
gctggatttgagttg

SEQ ID NO: 654085 - DNA, 15 bp, Homo sapiens
ctggatttgagttgc

SEQ ID NO: 654086 - DNA, 15 bp, Homo sapiens
tggatttgagttgca

SEQ ID NO: 654087 - DNA, 15 bp, Homo sapiens
ggatttgagttgcat

SEQ ID NO: 654088 - DNA, 15 bp, Homo sapiens
gatttgagttgcatc

SEQ ID NO: 654089 - DNA, 15 bp, Homo sapiens
atttgagttgcatca

SEQ ID NO: 654090 - DNA, 15 bp, Homo sapiens
tttgagttgcatcat

SEQ ID NO: 654091 - DNA, 15 bp, Homo sapiens
ttgagttgcatcatt

SEQ ID NO: 654092 - DNA, 15 bp, Homo sapiens
tgagttgcatcattt

SEQ ID NO: 654093 - DNA, 15 bp, Homo sapiens
gagttgcatcatttt

SEQ ID NO: 654094 - DNA, 15 bp, Homo sapiens
agttgcatcattttc

SEQ ID NO: 654095 - DNA, 15 bp, Homo sapiens
gttgcatcattttca

SEQ ID NO: 654096 - DNA, 15 bp, Homo sapiens
ttgcatcattttcat

SEQ ID NO: 654097 - DNA, 15 bp, Homo sapiens
tgcatcattttcatt

SEQ ID NO: 654098 - DNA, 15 bp, Homo sapiens
gcatcattttcattc

SEQ ID NO: 654099 - DNA, 15 bp, Homo sapiens
catcattttcattcc

SEQ ID NO: 654100 - DNA, 15 bp, Homo sapiens
atcattttcattcct

SEQ ID NO: 654101 - DNA, 15 bp, Homo sapiens
tcattttcattcctt

SEQ ID NO: 654102 - DNA, 15 bp, Homo sapiens
cattttcattccttt

SEQ ID NO: 654103 - DNA, 15 bp, Homo sapiens
attttcattcctttt

SEQ ID NO: 654104 - DNA, 15 bp, Homo sapiens
ttttcattcctttta

SEQ ID NO: 654105 - DNA, 15 bp, Homo sapiens
tttcattccttttat

SEQ ID NO: 654106 - DNA, 15 bp, Homo sapiens
ttcattccttttatt

SEQ ID NO: 654107 - DNA, 15 bp, Homo sapiens
tcattccttttattg

SEQ ID NO: 654108 - DNA, 15 bp, Homo sapiens
cattccttttattgg

SEQ ID NO: 654109 - DNA, 15 bp, Homo sapiens
attccttttattggt

SEQ ID NO: 654110 - DNA, 15 bp, Homo sapiens
ttccttttattggta

SEQ ID NO: 654111 - DNA, 15 bp, Homo sapiens
tccttttattggtac

SEQ ID NO: 654112 - DNA, 15 bp, Homo sapiens
ccttttattggtacc

SEQ ID NO: 654113 - DNA, 15 bp, Homo sapiens
cttttattggtaccc

SEQ ID NO: 654114 - DNA, 15 bp, Homo sapiens
ttttattggtacccc

SEQ ID NO: 654115 - DNA, 15 bp, Homo sapiens
tttattggtacccct

SEQ ID NO: 654116 - DNA, 15 bp, Homo sapiens
ttattggtacccctt

SEQ ID NO: 654117 - DNA, 15 bp, Homo sapiens
tattggtacccctta

SEQ ID NO: 654118 - DNA, 15 bp, Homo sapiens
attggtaccccttag

SEQ ID NO: 654119 - DNA, 15 bp, Homo sapiens
ttggtaccccttaga

SEQ ID NO: 654120 - DNA, 15 bp, Homo sapiens
tggtaccccttagac

SEQ ID NO: 654121 - DNA, 15 bp, Homo sapiens
ggtaccccttagact

SEQ ID NO: 654122 - DNA, 15 bp, Homo sapiens
gtaccccttagactg

SEQ ID NO: 654123 - DNA, 15 bp, Homo sapiens
taccccttagactgc

SEQ ID NO: 654124 - DNA, 15 bp, Homo sapiens
accccttagactgcc

SEQ ID NO: 654125 - DNA, 15 bp, Homo sapiens
ccccttagactgcct

SEQ ID NO: 654126 - DNA, 15 bp, Homo sapiens
cccttagactgcctg

SEQ ID NO: 654127 - DNA, 15 bp, Homo sapiens
ccttagactgcctgc

SEQ ID NO: 654128 - DNA, 15 bp, Homo sapiens
cttagactgcctgct

SEQ ID NO: 654129 - DNA, 15 bp, Homo sapiens
ttagactgcctgcta

SEQ ID NO: 654130 - DNA, 15 bp, Homo sapiens
tagactgcctgctat

SEQ ID NO: 654131 - DNA, 15 bp, Homo sapiens
agactgcctgctatg

SEQ ID NO: 654132 - DNA, 15 bp, Homo sapiens
gactgcctgctatgc

SEQ ID NO: 654133 - DNA, 15 bp, Homo sapiens
actgcctgctatgca

SEQ ID NO: 654134 - DNA, 15 bp, Homo sapiens
ctgcctgctatgcat

SEQ ID NO: 654135 - DNA, 15 bp, Homo sapiens
tgcctgctatgcatc

SEQ ID NO: 654136 - DNA, 15 bp, Homo sapiens
gcctgctatgcatct

SEQ ID NO: 654137 - DNA, 15 bp, Homo sapiens
cctgctatgcatctg

SEQ ID NO: 654138 - DNA, 15 bp, Homo sapiens
ctgctatgcatctgt

SEQ ID NO: 654139 - DNA, 15 bp, Homo sapiens
tgctatgcatctgtg

SEQ ID NO: 654140 - DNA, 15 bp, Homo sapiens
gctatgcatctgtgt

SEQ ID NO: 654141 - DNA, 15 bp, Homo sapiens
ctatgcatctgtgtg

SEQ ID NO: 654142 - DNA, 15 bp, Homo sapiens
tatgcatctgtgtga

SEQ ID NO: 654143 - DNA, 15 bp, Homo sapiens
atgcatctgtgtgac

SEQ ID NO: 654144 - DNA, 15 bp, Homo sapiens
tgcatctgtgtgaca

SEQ ID NO: 654145 - DNA, 15 bp, Homo sapiens
gcatctgtgtgacag

SEQ ID NO: 654146 - DNA, 15 bp, Homo sapiens
catctgtgtgacagc

SEQ ID NO: 654147 - DNA, 15 bp, Homo sapiens
atctgtgtgacagct

SEQ ID NO: 654148 - DNA, 15 bp, Homo sapiens
tctgtgtgacagctg

SEQ ID NO: 654149 - DNA, 15 bp, Homo sapiens
ctgtgtgacagctgg

SEQ ID NO: 654150 - DNA, 15 bp, Homo sapiens
tgtgtgacagctggt

SEQ ID NO: 654151 - DNA, 15 bp, Homo sapiens
gtgtgacagctggtc

SEQ ID NO: 654152 - DNA, 15 bp, Homo sapiens
tgtgacagctggtca

SEQ ID NO: 654153 - DNA, 15 bp, Homo sapiens
gtgacagctggtcaa

SEQ ID NO: 654154 - DNA, 15 bp, Homo sapiens
tgacagctggtcaaa

SEQ ID NO: 654155 - DNA, 15 bp, Homo sapiens
gacagctggtcaaag

SEQ ID NO: 654156 - DNA, 15 bp, Homo sapiens
acagctggtcaaagt

SEQ ID NO: 654157 - DNA, 15 bp, Homo sapiens
cagctggtcaaagtt

SEQ ID NO: 654158 - DNA, 15 bp, Homo sapiens
agctggtcaaagtta

SEQ ID NO: 654159 - DNA, 15 bp, Homo sapiens
gctggtcaaagttag

SEQ ID NO: 654160 - DNA, 15 bp, Homo sapiens
ctggtcaaagttagg

SEQ ID NO: 654161 - DNA, 15 bp, Homo sapiens
tggtcaaagttaggg

SEQ ID NO: 654162 - DNA, 15 bp, Homo sapiens
ggtcaaagttagggg

SEQ ID NO: 654163 - DNA, 15 bp, Homo sapiens
gtcaaagttaggggt

SEQ ID NO: 654164 - DNA, 15 bp, Homo sapiens
tcaaagttaggggta

SEQ ID NO: 654165 - DNA, 15 bp, Homo sapiens
caaagttaggggtac

SEQ ID NO: 654166 - DNA, 15 bp, Homo sapiens
aaagttaggggtaca

SEQ ID NO: 654167 - DNA, 15 bp, Homo sapiens
aagttaggggtacag

SEQ ID NO: 654168 - DNA, 15 bp, Homo sapiens
agttaggggtacagt

SEQ ID NO: 654169 - DNA, 15 bp, Homo sapiens
gttaggggtacagtc

SEQ ID NO: 654170 - DNA, 15 bp, Homo sapiens
ttaggggtacagtca

SEQ ID NO: 654171 - DNA, 15 bp, Homo sapiens
taggggtacagtcac

SEQ ID NO: 654172 - DNA, 15 bp, Homo sapiens
aggggtacagtcact

SEQ ID NO: 654173 - DNA, 15 bp, Homo sapiens
ggggtacagtcacta

SEQ ID NO: 654174 - DNA, 15 bp, Homo sapiens
gggtacagtcactag

SEQ ID NO: 654175 - DNA, 15 bp, Homo sapiens
ggtacagtcactagc

SEQ ID NO: 654176 - DNA, 15 bp, Homo sapiens
gtacagtcactagct

SEQ ID NO: 654177 - DNA, 15 bp, Homo sapiens
tacagtcactagctg

SEQ ID NO: 654178 - DNA, 15 bp, Homo sapiens
acagtcactagctgt

SEQ ID NO: 654179 - DNA, 15 bp, Homo sapiens
cagtcactagctgtg

SEQ ID NO: 654180 - DNA, 15 bp, Homo sapiens
agtcactagctgtgg

SEQ ID NO: 654181 - DNA, 15 bp, Homo sapiens
gtcactagctgtggg

SEQ ID NO: 654182 - DNA, 15 bp, Homo sapiens
tcactagctgtggga

SEQ ID NO: 654183 - DNA, 15 bp, Homo sapiens
cactagctgtgggaa

SEQ ID NO: 654184 - DNA, 15 bp, Homo sapiens
actagctgtgggaaa

SEQ ID NO: 654185 - DNA, 15 bp, Homo sapiens
ctagctgtgggaaag

SEQ ID NO: 654186 - DNA, 15 bp, Homo sapiens
tagctgtgggaaagc

SEQ ID NO: 654187 - DNA, 15 bp, Homo sapiens
agctgtgggaaagct

SEQ ID NO: 654188 - DNA, 15 bp, Homo sapiens
gctgtgggaaagctt

SEQ ID NO: 654189 - DNA, 15 bp, Homo sapiens
ctgtgggaaagcttt

SEQ ID NO: 654190 - DNA, 15 bp, Homo sapiens
tgtgggaaagctttt

SEQ ID NO: 654191 - DNA, 15 bp, Homo sapiens
gtgggaaagcttttc

SEQ ID NO: 654192 - DNA, 15 bp, Homo sapiens
tgggaaagcttttct

SEQ ID NO: 654193 - DNA, 15 bp, Homo sapiens
gggaaagcttttctc

SEQ ID NO: 654194 - DNA, 15 bp, Homo sapiens
ggaaagcttttctct

SEQ ID NO: 654195 - DNA, 15 bp, Homo sapiens
gaaagcttttctctt

SEQ ID NO: 654196 - DNA, 15 bp, Homo sapiens
aaagcttttctcttt

SEQ ID NO: 654197 - DNA, 15 bp, Homo sapiens
aagcttttctctttg

SEQ ID NO: 654198 - DNA, 15 bp, Homo sapiens
agcttttctctttga

SEQ ID NO: 654199 - DNA, 15 bp, Homo sapiens
gcttttctctttgaa

SEQ ID NO: 654200 - DNA, 15 bp, Homo sapiens
cttttctctttgaaa

SEQ ID NO: 654201 - DNA, 15 bp, Homo sapiens
ttttctctttgaaac

SEQ ID NO: 654202 - DNA, 15 bp, Homo sapiens
tttctctttgaaact

SEQ ID NO: 654203 - DNA, 15 bp, Homo sapiens
ttctctttgaaacta

SEQ ID NO: 654204 - DNA, 15 bp, Homo sapiens
tctctttgaaactaa

SEQ ID NO: 654205 - DNA, 15 bp, Homo sapiens
ctctttgaaactaat

SEQ ID NO: 654206 - DNA, 15 bp, Homo sapiens
tctttgaaactaatt

SEQ ID NO: 654207 - DNA, 15 bp, Homo sapiens
ctttgaaactaattg

SEQ ID NO: 654208 - DNA, 15 bp, Homo sapiens
tttgaaactaattgg

SEQ ID NO: 654209 - DNA, 15 bp, Homo sapiens
ttgaaactaattggt

SEQ ID NO: 654210 - DNA, 15 bp, Homo sapiens
tgaaactaattggta

SEQ ID NO: 654211 - DNA, 15 bp, Homo sapiens
gaaactaattggtac

SEQ ID NO: 654212 - DNA, 15 bp, Homo sapiens
aaactaattggtaca

SEQ ID NO: 654213 - DNA, 15 bp, Homo sapiens
aactaattggtacat

SEQ ID NO: 654214 - DNA, 15 bp, Homo sapiens
actaattggtacatg

SEQ ID NO: 654215 - DNA, 15 bp, Homo sapiens
ctaattggtacatgt

SEQ ID NO: 654216 - DNA, 15 bp, Homo sapiens
taattggtacatgtg

SEQ ID NO: 654217 - DNA, 15 bp, Homo sapiens
aattggtacatgtgg

SEQ ID NO: 654218 - DNA, 15 bp, Homo sapiens
attggtacatgtggg

SEQ ID NO: 654219 - DNA, 15 bp, Homo sapiens
ttggtacatgtgggg

SEQ ID NO: 654220 - DNA, 15 bp, Homo sapiens
tggtacatgtggggt

SEQ ID NO: 654221 - DNA, 15 bp, Homo sapiens
ggtacatgtggggtt

SEQ ID NO: 654222 - DNA, 15 bp, Homo sapiens
gtacatgtggggttt

SEQ ID NO: 654223 - DNA, 15 bp, Homo sapiens
tacatgtggggtttg

SEQ ID NO: 654224 - DNA, 15 bp, Homo sapiens
acatgtggggtttga

SEQ ID NO: 654225 - DNA, 15 bp, Homo sapiens
catgtggggtttgac

SEQ ID NO: 654226 - DNA, 15 bp, Homo sapiens
atgtggggtttgacc

SEQ ID NO: 654227 - DNA, 15 bp, Homo sapiens
tgtggggtttgacct

SEQ ID NO: 654228 - DNA, 15 bp, Homo sapiens
gtggggtttgacctt

SEQ ID NO: 654229 - DNA, 15 bp, Homo sapiens
tggggtttgacctta

SEQ ID NO: 654230 - DNA, 15 bp, Homo sapiens
ggggtttgaccttat

SEQ ID NO: 654231 - DNA, 15 bp, Homo sapiens
gggtttgaccttatg

SEQ ID NO: 654232 - DNA, 15 bp, Homo sapiens
ggtttgaccttatga

SEQ ID NO: 654233 - DNA, 15 bp, Homo sapiens
gtttgaccttatgac

SEQ ID NO: 654234 - DNA, 15 bp, Homo sapiens
tttgaccttatgacc

SEQ ID NO: 654235 - DNA, 15 bp, Homo sapiens
ttgaccttatgaccc

SEQ ID NO: 654236 - DNA, 15 bp, Homo sapiens
tgaccttatgaccct

SEQ ID NO: 654237 - DNA, 15 bp, Homo sapiens
gaccttatgaccctg

SEQ ID NO: 654238 - DNA, 15 bp, Homo sapiens
accttatgaccctgg

SEQ ID NO: 654239 - DNA, 15 bp, Homo sapiens
ccttatgaccctggc

SEQ ID NO: 654240 - DNA, 15 bp, Homo sapiens
cttatgaccctggcc

SEQ ID NO: 654241 - DNA, 15 bp, Homo sapiens
ttatgaccctggcct

SEQ ID NO: 654242 - DNA, 15 bp, Homo sapiens
tatgaccctggcctc

SEQ ID NO: 654243 - DNA, 15 bp, Homo sapiens
atgaccctggcctca

SEQ ID NO: 654244 - DNA, 15 bp, Homo sapiens
tgaccctggcctcat

SEQ ID NO: 654245 - DNA, 15 bp, Homo sapiens
gaccctggcctcatt

SEQ ID NO: 654246 - DNA, 15 bp, Homo sapiens
accctggcctcatta

SEQ ID NO: 654247 - DNA, 15 bp, Homo sapiens
ccctggcctcattag

SEQ ID NO: 654248 - DNA, 15 bp, Homo sapiens
cctggcctcattagt

SEQ ID NO: 654249 - DNA, 15 bp, Homo sapiens
ctggcctcattagta

SEQ ID NO: 654250 - DNA, 15 bp, Homo sapiens
tggcctcattagtac

SEQ ID NO: 654251 - DNA, 15 bp, Homo sapiens
ggcctcattagtacc

SEQ ID NO: 654252 - DNA, 15 bp, Homo sapiens
gcctcattagtacca

SEQ ID NO: 654253 - DNA, 15 bp, Homo sapiens
cctcattagtaccac

SEQ ID NO: 654254 - DNA, 15 bp, Homo sapiens
ctcattagtaccact

SEQ ID NO: 654255 - DNA, 15 bp, Homo sapiens
tcattagtaccacta

SEQ ID NO: 654256 - DNA, 15 bp, Homo sapiens
cattagtaccactaa

SEQ ID NO: 654257 - DNA, 15 bp, Homo sapiens
attagtaccactaag

SEQ ID NO: 654258 - DNA, 15 bp, Homo sapiens
ttagtaccactaagc

SEQ ID NO: 654259 - DNA, 15 bp, Homo sapiens
tagtaccactaagct

SEQ ID NO: 654260 - DNA, 15 bp, Homo sapiens
agtaccactaagcta

SEQ ID NO: 654261 - DNA, 15 bp, Homo sapiens
gtaccactaagctaa

SEQ ID NO: 654262 - DNA, 15 bp, Homo sapiens
taccactaagctaat

SEQ ID NO: 654263 - DNA, 15 bp, Homo sapiens
accactaagctaata

SEQ ID NO: 654264 - DNA, 15 bp, Homo sapiens
ccactaagctaatag

SEQ ID NO: 654265 - DNA, 15 bp, Homo sapiens
cactaagctaatagg

SEQ ID NO: 654266 - DNA, 15 bp, Homo sapiens
actaagctaataggc

SEQ ID NO: 654267 - DNA, 15 bp, Homo sapiens
ctaagctaataggct

SEQ ID NO: 654268 - DNA, 15 bp, Homo sapiens
taagctaataggcta

SEQ ID NO: 654269 - DNA, 15 bp, Homo sapiens
aagctaataggctac

SEQ ID NO: 654270 - DNA, 15 bp, Homo sapiens
agctaataggctaca

SEQ ID NO: 654271 - DNA, 15 bp, Homo sapiens
gctaataggctacag

SEQ ID NO: 654272 - DNA, 15 bp, Homo sapiens
ctaataggctacaga

SEQ ID NO: 654273 - DNA, 15 bp, Homo sapiens
taataggctacagat

SEQ ID NO: 654274 - DNA, 15 bp, Homo sapiens
aataggctacagata

SEQ ID NO: 654275 - DNA, 15 bp, Homo sapiens
ataggctacagatat

SEQ ID NO: 654276 - DNA, 15 bp, Homo sapiens
taggctacagatatt

SEQ ID NO: 654277 - DNA, 15 bp, Homo sapiens
aggctacagatatta

SEQ ID NO: 654278 - DNA, 15 bp, Homo sapiens
ggctacagatattat

SEQ ID NO: 654279 - DNA, 15 bp, Homo sapiens
gctacagatattatt

SEQ ID NO: 654280 - DNA, 15 bp, Homo sapiens
ctacagatattatta

SEQ ID NO: 654281 - DNA, 15 bp, Homo sapiens
tacagatattattaa

SEQ ID NO: 654282 - DNA, 15 bp, Homo sapiens
acagatattattaaa

SEQ ID NO: 654283 - DNA, 15 bp, Homo sapiens
cagatattattaaag

SEQ ID NO: 654284 - DNA, 15 bp, Homo sapiens
agatattattaaaga

SEQ ID NO: 654285 - DNA, 15 bp, Homo sapiens
gatattattaaagag

SEQ ID NO: 654286 - DNA, 15 bp, Homo sapiens
atattattaaagaga

SEQ ID NO: 654287 - DNA, 15 bp, Homo sapiens
tattattaaagagaa

SEQ ID NO: 654288 - DNA, 15 bp, Homo sapiens
attattaaagagaag

SEQ ID NO: 654289 - DNA, 15 bp, Homo sapiens
ttattaaagagaagc

SEQ ID NO: 654290 - DNA, 15 bp, Homo sapiens
tattaaagagaagca

SEQ ID NO: 654291 - DNA, 15 bp, Homo sapiens
attaaagagaagcaa

SEQ ID NO: 654292 - DNA, 15 bp, Homo sapiens
ttaaagagaagcaat

SEQ ID NO: 654293 - DNA, 15 bp, Homo sapiens
taaagagaagcaatg

SEQ ID NO: 654294 - DNA, 15 bp, Homo sapiens
aaagagaagcaatgt

SEQ ID NO: 654295 - DNA, 15 bp, Homo sapiens
aagagaagcaatgtg

SEQ ID NO: 654296 - DNA, 15 bp, Homo sapiens
agagaagcaatgtgt

SEQ ID NO: 654297 - DNA, 15 bp, Homo sapiens
gagaagcaatgtgtt

SEQ ID NO: 654298 - DNA, 15 bp, Homo sapiens
agaagcaatgtgttt

SEQ ID NO: 654299 - DNA, 15 bp, Homo sapiens
gaagcaatgtgtttt

SEQ ID NO: 654300 - DNA, 15 bp, Homo sapiens
aagcaatgtgttttt

SEQ ID NO: 654301 - DNA, 15 bp, Homo sapiens
agcaatgtgttttta

SEQ ID NO: 654302 - DNA, 15 bp, Homo sapiens
gcaatgtgtttttat

SEQ ID NO: 654303 - DNA, 15 bp, Homo sapiens
caatgtgtttttata

SEQ ID NO: 654304 - DNA, 15 bp, Homo sapiens
aatgtgtttttatat

SEQ ID NO: 654305 - DNA, 15 bp, Homo sapiens
atgtgtttttatatt

SEQ ID NO: 654306 - DNA, 15 bp, Homo sapiens
tgtgtttttatattg

SEQ ID NO: 654307 - DNA, 15 bp, Homo sapiens
gtgtttttatattga

SEQ ID NO: 654308 - DNA, 15 bp, Homo sapiens
tgtttttatattgac

SEQ ID NO: 654309 - DNA, 15 bp, Homo sapiens
gtttttatattgacc

SEQ ID NO: 654310 - DNA, 15 bp, Homo sapiens
tttttatattgaccc

SEQ ID NO: 654311 - DNA, 15 bp, Homo sapiens
ttttatattgacccc

SEQ ID NO: 654312 - DNA, 15 bp, Homo sapiens
tttatattgacccca

SEQ ID NO: 654313 - DNA, 15 bp, Homo sapiens
ttatattgaccccaa

SEQ ID NO: 654314 - DNA, 15 bp, Homo sapiens
tatattgaccccaaa

SEQ ID NO: 654315 - DNA, 15 bp, Homo sapiens
atattgaccccaaat

SEQ ID NO: 654316 - DNA, 15 bp, Homo sapiens
tattgaccccaaatg

SEQ ID NO: 654317 - DNA, 15 bp, Homo sapiens
attgaccccaaatgc

SEQ ID NO: 654318 - DNA, 15 bp, Homo sapiens
ttgaccccaaatgct

SEQ ID NO: 654319 - DNA, 15 bp, Homo sapiens
tgaccccaaatgctt

SEQ ID NO: 654320 - DNA, 15 bp, Homo sapiens
gaccccaaatgcttg

SEQ ID NO: 654321 - DNA, 15 bp, Homo sapiens
accccaaatgcttgt

SEQ ID NO: 654322 - DNA, 15 bp, Homo sapiens
ccccaaatgcttgtt

SEQ ID NO: 654323 - DNA, 15 bp, Homo sapiens
cccaaatgcttgttc

SEQ ID NO: 654324 - DNA, 15 bp, Homo sapiens
ccaaatgcttgttcc

SEQ ID NO: 654325 - DNA, 15 bp, Homo sapiens
caaatgcttgttcct

SEQ ID NO: 654326 - DNA, 15 bp, Homo sapiens
aaatgcttgttcctg

SEQ ID NO: 654327 - DNA, 15 bp, Homo sapiens
aatgcttgttcctgt

SEQ ID NO: 654328 - DNA, 15 bp, Homo sapiens
atgcttgttcctgtc

SEQ ID NO: 654329 - DNA, 15 bp, Homo sapiens
tgcttgttcctgtct

SEQ ID NO: 654330 - DNA, 15 bp, Homo sapiens
gcttgttcctgtctt

SEQ ID NO: 654331 - DNA, 15 bp, Homo sapiens
cttgttcctgtcttt

SEQ ID NO: 654332 - DNA, 15 bp, Homo sapiens
ttgttcctgtcttta

SEQ ID NO: 654333 - DNA, 15 bp, Homo sapiens
tgttcctgtctttaa

SEQ ID NO: 654334 - DNA, 15 bp, Homo sapiens
gttcctgtctttaaa

SEQ ID NO: 654335 - DNA, 15 bp, Homo sapiens
ttcctgtctttaaat

SEQ ID NO: 654336 - DNA, 15 bp, Homo sapiens
tcctgtctttaaata

SEQ ID NO: 654337 - DNA, 15 bp, Homo sapiens
cctgtctttaaatag

SEQ ID NO: 654338 - DNA, 15 bp, Homo sapiens
ctgtctttaaatagt

SEQ ID NO: 654339 - DNA, 15 bp, Homo sapiens
tgtctttaaatagta

SEQ ID NO: 654340 - DNA, 15 bp, Homo sapiens
gtctttaaatagtaa

SEQ ID NO: 654341 - DNA, 15 bp, Homo sapiens
tctttaaatagtaaa

SEQ ID NO: 654342 - DNA, 15 bp, Homo sapiens
ctttaaatagtaaag

SEQ ID NO: 654343 - DNA, 15 bp, Homo sapiens
tttaaatagtaaagg

SEQ ID NO: 654344 - DNA, 15 bp, Homo sapiens
ttaaatagtaaagga

SEQ ID NO: 654345 - DNA, 15 bp, Homo sapiens
taaatagtaaaggac

SEQ ID NO: 654346 - DNA, 15 bp, Homo sapiens
aaatagtaaaggacc

SEQ ID NO: 654347 - DNA, 15 bp, Homo sapiens
aatagtaaaggacca

SEQ ID NO: 654348 - DNA, 15 bp, Homo sapiens
atagtaaaggaccag

SEQ ID NO: 654349 - DNA, 15 bp, Homo sapiens
tagtaaaggaccagt

SEQ ID NO: 654350 - DNA, 15 bp, Homo sapiens
agtaaaggaccagtt

SEQ ID NO: 654351 - DNA, 15 bp, Homo sapiens
gtaaaggaccagttt

SEQ ID NO: 654352 - DNA, 15 bp, Homo sapiens
taaaggaccagtttc

SEQ ID NO: 654353 - DNA, 15 bp, Homo sapiens
aaaggaccagtttct

SEQ ID NO: 654354 - DNA, 15 bp, Homo sapiens
aaggaccagtttctg

SEQ ID NO: 654355 - DNA, 15 bp, Homo sapiens
aggaccagtttctgc

SEQ ID NO: 654356 - DNA, 15 bp, Homo sapiens
ggaccagtttctgca

SEQ ID NO: 654357 - DNA, 15 bp, Homo sapiens
gaccagtttctgcaa

SEQ ID NO: 654358 - DNA, 15 bp, Homo sapiens
accagtttctgcaac

SEQ ID NO: 654359 - DNA, 15 bp, Homo sapiens
ccagtttctgcaacc

SEQ ID NO: 654360 - DNA, 15 bp, Homo sapiens
cagtttctgcaacca

SEQ ID NO: 654361 - DNA, 15 bp, Homo sapiens
agtttctgcaaccat

SEQ ID NO: 654362 - DNA, 15 bp, Homo sapiens
gtttctgcaaccata

SEQ ID NO: 654363 - DNA, 15 bp, Homo sapiens
tttctgcaaccatag

SEQ ID NO: 654364 - DNA, 15 bp, Homo sapiens
ttctgcaaccatagg

SEQ ID NO: 654365 - DNA, 15 bp, Homo sapiens
tctgcaaccatagga

SEQ ID NO: 654366 - DNA, 15 bp, Homo sapiens
ctgcaaccataggac

SEQ ID NO: 654367 - DNA, 15 bp, Homo sapiens
tgcaaccataggacc

SEQ ID NO: 654368 - DNA, 15 bp, Homo sapiens
gcaaccataggacca

SEQ ID NO: 654369 - DNA, 15 bp, Homo sapiens
caaccataggaccac

SEQ ID NO: 654370 - DNA, 15 bp, Homo sapiens
aaccataggaccact

SEQ ID NO: 654371 - DNA, 15 bp, Homo sapiens
accataggaccacta

SEQ ID NO: 654372 - DNA, 15 bp, Homo sapiens
ccataggaccactaa

SEQ ID NO: 654373 - DNA, 15 bp, Homo sapiens
cataggaccactaag

SEQ ID NO: 654374 - DNA, 15 bp, Homo sapiens
ataggaccactaaga

SEQ ID NO: 654375 - DNA, 15 bp, Homo sapiens
taggaccactaagaa

SEQ ID NO: 654376 - DNA, 15 bp, Homo sapiens
aggaccactaagaaa

SEQ ID NO: 654377 - DNA, 15 bp, Homo sapiens
ggaccactaagaaaa

SEQ ID NO: 654378 - DNA, 15 bp, Homo sapiens
gaccactaagaaaat

SEQ ID NO: 654379 - DNA, 15 bp, Homo sapiens
accactaagaaaatg

SEQ ID NO: 654380 - DNA, 15 bp, Homo sapiens
ccactaagaaaatga

SEQ ID NO: 654381 - DNA, 15 bp, Homo sapiens
cactaagaaaatgat

SEQ ID NO: 654382 - DNA, 15 bp, Homo sapiens
actaagaaaatgatg

SEQ ID NO: 654383 - DNA, 15 bp, Homo sapiens
ctaagaaaatgatgc

SEQ ID NO: 654384 - DNA, 15 bp, Homo sapiens
taagaaaatgatgca

SEQ ID NO: 654385 - DNA, 15 bp, Homo sapiens
aagaaaatgatgcaa

SEQ ID NO: 654386 - DNA, 15 bp, Homo sapiens
agaaaatgatgcaaa

SEQ ID NO: 654387 - DNA, 15 bp, Homo sapiens
gaaaatgatgcaaaa

SEQ ID NO: 654388 - DNA, 15 bp, Homo sapiens
aaaatgatgcaaaat

SEQ ID NO: 654389 - DNA, 15 bp, Homo sapiens
aaatgatgcaaaatt

SEQ ID NO: 654390 - DNA, 15 bp, Homo sapiens
aatgatgcaaaatta

SEQ ID NO: 654391 - DNA, 15 bp, Homo sapiens
atgatgcaaaattag

SEQ ID NO: 654392 - DNA, 15 bp, Homo sapiens
tgatgcaaaattaga

SEQ ID NO: 654393 - DNA, 15 bp, Homo sapiens
gatgcaaaattagaa

SEQ ID NO: 654394 - DNA, 15 bp, Homo sapiens
atgcaaaattagaaa

SEQ ID NO: 654395 - DNA, 15 bp, Homo sapiens
tgcaaaattagaaaa

SEQ ID NO: 654396 - DNA, 15 bp, Homo sapiens
gcaaaattagaaaat

SEQ ID NO: 654397 - DNA, 15 bp, Homo sapiens
caaaattagaaaata

SEQ ID NO: 654398 - DNA, 15 bp, Homo sapiens
aaaattagaaaataa

SEQ ID NO: 654399 - DNA, 15 bp, Homo sapiens
aaattagaaaataat

SEQ ID NO: 654400 - DNA, 15 bp, Homo sapiens
aattagaaaataatt

SEQ ID NO: 654401 - DNA, 15 bp, Homo sapiens
attagaaaataattt

SEQ ID NO: 654402 - DNA, 15 bp, Homo sapiens
ttagaaaataatttg

SEQ ID NO: 654403 - DNA, 15 bp, Homo sapiens
tagaaaataatttgc

SEQ ID NO: 654404 - DNA, 15 bp, Homo sapiens
agaaaataatttgca

SEQ ID NO: 654405 - DNA, 15 bp, Homo sapiens
gaaaataatttgcat

SEQ ID NO: 654406 - DNA, 15 bp, Homo sapiens
aaaataatttgcatt

SEQ ID NO: 654407 - DNA, 15 bp, Homo sapiens
aaataatttgcattt

SEQ ID NO: 654408 - DNA, 15 bp, Homo sapiens
aataatttgcatttt

SEQ ID NO: 654409 - DNA, 15 bp, Homo sapiens
ataatttgcattttt

SEQ ID NO: 654410 - DNA, 15 bp, Homo sapiens
taatttgcatttttt

SEQ ID NO: 654411 - DNA, 15 bp, Homo sapiens
aatttgcattttttt

SEQ ID NO: 654412 - DNA, 15 bp, Homo sapiens
atttgcatttttttc

SEQ ID NO: 654413 - DNA, 15 bp, Homo sapiens
tttgcatttttttct

SEQ ID NO: 654414 - DNA, 15 bp, Homo sapiens
ttgcatttttttctg

SEQ ID NO: 654415 - DNA, 15 bp, Homo sapiens
tgcatttttttctga

SEQ ID NO: 654416 - DNA, 15 bp, Homo sapiens
gcatttttttctgac

SEQ ID NO: 654417 - DNA, 15 bp, Homo sapiens
catttttttctgaca

SEQ ID NO: 654418 - DNA, 15 bp, Homo sapiens
atttttttctgacat

SEQ ID NO: 654419 - DNA, 15 bp, Homo sapiens
tttttttctgacatg

SEQ ID NO: 654420 - DNA, 15 bp, Homo sapiens
ttttttctgacatgc

SEQ ID NO: 654421 - DNA, 15 bp, Homo sapiens
tttttctgacatgct

SEQ ID NO: 654422 - DNA, 15 bp, Homo sapiens
ttttctgacatgcta

SEQ ID NO: 654423 - DNA, 15 bp, Homo sapiens
tttctgacatgctaa

SEQ ID NO: 654424 - DNA, 15 bp, Homo sapiens
ttctgacatgctaat

SEQ ID NO: 654425 - DNA, 15 bp, Homo sapiens
tctgacatgctaatg

SEQ ID NO: 654426 - DNA, 15 bp, Homo sapiens
ctgacatgctaatgc

SEQ ID NO: 654427 - DNA, 15 bp, Homo sapiens
tgacatgctaatgcc

SEQ ID NO: 654428 - DNA, 15 bp, Homo sapiens
gacatgctaatgccc

SEQ ID NO: 654429 - DNA, 15 bp, Homo sapiens
acatgctaatgccct

SEQ ID NO: 654430 - DNA, 15 bp, Homo sapiens
catgctaatgccctt

SEQ ID NO: 654431 - DNA, 15 bp, Homo sapiens
atgctaatgcccttc

SEQ ID NO: 654432 - DNA, 15 bp, Homo sapiens
tgctaatgcccttca

SEQ ID NO: 654433 - DNA, 15 bp, Homo sapiens
gctaatgcccttcaa

SEQ ID NO: 654434 - DNA, 15 bp, Homo sapiens
ctaatgcccttcaag

SEQ ID NO: 654435 - DNA, 15 bp, Homo sapiens
taatgcccttcaaga

SEQ ID NO: 654436 - DNA, 15 bp, Homo sapiens
aatgcccttcaagac

SEQ ID NO: 654437 - DNA, 15 bp, Homo sapiens
atgcccttcaagacc

SEQ ID NO: 654438 - DNA, 15 bp, Homo sapiens
tgcccttcaagacca

SEQ ID NO: 654439 - DNA, 15 bp, Homo sapiens
gcccttcaagaccat

SEQ ID NO: 654440 - DNA, 15 bp, Homo sapiens
cccttcaagaccatc

SEQ ID NO: 654441 - DNA, 15 bp, Homo sapiens
ccttcaagaccatct

SEQ ID NO: 654442 - DNA, 15 bp, Homo sapiens
cttcaagaccatctc

SEQ ID NO: 654443 - DNA, 15 bp, Homo sapiens
ttcaagaccatctcc

SEQ ID NO: 654444 - DNA, 15 bp, Homo sapiens
tcaagaccatctccc

SEQ ID NO: 654445 - DNA, 15 bp, Homo sapiens
caagaccatctccct

SEQ ID NO: 654446 - DNA, 15 bp, Homo sapiens
aagaccatctccctc

SEQ ID NO: 654447 - DNA, 15 bp, Homo sapiens
agaccatctccctcc

SEQ ID NO: 654448 - DNA, 15 bp, Homo sapiens
gaccatctccctcct

SEQ ID NO: 654449 - DNA, 15 bp, Homo sapiens
accatctccctcctg

SEQ ID NO: 654450 - DNA, 15 bp, Homo sapiens
ccatctccctcctga

SEQ ID NO: 654451 - DNA, 15 bp, Homo sapiens
catctccctcctgat

SEQ ID NO: 654452 - DNA, 15 bp, Homo sapiens
atctccctcctgatg

SEQ ID NO: 654453 - DNA, 15 bp, Homo sapiens
tctccctcctgatgg

SEQ ID NO: 654454 - DNA, 15 bp, Homo sapiens
ctccctcctgatgga

SEQ ID NO: 654455 - DNA, 15 bp, Homo sapiens
tccctcctgatggag

SEQ ID NO: 654456 - DNA, 15 bp, Homo sapiens
ccctcctgatggaga

SEQ ID NO: 654457 - DNA, 15 bp, Homo sapiens
cctcctgatggagag

SEQ ID NO: 654458 - DNA, 15 bp, Homo sapiens
ctcctgatggagagt

SEQ ID NO: 654459 - DNA, 15 bp, Homo sapiens
tcctgatggagagtt

SEQ ID NO: 654460 - DNA, 15 bp, Homo sapiens
cctgatggagagtta

SEQ ID NO: 654461 - DNA, 15 bp, Homo sapiens
ctgatggagagttat

SEQ ID NO: 654462 - DNA, 15 bp, Homo sapiens
tgatggagagttata

SEQ ID NO: 654463 - DNA, 15 bp, Homo sapiens
gatggagagttataa

SEQ ID NO: 654464 - DNA, 15 bp, Homo sapiens
atggagagttataaa

SEQ ID NO: 654465 - DNA, 15 bp, Homo sapiens
tggagagttataaac

SEQ ID NO: 654466 - DNA, 15 bp, Homo sapiens
ggagagttataaaca

SEQ ID NO: 654467 - DNA, 15 bp, Homo sapiens
gagagttataaacag

SEQ ID NO: 654468 - DNA, 15 bp, Homo sapiens
agagttataaacagg

SEQ ID NO: 654469 - DNA, 15 bp, Homo sapiens
gagttataaacagga

SEQ ID NO: 654470 - DNA, 15 bp, Homo sapiens
agttataaacaggag

SEQ ID NO: 654471 - DNA, 15 bp, Homo sapiens
gttataaacaggaga

SEQ ID NO: 654472 - DNA, 15 bp, Homo sapiens
ttataaacaggagag

SEQ ID NO: 654473 - DNA, 15 bp, Homo sapiens
tataaacaggagagc

SEQ ID NO: 654474 - DNA, 15 bp, Homo sapiens
ataaacaggagagcg

SEQ ID NO: 654475 - DNA, 15 bp, Homo sapiens
taaacaggagagcga

SEQ ID NO: 654476 - DNA, 15 bp, Homo sapiens
aaacaggagagcgaa

SEQ ID NO: 654477 - DNA, 15 bp, Homo sapiens
aacaggagagcgaag

SEQ ID NO: 654478 - DNA, 15 bp, Homo sapiens
acaggagagcgaagg

SEQ ID NO: 654479 - DNA, 15 bp, Homo sapiens
caggagagcgaaggg

SEQ ID NO: 654480 - DNA, 15 bp, Homo sapiens
aggagagcgaagggt

SEQ ID NO: 654481 - DNA, 15 bp, Homo sapiens
ggagagcgaagggtt

SEQ ID NO: 654482 - DNA, 15 bp, Homo sapiens
gagagcgaagggttc

SEQ ID NO: 654483 - DNA, 15 bp, Homo sapiens
agagcgaagggttca

SEQ ID NO: 654484 - DNA, 15 bp, Homo sapiens
gagcgaagggttcaa

SEQ ID NO: 654485 - DNA, 15 bp, Homo sapiens
agcgaagggttcaag

SEQ ID NO: 654486 - DNA, 15 bp, Homo sapiens
gcgaagggttcaaga

SEQ ID NO: 654487 - DNA, 15 bp, Homo sapiens
cgaagggttcaagac

SEQ ID NO: 654488 - DNA, 15 bp, Homo sapiens
gaagggttcaagacc

SEQ ID NO: 654489 - DNA, 15 bp, Homo sapiens
aagggttcaagacca

SEQ ID NO: 654490 - DNA, 15 bp, Homo sapiens
agggttcaagaccaa

SEQ ID NO: 654491 - DNA, 15 bp, Homo sapiens
gggttcaagaccaag

SEQ ID NO: 654492 - DNA, 15 bp, Homo sapiens
ggttcaagaccaagg

SEQ ID NO: 654493 - DNA, 15 bp, Homo sapiens
gttcaagaccaaggg

SEQ ID NO: 654494 - DNA, 15 bp, Homo sapiens
ttcaagaccaagggc

SEQ ID NO: 654495 - DNA, 15 bp, Homo sapiens
tcaagaccaagggca

SEQ ID NO: 654496 - DNA, 15 bp, Homo sapiens
caagaccaagggcat

SEQ ID NO: 654497 - DNA, 15 bp, Homo sapiens
aagaccaagggcatg

SEQ ID NO: 654498 - DNA, 15 bp, Homo sapiens
agaccaagggcatgg

SEQ ID NO: 654499 - DNA, 15 bp, Homo sapiens
gaccaagggcatggc

SEQ ID NO: 654500 - DNA, 15 bp, Homo sapiens
accaagggcatggcc

SEQ ID NO: 654501 - DNA, 15 bp, Homo sapiens
ccaagggcatggcct

SEQ ID NO: 654502 - DNA, 15 bp, Homo sapiens
caagggcatggcctc

SEQ ID NO: 654503 - DNA, 15 bp, Homo sapiens
aagggcatggcctct

SEQ ID NO: 654504 - DNA, 15 bp, Homo sapiens
agggcatggcctcta

SEQ ID NO: 654505 - DNA, 15 bp, Homo sapiens
gggcatggcctctat

SEQ ID NO: 654506 - DNA, 15 bp, Homo sapiens
ggcatggcctctatt

SEQ ID NO: 654507 - DNA, 15 bp, Homo sapiens
gcatggcctctattg

SEQ ID NO: 654508 - DNA, 15 bp, Homo sapiens
catggcctctattgc

SEQ ID NO: 654509 - DNA, 15 bp, Homo sapiens
atggcctctattgcc

SEQ ID NO: 654510 - DNA, 15 bp, Homo sapiens
tggcctctattgcca

SEQ ID NO: 654511 - DNA, 15 bp, Homo sapiens
ggcctctattgccaa

SEQ ID NO: 654512 - DNA, 15 bp, Homo sapiens
gcctctattgccaaa

SEQ ID NO: 654513 - DNA, 15 bp, Homo sapiens
cctctattgccaaac

SEQ ID NO: 654514 - DNA, 15 bp, Homo sapiens
ctctattgccaaaca

SEQ ID NO: 654515 - DNA, 15 bp, Homo sapiens
tctattgccaaacac

SEQ ID NO: 654516 - DNA, 15 bp, Homo sapiens
ctattgccaaacact

SEQ ID NO: 654517 - DNA, 15 bp, Homo sapiens
tattgccaaacactt

SEQ ID NO: 654518 - DNA, 15 bp, Homo sapiens
attgccaaacacttc

SEQ ID NO: 654519 - DNA, 15 bp, Homo sapiens
ttgccaaacacttca

SEQ ID NO: 654520 - DNA, 15 bp, Homo sapiens
tgccaaacacttcag

SEQ ID NO: 654521 - DNA, 15 bp, Homo sapiens
gccaaacacttcagg

SEQ ID NO: 654522 - DNA, 15 bp, Homo sapiens
ccaaacacttcaggt

SEQ ID NO: 654523 - DNA, 15 bp, Homo sapiens
caaacacttcaggtt

SEQ ID NO: 654524 - DNA, 15 bp, Homo sapiens
aaacacttcaggttt

SEQ ID NO: 654525 - DNA, 15 bp, Homo sapiens
aacacttcaggtttg

SEQ ID NO: 654526 - DNA, 15 bp, Homo sapiens
acacttcaggtttga

SEQ ID NO: 654527 - DNA, 15 bp, Homo sapiens
cacttcaggtttgaa

SEQ ID NO: 654528 - DNA, 15 bp, Homo sapiens
acttcaggtttgaac

SEQ ID NO: 654529 - DNA, 15 bp, Homo sapiens
cttcaggtttgaacc

SEQ ID NO: 654530 - DNA, 15 bp, Homo sapiens
ttcaggtttgaaccc

SEQ ID NO: 654531 - DNA, 15 bp, Homo sapiens
tcaggtttgaacccc

SEQ ID NO: 654532 - DNA, 15 bp, Homo sapiens
caggtttgaacccca

SEQ ID NO: 654533 - DNA, 15 bp, Homo sapiens
aggtttgaaccccag

SEQ ID NO: 654534 - DNA, 15 bp, Homo sapiens
ggtttgaaccccagc

SEQ ID NO: 654535 - DNA, 15 bp, Homo sapiens
gtttgaaccccagct

SEQ ID NO: 654536 - DNA, 15 bp, Homo sapiens
tttgaaccccagctc

SEQ ID NO: 654537 - DNA, 15 bp, Homo sapiens
ttgaaccccagctct

SEQ ID NO: 654538 - DNA, 15 bp, Homo sapiens
tgaaccccagctctg

SEQ ID NO: 654539 - DNA, 15 bp, Homo sapiens
gaaccccagctctgc

SEQ ID NO: 654540 - DNA, 15 bp, Homo sapiens
aaccccagctctgca

SEQ ID NO: 654541 - DNA, 15 bp, Homo sapiens
accccagctctgcaa

SEQ ID NO: 654542 - DNA, 15 bp, Homo sapiens
ccccagctctgcaac

SEQ ID NO: 654543 - DNA, 15 bp, Homo sapiens
cccagctctgcaact

SEQ ID NO: 654544 - DNA, 15 bp, Homo sapiens
ccagctctgcaactt

SEQ ID NO: 654545 - DNA, 15 bp, Homo sapiens
cagctctgcaactta

SEQ ID NO: 654546 - DNA, 15 bp, Homo sapiens
agctctgcaacttac

SEQ ID NO: 654547 - DNA, 15 bp, Homo sapiens
gctctgcaacttact

SEQ ID NO: 654548 - DNA, 15 bp, Homo sapiens
ctctgcaacttactt

SEQ ID NO: 654549 - DNA, 15 bp, Homo sapiens
tctgcaacttacttg

SEQ ID NO: 654550 - DNA, 15 bp, Homo sapiens
ctgcaacttacttgg

SEQ ID NO: 654551 - DNA, 15 bp, Homo sapiens
tgcaacttacttggt

SEQ ID NO: 654552 - DNA, 15 bp, Homo sapiens
gcaacttacttggtg

SEQ ID NO: 654553 - DNA, 15 bp, Homo sapiens
caacttacttggtga

SEQ ID NO: 654554 - DNA, 15 bp, Homo sapiens
aacttacttggtgag

SEQ ID NO: 654555 - DNA, 15 bp, Homo sapiens
acttacttggtgagt

SEQ ID NO: 654556 - DNA, 15 bp, Homo sapiens
cttacttggtgagtg

SEQ ID NO: 654557 - DNA, 15 bp, Homo sapiens
ttacttggtgagtga

SEQ ID NO: 654558 - DNA, 15 bp, Homo sapiens
tacttggtgagtgat

SEQ ID NO: 654559 - DNA, 15 bp, Homo sapiens
acttggtgagtgatc

SEQ ID NO: 654560 - DNA, 15 bp, Homo sapiens
cttggtgagtgatct

SEQ ID NO: 654561 - DNA, 15 bp, Homo sapiens
ttggtgagtgatctt

SEQ ID NO: 654562 - DNA, 15 bp, Homo sapiens
tggtgagtgatcttg

SEQ ID NO: 654563 - DNA, 15 bp, Homo sapiens
ggtgagtgatcttga

SEQ ID NO: 654564 - DNA, 15 bp, Homo sapiens
gtgagtgatcttgag

SEQ ID NO: 654565 - DNA, 15 bp, Homo sapiens
tgagtgatcttgagc

SEQ ID NO: 654566 - DNA, 15 bp, Homo sapiens
gagtgatcttgagca

SEQ ID NO: 654567 - DNA, 15 bp, Homo sapiens
agtgatcttgagcaa

SEQ ID NO: 654568 - DNA, 15 bp, Homo sapiens
gtgatcttgagcaag

SEQ ID NO: 654569 - DNA, 15 bp, Homo sapiens
tgatcttgagcaagt

SEQ ID NO: 654570 - DNA, 15 bp, Homo sapiens
gatcttgagcaagtt

SEQ ID NO: 654571 - DNA, 15 bp, Homo sapiens
atcttgagcaagtta

SEQ ID NO: 654572 - DNA, 15 bp, Homo sapiens
tcttgagcaagttat

SEQ ID NO: 654573 - DNA, 15 bp, Homo sapiens
cttgagcaagttatt

SEQ ID NO: 654574 - DNA, 15 bp, Homo sapiens
ttgagcaagttattt

SEQ ID NO: 654575 - DNA, 15 bp, Homo sapiens
tgagcaagttattta

SEQ ID NO: 654576 - DNA, 15 bp, Homo sapiens
gagcaagttatttaa

SEQ ID NO: 654577 - DNA, 15 bp, Homo sapiens
agcaagttatttaac

SEQ ID NO: 654578 - DNA, 15 bp, Homo sapiens
gcaagttatttaacc

SEQ ID NO: 654579 - DNA, 15 bp, Homo sapiens
caagttatttaacct

SEQ ID NO: 654580 - DNA, 15 bp, Homo sapiens
aagttatttaacctg

SEQ ID NO: 654581 - DNA, 15 bp, Homo sapiens
agttatttaacctgt

SEQ ID NO: 654582 - DNA, 15 bp, Homo sapiens
gttatttaacctgtt

SEQ ID NO: 654583 - DNA, 15 bp, Homo sapiens
ttatttaacctgttt

SEQ ID NO: 654584 - DNA, 15 bp, Homo sapiens
tatttaacctgtttg

SEQ ID NO: 654585 - DNA, 15 bp, Homo sapiens
atttaacctgtttgt

SEQ ID NO: 654586 - DNA, 15 bp, Homo sapiens
tttaacctgtttgtt

SEQ ID NO: 654587 - DNA, 15 bp, Homo sapiens
ttaacctgtttgttc

SEQ ID NO: 654588 - DNA, 15 bp, Homo sapiens
taacctgtttgttcc

SEQ ID NO: 654589 - DNA, 15 bp, Homo sapiens
aacctgtttgttcct

SEQ ID NO: 654590 - DNA, 15 bp, Homo sapiens
acctgtttgttcctc

SEQ ID NO: 654591 - DNA, 15 bp, Homo sapiens
cctgtttgttcctca

SEQ ID NO: 654592 - DNA, 15 bp, Homo sapiens
ctgtttgttcctcaa

SEQ ID NO: 654593 - DNA, 15 bp, Homo sapiens
tgtttgttcctcaat

SEQ ID NO: 654594 - DNA, 15 bp, Homo sapiens
gtttgttcctcaatt

SEQ ID NO: 654595 - DNA, 15 bp, Homo sapiens
tttgttcctcaattt

SEQ ID NO: 654596 - DNA, 15 bp, Homo sapiens
ttgttcctcaatttt

SEQ ID NO: 654597 - DNA, 15 bp, Homo sapiens
tgttcctcaattttc

SEQ ID NO: 654598 - DNA, 15 bp, Homo sapiens
gttcctcaattttct

SEQ ID NO: 654599 - DNA, 15 bp, Homo sapiens
ttcctcaattttctc

SEQ ID NO: 654600 - DNA, 15 bp, Homo sapiens
tcctcaattttctca

SEQ ID NO: 654601 - DNA, 15 bp, Homo sapiens
cctcaattttctcat

SEQ ID NO: 654602 - DNA, 15 bp, Homo sapiens
ctcaattttctcatc

SEQ ID NO: 654603 - DNA, 15 bp, Homo sapiens
tcaattttctcatct

SEQ ID NO: 654604 - DNA, 15 bp, Homo sapiens
caattttctcatctg

SEQ ID NO: 654605 - DNA, 15 bp, Homo sapiens
aattttctcatctgt

SEQ ID NO: 654606 - DNA, 15 bp, Homo sapiens
attttctcatctgta

SEQ ID NO: 654607 - DNA, 15 bp, Homo sapiens
ttttctcatctgtaa

SEQ ID NO: 654608 - DNA, 15 bp, Homo sapiens
tttctcatctgtaaa

SEQ ID NO: 654609 - DNA, 15 bp, Homo sapiens
ttctcatctgtaaaa

SEQ ID NO: 654610 - DNA, 15 bp, Homo sapiens
tctcatctgtaaaat

SEQ ID NO: 654611 - DNA, 15 bp, Homo sapiens
ctcatctgtaaaatg

SEQ ID NO: 654612 - DNA, 15 bp, Homo sapiens
tcatctgtaaaatgg

SEQ ID NO: 654613 - DNA, 15 bp, Homo sapiens
catctgtaaaatggg

SEQ ID NO: 654614 - DNA, 15 bp, Homo sapiens
atctgtaaaatgggg

SEQ ID NO: 654615 - DNA, 15 bp, Homo sapiens
tctgtaaaatggggc

SEQ ID NO: 654616 - DNA, 15 bp, Homo sapiens
ctgtaaaatggggcc

SEQ ID NO: 654617 - DNA, 15 bp, Homo sapiens
tgtaaaatggggcct

SEQ ID NO: 654618 - DNA, 15 bp, Homo sapiens
gtaaaatggggcctg

SEQ ID NO: 654619 - DNA, 15 bp, Homo sapiens
taaaatggggcctgc

SEQ ID NO: 654620 - DNA, 15 bp, Homo sapiens
aaaatggggcctgcc

SEQ ID NO: 654621 - DNA, 15 bp, Homo sapiens
aaatggggcctgcct

SEQ ID NO: 654622 - DNA, 15 bp, Homo sapiens
aatggggcctgcctt

SEQ ID NO: 654623 - DNA, 15 bp, Homo sapiens
atggggcctgcctta

SEQ ID NO: 654624 - DNA, 15 bp, Homo sapiens
tggggcctgccttat

SEQ ID NO: 654625 - DNA, 15 bp, Homo sapiens
ggggcctgccttata

SEQ ID NO: 654626 - DNA, 15 bp, Homo sapiens
gggcctgccttatag

SEQ ID NO: 654627 - DNA, 15 bp, Homo sapiens
ggcctgccttataga

SEQ ID NO: 654628 - DNA, 15 bp, Homo sapiens
gcctgccttatagag

SEQ ID NO: 654629 - DNA, 15 bp, Homo sapiens
cctgccttatagagt

SEQ ID NO: 654630 - DNA, 15 bp, Homo sapiens
ctgccttatagagtt

SEQ ID NO: 654631 - DNA, 15 bp, Homo sapiens
tgccttatagagttg

SEQ ID NO: 654632 - DNA, 15 bp, Homo sapiens
gccttatagagttgg

SEQ ID NO: 654633 - DNA, 15 bp, Homo sapiens
ccttatagagttggt

SEQ ID NO: 654634 - DNA, 15 bp, Homo sapiens
cttatagagttggtg

SEQ ID NO: 654635 - DNA, 15 bp, Homo sapiens
ttatagagttggtgt

SEQ ID NO: 654636 - DNA, 15 bp, Homo sapiens
tatagagttggtgtt

SEQ ID NO: 654637 - DNA, 15 bp, Homo sapiens
atagagttggtgtta

SEQ ID NO: 654638 - DNA, 15 bp, Homo sapiens
tagagttggtgttag

SEQ ID NO: 654639 - DNA, 15 bp, Homo sapiens
agagttggtgttagg

SEQ ID NO: 654640 - DNA, 15 bp, Homo sapiens
gagttggtgttagga

SEQ ID NO: 654641 - DNA, 15 bp, Homo sapiens
agttggtgttaggat

SEQ ID NO: 654642 - DNA, 15 bp, Homo sapiens
gttggtgttaggatt

SEQ ID NO: 654643 - DNA, 15 bp, Homo sapiens
ttggtgttaggatta

SEQ ID NO: 654644 - DNA, 15 bp, Homo sapiens
tggtgttaggattaa

SEQ ID NO: 654645 - DNA, 15 bp, Homo sapiens
ggtgttaggattaaa

SEQ ID NO: 654646 - DNA, 15 bp, Homo sapiens
gtgttaggattaaat

SEQ ID NO: 654647 - DNA, 15 bp, Homo sapiens
tgttaggattaaatt

SEQ ID NO: 654648 - DNA, 15 bp, Homo sapiens
gttaggattaaatta

SEQ ID NO: 654649 - DNA, 15 bp, Homo sapiens
ttaggattaaattag

SEQ ID NO: 654650 - DNA, 15 bp, Homo sapiens
taggattaaattagt

SEQ ID NO: 654651 - DNA, 15 bp, Homo sapiens
aggattaaattagtt

SEQ ID NO: 654652 - DNA, 15 bp, Homo sapiens
ggattaaattagtta

SEQ ID NO: 654653 - DNA, 15 bp, Homo sapiens
gattaaattagttat

SEQ ID NO: 654654 - DNA, 15 bp, Homo sapiens
attaaattagttatt

SEQ ID NO: 654655 - DNA, 15 bp, Homo sapiens
ttaaattagttatta

SEQ ID NO: 654656 - DNA, 15 bp, Homo sapiens
taaattagttattat

SEQ ID NO: 654657 - DNA, 15 bp, Homo sapiens
aaattagttattata

SEQ ID NO: 654658 - DNA, 15 bp, Homo sapiens
aattagttattatat

SEQ ID NO: 654659 - DNA, 15 bp, Homo sapiens
attagttattatatt

SEQ ID NO: 654660 - DNA, 15 bp, Homo sapiens
ttagttattatattg

SEQ ID NO: 654661 - DNA, 15 bp, Homo sapiens
tagttattatattgg

SEQ ID NO: 654662 - DNA, 15 bp, Homo sapiens
agttattatattgga

SEQ ID NO: 654663 - DNA, 15 bp, Homo sapiens
gttattatattggaa

SEQ ID NO: 654664 - DNA, 15 bp, Homo sapiens
ttattatattggaat

SEQ ID NO: 654665 - DNA, 15 bp, Homo sapiens
tattatattggaata

SEQ ID NO: 654666 - DNA, 15 bp, Homo sapiens
attatattggaatat

SEQ ID NO: 654667 - DNA, 15 bp, Homo sapiens
ttatattggaatatg

SEQ ID NO: 654668 - DNA, 15 bp, Homo sapiens
tatattggaatatgt

SEQ ID NO: 654669 - DNA, 15 bp, Homo sapiens
atattggaatatgtt

SEQ ID NO: 654670 - DNA, 15 bp, Homo sapiens
tattggaatatgtta

SEQ ID NO: 654671 - DNA, 15 bp, Homo sapiens
attggaatatgttaa

SEQ ID NO: 654672 - DNA, 15 bp, Homo sapiens
ttggaatatgttaac

SEQ ID NO: 654673 - DNA, 15 bp, Homo sapiens
tggaatatgttaact

SEQ ID NO: 654674 - DNA, 15 bp, Homo sapiens
ggaatatgttaactt

SEQ ID NO: 654675 - DNA, 15 bp, Homo sapiens
gaatatgttaactta

SEQ ID NO: 654676 - DNA, 15 bp, Homo sapiens
aatatgttaacttag

SEQ ID NO: 654677 - DNA, 15 bp, Homo sapiens
atatgttaacttaga

SEQ ID NO: 654678 - DNA, 15 bp, Homo sapiens
tatgttaacttagaa

SEQ ID NO: 654679 - DNA, 15 bp, Homo sapiens
atgttaacttagaat

SEQ ID NO: 654680 - DNA, 15 bp, Homo sapiens
tgttaacttagaata

SEQ ID NO: 654681 - DNA, 15 bp, Homo sapiens
gttaacttagaatat

SEQ ID NO: 654682 - DNA, 15 bp, Homo sapiens
ttaacttagaatatt

SEQ ID NO: 654683 - DNA, 15 bp, Homo sapiens
taacttagaatattg

SEQ ID NO: 654684 - DNA, 15 bp, Homo sapiens
aacttagaatattgc

SEQ ID NO: 654685 - DNA, 15 bp, Homo sapiens
acttagaatattgcc

SEQ ID NO: 654686 - DNA, 15 bp, Homo sapiens
cttagaatattgcct

SEQ ID NO: 654687 - DNA, 15 bp, Homo sapiens
ttagaatattgcctg

SEQ ID NO: 654688 - DNA, 15 bp, Homo sapiens
tagaatattgcctgg

SEQ ID NO: 654689 - DNA, 15 bp, Homo sapiens
agaatattgcctggc

SEQ ID NO: 654690 - DNA, 15 bp, Homo sapiens
gaatattgcctggca

SEQ ID NO: 654691 - DNA, 15 bp, Homo sapiens
aatattgcctggcac

SEQ ID NO: 654692 - DNA, 15 bp, Homo sapiens
atattgcctggcaca

SEQ ID NO: 654693 - DNA, 15 bp, Homo sapiens
tattgcctggcacac

SEQ ID NO: 654694 - DNA, 15 bp, Homo sapiens
attgcctggcacaca

SEQ ID NO: 654695 - DNA, 15 bp, Homo sapiens
ttgcctggcacacag

SEQ ID NO: 654696 - DNA, 15 bp, Homo sapiens
tgcctggcacacagt

SEQ ID NO: 654697 - DNA, 15 bp, Homo sapiens
gcctggcacacagta

SEQ ID NO: 654698 - DNA, 15 bp, Homo sapiens
cctggcacacagtaa

SEQ ID NO: 654699 - DNA, 15 bp, Homo sapiens
ctggcacacagtaag

SEQ ID NO: 654700 - DNA, 15 bp, Homo sapiens
tggcacacagtaagc

SEQ ID NO: 654701 - DNA, 15 bp, Homo sapiens
ggcacacagtaagca

SEQ ID NO: 654702 - DNA, 15 bp, Homo sapiens
gcacacagtaagcac

SEQ ID NO: 654703 - DNA, 15 bp, Homo sapiens
cacacagtaagcacc

SEQ ID NO: 654704 - DNA, 15 bp, Homo sapiens
acacagtaagcacca

SEQ ID NO: 654705 - DNA, 15 bp, Homo sapiens
cacagtaagcaccac

SEQ ID NO: 654706 - DNA, 15 bp, Homo sapiens
acagtaagcaccaca

SEQ ID NO: 654707 - DNA, 15 bp, Homo sapiens
cagtaagcaccacat

SEQ ID NO: 654708 - DNA, 15 bp, Homo sapiens
agtaagcaccacata

SEQ ID NO: 654709 - DNA, 15 bp, Homo sapiens
gtaagcaccacatat

SEQ ID NO: 654710 - DNA, 15 bp, Homo sapiens
taagcaccacatatg

SEQ ID NO: 654711 - DNA, 15 bp, Homo sapiens
aagcaccacatatgt

SEQ ID NO: 654712 - DNA, 15 bp, Homo sapiens
agcaccacatatgtg

SEQ ID NO: 654713 - DNA, 15 bp, Homo sapiens
gcaccacatatgtga

SEQ ID NO: 654714 - DNA, 15 bp, Homo sapiens
caccacatatgtgag

SEQ ID NO: 654715 - DNA, 15 bp, Homo sapiens
accacatatgtgagc

SEQ ID NO: 654716 - DNA, 15 bp, Homo sapiens
ccacatatgtgagct

SEQ ID NO: 654717 - DNA, 15 bp, Homo sapiens
cacatatgtgagcta

SEQ ID NO: 654718 - DNA, 15 bp, Homo sapiens
acatatgtgagctat

SEQ ID NO: 654719 - DNA, 15 bp, Homo sapiens
catatgtgagctatt

SEQ ID NO: 654720 - DNA, 15 bp, Homo sapiens
atatgtgagctatta

SEQ ID NO: 654721 - DNA, 15 bp, Homo sapiens
tatgtgagctattac

SEQ ID NO: 654722 - DNA, 15 bp, Homo sapiens
atgtgagctattaca

SEQ ID NO: 654723 - DNA, 15 bp, Homo sapiens
tgtgagctattacac

SEQ ID NO: 654724 - DNA, 15 bp, Homo sapiens
gtgagctattacact

SEQ ID NO: 654725 - DNA, 15 bp, Homo sapiens
tgagctattacactt

SEQ ID NO: 654726 - DNA, 15 bp, Homo sapiens
gagctattacactta

SEQ ID NO: 654727 - DNA, 15 bp, Homo sapiens
agctattacacttaa

SEQ ID NO: 654728 - DNA, 15 bp, Homo sapiens
gctattacacttaat

SEQ ID NO: 654729 - DNA, 15 bp, Homo sapiens
ctattacacttaatt

SEQ ID NO: 654730 - DNA, 15 bp, Homo sapiens
tattacacttaatta

SEQ ID NO: 654731 - DNA, 15 bp, Homo sapiens
attacacttaattat

SEQ ID NO: 654732 - DNA, 15 bp, Homo sapiens
ttacacttaattatt

SEQ ID NO: 654733 - DNA, 15 bp, Homo sapiens
tacacttaattattc

SEQ ID NO: 654734 - DNA, 15 bp, Homo sapiens
acacttaattattct

SEQ ID NO: 654735 - DNA, 15 bp, Homo sapiens
cacttaattattctc

SEQ ID NO: 654736 - DNA, 15 bp, Homo sapiens
acttaattattctct

SEQ ID NO: 654737 - DNA, 15 bp, Homo sapiens
cttaattattctctt

SEQ ID NO: 654738 - DNA, 15 bp, Homo sapiens
ttaattattctcttc

SEQ ID NO: 654739 - DNA, 15 bp, Homo sapiens
taattattctcttct

SEQ ID NO: 654740 - DNA, 15 bp, Homo sapiens
aattattctcttctg

SEQ ID NO: 654741 - DNA, 15 bp, Homo sapiens
attattctcttctga

SEQ ID NO: 654742 - DNA, 15 bp, Homo sapiens
ttattctcttctgag

SEQ ID NO: 654743 - DNA, 15 bp, Homo sapiens
tattctcttctgaga

SEQ ID NO: 654744 - DNA, 15 bp, Homo sapiens
attctcttctgagat

SEQ ID NO: 654745 - DNA, 15 bp, Homo sapiens
ttctcttctgagatc

SEQ ID NO: 654746 - DNA, 15 bp, Homo sapiens
tctcttctgagatca

SEQ ID NO: 654747 - DNA, 15 bp, Homo sapiens
ctcttctgagatcaa

SEQ ID NO: 654748 - DNA, 15 bp, Homo sapiens
tcttctgagatcaat

SEQ ID NO: 654749 - DNA, 15 bp, Homo sapiens
cttctgagatcaatt

SEQ ID NO: 654750 - DNA, 15 bp, Homo sapiens
ttctgagatcaattg

SEQ ID NO: 654751 - DNA, 15 bp, Homo sapiens
tctgagatcaattgc

SEQ ID NO: 654752 - DNA, 15 bp, Homo sapiens
ctgagatcaattgca

SEQ ID NO: 654753 - DNA, 15 bp, Homo sapiens
tgagatcaattgcag

SEQ ID NO: 654754 - DNA, 15 bp, Homo sapiens
gagatcaattgcaga

SEQ ID NO: 654755 - DNA, 15 bp, Homo sapiens
agatcaattgcagaa

SEQ ID NO: 654756 - DNA, 15 bp, Homo sapiens
gatcaattgcagaat

SEQ ID NO: 654757 - DNA, 15 bp, Homo sapiens
atcaattgcagaatc

SEQ ID NO: 654758 - DNA, 15 bp, Homo sapiens
tcaattgcagaatct

SEQ ID NO: 654759 - DNA, 15 bp, Homo sapiens
caattgcagaatcta

SEQ ID NO: 654760 - DNA, 15 bp, Homo sapiens
aattgcagaatctat

SEQ ID NO: 654761 - DNA, 15 bp, Homo sapiens
attgcagaatctatt

SEQ ID NO: 654762 - DNA, 15 bp, Homo sapiens
ttgcagaatctattg

SEQ ID NO: 654763 - DNA, 15 bp, Homo sapiens
tgcagaatctattgc

SEQ ID NO: 654764 - DNA, 15 bp, Homo sapiens
gcagaatctattgcc

SEQ ID NO: 654765 - DNA, 15 bp, Homo sapiens
cagaatctattgcca

SEQ ID NO: 654766 - DNA, 15 bp, Homo sapiens
agaatctattgccaa

SEQ ID NO: 654767 - DNA, 15 bp, Homo sapiens
gaatctattgccaat

SEQ ID NO: 654768 - DNA, 15 bp, Homo sapiens
aatctattgccaatg

SEQ ID NO: 654769 - DNA, 15 bp, Homo sapiens
atctattgccaatgc

SEQ ID NO: 654770 - DNA, 15 bp, Homo sapiens
tctattgccaatgct

SEQ ID NO: 654771 - DNA, 15 bp, Homo sapiens
ctattgccaatgctg

SEQ ID NO: 654772 - DNA, 15 bp, Homo sapiens
tattgccaatgctga

SEQ ID NO: 654773 - DNA, 15 bp, Homo sapiens
attgccaatgctgag

SEQ ID NO: 654774 - DNA, 15 bp, Homo sapiens
ttgccaatgctgagg

SEQ ID NO: 654775 - DNA, 15 bp, Homo sapiens
tgccaatgctgaggt

SEQ ID NO: 654776 - DNA, 15 bp, Homo sapiens
gccaatgctgaggta

SEQ ID NO: 654777 - DNA, 15 bp, Homo sapiens
ccaatgctgaggtat

SEQ ID NO: 654778 - DNA, 15 bp, Homo sapiens
caatgctgaggtata

SEQ ID NO: 654779 - DNA, 15 bp, Homo sapiens
aatgctgaggtatat

SEQ ID NO: 654780 - DNA, 15 bp, Homo sapiens
atgctgaggtatatg

SEQ ID NO: 654781 - DNA, 15 bp, Homo sapiens
tgctgaggtatatga

SEQ ID NO: 654782 - DNA, 15 bp, Homo sapiens
gctgaggtatatgaa

SEQ ID NO: 654783 - DNA, 15 bp, Homo sapiens
ctgaggtatatgaac

SEQ ID NO: 654784 - DNA, 15 bp, Homo sapiens
tgaggtatatgaacg

SEQ ID NO: 654785 - DNA, 15 bp, Homo sapiens
gaggtatatgaacgg

SEQ ID NO: 654786 - DNA, 15 bp, Homo sapiens
aggtatatgaacggc

SEQ ID NO: 654787 - DNA, 15 bp, Homo sapiens
ggtatatgaacggcc

SEQ ID NO: 654788 - DNA, 15 bp, Homo sapiens
gtatatgaacggccc

SEQ ID NO: 654789 - DNA, 15 bp, Homo sapiens
tatatgaacggccca

SEQ ID NO: 654790 - DNA, 15 bp, Homo sapiens
atatgaacggcccaa

SEQ ID NO: 654791 - DNA, 15 bp, Homo sapiens
tatgaacggcccaat

SEQ ID NO: 654792 - DNA, 15 bp, Homo sapiens
atgaacggcccaatt

SEQ ID NO: 654793 - DNA, 15 bp, Homo sapiens
tgaacggcccaatta

SEQ ID NO: 654794 - DNA, 15 bp, Homo sapiens
gaacggcccaattaa

SEQ ID NO: 654795 - DNA, 15 bp, Homo sapiens
aacggcccaattaat

SEQ ID NO: 654796 - DNA, 15 bp, Homo sapiens
acggcccaattaatt

SEQ ID NO: 654797 - DNA, 15 bp, Homo sapiens
cggcccaattaatta

SEQ ID NO: 654798 - DNA, 15 bp, Homo sapiens
ggcccaattaattac

SEQ ID NO: 654799 - DNA, 15 bp, Homo sapiens
gcccaattaattaca

SEQ ID NO: 654800 - DNA, 15 bp, Homo sapiens
cccaattaattacac

SEQ ID NO: 654801 - DNA, 15 bp, Homo sapiens
ccaattaattacaca

SEQ ID NO: 654802 - DNA, 15 bp, Homo sapiens
caattaattacacac

SEQ ID NO: 654803 - DNA, 15 bp, Homo sapiens
aattaattacacact

SEQ ID NO: 654804 - DNA, 15 bp, Homo sapiens
attaattacacactc

SEQ ID NO: 654805 - DNA, 15 bp, Homo sapiens
ttaattacacactca

SEQ ID NO: 654806 - DNA, 15 bp, Homo sapiens
taattacacactcat

SEQ ID NO: 654807 - DNA, 15 bp, Homo sapiens
aattacacactcatt

SEQ ID NO: 654808 - DNA, 15 bp, Homo sapiens
attacacactcattt

SEQ ID NO: 654809 - DNA, 15 bp, Homo sapiens
ttacacactcatttt

SEQ ID NO: 654810 - DNA, 15 bp, Homo sapiens
tacacactcattttc

SEQ ID NO: 654811 - DNA, 15 bp, Homo sapiens
acacactcattttct

SEQ ID NO: 654812 - DNA, 15 bp, Homo sapiens
cacactcattttctc

SEQ ID NO: 654813 - DNA, 15 bp, Homo sapiens
acactcattttctct

SEQ ID NO: 654814 - DNA, 15 bp, Homo sapiens
cactcattttctctc

SEQ ID NO: 654815 - DNA, 15 bp, Homo sapiens
actcattttctctcc

SEQ ID NO: 654816 - DNA, 15 bp, Homo sapiens
ctcattttctctcct

SEQ ID NO: 654817 - DNA, 15 bp, Homo sapiens
tcattttctctcctt

SEQ ID NO: 654818 - DNA, 15 bp, Homo sapiens
cattttctctccttg

SEQ ID NO: 654819 - DNA, 15 bp, Homo sapiens
attttctctccttgg

SEQ ID NO: 654820 - DNA, 15 bp, Homo sapiens
ttttctctccttggc

SEQ ID NO: 654821 - DNA, 15 bp, Homo sapiens
tttctctccttggcg

SEQ ID NO: 654822 - DNA, 15 bp, Homo sapiens
ttctctccttggcgg

SEQ ID NO: 654823 - DNA, 15 bp, Homo sapiens
tctctccttggcggc

SEQ ID NO: 654824 - DNA, 15 bp, Homo sapiens
ctctccttggcggca

SEQ ID NO: 654825 - DNA, 15 bp, Homo sapiens
tctccttggcggcag

SEQ ID NO: 654826 - DNA, 15 bp, Homo sapiens
ctccttggcggcagc

SEQ ID NO: 654827 - DNA, 15 bp, Homo sapiens
tccttggcggcagct

SEQ ID NO: 654828 - DNA, 15 bp, Homo sapiens
ccttggcggcagctg

SEQ ID NO: 654829 - DNA, 15 bp, Homo sapiens
cttggcggcagctga

SEQ ID NO: 654830 - DNA, 15 bp, Homo sapiens
ttggcggcagctgat

SEQ ID NO: 654831 - DNA, 15 bp, Homo sapiens
tggcggcagctgatt

SEQ ID NO: 654832 - DNA, 15 bp, Homo sapiens
ggcggcagctgatta

SEQ ID NO: 654833 - DNA, 15 bp, Homo sapiens
gcggcagctgattaa

SEQ ID NO: 654834 - DNA, 15 bp, Homo sapiens
cggcagctgattaaa

SEQ ID NO: 654835 - DNA, 15 bp, Homo sapiens
ggcagctgattaaaa

SEQ ID NO: 654836 - DNA, 15 bp, Homo sapiens
gcagctgattaaaaa

SEQ ID NO: 654837 - DNA, 15 bp, Homo sapiens
cagctgattaaaaac

SEQ ID NO: 654838 - DNA, 15 bp, Homo sapiens
agctgattaaaaacc

SEQ ID NO: 654839 - DNA, 15 bp, Homo sapiens
gctgattaaaaacct

SEQ ID NO: 654840 - DNA, 15 bp, Homo sapiens
ctgattaaaaaccta

SEQ ID NO: 654841 - DNA, 15 bp, Homo sapiens
tgattaaaaacctat

SEQ ID NO: 654842 - DNA, 15 bp, Homo sapiens
gattaaaaacctatt

SEQ ID NO: 654843 - DNA, 15 bp, Homo sapiens
attaaaaacctatta

SEQ ID NO: 654844 - DNA, 15 bp, Homo sapiens
ttaaaaacctattat

SEQ ID NO: 654845 - DNA, 15 bp, Homo sapiens
taaaaacctattatg

SEQ ID NO: 654846 - DNA, 15 bp, Homo sapiens
aaaaacctattatga

SEQ ID NO: 654847 - DNA, 15 bp, Homo sapiens
aaaacctattatgag

SEQ ID NO: 654848 - DNA, 15 bp, Homo sapiens
aaacctattatgagt

SEQ ID NO: 654849 - DNA, 15 bp, Homo sapiens
aacctattatgagta

SEQ ID NO: 654850 - DNA, 15 bp, Homo sapiens
acctattatgagtag

SEQ ID NO: 654851 - DNA, 15 bp, Homo sapiens
cctattatgagtagt

SEQ ID NO: 654852 - DNA, 15 bp, Homo sapiens
ctattatgagtagta

SEQ ID NO: 654853 - DNA, 15 bp, Homo sapiens
tattatgagtagtaa

SEQ ID NO: 654854 - DNA, 15 bp, Homo sapiens
attatgagtagtaag

SEQ ID NO: 654855 - DNA, 15 bp, Homo sapiens
ttatgagtagtaaga

SEQ ID NO: 654856 - DNA, 15 bp, Homo sapiens
tatgagtagtaagaa

SEQ ID NO: 654857 - DNA, 15 bp, Homo sapiens
atgagtagtaagaat

SEQ ID NO: 654858 - DNA, 15 bp, Homo sapiens
tgagtagtaagaatt

SEQ ID NO: 654859 - DNA, 15 bp, Homo sapiens
gagtagtaagaatta

SEQ ID NO: 654860 - DNA, 15 bp, Homo sapiens
agtagtaagaattat

SEQ ID NO: 654861 - DNA, 15 bp, Homo sapiens
gtagtaagaattatg

SEQ ID NO: 654862 - DNA, 15 bp, Homo sapiens
tagtaagaattatgt

SEQ ID NO: 654863 - DNA, 15 bp, Homo sapiens
agtaagaattatgta

SEQ ID NO: 654864 - DNA, 15 bp, Homo sapiens
gtaagaattatgtag

SEQ ID NO: 654865 - DNA, 15 bp, Homo sapiens
taagaattatgtagt

SEQ ID NO: 654866 - DNA, 15 bp, Homo sapiens
aagaattatgtagta

SEQ ID NO: 654867 - DNA, 15 bp, Homo sapiens
agaattatgtagtag

SEQ ID NO: 654868 - DNA, 15 bp, Homo sapiens
gaattatgtagtagt

SEQ ID NO: 654869 - DNA, 15 bp, Homo sapiens
aattatgtagtagta

SEQ ID NO: 654870 - DNA, 15 bp, Homo sapiens
attatgtagtagtat

SEQ ID NO: 654871 - DNA, 15 bp, Homo sapiens
ttatgtagtagtatt

SEQ ID NO: 654872 - DNA, 15 bp, Homo sapiens
tatgtagtagtatta

SEQ ID NO: 654873 - DNA, 15 bp, Homo sapiens
atgtagtagtattag

SEQ ID NO: 654874 - DNA, 15 bp, Homo sapiens
tgtagtagtattagt

SEQ ID NO: 654875 - DNA, 15 bp, Homo sapiens
gtagtagtattagta

SEQ ID NO: 654876 - DNA, 15 bp, Homo sapiens
tagtagtattagtaa

SEQ ID NO: 654877 - DNA, 15 bp, Homo sapiens
agtagtattagtaat

SEQ ID NO: 654878 - DNA, 15 bp, Homo sapiens
gtagtattagtaata

SEQ ID NO: 654879 - DNA, 15 bp, Homo sapiens
tagtattagtaataa

SEQ ID NO: 654880 - DNA, 15 bp, Homo sapiens
agtattagtaataat

SEQ ID NO: 654881 - DNA, 15 bp, Homo sapiens
gtattagtaataatc

SEQ ID NO: 654882 - DNA, 15 bp, Homo sapiens
tattagtaataatca

SEQ ID NO: 654883 - DNA, 15 bp, Homo sapiens
attagtaataatcac

SEQ ID NO: 654884 - DNA, 15 bp, Homo sapiens
ttagtaataatcaca

SEQ ID NO: 654885 - DNA, 15 bp, Homo sapiens
tagtaataatcacat

SEQ ID NO: 654886 - DNA, 15 bp, Homo sapiens
agtaataatcacatg

SEQ ID NO: 654887 - DNA, 15 bp, Homo sapiens
gtaataatcacatga

SEQ ID NO: 654888 - DNA, 15 bp, Homo sapiens
taataatcacatgaa

SEQ ID NO: 654889 - DNA, 15 bp, Homo sapiens
aataatcacatgaag

SEQ ID NO: 654890 - DNA, 15 bp, Homo sapiens
ataatcacatgaaga

SEQ ID NO: 654891 - DNA, 15 bp, Homo sapiens
taatcacatgaagaa

SEQ ID NO: 654892 - DNA, 15 bp, Homo sapiens
aatcacatgaagaat

SEQ ID NO: 654893 - DNA, 15 bp, Homo sapiens
atcacatgaagaatg

SEQ ID NO: 654894 - DNA, 15 bp, Homo sapiens
tcacatgaagaatgt

SEQ ID NO: 654895 - DNA, 15 bp, Homo sapiens
cacatgaagaatgtt

SEQ ID NO: 654896 - DNA, 15 bp, Homo sapiens
acatgaagaatgtta

SEQ ID NO: 654897 - DNA, 15 bp, Homo sapiens
catgaagaatgttat

SEQ ID NO: 654898 - DNA, 15 bp, Homo sapiens
atgaagaatgttatg

SEQ ID NO: 654899 - DNA, 15 bp, Homo sapiens
tgaagaatgttatgt

SEQ ID NO: 654900 - DNA, 15 bp, Homo sapiens
gaagaatgttatgtt

SEQ ID NO: 654901 - DNA, 15 bp, Homo sapiens
aagaatgttatgttt

SEQ ID NO: 654902 - DNA, 15 bp, Homo sapiens
agaatgttatgttta

SEQ ID NO: 654903 - DNA, 15 bp, Homo sapiens
gaatgttatgtttat

SEQ ID NO: 654904 - DNA, 15 bp, Homo sapiens
aatgttatgtttatc

SEQ ID NO: 654905 - DNA, 15 bp, Homo sapiens
atgttatgtttatct

SEQ ID NO: 654906 - DNA, 15 bp, Homo sapiens
tgttatgtttatcta

SEQ ID NO: 654907 - DNA, 15 bp, Homo sapiens
gttatgtttatctag

SEQ ID NO: 654908 - DNA, 15 bp, Homo sapiens
ttatgtttatctagt

SEQ ID NO: 654909 - DNA, 15 bp, Homo sapiens
tatgtttatctagta

SEQ ID NO: 654910 - DNA, 15 bp, Homo sapiens
atgtttatctagtat

SEQ ID NO: 654911 - DNA, 15 bp, Homo sapiens
tgtttatctagtata

SEQ ID NO: 654912 - DNA, 15 bp, Homo sapiens
gtttatctagtatat

SEQ ID NO: 654913 - DNA, 15 bp, Homo sapiens
tttatctagtatatt

SEQ ID NO: 654914 - DNA, 15 bp, Homo sapiens
ttatctagtatattt

SEQ ID NO: 654915 - DNA, 15 bp, Homo sapiens
tatctagtatattta

SEQ ID NO: 654916 - DNA, 15 bp, Homo sapiens
atctagtatatttac

SEQ ID NO: 654917 - DNA, 15 bp, Homo sapiens
tctagtatatttact

SEQ ID NO: 654918 - DNA, 15 bp, Homo sapiens
ctagtatatttactt

SEQ ID NO: 654919 - DNA, 15 bp, Homo sapiens
tagtatatttacttt

SEQ ID NO: 654920 - DNA, 15 bp, Homo sapiens
agtatatttactttt

SEQ ID NO: 654921 - DNA, 15 bp, Homo sapiens
gtatatttacttttt

SEQ ID NO: 654922 - DNA, 15 bp, Homo sapiens
tatatttactttttc

SEQ ID NO: 654923 - DNA, 15 bp, Homo sapiens
atatttactttttca

SEQ ID NO: 654924 - DNA, 15 bp, Homo sapiens
tatttactttttcaa

SEQ ID NO: 654925 - DNA, 15 bp, Homo sapiens
atttactttttcaaa

SEQ ID NO: 654926 - DNA, 15 bp, Homo sapiens
tttactttttcaaaa

SEQ ID NO: 654927 - DNA, 15 bp, Homo sapiens
ttactttttcaaaat

SEQ ID NO: 654928 - DNA, 15 bp, Homo sapiens
tactttttcaaaatc

SEQ ID NO: 654929 - DNA, 15 bp, Homo sapiens
actttttcaaaatcc

SEQ ID NO: 654930 - DNA, 15 bp, Homo sapiens
ctttttcaaaatcca

SEQ ID NO: 654931 - DNA, 15 bp, Homo sapiens
tttttcaaaatccag

SEQ ID NO: 654932 - DNA, 15 bp, Homo sapiens
ttttcaaaatccagt

SEQ ID NO: 654933 - DNA, 15 bp, Homo sapiens
tttcaaaatccagtt

SEQ ID NO: 654934 - DNA, 15 bp, Homo sapiens
ttcaaaatccagttg

SEQ ID NO: 654935 - DNA, 15 bp, Homo sapiens
tcaaaatccagttgt

SEQ ID NO: 654936 - DNA, 15 bp, Homo sapiens
caaaatccagttgta

SEQ ID NO: 654937 - DNA, 15 bp, Homo sapiens
aaaatccagttgtat

SEQ ID NO: 654938 - DNA, 15 bp, Homo sapiens
aaatccagttgtatc

SEQ ID NO: 654939 - DNA, 15 bp, Homo sapiens
aatccagttgtatca

SEQ ID NO: 654940 - DNA, 15 bp, Homo sapiens
atccagttgtatcag

SEQ ID NO: 654941 - DNA, 15 bp, Homo sapiens
tccagttgtatcagc

SEQ ID NO: 654942 - DNA, 15 bp, Homo sapiens
ccagttgtatcagct

SEQ ID NO: 654943 - DNA, 15 bp, Homo sapiens
cagttgtatcagctc

SEQ ID NO: 654944 - DNA, 15 bp, Homo sapiens
agttgtatcagctct

SEQ ID NO: 654945 - DNA, 15 bp, Homo sapiens
gttgtatcagctctc

SEQ ID NO: 654946 - DNA, 15 bp, Homo sapiens
ttgtatcagctctct

SEQ ID NO: 654947 - DNA, 15 bp, Homo sapiens
tgtatcagctctctc

SEQ ID NO: 654948 - DNA, 15 bp, Homo sapiens
gtatcagctctctca

SEQ ID NO: 654949 - DNA, 15 bp, Homo sapiens
tatcagctctctcac

SEQ ID NO: 654950 - DNA, 15 bp, Homo sapiens
atcagctctctcact

SEQ ID NO: 654951 - DNA, 15 bp, Homo sapiens
tcagctctctcactt

SEQ ID NO: 654952 - DNA, 15 bp, Homo sapiens
cagctctctcacttt

SEQ ID NO: 654953 - DNA, 15 bp, Homo sapiens
agctctctcactttg

SEQ ID NO: 654954 - DNA, 15 bp, Homo sapiens
gctctctcactttgt

SEQ ID NO: 654955 - DNA, 15 bp, Homo sapiens
ctctctcactttgtc

SEQ ID NO: 654956 - DNA, 15 bp, Homo sapiens
tctctcactttgtct

SEQ ID NO: 654957 - DNA, 15 bp, Homo sapiens
ctctcactttgtctt

SEQ ID NO: 654958 - DNA, 15 bp, Homo sapiens
tctcactttgtcttg

SEQ ID NO: 654959 - DNA, 15 bp, Homo sapiens
ctcactttgtcttga

SEQ ID NO: 654960 - DNA, 15 bp, Homo sapiens
tcactttgtcttgac

SEQ ID NO: 654961 - DNA, 15 bp, Homo sapiens
cactttgtcttgact

SEQ ID NO: 654962 - DNA, 15 bp, Homo sapiens
actttgtcttgactc

SEQ ID NO: 654963 - DNA, 15 bp, Homo sapiens
ctttgtcttgactcc

SEQ ID NO: 654964 - DNA, 15 bp, Homo sapiens
tttgtcttgactcca

SEQ ID NO: 654965 - DNA, 15 bp, Homo sapiens
ttgtcttgactccac

SEQ ID NO: 654966 - DNA, 15 bp, Homo sapiens
tgtcttgactccact

SEQ ID NO: 654967 - DNA, 15 bp, Homo sapiens
gtcttgactccactt

SEQ ID NO: 654968 - DNA, 15 bp, Homo sapiens
tcttgactccacttt

SEQ ID NO: 654969 - DNA, 15 bp, Homo sapiens
cttgactccactttt

SEQ ID NO: 654970 - DNA, 15 bp, Homo sapiens
ttgactccacttttg

SEQ ID NO: 654971 - DNA, 15 bp, Homo sapiens
tgactccacttttgg

SEQ ID NO: 654972 - DNA, 15 bp, Homo sapiens
gactccacttttggt

SEQ ID NO: 654973 - DNA, 15 bp, Homo sapiens
actccacttttggtg

SEQ ID NO: 654974 - DNA, 15 bp, Homo sapiens
ctccacttttggtgg

SEQ ID NO: 654975 - DNA, 15 bp, Homo sapiens
tccacttttggtggg

SEQ ID NO: 654976 - DNA, 15 bp, Homo sapiens
ccacttttggtgggc

SEQ ID NO: 654977 - DNA, 15 bp, Homo sapiens
cacttttggtgggca

SEQ ID NO: 654978 - DNA, 15 bp, Homo sapiens
acttttggtgggcaa

SEQ ID NO: 654979 - DNA, 15 bp, Homo sapiens
cttttggtgggcaaa

SEQ ID NO: 654980 - DNA, 15 bp, Homo sapiens
ttttggtgggcaaag

SEQ ID NO: 654981 - DNA, 15 bp, Homo sapiens
tttggtgggcaaaga

SEQ ID NO: 654982 - DNA, 15 bp, Homo sapiens
ttggtgggcaaagat

SEQ ID NO: 654983 - DNA, 15 bp, Homo sapiens
tggtgggcaaagatt

SEQ ID NO: 654984 - DNA, 15 bp, Homo sapiens
ggtgggcaaagatta

SEQ ID NO: 654985 - DNA, 15 bp, Homo sapiens
gtgggcaaagattat

SEQ ID NO: 654986 - DNA, 15 bp, Homo sapiens
tgggcaaagattatt

SEQ ID NO: 654987 - DNA, 15 bp, Homo sapiens
gggcaaagattattg

SEQ ID NO: 654988 - DNA, 15 bp, Homo sapiens
ggcaaagattattgc

SEQ ID NO: 654989 - DNA, 15 bp, Homo sapiens
gcaaagattattgct

SEQ ID NO: 654990 - DNA, 15 bp, Homo sapiens
caaagattattgctt

SEQ ID NO: 654991 - DNA, 15 bp, Homo sapiens
aaagattattgcttc

SEQ ID NO: 654992 - DNA, 15 bp, Homo sapiens
aagattattgcttca

SEQ ID NO: 654993 - DNA, 15 bp, Homo sapiens
agattattgcttcat

SEQ ID NO: 654994 - DNA, 15 bp, Homo sapiens
gattattgcttcatg

SEQ ID NO: 654995 - DNA, 15 bp, Homo sapiens
attattgcttcatgg

SEQ ID NO: 654996 - DNA, 15 bp, Homo sapiens
ttattgcttcatggg

SEQ ID NO: 654997 - DNA, 15 bp, Homo sapiens
tattgcttcatggga

SEQ ID NO: 654998 - DNA, 15 bp, Homo sapiens
attgcttcatgggac

SEQ ID NO: 654999 - DNA, 15 bp, Homo sapiens
ttgcttcatgggaca

SEQ ID NO: 655000 - DNA, 15 bp, Homo sapiens
tgcttcatgggacaa

SEQ ID NO: 655001 - DNA, 15 bp, Homo sapiens
gcttcatgggacaaa

SEQ ID NO: 655002 - DNA, 15 bp, Homo sapiens
cttcatgggacaaat

SEQ ID NO: 655003 - DNA, 15 bp, Homo sapiens
ttcatgggacaaatg

SEQ ID NO: 655004 - DNA, 15 bp, Homo sapiens
tcatgggacaaatga

SEQ ID NO: 655005 - DNA, 15 bp, Homo sapiens
catgggacaaatgag

SEQ ID NO: 655006 - DNA, 15 bp, Homo sapiens
atgggacaaatgaga

SEQ ID NO: 655007 - DNA, 15 bp, Homo sapiens
tgggacaaatgagaa

SEQ ID NO: 655008 - DNA, 15 bp, Homo sapiens
gggacaaatgagaaa

SEQ ID NO: 655009 - DNA, 15 bp, Homo sapiens
ggacaaatgagaaat

SEQ ID NO: 655010 - DNA, 15 bp, Homo sapiens
gacaaatgagaaatg

SEQ ID NO: 655011 - DNA, 15 bp, Homo sapiens
acaaatgagaaatgt

SEQ ID NO: 655012 - DNA, 15 bp, Homo sapiens
caaatgagaaatgtg

SEQ ID NO: 655013 - DNA, 15 bp, Homo sapiens
aaatgagaaatgtga

SEQ ID NO: 655014 - DNA, 15 bp, Homo sapiens
aatgagaaatgtgag

SEQ ID NO: 655015 - DNA, 15 bp, Homo sapiens
atgagaaatgtgaga

SEQ ID NO: 655016 - DNA, 15 bp, Homo sapiens
tgagaaatgtgagac

SEQ ID NO: 655017 - DNA, 15 bp, Homo sapiens
gagaaatgtgagaca

SEQ ID NO: 655018 - DNA, 15 bp, Homo sapiens
agaaatgtgagacat

SEQ ID NO: 655019 - DNA, 15 bp, Homo sapiens
gaaatgtgagacatg

SEQ ID NO: 655020 - DNA, 15 bp, Homo sapiens
aaatgtgagacatga

SEQ ID NO: 655021 - DNA, 15 bp, Homo sapiens
aatgtgagacatgaa

SEQ ID NO: 655022 - DNA, 15 bp, Homo sapiens
atgtgagacatgaac

SEQ ID NO: 655023 - DNA, 15 bp, Homo sapiens
tgtgagacatgaaca

SEQ ID NO: 655024 - DNA, 15 bp, Homo sapiens
gtgagacatgaacat

SEQ ID NO: 655025 - DNA, 15 bp, Homo sapiens
tgagacatgaacatt

SEQ ID NO: 655026 - DNA, 15 bp, Homo sapiens
gagacatgaacattt

SEQ ID NO: 655027 - DNA, 15 bp, Homo sapiens
agacatgaacatttt

SEQ ID NO: 655028 - DNA, 15 bp, Homo sapiens
gacatgaacattttg

SEQ ID NO: 655029 - DNA, 15 bp, Homo sapiens
acatgaacattttgt

SEQ ID NO: 655030 - DNA, 15 bp, Homo sapiens
catgaacattttgta

SEQ ID NO: 655031 - DNA, 15 bp, Homo sapiens
atgaacattttgtaa

SEQ ID NO: 655032 - DNA, 15 bp, Homo sapiens
tgaacattttgtaac

SEQ ID NO: 655033 - DNA, 15 bp, Homo sapiens
gaacattttgtaact

SEQ ID NO: 655034 - DNA, 15 bp, Homo sapiens
aacattttgtaactt

SEQ ID NO: 655035 - DNA, 15 bp, Homo sapiens
acattttgtaactta

SEQ ID NO: 655036 - DNA, 15 bp, Homo sapiens
cattttgtaacttac

SEQ ID NO: 655037 - DNA, 15 bp, Homo sapiens
attttgtaacttacc

SEQ ID NO: 655038 - DNA, 15 bp, Homo sapiens
ttttgtaacttaccc

SEQ ID NO: 655039 - DNA, 15 bp, Homo sapiens
tttgtaacttacccc

SEQ ID NO: 655040 - DNA, 15 bp, Homo sapiens
ttgtaacttacccca

SEQ ID NO: 655041 - DNA, 15 bp, Homo sapiens
tgtaacttaccccac

SEQ ID NO: 655042 - DNA, 15 bp, Homo sapiens
gtaacttaccccact

SEQ ID NO: 655043 - DNA, 15 bp, Homo sapiens
taacttaccccactg

SEQ ID NO: 655044 - DNA, 15 bp, Homo sapiens
aacttaccccactga

SEQ ID NO: 655045 - DNA, 15 bp, Homo sapiens
acttaccccactgaa

SEQ ID NO: 655046 - DNA, 15 bp, Homo sapiens
cttaccccactgaat

SEQ ID NO: 655047 - DNA, 15 bp, Homo sapiens
ttaccccactgaatg

SEQ ID NO: 655048 - DNA, 15 bp, Homo sapiens
taccccactgaatgg

SEQ ID NO: 655049 - DNA, 15 bp, Homo sapiens
accccactgaatggt

SEQ ID NO: 655050 - DNA, 15 bp, Homo sapiens
ccccactgaatggtt

SEQ ID NO: 655051 - DNA, 15 bp, Homo sapiens
cccactgaatggttc

SEQ ID NO: 655052 - DNA, 15 bp, Homo sapiens
ccactgaatggttcc

SEQ ID NO: 655053 - DNA, 15 bp, Homo sapiens
cactgaatggttcca

SEQ ID NO: 655054 - DNA, 15 bp, Homo sapiens
actgaatggttccag

SEQ ID NO: 655055 - DNA, 15 bp, Homo sapiens
ctgaatggttccaga

SEQ ID NO: 655056 - DNA, 15 bp, Homo sapiens
tgaatggttccagaa

SEQ ID NO: 655057 - DNA, 15 bp, Homo sapiens
gaatggttccagaaa

SEQ ID NO: 655058 - DNA, 15 bp, Homo sapiens
aatggttccagaaac

SEQ ID NO: 655059 - DNA, 15 bp, Homo sapiens
atggttccagaaaca

SEQ ID NO: 655060 - DNA, 15 bp, Homo sapiens
tggttccagaaacaa

SEQ ID NO: 655061 - DNA, 15 bp, Homo sapiens
ggttccagaaacaaa

SEQ ID NO: 655062 - DNA, 15 bp, Homo sapiens
gttccagaaacaaag

SEQ ID NO: 655063 - DNA, 15 bp, Homo sapiens
ttccagaaacaaagc

SEQ ID NO: 655064 - DNA, 15 bp, Homo sapiens
tccagaaacaaagct

SEQ ID NO: 655065 - DNA, 15 bp, Homo sapiens
ccagaaacaaagcta

SEQ ID NO: 655066 - DNA, 15 bp, Homo sapiens
cagaaacaaagctag

SEQ ID NO: 655067 - DNA, 15 bp, Homo sapiens
agaaacaaagctagg

SEQ ID NO: 655068 - DNA, 15 bp, Homo sapiens
gaaacaaagctaggt

SEQ ID NO: 655069 - DNA, 15 bp, Homo sapiens
aaacaaagctaggtt

SEQ ID NO: 655070 - DNA, 15 bp, Homo sapiens
aacaaagctaggttc

SEQ ID NO: 655071 - DNA, 15 bp, Homo sapiens
acaaagctaggttct

SEQ ID NO: 655072 - DNA, 15 bp, Homo sapiens
caaagctaggttctc

SEQ ID NO: 655073 - DNA, 15 bp, Homo sapiens
aaagctaggttctct

SEQ ID NO: 655074 - DNA, 15 bp, Homo sapiens
aagctaggttctctt

SEQ ID NO: 655075 - DNA, 15 bp, Homo sapiens
agctaggttctcttg

SEQ ID NO: 655076 - DNA, 15 bp, Homo sapiens
gctaggttctcttgc

SEQ ID NO: 655077 - DNA, 15 bp, Homo sapiens
ctaggttctcttgcc

SEQ ID NO: 655078 - DNA, 15 bp, Homo sapiens
taggttctcttgcct

SEQ ID NO: 655079 - DNA, 15 bp, Homo sapiens
aggttctcttgcctc

SEQ ID NO: 655080 - DNA, 15 bp, Homo sapiens
ggttctcttgcctcc

SEQ ID NO: 655081 - DNA, 15 bp, Homo sapiens
gttctcttgcctcca

SEQ ID NO: 655082 - DNA, 15 bp, Homo sapiens
ttctcttgcctccaa

SEQ ID NO: 655083 - DNA, 15 bp, Homo sapiens
tctcttgcctccaag

SEQ ID NO: 655084 - DNA, 15 bp, Homo sapiens
ctcttgcctccaaga

SEQ ID NO: 655085 - DNA, 15 bp, Homo sapiens
tcttgcctccaagaa

SEQ ID NO: 655086 - DNA, 15 bp, Homo sapiens
cttgcctccaagaag

SEQ ID NO: 655087 - DNA, 15 bp, Homo sapiens
ttgcctccaagaagt

SEQ ID NO: 655088 - DNA, 15 bp, Homo sapiens
tgcctccaagaagtg

SEQ ID NO: 655089 - DNA, 15 bp, Homo sapiens
gcctccaagaagtgt

SEQ ID NO: 655090 - DNA, 15 bp, Homo sapiens
cctccaagaagtgtg

SEQ ID NO: 655091 - DNA, 15 bp, Homo sapiens
ctccaagaagtgtgt

SEQ ID NO: 655092 - DNA, 15 bp, Homo sapiens
tccaagaagtgtgta

SEQ ID NO: 655093 - DNA, 15 bp, Homo sapiens
ccaagaagtgtgtag

SEQ ID NO: 655094 - DNA, 15 bp, Homo sapiens
caagaagtgtgtagc

SEQ ID NO: 655095 - DNA, 15 bp, Homo sapiens
aagaagtgtgtagca

SEQ ID NO: 655096 - DNA, 15 bp, Homo sapiens
agaagtgtgtagcat

SEQ ID NO: 655097 - DNA, 15 bp, Homo sapiens
gaagtgtgtagcata

SEQ ID NO: 655098 - DNA, 15 bp, Homo sapiens
aagtgtgtagcatag

SEQ ID NO: 655099 - DNA, 15 bp, Homo sapiens
agtgtgtagcatagg

SEQ ID NO: 655100 - DNA, 15 bp, Homo sapiens
gtgtgtagcataggg

SEQ ID NO: 655101 - DNA, 15 bp, Homo sapiens
tgtgtagcataggga

SEQ ID NO: 655102 - DNA, 15 bp, Homo sapiens
gtgtagcatagggag

SEQ ID NO: 655103 - DNA, 15 bp, Homo sapiens
tgtagcatagggaga

SEQ ID NO: 655104 - DNA, 15 bp, Homo sapiens
gtagcatagggagat

SEQ ID NO: 655105 - DNA, 15 bp, Homo sapiens
tagcatagggagatg

SEQ ID NO: 655106 - DNA, 15 bp, Homo sapiens
agcatagggagatgc

SEQ ID NO: 655107 - DNA, 15 bp, Homo sapiens
gcatagggagatgct

SEQ ID NO: 655108 - DNA, 15 bp, Homo sapiens
catagggagatgctt

SEQ ID NO: 655109 - DNA, 15 bp, Homo sapiens
atagggagatgcttc

SEQ ID NO: 655110 - DNA, 15 bp, Homo sapiens
tagggagatgcttcc

SEQ ID NO: 655111 - DNA, 15 bp, Homo sapiens
agggagatgcttcca

SEQ ID NO: 655112 - DNA, 15 bp, Homo sapiens
gggagatgcttccaa

SEQ ID NO: 655113 - DNA, 15 bp, Homo sapiens
ggagatgcttccaaa

SEQ ID NO: 655114 - DNA, 15 bp, Homo sapiens
gagatgcttccaaaa

SEQ ID NO: 655115 - DNA, 15 bp, Homo sapiens
agatgcttccaaaat

SEQ ID NO: 655116 - DNA, 15 bp, Homo sapiens
gatgcttccaaaatc

SEQ ID NO: 655117 - DNA, 15 bp, Homo sapiens
atgcttccaaaatcc

SEQ ID NO: 655118 - DNA, 15 bp, Homo sapiens
tgcttccaaaatccc

SEQ ID NO: 655119 - DNA, 15 bp, Homo sapiens
gcttccaaaatccca

SEQ ID NO: 655120 - DNA, 15 bp, Homo sapiens
cttccaaaatcccag

SEQ ID NO: 655121 - DNA, 15 bp, Homo sapiens
ttccaaaatcccagt

SEQ ID NO: 655122 - DNA, 15 bp, Homo sapiens
tccaaaatcccagta

SEQ ID NO: 655123 - DNA, 15 bp, Homo sapiens
ccaaaatcccagtag

SEQ ID NO: 655124 - DNA, 15 bp, Homo sapiens
caaaatcccagtagt

SEQ ID NO: 655125 - DNA, 15 bp, Homo sapiens
aaaatcccagtagtc

SEQ ID NO: 655126 - DNA, 15 bp, Homo sapiens
aaatcccagtagtct

SEQ ID NO: 655127 - DNA, 15 bp, Homo sapiens
aatcccagtagtctt

SEQ ID NO: 655128 - DNA, 15 bp, Homo sapiens
atcccagtagtcttc

SEQ ID NO: 655129 - DNA, 15 bp, Homo sapiens
tcccagtagtcttct

SEQ ID NO: 655130 - DNA, 15 bp, Homo sapiens
cccagtagtcttctg

SEQ ID NO: 655131 - DNA, 15 bp, Homo sapiens
ccagtagtcttctgg

SEQ ID NO: 655132 - DNA, 15 bp, Homo sapiens
cagtagtcttctggg

SEQ ID NO: 655133 - DNA, 15 bp, Homo sapiens
agtagtcttctggga

SEQ ID NO: 655134 - DNA, 15 bp, Homo sapiens
gtagtcttctgggag

SEQ ID NO: 655135 - DNA, 15 bp, Homo sapiens
tagtcttctgggaga

SEQ ID NO: 655136 - DNA, 15 bp, Homo sapiens
agtcttctgggagat

SEQ ID NO: 655137 - DNA, 15 bp, Homo sapiens
gtcttctgggagata

SEQ ID NO: 655138 - DNA, 15 bp, Homo sapiens
tcttctgggagataa

SEQ ID NO: 655139 - DNA, 15 bp, Homo sapiens
cttctgggagataag

SEQ ID NO: 655140 - DNA, 15 bp, Homo sapiens
ttctgggagataagg

SEQ ID NO: 655141 - DNA, 15 bp, Homo sapiens
tctgggagataagga

SEQ ID NO: 655142 - DNA, 15 bp, Homo sapiens
ctgggagataaggag

SEQ ID NO: 655143 - DNA, 15 bp, Homo sapiens
tgggagataaggagc

SEQ ID NO: 655144 - DNA, 15 bp, Homo sapiens
gggagataaggagca

SEQ ID NO: 655145 - DNA, 15 bp, Homo sapiens
ggagataaggagcaa

SEQ ID NO: 655146 - DNA, 15 bp, Homo sapiens
gagataaggagcaag

SEQ ID NO: 655147 - DNA, 15 bp, Homo sapiens
agataaggagcaaga

SEQ ID NO: 655148 - DNA, 15 bp, Homo sapiens
gataaggagcaagaa

SEQ ID NO: 655149 - DNA, 15 bp, Homo sapiens
ataaggagcaagaat

SEQ ID NO: 655150 - DNA, 15 bp, Homo sapiens
taaggagcaagaatc

SEQ ID NO: 655151 - DNA, 15 bp, Homo sapiens
aaggagcaagaatcc

SEQ ID NO: 655152 - DNA, 15 bp, Homo sapiens
aggagcaagaatccc

SEQ ID NO: 655153 - DNA, 15 bp, Homo sapiens
ggagcaagaatccca

SEQ ID NO: 655154 - DNA, 15 bp, Homo sapiens
gagcaagaatcccag

SEQ ID NO: 655155 - DNA, 15 bp, Homo sapiens
agcaagaatcccagg

SEQ ID NO: 655156 - DNA, 15 bp, Homo sapiens
gcaagaatcccaggg

SEQ ID NO: 655157 - DNA, 15 bp, Homo sapiens
caagaatcccagggt

SEQ ID NO: 655158 - DNA, 15 bp, Homo sapiens
aagaatcccagggtg

SEQ ID NO: 655159 - DNA, 15 bp, Homo sapiens
agaatcccagggtga

SEQ ID NO: 655160 - DNA, 15 bp, Homo sapiens
gaatcccagggtgac

SEQ ID NO: 655161 - DNA, 15 bp, Homo sapiens
aatcccagggtgact

SEQ ID NO: 655162 - DNA, 15 bp, Homo sapiens
atcccagggtgacta

SEQ ID NO: 655163 - DNA, 15 bp, Homo sapiens
tcccagggtgactaa

SEQ ID NO: 655164 - DNA, 15 bp, Homo sapiens
cccagggtgactaaa

SEQ ID NO: 655165 - DNA, 15 bp, Homo sapiens
ccagggtgactaaat

SEQ ID NO: 655166 - DNA, 15 bp, Homo sapiens
cagggtgactaaatt

SEQ ID NO: 655167 - DNA, 15 bp, Homo sapiens
agggtgactaaattg

SEQ ID NO: 655168 - DNA, 15 bp, Homo sapiens
gggtgactaaattga

SEQ ID NO: 655169 - DNA, 15 bp, Homo sapiens
ggtgactaaattgat

SEQ ID NO: 655170 - DNA, 15 bp, Homo sapiens
gtgactaaattgatt

SEQ ID NO: 655171 - DNA, 15 bp, Homo sapiens
tgactaaattgattt

SEQ ID NO: 655172 - DNA, 15 bp, Homo sapiens
gactaaattgatttt

SEQ ID NO: 655173 - DNA, 15 bp, Homo sapiens
actaaattgattttg

SEQ ID NO: 655174 - DNA, 15 bp, Homo sapiens
ctaaattgattttga

SEQ ID NO: 655175 - DNA, 15 bp, Homo sapiens
taaattgattttgaa

SEQ ID NO: 655176 - DNA, 15 bp, Homo sapiens
aaattgattttgaac

SEQ ID NO: 655177 - DNA, 15 bp, Homo sapiens
aattgattttgaaca

SEQ ID NO: 655178 - DNA, 15 bp, Homo sapiens
attgattttgaacac

SEQ ID NO: 655179 - DNA, 15 bp, Homo sapiens
ttgattttgaacact

SEQ ID NO: 655180 - DNA, 15 bp, Homo sapiens
tgattttgaacactt

SEQ ID NO: 655181 - DNA, 15 bp, Homo sapiens
gattttgaacacttt

SEQ ID NO: 655182 - DNA, 15 bp, Homo sapiens
attttgaacactttc

SEQ ID NO: 655183 - DNA, 15 bp, Homo sapiens
ttttgaacactttct

SEQ ID NO: 655184 - DNA, 15 bp, Homo sapiens
tttgaacactttctt

SEQ ID NO: 655185 - DNA, 15 bp, Homo sapiens
ttgaacactttcttg

SEQ ID NO: 655186 - DNA, 15 bp, Homo sapiens
tgaacactttcttga

SEQ ID NO: 655187 - DNA, 15 bp, Homo sapiens
gaacactttcttgaa

SEQ ID NO: 655188 - DNA, 15 bp, Homo sapiens
aacactttcttgaaa

SEQ ID NO: 655189 - DNA, 15 bp, Homo sapiens
acactttcttgaaaa

SEQ ID NO: 655190 - DNA, 15 bp, Homo sapiens
cactttcttgaaaag

SEQ ID NO: 655191 - DNA, 15 bp, Homo sapiens
actttcttgaaaaga

SEQ ID NO: 655192 - DNA, 15 bp, Homo sapiens
ctttcttgaaaagag

SEQ ID NO: 655193 - DNA, 15 bp, Homo sapiens
tttcttgaaaagagg

SEQ ID NO: 655194 - DNA, 15 bp, Homo sapiens
ttcttgaaaagaggc

SEQ ID NO: 655195 - DNA, 15 bp, Homo sapiens
tcttgaaaagaggca

SEQ ID NO: 655196 - DNA, 15 bp, Homo sapiens
cttgaaaagaggcat

SEQ ID NO: 655197 - DNA, 15 bp, Homo sapiens
ttgaaaagaggcatg

SEQ ID NO: 655198 - DNA, 15 bp, Homo sapiens
tgaaaagaggcatga

SEQ ID NO: 655199 - DNA, 15 bp, Homo sapiens
gaaaagaggcatgag

SEQ ID NO: 655200 - DNA, 15 bp, Homo sapiens
aaaagaggcatgaga

SEQ ID NO: 655201 - DNA, 15 bp, Homo sapiens
aaagaggcatgagag

SEQ ID NO: 655202 - DNA, 15 bp, Homo sapiens
aagaggcatgagaga

SEQ ID NO: 655203 - DNA, 15 bp, Homo sapiens
agaggcatgagagag

SEQ ID NO: 655204 - DNA, 15 bp, Homo sapiens
gaggcatgagagaga

SEQ ID NO: 655205 - DNA, 15 bp, Homo sapiens
aggcatgagagagat

SEQ ID NO: 655206 - DNA, 15 bp, Homo sapiens
ggcatgagagagata

SEQ ID NO: 655207 - DNA, 15 bp, Homo sapiens
gcatgagagagatat

SEQ ID NO: 655208 - DNA, 15 bp, Homo sapiens
catgagagagatatc

SEQ ID NO: 655209 - DNA, 15 bp, Homo sapiens
atgagagagatatct

SEQ ID NO: 655210 - DNA, 15 bp, Homo sapiens
tgagagagatatcta

SEQ ID NO: 655211 - DNA, 15 bp, Homo sapiens
gagagagatatctat

SEQ ID NO: 655212 - DNA, 15 bp, Homo sapiens
agagagatatctatg

SEQ ID NO: 655213 - DNA, 15 bp, Homo sapiens
gagagatatctatgt

SEQ ID NO: 655214 - DNA, 15 bp, Homo sapiens
agagatatctatgta

SEQ ID NO: 655215 - DNA, 15 bp, Homo sapiens
gagatatctatgtaa

SEQ ID NO: 655216 - DNA, 15 bp, Homo sapiens
agatatctatgtaat

SEQ ID NO: 655217 - DNA, 15 bp, Homo sapiens
gatatctatgtaatg

SEQ ID NO: 655218 - DNA, 15 bp, Homo sapiens
atatctatgtaatga

SEQ ID NO: 655219 - DNA, 15 bp, Homo sapiens
tatctatgtaatgac

SEQ ID NO: 655220 - DNA, 15 bp, Homo sapiens
atctatgtaatgacc

SEQ ID NO: 655221 - DNA, 15 bp, Homo sapiens
tctatgtaatgaccc

SEQ ID NO: 655222 - DNA, 15 bp, Homo sapiens
ctatgtaatgaccct

SEQ ID NO: 655223 - DNA, 15 bp, Homo sapiens
tatgtaatgacccta

SEQ ID NO: 655224 - DNA, 15 bp, Homo sapiens
atgtaatgaccctat

SEQ ID NO: 655225 - DNA, 15 bp, Homo sapiens
tgtaatgaccctata

SEQ ID NO: 655226 - DNA, 15 bp, Homo sapiens
gtaatgaccctatat

SEQ ID NO: 655227 - DNA, 15 bp, Homo sapiens
taatgaccctatatt

SEQ ID NO: 655228 - DNA, 15 bp, Homo sapiens
aatgaccctatattt

SEQ ID NO: 655229 - DNA, 15 bp, Homo sapiens
atgaccctatatttt

SEQ ID NO: 655230 - DNA, 15 bp, Homo sapiens
tgaccctatatttta

SEQ ID NO: 655231 - DNA, 15 bp, Homo sapiens
gaccctatattttag

SEQ ID NO: 655232 - DNA, 15 bp, Homo sapiens
accctatattttagc

SEQ ID NO: 655233 - DNA, 15 bp, Homo sapiens
ccctatattttagct

SEQ ID NO: 655234 - DNA, 15 bp, Homo sapiens
cctatattttagctt

SEQ ID NO: 655235 - DNA, 15 bp, Homo sapiens
ctatattttagcttc

SEQ ID NO: 655236 - DNA, 15 bp, Homo sapiens
tatattttagcttct

SEQ ID NO: 655237 - DNA, 15 bp, Homo sapiens
atattttagcttctg

SEQ ID NO: 655238 - DNA, 15 bp, Homo sapiens
tattttagcttctgg

SEQ ID NO: 655239 - DNA, 15 bp, Homo sapiens
attttagcttctgga

SEQ ID NO: 655240 - DNA, 15 bp, Homo sapiens
ttttagcttctggaa

SEQ ID NO: 655241 - DNA, 15 bp, Homo sapiens
tttagcttctggaaa

SEQ ID NO: 655242 - DNA, 15 bp, Homo sapiens
ttagcttctggaaaa

SEQ ID NO: 655243 - DNA, 15 bp, Homo sapiens
tagcttctggaaaaa

SEQ ID NO: 655244 - DNA, 15 bp, Homo sapiens
agcttctggaaaaat

SEQ ID NO: 655245 - DNA, 15 bp, Homo sapiens
gcttctggaaaaatt

SEQ ID NO: 655246 - DNA, 15 bp, Homo sapiens
cttctggaaaaattg

SEQ ID NO: 655247 - DNA, 15 bp, Homo sapiens
ttctggaaaaattga

SEQ ID NO: 655248 - DNA, 15 bp, Homo sapiens
tctggaaaaattgag

SEQ ID NO: 655249 - DNA, 15 bp, Homo sapiens
ctggaaaaattgagg

SEQ ID NO: 655250 - DNA, 15 bp, Homo sapiens
tggaaaaattgagga

SEQ ID NO: 655251 - DNA, 15 bp, Homo sapiens
ggaaaaattgaggaa

SEQ ID NO: 655252 - DNA, 15 bp, Homo sapiens
gaaaaattgaggaaa

SEQ ID NO: 655253 - DNA, 15 bp, Homo sapiens
aaaaattgaggaaat

SEQ ID NO: 655254 - DNA, 15 bp, Homo sapiens
aaaattgaggaaatt

SEQ ID NO: 655255 - DNA, 15 bp, Homo sapiens
aaattgaggaaattc

SEQ ID NO: 655256 - DNA, 15 bp, Homo sapiens
aattgaggaaattct

SEQ ID NO: 655257 - DNA, 15 bp, Homo sapiens
attgaggaaattcta

SEQ ID NO: 655258 - DNA, 15 bp, Homo sapiens
ttgaggaaattctaa

SEQ ID NO: 655259 - DNA, 15 bp, Homo sapiens
tgaggaaattctaag

SEQ ID NO: 655260 - DNA, 15 bp, Homo sapiens
gaggaaattctaaga

SEQ ID NO: 655261 - DNA, 15 bp, Homo sapiens
aggaaattctaagaa

SEQ ID NO: 655262 - DNA, 15 bp, Homo sapiens
ggaaattctaagaaa

SEQ ID NO: 655263 - DNA, 15 bp, Homo sapiens
gaaattctaagaaaa

SEQ ID NO: 655264 - DNA, 15 bp, Homo sapiens
aaattctaagaaaac

SEQ ID NO: 655265 - DNA, 15 bp, Homo sapiens
aattctaagaaaact

SEQ ID NO: 655266 - DNA, 15 bp, Homo sapiens
attctaagaaaactt

SEQ ID NO: 655267 - DNA, 15 bp, Homo sapiens
ttctaagaaaacttc

SEQ ID NO: 655268 - DNA, 15 bp, Homo sapiens
tctaagaaaacttcc

SEQ ID NO: 655269 - DNA, 15 bp, Homo sapiens
ctaagaaaacttcct

SEQ ID NO: 655270 - DNA, 15 bp, Homo sapiens
taagaaaacttcctc

SEQ ID NO: 655271 - DNA, 15 bp, Homo sapiens
aagaaaacttcctca

SEQ ID NO: 655272 - DNA, 15 bp, Homo sapiens
agaaaacttcctcag

SEQ ID NO: 655273 - DNA, 15 bp, Homo sapiens
gaaaacttcctcagg

SEQ ID NO: 655274 - DNA, 15 bp, Homo sapiens
aaaacttcctcagga

SEQ ID NO: 655275 - DNA, 15 bp, Homo sapiens
aaacttcctcaggat

SEQ ID NO: 655276 - DNA, 15 bp, Homo sapiens
aacttcctcaggatg

SEQ ID NO: 655277 - DNA, 15 bp, Homo sapiens
acttcctcaggatgc

SEQ ID NO: 655278 - DNA, 15 bp, Homo sapiens
cttcctcaggatgca

SEQ ID NO: 655279 - DNA, 15 bp, Homo sapiens
ttcctcaggatgcac

SEQ ID NO: 655280 - DNA, 15 bp, Homo sapiens
tcctcaggatgcaca

SEQ ID NO: 655281 - DNA, 15 bp, Homo sapiens
cctcaggatgcacaa

SEQ ID NO: 655282 - DNA, 15 bp, Homo sapiens
ctcaggatgcacaag

SEQ ID NO: 655283 - DNA, 15 bp, Homo sapiens
tcaggatgcacaaga

SEQ ID NO: 655284 - DNA, 15 bp, Homo sapiens
caggatgcacaagaa

SEQ ID NO: 655285 - DNA, 15 bp, Homo sapiens
aggatgcacaagaaa

SEQ ID NO: 655286 - DNA, 15 bp, Homo sapiens
ggatgcacaagaaaa

SEQ ID NO: 655287 - DNA, 15 bp, Homo sapiens
gatgcacaagaaaag

SEQ ID NO: 655288 - DNA, 15 bp, Homo sapiens
atgcacaagaaaagt

SEQ ID NO: 655289 - DNA, 15 bp, Homo sapiens
tgcacaagaaaagtc

SEQ ID NO: 655290 - DNA, 15 bp, Homo sapiens
gcacaagaaaagtct

SEQ ID NO: 655291 - DNA, 15 bp, Homo sapiens
cacaagaaaagtctt

SEQ ID NO: 655292 - DNA, 15 bp, Homo sapiens
acaagaaaagtcttc

SEQ ID NO: 655293 - DNA, 15 bp, Homo sapiens
caagaaaagtcttct

SEQ ID NO: 655294 - DNA, 15 bp, Homo sapiens
aagaaaagtcttctt

SEQ ID NO: 655295 - DNA, 15 bp, Homo sapiens
agaaaagtcttcttt

SEQ ID NO: 655296 - DNA, 15 bp, Homo sapiens
gaaaagtcttctttt

SEQ ID NO: 655297 - DNA, 15 bp, Homo sapiens
aaaagtcttctttta

SEQ ID NO: 655298 - DNA, 15 bp, Homo sapiens
aaagtcttcttttag

SEQ ID NO: 655299 - DNA, 15 bp, Homo sapiens
aagtcttcttttaga

SEQ ID NO: 655300 - DNA, 15 bp, Homo sapiens
agtcttcttttagaa

SEQ ID NO: 655301 - DNA, 15 bp, Homo sapiens
gtcttcttttagaag

SEQ ID NO: 655302 - DNA, 15 bp, Homo sapiens
tcttcttttagaaga

SEQ ID NO: 655303 - DNA, 15 bp, Homo sapiens
cttcttttagaagag

SEQ ID NO: 655304 - DNA, 15 bp, Homo sapiens
ttcttttagaagagg

SEQ ID NO: 655305 - DNA, 15 bp, Homo sapiens
tcttttagaagaggc

SEQ ID NO: 655306 - DNA, 15 bp, Homo sapiens
cttttagaagaggct

SEQ ID NO: 655307 - DNA, 15 bp, Homo sapiens
ttttagaagaggcta

SEQ ID NO: 655308 - DNA, 15 bp, Homo sapiens
tttagaagaggctaa

SEQ ID NO: 655309 - DNA, 15 bp, Homo sapiens
ttagaagaggctaat

SEQ ID NO: 655310 - DNA, 15 bp, Homo sapiens
tagaagaggctaatt

SEQ ID NO: 655311 - DNA, 15 bp, Homo sapiens
agaagaggctaatta

SEQ ID NO: 655312 - DNA, 15 bp, Homo sapiens
gaagaggctaattag

SEQ ID NO: 655313 - DNA, 15 bp, Homo sapiens
aagaggctaattaga

SEQ ID NO: 655314 - DNA, 15 bp, Homo sapiens
agaggctaattagag

SEQ ID NO: 655315 - DNA, 15 bp, Homo sapiens
gaggctaattagagg

SEQ ID NO: 655316 - DNA, 15 bp, Homo sapiens
aggctaattagaggc

SEQ ID NO: 655317 - DNA, 15 bp, Homo sapiens
ggctaattagaggct

SEQ ID NO: 655318 - DNA, 15 bp, Homo sapiens
gctaattagaggctg

SEQ ID NO: 655319 - DNA, 15 bp, Homo sapiens
ctaattagaggctgc

SEQ ID NO: 655320 - DNA, 15 bp, Homo sapiens
taattagaggctgct

SEQ ID NO: 655321 - DNA, 15 bp, Homo sapiens
aattagaggctgctg

SEQ ID NO: 655322 - DNA, 15 bp, Homo sapiens
attagaggctgctgc

SEQ ID NO: 655323 - DNA, 15 bp, Homo sapiens
ttagaggctgctgct

SEQ ID NO: 655324 - DNA, 15 bp, Homo sapiens
tagaggctgctgctg

SEQ ID NO: 655325 - DNA, 15 bp, Homo sapiens
agaggctgctgctgt

SEQ ID NO: 655326 - DNA, 15 bp, Homo sapiens
gaggctgctgctgta

SEQ ID NO: 655327 - DNA, 15 bp, Homo sapiens
aggctgctgctgtac

SEQ ID NO: 655328 - DNA, 15 bp, Homo sapiens
ggctgctgctgtaca

SEQ ID NO: 655329 - DNA, 15 bp, Homo sapiens
gctgctgctgtacaa

SEQ ID NO: 655330 - DNA, 15 bp, Homo sapiens
ctgctgctgtacaag

SEQ ID NO: 655331 - DNA, 15 bp, Homo sapiens
tgctgctgtacaaga

SEQ ID NO: 655332 - DNA, 15 bp, Homo sapiens
gctgctgtacaagac

SEQ ID NO: 655333 - DNA, 15 bp, Homo sapiens
ctgctgtacaagacc

SEQ ID NO: 655334 - DNA, 15 bp, Homo sapiens
tgctgtacaagaccc

SEQ ID NO: 655335 - DNA, 15 bp, Homo sapiens
gctgtacaagaccct

SEQ ID NO: 655336 - DNA, 15 bp, Homo sapiens
ctgtacaagaccctt

SEQ ID NO: 655337 - DNA, 15 bp, Homo sapiens
tgtacaagacccttc

SEQ ID NO: 655338 - DNA, 15 bp, Homo sapiens
gtacaagacccttca

SEQ ID NO: 655339 - DNA, 15 bp, Homo sapiens
tacaagacccttcac

SEQ ID NO: 655340 - DNA, 15 bp, Homo sapiens
acaagacccttcaca

SEQ ID NO: 655341 - DNA, 15 bp, Homo sapiens
caagacccttcacag

SEQ ID NO: 655342 - DNA, 15 bp, Homo sapiens
aagacccttcacaga

SEQ ID NO: 655343 - DNA, 15 bp, Homo sapiens
agacccttcacagac

SEQ ID NO: 655344 - DNA, 15 bp, Homo sapiens
gacccttcacagact

SEQ ID NO: 655345 - DNA, 15 bp, Homo sapiens
acccttcacagactg

SEQ ID NO: 655346 - DNA, 15 bp, Homo sapiens
cccttcacagactga

SEQ ID NO: 655347 - DNA, 15 bp, Homo sapiens
ccttcacagactgaa

SEQ ID NO: 655348 - DNA, 15 bp, Homo sapiens
cttcacagactgaat

SEQ ID NO: 655349 - DNA, 15 bp, Homo sapiens
ttcacagactgaatt

SEQ ID NO: 655350 - DNA, 15 bp, Homo sapiens
tcacagactgaattc

SEQ ID NO: 655351 - DNA, 15 bp, Homo sapiens
cacagactgaattca

SEQ ID NO: 655352 - DNA, 15 bp, Homo sapiens
acagactgaattcag

SEQ ID NO: 655353 - DNA, 15 bp, Homo sapiens
cagactgaattcaga

SEQ ID NO: 655354 - DNA, 15 bp, Homo sapiens
agactgaattcagac

SEQ ID NO: 655355 - DNA, 15 bp, Homo sapiens
gactgaattcagaca

SEQ ID NO: 655356 - DNA, 15 bp, Homo sapiens
actgaattcagacag

SEQ ID NO: 655357 - DNA, 15 bp, Homo sapiens
ctgaattcagacaga

SEQ ID NO: 655358 - DNA, 15 bp, Homo sapiens
tgaattcagacagaa

SEQ ID NO: 655359 - DNA, 15 bp, Homo sapiens
gaattcagacagaac

SEQ ID NO: 655360 - DNA, 15 bp, Homo sapiens
aattcagacagaaca

SEQ ID NO: 655361 - DNA, 15 bp, Homo sapiens
attcagacagaacac

SEQ ID NO: 655362 - DNA, 15 bp, Homo sapiens
ttcagacagaacact

SEQ ID NO: 655363 - DNA, 15 bp, Homo sapiens
tcagacagaacactg

SEQ ID NO: 655364 - DNA, 15 bp, Homo sapiens
cagacagaacactgc

SEQ ID NO: 655365 - DNA, 15 bp, Homo sapiens
agacagaacactgca

SEQ ID NO: 655366 - DNA, 15 bp, Homo sapiens
gacagaacactgcaa

SEQ ID NO: 655367 - DNA, 15 bp, Homo sapiens
acagaacactgcaac

SEQ ID NO: 655368 - DNA, 15 bp, Homo sapiens
cagaacactgcaact

SEQ ID NO: 655369 - DNA, 15 bp, Homo sapiens
agaacactgcaactc

SEQ ID NO: 655370 - DNA, 15 bp, Homo sapiens
gaacactgcaactca

SEQ ID NO: 655371 - DNA, 15 bp, Homo sapiens
aacactgcaactcac

SEQ ID NO: 655372 - DNA, 15 bp, Homo sapiens
acactgcaactcacc

SEQ ID NO: 655373 - DNA, 15 bp, Homo sapiens
cactgcaactcacct

SEQ ID NO: 655374 - DNA, 15 bp, Homo sapiens
actgcaactcacctg

SEQ ID NO: 655375 - DNA, 15 bp, Homo sapiens
ctgcaactcacctgt

SEQ ID NO: 655376 - DNA, 15 bp, Homo sapiens
tgcaactcacctgta

SEQ ID NO: 655377 - DNA, 15 bp, Homo sapiens
gcaactcacctgtat

SEQ ID NO: 655378 - DNA, 15 bp, Homo sapiens
caactcacctgtata

SEQ ID NO: 655379 - DNA, 15 bp, Homo sapiens
aactcacctgtatac

SEQ ID NO: 655380 - DNA, 15 bp, Homo sapiens
actcacctgtataca

SEQ ID NO: 655381 - DNA, 15 bp, Homo sapiens
ctcacctgtatacac

SEQ ID NO: 655382 - DNA, 15 bp, Homo sapiens
tcacctgtatacacc

SEQ ID NO: 655383 - DNA, 15 bp, Homo sapiens
cacctgtatacacca

SEQ ID NO: 655384 - DNA, 15 bp, Homo sapiens
acctgtatacaccag

SEQ ID NO: 655385 - DNA, 15 bp, Homo sapiens
cctgtatacaccagg

SEQ ID NO: 655386 - DNA, 15 bp, Homo sapiens
ctgtatacaccagga

SEQ ID NO: 655387 - DNA, 15 bp, Homo sapiens
tgtatacaccaggat

SEQ ID NO: 655388 - DNA, 15 bp, Homo sapiens
gtatacaccaggata

SEQ ID NO: 655389 - DNA, 15 bp, Homo sapiens
tatacaccaggatat

SEQ ID NO: 655390 - DNA, 15 bp, Homo sapiens
atacaccaggatatg

SEQ ID NO: 655391 - DNA, 15 bp, Homo sapiens
tacaccaggatatgc

SEQ ID NO: 655392 - DNA, 15 bp, Homo sapiens
acaccaggatatgca

SEQ ID NO: 655393 - DNA, 15 bp, Homo sapiens
caccaggatatgcag

SEQ ID NO: 655394 - DNA, 15 bp, Homo sapiens
accaggatatgcagt

SEQ ID NO: 655395 - DNA, 15 bp, Homo sapiens
ccaggatatgcagta

SEQ ID NO: 655396 - DNA, 15 bp, Homo sapiens
caggatatgcagtag

SEQ ID NO: 655397 - DNA, 15 bp, Homo sapiens
aggatatgcagtagg

SEQ ID NO: 655398 - DNA, 15 bp, Homo sapiens
ggatatgcagtagga

SEQ ID NO: 655399 - DNA, 15 bp, Homo sapiens
gatatgcagtaggat

SEQ ID NO: 655400 - DNA, 15 bp, Homo sapiens
atatgcagtaggatc

SEQ ID NO: 655401 - DNA, 15 bp, Homo sapiens
tatgcagtaggatct

SEQ ID NO: 655402 - DNA, 15 bp, Homo sapiens
atgcagtaggatctg

SEQ ID NO: 655403 - DNA, 15 bp, Homo sapiens
tgcagtaggatctgg

SEQ ID NO: 655404 - DNA, 15 bp, Homo sapiens
gcagtaggatctggg

SEQ ID NO: 655405 - DNA, 15 bp, Homo sapiens
cagtaggatctgggg

SEQ ID NO: 655406 - DNA, 15 bp, Homo sapiens
agtaggatctgggga

SEQ ID NO: 655407 - DNA, 15 bp, Homo sapiens
gtaggatctggggag

SEQ ID NO: 655408 - DNA, 15 bp, Homo sapiens
taggatctggggagc

SEQ ID NO: 655409 - DNA, 15 bp, Homo sapiens
aggatctggggagct

SEQ ID NO: 655410 - DNA, 15 bp, Homo sapiens
ggatctggggagctt

SEQ ID NO: 655411 - DNA, 15 bp, Homo sapiens
gatctggggagcttc

SEQ ID NO: 655412 - DNA, 15 bp, Homo sapiens
atctggggagcttct

SEQ ID NO: 655413 - DNA, 15 bp, Homo sapiens
tctggggagcttctc

SEQ ID NO: 655414 - DNA, 15 bp, Homo sapiens
ctggggagcttctct

SEQ ID NO: 655415 - DNA, 15 bp, Homo sapiens
tggggagcttctctt

SEQ ID NO: 655416 - DNA, 15 bp, Homo sapiens
ggggagcttctcttc

SEQ ID NO: 655417 - DNA, 15 bp, Homo sapiens
gggagcttctcttct

SEQ ID NO: 655418 - DNA, 15 bp, Homo sapiens
ggagcttctcttctg

SEQ ID NO: 655419 - DNA, 15 bp, Homo sapiens
gagcttctcttctgc

SEQ ID NO: 655420 - DNA, 15 bp, Homo sapiens
agcttctcttctgcc

SEQ ID NO: 655421 - DNA, 15 bp, Homo sapiens
gcttctcttctgccc

SEQ ID NO: 655422 - DNA, 15 bp, Homo sapiens
cttctcttctgccca

SEQ ID NO: 655423 - DNA, 15 bp, Homo sapiens
ttctcttctgcccaa

SEQ ID NO: 655424 - DNA, 15 bp, Homo sapiens
tctcttctgcccaac

SEQ ID NO: 655425 - DNA, 15 bp, Homo sapiens
ctcttctgcccaact

SEQ ID NO: 655426 - DNA, 15 bp, Homo sapiens
tcttctgcccaactt

SEQ ID NO: 655427 - DNA, 15 bp, Homo sapiens
cttctgcccaacttc

SEQ ID NO: 655428 - DNA, 15 bp, Homo sapiens
ttctgcccaacttca

SEQ ID NO: 655429 - DNA, 15 bp, Homo sapiens
tctgcccaacttcaa

SEQ ID NO: 655430 - DNA, 15 bp, Homo sapiens
ctgcccaacttcaaa

SEQ ID NO: 655431 - DNA, 15 bp, Homo sapiens
tgcccaacttcaaat

SEQ ID NO: 655432 - DNA, 15 bp, Homo sapiens
gcccaacttcaaatc

SEQ ID NO: 655433 - DNA, 15 bp, Homo sapiens
cccaacttcaaatct

SEQ ID NO: 655434 - DNA, 15 bp, Homo sapiens
ccaacttcaaatctt

SEQ ID NO: 655435 - DNA, 15 bp, Homo sapiens
caacttcaaatcttc

SEQ ID NO: 655436 - DNA, 15 bp, Homo sapiens
aacttcaaatcttct

SEQ ID NO: 655437 - DNA, 15 bp, Homo sapiens
acttcaaatcttctt

SEQ ID NO: 655438 - DNA, 15 bp, Homo sapiens
cttcaaatcttcttc

SEQ ID NO: 655439 - DNA, 15 bp, Homo sapiens
ttcaaatcttcttcc

SEQ ID NO: 655440 - DNA, 15 bp, Homo sapiens
tcaaatcttcttcct

SEQ ID NO: 655441 - DNA, 15 bp, Homo sapiens
caaatcttcttcctc

SEQ ID NO: 655442 - DNA, 15 bp, Homo sapiens
aaatcttcttcctct

SEQ ID NO: 655443 - DNA, 15 bp, Homo sapiens
aatcttcttcctctt

SEQ ID NO: 655444 - DNA, 15 bp, Homo sapiens
atcttcttcctcttc

SEQ ID NO: 655445 - DNA, 15 bp, Homo sapiens
tcttcttcctcttcc

SEQ ID NO: 655446 - DNA, 15 bp, Homo sapiens
cttcttcctcttcct

SEQ ID NO: 655447 - DNA, 15 bp, Homo sapiens
ttcttcctcttcctg

SEQ ID NO: 655448 - DNA, 15 bp, Homo sapiens
tcttcctcttcctgc

SEQ ID NO: 655449 - DNA, 15 bp, Homo sapiens
cttcctcttcctgca

SEQ ID NO: 655450 - DNA, 15 bp, Homo sapiens
ttcctcttcctgcaa

SEQ ID NO: 655451 - DNA, 15 bp, Homo sapiens
tcctcttcctgcaaa

SEQ ID NO: 655452 - DNA, 15 bp, Homo sapiens
cctcttcctgcaaac

SEQ ID NO: 655453 - DNA, 15 bp, Homo sapiens
ctcttcctgcaaacc

SEQ ID NO: 655454 - DNA, 15 bp, Homo sapiens
tcttcctgcaaacct

SEQ ID NO: 655455 - DNA, 15 bp, Homo sapiens
cttcctgcaaacctc

SEQ ID NO: 655456 - DNA, 15 bp, Homo sapiens
ttcctgcaaacctca

SEQ ID NO: 655457 - DNA, 15 bp, Homo sapiens
tcctgcaaacctcaa

SEQ ID NO: 655458 - DNA, 15 bp, Homo sapiens
cctgcaaacctcaag

SEQ ID NO: 655459 - DNA, 15 bp, Homo sapiens
ctgcaaacctcaagt

SEQ ID NO: 655460 - DNA, 15 bp, Homo sapiens
tgcaaacctcaagtg

SEQ ID NO: 655461 - DNA, 15 bp, Homo sapiens
gcaaacctcaagtgc

SEQ ID NO: 655462 - DNA, 15 bp, Homo sapiens
caaacctcaagtgct

SEQ ID NO: 655463 - DNA, 15 bp, Homo sapiens
aaacctcaagtgctt

SEQ ID NO: 655464 - DNA, 15 bp, Homo sapiens
aacctcaagtgcttc

SEQ ID NO: 655465 - DNA, 15 bp, Homo sapiens
acctcaagtgcttca

SEQ ID NO: 655466 - DNA, 15 bp, Homo sapiens
cctcaagtgcttcat

SEQ ID NO: 655467 - DNA, 15 bp, Homo sapiens
ctcaagtgcttcatt

SEQ ID NO: 655468 - DNA, 15 bp, Homo sapiens
tcaagtgcttcatta

SEQ ID NO: 655469 - DNA, 15 bp, Homo sapiens
caagtgcttcattac

SEQ ID NO: 655470 - DNA, 15 bp, Homo sapiens
aagtgcttcattact

SEQ ID NO: 655471 - DNA, 15 bp, Homo sapiens
agtgcttcattactt

SEQ ID NO: 655472 - DNA, 15 bp, Homo sapiens
gtgcttcattacttg

SEQ ID NO: 655473 - DNA, 15 bp, Homo sapiens
tgcttcattacttgc

SEQ ID NO: 655474 - DNA, 15 bp, Homo sapiens
gcttcattacttgca

SEQ ID NO: 655475 - DNA, 15 bp, Homo sapiens
cttcattacttgcaa

SEQ ID NO: 655476 - DNA, 15 bp, Homo sapiens
ttcattacttgcaac

SEQ ID NO: 655477 - DNA, 15 bp, Homo sapiens
tcattacttgcaact

SEQ ID NO: 655478 - DNA, 15 bp, Homo sapiens
cattacttgcaacta

SEQ ID NO: 655479 - DNA, 15 bp, Homo sapiens
attacttgcaactat

SEQ ID NO: 655480 - DNA, 15 bp, Homo sapiens
ttacttgcaactatt

SEQ ID NO: 655481 - DNA, 15 bp, Homo sapiens
tacttgcaactattt

SEQ ID NO: 655482 - DNA, 15 bp, Homo sapiens
acttgcaactatttg

SEQ ID NO: 655483 - DNA, 15 bp, Homo sapiens
cttgcaactatttgt

SEQ ID NO: 655484 - DNA, 15 bp, Homo sapiens
ttgcaactatttgtt

SEQ ID NO: 655485 - DNA, 15 bp, Homo sapiens
tgcaactatttgttt

SEQ ID NO: 655486 - DNA, 15 bp, Homo sapiens
gcaactatttgttta

SEQ ID NO: 655487 - DNA, 15 bp, Homo sapiens
caactatttgtttaa

SEQ ID NO: 655488 - DNA, 15 bp, Homo sapiens
aactatttgtttaat

SEQ ID NO: 655489 - DNA, 15 bp, Homo sapiens
actatttgtttaatt

SEQ ID NO: 655490 - DNA, 15 bp, Homo sapiens
ctatttgtttaattg

SEQ ID NO: 655491 - DNA, 15 bp, Homo sapiens
tatttgtttaattgg

SEQ ID NO: 655492 - DNA, 15 bp, Homo sapiens
atttgtttaattggt

SEQ ID NO: 655493 - DNA, 15 bp, Homo sapiens
tttgtttaattggtc

SEQ ID NO: 655494 - DNA, 15 bp, Homo sapiens
ttgtttaattggtct

SEQ ID NO: 655495 - DNA, 15 bp, Homo sapiens
tgtttaattggtctt

SEQ ID NO: 655496 - DNA, 15 bp, Homo sapiens
gtttaattggtcttt

SEQ ID NO: 655497 - DNA, 15 bp, Homo sapiens
tttaattggtctttc

SEQ ID NO: 655498 - DNA, 15 bp, Homo sapiens
ttaattggtctttct

SEQ ID NO: 655499 - DNA, 15 bp, Homo sapiens
taattggtctttctc

SEQ ID NO: 655500 - DNA, 15 bp, Homo sapiens
aattggtctttctca

SEQ ID NO: 655501 - DNA, 15 bp, Homo sapiens
attggtctttctcaa

SEQ ID NO: 655502 - DNA, 15 bp, Homo sapiens
ttggtctttctcaaa

SEQ ID NO: 655503 - DNA, 15 bp, Homo sapiens
tggtctttctcaaag

SEQ ID NO: 655504 - DNA, 15 bp, Homo sapiens
ggtctttctcaaaga

SEQ ID NO: 655505 - DNA, 15 bp, Homo sapiens
gtctttctcaaagac

SEQ ID NO: 655506 - DNA, 15 bp, Homo sapiens
tctttctcaaagacc

SEQ ID NO: 655507 - DNA, 15 bp, Homo sapiens
ctttctcaaagacct

SEQ ID NO: 655508 - DNA, 15 bp, Homo sapiens
tttctcaaagaccta

SEQ ID NO: 655509 - DNA, 15 bp, Homo sapiens
ttctcaaagacctac

SEQ ID NO: 655510 - DNA, 15 bp, Homo sapiens
tctcaaagacctact

SEQ ID NO: 655511 - DNA, 15 bp, Homo sapiens
ctcaaagacctacta

SEQ ID NO: 655512 - DNA, 15 bp, Homo sapiens
tcaaagacctactaa

SEQ ID NO: 655513 - DNA, 15 bp, Homo sapiens
caaagacctactaaa

SEQ ID NO: 655514 - DNA, 15 bp, Homo sapiens
aaagacctactaaaa

SEQ ID NO: 655515 - DNA, 15 bp, Homo sapiens
aagacctactaaaaa

SEQ ID NO: 655516 - DNA, 15 bp, Homo sapiens
agacctactaaaaaa

SEQ ID NO: 655517 - DNA, 15 bp, Homo sapiens
gacctactaaaaaaa

SEQ ID NO: 655518 - DNA, 15 bp, Homo sapiens
acctactaaaaaaat

SEQ ID NO: 655519 - DNA, 15 bp, Homo sapiens
cctactaaaaaaatg

SEQ ID NO: 655520 - DNA, 15 bp, Homo sapiens
ctactaaaaaaatgc

SEQ ID NO: 655521 - DNA, 15 bp, Homo sapiens
tactaaaaaaatgct

SEQ ID NO: 655522 - DNA, 15 bp, Homo sapiens
actaaaaaaatgctg

SEQ ID NO: 655523 - DNA, 15 bp, Homo sapiens
ctaaaaaaatgctgt

SEQ ID NO: 655524 - DNA, 15 bp, Homo sapiens
taaaaaaatgctgtt

SEQ ID NO: 655525 - DNA, 15 bp, Homo sapiens
aaaaaaatgctgttt

SEQ ID NO: 655526 - DNA, 15 bp, Homo sapiens
aaaaaatgctgttta

SEQ ID NO: 655527 - DNA, 15 bp, Homo sapiens
aaaaatgctgtttaa

SEQ ID NO: 655528 - DNA, 15 bp, Homo sapiens
aaaatgctgtttaat

SEQ ID NO: 655529 - DNA, 15 bp, Homo sapiens
aaatgctgtttaatt

SEQ ID NO: 655530 - DNA, 15 bp, Homo sapiens
aatgctgtttaattg

SEQ ID NO: 655531 - DNA, 15 bp, Homo sapiens
atgctgtttaattgg

SEQ ID NO: 655532 - DNA, 15 bp, Homo sapiens
tgctgtttaattgga

SEQ ID NO: 655533 - DNA, 15 bp, Homo sapiens
gctgtttaattggac

SEQ ID NO: 655534 - DNA, 15 bp, Homo sapiens
ctgtttaattggacc

SEQ ID NO: 655535 - DNA, 15 bp, Homo sapiens
tgtttaattggacca

SEQ ID NO: 655536 - DNA, 15 bp, Homo sapiens
gtttaattggaccaa

SEQ ID NO: 655537 - DNA, 15 bp, Homo sapiens
tttaattggaccaaa

SEQ ID NO: 655538 - DNA, 15 bp, Homo sapiens
ttaattggaccaaac

SEQ ID NO: 655539 - DNA, 15 bp, Homo sapiens
taattggaccaaact

SEQ ID NO: 655540 - DNA, 15 bp, Homo sapiens
aattggaccaaactt

SEQ ID NO: 655541 - DNA, 15 bp, Homo sapiens
attggaccaaacttt

SEQ ID NO: 655542 - DNA, 15 bp, Homo sapiens
ttggaccaaactttt

SEQ ID NO: 655543 - DNA, 15 bp, Homo sapiens
tggaccaaacttttt

SEQ ID NO: 655544 - DNA, 15 bp, Homo sapiens
ggaccaaactttttc

SEQ ID NO: 655545 - DNA, 15 bp, Homo sapiens
gaccaaactttttct

SEQ ID NO: 655546 - DNA, 15 bp, Homo sapiens
accaaactttttctt

SEQ ID NO: 655547 - DNA, 15 bp, Homo sapiens
ccaaactttttcttg

SEQ ID NO: 655548 - DNA, 15 bp, Homo sapiens
caaactttttcttgg

SEQ ID NO: 655549 - DNA, 15 bp, Homo sapiens
aaactttttcttggg

SEQ ID NO: 655550 - DNA, 15 bp, Homo sapiens
aactttttcttgggg

SEQ ID NO: 655551 - DNA, 15 bp, Homo sapiens
actttttcttggggt

SEQ ID NO: 655552 - DNA, 15 bp, Homo sapiens
ctttttcttggggtg

SEQ ID NO: 655553 - DNA, 15 bp, Homo sapiens
tttttcttggggtgc

SEQ ID NO: 655554 - DNA, 15 bp, Homo sapiens
ttttcttggggtgct

SEQ ID NO: 655555 - DNA, 15 bp, Homo sapiens
tttcttggggtgcta

SEQ ID NO: 655556 - DNA, 15 bp, Homo sapiens
ttcttggggtgctat

SEQ ID NO: 655557 - DNA, 15 bp, Homo sapiens
tcttggggtgctatt

SEQ ID NO: 655558 - DNA, 15 bp, Homo sapiens
cttggggtgctatta

SEQ ID NO: 655559 - DNA, 15 bp, Homo sapiens
ttggggtgctattag

SEQ ID NO: 655560 - DNA, 15 bp, Homo sapiens
tggggtgctattaga

SEQ ID NO: 655561 - DNA, 15 bp, Homo sapiens
ggggtgctattagag

SEQ ID NO: 655562 - DNA, 15 bp, Homo sapiens
gggtgctattagagt

SEQ ID NO: 655563 - DNA, 15 bp, Homo sapiens
ggtgctattagagtc

SEQ ID NO: 655564 - DNA, 15 bp, Homo sapiens
gtgctattagagtcg

SEQ ID NO: 655565 - DNA, 15 bp, Homo sapiens
tgctattagagtcgt

SEQ ID NO: 655566 - DNA, 15 bp, Homo sapiens
gctattagagtcgta

SEQ ID NO: 655567 - DNA, 15 bp, Homo sapiens
ctattagagtcgtag

SEQ ID NO: 655568 - DNA, 15 bp, Homo sapiens
tattagagtcgtagt

SEQ ID NO: 655569 - DNA, 15 bp, Homo sapiens
attagagtcgtagta

SEQ ID NO: 655570 - DNA, 15 bp, Homo sapiens
ttagagtcgtagtaa

SEQ ID NO: 655571 - DNA, 15 bp, Homo sapiens
tagagtcgtagtaat

SEQ ID NO: 655572 - DNA, 15 bp, Homo sapiens
agagtcgtagtaatg

SEQ ID NO: 655573 - DNA, 15 bp, Homo sapiens
gagtcgtagtaatgg

SEQ ID NO: 655574 - DNA, 15 bp, Homo sapiens
agtcgtagtaatggg

SEQ ID NO: 655575 - DNA, 15 bp, Homo sapiens
gtcgtagtaatggga

SEQ ID NO: 655576 - DNA, 15 bp, Homo sapiens
tcgtagtaatgggag

SEQ ID NO: 655577 - DNA, 15 bp, Homo sapiens
cgtagtaatgggagg

SEQ ID NO: 655578 - DNA, 15 bp, Homo sapiens
gtagtaatgggaggt

SEQ ID NO: 655579 - DNA, 15 bp, Homo sapiens
tagtaatgggaggtg

SEQ ID NO: 655580 - DNA, 15 bp, Homo sapiens
agtaatgggaggtgg

SEQ ID NO: 655581 - DNA, 15 bp, Homo sapiens
gtaatgggaggtggt

SEQ ID NO: 655582 - DNA, 15 bp, Homo sapiens
taatgggaggtggtc

SEQ ID NO: 655583 - DNA, 15 bp, Homo sapiens
aatgggaggtggtca

SEQ ID NO: 655584 - DNA, 15 bp, Homo sapiens
atgggaggtggtcac

SEQ ID NO: 655585 - DNA, 15 bp, Homo sapiens
tgggaggtggtcaca

SEQ ID NO: 655586 - DNA, 15 bp, Homo sapiens
gggaggtggtcacag

SEQ ID NO: 655587 - DNA, 15 bp, Homo sapiens
ggaggtggtcacaga

SEQ ID NO: 655588 - DNA, 15 bp, Homo sapiens
gaggtggtcacagac

SEQ ID NO: 655589 - DNA, 15 bp, Homo sapiens
aggtggtcacagaca

SEQ ID NO: 655590 - DNA, 15 bp, Homo sapiens
ggtggtcacagacac

SEQ ID NO: 655591 - DNA, 15 bp, Homo sapiens
gtggtcacagacacc

SEQ ID NO: 655592 - DNA, 15 bp, Homo sapiens
tggtcacagacacca

SEQ ID NO: 655593 - DNA, 15 bp, Homo sapiens
ggtcacagacaccat

SEQ ID NO: 655594 - DNA, 15 bp, Homo sapiens
gtcacagacaccata

SEQ ID NO: 655595 - DNA, 15 bp, Homo sapiens
tcacagacaccataa

SEQ ID NO: 655596 - DNA, 15 bp, Homo sapiens
cacagacaccataat

SEQ ID NO: 655597 - DNA, 15 bp, Homo sapiens
acagacaccataatc

SEQ ID NO: 655598 - DNA, 15 bp, Homo sapiens
cagacaccataatcc

SEQ ID NO: 655599 - DNA, 15 bp, Homo sapiens
agacaccataatcca

SEQ ID NO: 655600 - DNA, 15 bp, Homo sapiens
gacaccataatccag

SEQ ID NO: 655601 - DNA, 15 bp, Homo sapiens
acaccataatccagg

SEQ ID NO: 655602 - DNA, 15 bp, Homo sapiens
caccataatccaggc

SEQ ID NO: 655603 - DNA, 15 bp, Homo sapiens
accataatccaggca

SEQ ID NO: 655604 - DNA, 15 bp, Homo sapiens
ccataatccaggcag

SEQ ID NO: 655605 - DNA, 15 bp, Homo sapiens
cataatccaggcagg

SEQ ID NO: 655606 - DNA, 15 bp, Homo sapiens
ataatccaggcagga

SEQ ID NO: 655607 - DNA, 15 bp, Homo sapiens
taatccaggcaggaa

SEQ ID NO: 655608 - DNA, 15 bp, Homo sapiens
aatccaggcaggaag

SEQ ID NO: 655609 - DNA, 15 bp, Homo sapiens
atccaggcaggaaga

SEQ ID NO: 655610 - DNA, 15 bp, Homo sapiens
tccaggcaggaagaa

SEQ ID NO: 655611 - DNA, 15 bp, Homo sapiens
ccaggcaggaagaaa

SEQ ID NO: 655612 - DNA, 15 bp, Homo sapiens
caggcaggaagaaac

SEQ ID NO: 655613 - DNA, 15 bp, Homo sapiens
aggcaggaagaaact

SEQ ID NO: 655614 - DNA, 15 bp, Homo sapiens
ggcaggaagaaactt

SEQ ID NO: 655615 - DNA, 15 bp, Homo sapiens
gcaggaagaaacttc

SEQ ID NO: 655616 - DNA, 15 bp, Homo sapiens
caggaagaaacttcc

SEQ ID NO: 655617 - DNA, 15 bp, Homo sapiens
aggaagaaacttccc

SEQ ID NO: 655618 - DNA, 15 bp, Homo sapiens
ggaagaaacttcccc

SEQ ID NO: 655619 - DNA, 15 bp, Homo sapiens
gaagaaacttcccca

SEQ ID NO: 655620 - DNA, 15 bp, Homo sapiens
aagaaacttccccaa

SEQ ID NO: 655621 - DNA, 15 bp, Homo sapiens
agaaacttccccaaa

SEQ ID NO: 655622 - DNA, 15 bp, Homo sapiens
gaaacttccccaaaa

SEQ ID NO: 655623 - DNA, 15 bp, Homo sapiens
aaacttccccaaaat

SEQ ID NO: 655624 - DNA, 15 bp, Homo sapiens
aacttccccaaaata

SEQ ID NO: 655625 - DNA, 15 bp, Homo sapiens
acttccccaaaataa

SEQ ID NO: 655626 - DNA, 15 bp, Homo sapiens
cttccccaaaataaa

SEQ ID NO: 655627 - DNA, 15 bp, Homo sapiens
ttccccaaaataaag

SEQ ID NO: 655628 - DNA, 15 bp, Homo sapiens
tccccaaaataaagg

SEQ ID NO: 655629 - DNA, 15 bp, Homo sapiens
ccccaaaataaagga

SEQ ID NO: 655630 - DNA, 15 bp, Homo sapiens
cccaaaataaaggag

SEQ ID NO: 655631 - DNA, 15 bp, Homo sapiens
ccaaaataaaggaga

SEQ ID NO: 655632 - DNA, 15 bp, Homo sapiens
caaaataaaggagat

SEQ ID NO: 655633 - DNA, 15 bp, Homo sapiens
aaaataaaggagatg

SEQ ID NO: 655634 - DNA, 15 bp, Homo sapiens
aaataaaggagatgt

SEQ ID NO: 655635 - DNA, 15 bp, Homo sapiens
aataaaggagatgtg

SEQ ID NO: 655636 - DNA, 15 bp, Homo sapiens
ataaaggagatgtgg

SEQ ID NO: 655637 - DNA, 15 bp, Homo sapiens
taaaggagatgtggg

SEQ ID NO: 655638 - DNA, 15 bp, Homo sapiens
aaaggagatgtggga

SEQ ID NO: 655639 - DNA, 15 bp, Homo sapiens
aaggagatgtgggag

SEQ ID NO: 655640 - DNA, 15 bp, Homo sapiens
aggagatgtgggagc

SEQ ID NO: 655641 - DNA, 15 bp, Homo sapiens
ggagatgtgggagca

SEQ ID NO: 655642 - DNA, 15 bp, Homo sapiens
gagatgtgggagcag

SEQ ID NO: 655643 - DNA, 15 bp, Homo sapiens
agatgtgggagcagc

SEQ ID NO: 655644 - DNA, 15 bp, Homo sapiens
gatgtgggagcagcc

SEQ ID NO: 655645 - DNA, 15 bp, Homo sapiens
atgtgggagcagcca

SEQ ID NO: 655646 - DNA, 15 bp, Homo sapiens
tgtgggagcagccag

SEQ ID NO: 655647 - DNA, 15 bp, Homo sapiens
gtgggagcagccagt

SEQ ID NO: 655648 - DNA, 15 bp, Homo sapiens
tgggagcagccagtg

SEQ ID NO: 655649 - DNA, 15 bp, Homo sapiens
gggagcagccagtgg

SEQ ID NO: 655650 - DNA, 15 bp, Homo sapiens
ggagcagccagtggt

SEQ ID NO: 655651 - DNA, 15 bp, Homo sapiens
gagcagccagtggtt

SEQ ID NO: 655652 - DNA, 15 bp, Homo sapiens
agcagccagtggttg

SEQ ID NO: 655653 - DNA, 15 bp, Homo sapiens
gcagccagtggttgg

SEQ ID NO: 655654 - DNA, 15 bp, Homo sapiens
cagccagtggttggg

SEQ ID NO: 655655 - DNA, 15 bp, Homo sapiens
agccagtggttggga

SEQ ID NO: 655656 - DNA, 15 bp, Homo sapiens
gccagtggttgggat

SEQ ID NO: 655657 - DNA, 15 bp, Homo sapiens
ccagtggttgggatg

SEQ ID NO: 655658 - DNA, 15 bp, Homo sapiens
cagtggttgggatgc

SEQ ID NO: 655659 - DNA, 15 bp, Homo sapiens
agtggttgggatgca

SEQ ID NO: 655660 - DNA, 15 bp, Homo sapiens
gtggttgggatgcaa

SEQ ID NO: 655661 - DNA, 15 bp, Homo sapiens
tggttgggatgcaag

SEQ ID NO: 655662 - DNA, 15 bp, Homo sapiens
ggttgggatgcaaga

SEQ ID NO: 655663 - DNA, 15 bp, Homo sapiens
gttgggatgcaagac

SEQ ID NO: 655664 - DNA, 15 bp, Homo sapiens
ttgggatgcaagacc

SEQ ID NO: 655665 - DNA, 15 bp, Homo sapiens
tgggatgcaagaccg

SEQ ID NO: 655666 - DNA, 15 bp, Homo sapiens
gggatgcaagaccgc

SEQ ID NO: 655667 - DNA, 15 bp, Homo sapiens
ggatgcaagaccgcc

SEQ ID NO: 655668 - DNA, 15 bp, Homo sapiens
gatgcaagaccgcca

SEQ ID NO: 655669 - DNA, 15 bp, Homo sapiens
atgcaagaccgccac

SEQ ID NO: 655670 - DNA, 15 bp, Homo sapiens
tgcaagaccgccacc

SEQ ID NO: 655671 - DNA, 15 bp, Homo sapiens
gcaagaccgccacct

SEQ ID NO: 655672 - DNA, 15 bp, Homo sapiens
caagaccgccacctt

SEQ ID NO: 655673 - DNA, 15 bp, Homo sapiens
aagaccgccaccttt

SEQ ID NO: 655674 - DNA, 15 bp, Homo sapiens
agaccgccacctttg

SEQ ID NO: 655675 - DNA, 15 bp, Homo sapiens
gaccgccacctttgc

SEQ ID NO: 655676 - DNA, 15 bp, Homo sapiens
accgccacctttgct

SEQ ID NO: 655677 - DNA, 15 bp, Homo sapiens
ccgccacctttgctg

SEQ ID NO: 655678 - DNA, 15 bp, Homo sapiens
cgccacctttgctgg

SEQ ID NO: 655679 - DNA, 15 bp, Homo sapiens
gccacctttgctggt

SEQ ID NO: 655680 - DNA, 15 bp, Homo sapiens
ccacctttgctggta

SEQ ID NO: 655681 - DNA, 15 bp, Homo sapiens
cacctttgctggtat

SEQ ID NO: 655682 - DNA, 15 bp, Homo sapiens
acctttgctggtatt

SEQ ID NO: 655683 - DNA, 15 bp, Homo sapiens
cctttgctggtatta

SEQ ID NO: 655684 - DNA, 15 bp, Homo sapiens
ctttgctggtattac

SEQ ID NO: 655685 - DNA, 15 bp, Homo sapiens
tttgctggtattact

SEQ ID NO: 655686 - DNA, 15 bp, Homo sapiens
ttgctggtattactc

SEQ ID NO: 655687 - DNA, 15 bp, Homo sapiens
tgctggtattactca

SEQ ID NO: 655688 - DNA, 15 bp, Homo sapiens
gctggtattactcaa

SEQ ID NO: 655689 - DNA, 15 bp, Homo sapiens
ctggtattactcaac

SEQ ID NO: 655690 - DNA, 15 bp, Homo sapiens
tggtattactcaacg

SEQ ID NO: 655691 - DNA, 15 bp, Homo sapiens
ggtattactcaacga

SEQ ID NO: 655692 - DNA, 15 bp, Homo sapiens
gtattactcaacgag

SEQ ID NO: 655693 - DNA, 15 bp, Homo sapiens
tattactcaacgagc

SEQ ID NO: 655694 - DNA, 15 bp, Homo sapiens
attactcaacgagct

SEQ ID NO: 655695 - DNA, 15 bp, Homo sapiens
ttactcaacgagctg

SEQ ID NO: 655696 - DNA, 15 bp, Homo sapiens
tactcaacgagctgt

SEQ ID NO: 655697 - DNA, 15 bp, Homo sapiens
actcaacgagctgtt

SEQ ID NO: 655698 - DNA, 15 bp, Homo sapiens
ctcaacgagctgttt

SEQ ID NO: 655699 - DNA, 15 bp, Homo sapiens
tcaacgagctgtttg

SEQ ID NO: 655700 - DNA, 15 bp, Homo sapiens
caacgagctgtttga

SEQ ID NO: 655701 - DNA, 15 bp, Homo sapiens
aacgagctgtttgaa

SEQ ID NO: 655702 - DNA, 15 bp, Homo sapiens
acgagctgtttgaag

SEQ ID NO: 655703 - DNA, 15 bp, Homo sapiens
cgagctgtttgaaga

SEQ ID NO: 655704 - DNA, 15 bp, Homo sapiens
gagctgtttgaagac

SEQ ID NO: 655705 - DNA, 15 bp, Homo sapiens
agctgtttgaagacc

SEQ ID NO: 655706 - DNA, 15 bp, Homo sapiens
gctgtttgaagacca

SEQ ID NO: 655707 - DNA, 15 bp, Homo sapiens
ctgtttgaagaccat

SEQ ID NO: 655708 - DNA, 15 bp, Homo sapiens
tgtttgaagaccatt

SEQ ID NO: 655709 - DNA, 15 bp, Homo sapiens
gtttgaagaccattg

SEQ ID NO: 655710 - DNA, 15 bp, Homo sapiens
tttgaagaccattgg

SEQ ID NO: 655711 - DNA, 15 bp, Homo sapiens
ttgaagaccattggt

SEQ ID NO: 655712 - DNA, 15 bp, Homo sapiens
tgaagaccattggta

SEQ ID NO: 655713 - DNA, 15 bp, Homo sapiens
gaagaccattggtat

SEQ ID NO: 655714 - DNA, 15 bp, Homo sapiens
aagaccattggtatt

SEQ ID NO: 655715 - DNA, 15 bp, Homo sapiens
agaccattggtattg

SEQ ID NO: 655716 - DNA, 15 bp, Homo sapiens
gaccattggtattga

SEQ ID NO: 655717 - DNA, 15 bp, Homo sapiens
accattggtattgaa

SEQ ID NO: 655718 - DNA, 15 bp, Homo sapiens
ccattggtattgaaa

SEQ ID NO: 655719 - DNA, 15 bp, Homo sapiens
cattggtattgaaat

SEQ ID NO: 655720 - DNA, 15 bp, Homo sapiens
attggtattgaaatg

SEQ ID NO: 655721 - DNA, 15 bp, Homo sapiens
ttggtattgaaatgt

SEQ ID NO: 655722 - DNA, 15 bp, Homo sapiens
tggtattgaaatgta

SEQ ID NO: 655723 - DNA, 15 bp, Homo sapiens
ggtattgaaatgtat

SEQ ID NO: 655724 - DNA, 15 bp, Homo sapiens
gtattgaaatgtatc

SEQ ID NO: 655725 - DNA, 15 bp, Homo sapiens
tattgaaatgtatcc

SEQ ID NO: 655726 - DNA, 15 bp, Homo sapiens
attgaaatgtatcct

SEQ ID NO: 655727 - DNA, 15 bp, Homo sapiens
ttgaaatgtatccta

SEQ ID NO: 655728 - DNA, 15 bp, Homo sapiens
tgaaatgtatcctat

SEQ ID NO: 655729 - DNA, 15 bp, Homo sapiens
gaaatgtatcctatc

SEQ ID NO: 655730 - DNA, 15 bp, Homo sapiens
aaatgtatcctatct

SEQ ID NO: 655731 - DNA, 15 bp, Homo sapiens
aatgtatcctatctc

SEQ ID NO: 655732 - DNA, 15 bp, Homo sapiens
atgtatcctatctcc

SEQ ID NO: 655733 - DNA, 15 bp, Homo sapiens
tgtatcctatctcca

SEQ ID NO: 655734 - DNA, 15 bp, Homo sapiens
gtatcctatctccag

SEQ ID NO: 655735 - DNA, 15 bp, Homo sapiens
tatcctatctccagt

SEQ ID NO: 655736 - DNA, 15 bp, Homo sapiens
atcctatctccagtg

SEQ ID NO: 655737 - DNA, 15 bp, Homo sapiens
tcctatctccagtgg

SEQ ID NO: 655738 - DNA, 15 bp, Homo sapiens
cctatctccagtggc

SEQ ID NO: 655739 - DNA, 15 bp, Homo sapiens
ctatctccagtggct

SEQ ID NO: 655740 - DNA, 15 bp, Homo sapiens
tatctccagtggctg

SEQ ID NO: 655741 - DNA, 15 bp, Homo sapiens
atctccagtggctgg

SEQ ID NO: 655742 - DNA, 15 bp, Homo sapiens
tctccagtggctggt

SEQ ID NO: 655743 - DNA, 15 bp, Homo sapiens
ctccagtggctggta

SEQ ID NO: 655744 - DNA, 15 bp, Homo sapiens
tccagtggctggtag

SEQ ID NO: 655745 - DNA, 15 bp, Homo sapiens
ccagtggctggtagg

SEQ ID NO: 655746 - DNA, 15 bp, Homo sapiens
cagtggctggtaggg

SEQ ID NO: 655747 - DNA, 15 bp, Homo sapiens
agtggctggtagggg

SEQ ID NO: 655748 - DNA, 15 bp, Homo sapiens
gtggctggtagggga

SEQ ID NO: 655749 - DNA, 15 bp, Homo sapiens
tggctggtaggggag

SEQ ID NO: 655750 - DNA, 15 bp, Homo sapiens
ggctggtaggggaga

SEQ ID NO: 655751 - DNA, 15 bp, Homo sapiens
gctggtaggggagac

SEQ ID NO: 655752 - DNA, 15 bp, Homo sapiens
ctggtaggggagaca

SEQ ID NO: 655753 - DNA, 15 bp, Homo sapiens
tggtaggggagacat

SEQ ID NO: 655754 - DNA, 15 bp, Homo sapiens
ggtaggggagacatt

SEQ ID NO: 655755 - DNA, 15 bp, Homo sapiens
gtaggggagacattt

SEQ ID NO: 655756 - DNA, 15 bp, Homo sapiens
taggggagacatttt

SEQ ID NO: 655757 - DNA, 15 bp, Homo sapiens
aggggagacattttg

SEQ ID NO: 655758 - DNA, 15 bp, Homo sapiens
ggggagacattttgg

SEQ ID NO: 655759 - DNA, 15 bp, Homo sapiens
gggagacattttgga

SEQ ID NO: 655760 - DNA, 15 bp, Homo sapiens
ggagacattttggat

SEQ ID NO: 655761 - DNA, 15 bp, Homo sapiens
gagacattttggatc

SEQ ID NO: 655762 - DNA, 15 bp, Homo sapiens
agacattttggatcc

SEQ ID NO: 655763 - DNA, 15 bp, Homo sapiens
gacattttggatcca

SEQ ID NO: 655764 - DNA, 15 bp, Homo sapiens
acattttggatccag

SEQ ID NO: 655765 - DNA, 15 bp, Homo sapiens
cattttggatccagg

SEQ ID NO: 655766 - DNA, 15 bp, Homo sapiens
attttggatccagga

SEQ ID NO: 655767 - DNA, 15 bp, Homo sapiens
ttttggatccaggag

SEQ ID NO: 655768 - DNA, 15 bp, Homo sapiens
tttggatccaggaga

SEQ ID NO: 655769 - DNA, 15 bp, Homo sapiens
ttggatccaggagag

SEQ ID NO: 655770 - DNA, 15 bp, Homo sapiens
tggatccaggagaga

SEQ ID NO: 655771 - DNA, 15 bp, Homo sapiens
ggatccaggagagaa

SEQ ID NO: 655772 - DNA, 15 bp, Homo sapiens
gatccaggagagaat

SEQ ID NO: 655773 - DNA, 15 bp, Homo sapiens
atccaggagagaatt

SEQ ID NO: 655774 - DNA, 15 bp, Homo sapiens
tccaggagagaattt

SEQ ID NO: 655775 - DNA, 15 bp, Homo sapiens
ccaggagagaatttt

SEQ ID NO: 655776 - DNA, 15 bp, Homo sapiens
caggagagaattttg

SEQ ID NO: 655777 - DNA, 15 bp, Homo sapiens
aggagagaattttgg

SEQ ID NO: 655778 - DNA, 15 bp, Homo sapiens
ggagagaattttggc

SEQ ID NO: 655779 - DNA, 15 bp, Homo sapiens
gagagaattttggca

SEQ ID NO: 655780 - DNA, 15 bp, Homo sapiens
agagaattttggcat

SEQ ID NO: 655781 - DNA, 15 bp, Homo sapiens
gagaattttggcatt

SEQ ID NO: 655782 - DNA, 15 bp, Homo sapiens
agaattttggcattc

SEQ ID NO: 655783 - DNA, 15 bp, Homo sapiens
gaattttggcattct

SEQ ID NO: 655784 - DNA, 15 bp, Homo sapiens
aattttggcattctg

SEQ ID NO: 655785 - DNA, 15 bp, Homo sapiens
attttggcattctgc

SEQ ID NO: 655786 - DNA, 15 bp, Homo sapiens
ttttggcattctgct

SEQ ID NO: 655787 - DNA, 15 bp, Homo sapiens
tttggcattctgcta

SEQ ID NO: 655788 - DNA, 15 bp, Homo sapiens
ttggcattctgctaa

SEQ ID NO: 655789 - DNA, 15 bp, Homo sapiens
tggcattctgctaat

SEQ ID NO: 655790 - DNA, 15 bp, Homo sapiens
ggcattctgctaatt

SEQ ID NO: 655791 - DNA, 15 bp, Homo sapiens
gcattctgctaattc

SEQ ID NO: 655792 - DNA, 15 bp, Homo sapiens
cattctgctaattca

SEQ ID NO: 655793 - DNA, 15 bp, Homo sapiens
attctgctaattcaa

SEQ ID NO: 655794 - DNA, 15 bp, Homo sapiens
ttctgctaattcaat

SEQ ID NO: 655795 - DNA, 15 bp, Homo sapiens
tctgctaattcaatg

SEQ ID NO: 655796 - DNA, 15 bp, Homo sapiens
ctgctaattcaatgg

SEQ ID NO: 655797 - DNA, 15 bp, Homo sapiens
tgctaattcaatggg

SEQ ID NO: 655798 - DNA, 15 bp, Homo sapiens
gctaattcaatgggc

SEQ ID NO: 655799 - DNA, 15 bp, Homo sapiens
ctaattcaatgggcc

SEQ ID NO: 655800 - DNA, 15 bp, Homo sapiens
taattcaatgggcct

SEQ ID NO: 655801 - DNA, 15 bp, Homo sapiens
aattcaatgggcctc

SEQ ID NO: 655802 - DNA, 15 bp, Homo sapiens
attcaatgggcctcc

SEQ ID NO: 655803 - DNA, 15 bp, Homo sapiens
ttcaatgggcctcca

SEQ ID NO: 655804 - DNA, 15 bp, Homo sapiens
tcaatgggcctccaa

SEQ ID NO: 655805 - DNA, 15 bp, Homo sapiens
caatgggcctccaat

SEQ ID NO: 655806 - DNA, 15 bp, Homo sapiens
aatgggcctccaata

SEQ ID NO: 655807 - DNA, 15 bp, Homo sapiens
atgggcctccaatac

SEQ ID NO: 655808 - DNA, 15 bp, Homo sapiens
tgggcctccaatact

SEQ ID NO: 655809 - DNA, 15 bp, Homo sapiens
gggcctccaatactt

SEQ ID NO: 655810 - DNA, 15 bp, Homo sapiens
ggcctccaatacttt

SEQ ID NO: 655811 - DNA, 15 bp, Homo sapiens
gcctccaatactttg

SEQ ID NO: 655812 - DNA, 15 bp, Homo sapiens
cctccaatactttga

SEQ ID NO: 655813 - DNA, 15 bp, Homo sapiens
ctccaatactttgac

SEQ ID NO: 655814 - DNA, 15 bp, Homo sapiens
tccaatactttgacc

SEQ ID NO: 655815 - DNA, 15 bp, Homo sapiens
ccaatactttgacca

SEQ ID NO: 655816 - DNA, 15 bp, Homo sapiens
caatactttgaccag

SEQ ID NO: 655817 - DNA, 15 bp, Homo sapiens
aatactttgaccaga

SEQ ID NO: 655818 - DNA, 15 bp, Homo sapiens
atactttgaccagac

SEQ ID NO: 655819 - DNA, 15 bp, Homo sapiens
tactttgaccagaca

SEQ ID NO: 655820 - DNA, 15 bp, Homo sapiens
actttgaccagacat

SEQ ID NO: 655821 - DNA, 15 bp, Homo sapiens
ctttgaccagacatc

SEQ ID NO: 655822 - DNA, 15 bp, Homo sapiens
tttgaccagacatct

SEQ ID NO: 655823 - DNA, 15 bp, Homo sapiens
ttgaccagacatctt

SEQ ID NO: 655824 - DNA, 15 bp, Homo sapiens
tgaccagacatcttg

SEQ ID NO: 655825 - DNA, 15 bp, Homo sapiens
gaccagacatcttgt

SEQ ID NO: 655826 - DNA, 15 bp, Homo sapiens
accagacatcttgtg

SEQ ID NO: 655827 - DNA, 15 bp, Homo sapiens
ccagacatcttgtgt

SEQ ID NO: 655828 - DNA, 15 bp, Homo sapiens
cagacatcttgtgtc

SEQ ID NO: 655829 - DNA, 15 bp, Homo sapiens
agacatcttgtgtcg

SEQ ID NO: 655830 - DNA, 15 bp, Homo sapiens
gacatcttgtgtcgt

SEQ ID NO: 655831 - DNA, 15 bp, Homo sapiens
acatcttgtgtcgtg

SEQ ID NO: 655832 - DNA, 15 bp, Homo sapiens
catcttgtgtcgtgc

SEQ ID NO: 655833 - DNA, 15 bp, Homo sapiens
atcttgtgtcgtgcc

SEQ ID NO: 655834 - DNA, 15 bp, Homo sapiens
tcttgtgtcgtgcca

SEQ ID NO: 655835 - DNA, 15 bp, Homo sapiens
cttgtgtcgtgccat

SEQ ID NO: 655836 - DNA, 15 bp, Homo sapiens
ttgtgtcgtgccatc

SEQ ID NO: 655837 - DNA, 15 bp, Homo sapiens
tgtgtcgtgccatca

SEQ ID NO: 655838 - DNA, 15 bp, Homo sapiens
gtgtcgtgccatcat

SEQ ID NO: 655839 - DNA, 15 bp, Homo sapiens
tgtcgtgccatcatt

SEQ ID NO: 655840 - DNA, 15 bp, Homo sapiens
gtcgtgccatcattg

SEQ ID NO: 655841 - DNA, 15 bp, Homo sapiens
tcgtgccatcattgc

SEQ ID NO: 655842 - DNA, 15 bp, Homo sapiens
cgtgccatcattgcc

SEQ ID NO: 655843 - DNA, 15 bp, Homo sapiens
gtgccatcattgccc

SEQ ID NO: 655844 - DNA, 15 bp, Homo sapiens
tgccatcattgccca

SEQ ID NO: 655845 - DNA, 15 bp, Homo sapiens
gccatcattgcccaa

SEQ ID NO: 655846 - DNA, 15 bp, Homo sapiens
ccatcattgcccaag

SEQ ID NO: 655847 - DNA, 15 bp, Homo sapiens
catcattgcccaaga

SEQ ID NO: 655848 - DNA, 15 bp, Homo sapiens
atcattgcccaagat

SEQ ID NO: 655849 - DNA, 15 bp, Homo sapiens
tcattgcccaagatc

SEQ ID NO: 655850 - DNA, 15 bp, Homo sapiens
cattgcccaagatct

SEQ ID NO: 655851 - DNA, 15 bp, Homo sapiens
attgcccaagatctc

SEQ ID NO: 655852 - DNA, 15 bp, Homo sapiens
ttgcccaagatctcc

SEQ ID NO: 655853 - DNA, 15 bp, Homo sapiens
tgcccaagatctcca

SEQ ID NO: 655854 - DNA, 15 bp, Homo sapiens
gcccaagatctccat

SEQ ID NO: 655855 - DNA, 15 bp, Homo sapiens
cccaagatctccatt

SEQ ID NO: 655856 - DNA, 15 bp, Homo sapiens
ccaagatctccatta

SEQ ID NO: 655857 - DNA, 15 bp, Homo sapiens
caagatctccattag

SEQ ID NO: 655858 - DNA, 15 bp, Homo sapiens
aagatctccattaga

SEQ ID NO: 655859 - DNA, 15 bp, Homo sapiens
agatctccattagag

SEQ ID NO: 655860 - DNA, 15 bp, Homo sapiens
gatctccattagagc

SEQ ID NO: 655861 - DNA, 15 bp, Homo sapiens
atctccattagagct

SEQ ID NO: 655862 - DNA, 15 bp, Homo sapiens
tctccattagagctg

SEQ ID NO: 655863 - DNA, 15 bp, Homo sapiens
ctccattagagctga

SEQ ID NO: 655864 - DNA, 15 bp, Homo sapiens
tccattagagctgac

SEQ ID NO: 655865 - DNA, 15 bp, Homo sapiens
ccattagagctgact

SEQ ID NO: 655866 - DNA, 15 bp, Homo sapiens
cattagagctgactt

SEQ ID NO: 655867 - DNA, 15 bp, Homo sapiens
attagagctgacttc

SEQ ID NO: 655868 - DNA, 15 bp, Homo sapiens
ttagagctgacttca

SEQ ID NO: 655869 - DNA, 15 bp, Homo sapiens
tagagctgacttcat

SEQ ID NO: 655870 - DNA, 15 bp, Homo sapiens
agagctgacttcatc

SEQ ID NO: 655871 - DNA, 15 bp, Homo sapiens
gagctgacttcatct

SEQ ID NO: 655872 - DNA, 15 bp, Homo sapiens
agctgacttcatctc

SEQ ID NO: 655873 - DNA, 15 bp, Homo sapiens
gctgacttcatctct

SEQ ID NO: 655874 - DNA, 15 bp, Homo sapiens
ctgacttcatctctt

SEQ ID NO: 655875 - DNA, 15 bp, Homo sapiens
tgacttcatctcttc

SEQ ID NO: 655876 - DNA, 15 bp, Homo sapiens
gacttcatctcttca

SEQ ID NO: 655877 - DNA, 15 bp, Homo sapiens
acttcatctcttcag

SEQ ID NO: 655878 - DNA, 15 bp, Homo sapiens
cttcatctcttcagc

SEQ ID NO: 655879 - DNA, 15 bp, Homo sapiens
ttcatctcttcagca

SEQ ID NO: 655880 - DNA, 15 bp, Homo sapiens
tcatctcttcagcag

SEQ ID NO: 655881 - DNA, 15 bp, Homo sapiens
catctcttcagcagc

SEQ ID NO: 655882 - DNA, 15 bp, Homo sapiens
atctcttcagcagcc

SEQ ID NO: 655883 - DNA, 15 bp, Homo sapiens
tctcttcagcagcct

SEQ ID NO: 655884 - DNA, 15 bp, Homo sapiens
ctcttcagcagcctt

SEQ ID NO: 655885 - DNA, 15 bp, Homo sapiens
tcttcagcagccttc

SEQ ID NO: 655886 - DNA, 15 bp, Homo sapiens
cttcagcagccttcc

SEQ ID NO: 655887 - DNA, 15 bp, Homo sapiens
ttcagcagccttcct

SEQ ID NO: 655888 - DNA, 15 bp, Homo sapiens
tcagcagccttcctt

SEQ ID NO: 655889 - DNA, 15 bp, Homo sapiens
cagcagccttccttc

SEQ ID NO: 655890 - DNA, 15 bp, Homo sapiens
agcagccttccttct

SEQ ID NO: 655891 - DNA, 15 bp, Homo sapiens
gcagccttccttctg

SEQ ID NO: 655892 - DNA, 15 bp, Homo sapiens
cagccttccttctgg

SEQ ID NO: 655893 - DNA, 15 bp, Homo sapiens
agccttccttctggt

SEQ ID NO: 655894 - DNA, 15 bp, Homo sapiens
gccttccttctggtt

SEQ ID NO: 655895 - DNA, 15 bp, Homo sapiens
ccttccttctggttt

SEQ ID NO: 655896 - DNA, 15 bp, Homo sapiens
cttccttctggtttt

SEQ ID NO: 655897 - DNA, 15 bp, Homo sapiens
ttccttctggtttta

SEQ ID NO: 655898 - DNA, 15 bp, Homo sapiens
tccttctggttttac

SEQ ID NO: 655899 - DNA, 15 bp, Homo sapiens
ccttctggttttaca

SEQ ID NO: 655900 - DNA, 15 bp, Homo sapiens
cttctggttttacag

SEQ ID NO: 655901 - DNA, 15 bp, Homo sapiens
ttctggttttacagc

SEQ ID NO: 655902 - DNA, 15 bp, Homo sapiens
tctggttttacagcc

SEQ ID NO: 655903 - DNA, 15 bp, Homo sapiens
ctggttttacagccc

SEQ ID NO: 655904 - DNA, 15 bp, Homo sapiens
tggttttacagccca

SEQ ID NO: 655905 - DNA, 15 bp, Homo sapiens
ggttttacagcccac

SEQ ID NO: 655906 - DNA, 15 bp, Homo sapiens
gttttacagcccaca

SEQ ID NO: 655907 - DNA, 15 bp, Homo sapiens
ttttacagcccacac

SEQ ID NO: 655908 - DNA, 15 bp, Homo sapiens
tttacagcccacacc

SEQ ID NO: 655909 - DNA, 15 bp, Homo sapiens
ttacagcccacacca

SEQ ID NO: 655910 - DNA, 15 bp, Homo sapiens
tacagcccacaccac

SEQ ID NO: 655911 - DNA, 15 bp, Homo sapiens
acagcccacaccaca

SEQ ID NO: 655912 - DNA, 15 bp, Homo sapiens
cagcccacaccacag

SEQ ID NO: 655913 - DNA, 15 bp, Homo sapiens
agcccacaccacaga

SEQ ID NO: 655914 - DNA, 15 bp, Homo sapiens
gcccacaccacagat

SEQ ID NO: 655915 - DNA, 15 bp, Homo sapiens
cccacaccacagatt

SEQ ID NO: 655916 - DNA, 15 bp, Homo sapiens
ccacaccacagattc

SEQ ID NO: 655917 - DNA, 15 bp, Homo sapiens
cacaccacagattca

SEQ ID NO: 655918 - DNA, 15 bp, Homo sapiens
acaccacagattcag

SEQ ID NO: 655919 - DNA, 15 bp, Homo sapiens
caccacagattcaga

SEQ ID NO: 655920 - DNA, 15 bp, Homo sapiens
accacagattcagac

SEQ ID NO: 655921 - DNA, 15 bp, Homo sapiens
ccacagattcagaca

SEQ ID NO: 655922 - DNA, 15 bp, Homo sapiens
cacagattcagacac

SEQ ID NO: 655923 - DNA, 15 bp, Homo sapiens
acagattcagacaca

SEQ ID NO: 655924 - DNA, 15 bp, Homo sapiens
cagattcagacacag

SEQ ID NO: 655925 - DNA, 15 bp, Homo sapiens
agattcagacacagt

SEQ ID NO: 655926 - DNA, 15 bp, Homo sapiens
gattcagacacagtg

SEQ ID NO: 655927 - DNA, 15 bp, Homo sapiens
attcagacacagtga

SEQ ID NO: 655928 - DNA, 15 bp, Homo sapiens
ttcagacacagtgaa

SEQ ID NO: 655929 - DNA, 15 bp, Homo sapiens
tcagacacagtgaaa

SEQ ID NO: 655930 - DNA, 15 bp, Homo sapiens
cagacacagtgaaaa

SEQ ID NO: 655931 - DNA, 15 bp, Homo sapiens
agacacagtgaaaat

SEQ ID NO: 655932 - DNA, 15 bp, Homo sapiens
gacacagtgaaaata

SEQ ID NO: 655933 - DNA, 15 bp, Homo sapiens
acacagtgaaaatag

SEQ ID NO: 655934 - DNA, 15 bp, Homo sapiens
cacagtgaaaatagc

SEQ ID NO: 655935 - DNA, 15 bp, Homo sapiens
acagtgaaaatagcc

SEQ ID NO: 655936 - DNA, 15 bp, Homo sapiens
cagtgaaaatagcca

SEQ ID NO: 655937 - DNA, 15 bp, Homo sapiens
agtgaaaatagccac

SEQ ID NO: 655938 - DNA, 15 bp, Homo sapiens
gtgaaaatagccaca

SEQ ID NO: 655939 - DNA, 15 bp, Homo sapiens
tgaaaatagccacaa

SEQ ID NO: 655940 - DNA, 15 bp, Homo sapiens
gaaaatagccacaag

SEQ ID NO: 655941 - DNA, 15 bp, Homo sapiens
aaaatagccacaagg

SEQ ID NO: 655942 - DNA, 15 bp, Homo sapiens
aaatagccacaaggt

SEQ ID NO: 655943 - DNA, 15 bp, Homo sapiens
aatagccacaaggtc

SEQ ID NO: 655944 - DNA, 15 bp, Homo sapiens
atagccacaaggtct

SEQ ID NO: 655945 - DNA, 15 bp, Homo sapiens
tagccacaaggtctc

SEQ ID NO: 655946 - DNA, 15 bp, Homo sapiens
agccacaaggtctct

SEQ ID NO: 655947 - DNA, 15 bp, Homo sapiens
gccacaaggtctctc

SEQ ID NO: 655948 - DNA, 15 bp, Homo sapiens
ccacaaggtctctcc

SEQ ID NO: 655949 - DNA, 15 bp, Homo sapiens
cacaaggtctctccc

SEQ ID NO: 655950 - DNA, 15 bp, Homo sapiens
acaaggtctctccca

SEQ ID NO: 655951 - DNA, 15 bp, Homo sapiens
caaggtctctcccaa

SEQ ID NO: 655952 - DNA, 15 bp, Homo sapiens
aaggtctctcccaag

SEQ ID NO: 655953 - DNA, 15 bp, Homo sapiens
aggtctctcccaagg

SEQ ID NO: 655954 - DNA, 15 bp, Homo sapiens
ggtctctcccaagga

SEQ ID NO: 655955 - DNA, 15 bp, Homo sapiens
gtctctcccaaggag

SEQ ID NO: 655956 - DNA, 15 bp, Homo sapiens
tctctcccaaggaga

SEQ ID NO: 655957 - DNA, 15 bp, Homo sapiens
ctctcccaaggagat

SEQ ID NO: 655958 - DNA, 15 bp, Homo sapiens
tctcccaaggagatg

SEQ ID NO: 655959 - DNA, 15 bp, Homo sapiens
ctcccaaggagatgt

SEQ ID NO: 655960 - DNA, 15 bp, Homo sapiens
tcccaaggagatgtc

SEQ ID NO: 655961 - DNA, 15 bp, Homo sapiens
cccaaggagatgtct

SEQ ID NO: 655962 - DNA, 15 bp, Homo sapiens
ccaaggagatgtctc

SEQ ID NO: 655963 - DNA, 15 bp, Homo sapiens
caaggagatgtctca

SEQ ID NO: 655964 - DNA, 15 bp, Homo sapiens
aaggagatgtctcat

SEQ ID NO: 655965 - DNA, 15 bp, Homo sapiens
aggagatgtctcatt

SEQ ID NO: 655966 - DNA, 15 bp, Homo sapiens
ggagatgtctcattg

SEQ ID NO: 655967 - DNA, 15 bp, Homo sapiens
gagatgtctcattgt

SEQ ID NO: 655968 - DNA, 15 bp, Homo sapiens
agatgtctcattgtt

SEQ ID NO: 655969 - DNA, 15 bp, Homo sapiens
gatgtctcattgttc

SEQ ID NO: 655970 - DNA, 15 bp, Homo sapiens
atgtctcattgttct

SEQ ID NO: 655971 - DNA, 15 bp, Homo sapiens
tgtctcattgttctc

SEQ ID NO: 655972 - DNA, 15 bp, Homo sapiens
gtctcattgttctcg

SEQ ID NO: 655973 - DNA, 15 bp, Homo sapiens
tctcattgttctcga

SEQ ID NO: 655974 - DNA, 15 bp, Homo sapiens
ctcattgttctcgat

SEQ ID NO: 655975 - DNA, 15 bp, Homo sapiens
tcattgttctcgata

SEQ ID NO: 655976 - DNA, 15 bp, Homo sapiens
cattgttctcgataa

SEQ ID NO: 655977 - DNA, 15 bp, Homo sapiens
attgttctcgataac

SEQ ID NO: 655978 - DNA, 15 bp, Homo sapiens
ttgttctcgataaca

SEQ ID NO: 655979 - DNA, 15 bp, Homo sapiens
tgttctcgataacag

SEQ ID NO: 655980 - DNA, 15 bp, Homo sapiens
gttctcgataacagc

SEQ ID NO: 655981 - DNA, 15 bp, Homo sapiens
ttctcgataacagcc

SEQ ID NO: 655982 - DNA, 15 bp, Homo sapiens
tctcgataacagcct

SEQ ID NO: 655983 - DNA, 15 bp, Homo sapiens
ctcgataacagcctg

SEQ ID NO: 655984 - DNA, 15 bp, Homo sapiens
tcgataacagcctgc

SEQ ID NO: 655985 - DNA, 15 bp, Homo sapiens
cgataacagcctgca

SEQ ID NO: 655986 - DNA, 15 bp, Homo sapiens
gataacagcctgcaa

SEQ ID NO: 655987 - DNA, 15 bp, Homo sapiens
ataacagcctgcaag

SEQ ID NO: 655988 - DNA, 15 bp, Homo sapiens
taacagcctgcaagg

SEQ ID NO: 655989 - DNA, 15 bp, Homo sapiens
aacagcctgcaaggg

SEQ ID NO: 655990 - DNA, 15 bp, Homo sapiens
acagcctgcaagggc

SEQ ID NO: 655991 - DNA, 15 bp, Homo sapiens
cagcctgcaagggct

SEQ ID NO: 655992 - DNA, 15 bp, Homo sapiens
agcctgcaagggctt

SEQ ID NO: 655993 - DNA, 15 bp, Homo sapiens
gcctgcaagggcttt

SEQ ID NO: 655994 - DNA, 15 bp, Homo sapiens
cctgcaagggctttg

SEQ ID NO: 655995 - DNA, 15 bp, Homo sapiens
ctgcaagggctttgc

SEQ ID NO: 655996 - DNA, 15 bp, Homo sapiens
tgcaagggctttgct

SEQ ID NO: 655997 - DNA, 15 bp, Homo sapiens
gcaagggctttgctc

SEQ ID NO: 655998 - DNA, 15 bp, Homo sapiens
caagggctttgctct

SEQ ID NO: 655999 - DNA, 15 bp, Homo sapiens
aagggctttgctctt

SEQ ID NO: 656000 - DNA, 15 bp, Homo sapiens
agggctttgctcttt

SEQ ID NO: 656001 - DNA, 15 bp, Homo sapiens
gggctttgctctttt

SEQ ID NO: 656002 - DNA, 15 bp, Homo sapiens
ggctttgctcttttg

SEQ ID NO: 656003 - DNA, 15 bp, Homo sapiens
gctttgctcttttgt

SEQ ID NO: 656004 - DNA, 15 bp, Homo sapiens
ctttgctcttttgtg

SEQ ID NO: 656005 - DNA, 15 bp, Homo sapiens
tttgctcttttgtgc

SEQ ID NO: 656006 - DNA, 15 bp, Homo sapiens
ttgctcttttgtgca

SEQ ID NO: 656007 - DNA, 15 bp, Homo sapiens
tgctcttttgtgcag

SEQ ID NO: 656008 - DNA, 15 bp, Homo sapiens
gctcttttgtgcagc

SEQ ID NO: 656009 - DNA, 15 bp, Homo sapiens
ctcttttgtgcagcc

SEQ ID NO: 656010 - DNA, 15 bp, Homo sapiens
tcttttgtgcagcca

SEQ ID NO: 656011 - DNA, 15 bp, Homo sapiens
cttttgtgcagccag

SEQ ID NO: 656012 - DNA, 15 bp, Homo sapiens
ttttgtgcagccaga

SEQ ID NO: 656013 - DNA, 15 bp, Homo sapiens
tttgtgcagccagac

SEQ ID NO: 656014 - DNA, 15 bp, Homo sapiens
ttgtgcagccagaca

SEQ ID NO: 656015 - DNA, 15 bp, Homo sapiens
tgtgcagccagacat

SEQ ID NO: 656016 - DNA, 15 bp, Homo sapiens
gtgcagccagacatc

SEQ ID NO: 656017 - DNA, 15 bp, Homo sapiens
tgcagccagacatct

SEQ ID NO: 656018 - DNA, 15 bp, Homo sapiens
gcagccagacatctt

SEQ ID NO: 656019 - DNA, 15 bp, Homo sapiens
cagccagacatcttt

SEQ ID NO: 656020 - DNA, 15 bp, Homo sapiens
agccagacatctttg

SEQ ID NO: 656021 - DNA, 15 bp, Homo sapiens
gccagacatctttga

SEQ ID NO: 656022 - DNA, 15 bp, Homo sapiens
ccagacatctttgac

SEQ ID NO: 656023 - DNA, 15 bp, Homo sapiens
cagacatctttgaca

SEQ ID NO: 656024 - DNA, 15 bp, Homo sapiens
agacatctttgacaa

SEQ ID NO: 656025 - DNA, 15 bp, Homo sapiens
gacatctttgacaac

SEQ ID NO: 656026 - DNA, 15 bp, Homo sapiens
acatctttgacaacc

SEQ ID NO: 656027 - DNA, 15 bp, Homo sapiens
catctttgacaaccc

SEQ ID NO: 656028 - DNA, 15 bp, Homo sapiens
atctttgacaaccca

SEQ ID NO: 656029 - DNA, 15 bp, Homo sapiens
tctttgacaacccat

SEQ ID NO: 656030 - DNA, 15 bp, Homo sapiens
ctttgacaacccatg

SEQ ID NO: 656031 - DNA, 15 bp, Homo sapiens
tttgacaacccatgg

SEQ ID NO: 656032 - DNA, 15 bp, Homo sapiens
ttgacaacccatggt

SEQ ID NO: 656033 - DNA, 15 bp, Homo sapiens
tgacaacccatggtg

SEQ ID NO: 656034 - DNA, 15 bp, Homo sapiens
gacaacccatggtgg

SEQ ID NO: 656035 - DNA, 15 bp, Homo sapiens
acaacccatggtggc

SEQ ID NO: 656036 - DNA, 15 bp, Homo sapiens
caacccatggtggca

SEQ ID NO: 656037 - DNA, 15 bp, Homo sapiens
aacccatggtggcaa

SEQ ID NO: 656038 - DNA, 15 bp, Homo sapiens
acccatggtggcaaa

SEQ ID NO: 656039 - DNA, 15 bp, Homo sapiens
cccatggtggcaaaa

SEQ ID NO: 656040 - DNA, 15 bp, Homo sapiens
ccatggtggcaaaaa

SEQ ID NO: 656041 - DNA, 15 bp, Homo sapiens
catggtggcaaaaaa

SEQ ID NO: 656042 - DNA, 15 bp, Homo sapiens
atggtggcaaaaaat

SEQ ID NO: 656043 - DNA, 15 bp, Homo sapiens
tggtggcaaaaaatc

SEQ ID NO: 656044 - DNA, 15 bp, Homo sapiens
ggtggcaaaaaatcg

SEQ ID NO: 656045 - DNA, 15 bp, Homo sapiens
gtggcaaaaaatcgt

SEQ ID NO: 656046 - DNA, 15 bp, Homo sapiens
tggcaaaaaatcgtt

SEQ ID NO: 656047 - DNA, 15 bp, Homo sapiens
ggcaaaaaatcgttt

SEQ ID NO: 656048 - DNA, 15 bp, Homo sapiens
gcaaaaaatcgtttt

SEQ ID NO: 656049 - DNA, 15 bp, Homo sapiens
caaaaaatcgttttc

SEQ ID NO: 656050 - DNA, 15 bp, Homo sapiens
aaaaaatcgttttcg

SEQ ID NO: 656051 - DNA, 15 bp, Homo sapiens
aaaaatcgttttcgc

SEQ ID NO: 656052 - DNA, 15 bp, Homo sapiens
aaaatcgttttcgca

SEQ ID NO: 656053 - DNA, 15 bp, Homo sapiens
aaatcgttttcgcat

SEQ ID NO: 656054 - DNA, 15 bp, Homo sapiens
aatcgttttcgcatt

SEQ ID NO: 656055 - DNA, 15 bp, Homo sapiens
atcgttttcgcattg

SEQ ID NO: 656056 - DNA, 15 bp, Homo sapiens
tcgttttcgcattga

SEQ ID NO: 656057 - DNA, 15 bp, Homo sapiens
cgttttcgcattgag

SEQ ID NO: 656058 - DNA, 15 bp, Homo sapiens
gttttcgcattgagc

SEQ ID NO: 656059 - DNA, 15 bp, Homo sapiens
ttttcgcattgagct

SEQ ID NO: 656060 - DNA, 15 bp, Homo sapiens
tttcgcattgagctg

SEQ ID NO: 656061 - DNA, 15 bp, Homo sapiens
ttcgcattgagctgc

SEQ ID NO: 656062 - DNA, 15 bp, Homo sapiens
tcgcattgagctgcc

SEQ ID NO: 656063 - DNA, 15 bp, Homo sapiens
cgcattgagctgccg

SEQ ID NO: 656064 - DNA, 15 bp, Homo sapiens
gcattgagctgccgc

SEQ ID NO: 656065 - DNA, 15 bp, Homo sapiens
cattgagctgccgcc

SEQ ID NO: 656066 - DNA, 15 bp, Homo sapiens
attgagctgccgccc

SEQ ID NO: 656067 - DNA, 15 bp, Homo sapiens
ttgagctgccgccct

SEQ ID NO: 656068 - DNA, 15 bp, Homo sapiens
tgagctgccgccctg

SEQ ID NO: 656069 - DNA, 15 bp, Homo sapiens
gagctgccgccctgg

SEQ ID NO: 656070 - DNA, 15 bp, Homo sapiens
agctgccgccctggc

SEQ ID NO: 656071 - DNA, 15 bp, Homo sapiens
gctgccgccctggca

SEQ ID NO: 656072 - DNA, 15 bp, Homo sapiens
ctgccgccctggcag

SEQ ID NO: 656073 - DNA, 15 bp, Homo sapiens
tgccgccctggcaga

SEQ ID NO: 656074 - DNA, 15 bp, Homo sapiens
gccgccctggcagag

SEQ ID NO: 656075 - DNA, 15 bp, Homo sapiens
ccgccctggcagagt

SEQ ID NO: 656076 - DNA, 15 bp, Homo sapiens
cgccctggcagagtt

SEQ ID NO: 656077 - DNA, 15 bp, Homo sapiens
gccctggcagagttc

SEQ ID NO: 656078 - DNA, 15 bp, Homo sapiens
ccctggcagagttcc

SEQ ID NO: 656079 - DNA, 15 bp, Homo sapiens
cctggcagagttcca

SEQ ID NO: 656080 - DNA, 15 bp, Homo sapiens
ctggcagagttccat

SEQ ID NO: 656081 - DNA, 15 bp, Homo sapiens
tggcagagttccatc

SEQ ID NO: 656082 - DNA, 15 bp, Homo sapiens
ggcagagttccatcg

SEQ ID NO: 656083 - DNA, 15 bp, Homo sapiens
gcagagttccatcgt

SEQ ID NO: 656084 - DNA, 15 bp, Homo sapiens
cagagttccatcgta

SEQ ID NO: 656085 - DNA, 15 bp, Homo sapiens
agagttccatcgtac

SEQ ID NO: 656086 - DNA, 15 bp, Homo sapiens
gagttccatcgtaca

SEQ ID NO: 656087 - DNA, 15 bp, Homo sapiens
agttccatcgtacac

SEQ ID NO: 656088 - DNA, 15 bp, Homo sapiens
gttccatcgtacacc

SEQ ID NO: 656089 - DNA, 15 bp, Homo sapiens
ttccatcgtacacct

SEQ ID NO: 656090 - DNA, 15 bp, Homo sapiens
tccatcgtacacctc

SEQ ID NO: 656091 - DNA, 15 bp, Homo sapiens
ccatcgtacacctct

SEQ ID NO: 656092 - DNA, 15 bp, Homo sapiens
catcgtacacctctc

SEQ ID NO: 656093 - DNA, 15 bp, Homo sapiens
atcgtacacctctcc

SEQ ID NO: 656094 - DNA, 15 bp, Homo sapiens
tcgtacacctctcca

SEQ ID NO: 656095 - DNA, 15 bp, Homo sapiens
cgtacacctctccat

SEQ ID NO: 656096 - DNA, 15 bp, Homo sapiens
gtacacctctccatg

SEQ ID NO: 656097 - DNA, 15 bp, Homo sapiens
tacacctctccatga

SEQ ID NO: 656098 - DNA, 15 bp, Homo sapiens
acacctctccatgag

SEQ ID NO: 656099 - DNA, 15 bp, Homo sapiens
cacctctccatgaga

SEQ ID NO: 656100 - DNA, 15 bp, Homo sapiens
acctctccatgagac

SEQ ID NO: 656101 - DNA, 15 bp, Homo sapiens
cctctccatgagaca

SEQ ID NO: 656102 - DNA, 15 bp, Homo sapiens
ctctccatgagacat

SEQ ID NO: 656103 - DNA, 15 bp, Homo sapiens
tctccatgagacatc

SEQ ID NO: 656104 - DNA, 15 bp, Homo sapiens
ctccatgagacatcc

SEQ ID NO: 656105 - DNA, 15 bp, Homo sapiens
tccatgagacatccc

SEQ ID NO: 656106 - DNA, 15 bp, Homo sapiens
ccatgagacatccca

SEQ ID NO: 656107 - DNA, 15 bp, Homo sapiens
catgagacatcccaa

SEQ ID NO: 656108 - DNA, 15 bp, Homo sapiens
atgagacatcccaaa

SEQ ID NO: 656109 - DNA, 15 bp, Homo sapiens
tgagacatcccaaag

SEQ ID NO: 656110 - DNA, 15 bp, Homo sapiens
gagacatcccaaaga

SEQ ID NO: 656111 - DNA, 15 bp, Homo sapiens
agacatcccaaagaa

SEQ ID NO: 656112 - DNA, 15 bp, Homo sapiens
gacatcccaaagaat

SEQ ID NO: 656113 - DNA, 15 bp, Homo sapiens
acatcccaaagaatt

SEQ ID NO: 656114 - DNA, 15 bp, Homo sapiens
catcccaaagaatta

SEQ ID NO: 656115 - DNA, 15 bp, Homo sapiens
atcccaaagaattac

SEQ ID NO: 656116 - DNA, 15 bp, Homo sapiens
tcccaaagaattact

SEQ ID NO: 656117 - DNA, 15 bp, Homo sapiens
cccaaagaattactt

SEQ ID NO: 656118 - DNA, 15 bp, Homo sapiens
ccaaagaattacttt

SEQ ID NO: 656119 - DNA, 15 bp, Homo sapiens
caaagaattacttta

SEQ ID NO: 656120 - DNA, 15 bp, Homo sapiens
aaagaattactttag

SEQ ID NO: 656121 - DNA, 15 bp, Homo sapiens
aagaattactttagg

SEQ ID NO: 656122 - DNA, 15 bp, Homo sapiens
agaattactttaggt

SEQ ID NO: 656123 - DNA, 15 bp, Homo sapiens
gaattactttaggtt

SEQ ID NO: 656124 - DNA, 15 bp, Homo sapiens
aattactttaggttg

SEQ ID NO: 656125 - DNA, 15 bp, Homo sapiens
attactttaggttgc

SEQ ID NO: 656126 - DNA, 15 bp, Homo sapiens
ttactttaggttgcc

SEQ ID NO: 656127 - DNA, 15 bp, Homo sapiens
tactttaggttgcct

SEQ ID NO: 656128 - DNA, 15 bp, Homo sapiens
actttaggttgcctg

SEQ ID NO: 656129 - DNA, 15 bp, Homo sapiens
ctttaggttgcctgg

SEQ ID NO: 656130 - DNA, 15 bp, Homo sapiens
tttaggttgcctgga

SEQ ID NO: 656131 - DNA, 15 bp, Homo sapiens
ttaggttgcctggaa

SEQ ID NO: 656132 - DNA, 15 bp, Homo sapiens
taggttgcctggaaa

SEQ ID NO: 656133 - DNA, 15 bp, Homo sapiens
aggttgcctggaaag

SEQ ID NO: 656134 - DNA, 15 bp, Homo sapiens
ggttgcctggaaagt

SEQ ID NO: 656135 - DNA, 15 bp, Homo sapiens
gttgcctggaaagtt

SEQ ID NO: 656136 - DNA, 15 bp, Homo sapiens
ttgcctggaaagttc

SEQ ID NO: 656137 - DNA, 15 bp, Homo sapiens
tgcctggaaagttca

SEQ ID NO: 656138 - DNA, 15 bp, Homo sapiens
gcctggaaagttcaa

SEQ ID NO: 656139 - DNA, 15 bp, Homo sapiens
cctggaaagttcaaa

SEQ ID NO: 656140 - DNA, 15 bp, Homo sapiens
ctggaaagttcaaac

SEQ ID NO: 656141 - DNA, 15 bp, Homo sapiens
tggaaagttcaaacc

SEQ ID NO: 656142 - DNA, 15 bp, Homo sapiens
ggaaagttcaaaccc

SEQ ID NO: 656143 - DNA, 15 bp, Homo sapiens
gaaagttcaaacccc

SEQ ID NO: 656144 - DNA, 15 bp, Homo sapiens
aaagttcaaaccccc

SEQ ID NO: 656145 - DNA, 15 bp, Homo sapiens
aagttcaaaccccca

SEQ ID NO: 656146 - DNA, 15 bp, Homo sapiens
agttcaaacccccag

SEQ ID NO: 656147 - DNA, 15 bp, Homo sapiens
gttcaaacccccagg

SEQ ID NO: 656148 - DNA, 15 bp, Homo sapiens
ttcaaacccccaggc

SEQ ID NO: 656149 - DNA, 15 bp, Homo sapiens
tcaaacccccaggcc

SEQ ID NO: 656150 - DNA, 15 bp, Homo sapiens
caaacccccaggcct

SEQ ID NO: 656151 - DNA, 15 bp, Homo sapiens
aaacccccaggcctt

SEQ ID NO: 656152 - DNA, 15 bp, Homo sapiens
aacccccaggcctta

SEQ ID NO: 656153 - DNA, 15 bp, Homo sapiens
acccccaggccttat

SEQ ID NO: 656154 - DNA, 15 bp, Homo sapiens
cccccaggccttatt

SEQ ID NO: 656155 - DNA, 15 bp, Homo sapiens
ccccaggccttatta

SEQ ID NO: 656156 - DNA, 15 bp, Homo sapiens
cccaggccttattag

SEQ ID NO: 656157 - DNA, 15 bp, Homo sapiens
ccaggccttattagc

SEQ ID NO: 656158 - DNA, 15 bp, Homo sapiens
caggccttattagct

SEQ ID NO: 656159 - DNA, 15 bp, Homo sapiens
aggccttattagctg

SEQ ID NO: 656160 - DNA, 15 bp, Homo sapiens
ggccttattagctgt

SEQ ID NO: 656161 - DNA, 15 bp, Homo sapiens
gccttattagctgtt

SEQ ID NO: 656162 - DNA, 15 bp, Homo sapiens
ccttattagctgtta

SEQ ID NO: 656163 - DNA, 15 bp, Homo sapiens
cttattagctgttag

SEQ ID NO: 656164 - DNA, 15 bp, Homo sapiens
ttattagctgttaga

SEQ ID NO: 656165 - DNA, 15 bp, Homo sapiens
tattagctgttagac

SEQ ID NO: 656166 - DNA, 15 bp, Homo sapiens
attagctgttagact

SEQ ID NO: 656167 - DNA, 15 bp, Homo sapiens
ttagctgttagacta

SEQ ID NO: 656168 - DNA, 15 bp, Homo sapiens
tagctgttagactaa

SEQ ID NO: 656169 - DNA, 15 bp, Homo sapiens
agctgttagactaag

SEQ ID NO: 656170 - DNA, 15 bp, Homo sapiens
gctgttagactaagg

SEQ ID NO: 656171 - DNA, 15 bp, Homo sapiens
ctgttagactaagga

SEQ ID NO: 656172 - DNA, 15 bp, Homo sapiens
tgttagactaaggag

SEQ ID NO: 656173 - DNA, 15 bp, Homo sapiens
gttagactaaggaga

SEQ ID NO: 656174 - DNA, 15 bp, Homo sapiens
ttagactaaggagat

SEQ ID NO: 656175 - DNA, 15 bp, Homo sapiens
tagactaaggagatg

SEQ ID NO: 656176 - DNA, 15 bp, Homo sapiens
agactaaggagatga

SEQ ID NO: 656177 - DNA, 15 bp, Homo sapiens
gactaaggagatgac

SEQ ID NO: 656178 - DNA, 15 bp, Homo sapiens
actaaggagatgaca

SEQ ID NO: 656179 - DNA, 15 bp, Homo sapiens
ctaaggagatgacaa

SEQ ID NO: 656180 - DNA, 15 bp, Homo sapiens
taaggagatgacaac

SEQ ID NO: 656181 - DNA, 15 bp, Homo sapiens
aaggagatgacaaca

SEQ ID NO: 656182 - DNA, 15 bp, Homo sapiens
aggagatgacaacac

SEQ ID NO: 656183 - DNA, 15 bp, Homo sapiens
ggagatgacaacaca

SEQ ID NO: 656184 - DNA, 15 bp, Homo sapiens
gagatgacaacacaa

SEQ ID NO: 656185 - DNA, 15 bp, Homo sapiens
agatgacaacacaac

SEQ ID NO: 656186 - DNA, 15 bp, Homo sapiens
gatgacaacacaaca

SEQ ID NO: 656187 - DNA, 15 bp, Homo sapiens
atgacaacacaacat

SEQ ID NO: 656188 - DNA, 15 bp, Homo sapiens
tgacaacacaacatt

SEQ ID NO: 656189 - DNA, 15 bp, Homo sapiens
gacaacacaacattt

SEQ ID NO: 656190 - DNA, 15 bp, Homo sapiens
acaacacaacatttt

SEQ ID NO: 656191 - DNA, 15 bp, Homo sapiens
caacacaacattttg

SEQ ID NO: 656192 - DNA, 15 bp, Homo sapiens
aacacaacattttgt

SEQ ID NO: 656193 - DNA, 15 bp, Homo sapiens
acacaacattttgtt

SEQ ID NO: 656194 - DNA, 15 bp, Homo sapiens
cacaacattttgttt

SEQ ID NO: 656195 - DNA, 15 bp, Homo sapiens
acaacattttgtttg

SEQ ID NO: 656196 - DNA, 15 bp, Homo sapiens
caacattttgtttgt

SEQ ID NO: 656197 - DNA, 15 bp, Homo sapiens
aacattttgtttgtc

SEQ ID NO: 656198 - DNA, 15 bp, Homo sapiens
acattttgtttgtct

SEQ ID NO: 656199 - DNA, 15 bp, Homo sapiens
cattttgtttgtctt

SEQ ID NO: 656200 - DNA, 15 bp, Homo sapiens
attttgtttgtcttt

SEQ ID NO: 656201 - DNA, 15 bp, Homo sapiens
ttttgtttgtcttta

SEQ ID NO: 656202 - DNA, 15 bp, Homo sapiens
tttgtttgtctttat

SEQ ID NO: 656203 - DNA, 15 bp, Homo sapiens
ttgtttgtctttatc

SEQ ID NO: 656204 - DNA, 15 bp, Homo sapiens
tgtttgtctttatct

SEQ ID NO: 656205 - DNA, 15 bp, Homo sapiens
gtttgtctttatcta

SEQ ID NO: 656206 - DNA, 15 bp, Homo sapiens
tttgtctttatctat

SEQ ID NO: 656207 - DNA, 15 bp, Homo sapiens
ttgtctttatctata

SEQ ID NO: 656208 - DNA, 15 bp, Homo sapiens
tgtctttatctatac

SEQ ID NO: 656209 - DNA, 15 bp, Homo sapiens
gtctttatctataca

SEQ ID NO: 656210 - DNA, 15 bp, Homo sapiens
tctttatctatacat

SEQ ID NO: 656211 - DNA, 15 bp, Homo sapiens
ctttatctatacatg

SEQ ID NO: 656212 - DNA, 15 bp, Homo sapiens
tttatctatacatga

SEQ ID NO: 656213 - DNA, 15 bp, Homo sapiens
ttatctatacatgag

SEQ ID NO: 656214 - DNA, 15 bp, Homo sapiens
tatctatacatgaga

SEQ ID NO: 656215 - DNA, 15 bp, Homo sapiens
atctatacatgagat

SEQ ID NO: 656216 - DNA, 15 bp, Homo sapiens
tctatacatgagatc

SEQ ID NO: 656217 - DNA, 15 bp, Homo sapiens
ctatacatgagatca

SEQ ID NO: 656218 - DNA, 15 bp, Homo sapiens
tatacatgagatcat

SEQ ID NO: 656219 - DNA, 15 bp, Homo sapiens
atacatgagatcatg

SEQ ID NO: 656220 - DNA, 15 bp, Homo sapiens
tacatgagatcatgt

SEQ ID NO: 656221 - DNA, 15 bp, Homo sapiens
acatgagatcatgtt

SEQ ID NO: 656222 - DNA, 15 bp, Homo sapiens
catgagatcatgttt

SEQ ID NO: 656223 - DNA, 15 bp, Homo sapiens
atgagatcatgttta

SEQ ID NO: 656224 - DNA, 15 bp, Homo sapiens
tgagatcatgtttaa

SEQ ID NO: 656225 - DNA, 15 bp, Homo sapiens
gagatcatgtttaaa

SEQ ID NO: 656226 - DNA, 15 bp, Homo sapiens
agatcatgtttaaaa

SEQ ID NO: 656227 - DNA, 15 bp, Homo sapiens
gatcatgtttaaaac

SEQ ID NO: 656228 - DNA, 15 bp, Homo sapiens
atcatgtttaaaaca

SEQ ID NO: 656229 - DNA, 15 bp, Homo sapiens
tcatgtttaaaacat

SEQ ID NO: 656230 - DNA, 15 bp, Homo sapiens
catgtttaaaacata

SEQ ID NO: 656231 - DNA, 15 bp, Homo sapiens
atgtttaaaacatag

SEQ ID NO: 656232 - DNA, 15 bp, Homo sapiens
tgtttaaaacatagc

SEQ ID NO: 656233 - DNA, 15 bp, Homo sapiens
gtttaaaacatagca

SEQ ID NO: 656234 - DNA, 15 bp, Homo sapiens
tttaaaacatagcaa

SEQ ID NO: 656235 - DNA, 15 bp, Homo sapiens
ttaaaacatagcaaa

SEQ ID NO: 656236 - DNA, 15 bp, Homo sapiens
taaaacatagcaaag

SEQ ID NO: 656237 - DNA, 15 bp, Homo sapiens
aaaacatagcaaaga

SEQ ID NO: 656238 - DNA, 15 bp, Homo sapiens
aaacatagcaaagag

SEQ ID NO: 656239 - DNA, 15 bp, Homo sapiens
aacatagcaaagagg

SEQ ID NO: 656240 - DNA, 15 bp, Homo sapiens
acatagcaaagaggt

SEQ ID NO: 656241 - DNA, 15 bp, Homo sapiens
catagcaaagaggtg

SEQ ID NO: 656242 - DNA, 15 bp, Homo sapiens
atagcaaagaggtgt

SEQ ID NO: 656243 - DNA, 15 bp, Homo sapiens
tagcaaagaggtgtt

SEQ ID NO: 656244 - DNA, 15 bp, Homo sapiens
agcaaagaggtgtta

SEQ ID NO: 656245 - DNA, 15 bp, Homo sapiens
gcaaagaggtgttat

SEQ ID NO: 656246 - DNA, 15 bp, Homo sapiens
caaagaggtgttatt

SEQ ID NO: 656247 - DNA, 15 bp, Homo sapiens
aaagaggtgttattt

SEQ ID NO: 656248 - DNA, 15 bp, Homo sapiens
aagaggtgttatttg

SEQ ID NO: 656249 - DNA, 15 bp, Homo sapiens
agaggtgttatttga

SEQ ID NO: 656250 - DNA, 15 bp, Homo sapiens
gaggtgttatttgac

SEQ ID NO: 656251 - DNA, 15 bp, Homo sapiens
aggtgttatttgaca

SEQ ID NO: 656252 - DNA, 15 bp, Homo sapiens
ggtgttatttgacaa

SEQ ID NO: 656253 - DNA, 15 bp, Homo sapiens
gtgttatttgacaag

SEQ ID NO: 656254 - DNA, 15 bp, Homo sapiens
tgttatttgacaagc

SEQ ID NO: 656255 - DNA, 15 bp, Homo sapiens
gttatttgacaagca

SEQ ID NO: 656256 - DNA, 15 bp, Homo sapiens
ttatttgacaagcaa

SEQ ID NO: 656257 - DNA, 15 bp, Homo sapiens
tatttgacaagcaat

SEQ ID NO: 656258 - DNA, 15 bp, Homo sapiens
atttgacaagcaatt

SEQ ID NO: 656259 - DNA, 15 bp, Homo sapiens
tttgacaagcaattc

SEQ ID NO: 656260 - DNA, 15 bp, Homo sapiens
ttgacaagcaattcc

SEQ ID NO: 656261 - DNA, 15 bp, Homo sapiens
tgacaagcaattccc

SEQ ID NO: 656262 - DNA, 15 bp, Homo sapiens
gacaagcaattccct

SEQ ID NO: 656263 - DNA, 15 bp, Homo sapiens
acaagcaattcccta

SEQ ID NO: 656264 - DNA, 15 bp, Homo sapiens
caagcaattccctaa

SEQ ID NO: 656265 - DNA, 15 bp, Homo sapiens
aagcaattccctaac

SEQ ID NO: 656266 - DNA, 15 bp, Homo sapiens
agcaattccctaact

SEQ ID NO: 656267 - DNA, 15 bp, Homo sapiens
gcaattccctaactg

SEQ ID NO: 656268 - DNA, 15 bp, Homo sapiens
caattccctaactgc

SEQ ID NO: 656269 - DNA, 15 bp, Homo sapiens
aattccctaactgca

SEQ ID NO: 656270 - DNA, 15 bp, Homo sapiens
attccctaactgcag

SEQ ID NO: 656271 - DNA, 15 bp, Homo sapiens
ttccctaactgcagt

SEQ ID NO: 656272 - DNA, 15 bp, Homo sapiens
tccctaactgcagta

SEQ ID NO: 656273 - DNA, 15 bp, Homo sapiens
ccctaactgcagtaa

SEQ ID NO: 656274 - DNA, 15 bp, Homo sapiens
cctaactgcagtaag

SEQ ID NO: 656275 - DNA, 15 bp, Homo sapiens
ctaactgcagtaagt

SEQ ID NO: 656276 - DNA, 15 bp, Homo sapiens
taactgcagtaagtt

SEQ ID NO: 656277 - DNA, 15 bp, Homo sapiens
aactgcagtaagttg

SEQ ID NO: 656278 - DNA, 15 bp, Homo sapiens
actgcagtaagttgt

SEQ ID NO: 656279 - DNA, 15 bp, Homo sapiens
ctgcagtaagttgta

SEQ ID NO: 656280 - DNA, 15 bp, Homo sapiens
tgcagtaagttgtat

SEQ ID NO: 656281 - DNA, 15 bp, Homo sapiens
gcagtaagttgtatg

SEQ ID NO: 656282 - DNA, 15 bp, Homo sapiens
cagtaagttgtatgc

SEQ ID NO: 656283 - DNA, 15 bp, Homo sapiens
agtaagttgtatgcc

SEQ ID NO: 656284 - DNA, 15 bp, Homo sapiens
gtaagttgtatgcct

SEQ ID NO: 656285 - DNA, 15 bp, Homo sapiens
taagttgtatgccta

SEQ ID NO: 656286 - DNA, 15 bp, Homo sapiens
aagttgtatgcctat

SEQ ID NO: 656287 - DNA, 15 bp, Homo sapiens
agttgtatgcctatt

SEQ ID NO: 656288 - DNA, 15 bp, Homo sapiens
gttgtatgcctattt

SEQ ID NO: 656289 - DNA, 15 bp, Homo sapiens
ttgtatgcctattta

SEQ ID NO: 656290 - DNA, 15 bp, Homo sapiens
tgtatgcctatttaa

SEQ ID NO: 656291 - DNA, 15 bp, Homo sapiens
gtatgcctatttaat

SEQ ID NO: 656292 - DNA, 15 bp, Homo sapiens
tatgcctatttaatg

SEQ ID NO: 656293 - DNA, 15 bp, Homo sapiens
atgcctatttaatgc

SEQ ID NO: 656294 - DNA, 15 bp, Homo sapiens
tgcctatttaatgca

SEQ ID NO: 656295 - DNA, 15 bp, Homo sapiens
gcctatttaatgcat

SEQ ID NO: 656296 - DNA, 15 bp, Homo sapiens
cctatttaatgcatt

SEQ ID NO: 656297 - DNA, 15 bp, Homo sapiens
ctatttaatgcattg

SEQ ID NO: 656298 - DNA, 15 bp, Homo sapiens
tatttaatgcattgt

SEQ ID NO: 656299 - DNA, 15 bp, Homo sapiens
atttaatgcattgtt

SEQ ID NO: 656300 - DNA, 15 bp, Homo sapiens
tttaatgcattgttt

SEQ ID NO: 656301 - DNA, 15 bp, Homo sapiens
ttaatgcattgttta

SEQ ID NO: 656302 - DNA, 15 bp, Homo sapiens
taatgcattgtttag

SEQ ID NO: 656303 - DNA, 15 bp, Homo sapiens
aatgcattgtttagt

SEQ ID NO: 656304 - DNA, 15 bp, Homo sapiens
atgcattgtttagtc

SEQ ID NO: 656305 - DNA, 15 bp, Homo sapiens
tgcattgtttagtct

SEQ ID NO: 656306 - DNA, 15 bp, Homo sapiens
gcattgtttagtctc

SEQ ID NO: 656307 - DNA, 15 bp, Homo sapiens
cattgtttagtctca

SEQ ID NO: 656308 - DNA, 15 bp, Homo sapiens
attgtttagtctcac

SEQ ID NO: 656309 - DNA, 15 bp, Homo sapiens
ttgtttagtctcaca

SEQ ID NO: 656310 - DNA, 15 bp, Homo sapiens
tgtttagtctcacat

SEQ ID NO: 656311 - DNA, 15 bp, Homo sapiens
gtttagtctcacatt

SEQ ID NO: 656312 - DNA, 15 bp, Homo sapiens
tttagtctcacattg

SEQ ID NO: 656313 - DNA, 15 bp, Homo sapiens
ttagtctcacattgg

SEQ ID NO: 656314 - DNA, 15 bp, Homo sapiens
tagtctcacattggc

SEQ ID NO: 656315 - DNA, 15 bp, Homo sapiens
agtctcacattggct

SEQ ID NO: 656316 - DNA, 15 bp, Homo sapiens
gtctcacattggcta

SEQ ID NO: 656317 - DNA, 15 bp, Homo sapiens
tctcacattggctaa

SEQ ID NO: 656318 - DNA, 15 bp, Homo sapiens
ctcacattggctaaa

SEQ ID NO: 656319 - DNA, 15 bp, Homo sapiens
tcacattggctaaag

SEQ ID NO: 656320 - DNA, 15 bp, Homo sapiens
cacattggctaaagc

SEQ ID NO: 656321 - DNA, 15 bp, Homo sapiens
acattggctaaagcc

SEQ ID NO: 656322 - DNA, 15 bp, Homo sapiens
cattggctaaagcca

SEQ ID NO: 656323 - DNA, 15 bp, Homo sapiens
attggctaaagccac

SEQ ID NO: 656324 - DNA, 15 bp, Homo sapiens
ttggctaaagccact

SEQ ID NO: 656325 - DNA, 15 bp, Homo sapiens
tggctaaagccactt

SEQ ID NO: 656326 - DNA, 15 bp, Homo sapiens
ggctaaagccactta

SEQ ID NO: 656327 - DNA, 15 bp, Homo sapiens
gctaaagccacttaa

SEQ ID NO: 656328 - DNA, 15 bp, Homo sapiens
ctaaagccacttaaa

SEQ ID NO: 656329 - DNA, 15 bp, Homo sapiens
taaagccacttaaag

SEQ ID NO: 656330 - DNA, 15 bp, Homo sapiens
aaagccacttaaaga

SEQ ID NO: 656331 - DNA, 15 bp, Homo sapiens
aagccacttaaagaa

SEQ ID NO: 656332 - DNA, 15 bp, Homo sapiens
agccacttaaagaag

SEQ ID NO: 656333 - DNA, 15 bp, Homo sapiens
gccacttaaagaagc

SEQ ID NO: 656334 - DNA, 15 bp, Homo sapiens
ccacttaaagaagca

SEQ ID NO: 656335 - DNA, 15 bp, Homo sapiens
cacttaaagaagcac

SEQ ID NO: 656336 - DNA, 15 bp, Homo sapiens
acttaaagaagcact

SEQ ID NO: 656337 - DNA, 15 bp, Homo sapiens
cttaaagaagcactt

SEQ ID NO: 656338 - DNA, 15 bp, Homo sapiens
ttaaagaagcacttg

SEQ ID NO: 656339 - DNA, 15 bp, Homo sapiens
taaagaagcacttgg

SEQ ID NO: 656340 - DNA, 15 bp, Homo sapiens
aaagaagcacttggc

SEQ ID NO: 656341 - DNA, 15 bp, Homo sapiens
aagaagcacttggca

SEQ ID NO: 656342 - DNA, 15 bp, Homo sapiens
agaagcacttggcaa

SEQ ID NO: 656343 - DNA, 15 bp, Homo sapiens
gaagcacttggcaag

SEQ ID NO: 656344 - DNA, 15 bp, Homo sapiens
aagcacttggcaagc

SEQ ID NO: 656345 - DNA, 15 bp, Homo sapiens
agcacttggcaagct

SEQ ID NO: 656346 - DNA, 15 bp, Homo sapiens
gcacttggcaagctc

SEQ ID NO: 656347 - DNA, 15 bp, Homo sapiens
cacttggcaagctct

SEQ ID NO: 656348 - DNA, 15 bp, Homo sapiens
acttggcaagctcta

SEQ ID NO: 656349 - DNA, 15 bp, Homo sapiens
cttggcaagctctag

SEQ ID NO: 656350 - DNA, 15 bp, Homo sapiens
ttggcaagctctagc

SEQ ID NO: 656351 - DNA, 15 bp, Homo sapiens
tggcaagctctagct

SEQ ID NO: 656352 - DNA, 15 bp, Homo sapiens
ggcaagctctagctt

SEQ ID NO: 656353 - DNA, 15 bp, Homo sapiens
gcaagctctagcttt

SEQ ID NO: 656354 - DNA, 15 bp, Homo sapiens
caagctctagctttt

SEQ ID NO: 656355 - DNA, 15 bp, Homo sapiens
aagctctagcttttc

SEQ ID NO: 656356 - DNA, 15 bp, Homo sapiens
agctctagcttttca

SEQ ID NO: 656357 - DNA, 15 bp, Homo sapiens
gctctagcttttcat

SEQ ID NO: 656358 - DNA, 15 bp, Homo sapiens
ctctagcttttcatt

SEQ ID NO: 656359 - DNA, 15 bp, Homo sapiens
tctagcttttcattc

SEQ ID NO: 656360 - DNA, 15 bp, Homo sapiens
ctagcttttcattct

SEQ ID NO: 656361 - DNA, 15 bp, Homo sapiens
tagcttttcattctt

SEQ ID NO: 656362 - DNA, 15 bp, Homo sapiens
agcttttcattcttg

SEQ ID NO: 656363 - DNA, 15 bp, Homo sapiens
gcttttcattcttgg

SEQ ID NO: 656364 - DNA, 15 bp, Homo sapiens
cttttcattcttggc

SEQ ID NO: 656365 - DNA, 15 bp, Homo sapiens
ttttcattcttggca

SEQ ID NO: 656366 - DNA, 15 bp, Homo sapiens
tttcattcttggcat

SEQ ID NO: 656367 - DNA, 15 bp, Homo sapiens
ttcattcttggcata

SEQ ID NO: 656368 - DNA, 15 bp, Homo sapiens
tcattcttggcatag

SEQ ID NO: 656369 - DNA, 15 bp, Homo sapiens
cattcttggcatagc

SEQ ID NO: 656370 - DNA, 15 bp, Homo sapiens
attcttggcatagct

SEQ ID NO: 656371 - DNA, 15 bp, Homo sapiens
ttcttggcatagctg

SEQ ID NO: 656372 - DNA, 15 bp, Homo sapiens
tcttggcatagctgc

SEQ ID NO: 656373 - DNA, 15 bp, Homo sapiens
cttggcatagctgcc

SEQ ID NO: 656374 - DNA, 15 bp, Homo sapiens
ttggcatagctgccc

SEQ ID NO: 656375 - DNA, 15 bp, Homo sapiens
tggcatagctgcccc

SEQ ID NO: 656376 - DNA, 15 bp, Homo sapiens
ggcatagctgcccct

SEQ ID NO: 656377 - DNA, 15 bp, Homo sapiens
gcatagctgcccctc

SEQ ID NO: 656378 - DNA, 15 bp, Homo sapiens
catagctgcccctct

SEQ ID NO: 656379 - DNA, 15 bp, Homo sapiens
atagctgcccctctt

SEQ ID NO: 656380 - DNA, 15 bp, Homo sapiens
tagctgcccctctta

SEQ ID NO: 656381 - DNA, 15 bp, Homo sapiens
agctgcccctcttac

SEQ ID NO: 656382 - DNA, 15 bp, Homo sapiens
gctgcccctcttact

SEQ ID NO: 656383 - DNA, 15 bp, Homo sapiens
ctgcccctcttactt

SEQ ID NO: 656384 - DNA, 15 bp, Homo sapiens
tgcccctcttacttt

SEQ ID NO: 656385 - DNA, 15 bp, Homo sapiens
gcccctcttactttt

SEQ ID NO: 656386 - DNA, 15 bp, Homo sapiens
cccctcttacttttt

SEQ ID NO: 656387 - DNA, 15 bp, Homo sapiens
ccctcttactttttc

SEQ ID NO: 656388 - DNA, 15 bp, Homo sapiens
cctcttactttttca

SEQ ID NO: 656389 - DNA, 15 bp, Homo sapiens
ctcttactttttcac

SEQ ID NO: 656390 - DNA, 15 bp, Homo sapiens
tcttactttttcact

SEQ ID NO: 656391 - DNA, 15 bp, Homo sapiens
cttactttttcactg

SEQ ID NO: 656392 - DNA, 15 bp, Homo sapiens
ttactttttcactga

SEQ ID NO: 656393 - DNA, 15 bp, Homo sapiens
tactttttcactgaa

SEQ ID NO: 656394 - DNA, 15 bp, Homo sapiens
actttttcactgaac

SEQ ID NO: 656395 - DNA, 15 bp, Homo sapiens
ctttttcactgaacc

SEQ ID NO: 656396 - DNA, 15 bp, Homo sapiens
tttttcactgaacct

SEQ ID NO: 656397 - DNA, 15 bp, Homo sapiens
ttttcactgaacctt

SEQ ID NO: 656398 - DNA, 15 bp, Homo sapiens
tttcactgaacctta

SEQ ID NO: 656399 - DNA, 15 bp, Homo sapiens
ttcactgaaccttaa

SEQ ID NO: 656400 - DNA, 15 bp, Homo sapiens
tcactgaaccttaaa

SEQ ID NO: 656401 - DNA, 15 bp, Homo sapiens
cactgaaccttaaat

SEQ ID NO: 656402 - DNA, 15 bp, Homo sapiens
actgaaccttaaata

SEQ ID NO: 656403 - DNA, 15 bp, Homo sapiens
ctgaaccttaaatac

SEQ ID NO: 656404 - DNA, 15 bp, Homo sapiens
tgaaccttaaatacc

SEQ ID NO: 656405 - DNA, 15 bp, Homo sapiens
gaaccttaaatacca

SEQ ID NO: 656406 - DNA, 15 bp, Homo sapiens
aaccttaaataccaa

SEQ ID NO: 656407 - DNA, 15 bp, Homo sapiens
accttaaataccaag

SEQ ID NO: 656408 - DNA, 15 bp, Homo sapiens
ccttaaataccaaga

SEQ ID NO: 656409 - DNA, 15 bp, Homo sapiens
cttaaataccaagaa

SEQ ID NO: 656410 - DNA, 15 bp, Homo sapiens
ttaaataccaagaaa

SEQ ID NO: 656411 - DNA, 15 bp, Homo sapiens
taaataccaagaaaa

SEQ ID NO: 656412 - DNA, 15 bp, Homo sapiens
aaataccaagaaaaa

SEQ ID NO: 656413 - DNA, 15 bp, Homo sapiens
aataccaagaaaaac

SEQ ID NO: 656414 - DNA, 15 bp, Homo sapiens
ataccaagaaaaacc

SEQ ID NO: 656415 - DNA, 15 bp, Homo sapiens
taccaagaaaaaccc

SEQ ID NO: 656416 - DNA, 15 bp, Homo sapiens
accaagaaaaaccct

SEQ ID NO: 656417 - DNA, 15 bp, Homo sapiens
ccaagaaaaaccctt

SEQ ID NO: 656418 - DNA, 15 bp, Homo sapiens
caagaaaaacccttc

SEQ ID NO: 656419 - DNA, 15 bp, Homo sapiens
aagaaaaacccttca

SEQ ID NO: 656420 - DNA, 15 bp, Homo sapiens
agaaaaacccttcac

SEQ ID NO: 656421 - DNA, 15 bp, Homo sapiens
gaaaaacccttcact

SEQ ID NO: 656422 - DNA, 15 bp, Homo sapiens
aaaaacccttcactt

SEQ ID NO: 656423 - DNA, 15 bp, Homo sapiens
aaaacccttcactta

SEQ ID NO: 656424 - DNA, 15 bp, Homo sapiens
aaacccttcacttac

SEQ ID NO: 656425 - DNA, 15 bp, Homo sapiens
aacccttcacttact

SEQ ID NO: 656426 - DNA, 15 bp, Homo sapiens
acccttcacttactt

SEQ ID NO: 656427 - DNA, 15 bp, Homo sapiens
cccttcacttacttt

SEQ ID NO: 656428 - DNA, 15 bp, Homo sapiens
ccttcacttacttta

SEQ ID NO: 656429 - DNA, 15 bp, Homo sapiens
cttcacttactttac

SEQ ID NO: 656430 - DNA, 15 bp, Homo sapiens
ttcacttactttaca

SEQ ID NO: 656431 - DNA, 15 bp, Homo sapiens
tcacttactttacat

SEQ ID NO: 656432 - DNA, 15 bp, Homo sapiens
cacttactttacatc

SEQ ID NO: 656433 - DNA, 15 bp, Homo sapiens
acttactttacatct

SEQ ID NO: 656434 - DNA, 15 bp, Homo sapiens
cttactttacatctg

SEQ ID NO: 656435 - DNA, 15 bp, Homo sapiens
ttactttacatctgg

SEQ ID NO: 656436 - DNA, 15 bp, Homo sapiens
tactttacatctggc

SEQ ID NO: 656437 - DNA, 15 bp, Homo sapiens
actttacatctggca

SEQ ID NO: 656438 - DNA, 15 bp, Homo sapiens
ctttacatctggcat

SEQ ID NO: 656439 - DNA, 15 bp, Homo sapiens
tttacatctggcata

SEQ ID NO: 656440 - DNA, 15 bp, Homo sapiens
ttacatctggcatat

SEQ ID NO: 656441 - DNA, 15 bp, Homo sapiens
tacatctggcatatt

SEQ ID NO: 656442 - DNA, 15 bp, Homo sapiens
acatctggcatattg

SEQ ID NO: 656443 - DNA, 15 bp, Homo sapiens
catctggcatattgc

SEQ ID NO: 656444 - DNA, 15 bp, Homo sapiens
atctggcatattgct

SEQ ID NO: 656445 - DNA, 15 bp, Homo sapiens
tctggcatattgctt

SEQ ID NO: 656446 - DNA, 15 bp, Homo sapiens
ctggcatattgcttt

SEQ ID NO: 656447 - DNA, 15 bp, Homo sapiens
tggcatattgctttc

SEQ ID NO: 656448 - DNA, 15 bp, Homo sapiens
ggcatattgctttct

SEQ ID NO: 656449 - DNA, 15 bp, Homo sapiens
gcatattgctttctg

SEQ ID NO: 656450 - DNA, 15 bp, Homo sapiens
catattgctttctgc

SEQ ID NO: 656451 - DNA, 15 bp, Homo sapiens
atattgctttctgca

SEQ ID NO: 656452 - DNA, 15 bp, Homo sapiens
tattgctttctgcaa

SEQ ID NO: 656453 - DNA, 15 bp, Homo sapiens
attgctttctgcaac

SEQ ID NO: 656454 - DNA, 15 bp, Homo sapiens
ttgctttctgcaact

SEQ ID NO: 656455 - DNA, 15 bp, Homo sapiens
tgctttctgcaactg

SEQ ID NO: 656456 - DNA, 15 bp, Homo sapiens
gctttctgcaactgg

SEQ ID NO: 656457 - DNA, 15 bp, Homo sapiens
ctttctgcaactggc

SEQ ID NO: 656458 - DNA, 15 bp, Homo sapiens
tttctgcaactggcc

SEQ ID NO: 656459 - DNA, 15 bp, Homo sapiens
ttctgcaactggcca

SEQ ID NO: 656460 - DNA, 15 bp, Homo sapiens
tctgcaactggccag

SEQ ID NO: 656461 - DNA, 15 bp, Homo sapiens
ctgcaactggccaga

SEQ ID NO: 656462 - DNA, 15 bp, Homo sapiens
tgcaactggccagaa

SEQ ID NO: 656463 - DNA, 15 bp, Homo sapiens
gcaactggccagaac

SEQ ID NO: 656464 - DNA, 15 bp, Homo sapiens
caactggccagaacc

SEQ ID NO: 656465 - DNA, 15 bp, Homo sapiens
aactggccagaacct

SEQ ID NO: 656466 - DNA, 15 bp, Homo sapiens
actggccagaacctt

SEQ ID NO: 656467 - DNA, 15 bp, Homo sapiens
ctggccagaaccttt

SEQ ID NO: 656468 - DNA, 15 bp, Homo sapiens
tggccagaacctttg

SEQ ID NO: 656469 - DNA, 15 bp, Homo sapiens
ggccagaacctttgc

SEQ ID NO: 656470 - DNA, 15 bp, Homo sapiens
gccagaacctttgca

SEQ ID NO: 656471 - DNA, 15 bp, Homo sapiens
ccagaacctttgcat

SEQ ID NO: 656472 - DNA, 15 bp, Homo sapiens
cagaacctttgcatg

SEQ ID NO: 656473 - DNA, 15 bp, Homo sapiens
agaacctttgcatgt

SEQ ID NO: 656474 - DNA, 15 bp, Homo sapiens
gaacctttgcatgtg

SEQ ID NO: 656475 - DNA, 15 bp, Homo sapiens
aacctttgcatgtgg

SEQ ID NO: 656476 - DNA, 15 bp, Homo sapiens
acctttgcatgtggc

SEQ ID NO: 656477 - DNA, 15 bp, Homo sapiens
cctttgcatgtggcc

SEQ ID NO: 656478 - DNA, 15 bp, Homo sapiens
ctttgcatgtggccc

SEQ ID NO: 656479 - DNA, 15 bp, Homo sapiens
tttgcatgtggccct

SEQ ID NO: 656480 - DNA, 15 bp, Homo sapiens
ttgcatgtggccctc

SEQ ID NO: 656481 - DNA, 15 bp, Homo sapiens
tgcatgtggccctct

SEQ ID NO: 656482 - DNA, 15 bp, Homo sapiens
gcatgtggccctctg

SEQ ID NO: 656483 - DNA, 15 bp, Homo sapiens
catgtggccctctgc

SEQ ID NO: 656484 - DNA, 15 bp, Homo sapiens
atgtggccctctgca

SEQ ID NO: 656485 - DNA, 15 bp, Homo sapiens
tgtggccctctgcat

SEQ ID NO: 656486 - DNA, 15 bp, Homo sapiens
gtggccctctgcatt

SEQ ID NO: 656487 - DNA, 15 bp, Homo sapiens
tggccctctgcattt

SEQ ID NO: 656488 - DNA, 15 bp, Homo sapiens
ggccctctgcatttg

SEQ ID NO: 656489 - DNA, 15 bp, Homo sapiens
gccctctgcatttgt

SEQ ID NO: 656490 - DNA, 15 bp, Homo sapiens
ccctctgcatttgtc

SEQ ID NO: 656491 - DNA, 15 bp, Homo sapiens
cctctgcatttgtcc

SEQ ID NO: 656492 - DNA, 15 bp, Homo sapiens
ctctgcatttgtcct

SEQ ID NO: 656493 - DNA, 15 bp, Homo sapiens
tctgcatttgtccta

SEQ ID NO: 656494 - DNA, 15 bp, Homo sapiens
ctgcatttgtcctaa

SEQ ID NO: 656495 - DNA, 15 bp, Homo sapiens
tgcatttgtcctaag

SEQ ID NO: 656496 - DNA, 15 bp, Homo sapiens
gcatttgtcctaagg

SEQ ID NO: 656497 - DNA, 15 bp, Homo sapiens
catttgtcctaaggt

SEQ ID NO: 656498 - DNA, 15 bp, Homo sapiens
atttgtcctaaggta

SEQ ID NO: 656499 - DNA, 15 bp, Homo sapiens
tttgtcctaaggtaa

SEQ ID NO: 656500 - DNA, 15 bp, Homo sapiens
ttgtcctaaggtaat

SEQ ID NO: 656501 - DNA, 15 bp, Homo sapiens
tgtcctaaggtaatt

SEQ ID NO: 656502 - DNA, 15 bp, Homo sapiens
gtcctaaggtaatta

SEQ ID NO: 656503 - DNA, 15 bp, Homo sapiens
tcctaaggtaattaa

SEQ ID NO: 656504 - DNA, 15 bp, Homo sapiens
cctaaggtaattaat

SEQ ID NO: 656505 - DNA, 15 bp, Homo sapiens
ctaaggtaattaatg

SEQ ID NO: 656506 - DNA, 15 bp, Homo sapiens
taaggtaattaatgg

SEQ ID NO: 656507 - DNA, 15 bp, Homo sapiens
aaggtaattaatggc

SEQ ID NO: 656508 - DNA, 15 bp, Homo sapiens
aggtaattaatggct

SEQ ID NO: 656509 - DNA, 15 bp, Homo sapiens
ggtaattaatggctt

SEQ ID NO: 656510 - DNA, 15 bp, Homo sapiens
gtaattaatggcttt

SEQ ID NO: 656511 - DNA, 15 bp, Homo sapiens
taattaatggctttg

SEQ ID NO: 656512 - DNA, 15 bp, Homo sapiens
aattaatggctttgc

SEQ ID NO: 656513 - DNA, 15 bp, Homo sapiens
attaatggctttgca

SEQ ID NO: 656514 - DNA, 15 bp, Homo sapiens
ttaatggctttgcaa

SEQ ID NO: 656515 - DNA, 15 bp, Homo sapiens
taatggctttgcaat

SEQ ID NO: 656516 - DNA, 15 bp, Homo sapiens
aatggctttgcaata

SEQ ID NO: 656517 - DNA, 15 bp, Homo sapiens
atggctttgcaatat

SEQ ID NO: 656518 - DNA, 15 bp, Homo sapiens
tggctttgcaatatt

SEQ ID NO: 656519 - DNA, 15 bp, Homo sapiens
ggctttgcaatattt

SEQ ID NO: 656520 - DNA, 15 bp, Homo sapiens
gctttgcaatatttg

SEQ ID NO: 656521 - DNA, 15 bp, Homo sapiens
ctttgcaatatttga

SEQ ID NO: 656522 - DNA, 15 bp, Homo sapiens
tttgcaatatttgat

SEQ ID NO: 656523 - DNA, 15 bp, Homo sapiens
ttgcaatatttgatc

SEQ ID NO: 656524 - DNA, 15 bp, Homo sapiens
tgcaatatttgatca

SEQ ID NO: 656525 - DNA, 15 bp, Homo sapiens
gcaatatttgatcat

SEQ ID NO: 656526 - DNA, 15 bp, Homo sapiens
caatatttgatcatc

SEQ ID NO: 656527 - DNA, 15 bp, Homo sapiens
aatatttgatcatca

SEQ ID NO: 656528 - DNA, 15 bp, Homo sapiens
atatttgatcatcag

SEQ ID NO: 656529 - DNA, 15 bp, Homo sapiens
tatttgatcatcagc

SEQ ID NO: 656530 - DNA, 15 bp, Homo sapiens
atttgatcatcagca

SEQ ID NO: 656531 - DNA, 15 bp, Homo sapiens
tttgatcatcagcag

SEQ ID NO: 656532 - DNA, 15 bp, Homo sapiens
ttgatcatcagcagc

SEQ ID NO: 656533 - DNA, 15 bp, Homo sapiens
tgatcatcagcagca

SEQ ID NO: 656534 - DNA, 15 bp, Homo sapiens
gatcatcagcagcac

SEQ ID NO: 656535 - DNA, 15 bp, Homo sapiens
atcatcagcagcaca

SEQ ID NO: 656536 - DNA, 15 bp, Homo sapiens
tcatcagcagcacag

SEQ ID NO: 656537 - DNA, 15 bp, Homo sapiens
catcagcagcacaga

SEQ ID NO: 656538 - DNA, 15 bp, Homo sapiens
atcagcagcacagac

SEQ ID NO: 656539 - DNA, 15 bp, Homo sapiens
tcagcagcacagaca

SEQ ID NO: 656540 - DNA, 15 bp, Homo sapiens
cagcagcacagacac

SEQ ID NO: 656541 - DNA, 15 bp, Homo sapiens
agcagcacagacaca

SEQ ID NO: 656542 - DNA, 15 bp, Homo sapiens
gcagcacagacacaa

SEQ ID NO: 656543 - DNA, 15 bp, Homo sapiens
cagcacagacacaaa

SEQ ID NO: 656544 - DNA, 15 bp, Homo sapiens
agcacagacacaaag

SEQ ID NO: 656545 - DNA, 15 bp, Homo sapiens
gcacagacacaaaga

SEQ ID NO: 656546 - DNA, 15 bp, Homo sapiens
cacagacacaaagag

SEQ ID NO: 656547 - DNA, 15 bp, Homo sapiens
acagacacaaagaga

SEQ ID NO: 656548 - DNA, 15 bp, Homo sapiens
cagacacaaagagaa

SEQ ID NO: 656549 - DNA, 15 bp, Homo sapiens
agacacaaagagaaa

SEQ ID NO: 656550 - DNA, 15 bp, Homo sapiens
gacacaaagagaaat

SEQ ID NO: 656551 - DNA, 15 bp, Homo sapiens
acacaaagagaaatt

SEQ ID NO: 656552 - DNA, 15 bp, Homo sapiens
cacaaagagaaattg

SEQ ID NO: 656553 - DNA, 15 bp, Homo sapiens
acaaagagaaattgt

SEQ ID NO: 656554 - DNA, 15 bp, Homo sapiens
caaagagaaattgtg

SEQ ID NO: 656555 - DNA, 15 bp, Homo sapiens
aaagagaaattgtgc

SEQ ID NO: 656556 - DNA, 15 bp, Homo sapiens
aagagaaattgtgca

SEQ ID NO: 656557 - DNA, 15 bp, Homo sapiens
agagaaattgtgcaa

SEQ ID NO: 656558 - DNA, 15 bp, Homo sapiens
gagaaattgtgcaac

SEQ ID NO: 656559 - DNA, 15 bp, Homo sapiens
agaaattgtgcaacc

SEQ ID NO: 656560 - DNA, 15 bp, Homo sapiens
gaaattgtgcaacca

SEQ ID NO: 656561 - DNA, 15 bp, Homo sapiens
aaattgtgcaaccag

SEQ ID NO: 656562 - DNA, 15 bp, Homo sapiens
aattgtgcaaccagc

SEQ ID NO: 656563 - DNA, 15 bp, Homo sapiens
attgtgcaaccagca

SEQ ID NO: 656564 - DNA, 15 bp, Homo sapiens
ttgtgcaaccagcag

SEQ ID NO: 656565 - DNA, 15 bp, Homo sapiens
tgtgcaaccagcaga

SEQ ID NO: 656566 - DNA, 15 bp, Homo sapiens
gtgcaaccagcagag

SEQ ID NO: 656567 - DNA, 15 bp, Homo sapiens
tgcaaccagcagaga

SEQ ID NO: 656568 - DNA, 15 bp, Homo sapiens
gcaaccagcagagac

SEQ ID NO: 656569 - DNA, 15 bp, Homo sapiens
caaccagcagagacc

SEQ ID NO: 656570 - DNA, 15 bp, Homo sapiens
aaccagcagagacca

SEQ ID NO: 656571 - DNA, 15 bp, Homo sapiens
accagcagagaccaa

SEQ ID NO: 656572 - DNA, 15 bp, Homo sapiens
ccagcagagaccaaa

SEQ ID NO: 656573 - DNA, 15 bp, Homo sapiens
cagcagagaccaaac

SEQ ID NO: 656574 - DNA, 15 bp, Homo sapiens
agcagagaccaaaca

SEQ ID NO: 656575 - DNA, 15 bp, Homo sapiens
gcagagaccaaacag

SEQ ID NO: 656576 - DNA, 15 bp, Homo sapiens
cagagaccaaacagc

SEQ ID NO: 656577 - DNA, 15 bp, Homo sapiens
agagaccaaacagcc

SEQ ID NO: 656578 - DNA, 15 bp, Homo sapiens
gagaccaaacagcct

SEQ ID NO: 656579 - DNA, 15 bp, Homo sapiens
agaccaaacagcctc

SEQ ID NO: 656580 - DNA, 15 bp, Homo sapiens
gaccaaacagcctct

SEQ ID NO: 656581 - DNA, 15 bp, Homo sapiens
accaaacagcctctt

SEQ ID NO: 656582 - DNA, 15 bp, Homo sapiens
ccaaacagcctcttt

SEQ ID NO: 656583 - DNA, 15 bp, Homo sapiens
caaacagcctctttt

SEQ ID NO: 656584 - DNA, 15 bp, Homo sapiens
aaacagcctctttta

SEQ ID NO: 656585 - DNA, 15 bp, Homo sapiens
aacagcctcttttaa

SEQ ID NO: 656586 - DNA, 15 bp, Homo sapiens
acagcctcttttaaa

SEQ ID NO: 656587 - DNA, 15 bp, Homo sapiens
cagcctcttttaaat

SEQ ID NO: 656588 - DNA, 15 bp, Homo sapiens
agcctcttttaaatt

SEQ ID NO: 656589 - DNA, 15 bp, Homo sapiens
gcctcttttaaatta

SEQ ID NO: 656590 - DNA, 15 bp, Homo sapiens
cctcttttaaattaa

SEQ ID NO: 656591 - DNA, 15 bp, Homo sapiens
ctcttttaaattaaa

SEQ ID NO: 656592 - DNA, 15 bp, Homo sapiens
tcttttaaattaaaa

SEQ ID NO: 656593 - DNA, 15 bp, Homo sapiens
cttttaaattaaaat

SEQ ID NO: 656594 - DNA, 15 bp, Homo sapiens
ttttaaattaaaatc

SEQ ID NO: 656595 - DNA, 15 bp, Homo sapiens
tttaaattaaaatct

SEQ ID NO: 656596 - DNA, 15 bp, Homo sapiens
ttaaattaaaatctt

SEQ ID NO: 656597 - DNA, 15 bp, Homo sapiens
taaattaaaatcttt

SEQ ID NO: 656598 - DNA, 15 bp, Homo sapiens
aaattaaaatctttt

SEQ ID NO: 656599 - DNA, 15 bp, Homo sapiens
aattaaaatcttttg

SEQ ID NO: 656600 - DNA, 15 bp, Homo sapiens
attaaaatcttttgc

SEQ ID NO: 656601 - DNA, 15 bp, Homo sapiens
ttaaaatcttttgca

SEQ ID NO: 656602 - DNA, 15 bp, Homo sapiens
taaaatcttttgcat

SEQ ID NO: 656603 - DNA, 15 bp, Homo sapiens
aaaatcttttgcatt

SEQ ID NO: 656604 - DNA, 15 bp, Homo sapiens
aaatcttttgcatta

SEQ ID NO: 656605 - DNA, 15 bp, Homo sapiens
aatcttttgcattaa

SEQ ID NO: 656606 - DNA, 15 bp, Homo sapiens
atcttttgcattaaa

SEQ ID NO: 656607 - DNA, 15 bp, Homo sapiens
tcttttgcattaaat

SEQ ID NO: 656608 - DNA, 15 bp, Homo sapiens
cttttgcattaaatg

SEQ ID NO: 656609 - DNA, 15 bp, Homo sapiens
ttttgcattaaatgc

SEQ ID NO: 656610 - DNA, 15 bp, Homo sapiens
tttgcattaaatgct

SEQ ID NO: 656611 - DNA, 15 bp, Homo sapiens
ttgcattaaatgctc

SEQ ID NO: 656612 - DNA, 15 bp, Homo sapiens
tgcattaaatgctca

SEQ ID NO: 656613 - DNA, 15 bp, Homo sapiens
gcattaaatgctcag

SEQ ID NO: 656614 - DNA, 15 bp, Homo sapiens
cattaaatgctcagg

SEQ ID NO: 656615 - DNA, 15 bp, Homo sapiens
attaaatgctcaggc

SEQ ID NO: 656616 - DNA, 15 bp, Homo sapiens
ttaaatgctcaggca

SEQ ID NO: 656617 - DNA, 15 bp, Homo sapiens
taaatgctcaggcat

SEQ ID NO: 656618 - DNA, 15 bp, Homo sapiens
aaatgctcaggcatt

SEQ ID NO: 656619 - DNA, 15 bp, Homo sapiens
aatgctcaggcattc

SEQ ID NO: 656620 - DNA, 15 bp, Homo sapiens
atgctcaggcattct

SEQ ID NO: 656621 - DNA, 15 bp, Homo sapiens
tgctcaggcattctg

SEQ ID NO: 656622 - DNA, 15 bp, Homo sapiens
gctcaggcattctgc

SEQ ID NO: 656623 - DNA, 15 bp, Homo sapiens
ctcaggcattctgca

SEQ ID NO: 656624 - DNA, 15 bp, Homo sapiens
tcaggcattctgcag

SEQ ID NO: 656625 - DNA, 15 bp, Homo sapiens
caggcattctgcagg

SEQ ID NO: 656626 - DNA, 15 bp, Homo sapiens
aggcattctgcagga

SEQ ID NO: 656627 - DNA, 15 bp, Homo sapiens
ggcattctgcaggaa

SEQ ID NO: 656628 - DNA, 15 bp, Homo sapiens
gcattctgcaggaat

SEQ ID NO: 656629 - DNA, 15 bp, Homo sapiens
cattctgcaggaata

SEQ ID NO: 656630 - DNA, 15 bp, Homo sapiens
attctgcaggaataa

SEQ ID NO: 656631 - DNA, 15 bp, Homo sapiens
ttctgcaggaataaa

SEQ ID NO: 656632 - DNA, 15 bp, Homo sapiens
tctgcaggaataaag

SEQ ID NO: 656633 - DNA, 15 bp, Homo sapiens
ctgcaggaataaaga

SEQ ID NO: 656634 - DNA, 15 bp, Homo sapiens
tgcaggaataaagat

SEQ ID NO: 656635 - DNA, 15 bp, Homo sapiens
gcaggaataaagatt

SEQ ID NO: 656636 - DNA, 15 bp, Homo sapiens
caggaataaagattt

SEQ ID NO: 656637 - DNA, 15 bp, Homo sapiens
aggaataaagatttc

SEQ ID NO: 656638 - DNA, 15 bp, Homo sapiens
ggaataaagatttcc

SEQ ID NO: 656639 - DNA, 15 bp, Homo sapiens
gaataaagatttcca

SEQ ID NO: 656640 - DNA, 15 bp, Homo sapiens
aataaagatttccat

SEQ ID NO: 656641 - DNA, 15 bp, Homo sapiens
ataaagatttccatg

SEQ ID NO: 656642 - DNA, 15 bp, Homo sapiens
taaagatttccatgc

SEQ ID NO: 656643 - DNA, 15 bp, Homo sapiens
aaagatttccatgcc

SEQ ID NO: 656644 - DNA, 15 bp, Homo sapiens
aagatttccatgcca

SEQ ID NO: 656645 - DNA, 15 bp, Homo sapiens
agatttccatgccaa

SEQ ID NO: 656646 - DNA, 15 bp, Homo sapiens
gatttccatgccaaa

SEQ ID NO: 656647 - DNA, 15 bp, Homo sapiens
atttccatgccaaaa

SEQ ID NO: 656648 - DNA, 15 bp, Homo sapiens
tttccatgccaaaaa

SEQ ID NO: 656649 - DNA, 15 bp, Homo sapiens
ttccatgccaaaaaa

SEQ ID NO: 656650 - DNA, 15 bp, Homo sapiens
tccatgccaaaaaaa

SEQ ID NO: 656651 - DNA, 15 bp, Homo sapiens
ccatgccaaaaaaaa

SEQ ID NO: 656652 - DNA, 15 bp, Homo sapiens
catgccaaaaaaaag

SEQ ID NO: 656653 - DNA, 15 bp, Homo sapiens
atgccaaaaaaaaga

SEQ ID NO: 656654 - DNA, 15 bp, Homo sapiens
tgccaaaaaaaagag

SEQ ID NO: 656655 - DNA, 15 bp, Homo sapiens
gccaaaaaaaagagg

SEQ ID NO: 656656 - DNA, 15 bp, Homo sapiens
ccaaaaaaaagaggg

SEQ ID NO: 656657 - DNA, 15 bp, Homo sapiens
caaaaaaaagagggg

SEQ ID NO: 656658 - DNA, 15 bp, Homo sapiens
aaaaaaaagaggggt

SEQ ID NO: 656659 - DNA, 15 bp, Homo sapiens
aaaaaaagaggggtc

SEQ ID NO: 656660 - DNA, 15 bp, Homo sapiens
aaaaaagaggggtca

SEQ ID NO: 656661 - DNA, 15 bp, Homo sapiens
aaaaagaggggtcaa

SEQ ID NO: 656662 - DNA, 15 bp, Homo sapiens
aaaagaggggtcaaa

SEQ ID NO: 656663 - DNA, 15 bp, Homo sapiens
aaagaggggtcaaaa

SEQ ID NO: 656664 - DNA, 15 bp, Homo sapiens
aagaggggtcaaaaa

SEQ ID NO: 656665 - DNA, 15 bp, Homo sapiens
agaggggtcaaaaag

SEQ ID NO: 656666 - DNA, 15 bp, Homo sapiens
gaggggtcaaaaaga

SEQ ID NO: 656667 - DNA, 15 bp, Homo sapiens
aggggtcaaaaagag

SEQ ID NO: 656668 - DNA, 15 bp, Homo sapiens
ggggtcaaaaagagg

SEQ ID NO: 656669 - DNA, 15 bp, Homo sapiens
gggtcaaaaagaggg

SEQ ID NO: 656670 - DNA, 15 bp, Homo sapiens
ggtcaaaaagagggg

SEQ ID NO: 656671 - DNA, 15 bp, Homo sapiens
gtcaaaaagagggga

SEQ ID NO: 656672 - DNA, 15 bp, Homo sapiens
tcaaaaagaggggag

SEQ ID NO: 656673 - DNA, 15 bp, Homo sapiens
caaaaagaggggagg

SEQ ID NO: 656674 - DNA, 15 bp, Homo sapiens
aaaaagaggggagga

SEQ ID NO: 656675 - DNA, 15 bp, Homo sapiens
aaaagaggggaggaa

SEQ ID NO: 656676 - DNA, 15 bp, Homo sapiens
aaagaggggaggaaa

SEQ ID NO: 656677 - DNA, 15 bp, Homo sapiens
aagaggggaggaaat

SEQ ID NO: 656678 - DNA, 15 bp, Homo sapiens
agaggggaggaaata

SEQ ID NO: 656679 - DNA, 15 bp, Homo sapiens
gaggggaggaaatac

SEQ ID NO: 656680 - DNA, 15 bp, Homo sapiens
aggggaggaaatacc

SEQ ID NO: 656681 - DNA, 15 bp, Homo sapiens
ggggaggaaataccc

SEQ ID NO: 656682 - DNA, 15 bp, Homo sapiens
gggaggaaataccca

SEQ ID NO: 656683 - DNA, 15 bp, Homo sapiens
ggaggaaatacccaa

SEQ ID NO: 656684 - DNA, 15 bp, Homo sapiens
gaggaaatacccaag

SEQ ID NO: 656685 - DNA, 15 bp, Homo sapiens
aggaaatacccaaga

SEQ ID NO: 656686 - DNA, 15 bp, Homo sapiens
ggaaatacccaagaa

SEQ ID NO: 656687 - DNA, 15 bp, Homo sapiens
gaaatacccaagaac

SEQ ID NO: 656688 - DNA, 15 bp, Homo sapiens
aaatacccaagaacc

SEQ ID NO: 656689 - DNA, 15 bp, Homo sapiens
aatacccaagaacct

SEQ ID NO: 656690 - DNA, 15 bp, Homo sapiens
atacccaagaacctg

SEQ ID NO: 656691 - DNA, 15 bp, Homo sapiens
tacccaagaacctga

SEQ ID NO: 656692 - DNA, 15 bp, Homo sapiens
acccaagaacctgat

SEQ ID NO: 656693 - DNA, 15 bp, Homo sapiens
cccaagaacctgatt

SEQ ID NO: 656694 - DNA, 15 bp, Homo sapiens
ccaagaacctgatta

SEQ ID NO: 656695 - DNA, 15 bp, Homo sapiens
caagaacctgattat

SEQ ID NO: 656696 - DNA, 15 bp, Homo sapiens
aagaacctgattatt

SEQ ID NO: 656697 - DNA, 15 bp, Homo sapiens
agaacctgattattg

SEQ ID NO: 656698 - DNA, 15 bp, Homo sapiens
gaacctgattattga

SEQ ID NO: 656699 - DNA, 15 bp, Homo sapiens
aacctgattattgat

SEQ ID NO: 656700 - DNA, 15 bp, Homo sapiens
acctgattattgatt

SEQ ID NO: 656701 - DNA, 15 bp, Homo sapiens
cctgattattgatta

SEQ ID NO: 656702 - DNA, 15 bp, Homo sapiens
ctgattattgattaa

SEQ ID NO: 656703 - DNA, 15 bp, Homo sapiens
tgattattgattaag

SEQ ID NO: 656704 - DNA, 15 bp, Homo sapiens
gattattgattaagt

SEQ ID NO: 656705 - DNA, 15 bp, Homo sapiens
attattgattaagta

SEQ ID NO: 656706 - DNA, 15 bp, Homo sapiens
ttattgattaagtat

SEQ ID NO: 656707 - DNA, 15 bp, Homo sapiens
tattgattaagtata

SEQ ID NO: 656708 - DNA, 15 bp, Homo sapiens
attgattaagtatac

SEQ ID NO: 656709 - DNA, 15 bp, Homo sapiens
ttgattaagtataca

SEQ ID NO: 656710 - DNA, 15 bp, Homo sapiens
tgattaagtatacat

SEQ ID NO: 656711 - DNA, 15 bp, Homo sapiens
gattaagtatacatc

SEQ ID NO: 656712 - DNA, 15 bp, Homo sapiens
attaagtatacatct

SEQ ID NO: 656713 - DNA, 15 bp, Homo sapiens
ttaagtatacatctc

SEQ ID NO: 656714 - DNA, 15 bp, Homo sapiens
taagtatacatctct

SEQ ID NO: 656715 - DNA, 15 bp, Homo sapiens
aagtatacatctctg

SEQ ID NO: 656716 - DNA, 15 bp, Homo sapiens
agtatacatctctgt

SEQ ID NO: 656717 - DNA, 15 bp, Homo sapiens
gtatacatctctgta

SEQ ID NO: 656718 - DNA, 15 bp, Homo sapiens
tatacatctctgtaa

SEQ ID NO: 656719 - DNA, 15 bp, Homo sapiens
atacatctctgtaat

SEQ ID NO: 656720 - DNA, 15 bp, Homo sapiens
tacatctctgtaatc

SEQ ID NO: 656721 - DNA, 15 bp, Homo sapiens
acatctctgtaatct

SEQ ID NO: 656722 - DNA, 15 bp, Homo sapiens
catctctgtaatctc

SEQ ID NO: 656723 - DNA, 15 bp, Homo sapiens
atctctgtaatctct

SEQ ID NO: 656724 - DNA, 15 bp, Homo sapiens
tctctgtaatctctc

SEQ ID NO: 656725 - DNA, 15 bp, Homo sapiens
ctctgtaatctctcc

SEQ ID NO: 656726 - DNA, 15 bp, Homo sapiens
tctgtaatctctccc

SEQ ID NO: 656727 - DNA, 15 bp, Homo sapiens
ctgtaatctctccct

SEQ ID NO: 656728 - DNA, 15 bp, Homo sapiens
tgtaatctctccctc

SEQ ID NO: 656729 - DNA, 15 bp, Homo sapiens
gtaatctctccctct

SEQ ID NO: 656730 - DNA, 15 bp, Homo sapiens
taatctctccctctt

SEQ ID NO: 656731 - DNA, 15 bp, Homo sapiens
aatctctccctctta

SEQ ID NO: 656732 - DNA, 15 bp, Homo sapiens
atctctccctcttaa

SEQ ID NO: 656733 - DNA, 15 bp, Homo sapiens
tctctccctcttaaa

SEQ ID NO: 656734 - DNA, 15 bp, Homo sapiens
ctctccctcttaaaa

SEQ ID NO: 656735 - DNA, 15 bp, Homo sapiens
tctccctcttaaaac

SEQ ID NO: 656736 - DNA, 15 bp, Homo sapiens
ctccctcttaaaact

SEQ ID NO: 656737 - DNA, 15 bp, Homo sapiens
tccctcttaaaacta

SEQ ID NO: 656738 - DNA, 15 bp, Homo sapiens
ccctcttaaaactac

SEQ ID NO: 656739 - DNA, 15 bp, Homo sapiens
cctcttaaaactacc

SEQ ID NO: 656740 - DNA, 15 bp, Homo sapiens
ctcttaaaactaccc

SEQ ID NO: 656741 - DNA, 15 bp, Homo sapiens
tcttaaaactacccg

SEQ ID NO: 656742 - DNA, 15 bp, Homo sapiens
cttaaaactacccga

SEQ ID NO: 656743 - DNA, 15 bp, Homo sapiens
ttaaaactacccgat

SEQ ID NO: 656744 - DNA, 15 bp, Homo sapiens
taaaactacccgatt

SEQ ID NO: 656745 - DNA, 15 bp, Homo sapiens
aaaactacccgattg

SEQ ID NO: 656746 - DNA, 15 bp, Homo sapiens
aaactacccgattgt

SEQ ID NO: 656747 - DNA, 15 bp, Homo sapiens
aactacccgattgtt

SEQ ID NO: 656748 - DNA, 15 bp, Homo sapiens
actacccgattgttc

SEQ ID NO: 656749 - DNA, 15 bp, Homo sapiens
ctacccgattgttca

SEQ ID NO: 656750 - DNA, 15 bp, Homo sapiens
tacccgattgttcaa

SEQ ID NO: 656751 - DNA, 15 bp, Homo sapiens
acccgattgttcaaa

SEQ ID NO: 656752 - DNA, 15 bp, Homo sapiens
cccgattgttcaaag

SEQ ID NO: 656753 - DNA, 15 bp, Homo sapiens
ccgattgttcaaaga

SEQ ID NO: 656754 - DNA, 15 bp, Homo sapiens
cgattgttcaaagaa

SEQ ID NO: 656755 - DNA, 15 bp, Homo sapiens
gattgttcaaagaaa

SEQ ID NO: 656756 - DNA, 15 bp, Homo sapiens
attgttcaaagaaaa

SEQ ID NO: 656757 - DNA, 15 bp, Homo sapiens
ttgttcaaagaaaat

SEQ ID NO: 656758 - DNA, 15 bp, Homo sapiens
tgttcaaagaaaata

SEQ ID NO: 656759 - DNA, 15 bp, Homo sapiens
gttcaaagaaaataa

SEQ ID NO: 656760 - DNA, 15 bp, Homo sapiens
ttcaaagaaaataaa

SEQ ID NO: 656761 - DNA, 15 bp, Homo sapiens
tcaaagaaaataaaa

SEQ ID NO: 656762 - DNA, 15 bp, Homo sapiens
caaagaaaataaaat

SEQ ID NO: 656763 - DNA, 15 bp, Homo sapiens
aaagaaaataaaatt

SEQ ID NO: 656764 - DNA, 15 bp, Homo sapiens
aagaaaataaaattg

SEQ ID NO: 656765 - DNA, 15 bp, Homo sapiens
agaaaataaaattga

SEQ ID NO: 656766 - DNA, 15 bp, Homo sapiens
gaaaataaaattgaa

SEQ ID NO: 656767 - DNA, 15 bp, Homo sapiens
aaaataaaattgaag

SEQ ID NO: 656768 - DNA, 15 bp, Homo sapiens
aaataaaattgaaga

SEQ ID NO: 656769 - DNA, 15 bp, Homo sapiens
aataaaattgaagat

SEQ ID NO: 656770 - DNA, 15 bp, Homo sapiens
ataaaattgaagatt

SEQ ID NO: 656771 - DNA, 15 bp, Homo sapiens
taaaattgaagattg

SEQ ID NO: 656772 - DNA, 15 bp, Homo sapiens
aaaattgaagattgc

SEQ ID NO: 656773 - DNA, 15 bp, Homo sapiens
aaattgaagattgct

SEQ ID NO: 656774 - DNA, 15 bp, Homo sapiens
aattgaagattgcta

SEQ ID NO: 656775 - DNA, 15 bp, Homo sapiens
attgaagattgctac

SEQ ID NO: 656776 - DNA, 15 bp, Homo sapiens
ttgaagattgctaca

SEQ ID NO: 656777 - DNA, 15 bp, Homo sapiens
tgaagattgctacaa

SEQ ID NO: 656778 - DNA, 15 bp, Homo sapiens
gaagattgctacaaa

SEQ ID NO: 656779 - DNA, 15 bp, Homo sapiens
aagattgctacaaac

SEQ ID NO: 656780 - DNA, 15 bp, Homo sapiens
agattgctacaaact

SEQ ID NO: 656781 - DNA, 15 bp, Homo sapiens
gattgctacaaactt

SEQ ID NO: 656782 - DNA, 15 bp, Homo sapiens
attgctacaaactta

SEQ ID NO: 656783 - DNA, 15 bp, Homo sapiens
ttgctacaaacttag

SEQ ID NO: 656784 - DNA, 15 bp, Homo sapiens
tgctacaaacttaga

SEQ ID NO: 656785 - DNA, 15 bp, Homo sapiens
gctacaaacttagaa

SEQ ID NO: 656786 - DNA, 15 bp, Homo sapiens
ctacaaacttagaag

SEQ ID NO: 656787 - DNA, 15 bp, Homo sapiens
tacaaacttagaagt

SEQ ID NO: 656788 - DNA, 15 bp, Homo sapiens
acaaacttagaagtc

SEQ ID NO: 656789 - DNA, 15 bp, Homo sapiens
caaacttagaagtcc

SEQ ID NO: 656790 - DNA, 15 bp, Homo sapiens
aaacttagaagtcct

SEQ ID NO: 656791 - DNA, 15 bp, Homo sapiens
aacttagaagtcctt

SEQ ID NO: 656792 - DNA, 15 bp, Homo sapiens
acttagaagtccttg

SEQ ID NO: 656793 - DNA, 15 bp, Homo sapiens
cttagaagtccttga

SEQ ID NO: 656794 - DNA, 15 bp, Homo sapiens
ttagaagtccttgaa

SEQ ID NO: 656795 - DNA, 15 bp, Homo sapiens
tagaagtccttgaaa

SEQ ID NO: 656796 - DNA, 15 bp, Homo sapiens
agaagtccttgaaaa

SEQ ID NO: 656797 - DNA, 15 bp, Homo sapiens
gaagtccttgaaaaa

SEQ ID NO: 656798 - DNA, 15 bp, Homo sapiens
aagtccttgaaaaat

SEQ ID NO: 656799 - DNA, 15 bp, Homo sapiens
agtccttgaaaaata

SEQ ID NO: 656800 - DNA, 15 bp, Homo sapiens
gtccttgaaaaataa

SEQ ID NO: 656801 - DNA, 15 bp, Homo sapiens
tccttgaaaaataaa

SEQ ID NO: 656802 - DNA, 15 bp, Homo sapiens
ccttgaaaaataaac

SEQ ID NO: 656803 - DNA, 15 bp, Homo sapiens
cttgaaaaataaact

SEQ ID NO: 656804 - DNA, 15 bp, Homo sapiens
ttgaaaaataaactt

SEQ ID NO: 656805 - DNA, 15 bp, Homo sapiens
tgaaaaataaacttg

SEQ ID NO: 656806 - DNA, 15 bp, Homo sapiens
gaaaaataaacttgt

SEQ ID NO: 656807 - DNA, 15 bp, Homo sapiens
aaaaataaacttgtc

SEQ ID NO: 656808 - DNA, 15 bp, Homo sapiens
aaaataaacttgtca

SEQ ID NO: 656809 - DNA, 15 bp, Homo sapiens
aaataaacttgtcaa

SEQ ID NO: 656810 - DNA, 15 bp, Homo sapiens
aataaacttgtcaat

SEQ ID NO: 656811 - DNA, 15 bp, Homo sapiens
ataaacttgtcaata

SEQ ID NO: 656812 - DNA, 15 bp, Homo sapiens
taaacttgtcaatat

SEQ ID NO: 656813 - DNA, 15 bp, Homo sapiens
aaacttgtcaatatt

SEQ ID NO: 656814 - DNA, 15 bp, Homo sapiens
aacttgtcaatatta

SEQ ID NO: 656815 - DNA, 15 bp, Homo sapiens
acttgtcaatattat

SEQ ID NO: 656816 - DNA, 15 bp, Homo sapiens
cttgtcaatattatg

SEQ ID NO: 656817 - DNA, 15 bp, Homo sapiens
ttgtcaatattatgc

SEQ ID NO: 656818 - DNA, 15 bp, Homo sapiens
tgtcaatattatgca

SEQ ID NO: 656819 - DNA, 15 bp, Homo sapiens
gtcaatattatgcaa

SEQ ID NO: 656820 - DNA, 15 bp, Homo sapiens
tcaatattatgcaat

SEQ ID NO: 656821 - DNA, 15 bp, Homo sapiens
caatattatgcaatc

SEQ ID NO: 656822 - DNA, 15 bp, Homo sapiens
aatattatgcaatct

SEQ ID NO: 656823 - DNA, 15 bp, Homo sapiens
atattatgcaatcta

SEQ ID NO: 656824 - DNA, 15 bp, Homo sapiens
tattatgcaatctag

SEQ ID NO: 656825 - DNA, 15 bp, Homo sapiens
attatgcaatctagt

SEQ ID NO: 656826 - DNA, 15 bp, Homo sapiens
ttatgcaatctagtc

SEQ ID NO: 656827 - DNA, 15 bp, Homo sapiens
tatgcaatctagtca

SEQ ID NO: 656828 - DNA, 15 bp, Homo sapiens
atgcaatctagtcat

SEQ ID NO: 656829 - DNA, 15 bp, Homo sapiens
tgcaatctagtcatg

SEQ ID NO: 656830 - DNA, 15 bp, Homo sapiens
gcaatctagtcatgt

SEQ ID NO: 656831 - DNA, 15 bp, Homo sapiens
caatctagtcatgta

SEQ ID NO: 656832 - DNA, 15 bp, Homo sapiens
aatctagtcatgtat

SEQ ID NO: 656833 - DNA, 15 bp, Homo sapiens
atctagtcatgtatc

SEQ ID NO: 656834 - DNA, 15 bp, Homo sapiens
tctagtcatgtatca

SEQ ID NO: 656835 - DNA, 15 bp, Homo sapiens
ctagtcatgtatcaa

SEQ ID NO: 656836 - DNA, 15 bp, Homo sapiens
tagtcatgtatcaaa

SEQ ID NO: 656837 - DNA, 15 bp, Homo sapiens
agtcatgtatcaaaa

SEQ ID NO: 656838 - DNA, 15 bp, Homo sapiens
gtcatgtatcaaaac

SEQ ID NO: 656839 - DNA, 15 bp, Homo sapiens
tcatgtatcaaaact

SEQ ID NO: 656840 - DNA, 15 bp, Homo sapiens
catgtatcaaaactg

SEQ ID NO: 656841 - DNA, 15 bp, Homo sapiens
atgtatcaaaactgc

SEQ ID NO: 656842 - DNA, 15 bp, Homo sapiens
tgtatcaaaactgca

SEQ ID NO: 656843 - DNA, 15 bp, Homo sapiens
gtatcaaaactgcac

SEQ ID NO: 656844 - DNA, 15 bp, Homo sapiens
tatcaaaactgcact

SEQ ID NO: 656845 - DNA, 15 bp, Homo sapiens
atcaaaactgcactt

SEQ ID NO: 656846 - DNA, 15 bp, Homo sapiens
tcaaaactgcacttt

SEQ ID NO: 656847 - DNA, 15 bp, Homo sapiens
caaaactgcactttt

SEQ ID NO: 656848 - DNA, 15 bp, Homo sapiens
aaaactgcactttta

SEQ ID NO: 656849 - DNA, 15 bp, Homo sapiens
aaactgcacttttac

SEQ ID NO: 656850 - DNA, 15 bp, Homo sapiens
aactgcacttttacc

SEQ ID NO: 656851 - DNA, 15 bp, Homo sapiens
actgcacttttaccc

SEQ ID NO: 656852 - DNA, 15 bp, Homo sapiens
ctgcacttttacccc

SEQ ID NO: 656853 - DNA, 15 bp, Homo sapiens
tgcacttttacccca

SEQ ID NO: 656854 - DNA, 15 bp, Homo sapiens
gcacttttaccccat

SEQ ID NO: 656855 - DNA, 15 bp, Homo sapiens
cacttttaccccata

SEQ ID NO: 656856 - DNA, 15 bp, Homo sapiens
acttttaccccatac

SEQ ID NO: 656857 - DNA, 15 bp, Homo sapiens
cttttaccccataca

SEQ ID NO: 656858 - DNA, 15 bp, Homo sapiens
ttttaccccatacat

SEQ ID NO: 656859 - DNA, 15 bp, Homo sapiens
tttaccccatacatt

SEQ ID NO: 656860 - DNA, 15 bp, Homo sapiens
ttaccccatacattc

SEQ ID NO: 656861 - DNA, 15 bp, Homo sapiens
taccccatacattca

SEQ ID NO: 656862 - DNA, 15 bp, Homo sapiens
accccatacattcat

SEQ ID NO: 656863 - DNA, 15 bp, Homo sapiens
ccccatacattcatg

SEQ ID NO: 656864 - DNA, 15 bp, Homo sapiens
cccatacattcatgt

SEQ ID NO: 656865 - DNA, 15 bp, Homo sapiens
ccatacattcatgta

SEQ ID NO: 656866 - DNA, 15 bp, Homo sapiens
catacattcatgtac

SEQ ID NO: 656867 - DNA, 15 bp, Homo sapiens
atacattcatgtaca

SEQ ID NO: 656868 - DNA, 15 bp, Homo sapiens
tacattcatgtacat

SEQ ID NO: 656869 - DNA, 15 bp, Homo sapiens
acattcatgtacatg

SEQ ID NO: 656870 - DNA, 15 bp, Homo sapiens
cattcatgtacatga

SEQ ID NO: 656871 - DNA, 15 bp, Homo sapiens
attcatgtacatgaa

SEQ ID NO: 656872 - DNA, 15 bp, Homo sapiens
ttcatgtacatgaaa

SEQ ID NO: 656873 - DNA, 15 bp, Homo sapiens
tcatgtacatgaaaa

SEQ ID NO: 656874 - DNA, 15 bp, Homo sapiens
catgtacatgaaaat

SEQ ID NO: 656875 - DNA, 15 bp, Homo sapiens
atgtacatgaaaatg

SEQ ID NO: 656876 - DNA, 15 bp, Homo sapiens
tgtacatgaaaatga

SEQ ID NO: 656877 - DNA, 15 bp, Homo sapiens
gtacatgaaaatgat

SEQ ID NO: 656878 - DNA, 15 bp, Homo sapiens
tacatgaaaatgata

SEQ ID NO: 656879 - DNA, 15 bp, Homo sapiens
acatgaaaatgataa

SEQ ID NO: 656880 - DNA, 15 bp, Homo sapiens
catgaaaatgataat

SEQ ID NO: 656881 - DNA, 15 bp, Homo sapiens
atgaaaatgataata

SEQ ID NO: 656882 - DNA, 15 bp, Homo sapiens
tgaaaatgataataa

SEQ ID NO: 656883 - DNA, 15 bp, Homo sapiens
gaaaatgataataat

SEQ ID NO: 656884 - DNA, 15 bp, Homo sapiens
aaaatgataataata

SEQ ID NO: 656885 - DNA, 15 bp, Homo sapiens
aaatgataataataa

SEQ ID NO: 656886 - DNA, 15 bp, Homo sapiens
aatgataataataag

SEQ ID NO: 656887 - DNA, 15 bp, Homo sapiens
atgataataataaga

SEQ ID NO: 656888 - DNA, 15 bp, Homo sapiens
tgataataataagaa

SEQ ID NO: 656889 - DNA, 15 bp, Homo sapiens
gataataataagaat

SEQ ID NO: 656890 - DNA, 15 bp, Homo sapiens
ataataataagaatt

SEQ ID NO: 656891 - DNA, 15 bp, Homo sapiens
taataataagaatta

SEQ ID NO: 656892 - DNA, 15 bp, Homo sapiens
aataataagaattag

SEQ ID NO: 656893 - DNA, 15 bp, Homo sapiens
ataataagaattagc

SEQ ID NO: 656894 - DNA, 15 bp, Homo sapiens
taataagaattagcc

SEQ ID NO: 656895 - DNA, 15 bp, Homo sapiens
aataagaattagcca

SEQ ID NO: 656896 - DNA, 15 bp, Homo sapiens
ataagaattagccaa

SEQ ID NO: 656897 - DNA, 15 bp, Homo sapiens
taagaattagccaaa

SEQ ID NO: 656898 - DNA, 15 bp, Homo sapiens
aagaattagccaaat

SEQ ID NO: 656899 - DNA, 15 bp, Homo sapiens
agaattagccaaatg

SEQ ID NO: 656900 - DNA, 15 bp, Homo sapiens
gaattagccaaatgc

SEQ ID NO: 656901 - DNA, 15 bp, Homo sapiens
aattagccaaatgct

SEQ ID NO: 656902 - DNA, 15 bp, Homo sapiens
attagccaaatgctg

SEQ ID NO: 656903 - DNA, 15 bp, Homo sapiens
ttagccaaatgctga

SEQ ID NO: 656904 - DNA, 15 bp, Homo sapiens
tagccaaatgctgac

SEQ ID NO: 656905 - DNA, 15 bp, Homo sapiens
agccaaatgctgact

SEQ ID NO: 656906 - DNA, 15 bp, Homo sapiens
gccaaatgctgactg

SEQ ID NO: 656907 - DNA, 15 bp, Homo sapiens
ccaaatgctgactga

SEQ ID NO: 656908 - DNA, 15 bp, Homo sapiens
caaatgctgactgaa

SEQ ID NO: 656909 - DNA, 15 bp, Homo sapiens
aaatgctgactgaaa

SEQ ID NO: 656910 - DNA, 15 bp, Homo sapiens
aatgctgactgaaat

SEQ ID NO: 656911 - DNA, 15 bp, Homo sapiens
atgctgactgaaatc

SEQ ID NO: 656912 - DNA, 15 bp, Homo sapiens
tgctgactgaaatcc

SEQ ID NO: 656913 - DNA, 15 bp, Homo sapiens
gctgactgaaatcca

SEQ ID NO: 656914 - DNA, 15 bp, Homo sapiens
ctgactgaaatccag

SEQ ID NO: 656915 - DNA, 15 bp, Homo sapiens
tgactgaaatccaga

SEQ ID NO: 656916 - DNA, 15 bp, Homo sapiens
gactgaaatccagag

SEQ ID NO: 656917 - DNA, 15 bp, Homo sapiens
actgaaatccagaga

SEQ ID NO: 656918 - DNA, 15 bp, Homo sapiens
ctgaaatccagagag

SEQ ID NO: 656919 - DNA, 15 bp, Homo sapiens
tgaaatccagagaga

SEQ ID NO: 656920 - DNA, 15 bp, Homo sapiens
gaaatccagagagaa

SEQ ID NO: 656921 - DNA, 15 bp, Homo sapiens
aaatccagagagaag

SEQ ID NO: 656922 - DNA, 15 bp, Homo sapiens
aatccagagagaagt

SEQ ID NO: 656923 - DNA, 15 bp, Homo sapiens
atccagagagaagtg

SEQ ID NO: 656924 - DNA, 15 bp, Homo sapiens
tccagagagaagtga

SEQ ID NO: 656925 - DNA, 15 bp, Homo sapiens
ccagagagaagtgac

SEQ ID NO: 656926 - DNA, 15 bp, Homo sapiens
cagagagaagtgaca

SEQ ID NO: 656927 - DNA, 15 bp, Homo sapiens
agagagaagtgacat

SEQ ID NO: 656928 - DNA, 15 bp, Homo sapiens
gagagaagtgacatg

SEQ ID NO: 656929 - DNA, 15 bp, Homo sapiens
agagaagtgacatgt

SEQ ID NO: 656930 - DNA, 15 bp, Homo sapiens
gagaagtgacatgtg

SEQ ID NO: 656931 - DNA, 15 bp, Homo sapiens
agaagtgacatgtgc

SEQ ID NO: 656932 - DNA, 15 bp, Homo sapiens
gaagtgacatgtgca

SEQ ID NO: 656933 - DNA, 15 bp, Homo sapiens
aagtgacatgtgcaa

SEQ ID NO: 656934 - DNA, 15 bp, Homo sapiens
agtgacatgtgcaaa

SEQ ID NO: 656935 - DNA, 15 bp, Homo sapiens
gtgacatgtgcaaag

SEQ ID NO: 656936 - DNA, 15 bp, Homo sapiens
tgacatgtgcaaagt

SEQ ID NO: 656937 - DNA, 15 bp, Homo sapiens
gacatgtgcaaagtc

SEQ ID NO: 656938 - DNA, 15 bp, Homo sapiens
acatgtgcaaagtca

SEQ ID NO: 656939 - DNA, 15 bp, Homo sapiens
catgtgcaaagtcac

SEQ ID NO: 656940 - DNA, 15 bp, Homo sapiens
atgtgcaaagtcaca

SEQ ID NO: 656941 - DNA, 15 bp, Homo sapiens
tgtgcaaagtcacac

SEQ ID NO: 656942 - DNA, 15 bp, Homo sapiens
gtgcaaagtcacaca

SEQ ID NO: 656943 - DNA, 15 bp, Homo sapiens
tgcaaagtcacacag

SEQ ID NO: 656944 - DNA, 15 bp, Homo sapiens
gcaaagtcacacagc

SEQ ID NO: 656945 - DNA, 15 bp, Homo sapiens
caaagtcacacagct

SEQ ID NO: 656946 - DNA, 15 bp, Homo sapiens
aaagtcacacagcta

SEQ ID NO: 656947 - DNA, 15 bp, Homo sapiens
aagtcacacagctaa

SEQ ID NO: 656948 - DNA, 15 bp, Homo sapiens
agtcacacagctaat

SEQ ID NO: 656949 - DNA, 15 bp, Homo sapiens
gtcacacagctaatt

SEQ ID NO: 656950 - DNA, 15 bp, Homo sapiens
tcacacagctaatta

SEQ ID NO: 656951 - DNA, 15 bp, Homo sapiens
cacacagctaattag

SEQ ID NO: 656952 - DNA, 15 bp, Homo sapiens
acacagctaattagt

SEQ ID NO: 656953 - DNA, 15 bp, Homo sapiens
cacagctaattagtg

SEQ ID NO: 656954 - DNA, 15 bp, Homo sapiens
acagctaattagtga

SEQ ID NO: 656955 - DNA, 15 bp, Homo sapiens
cagctaattagtgac

SEQ ID NO: 656956 - DNA, 15 bp, Homo sapiens
agctaattagtgaca

SEQ ID NO: 656957 - DNA, 15 bp, Homo sapiens
gctaattagtgacaa

SEQ ID NO: 656958 - DNA, 15 bp, Homo sapiens
ctaattagtgacaaa

SEQ ID NO: 656959 - DNA, 15 bp, Homo sapiens
taattagtgacaaag

SEQ ID NO: 656960 - DNA, 15 bp, Homo sapiens
aattagtgacaaagg

SEQ ID NO: 656961 - DNA, 15 bp, Homo sapiens
attagtgacaaaggg

SEQ ID NO: 656962 - DNA, 15 bp, Homo sapiens
ttagtgacaaaggga

SEQ ID NO: 656963 - DNA, 15 bp, Homo sapiens
tagtgacaaagggag

SEQ ID NO: 656964 - DNA, 15 bp, Homo sapiens
agtgacaaagggaga

SEQ ID NO: 656965 - DNA, 15 bp, Homo sapiens
gtgacaaagggagaa

SEQ ID NO: 656966 - DNA, 15 bp, Homo sapiens
tgacaaagggagaag

SEQ ID NO: 656967 - DNA, 15 bp, Homo sapiens
gacaaagggagaaga

SEQ ID NO: 656968 - DNA, 15 bp, Homo sapiens
acaaagggagaagat

SEQ ID NO: 656969 - DNA, 15 bp, Homo sapiens
caaagggagaagata

SEQ ID NO: 656970 - DNA, 15 bp, Homo sapiens
aaagggagaagatac

SEQ ID NO: 656971 - DNA, 15 bp, Homo sapiens
aagggagaagatact

SEQ ID NO: 656972 - DNA, 15 bp, Homo sapiens
agggagaagatactg

SEQ ID NO: 656973 - DNA, 15 bp, Homo sapiens
gggagaagatactgt

SEQ ID NO: 656974 - DNA, 15 bp, Homo sapiens
ggagaagatactgtg

SEQ ID NO: 656975 - DNA, 15 bp, Homo sapiens
gagaagatactgtga

SEQ ID NO: 656976 - DNA, 15 bp, Homo sapiens
agaagatactgtgat

SEQ ID NO: 656977 - DNA, 15 bp, Homo sapiens
gaagatactgtgatt

SEQ ID NO: 656978 - DNA, 15 bp, Homo sapiens
aagatactgtgattc

SEQ ID NO: 656979 - DNA, 15 bp, Homo sapiens
agatactgtgattct

SEQ ID NO: 656980 - DNA, 15 bp, Homo sapiens
gatactgtgattctc

SEQ ID NO: 656981 - DNA, 15 bp, Homo sapiens
atactgtgattctct

SEQ ID NO: 656982 - DNA, 15 bp, Homo sapiens
tactgtgattctctt

SEQ ID NO: 656983 - DNA, 15 bp, Homo sapiens
actgtgattctcttt

SEQ ID NO: 656984 - DNA, 15 bp, Homo sapiens
ctgtgattctctttt

SEQ ID NO: 656985 - DNA, 15 bp, Homo sapiens
tgtgattctcttttc

SEQ ID NO: 656986 - DNA, 15 bp, Homo sapiens
gtgattctcttttct

SEQ ID NO: 656987 - DNA, 15 bp, Homo sapiens
tgattctcttttctc

SEQ ID NO: 656988 - DNA, 15 bp, Homo sapiens
gattctcttttctca

SEQ ID NO: 656989 - DNA, 15 bp, Homo sapiens
attctcttttctcat

SEQ ID NO: 656990 - DNA, 15 bp, Homo sapiens
ttctcttttctcatc

SEQ ID NO: 656991 - DNA, 15 bp, Homo sapiens
tctcttttctcatcc

SEQ ID NO: 656992 - DNA, 15 bp, Homo sapiens
ctcttttctcatccc

SEQ ID NO: 656993 - DNA, 15 bp, Homo sapiens
tcttttctcatccca

SEQ ID NO: 656994 - DNA, 15 bp, Homo sapiens
cttttctcatcccac

SEQ ID NO: 656995 - DNA, 15 bp, Homo sapiens
ttttctcatcccact

SEQ ID NO: 656996 - DNA, 15 bp, Homo sapiens
tttctcatcccactg

SEQ ID NO: 656997 - DNA, 15 bp, Homo sapiens
ttctcatcccactgc

SEQ ID NO: 656998 - DNA, 15 bp, Homo sapiens
tctcatcccactgca

SEQ ID NO: 656999 - DNA, 15 bp, Homo sapiens
ctcatcccactgcag

SEQ ID NO: 657000 - DNA, 15 bp, Homo sapiens
tcatcccactgcagt

SEQ ID NO: 657001 - DNA, 15 bp, Homo sapiens
catcccactgcagta

SEQ ID NO: 657002 - DNA, 15 bp, Homo sapiens
atcccactgcagtat

SEQ ID NO: 657003 - DNA, 15 bp, Homo sapiens
tcccactgcagtatt

SEQ ID NO: 657004 - DNA, 15 bp, Homo sapiens
cccactgcagtattc

SEQ ID NO: 657005 - DNA, 15 bp, Homo sapiens
ccactgcagtattcc

SEQ ID NO: 657006 - DNA, 15 bp, Homo sapiens
cactgcagtattcct

SEQ ID NO: 657007 - DNA, 15 bp, Homo sapiens
actgcagtattcctc

SEQ ID NO: 657008 - DNA, 15 bp, Homo sapiens
ctgcagtattcctcc

SEQ ID NO: 657009 - DNA, 15 bp, Homo sapiens
tgcagtattcctcca

SEQ ID NO: 657010 - DNA, 15 bp, Homo sapiens
gcagtattcctccat

SEQ ID NO: 657011 - DNA, 15 bp, Homo sapiens
cagtattcctccatt

SEQ ID NO: 657012 - DNA, 15 bp, Homo sapiens
agtattcctccattt

SEQ ID NO: 657013 - DNA, 15 bp, Homo sapiens
gtattcctccattta

SEQ ID NO: 657014 - DNA, 15 bp, Homo sapiens
tattcctccatttag

SEQ ID NO: 657015 - DNA, 15 bp, Homo sapiens
attcctccatttagc

SEQ ID NO: 657016 - DNA, 15 bp, Homo sapiens
ttcctccatttagca

SEQ ID NO: 657017 - DNA, 15 bp, Homo sapiens
tcctccatttagcaa

SEQ ID NO: 657018 - DNA, 15 bp, Homo sapiens
cctccatttagcaac

SEQ ID NO: 657019 - DNA, 15 bp, Homo sapiens
ctccatttagcaaca

SEQ ID NO: 657020 - DNA, 15 bp, Homo sapiens
tccatttagcaacaa

SEQ ID NO: 657021 - DNA, 15 bp, Homo sapiens
ccatttagcaacaat

SEQ ID NO: 657022 - DNA, 15 bp, Homo sapiens
catttagcaacaatt

SEQ ID NO: 657023 - DNA, 15 bp, Homo sapiens
atttagcaacaatta

SEQ ID NO: 657024 - DNA, 15 bp, Homo sapiens
tttagcaacaattag

SEQ ID NO: 657025 - DNA, 15 bp, Homo sapiens
ttagcaacaattagc

SEQ ID NO: 657026 - DNA, 15 bp, Homo sapiens
tagcaacaattagcc

SEQ ID NO: 657027 - DNA, 15 bp, Homo sapiens
agcaacaattagcca

SEQ ID NO: 657028 - DNA, 15 bp, Homo sapiens
gcaacaattagccat

SEQ ID NO: 657029 - DNA, 15 bp, Homo sapiens
caacaattagccatg

SEQ ID NO: 657030 - DNA, 15 bp, Homo sapiens
aacaattagccatgt

SEQ ID NO: 657031 - DNA, 15 bp, Homo sapiens
acaattagccatgtc

SEQ ID NO: 657032 - DNA, 15 bp, Homo sapiens
caattagccatgtct

SEQ ID NO: 657033 - DNA, 15 bp, Homo sapiens
aattagccatgtctg

SEQ ID NO: 657034 - DNA, 15 bp, Homo sapiens
attagccatgtctgt

SEQ ID NO: 657035 - DNA, 15 bp, Homo sapiens
ttagccatgtctgtg

SEQ ID NO: 657036 - DNA, 15 bp, Homo sapiens
tagccatgtctgtgt

SEQ ID NO: 657037 - DNA, 15 bp, Homo sapiens
agccatgtctgtgtc

SEQ ID NO: 657038 - DNA, 15 bp, Homo sapiens
gccatgtctgtgtca

SEQ ID NO: 657039 - DNA, 15 bp, Homo sapiens
ccatgtctgtgtcaa

SEQ ID NO: 657040 - DNA, 15 bp, Homo sapiens
catgtctgtgtcaaa

SEQ ID NO: 657041 - DNA, 15 bp, Homo sapiens
atgtctgtgtcaaag

SEQ ID NO: 657042 - DNA, 15 bp, Homo sapiens
tgtctgtgtcaaagt

SEQ ID NO: 657043 - DNA, 15 bp, Homo sapiens
gtctgtgtcaaagtt

SEQ ID NO: 657044 - DNA, 15 bp, Homo sapiens
tctgtgtcaaagtta

SEQ ID NO: 657045 - DNA, 15 bp, Homo sapiens
ctgtgtcaaagttac

SEQ ID NO: 657046 - DNA, 15 bp, Homo sapiens
tgtgtcaaagttacc

SEQ ID NO: 657047 - DNA, 15 bp, Homo sapiens
gtgtcaaagttacct

SEQ ID NO: 657048 - DNA, 15 bp, Homo sapiens
tgtcaaagttacctg

SEQ ID NO: 657049 - DNA, 15 bp, Homo sapiens
gtcaaagttacctgg

SEQ ID NO: 657050 - DNA, 15 bp, Homo sapiens
tcaaagttacctggt

SEQ ID NO: 657051 - DNA, 15 bp, Homo sapiens
caaagttacctggta

SEQ ID NO: 657052 - DNA, 15 bp, Homo sapiens
aaagttacctggtaa

SEQ ID NO: 657053 - DNA, 15 bp, Homo sapiens
aagttacctggtaaa

SEQ ID NO: 657054 - DNA, 15 bp, Homo sapiens
agttacctggtaaat

SEQ ID NO: 657055 - DNA, 15 bp, Homo sapiens
gttacctggtaaatt

SEQ ID NO: 657056 - DNA, 15 bp, Homo sapiens
ttacctggtaaatta

SEQ ID NO: 657057 - DNA, 15 bp, Homo sapiens
tacctggtaaattaa

SEQ ID NO: 657058 - DNA, 15 bp, Homo sapiens
acctggtaaattaaa

SEQ ID NO: 657059 - DNA, 15 bp, Homo sapiens
cctggtaaattaaaa

SEQ ID NO: 657060 - DNA, 15 bp, Homo sapiens
ctggtaaattaaaat

SEQ ID NO: 657061 - DNA, 15 bp, Homo sapiens
tggtaaattaaaatg

SEQ ID NO: 657062 - DNA, 15 bp, Homo sapiens
ggtaaattaaaatga

SEQ ID NO: 657063 - DNA, 15 bp, Homo sapiens
gtaaattaaaatgac

SEQ ID NO: 657064 - DNA, 15 bp, Homo sapiens
taaattaaaatgacc

SEQ ID NO: 657065 - DNA, 15 bp, Homo sapiens
aaattaaaatgacca

SEQ ID NO: 657066 - DNA, 15 bp, Homo sapiens
aattaaaatgaccaa

SEQ ID NO: 657067 - DNA, 15 bp, Homo sapiens
attaaaatgaccaag

SEQ ID NO: 657068 - DNA, 15 bp, Homo sapiens
ttaaaatgaccaaga

SEQ ID NO: 657069 - DNA, 15 bp, Homo sapiens
taaaatgaccaagag

SEQ ID NO: 657070 - DNA, 15 bp, Homo sapiens
aaaatgaccaagaga

SEQ ID NO: 657071 - DNA, 15 bp, Homo sapiens
aaatgaccaagagaa

SEQ ID NO: 657072 - DNA, 15 bp, Homo sapiens
aatgaccaagagaag

SEQ ID NO: 657073 - DNA, 15 bp, Homo sapiens
atgaccaagagaagc

SEQ ID NO: 657074 - DNA, 15 bp, Homo sapiens
tgaccaagagaagcc

SEQ ID NO: 657075 - DNA, 15 bp, Homo sapiens
gaccaagagaagcca

SEQ ID NO: 657076 - DNA, 15 bp, Homo sapiens
accaagagaagccac

SEQ ID NO: 657077 - DNA, 15 bp, Homo sapiens
ccaagagaagccacc

SEQ ID NO: 657078 - DNA, 15 bp, Homo sapiens
caagagaagccacca

SEQ ID NO: 657079 - DNA, 15 bp, Homo sapiens
aagagaagccaccaa

SEQ ID NO: 657080 - DNA, 15 bp, Homo sapiens
agagaagccaccaat

SEQ ID NO: 657081 - DNA, 15 bp, Homo sapiens
gagaagccaccaatc

SEQ ID NO: 657082 - DNA, 15 bp, Homo sapiens
agaagccaccaatca

SEQ ID NO: 657083 - DNA, 15 bp, Homo sapiens
gaagccaccaatcaa

SEQ ID NO: 657084 - DNA, 15 bp, Homo sapiens
aagccaccaatcaaa

SEQ ID NO: 657085 - DNA, 15 bp, Homo sapiens
agccaccaatcaaat

SEQ ID NO: 657086 - DNA, 15 bp, Homo sapiens
gccaccaatcaaatt

SEQ ID NO: 657087 - DNA, 15 bp, Homo sapiens
ccaccaatcaaattc

SEQ ID NO: 657088 - DNA, 15 bp, Homo sapiens
caccaatcaaattca

SEQ ID NO: 657089 - DNA, 15 bp, Homo sapiens
accaatcaaattcat

SEQ ID NO: 657090 - DNA, 15 bp, Homo sapiens
ccaatcaaattcatc

SEQ ID NO: 657091 - DNA, 15 bp, Homo sapiens
caatcaaattcatcc

SEQ ID NO: 657092 - DNA, 15 bp, Homo sapiens
aatcaaattcatcca

SEQ ID NO: 657093 - DNA, 15 bp, Homo sapiens
atcaaattcatccaa

SEQ ID NO: 657094 - DNA, 15 bp, Homo sapiens
tcaaattcatccaaa

SEQ ID NO: 657095 - DNA, 15 bp, Homo sapiens
caaattcatccaaat

SEQ ID NO: 657096 - DNA, 15 bp, Homo sapiens
aaattcatccaaatg

SEQ ID NO: 657097 - DNA, 15 bp, Homo sapiens
aattcatccaaatga

SEQ ID NO: 657098 - DNA, 15 bp, Homo sapiens
attcatccaaatgag

SEQ ID NO: 657099 - DNA, 15 bp, Homo sapiens
ttcatccaaatgagc

SEQ ID NO: 657100 - DNA, 15 bp, Homo sapiens
tcatccaaatgagca

SEQ ID NO: 657101 - DNA, 15 bp, Homo sapiens
catccaaatgagcat

SEQ ID NO: 657102 - DNA, 15 bp, Homo sapiens
atccaaatgagcata

SEQ ID NO: 657103 - DNA, 15 bp, Homo sapiens
tccaaatgagcatag

SEQ ID NO: 657104 - DNA, 15 bp, Homo sapiens
ccaaatgagcataga

SEQ ID NO: 657105 - DNA, 15 bp, Homo sapiens
caaatgagcatagat

SEQ ID NO: 657106 - DNA, 15 bp, Homo sapiens
aaatgagcatagatc

SEQ ID NO: 657107 - DNA, 15 bp, Homo sapiens
aatgagcatagatct

SEQ ID NO: 657108 - DNA, 15 bp, Homo sapiens
atgagcatagatctt

SEQ ID NO: 657109 - DNA, 15 bp, Homo sapiens
tgagcatagatcttg

SEQ ID NO: 657110 - DNA, 15 bp, Homo sapiens
gagcatagatcttgt

SEQ ID NO: 657111 - DNA, 15 bp, Homo sapiens
agcatagatcttgtt

SEQ ID NO: 657112 - DNA, 15 bp, Homo sapiens
gcatagatcttgttg

SEQ ID NO: 657113 - DNA, 15 bp, Homo sapiens
catagatcttgttgg

SEQ ID NO: 657114 - DNA, 15 bp, Homo sapiens
atagatcttgttggt

SEQ ID NO: 657115 - DNA, 15 bp, Homo sapiens
tagatcttgttggtt

SEQ ID NO: 657116 - DNA, 15 bp, Homo sapiens
agatcttgttggttc

SEQ ID NO: 657117 - DNA, 15 bp, Homo sapiens
gatcttgttggttcc

SEQ ID NO: 657118 - DNA, 15 bp, Homo sapiens
atcttgttggttcct

SEQ ID NO: 657119 - DNA, 15 bp, Homo sapiens
tcttgttggttcctt

SEQ ID NO: 657120 - DNA, 15 bp, Homo sapiens
cttgttggttccttc

SEQ ID NO: 657121 - DNA, 15 bp, Homo sapiens
ttgttggttccttcc

SEQ ID NO: 657122 - DNA, 15 bp, Homo sapiens
tgttggttccttcct

SEQ ID NO: 657123 - DNA, 15 bp, Homo sapiens
gttggttccttcctt

SEQ ID NO: 657124 - DNA, 15 bp, Homo sapiens
ttggttccttccttt

SEQ ID NO: 657125 - DNA, 15 bp, Homo sapiens
tggttccttcctttc

SEQ ID NO: 657126 - DNA, 15 bp, Homo sapiens
ggttccttcctttca

SEQ ID NO: 657127 - DNA, 15 bp, Homo sapiens
gttccttcctttcaa

SEQ ID NO: 657128 - DNA, 15 bp, Homo sapiens
ttccttcctttcaat

SEQ ID NO: 657129 - DNA, 15 bp, Homo sapiens
tccttcctttcaata

SEQ ID NO: 657130 - DNA, 15 bp, Homo sapiens
ccttcctttcaataa

SEQ ID NO: 657131 - DNA, 15 bp, Homo sapiens
cttcctttcaataaa

SEQ ID NO: 657132 - DNA, 15 bp, Homo sapiens
ttcctttcaataaat

SEQ ID NO: 657133 - DNA, 15 bp, Homo sapiens
tcctttcaataaatt

SEQ ID NO: 657134 - DNA, 15 bp, Homo sapiens
cctttcaataaattc

SEQ ID NO: 657135 - DNA, 15 bp, Homo sapiens
ctttcaataaattca

SEQ ID NO: 657136 - DNA, 15 bp, Homo sapiens
tttcaataaattcac

SEQ ID NO: 657137 - DNA, 15 bp, Homo sapiens
ttcaataaattcacc

SEQ ID NO: 657138 - DNA, 15 bp, Homo sapiens
tcaataaattcacct

SEQ ID NO: 657139 - DNA, 15 bp, Homo sapiens
caataaattcacctg

SEQ ID NO: 657140 - DNA, 15 bp, Homo sapiens
aataaattcacctga

SEQ ID NO: 657141 - DNA, 15 bp, Homo sapiens
ataaattcacctgag

SEQ ID NO: 657142 - DNA, 15 bp, Homo sapiens
taaattcacctgaga

SEQ ID NO: 657143 - DNA, 15 bp, Homo sapiens
aaattcacctgagac

SEQ ID NO: 657144 - DNA, 15 bp, Homo sapiens
aattcacctgagact

SEQ ID NO: 657145 - DNA, 15 bp, Homo sapiens
attcacctgagactt

SEQ ID NO: 657146 - DNA, 15 bp, Homo sapiens
ttcacctgagactta

SEQ ID NO: 657147 - DNA, 15 bp, Homo sapiens
tcacctgagacttag

SEQ ID NO: 657148 - DNA, 15 bp, Homo sapiens
cacctgagacttagg

SEQ ID NO: 657149 - DNA, 15 bp, Homo sapiens
acctgagacttaggt

SEQ ID NO: 657150 - DNA, 15 bp, Homo sapiens
cctgagacttaggtt

SEQ ID NO: 657151 - DNA, 15 bp, Homo sapiens
ctgagacttaggtta

SEQ ID NO: 657152 - DNA, 15 bp, Homo sapiens
tgagacttaggttaa

SEQ ID NO: 657153 - DNA, 15 bp, Homo sapiens
gagacttaggttaac

SEQ ID NO: 657154 - DNA, 15 bp, Homo sapiens
agacttaggttaaca

SEQ ID NO: 657155 - DNA, 15 bp, Homo sapiens
gacttaggttaacac

SEQ ID NO: 657156 - DNA, 15 bp, Homo sapiens
acttaggttaacact

SEQ ID NO: 657157 - DNA, 15 bp, Homo sapiens
cttaggttaacactt

SEQ ID NO: 657158 - DNA, 15 bp, Homo sapiens
ttaggttaacacttt

SEQ ID NO: 657159 - DNA, 15 bp, Homo sapiens
taggttaacactttt

SEQ ID NO: 657160 - DNA, 15 bp, Homo sapiens
aggttaacacttttg

SEQ ID NO: 657161 - DNA, 15 bp, Homo sapiens
ggttaacacttttgc

SEQ ID NO: 657162 - DNA, 15 bp, Homo sapiens
gttaacacttttgct

SEQ ID NO: 657163 - DNA, 15 bp, Homo sapiens
ttaacacttttgctc

SEQ ID NO: 657164 - DNA, 15 bp, Homo sapiens
taacacttttgctcc

SEQ ID NO: 657165 - DNA, 15 bp, Homo sapiens
aacacttttgctccc

SEQ ID NO: 657166 - DNA, 15 bp, Homo sapiens
acacttttgctccct

SEQ ID NO: 657167 - DNA, 15 bp, Homo sapiens
cacttttgctccctc

SEQ ID NO: 657168 - DNA, 15 bp, Homo sapiens
acttttgctccctcg

SEQ ID NO: 657169 - DNA, 15 bp, Homo sapiens
cttttgctccctcgc

SEQ ID NO: 657170 - DNA, 15 bp, Homo sapiens
ttttgctccctcgct

SEQ ID NO: 657171 - DNA, 15 bp, Homo sapiens
tttgctccctcgctg

SEQ ID NO: 657172 - DNA, 15 bp, Homo sapiens
ttgctccctcgctgt

SEQ ID NO: 657173 - DNA, 15 bp, Homo sapiens
tgctccctcgctgtg

SEQ ID NO: 657174 - DNA, 15 bp, Homo sapiens
gctccctcgctgtgg

SEQ ID NO: 657175 - DNA, 15 bp, Homo sapiens
ctccctcgctgtgga

SEQ ID NO: 657176 - DNA, 15 bp, Homo sapiens
tccctcgctgtggaa

SEQ ID NO: 657177 - DNA, 15 bp, Homo sapiens
ccctcgctgtggaaa

SEQ ID NO: 657178 - DNA, 15 bp, Homo sapiens
cctcgctgtggaaat

SEQ ID NO: 657179 - DNA, 15 bp, Homo sapiens
ctcgctgtggaaatt

SEQ ID NO: 657180 - DNA, 15 bp, Homo sapiens
tcgctgtggaaattt

SEQ ID NO: 657181 - DNA, 15 bp, Homo sapiens
cgctgtggaaatttg

SEQ ID NO: 657182 - DNA, 15 bp, Homo sapiens
gctgtggaaatttgt

SEQ ID NO: 657183 - DNA, 15 bp, Homo sapiens
ctgtggaaatttgta

SEQ ID NO: 657184 - DNA, 15 bp, Homo sapiens
tgtggaaatttgtac

SEQ ID NO: 657185 - DNA, 15 bp, Homo sapiens
gtggaaatttgtaca

SEQ ID NO: 657186 - DNA, 15 bp, Homo sapiens
tggaaatttgtacaa

SEQ ID NO: 657187 - DNA, 15 bp, Homo sapiens
ggaaatttgtacaaa

SEQ ID NO: 657188 - DNA, 15 bp, Homo sapiens
gaaatttgtacaaac

SEQ ID NO: 657189 - DNA, 15 bp, Homo sapiens
aaatttgtacaaact

SEQ ID NO: 657190 - DNA, 15 bp, Homo sapiens
aatttgtacaaacta

SEQ ID NO: 657191 - DNA, 15 bp, Homo sapiens
atttgtacaaactaa

SEQ ID NO: 657192 - DNA, 15 bp, Homo sapiens
tttgtacaaactaaa

SEQ ID NO: 657193 - DNA, 15 bp, Homo sapiens
ttgtacaaactaaag

SEQ ID NO: 657194 - DNA, 15 bp, Homo sapiens
tgtacaaactaaagt

SEQ ID NO: 657195 - DNA, 15 bp, Homo sapiens
gtacaaactaaagtg

SEQ ID NO: 657196 - DNA, 15 bp, Homo sapiens
tacaaactaaagtga

SEQ ID NO: 657197 - DNA, 15 bp, Homo sapiens
acaaactaaagtgat

SEQ ID NO: 657198 - DNA, 15 bp, Homo sapiens
caaactaaagtgatt

SEQ ID NO: 657199 - DNA, 15 bp, Homo sapiens
aaactaaagtgattc

SEQ ID NO: 657200 - DNA, 15 bp, Homo sapiens
aactaaagtgattcc

SEQ ID NO: 657201 - DNA, 15 bp, Homo sapiens
actaaagtgattccc

SEQ ID NO: 657202 - DNA, 15 bp, Homo sapiens
ctaaagtgattccct

SEQ ID NO: 657203 - DNA, 15 bp, Homo sapiens
taaagtgattccctg

SEQ ID NO: 657204 - DNA, 15 bp, Homo sapiens
aaagtgattccctgc

SEQ ID NO: 657205 - DNA, 15 bp, Homo sapiens
aagtgattccctgcc

SEQ ID NO: 657206 - DNA, 15 bp, Homo sapiens
agtgattccctgcct

SEQ ID NO: 657207 - DNA, 15 bp, Homo sapiens
gtgattccctgcctg

SEQ ID NO: 657208 - DNA, 15 bp, Homo sapiens
tgattccctgcctgt

SEQ ID NO: 657209 - DNA, 15 bp, Homo sapiens
gattccctgcctgtc

SEQ ID NO: 657210 - DNA, 15 bp, Homo sapiens
attccctgcctgtct

SEQ ID NO: 657211 - DNA, 15 bp, Homo sapiens
ttccctgcctgtctc

SEQ ID NO: 657212 - DNA, 15 bp, Homo sapiens
tccctgcctgtctcc

SEQ ID NO: 657213 - DNA, 15 bp, Homo sapiens
ccctgcctgtctcct

SEQ ID NO: 657214 - DNA, 15 bp, Homo sapiens
cctgcctgtctccta

SEQ ID NO: 657215 - DNA, 15 bp, Homo sapiens
ctgcctgtctcctat

SEQ ID NO: 657216 - DNA, 15 bp, Homo sapiens
tgcctgtctcctata

SEQ ID NO: 657217 - DNA, 15 bp, Homo sapiens
gcctgtctcctatat

SEQ ID NO: 657218 - DNA, 15 bp, Homo sapiens
cctgtctcctatatg

SEQ ID NO: 657219 - DNA, 15 bp, Homo sapiens
ctgtctcctatatgg

SEQ ID NO: 657220 - DNA, 15 bp, Homo sapiens
tgtctcctatatggt

SEQ ID NO: 657221 - DNA, 15 bp, Homo sapiens
gtctcctatatggtg

SEQ ID NO: 657222 - DNA, 15 bp, Homo sapiens
tctcctatatggtgt

SEQ ID NO: 657223 - DNA, 15 bp, Homo sapiens
ctcctatatggtgtg

SEQ ID NO: 657224 - DNA, 15 bp, Homo sapiens
tcctatatggtgtgc

SEQ ID NO: 657225 - DNA, 15 bp, Homo sapiens
cctatatggtgtgca

SEQ ID NO: 657226 - DNA, 15 bp, Homo sapiens
ctatatggtgtgcaa

SEQ ID NO: 657227 - DNA, 15 bp, Homo sapiens
tatatggtgtgcaaa

SEQ ID NO: 657228 - DNA, 15 bp, Homo sapiens
atatggtgtgcaaag

SEQ ID NO: 657229 - DNA, 15 bp, Homo sapiens
tatggtgtgcaaagc

SEQ ID NO: 657230 - DNA, 15 bp, Homo sapiens
atggtgtgcaaagcc

SEQ ID NO: 657231 - DNA, 15 bp, Homo sapiens
tggtgtgcaaagcct

SEQ ID NO: 657232 - DNA, 15 bp, Homo sapiens
ggtgtgcaaagcctt

SEQ ID NO: 657233 - DNA, 15 bp, Homo sapiens
gtgtgcaaagccttc

SEQ ID NO: 657234 - DNA, 15 bp, Homo sapiens
tgtgcaaagccttca

SEQ ID NO: 657235 - DNA, 15 bp, Homo sapiens
gtgcaaagccttcac

SEQ ID NO: 657236 - DNA, 15 bp, Homo sapiens
tgcaaagccttcaca

SEQ ID NO: 657237 - DNA, 15 bp, Homo sapiens
gcaaagccttcacat

SEQ ID NO: 657238 - DNA, 15 bp, Homo sapiens
caaagccttcacatg

SEQ ID NO: 657239 - DNA, 15 bp, Homo sapiens
aaagccttcacatgt

SEQ ID NO: 657240 - DNA, 15 bp, Homo sapiens
aagccttcacatgta

SEQ ID NO: 657241 - DNA, 15 bp, Homo sapiens
agccttcacatgtac

SEQ ID NO: 657242 - DNA, 15 bp, Homo sapiens
gccttcacatgtact

SEQ ID NO: 657243 - DNA, 15 bp, Homo sapiens
ccttcacatgtactt

SEQ ID NO: 657244 - DNA, 15 bp, Homo sapiens
cttcacatgtacttt

SEQ ID NO: 657245 - DNA, 15 bp, Homo sapiens
ttcacatgtactttg

SEQ ID NO: 657246 - DNA, 15 bp, Homo sapiens
tcacatgtactttgg

SEQ ID NO: 657247 - DNA, 15 bp, Homo sapiens
cacatgtactttggg

SEQ ID NO: 657248 - DNA, 15 bp, Homo sapiens
acatgtactttgggc

SEQ ID NO: 657249 - DNA, 15 bp, Homo sapiens
catgtactttgggca

SEQ ID NO: 657250 - DNA, 15 bp, Homo sapiens
atgtactttgggcat

SEQ ID NO: 657251 - DNA, 15 bp, Homo sapiens
tgtactttgggcatt

SEQ ID NO: 657252 - DNA, 15 bp, Homo sapiens
gtactttgggcattc

SEQ ID NO: 657253 - DNA, 15 bp, Homo sapiens
tactttgggcattcc

SEQ ID NO: 657254 - DNA, 15 bp, Homo sapiens
actttgggcattccg

SEQ ID NO: 657255 - DNA, 15 bp, Homo sapiens
ctttgggcattccgt

SEQ ID NO: 657256 - DNA, 15 bp, Homo sapiens
tttgggcattccgtc

SEQ ID NO: 657257 - DNA, 15 bp, Homo sapiens
ttgggcattccgtcc

SEQ ID NO: 657258 - DNA, 15 bp, Homo sapiens
tgggcattccgtcca

SEQ ID NO: 657259 - DNA, 15 bp, Homo sapiens
gggcattccgtccac

SEQ ID NO: 657260 - DNA, 15 bp, Homo sapiens
ggcattccgtccact

SEQ ID NO: 657261 - DNA, 15 bp, Homo sapiens
gcattccgtccactt

SEQ ID NO: 657262 - DNA, 15 bp, Homo sapiens
cattccgtccactta

SEQ ID NO: 657263 - DNA, 15 bp, Homo sapiens
attccgtccacttaa

SEQ ID NO: 657264 - DNA, 15 bp, Homo sapiens
ttccgtccacttaag

SEQ ID NO: 657265 - DNA, 15 bp, Homo sapiens
tccgtccacttaagg

SEQ ID NO: 657266 - DNA, 15 bp, Homo sapiens
ccgtccacttaaggt

SEQ ID NO: 657267 - DNA, 15 bp, Homo sapiens
cgtccacttaaggtc

SEQ ID NO: 657268 - DNA, 15 bp, Homo sapiens
gtccacttaaggtca

SEQ ID NO: 657269 - DNA, 15 bp, Homo sapiens
tccacttaaggtcat

SEQ ID NO: 657270 - DNA, 15 bp, Homo sapiens
ccacttaaggtcata

SEQ ID NO: 657271 - DNA, 15 bp, Homo sapiens
cacttaaggtcataa

SEQ ID NO: 657272 - DNA, 15 bp, Homo sapiens
acttaaggtcataat

SEQ ID NO: 657273 - DNA, 15 bp, Homo sapiens
cttaaggtcataatt

SEQ ID NO: 657274 - DNA, 15 bp, Homo sapiens
ttaaggtcataattt

SEQ ID NO: 657275 - DNA, 15 bp, Homo sapiens
taaggtcataatttg

SEQ ID NO: 657276 - DNA, 15 bp, Homo sapiens
aaggtcataatttga

SEQ ID NO: 657277 - DNA, 15 bp, Homo sapiens
aggtcataatttgac

SEQ ID NO: 657278 - DNA, 15 bp, Homo sapiens
ggtcataatttgact

SEQ ID NO: 657279 - DNA, 15 bp, Homo sapiens
gtcataatttgacta

SEQ ID NO: 657280 - DNA, 15 bp, Homo sapiens
tcataatttgactat

SEQ ID NO: 657281 - DNA, 15 bp, Homo sapiens
cataatttgactatt

SEQ ID NO: 657282 - DNA, 15 bp, Homo sapiens
ataatttgactatta

SEQ ID NO: 657283 - DNA, 15 bp, Homo sapiens
taatttgactattat

SEQ ID NO: 657284 - DNA, 15 bp, Homo sapiens
aatttgactattatt

SEQ ID NO: 657285 - DNA, 15 bp, Homo sapiens
atttgactattattg

SEQ ID NO: 657286 - DNA, 15 bp, Homo sapiens
tttgactattattgt

SEQ ID NO: 657287 - DNA, 15 bp, Homo sapiens
ttgactattattgta

SEQ ID NO: 657288 - DNA, 15 bp, Homo sapiens
tgactattattgtat

SEQ ID NO: 657289 - DNA, 15 bp, Homo sapiens
gactattattgtata

SEQ ID NO: 657290 - DNA, 15 bp, Homo sapiens
actattattgtatat

SEQ ID NO: 657291 - DNA, 15 bp, Homo sapiens
ctattattgtatatt

SEQ ID NO: 657292 - DNA, 15 bp, Homo sapiens
tattattgtatatta

SEQ ID NO: 657293 - DNA, 15 bp, Homo sapiens
attattgtatattat

SEQ ID NO: 657294 - DNA, 15 bp, Homo sapiens
ttattgtatattata

SEQ ID NO: 657295 - DNA, 15 bp, Homo sapiens
tattgtatattatac

SEQ ID NO: 657296 - DNA, 15 bp, Homo sapiens
attgtatattatact

SEQ ID NO: 657297 - DNA, 15 bp, Homo sapiens
ttgtatattatacta

SEQ ID NO: 657298 - DNA, 15 bp, Homo sapiens
tgtatattatactat

SEQ ID NO: 657299 - DNA, 15 bp, Homo sapiens
gtatattatactatt

SEQ ID NO: 657300 - DNA, 15 bp, Homo sapiens
tatattatactattc

SEQ ID NO: 657301 - DNA, 15 bp, Homo sapiens
atattatactattct

SEQ ID NO: 657302 - DNA, 15 bp, Homo sapiens
tattatactattctg

SEQ ID NO: 657303 - DNA, 15 bp, Homo sapiens
attatactattctga

SEQ ID NO: 657304 - DNA, 15 bp, Homo sapiens
ttatactattctgac

SEQ ID NO: 657305 - DNA, 15 bp, Homo sapiens
tatactattctgact

SEQ ID NO: 657306 - DNA, 15 bp, Homo sapiens
atactattctgactc

SEQ ID NO: 657307 - DNA, 15 bp, Homo sapiens
tactattctgactct

SEQ ID NO: 657308 - DNA, 15 bp, Homo sapiens
actattctgactcta

SEQ ID NO: 657309 - DNA, 15 bp, Homo sapiens
ctattctgactctat

SEQ ID NO: 657310 - DNA, 15 bp, Homo sapiens
tattctgactctatg

SEQ ID NO: 657311 - DNA, 15 bp, Homo sapiens
attctgactctatgg

SEQ ID NO: 657312 - DNA, 15 bp, Homo sapiens
ttctgactctatggt

SEQ ID NO: 657313 - DNA, 15 bp, Homo sapiens
tctgactctatggtc

SEQ ID NO: 657314 - DNA, 15 bp, Homo sapiens
ctgactctatggtca

SEQ ID NO: 657315 - DNA, 15 bp, Homo sapiens
tgactctatggtcac

SEQ ID NO: 657316 - DNA, 15 bp, Homo sapiens
gactctatggtcact

SEQ ID NO: 657317 - DNA, 15 bp, Homo sapiens
actctatggtcactc

SEQ ID NO: 657318 - DNA, 15 bp, Homo sapiens
ctctatggtcactct

SEQ ID NO: 657319 - DNA, 15 bp, Homo sapiens
tctatggtcactctc

SEQ ID NO: 657320 - DNA, 15 bp, Homo sapiens
ctatggtcactctct

SEQ ID NO: 657321 - DNA, 15 bp, Homo sapiens
tatggtcactctctc

SEQ ID NO: 657322 - DNA, 15 bp, Homo sapiens
atggtcactctctcc

SEQ ID NO: 657323 - DNA, 15 bp, Homo sapiens
tggtcactctctcca

SEQ ID NO: 657324 - DNA, 15 bp, Homo sapiens
ggtcactctctccaa

SEQ ID NO: 657325 - DNA, 15 bp, Homo sapiens
gtcactctctccaat

SEQ ID NO: 657326 - DNA, 15 bp, Homo sapiens
tcactctctccaatg

SEQ ID NO: 657327 - DNA, 15 bp, Homo sapiens
cactctctccaatgt

SEQ ID NO: 657328 - DNA, 15 bp, Homo sapiens
actctctccaatgtc

SEQ ID NO: 657329 - DNA, 15 bp, Homo sapiens
ctctctccaatgtca

SEQ ID NO: 657330 - DNA, 15 bp, Homo sapiens
tctctccaatgtcaa

SEQ ID NO: 657331 - DNA, 15 bp, Homo sapiens
ctctccaatgtcaac

SEQ ID NO: 657332 - DNA, 15 bp, Homo sapiens
tctccaatgtcaact

SEQ ID NO: 657333 - DNA, 15 bp, Homo sapiens
ctccaatgtcaactt

SEQ ID NO: 657334 - DNA, 15 bp, Homo sapiens
tccaatgtcaacttt

SEQ ID NO: 657335 - DNA, 15 bp, Homo sapiens
ccaatgtcaactttg

SEQ ID NO: 657336 - DNA, 15 bp, Homo sapiens
caatgtcaactttgg

SEQ ID NO: 657337 - DNA, 15 bp, Homo sapiens
aatgtcaactttggt

SEQ ID NO: 657338 - DNA, 15 bp, Homo sapiens
atgtcaactttggta

SEQ ID NO: 657339 - DNA, 15 bp, Homo sapiens
tgtcaactttggtag

SEQ ID NO: 657340 - DNA, 15 bp, Homo sapiens
gtcaactttggtaga

SEQ ID NO: 657341 - DNA, 15 bp, Homo sapiens
tcaactttggtagaa

SEQ ID NO: 657342 - DNA, 15 bp, Homo sapiens
caactttggtagaaa

SEQ ID NO: 657343 - DNA, 15 bp, Homo sapiens
aactttggtagaaat

SEQ ID NO: 657344 - DNA, 15 bp, Homo sapiens
actttggtagaaatg

SEQ ID NO: 657345 - DNA, 15 bp, Homo sapiens
ctttggtagaaatgc

SEQ ID NO: 657346 - DNA, 15 bp, Homo sapiens
tttggtagaaatgct

SEQ ID NO: 657347 - DNA, 15 bp, Homo sapiens
ttggtagaaatgctt

SEQ ID NO: 657348 - DNA, 15 bp, Homo sapiens
tggtagaaatgcttt

SEQ ID NO: 657349 - DNA, 15 bp, Homo sapiens
ggtagaaatgctttg

SEQ ID NO: 657350 - DNA, 15 bp, Homo sapiens
gtagaaatgctttgg

SEQ ID NO: 657351 - DNA, 15 bp, Homo sapiens
tagaaatgctttgga

SEQ ID NO: 657352 - DNA, 15 bp, Homo sapiens
agaaatgctttggaa

SEQ ID NO: 657353 - DNA, 15 bp, Homo sapiens
gaaatgctttggaat

SEQ ID NO: 657354 - DNA, 15 bp, Homo sapiens
aaatgctttggaatg

SEQ ID NO: 657355 - DNA, 15 bp, Homo sapiens
aatgctttggaatga

SEQ ID NO: 657356 - DNA, 15 bp, Homo sapiens
atgctttggaatgac

SEQ ID NO: 657357 - DNA, 15 bp, Homo sapiens
tgctttggaatgact

SEQ ID NO: 657358 - DNA, 15 bp, Homo sapiens
gctttggaatgactt

SEQ ID NO: 657359 - DNA, 15 bp, Homo sapiens
ctttggaatgactta

SEQ ID NO: 657360 - DNA, 15 bp, Homo sapiens
tttggaatgacttag

SEQ ID NO: 657361 - DNA, 15 bp, Homo sapiens
ttggaatgacttagc

SEQ ID NO: 657362 - DNA, 15 bp, Homo sapiens
tggaatgacttagca

SEQ ID NO: 657363 - DNA, 15 bp, Homo sapiens
ggaatgacttagcaa

SEQ ID NO: 657364 - DNA, 15 bp, Homo sapiens
gaatgacttagcaaa

SEQ ID NO: 657365 - DNA, 15 bp, Homo sapiens
aatgacttagcaaag

SEQ ID NO: 657366 - DNA, 15 bp, Homo sapiens
atgacttagcaaagc

SEQ ID NO: 657367 - DNA, 15 bp, Homo sapiens
tgacttagcaaagct

SEQ ID NO: 657368 - DNA, 15 bp, Homo sapiens
gacttagcaaagctg

SEQ ID NO: 657369 - DNA, 15 bp, Homo sapiens
acttagcaaagctgc

SEQ ID NO: 657370 - DNA, 15 bp, Homo sapiens
cttagcaaagctgcg

SEQ ID NO: 657371 - DNA, 15 bp, Homo sapiens
ttagcaaagctgcgc

SEQ ID NO: 657372 - DNA, 15 bp, Homo sapiens
tagcaaagctgcgct

SEQ ID NO: 657373 - DNA, 15 bp, Homo sapiens
agcaaagctgcgctc

SEQ ID NO: 657374 - DNA, 15 bp, Homo sapiens
gcaaagctgcgctcc

SEQ ID NO: 657375 - DNA, 15 bp, Homo sapiens
caaagctgcgctcct

SEQ ID NO: 657376 - DNA, 15 bp, Homo sapiens
aaagctgcgctcctg

SEQ ID NO: 657377 - DNA, 15 bp, Homo sapiens
aagctgcgctcctgg

SEQ ID NO: 657378 - DNA, 15 bp, Homo sapiens
agctgcgctcctgga

SEQ ID NO: 657379 - DNA, 15 bp, Homo sapiens
gctgcgctcctggaa

SEQ ID NO: 657380 - DNA, 15 bp, Homo sapiens
ctgcgctcctggaaa

SEQ ID NO: 657381 - DNA, 15 bp, Homo sapiens
tgcgctcctggaaaa

SEQ ID NO: 657382 - DNA, 15 bp, Homo sapiens
gcgctcctggaaaat

SEQ ID NO: 657383 - DNA, 15 bp, Homo sapiens
cgctcctggaaaatc

SEQ ID NO: 657384 - DNA, 15 bp, Homo sapiens
gctcctggaaaatct

SEQ ID NO: 657385 - DNA, 15 bp, Homo sapiens
ctcctggaaaatctg

SEQ ID NO: 657386 - DNA, 15 bp, Homo sapiens
tcctggaaaatctga

SEQ ID NO: 657387 - DNA, 15 bp, Homo sapiens
cctggaaaatctgaa

SEQ ID NO: 657388 - DNA, 15 bp, Homo sapiens
ctggaaaatctgaaa

SEQ ID NO: 657389 - DNA, 15 bp, Homo sapiens
tggaaaatctgaaac

SEQ ID NO: 657390 - DNA, 15 bp, Homo sapiens
ggaaaatctgaaaca

SEQ ID NO: 657391 - DNA, 15 bp, Homo sapiens
gaaaatctgaaacag

SEQ ID NO: 657392 - DNA, 15 bp, Homo sapiens
aaaatctgaaacagt

SEQ ID NO: 657393 - DNA, 15 bp, Homo sapiens
aaatctgaaacagtc

SEQ ID NO: 657394 - DNA, 15 bp, Homo sapiens
aatctgaaacagtct

SEQ ID NO: 657395 - DNA, 15 bp, Homo sapiens
atctgaaacagtctg

SEQ ID NO: 657396 - DNA, 15 bp, Homo sapiens
tctgaaacagtctga

SEQ ID NO: 657397 - DNA, 15 bp, Homo sapiens
ctgaaacagtctgac

SEQ ID NO: 657398 - DNA, 15 bp, Homo sapiens
tgaaacagtctgacg

SEQ ID NO: 657399 - DNA, 15 bp, Homo sapiens
gaaacagtctgacga

SEQ ID NO: 657400 - DNA, 15 bp, Homo sapiens
aaacagtctgacgag

SEQ ID NO: 657401 - DNA, 15 bp, Homo sapiens
aacagtctgacgagt

SEQ ID NO: 657402 - DNA, 15 bp, Homo sapiens
acagtctgacgagtt

SEQ ID NO: 657403 - DNA, 15 bp, Homo sapiens
cagtctgacgagttg

SEQ ID NO: 657404 - DNA, 15 bp, Homo sapiens
agtctgacgagttgt

SEQ ID NO: 657405 - DNA, 15 bp, Homo sapiens
gtctgacgagttgtt

SEQ ID NO: 657406 - DNA, 15 bp, Homo sapiens
tctgacgagttgttg

SEQ ID NO: 657407 - DNA, 15 bp, Homo sapiens
ctgacgagttgttgg

SEQ ID NO: 657408 - DNA, 15 bp, Homo sapiens
tgacgagttgttgga

SEQ ID NO: 657409 - DNA, 15 bp, Homo sapiens
gacgagttgttggat

SEQ ID NO: 657410 - DNA, 15 bp, Homo sapiens
acgagttgttggatc

SEQ ID NO: 657411 - DNA, 15 bp, Homo sapiens
cgagttgttggatca

SEQ ID NO: 657412 - DNA, 15 bp, Homo sapiens
gagttgttggatcag

SEQ ID NO: 657413 - DNA, 15 bp, Homo sapiens
agttgttggatcagc

SEQ ID NO: 657414 - DNA, 15 bp, Homo sapiens
gttgttggatcagct

SEQ ID NO: 657415 - DNA, 15 bp, Homo sapiens
ttgttggatcagctt

SEQ ID NO: 657416 - DNA, 15 bp, Homo sapiens
tgttggatcagcttt

SEQ ID NO: 657417 - DNA, 15 bp, Homo sapiens
gttggatcagctttt

SEQ ID NO: 657418 - DNA, 15 bp, Homo sapiens
ttggatcagcttttt

SEQ ID NO: 657419 - DNA, 15 bp, Homo sapiens
tggatcagctttttt

SEQ ID NO: 657420 - DNA, 15 bp, Homo sapiens
ggatcagcttttttt

SEQ ID NO: 657421 - DNA, 15 bp, Homo sapiens
gatcagctttttttt

SEQ ID NO: 657422 - DNA, 15 bp, Homo sapiens
atcagcttttttttt

SEQ ID NO: 657423 - DNA, 15 bp, Homo sapiens
tcagctttttttttc

SEQ ID NO: 657424 - DNA, 15 bp, Homo sapiens
cagctttttttttct

SEQ ID NO: 657425 - DNA, 15 bp, Homo sapiens
agctttttttttctg

SEQ ID NO: 657426 - DNA, 15 bp, Homo sapiens
gctttttttttctgg

SEQ ID NO: 657427 - DNA, 15 bp, Homo sapiens
ctttttttttctgga

SEQ ID NO: 657428 - DNA, 15 bp, Homo sapiens
tttttttttctggag

SEQ ID NO: 657429 - DNA, 15 bp, Homo sapiens
ttttttttctggaga

SEQ ID NO: 657430 - DNA, 15 bp, Homo sapiens
tttttttctggagat

SEQ ID NO: 657431 - DNA, 15 bp, Homo sapiens
ttttttctggagatt

SEQ ID NO: 657432 - DNA, 15 bp, Homo sapiens
tttttctggagattt

SEQ ID NO: 657433 - DNA, 15 bp, Homo sapiens
ttttctggagatttc

SEQ ID NO: 657434 - DNA, 15 bp, Homo sapiens
tttctggagatttct

SEQ ID NO: 657435 - DNA, 15 bp, Homo sapiens
ttctggagatttctc

SEQ ID NO: 657436 - DNA, 15 bp, Homo sapiens
tctggagatttctct

SEQ ID NO: 657437 - DNA, 15 bp, Homo sapiens
ctggagatttctctg

SEQ ID NO: 657438 - DNA, 15 bp, Homo sapiens
tggagatttctctga

SEQ ID NO: 657439 - DNA, 15 bp, Homo sapiens
ggagatttctctgac

SEQ ID NO: 657440 - DNA, 15 bp, Homo sapiens
gagatttctctgact

SEQ ID NO: 657441 - DNA, 15 bp, Homo sapiens
agatttctctgactg

SEQ ID NO: 657442 - DNA, 15 bp, Homo sapiens
gatttctctgactgt

SEQ ID NO: 657443 - DNA, 15 bp, Homo sapiens
atttctctgactgtc

SEQ ID NO: 657444 - DNA, 15 bp, Homo sapiens
tttctctgactgtcc

SEQ ID NO: 657445 - DNA, 15 bp, Homo sapiens
ttctctgactgtccc

SEQ ID NO: 657446 - DNA, 15 bp, Homo sapiens
tctctgactgtccca

SEQ ID NO: 657447 - DNA, 15 bp, Homo sapiens
ctctgactgtcccaa

SEQ ID NO: 657448 - DNA, 15 bp, Homo sapiens
tctgactgtcccaaa

SEQ ID NO: 657449 - DNA, 15 bp, Homo sapiens
ctgactgtcccaaac

SEQ ID NO: 657450 - DNA, 15 bp, Homo sapiens
tgactgtcccaaacc

SEQ ID NO: 657451 - DNA, 15 bp, Homo sapiens
gactgtcccaaacca

SEQ ID NO: 657452 - DNA, 15 bp, Homo sapiens
actgtcccaaaccaa

SEQ ID NO: 657453 - DNA, 15 bp, Homo sapiens
ctgtcccaaaccaaa

SEQ ID NO: 657454 - DNA, 15 bp, Homo sapiens
tgtcccaaaccaaaa

SEQ ID NO: 657455 - DNA, 15 bp, Homo sapiens
gtcccaaaccaaaag

SEQ ID NO: 657456 - DNA, 15 bp, Homo sapiens
tcccaaaccaaaaga

SEQ ID NO: 657457 - DNA, 15 bp, Homo sapiens
cccaaaccaaaagaa

SEQ ID NO: 657458 - DNA, 15 bp, Homo sapiens
ccaaaccaaaagaaa

SEQ ID NO: 657459 - DNA, 15 bp, Homo sapiens
caaaccaaaagaaat

SEQ ID NO: 657460 - DNA, 15 bp, Homo sapiens
aaaccaaaagaaatt

SEQ ID NO: 657461 - DNA, 15 bp, Homo sapiens
aaccaaaagaaattt

SEQ ID NO: 657462 - DNA, 15 bp, Homo sapiens
accaaaagaaattta

SEQ ID NO: 657463 - DNA, 15 bp, Homo sapiens
ccaaaagaaatttac

SEQ ID NO: 657464 - DNA, 15 bp, Homo sapiens
caaaagaaatttaca

SEQ ID NO: 657465 - DNA, 15 bp, Homo sapiens
aaaagaaatttacac

SEQ ID NO: 657466 - DNA, 15 bp, Homo sapiens
aaagaaatttacacc

SEQ ID NO: 657467 - DNA, 15 bp, Homo sapiens
aagaaatttacacct

SEQ ID NO: 657468 - DNA, 15 bp, Homo sapiens
agaaatttacacctg

SEQ ID NO: 657469 - DNA, 15 bp, Homo sapiens
gaaatttacacctga

SEQ ID NO: 657470 - DNA, 15 bp, Homo sapiens
aaatttacacctgat

SEQ ID NO: 657471 - DNA, 15 bp, Homo sapiens
aatttacacctgatt

SEQ ID NO: 657472 - DNA, 15 bp, Homo sapiens
atttacacctgattt

SEQ ID NO: 657473 - DNA, 15 bp, Homo sapiens
tttacacctgatttt

SEQ ID NO: 657474 - DNA, 15 bp, Homo sapiens
ttacacctgattttt

SEQ ID NO: 657475 - DNA, 15 bp, Homo sapiens
tacacctgatttttt

SEQ ID NO: 657476 - DNA, 15 bp, Homo sapiens
acacctgattttttt

SEQ ID NO: 657477 - DNA, 15 bp, Homo sapiens
cacctgatttttttg

SEQ ID NO: 657478 - DNA, 15 bp, Homo sapiens
acctgatttttttgc

SEQ ID NO: 657479 - DNA, 15 bp, Homo sapiens
cctgatttttttgca

SEQ ID NO: 657480 - DNA, 15 bp, Homo sapiens
ctgatttttttgcag

SEQ ID NO: 657481 - DNA, 15 bp, Homo sapiens
tgatttttttgcaga

SEQ ID NO: 657482 - DNA, 15 bp, Homo sapiens
gatttttttgcagac

SEQ ID NO: 657483 - DNA, 15 bp, Homo sapiens
atttttttgcagact

SEQ ID NO: 657484 - DNA, 15 bp, Homo sapiens
tttttttgcagactc

SEQ ID NO: 657485 - DNA, 15 bp, Homo sapiens
ttttttgcagactcc

SEQ ID NO: 657486 - DNA, 15 bp, Homo sapiens
tttttgcagactccc

SEQ ID NO: 657487 - DNA, 15 bp, Homo sapiens
ttttgcagactccca

SEQ ID NO: 657488 - DNA, 15 bp, Homo sapiens
tttgcagactcccaa

SEQ ID NO: 657489 - DNA, 15 bp, Homo sapiens
ttgcagactcccaag

SEQ ID NO: 657490 - DNA, 15 bp, Homo sapiens
tgcagactcccaagc

SEQ ID NO: 657491 - DNA, 15 bp, Homo sapiens
gcagactcccaagca

SEQ ID NO: 657492 - DNA, 15 bp, Homo sapiens
cagactcccaagcaa

SEQ ID NO: 657493 - DNA, 15 bp, Homo sapiens
agactcccaagcaaa

SEQ ID NO: 657494 - DNA, 15 bp, Homo sapiens
gactcccaagcaaat

SEQ ID NO: 657495 - DNA, 15 bp, Homo sapiens
actcccaagcaaata

SEQ ID NO: 657496 - DNA, 15 bp, Homo sapiens
ctcccaagcaaatac

SEQ ID NO: 657497 - DNA, 15 bp, Homo sapiens
tcccaagcaaatact

SEQ ID NO: 657498 - DNA, 15 bp, Homo sapiens
cccaagcaaatactc

SEQ ID NO: 657499 - DNA, 15 bp, Homo sapiens
atactacgcggcact

SEQ ID NO: 657500 - DNA, 15 bp, Homo sapiens
tactacgcggcactt

SEQ ID NO: 657501 - DNA, 15 bp, Homo sapiens
actacgcggcactta

SEQ ID NO: 657502 - DNA, 15 bp, Homo sapiens
ctacgcggcacttag

SEQ ID NO: 657503 - DNA, 15 bp, Homo sapiens
tacgcggcacttagg

SEQ ID NO: 657504 - DNA, 15 bp, Homo sapiens
acgcggcacttaggg

SEQ ID NO: 657505 - DNA, 15 bp, Homo sapiens
cgcggcacttagggc

SEQ ID NO: 657506 - DNA, 15 bp, Homo sapiens
gcggcacttagggca

SEQ ID NO: 657507 - DNA, 15 bp, Homo sapiens
cggcacttagggcag

SEQ ID NO: 657508 - DNA, 15 bp, Homo sapiens
ggcacttagggcagt

SEQ ID NO: 657509 - DNA, 15 bp, Homo sapiens
gcacttagggcagtg

SEQ ID NO: 657510 - DNA, 15 bp, Homo sapiens
cacttagggcagtgc

SEQ ID NO: 657511 - DNA, 15 bp, Homo sapiens
acttagggcagtgct

SEQ ID NO: 657512 - DNA, 15 bp, Homo sapiens
cttagggcagtgctt

SEQ ID NO: 657513 - DNA, 15 bp, Homo sapiens
ttagggcagtgcttt

SEQ ID NO: 657514 - DNA, 15 bp, Homo sapiens
tagggcagtgctttc

SEQ ID NO: 657515 - DNA, 15 bp, Homo sapiens
agggcagtgctttca

SEQ ID NO: 657516 - DNA, 15 bp, Homo sapiens
gggcagtgctttcaa

SEQ ID NO: 657517 - DNA, 15 bp, Homo sapiens
ggcagtgctttcaat

SEQ ID NO: 657518 - DNA, 15 bp, Homo sapiens
gcagtgctttcaatg

SEQ ID NO: 657519 - DNA, 15 bp, Homo sapiens
cagtgctttcaatgt

SEQ ID NO: 657520 - DNA, 15 bp, Homo sapiens
agtgctttcaatgta

SEQ ID NO: 657521 - DNA, 15 bp, Homo sapiens
gtgctttcaatgtag

SEQ ID NO: 657522 - DNA, 15 bp, Homo sapiens
tgctttcaatgtagc

SEQ ID NO: 657523 - DNA, 15 bp, Homo sapiens
gctttcaatgtagca

SEQ ID NO: 657524 - DNA, 15 bp, Homo sapiens
ctttcaatgtagcag

SEQ ID NO: 657525 - DNA, 15 bp, Homo sapiens
tttcaatgtagcagg

SEQ ID NO: 657526 - DNA, 15 bp, Homo sapiens
ttcaatgtagcaggt

SEQ ID NO: 657527 - DNA, 15 bp, Homo sapiens
tcaatgtagcaggta

SEQ ID NO: 657528 - DNA, 15 bp, Homo sapiens
caatgtagcaggtaa

SEQ ID NO: 657529 - DNA, 15 bp, Homo sapiens
aatgtagcaggtaac

SEQ ID NO: 657530 - DNA, 15 bp, Homo sapiens
atgtagcaggtaacc

SEQ ID NO: 657531 - DNA, 15 bp, Homo sapiens
tgtagcaggtaacca

SEQ ID NO: 657532 - DNA, 15 bp, Homo sapiens
gtagcaggtaaccaa

SEQ ID NO: 657533 - DNA, 15 bp, Homo sapiens
tagcaggtaaccaat

SEQ ID NO: 657534 - DNA, 15 bp, Homo sapiens
agcaggtaaccaatt

SEQ ID NO: 657535 - DNA, 15 bp, Homo sapiens
gcaggtaaccaattg

SEQ ID NO: 657536 - DNA, 15 bp, Homo sapiens
caggtaaccaattgt

SEQ ID NO: 657537 - DNA, 15 bp, Homo sapiens
aggtaaccaattgtt

SEQ ID NO: 657538 - DNA, 15 bp, Homo sapiens
ggtaaccaattgttt

SEQ ID NO: 657539 - DNA, 15 bp, Homo sapiens
gtaaccaattgtttt

SEQ ID NO: 657540 - DNA, 15 bp, Homo sapiens
taaccaattgttttg

SEQ ID NO: 657541 - DNA, 15 bp, Homo sapiens
aaccaattgttttgc

SEQ ID NO: 657542 - DNA, 15 bp, Homo sapiens
accaattgttttgct

SEQ ID NO: 657543 - DNA, 15 bp, Homo sapiens
ccaattgttttgctt

SEQ ID NO: 657544 - DNA, 15 bp, Homo sapiens
caattgttttgcttg

SEQ ID NO: 657545 - DNA, 15 bp, Homo sapiens
aattgttttgcttgc

SEQ ID NO: 657546 - DNA, 15 bp, Homo sapiens
attgttttgcttgct

SEQ ID NO: 657547 - DNA, 15 bp, Homo sapiens
ttgttttgcttgctt

SEQ ID NO: 657548 - DNA, 15 bp, Homo sapiens
tgttttgcttgcttt

SEQ ID NO: 657549 - DNA, 15 bp, Homo sapiens
gttttgcttgctttt

SEQ ID NO: 657550 - DNA, 15 bp, Homo sapiens
ttttgcttgctttta

SEQ ID NO: 657551 - DNA, 15 bp, Homo sapiens
tttgcttgcttttaa

SEQ ID NO: 657552 - DNA, 15 bp, Homo sapiens
ttgcttgcttttaaa

SEQ ID NO: 657553 - DNA, 15 bp, Homo sapiens
tgcttgcttttaaag

SEQ ID NO: 657554 - DNA, 15 bp, Homo sapiens
gcttgcttttaaagt

SEQ ID NO: 657555 - DNA, 15 bp, Homo sapiens
cttgcttttaaagta

SEQ ID NO: 657556 - DNA, 15 bp, Homo sapiens
ttgcttttaaagtag

SEQ ID NO: 657557 - DNA, 15 bp, Homo sapiens
tgcttttaaagtagt

SEQ ID NO: 657558 - DNA, 15 bp, Homo sapiens
gcttttaaagtagtt

SEQ ID NO: 657559 - DNA, 15 bp, Homo sapiens
cttttaaagtagttg

SEQ ID NO: 657560 - DNA, 15 bp, Homo sapiens
ttttaaagtagttgt

SEQ ID NO: 657561 - DNA, 15 bp, Homo sapiens
tttaaagtagttgtt

SEQ ID NO: 657562 - DNA, 15 bp, Homo sapiens
ttaaagtagttgttt

SEQ ID NO: 657563 - DNA, 15 bp, Homo sapiens
taaagtagttgtttt

SEQ ID NO: 657564 - DNA, 15 bp, Homo sapiens
aaagtagttgttttt

SEQ ID NO: 657565 - DNA, 15 bp, Homo sapiens
aagtagttgttttta

SEQ ID NO: 657566 - DNA, 15 bp, Homo sapiens
agtagttgtttttaa

SEQ ID NO: 657567 - DNA, 15 bp, Homo sapiens
gtagttgtttttaaa

SEQ ID NO: 657568 - DNA, 15 bp, Homo sapiens
tagttgtttttaaat

SEQ ID NO: 657569 - DNA, 15 bp, Homo sapiens
agttgtttttaaatt

SEQ ID NO: 657570 - DNA, 15 bp, Homo sapiens
gttgtttttaaattg

SEQ ID NO: 657571 - DNA, 15 bp, Homo sapiens
ttgtttttaaattga

SEQ ID NO: 657572 - DNA, 15 bp, Homo sapiens
tgtttttaaattgac

SEQ ID NO: 657573 - DNA, 15 bp, Homo sapiens
gtttttaaattgact

SEQ ID NO: 657574 - DNA, 15 bp, Homo sapiens
tttttaaattgactt

SEQ ID NO: 657575 - DNA, 15 bp, Homo sapiens
ttttaaattgacttg

SEQ ID NO: 657576 - DNA, 15 bp, Homo sapiens
tttaaattgacttga

SEQ ID NO: 657577 - DNA, 15 bp, Homo sapiens
ttaaattgacttgag

SEQ ID NO: 657578 - DNA, 15 bp, Homo sapiens
taaattgacttgagc

SEQ ID NO: 657579 - DNA, 15 bp, Homo sapiens
aaattgacttgagct

SEQ ID NO: 657580 - DNA, 15 bp, Homo sapiens
aattgacttgagctt

SEQ ID NO: 657581 - DNA, 15 bp, Homo sapiens
attgacttgagctta

SEQ ID NO: 657582 - DNA, 15 bp, Homo sapiens
ttgacttgagcttag

SEQ ID NO: 657583 - DNA, 15 bp, Homo sapiens
tgacttgagcttagt

SEQ ID NO: 657584 - DNA, 15 bp, Homo sapiens
gacttgagcttagtt

SEQ ID NO: 657585 - DNA, 15 bp, Homo sapiens
acttgagcttagttc

SEQ ID NO: 657586 - DNA, 15 bp, Homo sapiens
cttgagcttagttct

SEQ ID NO: 657587 - DNA, 15 bp, Homo sapiens
ttgagcttagttctg

SEQ ID NO: 657588 - DNA, 15 bp, Homo sapiens
tgagcttagttctgc

SEQ ID NO: 657589 - DNA, 15 bp, Homo sapiens
gagcttagttctgca

SEQ ID NO: 657590 - DNA, 15 bp, Homo sapiens
agcttagttctgcaa

SEQ ID NO: 657591 - DNA, 15 bp, Homo sapiens
gcttagttctgcaag

SEQ ID NO: 657592 - DNA, 15 bp, Homo sapiens
cttagttctgcaaga

SEQ ID NO: 657593 - DNA, 15 bp, Homo sapiens
ttagttctgcaagaa

SEQ ID NO: 657594 - DNA, 15 bp, Homo sapiens
tagttctgcaagaag

SEQ ID NO: 657595 - DNA, 15 bp, Homo sapiens
agttctgcaagaaga

SEQ ID NO: 657596 - DNA, 15 bp, Homo sapiens
gttctgcaagaagac

SEQ ID NO: 657597 - DNA, 15 bp, Homo sapiens
ttctgcaagaagact

SEQ ID NO: 657598 - DNA, 15 bp, Homo sapiens
tctgcaagaagacta

SEQ ID NO: 657599 - DNA, 15 bp, Homo sapiens
ctgcaagaagactag

SEQ ID NO: 657600 - DNA, 15 bp, Homo sapiens
tgcaagaagactaga

SEQ ID NO: 657601 - DNA, 15 bp, Homo sapiens
gcaagaagactagat

SEQ ID NO: 657602 - DNA, 15 bp, Homo sapiens
caagaagactagatg

SEQ ID NO: 657603 - DNA, 15 bp, Homo sapiens
aagaagactagatga

SEQ ID NO: 657604 - DNA, 15 bp, Homo sapiens
agaagactagatgag

SEQ ID NO: 657605 - DNA, 15 bp, Homo sapiens
gaagactagatgaga

SEQ ID NO: 657606 - DNA, 15 bp, Homo sapiens
aagactagatgagat

SEQ ID NO: 657607 - DNA, 15 bp, Homo sapiens
agactagatgagata

SEQ ID NO: 657608 - DNA, 15 bp, Homo sapiens
gactagatgagatat

SEQ ID NO: 657609 - DNA, 15 bp, Homo sapiens
actagatgagatatg

SEQ ID NO: 657610 - DNA, 15 bp, Homo sapiens
ctagatgagatatga

SEQ ID NO: 657611 - DNA, 15 bp, Homo sapiens
tagatgagatatgat

SEQ ID NO: 657612 - DNA, 15 bp, Homo sapiens
agatgagatatgatt

SEQ ID NO: 657613 - DNA, 15 bp, Homo sapiens
gatgagatatgattt

SEQ ID NO: 657614 - DNA, 15 bp, Homo sapiens
atgagatatgatttt

SEQ ID NO: 657615 - DNA, 15 bp, Homo sapiens
tgagatatgattttg

SEQ ID NO: 657616 - DNA, 15 bp, Homo sapiens
gagatatgattttgt

SEQ ID NO: 657617 - DNA, 15 bp, Homo sapiens
agatatgattttgtc

SEQ ID NO: 657618 - DNA, 15 bp, Homo sapiens
gatatgattttgtca

SEQ ID NO: 657619 - DNA, 15 bp, Homo sapiens
atatgattttgtcat

SEQ ID NO: 657620 - DNA, 15 bp, Homo sapiens
tatgattttgtcatc

SEQ ID NO: 657621 - DNA, 15 bp, Homo sapiens
atgattttgtcatca

SEQ ID NO: 657622 - DNA, 15 bp, Homo sapiens
tgattttgtcatcat

SEQ ID NO: 657623 - DNA, 15 bp, Homo sapiens
gattttgtcatcata

SEQ ID NO: 657624 - DNA, 15 bp, Homo sapiens
attttgtcatcataa

SEQ ID NO: 657625 - DNA, 15 bp, Homo sapiens
ttttgtcatcataaa

SEQ ID NO: 657626 - DNA, 15 bp, Homo sapiens
tttgtcatcataaat

SEQ ID NO: 657627 - DNA, 15 bp, Homo sapiens
ttgtcatcataaatt

SEQ ID NO: 657628 - DNA, 15 bp, Homo sapiens
tgtcatcataaattt

SEQ ID NO: 657629 - DNA, 15 bp, Homo sapiens
gtcatcataaattta

SEQ ID NO: 657630 - DNA, 15 bp, Homo sapiens
tcatcataaatttaa

SEQ ID NO: 657631 - DNA, 15 bp, Homo sapiens
catcataaatttaaa

SEQ ID NO: 657632 - DNA, 15 bp, Homo sapiens
atcataaatttaaaa

SEQ ID NO: 657633 - DNA, 15 bp, Homo sapiens
tcataaatttaaaat

SEQ ID NO: 657634 - DNA, 15 bp, Homo sapiens
cataaatttaaaatg

SEQ ID NO: 657635 - DNA, 15 bp, Homo sapiens
ataaatttaaaatgt

SEQ ID NO: 657636 - DNA, 15 bp, Homo sapiens
taaatttaaaatgtc

SEQ ID NO: 657637 - DNA, 15 bp, Homo sapiens
aaatttaaaatgtcc

SEQ ID NO: 657638 - DNA, 15 bp, Homo sapiens
aatttaaaatgtcct

SEQ ID NO: 657639 - DNA, 15 bp, Homo sapiens
atttaaaatgtcctt

SEQ ID NO: 657640 - DNA, 15 bp, Homo sapiens
tttaaaatgtcctta

SEQ ID NO: 657641 - DNA, 15 bp, Homo sapiens
ttaaaatgtccttaa

SEQ ID NO: 657642 - DNA, 15 bp, Homo sapiens
taaaatgtccttaat

SEQ ID NO: 657643 - DNA, 15 bp, Homo sapiens
aaaatgtccttaata

SEQ ID NO: 657644 - DNA, 15 bp, Homo sapiens
aaatgtccttaatat

SEQ ID NO: 657645 - DNA, 15 bp, Homo sapiens
aatgtccttaatatt

SEQ ID NO: 657646 - DNA, 15 bp, Homo sapiens
atgtccttaatattt

SEQ ID NO: 657647 - DNA, 15 bp, Homo sapiens
tgtccttaatatttt

SEQ ID NO: 657648 - DNA, 15 bp, Homo sapiens
gtccttaatattttc

SEQ ID NO: 657649 - DNA, 15 bp, Homo sapiens
tccttaatattttct

SEQ ID NO: 657650 - DNA, 15 bp, Homo sapiens
ccttaatattttctt

SEQ ID NO: 657651 - DNA, 15 bp, Homo sapiens
cttaatattttctta

SEQ ID NO: 657652 - DNA, 15 bp, Homo sapiens
ttaatattttcttaa

SEQ ID NO: 657653 - DNA, 15 bp, Homo sapiens
taatattttcttaat

SEQ ID NO: 657654 - DNA, 15 bp, Homo sapiens
aatattttcttaata

SEQ ID NO: 657655 - DNA, 15 bp, Homo sapiens
atattttcttaatat

SEQ ID NO: 657656 - DNA, 15 bp, Homo sapiens
tattttcttaatatt

SEQ ID NO: 657657 - DNA, 15 bp, Homo sapiens
attttcttaatattt

SEQ ID NO: 657658 - DNA, 15 bp, Homo sapiens
ttttcttaatattta

SEQ ID NO: 657659 - DNA, 15 bp, Homo sapiens
tttcttaatatttaa

SEQ ID NO: 657660 - DNA, 15 bp, Homo sapiens
ttcttaatatttaat

SEQ ID NO: 657661 - DNA, 15 bp, Homo sapiens
tcttaatatttaatc

SEQ ID NO: 657662 - DNA, 15 bp, Homo sapiens
cttaatatttaatct

SEQ ID NO: 657663 - DNA, 15 bp, Homo sapiens
ttaatatttaatcta

SEQ ID NO: 657664 - DNA, 15 bp, Homo sapiens
taatatttaatctat

SEQ ID NO: 657665 - DNA, 15 bp, Homo sapiens
aatatttaatctata

SEQ ID NO: 657666 - DNA, 15 bp, Homo sapiens
atatttaatctataa

SEQ ID NO: 657667 - DNA, 15 bp, Homo sapiens
tatttaatctataaa

SEQ ID NO: 657668 - DNA, 15 bp, Homo sapiens
atttaatctataaag

SEQ ID NO: 657669 - DNA, 15 bp, Homo sapiens
tttaatctataaaga

SEQ ID NO: 657670 - DNA, 15 bp, Homo sapiens
ttaatctataaagag

SEQ ID NO: 657671 - DNA, 15 bp, Homo sapiens
taatctataaagagt

SEQ ID NO: 657672 - DNA, 15 bp, Homo sapiens
aatctataaagagta

SEQ ID NO: 657673 - DNA, 15 bp, Homo sapiens
atctataaagagtat

SEQ ID NO: 657674 - DNA, 15 bp, Homo sapiens
tctataaagagtatt

SEQ ID NO: 657675 - DNA, 15 bp, Homo sapiens
ctataaagagtattc

SEQ ID NO: 657676 - DNA, 15 bp, Homo sapiens
tataaagagtattcc

SEQ ID NO: 657677 - DNA, 15 bp, Homo sapiens
ataaagagtattcct

SEQ ID NO: 657678 - DNA, 15 bp, Homo sapiens
taaagagtattcctg

SEQ ID NO: 657679 - DNA, 15 bp, Homo sapiens
aaagagtattcctgg

SEQ ID NO: 657680 - DNA, 15 bp, Homo sapiens
aagagtattcctggc

SEQ ID NO: 657681 - DNA, 15 bp, Homo sapiens
agagtattcctggca

SEQ ID NO: 657682 - DNA, 15 bp, Homo sapiens
gagtattcctggcac

SEQ ID NO: 657683 - DNA, 15 bp, Homo sapiens
agtattcctggcaca

SEQ ID NO: 657684 - DNA, 15 bp, Homo sapiens
gtattcctggcacat

SEQ ID NO: 657685 - DNA, 15 bp, Homo sapiens
tattcctggcacata

SEQ ID NO: 657686 - DNA, 15 bp, Homo sapiens
attcctggcacatag

SEQ ID NO: 657687 - DNA, 15 bp, Homo sapiens
ttcctggcacatagt

SEQ ID NO: 657688 - DNA, 15 bp, Homo sapiens
tcctggcacatagta

SEQ ID NO: 657689 - DNA, 15 bp, Homo sapiens
cctggcacatagtag

SEQ ID NO: 657690 - DNA, 15 bp, Homo sapiens
ctggcacatagtaga

SEQ ID NO: 657691 - DNA, 15 bp, Homo sapiens
tggcacatagtagac

SEQ ID NO: 657692 - DNA, 15 bp, Homo sapiens
ggcacatagtagaca

SEQ ID NO: 657693 - DNA, 15 bp, Homo sapiens
gcacatagtagacag

SEQ ID NO: 657694 - DNA, 15 bp, Homo sapiens
cacatagtagacagt

SEQ ID NO: 657695 - DNA, 15 bp, Homo sapiens
acatagtagacagta

SEQ ID NO: 657696 - DNA, 15 bp, Homo sapiens
catagtagacagtaa

SEQ ID NO: 657697 - DNA, 15 bp, Homo sapiens
atagtagacagtaaa

SEQ ID NO: 657698 - DNA, 15 bp, Homo sapiens
tagtagacagtaaat

SEQ ID NO: 657699 - DNA, 15 bp, Homo sapiens
agtagacagtaaata

SEQ ID NO: 657700 - DNA, 15 bp, Homo sapiens
gtagacagtaaataa

SEQ ID NO: 657701 - DNA, 15 bp, Homo sapiens
tagacagtaaataac

SEQ ID NO: 657702 - DNA, 15 bp, Homo sapiens
agacagtaaataact

SEQ ID NO: 657703 - DNA, 15 bp, Homo sapiens
gacagtaaataactt

SEQ ID NO: 657704 - DNA, 15 bp, Homo sapiens
acagtaaataacttt

SEQ ID NO: 657705 - DNA, 15 bp, Homo sapiens
cagtaaataactttg

SEQ ID NO: 657706 - DNA, 15 bp, Homo sapiens
agtaaataactttgt

SEQ ID NO: 657707 - DNA, 15 bp, Homo sapiens
gtaaataactttgtt

SEQ ID NO: 657708 - DNA, 15 bp, Homo sapiens
taaataactttgttg

SEQ ID NO: 657709 - DNA, 15 bp, Homo sapiens
aaataactttgttga

SEQ ID NO: 657710 - DNA, 15 bp, Homo sapiens
aataactttgttgaa

SEQ ID NO: 657711 - DNA, 15 bp, Homo sapiens
ataactttgttgaat

SEQ ID NO: 657712 - DNA, 15 bp, Homo sapiens
taactttgttgaatg

SEQ ID NO: 657713 - DNA, 15 bp, Homo sapiens
aactttgttgaatga

SEQ ID NO: 657714 - DNA, 15 bp, Homo sapiens
actttgttgaatgaa

SEQ ID NO: 657715 - DNA, 15 bp, Homo sapiens
ctttgttgaatgaac

SEQ ID NO: 657716 - DNA, 15 bp, Homo sapiens
tttgttgaatgaact

SEQ ID NO: 657717 - DNA, 15 bp, Homo sapiens
ttgttgaatgaactt

SEQ ID NO: 657718 - DNA, 15 bp, Homo sapiens
tgttgaatgaactta

SEQ ID NO: 657719 - DNA, 15 bp, Homo sapiens
gttgaatgaacttac

SEQ ID NO: 657720 - DNA, 15 bp, Homo sapiens
ttgaatgaacttacg

SEQ ID NO: 657721 - DNA, 15 bp, Homo sapiens
tgaatgaacttacgc

SEQ ID NO: 657722 - DNA, 15 bp, Homo sapiens
gaatgaacttacgcg

SEQ ID NO: 657723 - DNA, 15 bp, Homo sapiens
aatgaacttacgcgt

SEQ ID NO: 657724 - DNA, 15 bp, Homo sapiens
atgaacttacgcgta

SEQ ID NO: 657725 - DNA, 15 bp, Homo sapiens
tgaacttacgcgtaa

SEQ ID NO: 657726 - DNA, 15 bp, Homo sapiens
gaacttacgcgtaaa

SEQ ID NO: 657727 - DNA, 15 bp, Homo sapiens
aacttacgcgtaaat

SEQ ID NO: 657728 - DNA, 15 bp, Homo sapiens
acttacgcgtaaata

SEQ ID NO: 657729 - DNA, 15 bp, Homo sapiens
cttacgcgtaaatac

SEQ ID NO: 657730 - DNA, 15 bp, Homo sapiens
ttacgcgtaaataca

SEQ ID NO: 657731 - DNA, 15 bp, Homo sapiens
tacgcgtaaatacat

SEQ ID NO: 657732 - DNA, 15 bp, Homo sapiens
acgcgtaaatacatc

SEQ ID NO: 657733 - DNA, 15 bp, Homo sapiens
cgcgtaaatacatca

SEQ ID NO: 657734 - DNA, 15 bp, Homo sapiens
gcgtaaatacatcaa

SEQ ID NO: 657735 - DNA, 15 bp, Homo sapiens
cgtaaatacatcaat

SEQ ID NO: 657736 - DNA, 15 bp, Homo sapiens
gtaaatacatcaatg

SEQ ID NO: 657737 - DNA, 15 bp, Homo sapiens
taaatacatcaatga

SEQ ID NO: 657738 - DNA, 15 bp, Homo sapiens
aaatacatcaatgac

SEQ ID NO: 657739 - DNA, 15 bp, Homo sapiens
aatacatcaatgact

SEQ ID NO: 657740 - DNA, 15 bp, Homo sapiens
atacatcaatgactg

SEQ ID NO: 657741 - DNA, 15 bp, Homo sapiens
tacatcaatgactga

SEQ ID NO: 657742 - DNA, 15 bp, Homo sapiens
acatcaatgactgac

SEQ ID NO: 657743 - DNA, 15 bp, Homo sapiens
catcaatgactgact

SEQ ID NO: 657744 - DNA, 15 bp, Homo sapiens
atcaatgactgactg

SEQ ID NO: 657745 - DNA, 15 bp, Homo sapiens
tcaatgactgactgc

SEQ ID NO: 657746 - DNA, 15 bp, Homo sapiens
caatgactgactgct

SEQ ID NO: 657747 - DNA, 15 bp, Homo sapiens
aatgactgactgctc

SEQ ID NO: 657748 - DNA, 15 bp, Homo sapiens
atgactgactgctca

SEQ ID NO: 657749 - DNA, 15 bp, Homo sapiens
tgactgactgctcat

SEQ ID NO: 657750 - DNA, 15 bp, Homo sapiens
gactgactgctcatg

SEQ ID NO: 657751 - DNA, 15 bp, Homo sapiens
actgactgctcatgg

SEQ ID NO: 657752 - DNA, 15 bp, Homo sapiens
ctgactgctcatgga

SEQ ID NO: 657753 - DNA, 15 bp, Homo sapiens
tgactgctcatggag

SEQ ID NO: 657754 - DNA, 15 bp, Homo sapiens
gactgctcatggagg

SEQ ID NO: 657755 - DNA, 15 bp, Homo sapiens
actgctcatggaggg

SEQ ID NO: 657756 - DNA, 15 bp, Homo sapiens
ctgctcatggagggt

SEQ ID NO: 657757 - DNA, 15 bp, Homo sapiens
tgctcatggagggtg

SEQ ID NO: 657758 - DNA, 15 bp, Homo sapiens
gctcatggagggtgc

SEQ ID NO: 657759 - DNA, 15 bp, Homo sapiens
ctcatggagggtgcc

SEQ ID NO: 657760 - DNA, 15 bp, Homo sapiens
tcatggagggtgccc

SEQ ID NO: 657761 - DNA, 15 bp, Homo sapiens
catggagggtgcccc

SEQ ID NO: 657762 - DNA, 15 bp, Homo sapiens
atggagggtgccccc

SEQ ID NO: 657763 - DNA, 15 bp, Homo sapiens
tggagggtgccccct

SEQ ID NO: 657764 - DNA, 15 bp, Homo sapiens
ggagggtgccccctt

SEQ ID NO: 657765 - DNA, 15 bp, Homo sapiens
gagggtgcccccttt

SEQ ID NO: 657766 - DNA, 15 bp, Homo sapiens
agggtgccccctttt

SEQ ID NO: 657767 - DNA, 15 bp, Homo sapiens
gggtgcccccttttt

SEQ ID NO: 657768 - DNA, 15 bp, Homo sapiens
ggtgccccctttttg

SEQ ID NO: 657769 - DNA, 15 bp, Homo sapiens
gtgccccctttttgc

SEQ ID NO: 657770 - DNA, 15 bp, Homo sapiens
tgccccctttttgcc

SEQ ID NO: 657771 - DNA, 15 bp, Homo sapiens
gccccctttttgccc

SEQ ID NO: 657772 - DNA, 15 bp, Homo sapiens
ccccctttttgccca

SEQ ID NO: 657773 - DNA, 15 bp, Homo sapiens
cccctttttgcccat

SEQ ID NO: 657774 - DNA, 15 bp, Homo sapiens
ccctttttgcccatg

SEQ ID NO: 657775 - DNA, 15 bp, Homo sapiens
cctttttgcccatga

SEQ ID NO: 657776 - DNA, 15 bp, Homo sapiens
ctttttgcccatgaa

SEQ ID NO: 657777 - DNA, 15 bp, Homo sapiens
tttttgcccatgaag

SEQ ID NO: 657778 - DNA, 15 bp, Homo sapiens
ttttgcccatgaagt

SEQ ID NO: 657779 - DNA, 15 bp, Homo sapiens
tttgcccatgaagtt

SEQ ID NO: 657780 - DNA, 15 bp, Homo sapiens
ttgcccatgaagttg

SEQ ID NO: 657781 - DNA, 15 bp, Homo sapiens
tgcccatgaagttga

SEQ ID NO: 657782 - DNA, 15 bp, Homo sapiens
gcccatgaagttgag

SEQ ID NO: 657783 - DNA, 15 bp, Homo sapiens
cccatgaagttgagg

SEQ ID NO: 657784 - DNA, 15 bp, Homo sapiens
ccatgaagttgaggt

SEQ ID NO: 657785 - DNA, 15 bp, Homo sapiens
catgaagttgaggtg

SEQ ID NO: 657786 - DNA, 15 bp, Homo sapiens
atgaagttgaggtgg

SEQ ID NO: 657787 - DNA, 15 bp, Homo sapiens
tgaagttgaggtggt

SEQ ID NO: 657788 - DNA, 15 bp, Homo sapiens
gaagttgaggtggta

SEQ ID NO: 657789 - DNA, 15 bp, Homo sapiens
aagttgaggtggtat

SEQ ID NO: 657790 - DNA, 15 bp, Homo sapiens
agttgaggtggtatt

SEQ ID NO: 657791 - DNA, 15 bp, Homo sapiens
gttgaggtggtattg

SEQ ID NO: 657792 - DNA, 15 bp, Homo sapiens
ttgaggtggtattgg

SEQ ID NO: 657793 - DNA, 15 bp, Homo sapiens
tgaggtggtattggg

SEQ ID NO: 657794 - DNA, 15 bp, Homo sapiens
gaggtggtattggga

SEQ ID NO: 657795 - DNA, 15 bp, Homo sapiens
aggtggtattgggag

SEQ ID NO: 657796 - DNA, 15 bp, Homo sapiens
ggtggtattgggaga

SEQ ID NO: 657797 - DNA, 15 bp, Homo sapiens
gtggtattgggagaa

SEQ ID NO: 657798 - DNA, 15 bp, Homo sapiens
tggtattgggagaat

SEQ ID NO: 657799 - DNA, 15 bp, Homo sapiens
ggtattgggagaatg

SEQ ID NO: 657800 - DNA, 15 bp, Homo sapiens
gtattgggagaatgc

SEQ ID NO: 657801 - DNA, 15 bp, Homo sapiens
tattgggagaatgct

SEQ ID NO: 657802 - DNA, 15 bp, Homo sapiens
attgggagaatgctt

SEQ ID NO: 657803 - DNA, 15 bp, Homo sapiens
ttgggagaatgcttt

SEQ ID NO: 657804 - DNA, 15 bp, Homo sapiens
tgggagaatgctttc

SEQ ID NO: 657805 - DNA, 15 bp, Homo sapiens
gggagaatgctttca

SEQ ID NO: 657806 - DNA, 15 bp, Homo sapiens
ggagaatgctttcat

SEQ ID NO: 657807 - DNA, 15 bp, Homo sapiens
gagaatgctttcatt

SEQ ID NO: 657808 - DNA, 15 bp, Homo sapiens
agaatgctttcattt

SEQ ID NO: 657809 - DNA, 15 bp, Homo sapiens
gaatgctttcatttc

SEQ ID NO: 657810 - DNA, 15 bp, Homo sapiens
aatgctttcatttcc

SEQ ID NO: 657811 - DNA, 15 bp, Homo sapiens
atgctttcatttcct

SEQ ID NO: 657812 - DNA, 15 bp, Homo sapiens
tgctttcatttcctg

SEQ ID NO: 657813 - DNA, 15 bp, Homo sapiens
gctttcatttcctga

SEQ ID NO: 657814 - DNA, 15 bp, Homo sapiens
ctttcatttcctgat

SEQ ID NO: 657815 - DNA, 15 bp, Homo sapiens
tttcatttcctgatc

SEQ ID NO: 657816 - DNA, 15 bp, Homo sapiens
ttcatttcctgatcc

SEQ ID NO: 657817 - DNA, 15 bp, Homo sapiens
tcatttcctgatcct

SEQ ID NO: 657818 - DNA, 15 bp, Homo sapiens
catttcctgatccta

SEQ ID NO: 657819 - DNA, 15 bp, Homo sapiens
atttcctgatcctaa

SEQ ID NO: 657820 - DNA, 15 bp, Homo sapiens
tttcctgatcctaac

SEQ ID NO: 657821 - DNA, 15 bp, Homo sapiens
ttcctgatcctaact

SEQ ID NO: 657822 - DNA, 15 bp, Homo sapiens
tcctgatcctaactc

SEQ ID NO: 657823 - DNA, 15 bp, Homo sapiens
cctgatcctaactct

SEQ ID NO: 657824 - DNA, 15 bp, Homo sapiens
ctgatcctaactctc

SEQ ID NO: 657825 - DNA, 15 bp, Homo sapiens
tgatcctaactctcc

SEQ ID NO: 657826 - DNA, 15 bp, Homo sapiens
gatcctaactctcct

SEQ ID NO: 657827 - DNA, 15 bp, Homo sapiens
atcctaactctcctg

SEQ ID NO: 657828 - DNA, 15 bp, Homo sapiens
tcctaactctcctgt

SEQ ID NO: 657829 - DNA, 15 bp, Homo sapiens
cctaactctcctgtt

SEQ ID NO: 657830 - DNA, 15 bp, Homo sapiens
ctaactctcctgttg

SEQ ID NO: 657831 - DNA, 15 bp, Homo sapiens
taactctcctgttgc

SEQ ID NO: 657832 - DNA, 15 bp, Homo sapiens
aactctcctgttgca

SEQ ID NO: 657833 - DNA, 15 bp, Homo sapiens
actctcctgttgcag

SEQ ID NO: 657834 - DNA, 15 bp, Homo sapiens
ctctcctgttgcagt

SEQ ID NO: 657835 - DNA, 15 bp, Homo sapiens
tctcctgttgcagtc

SEQ ID NO: 657836 - DNA, 15 bp, Homo sapiens
ctcctgttgcagtct

SEQ ID NO: 657837 - DNA, 15 bp, Homo sapiens
tcctgttgcagtcta

SEQ ID NO: 657838 - DNA, 15 bp, Homo sapiens
cctgttgcagtctag

SEQ ID NO: 657839 - DNA, 15 bp, Homo sapiens
ctgttgcagtctagt

SEQ ID NO: 657840 - DNA, 15 bp, Homo sapiens
tgttgcagtctagta

SEQ ID NO: 657841 - DNA, 15 bp, Homo sapiens
gttgcagtctagtat

SEQ ID NO: 657842 - DNA, 15 bp, Homo sapiens
ttgcagtctagtatt

SEQ ID NO: 657843 - DNA, 15 bp, Homo sapiens
tgcagtctagtattg

SEQ ID NO: 657844 - DNA, 15 bp, Homo sapiens
gcagtctagtattgt

SEQ ID NO: 657845 - DNA, 15 bp, Homo sapiens
cagtctagtattgtc

SEQ ID NO: 657846 - DNA, 15 bp, Homo sapiens
agtctagtattgtca

SEQ ID NO: 657847 - DNA, 15 bp, Homo sapiens
gtctagtattgtcaa

SEQ ID NO: 657848 - DNA, 15 bp, Homo sapiens
tctagtattgtcaat

SEQ ID NO: 657849 - DNA, 15 bp, Homo sapiens
ctagtattgtcaata

SEQ ID NO: 657850 - DNA, 15 bp, Homo sapiens
tagtattgtcaatac

SEQ ID NO: 657851 - DNA, 15 bp, Homo sapiens
agtattgtcaataca

SEQ ID NO: 657852 - DNA, 15 bp, Homo sapiens
gtattgtcaatacaa

SEQ ID NO: 657853 - DNA, 15 bp, Homo sapiens
tattgtcaatacaaa

SEQ ID NO: 657854 - DNA, 15 bp, Homo sapiens
attgtcaatacaaag

SEQ ID NO: 657855 - DNA, 15 bp, Homo sapiens
ttgtcaatacaaagg

SEQ ID NO: 657856 - DNA, 15 bp, Homo sapiens
tgtcaatacaaaggt

SEQ ID NO: 657857 - DNA, 15 bp, Homo sapiens
gtcaatacaaaggtg

SEQ ID NO: 657858 - DNA, 15 bp, Homo sapiens
tcaatacaaaggtgt

SEQ ID NO: 657859 - DNA, 15 bp, Homo sapiens
caatacaaaggtgtc

SEQ ID NO: 657860 - DNA, 15 bp, Homo sapiens
aatacaaaggtgtca

SEQ ID NO: 657861 - DNA, 15 bp, Homo sapiens
atacaaaggtgtcat

SEQ ID NO: 657862 - DNA, 15 bp, Homo sapiens
tacaaaggtgtcatc

SEQ ID NO: 657863 - DNA, 15 bp, Homo sapiens
acaaaggtgtcatca

SEQ ID NO: 657864 - DNA, 15 bp, Homo sapiens
caaaggtgtcatcat

SEQ ID NO: 657865 - DNA, 15 bp, Homo sapiens
aaaggtgtcatcatt

SEQ ID NO: 657866 - DNA, 15 bp, Homo sapiens
aaggtgtcatcatta

SEQ ID NO: 657867 - DNA, 15 bp, Homo sapiens
aggtgtcatcattac

SEQ ID NO: 657868 - DNA, 15 bp, Homo sapiens
ggtgtcatcattacc

SEQ ID NO: 657869 - DNA, 15 bp, Homo sapiens
gtgtcatcattaccg

SEQ ID NO: 657870 - DNA, 15 bp, Homo sapiens
tgtcatcattaccgt

SEQ ID NO: 657871 - DNA, 15 bp, Homo sapiens
gtcatcattaccgtt

SEQ ID NO: 657872 - DNA, 15 bp, Homo sapiens
tcatcattaccgtta

SEQ ID NO: 657873 - DNA, 15 bp, Homo sapiens
catcattaccgttaa

SEQ ID NO: 657874 - DNA, 15 bp, Homo sapiens
atcattaccgttaat

SEQ ID NO: 657875 - DNA, 15 bp, Homo sapiens
tcattaccgttaatc

SEQ ID NO: 657876 - DNA, 15 bp, Homo sapiens
cattaccgttaatcc

SEQ ID NO: 657877 - DNA, 15 bp, Homo sapiens
attaccgttaatccc

SEQ ID NO: 657878 - DNA, 15 bp, Homo sapiens
ttaccgttaatccca

SEQ ID NO: 657879 - DNA, 15 bp, Homo sapiens
taccgttaatcccaa

SEQ ID NO: 657880 - DNA, 15 bp, Homo sapiens
accgttaatcccaaa

SEQ ID NO: 657881 - DNA, 15 bp, Homo sapiens
ccgttaatcccaaac

SEQ ID NO: 657882 - DNA, 15 bp, Homo sapiens
cgttaatcccaaact

SEQ ID NO: 657883 - DNA, 15 bp, Homo sapiens
gttaatcccaaactg

SEQ ID NO: 657884 - DNA, 15 bp, Homo sapiens
ttaatcccaaactga

SEQ ID NO: 657885 - DNA, 15 bp, Homo sapiens
taatcccaaactgat

SEQ ID NO: 657886 - DNA, 15 bp, Homo sapiens
aatcccaaactgatg

SEQ ID NO: 657887 - DNA, 15 bp, Homo sapiens
atcccaaactgatgt

SEQ ID NO: 657888 - DNA, 15 bp, Homo sapiens
tcccaaactgatgta

SEQ ID NO: 657889 - DNA, 15 bp, Homo sapiens
cccaaactgatgtaa

SEQ ID NO: 657890 - DNA, 15 bp, Homo sapiens
ccaaactgatgtaat

SEQ ID NO: 657891 - DNA, 15 bp, Homo sapiens
caaactgatgtaatc

SEQ ID NO: 657892 - DNA, 15 bp, Homo sapiens
aaactgatgtaatct

SEQ ID NO: 657893 - DNA, 15 bp, Homo sapiens
aactgatgtaatctg

SEQ ID NO: 657894 - DNA, 15 bp, Homo sapiens
actgatgtaatctga

SEQ ID NO: 657895 - DNA, 15 bp, Homo sapiens
ctgatgtaatctgaa

SEQ ID NO: 657896 - DNA, 15 bp, Homo sapiens
tgatgtaatctgaac

SEQ ID NO: 657897 - DNA, 15 bp, Homo sapiens
gatgtaatctgaact

SEQ ID NO: 657898 - DNA, 15 bp, Homo sapiens
atgtaatctgaactt

SEQ ID NO: 657899 - DNA, 15 bp, Homo sapiens
tgtaatctgaacttt

SEQ ID NO: 657900 - DNA, 15 bp, Homo sapiens
gtaatctgaactttt

SEQ ID NO: 657901 - DNA, 15 bp, Homo sapiens
taatctgaacttttg

SEQ ID NO: 657902 - DNA, 15 bp, Homo sapiens
aatctgaacttttgc

SEQ ID NO: 657903 - DNA, 15 bp, Homo sapiens
atctgaacttttgct

SEQ ID NO: 657904 - DNA, 15 bp, Homo sapiens
tctgaacttttgctc

SEQ ID NO: 657905 - DNA, 15 bp, Homo sapiens
ctgaacttttgctct

SEQ ID NO: 657906 - DNA, 15 bp, Homo sapiens
tgaacttttgctctg

SEQ ID NO: 657907 - DNA, 15 bp, Homo sapiens
gaacttttgctctgt

SEQ ID NO: 657908 - DNA, 15 bp, Homo sapiens
aacttttgctctgtg

SEQ ID NO: 657909 - DNA, 15 bp, Homo sapiens
acttttgctctgtgt

SEQ ID NO: 657910 - DNA, 15 bp, Homo sapiens
cttttgctctgtgta

SEQ ID NO: 657911 - DNA, 15 bp, Homo sapiens
ttttgctctgtgtaa

SEQ ID NO: 657912 - DNA, 15 bp, Homo sapiens
tttgctctgtgtaat

SEQ ID NO: 657913 - DNA, 15 bp, Homo sapiens
ttgctctgtgtaatt

SEQ ID NO: 657914 - DNA, 15 bp, Homo sapiens
tgctctgtgtaatta

SEQ ID NO: 657915 - DNA, 15 bp, Homo sapiens
gctctgtgtaattac

SEQ ID NO: 657916 - DNA, 15 bp, Homo sapiens
ctctgtgtaattaca

SEQ ID NO: 657917 - DNA, 15 bp, Homo sapiens
tctgtgtaattacag

SEQ ID NO: 657918 - DNA, 15 bp, Homo sapiens
ctgtgtaattacaga

SEQ ID NO: 657919 - DNA, 15 bp, Homo sapiens
tgtgtaattacagat

SEQ ID NO: 657920 - DNA, 15 bp, Homo sapiens
gtgtaattacagata

SEQ ID NO: 657921 - DNA, 15 bp, Homo sapiens
tgtaattacagatat

SEQ ID NO: 657922 - DNA, 15 bp, Homo sapiens
gtaattacagatatg

SEQ ID NO: 657923 - DNA, 15 bp, Homo sapiens
taattacagatatgg

SEQ ID NO: 657924 - DNA, 15 bp, Homo sapiens
aattacagatatggg

SEQ ID NO: 657925 - DNA, 15 bp, Homo sapiens
attacagatatgggg

SEQ ID NO: 657926 - DNA, 15 bp, Homo sapiens
ttacagatatggggt

SEQ ID NO: 657927 - DNA, 15 bp, Homo sapiens
tacagatatggggta

SEQ ID NO: 657928 - DNA, 15 bp, Homo sapiens
acagatatggggtac

SEQ ID NO: 657929 - DNA, 15 bp, Homo sapiens
cagatatggggtaca

SEQ ID NO: 657930 - DNA, 15 bp, Homo sapiens
agatatggggtacat

SEQ ID NO: 657931 - DNA, 15 bp, Homo sapiens
gatatggggtacatt

SEQ ID NO: 657932 - DNA, 15 bp, Homo sapiens
atatggggtacattt

SEQ ID NO: 657933 - DNA, 15 bp, Homo sapiens
tatggggtacatttc

SEQ ID NO: 657934 - DNA, 15 bp, Homo sapiens
atggggtacatttcc

SEQ ID NO: 657935 - DNA, 15 bp, Homo sapiens
tggggtacatttcct

SEQ ID NO: 657936 - DNA, 15 bp, Homo sapiens
ggggtacatttccta

SEQ ID NO: 657937 - DNA, 15 bp, Homo sapiens
gggtacatttcctag

SEQ ID NO: 657938 - DNA, 15 bp, Homo sapiens
ggtacatttcctaga

SEQ ID NO: 657939 - DNA, 15 bp, Homo sapiens
gtacatttcctagaa

SEQ ID NO: 657940 - DNA, 15 bp, Homo sapiens
tacatttcctagaaa

SEQ ID NO: 657941 - DNA, 15 bp, Homo sapiens
acatttcctagaaaa

SEQ ID NO: 657942 - DNA, 15 bp, Homo sapiens
catttcctagaaaag

SEQ ID NO: 657943 - DNA, 15 bp, Homo sapiens
atttcctagaaaaga

SEQ ID NO: 657944 - DNA, 15 bp, Homo sapiens
tttcctagaaaagaa

SEQ ID NO: 657945 - DNA, 15 bp, Homo sapiens
ttcctagaaaagaac

SEQ ID NO: 657946 - DNA, 15 bp, Homo sapiens
tcctagaaaagaact

SEQ ID NO: 657947 - DNA, 15 bp, Homo sapiens
cctagaaaagaactg

SEQ ID NO: 657948 - DNA, 15 bp, Homo sapiens
ctagaaaagaactgc

SEQ ID NO: 657949 - DNA, 15 bp, Homo sapiens
tagaaaagaactgcc

SEQ ID NO: 657950 - DNA, 15 bp, Homo sapiens
agaaaagaactgccc

SEQ ID NO: 657951 - DNA, 15 bp, Homo sapiens
gaaaagaactgccct

SEQ ID NO: 657952 - DNA, 15 bp, Homo sapiens
aaaagaactgccctg

SEQ ID NO: 657953 - DNA, 15 bp, Homo sapiens
aaagaactgccctgg

SEQ ID NO: 657954 - DNA, 15 bp, Homo sapiens
aagaactgccctgga

SEQ ID NO: 657955 - DNA, 15 bp, Homo sapiens
agaactgccctggac

SEQ ID NO: 657956 - DNA, 15 bp, Homo sapiens
gaactgccctggaca

SEQ ID NO: 657957 - DNA, 15 bp, Homo sapiens
aactgccctggacaa

SEQ ID NO: 657958 - DNA, 15 bp, Homo sapiens
actgccctggacaaa

SEQ ID NO: 657959 - DNA, 15 bp, Homo sapiens
ctgccctggacaaaa

SEQ ID NO: 657960 - DNA, 15 bp, Homo sapiens
tgccctggacaaaac

SEQ ID NO: 657961 - DNA, 15 bp, Homo sapiens
gccctggacaaaact

SEQ ID NO: 657962 - DNA, 15 bp, Homo sapiens
ccctggacaaaactg

SEQ ID NO: 657963 - DNA, 15 bp, Homo sapiens
cctggacaaaactgt

SEQ ID NO: 657964 - DNA, 15 bp, Homo sapiens
ctggacaaaactgtt

SEQ ID NO: 657965 - DNA, 15 bp, Homo sapiens
tggacaaaactgtta

SEQ ID NO: 657966 - DNA, 15 bp, Homo sapiens
ggacaaaactgttag

SEQ ID NO: 657967 - DNA, 15 bp, Homo sapiens
gacaaaactgttagg

SEQ ID NO: 657968 - DNA, 15 bp, Homo sapiens
acaaaactgttaggt

SEQ ID NO: 657969 - DNA, 15 bp, Homo sapiens
caaaactgttaggta

SEQ ID NO: 657970 - DNA, 15 bp, Homo sapiens
aaaactgttaggtag

SEQ ID NO: 657971 - DNA, 15 bp, Homo sapiens
aaactgttaggtaga

SEQ ID NO: 657972 - DNA, 15 bp, Homo sapiens
aactgttaggtagaa

SEQ ID NO: 657973 - DNA, 15 bp, Homo sapiens
actgttaggtagaaa

SEQ ID NO: 657974 - DNA, 15 bp, Homo sapiens
ctgttaggtagaaaa

SEQ ID NO: 657975 - DNA, 15 bp, Homo sapiens
tgttaggtagaaaaa

SEQ ID NO: 657976 - DNA, 15 bp, Homo sapiens
gttaggtagaaaaaa

SEQ ID NO: 657977 - DNA, 15 bp, Homo sapiens
ttaggtagaaaaaaa

SEQ ID NO: 657978 - DNA, 15 bp, Homo sapiens
taggtagaaaaaaaa

SEQ ID NO: 657979 - DNA, 15 bp, Homo sapiens
aggtagaaaaaaaaa

SEQ ID NO: 657980 - DNA, 15 bp, Homo sapiens
ggtagaaaaaaaaaa

SEQ ID NO: 657981 - DNA, 15 bp, Homo sapiens
gtagaaaaaaaaaaa

SEQ ID NO: 657982 - DNA, 15 bp, Homo sapiens
tagaaaaaaaaaaaa

SEQ ID NO: 657983 - DNA, 15 bp, Homo sapiens
agaaaaaaaaaaaag

SEQ ID NO: 657984 - DNA, 15 bp, Homo sapiens
gaaaaaaaaaaaagg

SEQ ID NO: 657985 - DNA, 15 bp, Homo sapiens
aaaaaaaaaaaagga

SEQ ID NO: 657986 - DNA, 15 bp, Homo sapiens
aaaaaaaaaaaggaa

SEQ ID NO: 657987 - DNA, 15 bp, Homo sapiens
aaaaaaaaaaggaaa

SEQ ID NO: 657988 - DNA, 15 bp, Homo sapiens
aaaaaaaaaggaaat

SEQ ID NO: 657989 - DNA, 15 bp, Homo sapiens
aaaaaaaaggaaatt

SEQ ID NO: 657990 - DNA, 15 bp, Homo sapiens
aaaaaaaggaaattg

SEQ ID NO: 657991 - DNA, 15 bp, Homo sapiens
aaaaaaggaaattgg

SEQ ID NO: 657992 - DNA, 15 bp, Homo sapiens
aaaaaggaaattggg

SEQ ID NO: 657993 - DNA, 15 bp, Homo sapiens
aaaaggaaattgggt

SEQ ID NO: 657994 - DNA, 15 bp, Homo sapiens
aaaggaaattgggtg

SEQ ID NO: 657995 - DNA, 15 bp, Homo sapiens
aaggaaattgggtgt

SEQ ID NO: 657996 - DNA, 15 bp, Homo sapiens
aggaaattgggtgtc

SEQ ID NO: 657997 - DNA, 15 bp, Homo sapiens
ggaaattgggtgtct

SEQ ID NO: 657998 - DNA, 15 bp, Homo sapiens
gaaattgggtgtctt

SEQ ID NO: 657999 - DNA, 15 bp, Homo sapiens
aaattgggtgtcttt

SEQ ID NO: 658000 - DNA, 15 bp, Homo sapiens
aattgggtgtctttt

SEQ ID NO: 658001 - DNA, 15 bp, Homo sapiens
attgggtgtcttttt

SEQ ID NO: 658002 - DNA, 15 bp, Homo sapiens
ttgggtgtctttttt

SEQ ID NO: 658003 - DNA, 15 bp, Homo sapiens
tgggtgtcttttttc

SEQ ID NO: 658004 - DNA, 15 bp, Homo sapiens
gggtgtcttttttcc

SEQ ID NO: 658005 - DNA, 15 bp, Homo sapiens
ggtgtcttttttcca

SEQ ID NO: 658006 - DNA, 15 bp, Homo sapiens
gtgtcttttttccat

SEQ ID NO: 658007 - DNA, 15 bp, Homo sapiens
tgtcttttttccata

SEQ ID NO: 658008 - DNA, 15 bp, Homo sapiens
gtcttttttccatat

SEQ ID NO: 658009 - DNA, 15 bp, Homo sapiens
tcttttttccatatt

SEQ ID NO: 658010 - DNA, 15 bp, Homo sapiens
cttttttccatattg

SEQ ID NO: 658011 - DNA, 15 bp, Homo sapiens
ttttttccatattgt

SEQ ID NO: 658012 - DNA, 15 bp, Homo sapiens
tttttccatattgtc

SEQ ID NO: 658013 - DNA, 15 bp, Homo sapiens
ttttccatattgtca

SEQ ID NO: 658014 - DNA, 15 bp, Homo sapiens
tttccatattgtcaa

SEQ ID NO: 658015 - DNA, 15 bp, Homo sapiens
ttccatattgtcaag

SEQ ID NO: 658016 - DNA, 15 bp, Homo sapiens
tccatattgtcaaga

SEQ ID NO: 658017 - DNA, 15 bp, Homo sapiens
ccatattgtcaagag

SEQ ID NO: 658018 - DNA, 15 bp, Homo sapiens
catattgtcaagagc

SEQ ID NO: 658019 - DNA, 15 bp, Homo sapiens
atattgtcaagagca

SEQ ID NO: 658020 - DNA, 15 bp, Homo sapiens
tattgtcaagagcag

SEQ ID NO: 658021 - DNA, 15 bp, Homo sapiens
attgtcaagagcaga

SEQ ID NO: 658022 - DNA, 15 bp, Homo sapiens
ttgtcaagagcagag

SEQ ID NO: 658023 - DNA, 15 bp, Homo sapiens
tgtcaagagcagaga

SEQ ID NO: 658024 - DNA, 15 bp, Homo sapiens
gtcaagagcagagag

SEQ ID NO: 658025 - DNA, 15 bp, Homo sapiens
tcaagagcagagagg

SEQ ID NO: 658026 - DNA, 15 bp, Homo sapiens
caagagcagagagga

SEQ ID NO: 658027 - DNA, 15 bp, Homo sapiens
aagagcagagaggac

SEQ ID NO: 658028 - DNA, 15 bp, Homo sapiens
agagcagagaggacc

SEQ ID NO: 658029 - DNA, 15 bp, Homo sapiens
gagcagagaggacct

SEQ ID NO: 658030 - DNA, 15 bp, Homo sapiens
agcagagaggacctc

SEQ ID NO: 658031 - DNA, 15 bp, Homo sapiens
gcagagaggacctca

SEQ ID NO: 658032 - DNA, 15 bp, Homo sapiens
cagagaggacctcac

SEQ ID NO: 658033 - DNA, 15 bp, Homo sapiens
agagaggacctcact

SEQ ID NO: 658034 - DNA, 15 bp, Homo sapiens
gagaggacctcactc

SEQ ID NO: 658035 - DNA, 15 bp, Homo sapiens
agaggacctcactct

SEQ ID NO: 658036 - DNA, 15 bp, Homo sapiens
gaggacctcactctg

SEQ ID NO: 658037 - DNA, 15 bp, Homo sapiens
aggacctcactctgc

SEQ ID NO: 658038 - DNA, 15 bp, Homo sapiens
ggacctcactctgcc

SEQ ID NO: 658039 - DNA, 15 bp, Homo sapiens
gacctcactctgccc

SEQ ID NO: 658040 - DNA, 15 bp, Homo sapiens
acctcactctgcccc

SEQ ID NO: 658041 - DNA, 15 bp, Homo sapiens
cctcactctgccccc

SEQ ID NO: 658042 - DNA, 15 bp, Homo sapiens
ctcactctgccccct

SEQ ID NO: 658043 - DNA, 15 bp, Homo sapiens
tcactctgccccctc

SEQ ID NO: 658044 - DNA, 15 bp, Homo sapiens
cactctgccccctcc

SEQ ID NO: 658045 - DNA, 15 bp, Homo sapiens
actctgccccctccc

SEQ ID NO: 658046 - DNA, 15 bp, Homo sapiens
ctctgccccctccct

SEQ ID NO: 658047 - DNA, 15 bp, Homo sapiens
tctgccccctccctc

SEQ ID NO: 658048 - DNA, 15 bp, Homo sapiens
ctgccccctccctct

SEQ ID NO: 658049 - DNA, 15 bp, Homo sapiens
tgccccctccctctt

SEQ ID NO: 658050 - DNA, 15 bp, Homo sapiens
gccccctccctcttg

SEQ ID NO: 658051 - DNA, 15 bp, Homo sapiens
ccccctccctcttga

SEQ ID NO: 658052 - DNA, 15 bp, Homo sapiens
cccctccctcttgac

SEQ ID NO: 658053 - DNA, 15 bp, Homo sapiens
ccctccctcttgact

SEQ ID NO: 658054 - DNA, 15 bp, Homo sapiens
cctccctcttgactc

SEQ ID NO: 658055 - DNA, 15 bp, Homo sapiens
ctccctcttgactcc

SEQ ID NO: 658056 - DNA, 15 bp, Homo sapiens
tccctcttgactcct

SEQ ID NO: 658057 - DNA, 15 bp, Homo sapiens
ccctcttgactcctc

SEQ ID NO: 658058 - DNA, 15 bp, Homo sapiens
cctcttgactcctca

SEQ ID NO: 658059 - DNA, 15 bp, Homo sapiens
ctcttgactcctcac

SEQ ID NO: 658060 - DNA, 15 bp, Homo sapiens
tcttgactcctcaca

SEQ ID NO: 658061 - DNA, 15 bp, Homo sapiens
cttgactcctcacac

SEQ ID NO: 658062 - DNA, 15 bp, Homo sapiens
ttgactcctcacacc

SEQ ID NO: 658063 - DNA, 15 bp, Homo sapiens
tgactcctcacaccc

SEQ ID NO: 658064 - DNA, 15 bp, Homo sapiens
gactcctcacaccca

SEQ ID NO: 658065 - DNA, 15 bp, Homo sapiens
actcctcacacccaa

SEQ ID NO: 658066 - DNA, 15 bp, Homo sapiens
ctcctcacacccaat

SEQ ID NO: 658067 - DNA, 15 bp, Homo sapiens
tcctcacacccaata

SEQ ID NO: 658068 - DNA, 15 bp, Homo sapiens
cctcacacccaatag

SEQ ID NO: 658069 - DNA, 15 bp, Homo sapiens
ctcacacccaatagc

SEQ ID NO: 658070 - DNA, 15 bp, Homo sapiens
tcacacccaatagca

SEQ ID NO: 658071 - DNA, 15 bp, Homo sapiens
cacacccaatagcag

SEQ ID NO: 658072 - DNA, 15 bp, Homo sapiens
acacccaatagcagc

SEQ ID NO: 658073 - DNA, 15 bp, Homo sapiens
cacccaatagcagca

SEQ ID NO: 658074 - DNA, 15 bp, Homo sapiens
acccaatagcagcac

SEQ ID NO: 658075 - DNA, 15 bp, Homo sapiens
cccaatagcagcacc

SEQ ID NO: 658076 - DNA, 15 bp, Homo sapiens
ccaatagcagcacca

SEQ ID NO: 658077 - DNA, 15 bp, Homo sapiens
caatagcagcaccaa

SEQ ID NO: 658078 - DNA, 15 bp, Homo sapiens
aatagcagcaccaat

SEQ ID NO: 658079 - DNA, 15 bp, Homo sapiens
atagcagcaccaatg

SEQ ID NO: 658080 - DNA, 15 bp, Homo sapiens
tagcagcaccaatgc

SEQ ID NO: 658081 - DNA, 15 bp, Homo sapiens
agcagcaccaatgcc

SEQ ID NO: 658082 - DNA, 15 bp, Homo sapiens
gcagcaccaatgcct

SEQ ID NO: 658083 - DNA, 15 bp, Homo sapiens
cagcaccaatgcctg

SEQ ID NO: 658084 - DNA, 15 bp, Homo sapiens
agcaccaatgcctgc

SEQ ID NO: 658085 - DNA, 15 bp, Homo sapiens
gcaccaatgcctgcc

SEQ ID NO: 658086 - DNA, 15 bp, Homo sapiens
caccaatgcctgcca

SEQ ID NO: 658087 - DNA, 15 bp, Homo sapiens
accaatgcctgccac

SEQ ID NO: 658088 - DNA, 15 bp, Homo sapiens
ccaatgcctgccaca

SEQ ID NO: 658089 - DNA, 15 bp, Homo sapiens
caatgcctgccacag

SEQ ID NO: 658090 - DNA, 15 bp, Homo sapiens
aatgcctgccacaga

SEQ ID NO: 658091 - DNA, 15 bp, Homo sapiens
atgcctgccacagaa

SEQ ID NO: 658092 - DNA, 15 bp, Homo sapiens
tgcctgccacagaat

SEQ ID NO: 658093 - DNA, 15 bp, Homo sapiens
gcctgccacagaatt

SEQ ID NO: 658094 - DNA, 15 bp, Homo sapiens
cctgccacagaatta

SEQ ID NO: 658095 - DNA, 15 bp, Homo sapiens
ctgccacagaattat

SEQ ID NO: 658096 - DNA, 15 bp, Homo sapiens
tgccacagaattatg

SEQ ID NO: 658097 - DNA, 15 bp, Homo sapiens
gccacagaattatga

SEQ ID NO: 658098 - DNA, 15 bp, Homo sapiens
ccacagaattatgag

SEQ ID NO: 658099 - DNA, 15 bp, Homo sapiens
cacagaattatgagc

SEQ ID NO: 658100 - DNA, 15 bp, Homo sapiens
acagaattatgagca

SEQ ID NO: 658101 - DNA, 15 bp, Homo sapiens
cagaattatgagcac

SEQ ID NO: 658102 - DNA, 15 bp, Homo sapiens
agaattatgagcact

SEQ ID NO: 658103 - DNA, 15 bp, Homo sapiens
gaattatgagcactt

SEQ ID NO: 658104 - DNA, 15 bp, Homo sapiens
aattatgagcacttc

SEQ ID NO: 658105 - DNA, 15 bp, Homo sapiens
attatgagcacttca

SEQ ID NO: 658106 - DNA, 15 bp, Homo sapiens
ttatgagcacttcag

SEQ ID NO: 658107 - DNA, 15 bp, Homo sapiens
tatgagcacttcagc

SEQ ID NO: 658108 - DNA, 15 bp, Homo sapiens
atgagcacttcagcc

SEQ ID NO: 658109 - DNA, 15 bp, Homo sapiens
tgagcacttcagccg

SEQ ID NO: 658110 - DNA, 15 bp, Homo sapiens
gagcacttcagccgg

SEQ ID NO: 658111 - DNA, 15 bp, Homo sapiens
agcacttcagccggg

SEQ ID NO: 658112 - DNA, 15 bp, Homo sapiens
gcacttcagccgggc

SEQ ID NO: 658113 - DNA, 15 bp, Homo sapiens
cacttcagccgggcg

SEQ ID NO: 658114 - DNA, 15 bp, Homo sapiens
acttcagccgggcgt

SEQ ID NO: 658115 - DNA, 15 bp, Homo sapiens
cttcagccgggcgtg

SEQ ID NO: 658116 - DNA, 15 bp, Homo sapiens
ttcagccgggcgtgg

SEQ ID NO: 658117 - DNA, 15 bp, Homo sapiens
tcagccgggcgtggt

SEQ ID NO: 658118 - DNA, 15 bp, Homo sapiens
cagccgggcgtggtg

SEQ ID NO: 658119 - DNA, 15 bp, Homo sapiens
agccgggcgtggtgg

SEQ ID NO: 658120 - DNA, 15 bp, Homo sapiens
gccgggcgtggtggc

SEQ ID NO: 658121 - DNA, 15 bp, Homo sapiens
ccgggcgtggtggct

SEQ ID NO: 658122 - DNA, 15 bp, Homo sapiens
cgggcgtggtggctc

SEQ ID NO: 658123 - DNA, 15 bp, Homo sapiens
gggcgtggtggctca

SEQ ID NO: 658124 - DNA, 15 bp, Homo sapiens
ggcgtggtggctcat

SEQ ID NO: 658125 - DNA, 15 bp, Homo sapiens
gcgtggtggctcatg

SEQ ID NO: 658126 - DNA, 15 bp, Homo sapiens
cgtggtggctcatgc

SEQ ID NO: 658127 - DNA, 15 bp, Homo sapiens
gtggtggctcatgcc

SEQ ID NO: 658128 - DNA, 15 bp, Homo sapiens
tggtggctcatgcct

SEQ ID NO: 658129 - DNA, 15 bp, Homo sapiens
ggtggctcatgcctg

SEQ ID NO: 658130 - DNA, 15 bp, Homo sapiens
gtggctcatgcctgt

SEQ ID NO: 658131 - DNA, 15 bp, Homo sapiens
tggctcatgcctgta

SEQ ID NO: 658132 - DNA, 15 bp, Homo sapiens
ggctcatgcctgtaa

SEQ ID NO: 658133 - DNA, 15 bp, Homo sapiens
gctcatgcctgtaat

SEQ ID NO: 658134 - DNA, 15 bp, Homo sapiens
ctcatgcctgtaatc

SEQ ID NO: 658135 - DNA, 15 bp, Homo sapiens
tcatgcctgtaatct

SEQ ID NO: 658136 - DNA, 15 bp, Homo sapiens
catgcctgtaatctc

SEQ ID NO: 658137 - DNA, 15 bp, Homo sapiens
atgcctgtaatctca

SEQ ID NO: 658138 - DNA, 15 bp, Homo sapiens
tgcctgtaatctcag

SEQ ID NO: 658139 - DNA, 15 bp, Homo sapiens
gcctgtaatctcagc

SEQ ID NO: 658140 - DNA, 15 bp, Homo sapiens
cctgtaatctcagca

SEQ ID NO: 658141 - DNA, 15 bp, Homo sapiens
ctgtaatctcagcac

SEQ ID NO: 658142 - DNA, 15 bp, Homo sapiens
tgtaatctcagcact

SEQ ID NO: 658143 - DNA, 15 bp, Homo sapiens
gtaatctcagcactt

SEQ ID NO: 658144 - DNA, 15 bp, Homo sapiens
taatctcagcacttt

SEQ ID NO: 658145 - DNA, 15 bp, Homo sapiens
aatctcagcactttg

SEQ ID NO: 658146 - DNA, 15 bp, Homo sapiens
atctcagcactttga

SEQ ID NO: 658147 - DNA, 15 bp, Homo sapiens
tctcagcactttgag

SEQ ID NO: 658148 - DNA, 15 bp, Homo sapiens
ctcagcactttgaga

SEQ ID NO: 658149 - DNA, 15 bp, Homo sapiens
tcagcactttgagag

SEQ ID NO: 658150 - DNA, 15 bp, Homo sapiens
cagcactttgagagg

SEQ ID NO: 658151 - DNA, 15 bp, Homo sapiens
agcactttgagaggc

SEQ ID NO: 658152 - DNA, 15 bp, Homo sapiens
gcactttgagaggct

SEQ ID NO: 658153 - DNA, 15 bp, Homo sapiens
cactttgagaggctg

SEQ ID NO: 658154 - DNA, 15 bp, Homo sapiens
actttgagaggctga

SEQ ID NO: 658155 - DNA, 15 bp, Homo sapiens
ctttgagaggctgag

SEQ ID NO: 658156 - DNA, 15 bp, Homo sapiens
tttgagaggctgagg

SEQ ID NO: 658157 - DNA, 15 bp, Homo sapiens
ttgagaggctgaggc

SEQ ID NO: 658158 - DNA, 15 bp, Homo sapiens
tgagaggctgaggca

SEQ ID NO: 658159 - DNA, 15 bp, Homo sapiens
gagaggctgaggcag

SEQ ID NO: 658160 - DNA, 15 bp, Homo sapiens
agaggctgaggcagg

SEQ ID NO: 658161 - DNA, 15 bp, Homo sapiens
gaggctgaggcaggc

SEQ ID NO: 658162 - DNA, 15 bp, Homo sapiens
aggctgaggcaggcg

SEQ ID NO: 658163 - DNA, 15 bp, Homo sapiens
ggctgaggcaggcgg

SEQ ID NO: 658164 - DNA, 15 bp, Homo sapiens
gctgaggcaggcgga

SEQ ID NO: 658165 - DNA, 15 bp, Homo sapiens
ctgaggcaggcggat

SEQ ID NO: 658166 - DNA, 15 bp, Homo sapiens
tgaggcaggcggatc

SEQ ID NO: 658167 - DNA, 15 bp, Homo sapiens
gaggcaggcggatca

SEQ ID NO: 658168 - DNA, 15 bp, Homo sapiens
aggcaggcggatcac

SEQ ID NO: 658169 - DNA, 15 bp, Homo sapiens
ggcaggcggatcact

SEQ ID NO: 658170 - DNA, 15 bp, Homo sapiens
gcaggcggatcactt

SEQ ID NO: 658171 - DNA, 15 bp, Homo sapiens
caggcggatcacttg

SEQ ID NO: 658172 - DNA, 15 bp, Homo sapiens
aggcggatcacttga

SEQ ID NO: 658173 - DNA, 15 bp, Homo sapiens
ggcggatcacttgag

SEQ ID NO: 658174 - DNA, 15 bp, Homo sapiens
gcggatcacttgagg

SEQ ID NO: 658175 - DNA, 15 bp, Homo sapiens
cggatcacttgaggt

SEQ ID NO: 658176 - DNA, 15 bp, Homo sapiens
ggatcacttgaggtc

SEQ ID NO: 658177 - DNA, 15 bp, Homo sapiens
gatcacttgaggtca

SEQ ID NO: 658178 - DNA, 15 bp, Homo sapiens
atcacttgaggtcag

SEQ ID NO: 658179 - DNA, 15 bp, Homo sapiens
tcacttgaggtcagg

SEQ ID NO: 658180 - DNA, 15 bp, Homo sapiens
cacttgaggtcagga

SEQ ID NO: 658181 - DNA, 15 bp, Homo sapiens
acttgaggtcaggag

SEQ ID NO: 658182 - DNA, 15 bp, Homo sapiens
cttgaggtcaggagt

SEQ ID NO: 658183 - DNA, 15 bp, Homo sapiens
ttgaggtcaggagtt

SEQ ID NO: 658184 - DNA, 15 bp, Homo sapiens
tgaggtcaggagttc

SEQ ID NO: 658185 - DNA, 15 bp, Homo sapiens
gaggtcaggagttcg

SEQ ID NO: 658186 - DNA, 15 bp, Homo sapiens
aggtcaggagttcga

SEQ ID NO: 658187 - DNA, 15 bp, Homo sapiens
ggtcaggagttcgag

SEQ ID NO: 658188 - DNA, 15 bp, Homo sapiens
gtcaggagttcgaga

SEQ ID NO: 658189 - DNA, 15 bp, Homo sapiens
tcaggagttcgagac

SEQ ID NO: 658190 - DNA, 15 bp, Homo sapiens
caggagttcgagacc

SEQ ID NO: 658191 - DNA, 15 bp, Homo sapiens
aggagttcgagacca

SEQ ID NO: 658192 - DNA, 15 bp, Homo sapiens
ggagttcgagaccag

SEQ ID NO: 658193 - DNA, 15 bp, Homo sapiens
gagttcgagaccagc

SEQ ID NO: 658194 - DNA, 15 bp, Homo sapiens
agttcgagaccagcc

SEQ ID NO: 658195 - DNA, 15 bp, Homo sapiens
gttcgagaccagcct

SEQ ID NO: 658196 - DNA, 15 bp, Homo sapiens
ttcgagaccagcctg

SEQ ID NO: 658197 - DNA, 15 bp, Homo sapiens
tcgagaccagcctgg

SEQ ID NO: 658198 - DNA, 15 bp, Homo sapiens
cgagaccagcctggc

SEQ ID NO: 658199 - DNA, 15 bp, Homo sapiens
gagaccagcctggcc

SEQ ID NO: 658200 - DNA, 15 bp, Homo sapiens
agaccagcctggcca

SEQ ID NO: 658201 - DNA, 15 bp, Homo sapiens
gaccagcctggccaa

SEQ ID NO: 658202 - DNA, 15 bp, Homo sapiens
accagcctggccaac

SEQ ID NO: 658203 - DNA, 15 bp, Homo sapiens
ccagcctggccaaca

SEQ ID NO: 658204 - DNA, 15 bp, Homo sapiens
cagcctggccaacat

SEQ ID NO: 658205 - DNA, 15 bp, Homo sapiens
agcctggccaacatg

SEQ ID NO: 658206 - DNA, 15 bp, Homo sapiens
gcctggccaacatgg

SEQ ID NO: 658207 - DNA, 15 bp, Homo sapiens
cctggccaacatggt

SEQ ID NO: 658208 - DNA, 15 bp, Homo sapiens
ctggccaacatggtg

SEQ ID NO: 658209 - DNA, 15 bp, Homo sapiens
tggccaacatggtga

SEQ ID NO: 658210 - DNA, 15 bp, Homo sapiens
ggccaacatggtgaa

SEQ ID NO: 658211 - DNA, 15 bp, Homo sapiens
gccaacatggtgaaa

SEQ ID NO: 658212 - DNA, 15 bp, Homo sapiens
ccaacatggtgaaac

SEQ ID NO: 658213 - DNA, 15 bp, Homo sapiens
caacatggtgaaacc

SEQ ID NO: 658214 - DNA, 15 bp, Homo sapiens
aacatggtgaaaccc

SEQ ID NO: 658215 - DNA, 15 bp, Homo sapiens
acatggtgaaacccc

SEQ ID NO: 658216 - DNA, 15 bp, Homo sapiens
catggtgaaacccca

SEQ ID NO: 658217 - DNA, 15 bp, Homo sapiens
atggtgaaaccccat

SEQ ID NO: 658218 - DNA, 15 bp, Homo sapiens
tggtgaaaccccatc

SEQ ID NO: 658219 - DNA, 15 bp, Homo sapiens
ggtgaaaccccatct

SEQ ID NO: 658220 - DNA, 15 bp, Homo sapiens
gtgaaaccccatctt

SEQ ID NO: 658221 - DNA, 15 bp, Homo sapiens
tgaaaccccatcttt

SEQ ID NO: 658222 - DNA, 15 bp, Homo sapiens
gaaaccccatcttta

SEQ ID NO: 658223 - DNA, 15 bp, Homo sapiens
aaaccccatctttac

SEQ ID NO: 658224 - DNA, 15 bp, Homo sapiens
aaccccatctttact

SEQ ID NO: 658225 - DNA, 15 bp, Homo sapiens
accccatctttacta

SEQ ID NO: 658226 - DNA, 15 bp, Homo sapiens
ccccatctttactaa

SEQ ID NO: 658227 - DNA, 15 bp, Homo sapiens
cccatctttactaaa

SEQ ID NO: 658228 - DNA, 15 bp, Homo sapiens
ccatctttactaaaa

SEQ ID NO: 658229 - DNA, 15 bp, Homo sapiens
catctttactaaaat

SEQ ID NO: 658230 - DNA, 15 bp, Homo sapiens
atctttactaaaata

SEQ ID NO: 658231 - DNA, 15 bp, Homo sapiens
tctttactaaaatac

SEQ ID NO: 658232 - DNA, 15 bp, Homo sapiens
ctttactaaaataca

SEQ ID NO: 658233 - DNA, 15 bp, Homo sapiens
tttactaaaatacaa

SEQ ID NO: 658234 - DNA, 15 bp, Homo sapiens
ttactaaaatacaac

SEQ ID NO: 658235 - DNA, 15 bp, Homo sapiens
tactaaaatacaaca

SEQ ID NO: 658236 - DNA, 15 bp, Homo sapiens
actaaaatacaacaa

SEQ ID NO: 658237 - DNA, 15 bp, Homo sapiens
ctaaaatacaacaat

SEQ ID NO: 658238 - DNA, 15 bp, Homo sapiens
taaaatacaacaatt

SEQ ID NO: 658239 - DNA, 15 bp, Homo sapiens
aaaatacaacaatta

SEQ ID NO: 658240 - DNA, 15 bp, Homo sapiens
aaatacaacaattag

SEQ ID NO: 658241 - DNA, 15 bp, Homo sapiens
aatacaacaattagc

SEQ ID NO: 658242 - DNA, 15 bp, Homo sapiens
atacaacaattagcc

SEQ ID NO: 658243 - DNA, 15 bp, Homo sapiens
tacaacaattagcca

SEQ ID NO: 658244 - DNA, 15 bp, Homo sapiens
acaacaattagccag

SEQ ID NO: 658245 - DNA, 15 bp, Homo sapiens
caacaattagccaga

SEQ ID NO: 658246 - DNA, 15 bp, Homo sapiens
aacaattagccagac

SEQ ID NO: 658247 - DNA, 15 bp, Homo sapiens
acaattagccagaca

SEQ ID NO: 658248 - DNA, 15 bp, Homo sapiens
caattagccagacat

SEQ ID NO: 658249 - DNA, 15 bp, Homo sapiens
aattagccagacatg

SEQ ID NO: 658250 - DNA, 15 bp, Homo sapiens
attagccagacatgg

SEQ ID NO: 658251 - DNA, 15 bp, Homo sapiens
ttagccagacatggt

SEQ ID NO: 658252 - DNA, 15 bp, Homo sapiens
tagccagacatggtg

SEQ ID NO: 658253 - DNA, 15 bp, Homo sapiens
agccagacatggtgg

SEQ ID NO: 658254 - DNA, 15 bp, Homo sapiens
gccagacatggtggc

SEQ ID NO: 658255 - DNA, 15 bp, Homo sapiens
ccagacatggtggca

SEQ ID NO: 658256 - DNA, 15 bp, Homo sapiens
cagacatggtggcag

SEQ ID NO: 658257 - DNA, 15 bp, Homo sapiens
agacatggtggcagg

SEQ ID NO: 658258 - DNA, 15 bp, Homo sapiens
gacatggtggcaggc

SEQ ID NO: 658259 - DNA, 15 bp, Homo sapiens
acatggtggcaggca

SEQ ID NO: 658260 - DNA, 15 bp, Homo sapiens
catggtggcaggcac

SEQ ID NO: 658261 - DNA, 15 bp, Homo sapiens
atggtggcaggcacc

SEQ ID NO: 658262 - DNA, 15 bp, Homo sapiens
tggtggcaggcacct

SEQ ID NO: 658263 - DNA, 15 bp, Homo sapiens
ggtggcaggcacctg

SEQ ID NO: 658264 - DNA, 15 bp, Homo sapiens
gtggcaggcacctgt

SEQ ID NO: 658265 - DNA, 15 bp, Homo sapiens
tggcaggcacctgta

SEQ ID NO: 658266 - DNA, 15 bp, Homo sapiens
ggcaggcacctgtaa

SEQ ID NO: 658267 - DNA, 15 bp, Homo sapiens
gcaggcacctgtaat

SEQ ID NO: 658268 - DNA, 15 bp, Homo sapiens
caggcacctgtaatc

SEQ ID NO: 658269 - DNA, 15 bp, Homo sapiens
aggcacctgtaatct

SEQ ID NO: 658270 - DNA, 15 bp, Homo sapiens
ggcacctgtaatctc

SEQ ID NO: 658271 - DNA, 15 bp, Homo sapiens
gcacctgtaatctca

SEQ ID NO: 658272 - DNA, 15 bp, Homo sapiens
cacctgtaatctcag

SEQ ID NO: 658273 - DNA, 15 bp, Homo sapiens
acctgtaatctcagc

SEQ ID NO: 658274 - DNA, 15 bp, Homo sapiens
cctgtaatctcagct

SEQ ID NO: 658275 - DNA, 15 bp, Homo sapiens
ctgtaatctcagcta

SEQ ID NO: 658276 - DNA, 15 bp, Homo sapiens
tgtaatctcagctat

SEQ ID NO: 658277 - DNA, 15 bp, Homo sapiens
gtaatctcagctatt

SEQ ID NO: 658278 - DNA, 15 bp, Homo sapiens
taatctcagctattt

SEQ ID NO: 658279 - DNA, 15 bp, Homo sapiens
aatctcagctattta

SEQ ID NO: 658280 - DNA, 15 bp, Homo sapiens
atctcagctatttag

SEQ ID NO: 658281 - DNA, 15 bp, Homo sapiens
tctcagctatttagg

SEQ ID NO: 658282 - DNA, 15 bp, Homo sapiens
ctcagctatttagga

SEQ ID NO: 658283 - DNA, 15 bp, Homo sapiens
tcagctatttaggag

SEQ ID NO: 658284 - DNA, 15 bp, Homo sapiens
cagctatttaggagg

SEQ ID NO: 658285 - DNA, 15 bp, Homo sapiens
agctatttaggaggt

SEQ ID NO: 658286 - DNA, 15 bp, Homo sapiens
gctatttaggaggtt

SEQ ID NO: 658287 - DNA, 15 bp, Homo sapiens
ctatttaggaggttg

SEQ ID NO: 658288 - DNA, 15 bp, Homo sapiens
tatttaggaggttga

SEQ ID NO: 658289 - DNA, 15 bp, Homo sapiens
atttaggaggttgag

SEQ ID NO: 658290 - DNA, 15 bp, Homo sapiens
tttaggaggttgagg

SEQ ID NO: 658291 - DNA, 15 bp, Homo sapiens
ttaggaggttgaggc

SEQ ID NO: 658292 - DNA, 15 bp, Homo sapiens
taggaggttgaggca

SEQ ID NO: 658293 - DNA, 15 bp, Homo sapiens
aggaggttgaggcag

SEQ ID NO: 658294 - DNA, 15 bp, Homo sapiens
ggaggttgaggcagg

SEQ ID NO: 658295 - DNA, 15 bp, Homo sapiens
gaggttgaggcagga

SEQ ID NO: 658296 - DNA, 15 bp, Homo sapiens
aggttgaggcaggag

SEQ ID NO: 658297 - DNA, 15 bp, Homo sapiens
ggttgaggcaggaga

SEQ ID NO: 658298 - DNA, 15 bp, Homo sapiens
gttgaggcaggagaa

SEQ ID NO: 658299 - DNA, 15 bp, Homo sapiens
ttgaggcaggagaat

SEQ ID NO: 658300 - DNA, 15 bp, Homo sapiens
tgaggcaggagaatc

SEQ ID NO: 658301 - DNA, 15 bp, Homo sapiens
gaggcaggagaatca

SEQ ID NO: 658302 - DNA, 15 bp, Homo sapiens
aggcaggagaatcac

SEQ ID NO: 658303 - DNA, 15 bp, Homo sapiens
ggcaggagaatcact

SEQ ID NO: 658304 - DNA, 15 bp, Homo sapiens
gcaggagaatcactt

SEQ ID NO: 658305 - DNA, 15 bp, Homo sapiens
caggagaatcacttg

SEQ ID NO: 658306 - DNA, 15 bp, Homo sapiens
aggagaatcacttga

SEQ ID NO: 658307 - DNA, 15 bp, Homo sapiens
ggagaatcacttgaa

SEQ ID NO: 658308 - DNA, 15 bp, Homo sapiens
gagaatcacttgaac

SEQ ID NO: 658309 - DNA, 15 bp, Homo sapiens
agaatcacttgaacc

SEQ ID NO: 658310 - DNA, 15 bp, Homo sapiens
gaatcacttgaaccc

SEQ ID NO: 658311 - DNA, 15 bp, Homo sapiens
aatcacttgaacccc

SEQ ID NO: 658312 - DNA, 15 bp, Homo sapiens
atcacttgaaccccg

SEQ ID NO: 658313 - DNA, 15 bp, Homo sapiens
tcacttgaaccccgg

SEQ ID NO: 658314 - DNA, 15 bp, Homo sapiens
cacttgaaccccggg

SEQ ID NO: 658315 - DNA, 15 bp, Homo sapiens
acttgaaccccggga

SEQ ID NO: 658316 - DNA, 15 bp, Homo sapiens
cttgaaccccgggag

SEQ ID NO: 658317 - DNA, 15 bp, Homo sapiens
ttgaaccccgggagg

SEQ ID NO: 658318 - DNA, 15 bp, Homo sapiens
tgaaccccgggaggc

SEQ ID NO: 658319 - DNA, 15 bp, Homo sapiens
gaaccccgggaggca

SEQ ID NO: 658320 - DNA, 15 bp, Homo sapiens
aaccccgggaggcag

SEQ ID NO: 658321 - DNA, 15 bp, Homo sapiens
accccgggaggcaga

SEQ ID NO: 658322 - DNA, 15 bp, Homo sapiens
ccccgggaggcagag

SEQ ID NO: 658323 - DNA, 15 bp, Homo sapiens
cccgggaggcagagg

SEQ ID NO: 658324 - DNA, 15 bp, Homo sapiens
ccgggaggcagaggt

SEQ ID NO: 658325 - DNA, 15 bp, Homo sapiens
cgggaggcagaggtt

SEQ ID NO: 658326 - DNA, 15 bp, Homo sapiens
gggaggcagaggttg

SEQ ID NO: 658327 - DNA, 15 bp, Homo sapiens
ggaggcagaggttgc

SEQ ID NO: 658328 - DNA, 15 bp, Homo sapiens
gaggcagaggttgca

SEQ ID NO: 658329 - DNA, 15 bp, Homo sapiens
aggcagaggttgcag

SEQ ID NO: 658330 - DNA, 15 bp, Homo sapiens
ggcagaggttgcagt

SEQ ID NO: 658331 - DNA, 15 bp, Homo sapiens
gcagaggttgcagtt

SEQ ID NO: 658332 - DNA, 15 bp, Homo sapiens
cagaggttgcagtta

SEQ ID NO: 658333 - DNA, 15 bp, Homo sapiens
agaggttgcagttag

SEQ ID NO: 658334 - DNA, 15 bp, Homo sapiens
gaggttgcagttagc

SEQ ID NO: 658335 - DNA, 15 bp, Homo sapiens
aggttgcagttagcc

SEQ ID NO: 658336 - DNA, 15 bp, Homo sapiens
ggttgcagttagcca

SEQ ID NO: 658337 - DNA, 15 bp, Homo sapiens
gttgcagttagccaa

SEQ ID NO: 658338 - DNA, 15 bp, Homo sapiens
ttgcagttagccaag

SEQ ID NO: 658339 - DNA, 15 bp, Homo sapiens
tgcagttagccaaga

SEQ ID NO: 658340 - DNA, 15 bp, Homo sapiens
gcagttagccaagat

SEQ ID NO: 658341 - DNA, 15 bp, Homo sapiens
cagttagccaagatt

SEQ ID NO: 658342 - DNA, 15 bp, Homo sapiens
agttagccaagattg

SEQ ID NO: 658343 - DNA, 15 bp, Homo sapiens
gttagccaagattgt

SEQ ID NO: 658344 - DNA, 15 bp, Homo sapiens
ttagccaagattgtg

SEQ ID NO: 658345 - DNA, 15 bp, Homo sapiens
tagccaagattgtgt

SEQ ID NO: 658346 - DNA, 15 bp, Homo sapiens
agccaagattgtgta

SEQ ID NO: 658347 - DNA, 15 bp, Homo sapiens
gccaagattgtgtat

SEQ ID NO: 658348 - DNA, 15 bp, Homo sapiens
ccaagattgtgtatc

SEQ ID NO: 658349 - DNA, 15 bp, Homo sapiens
caagattgtgtatca

SEQ ID NO: 658350 - DNA, 15 bp, Homo sapiens
aagattgtgtatcat

SEQ ID NO: 658351 - DNA, 15 bp, Homo sapiens
agattgtgtatcatt

SEQ ID NO: 658352 - DNA, 15 bp, Homo sapiens
gattgtgtatcatta

SEQ ID NO: 658353 - DNA, 15 bp, Homo sapiens
attgtgtatcattac

SEQ ID NO: 658354 - DNA, 15 bp, Homo sapiens
ttgtgtatcattaca

SEQ ID NO: 658355 - DNA, 15 bp, Homo sapiens
tgtgtatcattacat

SEQ ID NO: 658356 - DNA, 15 bp, Homo sapiens
gtgtatcattacatt

SEQ ID NO: 658357 - DNA, 15 bp, Homo sapiens
tgtatcattacattc

SEQ ID NO: 658358 - DNA, 15 bp, Homo sapiens
gtatcattacattcc

SEQ ID NO: 658359 - DNA, 15 bp, Homo sapiens
tatcattacattcca

SEQ ID NO: 658360 - DNA, 15 bp, Homo sapiens
atcattacattccag

SEQ ID NO: 658361 - DNA, 15 bp, Homo sapiens
tcattacattccagc

SEQ ID NO: 658362 - DNA, 15 bp, Homo sapiens
cattacattccagcc

SEQ ID NO: 658363 - DNA, 15 bp, Homo sapiens
attacattccagcct

SEQ ID NO: 658364 - DNA, 15 bp, Homo sapiens
ttacattccagccta

SEQ ID NO: 658365 - DNA, 15 bp, Homo sapiens
tacattccagcctag

SEQ ID NO: 658366 - DNA, 15 bp, Homo sapiens
acattccagcctagg

SEQ ID NO: 658367 - DNA, 15 bp, Homo sapiens
cattccagcctaggt

SEQ ID NO: 658368 - DNA, 15 bp, Homo sapiens
attccagcctaggtg

SEQ ID NO: 658369 - DNA, 15 bp, Homo sapiens
ttccagcctaggtga

SEQ ID NO: 658370 - DNA, 15 bp, Homo sapiens
tccagcctaggtgac

SEQ ID NO: 658371 - DNA, 15 bp, Homo sapiens
ccagcctaggtgaca

SEQ ID NO: 658372 - DNA, 15 bp, Homo sapiens
cagcctaggtgacag

SEQ ID NO: 658373 - DNA, 15 bp, Homo sapiens
agcctaggtgacaga

SEQ ID NO: 658374 - DNA, 15 bp, Homo sapiens
gcctaggtgacagag

SEQ ID NO: 658375 - DNA, 15 bp, Homo sapiens
cctaggtgacagagt

SEQ ID NO: 658376 - DNA, 15 bp, Homo sapiens
ctaggtgacagagtg

SEQ ID NO: 658377 - DNA, 15 bp, Homo sapiens
taggtgacagagtga

SEQ ID NO: 658378 - DNA, 15 bp, Homo sapiens
aggtgacagagtgag

SEQ ID NO: 658379 - DNA, 15 bp, Homo sapiens
ggtgacagagtgaga

SEQ ID NO: 658380 - DNA, 15 bp, Homo sapiens
gtgacagagtgagac

SEQ ID NO: 658381 - DNA, 15 bp, Homo sapiens
tgacagagtgagacg

SEQ ID NO: 658382 - DNA, 15 bp, Homo sapiens
gacagagtgagacgc

SEQ ID NO: 658383 - DNA, 15 bp, Homo sapiens
acagagtgagacgct

SEQ ID NO: 658384 - DNA, 15 bp, Homo sapiens
cagagtgagacgctg

SEQ ID NO: 658385 - DNA, 15 bp, Homo sapiens
agagtgagacgctgt

SEQ ID NO: 658386 - DNA, 15 bp, Homo sapiens
gagtgagacgctgtc

SEQ ID NO: 658387 - DNA, 15 bp, Homo sapiens
agtgagacgctgtct

SEQ ID NO: 658388 - DNA, 15 bp, Homo sapiens
gtgagacgctgtctc

SEQ ID NO: 658389 - DNA, 15 bp, Homo sapiens
tgagacgctgtctca

SEQ ID NO: 658390 - DNA, 15 bp, Homo sapiens
gagacgctgtctcaa

SEQ ID NO: 658391 - DNA, 15 bp, Homo sapiens
agacgctgtctcaaa

SEQ ID NO: 658392 - DNA, 15 bp, Homo sapiens
gacgctgtctcaaaa

SEQ ID NO: 658393 - DNA, 15 bp, Homo sapiens
acgctgtctcaaaaa

SEQ ID NO: 658394 - DNA, 15 bp, Homo sapiens
cgctgtctcaaaaaa

SEQ ID NO: 658395 - DNA, 15 bp, Homo sapiens
gctgtctcaaaaaat

SEQ ID NO: 658396 - DNA, 15 bp, Homo sapiens
ctgtctcaaaaaata

SEQ ID NO: 658397 - DNA, 15 bp, Homo sapiens
tgtctcaaaaaataa

SEQ ID NO: 658398 - DNA, 15 bp, Homo sapiens
gtctcaaaaaataaa

SEQ ID NO: 658399 - DNA, 15 bp, Homo sapiens
tctcaaaaaataaat

SEQ ID NO: 658400 - DNA, 15 bp, Homo sapiens
ctcaaaaaataaata

SEQ ID NO: 658401 - DNA, 15 bp, Homo sapiens
tcaaaaaataaataa

SEQ ID NO: 658402 - DNA, 15 bp, Homo sapiens
caaaaaataaataaa

SEQ ID NO: 658403 - DNA, 15 bp, Homo sapiens
aaaaaataaataaat

SEQ ID NO: 658404 - DNA, 15 bp, Homo sapiens
aaaaataaataaata

SEQ ID NO: 658405 - DNA, 15 bp, Homo sapiens
aaaataaataaataa

SEQ ID NO: 658406 - DNA, 15 bp, Homo sapiens
aaataaataaataaa

SEQ ID NO: 658407 - DNA, 15 bp, Homo sapiens
aataaataaataaat

SEQ ID NO: 658408 - DNA, 15 bp, Homo sapiens
ataaataaataaata

SEQ ID NO: 658409 - DNA, 15 bp, Homo sapiens
taaataaataaataa

SEQ ID NO: 658410 - DNA, 15 bp, Homo sapiens
aataaataaataaaa

SEQ ID NO: 658411 - DNA, 15 bp, Homo sapiens
ataaataaataaaaa

SEQ ID NO: 658412 - DNA, 15 bp, Homo sapiens
taaataaataaaaat

SEQ ID NO: 658413 - DNA, 15 bp, Homo sapiens
aaataaataaaaata

SEQ ID NO: 658414 - DNA, 15 bp, Homo sapiens
aataaataaaaataa

SEQ ID NO: 658415 - DNA, 15 bp, Homo sapiens
ataaataaaaataaa

SEQ ID NO: 658416 - DNA, 15 bp, Homo sapiens
taaataaaaataaaa

SEQ ID NO: 658417 - DNA, 15 bp, Homo sapiens
aaataaaaataaaaa

SEQ ID NO: 658418 - DNA, 15 bp, Homo sapiens
aataaaaataaaaag

SEQ ID NO: 658419 - DNA, 15 bp, Homo sapiens
ataaaaataaaaagt

SEQ ID NO: 658420 - DNA, 15 bp, Homo sapiens
taaaaataaaaagtt

SEQ ID NO: 658421 - DNA, 15 bp, Homo sapiens
aaaaataaaaagtta

SEQ ID NO: 658422 - DNA, 15 bp, Homo sapiens
aaaataaaaagttac

SEQ ID NO: 658423 - DNA, 15 bp, Homo sapiens
aaataaaaagttaca

SEQ ID NO: 658424 - DNA, 15 bp, Homo sapiens
aataaaaagttacag

SEQ ID NO: 658425 - DNA, 15 bp, Homo sapiens
ataaaaagttacagg

SEQ ID NO: 658426 - DNA, 15 bp, Homo sapiens
taaaaagttacaggc

SEQ ID NO: 658427 - DNA, 15 bp, Homo sapiens
aaaaagttacaggca

SEQ ID NO: 658428 - DNA, 15 bp, Homo sapiens
aaaagttacaggcac

SEQ ID NO: 658429 - DNA, 15 bp, Homo sapiens
aaagttacaggcacc

SEQ ID NO: 658430 - DNA, 15 bp, Homo sapiens
aagttacaggcacct

SEQ ID NO: 658431 - DNA, 15 bp, Homo sapiens
agttacaggcacctc

SEQ ID NO: 658432 - DNA, 15 bp, Homo sapiens
gttacaggcacctca

SEQ ID NO: 658433 - DNA, 15 bp, Homo sapiens
ttacaggcacctcaa

SEQ ID NO: 658434 - DNA, 15 bp, Homo sapiens
tacaggcacctcaag

SEQ ID NO: 658435 - DNA, 15 bp, Homo sapiens
acaggcacctcaagg

SEQ ID NO: 658436 - DNA, 15 bp, Homo sapiens
caggcacctcaaggt

SEQ ID NO: 658437 - DNA, 15 bp, Homo sapiens
aggcacctcaaggtt

SEQ ID NO: 658438 - DNA, 15 bp, Homo sapiens
ggcacctcaaggttg

SEQ ID NO: 658439 - DNA, 15 bp, Homo sapiens
gcacctcaaggttgc

SEQ ID NO: 658440 - DNA, 15 bp, Homo sapiens
cacctcaaggttgcc

SEQ ID NO: 658441 - DNA, 15 bp, Homo sapiens
acctcaaggttgcct

SEQ ID NO: 658442 - DNA, 15 bp, Homo sapiens
cctcaaggttgcctg

SEQ ID NO: 658443 - DNA, 15 bp, Homo sapiens
ctcaaggttgcctgt

SEQ ID NO: 658444 - DNA, 15 bp, Homo sapiens
tcaaggttgcctgtt

SEQ ID NO: 658445 - DNA, 15 bp, Homo sapiens
caaggttgcctgttt

SEQ ID NO: 658446 - DNA, 15 bp, Homo sapiens
aaggttgcctgtttt

SEQ ID NO: 658447 - DNA, 15 bp, Homo sapiens
aggttgcctgttttt

SEQ ID NO: 658448 - DNA, 15 bp, Homo sapiens
ggttgcctgtttttt

SEQ ID NO: 658449 - DNA, 15 bp, Homo sapiens
gttgcctgttttttg

SEQ ID NO: 658450 - DNA, 15 bp, Homo sapiens
ttgcctgttttttgc

SEQ ID NO: 658451 - DNA, 15 bp, Homo sapiens
tgcctgttttttgcc

SEQ ID NO: 658452 - DNA, 15 bp, Homo sapiens
gcctgttttttgcct

SEQ ID NO: 658453 - DNA, 15 bp, Homo sapiens
cctgttttttgccta

SEQ ID NO: 658454 - DNA, 15 bp, Homo sapiens
ctgttttttgcctac

SEQ ID NO: 658455 - DNA, 15 bp, Homo sapiens
tgttttttgcctact

SEQ ID NO: 658456 - DNA, 15 bp, Homo sapiens
gttttttgcctactg

SEQ ID NO: 658457 - DNA, 15 bp, Homo sapiens
ttttttgcctactgt

SEQ ID NO: 658458 - DNA, 15 bp, Homo sapiens
tttttgcctactgtt

SEQ ID NO: 658459 - DNA, 15 bp, Homo sapiens
ttttgcctactgttg

SEQ ID NO: 658460 - DNA, 15 bp, Homo sapiens
tttgcctactgttgc

SEQ ID NO: 658461 - DNA, 15 bp, Homo sapiens
ttgcctactgttgct

SEQ ID NO: 658462 - DNA, 15 bp, Homo sapiens
tgcctactgttgctt

SEQ ID NO: 658463 - DNA, 15 bp, Homo sapiens
gcctactgttgcttc

SEQ ID NO: 658464 - DNA, 15 bp, Homo sapiens
cctactgttgcttca

SEQ ID NO: 658465 - DNA, 15 bp, Homo sapiens
ctactgttgcttcag

SEQ ID NO: 658466 - DNA, 15 bp, Homo sapiens
tactgttgcttcagt

SEQ ID NO: 658467 - DNA, 15 bp, Homo sapiens
actgttgcttcagtt

SEQ ID NO: 658468 - DNA, 15 bp, Homo sapiens
ctgttgcttcagtta

SEQ ID NO: 658469 - DNA, 15 bp, Homo sapiens
tgttgcttcagttat

SEQ ID NO: 658470 - DNA, 15 bp, Homo sapiens
gttgcttcagttatg

SEQ ID NO: 658471 - DNA, 15 bp, Homo sapiens
ttgcttcagttatgt

SEQ ID NO: 658472 - DNA, 15 bp, Homo sapiens
tgcttcagttatgta

SEQ ID NO: 658473 - DNA, 15 bp, Homo sapiens
gcttcagttatgtac

SEQ ID NO: 658474 - DNA, 15 bp, Homo sapiens
cttcagttatgtact

SEQ ID NO: 658475 - DNA, 15 bp, Homo sapiens
ttcagttatgtactc

SEQ ID NO: 658476 - DNA, 15 bp, Homo sapiens
tcagttatgtactct

SEQ ID NO: 658477 - DNA, 15 bp, Homo sapiens
cagttatgtactctc

SEQ ID NO: 658478 - DNA, 15 bp, Homo sapiens
agttatgtactctca

SEQ ID NO: 658479 - DNA, 15 bp, Homo sapiens
gttatgtactctcag

SEQ ID NO: 658480 - DNA, 15 bp, Homo sapiens
ttatgtactctcagt

SEQ ID NO: 658481 - DNA, 15 bp, Homo sapiens
tatgtactctcagtg

SEQ ID NO: 658482 - DNA, 15 bp, Homo sapiens
atgtactctcagtga

SEQ ID NO: 658483 - DNA, 15 bp, Homo sapiens
tgtactctcagtgat

SEQ ID NO: 658484 - DNA, 15 bp, Homo sapiens
gtactctcagtgatc

SEQ ID NO: 658485 - DNA, 15 bp, Homo sapiens
tactctcagtgatct

SEQ ID NO: 658486 - DNA, 15 bp, Homo sapiens
actctcagtgatctg

SEQ ID NO: 658487 - DNA, 15 bp, Homo sapiens
ctctcagtgatctgt

SEQ ID NO: 658488 - DNA, 15 bp, Homo sapiens
tctcagtgatctgtt

SEQ ID NO: 658489 - DNA, 15 bp, Homo sapiens
ctcagtgatctgtta

SEQ ID NO: 658490 - DNA, 15 bp, Homo sapiens
tcagtgatctgttac

SEQ ID NO: 658491 - DNA, 15 bp, Homo sapiens
cagtgatctgttacc

SEQ ID NO: 658492 - DNA, 15 bp, Homo sapiens
agtgatctgttacct

SEQ ID NO: 658493 - DNA, 15 bp, Homo sapiens
gtgatctgttacctt

SEQ ID NO: 658494 - DNA, 15 bp, Homo sapiens
tgatctgttaccttc

SEQ ID NO: 658495 - DNA, 15 bp, Homo sapiens
gatctgttaccttcc

SEQ ID NO: 658496 - DNA, 15 bp, Homo sapiens
atctgttaccttcct

SEQ ID NO: 658497 - DNA, 15 bp, Homo sapiens
tctgttaccttcctt

SEQ ID NO: 658498 - DNA, 15 bp, Homo sapiens
ctgttaccttccttt

SEQ ID NO: 658499 - DNA, 15 bp, Homo sapiens
tgttaccttcctttc

SEQ ID NO: 658500 - DNA, 15 bp, Homo sapiens
gttaccttcctttcc

SEQ ID NO: 658501 - DNA, 15 bp, Homo sapiens
ttaccttcctttcca

SEQ ID NO: 658502 - DNA, 15 bp, Homo sapiens
taccttcctttccag

SEQ ID NO: 658503 - DNA, 15 bp, Homo sapiens
accttcctttccaga

SEQ ID NO: 658504 - DNA, 15 bp, Homo sapiens
ccttcctttccagaa

SEQ ID NO: 658505 - DNA, 15 bp, Homo sapiens
cttcctttccagaaa

SEQ ID NO: 658506 - DNA, 15 bp, Homo sapiens
ttcctttccagaaac

SEQ ID NO: 658507 - DNA, 15 bp, Homo sapiens
tcctttccagaaact

SEQ ID NO: 658508 - DNA, 15 bp, Homo sapiens
cctttccagaaactc

SEQ ID NO: 658509 - DNA, 15 bp, Homo sapiens
ctttccagaaactct

SEQ ID NO: 658510 - DNA, 15 bp, Homo sapiens
tttccagaaactctg

SEQ ID NO: 658511 - DNA, 15 bp, Homo sapiens
ttccagaaactctgt

SEQ ID NO: 658512 - DNA, 15 bp, Homo sapiens
tccagaaactctgtg

SEQ ID NO: 658513 - DNA, 15 bp, Homo sapiens
ccagaaactctgtgt

SEQ ID NO: 658514 - DNA, 15 bp, Homo sapiens
cagaaactctgtgta

SEQ ID NO: 658515 - DNA, 15 bp, Homo sapiens
agaaactctgtgtaa

SEQ ID NO: 658516 - DNA, 15 bp, Homo sapiens
gaaactctgtgtaaa

SEQ ID NO: 658517 - DNA, 15 bp, Homo sapiens
aaactctgtgtaaat

SEQ ID NO: 658518 - DNA, 15 bp, Homo sapiens
aactctgtgtaaata

SEQ ID NO: 658519 - DNA, 15 bp, Homo sapiens
actctgtgtaaatat

SEQ ID NO: 658520 - DNA, 15 bp, Homo sapiens
ctctgtgtaaatata

SEQ ID NO: 658521 - DNA, 15 bp, Homo sapiens
tctgtgtaaatatat

SEQ ID NO: 658522 - DNA, 15 bp, Homo sapiens
ctgtgtaaatatatc

SEQ ID NO: 658523 - DNA, 15 bp, Homo sapiens
tgtgtaaatatatct

SEQ ID NO: 658524 - DNA, 15 bp, Homo sapiens
gtgtaaatatatctt

SEQ ID NO: 658525 - DNA, 15 bp, Homo sapiens
tgtaaatatatctta

SEQ ID NO: 658526 - DNA, 15 bp, Homo sapiens
gtaaatatatcttaa

SEQ ID NO: 658527 - DNA, 15 bp, Homo sapiens
taaatatatcttaat

SEQ ID NO: 658528 - DNA, 15 bp, Homo sapiens
aaatatatcttaatt

SEQ ID NO: 658529 - DNA, 15 bp, Homo sapiens
aatatatcttaattc

SEQ ID NO: 658530 - DNA, 15 bp, Homo sapiens
atatatcttaattca

SEQ ID NO: 658531 - DNA, 15 bp, Homo sapiens
tatatcttaattcaa

SEQ ID NO: 658532 - DNA, 15 bp, Homo sapiens
atatcttaattcaat

SEQ ID NO: 658533 - DNA, 15 bp, Homo sapiens
tatcttaattcaatg

SEQ ID NO: 658534 - DNA, 15 bp, Homo sapiens
atcttaattcaatga

SEQ ID NO: 658535 - DNA, 15 bp, Homo sapiens
tcttaattcaatgaa

SEQ ID NO: 658536 - DNA, 15 bp, Homo sapiens
cttaattcaatgaac

SEQ ID NO: 658537 - DNA, 15 bp, Homo sapiens
ttaattcaatgaaca

SEQ ID NO: 658538 - DNA, 15 bp, Homo sapiens
taattcaatgaacaa

SEQ ID NO: 658539 - DNA, 15 bp, Homo sapiens
aattcaatgaacaaa

SEQ ID NO: 658540 - DNA, 15 bp, Homo sapiens
attcaatgaacaaag

SEQ ID NO: 658541 - DNA, 15 bp, Homo sapiens
ttcaatgaacaaagc

SEQ ID NO: 658542 - DNA, 15 bp, Homo sapiens
tcaatgaacaaagcc

SEQ ID NO: 658543 - DNA, 15 bp, Homo sapiens
caatgaacaaagcca

SEQ ID NO: 658544 - DNA, 15 bp, Homo sapiens
aatgaacaaagccat

SEQ ID NO: 658545 - DNA, 15 bp, Homo sapiens
atgaacaaagccata

SEQ ID NO: 658546 - DNA, 15 bp, Homo sapiens
tgaacaaagccataa

SEQ ID NO: 658547 - DNA, 15 bp, Homo sapiens
gaacaaagccataat

SEQ ID NO: 658548 - DNA, 15 bp, Homo sapiens
aacaaagccataatg

SEQ ID NO: 658549 - DNA, 15 bp, Homo sapiens
acaaagccataatgg

SEQ ID NO: 658550 - DNA, 15 bp, Homo sapiens
caaagccataatgga

SEQ ID NO: 658551 - DNA, 15 bp, Homo sapiens
aaagccataatggag

SEQ ID NO: 658552 - DNA, 15 bp, Homo sapiens
aagccataatggaga

SEQ ID NO: 658553 - DNA, 15 bp, Homo sapiens
agccataatggagac

SEQ ID NO: 658554 - DNA, 15 bp, Homo sapiens
gccataatggagaca

SEQ ID NO: 658555 - DNA, 15 bp, Homo sapiens
ccataatggagacat

SEQ ID NO: 658556 - DNA, 15 bp, Homo sapiens
cataatggagacatt

SEQ ID NO: 658557 - DNA, 15 bp, Homo sapiens
ataatggagacattg

SEQ ID NO: 658558 - DNA, 15 bp, Homo sapiens
taatggagacattgg

SEQ ID NO: 658559 - DNA, 15 bp, Homo sapiens
aatggagacattgga

SEQ ID NO: 658560 - DNA, 15 bp, Homo sapiens
atggagacattggag

SEQ ID NO: 658561 - DNA, 15 bp, Homo sapiens
tggagacattggagg

SEQ ID NO: 658562 - DNA, 15 bp, Homo sapiens
ggagacattggaggc

SEQ ID NO: 658563 - DNA, 15 bp, Homo sapiens
gagacattggaggca

SEQ ID NO: 658564 - DNA, 15 bp, Homo sapiens
agacattggaggcat

SEQ ID NO: 658565 - DNA, 15 bp, Homo sapiens
gacattggaggcatt

SEQ ID NO: 658566 - DNA, 15 bp, Homo sapiens
acattggaggcatta

SEQ ID NO: 658567 - DNA, 15 bp, Homo sapiens
cattggaggcattag

SEQ ID NO: 658568 - DNA, 15 bp, Homo sapiens
attggaggcattagt

SEQ ID NO: 658569 - DNA, 15 bp, Homo sapiens
ttggaggcattagta

SEQ ID NO: 658570 - DNA, 15 bp, Homo sapiens
tggaggcattagtag

SEQ ID NO: 658571 - DNA, 15 bp, Homo sapiens
ggaggcattagtagc

SEQ ID NO: 658572 - DNA, 15 bp, Homo sapiens
gaggcattagtagcc

SEQ ID NO: 658573 - DNA, 15 bp, Homo sapiens
aggcattagtagcca

SEQ ID NO: 658574 - DNA, 15 bp, Homo sapiens
ggcattagtagccag

SEQ ID NO: 658575 - DNA, 15 bp, Homo sapiens
gcattagtagccagc

SEQ ID NO: 658576 - DNA, 15 bp, Homo sapiens
cattagtagccagcc

SEQ ID NO: 658577 - DNA, 15 bp, Homo sapiens
attagtagccagcca

SEQ ID NO: 658578 - DNA, 15 bp, Homo sapiens
ttagtagccagccag

SEQ ID NO: 658579 - DNA, 15 bp, Homo sapiens
tagtagccagccagt

SEQ ID NO: 658580 - DNA, 15 bp, Homo sapiens
agtagccagccagtg

SEQ ID NO: 658581 - DNA, 15 bp, Homo sapiens
gtagccagccagtga

SEQ ID NO: 658582 - DNA, 15 bp, Homo sapiens
tagccagccagtgat

SEQ ID NO: 658583 - DNA, 15 bp, Homo sapiens
agccagccagtgatc

SEQ ID NO: 658584 - DNA, 15 bp, Homo sapiens
gccagccagtgatct

SEQ ID NO: 658585 - DNA, 15 bp, Homo sapiens
ccagccagtgatctg

SEQ ID NO: 658586 - DNA, 15 bp, Homo sapiens
cagccagtgatctgt

SEQ ID NO: 658587 - DNA, 15 bp, Homo sapiens
agccagtgatctgtt

SEQ ID NO: 658588 - DNA, 15 bp, Homo sapiens
gccagtgatctgttg

SEQ ID NO: 658589 - DNA, 15 bp, Homo sapiens
ccagtgatctgttgt

SEQ ID NO: 658590 - DNA, 15 bp, Homo sapiens
cagtgatctgttgtt

SEQ ID NO: 658591 - DNA, 15 bp, Homo sapiens
agtgatctgttgttt

SEQ ID NO: 658592 - DNA, 15 bp, Homo sapiens
gtgatctgttgtttt

SEQ ID NO: 658593 - DNA, 15 bp, Homo sapiens
tgatctgttgttttg

SEQ ID NO: 658594 - DNA, 15 bp, Homo sapiens
gatctgttgttttgt

SEQ ID NO: 658595 - DNA, 15 bp, Homo sapiens
atctgttgttttgtt

SEQ ID NO: 658596 - DNA, 15 bp, Homo sapiens
tctgttgttttgttc

SEQ ID NO: 658597 - DNA, 15 bp, Homo sapiens
ctgttgttttgttca

SEQ ID NO: 658598 - DNA, 15 bp, Homo sapiens
tgttgttttgttcat

SEQ ID NO: 658599 - DNA, 15 bp, Homo sapiens
gttgttttgttcatt

SEQ ID NO: 658600 - DNA, 15 bp, Homo sapiens
ttgttttgttcattc

SEQ ID NO: 658601 - DNA, 15 bp, Homo sapiens
tgttttgttcattca

SEQ ID NO: 658602 - DNA, 15 bp, Homo sapiens
gttttgttcattcaa

SEQ ID NO: 658603 - DNA, 15 bp, Homo sapiens
ttttgttcattcaag

SEQ ID NO: 658604 - DNA, 15 bp, Homo sapiens
tttgttcattcaaga

SEQ ID NO: 658605 - DNA, 15 bp, Homo sapiens
ttgttcattcaagag

SEQ ID NO: 658606 - DNA, 15 bp, Homo sapiens
tgttcattcaagagg

SEQ ID NO: 658607 - DNA, 15 bp, Homo sapiens
gttcattcaagagga

SEQ ID NO: 658608 - DNA, 15 bp, Homo sapiens
ttcattcaagaggag

SEQ ID NO: 658609 - DNA, 15 bp, Homo sapiens
tcattcaagaggagg

SEQ ID NO: 658610 - DNA, 15 bp, Homo sapiens
cattcaagaggaggt

SEQ ID NO: 658611 - DNA, 15 bp, Homo sapiens
attcaagaggaggtt

SEQ ID NO: 658612 - DNA, 15 bp, Homo sapiens
ttcaagaggaggtta

SEQ ID NO: 658613 - DNA, 15 bp, Homo sapiens
tcaagaggaggttat

SEQ ID NO: 658614 - DNA, 15 bp, Homo sapiens
caagaggaggttatc

SEQ ID NO: 658615 - DNA, 15 bp, Homo sapiens
aagaggaggttatca

SEQ ID NO: 658616 - DNA, 15 bp, Homo sapiens
agaggaggttatcat

SEQ ID NO: 658617 - DNA, 15 bp, Homo sapiens
gaggaggttatcatg

SEQ ID NO: 658618 - DNA, 15 bp, Homo sapiens
aggaggttatcatga

SEQ ID NO: 658619 - DNA, 15 bp, Homo sapiens
ggaggttatcatgaa

SEQ ID NO: 658620 - DNA, 15 bp, Homo sapiens
gaggttatcatgaaa

SEQ ID NO: 658621 - DNA, 15 bp, Homo sapiens
aggttatcatgaaaa

SEQ ID NO: 658622 - DNA, 15 bp, Homo sapiens
ggttatcatgaaaat

SEQ ID NO: 658623 - DNA, 15 bp, Homo sapiens
gttatcatgaaaata

SEQ ID NO: 658624 - DNA, 15 bp, Homo sapiens
ttatcatgaaaatac

SEQ ID NO: 658625 - DNA, 15 bp, Homo sapiens
tatcatgaaaatact

SEQ ID NO: 658626 - DNA, 15 bp, Homo sapiens
atcatgaaaatactc

SEQ ID NO: 658627 - DNA, 15 bp, Homo sapiens
tcatgaaaatactct

SEQ ID NO: 658628 - DNA, 15 bp, Homo sapiens
catgaaaatactctg

SEQ ID NO: 658629 - DNA, 15 bp, Homo sapiens
atgaaaatactctgt

SEQ ID NO: 658630 - DNA, 15 bp, Homo sapiens
tgaaaatactctgtg

SEQ ID NO: 658631 - DNA, 15 bp, Homo sapiens
gaaaatactctgtga

SEQ ID NO: 658632 - DNA, 15 bp, Homo sapiens
aaaatactctgtgag

SEQ ID NO: 658633 - DNA, 15 bp, Homo sapiens
aaatactctgtgaga

SEQ ID NO: 658634 - DNA, 15 bp, Homo sapiens
aatactctgtgagaa

SEQ ID NO: 658635 - DNA, 15 bp, Homo sapiens
atactctgtgagaaa

SEQ ID NO: 658636 - DNA, 15 bp, Homo sapiens
tactctgtgagaaac

SEQ ID NO: 658637 - DNA, 15 bp, Homo sapiens
actctgtgagaaaca

SEQ ID NO: 658638 - DNA, 15 bp, Homo sapiens
ctctgtgagaaacag

SEQ ID NO: 658639 - DNA, 15 bp, Homo sapiens
tctgtgagaaacaga

SEQ ID NO: 658640 - DNA, 15 bp, Homo sapiens
ctgtgagaaacagag

SEQ ID NO: 658641 - DNA, 15 bp, Homo sapiens
tgtgagaaacagagt

SEQ ID NO: 658642 - DNA, 15 bp, Homo sapiens
gtgagaaacagagtt

SEQ ID NO: 658643 - DNA, 15 bp, Homo sapiens
tgagaaacagagttc

SEQ ID NO: 658644 - DNA, 15 bp, Homo sapiens
gagaaacagagttcc

SEQ ID NO: 658645 - DNA, 15 bp, Homo sapiens
agaaacagagttcca

SEQ ID NO: 658646 - DNA, 15 bp, Homo sapiens
gaaacagagttccag

SEQ ID NO: 658647 - DNA, 15 bp, Homo sapiens
aaacagagttccagg

SEQ ID NO: 658648 - DNA, 15 bp, Homo sapiens
aacagagttccagga

SEQ ID NO: 658649 - DNA, 15 bp, Homo sapiens
acagagttccaggat

SEQ ID NO: 658650 - DNA, 15 bp, Homo sapiens
cagagttccaggatt

SEQ ID NO: 658651 - DNA, 15 bp, Homo sapiens
agagttccaggatta

SEQ ID NO: 658652 - DNA, 15 bp, Homo sapiens
gagttccaggattac

SEQ ID NO: 658653 - DNA, 15 bp, Homo sapiens
agttccaggattaca

SEQ ID NO: 658654 - DNA, 15 bp, Homo sapiens
gttccaggattacac

SEQ ID NO: 658655 - DNA, 15 bp, Homo sapiens
ttccaggattacact

SEQ ID NO: 658656 - DNA, 15 bp, Homo sapiens
tccaggattacactg

SEQ ID NO: 658657 - DNA, 15 bp, Homo sapiens
ccaggattacactgg

SEQ ID NO: 658658 - DNA, 15 bp, Homo sapiens
caggattacactggc

SEQ ID NO: 658659 - DNA, 15 bp, Homo sapiens
aggattacactggct

SEQ ID NO: 658660 - DNA, 15 bp, Homo sapiens
ggattacactggctt

SEQ ID NO: 658661 - DNA, 15 bp, Homo sapiens
gattacactggctta

SEQ ID NO: 658662 - DNA, 15 bp, Homo sapiens
attacactggcttaa

SEQ ID NO: 658663 - DNA, 15 bp, Homo sapiens
ttacactggcttaaa

SEQ ID NO: 658664 - DNA, 15 bp, Homo sapiens
tacactggcttaaac

SEQ ID NO: 658665 - DNA, 15 bp, Homo sapiens
acactggcttaaaca

SEQ ID NO: 658666 - DNA, 15 bp, Homo sapiens
cactggcttaaacaa

SEQ ID NO: 658667 - DNA, 15 bp, Homo sapiens
actggcttaaacaat

SEQ ID NO: 658668 - DNA, 15 bp, Homo sapiens
ctggcttaaacaata

SEQ ID NO: 658669 - DNA, 15 bp, Homo sapiens
tggcttaaacaatat

SEQ ID NO: 658670 - DNA, 15 bp, Homo sapiens
ggcttaaacaatatg

SEQ ID NO: 658671 - DNA, 15 bp, Homo sapiens
gcttaaacaatatgg

SEQ ID NO: 658672 - DNA, 15 bp, Homo sapiens
cttaaacaatatgga

SEQ ID NO: 658673 - DNA, 15 bp, Homo sapiens
ttaaacaatatggaa

SEQ ID NO: 658674 - DNA, 15 bp, Homo sapiens
taaacaatatggaag

SEQ ID NO: 658675 - DNA, 15 bp, Homo sapiens
aaacaatatggaagt

SEQ ID NO: 658676 - DNA, 15 bp, Homo sapiens
aacaatatggaagtt

SEQ ID NO: 658677 - DNA, 15 bp, Homo sapiens
acaatatggaagttt

SEQ ID NO: 658678 - DNA, 15 bp, Homo sapiens
caatatggaagtttg

SEQ ID NO: 658679 - DNA, 15 bp, Homo sapiens
aatatggaagtttgt

SEQ ID NO: 658680 - DNA, 15 bp, Homo sapiens
atatggaagtttgtt

SEQ ID NO: 658681 - DNA, 15 bp, Homo sapiens
tatggaagtttgttt

SEQ ID NO: 658682 - DNA, 15 bp, Homo sapiens
atggaagtttgtttc

SEQ ID NO: 658683 - DNA, 15 bp, Homo sapiens
tggaagtttgtttct

SEQ ID NO: 658684 - DNA, 15 bp, Homo sapiens
ggaagtttgtttctc

SEQ ID NO: 658685 - DNA, 15 bp, Homo sapiens
gaagtttgtttctct

SEQ ID NO: 658686 - DNA, 15 bp, Homo sapiens
aagtttgtttctctt

SEQ ID NO: 658687 - DNA, 15 bp, Homo sapiens
agtttgtttctctta

SEQ ID NO: 658688 - DNA, 15 bp, Homo sapiens
gtttgtttctcttat

SEQ ID NO: 658689 - DNA, 15 bp, Homo sapiens
tttgtttctcttatg

SEQ ID NO: 658690 - DNA, 15 bp, Homo sapiens
ttgtttctcttatgt

SEQ ID NO: 658691 - DNA, 15 bp, Homo sapiens
tgtttctcttatgta

SEQ ID NO: 658692 - DNA, 15 bp, Homo sapiens
gtttctcttatgtag

SEQ ID NO: 658693 - DNA, 15 bp, Homo sapiens
tttctcttatgtagt

SEQ ID NO: 658694 - DNA, 15 bp, Homo sapiens
ttctcttatgtagta

SEQ ID NO: 658695 - DNA, 15 bp, Homo sapiens
tctcttatgtagtag

SEQ ID NO: 658696 - DNA, 15 bp, Homo sapiens
ctcttatgtagtagt

SEQ ID NO: 658697 - DNA, 15 bp, Homo sapiens
tcttatgtagtagtc

SEQ ID NO: 658698 - DNA, 15 bp, Homo sapiens
cttatgtagtagtcc

SEQ ID NO: 658699 - DNA, 15 bp, Homo sapiens
ttatgtagtagtccc

SEQ ID NO: 658700 - DNA, 15 bp, Homo sapiens
tatgtagtagtccca

SEQ ID NO: 658701 - DNA, 15 bp, Homo sapiens
atgtagtagtcccaa

SEQ ID NO: 658702 - DNA, 15 bp, Homo sapiens
tgtagtagtcccaag

SEQ ID NO: 658703 - DNA, 15 bp, Homo sapiens
gtagtagtcccaaga

SEQ ID NO: 658704 - DNA, 15 bp, Homo sapiens
tagtagtcccaagat

SEQ ID NO: 658705 - DNA, 15 bp, Homo sapiens
agtagtcccaagata

SEQ ID NO: 658706 - DNA, 15 bp, Homo sapiens
gtagtcccaagatac

SEQ ID NO: 658707 - DNA, 15 bp, Homo sapiens
tagtcccaagataca

SEQ ID NO: 658708 - DNA, 15 bp, Homo sapiens
agtcccaagatacat

SEQ ID NO: 658709 - DNA, 15 bp, Homo sapiens
gtcccaagatacata

SEQ ID NO: 658710 - DNA, 15 bp, Homo sapiens
tcccaagatacatag

SEQ ID NO: 658711 - DNA, 15 bp, Homo sapiens
cccaagatacatagt

SEQ ID NO: 658712 - DNA, 15 bp, Homo sapiens
ccaagatacatagtt

SEQ ID NO: 658713 - DNA, 15 bp, Homo sapiens
caagatacatagttc

SEQ ID NO: 658714 - DNA, 15 bp, Homo sapiens
aagatacatagttca

SEQ ID NO: 658715 - DNA, 15 bp, Homo sapiens
agatacatagttcag

SEQ ID NO: 658716 - DNA, 15 bp, Homo sapiens
gatacatagttcagg

SEQ ID NO: 658717 - DNA, 15 bp, Homo sapiens
atacatagttcaggg

SEQ ID NO: 658718 - DNA, 15 bp, Homo sapiens
tacatagttcagggc

SEQ ID NO: 658719 - DNA, 15 bp, Homo sapiens
acatagttcagggct

SEQ ID NO: 658720 - DNA, 15 bp, Homo sapiens
catagttcagggctg

SEQ ID NO: 658721 - DNA, 15 bp, Homo sapiens
atagttcagggctgc

SEQ ID NO: 658722 - DNA, 15 bp, Homo sapiens
tagttcagggctgct

SEQ ID NO: 658723 - DNA, 15 bp, Homo sapiens
agttcagggctgctg

SEQ ID NO: 658724 - DNA, 15 bp, Homo sapiens
gttcagggctgctga

SEQ ID NO: 658725 - DNA, 15 bp, Homo sapiens
ttcagggctgctgaa

SEQ ID NO: 658726 - DNA, 15 bp, Homo sapiens
tcagggctgctgaac

SEQ ID NO: 658727 - DNA, 15 bp, Homo sapiens
cagggctgctgaacc

SEQ ID NO: 658728 - DNA, 15 bp, Homo sapiens
agggctgctgaacca

SEQ ID NO: 658729 - DNA, 15 bp, Homo sapiens
gggctgctgaaccat

SEQ ID NO: 658730 - DNA, 15 bp, Homo sapiens
ggctgctgaaccatc

SEQ ID NO: 658731 - DNA, 15 bp, Homo sapiens
gctgctgaaccatct

SEQ ID NO: 658732 - DNA, 15 bp, Homo sapiens
ctgctgaaccatctg

SEQ ID NO: 658733 - DNA, 15 bp, Homo sapiens
tgctgaaccatctgc

SEQ ID NO: 658734 - DNA, 15 bp, Homo sapiens
gctgaaccatctgct

SEQ ID NO: 658735 - DNA, 15 bp, Homo sapiens
ctgaaccatctgctg

SEQ ID NO: 658736 - DNA, 15 bp, Homo sapiens
tgaaccatctgctgt

SEQ ID NO: 658737 - DNA, 15 bp, Homo sapiens
gaaccatctgctgtg

SEQ ID NO: 658738 - DNA, 15 bp, Homo sapiens
aaccatctgctgtgc

SEQ ID NO: 658739 - DNA, 15 bp, Homo sapiens
accatctgctgtgca

SEQ ID NO: 658740 - DNA, 15 bp, Homo sapiens
ccatctgctgtgcaa

SEQ ID NO: 658741 - DNA, 15 bp, Homo sapiens
catctgctgtgcaaa

SEQ ID NO: 658742 - DNA, 15 bp, Homo sapiens
atctgctgtgcaaag

SEQ ID NO: 658743 - DNA, 15 bp, Homo sapiens
tctgctgtgcaaagt

SEQ ID NO: 658744 - DNA, 15 bp, Homo sapiens
ctgctgtgcaaagta

SEQ ID NO: 658745 - DNA, 15 bp, Homo sapiens
tgctgtgcaaagtag

SEQ ID NO: 658746 - DNA, 15 bp, Homo sapiens
gctgtgcaaagtagc

SEQ ID NO: 658747 - DNA, 15 bp, Homo sapiens
ctgtgcaaagtagct

SEQ ID NO: 658748 - DNA, 15 bp, Homo sapiens
tgtgcaaagtagctc

SEQ ID NO: 658749 - DNA, 15 bp, Homo sapiens
gtgcaaagtagctct

SEQ ID NO: 658750 - DNA, 15 bp, Homo sapiens
tgcaaagtagctcta

SEQ ID NO: 658751 - DNA, 15 bp, Homo sapiens
gcaaagtagctctat

SEQ ID NO: 658752 - DNA, 15 bp, Homo sapiens
caaagtagctctatg

SEQ ID NO: 658753 - DNA, 15 bp, Homo sapiens
aaagtagctctatgc

SEQ ID NO: 658754 - DNA, 15 bp, Homo sapiens
aagtagctctatgcc

SEQ ID NO: 658755 - DNA, 15 bp, Homo sapiens
agtagctctatgcca

SEQ ID NO: 658756 - DNA, 15 bp, Homo sapiens
gtagctctatgccac

SEQ ID NO: 658757 - DNA, 15 bp, Homo sapiens
tagctctatgccaca

SEQ ID NO: 658758 - DNA, 15 bp, Homo sapiens
agctctatgccacaa

SEQ ID NO: 658759 - DNA, 15 bp, Homo sapiens
gctctatgccacaaa

SEQ ID NO: 658760 - DNA, 15 bp, Homo sapiens
ctctatgccacaaaa

SEQ ID NO: 658761 - DNA, 15 bp, Homo sapiens
tctatgccacaaaat

SEQ ID NO: 658762 - DNA, 15 bp, Homo sapiens
ctatgccacaaaatc

SEQ ID NO: 658763 - DNA, 15 bp, Homo sapiens
tatgccacaaaatct

SEQ ID NO: 658764 - DNA, 15 bp, Homo sapiens
atgccacaaaatctt

SEQ ID NO: 658765 - DNA, 15 bp, Homo sapiens
tgccacaaaatcttc

SEQ ID NO: 658766 - DNA, 15 bp, Homo sapiens
gccacaaaatcttca

SEQ ID NO: 658767 - DNA, 15 bp, Homo sapiens
ccacaaaatcttcaa

SEQ ID NO: 658768 - DNA, 15 bp, Homo sapiens
cacaaaatcttcaag

SEQ ID NO: 658769 - DNA, 15 bp, Homo sapiens
acaaaatcttcaaga

SEQ ID NO: 658770 - DNA, 15 bp, Homo sapiens
caaaatcttcaagac

SEQ ID NO: 658771 - DNA, 15 bp, Homo sapiens
aaaatcttcaagacc

SEQ ID NO: 658772 - DNA, 15 bp, Homo sapiens
aaatcttcaagaccc

SEQ ID NO: 658773 - DNA, 15 bp, Homo sapiens
aatcttcaagaccca

SEQ ID NO: 658774 - DNA, 15 bp, Homo sapiens
atcttcaagacccag

SEQ ID NO: 658775 - DNA, 15 bp, Homo sapiens
tcttcaagacccagc

SEQ ID NO: 658776 - DNA, 15 bp, Homo sapiens
cttcaagacccagca

SEQ ID NO: 658777 - DNA, 15 bp, Homo sapiens
ttcaagacccagcaa

SEQ ID NO: 658778 - DNA, 15 bp, Homo sapiens
tcaagacccagcaat

SEQ ID NO: 658779 - DNA, 15 bp, Homo sapiens
caagacccagcaatt

SEQ ID NO: 658780 - DNA, 15 bp, Homo sapiens
aagacccagcaattt

SEQ ID NO: 658781 - DNA, 15 bp, Homo sapiens
agacccagcaatttc

SEQ ID NO: 658782 - DNA, 15 bp, Homo sapiens
gacccagcaatttct

SEQ ID NO: 658783 - DNA, 15 bp, Homo sapiens
acccagcaatttcta

SEQ ID NO: 658784 - DNA, 15 bp, Homo sapiens
cccagcaatttctag

SEQ ID NO: 658785 - DNA, 15 bp, Homo sapiens
ccagcaatttctaga

SEQ ID NO: 658786 - DNA, 15 bp, Homo sapiens
cagcaatttctagat

SEQ ID NO: 658787 - DNA, 15 bp, Homo sapiens
agcaatttctagatt

SEQ ID NO: 658788 - DNA, 15 bp, Homo sapiens
gcaatttctagattt

SEQ ID NO: 658789 - DNA, 15 bp, Homo sapiens
caatttctagatttc

SEQ ID NO: 658790 - DNA, 15 bp, Homo sapiens
aatttctagatttct

SEQ ID NO: 658791 - DNA, 15 bp, Homo sapiens
atttctagatttcta

SEQ ID NO: 658792 - DNA, 15 bp, Homo sapiens
tttctagatttctat

SEQ ID NO: 658793 - DNA, 15 bp, Homo sapiens
ttctagatttctatt

SEQ ID NO: 658794 - DNA, 15 bp, Homo sapiens
tctagatttctattt

SEQ ID NO: 658795 - DNA, 15 bp, Homo sapiens
ctagatttctatttc

SEQ ID NO: 658796 - DNA, 15 bp, Homo sapiens
tagatttctatttca

SEQ ID NO: 658797 - DNA, 15 bp, Homo sapiens
agatttctatttcac

SEQ ID NO: 658798 - DNA, 15 bp, Homo sapiens
gatttctatttcacc

SEQ ID NO: 658799 - DNA, 15 bp, Homo sapiens
atttctatttcacca

SEQ ID NO: 658800 - DNA, 15 bp, Homo sapiens
tttctatttcaccat

SEQ ID NO: 658801 - DNA, 15 bp, Homo sapiens
ttctatttcaccatc

SEQ ID NO: 658802 - DNA, 15 bp, Homo sapiens
tctatttcaccatcc

SEQ ID NO: 658803 - DNA, 15 bp, Homo sapiens
ctatttcaccatccc

SEQ ID NO: 658804 - DNA, 15 bp, Homo sapiens
tatttcaccatccca

SEQ ID NO: 658805 - DNA, 15 bp, Homo sapiens
atttcaccatcccag

SEQ ID NO: 658806 - DNA, 15 bp, Homo sapiens
tttcaccatcccagc

SEQ ID NO: 658807 - DNA, 15 bp, Homo sapiens
ttcaccatcccagca

SEQ ID NO: 658808 - DNA, 15 bp, Homo sapiens
tcaccatcccagcat

SEQ ID NO: 658809 - DNA, 15 bp, Homo sapiens
caccatcccagcatg

SEQ ID NO: 658810 - DNA, 15 bp, Homo sapiens
accatcccagcatgg

SEQ ID NO: 658811 - DNA, 15 bp, Homo sapiens
ccatcccagcatggt

SEQ ID NO: 658812 - DNA, 15 bp, Homo sapiens
catcccagcatggtg

SEQ ID NO: 658813 - DNA, 15 bp, Homo sapiens
atcccagcatggtgg

SEQ ID NO: 658814 - DNA, 15 bp, Homo sapiens
tcccagcatggtggc

SEQ ID NO: 658815 - DNA, 15 bp, Homo sapiens
cccagcatggtggcc

SEQ ID NO: 658816 - DNA, 15 bp, Homo sapiens
ccagcatggtggccc

SEQ ID NO: 658817 - DNA, 15 bp, Homo sapiens
cagcatggtggccct

SEQ ID NO: 658818 - DNA, 15 bp, Homo sapiens
agcatggtggccctc

SEQ ID NO: 658819 - DNA, 15 bp, Homo sapiens
gcatggtggccctca

SEQ ID NO: 658820 - DNA, 15 bp, Homo sapiens
catggtggccctcat

SEQ ID NO: 658821 - DNA, 15 bp, Homo sapiens
atggtggccctcatc

SEQ ID NO: 658822 - DNA, 15 bp, Homo sapiens
tggtggccctcatct

SEQ ID NO: 658823 - DNA, 15 bp, Homo sapiens
ggtggccctcatctg

SEQ ID NO: 658824 - DNA, 15 bp, Homo sapiens
gtggccctcatctgc

SEQ ID NO: 658825 - DNA, 15 bp, Homo sapiens
tggccctcatctgca

SEQ ID NO: 658826 - DNA, 15 bp, Homo sapiens
ggccctcatctgcag

SEQ ID NO: 658827 - DNA, 15 bp, Homo sapiens
gccctcatctgcagg

SEQ ID NO: 658828 - DNA, 15 bp, Homo sapiens
ccctcatctgcaggg

SEQ ID NO: 658829 - DNA, 15 bp, Homo sapiens
cctcatctgcagggg

SEQ ID NO: 658830 - DNA, 15 bp, Homo sapiens
ctcatctgcaggggc

SEQ ID NO: 658831 - DNA, 15 bp, Homo sapiens
tcatctgcaggggcc

SEQ ID NO: 658832 - DNA, 15 bp, Homo sapiens
catctgcaggggcca

SEQ ID NO: 658833 - DNA, 15 bp, Homo sapiens
atctgcaggggccaa

SEQ ID NO: 658834 - DNA, 15 bp, Homo sapiens
tctgcaggggccaag

SEQ ID NO: 658835 - DNA, 15 bp, Homo sapiens
ctgcaggggccaaga

SEQ ID NO: 658836 - DNA, 15 bp, Homo sapiens
tgcaggggccaagat

SEQ ID NO: 658837 - DNA, 15 bp, Homo sapiens
gcaggggccaagatg

SEQ ID NO: 658838 - DNA, 15 bp, Homo sapiens
caggggccaagatgg

SEQ ID NO: 658839 - DNA, 15 bp, Homo sapiens
aggggccaagatggc

SEQ ID NO: 658840 - DNA, 15 bp, Homo sapiens
ggggccaagatggct

SEQ ID NO: 658841 - DNA, 15 bp, Homo sapiens
gggccaagatggctg

SEQ ID NO: 658842 - DNA, 15 bp, Homo sapiens
ggccaagatggctgc

SEQ ID NO: 658843 - DNA, 15 bp, Homo sapiens
gccaagatggctgct

SEQ ID NO: 658844 - DNA, 15 bp, Homo sapiens
ccaagatggctgctg

SEQ ID NO: 658845 - DNA, 15 bp, Homo sapiens
caagatggctgctgg

SEQ ID NO: 658846 - DNA, 15 bp, Homo sapiens
aagatggctgctgga

SEQ ID NO: 658847 - DNA, 15 bp, Homo sapiens
agatggctgctggag

SEQ ID NO: 658848 - DNA, 15 bp, Homo sapiens
gatggctgctggagg

SEQ ID NO: 658849 - DNA, 15 bp, Homo sapiens
atggctgctggaggt

SEQ ID NO: 658850 - DNA, 15 bp, Homo sapiens
tggctgctggaggtt

SEQ ID NO: 658851 - DNA, 15 bp, Homo sapiens
ggctgctggaggttc

SEQ ID NO: 658852 - DNA, 15 bp, Homo sapiens
gctgctggaggttca

SEQ ID NO: 658853 - DNA, 15 bp, Homo sapiens
ctgctggaggttcaa

SEQ ID NO: 658854 - DNA, 15 bp, Homo sapiens
tgctggaggttcaac

SEQ ID NO: 658855 - DNA, 15 bp, Homo sapiens
gctggaggttcaaca

SEQ ID NO: 658856 - DNA, 15 bp, Homo sapiens
ctggaggttcaacat

SEQ ID NO: 658857 - DNA, 15 bp, Homo sapiens
tggaggttcaacatt

SEQ ID NO: 658858 - DNA, 15 bp, Homo sapiens
ggaggttcaacatta

SEQ ID NO: 658859 - DNA, 15 bp, Homo sapiens
gaggttcaacattat

SEQ ID NO: 658860 - DNA, 15 bp, Homo sapiens
aggttcaacattata

SEQ ID NO: 658861 - DNA, 15 bp, Homo sapiens
ggttcaacattatac

SEQ ID NO: 658862 - DNA, 15 bp, Homo sapiens
gttcaacattatacc

SEQ ID NO: 658863 - DNA, 15 bp, Homo sapiens
ttcaacattataccc

SEQ ID NO: 658864 - DNA, 15 bp, Homo sapiens
tcaacattataccca

SEQ ID NO: 658865 - DNA, 15 bp, Homo sapiens
caacattatacccat

SEQ ID NO: 658866 - DNA, 15 bp, Homo sapiens
aacattatacccatg

SEQ ID NO: 658867 - DNA, 15 bp, Homo sapiens
acattatacccatgc

SEQ ID NO: 658868 - DNA, 15 bp, Homo sapiens
cattatacccatgct

SEQ ID NO: 658869 - DNA, 15 bp, Homo sapiens
attatacccatgctc

SEQ ID NO: 658870 - DNA, 15 bp, Homo sapiens
ttatacccatgctct

SEQ ID NO: 658871 - DNA, 15 bp, Homo sapiens
tatacccatgctcta

SEQ ID NO: 658872 - DNA, 15 bp, Homo sapiens
atacccatgctctag

SEQ ID NO: 658873 - DNA, 15 bp, Homo sapiens
tacccatgctctagc

SEQ ID NO: 658874 - DNA, 15 bp, Homo sapiens
acccatgctctagcc

SEQ ID NO: 658875 - DNA, 15 bp, Homo sapiens
cccatgctctagcca

SEQ ID NO: 658876 - DNA, 15 bp, Homo sapiens
ccatgctctagccaa

SEQ ID NO: 658877 - DNA, 15 bp, Homo sapiens
catgctctagccaat

SEQ ID NO: 658878 - DNA, 15 bp, Homo sapiens
atgctctagccaata

SEQ ID NO: 658879 - DNA, 15 bp, Homo sapiens
tgctctagccaatag

SEQ ID NO: 658880 - DNA, 15 bp, Homo sapiens
gctctagccaatagg

SEQ ID NO: 658881 - DNA, 15 bp, Homo sapiens
ctctagccaatagga

SEQ ID NO: 658882 - DNA, 15 bp, Homo sapiens
tctagccaataggaa

SEQ ID NO: 658883 - DNA, 15 bp, Homo sapiens
ctagccaataggaag

SEQ ID NO: 658884 - DNA, 15 bp, Homo sapiens
tagccaataggaaga

SEQ ID NO: 658885 - DNA, 15 bp, Homo sapiens
agccaataggaagat

SEQ ID NO: 658886 - DNA, 15 bp, Homo sapiens
gccaataggaagata

SEQ ID NO: 658887 - DNA, 15 bp, Homo sapiens
ccaataggaagatag

SEQ ID NO: 658888 - DNA, 15 bp, Homo sapiens
caataggaagataga

SEQ ID NO: 658889 - DNA, 15 bp, Homo sapiens
aataggaagatagaa

SEQ ID NO: 658890 - DNA, 15 bp, Homo sapiens
ataggaagatagaaa

SEQ ID NO: 658891 - DNA, 15 bp, Homo sapiens
taggaagatagaaaa

SEQ ID NO: 658892 - DNA, 15 bp, Homo sapiens
aggaagatagaaaaa

SEQ ID NO: 658893 - DNA, 15 bp, Homo sapiens
ggaagatagaaaaag

SEQ ID NO: 658894 - DNA, 15 bp, Homo sapiens
gaagatagaaaaagc

SEQ ID NO: 658895 - DNA, 15 bp, Homo sapiens
aagatagaaaaagca

SEQ ID NO: 658896 - DNA, 15 bp, Homo sapiens
agatagaaaaagcaa

SEQ ID NO: 658897 - DNA, 15 bp, Homo sapiens
gatagaaaaagcaaa

SEQ ID NO: 658898 - DNA, 15 bp, Homo sapiens
atagaaaaagcaaag

SEQ ID NO: 658899 - DNA, 15 bp, Homo sapiens
tagaaaaagcaaagg

SEQ ID NO: 658900 - DNA, 15 bp, Homo sapiens
agaaaaagcaaagga

SEQ ID NO: 658901 - DNA, 15 bp, Homo sapiens
gaaaaagcaaaggat

SEQ ID NO: 658902 - DNA, 15 bp, Homo sapiens
aaaaagcaaaggatg

SEQ ID NO: 658903 - DNA, 15 bp, Homo sapiens
aaaagcaaaggatgc

SEQ ID NO: 658904 - DNA, 15 bp, Homo sapiens
aaagcaaaggatgca

SEQ ID NO: 658905 - DNA, 15 bp, Homo sapiens
aagcaaaggatgcat

SEQ ID NO: 658906 - DNA, 15 bp, Homo sapiens
agcaaaggatgcatt

SEQ ID NO: 658907 - DNA, 15 bp, Homo sapiens
gcaaaggatgcattt

SEQ ID NO: 658908 - DNA, 15 bp, Homo sapiens
caaaggatgcatttt

SEQ ID NO: 658909 - DNA, 15 bp, Homo sapiens
aaaggatgcattttg

SEQ ID NO: 658910 - DNA, 15 bp, Homo sapiens
aaggatgcattttgg

SEQ ID NO: 658911 - DNA, 15 bp, Homo sapiens
aggatgcattttggt

SEQ ID NO: 658912 - DNA, 15 bp, Homo sapiens
ggatgcattttggtt

SEQ ID NO: 658913 - DNA, 15 bp, Homo sapiens
gatgcattttggttg

SEQ ID NO: 658914 - DNA, 15 bp, Homo sapiens
atgcattttggttgt

SEQ ID NO: 658915 - DNA, 15 bp, Homo sapiens
tgcattttggttgtc

SEQ ID NO: 658916 - DNA, 15 bp, Homo sapiens
gcattttggttgtct

SEQ ID NO: 658917 - DNA, 15 bp, Homo sapiens
cattttggttgtctt

SEQ ID NO: 658918 - DNA, 15 bp, Homo sapiens
attttggttgtcttt

SEQ ID NO: 658919 - DNA, 15 bp, Homo sapiens
ttttggttgtctttt

SEQ ID NO: 658920 - DNA, 15 bp, Homo sapiens
tttggttgtctttta

SEQ ID NO: 658921 - DNA, 15 bp, Homo sapiens
ttggttgtcttttaa

SEQ ID NO: 658922 - DNA, 15 bp, Homo sapiens
tggttgtcttttaat

SEQ ID NO: 658923 - DNA, 15 bp, Homo sapiens
ggttgtcttttaatg

SEQ ID NO: 658924 - DNA, 15 bp, Homo sapiens
gttgtcttttaatga

SEQ ID NO: 658925 - DNA, 15 bp, Homo sapiens
ttgtcttttaatgaa

SEQ ID NO: 658926 - DNA, 15 bp, Homo sapiens
tgtcttttaatgaag

SEQ ID NO: 658927 - DNA, 15 bp, Homo sapiens
gtcttttaatgaagg

SEQ ID NO: 658928 - DNA, 15 bp, Homo sapiens
tcttttaatgaagga

SEQ ID NO: 658929 - DNA, 15 bp, Homo sapiens
cttttaatgaaggat

SEQ ID NO: 658930 - DNA, 15 bp, Homo sapiens
ttttaatgaaggatc

SEQ ID NO: 658931 - DNA, 15 bp, Homo sapiens
tttaatgaaggatcc

SEQ ID NO: 658932 - DNA, 15 bp, Homo sapiens
ttaatgaaggatccc

SEQ ID NO: 658933 - DNA, 15 bp, Homo sapiens
taatgaaggatccca

SEQ ID NO: 658934 - DNA, 15 bp, Homo sapiens
aatgaaggatcccag

SEQ ID NO: 658935 - DNA, 15 bp, Homo sapiens
atgaaggatcccaga

SEQ ID NO: 658936 - DNA, 15 bp, Homo sapiens
tgaaggatcccagaa

SEQ ID NO: 658937 - DNA, 15 bp, Homo sapiens
gaaggatcccagaag

SEQ ID NO: 658938 - DNA, 15 bp, Homo sapiens
aaggatcccagaagc

SEQ ID NO: 658939 - DNA, 15 bp, Homo sapiens
aggatcccagaagct

SEQ ID NO: 658940 - DNA, 15 bp, Homo sapiens
ggatcccagaagctt

SEQ ID NO: 658941 - DNA, 15 bp, Homo sapiens
gatcccagaagcttt

SEQ ID NO: 658942 - DNA, 15 bp, Homo sapiens
atcccagaagctttc

SEQ ID NO: 658943 - DNA, 15 bp, Homo sapiens
tcccagaagctttca

SEQ ID NO: 658944 - DNA, 15 bp, Homo sapiens
cccagaagctttcat

SEQ ID NO: 658945 - DNA, 15 bp, Homo sapiens
ccagaagctttcatg

SEQ ID NO: 658946 - DNA, 15 bp, Homo sapiens
cagaagctttcatgt

SEQ ID NO: 658947 - DNA, 15 bp, Homo sapiens
agaagctttcatgtg

SEQ ID NO: 658948 - DNA, 15 bp, Homo sapiens
gaagctttcatgtga

SEQ ID NO: 658949 - DNA, 15 bp, Homo sapiens
aagctttcatgtgac

SEQ ID NO: 658950 - DNA, 15 bp, Homo sapiens
agctttcatgtgaca

SEQ ID NO: 658951 - DNA, 15 bp, Homo sapiens
gctttcatgtgacac

SEQ ID NO: 658952 - DNA, 15 bp, Homo sapiens
ctttcatgtgacact

SEQ ID NO: 658953 - DNA, 15 bp, Homo sapiens
tttcatgtgacactt

SEQ ID NO: 658954 - DNA, 15 bp, Homo sapiens
ttcatgtgacacttt

SEQ ID NO: 658955 - DNA, 15 bp, Homo sapiens
tcatgtgacactttc

SEQ ID NO: 658956 - DNA, 15 bp, Homo sapiens
catgtgacactttca

SEQ ID NO: 658957 - DNA, 15 bp, Homo sapiens
atgtgacactttcac

SEQ ID NO: 658958 - DNA, 15 bp, Homo sapiens
tgtgacactttcact

SEQ ID NO: 658959 - DNA, 15 bp, Homo sapiens
gtgacactttcactt

SEQ ID NO: 658960 - DNA, 15 bp, Homo sapiens
tgacactttcactta

SEQ ID NO: 658961 - DNA, 15 bp, Homo sapiens
gacactttcacttat

SEQ ID NO: 658962 - DNA, 15 bp, Homo sapiens
acactttcacttata

SEQ ID NO: 658963 - DNA, 15 bp, Homo sapiens
cactttcacttatat

SEQ ID NO: 658964 - DNA, 15 bp, Homo sapiens
actttcacttatatt

SEQ ID NO: 658965 - DNA, 15 bp, Homo sapiens
ctttcacttatattt

SEQ ID NO: 658966 - DNA, 15 bp, Homo sapiens
tttcacttatatttc

SEQ ID NO: 658967 - DNA, 15 bp, Homo sapiens
ttcacttatatttca

SEQ ID NO: 658968 - DNA, 15 bp, Homo sapiens
tcacttatatttcat

SEQ ID NO: 658969 - DNA, 15 bp, Homo sapiens
cacttatatttcatt

SEQ ID NO: 658970 - DNA, 15 bp, Homo sapiens
acttatatttcattt

SEQ ID NO: 658971 - DNA, 15 bp, Homo sapiens
cttatatttcatttc

SEQ ID NO: 658972 - DNA, 15 bp, Homo sapiens
ttatatttcatttcc

SEQ ID NO: 658973 - DNA, 15 bp, Homo sapiens
tatatttcatttcct

SEQ ID NO: 658974 - DNA, 15 bp, Homo sapiens
atatttcatttccta

SEQ ID NO: 658975 - DNA, 15 bp, Homo sapiens
tatttcatttcctag

SEQ ID NO: 658976 - DNA, 15 bp, Homo sapiens
atttcatttcctaga

SEQ ID NO: 658977 - DNA, 15 bp, Homo sapiens
tttcatttcctagaa

SEQ ID NO: 658978 - DNA, 15 bp, Homo sapiens
ttcatttcctagaac

SEQ ID NO: 658979 - DNA, 15 bp, Homo sapiens
tcatttcctagaact

SEQ ID NO: 658980 - DNA, 15 bp, Homo sapiens
catttcctagaactt

SEQ ID NO: 658981 - DNA, 15 bp, Homo sapiens
atttcctagaacttg

SEQ ID NO: 658982 - DNA, 15 bp, Homo sapiens
tttcctagaacttga

SEQ ID NO: 658983 - DNA, 15 bp, Homo sapiens
ttcctagaacttgaa

SEQ ID NO: 658984 - DNA, 15 bp, Homo sapiens
tcctagaacttgaac

SEQ ID NO: 658985 - DNA, 15 bp, Homo sapiens
cctagaacttgaaca

SEQ ID NO: 658986 - DNA, 15 bp, Homo sapiens
ctagaacttgaacac

SEQ ID NO: 658987 - DNA, 15 bp, Homo sapiens
tagaacttgaacaca

SEQ ID NO: 658988 - DNA, 15 bp, Homo sapiens
agaacttgaacacat

SEQ ID NO: 658989 - DNA, 15 bp, Homo sapiens
gaacttgaacacata

SEQ ID NO: 658990 - DNA, 15 bp, Homo sapiens
aacttgaacacatag

SEQ ID NO: 658991 - DNA, 15 bp, Homo sapiens
acttgaacacatagc

SEQ ID NO: 658992 - DNA, 15 bp, Homo sapiens
cttgaacacatagcc

SEQ ID NO: 658993 - DNA, 15 bp, Homo sapiens
ttgaacacatagcca

SEQ ID NO: 658994 - DNA, 15 bp, Homo sapiens
tgaacacatagccac

SEQ ID NO: 658995 - DNA, 15 bp, Homo sapiens
gaacacatagccaca

SEQ ID NO: 658996 - DNA, 15 bp, Homo sapiens
aacacatagccacac

SEQ ID NO: 658997 - DNA, 15 bp, Homo sapiens
acacatagccacaca

SEQ ID NO: 658998 - DNA, 15 bp, Homo sapiens
cacatagccacacag

SEQ ID NO: 658999 - DNA, 15 bp, Homo sapiens
acatagccacacaga

SEQ ID NO: 659000 - DNA, 15 bp, Homo sapiens
catagccacacagag

SEQ ID NO: 659001 - DNA, 15 bp, Homo sapiens
atagccacacagagt

SEQ ID NO: 659002 - DNA, 15 bp, Homo sapiens
tagccacacagagtt

SEQ ID NO: 659003 - DNA, 15 bp, Homo sapiens
agccacacagagttc

SEQ ID NO: 659004 - DNA, 15 bp, Homo sapiens
gccacacagagttct

SEQ ID NO: 659005 - DNA, 15 bp, Homo sapiens
ccacacagagttcta

SEQ ID NO: 659006 - DNA, 15 bp, Homo sapiens
cacacagagttctaa

SEQ ID NO: 659007 - DNA, 15 bp, Homo sapiens
acacagagttctaag

SEQ ID NO: 659008 - DNA, 15 bp, Homo sapiens
cacagagttctaagt

SEQ ID NO: 659009 - DNA, 15 bp, Homo sapiens
acagagttctaagtt

SEQ ID NO: 659010 - DNA, 15 bp, Homo sapiens
cagagttctaagtta

SEQ ID NO: 659011 - DNA, 15 bp, Homo sapiens
agagttctaagttag

SEQ ID NO: 659012 - DNA, 15 bp, Homo sapiens
gagttctaagttagg

SEQ ID NO: 659013 - DNA, 15 bp, Homo sapiens
agttctaagttaggc

SEQ ID NO: 659014 - DNA, 15 bp, Homo sapiens
gttctaagttaggct

SEQ ID NO: 659015 - DNA, 15 bp, Homo sapiens
ttctaagttaggctg

SEQ ID NO: 659016 - DNA, 15 bp, Homo sapiens
tctaagttaggctgg

SEQ ID NO: 659017 - DNA, 15 bp, Homo sapiens
ctaagttaggctgga

SEQ ID NO: 659018 - DNA, 15 bp, Homo sapiens
taagttaggctggaa

SEQ ID NO: 659019 - DNA, 15 bp, Homo sapiens
aagttaggctggaaa

SEQ ID NO: 659020 - DNA, 15 bp, Homo sapiens
agttaggctggaaaa

SEQ ID NO: 659021 - DNA, 15 bp, Homo sapiens
gttaggctggaaaat

SEQ ID NO: 659022 - DNA, 15 bp, Homo sapiens
ttaggctggaaaata

SEQ ID NO: 659023 - DNA, 15 bp, Homo sapiens
taggctggaaaatac

SEQ ID NO: 659024 - DNA, 15 bp, Homo sapiens
aggctggaaaataca

SEQ ID NO: 659025 - DNA, 15 bp, Homo sapiens
ggctggaaaatacag

SEQ ID NO: 659026 - DNA, 15 bp, Homo sapiens
gctggaaaatacagt

SEQ ID NO: 659027 - DNA, 15 bp, Homo sapiens
ctggaaaatacagtt

SEQ ID NO: 659028 - DNA, 15 bp, Homo sapiens
tggaaaatacagtta

SEQ ID NO: 659029 - DNA, 15 bp, Homo sapiens
ggaaaatacagttag

SEQ ID NO: 659030 - DNA, 15 bp, Homo sapiens
gaaaatacagttagc

SEQ ID NO: 659031 - DNA, 15 bp, Homo sapiens
aaaatacagttagct

SEQ ID NO: 659032 - DNA, 15 bp, Homo sapiens
aaatacagttagctg

SEQ ID NO: 659033 - DNA, 15 bp, Homo sapiens
aatacagttagctga

SEQ ID NO: 659034 - DNA, 15 bp, Homo sapiens
atacagttagctgaa

SEQ ID NO: 659035 - DNA, 15 bp, Homo sapiens
tacagttagctgaaa

SEQ ID NO: 659036 - DNA, 15 bp, Homo sapiens
acagttagctgaaaa

SEQ ID NO: 659037 - DNA, 15 bp, Homo sapiens
cagttagctgaaaat

SEQ ID NO: 659038 - DNA, 15 bp, Homo sapiens
agttagctgaaaatt

SEQ ID NO: 659039 - DNA, 15 bp, Homo sapiens
gttagctgaaaatta

SEQ ID NO: 659040 - DNA, 15 bp, Homo sapiens
ttagctgaaaattag

SEQ ID NO: 659041 - DNA, 15 bp, Homo sapiens
tagctgaaaattagg

SEQ ID NO: 659042 - DNA, 15 bp, Homo sapiens
agctgaaaattaggg

SEQ ID NO: 659043 - DNA, 15 bp, Homo sapiens
gctgaaaattagggt

SEQ ID NO: 659044 - DNA, 15 bp, Homo sapiens
ctgaaaattagggtt

SEQ ID NO: 659045 - DNA, 15 bp, Homo sapiens
tgaaaattagggttt

SEQ ID NO: 659046 - DNA, 15 bp, Homo sapiens
gaaaattagggtttc

SEQ ID NO: 659047 - DNA, 15 bp, Homo sapiens
aaaattagggtttct

SEQ ID NO: 659048 - DNA, 15 bp, Homo sapiens
aaattagggtttcta

SEQ ID NO: 659049 - DNA, 15 bp, Homo sapiens
aattagggtttctat

SEQ ID NO: 659050 - DNA, 15 bp, Homo sapiens
attagggtttctatt

SEQ ID NO: 659051 - DNA, 15 bp, Homo sapiens
ttagggtttctatta

SEQ ID NO: 659052 - DNA, 15 bp, Homo sapiens
tagggtttctattac

SEQ ID NO: 659053 - DNA, 15 bp, Homo sapiens
agggtttctattact

SEQ ID NO: 659054 - DNA, 15 bp, Homo sapiens
gggtttctattactg

SEQ ID NO: 659055 - DNA, 15 bp, Homo sapiens
ggtttctattactgc

SEQ ID NO: 659056 - DNA, 15 bp, Homo sapiens
gtttctattactgca

SEQ ID NO: 659057 - DNA, 15 bp, Homo sapiens
tttctattactgcag

SEQ ID NO: 659058 - DNA, 15 bp, Homo sapiens
ttctattactgcaga

SEQ ID NO: 659059 - DNA, 15 bp, Homo sapiens
tctattactgcagaa

SEQ ID NO: 659060 - DNA, 15 bp, Homo sapiens
ctattactgcagaaa

SEQ ID NO: 659061 - DNA, 15 bp, Homo sapiens
tattactgcagaaag

SEQ ID NO: 659062 - DNA, 15 bp, Homo sapiens
attactgcagaaaga

SEQ ID NO: 659063 - DNA, 15 bp, Homo sapiens
ttactgcagaaagag

SEQ ID NO: 659064 - DNA, 15 bp, Homo sapiens
tactgcagaaagagg

SEQ ID NO: 659065 - DNA, 15 bp, Homo sapiens
actgcagaaagaggg

SEQ ID NO: 659066 - DNA, 15 bp, Homo sapiens
ctgcagaaagaggga

SEQ ID NO: 659067 - DNA, 15 bp, Homo sapiens
tgcagaaagagggaa

SEQ ID NO: 659068 - DNA, 15 bp, Homo sapiens
gcagaaagagggaaa

SEQ ID NO: 659069 - DNA, 15 bp, Homo sapiens
cagaaagagggaaaa

SEQ ID NO: 659070 - DNA, 15 bp, Homo sapiens
agaaagagggaaaat

SEQ ID NO: 659071 - DNA, 15 bp, Homo sapiens
gaaagagggaaaata

SEQ ID NO: 659072 - DNA, 15 bp, Homo sapiens
aaagagggaaaatag

SEQ ID NO: 659073 - DNA, 15 bp, Homo sapiens
aagagggaaaatagc

SEQ ID NO: 659074 - DNA, 15 bp, Homo sapiens
agagggaaaatagct

SEQ ID NO: 659075 - DNA, 15 bp, Homo sapiens
gagggaaaatagcta

SEQ ID NO: 659076 - DNA, 15 bp, Homo sapiens
agggaaaatagctat

SEQ ID NO: 659077 - DNA, 15 bp, Homo sapiens
gggaaaatagctatt

SEQ ID NO: 659078 - DNA, 15 bp, Homo sapiens
ggaaaatagctattg

SEQ ID NO: 659079 - DNA, 15 bp, Homo sapiens
gaaaatagctattgg

SEQ ID NO: 659080 - DNA, 15 bp, Homo sapiens
aaaatagctattggg

SEQ ID NO: 659081 - DNA, 15 bp, Homo sapiens
aaatagctattggga

SEQ ID NO: 659082 - DNA, 15 bp, Homo sapiens
aatagctattgggaa

SEQ ID NO: 659083 - DNA, 15 bp, Homo sapiens
atagctattgggaaa

SEQ ID NO: 659084 - DNA, 15 bp, Homo sapiens
tagctattgggaaat

SEQ ID NO: 659085 - DNA, 15 bp, Homo sapiens
agctattgggaaatt

SEQ ID NO: 659086 - DNA, 15 bp, Homo sapiens
gctattgggaaatta

SEQ ID NO: 659087 - DNA, 15 bp, Homo sapiens
ctattgggaaattac

SEQ ID NO: 659088 - DNA, 15 bp, Homo sapiens
tattgggaaattact

SEQ ID NO: 659089 - DNA, 15 bp, Homo sapiens
attgggaaattacta

SEQ ID NO: 659090 - DNA, 15 bp, Homo sapiens
ttgggaaattactag

SEQ ID NO: 659091 - DNA, 15 bp, Homo sapiens
tgggaaattactagg

SEQ ID NO: 659092 - DNA, 15 bp, Homo sapiens
gggaaattactagga

SEQ ID NO: 659093 - DNA, 15 bp, Homo sapiens
ggaaattactaggaa

SEQ ID NO: 659094 - DNA, 15 bp, Homo sapiens
gaaattactaggaat

SEQ ID NO: 659095 - DNA, 15 bp, Homo sapiens
aaattactaggaatc

SEQ ID NO: 659096 - DNA, 15 bp, Homo sapiens
aattactaggaatct

SEQ ID NO: 659097 - DNA, 15 bp, Homo sapiens
attactaggaatctc

SEQ ID NO: 659098 - DNA, 15 bp, Homo sapiens
ttactaggaatctct

SEQ ID NO: 659099 - DNA, 15 bp, Homo sapiens
tactaggaatctctg

SEQ ID NO: 659100 - DNA, 15 bp, Homo sapiens
actaggaatctctgc

SEQ ID NO: 659101 - DNA, 15 bp, Homo sapiens
ctaggaatctctgcc

SEQ ID NO: 659102 - DNA, 15 bp, Homo sapiens
taggaatctctgcca

SEQ ID NO: 659103 - DNA, 15 bp, Homo sapiens
aggaatctctgccaa

SEQ ID NO: 659104 - DNA, 15 bp, Homo sapiens
ggaatctctgccaaa

SEQ ID NO: 659105 - DNA, 15 bp, Homo sapiens
gaatctctgccaaag

SEQ ID NO: 659106 - DNA, 15 bp, Homo sapiens
aatctctgccaaaga

SEQ ID NO: 659107 - DNA, 15 bp, Homo sapiens
atctctgccaaagac

SEQ ID NO: 659108 - DNA, 15 bp, Homo sapiens
tctctgccaaagacg

SEQ ID NO: 659109 - DNA, 15 bp, Homo sapiens
ctctgccaaagacgc

SEQ ID NO: 659110 - DNA, 15 bp, Homo sapiens
tctgccaaagacgct

SEQ ID NO: 659111 - DNA, 15 bp, Homo sapiens
ctgccaaagacgcta

SEQ ID NO: 659112 - DNA, 15 bp, Homo sapiens
tgccaaagacgctat

SEQ ID NO: 659113 - DNA, 15 bp, Homo sapiens
gccaaagacgctatc

SEQ ID NO: 659114 - DNA, 15 bp, Homo sapiens
ccaaagacgctatcc

SEQ ID NO: 659115 - DNA, 15 bp, Homo sapiens
caaagacgctatccc

SEQ ID NO: 659116 - DNA, 15 bp, Homo sapiens
aaagacgctatccct

SEQ ID NO: 659117 - DNA, 15 bp, Homo sapiens
aagacgctatccctg

SEQ ID NO: 659118 - DNA, 15 bp, Homo sapiens
agacgctatccctga

SEQ ID NO: 659119 - DNA, 15 bp, Homo sapiens
gacgctatccctgag

SEQ ID NO: 659120 - DNA, 15 bp, Homo sapiens
acgctatccctgagc

SEQ ID NO: 659121 - DNA, 15 bp, Homo sapiens
cgctatccctgagct

SEQ ID NO: 659122 - DNA, 15 bp, Homo sapiens
gctatccctgagctc

SEQ ID NO: 659123 - DNA, 15 bp, Homo sapiens
ctatccctgagctcc

SEQ ID NO: 659124 - DNA, 15 bp, Homo sapiens
tatccctgagctcct

SEQ ID NO: 659125 - DNA, 15 bp, Homo sapiens
atccctgagctcctt

SEQ ID NO: 659126 - DNA, 15 bp, Homo sapiens
tccctgagctcctta

SEQ ID NO: 659127 - DNA, 15 bp, Homo sapiens
ccctgagctccttac

SEQ ID NO: 659128 - DNA, 15 bp, Homo sapiens
cctgagctccttacg

SEQ ID NO: 659129 - DNA, 15 bp, Homo sapiens
ctgagctccttacgt

SEQ ID NO: 659130 - DNA, 15 bp, Homo sapiens
tgagctccttacgtt

SEQ ID NO: 659131 - DNA, 15 bp, Homo sapiens
gagctccttacgttc

SEQ ID NO: 659132 - DNA, 15 bp, Homo sapiens
agctccttacgttct

SEQ ID NO: 659133 - DNA, 15 bp, Homo sapiens
gctccttacgttcta

SEQ ID NO: 659134 - DNA, 15 bp, Homo sapiens
ctccttacgttctac

SEQ ID NO: 659135 - DNA, 15 bp, Homo sapiens
tccttacgttctacc

SEQ ID NO: 659136 - DNA, 15 bp, Homo sapiens
ccttacgttctacca

SEQ ID NO: 659137 - DNA, 15 bp, Homo sapiens
cttacgttctaccac

SEQ ID NO: 659138 - DNA, 15 bp, Homo sapiens
ttacgttctaccact

SEQ ID NO: 659139 - DNA, 15 bp, Homo sapiens
tacgttctaccactt

SEQ ID NO: 659140 - DNA, 15 bp, Homo sapiens
acgttctaccacttg

SEQ ID NO: 659141 - DNA, 15 bp, Homo sapiens
cgttctaccacttga

SEQ ID NO: 659142 - DNA, 15 bp, Homo sapiens
gttctaccacttgag

SEQ ID NO: 659143 - DNA, 15 bp, Homo sapiens
ttctaccacttgagt

SEQ ID NO: 659144 - DNA, 15 bp, Homo sapiens
tctaccacttgagtg

SEQ ID NO: 659145 - DNA, 15 bp, Homo sapiens
ctaccacttgagtgc

SEQ ID NO: 659146 - DNA, 15 bp, Homo sapiens
taccacttgagtgcc

SEQ ID NO: 659147 - DNA, 15 bp, Homo sapiens
accacttgagtgccc

SEQ ID NO: 659148 - DNA, 15 bp, Homo sapiens
ccacttgagtgcccc

SEQ ID NO: 659149 - DNA, 15 bp, Homo sapiens
cacttgagtgcccca

SEQ ID NO: 659150 - DNA, 15 bp, Homo sapiens
acttgagtgccccaa

SEQ ID NO: 659151 - DNA, 15 bp, Homo sapiens
cttgagtgccccaaa

SEQ ID NO: 659152 - DNA, 15 bp, Homo sapiens
ttgagtgccccaaat

SEQ ID NO: 659153 - DNA, 15 bp, Homo sapiens
tgagtgccccaaatc

SEQ ID NO: 659154 - DNA, 15 bp, Homo sapiens
gagtgccccaaatca

SEQ ID NO: 659155 - DNA, 15 bp, Homo sapiens
agtgccccaaatcaa

SEQ ID NO: 659156 - DNA, 15 bp, Homo sapiens
gtgccccaaatcaag

SEQ ID NO: 659157 - DNA, 15 bp, Homo sapiens
tgccccaaatcaaga

SEQ ID NO: 659158 - DNA, 15 bp, Homo sapiens
gccccaaatcaagac

SEQ ID NO: 659159 - DNA, 15 bp, Homo sapiens
ccccaaatcaagaca

SEQ ID NO: 659160 - DNA, 15 bp, Homo sapiens
cccaaatcaagacac

SEQ ID NO: 659161 - DNA, 15 bp, Homo sapiens
ccaaatcaagacact

SEQ ID NO: 659162 - DNA, 15 bp, Homo sapiens
caaatcaagacacta

SEQ ID NO: 659163 - DNA, 15 bp, Homo sapiens
aaatcaagacactac

SEQ ID NO: 659164 - DNA, 15 bp, Homo sapiens
aatcaagacactaca

SEQ ID NO: 659165 - DNA, 15 bp, Homo sapiens
atcaagacactacaa

SEQ ID NO: 659166 - DNA, 15 bp, Homo sapiens
tcaagacactacaaa

SEQ ID NO: 659167 - DNA, 15 bp, Homo sapiens
caagacactacaaaa

SEQ ID NO: 659168 - DNA, 15 bp, Homo sapiens
aagacactacaaaat

SEQ ID NO: 659169 - DNA, 15 bp, Homo sapiens
agacactacaaaatg

SEQ ID NO: 659170 - DNA, 15 bp, Homo sapiens
gacactacaaaatga

SEQ ID NO: 659171 - DNA, 15 bp, Homo sapiens
acactacaaaatgaa

SEQ ID NO: 659172 - DNA, 15 bp, Homo sapiens
cactacaaaatgaaa

SEQ ID NO: 659173 - DNA, 15 bp, Homo sapiens
actacaaaatgaaag

SEQ ID NO: 659174 - DNA, 15 bp, Homo sapiens
ctacaaaatgaaagg

SEQ ID NO: 659175 - DNA, 15 bp, Homo sapiens
tacaaaatgaaaggt

SEQ ID NO: 659176 - DNA, 15 bp, Homo sapiens
acaaaatgaaaggtt

SEQ ID NO: 659177 - DNA, 15 bp, Homo sapiens
caaaatgaaaggttg

SEQ ID NO: 659178 - DNA, 15 bp, Homo sapiens
aaaatgaaaggttga

SEQ ID NO: 659179 - DNA, 15 bp, Homo sapiens
aaatgaaaggttgat

SEQ ID NO: 659180 - DNA, 15 bp, Homo sapiens
aatgaaaggttgatc

SEQ ID NO: 659181 - DNA, 15 bp, Homo sapiens
atgaaaggttgatct

SEQ ID NO: 659182 - DNA, 15 bp, Homo sapiens
tgaaaggttgatcta

SEQ ID NO: 659183 - DNA, 15 bp, Homo sapiens
gaaaggttgatctag

SEQ ID NO: 659184 - DNA, 15 bp, Homo sapiens
aaaggttgatctagt

SEQ ID NO: 659185 - DNA, 15 bp, Homo sapiens
aaggttgatctagtg

SEQ ID NO: 659186 - DNA, 15 bp, Homo sapiens
aggttgatctagtgt

SEQ ID NO: 659187 - DNA, 15 bp, Homo sapiens
ggttgatctagtgtc

SEQ ID NO: 659188 - DNA, 15 bp, Homo sapiens
gttgatctagtgtca

SEQ ID NO: 659189 - DNA, 15 bp, Homo sapiens
ttgatctagtgtcag

SEQ ID NO: 659190 - DNA, 15 bp, Homo sapiens
tgatctagtgtcagc

SEQ ID NO: 659191 - DNA, 15 bp, Homo sapiens
gatctagtgtcagcc

SEQ ID NO: 659192 - DNA, 15 bp, Homo sapiens
atctagtgtcagcca

SEQ ID NO: 659193 - DNA, 15 bp, Homo sapiens
tctagtgtcagccag

SEQ ID NO: 659194 - DNA, 15 bp, Homo sapiens
ctagtgtcagccaga

SEQ ID NO: 659195 - DNA, 15 bp, Homo sapiens
tagtgtcagccagat

SEQ ID NO: 659196 - DNA, 15 bp, Homo sapiens
agtgtcagccagatc

SEQ ID NO: 659197 - DNA, 15 bp, Homo sapiens
gtgtcagccagatct

SEQ ID NO: 659198 - DNA, 15 bp, Homo sapiens
tgtcagccagatcta

SEQ ID NO: 659199 - DNA, 15 bp, Homo sapiens
gtcagccagatctag

SEQ ID NO: 659200 - DNA, 15 bp, Homo sapiens
tcagccagatctaga

SEQ ID NO: 659201 - DNA, 15 bp, Homo sapiens
cagccagatctagat

SEQ ID NO: 659202 - DNA, 15 bp, Homo sapiens
agccagatctagatg

SEQ ID NO: 659203 - DNA, 15 bp, Homo sapiens
gccagatctagatgc

SEQ ID NO: 659204 - DNA, 15 bp, Homo sapiens
ccagatctagatgcc

SEQ ID NO: 659205 - DNA, 15 bp, Homo sapiens
cagatctagatgcca

SEQ ID NO: 659206 - DNA, 15 bp, Homo sapiens
agatctagatgccag

SEQ ID NO: 659207 - DNA, 15 bp, Homo sapiens
gatctagatgccagt

SEQ ID NO: 659208 - DNA, 15 bp, Homo sapiens
atctagatgccagtc

SEQ ID NO: 659209 - DNA, 15 bp, Homo sapiens
tctagatgccagtcc

SEQ ID NO: 659210 - DNA, 15 bp, Homo sapiens
ctagatgccagtcct

SEQ ID NO: 659211 - DNA, 15 bp, Homo sapiens
tagatgccagtccta

SEQ ID NO: 659212 - DNA, 15 bp, Homo sapiens
agatgccagtcctat

SEQ ID NO: 659213 - DNA, 15 bp, Homo sapiens
gatgccagtcctatt

SEQ ID NO: 659214 - DNA, 15 bp, Homo sapiens
atgccagtcctatta

SEQ ID NO: 659215 - DNA, 15 bp, Homo sapiens
tgccagtcctattag

SEQ ID NO: 659216 - DNA, 15 bp, Homo sapiens
gccagtcctattagc

SEQ ID NO: 659217 - DNA, 15 bp, Homo sapiens
ccagtcctattagca

SEQ ID NO: 659218 - DNA, 15 bp, Homo sapiens
cagtcctattagcat

SEQ ID NO: 659219 - DNA, 15 bp, Homo sapiens
agtcctattagcatc

SEQ ID NO: 659220 - DNA, 15 bp, Homo sapiens
gtcctattagcatca

SEQ ID NO: 659221 - DNA, 15 bp, Homo sapiens
tcctattagcatcac

SEQ ID NO: 659222 - DNA, 15 bp, Homo sapiens
cctattagcatcact

SEQ ID NO: 659223 - DNA, 15 bp, Homo sapiens
ctattagcatcactt

SEQ ID NO: 659224 - DNA, 15 bp, Homo sapiens
tattagcatcactta

SEQ ID NO: 659225 - DNA, 15 bp, Homo sapiens
attagcatcacttaa

SEQ ID NO: 659226 - DNA, 15 bp, Homo sapiens
ttagcatcacttaat

SEQ ID NO: 659227 - DNA, 15 bp, Homo sapiens
tagcatcacttaatg

SEQ ID NO: 659228 - DNA, 15 bp, Homo sapiens
agcatcacttaatga

SEQ ID NO: 659229 - DNA, 15 bp, Homo sapiens
gcatcacttaatgag

SEQ ID NO: 659230 - DNA, 15 bp, Homo sapiens
catcacttaatgagc

SEQ ID NO: 659231 - DNA, 15 bp, Homo sapiens
atcacttaatgagct

SEQ ID NO: 659232 - DNA, 15 bp, Homo sapiens
tcacttaatgagctt

SEQ ID NO: 659233 - DNA, 15 bp, Homo sapiens
cacttaatgagcttt

SEQ ID NO: 659234 - DNA, 15 bp, Homo sapiens
acttaatgagctttg

SEQ ID NO: 659235 - DNA, 15 bp, Homo sapiens
cttaatgagctttgt

SEQ ID NO: 659236 - DNA, 15 bp, Homo sapiens
ttaatgagctttgtg

SEQ ID NO: 659237 - DNA, 15 bp, Homo sapiens
taatgagctttgtga

SEQ ID NO: 659238 - DNA, 15 bp, Homo sapiens
aatgagctttgtgat

SEQ ID NO: 659239 - DNA, 15 bp, Homo sapiens
atgagctttgtgatc

SEQ ID NO: 659240 - DNA, 15 bp, Homo sapiens
tgagctttgtgatct

SEQ ID NO: 659241 - DNA, 15 bp, Homo sapiens
gagctttgtgatctc

SEQ ID NO: 659242 - DNA, 15 bp, Homo sapiens
agctttgtgatctct

SEQ ID NO: 659243 - DNA, 15 bp, Homo sapiens
gctttgtgatctctg

SEQ ID NO: 659244 - DNA, 15 bp, Homo sapiens
ctttgtgatctctga

SEQ ID NO: 659245 - DNA, 15 bp, Homo sapiens
tttgtgatctctgag

SEQ ID NO: 659246 - DNA, 15 bp, Homo sapiens
ttgtgatctctgagc

SEQ ID NO: 659247 - DNA, 15 bp, Homo sapiens
tgtgatctctgagcc

SEQ ID NO: 659248 - DNA, 15 bp, Homo sapiens
gtgatctctgagcca

SEQ ID NO: 659249 - DNA, 15 bp, Homo sapiens
tgatctctgagccat

SEQ ID NO: 659250 - DNA, 15 bp, Homo sapiens
gatctctgagccatt

SEQ ID NO: 659251 - DNA, 15 bp, Homo sapiens
atctctgagccattt

SEQ ID NO: 659252 - DNA, 15 bp, Homo sapiens
tctctgagccatttt

SEQ ID NO: 659253 - DNA, 15 bp, Homo sapiens
ctctgagccattttc

SEQ ID NO: 659254 - DNA, 15 bp, Homo sapiens
tctgagccattttcc

SEQ ID NO: 659255 - DNA, 15 bp, Homo sapiens
ctgagccattttcca

SEQ ID NO: 659256 - DNA, 15 bp, Homo sapiens
tgagccattttccat

SEQ ID NO: 659257 - DNA, 15 bp, Homo sapiens
gagccattttccatg

SEQ ID NO: 659258 - DNA, 15 bp, Homo sapiens
agccattttccatgc

SEQ ID NO: 659259 - DNA, 15 bp, Homo sapiens
gccattttccatgct

SEQ ID NO: 659260 - DNA, 15 bp, Homo sapiens
ccattttccatgcta

SEQ ID NO: 659261 - DNA, 15 bp, Homo sapiens
cattttccatgctat

SEQ ID NO: 659262 - DNA, 15 bp, Homo sapiens
attttccatgctatc

SEQ ID NO: 659263 - DNA, 15 bp, Homo sapiens
ttttccatgctatca

SEQ ID NO: 659264 - DNA, 15 bp, Homo sapiens
tttccatgctatcaa

SEQ ID NO: 659265 - DNA, 15 bp, Homo sapiens
ttccatgctatcaaa

SEQ ID NO: 659266 - DNA, 15 bp, Homo sapiens
tccatgctatcaaaa

SEQ ID NO: 659267 - DNA, 15 bp, Homo sapiens
ccatgctatcaaaaa

SEQ ID NO: 659268 - DNA, 15 bp, Homo sapiens
catgctatcaaaaac

SEQ ID NO: 659269 - DNA, 15 bp, Homo sapiens
atgctatcaaaaaca

SEQ ID NO: 659270 - DNA, 15 bp, Homo sapiens
tgctatcaaaaacag

SEQ ID NO: 659271 - DNA, 15 bp, Homo sapiens
gctatcaaaaacagc

SEQ ID NO: 659272 - DNA, 15 bp, Homo sapiens
ctatcaaaaacagca

SEQ ID NO: 659273 - DNA, 15 bp, Homo sapiens
tatcaaaaacagcaa

SEQ ID NO: 659274 - DNA, 15 bp, Homo sapiens
atcaaaaacagcaat

SEQ ID NO: 659275 - DNA, 15 bp, Homo sapiens
tcaaaaacagcaata

SEQ ID NO: 659276 - DNA, 15 bp, Homo sapiens
caaaaacagcaataa

SEQ ID NO: 659277 - DNA, 15 bp, Homo sapiens
aaaaacagcaataac

SEQ ID NO: 659278 - DNA, 15 bp, Homo sapiens
aaaacagcaataaca

SEQ ID NO: 659279 - DNA, 15 bp, Homo sapiens
aaacagcaataacac

SEQ ID NO: 659280 - DNA, 15 bp, Homo sapiens
aacagcaataacacc

SEQ ID NO: 659281 - DNA, 15 bp, Homo sapiens
acagcaataacacct

SEQ ID NO: 659282 - DNA, 15 bp, Homo sapiens
cagcaataacacctc

SEQ ID NO: 659283 - DNA, 15 bp, Homo sapiens
agcaataacacctcc

SEQ ID NO: 659284 - DNA, 15 bp, Homo sapiens
gcaataacacctccc

SEQ ID NO: 659285 - DNA, 15 bp, Homo sapiens
caataacacctccct

SEQ ID NO: 659286 - DNA, 15 bp, Homo sapiens
aataacacctcccta

SEQ ID NO: 659287 - DNA, 15 bp, Homo sapiens
ataacacctccctat

SEQ ID NO: 659288 - DNA, 15 bp, Homo sapiens
taacacctccctatt

SEQ ID NO: 659289 - DNA, 15 bp, Homo sapiens
aacacctccctatta

SEQ ID NO: 659290 - DNA, 15 bp, Homo sapiens
acacctccctattag

SEQ ID NO: 659291 - DNA, 15 bp, Homo sapiens
cacctccctattagg

SEQ ID NO: 659292 - DNA, 15 bp, Homo sapiens
acctccctattaggt

SEQ ID NO: 659293 - DNA, 15 bp, Homo sapiens
cctccctattaggtt

SEQ ID NO: 659294 - DNA, 15 bp, Homo sapiens
ctccctattaggttc

SEQ ID NO: 659295 - DNA, 15 bp, Homo sapiens
tccctattaggttcc

SEQ ID NO: 659296 - DNA, 15 bp, Homo sapiens
ccctattaggttcct

SEQ ID NO: 659297 - DNA, 15 bp, Homo sapiens
cctattaggttcctg

SEQ ID NO: 659298 - DNA, 15 bp, Homo sapiens
ctattaggttcctgt

SEQ ID NO: 659299 - DNA, 15 bp, Homo sapiens
tattaggttcctgta

SEQ ID NO: 659300 - DNA, 15 bp, Homo sapiens
attaggttcctgtag

SEQ ID NO: 659301 - DNA, 15 bp, Homo sapiens
ttaggttcctgtagg

SEQ ID NO: 659302 - DNA, 15 bp, Homo sapiens
taggttcctgtagga

SEQ ID NO: 659303 - DNA, 15 bp, Homo sapiens
aggttcctgtaggat

SEQ ID NO: 659304 - DNA, 15 bp, Homo sapiens
ggttcctgtaggatg

SEQ ID NO: 659305 - DNA, 15 bp, Homo sapiens
gttcctgtaggatga

SEQ ID NO: 659306 - DNA, 15 bp, Homo sapiens
ttcctgtaggatgat

SEQ ID NO: 659307 - DNA, 15 bp, Homo sapiens
tcctgtaggatgata

SEQ ID NO: 659308 - DNA, 15 bp, Homo sapiens
cctgtaggatgatat

SEQ ID NO: 659309 - DNA, 15 bp, Homo sapiens
ctgtaggatgatata

SEQ ID NO: 659310 - DNA, 15 bp, Homo sapiens
tgtaggatgatataa

SEQ ID NO: 659311 - DNA, 15 bp, Homo sapiens
gtaggatgatataag

SEQ ID NO: 659312 - DNA, 15 bp, Homo sapiens
taggatgatataaga

SEQ ID NO: 659313 - DNA, 15 bp, Homo sapiens
aggatgatataagat

SEQ ID NO: 659314 - DNA, 15 bp, Homo sapiens
ggatgatataagata

SEQ ID NO: 659315 - DNA, 15 bp, Homo sapiens
gatgatataagataa

SEQ ID NO: 659316 - DNA, 15 bp, Homo sapiens
atgatataagataac

SEQ ID NO: 659317 - DNA, 15 bp, Homo sapiens
tgatataagataacc

SEQ ID NO: 659318 - DNA, 15 bp, Homo sapiens
gatataagataacca

SEQ ID NO: 659319 - DNA, 15 bp, Homo sapiens
atataagataaccag

SEQ ID NO: 659320 - DNA, 15 bp, Homo sapiens
tataagataaccagt

SEQ ID NO: 659321 - DNA, 15 bp, Homo sapiens
ataagataaccagtg

SEQ ID NO: 659322 - DNA, 15 bp, Homo sapiens
taagataaccagtgg

SEQ ID NO: 659323 - DNA, 15 bp, Homo sapiens
aagataaccagtggt

SEQ ID NO: 659324 - DNA, 15 bp, Homo sapiens
agataaccagtggtg

SEQ ID NO: 659325 - DNA, 15 bp, Homo sapiens
gataaccagtggtgc

SEQ ID NO: 659326 - DNA, 15 bp, Homo sapiens
ataaccagtggtgcc

SEQ ID NO: 659327 - DNA, 15 bp, Homo sapiens
taaccagtggtgcct

SEQ ID NO: 659328 - DNA, 15 bp, Homo sapiens
aaccagtggtgccta

SEQ ID NO: 659329 - DNA, 15 bp, Homo sapiens
accagtggtgcctag

SEQ ID NO: 659330 - DNA, 15 bp, Homo sapiens
ccagtggtgcctagc

SEQ ID NO: 659331 - DNA, 15 bp, Homo sapiens
cagtggtgcctagca

SEQ ID NO: 659332 - DNA, 15 bp, Homo sapiens
agtggtgcctagcac

SEQ ID NO: 659333 - DNA, 15 bp, Homo sapiens
gtggtgcctagcaca

SEQ ID NO: 659334 - DNA, 15 bp, Homo sapiens
tggtgcctagcacag

SEQ ID NO: 659335 - DNA, 15 bp, Homo sapiens
ggtgcctagcacagt

SEQ ID NO: 659336 - DNA, 15 bp, Homo sapiens
gtgcctagcacagtg

SEQ ID NO: 659337 - DNA, 15 bp, Homo sapiens
tgcctagcacagtgc

SEQ ID NO: 659338 - DNA, 15 bp, Homo sapiens
gcctagcacagtgcc

SEQ ID NO: 659339 - DNA, 15 bp, Homo sapiens
cctagcacagtgcct

SEQ ID NO: 659340 - DNA, 15 bp, Homo sapiens
ctagcacagtgcctg

SEQ ID NO: 659341 - DNA, 15 bp, Homo sapiens
tagcacagtgcctgg

SEQ ID NO: 659342 - DNA, 15 bp, Homo sapiens
agcacagtgcctggc

SEQ ID NO: 659343 - DNA, 15 bp, Homo sapiens
gcacagtgcctggca

SEQ ID NO: 659344 - DNA, 15 bp, Homo sapiens
cacagtgcctggcat

SEQ ID NO: 659345 - DNA, 15 bp, Homo sapiens
acagtgcctggcata

SEQ ID NO: 659346 - DNA, 15 bp, Homo sapiens
cagtgcctggcatat

SEQ ID NO: 659347 - DNA, 15 bp, Homo sapiens
agtgcctggcatata

SEQ ID NO: 659348 - DNA, 15 bp, Homo sapiens
gtgcctggcatatat

SEQ ID NO: 659349 - DNA, 15 bp, Homo sapiens
tgcctggcatatatg

SEQ ID NO: 659350 - DNA, 15 bp, Homo sapiens
gcctggcatatatgg

SEQ ID NO: 659351 - DNA, 15 bp, Homo sapiens
cctggcatatatggt

SEQ ID NO: 659352 - DNA, 15 bp, Homo sapiens
ctggcatatatggta

SEQ ID NO: 659353 - DNA, 15 bp, Homo sapiens
tggcatatatggtag

SEQ ID NO: 659354 - DNA, 15 bp, Homo sapiens
ggcatatatggtaga

SEQ ID NO: 659355 - DNA, 15 bp, Homo sapiens
gcatatatggtagat

SEQ ID NO: 659356 - DNA, 15 bp, Homo sapiens
catatatggtagata

SEQ ID NO: 659357 - DNA, 15 bp, Homo sapiens
atatatggtagatac

SEQ ID NO: 659358 - DNA, 15 bp, Homo sapiens
tatatggtagatact

SEQ ID NO: 659359 - DNA, 15 bp, Homo sapiens
atatggtagatactt

SEQ ID NO: 659360 - DNA, 15 bp, Homo sapiens
tatggtagatactta

SEQ ID NO: 659361 - DNA, 15 bp, Homo sapiens
atggtagatacttag

SEQ ID NO: 659362 - DNA, 15 bp, Homo sapiens
tggtagatacttagt

SEQ ID NO: 659363 - DNA, 15 bp, Homo sapiens
ggtagatacttagtc

SEQ ID NO: 659364 - DNA, 15 bp, Homo sapiens
gtagatacttagtca

SEQ ID NO: 659365 - DNA, 15 bp, Homo sapiens
tagatacttagtcaa

SEQ ID NO: 659366 - DNA, 15 bp, Homo sapiens
agatacttagtcaac

SEQ ID NO: 659367 - DNA, 15 bp, Homo sapiens
gatacttagtcaaca

SEQ ID NO: 659368 - DNA, 15 bp, Homo sapiens
atacttagtcaacat

SEQ ID NO: 659369 - DNA, 15 bp, Homo sapiens
tacttagtcaacatt

SEQ ID NO: 659370 - DNA, 15 bp, Homo sapiens
acttagtcaacattt

SEQ ID NO: 659371 - DNA, 15 bp, Homo sapiens
cttagtcaacattta

SEQ ID NO: 659372 - DNA, 15 bp, Homo sapiens
ttagtcaacatttat

SEQ ID NO: 659373 - DNA, 15 bp, Homo sapiens
tagtcaacatttatt

SEQ ID NO: 659374 - DNA, 15 bp, Homo sapiens
agtcaacatttattt

SEQ ID NO: 659375 - DNA, 15 bp, Homo sapiens
gtcaacatttatttt

SEQ ID NO: 659376 - DNA, 15 bp, Homo sapiens
tcaacatttattttt

SEQ ID NO: 659377 - DNA, 15 bp, Homo sapiens
caacatttattttta

SEQ ID NO: 659378 - DNA, 15 bp, Homo sapiens
aacatttatttttac

SEQ ID NO: 659379 - DNA, 15 bp, Homo sapiens
acatttatttttacc

SEQ ID NO: 659380 - DNA, 15 bp, Homo sapiens
catttatttttacca

SEQ ID NO: 659381 - DNA, 15 bp, Homo sapiens
atttatttttaccat

SEQ ID NO: 659382 - DNA, 15 bp, Homo sapiens
tttatttttaccatt

SEQ ID NO: 659383 - DNA, 15 bp, Homo sapiens
ttatttttaccattc

SEQ ID NO: 659384 - DNA, 15 bp, Homo sapiens
tatttttaccattct

SEQ ID NO: 659385 - DNA, 15 bp, Homo sapiens
atttttaccattctt

SEQ ID NO: 659386 - DNA, 15 bp, Homo sapiens
tttttaccattcttt

SEQ ID NO: 659387 - DNA, 15 bp, Homo sapiens
ttttaccattctttc

SEQ ID NO: 659388 - DNA, 15 bp, Homo sapiens
tttaccattctttct

SEQ ID NO: 659389 - DNA, 15 bp, Homo sapiens
ttaccattctttctg

SEQ ID NO: 659390 - DNA, 15 bp, Homo sapiens
taccattctttctgc

SEQ ID NO: 659391 - DNA, 15 bp, Homo sapiens
accattctttctgca

SEQ ID NO: 659392 - DNA, 15 bp, Homo sapiens
ccattctttctgcat

SEQ ID NO: 659393 - DNA, 15 bp, Homo sapiens
cattctttctgcata

SEQ ID NO: 659394 - DNA, 15 bp, Homo sapiens
attctttctgcatat

SEQ ID NO: 659395 - DNA, 15 bp, Homo sapiens
ttctttctgcatata

SEQ ID NO: 659396 - DNA, 15 bp, Homo sapiens
tctttctgcatataa

SEQ ID NO: 659397 - DNA, 15 bp, Homo sapiens
ctttctgcatataag

SEQ ID NO: 659398 - DNA, 15 bp, Homo sapiens
tttctgcatataaga

SEQ ID NO: 659399 - DNA, 15 bp, Homo sapiens
ttctgcatataagac

SEQ ID NO: 659400 - DNA, 15 bp, Homo sapiens
tctgcatataagact

SEQ ID NO: 659401 - DNA, 15 bp, Homo sapiens
ctgcatataagactg

SEQ ID NO: 659402 - DNA, 15 bp, Homo sapiens
tgcatataagactgg

SEQ ID NO: 659403 - DNA, 15 bp, Homo sapiens
gcatataagactggc

SEQ ID NO: 659404 - DNA, 15 bp, Homo sapiens
catataagactggct

SEQ ID NO: 659405 - DNA, 15 bp, Homo sapiens
atataagactggctc

SEQ ID NO: 659406 - DNA, 15 bp, Homo sapiens
tataagactggctca

SEQ ID NO: 659407 - DNA, 15 bp, Homo sapiens
ataagactggctcag

SEQ ID NO: 659408 - DNA, 15 bp, Homo sapiens
taagactggctcagc

SEQ ID NO: 659409 - DNA, 15 bp, Homo sapiens
aagactggctcagct

SEQ ID NO: 659410 - DNA, 15 bp, Homo sapiens
agactggctcagctc

SEQ ID NO: 659411 - DNA, 15 bp, Homo sapiens
gactggctcagctcc

SEQ ID NO: 659412 - DNA, 15 bp, Homo sapiens
actggctcagctcca

SEQ ID NO: 659413 - DNA, 15 bp, Homo sapiens
ctggctcagctccac

SEQ ID NO: 659414 - DNA, 15 bp, Homo sapiens
tggctcagctccaca

SEQ ID NO: 659415 - DNA, 15 bp, Homo sapiens
ggctcagctccacag

SEQ ID NO: 659416 - DNA, 15 bp, Homo sapiens
gctcagctccacagt

SEQ ID NO: 659417 - DNA, 15 bp, Homo sapiens
ctcagctccacagtt

SEQ ID NO: 659418 - DNA, 15 bp, Homo sapiens
tcagctccacagttt

SEQ ID NO: 659419 - DNA, 15 bp, Homo sapiens
cagctccacagttta

SEQ ID NO: 659420 - DNA, 15 bp, Homo sapiens
agctccacagtttat

SEQ ID NO: 659421 - DNA, 15 bp, Homo sapiens
gctccacagtttata

SEQ ID NO: 659422 - DNA, 15 bp, Homo sapiens
ctccacagtttatat

SEQ ID NO: 659423 - DNA, 15 bp, Homo sapiens
tccacagtttatatc

SEQ ID NO: 659424 - DNA, 15 bp, Homo sapiens
ccacagtttatatca

SEQ ID NO: 659425 - DNA, 15 bp, Homo sapiens
cacagtttatatcaa

SEQ ID NO: 659426 - DNA, 15 bp, Homo sapiens
acagtttatatcaac

SEQ ID NO: 659427 - DNA, 15 bp, Homo sapiens
cagtttatatcaact

SEQ ID NO: 659428 - DNA, 15 bp, Homo sapiens
agtttatatcaactt

SEQ ID NO: 659429 - DNA, 15 bp, Homo sapiens
gtttatatcaacttg

SEQ ID NO: 659430 - DNA, 15 bp, Homo sapiens
tttatatcaacttgg

SEQ ID NO: 659431 - DNA, 15 bp, Homo sapiens
ttatatcaacttggg

SEQ ID NO: 659432 - DNA, 15 bp, Homo sapiens
tatatcaacttgggc

SEQ ID NO: 659433 - DNA, 15 bp, Homo sapiens
atatcaacttgggca

SEQ ID NO: 659434 - DNA, 15 bp, Homo sapiens
tatcaacttgggcac

SEQ ID NO: 659435 - DNA, 15 bp, Homo sapiens
atcaacttgggcaca

SEQ ID NO: 659436 - DNA, 15 bp, Homo sapiens
tcaacttgggcacaa

SEQ ID NO: 659437 - DNA, 15 bp, Homo sapiens
caacttgggcacaaa

SEQ ID NO: 659438 - DNA, 15 bp, Homo sapiens
aacttgggcacaaaa

SEQ ID NO: 659439 - DNA, 15 bp, Homo sapiens
acttgggcacaaaaa

SEQ ID NO: 659440 - DNA, 15 bp, Homo sapiens
cttgggcacaaaaac

SEQ ID NO: 659441 - DNA, 15 bp, Homo sapiens
ttgggcacaaaaaca

SEQ ID NO: 659442 - DNA, 15 bp, Homo sapiens
tgggcacaaaaacat

SEQ ID NO: 659443 - DNA, 15 bp, Homo sapiens
gggcacaaaaacatt

SEQ ID NO: 659444 - DNA, 15 bp, Homo sapiens
ggcacaaaaacatta

SEQ ID NO: 659445 - DNA, 15 bp, Homo sapiens
gcacaaaaacattaa

SEQ ID NO: 659446 - DNA, 15 bp, Homo sapiens
cacaaaaacattaac

SEQ ID NO: 659447 - DNA, 15 bp, Homo sapiens
acaaaaacattaaca

SEQ ID NO: 659448 - DNA, 15 bp, Homo sapiens
caaaaacattaacaa

SEQ ID NO: 659449 - DNA, 15 bp, Homo sapiens
aaaaacattaacaaa

SEQ ID NO: 659450 - DNA, 15 bp, Homo sapiens
aaaacattaacaaag

SEQ ID NO: 659451 - DNA, 15 bp, Homo sapiens
aaacattaacaaagt

SEQ ID NO: 659452 - DNA, 15 bp, Homo sapiens
aacattaacaaagtt

SEQ ID NO: 659453 - DNA, 15 bp, Homo sapiens
acattaacaaagttc

SEQ ID NO: 659454 - DNA, 15 bp, Homo sapiens
cattaacaaagttcc

SEQ ID NO: 659455 - DNA, 15 bp, Homo sapiens
attaacaaagttcct

SEQ ID NO: 659456 - DNA, 15 bp, Homo sapiens
ttaacaaagttcctg

SEQ ID NO: 659457 - DNA, 15 bp, Homo sapiens
taacaaagttcctgg

SEQ ID NO: 659458 - DNA, 15 bp, Homo sapiens
aacaaagttcctggc

SEQ ID NO: 659459 - DNA, 15 bp, Homo sapiens
acaaagttcctggcg

SEQ ID NO: 659460 - DNA, 15 bp, Homo sapiens
caaagttcctggcgg

SEQ ID NO: 659461 - DNA, 15 bp, Homo sapiens
aaagttcctggcggc

SEQ ID NO: 659462 - DNA, 15 bp, Homo sapiens
aagttcctggcggcc

SEQ ID NO: 659463 - DNA, 15 bp, Homo sapiens
agttcctggcggcca

SEQ ID NO: 659464 - DNA, 15 bp, Homo sapiens
gttcctggcggccat

SEQ ID NO: 659465 - DNA, 15 bp, Homo sapiens
ttcctggcggccata

SEQ ID NO: 659466 - DNA, 15 bp, Homo sapiens
tcctggcggccatat

SEQ ID NO: 659467 - DNA, 15 bp, Homo sapiens
cctggcggccatatt

SEQ ID NO: 659468 - DNA, 15 bp, Homo sapiens
ctggcggccatattt

SEQ ID NO: 659469 - DNA, 15 bp, Homo sapiens
tggcggccatatttc

SEQ ID NO: 659470 - DNA, 15 bp, Homo sapiens
ggcggccatatttct

SEQ ID NO: 659471 - DNA, 15 bp, Homo sapiens
gcggccatatttctt

SEQ ID NO: 659472 - DNA, 15 bp, Homo sapiens
cggccatatttcttg

SEQ ID NO: 659473 - DNA, 15 bp, Homo sapiens
ggccatatttcttga

SEQ ID NO: 659474 - DNA, 15 bp, Homo sapiens
gccatatttcttgag

SEQ ID NO: 659475 - DNA, 15 bp, Homo sapiens
ccatatttcttgagc

SEQ ID NO: 659476 - DNA, 15 bp, Homo sapiens
catatttcttgagca

SEQ ID NO: 659477 - DNA, 15 bp, Homo sapiens
atatttcttgagcaa

SEQ ID NO: 659478 - DNA, 15 bp, Homo sapiens
tatttcttgagcaat

SEQ ID NO: 659479 - DNA, 15 bp, Homo sapiens
atttcttgagcaatt

SEQ ID NO: 659480 - DNA, 15 bp, Homo sapiens
tttcttgagcaattt

SEQ ID NO: 659481 - DNA, 15 bp, Homo sapiens
ttcttgagcaatttt

SEQ ID NO: 659482 - DNA, 15 bp, Homo sapiens
tcttgagcaatttta

SEQ ID NO: 659483 - DNA, 15 bp, Homo sapiens
cttgagcaattttat

SEQ ID NO: 659484 - DNA, 15 bp, Homo sapiens
ttgagcaattttata

SEQ ID NO: 659485 - DNA, 15 bp, Homo sapiens
tgagcaattttatac

SEQ ID NO: 659486 - DNA, 15 bp, Homo sapiens
gagcaattttatact

SEQ ID NO: 659487 - DNA, 15 bp, Homo sapiens
agcaattttatactc

SEQ ID NO: 659488 - DNA, 15 bp, Homo sapiens
gcaattttatactct

SEQ ID NO: 659489 - DNA, 15 bp, Homo sapiens
caattttatactcta

SEQ ID NO: 659490 - DNA, 15 bp, Homo sapiens
aattttatactctat

SEQ ID NO: 659491 - DNA, 15 bp, Homo sapiens
attttatactctatc

SEQ ID NO: 659492 - DNA, 15 bp, Homo sapiens
ttttatactctatcc

SEQ ID NO: 659493 - DNA, 15 bp, Homo sapiens
tttatactctatcca

SEQ ID NO: 659494 - DNA, 15 bp, Homo sapiens
ttatactctatccat

SEQ ID NO: 659495 - DNA, 15 bp, Homo sapiens
tatactctatccatt

SEQ ID NO: 659496 - DNA, 15 bp, Homo sapiens
atactctatccatta

SEQ ID NO: 659497 - DNA, 15 bp, Homo sapiens
tactctatccattag

SEQ ID NO: 659498 - DNA, 15 bp, Homo sapiens
actctatccattagc

SEQ ID NO: 659499 - DNA, 15 bp, Homo sapiens
ctctatccattagcc

SEQ ID NO: 659500 - DNA, 15 bp, Homo sapiens
tctatccattagcca

SEQ ID NO: 659501 - DNA, 15 bp, Homo sapiens
ctatccattagccag

SEQ ID NO: 659502 - DNA, 15 bp, Homo sapiens
tatccattagccaga

SEQ ID NO: 659503 - DNA, 15 bp, Homo sapiens
atccattagccagat

SEQ ID NO: 659504 - DNA, 15 bp, Homo sapiens
tccattagccagatg

SEQ ID NO: 659505 - DNA, 15 bp, Homo sapiens
ccattagccagatgt

SEQ ID NO: 659506 - DNA, 15 bp, Homo sapiens
cattagccagatgtg

SEQ ID NO: 659507 - DNA, 15 bp, Homo sapiens
attagccagatgtgt

SEQ ID NO: 659508 - DNA, 15 bp, Homo sapiens
ttagccagatgtgtt

SEQ ID NO: 659509 - DNA, 15 bp, Homo sapiens
tagccagatgtgtta

SEQ ID NO: 659510 - DNA, 15 bp, Homo sapiens
agccagatgtgttag

SEQ ID NO: 659511 - DNA, 15 bp, Homo sapiens
gccagatgtgttaga

SEQ ID NO: 659512 - DNA, 15 bp, Homo sapiens
ccagatgtgttagag

SEQ ID NO: 659513 - DNA, 15 bp, Homo sapiens
cagatgtgttagagc

SEQ ID NO: 659514 - DNA, 15 bp, Homo sapiens
agatgtgttagagca

SEQ ID NO: 659515 - DNA, 15 bp, Homo sapiens
gatgtgttagagcaa

SEQ ID NO: 659516 - DNA, 15 bp, Homo sapiens
atgtgttagagcaaa

SEQ ID NO: 659517 - DNA, 15 bp, Homo sapiens
tgtgttagagcaaat

SEQ ID NO: 659518 - DNA, 15 bp, Homo sapiens
gtgttagagcaaatg

SEQ ID NO: 659519 - DNA, 15 bp, Homo sapiens
tgttagagcaaatga

SEQ ID NO: 659520 - DNA, 15 bp, Homo sapiens
gttagagcaaatgag

SEQ ID NO: 659521 - DNA, 15 bp, Homo sapiens
ttagagcaaatgagc

SEQ ID NO: 659522 - DNA, 15 bp, Homo sapiens
tagagcaaatgagcg

SEQ ID NO: 659523 - DNA, 15 bp, Homo sapiens
agagcaaatgagcgg

SEQ ID NO: 659524 - DNA, 15 bp, Homo sapiens
gagcaaatgagcggc

SEQ ID NO: 659525 - DNA, 15 bp, Homo sapiens
agcaaatgagcggct

SEQ ID NO: 659526 - DNA, 15 bp, Homo sapiens
gcaaatgagcggctg

SEQ ID NO: 659527 - DNA, 15 bp, Homo sapiens
caaatgagcggctgc

SEQ ID NO: 659528 - DNA, 15 bp, Homo sapiens
aaatgagcggctgct

SEQ ID NO: 659529 - DNA, 15 bp, Homo sapiens
aatgagcggctgctc

SEQ ID NO: 659530 - DNA, 15 bp, Homo sapiens
atgagcggctgctca

SEQ ID NO: 659531 - DNA, 15 bp, Homo sapiens
tgagcggctgctcaa

SEQ ID NO: 659532 - DNA, 15 bp, Homo sapiens
gagcggctgctcaaa

SEQ ID NO: 659533 - DNA, 15 bp, Homo sapiens
agcggctgctcaaaa

SEQ ID NO: 659534 - DNA, 15 bp, Homo sapiens
gcggctgctcaaaag

SEQ ID NO: 659535 - DNA, 15 bp, Homo sapiens
cggctgctcaaaaga

SEQ ID NO: 659536 - DNA, 15 bp, Homo sapiens
ggctgctcaaaagaa

SEQ ID NO: 659537 - DNA, 15 bp, Homo sapiens
gctgctcaaaagaat

SEQ ID NO: 659538 - DNA, 15 bp, Homo sapiens
ctgctcaaaagaatg

SEQ ID NO: 659539 - DNA, 15 bp, Homo sapiens
tgctcaaaagaatgt

SEQ ID NO: 659540 - DNA, 15 bp, Homo sapiens
gctcaaaagaatgtc

SEQ ID NO: 659541 - DNA, 15 bp, Homo sapiens
ctcaaaagaatgtct

SEQ ID NO: 659542 - DNA, 15 bp, Homo sapiens
tcaaaagaatgtctt

SEQ ID NO: 659543 - DNA, 15 bp, Homo sapiens
caaaagaatgtcttt

SEQ ID NO: 659544 - DNA, 15 bp, Homo sapiens
aaaagaatgtcttta

SEQ ID NO: 659545 - DNA, 15 bp, Homo sapiens
aaagaatgtctttat

SEQ ID NO: 659546 - DNA, 15 bp, Homo sapiens
aagaatgtctttatc

SEQ ID NO: 659547 - DNA, 15 bp, Homo sapiens
agaatgtctttatcc

SEQ ID NO: 659548 - DNA, 15 bp, Homo sapiens
gaatgtctttatcct

SEQ ID NO: 659549 - DNA, 15 bp, Homo sapiens
aatgtctttatcctc

SEQ ID NO: 659550 - DNA, 15 bp, Homo sapiens
atgtctttatcctca

SEQ ID NO: 659551 - DNA, 15 bp, Homo sapiens
tgtctttatcctcac

SEQ ID NO: 659552 - DNA, 15 bp, Homo sapiens
gtctttatcctcact

SEQ ID NO: 659553 - DNA, 15 bp, Homo sapiens
tctttatcctcactt

SEQ ID NO: 659554 - DNA, 15 bp, Homo sapiens
ctttatcctcacttg

SEQ ID NO: 659555 - DNA, 15 bp, Homo sapiens
tttatcctcacttgc

SEQ ID NO: 659556 - DNA, 15 bp, Homo sapiens
ttatcctcacttgcc

SEQ ID NO: 659557 - DNA, 15 bp, Homo sapiens
tatcctcacttgcct

SEQ ID NO: 659558 - DNA, 15 bp, Homo sapiens
atcctcacttgcctt

SEQ ID NO: 659559 - DNA, 15 bp, Homo sapiens
tcctcacttgccttt

SEQ ID NO: 659560 - DNA, 15 bp, Homo sapiens
cctcacttgcctttt

SEQ ID NO: 659561 - DNA, 15 bp, Homo sapiens
ctcacttgccttttt

SEQ ID NO: 659562 - DNA, 15 bp, Homo sapiens
tcacttgcctttttt

SEQ ID NO: 659563 - DNA, 15 bp, Homo sapiens
cacttgccttttttt

SEQ ID NO: 659564 - DNA, 15 bp, Homo sapiens
acttgcctttttttc

SEQ ID NO: 659565 - DNA, 15 bp, Homo sapiens
cttgcctttttttcc

SEQ ID NO: 659566 - DNA, 15 bp, Homo sapiens
ttgcctttttttcct

SEQ ID NO: 659567 - DNA, 15 bp, Homo sapiens
tgcctttttttcctg

SEQ ID NO: 659568 - DNA, 15 bp, Homo sapiens
gcctttttttcctgt

SEQ ID NO: 659569 - DNA, 15 bp, Homo sapiens
cctttttttcctgtt

SEQ ID NO: 659570 - DNA, 15 bp, Homo sapiens
ctttttttcctgtta

SEQ ID NO: 659571 - DNA, 15 bp, Homo sapiens
tttttttcctgttat

SEQ ID NO: 659572 - DNA, 15 bp, Homo sapiens
ttttttcctgttatt

SEQ ID NO: 659573 - DNA, 15 bp, Homo sapiens
tttttcctgttattg

SEQ ID NO: 659574 - DNA, 15 bp, Homo sapiens
ttttcctgttattgt

SEQ ID NO: 659575 - DNA, 15 bp, Homo sapiens
tttcctgttattgtt

SEQ ID NO: 659576 - DNA, 15 bp, Homo sapiens
ttcctgttattgttg

SEQ ID NO: 659577 - DNA, 15 bp, Homo sapiens
tcctgttattgttgg

SEQ ID NO: 659578 - DNA, 15 bp, Homo sapiens
cctgttattgttgga

SEQ ID NO: 659579 - DNA, 15 bp, Homo sapiens
ctgttattgttggat

SEQ ID NO: 659580 - DNA, 15 bp, Homo sapiens
tgttattgttggatg

SEQ ID NO: 659581 - DNA, 15 bp, Homo sapiens
gttattgttggatgg

SEQ ID NO: 659582 - DNA, 15 bp, Homo sapiens
ttattgttggatggt

SEQ ID NO: 659583 - DNA, 15 bp, Homo sapiens
tattgttggatggtg

SEQ ID NO: 659584 - DNA, 15 bp, Homo sapiens
attgttggatggtgc

SEQ ID NO: 659585 - DNA, 15 bp, Homo sapiens
ttgttggatggtgcc

SEQ ID NO: 659586 - DNA, 15 bp, Homo sapiens
tgttggatggtgcca

SEQ ID NO: 659587 - DNA, 15 bp, Homo sapiens
gttggatggtgccaa

SEQ ID NO: 659588 - DNA, 15 bp, Homo sapiens
ttggatggtgccaaa

SEQ ID NO: 659589 - DNA, 15 bp, Homo sapiens
tggatggtgccaaac

SEQ ID NO: 659590 - DNA, 15 bp, Homo sapiens
ggatggtgccaaaca

SEQ ID NO: 659591 - DNA, 15 bp, Homo sapiens
gatggtgccaaacaa

SEQ ID NO: 659592 - DNA, 15 bp, Homo sapiens
atggtgccaaacaag

SEQ ID NO: 659593 - DNA, 15 bp, Homo sapiens
tggtgccaaacaaga

SEQ ID NO: 659594 - DNA, 15 bp, Homo sapiens
ggtgccaaacaagac

SEQ ID NO: 659595 - DNA, 15 bp, Homo sapiens
gtgccaaacaagaca

SEQ ID NO: 659596 - DNA, 15 bp, Homo sapiens
tgccaaacaagacag

SEQ ID NO: 659597 - DNA, 15 bp, Homo sapiens
gccaaacaagacaga

SEQ ID NO: 659598 - DNA, 15 bp, Homo sapiens
ccaaacaagacagaa

SEQ ID NO: 659599 - DNA, 15 bp, Homo sapiens
caaacaagacagaag

SEQ ID NO: 659600 - DNA, 15 bp, Homo sapiens
aaacaagacagaagc

SEQ ID NO: 659601 - DNA, 15 bp, Homo sapiens
aacaagacagaagca

SEQ ID NO: 659602 - DNA, 15 bp, Homo sapiens
acaagacagaagcaa

SEQ ID NO: 659603 - DNA, 15 bp, Homo sapiens
caagacagaagcaat

SEQ ID NO: 659604 - DNA, 15 bp, Homo sapiens
aagacagaagcaatt

SEQ ID NO: 659605 - DNA, 15 bp, Homo sapiens
agacagaagcaatta

SEQ ID NO: 659606 - DNA, 15 bp, Homo sapiens
gacagaagcaattaa

SEQ ID NO: 659607 - DNA, 15 bp, Homo sapiens
acagaagcaattaat

SEQ ID NO: 659608 - DNA, 15 bp, Homo sapiens
cagaagcaattaata

SEQ ID NO: 659609 - DNA, 15 bp, Homo sapiens
agaagcaattaataa

SEQ ID NO: 659610 - DNA, 15 bp, Homo sapiens
gaagcaattaataaa

SEQ ID NO: 659611 - DNA, 15 bp, Homo sapiens
aagcaattaataaac

SEQ ID NO: 659612 - DNA, 15 bp, Homo sapiens
agcaattaataaact

SEQ ID NO: 659613 - DNA, 15 bp, Homo sapiens
gcaattaataaactt

SEQ ID NO: 659614 - DNA, 15 bp, Homo sapiens
caattaataaacttg

SEQ ID NO: 659615 - DNA, 15 bp, Homo sapiens
aattaataaacttgt

SEQ ID NO: 659616 - DNA, 15 bp, Homo sapiens
attaataaacttgtc

SEQ ID NO: 659617 - DNA, 15 bp, Homo sapiens
ttaataaacttgtca

SEQ ID NO: 659618 - DNA, 15 bp, Homo sapiens
taataaacttgtcag

SEQ ID NO: 659619 - DNA, 15 bp, Homo sapiens
aataaacttgtcagt

SEQ ID NO: 659620 - DNA, 15 bp, Homo sapiens
ataaacttgtcagta

SEQ ID NO: 659621 - DNA, 15 bp, Homo sapiens
taaacttgtcagtat

SEQ ID NO: 659622 - DNA, 15 bp, Homo sapiens
aaacttgtcagtatc

SEQ ID NO: 659623 - DNA, 15 bp, Homo sapiens
aacttgtcagtatca

SEQ ID NO: 659624 - DNA, 15 bp, Homo sapiens
acttgtcagtatcat

SEQ ID NO: 659625 - DNA, 15 bp, Homo sapiens
cttgtcagtatcata

SEQ ID NO: 659626 - DNA, 15 bp, Homo sapiens
ttgtcagtatcataa

SEQ ID NO: 659627 - DNA, 15 bp, Homo sapiens
tgtcagtatcataag

SEQ ID NO: 659628 - DNA, 15 bp, Homo sapiens
gtcagtatcataaga

SEQ ID NO: 659629 - DNA, 15 bp, Homo sapiens
tcagtatcataagag

SEQ ID NO: 659630 - DNA, 15 bp, Homo sapiens
cagtatcataagaga

SEQ ID NO: 659631 - DNA, 15 bp, Homo sapiens
agtatcataagagat

SEQ ID NO: 659632 - DNA, 15 bp, Homo sapiens
gtatcataagagatg

SEQ ID NO: 659633 - DNA, 15 bp, Homo sapiens
tatcataagagatga

SEQ ID NO: 659634 - DNA, 15 bp, Homo sapiens
atcataagagatgac

SEQ ID NO: 659635 - DNA, 15 bp, Homo sapiens
tcataagagatgaca

SEQ ID NO: 659636 - DNA, 15 bp, Homo sapiens
cataagagatgacaa

SEQ ID NO: 659637 - DNA, 15 bp, Homo sapiens
ataagagatgacaat

SEQ ID NO: 659638 - DNA, 15 bp, Homo sapiens
taagagatgacaatt

SEQ ID NO: 659639 - DNA, 15 bp, Homo sapiens
aagagatgacaatta

SEQ ID NO: 659640 - DNA, 15 bp, Homo sapiens
agagatgacaattag

SEQ ID NO: 659641 - DNA, 15 bp, Homo sapiens
gagatgacaattaga

SEQ ID NO: 659642 - DNA, 15 bp, Homo sapiens
agatgacaattagaa

SEQ ID NO: 659643 - DNA, 15 bp, Homo sapiens
gatgacaattagaat

SEQ ID NO: 659644 - DNA, 15 bp, Homo sapiens
atgacaattagaatc

SEQ ID NO: 659645 - DNA, 15 bp, Homo sapiens
tgacaattagaatca

SEQ ID NO: 659646 - DNA, 15 bp, Homo sapiens
gacaattagaatcag

SEQ ID NO: 659647 - DNA, 15 bp, Homo sapiens
acaattagaatcagc

SEQ ID NO: 659648 - DNA, 15 bp, Homo sapiens
caattagaatcagca

SEQ ID NO: 659649 - DNA, 15 bp, Homo sapiens
aattagaatcagcag

SEQ ID NO: 659650 - DNA, 15 bp, Homo sapiens
attagaatcagcaga

SEQ ID NO: 659651 - DNA, 15 bp, Homo sapiens
ttagaatcagcagag

SEQ ID NO: 659652 - DNA, 15 bp, Homo sapiens
tagaatcagcagagc

SEQ ID NO: 659653 - DNA, 15 bp, Homo sapiens
agaatcagcagagct

SEQ ID NO: 659654 - DNA, 15 bp, Homo sapiens
gaatcagcagagctt

SEQ ID NO: 659655 - DNA, 15 bp, Homo sapiens
aatcagcagagctta

SEQ ID NO: 659656 - DNA, 15 bp, Homo sapiens
atcagcagagcttaa

SEQ ID NO: 659657 - DNA, 15 bp, Homo sapiens
tcagcagagcttaaa

SEQ ID NO: 659658 - DNA, 15 bp, Homo sapiens
cagcagagcttaaaa

SEQ ID NO: 659659 - DNA, 15 bp, Homo sapiens
agcagagcttaaaaa

SEQ ID NO: 659660 - DNA, 15 bp, Homo sapiens
gcagagcttaaaaag

SEQ ID NO: 659661 - DNA, 15 bp, Homo sapiens
cagagcttaaaaagg

SEQ ID NO: 659662 - DNA, 15 bp, Homo sapiens
agagcttaaaaagga

SEQ ID NO: 659663 - DNA, 15 bp, Homo sapiens
gagcttaaaaaggag

SEQ ID NO: 659664 - DNA, 15 bp, Homo sapiens
agcttaaaaaggagc

SEQ ID NO: 659665 - DNA, 15 bp, Homo sapiens
gcttaaaaaggagcc

SEQ ID NO: 659666 - DNA, 15 bp, Homo sapiens
cttaaaaaggagcct

SEQ ID NO: 659667 - DNA, 15 bp, Homo sapiens
ttaaaaaggagcctg

SEQ ID NO: 659668 - DNA, 15 bp, Homo sapiens
taaaaaggagcctga

SEQ ID NO: 659669 - DNA, 15 bp, Homo sapiens
aaaaaggagcctgaa

SEQ ID NO: 659670 - DNA, 15 bp, Homo sapiens
aaaaggagcctgaaa

SEQ ID NO: 659671 - DNA, 15 bp, Homo sapiens
aaaggagcctgaaat

SEQ ID NO: 659672 - DNA, 15 bp, Homo sapiens
aaggagcctgaaatc

SEQ ID NO: 659673 - DNA, 15 bp, Homo sapiens
aggagcctgaaatca

SEQ ID NO: 659674 - DNA, 15 bp, Homo sapiens
ggagcctgaaatcat

SEQ ID NO: 659675 - DNA, 15 bp, Homo sapiens
gagcctgaaatcata

SEQ ID NO: 659676 - DNA, 15 bp, Homo sapiens
agcctgaaatcatag

SEQ ID NO: 659677 - DNA, 15 bp, Homo sapiens
gcctgaaatcatagg

SEQ ID NO: 659678 - DNA, 15 bp, Homo sapiens
cctgaaatcataggg

SEQ ID NO: 659679 - DNA, 15 bp, Homo sapiens
ctgaaatcatagggg

SEQ ID NO: 659680 - DNA, 15 bp, Homo sapiens
tgaaatcataggggt

SEQ ID NO: 659681 - DNA, 15 bp, Homo sapiens
gaaatcataggggtt

SEQ ID NO: 659682 - DNA, 15 bp, Homo sapiens
aaatcataggggttg

SEQ ID NO: 659683 - DNA, 15 bp, Homo sapiens
aatcataggggttga

SEQ ID NO: 659684 - DNA, 15 bp, Homo sapiens
atcataggggttgag

SEQ ID NO: 659685 - DNA, 15 bp, Homo sapiens
tcataggggttgagg

SEQ ID NO: 659686 - DNA, 15 bp, Homo sapiens
cataggggttgaggt

SEQ ID NO: 659687 - DNA, 15 bp, Homo sapiens
ataggggttgaggta

SEQ ID NO: 659688 - DNA, 15 bp, Homo sapiens
taggggttgaggtag

SEQ ID NO: 659689 - DNA, 15 bp, Homo sapiens
aggggttgaggtagt

SEQ ID NO: 659690 - DNA, 15 bp, Homo sapiens
ggggttgaggtagtg

SEQ ID NO: 659691 - DNA, 15 bp, Homo sapiens
gggttgaggtagtgg

SEQ ID NO: 659692 - DNA, 15 bp, Homo sapiens
ggttgaggtagtggg

SEQ ID NO: 659693 - DNA, 15 bp, Homo sapiens
gttgaggtagtgggg

SEQ ID NO: 659694 - DNA, 15 bp, Homo sapiens
ttgaggtagtggggt

SEQ ID NO: 659695 - DNA, 15 bp, Homo sapiens
tgaggtagtggggtt

SEQ ID NO: 659696 - DNA, 15 bp, Homo sapiens
gaggtagtggggttt

SEQ ID NO: 659697 - DNA, 15 bp, Homo sapiens
aggtagtggggtttt

SEQ ID NO: 659698 - DNA, 15 bp, Homo sapiens
ggtagtggggttttt

SEQ ID NO: 659699 - DNA, 15 bp, Homo sapiens
gtagtggggttttta

SEQ ID NO: 659700 - DNA, 15 bp, Homo sapiens
tagtggggtttttaa

SEQ ID NO: 659701 - DNA, 15 bp, Homo sapiens
agtggggtttttaaa

SEQ ID NO: 659702 - DNA, 15 bp, Homo sapiens
gtggggtttttaaaa

SEQ ID NO: 659703 - DNA, 15 bp, Homo sapiens
tggggtttttaaaat

SEQ ID NO: 659704 - DNA, 15 bp, Homo sapiens
ggggtttttaaaatg

SEQ ID NO: 659705 - DNA, 15 bp, Homo sapiens
gggtttttaaaatgc

SEQ ID NO: 659706 - DNA, 15 bp, Homo sapiens
ggtttttaaaatgca

SEQ ID NO: 659707 - DNA, 15 bp, Homo sapiens
gtttttaaaatgcaa

SEQ ID NO: 659708 - DNA, 15 bp, Homo sapiens
tttttaaaatgcaaa

SEQ ID NO: 659709 - DNA, 15 bp, Homo sapiens
tttaaaatgcaaaga

SEQ ID NO: 659710 - DNA, 15 bp, Homo sapiens
ttaaaatgcaaagag

SEQ ID NO: 659711 - DNA, 15 bp, Homo sapiens
taaaatgcaaagagc

SEQ ID NO: 659712 - DNA, 15 bp, Homo sapiens
aaaatgcaaagagca

SEQ ID NO: 659713 - DNA, 15 bp, Homo sapiens
aaatgcaaagagcat

SEQ ID NO: 659714 - DNA, 15 bp, Homo sapiens
aatgcaaagagcatg

SEQ ID NO: 659715 - DNA, 15 bp, Homo sapiens
atgcaaagagcatgc

SEQ ID NO: 659716 - DNA, 15 bp, Homo sapiens
tgcaaagagcatgcc

SEQ ID NO: 659717 - DNA, 15 bp, Homo sapiens
gcaaagagcatgcct

SEQ ID NO: 659718 - DNA, 15 bp, Homo sapiens
caaagagcatgcctt

SEQ ID NO: 659719 - DNA, 15 bp, Homo sapiens
aaagagcatgccttt

SEQ ID NO: 659720 - DNA, 15 bp, Homo sapiens
aagagcatgcctttt

SEQ ID NO: 659721 - DNA, 15 bp, Homo sapiens
agagcatgccttttc

SEQ ID NO: 659722 - DNA, 15 bp, Homo sapiens
gagcatgccttttca

SEQ ID NO: 659723 - DNA, 15 bp, Homo sapiens
agcatgccttttcac

SEQ ID NO: 659724 - DNA, 15 bp, Homo sapiens
gcatgccttttcact

SEQ ID NO: 659725 - DNA, 15 bp, Homo sapiens
catgccttttcactt

SEQ ID NO: 659726 - DNA, 15 bp, Homo sapiens
atgccttttcacttc

SEQ ID NO: 659727 - DNA, 15 bp, Homo sapiens
tgccttttcacttca

SEQ ID NO: 659728 - DNA, 15 bp, Homo sapiens
gccttttcacttcac

SEQ ID NO: 659729 - DNA, 15 bp, Homo sapiens
ccttttcacttcact

SEQ ID NO: 659730 - DNA, 15 bp, Homo sapiens
cttttcacttcactc

SEQ ID NO: 659731 - DNA, 15 bp, Homo sapiens
ttttcacttcactct

SEQ ID NO: 659732 - DNA, 15 bp, Homo sapiens
tttcacttcactctg

SEQ ID NO: 659733 - DNA, 15 bp, Homo sapiens
ttcacttcactctgt

SEQ ID NO: 659734 - DNA, 15 bp, Homo sapiens
tcacttcactctgtt

SEQ ID NO: 659735 - DNA, 15 bp, Homo sapiens
cacttcactctgttt

SEQ ID NO: 659736 - DNA, 15 bp, Homo sapiens
acttcactctgttta

SEQ ID NO: 659737 - DNA, 15 bp, Homo sapiens
cttcactctgtttat

SEQ ID NO: 659738 - DNA, 15 bp, Homo sapiens
ttcactctgtttatc

SEQ ID NO: 659739 - DNA, 15 bp, Homo sapiens
tcactctgtttatca

SEQ ID NO: 659740 - DNA, 15 bp, Homo sapiens
cactctgtttatcag

SEQ ID NO: 659741 - DNA, 15 bp, Homo sapiens
actctgtttatcagg

SEQ ID NO: 659742 - DNA, 15 bp, Homo sapiens
ctctgtttatcaggc

SEQ ID NO: 659743 - DNA, 15 bp, Homo sapiens
tctgtttatcaggcc

SEQ ID NO: 659744 - DNA, 15 bp, Homo sapiens
ctgtttatcaggcca

SEQ ID NO: 659745 - DNA, 15 bp, Homo sapiens
tgtttatcaggccaa

SEQ ID NO: 659746 - DNA, 15 bp, Homo sapiens
gtttatcaggccaag

SEQ ID NO: 659747 - DNA, 15 bp, Homo sapiens
tttatcaggccaagc

SEQ ID NO: 659748 - DNA, 15 bp, Homo sapiens
ttatcaggccaagca

SEQ ID NO: 659749 - DNA, 15 bp, Homo sapiens
tatcaggccaagcaa

SEQ ID NO: 659750 - DNA, 15 bp, Homo sapiens
atcaggccaagcaaa

SEQ ID NO: 659751 - DNA, 15 bp, Homo sapiens
tcaggccaagcaaac

SEQ ID NO: 659752 - DNA, 15 bp, Homo sapiens
caggccaagcaaact

SEQ ID NO: 659753 - DNA, 15 bp, Homo sapiens
aggccaagcaaacta

SEQ ID NO: 659754 - DNA, 15 bp, Homo sapiens
ggccaagcaaactaa

SEQ ID NO: 659755 - DNA, 15 bp, Homo sapiens
gccaagcaaactaaa

SEQ ID NO: 659756 - DNA, 15 bp, Homo sapiens
ccaagcaaactaaag

SEQ ID NO: 659757 - DNA, 15 bp, Homo sapiens
caagcaaactaaagt

SEQ ID NO: 659758 - DNA, 15 bp, Homo sapiens
aagcaaactaaagtg

SEQ ID NO: 659759 - DNA, 15 bp, Homo sapiens
agcaaactaaagtga

SEQ ID NO: 659760 - DNA, 15 bp, Homo sapiens
gcaaactaaagtgaa

SEQ ID NO: 659761 - DNA, 15 bp, Homo sapiens
caaactaaagtgaaa

SEQ ID NO: 659762 - DNA, 15 bp, Homo sapiens
aaactaaagtgaaaa

SEQ ID NO: 659763 - DNA, 15 bp, Homo sapiens
aactaaagtgaaaag

SEQ ID NO: 659764 - DNA, 15 bp, Homo sapiens
actaaagtgaaaagt

SEQ ID NO: 659765 - DNA, 15 bp, Homo sapiens
ctaaagtgaaaagtc

SEQ ID NO: 659766 - DNA, 15 bp, Homo sapiens
taaagtgaaaagtca

SEQ ID NO: 659767 - DNA, 15 bp, Homo sapiens
aaagtgaaaagtcac

SEQ ID NO: 659768 - DNA, 15 bp, Homo sapiens
aagtgaaaagtcact

SEQ ID NO: 659769 - DNA, 15 bp, Homo sapiens
agtgaaaagtcactg

SEQ ID NO: 659770 - DNA, 15 bp, Homo sapiens
gtgaaaagtcactgt

SEQ ID NO: 659771 - DNA, 15 bp, Homo sapiens
tgaaaagtcactgtg

SEQ ID NO: 659772 - DNA, 15 bp, Homo sapiens
gaaaagtcactgtgg

SEQ ID NO: 659773 - DNA, 15 bp, Homo sapiens
aaaagtcactgtgga

SEQ ID NO: 659774 - DNA, 15 bp, Homo sapiens
aaagtcactgtggaa

SEQ ID NO: 659775 - DNA, 15 bp, Homo sapiens
aagtcactgtggaaa

SEQ ID NO: 659776 - DNA, 15 bp, Homo sapiens
agtcactgtggaaaa

SEQ ID NO: 659777 - DNA, 15 bp, Homo sapiens
gtcactgtggaaaaa

SEQ ID NO: 659778 - DNA, 15 bp, Homo sapiens
tcactgtggaaaaag

SEQ ID NO: 659779 - DNA, 15 bp, Homo sapiens
cactgtggaaaaagg

SEQ ID NO: 659780 - DNA, 15 bp, Homo sapiens
actgtggaaaaaggt

SEQ ID NO: 659781 - DNA, 15 bp, Homo sapiens
ctgtggaaaaaggtg

SEQ ID NO: 659782 - DNA, 15 bp, Homo sapiens
tgtggaaaaaggtga

SEQ ID NO: 659783 - DNA, 15 bp, Homo sapiens
gtggaaaaaggtgaa

SEQ ID NO: 659784 - DNA, 15 bp, Homo sapiens
tggaaaaaggtgaag

SEQ ID NO: 659785 - DNA, 15 bp, Homo sapiens
ggaaaaaggtgaaga

SEQ ID NO: 659786 - DNA, 15 bp, Homo sapiens
gaaaaaggtgaagaa

SEQ ID NO: 659787 - DNA, 15 bp, Homo sapiens
aaaaaggtgaagaaa

SEQ ID NO: 659788 - DNA, 15 bp, Homo sapiens
aaaaggtgaagaaaa

SEQ ID NO: 659789 - DNA, 15 bp, Homo sapiens
aaaggtgaagaaaaa

SEQ ID NO: 659790 - DNA, 15 bp, Homo sapiens
aaggtgaagaaaaag

SEQ ID NO: 659791 - DNA, 15 bp, Homo sapiens
aggtgaagaaaaagg

SEQ ID NO: 659792 - DNA, 15 bp, Homo sapiens
ggtgaagaaaaaggt

SEQ ID NO: 659793 - DNA, 15 bp, Homo sapiens
gtgaagaaaaaggta

SEQ ID NO: 659794 - DNA, 15 bp, Homo sapiens
tgaagaaaaaggtac

SEQ ID NO: 659795 - DNA, 15 bp, Homo sapiens
gaagaaaaaggtacc

SEQ ID NO: 659796 - DNA, 15 bp, Homo sapiens
aagaaaaaggtacct

SEQ ID NO: 659797 - DNA, 15 bp, Homo sapiens
agaaaaaggtaccta

SEQ ID NO: 659798 - DNA, 15 bp, Homo sapiens
gaaaaaggtacctat

SEQ ID NO: 659799 - DNA, 15 bp, Homo sapiens
aaaaaggtacctatt

SEQ ID NO: 659800 - DNA, 15 bp, Homo sapiens
aaaaggtacctattt

SEQ ID NO: 659801 - DNA, 15 bp, Homo sapiens
aaaggtacctatttt

SEQ ID NO: 659802 - DNA, 15 bp, Homo sapiens
aaggtacctattttg

SEQ ID NO: 659803 - DNA, 15 bp, Homo sapiens
aggtacctattttgc

SEQ ID NO: 659804 - DNA, 15 bp, Homo sapiens
ggtacctattttgca

SEQ ID NO: 659805 - DNA, 15 bp, Homo sapiens
gtacctattttgcat

SEQ ID NO: 659806 - DNA, 15 bp, Homo sapiens
tacctattttgcatc

SEQ ID NO: 659807 - DNA, 15 bp, Homo sapiens
acctattttgcatca

SEQ ID NO: 659808 - DNA, 15 bp, Homo sapiens
cctattttgcatcac

SEQ ID NO: 659809 - DNA, 15 bp, Homo sapiens
ctattttgcatcacc

SEQ ID NO: 659810 - DNA, 15 bp, Homo sapiens
tattttgcatcaccc

SEQ ID NO: 659811 - DNA, 15 bp, Homo sapiens
attttgcatcaccca

SEQ ID NO: 659812 - DNA, 15 bp, Homo sapiens
ttttgcatcacccac

SEQ ID NO: 659813 - DNA, 15 bp, Homo sapiens
tttgcatcacccact

SEQ ID NO: 659814 - DNA, 15 bp, Homo sapiens
ttgcatcacccacta

SEQ ID NO: 659815 - DNA, 15 bp, Homo sapiens
tgcatcacccactat

SEQ ID NO: 659816 - DNA, 15 bp, Homo sapiens
gcatcacccactatg

SEQ ID NO: 659817 - DNA, 15 bp, Homo sapiens
catcacccactatgt

SEQ ID NO: 659818 - DNA, 15 bp, Homo sapiens
atcacccactatgtc

SEQ ID NO: 659819 - DNA, 15 bp, Homo sapiens
tcacccactatgtca

SEQ ID NO: 659820 - DNA, 15 bp, Homo sapiens
cacccactatgtcat

SEQ ID NO: 659821 - DNA, 15 bp, Homo sapiens
acccactatgtcata

SEQ ID NO: 659822 - DNA, 15 bp, Homo sapiens
cccactatgtcatat

SEQ ID NO: 659823 - DNA, 15 bp, Homo sapiens
ccactatgtcatatc

SEQ ID NO: 659824 - DNA, 15 bp, Homo sapiens
cactatgtcatatca

SEQ ID NO: 659825 - DNA, 15 bp, Homo sapiens
actatgtcatatcaa

SEQ ID NO: 659826 - DNA, 15 bp, Homo sapiens
ctatgtcatatcaag

SEQ ID NO: 659827 - DNA, 15 bp, Homo sapiens
tatgtcatatcaagt

SEQ ID NO: 659828 - DNA, 15 bp, Homo sapiens
atgtcatatcaagta

SEQ ID NO: 659829 - DNA, 15 bp, Homo sapiens
tgtcatatcaagtaa

SEQ ID NO: 659830 - DNA, 15 bp, Homo sapiens
gtcatatcaagtaaa

SEQ ID NO: 659831 - DNA, 15 bp, Homo sapiens
tcatatcaagtaaat

SEQ ID NO: 659832 - DNA, 15 bp, Homo sapiens
catatcaagtaaatg

SEQ ID NO: 659833 - DNA, 15 bp, Homo sapiens
atatcaagtaaatga

SEQ ID NO: 659834 - DNA, 15 bp, Homo sapiens
tatcaagtaaatgaa

SEQ ID NO: 659835 - DNA, 15 bp, Homo sapiens
atcaagtaaatgaat

SEQ ID NO: 659836 - DNA, 15 bp, Homo sapiens
tcaagtaaatgaatt

SEQ ID NO: 659837 - DNA, 15 bp, Homo sapiens
caagtaaatgaatta

SEQ ID NO: 659838 - DNA, 15 bp, Homo sapiens
aagtaaatgaattaa

SEQ ID NO: 659839 - DNA, 15 bp, Homo sapiens
agtaaatgaattaaa

SEQ ID NO: 659840 - DNA, 15 bp, Homo sapiens
gtaaatgaattaaaa

SEQ ID NO: 659841 - DNA, 15 bp, Homo sapiens
taaatgaattaaaat

SEQ ID NO: 659842 - DNA, 15 bp, Homo sapiens
aaatgaattaaaatc

SEQ ID NO: 659843 - DNA, 15 bp, Homo sapiens
aatgaattaaaatcc

SEQ ID NO: 659844 - DNA, 15 bp, Homo sapiens
atgaattaaaatccc

SEQ ID NO: 659845 - DNA, 15 bp, Homo sapiens
tgaattaaaatccca

SEQ ID NO: 659846 - DNA, 15 bp, Homo sapiens
gaattaaaatcccat

SEQ ID NO: 659847 - DNA, 15 bp, Homo sapiens
aattaaaatcccatg

SEQ ID NO: 659848 - DNA, 15 bp, Homo sapiens
attaaaatcccatgt

SEQ ID NO: 659849 - DNA, 15 bp, Homo sapiens
ttaaaatcccatgtc

SEQ ID NO: 659850 - DNA, 15 bp, Homo sapiens
taaaatcccatgtca

SEQ ID NO: 659851 - DNA, 15 bp, Homo sapiens
aaaatcccatgtcaa

SEQ ID NO: 659852 - DNA, 15 bp, Homo sapiens
aaatcccatgtcaag

SEQ ID NO: 659853 - DNA, 15 bp, Homo sapiens
aatcccatgtcaagt

SEQ ID NO: 659854 - DNA, 15 bp, Homo sapiens
atcccatgtcaagta

SEQ ID NO: 659855 - DNA, 15 bp, Homo sapiens
tcccatgtcaagtac

SEQ ID NO: 659856 - DNA, 15 bp, Homo sapiens
cccatgtcaagtact

SEQ ID NO: 659857 - DNA, 15 bp, Homo sapiens
ccatgtcaagtactg

SEQ ID NO: 659858 - DNA, 15 bp, Homo sapiens
catgtcaagtactgg

SEQ ID NO: 659859 - DNA, 15 bp, Homo sapiens
atgtcaagtactggg

SEQ ID NO: 659860 - DNA, 15 bp, Homo sapiens
tgtcaagtactgggc

SEQ ID NO: 659861 - DNA, 15 bp, Homo sapiens
gtcaagtactgggct

SEQ ID NO: 659862 - DNA, 15 bp, Homo sapiens
tcaagtactgggctt

SEQ ID NO: 659863 - DNA, 15 bp, Homo sapiens
caagtactgggcttt

SEQ ID NO: 659864 - DNA, 15 bp, Homo sapiens
aagtactgggcttta

SEQ ID NO: 659865 - DNA, 15 bp, Homo sapiens
agtactgggctttat

SEQ ID NO: 659866 - DNA, 15 bp, Homo sapiens
gtactgggctttatt

SEQ ID NO: 659867 - DNA, 15 bp, Homo sapiens
tactgggctttattc

SEQ ID NO: 659868 - DNA, 15 bp, Homo sapiens
actgggctttattcc

SEQ ID NO: 659869 - DNA, 15 bp, Homo sapiens
ctgggctttattccc

SEQ ID NO: 659870 - DNA, 15 bp, Homo sapiens
tgggctttattcccc

SEQ ID NO: 659871 - DNA, 15 bp, Homo sapiens
gggctttattcccca

SEQ ID NO: 659872 - DNA, 15 bp, Homo sapiens
ggctttattccccat

SEQ ID NO: 659873 - DNA, 15 bp, Homo sapiens
gctttattccccatg

SEQ ID NO: 659874 - DNA, 15 bp, Homo sapiens
ctttattccccatgg

SEQ ID NO: 659875 - DNA, 15 bp, Homo sapiens
tttattccccatggt

SEQ ID NO: 659876 - DNA, 15 bp, Homo sapiens
ttattccccatggtt

SEQ ID NO: 659877 - DNA, 15 bp, Homo sapiens
tattccccatggttt

SEQ ID NO: 659878 - DNA, 15 bp, Homo sapiens
attccccatggtttc

SEQ ID NO: 659879 - DNA, 15 bp, Homo sapiens
ttccccatggtttca

SEQ ID NO: 659880 - DNA, 15 bp, Homo sapiens
tccccatggtttcac

SEQ ID NO: 659881 - DNA, 15 bp, Homo sapiens
ccccatggtttcaca

SEQ ID NO: 659882 - DNA, 15 bp, Homo sapiens
cccatggtttcacac

SEQ ID NO: 659883 - DNA, 15 bp, Homo sapiens
ccatggtttcacacc

SEQ ID NO: 659884 - DNA, 15 bp, Homo sapiens
catggtttcacacca

SEQ ID NO: 659885 - DNA, 15 bp, Homo sapiens
atggtttcacaccaa

SEQ ID NO: 659886 - DNA, 15 bp, Homo sapiens
tggtttcacaccaag

SEQ ID NO: 659887 - DNA, 15 bp, Homo sapiens
ggtttcacaccaagt

SEQ ID NO: 659888 - DNA, 15 bp, Homo sapiens
gtttcacaccaagtt

SEQ ID NO: 659889 - DNA, 15 bp, Homo sapiens
tttcacaccaagttt

SEQ ID NO: 659890 - DNA, 15 bp, Homo sapiens
ttcacaccaagtttc

SEQ ID NO: 659891 - DNA, 15 bp, Homo sapiens
tcacaccaagtttct

SEQ ID NO: 659892 - DNA, 15 bp, Homo sapiens
cacaccaagtttctc

SEQ ID NO: 659893 - DNA, 15 bp, Homo sapiens
acaccaagtttctct

SEQ ID NO: 659894 - DNA, 15 bp, Homo sapiens
caccaagtttctctt

SEQ ID NO: 659895 - DNA, 15 bp, Homo sapiens
accaagtttctctta

SEQ ID NO: 659896 - DNA, 15 bp, Homo sapiens
ccaagtttctcttag

SEQ ID NO: 659897 - DNA, 15 bp, Homo sapiens
caagtttctcttaga

SEQ ID NO: 659898 - DNA, 15 bp, Homo sapiens
aagtttctcttagaa

SEQ ID NO: 659899 - DNA, 15 bp, Homo sapiens
agtttctcttagaag

SEQ ID NO: 659900 - DNA, 15 bp, Homo sapiens
gtttctcttagaaga

SEQ ID NO: 659901 - DNA, 15 bp, Homo sapiens
tttctcttagaagat

SEQ ID NO: 659902 - DNA, 15 bp, Homo sapiens
ttctcttagaagata

SEQ ID NO: 659903 - DNA, 15 bp, Homo sapiens
tctcttagaagatac

SEQ ID NO: 659904 - DNA, 15 bp, Homo sapiens
ctcttagaagatact

SEQ ID NO: 659905 - DNA, 15 bp, Homo sapiens
tcttagaagatactc

SEQ ID NO: 659906 - DNA, 15 bp, Homo sapiens
cttagaagatactct

SEQ ID NO: 659907 - DNA, 15 bp, Homo sapiens
ttagaagatactcta

SEQ ID NO: 659908 - DNA, 15 bp, Homo sapiens
tagaagatactctaa

SEQ ID NO: 659909 - DNA, 15 bp, Homo sapiens
agaagatactctaag

SEQ ID NO: 659910 - DNA, 15 bp, Homo sapiens
gaagatactctaaga

SEQ ID NO: 659911 - DNA, 15 bp, Homo sapiens
aagatactctaagat

SEQ ID NO: 659912 - DNA, 15 bp, Homo sapiens
agatactctaagatg

SEQ ID NO: 659913 - DNA, 15 bp, Homo sapiens
gatactctaagatgc

SEQ ID NO: 659914 - DNA, 15 bp, Homo sapiens
atactctaagatgca

SEQ ID NO: 659915 - DNA, 15 bp, Homo sapiens
tactctaagatgcac

SEQ ID NO: 659916 - DNA, 15 bp, Homo sapiens
actctaagatgcact

SEQ ID NO: 659917 - DNA, 15 bp, Homo sapiens
ctctaagatgcacta

SEQ ID NO: 659918 - DNA, 15 bp, Homo sapiens
tctaagatgcactaa

SEQ ID NO: 659919 - DNA, 15 bp, Homo sapiens
ctaagatgcactaag

SEQ ID NO: 659920 - DNA, 15 bp, Homo sapiens
taagatgcactaagc

SEQ ID NO: 659921 - DNA, 15 bp, Homo sapiens
aagatgcactaagct

SEQ ID NO: 659922 - DNA, 15 bp, Homo sapiens
agatgcactaagctt

SEQ ID NO: 659923 - DNA, 15 bp, Homo sapiens
gatgcactaagcttt

SEQ ID NO: 659924 - DNA, 15 bp, Homo sapiens
atgcactaagctttc

SEQ ID NO: 659925 - DNA, 15 bp, Homo sapiens
tgcactaagctttcc

SEQ ID NO: 659926 - DNA, 15 bp, Homo sapiens
gcactaagctttccc

SEQ ID NO: 659927 - DNA, 15 bp, Homo sapiens
cactaagctttccca

SEQ ID NO: 659928 - DNA, 15 bp, Homo sapiens
actaagctttcccat

SEQ ID NO: 659929 - DNA, 15 bp, Homo sapiens
ctaagctttcccatt

SEQ ID NO: 659930 - DNA, 15 bp, Homo sapiens
taagctttcccattc

SEQ ID NO: 659931 - DNA, 15 bp, Homo sapiens
aagctttcccattca

SEQ ID NO: 659932 - DNA, 15 bp, Homo sapiens
agctttcccattcac

SEQ ID NO: 659933 - DNA, 15 bp, Homo sapiens
gctttcccattcact

SEQ ID NO: 659934 - DNA, 15 bp, Homo sapiens
ctttcccattcactt

SEQ ID NO: 659935 - DNA, 15 bp, Homo sapiens
tttcccattcacttc

SEQ ID NO: 659936 - DNA, 15 bp, Homo sapiens
ttcccattcacttct

SEQ ID NO: 659937 - DNA, 15 bp, Homo sapiens
tcccattcacttctg

SEQ ID NO: 659938 - DNA, 15 bp, Homo sapiens
cccattcacttctgt

SEQ ID NO: 659939 - DNA, 15 bp, Homo sapiens
ccattcacttctgtc

SEQ ID NO: 659940 - DNA, 15 bp, Homo sapiens
cattcacttctgtct

SEQ ID NO: 659941 - DNA, 15 bp, Homo sapiens
attcacttctgtcta

SEQ ID NO: 659942 - DNA, 15 bp, Homo sapiens
ttcacttctgtctag

SEQ ID NO: 659943 - DNA, 15 bp, Homo sapiens
tcacttctgtctagg

SEQ ID NO: 659944 - DNA, 15 bp, Homo sapiens
cacttctgtctaggc

SEQ ID NO: 659945 - DNA, 15 bp, Homo sapiens
acttctgtctaggca

SEQ ID NO: 659946 - DNA, 15 bp, Homo sapiens
cttctgtctaggcag

SEQ ID NO: 659947 - DNA, 15 bp, Homo sapiens
ttctgtctaggcagg

SEQ ID NO: 659948 - DNA, 15 bp, Homo sapiens
tctgtctaggcagga

SEQ ID NO: 659949 - DNA, 15 bp, Homo sapiens
ctgtctaggcaggaa

SEQ ID NO: 659950 - DNA, 15 bp, Homo sapiens
tgtctaggcaggaag

SEQ ID NO: 659951 - DNA, 15 bp, Homo sapiens
gtctaggcaggaaga

SEQ ID NO: 659952 - DNA, 15 bp, Homo sapiens
tctaggcaggaagat

SEQ ID NO: 659953 - DNA, 15 bp, Homo sapiens
ctaggcaggaagatt

SEQ ID NO: 659954 - DNA, 15 bp, Homo sapiens
taggcaggaagattc

SEQ ID NO: 659955 - DNA, 15 bp, Homo sapiens
aggcaggaagattct

SEQ ID NO: 659956 - DNA, 15 bp, Homo sapiens
ggcaggaagattcta

SEQ ID NO: 659957 - DNA, 15 bp, Homo sapiens
gcaggaagattctac

SEQ ID NO: 659958 - DNA, 15 bp, Homo sapiens
caggaagattctact

SEQ ID NO: 659959 - DNA, 15 bp, Homo sapiens
aggaagattctactc

SEQ ID NO: 659960 - DNA, 15 bp, Homo sapiens
ggaagattctactca

SEQ ID NO: 659961 - DNA, 15 bp, Homo sapiens
gaagattctactcaa

SEQ ID NO: 659962 - DNA, 15 bp, Homo sapiens
aagattctactcaag

SEQ ID NO: 659963 - DNA, 15 bp, Homo sapiens
agattctactcaagt

SEQ ID NO: 659964 - DNA, 15 bp, Homo sapiens
gattctactcaagtt

SEQ ID NO: 659965 - DNA, 15 bp, Homo sapiens
attctactcaagtta

SEQ ID NO: 659966 - DNA, 15 bp, Homo sapiens
ttctactcaagttaa

SEQ ID NO: 659967 - DNA, 15 bp, Homo sapiens
tctactcaagttaag

SEQ ID NO: 659968 - DNA, 15 bp, Homo sapiens
ctactcaagttaaga

SEQ ID NO: 659969 - DNA, 15 bp, Homo sapiens
tactcaagttaagaa

SEQ ID NO: 659970 - DNA, 15 bp, Homo sapiens
actcaagttaagaag

SEQ ID NO: 659971 - DNA, 15 bp, Homo sapiens
ctcaagttaagaagc

SEQ ID NO: 659972 - DNA, 15 bp, Homo sapiens
tcaagttaagaagca

SEQ ID NO: 659973 - DNA, 15 bp, Homo sapiens
caagttaagaagcag

SEQ ID NO: 659974 - DNA, 15 bp, Homo sapiens
aagttaagaagcagt

SEQ ID NO: 659975 - DNA, 15 bp, Homo sapiens
agttaagaagcagtg

SEQ ID NO: 659976 - DNA, 15 bp, Homo sapiens
gttaagaagcagtgt

SEQ ID NO: 659977 - DNA, 15 bp, Homo sapiens
ttaagaagcagtgtt

SEQ ID NO: 659978 - DNA, 15 bp, Homo sapiens
taagaagcagtgttg

SEQ ID NO: 659979 - DNA, 15 bp, Homo sapiens
aagaagcagtgttgc

SEQ ID NO: 659980 - DNA, 15 bp, Homo sapiens
agaagcagtgttgcc

SEQ ID NO: 659981 - DNA, 15 bp, Homo sapiens
gaagcagtgttgcca

SEQ ID NO: 659982 - DNA, 15 bp, Homo sapiens
aagcagtgttgccag

SEQ ID NO: 659983 - DNA, 15 bp, Homo sapiens
agcagtgttgccaga

SEQ ID NO: 659984 - DNA, 15 bp, Homo sapiens
gcagtgttgccagat

SEQ ID NO: 659985 - DNA, 15 bp, Homo sapiens
cagtgttgccagatg

SEQ ID NO: 659986 - DNA, 15 bp, Homo sapiens
agtgttgccagatgc

SEQ ID NO: 659987 - DNA, 15 bp, Homo sapiens
gtgttgccagatgca

SEQ ID NO: 659988 - DNA, 15 bp, Homo sapiens
tgttgccagatgcag

SEQ ID NO: 659989 - DNA, 15 bp, Homo sapiens
gttgccagatgcagt

SEQ ID NO: 659990 - DNA, 15 bp, Homo sapiens
ttgccagatgcagtg

SEQ ID NO: 659991 - DNA, 15 bp, Homo sapiens
tgccagatgcagtgg

SEQ ID NO: 659992 - DNA, 15 bp, Homo sapiens
gccagatgcagtggc

SEQ ID NO: 659993 - DNA, 15 bp, Homo sapiens
ccagatgcagtggct

SEQ ID NO: 659994 - DNA, 15 bp, Homo sapiens
cagatgcagtggctc

SEQ ID NO: 659995 - DNA, 15 bp, Homo sapiens
agatgcagtggctca

SEQ ID NO: 659996 - DNA, 15 bp, Homo sapiens
gatgcagtggctcac

SEQ ID NO: 659997 - DNA, 15 bp, Homo sapiens
atgcagtggctcact

SEQ ID NO: 659998 - DNA, 15 bp, Homo sapiens
tgcagtggctcactc

SEQ ID NO: 659999 - DNA, 15 bp, Homo sapiens
gcagtggctcactcc

SEQ ID NO: 660000 - DNA, 15 bp, Homo sapiens
cagtggctcactcct

SEQ ID NO: 660001 - DNA, 15 bp, Homo sapiens
agtggctcactcctg

SEQ ID NO: 660002 - DNA, 15 bp, Homo sapiens
gtggctcactcctga

SEQ ID NO: 660003 - DNA, 15 bp, Homo sapiens
tggctcactcctgaa

SEQ ID NO: 660004 - DNA, 15 bp, Homo sapiens
ggctcactcctgaaa

SEQ ID NO: 660005 - DNA, 15 bp, Homo sapiens
gctcactcctgaaat

SEQ ID NO: 660006 - DNA, 15 bp, Homo sapiens
ctcactcctgaaatt

SEQ ID NO: 660007 - DNA, 15 bp, Homo sapiens
tcactcctgaaattc

SEQ ID NO: 660008 - DNA, 15 bp, Homo sapiens
cactcctgaaattcc

SEQ ID NO: 660009 - DNA, 15 bp, Homo sapiens
actcctgaaattcca

SEQ ID NO: 660010 - DNA, 15 bp, Homo sapiens
ctcctgaaattccag

SEQ ID NO: 660011 - DNA, 15 bp, Homo sapiens
tcctgaaattccagc

SEQ ID NO: 660012 - DNA, 15 bp, Homo sapiens
cctgaaattccagca

SEQ ID NO: 660013 - DNA, 15 bp, Homo sapiens
ctgaaattccagcaa

SEQ ID NO: 660014 - DNA, 15 bp, Homo sapiens
tgaaattccagcaat

SEQ ID NO: 660015 - DNA, 15 bp, Homo sapiens
gaaattccagcaatt

SEQ ID NO: 660016 - DNA, 15 bp, Homo sapiens
aaattccagcaattt

SEQ ID NO: 660017 - DNA, 15 bp, Homo sapiens
aattccagcaatttg

SEQ ID NO: 660018 - DNA, 15 bp, Homo sapiens
attccagcaatttga

SEQ ID NO: 660019 - DNA, 15 bp, Homo sapiens
ttccagcaatttgag

SEQ ID NO: 660020 - DNA, 15 bp, Homo sapiens
tccagcaatttgaga

SEQ ID NO: 660021 - DNA, 15 bp, Homo sapiens
ccagcaatttgagag

SEQ ID NO: 660022 - DNA, 15 bp, Homo sapiens
cagcaatttgagagg

SEQ ID NO: 660023 - DNA, 15 bp, Homo sapiens
agcaatttgagaggc

SEQ ID NO: 660024 - DNA, 15 bp, Homo sapiens
gcaatttgagaggcc

SEQ ID NO: 660025 - DNA, 15 bp, Homo sapiens
caatttgagaggcca

SEQ ID NO: 660026 - DNA, 15 bp, Homo sapiens
aatttgagaggccaa

SEQ ID NO: 660027 - DNA, 15 bp, Homo sapiens
atttgagaggccaag

SEQ ID NO: 660028 - DNA, 15 bp, Homo sapiens
tttgagaggccaagg

SEQ ID NO: 660029 - DNA, 15 bp, Homo sapiens
ttgagaggccaaggc

SEQ ID NO: 660030 - DNA, 15 bp, Homo sapiens
tgagaggccaaggca

SEQ ID NO: 660031 - DNA, 15 bp, Homo sapiens
gagaggccaaggcag

SEQ ID NO: 660032 - DNA, 15 bp, Homo sapiens
agaggccaaggcagg

SEQ ID NO: 660033 - DNA, 15 bp, Homo sapiens
gaggccaaggcagga

SEQ ID NO: 660034 - DNA, 15 bp, Homo sapiens
aggccaaggcaggaa

SEQ ID NO: 660035 - DNA, 15 bp, Homo sapiens
ggccaaggcaggaaa

SEQ ID NO: 660036 - DNA, 15 bp, Homo sapiens
gccaaggcaggaaaa

SEQ ID NO: 660037 - DNA, 15 bp, Homo sapiens
ccaaggcaggaaaat

SEQ ID NO: 660038 - DNA, 15 bp, Homo sapiens
caaggcaggaaaatt

SEQ ID NO: 660039 - DNA, 15 bp, Homo sapiens
aaggcaggaaaattg

SEQ ID NO: 660040 - DNA, 15 bp, Homo sapiens
aggcaggaaaattgc

SEQ ID NO: 660041 - DNA, 15 bp, Homo sapiens
ggcaggaaaattgct

SEQ ID NO: 660042 - DNA, 15 bp, Homo sapiens
gcaggaaaattgctt

SEQ ID NO: 660043 - DNA, 15 bp, Homo sapiens
caggaaaattgcttg

SEQ ID NO: 660044 - DNA, 15 bp, Homo sapiens
aggaaaattgcttga

SEQ ID NO: 660045 - DNA, 15 bp, Homo sapiens
ggaaaattgcttgag

SEQ ID NO: 660046 - DNA, 15 bp, Homo sapiens
gaaaattgcttgagc

SEQ ID NO: 660047 - DNA, 15 bp, Homo sapiens
aaaattgcttgagct

SEQ ID NO: 660048 - DNA, 15 bp, Homo sapiens
aaattgcttgagctg

SEQ ID NO: 660049 - DNA, 15 bp, Homo sapiens
aattgcttgagctga

SEQ ID NO: 660050 - DNA, 15 bp, Homo sapiens
attgcttgagctgag

SEQ ID NO: 660051 - DNA, 15 bp, Homo sapiens
ttgcttgagctgagg

SEQ ID NO: 660052 - DNA, 15 bp, Homo sapiens
tgcttgagctgagga

SEQ ID NO: 660053 - DNA, 15 bp, Homo sapiens
gcttgagctgaggag

SEQ ID NO: 660054 - DNA, 15 bp, Homo sapiens
cttgagctgaggagt

SEQ ID NO: 660055 - DNA, 15 bp, Homo sapiens
ttgagctgaggagtt

SEQ ID NO: 660056 - DNA, 15 bp, Homo sapiens
tgagctgaggagttc

SEQ ID NO: 660057 - DNA, 15 bp, Homo sapiens
gagctgaggagttcg

SEQ ID NO: 660058 - DNA, 15 bp, Homo sapiens
agctgaggagttcga

SEQ ID NO: 660059 - DNA, 15 bp, Homo sapiens
gctgaggagttcgag

SEQ ID NO: 660060 - DNA, 15 bp, Homo sapiens
ctgaggagttcgaga

SEQ ID NO: 660061 - DNA, 15 bp, Homo sapiens
tgaggagttcgagac

SEQ ID NO: 660062 - DNA, 15 bp, Homo sapiens
gaggagttcgagacc

SEQ ID NO: 660063 - DNA, 15 bp, Homo sapiens
tcgagaccagcctga

SEQ ID NO: 660064 - DNA, 15 bp, Homo sapiens
cgagaccagcctgag

SEQ ID NO: 660065 - DNA, 15 bp, Homo sapiens
gagaccagcctgagc

SEQ ID NO: 660066 - DNA, 15 bp, Homo sapiens
agaccagcctgagca

SEQ ID NO: 660067 - DNA, 15 bp, Homo sapiens
gaccagcctgagcag

SEQ ID NO: 660068 - DNA, 15 bp, Homo sapiens
accagcctgagcagc

SEQ ID NO: 660069 - DNA, 15 bp, Homo sapiens
ccagcctgagcagca

SEQ ID NO: 660070 - DNA, 15 bp, Homo sapiens
cagcctgagcagcat

SEQ ID NO: 660071 - DNA, 15 bp, Homo sapiens
agcctgagcagcata

SEQ ID NO: 660072 - DNA, 15 bp, Homo sapiens
gcctgagcagcatag

SEQ ID NO: 660073 - DNA, 15 bp, Homo sapiens
cctgagcagcatagt

SEQ ID NO: 660074 - DNA, 15 bp, Homo sapiens
ctgagcagcatagtg

SEQ ID NO: 660075 - DNA, 15 bp, Homo sapiens
tgagcagcatagtga

SEQ ID NO: 660076 - DNA, 15 bp, Homo sapiens
gagcagcatagtgag

SEQ ID NO: 660077 - DNA, 15 bp, Homo sapiens
agcagcatagtgaga

SEQ ID NO: 660078 - DNA, 15 bp, Homo sapiens
gcagcatagtgagac

SEQ ID NO: 660079 - DNA, 15 bp, Homo sapiens
cagcatagtgagacc

SEQ ID NO: 660080 - DNA, 15 bp, Homo sapiens
agcatagtgagaccc

SEQ ID NO: 660081 - DNA, 15 bp, Homo sapiens
gcatagtgagaccct

SEQ ID NO: 660082 - DNA, 15 bp, Homo sapiens
catagtgagaccctg

SEQ ID NO: 660083 - DNA, 15 bp, Homo sapiens
atagtgagaccctgt

SEQ ID NO: 660084 - DNA, 15 bp, Homo sapiens
tagtgagaccctgtc

SEQ ID NO: 660085 - DNA, 15 bp, Homo sapiens
agtgagaccctgtct

SEQ ID NO: 660086 - DNA, 15 bp, Homo sapiens
gtgagaccctgtctc

SEQ ID NO: 660087 - DNA, 15 bp, Homo sapiens
tgagaccctgtctct

SEQ ID NO: 660088 - DNA, 15 bp, Homo sapiens
gagaccctgtctcta

SEQ ID NO: 660089 - DNA, 15 bp, Homo sapiens
agaccctgtctctac

SEQ ID NO: 660090 - DNA, 15 bp, Homo sapiens
gaccctgtctctaca

SEQ ID NO: 660091 - DNA, 15 bp, Homo sapiens
accctgtctctacaa

SEQ ID NO: 660092 - DNA, 15 bp, Homo sapiens
ccctgtctctacaaa

SEQ ID NO: 660093 - DNA, 15 bp, Homo sapiens
cctgtctctacaaat

SEQ ID NO: 660094 - DNA, 15 bp, Homo sapiens
ctgtctctacaaata

SEQ ID NO: 660095 - DNA, 15 bp, Homo sapiens
tgtctctacaaataa

SEQ ID NO: 660096 - DNA, 15 bp, Homo sapiens
gtctctacaaataat

SEQ ID NO: 660097 - DNA, 15 bp, Homo sapiens
tctctacaaataatc

SEQ ID NO: 660098 - DNA, 15 bp, Homo sapiens
ctctacaaataatca

SEQ ID NO: 660099 - DNA, 15 bp, Homo sapiens
tctacaaataatcaa

SEQ ID NO: 660100 - DNA, 15 bp, Homo sapiens
ctacaaataatcaaa

SEQ ID NO: 660101 - DNA, 15 bp, Homo sapiens
tacaaataatcaaaa

SEQ ID NO: 660102 - DNA, 15 bp, Homo sapiens
acaaataatcaaaaa

SEQ ID NO: 660103 - DNA, 15 bp, Homo sapiens
caaataatcaaaaat

SEQ ID NO: 660104 - DNA, 15 bp, Homo sapiens
aaataatcaaaaatt

SEQ ID NO: 660105 - DNA, 15 bp, Homo sapiens
aataatcaaaaatta

SEQ ID NO: 660106 - DNA, 15 bp, Homo sapiens
ataatcaaaaattaa

SEQ ID NO: 660107 - DNA, 15 bp, Homo sapiens
taatcaaaaattaac

SEQ ID NO: 660108 - DNA, 15 bp, Homo sapiens
aatcaaaaattaacc

SEQ ID NO: 660109 - DNA, 15 bp, Homo sapiens
atcaaaaattaacca

SEQ ID NO: 660110 - DNA, 15 bp, Homo sapiens
tcaaaaattaaccag

SEQ ID NO: 660111 - DNA, 15 bp, Homo sapiens
caaaaattaaccaga

SEQ ID NO: 660112 - DNA, 15 bp, Homo sapiens
aaaaattaaccagac

SEQ ID NO: 660113 - DNA, 15 bp, Homo sapiens
aaaattaaccagaca

SEQ ID NO: 660114 - DNA, 15 bp, Homo sapiens
aaattaaccagacat

SEQ ID NO: 660115 - DNA, 15 bp, Homo sapiens
aattaaccagacatg

SEQ ID NO: 660116 - DNA, 15 bp, Homo sapiens
attaaccagacatgg

SEQ ID NO: 660117 - DNA, 15 bp, Homo sapiens
ttaaccagacatggt

SEQ ID NO: 660118 - DNA, 15 bp, Homo sapiens
taaccagacatggta

SEQ ID NO: 660119 - DNA, 15 bp, Homo sapiens
aaccagacatggtaa

SEQ ID NO: 660120 - DNA, 15 bp, Homo sapiens
accagacatggtaat

SEQ ID NO: 660121 - DNA, 15 bp, Homo sapiens
ccagacatggtaatg

SEQ ID NO: 660122 - DNA, 15 bp, Homo sapiens
cagacatggtaatgc

SEQ ID NO: 660123 - DNA, 15 bp, Homo sapiens
agacatggtaatgca

SEQ ID NO: 660124 - DNA, 15 bp, Homo sapiens
gacatggtaatgcat

SEQ ID NO: 660125 - DNA, 15 bp, Homo sapiens
acatggtaatgcatg

SEQ ID NO: 660126 - DNA, 15 bp, Homo sapiens
catggtaatgcatgc

SEQ ID NO: 660127 - DNA, 15 bp, Homo sapiens
atggtaatgcatgcc

SEQ ID NO: 660128 - DNA, 15 bp, Homo sapiens
tggtaatgcatgcct

SEQ ID NO: 660129 - DNA, 15 bp, Homo sapiens
ggtaatgcatgcctg

SEQ ID NO: 660130 - DNA, 15 bp, Homo sapiens
gtaatgcatgcctgc

SEQ ID NO: 660131 - DNA, 15 bp, Homo sapiens
taatgcatgcctgca

SEQ ID NO: 660132 - DNA, 15 bp, Homo sapiens
aatgcatgcctgcag

SEQ ID NO: 660133 - DNA, 15 bp, Homo sapiens
atgcatgcctgcagt

SEQ ID NO: 660134 - DNA, 15 bp, Homo sapiens
tgcatgcctgcagtc

SEQ ID NO: 660135 - DNA, 15 bp, Homo sapiens
gcatgcctgcagtcc

SEQ ID NO: 660136 - DNA, 15 bp, Homo sapiens
catgcctgcagtccc

SEQ ID NO: 660137 - DNA, 15 bp, Homo sapiens
atgcctgcagtccca

SEQ ID NO: 660138 - DNA, 15 bp, Homo sapiens
tgcctgcagtcccag

SEQ ID NO: 660139 - DNA, 15 bp, Homo sapiens
gcctgcagtcccagc

SEQ ID NO: 660140 - DNA, 15 bp, Homo sapiens
cctgcagtcccagct

SEQ ID NO: 660141 - DNA, 15 bp, Homo sapiens
ctgcagtcccagcta

SEQ ID NO: 660142 - DNA, 15 bp, Homo sapiens
tgcagtcccagctac

SEQ ID NO: 660143 - DNA, 15 bp, Homo sapiens
gcagtcccagctact

SEQ ID NO: 660144 - DNA, 15 bp, Homo sapiens
cagtcccagctactc

SEQ ID NO: 660145 - DNA, 15 bp, Homo sapiens
agtcccagctactca

SEQ ID NO: 660146 - DNA, 15 bp, Homo sapiens
gtcccagctactcag

SEQ ID NO: 660147 - DNA, 15 bp, Homo sapiens
tcccagctactcaga

SEQ ID NO: 660148 - DNA, 15 bp, Homo sapiens
cccagctactcagaa

SEQ ID NO: 660149 - DNA, 15 bp, Homo sapiens
ccagctactcagaag

SEQ ID NO: 660150 - DNA, 15 bp, Homo sapiens
cagctactcagaagg

SEQ ID NO: 660151 - DNA, 15 bp, Homo sapiens
agctactcagaaggc

SEQ ID NO: 660152 - DNA, 15 bp, Homo sapiens
gctactcagaaggct

SEQ ID NO: 660153 - DNA, 15 bp, Homo sapiens
ctactcagaaggctg

SEQ ID NO: 660154 - DNA, 15 bp, Homo sapiens
tactcagaaggctga

SEQ ID NO: 660155 - DNA, 15 bp, Homo sapiens
actcagaaggctgag

SEQ ID NO: 660156 - DNA, 15 bp, Homo sapiens
ctcagaaggctgagg

SEQ ID NO: 660157 - DNA, 15 bp, Homo sapiens
tcagaaggctgaggt

SEQ ID NO: 660158 - DNA, 15 bp, Homo sapiens
cagaaggctgaggtg

SEQ ID NO: 660159 - DNA, 15 bp, Homo sapiens
agaaggctgaggtgg

SEQ ID NO: 660160 - DNA, 15 bp, Homo sapiens
gaaggctgaggtggg

SEQ ID NO: 660161 - DNA, 15 bp, Homo sapiens
aaggctgaggtggga

SEQ ID NO: 660162 - DNA, 15 bp, Homo sapiens
aggctgaggtgggag

SEQ ID NO: 660163 - DNA, 15 bp, Homo sapiens
ggctgaggtgggagg

SEQ ID NO: 660164 - DNA, 15 bp, Homo sapiens
gctgaggtgggagga

SEQ ID NO: 660165 - DNA, 15 bp, Homo sapiens
ctgaggtgggaggat

SEQ ID NO: 660166 - DNA, 15 bp, Homo sapiens
tgaggtgggaggatc

SEQ ID NO: 660167 - DNA, 15 bp, Homo sapiens
gaggtgggaggatct

SEQ ID NO: 660168 - DNA, 15 bp, Homo sapiens
aggtgggaggatctc

SEQ ID NO: 660169 - DNA, 15 bp, Homo sapiens
ggtgggaggatctct

SEQ ID NO: 660170 - DNA, 15 bp, Homo sapiens
gtgggaggatctctt

SEQ ID NO: 660171 - DNA, 15 bp, Homo sapiens
tgggaggatctcttg

SEQ ID NO: 660172 - DNA, 15 bp, Homo sapiens
gggaggatctcttga

SEQ ID NO: 660173 - DNA, 15 bp, Homo sapiens
ggaggatctcttgag

SEQ ID NO: 660174 - DNA, 15 bp, Homo sapiens
gaggatctcttgagc

SEQ ID NO: 660175 - DNA, 15 bp, Homo sapiens
aggatctcttgagcc

SEQ ID NO: 660176 - DNA, 15 bp, Homo sapiens
ggatctcttgagcct

SEQ ID NO: 660177 - DNA, 15 bp, Homo sapiens
gatctcttgagcctg

SEQ ID NO: 660178 - DNA, 15 bp, Homo sapiens
atctcttgagcctga

SEQ ID NO: 660179 - DNA, 15 bp, Homo sapiens
tctcttgagcctgag

SEQ ID NO: 660180 - DNA, 15 bp, Homo sapiens
ctcttgagcctgaga

SEQ ID NO: 660181 - DNA, 15 bp, Homo sapiens
tcttgagcctgagag

SEQ ID NO: 660182 - DNA, 15 bp, Homo sapiens
cttgagcctgagagg

SEQ ID NO: 660183 - DNA, 15 bp, Homo sapiens
ttgagcctgagaggt

SEQ ID NO: 660184 - DNA, 15 bp, Homo sapiens
tgagcctgagaggtt

SEQ ID NO: 660185 - DNA, 15 bp, Homo sapiens
gagcctgagaggttg

SEQ ID NO: 660186 - DNA, 15 bp, Homo sapiens
agcctgagaggttga

SEQ ID NO: 660187 - DNA, 15 bp, Homo sapiens
gcctgagaggttgac

SEQ ID NO: 660188 - DNA, 15 bp, Homo sapiens
cctgagaggttgacg

SEQ ID NO: 660189 - DNA, 15 bp, Homo sapiens
ctgagaggttgacgc

SEQ ID NO: 660190 - DNA, 15 bp, Homo sapiens
tgagaggttgacgct

SEQ ID NO: 660191 - DNA, 15 bp, Homo sapiens
gagaggttgacgctg

SEQ ID NO: 660192 - DNA, 15 bp, Homo sapiens
agaggttgacgctgt

SEQ ID NO: 660193 - DNA, 15 bp, Homo sapiens
gaggttgacgctgta

SEQ ID NO: 660194 - DNA, 15 bp, Homo sapiens
aggttgacgctgtag

SEQ ID NO: 660195 - DNA, 15 bp, Homo sapiens
ggttgacgctgtagt

SEQ ID NO: 660196 - DNA, 15 bp, Homo sapiens
gttgacgctgtagtg

SEQ ID NO: 660197 - DNA, 15 bp, Homo sapiens
ttgacgctgtagtga

SEQ ID NO: 660198 - DNA, 15 bp, Homo sapiens
tgacgctgtagtgag

SEQ ID NO: 660199 - DNA, 15 bp, Homo sapiens
gacgctgtagtgagc

SEQ ID NO: 660200 - DNA, 15 bp, Homo sapiens
acgctgtagtgagcc

SEQ ID NO: 660201 - DNA, 15 bp, Homo sapiens
cgctgtagtgagcca

SEQ ID NO: 660202 - DNA, 15 bp, Homo sapiens
gctgtagtgagccac

SEQ ID NO: 660203 - DNA, 15 bp, Homo sapiens
ctgtagtgagccaca

SEQ ID NO: 660204 - DNA, 15 bp, Homo sapiens
tgtagtgagccacaa

SEQ ID NO: 660205 - DNA, 15 bp, Homo sapiens
gtagtgagccacaat

SEQ ID NO: 660206 - DNA, 15 bp, Homo sapiens
tagtgagccacaatt

SEQ ID NO: 660207 - DNA, 15 bp, Homo sapiens
agtgagccacaattg

SEQ ID NO: 660208 - DNA, 15 bp, Homo sapiens
gtgagccacaattgc

SEQ ID NO: 660209 - DNA, 15 bp, Homo sapiens
tgagccacaattgca

SEQ ID NO: 660210 - DNA, 15 bp, Homo sapiens
gagccacaattgcac

SEQ ID NO: 660211 - DNA, 15 bp, Homo sapiens
agccacaattgcacc

SEQ ID NO: 660212 - DNA, 15 bp, Homo sapiens
gccacaattgcacca

SEQ ID NO: 660213 - DNA, 15 bp, Homo sapiens
ccacaattgcaccac

SEQ ID NO: 660214 - DNA, 15 bp, Homo sapiens
cacaattgcaccact

SEQ ID NO: 660215 - DNA, 15 bp, Homo sapiens
acaattgcaccactg

SEQ ID NO: 660216 - DNA, 15 bp, Homo sapiens
caattgcaccactgc

SEQ ID NO: 660217 - DNA, 15 bp, Homo sapiens
aattgcaccactgca

SEQ ID NO: 660218 - DNA, 15 bp, Homo sapiens
attgcaccactgcac

SEQ ID NO: 660219 - DNA, 15 bp, Homo sapiens
ttgcaccactgcact

SEQ ID NO: 660220 - DNA, 15 bp, Homo sapiens
tgcaccactgcactc

SEQ ID NO: 660221 - DNA, 15 bp, Homo sapiens
gcaccactgcactcc

SEQ ID NO: 660222 - DNA, 15 bp, Homo sapiens
caccactgcactcca

SEQ ID NO: 660223 - DNA, 15 bp, Homo sapiens
accactgcactccag

SEQ ID NO: 660224 - DNA, 15 bp, Homo sapiens
ccactgcactccagc

SEQ ID NO: 660225 - DNA, 15 bp, Homo sapiens
cactgcactccagcc

SEQ ID NO: 660226 - DNA, 15 bp, Homo sapiens
actgcactccagcct

SEQ ID NO: 660227 - DNA, 15 bp, Homo sapiens
ctgcactccagcctg

SEQ ID NO: 660228 - DNA, 15 bp, Homo sapiens
tgcactccagcctgg

SEQ ID NO: 660229 - DNA, 15 bp, Homo sapiens
gcactccagcctggg

SEQ ID NO: 660230 - DNA, 15 bp, Homo sapiens
cactccagcctgggc

SEQ ID NO: 660231 - DNA, 15 bp, Homo sapiens
actccagcctgggca

SEQ ID NO: 660232 - DNA, 15 bp, Homo sapiens
ctccagcctgggcaa

SEQ ID NO: 660233 - DNA, 15 bp, Homo sapiens
tccagcctgggcaac

SEQ ID NO: 660234 - DNA, 15 bp, Homo sapiens
ccagcctgggcaaca

SEQ ID NO: 660235 - DNA, 15 bp, Homo sapiens
cagcctgggcaacag

SEQ ID NO: 660236 - DNA, 15 bp, Homo sapiens
agcctgggcaacagt

SEQ ID NO: 660237 - DNA, 15 bp, Homo sapiens
gcctgggcaacagtg

SEQ ID NO: 660238 - DNA, 15 bp, Homo sapiens
cctgggcaacagtgc

SEQ ID NO: 660239 - DNA, 15 bp, Homo sapiens
ctgggcaacagtgca

SEQ ID NO: 660240 - DNA, 15 bp, Homo sapiens
tgggcaacagtgcaa

SEQ ID NO: 660241 - DNA, 15 bp, Homo sapiens
gggcaacagtgcaaa

SEQ ID NO: 660242 - DNA, 15 bp, Homo sapiens
ggcaacagtgcaaaa

SEQ ID NO: 660243 - DNA, 15 bp, Homo sapiens
gcaacagtgcaaaac

SEQ ID NO: 660244 - DNA, 15 bp, Homo sapiens
caacagtgcaaaacc

SEQ ID NO: 660245 - DNA, 15 bp, Homo sapiens
aacagtgcaaaaccc

SEQ ID NO: 660246 - DNA, 15 bp, Homo sapiens
acagtgcaaaaccct

SEQ ID NO: 660247 - DNA, 15 bp, Homo sapiens
cagtgcaaaaccctg

SEQ ID NO: 660248 - DNA, 15 bp, Homo sapiens
agtgcaaaaccctgt

SEQ ID NO: 660249 - DNA, 15 bp, Homo sapiens
gtgcaaaaccctgtc

SEQ ID NO: 660250 - DNA, 15 bp, Homo sapiens
tgcaaaaccctgtct

SEQ ID NO: 660251 - DNA, 15 bp, Homo sapiens
gcaaaaccctgtctc

SEQ ID NO: 660252 - DNA, 15 bp, Homo sapiens
caaaaccctgtctca

SEQ ID NO: 660253 - DNA, 15 bp, Homo sapiens
aaaaccctgtctcaa

SEQ ID NO: 660254 - DNA, 15 bp, Homo sapiens
aaaccctgtctcaaa

SEQ ID NO: 660255 - DNA, 15 bp, Homo sapiens
aaccctgtctcaaaa

SEQ ID NO: 660256 - DNA, 15 bp, Homo sapiens
accctgtctcaaaaa

SEQ ID NO: 660257 - DNA, 15 bp, Homo sapiens
ccctgtctcaaaaaa

SEQ ID NO: 660258 - DNA, 15 bp, Homo sapiens
cctgtctcaaaaaaa

SEQ ID NO: 660259 - DNA, 15 bp, Homo sapiens
ctgtctcaaaaaaaa

SEQ ID NO: 660260 - DNA, 15 bp, Homo sapiens
tgtctcaaaaaaaaa

SEQ ID NO: 660261 - DNA, 15 bp, Homo sapiens
gtctcaaaaaaaaaa

SEQ ID NO: 660262 - DNA, 15 bp, Homo sapiens
tctcaaaaaaaaaaa

SEQ ID NO: 660263 - DNA, 15 bp, Homo sapiens
ctcaaaaaaaaaaaa

SEQ ID NO: 660264 - DNA, 15 bp, Homo sapiens
tcaaaaaaaaaaaag

SEQ ID NO: 660265 - DNA, 15 bp, Homo sapiens
caaaaaaaaaaaaga

SEQ ID NO: 660266 - DNA, 15 bp, Homo sapiens
aaaaaaaaaaagaag

SEQ ID NO: 660267 - DNA, 15 bp, Homo sapiens
aaaaaaaaaagaaga

SEQ ID NO: 660268 - DNA, 15 bp, Homo sapiens
aaaaaaaaagaagaa

SEQ ID NO: 660269 - DNA, 15 bp, Homo sapiens
aaaaaaaagaagaag

SEQ ID NO: 660270 - DNA, 15 bp, Homo sapiens
aaaaaaagaagaaga

SEQ ID NO: 660271 - DNA, 15 bp, Homo sapiens
aaaaaagaagaagaa

SEQ ID NO: 660272 - DNA, 15 bp, Homo sapiens
aaaaagaagaagaag

SEQ ID NO: 660273 - DNA, 15 bp, Homo sapiens
aaaagaagaagaaga

SEQ ID NO: 660274 - DNA, 15 bp, Homo sapiens
aaagaagaagaagaa

SEQ ID NO: 660275 - DNA, 15 bp, Homo sapiens
aagaagaagaagaag

SEQ ID NO: 660276 - DNA, 15 bp, Homo sapiens
agaagaagaagaaga

SEQ ID NO: 660277 - DNA, 15 bp, Homo sapiens
gaagaagaagaagaa

SEQ ID NO: 660278 - DNA, 15 bp, Homo sapiens
agaagaagaagaagg

SEQ ID NO: 660279 - DNA, 15 bp, Homo sapiens
gaagaagaagaagga

SEQ ID NO: 660280 - DNA, 15 bp, Homo sapiens
aagaagaagaaggag

SEQ ID NO: 660281 - DNA, 15 bp, Homo sapiens
agaagaagaaggaga

SEQ ID NO: 660282 - DNA, 15 bp, Homo sapiens
gaagaagaaggagaa

SEQ ID NO: 660283 - DNA, 15 bp, Homo sapiens
aagaagaaggagaag

SEQ ID NO: 660284 - DNA, 15 bp, Homo sapiens
agaagaaggagaaga

SEQ ID NO: 660285 - DNA, 15 bp, Homo sapiens
gaagaaggagaagaa

SEQ ID NO: 660286 - DNA, 15 bp, Homo sapiens
aagaaggagaagaag

SEQ ID NO: 660287 - DNA, 15 bp, Homo sapiens
agaaggagaagaagc

SEQ ID NO: 660288 - DNA, 15 bp, Homo sapiens
gaaggagaagaagca

SEQ ID NO: 660289 - DNA, 15 bp, Homo sapiens
aaggagaagaagcag

SEQ ID NO: 660290 - DNA, 15 bp, Homo sapiens
aggagaagaagcagt

SEQ ID NO: 660291 - DNA, 15 bp, Homo sapiens
ggagaagaagcagtg

SEQ ID NO: 660292 - DNA, 15 bp, Homo sapiens
gagaagaagcagtgt

SEQ ID NO: 660293 - DNA, 15 bp, Homo sapiens
agaagaagcagtgta

SEQ ID NO: 660294 - DNA, 15 bp, Homo sapiens
gaagaagcagtgtaa

SEQ ID NO: 660295 - DNA, 15 bp, Homo sapiens
aagaagcagtgtaat

SEQ ID NO: 660296 - DNA, 15 bp, Homo sapiens
agaagcagtgtaata

SEQ ID NO: 660297 - DNA, 15 bp, Homo sapiens
gaagcagtgtaatag

SEQ ID NO: 660298 - DNA, 15 bp, Homo sapiens
aagcagtgtaataga

SEQ ID NO: 660299 - DNA, 15 bp, Homo sapiens
agcagtgtaatagaa

SEQ ID NO: 660300 - DNA, 15 bp, Homo sapiens
gcagtgtaatagaat

SEQ ID NO: 660301 - DNA, 15 bp, Homo sapiens
cagtgtaatagaatg

SEQ ID NO: 660302 - DNA, 15 bp, Homo sapiens
agtgtaatagaatga

SEQ ID NO: 660303 - DNA, 15 bp, Homo sapiens
gtgtaatagaatgac

SEQ ID NO: 660304 - DNA, 15 bp, Homo sapiens
tgtaatagaatgact

SEQ ID NO: 660305 - DNA, 15 bp, Homo sapiens
gtaatagaatgactt

SEQ ID NO: 660306 - DNA, 15 bp, Homo sapiens
taatagaatgactta

SEQ ID NO: 660307 - DNA, 15 bp, Homo sapiens
aatagaatgacttag

SEQ ID NO: 660308 - DNA, 15 bp, Homo sapiens
atagaatgacttagt

SEQ ID NO: 660309 - DNA, 15 bp, Homo sapiens
tagaatgacttagtg

SEQ ID NO: 660310 - DNA, 15 bp, Homo sapiens
agaatgacttagtgc

SEQ ID NO: 660311 - DNA, 15 bp, Homo sapiens
gaatgacttagtgct

SEQ ID NO: 660312 - DNA, 15 bp, Homo sapiens
aatgacttagtgctc

SEQ ID NO: 660313 - DNA, 15 bp, Homo sapiens
atgacttagtgctca

SEQ ID NO: 660314 - DNA, 15 bp, Homo sapiens
tgacttagtgctcag

SEQ ID NO: 660315 - DNA, 15 bp, Homo sapiens
gacttagtgctcaga

SEQ ID NO: 660316 - DNA, 15 bp, Homo sapiens
acttagtgctcagaa

SEQ ID NO: 660317 - DNA, 15 bp, Homo sapiens
cttagtgctcagaaa

SEQ ID NO: 660318 - DNA, 15 bp, Homo sapiens
ttagtgctcagaaag

SEQ ID NO: 660319 - DNA, 15 bp, Homo sapiens
tagtgctcagaaagt

SEQ ID NO: 660320 - DNA, 15 bp, Homo sapiens
agtgctcagaaagtc

SEQ ID NO: 660321 - DNA, 15 bp, Homo sapiens
gtgctcagaaagtct

SEQ ID NO: 660322 - DNA, 15 bp, Homo sapiens
tgctcagaaagtctt

SEQ ID NO: 660323 - DNA, 15 bp, Homo sapiens
gctcagaaagtcttg

SEQ ID NO: 660324 - DNA, 15 bp, Homo sapiens
ctcagaaagtcttga

SEQ ID NO: 660325 - DNA, 15 bp, Homo sapiens
tcagaaagtcttgag

SEQ ID NO: 660326 - DNA, 15 bp, Homo sapiens
cagaaagtcttgagt

SEQ ID NO: 660327 - DNA, 15 bp, Homo sapiens
agaaagtcttgagtt

SEQ ID NO: 660328 - DNA, 15 bp, Homo sapiens
gaaagtcttgagttt

SEQ ID NO: 660329 - DNA, 15 bp, Homo sapiens
aaagtcttgagtttg

SEQ ID NO: 660330 - DNA, 15 bp, Homo sapiens
aagtcttgagtttgg

SEQ ID NO: 660331 - DNA, 15 bp, Homo sapiens
agtcttgagtttgga

SEQ ID NO: 660332 - DNA, 15 bp, Homo sapiens
gtcttgagtttggat

SEQ ID NO: 660333 - DNA, 15 bp, Homo sapiens
tcttgagtttggatc

SEQ ID NO: 660334 - DNA, 15 bp, Homo sapiens
cttgagtttggatcc

SEQ ID NO: 660335 - DNA, 15 bp, Homo sapiens
ttgagtttggatcct

SEQ ID NO: 660336 - DNA, 15 bp, Homo sapiens
tgagtttggatcctg

SEQ ID NO: 660337 - DNA, 15 bp, Homo sapiens
gagtttggatcctgg

SEQ ID NO: 660338 - DNA, 15 bp, Homo sapiens
agtttggatcctggt

SEQ ID NO: 660339 - DNA, 15 bp, Homo sapiens
gtttggatcctggtt

SEQ ID NO: 660340 - DNA, 15 bp, Homo sapiens
tttggatcctggttt

SEQ ID NO: 660341 - DNA, 15 bp, Homo sapiens
ttggatcctggtttg

SEQ ID NO: 660342 - DNA, 15 bp, Homo sapiens
tggatcctggtttgg

SEQ ID NO: 660343 - DNA, 15 bp, Homo sapiens
ggatcctggtttggg

SEQ ID NO: 660344 - DNA, 15 bp, Homo sapiens
gatcctggtttgggc

SEQ ID NO: 660345 - DNA, 15 bp, Homo sapiens
atcctggtttgggca

SEQ ID NO: 660346 - DNA, 15 bp, Homo sapiens
tcctggtttgggcat

SEQ ID NO: 660347 - DNA, 15 bp, Homo sapiens
cctggtttgggcatt

SEQ ID NO: 660348 - DNA, 15 bp, Homo sapiens
ctggtttgggcattt

SEQ ID NO: 660349 - DNA, 15 bp, Homo sapiens
tggtttgggcattta

SEQ ID NO: 660350 - DNA, 15 bp, Homo sapiens
ggtttgggcatttaa

SEQ ID NO: 660351 - DNA, 15 bp, Homo sapiens
gtttgggcatttaat

SEQ ID NO: 660352 - DNA, 15 bp, Homo sapiens
tttgggcatttaata

SEQ ID NO: 660353 - DNA, 15 bp, Homo sapiens
ttgggcatttaataa

SEQ ID NO: 660354 - DNA, 15 bp, Homo sapiens
tgggcatttaataag

SEQ ID NO: 660355 - DNA, 15 bp, Homo sapiens
gggcatttaataagt

SEQ ID NO: 660356 - DNA, 15 bp, Homo sapiens
ggcatttaataagtg

SEQ ID NO: 660357 - DNA, 15 bp, Homo sapiens
gcatttaataagtga

SEQ ID NO: 660358 - DNA, 15 bp, Homo sapiens
catttaataagtgag

SEQ ID NO: 660359 - DNA, 15 bp, Homo sapiens
atttaataagtgagt

SEQ ID NO: 660360 - DNA, 15 bp, Homo sapiens
tttaataagtgagtg

SEQ ID NO: 660361 - DNA, 15 bp, Homo sapiens
ttaataagtgagtgg

SEQ ID NO: 660362 - DNA, 15 bp, Homo sapiens
taataagtgagtggc

SEQ ID NO: 660363 - DNA, 15 bp, Homo sapiens
aataagtgagtggcc

SEQ ID NO: 660364 - DNA, 15 bp, Homo sapiens
ataagtgagtggcct

SEQ ID NO: 660365 - DNA, 15 bp, Homo sapiens
taagtgagtggcctg

SEQ ID NO: 660366 - DNA, 15 bp, Homo sapiens
aagtgagtggcctga

SEQ ID NO: 660367 - DNA, 15 bp, Homo sapiens
agtgagtggcctgag

SEQ ID NO: 660368 - DNA, 15 bp, Homo sapiens
gtgagtggcctgaga

SEQ ID NO: 660369 - DNA, 15 bp, Homo sapiens
tgagtggcctgagac

SEQ ID NO: 660370 - DNA, 15 bp, Homo sapiens
gagtggcctgagaca

SEQ ID NO: 660371 - DNA, 15 bp, Homo sapiens
agtggcctgagacaa

SEQ ID NO: 660372 - DNA, 15 bp, Homo sapiens
gtggcctgagacaaa

SEQ ID NO: 660373 - DNA, 15 bp, Homo sapiens
tggcctgagacaaat

SEQ ID NO: 660374 - DNA, 15 bp, Homo sapiens
ggcctgagacaaata

SEQ ID NO: 660375 - DNA, 15 bp, Homo sapiens
gcctgagacaaataa

SEQ ID NO: 660376 - DNA, 15 bp, Homo sapiens
cctgagacaaataaa

SEQ ID NO: 660377 - DNA, 15 bp, Homo sapiens
ctgagacaaataaat

SEQ ID NO: 660378 - DNA, 15 bp, Homo sapiens
tgagacaaataaata

SEQ ID NO: 660379 - DNA, 15 bp, Homo sapiens
gagacaaataaataa

SEQ ID NO: 660380 - DNA, 15 bp, Homo sapiens
agacaaataaataaa

SEQ ID NO: 660381 - DNA, 15 bp, Homo sapiens
gacaaataaataaac

SEQ ID NO: 660382 - DNA, 15 bp, Homo sapiens
acaaataaataaact

SEQ ID NO: 660383 - DNA, 15 bp, Homo sapiens
caaataaataaactt

SEQ ID NO: 660384 - DNA, 15 bp, Homo sapiens
aaataaataaacttt

SEQ ID NO: 660385 - DNA, 15 bp, Homo sapiens
aataaataaactttt

SEQ ID NO: 660386 - DNA, 15 bp, Homo sapiens
ataaataaacttttc

SEQ ID NO: 660387 - DNA, 15 bp, Homo sapiens
taaataaacttttct

SEQ ID NO: 660388 - DNA, 15 bp, Homo sapiens
aaataaacttttcta

SEQ ID NO: 660389 - DNA, 15 bp, Homo sapiens
aataaacttttctat

SEQ ID NO: 660390 - DNA, 15 bp, Homo sapiens
ataaacttttctatg

SEQ ID NO: 660391 - DNA, 15 bp, Homo sapiens
taaacttttctatgg

SEQ ID NO: 660392 - DNA, 15 bp, Homo sapiens
aaacttttctatggc

SEQ ID NO: 660393 - DNA, 15 bp, Homo sapiens
aacttttctatggct

SEQ ID NO: 660394 - DNA, 15 bp, Homo sapiens
acttttctatggctc

SEQ ID NO: 660395 - DNA, 15 bp, Homo sapiens
cttttctatggctca

SEQ ID NO: 660396 - DNA, 15 bp, Homo sapiens
ttttctatggctcaa

SEQ ID NO: 660397 - DNA, 15 bp, Homo sapiens
tttctatggctcaat

SEQ ID NO: 660398 - DNA, 15 bp, Homo sapiens
ttctatggctcaata

SEQ ID NO: 660399 - DNA, 15 bp, Homo sapiens
tctatggctcaatat

SEQ ID NO: 660400 - DNA, 15 bp, Homo sapiens
ctatggctcaatatt

SEQ ID NO: 660401 - DNA, 15 bp, Homo sapiens
tatggctcaatattt

SEQ ID NO: 660402 - DNA, 15 bp, Homo sapiens
atggctcaatatttt

SEQ ID NO: 660403 - DNA, 15 bp, Homo sapiens
tggctcaatattttc

SEQ ID NO: 660404 - DNA, 15 bp, Homo sapiens
ggctcaatattttca

SEQ ID NO: 660405 - DNA, 15 bp, Homo sapiens
gctcaatattttcaa

SEQ ID NO: 660406 - DNA, 15 bp, Homo sapiens
ctcaatattttcaac

SEQ ID NO: 660407 - DNA, 15 bp, Homo sapiens
tcaatattttcaact

SEQ ID NO: 660408 - DNA, 15 bp, Homo sapiens
caatattttcaactg

SEQ ID NO: 660409 - DNA, 15 bp, Homo sapiens
aatattttcaactgt

SEQ ID NO: 660410 - DNA, 15 bp, Homo sapiens
atattttcaactgta

SEQ ID NO: 660411 - DNA, 15 bp, Homo sapiens
tattttcaactgtaa

SEQ ID NO: 660412 - DNA, 15 bp, Homo sapiens
attttcaactgtaaa

SEQ ID NO: 660413 - DNA, 15 bp, Homo sapiens
ttttcaactgtaaag

SEQ ID NO: 660414 - DNA, 15 bp, Homo sapiens
tttcaactgtaaagt

SEQ ID NO: 660415 - DNA, 15 bp, Homo sapiens
ttcaactgtaaagtg

SEQ ID NO: 660416 - DNA, 15 bp, Homo sapiens
tcaactgtaaagtga

SEQ ID NO: 660417 - DNA, 15 bp, Homo sapiens
caactgtaaagtgaa

SEQ ID NO: 660418 - DNA, 15 bp, Homo sapiens
aactgtaaagtgaag

SEQ ID NO: 660419 - DNA, 15 bp, Homo sapiens
actgtaaagtgaaga

SEQ ID NO: 660420 - DNA, 15 bp, Homo sapiens
ctgtaaagtgaagat

SEQ ID NO: 660421 - DNA, 15 bp, Homo sapiens
tgtaaagtgaagatg

SEQ ID NO: 660422 - DNA, 15 bp, Homo sapiens
gtaaagtgaagatga

SEQ ID NO: 660423 - DNA, 15 bp, Homo sapiens
taaagtgaagatgat

SEQ ID NO: 660424 - DNA, 15 bp, Homo sapiens
aaagtgaagatgata

SEQ ID NO: 660425 - DNA, 15 bp, Homo sapiens
aagtgaagatgataa

SEQ ID NO: 660426 - DNA, 15 bp, Homo sapiens
agtgaagatgataac

SEQ ID NO: 660427 - DNA, 15 bp, Homo sapiens
gtgaagatgataaca

SEQ ID NO: 660428 - DNA, 15 bp, Homo sapiens
tgaagatgataacag

SEQ ID NO: 660429 - DNA, 15 bp, Homo sapiens
gaagatgataacagt

SEQ ID NO: 660430 - DNA, 15 bp, Homo sapiens
aagatgataacagtg

SEQ ID NO: 660431 - DNA, 15 bp, Homo sapiens
agatgataacagtgt

SEQ ID NO: 660432 - DNA, 15 bp, Homo sapiens
gatgataacagtgtc

SEQ ID NO: 660433 - DNA, 15 bp, Homo sapiens
atgataacagtgtcc

SEQ ID NO: 660434 - DNA, 15 bp, Homo sapiens
tgataacagtgtcca

SEQ ID NO: 660435 - DNA, 15 bp, Homo sapiens
gataacagtgtccat

SEQ ID NO: 660436 - DNA, 15 bp, Homo sapiens
ataacagtgtccatc

SEQ ID NO: 660437 - DNA, 15 bp, Homo sapiens
taacagtgtccatct

SEQ ID NO: 660438 - DNA, 15 bp, Homo sapiens
aacagtgtccatctc

SEQ ID NO: 660439 - DNA, 15 bp, Homo sapiens
acagtgtccatctca

SEQ ID NO: 660440 - DNA, 15 bp, Homo sapiens
cagtgtccatctcat

SEQ ID NO: 660441 - DNA, 15 bp, Homo sapiens
agtgtccatctcata

SEQ ID NO: 660442 - DNA, 15 bp, Homo sapiens
gtgtccatctcatag

SEQ ID NO: 660443 - DNA, 15 bp, Homo sapiens
tgtccatctcatagg

SEQ ID NO: 660444 - DNA, 15 bp, Homo sapiens
gtccatctcatagga

SEQ ID NO: 660445 - DNA, 15 bp, Homo sapiens
tccatctcataggat

SEQ ID NO: 660446 - DNA, 15 bp, Homo sapiens
ccatctcataggatt

SEQ ID NO: 660447 - DNA, 15 bp, Homo sapiens
catctcataggattg

SEQ ID NO: 660448 - DNA, 15 bp, Homo sapiens
atctcataggattgt

SEQ ID NO: 660449 - DNA, 15 bp, Homo sapiens
tctcataggattgtt

SEQ ID NO: 660450 - DNA, 15 bp, Homo sapiens
ctcataggattgttg

SEQ ID NO: 660451 - DNA, 15 bp, Homo sapiens
tcataggattgttgt

SEQ ID NO: 660452 - DNA, 15 bp, Homo sapiens
cataggattgttgta

SEQ ID NO: 660453 - DNA, 15 bp, Homo sapiens
ataggattgttgtaa

SEQ ID NO: 660454 - DNA, 15 bp, Homo sapiens
taggattgttgtaaa

SEQ ID NO: 660455 - DNA, 15 bp, Homo sapiens
aggattgttgtaaaa

SEQ ID NO: 660456 - DNA, 15 bp, Homo sapiens
ggattgttgtaaaag

SEQ ID NO: 660457 - DNA, 15 bp, Homo sapiens
gattgttgtaaaagg

SEQ ID NO: 660458 - DNA, 15 bp, Homo sapiens
attgttgtaaaaggt

SEQ ID NO: 660459 - DNA, 15 bp, Homo sapiens
ttgttgtaaaaggta

SEQ ID NO: 660460 - DNA, 15 bp, Homo sapiens
tgttgtaaaaggtaa

SEQ ID NO: 660461 - DNA, 15 bp, Homo sapiens
gttgtaaaaggtaaa

SEQ ID NO: 660462 - DNA, 15 bp, Homo sapiens
ttgtaaaaggtaaat

SEQ ID NO: 660463 - DNA, 15 bp, Homo sapiens
tgtaaaaggtaaatg

SEQ ID NO: 660464 - DNA, 15 bp, Homo sapiens
gtaaaaggtaaatga

SEQ ID NO: 660465 - DNA, 15 bp, Homo sapiens
taaaaggtaaatgat

SEQ ID NO: 660466 - DNA, 15 bp, Homo sapiens
aaaaggtaaatgata

SEQ ID NO: 660467 - DNA, 15 bp, Homo sapiens
aaaggtaaatgatac

SEQ ID NO: 660468 - DNA, 15 bp, Homo sapiens
aaggtaaatgataca

SEQ ID NO: 660469 - DNA, 15 bp, Homo sapiens
aggtaaatgatacag

SEQ ID NO: 660470 - DNA, 15 bp, Homo sapiens
ggtaaatgatacagc

SEQ ID NO: 660471 - DNA, 15 bp, Homo sapiens
gtaaatgatacagca

SEQ ID NO: 660472 - DNA, 15 bp, Homo sapiens
taaatgatacagcat

SEQ ID NO: 660473 - DNA, 15 bp, Homo sapiens
aaatgatacagcata

SEQ ID NO: 660474 - DNA, 15 bp, Homo sapiens
aatgatacagcatat

SEQ ID NO: 660475 - DNA, 15 bp, Homo sapiens
atgatacagcatatg

SEQ ID NO: 660476 - DNA, 15 bp, Homo sapiens
tgatacagcatatgt

SEQ ID NO: 660477 - DNA, 15 bp, Homo sapiens
gatacagcatatgta

SEQ ID NO: 660478 - DNA, 15 bp, Homo sapiens
atacagcatatgtat

SEQ ID NO: 660479 - DNA, 15 bp, Homo sapiens
tacagcatatgtata

SEQ ID NO: 660480 - DNA, 15 bp, Homo sapiens
acagcatatgtataa

SEQ ID NO: 660481 - DNA, 15 bp, Homo sapiens
cagcatatgtataaa

SEQ ID NO: 660482 - DNA, 15 bp, Homo sapiens
agcatatgtataaac

SEQ ID NO: 660483 - DNA, 15 bp, Homo sapiens
gcatatgtataaacc

SEQ ID NO: 660484 - DNA, 15 bp, Homo sapiens
catatgtataaacca

SEQ ID NO: 660485 - DNA, 15 bp, Homo sapiens
atatgtataaaccag

SEQ ID NO: 660486 - DNA, 15 bp, Homo sapiens
tatgtataaaccaga

SEQ ID NO: 660487 - DNA, 15 bp, Homo sapiens
atgtataaaccagat

SEQ ID NO: 660488 - DNA, 15 bp, Homo sapiens
tgtataaaccagatg

SEQ ID NO: 660489 - DNA, 15 bp, Homo sapiens
gtataaaccagatgc

SEQ ID NO: 660490 - DNA, 15 bp, Homo sapiens
tataaaccagatgca

SEQ ID NO: 660491 - DNA, 15 bp, Homo sapiens
ataaaccagatgcac

SEQ ID NO: 660492 - DNA, 15 bp, Homo sapiens
taaaccagatgcact

SEQ ID NO: 660493 - DNA, 15 bp, Homo sapiens
aaaccagatgcactc

SEQ ID NO: 660494 - DNA, 15 bp, Homo sapiens
aaccagatgcactca

SEQ ID NO: 660495 - DNA, 15 bp, Homo sapiens
accagatgcactcag

SEQ ID NO: 660496 - DNA, 15 bp, Homo sapiens
ccagatgcactcagg

SEQ ID NO: 660497 - DNA, 15 bp, Homo sapiens
cagatgcactcaggt

SEQ ID NO: 660498 - DNA, 15 bp, Homo sapiens
agatgcactcaggtt

SEQ ID NO: 660499 - DNA, 15 bp, Homo sapiens
gatgcactcaggttt

SEQ ID NO: 660500 - DNA, 15 bp, Homo sapiens
atgcactcaggtttt

SEQ ID NO: 660501 - DNA, 15 bp, Homo sapiens
tgcactcaggttttc

SEQ ID NO: 660502 - DNA, 15 bp, Homo sapiens
gcactcaggttttcc

SEQ ID NO: 660503 - DNA, 15 bp, Homo sapiens
cactcaggttttcca

SEQ ID NO: 660504 - DNA, 15 bp, Homo sapiens
actcaggttttccag

SEQ ID NO: 660505 - DNA, 15 bp, Homo sapiens
ctcaggttttccagt

SEQ ID NO: 660506 - DNA, 15 bp, Homo sapiens
tcaggttttccagtc

SEQ ID NO: 660507 - DNA, 15 bp, Homo sapiens
caggttttccagtct

SEQ ID NO: 660508 - DNA, 15 bp, Homo sapiens
aggttttccagtctc

SEQ ID NO: 660509 - DNA, 15 bp, Homo sapiens
ggttttccagtctcc

SEQ ID NO: 660510 - DNA, 15 bp, Homo sapiens
gttttccagtctcct

SEQ ID NO: 660511 - DNA, 15 bp, Homo sapiens
ttttccagtctcctt

SEQ ID NO: 660512 - DNA, 15 bp, Homo sapiens
tttccagtctccttg

SEQ ID NO: 660513 - DNA, 15 bp, Homo sapiens
ttccagtctccttgg

SEQ ID NO: 660514 - DNA, 15 bp, Homo sapiens
tccagtctccttggg

SEQ ID NO: 660515 - DNA, 15 bp, Homo sapiens
ccagtctccttgggt

SEQ ID NO: 660516 - DNA, 15 bp, Homo sapiens
cagtctccttgggtc

SEQ ID NO: 660517 - DNA, 15 bp, Homo sapiens
agtctccttgggtca

SEQ ID NO: 660518 - DNA, 15 bp, Homo sapiens
gtctccttgggtcac

SEQ ID NO: 660519 - DNA, 15 bp, Homo sapiens
tctccttgggtcacg

SEQ ID NO: 660520 - DNA, 15 bp, Homo sapiens
ctccttgggtcacgc

SEQ ID NO: 660521 - DNA, 15 bp, Homo sapiens
tccttgggtcacgct

SEQ ID NO: 660522 - DNA, 15 bp, Homo sapiens
ccttgggtcacgctt

SEQ ID NO: 660523 - DNA, 15 bp, Homo sapiens
cttgggtcacgcttt

SEQ ID NO: 660524 - DNA, 15 bp, Homo sapiens
ttgggtcacgctttt

SEQ ID NO: 660525 - DNA, 15 bp, Homo sapiens
tgggtcacgcttttc

SEQ ID NO: 660526 - DNA, 15 bp, Homo sapiens
gggtcacgcttttct

SEQ ID NO: 660527 - DNA, 15 bp, Homo sapiens
ggtcacgcttttctc

SEQ ID NO: 660528 - DNA, 15 bp, Homo sapiens
gtcacgcttttctcc

SEQ ID NO: 660529 - DNA, 15 bp, Homo sapiens
tcacgcttttctcca

SEQ ID NO: 660530 - DNA, 15 bp, Homo sapiens
cacgcttttctccaa

SEQ ID NO: 660531 - DNA, 15 bp, Homo sapiens
acgcttttctccaat

SEQ ID NO: 660532 - DNA, 15 bp, Homo sapiens
cgcttttctccaata

SEQ ID NO: 660533 - DNA, 15 bp, Homo sapiens
gcttttctccaatat

SEQ ID NO: 660534 - DNA, 15 bp, Homo sapiens
cttttctccaatatc

SEQ ID NO: 660535 - DNA, 15 bp, Homo sapiens
ttttctccaatatct

SEQ ID NO: 660536 - DNA, 15 bp, Homo sapiens
tttctccaatatcta

SEQ ID NO: 660537 - DNA, 15 bp, Homo sapiens
ttctccaatatctac

SEQ ID NO: 660538 - DNA, 15 bp, Homo sapiens
tctccaatatctaca

SEQ ID NO: 660539 - DNA, 15 bp, Homo sapiens
ctccaatatctacat

SEQ ID NO: 660540 - DNA, 15 bp, Homo sapiens
tccaatatctacata

SEQ ID NO: 660541 - DNA, 15 bp, Homo sapiens
ccaatatctacataa

SEQ ID NO: 660542 - DNA, 15 bp, Homo sapiens
caatatctacataaa

SEQ ID NO: 660543 - DNA, 15 bp, Homo sapiens
aatatctacataaaa

SEQ ID NO: 660544 - DNA, 15 bp, Homo sapiens
atatctacataaaat

SEQ ID NO: 660545 - DNA, 15 bp, Homo sapiens
tatctacataaaata

SEQ ID NO: 660546 - DNA, 15 bp, Homo sapiens
atctacataaaataa

SEQ ID NO: 660547 - DNA, 15 bp, Homo sapiens
tctacataaaataac

SEQ ID NO: 660548 - DNA, 15 bp, Homo sapiens
ctacataaaataacc

SEQ ID NO: 660549 - DNA, 15 bp, Homo sapiens
tacataaaataacct

SEQ ID NO: 660550 - DNA, 15 bp, Homo sapiens
acataaaataacctg

SEQ ID NO: 660551 - DNA, 15 bp, Homo sapiens
cataaaataacctgc

SEQ ID NO: 660552 - DNA, 15 bp, Homo sapiens
ataaaataacctgca

SEQ ID NO: 660553 - DNA, 15 bp, Homo sapiens
taaaataacctgcaa

SEQ ID NO: 660554 - DNA, 15 bp, Homo sapiens
aaaataacctgcaac

SEQ ID NO: 660555 - DNA, 15 bp, Homo sapiens
aaataacctgcaacc

SEQ ID NO: 660556 - DNA, 15 bp, Homo sapiens
aataacctgcaaccc

SEQ ID NO: 660557 - DNA, 15 bp, Homo sapiens
ataacctgcaacccc

SEQ ID NO: 660558 - DNA, 15 bp, Homo sapiens
taacctgcaacccct

SEQ ID NO: 660559 - DNA, 15 bp, Homo sapiens
aacctgcaacccctt

SEQ ID NO: 660560 - DNA, 15 bp, Homo sapiens
acctgcaaccccttt

SEQ ID NO: 660561 - DNA, 15 bp, Homo sapiens
cctgcaacccctttt

SEQ ID NO: 660562 - DNA, 15 bp, Homo sapiens
ctgcaaccccttttc

SEQ ID NO: 660563 - DNA, 15 bp, Homo sapiens
tgcaaccccttttca

SEQ ID NO: 660564 - DNA, 15 bp, Homo sapiens
gcaaccccttttcac

SEQ ID NO: 660565 - DNA, 15 bp, Homo sapiens
caaccccttttcaca

SEQ ID NO: 660566 - DNA, 15 bp, Homo sapiens
aaccccttttcacat

SEQ ID NO: 660567 - DNA, 15 bp, Homo sapiens
accccttttcacatt

SEQ ID NO: 660568 - DNA, 15 bp, Homo sapiens
ccccttttcacattc

SEQ ID NO: 660569 - DNA, 15 bp, Homo sapiens
cccttttcacattcc

SEQ ID NO: 660570 - DNA, 15 bp, Homo sapiens
ccttttcacattcca

SEQ ID NO: 660571 - DNA, 15 bp, Homo sapiens
cttttcacattccat

SEQ ID NO: 660572 - DNA, 15 bp, Homo sapiens
ttttcacattccatg

SEQ ID NO: 660573 - DNA, 15 bp, Homo sapiens
tttcacattccatgg

SEQ ID NO: 660574 - DNA, 15 bp, Homo sapiens
ttcacattccatggg

SEQ ID NO: 660575 - DNA, 15 bp, Homo sapiens
tcacattccatggga

SEQ ID NO: 660576 - DNA, 15 bp, Homo sapiens
cacattccatgggaa

SEQ ID NO: 660577 - DNA, 15 bp, Homo sapiens
acattccatgggaag

SEQ ID NO: 660578 - DNA, 15 bp, Homo sapiens
cattccatgggaagc

SEQ ID NO: 660579 - DNA, 15 bp, Homo sapiens
attccatgggaagcc

SEQ ID NO: 660580 - DNA, 15 bp, Homo sapiens
ttccatgggaagccc

SEQ ID NO: 660581 - DNA, 15 bp, Homo sapiens
tccatgggaagccca

SEQ ID NO: 660582 - DNA, 15 bp, Homo sapiens
ccatgggaagcccat

SEQ ID NO: 660583 - DNA, 15 bp, Homo sapiens
catgggaagcccatc

SEQ ID NO: 660584 - DNA, 15 bp, Homo sapiens
atgggaagcccatcc

SEQ ID NO: 660585 - DNA, 15 bp, Homo sapiens
tgggaagcccatcct

SEQ ID NO: 660586 - DNA, 15 bp, Homo sapiens
gggaagcccatcctc

SEQ ID NO: 660587 - DNA, 15 bp, Homo sapiens
ggaagcccatcctct

SEQ ID NO: 660588 - DNA, 15 bp, Homo sapiens
gaagcccatcctctg

SEQ ID NO: 660589 - DNA, 15 bp, Homo sapiens
aagcccatcctctgc

SEQ ID NO: 660590 - DNA, 15 bp, Homo sapiens
agcccatcctctgcc

SEQ ID NO: 660591 - DNA, 15 bp, Homo sapiens
gcccatcctctgccc

SEQ ID NO: 660592 - DNA, 15 bp, Homo sapiens
cccatcctctgccca

SEQ ID NO: 660593 - DNA, 15 bp, Homo sapiens
ccatcctctgcccac

SEQ ID NO: 660594 - DNA, 15 bp, Homo sapiens
catcctctgcccacg

SEQ ID NO: 660595 - DNA, 15 bp, Homo sapiens
atcctctgcccacga

SEQ ID NO: 660596 - DNA, 15 bp, Homo sapiens
tcctctgcccacgag

SEQ ID NO: 660597 - DNA, 15 bp, Homo sapiens
cctctgcccacgagc

SEQ ID NO: 660598 - DNA, 15 bp, Homo sapiens
ctctgcccacgagct

SEQ ID NO: 660599 - DNA, 15 bp, Homo sapiens
tctgcccacgagctc

SEQ ID NO: 660600 - DNA, 15 bp, Homo sapiens
ctgcccacgagctct

SEQ ID NO: 660601 - DNA, 15 bp, Homo sapiens
tgcccacgagctctg

SEQ ID NO: 660602 - DNA, 15 bp, Homo sapiens
gcccacgagctctga

SEQ ID NO: 660603 - DNA, 15 bp, Homo sapiens
cccacgagctctgaa

SEQ ID NO: 660604 - DNA, 15 bp, Homo sapiens
ccacgagctctgaag

SEQ ID NO: 660605 - DNA, 15 bp, Homo sapiens
cacgagctctgaaga

SEQ ID NO: 660606 - DNA, 15 bp, Homo sapiens
acgagctctgaagat

SEQ ID NO: 660607 - DNA, 15 bp, Homo sapiens
cgagctctgaagatt

SEQ ID NO: 660608 - DNA, 15 bp, Homo sapiens
gagctctgaagattt

SEQ ID NO: 660609 - DNA, 15 bp, Homo sapiens
agctctgaagatttg

SEQ ID NO: 660610 - DNA, 15 bp, Homo sapiens
gctctgaagatttgg

SEQ ID NO: 660611 - DNA, 15 bp, Homo sapiens
ctctgaagatttggg

SEQ ID NO: 660612 - DNA, 15 bp, Homo sapiens
tctgaagatttgggg

SEQ ID NO: 660613 - DNA, 15 bp, Homo sapiens
ctgaagatttggggt

SEQ ID NO: 660614 - DNA, 15 bp, Homo sapiens
tgaagatttggggta

SEQ ID NO: 660615 - DNA, 15 bp, Homo sapiens
gaagatttggggtat

SEQ ID NO: 660616 - DNA, 15 bp, Homo sapiens
aagatttggggtatc

SEQ ID NO: 660617 - DNA, 15 bp, Homo sapiens
agatttggggtatca

SEQ ID NO: 660618 - DNA, 15 bp, Homo sapiens
gatttggggtatcat

SEQ ID NO: 660619 - DNA, 15 bp, Homo sapiens
atttggggtatcatg

SEQ ID NO: 660620 - DNA, 15 bp, Homo sapiens
tttggggtatcatgc

SEQ ID NO: 660621 - DNA, 15 bp, Homo sapiens
ttggggtatcatgct

SEQ ID NO: 660622 - DNA, 15 bp, Homo sapiens
tggggtatcatgctt

SEQ ID NO: 660623 - DNA, 15 bp, Homo sapiens
ggggtatcatgcttc

SEQ ID NO: 660624 - DNA, 15 bp, Homo sapiens
gggtatcatgcttct

SEQ ID NO: 660625 - DNA, 15 bp, Homo sapiens
ggtatcatgcttctc

SEQ ID NO: 660626 - DNA, 15 bp, Homo sapiens
gtatcatgcttctct

SEQ ID NO: 660627 - DNA, 15 bp, Homo sapiens
tatcatgcttctctc

SEQ ID NO: 660628 - DNA, 15 bp, Homo sapiens
atcatgcttctctca

SEQ ID NO: 660629 - DNA, 15 bp, Homo sapiens
tcatgcttctctcaa

SEQ ID NO: 660630 - DNA, 15 bp, Homo sapiens
catgcttctctcaag

SEQ ID NO: 660631 - DNA, 15 bp, Homo sapiens
atgcttctctcaagt

SEQ ID NO: 660632 - DNA, 15 bp, Homo sapiens
tgcttctctcaagtt

SEQ ID NO: 660633 - DNA, 15 bp, Homo sapiens
gcttctctcaagtta

SEQ ID NO: 660634 - DNA, 15 bp, Homo sapiens
cttctctcaagttat

SEQ ID NO: 660635 - DNA, 15 bp, Homo sapiens
ttctctcaagttatt

SEQ ID NO: 660636 - DNA, 15 bp, Homo sapiens
tctctcaagttattt

SEQ ID NO: 660637 - DNA, 15 bp, Homo sapiens
ctctcaagttatttc

SEQ ID NO: 660638 - DNA, 15 bp, Homo sapiens
tctcaagttatttca

SEQ ID NO: 660639 - DNA, 15 bp, Homo sapiens
ctcaagttatttcac

SEQ ID NO: 660640 - DNA, 15 bp, Homo sapiens
tcaagttatttcact

SEQ ID NO: 660641 - DNA, 15 bp, Homo sapiens
caagttatttcactc

SEQ ID NO: 660642 - DNA, 15 bp, Homo sapiens
aagttatttcactct

SEQ ID NO: 660643 - DNA, 15 bp, Homo sapiens
agttatttcactcta

SEQ ID NO: 660644 - DNA, 15 bp, Homo sapiens
gttatttcactctat

SEQ ID NO: 660645 - DNA, 15 bp, Homo sapiens
ttatttcactctata

SEQ ID NO: 660646 - DNA, 15 bp, Homo sapiens
tatttcactctatag

SEQ ID NO: 660647 - DNA, 15 bp, Homo sapiens
atttcactctatagc

SEQ ID NO: 660648 - DNA, 15 bp, Homo sapiens
tttcactctatagcc

SEQ ID NO: 660649 - DNA, 15 bp, Homo sapiens
ttcactctatagcct

SEQ ID NO: 660650 - DNA, 15 bp, Homo sapiens
tcactctatagcctg

SEQ ID NO: 660651 - DNA, 15 bp, Homo sapiens
cactctatagcctgc

SEQ ID NO: 660652 - DNA, 15 bp, Homo sapiens
actctatagcctgct

SEQ ID NO: 660653 - DNA, 15 bp, Homo sapiens
ctctatagcctgctt

SEQ ID NO: 660654 - DNA, 15 bp, Homo sapiens
tctatagcctgcttc

SEQ ID NO: 660655 - DNA, 15 bp, Homo sapiens
ctatagcctgcttcc

SEQ ID NO: 660656 - DNA, 15 bp, Homo sapiens
tatagcctgcttccc

SEQ ID NO: 660657 - DNA, 15 bp, Homo sapiens
atagcctgcttccca

SEQ ID NO: 660658 - DNA, 15 bp, Homo sapiens
tagcctgcttcccaa

SEQ ID NO: 660659 - DNA, 15 bp, Homo sapiens
agcctgcttcccaaa

SEQ ID NO: 660660 - DNA, 15 bp, Homo sapiens
gcctgcttcccaaat

SEQ ID NO: 660661 - DNA, 15 bp, Homo sapiens
cctgcttcccaaata

SEQ ID NO: 660662 - DNA, 15 bp, Homo sapiens
ctgcttcccaaatat

SEQ ID NO: 660663 - DNA, 15 bp, Homo sapiens
tgcttcccaaatatg

SEQ ID NO: 660664 - DNA, 15 bp, Homo sapiens
gcttcccaaatatgg

SEQ ID NO: 660665 - DNA, 15 bp, Homo sapiens
cttcccaaatatggc

SEQ ID NO: 660666 - DNA, 15 bp, Homo sapiens
ttcccaaatatggcc

SEQ ID NO: 660667 - DNA, 15 bp, Homo sapiens
tcccaaatatggccc

SEQ ID NO: 660668 - DNA, 15 bp, Homo sapiens
cccaaatatggccca

SEQ ID NO: 660669 - DNA, 15 bp, Homo sapiens
ccaaatatggcccac

SEQ ID NO: 660670 - DNA, 15 bp, Homo sapiens
caaatatggcccact

SEQ ID NO: 660671 - DNA, 15 bp, Homo sapiens
aaatatggcccactc

SEQ ID NO: 660672 - DNA, 15 bp, Homo sapiens
aatatggcccactcc

SEQ ID NO: 660673 - DNA, 15 bp, Homo sapiens
atatggcccactccc

SEQ ID NO: 660674 - DNA, 15 bp, Homo sapiens
tatggcccactccca

SEQ ID NO: 660675 - DNA, 15 bp, Homo sapiens
atggcccactcccac

SEQ ID NO: 660676 - DNA, 15 bp, Homo sapiens
tggcccactcccact

SEQ ID NO: 660677 - DNA, 15 bp, Homo sapiens
ggcccactcccactt

SEQ ID NO: 660678 - DNA, 15 bp, Homo sapiens
gcccactcccacttg

SEQ ID NO: 660679 - DNA, 15 bp, Homo sapiens
cccactcccacttgt

SEQ ID NO: 660680 - DNA, 15 bp, Homo sapiens
ccactcccacttgtc

SEQ ID NO: 660681 - DNA, 15 bp, Homo sapiens
cactcccacttgtca

SEQ ID NO: 660682 - DNA, 15 bp, Homo sapiens
actcccacttgtcat

SEQ ID NO: 660683 - DNA, 15 bp, Homo sapiens
ctcccacttgtcatt

SEQ ID NO: 660684 - DNA, 15 bp, Homo sapiens
tcccacttgtcattc

SEQ ID NO: 660685 - DNA, 15 bp, Homo sapiens
cccacttgtcattcc

SEQ ID NO: 660686 - DNA, 15 bp, Homo sapiens
ccacttgtcattcct

SEQ ID NO: 660687 - DNA, 15 bp, Homo sapiens
cacttgtcattcctg

SEQ ID NO: 660688 - DNA, 15 bp, Homo sapiens
acttgtcattcctga

SEQ ID NO: 660689 - DNA, 15 bp, Homo sapiens
cttgtcattcctgaa

SEQ ID NO: 660690 - DNA, 15 bp, Homo sapiens
ttgtcattcctgaaa

SEQ ID NO: 660691 - DNA, 15 bp, Homo sapiens
tgtcattcctgaaac

SEQ ID NO: 660692 - DNA, 15 bp, Homo sapiens
gtcattcctgaaacc

SEQ ID NO: 660693 - DNA, 15 bp, Homo sapiens
tcattcctgaaacca

SEQ ID NO: 660694 - DNA, 15 bp, Homo sapiens
cattcctgaaaccat

SEQ ID NO: 660695 - DNA, 15 bp, Homo sapiens
attcctgaaaccatt

SEQ ID NO: 660696 - DNA, 15 bp, Homo sapiens
ttcctgaaaccatta

SEQ ID NO: 660697 - DNA, 15 bp, Homo sapiens
tcctgaaaccattat

SEQ ID NO: 660698 - DNA, 15 bp, Homo sapiens
cctgaaaccattatt

SEQ ID NO: 660699 - DNA, 15 bp, Homo sapiens
ctgaaaccattattc

SEQ ID NO: 660700 - DNA, 15 bp, Homo sapiens
tgaaaccattattct

SEQ ID NO: 660701 - DNA, 15 bp, Homo sapiens
gaaaccattattcta

SEQ ID NO: 660702 - DNA, 15 bp, Homo sapiens
aaaccattattctat

SEQ ID NO: 660703 - DNA, 15 bp, Homo sapiens
aaccattattctatg

SEQ ID NO: 660704 - DNA, 15 bp, Homo sapiens
accattattctatgt

SEQ ID NO: 660705 - DNA, 15 bp, Homo sapiens
ccattattctatgtt

SEQ ID NO: 660706 - DNA, 15 bp, Homo sapiens
cattattctatgttc

SEQ ID NO: 660707 - DNA, 15 bp, Homo sapiens
attattctatgttcc

SEQ ID NO: 660708 - DNA, 15 bp, Homo sapiens
ttattctatgttccc

SEQ ID NO: 660709 - DNA, 15 bp, Homo sapiens
tattctatgttccct

SEQ ID NO: 660710 - DNA, 15 bp, Homo sapiens
attctatgttccctg

SEQ ID NO: 660711 - DNA, 15 bp, Homo sapiens
ttctatgttccctgc

SEQ ID NO: 660712 - DNA, 15 bp, Homo sapiens
tctatgttccctgcc

SEQ ID NO: 660713 - DNA, 15 bp, Homo sapiens
ctatgttccctgccc

SEQ ID NO: 660714 - DNA, 15 bp, Homo sapiens
tatgttccctgcccc

SEQ ID NO: 660715 - DNA, 15 bp, Homo sapiens
atgttccctgccccc

SEQ ID NO: 660716 - DNA, 15 bp, Homo sapiens
tgttccctgccccct

SEQ ID NO: 660717 - DNA, 15 bp, Homo sapiens
gttccctgccccctt

SEQ ID NO: 660718 - DNA, 15 bp, Homo sapiens
ttccctgcccccttt

SEQ ID NO: 660719 - DNA, 15 bp, Homo sapiens
tccctgccccctttg

SEQ ID NO: 660720 - DNA, 15 bp, Homo sapiens
ccctgccccctttgc

SEQ ID NO: 660721 - DNA, 15 bp, Homo sapiens
cctgccccctttgct

SEQ ID NO: 660722 - DNA, 15 bp, Homo sapiens
ctgccccctttgctt

SEQ ID NO: 660723 - DNA, 15 bp, Homo sapiens
tgccccctttgcttc

SEQ ID NO: 660724 - DNA, 15 bp, Homo sapiens
gccccctttgcttca

SEQ ID NO: 660725 - DNA, 15 bp, Homo sapiens
ccccctttgcttcag

SEQ ID NO: 660726 - DNA, 15 bp, Homo sapiens
cccctttgcttcagc

SEQ ID NO: 660727 - DNA, 15 bp, Homo sapiens
ccctttgcttcagct

SEQ ID NO: 660728 - DNA, 15 bp, Homo sapiens
cctttgcttcagctc

SEQ ID NO: 660729 - DNA, 15 bp, Homo sapiens
ctttgcttcagctca

SEQ ID NO: 660730 - DNA, 15 bp, Homo sapiens
tttgcttcagctcat

SEQ ID NO: 660731 - DNA, 15 bp, Homo sapiens
ttgcttcagctcatc

SEQ ID NO: 660732 - DNA, 15 bp, Homo sapiens
tgcttcagctcatct

SEQ ID NO: 660733 - DNA, 15 bp, Homo sapiens
gcttcagctcatcta

SEQ ID NO: 660734 - DNA, 15 bp, Homo sapiens
cttcagctcatctaa

SEQ ID NO: 660735 - DNA, 15 bp, Homo sapiens
ttcagctcatctaaa

SEQ ID NO: 660736 - DNA, 15 bp, Homo sapiens
tcagctcatctaaag

SEQ ID NO: 660737 - DNA, 15 bp, Homo sapiens
cagctcatctaaagg

SEQ ID NO: 660738 - DNA, 15 bp, Homo sapiens
agctcatctaaaggg

SEQ ID NO: 660739 - DNA, 15 bp, Homo sapiens
gctcatctaaagggc

SEQ ID NO: 660740 - DNA, 15 bp, Homo sapiens
ctcatctaaagggca

SEQ ID NO: 660741 - DNA, 15 bp, Homo sapiens
tcatctaaagggcag

SEQ ID NO: 660742 - DNA, 15 bp, Homo sapiens
catctaaagggcagg

SEQ ID NO: 660743 - DNA, 15 bp, Homo sapiens
atctaaagggcagga

SEQ ID NO: 660744 - DNA, 15 bp, Homo sapiens
tctaaagggcaggaa

SEQ ID NO: 660745 - DNA, 15 bp, Homo sapiens
taaagggcaggaaaa

SEQ ID NO: 660746 - DNA, 15 bp, Homo sapiens
aaagggcaggaaaac

SEQ ID NO: 660747 - DNA, 15 bp, Homo sapiens
aagggcaggaaaacg

SEQ ID NO: 660748 - DNA, 15 bp, Homo sapiens
agggcaggaaaacgc

SEQ ID NO: 660749 - DNA, 15 bp, Homo sapiens
gggcaggaaaacgct

SEQ ID NO: 660750 - DNA, 15 bp, Homo sapiens
ggcaggaaaacgctg

SEQ ID NO: 660751 - DNA, 15 bp, Homo sapiens
gcaggaaaacgctgg

SEQ ID NO: 660752 - DNA, 15 bp, Homo sapiens
caggaaaacgctgga

SEQ ID NO: 660753 - DNA, 15 bp, Homo sapiens
aggaaaacgctggaa

SEQ ID NO: 660754 - DNA, 15 bp, Homo sapiens
ggaaaacgctggaag

SEQ ID NO: 660755 - DNA, 15 bp, Homo sapiens
gaaaacgctggaagc

SEQ ID NO: 660756 - DNA, 15 bp, Homo sapiens
aaaacgctggaagca

SEQ ID NO: 660757 - DNA, 15 bp, Homo sapiens
aaacgctggaagcag

SEQ ID NO: 660758 - DNA, 15 bp, Homo sapiens
aacgctggaagcagg

SEQ ID NO: 660759 - DNA, 15 bp, Homo sapiens
acgctggaagcagga

SEQ ID NO: 660760 - DNA, 15 bp, Homo sapiens
cgctggaagcaggag

SEQ ID NO: 660761 - DNA, 15 bp, Homo sapiens
gctggaagcaggaga

SEQ ID NO: 660762 - DNA, 15 bp, Homo sapiens
ctggaagcaggagag

SEQ ID NO: 660763 - DNA, 15 bp, Homo sapiens
tggaagcaggagagt

SEQ ID NO: 660764 - DNA, 15 bp, Homo sapiens
ggaagcaggagagtc

SEQ ID NO: 660765 - DNA, 15 bp, Homo sapiens
gaagcaggagagtca

SEQ ID NO: 660766 - DNA, 15 bp, Homo sapiens
aagcaggagagtcat

SEQ ID NO: 660767 - DNA, 15 bp, Homo sapiens
agcaggagagtcatg

SEQ ID NO: 660768 - DNA, 15 bp, Homo sapiens
gcaggagagtcatga

SEQ ID NO: 660769 - DNA, 15 bp, Homo sapiens
caggagagtcatgag

SEQ ID NO: 660770 - DNA, 15 bp, Homo sapiens
aggagagtcatgagt

SEQ ID NO: 660771 - DNA, 15 bp, Homo sapiens
ggagagtcatgagtg

SEQ ID NO: 660772 - DNA, 15 bp, Homo sapiens
gagagtcatgagtgc

SEQ ID NO: 660773 - DNA, 15 bp, Homo sapiens
agagtcatgagtgcc

SEQ ID NO: 660774 - DNA, 15 bp, Homo sapiens
gagtcatgagtgcct

SEQ ID NO: 660775 - DNA, 15 bp, Homo sapiens
agtcatgagtgcctg

SEQ ID NO: 660776 - DNA, 15 bp, Homo sapiens
gtcatgagtgcctga

SEQ ID NO: 660777 - DNA, 15 bp, Homo sapiens
tcatgagtgcctgaa

SEQ ID NO: 660778 - DNA, 15 bp, Homo sapiens
catgagtgcctgaaa

SEQ ID NO: 660779 - DNA, 15 bp, Homo sapiens
atgagtgcctgaaat

SEQ ID NO: 660780 - DNA, 15 bp, Homo sapiens
tgagtgcctgaaatt

SEQ ID NO: 660781 - DNA, 15 bp, Homo sapiens
gagtgcctgaaattt

SEQ ID NO: 660782 - DNA, 15 bp, Homo sapiens
agtgcctgaaatttt

SEQ ID NO: 660783 - DNA, 15 bp, Homo sapiens
gtgcctgaaattttg

SEQ ID NO: 660784 - DNA, 15 bp, Homo sapiens
tgcctgaaattttgc

SEQ ID NO: 660785 - DNA, 15 bp, Homo sapiens
gcctgaaattttgca

SEQ ID NO: 660786 - DNA, 15 bp, Homo sapiens
cctgaaattttgcag

SEQ ID NO: 660787 - DNA, 15 bp, Homo sapiens
ctgaaattttgcagg

SEQ ID NO: 660788 - DNA, 15 bp, Homo sapiens
tgaaattttgcagga

SEQ ID NO: 660789 - DNA, 15 bp, Homo sapiens
gaaattttgcaggag

SEQ ID NO: 660790 - DNA, 15 bp, Homo sapiens
aaattttgcaggagc

SEQ ID NO: 660791 - DNA, 15 bp, Homo sapiens
aattttgcaggagca

SEQ ID NO: 660792 - DNA, 15 bp, Homo sapiens
attttgcaggagcag

SEQ ID NO: 660793 - DNA, 15 bp, Homo sapiens
ttttgcaggagcagc

SEQ ID NO: 660794 - DNA, 15 bp, Homo sapiens
tttgcaggagcagca

SEQ ID NO: 660795 - DNA, 15 bp, Homo sapiens
atggatgtagtaata

SEQ ID NO: 660796 - DNA, 15 bp, Homo sapiens
tggatgtagtaataa

SEQ ID NO: 660797 - DNA, 15 bp, Homo sapiens
ggatgtagtaataat

SEQ ID NO: 660798 - DNA, 15 bp, Homo sapiens
gatgtagtaataatg

SEQ ID NO: 660799 - DNA, 15 bp, Homo sapiens
atgtagtaataatgc

SEQ ID NO: 660800 - DNA, 15 bp, Homo sapiens
tgtagtaataatgct

SEQ ID NO: 660801 - DNA, 15 bp, Homo sapiens
gtagtaataatgctg

SEQ ID NO: 660802 - DNA, 15 bp, Homo sapiens
tagtaataatgctgc

SEQ ID NO: 660803 - DNA, 15 bp, Homo sapiens
agtaataatgctgcc

SEQ ID NO: 660804 - DNA, 15 bp, Homo sapiens
gtaataatgctgcct

SEQ ID NO: 660805 - DNA, 15 bp, Homo sapiens
taataatgctgcctc

SEQ ID NO: 660806 - DNA, 15 bp, Homo sapiens
aataatgctgcctcc

SEQ ID NO: 660807 - DNA, 15 bp, Homo sapiens
ataatgctgcctcca

SEQ ID NO: 660808 - DNA, 15 bp, Homo sapiens
taatgctgcctccat

SEQ ID NO: 660809 - DNA, 15 bp, Homo sapiens
aatgctgcctccatg

SEQ ID NO: 660810 - DNA, 15 bp, Homo sapiens
atgctgcctccatgt

SEQ ID NO: 660811 - DNA, 15 bp, Homo sapiens
tgctgcctccatgta

SEQ ID NO: 660812 - DNA, 15 bp, Homo sapiens
gctgcctccatgtag

SEQ ID NO: 660813 - DNA, 15 bp, Homo sapiens
ctgcctccatgtaga

SEQ ID NO: 660814 - DNA, 15 bp, Homo sapiens
tgcctccatgtagat

SEQ ID NO: 660815 - DNA, 15 bp, Homo sapiens
gcctccatgtagata

SEQ ID NO: 660816 - DNA, 15 bp, Homo sapiens
cctccatgtagatac

SEQ ID NO: 660817 - DNA, 15 bp, Homo sapiens
ctccatgtagatact

SEQ ID NO: 660818 - DNA, 15 bp, Homo sapiens
tccatgtagatactg

SEQ ID NO: 660819 - DNA, 15 bp, Homo sapiens
ccatgtagatactgc

SEQ ID NO: 660820 - DNA, 15 bp, Homo sapiens
catgtagatactgca

SEQ ID NO: 660821 - DNA, 15 bp, Homo sapiens
atgtagatactgcac

SEQ ID NO: 660822 - DNA, 15 bp, Homo sapiens
tgtagatactgcaca

SEQ ID NO: 660823 - DNA, 15 bp, Homo sapiens
gtagatactgcacat

SEQ ID NO: 660824 - DNA, 15 bp, Homo sapiens
tagatactgcacatg

SEQ ID NO: 660825 - DNA, 15 bp, Homo sapiens
agatactgcacatgt

SEQ ID NO: 660826 - DNA, 15 bp, Homo sapiens
gatactgcacatgtg

SEQ ID NO: 660827 - DNA, 15 bp, Homo sapiens
atactgcacatgtgt

SEQ ID NO: 660828 - DNA, 15 bp, Homo sapiens
tactgcacatgtgta

SEQ ID NO: 660829 - DNA, 15 bp, Homo sapiens
actgcacatgtgtaa

SEQ ID NO: 660830 - DNA, 15 bp, Homo sapiens
ctgcacatgtgtaaa

SEQ ID NO: 660831 - DNA, 15 bp, Homo sapiens
tgcacatgtgtaaat

SEQ ID NO: 660832 - DNA, 15 bp, Homo sapiens
gcacatgtgtaaata

SEQ ID NO: 660833 - DNA, 15 bp, Homo sapiens
cacatgtgtaaataa

SEQ ID NO: 660834 - DNA, 15 bp, Homo sapiens
acatgtgtaaataag

SEQ ID NO: 660835 - DNA, 15 bp, Homo sapiens
catgtgtaaataaga

SEQ ID NO: 660836 - DNA, 15 bp, Homo sapiens
atgtgtaaataagac

SEQ ID NO: 660837 - DNA, 15 bp, Homo sapiens
tgtgtaaataagaca

SEQ ID NO: 660838 - DNA, 15 bp, Homo sapiens
gtgtaaataagacaa

SEQ ID NO: 660839 - DNA, 15 bp, Homo sapiens
tgtaaataagacaag

SEQ ID NO: 660840 - DNA, 15 bp, Homo sapiens
gtaaataagacaaga

SEQ ID NO: 660841 - DNA, 15 bp, Homo sapiens
taaataagacaagaa

SEQ ID NO: 660842 - DNA, 15 bp, Homo sapiens
aaataagacaagaaa

SEQ ID NO: 660843 - DNA, 15 bp, Homo sapiens
aataagacaagaaaa

SEQ ID NO: 660844 - DNA, 15 bp, Homo sapiens
ataagacaagaaaag

SEQ ID NO: 660845 - DNA, 15 bp, Homo sapiens
taagacaagaaaagt

SEQ ID NO: 660846 - DNA, 15 bp, Homo sapiens
aagacaagaaaagta

SEQ ID NO: 660847 - DNA, 15 bp, Homo sapiens
agacaagaaaagtaa

SEQ ID NO: 660848 - DNA, 15 bp, Homo sapiens
gacaagaaaagtaat

SEQ ID NO: 660849 - DNA, 15 bp, Homo sapiens
acaagaaaagtaata

SEQ ID NO: 660850 - DNA, 15 bp, Homo sapiens
caagaaaagtaatat

SEQ ID NO: 660851 - DNA, 15 bp, Homo sapiens
aagaaaagtaatatt

SEQ ID NO: 660852 - DNA, 15 bp, Homo sapiens
agaaaagtaatattt

SEQ ID NO: 660853 - DNA, 15 bp, Homo sapiens
gaaaagtaatattta

SEQ ID NO: 660854 - DNA, 15 bp, Homo sapiens
aaaagtaatatttac

SEQ ID NO: 660855 - DNA, 15 bp, Homo sapiens
aaagtaatatttact

SEQ ID NO: 660856 - DNA, 15 bp, Homo sapiens
aagtaatatttacta

SEQ ID NO: 660857 - DNA, 15 bp, Homo sapiens
agtaatatttactat

SEQ ID NO: 660858 - DNA, 15 bp, Homo sapiens
gtaatatttactata

SEQ ID NO: 660859 - DNA, 15 bp, Homo sapiens
taatatttactatag

SEQ ID NO: 660860 - DNA, 15 bp, Homo sapiens
aatatttactatagt

SEQ ID NO: 660861 - DNA, 15 bp, Homo sapiens
atatttactatagta

SEQ ID NO: 660862 - DNA, 15 bp, Homo sapiens
tatttactatagtag

SEQ ID NO: 660863 - DNA, 15 bp, Homo sapiens
atttactatagtagc

SEQ ID NO: 660864 - DNA, 15 bp, Homo sapiens
tttactatagtagct

SEQ ID NO: 660865 - DNA, 15 bp, Homo sapiens
ttactatagtagctt

SEQ ID NO: 660866 - DNA, 15 bp, Homo sapiens
tactatagtagctta

SEQ ID NO: 660867 - DNA, 15 bp, Homo sapiens
actatagtagcttag

SEQ ID NO: 660868 - DNA, 15 bp, Homo sapiens
ctatagtagcttagt

SEQ ID NO: 660869 - DNA, 15 bp, Homo sapiens
tatagtagcttagta

SEQ ID NO: 660870 - DNA, 15 bp, Homo sapiens
atagtagcttagtag

SEQ ID NO: 660871 - DNA, 15 bp, Homo sapiens
tagtagcttagtagg

SEQ ID NO: 660872 - DNA, 15 bp, Homo sapiens
agtagcttagtagga

SEQ ID NO: 660873 - DNA, 15 bp, Homo sapiens
gtagcttagtaggaa

SEQ ID NO: 660874 - DNA, 15 bp, Homo sapiens
tagcttagtaggaag

SEQ ID NO: 660875 - DNA, 15 bp, Homo sapiens
agcttagtaggaagc

SEQ ID NO: 660876 - DNA, 15 bp, Homo sapiens
gcttagtaggaagca

SEQ ID NO: 660877 - DNA, 15 bp, Homo sapiens
cttagtaggaagcac

SEQ ID NO: 660878 - DNA, 15 bp, Homo sapiens
ttagtaggaagcact

SEQ ID NO: 660879 - DNA, 15 bp, Homo sapiens
tagtaggaagcactc

SEQ ID NO: 660880 - DNA, 15 bp, Homo sapiens
agtaggaagcactca

SEQ ID NO: 660881 - DNA, 15 bp, Homo sapiens
gtaggaagcactcaa

SEQ ID NO: 660882 - DNA, 15 bp, Homo sapiens
taggaagcactcaat

SEQ ID NO: 660883 - DNA, 15 bp, Homo sapiens
aggaagcactcaata

SEQ ID NO: 660884 - DNA, 15 bp, Homo sapiens
ggaagcactcaataa

SEQ ID NO: 660885 - DNA, 15 bp, Homo sapiens
gaagcactcaataaa

SEQ ID NO: 660886 - DNA, 15 bp, Homo sapiens
aagcactcaataaag

SEQ ID NO: 660887 - DNA, 15 bp, Homo sapiens
agcactcaataaagg

SEQ ID NO: 660888 - DNA, 15 bp, Homo sapiens
gcactcaataaaggg

SEQ ID NO: 660889 - DNA, 15 bp, Homo sapiens
cactcaataaaggga

SEQ ID NO: 660890 - DNA, 15 bp, Homo sapiens
actcaataaagggaa

SEQ ID NO: 660891 - DNA, 15 bp, Homo sapiens
ctcaataaagggaag

SEQ ID NO: 660892 - DNA, 15 bp, Homo sapiens
tcaataaagggaagc

SEQ ID NO: 660893 - DNA, 15 bp, Homo sapiens
caataaagggaagct

SEQ ID NO: 660894 - DNA, 15 bp, Homo sapiens
aataaagggaagcta

SEQ ID NO: 660895 - DNA, 15 bp, Homo sapiens
ataaagggaagctat

SEQ ID NO: 660896 - DNA, 15 bp, Homo sapiens
taaagggaagctatt

SEQ ID NO: 660897 - DNA, 15 bp, Homo sapiens
aaagggaagctattg

SEQ ID NO: 660898 - DNA, 15 bp, Homo sapiens
aagggaagctattgg

SEQ ID NO: 660899 - DNA, 15 bp, Homo sapiens
agggaagctattggt

SEQ ID NO: 660900 - DNA, 15 bp, Homo sapiens
gggaagctattggta

SEQ ID NO: 660901 - DNA, 15 bp, Homo sapiens
ggaagctattggtag

SEQ ID NO: 660902 - DNA, 15 bp, Homo sapiens
gaagctattggtagt

SEQ ID NO: 660903 - DNA, 15 bp, Homo sapiens
aagctattggtagtg

SEQ ID NO: 660904 - DNA, 15 bp, Homo sapiens
agctattggtagtgt

SEQ ID NO: 660905 - DNA, 15 bp, Homo sapiens
gctattggtagtgta

SEQ ID NO: 660906 - DNA, 15 bp, Homo sapiens
ctattggtagtgtat

SEQ ID NO: 660907 - DNA, 15 bp, Homo sapiens
tattggtagtgtatt

SEQ ID NO: 660908 - DNA, 15 bp, Homo sapiens
attggtagtgtatta

SEQ ID NO: 660909 - DNA, 15 bp, Homo sapiens
ttggtagtgtattat

SEQ ID NO: 660910 - DNA, 15 bp, Homo sapiens
tggtagtgtattatt

SEQ ID NO: 660911 - DNA, 15 bp, Homo sapiens
ggtagtgtattattg

SEQ ID NO: 660912 - DNA, 15 bp, Homo sapiens
gtagtgtattattgc

SEQ ID NO: 660913 - DNA, 15 bp, Homo sapiens
tagtgtattattgca

SEQ ID NO: 660914 - DNA, 15 bp, Homo sapiens
agtgtattattgcaa

SEQ ID NO: 660915 - DNA, 15 bp, Homo sapiens
gtgtattattgcaaa

SEQ ID NO: 660916 - DNA, 15 bp, Homo sapiens
tgtattattgcaaac

SEQ ID NO: 660917 - DNA, 15 bp, Homo sapiens
gtattattgcaaacg

SEQ ID NO: 660918 - DNA, 15 bp, Homo sapiens
tattattgcaaacgc

SEQ ID NO: 660919 - DNA, 15 bp, Homo sapiens
attattgcaaacgcc

SEQ ID NO: 660920 - DNA, 15 bp, Homo sapiens
ttattgcaaacgccc

SEQ ID NO: 660921 - DNA, 15 bp, Homo sapiens
tattgcaaacgccct

SEQ ID NO: 660922 - DNA, 15 bp, Homo sapiens
attgcaaacgccctg

SEQ ID NO: 660923 - DNA, 15 bp, Homo sapiens
ttgcaaacgccctga

SEQ ID NO: 660924 - DNA, 15 bp, Homo sapiens
tgcaaacgccctgat

SEQ ID NO: 660925 - DNA, 15 bp, Homo sapiens
gcaaacgccctgatt

SEQ ID NO: 660926 - DNA, 15 bp, Homo sapiens
caaacgccctgattt

SEQ ID NO: 660927 - DNA, 15 bp, Homo sapiens
aaacgccctgatttt

SEQ ID NO: 660928 - DNA, 15 bp, Homo sapiens
aacgccctgattttt

SEQ ID NO: 660929 - DNA, 15 bp, Homo sapiens
acgccctgatttttc

SEQ ID NO: 660930 - DNA, 15 bp, Homo sapiens
cgccctgatttttct

SEQ ID NO: 660931 - DNA, 15 bp, Homo sapiens
gccctgatttttcta

SEQ ID NO: 660932 - DNA, 15 bp, Homo sapiens
ccctgatttttctaa

SEQ ID NO: 660933 - DNA, 15 bp, Homo sapiens
cctgatttttctaaa

SEQ ID NO: 660934 - DNA, 15 bp, Homo sapiens
ctgatttttctaaat

SEQ ID NO: 660935 - DNA, 15 bp, Homo sapiens
tgatttttctaaatg

SEQ ID NO: 660936 - DNA, 15 bp, Homo sapiens
gatttttctaaatgt

SEQ ID NO: 660937 - DNA, 15 bp, Homo sapiens
atttttctaaatgtc

SEQ ID NO: 660938 - DNA, 15 bp, Homo sapiens
tttttctaaatgtca

SEQ ID NO: 660939 - DNA, 15 bp, Homo sapiens
ttttctaaatgtcaa

SEQ ID NO: 660940 - DNA, 15 bp, Homo sapiens
tttctaaatgtcaag

SEQ ID NO: 660941 - DNA, 15 bp, Homo sapiens
ttctaaatgtcaagg

SEQ ID NO: 660942 - DNA, 15 bp, Homo sapiens
tctaaatgtcaagga

SEQ ID NO: 660943 - DNA, 15 bp, Homo sapiens
ctaaatgtcaaggag

SEQ ID NO: 660944 - DNA, 15 bp, Homo sapiens
taaatgtcaaggaga

SEQ ID NO: 660945 - DNA, 15 bp, Homo sapiens
aaatgtcaaggagaa

SEQ ID NO: 660946 - DNA, 15 bp, Homo sapiens
aatgtcaaggagaaa

SEQ ID NO: 660947 - DNA, 15 bp, Homo sapiens
atgtcaaggagaaac

SEQ ID NO: 660948 - DNA, 15 bp, Homo sapiens
tgtcaaggagaaact

SEQ ID NO: 660949 - DNA, 15 bp, Homo sapiens
gtcaaggagaaactt

SEQ ID NO: 660950 - DNA, 15 bp, Homo sapiens
tcaaggagaaacttg

SEQ ID NO: 660951 - DNA, 15 bp, Homo sapiens
caaggagaaacttgt

SEQ ID NO: 660952 - DNA, 15 bp, Homo sapiens
aaggagaaacttgtg

SEQ ID NO: 660953 - DNA, 15 bp, Homo sapiens
aggagaaacttgtgt

SEQ ID NO: 660954 - DNA, 15 bp, Homo sapiens
ggagaaacttgtgtt

SEQ ID NO: 660955 - DNA, 15 bp, Homo sapiens
gagaaacttgtgttt

SEQ ID NO: 660956 - DNA, 15 bp, Homo sapiens
agaaacttgtgttta

SEQ ID NO: 660957 - DNA, 15 bp, Homo sapiens
gaaacttgtgtttaa

SEQ ID NO: 660958 - DNA, 15 bp, Homo sapiens
aaacttgtgtttaat

SEQ ID NO: 660959 - DNA, 15 bp, Homo sapiens
aacttgtgtttaatg

SEQ ID NO: 660960 - DNA, 15 bp, Homo sapiens
acttgtgtttaatgg

SEQ ID NO: 660961 - DNA, 15 bp, Homo sapiens
cttgtgtttaatgga

SEQ ID NO: 660962 - DNA, 15 bp, Homo sapiens
ttgtgtttaatggaa

SEQ ID NO: 660963 - DNA, 15 bp, Homo sapiens
tgtgtttaatggaat

SEQ ID NO: 660964 - DNA, 15 bp, Homo sapiens
gtgtttaatggaata

SEQ ID NO: 660965 - DNA, 15 bp, Homo sapiens
tgtttaatggaatag

SEQ ID NO: 660966 - DNA, 15 bp, Homo sapiens
gtttaatggaatagt

SEQ ID NO: 660967 - DNA, 15 bp, Homo sapiens
tttaatggaatagtt

SEQ ID NO: 660968 - DNA, 15 bp, Homo sapiens
ttaatggaatagttt

SEQ ID NO: 660969 - DNA, 15 bp, Homo sapiens
taatggaatagtttt

SEQ ID NO: 660970 - DNA, 15 bp, Homo sapiens
aatggaatagttttc

SEQ ID NO: 660971 - DNA, 15 bp, Homo sapiens
atggaatagttttca

SEQ ID NO: 660972 - DNA, 15 bp, Homo sapiens
tggaatagttttcaa

SEQ ID NO: 660973 - DNA, 15 bp, Homo sapiens
ggaatagttttcaac

SEQ ID NO: 660974 - DNA, 15 bp, Homo sapiens
gaatagttttcaact

SEQ ID NO: 660975 - DNA, 15 bp, Homo sapiens
aatagttttcaactt

SEQ ID NO: 660976 - DNA, 15 bp, Homo sapiens
atagttttcaacttc

SEQ ID NO: 660977 - DNA, 15 bp, Homo sapiens
tagttttcaacttca

SEQ ID NO: 660978 - DNA, 15 bp, Homo sapiens
agttttcaacttcat

SEQ ID NO: 660979 - DNA, 15 bp, Homo sapiens
gttttcaacttcatt

SEQ ID NO: 660980 - DNA, 15 bp, Homo sapiens
ttttcaacttcattt

SEQ ID NO: 660981 - DNA, 15 bp, Homo sapiens
tttcaacttcatttg

SEQ ID NO: 660982 - DNA, 15 bp, Homo sapiens
ttcaacttcatttga

SEQ ID NO: 660983 - DNA, 15 bp, Homo sapiens
tcaacttcatttgat

SEQ ID NO: 660984 - DNA, 15 bp, Homo sapiens
caacttcatttgatt

SEQ ID NO: 660985 - DNA, 15 bp, Homo sapiens
aacttcatttgatta

SEQ ID NO: 660986 - DNA, 15 bp, Homo sapiens
acttcatttgattat

SEQ ID NO: 660987 - DNA, 15 bp, Homo sapiens
cttcatttgattata

SEQ ID NO: 660988 - DNA, 15 bp, Homo sapiens
ttcatttgattatat

SEQ ID NO: 660989 - DNA, 15 bp, Homo sapiens
tcatttgattatatc

SEQ ID NO: 660990 - DNA, 15 bp, Homo sapiens
catttgattatatct

SEQ ID NO: 660991 - DNA, 15 bp, Homo sapiens
atttgattatatctt

SEQ ID NO: 660992 - DNA, 15 bp, Homo sapiens
tttgattatatcttt

SEQ ID NO: 660993 - DNA, 15 bp, Homo sapiens
ttgattatatctttg

SEQ ID NO: 660994 - DNA, 15 bp, Homo sapiens
tgattatatctttgg

SEQ ID NO: 660995 - DNA, 15 bp, Homo sapiens
gattatatctttggg

SEQ ID NO: 660996 - DNA, 15 bp, Homo sapiens
attatatctttgggt

SEQ ID NO: 660997 - DNA, 15 bp, Homo sapiens
ttatatctttgggtc

SEQ ID NO: 660998 - DNA, 15 bp, Homo sapiens
tatatctttgggtct

SEQ ID NO: 660999 - DNA, 15 bp, Homo sapiens
atatctttgggtctt

SEQ ID NO: 661000 - DNA, 15 bp, Homo sapiens
tatctttgggtcttg

SEQ ID NO: 661001 - DNA, 15 bp, Homo sapiens
atctttgggtcttgt

SEQ ID NO: 661002 - DNA, 15 bp, Homo sapiens
tctttgggtcttgtt

SEQ ID NO: 661003 - DNA, 15 bp, Homo sapiens
ctttgggtcttgtta

SEQ ID NO: 661004 - DNA, 15 bp, Homo sapiens
tttgggtcttgttat

SEQ ID NO: 661005 - DNA, 15 bp, Homo sapiens
ttgggtcttgttata

SEQ ID NO: 661006 - DNA, 15 bp, Homo sapiens
tgggtcttgttatag

SEQ ID NO: 661007 - DNA, 15 bp, Homo sapiens
gggtcttgttatagt

SEQ ID NO: 661008 - DNA, 15 bp, Homo sapiens
ggtcttgttatagtg

SEQ ID NO: 661009 - DNA, 15 bp, Homo sapiens
gtcttgttatagtgc

SEQ ID NO: 661010 - DNA, 15 bp, Homo sapiens
tcttgttatagtgcc

SEQ ID NO: 661011 - DNA, 15 bp, Homo sapiens
cttgttatagtgcct

SEQ ID NO: 661012 - DNA, 15 bp, Homo sapiens
ttgttatagtgcctt

SEQ ID NO: 661013 - DNA, 15 bp, Homo sapiens
tgttatagtgccttc

SEQ ID NO: 661014 - DNA, 15 bp, Homo sapiens
gttatagtgccttct

SEQ ID NO: 661015 - DNA, 15 bp, Homo sapiens
ttatagtgccttctc

SEQ ID NO: 661016 - DNA, 15 bp, Homo sapiens
tatagtgccttctct

SEQ ID NO: 661017 - DNA, 15 bp, Homo sapiens
atagtgccttctctc

SEQ ID NO: 661018 - DNA, 15 bp, Homo sapiens
tagtgccttctctct

SEQ ID NO: 661019 - DNA, 15 bp, Homo sapiens
agtgccttctctctc

SEQ ID NO: 661020 - DNA, 15 bp, Homo sapiens
gtgccttctctctca

SEQ ID NO: 661021 - DNA, 15 bp, Homo sapiens
tgccttctctctcag

SEQ ID NO: 661022 - DNA, 15 bp, Homo sapiens
gccttctctctcagt

SEQ ID NO: 661023 - DNA, 15 bp, Homo sapiens
ccttctctctcagta

SEQ ID NO: 661024 - DNA, 15 bp, Homo sapiens
cttctctctcagtag

SEQ ID NO: 661025 - DNA, 15 bp, Homo sapiens
ttctctctcagtagc

SEQ ID NO: 661026 - DNA, 15 bp, Homo sapiens
tctctctcagtagct

SEQ ID NO: 661027 - DNA, 15 bp, Homo sapiens
ctctctcagtagcta

SEQ ID NO: 661028 - DNA, 15 bp, Homo sapiens
tctctcagtagctaa

SEQ ID NO: 661029 - DNA, 15 bp, Homo sapiens
ctctcagtagctaat

SEQ ID NO: 661030 - DNA, 15 bp, Homo sapiens
tctcagtagctaatt

SEQ ID NO: 661031 - DNA, 15 bp, Homo sapiens
ctcagtagctaatta

SEQ ID NO: 661032 - DNA, 15 bp, Homo sapiens
tcagtagctaattag

SEQ ID NO: 661033 - DNA, 15 bp, Homo sapiens
cagtagctaattagt

SEQ ID NO: 661034 - DNA, 15 bp, Homo sapiens
agtagctaattagta

SEQ ID NO: 661035 - DNA, 15 bp, Homo sapiens
gtagctaattagtat

SEQ ID NO: 661036 - DNA, 15 bp, Homo sapiens
tagctaattagtatc

SEQ ID NO: 661037 - DNA, 15 bp, Homo sapiens
agctaattagtatcc

SEQ ID NO: 661038 - DNA, 15 bp, Homo sapiens
gctaattagtatcct

SEQ ID NO: 661039 - DNA, 15 bp, Homo sapiens
ctaattagtatcctc

SEQ ID NO: 661040 - DNA, 15 bp, Homo sapiens
taattagtatcctct

SEQ ID NO: 661041 - DNA, 15 bp, Homo sapiens
aattagtatcctcta

SEQ ID NO: 661042 - DNA, 15 bp, Homo sapiens
attagtatcctctaa

SEQ ID NO: 661043 - DNA, 15 bp, Homo sapiens
ttagtatcctctaag

SEQ ID NO: 661044 - DNA, 15 bp, Homo sapiens
tagtatcctctaagt

SEQ ID NO: 661045 - DNA, 15 bp, Homo sapiens
agtatcctctaagtt

SEQ ID NO: 661046 - DNA, 15 bp, Homo sapiens
gtatcctctaagttt

SEQ ID NO: 661047 - DNA, 15 bp, Homo sapiens
tatcctctaagtttg

SEQ ID NO: 661048 - DNA, 15 bp, Homo sapiens
atcctctaagtttga

SEQ ID NO: 661049 - DNA, 15 bp, Homo sapiens
tcctctaagtttgag

SEQ ID NO: 661050 - DNA, 15 bp, Homo sapiens
cctctaagtttgagt

SEQ ID NO: 661051 - DNA, 15 bp, Homo sapiens
ctctaagtttgagtc

SEQ ID NO: 661052 - DNA, 15 bp, Homo sapiens
tctaagtttgagtct

SEQ ID NO: 661053 - DNA, 15 bp, Homo sapiens
ctaagtttgagtctt

SEQ ID NO: 661054 - DNA, 15 bp, Homo sapiens
taagtttgagtcttt

SEQ ID NO: 661055 - DNA, 15 bp, Homo sapiens
aagtttgagtctttt

SEQ ID NO: 661056 - DNA, 15 bp, Homo sapiens
agtttgagtcttttc

SEQ ID NO: 661057 - DNA, 15 bp, Homo sapiens
gtttgagtcttttca

SEQ ID NO: 661058 - DNA, 15 bp, Homo sapiens
tttgagtcttttcaa

SEQ ID NO: 661059 - DNA, 15 bp, Homo sapiens
ttgagtcttttcaag

SEQ ID NO: 661060 - DNA, 15 bp, Homo sapiens
tgagtcttttcaagc

SEQ ID NO: 661061 - DNA, 15 bp, Homo sapiens
gagtcttttcaagcg

SEQ ID NO: 661062 - DNA, 15 bp, Homo sapiens
agtcttttcaagcgt

SEQ ID NO: 661063 - DNA, 15 bp, Homo sapiens
gtcttttcaagcgtt

SEQ ID NO: 661064 - DNA, 15 bp, Homo sapiens
tcttttcaagcgttc

SEQ ID NO: 661065 - DNA, 15 bp, Homo sapiens
cttttcaagcgttca

SEQ ID NO: 661066 - DNA, 15 bp, Homo sapiens
ttttcaagcgttcac

SEQ ID NO: 661067 - DNA, 15 bp, Homo sapiens
tttcaagcgttcacg

SEQ ID NO: 661068 - DNA, 15 bp, Homo sapiens
ttcaagcgttcacgc

SEQ ID NO: 661069 - DNA, 15 bp, Homo sapiens
tcaagcgttcacgct

SEQ ID NO: 661070 - DNA, 15 bp, Homo sapiens
caagcgttcacgctt

SEQ ID NO: 661071 - DNA, 15 bp, Homo sapiens
aagcgttcacgcttc

SEQ ID NO: 661072 - DNA, 15 bp, Homo sapiens
agcgttcacgcttcc

SEQ ID NO: 661073 - DNA, 15 bp, Homo sapiens
gcgttcacgcttcca

SEQ ID NO: 661074 - DNA, 15 bp, Homo sapiens
cgttcacgcttccat

SEQ ID NO: 661075 - DNA, 15 bp, Homo sapiens
gttcacgcttccatg

SEQ ID NO: 661076 - DNA, 15 bp, Homo sapiens
ttcacgcttccatgg

SEQ ID NO: 661077 - DNA, 15 bp, Homo sapiens
tcacgcttccatgga

SEQ ID NO: 661078 - DNA, 15 bp, Homo sapiens
cacgcttccatggaa

SEQ ID NO: 661079 - DNA, 15 bp, Homo sapiens
acgcttccatggaag

SEQ ID NO: 661080 - DNA, 15 bp, Homo sapiens
cgcttccatggaagt

SEQ ID NO: 661081 - DNA, 15 bp, Homo sapiens
gcttccatggaagtg

SEQ ID NO: 661082 - DNA, 15 bp, Homo sapiens
cttccatggaagtgt

SEQ ID NO: 661083 - DNA, 15 bp, Homo sapiens
ttccatggaagtgtt

SEQ ID NO: 661084 - DNA, 15 bp, Homo sapiens
tccatggaagtgttt

SEQ ID NO: 661085 - DNA, 15 bp, Homo sapiens
ccatggaagtgtttt

SEQ ID NO: 661086 - DNA, 15 bp, Homo sapiens
catggaagtgttttc

SEQ ID NO: 661087 - DNA, 15 bp, Homo sapiens
atggaagtgttttct

SEQ ID NO: 661088 - DNA, 15 bp, Homo sapiens
tggaagtgttttctg

SEQ ID NO: 661089 - DNA, 15 bp, Homo sapiens
ggaagtgttttctgc

SEQ ID NO: 661090 - DNA, 15 bp, Homo sapiens
gaagtgttttctgca

SEQ ID NO: 661091 - DNA, 15 bp, Homo sapiens
aagtgttttctgcac

SEQ ID NO: 661092 - DNA, 15 bp, Homo sapiens
agtgttttctgcact

SEQ ID NO: 661093 - DNA, 15 bp, Homo sapiens
gtgttttctgcactg

SEQ ID NO: 661094 - DNA, 15 bp, Homo sapiens
tgttttctgcactgt

SEQ ID NO: 661095 - DNA, 15 bp, Homo sapiens
gttttctgcactgtg

SEQ ID NO: 661096 - DNA, 15 bp, Homo sapiens
ttttctgcactgtgt

SEQ ID NO: 661097 - DNA, 15 bp, Homo sapiens
tttctgcactgtgtt

SEQ ID NO: 661098 - DNA, 15 bp, Homo sapiens
ttctgcactgtgttt

SEQ ID NO: 661099 - DNA, 15 bp, Homo sapiens
tctgcactgtgttta

SEQ ID NO: 661100 - DNA, 15 bp, Homo sapiens
ctgcactgtgtttaa

SEQ ID NO: 661101 - DNA, 15 bp, Homo sapiens
tgcactgtgtttaaa

SEQ ID NO: 661102 - DNA, 15 bp, Homo sapiens
gcactgtgtttaaat

SEQ ID NO: 661103 - DNA, 15 bp, Homo sapiens
cactgtgtttaaatc

SEQ ID NO: 661104 - DNA, 15 bp, Homo sapiens
actgtgtttaaatca

SEQ ID NO: 661105 - DNA, 15 bp, Homo sapiens
ctgtgtttaaatcac

SEQ ID NO: 661106 - DNA, 15 bp, Homo sapiens
tgtgtttaaatcacg

SEQ ID NO: 661107 - DNA, 15 bp, Homo sapiens
gtgtttaaatcacgt

SEQ ID NO: 661108 - DNA, 15 bp, Homo sapiens
tgtttaaatcacgtt

SEQ ID NO: 661109 - DNA, 15 bp, Homo sapiens
gtttaaatcacgtta

SEQ ID NO: 661110 - DNA, 15 bp, Homo sapiens
tttaaatcacgttag

SEQ ID NO: 661111 - DNA, 15 bp, Homo sapiens
ttaaatcacgttaga

SEQ ID NO: 661112 - DNA, 15 bp, Homo sapiens
taaatcacgttagag

SEQ ID NO: 661113 - DNA, 15 bp, Homo sapiens
aaatcacgttagaga

SEQ ID NO: 661114 - DNA, 15 bp, Homo sapiens
aatcacgttagagaa

SEQ ID NO: 661115 - DNA, 15 bp, Homo sapiens
atcacgttagagaac

SEQ ID NO: 661116 - DNA, 15 bp, Homo sapiens
tcacgttagagaact

SEQ ID NO: 661117 - DNA, 15 bp, Homo sapiens
cacgttagagaactt

SEQ ID NO: 661118 - DNA, 15 bp, Homo sapiens
acgttagagaactta

SEQ ID NO: 661119 - DNA, 15 bp, Homo sapiens
cgttagagaacttaa

SEQ ID NO: 661120 - DNA, 15 bp, Homo sapiens
gttagagaacttaac

SEQ ID NO: 661121 - DNA, 15 bp, Homo sapiens
ttagagaacttaact

SEQ ID NO: 661122 - DNA, 15 bp, Homo sapiens
tagagaacttaacta

SEQ ID NO: 661123 - DNA, 15 bp, Homo sapiens
agagaacttaactaa

SEQ ID NO: 661124 - DNA, 15 bp, Homo sapiens
gagaacttaactaag

SEQ ID NO: 661125 - DNA, 15 bp, Homo sapiens
agaacttaactaagc

SEQ ID NO: 661126 - DNA, 15 bp, Homo sapiens
gaacttaactaagct

SEQ ID NO: 661127 - DNA, 15 bp, Homo sapiens
aacttaactaagctt

SEQ ID NO: 661128 - DNA, 15 bp, Homo sapiens
acttaactaagcttc

SEQ ID NO: 661129 - DNA, 15 bp, Homo sapiens
cttaactaagcttca

SEQ ID NO: 661130 - DNA, 15 bp, Homo sapiens
ttaactaagcttcaa

SEQ ID NO: 661131 - DNA, 15 bp, Homo sapiens
taactaagcttcaag

SEQ ID NO: 661132 - DNA, 15 bp, Homo sapiens
aactaagcttcaagc

SEQ ID NO: 661133 - DNA, 15 bp, Homo sapiens
actaagcttcaagcc

SEQ ID NO: 661134 - DNA, 15 bp, Homo sapiens
ctaagcttcaagcct

SEQ ID NO: 661135 - DNA, 15 bp, Homo sapiens
taagcttcaagccta

SEQ ID NO: 661136 - DNA, 15 bp, Homo sapiens
aagcttcaagcctag

SEQ ID NO: 661137 - DNA, 15 bp, Homo sapiens
agcttcaagcctagt

SEQ ID NO: 661138 - DNA, 15 bp, Homo sapiens
gcttcaagcctagta

SEQ ID NO: 661139 - DNA, 15 bp, Homo sapiens
cttcaagcctagtag

SEQ ID NO: 661140 - DNA, 15 bp, Homo sapiens
ttcaagcctagtagt

SEQ ID NO: 661141 - DNA, 15 bp, Homo sapiens
tcaagcctagtagtg

SEQ ID NO: 661142 - DNA, 15 bp, Homo sapiens
caagcctagtagtgt

SEQ ID NO: 661143 - DNA, 15 bp, Homo sapiens
aagcctagtagtgtg

SEQ ID NO: 661144 - DNA, 15 bp, Homo sapiens
agcctagtagtgtgg

SEQ ID NO: 661145 - DNA, 15 bp, Homo sapiens
gcctagtagtgtggt

SEQ ID NO: 661146 - DNA, 15 bp, Homo sapiens
cctagtagtgtggta

SEQ ID NO: 661147 - DNA, 15 bp, Homo sapiens
ctagtagtgtggtat

SEQ ID NO: 661148 - DNA, 15 bp, Homo sapiens
tagtagtgtggtatg

SEQ ID NO: 661149 - DNA, 15 bp, Homo sapiens
agtagtgtggtatgt

SEQ ID NO: 661150 - DNA, 15 bp, Homo sapiens
gtagtgtggtatgtg

SEQ ID NO: 661151 - DNA, 15 bp, Homo sapiens
tagtgtggtatgtgt

SEQ ID NO: 661152 - DNA, 15 bp, Homo sapiens
agtgtggtatgtgta

SEQ ID NO: 661153 - DNA, 15 bp, Homo sapiens
gtgtggtatgtgtag

SEQ ID NO: 661154 - DNA, 15 bp, Homo sapiens
tgtggtatgtgtagt

SEQ ID NO: 661155 - DNA, 15 bp, Homo sapiens
gtggtatgtgtagtt

SEQ ID NO: 661156 - DNA, 15 bp, Homo sapiens
tggtatgtgtagtta

SEQ ID NO: 661157 - DNA, 15 bp, Homo sapiens
ggtatgtgtagttat

SEQ ID NO: 661158 - DNA, 15 bp, Homo sapiens
gtatgtgtagttatt

SEQ ID NO: 661159 - DNA, 15 bp, Homo sapiens
tatgtgtagttattc

SEQ ID NO: 661160 - DNA, 15 bp, Homo sapiens
atgtgtagttattct

SEQ ID NO: 661161 - DNA, 15 bp, Homo sapiens
tgtgtagttattctg

SEQ ID NO: 661162 - DNA, 15 bp, Homo sapiens
gtgtagttattctga

SEQ ID NO: 661163 - DNA, 15 bp, Homo sapiens
tgtagttattctgac

SEQ ID NO: 661164 - DNA, 15 bp, Homo sapiens
gtagttattctgaca

SEQ ID NO: 661165 - DNA, 15 bp, Homo sapiens
tagttattctgacat

SEQ ID NO: 661166 - DNA, 15 bp, Homo sapiens
agttattctgacatt

SEQ ID NO: 661167 - DNA, 15 bp, Homo sapiens
gttattctgacattc

SEQ ID NO: 661168 - DNA, 15 bp, Homo sapiens
ttattctgacattca

SEQ ID NO: 661169 - DNA, 15 bp, Homo sapiens
tattctgacattcag

SEQ ID NO: 661170 - DNA, 15 bp, Homo sapiens
attctgacattcaga

SEQ ID NO: 661171 - DNA, 15 bp, Homo sapiens
ttctgacattcagag

SEQ ID NO: 661172 - DNA, 15 bp, Homo sapiens
tctgacattcagaga

SEQ ID NO: 661173 - DNA, 15 bp, Homo sapiens
ctgacattcagagaa

SEQ ID NO: 661174 - DNA, 15 bp, Homo sapiens
tgacattcagagaaa

SEQ ID NO: 661175 - DNA, 15 bp, Homo sapiens
gacattcagagaaat

SEQ ID NO: 661176 - DNA, 15 bp, Homo sapiens
acattcagagaaatg

SEQ ID NO: 661177 - DNA, 15 bp, Homo sapiens
cattcagagaaatgc

SEQ ID NO: 661178 - DNA, 15 bp, Homo sapiens
attcagagaaatgca

SEQ ID NO: 661179 - DNA, 15 bp, Homo sapiens
ttcagagaaatgcag

SEQ ID NO: 661180 - DNA, 15 bp, Homo sapiens
tcagagaaatgcaga

SEQ ID NO: 661181 - DNA, 15 bp, Homo sapiens
cagagaaatgcagaa

SEQ ID NO: 661182 - DNA, 15 bp, Homo sapiens
agagaaatgcagaag

SEQ ID NO: 661183 - DNA, 15 bp, Homo sapiens
gagaaatgcagaagt

SEQ ID NO: 661184 - DNA, 15 bp, Homo sapiens
agaaatgcagaagtt

SEQ ID NO: 661185 - DNA, 15 bp, Homo sapiens
gaaatgcagaagttc

SEQ ID NO: 661186 - DNA, 15 bp, Homo sapiens
aaatgcagaagttca

SEQ ID NO: 661187 - DNA, 15 bp, Homo sapiens
aatgcagaagttcag

SEQ ID NO: 661188 - DNA, 15 bp, Homo sapiens
atgcagaagttcagg

SEQ ID NO: 661189 - DNA, 15 bp, Homo sapiens
tgcagaagttcaggc

SEQ ID NO: 661190 - DNA, 15 bp, Homo sapiens
gcagaagttcaggcc

SEQ ID NO: 661191 - DNA, 15 bp, Homo sapiens
cagaagttcaggcca

SEQ ID NO: 661192 - DNA, 15 bp, Homo sapiens
agaagttcaggccag

SEQ ID NO: 661193 - DNA, 15 bp, Homo sapiens
gaagttcaggccaga

SEQ ID NO: 661194 - DNA, 15 bp, Homo sapiens
aagttcaggccagat

SEQ ID NO: 661195 - DNA, 15 bp, Homo sapiens
agttcaggccagata

SEQ ID NO: 661196 - DNA, 15 bp, Homo sapiens
gttcaggccagatag

SEQ ID NO: 661197 - DNA, 15 bp, Homo sapiens
ttcaggccagataga

SEQ ID NO: 661198 - DNA, 15 bp, Homo sapiens
tcaggccagatagaa

SEQ ID NO: 661199 - DNA, 15 bp, Homo sapiens
caggccagatagaag

SEQ ID NO: 661200 - DNA, 15 bp, Homo sapiens
aggccagatagaagg

SEQ ID NO: 661201 - DNA, 15 bp, Homo sapiens
ggccagatagaaggc

SEQ ID NO: 661202 - DNA, 15 bp, Homo sapiens
gccagatagaaggct

SEQ ID NO: 661203 - DNA, 15 bp, Homo sapiens
ccagatagaaggcta

SEQ ID NO: 661204 - DNA, 15 bp, Homo sapiens
cagatagaaggctaa

SEQ ID NO: 661205 - DNA, 15 bp, Homo sapiens
agatagaaggctaag

SEQ ID NO: 661206 - DNA, 15 bp, Homo sapiens
gatagaaggctaaga

SEQ ID NO: 661207 - DNA, 15 bp, Homo sapiens
atagaaggctaagag

SEQ ID NO: 661208 - DNA, 15 bp, Homo sapiens
tagaaggctaagaga

SEQ ID NO: 661209 - DNA, 15 bp, Homo sapiens
agaaggctaagagaa

SEQ ID NO: 661210 - DNA, 15 bp, Homo sapiens
gaaggctaagagaaa

SEQ ID NO: 661211 - DNA, 15 bp, Homo sapiens
aaggctaagagaaag

SEQ ID NO: 661212 - DNA, 15 bp, Homo sapiens
aggctaagagaaaga

SEQ ID NO: 661213 - DNA, 15 bp, Homo sapiens
ggctaagagaaagag

SEQ ID NO: 661214 - DNA, 15 bp, Homo sapiens
gctaagagaaagaga

SEQ ID NO: 661215 - DNA, 15 bp, Homo sapiens
ctaagagaaagagac

SEQ ID NO: 661216 - DNA, 15 bp, Homo sapiens
taagagaaagagacc

SEQ ID NO: 661217 - DNA, 15 bp, Homo sapiens
aagagaaagagaccc

SEQ ID NO: 661218 - DNA, 15 bp, Homo sapiens
agagaaagagacccc

SEQ ID NO: 661219 - DNA, 15 bp, Homo sapiens
gagaaagagacccct

SEQ ID NO: 661220 - DNA, 15 bp, Homo sapiens
agaaagagacccctt

SEQ ID NO: 661221 - DNA, 15 bp, Homo sapiens
gaaagagaccccttg

SEQ ID NO: 661222 - DNA, 15 bp, Homo sapiens
aaagagaccccttgg

SEQ ID NO: 661223 - DNA, 15 bp, Homo sapiens
aagagaccccttggt

SEQ ID NO: 661224 - DNA, 15 bp, Homo sapiens
agagaccccttggtg

SEQ ID NO: 661225 - DNA, 15 bp, Homo sapiens
gagaccccttggtga

SEQ ID NO: 661226 - DNA, 15 bp, Homo sapiens
agaccccttggtgat

SEQ ID NO: 661227 - DNA, 15 bp, Homo sapiens
gaccccttggtgatg

SEQ ID NO: 661228 - DNA, 15 bp, Homo sapiens
accccttggtgatgc

SEQ ID NO: 661229 - DNA, 15 bp, Homo sapiens
ccccttggtgatgcc

SEQ ID NO: 661230 - DNA, 15 bp, Homo sapiens
cccttggtgatgcca

SEQ ID NO: 661231 - DNA, 15 bp, Homo sapiens
ccttggtgatgccac

SEQ ID NO: 661232 - DNA, 15 bp, Homo sapiens
cttggtgatgccaca

SEQ ID NO: 661233 - DNA, 15 bp, Homo sapiens
ttggtgatgccacag

SEQ ID NO: 661234 - DNA, 15 bp, Homo sapiens
tggtgatgccacaga

SEQ ID NO: 661235 - DNA, 15 bp, Homo sapiens
ggtgatgccacagat

SEQ ID NO: 661236 - DNA, 15 bp, Homo sapiens
gtgatgccacagatg

SEQ ID NO: 661237 - DNA, 15 bp, Homo sapiens
tgatgccacagatga

SEQ ID NO: 661238 - DNA, 15 bp, Homo sapiens
gatgccacagatgac

SEQ ID NO: 661239 - DNA, 15 bp, Homo sapiens
atgccacagatgact

SEQ ID NO: 661240 - DNA, 15 bp, Homo sapiens
tgccacagatgacta

SEQ ID NO: 661241 - DNA, 15 bp, Homo sapiens
gccacagatgactaa

SEQ ID NO: 661242 - DNA, 15 bp, Homo sapiens
ccacagatgactaac

SEQ ID NO: 661243 - DNA, 15 bp, Homo sapiens
cacagatgactaacc

SEQ ID NO: 661244 - DNA, 15 bp, Homo sapiens
acagatgactaaccc

SEQ ID NO: 661245 - DNA, 15 bp, Homo sapiens
cagatgactaaccca

SEQ ID NO: 661246 - DNA, 15 bp, Homo sapiens
agatgactaacccag

SEQ ID NO: 661247 - DNA, 15 bp, Homo sapiens
gatgactaacccaga

SEQ ID NO: 661248 - DNA, 15 bp, Homo sapiens
atgactaacccagat

SEQ ID NO: 661249 - DNA, 15 bp, Homo sapiens
tgactaacccagatg

SEQ ID NO: 661250 - DNA, 15 bp, Homo sapiens
gactaacccagatgg

SEQ ID NO: 661251 - DNA, 15 bp, Homo sapiens
actaacccagatggg

SEQ ID NO: 661252 - DNA, 15 bp, Homo sapiens
ctaacccagatgggg

SEQ ID NO: 661253 - DNA, 15 bp, Homo sapiens
taacccagatggggg

SEQ ID NO: 661254 - DNA, 15 bp, Homo sapiens
aacccagatggggga

SEQ ID NO: 661255 - DNA, 15 bp, Homo sapiens
acccagatgggggag

SEQ ID NO: 661256 - DNA, 15 bp, Homo sapiens
cccagatgggggaga

SEQ ID NO: 661257 - DNA, 15 bp, Homo sapiens
ccagatgggggagat

SEQ ID NO: 661258 - DNA, 15 bp, Homo sapiens
cagatgggggagatg

SEQ ID NO: 661259 - DNA, 15 bp, Homo sapiens
agatgggggagatga

SEQ ID NO: 661260 - DNA, 15 bp, Homo sapiens
gatgggggagatgag

SEQ ID NO: 661261 - DNA, 15 bp, Homo sapiens
atgggggagatgaga

SEQ ID NO: 661262 - DNA, 15 bp, Homo sapiens
tgggggagatgagaa

SEQ ID NO: 661263 - DNA, 15 bp, Homo sapiens
gggggagatgagaag

SEQ ID NO: 661264 - DNA, 15 bp, Homo sapiens
ggggagatgagaagg

SEQ ID NO: 661265 - DNA, 15 bp, Homo sapiens
gggagatgagaaggc

SEQ ID NO: 661266 - DNA, 15 bp, Homo sapiens
ggagatgagaaggct

SEQ ID NO: 661267 - DNA, 15 bp, Homo sapiens
gagatgagaaggctg

SEQ ID NO: 661268 - DNA, 15 bp, Homo sapiens
agatgagaaggctgg

SEQ ID NO: 661269 - DNA, 15 bp, Homo sapiens
gatgagaaggctggg

SEQ ID NO: 661270 - DNA, 15 bp, Homo sapiens
atgagaaggctgggg

SEQ ID NO: 661271 - DNA, 15 bp, Homo sapiens
tgagaaggctgggga

SEQ ID NO: 661272 - DNA, 15 bp, Homo sapiens
gagaaggctggggag

SEQ ID NO: 661273 - DNA, 15 bp, Homo sapiens
agaaggctggggagc

SEQ ID NO: 661274 - DNA, 15 bp, Homo sapiens
gaaggctggggagct

SEQ ID NO: 661275 - DNA, 15 bp, Homo sapiens
aaggctggggagcta

SEQ ID NO: 661276 - DNA, 15 bp, Homo sapiens
aggctggggagctaa

SEQ ID NO: 661277 - DNA, 15 bp, Homo sapiens
ggctggggagctaag

SEQ ID NO: 661278 - DNA, 15 bp, Homo sapiens
gctggggagctaaga

SEQ ID NO: 661279 - DNA, 15 bp, Homo sapiens
ctggggagctaagag

SEQ ID NO: 661280 - DNA, 15 bp, Homo sapiens
tggggagctaagagc

SEQ ID NO: 661281 - DNA, 15 bp, Homo sapiens
ggggagctaagagcc

SEQ ID NO: 661282 - DNA, 15 bp, Homo sapiens
gggagctaagagcca

SEQ ID NO: 661283 - DNA, 15 bp, Homo sapiens
ggagctaagagccac

SEQ ID NO: 661284 - DNA, 15 bp, Homo sapiens
gagctaagagccaca

SEQ ID NO: 661285 - DNA, 15 bp, Homo sapiens
agctaagagccacag

SEQ ID NO: 661286 - DNA, 15 bp, Homo sapiens
gctaagagccacagc

SEQ ID NO: 661287 - DNA, 15 bp, Homo sapiens
ctaagagccacagcc

SEQ ID NO: 661288 - DNA, 15 bp, Homo sapiens
taagagccacagcca

SEQ ID NO: 661289 - DNA, 15 bp, Homo sapiens
aagagccacagccag

SEQ ID NO: 661290 - DNA, 15 bp, Homo sapiens
agagccacagccaga

SEQ ID NO: 661291 - DNA, 15 bp, Homo sapiens
gagccacagccagac

SEQ ID NO: 661292 - DNA, 15 bp, Homo sapiens
agccacagccagaca

SEQ ID NO: 661293 - DNA, 15 bp, Homo sapiens
gccacagccagacac

SEQ ID NO: 661294 - DNA, 15 bp, Homo sapiens
ccacagccagacaca

SEQ ID NO: 661295 - DNA, 15 bp, Homo sapiens
cacagccagacacaa

SEQ ID NO: 661296 - DNA, 15 bp, Homo sapiens
acagccagacacaag

SEQ ID NO: 661297 - DNA, 15 bp, Homo sapiens
cagccagacacaaga

SEQ ID NO: 661298 - DNA, 15 bp, Homo sapiens
agccagacacaagag

SEQ ID NO: 661299 - DNA, 15 bp, Homo sapiens
gccagacacaagaga

SEQ ID NO: 661300 - DNA, 15 bp, Homo sapiens
ccagacacaagagag

SEQ ID NO: 661301 - DNA, 15 bp, Homo sapiens
cagacacaagagagg

SEQ ID NO: 661302 - DNA, 15 bp, Homo sapiens
agacacaagagagga

SEQ ID NO: 661303 - DNA, 15 bp, Homo sapiens
gacacaagagaggaa

SEQ ID NO: 661304 - DNA, 15 bp, Homo sapiens
acacaagagaggaat

SEQ ID NO: 661305 - DNA, 15 bp, Homo sapiens
cacaagagaggaatt

SEQ ID NO: 661306 - DNA, 15 bp, Homo sapiens
acaagagaggaattt

SEQ ID NO: 661307 - DNA, 15 bp, Homo sapiens
caagagaggaatttg

SEQ ID NO: 661308 - DNA, 15 bp, Homo sapiens
aagagaggaatttgg

SEQ ID NO: 661309 - DNA, 15 bp, Homo sapiens
agagaggaatttggt

SEQ ID NO: 661310 - DNA, 15 bp, Homo sapiens
gagaggaatttggtt

SEQ ID NO: 661311 - DNA, 15 bp, Homo sapiens
agaggaatttggttt

SEQ ID NO: 661312 - DNA, 15 bp, Homo sapiens
gaggaatttggtttg

SEQ ID NO: 661313 - DNA, 15 bp, Homo sapiens
aggaatttggtttga

SEQ ID NO: 661314 - DNA, 15 bp, Homo sapiens
ggaatttggtttgaa

SEQ ID NO: 661315 - DNA, 15 bp, Homo sapiens
gaatttggtttgaaa

SEQ ID NO: 661316 - DNA, 15 bp, Homo sapiens
aatttggtttgaaaa

SEQ ID NO: 661317 - DNA, 15 bp, Homo sapiens
atttggtttgaaaag

SEQ ID NO: 661318 - DNA, 15 bp, Homo sapiens
tttggtttgaaaaga

SEQ ID NO: 661319 - DNA, 15 bp, Homo sapiens
ttggtttgaaaagag

SEQ ID NO: 661320 - DNA, 15 bp, Homo sapiens
tggtttgaaaagaga

SEQ ID NO: 661321 - DNA, 15 bp, Homo sapiens
ggtttgaaaagagag

SEQ ID NO: 661322 - DNA, 15 bp, Homo sapiens
gtttgaaaagagagt

SEQ ID NO: 661323 - DNA, 15 bp, Homo sapiens
tttgaaaagagagta

SEQ ID NO: 661324 - DNA, 15 bp, Homo sapiens
ttgaaaagagagtat

SEQ ID NO: 661325 - DNA, 15 bp, Homo sapiens
tgaaaagagagtatt

SEQ ID NO: 661326 - DNA, 15 bp, Homo sapiens
gaaaagagagtatta

SEQ ID NO: 661327 - DNA, 15 bp, Homo sapiens
aaaagagagtattaa

SEQ ID NO: 661328 - DNA, 15 bp, Homo sapiens
aaagagagtattaag

SEQ ID NO: 661329 - DNA, 15 bp, Homo sapiens
aagagagtattaaga

SEQ ID NO: 661330 - DNA, 15 bp, Homo sapiens
agagagtattaagac

SEQ ID NO: 661331 - DNA, 15 bp, Homo sapiens
gagagtattaagaca

SEQ ID NO: 661332 - DNA, 15 bp, Homo sapiens
agagtattaagacat

SEQ ID NO: 661333 - DNA, 15 bp, Homo sapiens
gagtattaagacatc

SEQ ID NO: 661334 - DNA, 15 bp, Homo sapiens
agtattaagacatca

SEQ ID NO: 661335 - DNA, 15 bp, Homo sapiens
gtattaagacatcaa

SEQ ID NO: 661336 - DNA, 15 bp, Homo sapiens
tattaagacatcaac

SEQ ID NO: 661337 - DNA, 15 bp, Homo sapiens
attaagacatcaaca

SEQ ID NO: 661338 - DNA, 15 bp, Homo sapiens
ttaagacatcaacag

SEQ ID NO: 661339 - DNA, 15 bp, Homo sapiens
taagacatcaacagc

SEQ ID NO: 661340 - DNA, 15 bp, Homo sapiens
aagacatcaacagcc

SEQ ID NO: 661341 - DNA, 15 bp, Homo sapiens
agacatcaacagcct

SEQ ID NO: 661342 - DNA, 15 bp, Homo sapiens
gacatcaacagcctg

SEQ ID NO: 661343 - DNA, 15 bp, Homo sapiens
acatcaacagcctgg

SEQ ID NO: 661344 - DNA, 15 bp, Homo sapiens
catcaacagcctgga

SEQ ID NO: 661345 - DNA, 15 bp, Homo sapiens
atcaacagcctggaa

SEQ ID NO: 661346 - DNA, 15 bp, Homo sapiens
tcaacagcctggaaa

SEQ ID NO: 661347 - DNA, 15 bp, Homo sapiens
caacagcctggaaag

SEQ ID NO: 661348 - DNA, 15 bp, Homo sapiens
aacagcctggaaaga

SEQ ID NO: 661349 - DNA, 15 bp, Homo sapiens
acagcctggaaagag

SEQ ID NO: 661350 - DNA, 15 bp, Homo sapiens
cagcctggaaagaga

SEQ ID NO: 661351 - DNA, 15 bp, Homo sapiens
agcctggaaagagaa

SEQ ID NO: 661352 - DNA, 15 bp, Homo sapiens
gcctggaaagagaag

SEQ ID NO: 661353 - DNA, 15 bp, Homo sapiens
cctggaaagagaagt

SEQ ID NO: 661354 - DNA, 15 bp, Homo sapiens
ctggaaagagaagta

SEQ ID NO: 661355 - DNA, 15 bp, Homo sapiens
tggaaagagaagtac

SEQ ID NO: 661356 - DNA, 15 bp, Homo sapiens
ggaaagagaagtaca

SEQ ID NO: 661357 - DNA, 15 bp, Homo sapiens
gaaagagaagtacag

SEQ ID NO: 661358 - DNA, 15 bp, Homo sapiens
aaagagaagtacagg

SEQ ID NO: 661359 - DNA, 15 bp, Homo sapiens
aagagaagtacaggc

SEQ ID NO: 661360 - DNA, 15 bp, Homo sapiens
agagaagtacaggct

SEQ ID NO: 661361 - DNA, 15 bp, Homo sapiens
gagaagtacaggctg

SEQ ID NO: 661362 - DNA, 15 bp, Homo sapiens
agaagtacaggctga

SEQ ID NO: 661363 - DNA, 15 bp, Homo sapiens
gaagtacaggctgat

SEQ ID NO: 661364 - DNA, 15 bp, Homo sapiens
aagtacaggctgatt

SEQ ID NO: 661365 - DNA, 15 bp, Homo sapiens
agtacaggctgattt

SEQ ID NO: 661366 - DNA, 15 bp, Homo sapiens
gtacaggctgatttg

SEQ ID NO: 661367 - DNA, 15 bp, Homo sapiens
tacaggctgatttgt

SEQ ID NO: 661368 - DNA, 15 bp, Homo sapiens
acaggctgatttgtg

SEQ ID NO: 661369 - DNA, 15 bp, Homo sapiens
caggctgatttgtga

SEQ ID NO: 661370 - DNA, 15 bp, Homo sapiens
aggctgatttgtgac

SEQ ID NO: 661371 - DNA, 15 bp, Homo sapiens
ggctgatttgtgacc

SEQ ID NO: 661372 - DNA, 15 bp, Homo sapiens
gctgatttgtgacct

SEQ ID NO: 661373 - DNA, 15 bp, Homo sapiens
ctgatttgtgacctg

SEQ ID NO: 661374 - DNA, 15 bp, Homo sapiens
tgatttgtgacctgt

SEQ ID NO: 661375 - DNA, 15 bp, Homo sapiens
gatttgtgacctgtt

SEQ ID NO: 661376 - DNA, 15 bp, Homo sapiens
atttgtgacctgttg

SEQ ID NO: 661377 - DNA, 15 bp, Homo sapiens
tttgtgacctgttga

SEQ ID NO: 661378 - DNA, 15 bp, Homo sapiens
ttgtgacctgttgag

SEQ ID NO: 661379 - DNA, 15 bp, Homo sapiens
tgtgacctgttgagc

SEQ ID NO: 661380 - DNA, 15 bp, Homo sapiens
gtgacctgttgagca

SEQ ID NO: 661381 - DNA, 15 bp, Homo sapiens
tgacctgttgagcac

SEQ ID NO: 661382 - DNA, 15 bp, Homo sapiens
gacctgttgagcacc

SEQ ID NO: 661383 - DNA, 15 bp, Homo sapiens
acctgttgagcacca

SEQ ID NO: 661384 - DNA, 15 bp, Homo sapiens
cctgttgagcaccaa

SEQ ID NO: 661385 - DNA, 15 bp, Homo sapiens
ctgttgagcaccaag

SEQ ID NO: 661386 - DNA, 15 bp, Homo sapiens
tgttgagcaccaaga

SEQ ID NO: 661387 - DNA, 15 bp, Homo sapiens
gttgagcaccaagaa

SEQ ID NO: 661388 - DNA, 15 bp, Homo sapiens
ttgagcaccaagaaa

SEQ ID NO: 661389 - DNA, 15 bp, Homo sapiens
tgagcaccaagaaaa

SEQ ID NO: 661390 - DNA, 15 bp, Homo sapiens
gagcaccaagaaaaa

SEQ ID NO: 661391 - DNA, 15 bp, Homo sapiens
agcaccaagaaaaaa

SEQ ID NO: 661392 - DNA, 15 bp, Homo sapiens
gcaccaagaaaaaag

SEQ ID NO: 661393 - DNA, 15 bp, Homo sapiens
caccaagaaaaaaga

SEQ ID NO: 661394 - DNA, 15 bp, Homo sapiens
accaagaaaaaagat

SEQ ID NO: 661395 - DNA, 15 bp, Homo sapiens
ccaagaaaaaagatg

SEQ ID NO: 661396 - DNA, 15 bp, Homo sapiens
caagaaaaaagatgt

SEQ ID NO: 661397 - DNA, 15 bp, Homo sapiens
aagaaaaaagatgtg

SEQ ID NO: 661398 - DNA, 15 bp, Homo sapiens
agaaaaaagatgtgg

SEQ ID NO: 661399 - DNA, 15 bp, Homo sapiens
gaaaaaagatgtggc

SEQ ID NO: 661400 - DNA, 15 bp, Homo sapiens
aaaaaagatgtggca

SEQ ID NO: 661401 - DNA, 15 bp, Homo sapiens
aaaaagatgtggcaa

SEQ ID NO: 661402 - DNA, 15 bp, Homo sapiens
aaaagatgtggcaaa

SEQ ID NO: 661403 - DNA, 15 bp, Homo sapiens
aaagatgtggcaaaa

SEQ ID NO: 661404 - DNA, 15 bp, Homo sapiens
aagatgtggcaaaag

SEQ ID NO: 661405 - DNA, 15 bp, Homo sapiens
agatgtggcaaaaga

SEQ ID NO: 661406 - DNA, 15 bp, Homo sapiens
gatgtggcaaaagaa

SEQ ID NO: 661407 - DNA, 15 bp, Homo sapiens
atgtggcaaaagaag

SEQ ID NO: 661408 - DNA, 15 bp, Homo sapiens
tgtggcaaaagaagg

SEQ ID NO: 661409 - DNA, 15 bp, Homo sapiens
gtggcaaaagaaggc

SEQ ID NO: 661410 - DNA, 15 bp, Homo sapiens
tggcaaaagaaggca

SEQ ID NO: 661411 - DNA, 15 bp, Homo sapiens
ggcaaaagaaggcac

SEQ ID NO: 661412 - DNA, 15 bp, Homo sapiens
gcaaaagaaggcaca

SEQ ID NO: 661413 - DNA, 15 bp, Homo sapiens
caaaagaaggcacag

SEQ ID NO: 661414 - DNA, 15 bp, Homo sapiens
aaaagaaggcacaga

SEQ ID NO: 661415 - DNA, 15 bp, Homo sapiens
aaagaaggcacagat

SEQ ID NO: 661416 - DNA, 15 bp, Homo sapiens
aagaaggcacagatg

SEQ ID NO: 661417 - DNA, 15 bp, Homo sapiens
agaaggcacagatgt

SEQ ID NO: 661418 - DNA, 15 bp, Homo sapiens
gaaggcacagatgtt

SEQ ID NO: 661419 - DNA, 15 bp, Homo sapiens
aaggcacagatgttc

SEQ ID NO: 661420 - DNA, 15 bp, Homo sapiens
aggcacagatgttct

SEQ ID NO: 661421 - DNA, 15 bp, Homo sapiens
ggcacagatgttctg

SEQ ID NO: 661422 - DNA, 15 bp, Homo sapiens
gcacagatgttctga

SEQ ID NO: 661423 - DNA, 15 bp, Homo sapiens
cacagatgttctgaa

SEQ ID NO: 661424 - DNA, 15 bp, Homo sapiens
acagatgttctgaaa

SEQ ID NO: 661425 - DNA, 15 bp, Homo sapiens
cagatgttctgaaaa

SEQ ID NO: 661426 - DNA, 15 bp, Homo sapiens
agatgttctgaaaaa

SEQ ID NO: 661427 - DNA, 15 bp, Homo sapiens
gatgttctgaaaaat

SEQ ID NO: 661428 - DNA, 15 bp, Homo sapiens
atgttctgaaaaatg

SEQ ID NO: 661429 - DNA, 15 bp, Homo sapiens
tgttctgaaaaatgc

SEQ ID NO: 661430 - DNA, 15 bp, Homo sapiens
gttctgaaaaatgca

SEQ ID NO: 661431 - DNA, 15 bp, Homo sapiens
ttctgaaaaatgcaa

SEQ ID NO: 661432 - DNA, 15 bp, Homo sapiens
tctgaaaaatgcaaa

SEQ ID NO: 661433 - DNA, 15 bp, Homo sapiens
ctgaaaaatgcaaag

SEQ ID NO: 661434 - DNA, 15 bp, Homo sapiens
tgaaaaatgcaaaga

SEQ ID NO: 661435 - DNA, 15 bp, Homo sapiens
gaaaaatgcaaagaa

SEQ ID NO: 661436 - DNA, 15 bp, Homo sapiens
aaaaatgcaaagaat

SEQ ID NO: 661437 - DNA, 15 bp, Homo sapiens
aaaatgcaaagaatt

SEQ ID NO: 661438 - DNA, 15 bp, Homo sapiens
aaatgcaaagaattt

SEQ ID NO: 661439 - DNA, 15 bp, Homo sapiens
aatgcaaagaatttg

SEQ ID NO: 661440 - DNA, 15 bp, Homo sapiens
atgcaaagaatttgt

SEQ ID NO: 661441 - DNA, 15 bp, Homo sapiens
tgcaaagaatttgtg

SEQ ID NO: 661442 - DNA, 15 bp, Homo sapiens
gcaaagaatttgtga

SEQ ID NO: 661443 - DNA, 15 bp, Homo sapiens
caaagaatttgtgat

SEQ ID NO: 661444 - DNA, 15 bp, Homo sapiens
aaagaatttgtgatg

SEQ ID NO: 661445 - DNA, 15 bp, Homo sapiens
aagaatttgtgatgg

SEQ ID NO: 661446 - DNA, 15 bp, Homo sapiens
agaatttgtgatggc

SEQ ID NO: 661447 - DNA, 15 bp, Homo sapiens
gaatttgtgatggct

SEQ ID NO: 661448 - DNA, 15 bp, Homo sapiens
aatttgtgatggctc

SEQ ID NO: 661449 - DNA, 15 bp, Homo sapiens
atttgtgatggctca

SEQ ID NO: 661450 - DNA, 15 bp, Homo sapiens
tttgtgatggctcag

SEQ ID NO: 661451 - DNA, 15 bp, Homo sapiens
ttgtgatggctcaga

SEQ ID NO: 661452 - DNA, 15 bp, Homo sapiens
tgtgatggctcagag

SEQ ID NO: 661453 - DNA, 15 bp, Homo sapiens
gtgatggctcagagt

SEQ ID NO: 661454 - DNA, 15 bp, Homo sapiens
tgatggctcagagtc

SEQ ID NO: 661455 - DNA, 15 bp, Homo sapiens
gatggctcagagtcc

SEQ ID NO: 661456 - DNA, 15 bp, Homo sapiens
atggctcagagtcca

SEQ ID NO: 661457 - DNA, 15 bp, Homo sapiens
tggctcagagtccaa

SEQ ID NO: 661458 - DNA, 15 bp, Homo sapiens
ggctcagagtccaac

SEQ ID NO: 661459 - DNA, 15 bp, Homo sapiens
gctcagagtccaact

SEQ ID NO: 661460 - DNA, 15 bp, Homo sapiens
ctcagagtccaactg

SEQ ID NO: 661461 - DNA, 15 bp, Homo sapiens
tcagagtccaactga

SEQ ID NO: 661462 - DNA, 15 bp, Homo sapiens
cagagtccaactgag

SEQ ID NO: 661463 - DNA, 15 bp, Homo sapiens
agagtccaactgagg

SEQ ID NO: 661464 - DNA, 15 bp, Homo sapiens
gagtccaactgaggg

SEQ ID NO: 661465 - DNA, 15 bp, Homo sapiens
agtccaactgaggga

SEQ ID NO: 661466 - DNA, 15 bp, Homo sapiens
gtccaactgagggaa

SEQ ID NO: 661467 - DNA, 15 bp, Homo sapiens
tccaactgagggaaa

SEQ ID NO: 661468 - DNA, 15 bp, Homo sapiens
ccaactgagggaaat

SEQ ID NO: 661469 - DNA, 15 bp, Homo sapiens
caactgagggaaatg

SEQ ID NO: 661470 - DNA, 15 bp, Homo sapiens
aactgagggaaatga

SEQ ID NO: 661471 - DNA, 15 bp, Homo sapiens
actgagggaaatgac

SEQ ID NO: 661472 - DNA, 15 bp, Homo sapiens
ctgagggaaatgact

SEQ ID NO: 661473 - DNA, 15 bp, Homo sapiens
tgagggaaatgactg

SEQ ID NO: 661474 - DNA, 15 bp, Homo sapiens
gagggaaatgactgc

SEQ ID NO: 661475 - DNA, 15 bp, Homo sapiens
agggaaatgactgcc

SEQ ID NO: 661476 - DNA, 15 bp, Homo sapiens
gggaaatgactgcca

SEQ ID NO: 661477 - DNA, 15 bp, Homo sapiens
ggaaatgactgccaa

SEQ ID NO: 661478 - DNA, 15 bp, Homo sapiens
gaaatgactgccaaa

SEQ ID NO: 661479 - DNA, 15 bp, Homo sapiens
aaatgactgccaaag

SEQ ID NO: 661480 - DNA, 15 bp, Homo sapiens
aatgactgccaaagg

SEQ ID NO: 661481 - DNA, 15 bp, Homo sapiens
atgactgccaaaggc

SEQ ID NO: 661482 - DNA, 15 bp, Homo sapiens
tgactgccaaaggca

SEQ ID NO: 661483 - DNA, 15 bp, Homo sapiens
gactgccaaaggcag

SEQ ID NO: 661484 - DNA, 15 bp, Homo sapiens
actgccaaaggcaga

SEQ ID NO: 661485 - DNA, 15 bp, Homo sapiens
ctgccaaaggcagat

SEQ ID NO: 661486 - DNA, 15 bp, Homo sapiens
tgccaaaggcagatc

SEQ ID NO: 661487 - DNA, 15 bp, Homo sapiens
gccaaaggcagatct

SEQ ID NO: 661488 - DNA, 15 bp, Homo sapiens
ccaaaggcagatctc

SEQ ID NO: 661489 - DNA, 15 bp, Homo sapiens
caaaggcagatctca

SEQ ID NO: 661490 - DNA, 15 bp, Homo sapiens
aaaggcagatctcag

SEQ ID NO: 661491 - DNA, 15 bp, Homo sapiens
aaggcagatctcagt

SEQ ID NO: 661492 - DNA, 15 bp, Homo sapiens
aggcagatctcagtg

SEQ ID NO: 661493 - DNA, 15 bp, Homo sapiens
ggcagatctcagtgg

SEQ ID NO: 661494 - DNA, 15 bp, Homo sapiens
gcagatctcagtgga

SEQ ID NO: 661495 - DNA, 15 bp, Homo sapiens
cagatctcagtggac

SEQ ID NO: 661496 - DNA, 15 bp, Homo sapiens
agatctcagtggacc

SEQ ID NO: 661497 - DNA, 15 bp, Homo sapiens
gatctcagtggaccg

SEQ ID NO: 661498 - DNA, 15 bp, Homo sapiens
atctcagtggaccgt

SEQ ID NO: 661499 - DNA, 15 bp, Homo sapiens
tctcagtggaccgtg

SEQ ID NO: 661500 - DNA, 15 bp, Homo sapiens
ctcagtggaccgtgg

SEQ ID NO: 661501 - DNA, 15 bp, Homo sapiens
tcagtggaccgtggg

SEQ ID NO: 661502 - DNA, 15 bp, Homo sapiens
cagtggaccgtggga

SEQ ID NO: 661503 - DNA, 15 bp, Homo sapiens
agtggaccgtgggag

SEQ ID NO: 661504 - DNA, 15 bp, Homo sapiens
gtggaccgtgggagc

SEQ ID NO: 661505 - DNA, 15 bp, Homo sapiens
tggaccgtgggagca

SEQ ID NO: 661506 - DNA, 15 bp, Homo sapiens
ggaccgtgggagcac

SEQ ID NO: 661507 - DNA, 15 bp, Homo sapiens
gaccgtgggagcact

SEQ ID NO: 661508 - DNA, 15 bp, Homo sapiens
accgtgggagcactg

SEQ ID NO: 661509 - DNA, 15 bp, Homo sapiens
ccgtgggagcactgg

SEQ ID NO: 661510 - DNA, 15 bp, Homo sapiens
cgtgggagcactggc

SEQ ID NO: 661511 - DNA, 15 bp, Homo sapiens
gtgggagcactggct

SEQ ID NO: 661512 - DNA, 15 bp, Homo sapiens
tgggagcactggctc

SEQ ID NO: 661513 - DNA, 15 bp, Homo sapiens
gggagcactggctcg

SEQ ID NO: 661514 - DNA, 15 bp, Homo sapiens
ggagcactggctcga

SEQ ID NO: 661515 - DNA, 15 bp, Homo sapiens
gagcactggctcgat

SEQ ID NO: 661516 - DNA, 15 bp, Homo sapiens
agcactggctcgatg

SEQ ID NO: 661517 - DNA, 15 bp, Homo sapiens
gcactggctcgatga

SEQ ID NO: 661518 - DNA, 15 bp, Homo sapiens
cactggctcgatgag

SEQ ID NO: 661519 - DNA, 15 bp, Homo sapiens
actggctcgatgaga

SEQ ID NO: 661520 - DNA, 15 bp, Homo sapiens
ctggctcgatgagaa

SEQ ID NO: 661521 - DNA, 15 bp, Homo sapiens
tggctcgatgagaag

SEQ ID NO: 661522 - DNA, 15 bp, Homo sapiens
ggctcgatgagaaga

SEQ ID NO: 661523 - DNA, 15 bp, Homo sapiens
gctcgatgagaagac

SEQ ID NO: 661524 - DNA, 15 bp, Homo sapiens
ctcgatgagaagaca

SEQ ID NO: 661525 - DNA, 15 bp, Homo sapiens
tcgatgagaagacat

SEQ ID NO: 661526 - DNA, 15 bp, Homo sapiens
cgatgagaagacatg

SEQ ID NO: 661527 - DNA, 15 bp, Homo sapiens
gatgagaagacatga

SEQ ID NO: 661528 - DNA, 15 bp, Homo sapiens
atgagaagacatgag

SEQ ID NO: 661529 - DNA, 15 bp, Homo sapiens
tgagaagacatgagg

SEQ ID NO: 661530 - DNA, 15 bp, Homo sapiens
gagaagacatgagga

SEQ ID NO: 661531 - DNA, 15 bp, Homo sapiens
agaagacatgaggag

SEQ ID NO: 661532 - DNA, 15 bp, Homo sapiens
gaagacatgaggagg

SEQ ID NO: 661533 - DNA, 15 bp, Homo sapiens
aagacatgaggaggc

SEQ ID NO: 661534 - DNA, 15 bp, Homo sapiens
agacatgaggaggct

SEQ ID NO: 661535 - DNA, 15 bp, Homo sapiens
gacatgaggaggcta

SEQ ID NO: 661536 - DNA, 15 bp, Homo sapiens
acatgaggaggctag

SEQ ID NO: 661537 - DNA, 15 bp, Homo sapiens
catgaggaggctagg

SEQ ID NO: 661538 - DNA, 15 bp, Homo sapiens
atgaggaggctagga

SEQ ID NO: 661539 - DNA, 15 bp, Homo sapiens
tgaggaggctaggac

SEQ ID NO: 661540 - DNA, 15 bp, Homo sapiens
gaggaggctaggact

SEQ ID NO: 661541 - DNA, 15 bp, Homo sapiens
aggaggctaggactt

SEQ ID NO: 661542 - DNA, 15 bp, Homo sapiens
ggaggctaggacttc

SEQ ID NO: 661543 - DNA, 15 bp, Homo sapiens
gaggctaggacttca

SEQ ID NO: 661544 - DNA, 15 bp, Homo sapiens
aggctaggacttcat

SEQ ID NO: 661545 - DNA, 15 bp, Homo sapiens
ggctaggacttcata

SEQ ID NO: 661546 - DNA, 15 bp, Homo sapiens
gctaggacttcataa

SEQ ID NO: 661547 - DNA, 15 bp, Homo sapiens
ctaggacttcataac

SEQ ID NO: 661548 - DNA, 15 bp, Homo sapiens
taggacttcataact

SEQ ID NO: 661549 - DNA, 15 bp, Homo sapiens
aggacttcataactg

SEQ ID NO: 661550 - DNA, 15 bp, Homo sapiens
ggacttcataactga

SEQ ID NO: 661551 - DNA, 15 bp, Homo sapiens
gacttcataactgac

SEQ ID NO: 661552 - DNA, 15 bp, Homo sapiens
acttcataactgacc

SEQ ID NO: 661553 - DNA, 15 bp, Homo sapiens
cttcataactgacct

SEQ ID NO: 661554 - DNA, 15 bp, Homo sapiens
ttcataactgacctt

SEQ ID NO: 661555 - DNA, 15 bp, Homo sapiens
tcataactgaccttt

SEQ ID NO: 661556 - DNA, 15 bp, Homo sapiens
cataactgaccttta

SEQ ID NO: 661557 - DNA, 15 bp, Homo sapiens
ataactgacctttac

SEQ ID NO: 661558 - DNA, 15 bp, Homo sapiens
taactgacctttacc

SEQ ID NO: 661559 - DNA, 15 bp, Homo sapiens
aactgacctttacca

SEQ ID NO: 661560 - DNA, 15 bp, Homo sapiens
actgacctttaccag

SEQ ID NO: 661561 - DNA, 15 bp, Homo sapiens
ctgacctttaccaga

SEQ ID NO: 661562 - DNA, 15 bp, Homo sapiens
tgacctttaccagag

SEQ ID NO: 661563 - DNA, 15 bp, Homo sapiens
gacctttaccagagt

SEQ ID NO: 661564 - DNA, 15 bp, Homo sapiens
acctttaccagagtg

SEQ ID NO: 661565 - DNA, 15 bp, Homo sapiens
cctttaccagagtgt

SEQ ID NO: 661566 - DNA, 15 bp, Homo sapiens
ctttaccagagtgtc

SEQ ID NO: 661567 - DNA, 15 bp, Homo sapiens
tttaccagagtgtct

SEQ ID NO: 661568 - DNA, 15 bp, Homo sapiens
ttaccagagtgtctt

SEQ ID NO: 661569 - DNA, 15 bp, Homo sapiens
taccagagtgtcttc

SEQ ID NO: 661570 - DNA, 15 bp, Homo sapiens
accagagtgtcttcc

SEQ ID NO: 661571 - DNA, 15 bp, Homo sapiens
ccagagtgtcttcct

SEQ ID NO: 661572 - DNA, 15 bp, Homo sapiens
cagagtgtcttcctg

SEQ ID NO: 661573 - DNA, 15 bp, Homo sapiens
agagtgtcttcctga

SEQ ID NO: 661574 - DNA, 15 bp, Homo sapiens
gagtgtcttcctgac

SEQ ID NO: 661575 - DNA, 15 bp, Homo sapiens
agtgtcttcctgacc

SEQ ID NO: 661576 - DNA, 15 bp, Homo sapiens
gtgtcttcctgaccc

SEQ ID NO: 661577 - DNA, 15 bp, Homo sapiens
tgtcttcctgaccca

SEQ ID NO: 661578 - DNA, 15 bp, Homo sapiens
gtcttcctgacccag

SEQ ID NO: 661579 - DNA, 15 bp, Homo sapiens
tcttcctgacccaga

SEQ ID NO: 661580 - DNA, 15 bp, Homo sapiens
cttcctgacccagag

SEQ ID NO: 661581 - DNA, 15 bp, Homo sapiens
ttcctgacccagagc

SEQ ID NO: 661582 - DNA, 15 bp, Homo sapiens
tcctgacccagagca

SEQ ID NO: 661583 - DNA, 15 bp, Homo sapiens
cctgacccagagcaa

SEQ ID NO: 661584 - DNA, 15 bp, Homo sapiens
ctgacccagagcaag

SEQ ID NO: 661585 - DNA, 15 bp, Homo sapiens
tgacccagagcaagg

SEQ ID NO: 661586 - DNA, 15 bp, Homo sapiens
gacccagagcaagga

SEQ ID NO: 661587 - DNA, 15 bp, Homo sapiens
acccagagcaaggaa

SEQ ID NO: 661588 - DNA, 15 bp, Homo sapiens
cccagagcaaggaag

SEQ ID NO: 661589 - DNA, 15 bp, Homo sapiens
ccagagcaaggaaga

SEQ ID NO: 661590 - DNA, 15 bp, Homo sapiens
cagagcaaggaagag

SEQ ID NO: 661591 - DNA, 15 bp, Homo sapiens
agagcaaggaagaga

SEQ ID NO: 661592 - DNA, 15 bp, Homo sapiens
gagcaaggaagagag

SEQ ID NO: 661593 - DNA, 15 bp, Homo sapiens
agcaaggaagagaga

SEQ ID NO: 661594 - DNA, 15 bp, Homo sapiens
gcaaggaagagagat

SEQ ID NO: 661595 - DNA, 15 bp, Homo sapiens
caaggaagagagatg

SEQ ID NO: 661596 - DNA, 15 bp, Homo sapiens
aaggaagagagatga

SEQ ID NO: 661597 - DNA, 15 bp, Homo sapiens
aggaagagagatgaa

SEQ ID NO: 661598 - DNA, 15 bp, Homo sapiens
ggaagagagatgaag

SEQ ID NO: 661599 - DNA, 15 bp, Homo sapiens
gaagagagatgaaga

SEQ ID NO: 661600 - DNA, 15 bp, Homo sapiens
aagagagatgaagag

SEQ ID NO: 661601 - DNA, 15 bp, Homo sapiens
agagagatgaagagg

SEQ ID NO: 661602 - DNA, 15 bp, Homo sapiens
gagagatgaagagga

SEQ ID NO: 661603 - DNA, 15 bp, Homo sapiens
agagatgaagaggag

SEQ ID NO: 661604 - DNA, 15 bp, Homo sapiens
gagatgaagaggaga

SEQ ID NO: 661605 - DNA, 15 bp, Homo sapiens
agatgaagaggagaa

SEQ ID NO: 661606 - DNA, 15 bp, Homo sapiens
gatgaagaggagaag

SEQ ID NO: 661607 - DNA, 15 bp, Homo sapiens
atgaagaggagaaga

SEQ ID NO: 661608 - DNA, 15 bp, Homo sapiens
tgaagaggagaagat

SEQ ID NO: 661609 - DNA, 15 bp, Homo sapiens
gaagaggagaagatg

SEQ ID NO: 661610 - DNA, 15 bp, Homo sapiens
aagaggagaagatga

SEQ ID NO: 661611 - DNA, 15 bp, Homo sapiens
agaggagaagatgaa

SEQ ID NO: 661612 - DNA, 15 bp, Homo sapiens
gaggagaagatgaac

SEQ ID NO: 661613 - DNA, 15 bp, Homo sapiens
aggagaagatgaaca

SEQ ID NO: 661614 - DNA, 15 bp, Homo sapiens
ggagaagatgaacaa

SEQ ID NO: 661615 - DNA, 15 bp, Homo sapiens
gagaagatgaacaag

SEQ ID NO: 661616 - DNA, 15 bp, Homo sapiens
agaagatgaacaagt

SEQ ID NO: 661617 - DNA, 15 bp, Homo sapiens
gaagatgaacaagtc

SEQ ID NO: 661618 - DNA, 15 bp, Homo sapiens
aagatgaacaagtcg

SEQ ID NO: 661619 - DNA, 15 bp, Homo sapiens
agatgaacaagtcgt

SEQ ID NO: 661620 - DNA, 15 bp, Homo sapiens
gatgaacaagtcgtt

SEQ ID NO: 661621 - DNA, 15 bp, Homo sapiens
atgaacaagtcgttt

SEQ ID NO: 661622 - DNA, 15 bp, Homo sapiens
tgaacaagtcgtttg

SEQ ID NO: 661623 - DNA, 15 bp, Homo sapiens
gaacaagtcgtttga

SEQ ID NO: 661624 - DNA, 15 bp, Homo sapiens
aacaagtcgtttgag

SEQ ID NO: 661625 - DNA, 15 bp, Homo sapiens
acaagtcgtttgaga

SEQ ID NO: 661626 - DNA, 15 bp, Homo sapiens
caagtcgtttgagaa

SEQ ID NO: 661627 - DNA, 15 bp, Homo sapiens
aagtcgtttgagaag

SEQ ID NO: 661628 - DNA, 15 bp, Homo sapiens
agtcgtttgagaaga

SEQ ID NO: 661629 - DNA, 15 bp, Homo sapiens
gtcgtttgagaagaa

SEQ ID NO: 661630 - DNA, 15 bp, Homo sapiens
tcgtttgagaagaaa

SEQ ID NO: 661631 - DNA, 15 bp, Homo sapiens
cgtttgagaagaaaa

SEQ ID NO: 661632 - DNA, 15 bp, Homo sapiens
gtttgagaagaaaaa

SEQ ID NO: 661633 - DNA, 15 bp, Homo sapiens
tttgagaagaaaaat

SEQ ID NO: 661634 - DNA, 15 bp, Homo sapiens
ttgagaagaaaaata

SEQ ID NO: 661635 - DNA, 15 bp, Homo sapiens
tgagaagaaaaataa

SEQ ID NO: 661636 - DNA, 15 bp, Homo sapiens
gagaagaaaaataaa

SEQ ID NO: 661637 - DNA, 15 bp, Homo sapiens
agaagaaaaataaat

SEQ ID NO: 661638 - DNA, 15 bp, Homo sapiens
gaagaaaaataaatt

SEQ ID NO: 661639 - DNA, 15 bp, Homo sapiens
aagaaaaataaatta

SEQ ID NO: 661640 - DNA, 15 bp, Homo sapiens
agaaaaataaattag

SEQ ID NO: 661641 - DNA, 15 bp, Homo sapiens
gaaaaataaattagc

SEQ ID NO: 661642 - DNA, 15 bp, Homo sapiens
aaaaataaattagca

SEQ ID NO: 661643 - DNA, 15 bp, Homo sapiens
aaaataaattagcaa

SEQ ID NO: 661644 - DNA, 15 bp, Homo sapiens
aaataaattagcaag

SEQ ID NO: 661645 - DNA, 15 bp, Homo sapiens
aataaattagcaagt

SEQ ID NO: 661646 - DNA, 15 bp, Homo sapiens
ataaattagcaagtc

SEQ ID NO: 661647 - DNA, 15 bp, Homo sapiens
taaattagcaagtct

SEQ ID NO: 661648 - DNA, 15 bp, Homo sapiens
aaattagcaagtctt

SEQ ID NO: 661649 - DNA, 15 bp, Homo sapiens
aattagcaagtcttt

SEQ ID NO: 661650 - DNA, 15 bp, Homo sapiens
attagcaagtcttta

SEQ ID NO: 661651 - DNA, 15 bp, Homo sapiens
ttagcaagtctttag

SEQ ID NO: 661652 - DNA, 15 bp, Homo sapiens
tagcaagtctttaga

SEQ ID NO: 661653 - DNA, 15 bp, Homo sapiens
agcaagtctttagaa

SEQ ID NO: 661654 - DNA, 15 bp, Homo sapiens
gcaagtctttagaag

SEQ ID NO: 661655 - DNA, 15 bp, Homo sapiens
caagtctttagaagt

SEQ ID NO: 661656 - DNA, 15 bp, Homo sapiens
aagtctttagaagta

SEQ ID NO: 661657 - DNA, 15 bp, Homo sapiens
agtctttagaagtag

SEQ ID NO: 661658 - DNA, 15 bp, Homo sapiens
gtctttagaagtaga

SEQ ID NO: 661659 - DNA, 15 bp, Homo sapiens
tctttagaagtagat

SEQ ID NO: 661660 - DNA, 15 bp, Homo sapiens
ctttagaagtagatt

SEQ ID NO: 661661 - DNA, 15 bp, Homo sapiens
tttagaagtagatta

SEQ ID NO: 661662 - DNA, 15 bp, Homo sapiens
ttagaagtagattaa

SEQ ID NO: 661663 - DNA, 15 bp, Homo sapiens
tagaagtagattaaa

SEQ ID NO: 661664 - DNA, 15 bp, Homo sapiens
agaagtagattaaaa

SEQ ID NO: 661665 - DNA, 15 bp, Homo sapiens
gaagtagattaaaat

SEQ ID NO: 661666 - DNA, 15 bp, Homo sapiens
aagtagattaaaata

SEQ ID NO: 661667 - DNA, 15 bp, Homo sapiens
agtagattaaaatat

SEQ ID NO: 661668 - DNA, 15 bp, Homo sapiens
gtagattaaaatatt

SEQ ID NO: 661669 - DNA, 15 bp, Homo sapiens
tagattaaaatattc

SEQ ID NO: 661670 - DNA, 15 bp, Homo sapiens
agattaaaatattcc

SEQ ID NO: 661671 - DNA, 15 bp, Homo sapiens
gattaaaatattcct

SEQ ID NO: 661672 - DNA, 15 bp, Homo sapiens
attaaaatattcctg

SEQ ID NO: 661673 - DNA, 15 bp, Homo sapiens
ttaaaatattcctga

SEQ ID NO: 661674 - DNA, 15 bp, Homo sapiens
taaaatattcctgaa

SEQ ID NO: 661675 - DNA, 15 bp, Homo sapiens
aaaatattcctgaac

SEQ ID NO: 661676 - DNA, 15 bp, Homo sapiens
aaatattcctgaacc

SEQ ID NO: 661677 - DNA, 15 bp, Homo sapiens
aatattcctgaacca

SEQ ID NO: 661678 - DNA, 15 bp, Homo sapiens
atattcctgaaccag

SEQ ID NO: 661679 - DNA, 15 bp, Homo sapiens
tattcctgaaccagc

SEQ ID NO: 661680 - DNA, 15 bp, Homo sapiens
attcctgaaccagca

SEQ ID NO: 661681 - DNA, 15 bp, Homo sapiens
ttcctgaaccagcag

SEQ ID NO: 661682 - DNA, 15 bp, Homo sapiens
tcctgaaccagcagc

SEQ ID NO: 661683 - DNA, 15 bp, Homo sapiens
cctgaaccagcagcc

SEQ ID NO: 661684 - DNA, 15 bp, Homo sapiens
ctgaaccagcagcct

SEQ ID NO: 661685 - DNA, 15 bp, Homo sapiens
tgaaccagcagcctg

SEQ ID NO: 661686 - DNA, 15 bp, Homo sapiens
gaaccagcagcctgc

SEQ ID NO: 661687 - DNA, 15 bp, Homo sapiens
aaccagcagcctgct

SEQ ID NO: 661688 - DNA, 15 bp, Homo sapiens
accagcagcctgctt

SEQ ID NO: 661689 - DNA, 15 bp, Homo sapiens
ccagcagcctgcttt

SEQ ID NO: 661690 - DNA, 15 bp, Homo sapiens
cagcagcctgctttt

SEQ ID NO: 661691 - DNA, 15 bp, Homo sapiens
agcagcctgcttttt

SEQ ID NO: 661692 - DNA, 15 bp, Homo sapiens
gcagcctgcttttta

SEQ ID NO: 661693 - DNA, 15 bp, Homo sapiens
cagcctgctttttac

SEQ ID NO: 661694 - DNA, 15 bp, Homo sapiens
agcctgctttttact

SEQ ID NO: 661695 - DNA, 15 bp, Homo sapiens
gcctgctttttacta

SEQ ID NO: 661696 - DNA, 15 bp, Homo sapiens
cctgctttttactaa

SEQ ID NO: 661697 - DNA, 15 bp, Homo sapiens
ctgctttttactaaa

SEQ ID NO: 661698 - DNA, 15 bp, Homo sapiens
tgctttttactaaaa

SEQ ID NO: 661699 - DNA, 15 bp, Homo sapiens
gctttttactaaaat

SEQ ID NO: 661700 - DNA, 15 bp, Homo sapiens
ctttttactaaaatt

SEQ ID NO: 661701 - DNA, 15 bp, Homo sapiens
tttttactaaaattc

SEQ ID NO: 661702 - DNA, 15 bp, Homo sapiens
ttttactaaaattct

SEQ ID NO: 661703 - DNA, 15 bp, Homo sapiens
tttactaaaattctt

SEQ ID NO: 661704 - DNA, 15 bp, Homo sapiens
ttactaaaattcttt

SEQ ID NO: 661705 - DNA, 15 bp, Homo sapiens
tactaaaattctttt

SEQ ID NO: 661706 - DNA, 15 bp, Homo sapiens
actaaaattcttttt

SEQ ID NO: 661707 - DNA, 15 bp, Homo sapiens
ctaaaattctttttt

SEQ ID NO: 661708 - DNA, 15 bp, Homo sapiens
taaaattcttttttt

SEQ ID NO: 661709 - DNA, 15 bp, Homo sapiens
aaaattctttttttt

SEQ ID NO: 661710 - DNA, 15 bp, Homo sapiens
aaattctttttttta

SEQ ID NO: 661711 - DNA, 15 bp, Homo sapiens
aattcttttttttaa

SEQ ID NO: 661712 - DNA, 15 bp, Homo sapiens
attcttttttttaag

SEQ ID NO: 661713 - DNA, 15 bp, Homo sapiens
ttcttttttttaagt

SEQ ID NO: 661714 - DNA, 15 bp, Homo sapiens
tcttttttttaagtc

SEQ ID NO: 661715 - DNA, 15 bp, Homo sapiens
cttttttttaagtca

SEQ ID NO: 661716 - DNA, 15 bp, Homo sapiens
ttttttttaagtcat

SEQ ID NO: 661717 - DNA, 15 bp, Homo sapiens
tttttttaagtcatc

SEQ ID NO: 661718 - DNA, 15 bp, Homo sapiens
ttttttaagtcatct

SEQ ID NO: 661719 - DNA, 15 bp, Homo sapiens
tttttaagtcatctt

SEQ ID NO: 661720 - DNA, 15 bp, Homo sapiens
ttttaagtcatcttc

SEQ ID NO: 661721 - DNA, 15 bp, Homo sapiens
tttaagtcatcttca

SEQ ID NO: 661722 - DNA, 15 bp, Homo sapiens
ttaagtcatcttcaa

SEQ ID NO: 661723 - DNA, 15 bp, Homo sapiens
taagtcatcttcaat

SEQ ID NO: 661724 - DNA, 15 bp, Homo sapiens
aagtcatcttcaatg

SEQ ID NO: 661725 - DNA, 15 bp, Homo sapiens
agtcatcttcaatgg

SEQ ID NO: 661726 - DNA, 15 bp, Homo sapiens
gtcatcttcaatggc

SEQ ID NO: 661727 - DNA, 15 bp, Homo sapiens
tcatcttcaatggct

SEQ ID NO: 661728 - DNA, 15 bp, Homo sapiens
catcttcaatggctt

SEQ ID NO: 661729 - DNA, 15 bp, Homo sapiens
atcttcaatggcttg

SEQ ID NO: 661730 - DNA, 15 bp, Homo sapiens
tcttcaatggcttga

SEQ ID NO: 661731 - DNA, 15 bp, Homo sapiens
cttcaatggcttgaa

SEQ ID NO: 661732 - DNA, 15 bp, Homo sapiens
ttcaatggcttgaac

SEQ ID NO: 661733 - DNA, 15 bp, Homo sapiens
tcaatggcttgaact

SEQ ID NO: 661734 - DNA, 15 bp, Homo sapiens
caatggcttgaactt

SEQ ID NO: 661735 - DNA, 15 bp, Homo sapiens
aatggcttgaactta

SEQ ID NO: 661736 - DNA, 15 bp, Homo sapiens
atggcttgaacttac

SEQ ID NO: 661737 - DNA, 15 bp, Homo sapiens
tggcttgaacttaca

SEQ ID NO: 661738 - DNA, 15 bp, Homo sapiens
ggcttgaacttacag

SEQ ID NO: 661739 - DNA, 15 bp, Homo sapiens
gcttgaacttacagt

SEQ ID NO: 661740 - DNA, 15 bp, Homo sapiens
cttgaacttacagtt

SEQ ID NO: 661741 - DNA, 15 bp, Homo sapiens
ttgaacttacagttc

SEQ ID NO: 661742 - DNA, 15 bp, Homo sapiens
tgaacttacagttca

SEQ ID NO: 661743 - DNA, 15 bp, Homo sapiens
gaacttacagttcag

SEQ ID NO: 661744 - DNA, 15 bp, Homo sapiens
aacttacagttcagt

SEQ ID NO: 661745 - DNA, 15 bp, Homo sapiens
acttacagttcagtt

SEQ ID NO: 661746 - DNA, 15 bp, Homo sapiens
cttacagttcagtta

SEQ ID NO: 661747 - DNA, 15 bp, Homo sapiens
ttacagttcagttaa

SEQ ID NO: 661748 - DNA, 15 bp, Homo sapiens
tacagttcagttaag

SEQ ID NO: 661749 - DNA, 15 bp, Homo sapiens
acagttcagttaaga

SEQ ID NO: 661750 - DNA, 15 bp, Homo sapiens
cagttcagttaagag

SEQ ID NO: 661751 - DNA, 15 bp, Homo sapiens
agttcagttaagagg

SEQ ID NO: 661752 - DNA, 15 bp, Homo sapiens
gttcagttaagagga

SEQ ID NO: 661753 - DNA, 15 bp, Homo sapiens
ttcagttaagaggat

SEQ ID NO: 661754 - DNA, 15 bp, Homo sapiens
tcagttaagaggatg

SEQ ID NO: 661755 - DNA, 15 bp, Homo sapiens
cagttaagaggatgt

SEQ ID NO: 661756 - DNA, 15 bp, Homo sapiens
agttaagaggatgtg

SEQ ID NO: 661757 - DNA, 15 bp, Homo sapiens
gttaagaggatgtgt

SEQ ID NO: 661758 - DNA, 15 bp, Homo sapiens
ttaagaggatgtgtg

SEQ ID NO: 661759 - DNA, 15 bp, Homo sapiens
taagaggatgtgtgt

SEQ ID NO: 661760 - DNA, 15 bp, Homo sapiens
aagaggatgtgtgta

SEQ ID NO: 661761 - DNA, 15 bp, Homo sapiens
agaggatgtgtgtag

SEQ ID NO: 661762 - DNA, 15 bp, Homo sapiens
gaggatgtgtgtagc

SEQ ID NO: 661763 - DNA, 15 bp, Homo sapiens
aggatgtgtgtagct

SEQ ID NO: 661764 - DNA, 15 bp, Homo sapiens
ggatgtgtgtagctc

SEQ ID NO: 661765 - DNA, 15 bp, Homo sapiens
gatgtgtgtagctct

SEQ ID NO: 661766 - DNA, 15 bp, Homo sapiens
atgtgtgtagctctg

SEQ ID NO: 661767 - DNA, 15 bp, Homo sapiens
tgtgtgtagctctgt

SEQ ID NO: 661768 - DNA, 15 bp, Homo sapiens
gtgtgtagctctgtc

SEQ ID NO: 661769 - DNA, 15 bp, Homo sapiens
tgtgtagctctgtct

SEQ ID NO: 661770 - DNA, 15 bp, Homo sapiens
gtgtagctctgtcta

SEQ ID NO: 661771 - DNA, 15 bp, Homo sapiens
tgtagctctgtctac

SEQ ID NO: 661772 - DNA, 15 bp, Homo sapiens
gtagctctgtctaca

SEQ ID NO: 661773 - DNA, 15 bp, Homo sapiens
tagctctgtctacat

SEQ ID NO: 661774 - DNA, 15 bp, Homo sapiens
agctctgtctacatt

SEQ ID NO: 661775 - DNA, 15 bp, Homo sapiens
gctctgtctacattc

SEQ ID NO: 661776 - DNA, 15 bp, Homo sapiens
ctctgtctacattct

SEQ ID NO: 661777 - DNA, 15 bp, Homo sapiens
tctgtctacattctc

SEQ ID NO: 661778 - DNA, 15 bp, Homo sapiens
ctgtctacattctct

SEQ ID NO: 661779 - DNA, 15 bp, Homo sapiens
tgtctacattctctc

SEQ ID NO: 661780 - DNA, 15 bp, Homo sapiens
gtctacattctctca

SEQ ID NO: 661781 - DNA, 15 bp, Homo sapiens
tctacattctctcat

SEQ ID NO: 661782 - DNA, 15 bp, Homo sapiens
ctacattctctcatc

SEQ ID NO: 661783 - DNA, 15 bp, Homo sapiens
tacattctctcatca

SEQ ID NO: 661784 - DNA, 15 bp, Homo sapiens
acattctctcatcag

SEQ ID NO: 661785 - DNA, 15 bp, Homo sapiens
cattctctcatcaga

SEQ ID NO: 661786 - DNA, 15 bp, Homo sapiens
attctctcatcagaa

SEQ ID NO: 661787 - DNA, 15 bp, Homo sapiens
ttctctcatcagaac

SEQ ID NO: 661788 - DNA, 15 bp, Homo sapiens
tctctcatcagaact

SEQ ID NO: 661789 - DNA, 15 bp, Homo sapiens
ctctcatcagaactc

SEQ ID NO: 661790 - DNA, 15 bp, Homo sapiens
tctcatcagaactcc

SEQ ID NO: 661791 - DNA, 15 bp, Homo sapiens
ctcatcagaactcct

SEQ ID NO: 661792 - DNA, 15 bp, Homo sapiens
tcatcagaactccta

SEQ ID NO: 661793 - DNA, 15 bp, Homo sapiens
catcagaactcctac

SEQ ID NO: 661794 - DNA, 15 bp, Homo sapiens
atcagaactcctact

SEQ ID NO: 661795 - DNA, 15 bp, Homo sapiens
tcagaactcctacta

SEQ ID NO: 661796 - DNA, 15 bp, Homo sapiens
cagaactcctactac

SEQ ID NO: 661797 - DNA, 15 bp, Homo sapiens
agaactcctactact

SEQ ID NO: 661798 - DNA, 15 bp, Homo sapiens
gaactcctactactc

SEQ ID NO: 661799 - DNA, 15 bp, Homo sapiens
aactcctactactca

SEQ ID NO: 661800 - DNA, 15 bp, Homo sapiens
actcctactactcag

SEQ ID NO: 661801 - DNA, 15 bp, Homo sapiens
ctcctactactcaga

SEQ ID NO: 661802 - DNA, 15 bp, Homo sapiens
tcctactactcagag

SEQ ID NO: 661803 - DNA, 15 bp, Homo sapiens
cctactactcagagt

SEQ ID NO: 661804 - DNA, 15 bp, Homo sapiens
ctactactcagagtc

SEQ ID NO: 661805 - DNA, 15 bp, Homo sapiens
tactactcagagtca

SEQ ID NO: 661806 - DNA, 15 bp, Homo sapiens
actactcagagtcaa

SEQ ID NO: 661807 - DNA, 15 bp, Homo sapiens
ctactcagagtcaaa

SEQ ID NO: 661808 - DNA, 15 bp, Homo sapiens
tactcagagtcaaaa

SEQ ID NO: 661809 - DNA, 15 bp, Homo sapiens
actcagagtcaaaag

SEQ ID NO: 661810 - DNA, 15 bp, Homo sapiens
ctcagagtcaaaagc

SEQ ID NO: 661811 - DNA, 15 bp, Homo sapiens
tcagagtcaaaagct

SEQ ID NO: 661812 - DNA, 15 bp, Homo sapiens
cagagtcaaaagctt

SEQ ID NO: 661813 - DNA, 15 bp, Homo sapiens
agagtcaaaagcttc

SEQ ID NO: 661814 - DNA, 15 bp, Homo sapiens
gagtcaaaagcttca

SEQ ID NO: 661815 - DNA, 15 bp, Homo sapiens
agtcaaaagcttcac

SEQ ID NO: 661816 - DNA, 15 bp, Homo sapiens
gtcaaaagcttcact

SEQ ID NO: 661817 - DNA, 15 bp, Homo sapiens
tcaaaagcttcactt

SEQ ID NO: 661818 - DNA, 15 bp, Homo sapiens
caaaagcttcacttc

SEQ ID NO: 661819 - DNA, 15 bp, Homo sapiens
aaaagcttcacttct

SEQ ID NO: 661820 - DNA, 15 bp, Homo sapiens
aaagcttcacttctt

SEQ ID NO: 661821 - DNA, 15 bp, Homo sapiens
aagcttcacttcttt

SEQ ID NO: 661822 - DNA, 15 bp, Homo sapiens
agcttcacttctttc

SEQ ID NO: 661823 - DNA, 15 bp, Homo sapiens
gcttcacttctttcc

SEQ ID NO: 661824 - DNA, 15 bp, Homo sapiens
cttcacttctttcct

SEQ ID NO: 661825 - DNA, 15 bp, Homo sapiens
ttcacttctttcctt

SEQ ID NO: 661826 - DNA, 15 bp, Homo sapiens
tcacttctttccttc

SEQ ID NO: 661827 - DNA, 15 bp, Homo sapiens
cacttctttccttct

SEQ ID NO: 661828 - DNA, 15 bp, Homo sapiens
acttctttccttcta

SEQ ID NO: 661829 - DNA, 15 bp, Homo sapiens
cttctttccttctat

SEQ ID NO: 661830 - DNA, 15 bp, Homo sapiens
ttctttccttctatc

SEQ ID NO: 661831 - DNA, 15 bp, Homo sapiens
tctttccttctatcc

SEQ ID NO: 661832 - DNA, 15 bp, Homo sapiens
ctttccttctatcct

SEQ ID NO: 661833 - DNA, 15 bp, Homo sapiens
tttccttctatcctt

SEQ ID NO: 661834 - DNA, 15 bp, Homo sapiens
ttccttctatcctta

SEQ ID NO: 661835 - DNA, 15 bp, Homo sapiens
tccttctatccttat

SEQ ID NO: 661836 - DNA, 15 bp, Homo sapiens
ccttctatccttatc

SEQ ID NO: 661837 - DNA, 15 bp, Homo sapiens
cttctatccttatca

SEQ ID NO: 661838 - DNA, 15 bp, Homo sapiens
ttctatccttatcat

SEQ ID NO: 661839 - DNA, 15 bp, Homo sapiens
tctatccttatcata

SEQ ID NO: 661840 - DNA, 15 bp, Homo sapiens
ctatccttatcatat

SEQ ID NO: 661841 - DNA, 15 bp, Homo sapiens
tatccttatcatatg

SEQ ID NO: 661842 - DNA, 15 bp, Homo sapiens
atccttatcatatgg

SEQ ID NO: 661843 - DNA, 15 bp, Homo sapiens
tccttatcatatgga

SEQ ID NO: 661844 - DNA, 15 bp, Homo sapiens
ccttatcatatggaa

SEQ ID NO: 661845 - DNA, 15 bp, Homo sapiens
cttatcatatggaag

SEQ ID NO: 661846 - DNA, 15 bp, Homo sapiens
ttatcatatggaagc

SEQ ID NO: 661847 - DNA, 15 bp, Homo sapiens
tatcatatggaagct

SEQ ID NO: 661848 - DNA, 15 bp, Homo sapiens
atcatatggaagctg

SEQ ID NO: 661849 - DNA, 15 bp, Homo sapiens
tcatatggaagctgc

SEQ ID NO: 661850 - DNA, 15 bp, Homo sapiens
catatggaagctgct

SEQ ID NO: 661851 - DNA, 15 bp, Homo sapiens
atatggaagctgcta

SEQ ID NO: 661852 - DNA, 15 bp, Homo sapiens
tatggaagctgctac

SEQ ID NO: 661853 - DNA, 15 bp, Homo sapiens
atggaagctgctaca

SEQ ID NO: 661854 - DNA, 15 bp, Homo sapiens
tggaagctgctacaa

SEQ ID NO: 661855 - DNA, 15 bp, Homo sapiens
ggaagctgctacaat

SEQ ID NO: 661856 - DNA, 15 bp, Homo sapiens
gaagctgctacaata

SEQ ID NO: 661857 - DNA, 15 bp, Homo sapiens
aagctgctacaatac

SEQ ID NO: 661858 - DNA, 15 bp, Homo sapiens
agctgctacaatacc

SEQ ID NO: 661859 - DNA, 15 bp, Homo sapiens
gctgctacaatacct

SEQ ID NO: 661860 - DNA, 15 bp, Homo sapiens
ctgctacaatacctt

SEQ ID NO: 661861 - DNA, 15 bp, Homo sapiens
tgctacaataccttg

SEQ ID NO: 661862 - DNA, 15 bp, Homo sapiens
gctacaataccttga

SEQ ID NO: 661863 - DNA, 15 bp, Homo sapiens
ctacaataccttgag

SEQ ID NO: 661864 - DNA, 15 bp, Homo sapiens
tacaataccttgagg

SEQ ID NO: 661865 - DNA, 15 bp, Homo sapiens
acaataccttgaggg

SEQ ID NO: 661866 - DNA, 15 bp, Homo sapiens
caataccttgagggt

SEQ ID NO: 661867 - DNA, 15 bp, Homo sapiens
aataccttgagggtc

SEQ ID NO: 661868 - DNA, 15 bp, Homo sapiens
ataccttgagggtca

SEQ ID NO: 661869 - DNA, 15 bp, Homo sapiens
taccttgagggtcat

SEQ ID NO: 661870 - DNA, 15 bp, Homo sapiens
accttgagggtcatt

SEQ ID NO: 661871 - DNA, 15 bp, Homo sapiens
ccttgagggtcattt

SEQ ID NO: 661872 - DNA, 15 bp, Homo sapiens
cttgagggtcatttc

SEQ ID NO: 661873 - DNA, 15 bp, Homo sapiens
ttgagggtcatttca

SEQ ID NO: 661874 - DNA, 15 bp, Homo sapiens
tgagggtcatttcat

SEQ ID NO: 661875 - DNA, 15 bp, Homo sapiens
gagggtcatttcatt

SEQ ID NO: 661876 - DNA, 15 bp, Homo sapiens
agggtcatttcattc

SEQ ID NO: 661877 - DNA, 15 bp, Homo sapiens
gggtcatttcattcg

SEQ ID NO: 661878 - DNA, 15 bp, Homo sapiens
ggtcatttcattcgt

SEQ ID NO: 661879 - DNA, 15 bp, Homo sapiens
gtcatttcattcgtc

SEQ ID NO: 661880 - DNA, 15 bp, Homo sapiens
tcatttcattcgtca

SEQ ID NO: 661881 - DNA, 15 bp, Homo sapiens
catttcattcgtcag

SEQ ID NO: 661882 - DNA, 15 bp, Homo sapiens
atttcattcgtcagc

SEQ ID NO: 661883 - DNA, 15 bp, Homo sapiens
tttcattcgtcagcc

SEQ ID NO: 661884 - DNA, 15 bp, Homo sapiens
ttcattcgtcagcct

SEQ ID NO: 661885 - DNA, 15 bp, Homo sapiens
tcattcgtcagccta

SEQ ID NO: 661886 - DNA, 15 bp, Homo sapiens
cattcgtcagcctaa

SEQ ID NO: 661887 - DNA, 15 bp, Homo sapiens
attcgtcagcctaaa

SEQ ID NO: 661888 - DNA, 15 bp, Homo sapiens
ttcgtcagcctaaag

SEQ ID NO: 661889 - DNA, 15 bp, Homo sapiens
tcgtcagcctaaagg

SEQ ID NO: 661890 - DNA, 15 bp, Homo sapiens
cgtcagcctaaaggt

SEQ ID NO: 661891 - DNA, 15 bp, Homo sapiens
gtcagcctaaaggtt

SEQ ID NO: 661892 - DNA, 15 bp, Homo sapiens
tcagcctaaaggtta

SEQ ID NO: 661893 - DNA, 15 bp, Homo sapiens
cagcctaaaggttac

SEQ ID NO: 661894 - DNA, 15 bp, Homo sapiens
agcctaaaggttact

SEQ ID NO: 661895 - DNA, 15 bp, Homo sapiens
gcctaaaggttacta

SEQ ID NO: 661896 - DNA, 15 bp, Homo sapiens
cctaaaggttactaa

SEQ ID NO: 661897 - DNA, 15 bp, Homo sapiens
ctaaaggttactaaa

SEQ ID NO: 661898 - DNA, 15 bp, Homo sapiens
taaaggttactaaat

SEQ ID NO: 661899 - DNA, 15 bp, Homo sapiens
aaaggttactaaatg

SEQ ID NO: 661900 - DNA, 15 bp, Homo sapiens
aaggttactaaatgt

SEQ ID NO: 661901 - DNA, 15 bp, Homo sapiens
aggttactaaatgta

SEQ ID NO: 661902 - DNA, 15 bp, Homo sapiens
ggttactaaatgtag

SEQ ID NO: 661903 - DNA, 15 bp, Homo sapiens
gttactaaatgtagc

SEQ ID NO: 661904 - DNA, 15 bp, Homo sapiens
ttactaaatgtagct

SEQ ID NO: 661905 - DNA, 15 bp, Homo sapiens
tactaaatgtagctt

SEQ ID NO: 661906 - DNA, 15 bp, Homo sapiens
actaaatgtagcttt

SEQ ID NO: 661907 - DNA, 15 bp, Homo sapiens
ctaaatgtagctttt

SEQ ID NO: 661908 - DNA, 15 bp, Homo sapiens
taaatgtagctttta

SEQ ID NO: 661909 - DNA, 15 bp, Homo sapiens
aaatgtagcttttat

SEQ ID NO: 661910 - DNA, 15 bp, Homo sapiens
aatgtagcttttata

SEQ ID NO: 661911 - DNA, 15 bp, Homo sapiens
atgtagcttttatat

SEQ ID NO: 661912 - DNA, 15 bp, Homo sapiens
tgtagcttttatata

SEQ ID NO: 661913 - DNA, 15 bp, Homo sapiens
gtagcttttatataa

SEQ ID NO: 661914 - DNA, 15 bp, Homo sapiens
tagcttttatataaa

SEQ ID NO: 661915 - DNA, 15 bp, Homo sapiens
agcttttatataaac

SEQ ID NO: 661916 - DNA, 15 bp, Homo sapiens
gcttttatataaaca

SEQ ID NO: 661917 - DNA, 15 bp, Homo sapiens
cttttatataaacag

SEQ ID NO: 661918 - DNA, 15 bp, Homo sapiens
ttttatataaacagg

SEQ ID NO: 661919 - DNA, 15 bp, Homo sapiens
tttatataaacaggc

SEQ ID NO: 661920 - DNA, 15 bp, Homo sapiens
ttatataaacaggca

SEQ ID NO: 661921 - DNA, 15 bp, Homo sapiens
tatataaacaggcat

SEQ ID NO: 661922 - DNA, 15 bp, Homo sapiens
atataaacaggcatc

SEQ ID NO: 661923 - DNA, 15 bp, Homo sapiens
tataaacaggcatcc

SEQ ID NO: 661924 - DNA, 15 bp, Homo sapiens
ataaacaggcatcca

SEQ ID NO: 661925 - DNA, 15 bp, Homo sapiens
taaacaggcatccag

SEQ ID NO: 661926 - DNA, 15 bp, Homo sapiens
aaacaggcatccagt

SEQ ID NO: 661927 - DNA, 15 bp, Homo sapiens
aacaggcatccagtt

SEQ ID NO: 661928 - DNA, 15 bp, Homo sapiens
acaggcatccagtta

SEQ ID NO: 661929 - DNA, 15 bp, Homo sapiens
caggcatccagttaa

SEQ ID NO: 661930 - DNA, 15 bp, Homo sapiens
aggcatccagttaac

SEQ ID NO: 661931 - DNA, 15 bp, Homo sapiens
ggcatccagttaaca

SEQ ID NO: 661932 - DNA, 15 bp, Homo sapiens
gcatccagttaacat

SEQ ID NO: 661933 - DNA, 15 bp, Homo sapiens
catccagttaacata

SEQ ID NO: 661934 - DNA, 15 bp, Homo sapiens
atccagttaacatag

SEQ ID NO: 661935 - DNA, 15 bp, Homo sapiens
tccagttaacatagt

SEQ ID NO: 661936 - DNA, 15 bp, Homo sapiens
ccagttaacatagtg

SEQ ID NO: 661937 - DNA, 15 bp, Homo sapiens
cagttaacatagtgg

SEQ ID NO: 661938 - DNA, 15 bp, Homo sapiens
agttaacatagtgga

SEQ ID NO: 661939 - DNA, 15 bp, Homo sapiens
gttaacatagtggag

SEQ ID NO: 661940 - DNA, 15 bp, Homo sapiens
ttaacatagtggaga

SEQ ID NO: 661941 - DNA, 15 bp, Homo sapiens
taacatagtggagat

SEQ ID NO: 661942 - DNA, 15 bp, Homo sapiens
aacatagtggagatt

SEQ ID NO: 661943 - DNA, 15 bp, Homo sapiens
acatagtggagatta

SEQ ID NO: 661944 - DNA, 15 bp, Homo sapiens
catagtggagattac

SEQ ID NO: 661945 - DNA, 15 bp, Homo sapiens
atagtggagattaca

SEQ ID NO: 661946 - DNA, 15 bp, Homo sapiens
tagtggagattacaa

SEQ ID NO: 661947 - DNA, 15 bp, Homo sapiens
agtggagattacaaa

SEQ ID NO: 661948 - DNA, 15 bp, Homo sapiens
gtggagattacaaag

SEQ ID NO: 661949 - DNA, 15 bp, Homo sapiens
tggagattacaaaga

SEQ ID NO: 661950 - DNA, 15 bp, Homo sapiens
ggagattacaaagac

SEQ ID NO: 661951 - DNA, 15 bp, Homo sapiens
gagattacaaagacc

SEQ ID NO: 661952 - DNA, 15 bp, Homo sapiens
agattacaaagacca

SEQ ID NO: 661953 - DNA, 15 bp, Homo sapiens
gattacaaagaccat

SEQ ID NO: 661954 - DNA, 15 bp, Homo sapiens
attacaaagaccata

SEQ ID NO: 661955 - DNA, 15 bp, Homo sapiens
ttacaaagaccatac

SEQ ID NO: 661956 - DNA, 15 bp, Homo sapiens
tacaaagaccatacc

SEQ ID NO: 661957 - DNA, 15 bp, Homo sapiens
acaaagaccataccc

SEQ ID NO: 661958 - DNA, 15 bp, Homo sapiens
caaagaccataccca

SEQ ID NO: 661959 - DNA, 15 bp, Homo sapiens
aaagaccatacccag

SEQ ID NO: 661960 - DNA, 15 bp, Homo sapiens
aagaccatacccagc

SEQ ID NO: 661961 - DNA, 15 bp, Homo sapiens
agaccatacccagca

SEQ ID NO: 661962 - DNA, 15 bp, Homo sapiens
gaccatacccagcag

SEQ ID NO: 661963 - DNA, 15 bp, Homo sapiens
accatacccagcagg

SEQ ID NO: 661964 - DNA, 15 bp, Homo sapiens
ccatacccagcagga

SEQ ID NO: 661965 - DNA, 15 bp, Homo sapiens
catacccagcaggag

SEQ ID NO: 661966 - DNA, 15 bp, Homo sapiens
atacccagcaggagg

SEQ ID NO: 661967 - DNA, 15 bp, Homo sapiens
tacccagcaggaggt

SEQ ID NO: 661968 - DNA, 15 bp, Homo sapiens
acccagcaggaggtc

SEQ ID NO: 661969 - DNA, 15 bp, Homo sapiens
cccagcaggaggtca

SEQ ID NO: 661970 - DNA, 15 bp, Homo sapiens
ccagcaggaggtcag

SEQ ID NO: 661971 - DNA, 15 bp, Homo sapiens
cagcaggaggtcagt

SEQ ID NO: 661972 - DNA, 15 bp, Homo sapiens
agcaggaggtcagtg

SEQ ID NO: 661973 - DNA, 15 bp, Homo sapiens
gcaggaggtcagtgg

SEQ ID NO: 661974 - DNA, 15 bp, Homo sapiens
caggaggtcagtgga

SEQ ID NO: 661975 - DNA, 15 bp, Homo sapiens
aggaggtcagtggat

SEQ ID NO: 661976 - DNA, 15 bp, Homo sapiens
ggaggtcagtggatt

SEQ ID NO: 661977 - DNA, 15 bp, Homo sapiens
gaggtcagtggattt

SEQ ID NO: 661978 - DNA, 15 bp, Homo sapiens
aggtcagtggatttt

SEQ ID NO: 661979 - DNA, 15 bp, Homo sapiens
ggtcagtggattttg

SEQ ID NO: 661980 - DNA, 15 bp, Homo sapiens
gtcagtggattttga

SEQ ID NO: 661981 - DNA, 15 bp, Homo sapiens
tcagtggattttgat

SEQ ID NO: 661982 - DNA, 15 bp, Homo sapiens
cagtggattttgata

SEQ ID NO: 661983 - DNA, 15 bp, Homo sapiens
agtggattttgatat

SEQ ID NO: 661984 - DNA, 15 bp, Homo sapiens
gtggattttgatatt

SEQ ID NO: 661985 - DNA, 15 bp, Homo sapiens
tggattttgatattc

SEQ ID NO: 661986 - DNA, 15 bp, Homo sapiens
ggattttgatattct

SEQ ID NO: 661987 - DNA, 15 bp, Homo sapiens
gattttgatattctc

SEQ ID NO: 661988 - DNA, 15 bp, Homo sapiens
attttgatattctcc

SEQ ID NO: 661989 - DNA, 15 bp, Homo sapiens
ttttgatattctcct

SEQ ID NO: 661990 - DNA, 15 bp, Homo sapiens
tttgatattctcctt

SEQ ID NO: 661991 - DNA, 15 bp, Homo sapiens
ttgatattctccttt

SEQ ID NO: 661992 - DNA, 15 bp, Homo sapiens
tgatattctcctttt

SEQ ID NO: 661993 - DNA, 15 bp, Homo sapiens
gatattctccttttt

SEQ ID NO: 661994 - DNA, 15 bp, Homo sapiens
atattctcctttttc

SEQ ID NO: 661995 - DNA, 15 bp, Homo sapiens
tattctcctttttcc

SEQ ID NO: 661996 - DNA, 15 bp, Homo sapiens
attctcctttttccc

SEQ ID NO: 661997 - DNA, 15 bp, Homo sapiens
ttctcctttttccca

SEQ ID NO: 661998 - DNA, 15 bp, Homo sapiens
tctcctttttcccaa

SEQ ID NO: 661999 - DNA, 15 bp, Homo sapiens
ctcctttttcccaaa

SEQ ID NO: 662000 - DNA, 15 bp, Homo sapiens
tcctttttcccaaag

SEQ ID NO: 662001 - DNA, 15 bp, Homo sapiens
cctttttcccaaagg

SEQ ID NO: 662002 - DNA, 15 bp, Homo sapiens
ctttttcccaaaggg

SEQ ID NO: 662003 - DNA, 15 bp, Homo sapiens
tttttcccaaaggga

SEQ ID NO: 662004 - DNA, 15 bp, Homo sapiens
ttttcccaaagggaa

SEQ ID NO: 662005 - DNA, 15 bp, Homo sapiens
tttcccaaagggaag

SEQ ID NO: 662006 - DNA, 15 bp, Homo sapiens
ttcccaaagggaaga

SEQ ID NO: 662007 - DNA, 15 bp, Homo sapiens
tcccaaagggaagag

SEQ ID NO: 662008 - DNA, 15 bp, Homo sapiens
cccaaagggaagagg

SEQ ID NO: 662009 - DNA, 15 bp, Homo sapiens
ccaaagggaagaggc

SEQ ID NO: 662010 - DNA, 15 bp, Homo sapiens
caaagggaagaggct

SEQ ID NO: 662011 - DNA, 15 bp, Homo sapiens
aaagggaagaggctt

SEQ ID NO: 662012 - DNA, 15 bp, Homo sapiens
aagggaagaggcttc

SEQ ID NO: 662013 - DNA, 15 bp, Homo sapiens
agggaagaggcttcc

SEQ ID NO: 662014 - DNA, 15 bp, Homo sapiens
gggaagaggcttccc

SEQ ID NO: 662015 - DNA, 15 bp, Homo sapiens
ggaagaggcttccca

SEQ ID NO: 662016 - DNA, 15 bp, Homo sapiens
gaagaggcttcccat

SEQ ID NO: 662017 - DNA, 15 bp, Homo sapiens
aagaggcttcccatt

SEQ ID NO: 662018 - DNA, 15 bp, Homo sapiens
agaggcttcccattg

SEQ ID NO: 662019 - DNA, 15 bp, Homo sapiens
gaggcttcccattgg

SEQ ID NO: 662020 - DNA, 15 bp, Homo sapiens
aggcttcccattggg

SEQ ID NO: 662021 - DNA, 15 bp, Homo sapiens
ggcttcccattgggg

SEQ ID NO: 662022 - DNA, 15 bp, Homo sapiens
gcttcccattggggt

SEQ ID NO: 662023 - DNA, 15 bp, Homo sapiens
cttcccattggggtt

SEQ ID NO: 662024 - DNA, 15 bp, Homo sapiens
ttcccattggggtta

SEQ ID NO: 662025 - DNA, 15 bp, Homo sapiens
tcccattggggttac

SEQ ID NO: 662026 - DNA, 15 bp, Homo sapiens
cccattggggttaca

SEQ ID NO: 662027 - DNA, 15 bp, Homo sapiens
ccattggggttacaa

SEQ ID NO: 662028 - DNA, 15 bp, Homo sapiens
cattggggttacaaa

SEQ ID NO: 662029 - DNA, 15 bp, Homo sapiens
attggggttacaaag

SEQ ID NO: 662030 - DNA, 15 bp, Homo sapiens
ttggggttacaaagt

SEQ ID NO: 662031 - DNA, 15 bp, Homo sapiens
tggggttacaaagta

SEQ ID NO: 662032 - DNA, 15 bp, Homo sapiens
ggggttacaaagtag

SEQ ID NO: 662033 - DNA, 15 bp, Homo sapiens
gggttacaaagtagc

SEQ ID NO: 662034 - DNA, 15 bp, Homo sapiens
ggttacaaagtagca

SEQ ID NO: 662035 - DNA, 15 bp, Homo sapiens
gttacaaagtagcag

SEQ ID NO: 662036 - DNA, 15 bp, Homo sapiens
ttacaaagtagcagg

SEQ ID NO: 662037 - DNA, 15 bp, Homo sapiens
tacaaagtagcaggt

SEQ ID NO: 662038 - DNA, 15 bp, Homo sapiens
acaaagtagcaggta

SEQ ID NO: 662039 - DNA, 15 bp, Homo sapiens
caaagtagcaggtac

SEQ ID NO: 662040 - DNA, 15 bp, Homo sapiens
aaagtagcaggtact

SEQ ID NO: 662041 - DNA, 15 bp, Homo sapiens
aagtagcaggtactt

SEQ ID NO: 662042 - DNA, 15 bp, Homo sapiens
agtagcaggtacttg

SEQ ID NO: 662043 - DNA, 15 bp, Homo sapiens
gtagcaggtacttgg

SEQ ID NO: 662044 - DNA, 15 bp, Homo sapiens
tagcaggtacttggc

SEQ ID NO: 662045 - DNA, 15 bp, Homo sapiens
agcaggtacttggct

SEQ ID NO: 662046 - DNA, 15 bp, Homo sapiens
gcaggtacttggctg

SEQ ID NO: 662047 - DNA, 15 bp, Homo sapiens
caggtacttggctgg

SEQ ID NO: 662048 - DNA, 15 bp, Homo sapiens
aggtacttggctgga

SEQ ID NO: 662049 - DNA, 15 bp, Homo sapiens
ggtacttggctggaa

SEQ ID NO: 662050 - DNA, 15 bp, Homo sapiens
gtacttggctggaag

SEQ ID NO: 662051 - DNA, 15 bp, Homo sapiens
tacttggctggaagg

SEQ ID NO: 662052 - DNA, 15 bp, Homo sapiens
acttggctggaaggc

SEQ ID NO: 662053 - DNA, 15 bp, Homo sapiens
cttggctggaaggct

SEQ ID NO: 662054 - DNA, 15 bp, Homo sapiens
ttggctggaaggctg

SEQ ID NO: 662055 - DNA, 15 bp, Homo sapiens
tggctggaaggctga

SEQ ID NO: 662056 - DNA, 15 bp, Homo sapiens
ggctggaaggctgag

SEQ ID NO: 662057 - DNA, 15 bp, Homo sapiens
gctggaaggctgaga

SEQ ID NO: 662058 - DNA, 15 bp, Homo sapiens
ctggaaggctgagaa

SEQ ID NO: 662059 - DNA, 15 bp, Homo sapiens
tggaaggctgagaag

SEQ ID NO: 662060 - DNA, 15 bp, Homo sapiens
ggaaggctgagaaga

SEQ ID NO: 662061 - DNA, 15 bp, Homo sapiens
gaaggctgagaagag

SEQ ID NO: 662062 - DNA, 15 bp, Homo sapiens
aaggctgagaagaga

SEQ ID NO: 662063 - DNA, 15 bp, Homo sapiens
aggctgagaagagag

SEQ ID NO: 662064 - DNA, 15 bp, Homo sapiens
ggctgagaagagaga

SEQ ID NO: 662065 - DNA, 15 bp, Homo sapiens
gctgagaagagagaa

SEQ ID NO: 662066 - DNA, 15 bp, Homo sapiens
ctgagaagagagaat

SEQ ID NO: 662067 - DNA, 15 bp, Homo sapiens
tgagaagagagaatg

SEQ ID NO: 662068 - DNA, 15 bp, Homo sapiens
gagaagagagaatgg

SEQ ID NO: 662069 - DNA, 15 bp, Homo sapiens
agaagagagaatgga

SEQ ID NO: 662070 - DNA, 15 bp, Homo sapiens
gaagagagaatggag

SEQ ID NO: 662071 - DNA, 15 bp, Homo sapiens
aagagagaatggagg

SEQ ID NO: 662072 - DNA, 15 bp, Homo sapiens
agagagaatggaggc

SEQ ID NO: 662073 - DNA, 15 bp, Homo sapiens
gagagaatggaggct

SEQ ID NO: 662074 - DNA, 15 bp, Homo sapiens
agagaatggaggctg

SEQ ID NO: 662075 - DNA, 15 bp, Homo sapiens
gagaatggaggctgc

SEQ ID NO: 662076 - DNA, 15 bp, Homo sapiens
agaatggaggctgcc

SEQ ID NO: 662077 - DNA, 15 bp, Homo sapiens
gaatggaggctgccc

SEQ ID NO: 662078 - DNA, 15 bp, Homo sapiens
aatggaggctgccct

SEQ ID NO: 662079 - DNA, 15 bp, Homo sapiens
atggaggctgccctg

SEQ ID NO: 662080 - DNA, 15 bp, Homo sapiens
tggaggctgccctgt

SEQ ID NO: 662081 - DNA, 15 bp, Homo sapiens
ggaggctgccctgtt

SEQ ID NO: 662082 - DNA, 15 bp, Homo sapiens
gaggctgccctgttg

SEQ ID NO: 662083 - DNA, 15 bp, Homo sapiens
aggctgccctgttga

SEQ ID NO: 662084 - DNA, 15 bp, Homo sapiens
ggctgccctgttgaa

SEQ ID NO: 662085 - DNA, 15 bp, Homo sapiens
gctgccctgttgaaa

SEQ ID NO: 662086 - DNA, 15 bp, Homo sapiens
ctgccctgttgaaag

SEQ ID NO: 662087 - DNA, 15 bp, Homo sapiens
tgccctgttgaaaga

SEQ ID NO: 662088 - DNA, 15 bp, Homo sapiens
gccctgttgaaagac

SEQ ID NO: 662089 - DNA, 15 bp, Homo sapiens
ccctgttgaaagact

SEQ ID NO: 662090 - DNA, 15 bp, Homo sapiens
cctgttgaaagactg

SEQ ID NO: 662091 - DNA, 15 bp, Homo sapiens
ctgttgaaagactgt

SEQ ID NO: 662092 - DNA, 15 bp, Homo sapiens
tgttgaaagactgtg

SEQ ID NO: 662093 - DNA, 15 bp, Homo sapiens
gttgaaagactgtgt

SEQ ID NO: 662094 - DNA, 15 bp, Homo sapiens
ttgaaagactgtgta

SEQ ID NO: 662095 - DNA, 15 bp, Homo sapiens
tgaaagactgtgtat

SEQ ID NO: 662096 - DNA, 15 bp, Homo sapiens
gaaagactgtgtatc

SEQ ID NO: 662097 - DNA, 15 bp, Homo sapiens
aaagactgtgtatca

SEQ ID NO: 662098 - DNA, 15 bp, Homo sapiens
aagactgtgtatcag

SEQ ID NO: 662099 - DNA, 15 bp, Homo sapiens
agactgtgtatcaga

SEQ ID NO: 662100 - DNA, 15 bp, Homo sapiens
gactgtgtatcagaa

SEQ ID NO: 662101 - DNA, 15 bp, Homo sapiens
actgtgtatcagaaa

SEQ ID NO: 662102 - DNA, 15 bp, Homo sapiens
ctgtgtatcagaaag

SEQ ID NO: 662103 - DNA, 15 bp, Homo sapiens
tgtgtatcagaaagg

SEQ ID NO: 662104 - DNA, 15 bp, Homo sapiens
gtgtatcagaaagga

SEQ ID NO: 662105 - DNA, 15 bp, Homo sapiens
tgtatcagaaaggaa

SEQ ID NO: 662106 - DNA, 15 bp, Homo sapiens
gtatcagaaaggaat

SEQ ID NO: 662107 - DNA, 15 bp, Homo sapiens
tatcagaaaggaatg

SEQ ID NO: 662108 - DNA, 15 bp, Homo sapiens
atcagaaaggaatgt

SEQ ID NO: 662109 - DNA, 15 bp, Homo sapiens
tcagaaaggaatgtt

SEQ ID NO: 662110 - DNA, 15 bp, Homo sapiens
cagaaaggaatgttt

SEQ ID NO: 662111 - DNA, 15 bp, Homo sapiens
agaaaggaatgttta

SEQ ID NO: 662112 - DNA, 15 bp, Homo sapiens
gaaaggaatgtttaa

SEQ ID NO: 662113 - DNA, 15 bp, Homo sapiens
aaaggaatgtttaaa

SEQ ID NO: 662114 - DNA, 15 bp, Homo sapiens
aaggaatgtttaaat

SEQ ID NO: 662115 - DNA, 15 bp, Homo sapiens
aggaatgtttaaatc

SEQ ID NO: 662116 - DNA, 15 bp, Homo sapiens
ggaatgtttaaatcc

SEQ ID NO: 662117 - DNA, 15 bp, Homo sapiens
gaatgtttaaatcct

SEQ ID NO: 662118 - DNA, 15 bp, Homo sapiens
aatgtttaaatcctg

SEQ ID NO: 662119 - DNA, 15 bp, Homo sapiens
atgtttaaatcctga

SEQ ID NO: 662120 - DNA, 15 bp, Homo sapiens
tgtttaaatcctgaa

SEQ ID NO: 662121 - DNA, 15 bp, Homo sapiens
gtttaaatcctgaac

SEQ ID NO: 662122 - DNA, 15 bp, Homo sapiens
tttaaatcctgaact

SEQ ID NO: 662123 - DNA, 15 bp, Homo sapiens
ttaaatcctgaactt

SEQ ID NO: 662124 - DNA, 15 bp, Homo sapiens
taaatcctgaactta

SEQ ID NO: 662125 - DNA, 15 bp, Homo sapiens
aaatcctgaacttag

SEQ ID NO: 662126 - DNA, 15 bp, Homo sapiens
aatcctgaacttagg

SEQ ID NO: 662127 - DNA, 15 bp, Homo sapiens
atcctgaacttaggc

SEQ ID NO: 662128 - DNA, 15 bp, Homo sapiens
tcctgaacttaggcc

SEQ ID NO: 662129 - DNA, 15 bp, Homo sapiens
cctgaacttaggccc

SEQ ID NO: 662130 - DNA, 15 bp, Homo sapiens
ctgaacttaggccct

SEQ ID NO: 662131 - DNA, 15 bp, Homo sapiens
tgaacttaggccctc

SEQ ID NO: 662132 - DNA, 15 bp, Homo sapiens
gaacttaggccctca

SEQ ID NO: 662133 - DNA, 15 bp, Homo sapiens
aacttaggccctcac

SEQ ID NO: 662134 - DNA, 15 bp, Homo sapiens
acttaggccctcact

SEQ ID NO: 662135 - DNA, 15 bp, Homo sapiens
cttaggccctcactt

SEQ ID NO: 662136 - DNA, 15 bp, Homo sapiens
ttaggccctcacttc

SEQ ID NO: 662137 - DNA, 15 bp, Homo sapiens
taggccctcacttct

SEQ ID NO: 662138 - DNA, 15 bp, Homo sapiens
aggccctcacttctg

SEQ ID NO: 662139 - DNA, 15 bp, Homo sapiens
ggccctcacttctgc

SEQ ID NO: 662140 - DNA, 15 bp, Homo sapiens
gccctcacttctgct

SEQ ID NO: 662141 - DNA, 15 bp, Homo sapiens
ccctcacttctgctt

SEQ ID NO: 662142 - DNA, 15 bp, Homo sapiens
cctcacttctgcttg

SEQ ID NO: 662143 - DNA, 15 bp, Homo sapiens
ctcacttctgcttga

SEQ ID NO: 662144 - DNA, 15 bp, Homo sapiens
tcacttctgcttgag

SEQ ID NO: 662145 - DNA, 15 bp, Homo sapiens
cacttctgcttgagc

SEQ ID NO: 662146 - DNA, 15 bp, Homo sapiens
acttctgcttgagca

SEQ ID NO: 662147 - DNA, 15 bp, Homo sapiens
cttctgcttgagcag

SEQ ID NO: 662148 - DNA, 15 bp, Homo sapiens
ttctgcttgagcaga

SEQ ID NO: 662149 - DNA, 15 bp, Homo sapiens
tctgcttgagcagag

SEQ ID NO: 662150 - DNA, 15 bp, Homo sapiens
ctgcttgagcagagc

SEQ ID NO: 662151 - DNA, 15 bp, Homo sapiens
tgcttgagcagagca

SEQ ID NO: 662152 - DNA, 15 bp, Homo sapiens
gcttgagcagagcag

SEQ ID NO: 662153 - DNA, 15 bp, Homo sapiens
cttgagcagagcaga

SEQ ID NO: 662154 - DNA, 15 bp, Homo sapiens
ttgagcagagcagag

SEQ ID NO: 662155 - DNA, 15 bp, Homo sapiens
tgagcagagcagagc

SEQ ID NO: 662156 - DNA, 15 bp, Homo sapiens
gagcagagcagagct

SEQ ID NO: 662157 - DNA, 15 bp, Homo sapiens
agcagagcagagcta

SEQ ID NO: 662158 - DNA, 15 bp, Homo sapiens
gcagagcagagctac

SEQ ID NO: 662159 - DNA, 15 bp, Homo sapiens
cagagcagagctact

SEQ ID NO: 662160 - DNA, 15 bp, Homo sapiens
agagcagagctactt

SEQ ID NO: 662161 - DNA, 15 bp, Homo sapiens
gagcagagctactta

SEQ ID NO: 662162 - DNA, 15 bp, Homo sapiens
agcagagctacttat

SEQ ID NO: 662163 - DNA, 15 bp, Homo sapiens
gcagagctacttatg

SEQ ID NO: 662164 - DNA, 15 bp, Homo sapiens
cagagctacttatgc

SEQ ID NO: 662165 - DNA, 15 bp, Homo sapiens
agagctacttatgcc

SEQ ID NO: 662166 - DNA, 15 bp, Homo sapiens
gagctacttatgcct

SEQ ID NO: 662167 - DNA, 15 bp, Homo sapiens
agctacttatgccta

SEQ ID NO: 662168 - DNA, 15 bp, Homo sapiens
gctacttatgcctaa

SEQ ID NO: 662169 - DNA, 15 bp, Homo sapiens
ctacttatgcctaag

SEQ ID NO: 662170 - DNA, 15 bp, Homo sapiens
tacttatgcctaagt

SEQ ID NO: 662171 - DNA, 15 bp, Homo sapiens
acttatgcctaagta

SEQ ID NO: 662172 - DNA, 15 bp, Homo sapiens
cttatgcctaagtat

SEQ ID NO: 662173 - DNA, 15 bp, Homo sapiens
ttatgcctaagtatt

SEQ ID NO: 662174 - DNA, 15 bp, Homo sapiens
tatgcctaagtattg

SEQ ID NO: 662175 - DNA, 15 bp, Homo sapiens
atgcctaagtattgg

SEQ ID NO: 662176 - DNA, 15 bp, Homo sapiens
tgcctaagtattggc

SEQ ID NO: 662177 - DNA, 15 bp, Homo sapiens
gcctaagtattggca

SEQ ID NO: 662178 - DNA, 15 bp, Homo sapiens
cctaagtattggcat

SEQ ID NO: 662179 - DNA, 15 bp, Homo sapiens
ctaagtattggcata

SEQ ID NO: 662180 - DNA, 15 bp, Homo sapiens
taagtattggcataa

SEQ ID NO: 662181 - DNA, 15 bp, Homo sapiens
aagtattggcataag

SEQ ID NO: 662182 - DNA, 15 bp, Homo sapiens
agtattggcataagt

SEQ ID NO: 662183 - DNA, 15 bp, Homo sapiens
gtattggcataagtg

SEQ ID NO: 662184 - DNA, 15 bp, Homo sapiens
tattggcataagtga

SEQ ID NO: 662185 - DNA, 15 bp, Homo sapiens
attggcataagtgat

SEQ ID NO: 662186 - DNA, 15 bp, Homo sapiens
ttggcataagtgatg

SEQ ID NO: 662187 - DNA, 15 bp, Homo sapiens
tggcataagtgatgc

SEQ ID NO: 662188 - DNA, 15 bp, Homo sapiens
ggcataagtgatgcc

SEQ ID NO: 662189 - DNA, 15 bp, Homo sapiens
gcataagtgatgcct

SEQ ID NO: 662190 - DNA, 15 bp, Homo sapiens
cataagtgatgcctc

SEQ ID NO: 662191 - DNA, 15 bp, Homo sapiens
ataagtgatgcctcc

SEQ ID NO: 662192 - DNA, 15 bp, Homo sapiens
taagtgatgcctcca

SEQ ID NO: 662193 - DNA, 15 bp, Homo sapiens
aagtgatgcctccac

SEQ ID NO: 662194 - DNA, 15 bp, Homo sapiens
agtgatgcctccaca

SEQ ID NO: 662195 - DNA, 15 bp, Homo sapiens
gtgatgcctccacac

SEQ ID NO: 662196 - DNA, 15 bp, Homo sapiens
tgatgcctccacaca

SEQ ID NO: 662197 - DNA, 15 bp, Homo sapiens
gatgcctccacacag

SEQ ID NO: 662198 - DNA, 15 bp, Homo sapiens
atgcctccacacagc

SEQ ID NO: 662199 - DNA, 15 bp, Homo sapiens
tgcctccacacagct

SEQ ID NO: 662200 - DNA, 15 bp, Homo sapiens
gcctccacacagctt

SEQ ID NO: 662201 - DNA, 15 bp, Homo sapiens
cctccacacagcttt

SEQ ID NO: 662202 - DNA, 15 bp, Homo sapiens
ctccacacagctttc

SEQ ID NO: 662203 - DNA, 15 bp, Homo sapiens
tccacacagctttct

SEQ ID NO: 662204 - DNA, 15 bp, Homo sapiens
ccacacagctttctc

SEQ ID NO: 662205 - DNA, 15 bp, Homo sapiens
cacacagctttctca

SEQ ID NO: 662206 - DNA, 15 bp, Homo sapiens
acacagctttctcaa

SEQ ID NO: 662207 - DNA, 15 bp, Homo sapiens
cacagctttctcaaa

SEQ ID NO: 662208 - DNA, 15 bp, Homo sapiens
acagctttctcaaac

SEQ ID NO: 662209 - DNA, 15 bp, Homo sapiens
cagctttctcaaacc

SEQ ID NO: 662210 - DNA, 15 bp, Homo sapiens
agctttctcaaaccc

SEQ ID NO: 662211 - DNA, 15 bp, Homo sapiens
gctttctcaaaccca

SEQ ID NO: 662212 - DNA, 15 bp, Homo sapiens
ctttctcaaacccag

SEQ ID NO: 662213 - DNA, 15 bp, Homo sapiens
tttctcaaacccaga

SEQ ID NO: 662214 - DNA, 15 bp, Homo sapiens
ttctcaaacccagat

SEQ ID NO: 662215 - DNA, 15 bp, Homo sapiens
tctcaaacccagatg

SEQ ID NO: 662216 - DNA, 15 bp, Homo sapiens
ctcaaacccagatgt

SEQ ID NO: 662217 - DNA, 15 bp, Homo sapiens
tcaaacccagatgtg

SEQ ID NO: 662218 - DNA, 15 bp, Homo sapiens
caaacccagatgtga

SEQ ID NO: 662219 - DNA, 15 bp, Homo sapiens
aaacccagatgtgag

SEQ ID NO: 662220 - DNA, 15 bp, Homo sapiens
aacccagatgtgaga

SEQ ID NO: 662221 - DNA, 15 bp, Homo sapiens
acccagatgtgagac

SEQ ID NO: 662222 - DNA, 15 bp, Homo sapiens
cccagatgtgagaca

SEQ ID NO: 662223 - DNA, 15 bp, Homo sapiens
ccagatgtgagacaa

SEQ ID NO: 662224 - DNA, 15 bp, Homo sapiens
cagatgtgagacaaa

SEQ ID NO: 662225 - DNA, 15 bp, Homo sapiens
agatgtgagacaaag

SEQ ID NO: 662226 - DNA, 15 bp, Homo sapiens
gatgtgagacaaaga

SEQ ID NO: 662227 - DNA, 15 bp, Homo sapiens
atgtgagacaaagag

SEQ ID NO: 662228 - DNA, 15 bp, Homo sapiens
tgtgagacaaagaga

SEQ ID NO: 662229 - DNA, 15 bp, Homo sapiens
gtgagacaaagagag

SEQ ID NO: 662230 - DNA, 15 bp, Homo sapiens
tgagacaaagagagc

SEQ ID NO: 662231 - DNA, 15 bp, Homo sapiens
gagacaaagagagca

SEQ ID NO: 662232 - DNA, 15 bp, Homo sapiens
agacaaagagagcag

SEQ ID NO: 662233 - DNA, 15 bp, Homo sapiens
gacaaagagagcaga

SEQ ID NO: 662234 - DNA, 15 bp, Homo sapiens
acaaagagagcagac

SEQ ID NO: 662235 - DNA, 15 bp, Homo sapiens
caaagagagcagaca

SEQ ID NO: 662236 - DNA, 15 bp, Homo sapiens
aaagagagcagacag

SEQ ID NO: 662237 - DNA, 15 bp, Homo sapiens
aagagagcagacaga

SEQ ID NO: 662238 - DNA, 15 bp, Homo sapiens
agagagcagacagaa

SEQ ID NO: 662239 - DNA, 15 bp, Homo sapiens
gagagcagacagaag

SEQ ID NO: 662240 - DNA, 15 bp, Homo sapiens
agagcagacagaagg

SEQ ID NO: 662241 - DNA, 15 bp, Homo sapiens
gagcagacagaaggc

SEQ ID NO: 662242 - DNA, 15 bp, Homo sapiens
agcagacagaaggca

SEQ ID NO: 662243 - DNA, 15 bp, Homo sapiens
gcagacagaaggcaa

SEQ ID NO: 662244 - DNA, 15 bp, Homo sapiens
cagacagaaggcaag

SEQ ID NO: 662245 - DNA, 15 bp, Homo sapiens
agacagaaggcaagt

SEQ ID NO: 662246 - DNA, 15 bp, Homo sapiens
gacagaaggcaagtg

SEQ ID NO: 662247 - DNA, 15 bp, Homo sapiens
acagaaggcaagtgt

SEQ ID NO: 662248 - DNA, 15 bp, Homo sapiens
cagaaggcaagtgtc

SEQ ID NO: 662249 - DNA, 15 bp, Homo sapiens
agaaggcaagtgtcc

SEQ ID NO: 662250 - DNA, 15 bp, Homo sapiens
gaaggcaagtgtcca

SEQ ID NO: 662251 - DNA, 15 bp, Homo sapiens
aaggcaagtgtccag

SEQ ID NO: 662252 - DNA, 15 bp, Homo sapiens
aggcaagtgtccagg

SEQ ID NO: 662253 - DNA, 15 bp, Homo sapiens
ggcaagtgtccaggg

SEQ ID NO: 662254 - DNA, 15 bp, Homo sapiens
gcaagtgtccaggga

SEQ ID NO: 662255 - DNA, 15 bp, Homo sapiens
caagtgtccagggaa

SEQ ID NO: 662256 - DNA, 15 bp, Homo sapiens
aagtgtccagggaaa

SEQ ID NO: 662257 - DNA, 15 bp, Homo sapiens
agtgtccagggaaat

SEQ ID NO: 662258 - DNA, 15 bp, Homo sapiens
gtgtccagggaaata

SEQ ID NO: 662259 - DNA, 15 bp, Homo sapiens
tgtccagggaaataa

SEQ ID NO: 662260 - DNA, 15 bp, Homo sapiens
gtccagggaaataaa

SEQ ID NO: 662261 - DNA, 15 bp, Homo sapiens
tccagggaaataaaa

SEQ ID NO: 662262 - DNA, 15 bp, Homo sapiens
ccagggaaataaaat

SEQ ID NO: 662263 - DNA, 15 bp, Homo sapiens
cagggaaataaaatg

SEQ ID NO: 662264 - DNA, 15 bp, Homo sapiens
agggaaataaaatgg

SEQ ID NO: 662265 - DNA, 15 bp, Homo sapiens
gggaaataaaatggc

SEQ ID NO: 662266 - DNA, 15 bp, Homo sapiens
ggaaataaaatggcc

SEQ ID NO: 662267 - DNA, 15 bp, Homo sapiens
gaaataaaatggccc

SEQ ID NO: 662268 - DNA, 15 bp, Homo sapiens
aaataaaatggccca

SEQ ID NO: 662269 - DNA, 15 bp, Homo sapiens
aataaaatggcccac

SEQ ID NO: 662270 - DNA, 15 bp, Homo sapiens
ataaaatggcccaca

SEQ ID NO: 662271 - DNA, 15 bp, Homo sapiens
taaaatggcccacaa

SEQ ID NO: 662272 - DNA, 15 bp, Homo sapiens
aaaatggcccacaag

SEQ ID NO: 662273 - DNA, 15 bp, Homo sapiens
aaatggcccacaagc

SEQ ID NO: 662274 - DNA, 15 bp, Homo sapiens
aatggcccacaagca

SEQ ID NO: 662275 - DNA, 15 bp, Homo sapiens
atggcccacaagcag

SEQ ID NO: 662276 - DNA, 15 bp, Homo sapiens
tggcccacaagcagt

SEQ ID NO: 662277 - DNA, 15 bp, Homo sapiens
ggcccacaagcagtt

SEQ ID NO: 662278 - DNA, 15 bp, Homo sapiens
gcccacaagcagtta

SEQ ID NO: 662279 - DNA, 15 bp, Homo sapiens
cccacaagcagttat

SEQ ID NO: 662280 - DNA, 15 bp, Homo sapiens
ccacaagcagttatc

SEQ ID NO: 662281 - DNA, 15 bp, Homo sapiens
cacaagcagttatcc

SEQ ID NO: 662282 - DNA, 15 bp, Homo sapiens
acaagcagttatcct

SEQ ID NO: 662283 - DNA, 15 bp, Homo sapiens
caagcagttatcctg

SEQ ID NO: 662284 - DNA, 15 bp, Homo sapiens
aagcagttatcctgg

SEQ ID NO: 662285 - DNA, 15 bp, Homo sapiens
agcagttatcctggc

SEQ ID NO: 662286 - DNA, 15 bp, Homo sapiens
gcagttatcctggcc

SEQ ID NO: 662287 - DNA, 15 bp, Homo sapiens
cagttatcctggccc

SEQ ID NO: 662288 - DNA, 15 bp, Homo sapiens
agttatcctggccca

SEQ ID NO: 662289 - DNA, 15 bp, Homo sapiens
gttatcctggcccag

SEQ ID NO: 662290 - DNA, 15 bp, Homo sapiens
ttatcctggcccagt

SEQ ID NO: 662291 - DNA, 15 bp, Homo sapiens
tatcctggcccagtg

SEQ ID NO: 662292 - DNA, 15 bp, Homo sapiens
atcctggcccagtgt

SEQ ID NO: 662293 - DNA, 15 bp, Homo sapiens
tcctggcccagtgtc

SEQ ID NO: 662294 - DNA, 15 bp, Homo sapiens
cctggcccagtgtcc

SEQ ID NO: 662295 - DNA, 15 bp, Homo sapiens
ctggcccagtgtccc

SEQ ID NO: 662296 - DNA, 15 bp, Homo sapiens
tggcccagtgtccct

SEQ ID NO: 662297 - DNA, 15 bp, Homo sapiens
ggcccagtgtccctg

SEQ ID NO: 662298 - DNA, 15 bp, Homo sapiens
gcccagtgtccctgc

SEQ ID NO: 662299 - DNA, 15 bp, Homo sapiens
cccagtgtccctgca

SEQ ID NO: 662300 - DNA, 15 bp, Homo sapiens
ccagtgtccctgcac

SEQ ID NO: 662301 - DNA, 15 bp, Homo sapiens
cagtgtccctgcacc

SEQ ID NO: 662302 - DNA, 15 bp, Homo sapiens
agtgtccctgcacca

SEQ ID NO: 662303 - DNA, 15 bp, Homo sapiens
gtgtccctgcaccaa

SEQ ID NO: 662304 - DNA, 15 bp, Homo sapiens
tgtccctgcaccaaa

SEQ ID NO: 662305 - DNA, 15 bp, Homo sapiens
gtccctgcaccaaag

SEQ ID NO: 662306 - DNA, 15 bp, Homo sapiens
tccctgcaccaaagg

SEQ ID NO: 662307 - DNA, 15 bp, Homo sapiens
ccctgcaccaaagga

SEQ ID NO: 662308 - DNA, 15 bp, Homo sapiens
cctgcaccaaaggag

SEQ ID NO: 662309 - DNA, 15 bp, Homo sapiens
ctgcaccaaaggagc

SEQ ID NO: 662310 - DNA, 15 bp, Homo sapiens
tgcaccaaaggagct

SEQ ID NO: 662311 - DNA, 15 bp, Homo sapiens
gcaccaaaggagctt

SEQ ID NO: 662312 - DNA, 15 bp, Homo sapiens
caccaaaggagcttc

SEQ ID NO: 662313 - DNA, 15 bp, Homo sapiens
accaaaggagcttcc

SEQ ID NO: 662314 - DNA, 15 bp, Homo sapiens
ccaaaggagcttccc

SEQ ID NO: 662315 - DNA, 15 bp, Homo sapiens
caaaggagcttcccc

SEQ ID NO: 662316 - DNA, 15 bp, Homo sapiens
aaaggagcttcccca

SEQ ID NO: 662317 - DNA, 15 bp, Homo sapiens
aaggagcttccccag

SEQ ID NO: 662318 - DNA, 15 bp, Homo sapiens
aggagcttccccagc

SEQ ID NO: 662319 - DNA, 15 bp, Homo sapiens
ggagcttccccagct

SEQ ID NO: 662320 - DNA, 15 bp, Homo sapiens
gagcttccccagctg

SEQ ID NO: 662321 - DNA, 15 bp, Homo sapiens
agcttccccagctgt

SEQ ID NO: 662322 - DNA, 15 bp, Homo sapiens
gcttccccagctgtg

SEQ ID NO: 662323 - DNA, 15 bp, Homo sapiens
cttccccagctgtgt

SEQ ID NO: 662324 - DNA, 15 bp, Homo sapiens
ttccccagctgtgtg

SEQ ID NO: 662325 - DNA, 15 bp, Homo sapiens
tccccagctgtgtgt

SEQ ID NO: 662326 - DNA, 15 bp, Homo sapiens
ccccagctgtgtgtc

SEQ ID NO: 662327 - DNA, 15 bp, Homo sapiens
cccagctgtgtgtca

SEQ ID NO: 662328 - DNA, 15 bp, Homo sapiens
ccagctgtgtgtcac

SEQ ID NO: 662329 - DNA, 15 bp, Homo sapiens
cagctgtgtgtcaca

SEQ ID NO: 662330 - DNA, 15 bp, Homo sapiens
agctgtgtgtcacat

SEQ ID NO: 662331 - DNA, 15 bp, Homo sapiens
gctgtgtgtcacatt

SEQ ID NO: 662332 - DNA, 15 bp, Homo sapiens
ctgtgtgtcacatta

SEQ ID NO: 662333 - DNA, 15 bp, Homo sapiens
tgtgtgtcacattag

SEQ ID NO: 662334 - DNA, 15 bp, Homo sapiens
gtgtgtcacattagg

SEQ ID NO: 662335 - DNA, 15 bp, Homo sapiens
tgtgtcacattaggt

SEQ ID NO: 662336 - DNA, 15 bp, Homo sapiens
gtgtcacattaggtc

SEQ ID NO: 662337 - DNA, 15 bp, Homo sapiens
tgtcacattaggtct

SEQ ID NO: 662338 - DNA, 15 bp, Homo sapiens
gtcacattaggtctc

SEQ ID NO: 662339 - DNA, 15 bp, Homo sapiens
tcacattaggtctca

SEQ ID NO: 662340 - DNA, 15 bp, Homo sapiens
cacattaggtctcac

SEQ ID NO: 662341 - DNA, 15 bp, Homo sapiens
acattaggtctcaca

SEQ ID NO: 662342 - DNA, 15 bp, Homo sapiens
cattaggtctcacat

SEQ ID NO: 662343 - DNA, 15 bp, Homo sapiens
attaggtctcacatt

SEQ ID NO: 662344 - DNA, 15 bp, Homo sapiens
ttaggtctcacattg

SEQ ID NO: 662345 - DNA, 15 bp, Homo sapiens
taggtctcacattgc

SEQ ID NO: 662346 - DNA, 15 bp, Homo sapiens
aggtctcacattgcg

SEQ ID NO: 662347 - DNA, 15 bp, Homo sapiens
ggtctcacattgcgt

SEQ ID NO: 662348 - DNA, 15 bp, Homo sapiens
gtctcacattgcgta

SEQ ID NO: 662349 - DNA, 15 bp, Homo sapiens
tctcacattgcgtat

SEQ ID NO: 662350 - DNA, 15 bp, Homo sapiens
ctcacattgcgtatt

SEQ ID NO: 662351 - DNA, 15 bp, Homo sapiens
tcacattgcgtattc

SEQ ID NO: 662352 - DNA, 15 bp, Homo sapiens
cacattgcgtattct

SEQ ID NO: 662353 - DNA, 15 bp, Homo sapiens
acattgcgtattctc

SEQ ID NO: 662354 - DNA, 15 bp, Homo sapiens
cattgcgtattctca

SEQ ID NO: 662355 - DNA, 15 bp, Homo sapiens
attgcgtattctcaa

SEQ ID NO: 662356 - DNA, 15 bp, Homo sapiens
ttgcgtattctcaag

SEQ ID NO: 662357 - DNA, 15 bp, Homo sapiens
tgcgtattctcaagg

SEQ ID NO: 662358 - DNA, 15 bp, Homo sapiens
gcgtattctcaagga

SEQ ID NO: 662359 - DNA, 15 bp, Homo sapiens
cgtattctcaaggag

SEQ ID NO: 662360 - DNA, 15 bp, Homo sapiens
gtattctcaaggagg

SEQ ID NO: 662361 - DNA, 15 bp, Homo sapiens
tattctcaaggaggc

SEQ ID NO: 662362 - DNA, 15 bp, Homo sapiens
attctcaaggaggcc

SEQ ID NO: 662363 - DNA, 15 bp, Homo sapiens
ttctcaaggaggcca

SEQ ID NO: 662364 - DNA, 15 bp, Homo sapiens
tctcaaggaggccaa

SEQ ID NO: 662365 - DNA, 15 bp, Homo sapiens
ctcaaggaggccaac

SEQ ID NO: 662366 - DNA, 15 bp, Homo sapiens
tcaaggaggccaact

SEQ ID NO: 662367 - DNA, 15 bp, Homo sapiens
caaggaggccaacta

SEQ ID NO: 662368 - DNA, 15 bp, Homo sapiens
aaggaggccaactaa

SEQ ID NO: 662369 - DNA, 15 bp, Homo sapiens
aggaggccaactaat

SEQ ID NO: 662370 - DNA, 15 bp, Homo sapiens
ggaggccaactaatt

SEQ ID NO: 662371 - DNA, 15 bp, Homo sapiens
gaggccaactaattc

SEQ ID NO: 662372 - DNA, 15 bp, Homo sapiens
aggccaactaattct

SEQ ID NO: 662373 - DNA, 15 bp, Homo sapiens
ggccaactaattctg

SEQ ID NO: 662374 - DNA, 15 bp, Homo sapiens
gccaactaattctgt

SEQ ID NO: 662375 - DNA, 15 bp, Homo sapiens
ccaactaattctgta

SEQ ID NO: 662376 - DNA, 15 bp, Homo sapiens
caactaattctgtaa

SEQ ID NO: 662377 - DNA, 15 bp, Homo sapiens
aactaattctgtaac

SEQ ID NO: 662378 - DNA, 15 bp, Homo sapiens
actaattctgtaacc

SEQ ID NO: 662379 - DNA, 15 bp, Homo sapiens
ctaattctgtaacca

SEQ ID NO: 662380 - DNA, 15 bp, Homo sapiens
taattctgtaaccat

SEQ ID NO: 662381 - DNA, 15 bp, Homo sapiens
aattctgtaaccatg

SEQ ID NO: 662382 - DNA, 15 bp, Homo sapiens
attctgtaaccatgg

SEQ ID NO: 662383 - DNA, 15 bp, Homo sapiens
ttctgtaaccatgga

SEQ ID NO: 662384 - DNA, 15 bp, Homo sapiens
tctgtaaccatggat

SEQ ID NO: 662385 - DNA, 15 bp, Homo sapiens
ctgtaaccatggata

SEQ ID NO: 662386 - DNA, 15 bp, Homo sapiens
tgtaaccatggatag

SEQ ID NO: 662387 - DNA, 15 bp, Homo sapiens
gtaaccatggatagg

SEQ ID NO: 662388 - DNA, 15 bp, Homo sapiens
taaccatggataggt

SEQ ID NO: 662389 - DNA, 15 bp, Homo sapiens
aaccatggataggtc

SEQ ID NO: 662390 - DNA, 15 bp, Homo sapiens
accatggataggtcc

SEQ ID NO: 662391 - DNA, 15 bp, Homo sapiens
ccatggataggtcct

SEQ ID NO: 662392 - DNA, 15 bp, Homo sapiens
catggataggtcctg

SEQ ID NO: 662393 - DNA, 15 bp, Homo sapiens
atggataggtcctgt

SEQ ID NO: 662394 - DNA, 15 bp, Homo sapiens
tggataggtcctgtg

SEQ ID NO: 662395 - DNA, 15 bp, Homo sapiens
ggataggtcctgtga

SEQ ID NO: 662396 - DNA, 15 bp, Homo sapiens
gataggtcctgtgat

SEQ ID NO: 662397 - DNA, 15 bp, Homo sapiens
ataggtcctgtgata

SEQ ID NO: 662398 - DNA, 15 bp, Homo sapiens
taggtcctgtgataa

SEQ ID NO: 662399 - DNA, 15 bp, Homo sapiens
aggtcctgtgataaa

SEQ ID NO: 662400 - DNA, 15 bp, Homo sapiens
ggtcctgtgataaat

SEQ ID NO: 662401 - DNA, 15 bp, Homo sapiens
gtcctgtgataaatt

SEQ ID NO: 662402 - DNA, 15 bp, Homo sapiens
tcctgtgataaattg

SEQ ID NO: 662403 - DNA, 15 bp, Homo sapiens
cctgtgataaattgg

SEQ ID NO: 662404 - DNA, 15 bp, Homo sapiens
ctgtgataaattgga

SEQ ID NO: 662405 - DNA, 15 bp, Homo sapiens
tgtgataaattggaa

SEQ ID NO: 662406 - DNA, 15 bp, Homo sapiens
gtgataaattggaaa

SEQ ID NO: 662407 - DNA, 15 bp, Homo sapiens
tgataaattggaaaa

SEQ ID NO: 662408 - DNA, 15 bp, Homo sapiens
gataaattggaaaat

SEQ ID NO: 662409 - DNA, 15 bp, Homo sapiens
ataaattggaaaatg

SEQ ID NO: 662410 - DNA, 15 bp, Homo sapiens
taaattggaaaatga

SEQ ID NO: 662411 - DNA, 15 bp, Homo sapiens
aaattggaaaatgac

SEQ ID NO: 662412 - DNA, 15 bp, Homo sapiens
aattggaaaatgact

SEQ ID NO: 662413 - DNA, 15 bp, Homo sapiens
attggaaaatgactt

SEQ ID NO: 662414 - DNA, 15 bp, Homo sapiens
ttggaaaatgacttc

SEQ ID NO: 662415 - DNA, 15 bp, Homo sapiens
tggaaaatgacttct

SEQ ID NO: 662416 - DNA, 15 bp, Homo sapiens
ggaaaatgacttctg

SEQ ID NO: 662417 - DNA, 15 bp, Homo sapiens
gaaaatgacttctgg

SEQ ID NO: 662418 - DNA, 15 bp, Homo sapiens
aaaatgacttctggg

SEQ ID NO: 662419 - DNA, 15 bp, Homo sapiens
aaatgacttctgggg

SEQ ID NO: 662420 - DNA, 15 bp, Homo sapiens
aatgacttctggggc

SEQ ID NO: 662421 - DNA, 15 bp, Homo sapiens
atgacttctggggca

SEQ ID NO: 662422 - DNA, 15 bp, Homo sapiens
tgacttctggggcaa

SEQ ID NO: 662423 - DNA, 15 bp, Homo sapiens
gacttctggggcaac

SEQ ID NO: 662424 - DNA, 15 bp, Homo sapiens
acttctggggcaaca

SEQ ID NO: 662425 - DNA, 15 bp, Homo sapiens
cttctggggcaacag

SEQ ID NO: 662426 - DNA, 15 bp, Homo sapiens
ttctggggcaacagt

SEQ ID NO: 662427 - DNA, 15 bp, Homo sapiens
tctggggcaacagtc

SEQ ID NO: 662428 - DNA, 15 bp, Homo sapiens
ctggggcaacagtct

SEQ ID NO: 662429 - DNA, 15 bp, Homo sapiens
tggggcaacagtctc

SEQ ID NO: 662430 - DNA, 15 bp, Homo sapiens
ggggcaacagtctct

SEQ ID NO: 662431 - DNA, 15 bp, Homo sapiens
gggcaacagtctcta

SEQ ID NO: 662432 - DNA, 15 bp, Homo sapiens
ggcaacagtctctag

SEQ ID NO: 662433 - DNA, 15 bp, Homo sapiens
gcaacagtctctagt

SEQ ID NO: 662434 - DNA, 15 bp, Homo sapiens
caacagtctctagtt

SEQ ID NO: 662435 - DNA, 15 bp, Homo sapiens
aacagtctctagttc

SEQ ID NO: 662436 - DNA, 15 bp, Homo sapiens
acagtctctagttct

SEQ ID NO: 662437 - DNA, 15 bp, Homo sapiens
cagtctctagttctc

SEQ ID NO: 662438 - DNA, 15 bp, Homo sapiens
agtctctagttctca

SEQ ID NO: 662439 - DNA, 15 bp, Homo sapiens
gtctctagttctcag

SEQ ID NO: 662440 - DNA, 15 bp, Homo sapiens
tctctagttctcaga

SEQ ID NO: 662441 - DNA, 15 bp, Homo sapiens
ctctagttctcagaa

SEQ ID NO: 662442 - DNA, 15 bp, Homo sapiens
tctagttctcagaaa

SEQ ID NO: 662443 - DNA, 15 bp, Homo sapiens
ctagttctcagaaag

SEQ ID NO: 662444 - DNA, 15 bp, Homo sapiens
tagttctcagaaagg

SEQ ID NO: 662445 - DNA, 15 bp, Homo sapiens
agttctcagaaagga

SEQ ID NO: 662446 - DNA, 15 bp, Homo sapiens
gttctcagaaaggaa

SEQ ID NO: 662447 - DNA, 15 bp, Homo sapiens
ttctcagaaaggaaa

SEQ ID NO: 662448 - DNA, 15 bp, Homo sapiens
tctcagaaaggaaat

SEQ ID NO: 662449 - DNA, 15 bp, Homo sapiens
ctcagaaaggaaatt

SEQ ID NO: 662450 - DNA, 15 bp, Homo sapiens
tcagaaaggaaattc

SEQ ID NO: 662451 - DNA, 15 bp, Homo sapiens
cagaaaggaaattca

SEQ ID NO: 662452 - DNA, 15 bp, Homo sapiens
agaaaggaaattcac

SEQ ID NO: 662453 - DNA, 15 bp, Homo sapiens
gaaaggaaattcaca

SEQ ID NO: 662454 - DNA, 15 bp, Homo sapiens
aaaggaaattcacag

SEQ ID NO: 662455 - DNA, 15 bp, Homo sapiens
aaggaaattcacaga

SEQ ID NO: 662456 - DNA, 15 bp, Homo sapiens
aggaaattcacagaa

SEQ ID NO: 662457 - DNA, 15 bp, Homo sapiens
ggaaattcacagaag

SEQ ID NO: 662458 - DNA, 15 bp, Homo sapiens
gaaattcacagaagt

SEQ ID NO: 662459 - DNA, 15 bp, Homo sapiens
aaattcacagaagtg

SEQ ID NO: 662460 - DNA, 15 bp, Homo sapiens
aattcacagaagtga

SEQ ID NO: 662461 - DNA, 15 bp, Homo sapiens
attcacagaagtgag

SEQ ID NO: 662462 - DNA, 15 bp, Homo sapiens
ttcacagaagtgagc

SEQ ID NO: 662463 - DNA, 15 bp, Homo sapiens
tcacagaagtgagcg

SEQ ID NO: 662464 - DNA, 15 bp, Homo sapiens
cacagaagtgagcgg

SEQ ID NO: 662465 - DNA, 15 bp, Homo sapiens
acagaagtgagcggt

SEQ ID NO: 662466 - DNA, 15 bp, Homo sapiens
cagaagtgagcggtt

SEQ ID NO: 662467 - DNA, 15 bp, Homo sapiens
agaagtgagcggttg

SEQ ID NO: 662468 - DNA, 15 bp, Homo sapiens
gaagtgagcggttgg

SEQ ID NO: 662469 - DNA, 15 bp, Homo sapiens
aagtgagcggttggc

SEQ ID NO: 662470 - DNA, 15 bp, Homo sapiens
agtgagcggttggcc

SEQ ID NO: 662471 - DNA, 15 bp, Homo sapiens
gtgagcggttggcca

SEQ ID NO: 662472 - DNA, 15 bp, Homo sapiens
tgagcggttggccag

SEQ ID NO: 662473 - DNA, 15 bp, Homo sapiens
gagcggttggccaga

SEQ ID NO: 662474 - DNA, 15 bp, Homo sapiens
agcggttggccagaa

SEQ ID NO: 662475 - DNA, 15 bp, Homo sapiens
gcggttggccagaag

SEQ ID NO: 662476 - DNA, 15 bp, Homo sapiens
cggttggccagaagg

SEQ ID NO: 662477 - DNA, 15 bp, Homo sapiens
ggttggccagaaggc

SEQ ID NO: 662478 - DNA, 15 bp, Homo sapiens
gttggccagaaggcc

SEQ ID NO: 662479 - DNA, 15 bp, Homo sapiens
ttggccagaaggcca

SEQ ID NO: 662480 - DNA, 15 bp, Homo sapiens
tggccagaaggccaa

SEQ ID NO: 662481 - DNA, 15 bp, Homo sapiens
ggccagaaggccaaa

SEQ ID NO: 662482 - DNA, 15 bp, Homo sapiens
gccagaaggccaaaa

SEQ ID NO: 662483 - DNA, 15 bp, Homo sapiens
ccagaaggccaaaag

SEQ ID NO: 662484 - DNA, 15 bp, Homo sapiens
cagaaggccaaaagg

SEQ ID NO: 662485 - DNA, 15 bp, Homo sapiens
agaaggccaaaaggc

SEQ ID NO: 662486 - DNA, 15 bp, Homo sapiens
gaaggccaaaaggcc

SEQ ID NO: 662487 - DNA, 15 bp, Homo sapiens
aaggccaaaaggcca

SEQ ID NO: 662488 - DNA, 15 bp, Homo sapiens
aggccaaaaggccat

SEQ ID NO: 662489 - DNA, 15 bp, Homo sapiens
ggccaaaaggccatt

SEQ ID NO: 662490 - DNA, 15 bp, Homo sapiens
gccaaaaggccattg

SEQ ID NO: 662491 - DNA, 15 bp, Homo sapiens
ccaaaaggccattgc

SEQ ID NO: 662492 - DNA, 15 bp, Homo sapiens
caaaaggccattgcc

SEQ ID NO: 662493 - DNA, 15 bp, Homo sapiens
aaaaggccattgcct

SEQ ID NO: 662494 - DNA, 15 bp, Homo sapiens
aaaggccattgcctc

SEQ ID NO: 662495 - DNA, 15 bp, Homo sapiens
aaggccattgcctca

SEQ ID NO: 662496 - DNA, 15 bp, Homo sapiens
aggccattgcctcag

SEQ ID NO: 662497 - DNA, 15 bp, Homo sapiens
ggccattgcctcaga

SEQ ID NO: 662498 - DNA, 15 bp, Homo sapiens
gccattgcctcagag

SEQ ID NO: 662499 - DNA, 15 bp, Homo sapiens
ccattgcctcagagt

SEQ ID NO: 662500 - DNA, 15 bp, Homo sapiens
cattgcctcagagtg

SEQ ID NO: 662501 - DNA, 15 bp, Homo sapiens
attgcctcagagtgg

SEQ ID NO: 662502 - DNA, 15 bp, Homo sapiens
ttgcctcagagtgga

SEQ ID NO: 662503 - DNA, 15 bp, Homo sapiens
tgcctcagagtggat

SEQ ID NO: 662504 - DNA, 15 bp, Homo sapiens
gcctcagagtggatc

SEQ ID NO: 662505 - DNA, 15 bp, Homo sapiens
cctcagagtggatcc

SEQ ID NO: 662506 - DNA, 15 bp, Homo sapiens
ctcagagtggatccc

SEQ ID NO: 662507 - DNA, 15 bp, Homo sapiens
tcagagtggatccca

SEQ ID NO: 662508 - DNA, 15 bp, Homo sapiens
cagagtggatcccaa

SEQ ID NO: 662509 - DNA, 15 bp, Homo sapiens
agagtggatcccaaa

SEQ ID NO: 662510 - DNA, 15 bp, Homo sapiens
gagtggatcccaaag

SEQ ID NO: 662511 - DNA, 15 bp, Homo sapiens
agtggatcccaaagc

SEQ ID NO: 662512 - DNA, 15 bp, Homo sapiens
gtggatcccaaagca

SEQ ID NO: 662513 - DNA, 15 bp, Homo sapiens
tggatcccaaagcag

SEQ ID NO: 662514 - DNA, 15 bp, Homo sapiens
ggatcccaaagcaga

SEQ ID NO: 662515 - DNA, 15 bp, Homo sapiens
gatcccaaagcagag

SEQ ID NO: 662516 - DNA, 15 bp, Homo sapiens
atcccaaagcagagt

SEQ ID NO: 662517 - DNA, 15 bp, Homo sapiens
tcccaaagcagagtg

SEQ ID NO: 662518 - DNA, 15 bp, Homo sapiens
cccaaagcagagtga

SEQ ID NO: 662519 - DNA, 15 bp, Homo sapiens
ccaaagcagagtgat

SEQ ID NO: 662520 - DNA, 15 bp, Homo sapiens
caaagcagagtgatg

SEQ ID NO: 662521 - DNA, 15 bp, Homo sapiens
aaagcagagtgatgt

SEQ ID NO: 662522 - DNA, 15 bp, Homo sapiens
aagcagagtgatgtg

SEQ ID NO: 662523 - DNA, 15 bp, Homo sapiens
agcagagtgatgtgg

SEQ ID NO: 662524 - DNA, 15 bp, Homo sapiens
gcagagtgatgtggc

SEQ ID NO: 662525 - DNA, 15 bp, Homo sapiens
cagagtgatgtggcc

SEQ ID NO: 662526 - DNA, 15 bp, Homo sapiens
agagtgatgtggcca

SEQ ID NO: 662527 - DNA, 15 bp, Homo sapiens
gagtgatgtggccat

SEQ ID NO: 662528 - DNA, 15 bp, Homo sapiens
agtgatgtggccatt

SEQ ID NO: 662529 - DNA, 15 bp, Homo sapiens
gtgatgtggccattc

SEQ ID NO: 662530 - DNA, 15 bp, Homo sapiens
tgatgtggccattca

SEQ ID NO: 662531 - DNA, 15 bp, Homo sapiens
gatgtggccattcac

SEQ ID NO: 662532 - DNA, 15 bp, Homo sapiens
atgtggccattcaca

SEQ ID NO: 662533 - DNA, 15 bp, Homo sapiens
tgtggccattcacag

SEQ ID NO: 662534 - DNA, 15 bp, Homo sapiens
gtggccattcacagc

SEQ ID NO: 662535 - DNA, 15 bp, Homo sapiens
tggccattcacagca

SEQ ID NO: 662536 - DNA, 15 bp, Homo sapiens
ggccattcacagcat

SEQ ID NO: 662537 - DNA, 15 bp, Homo sapiens
gccattcacagcatg

SEQ ID NO: 662538 - DNA, 15 bp, Homo sapiens
ccattcacagcatgt

SEQ ID NO: 662539 - DNA, 15 bp, Homo sapiens
cattcacagcatgtt

SEQ ID NO: 662540 - DNA, 15 bp, Homo sapiens
attcacagcatgttt

SEQ ID NO: 662541 - DNA, 15 bp, Homo sapiens
ttcacagcatgtttg

SEQ ID NO: 662542 - DNA, 15 bp, Homo sapiens
tcacagcatgtttga

SEQ ID NO: 662543 - DNA, 15 bp, Homo sapiens
cacagcatgtttgag

SEQ ID NO: 662544 - DNA, 15 bp, Homo sapiens
acagcatgtttgagt

SEQ ID NO: 662545 - DNA, 15 bp, Homo sapiens
cagcatgtttgagta

SEQ ID NO: 662546 - DNA, 15 bp, Homo sapiens
agcatgtttgagtat

SEQ ID NO: 662547 - DNA, 15 bp, Homo sapiens
gcatgtttgagtatg

SEQ ID NO: 662548 - DNA, 15 bp, Homo sapiens
catgtttgagtatgt

SEQ ID NO: 662549 - DNA, 15 bp, Homo sapiens
atgtttgagtatgta

SEQ ID NO: 662550 - DNA, 15 bp, Homo sapiens
tgtttgagtatgtaa

SEQ ID NO: 662551 - DNA, 15 bp, Homo sapiens
gtttgagtatgtaag

SEQ ID NO: 662552 - DNA, 15 bp, Homo sapiens
tttgagtatgtaaga

SEQ ID NO: 662553 - DNA, 15 bp, Homo sapiens
ttgagtatgtaagaa

SEQ ID NO: 662554 - DNA, 15 bp, Homo sapiens
tgagtatgtaagaaa

SEQ ID NO: 662555 - DNA, 15 bp, Homo sapiens
gagtatgtaagaaaa

SEQ ID NO: 662556 - DNA, 15 bp, Homo sapiens
agtatgtaagaaaaa

SEQ ID NO: 662557 - DNA, 15 bp, Homo sapiens
gtatgtaagaaaaaa

SEQ ID NO: 662558 - DNA, 15 bp, Homo sapiens
tatgtaagaaaaaag

SEQ ID NO: 662559 - DNA, 15 bp, Homo sapiens
atgtaagaaaaaaga

SEQ ID NO: 662560 - DNA, 15 bp, Homo sapiens
tgtaagaaaaaagaa

SEQ ID NO: 662561 - DNA, 15 bp, Homo sapiens
gtaagaaaaaagaaa

SEQ ID NO: 662562 - DNA, 15 bp, Homo sapiens
taagaaaaaagaaaa

SEQ ID NO: 662563 - DNA, 15 bp, Homo sapiens
aagaaaaaagaaaaa

SEQ ID NO: 662564 - DNA, 15 bp, Homo sapiens
agaaaaaagaaaaat

SEQ ID NO: 662565 - DNA, 15 bp, Homo sapiens
gaaaaaagaaaaata

SEQ ID NO: 662566 - DNA, 15 bp, Homo sapiens
aaaaaagaaaaataa

SEQ ID NO: 662567 - DNA, 15 bp, Homo sapiens
aaaaagaaaaataag

SEQ ID NO: 662568 - DNA, 15 bp, Homo sapiens
aaaagaaaaataaga

SEQ ID NO: 662569 - DNA, 15 bp, Homo sapiens
aaagaaaaataagaa

SEQ ID NO: 662570 - DNA, 15 bp, Homo sapiens
aagaaaaataagaaa

SEQ ID NO: 662571 - DNA, 15 bp, Homo sapiens
agaaaaataagaaag

SEQ ID NO: 662572 - DNA, 15 bp, Homo sapiens
gaaaaataagaaagg

SEQ ID NO: 662573 - DNA, 15 bp, Homo sapiens
aaaaataagaaaggg

SEQ ID NO: 662574 - DNA, 15 bp, Homo sapiens
aaaataagaaagggt

SEQ ID NO: 662575 - DNA, 15 bp, Homo sapiens
aaataagaaagggta

SEQ ID NO: 662576 - DNA, 15 bp, Homo sapiens
aataagaaagggtat

SEQ ID NO: 662577 - DNA, 15 bp, Homo sapiens
ataagaaagggtatg

SEQ ID NO: 662578 - DNA, 15 bp, Homo sapiens
taagaaagggtatga

SEQ ID NO: 662579 - DNA, 15 bp, Homo sapiens
aagaaagggtatgat

SEQ ID NO: 662580 - DNA, 15 bp, Homo sapiens
agaaagggtatgatt

SEQ ID NO: 662581 - DNA, 15 bp, Homo sapiens
gaaagggtatgattt

SEQ ID NO: 662582 - DNA, 15 bp, Homo sapiens
aaagggtatgatttc

SEQ ID NO: 662583 - DNA, 15 bp, Homo sapiens
aagggtatgatttct

SEQ ID NO: 662584 - DNA, 15 bp, Homo sapiens
agggtatgatttctc

SEQ ID NO: 662585 - DNA, 15 bp, Homo sapiens
gggtatgatttctcc

SEQ ID NO: 662586 - DNA, 15 bp, Homo sapiens
ggtatgatttctcct

SEQ ID NO: 662587 - DNA, 15 bp, Homo sapiens
gtatgatttctcctg

SEQ ID NO: 662588 - DNA, 15 bp, Homo sapiens
tatgatttctcctgc

SEQ ID NO: 662589 - DNA, 15 bp, Homo sapiens
atgatttctcctgcc

SEQ ID NO: 662590 - DNA, 15 bp, Homo sapiens
tgatttctcctgcca

SEQ ID NO: 662591 - DNA, 15 bp, Homo sapiens
gatttctcctgccaa

SEQ ID NO: 662592 - DNA, 15 bp, Homo sapiens
atttctcctgccaat

SEQ ID NO: 662593 - DNA, 15 bp, Homo sapiens
tttctcctgccaata

SEQ ID NO: 662594 - DNA, 15 bp, Homo sapiens
ttctcctgccaatat

SEQ ID NO: 662595 - DNA, 15 bp, Homo sapiens
tctcctgccaatatc

SEQ ID NO: 662596 - DNA, 15 bp, Homo sapiens
ctcctgccaatatca

SEQ ID NO: 662597 - DNA, 15 bp, Homo sapiens
tcctgccaatatcat

SEQ ID NO: 662598 - DNA, 15 bp, Homo sapiens
cctgccaatatcata

SEQ ID NO: 662599 - DNA, 15 bp, Homo sapiens
ctgccaatatcataa

SEQ ID NO: 662600 - DNA, 15 bp, Homo sapiens
tgccaatatcataag

SEQ ID NO: 662601 - DNA, 15 bp, Homo sapiens
gccaatatcataagc

SEQ ID NO: 662602 - DNA, 15 bp, Homo sapiens
ccaatatcataagct

SEQ ID NO: 662603 - DNA, 15 bp, Homo sapiens
caatatcataagctg

SEQ ID NO: 662604 - DNA, 15 bp, Homo sapiens
aatatcataagctga

SEQ ID NO: 662605 - DNA, 15 bp, Homo sapiens
atatcataagctgag

SEQ ID NO: 662606 - DNA, 15 bp, Homo sapiens
tatcataagctgaga

SEQ ID NO: 662607 - DNA, 15 bp, Homo sapiens
atcataagctgagaa

SEQ ID NO: 662608 - DNA, 15 bp, Homo sapiens
tcataagctgagaat

SEQ ID NO: 662609 - DNA, 15 bp, Homo sapiens
cataagctgagaata

SEQ ID NO: 662610 - DNA, 15 bp, Homo sapiens
ataagctgagaatat

SEQ ID NO: 662611 - DNA, 15 bp, Homo sapiens
taagctgagaatatt

SEQ ID NO: 662612 - DNA, 15 bp, Homo sapiens
aagctgagaatattt

SEQ ID NO: 662613 - DNA, 15 bp, Homo sapiens
agctgagaatatttt

SEQ ID NO: 662614 - DNA, 15 bp, Homo sapiens
gctgagaatattttt

SEQ ID NO: 662615 - DNA, 15 bp, Homo sapiens
ctgagaatatttttc

SEQ ID NO: 662616 - DNA, 15 bp, Homo sapiens
tgagaatatttttct

SEQ ID NO: 662617 - DNA, 15 bp, Homo sapiens
gagaatatttttctt

SEQ ID NO: 662618 - DNA, 15 bp, Homo sapiens
agaatatttttcttt

SEQ ID NO: 662619 - DNA, 15 bp, Homo sapiens
gaatatttttctttg

SEQ ID NO: 662620 - DNA, 15 bp, Homo sapiens
aatatttttctttgc

SEQ ID NO: 662621 - DNA, 15 bp, Homo sapiens
atatttttctttgct

SEQ ID NO: 662622 - DNA, 15 bp, Homo sapiens
tatttttctttgctg

SEQ ID NO: 662623 - DNA, 15 bp, Homo sapiens
atttttctttgctga

SEQ ID NO: 662624 - DNA, 15 bp, Homo sapiens
tttttctttgctgaa

SEQ ID NO: 662625 - DNA, 15 bp, Homo sapiens
ttttctttgctgaat

SEQ ID NO: 662626 - DNA, 15 bp, Homo sapiens
tttctttgctgaatt

SEQ ID NO: 662627 - DNA, 15 bp, Homo sapiens
ttctttgctgaattc

SEQ ID NO: 662628 - DNA, 15 bp, Homo sapiens
tctttgctgaattca

SEQ ID NO: 662629 - DNA, 15 bp, Homo sapiens
ctttgctgaattcag

SEQ ID NO: 662630 - DNA, 15 bp, Homo sapiens
tttgctgaattcagt

SEQ ID NO: 662631 - DNA, 15 bp, Homo sapiens
ttgctgaattcagta

SEQ ID NO: 662632 - DNA, 15 bp, Homo sapiens
tgctgaattcagtaa

SEQ ID NO: 662633 - DNA, 15 bp, Homo sapiens
gctgaattcagtaaa

SEQ ID NO: 662634 - DNA, 15 bp, Homo sapiens
ctgaattcagtaaaa

SEQ ID NO: 662635 - DNA, 15 bp, Homo sapiens
tgaattcagtaaaat

SEQ ID NO: 662636 - DNA, 15 bp, Homo sapiens
gaattcagtaaaata

SEQ ID NO: 662637 - DNA, 15 bp, Homo sapiens
aattcagtaaaataa

SEQ ID NO: 662638 - DNA, 15 bp, Homo sapiens
attcagtaaaataaa

SEQ ID NO: 662639 - DNA, 15 bp, Homo sapiens
ttcagtaaaataaat

SEQ ID NO: 662640 - DNA, 15 bp, Homo sapiens
tcagtaaaataaatc

SEQ ID NO: 662641 - DNA, 15 bp, Homo sapiens
cagtaaaataaatca

SEQ ID NO: 662642 - DNA, 15 bp, Homo sapiens
agtaaaataaatcag

SEQ ID NO: 662643 - DNA, 15 bp, Homo sapiens
gtaaaataaatcaga

SEQ ID NO: 662644 - DNA, 15 bp, Homo sapiens
taaaataaatcagag

SEQ ID NO: 662645 - DNA, 15 bp, Homo sapiens
aaaataaatcagaga

SEQ ID NO: 662646 - DNA, 15 bp, Homo sapiens
aaataaatcagagat

SEQ ID NO: 662647 - DNA, 15 bp, Homo sapiens
aataaatcagagatt

SEQ ID NO: 662648 - DNA, 15 bp, Homo sapiens
ataaatcagagattt

SEQ ID NO: 662649 - DNA, 15 bp, Homo sapiens
taaatcagagatttt

SEQ ID NO: 662650 - DNA, 15 bp, Homo sapiens
aaatcagagattttt

SEQ ID NO: 662651 - DNA, 15 bp, Homo sapiens
aatcagagatttttc

SEQ ID NO: 662652 - DNA, 15 bp, Homo sapiens
atcagagatttttct

SEQ ID NO: 662653 - DNA, 15 bp, Homo sapiens
tcagagatttttctc

SEQ ID NO: 662654 - DNA, 15 bp, Homo sapiens
cagagatttttctcg

SEQ ID NO: 662655 - DNA, 15 bp, Homo sapiens
agagatttttctcga

SEQ ID NO: 662656 - DNA, 15 bp, Homo sapiens
gagatttttctcgat

SEQ ID NO: 662657 - DNA, 15 bp, Homo sapiens
agatttttctcgatg

SEQ ID NO: 662658 - DNA, 15 bp, Homo sapiens
gatttttctcgatgg

SEQ ID NO: 662659 - DNA, 15 bp, Homo sapiens
atttttctcgatgga

SEQ ID NO: 662660 - DNA, 15 bp, Homo sapiens
tttttctcgatggat

SEQ ID NO: 662661 - DNA, 15 bp, Homo sapiens
ttttctcgatggata

SEQ ID NO: 662662 - DNA, 15 bp, Homo sapiens
tttctcgatggataa

SEQ ID NO: 662663 - DNA, 15 bp, Homo sapiens
ttctcgatggataat

SEQ ID NO: 662664 - DNA, 15 bp, Homo sapiens
tctcgatggataatt

SEQ ID NO: 662665 - DNA, 15 bp, Homo sapiens
ctcgatggataatta

SEQ ID NO: 662666 - DNA, 15 bp, Homo sapiens
tcgatggataattac

SEQ ID NO: 662667 - DNA, 15 bp, Homo sapiens
cgatggataattaca

SEQ ID NO: 662668 - DNA, 15 bp, Homo sapiens
gatggataattacat

SEQ ID NO: 662669 - DNA, 15 bp, Homo sapiens
atggataattacatt

SEQ ID NO: 662670 - DNA, 15 bp, Homo sapiens
tggataattacattt

SEQ ID NO: 662671 - DNA, 15 bp, Homo sapiens
ggataattacatttg

SEQ ID NO: 662672 - DNA, 15 bp, Homo sapiens
gataattacatttgt

SEQ ID NO: 662673 - DNA, 15 bp, Homo sapiens
ataattacatttgtt

SEQ ID NO: 662674 - DNA, 15 bp, Homo sapiens
taattacatttgtta

SEQ ID NO: 662675 - DNA, 15 bp, Homo sapiens
aattacatttgttaa

SEQ ID NO: 662676 - DNA, 15 bp, Homo sapiens
attacatttgttaaa

SEQ ID NO: 662677 - DNA, 15 bp, Homo sapiens
ttacatttgttaaaa

SEQ ID NO: 662678 - DNA, 15 bp, Homo sapiens
tacatttgttaaaaa

SEQ ID NO: 662679 - DNA, 15 bp, Homo sapiens
acatttgttaaaaag

SEQ ID NO: 662680 - DNA, 15 bp, Homo sapiens
catttgttaaaaagc

SEQ ID NO: 662681 - DNA, 15 bp, Homo sapiens
atttgttaaaaagca

SEQ ID NO: 662682 - DNA, 15 bp, Homo sapiens
tttgttaaaaagcat

SEQ ID NO: 662683 - DNA, 15 bp, Homo sapiens
ttgttaaaaagcatt

SEQ ID NO: 662684 - DNA, 15 bp, Homo sapiens
tgttaaaaagcattt

SEQ ID NO: 662685 - DNA, 15 bp, Homo sapiens
gttaaaaagcattta

SEQ ID NO: 662686 - DNA, 15 bp, Homo sapiens
ttaaaaagcatttaa

SEQ ID NO: 662687 - DNA, 15 bp, Homo sapiens
taaaaagcatttaag

SEQ ID NO: 662688 - DNA, 15 bp, Homo sapiens
aaaaagcatttaagg

SEQ ID NO: 662689 - DNA, 15 bp, Homo sapiens
aaaagcatttaagga

SEQ ID NO: 662690 - DNA, 15 bp, Homo sapiens
aaagcatttaaggag

SEQ ID NO: 662691 - DNA, 15 bp, Homo sapiens
aagcatttaaggagg

SEQ ID NO: 662692 - DNA, 15 bp, Homo sapiens
agcatttaaggaggt

SEQ ID NO: 662693 - DNA, 15 bp, Homo sapiens
gcatttaaggaggtt

SEQ ID NO: 662694 - DNA, 15 bp, Homo sapiens
catttaaggaggttt

SEQ ID NO: 662695 - DNA, 15 bp, Homo sapiens
atttaaggaggtttg

SEQ ID NO: 662696 - DNA, 15 bp, Homo sapiens
tttaaggaggtttgg

SEQ ID NO: 662697 - DNA, 15 bp, Homo sapiens
ttaaggaggtttggg

SEQ ID NO: 662698 - DNA, 15 bp, Homo sapiens
taaggaggtttggga

SEQ ID NO: 662699 - DNA, 15 bp, Homo sapiens
aaggaggtttgggaa

SEQ ID NO: 662700 - DNA, 15 bp, Homo sapiens
aggaggtttgggaat

SEQ ID NO: 662701 - DNA, 15 bp, Homo sapiens
ggaggtttgggaatc

SEQ ID NO: 662702 - DNA, 15 bp, Homo sapiens
gaggtttgggaatct

SEQ ID NO: 662703 - DNA, 15 bp, Homo sapiens
aggtttgggaatctg

SEQ ID NO: 662704 - DNA, 15 bp, Homo sapiens
ggtttgggaatctgg

SEQ ID NO: 662705 - DNA, 15 bp, Homo sapiens
gtttgggaatctggg

SEQ ID NO: 662706 - DNA, 15 bp, Homo sapiens
tttgggaatctgggc

SEQ ID NO: 662707 - DNA, 15 bp, Homo sapiens
ttgggaatctgggca

SEQ ID NO: 662708 - DNA, 15 bp, Homo sapiens
tgggaatctgggcat

SEQ ID NO: 662709 - DNA, 15 bp, Homo sapiens
gggaatctgggcatg

SEQ ID NO: 662710 - DNA, 15 bp, Homo sapiens
ggaatctgggcatga

SEQ ID NO: 662711 - DNA, 15 bp, Homo sapiens
gaatctgggcatgat

SEQ ID NO: 662712 - DNA, 15 bp, Homo sapiens
aatctgggcatgatg

SEQ ID NO: 662713 - DNA, 15 bp, Homo sapiens
atctgggcatgatgt

SEQ ID NO: 662714 - DNA, 15 bp, Homo sapiens
tctgggcatgatgtt

SEQ ID NO: 662715 - DNA, 15 bp, Homo sapiens
ctgggcatgatgttg

SEQ ID NO: 662716 - DNA, 15 bp, Homo sapiens
tgggcatgatgttgg

SEQ ID NO: 662717 - DNA, 15 bp, Homo sapiens
gggcatgatgttggt

SEQ ID NO: 662718 - DNA, 15 bp, Homo sapiens
ggcatgatgttggtc

SEQ ID NO: 662719 - DNA, 15 bp, Homo sapiens
gcatgatgttggtcc

SEQ ID NO: 662720 - DNA, 15 bp, Homo sapiens
catgatgttggtccc

SEQ ID NO: 662721 - DNA, 15 bp, Homo sapiens
atgatgttggtccca

SEQ ID NO: 662722 - DNA, 15 bp, Homo sapiens
tgatgttggtcccag

SEQ ID NO: 662723 - DNA, 15 bp, Homo sapiens
gatgttggtcccaga

SEQ ID NO: 662724 - DNA, 15 bp, Homo sapiens
atgttggtcccagat

SEQ ID NO: 662725 - DNA, 15 bp, Homo sapiens
tgttggtcccagatg

SEQ ID NO: 662726 - DNA, 15 bp, Homo sapiens
gttggtcccagatga

SEQ ID NO: 662727 - DNA, 15 bp, Homo sapiens
ttggtcccagatgaa

SEQ ID NO: 662728 - DNA, 15 bp, Homo sapiens
tggtcccagatgaaa

SEQ ID NO: 662729 - DNA, 15 bp, Homo sapiens
ggtcccagatgaaat

SEQ ID NO: 662730 - DNA, 15 bp, Homo sapiens
gtcccagatgaaata

SEQ ID NO: 662731 - DNA, 15 bp, Homo sapiens
tcccagatgaaataa

SEQ ID NO: 662732 - DNA, 15 bp, Homo sapiens
cccagatgaaataaa

SEQ ID NO: 662733 - DNA, 15 bp, Homo sapiens
ccagatgaaataaag

SEQ ID NO: 662734 - DNA, 15 bp, Homo sapiens
cagatgaaataaaga

SEQ ID NO: 662735 - DNA, 15 bp, Homo sapiens
agatgaaataaagat

SEQ ID NO: 662736 - DNA, 15 bp, Homo sapiens
gatgaaataaagatg

SEQ ID NO: 662737 - DNA, 15 bp, Homo sapiens
atgaaataaagatga

SEQ ID NO: 662738 - DNA, 15 bp, Homo sapiens
tgaaataaagatgag

SEQ ID NO: 662739 - DNA, 15 bp, Homo sapiens
gaaataaagatgaga

SEQ ID NO: 662740 - DNA, 15 bp, Homo sapiens
aaataaagatgagaa

SEQ ID NO: 662741 - DNA, 15 bp, Homo sapiens
aataaagatgagaac

SEQ ID NO: 662742 - DNA, 15 bp, Homo sapiens
ataaagatgagaaca

SEQ ID NO: 662743 - DNA, 15 bp, Homo sapiens
taaagatgagaacat

SEQ ID NO: 662744 - DNA, 15 bp, Homo sapiens
aaagatgagaacatg

SEQ ID NO: 662745 - DNA, 15 bp, Homo sapiens
aagatgagaacatga

SEQ ID NO: 662746 - DNA, 15 bp, Homo sapiens
agatgagaacatgat

SEQ ID NO: 662747 - DNA, 15 bp, Homo sapiens
gatgagaacatgatt

SEQ ID NO: 662748 - DNA, 15 bp, Homo sapiens
atgagaacatgattt

SEQ ID NO: 662749 - DNA, 15 bp, Homo sapiens
tgagaacatgattta

SEQ ID NO: 662750 - DNA, 15 bp, Homo sapiens
gagaacatgatttag

SEQ ID NO: 662751 - DNA, 15 bp, Homo sapiens
agaacatgatttagc

SEQ ID NO: 662752 - DNA, 15 bp, Homo sapiens
gaacatgatttagct

SEQ ID NO: 662753 - DNA, 15 bp, Homo sapiens
aacatgatttagctt

SEQ ID NO: 662754 - DNA, 15 bp, Homo sapiens
acatgatttagcttg

SEQ ID NO: 662755 - DNA, 15 bp, Homo sapiens
catgatttagcttgg

SEQ ID NO: 662756 - DNA, 15 bp, Homo sapiens
atgatttagcttgga

SEQ ID NO: 662757 - DNA, 15 bp, Homo sapiens
tgatttagcttggag

SEQ ID NO: 662758 - DNA, 15 bp, Homo sapiens
gatttagcttggaga

SEQ ID NO: 662759 - DNA, 15 bp, Homo sapiens
atttagcttggagac

SEQ ID NO: 662760 - DNA, 15 bp, Homo sapiens
tttagcttggagaca

SEQ ID NO: 662761 - DNA, 15 bp, Homo sapiens
ttagcttggagacaa

SEQ ID NO: 662762 - DNA, 15 bp, Homo sapiens
tagcttggagacaaa

SEQ ID NO: 662763 - DNA, 15 bp, Homo sapiens
agcttggagacaaac

SEQ ID NO: 662764 - DNA, 15 bp, Homo sapiens
gcttggagacaaact

SEQ ID NO: 662765 - DNA, 15 bp, Homo sapiens
cttggagacaaactg

SEQ ID NO: 662766 - DNA, 15 bp, Homo sapiens
ttggagacaaactgt

SEQ ID NO: 662767 - DNA, 15 bp, Homo sapiens
tggagacaaactgta

SEQ ID NO: 662768 - DNA, 15 bp, Homo sapiens
ggagacaaactgtaa

SEQ ID NO: 662769 - DNA, 15 bp, Homo sapiens
gagacaaactgtaac

SEQ ID NO: 662770 - DNA, 15 bp, Homo sapiens
agacaaactgtaact

SEQ ID NO: 662771 - DNA, 15 bp, Homo sapiens
gacaaactgtaactt

SEQ ID NO: 662772 - DNA, 15 bp, Homo sapiens
acaaactgtaactta

SEQ ID NO: 662773 - DNA, 15 bp, Homo sapiens
caaactgtaacttaa

SEQ ID NO: 662774 - DNA, 15 bp, Homo sapiens
aaactgtaacttaaa

SEQ ID NO: 662775 - DNA, 15 bp, Homo sapiens
aactgtaacttaaac

SEQ ID NO: 662776 - DNA, 15 bp, Homo sapiens
actgtaacttaaacc

SEQ ID NO: 662777 - DNA, 15 bp, Homo sapiens
ctgtaacttaaacca

SEQ ID NO: 662778 - DNA, 15 bp, Homo sapiens
tgtaacttaaaccac

SEQ ID NO: 662779 - DNA, 15 bp, Homo sapiens
gtaacttaaaccaca

SEQ ID NO: 662780 - DNA, 15 bp, Homo sapiens
taacttaaaccacac

SEQ ID NO: 662781 - DNA, 15 bp, Homo sapiens
aacttaaaccacacc

SEQ ID NO: 662782 - DNA, 15 bp, Homo sapiens
acttaaaccacacct

SEQ ID NO: 662783 - DNA, 15 bp, Homo sapiens
cttaaaccacacctc

SEQ ID NO: 662784 - DNA, 15 bp, Homo sapiens
ttaaaccacacctct

SEQ ID NO: 662785 - DNA, 15 bp, Homo sapiens
taaaccacacctctc

SEQ ID NO: 662786 - DNA, 15 bp, Homo sapiens
aaaccacacctctct

SEQ ID NO: 662787 - DNA, 15 bp, Homo sapiens
aaccacacctctctt

SEQ ID NO: 662788 - DNA, 15 bp, Homo sapiens
accacacctctcttt

SEQ ID NO: 662789 - DNA, 15 bp, Homo sapiens
ccacacctctctttt

SEQ ID NO: 662790 - DNA, 15 bp, Homo sapiens
cacacctctcttttt

SEQ ID NO: 662791 - DNA, 15 bp, Homo sapiens
acacctctctttttc

SEQ ID NO: 662792 - DNA, 15 bp, Homo sapiens
cacctctctttttct

SEQ ID NO: 662793 - DNA, 15 bp, Homo sapiens
acctctctttttctt

SEQ ID NO: 662794 - DNA, 15 bp, Homo sapiens
cctctctttttcttt

SEQ ID NO: 662795 - DNA, 15 bp, Homo sapiens
ctctctttttctttt

SEQ ID NO: 662796 - DNA, 15 bp, Homo sapiens
tctctttttcttttt

SEQ ID NO: 662797 - DNA, 15 bp, Homo sapiens
ctctttttctttttc

SEQ ID NO: 662798 - DNA, 15 bp, Homo sapiens
tctttttctttttcc

SEQ ID NO: 662799 - DNA, 15 bp, Homo sapiens
ctttttctttttcct

SEQ ID NO: 662800 - DNA, 15 bp, Homo sapiens
tttttctttttcctt

SEQ ID NO: 662801 - DNA, 15 bp, Homo sapiens
ttttctttttcctta

SEQ ID NO: 662802 - DNA, 15 bp, Homo sapiens
tttctttttccttat

SEQ ID NO: 662803 - DNA, 15 bp, Homo sapiens
ttctttttccttatt

SEQ ID NO: 662804 - DNA, 15 bp, Homo sapiens
tctttttccttattc

SEQ ID NO: 662805 - DNA, 15 bp, Homo sapiens
ctttttccttattca

SEQ ID NO: 662806 - DNA, 15 bp, Homo sapiens
tttttccttattcat

SEQ ID NO: 662807 - DNA, 15 bp, Homo sapiens
ttttccttattcata

SEQ ID NO: 662808 - DNA, 15 bp, Homo sapiens
tttccttattcatag

SEQ ID NO: 662809 - DNA, 15 bp, Homo sapiens
ttccttattcatagt

SEQ ID NO: 662810 - DNA, 15 bp, Homo sapiens
tccttattcatagtt

SEQ ID NO: 662811 - DNA, 15 bp, Homo sapiens
ccttattcatagttc

SEQ ID NO: 662812 - DNA, 15 bp, Homo sapiens
cttattcatagttca

SEQ ID NO: 662813 - DNA, 15 bp, Homo sapiens
ttattcatagttcat

SEQ ID NO: 662814 - DNA, 15 bp, Homo sapiens
tattcatagttcatt

SEQ ID NO: 662815 - DNA, 15 bp, Homo sapiens
attcatagttcattt

SEQ ID NO: 662816 - DNA, 15 bp, Homo sapiens
ttcatagttcatttc

SEQ ID NO: 662817 - DNA, 15 bp, Homo sapiens
tcatagttcatttct

SEQ ID NO: 662818 - DNA, 15 bp, Homo sapiens
catagttcatttctt

SEQ ID NO: 662819 - DNA, 15 bp, Homo sapiens
atagttcatttcttc

SEQ ID NO: 662820 - DNA, 15 bp, Homo sapiens
tagttcatttcttca

SEQ ID NO: 662821 - DNA, 15 bp, Homo sapiens
agttcatttcttcaa

SEQ ID NO: 662822 - DNA, 15 bp, Homo sapiens
gttcatttcttcaat

SEQ ID NO: 662823 - DNA, 15 bp, Homo sapiens
ttcatttcttcaatt

SEQ ID NO: 662824 - DNA, 15 bp, Homo sapiens
tcatttcttcaattc

SEQ ID NO: 662825 - DNA, 15 bp, Homo sapiens
catttcttcaattca

SEQ ID NO: 662826 - DNA, 15 bp, Homo sapiens
atttcttcaattcag

SEQ ID NO: 662827 - DNA, 15 bp, Homo sapiens
tttcttcaattcaga

SEQ ID NO: 662828 - DNA, 15 bp, Homo sapiens
ttcttcaattcagaa

SEQ ID NO: 662829 - DNA, 15 bp, Homo sapiens
tcttcaattcagaaa

SEQ ID NO: 662830 - DNA, 15 bp, Homo sapiens
cttcaattcagaaaa

SEQ ID NO: 662831 - DNA, 15 bp, Homo sapiens
ttcaattcagaaaaa

SEQ ID NO: 662832 - DNA, 15 bp, Homo sapiens
tcaattcagaaaaat

SEQ ID NO: 662833 - DNA, 15 bp, Homo sapiens
caattcagaaaaata

SEQ ID NO: 662834 - DNA, 15 bp, Homo sapiens
aattcagaaaaatag

SEQ ID NO: 662835 - DNA, 15 bp, Homo sapiens
attcagaaaaatagt

SEQ ID NO: 662836 - DNA, 15 bp, Homo sapiens
ttcagaaaaatagtt

SEQ ID NO: 662837 - DNA, 15 bp, Homo sapiens
tcagaaaaatagttt

SEQ ID NO: 662838 - DNA, 15 bp, Homo sapiens
cagaaaaatagtttt

SEQ ID NO: 662839 - DNA, 15 bp, Homo sapiens
agaaaaatagttttc

SEQ ID NO: 662840 - DNA, 15 bp, Homo sapiens
gaaaaatagttttca

SEQ ID NO: 662841 - DNA, 15 bp, Homo sapiens
aaaaatagttttcat

SEQ ID NO: 662842 - DNA, 15 bp, Homo sapiens
aaaatagttttcatg

SEQ ID NO: 662843 - DNA, 15 bp, Homo sapiens
aaatagttttcatgg

SEQ ID NO: 662844 - DNA, 15 bp, Homo sapiens
aatagttttcatggg

SEQ ID NO: 662845 - DNA, 15 bp, Homo sapiens
atagttttcatgggg

SEQ ID NO: 662846 - DNA, 15 bp, Homo sapiens
tagttttcatggggg

SEQ ID NO: 662847 - DNA, 15 bp, Homo sapiens
agttttcatggggga

SEQ ID NO: 662848 - DNA, 15 bp, Homo sapiens
gttttcatgggggag

SEQ ID NO: 662849 - DNA, 15 bp, Homo sapiens
ttttcatgggggagg

SEQ ID NO: 662850 - DNA, 15 bp, Homo sapiens
tttcatgggggaggg

SEQ ID NO: 662851 - DNA, 15 bp, Homo sapiens
ttcatgggggagggg

SEQ ID NO: 662852 - DNA, 15 bp, Homo sapiens
tcatgggggagggga

SEQ ID NO: 662853 - DNA, 15 bp, Homo sapiens
catgggggaggggat

SEQ ID NO: 662854 - DNA, 15 bp, Homo sapiens
atgggggaggggatt

SEQ ID NO: 662855 - DNA, 15 bp, Homo sapiens
tgggggaggggattg

SEQ ID NO: 662856 - DNA, 15 bp, Homo sapiens
gggggaggggattgg

SEQ ID NO: 662857 - DNA, 15 bp, Homo sapiens
ggggaggggattggg

SEQ ID NO: 662858 - DNA, 15 bp, Homo sapiens
gggaggggattggga

SEQ ID NO: 662859 - DNA, 15 bp, Homo sapiens
ggaggggattgggag

SEQ ID NO: 662860 - DNA, 15 bp, Homo sapiens
gaggggattgggagg

SEQ ID NO: 662861 - DNA, 15 bp, Homo sapiens
aggggattgggagga

SEQ ID NO: 662862 - DNA, 15 bp, Homo sapiens
ggggattgggaggag

SEQ ID NO: 662863 - DNA, 15 bp, Homo sapiens
gggattgggaggagt

SEQ ID NO: 662864 - DNA, 15 bp, Homo sapiens
ggattgggaggagtg

SEQ ID NO: 662865 - DNA, 15 bp, Homo sapiens
gattgggaggagtgc

SEQ ID NO: 662866 - DNA, 15 bp, Homo sapiens
attgggaggagtgca

SEQ ID NO: 662867 - DNA, 15 bp, Homo sapiens
ttgggaggagtgcaa

SEQ ID NO: 662868 - DNA, 15 bp, Homo sapiens
tgggaggagtgcaat

SEQ ID NO: 662869 - DNA, 15 bp, Homo sapiens
gggaggagtgcaatg

SEQ ID NO: 662870 - DNA, 15 bp, Homo sapiens
ggaggagtgcaatgg

SEQ ID NO: 662871 - DNA, 15 bp, Homo sapiens
gaggagtgcaatggc

SEQ ID NO: 662872 - DNA, 15 bp, Homo sapiens
aggagtgcaatggct

SEQ ID NO: 662873 - DNA, 15 bp, Homo sapiens
ggagtgcaatggcta

SEQ ID NO: 662874 - DNA, 15 bp, Homo sapiens
gagtgcaatggctaa

SEQ ID NO: 662875 - DNA, 15 bp, Homo sapiens
agtgcaatggctaaa

SEQ ID NO: 662876 - DNA, 15 bp, Homo sapiens
gtgcaatggctaaaa

SEQ ID NO: 662877 - DNA, 15 bp, Homo sapiens
tgcaatggctaaaaa

SEQ ID NO: 662878 - DNA, 15 bp, Homo sapiens
gcaatggctaaaaaa

SEQ ID NO: 662879 - DNA, 15 bp, Homo sapiens
caatggctaaaaaac

SEQ ID NO: 662880 - DNA, 15 bp, Homo sapiens
aatggctaaaaaaca

SEQ ID NO: 662881 - DNA, 15 bp, Homo sapiens
atggctaaaaaacag

SEQ ID NO: 662882 - DNA, 15 bp, Homo sapiens
tggctaaaaaacagg

SEQ ID NO: 662883 - DNA, 15 bp, Homo sapiens
ggctaaaaaacaggc

SEQ ID NO: 662884 - DNA, 15 bp, Homo sapiens
gctaaaaaacaggct

SEQ ID NO: 662885 - DNA, 15 bp, Homo sapiens
ctaaaaaacaggctc

SEQ ID NO: 662886 - DNA, 15 bp, Homo sapiens
taaaaaacaggctca

SEQ ID NO: 662887 - DNA, 15 bp, Homo sapiens
aaaaaacaggctcag

SEQ ID NO: 662888 - DNA, 15 bp, Homo sapiens
aaaaacaggctcagt

SEQ ID NO: 662889 - DNA, 15 bp, Homo sapiens
aaaacaggctcagtg

SEQ ID NO: 662890 - DNA, 15 bp, Homo sapiens
aaacaggctcagtga

SEQ ID NO: 662891 - DNA, 15 bp, Homo sapiens
aacaggctcagtgaa

SEQ ID NO: 662892 - DNA, 15 bp, Homo sapiens
acaggctcagtgaag

SEQ ID NO: 662893 - DNA, 15 bp, Homo sapiens
caggctcagtgaagg

SEQ ID NO: 662894 - DNA, 15 bp, Homo sapiens
aggctcagtgaaggc

SEQ ID NO: 662895 - DNA, 15 bp, Homo sapiens
ggctcagtgaaggcc

SEQ ID NO: 662896 - DNA, 15 bp, Homo sapiens
gctcagtgaaggcca

SEQ ID NO: 662897 - DNA, 15 bp, Homo sapiens
ctcagtgaaggccag

SEQ ID NO: 662898 - DNA, 15 bp, Homo sapiens
tcagtgaaggccaga

SEQ ID NO: 662899 - DNA, 15 bp, Homo sapiens
cagtgaaggccagaa

SEQ ID NO: 662900 - DNA, 15 bp, Homo sapiens
agtgaaggccagaag

SEQ ID NO: 662901 - DNA, 15 bp, Homo sapiens
gtgaaggccagaaga

SEQ ID NO: 662902 - DNA, 15 bp, Homo sapiens
tgaaggccagaagat

SEQ ID NO: 662903 - DNA, 15 bp, Homo sapiens
gaaggccagaagatt

SEQ ID NO: 662904 - DNA, 15 bp, Homo sapiens
aaggccagaagatta

SEQ ID NO: 662905 - DNA, 15 bp, Homo sapiens
aggccagaagattac

SEQ ID NO: 662906 - DNA, 15 bp, Homo sapiens
ggccagaagattact

SEQ ID NO: 662907 - DNA, 15 bp, Homo sapiens
gccagaagattacta

SEQ ID NO: 662908 - DNA, 15 bp, Homo sapiens
ccagaagattactaa

SEQ ID NO: 662909 - DNA, 15 bp, Homo sapiens
cagaagattactaag

SEQ ID NO: 662910 - DNA, 15 bp, Homo sapiens
agaagattactaaga

SEQ ID NO: 662911 - DNA, 15 bp, Homo sapiens
gaagattactaagaa

SEQ ID NO: 662912 - DNA, 15 bp, Homo sapiens
aagattactaagaaa

SEQ ID NO: 662913 - DNA, 15 bp, Homo sapiens
agattactaagaaac

SEQ ID NO: 662914 - DNA, 15 bp, Homo sapiens
gattactaagaaacc

SEQ ID NO: 662915 - DNA, 15 bp, Homo sapiens
attactaagaaacct

SEQ ID NO: 662916 - DNA, 15 bp, Homo sapiens
ttactaagaaacctc

SEQ ID NO: 662917 - DNA, 15 bp, Homo sapiens
tactaagaaacctct

SEQ ID NO: 662918 - DNA, 15 bp, Homo sapiens
actaagaaacctctt

SEQ ID NO: 662919 - DNA, 15 bp, Homo sapiens
ctaagaaacctcttc

SEQ ID NO: 662920 - DNA, 15 bp, Homo sapiens
taagaaacctcttca

SEQ ID NO: 662921 - DNA, 15 bp, Homo sapiens
aagaaacctcttcag

SEQ ID NO: 662922 - DNA, 15 bp, Homo sapiens
agaaacctcttcagt

SEQ ID NO: 662923 - DNA, 15 bp, Homo sapiens
gaaacctcttcagtt

SEQ ID NO: 662924 - DNA, 15 bp, Homo sapiens
aaacctcttcagttg

SEQ ID NO: 662925 - DNA, 15 bp, Homo sapiens
aacctcttcagttga

SEQ ID NO: 662926 - DNA, 15 bp, Homo sapiens
acctcttcagttgac

SEQ ID NO: 662927 - DNA, 15 bp, Homo sapiens
cctcttcagttgacc

SEQ ID NO: 662928 - DNA, 15 bp, Homo sapiens
ctcttcagttgacct

SEQ ID NO: 662929 - DNA, 15 bp, Homo sapiens
tcttcagttgacctt

SEQ ID NO: 662930 - DNA, 15 bp, Homo sapiens
cttcagttgaccttg

SEQ ID NO: 662931 - DNA, 15 bp, Homo sapiens
ttcagttgaccttga

SEQ ID NO: 662932 - DNA, 15 bp, Homo sapiens
tcagttgaccttgag

SEQ ID NO: 662933 - DNA, 15 bp, Homo sapiens
cagttgaccttgagt

SEQ ID NO: 662934 - DNA, 15 bp, Homo sapiens
agttgaccttgagtt

SEQ ID NO: 662935 - DNA, 15 bp, Homo sapiens
gttgaccttgagttt

SEQ ID NO: 662936 - DNA, 15 bp, Homo sapiens
ttgaccttgagtttg

SEQ ID NO: 662937 - DNA, 15 bp, Homo sapiens
tgaccttgagtttgc

SEQ ID NO: 662938 - DNA, 15 bp, Homo sapiens
gaccttgagtttgct

SEQ ID NO: 662939 - DNA, 15 bp, Homo sapiens
accttgagtttgctg

SEQ ID NO: 662940 - DNA, 15 bp, Homo sapiens
ccttgagtttgctgc

SEQ ID NO: 662941 - DNA, 15 bp, Homo sapiens
cttgagtttgctgca

SEQ ID NO: 662942 - DNA, 15 bp, Homo sapiens
ttgagtttgctgcaa

SEQ ID NO: 662943 - DNA, 15 bp, Homo sapiens
tgagtttgctgcaat

SEQ ID NO: 662944 - DNA, 15 bp, Homo sapiens
gagtttgctgcaata

SEQ ID NO: 662945 - DNA, 15 bp, Homo sapiens
agtttgctgcaatat

SEQ ID NO: 662946 - DNA, 15 bp, Homo sapiens
gtttgctgcaatatc

SEQ ID NO: 662947 - DNA, 15 bp, Homo sapiens
tttgctgcaatatcc

SEQ ID NO: 662948 - DNA, 15 bp, Homo sapiens
ttgctgcaatatcca

SEQ ID NO: 662949 - DNA, 15 bp, Homo sapiens
tgctgcaatatccaa

SEQ ID NO: 662950 - DNA, 15 bp, Homo sapiens
gctgcaatatccaaa

SEQ ID NO: 662951 - DNA, 15 bp, Homo sapiens
ctgcaatatccaaag

SEQ ID NO: 662952 - DNA, 15 bp, Homo sapiens
tgcaatatccaaaga

SEQ ID NO: 662953 - DNA, 15 bp, Homo sapiens
gcaatatccaaagat

SEQ ID NO: 662954 - DNA, 15 bp, Homo sapiens
caatatccaaagata

SEQ ID NO: 662955 - DNA, 15 bp, Homo sapiens
aatatccaaagatat

SEQ ID NO: 662956 - DNA, 15 bp, Homo sapiens
atatccaaagatata

SEQ ID NO: 662957 - DNA, 15 bp, Homo sapiens
tatccaaagatatat

SEQ ID NO: 662958 - DNA, 15 bp, Homo sapiens
atccaaagatatatg

SEQ ID NO: 662959 - DNA, 15 bp, Homo sapiens
tccaaagatatatgg

SEQ ID NO: 662960 - DNA, 15 bp, Homo sapiens
ccaaagatatatggc

SEQ ID NO: 662961 - DNA, 15 bp, Homo sapiens
caaagatatatggca

SEQ ID NO: 662962 - DNA, 15 bp, Homo sapiens
aaagatatatggcat

SEQ ID NO: 662963 - DNA, 15 bp, Homo sapiens
aagatatatggcatt

SEQ ID NO: 662964 - DNA, 15 bp, Homo sapiens
agatatatggcattc

SEQ ID NO: 662965 - DNA, 15 bp, Homo sapiens
gatatatggcattct

SEQ ID NO: 662966 - DNA, 15 bp, Homo sapiens
atatatggcattcta

SEQ ID NO: 662967 - DNA, 15 bp, Homo sapiens
tatatggcattctaa

SEQ ID NO: 662968 - DNA, 15 bp, Homo sapiens
atatggcattctaaa

SEQ ID NO: 662969 - DNA, 15 bp, Homo sapiens
tatggcattctaaaa

SEQ ID NO: 662970 - DNA, 15 bp, Homo sapiens
atggcattctaaaat

SEQ ID NO: 662971 - DNA, 15 bp, Homo sapiens
tggcattctaaaata

SEQ ID NO: 662972 - DNA, 15 bp, Homo sapiens
ggcattctaaaatac

SEQ ID NO: 662973 - DNA, 15 bp, Homo sapiens
gcattctaaaataca

SEQ ID NO: 662974 - DNA, 15 bp, Homo sapiens
cattctaaaatacaa

SEQ ID NO: 662975 - DNA, 15 bp, Homo sapiens
attctaaaatacaat

SEQ ID NO: 662976 - DNA, 15 bp, Homo sapiens
ttctaaaatacaata

SEQ ID NO: 662977 - DNA, 15 bp, Homo sapiens
tctaaaatacaataa

SEQ ID NO: 662978 - DNA, 15 bp, Homo sapiens
ctaaaatacaataat

SEQ ID NO: 662979 - DNA, 15 bp, Homo sapiens
taaaatacaataatt

SEQ ID NO: 662980 - DNA, 15 bp, Homo sapiens
aaaatacaataattt

SEQ ID NO: 662981 - DNA, 15 bp, Homo sapiens
aaatacaataattta

SEQ ID NO: 662982 - DNA, 15 bp, Homo sapiens
aatacaataatttaa

SEQ ID NO: 662983 - DNA, 15 bp, Homo sapiens
atacaataatttaag

SEQ ID NO: 662984 - DNA, 15 bp, Homo sapiens
tacaataatttaagg

SEQ ID NO: 662985 - DNA, 15 bp, Homo sapiens
acaataatttaagga

SEQ ID NO: 662986 - DNA, 15 bp, Homo sapiens
caataatttaaggaa

SEQ ID NO: 662987 - DNA, 15 bp, Homo sapiens
aataatttaaggaag

SEQ ID NO: 662988 - DNA, 15 bp, Homo sapiens
ataatttaaggaagg

SEQ ID NO: 662989 - DNA, 15 bp, Homo sapiens
taatttaaggaaggc

SEQ ID NO: 662990 - DNA, 15 bp, Homo sapiens
aatttaaggaaggca

SEQ ID NO: 662991 - DNA, 15 bp, Homo sapiens
atttaaggaaggcat

SEQ ID NO: 662992 - DNA, 15 bp, Homo sapiens
tttaaggaaggcatt

SEQ ID NO: 662993 - DNA, 15 bp, Homo sapiens
ttaaggaaggcattt

SEQ ID NO: 662994 - DNA, 15 bp, Homo sapiens
taaggaaggcattta

SEQ ID NO: 662995 - DNA, 15 bp, Homo sapiens
aaggaaggcatttac

SEQ ID NO: 662996 - DNA, 15 bp, Homo sapiens
aggaaggcatttaca

SEQ ID NO: 662997 - DNA, 15 bp, Homo sapiens
ggaaggcatttacag

SEQ ID NO: 662998 - DNA, 15 bp, Homo sapiens
gaaggcatttacagt

SEQ ID NO: 662999 - DNA, 15 bp, Homo sapiens
aaggcatttacagtt

SEQ ID NO: 663000 - DNA, 15 bp, Homo sapiens
aggcatttacagttt

SEQ ID NO: 663001 - DNA, 15 bp, Homo sapiens
ggcatttacagtttc

SEQ ID NO: 663002 - DNA, 15 bp, Homo sapiens
gcatttacagtttca

SEQ ID NO: 663003 - DNA, 15 bp, Homo sapiens
catttacagtttcat

SEQ ID NO: 663004 - DNA, 15 bp, Homo sapiens
atttacagtttcatg

SEQ ID NO: 663005 - DNA, 15 bp, Homo sapiens
tttacagtttcatgg

SEQ ID NO: 663006 - DNA, 15 bp, Homo sapiens
ttacagtttcatggt

SEQ ID NO: 663007 - DNA, 15 bp, Homo sapiens
tacagtttcatggtc

SEQ ID NO: 663008 - DNA, 15 bp, Homo sapiens
acagtttcatggtca

SEQ ID NO: 663009 - DNA, 15 bp, Homo sapiens
cagtttcatggtcat

SEQ ID NO: 663010 - DNA, 15 bp, Homo sapiens
agtttcatggtcatg

SEQ ID NO: 663011 - DNA, 15 bp, Homo sapiens
gtttcatggtcatgt

SEQ ID NO: 663012 - DNA, 15 bp, Homo sapiens
tttcatggtcatgtt

SEQ ID NO: 663013 - DNA, 15 bp, Homo sapiens
ttcatggtcatgttt

SEQ ID NO: 663014 - DNA, 15 bp, Homo sapiens
tcatggtcatgttta

SEQ ID NO: 663015 - DNA, 15 bp, Homo sapiens
catggtcatgtttaa

SEQ ID NO: 663016 - DNA, 15 bp, Homo sapiens
atggtcatgtttaag

SEQ ID NO: 663017 - DNA, 15 bp, Homo sapiens
tggtcatgtttaagc

SEQ ID NO: 663018 - DNA, 15 bp, Homo sapiens
ggtcatgtttaagca

SEQ ID NO: 663019 - DNA, 15 bp, Homo sapiens
gtcatgtttaagcaa

SEQ ID NO: 663020 - DNA, 15 bp, Homo sapiens
tcatgtttaagcaat

SEQ ID NO: 663021 - DNA, 15 bp, Homo sapiens
catgtttaagcaata

SEQ ID NO: 663022 - DNA, 15 bp, Homo sapiens
atgtttaagcaataa

SEQ ID NO: 663023 - DNA, 15 bp, Homo sapiens
tgtttaagcaataat

SEQ ID NO: 663024 - DNA, 15 bp, Homo sapiens
gtttaagcaataata

SEQ ID NO: 663025 - DNA, 15 bp, Homo sapiens
tttaagcaataatat

SEQ ID NO: 663026 - DNA, 15 bp, Homo sapiens
ttaagcaataatata

SEQ ID NO: 663027 - DNA, 15 bp, Homo sapiens
taagcaataatatat

SEQ ID NO: 663028 - DNA, 15 bp, Homo sapiens
aagcaataatatatt

SEQ ID NO: 663029 - DNA, 15 bp, Homo sapiens
agcaataatatatta

SEQ ID NO: 663030 - DNA, 15 bp, Homo sapiens
gcaataatatattaa

SEQ ID NO: 663031 - DNA, 15 bp, Homo sapiens
caataatatattaag

SEQ ID NO: 663032 - DNA, 15 bp, Homo sapiens
aataatatattaaga

SEQ ID NO: 663033 - DNA, 15 bp, Homo sapiens
ataatatattaagaa

SEQ ID NO: 663034 - DNA, 15 bp, Homo sapiens
taatatattaagaat

SEQ ID NO: 663035 - DNA, 15 bp, Homo sapiens
aatatattaagaata

SEQ ID NO: 663036 - DNA, 15 bp, Homo sapiens
atatattaagaataa

SEQ ID NO: 663037 - DNA, 15 bp, Homo sapiens
tatattaagaataaa

SEQ ID NO: 663038 - DNA, 15 bp, Homo sapiens
atattaagaataaaa

SEQ ID NO: 663039 - DNA, 15 bp, Homo sapiens
tattaagaataaaag

SEQ ID NO: 663040 - DNA, 15 bp, Homo sapiens
attaagaataaaagg

SEQ ID NO: 663041 - DNA, 15 bp, Homo sapiens
ttaagaataaaaggg

SEQ ID NO: 663042 - DNA, 15 bp, Homo sapiens
taagaataaaaggga

SEQ ID NO: 663043 - DNA, 15 bp, Homo sapiens
aagaataaaagggaa

SEQ ID NO: 663044 - DNA, 15 bp, Homo sapiens
agaataaaagggaaa

SEQ ID NO: 663045 - DNA, 15 bp, Homo sapiens
gaataaaagggaaag

SEQ ID NO: 663046 - DNA, 15 bp, Homo sapiens
aataaaagggaaaga

SEQ ID NO: 663047 - DNA, 15 bp, Homo sapiens
ataaaagggaaagaa

SEQ ID NO: 663048 - DNA, 15 bp, Homo sapiens
taaaagggaaagaaa

SEQ ID NO: 663049 - DNA, 15 bp, Homo sapiens
aaaagggaaagaaat

SEQ ID NO: 663050 - DNA, 15 bp, Homo sapiens
aaagggaaagaaata

SEQ ID NO: 663051 - DNA, 15 bp, Homo sapiens
aagggaaagaaataa

SEQ ID NO: 663052 - DNA, 15 bp, Homo sapiens
agggaaagaaataat

SEQ ID NO: 663053 - DNA, 15 bp, Homo sapiens
gggaaagaaataata

SEQ ID NO: 663054 - DNA, 15 bp, Homo sapiens
ggaaagaaataatag

SEQ ID NO: 663055 - DNA, 15 bp, Homo sapiens
gaaagaaataatagc

SEQ ID NO: 663056 - DNA, 15 bp, Homo sapiens
aaagaaataatagca

SEQ ID NO: 663057 - DNA, 15 bp, Homo sapiens
aagaaataatagcag

SEQ ID NO: 663058 - DNA, 15 bp, Homo sapiens
agaaataatagcagc

SEQ ID NO: 663059 - DNA, 15 bp, Homo sapiens
gaaataatagcagca

SEQ ID NO: 663060 - DNA, 15 bp, Homo sapiens
aaataatagcagcaa

SEQ ID NO: 663061 - DNA, 15 bp, Homo sapiens
aataatagcagcaaa

SEQ ID NO: 663062 - DNA, 15 bp, Homo sapiens
ataatagcagcaaaa

SEQ ID NO: 663063 - DNA, 15 bp, Homo sapiens
taatagcagcaaaat

SEQ ID NO: 663064 - DNA, 15 bp, Homo sapiens
aatagcagcaaaatc

SEQ ID NO: 663065 - DNA, 15 bp, Homo sapiens
atagcagcaaaatcc

SEQ ID NO: 663066 - DNA, 15 bp, Homo sapiens
tagcagcaaaatcct

SEQ ID NO: 663067 - DNA, 15 bp, Homo sapiens
agcagcaaaatcctg

SEQ ID NO: 663068 - DNA, 15 bp, Homo sapiens
gcagcaaaatcctgc

SEQ ID NO: 663069 - DNA, 15 bp, Homo sapiens
cagcaaaatcctgca

SEQ ID NO: 663070 - DNA, 15 bp, Homo sapiens
agcaaaatcctgcag

SEQ ID NO: 663071 - DNA, 15 bp, Homo sapiens
gcaaaatcctgcaga

SEQ ID NO: 663072 - DNA, 15 bp, Homo sapiens
caaaatcctgcagaa

SEQ ID NO: 663073 - DNA, 15 bp, Homo sapiens
aaaatcctgcagaaa

SEQ ID NO: 663074 - DNA, 15 bp, Homo sapiens
aaatcctgcagaaag

SEQ ID NO: 663075 - DNA, 15 bp, Homo sapiens
aatcctgcagaaaga

SEQ ID NO: 663076 - DNA, 15 bp, Homo sapiens
atcctgcagaaagaa

SEQ ID NO: 663077 - DNA, 15 bp, Homo sapiens
tcctgcagaaagaaa

SEQ ID NO: 663078 - DNA, 15 bp, Homo sapiens
cctgcagaaagaaaa

SEQ ID NO: 663079 - DNA, 15 bp, Homo sapiens
ctgcagaaagaaaag

SEQ ID NO: 663080 - DNA, 15 bp, Homo sapiens
tgcagaaagaaaaga

SEQ ID NO: 663081 - DNA, 15 bp, Homo sapiens
gcagaaagaaaagaa

SEQ ID NO: 663082 - DNA, 15 bp, Homo sapiens
cagaaagaaaagaaa

SEQ ID NO: 663083 - DNA, 15 bp, Homo sapiens
agaaagaaaagaaat

SEQ ID NO: 663084 - DNA, 15 bp, Homo sapiens
gaaagaaaagaaata

SEQ ID NO: 663085 - DNA, 15 bp, Homo sapiens
aaagaaaagaaataa

SEQ ID NO: 663086 - DNA, 15 bp, Homo sapiens
aagaaaagaaataat

SEQ ID NO: 663087 - DNA, 15 bp, Homo sapiens
agaaaagaaataatg

SEQ ID NO: 663088 - DNA, 15 bp, Homo sapiens
gaaaagaaataatgg

SEQ ID NO: 663089 - DNA, 15 bp, Homo sapiens
aaaagaaataatggt

SEQ ID NO: 663090 - DNA, 15 bp, Homo sapiens
aaagaaataatggtc

SEQ ID NO: 663091 - DNA, 15 bp, Homo sapiens
aagaaataatggtct

SEQ ID NO: 663092 - DNA, 15 bp, Homo sapiens
agaaataatggtctg

SEQ ID NO: 663093 - DNA, 15 bp, Homo sapiens
gaaataatggtctga

SEQ ID NO: 663094 - DNA, 15 bp, Homo sapiens
aaataatggtctgat

SEQ ID NO: 663095 - DNA, 15 bp, Homo sapiens
aataatggtctgatg

SEQ ID NO: 663096 - DNA, 15 bp, Homo sapiens
ataatggtctgatga

SEQ ID NO: 663097 - DNA, 15 bp, Homo sapiens
taatggtctgatgag

SEQ ID NO: 663098 - DNA, 15 bp, Homo sapiens
aatggtctgatgagt

SEQ ID NO: 663099 - DNA, 15 bp, Homo sapiens
atggtctgatgagtc

SEQ ID NO: 663100 - DNA, 15 bp, Homo sapiens
tggtctgatgagtcc

SEQ ID NO: 663101 - DNA, 15 bp, Homo sapiens
ggtctgatgagtcca

SEQ ID NO: 663102 - DNA, 15 bp, Homo sapiens
gtctgatgagtccag

SEQ ID NO: 663103 - DNA, 15 bp, Homo sapiens
tctgatgagtccaga

SEQ ID NO: 663104 - DNA, 15 bp, Homo sapiens
ctgatgagtccagat

SEQ ID NO: 663105 - DNA, 15 bp, Homo sapiens
tgatgagtccagatt

SEQ ID NO: 663106 - DNA, 15 bp, Homo sapiens
gatgagtccagattt

SEQ ID NO: 663107 - DNA, 15 bp, Homo sapiens
atgagtccagatttt

SEQ ID NO: 663108 - DNA, 15 bp, Homo sapiens
tgagtccagatttta

SEQ ID NO: 663109 - DNA, 15 bp, Homo sapiens
gagtccagattttat

SEQ ID NO: 663110 - DNA, 15 bp, Homo sapiens
agtccagattttatc

SEQ ID NO: 663111 - DNA, 15 bp, Homo sapiens
gtccagattttatct

SEQ ID NO: 663112 - DNA, 15 bp, Homo sapiens
tccagattttatctg

SEQ ID NO: 663113 - DNA, 15 bp, Homo sapiens
ccagattttatctga

SEQ ID NO: 663114 - DNA, 15 bp, Homo sapiens
cagattttatctgaa

SEQ ID NO: 663115 - DNA, 15 bp, Homo sapiens
agattttatctgaaa

SEQ ID NO: 663116 - DNA, 15 bp, Homo sapiens
gattttatctgaaat

SEQ ID NO: 663117 - DNA, 15 bp, Homo sapiens
attttatctgaaatt

SEQ ID NO: 663118 - DNA, 15 bp, Homo sapiens
ttttatctgaaattc

SEQ ID NO: 663119 - DNA, 15 bp, Homo sapiens
tttatctgaaattcc

SEQ ID NO: 663120 - DNA, 15 bp, Homo sapiens
ttatctgaaattcct

SEQ ID NO: 663121 - DNA, 15 bp, Homo sapiens
tatctgaaattcctg

SEQ ID NO: 663122 - DNA, 15 bp, Homo sapiens
atctgaaattcctga

SEQ ID NO: 663123 - DNA, 15 bp, Homo sapiens
tctgaaattcctgaa

SEQ ID NO: 663124 - DNA, 15 bp, Homo sapiens
ctgaaattcctgaaa

SEQ ID NO: 663125 - DNA, 15 bp, Homo sapiens
tgaaattcctgaaat

SEQ ID NO: 663126 - DNA, 15 bp, Homo sapiens
gaaattcctgaaata

SEQ ID NO: 663127 - DNA, 15 bp, Homo sapiens
aaattcctgaaataa

SEQ ID NO: 663128 - DNA, 15 bp, Homo sapiens
aattcctgaaataat

SEQ ID NO: 663129 - DNA, 15 bp, Homo sapiens
attcctgaaataatg

SEQ ID NO: 663130 - DNA, 15 bp, Homo sapiens
ttcctgaaataatgt

SEQ ID NO: 663131 - DNA, 15 bp, Homo sapiens
tcctgaaataatgtt

SEQ ID NO: 663132 - DNA, 15 bp, Homo sapiens
cctgaaataatgtta

SEQ ID NO: 663133 - DNA, 15 bp, Homo sapiens
ctgaaataatgttat

SEQ ID NO: 663134 - DNA, 15 bp, Homo sapiens
tgaaataatgttatc

SEQ ID NO: 663135 - DNA, 15 bp, Homo sapiens
gaaataatgttatca

SEQ ID NO: 663136 - DNA, 15 bp, Homo sapiens
aaataatgttatcac

SEQ ID NO: 663137 - DNA, 15 bp, Homo sapiens
aataatgttatcaca

SEQ ID NO: 663138 - DNA, 15 bp, Homo sapiens
ataatgttatcacac

SEQ ID NO: 663139 - DNA, 15 bp, Homo sapiens
taatgttatcacacc

SEQ ID NO: 663140 - DNA, 15 bp, Homo sapiens
aatgttatcacaccc

SEQ ID NO: 663141 - DNA, 15 bp, Homo sapiens
atgttatcacaccct

SEQ ID NO: 663142 - DNA, 15 bp, Homo sapiens
tgttatcacacccta

SEQ ID NO: 663143 - DNA, 15 bp, Homo sapiens
gttatcacaccctaa

SEQ ID NO: 663144 - DNA, 15 bp, Homo sapiens
ttatcacaccctaaa

SEQ ID NO: 663145 - DNA, 15 bp, Homo sapiens
tatcacaccctaaat

SEQ ID NO: 663146 - DNA, 15 bp, Homo sapiens
atcacaccctaaatg

SEQ ID NO: 663147 - DNA, 15 bp, Homo sapiens
tcacaccctaaatga

SEQ ID NO: 663148 - DNA, 15 bp, Homo sapiens
cacaccctaaatgaa

SEQ ID NO: 663149 - DNA, 15 bp, Homo sapiens
acaccctaaatgaac

SEQ ID NO: 663150 - DNA, 15 bp, Homo sapiens
caccctaaatgaacc

SEQ ID NO: 663151 - DNA, 15 bp, Homo sapiens
accctaaatgaacca

SEQ ID NO: 663152 - DNA, 15 bp, Homo sapiens
ccctaaatgaaccat

SEQ ID NO: 663153 - DNA, 15 bp, Homo sapiens
cctaaatgaaccatt

SEQ ID NO: 663154 - DNA, 15 bp, Homo sapiens
ctaaatgaaccattc

SEQ ID NO: 663155 - DNA, 15 bp, Homo sapiens
taaatgaaccattca

SEQ ID NO: 663156 - DNA, 15 bp, Homo sapiens
aaatgaaccattcag

SEQ ID NO: 663157 - DNA, 15 bp, Homo sapiens
aatgaaccattcagc

SEQ ID NO: 663158 - DNA, 15 bp, Homo sapiens
atgaaccattcagcc

SEQ ID NO: 663159 - DNA, 15 bp, Homo sapiens
tgaaccattcagcct

SEQ ID NO: 663160 - DNA, 15 bp, Homo sapiens
gaaccattcagcctc

SEQ ID NO: 663161 - DNA, 15 bp, Homo sapiens
aaccattcagcctca

SEQ ID NO: 663162 - DNA, 15 bp, Homo sapiens
accattcagcctcag

SEQ ID NO: 663163 - DNA, 15 bp, Homo sapiens
ccattcagcctcagt

SEQ ID NO: 663164 - DNA, 15 bp, Homo sapiens
cattcagcctcagtc

SEQ ID NO: 663165 - DNA, 15 bp, Homo sapiens
attcagcctcagtct

SEQ ID NO: 663166 - DNA, 15 bp, Homo sapiens
ttcagcctcagtctg

SEQ ID NO: 663167 - DNA, 15 bp, Homo sapiens
tcagcctcagtctgc

SEQ ID NO: 663168 - DNA, 15 bp, Homo sapiens
cagcctcagtctgca

SEQ ID NO: 663169 - DNA, 15 bp, Homo sapiens
agcctcagtctgcat

SEQ ID NO: 663170 - DNA, 15 bp, Homo sapiens
gcctcagtctgcata

SEQ ID NO: 663171 - DNA, 15 bp, Homo sapiens
cctcagtctgcatac

SEQ ID NO: 663172 - DNA, 15 bp, Homo sapiens
ctcagtctgcatact

SEQ ID NO: 663173 - DNA, 15 bp, Homo sapiens
tcagtctgcatactt

SEQ ID NO: 663174 - DNA, 15 bp, Homo sapiens
cagtctgcatacttg

SEQ ID NO: 663175 - DNA, 15 bp, Homo sapiens
agtctgcatacttgc

SEQ ID NO: 663176 - DNA, 15 bp, Homo sapiens
gtctgcatacttgct

SEQ ID NO: 663177 - DNA, 15 bp, Homo sapiens
tctgcatacttgctt

SEQ ID NO: 663178 - DNA, 15 bp, Homo sapiens
ctgcatacttgcttg

SEQ ID NO: 663179 - DNA, 15 bp, Homo sapiens
tgcatacttgcttgg

SEQ ID NO: 663180 - DNA, 15 bp, Homo sapiens
gcatacttgcttggt

SEQ ID NO: 663181 - DNA, 15 bp, Homo sapiens
catacttgcttggta

SEQ ID NO: 663182 - DNA, 15 bp, Homo sapiens
atacttgcttggtat

SEQ ID NO: 663183 - DNA, 15 bp, Homo sapiens
tacttgcttggtatt

SEQ ID NO: 663184 - DNA, 15 bp, Homo sapiens
acttgcttggtattt

SEQ ID NO: 663185 - DNA, 15 bp, Homo sapiens
cttgcttggtatttt

SEQ ID NO: 663186 - DNA, 15 bp, Homo sapiens
ttgcttggtattttg

SEQ ID NO: 663187 - DNA, 15 bp, Homo sapiens
tgcttggtattttga

SEQ ID NO: 663188 - DNA, 15 bp, Homo sapiens
gcttggtattttgaa

SEQ ID NO: 663189 - DNA, 15 bp, Homo sapiens
cttggtattttgaaa

SEQ ID NO: 663190 - DNA, 15 bp, Homo sapiens
ttggtattttgaaaa

SEQ ID NO: 663191 - DNA, 15 bp, Homo sapiens
tggtattttgaaaaa

SEQ ID NO: 663192 - DNA, 15 bp, Homo sapiens
ggtattttgaaaaaa

SEQ ID NO: 663193 - DNA, 15 bp, Homo sapiens
gtattttgaaaaaaa

SEQ ID NO: 663194 - DNA, 15 bp, Homo sapiens
tattttgaaaaaaaa

SEQ ID NO: 663195 - DNA, 15 bp, Homo sapiens
attttgaaaaaaaat

SEQ ID NO: 663196 - DNA, 15 bp, Homo sapiens
ttttgaaaaaaaata

SEQ ID NO: 663197 - DNA, 15 bp, Homo sapiens
tttgaaaaaaaataa

SEQ ID NO: 663198 - DNA, 15 bp, Homo sapiens
ttgaaaaaaaataat

SEQ ID NO: 663199 - DNA, 15 bp, Homo sapiens
tgaaaaaaaataata

SEQ ID NO: 663200 - DNA, 15 bp, Homo sapiens
gaaaaaaaataatat

SEQ ID NO: 663201 - DNA, 15 bp, Homo sapiens
aaaaaaaataatata

SEQ ID NO: 663202 - DNA, 15 bp, Homo sapiens
aaaaaaataatataa

SEQ ID NO: 663203 - DNA, 15 bp, Homo sapiens
aaaaaataatataat

SEQ ID NO: 663204 - DNA, 15 bp, Homo sapiens
aaaaataatataata

SEQ ID NO: 663205 - DNA, 15 bp, Homo sapiens
aaaataatataatac

SEQ ID NO: 663206 - DNA, 15 bp, Homo sapiens
aaataatataatacc

SEQ ID NO: 663207 - DNA, 15 bp, Homo sapiens
aataatataatacca

SEQ ID NO: 663208 - DNA, 15 bp, Homo sapiens
ataatataataccac

SEQ ID NO: 663209 - DNA, 15 bp, Homo sapiens
taatataataccaca

SEQ ID NO: 663210 - DNA, 15 bp, Homo sapiens
aatataataccacaa

SEQ ID NO: 663211 - DNA, 15 bp, Homo sapiens
atataataccacaac

SEQ ID NO: 663212 - DNA, 15 bp, Homo sapiens
tataataccacaaca

SEQ ID NO: 663213 - DNA, 15 bp, Homo sapiens
ataataccacaacat

SEQ ID NO: 663214 - DNA, 15 bp, Homo sapiens
taataccacaacatg

SEQ ID NO: 663215 - DNA, 15 bp, Homo sapiens
aataccacaacatgc

SEQ ID NO: 663216 - DNA, 15 bp, Homo sapiens
ataccacaacatgct

SEQ ID NO: 663217 - DNA, 15 bp, Homo sapiens
taccacaacatgctt

SEQ ID NO: 663218 - DNA, 15 bp, Homo sapiens
accacaacatgcttg

SEQ ID NO: 663219 - DNA, 15 bp, Homo sapiens
ccacaacatgcttga

SEQ ID NO: 663220 - DNA, 15 bp, Homo sapiens
cacaacatgcttgag

SEQ ID NO: 663221 - DNA, 15 bp, Homo sapiens
acaacatgcttgagc

SEQ ID NO: 663222 - DNA, 15 bp, Homo sapiens
caacatgcttgagca

SEQ ID NO: 663223 - DNA, 15 bp, Homo sapiens
aacatgcttgagcac

SEQ ID NO: 663224 - DNA, 15 bp, Homo sapiens
acatgcttgagcact

SEQ ID NO: 663225 - DNA, 15 bp, Homo sapiens
catgcttgagcactc

SEQ ID NO: 663226 - DNA, 15 bp, Homo sapiens
atgcttgagcactct

SEQ ID NO: 663227 - DNA, 15 bp, Homo sapiens
tgcttgagcactctt

SEQ ID NO: 663228 - DNA, 15 bp, Homo sapiens
gcttgagcactcttc

SEQ ID NO: 663229 - DNA, 15 bp, Homo sapiens
cttgagcactcttcg

SEQ ID NO: 663230 - DNA, 15 bp, Homo sapiens
ttgagcactcttcgt

SEQ ID NO: 663231 - DNA, 15 bp, Homo sapiens
tgagcactcttcgta

SEQ ID NO: 663232 - DNA, 15 bp, Homo sapiens
gagcactcttcgtat

SEQ ID NO: 663233 - DNA, 15 bp, Homo sapiens
agcactcttcgtata

SEQ ID NO: 663234 - DNA, 15 bp, Homo sapiens
gcactcttcgtatag

SEQ ID NO: 663235 - DNA, 15 bp, Homo sapiens
cactcttcgtataga

SEQ ID NO: 663236 - DNA, 15 bp, Homo sapiens
actcttcgtatagac

SEQ ID NO: 663237 - DNA, 15 bp, Homo sapiens
ctcttcgtatagact

SEQ ID NO: 663238 - DNA, 15 bp, Homo sapiens
tcttcgtatagactt

SEQ ID NO: 663239 - DNA, 15 bp, Homo sapiens
cttcgtatagacttt

SEQ ID NO: 663240 - DNA, 15 bp, Homo sapiens
ttcgtatagactttt

SEQ ID NO: 663241 - DNA, 15 bp, Homo sapiens
tcgtatagactttta

SEQ ID NO: 663242 - DNA, 15 bp, Homo sapiens
cgtatagacttttaa

SEQ ID NO: 663243 - DNA, 15 bp, Homo sapiens
gtatagacttttaaa

SEQ ID NO: 663244 - DNA, 15 bp, Homo sapiens
tatagacttttaaat

SEQ ID NO: 663245 - DNA, 15 bp, Homo sapiens
atagacttttaaatt

SEQ ID NO: 663246 - DNA, 15 bp, Homo sapiens
tagacttttaaattt

SEQ ID NO: 663247 - DNA, 15 bp, Homo sapiens
agacttttaaatttt

SEQ ID NO: 663248 - DNA, 15 bp, Homo sapiens
gacttttaaatttta

SEQ ID NO: 663249 - DNA, 15 bp, Homo sapiens
acttttaaattttac

SEQ ID NO: 663250 - DNA, 15 bp, Homo sapiens
cttttaaattttact

SEQ ID NO: 663251 - DNA, 15 bp, Homo sapiens
ttttaaattttactg

SEQ ID NO: 663252 - DNA, 15 bp, Homo sapiens
tttaaattttactga

SEQ ID NO: 663253 - DNA, 15 bp, Homo sapiens
ttaaattttactgaa

SEQ ID NO: 663254 - DNA, 15 bp, Homo sapiens
taaattttactgaac

SEQ ID NO: 663255 - DNA, 15 bp, Homo sapiens
aaattttactgaact

SEQ ID NO: 663256 - DNA, 15 bp, Homo sapiens
aattttactgaactt

SEQ ID NO: 663257 - DNA, 15 bp, Homo sapiens
attttactgaactta

SEQ ID NO: 663258 - DNA, 15 bp, Homo sapiens
ttttactgaacttag

SEQ ID NO: 663259 - DNA, 15 bp, Homo sapiens
tttactgaacttagc

SEQ ID NO: 663260 - DNA, 15 bp, Homo sapiens
ttactgaacttagca

SEQ ID NO: 663261 - DNA, 15 bp, Homo sapiens
tactgaacttagcag

SEQ ID NO: 663262 - DNA, 15 bp, Homo sapiens
actgaacttagcagt

SEQ ID NO: 663263 - DNA, 15 bp, Homo sapiens
ctgaacttagcagta

SEQ ID NO: 663264 - DNA, 15 bp, Homo sapiens
tgaacttagcagtaa

SEQ ID NO: 663265 - DNA, 15 bp, Homo sapiens
gaacttagcagtaat

SEQ ID NO: 663266 - DNA, 15 bp, Homo sapiens
aacttagcagtaatt

SEQ ID NO: 663267 - DNA, 15 bp, Homo sapiens
acttagcagtaattt

SEQ ID NO: 663268 - DNA, 15 bp, Homo sapiens
cttagcagtaattta

SEQ ID NO: 663269 - DNA, 15 bp, Homo sapiens
ttagcagtaatttat

SEQ ID NO: 663270 - DNA, 15 bp, Homo sapiens
tagcagtaatttatt

SEQ ID NO: 663271 - DNA, 15 bp, Homo sapiens
agcagtaatttattt

SEQ ID NO: 663272 - DNA, 15 bp, Homo sapiens
gcagtaatttatttt

SEQ ID NO: 663273 - DNA, 15 bp, Homo sapiens
cagtaatttatttta

SEQ ID NO: 663274 - DNA, 15 bp, Homo sapiens
agtaatttattttac

SEQ ID NO: 663275 - DNA, 15 bp, Homo sapiens
gtaatttattttacc

SEQ ID NO: 663276 - DNA, 15 bp, Homo sapiens
taatttattttacca

SEQ ID NO: 663277 - DNA, 15 bp, Homo sapiens
aatttattttaccaa

SEQ ID NO: 663278 - DNA, 15 bp, Homo sapiens
atttattttaccaaa

SEQ ID NO: 663279 - DNA, 15 bp, Homo sapiens
tttattttaccaaaa

SEQ ID NO: 663280 - DNA, 15 bp, Homo sapiens
ttattttaccaaaaa

SEQ ID NO: 663281 - DNA, 15 bp, Homo sapiens
tattttaccaaaaaa

SEQ ID NO: 663282 - DNA, 15 bp, Homo sapiens
attttaccaaaaaaa

SEQ ID NO: 663283 - DNA, 15 bp, Homo sapiens
ttttaccaaaaaaag

SEQ ID NO: 663284 - DNA, 15 bp, Homo sapiens
tttaccaaaaaaaga

SEQ ID NO: 663285 - DNA, 15 bp, Homo sapiens
ttaccaaaaaaagag

SEQ ID NO: 663286 - DNA, 15 bp, Homo sapiens
taccaaaaaaagagg

SEQ ID NO: 663287 - DNA, 15 bp, Homo sapiens
accaaaaaaagagga

SEQ ID NO: 663288 - DNA, 15 bp, Homo sapiens
ccaaaaaaagaggat

SEQ ID NO: 663289 - DNA, 15 bp, Homo sapiens
caaaaaaagaggatg

SEQ ID NO: 663290 - DNA, 15 bp, Homo sapiens
aaaaaaagaggatgg

SEQ ID NO: 663291 - DNA, 15 bp, Homo sapiens
aaaaaagaggatggc

SEQ ID NO: 663292 - DNA, 15 bp, Homo sapiens
aaaaagaggatggca

SEQ ID NO: 663293 - DNA, 15 bp, Homo sapiens
aaaagaggatggcat

SEQ ID NO: 663294 - DNA, 15 bp, Homo sapiens
aaagaggatggcatt

SEQ ID NO: 663295 - DNA, 15 bp, Homo sapiens
aagaggatggcattt

SEQ ID NO: 663296 - DNA, 15 bp, Homo sapiens
agaggatggcatttg

SEQ ID NO: 663297 - DNA, 15 bp, Homo sapiens
gaggatggcatttga

SEQ ID NO: 663298 - DNA, 15 bp, Homo sapiens
aggatggcatttgaa

SEQ ID NO: 663299 - DNA, 15 bp, Homo sapiens
ggatggcatttgaaa

SEQ ID NO: 663300 - DNA, 15 bp, Homo sapiens
gatggcatttgaaaa

SEQ ID NO: 663301 - DNA, 15 bp, Homo sapiens
atggcatttgaaaaa

SEQ ID NO: 663302 - DNA, 15 bp, Homo sapiens
tggcatttgaaaaac

SEQ ID NO: 663303 - DNA, 15 bp, Homo sapiens
ggcatttgaaaaact

SEQ ID NO: 663304 - DNA, 15 bp, Homo sapiens
gcatttgaaaaacta

SEQ ID NO: 663305 - DNA, 15 bp, Homo sapiens
catttgaaaaactat

SEQ ID NO: 663306 - DNA, 15 bp, Homo sapiens
atttgaaaaactatg

SEQ ID NO: 663307 - DNA, 15 bp, Homo sapiens
tttgaaaaactatgt

SEQ ID NO: 663308 - DNA, 15 bp, Homo sapiens
ttgaaaaactatgtt

SEQ ID NO: 663309 - DNA, 15 bp, Homo sapiens
tgaaaaactatgttt

SEQ ID NO: 663310 - DNA, 15 bp, Homo sapiens
gaaaaactatgttta

SEQ ID NO: 663311 - DNA, 15 bp, Homo sapiens
aaaaactatgtttaa

SEQ ID NO: 663312 - DNA, 15 bp, Homo sapiens
aaaactatgtttaat

SEQ ID NO: 663313 - DNA, 15 bp, Homo sapiens
aaactatgtttaatc

SEQ ID NO: 663314 - DNA, 15 bp, Homo sapiens
aactatgtttaatct

SEQ ID NO: 663315 - DNA, 15 bp, Homo sapiens
actatgtttaatctt

SEQ ID NO: 663316 - DNA, 15 bp, Homo sapiens
ctatgtttaatcttt

SEQ ID NO: 663317 - DNA, 15 bp, Homo sapiens
tatgtttaatcttta

SEQ ID NO: 663318 - DNA, 15 bp, Homo sapiens
atgtttaatctttat

SEQ ID NO: 663319 - DNA, 15 bp, Homo sapiens
tgtttaatctttatc

SEQ ID NO: 663320 - DNA, 15 bp, Homo sapiens
gtttaatctttatct

SEQ ID NO: 663321 - DNA, 15 bp, Homo sapiens
tttaatctttatctt

SEQ ID NO: 663322 - DNA, 15 bp, Homo sapiens
ttaatctttatcttc

SEQ ID NO: 663323 - DNA, 15 bp, Homo sapiens
taatctttatcttct

SEQ ID NO: 663324 - DNA, 15 bp, Homo sapiens
aatctttatcttctg

SEQ ID NO: 663325 - DNA, 15 bp, Homo sapiens
atctttatcttctga

SEQ ID NO: 663326 - DNA, 15 bp, Homo sapiens
tctttatcttctgat

SEQ ID NO: 663327 - DNA, 15 bp, Homo sapiens
ctttatcttctgatt

SEQ ID NO: 663328 - DNA, 15 bp, Homo sapiens
tttatcttctgattt

SEQ ID NO: 663329 - DNA, 15 bp, Homo sapiens
ttatcttctgatttt

SEQ ID NO: 663330 - DNA, 15 bp, Homo sapiens
tatcttctgatttta

SEQ ID NO: 663331 - DNA, 15 bp, Homo sapiens
atcttctgattttat

SEQ ID NO: 663332 - DNA, 15 bp, Homo sapiens
tcttctgattttata

SEQ ID NO: 663333 - DNA, 15 bp, Homo sapiens
cttctgattttatat

SEQ ID NO: 663334 - DNA, 15 bp, Homo sapiens
ttctgattttatatt

SEQ ID NO: 663335 - DNA, 15 bp, Homo sapiens
ctgattttatattct

SEQ ID NO: 663336 - DNA, 15 bp, Homo sapiens
tgattttatattctg

SEQ ID NO: 663337 - DNA, 15 bp, Homo sapiens
gattttatattctgg

SEQ ID NO: 663338 - DNA, 15 bp, Homo sapiens
attttatattctggg

SEQ ID NO: 663339 - DNA, 15 bp, Homo sapiens
ttttatattctgggc

SEQ ID NO: 663340 - DNA, 15 bp, Homo sapiens
tttatattctgggca

SEQ ID NO: 663341 - DNA, 15 bp, Homo sapiens
ttatattctgggcag

SEQ ID NO: 663342 - DNA, 15 bp, Homo sapiens
tatattctgggcaga

SEQ ID NO: 663343 - DNA, 15 bp, Homo sapiens
atattctgggcagat

SEQ ID NO: 663344 - DNA, 15 bp, Homo sapiens
tattctgggcagatg

SEQ ID NO: 663345 - DNA, 15 bp, Homo sapiens
attctgggcagatgt

SEQ ID NO: 663346 - DNA, 15 bp, Homo sapiens
ttctgggcagatgtt

SEQ ID NO: 663347 - DNA, 15 bp, Homo sapiens
tctgggcagatgttg

SEQ ID NO: 663348 - DNA, 15 bp, Homo sapiens
ctgggcagatgttgg

SEQ ID NO: 663349 - DNA, 15 bp, Homo sapiens
tgggcagatgttggg

SEQ ID NO: 663350 - DNA, 15 bp, Homo sapiens
gggcagatgttgggt

SEQ ID NO: 663351 - DNA, 15 bp, Homo sapiens
ggcagatgttgggta

SEQ ID NO: 663352 - DNA, 15 bp, Homo sapiens
gcagatgttgggtac

SEQ ID NO: 663353 - DNA, 15 bp, Homo sapiens
cagatgttgggtacc

SEQ ID NO: 663354 - DNA, 15 bp, Homo sapiens
agatgttgggtacca

SEQ ID NO: 663355 - DNA, 15 bp, Homo sapiens
gatgttgggtaccaa

SEQ ID NO: 663356 - DNA, 15 bp, Homo sapiens
atgttgggtaccaat

SEQ ID NO: 663357 - DNA, 15 bp, Homo sapiens
tgttgggtaccaatg

SEQ ID NO: 663358 - DNA, 15 bp, Homo sapiens
gttgggtaccaatgg

SEQ ID NO: 663359 - DNA, 15 bp, Homo sapiens
ttgggtaccaatggc

SEQ ID NO: 663360 - DNA, 15 bp, Homo sapiens
tgggtaccaatggca

SEQ ID NO: 663361 - DNA, 15 bp, Homo sapiens
gggtaccaatggcat

SEQ ID NO: 663362 - DNA, 15 bp, Homo sapiens
ggtaccaatggcata

SEQ ID NO: 663363 - DNA, 15 bp, Homo sapiens
gtaccaatggcatag

SEQ ID NO: 663364 - DNA, 15 bp, Homo sapiens
taccaatggcataga

SEQ ID NO: 663365 - DNA, 15 bp, Homo sapiens
accaatggcatagat

SEQ ID NO: 663366 - DNA, 15 bp, Homo sapiens
ccaatggcatagatg

SEQ ID NO: 663367 - DNA, 15 bp, Homo sapiens
caatggcatagatga

SEQ ID NO: 663368 - DNA, 15 bp, Homo sapiens
aatggcatagatgat

SEQ ID NO: 663369 - DNA, 15 bp, Homo sapiens
atggcatagatgatg

SEQ ID NO: 663370 - DNA, 15 bp, Homo sapiens
tggcatagatgatgt

SEQ ID NO: 663371 - DNA, 15 bp, Homo sapiens
ggcatagatgatgtc

SEQ ID NO: 663372 - DNA, 15 bp, Homo sapiens
gcatagatgatgtcc

SEQ ID NO: 663373 - DNA, 15 bp, Homo sapiens
catagatgatgtcct

SEQ ID NO: 663374 - DNA, 15 bp, Homo sapiens
atagatgatgtcctg

SEQ ID NO: 663375 - DNA, 15 bp, Homo sapiens
tagatgatgtcctgt

SEQ ID NO: 663376 - DNA, 15 bp, Homo sapiens
agatgatgtcctgtc

SEQ ID NO: 663377 - DNA, 15 bp, Homo sapiens
gatgatgtcctgtct

SEQ ID NO: 663378 - DNA, 15 bp, Homo sapiens
atgatgtcctgtctg

SEQ ID NO: 663379 - DNA, 15 bp, Homo sapiens
tgatgtcctgtctgg

SEQ ID NO: 663380 - DNA, 15 bp, Homo sapiens
gatgtcctgtctgga

SEQ ID NO: 663381 - DNA, 15 bp, Homo sapiens
atgtcctgtctggaa

SEQ ID NO: 663382 - DNA, 15 bp, Homo sapiens
tgtcctgtctggaag

SEQ ID NO: 663383 - DNA, 15 bp, Homo sapiens
gtcctgtctggaagc

SEQ ID NO: 663384 - DNA, 15 bp, Homo sapiens
tcctgtctggaagcc

SEQ ID NO: 663385 - DNA, 15 bp, Homo sapiens
cctgtctggaagccc

SEQ ID NO: 663386 - DNA, 15 bp, Homo sapiens
ctgtctggaagccca

SEQ ID NO: 663387 - DNA, 15 bp, Homo sapiens
tgtctggaagcccat

SEQ ID NO: 663388 - DNA, 15 bp, Homo sapiens
gtctggaagcccatt

SEQ ID NO: 663389 - DNA, 15 bp, Homo sapiens
tctggaagcccattc

SEQ ID NO: 663390 - DNA, 15 bp, Homo sapiens
ctggaagcccattca

SEQ ID NO: 663391 - DNA, 15 bp, Homo sapiens
tggaagcccattcat

SEQ ID NO: 663392 - DNA, 15 bp, Homo sapiens
ggaagcccattcata

SEQ ID NO: 663393 - DNA, 15 bp, Homo sapiens
gaagcccattcatac

SEQ ID NO: 663394 - DNA, 15 bp, Homo sapiens
aagcccattcatact

SEQ ID NO: 663395 - DNA, 15 bp, Homo sapiens
agcccattcatacta

SEQ ID NO: 663396 - DNA, 15 bp, Homo sapiens
gcccattcatactat

SEQ ID NO: 663397 - DNA, 15 bp, Homo sapiens
cccattcatactatc

SEQ ID NO: 663398 - DNA, 15 bp, Homo sapiens
ccattcatactatca

SEQ ID NO: 663399 - DNA, 15 bp, Homo sapiens
cattcatactatcag

SEQ ID NO: 663400 - DNA, 15 bp, Homo sapiens
attcatactatcaga

SEQ ID NO: 663401 - DNA, 15 bp, Homo sapiens
ttcatactatcagag

SEQ ID NO: 663402 - DNA, 15 bp, Homo sapiens
tcatactatcagaga

SEQ ID NO: 663403 - DNA, 15 bp, Homo sapiens
catactatcagagat

SEQ ID NO: 663404 - DNA, 15 bp, Homo sapiens
atactatcagagata

SEQ ID NO: 663405 - DNA, 15 bp, Homo sapiens
tactatcagagataa

SEQ ID NO: 663406 - DNA, 15 bp, Homo sapiens
actatcagagataac

SEQ ID NO: 663407 - DNA, 15 bp, Homo sapiens
ctatcagagataaca

SEQ ID NO: 663408 - DNA, 15 bp, Homo sapiens
tatcagagataacat

SEQ ID NO: 663409 - DNA, 15 bp, Homo sapiens
atcagagataacatg

SEQ ID NO: 663410 - DNA, 15 bp, Homo sapiens
tcagagataacatgt

SEQ ID NO: 663411 - DNA, 15 bp, Homo sapiens
cagagataacatgta

SEQ ID NO: 663412 - DNA, 15 bp, Homo sapiens
agagataacatgtag

SEQ ID NO: 663413 - DNA, 15 bp, Homo sapiens
gagataacatgtagt

SEQ ID NO: 663414 - DNA, 15 bp, Homo sapiens
agataacatgtagtt

SEQ ID NO: 663415 - DNA, 15 bp, Homo sapiens
gataacatgtagtta

SEQ ID NO: 663416 - DNA, 15 bp, Homo sapiens
ataacatgtagttac

SEQ ID NO: 663417 - DNA, 15 bp, Homo sapiens
taacatgtagttacg

SEQ ID NO: 663418 - DNA, 15 bp, Homo sapiens
aacatgtagttacgg

SEQ ID NO: 663419 - DNA, 15 bp, Homo sapiens
acatgtagttacggc

SEQ ID NO: 663420 - DNA, 15 bp, Homo sapiens
catgtagttacggct

SEQ ID NO: 663421 - DNA, 15 bp, Homo sapiens
atgtagttacggcta

SEQ ID NO: 663422 - DNA, 15 bp, Homo sapiens
tgtagttacggctag

SEQ ID NO: 663423 - DNA, 15 bp, Homo sapiens
gtagttacggctaga

SEQ ID NO: 663424 - DNA, 15 bp, Homo sapiens
tagttacggctagac

SEQ ID NO: 663425 - DNA, 15 bp, Homo sapiens
agttacggctagaca

SEQ ID NO: 663426 - DNA, 15 bp, Homo sapiens
gttacggctagacat

SEQ ID NO: 663427 - DNA, 15 bp, Homo sapiens
ttacggctagacatt

SEQ ID NO: 663428 - DNA, 15 bp, Homo sapiens
tacggctagacattt

SEQ ID NO: 663429 - DNA, 15 bp, Homo sapiens
acggctagacatttc

SEQ ID NO: 663430 - DNA, 15 bp, Homo sapiens
cggctagacatttcc

SEQ ID NO: 663431 - DNA, 15 bp, Homo sapiens
ggctagacatttcca

SEQ ID NO: 663432 - DNA, 15 bp, Homo sapiens
gctagacatttccaa

SEQ ID NO: 663433 - DNA, 15 bp, Homo sapiens
ctagacatttccaag

SEQ ID NO: 663434 - DNA, 15 bp, Homo sapiens
tagacatttccaagg

SEQ ID NO: 663435 - DNA, 15 bp, Homo sapiens
agacatttccaagga

SEQ ID NO: 663436 - DNA, 15 bp, Homo sapiens
gacatttccaaggaa

SEQ ID NO: 663437 - DNA, 15 bp, Homo sapiens
acatttccaaggaaa

SEQ ID NO: 663438 - DNA, 15 bp, Homo sapiens
catttccaaggaaac

SEQ ID NO: 663439 - DNA, 15 bp, Homo sapiens
atttccaaggaaact

SEQ ID NO: 663440 - DNA, 15 bp, Homo sapiens
tttccaaggaaacta

SEQ ID NO: 663441 - DNA, 15 bp, Homo sapiens
ttccaaggaaactat

SEQ ID NO: 663442 - DNA, 15 bp, Homo sapiens
tccaaggaaactatg

SEQ ID NO: 663443 - DNA, 15 bp, Homo sapiens
ccaaggaaactatgc

SEQ ID NO: 663444 - DNA, 15 bp, Homo sapiens
caaggaaactatgca

SEQ ID NO: 663445 - DNA, 15 bp, Homo sapiens
aaggaaactatgcat

SEQ ID NO: 663446 - DNA, 15 bp, Homo sapiens
aggaaactatgcatc

SEQ ID NO: 663447 - DNA, 15 bp, Homo sapiens
ggaaactatgcatct

SEQ ID NO: 663448 - DNA, 15 bp, Homo sapiens
gaaactatgcatctg

SEQ ID NO: 663449 - DNA, 15 bp, Homo sapiens
aaactatgcatctgt

SEQ ID NO: 663450 - DNA, 15 bp, Homo sapiens
aactatgcatctgtc

SEQ ID NO: 663451 - DNA, 15 bp, Homo sapiens
actatgcatctgtcc

SEQ ID NO: 663452 - DNA, 15 bp, Homo sapiens
ctatgcatctgtcca

SEQ ID NO: 663453 - DNA, 15 bp, Homo sapiens
tatgcatctgtccac

SEQ ID NO: 663454 - DNA, 15 bp, Homo sapiens
atgcatctgtccacc

SEQ ID NO: 663455 - DNA, 15 bp, Homo sapiens
tgcatctgtccacct

SEQ ID NO: 663456 - DNA, 15 bp, Homo sapiens
gcatctgtccacctg

SEQ ID NO: 663457 - DNA, 15 bp, Homo sapiens
catctgtccacctga

SEQ ID NO: 663458 - DNA, 15 bp, Homo sapiens
atctgtccacctgaa

SEQ ID NO: 663459 - DNA, 15 bp, Homo sapiens
tctgtccacctgaaa

SEQ ID NO: 663460 - DNA, 15 bp, Homo sapiens
ctgtccacctgaaaa

SEQ ID NO: 663461 - DNA, 15 bp, Homo sapiens
tgtccacctgaaaat

SEQ ID NO: 663462 - DNA, 15 bp, Homo sapiens
gtccacctgaaaata

SEQ ID NO: 663463 - DNA, 15 bp, Homo sapiens
tccacctgaaaataa

SEQ ID NO: 663464 - DNA, 15 bp, Homo sapiens
ccacctgaaaataag

SEQ ID NO: 663465 - DNA, 15 bp, Homo sapiens
cacctgaaaataagt

SEQ ID NO: 663466 - DNA, 15 bp, Homo sapiens
acctgaaaataagtg

SEQ ID NO: 663467 - DNA, 15 bp, Homo sapiens
cctgaaaataagtga

SEQ ID NO: 663468 - DNA, 15 bp, Homo sapiens
ctgaaaataagtgaa

SEQ ID NO: 663469 - DNA, 15 bp, Homo sapiens
tgaaaataagtgaat

SEQ ID NO: 663470 - DNA, 15 bp, Homo sapiens
gaaaataagtgaata

SEQ ID NO: 663471 - DNA, 15 bp, Homo sapiens
aaaataagtgaatat

SEQ ID NO: 663472 - DNA, 15 bp, Homo sapiens
aaataagtgaatatc

SEQ ID NO: 663473 - DNA, 15 bp, Homo sapiens
aataagtgaatatca

SEQ ID NO: 663474 - DNA, 15 bp, Homo sapiens
ataagtgaatatcac

SEQ ID NO: 663475 - DNA, 15 bp, Homo sapiens
taagtgaatatcaca

SEQ ID NO: 663476 - DNA, 15 bp, Homo sapiens
aagtgaatatcacac

SEQ ID NO: 663477 - DNA, 15 bp, Homo sapiens
agtgaatatcacaca

SEQ ID NO: 663478 - DNA, 15 bp, Homo sapiens
gtgaatatcacacag

SEQ ID NO: 663479 - DNA, 15 bp, Homo sapiens
tgaatatcacacaga

SEQ ID NO: 663480 - DNA, 15 bp, Homo sapiens
gaatatcacacagag

SEQ ID NO: 663481 - DNA, 15 bp, Homo sapiens
aatatcacacagaga

SEQ ID NO: 663482 - DNA, 15 bp, Homo sapiens
atatcacacagagaa

SEQ ID NO: 663483 - DNA, 15 bp, Homo sapiens
tatcacacagagaac

SEQ ID NO: 663484 - DNA, 15 bp, Homo sapiens
atcacacagagaact

SEQ ID NO: 663485 - DNA, 15 bp, Homo sapiens
tcacacagagaactc

SEQ ID NO: 663486 - DNA, 15 bp, Homo sapiens
cacacagagaactca

SEQ ID NO: 663487 - DNA, 15 bp, Homo sapiens
acacagagaactcat

SEQ ID NO: 663488 - DNA, 15 bp, Homo sapiens
cacagagaactcatg

SEQ ID NO: 663489 - DNA, 15 bp, Homo sapiens
acagagaactcatgt

SEQ ID NO: 663490 - DNA, 15 bp, Homo sapiens
cagagaactcatgta

SEQ ID NO: 663491 - DNA, 15 bp, Homo sapiens
agagaactcatgtag

SEQ ID NO: 663492 - DNA, 15 bp, Homo sapiens
gagaactcatgtagc

SEQ ID NO: 663493 - DNA, 15 bp, Homo sapiens
agaactcatgtagca

SEQ ID NO: 663494 - DNA, 15 bp, Homo sapiens
gaactcatgtagcat

SEQ ID NO: 663495 - DNA, 15 bp, Homo sapiens
aactcatgtagcatt

SEQ ID NO: 663496 - DNA, 15 bp, Homo sapiens
actcatgtagcattg

SEQ ID NO: 663497 - DNA, 15 bp, Homo sapiens
ctcatgtagcattga

SEQ ID NO: 663498 - DNA, 15 bp, Homo sapiens
tcatgtagcattgac

SEQ ID NO: 663499 - DNA, 15 bp, Homo sapiens
catgtagcattgaca

SEQ ID NO: 663500 - DNA, 15 bp, Homo sapiens
atgtagcattgacag

SEQ ID NO: 663501 - DNA, 15 bp, Homo sapiens
tgtagcattgacaga

SEQ ID NO: 663502 - DNA, 15 bp, Homo sapiens
gtagcattgacagac

SEQ ID NO: 663503 - DNA, 15 bp, Homo sapiens
tagcattgacagaca

SEQ ID NO: 663504 - DNA, 15 bp, Homo sapiens
agcattgacagacac

SEQ ID NO: 663505 - DNA, 15 bp, Homo sapiens
gcattgacagacacc

SEQ ID NO: 663506 - DNA, 15 bp, Homo sapiens
cattgacagacacca

SEQ ID NO: 663507 - DNA, 15 bp, Homo sapiens
attgacagacaccaa

SEQ ID NO: 663508 - DNA, 15 bp, Homo sapiens
ttgacagacaccaag

SEQ ID NO: 663509 - DNA, 15 bp, Homo sapiens
tgacagacaccaagg

SEQ ID NO: 663510 - DNA, 15 bp, Homo sapiens
gacagacaccaagga

SEQ ID NO: 663511 - DNA, 15 bp, Homo sapiens
acagacaccaaggaa

SEQ ID NO: 663512 - DNA, 15 bp, Homo sapiens
cagacaccaaggaaa

SEQ ID NO: 663513 - DNA, 15 bp, Homo sapiens
agacaccaaggaaat

SEQ ID NO: 663514 - DNA, 15 bp, Homo sapiens
gacaccaaggaaatt

SEQ ID NO: 663515 - DNA, 15 bp, Homo sapiens
acaccaaggaaatta

SEQ ID NO: 663516 - DNA, 15 bp, Homo sapiens
caccaaggaaattag

SEQ ID NO: 663517 - DNA, 15 bp, Homo sapiens
accaaggaaattagt

SEQ ID NO: 663518 - DNA, 15 bp, Homo sapiens
ccaaggaaattagtg

SEQ ID NO: 663519 - DNA, 15 bp, Homo sapiens
caaggaaattagtga

SEQ ID NO: 663520 - DNA, 15 bp, Homo sapiens
aaggaaattagtgaa

SEQ ID NO: 663521 - DNA, 15 bp, Homo sapiens
aggaaattagtgaaa

SEQ ID NO: 663522 - DNA, 15 bp, Homo sapiens
ggaaattagtgaaag

SEQ ID NO: 663523 - DNA, 15 bp, Homo sapiens
gaaattagtgaaaga

SEQ ID NO: 663524 - DNA, 15 bp, Homo sapiens
aaattagtgaaagaa

SEQ ID NO: 663525 - DNA, 15 bp, Homo sapiens
aattagtgaaagaaa

SEQ ID NO: 663526 - DNA, 15 bp, Homo sapiens
attagtgaaagaaaa

SEQ ID NO: 663527 - DNA, 15 bp, Homo sapiens
ttagtgaaagaaaac

SEQ ID NO: 663528 - DNA, 15 bp, Homo sapiens
tagtgaaagaaaaca

SEQ ID NO: 663529 - DNA, 15 bp, Homo sapiens
agtgaaagaaaacat

SEQ ID NO: 663530 - DNA, 15 bp, Homo sapiens
gtgaaagaaaacatt

SEQ ID NO: 663531 - DNA, 15 bp, Homo sapiens
tgaaagaaaacattg

SEQ ID NO: 663532 - DNA, 15 bp, Homo sapiens
gaaagaaaacattgg

SEQ ID NO: 663533 - DNA, 15 bp, Homo sapiens
aaagaaaacattggc

SEQ ID NO: 663534 - DNA, 15 bp, Homo sapiens
aagaaaacattggcc

SEQ ID NO: 663535 - DNA, 15 bp, Homo sapiens
agaaaacattggcct

SEQ ID NO: 663536 - DNA, 15 bp, Homo sapiens
gaaaacattggccta

SEQ ID NO: 663537 - DNA, 15 bp, Homo sapiens
aaaacattggcctat

SEQ ID NO: 663538 - DNA, 15 bp, Homo sapiens
aaacattggcctatg

SEQ ID NO: 663539 - DNA, 15 bp, Homo sapiens
aacattggcctatgt

SEQ ID NO: 663540 - DNA, 15 bp, Homo sapiens
acattggcctatgtt

SEQ ID NO: 663541 - DNA, 15 bp, Homo sapiens
cattggcctatgtta

SEQ ID NO: 663542 - DNA, 15 bp, Homo sapiens
attggcctatgttaa

SEQ ID NO: 663543 - DNA, 15 bp, Homo sapiens
ttggcctatgttaaa

SEQ ID NO: 663544 - DNA, 15 bp, Homo sapiens
tggcctatgttaaac

SEQ ID NO: 663545 - DNA, 15 bp, Homo sapiens
ggcctatgttaaaca

SEQ ID NO: 663546 - DNA, 15 bp, Homo sapiens
gcctatgttaaacac

SEQ ID NO: 663547 - DNA, 15 bp, Homo sapiens
cctatgttaaacact

SEQ ID NO: 663548 - DNA, 15 bp, Homo sapiens
ctatgttaaacacta

SEQ ID NO: 663549 - DNA, 15 bp, Homo sapiens
tatgttaaacactag

SEQ ID NO: 663550 - DNA, 15 bp, Homo sapiens
atgttaaacactagg

SEQ ID NO: 663551 - DNA, 15 bp, Homo sapiens
tgttaaacactagga

SEQ ID NO: 663552 - DNA, 15 bp, Homo sapiens
gttaaacactaggaa

SEQ ID NO: 663553 - DNA, 15 bp, Homo sapiens
ttaaacactaggaaa

SEQ ID NO: 663554 - DNA, 15 bp, Homo sapiens
taaacactaggaaat

SEQ ID NO: 663555 - DNA, 15 bp, Homo sapiens
aaacactaggaaata

SEQ ID NO: 663556 - DNA, 15 bp, Homo sapiens
aacactaggaaataa

SEQ ID NO: 663557 - DNA, 15 bp, Homo sapiens
acactaggaaataaa

SEQ ID NO: 663558 - DNA, 15 bp, Homo sapiens
cactaggaaataaag

SEQ ID NO: 663559 - DNA, 15 bp, Homo sapiens
actaggaaataaagc

SEQ ID NO: 663560 - DNA, 15 bp, Homo sapiens
ctaggaaataaagca

SEQ ID NO: 663561 - DNA, 15 bp, Homo sapiens
taggaaataaagcaa

SEQ ID NO: 663562 - DNA, 15 bp, Homo sapiens
aggaaataaagcaat

SEQ ID NO: 663563 - DNA, 15 bp, Homo sapiens
ggaaataaagcaatc

SEQ ID NO: 663564 - DNA, 15 bp, Homo sapiens
gaaataaagcaatct

SEQ ID NO: 663565 - DNA, 15 bp, Homo sapiens
aaataaagcaatctt

SEQ ID NO: 663566 - DNA, 15 bp, Homo sapiens
aataaagcaatcttg

SEQ ID NO: 663567 - DNA, 15 bp, Homo sapiens
ataaagcaatcttgt

SEQ ID NO: 663568 - DNA, 15 bp, Homo sapiens
taaagcaatcttgtc

SEQ ID NO: 663569 - DNA, 15 bp, Homo sapiens
aaagcaatcttgtca

SEQ ID NO: 663570 - DNA, 15 bp, Homo sapiens
aagcaatcttgtcaa

SEQ ID NO: 663571 - DNA, 15 bp, Homo sapiens
agcaatcttgtcaac

SEQ ID NO: 663572 - DNA, 15 bp, Homo sapiens
gcaatcttgtcaaca

SEQ ID NO: 663573 - DNA, 15 bp, Homo sapiens
caatcttgtcaacaa

SEQ ID NO: 663574 - DNA, 15 bp, Homo sapiens
aatcttgtcaacaat

SEQ ID NO: 663575 - DNA, 15 bp, Homo sapiens
atcttgtcaacaata

SEQ ID NO: 663576 - DNA, 15 bp, Homo sapiens
tcttgtcaacaatat

SEQ ID NO: 663577 - DNA, 15 bp, Homo sapiens
cttgtcaacaatatt

SEQ ID NO: 663578 - DNA, 15 bp, Homo sapiens
ttgtcaacaatatta

SEQ ID NO: 663579 - DNA, 15 bp, Homo sapiens
tgtcaacaatattaa

SEQ ID NO: 663580 - DNA, 15 bp, Homo sapiens
gtcaacaatattaac

SEQ ID NO: 663581 - DNA, 15 bp, Homo sapiens
tcaacaatattaaca

SEQ ID NO: 663582 - DNA, 15 bp, Homo sapiens
caacaatattaacag

SEQ ID NO: 663583 - DNA, 15 bp, Homo sapiens
aacaatattaacagt

SEQ ID NO: 663584 - DNA, 15 bp, Homo sapiens
acaatattaacagtc

SEQ ID NO: 663585 - DNA, 15 bp, Homo sapiens
caatattaacagtcc

SEQ ID NO: 663586 - DNA, 15 bp, Homo sapiens
aatattaacagtcct

SEQ ID NO: 663587 - DNA, 15 bp, Homo sapiens
atattaacagtcctc

SEQ ID NO: 663588 - DNA, 15 bp, Homo sapiens
tattaacagtcctcc

SEQ ID NO: 663589 - DNA, 15 bp, Homo sapiens
attaacagtcctcct

SEQ ID NO: 663590 - DNA, 15 bp, Homo sapiens
ttaacagtcctcctg

SEQ ID NO: 663591 - DNA, 15 bp, Homo sapiens
taacagtcctcctgg

SEQ ID NO: 663592 - DNA, 15 bp, Homo sapiens
aacagtcctcctggg

SEQ ID NO: 663593 - DNA, 15 bp, Homo sapiens
acagtcctcctgggg

SEQ ID NO: 663594 - DNA, 15 bp, Homo sapiens
cagtcctcctggggc

SEQ ID NO: 663595 - DNA, 15 bp, Homo sapiens
agtcctcctggggcc

SEQ ID NO: 663596 - DNA, 15 bp, Homo sapiens
gtcctcctggggccg

SEQ ID NO: 663597 - DNA, 15 bp, Homo sapiens
tcctcctggggccga

SEQ ID NO: 663598 - DNA, 15 bp, Homo sapiens
cctcctggggccgaa

SEQ ID NO: 663599 - DNA, 15 bp, Homo sapiens
ctcctggggccgaaa

SEQ ID NO: 663600 - DNA, 15 bp, Homo sapiens
tcctggggccgaaag

SEQ ID NO: 663601 - DNA, 15 bp, Homo sapiens
cctggggccgaaaga

SEQ ID NO: 663602 - DNA, 15 bp, Homo sapiens
ctggggccgaaagag

SEQ ID NO: 663603 - DNA, 15 bp, Homo sapiens
tggggccgaaagagt

SEQ ID NO: 663604 - DNA, 15 bp, Homo sapiens
ggggccgaaagagtc

SEQ ID NO: 663605 - DNA, 15 bp, Homo sapiens
gggccgaaagagtca

SEQ ID NO: 663606 - DNA, 15 bp, Homo sapiens
ggccgaaagagtcat

SEQ ID NO: 663607 - DNA, 15 bp, Homo sapiens
gccgaaagagtcatt

SEQ ID NO: 663608 - DNA, 15 bp, Homo sapiens
ccgaaagagtcattt

SEQ ID NO: 663609 - DNA, 15 bp, Homo sapiens
cgaaagagtcatttg

SEQ ID NO: 663610 - DNA, 15 bp, Homo sapiens
gaaagagtcatttgt

SEQ ID NO: 663611 - DNA, 15 bp, Homo sapiens
aaagagtcatttgtt

SEQ ID NO: 663612 - DNA, 15 bp, Homo sapiens
aagagtcatttgttt

SEQ ID NO: 663613 - DNA, 15 bp, Homo sapiens
agagtcatttgttta

SEQ ID NO: 663614 - DNA, 15 bp, Homo sapiens
gagtcatttgtttac

SEQ ID NO: 663615 - DNA, 15 bp, Homo sapiens
agtcatttgtttacc

SEQ ID NO: 663616 - DNA, 15 bp, Homo sapiens
gtcatttgtttacct

SEQ ID NO: 663617 - DNA, 15 bp, Homo sapiens
tcatttgtttacctt

SEQ ID NO: 663618 - DNA, 15 bp, Homo sapiens
catttgtttacctta

SEQ ID NO: 663619 - DNA, 15 bp, Homo sapiens
atttgtttaccttat

SEQ ID NO: 663620 - DNA, 15 bp, Homo sapiens
tttgtttaccttatg

SEQ ID NO: 663621 - DNA, 15 bp, Homo sapiens
ttgtttaccttatga

SEQ ID NO: 663622 - DNA, 15 bp, Homo sapiens
tgtttaccttatgaa

SEQ ID NO: 663623 - DNA, 15 bp, Homo sapiens
gtttaccttatgaag

SEQ ID NO: 663624 - DNA, 15 bp, Homo sapiens
tttaccttatgaaga

SEQ ID NO: 663625 - DNA, 15 bp, Homo sapiens
ttaccttatgaagat

SEQ ID NO: 663626 - DNA, 15 bp, Homo sapiens
taccttatgaagatg

SEQ ID NO: 663627 - DNA, 15 bp, Homo sapiens
accttatgaagatgc

SEQ ID NO: 663628 - DNA, 15 bp, Homo sapiens
ccttatgaagatgcg

SEQ ID NO: 663629 - DNA, 15 bp, Homo sapiens
cttatgaagatgcgg

SEQ ID NO: 663630 - DNA, 15 bp, Homo sapiens
ttatgaagatgcggc

SEQ ID NO: 663631 - DNA, 15 bp, Homo sapiens
tatgaagatgcggct

SEQ ID NO: 663632 - DNA, 15 bp, Homo sapiens
atgaagatgcggctt

SEQ ID NO: 663633 - DNA, 15 bp, Homo sapiens
tgaagatgcggcttt

SEQ ID NO: 663634 - DNA, 15 bp, Homo sapiens
gaagatgcggctttg

SEQ ID NO: 663635 - DNA, 15 bp, Homo sapiens
aagatgcggctttgt

SEQ ID NO: 663636 - DNA, 15 bp, Homo sapiens
agatgcggctttgtg

SEQ ID NO: 663637 - DNA, 15 bp, Homo sapiens
gatgcggctttgtga

SEQ ID NO: 663638 - DNA, 15 bp, Homo sapiens
atgcggctttgtgaa

SEQ ID NO: 663639 - DNA, 15 bp, Homo sapiens
tgcggctttgtgaag

SEQ ID NO: 663640 - DNA, 15 bp, Homo sapiens
gcggctttgtgaaga

SEQ ID NO: 663641 - DNA, 15 bp, Homo sapiens
cggctttgtgaagaa

SEQ ID NO: 663642 - DNA, 15 bp, Homo sapiens
ggctttgtgaagaat

SEQ ID NO: 663643 - DNA, 15 bp, Homo sapiens
gctttgtgaagaata

SEQ ID NO: 663644 - DNA, 15 bp, Homo sapiens
ctttgtgaagaataa

SEQ ID NO: 663645 - DNA, 15 bp, Homo sapiens
tttgtgaagaataaa

SEQ ID NO: 663646 - DNA, 15 bp, Homo sapiens
ttgtgaagaataaaa

SEQ ID NO: 663647 - DNA, 15 bp, Homo sapiens
tgtgaagaataaaag

SEQ ID NO: 663648 - DNA, 15 bp, Homo sapiens
gtgaagaataaaagt

SEQ ID NO: 663649 - DNA, 15 bp, Homo sapiens
tgaagaataaaagta

SEQ ID NO: 663650 - DNA, 15 bp, Homo sapiens
gaagaataaaagtaa

SEQ ID NO: 663651 - DNA, 15 bp, Homo sapiens
aagaataaaagtaaa

SEQ ID NO: 663652 - DNA, 15 bp, Homo sapiens
agaataaaagtaaaa

SEQ ID NO: 663653 - DNA, 15 bp, Homo sapiens
gaataaaagtaaaag

SEQ ID NO: 663654 - DNA, 15 bp, Homo sapiens
aataaaagtaaaagg

SEQ ID NO: 663655 - DNA, 15 bp, Homo sapiens
ataaaagtaaaaggc

SEQ ID NO: 663656 - DNA, 15 bp, Homo sapiens
taaaagtaaaaggcc

SEQ ID NO: 663657 - DNA, 15 bp, Homo sapiens
aaaagtaaaaggcca

SEQ ID NO: 663658 - DNA, 15 bp, Homo sapiens
aaagtaaaaggccat

SEQ ID NO: 663659 - DNA, 15 bp, Homo sapiens
aagtaaaaggccatg

SEQ ID NO: 663660 - DNA, 15 bp, Homo sapiens
agtaaaaggccatgc

SEQ ID NO: 663661 - DNA, 15 bp, Homo sapiens
gtaaaaggccatgcc

SEQ ID NO: 663662 - DNA, 15 bp, Homo sapiens
taaaaggccatgccc

SEQ ID NO: 663663 - DNA, 15 bp, Homo sapiens
aaaaggccatgccca

SEQ ID NO: 663664 - DNA, 15 bp, Homo sapiens
aaaggccatgcccaa

SEQ ID NO: 663665 - DNA, 15 bp, Homo sapiens
aaggccatgcccaag

SEQ ID NO: 663666 - DNA, 15 bp, Homo sapiens
aggccatgcccaagg

SEQ ID NO: 663667 - DNA, 15 bp, Homo sapiens
ggccatgcccaagga

SEQ ID NO: 663668 - DNA, 15 bp, Homo sapiens
gccatgcccaaggat

SEQ ID NO: 663669 - DNA, 15 bp, Homo sapiens
ccatgcccaaggatt

SEQ ID NO: 663670 - DNA, 15 bp, Homo sapiens
catgcccaaggatta

SEQ ID NO: 663671 - DNA, 15 bp, Homo sapiens
atgcccaaggattat

SEQ ID NO: 663672 - DNA, 15 bp, Homo sapiens
tgcccaaggattatt

SEQ ID NO: 663673 - DNA, 15 bp, Homo sapiens
gcccaaggattatta

SEQ ID NO: 663674 - DNA, 15 bp, Homo sapiens
cccaaggattattag

SEQ ID NO: 663675 - DNA, 15 bp, Homo sapiens
ccaaggattattaga

SEQ ID NO: 663676 - DNA, 15 bp, Homo sapiens
caaggattattagaa

SEQ ID NO: 663677 - DNA, 15 bp, Homo sapiens
aaggattattagaaa

SEQ ID NO: 663678 - DNA, 15 bp, Homo sapiens
aggattattagaaag

SEQ ID NO: 663679 - DNA, 15 bp, Homo sapiens
ggattattagaaaga

SEQ ID NO: 663680 - DNA, 15 bp, Homo sapiens
gattattagaaagac

SEQ ID NO: 663681 - DNA, 15 bp, Homo sapiens
attattagaaagact

SEQ ID NO: 663682 - DNA, 15 bp, Homo sapiens
ttattagaaagactc

SEQ ID NO: 663683 - DNA, 15 bp, Homo sapiens
tattagaaagactct

SEQ ID NO: 663684 - DNA, 15 bp, Homo sapiens
attagaaagactctt

SEQ ID NO: 663685 - DNA, 15 bp, Homo sapiens
ttagaaagactcttc

SEQ ID NO: 663686 - DNA, 15 bp, Homo sapiens
tagaaagactcttct

SEQ ID NO: 663687 - DNA, 15 bp, Homo sapiens
agaaagactcttctc

SEQ ID NO: 663688 - DNA, 15 bp, Homo sapiens
gaaagactcttctca

SEQ ID NO: 663689 - DNA, 15 bp, Homo sapiens
aaagactcttctcat

SEQ ID NO: 663690 - DNA, 15 bp, Homo sapiens
aagactcttctcata

SEQ ID NO: 663691 - DNA, 15 bp, Homo sapiens
agactcttctcatac

SEQ ID NO: 663692 - DNA, 15 bp, Homo sapiens
gactcttctcatact

SEQ ID NO: 663693 - DNA, 15 bp, Homo sapiens
actcttctcatacta

SEQ ID NO: 663694 - DNA, 15 bp, Homo sapiens
ctcttctcatactaa

SEQ ID NO: 663695 - DNA, 15 bp, Homo sapiens
tcttctcatactaat

SEQ ID NO: 663696 - DNA, 15 bp, Homo sapiens
cttctcatactaatt

SEQ ID NO: 663697 - DNA, 15 bp, Homo sapiens
ttctcatactaattc

SEQ ID NO: 663698 - DNA, 15 bp, Homo sapiens
tctcatactaattct

SEQ ID NO: 663699 - DNA, 15 bp, Homo sapiens
ctcatactaattctc

SEQ ID NO: 663700 - DNA, 15 bp, Homo sapiens
tcatactaattctca

SEQ ID NO: 663701 - DNA, 15 bp, Homo sapiens
catactaattctcat

SEQ ID NO: 663702 - DNA, 15 bp, Homo sapiens
atactaattctcatt

SEQ ID NO: 663703 - DNA, 15 bp, Homo sapiens
tactaattctcattt

SEQ ID NO: 663704 - DNA, 15 bp, Homo sapiens
actaattctcatttc

SEQ ID NO: 663705 - DNA, 15 bp, Homo sapiens
ctaattctcatttct

SEQ ID NO: 663706 - DNA, 15 bp, Homo sapiens
taattctcatttctg

SEQ ID NO: 663707 - DNA, 15 bp, Homo sapiens
aattctcatttctga

SEQ ID NO: 663708 - DNA, 15 bp, Homo sapiens
attctcatttctgag

SEQ ID NO: 663709 - DNA, 15 bp, Homo sapiens
ttctcatttctgagt

SEQ ID NO: 663710 - DNA, 15 bp, Homo sapiens
tctcatttctgagtg

SEQ ID NO: 663711 - DNA, 15 bp, Homo sapiens
ctcatttctgagtgc

SEQ ID NO: 663712 - DNA, 15 bp, Homo sapiens
tcatttctgagtgcc

SEQ ID NO: 663713 - DNA, 15 bp, Homo sapiens
catttctgagtgccc

SEQ ID NO: 663714 - DNA, 15 bp, Homo sapiens
atttctgagtgccca

SEQ ID NO: 663715 - DNA, 15 bp, Homo sapiens
tttctgagtgcccac

SEQ ID NO: 663716 - DNA, 15 bp, Homo sapiens
ttctgagtgcccaca

SEQ ID NO: 663717 - DNA, 15 bp, Homo sapiens
tctgagtgcccacag

SEQ ID NO: 663718 - DNA, 15 bp, Homo sapiens
ctgagtgcccacaga

SEQ ID NO: 663719 - DNA, 15 bp, Homo sapiens
tgagtgcccacagaa

SEQ ID NO: 663720 - DNA, 15 bp, Homo sapiens
gagtgcccacagaag

SEQ ID NO: 663721 - DNA, 15 bp, Homo sapiens
agtgcccacagaagt

SEQ ID NO: 663722 - DNA, 15 bp, Homo sapiens
gtgcccacagaagtg

SEQ ID NO: 663723 - DNA, 15 bp, Homo sapiens
tgcccacagaagtga

SEQ ID NO: 663724 - DNA, 15 bp, Homo sapiens
gcccacagaagtgag

SEQ ID NO: 663725 - DNA, 15 bp, Homo sapiens
cccacagaagtgagg

SEQ ID NO: 663726 - DNA, 15 bp, Homo sapiens
ccacagaagtgaggg

SEQ ID NO: 663727 - DNA, 15 bp, Homo sapiens
cacagaagtgagggc

SEQ ID NO: 663728 - DNA, 15 bp, Homo sapiens
acagaagtgagggcc

SEQ ID NO: 663729 - DNA, 15 bp, Homo sapiens
cagaagtgagggcca

SEQ ID NO: 663730 - DNA, 15 bp, Homo sapiens
agaagtgagggccat

SEQ ID NO: 663731 - DNA, 15 bp, Homo sapiens
gaagtgagggccatc

SEQ ID NO: 663732 - DNA, 15 bp, Homo sapiens
aagtgagggccatct

SEQ ID NO: 663733 - DNA, 15 bp, Homo sapiens
agtgagggccatctc

SEQ ID NO: 663734 - DNA, 15 bp, Homo sapiens
gtgagggccatctct

SEQ ID NO: 663735 - DNA, 15 bp, Homo sapiens
tgagggccatctctc

SEQ ID NO: 663736 - DNA, 15 bp, Homo sapiens
gagggccatctctct

SEQ ID NO: 663737 - DNA, 15 bp, Homo sapiens
agggccatctctctt

SEQ ID NO: 663738 - DNA, 15 bp, Homo sapiens
gggccatctctcttt

SEQ ID NO: 663739 - DNA, 15 bp, Homo sapiens
ggccatctctctttc

SEQ ID NO: 663740 - DNA, 15 bp, Homo sapiens
gccatctctctttcc

SEQ ID NO: 663741 - DNA, 15 bp, Homo sapiens
ccatctctctttcct

SEQ ID NO: 663742 - DNA, 15 bp, Homo sapiens
catctctctttcctt

SEQ ID NO: 663743 - DNA, 15 bp, Homo sapiens
atctctctttcctta

SEQ ID NO: 663744 - DNA, 15 bp, Homo sapiens
tctctctttccttag

SEQ ID NO: 663745 - DNA, 15 bp, Homo sapiens
ctctctttccttagg

SEQ ID NO: 663746 - DNA, 15 bp, Homo sapiens
tctctttccttagga

SEQ ID NO: 663747 - DNA, 15 bp, Homo sapiens
ctctttccttaggac

SEQ ID NO: 663748 - DNA, 15 bp, Homo sapiens
tctttccttaggact

SEQ ID NO: 663749 - DNA, 15 bp, Homo sapiens
ctttccttaggactc

SEQ ID NO: 663750 - DNA, 15 bp, Homo sapiens
tttccttaggactcc

SEQ ID NO: 663751 - DNA, 15 bp, Homo sapiens
ttccttaggactccg

SEQ ID NO: 663752 - DNA, 15 bp, Homo sapiens
tccttaggactccgg

SEQ ID NO: 663753 - DNA, 15 bp, Homo sapiens
ccttaggactccggt

SEQ ID NO: 663754 - DNA, 15 bp, Homo sapiens
cttaggactccggtt

SEQ ID NO: 663755 - DNA, 15 bp, Homo sapiens
ttaggactccggttt

SEQ ID NO: 663756 - DNA, 15 bp, Homo sapiens
taggactccggtttt

SEQ ID NO: 663757 - DNA, 15 bp, Homo sapiens
aggactccggttttc

SEQ ID NO: 663758 - DNA, 15 bp, Homo sapiens
ggactccggttttca

SEQ ID NO: 663759 - DNA, 15 bp, Homo sapiens
gactccggttttcaa

SEQ ID NO: 663760 - DNA, 15 bp, Homo sapiens
actccggttttcaaa

SEQ ID NO: 663761 - DNA, 15 bp, Homo sapiens
ctccggttttcaaaa

SEQ ID NO: 663762 - DNA, 15 bp, Homo sapiens
tccggttttcaaaat

SEQ ID NO: 663763 - DNA, 15 bp, Homo sapiens
ccggttttcaaaatg

SEQ ID NO: 663764 - DNA, 15 bp, Homo sapiens
cggttttcaaaatgt

SEQ ID NO: 663765 - DNA, 15 bp, Homo sapiens
ggttttcaaaatgta

SEQ ID NO: 663766 - DNA, 15 bp, Homo sapiens
gttttcaaaatgtag

SEQ ID NO: 663767 - DNA, 15 bp, Homo sapiens
ttttcaaaatgtagt

SEQ ID NO: 663768 - DNA, 15 bp, Homo sapiens
tttcaaaatgtagtt

SEQ ID NO: 663769 - DNA, 15 bp, Homo sapiens
ttcaaaatgtagttt

SEQ ID NO: 663770 - DNA, 15 bp, Homo sapiens
tcaaaatgtagtttg

SEQ ID NO: 663771 - DNA, 15 bp, Homo sapiens
caaaatgtagtttga

SEQ ID NO: 663772 - DNA, 15 bp, Homo sapiens
aaaatgtagtttgat

SEQ ID NO: 663773 - DNA, 15 bp, Homo sapiens
aaatgtagtttgatt

SEQ ID NO: 663774 - DNA, 15 bp, Homo sapiens
aatgtagtttgattc

SEQ ID NO: 663775 - DNA, 15 bp, Homo sapiens
atgtagtttgattct

SEQ ID NO: 663776 - DNA, 15 bp, Homo sapiens
tgtagtttgattcta

SEQ ID NO: 663777 - DNA, 15 bp, Homo sapiens
gtagtttgattctat

SEQ ID NO: 663778 - DNA, 15 bp, Homo sapiens
tagtttgattctatc

SEQ ID NO: 663779 - DNA, 15 bp, Homo sapiens
agtttgattctatca

SEQ ID NO: 663780 - DNA, 15 bp, Homo sapiens
gtttgattctatcac

SEQ ID NO: 663781 - DNA, 15 bp, Homo sapiens
tttgattctatcacc

SEQ ID NO: 663782 - DNA, 15 bp, Homo sapiens
ttgattctatcacct

SEQ ID NO: 663783 - DNA, 15 bp, Homo sapiens
tgattctatcacctg

SEQ ID NO: 663784 - DNA, 15 bp, Homo sapiens
gattctatcacctgc

SEQ ID NO: 663785 - DNA, 15 bp, Homo sapiens
attctatcacctgct

SEQ ID NO: 663786 - DNA, 15 bp, Homo sapiens
ttctatcacctgctt

SEQ ID NO: 663787 - DNA, 15 bp, Homo sapiens
tctatcacctgcttc

SEQ ID NO: 663788 - DNA, 15 bp, Homo sapiens
ctatcacctgcttca

SEQ ID NO: 663789 - DNA, 15 bp, Homo sapiens
tatcacctgcttcaa

SEQ ID NO: 663790 - DNA, 15 bp, Homo sapiens
atcacctgcttcaaa

SEQ ID NO: 663791 - DNA, 15 bp, Homo sapiens
tcacctgcttcaaat

SEQ ID NO: 663792 - DNA, 15 bp, Homo sapiens
cacctgcttcaaatg

SEQ ID NO: 663793 - DNA, 15 bp, Homo sapiens
acctgcttcaaatga

SEQ ID NO: 663794 - DNA, 15 bp, Homo sapiens
cctgcttcaaatgac

SEQ ID NO: 663795 - DNA, 15 bp, Homo sapiens
ctgcttcaaatgact

SEQ ID NO: 663796 - DNA, 15 bp, Homo sapiens
tgcttcaaatgactc

SEQ ID NO: 663797 - DNA, 15 bp, Homo sapiens
gcttcaaatgactct

SEQ ID NO: 663798 - DNA, 15 bp, Homo sapiens
cttcaaatgactctc

SEQ ID NO: 663799 - DNA, 15 bp, Homo sapiens
ttcaaatgactctct

SEQ ID NO: 663800 - DNA, 15 bp, Homo sapiens
tcaaatgactctcta

SEQ ID NO: 663801 - DNA, 15 bp, Homo sapiens
caaatgactctctaa

SEQ ID NO: 663802 - DNA, 15 bp, Homo sapiens
aaatgactctctaaa

SEQ ID NO: 663803 - DNA, 15 bp, Homo sapiens
aatgactctctaaag

SEQ ID NO: 663804 - DNA, 15 bp, Homo sapiens
atgactctctaaagg

SEQ ID NO: 663805 - DNA, 15 bp, Homo sapiens
tgactctctaaaggg

SEQ ID NO: 663806 - DNA, 15 bp, Homo sapiens
gactctctaaagggc

SEQ ID NO: 663807 - DNA, 15 bp, Homo sapiens
actctctaaagggct

SEQ ID NO: 663808 - DNA, 15 bp, Homo sapiens
ctctctaaagggctc

SEQ ID NO: 663809 - DNA, 15 bp, Homo sapiens
tctctaaagggctct

SEQ ID NO: 663810 - DNA, 15 bp, Homo sapiens
ctctaaagggctctt

SEQ ID NO: 663811 - DNA, 15 bp, Homo sapiens
tctaaagggctcttt

SEQ ID NO: 663812 - DNA, 15 bp, Homo sapiens
ctaaagggctctttg

SEQ ID NO: 663813 - DNA, 15 bp, Homo sapiens
taaagggctctttgt

SEQ ID NO: 663814 - DNA, 15 bp, Homo sapiens
aaagggctctttgtg

SEQ ID NO: 663815 - DNA, 15 bp, Homo sapiens
aagggctctttgtgc

SEQ ID NO: 663816 - DNA, 15 bp, Homo sapiens
agggctctttgtgcc

SEQ ID NO: 663817 - DNA, 15 bp, Homo sapiens
gggctctttgtgccc

SEQ ID NO: 663818 - DNA, 15 bp, Homo sapiens
ggctctttgtgccct

SEQ ID NO: 663819 - DNA, 15 bp, Homo sapiens
gctctttgtgcccta

SEQ ID NO: 663820 - DNA, 15 bp, Homo sapiens
ctctttgtgccctac

SEQ ID NO: 663821 - DNA, 15 bp, Homo sapiens
tctttgtgccctacc

SEQ ID NO: 663822 - DNA, 15 bp, Homo sapiens
ctttgtgccctacct

SEQ ID NO: 663823 - DNA, 15 bp, Homo sapiens
tttgtgccctacctt

SEQ ID NO: 663824 - DNA, 15 bp, Homo sapiens
ttgtgccctaccttg

SEQ ID NO: 663825 - DNA, 15 bp, Homo sapiens
tgtgccctaccttga

SEQ ID NO: 663826 - DNA, 15 bp, Homo sapiens
gtgccctaccttgag

SEQ ID NO: 663827 - DNA, 15 bp, Homo sapiens
tgccctaccttgagc

SEQ ID NO: 663828 - DNA, 15 bp, Homo sapiens
gccctaccttgagct

SEQ ID NO: 663829 - DNA, 15 bp, Homo sapiens
ccctaccttgagctg

SEQ ID NO: 663830 - DNA, 15 bp, Homo sapiens
cctaccttgagctgg

SEQ ID NO: 663831 - DNA, 15 bp, Homo sapiens
ctaccttgagctggc

SEQ ID NO: 663832 - DNA, 15 bp, Homo sapiens
taccttgagctggct

SEQ ID NO: 663833 - DNA, 15 bp, Homo sapiens
accttgagctggctt

SEQ ID NO: 663834 - DNA, 15 bp, Homo sapiens
ccttgagctggcttc

SEQ ID NO: 663835 - DNA, 15 bp, Homo sapiens
cttgagctggcttct

SEQ ID NO: 663836 - DNA, 15 bp, Homo sapiens
ttgagctggcttctg

SEQ ID NO: 663837 - DNA, 15 bp, Homo sapiens
tgagctggcttctgc

SEQ ID NO: 663838 - DNA, 15 bp, Homo sapiens
gagctggcttctgca

SEQ ID NO: 663839 - DNA, 15 bp, Homo sapiens
agctggcttctgcaa

SEQ ID NO: 663840 - DNA, 15 bp, Homo sapiens
gctggcttctgcaat

SEQ ID NO: 663841 - DNA, 15 bp, Homo sapiens
ctggcttctgcaatc

SEQ ID NO: 663842 - DNA, 15 bp, Homo sapiens
tggcttctgcaatcc

SEQ ID NO: 663843 - DNA, 15 bp, Homo sapiens
ggcttctgcaatcca

SEQ ID NO: 663844 - DNA, 15 bp, Homo sapiens
gcttctgcaatccat

SEQ ID NO: 663845 - DNA, 15 bp, Homo sapiens
cttctgcaatccata

SEQ ID NO: 663846 - DNA, 15 bp, Homo sapiens
ttctgcaatccatat

SEQ ID NO: 663847 - DNA, 15 bp, Homo sapiens
tctgcaatccatatg

SEQ ID NO: 663848 - DNA, 15 bp, Homo sapiens
ctgcaatccatatgg

SEQ ID NO: 663849 - DNA, 15 bp, Homo sapiens
tgcaatccatatgga

SEQ ID NO: 663850 - DNA, 15 bp, Homo sapiens
gcaatccatatggat

SEQ ID NO: 663851 - DNA, 15 bp, Homo sapiens
caatccatatggatg

SEQ ID NO: 663852 - DNA, 15 bp, Homo sapiens
aatccatatggatgg

SEQ ID NO: 663853 - DNA, 15 bp, Homo sapiens
atccatatggatggg

SEQ ID NO: 663854 - DNA, 15 bp, Homo sapiens
tccatatggatgggc

SEQ ID NO: 663855 - DNA, 15 bp, Homo sapiens
ccatatggatgggct

SEQ ID NO: 663856 - DNA, 15 bp, Homo sapiens
catatggatgggctt

SEQ ID NO: 663857 - DNA, 15 bp, Homo sapiens
atatggatgggcttg

SEQ ID NO: 663858 - DNA, 15 bp, Homo sapiens
tatggatgggcttgt

SEQ ID NO: 663859 - DNA, 15 bp, Homo sapiens
atggatgggcttgtc

SEQ ID NO: 663860 - DNA, 15 bp, Homo sapiens
tggatgggcttgtct

SEQ ID NO: 663861 - DNA, 15 bp, Homo sapiens
ggatgggcttgtctc

SEQ ID NO: 663862 - DNA, 15 bp, Homo sapiens
gatgggcttgtctcc

SEQ ID NO: 663863 - DNA, 15 bp, Homo sapiens
atgggcttgtctcct

SEQ ID NO: 663864 - DNA, 15 bp, Homo sapiens
tgggcttgtctcctt

SEQ ID NO: 663865 - DNA, 15 bp, Homo sapiens
gggcttgtctccttc

SEQ ID NO: 663866 - DNA, 15 bp, Homo sapiens
ggcttgtctccttcc

SEQ ID NO: 663867 - DNA, 15 bp, Homo sapiens
gcttgtctccttccc

SEQ ID NO: 663868 - DNA, 15 bp, Homo sapiens
cttgtctccttcccc

SEQ ID NO: 663869 - DNA, 15 bp, Homo sapiens
ttgtctccttcccct

SEQ ID NO: 663870 - DNA, 15 bp, Homo sapiens
tgtctccttccccta

SEQ ID NO: 663871 - DNA, 15 bp, Homo sapiens
gtctccttcccctaa

SEQ ID NO: 663872 - DNA, 15 bp, Homo sapiens
tctccttcccctaat

SEQ ID NO: 663873 - DNA, 15 bp, Homo sapiens
ctccttcccctaatc

SEQ ID NO: 663874 - DNA, 15 bp, Homo sapiens
tccttcccctaatca

SEQ ID NO: 663875 - DNA, 15 bp, Homo sapiens
ccttcccctaatcaa

SEQ ID NO: 663876 - DNA, 15 bp, Homo sapiens
cttcccctaatcaag

SEQ ID NO: 663877 - DNA, 15 bp, Homo sapiens
ttcccctaatcaagc

SEQ ID NO: 663878 - DNA, 15 bp, Homo sapiens
tcccctaatcaagcc

SEQ ID NO: 663879 - DNA, 15 bp, Homo sapiens
cccctaatcaagccc

SEQ ID NO: 663880 - DNA, 15 bp, Homo sapiens
ccctaatcaagccca

SEQ ID NO: 663881 - DNA, 15 bp, Homo sapiens
cctaatcaagcccaa

SEQ ID NO: 663882 - DNA, 15 bp, Homo sapiens
ctaatcaagcccaac

SEQ ID NO: 663883 - DNA, 15 bp, Homo sapiens
taatcaagcccaact

SEQ ID NO: 663884 - DNA, 15 bp, Homo sapiens
aatcaagcccaactc

SEQ ID NO: 663885 - DNA, 15 bp, Homo sapiens
atcaagcccaactcc

SEQ ID NO: 663886 - DNA, 15 bp, Homo sapiens
tcaagcccaactcca

SEQ ID NO: 663887 - DNA, 15 bp, Homo sapiens
caagcccaactccaa

SEQ ID NO: 663888 - DNA, 15 bp, Homo sapiens
aagcccaactccaaa

SEQ ID NO: 663889 - DNA, 15 bp, Homo sapiens
agcccaactccaaat

SEQ ID NO: 663890 - DNA, 15 bp, Homo sapiens
gcccaactccaaatt

SEQ ID NO: 663891 - DNA, 15 bp, Homo sapiens
cccaactccaaatta

SEQ ID NO: 663892 - DNA, 15 bp, Homo sapiens
ccaactccaaattag

SEQ ID NO: 663893 - DNA, 15 bp, Homo sapiens
caactccaaattaga

SEQ ID NO: 663894 - DNA, 15 bp, Homo sapiens
aactccaaattagac

SEQ ID NO: 663895 - DNA, 15 bp, Homo sapiens
actccaaattagaca

SEQ ID NO: 663896 - DNA, 15 bp, Homo sapiens
ctccaaattagacat

SEQ ID NO: 663897 - DNA, 15 bp, Homo sapiens
tccaaattagacatt

SEQ ID NO: 663898 - DNA, 15 bp, Homo sapiens
ccaaattagacattt

SEQ ID NO: 663899 - DNA, 15 bp, Homo sapiens
caaattagacatttt

SEQ ID NO: 663900 - DNA, 15 bp, Homo sapiens
aaattagacattttc

SEQ ID NO: 663901 - DNA, 15 bp, Homo sapiens
aattagacattttcc

SEQ ID NO: 663902 - DNA, 15 bp, Homo sapiens
attagacattttcct

SEQ ID NO: 663903 - DNA, 15 bp, Homo sapiens
ttagacattttcctt

SEQ ID NO: 663904 - DNA, 15 bp, Homo sapiens
tagacattttccttc

SEQ ID NO: 663905 - DNA, 15 bp, Homo sapiens
agacattttccttca

SEQ ID NO: 663906 - DNA, 15 bp, Homo sapiens
gacattttccttcat

SEQ ID NO: 663907 - DNA, 15 bp, Homo sapiens
acattttccttcatc

SEQ ID NO: 663908 - DNA, 15 bp, Homo sapiens
cattttccttcatca

SEQ ID NO: 663909 - DNA, 15 bp, Homo sapiens
attttccttcatcag

SEQ ID NO: 663910 - DNA, 15 bp, Homo sapiens
ttttccttcatcaga

SEQ ID NO: 663911 - DNA, 15 bp, Homo sapiens
tttccttcatcagac

SEQ ID NO: 663912 - DNA, 15 bp, Homo sapiens
ttccttcatcagact

SEQ ID NO: 663913 - DNA, 15 bp, Homo sapiens
tccttcatcagactc

SEQ ID NO: 663914 - DNA, 15 bp, Homo sapiens
ccttcatcagactca

SEQ ID NO: 663915 - DNA, 15 bp, Homo sapiens
cttcatcagactcaa

SEQ ID NO: 663916 - DNA, 15 bp, Homo sapiens
ttcatcagactcaac

SEQ ID NO: 663917 - DNA, 15 bp, Homo sapiens
tcatcagactcaaca

SEQ ID NO: 663918 - DNA, 15 bp, Homo sapiens
catcagactcaacac

SEQ ID NO: 663919 - DNA, 15 bp, Homo sapiens
atcagactcaacact

SEQ ID NO: 663920 - DNA, 15 bp, Homo sapiens
tcagactcaacactg

SEQ ID NO: 663921 - DNA, 15 bp, Homo sapiens
cagactcaacactga

SEQ ID NO: 663922 - DNA, 15 bp, Homo sapiens
agactcaacactgat

SEQ ID NO: 663923 - DNA, 15 bp, Homo sapiens
gactcaacactgatc

SEQ ID NO: 663924 - DNA, 15 bp, Homo sapiens
actcaacactgatcc

SEQ ID NO: 663925 - DNA, 15 bp, Homo sapiens
ctcaacactgatccc

SEQ ID NO: 663926 - DNA, 15 bp, Homo sapiens
tcaacactgatccct

SEQ ID NO: 663927 - DNA, 15 bp, Homo sapiens
caacactgatccctg

SEQ ID NO: 663928 - DNA, 15 bp, Homo sapiens
aacactgatccctgc

SEQ ID NO: 663929 - DNA, 15 bp, Homo sapiens
acactgatccctgct

SEQ ID NO: 663930 - DNA, 15 bp, Homo sapiens
cactgatccctgctt

SEQ ID NO: 663931 - DNA, 15 bp, Homo sapiens
actgatccctgcttt

SEQ ID NO: 663932 - DNA, 15 bp, Homo sapiens
ctgatccctgctttc

SEQ ID NO: 663933 - DNA, 15 bp, Homo sapiens
tgatccctgctttcc

SEQ ID NO: 663934 - DNA, 15 bp, Homo sapiens
gatccctgctttcct

SEQ ID NO: 663935 - DNA, 15 bp, Homo sapiens
atccctgctttcctt

SEQ ID NO: 663936 - DNA, 15 bp, Homo sapiens
tccctgctttcctta

SEQ ID NO: 663937 - DNA, 15 bp, Homo sapiens
ccctgctttccttaa

SEQ ID NO: 663938 - DNA, 15 bp, Homo sapiens
cctgctttccttaaa

SEQ ID NO: 663939 - DNA, 15 bp, Homo sapiens
ctgctttccttaaat

SEQ ID NO: 663940 - DNA, 15 bp, Homo sapiens
tgctttccttaaatt

SEQ ID NO: 663941 - DNA, 15 bp, Homo sapiens
gctttccttaaattc

SEQ ID NO: 663942 - DNA, 15 bp, Homo sapiens
ctttccttaaattca

SEQ ID NO: 663943 - DNA, 15 bp, Homo sapiens
tttccttaaattcag

SEQ ID NO: 663944 - DNA, 15 bp, Homo sapiens
ttccttaaattcagc

SEQ ID NO: 663945 - DNA, 15 bp, Homo sapiens
tccttaaattcagct

SEQ ID NO: 663946 - DNA, 15 bp, Homo sapiens
ccttaaattcagctt

SEQ ID NO: 663947 - DNA, 15 bp, Homo sapiens
cttaaattcagctta

SEQ ID NO: 663948 - DNA, 15 bp, Homo sapiens
ttaaattcagcttat

SEQ ID NO: 663949 - DNA, 15 bp, Homo sapiens
taaattcagcttata

SEQ ID NO: 663950 - DNA, 15 bp, Homo sapiens
aaattcagcttatac

SEQ ID NO: 663951 - DNA, 15 bp, Homo sapiens
aattcagcttataca

SEQ ID NO: 663952 - DNA, 15 bp, Homo sapiens
attcagcttatacat

SEQ ID NO: 663953 - DNA, 15 bp, Homo sapiens
ttcagcttatacatc

SEQ ID NO: 663954 - DNA, 15 bp, Homo sapiens
tcagcttatacatct

SEQ ID NO: 663955 - DNA, 15 bp, Homo sapiens
cagcttatacatctt

SEQ ID NO: 663956 - DNA, 15 bp, Homo sapiens
agcttatacatcttg

SEQ ID NO: 663957 - DNA, 15 bp, Homo sapiens
gcttatacatcttgt

SEQ ID NO: 663958 - DNA, 15 bp, Homo sapiens
cttatacatcttgtt

SEQ ID NO: 663959 - DNA, 15 bp, Homo sapiens
ttatacatcttgttt

SEQ ID NO: 663960 - DNA, 15 bp, Homo sapiens
tatacatcttgttta

SEQ ID NO: 663961 - DNA, 15 bp, Homo sapiens
atacatcttgtttac

SEQ ID NO: 663962 - DNA, 15 bp, Homo sapiens
tacatcttgtttaca

SEQ ID NO: 663963 - DNA, 15 bp, Homo sapiens
acatcttgtttacat

SEQ ID NO: 663964 - DNA, 15 bp, Homo sapiens
catcttgtttacatc

SEQ ID NO: 663965 - DNA, 15 bp, Homo sapiens
atcttgtttacatcc

SEQ ID NO: 663966 - DNA, 15 bp, Homo sapiens
tcttgtttacatcca

SEQ ID NO: 663967 - DNA, 15 bp, Homo sapiens
cttgtttacatccaa

SEQ ID NO: 663968 - DNA, 15 bp, Homo sapiens
ttgtttacatccaaa

SEQ ID NO: 663969 - DNA, 15 bp, Homo sapiens
tgtttacatccaaaa

SEQ ID NO: 663970 - DNA, 15 bp, Homo sapiens
gtttacatccaaaat

SEQ ID NO: 663971 - DNA, 15 bp, Homo sapiens
tttacatccaaaatt

SEQ ID NO: 663972 - DNA, 15 bp, Homo sapiens
ttacatccaaaatta

SEQ ID NO: 663973 - DNA, 15 bp, Homo sapiens
tacatccaaaattaa

SEQ ID NO: 663974 - DNA, 15 bp, Homo sapiens
acatccaaaattaaa

SEQ ID NO: 663975 - DNA, 15 bp, Homo sapiens
catccaaaattaaat

SEQ ID NO: 663976 - DNA, 15 bp, Homo sapiens
atccaaaattaaatc

SEQ ID NO: 663977 - DNA, 15 bp, Homo sapiens
tccaaaattaaatct

SEQ ID NO: 663978 - DNA, 15 bp, Homo sapiens
ccaaaattaaatcta

SEQ ID NO: 663979 - DNA, 15 bp, Homo sapiens
caaaattaaatctaa

SEQ ID NO: 663980 - DNA, 15 bp, Homo sapiens
aaaattaaatctaaa

SEQ ID NO: 663981 - DNA, 15 bp, Homo sapiens
aaattaaatctaaaa

SEQ ID NO: 663982 - DNA, 15 bp, Homo sapiens
aattaaatctaaaaa

SEQ ID NO: 663983 - DNA, 15 bp, Homo sapiens
attaaatctaaaaaa

SEQ ID NO: 663984 - DNA, 15 bp, Homo sapiens
ttaaatctaaaaaag

SEQ ID NO: 663985 - DNA, 15 bp, Homo sapiens
taaatctaaaaaaga

SEQ ID NO: 663986 - DNA, 15 bp, Homo sapiens
aaatctaaaaaagag

SEQ ID NO: 663987 - DNA, 15 bp, Homo sapiens
aatctaaaaaagaga

SEQ ID NO: 663988 - DNA, 15 bp, Homo sapiens
atctaaaaaagagaa

SEQ ID NO: 663989 - DNA, 15 bp, Homo sapiens
tctaaaaaagagaaa

SEQ ID NO: 663990 - DNA, 15 bp, Homo sapiens
ctaaaaaagagaaaa

SEQ ID NO: 663991 - DNA, 15 bp, Homo sapiens
taaaaaagagaaaac

SEQ ID NO: 663992 - DNA, 15 bp, Homo sapiens
aaaaaagagaaaact

SEQ ID NO: 663993 - DNA, 15 bp, Homo sapiens
aaaaagagaaaactc

SEQ ID NO: 663994 - DNA, 15 bp, Homo sapiens
aaaagagaaaactct

SEQ ID NO: 663995 - DNA, 15 bp, Homo sapiens
aaagagaaaactctt

SEQ ID NO: 663996 - DNA, 15 bp, Homo sapiens
aagagaaaactcttg

SEQ ID NO: 663997 - DNA, 15 bp, Homo sapiens
agagaaaactcttgg

SEQ ID NO: 663998 - DNA, 15 bp, Homo sapiens
gagaaaactcttggt

SEQ ID NO: 663999 - DNA, 15 bp, Homo sapiens
agaaaactcttggtt

SEQ ID NO: 664000 - DNA, 15 bp, Homo sapiens
gaaaactcttggttt

SEQ ID NO: 664001 - DNA, 15 bp, Homo sapiens
aaaactcttggtttt

SEQ ID NO: 664002 - DNA, 15 bp, Homo sapiens
aaactcttggttttc

SEQ ID NO: 664003 - DNA, 15 bp, Homo sapiens
aactcttggttttct

SEQ ID NO: 664004 - DNA, 15 bp, Homo sapiens
actcttggttttctc

SEQ ID NO: 664005 - DNA, 15 bp, Homo sapiens
ctcttggttttctca

SEQ ID NO: 664006 - DNA, 15 bp, Homo sapiens
tcttggttttctcat

SEQ ID NO: 664007 - DNA, 15 bp, Homo sapiens
cttggttttctcatc

SEQ ID NO: 664008 - DNA, 15 bp, Homo sapiens
ttggttttctcatca

SEQ ID NO: 664009 - DNA, 15 bp, Homo sapiens
tggttttctcatcaa

SEQ ID NO: 664010 - DNA, 15 bp, Homo sapiens
ggttttctcatcaaa

SEQ ID NO: 664011 - DNA, 15 bp, Homo sapiens
gttttctcatcaaac

SEQ ID NO: 664012 - DNA, 15 bp, Homo sapiens
ttttctcatcaaact

SEQ ID NO: 664013 - DNA, 15 bp, Homo sapiens
tttctcatcaaactt

SEQ ID NO: 664014 - DNA, 15 bp, Homo sapiens
ttctcatcaaacttc

SEQ ID NO: 664015 - DNA, 15 bp, Homo sapiens
tctcatcaaacttct

SEQ ID NO: 664016 - DNA, 15 bp, Homo sapiens
ctcatcaaacttctc

SEQ ID NO: 664017 - DNA, 15 bp, Homo sapiens
tcatcaaacttctct

SEQ ID NO: 664018 - DNA, 15 bp, Homo sapiens
catcaaacttctctt

SEQ ID NO: 664019 - DNA, 15 bp, Homo sapiens
atcaaacttctcttc

SEQ ID NO: 664020 - DNA, 15 bp, Homo sapiens
tcaaacttctcttca

SEQ ID NO: 664021 - DNA, 15 bp, Homo sapiens
caaacttctcttcac

SEQ ID NO: 664022 - DNA, 15 bp, Homo sapiens
aaacttctcttcact

SEQ ID NO: 664023 - DNA, 15 bp, Homo sapiens
aacttctcttcacta

SEQ ID NO: 664024 - DNA, 15 bp, Homo sapiens
acttctcttcactac

SEQ ID NO: 664025 - DNA, 15 bp, Homo sapiens
cttctcttcactact

SEQ ID NO: 664026 - DNA, 15 bp, Homo sapiens
ttctcttcactacta

SEQ ID NO: 664027 - DNA, 15 bp, Homo sapiens
tctcttcactactat

SEQ ID NO: 664028 - DNA, 15 bp, Homo sapiens
ctcttcactactata

SEQ ID NO: 664029 - DNA, 15 bp, Homo sapiens
tcttcactactatac

SEQ ID NO: 664030 - DNA, 15 bp, Homo sapiens
cttcactactatact

SEQ ID NO: 664031 - DNA, 15 bp, Homo sapiens
ttcactactatactc

SEQ ID NO: 664032 - DNA, 15 bp, Homo sapiens
tcactactatactcc

SEQ ID NO: 664033 - DNA, 15 bp, Homo sapiens
cactactatactccc

SEQ ID NO: 664034 - DNA, 15 bp, Homo sapiens
actactatactcccc

SEQ ID NO: 664035 - DNA, 15 bp, Homo sapiens
ctactatactcccct

SEQ ID NO: 664036 - DNA, 15 bp, Homo sapiens
tactatactccccta

SEQ ID NO: 664037 - DNA, 15 bp, Homo sapiens
actatactcccctat

SEQ ID NO: 664038 - DNA, 15 bp, Homo sapiens
ctatactcccctatt

SEQ ID NO: 664039 - DNA, 15 bp, Homo sapiens
tatactcccctatta

SEQ ID NO: 664040 - DNA, 15 bp, Homo sapiens
atactcccctattat

SEQ ID NO: 664041 - DNA, 15 bp, Homo sapiens
tactcccctattatt

SEQ ID NO: 664042 - DNA, 15 bp, Homo sapiens
actcccctattatta

SEQ ID NO: 664043 - DNA, 15 bp, Homo sapiens
ctcccctattattag

SEQ ID NO: 664044 - DNA, 15 bp, Homo sapiens
tcccctattattagc

SEQ ID NO: 664045 - DNA, 15 bp, Homo sapiens
cccctattattagct

SEQ ID NO: 664046 - DNA, 15 bp, Homo sapiens
ccctattattagcta

SEQ ID NO: 664047 - DNA, 15 bp, Homo sapiens
cctattattagctag

SEQ ID NO: 664048 - DNA, 15 bp, Homo sapiens
ctattattagctaga

SEQ ID NO: 664049 - DNA, 15 bp, Homo sapiens
tattattagctagaa

SEQ ID NO: 664050 - DNA, 15 bp, Homo sapiens
attattagctagaaa

SEQ ID NO: 664051 - DNA, 15 bp, Homo sapiens
ttattagctagaaac

SEQ ID NO: 664052 - DNA, 15 bp, Homo sapiens
tattagctagaaaca

SEQ ID NO: 664053 - DNA, 15 bp, Homo sapiens
attagctagaaacat

SEQ ID NO: 664054 - DNA, 15 bp, Homo sapiens
ttagctagaaacatt

SEQ ID NO: 664055 - DNA, 15 bp, Homo sapiens
tagctagaaacatta

SEQ ID NO: 664056 - DNA, 15 bp, Homo sapiens
agctagaaacattaa

SEQ ID NO: 664057 - DNA, 15 bp, Homo sapiens
gctagaaacattaat

SEQ ID NO: 664058 - DNA, 15 bp, Homo sapiens
ctagaaacattaata

SEQ ID NO: 664059 - DNA, 15 bp, Homo sapiens
tagaaacattaatat

SEQ ID NO: 664060 - DNA, 15 bp, Homo sapiens
agaaacattaatatg

SEQ ID NO: 664061 - DNA, 15 bp, Homo sapiens
gaaacattaatatgc

SEQ ID NO: 664062 - DNA, 15 bp, Homo sapiens
aaacattaatatgcc

SEQ ID NO: 664063 - DNA, 15 bp, Homo sapiens
aacattaatatgcca

SEQ ID NO: 664064 - DNA, 15 bp, Homo sapiens
acattaatatgccat

SEQ ID NO: 664065 - DNA, 15 bp, Homo sapiens
cattaatatgccata

SEQ ID NO: 664066 - DNA, 15 bp, Homo sapiens
attaatatgccatat

SEQ ID NO: 664067 - DNA, 15 bp, Homo sapiens
ttaatatgccatata

SEQ ID NO: 664068 - DNA, 15 bp, Homo sapiens
taatatgccatatat

SEQ ID NO: 664069 - DNA, 15 bp, Homo sapiens
aatatgccatatata

SEQ ID NO: 664070 - DNA, 15 bp, Homo sapiens
atatgccatatatat

SEQ ID NO: 664071 - DNA, 15 bp, Homo sapiens
tatgccatatatata

SEQ ID NO: 664072 - DNA, 15 bp, Homo sapiens
atgccatatatatat

SEQ ID NO: 664073 - DNA, 15 bp, Homo sapiens
tgccatatatatata

SEQ ID NO: 664074 - DNA, 15 bp, Homo sapiens
gccatatatatatat

SEQ ID NO: 664075 - DNA, 15 bp, Homo sapiens
ccatatatatatata

SEQ ID NO: 664076 - DNA, 15 bp, Homo sapiens
catatatatatatac

SEQ ID NO: 664077 - DNA, 15 bp, Homo sapiens
atatatatatataca

SEQ ID NO: 664078 - DNA, 15 bp, Homo sapiens
tatatatatatacac

SEQ ID NO: 664079 - DNA, 15 bp, Homo sapiens
atatatatatacaca

SEQ ID NO: 664080 - DNA, 15 bp, Homo sapiens
tatatatatacacat

SEQ ID NO: 664081 - DNA, 15 bp, Homo sapiens
atatatatacacatt

SEQ ID NO: 664082 - DNA, 15 bp, Homo sapiens
tatatatacacatta

SEQ ID NO: 664083 - DNA, 15 bp, Homo sapiens
atatatacacattat

SEQ ID NO: 664084 - DNA, 15 bp, Homo sapiens
tatatacacattatt

SEQ ID NO: 664085 - DNA, 15 bp, Homo sapiens
atatacacattattg

SEQ ID NO: 664086 - DNA, 15 bp, Homo sapiens
tatacacattattga

SEQ ID NO: 664087 - DNA, 15 bp, Homo sapiens
atacacattattgat

SEQ ID NO: 664088 - DNA, 15 bp, Homo sapiens
tacacattattgatt

SEQ ID NO: 664089 - DNA, 15 bp, Homo sapiens
acacattattgatta

SEQ ID NO: 664090 - DNA, 15 bp, Homo sapiens
cacattattgattac

SEQ ID NO: 664091 - DNA, 15 bp, Homo sapiens
acattattgattaca

SEQ ID NO: 664092 - DNA, 15 bp, Homo sapiens
cattattgattacaa

SEQ ID NO: 664093 - DNA, 15 bp, Homo sapiens
attattgattacaaa

SEQ ID NO: 664094 - DNA, 15 bp, Homo sapiens
ttattgattacaaag

SEQ ID NO: 664095 - DNA, 15 bp, Homo sapiens
tattgattacaaagt

SEQ ID NO: 664096 - DNA, 15 bp, Homo sapiens
attgattacaaagtg

SEQ ID NO: 664097 - DNA, 15 bp, Homo sapiens
ttgattacaaagtgg

SEQ ID NO: 664098 - DNA, 15 bp, Homo sapiens
tgattacaaagtggg

SEQ ID NO: 664099 - DNA, 15 bp, Homo sapiens
gattacaaagtgggt

SEQ ID NO: 664100 - DNA, 15 bp, Homo sapiens
attacaaagtgggtc

SEQ ID NO: 664101 - DNA, 15 bp, Homo sapiens
ttacaaagtgggtcg

SEQ ID NO: 664102 - DNA, 15 bp, Homo sapiens
tacaaagtgggtcgt

SEQ ID NO: 664103 - DNA, 15 bp, Homo sapiens
acaaagtgggtcgtt

SEQ ID NO: 664104 - DNA, 15 bp, Homo sapiens
caaagtgggtcgttc

SEQ ID NO: 664105 - DNA, 15 bp, Homo sapiens
aaagtgggtcgttca

SEQ ID NO: 664106 - DNA, 15 bp, Homo sapiens
aagtgggtcgttcat

SEQ ID NO: 664107 - DNA, 15 bp, Homo sapiens
agtgggtcgttcatg

SEQ ID NO: 664108 - DNA, 15 bp, Homo sapiens
gtgggtcgttcatga

SEQ ID NO: 664109 - DNA, 15 bp, Homo sapiens
tgggtcgttcatgac

SEQ ID NO: 664110 - DNA, 15 bp, Homo sapiens
gggtcgttcatgacc

SEQ ID NO: 664111 - DNA, 15 bp, Homo sapiens
ggtcgttcatgacca

SEQ ID NO: 664112 - DNA, 15 bp, Homo sapiens
gtcgttcatgaccat

SEQ ID NO: 664113 - DNA, 15 bp, Homo sapiens
tcgttcatgaccatc

SEQ ID NO: 664114 - DNA, 15 bp, Homo sapiens
cgttcatgaccatct

SEQ ID NO: 664115 - DNA, 15 bp, Homo sapiens
gttcatgaccatctg

SEQ ID NO: 664116 - DNA, 15 bp, Homo sapiens
ttcatgaccatctgg

SEQ ID NO: 664117 - DNA, 15 bp, Homo sapiens
tcatgaccatctgga

SEQ ID NO: 664118 - DNA, 15 bp, Homo sapiens
catgaccatctggat

SEQ ID NO: 664119 - DNA, 15 bp, Homo sapiens
atgaccatctggata

SEQ ID NO: 664120 - DNA, 15 bp, Homo sapiens
tgaccatctggatat

SEQ ID NO: 664121 - DNA, 15 bp, Homo sapiens
gaccatctggatatt

SEQ ID NO: 664122 - DNA, 15 bp, Homo sapiens
accatctggatattt

SEQ ID NO: 664123 - DNA, 15 bp, Homo sapiens
ccatctggatattta

SEQ ID NO: 664124 - DNA, 15 bp, Homo sapiens
catctggatatttag

SEQ ID NO: 664125 - DNA, 15 bp, Homo sapiens
atctggatatttagg

SEQ ID NO: 664126 - DNA, 15 bp, Homo sapiens
tctggatatttaggg

SEQ ID NO: 664127 - DNA, 15 bp, Homo sapiens
ctggatatttagggt

SEQ ID NO: 664128 - DNA, 15 bp, Homo sapiens
tggatatttagggtc

SEQ ID NO: 664129 - DNA, 15 bp, Homo sapiens
ggatatttagggtca

SEQ ID NO: 664130 - DNA, 15 bp, Homo sapiens
gatatttagggtcat

SEQ ID NO: 664131 - DNA, 15 bp, Homo sapiens
atatttagggtcatc

SEQ ID NO: 664132 - DNA, 15 bp, Homo sapiens
tatttagggtcatct

SEQ ID NO: 664133 - DNA, 15 bp, Homo sapiens
atttagggtcatctt

SEQ ID NO: 664134 - DNA, 15 bp, Homo sapiens
tttagggtcatcttt

SEQ ID NO: 664135 - DNA, 15 bp, Homo sapiens
ttagggtcatctttt

SEQ ID NO: 664136 - DNA, 15 bp, Homo sapiens
tagggtcatcttttt

SEQ ID NO: 664137 - DNA, 15 bp, Homo sapiens
agggtcatcttttta

SEQ ID NO: 664138 - DNA, 15 bp, Homo sapiens
gggtcatctttttag

SEQ ID NO: 664139 - DNA, 15 bp, Homo sapiens
ggtcatctttttaga

SEQ ID NO: 664140 - DNA, 15 bp, Homo sapiens
gtcatctttttagaa

SEQ ID NO: 664141 - DNA, 15 bp, Homo sapiens
tcatctttttagaag

SEQ ID NO: 664142 - DNA, 15 bp, Homo sapiens
catctttttagaagg

SEQ ID NO: 664143 - DNA, 15 bp, Homo sapiens
atctttttagaaggg

SEQ ID NO: 664144 - DNA, 15 bp, Homo sapiens
tctttttagaagggg

SEQ ID NO: 664145 - DNA, 15 bp, Homo sapiens
ctttttagaaggggt

SEQ ID NO: 664146 - DNA, 15 bp, Homo sapiens
tttttagaaggggtg

SEQ ID NO: 664147 - DNA, 15 bp, Homo sapiens
ttttagaaggggtgc

SEQ ID NO: 664148 - DNA, 15 bp, Homo sapiens
tttagaaggggtgct

SEQ ID NO: 664149 - DNA, 15 bp, Homo sapiens
ttagaaggggtgctt

SEQ ID NO: 664150 - DNA, 15 bp, Homo sapiens
tagaaggggtgcttg

SEQ ID NO: 664151 - DNA, 15 bp, Homo sapiens
agaaggggtgcttga

SEQ ID NO: 664152 - DNA, 15 bp, Homo sapiens
gaaggggtgcttgat

SEQ ID NO: 664153 - DNA, 15 bp, Homo sapiens
aaggggtgcttgata

SEQ ID NO: 664154 - DNA, 15 bp, Homo sapiens
aggggtgcttgatat

SEQ ID NO: 664155 - DNA, 15 bp, Homo sapiens
ggggtgcttgatatt

SEQ ID NO: 664156 - DNA, 15 bp, Homo sapiens
gggtgcttgatatta

SEQ ID NO: 664157 - DNA, 15 bp, Homo sapiens
ggtgcttgatattat

SEQ ID NO: 664158 - DNA, 15 bp, Homo sapiens
gtgcttgatattatc

SEQ ID NO: 664159 - DNA, 15 bp, Homo sapiens
tgcttgatattatct

SEQ ID NO: 664160 - DNA, 15 bp, Homo sapiens
gcttgatattatcta

SEQ ID NO: 664161 - DNA, 15 bp, Homo sapiens
cttgatattatctag

SEQ ID NO: 664162 - DNA, 15 bp, Homo sapiens
ttgatattatctagc

SEQ ID NO: 664163 - DNA, 15 bp, Homo sapiens
tgatattatctagca

SEQ ID NO: 664164 - DNA, 15 bp, Homo sapiens
gatattatctagcac

SEQ ID NO: 664165 - DNA, 15 bp, Homo sapiens
atattatctagcaca

SEQ ID NO: 664166 - DNA, 15 bp, Homo sapiens
tattatctagcacat

SEQ ID NO: 664167 - DNA, 15 bp, Homo sapiens
attatctagcacatt

SEQ ID NO: 664168 - DNA, 15 bp, Homo sapiens
ttatctagcacattt

SEQ ID NO: 664169 - DNA, 15 bp, Homo sapiens
tatctagcacatttg

SEQ ID NO: 664170 - DNA, 15 bp, Homo sapiens
atctagcacatttgg

SEQ ID NO: 664171 - DNA, 15 bp, Homo sapiens
tctagcacatttggt

SEQ ID NO: 664172 - DNA, 15 bp, Homo sapiens
ctagcacatttggtt

SEQ ID NO: 664173 - DNA, 15 bp, Homo sapiens
tagcacatttggttg

SEQ ID NO: 664174 - DNA, 15 bp, Homo sapiens
agcacatttggttgt

SEQ ID NO: 664175 - DNA, 15 bp, Homo sapiens
gcacatttggttgtt

SEQ ID NO: 664176 - DNA, 15 bp, Homo sapiens
cacatttggttgttt

SEQ ID NO: 664177 - DNA, 15 bp, Homo sapiens
acatttggttgttta

SEQ ID NO: 664178 - DNA, 15 bp, Homo sapiens
catttggttgtttac

SEQ ID NO: 664179 - DNA, 15 bp, Homo sapiens
atttggttgtttaca

SEQ ID NO: 664180 - DNA, 15 bp, Homo sapiens
tttggttgtttacat

SEQ ID NO: 664181 - DNA, 15 bp, Homo sapiens
ttggttgtttacatg

SEQ ID NO: 664182 - DNA, 15 bp, Homo sapiens
tggttgtttacatga

SEQ ID NO: 664183 - DNA, 15 bp, Homo sapiens
ggttgtttacatgag

SEQ ID NO: 664184 - DNA, 15 bp, Homo sapiens
gttgtttacatgaga

SEQ ID NO: 664185 - DNA, 15 bp, Homo sapiens
ttgtttacatgagaa

SEQ ID NO: 664186 - DNA, 15 bp, Homo sapiens
tgtttacatgagaaa

SEQ ID NO: 664187 - DNA, 15 bp, Homo sapiens
gtttacatgagaaac

SEQ ID NO: 664188 - DNA, 15 bp, Homo sapiens
tttacatgagaaact

SEQ ID NO: 664189 - DNA, 15 bp, Homo sapiens
ttacatgagaaactg

SEQ ID NO: 664190 - DNA, 15 bp, Homo sapiens
tacatgagaaactga

SEQ ID NO: 664191 - DNA, 15 bp, Homo sapiens
acatgagaaactgaa

SEQ ID NO: 664192 - DNA, 15 bp, Homo sapiens
catgagaaactgaat

SEQ ID NO: 664193 - DNA, 15 bp, Homo sapiens
atgagaaactgaatc

SEQ ID NO: 664194 - DNA, 15 bp, Homo sapiens
tgagaaactgaatct

SEQ ID NO: 664195 - DNA, 15 bp, Homo sapiens
gagaaactgaatctc

SEQ ID NO: 664196 - DNA, 15 bp, Homo sapiens
agaaactgaatctca

SEQ ID NO: 664197 - DNA, 15 bp, Homo sapiens
gaaactgaatctcag

SEQ ID NO: 664198 - DNA, 15 bp, Homo sapiens
aaactgaatctcaga

SEQ ID NO: 664199 - DNA, 15 bp, Homo sapiens
aactgaatctcagag

SEQ ID NO: 664200 - DNA, 15 bp, Homo sapiens
actgaatctcagaga

SEQ ID NO: 664201 - DNA, 15 bp, Homo sapiens
ctgaatctcagagaa

SEQ ID NO: 664202 - DNA, 15 bp, Homo sapiens
tgaatctcagagaat

SEQ ID NO: 664203 - DNA, 15 bp, Homo sapiens
gaatctcagagaatt

SEQ ID NO: 664204 - DNA, 15 bp, Homo sapiens
aatctcagagaattt

SEQ ID NO: 664205 - DNA, 15 bp, Homo sapiens
atctcagagaatttg

SEQ ID NO: 664206 - DNA, 15 bp, Homo sapiens
tctcagagaatttgg

SEQ ID NO: 664207 - DNA, 15 bp, Homo sapiens
ctcagagaatttggg

SEQ ID NO: 664208 - DNA, 15 bp, Homo sapiens
tcagagaatttgggt

SEQ ID NO: 664209 - DNA, 15 bp, Homo sapiens
cagagaatttgggtg

SEQ ID NO: 664210 - DNA, 15 bp, Homo sapiens
agagaatttgggtga

SEQ ID NO: 664211 - DNA, 15 bp, Homo sapiens
gagaatttgggtgac

SEQ ID NO: 664212 - DNA, 15 bp, Homo sapiens
agaatttgggtgact

SEQ ID NO: 664213 - DNA, 15 bp, Homo sapiens
gaatttgggtgactt

SEQ ID NO: 664214 - DNA, 15 bp, Homo sapiens
aatttgggtgacttg

SEQ ID NO: 664215 - DNA, 15 bp, Homo sapiens
atttgggtgacttgt

SEQ ID NO: 664216 - DNA, 15 bp, Homo sapiens
tttgggtgacttgtg

SEQ ID NO: 664217 - DNA, 15 bp, Homo sapiens
ttgggtgacttgtgc

SEQ ID NO: 664218 - DNA, 15 bp, Homo sapiens
tgggtgacttgtgca

SEQ ID NO: 664219 - DNA, 15 bp, Homo sapiens
gggtgacttgtgcat

SEQ ID NO: 664220 - DNA, 15 bp, Homo sapiens
ggtgacttgtgcatc

SEQ ID NO: 664221 - DNA, 15 bp, Homo sapiens
gtgacttgtgcatcc

SEQ ID NO: 664222 - DNA, 15 bp, Homo sapiens
tgacttgtgcatcca

SEQ ID NO: 664223 - DNA, 15 bp, Homo sapiens
gacttgtgcatccac

SEQ ID NO: 664224 - DNA, 15 bp, Homo sapiens
acttgtgcatccaca

SEQ ID NO: 664225 - DNA, 15 bp, Homo sapiens
cttgtgcatccacac

SEQ ID NO: 664226 - DNA, 15 bp, Homo sapiens
ttgtgcatccacaca

SEQ ID NO: 664227 - DNA, 15 bp, Homo sapiens
tgtgcatccacacag

SEQ ID NO: 664228 - DNA, 15 bp, Homo sapiens
gtgcatccacacaga

SEQ ID NO: 664229 - DNA, 15 bp, Homo sapiens
tgcatccacacagag

SEQ ID NO: 664230 - DNA, 15 bp, Homo sapiens
gcatccacacagagg

SEQ ID NO: 664231 - DNA, 15 bp, Homo sapiens
catccacacagagga

SEQ ID NO: 664232 - DNA, 15 bp, Homo sapiens
atccacacagaggat

SEQ ID NO: 664233 - DNA, 15 bp, Homo sapiens
tccacacagaggatt

SEQ ID NO: 664234 - DNA, 15 bp, Homo sapiens
ccacacagaggattt

SEQ ID NO: 664235 - DNA, 15 bp, Homo sapiens
cacacagaggatttg

SEQ ID NO: 664236 - DNA, 15 bp, Homo sapiens
acacagaggatttgg

SEQ ID NO: 664237 - DNA, 15 bp, Homo sapiens
cacagaggatttggg

SEQ ID NO: 664238 - DNA, 15 bp, Homo sapiens
acagaggatttgggg

SEQ ID NO: 664239 - DNA, 15 bp, Homo sapiens
cagaggatttggggc

SEQ ID NO: 664240 - DNA, 15 bp, Homo sapiens
agaggatttggggct

SEQ ID NO: 664241 - DNA, 15 bp, Homo sapiens
gaggatttggggctg

SEQ ID NO: 664242 - DNA, 15 bp, Homo sapiens
aggatttggggctgt

SEQ ID NO: 664243 - DNA, 15 bp, Homo sapiens
ggatttggggctgta

SEQ ID NO: 664244 - DNA, 15 bp, Homo sapiens
gatttggggctgtaa

SEQ ID NO: 664245 - DNA, 15 bp, Homo sapiens
atttggggctgtaat

SEQ ID NO: 664246 - DNA, 15 bp, Homo sapiens
tttggggctgtaatc

SEQ ID NO: 664247 - DNA, 15 bp, Homo sapiens
ttggggctgtaatcc

SEQ ID NO: 664248 - DNA, 15 bp, Homo sapiens
tggggctgtaatcca

SEQ ID NO: 664249 - DNA, 15 bp, Homo sapiens
ggggctgtaatccaa

SEQ ID NO: 664250 - DNA, 15 bp, Homo sapiens
gggctgtaatccaat

SEQ ID NO: 664251 - DNA, 15 bp, Homo sapiens
ggctgtaatccaatg

SEQ ID NO: 664252 - DNA, 15 bp, Homo sapiens
gctgtaatccaatgt

SEQ ID NO: 664253 - DNA, 15 bp, Homo sapiens
ctgtaatccaatgtt

SEQ ID NO: 664254 - DNA, 15 bp, Homo sapiens
tgtaatccaatgttg

SEQ ID NO: 664255 - DNA, 15 bp, Homo sapiens
gtaatccaatgttgt

SEQ ID NO: 664256 - DNA, 15 bp, Homo sapiens
taatccaatgttgtt

SEQ ID NO: 664257 - DNA, 15 bp, Homo sapiens
aatccaatgttgttt

SEQ ID NO: 664258 - DNA, 15 bp, Homo sapiens
atccaatgttgtttt

SEQ ID NO: 664259 - DNA, 15 bp, Homo sapiens
tccaatgttgttttc

SEQ ID NO: 664260 - DNA, 15 bp, Homo sapiens
ccaatgttgttttca

SEQ ID NO: 664261 - DNA, 15 bp, Homo sapiens
caatgttgttttcaa

SEQ ID NO: 664262 - DNA, 15 bp, Homo sapiens
aatgttgttttcaat

SEQ ID NO: 664263 - DNA, 15 bp, Homo sapiens
atgttgttttcaata

SEQ ID NO: 664264 - DNA, 15 bp, Homo sapiens
tgttgttttcaatat

SEQ ID NO: 664265 - DNA, 15 bp, Homo sapiens
gttgttttcaatata

SEQ ID NO: 664266 - DNA, 15 bp, Homo sapiens
ttgttttcaatatac

SEQ ID NO: 664267 - DNA, 15 bp, Homo sapiens
tgttttcaatatacc

SEQ ID NO: 664268 - DNA, 15 bp, Homo sapiens
gttttcaatatacca

SEQ ID NO: 664269 - DNA, 15 bp, Homo sapiens
ttttcaatataccat

SEQ ID NO: 664270 - DNA, 15 bp, Homo sapiens
tttcaatataccata

SEQ ID NO: 664271 - DNA, 15 bp, Homo sapiens
ttcaatataccatat

SEQ ID NO: 664272 - DNA, 15 bp, Homo sapiens
tcaatataccatatt

SEQ ID NO: 664273 - DNA, 15 bp, Homo sapiens
caatataccatattg

SEQ ID NO: 664274 - DNA, 15 bp, Homo sapiens
aatataccatattgc

SEQ ID NO: 664275 - DNA, 15 bp, Homo sapiens
atataccatattgcc

SEQ ID NO: 664276 - DNA, 15 bp, Homo sapiens
tataccatattgcct

SEQ ID NO: 664277 - DNA, 15 bp, Homo sapiens
ataccatattgcctt

SEQ ID NO: 664278 - DNA, 15 bp, Homo sapiens
taccatattgccttg

SEQ ID NO: 664279 - DNA, 15 bp, Homo sapiens
accatattgccttgt

SEQ ID NO: 664280 - DNA, 15 bp, Homo sapiens
ccatattgccttgtt

SEQ ID NO: 664281 - DNA, 15 bp, Homo sapiens
catattgccttgttt

SEQ ID NO: 664282 - DNA, 15 bp, Homo sapiens
atattgccttgtttt

SEQ ID NO: 664283 - DNA, 15 bp, Homo sapiens
tattgccttgttttt

SEQ ID NO: 664284 - DNA, 15 bp, Homo sapiens
attgccttgttttta

SEQ ID NO: 664285 - DNA, 15 bp, Homo sapiens
ttgccttgtttttat

SEQ ID NO: 664286 - DNA, 15 bp, Homo sapiens
tgccttgtttttatt

SEQ ID NO: 664287 - DNA, 15 bp, Homo sapiens
gccttgtttttattc

SEQ ID NO: 664288 - DNA, 15 bp, Homo sapiens
ccttgtttttattcc

SEQ ID NO: 664289 - DNA, 15 bp, Homo sapiens
cttgtttttattccc

SEQ ID NO: 664290 - DNA, 15 bp, Homo sapiens
ttgtttttattccct

SEQ ID NO: 664291 - DNA, 15 bp, Homo sapiens
tgtttttattccctc

SEQ ID NO: 664292 - DNA, 15 bp, Homo sapiens
gtttttattccctct

SEQ ID NO: 664293 - DNA, 15 bp, Homo sapiens
tttttattccctctc

SEQ ID NO: 664294 - DNA, 15 bp, Homo sapiens
ttttattccctctct

SEQ ID NO: 664295 - DNA, 15 bp, Homo sapiens
tttattccctctctg

SEQ ID NO: 664296 - DNA, 15 bp, Homo sapiens
ttattccctctctgc

SEQ ID NO: 664297 - DNA, 15 bp, Homo sapiens
tattccctctctgca

SEQ ID NO: 664298 - DNA, 15 bp, Homo sapiens
attccctctctgcat

SEQ ID NO: 664299 - DNA, 15 bp, Homo sapiens
ttccctctctgcata

SEQ ID NO: 664300 - DNA, 15 bp, Homo sapiens
tccctctctgcatat

SEQ ID NO: 664301 - DNA, 15 bp, Homo sapiens
ccctctctgcatatg

SEQ ID NO: 664302 - DNA, 15 bp, Homo sapiens
cctctctgcatatgg

SEQ ID NO: 664303 - DNA, 15 bp, Homo sapiens
ctctctgcatatggc

SEQ ID NO: 664304 - DNA, 15 bp, Homo sapiens
tctctgcatatggca

SEQ ID NO: 664305 - DNA, 15 bp, Homo sapiens
ctctgcatatggcac

SEQ ID NO: 664306 - DNA, 15 bp, Homo sapiens
tctgcatatggcact

SEQ ID NO: 664307 - DNA, 15 bp, Homo sapiens
ctgcatatggcactg

SEQ ID NO: 664308 - DNA, 15 bp, Homo sapiens
tgcatatggcactgt

SEQ ID NO: 664309 - DNA, 15 bp, Homo sapiens
gcatatggcactgtg

SEQ ID NO: 664310 - DNA, 15 bp, Homo sapiens
catatggcactgtgc

SEQ ID NO: 664311 - DNA, 15 bp, Homo sapiens
atatggcactgtgct

SEQ ID NO: 664312 - DNA, 15 bp, Homo sapiens
tatggcactgtgcta

SEQ ID NO: 664313 - DNA, 15 bp, Homo sapiens
atggcactgtgctag

SEQ ID NO: 664314 - DNA, 15 bp, Homo sapiens
tggcactgtgctagg

SEQ ID NO: 664315 - DNA, 15 bp, Homo sapiens
ggcactgtgctaggt

SEQ ID NO: 664316 - DNA, 15 bp, Homo sapiens
gcactgtgctaggtg

SEQ ID NO: 664317 - DNA, 15 bp, Homo sapiens
cactgtgctaggtgc

SEQ ID NO: 664318 - DNA, 15 bp, Homo sapiens
actgtgctaggtgct

SEQ ID NO: 664319 - DNA, 15 bp, Homo sapiens
ctgtgctaggtgcta

SEQ ID NO: 664320 - DNA, 15 bp, Homo sapiens
tgtgctaggtgctat

SEQ ID NO: 664321 - DNA, 15 bp, Homo sapiens
gtgctaggtgctata

SEQ ID NO: 664322 - DNA, 15 bp, Homo sapiens
tgctaggtgctatag

SEQ ID NO: 664323 - DNA, 15 bp, Homo sapiens
gctaggtgctataga

SEQ ID NO: 664324 - DNA, 15 bp, Homo sapiens
ctaggtgctatagaa

SEQ ID NO: 664325 - DNA, 15 bp, Homo sapiens
taggtgctatagaaa

SEQ ID NO: 664326 - DNA, 15 bp, Homo sapiens
aggtgctatagaaac

SEQ ID NO: 664327 - DNA, 15 bp, Homo sapiens
ggtgctatagaaaca

SEQ ID NO: 664328 - DNA, 15 bp, Homo sapiens
gtgctatagaaacat

SEQ ID NO: 664329 - DNA, 15 bp, Homo sapiens
tgctatagaaacatt

SEQ ID NO: 664330 - DNA, 15 bp, Homo sapiens
gctatagaaacattc

SEQ ID NO: 664331 - DNA, 15 bp, Homo sapiens
ctatagaaacattcc

SEQ ID NO: 664332 - DNA, 15 bp, Homo sapiens
tatagaaacattccc

SEQ ID NO: 664333 - DNA, 15 bp, Homo sapiens
atagaaacattcccc

SEQ ID NO: 664334 - DNA, 15 bp, Homo sapiens
tagaaacattcccca

SEQ ID NO: 664335 - DNA, 15 bp, Homo sapiens
agaaacattccccag

SEQ ID NO: 664336 - DNA, 15 bp, Homo sapiens
gaaacattccccagg

SEQ ID NO: 664337 - DNA, 15 bp, Homo sapiens
aaacattccccagga

SEQ ID NO: 664338 - DNA, 15 bp, Homo sapiens
aacattccccaggac

SEQ ID NO: 664339 - DNA, 15 bp, Homo sapiens
acattccccaggacc

SEQ ID NO: 664340 - DNA, 15 bp, Homo sapiens
cattccccaggacct

SEQ ID NO: 664341 - DNA, 15 bp, Homo sapiens
attccccaggacctc

SEQ ID NO: 664342 - DNA, 15 bp, Homo sapiens
ttccccaggacctct

SEQ ID NO: 664343 - DNA, 15 bp, Homo sapiens
tccccaggacctctc

SEQ ID NO: 664344 - DNA, 15 bp, Homo sapiens
ccccaggacctctca

SEQ ID NO: 664345 - DNA, 15 bp, Homo sapiens
cccaggacctctcaa

SEQ ID NO: 664346 - DNA, 15 bp, Homo sapiens
ccaggacctctcaat

SEQ ID NO: 664347 - DNA, 15 bp, Homo sapiens
caggacctctcaatc

SEQ ID NO: 664348 - DNA, 15 bp, Homo sapiens
aggacctctcaatcc

SEQ ID NO: 664349 - DNA, 15 bp, Homo sapiens
ggacctctcaatcca

SEQ ID NO: 664350 - DNA, 15 bp, Homo sapiens
gacctctcaatccaa

SEQ ID NO: 664351 - DNA, 15 bp, Homo sapiens
acctctcaatccaag

SEQ ID NO: 664352 - DNA, 15 bp, Homo sapiens
cctctcaatccaaga

SEQ ID NO: 664353 - DNA, 15 bp, Homo sapiens
ctctcaatccaagaa

SEQ ID NO: 664354 - DNA, 15 bp, Homo sapiens
tctcaatccaagaac

SEQ ID NO: 664355 - DNA, 15 bp, Homo sapiens
ctcaatccaagaaca

SEQ ID NO: 664356 - DNA, 15 bp, Homo sapiens
tcaatccaagaacaa

SEQ ID NO: 664357 - DNA, 15 bp, Homo sapiens
caatccaagaacaac

SEQ ID NO: 664358 - DNA, 15 bp, Homo sapiens
aatccaagaacaaca

SEQ ID NO: 664359 - DNA, 15 bp, Homo sapiens
atccaagaacaacac

SEQ ID NO: 664360 - DNA, 15 bp, Homo sapiens
tccaagaacaacact

SEQ ID NO: 664361 - DNA, 15 bp, Homo sapiens
ccaagaacaacactg

SEQ ID NO: 664362 - DNA, 15 bp, Homo sapiens
caagaacaacactgt

SEQ ID NO: 664363 - DNA, 15 bp, Homo sapiens
aagaacaacactgtt

SEQ ID NO: 664364 - DNA, 15 bp, Homo sapiens
agaacaacactgttg

SEQ ID NO: 664365 - DNA, 15 bp, Homo sapiens
gaacaacactgttga

SEQ ID NO: 664366 - DNA, 15 bp, Homo sapiens
aacaacactgttgat

SEQ ID NO: 664367 - DNA, 15 bp, Homo sapiens
acaacactgttgata

SEQ ID NO: 664368 - DNA, 15 bp, Homo sapiens
caacactgttgatac

SEQ ID NO: 664369 - DNA, 15 bp, Homo sapiens
aacactgttgataca

SEQ ID NO: 664370 - DNA, 15 bp, Homo sapiens
acactgttgatacac

SEQ ID NO: 664371 - DNA, 15 bp, Homo sapiens
cactgttgatacacc

SEQ ID NO: 664372 - DNA, 15 bp, Homo sapiens
actgttgatacacca

SEQ ID NO: 664373 - DNA, 15 bp, Homo sapiens
ctgttgatacaccag

SEQ ID NO: 664374 - DNA, 15 bp, Homo sapiens
tgttgatacaccagc

SEQ ID NO: 664375 - DNA, 15 bp, Homo sapiens
gttgatacaccagca

SEQ ID NO: 664376 - DNA, 15 bp, Homo sapiens
ttgatacaccagcat

SEQ ID NO: 664377 - DNA, 15 bp, Homo sapiens
tgatacaccagcatg

SEQ ID NO: 664378 - DNA, 15 bp, Homo sapiens
gatacaccagcatga

SEQ ID NO: 664379 - DNA, 15 bp, Homo sapiens
atacaccagcatgaa

SEQ ID NO: 664380 - DNA, 15 bp, Homo sapiens
tacaccagcatgaaa

SEQ ID NO: 664381 - DNA, 15 bp, Homo sapiens
acaccagcatgaaag

SEQ ID NO: 664382 - DNA, 15 bp, Homo sapiens
caccagcatgaaagg

SEQ ID NO: 664383 - DNA, 15 bp, Homo sapiens
accagcatgaaaggg

SEQ ID NO: 664384 - DNA, 15 bp, Homo sapiens
ccagcatgaaaggga

SEQ ID NO: 664385 - DNA, 15 bp, Homo sapiens
cagcatgaaagggac

SEQ ID NO: 664386 - DNA, 15 bp, Homo sapiens
agcatgaaagggaca

SEQ ID NO: 664387 - DNA, 15 bp, Homo sapiens
gcatgaaagggacat

SEQ ID NO: 664388 - DNA, 15 bp, Homo sapiens
catgaaagggacatc

SEQ ID NO: 664389 - DNA, 15 bp, Homo sapiens
atgaaagggacatca

SEQ ID NO: 664390 - DNA, 15 bp, Homo sapiens
tgaaagggacatcac

SEQ ID NO: 664391 - DNA, 15 bp, Homo sapiens
gaaagggacatcaca

SEQ ID NO: 664392 - DNA, 15 bp, Homo sapiens
aaagggacatcacac

SEQ ID NO: 664393 - DNA, 15 bp, Homo sapiens
aagggacatcacaca

SEQ ID NO: 664394 - DNA, 15 bp, Homo sapiens
agggacatcacacac

SEQ ID NO: 664395 - DNA, 15 bp, Homo sapiens
gggacatcacacaca

SEQ ID NO: 664396 - DNA, 15 bp, Homo sapiens
ggacatcacacacaa

SEQ ID NO: 664397 - DNA, 15 bp, Homo sapiens
gacatcacacacaac

SEQ ID NO: 664398 - DNA, 15 bp, Homo sapiens
acatcacacacaacc

SEQ ID NO: 664399 - DNA, 15 bp, Homo sapiens
catcacacacaaccc

SEQ ID NO: 664400 - DNA, 15 bp, Homo sapiens
atcacacacaaccca

SEQ ID NO: 664401 - DNA, 15 bp, Homo sapiens
tcacacacaacccaa

SEQ ID NO: 664402 - DNA, 15 bp, Homo sapiens
cacacacaacccaac

SEQ ID NO: 664403 - DNA, 15 bp, Homo sapiens
acacacaacccaact

SEQ ID NO: 664404 - DNA, 15 bp, Homo sapiens
cacacaacccaactg

SEQ ID NO: 664405 - DNA, 15 bp, Homo sapiens
acacaacccaactgg

SEQ ID NO: 664406 - DNA, 15 bp, Homo sapiens
cacaacccaactggc

SEQ ID NO: 664407 - DNA, 15 bp, Homo sapiens
acaacccaactggca

SEQ ID NO: 664408 - DNA, 15 bp, Homo sapiens
caacccaactggcac

SEQ ID NO: 664409 - DNA, 15 bp, Homo sapiens
aacccaactggcact

SEQ ID NO: 664410 - DNA, 15 bp, Homo sapiens
acccaactggcactc

SEQ ID NO: 664411 - DNA, 15 bp, Homo sapiens
cccaactggcactca

SEQ ID NO: 664412 - DNA, 15 bp, Homo sapiens
ccaactggcactcaa

SEQ ID NO: 664413 - DNA, 15 bp, Homo sapiens
caactggcactcaag

SEQ ID NO: 664414 - DNA, 15 bp, Homo sapiens
aactggcactcaagt

SEQ ID NO: 664415 - DNA, 15 bp, Homo sapiens
actggcactcaagtc

SEQ ID NO: 664416 - DNA, 15 bp, Homo sapiens
ctggcactcaagtct

SEQ ID NO: 664417 - DNA, 15 bp, Homo sapiens
tggcactcaagtctg

SEQ ID NO: 664418 - DNA, 15 bp, Homo sapiens
ggcactcaagtctgc

SEQ ID NO: 664419 - DNA, 15 bp, Homo sapiens
gcactcaagtctgca

SEQ ID NO: 664420 - DNA, 15 bp, Homo sapiens
cactcaagtctgcac

SEQ ID NO: 664421 - DNA, 15 bp, Homo sapiens
actcaagtctgcacc

SEQ ID NO: 664422 - DNA, 15 bp, Homo sapiens
ctcaagtctgcacca

SEQ ID NO: 664423 - DNA, 15 bp, Homo sapiens
tcaagtctgcaccat

SEQ ID NO: 664424 - DNA, 15 bp, Homo sapiens
caagtctgcaccatg

SEQ ID NO: 664425 - DNA, 15 bp, Homo sapiens
aagtctgcaccatgc

SEQ ID NO: 664426 - DNA, 15 bp, Homo sapiens
agtctgcaccatgca

SEQ ID NO: 664427 - DNA, 15 bp, Homo sapiens
gtctgcaccatgcag

SEQ ID NO: 664428 - DNA, 15 bp, Homo sapiens
tctgcaccatgcagt

SEQ ID NO: 664429 - DNA, 15 bp, Homo sapiens
ctgcaccatgcagtt

SEQ ID NO: 664430 - DNA, 15 bp, Homo sapiens
tgcaccatgcagtta

SEQ ID NO: 664431 - DNA, 15 bp, Homo sapiens
gcaccatgcagttat

SEQ ID NO: 664432 - DNA, 15 bp, Homo sapiens
caccatgcagttatt

SEQ ID NO: 664433 - DNA, 15 bp, Homo sapiens
accatgcagttattt

SEQ ID NO: 664434 - DNA, 15 bp, Homo sapiens
ccatgcagttattta

SEQ ID NO: 664435 - DNA, 15 bp, Homo sapiens
catgcagttatttat

SEQ ID NO: 664436 - DNA, 15 bp, Homo sapiens
atgcagttatttata

SEQ ID NO: 664437 - DNA, 15 bp, Homo sapiens
tgcagttatttatat

SEQ ID NO: 664438 - DNA, 15 bp, Homo sapiens
gcagttatttatatc

SEQ ID NO: 664439 - DNA, 15 bp, Homo sapiens
cagttatttatatca

SEQ ID NO: 664440 - DNA, 15 bp, Homo sapiens
agttatttatatcat

SEQ ID NO: 664441 - DNA, 15 bp, Homo sapiens
gttatttatatcatg

SEQ ID NO: 664442 - DNA, 15 bp, Homo sapiens
ttatttatatcatgt

SEQ ID NO: 664443 - DNA, 15 bp, Homo sapiens
tatttatatcatgta

SEQ ID NO: 664444 - DNA, 15 bp, Homo sapiens
atttatatcatgtaa

SEQ ID NO: 664445 - DNA, 15 bp, Homo sapiens
tttatatcatgtaac

SEQ ID NO: 664446 - DNA, 15 bp, Homo sapiens
ttatatcatgtaaca

SEQ ID NO: 664447 - DNA, 15 bp, Homo sapiens
tatatcatgtaacac

SEQ ID NO: 664448 - DNA, 15 bp, Homo sapiens
atatcatgtaacacc

SEQ ID NO: 664449 - DNA, 15 bp, Homo sapiens
tatcatgtaacacca

SEQ ID NO: 664450 - DNA, 15 bp, Homo sapiens
atcatgtaacaccaa

SEQ ID NO: 664451 - DNA, 15 bp, Homo sapiens
tcatgtaacaccaaa

SEQ ID NO: 664452 - DNA, 15 bp, Homo sapiens
catgtaacaccaaac

SEQ ID NO: 664453 - DNA, 15 bp, Homo sapiens
atgtaacaccaaacc

SEQ ID NO: 664454 - DNA, 15 bp, Homo sapiens
tgtaacaccaaacca

SEQ ID NO: 664455 - DNA, 15 bp, Homo sapiens
gtaacaccaaaccat

SEQ ID NO: 664456 - DNA, 15 bp, Homo sapiens
taacaccaaaccatc

SEQ ID NO: 664457 - DNA, 15 bp, Homo sapiens
aacaccaaaccatct

SEQ ID NO: 664458 - DNA, 15 bp, Homo sapiens
acaccaaaccatctc

SEQ ID NO: 664459 - DNA, 15 bp, Homo sapiens
caccaaaccatctcc

SEQ ID NO: 664460 - DNA, 15 bp, Homo sapiens
accaaaccatctcct

SEQ ID NO: 664461 - DNA, 15 bp, Homo sapiens
ccaaaccatctcctc

SEQ ID NO: 664462 - DNA, 15 bp, Homo sapiens
caaaccatctcctcc

SEQ ID NO: 664463 - DNA, 15 bp, Homo sapiens
aaaccatctcctccc

SEQ ID NO: 664464 - DNA, 15 bp, Homo sapiens
aaccatctcctccca

SEQ ID NO: 664465 - DNA, 15 bp, Homo sapiens
accatctcctcccac

SEQ ID NO: 664466 - DNA, 15 bp, Homo sapiens
ccatctcctcccact

SEQ ID NO: 664467 - DNA, 15 bp, Homo sapiens
catctcctcccactc

SEQ ID NO: 664468 - DNA, 15 bp, Homo sapiens
atctcctcccactcg

SEQ ID NO: 664469 - DNA, 15 bp, Homo sapiens
tctcctcccactcgc

SEQ ID NO: 664470 - DNA, 15 bp, Homo sapiens
ctcctcccactcgcc

SEQ ID NO: 664471 - DNA, 15 bp, Homo sapiens
tcctcccactcgccc

SEQ ID NO: 664472 - DNA, 15 bp, Homo sapiens
cctcccactcgccct

SEQ ID NO: 664473 - DNA, 15 bp, Homo sapiens
ctcccactcgccctc

SEQ ID NO: 664474 - DNA, 15 bp, Homo sapiens
tcccactcgccctcc

SEQ ID NO: 664475 - DNA, 15 bp, Homo sapiens
cccactcgccctccc

SEQ ID NO: 664476 - DNA, 15 bp, Homo sapiens
ccactcgccctccct

SEQ ID NO: 664477 - DNA, 15 bp, Homo sapiens
cactcgccctccctc

SEQ ID NO: 664478 - DNA, 15 bp, Homo sapiens
actcgccctccctcc

SEQ ID NO: 664479 - DNA, 15 bp, Homo sapiens
ctcgccctccctcct

SEQ ID NO: 664480 - DNA, 15 bp, Homo sapiens
tcgccctccctcctt

SEQ ID NO: 664481 - DNA, 15 bp, Homo sapiens
cgccctccctccttc

SEQ ID NO: 664482 - DNA, 15 bp, Homo sapiens
gccctccctccttcc

SEQ ID NO: 664483 - DNA, 15 bp, Homo sapiens
ccctccctccttccc

SEQ ID NO: 664484 - DNA, 15 bp, Homo sapiens
cctccctccttccct

SEQ ID NO: 664485 - DNA, 15 bp, Homo sapiens
ctccctccttccctc

SEQ ID NO: 664486 - DNA, 15 bp, Homo sapiens
tccctccttccctct

SEQ ID NO: 664487 - DNA, 15 bp, Homo sapiens
ccctccttccctctc

SEQ ID NO: 664488 - DNA, 15 bp, Homo sapiens
cctccttccctctct

SEQ ID NO: 664489 - DNA, 15 bp, Homo sapiens
ctccttccctctctc

SEQ ID NO: 664490 - DNA, 15 bp, Homo sapiens
tccttccctctctcc

SEQ ID NO: 664491 - DNA, 15 bp, Homo sapiens
ccttccctctctcct

SEQ ID NO: 664492 - DNA, 15 bp, Homo sapiens
cttccctctctcctg

SEQ ID NO: 664493 - DNA, 15 bp, Homo sapiens
ttccctctctcctgt

SEQ ID NO: 664494 - DNA, 15 bp, Homo sapiens
tccctctctcctgtg

SEQ ID NO: 664495 - DNA, 15 bp, Homo sapiens
ccctctctcctgtgt

SEQ ID NO: 664496 - DNA, 15 bp, Homo sapiens
cctctctcctgtgtt

SEQ ID NO: 664497 - DNA, 15 bp, Homo sapiens
ctctctcctgtgttc

SEQ ID NO: 664498 - DNA, 15 bp, Homo sapiens
tctctcctgtgttca

SEQ ID NO: 664499 - DNA, 15 bp, Homo sapiens
ctctcctgtgttcaa

SEQ ID NO: 664500 - DNA, 15 bp, Homo sapiens
tctcctgtgttcaat

SEQ ID NO: 664501 - DNA, 15 bp, Homo sapiens
ctcctgtgttcaatc

SEQ ID NO: 664502 - DNA, 15 bp, Homo sapiens
tcctgtgttcaatct

SEQ ID NO: 664503 - DNA, 15 bp, Homo sapiens
cctgtgttcaatctg

SEQ ID NO: 664504 - DNA, 15 bp, Homo sapiens
ctgtgttcaatctgt

SEQ ID NO: 664505 - DNA, 15 bp, Homo sapiens
tgtgttcaatctgtc

SEQ ID NO: 664506 - DNA, 15 bp, Homo sapiens
gtgttcaatctgtcg

SEQ ID NO: 664507 - DNA, 15 bp, Homo sapiens
tgttcaatctgtcgc

SEQ ID NO: 664508 - DNA, 15 bp, Homo sapiens
gttcaatctgtcgct

SEQ ID NO: 664509 - DNA, 15 bp, Homo sapiens
ttcaatctgtcgctg

SEQ ID NO: 664510 - DNA, 15 bp, Homo sapiens
tcaatctgtcgctga

SEQ ID NO: 664511 - DNA, 15 bp, Homo sapiens
caatctgtcgctgac

SEQ ID NO: 664512 - DNA, 15 bp, Homo sapiens
aatctgtcgctgact

SEQ ID NO: 664513 - DNA, 15 bp, Homo sapiens
atctgtcgctgactc

SEQ ID NO: 664514 - DNA, 15 bp, Homo sapiens
tctgtcgctgactct

SEQ ID NO: 664515 - DNA, 15 bp, Homo sapiens
ctgtcgctgactctg

SEQ ID NO: 664516 - DNA, 15 bp, Homo sapiens
tgtcgctgactctgg

SEQ ID NO: 664517 - DNA, 15 bp, Homo sapiens
gtcgctgactctggc

SEQ ID NO: 664518 - DNA, 15 bp, Homo sapiens
tcgctgactctggct

SEQ ID NO: 664519 - DNA, 15 bp, Homo sapiens
cgctgactctggctg

SEQ ID NO: 664520 - DNA, 15 bp, Homo sapiens
gctgactctggctgc

SEQ ID NO: 664521 - DNA, 15 bp, Homo sapiens
ctgactctggctgct

SEQ ID NO: 664522 - DNA, 15 bp, Homo sapiens
tgactctggctgctc

SEQ ID NO: 664523 - DNA, 15 bp, Homo sapiens
gactctggctgctcc

SEQ ID NO: 664524 - DNA, 15 bp, Homo sapiens
actctggctgctccc

SEQ ID NO: 664525 - DNA, 15 bp, Homo sapiens
ctctggctgctccct

SEQ ID NO: 664526 - DNA, 15 bp, Homo sapiens
tctggctgctccctt

SEQ ID NO: 664527 - DNA, 15 bp, Homo sapiens
ctggctgctcccttc

SEQ ID NO: 664528 - DNA, 15 bp, Homo sapiens
tggctgctcccttct

SEQ ID NO: 664529 - DNA, 15 bp, Homo sapiens
ggctgctcccttctc

SEQ ID NO: 664530 - DNA, 15 bp, Homo sapiens
gctgctcccttctct

SEQ ID NO: 664531 - DNA, 15 bp, Homo sapiens
ctgctcccttctctg

SEQ ID NO: 664532 - DNA, 15 bp, Homo sapiens
tgctcccttctctgc

SEQ ID NO: 664533 - DNA, 15 bp, Homo sapiens
gctcccttctctgcg

SEQ ID NO: 664534 - DNA, 15 bp, Homo sapiens
ctcccttctctgcga

SEQ ID NO: 664535 - DNA, 15 bp, Homo sapiens
tcccttctctgcgac

SEQ ID NO: 664536 - DNA, 15 bp, Homo sapiens
cccttctctgcgaca

SEQ ID NO: 664537 - DNA, 15 bp, Homo sapiens
ccttctctgcgacag

SEQ ID NO: 664538 - DNA, 15 bp, Homo sapiens
cttctctgcgacagt

SEQ ID NO: 664539 - DNA, 15 bp, Homo sapiens
ttctctgcgacagtg

SEQ ID NO: 664540 - DNA, 15 bp, Homo sapiens
tctctgcgacagtgc

SEQ ID NO: 664541 - DNA, 15 bp, Homo sapiens
ctctgcgacagtgcc

SEQ ID NO: 664542 - DNA, 15 bp, Homo sapiens
tctgcgacagtgcca

SEQ ID NO: 664543 - DNA, 15 bp, Homo sapiens
ctgcgacagtgccaa

SEQ ID NO: 664544 - DNA, 15 bp, Homo sapiens
tgcgacagtgccaag

SEQ ID NO: 664545 - DNA, 15 bp, Homo sapiens
gcgacagtgccaaga

SEQ ID NO: 664546 - DNA, 15 bp, Homo sapiens
cgacagtgccaagag

SEQ ID NO: 664547 - DNA, 15 bp, Homo sapiens
gacagtgccaagagc

SEQ ID NO: 664548 - DNA, 15 bp, Homo sapiens
acagtgccaagagct

SEQ ID NO: 664549 - DNA, 15 bp, Homo sapiens
cagtgccaagagctg

SEQ ID NO: 664550 - DNA, 15 bp, Homo sapiens
agtgccaagagctgt

SEQ ID NO: 664551 - DNA, 15 bp, Homo sapiens
gtgccaagagctgtt

SEQ ID NO: 664552 - DNA, 15 bp, Homo sapiens
tgccaagagctgttt

SEQ ID NO: 664553 - DNA, 15 bp, Homo sapiens
gccaagagctgtttc

SEQ ID NO: 664554 - DNA, 15 bp, Homo sapiens
ccaagagctgtttct

SEQ ID NO: 664555 - DNA, 15 bp, Homo sapiens
caagagctgtttctg

SEQ ID NO: 664556 - DNA, 15 bp, Homo sapiens
aagagctgtttctgc

SEQ ID NO: 664557 - DNA, 15 bp, Homo sapiens
agagctgtttctgct

SEQ ID NO: 664558 - DNA, 15 bp, Homo sapiens
gagctgtttctgctg

SEQ ID NO: 664559 - DNA, 15 bp, Homo sapiens
agctgtttctgctgc

SEQ ID NO: 664560 - DNA, 15 bp, Homo sapiens
gctgtttctgctgct

SEQ ID NO: 664561 - DNA, 15 bp, Homo sapiens
ctgtttctgctgctg

SEQ ID NO: 664562 - DNA, 15 bp, Homo sapiens
tgtttctgctgctgt

SEQ ID NO: 664563 - DNA, 15 bp, Homo sapiens
gtttctgctgctgta

SEQ ID NO: 664564 - DNA, 15 bp, Homo sapiens
tttctgctgctgtag

SEQ ID NO: 664565 - DNA, 15 bp, Homo sapiens
ttctgctgctgtaga

SEQ ID NO: 664566 - DNA, 15 bp, Homo sapiens
tctgctgctgtagag

SEQ ID NO: 664567 - DNA, 15 bp, Homo sapiens
ctgctgctgtagagg

SEQ ID NO: 664568 - DNA, 15 bp, Homo sapiens
tgctgctgtagaggc

SEQ ID NO: 664569 - DNA, 15 bp, Homo sapiens
gctgctgtagaggct

SEQ ID NO: 664570 - DNA, 15 bp, Homo sapiens
ctgctgtagaggctg

SEQ ID NO: 664571 - DNA, 15 bp, Homo sapiens
tgctgtagaggctgt

SEQ ID NO: 664572 - DNA, 15 bp, Homo sapiens
gctgtagaggctgtc

SEQ ID NO: 664573 - DNA, 15 bp, Homo sapiens
ctgtagaggctgtct

SEQ ID NO: 664574 - DNA, 15 bp, Homo sapiens
tgtagaggctgtctt

SEQ ID NO: 664575 - DNA, 15 bp, Homo sapiens
gtagaggctgtcttc

SEQ ID NO: 664576 - DNA, 15 bp, Homo sapiens
tagaggctgtcttcc

SEQ ID NO: 664577 - DNA, 15 bp, Homo sapiens
agaggctgtcttcca

SEQ ID NO: 664578 - DNA, 15 bp, Homo sapiens
gaggctgtcttccaa

SEQ ID NO: 664579 - DNA, 15 bp, Homo sapiens
aggctgtcttccaac

SEQ ID NO: 664580 - DNA, 15 bp, Homo sapiens
ggctgtcttccaaca

SEQ ID NO: 664581 - DNA, 15 bp, Homo sapiens
gctgtcttccaacag

SEQ ID NO: 664582 - DNA, 15 bp, Homo sapiens
ctgtcttccaacagt

SEQ ID NO: 664583 - DNA, 15 bp, Homo sapiens
tgtcttccaacagtt

SEQ ID NO: 664584 - DNA, 15 bp, Homo sapiens
gtcttccaacagttt

SEQ ID NO: 664585 - DNA, 15 bp, Homo sapiens
tcttccaacagttta

SEQ ID NO: 664586 - DNA, 15 bp, Homo sapiens
cttccaacagtttac

SEQ ID NO: 664587 - DNA, 15 bp, Homo sapiens
ttccaacagtttact

SEQ ID NO: 664588 - DNA, 15 bp, Homo sapiens
tccaacagtttactc

SEQ ID NO: 664589 - DNA, 15 bp, Homo sapiens
ccaacagtttactcc

SEQ ID NO: 664590 - DNA, 15 bp, Homo sapiens
caacagtttactccc

SEQ ID NO: 664591 - DNA, 15 bp, Homo sapiens
aacagtttactccct

SEQ ID NO: 664592 - DNA, 15 bp, Homo sapiens
acagtttactccctg

SEQ ID NO: 664593 - DNA, 15 bp, Homo sapiens
cagtttactccctga

SEQ ID NO: 664594 - DNA, 15 bp, Homo sapiens
agtttactccctgat

SEQ ID NO: 664595 - DNA, 15 bp, Homo sapiens
gtttactccctgatg

SEQ ID NO: 664596 - DNA, 15 bp, Homo sapiens
tttactccctgatgc

SEQ ID NO: 664597 - DNA, 15 bp, Homo sapiens
ttactccctgatgca

SEQ ID NO: 664598 - DNA, 15 bp, Homo sapiens
tactccctgatgcag

SEQ ID NO: 664599 - DNA, 15 bp, Homo sapiens
actccctgatgcagg

SEQ ID NO: 664600 - DNA, 15 bp, Homo sapiens
ctccctgatgcaggc

SEQ ID NO: 664601 - DNA, 15 bp, Homo sapiens
tccctgatgcaggcc

SEQ ID NO: 664602 - DNA, 15 bp, Homo sapiens
ccctgatgcaggccc

SEQ ID NO: 664603 - DNA, 15 bp, Homo sapiens
cctgatgcaggcccg

SEQ ID NO: 664604 - DNA, 15 bp, Homo sapiens
ctgatgcaggcccgg

SEQ ID NO: 664605 - DNA, 15 bp, Homo sapiens
tgatgcaggcccgga

SEQ ID NO: 664606 - DNA, 15 bp, Homo sapiens
gatgcaggcccggat

SEQ ID NO: 664607 - DNA, 15 bp, Homo sapiens
atgcaggcccggatg

SEQ ID NO: 664608 - DNA, 15 bp, Homo sapiens
tgcaggcccggatgc

SEQ ID NO: 664609 - DNA, 15 bp, Homo sapiens
gcaggcccggatgcc

SEQ ID NO: 664610 - DNA, 15 bp, Homo sapiens
caggcccggatgcct

SEQ ID NO: 664611 - DNA, 15 bp, Homo sapiens
aggcccggatgcctc

SEQ ID NO: 664612 - DNA, 15 bp, Homo sapiens
ggcccggatgcctct

SEQ ID NO: 664613 - DNA, 15 bp, Homo sapiens
gcccggatgcctctc

SEQ ID NO: 664614 - DNA, 15 bp, Homo sapiens
cccggatgcctctct

SEQ ID NO: 664615 - DNA, 15 bp, Homo sapiens
ccggatgcctctctt

SEQ ID NO: 664616 - DNA, 15 bp, Homo sapiens
cggatgcctctcttt

SEQ ID NO: 664617 - DNA, 15 bp, Homo sapiens
ggatgcctctcttta

SEQ ID NO: 664618 - DNA, 15 bp, Homo sapiens
gatgcctctctttaa

SEQ ID NO: 664619 - DNA, 15 bp, Homo sapiens
atgcctctctttaag

SEQ ID NO: 664620 - DNA, 15 bp, Homo sapiens
tgcctctctttaagg

SEQ ID NO: 664621 - DNA, 15 bp, Homo sapiens
gcctctctttaagga

SEQ ID NO: 664622 - DNA, 15 bp, Homo sapiens
cctctctttaaggag

SEQ ID NO: 664623 - DNA, 15 bp, Homo sapiens
ctctctttaaggagc

SEQ ID NO: 664624 - DNA, 15 bp, Homo sapiens
tctctttaaggagcg

SEQ ID NO: 664625 - DNA, 15 bp, Homo sapiens
ctctttaaggagcgt

SEQ ID NO: 664626 - DNA, 15 bp, Homo sapiens
tctttaaggagcgtc

SEQ ID NO: 664627 - DNA, 15 bp, Homo sapiens
ctttaaggagcgtcc

SEQ ID NO: 664628 - DNA, 15 bp, Homo sapiens
tttaaggagcgtcca

SEQ ID NO: 664629 - DNA, 15 bp, Homo sapiens
ttaaggagcgtccac

SEQ ID NO: 664630 - DNA, 15 bp, Homo sapiens
taaggagcgtccacc

SEQ ID NO: 664631 - DNA, 15 bp, Homo sapiens
aaggagcgtccacct

SEQ ID NO: 664632 - DNA, 15 bp, Homo sapiens
aggagcgtccacctc

SEQ ID NO: 664633 - DNA, 15 bp, Homo sapiens
ggagcgtccacctcc

SEQ ID NO: 664634 - DNA, 15 bp, Homo sapiens
gagcgtccacctccc

SEQ ID NO: 664635 - DNA, 15 bp, Homo sapiens
agcgtccacctccca

SEQ ID NO: 664636 - DNA, 15 bp, Homo sapiens
gcgtccacctcccaa

SEQ ID NO: 664637 - DNA, 15 bp, Homo sapiens
cgtccacctcccaac

SEQ ID NO: 664638 - DNA, 15 bp, Homo sapiens
gtccacctcccaaca

SEQ ID NO: 664639 - DNA, 15 bp, Homo sapiens
tccacctcccaacac

SEQ ID NO: 664640 - DNA, 15 bp, Homo sapiens
ccacctcccaacact

SEQ ID NO: 664641 - DNA, 15 bp, Homo sapiens
cacctcccaacactc

SEQ ID NO: 664642 - DNA, 15 bp, Homo sapiens
acctcccaacactct

SEQ ID NO: 664643 - DNA, 15 bp, Homo sapiens
cctcccaacactctc

SEQ ID NO: 664644 - DNA, 15 bp, Homo sapiens
ctcccaacactctcc

SEQ ID NO: 664645 - DNA, 15 bp, Homo sapiens
tcccaacactctccc

SEQ ID NO: 664646 - DNA, 15 bp, Homo sapiens
cccaacactctccct

SEQ ID NO: 664647 - DNA, 15 bp, Homo sapiens
ccaacactctccctc

SEQ ID NO: 664648 - DNA, 15 bp, Homo sapiens
caacactctccctcc

SEQ ID NO: 664649 - DNA, 15 bp, Homo sapiens
aacactctccctcca

SEQ ID NO: 664650 - DNA, 15 bp, Homo sapiens
acactctccctccag

SEQ ID NO: 664651 - DNA, 15 bp, Homo sapiens
cactctccctccaga

SEQ ID NO: 664652 - DNA, 15 bp, Homo sapiens
actctccctccagac

SEQ ID NO: 664653 - DNA, 15 bp, Homo sapiens
ctctccctccagaca

SEQ ID NO: 664654 - DNA, 15 bp, Homo sapiens
tctccctccagacac

SEQ ID NO: 664655 - DNA, 15 bp, Homo sapiens
ctccctccagacacg

SEQ ID NO: 664656 - DNA, 15 bp, Homo sapiens
tccctccagacacgc

SEQ ID NO: 664657 - DNA, 15 bp, Homo sapiens
ccctccagacacgcc

SEQ ID NO: 664658 - DNA, 15 bp, Homo sapiens
cctccagacacgcca

SEQ ID NO: 664659 - DNA, 15 bp, Homo sapiens
ctccagacacgccag

SEQ ID NO: 664660 - DNA, 15 bp, Homo sapiens
tccagacacgccaga

SEQ ID NO: 664661 - DNA, 15 bp, Homo sapiens
ccagacacgccagac

SEQ ID NO: 664662 - DNA, 15 bp, Homo sapiens
cagacacgccagact

SEQ ID NO: 664663 - DNA, 15 bp, Homo sapiens
agacacgccagactg

SEQ ID NO: 664664 - DNA, 15 bp, Homo sapiens
gacacgccagactgc

SEQ ID NO: 664665 - DNA, 15 bp, Homo sapiens
acacgccagactgcc

SEQ ID NO: 664666 - DNA, 15 bp, Homo sapiens
cacgccagactgccc

SEQ ID NO: 664667 - DNA, 15 bp, Homo sapiens
acgccagactgccct

SEQ ID NO: 664668 - DNA, 15 bp, Homo sapiens
cgccagactgccctg

SEQ ID NO: 664669 - DNA, 15 bp, Homo sapiens
gccagactgccctgg

SEQ ID NO: 664670 - DNA, 15 bp, Homo sapiens
ccagactgccctggc

SEQ ID NO: 664671 - DNA, 15 bp, Homo sapiens
cagactgccctggca

SEQ ID NO: 664672 - DNA, 15 bp, Homo sapiens
agactgccctggcag

SEQ ID NO: 664673 - DNA, 15 bp, Homo sapiens
gactgccctggcagc

SEQ ID NO: 664674 - DNA, 15 bp, Homo sapiens
actgccctggcagcc

SEQ ID NO: 664675 - DNA, 15 bp, Homo sapiens
ctgccctggcagccg

SEQ ID NO: 664676 - DNA, 15 bp, Homo sapiens
tgccctggcagccgc

SEQ ID NO: 664677 - DNA, 15 bp, Homo sapiens
gccctggcagccgcc

SEQ ID NO: 664678 - DNA, 15 bp, Homo sapiens
ccctggcagccgcca

SEQ ID NO: 664679 - DNA, 15 bp, Homo sapiens
cctggcagccgccac

SEQ ID NO: 664680 - DNA, 15 bp, Homo sapiens
ctggcagccgccacc

SEQ ID NO: 664681 - DNA, 15 bp, Homo sapiens
tggcagccgccaccc

SEQ ID NO: 664682 - DNA, 15 bp, Homo sapiens
ggcagccgccacccc

SEQ ID NO: 664683 - DNA, 15 bp, Homo sapiens
gcagccgccacccct

SEQ ID NO: 664684 - DNA, 15 bp, Homo sapiens
cagccgccacccctt

SEQ ID NO: 664685 - DNA, 15 bp, Homo sapiens
agccgccaccccttc

SEQ ID NO: 664686 - DNA, 15 bp, Homo sapiens
gccgccaccccttca

SEQ ID NO: 664687 - DNA, 15 bp, Homo sapiens
ccgccaccccttcac

SEQ ID NO: 664688 - DNA, 15 bp, Homo sapiens
cgccaccccttcacc

SEQ ID NO: 664689 - DNA, 15 bp, Homo sapiens
gccaccccttcacct

SEQ ID NO: 664690 - DNA, 15 bp, Homo sapiens
ccaccccttcacctg

SEQ ID NO: 664691 - DNA, 15 bp, Homo sapiens
caccccttcacctgc

SEQ ID NO: 664692 - DNA, 15 bp, Homo sapiens
accccttcacctgcc

SEQ ID NO: 664693 - DNA, 15 bp, Homo sapiens
ccccttcacctgcca

SEQ ID NO: 664694 - DNA, 15 bp, Homo sapiens
cccttcacctgccat

SEQ ID NO: 664695 - DNA, 15 bp, Homo sapiens
ccttcacctgccatc

SEQ ID NO: 664696 - DNA, 15 bp, Homo sapiens
cttcacctgccatcc

SEQ ID NO: 664697 - DNA, 15 bp, Homo sapiens
ttcacctgccatcct

SEQ ID NO: 664698 - DNA, 15 bp, Homo sapiens
tcacctgccatcctg

SEQ ID NO: 664699 - DNA, 15 bp, Homo sapiens
cacctgccatcctgg

SEQ ID NO: 664700 - DNA, 15 bp, Homo sapiens
acctgccatcctggc

SEQ ID NO: 664701 - DNA, 15 bp, Homo sapiens
cctgccatcctggcc

SEQ ID NO: 664702 - DNA, 15 bp, Homo sapiens
ctgccatcctggcca

SEQ ID NO: 664703 - DNA, 15 bp, Homo sapiens
tgccatcctggccat

SEQ ID NO: 664704 - DNA, 15 bp, Homo sapiens
gccatcctggccatg

SEQ ID NO: 664705 - DNA, 15 bp, Homo sapiens
ccatcctggccatgt

SEQ ID NO: 664706 - DNA, 15 bp, Homo sapiens
catcctggccatgtc

SEQ ID NO: 664707 - DNA, 15 bp, Homo sapiens
atcctggccatgtca

SEQ ID NO: 664708 - DNA, 15 bp, Homo sapiens
tcctggccatgtcac

SEQ ID NO: 664709 - DNA, 15 bp, Homo sapiens
cctggccatgtcact

SEQ ID NO: 664710 - DNA, 15 bp, Homo sapiens
ctggccatgtcactc

SEQ ID NO: 664711 - DNA, 15 bp, Homo sapiens
tggccatgtcactcc

SEQ ID NO: 664712 - DNA, 15 bp, Homo sapiens
ggccatgtcactccc

SEQ ID NO: 664713 - DNA, 15 bp, Homo sapiens
gccatgtcactccca

SEQ ID NO: 664714 - DNA, 15 bp, Homo sapiens
ccatgtcactcccac

SEQ ID NO: 664715 - DNA, 15 bp, Homo sapiens
catgtcactcccacc

SEQ ID NO: 664716 - DNA, 15 bp, Homo sapiens
atgtcactcccaccc

SEQ ID NO: 664717 - DNA, 15 bp, Homo sapiens
tgtcactcccacccc

SEQ ID NO: 664718 - DNA, 15 bp, Homo sapiens
gtcactcccacccct

SEQ ID NO: 664719 - DNA, 15 bp, Homo sapiens
tcactcccacccctg

SEQ ID NO: 664720 - DNA, 15 bp, Homo sapiens
cactcccacccctgg

SEQ ID NO: 664721 - DNA, 15 bp, Homo sapiens
actcccacccctggg

SEQ ID NO: 664722 - DNA, 15 bp, Homo sapiens
ctcccacccctggga

SEQ ID NO: 664723 - DNA, 15 bp, Homo sapiens
tcccacccctgggac

SEQ ID NO: 664724 - DNA, 15 bp, Homo sapiens
cccacccctgggaca

SEQ ID NO: 664725 - DNA, 15 bp, Homo sapiens
ccacccctgggacaa

SEQ ID NO: 664726 - DNA, 15 bp, Homo sapiens
cacccctgggacaag

SEQ ID NO: 664727 - DNA, 15 bp, Homo sapiens
acccctgggacaagg

SEQ ID NO: 664728 - DNA, 15 bp, Homo sapiens
cccctgggacaaggt

SEQ ID NO: 664729 - DNA, 15 bp, Homo sapiens
ccctgggacaaggtc

SEQ ID NO: 664730 - DNA, 15 bp, Homo sapiens
cctgggacaaggtcc

SEQ ID NO: 664731 - DNA, 15 bp, Homo sapiens
ctgggacaaggtcca

SEQ ID NO: 664732 - DNA, 15 bp, Homo sapiens
tgggacaaggtccag

SEQ ID NO: 664733 - DNA, 15 bp, Homo sapiens
gggacaaggtccaga

SEQ ID NO: 664734 - DNA, 15 bp, Homo sapiens
ggacaaggtccagat

SEQ ID NO: 664735 - DNA, 15 bp, Homo sapiens
gacaaggtccagatg

SEQ ID NO: 664736 - DNA, 15 bp, Homo sapiens
acaaggtccagatgt

SEQ ID NO: 664737 - DNA, 15 bp, Homo sapiens
caaggtccagatgtg

SEQ ID NO: 664738 - DNA, 15 bp, Homo sapiens
aaggtccagatgtgc

SEQ ID NO: 664739 - DNA, 15 bp, Homo sapiens
aggtccagatgtgcc

SEQ ID NO: 664740 - DNA, 15 bp, Homo sapiens
ggtccagatgtgccc

SEQ ID NO: 664741 - DNA, 15 bp, Homo sapiens
gtccagatgtgccct

SEQ ID NO: 664742 - DNA, 15 bp, Homo sapiens
tccagatgtgccctg

SEQ ID NO: 664743 - DNA, 15 bp, Homo sapiens
ccagatgtgccctga

SEQ ID NO: 664744 - DNA, 15 bp, Homo sapiens
cagatgtgccctgag

SEQ ID NO: 664745 - DNA, 15 bp, Homo sapiens
agatgtgccctgagc

SEQ ID NO: 664746 - DNA, 15 bp, Homo sapiens
gatgtgccctgagca

SEQ ID NO: 664747 - DNA, 15 bp, Homo sapiens
atgtgccctgagcaa

SEQ ID NO: 664748 - DNA, 15 bp, Homo sapiens
tgtgccctgagcaaa

SEQ ID NO: 664749 - DNA, 15 bp, Homo sapiens
gtgccctgagcaaaa

SEQ ID NO: 664750 - DNA, 15 bp, Homo sapiens
tgccctgagcaaaaa

SEQ ID NO: 664751 - DNA, 15 bp, Homo sapiens
gccctgagcaaaaaa

SEQ ID NO: 664752 - DNA, 15 bp, Homo sapiens
ccctgagcaaaaaac

SEQ ID NO: 664753 - DNA, 15 bp, Homo sapiens
cctgagcaaaaaaca

SEQ ID NO: 664754 - DNA, 15 bp, Homo sapiens
ctgagcaaaaaacag

SEQ ID NO: 664755 - DNA, 15 bp, Homo sapiens
tgagcaaaaaacagg

SEQ ID NO: 664756 - DNA, 15 bp, Homo sapiens
gagcaaaaaacaggt

SEQ ID NO: 664757 - DNA, 15 bp, Homo sapiens
agcaaaaaacaggtc

SEQ ID NO: 664758 - DNA, 15 bp, Homo sapiens
gcaaaaaacaggtcc

SEQ ID NO: 664759 - DNA, 15 bp, Homo sapiens
caaaaaacaggtccc

SEQ ID NO: 664760 - DNA, 15 bp, Homo sapiens
aaaaaacaggtccct

SEQ ID NO: 664761 - DNA, 15 bp, Homo sapiens
aaaaacaggtccctg

SEQ ID NO: 664762 - DNA, 15 bp, Homo sapiens
aaaacaggtccctga

SEQ ID NO: 664763 - DNA, 15 bp, Homo sapiens
aaacaggtccctgag

SEQ ID NO: 664764 - DNA, 15 bp, Homo sapiens
aacaggtccctgagt

SEQ ID NO: 664765 - DNA, 15 bp, Homo sapiens
acaggtccctgagtg

SEQ ID NO: 664766 - DNA, 15 bp, Homo sapiens
caggtccctgagtga

SEQ ID NO: 664767 - DNA, 15 bp, Homo sapiens
aggtccctgagtgag

SEQ ID NO: 664768 - DNA, 15 bp, Homo sapiens
ggtccctgagtgagg

SEQ ID NO: 664769 - DNA, 15 bp, Homo sapiens
gtccctgagtgagga

SEQ ID NO: 664770 - DNA, 15 bp, Homo sapiens
tccctgagtgaggag

SEQ ID NO: 664771 - DNA, 15 bp, Homo sapiens
ccctgagtgaggaga

SEQ ID NO: 664772 - DNA, 15 bp, Homo sapiens
cctgagtgaggagac

SEQ ID NO: 664773 - DNA, 15 bp, Homo sapiens
ctgagtgaggagact

SEQ ID NO: 664774 - DNA, 15 bp, Homo sapiens
tgagtgaggagacta

SEQ ID NO: 664775 - DNA, 15 bp, Homo sapiens
gagtgaggagactaa

SEQ ID NO: 664776 - DNA, 15 bp, Homo sapiens
agtgaggagactaat

SEQ ID NO: 664777 - DNA, 15 bp, Homo sapiens
gtgaggagactaatg

SEQ ID NO: 664778 - DNA, 15 bp, Homo sapiens
tgaggagactaatgg

SEQ ID NO: 664779 - DNA, 15 bp, Homo sapiens
gaggagactaatggg

SEQ ID NO: 664780 - DNA, 15 bp, Homo sapiens
aggagactaatgggg

SEQ ID NO: 664781 - DNA, 15 bp, Homo sapiens
ggagactaatggggt

SEQ ID NO: 664782 - DNA, 15 bp, Homo sapiens
gagactaatggggtg

SEQ ID NO: 664783 - DNA, 15 bp, Homo sapiens
agactaatggggtgc

SEQ ID NO: 664784 - DNA, 15 bp, Homo sapiens
gactaatggggtgca

SEQ ID NO: 664785 - DNA, 15 bp, Homo sapiens
actaatggggtgcag

SEQ ID NO: 664786 - DNA, 15 bp, Homo sapiens
ctaatggggtgcagg

SEQ ID NO: 664787 - DNA, 15 bp, Homo sapiens
taatggggtgcaggg

SEQ ID NO: 664788 - DNA, 15 bp, Homo sapiens
aatggggtgcagggc

SEQ ID NO: 664789 - DNA, 15 bp, Homo sapiens
atggggtgcagggcc

SEQ ID NO: 664790 - DNA, 15 bp, Homo sapiens
tggggtgcagggccc

SEQ ID NO: 664791 - DNA, 15 bp, Homo sapiens
ggggtgcagggcccc

SEQ ID NO: 664792 - DNA, 15 bp, Homo sapiens
gggtgcagggcccct

SEQ ID NO: 664793 - DNA, 15 bp, Homo sapiens
ggtgcagggcccctg

SEQ ID NO: 664794 - DNA, 15 bp, Homo sapiens
gtgcagggcccctga

SEQ ID NO: 664795 - DNA, 15 bp, Homo sapiens
tgcagggcccctgag

SEQ ID NO: 664796 - DNA, 15 bp, Homo sapiens
gcagggcccctgaga

SEQ ID NO: 664797 - DNA, 15 bp, Homo sapiens
cagggcccctgagaa

SEQ ID NO: 664798 - DNA, 15 bp, Homo sapiens
agggcccctgagaac

SEQ ID NO: 664799 - DNA, 15 bp, Homo sapiens
gggcccctgagaaca

SEQ ID NO: 664800 - DNA, 15 bp, Homo sapiens
ggcccctgagaacag

SEQ ID NO: 664801 - DNA, 15 bp, Homo sapiens
gcccctgagaacaga

SEQ ID NO: 664802 - DNA, 15 bp, Homo sapiens
cccctgagaacagag

SEQ ID NO: 664803 - DNA, 15 bp, Homo sapiens
ccctgagaacagagg

SEQ ID NO: 664804 - DNA, 15 bp, Homo sapiens
cctgagaacagaggg

SEQ ID NO: 664805 - DNA, 15 bp, Homo sapiens
ctgagaacagagggc

SEQ ID NO: 664806 - DNA, 15 bp, Homo sapiens
tgagaacagagggca

SEQ ID NO: 664807 - DNA, 15 bp, Homo sapiens
gagaacagagggcag

SEQ ID NO: 664808 - DNA, 15 bp, Homo sapiens
agaacagagggcagg

SEQ ID NO: 664809 - DNA, 15 bp, Homo sapiens
gaacagagggcaggt

SEQ ID NO: 664810 - DNA, 15 bp, Homo sapiens
aacagagggcaggtg

SEQ ID NO: 664811 - DNA, 15 bp, Homo sapiens
acagagggcaggtgc

SEQ ID NO: 664812 - DNA, 15 bp, Homo sapiens
cagagggcaggtgcc

SEQ ID NO: 664813 - DNA, 15 bp, Homo sapiens
agagggcaggtgcca

SEQ ID NO: 664814 - DNA, 15 bp, Homo sapiens
gagggcaggtgccaa

SEQ ID NO: 664815 - DNA, 15 bp, Homo sapiens
agggcaggtgccaag

SEQ ID NO: 664816 - DNA, 15 bp, Homo sapiens
gggcaggtgccaagt

SEQ ID NO: 664817 - DNA, 15 bp, Homo sapiens
ggcaggtgccaagtt

SEQ ID NO: 664818 - DNA, 15 bp, Homo sapiens
gcaggtgccaagtta

SEQ ID NO: 664819 - DNA, 15 bp, Homo sapiens
caggtgccaagttac

SEQ ID NO: 664820 - DNA, 15 bp, Homo sapiens
aggtgccaagttaca

SEQ ID NO: 664821 - DNA, 15 bp, Homo sapiens
ggtgccaagttacaa

SEQ ID NO: 664822 - DNA, 15 bp, Homo sapiens
gtgccaagttacaaa

SEQ ID NO: 664823 - DNA, 15 bp, Homo sapiens
tgccaagttacaaag

SEQ ID NO: 664824 - DNA, 15 bp, Homo sapiens
gccaagttacaaaga

SEQ ID NO: 664825 - DNA, 15 bp, Homo sapiens
ccaagttacaaagaa

SEQ ID NO: 664826 - DNA, 15 bp, Homo sapiens
caagttacaaagaaa

SEQ ID NO: 664827 - DNA, 15 bp, Homo sapiens
aagttacaaagaaaa

SEQ ID NO: 664828 - DNA, 15 bp, Homo sapiens
agttacaaagaaaaa

SEQ ID NO: 664829 - DNA, 15 bp, Homo sapiens
gttacaaagaaaaaa

SEQ ID NO: 664830 - DNA, 15 bp, Homo sapiens
ttacaaagaaaaaaa

SEQ ID NO: 664831 - DNA, 15 bp, Homo sapiens
tacaaagaaaaaaag

SEQ ID NO: 664832 - DNA, 15 bp, Homo sapiens
acaaagaaaaaaaga

SEQ ID NO: 664833 - DNA, 15 bp, Homo sapiens
caaagaaaaaaagaa

SEQ ID NO: 664834 - DNA, 15 bp, Homo sapiens
aaagaaaaaaagaaa

SEQ ID NO: 664835 - DNA, 15 bp, Homo sapiens
aagaaaaaaagaaat

SEQ ID NO: 664836 - DNA, 15 bp, Homo sapiens
agaaaaaaagaaatg

SEQ ID NO: 664837 - DNA, 15 bp, Homo sapiens
gaaaaaaagaaatga

SEQ ID NO: 664838 - DNA, 15 bp, Homo sapiens
aaaaaaagaaatgaa

SEQ ID NO: 664839 - DNA, 15 bp, Homo sapiens
aaaaaagaaatgaaa

SEQ ID NO: 664840 - DNA, 15 bp, Homo sapiens
aaaaagaaatgaaag

SEQ ID NO: 664841 - DNA, 15 bp, Homo sapiens
aaaagaaatgaaaga

SEQ ID NO: 664842 - DNA, 15 bp, Homo sapiens
aaagaaatgaaagac

SEQ ID NO: 664843 - DNA, 15 bp, Homo sapiens
aagaaatgaaagact

SEQ ID NO: 664844 - DNA, 15 bp, Homo sapiens
agaaatgaaagactt

SEQ ID NO: 664845 - DNA, 15 bp, Homo sapiens
gaaatgaaagacttt

SEQ ID NO: 664846 - DNA, 15 bp, Homo sapiens
aaatgaaagacttta

SEQ ID NO: 664847 - DNA, 15 bp, Homo sapiens
aatgaaagactttag

SEQ ID NO: 664848 - DNA, 15 bp, Homo sapiens
atgaaagactttaga

SEQ ID NO: 664849 - DNA, 15 bp, Homo sapiens
tgaaagactttagag

SEQ ID NO: 664850 - DNA, 15 bp, Homo sapiens
gaaagactttagaga

SEQ ID NO: 664851 - DNA, 15 bp, Homo sapiens
aaagactttagagag

SEQ ID NO: 664852 - DNA, 15 bp, Homo sapiens
aagactttagagaga

SEQ ID NO: 664853 - DNA, 15 bp, Homo sapiens
agactttagagagaa

SEQ ID NO: 664854 - DNA, 15 bp, Homo sapiens
gactttagagagaaa

SEQ ID NO: 664855 - DNA, 15 bp, Homo sapiens
actttagagagaaac

SEQ ID NO: 664856 - DNA, 15 bp, Homo sapiens
ctttagagagaaact

SEQ ID NO: 664857 - DNA, 15 bp, Homo sapiens
tttagagagaaacta

SEQ ID NO: 664858 - DNA, 15 bp, Homo sapiens
ttagagagaaactaa

SEQ ID NO: 664859 - DNA, 15 bp, Homo sapiens
tagagagaaactaaa

SEQ ID NO: 664860 - DNA, 15 bp, Homo sapiens
agagagaaactaaaa

SEQ ID NO: 664861 - DNA, 15 bp, Homo sapiens
gagagaaactaaaaa

SEQ ID NO: 664862 - DNA, 15 bp, Homo sapiens
agagaaactaaaaat

SEQ ID NO: 664863 - DNA, 15 bp, Homo sapiens
gagaaactaaaaata

SEQ ID NO: 664864 - DNA, 15 bp, Homo sapiens
agaaactaaaaataa

SEQ ID NO: 664865 - DNA, 15 bp, Homo sapiens
gaaactaaaaataaa

SEQ ID NO: 664866 - DNA, 15 bp, Homo sapiens
aaactaaaaataaag

SEQ ID NO: 664867 - DNA, 15 bp, Homo sapiens
aactaaaaataaaga

SEQ ID NO: 664868 - DNA, 15 bp, Homo sapiens
actaaaaataaagag

SEQ ID NO: 664869 - DNA, 15 bp, Homo sapiens
ctaaaaataaagaga

SEQ ID NO: 664870 - DNA, 15 bp, Homo sapiens
gagtaccacaattat

SEQ ID NO: 664871 - DNA, 15 bp, Homo sapiens
agtaccacaattatc

SEQ ID NO: 664872 - DNA, 15 bp, Homo sapiens
gtaccacaattatca

SEQ ID NO: 664873 - DNA, 15 bp, Homo sapiens
taccacaattatcac

SEQ ID NO: 664874 - DNA, 15 bp, Homo sapiens
accacaattatcact

SEQ ID NO: 664875 - DNA, 15 bp, Homo sapiens
ccacaattatcacta

SEQ ID NO: 664876 - DNA, 15 bp, Homo sapiens
cacaattatcactat

SEQ ID NO: 664877 - DNA, 15 bp, Homo sapiens
acaattatcactatt

SEQ ID NO: 664878 - DNA, 15 bp, Homo sapiens
caattatcactattg

SEQ ID NO: 664879 - DNA, 15 bp, Homo sapiens
aattatcactattgt

SEQ ID NO: 664880 - DNA, 15 bp, Homo sapiens
attatcactattgta

SEQ ID NO: 664881 - DNA, 15 bp, Homo sapiens
ttatcactattgtat

SEQ ID NO: 664882 - DNA, 15 bp, Homo sapiens
tatcactattgtata

SEQ ID NO: 664883 - DNA, 15 bp, Homo sapiens
atcactattgtatag

SEQ ID NO: 664884 - DNA, 15 bp, Homo sapiens
tcactattgtataga

SEQ ID NO: 664885 - DNA, 15 bp, Homo sapiens
cactattgtatagac

SEQ ID NO: 664886 - DNA, 15 bp, Homo sapiens
actattgtatagaca

SEQ ID NO: 664887 - DNA, 15 bp, Homo sapiens
ctattgtatagacag

SEQ ID NO: 664888 - DNA, 15 bp, Homo sapiens
tattgtatagacagg

SEQ ID NO: 664889 - DNA, 15 bp, Homo sapiens
attgtatagacagga

SEQ ID NO: 664890 - DNA, 15 bp, Homo sapiens
ttgtatagacaggaa

SEQ ID NO: 664891 - DNA, 15 bp, Homo sapiens
tgtatagacaggaaa

SEQ ID NO: 664892 - DNA, 15 bp, Homo sapiens
gtatagacaggaaaa

SEQ ID NO: 664893 - DNA, 15 bp, Homo sapiens
tatagacaggaaaac

SEQ ID NO: 664894 - DNA, 15 bp, Homo sapiens
atagacaggaaaact

SEQ ID NO: 664895 - DNA, 15 bp, Homo sapiens
tagacaggaaaactc

SEQ ID NO: 664896 - DNA, 15 bp, Homo sapiens
agacaggaaaactca

SEQ ID NO: 664897 - DNA, 15 bp, Homo sapiens
gacaggaaaactcag

SEQ ID NO: 664898 - DNA, 15 bp, Homo sapiens
acaggaaaactcagg

SEQ ID NO: 664899 - DNA, 15 bp, Homo sapiens
caggaaaactcaggc

SEQ ID NO: 664900 - DNA, 15 bp, Homo sapiens
aggaaaactcaggct

SEQ ID NO: 664901 - DNA, 15 bp, Homo sapiens
ggaaaactcaggctg

SEQ ID NO: 664902 - DNA, 15 bp, Homo sapiens
gaaaactcaggctga

SEQ ID NO: 664903 - DNA, 15 bp, Homo sapiens
aaaactcaggctgag

SEQ ID NO: 664904 - DNA, 15 bp, Homo sapiens
aaactcaggctgagt

SEQ ID NO: 664905 - DNA, 15 bp, Homo sapiens
aactcaggctgagta

SEQ ID NO: 664906 - DNA, 15 bp, Homo sapiens
actcaggctgagtat

SEQ ID NO: 664907 - DNA, 15 bp, Homo sapiens
ctcaggctgagtatg

SEQ ID NO: 664908 - DNA, 15 bp, Homo sapiens
tcaggctgagtatgg

SEQ ID NO: 664909 - DNA, 15 bp, Homo sapiens
caggctgagtatggc

SEQ ID NO: 664910 - DNA, 15 bp, Homo sapiens
aggctgagtatggct

SEQ ID NO: 664911 - DNA, 15 bp, Homo sapiens
ggctgagtatggcta

SEQ ID NO: 664912 - DNA, 15 bp, Homo sapiens
gctgagtatggctaa

SEQ ID NO: 664913 - DNA, 15 bp, Homo sapiens
ctgagtatggctaag

SEQ ID NO: 664914 - DNA, 15 bp, Homo sapiens
tgagtatggctaagt

SEQ ID NO: 664915 - DNA, 15 bp, Homo sapiens
gagtatggctaagtg

SEQ ID NO: 664916 - DNA, 15 bp, Homo sapiens
agtatggctaagtgt

SEQ ID NO: 664917 - DNA, 15 bp, Homo sapiens
gtatggctaagtgtc

SEQ ID NO: 664918 - DNA, 15 bp, Homo sapiens
tatggctaagtgtct

SEQ ID NO: 664919 - DNA, 15 bp, Homo sapiens
atggctaagtgtctt

SEQ ID NO: 664920 - DNA, 15 bp, Homo sapiens
tggctaagtgtcttg

SEQ ID NO: 664921 - DNA, 15 bp, Homo sapiens
ggctaagtgtcttgc

SEQ ID NO: 664922 - DNA, 15 bp, Homo sapiens
gctaagtgtcttgcc

SEQ ID NO: 664923 - DNA, 15 bp, Homo sapiens
ctaagtgtcttgcca

SEQ ID NO: 664924 - DNA, 15 bp, Homo sapiens
taagtgtcttgccaa

SEQ ID NO: 664925 - DNA, 15 bp, Homo sapiens
aagtgtcttgccaac

SEQ ID NO: 664926 - DNA, 15 bp, Homo sapiens
agtgtcttgccaacg

SEQ ID NO: 664927 - DNA, 15 bp, Homo sapiens
gtgtcttgccaacgt

SEQ ID NO: 664928 - DNA, 15 bp, Homo sapiens
tgtcttgccaacgtc

SEQ ID NO: 664929 - DNA, 15 bp, Homo sapiens
gtcttgccaacgtct

SEQ ID NO: 664930 - DNA, 15 bp, Homo sapiens
tcttgccaacgtctt

SEQ ID NO: 664931 - DNA, 15 bp, Homo sapiens
cttgccaacgtcttg

SEQ ID NO: 664932 - DNA, 15 bp, Homo sapiens
ttgccaacgtcttgg

SEQ ID NO: 664933 - DNA, 15 bp, Homo sapiens
tgccaacgtcttggg

SEQ ID NO: 664934 - DNA, 15 bp, Homo sapiens
gccaacgtcttgggc

SEQ ID NO: 664935 - DNA, 15 bp, Homo sapiens
ccaacgtcttgggct

SEQ ID NO: 664936 - DNA, 15 bp, Homo sapiens
caacgtcttgggcta

SEQ ID NO: 664937 - DNA, 15 bp, Homo sapiens
aacgtcttgggctaa

SEQ ID NO: 664938 - DNA, 15 bp, Homo sapiens
acgtcttgggctaac

SEQ ID NO: 664939 - DNA, 15 bp, Homo sapiens
cgtcttgggctaaca

SEQ ID NO: 664940 - DNA, 15 bp, Homo sapiens
gtcttgggctaacaa

SEQ ID NO: 664941 - DNA, 15 bp, Homo sapiens
tcttgggctaacaag

SEQ ID NO: 664942 - DNA, 15 bp, Homo sapiens
cttgggctaacaagc

SEQ ID NO: 664943 - DNA, 15 bp, Homo sapiens
ttgggctaacaagcg

SEQ ID NO: 664944 - DNA, 15 bp, Homo sapiens
tgggctaacaagcgg

SEQ ID NO: 664945 - DNA, 15 bp, Homo sapiens
gggctaacaagcggt

SEQ ID NO: 664946 - DNA, 15 bp, Homo sapiens
ggctaacaagcggtc

SEQ ID NO: 664947 - DNA, 15 bp, Homo sapiens
gctaacaagcggtca

SEQ ID NO: 664948 - DNA, 15 bp, Homo sapiens
ctaacaagcggtcaa

SEQ ID NO: 664949 - DNA, 15 bp, Homo sapiens
taacaagcggtcaag

SEQ ID NO: 664950 - DNA, 15 bp, Homo sapiens
aacaagcggtcaagc

SEQ ID NO: 664951 - DNA, 15 bp, Homo sapiens
acaagcggtcaagca

SEQ ID NO: 664952 - DNA, 15 bp, Homo sapiens
caagcggtcaagcag

SEQ ID NO: 664953 - DNA, 15 bp, Homo sapiens
aagcggtcaagcaga

SEQ ID NO: 664954 - DNA, 15 bp, Homo sapiens
agcggtcaagcagaa

SEQ ID NO: 664955 - DNA, 15 bp, Homo sapiens
gcggtcaagcagaat

SEQ ID NO: 664956 - DNA, 15 bp, Homo sapiens
cggtcaagcagaatc

SEQ ID NO: 664957 - DNA, 15 bp, Homo sapiens
ggtcaagcagaatcc

SEQ ID NO: 664958 - DNA, 15 bp, Homo sapiens
gtcaagcagaatcca

SEQ ID NO: 664959 - DNA, 15 bp, Homo sapiens
tcaagcagaatccaa

SEQ ID NO: 664960 - DNA, 15 bp, Homo sapiens
caagcagaatccaaa

SEQ ID NO: 664961 - DNA, 15 bp, Homo sapiens
aagcagaatccaaac

SEQ ID NO: 664962 - DNA, 15 bp, Homo sapiens
agcagaatccaaacc

SEQ ID NO: 664963 - DNA, 15 bp, Homo sapiens
gcagaatccaaaccc

SEQ ID NO: 664964 - DNA, 15 bp, Homo sapiens
cagaatccaaacccg

SEQ ID NO: 664965 - DNA, 15 bp, Homo sapiens
agaatccaaacccga

SEQ ID NO: 664966 - DNA, 15 bp, Homo sapiens
gaatccaaacccgag

SEQ ID NO: 664967 - DNA, 15 bp, Homo sapiens
aatccaaacccgaga

SEQ ID NO: 664968 - DNA, 15 bp, Homo sapiens
atccaaacccgagat

SEQ ID NO: 664969 - DNA, 15 bp, Homo sapiens
tccaaacccgagata

SEQ ID NO: 664970 - DNA, 15 bp, Homo sapiens
ccaaacccgagatag

SEQ ID NO: 664971 - DNA, 15 bp, Homo sapiens
caaacccgagataga

SEQ ID NO: 664972 - DNA, 15 bp, Homo sapiens
aaacccgagatagat

SEQ ID NO: 664973 - DNA, 15 bp, Homo sapiens
aacccgagatagata

SEQ ID NO: 664974 - DNA, 15 bp, Homo sapiens
acccgagatagatag

SEQ ID NO: 664975 - DNA, 15 bp, Homo sapiens
cccgagatagataga

SEQ ID NO: 664976 - DNA, 15 bp, Homo sapiens
ccgagatagatagac

SEQ ID NO: 664977 - DNA, 15 bp, Homo sapiens
cgagatagatagacc

SEQ ID NO: 664978 - DNA, 15 bp, Homo sapiens
gagatagatagacca

SEQ ID NO: 664979 - DNA, 15 bp, Homo sapiens
agatagatagaccac

SEQ ID NO: 664980 - DNA, 15 bp, Homo sapiens
gatagatagaccaca

SEQ ID NO: 664981 - DNA, 15 bp, Homo sapiens
atagatagaccacag

SEQ ID NO: 664982 - DNA, 15 bp, Homo sapiens
tagatagaccacagt

SEQ ID NO: 664983 - DNA, 15 bp, Homo sapiens
agatagaccacagtg

SEQ ID NO: 664984 - DNA, 15 bp, Homo sapiens
gatagaccacagtgt

SEQ ID NO: 664985 - DNA, 15 bp, Homo sapiens
atagaccacagtgtg

SEQ ID NO: 664986 - DNA, 15 bp, Homo sapiens
tagaccacagtgtgc

SEQ ID NO: 664987 - DNA, 15 bp, Homo sapiens
agaccacagtgtgct

SEQ ID NO: 664988 - DNA, 15 bp, Homo sapiens
gaccacagtgtgcta

SEQ ID NO: 664989 - DNA, 15 bp, Homo sapiens
accacagtgtgctaa

SEQ ID NO: 664990 - DNA, 15 bp, Homo sapiens
ccacagtgtgctaat

SEQ ID NO: 664991 - DNA, 15 bp, Homo sapiens
cacagtgtgctaatc

SEQ ID NO: 664992 - DNA, 15 bp, Homo sapiens
acagtgtgctaatca

SEQ ID NO: 664993 - DNA, 15 bp, Homo sapiens
cagtgtgctaatcaa

SEQ ID NO: 664994 - DNA, 15 bp, Homo sapiens
agtgtgctaatcaag

SEQ ID NO: 664995 - DNA, 15 bp, Homo sapiens
gtgtgctaatcaagc

SEQ ID NO: 664996 - DNA, 15 bp, Homo sapiens
tgtgctaatcaagca

SEQ ID NO: 664997 - DNA, 15 bp, Homo sapiens
gtgctaatcaagcac

SEQ ID NO: 664998 - DNA, 15 bp, Homo sapiens
tgctaatcaagcact

SEQ ID NO: 664999 - DNA, 15 bp, Homo sapiens
gctaatcaagcactg

SEQ ID NO: 665000 - DNA, 15 bp, Homo sapiens
ctaatcaagcactgc

SEQ ID NO: 665001 - DNA, 15 bp, Homo sapiens
taatcaagcactgca

SEQ ID NO: 665002 - DNA, 15 bp, Homo sapiens
aatcaagcactgcac

SEQ ID NO: 665003 - DNA, 15 bp, Homo sapiens
atcaagcactgcact

SEQ ID NO: 665004 - DNA, 15 bp, Homo sapiens
tcaagcactgcactc

SEQ ID NO: 665005 - DNA, 15 bp, Homo sapiens
caagcactgcactct

SEQ ID NO: 665006 - DNA, 15 bp, Homo sapiens
aagcactgcactctc

SEQ ID NO: 665007 - DNA, 15 bp, Homo sapiens
agcactgcactctct

SEQ ID NO: 665008 - DNA, 15 bp, Homo sapiens
gcactgcactctctc

SEQ ID NO: 665009 - DNA, 15 bp, Homo sapiens
cactgcactctctcc

SEQ ID NO: 665010 - DNA, 15 bp, Homo sapiens
actgcactctctcct

SEQ ID NO: 665011 - DNA, 15 bp, Homo sapiens
ctgcactctctcctg

SEQ ID NO: 665012 - DNA, 15 bp, Homo sapiens
tgcactctctcctgc

SEQ ID NO: 665013 - DNA, 15 bp, Homo sapiens
gcactctctcctgca

SEQ ID NO: 665014 - DNA, 15 bp, Homo sapiens
cactctctcctgcat

SEQ ID NO: 665015 - DNA, 15 bp, Homo sapiens
actctctcctgcatt

SEQ ID NO: 665016 - DNA, 15 bp, Homo sapiens
ctctctcctgcattt

SEQ ID NO: 665017 - DNA, 15 bp, Homo sapiens
tctctcctgcatttc

SEQ ID NO: 665018 - DNA, 15 bp, Homo sapiens
ctctcctgcatttct

SEQ ID NO: 665019 - DNA, 15 bp, Homo sapiens
tctcctgcatttctt

SEQ ID NO: 665020 - DNA, 15 bp, Homo sapiens
ctcctgcatttctta

SEQ ID NO: 665021 - DNA, 15 bp, Homo sapiens
tcctgcatttcttag

SEQ ID NO: 665022 - DNA, 15 bp, Homo sapiens
cctgcatttcttagt

SEQ ID NO: 665023 - DNA, 15 bp, Homo sapiens
ctgcatttcttagtt

SEQ ID NO: 665024 - DNA, 15 bp, Homo sapiens
tgcatttcttagttg

SEQ ID NO: 665025 - DNA, 15 bp, Homo sapiens
gcatttcttagttga

SEQ ID NO: 665026 - DNA, 15 bp, Homo sapiens
catttcttagttgat

SEQ ID NO: 665027 - DNA, 15 bp, Homo sapiens
atttcttagttgata

SEQ ID NO: 665028 - DNA, 15 bp, Homo sapiens
tttcttagttgatat

SEQ ID NO: 665029 - DNA, 15 bp, Homo sapiens
ttcttagttgatatt

SEQ ID NO: 665030 - DNA, 15 bp, Homo sapiens
tcttagttgatattt

SEQ ID NO: 665031 - DNA, 15 bp, Homo sapiens
cttagttgatattta

SEQ ID NO: 665032 - DNA, 15 bp, Homo sapiens
ttagttgatatttac

SEQ ID NO: 665033 - DNA, 15 bp, Homo sapiens
tagttgatatttacc

SEQ ID NO: 665034 - DNA, 15 bp, Homo sapiens
agttgatatttacca

SEQ ID NO: 665035 - DNA, 15 bp, Homo sapiens
gttgatatttaccat

SEQ ID NO: 665036 - DNA, 15 bp, Homo sapiens
ttgatatttaccata

SEQ ID NO: 665037 - DNA, 15 bp, Homo sapiens
tgatatttaccatat

SEQ ID NO: 665038 - DNA, 15 bp, Homo sapiens
gatatttaccatata

SEQ ID NO: 665039 - DNA, 15 bp, Homo sapiens
atatttaccatatac

SEQ ID NO: 665040 - DNA, 15 bp, Homo sapiens
tatttaccatataca

SEQ ID NO: 665041 - DNA, 15 bp, Homo sapiens
atttaccatatacaa

SEQ ID NO: 665042 - DNA, 15 bp, Homo sapiens
tttaccatatacaat

SEQ ID NO: 665043 - DNA, 15 bp, Homo sapiens
ttaccatatacaatc

SEQ ID NO: 665044 - DNA, 15 bp, Homo sapiens
taccatatacaatct

SEQ ID NO: 665045 - DNA, 15 bp, Homo sapiens
accatatacaatctg

SEQ ID NO: 665046 - DNA, 15 bp, Homo sapiens
ccatatacaatctgt

SEQ ID NO: 665047 - DNA, 15 bp, Homo sapiens
catatacaatctgtc

SEQ ID NO: 665048 - DNA, 15 bp, Homo sapiens
atatacaatctgtca

SEQ ID NO: 665049 - DNA, 15 bp, Homo sapiens
tatacaatctgtcac

SEQ ID NO: 665050 - DNA, 15 bp, Homo sapiens
atacaatctgtcact

SEQ ID NO: 665051 - DNA, 15 bp, Homo sapiens
tacaatctgtcactt

SEQ ID NO: 665052 - DNA, 15 bp, Homo sapiens
acaatctgtcacttg

SEQ ID NO: 665053 - DNA, 15 bp, Homo sapiens
caatctgtcacttgt

SEQ ID NO: 665054 - DNA, 15 bp, Homo sapiens
aatctgtcacttgta

SEQ ID NO: 665055 - DNA, 15 bp, Homo sapiens
atctgtcacttgtat

SEQ ID NO: 665056 - DNA, 15 bp, Homo sapiens
tctgtcacttgtatg

SEQ ID NO: 665057 - DNA, 15 bp, Homo sapiens
ctgtcacttgtatga

SEQ ID NO: 665058 - DNA, 15 bp, Homo sapiens
tgtcacttgtatgag

SEQ ID NO: 665059 - DNA, 15 bp, Homo sapiens
gtcacttgtatgaga

SEQ ID NO: 665060 - DNA, 15 bp, Homo sapiens
tcacttgtatgagat

SEQ ID NO: 665061 - DNA, 15 bp, Homo sapiens
cacttgtatgagatg

SEQ ID NO: 665062 - DNA, 15 bp, Homo sapiens
acttgtatgagatgg

SEQ ID NO: 665063 - DNA, 15 bp, Homo sapiens
cttgtatgagatggc

SEQ ID NO: 665064 - DNA, 15 bp, Homo sapiens
ttgtatgagatggca

SEQ ID NO: 665065 - DNA, 15 bp, Homo sapiens
tgtatgagatggcag

SEQ ID NO: 665066 - DNA, 15 bp, Homo sapiens
gtatgagatggcagg

SEQ ID NO: 665067 - DNA, 15 bp, Homo sapiens
tatgagatggcaggg

SEQ ID NO: 665068 - DNA, 15 bp, Homo sapiens
atgagatggcagggg

SEQ ID NO: 665069 - DNA, 15 bp, Homo sapiens
tgagatggcaggggg

SEQ ID NO: 665070 - DNA, 15 bp, Homo sapiens
gagatggcagggggt

SEQ ID NO: 665071 - DNA, 15 bp, Homo sapiens
agatggcagggggtt

SEQ ID NO: 665072 - DNA, 15 bp, Homo sapiens
gatggcagggggttc

SEQ ID NO: 665073 - DNA, 15 bp, Homo sapiens
atggcagggggttct

SEQ ID NO: 665074 - DNA, 15 bp, Homo sapiens
tggcagggggttctg

SEQ ID NO: 665075 - DNA, 15 bp, Homo sapiens
ggcagggggttctgt

SEQ ID NO: 665076 - DNA, 15 bp, Homo sapiens
gcagggggttctgtg

SEQ ID NO: 665077 - DNA, 15 bp, Homo sapiens
cagggggttctgtgc

SEQ ID NO: 665078 - DNA, 15 bp, Homo sapiens
agggggttctgtgct

SEQ ID NO: 665079 - DNA, 15 bp, Homo sapiens
gggggttctgtgcta

SEQ ID NO: 665080 - DNA, 15 bp, Homo sapiens
ggggttctgtgctat

SEQ ID NO: 665081 - DNA, 15 bp, Homo sapiens
gggttctgtgctatt

SEQ ID NO: 665082 - DNA, 15 bp, Homo sapiens
ggttctgtgctattt

SEQ ID NO: 665083 - DNA, 15 bp, Homo sapiens
gttctgtgctatttg

SEQ ID NO: 665084 - DNA, 15 bp, Homo sapiens
ttctgtgctatttgt

SEQ ID NO: 665085 - DNA, 15 bp, Homo sapiens
tctgtgctatttgtc

SEQ ID NO: 665086 - DNA, 15 bp, Homo sapiens
ctgtgctatttgtcc

SEQ ID NO: 665087 - DNA, 15 bp, Homo sapiens
tgtgctatttgtcct

SEQ ID NO: 665088 - DNA, 15 bp, Homo sapiens
gtgctatttgtcctt

SEQ ID NO: 665089 - DNA, 15 bp, Homo sapiens
tgctatttgtccttg

SEQ ID NO: 665090 - DNA, 15 bp, Homo sapiens
gctatttgtccttgt

SEQ ID NO: 665091 - DNA, 15 bp, Homo sapiens
ctatttgtccttgta

SEQ ID NO: 665092 - DNA, 15 bp, Homo sapiens
tatttgtccttgtag

SEQ ID NO: 665093 - DNA, 15 bp, Homo sapiens
atttgtccttgtaga

SEQ ID NO: 665094 - DNA, 15 bp, Homo sapiens
tttgtccttgtagag

SEQ ID NO: 665095 - DNA, 15 bp, Homo sapiens
ttgtccttgtagaga

SEQ ID NO: 665096 - DNA, 15 bp, Homo sapiens
tgtccttgtagagaa

SEQ ID NO: 665097 - DNA, 15 bp, Homo sapiens
gtccttgtagagaat

SEQ ID NO: 665098 - DNA, 15 bp, Homo sapiens
tccttgtagagaata

SEQ ID NO: 665099 - DNA, 15 bp, Homo sapiens
ccttgtagagaatac

SEQ ID NO: 665100 - DNA, 15 bp, Homo sapiens
cttgtagagaatacc

SEQ ID NO: 665101 - DNA, 15 bp, Homo sapiens
ttgtagagaatacca

SEQ ID NO: 665102 - DNA, 15 bp, Homo sapiens
tgtagagaataccac

SEQ ID NO: 665103 - DNA, 15 bp, Homo sapiens
gtagagaataccaca

SEQ ID NO: 665104 - DNA, 15 bp, Homo sapiens
tagagaataccacag

SEQ ID NO: 665105 - DNA, 15 bp, Homo sapiens
agagaataccacagg

SEQ ID NO: 665106 - DNA, 15 bp, Homo sapiens
gagaataccacagga

SEQ ID NO: 665107 - DNA, 15 bp, Homo sapiens
agaataccacaggaa

SEQ ID NO: 665108 - DNA, 15 bp, Homo sapiens
gaataccacaggaag

SEQ ID NO: 665109 - DNA, 15 bp, Homo sapiens
aataccacaggaaga

SEQ ID NO: 665110 - DNA, 15 bp, Homo sapiens
ataccacaggaagaa

SEQ ID NO: 665111 - DNA, 15 bp, Homo sapiens
taccacaggaagaaa

SEQ ID NO: 665112 - DNA, 15 bp, Homo sapiens
accacaggaagaaag

SEQ ID NO: 665113 - DNA, 15 bp, Homo sapiens
ccacaggaagaaagt

SEQ ID NO: 665114 - DNA, 15 bp, Homo sapiens
cacaggaagaaagta

SEQ ID NO: 665115 - DNA, 15 bp, Homo sapiens
acaggaagaaagtaa

SEQ ID NO: 665116 - DNA, 15 bp, Homo sapiens
caggaagaaagtaag

SEQ ID NO: 665117 - DNA, 15 bp, Homo sapiens
aggaagaaagtaagc

SEQ ID NO: 665118 - DNA, 15 bp, Homo sapiens
ggaagaaagtaagca

SEQ ID NO: 665119 - DNA, 15 bp, Homo sapiens
gaagaaagtaagcag

SEQ ID NO: 665120 - DNA, 15 bp, Homo sapiens
aagaaagtaagcagc

SEQ ID NO: 665121 - DNA, 15 bp, Homo sapiens
agaaagtaagcagcc

SEQ ID NO: 665122 - DNA, 15 bp, Homo sapiens
gaaagtaagcagcca

SEQ ID NO: 665123 - DNA, 15 bp, Homo sapiens
aaagtaagcagccat

SEQ ID NO: 665124 - DNA, 15 bp, Homo sapiens
aagtaagcagccatg

SEQ ID NO: 665125 - DNA, 15 bp, Homo sapiens
agtaagcagccatgc

SEQ ID NO: 665126 - DNA, 15 bp, Homo sapiens
gtaagcagccatgca

SEQ ID NO: 665127 - DNA, 15 bp, Homo sapiens
taagcagccatgcaa

SEQ ID NO: 665128 - DNA, 15 bp, Homo sapiens
aagcagccatgcaat

SEQ ID NO: 665129 - DNA, 15 bp, Homo sapiens
agcagccatgcaata

SEQ ID NO: 665130 - DNA, 15 bp, Homo sapiens
gcagccatgcaatat

SEQ ID NO: 665131 - DNA, 15 bp, Homo sapiens
cagccatgcaatatt

SEQ ID NO: 665132 - DNA, 15 bp, Homo sapiens
agccatgcaatattt

SEQ ID NO: 665133 - DNA, 15 bp, Homo sapiens
gccatgcaatatttg

SEQ ID NO: 665134 - DNA, 15 bp, Homo sapiens
ccatgcaatatttgc

SEQ ID NO: 665135 - DNA, 15 bp, Homo sapiens
catgcaatatttgct

SEQ ID NO: 665136 - DNA, 15 bp, Homo sapiens
atgcaatatttgctg

SEQ ID NO: 665137 - DNA, 15 bp, Homo sapiens
tgcaatatttgctgt

SEQ ID NO: 665138 - DNA, 15 bp, Homo sapiens
gcaatatttgctgtt

SEQ ID NO: 665139 - DNA, 15 bp, Homo sapiens
caatatttgctgttg

SEQ ID NO: 665140 - DNA, 15 bp, Homo sapiens
aatatttgctgttga

SEQ ID NO: 665141 - DNA, 15 bp, Homo sapiens
atatttgctgttgac

SEQ ID NO: 665142 - DNA, 15 bp, Homo sapiens
tatttgctgttgacc

SEQ ID NO: 665143 - DNA, 15 bp, Homo sapiens
atttgctgttgacct

SEQ ID NO: 665144 - DNA, 15 bp, Homo sapiens
tttgctgttgacctg

SEQ ID NO: 665145 - DNA, 15 bp, Homo sapiens
ttgctgttgacctga

SEQ ID NO: 665146 - DNA, 15 bp, Homo sapiens
tgctgttgacctgaa

SEQ ID NO: 665147 - DNA, 15 bp, Homo sapiens
gctgttgacctgaac

SEQ ID NO: 665148 - DNA, 15 bp, Homo sapiens
ctgttgacctgaact

SEQ ID NO: 665149 - DNA, 15 bp, Homo sapiens
tgttgacctgaactc

SEQ ID NO: 665150 - DNA, 15 bp, Homo sapiens
gttgacctgaactcc

SEQ ID NO: 665151 - DNA, 15 bp, Homo sapiens
ttgacctgaactcca

SEQ ID NO: 665152 - DNA, 15 bp, Homo sapiens
tgacctgaactccat

SEQ ID NO: 665153 - DNA, 15 bp, Homo sapiens
gacctgaactccatt

SEQ ID NO: 665154 - DNA, 15 bp, Homo sapiens
acctgaactccattc

SEQ ID NO: 665155 - DNA, 15 bp, Homo sapiens
cctgaactccattcc

SEQ ID NO: 665156 - DNA, 15 bp, Homo sapiens
ctgaactccattcca

SEQ ID NO: 665157 - DNA, 15 bp, Homo sapiens
tgaactccattccat

SEQ ID NO: 665158 - DNA, 15 bp, Homo sapiens
gaactccattccatc

SEQ ID NO: 665159 - DNA, 15 bp, Homo sapiens
aactccattccatca

SEQ ID NO: 665160 - DNA, 15 bp, Homo sapiens
actccattccatcat

SEQ ID NO: 665161 - DNA, 15 bp, Homo sapiens
ctccattccatcatt

SEQ ID NO: 665162 - DNA, 15 bp, Homo sapiens
tccattccatcattc

SEQ ID NO: 665163 - DNA, 15 bp, Homo sapiens
ccattccatcattcc

SEQ ID NO: 665164 - DNA, 15 bp, Homo sapiens
cattccatcattcct

SEQ ID NO: 665165 - DNA, 15 bp, Homo sapiens
attccatcattcctg

SEQ ID NO: 665166 - DNA, 15 bp, Homo sapiens
ttccatcattcctgc

SEQ ID NO: 665167 - DNA, 15 bp, Homo sapiens
tccatcattcctgca

SEQ ID NO: 665168 - DNA, 15 bp, Homo sapiens
ccatcattcctgcag

SEQ ID NO: 665169 - DNA, 15 bp, Homo sapiens
catcattcctgcagg

SEQ ID NO: 665170 - DNA, 15 bp, Homo sapiens
atcattcctgcagga

SEQ ID NO: 665171 - DNA, 15 bp, Homo sapiens
tcattcctgcaggaa

SEQ ID NO: 665172 - DNA, 15 bp, Homo sapiens
cattcctgcaggaaa

SEQ ID NO: 665173 - DNA, 15 bp, Homo sapiens
attcctgcaggaaat

SEQ ID NO: 665174 - DNA, 15 bp, Homo sapiens
ttcctgcaggaaatt

SEQ ID NO: 665175 - DNA, 15 bp, Homo sapiens
tcctgcaggaaattc

SEQ ID NO: 665176 - DNA, 15 bp, Homo sapiens
cctgcaggaaattcg

SEQ ID NO: 665177 - DNA, 15 bp, Homo sapiens
ctgcaggaaattcgc

SEQ ID NO: 665178 - DNA, 15 bp, Homo sapiens
tgcaggaaattcgca

SEQ ID NO: 665179 - DNA, 15 bp, Homo sapiens
gcaggaaattcgcat

SEQ ID NO: 665180 - DNA, 15 bp, Homo sapiens
caggaaattcgcatc

SEQ ID NO: 665181 - DNA, 15 bp, Homo sapiens
aggaaattcgcatcc

SEQ ID NO: 665182 - DNA, 15 bp, Homo sapiens
ggaaattcgcatcca

SEQ ID NO: 665183 - DNA, 15 bp, Homo sapiens
gaaattcgcatccat

SEQ ID NO: 665184 - DNA, 15 bp, Homo sapiens
aaattcgcatccatt

SEQ ID NO: 665185 - DNA, 15 bp, Homo sapiens
aattcgcatccatta

SEQ ID NO: 665186 - DNA, 15 bp, Homo sapiens
attcgcatccattaa

SEQ ID NO: 665187 - DNA, 15 bp, Homo sapiens
ttcgcatccattaaa

SEQ ID NO: 665188 - DNA, 15 bp, Homo sapiens
tcgcatccattaaat

SEQ ID NO: 665189 - DNA, 15 bp, Homo sapiens
cgcatccattaaatg

SEQ ID NO: 665190 - DNA, 15 bp, Homo sapiens
gcatccattaaatga

SEQ ID NO: 665191 - DNA, 15 bp, Homo sapiens
catccattaaatgag

SEQ ID NO: 665192 - DNA, 15 bp, Homo sapiens
atccattaaatgagc

SEQ ID NO: 665193 - DNA, 15 bp, Homo sapiens
tccattaaatgagca

SEQ ID NO: 665194 - DNA, 15 bp, Homo sapiens
ccattaaatgagcat

SEQ ID NO: 665195 - DNA, 15 bp, Homo sapiens
cattaaatgagcatt

SEQ ID NO: 665196 - DNA, 15 bp, Homo sapiens
attaaatgagcattt

SEQ ID NO: 665197 - DNA, 15 bp, Homo sapiens
ttaaatgagcatttc

SEQ ID NO: 665198 - DNA, 15 bp, Homo sapiens
taaatgagcatttcc

SEQ ID NO: 665199 - DNA, 15 bp, Homo sapiens
aaatgagcatttcct

SEQ ID NO: 665200 - DNA, 15 bp, Homo sapiens
aatgagcatttcctg

SEQ ID NO: 665201 - DNA, 15 bp, Homo sapiens
atgagcatttcctgg

SEQ ID NO: 665202 - DNA, 15 bp, Homo sapiens
tgagcatttcctggt

SEQ ID NO: 665203 - DNA, 15 bp, Homo sapiens
gagcatttcctggtt

SEQ ID NO: 665204 - DNA, 15 bp, Homo sapiens
agcatttcctggttt

SEQ ID NO: 665205 - DNA, 15 bp, Homo sapiens
gcatttcctggtttg

SEQ ID NO: 665206 - DNA, 15 bp, Homo sapiens
catttcctggtttgc

SEQ ID NO: 665207 - DNA, 15 bp, Homo sapiens
atttcctggtttgcc

SEQ ID NO: 665208 - DNA, 15 bp, Homo sapiens
tttcctggtttgcca

SEQ ID NO: 665209 - DNA, 15 bp, Homo sapiens
ttcctggtttgccac

SEQ ID NO: 665210 - DNA, 15 bp, Homo sapiens
tcctggtttgccact

SEQ ID NO: 665211 - DNA, 15 bp, Homo sapiens
cctggtttgccactt

SEQ ID NO: 665212 - DNA, 15 bp, Homo sapiens
ctggtttgccacttt

SEQ ID NO: 665213 - DNA, 15 bp, Homo sapiens
tggtttgccactttg

SEQ ID NO: 665214 - DNA, 15 bp, Homo sapiens
ggtttgccactttgc

SEQ ID NO: 665215 - DNA, 15 bp, Homo sapiens
gtttgccactttgct

SEQ ID NO: 665216 - DNA, 15 bp, Homo sapiens
tttgccactttgctc

SEQ ID NO: 665217 - DNA, 15 bp, Homo sapiens
ttgccactttgctca

SEQ ID NO: 665218 - DNA, 15 bp, Homo sapiens
tgccactttgctcaa

SEQ ID NO: 665219 - DNA, 15 bp, Homo sapiens
gccactttgctcaaa

SEQ ID NO: 665220 - DNA, 15 bp, Homo sapiens
ccactttgctcaaac

SEQ ID NO: 665221 - DNA, 15 bp, Homo sapiens
cactttgctcaaaca

SEQ ID NO: 665222 - DNA, 15 bp, Homo sapiens
actttgctcaaacac

SEQ ID NO: 665223 - DNA, 15 bp, Homo sapiens
ctttgctcaaacact

SEQ ID NO: 665224 - DNA, 15 bp, Homo sapiens
tttgctcaaacactt

SEQ ID NO: 665225 - DNA, 15 bp, Homo sapiens
ttgctcaaacacttt

SEQ ID NO: 665226 - DNA, 15 bp, Homo sapiens
tgctcaaacactttg

SEQ ID NO: 665227 - DNA, 15 bp, Homo sapiens
gctcaaacactttgc

SEQ ID NO: 665228 - DNA, 15 bp, Homo sapiens
ctcaaacactttgct

SEQ ID NO: 665229 - DNA, 15 bp, Homo sapiens
tcaaacactttgctt

SEQ ID NO: 665230 - DNA, 15 bp, Homo sapiens
caaacactttgcttg

SEQ ID NO: 665231 - DNA, 15 bp, Homo sapiens
aaacactttgcttgg

SEQ ID NO: 665232 - DNA, 15 bp, Homo sapiens
aacactttgcttgga

SEQ ID NO: 665233 - DNA, 15 bp, Homo sapiens
acactttgcttggat

SEQ ID NO: 665234 - DNA, 15 bp, Homo sapiens
cactttgcttggatc

SEQ ID NO: 665235 - DNA, 15 bp, Homo sapiens
actttgcttggatct

SEQ ID NO: 665236 - DNA, 15 bp, Homo sapiens
ctttgcttggatctg

SEQ ID NO: 665237 - DNA, 15 bp, Homo sapiens
tttgcttggatctgg

SEQ ID NO: 665238 - DNA, 15 bp, Homo sapiens
ttgcttggatctgga

SEQ ID NO: 665239 - DNA, 15 bp, Homo sapiens
tgcttggatctggag

SEQ ID NO: 665240 - DNA, 15 bp, Homo sapiens
gcttggatctggaga

SEQ ID NO: 665241 - DNA, 15 bp, Homo sapiens
cttggatctggagag

SEQ ID NO: 665242 - DNA, 15 bp, Homo sapiens
ttggatctggagagg

SEQ ID NO: 665243 - DNA, 15 bp, Homo sapiens
tggatctggagagga

SEQ ID NO: 665244 - DNA, 15 bp, Homo sapiens
ggatctggagaggat

SEQ ID NO: 665245 - DNA, 15 bp, Homo sapiens
gatctggagaggata

SEQ ID NO: 665246 - DNA, 15 bp, Homo sapiens
atctggagaggatat

SEQ ID NO: 665247 - DNA, 15 bp, Homo sapiens
tctggagaggatata

SEQ ID NO: 665248 - DNA, 15 bp, Homo sapiens
ctggagaggatatag

SEQ ID NO: 665249 - DNA, 15 bp, Homo sapiens
tggagaggatataga

SEQ ID NO: 665250 - DNA, 15 bp, Homo sapiens
ggagaggatatagaa

SEQ ID NO: 665251 - DNA, 15 bp, Homo sapiens
gagaggatatagaag

SEQ ID NO: 665252 - DNA, 15 bp, Homo sapiens
agaggatatagaagt

SEQ ID NO: 665253 - DNA, 15 bp, Homo sapiens
gaggatatagaagtg

SEQ ID NO: 665254 - DNA, 15 bp, Homo sapiens
aggatatagaagtga

SEQ ID NO: 665255 - DNA, 15 bp, Homo sapiens
ggatatagaagtgaa

SEQ ID NO: 665256 - DNA, 15 bp, Homo sapiens
gatatagaagtgaag

SEQ ID NO: 665257 - DNA, 15 bp, Homo sapiens
atatagaagtgaagg

SEQ ID NO: 665258 - DNA, 15 bp, Homo sapiens
tatagaagtgaagga

SEQ ID NO: 665259 - DNA, 15 bp, Homo sapiens
atagaagtgaaggaa

SEQ ID NO: 665260 - DNA, 15 bp, Homo sapiens
tagaagtgaaggaaa

SEQ ID NO: 665261 - DNA, 15 bp, Homo sapiens
agaagtgaaggaaat

SEQ ID NO: 665262 - DNA, 15 bp, Homo sapiens
gaagtgaaggaaata

SEQ ID NO: 665263 - DNA, 15 bp, Homo sapiens
aagtgaaggaaatat

SEQ ID NO: 665264 - DNA, 15 bp, Homo sapiens
agtgaaggaaatatg

SEQ ID NO: 665265 - DNA, 15 bp, Homo sapiens
gtgaaggaaatatgc

SEQ ID NO: 665266 - DNA, 15 bp, Homo sapiens
tgaaggaaatatgct

SEQ ID NO: 665267 - DNA, 15 bp, Homo sapiens
gaaggaaatatgcta

SEQ ID NO: 665268 - DNA, 15 bp, Homo sapiens
aaggaaatatgctac

SEQ ID NO: 665269 - DNA, 15 bp, Homo sapiens
aggaaatatgctacc

SEQ ID NO: 665270 - DNA, 15 bp, Homo sapiens
ggaaatatgctacct

SEQ ID NO: 665271 - DNA, 15 bp, Homo sapiens
gaaatatgctacctg

SEQ ID NO: 665272 - DNA, 15 bp, Homo sapiens
aaatatgctacctgc

SEQ ID NO: 665273 - DNA, 15 bp, Homo sapiens
aatatgctacctgct

SEQ ID NO: 665274 - DNA, 15 bp, Homo sapiens
atatgctacctgctc

SEQ ID NO: 665275 - DNA, 15 bp, Homo sapiens
tatgctacctgctct

SEQ ID NO: 665276 - DNA, 15 bp, Homo sapiens
atgctacctgctctc

SEQ ID NO: 665277 - DNA, 15 bp, Homo sapiens
tgctacctgctctca

SEQ ID NO: 665278 - DNA, 15 bp, Homo sapiens
gctacctgctctcaa

SEQ ID NO: 665279 - DNA, 15 bp, Homo sapiens
ctacctgctctcaag

SEQ ID NO: 665280 - DNA, 15 bp, Homo sapiens
tacctgctctcaagg

SEQ ID NO: 665281 - DNA, 15 bp, Homo sapiens
acctgctctcaagga

SEQ ID NO: 665282 - DNA, 15 bp, Homo sapiens
cctgctctcaaggaa

SEQ ID NO: 665283 - DNA, 15 bp, Homo sapiens
ctgctctcaaggaac

SEQ ID NO: 665284 - DNA, 15 bp, Homo sapiens
tgctctcaaggaact

SEQ ID NO: 665285 - DNA, 15 bp, Homo sapiens
gctctcaaggaactt

SEQ ID NO: 665286 - DNA, 15 bp, Homo sapiens
ctctcaaggaactta

SEQ ID NO: 665287 - DNA, 15 bp, Homo sapiens
tctcaaggaacttat

SEQ ID NO: 665288 - DNA, 15 bp, Homo sapiens
ctcaaggaacttatg

SEQ ID NO: 665289 - DNA, 15 bp, Homo sapiens
tcaaggaacttatgt

SEQ ID NO: 665290 - DNA, 15 bp, Homo sapiens
caaggaacttatgtt

SEQ ID NO: 665291 - DNA, 15 bp, Homo sapiens
aaggaacttatgttt

SEQ ID NO: 665292 - DNA, 15 bp, Homo sapiens
aggaacttatgtttt

SEQ ID NO: 665293 - DNA, 15 bp, Homo sapiens
ggaacttatgtttta

SEQ ID NO: 665294 - DNA, 15 bp, Homo sapiens
gaacttatgttttag

SEQ ID NO: 665295 - DNA, 15 bp, Homo sapiens
aacttatgttttagt

SEQ ID NO: 665296 - DNA, 15 bp, Homo sapiens
acttatgttttagtg

SEQ ID NO: 665297 - DNA, 15 bp, Homo sapiens
cttatgttttagtgg

SEQ ID NO: 665298 - DNA, 15 bp, Homo sapiens
ttatgttttagtgga

SEQ ID NO: 665299 - DNA, 15 bp, Homo sapiens
tatgttttagtggag

SEQ ID NO: 665300 - DNA, 15 bp, Homo sapiens
atgttttagtggaga

SEQ ID NO: 665301 - DNA, 15 bp, Homo sapiens
tgttttagtggagag

SEQ ID NO: 665302 - DNA, 15 bp, Homo sapiens
gttttagtggagaga

SEQ ID NO: 665303 - DNA, 15 bp, Homo sapiens
ttttagtggagagac

SEQ ID NO: 665304 - DNA, 15 bp, Homo sapiens
tttagtggagagaca

SEQ ID NO: 665305 - DNA, 15 bp, Homo sapiens
ttagtggagagacaa

SEQ ID NO: 665306 - DNA, 15 bp, Homo sapiens
tagtggagagacaaa

SEQ ID NO: 665307 - DNA, 15 bp, Homo sapiens
agtggagagacaaac

SEQ ID NO: 665308 - DNA, 15 bp, Homo sapiens
gtggagagacaaaca

SEQ ID NO: 665309 - DNA, 15 bp, Homo sapiens
tggagagacaaacat

SEQ ID NO: 665310 - DNA, 15 bp, Homo sapiens
ggagagacaaacatg

SEQ ID NO: 665311 - DNA, 15 bp, Homo sapiens
gagagacaaacatgc

SEQ ID NO: 665312 - DNA, 15 bp, Homo sapiens
agagacaaacatgca

SEQ ID NO: 665313 - DNA, 15 bp, Homo sapiens
gagacaaacatgcag

SEQ ID NO: 665314 - DNA, 15 bp, Homo sapiens
agacaaacatgcaga

SEQ ID NO: 665315 - DNA, 15 bp, Homo sapiens
gacaaacatgcagaa

SEQ ID NO: 665316 - DNA, 15 bp, Homo sapiens
acaaacatgcagaat

SEQ ID NO: 665317 - DNA, 15 bp, Homo sapiens
caaacatgcagaatt

SEQ ID NO: 665318 - DNA, 15 bp, Homo sapiens
aaacatgcagaattt

SEQ ID NO: 665319 - DNA, 15 bp, Homo sapiens
aacatgcagaattta

SEQ ID NO: 665320 - DNA, 15 bp, Homo sapiens
acatgcagaatttac

SEQ ID NO: 665321 - DNA, 15 bp, Homo sapiens
catgcagaatttact

SEQ ID NO: 665322 - DNA, 15 bp, Homo sapiens
atgcagaatttactc

SEQ ID NO: 665323 - DNA, 15 bp, Homo sapiens
tgcagaatttactct

SEQ ID NO: 665324 - DNA, 15 bp, Homo sapiens
gcagaatttactcta

SEQ ID NO: 665325 - DNA, 15 bp, Homo sapiens
cagaatttactctac

SEQ ID NO: 665326 - DNA, 15 bp, Homo sapiens
agaatttactctaca

SEQ ID NO: 665327 - DNA, 15 bp, Homo sapiens
gaatttactctacag

SEQ ID NO: 665328 - DNA, 15 bp, Homo sapiens
aatttactctacaga

SEQ ID NO: 665329 - DNA, 15 bp, Homo sapiens
atttactctacagaa

SEQ ID NO: 665330 - DNA, 15 bp, Homo sapiens
tttactctacagaac

SEQ ID NO: 665331 - DNA, 15 bp, Homo sapiens
ttactctacagaaca

SEQ ID NO: 665332 - DNA, 15 bp, Homo sapiens
tactctacagaacat

SEQ ID NO: 665333 - DNA, 15 bp, Homo sapiens
actctacagaacatc

SEQ ID NO: 665334 - DNA, 15 bp, Homo sapiens
ctctacagaacatca

SEQ ID NO: 665335 - DNA, 15 bp, Homo sapiens
tctacagaacatcaa

SEQ ID NO: 665336 - DNA, 15 bp, Homo sapiens
ctacagaacatcaat

SEQ ID NO: 665337 - DNA, 15 bp, Homo sapiens
tacagaacatcaatg

SEQ ID NO: 665338 - DNA, 15 bp, Homo sapiens
acagaacatcaatgc

SEQ ID NO: 665339 - DNA, 15 bp, Homo sapiens
cagaacatcaatgct

SEQ ID NO: 665340 - DNA, 15 bp, Homo sapiens
agaacatcaatgctt

SEQ ID NO: 665341 - DNA, 15 bp, Homo sapiens
gaacatcaatgcttg

SEQ ID NO: 665342 - DNA, 15 bp, Homo sapiens
aacatcaatgcttga

SEQ ID NO: 665343 - DNA, 15 bp, Homo sapiens
acatcaatgcttgag

SEQ ID NO: 665344 - DNA, 15 bp, Homo sapiens
catcaatgcttgagc

SEQ ID NO: 665345 - DNA, 15 bp, Homo sapiens
atcaatgcttgagca

SEQ ID NO: 665346 - DNA, 15 bp, Homo sapiens
tcaatgcttgagcaa

SEQ ID NO: 665347 - DNA, 15 bp, Homo sapiens
caatgcttgagcaaa

SEQ ID NO: 665348 - DNA, 15 bp, Homo sapiens
aatgcttgagcaaat

SEQ ID NO: 665349 - DNA, 15 bp, Homo sapiens
atgcttgagcaaatg

SEQ ID NO: 665350 - DNA, 15 bp, Homo sapiens
tgcttgagcaaatgt

SEQ ID NO: 665351 - DNA, 15 bp, Homo sapiens
gcttgagcaaatgta

SEQ ID NO: 665352 - DNA, 15 bp, Homo sapiens
cttgagcaaatgtag

SEQ ID NO: 665353 - DNA, 15 bp, Homo sapiens
ttgagcaaatgtaga

SEQ ID NO: 665354 - DNA, 15 bp, Homo sapiens
tgagcaaatgtagac

SEQ ID NO: 665355 - DNA, 15 bp, Homo sapiens
gagcaaatgtagacc

SEQ ID NO: 665356 - DNA, 15 bp, Homo sapiens
agcaaatgtagaccc

SEQ ID NO: 665357 - DNA, 15 bp, Homo sapiens
gcaaatgtagaccca

SEQ ID NO: 665358 - DNA, 15 bp, Homo sapiens
caaatgtagacccag

SEQ ID NO: 665359 - DNA, 15 bp, Homo sapiens
aaatgtagacccaga

SEQ ID NO: 665360 - DNA, 15 bp, Homo sapiens
aatgtagacccagag

SEQ ID NO: 665361 - DNA, 15 bp, Homo sapiens
atgtagacccagaga

SEQ ID NO: 665362 - DNA, 15 bp, Homo sapiens
tgtagacccagagag

SEQ ID NO: 665363 - DNA, 15 bp, Homo sapiens
gtagacccagagagg

SEQ ID NO: 665364 - DNA, 15 bp, Homo sapiens
tagacccagagaggg

SEQ ID NO: 665365 - DNA, 15 bp, Homo sapiens
agacccagagagggc

SEQ ID NO: 665366 - DNA, 15 bp, Homo sapiens
gacccagagagggct

SEQ ID NO: 665367 - DNA, 15 bp, Homo sapiens
acccagagagggctc

SEQ ID NO: 665368 - DNA, 15 bp, Homo sapiens
cccagagagggctct

SEQ ID NO: 665369 - DNA, 15 bp, Homo sapiens
ccagagagggctctt

SEQ ID NO: 665370 - DNA, 15 bp, Homo sapiens
cagagagggctctta

SEQ ID NO: 665371 - DNA, 15 bp, Homo sapiens
agagagggctcttac

SEQ ID NO: 665372 - DNA, 15 bp, Homo sapiens
gagagggctcttaca

SEQ ID NO: 665373 - DNA, 15 bp, Homo sapiens
agagggctcttacag

SEQ ID NO: 665374 - DNA, 15 bp, Homo sapiens
gagggctcttacagc

SEQ ID NO: 665375 - DNA, 15 bp, Homo sapiens
agggctcttacagca

SEQ ID NO: 665376 - DNA, 15 bp, Homo sapiens
gggctcttacagcac

SEQ ID NO: 665377 - DNA, 15 bp, Homo sapiens
ggctcttacagcaca

SEQ ID NO: 665378 - DNA, 15 bp, Homo sapiens
gctcttacagcacac

SEQ ID NO: 665379 - DNA, 15 bp, Homo sapiens
ctcttacagcacaca

SEQ ID NO: 665380 - DNA, 15 bp, Homo sapiens
tcttacagcacacaa

SEQ ID NO: 665381 - DNA, 15 bp, Homo sapiens
cttacagcacacaag

SEQ ID NO: 665382 - DNA, 15 bp, Homo sapiens
ttacagcacacaagc

SEQ ID NO: 665383 - DNA, 15 bp, Homo sapiens
tacagcacacaagcc

SEQ ID NO: 665384 - DNA, 15 bp, Homo sapiens
acagcacacaagcca

SEQ ID NO: 665385 - DNA, 15 bp, Homo sapiens
cagcacacaagccag

SEQ ID NO: 665386 - DNA, 15 bp, Homo sapiens
agcacacaagccaga

SEQ ID NO: 665387 - DNA, 15 bp, Homo sapiens
gcacacaagccagaa

SEQ ID NO: 665388 - DNA, 15 bp, Homo sapiens
cacacaagccagaac

SEQ ID NO: 665389 - DNA, 15 bp, Homo sapiens
acacaagccagaaca

SEQ ID NO: 665390 - DNA, 15 bp, Homo sapiens
cacaagccagaacag

SEQ ID NO: 665391 - DNA, 15 bp, Homo sapiens
acaagccagaacaga

SEQ ID NO: 665392 - DNA, 15 bp, Homo sapiens
caagccagaacagac

SEQ ID NO: 665393 - DNA, 15 bp, Homo sapiens
aagccagaacagact

SEQ ID NO: 665394 - DNA, 15 bp, Homo sapiens
agccagaacagactg

SEQ ID NO: 665395 - DNA, 15 bp, Homo sapiens
gccagaacagactga

SEQ ID NO: 665396 - DNA, 15 bp, Homo sapiens
ccagaacagactgat

SEQ ID NO: 665397 - DNA, 15 bp, Homo sapiens
cagaacagactgatg

SEQ ID NO: 665398 - DNA, 15 bp, Homo sapiens
agaacagactgatgg

SEQ ID NO: 665399 - DNA, 15 bp, Homo sapiens
gaacagactgatggt

SEQ ID NO: 665400 - DNA, 15 bp, Homo sapiens
aacagactgatggtg

SEQ ID NO: 665401 - DNA, 15 bp, Homo sapiens
acagactgatggtgc

SEQ ID NO: 665402 - DNA, 15 bp, Homo sapiens
cagactgatggtgct

SEQ ID NO: 665403 - DNA, 15 bp, Homo sapiens
agactgatggtgcta

SEQ ID NO: 665404 - DNA, 15 bp, Homo sapiens
gactgatggtgctaa

SEQ ID NO: 665405 - DNA, 15 bp, Homo sapiens
actgatggtgctaac

SEQ ID NO: 665406 - DNA, 15 bp, Homo sapiens
ctgatggtgctaaca

SEQ ID NO: 665407 - DNA, 15 bp, Homo sapiens
tgatggtgctaacaa

SEQ ID NO: 665408 - DNA, 15 bp, Homo sapiens
gatggtgctaacaat

SEQ ID NO: 665409 - DNA, 15 bp, Homo sapiens
atggtgctaacaatt

SEQ ID NO: 665410 - DNA, 15 bp, Homo sapiens
tggtgctaacaatta

SEQ ID NO: 665411 - DNA, 15 bp, Homo sapiens
ggtgctaacaattag

SEQ ID NO: 665412 - DNA, 15 bp, Homo sapiens
gtgctaacaattagg

SEQ ID NO: 665413 - DNA, 15 bp, Homo sapiens
tgctaacaattaggt

SEQ ID NO: 665414 - DNA, 15 bp, Homo sapiens
gctaacaattaggtt

SEQ ID NO: 665415 - DNA, 15 bp, Homo sapiens
ctaacaattaggttc

SEQ ID NO: 665416 - DNA, 15 bp, Homo sapiens
taacaattaggttca

SEQ ID NO: 665417 - DNA, 15 bp, Homo sapiens
aacaattaggttcaa

SEQ ID NO: 665418 - DNA, 15 bp, Homo sapiens
acaattaggttcaag

SEQ ID NO: 665419 - DNA, 15 bp, Homo sapiens
caattaggttcaagg

SEQ ID NO: 665420 - DNA, 15 bp, Homo sapiens
aattaggttcaaggt

SEQ ID NO: 665421 - DNA, 15 bp, Homo sapiens
attaggttcaaggtt

SEQ ID NO: 665422 - DNA, 15 bp, Homo sapiens
ttaggttcaaggttt

SEQ ID NO: 665423 - DNA, 15 bp, Homo sapiens
taggttcaaggtttt

SEQ ID NO: 665424 - DNA, 15 bp, Homo sapiens
aggttcaaggttttt

SEQ ID NO: 665425 - DNA, 15 bp, Homo sapiens
ggttcaaggtttttc

SEQ ID NO: 665426 - DNA, 15 bp, Homo sapiens
gttcaaggtttttct

SEQ ID NO: 665427 - DNA, 15 bp, Homo sapiens
ttcaaggtttttcta

SEQ ID NO: 665428 - DNA, 15 bp, Homo sapiens
tcaaggtttttctaa

SEQ ID NO: 665429 - DNA, 15 bp, Homo sapiens
caaggtttttctaaa

SEQ ID NO: 665430 - DNA, 15 bp, Homo sapiens
aaggtttttctaaac

SEQ ID NO: 665431 - DNA, 15 bp, Homo sapiens
aggtttttctaaaca

SEQ ID NO: 665432 - DNA, 15 bp, Homo sapiens
ggtttttctaaacag

SEQ ID NO: 665433 - DNA, 15 bp, Homo sapiens
gtttttctaaacagt

SEQ ID NO: 665434 - DNA, 15 bp, Homo sapiens
tttttctaaacagta

SEQ ID NO: 665435 - DNA, 15 bp, Homo sapiens
ttttctaaacagtag

SEQ ID NO: 665436 - DNA, 15 bp, Homo sapiens
tttctaaacagtaga

SEQ ID NO: 665437 - DNA, 15 bp, Homo sapiens
ttctaaacagtagac

SEQ ID NO: 665438 - DNA, 15 bp, Homo sapiens
tctaaacagtagact

SEQ ID NO: 665439 - DNA, 15 bp, Homo sapiens
ctaaacagtagactc

SEQ ID NO: 665440 - DNA, 15 bp, Homo sapiens
taaacagtagactct

SEQ ID NO: 665441 - DNA, 15 bp, Homo sapiens
aaacagtagactctc

SEQ ID NO: 665442 - DNA, 15 bp, Homo sapiens
aacagtagactctcc

SEQ ID NO: 665443 - DNA, 15 bp, Homo sapiens
acagtagactctcct

SEQ ID NO: 665444 - DNA, 15 bp, Homo sapiens
cagtagactctcctg

SEQ ID NO: 665445 - DNA, 15 bp, Homo sapiens
agtagactctcctgc

SEQ ID NO: 665446 - DNA, 15 bp, Homo sapiens
gtagactctcctgca

SEQ ID NO: 665447 - DNA, 15 bp, Homo sapiens
tagactctcctgcat

SEQ ID NO: 665448 - DNA, 15 bp, Homo sapiens
agactctcctgcata

SEQ ID NO: 665449 - DNA, 15 bp, Homo sapiens
gactctcctgcatac

SEQ ID NO: 665450 - DNA, 15 bp, Homo sapiens
actctcctgcataca

SEQ ID NO: 665451 - DNA, 15 bp, Homo sapiens
ctctcctgcatacaa

SEQ ID NO: 665452 - DNA, 15 bp, Homo sapiens
tctcctgcatacaac

SEQ ID NO: 665453 - DNA, 15 bp, Homo sapiens
ctcctgcatacaact

SEQ ID NO: 665454 - DNA, 15 bp, Homo sapiens
tcctgcatacaacta

SEQ ID NO: 665455 - DNA, 15 bp, Homo sapiens
cctgcatacaactat

SEQ ID NO: 665456 - DNA, 15 bp, Homo sapiens
ctgcatacaactata

SEQ ID NO: 665457 - DNA, 15 bp, Homo sapiens
tgcatacaactatac

SEQ ID NO: 665458 - DNA, 15 bp, Homo sapiens
gcatacaactatacc

SEQ ID NO: 665459 - DNA, 15 bp, Homo sapiens
catacaactataccg

SEQ ID NO: 665460 - DNA, 15 bp, Homo sapiens
atacaactataccgc

SEQ ID NO: 665461 - DNA, 15 bp, Homo sapiens
tacaactataccgca

SEQ ID NO: 665462 - DNA, 15 bp, Homo sapiens
acaactataccgcat

SEQ ID NO: 665463 - DNA, 15 bp, Homo sapiens
caactataccgcatg

SEQ ID NO: 665464 - DNA, 15 bp, Homo sapiens
aactataccgcatgc

SEQ ID NO: 665465 - DNA, 15 bp, Homo sapiens
actataccgcatgcc

SEQ ID NO: 665466 - DNA, 15 bp, Homo sapiens
ctataccgcatgcca

SEQ ID NO: 665467 - DNA, 15 bp, Homo sapiens
tataccgcatgccag

SEQ ID NO: 665468 - DNA, 15 bp, Homo sapiens
ataccgcatgccagg

SEQ ID NO: 665469 - DNA, 15 bp, Homo sapiens
taccgcatgccaggt

SEQ ID NO: 665470 - DNA, 15 bp, Homo sapiens
accgcatgccaggta

SEQ ID NO: 665471 - DNA, 15 bp, Homo sapiens
ccgcatgccaggtaa

SEQ ID NO: 665472 - DNA, 15 bp, Homo sapiens
cgcatgccaggtaaa

SEQ ID NO: 665473 - DNA, 15 bp, Homo sapiens
gcatgccaggtaaat

SEQ ID NO: 665474 - DNA, 15 bp, Homo sapiens
catgccaggtaaatg

SEQ ID NO: 665475 - DNA, 15 bp, Homo sapiens
atgccaggtaaatga

SEQ ID NO: 665476 - DNA, 15 bp, Homo sapiens
tgccaggtaaatgac

SEQ ID NO: 665477 - DNA, 15 bp, Homo sapiens
gccaggtaaatgact

SEQ ID NO: 665478 - DNA, 15 bp, Homo sapiens
ccaggtaaatgactg

SEQ ID NO: 665479 - DNA, 15 bp, Homo sapiens
caggtaaatgactga

SEQ ID NO: 665480 - DNA, 15 bp, Homo sapiens
aggtaaatgactgag

SEQ ID NO: 665481 - DNA, 15 bp, Homo sapiens
ggtaaatgactgagg

SEQ ID NO: 665482 - DNA, 15 bp, Homo sapiens
gtaaatgactgaggg

SEQ ID NO: 665483 - DNA, 15 bp, Homo sapiens
taaatgactgagggt

SEQ ID NO: 665484 - DNA, 15 bp, Homo sapiens
aaatgactgagggtt

SEQ ID NO: 665485 - DNA, 15 bp, Homo sapiens
aatgactgagggtta

SEQ ID NO: 665486 - DNA, 15 bp, Homo sapiens
atgactgagggttat

SEQ ID NO: 665487 - DNA, 15 bp, Homo sapiens
tgactgagggttatt

SEQ ID NO: 665488 - DNA, 15 bp, Homo sapiens
gactgagggttatta

SEQ ID NO: 665489 - DNA, 15 bp, Homo sapiens
actgagggttattac

SEQ ID NO: 665490 - DNA, 15 bp, Homo sapiens
ctgagggttattaca

SEQ ID NO: 665491 - DNA, 15 bp, Homo sapiens
tgagggttattacat

SEQ ID NO: 665492 - DNA, 15 bp, Homo sapiens
gagggttattacatc

SEQ ID NO: 665493 - DNA, 15 bp, Homo sapiens
agggttattacatcc

SEQ ID NO: 665494 - DNA, 15 bp, Homo sapiens
gggttattacatcca

SEQ ID NO: 665495 - DNA, 15 bp, Homo sapiens
ggttattacatccaa

SEQ ID NO: 665496 - DNA, 15 bp, Homo sapiens
gttattacatccaat

SEQ ID NO: 665497 - DNA, 15 bp, Homo sapiens
ttattacatccaatt

SEQ ID NO: 665498 - DNA, 15 bp, Homo sapiens
tattacatccaatta

SEQ ID NO: 665499 - DNA, 15 bp, Homo sapiens
attacatccaattat

SEQ ID NO: 665500 - DNA, 15 bp, Homo sapiens
ttacatccaattata

SEQ ID NO: 665501 - DNA, 15 bp, Homo sapiens
tacatccaattataa

SEQ ID NO: 665502 - DNA, 15 bp, Homo sapiens
acatccaattataac

SEQ ID NO: 665503 - DNA, 15 bp, Homo sapiens
catccaattataaca

SEQ ID NO: 665504 - DNA, 15 bp, Homo sapiens
atccaattataacac

SEQ ID NO: 665505 - DNA, 15 bp, Homo sapiens
tccaattataacacc

SEQ ID NO: 665506 - DNA, 15 bp, Homo sapiens
ccaattataacacca

SEQ ID NO: 665507 - DNA, 15 bp, Homo sapiens
caattataacaccac

SEQ ID NO: 665508 - DNA, 15 bp, Homo sapiens
aattataacaccact

SEQ ID NO: 665509 - DNA, 15 bp, Homo sapiens
attataacaccactg

SEQ ID NO: 665510 - DNA, 15 bp, Homo sapiens
ttataacaccactgt

SEQ ID NO: 665511 - DNA, 15 bp, Homo sapiens
tataacaccactgtg

SEQ ID NO: 665512 - DNA, 15 bp, Homo sapiens
ataacaccactgtga

SEQ ID NO: 665513 - DNA, 15 bp, Homo sapiens
taacaccactgtgat

SEQ ID NO: 665514 - DNA, 15 bp, Homo sapiens
aacaccactgtgatg

SEQ ID NO: 665515 - DNA, 15 bp, Homo sapiens
acaccactgtgatgt

SEQ ID NO: 665516 - DNA, 15 bp, Homo sapiens
caccactgtgatgta

SEQ ID NO: 665517 - DNA, 15 bp, Homo sapiens
accactgtgatgtag

SEQ ID NO: 665518 - DNA, 15 bp, Homo sapiens
ccactgtgatgtagg

SEQ ID NO: 665519 - DNA, 15 bp, Homo sapiens
cactgtgatgtaggt

SEQ ID NO: 665520 - DNA, 15 bp, Homo sapiens
actgtgatgtaggtg

SEQ ID NO: 665521 - DNA, 15 bp, Homo sapiens
ctgtgatgtaggtgc

SEQ ID NO: 665522 - DNA, 15 bp, Homo sapiens
tgtgatgtaggtgct

SEQ ID NO: 665523 - DNA, 15 bp, Homo sapiens
gtgatgtaggtgctc

SEQ ID NO: 665524 - DNA, 15 bp, Homo sapiens
tgatgtaggtgctct

SEQ ID NO: 665525 - DNA, 15 bp, Homo sapiens
gatgtaggtgctctt

SEQ ID NO: 665526 - DNA, 15 bp, Homo sapiens
atgtaggtgctctta

SEQ ID NO: 665527 - DNA, 15 bp, Homo sapiens
tgtaggtgctcttac

SEQ ID NO: 665528 - DNA, 15 bp, Homo sapiens
gtaggtgctcttacc

SEQ ID NO: 665529 - DNA, 15 bp, Homo sapiens
taggtgctcttaccc

SEQ ID NO: 665530 - DNA, 15 bp, Homo sapiens
aggtgctcttacccc

SEQ ID NO: 665531 - DNA, 15 bp, Homo sapiens
ggtgctcttacccca

SEQ ID NO: 665532 - DNA, 15 bp, Homo sapiens
gtgctcttaccccac

SEQ ID NO: 665533 - DNA, 15 bp, Homo sapiens
tgctcttaccccaca

SEQ ID NO: 665534 - DNA, 15 bp, Homo sapiens
gctcttaccccacac

SEQ ID NO: 665535 - DNA, 15 bp, Homo sapiens
ctcttaccccacact

SEQ ID NO: 665536 - DNA, 15 bp, Homo sapiens
tcttaccccacactt

SEQ ID NO: 665537 - DNA, 15 bp, Homo sapiens
cttaccccacacttt

SEQ ID NO: 665538 - DNA, 15 bp, Homo sapiens
ttaccccacactttc

SEQ ID NO: 665539 - DNA, 15 bp, Homo sapiens
taccccacactttca

SEQ ID NO: 665540 - DNA, 15 bp, Homo sapiens
accccacactttcat

SEQ ID NO: 665541 - DNA, 15 bp, Homo sapiens
ccccacactttcatt

SEQ ID NO: 665542 - DNA, 15 bp, Homo sapiens
cccacactttcattt

SEQ ID NO: 665543 - DNA, 15 bp, Homo sapiens
ccacactttcatttt

SEQ ID NO: 665544 - DNA, 15 bp, Homo sapiens
cacactttcatttta

SEQ ID NO: 665545 - DNA, 15 bp, Homo sapiens
acactttcattttac

SEQ ID NO: 665546 - DNA, 15 bp, Homo sapiens
cactttcattttaca

SEQ ID NO: 665547 - DNA, 15 bp, Homo sapiens
actttcattttacag

SEQ ID NO: 665548 - DNA, 15 bp, Homo sapiens
ctttcattttacaga

SEQ ID NO: 665549 - DNA, 15 bp, Homo sapiens
tttcattttacagaa

SEQ ID NO: 665550 - DNA, 15 bp, Homo sapiens
ttcattttacagaag

SEQ ID NO: 665551 - DNA, 15 bp, Homo sapiens
tcattttacagaaga

SEQ ID NO: 665552 - DNA, 15 bp, Homo sapiens
cattttacagaagag

SEQ ID NO: 665553 - DNA, 15 bp, Homo sapiens
attttacagaagagg

SEQ ID NO: 665554 - DNA, 15 bp, Homo sapiens
ttttacagaagagga

SEQ ID NO: 665555 - DNA, 15 bp, Homo sapiens
tttacagaagaggaa

SEQ ID NO: 665556 - DNA, 15 bp, Homo sapiens
ttacagaagaggaaa

SEQ ID NO: 665557 - DNA, 15 bp, Homo sapiens
tacagaagaggaaat

SEQ ID NO: 665558 - DNA, 15 bp, Homo sapiens
acagaagaggaaatt

SEQ ID NO: 665559 - DNA, 15 bp, Homo sapiens
cagaagaggaaattg

SEQ ID NO: 665560 - DNA, 15 bp, Homo sapiens
agaagaggaaattga

SEQ ID NO: 665561 - DNA, 15 bp, Homo sapiens
gaagaggaaattgag

SEQ ID NO: 665562 - DNA, 15 bp, Homo sapiens
aagaggaaattgagg

SEQ ID NO: 665563 - DNA, 15 bp, Homo sapiens
agaggaaattgagga

SEQ ID NO: 665564 - DNA, 15 bp, Homo sapiens
gaggaaattgaggac

SEQ ID NO: 665565 - DNA, 15 bp, Homo sapiens
aggaaattgaggaca

SEQ ID NO: 665566 - DNA, 15 bp, Homo sapiens
ggaaattgaggacag

SEQ ID NO: 665567 - DNA, 15 bp, Homo sapiens
gaaattgaggacagc

SEQ ID NO: 665568 - DNA, 15 bp, Homo sapiens
aaattgaggacagca

SEQ ID NO: 665569 - DNA, 15 bp, Homo sapiens
aattgaggacagcac

SEQ ID NO: 665570 - DNA, 15 bp, Homo sapiens
attgaggacagcaca

SEQ ID NO: 665571 - DNA, 15 bp, Homo sapiens
ttgaggacagcacaa

SEQ ID NO: 665572 - DNA, 15 bp, Homo sapiens
tgaggacagcacaat

SEQ ID NO: 665573 - DNA, 15 bp, Homo sapiens
gaggacagcacaatg

SEQ ID NO: 665574 - DNA, 15 bp, Homo sapiens
aggacagcacaatgt

SEQ ID NO: 665575 - DNA, 15 bp, Homo sapiens
ggacagcacaatgta

SEQ ID NO: 665576 - DNA, 15 bp, Homo sapiens
gacagcacaatgtag

SEQ ID NO: 665577 - DNA, 15 bp, Homo sapiens
acagcacaatgtagt

SEQ ID NO: 665578 - DNA, 15 bp, Homo sapiens
cagcacaatgtagtg

SEQ ID NO: 665579 - DNA, 15 bp, Homo sapiens
agcacaatgtagtga

SEQ ID NO: 665580 - DNA, 15 bp, Homo sapiens
gcacaatgtagtgat

SEQ ID NO: 665581 - DNA, 15 bp, Homo sapiens
cacaatgtagtgatt

SEQ ID NO: 665582 - DNA, 15 bp, Homo sapiens
acaatgtagtgatta

SEQ ID NO: 665583 - DNA, 15 bp, Homo sapiens
caatgtagtgattat

SEQ ID NO: 665584 - DNA, 15 bp, Homo sapiens
aatgtagtgattatc

SEQ ID NO: 665585 - DNA, 15 bp, Homo sapiens
atgtagtgattatca

SEQ ID NO: 665586 - DNA, 15 bp, Homo sapiens
tgtagtgattatcaa

SEQ ID NO: 665587 - DNA, 15 bp, Homo sapiens
gtagtgattatcaaa

SEQ ID NO: 665588 - DNA, 15 bp, Homo sapiens
tagtgattatcaaag

SEQ ID NO: 665589 - DNA, 15 bp, Homo sapiens
agtgattatcaaagg

SEQ ID NO: 665590 - DNA, 15 bp, Homo sapiens
gtgattatcaaaggt

SEQ ID NO: 665591 - DNA, 15 bp, Homo sapiens
tgattatcaaaggtc

SEQ ID NO: 665592 - DNA, 15 bp, Homo sapiens
gattatcaaaggtca

SEQ ID NO: 665593 - DNA, 15 bp, Homo sapiens
attatcaaaggtcac

SEQ ID NO: 665594 - DNA, 15 bp, Homo sapiens
ttatcaaaggtcaca

SEQ ID NO: 665595 - DNA, 15 bp, Homo sapiens
tatcaaaggtcacac

SEQ ID NO: 665596 - DNA, 15 bp, Homo sapiens
atcaaaggtcacacg

SEQ ID NO: 665597 - DNA, 15 bp, Homo sapiens
tcaaaggtcacacga

SEQ ID NO: 665598 - DNA, 15 bp, Homo sapiens
caaaggtcacacgac

SEQ ID NO: 665599 - DNA, 15 bp, Homo sapiens
aaaggtcacacgact

SEQ ID NO: 665600 - DNA, 15 bp, Homo sapiens
aaggtcacacgacta

SEQ ID NO: 665601 - DNA, 15 bp, Homo sapiens
aggtcacacgactac

SEQ ID NO: 665602 - DNA, 15 bp, Homo sapiens
ggtcacacgactact

SEQ ID NO: 665603 - DNA, 15 bp, Homo sapiens
gtcacacgactactg

SEQ ID NO: 665604 - DNA, 15 bp, Homo sapiens
tcacacgactactgt

SEQ ID NO: 665605 - DNA, 15 bp, Homo sapiens
cacacgactactgtg

SEQ ID NO: 665606 - DNA, 15 bp, Homo sapiens
acacgactactgtgt

SEQ ID NO: 665607 - DNA, 15 bp, Homo sapiens
cacgactactgtgtg

SEQ ID NO: 665608 - DNA, 15 bp, Homo sapiens
acgactactgtgtgg

SEQ ID NO: 665609 - DNA, 15 bp, Homo sapiens
cgactactgtgtggg

SEQ ID NO: 665610 - DNA, 15 bp, Homo sapiens
gactactgtgtggga

SEQ ID NO: 665611 - DNA, 15 bp, Homo sapiens
actactgtgtgggag

SEQ ID NO: 665612 - DNA, 15 bp, Homo sapiens
ctactgtgtgggaga

SEQ ID NO: 665613 - DNA, 15 bp, Homo sapiens
tactgtgtgggagag

SEQ ID NO: 665614 - DNA, 15 bp, Homo sapiens
actgtgtgggagagc

SEQ ID NO: 665615 - DNA, 15 bp, Homo sapiens
ctgtgtgggagagct

SEQ ID NO: 665616 - DNA, 15 bp, Homo sapiens
tgtgtgggagagcta

SEQ ID NO: 665617 - DNA, 15 bp, Homo sapiens
gtgtgggagagctag

SEQ ID NO: 665618 - DNA, 15 bp, Homo sapiens
tgtgggagagctagg

SEQ ID NO: 665619 - DNA, 15 bp, Homo sapiens
gtgggagagctagga

SEQ ID NO: 665620 - DNA, 15 bp, Homo sapiens
tgggagagctaggat

SEQ ID NO: 665621 - DNA, 15 bp, Homo sapiens
gggagagctaggatt

SEQ ID NO: 665622 - DNA, 15 bp, Homo sapiens
ggagagctaggattt

SEQ ID NO: 665623 - DNA, 15 bp, Homo sapiens
gagagctaggattta

SEQ ID NO: 665624 - DNA, 15 bp, Homo sapiens
agagctaggatttaa

SEQ ID NO: 665625 - DNA, 15 bp, Homo sapiens
gagctaggatttaaa

SEQ ID NO: 665626 - DNA, 15 bp, Homo sapiens
agctaggatttaaac

SEQ ID NO: 665627 - DNA, 15 bp, Homo sapiens
gctaggatttaaacc

SEQ ID NO: 665628 - DNA, 15 bp, Homo sapiens
ctaggatttaaacca

SEQ ID NO: 665629 - DNA, 15 bp, Homo sapiens
taggatttaaaccag

SEQ ID NO: 665630 - DNA, 15 bp, Homo sapiens
aggatttaaaccaga

SEQ ID NO: 665631 - DNA, 15 bp, Homo sapiens
ggatttaaaccagat

SEQ ID NO: 665632 - DNA, 15 bp, Homo sapiens
gatttaaaccagatg

SEQ ID NO: 665633 - DNA, 15 bp, Homo sapiens
atttaaaccagatgc

SEQ ID NO: 665634 - DNA, 15 bp, Homo sapiens
tttaaaccagatgca

SEQ ID NO: 665635 - DNA, 15 bp, Homo sapiens
ttaaaccagatgcat

SEQ ID NO: 665636 - DNA, 15 bp, Homo sapiens
taaaccagatgcata

SEQ ID NO: 665637 - DNA, 15 bp, Homo sapiens
aaaccagatgcataa

SEQ ID NO: 665638 - DNA, 15 bp, Homo sapiens
aaccagatgcataag

SEQ ID NO: 665639 - DNA, 15 bp, Homo sapiens
accagatgcataaga

SEQ ID NO: 665640 - DNA, 15 bp, Homo sapiens
ccagatgcataagat

SEQ ID NO: 665641 - DNA, 15 bp, Homo sapiens
cagatgcataagatg

SEQ ID NO: 665642 - DNA, 15 bp, Homo sapiens
agatgcataagatga

SEQ ID NO: 665643 - DNA, 15 bp, Homo sapiens
gatgcataagatgag

SEQ ID NO: 665644 - DNA, 15 bp, Homo sapiens
atgcataagatgagg

SEQ ID NO: 665645 - DNA, 15 bp, Homo sapiens
tgcataagatgaggt

SEQ ID NO: 665646 - DNA, 15 bp, Homo sapiens
gcataagatgaggtc

SEQ ID NO: 665647 - DNA, 15 bp, Homo sapiens
cataagatgaggtcc

SEQ ID NO: 665648 - DNA, 15 bp, Homo sapiens
ataagatgaggtcct

SEQ ID NO: 665649 - DNA, 15 bp, Homo sapiens
taagatgaggtcctc

SEQ ID NO: 665650 - DNA, 15 bp, Homo sapiens
aagatgaggtcctcc

SEQ ID NO: 665651 - DNA, 15 bp, Homo sapiens
agatgaggtcctcca

SEQ ID NO: 665652 - DNA, 15 bp, Homo sapiens
gatgaggtcctccaa

SEQ ID NO: 665653 - DNA, 15 bp, Homo sapiens
atgaggtcctccaag

SEQ ID NO: 665654 - DNA, 15 bp, Homo sapiens
tgaggtcctccaaga

SEQ ID NO: 665655 - DNA, 15 bp, Homo sapiens
gaggtcctccaagaa

SEQ ID NO: 665656 - DNA, 15 bp, Homo sapiens
aggtcctccaagaaa

SEQ ID NO: 665657 - DNA, 15 bp, Homo sapiens
ggtcctccaagaaac

SEQ ID NO: 665658 - DNA, 15 bp, Homo sapiens
gtcctccaagaaaca

SEQ ID NO: 665659 - DNA, 15 bp, Homo sapiens
tcctccaagaaacag

SEQ ID NO: 665660 - DNA, 15 bp, Homo sapiens
cctccaagaaacaga

SEQ ID NO: 665661 - DNA, 15 bp, Homo sapiens
ctccaagaaacagaa

SEQ ID NO: 665662 - DNA, 15 bp, Homo sapiens
tccaagaaacagaag

SEQ ID NO: 665663 - DNA, 15 bp, Homo sapiens
ccaagaaacagaaga

SEQ ID NO: 665664 - DNA, 15 bp, Homo sapiens
caagaaacagaagat

SEQ ID NO: 665665 - DNA, 15 bp, Homo sapiens
aagaaacagaagatg

SEQ ID NO: 665666 - DNA, 15 bp, Homo sapiens
agaaacagaagatga

SEQ ID NO: 665667 - DNA, 15 bp, Homo sapiens
gaaacagaagatgag

SEQ ID NO: 665668 - DNA, 15 bp, Homo sapiens
aaacagaagatgaga

SEQ ID NO: 665669 - DNA, 15 bp, Homo sapiens
aacagaagatgagaa

SEQ ID NO: 665670 - DNA, 15 bp, Homo sapiens
acagaagatgagaag

SEQ ID NO: 665671 - DNA, 15 bp, Homo sapiens
cagaagatgagaagg

SEQ ID NO: 665672 - DNA, 15 bp, Homo sapiens
agaagatgagaaggt

SEQ ID NO: 665673 - DNA, 15 bp, Homo sapiens
gaagatgagaaggtg

SEQ ID NO: 665674 - DNA, 15 bp, Homo sapiens
aagatgagaaggtgt

SEQ ID NO: 665675 - DNA, 15 bp, Homo sapiens
agatgagaaggtgtt

SEQ ID NO: 665676 - DNA, 15 bp, Homo sapiens
gatgagaaggtgtta

SEQ ID NO: 665677 - DNA, 15 bp, Homo sapiens
atgagaaggtgttaa

SEQ ID NO: 665678 - DNA, 15 bp, Homo sapiens
tgagaaggtgttaaa

SEQ ID NO: 665679 - DNA, 15 bp, Homo sapiens
gagaaggtgttaaat

SEQ ID NO: 665680 - DNA, 15 bp, Homo sapiens
agaaggtgttaaatg

SEQ ID NO: 665681 - DNA, 15 bp, Homo sapiens
gaaggtgttaaatga

SEQ ID NO: 665682 - DNA, 15 bp, Homo sapiens
aaggtgttaaatgag

SEQ ID NO: 665683 - DNA, 15 bp, Homo sapiens
aggtgttaaatgagc

SEQ ID NO: 665684 - DNA, 15 bp, Homo sapiens
ggtgttaaatgagca

SEQ ID NO: 665685 - DNA, 15 bp, Homo sapiens
gtgttaaatgagcag

SEQ ID NO: 665686 - DNA, 15 bp, Homo sapiens
tgttaaatgagcagg

SEQ ID NO: 665687 - DNA, 15 bp, Homo sapiens
gttaaatgagcaggg

SEQ ID NO: 665688 - DNA, 15 bp, Homo sapiens
ttaaatgagcagggg

SEQ ID NO: 665689 - DNA, 15 bp, Homo sapiens
taaatgagcaggggt

SEQ ID NO: 665690 - DNA, 15 bp, Homo sapiens
aaatgagcaggggtt

SEQ ID NO: 665691 - DNA, 15 bp, Homo sapiens
aatgagcaggggttt

SEQ ID NO: 665692 - DNA, 15 bp, Homo sapiens
atgagcaggggtttt

SEQ ID NO: 665693 - DNA, 15 bp, Homo sapiens
tgagcaggggtttta

SEQ ID NO: 665694 - DNA, 15 bp, Homo sapiens
gagcaggggttttat

SEQ ID NO: 665695 - DNA, 15 bp, Homo sapiens
agcaggggttttatt

SEQ ID NO: 665696 - DNA, 15 bp, Homo sapiens
gcaggggttttatta

SEQ ID NO: 665697 - DNA, 15 bp, Homo sapiens
caggggttttattag

SEQ ID NO: 665698 - DNA, 15 bp, Homo sapiens
aggggttttattagg

SEQ ID NO: 665699 - DNA, 15 bp, Homo sapiens
ggggttttattaggg

SEQ ID NO: 665700 - DNA, 15 bp, Homo sapiens
gggttttattagggg

SEQ ID NO: 665701 - DNA, 15 bp, Homo sapiens
ggttttattaggggg

SEQ ID NO: 665702 - DNA, 15 bp, Homo sapiens
gttttattaggggga

SEQ ID NO: 665703 - DNA, 15 bp, Homo sapiens
ttttattagggggaa

SEQ ID NO: 665704 - DNA, 15 bp, Homo sapiens
tttattagggggaat

SEQ ID NO: 665705 - DNA, 15 bp, Homo sapiens
ttattagggggaatt

SEQ ID NO: 665706 - DNA, 15 bp, Homo sapiens
tattagggggaatta

SEQ ID NO: 665707 - DNA, 15 bp, Homo sapiens
attagggggaattaa

SEQ ID NO: 665708 - DNA, 15 bp, Homo sapiens
ttagggggaattaat

SEQ ID NO: 665709 - DNA, 15 bp, Homo sapiens
tagggggaattaatg

SEQ ID NO: 665710 - DNA, 15 bp, Homo sapiens
agggggaattaatgt

SEQ ID NO: 665711 - DNA, 15 bp, Homo sapiens
gggggaattaatgtg

SEQ ID NO: 665712 - DNA, 15 bp, Homo sapiens
ggggaattaatgtgt

SEQ ID NO: 665713 - DNA, 15 bp, Homo sapiens
gggaattaatgtgtg

SEQ ID NO: 665714 - DNA, 15 bp, Homo sapiens
ggaattaatgtgtga

SEQ ID NO: 665715 - DNA, 15 bp, Homo sapiens
gaattaatgtgtgaa

SEQ ID NO: 665716 - DNA, 15 bp, Homo sapiens
aattaatgtgtgaac

SEQ ID NO: 665717 - DNA, 15 bp, Homo sapiens
attaatgtgtgaaca

SEQ ID NO: 665718 - DNA, 15 bp, Homo sapiens
ttaatgtgtgaacag

SEQ ID NO: 665719 - DNA, 15 bp, Homo sapiens
taatgtgtgaacaga

SEQ ID NO: 665720 - DNA, 15 bp, Homo sapiens
aatgtgtgaacagaa

SEQ ID NO: 665721 - DNA, 15 bp, Homo sapiens
atgtgtgaacagaaa

SEQ ID NO: 665722 - DNA, 15 bp, Homo sapiens
tgtgtgaacagaaat

SEQ ID NO: 665723 - DNA, 15 bp, Homo sapiens
gtgtgaacagaaata

SEQ ID NO: 665724 - DNA, 15 bp, Homo sapiens
tgtgaacagaaatag

SEQ ID NO: 665725 - DNA, 15 bp, Homo sapiens
gtgaacagaaatagg

SEQ ID NO: 665726 - DNA, 15 bp, Homo sapiens
tgaacagaaataggg

SEQ ID NO: 665727 - DNA, 15 bp, Homo sapiens
gaacagaaatagggg

SEQ ID NO: 665728 - DNA, 15 bp, Homo sapiens
aacagaaatagggga

SEQ ID NO: 665729 - DNA, 15 bp, Homo sapiens
acagaaataggggag

SEQ ID NO: 665730 - DNA, 15 bp, Homo sapiens
cagaaataggggagg

SEQ ID NO: 665731 - DNA, 15 bp, Homo sapiens
agaaataggggagga

SEQ ID NO: 665732 - DNA, 15 bp, Homo sapiens
gaaataggggaggat

SEQ ID NO: 665733 - DNA, 15 bp, Homo sapiens
aaataggggaggata

SEQ ID NO: 665734 - DNA, 15 bp, Homo sapiens
aataggggaggatag

SEQ ID NO: 665735 - DNA, 15 bp, Homo sapiens
ataggggaggatagg

SEQ ID NO: 665736 - DNA, 15 bp, Homo sapiens
taggggaggataggc

SEQ ID NO: 665737 - DNA, 15 bp, Homo sapiens
aggggaggataggca

SEQ ID NO: 665738 - DNA, 15 bp, Homo sapiens
ggggaggataggcaa

SEQ ID NO: 665739 - DNA, 15 bp, Homo sapiens
gggaggataggcaaa

SEQ ID NO: 665740 - DNA, 15 bp, Homo sapiens
ggaggataggcaaag

SEQ ID NO: 665741 - DNA, 15 bp, Homo sapiens
gaggataggcaaagc

SEQ ID NO: 665742 - DNA, 15 bp, Homo sapiens
aggataggcaaagcc

SEQ ID NO: 665743 - DNA, 15 bp, Homo sapiens
ggataggcaaagcca

SEQ ID NO: 665744 - DNA, 15 bp, Homo sapiens
gataggcaaagccat

SEQ ID NO: 665745 - DNA, 15 bp, Homo sapiens
ataggcaaagccatc

SEQ ID NO: 665746 - DNA, 15 bp, Homo sapiens
taggcaaagccatca

SEQ ID NO: 665747 - DNA, 15 bp, Homo sapiens
aggcaaagccatcag

SEQ ID NO: 665748 - DNA, 15 bp, Homo sapiens
ggcaaagccatcaga

SEQ ID NO: 665749 - DNA, 15 bp, Homo sapiens
gcaaagccatcagat

SEQ ID NO: 665750 - DNA, 15 bp, Homo sapiens
caaagccatcagatt

SEQ ID NO: 665751 - DNA, 15 bp, Homo sapiens
aaagccatcagattg

SEQ ID NO: 665752 - DNA, 15 bp, Homo sapiens
aagccatcagattgc

SEQ ID NO: 665753 - DNA, 15 bp, Homo sapiens
agccatcagattgca

SEQ ID NO: 665754 - DNA, 15 bp, Homo sapiens
gccatcagattgcaa

SEQ ID NO: 665755 - DNA, 15 bp, Homo sapiens
ccatcagattgcaag

SEQ ID NO: 665756 - DNA, 15 bp, Homo sapiens
catcagattgcaagg

SEQ ID NO: 665757 - DNA, 15 bp, Homo sapiens
atcagattgcaaggc

SEQ ID NO: 665758 - DNA, 15 bp, Homo sapiens
tcagattgcaaggca

SEQ ID NO: 665759 - DNA, 15 bp, Homo sapiens
cagattgcaaggcaa

SEQ ID NO: 665760 - DNA, 15 bp, Homo sapiens
agattgcaaggcaag

SEQ ID NO: 665761 - DNA, 15 bp, Homo sapiens
gattgcaaggcaagc

SEQ ID NO: 665762 - DNA, 15 bp, Homo sapiens
attgcaaggcaagcc

SEQ ID NO: 665763 - DNA, 15 bp, Homo sapiens
ttgcaaggcaagcct

SEQ ID NO: 665764 - DNA, 15 bp, Homo sapiens
tgcaaggcaagccta

SEQ ID NO: 665765 - DNA, 15 bp, Homo sapiens
gcaaggcaagcctaa

SEQ ID NO: 665766 - DNA, 15 bp, Homo sapiens
caaggcaagcctaac

SEQ ID NO: 665767 - DNA, 15 bp, Homo sapiens
aaggcaagcctaacc

SEQ ID NO: 665768 - DNA, 15 bp, Homo sapiens
aggcaagcctaaccc

SEQ ID NO: 665769 - DNA, 15 bp, Homo sapiens
ggcaagcctaacccc

SEQ ID NO: 665770 - DNA, 15 bp, Homo sapiens
gcaagcctaacccca

SEQ ID NO: 665771 - DNA, 15 bp, Homo sapiens
caagcctaaccccaa

SEQ ID NO: 665772 - DNA, 15 bp, Homo sapiens
aagcctaaccccaag

SEQ ID NO: 665773 - DNA, 15 bp, Homo sapiens
agcctaaccccaagg

SEQ ID NO: 665774 - DNA, 15 bp, Homo sapiens
gcctaaccccaaggg

SEQ ID NO: 665775 - DNA, 15 bp, Homo sapiens
cctaaccccaaggga

SEQ ID NO: 665776 - DNA, 15 bp, Homo sapiens
ctaaccccaagggaa

SEQ ID NO: 665777 - DNA, 15 bp, Homo sapiens
taaccccaagggaag

SEQ ID NO: 665778 - DNA, 15 bp, Homo sapiens
aaccccaagggaagg

SEQ ID NO: 665779 - DNA, 15 bp, Homo sapiens
accccaagggaagga

SEQ ID NO: 665780 - DNA, 15 bp, Homo sapiens
ccccaagggaaggag

SEQ ID NO: 665781 - DNA, 15 bp, Homo sapiens
cccaagggaaggaga

SEQ ID NO: 665782 - DNA, 15 bp, Homo sapiens
ccaagggaaggagag

SEQ ID NO: 665783 - DNA, 15 bp, Homo sapiens
caagggaaggagaga

SEQ ID NO: 665784 - DNA, 15 bp, Homo sapiens
aagggaaggagagag

SEQ ID NO: 665785 - DNA, 15 bp, Homo sapiens
agggaaggagagaga

SEQ ID NO: 665786 - DNA, 15 bp, Homo sapiens
gggaaggagagagag

SEQ ID NO: 665787 - DNA, 15 bp, Homo sapiens
ggaaggagagagaga

SEQ ID NO: 665788 - DNA, 15 bp, Homo sapiens
gaaggagagagagag

SEQ ID NO: 665789 - DNA, 15 bp, Homo sapiens
aaggagagagagaga

SEQ ID NO: 665790 - DNA, 15 bp, Homo sapiens
aggagagagagagag

SEQ ID NO: 665791 - DNA, 15 bp, Homo sapiens
ggagagagagagagt

SEQ ID NO: 665792 - DNA, 15 bp, Homo sapiens
gagagagagagagta

SEQ ID NO: 665793 - DNA, 15 bp, Homo sapiens
agagagagagagtag

SEQ ID NO: 665794 - DNA, 15 bp, Homo sapiens
gagagagagagtaga

SEQ ID NO: 665795 - DNA, 15 bp, Homo sapiens
agagagagagtagat

SEQ ID NO: 665796 - DNA, 15 bp, Homo sapiens
gagagagagtagatt

SEQ ID NO: 665797 - DNA, 15 bp, Homo sapiens
agagagagtagattg

SEQ ID NO: 665798 - DNA, 15 bp, Homo sapiens
gagagagtagattgg

SEQ ID NO: 665799 - DNA, 15 bp, Homo sapiens
agagagtagattggt

SEQ ID NO: 665800 - DNA, 15 bp, Homo sapiens
gagagtagattggtt

SEQ ID NO: 665801 - DNA, 15 bp, Homo sapiens
agagtagattggttg

SEQ ID NO: 665802 - DNA, 15 bp, Homo sapiens
gagtagattggttgg

SEQ ID NO: 665803 - DNA, 15 bp, Homo sapiens
agtagattggttgga

SEQ ID NO: 665804 - DNA, 15 bp, Homo sapiens
gtagattggttggaa

SEQ ID NO: 665805 - DNA, 15 bp, Homo sapiens
tagattggttggaaa

SEQ ID NO: 665806 - DNA, 15 bp, Homo sapiens
agattggttggaaac

SEQ ID NO: 665807 - DNA, 15 bp, Homo sapiens
gattggttggaaaca

SEQ ID NO: 665808 - DNA, 15 bp, Homo sapiens
attggttggaaacat

SEQ ID NO: 665809 - DNA, 15 bp, Homo sapiens
ttggttggaaacatt

SEQ ID NO: 665810 - DNA, 15 bp, Homo sapiens
tggttggaaacattt

SEQ ID NO: 665811 - DNA, 15 bp, Homo sapiens
ggttggaaacatttt

SEQ ID NO: 665812 - DNA, 15 bp, Homo sapiens
gttggaaacattttt

SEQ ID NO: 665813 - DNA, 15 bp, Homo sapiens
ttggaaacatttttg

SEQ ID NO: 665814 - DNA, 15 bp, Homo sapiens
tggaaacatttttgg

SEQ ID NO: 665815 - DNA, 15 bp, Homo sapiens
ggaaacatttttggt

SEQ ID NO: 665816 - DNA, 15 bp, Homo sapiens
gaaacatttttggtg

SEQ ID NO: 665817 - DNA, 15 bp, Homo sapiens
aaacatttttggtgg

SEQ ID NO: 665818 - DNA, 15 bp, Homo sapiens
aacatttttggtggg

SEQ ID NO: 665819 - DNA, 15 bp, Homo sapiens
acatttttggtgggt

SEQ ID NO: 665820 - DNA, 15 bp, Homo sapiens
catttttggtgggtc

SEQ ID NO: 665821 - DNA, 15 bp, Homo sapiens
atttttggtgggtct

SEQ ID NO: 665822 - DNA, 15 bp, Homo sapiens
tttttggtgggtcta

SEQ ID NO: 665823 - DNA, 15 bp, Homo sapiens
ttttggtgggtctat

SEQ ID NO: 665824 - DNA, 15 bp, Homo sapiens
tttggtgggtctatg

SEQ ID NO: 665825 - DNA, 15 bp, Homo sapiens
ttggtgggtctatgg

SEQ ID NO: 665826 - DNA, 15 bp, Homo sapiens
tggtgggtctatggt

SEQ ID NO: 665827 - DNA, 15 bp, Homo sapiens
ggtgggtctatggtc

SEQ ID NO: 665828 - DNA, 15 bp, Homo sapiens
gtgggtctatggtct

SEQ ID NO: 665829 - DNA, 15 bp, Homo sapiens
tgggtctatggtcta

SEQ ID NO: 665830 - DNA, 15 bp, Homo sapiens
gggtctatggtctaa

SEQ ID NO: 665831 - DNA, 15 bp, Homo sapiens
ggtctatggtctaag

SEQ ID NO: 665832 - DNA, 15 bp, Homo sapiens
gtctatggtctaagg

SEQ ID NO: 665833 - DNA, 15 bp, Homo sapiens
tctatggtctaagga

SEQ ID NO: 665834 - DNA, 15 bp, Homo sapiens
ctatggtctaaggaa

SEQ ID NO: 665835 - DNA, 15 bp, Homo sapiens
tatggtctaaggaaa

SEQ ID NO: 665836 - DNA, 15 bp, Homo sapiens
atggtctaaggaaag

SEQ ID NO: 665837 - DNA, 15 bp, Homo sapiens
tggtctaaggaaagt

SEQ ID NO: 665838 - DNA, 15 bp, Homo sapiens
ggtctaaggaaagtt

SEQ ID NO: 665839 - DNA, 15 bp, Homo sapiens
gtctaaggaaagttc

SEQ ID NO: 665840 - DNA, 15 bp, Homo sapiens
tctaaggaaagttca

SEQ ID NO: 665841 - DNA, 15 bp, Homo sapiens
ctaaggaaagttcag

SEQ ID NO: 665842 - DNA, 15 bp, Homo sapiens
taaggaaagttcagc

SEQ ID NO: 665843 - DNA, 15 bp, Homo sapiens
aaggaaagttcagca

SEQ ID NO: 665844 - DNA, 15 bp, Homo sapiens
aggaaagttcagcaa

SEQ ID NO: 665845 - DNA, 15 bp, Homo sapiens
ggaaagttcagcaaa

SEQ ID NO: 665846 - DNA, 15 bp, Homo sapiens
gaaagttcagcaaag

SEQ ID NO: 665847 - DNA, 15 bp, Homo sapiens
aaagttcagcaaagt

SEQ ID NO: 665848 - DNA, 15 bp, Homo sapiens
aagttcagcaaagtc

SEQ ID NO: 665849 - DNA, 15 bp, Homo sapiens
agttcagcaaagtca

SEQ ID NO: 665850 - DNA, 15 bp, Homo sapiens
gttcagcaaagtcat

SEQ ID NO: 665851 - DNA, 15 bp, Homo sapiens
ttcagcaaagtcatc

SEQ ID NO: 665852 - DNA, 15 bp, Homo sapiens
tcagcaaagtcatca

SEQ ID NO: 665853 - DNA, 15 bp, Homo sapiens
cagcaaagtcatcat

SEQ ID NO: 665854 - DNA, 15 bp, Homo sapiens
agcaaagtcatcatg

SEQ ID NO: 665855 - DNA, 15 bp, Homo sapiens
gcaaagtcatcatgg

SEQ ID NO: 665856 - DNA, 15 bp, Homo sapiens
caaagtcatcatgga

SEQ ID NO: 665857 - DNA, 15 bp, Homo sapiens
aaagtcatcatggag

SEQ ID NO: 665858 - DNA, 15 bp, Homo sapiens
aagtcatcatggagt

SEQ ID NO: 665859 - DNA, 15 bp, Homo sapiens
agtcatcatggagtt

SEQ ID NO: 665860 - DNA, 15 bp, Homo sapiens
gtcatcatggagttt

SEQ ID NO: 665861 - DNA, 15 bp, Homo sapiens
tcatcatggagtttt

SEQ ID NO: 665862 - DNA, 15 bp, Homo sapiens
catcatggagttttt

SEQ ID NO: 665863 - DNA, 15 bp, Homo sapiens
atcatggagtttttg

SEQ ID NO: 665864 - DNA, 15 bp, Homo sapiens
tcatggagtttttga

SEQ ID NO: 665865 - DNA, 15 bp, Homo sapiens
catggagtttttgag

SEQ ID NO: 665866 - DNA, 15 bp, Homo sapiens
atggagtttttgagc

SEQ ID NO: 665867 - DNA, 15 bp, Homo sapiens
tggagtttttgagcc

SEQ ID NO: 665868 - DNA, 15 bp, Homo sapiens
ggagtttttgagcca

SEQ ID NO: 665869 - DNA, 15 bp, Homo sapiens
gagtttttgagccaa

SEQ ID NO: 665870 - DNA, 15 bp, Homo sapiens
agtttttgagccaaa

SEQ ID NO: 665871 - DNA, 15 bp, Homo sapiens
gtttttgagccaaag

SEQ ID NO: 665872 - DNA, 15 bp, Homo sapiens
tttttgagccaaagt

SEQ ID NO: 665873 - DNA, 15 bp, Homo sapiens
ttttgagccaaagtt

SEQ ID NO: 665874 - DNA, 15 bp, Homo sapiens
tttgagccaaagttg

SEQ ID NO: 665875 - DNA, 15 bp, Homo sapiens
ttgagccaaagttgg

SEQ ID NO: 665876 - DNA, 15 bp, Homo sapiens
tgagccaaagttggg

SEQ ID NO: 665877 - DNA, 15 bp, Homo sapiens
gagccaaagttgggc

SEQ ID NO: 665878 - DNA, 15 bp, Homo sapiens
agccaaagttgggca

SEQ ID NO: 665879 - DNA, 15 bp, Homo sapiens
gccaaagttgggcaa

SEQ ID NO: 665880 - DNA, 15 bp, Homo sapiens
ccaaagttgggcaat

SEQ ID NO: 665881 - DNA, 15 bp, Homo sapiens
caaagttgggcaata

SEQ ID NO: 665882 - DNA, 15 bp, Homo sapiens
aaagttgggcaatac

SEQ ID NO: 665883 - DNA, 15 bp, Homo sapiens
aagttgggcaataca

SEQ ID NO: 665884 - DNA, 15 bp, Homo sapiens
agttgggcaatacag

SEQ ID NO: 665885 - DNA, 15 bp, Homo sapiens
gttgggcaatacagt

SEQ ID NO: 665886 - DNA, 15 bp, Homo sapiens
ttgggcaatacagtt

SEQ ID NO: 665887 - DNA, 15 bp, Homo sapiens
tgggcaatacagttg

SEQ ID NO: 665888 - DNA, 15 bp, Homo sapiens
gggcaatacagttgc

SEQ ID NO: 665889 - DNA, 15 bp, Homo sapiens
ggcaatacagttgcc

SEQ ID NO: 665890 - DNA, 15 bp, Homo sapiens
gcaatacagttgccc

SEQ ID NO: 665891 - DNA, 15 bp, Homo sapiens
caatacagttgccca

SEQ ID NO: 665892 - DNA, 15 bp, Homo sapiens
aatacagttgcccaa

SEQ ID NO: 665893 - DNA, 15 bp, Homo sapiens
atacagttgcccaac

SEQ ID NO: 665894 - DNA, 15 bp, Homo sapiens
tacagttgcccaaca

SEQ ID NO: 665895 - DNA, 15 bp, Homo sapiens
acagttgcccaacaa

SEQ ID NO: 665896 - DNA, 15 bp, Homo sapiens
cagttgcccaacaaa

SEQ ID NO: 665897 - DNA, 15 bp, Homo sapiens
agttgcccaacaaat

SEQ ID NO: 665898 - DNA, 15 bp, Homo sapiens
gttgcccaacaaatt

SEQ ID NO: 665899 - DNA, 15 bp, Homo sapiens
ttgcccaacaaattt

SEQ ID NO: 665900 - DNA, 15 bp, Homo sapiens
tgcccaacaaatttc

SEQ ID NO: 665901 - DNA, 15 bp, Homo sapiens
gcccaacaaatttct

SEQ ID NO: 665902 - DNA, 15 bp, Homo sapiens
cccaacaaatttctg

SEQ ID NO: 665903 - DNA, 15 bp, Homo sapiens
ccaacaaatttctgt

SEQ ID NO: 665904 - DNA, 15 bp, Homo sapiens
caacaaatttctgtg

SEQ ID NO: 665905 - DNA, 15 bp, Homo sapiens
aacaaatttctgtgt

SEQ ID NO: 665906 - DNA, 15 bp, Homo sapiens
acaaatttctgtgtt

SEQ ID NO: 665907 - DNA, 15 bp, Homo sapiens
caaatttctgtgttt

SEQ ID NO: 665908 - DNA, 15 bp, Homo sapiens
aaatttctgtgtttc

SEQ ID NO: 665909 - DNA, 15 bp, Homo sapiens
aatttctgtgtttct

SEQ ID NO: 665910 - DNA, 15 bp, Homo sapiens
atttctgtgtttctc

SEQ ID NO: 665911 - DNA, 15 bp, Homo sapiens
tttctgtgtttctca

SEQ ID NO: 665912 - DNA, 15 bp, Homo sapiens
ttctgtgtttctcag

SEQ ID NO: 665913 - DNA, 15 bp, Homo sapiens
tctgtgtttctcaga

SEQ ID NO: 665914 - DNA, 15 bp, Homo sapiens
ctgtgtttctcagaa

SEQ ID NO: 665915 - DNA, 15 bp, Homo sapiens
tgtgtttctcagaaa

SEQ ID NO: 665916 - DNA, 15 bp, Homo sapiens
gtgtttctcagaaat

SEQ ID NO: 665917 - DNA, 15 bp, Homo sapiens
tgtttctcagaaata

SEQ ID NO: 665918 - DNA, 15 bp, Homo sapiens
gtttctcagaaatag

SEQ ID NO: 665919 - DNA, 15 bp, Homo sapiens
tttctcagaaatagg

SEQ ID NO: 665920 - DNA, 15 bp, Homo sapiens
ttctcagaaataggt

SEQ ID NO: 665921 - DNA, 15 bp, Homo sapiens
tctcagaaataggtc

SEQ ID NO: 665922 - DNA, 15 bp, Homo sapiens
ctcagaaataggtct

SEQ ID NO: 665923 - DNA, 15 bp, Homo sapiens
tcagaaataggtctg

SEQ ID NO: 665924 - DNA, 15 bp, Homo sapiens
cagaaataggtctgc

SEQ ID NO: 665925 - DNA, 15 bp, Homo sapiens
agaaataggtctgcc

SEQ ID NO: 665926 - DNA, 15 bp, Homo sapiens
gaaataggtctgcct

SEQ ID NO: 665927 - DNA, 15 bp, Homo sapiens
aaataggtctgcctc

SEQ ID NO: 665928 - DNA, 15 bp, Homo sapiens
aataggtctgcctca

SEQ ID NO: 665929 - DNA, 15 bp, Homo sapiens
ataggtctgcctcaa

SEQ ID NO: 665930 - DNA, 15 bp, Homo sapiens
taggtctgcctcaat

SEQ ID NO: 665931 - DNA, 15 bp, Homo sapiens
aggtctgcctcaatg

SEQ ID NO: 665932 - DNA, 15 bp, Homo sapiens
ggtctgcctcaatgt

SEQ ID NO: 665933 - DNA, 15 bp, Homo sapiens
gtctgcctcaatgtc

SEQ ID NO: 665934 - DNA, 15 bp, Homo sapiens
tctgcctcaatgtcc

SEQ ID NO: 665935 - DNA, 15 bp, Homo sapiens
ctgcctcaatgtccc

SEQ ID NO: 665936 - DNA, 15 bp, Homo sapiens
tgcctcaatgtcccc

SEQ ID NO: 665937 - DNA, 15 bp, Homo sapiens
gcctcaatgtcccca

SEQ ID NO: 665938 - DNA, 15 bp, Homo sapiens
cctcaatgtccccac

SEQ ID NO: 665939 - DNA, 15 bp, Homo sapiens
ctcaatgtccccacc

SEQ ID NO: 665940 - DNA, 15 bp, Homo sapiens
tcaatgtccccacca

SEQ ID NO: 665941 - DNA, 15 bp, Homo sapiens
caatgtccccaccat

SEQ ID NO: 665942 - DNA, 15 bp, Homo sapiens
aatgtccccaccata

SEQ ID NO: 665943 - DNA, 15 bp, Homo sapiens
atgtccccaccatac

SEQ ID NO: 665944 - DNA, 15 bp, Homo sapiens
tgtccccaccatact

SEQ ID NO: 665945 - DNA, 15 bp, Homo sapiens
gtccccaccatactt

SEQ ID NO: 665946 - DNA, 15 bp, Homo sapiens
tccccaccatacttg

SEQ ID NO: 665947 - DNA, 15 bp, Homo sapiens
ccccaccatacttgg

SEQ ID NO: 665948 - DNA, 15 bp, Homo sapiens
cccaccatacttggt

SEQ ID NO: 665949 - DNA, 15 bp, Homo sapiens
ccaccatacttggtc

SEQ ID NO: 665950 - DNA, 15 bp, Homo sapiens
caccatacttggtca

SEQ ID NO: 665951 - DNA, 15 bp, Homo sapiens
accatacttggtcac

SEQ ID NO: 665952 - DNA, 15 bp, Homo sapiens
ccatacttggtcact

SEQ ID NO: 665953 - DNA, 15 bp, Homo sapiens
catacttggtcactg

SEQ ID NO: 665954 - DNA, 15 bp, Homo sapiens
atacttggtcactgg

SEQ ID NO: 665955 - DNA, 15 bp, Homo sapiens
tacttggtcactggc

SEQ ID NO: 665956 - DNA, 15 bp, Homo sapiens
acttggtcactggct

SEQ ID NO: 665957 - DNA, 15 bp, Homo sapiens
cttggtcactggctc

SEQ ID NO: 665958 - DNA, 15 bp, Homo sapiens
ttggtcactggctct

SEQ ID NO: 665959 - DNA, 15 bp, Homo sapiens
tggtcactggctctt

SEQ ID NO: 665960 - DNA, 15 bp, Homo sapiens
ggtcactggctcttg

SEQ ID NO: 665961 - DNA, 15 bp, Homo sapiens
gtcactggctcttgg

SEQ ID NO: 665962 - DNA, 15 bp, Homo sapiens
tcactggctcttggg

SEQ ID NO: 665963 - DNA, 15 bp, Homo sapiens
cactggctcttggga

SEQ ID NO: 665964 - DNA, 15 bp, Homo sapiens
actggctcttgggag

SEQ ID NO: 665965 - DNA, 15 bp, Homo sapiens
ctggctcttgggagg

SEQ ID NO: 665966 - DNA, 15 bp, Homo sapiens
tggctcttgggaggg

SEQ ID NO: 665967 - DNA, 15 bp, Homo sapiens
ggctcttgggagggg

SEQ ID NO: 665968 - DNA, 15 bp, Homo sapiens
gctcttgggaggggc

SEQ ID NO: 665969 - DNA, 15 bp, Homo sapiens
ctcttgggaggggcc

SEQ ID NO: 665970 - DNA, 15 bp, Homo sapiens
tcttgggaggggcct

SEQ ID NO: 665971 - DNA, 15 bp, Homo sapiens
cttgggaggggcctg

SEQ ID NO: 665972 - DNA, 15 bp, Homo sapiens
ttgggaggggcctgc

SEQ ID NO: 665973 - DNA, 15 bp, Homo sapiens
tgggaggggcctgcc

SEQ ID NO: 665974 - DNA, 15 bp, Homo sapiens
gggaggggcctgccc

SEQ ID NO: 665975 - DNA, 15 bp, Homo sapiens
ggaggggcctgccct

SEQ ID NO: 665976 - DNA, 15 bp, Homo sapiens
gaggggcctgccctg

SEQ ID NO: 665977 - DNA, 15 bp, Homo sapiens
aggggcctgccctgt

SEQ ID NO: 665978 - DNA, 15 bp, Homo sapiens
ggggcctgccctgtt

SEQ ID NO: 665979 - DNA, 15 bp, Homo sapiens
gggcctgccctgttc

SEQ ID NO: 665980 - DNA, 15 bp, Homo sapiens
ggcctgccctgttcc

SEQ ID NO: 665981 - DNA, 15 bp, Homo sapiens
gcctgccctgttcca

SEQ ID NO: 665982 - DNA, 15 bp, Homo sapiens
cctgccctgttccaa

SEQ ID NO: 665983 - DNA, 15 bp, Homo sapiens
ctgccctgttccaat

SEQ ID NO: 665984 - DNA, 15 bp, Homo sapiens
tgccctgttccaatc

SEQ ID NO: 665985 - DNA, 15 bp, Homo sapiens
gccctgttccaatcc

SEQ ID NO: 665986 - DNA, 15 bp, Homo sapiens
ccctgttccaatcca

SEQ ID NO: 665987 - DNA, 15 bp, Homo sapiens
cctgttccaatccac

SEQ ID NO: 665988 - DNA, 15 bp, Homo sapiens
ctgttccaatccact

SEQ ID NO: 665989 - DNA, 15 bp, Homo sapiens
tgttccaatccacta

SEQ ID NO: 665990 - DNA, 15 bp, Homo sapiens
gttccaatccactag

SEQ ID NO: 665991 - DNA, 15 bp, Homo sapiens
ttccaatccactaga

SEQ ID NO: 665992 - DNA, 15 bp, Homo sapiens
tccaatccactagag

SEQ ID NO: 665993 - DNA, 15 bp, Homo sapiens
ccaatccactagagc

SEQ ID NO: 665994 - DNA, 15 bp, Homo sapiens
caatccactagagcc

SEQ ID NO: 665995 - DNA, 15 bp, Homo sapiens
aatccactagagcca

SEQ ID NO: 665996 - DNA, 15 bp, Homo sapiens
atccactagagccaa

SEQ ID NO: 665997 - DNA, 15 bp, Homo sapiens
tccactagagccaaa

SEQ ID NO: 665998 - DNA, 15 bp, Homo sapiens
ccactagagccaaag

SEQ ID NO: 665999 - DNA, 15 bp, Homo sapiens
cactagagccaaaga

SEQ ID NO: 666000 - DNA, 15 bp, Homo sapiens
actagagccaaagaa

SEQ ID NO: 666001 - DNA, 15 bp, Homo sapiens
ctagagccaaagaag

SEQ ID NO: 666002 - DNA, 15 bp, Homo sapiens
tagagccaaagaaga

SEQ ID NO: 666003 - DNA, 15 bp, Homo sapiens
agagccaaagaagag

SEQ ID NO: 666004 - DNA, 15 bp, Homo sapiens
gagccaaagaagagc

SEQ ID NO: 666005 - DNA, 15 bp, Homo sapiens
agccaaagaagagcc

SEQ ID NO: 666006 - DNA, 15 bp, Homo sapiens
gccaaagaagagccg

SEQ ID NO: 666007 - DNA, 15 bp, Homo sapiens
ccaaagaagagccgt

SEQ ID NO: 666008 - DNA, 15 bp, Homo sapiens
caaagaagagccgtt

SEQ ID NO: 666009 - DNA, 15 bp, Homo sapiens
aaagaagagccgttg

SEQ ID NO: 666010 - DNA, 15 bp, Homo sapiens
aagaagagccgttgt

SEQ ID NO: 666011 - DNA, 15 bp, Homo sapiens
agaagagccgttgta

SEQ ID NO: 666012 - DNA, 15 bp, Homo sapiens
gaagagccgttgtac

SEQ ID NO: 666013 - DNA, 15 bp, Homo sapiens
aagagccgttgtact

SEQ ID NO: 666014 - DNA, 15 bp, Homo sapiens
agagccgttgtactg

SEQ ID NO: 666015 - DNA, 15 bp, Homo sapiens
gagccgttgtactgg

SEQ ID NO: 666016 - DNA, 15 bp, Homo sapiens
agccgttgtactggc

SEQ ID NO: 666017 - DNA, 15 bp, Homo sapiens
gccgttgtactggca

SEQ ID NO: 666018 - DNA, 15 bp, Homo sapiens
ccgttgtactggcag

SEQ ID NO: 666019 - DNA, 15 bp, Homo sapiens
cgttgtactggcagg

SEQ ID NO: 666020 - DNA, 15 bp, Homo sapiens
gttgtactggcaggg

SEQ ID NO: 666021 - DNA, 15 bp, Homo sapiens
ttgtactggcagggg

SEQ ID NO: 666022 - DNA, 15 bp, Homo sapiens
tgtactggcaggggg

SEQ ID NO: 666023 - DNA, 15 bp, Homo sapiens
gtactggcagggggt

SEQ ID NO: 666024 - DNA, 15 bp, Homo sapiens
tactggcagggggtg

SEQ ID NO: 666025 - DNA, 15 bp, Homo sapiens
actggcagggggtgg

SEQ ID NO: 666026 - DNA, 15 bp, Homo sapiens
ctggcagggggtggg

SEQ ID NO: 666027 - DNA, 15 bp, Homo sapiens
tggcagggggtgggg

SEQ ID NO: 666028 - DNA, 15 bp, Homo sapiens
ggcagggggtggggg

SEQ ID NO: 666029 - DNA, 15 bp, Homo sapiens
gcagggggtggggga

SEQ ID NO: 666030 - DNA, 15 bp, Homo sapiens
cagggggtgggggaa

SEQ ID NO: 666031 - DNA, 15 bp, Homo sapiens
agggggtgggggaat

SEQ ID NO: 666032 - DNA, 15 bp, Homo sapiens
gggggtgggggaatt

SEQ ID NO: 666033 - DNA, 15 bp, Homo sapiens
ggggtgggggaattc

SEQ ID NO: 666034 - DNA, 15 bp, Homo sapiens
gggtgggggaattcc

SEQ ID NO: 666035 - DNA, 15 bp, Homo sapiens
ggtgggggaattcct

SEQ ID NO: 666036 - DNA, 15 bp, Homo sapiens
gtgggggaattccta

SEQ ID NO: 666037 - DNA, 15 bp, Homo sapiens
tgggggaattcctac

SEQ ID NO: 666038 - DNA, 15 bp, Homo sapiens
gggggaattcctaca

SEQ ID NO: 666039 - DNA, 15 bp, Homo sapiens
ggggaattcctacaa

SEQ ID NO: 666040 - DNA, 15 bp, Homo sapiens
gggaattcctacaac

SEQ ID NO: 666041 - DNA, 15 bp, Homo sapiens
ggaattcctacaacc

SEQ ID NO: 666042 - DNA, 15 bp, Homo sapiens
gaattcctacaacca

SEQ ID NO: 666043 - DNA, 15 bp, Homo sapiens
aattcctacaaccac

SEQ ID NO: 666044 - DNA, 15 bp, Homo sapiens
attcctacaaccaca

SEQ ID NO: 666045 - DNA, 15 bp, Homo sapiens
ttcctacaaccacat

SEQ ID NO: 666046 - DNA, 15 bp, Homo sapiens
tcctacaaccacata

SEQ ID NO: 666047 - DNA, 15 bp, Homo sapiens
cctacaaccacataa

SEQ ID NO: 666048 - DNA, 15 bp, Homo sapiens
ctacaaccacataaa

SEQ ID NO: 666049 - DNA, 15 bp, Homo sapiens
tacaaccacataaaa

SEQ ID NO: 666050 - DNA, 15 bp, Homo sapiens
acaaccacataaaaa

SEQ ID NO: 666051 - DNA, 15 bp, Homo sapiens
caaccacataaaaag

SEQ ID NO: 666052 - DNA, 15 bp, Homo sapiens
aaccacataaaaagt

SEQ ID NO: 666053 - DNA, 15 bp, Homo sapiens
accacataaaaagtg

SEQ ID NO: 666054 - DNA, 15 bp, Homo sapiens
ccacataaaaagtgg

SEQ ID NO: 666055 - DNA, 15 bp, Homo sapiens
cacataaaaagtggg

SEQ ID NO: 666056 - DNA, 15 bp, Homo sapiens
acataaaaagtgggg

SEQ ID NO: 666057 - DNA, 15 bp, Homo sapiens
cataaaaagtggggt

SEQ ID NO: 666058 - DNA, 15 bp, Homo sapiens
ataaaaagtggggtg

SEQ ID NO: 666059 - DNA, 15 bp, Homo sapiens
taaaaagtggggtga

SEQ ID NO: 666060 - DNA, 15 bp, Homo sapiens
aaaaagtggggtgag

SEQ ID NO: 666061 - DNA, 15 bp, Homo sapiens
aaaagtggggtgagg

SEQ ID NO: 666062 - DNA, 15 bp, Homo sapiens
aaagtggggtgaggt

SEQ ID NO: 666063 - DNA, 15 bp, Homo sapiens
aagtggggtgaggtt

SEQ ID NO: 666064 - DNA, 15 bp, Homo sapiens
agtggggtgaggttt

SEQ ID NO: 666065 - DNA, 15 bp, Homo sapiens
gtggggtgaggtttc

SEQ ID NO: 666066 - DNA, 15 bp, Homo sapiens
tggggtgaggtttcc

SEQ ID NO: 666067 - DNA, 15 bp, Homo sapiens
ggggtgaggtttcca

SEQ ID NO: 666068 - DNA, 15 bp, Homo sapiens
gggtgaggtttccag

SEQ ID NO: 666069 - DNA, 15 bp, Homo sapiens
ggtgaggtttccaga

SEQ ID NO: 666070 - DNA, 15 bp, Homo sapiens
gtgaggtttccagaa

SEQ ID NO: 666071 - DNA, 15 bp, Homo sapiens
tgaggtttccagaaa

SEQ ID NO: 666072 - DNA, 15 bp, Homo sapiens
gaggtttccagaaaa

SEQ ID NO: 666073 - DNA, 15 bp, Homo sapiens
aggtttccagaaaaa

SEQ ID NO: 666074 - DNA, 15 bp, Homo sapiens
ggtttccagaaaaaa

SEQ ID NO: 666075 - DNA, 15 bp, Homo sapiens
gtttccagaaaaaaa

SEQ ID NO: 666076 - DNA, 15 bp, Homo sapiens
tttccagaaaaaaac

SEQ ID NO: 666077 - DNA, 15 bp, Homo sapiens
ttccagaaaaaaacg

SEQ ID NO: 666078 - DNA, 15 bp, Homo sapiens
tccagaaaaaaacgt

SEQ ID NO: 666079 - DNA, 15 bp, Homo sapiens
ccagaaaaaaacgtg

SEQ ID NO: 666080 - DNA, 15 bp, Homo sapiens
cagaaaaaaacgtga

SEQ ID NO: 666081 - DNA, 15 bp, Homo sapiens
agaaaaaaacgtgat

SEQ ID NO: 666082 - DNA, 15 bp, Homo sapiens
gaaaaaaacgtgatg

SEQ ID NO: 666083 - DNA, 15 bp, Homo sapiens
aaaaaaacgtgatgc

SEQ ID NO: 666084 - DNA, 15 bp, Homo sapiens
aaaaaacgtgatgct

SEQ ID NO: 666085 - DNA, 15 bp, Homo sapiens
aaaaacgtgatgctg

SEQ ID NO: 666086 - DNA, 15 bp, Homo sapiens
aaaacgtgatgctgg

SEQ ID NO: 666087 - DNA, 15 bp, Homo sapiens
aaacgtgatgctggg

SEQ ID NO: 666088 - DNA, 15 bp, Homo sapiens
aacgtgatgctgggc

SEQ ID NO: 666089 - DNA, 15 bp, Homo sapiens
acgtgatgctgggct

SEQ ID NO: 666090 - DNA, 15 bp, Homo sapiens
cgtgatgctgggcta

SEQ ID NO: 666091 - DNA, 15 bp, Homo sapiens
gtgatgctgggctaa

SEQ ID NO: 666092 - DNA, 15 bp, Homo sapiens
tgatgctgggctaac

SEQ ID NO: 666093 - DNA, 15 bp, Homo sapiens
gatgctgggctaacc

SEQ ID NO: 666094 - DNA, 15 bp, Homo sapiens
atgctgggctaacca

SEQ ID NO: 666095 - DNA, 15 bp, Homo sapiens
tgctgggctaaccaa

SEQ ID NO: 666096 - DNA, 15 bp, Homo sapiens
gctgggctaaccaaa

SEQ ID NO: 666097 - DNA, 15 bp, Homo sapiens
ctgggctaaccaaaa

SEQ ID NO: 666098 - DNA, 15 bp, Homo sapiens
tgggctaaccaaaac

SEQ ID NO: 666099 - DNA, 15 bp, Homo sapiens
gggctaaccaaaact

SEQ ID NO: 666100 - DNA, 15 bp, Homo sapiens
ggctaaccaaaactg

SEQ ID NO: 666101 - DNA, 15 bp, Homo sapiens
gctaaccaaaactgt

SEQ ID NO: 666102 - DNA, 15 bp, Homo sapiens
ctaaccaaaactgtg

SEQ ID NO: 666103 - DNA, 15 bp, Homo sapiens
taaccaaaactgtgt

SEQ ID NO: 666104 - DNA, 15 bp, Homo sapiens
aaccaaaactgtgtc

SEQ ID NO: 666105 - DNA, 15 bp, Homo sapiens
accaaaactgtgtcc

SEQ ID NO: 666106 - DNA, 15 bp, Homo sapiens
ccaaaactgtgtcca

SEQ ID NO: 666107 - DNA, 15 bp, Homo sapiens
caaaactgtgtccag

SEQ ID NO: 666108 - DNA, 15 bp, Homo sapiens
aaaactgtgtccagt

SEQ ID NO: 666109 - DNA, 15 bp, Homo sapiens
aaactgtgtccagta

SEQ ID NO: 666110 - DNA, 15 bp, Homo sapiens
aactgtgtccagtaa

SEQ ID NO: 666111 - DNA, 15 bp, Homo sapiens
actgtgtccagtaag

SEQ ID NO: 666112 - DNA, 15 bp, Homo sapiens
ctgtgtccagtaagt

SEQ ID NO: 666113 - DNA, 15 bp, Homo sapiens
tgtgtccagtaagta

SEQ ID NO: 666114 - DNA, 15 bp, Homo sapiens
gtgtccagtaagtac

SEQ ID NO: 666115 - DNA, 15 bp, Homo sapiens
tgtccagtaagtaca

SEQ ID NO: 666116 - DNA, 15 bp, Homo sapiens
gtccagtaagtacat

SEQ ID NO: 666117 - DNA, 15 bp, Homo sapiens
tccagtaagtacata

SEQ ID NO: 666118 - DNA, 15 bp, Homo sapiens
ccagtaagtacatat

SEQ ID NO: 666119 - DNA, 15 bp, Homo sapiens
cagtaagtacatatc

SEQ ID NO: 666120 - DNA, 15 bp, Homo sapiens
agtaagtacatatcc

SEQ ID NO: 666121 - DNA, 15 bp, Homo sapiens
gtaagtacatatccc

SEQ ID NO: 666122 - DNA, 15 bp, Homo sapiens
taagtacatatccct

SEQ ID NO: 666123 - DNA, 15 bp, Homo sapiens
aagtacatatccctc

SEQ ID NO: 666124 - DNA, 15 bp, Homo sapiens
agtacatatccctca

SEQ ID NO: 666125 - DNA, 15 bp, Homo sapiens
gtacatatccctcac

SEQ ID NO: 666126 - DNA, 15 bp, Homo sapiens
tacatatccctcact

SEQ ID NO: 666127 - DNA, 15 bp, Homo sapiens
acatatccctcactc

SEQ ID NO: 666128 - DNA, 15 bp, Homo sapiens
catatccctcactct

SEQ ID NO: 666129 - DNA, 15 bp, Homo sapiens
atatccctcactctg

SEQ ID NO: 666130 - DNA, 15 bp, Homo sapiens
tatccctcactctgt

SEQ ID NO: 666131 - DNA, 15 bp, Homo sapiens
atccctcactctgtt

SEQ ID NO: 666132 - DNA, 15 bp, Homo sapiens
tccctcactctgtta

SEQ ID NO: 666133 - DNA, 15 bp, Homo sapiens
ccctcactctgttaa

SEQ ID NO: 666134 - DNA, 15 bp, Homo sapiens
cctcactctgttaaa

SEQ ID NO: 666135 - DNA, 15 bp, Homo sapiens
ctcactctgttaaag

SEQ ID NO: 666136 - DNA, 15 bp, Homo sapiens
tcactctgttaaaga

SEQ ID NO: 666137 - DNA, 15 bp, Homo sapiens
cactctgttaaagaa

SEQ ID NO: 666138 - DNA, 15 bp, Homo sapiens
actctgttaaagaag

SEQ ID NO: 666139 - DNA, 15 bp, Homo sapiens
ctctgttaaagaagc

SEQ ID NO: 666140 - DNA, 15 bp, Homo sapiens
tctgttaaagaagca

SEQ ID NO: 666141 - DNA, 15 bp, Homo sapiens
ctgttaaagaagcag

SEQ ID NO: 666142 - DNA, 15 bp, Homo sapiens
tgttaaagaagcagc

SEQ ID NO: 666143 - DNA, 15 bp, Homo sapiens
gttaaagaagcagcc

SEQ ID NO: 666144 - DNA, 15 bp, Homo sapiens
ttaaagaagcagcca

SEQ ID NO: 666145 - DNA, 15 bp, Homo sapiens
taaagaagcagccac

SEQ ID NO: 666146 - DNA, 15 bp, Homo sapiens
aaagaagcagccaca

SEQ ID NO: 666147 - DNA, 15 bp, Homo sapiens
aagaagcagccacat

SEQ ID NO: 666148 - DNA, 15 bp, Homo sapiens
agaagcagccacata

SEQ ID NO: 666149 - DNA, 15 bp, Homo sapiens
gaagcagccacataa

SEQ ID NO: 666150 - DNA, 15 bp, Homo sapiens
aagcagccacataaa

SEQ ID NO: 666151 - DNA, 15 bp, Homo sapiens
agcagccacataaac

SEQ ID NO: 666152 - DNA, 15 bp, Homo sapiens
gcagccacataaaca

SEQ ID NO: 666153 - DNA, 15 bp, Homo sapiens
cagccacataaacaa

SEQ ID NO: 666154 - DNA, 15 bp, Homo sapiens
agccacataaacaag

SEQ ID NO: 666155 - DNA, 15 bp, Homo sapiens
gccacataaacaagg

SEQ ID NO: 666156 - DNA, 15 bp, Homo sapiens
ccacataaacaagga

SEQ ID NO: 666157 - DNA, 15 bp, Homo sapiens
cacataaacaaggag

SEQ ID NO: 666158 - DNA, 15 bp, Homo sapiens
acataaacaaggagt

SEQ ID NO: 666159 - DNA, 15 bp, Homo sapiens
cataaacaaggagta

SEQ ID NO: 666160 - DNA, 15 bp, Homo sapiens
ataaacaaggagtac

SEQ ID NO: 666161 - DNA, 15 bp, Homo sapiens
taaacaaggagtaca

SEQ ID NO: 666162 - DNA, 15 bp, Homo sapiens
aaacaaggagtacac

SEQ ID NO: 666163 - DNA, 15 bp, Homo sapiens
aacaaggagtacacg

SEQ ID NO: 666164 - DNA, 15 bp, Homo sapiens
acaaggagtacacgt

SEQ ID NO: 666165 - DNA, 15 bp, Homo sapiens
caaggagtacacgtt

SEQ ID NO: 666166 - DNA, 15 bp, Homo sapiens
aaggagtacacgttt

SEQ ID NO: 666167 - DNA, 15 bp, Homo sapiens
aggagtacacgtttc

SEQ ID NO: 666168 - DNA, 15 bp, Homo sapiens
ggagtacacgtttct

SEQ ID NO: 666169 - DNA, 15 bp, Homo sapiens
gagtacacgtttctc

SEQ ID NO: 666170 - DNA, 15 bp, Homo sapiens
agtacacgtttctca

SEQ ID NO: 666171 - DNA, 15 bp, Homo sapiens
gtacacgtttctcaa

SEQ ID NO: 666172 - DNA, 15 bp, Homo sapiens
tacacgtttctcaaa

SEQ ID NO: 666173 - DNA, 15 bp, Homo sapiens
acacgtttctcaaaa

SEQ ID NO: 666174 - DNA, 15 bp, Homo sapiens
cacgtttctcaaaat

SEQ ID NO: 666175 - DNA, 15 bp, Homo sapiens
acgtttctcaaaatg

SEQ ID NO: 666176 - DNA, 15 bp, Homo sapiens
cgtttctcaaaatgt

SEQ ID NO: 666177 - DNA, 15 bp, Homo sapiens
gtttctcaaaatgtg

SEQ ID NO: 666178 - DNA, 15 bp, Homo sapiens
tttctcaaaatgtgc

SEQ ID NO: 666179 - DNA, 15 bp, Homo sapiens
ttctcaaaatgtgca

SEQ ID NO: 666180 - DNA, 15 bp, Homo sapiens
tctcaaaatgtgcac

SEQ ID NO: 666181 - DNA, 15 bp, Homo sapiens
ctcaaaatgtgcacc

SEQ ID NO: 666182 - DNA, 15 bp, Homo sapiens
tcaaaatgtgcacct

SEQ ID NO: 666183 - DNA, 15 bp, Homo sapiens
caaaatgtgcacctt

SEQ ID NO: 666184 - DNA, 15 bp, Homo sapiens
aaaatgtgcaccttg

SEQ ID NO: 666185 - DNA, 15 bp, Homo sapiens
aaatgtgcaccttgt

SEQ ID NO: 666186 - DNA, 15 bp, Homo sapiens
aatgtgcaccttgtt

SEQ ID NO: 666187 - DNA, 15 bp, Homo sapiens
atgtgcaccttgttc

SEQ ID NO: 666188 - DNA, 15 bp, Homo sapiens
tgtgcaccttgttct

SEQ ID NO: 666189 - DNA, 15 bp, Homo sapiens
gtgcaccttgttctt

SEQ ID NO: 666190 - DNA, 15 bp, Homo sapiens
tgcaccttgttcttt

SEQ ID NO: 666191 - DNA, 15 bp, Homo sapiens
gcaccttgttctttg

SEQ ID NO: 666192 - DNA, 15 bp, Homo sapiens
caccttgttctttgg

SEQ ID NO: 666193 - DNA, 15 bp, Homo sapiens
accttgttctttggt

SEQ ID NO: 666194 - DNA, 15 bp, Homo sapiens
ccttgttctttggtt

SEQ ID NO: 666195 - DNA, 15 bp, Homo sapiens
cttgttctttggttt

SEQ ID NO: 666196 - DNA, 15 bp, Homo sapiens
ttgttctttggtttt

SEQ ID NO: 666197 - DNA, 15 bp, Homo sapiens
tgttctttggttttg

SEQ ID NO: 666198 - DNA, 15 bp, Homo sapiens
gttctttggttttga

SEQ ID NO: 666199 - DNA, 15 bp, Homo sapiens
ttctttggttttgaa

SEQ ID NO: 666200 - DNA, 15 bp, Homo sapiens
tctttggttttgaag

SEQ ID NO: 666201 - DNA, 15 bp, Homo sapiens
ctttggttttgaagt

SEQ ID NO: 666202 - DNA, 15 bp, Homo sapiens
tttggttttgaagtc

SEQ ID NO: 666203 - DNA, 15 bp, Homo sapiens
ttggttttgaagtca

SEQ ID NO: 666204 - DNA, 15 bp, Homo sapiens
tggttttgaagtcac

SEQ ID NO: 666205 - DNA, 15 bp, Homo sapiens
ggttttgaagtcaca

SEQ ID NO: 666206 - DNA, 15 bp, Homo sapiens
gttttgaagtcacat

SEQ ID NO: 666207 - DNA, 15 bp, Homo sapiens
ttttgaagtcacatc

SEQ ID NO: 666208 - DNA, 15 bp, Homo sapiens
tttgaagtcacatcc

SEQ ID NO: 666209 - DNA, 15 bp, Homo sapiens
ttgaagtcacatccc

SEQ ID NO: 666210 - DNA, 15 bp, Homo sapiens
tgaagtcacatccca

SEQ ID NO: 666211 - DNA, 15 bp, Homo sapiens
gaagtcacatcccaa

SEQ ID NO: 666212 - DNA, 15 bp, Homo sapiens
aagtcacatcccaaa

SEQ ID NO: 666213 - DNA, 15 bp, Homo sapiens
agtcacatcccaaag

SEQ ID NO: 666214 - DNA, 15 bp, Homo sapiens
gtcacatcccaaagt

SEQ ID NO: 666215 - DNA, 15 bp, Homo sapiens
tcacatcccaaagtg

SEQ ID NO: 666216 - DNA, 15 bp, Homo sapiens
cacatcccaaagtgc

SEQ ID NO: 666217 - DNA, 15 bp, Homo sapiens
acatcccaaagtgct

SEQ ID NO: 666218 - DNA, 15 bp, Homo sapiens
catcccaaagtgctg

SEQ ID NO: 666219 - DNA, 15 bp, Homo sapiens
atcccaaagtgctga

SEQ ID NO: 666220 - DNA, 15 bp, Homo sapiens
tcccaaagtgctgag

SEQ ID NO: 666221 - DNA, 15 bp, Homo sapiens
cccaaagtgctgagt

SEQ ID NO: 666222 - DNA, 15 bp, Homo sapiens
ccaaagtgctgagta

SEQ ID NO: 666223 - DNA, 15 bp, Homo sapiens
caaagtgctgagtag

SEQ ID NO: 666224 - DNA, 15 bp, Homo sapiens
aaagtgctgagtaga

SEQ ID NO: 666225 - DNA, 15 bp, Homo sapiens
aagtgctgagtagat

SEQ ID NO: 666226 - DNA, 15 bp, Homo sapiens
agtgctgagtagatc

SEQ ID NO: 666227 - DNA, 15 bp, Homo sapiens
gtgctgagtagatcg

SEQ ID NO: 666228 - DNA, 15 bp, Homo sapiens
tgctgagtagatcgc

SEQ ID NO: 666229 - DNA, 15 bp, Homo sapiens
gctgagtagatcgca

SEQ ID NO: 666230 - DNA, 15 bp, Homo sapiens
ctgagtagatcgcat

SEQ ID NO: 666231 - DNA, 15 bp, Homo sapiens
tgagtagatcgcatg

SEQ ID NO: 666232 - DNA, 15 bp, Homo sapiens
gagtagatcgcatga

SEQ ID NO: 666233 - DNA, 15 bp, Homo sapiens
agtagatcgcatgac

SEQ ID NO: 666234 - DNA, 15 bp, Homo sapiens
gtagatcgcatgacc

SEQ ID NO: 666235 - DNA, 15 bp, Homo sapiens
tagatcgcatgaccc

SEQ ID NO: 666236 - DNA, 15 bp, Homo sapiens
agatcgcatgaccct

SEQ ID NO: 666237 - DNA, 15 bp, Homo sapiens
gatcgcatgaccctc

SEQ ID NO: 666238 - DNA, 15 bp, Homo sapiens
atcgcatgaccctcg

SEQ ID NO: 666239 - DNA, 15 bp, Homo sapiens
tcgcatgaccctcgc

SEQ ID NO: 666240 - DNA, 15 bp, Homo sapiens
cgcatgaccctcgct

SEQ ID NO: 666241 - DNA, 15 bp, Homo sapiens
gcatgaccctcgctt

SEQ ID NO: 666242 - DNA, 15 bp, Homo sapiens
catgaccctcgcttt

SEQ ID NO: 666243 - DNA, 15 bp, Homo sapiens
atgaccctcgctttg

SEQ ID NO: 666244 - DNA, 15 bp, Homo sapiens
tgaccctcgctttgc

SEQ ID NO: 666245 - DNA, 15 bp, Homo sapiens
gaccctcgctttgcc

SEQ ID NO: 666246 - DNA, 15 bp, Homo sapiens
accctcgctttgcct

SEQ ID NO: 666247 - DNA, 15 bp, Homo sapiens
ccctcgctttgcctg

SEQ ID NO: 666248 - DNA, 15 bp, Homo sapiens
cctcgctttgcctgg

SEQ ID NO: 666249 - DNA, 15 bp, Homo sapiens
ctcgctttgcctggc

SEQ ID NO: 666250 - DNA, 15 bp, Homo sapiens
tcgctttgcctggct

SEQ ID NO: 666251 - DNA, 15 bp, Homo sapiens
cgctttgcctggctg

SEQ ID NO: 666252 - DNA, 15 bp, Homo sapiens
gctttgcctggctgc

SEQ ID NO: 666253 - DNA, 15 bp, Homo sapiens
ctttgcctggctgcc

SEQ ID NO: 666254 - DNA, 15 bp, Homo sapiens
tttgcctggctgcca

SEQ ID NO: 666255 - DNA, 15 bp, Homo sapiens
ttgcctggctgccag

SEQ ID NO: 666256 - DNA, 15 bp, Homo sapiens
tgcctggctgccaga

SEQ ID NO: 666257 - DNA, 15 bp, Homo sapiens
gcctggctgccagag

SEQ ID NO: 666258 - DNA, 15 bp, Homo sapiens
cctggctgccagaga

SEQ ID NO: 666259 - DNA, 15 bp, Homo sapiens
ctggctgccagagag

SEQ ID NO: 666260 - DNA, 15 bp, Homo sapiens
tggctgccagagagg

SEQ ID NO: 666261 - DNA, 15 bp, Homo sapiens
ggctgccagagagga

SEQ ID NO: 666262 - DNA, 15 bp, Homo sapiens
gctgccagagaggaa

SEQ ID NO: 666263 - DNA, 15 bp, Homo sapiens
ctgccagagaggaaa

SEQ ID NO: 666264 - DNA, 15 bp, Homo sapiens
tgccagagaggaaag

SEQ ID NO: 666265 - DNA, 15 bp, Homo sapiens
gccagagaggaaagg

SEQ ID NO: 666266 - DNA, 15 bp, Homo sapiens
ccagagaggaaaggc

SEQ ID NO: 666267 - DNA, 15 bp, Homo sapiens
cagagaggaaaggct

SEQ ID NO: 666268 - DNA, 15 bp, Homo sapiens
agagaggaaaggctg

SEQ ID NO: 666269 - DNA, 15 bp, Homo sapiens
gagaggaaaggctga

SEQ ID NO: 666270 - DNA, 15 bp, Homo sapiens
agaggaaaggctgat

SEQ ID NO: 666271 - DNA, 15 bp, Homo sapiens
gaggaaaggctgatc

SEQ ID NO: 666272 - DNA, 15 bp, Homo sapiens
aggaaaggctgatcc

SEQ ID NO: 666273 - DNA, 15 bp, Homo sapiens
ggaaaggctgatcca

SEQ ID NO: 666274 - DNA, 15 bp, Homo sapiens
gaaaggctgatccaa

SEQ ID NO: 666275 - DNA, 15 bp, Homo sapiens
aaaggctgatccaac

SEQ ID NO: 666276 - DNA, 15 bp, Homo sapiens
aaggctgatccaact

SEQ ID NO: 666277 - DNA, 15 bp, Homo sapiens
aggctgatccaactc

SEQ ID NO: 666278 - DNA, 15 bp, Homo sapiens
ggctgatccaactct

SEQ ID NO: 666279 - DNA, 15 bp, Homo sapiens
gctgatccaactctc

SEQ ID NO: 666280 - DNA, 15 bp, Homo sapiens
ctgatccaactctcc

SEQ ID NO: 666281 - DNA, 15 bp, Homo sapiens
tgatccaactctcct

SEQ ID NO: 666282 - DNA, 15 bp, Homo sapiens
gatccaactctcctg

SEQ ID NO: 666283 - DNA, 15 bp, Homo sapiens
atccaactctcctgg

SEQ ID NO: 666284 - DNA, 15 bp, Homo sapiens
tccaactctcctgga

SEQ ID NO: 666285 - DNA, 15 bp, Homo sapiens
ccaactctcctggaa

SEQ ID NO: 666286 - DNA, 15 bp, Homo sapiens
caactctcctggaat

SEQ ID NO: 666287 - DNA, 15 bp, Homo sapiens
aactctcctggaatt

SEQ ID NO: 666288 - DNA, 15 bp, Homo sapiens
actctcctggaattt

SEQ ID NO: 666289 - DNA, 15 bp, Homo sapiens
ctctcctggaatttg

SEQ ID NO: 666290 - DNA, 15 bp, Homo sapiens
tctcctggaatttga

SEQ ID NO: 666291 - DNA, 15 bp, Homo sapiens
ctcctggaatttgaa

SEQ ID NO: 666292 - DNA, 15 bp, Homo sapiens
tcctggaatttgaac

SEQ ID NO: 666293 - DNA, 15 bp, Homo sapiens
cctggaatttgaact

SEQ ID NO: 666294 - DNA, 15 bp, Homo sapiens
ctggaatttgaactt

SEQ ID NO: 666295 - DNA, 15 bp, Homo sapiens
tggaatttgaacttg

SEQ ID NO: 666296 - DNA, 15 bp, Homo sapiens
ggaatttgaacttgt

SEQ ID NO: 666297 - DNA, 15 bp, Homo sapiens
gaatttgaacttgtg

SEQ ID NO: 666298 - DNA, 15 bp, Homo sapiens
aatttgaacttgtga

SEQ ID NO: 666299 - DNA, 15 bp, Homo sapiens
atttgaacttgtgat

SEQ ID NO: 666300 - DNA, 15 bp, Homo sapiens
tttgaacttgtgatt

SEQ ID NO: 666301 - DNA, 15 bp, Homo sapiens
ttgaacttgtgattc

SEQ ID NO: 666302 - DNA, 15 bp, Homo sapiens
tgaacttgtgattcc

SEQ ID NO: 666303 - DNA, 15 bp, Homo sapiens
gaacttgtgattccc

SEQ ID NO: 666304 - DNA, 15 bp, Homo sapiens
aacttgtgattccct

SEQ ID NO: 666305 - DNA, 15 bp, Homo sapiens
acttgtgattccctg

SEQ ID NO: 666306 - DNA, 15 bp, Homo sapiens
cttgtgattccctga

SEQ ID NO: 666307 - DNA, 15 bp, Homo sapiens
ttgtgattccctgaa

SEQ ID NO: 666308 - DNA, 15 bp, Homo sapiens
tgtgattccctgaag

SEQ ID NO: 666309 - DNA, 15 bp, Homo sapiens
gtgattccctgaagt

SEQ ID NO: 666310 - DNA, 15 bp, Homo sapiens
tgattccctgaagta

SEQ ID NO: 666311 - DNA, 15 bp, Homo sapiens
gattccctgaagtaa

SEQ ID NO: 666312 - DNA, 15 bp, Homo sapiens
attccctgaagtaaa

SEQ ID NO: 666313 - DNA, 15 bp, Homo sapiens
ttccctgaagtaaag

SEQ ID NO: 666314 - DNA, 15 bp, Homo sapiens
tccctgaagtaaaga

SEQ ID NO: 666315 - DNA, 15 bp, Homo sapiens
ccctgaagtaaagag

SEQ ID NO: 666316 - DNA, 15 bp, Homo sapiens
cctgaagtaaagaga

SEQ ID NO: 666317 - DNA, 15 bp, Homo sapiens
ctgaagtaaagagat

SEQ ID NO: 666318 - DNA, 15 bp, Homo sapiens
tgaagtaaagagata

SEQ ID NO: 666319 - DNA, 15 bp, Homo sapiens
gaagtaaagagatat

SEQ ID NO: 666320 - DNA, 15 bp, Homo sapiens
aagtaaagagatatc

SEQ ID NO: 666321 - DNA, 15 bp, Homo sapiens
agtaaagagatatca

SEQ ID NO: 666322 - DNA, 15 bp, Homo sapiens
gtaaagagatatcaa

SEQ ID NO: 666323 - DNA, 15 bp, Homo sapiens
taaagagatatcaaa

SEQ ID NO: 666324 - DNA, 15 bp, Homo sapiens
aaagagatatcaaag

SEQ ID NO: 666325 - DNA, 15 bp, Homo sapiens
aagagatatcaaagt

SEQ ID NO: 666326 - DNA, 15 bp, Homo sapiens
agagatatcaaagtt

SEQ ID NO: 666327 - DNA, 15 bp, Homo sapiens
gagatatcaaagttg

SEQ ID NO: 666328 - DNA, 15 bp, Homo sapiens
agatatcaaagttga

SEQ ID NO: 666329 - DNA, 15 bp, Homo sapiens
gatatcaaagttgat

SEQ ID NO: 666330 - DNA, 15 bp, Homo sapiens
atatcaaagttgata

SEQ ID NO: 666331 - DNA, 15 bp, Homo sapiens
tatcaaagttgatac

SEQ ID NO: 666332 - DNA, 15 bp, Homo sapiens
atcaaagttgatact

SEQ ID NO: 666333 - DNA, 15 bp, Homo sapiens
tcaaagttgatactg

SEQ ID NO: 666334 - DNA, 15 bp, Homo sapiens
caaagttgatactga

SEQ ID NO: 666335 - DNA, 15 bp, Homo sapiens
aaagttgatactgag

SEQ ID NO: 666336 - DNA, 15 bp, Homo sapiens
aagttgatactgaga

SEQ ID NO: 666337 - DNA, 15 bp, Homo sapiens
agttgatactgagac

SEQ ID NO: 666338 - DNA, 15 bp, Homo sapiens
gttgatactgagaca

SEQ ID NO: 666339 - DNA, 15 bp, Homo sapiens
ttgatactgagacat

SEQ ID NO: 666340 - DNA, 15 bp, Homo sapiens
tgatactgagacatc

SEQ ID NO: 666341 - DNA, 15 bp, Homo sapiens
gatactgagacatct

SEQ ID NO: 666342 - DNA, 15 bp, Homo sapiens
atactgagacatcta

SEQ ID NO: 666343 - DNA, 15 bp, Homo sapiens
tactgagacatctaa

SEQ ID NO: 666344 - DNA, 15 bp, Homo sapiens
actgagacatctaaa

SEQ ID NO: 666345 - DNA, 15 bp, Homo sapiens
ctgagacatctaaat

SEQ ID NO: 666346 - DNA, 15 bp, Homo sapiens
tgagacatctaaatc

SEQ ID NO: 666347 - DNA, 15 bp, Homo sapiens
gagacatctaaatca

SEQ ID NO: 666348 - DNA, 15 bp, Homo sapiens
agacatctaaatcat

SEQ ID NO: 666349 - DNA, 15 bp, Homo sapiens
gacatctaaatcatc

SEQ ID NO: 666350 - DNA, 15 bp, Homo sapiens
acatctaaatcatcc

SEQ ID NO: 666351 - DNA, 15 bp, Homo sapiens
catctaaatcatcct

SEQ ID NO: 666352 - DNA, 15 bp, Homo sapiens
atctaaatcatcctc

SEQ ID NO: 666353 - DNA, 15 bp, Homo sapiens
tctaaatcatcctcc

SEQ ID NO: 666354 - DNA, 15 bp, Homo sapiens
ctaaatcatcctcca

SEQ ID NO: 666355 - DNA, 15 bp, Homo sapiens
taaatcatcctccac

SEQ ID NO: 666356 - DNA, 15 bp, Homo sapiens
aaatcatcctccacc

SEQ ID NO: 666357 - DNA, 15 bp, Homo sapiens
aatcatcctccacca

SEQ ID NO: 666358 - DNA, 15 bp, Homo sapiens
atcatcctccaccat

SEQ ID NO: 666359 - DNA, 15 bp, Homo sapiens
tcatcctccaccatt

SEQ ID NO: 666360 - DNA, 15 bp, Homo sapiens
catcctccaccattt

SEQ ID NO: 666361 - DNA, 15 bp, Homo sapiens
atcctccaccatttc

SEQ ID NO: 666362 - DNA, 15 bp, Homo sapiens
tcctccaccatttca

SEQ ID NO: 666363 - DNA, 15 bp, Homo sapiens
cctccaccatttcac

SEQ ID NO: 666364 - DNA, 15 bp, Homo sapiens
ctccaccatttcaca

SEQ ID NO: 666365 - DNA, 15 bp, Homo sapiens
tccaccatttcacat

SEQ ID NO: 666366 - DNA, 15 bp, Homo sapiens
ccaccatttcacatg

SEQ ID NO: 666367 - DNA, 15 bp, Homo sapiens
caccatttcacatgt

SEQ ID NO: 666368 - DNA, 15 bp, Homo sapiens
accatttcacatgtc

SEQ ID NO: 666369 - DNA, 15 bp, Homo sapiens
ccatttcacatgtcc

SEQ ID NO: 666370 - DNA, 15 bp, Homo sapiens
catttcacatgtccc

SEQ ID NO: 666371 - DNA, 15 bp, Homo sapiens
atttcacatgtcccc

SEQ ID NO: 666372 - DNA, 15 bp, Homo sapiens
tttcacatgtcccca

SEQ ID NO: 666373 - DNA, 15 bp, Homo sapiens
ttcacatgtccccag

SEQ ID NO: 666374 - DNA, 15 bp, Homo sapiens
tcacatgtccccagg

SEQ ID NO: 666375 - DNA, 15 bp, Homo sapiens
cacatgtccccaggc

SEQ ID NO: 666376 - DNA, 15 bp, Homo sapiens
acatgtccccaggcc

SEQ ID NO: 666377 - DNA, 15 bp, Homo sapiens
catgtccccaggcca

SEQ ID NO: 666378 - DNA, 15 bp, Homo sapiens
atgtccccaggccaa

SEQ ID NO: 666379 - DNA, 15 bp, Homo sapiens
tgtccccaggccaag

SEQ ID NO: 666380 - DNA, 15 bp, Homo sapiens
gtccccaggccaagc

SEQ ID NO: 666381 - DNA, 15 bp, Homo sapiens
tccccaggccaagcc

SEQ ID NO: 666382 - DNA, 15 bp, Homo sapiens
ccccaggccaagcca

SEQ ID NO: 666383 - DNA, 15 bp, Homo sapiens
cccaggccaagccag

SEQ ID NO: 666384 - DNA, 15 bp, Homo sapiens
ccaggccaagccagc

SEQ ID NO: 666385 - DNA, 15 bp, Homo sapiens
caggccaagccagca

SEQ ID NO: 666386 - DNA, 15 bp, Homo sapiens
aggccaagccagcaa

SEQ ID NO: 666387 - DNA, 15 bp, Homo sapiens
ggccaagccagcaaa

SEQ ID NO: 666388 - DNA, 15 bp, Homo sapiens
gccaagccagcaaaa

SEQ ID NO: 666389 - DNA, 15 bp, Homo sapiens
ccaagccagcaaaat

SEQ ID NO: 666390 - DNA, 15 bp, Homo sapiens
caagccagcaaaatt

SEQ ID NO: 666391 - DNA, 15 bp, Homo sapiens
aagccagcaaaattg

SEQ ID NO: 666392 - DNA, 15 bp, Homo sapiens
agccagcaaaattgc

SEQ ID NO: 666393 - DNA, 15 bp, Homo sapiens
gccagcaaaattgct

SEQ ID NO: 666394 - DNA, 15 bp, Homo sapiens
ccagcaaaattgcta

SEQ ID NO: 666395 - DNA, 15 bp, Homo sapiens
cagcaaaattgctat

SEQ ID NO: 666396 - DNA, 15 bp, Homo sapiens
agcaaaattgctata

SEQ ID NO: 666397 - DNA, 15 bp, Homo sapiens
gcaaaattgctatag

SEQ ID NO: 666398 - DNA, 15 bp, Homo sapiens
caaaattgctatagc

SEQ ID NO: 666399 - DNA, 15 bp, Homo sapiens
aaaattgctatagca

SEQ ID NO: 666400 - DNA, 15 bp, Homo sapiens
aaattgctatagcac

SEQ ID NO: 666401 - DNA, 15 bp, Homo sapiens
aattgctatagcaca

SEQ ID NO: 666402 - DNA, 15 bp, Homo sapiens
attgctatagcacat

SEQ ID NO: 666403 - DNA, 15 bp, Homo sapiens
ttgctatagcacatc

SEQ ID NO: 666404 - DNA, 15 bp, Homo sapiens
tgctatagcacatcc

SEQ ID NO: 666405 - DNA, 15 bp, Homo sapiens
gctatagcacatccc

SEQ ID NO: 666406 - DNA, 15 bp, Homo sapiens
ctatagcacatccct

SEQ ID NO: 666407 - DNA, 15 bp, Homo sapiens
tatagcacatccctt

SEQ ID NO: 666408 - DNA, 15 bp, Homo sapiens
atagcacatcccttt

SEQ ID NO: 666409 - DNA, 15 bp, Homo sapiens
tagcacatccctttc

SEQ ID NO: 666410 - DNA, 15 bp, Homo sapiens
agcacatccctttca

SEQ ID NO: 666411 - DNA, 15 bp, Homo sapiens
gcacatccctttcaa

SEQ ID NO: 666412 - DNA, 15 bp, Homo sapiens
cacatccctttcaac

SEQ ID NO: 666413 - DNA, 15 bp, Homo sapiens
acatccctttcaaca

SEQ ID NO: 666414 - DNA, 15 bp, Homo sapiens
catccctttcaacag

SEQ ID NO: 666415 - DNA, 15 bp, Homo sapiens
atccctttcaacagg

SEQ ID NO: 666416 - DNA, 15 bp, Homo sapiens
tccctttcaacaggt

SEQ ID NO: 666417 - DNA, 15 bp, Homo sapiens
ccctttcaacaggta

SEQ ID NO: 666418 - DNA, 15 bp, Homo sapiens
cctttcaacaggtaa

SEQ ID NO: 666419 - DNA, 15 bp, Homo sapiens
ctttcaacaggtaaa

SEQ ID NO: 666420 - DNA, 15 bp, Homo sapiens
tttcaacaggtaaag

SEQ ID NO: 666421 - DNA, 15 bp, Homo sapiens
ttcaacaggtaaagg

SEQ ID NO: 666422 - DNA, 15 bp, Homo sapiens
tcaacaggtaaaggg

SEQ ID NO: 666423 - DNA, 15 bp, Homo sapiens
caacaggtaaagggc

SEQ ID NO: 666424 - DNA, 15 bp, Homo sapiens
aacaggtaaagggct

SEQ ID NO: 666425 - DNA, 15 bp, Homo sapiens
acaggtaaagggctg

SEQ ID NO: 666426 - DNA, 15 bp, Homo sapiens
caggtaaagggctga

SEQ ID NO: 666427 - DNA, 15 bp, Homo sapiens
aggtaaagggctgat

SEQ ID NO: 666428 - DNA, 15 bp, Homo sapiens
ggtaaagggctgata

SEQ ID NO: 666429 - DNA, 15 bp, Homo sapiens
gtaaagggctgatat

SEQ ID NO: 666430 - DNA, 15 bp, Homo sapiens
taaagggctgatatc

SEQ ID NO: 666431 - DNA, 15 bp, Homo sapiens
aaagggctgatatct

SEQ ID NO: 666432 - DNA, 15 bp, Homo sapiens
aagggctgatatctg

SEQ ID NO: 666433 - DNA, 15 bp, Homo sapiens
agggctgatatctga

SEQ ID NO: 666434 - DNA, 15 bp, Homo sapiens
gggctgatatctgag

SEQ ID NO: 666435 - DNA, 15 bp, Homo sapiens
ggctgatatctgagc

SEQ ID NO: 666436 - DNA, 15 bp, Homo sapiens
gctgatatctgagcc

SEQ ID NO: 666437 - DNA, 15 bp, Homo sapiens
ctgatatctgagccc

SEQ ID NO: 666438 - DNA, 15 bp, Homo sapiens
tgatatctgagccct

SEQ ID NO: 666439 - DNA, 15 bp, Homo sapiens
gatatctgagccctc

SEQ ID NO: 666440 - DNA, 15 bp, Homo sapiens
atatctgagccctct

SEQ ID NO: 666441 - DNA, 15 bp, Homo sapiens
tatctgagccctctt

SEQ ID NO: 666442 - DNA, 15 bp, Homo sapiens
atctgagccctcttt

SEQ ID NO: 666443 - DNA, 15 bp, Homo sapiens
tctgagccctctttc

SEQ ID NO: 666444 - DNA, 15 bp, Homo sapiens
ctgagccctctttcc

SEQ ID NO: 666445 - DNA, 15 bp, Homo sapiens
tgagccctctttcca

SEQ ID NO: 666446 - DNA, 15 bp, Homo sapiens
gagccctctttccaa

SEQ ID NO: 666447 - DNA, 15 bp, Homo sapiens
agccctctttccaat

SEQ ID NO: 666448 - DNA, 15 bp, Homo sapiens
gccctctttccaatc

SEQ ID NO: 666449 - DNA, 15 bp, Homo sapiens
ccctctttccaatca

SEQ ID NO: 666450 - DNA, 15 bp, Homo sapiens
cctctttccaatcat

SEQ ID NO: 666451 - DNA, 15 bp, Homo sapiens
ctctttccaatcatc

SEQ ID NO: 666452 - DNA, 15 bp, Homo sapiens
tctttccaatcatcc

SEQ ID NO: 666453 - DNA, 15 bp, Homo sapiens
ctttccaatcatcca

SEQ ID NO: 666454 - DNA, 15 bp, Homo sapiens
tttccaatcatccac

SEQ ID NO: 666455 - DNA, 15 bp, Homo sapiens
ttccaatcatccact

SEQ ID NO: 666456 - DNA, 15 bp, Homo sapiens
tccaatcatccactg

SEQ ID NO: 666457 - DNA, 15 bp, Homo sapiens
ccaatcatccactgc

SEQ ID NO: 666458 - DNA, 15 bp, Homo sapiens
caatcatccactgct

SEQ ID NO: 666459 - DNA, 15 bp, Homo sapiens
aatcatccactgctc

SEQ ID NO: 666460 - DNA, 15 bp, Homo sapiens
atcatccactgctct

SEQ ID NO: 666461 - DNA, 15 bp, Homo sapiens
tcatccactgctctt

SEQ ID NO: 666462 - DNA, 15 bp, Homo sapiens
catccactgctcttt

SEQ ID NO: 666463 - DNA, 15 bp, Homo sapiens
atccactgctctttt

SEQ ID NO: 666464 - DNA, 15 bp, Homo sapiens
tccactgctcttttc

SEQ ID NO: 666465 - DNA, 15 bp, Homo sapiens
ccactgctcttttct

SEQ ID NO: 666466 - DNA, 15 bp, Homo sapiens
cactgctcttttctt

SEQ ID NO: 666467 - DNA, 15 bp, Homo sapiens
actgctcttttcttc

SEQ ID NO: 666468 - DNA, 15 bp, Homo sapiens
ctgctcttttcttct

SEQ ID NO: 666469 - DNA, 15 bp, Homo sapiens
tgctcttttcttctc

SEQ ID NO: 666470 - DNA, 15 bp, Homo sapiens
gctcttttcttctca

SEQ ID NO: 666471 - DNA, 15 bp, Homo sapiens
ctcttttcttctcat

SEQ ID NO: 666472 - DNA, 15 bp, Homo sapiens
tcttttcttctcatt

SEQ ID NO: 666473 - DNA, 15 bp, Homo sapiens
cttttcttctcattt

SEQ ID NO: 666474 - DNA, 15 bp, Homo sapiens
ttttcttctcatttt

SEQ ID NO: 666475 - DNA, 15 bp, Homo sapiens
tttcttctcattttg

SEQ ID NO: 666476 - DNA, 15 bp, Homo sapiens
ttcttctcattttgc

SEQ ID NO: 666477 - DNA, 15 bp, Homo sapiens
tcttctcattttgcc

SEQ ID NO: 666478 - DNA, 15 bp, Homo sapiens
cttctcattttgccc

SEQ ID NO: 666479 - DNA, 15 bp, Homo sapiens
ttctcattttgccct

SEQ ID NO: 666480 - DNA, 15 bp, Homo sapiens
tctcattttgccctt

SEQ ID NO: 666481 - DNA, 15 bp, Homo sapiens
ctcattttgcccttt

SEQ ID NO: 666482 - DNA, 15 bp, Homo sapiens
tcattttgccctttt

SEQ ID NO: 666483 - DNA, 15 bp, Homo sapiens
cattttgcccttttt

SEQ ID NO: 666484 - DNA, 15 bp, Homo sapiens
attttgccctttttg

SEQ ID NO: 666485 - DNA, 15 bp, Homo sapiens
ttttgccctttttgg

SEQ ID NO: 666486 - DNA, 15 bp, Homo sapiens
tttgccctttttggg

SEQ ID NO: 666487 - DNA, 15 bp, Homo sapiens
ttgccctttttggga

SEQ ID NO: 666488 - DNA, 15 bp, Homo sapiens
tgccctttttgggag

SEQ ID NO: 666489 - DNA, 15 bp, Homo sapiens
gccctttttgggagc

SEQ ID NO: 666490 - DNA, 15 bp, Homo sapiens
ccctttttgggagca

SEQ ID NO: 666491 - DNA, 15 bp, Homo sapiens
cctttttgggagcag

SEQ ID NO: 666492 - DNA, 15 bp, Homo sapiens
ctttttgggagcagg

SEQ ID NO: 666493 - DNA, 15 bp, Homo sapiens
tttttgggagcaggt

SEQ ID NO: 666494 - DNA, 15 bp, Homo sapiens
ttttgggagcaggtc

SEQ ID NO: 666495 - DNA, 15 bp, Homo sapiens
tttgggagcaggtca

SEQ ID NO: 666496 - DNA, 15 bp, Homo sapiens
ttgggagcaggtcaa

SEQ ID NO: 666497 - DNA, 15 bp, Homo sapiens
tgggagcaggtcaat

SEQ ID NO: 666498 - DNA, 15 bp, Homo sapiens
gggagcaggtcaatg

SEQ ID NO: 666499 - DNA, 15 bp, Homo sapiens
ggagcaggtcaatgc

SEQ ID NO: 666500 - DNA, 15 bp, Homo sapiens
gagcaggtcaatgct

SEQ ID NO: 666501 - DNA, 15 bp, Homo sapiens
agcaggtcaatgctg

SEQ ID NO: 666502 - DNA, 15 bp, Homo sapiens
gcaggtcaatgctga

SEQ ID NO: 666503 - DNA, 15 bp, Homo sapiens
caggtcaatgctgag

SEQ ID NO: 666504 - DNA, 15 bp, Homo sapiens
aggtcaatgctgagt

SEQ ID NO: 666505 - DNA, 15 bp, Homo sapiens
ggtcaatgctgagtt

SEQ ID NO: 666506 - DNA, 15 bp, Homo sapiens
gtcaatgctgagtta

SEQ ID NO: 666507 - DNA, 15 bp, Homo sapiens
tcaatgctgagttag

SEQ ID NO: 666508 - DNA, 15 bp, Homo sapiens
caatgctgagttagt

SEQ ID NO: 666509 - DNA, 15 bp, Homo sapiens
aatgctgagttagta

SEQ ID NO: 666510 - DNA, 15 bp, Homo sapiens
atgctgagttagtac

SEQ ID NO: 666511 - DNA, 15 bp, Homo sapiens
tgctgagttagtact

SEQ ID NO: 666512 - DNA, 15 bp, Homo sapiens
gctgagttagtactt

SEQ ID NO: 666513 - DNA, 15 bp, Homo sapiens
ctgagttagtacttt

SEQ ID NO: 666514 - DNA, 15 bp, Homo sapiens
tgagttagtacttta

SEQ ID NO: 666515 - DNA, 15 bp, Homo sapiens
gagttagtactttat

SEQ ID NO: 666516 - DNA, 15 bp, Homo sapiens
agttagtactttatg

SEQ ID NO: 666517 - DNA, 15 bp, Homo sapiens
gttagtactttatgc

SEQ ID NO: 666518 - DNA, 15 bp, Homo sapiens
ttagtactttatgct

SEQ ID NO: 666519 - DNA, 15 bp, Homo sapiens
tagtactttatgctg

SEQ ID NO: 666520 - DNA, 15 bp, Homo sapiens
agtactttatgctgt

SEQ ID NO: 666521 - DNA, 15 bp, Homo sapiens
gtactttatgctgta

SEQ ID NO: 666522 - DNA, 15 bp, Homo sapiens
tactttatgctgtac

SEQ ID NO: 666523 - DNA, 15 bp, Homo sapiens
actttatgctgtaca

SEQ ID NO: 666524 - DNA, 15 bp, Homo sapiens
ctttatgctgtacaa

SEQ ID NO: 666525 - DNA, 15 bp, Homo sapiens
tttatgctgtacaat

SEQ ID NO: 666526 - DNA, 15 bp, Homo sapiens
ttatgctgtacaata

SEQ ID NO: 666527 - DNA, 15 bp, Homo sapiens
tatgctgtacaataa

SEQ ID NO: 666528 - DNA, 15 bp, Homo sapiens
atgctgtacaataag

SEQ ID NO: 666529 - DNA, 15 bp, Homo sapiens
tgctgtacaataagc

SEQ ID NO: 666530 - DNA, 15 bp, Homo sapiens
gctgtacaataagct

SEQ ID NO: 666531 - DNA, 15 bp, Homo sapiens
ctgtacaataagctg

SEQ ID NO: 666532 - DNA, 15 bp, Homo sapiens
tgtacaataagctgc

SEQ ID NO: 666533 - DNA, 15 bp, Homo sapiens
gtacaataagctgct

SEQ ID NO: 666534 - DNA, 15 bp, Homo sapiens
tacaataagctgctg

SEQ ID NO: 666535 - DNA, 15 bp, Homo sapiens
acaataagctgctga

SEQ ID NO: 666536 - DNA, 15 bp, Homo sapiens
caataagctgctgat

SEQ ID NO: 666537 - DNA, 15 bp, Homo sapiens
aataagctgctgata

SEQ ID NO: 666538 - DNA, 15 bp, Homo sapiens
ataagctgctgatat

SEQ ID NO: 666539 - DNA, 15 bp, Homo sapiens
taagctgctgatatt

SEQ ID NO: 666540 - DNA, 15 bp, Homo sapiens
aagctgctgatattc

SEQ ID NO: 666541 - DNA, 15 bp, Homo sapiens
agctgctgatattcc

SEQ ID NO: 666542 - DNA, 15 bp, Homo sapiens
gctgctgatattcca

SEQ ID NO: 666543 - DNA, 15 bp, Homo sapiens
ctgctgatattccat

SEQ ID NO: 666544 - DNA, 15 bp, Homo sapiens
tgctgatattccatg

SEQ ID NO: 666545 - DNA, 15 bp, Homo sapiens
gctgatattccatgc

SEQ ID NO: 666546 - DNA, 15 bp, Homo sapiens
ctgatattccatgct

SEQ ID NO: 666547 - DNA, 15 bp, Homo sapiens
tgatattccatgctg

SEQ ID NO: 666548 - DNA, 15 bp, Homo sapiens
gatattccatgctgg

SEQ ID NO: 666549 - DNA, 15 bp, Homo sapiens
atattccatgctgga

SEQ ID NO: 666550 - DNA, 15 bp, Homo sapiens
tattccatgctggac

SEQ ID NO: 666551 - DNA, 15 bp, Homo sapiens
attccatgctggaca

SEQ ID NO: 666552 - DNA, 15 bp, Homo sapiens
ttccatgctggacag

SEQ ID NO: 666553 - DNA, 15 bp, Homo sapiens
tccatgctggacaga

SEQ ID NO: 666554 - DNA, 15 bp, Homo sapiens
ccatgctggacagaa

SEQ ID NO: 666555 - DNA, 15 bp, Homo sapiens
catgctggacagaat

SEQ ID NO: 666556 - DNA, 15 bp, Homo sapiens
atgctggacagaatt

SEQ ID NO: 666557 - DNA, 15 bp, Homo sapiens
tgctggacagaattt

SEQ ID NO: 666558 - DNA, 15 bp, Homo sapiens
gctggacagaatttt

SEQ ID NO: 666559 - DNA, 15 bp, Homo sapiens
ctggacagaattttc

SEQ ID NO: 666560 - DNA, 15 bp, Homo sapiens
tggacagaattttcc

SEQ ID NO: 666561 - DNA, 15 bp, Homo sapiens
ggacagaattttccc

SEQ ID NO: 666562 - DNA, 15 bp, Homo sapiens
gacagaattttccca

SEQ ID NO: 666563 - DNA, 15 bp, Homo sapiens
acagaattttcccag

SEQ ID NO: 666564 - DNA, 15 bp, Homo sapiens
cagaattttcccagt

SEQ ID NO: 666565 - DNA, 15 bp, Homo sapiens
agaattttcccagta

SEQ ID NO: 666566 - DNA, 15 bp, Homo sapiens
gaattttcccagtat

SEQ ID NO: 666567 - DNA, 15 bp, Homo sapiens
aattttcccagtatt

SEQ ID NO: 666568 - DNA, 15 bp, Homo sapiens
attttcccagtattt

SEQ ID NO: 666569 - DNA, 15 bp, Homo sapiens
ttttcccagtatttt

SEQ ID NO: 666570 - DNA, 15 bp, Homo sapiens
tttcccagtattttt

SEQ ID NO: 666571 - DNA, 15 bp, Homo sapiens
ttcccagtatttttt

SEQ ID NO: 666572 - DNA, 15 bp, Homo sapiens
tcccagtatttttta

SEQ ID NO: 666573 - DNA, 15 bp, Homo sapiens
cccagtattttttat

SEQ ID NO: 666574 - DNA, 15 bp, Homo sapiens
ccagtattttttata

SEQ ID NO: 666575 - DNA, 15 bp, Homo sapiens
cagtattttttatag

SEQ ID NO: 666576 - DNA, 15 bp, Homo sapiens
agtattttttataga

SEQ ID NO: 666577 - DNA, 15 bp, Homo sapiens
gtattttttatagag

SEQ ID NO: 666578 - DNA, 15 bp, Homo sapiens
tattttttatagagt

SEQ ID NO: 666579 - DNA, 15 bp, Homo sapiens
attttttatagagtg

SEQ ID NO: 666580 - DNA, 15 bp, Homo sapiens
ttttttatagagtgc

SEQ ID NO: 666581 - DNA, 15 bp, Homo sapiens
tttttatagagtgcc

SEQ ID NO: 666582 - DNA, 15 bp, Homo sapiens
ttttatagagtgcca

SEQ ID NO: 666583 - DNA, 15 bp, Homo sapiens
tttatagagtgccag

SEQ ID NO: 666584 - DNA, 15 bp, Homo sapiens
ttatagagtgccagg

SEQ ID NO: 666585 - DNA, 15 bp, Homo sapiens
tatagagtgccaggc

SEQ ID NO: 666586 - DNA, 15 bp, Homo sapiens
atagagtgccaggct

SEQ ID NO: 666587 - DNA, 15 bp, Homo sapiens
tagagtgccaggctt

SEQ ID NO: 666588 - DNA, 15 bp, Homo sapiens
agagtgccaggcttt

SEQ ID NO: 666589 - DNA, 15 bp, Homo sapiens
gagtgccaggctttt

SEQ ID NO: 666590 - DNA, 15 bp, Homo sapiens
agtgccaggcttttc

SEQ ID NO: 666591 - DNA, 15 bp, Homo sapiens
gtgccaggcttttcc

SEQ ID NO: 666592 - DNA, 15 bp, Homo sapiens
tgccaggcttttcct

SEQ ID NO: 666593 - DNA, 15 bp, Homo sapiens
gccaggcttttccta

SEQ ID NO: 666594 - DNA, 15 bp, Homo sapiens
ccaggcttttcctag

SEQ ID NO: 666595 - DNA, 15 bp, Homo sapiens
caggcttttcctaga

SEQ ID NO: 666596 - DNA, 15 bp, Homo sapiens
aggcttttcctagac

SEQ ID NO: 666597 - DNA, 15 bp, Homo sapiens
ggcttttcctagact

SEQ ID NO: 666598 - DNA, 15 bp, Homo sapiens
gcttttcctagactt

SEQ ID NO: 666599 - DNA, 15 bp, Homo sapiens
cttttcctagacttc

SEQ ID NO: 666600 - DNA, 15 bp, Homo sapiens
ttttcctagacttca

SEQ ID NO: 666601 - DNA, 15 bp, Homo sapiens
tttcctagacttcat

SEQ ID NO: 666602 - DNA, 15 bp, Homo sapiens
ttcctagacttcatg

SEQ ID NO: 666603 - DNA, 15 bp, Homo sapiens
tcctagacttcatgt

SEQ ID NO: 666604 - DNA, 15 bp, Homo sapiens
cctagacttcatgtc

SEQ ID NO: 666605 - DNA, 15 bp, Homo sapiens
ctagacttcatgtca

SEQ ID NO: 666606 - DNA, 15 bp, Homo sapiens
tagacttcatgtcat

SEQ ID NO: 666607 - DNA, 15 bp, Homo sapiens
agacttcatgtcata

SEQ ID NO: 666608 - DNA, 15 bp, Homo sapiens
gacttcatgtcatac

SEQ ID NO: 666609 - DNA, 15 bp, Homo sapiens
acttcatgtcataca

SEQ ID NO: 666610 - DNA, 15 bp, Homo sapiens
cttcatgtcatacaa

SEQ ID NO: 666611 - DNA, 15 bp, Homo sapiens
ttcatgtcatacaat

SEQ ID NO: 666612 - DNA, 15 bp, Homo sapiens
tcatgtcatacaata

SEQ ID NO: 666613 - DNA, 15 bp, Homo sapiens
catgtcatacaatac

SEQ ID NO: 666614 - DNA, 15 bp, Homo sapiens
atgtcatacaatact

SEQ ID NO: 666615 - DNA, 15 bp, Homo sapiens
tgtcatacaatactt

SEQ ID NO: 666616 - DNA, 15 bp, Homo sapiens
gtcatacaatactta

SEQ ID NO: 666617 - DNA, 15 bp, Homo sapiens
tcatacaatacttaa

SEQ ID NO: 666618 - DNA, 15 bp, Homo sapiens
catacaatacttaac

SEQ ID NO: 666619 - DNA, 15 bp, Homo sapiens
atacaatacttaact

SEQ ID NO: 666620 - DNA, 15 bp, Homo sapiens
tacaatacttaactt

SEQ ID NO: 666621 - DNA, 15 bp, Homo sapiens
acaatacttaacttg

SEQ ID NO: 666622 - DNA, 15 bp, Homo sapiens
caatacttaacttgt

SEQ ID NO: 666623 - DNA, 15 bp, Homo sapiens
aatacttaacttgtt

SEQ ID NO: 666624 - DNA, 15 bp, Homo sapiens
atacttaacttgttt

SEQ ID NO: 666625 - DNA, 15 bp, Homo sapiens
tacttaacttgtttg

SEQ ID NO: 666626 - DNA, 15 bp, Homo sapiens
acttaacttgtttgg

SEQ ID NO: 666627 - DNA, 15 bp, Homo sapiens
cttaacttgtttgga

SEQ ID NO: 666628 - DNA, 15 bp, Homo sapiens
ttaacttgtttggag

SEQ ID NO: 666629 - DNA, 15 bp, Homo sapiens
taacttgtttggagt

SEQ ID NO: 666630 - DNA, 15 bp, Homo sapiens
aacttgtttggagtg

SEQ ID NO: 666631 - DNA, 15 bp, Homo sapiens
acttgtttggagtgg

SEQ ID NO: 666632 - DNA, 15 bp, Homo sapiens
cttgtttggagtggg

SEQ ID NO: 666633 - DNA, 15 bp, Homo sapiens
ttgtttggagtgggt

SEQ ID NO: 666634 - DNA, 15 bp, Homo sapiens
tgtttggagtgggtg

SEQ ID NO: 666635 - DNA, 15 bp, Homo sapiens
gtttggagtgggtgg

SEQ ID NO: 666636 - DNA, 15 bp, Homo sapiens
tttggagtgggtgga

SEQ ID NO: 666637 - DNA, 15 bp, Homo sapiens
ttggagtgggtggag

SEQ ID NO: 666638 - DNA, 15 bp, Homo sapiens
tggagtgggtggaga

SEQ ID NO: 666639 - DNA, 15 bp, Homo sapiens
ggagtgggtggagat

SEQ ID NO: 666640 - DNA, 15 bp, Homo sapiens
gagtgggtggagatg

SEQ ID NO: 666641 - DNA, 15 bp, Homo sapiens
agtgggtggagatgg

SEQ ID NO: 666642 - DNA, 15 bp, Homo sapiens
gtgggtggagatgga

SEQ ID NO: 666643 - DNA, 15 bp, Homo sapiens
tgggtggagatggaa

SEQ ID NO: 666644 - DNA, 15 bp, Homo sapiens
gggtggagatggaaa

SEQ ID NO: 666645 - DNA, 15 bp, Homo sapiens
ggtggagatggaaac

SEQ ID NO: 666646 - DNA, 15 bp, Homo sapiens
gtggagatggaaaca

SEQ ID NO: 666647 - DNA, 15 bp, Homo sapiens
tggagatggaaacat

SEQ ID NO: 666648 - DNA, 15 bp, Homo sapiens
ggagatggaaacata

SEQ ID NO: 666649 - DNA, 15 bp, Homo sapiens
gagatggaaacatag

SEQ ID NO: 666650 - DNA, 15 bp, Homo sapiens
agatggaaacatagt

SEQ ID NO: 666651 - DNA, 15 bp, Homo sapiens
gatggaaacatagtc

SEQ ID NO: 666652 - DNA, 15 bp, Homo sapiens
atggaaacatagtct

SEQ ID NO: 666653 - DNA, 15 bp, Homo sapiens
tggaaacatagtcta

SEQ ID NO: 666654 - DNA, 15 bp, Homo sapiens
ggaaacatagtctat

SEQ ID NO: 666655 - DNA, 15 bp, Homo sapiens
gaaacatagtctatt

SEQ ID NO: 666656 - DNA, 15 bp, Homo sapiens
aaacatagtctattg

SEQ ID NO: 666657 - DNA, 15 bp, Homo sapiens
aacatagtctattga

SEQ ID NO: 666658 - DNA, 15 bp, Homo sapiens
acatagtctattgaa

SEQ ID NO: 666659 - DNA, 15 bp, Homo sapiens
catagtctattgaaa

SEQ ID NO: 666660 - DNA, 15 bp, Homo sapiens
atagtctattgaaaa

SEQ ID NO: 666661 - DNA, 15 bp, Homo sapiens
tagtctattgaaaac

SEQ ID NO: 666662 - DNA, 15 bp, Homo sapiens
agtctattgaaaaca

SEQ ID NO: 666663 - DNA, 15 bp, Homo sapiens
gtctattgaaaacat

SEQ ID NO: 666664 - DNA, 15 bp, Homo sapiens
tctattgaaaacatc

SEQ ID NO: 666665 - DNA, 15 bp, Homo sapiens
ctattgaaaacatca

SEQ ID NO: 666666 - DNA, 15 bp, Homo sapiens
tattgaaaacatcac

SEQ ID NO: 666667 - DNA, 15 bp, Homo sapiens
attgaaaacatcact

SEQ ID NO: 666668 - DNA, 15 bp, Homo sapiens
ttgaaaacatcactg

SEQ ID NO: 666669 - DNA, 15 bp, Homo sapiens
tgaaaacatcactgc

SEQ ID NO: 666670 - DNA, 15 bp, Homo sapiens
gaaaacatcactgct

SEQ ID NO: 666671 - DNA, 15 bp, Homo sapiens
aaaacatcactgctt

SEQ ID NO: 666672 - DNA, 15 bp, Homo sapiens
aaacatcactgcttc

SEQ ID NO: 666673 - DNA, 15 bp, Homo sapiens
aacatcactgcttcc

SEQ ID NO: 666674 - DNA, 15 bp, Homo sapiens
acatcactgcttcct

SEQ ID NO: 666675 - DNA, 15 bp, Homo sapiens
catcactgcttcctc

SEQ ID NO: 666676 - DNA, 15 bp, Homo sapiens
atcactgcttcctcc

SEQ ID NO: 666677 - DNA, 15 bp, Homo sapiens
tcactgcttcctccc

SEQ ID NO: 666678 - DNA, 15 bp, Homo sapiens
cactgcttcctccct

SEQ ID NO: 666679 - DNA, 15 bp, Homo sapiens
actgcttcctccctg

SEQ ID NO: 666680 - DNA, 15 bp, Homo sapiens
ctgcttcctccctga

SEQ ID NO: 666681 - DNA, 15 bp, Homo sapiens
tgcttcctccctgaa

SEQ ID NO: 666682 - DNA, 15 bp, Homo sapiens
gcttcctccctgaag

SEQ ID NO: 666683 - DNA, 15 bp, Homo sapiens
cttcctccctgaagt

SEQ ID NO: 666684 - DNA, 15 bp, Homo sapiens
ttcctccctgaagtt

SEQ ID NO: 666685 - DNA, 15 bp, Homo sapiens
tcctccctgaagttt

SEQ ID NO: 666686 - DNA, 15 bp, Homo sapiens
cctccctgaagttta

SEQ ID NO: 666687 - DNA, 15 bp, Homo sapiens
ctccctgaagtttaa

SEQ ID NO: 666688 - DNA, 15 bp, Homo sapiens
tccctgaagtttaaa

SEQ ID NO: 666689 - DNA, 15 bp, Homo sapiens
ccctgaagtttaaag

SEQ ID NO: 666690 - DNA, 15 bp, Homo sapiens
cctgaagtttaaaga

SEQ ID NO: 666691 - DNA, 15 bp, Homo sapiens
ctgaagtttaaagag

SEQ ID NO: 666692 - DNA, 15 bp, Homo sapiens
tgaagtttaaagagc

SEQ ID NO: 666693 - DNA, 15 bp, Homo sapiens
gaagtttaaagagcc

SEQ ID NO: 666694 - DNA, 15 bp, Homo sapiens
aagtttaaagagcct

SEQ ID NO: 666695 - DNA, 15 bp, Homo sapiens
agtttaaagagccta

SEQ ID NO: 666696 - DNA, 15 bp, Homo sapiens
gtttaaagagcctat

SEQ ID NO: 666697 - DNA, 15 bp, Homo sapiens
tttaaagagcctatt

SEQ ID NO: 666698 - DNA, 15 bp, Homo sapiens
ttaaagagcctattt

SEQ ID NO: 666699 - DNA, 15 bp, Homo sapiens
taaagagcctatttt

SEQ ID NO: 666700 - DNA, 15 bp, Homo sapiens
aaagagcctattttt

SEQ ID NO: 666701 - DNA, 15 bp, Homo sapiens
aagagcctattttta

SEQ ID NO: 666702 - DNA, 15 bp, Homo sapiens
agagcctatttttat

SEQ ID NO: 666703 - DNA, 15 bp, Homo sapiens
gagcctatttttatc

SEQ ID NO: 666704 - DNA, 15 bp, Homo sapiens
agcctatttttatcc

SEQ ID NO: 666705 - DNA, 15 bp, Homo sapiens
gcctatttttatcct

SEQ ID NO: 666706 - DNA, 15 bp, Homo sapiens
cctatttttatcctt

SEQ ID NO: 666707 - DNA, 15 bp, Homo sapiens
ctatttttatccttt

SEQ ID NO: 666708 - DNA, 15 bp, Homo sapiens
tatttttatcctttt

SEQ ID NO: 666709 - DNA, 15 bp, Homo sapiens
atttttatcctttta

SEQ ID NO: 666710 - DNA, 15 bp, Homo sapiens
tttttatccttttag

SEQ ID NO: 666711 - DNA, 15 bp, Homo sapiens
ttttatccttttaga

SEQ ID NO: 666712 - DNA, 15 bp, Homo sapiens
tttatccttttagat

SEQ ID NO: 666713 - DNA, 15 bp, Homo sapiens
ttatccttttagatt

SEQ ID NO: 666714 - DNA, 15 bp, Homo sapiens
tatccttttagattc

SEQ ID NO: 666715 - DNA, 15 bp, Homo sapiens
atccttttagattct

SEQ ID NO: 666716 - DNA, 15 bp, Homo sapiens
tccttttagattcta

SEQ ID NO: 666717 - DNA, 15 bp, Homo sapiens
ccttttagattctat

SEQ ID NO: 666718 - DNA, 15 bp, Homo sapiens
cttttagattctatc

SEQ ID NO: 666719 - DNA, 15 bp, Homo sapiens
ttttagattctatct

SEQ ID NO: 666720 - DNA, 15 bp, Homo sapiens
tttagattctatctc

SEQ ID NO: 666721 - DNA, 15 bp, Homo sapiens
ttagattctatctct

SEQ ID NO: 666722 - DNA, 15 bp, Homo sapiens
tagattctatctctc

SEQ ID NO: 666723 - DNA, 15 bp, Homo sapiens
agattctatctctca

SEQ ID NO: 666724 - DNA, 15 bp, Homo sapiens
gattctatctctcag

SEQ ID NO: 666725 - DNA, 15 bp, Homo sapiens
attctatctctcagg

SEQ ID NO: 666726 - DNA, 15 bp, Homo sapiens
ttctatctctcaggc

SEQ ID NO: 666727 - DNA, 15 bp, Homo sapiens
tctatctctcaggca

SEQ ID NO: 666728 - DNA, 15 bp, Homo sapiens
ctatctctcaggcaa

SEQ ID NO: 666729 - DNA, 15 bp, Homo sapiens
tatctctcaggcaaa

SEQ ID NO: 666730 - DNA, 15 bp, Homo sapiens
atctctcaggcaaaa

SEQ ID NO: 666731 - DNA, 15 bp, Homo sapiens
tctctcaggcaaaat

SEQ ID NO: 666732 - DNA, 15 bp, Homo sapiens
ctctcaggcaaaatc

SEQ ID NO: 666733 - DNA, 15 bp, Homo sapiens
tctcaggcaaaatct

SEQ ID NO: 666734 - DNA, 15 bp, Homo sapiens
ctcaggcaaaatctc

SEQ ID NO: 666735 - DNA, 15 bp, Homo sapiens
tcaggcaaaatctca

SEQ ID NO: 666736 - DNA, 15 bp, Homo sapiens
caggcaaaatctcat

SEQ ID NO: 666737 - DNA, 15 bp, Homo sapiens
aggcaaaatctcata

SEQ ID NO: 666738 - DNA, 15 bp, Homo sapiens
ggcaaaatctcataa

SEQ ID NO: 666739 - DNA, 15 bp, Homo sapiens
gcaaaatctcataaa

SEQ ID NO: 666740 - DNA, 15 bp, Homo sapiens
caaaatctcataaag

SEQ ID NO: 666741 - DNA, 15 bp, Homo sapiens
aaaatctcataaaga

SEQ ID NO: 666742 - DNA, 15 bp, Homo sapiens
aaatctcataaagat

SEQ ID NO: 666743 - DNA, 15 bp, Homo sapiens
aatctcataaagata

SEQ ID NO: 666744 - DNA, 15 bp, Homo sapiens
atctcataaagataa

SEQ ID NO: 666745 - DNA, 15 bp, Homo sapiens
tctcataaagataag

SEQ ID NO: 666746 - DNA, 15 bp, Homo sapiens
ctcataaagataagt

SEQ ID NO: 666747 - DNA, 15 bp, Homo sapiens
tcataaagataagtg

SEQ ID NO: 666748 - DNA, 15 bp, Homo sapiens
cataaagataagtgg

SEQ ID NO: 666749 - DNA, 15 bp, Homo sapiens
ataaagataagtggg

SEQ ID NO: 666750 - DNA, 15 bp, Homo sapiens
taaagataagtgggg

SEQ ID NO: 666751 - DNA, 15 bp, Homo sapiens
aaagataagtgggga

SEQ ID NO: 666752 - DNA, 15 bp, Homo sapiens
aagataagtggggag

SEQ ID NO: 666753 - DNA, 15 bp, Homo sapiens
agataagtggggagg

SEQ ID NO: 666754 - DNA, 15 bp, Homo sapiens
gataagtggggagga

SEQ ID NO: 666755 - DNA, 15 bp, Homo sapiens
ataagtggggaggaa

SEQ ID NO: 666756 - DNA, 15 bp, Homo sapiens
taagtggggaggaaa

SEQ ID NO: 666757 - DNA, 15 bp, Homo sapiens
aagtggggaggaaaa

SEQ ID NO: 666758 - DNA, 15 bp, Homo sapiens
agtggggaggaaaaa

SEQ ID NO: 666759 - DNA, 15 bp, Homo sapiens
gtggggaggaaaaaa

SEQ ID NO: 666760 - DNA, 15 bp, Homo sapiens
tggggaggaaaaaaa

SEQ ID NO: 666761 - DNA, 15 bp, Homo sapiens
ggggaggaaaaaaag

SEQ ID NO: 666762 - DNA, 15 bp, Homo sapiens
gggaggaaaaaaagg

SEQ ID NO: 666763 - DNA, 15 bp, Homo sapiens
ggaggaaaaaaaggg

SEQ ID NO: 666764 - DNA, 15 bp, Homo sapiens
gaggaaaaaaagggg

SEQ ID NO: 666765 - DNA, 15 bp, Homo sapiens
aggaaaaaaaggggg

SEQ ID NO: 666766 - DNA, 15 bp, Homo sapiens
ggaaaaaaagggggt

SEQ ID NO: 666767 - DNA, 15 bp, Homo sapiens
gaaaaaaagggggtt

SEQ ID NO: 666768 - DNA, 15 bp, Homo sapiens
aaaaaaagggggtta

SEQ ID NO: 666769 - DNA, 15 bp, Homo sapiens
aaaaaagggggttat

SEQ ID NO: 666770 - DNA, 15 bp, Homo sapiens
aaaaagggggttata

SEQ ID NO: 666771 - DNA, 15 bp, Homo sapiens
aaaagggggttataa

SEQ ID NO: 666772 - DNA, 15 bp, Homo sapiens
aaagggggttataat

SEQ ID NO: 666773 - DNA, 15 bp, Homo sapiens
aagggggttataata

SEQ ID NO: 666774 - DNA, 15 bp, Homo sapiens
agggggttataatac

SEQ ID NO: 666775 - DNA, 15 bp, Homo sapiens
gggggttataatacc

SEQ ID NO: 666776 - DNA, 15 bp, Homo sapiens
ggggttataatacct

SEQ ID NO: 666777 - DNA, 15 bp, Homo sapiens
gggttataataccta

SEQ ID NO: 666778 - DNA, 15 bp, Homo sapiens
ggttataatacctag

SEQ ID NO: 666779 - DNA, 15 bp, Homo sapiens
gttataatacctagg

SEQ ID NO: 666780 - DNA, 15 bp, Homo sapiens
ttataatacctaggg

SEQ ID NO: 666781 - DNA, 15 bp, Homo sapiens
tataatacctaggga

SEQ ID NO: 666782 - DNA, 15 bp, Homo sapiens
ataatacctagggag

SEQ ID NO: 666783 - DNA, 15 bp, Homo sapiens
taatacctagggagt

SEQ ID NO: 666784 - DNA, 15 bp, Homo sapiens
aatacctagggagtt

SEQ ID NO: 666785 - DNA, 15 bp, Homo sapiens
atacctagggagttt

SEQ ID NO: 666786 - DNA, 15 bp, Homo sapiens
tacctagggagtttg

SEQ ID NO: 666787 - DNA, 15 bp, Homo sapiens
acctagggagtttgc

SEQ ID NO: 666788 - DNA, 15 bp, Homo sapiens
cctagggagtttgct

SEQ ID NO: 666789 - DNA, 15 bp, Homo sapiens
ctagggagtttgctt

SEQ ID NO: 666790 - DNA, 15 bp, Homo sapiens
tagggagtttgcttt

SEQ ID NO: 666791 - DNA, 15 bp, Homo sapiens
agggagtttgctttt

SEQ ID NO: 666792 - DNA, 15 bp, Homo sapiens
gggagtttgcttttg

SEQ ID NO: 666793 - DNA, 15 bp, Homo sapiens
ggagtttgcttttgc

SEQ ID NO: 666794 - DNA, 15 bp, Homo sapiens
gagtttgcttttgct

SEQ ID NO: 666795 - DNA, 15 bp, Homo sapiens
agtttgcttttgcta

SEQ ID NO: 666796 - DNA, 15 bp, Homo sapiens
gtttgcttttgctaa

SEQ ID NO: 666797 - DNA, 15 bp, Homo sapiens
tttgcttttgctaat

SEQ ID NO: 666798 - DNA, 15 bp, Homo sapiens
ttgcttttgctaatt

SEQ ID NO: 666799 - DNA, 15 bp, Homo sapiens
tgcttttgctaattg

SEQ ID NO: 666800 - DNA, 15 bp, Homo sapiens
gcttttgctaattga

SEQ ID NO: 666801 - DNA, 15 bp, Homo sapiens
cttttgctaattgaa

SEQ ID NO: 666802 - DNA, 15 bp, Homo sapiens
ttttgctaattgaat

SEQ ID NO: 666803 - DNA, 15 bp, Homo sapiens
tttgctaattgaata

SEQ ID NO: 666804 - DNA, 15 bp, Homo sapiens
ttgctaattgaatac

SEQ ID NO: 666805 - DNA, 15 bp, Homo sapiens
tgctaattgaatact

SEQ ID NO: 666806 - DNA, 15 bp, Homo sapiens
gctaattgaatactg

SEQ ID NO: 666807 - DNA, 15 bp, Homo sapiens
ctaattgaatactgt

SEQ ID NO: 666808 - DNA, 15 bp, Homo sapiens
taattgaatactgtg

SEQ ID NO: 666809 - DNA, 15 bp, Homo sapiens
aattgaatactgtgc

SEQ ID NO: 666810 - DNA, 15 bp, Homo sapiens
attgaatactgtgct

SEQ ID NO: 666811 - DNA, 15 bp, Homo sapiens
ttgaatactgtgctc

SEQ ID NO: 666812 - DNA, 15 bp, Homo sapiens
tgaatactgtgctcc

SEQ ID NO: 666813 - DNA, 15 bp, Homo sapiens
gaatactgtgctcct

SEQ ID NO: 666814 - DNA, 15 bp, Homo sapiens
aatactgtgctccta

SEQ ID NO: 666815 - DNA, 15 bp, Homo sapiens
atactgtgctcctag

SEQ ID NO: 666816 - DNA, 15 bp, Homo sapiens
tactgtgctcctaga

SEQ ID NO: 666817 - DNA, 15 bp, Homo sapiens
actgtgctcctagac

SEQ ID NO: 666818 - DNA, 15 bp, Homo sapiens
ctgtgctcctagact

SEQ ID NO: 666819 - DNA, 15 bp, Homo sapiens
tgtgctcctagactt

SEQ ID NO: 666820 - DNA, 15 bp, Homo sapiens
gtgctcctagacttc

SEQ ID NO: 666821 - DNA, 15 bp, Homo sapiens
tgctcctagacttct

SEQ ID NO: 666822 - DNA, 15 bp, Homo sapiens
gctcctagacttcta

SEQ ID NO: 666823 - DNA, 15 bp, Homo sapiens
ctcctagacttctat

SEQ ID NO: 666824 - DNA, 15 bp, Homo sapiens
tcctagacttctata

SEQ ID NO: 666825 - DNA, 15 bp, Homo sapiens
cctagacttctataa

SEQ ID NO: 666826 - DNA, 15 bp, Homo sapiens
ctagacttctataaa

SEQ ID NO: 666827 - DNA, 15 bp, Homo sapiens
tagacttctataaat

SEQ ID NO: 666828 - DNA, 15 bp, Homo sapiens
agacttctataaata

SEQ ID NO: 666829 - DNA, 15 bp, Homo sapiens
gacttctataaatac

SEQ ID NO: 666830 - DNA, 15 bp, Homo sapiens
acttctataaatacc

SEQ ID NO: 666831 - DNA, 15 bp, Homo sapiens
cttctataaatacca

SEQ ID NO: 666832 - DNA, 15 bp, Homo sapiens
ttctataaataccat

SEQ ID NO: 666833 - DNA, 15 bp, Homo sapiens
tctataaataccatt

SEQ ID NO: 666834 - DNA, 15 bp, Homo sapiens
ctataaataccatta

SEQ ID NO: 666835 - DNA, 15 bp, Homo sapiens
tataaataccattac

SEQ ID NO: 666836 - DNA, 15 bp, Homo sapiens
ataaataccattaca

SEQ ID NO: 666837 - DNA, 15 bp, Homo sapiens
taaataccattacaa

SEQ ID NO: 666838 - DNA, 15 bp, Homo sapiens
aaataccattacaaa

SEQ ID NO: 666839 - DNA, 15 bp, Homo sapiens
aataccattacaaat

SEQ ID NO: 666840 - DNA, 15 bp, Homo sapiens
ataccattacaaatg

SEQ ID NO: 666841 - DNA, 15 bp, Homo sapiens
taccattacaaatgg

SEQ ID NO: 666842 - DNA, 15 bp, Homo sapiens
accattacaaatggg

SEQ ID NO: 666843 - DNA, 15 bp, Homo sapiens
ccattacaaatgggt

SEQ ID NO: 666844 - DNA, 15 bp, Homo sapiens
cattacaaatgggtc

SEQ ID NO: 666845 - DNA, 15 bp, Homo sapiens
attacaaatgggtcc

SEQ ID NO: 666846 - DNA, 15 bp, Homo sapiens
ttacaaatgggtccc

SEQ ID NO: 666847 - DNA, 15 bp, Homo sapiens
tacaaatgggtccca

SEQ ID NO: 666848 - DNA, 15 bp, Homo sapiens
acaaatgggtcccag

SEQ ID NO: 666849 - DNA, 15 bp, Homo sapiens
caaatgggtcccagc

SEQ ID NO: 666850 - DNA, 15 bp, Homo sapiens
aaatgggtcccagct

SEQ ID NO: 666851 - DNA, 15 bp, Homo sapiens
aatgggtcccagctt

SEQ ID NO: 666852 - DNA, 15 bp, Homo sapiens
atgggtcccagcttg

SEQ ID NO: 666853 - DNA, 15 bp, Homo sapiens
tgggtcccagcttgt

SEQ ID NO: 666854 - DNA, 15 bp, Homo sapiens
gggtcccagcttgtg

SEQ ID NO: 666855 - DNA, 15 bp, Homo sapiens
ggtcccagcttgtgg

SEQ ID NO: 666856 - DNA, 15 bp, Homo sapiens
gtcccagcttgtggt

SEQ ID NO: 666857 - DNA, 15 bp, Homo sapiens
tcccagcttgtggta

SEQ ID NO: 666858 - DNA, 15 bp, Homo sapiens
cccagcttgtggtaa

SEQ ID NO: 666859 - DNA, 15 bp, Homo sapiens
ccagcttgtggtaat

SEQ ID NO: 666860 - DNA, 15 bp, Homo sapiens
cagcttgtggtaata

SEQ ID NO: 666861 - DNA, 15 bp, Homo sapiens
agcttgtggtaatac

SEQ ID NO: 666862 - DNA, 15 bp, Homo sapiens
gcttgtggtaatact

SEQ ID NO: 666863 - DNA, 15 bp, Homo sapiens
cttgtggtaatactc

SEQ ID NO: 666864 - DNA, 15 bp, Homo sapiens
ttgtggtaatactca

SEQ ID NO: 666865 - DNA, 15 bp, Homo sapiens
tgtggtaatactcac

SEQ ID NO: 666866 - DNA, 15 bp, Homo sapiens
gtggtaatactcacc

SEQ ID NO: 666867 - DNA, 15 bp, Homo sapiens
tggtaatactcaccc

SEQ ID NO: 666868 - DNA, 15 bp, Homo sapiens
ggtaatactcaccct

SEQ ID NO: 666869 - DNA, 15 bp, Homo sapiens
gtaatactcaccctc

SEQ ID NO: 666870 - DNA, 15 bp, Homo sapiens
taatactcaccctcc

SEQ ID NO: 666871 - DNA, 15 bp, Homo sapiens
aatactcaccctcct

SEQ ID NO: 666872 - DNA, 15 bp, Homo sapiens
atactcaccctcctc

SEQ ID NO: 666873 - DNA, 15 bp, Homo sapiens
tactcaccctcctca

SEQ ID NO: 666874 - DNA, 15 bp, Homo sapiens
actcaccctcctcat

SEQ ID NO: 666875 - DNA, 15 bp, Homo sapiens
ctcaccctcctcatt

SEQ ID NO: 666876 - DNA, 15 bp, Homo sapiens
tcaccctcctcattg

SEQ ID NO: 666877 - DNA, 15 bp, Homo sapiens
caccctcctcattga

SEQ ID NO: 666878 - DNA, 15 bp, Homo sapiens
accctcctcattgag

SEQ ID NO: 666879 - DNA, 15 bp, Homo sapiens
ccctcctcattgagt

SEQ ID NO: 666880 - DNA, 15 bp, Homo sapiens
cctcctcattgagtc

SEQ ID NO: 666881 - DNA, 15 bp, Homo sapiens
ctcctcattgagtct

SEQ ID NO: 666882 - DNA, 15 bp, Homo sapiens
tcctcattgagtctt

SEQ ID NO: 666883 - DNA, 15 bp, Homo sapiens
cctcattgagtcttc

SEQ ID NO: 666884 - DNA, 15 bp, Homo sapiens
ctcattgagtcttct

SEQ ID NO: 666885 - DNA, 15 bp, Homo sapiens
tcattgagtcttctg

SEQ ID NO: 666886 - DNA, 15 bp, Homo sapiens
cattgagtcttctgt

SEQ ID NO: 666887 - DNA, 15 bp, Homo sapiens
attgagtcttctgtc

SEQ ID NO: 666888 - DNA, 15 bp, Homo sapiens
ttgagtcttctgtcc

SEQ ID NO: 666889 - DNA, 15 bp, Homo sapiens
tgagtcttctgtccc

SEQ ID NO: 666890 - DNA, 15 bp, Homo sapiens
gagtcttctgtccca

SEQ ID NO: 666891 - DNA, 15 bp, Homo sapiens
agtcttctgtcccat

SEQ ID NO: 666892 - DNA, 15 bp, Homo sapiens
gtcttctgtcccatg

SEQ ID NO: 666893 - DNA, 15 bp, Homo sapiens
tcttctgtcccatgg

SEQ ID NO: 666894 - DNA, 15 bp, Homo sapiens
cttctgtcccatggc

SEQ ID NO: 666895 - DNA, 15 bp, Homo sapiens
ttctgtcccatggca

SEQ ID NO: 666896 - DNA, 15 bp, Homo sapiens
tctgtcccatggcac

SEQ ID NO: 666897 - DNA, 15 bp, Homo sapiens
ctgtcccatggcaca

SEQ ID NO: 666898 - DNA, 15 bp, Homo sapiens
tgtcccatggcacag

SEQ ID NO: 666899 - DNA, 15 bp, Homo sapiens
gtcccatggcacagc

SEQ ID NO: 666900 - DNA, 15 bp, Homo sapiens
tcccatggcacagcc

SEQ ID NO: 666901 - DNA, 15 bp, Homo sapiens
cccatggcacagcct

SEQ ID NO: 666902 - DNA, 15 bp, Homo sapiens
ccatggcacagcctt

SEQ ID NO: 666903 - DNA, 15 bp, Homo sapiens
catggcacagccttt

SEQ ID NO: 666904 - DNA, 15 bp, Homo sapiens
atggcacagcctttc

SEQ ID NO: 666905 - DNA, 15 bp, Homo sapiens
tggcacagcctttcc

SEQ ID NO: 666906 - DNA, 15 bp, Homo sapiens
ggcacagcctttccc

SEQ ID NO: 666907 - DNA, 15 bp, Homo sapiens
gcacagcctttccct

SEQ ID NO: 666908 - DNA, 15 bp, Homo sapiens
cacagcctttccctc

SEQ ID NO: 666909 - DNA, 15 bp, Homo sapiens
acagcctttccctcc

SEQ ID NO: 666910 - DNA, 15 bp, Homo sapiens
cagcctttccctcca

SEQ ID NO: 666911 - DNA, 15 bp, Homo sapiens
agcctttccctccaa

SEQ ID NO: 666912 - DNA, 15 bp, Homo sapiens
gcctttccctccaaa

SEQ ID NO: 666913 - DNA, 15 bp, Homo sapiens
cctttccctccaaac

SEQ ID NO: 666914 - DNA, 15 bp, Homo sapiens
ctttccctccaaact

SEQ ID NO: 666915 - DNA, 15 bp, Homo sapiens
tttccctccaaacta

SEQ ID NO: 666916 - DNA, 15 bp, Homo sapiens
ttccctccaaactag

SEQ ID NO: 666917 - DNA, 15 bp, Homo sapiens
tccctccaaactagc

SEQ ID NO: 666918 - DNA, 15 bp, Homo sapiens
ccctccaaactagca

SEQ ID NO: 666919 - DNA, 15 bp, Homo sapiens
cctccaaactagcat

SEQ ID NO: 666920 - DNA, 15 bp, Homo sapiens
ctccaaactagcatc

SEQ ID NO: 666921 - DNA, 15 bp, Homo sapiens
tccaaactagcatct

SEQ ID NO: 666922 - DNA, 15 bp, Homo sapiens
ccaaactagcatcta

SEQ ID NO: 666923 - DNA, 15 bp, Homo sapiens
caaactagcatctac

SEQ ID NO: 666924 - DNA, 15 bp, Homo sapiens
aaactagcatctacc

SEQ ID NO: 666925 - DNA, 15 bp, Homo sapiens
aactagcatctaccc

SEQ ID NO: 666926 - DNA, 15 bp, Homo sapiens
actagcatctacccc

SEQ ID NO: 666927 - DNA, 15 bp, Homo sapiens
ctagcatctaccccc

SEQ ID NO: 666928 - DNA, 15 bp, Homo sapiens
tagcatctaccccca

SEQ ID NO: 666929 - DNA, 15 bp, Homo sapiens
agcatctacccccat

SEQ ID NO: 666930 - DNA, 15 bp, Homo sapiens
gcatctacccccatc

SEQ ID NO: 666931 - DNA, 15 bp, Homo sapiens
catctacccccatct

SEQ ID NO: 666932 - DNA, 15 bp, Homo sapiens
atctacccccatctg

SEQ ID NO: 666933 - DNA, 15 bp, Homo sapiens
tctacccccatctgg

SEQ ID NO: 666934 - DNA, 15 bp, Homo sapiens
ctacccccatctgga

SEQ ID NO: 666935 - DNA, 15 bp, Homo sapiens
tacccccatctggaa

SEQ ID NO: 666936 - DNA, 15 bp, Homo sapiens
acccccatctggaag

SEQ ID NO: 666937 - DNA, 15 bp, Homo sapiens
cccccatctggaagc

SEQ ID NO: 666938 - DNA, 15 bp, Homo sapiens
ccccatctggaagca

SEQ ID NO: 666939 - DNA, 15 bp, Homo sapiens
cccatctggaagcat

SEQ ID NO: 666940 - DNA, 15 bp, Homo sapiens
ccatctggaagcatg

SEQ ID NO: 666941 - DNA, 15 bp, Homo sapiens
catctggaagcatgg

SEQ ID NO: 666942 - DNA, 15 bp, Homo sapiens
atctggaagcatggg

SEQ ID NO: 666943 - DNA, 15 bp, Homo sapiens
tctggaagcatgggc

SEQ ID NO: 666944 - DNA, 15 bp, Homo sapiens
ctggaagcatgggca

SEQ ID NO: 666945 - DNA, 15 bp, Homo sapiens
tggaagcatgggcag

SEQ ID NO: 666946 - DNA, 15 bp, Homo sapiens
ggaagcatgggcagc

SEQ ID NO: 666947 - DNA, 15 bp, Homo sapiens
gaagcatgggcagct

SEQ ID NO: 666948 - DNA, 15 bp, Homo sapiens
aagcatgggcagctc

SEQ ID NO: 666949 - DNA, 15 bp, Homo sapiens
agcatgggcagctca

SEQ ID NO: 666950 - DNA, 15 bp, Homo sapiens
gcatgggcagctcat

SEQ ID NO: 666951 - DNA, 15 bp, Homo sapiens
catgggcagctcatg

SEQ ID NO: 666952 - DNA, 15 bp, Homo sapiens
atgggcagctcatga

SEQ ID NO: 666953 - DNA, 15 bp, Homo sapiens
tgggcagctcatgat

SEQ ID NO: 666954 - DNA, 15 bp, Homo sapiens
gggcagctcatgata

SEQ ID NO: 666955 - DNA, 15 bp, Homo sapiens
ggcagctcatgatat

SEQ ID NO: 666956 - DNA, 15 bp, Homo sapiens
gcagctcatgatatt

SEQ ID NO: 666957 - DNA, 15 bp, Homo sapiens
cagctcatgatatta

SEQ ID NO: 666958 - DNA, 15 bp, Homo sapiens
agctcatgatattat

SEQ ID NO: 666959 - DNA, 15 bp, Homo sapiens
gctcatgatattatc

SEQ ID NO: 666960 - DNA, 15 bp, Homo sapiens
ctcatgatattatca

SEQ ID NO: 666961 - DNA, 15 bp, Homo sapiens
tcatgatattatcaa

SEQ ID NO: 666962 - DNA, 15 bp, Homo sapiens
catgatattatcaac

SEQ ID NO: 666963 - DNA, 15 bp, Homo sapiens
atgatattatcaact

SEQ ID NO: 666964 - DNA, 15 bp, Homo sapiens
tgatattatcaacta

SEQ ID NO: 666965 - DNA, 15 bp, Homo sapiens
gatattatcaactat

SEQ ID NO: 666966 - DNA, 15 bp, Homo sapiens
atattatcaactatt

SEQ ID NO: 666967 - DNA, 15 bp, Homo sapiens
tattatcaactattg

SEQ ID NO: 666968 - DNA, 15 bp, Homo sapiens
attatcaactattgc

SEQ ID NO: 666969 - DNA, 15 bp, Homo sapiens
ttatcaactattgct

SEQ ID NO: 666970 - DNA, 15 bp, Homo sapiens
tatcaactattgcta

SEQ ID NO: 666971 - DNA, 15 bp, Homo sapiens
atcaactattgctat

SEQ ID NO: 666972 - DNA, 15 bp, Homo sapiens
tcaactattgctatt

SEQ ID NO: 666973 - DNA, 15 bp, Homo sapiens
caactattgctattg

SEQ ID NO: 666974 - DNA, 15 bp, Homo sapiens
aactattgctattgg

SEQ ID NO: 666975 - DNA, 15 bp, Homo sapiens
actattgctattgga

SEQ ID NO: 666976 - DNA, 15 bp, Homo sapiens
ctattgctattggaa

SEQ ID NO: 666977 - DNA, 15 bp, Homo sapiens
tattgctattggaaa

SEQ ID NO: 666978 - DNA, 15 bp, Homo sapiens
attgctattggaaag

SEQ ID NO: 666979 - DNA, 15 bp, Homo sapiens
ttgctattggaaagt

SEQ ID NO: 666980 - DNA, 15 bp, Homo sapiens
tgctattggaaagtg

SEQ ID NO: 666981 - DNA, 15 bp, Homo sapiens
gctattggaaagtga

SEQ ID NO: 666982 - DNA, 15 bp, Homo sapiens
ctattggaaagtgat

SEQ ID NO: 666983 - DNA, 15 bp, Homo sapiens
tattggaaagtgatt

SEQ ID NO: 666984 - DNA, 15 bp, Homo sapiens
attggaaagtgattt

SEQ ID NO: 666985 - DNA, 15 bp, Homo sapiens
ttggaaagtgatttg

SEQ ID NO: 666986 - DNA, 15 bp, Homo sapiens
tggaaagtgatttgg

SEQ ID NO: 666987 - DNA, 15 bp, Homo sapiens
ggaaagtgatttgga

SEQ ID NO: 666988 - DNA, 15 bp, Homo sapiens
gaaagtgatttggac

SEQ ID NO: 666989 - DNA, 15 bp, Homo sapiens
aaagtgatttggact

SEQ ID NO: 666990 - DNA, 15 bp, Homo sapiens
aagtgatttggactt

SEQ ID NO: 666991 - DNA, 15 bp, Homo sapiens
agtgatttggacttg

SEQ ID NO: 666992 - DNA, 15 bp, Homo sapiens
gtgatttggacttga

SEQ ID NO: 666993 - DNA, 15 bp, Homo sapiens
tgatttggacttgaa

SEQ ID NO: 666994 - DNA, 15 bp, Homo sapiens
gatttggacttgaaa

SEQ ID NO: 666995 - DNA, 15 bp, Homo sapiens
atttggacttgaaag

SEQ ID NO: 666996 - DNA, 15 bp, Homo sapiens
tttggacttgaaagc

SEQ ID NO: 666997 - DNA, 15 bp, Homo sapiens
ttggacttgaaagca

SEQ ID NO: 666998 - DNA, 15 bp, Homo sapiens
tggacttgaaagcac

SEQ ID NO: 666999 - DNA, 15 bp, Homo sapiens
ggacttgaaagcact

SEQ ID NO: 667000 - DNA, 15 bp, Homo sapiens
gacttgaaagcacta

SEQ ID NO: 667001 - DNA, 15 bp, Homo sapiens
acttgaaagcactag

SEQ ID NO: 667002 - DNA, 15 bp, Homo sapiens
cttgaaagcactaga

SEQ ID NO: 667003 - DNA, 15 bp, Homo sapiens
ttgaaagcactagat

SEQ ID NO: 667004 - DNA, 15 bp, Homo sapiens
tgaaagcactagata

SEQ ID NO: 667005 - DNA, 15 bp, Homo sapiens
gaaagcactagatat

SEQ ID NO: 667006 - DNA, 15 bp, Homo sapiens
aaagcactagatatt

SEQ ID NO: 667007 - DNA, 15 bp, Homo sapiens
aagcactagatattt

SEQ ID NO: 667008 - DNA, 15 bp, Homo sapiens
agcactagatatttt

SEQ ID NO: 667009 - DNA, 15 bp, Homo sapiens
gcactagatattttt

SEQ ID NO: 667010 - DNA, 15 bp, Homo sapiens
cactagatatttttt

SEQ ID NO: 667011 - DNA, 15 bp, Homo sapiens
actagatatttttta

SEQ ID NO: 667012 - DNA, 15 bp, Homo sapiens
ctagatattttttac

SEQ ID NO: 667013 - DNA, 15 bp, Homo sapiens
tagatattttttacc

SEQ ID NO: 667014 - DNA, 15 bp, Homo sapiens
agatattttttacct

SEQ ID NO: 667015 - DNA, 15 bp, Homo sapiens
gatattttttacctc

SEQ ID NO: 667016 - DNA, 15 bp, Homo sapiens
atattttttacctct

SEQ ID NO: 667017 - DNA, 15 bp, Homo sapiens
tattttttacctctt

SEQ ID NO: 667018 - DNA, 15 bp, Homo sapiens
attttttacctcttg

SEQ ID NO: 667019 - DNA, 15 bp, Homo sapiens
ttttttacctcttgg

SEQ ID NO: 667020 - DNA, 15 bp, Homo sapiens
tttttacctcttggg

SEQ ID NO: 667021 - DNA, 15 bp, Homo sapiens
ttttacctcttgggg

SEQ ID NO: 667022 - DNA, 15 bp, Homo sapiens
tttacctcttgggga

SEQ ID NO: 667023 - DNA, 15 bp, Homo sapiens
ttacctcttggggag

SEQ ID NO: 667024 - DNA, 15 bp, Homo sapiens
tacctcttggggagg

SEQ ID NO: 667025 - DNA, 15 bp, Homo sapiens
acctcttggggaggc

SEQ ID NO: 667026 - DNA, 15 bp, Homo sapiens
cctcttggggaggca

SEQ ID NO: 667027 - DNA, 15 bp, Homo sapiens
ctcttggggaggcag

SEQ ID NO: 667028 - DNA, 15 bp, Homo sapiens
tcttggggaggcagt

SEQ ID NO: 667029 - DNA, 15 bp, Homo sapiens
cttggggaggcagtt

SEQ ID NO: 667030 - DNA, 15 bp, Homo sapiens
ttggggaggcagttt

SEQ ID NO: 667031 - DNA, 15 bp, Homo sapiens
tggggaggcagttta

SEQ ID NO: 667032 - DNA, 15 bp, Homo sapiens
ggggaggcagtttag

SEQ ID NO: 667033 - DNA, 15 bp, Homo sapiens
gggaggcagtttagc

SEQ ID NO: 667034 - DNA, 15 bp, Homo sapiens
ggaggcagtttagca

SEQ ID NO: 667035 - DNA, 15 bp, Homo sapiens
gaggcagtttagcag

SEQ ID NO: 667036 - DNA, 15 bp, Homo sapiens
aggcagtttagcaga

SEQ ID NO: 667037 - DNA, 15 bp, Homo sapiens
ggcagtttagcagag

SEQ ID NO: 667038 - DNA, 15 bp, Homo sapiens
gcagtttagcagagt

SEQ ID NO: 667039 - DNA, 15 bp, Homo sapiens
cagtttagcagagtg

SEQ ID NO: 667040 - DNA, 15 bp, Homo sapiens
agtttagcagagtgg

SEQ ID NO: 667041 - DNA, 15 bp, Homo sapiens
gtttagcagagtggt

SEQ ID NO: 667042 - DNA, 15 bp, Homo sapiens
tttagcagagtggtt

SEQ ID NO: 667043 - DNA, 15 bp, Homo sapiens
ttagcagagtggtta

SEQ ID NO: 667044 - DNA, 15 bp, Homo sapiens
tagcagagtggttaa

SEQ ID NO: 667045 - DNA, 15 bp, Homo sapiens
agcagagtggttaac

SEQ ID NO: 667046 - DNA, 15 bp, Homo sapiens
gcagagtggttaact

SEQ ID NO: 667047 - DNA, 15 bp, Homo sapiens
cagagtggttaactg

SEQ ID NO: 667048 - DNA, 15 bp, Homo sapiens
agagtggttaactgg

SEQ ID NO: 667049 - DNA, 15 bp, Homo sapiens
gagtggttaactggt

SEQ ID NO: 667050 - DNA, 15 bp, Homo sapiens
agtggttaactggtg

SEQ ID NO: 667051 - DNA, 15 bp, Homo sapiens
gtggttaactggtga

SEQ ID NO: 667052 - DNA, 15 bp, Homo sapiens
tggttaactggtgag

SEQ ID NO: 667053 - DNA, 15 bp, Homo sapiens
ggttaactggtgagc

SEQ ID NO: 667054 - DNA, 15 bp, Homo sapiens
gttaactggtgagct

SEQ ID NO: 667055 - DNA, 15 bp, Homo sapiens
ttaactggtgagctc

SEQ ID NO: 667056 - DNA, 15 bp, Homo sapiens
taactggtgagctcc

SEQ ID NO: 667057 - DNA, 15 bp, Homo sapiens
aactggtgagctcca

SEQ ID NO: 667058 - DNA, 15 bp, Homo sapiens
actggtgagctccag

SEQ ID NO: 667059 - DNA, 15 bp, Homo sapiens
ctggtgagctccaga

SEQ ID NO: 667060 - DNA, 15 bp, Homo sapiens
tggtgagctccagaa

SEQ ID NO: 667061 - DNA, 15 bp, Homo sapiens
ggtgagctccagaat

SEQ ID NO: 667062 - DNA, 15 bp, Homo sapiens
gtgagctccagaatc

SEQ ID NO: 667063 - DNA, 15 bp, Homo sapiens
tgagctccagaatca

SEQ ID NO: 667064 - DNA, 15 bp, Homo sapiens
gagctccagaatcag

SEQ ID NO: 667065 - DNA, 15 bp, Homo sapiens
agctccagaatcaga

SEQ ID NO: 667066 - DNA, 15 bp, Homo sapiens
gctccagaatcagaa

SEQ ID NO: 667067 - DNA, 15 bp, Homo sapiens
ctccagaatcagaag

SEQ ID NO: 667068 - DNA, 15 bp, Homo sapiens
tccagaatcagaagg

SEQ ID NO: 667069 - DNA, 15 bp, Homo sapiens
ccagaatcagaagga

SEQ ID NO: 667070 - DNA, 15 bp, Homo sapiens
cagaatcagaaggaa

SEQ ID NO: 667071 - DNA, 15 bp, Homo sapiens
agaatcagaaggaat

SEQ ID NO: 667072 - DNA, 15 bp, Homo sapiens
gaatcagaaggaata

SEQ ID NO: 667073 - DNA, 15 bp, Homo sapiens
aatcagaaggaatag

SEQ ID NO: 667074 - DNA, 15 bp, Homo sapiens
atcagaaggaatagg

SEQ ID NO: 667075 - DNA, 15 bp, Homo sapiens
tcagaaggaataggt

SEQ ID NO: 667076 - DNA, 15 bp, Homo sapiens
cagaaggaataggtc

SEQ ID NO: 667077 - DNA, 15 bp, Homo sapiens
agaaggaataggtcc

SEQ ID NO: 667078 - DNA, 15 bp, Homo sapiens
gaaggaataggtcca

SEQ ID NO: 667079 - DNA, 15 bp, Homo sapiens
aaggaataggtccaa

SEQ ID NO: 667080 - DNA, 15 bp, Homo sapiens
aggaataggtccaaa

SEQ ID NO: 667081 - DNA, 15 bp, Homo sapiens
ggaataggtccaaat

SEQ ID NO: 667082 - DNA, 15 bp, Homo sapiens
gaataggtccaaatt

SEQ ID NO: 667083 - DNA, 15 bp, Homo sapiens
aataggtccaaattc

SEQ ID NO: 667084 - DNA, 15 bp, Homo sapiens
ataggtccaaattcc

SEQ ID NO: 667085 - DNA, 15 bp, Homo sapiens
taggtccaaattcca

SEQ ID NO: 667086 - DNA, 15 bp, Homo sapiens
aggtccaaattccaa

SEQ ID NO: 667087 - DNA, 15 bp, Homo sapiens
ggtccaaattccaac

SEQ ID NO: 667088 - DNA, 15 bp, Homo sapiens
gtccaaattccaacc

SEQ ID NO: 667089 - DNA, 15 bp, Homo sapiens
tccaaattccaacca

SEQ ID NO: 667090 - DNA, 15 bp, Homo sapiens
ccaaattccaaccac

SEQ ID NO: 667091 - DNA, 15 bp, Homo sapiens
caaattccaaccact

SEQ ID NO: 667092 - DNA, 15 bp, Homo sapiens
aaattccaaccacta

SEQ ID NO: 667093 - DNA, 15 bp, Homo sapiens
aattccaaccactat

SEQ ID NO: 667094 - DNA, 15 bp, Homo sapiens
attccaaccactatt

SEQ ID NO: 667095 - DNA, 15 bp, Homo sapiens
ttccaaccactatta

SEQ ID NO: 667096 - DNA, 15 bp, Homo sapiens
tccaaccactattac

SEQ ID NO: 667097 - DNA, 15 bp, Homo sapiens
ccaaccactattaca

SEQ ID NO: 667098 - DNA, 15 bp, Homo sapiens
caaccactattacat

SEQ ID NO: 667099 - DNA, 15 bp, Homo sapiens
aaccactattacatc

SEQ ID NO: 667100 - DNA, 15 bp, Homo sapiens
accactattacatct

SEQ ID NO: 667101 - DNA, 15 bp, Homo sapiens
ccactattacatctc

SEQ ID NO: 667102 - DNA, 15 bp, Homo sapiens
cactattacatctcc

SEQ ID NO: 667103 - DNA, 15 bp, Homo sapiens
actattacatctcca

SEQ ID NO: 667104 - DNA, 15 bp, Homo sapiens
ctattacatctccat

SEQ ID NO: 667105 - DNA, 15 bp, Homo sapiens
tattacatctccatc

SEQ ID NO: 667106 - DNA, 15 bp, Homo sapiens
attacatctccatca

SEQ ID NO: 667107 - DNA, 15 bp, Homo sapiens
ttacatctccatcat

SEQ ID NO: 667108 - DNA, 15 bp, Homo sapiens
tacatctccatcata

SEQ ID NO: 667109 - DNA, 15 bp, Homo sapiens
acatctccatcataa

SEQ ID NO: 667110 - DNA, 15 bp, Homo sapiens
catctccatcataag

SEQ ID NO: 667111 - DNA, 15 bp, Homo sapiens
atctccatcataaga

SEQ ID NO: 667112 - DNA, 15 bp, Homo sapiens
tctccatcataagaa

SEQ ID NO: 667113 - DNA, 15 bp, Homo sapiens
ctccatcataagaaa

SEQ ID NO: 667114 - DNA, 15 bp, Homo sapiens
tccatcataagaaat

SEQ ID NO: 667115 - DNA, 15 bp, Homo sapiens
ccatcataagaaatt

SEQ ID NO: 667116 - DNA, 15 bp, Homo sapiens
catcataagaaatta

SEQ ID NO: 667117 - DNA, 15 bp, Homo sapiens
atcataagaaattag

SEQ ID NO: 667118 - DNA, 15 bp, Homo sapiens
tcataagaaattagg

SEQ ID NO: 667119 - DNA, 15 bp, Homo sapiens
cataagaaattaggc

SEQ ID NO: 667120 - DNA, 15 bp, Homo sapiens
ataagaaattaggca

SEQ ID NO: 667121 - DNA, 15 bp, Homo sapiens
taagaaattaggcaa

SEQ ID NO: 667122 - DNA, 15 bp, Homo sapiens
aagaaattaggcaag

SEQ ID NO: 667123 - DNA, 15 bp, Homo sapiens
agaaattaggcaagt

SEQ ID NO: 667124 - DNA, 15 bp, Homo sapiens
gaaattaggcaagtt

SEQ ID NO: 667125 - DNA, 15 bp, Homo sapiens
aaattaggcaagttg

SEQ ID NO: 667126 - DNA, 15 bp, Homo sapiens
aattaggcaagttgt

SEQ ID NO: 667127 - DNA, 15 bp, Homo sapiens
attaggcaagttgtt

SEQ ID NO: 667128 - DNA, 15 bp, Homo sapiens
ttaggcaagttgttt

SEQ ID NO: 667129 - DNA, 15 bp, Homo sapiens
taggcaagttgttta

SEQ ID NO: 667130 - DNA, 15 bp, Homo sapiens
aggcaagttgtttat

SEQ ID NO: 667131 - DNA, 15 bp, Homo sapiens
ggcaagttgtttatc

SEQ ID NO: 667132 - DNA, 15 bp, Homo sapiens
gcaagttgtttatcc

SEQ ID NO: 667133 - DNA, 15 bp, Homo sapiens
caagttgtttatcct

SEQ ID NO: 667134 - DNA, 15 bp, Homo sapiens
aagttgtttatccta

SEQ ID NO: 667135 - DNA, 15 bp, Homo sapiens
agttgtttatcctaa

SEQ ID NO: 667136 - DNA, 15 bp, Homo sapiens
gttgtttatcctaag

SEQ ID NO: 667137 - DNA, 15 bp, Homo sapiens
ttgtttatcctaagt

SEQ ID NO: 667138 - DNA, 15 bp, Homo sapiens
tgtttatcctaagtt

SEQ ID NO: 667139 - DNA, 15 bp, Homo sapiens
gtttatcctaagttt

SEQ ID NO: 667140 - DNA, 15 bp, Homo sapiens
tttatcctaagtttc

SEQ ID NO: 667141 - DNA, 15 bp, Homo sapiens
ttatcctaagtttca

SEQ ID NO: 667142 - DNA, 15 bp, Homo sapiens
tatcctaagtttcag

SEQ ID NO: 667143 - DNA, 15 bp, Homo sapiens
atcctaagtttcaga

SEQ ID NO: 667144 - DNA, 15 bp, Homo sapiens
tcctaagtttcagat

SEQ ID NO: 667145 - DNA, 15 bp, Homo sapiens
cctaagtttcagatt

SEQ ID NO: 667146 - DNA, 15 bp, Homo sapiens
ctaagtttcagattc

SEQ ID NO: 667147 - DNA, 15 bp, Homo sapiens
taagtttcagattcc

SEQ ID NO: 667148 - DNA, 15 bp, Homo sapiens
aagtttcagattcct

SEQ ID NO: 667149 - DNA, 15 bp, Homo sapiens
agtttcagattcctt

SEQ ID NO: 667150 - DNA, 15 bp, Homo sapiens
gtttcagattcctta

SEQ ID NO: 667151 - DNA, 15 bp, Homo sapiens
tttcagattccttaa

SEQ ID NO: 667152 - DNA, 15 bp, Homo sapiens
ttcagattccttaaa

SEQ ID NO: 667153 - DNA, 15 bp, Homo sapiens
tcagattccttaaag

SEQ ID NO: 667154 - DNA, 15 bp, Homo sapiens
cagattccttaaaga

SEQ ID NO: 667155 - DNA, 15 bp, Homo sapiens
agattccttaaagat

SEQ ID NO: 667156 - DNA, 15 bp, Homo sapiens
gattccttaaagata

SEQ ID NO: 667157 - DNA, 15 bp, Homo sapiens
attccttaaagataa

SEQ ID NO: 667158 - DNA, 15 bp, Homo sapiens
ttccttaaagataaa

SEQ ID NO: 667159 - DNA, 15 bp, Homo sapiens
tccttaaagataaaa

SEQ ID NO: 667160 - DNA, 15 bp, Homo sapiens
ccttaaagataaaac

SEQ ID NO: 667161 - DNA, 15 bp, Homo sapiens
cttaaagataaaaca

SEQ ID NO: 667162 - DNA, 15 bp, Homo sapiens
ttaaagataaaacag

SEQ ID NO: 667163 - DNA, 15 bp, Homo sapiens
taaagataaaacagt

SEQ ID NO: 667164 - DNA, 15 bp, Homo sapiens
aaagataaaacagtc

SEQ ID NO: 667165 - DNA, 15 bp, Homo sapiens
aagataaaacagtca

SEQ ID NO: 667166 - DNA, 15 bp, Homo sapiens
agataaaacagtcaa

SEQ ID NO: 667167 - DNA, 15 bp, Homo sapiens
gataaaacagtcaag

SEQ ID NO: 667168 - DNA, 15 bp, Homo sapiens
ataaaacagtcaaga

SEQ ID NO: 667169 - DNA, 15 bp, Homo sapiens
taaaacagtcaagac

SEQ ID NO: 667170 - DNA, 15 bp, Homo sapiens
aaaacagtcaagaca

SEQ ID NO: 667171 - DNA, 15 bp, Homo sapiens
aaacagtcaagacag

SEQ ID NO: 667172 - DNA, 15 bp, Homo sapiens
aacagtcaagacagt

SEQ ID NO: 667173 - DNA, 15 bp, Homo sapiens
acagtcaagacagta

SEQ ID NO: 667174 - DNA, 15 bp, Homo sapiens
cagtcaagacagtag

SEQ ID NO: 667175 - DNA, 15 bp, Homo sapiens
agtcaagacagtagt

SEQ ID NO: 667176 - DNA, 15 bp, Homo sapiens
gtcaagacagtagta

SEQ ID NO: 667177 - DNA, 15 bp, Homo sapiens
tcaagacagtagtac

SEQ ID NO: 667178 - DNA, 15 bp, Homo sapiens
caagacagtagtact

SEQ ID NO: 667179 - DNA, 15 bp, Homo sapiens
aagacagtagtactt

SEQ ID NO: 667180 - DNA, 15 bp, Homo sapiens
agacagtagtactta

SEQ ID NO: 667181 - DNA, 15 bp, Homo sapiens
gacagtagtacttat

SEQ ID NO: 667182 - DNA, 15 bp, Homo sapiens
acagtagtacttatc

SEQ ID NO: 667183 - DNA, 15 bp, Homo sapiens
cagtagtacttatcc

SEQ ID NO: 667184 - DNA, 15 bp, Homo sapiens
agtagtacttatccc

SEQ ID NO: 667185 - DNA, 15 bp, Homo sapiens
gtagtacttatccct

SEQ ID NO: 667186 - DNA, 15 bp, Homo sapiens
tagtacttatccctg

SEQ ID NO: 667187 - DNA, 15 bp, Homo sapiens
agtacttatccctga

SEQ ID NO: 667188 - DNA, 15 bp, Homo sapiens
gtacttatccctgag

SEQ ID NO: 667189 - DNA, 15 bp, Homo sapiens
tacttatccctgaga

SEQ ID NO: 667190 - DNA, 15 bp, Homo sapiens
acttatccctgagag

SEQ ID NO: 667191 - DNA, 15 bp, Homo sapiens
cttatccctgagaga

SEQ ID NO: 667192 - DNA, 15 bp, Homo sapiens
ttatccctgagagaa

SEQ ID NO: 667193 - DNA, 15 bp, Homo sapiens
tatccctgagagaag

SEQ ID NO: 667194 - DNA, 15 bp, Homo sapiens
atccctgagagaagt

SEQ ID NO: 667195 - DNA, 15 bp, Homo sapiens
tccctgagagaagta

SEQ ID NO: 667196 - DNA, 15 bp, Homo sapiens
ccctgagagaagtat

SEQ ID NO: 667197 - DNA, 15 bp, Homo sapiens
cctgagagaagtata

SEQ ID NO: 667198 - DNA, 15 bp, Homo sapiens
ctgagagaagtatag

SEQ ID NO: 667199 - DNA, 15 bp, Homo sapiens
tgagagaagtatagg

SEQ ID NO: 667200 - DNA, 15 bp, Homo sapiens
gagagaagtatagga

SEQ ID NO: 667201 - DNA, 15 bp, Homo sapiens
agagaagtataggaa

SEQ ID NO: 667202 - DNA, 15 bp, Homo sapiens
gagaagtataggaaa

SEQ ID NO: 667203 - DNA, 15 bp, Homo sapiens
agaagtataggaaac

SEQ ID NO: 667204 - DNA, 15 bp, Homo sapiens
gaagtataggaaaca

SEQ ID NO: 667205 - DNA, 15 bp, Homo sapiens
aagtataggaaacaa

SEQ ID NO: 667206 - DNA, 15 bp, Homo sapiens
agtataggaaacaag

SEQ ID NO: 667207 - DNA, 15 bp, Homo sapiens
gtataggaaacaaga

SEQ ID NO: 667208 - DNA, 15 bp, Homo sapiens
tataggaaacaagaa

SEQ ID NO: 667209 - DNA, 15 bp, Homo sapiens
ataggaaacaagaaa

SEQ ID NO: 667210 - DNA, 15 bp, Homo sapiens
taggaaacaagaaaa

SEQ ID NO: 667211 - DNA, 15 bp, Homo sapiens
aggaaacaagaaaat

SEQ ID NO: 667212 - DNA, 15 bp, Homo sapiens
ggaaacaagaaaata

SEQ ID NO: 667213 - DNA, 15 bp, Homo sapiens
gaaacaagaaaatat

SEQ ID NO: 667214 - DNA, 15 bp, Homo sapiens
aaacaagaaaatata

SEQ ID NO: 667215 - DNA, 15 bp, Homo sapiens
aacaagaaaatatat

SEQ ID NO: 667216 - DNA, 15 bp, Homo sapiens
acaagaaaatatatg

SEQ ID NO: 667217 - DNA, 15 bp, Homo sapiens
caagaaaatatatgc

SEQ ID NO: 667218 - DNA, 15 bp, Homo sapiens
aagaaaatatatgca

SEQ ID NO: 667219 - DNA, 15 bp, Homo sapiens
agaaaatatatgcaa

SEQ ID NO: 667220 - DNA, 15 bp, Homo sapiens
gaaaatatatgcaat

SEQ ID NO: 667221 - DNA, 15 bp, Homo sapiens
aaaatatatgcaatt

SEQ ID NO: 667222 - DNA, 15 bp, Homo sapiens
aaatatatgcaattt

SEQ ID NO: 667223 - DNA, 15 bp, Homo sapiens
aatatatgcaattta

SEQ ID NO: 667224 - DNA, 15 bp, Homo sapiens
atatatgcaatttac

SEQ ID NO: 667225 - DNA, 15 bp, Homo sapiens
tatatgcaatttaca

SEQ ID NO: 667226 - DNA, 15 bp, Homo sapiens
atatgcaatttacat

SEQ ID NO: 667227 - DNA, 15 bp, Homo sapiens
tatgcaatttacata

SEQ ID NO: 667228 - DNA, 15 bp, Homo sapiens
atgcaatttacatac

SEQ ID NO: 667229 - DNA, 15 bp, Homo sapiens
tgcaatttacataca

SEQ ID NO: 667230 - DNA, 15 bp, Homo sapiens
gcaatttacatacat

SEQ ID NO: 667231 - DNA, 15 bp, Homo sapiens
caatttacatacata

SEQ ID NO: 667232 - DNA, 15 bp, Homo sapiens
aatttacatacatac

SEQ ID NO: 667233 - DNA, 15 bp, Homo sapiens
atttacatacatact

SEQ ID NO: 667234 - DNA, 15 bp, Homo sapiens
tttacatacatacta

SEQ ID NO: 667235 - DNA, 15 bp, Homo sapiens
ttacatacatactac

SEQ ID NO: 667236 - DNA, 15 bp, Homo sapiens
tacatacatactaca

SEQ ID NO: 667237 - DNA, 15 bp, Homo sapiens
acatacatactacaa

SEQ ID NO: 667238 - DNA, 15 bp, Homo sapiens
catacatactacaat

SEQ ID NO: 667239 - DNA, 15 bp, Homo sapiens
atacatactacaatc

SEQ ID NO: 667240 - DNA, 15 bp, Homo sapiens
tacatactacaatcc

SEQ ID NO: 667241 - DNA, 15 bp, Homo sapiens
acatactacaatccc

SEQ ID NO: 667242 - DNA, 15 bp, Homo sapiens
catactacaatcccc

SEQ ID NO: 667243 - DNA, 15 bp, Homo sapiens
atactacaatcccca

SEQ ID NO: 667244 - DNA, 15 bp, Homo sapiens
tactacaatccccag

SEQ ID NO: 667245 - DNA, 15 bp, Homo sapiens
actacaatccccagc

SEQ ID NO: 667246 - DNA, 15 bp, Homo sapiens
ctacaatccccagca

SEQ ID NO: 667247 - DNA, 15 bp, Homo sapiens
tacaatccccagcac

SEQ ID NO: 667248 - DNA, 15 bp, Homo sapiens
acaatccccagcaca

SEQ ID NO: 667249 - DNA, 15 bp, Homo sapiens
caatccccagcacat

SEQ ID NO: 667250 - DNA, 15 bp, Homo sapiens
aatccccagcacatg

SEQ ID NO: 667251 - DNA, 15 bp, Homo sapiens
atccccagcacatga

SEQ ID NO: 667252 - DNA, 15 bp, Homo sapiens
tccccagcacatgac

SEQ ID NO: 667253 - DNA, 15 bp, Homo sapiens
ccccagcacatgaca

SEQ ID NO: 667254 - DNA, 15 bp, Homo sapiens
cccagcacatgacaa

SEQ ID NO: 667255 - DNA, 15 bp, Homo sapiens
ccagcacatgacaaa

SEQ ID NO: 667256 - DNA, 15 bp, Homo sapiens
cagcacatgacaaat

SEQ ID NO: 667257 - DNA, 15 bp, Homo sapiens
agcacatgacaaatg

SEQ ID NO: 667258 - DNA, 15 bp, Homo sapiens
gcacatgacaaatgt

SEQ ID NO: 667259 - DNA, 15 bp, Homo sapiens
cacatgacaaatgtt

SEQ ID NO: 667260 - DNA, 15 bp, Homo sapiens
acatgacaaatgttc

SEQ ID NO: 667261 - DNA, 15 bp, Homo sapiens
catgacaaatgttca

SEQ ID NO: 667262 - DNA, 15 bp, Homo sapiens
atgacaaatgttcaa

SEQ ID NO: 667263 - DNA, 15 bp, Homo sapiens
tgacaaatgttcaag

SEQ ID NO: 667264 - DNA, 15 bp, Homo sapiens
gacaaatgttcaagt

SEQ ID NO: 667265 - DNA, 15 bp, Homo sapiens
acaaatgttcaagta

SEQ ID NO: 667266 - DNA, 15 bp, Homo sapiens
caaatgttcaagtaa

SEQ ID NO: 667267 - DNA, 15 bp, Homo sapiens
aaatgttcaagtaat

SEQ ID NO: 667268 - DNA, 15 bp, Homo sapiens
aatgttcaagtaatg

SEQ ID NO: 667269 - DNA, 15 bp, Homo sapiens
atgttcaagtaatgg

SEQ ID NO: 667270 - DNA, 15 bp, Homo sapiens
tgttcaagtaatggg

SEQ ID NO: 667271 - DNA, 15 bp, Homo sapiens
gttcaagtaatggga

SEQ ID NO: 667272 - DNA, 15 bp, Homo sapiens
ttcaagtaatgggaa

SEQ ID NO: 667273 - DNA, 15 bp, Homo sapiens
tcaagtaatgggaac

SEQ ID NO: 667274 - DNA, 15 bp, Homo sapiens
caagtaatgggaact

SEQ ID NO: 667275 - DNA, 15 bp, Homo sapiens
aagtaatgggaactg

SEQ ID NO: 667276 - DNA, 15 bp, Homo sapiens
agtaatgggaactgt

SEQ ID NO: 667277 - DNA, 15 bp, Homo sapiens
gtaatgggaactgtt

SEQ ID NO: 667278 - DNA, 15 bp, Homo sapiens
taatgggaactgtta

SEQ ID NO: 667279 - DNA, 15 bp, Homo sapiens
aatgggaactgttat

SEQ ID NO: 667280 - DNA, 15 bp, Homo sapiens
atgggaactgttatt

SEQ ID NO: 667281 - DNA, 15 bp, Homo sapiens
tgggaactgttatta

SEQ ID NO: 667282 - DNA, 15 bp, Homo sapiens
gggaactgttattat

SEQ ID NO: 667283 - DNA, 15 bp, Homo sapiens
ggaactgttattatt

SEQ ID NO: 667284 - DNA, 15 bp, Homo sapiens
gaactgttattattt

SEQ ID NO: 667285 - DNA, 15 bp, Homo sapiens
aactgttattatttt

SEQ ID NO: 667286 - DNA, 15 bp, Homo sapiens
actgttattatttta

SEQ ID NO: 667287 - DNA, 15 bp, Homo sapiens
ctgttattattttag

SEQ ID NO: 667288 - DNA, 15 bp, Homo sapiens
tgttattattttagc

SEQ ID NO: 667289 - DNA, 15 bp, Homo sapiens
gttattattttagcc

SEQ ID NO: 667290 - DNA, 15 bp, Homo sapiens
ttattattttagccc

SEQ ID NO: 667291 - DNA, 15 bp, Homo sapiens
tattattttagccct

SEQ ID NO: 667292 - DNA, 15 bp, Homo sapiens
attattttagccctt

SEQ ID NO: 667293 - DNA, 15 bp, Homo sapiens
ttattttagcccttt

SEQ ID NO: 667294 - DNA, 15 bp, Homo sapiens
tattttagccctttg

SEQ ID NO: 667295 - DNA, 15 bp, Homo sapiens
attttagccctttgt

SEQ ID NO: 667296 - DNA, 15 bp, Homo sapiens
ttttagccctttgtc

SEQ ID NO: 667297 - DNA, 15 bp, Homo sapiens
tttagccctttgtct

SEQ ID NO: 667298 - DNA, 15 bp, Homo sapiens
ttagccctttgtcta

SEQ ID NO: 667299 - DNA, 15 bp, Homo sapiens
tagccctttgtctat

SEQ ID NO: 667300 - DNA, 15 bp, Homo sapiens
agccctttgtctatc

SEQ ID NO: 667301 - DNA, 15 bp, Homo sapiens
gccctttgtctatca

SEQ ID NO: 667302 - DNA, 15 bp, Homo sapiens
ccctttgtctatcag

SEQ ID NO: 667303 - DNA, 15 bp, Homo sapiens
cctttgtctatcagt

SEQ ID NO: 667304 - DNA, 15 bp, Homo sapiens
ctttgtctatcagtt

SEQ ID NO: 667305 - DNA, 15 bp, Homo sapiens
tttgtctatcagttt

SEQ ID NO: 667306 - DNA, 15 bp, Homo sapiens
ttgtctatcagtttg

SEQ ID NO: 667307 - DNA, 15 bp, Homo sapiens
tgtctatcagtttgt

SEQ ID NO: 667308 - DNA, 15 bp, Homo sapiens
gtctatcagtttgtt

SEQ ID NO: 667309 - DNA, 15 bp, Homo sapiens
tctatcagtttgttc

SEQ ID NO: 667310 - DNA, 15 bp, Homo sapiens
ctatcagtttgttcc

SEQ ID NO: 667311 - DNA, 15 bp, Homo sapiens
tatcagtttgttcct

SEQ ID NO: 667312 - DNA, 15 bp, Homo sapiens
atcagtttgttcctc

SEQ ID NO: 667313 - DNA, 15 bp, Homo sapiens
tcagtttgttcctct

SEQ ID NO: 667314 - DNA, 15 bp, Homo sapiens
cagtttgttcctctg

SEQ ID NO: 667315 - DNA, 15 bp, Homo sapiens
agtttgttcctctgt

SEQ ID NO: 667316 - DNA, 15 bp, Homo sapiens
gtttgttcctctgtg

SEQ ID NO: 667317 - DNA, 15 bp, Homo sapiens
tttgttcctctgtga

SEQ ID NO: 667318 - DNA, 15 bp, Homo sapiens
ttgttcctctgtgac

SEQ ID NO: 667319 - DNA, 15 bp, Homo sapiens
tgttcctctgtgacc

SEQ ID NO: 667320 - DNA, 15 bp, Homo sapiens
gttcctctgtgacct

SEQ ID NO: 667321 - DNA, 15 bp, Homo sapiens
ttcctctgtgacctc

SEQ ID NO: 667322 - DNA, 15 bp, Homo sapiens
tcctctgtgacctca

SEQ ID NO: 667323 - DNA, 15 bp, Homo sapiens
cctctgtgacctcaa

SEQ ID NO: 667324 - DNA, 15 bp, Homo sapiens
ctctgtgacctcaag

SEQ ID NO: 667325 - DNA, 15 bp, Homo sapiens
tctgtgacctcaagc

SEQ ID NO: 667326 - DNA, 15 bp, Homo sapiens
ctgtgacctcaagca

SEQ ID NO: 667327 - DNA, 15 bp, Homo sapiens
tgtgacctcaagcac

SEQ ID NO: 667328 - DNA, 15 bp, Homo sapiens
gtgacctcaagcaca

SEQ ID NO: 667329 - DNA, 15 bp, Homo sapiens
tgacctcaagcacat

SEQ ID NO: 667330 - DNA, 15 bp, Homo sapiens
gacctcaagcacatt

SEQ ID NO: 667331 - DNA, 15 bp, Homo sapiens
acctcaagcacatta

SEQ ID NO: 667332 - DNA, 15 bp, Homo sapiens
cctcaagcacattac

SEQ ID NO: 667333 - DNA, 15 bp, Homo sapiens
ctcaagcacattact

SEQ ID NO: 667334 - DNA, 15 bp, Homo sapiens
tcaagcacattacta

SEQ ID NO: 667335 - DNA, 15 bp, Homo sapiens
caagcacattactaa

SEQ ID NO: 667336 - DNA, 15 bp, Homo sapiens
aagcacattactaaa

SEQ ID NO: 667337 - DNA, 15 bp, Homo sapiens
agcacattactaaat

SEQ ID NO: 667338 - DNA, 15 bp, Homo sapiens
gcacattactaaatg

SEQ ID NO: 667339 - DNA, 15 bp, Homo sapiens
cacattactaaatgt

SEQ ID NO: 667340 - DNA, 15 bp, Homo sapiens
acattactaaatgtt

SEQ ID NO: 667341 - DNA, 15 bp, Homo sapiens
cattactaaatgtta

SEQ ID NO: 667342 - DNA, 15 bp, Homo sapiens
attactaaatgttag

SEQ ID NO: 667343 - DNA, 15 bp, Homo sapiens
ttactaaatgttagc

SEQ ID NO: 667344 - DNA, 15 bp, Homo sapiens
tactaaatgttagcg

SEQ ID NO: 667345 - DNA, 15 bp, Homo sapiens
actaaatgttagcga

SEQ ID NO: 667346 - DNA, 15 bp, Homo sapiens
ctaaatgttagcgag

SEQ ID NO: 667347 - DNA, 15 bp, Homo sapiens
taaatgttagcgagc

SEQ ID NO: 667348 - DNA, 15 bp, Homo sapiens
aaatgttagcgagct

SEQ ID NO: 667349 - DNA, 15 bp, Homo sapiens
aatgttagcgagctt

SEQ ID NO: 667350 - DNA, 15 bp, Homo sapiens
atgttagcgagcttc

SEQ ID NO: 667351 - DNA, 15 bp, Homo sapiens
tgttagcgagcttca

SEQ ID NO: 667352 - DNA, 15 bp, Homo sapiens
gttagcgagcttcag

SEQ ID NO: 667353 - DNA, 15 bp, Homo sapiens
ttagcgagcttcagc

SEQ ID NO: 667354 - DNA, 15 bp, Homo sapiens
tagcgagcttcagct

SEQ ID NO: 667355 - DNA, 15 bp, Homo sapiens
agcgagcttcagctt

SEQ ID NO: 667356 - DNA, 15 bp, Homo sapiens
gcgagcttcagcttg

SEQ ID NO: 667357 - DNA, 15 bp, Homo sapiens
cgagcttcagcttgt

SEQ ID NO: 667358 - DNA, 15 bp, Homo sapiens
gagcttcagcttgta

SEQ ID NO: 667359 - DNA, 15 bp, Homo sapiens
agcttcagcttgtac

SEQ ID NO: 667360 - DNA, 15 bp, Homo sapiens
gcttcagcttgtacg

SEQ ID NO: 667361 - DNA, 15 bp, Homo sapiens
cttcagcttgtacgt

SEQ ID NO: 667362 - DNA, 15 bp, Homo sapiens
ttcagcttgtacgtg

SEQ ID NO: 667363 - DNA, 15 bp, Homo sapiens
tcagcttgtacgtgg

SEQ ID NO: 667364 - DNA, 15 bp, Homo sapiens
cagcttgtacgtggg

SEQ ID NO: 667365 - DNA, 15 bp, Homo sapiens
agcttgtacgtggga

SEQ ID NO: 667366 - DNA, 15 bp, Homo sapiens
gcttgtacgtgggac

SEQ ID NO: 667367 - DNA, 15 bp, Homo sapiens
cttgtacgtgggact

SEQ ID NO: 667368 - DNA, 15 bp, Homo sapiens
ttgtacgtgggactg

SEQ ID NO: 667369 - DNA, 15 bp, Homo sapiens
tgtacgtgggactga

SEQ ID NO: 667370 - DNA, 15 bp, Homo sapiens
gtacgtgggactgac

SEQ ID NO: 667371 - DNA, 15 bp, Homo sapiens
tacgtgggactgaca

SEQ ID NO: 667372 - DNA, 15 bp, Homo sapiens
acgtgggactgacag

SEQ ID NO: 667373 - DNA, 15 bp, Homo sapiens
cgtgggactgacagg

SEQ ID NO: 667374 - DNA, 15 bp, Homo sapiens
gtgggactgacagga

SEQ ID NO: 667375 - DNA, 15 bp, Homo sapiens
tgggactgacaggaa

SEQ ID NO: 667376 - DNA, 15 bp, Homo sapiens
gggactgacaggaat

SEQ ID NO: 667377 - DNA, 15 bp, Homo sapiens
ggactgacaggaata

SEQ ID NO: 667378 - DNA, 15 bp, Homo sapiens
gactgacaggaataa

SEQ ID NO: 667379 - DNA, 15 bp, Homo sapiens
actgacaggaataac

SEQ ID NO: 667380 - DNA, 15 bp, Homo sapiens
ctgacaggaataaca

SEQ ID NO: 667381 - DNA, 15 bp, Homo sapiens
tgacaggaataacac

SEQ ID NO: 667382 - DNA, 15 bp, Homo sapiens
gacaggaataacacc

SEQ ID NO: 667383 - DNA, 15 bp, Homo sapiens
acaggaataacaccg

SEQ ID NO: 667384 - DNA, 15 bp, Homo sapiens
caggaataacaccgc

SEQ ID NO: 667385 - DNA, 15 bp, Homo sapiens
aggaataacaccgca

SEQ ID NO: 667386 - DNA, 15 bp, Homo sapiens
ggaataacaccgcat

SEQ ID NO: 667387 - DNA, 15 bp, Homo sapiens
gaataacaccgcatc

SEQ ID NO: 667388 - DNA, 15 bp, Homo sapiens
aataacaccgcatca

SEQ ID NO: 667389 - DNA, 15 bp, Homo sapiens
ataacaccgcatcac

SEQ ID NO: 667390 - DNA, 15 bp, Homo sapiens
taacaccgcatcacc

SEQ ID NO: 667391 - DNA, 15 bp, Homo sapiens
aacaccgcatcacct

SEQ ID NO: 667392 - DNA, 15 bp, Homo sapiens
acaccgcatcacctc

SEQ ID NO: 667393 - DNA, 15 bp, Homo sapiens
caccgcatcacctca

SEQ ID NO: 667394 - DNA, 15 bp, Homo sapiens
accgcatcacctcat

SEQ ID NO: 667395 - DNA, 15 bp, Homo sapiens
ccgcatcacctcatg

SEQ ID NO: 667396 - DNA, 15 bp, Homo sapiens
cgcatcacctcatgt

SEQ ID NO: 667397 - DNA, 15 bp, Homo sapiens
gcatcacctcatgtg

SEQ ID NO: 667398 - DNA, 15 bp, Homo sapiens
catcacctcatgtgg

SEQ ID NO: 667399 - DNA, 15 bp, Homo sapiens
atcacctcatgtggt

SEQ ID NO: 667400 - DNA, 15 bp, Homo sapiens
tcacctcatgtggtg

SEQ ID NO: 667401 - DNA, 15 bp, Homo sapiens
cacctcatgtggtga

SEQ ID NO: 667402 - DNA, 15 bp, Homo sapiens
acctcatgtggtgat

SEQ ID NO: 667403 - DNA, 15 bp, Homo sapiens
cctcatgtggtgatt

SEQ ID NO: 667404 - DNA, 15 bp, Homo sapiens
ctcatgtggtgattg

SEQ ID NO: 667405 - DNA, 15 bp, Homo sapiens
tcatgtggtgattgt

SEQ ID NO: 667406 - DNA, 15 bp, Homo sapiens
catgtggtgattgta

SEQ ID NO: 667407 - DNA, 15 bp, Homo sapiens
atgtggtgattgtaa

SEQ ID NO: 667408 - DNA, 15 bp, Homo sapiens
tgtggtgattgtaag

SEQ ID NO: 667409 - DNA, 15 bp, Homo sapiens
gtggtgattgtaagg

SEQ ID NO: 667410 - DNA, 15 bp, Homo sapiens
tggtgattgtaagga

SEQ ID NO: 667411 - DNA, 15 bp, Homo sapiens
ggtgattgtaaggat

SEQ ID NO: 667412 - DNA, 15 bp, Homo sapiens
gtgattgtaaggatt

SEQ ID NO: 667413 - DNA, 15 bp, Homo sapiens
tgattgtaaggattc

SEQ ID NO: 667414 - DNA, 15 bp, Homo sapiens
gattgtaaggattca

SEQ ID NO: 667415 - DNA, 15 bp, Homo sapiens
attgtaaggattcag

SEQ ID NO: 667416 - DNA, 15 bp, Homo sapiens
ttgtaaggattcagt

SEQ ID NO: 667417 - DNA, 15 bp, Homo sapiens
tgtaaggattcagtg

SEQ ID NO: 667418 - DNA, 15 bp, Homo sapiens
gtaaggattcagtga

SEQ ID NO: 667419 - DNA, 15 bp, Homo sapiens
taaggattcagtgat

SEQ ID NO: 667420 - DNA, 15 bp, Homo sapiens
aaggattcagtgata

SEQ ID NO: 667421 - DNA, 15 bp, Homo sapiens
aggattcagtgatat

SEQ ID NO: 667422 - DNA, 15 bp, Homo sapiens
ggattcagtgatatt

SEQ ID NO: 667423 - DNA, 15 bp, Homo sapiens
gattcagtgatatta

SEQ ID NO: 667424 - DNA, 15 bp, Homo sapiens
attcagtgatattat

SEQ ID NO: 667425 - DNA, 15 bp, Homo sapiens
ttcagtgatattatt

SEQ ID NO: 667426 - DNA, 15 bp, Homo sapiens
tcagtgatattattt

SEQ ID NO: 667427 - DNA, 15 bp, Homo sapiens
cagtgatattatttt

SEQ ID NO: 667428 - DNA, 15 bp, Homo sapiens
agtgatattattttg

SEQ ID NO: 667429 - DNA, 15 bp, Homo sapiens
gtgatattattttgt

SEQ ID NO: 667430 - DNA, 15 bp, Homo sapiens
tgatattattttgta

SEQ ID NO: 667431 - DNA, 15 bp, Homo sapiens
gatattattttgtaa

SEQ ID NO: 667432 - DNA, 15 bp, Homo sapiens
atattattttgtaaa

SEQ ID NO: 667433 - DNA, 15 bp, Homo sapiens
tattattttgtaaac

SEQ ID NO: 667434 - DNA, 15 bp, Homo sapiens
attattttgtaaact

SEQ ID NO: 667435 - DNA, 15 bp, Homo sapiens
ttattttgtaaactg

SEQ ID NO: 667436 - DNA, 15 bp, Homo sapiens
tattttgtaaactgt

SEQ ID NO: 667437 - DNA, 15 bp, Homo sapiens
attttgtaaactgta

SEQ ID NO: 667438 - DNA, 15 bp, Homo sapiens
ttttgtaaactgtaa

SEQ ID NO: 667439 - DNA, 15 bp, Homo sapiens
tttgtaaactgtaaa

SEQ ID NO: 667440 - DNA, 15 bp, Homo sapiens
ttgtaaactgtaaag

SEQ ID NO: 667441 - DNA, 15 bp, Homo sapiens
tgtaaactgtaaagc

SEQ ID NO: 667442 - DNA, 15 bp, Homo sapiens
gtaaactgtaaagcc

SEQ ID NO: 667443 - DNA, 15 bp, Homo sapiens
taaactgtaaagcct

SEQ ID NO: 667444 - DNA, 15 bp, Homo sapiens
aaactgtaaagcctt

SEQ ID NO: 667445 - DNA, 15 bp, Homo sapiens
aactgtaaagccttt

SEQ ID NO: 667446 - DNA, 15 bp, Homo sapiens
actgtaaagcctttg

SEQ ID NO: 667447 - DNA, 15 bp, Homo sapiens
ctgtaaagcctttgc

SEQ ID NO: 667448 - DNA, 15 bp, Homo sapiens
tgtaaagcctttgca

SEQ ID NO: 667449 - DNA, 15 bp, Homo sapiens
gtaaagcctttgcaa

SEQ ID NO: 667450 - DNA, 15 bp, Homo sapiens
taaagcctttgcaaa

SEQ ID NO: 667451 - DNA, 15 bp, Homo sapiens
aaagcctttgcaaat

SEQ ID NO: 667452 - DNA, 15 bp, Homo sapiens
aagcctttgcaaatg

SEQ ID NO: 667453 - DNA, 15 bp, Homo sapiens
agcctttgcaaatgt

SEQ ID NO: 667454 - DNA, 15 bp, Homo sapiens
gcctttgcaaatgtt

SEQ ID NO: 667455 - DNA, 15 bp, Homo sapiens
cctttgcaaatgtta

SEQ ID NO: 667456 - DNA, 15 bp, Homo sapiens
ctttgcaaatgttaa

SEQ ID NO: 667457 - DNA, 15 bp, Homo sapiens
tttgcaaatgttaag

SEQ ID NO: 667458 - DNA, 15 bp, Homo sapiens
ttgcaaatgttaagc

SEQ ID NO: 667459 - DNA, 15 bp, Homo sapiens
tgcaaatgttaagca

SEQ ID NO: 667460 - DNA, 15 bp, Homo sapiens
gcaaatgttaagcaa

SEQ ID NO: 667461 - DNA, 15 bp, Homo sapiens
caaatgttaagcaag

SEQ ID NO: 667462 - DNA, 15 bp, Homo sapiens
aaatgttaagcaaga

SEQ ID NO: 667463 - DNA, 15 bp, Homo sapiens
aatgttaagcaagat

SEQ ID NO: 667464 - DNA, 15 bp, Homo sapiens
atgttaagcaagatt

SEQ ID NO: 667465 - DNA, 15 bp, Homo sapiens
tgttaagcaagatta

SEQ ID NO: 667466 - DNA, 15 bp, Homo sapiens
gttaagcaagattat

SEQ ID NO: 667467 - DNA, 15 bp, Homo sapiens
ttaagcaagattatt

SEQ ID NO: 667468 - DNA, 15 bp, Homo sapiens
taagcaagattatta

SEQ ID NO: 667469 - DNA, 15 bp, Homo sapiens
aagcaagattattat

SEQ ID NO: 667470 - DNA, 15 bp, Homo sapiens
agcaagattattatt

SEQ ID NO: 667471 - DNA, 15 bp, Homo sapiens
gcaagattattatta

SEQ ID NO: 667472 - DNA, 15 bp, Homo sapiens
caagattattattat

SEQ ID NO: 667473 - DNA, 15 bp, Homo sapiens
aagattattattatt

SEQ ID NO: 667474 - DNA, 15 bp, Homo sapiens
agattattattattg

SEQ ID NO: 667475 - DNA, 15 bp, Homo sapiens
gattattattattgc

SEQ ID NO: 667476 - DNA, 15 bp, Homo sapiens
attattattattgcc

SEQ ID NO: 667477 - DNA, 15 bp, Homo sapiens
ttattattattgccg

SEQ ID NO: 667478 - DNA, 15 bp, Homo sapiens
tattattattgccgt

SEQ ID NO: 667479 - DNA, 15 bp, Homo sapiens
attattattgccgtt

SEQ ID NO: 667480 - DNA, 15 bp, Homo sapiens
ttattattgccgttg

SEQ ID NO: 667481 - DNA, 15 bp, Homo sapiens
tattattgccgttgt

SEQ ID NO: 667482 - DNA, 15 bp, Homo sapiens
attattgccgttgtt

SEQ ID NO: 667483 - DNA, 15 bp, Homo sapiens
ttattgccgttgtta

SEQ ID NO: 667484 - DNA, 15 bp, Homo sapiens
tattgccgttgttat

SEQ ID NO: 667485 - DNA, 15 bp, Homo sapiens
attgccgttgttatt

SEQ ID NO: 667486 - DNA, 15 bp, Homo sapiens
ttgccgttgttatta

SEQ ID NO: 667487 - DNA, 15 bp, Homo sapiens
tgccgttgttattag

SEQ ID NO: 667488 - DNA, 15 bp, Homo sapiens
gccgttgttattagt

SEQ ID NO: 667489 - DNA, 15 bp, Homo sapiens
ccgttgttattagtc

SEQ ID NO: 667490 - DNA, 15 bp, Homo sapiens
cgttgttattagtcc

SEQ ID NO: 667491 - DNA, 15 bp, Homo sapiens
gttgttattagtcct

SEQ ID NO: 667492 - DNA, 15 bp, Homo sapiens
ttgttattagtcctc

SEQ ID NO: 667493 - DNA, 15 bp, Homo sapiens
tgttattagtcctca

SEQ ID NO: 667494 - DNA, 15 bp, Homo sapiens
gttattagtcctcag

SEQ ID NO: 667495 - DNA, 15 bp, Homo sapiens
ttattagtcctcagt

SEQ ID NO: 667496 - DNA, 15 bp, Homo sapiens
tattagtcctcagtg

SEQ ID NO: 667497 - DNA, 15 bp, Homo sapiens
attagtcctcagtga

SEQ ID NO: 667498 - DNA, 15 bp, Homo sapiens
ttagtcctcagtgat

SEQ ID NO: 667499 - DNA, 15 bp, Homo sapiens
tagtcctcagtgatc

SEQ ID NO: 667500 - DNA, 15 bp, Homo sapiens
agtcctcagtgatct

SEQ ID NO: 667501 - DNA, 15 bp, Homo sapiens
gtcctcagtgatctt

SEQ ID NO: 667502 - DNA, 15 bp, Homo sapiens
tcctcagtgatcttt

SEQ ID NO: 667503 - DNA, 15 bp, Homo sapiens
cctcagtgatctttt

SEQ ID NO: 667504 - DNA, 15 bp, Homo sapiens
ctcagtgatcttttt

SEQ ID NO: 667505 - DNA, 15 bp, Homo sapiens
tcagtgatctttttt

SEQ ID NO: 667506 - DNA, 15 bp, Homo sapiens
cagtgatcttttttt

SEQ ID NO: 667507 - DNA, 15 bp, Homo sapiens
agtgatctttttttt

SEQ ID NO: 667508 - DNA, 15 bp, Homo sapiens
gtgatcttttttttt

SEQ ID NO: 667509 - DNA, 15 bp, Homo sapiens
tgatctttttttttt

SEQ ID NO: 667510 - DNA, 15 bp, Homo sapiens
gatcttttttttttt

SEQ ID NO: 667511 - DNA, 15 bp, Homo sapiens
ttttttttttttgga

SEQ ID NO: 667512 - DNA, 15 bp, Homo sapiens
tttttttttttggag

SEQ ID NO: 667513 - DNA, 15 bp, Homo sapiens
ttttttttttggaga

SEQ ID NO: 667514 - DNA, 15 bp, Homo sapiens
tttttttttggagac

SEQ ID NO: 667515 - DNA, 15 bp, Homo sapiens
ttttttttggagaca

SEQ ID NO: 667516 - DNA, 15 bp, Homo sapiens
tttttttggagacag

SEQ ID NO: 667517 - DNA, 15 bp, Homo sapiens
ttttttggagacaga

SEQ ID NO: 667518 - DNA, 15 bp, Homo sapiens
tttttggagacagag

SEQ ID NO: 667519 - DNA, 15 bp, Homo sapiens
ttttggagacagagt

SEQ ID NO: 667520 - DNA, 15 bp, Homo sapiens
tttggagacagagtt

SEQ ID NO: 667521 - DNA, 15 bp, Homo sapiens
ttggagacagagttt

SEQ ID NO: 667522 - DNA, 15 bp, Homo sapiens
tggagacagagtttt

SEQ ID NO: 667523 - DNA, 15 bp, Homo sapiens
ggagacagagtttta

SEQ ID NO: 667524 - DNA, 15 bp, Homo sapiens
gagacagagttttac

SEQ ID NO: 667525 - DNA, 15 bp, Homo sapiens
agacagagttttact

SEQ ID NO: 667526 - DNA, 15 bp, Homo sapiens
gacagagttttactc

SEQ ID NO: 667527 - DNA, 15 bp, Homo sapiens
acagagttttactct

SEQ ID NO: 667528 - DNA, 15 bp, Homo sapiens
cagagttttactctg

SEQ ID NO: 667529 - DNA, 15 bp, Homo sapiens
agagttttactctgt

SEQ ID NO: 667530 - DNA, 15 bp, Homo sapiens
gagttttactctgtc

SEQ ID NO: 667531 - DNA, 15 bp, Homo sapiens
agttttactctgtcg

SEQ ID NO: 667532 - DNA, 15 bp, Homo sapiens
gttttactctgtcgc

SEQ ID NO: 667533 - DNA, 15 bp, Homo sapiens
ttttactctgtcgcc

SEQ ID NO: 667534 - DNA, 15 bp, Homo sapiens
tttactctgtcgcca

SEQ ID NO: 667535 - DNA, 15 bp, Homo sapiens
ttactctgtcgccaa

SEQ ID NO: 667536 - DNA, 15 bp, Homo sapiens
tactctgtcgccaag

SEQ ID NO: 667537 - DNA, 15 bp, Homo sapiens
actctgtcgccaagg

SEQ ID NO: 667538 - DNA, 15 bp, Homo sapiens
ctctgtcgccaaggc

SEQ ID NO: 667539 - DNA, 15 bp, Homo sapiens
tctgtcgccaaggct

SEQ ID NO: 667540 - DNA, 15 bp, Homo sapiens
ctgtcgccaaggctg

SEQ ID NO: 667541 - DNA, 15 bp, Homo sapiens
tgtcgccaaggctgg

SEQ ID NO: 667542 - DNA, 15 bp, Homo sapiens
gtcgccaaggctgga

SEQ ID NO: 667543 - DNA, 15 bp, Homo sapiens
tcgccaaggctggaa

SEQ ID NO: 667544 - DNA, 15 bp, Homo sapiens
cgccaaggctggaat

SEQ ID NO: 667545 - DNA, 15 bp, Homo sapiens
gccaaggctggaatg

SEQ ID NO: 667546 - DNA, 15 bp, Homo sapiens
ccaaggctggaatgc

SEQ ID NO: 667547 - DNA, 15 bp, Homo sapiens
caaggctggaatgca

SEQ ID NO: 667548 - DNA, 15 bp, Homo sapiens
aaggctggaatgcag

SEQ ID NO: 667549 - DNA, 15 bp, Homo sapiens
aggctggaatgcagt

SEQ ID NO: 667550 - DNA, 15 bp, Homo sapiens
ggctggaatgcagtg

SEQ ID NO: 667551 - DNA, 15 bp, Homo sapiens
gctggaatgcagtgg

SEQ ID NO: 667552 - DNA, 15 bp, Homo sapiens
ctggaatgcagtggc

SEQ ID NO: 667553 - DNA, 15 bp, Homo sapiens
tggaatgcagtggca

SEQ ID NO: 667554 - DNA, 15 bp, Homo sapiens
ggaatgcagtggcac

SEQ ID NO: 667555 - DNA, 15 bp, Homo sapiens
gaatgcagtggcaca

SEQ ID NO: 667556 - DNA, 15 bp, Homo sapiens
aatgcagtggcacaa

SEQ ID NO: 667557 - DNA, 15 bp, Homo sapiens
atgcagtggcacaat

SEQ ID NO: 667558 - DNA, 15 bp, Homo sapiens
tgcagtggcacaatc

SEQ ID NO: 667559 - DNA, 15 bp, Homo sapiens
gcagtggcacaatct

SEQ ID NO: 667560 - DNA, 15 bp, Homo sapiens
cagtggcacaatctc

SEQ ID NO: 667561 - DNA, 15 bp, Homo sapiens
agtggcacaatctca

SEQ ID NO: 667562 - DNA, 15 bp, Homo sapiens
gtggcacaatctcag

SEQ ID NO: 667563 - DNA, 15 bp, Homo sapiens
tggcacaatctcagc

SEQ ID NO: 667564 - DNA, 15 bp, Homo sapiens
ggcacaatctcagct

SEQ ID NO: 667565 - DNA, 15 bp, Homo sapiens
gcacaatctcagctc

SEQ ID NO: 667566 - DNA, 15 bp, Homo sapiens
cacaatctcagctca

SEQ ID NO: 667567 - DNA, 15 bp, Homo sapiens
acaatctcagctcac

SEQ ID NO: 667568 - DNA, 15 bp, Homo sapiens
caatctcagctcact

SEQ ID NO: 667569 - DNA, 15 bp, Homo sapiens
aatctcagctcactg

SEQ ID NO: 667570 - DNA, 15 bp, Homo sapiens
atctcagctcactgc

SEQ ID NO: 667571 - DNA, 15 bp, Homo sapiens
tctcagctcactgca

SEQ ID NO: 667572 - DNA, 15 bp, Homo sapiens
ctcagctcactgcaa

SEQ ID NO: 667573 - DNA, 15 bp, Homo sapiens
tcagctcactgcaac

SEQ ID NO: 667574 - DNA, 15 bp, Homo sapiens
cagctcactgcaacc

SEQ ID NO: 667575 - DNA, 15 bp, Homo sapiens
agctcactgcaacct

SEQ ID NO: 667576 - DNA, 15 bp, Homo sapiens
ctcactgcaacctcc

SEQ ID NO: 667577 - DNA, 15 bp, Homo sapiens
tcactgcaacctccg

SEQ ID NO: 667578 - DNA, 15 bp, Homo sapiens
cactgcaacctccgc

SEQ ID NO: 667579 - DNA, 15 bp, Homo sapiens
actgcaacctccgcc

SEQ ID NO: 667580 - DNA, 15 bp, Homo sapiens
ctgcaacctccgcct

SEQ ID NO: 667581 - DNA, 15 bp, Homo sapiens
tgcaacctccgcctc

SEQ ID NO: 667582 - DNA, 15 bp, Homo sapiens
gcaacctccgcctcc

SEQ ID NO: 667583 - DNA, 15 bp, Homo sapiens
caacctccgcctcct

SEQ ID NO: 667584 - DNA, 15 bp, Homo sapiens
aacctccgcctcctg

SEQ ID NO: 667585 - DNA, 15 bp, Homo sapiens
acctccgcctcctgg

SEQ ID NO: 667586 - DNA, 15 bp, Homo sapiens
cctccgcctcctggg

SEQ ID NO: 667587 - DNA, 15 bp, Homo sapiens
ctccgcctcctgggt

SEQ ID NO: 667588 - DNA, 15 bp, Homo sapiens
tccgcctcctgggtt

SEQ ID NO: 667589 - DNA, 15 bp, Homo sapiens
ccgcctcctgggttc

SEQ ID NO: 667590 - DNA, 15 bp, Homo sapiens
cgcctcctgggttca

SEQ ID NO: 667591 - DNA, 15 bp, Homo sapiens
tcctgggttcaagca

SEQ ID NO: 667592 - DNA, 15 bp, Homo sapiens
cctgggttcaagcaa

SEQ ID NO: 667593 - DNA, 15 bp, Homo sapiens
ctgggttcaagcaat

SEQ ID NO: 667594 - DNA, 15 bp, Homo sapiens
tgggttcaagcaatt

SEQ ID NO: 667595 - DNA, 15 bp, Homo sapiens
gggttcaagcaattt

SEQ ID NO: 667596 - DNA, 15 bp, Homo sapiens
ggttcaagcaatttt

SEQ ID NO: 667597 - DNA, 15 bp, Homo sapiens
gttcaagcaattttc

SEQ ID NO: 667598 - DNA, 15 bp, Homo sapiens
ttcaagcaattttcc

SEQ ID NO: 667599 - DNA, 15 bp, Homo sapiens
tcaagcaattttcct

SEQ ID NO: 667600 - DNA, 15 bp, Homo sapiens
caagcaattttcctg

SEQ ID NO: 667601 - DNA, 15 bp, Homo sapiens
aagcaattttcctgc

SEQ ID NO: 667602 - DNA, 15 bp, Homo sapiens
agcaattttcctgcc

SEQ ID NO: 667603 - DNA, 15 bp, Homo sapiens
gcaattttcctgcct

SEQ ID NO: 667604 - DNA, 15 bp, Homo sapiens
caattttcctgcctc

SEQ ID NO: 667605 - DNA, 15 bp, Homo sapiens
aattttcctgcctca

SEQ ID NO: 667606 - DNA, 15 bp, Homo sapiens
attttcctgcctcag

SEQ ID NO: 667607 - DNA, 15 bp, Homo sapiens
ttttcctgcctcagc

SEQ ID NO: 667608 - DNA, 15 bp, Homo sapiens
tttcctgcctcagcc

SEQ ID NO: 667609 - DNA, 15 bp, Homo sapiens
ttcctgcctcagcct

SEQ ID NO: 667610 - DNA, 15 bp, Homo sapiens
ctgcctcagcctcct

SEQ ID NO: 667611 - DNA, 15 bp, Homo sapiens
tgcctcagcctcctg

SEQ ID NO: 667612 - DNA, 15 bp, Homo sapiens
gcctcagcctcctga

SEQ ID NO: 667613 - DNA, 15 bp, Homo sapiens
cctcagcctcctgag

SEQ ID NO: 667614 - DNA, 15 bp, Homo sapiens
ctcagcctcctgagt

SEQ ID NO: 667615 - DNA, 15 bp, Homo sapiens
tcagcctcctgagta

SEQ ID NO: 667616 - DNA, 15 bp, Homo sapiens
cagcctcctgagtag

SEQ ID NO: 667617 - DNA, 15 bp, Homo sapiens
agcctcctgagtagc

SEQ ID NO: 667618 - DNA, 15 bp, Homo sapiens
gcctcctgagtagct

SEQ ID NO: 667619 - DNA, 15 bp, Homo sapiens
cctcctgagtagctg

SEQ ID NO: 667620 - DNA, 15 bp, Homo sapiens
ctcctgagtagctga

SEQ ID NO: 667621 - DNA, 15 bp, Homo sapiens
tcctgagtagctgaa

SEQ ID NO: 667622 - DNA, 15 bp, Homo sapiens
cctgagtagctgaaa

SEQ ID NO: 667623 - DNA, 15 bp, Homo sapiens
ctgagtagctgaaac

SEQ ID NO: 667624 - DNA, 15 bp, Homo sapiens
tgagtagctgaaact

SEQ ID NO: 667625 - DNA, 15 bp, Homo sapiens
gagtagctgaaacta

SEQ ID NO: 667626 - DNA, 15 bp, Homo sapiens
agtagctgaaactac

SEQ ID NO: 667627 - DNA, 15 bp, Homo sapiens
gtagctgaaactaca

SEQ ID NO: 667628 - DNA, 15 bp, Homo sapiens
tagctgaaactacag

SEQ ID NO: 667629 - DNA, 15 bp, Homo sapiens
agctgaaactacagg

SEQ ID NO: 667630 - DNA, 15 bp, Homo sapiens
gctgaaactacaggc

SEQ ID NO: 667631 - DNA, 15 bp, Homo sapiens
ctgaaactacaggca

SEQ ID NO: 667632 - DNA, 15 bp, Homo sapiens
tgaaactacaggcac

SEQ ID NO: 667633 - DNA, 15 bp, Homo sapiens
gaaactacaggcaca

SEQ ID NO: 667634 - DNA, 15 bp, Homo sapiens
aaactacaggcacac

SEQ ID NO: 667635 - DNA, 15 bp, Homo sapiens
aactacaggcacacg

SEQ ID NO: 667636 - DNA, 15 bp, Homo sapiens
actacaggcacacgc

SEQ ID NO: 667637 - DNA, 15 bp, Homo sapiens
ctacaggcacacgcc

SEQ ID NO: 667638 - DNA, 15 bp, Homo sapiens
tacaggcacacgcca

SEQ ID NO: 667639 - DNA, 15 bp, Homo sapiens
acaggcacacgccac

SEQ ID NO: 667640 - DNA, 15 bp, Homo sapiens
caggcacacgccacc

SEQ ID NO: 667641 - DNA, 15 bp, Homo sapiens
aggcacacgccacca

SEQ ID NO: 667642 - DNA, 15 bp, Homo sapiens
ggcacacgccaccac

SEQ ID NO: 667643 - DNA, 15 bp, Homo sapiens
gcacacgccaccaca

SEQ ID NO: 667644 - DNA, 15 bp, Homo sapiens
cacacgccaccacac

SEQ ID NO: 667645 - DNA, 15 bp, Homo sapiens
acacgccaccacacc

SEQ ID NO: 667646 - DNA, 15 bp, Homo sapiens
cacgccaccacacca

SEQ ID NO: 667647 - DNA, 15 bp, Homo sapiens
acgccaccacaccag

SEQ ID NO: 667648 - DNA, 15 bp, Homo sapiens
cgccaccacaccagg

SEQ ID NO: 667649 - DNA, 15 bp, Homo sapiens
gccaccacaccaggc

SEQ ID NO: 667650 - DNA, 15 bp, Homo sapiens
ccaccacaccaggct

SEQ ID NO: 667651 - DNA, 15 bp, Homo sapiens
caccacaccaggcta

SEQ ID NO: 667652 - DNA, 15 bp, Homo sapiens
accacaccaggctaa

SEQ ID NO: 667653 - DNA, 15 bp, Homo sapiens
ccacaccaggctaat

SEQ ID NO: 667654 - DNA, 15 bp, Homo sapiens
cacaccaggctaatt

SEQ ID NO: 667655 - DNA, 15 bp, Homo sapiens
acaccaggctaattt

SEQ ID NO: 667656 - DNA, 15 bp, Homo sapiens
caccaggctaatttt

SEQ ID NO: 667657 - DNA, 15 bp, Homo sapiens
accaggctaattttt

SEQ ID NO: 667658 - DNA, 15 bp, Homo sapiens
ccaggctaatttttt

SEQ ID NO: 667659 - DNA, 15 bp, Homo sapiens
caggctaattttttg

SEQ ID NO: 667660 - DNA, 15 bp, Homo sapiens
aggctaattttttgt

SEQ ID NO: 667661 - DNA, 15 bp, Homo sapiens
tcaccatgttggcca

SEQ ID NO: 667662 - DNA, 15 bp, Homo sapiens
caccatgttggccag

SEQ ID NO: 667663 - DNA, 15 bp, Homo sapiens
accatgttggccagg

SEQ ID NO: 667664 - DNA, 15 bp, Homo sapiens
ccatgttggccaggc

SEQ ID NO: 667665 - DNA, 15 bp, Homo sapiens
catgttggccaggct

SEQ ID NO: 667666 - DNA, 15 bp, Homo sapiens
atgttggccaggctg

SEQ ID NO: 667667 - DNA, 15 bp, Homo sapiens
tgttggccaggctgg

SEQ ID NO: 667668 - DNA, 15 bp, Homo sapiens
gttggccaggctggt

SEQ ID NO: 667669 - DNA, 15 bp, Homo sapiens
ttggccaggctggtc

SEQ ID NO: 667670 - DNA, 15 bp, Homo sapiens
tggccaggctggtct

SEQ ID NO: 667671 - DNA, 15 bp, Homo sapiens
ggccaggctggtctc

SEQ ID NO: 667672 - DNA, 15 bp, Homo sapiens
gccaggctggtctcc

SEQ ID NO: 667673 - DNA, 15 bp, Homo sapiens
ccaggctggtctcca

SEQ ID NO: 667674 - DNA, 15 bp, Homo sapiens
caggctggtctccag

SEQ ID NO: 667675 - DNA, 15 bp, Homo sapiens
aggctggtctccagc

SEQ ID NO: 667676 - DNA, 15 bp, Homo sapiens
ggctggtctccagct

SEQ ID NO: 667677 - DNA, 15 bp, Homo sapiens
gctggtctccagctc

SEQ ID NO: 667678 - DNA, 15 bp, Homo sapiens
ctggtctccagctcc

SEQ ID NO: 667679 - DNA, 15 bp, Homo sapiens
tggtctccagctcct

SEQ ID NO: 667680 - DNA, 15 bp, Homo sapiens
ggtctccagctcctg

SEQ ID NO: 667681 - DNA, 15 bp, Homo sapiens
gtctccagctcctga

SEQ ID NO: 667682 - DNA, 15 bp, Homo sapiens
tctccagctcctgac

SEQ ID NO: 667683 - DNA, 15 bp, Homo sapiens
ctccagctcctgacc

SEQ ID NO: 667684 - DNA, 15 bp, Homo sapiens
tccagctcctgacct

SEQ ID NO: 667685 - DNA, 15 bp, Homo sapiens
ccagctcctgacctc

SEQ ID NO: 667686 - DNA, 15 bp, Homo sapiens
cagctcctgacctca

SEQ ID NO: 667687 - DNA, 15 bp, Homo sapiens
agctcctgacctcaa

SEQ ID NO: 667688 - DNA, 15 bp, Homo sapiens
gctcctgacctcaag

SEQ ID NO: 667689 - DNA, 15 bp, Homo sapiens
ctcctgacctcaagt

SEQ ID NO: 667690 - DNA, 15 bp, Homo sapiens
tcctgacctcaagtg

SEQ ID NO: 667691 - DNA, 15 bp, Homo sapiens
cctgacctcaagtga

SEQ ID NO: 667692 - DNA, 15 bp, Homo sapiens
ctgacctcaagtgat

SEQ ID NO: 667693 - DNA, 15 bp, Homo sapiens
tgacctcaagtgatc

SEQ ID NO: 667694 - DNA, 15 bp, Homo sapiens
gacctcaagtgatct

SEQ ID NO: 667695 - DNA, 15 bp, Homo sapiens
acctcaagtgatctg

SEQ ID NO: 667696 - DNA, 15 bp, Homo sapiens
cctcaagtgatctgc

SEQ ID NO: 667697 - DNA, 15 bp, Homo sapiens
caagtgatctgccca

SEQ ID NO: 667698 - DNA, 15 bp, Homo sapiens
aagtgatctgcccac

SEQ ID NO: 667699 - DNA, 15 bp, Homo sapiens
agtgatctgcccacc

SEQ ID NO: 667700 - DNA, 15 bp, Homo sapiens
gtgatctgcccacct

SEQ ID NO: 667701 - DNA, 15 bp, Homo sapiens
tgatctgcccacctc

SEQ ID NO: 667702 - DNA, 15 bp, Homo sapiens
gatctgcccacctcg

SEQ ID NO: 667703 - DNA, 15 bp, Homo sapiens
atctgcccacctcgg

SEQ ID NO: 667704 - DNA, 15 bp, Homo sapiens
tctgcccacctcggc

SEQ ID NO: 667705 - DNA, 15 bp, Homo sapiens
ctgcccacctcggcc

SEQ ID NO: 667706 - DNA, 15 bp, Homo sapiens
tgcccacctcggcct

SEQ ID NO: 667707 - DNA, 15 bp, Homo sapiens
gcccacctcggcctc

SEQ ID NO: 667708 - DNA, 15 bp, Homo sapiens
cccacctcggcctcc

SEQ ID NO: 667709 - DNA, 15 bp, Homo sapiens
ccacctcggcctccc

SEQ ID NO: 667710 - DNA, 15 bp, Homo sapiens
cacctcggcctccca

SEQ ID NO: 667711 - DNA, 15 bp, Homo sapiens
acctcggcctcccaa

SEQ ID NO: 667712 - DNA, 15 bp, Homo sapiens
gctgggattacaggt

SEQ ID NO: 667713 - DNA, 15 bp, Homo sapiens
ctgggattacaggtg

SEQ ID NO: 667714 - DNA, 15 bp, Homo sapiens
tgggattacaggtgt

SEQ ID NO: 667715 - DNA, 15 bp, Homo sapiens
gggattacaggtgtg

SEQ ID NO: 667716 - DNA, 15 bp, Homo sapiens
ggattacaggtgtga

SEQ ID NO: 667717 - DNA, 15 bp, Homo sapiens
gattacaggtgtgag

SEQ ID NO: 667718 - DNA, 15 bp, Homo sapiens
attacaggtgtgagc

SEQ ID NO: 667719 - DNA, 15 bp, Homo sapiens
ttacaggtgtgagcc

SEQ ID NO: 667720 - DNA, 15 bp, Homo sapiens
tacaggtgtgagcca

SEQ ID NO: 667721 - DNA, 15 bp, Homo sapiens
acaggtgtgagccac

SEQ ID NO: 667722 - DNA, 15 bp, Homo sapiens
caggtgtgagccacc

SEQ ID NO: 667723 - DNA, 15 bp, Homo sapiens
aggtgtgagccacca

SEQ ID NO: 667724 - DNA, 15 bp, Homo sapiens
ggtgtgagccaccac

SEQ ID NO: 667725 - DNA, 15 bp, Homo sapiens
gtgtgagccaccaca

SEQ ID NO: 667726 - DNA, 15 bp, Homo sapiens
tgtgagccaccacac

SEQ ID NO: 667727 - DNA, 15 bp, Homo sapiens
gtgagccaccacacc

SEQ ID NO: 667728 - DNA, 15 bp, Homo sapiens
tgagccaccacacct

SEQ ID NO: 667729 - DNA, 15 bp, Homo sapiens
gagccaccacacctg

SEQ ID NO: 667730 - DNA, 15 bp, Homo sapiens
agccaccacacctgg

SEQ ID NO: 667731 - DNA, 15 bp, Homo sapiens
gccaccacacctggc

SEQ ID NO: 667732 - DNA, 15 bp, Homo sapiens
ccaccacacctggca

SEQ ID NO: 667733 - DNA, 15 bp, Homo sapiens
caccacacctggcac

SEQ ID NO: 667734 - DNA, 15 bp, Homo sapiens
accacacctggcaca

SEQ ID NO: 667735 - DNA, 15 bp, Homo sapiens
ccacacctggcacag

SEQ ID NO: 667736 - DNA, 15 bp, Homo sapiens
cacacctggcacagt

SEQ ID NO: 667737 - DNA, 15 bp, Homo sapiens
acacctggcacagta

SEQ ID NO: 667738 - DNA, 15 bp, Homo sapiens
cacctggcacagtaa

SEQ ID NO: 667739 - DNA, 15 bp, Homo sapiens
acctggcacagtaat

SEQ ID NO: 667740 - DNA, 15 bp, Homo sapiens
cctggcacagtaatc

SEQ ID NO: 667741 - DNA, 15 bp, Homo sapiens
ctggcacagtaatct

SEQ ID NO: 667742 - DNA, 15 bp, Homo sapiens
tggcacagtaatctt

SEQ ID NO: 667743 - DNA, 15 bp, Homo sapiens
ggcacagtaatctta

SEQ ID NO: 667744 - DNA, 15 bp, Homo sapiens
gcacagtaatcttaa

SEQ ID NO: 667745 - DNA, 15 bp, Homo sapiens
cacagtaatcttaat

SEQ ID NO: 667746 - DNA, 15 bp, Homo sapiens
acagtaatcttaatt

SEQ ID NO: 667747 - DNA, 15 bp, Homo sapiens
cagtaatcttaattg

SEQ ID NO: 667748 - DNA, 15 bp, Homo sapiens
agtaatcttaattga

SEQ ID NO: 667749 - DNA, 15 bp, Homo sapiens
gtaatcttaattgaa

SEQ ID NO: 667750 - DNA, 15 bp, Homo sapiens
taatcttaattgaaa

SEQ ID NO: 667751 - DNA, 15 bp, Homo sapiens
aatcttaattgaaaa

SEQ ID NO: 667752 - DNA, 15 bp, Homo sapiens
atcttaattgaaaag

SEQ ID NO: 667753 - DNA, 15 bp, Homo sapiens
tcttaattgaaaagt

SEQ ID NO: 667754 - DNA, 15 bp, Homo sapiens
cttaattgaaaagtc

SEQ ID NO: 667755 - DNA, 15 bp, Homo sapiens
ttaattgaaaagtct

SEQ ID NO: 667756 - DNA, 15 bp, Homo sapiens
taattgaaaagtctg

SEQ ID NO: 667757 - DNA, 15 bp, Homo sapiens
aattgaaaagtctgt

SEQ ID NO: 667758 - DNA, 15 bp, Homo sapiens
attgaaaagtctgtg

SEQ ID NO: 667759 - DNA, 15 bp, Homo sapiens
ttgaaaagtctgtgg

SEQ ID NO: 667760 - DNA, 15 bp, Homo sapiens
tgaaaagtctgtgga

SEQ ID NO: 667761 - DNA, 15 bp, Homo sapiens
gaaaagtctgtggat

SEQ ID NO: 667762 - DNA, 15 bp, Homo sapiens
aaaagtctgtggata

SEQ ID NO: 667763 - DNA, 15 bp, Homo sapiens
aaagtctgtggatag

SEQ ID NO: 667764 - DNA, 15 bp, Homo sapiens
aagtctgtggatagc

SEQ ID NO: 667765 - DNA, 15 bp, Homo sapiens
agtctgtggatagct

SEQ ID NO: 667766 - DNA, 15 bp, Homo sapiens
gtctgtggatagctt

SEQ ID NO: 667767 - DNA, 15 bp, Homo sapiens
tctgtggatagcttt

SEQ ID NO: 667768 - DNA, 15 bp, Homo sapiens
ctgtggatagctttc

SEQ ID NO: 667769 - DNA, 15 bp, Homo sapiens
tgtggatagctttcc

SEQ ID NO: 667770 - DNA, 15 bp, Homo sapiens
gtggatagctttcca

SEQ ID NO: 667771 - DNA, 15 bp, Homo sapiens
tggatagctttccaa

SEQ ID NO: 667772 - DNA, 15 bp, Homo sapiens
ggatagctttccaaa

SEQ ID NO: 667773 - DNA, 15 bp, Homo sapiens
gatagctttccaaag

SEQ ID NO: 667774 - DNA, 15 bp, Homo sapiens
atagctttccaaagg

SEQ ID NO: 667775 - DNA, 15 bp, Homo sapiens
tagctttccaaagga

SEQ ID NO: 667776 - DNA, 15 bp, Homo sapiens
agctttccaaaggaa

SEQ ID NO: 667777 - DNA, 15 bp, Homo sapiens
gctttccaaaggaaa

SEQ ID NO: 667778 - DNA, 15 bp, Homo sapiens
ctttccaaaggaaag

SEQ ID NO: 667779 - DNA, 15 bp, Homo sapiens
tttccaaaggaaagc

SEQ ID NO: 667780 - DNA, 15 bp, Homo sapiens
ttccaaaggaaagct

SEQ ID NO: 667781 - DNA, 15 bp, Homo sapiens
tccaaaggaaagctt

SEQ ID NO: 667782 - DNA, 15 bp, Homo sapiens
ccaaaggaaagcttg

SEQ ID NO: 667783 - DNA, 15 bp, Homo sapiens
caaaggaaagcttgg

SEQ ID NO: 667784 - DNA, 15 bp, Homo sapiens
aaaggaaagcttgga

SEQ ID NO: 667785 - DNA, 15 bp, Homo sapiens
aaggaaagcttggag

SEQ ID NO: 667786 - DNA, 15 bp, Homo sapiens
aggaaagcttggagc

SEQ ID NO: 667787 - DNA, 15 bp, Homo sapiens
ggaaagcttggagct

SEQ ID NO: 667788 - DNA, 15 bp, Homo sapiens
gaaagcttggagctt

SEQ ID NO: 667789 - DNA, 15 bp, Homo sapiens
aaagcttggagcttg

SEQ ID NO: 667790 - DNA, 15 bp, Homo sapiens
aagcttggagcttgg

SEQ ID NO: 667791 - DNA, 15 bp, Homo sapiens
agcttggagcttgga

SEQ ID NO: 667792 - DNA, 15 bp, Homo sapiens
gcttggagcttggat

SEQ ID NO: 667793 - DNA, 15 bp, Homo sapiens
cttggagcttggata

SEQ ID NO: 667794 - DNA, 15 bp, Homo sapiens
ttggagcttggataa

SEQ ID NO: 667795 - DNA, 15 bp, Homo sapiens
tggagcttggataag

SEQ ID NO: 667796 - DNA, 15 bp, Homo sapiens
ggagcttggataaga

SEQ ID NO: 667797 - DNA, 15 bp, Homo sapiens
gagcttggataagaa

SEQ ID NO: 667798 - DNA, 15 bp, Homo sapiens
agcttggataagaac

SEQ ID NO: 667799 - DNA, 15 bp, Homo sapiens
gcttggataagaacc

SEQ ID NO: 667800 - DNA, 15 bp, Homo sapiens
cttggataagaacca

SEQ ID NO: 667801 - DNA, 15 bp, Homo sapiens
ttggataagaaccaa

SEQ ID NO: 667802 - DNA, 15 bp, Homo sapiens
tggataagaaccaag

SEQ ID NO: 667803 - DNA, 15 bp, Homo sapiens
ggataagaaccaaga

SEQ ID NO: 667804 - DNA, 15 bp, Homo sapiens
gataagaaccaagag

SEQ ID NO: 667805 - DNA, 15 bp, Homo sapiens
ataagaaccaagaga

SEQ ID NO: 667806 - DNA, 15 bp, Homo sapiens
taagaaccaagagat

SEQ ID NO: 667807 - DNA, 15 bp, Homo sapiens
aagaaccaagagata

SEQ ID NO: 667808 - DNA, 15 bp, Homo sapiens
agaaccaagagataa

SEQ ID NO: 667809 - DNA, 15 bp, Homo sapiens
gaaccaagagataat

SEQ ID NO: 667810 - DNA, 15 bp, Homo sapiens
aaccaagagataatg

SEQ ID NO: 667811 - DNA, 15 bp, Homo sapiens
accaagagataatgg

SEQ ID NO: 667812 - DNA, 15 bp, Homo sapiens
ccaagagataatggg

SEQ ID NO: 667813 - DNA, 15 bp, Homo sapiens
caagagataatggga

SEQ ID NO: 667814 - DNA, 15 bp, Homo sapiens
aagagataatgggag

SEQ ID NO: 667815 - DNA, 15 bp, Homo sapiens
agagataatgggaga

SEQ ID NO: 667816 - DNA, 15 bp, Homo sapiens
gagataatgggagaa

SEQ ID NO: 667817 - DNA, 15 bp, Homo sapiens
agataatgggagaag

SEQ ID NO: 667818 - DNA, 15 bp, Homo sapiens
gataatgggagaagg

SEQ ID NO: 667819 - DNA, 15 bp, Homo sapiens
ataatgggagaaggt

SEQ ID NO: 667820 - DNA, 15 bp, Homo sapiens
taatgggagaaggtg

SEQ ID NO: 667821 - DNA, 15 bp, Homo sapiens
aatgggagaaggtga

SEQ ID NO: 667822 - DNA, 15 bp, Homo sapiens
atgggagaaggtgaa

SEQ ID NO: 667823 - DNA, 15 bp, Homo sapiens
tgggagaaggtgaat

SEQ ID NO: 667824 - DNA, 15 bp, Homo sapiens
gggagaaggtgaatg

SEQ ID NO: 667825 - DNA, 15 bp, Homo sapiens
ggagaaggtgaatgg

SEQ ID NO: 667826 - DNA, 15 bp, Homo sapiens
gagaaggtgaatggc

SEQ ID NO: 667827 - DNA, 15 bp, Homo sapiens
agaaggtgaatggcc

SEQ ID NO: 667828 - DNA, 15 bp, Homo sapiens
gaaggtgaatggcct

SEQ ID NO: 667829 - DNA, 15 bp, Homo sapiens
aaggtgaatggcctc

SEQ ID NO: 667830 - DNA, 15 bp, Homo sapiens
aggtgaatggcctct

SEQ ID NO: 667831 - DNA, 15 bp, Homo sapiens
ggtgaatggcctctt

SEQ ID NO: 667832 - DNA, 15 bp, Homo sapiens
gtgaatggcctcttc

SEQ ID NO: 667833 - DNA, 15 bp, Homo sapiens
tgaatggcctcttca

SEQ ID NO: 667834 - DNA, 15 bp, Homo sapiens
gaatggcctcttcag

SEQ ID NO: 667835 - DNA, 15 bp, Homo sapiens
aatggcctcttcagg

SEQ ID NO: 667836 - DNA, 15 bp, Homo sapiens
atggcctcttcaggg

SEQ ID NO: 667837 - DNA, 15 bp, Homo sapiens
tggcctcttcagggc

SEQ ID NO: 667838 - DNA, 15 bp, Homo sapiens
ggcctcttcagggcc

SEQ ID NO: 667839 - DNA, 15 bp, Homo sapiens
gcctcttcagggcct

SEQ ID NO: 667840 - DNA, 15 bp, Homo sapiens
cctcttcagggcctt

SEQ ID NO: 667841 - DNA, 15 bp, Homo sapiens
ctcttcagggccttt

SEQ ID NO: 667842 - DNA, 15 bp, Homo sapiens
tcttcagggcctttt

SEQ ID NO: 667843 - DNA, 15 bp, Homo sapiens
cttcagggccttttc

SEQ ID NO: 667844 - DNA, 15 bp, Homo sapiens
ttcagggccttttct

SEQ ID NO: 667845 - DNA, 15 bp, Homo sapiens
tcagggccttttcta

SEQ ID NO: 667846 - DNA, 15 bp, Homo sapiens
cagggccttttctag

SEQ ID NO: 667847 - DNA, 15 bp, Homo sapiens
agggccttttctagc

SEQ ID NO: 667848 - DNA, 15 bp, Homo sapiens
gggccttttctagca

SEQ ID NO: 667849 - DNA, 15 bp, Homo sapiens
ggccttttctagcac

SEQ ID NO: 667850 - DNA, 15 bp, Homo sapiens
gccttttctagcacc

SEQ ID NO: 667851 - DNA, 15 bp, Homo sapiens
ccttttctagcaccc

SEQ ID NO: 667852 - DNA, 15 bp, Homo sapiens
cttttctagcaccct

SEQ ID NO: 667853 - DNA, 15 bp, Homo sapiens
ttttctagcacccta

SEQ ID NO: 667854 - DNA, 15 bp, Homo sapiens
tttctagcaccctaa

SEQ ID NO: 667855 - DNA, 15 bp, Homo sapiens
ttctagcaccctaaa

SEQ ID NO: 667856 - DNA, 15 bp, Homo sapiens
tctagcaccctaaat

SEQ ID NO: 667857 - DNA, 15 bp, Homo sapiens
ctagcaccctaaata

SEQ ID NO: 667858 - DNA, 15 bp, Homo sapiens
tagcaccctaaatat

SEQ ID NO: 667859 - DNA, 15 bp, Homo sapiens
agcaccctaaatatg

SEQ ID NO: 667860 - DNA, 15 bp, Homo sapiens
gcaccctaaatatgc

SEQ ID NO: 667861 - DNA, 15 bp, Homo sapiens
caccctaaatatgcg

SEQ ID NO: 667862 - DNA, 15 bp, Homo sapiens
accctaaatatgcgt

SEQ ID NO: 667863 - DNA, 15 bp, Homo sapiens
ccctaaatatgcgtg

SEQ ID NO: 667864 - DNA, 15 bp, Homo sapiens
cctaaatatgcgtgt

SEQ ID NO: 667865 - DNA, 15 bp, Homo sapiens
ctaaatatgcgtgtc

SEQ ID NO: 667866 - DNA, 15 bp, Homo sapiens
taaatatgcgtgtct

SEQ ID NO: 667867 - DNA, 15 bp, Homo sapiens
aaatatgcgtgtctg

SEQ ID NO: 667868 - DNA, 15 bp, Homo sapiens
aatatgcgtgtctgt

SEQ ID NO: 667869 - DNA, 15 bp, Homo sapiens
atatgcgtgtctgtc

SEQ ID NO: 667870 - DNA, 15 bp, Homo sapiens
tatgcgtgtctgtcc

SEQ ID NO: 667871 - DNA, 15 bp, Homo sapiens
atgcgtgtctgtcca

SEQ ID NO: 667872 - DNA, 15 bp, Homo sapiens
tgcgtgtctgtccat

SEQ ID NO: 667873 - DNA, 15 bp, Homo sapiens
gcgtgtctgtccata

SEQ ID NO: 667874 - DNA, 15 bp, Homo sapiens
cgtgtctgtccataa

SEQ ID NO: 667875 - DNA, 15 bp, Homo sapiens
gtgtctgtccataat

SEQ ID NO: 667876 - DNA, 15 bp, Homo sapiens
tgtctgtccataatg

SEQ ID NO: 667877 - DNA, 15 bp, Homo sapiens
gtctgtccataatgg

SEQ ID NO: 667878 - DNA, 15 bp, Homo sapiens
tctgtccataatggg

SEQ ID NO: 667879 - DNA, 15 bp, Homo sapiens
ctgtccataatgggt

SEQ ID NO: 667880 - DNA, 15 bp, Homo sapiens
tgtccataatgggta

SEQ ID NO: 667881 - DNA, 15 bp, Homo sapiens
gtccataatgggtaa

SEQ ID NO: 667882 - DNA, 15 bp, Homo sapiens
tccataatgggtaat

SEQ ID NO: 667883 - DNA, 15 bp, Homo sapiens
ccataatgggtaatc

SEQ ID NO: 667884 - DNA, 15 bp, Homo sapiens
cataatgggtaatca

SEQ ID NO: 667885 - DNA, 15 bp, Homo sapiens
ataatgggtaatcat

SEQ ID NO: 667886 - DNA, 15 bp, Homo sapiens
taatgggtaatcata

SEQ ID NO: 667887 - DNA, 15 bp, Homo sapiens
aatgggtaatcatat

SEQ ID NO: 667888 - DNA, 15 bp, Homo sapiens
atgggtaatcatata

SEQ ID NO: 667889 - DNA, 15 bp, Homo sapiens
tgggtaatcatatat

SEQ ID NO: 667890 - DNA, 15 bp, Homo sapiens
gggtaatcatatata

SEQ ID NO: 667891 - DNA, 15 bp, Homo sapiens
ggtaatcatatatat

SEQ ID NO: 667892 - DNA, 15 bp, Homo sapiens
gtaatcatatatatc

SEQ ID NO: 667893 - DNA, 15 bp, Homo sapiens
taatcatatatatca

SEQ ID NO: 667894 - DNA, 15 bp, Homo sapiens
aatcatatatatcac

SEQ ID NO: 667895 - DNA, 15 bp, Homo sapiens
atcatatatatcaca

SEQ ID NO: 667896 - DNA, 15 bp, Homo sapiens
tcatatatatcacaa

SEQ ID NO: 667897 - DNA, 15 bp, Homo sapiens
catatatatcacaaa

SEQ ID NO: 667898 - DNA, 15 bp, Homo sapiens
atatatatcacaaat

SEQ ID NO: 667899 - DNA, 15 bp, Homo sapiens
tatatatcacaaatc

SEQ ID NO: 667900 - DNA, 15 bp, Homo sapiens
atatatcacaaatca

SEQ ID NO: 667901 - DNA, 15 bp, Homo sapiens
tatatcacaaatcaa

SEQ ID NO: 667902 - DNA, 15 bp, Homo sapiens
atatcacaaatcaaa

SEQ ID NO: 667903 - DNA, 15 bp, Homo sapiens
tatcacaaatcaaac

SEQ ID NO: 667904 - DNA, 15 bp, Homo sapiens
atcacaaatcaaacc

SEQ ID NO: 667905 - DNA, 15 bp, Homo sapiens
tcacaaatcaaaccc

SEQ ID NO: 667906 - DNA, 15 bp, Homo sapiens
cacaaatcaaaccct

SEQ ID NO: 667907 - DNA, 15 bp, Homo sapiens
acaaatcaaaccctc

SEQ ID NO: 667908 - DNA, 15 bp, Homo sapiens
caaatcaaaccctcc

SEQ ID NO: 667909 - DNA, 15 bp, Homo sapiens
aaatcaaaccctcca

SEQ ID NO: 667910 - DNA, 15 bp, Homo sapiens
aatcaaaccctccac

SEQ ID NO: 667911 - DNA, 15 bp, Homo sapiens
atcaaaccctccaca

SEQ ID NO: 667912 - DNA, 15 bp, Homo sapiens
tcaaaccctccacaa

SEQ ID NO: 667913 - DNA, 15 bp, Homo sapiens
caaaccctccacaaa

SEQ ID NO: 667914 - DNA, 15 bp, Homo sapiens
aaaccctccacaaac

SEQ ID NO: 667915 - DNA, 15 bp, Homo sapiens
aaccctccacaaact

SEQ ID NO: 667916 - DNA, 15 bp, Homo sapiens
accctccacaaactt

SEQ ID NO: 667917 - DNA, 15 bp, Homo sapiens
ccctccacaaactta

SEQ ID NO: 667918 - DNA, 15 bp, Homo sapiens
cctccacaaacttat

SEQ ID NO: 667919 - DNA, 15 bp, Homo sapiens
ctccacaaacttatt

SEQ ID NO: 667920 - DNA, 15 bp, Homo sapiens
tccacaaacttattt

SEQ ID NO: 667921 - DNA, 15 bp, Homo sapiens
ccacaaacttatttc

SEQ ID NO: 667922 - DNA, 15 bp, Homo sapiens
cacaaacttatttcc

SEQ ID NO: 667923 - DNA, 15 bp, Homo sapiens
acaaacttatttcct

SEQ ID NO: 667924 - DNA, 15 bp, Homo sapiens
caaacttatttccta

SEQ ID NO: 667925 - DNA, 15 bp, Homo sapiens
aaacttatttcctaa

SEQ ID NO: 667926 - DNA, 15 bp, Homo sapiens
aacttatttcctaat

SEQ ID NO: 667927 - DNA, 15 bp, Homo sapiens
acttatttcctaatg

SEQ ID NO: 667928 - DNA, 15 bp, Homo sapiens
cttatttcctaatgt

SEQ ID NO: 667929 - DNA, 15 bp, Homo sapiens
ttatttcctaatgtg

SEQ ID NO: 667930 - DNA, 15 bp, Homo sapiens
tatttcctaatgtgt

SEQ ID NO: 667931 - DNA, 15 bp, Homo sapiens
atttcctaatgtgtt

SEQ ID NO: 667932 - DNA, 15 bp, Homo sapiens
tttcctaatgtgttt

SEQ ID NO: 667933 - DNA, 15 bp, Homo sapiens
ttcctaatgtgtttg

SEQ ID NO: 667934 - DNA, 15 bp, Homo sapiens
tcctaatgtgtttgt

SEQ ID NO: 667935 - DNA, 15 bp, Homo sapiens
cctaatgtgtttgtt

SEQ ID NO: 667936 - DNA, 15 bp, Homo sapiens
ctaatgtgtttgtta

SEQ ID NO: 667937 - DNA, 15 bp, Homo sapiens
taatgtgtttgttaa

SEQ ID NO: 667938 - DNA, 15 bp, Homo sapiens
aatgtgtttgttaac

SEQ ID NO: 667939 - DNA, 15 bp, Homo sapiens
atgtgtttgttaacc

SEQ ID NO: 667940 - DNA, 15 bp, Homo sapiens
tgtgtttgttaacct

SEQ ID NO: 667941 - DNA, 15 bp, Homo sapiens
gtgtttgttaacctt

SEQ ID NO: 667942 - DNA, 15 bp, Homo sapiens
tgtttgttaaccttt

SEQ ID NO: 667943 - DNA, 15 bp, Homo sapiens
gtttgttaacctttc

SEQ ID NO: 667944 - DNA, 15 bp, Homo sapiens
tttgttaacctttcc

SEQ ID NO: 667945 - DNA, 15 bp, Homo sapiens
ttgttaacctttcct

SEQ ID NO: 667946 - DNA, 15 bp, Homo sapiens
tgttaacctttcctt

SEQ ID NO: 667947 - DNA, 15 bp, Homo sapiens
gttaacctttccttc

SEQ ID NO: 667948 - DNA, 15 bp, Homo sapiens
ttaacctttccttct

SEQ ID NO: 667949 - DNA, 15 bp, Homo sapiens
taacctttccttcta

SEQ ID NO: 667950 - DNA, 15 bp, Homo sapiens
aacctttccttctaa

SEQ ID NO: 667951 - DNA, 15 bp, Homo sapiens
acctttccttctaaa

SEQ ID NO: 667952 - DNA, 15 bp, Homo sapiens
cctttccttctaaag

SEQ ID NO: 667953 - DNA, 15 bp, Homo sapiens
ctttccttctaaagg

SEQ ID NO: 667954 - DNA, 15 bp, Homo sapiens
tttccttctaaaggg

SEQ ID NO: 667955 - DNA, 15 bp, Homo sapiens
ttccttctaaagggt

SEQ ID NO: 667956 - DNA, 15 bp, Homo sapiens
tccttctaaagggta

SEQ ID NO: 667957 - DNA, 15 bp, Homo sapiens
ccttctaaagggtaa

SEQ ID NO: 667958 - DNA, 15 bp, Homo sapiens
cttctaaagggtaaa

SEQ ID NO: 667959 - DNA, 15 bp, Homo sapiens
ttctaaagggtaaac

SEQ ID NO: 667960 - DNA, 15 bp, Homo sapiens
tctaaagggtaaact

SEQ ID NO: 667961 - DNA, 15 bp, Homo sapiens
ctaaagggtaaactt

SEQ ID NO: 667962 - DNA, 15 bp, Homo sapiens
taaagggtaaacttc

SEQ ID NO: 667963 - DNA, 15 bp, Homo sapiens
aaagggtaaacttct

SEQ ID NO: 667964 - DNA, 15 bp, Homo sapiens
aagggtaaacttctt

SEQ ID NO: 667965 - DNA, 15 bp, Homo sapiens
agggtaaacttcttt

SEQ ID NO: 667966 - DNA, 15 bp, Homo sapiens
gggtaaacttcttta

SEQ ID NO: 667967 - DNA, 15 bp, Homo sapiens
ggtaaacttctttaa

SEQ ID NO: 667968 - DNA, 15 bp, Homo sapiens
gtaaacttctttaac

SEQ ID NO: 667969 - DNA, 15 bp, Homo sapiens
taaacttctttaacc

SEQ ID NO: 667970 - DNA, 15 bp, Homo sapiens
aaacttctttaacca

SEQ ID NO: 667971 - DNA, 15 bp, Homo sapiens
aacttctttaaccaa

SEQ ID NO: 667972 - DNA, 15 bp, Homo sapiens
acttctttaaccaac

SEQ ID NO: 667973 - DNA, 15 bp, Homo sapiens
cttctttaaccaacc

SEQ ID NO: 667974 - DNA, 15 bp, Homo sapiens
ttctttaaccaaccc

SEQ ID NO: 667975 - DNA, 15 bp, Homo sapiens
tctttaaccaacccc

SEQ ID NO: 667976 - DNA, 15 bp, Homo sapiens
ctttaaccaacccca

SEQ ID NO: 667977 - DNA, 15 bp, Homo sapiens
tttaaccaaccccag

SEQ ID NO: 667978 - DNA, 15 bp, Homo sapiens
ttaaccaaccccagt

SEQ ID NO: 667979 - DNA, 15 bp, Homo sapiens
taaccaaccccagtg

SEQ ID NO: 667980 - DNA, 15 bp, Homo sapiens
aaccaaccccagtga

SEQ ID NO: 667981 - DNA, 15 bp, Homo sapiens
accaaccccagtgag

SEQ ID NO: 667982 - DNA, 15 bp, Homo sapiens
ccaaccccagtgagc

SEQ ID NO: 667983 - DNA, 15 bp, Homo sapiens
caaccccagtgagct

SEQ ID NO: 667984 - DNA, 15 bp, Homo sapiens
aaccccagtgagctg

SEQ ID NO: 667985 - DNA, 15 bp, Homo sapiens
accccagtgagctgg

SEQ ID NO: 667986 - DNA, 15 bp, Homo sapiens
ccccagtgagctgga

SEQ ID NO: 667987 - DNA, 15 bp, Homo sapiens
cccagtgagctggag

SEQ ID NO: 667988 - DNA, 15 bp, Homo sapiens
ccagtgagctggagg

SEQ ID NO: 667989 - DNA, 15 bp, Homo sapiens
cagtgagctggagga

SEQ ID NO: 667990 - DNA, 15 bp, Homo sapiens
agtgagctggaggat

SEQ ID NO: 667991 - DNA, 15 bp, Homo sapiens
gtgagctggaggatc

SEQ ID NO: 667992 - DNA, 15 bp, Homo sapiens
tgagctggaggatca

SEQ ID NO: 667993 - DNA, 15 bp, Homo sapiens
gagctggaggatcaa

SEQ ID NO: 667994 - DNA, 15 bp, Homo sapiens
agctggaggatcaat

SEQ ID NO: 667995 - DNA, 15 bp, Homo sapiens
gctggaggatcaatg

SEQ ID NO: 667996 - DNA, 15 bp, Homo sapiens
ctggaggatcaatgt

SEQ ID NO: 667997 - DNA, 15 bp, Homo sapiens
tggaggatcaatgtt

SEQ ID NO: 667998 - DNA, 15 bp, Homo sapiens
ggaggatcaatgttt

SEQ ID NO: 667999 - DNA, 15 bp, Homo sapiens
gaggatcaatgtttt

SEQ ID NO: 668000 - DNA, 15 bp, Homo sapiens
aggatcaatgttttc

SEQ ID NO: 668001 - DNA, 15 bp, Homo sapiens
ggatcaatgttttct

SEQ ID NO: 668002 - DNA, 15 bp, Homo sapiens
gatcaatgttttctt

SEQ ID NO: 668003 - DNA, 15 bp, Homo sapiens
atcaatgttttctta

SEQ ID NO: 668004 - DNA, 15 bp, Homo sapiens
tcaatgttttcttaa

SEQ ID NO: 668005 - DNA, 15 bp, Homo sapiens
caatgttttcttaat

SEQ ID NO: 668006 - DNA, 15 bp, Homo sapiens
aatgttttcttaata

SEQ ID NO: 668007 - DNA, 15 bp, Homo sapiens
atgttttcttaatag

SEQ ID NO: 668008 - DNA, 15 bp, Homo sapiens
tgttttcttaatagt

SEQ ID NO: 668009 - DNA, 15 bp, Homo sapiens
gttttcttaatagtc

SEQ ID NO: 668010 - DNA, 15 bp, Homo sapiens
ttttcttaatagtct

SEQ ID NO: 668011 - DNA, 15 bp, Homo sapiens
tttcttaatagtctt

SEQ ID NO: 668012 - DNA, 15 bp, Homo sapiens
ttcttaatagtctta

SEQ ID NO: 668013 - DNA, 15 bp, Homo sapiens
tcttaatagtcttac

SEQ ID NO: 668014 - DNA, 15 bp, Homo sapiens
cttaatagtcttacc

SEQ ID NO: 668015 - DNA, 15 bp, Homo sapiens
ttaatagtcttacct

SEQ ID NO: 668016 - DNA, 15 bp, Homo sapiens
taatagtcttacctt

SEQ ID NO: 668017 - DNA, 15 bp, Homo sapiens
aatagtcttaccttc

SEQ ID NO: 668018 - DNA, 15 bp, Homo sapiens
atagtcttaccttcg

SEQ ID NO: 668019 - DNA, 15 bp, Homo sapiens
tagtcttaccttcgt

SEQ ID NO: 668020 - DNA, 15 bp, Homo sapiens
agtcttaccttcgtt

SEQ ID NO: 668021 - DNA, 15 bp, Homo sapiens
gtcttaccttcgttg

SEQ ID NO: 668022 - DNA, 15 bp, Homo sapiens
tcttaccttcgttgg

SEQ ID NO: 668023 - DNA, 15 bp, Homo sapiens
cttaccttcgttggt

SEQ ID NO: 668024 - DNA, 15 bp, Homo sapiens
ttaccttcgttggtg

SEQ ID NO: 668025 - DNA, 15 bp, Homo sapiens
taccttcgttggtgt

SEQ ID NO: 668026 - DNA, 15 bp, Homo sapiens
accttcgttggtgtc

SEQ ID NO: 668027 - DNA, 15 bp, Homo sapiens
ccttcgttggtgtca

SEQ ID NO: 668028 - DNA, 15 bp, Homo sapiens
cttcgttggtgtcaa

SEQ ID NO: 668029 - DNA, 15 bp, Homo sapiens
ttcgttggtgtcaat

SEQ ID NO: 668030 - DNA, 15 bp, Homo sapiens
tcgttggtgtcaata

SEQ ID NO: 668031 - DNA, 15 bp, Homo sapiens
cgttggtgtcaatag

SEQ ID NO: 668032 - DNA, 15 bp, Homo sapiens
gttggtgtcaatagg

SEQ ID NO: 668033 - DNA, 15 bp, Homo sapiens
ttggtgtcaatagga

SEQ ID NO: 668034 - DNA, 15 bp, Homo sapiens
tggtgtcaataggaa

SEQ ID NO: 668035 - DNA, 15 bp, Homo sapiens
ggtgtcaataggaaa

SEQ ID NO: 668036 - DNA, 15 bp, Homo sapiens
gtgtcaataggaaac

SEQ ID NO: 668037 - DNA, 15 bp, Homo sapiens
tgtcaataggaaaca

SEQ ID NO: 668038 - DNA, 15 bp, Homo sapiens
gtcaataggaaacag

SEQ ID NO: 668039 - DNA, 15 bp, Homo sapiens
tcaataggaaacagt

SEQ ID NO: 668040 - DNA, 15 bp, Homo sapiens
caataggaaacagta

SEQ ID NO: 668041 - DNA, 15 bp, Homo sapiens
aataggaaacagtat

SEQ ID NO: 668042 - DNA, 15 bp, Homo sapiens
ataggaaacagtatt

SEQ ID NO: 668043 - DNA, 15 bp, Homo sapiens
taggaaacagtattt

SEQ ID NO: 668044 - DNA, 15 bp, Homo sapiens
aggaaacagtattta

SEQ ID NO: 668045 - DNA, 15 bp, Homo sapiens
ggaaacagtatttac

SEQ ID NO: 668046 - DNA, 15 bp, Homo sapiens
gaaacagtatttact

SEQ ID NO: 668047 - DNA, 15 bp, Homo sapiens
aaacagtatttactc

SEQ ID NO: 668048 - DNA, 15 bp, Homo sapiens
aacagtatttactca

SEQ ID NO: 668049 - DNA, 15 bp, Homo sapiens
acagtatttactcac

SEQ ID NO: 668050 - DNA, 15 bp, Homo sapiens
cagtatttactcact

SEQ ID NO: 668051 - DNA, 15 bp, Homo sapiens
agtatttactcacta

SEQ ID NO: 668052 - DNA, 15 bp, Homo sapiens
gtatttactcactac

SEQ ID NO: 668053 - DNA, 15 bp, Homo sapiens
tatttactcactact

SEQ ID NO: 668054 - DNA, 15 bp, Homo sapiens
atttactcactactg

SEQ ID NO: 668055 - DNA, 15 bp, Homo sapiens
tttactcactactgt

SEQ ID NO: 668056 - DNA, 15 bp, Homo sapiens
ttactcactactgtt

SEQ ID NO: 668057 - DNA, 15 bp, Homo sapiens
tactcactactgttt

SEQ ID NO: 668058 - DNA, 15 bp, Homo sapiens
actcactactgtttt

SEQ ID NO: 668059 - DNA, 15 bp, Homo sapiens
ctcactactgttttc

SEQ ID NO: 668060 - DNA, 15 bp, Homo sapiens
tcactactgttttcc

SEQ ID NO: 668061 - DNA, 15 bp, Homo sapiens
cactactgttttcct

SEQ ID NO: 668062 - DNA, 15 bp, Homo sapiens
actactgttttcctt

SEQ ID NO: 668063 - DNA, 15 bp, Homo sapiens
ctactgttttccttt

SEQ ID NO: 668064 - DNA, 15 bp, Homo sapiens
tactgttttcctttt

SEQ ID NO: 668065 - DNA, 15 bp, Homo sapiens
actgttttcctttta

SEQ ID NO: 668066 - DNA, 15 bp, Homo sapiens
ctgttttccttttaa

SEQ ID NO: 668067 - DNA, 15 bp, Homo sapiens
tgttttccttttaaa

SEQ ID NO: 668068 - DNA, 15 bp, Homo sapiens
gttttccttttaaaa

SEQ ID NO: 668069 - DNA, 15 bp, Homo sapiens
ttttccttttaaaaa

SEQ ID NO: 668070 - DNA, 15 bp, Homo sapiens
tttccttttaaaaat

SEQ ID NO: 668071 - DNA, 15 bp, Homo sapiens
ttccttttaaaaatc

SEQ ID NO: 668072 - DNA, 15 bp, Homo sapiens
tccttttaaaaatct

SEQ ID NO: 668073 - DNA, 15 bp, Homo sapiens
ccttttaaaaatctg

SEQ ID NO: 668074 - DNA, 15 bp, Homo sapiens
cttttaaaaatctgt

SEQ ID NO: 668075 - DNA, 15 bp, Homo sapiens
ttttaaaaatctgtc

SEQ ID NO: 668076 - DNA, 15 bp, Homo sapiens
tttaaaaatctgtct

SEQ ID NO: 668077 - DNA, 15 bp, Homo sapiens
ttaaaaatctgtcta

SEQ ID NO: 668078 - DNA, 15 bp, Homo sapiens
taaaaatctgtctag

SEQ ID NO: 668079 - DNA, 15 bp, Homo sapiens
aaaaatctgtctagt

SEQ ID NO: 668080 - DNA, 15 bp, Homo sapiens
aaaatctgtctagtt

SEQ ID NO: 668081 - DNA, 15 bp, Homo sapiens
aaatctgtctagttg

SEQ ID NO: 668082 - DNA, 15 bp, Homo sapiens
aatctgtctagttgc

SEQ ID NO: 668083 - DNA, 15 bp, Homo sapiens
atctgtctagttgca

SEQ ID NO: 668084 - DNA, 15 bp, Homo sapiens
tctgtctagttgcat

SEQ ID NO: 668085 - DNA, 15 bp, Homo sapiens
ctgtctagttgcata

SEQ ID NO: 668086 - DNA, 15 bp, Homo sapiens
tgtctagttgcatac

SEQ ID NO: 668087 - DNA, 15 bp, Homo sapiens
gtctagttgcatact

SEQ ID NO: 668088 - DNA, 15 bp, Homo sapiens
tctagttgcatacta

SEQ ID NO: 668089 - DNA, 15 bp, Homo sapiens
ctagttgcatactag

SEQ ID NO: 668090 - DNA, 15 bp, Homo sapiens
tagttgcatactaga

SEQ ID NO: 668091 - DNA, 15 bp, Homo sapiens
agttgcatactagaa

SEQ ID NO: 668092 - DNA, 15 bp, Homo sapiens
gttgcatactagaaa

SEQ ID NO: 668093 - DNA, 15 bp, Homo sapiens
ttgcatactagaaac

SEQ ID NO: 668094 - DNA, 15 bp, Homo sapiens
tgcatactagaaaca

SEQ ID NO: 668095 - DNA, 15 bp, Homo sapiens
gcatactagaaacag

SEQ ID NO: 668096 - DNA, 15 bp, Homo sapiens
catactagaaacagt

SEQ ID NO: 668097 - DNA, 15 bp, Homo sapiens
atactagaaacagtt

SEQ ID NO: 668098 - DNA, 15 bp, Homo sapiens
tactagaaacagttt

SEQ ID NO: 668099 - DNA, 15 bp, Homo sapiens
actagaaacagtttc

SEQ ID NO: 668100 - DNA, 15 bp, Homo sapiens
ctagaaacagtttca

SEQ ID NO: 668101 - DNA, 15 bp, Homo sapiens
tagaaacagtttcag

SEQ ID NO: 668102 - DNA, 15 bp, Homo sapiens
agaaacagtttcagc

SEQ ID NO: 668103 - DNA, 15 bp, Homo sapiens
gaaacagtttcagct

SEQ ID NO: 668104 - DNA, 15 bp, Homo sapiens
aaacagtttcagctg

SEQ ID NO: 668105 - DNA, 15 bp, Homo sapiens
aacagtttcagctgg

SEQ ID NO: 668106 - DNA, 15 bp, Homo sapiens
acagtttcagctggt

SEQ ID NO: 668107 - DNA, 15 bp, Homo sapiens
cagtttcagctggtt

SEQ ID NO: 668108 - DNA, 15 bp, Homo sapiens
agtttcagctggttt

SEQ ID NO: 668109 - DNA, 15 bp, Homo sapiens
gtttcagctggtttg

SEQ ID NO: 668110 - DNA, 15 bp, Homo sapiens
tttcagctggtttgt

SEQ ID NO: 668111 - DNA, 15 bp, Homo sapiens
ttcagctggtttgtt

SEQ ID NO: 668112 - DNA, 15 bp, Homo sapiens
tcagctggtttgttt

SEQ ID NO: 668113 - DNA, 15 bp, Homo sapiens
cagctggtttgtttg

SEQ ID NO: 668114 - DNA, 15 bp, Homo sapiens
agctggtttgtttgt

SEQ ID NO: 668115 - DNA, 15 bp, Homo sapiens
gctggtttgtttgta

SEQ ID NO: 668116 - DNA, 15 bp, Homo sapiens
ctggtttgtttgtat

SEQ ID NO: 668117 - DNA, 15 bp, Homo sapiens
tggtttgtttgtatt

SEQ ID NO: 668118 - DNA, 15 bp, Homo sapiens
ggtttgtttgtattg

SEQ ID NO: 668119 - DNA, 15 bp, Homo sapiens
gtttgtttgtattgg

SEQ ID NO: 668120 - DNA, 15 bp, Homo sapiens
tttgtttgtattgga

SEQ ID NO: 668121 - DNA, 15 bp, Homo sapiens
ttgtttgtattggac

SEQ ID NO: 668122 - DNA, 15 bp, Homo sapiens
tgtttgtattggaca

SEQ ID NO: 668123 - DNA, 15 bp, Homo sapiens
gtttgtattggacaa

SEQ ID NO: 668124 - DNA, 15 bp, Homo sapiens
tttgtattggacaag

SEQ ID NO: 668125 - DNA, 15 bp, Homo sapiens
ttgtattggacaagc

SEQ ID NO: 668126 - DNA, 15 bp, Homo sapiens
tgtattggacaagct

SEQ ID NO: 668127 - DNA, 15 bp, Homo sapiens
gtattggacaagctg

SEQ ID NO: 668128 - DNA, 15 bp, Homo sapiens
tattggacaagctgc

SEQ ID NO: 668129 - DNA, 15 bp, Homo sapiens
attggacaagctgct

SEQ ID NO: 668130 - DNA, 15 bp, Homo sapiens
ttggacaagctgctg

SEQ ID NO: 668131 - DNA, 15 bp, Homo sapiens
tggacaagctgctga

SEQ ID NO: 668132 - DNA, 15 bp, Homo sapiens
ggacaagctgctgaa

SEQ ID NO: 668133 - DNA, 15 bp, Homo sapiens
gacaagctgctgaag

SEQ ID NO: 668134 - DNA, 15 bp, Homo sapiens
acaagctgctgaagt

SEQ ID NO: 668135 - DNA, 15 bp, Homo sapiens
caagctgctgaagtg

SEQ ID NO: 668136 - DNA, 15 bp, Homo sapiens
aagctgctgaagtga

SEQ ID NO: 668137 - DNA, 15 bp, Homo sapiens
agctgctgaagtgaa

SEQ ID NO: 668138 - DNA, 15 bp, Homo sapiens
gctgctgaagtgaaa

SEQ ID NO: 668139 - DNA, 15 bp, Homo sapiens
ctgctgaagtgaaaa

SEQ ID NO: 668140 - DNA, 15 bp, Homo sapiens
tgctgaagtgaaaag

SEQ ID NO: 668141 - DNA, 15 bp, Homo sapiens
gctgaagtgaaaagt

SEQ ID NO: 668142 - DNA, 15 bp, Homo sapiens
ctgaagtgaaaagtt

SEQ ID NO: 668143 - DNA, 15 bp, Homo sapiens
tgaagtgaaaagttt

SEQ ID NO: 668144 - DNA, 15 bp, Homo sapiens
gaagtgaaaagtttt

SEQ ID NO: 668145 - DNA, 15 bp, Homo sapiens
aagtgaaaagttttt

SEQ ID NO: 668146 - DNA, 15 bp, Homo sapiens
agtgaaaagtttttg

SEQ ID NO: 668147 - DNA, 15 bp, Homo sapiens
gtgaaaagtttttgc

SEQ ID NO: 668148 - DNA, 15 bp, Homo sapiens
tgaaaagtttttgct

SEQ ID NO: 668149 - DNA, 15 bp, Homo sapiens
gaaaagtttttgctt

SEQ ID NO: 668150 - DNA, 15 bp, Homo sapiens
aaaagtttttgcttg

SEQ ID NO: 668151 - DNA, 15 bp, Homo sapiens
aaagtttttgcttga

SEQ ID NO: 668152 - DNA, 15 bp, Homo sapiens
aagtttttgcttgac

SEQ ID NO: 668153 - DNA, 15 bp, Homo sapiens
agtttttgcttgact

SEQ ID NO: 668154 - DNA, 15 bp, Homo sapiens
gtttttgcttgactg

SEQ ID NO: 668155 - DNA, 15 bp, Homo sapiens
tttttgcttgactga

SEQ ID NO: 668156 - DNA, 15 bp, Homo sapiens
ttttgcttgactgaa

SEQ ID NO: 668157 - DNA, 15 bp, Homo sapiens
tttgcttgactgaat

SEQ ID NO: 668158 - DNA, 15 bp, Homo sapiens
ttgcttgactgaatg

SEQ ID NO: 668159 - DNA, 15 bp, Homo sapiens
tgcttgactgaatgt

SEQ ID NO: 668160 - DNA, 15 bp, Homo sapiens
gcttgactgaatgtg

SEQ ID NO: 668161 - DNA, 15 bp, Homo sapiens
cttgactgaatgtga

SEQ ID NO: 668162 - DNA, 15 bp, Homo sapiens
ttgactgaatgtgag

SEQ ID NO: 668163 - DNA, 15 bp, Homo sapiens
tgactgaatgtgaga

SEQ ID NO: 668164 - DNA, 15 bp, Homo sapiens
gactgaatgtgagac

SEQ ID NO: 668165 - DNA, 15 bp, Homo sapiens
actgaatgtgagaca

SEQ ID NO: 668166 - DNA, 15 bp, Homo sapiens
ctgaatgtgagacag

SEQ ID NO: 668167 - DNA, 15 bp, Homo sapiens
tgaatgtgagacagt

SEQ ID NO: 668168 - DNA, 15 bp, Homo sapiens
gaatgtgagacagtt

SEQ ID NO: 668169 - DNA, 15 bp, Homo sapiens
aatgtgagacagttt

SEQ ID NO: 668170 - DNA, 15 bp, Homo sapiens
atgtgagacagtttc

SEQ ID NO: 668171 - DNA, 15 bp, Homo sapiens
tgtgagacagtttca

SEQ ID NO: 668172 - DNA, 15 bp, Homo sapiens
gtgagacagtttcat

SEQ ID NO: 668173 - DNA, 15 bp, Homo sapiens
tgagacagtttcata

SEQ ID NO: 668174 - DNA, 15 bp, Homo sapiens
gagacagtttcataa

SEQ ID NO: 668175 - DNA, 15 bp, Homo sapiens
agacagtttcataac

SEQ ID NO: 668176 - DNA, 15 bp, Homo sapiens
gacagtttcataact

SEQ ID NO: 668177 - DNA, 15 bp, Homo sapiens
acagtttcataactc

SEQ ID NO: 668178 - DNA, 15 bp, Homo sapiens
cagtttcataactct

SEQ ID NO: 668179 - DNA, 15 bp, Homo sapiens
agtttcataactctt

SEQ ID NO: 668180 - DNA, 15 bp, Homo sapiens
gtttcataactcttc

SEQ ID NO: 668181 - DNA, 15 bp, Homo sapiens
tttcataactcttca

SEQ ID NO: 668182 - DNA, 15 bp, Homo sapiens
ttcataactcttcaa

SEQ ID NO: 668183 - DNA, 15 bp, Homo sapiens
tcataactcttcaag

SEQ ID NO: 668184 - DNA, 15 bp, Homo sapiens
cataactcttcaaga

SEQ ID NO: 668185 - DNA, 15 bp, Homo sapiens
ataactcttcaagaa

SEQ ID NO: 668186 - DNA, 15 bp, Homo sapiens
taactcttcaagaag

SEQ ID NO: 668187 - DNA, 15 bp, Homo sapiens
aactcttcaagaagt

SEQ ID NO: 668188 - DNA, 15 bp, Homo sapiens
actcttcaagaagtg

SEQ ID NO: 668189 - DNA, 15 bp, Homo sapiens
ctcttcaagaagtgc

SEQ ID NO: 668190 - DNA, 15 bp, Homo sapiens
tcttcaagaagtgca

SEQ ID NO: 668191 - DNA, 15 bp, Homo sapiens
cttcaagaagtgcac

SEQ ID NO: 668192 - DNA, 15 bp, Homo sapiens
ttcaagaagtgcacc

SEQ ID NO: 668193 - DNA, 15 bp, Homo sapiens
tcaagaagtgcacca

SEQ ID NO: 668194 - DNA, 15 bp, Homo sapiens
caagaagtgcaccaa

SEQ ID NO: 668195 - DNA, 15 bp, Homo sapiens
aagaagtgcaccaaa

SEQ ID NO: 668196 - DNA, 15 bp, Homo sapiens
agaagtgcaccaaag

SEQ ID NO: 668197 - DNA, 15 bp, Homo sapiens
gaagtgcaccaaagg

SEQ ID NO: 668198 - DNA, 15 bp, Homo sapiens
aagtgcaccaaaggt

SEQ ID NO: 668199 - DNA, 15 bp, Homo sapiens
agtgcaccaaaggtg

SEQ ID NO: 668200 - DNA, 15 bp, Homo sapiens
gtgcaccaaaggtgg

SEQ ID NO: 668201 - DNA, 15 bp, Homo sapiens
tgcaccaaaggtggg

SEQ ID NO: 668202 - DNA, 15 bp, Homo sapiens
gcaccaaaggtgggt

SEQ ID NO: 668203 - DNA, 15 bp, Homo sapiens
caccaaaggtgggtg

SEQ ID NO: 668204 - DNA, 15 bp, Homo sapiens
accaaaggtgggtgc

SEQ ID NO: 668205 - DNA, 15 bp, Homo sapiens
ccaaaggtgggtgcc

SEQ ID NO: 668206 - DNA, 15 bp, Homo sapiens
caaaggtgggtgcca

SEQ ID NO: 668207 - DNA, 15 bp, Homo sapiens
aaaggtgggtgccag

SEQ ID NO: 668208 - DNA, 15 bp, Homo sapiens
aaggtgggtgccagc

SEQ ID NO: 668209 - DNA, 15 bp, Homo sapiens
aggtgggtgccagct

SEQ ID NO: 668210 - DNA, 15 bp, Homo sapiens
ggtgggtgccagctc

SEQ ID NO: 668211 - DNA, 15 bp, Homo sapiens
gtgggtgccagctct

SEQ ID NO: 668212 - DNA, 15 bp, Homo sapiens
tgggtgccagctctg

SEQ ID NO: 668213 - DNA, 15 bp, Homo sapiens
gggtgccagctctga

SEQ ID NO: 668214 - DNA, 15 bp, Homo sapiens
ggtgccagctctgat

SEQ ID NO: 668215 - DNA, 15 bp, Homo sapiens
gtgccagctctgatg

SEQ ID NO: 668216 - DNA, 15 bp, Homo sapiens
tgccagctctgatga

SEQ ID NO: 668217 - DNA, 15 bp, Homo sapiens
gccagctctgatgac

SEQ ID NO: 668218 - DNA, 15 bp, Homo sapiens
ccagctctgatgacg

SEQ ID NO: 668219 - DNA, 15 bp, Homo sapiens
cagctctgatgacgg

SEQ ID NO: 668220 - DNA, 15 bp, Homo sapiens
agctctgatgacggc

SEQ ID NO: 668221 - DNA, 15 bp, Homo sapiens
gctctgatgacggct

SEQ ID NO: 668222 - DNA, 15 bp, Homo sapiens
ctctgatgacggctg

SEQ ID NO: 668223 - DNA, 15 bp, Homo sapiens
tctgatgacggctgc

SEQ ID NO: 668224 - DNA, 15 bp, Homo sapiens
ctgatgacggctgct

SEQ ID NO: 668225 - DNA, 15 bp, Homo sapiens
tgatgacggctgctt

SEQ ID NO: 668226 - DNA, 15 bp, Homo sapiens
gatgacggctgcttc

SEQ ID NO: 668227 - DNA, 15 bp, Homo sapiens
atgacggctgcttct

SEQ ID NO: 668228 - DNA, 15 bp, Homo sapiens
tgacggctgcttcta

SEQ ID NO: 668229 - DNA, 15 bp, Homo sapiens
gacggctgcttctaa

SEQ ID NO: 668230 - DNA, 15 bp, Homo sapiens
acggctgcttctaac

SEQ ID NO: 668231 - DNA, 15 bp, Homo sapiens
cggctgcttctaaca

SEQ ID NO: 668232 - DNA, 15 bp, Homo sapiens
ggctgcttctaacat

SEQ ID NO: 668233 - DNA, 15 bp, Homo sapiens
gctgcttctaacatg

SEQ ID NO: 668234 - DNA, 15 bp, Homo sapiens
ctgcttctaacatgc

SEQ ID NO: 668235 - DNA, 15 bp, Homo sapiens
tgcttctaacatgcc

SEQ ID NO: 668236 - DNA, 15 bp, Homo sapiens
gcttctaacatgcct

SEQ ID NO: 668237 - DNA, 15 bp, Homo sapiens
cttctaacatgcctc

SEQ ID NO: 668238 - DNA, 15 bp, Homo sapiens
ttctaacatgcctcc

SEQ ID NO: 668239 - DNA, 15 bp, Homo sapiens
tctaacatgcctcca

SEQ ID NO: 668240 - DNA, 15 bp, Homo sapiens
ctaacatgcctccac

SEQ ID NO: 668241 - DNA, 15 bp, Homo sapiens
taacatgcctccact

SEQ ID NO: 668242 - DNA, 15 bp, Homo sapiens
aacatgcctccactt

SEQ ID NO: 668243 - DNA, 15 bp, Homo sapiens
acatgcctccacttg

SEQ ID NO: 668244 - DNA, 15 bp, Homo sapiens
catgcctccacttgc

SEQ ID NO: 668245 - DNA, 15 bp, Homo sapiens
atgcctccacttgcc

SEQ ID NO: 668246 - DNA, 15 bp, Homo sapiens
tgcctccacttgccg

SEQ ID NO: 668247 - DNA, 15 bp, Homo sapiens
gcctccacttgccgc

SEQ ID NO: 668248 - DNA, 15 bp, Homo sapiens
cctccacttgccgcc

SEQ ID NO: 668249 - DNA, 15 bp, Homo sapiens
ctccacttgccgccc

SEQ ID NO: 668250 - DNA, 15 bp, Homo sapiens
tccacttgccgccca

SEQ ID NO: 668251 - DNA, 15 bp, Homo sapiens
ccacttgccgcccat

SEQ ID NO: 668252 - DNA, 15 bp, Homo sapiens
cacttgccgcccatt

SEQ ID NO: 668253 - DNA, 15 bp, Homo sapiens
acttgccgcccattg

SEQ ID NO: 668254 - DNA, 15 bp, Homo sapiens
cttgccgcccattgt

SEQ ID NO: 668255 - DNA, 15 bp, Homo sapiens
ttgccgcccattgtc

SEQ ID NO: 668256 - DNA, 15 bp, Homo sapiens
tgccgcccattgtca

SEQ ID NO: 668257 - DNA, 15 bp, Homo sapiens
gccgcccattgtcaa

SEQ ID NO: 668258 - DNA, 15 bp, Homo sapiens
ccgcccattgtcaag

SEQ ID NO: 668259 - DNA, 15 bp, Homo sapiens
cgcccattgtcaagg

SEQ ID NO: 668260 - DNA, 15 bp, Homo sapiens
gcccattgtcaaggg

SEQ ID NO: 668261 - DNA, 15 bp, Homo sapiens
cccattgtcaagggt

SEQ ID NO: 668262 - DNA, 15 bp, Homo sapiens
ccattgtcaagggtg

SEQ ID NO: 668263 - DNA, 15 bp, Homo sapiens
cattgtcaagggtgg

SEQ ID NO: 668264 - DNA, 15 bp, Homo sapiens
attgtcaagggtggc

SEQ ID NO: 668265 - DNA, 15 bp, Homo sapiens
ttgtcaagggtggct

SEQ ID NO: 668266 - DNA, 15 bp, Homo sapiens
tgtcaagggtggctg

SEQ ID NO: 668267 - DNA, 15 bp, Homo sapiens
gtcaagggtggctgg

SEQ ID NO: 668268 - DNA, 15 bp, Homo sapiens
tcaagggtggctggc

SEQ ID NO: 668269 - DNA, 15 bp, Homo sapiens
caagggtggctggcg

SEQ ID NO: 668270 - DNA, 15 bp, Homo sapiens
aagggtggctggcgt

SEQ ID NO: 668271 - DNA, 15 bp, Homo sapiens
agggtggctggcgta

SEQ ID NO: 668272 - DNA, 15 bp, Homo sapiens
gggtggctggcgtaa

SEQ ID NO: 668273 - DNA, 15 bp, Homo sapiens
ggtggctggcgtaat

SEQ ID NO: 668274 - DNA, 15 bp, Homo sapiens
gtggctggcgtaatt

SEQ ID NO: 668275 - DNA, 15 bp, Homo sapiens
tggctggcgtaatta

SEQ ID NO: 668276 - DNA, 15 bp, Homo sapiens
ggctggcgtaattaa

SEQ ID NO: 668277 - DNA, 15 bp, Homo sapiens
gctggcgtaattaag

SEQ ID NO: 668278 - DNA, 15 bp, Homo sapiens
ctggcgtaattaagt

SEQ ID NO: 668279 - DNA, 15 bp, Homo sapiens
tggcgtaattaagtt

SEQ ID NO: 668280 - DNA, 15 bp, Homo sapiens
ggcgtaattaagtta

SEQ ID NO: 668281 - DNA, 15 bp, Homo sapiens
gcgtaattaagttaa

SEQ ID NO: 668282 - DNA, 15 bp, Homo sapiens
cgtaattaagttaag

SEQ ID NO: 668283 - DNA, 15 bp, Homo sapiens
gtaattaagttaaga

SEQ ID NO: 668284 - DNA, 15 bp, Homo sapiens
taattaagttaagac

SEQ ID NO: 668285 - DNA, 15 bp, Homo sapiens
aattaagttaagaca

SEQ ID NO: 668286 - DNA, 15 bp, Homo sapiens
attaagttaagacaa

SEQ ID NO: 668287 - DNA, 15 bp, Homo sapiens
ttaagttaagacaat

SEQ ID NO: 668288 - DNA, 15 bp, Homo sapiens
taagttaagacaatg

SEQ ID NO: 668289 - DNA, 15 bp, Homo sapiens
aagttaagacaatga

SEQ ID NO: 668290 - DNA, 15 bp, Homo sapiens
agttaagacaatgag

SEQ ID NO: 668291 - DNA, 15 bp, Homo sapiens
gttaagacaatgagc

SEQ ID NO: 668292 - DNA, 15 bp, Homo sapiens
ttaagacaatgagca

SEQ ID NO: 668293 - DNA, 15 bp, Homo sapiens
taagacaatgagcaa

SEQ ID NO: 668294 - DNA, 15 bp, Homo sapiens
aagacaatgagcaaa

SEQ ID NO: 668295 - DNA, 15 bp, Homo sapiens
agacaatgagcaaag

SEQ ID NO: 668296 - DNA, 15 bp, Homo sapiens
gacaatgagcaaagc

SEQ ID NO: 668297 - DNA, 15 bp, Homo sapiens
acaatgagcaaagca

SEQ ID NO: 668298 - DNA, 15 bp, Homo sapiens
caatgagcaaagcaa

SEQ ID NO: 668299 - DNA, 15 bp, Homo sapiens
aatgagcaaagcaac

SEQ ID NO: 668300 - DNA, 15 bp, Homo sapiens
atgagcaaagcaaca

SEQ ID NO: 668301 - DNA, 15 bp, Homo sapiens
tgagcaaagcaacag

SEQ ID NO: 668302 - DNA, 15 bp, Homo sapiens
gagcaaagcaacaga

SEQ ID NO: 668303 - DNA, 15 bp, Homo sapiens
agcaaagcaacagat

SEQ ID NO: 668304 - DNA, 15 bp, Homo sapiens
gcaaagcaacagatg

SEQ ID NO: 668305 - DNA, 15 bp, Homo sapiens
caaagcaacagatgc

SEQ ID NO: 668306 - DNA, 15 bp, Homo sapiens
aaagcaacagatgca

SEQ ID NO: 668307 - DNA, 15 bp, Homo sapiens
aagcaacagatgcaa

SEQ ID NO: 668308 - DNA, 15 bp, Homo sapiens
agcaacagatgcaac

SEQ ID NO: 668309 - DNA, 15 bp, Homo sapiens
gcaacagatgcaact

SEQ ID NO: 668310 - DNA, 15 bp, Homo sapiens
caacagatgcaactg

SEQ ID NO: 668311 - DNA, 15 bp, Homo sapiens
aacagatgcaactga

SEQ ID NO: 668312 - DNA, 15 bp, Homo sapiens
acagatgcaactgag

SEQ ID NO: 668313 - DNA, 15 bp, Homo sapiens
cagatgcaactgaga

SEQ ID NO: 668314 - DNA, 15 bp, Homo sapiens
agatgcaactgagac

SEQ ID NO: 668315 - DNA, 15 bp, Homo sapiens
gatgcaactgagacc

SEQ ID NO: 668316 - DNA, 15 bp, Homo sapiens
atgcaactgagacct

SEQ ID NO: 668317 - DNA, 15 bp, Homo sapiens
tgcaactgagaccta

SEQ ID NO: 668318 - DNA, 15 bp, Homo sapiens
gcaactgagacctag

SEQ ID NO: 668319 - DNA, 15 bp, Homo sapiens
caactgagacctagt

SEQ ID NO: 668320 - DNA, 15 bp, Homo sapiens
aactgagacctagtc

SEQ ID NO: 668321 - DNA, 15 bp, Homo sapiens
actgagacctagtcc

SEQ ID NO: 668322 - DNA, 15 bp, Homo sapiens
ctgagacctagtccc

SEQ ID NO: 668323 - DNA, 15 bp, Homo sapiens
tgagacctagtccct

SEQ ID NO: 668324 - DNA, 15 bp, Homo sapiens
gagacctagtccctg

SEQ ID NO: 668325 - DNA, 15 bp, Homo sapiens
agacctagtccctga

SEQ ID NO: 668326 - DNA, 15 bp, Homo sapiens
gacctagtccctgag

SEQ ID NO: 668327 - DNA, 15 bp, Homo sapiens
acctagtccctgagt

SEQ ID NO: 668328 - DNA, 15 bp, Homo sapiens
cctagtccctgagtg

SEQ ID NO: 668329 - DNA, 15 bp, Homo sapiens
ctagtccctgagtgc

SEQ ID NO: 668330 - DNA, 15 bp, Homo sapiens
tagtccctgagtgct

SEQ ID NO: 668331 - DNA, 15 bp, Homo sapiens
agtccctgagtgctt

SEQ ID NO: 668332 - DNA, 15 bp, Homo sapiens
gtccctgagtgcttt

SEQ ID NO: 668333 - DNA, 15 bp, Homo sapiens
tccctgagtgctttt

SEQ ID NO: 668334 - DNA, 15 bp, Homo sapiens
ccctgagtgcttttg

SEQ ID NO: 668335 - DNA, 15 bp, Homo sapiens
cctgagtgcttttgt

SEQ ID NO: 668336 - DNA, 15 bp, Homo sapiens
ctgagtgcttttgtt

SEQ ID NO: 668337 - DNA, 15 bp, Homo sapiens
tgagtgcttttgttt

SEQ ID NO: 668338 - DNA, 15 bp, Homo sapiens
gagtgcttttgtttt

SEQ ID NO: 668339 - DNA, 15 bp, Homo sapiens
agtgcttttgttttg

SEQ ID NO: 668340 - DNA, 15 bp, Homo sapiens
gtgcttttgttttgt

SEQ ID NO: 668341 - DNA, 15 bp, Homo sapiens
tgcttttgttttgtc

SEQ ID NO: 668342 - DNA, 15 bp, Homo sapiens
gcttttgttttgtca

SEQ ID NO: 668343 - DNA, 15 bp, Homo sapiens
cttttgttttgtcac

SEQ ID NO: 668344 - DNA, 15 bp, Homo sapiens
ttttgttttgtcact

SEQ ID NO: 668345 - DNA, 15 bp, Homo sapiens
tttgttttgtcactg

SEQ ID NO: 668346 - DNA, 15 bp, Homo sapiens
ttgttttgtcactgt

SEQ ID NO: 668347 - DNA, 15 bp, Homo sapiens
tgttttgtcactgtc

SEQ ID NO: 668348 - DNA, 15 bp, Homo sapiens
gttttgtcactgtca

SEQ ID NO: 668349 - DNA, 15 bp, Homo sapiens
ttttgtcactgtcat

SEQ ID NO: 668350 - DNA, 15 bp, Homo sapiens
tttgtcactgtcatt

SEQ ID NO: 668351 - DNA, 15 bp, Homo sapiens
ttgtcactgtcattg

SEQ ID NO: 668352 - DNA, 15 bp, Homo sapiens
tgtcactgtcattgt

SEQ ID NO: 668353 - DNA, 15 bp, Homo sapiens
gtcactgtcattgtc

SEQ ID NO: 668354 - DNA, 15 bp, Homo sapiens
tcactgtcattgtct

SEQ ID NO: 668355 - DNA, 15 bp, Homo sapiens
cactgtcattgtctg

SEQ ID NO: 668356 - DNA, 15 bp, Homo sapiens
actgtcattgtctgc

SEQ ID NO: 668357 - DNA, 15 bp, Homo sapiens
ctgtcattgtctgca

SEQ ID NO: 668358 - DNA, 15 bp, Homo sapiens
tgtcattgtctgcaa

SEQ ID NO: 668359 - DNA, 15 bp, Homo sapiens
gtcattgtctgcaac

SEQ ID NO: 668360 - DNA, 15 bp, Homo sapiens
tcattgtctgcaaca

SEQ ID NO: 668361 - DNA, 15 bp, Homo sapiens
cattgtctgcaacaa

SEQ ID NO: 668362 - DNA, 15 bp, Homo sapiens
attgtctgcaacaaa

SEQ ID NO: 668363 - DNA, 15 bp, Homo sapiens
ttgtctgcaacaaag

SEQ ID NO: 668364 - DNA, 15 bp, Homo sapiens
tgtctgcaacaaaga

SEQ ID NO: 668365 - DNA, 15 bp, Homo sapiens
gtctgcaacaaagaa

SEQ ID NO: 668366 - DNA, 15 bp, Homo sapiens
tctgcaacaaagaag

SEQ ID NO: 668367 - DNA, 15 bp, Homo sapiens
ctgcaacaaagaagt

SEQ ID NO: 668368 - DNA, 15 bp, Homo sapiens
tgcaacaaagaagtc

SEQ ID NO: 668369 - DNA, 15 bp, Homo sapiens
gcaacaaagaagtca

SEQ ID NO: 668370 - DNA, 15 bp, Homo sapiens
caacaaagaagtcac

SEQ ID NO: 668371 - DNA, 15 bp, Homo sapiens
aacaaagaagtcaca

SEQ ID NO: 668372 - DNA, 15 bp, Homo sapiens
acaaagaagtcacat

SEQ ID NO: 668373 - DNA, 15 bp, Homo sapiens
caaagaagtcacatg

SEQ ID NO: 668374 - DNA, 15 bp, Homo sapiens
aaagaagtcacatgt

SEQ ID NO: 668375 - DNA, 15 bp, Homo sapiens
aagaagtcacatgtg

SEQ ID NO: 668376 - DNA, 15 bp, Homo sapiens
agaagtcacatgtga

SEQ ID NO: 668377 - DNA, 15 bp, Homo sapiens
gaagtcacatgtgac

SEQ ID NO: 668378 - DNA, 15 bp, Homo sapiens
aagtcacatgtgaca

SEQ ID NO: 668379 - DNA, 15 bp, Homo sapiens
agtcacatgtgacag

SEQ ID NO: 668380 - DNA, 15 bp, Homo sapiens
gtcacatgtgacagc

SEQ ID NO: 668381 - DNA, 15 bp, Homo sapiens
tcacatgtgacagcc

SEQ ID NO: 668382 - DNA, 15 bp, Homo sapiens
cacatgtgacagcct

SEQ ID NO: 668383 - DNA, 15 bp, Homo sapiens
acatgtgacagcctg

SEQ ID NO: 668384 - DNA, 15 bp, Homo sapiens
catgtgacagcctgg

SEQ ID NO: 668385 - DNA, 15 bp, Homo sapiens
atgtgacagcctggg

SEQ ID NO: 668386 - DNA, 15 bp, Homo sapiens
tgtgacagcctggga

SEQ ID NO: 668387 - DNA, 15 bp, Homo sapiens
gtgacagcctgggaa

SEQ ID NO: 668388 - DNA, 15 bp, Homo sapiens
tgacagcctgggaag

SEQ ID NO: 668389 - DNA, 15 bp, Homo sapiens
gacagcctgggaaga

SEQ ID NO: 668390 - DNA, 15 bp, Homo sapiens
acagcctgggaagag

SEQ ID NO: 668391 - DNA, 15 bp, Homo sapiens
cagcctgggaagaga

SEQ ID NO: 668392 - DNA, 15 bp, Homo sapiens
agcctgggaagagag

SEQ ID NO: 668393 - DNA, 15 bp, Homo sapiens
gcctgggaagagagc

SEQ ID NO: 668394 - DNA, 15 bp, Homo sapiens
cctgggaagagagcc

SEQ ID NO: 668395 - DNA, 15 bp, Homo sapiens
ctgggaagagagcca

SEQ ID NO: 668396 - DNA, 15 bp, Homo sapiens
tgggaagagagccaa

SEQ ID NO: 668397 - DNA, 15 bp, Homo sapiens
gggaagagagccaaa

SEQ ID NO: 668398 - DNA, 15 bp, Homo sapiens
ggaagagagccaaat

SEQ ID NO: 668399 - DNA, 15 bp, Homo sapiens
gaagagagccaaatg

SEQ ID NO: 668400 - DNA, 15 bp, Homo sapiens
aagagagccaaatgc

SEQ ID NO: 668401 - DNA, 15 bp, Homo sapiens
agagagccaaatgca

SEQ ID NO: 668402 - DNA, 15 bp, Homo sapiens
gagagccaaatgcaa

SEQ ID NO: 668403 - DNA, 15 bp, Homo sapiens
agagccaaatgcaaa

SEQ ID NO: 668404 - DNA, 15 bp, Homo sapiens
gagccaaatgcaaac

SEQ ID NO: 668405 - DNA, 15 bp, Homo sapiens
agccaaatgcaaacc

SEQ ID NO: 668406 - DNA, 15 bp, Homo sapiens
gccaaatgcaaacca

SEQ ID NO: 668407 - DNA, 15 bp, Homo sapiens
ccaaatgcaaaccag

SEQ ID NO: 668408 - DNA, 15 bp, Homo sapiens
caaatgcaaaccaga

SEQ ID NO: 668409 - DNA, 15 bp, Homo sapiens
aaatgcaaaccagac

SEQ ID NO: 668410 - DNA, 15 bp, Homo sapiens
aatgcaaaccagacg

SEQ ID NO: 668411 - DNA, 15 bp, Homo sapiens
atgcaaaccagacga

SEQ ID NO: 668412 - DNA, 15 bp, Homo sapiens
tgcaaaccagacgat

SEQ ID NO: 668413 - DNA, 15 bp, Homo sapiens
gcaaaccagacgata

SEQ ID NO: 668414 - DNA, 15 bp, Homo sapiens
caaaccagacgatat

SEQ ID NO: 668415 - DNA, 15 bp, Homo sapiens
aaaccagacgatatc

SEQ ID NO: 668416 - DNA, 15 bp, Homo sapiens
aaccagacgatatcc

SEQ ID NO: 668417 - DNA, 15 bp, Homo sapiens
accagacgatatccc

SEQ ID NO: 668418 - DNA, 15 bp, Homo sapiens
ccagacgatatccca

SEQ ID NO: 668419 - DNA, 15 bp, Homo sapiens
cagacgatatcccag

SEQ ID NO: 668420 - DNA, 15 bp, Homo sapiens
agacgatatcccagc

SEQ ID NO: 668421 - DNA, 15 bp, Homo sapiens
gacgatatcccagct

SEQ ID NO: 668422 - DNA, 15 bp, Homo sapiens
acgatatcccagctg

SEQ ID NO: 668423 - DNA, 15 bp, Homo sapiens
cgatatcccagctgg

SEQ ID NO: 668424 - DNA, 15 bp, Homo sapiens
gatatcccagctggt

SEQ ID NO: 668425 - DNA, 15 bp, Homo sapiens
atatcccagctggtt

SEQ ID NO: 668426 - DNA, 15 bp, Homo sapiens
tatcccagctggttt

SEQ ID NO: 668427 - DNA, 15 bp, Homo sapiens
atcccagctggtttg

SEQ ID NO: 668428 - DNA, 15 bp, Homo sapiens
tcccagctggtttga

SEQ ID NO: 668429 - DNA, 15 bp, Homo sapiens
cccagctggtttgaa

SEQ ID NO: 668430 - DNA, 15 bp, Homo sapiens
ccagctggtttgaat

SEQ ID NO: 668431 - DNA, 15 bp, Homo sapiens
cagctggtttgaatg

SEQ ID NO: 668432 - DNA, 15 bp, Homo sapiens
agctggtttgaatgg

SEQ ID NO: 668433 - DNA, 15 bp, Homo sapiens
gctggtttgaatggc

SEQ ID NO: 668434 - DNA, 15 bp, Homo sapiens
ctggtttgaatggcc

SEQ ID NO: 668435 - DNA, 15 bp, Homo sapiens
tggtttgaatggcct

SEQ ID NO: 668436 - DNA, 15 bp, Homo sapiens
ggtttgaatggcctc

SEQ ID NO: 668437 - DNA, 15 bp, Homo sapiens
gtttgaatggcctcc

SEQ ID NO: 668438 - DNA, 15 bp, Homo sapiens
tttgaatggcctcca

SEQ ID NO: 668439 - DNA, 15 bp, Homo sapiens
ttgaatggcctccac

SEQ ID NO: 668440 - DNA, 15 bp, Homo sapiens
tgaatggcctccacc

SEQ ID NO: 668441 - DNA, 15 bp, Homo sapiens
gaatggcctccaccg

SEQ ID NO: 668442 - DNA, 15 bp, Homo sapiens
aatggcctccaccgt

SEQ ID NO: 668443 - DNA, 15 bp, Homo sapiens
atggcctccaccgtg

SEQ ID NO: 668444 - DNA, 15 bp, Homo sapiens
tggcctccaccgtgc

SEQ ID NO: 668445 - DNA, 15 bp, Homo sapiens
ggcctccaccgtgca

SEQ ID NO: 668446 - DNA, 15 bp, Homo sapiens
gcctccaccgtgcac

SEQ ID NO: 668447 - DNA, 15 bp, Homo sapiens
cctccaccgtgcacg

SEQ ID NO: 668448 - DNA, 15 bp, Homo sapiens
ctccaccgtgcacgt

SEQ ID NO: 668449 - DNA, 15 bp, Homo sapiens
tccaccgtgcacgtg

SEQ ID NO: 668450 - DNA, 15 bp, Homo sapiens
ccaccgtgcacgtgt

SEQ ID NO: 668451 - DNA, 15 bp, Homo sapiens
caccgtgcacgtgtg

SEQ ID NO: 668452 - DNA, 15 bp, Homo sapiens
accgtgcacgtgtgt

SEQ ID NO: 668453 - DNA, 15 bp, Homo sapiens
ccgtgcacgtgtgtg

SEQ ID NO: 668454 - DNA, 15 bp, Homo sapiens
cgtgcacgtgtgtgc

SEQ ID NO: 668455 - DNA, 15 bp, Homo sapiens
gtgcacgtgtgtgca

SEQ ID NO: 668456 - DNA, 15 bp, Homo sapiens
tgcacgtgtgtgcat

SEQ ID NO: 668457 - DNA, 15 bp, Homo sapiens
gcacgtgtgtgcatg

SEQ ID NO: 668458 - DNA, 15 bp, Homo sapiens
cacgtgtgtgcatgg

SEQ ID NO: 668459 - DNA, 15 bp, Homo sapiens
acgtgtgtgcatggg

SEQ ID NO: 668460 - DNA, 15 bp, Homo sapiens
cgtgtgtgcatggga

SEQ ID NO: 668461 - DNA, 15 bp, Homo sapiens
gtgtgtgcatgggaa

SEQ ID NO: 668462 - DNA, 15 bp, Homo sapiens
tgtgtgcatgggaat

SEQ ID NO: 668463 - DNA, 15 bp, Homo sapiens
gtgtgcatgggaatc

SEQ ID NO: 668464 - DNA, 15 bp, Homo sapiens
tgtgcatgggaatca

SEQ ID NO: 668465 - DNA, 15 bp, Homo sapiens
gtgcatgggaatcat

SEQ ID NO: 668466 - DNA, 15 bp, Homo sapiens
tgcatgggaatcatg

SEQ ID NO: 668467 - DNA, 15 bp, Homo sapiens
gcatgggaatcatgc

SEQ ID NO: 668468 - DNA, 15 bp, Homo sapiens
catgggaatcatgct

SEQ ID NO: 668469 - DNA, 15 bp, Homo sapiens
atgggaatcatgcta

SEQ ID NO: 668470 - DNA, 15 bp, Homo sapiens
tgggaatcatgctac

SEQ ID NO: 668471 - DNA, 15 bp, Homo sapiens
gggaatcatgctact

SEQ ID NO: 668472 - DNA, 15 bp, Homo sapiens
ggaatcatgctactt

SEQ ID NO: 668473 - DNA, 15 bp, Homo sapiens
gaatcatgctacttg

SEQ ID NO: 668474 - DNA, 15 bp, Homo sapiens
aatcatgctacttgg

SEQ ID NO: 668475 - DNA, 15 bp, Homo sapiens
atcatgctacttggt

SEQ ID NO: 668476 - DNA, 15 bp, Homo sapiens
tcatgctacttggta

SEQ ID NO: 668477 - DNA, 15 bp, Homo sapiens
catgctacttggtac

SEQ ID NO: 668478 - DNA, 15 bp, Homo sapiens
atgctacttggtaca

SEQ ID NO: 668479 - DNA, 15 bp, Homo sapiens
tgctacttggtacag

SEQ ID NO: 668480 - DNA, 15 bp, Homo sapiens
gctacttggtacagc

SEQ ID NO: 668481 - DNA, 15 bp, Homo sapiens
ctacttggtacagca

SEQ ID NO: 668482 - DNA, 15 bp, Homo sapiens
tacttggtacagcat

SEQ ID NO: 668483 - DNA, 15 bp, Homo sapiens
acttggtacagcatc

SEQ ID NO: 668484 - DNA, 15 bp, Homo sapiens
cttggtacagcatct

SEQ ID NO: 668485 - DNA, 15 bp, Homo sapiens
ttggtacagcatctg

SEQ ID NO: 668486 - DNA, 15 bp, Homo sapiens
tggtacagcatctgc

SEQ ID NO: 668487 - DNA, 15 bp, Homo sapiens
ggtacagcatctgct

SEQ ID NO: 668488 - DNA, 15 bp, Homo sapiens
gtacagcatctgctt

SEQ ID NO: 668489 - DNA, 15 bp, Homo sapiens
tacagcatctgcttc

SEQ ID NO: 668490 - DNA, 15 bp, Homo sapiens
acagcatctgcttca

SEQ ID NO: 668491 - DNA, 15 bp, Homo sapiens
cagcatctgcttcac

SEQ ID NO: 668492 - DNA, 15 bp, Homo sapiens
agcatctgcttcact

SEQ ID NO: 668493 - DNA, 15 bp, Homo sapiens
gcatctgcttcactc

SEQ ID NO: 668494 - DNA, 15 bp, Homo sapiens
catctgcttcactca

SEQ ID NO: 668495 - DNA, 15 bp, Homo sapiens
atctgcttcactcaa

SEQ ID NO: 668496 - DNA, 15 bp, Homo sapiens
tctgcttcactcaag

SEQ ID NO: 668497 - DNA, 15 bp, Homo sapiens
ctgcttcactcaagt

SEQ ID NO: 668498 - DNA, 15 bp, Homo sapiens
tgcttcactcaagtg

SEQ ID NO: 668499 - DNA, 15 bp, Homo sapiens
gcttcactcaagtga

SEQ ID NO: 668500 - DNA, 15 bp, Homo sapiens
cttcactcaagtgag

SEQ ID NO: 668501 - DNA, 15 bp, Homo sapiens
ttcactcaagtgagt

SEQ ID NO: 668502 - DNA, 15 bp, Homo sapiens
tcactcaagtgagtt

SEQ ID NO: 668503 - DNA, 15 bp, Homo sapiens
cactcaagtgagttt

SEQ ID NO: 668504 - DNA, 15 bp, Homo sapiens
actcaagtgagtttc

SEQ ID NO: 668505 - DNA, 15 bp, Homo sapiens
ctcaagtgagtttca

SEQ ID NO: 668506 - DNA, 15 bp, Homo sapiens
tcaagtgagtttcag

SEQ ID NO: 668507 - DNA, 15 bp, Homo sapiens
caagtgagtttcagc

SEQ ID NO: 668508 - DNA, 15 bp, Homo sapiens
aagtgagtttcagcc

SEQ ID NO: 668509 - DNA, 15 bp, Homo sapiens
agtgagtttcagccc

SEQ ID NO: 668510 - DNA, 15 bp, Homo sapiens
gtgagtttcagccca

SEQ ID NO: 668511 - DNA, 15 bp, Homo sapiens
tgagtttcagcccat

SEQ ID NO: 668512 - DNA, 15 bp, Homo sapiens
gagtttcagcccatg

SEQ ID NO: 668513 - DNA, 15 bp, Homo sapiens
agtttcagcccatgg

SEQ ID NO: 668514 - DNA, 15 bp, Homo sapiens
gtttcagcccatggc

SEQ ID NO: 668515 - DNA, 15 bp, Homo sapiens
tttcagcccatggct

SEQ ID NO: 668516 - DNA, 15 bp, Homo sapiens
ttcagcccatggctt

SEQ ID NO: 668517 - DNA, 15 bp, Homo sapiens
tcagcccatggcttt

SEQ ID NO: 668518 - DNA, 15 bp, Homo sapiens
cagcccatggctttg

SEQ ID NO: 668519 - DNA, 15 bp, Homo sapiens
agcccatggctttgc

SEQ ID NO: 668520 - DNA, 15 bp, Homo sapiens
gcccatggctttgct

SEQ ID NO: 668521 - DNA, 15 bp, Homo sapiens
cccatggctttgctg

SEQ ID NO: 668522 - DNA, 15 bp, Homo sapiens
ccatggctttgctgt

SEQ ID NO: 668523 - DNA, 15 bp, Homo sapiens
catggctttgctgtg

SEQ ID NO: 668524 - DNA, 15 bp, Homo sapiens
atggctttgctgtga

SEQ ID NO: 668525 - DNA, 15 bp, Homo sapiens
tggctttgctgtgat

SEQ ID NO: 668526 - DNA, 15 bp, Homo sapiens
ggctttgctgtgatg

SEQ ID NO: 668527 - DNA, 15 bp, Homo sapiens
gctttgctgtgatgc

SEQ ID NO: 668528 - DNA, 15 bp, Homo sapiens
ctttgctgtgatgct

SEQ ID NO: 668529 - DNA, 15 bp, Homo sapiens
tttgctgtgatgctg

SEQ ID NO: 668530 - DNA, 15 bp, Homo sapiens
ttgctgtgatgctga

SEQ ID NO: 668531 - DNA, 15 bp, Homo sapiens
tgctgtgatgctgag

SEQ ID NO: 668532 - DNA, 15 bp, Homo sapiens
gctgtgatgctgaga

SEQ ID NO: 668533 - DNA, 15 bp, Homo sapiens
ctgtgatgctgagac

SEQ ID NO: 668534 - DNA, 15 bp, Homo sapiens
tgtgatgctgagaca

SEQ ID NO: 668535 - DNA, 15 bp, Homo sapiens
gtgatgctgagacag

SEQ ID NO: 668536 - DNA, 15 bp, Homo sapiens
tgatgctgagacaga

SEQ ID NO: 668537 - DNA, 15 bp, Homo sapiens
gatgctgagacagac

SEQ ID NO: 668538 - DNA, 15 bp, Homo sapiens
atgctgagacagacc

SEQ ID NO: 668539 - DNA, 15 bp, Homo sapiens
tgctgagacagaccc

SEQ ID NO: 668540 - DNA, 15 bp, Homo sapiens
gctgagacagaccca

SEQ ID NO: 668541 - DNA, 15 bp, Homo sapiens
ctgagacagacccag

SEQ ID NO: 668542 - DNA, 15 bp, Homo sapiens
tgagacagacccaga

SEQ ID NO: 668543 - DNA, 15 bp, Homo sapiens
gagacagacccagaa

SEQ ID NO: 668544 - DNA, 15 bp, Homo sapiens
agacagacccagaag

SEQ ID NO: 668545 - DNA, 15 bp, Homo sapiens
gacagacccagaaga

SEQ ID NO: 668546 - DNA, 15 bp, Homo sapiens
acagacccagaagaa

SEQ ID NO: 668547 - DNA, 15 bp, Homo sapiens
cagacccagaagaaa

SEQ ID NO: 668548 - DNA, 15 bp, Homo sapiens
agacccagaagaaac

SEQ ID NO: 668549 - DNA, 15 bp, Homo sapiens
gacccagaagaaaca

SEQ ID NO: 668550 - DNA, 15 bp, Homo sapiens
acccagaagaaacag

SEQ ID NO: 668551 - DNA, 15 bp, Homo sapiens
cccagaagaaacaga

SEQ ID NO: 668552 - DNA, 15 bp, Homo sapiens
ccagaagaaacagac

SEQ ID NO: 668553 - DNA, 15 bp, Homo sapiens
cagaagaaacagacc

SEQ ID NO: 668554 - DNA, 15 bp, Homo sapiens
agaagaaacagacca

SEQ ID NO: 668555 - DNA, 15 bp, Homo sapiens
gaagaaacagaccag

SEQ ID NO: 668556 - DNA, 15 bp, Homo sapiens
aagaaacagaccagg

SEQ ID NO: 668557 - DNA, 15 bp, Homo sapiens
agaaacagaccaggg

SEQ ID NO: 668558 - DNA, 15 bp, Homo sapiens
gaaacagaccaggga

SEQ ID NO: 668559 - DNA, 15 bp, Homo sapiens
aaacagaccagggaa

SEQ ID NO: 668560 - DNA, 15 bp, Homo sapiens
aacagaccagggaat

SEQ ID NO: 668561 - DNA, 15 bp, Homo sapiens
acagaccagggaatc

SEQ ID NO: 668562 - DNA, 15 bp, Homo sapiens
cagaccagggaatcc

SEQ ID NO: 668563 - DNA, 15 bp, Homo sapiens
agaccagggaatccc

SEQ ID NO: 668564 - DNA, 15 bp, Homo sapiens
gaccagggaatccct

SEQ ID NO: 668565 - DNA, 15 bp, Homo sapiens
accagggaatccctc

SEQ ID NO: 668566 - DNA, 15 bp, Homo sapiens
ccagggaatccctcc

SEQ ID NO: 668567 - DNA, 15 bp, Homo sapiens
cagggaatccctccg

SEQ ID NO: 668568 - DNA, 15 bp, Homo sapiens
agggaatccctccgc

SEQ ID NO: 668569 - DNA, 15 bp, Homo sapiens
gggaatccctccgct

SEQ ID NO: 668570 - DNA, 15 bp, Homo sapiens
ggaatccctccgctc

SEQ ID NO: 668571 - DNA, 15 bp, Homo sapiens
gaatccctccgctca

SEQ ID NO: 668572 - DNA, 15 bp, Homo sapiens
aatccctccgctcag

SEQ ID NO: 668573 - DNA, 15 bp, Homo sapiens
atccctccgctcaga

SEQ ID NO: 668574 - DNA, 15 bp, Homo sapiens
tccctccgctcagac

SEQ ID NO: 668575 - DNA, 15 bp, Homo sapiens
ccctccgctcagact

SEQ ID NO: 668576 - DNA, 15 bp, Homo sapiens
cctccgctcagactt

SEQ ID NO: 668577 - DNA, 15 bp, Homo sapiens
ctccgctcagacttt

SEQ ID NO: 668578 - DNA, 15 bp, Homo sapiens
tccgctcagacttta

SEQ ID NO: 668579 - DNA, 15 bp, Homo sapiens
ccgctcagactttac

SEQ ID NO: 668580 - DNA, 15 bp, Homo sapiens
cgctcagactttaca

SEQ ID NO: 668581 - DNA, 15 bp, Homo sapiens
gctcagactttacac

SEQ ID NO: 668582 - DNA, 15 bp, Homo sapiens
ctcagactttacact

SEQ ID NO: 668583 - DNA, 15 bp, Homo sapiens
tcagactttacactt

SEQ ID NO: 668584 - DNA, 15 bp, Homo sapiens
cagactttacacttt

SEQ ID NO: 668585 - DNA, 15 bp, Homo sapiens
agactttacacttta

SEQ ID NO: 668586 - DNA, 15 bp, Homo sapiens
gactttacactttat

SEQ ID NO: 668587 - DNA, 15 bp, Homo sapiens
actttacactttata

SEQ ID NO: 668588 - DNA, 15 bp, Homo sapiens
ctttacactttatac

SEQ ID NO: 668589 - DNA, 15 bp, Homo sapiens
tttacactttatacc

SEQ ID NO: 668590 - DNA, 15 bp, Homo sapiens
ttacactttatacct

SEQ ID NO: 668591 - DNA, 15 bp, Homo sapiens
tacactttatacctt

SEQ ID NO: 668592 - DNA, 15 bp, Homo sapiens
acactttataccttg

SEQ ID NO: 668593 - DNA, 15 bp, Homo sapiens
cactttataccttgt

SEQ ID NO: 668594 - DNA, 15 bp, Homo sapiens
actttataccttgtg

SEQ ID NO: 668595 - DNA, 15 bp, Homo sapiens
ctttataccttgtgc

SEQ ID NO: 668596 - DNA, 15 bp, Homo sapiens
tttataccttgtgct

SEQ ID NO: 668597 - DNA, 15 bp, Homo sapiens
ttataccttgtgctt

SEQ ID NO: 668598 - DNA, 15 bp, Homo sapiens
tataccttgtgcttt

SEQ ID NO: 668599 - DNA, 15 bp, Homo sapiens
ataccttgtgctttg

SEQ ID NO: 668600 - DNA, 15 bp, Homo sapiens
taccttgtgctttga

SEQ ID NO: 668601 - DNA, 15 bp, Homo sapiens
accttgtgctttgag

SEQ ID NO: 668602 - DNA, 15 bp, Homo sapiens
ccttgtgctttgaga

SEQ ID NO: 668603 - DNA, 15 bp, Homo sapiens
cttgtgctttgagag

SEQ ID NO: 668604 - DNA, 15 bp, Homo sapiens
ttgtgctttgagaga

SEQ ID NO: 668605 - DNA, 15 bp, Homo sapiens
tgtgctttgagagaa

SEQ ID NO: 668606 - DNA, 15 bp, Homo sapiens
gtgctttgagagaaa

SEQ ID NO: 668607 - DNA, 15 bp, Homo sapiens
tgctttgagagaaaa

SEQ ID NO: 668608 - DNA, 15 bp, Homo sapiens
gctttgagagaaaag

SEQ ID NO: 668609 - DNA, 15 bp, Homo sapiens
ctttgagagaaaaga

SEQ ID NO: 668610 - DNA, 15 bp, Homo sapiens
tttgagagaaaagaa

SEQ ID NO: 668611 - DNA, 15 bp, Homo sapiens
ttgagagaaaagaaa

SEQ ID NO: 668612 - DNA, 15 bp, Homo sapiens
tgagagaaaagaaaa

SEQ ID NO: 668613 - DNA, 15 bp, Homo sapiens
gagagaaaagaaaaa

SEQ ID NO: 668614 - DNA, 15 bp, Homo sapiens
agagaaaagaaaaag

SEQ ID NO: 668615 - DNA, 15 bp, Homo sapiens
gagaaaagaaaaaga

SEQ ID NO: 668616 - DNA, 15 bp, Homo sapiens
agaaaagaaaaagaa

SEQ ID NO: 668617 - DNA, 15 bp, Homo sapiens
gaaaagaaaaagaat

SEQ ID NO: 668618 - DNA, 15 bp, Homo sapiens
aaaagaaaaagaatc

SEQ ID NO: 668619 - DNA, 15 bp, Homo sapiens
aaagaaaaagaatct

SEQ ID NO: 668620 - DNA, 15 bp, Homo sapiens
aagaaaaagaatctc

SEQ ID NO: 668621 - DNA, 15 bp, Homo sapiens
agaaaaagaatctct

SEQ ID NO: 668622 - DNA, 15 bp, Homo sapiens
gaaaaagaatctctc

SEQ ID NO: 668623 - DNA, 15 bp, Homo sapiens
aaaaagaatctctct

SEQ ID NO: 668624 - DNA, 15 bp, Homo sapiens
aaaagaatctctcta

SEQ ID NO: 668625 - DNA, 15 bp, Homo sapiens
aaagaatctctctat

SEQ ID NO: 668626 - DNA, 15 bp, Homo sapiens
aagaatctctctatt

SEQ ID NO: 668627 - DNA, 15 bp, Homo sapiens
agaatctctctattg

SEQ ID NO: 668628 - DNA, 15 bp, Homo sapiens
gaatctctctattgg

SEQ ID NO: 668629 - DNA, 15 bp, Homo sapiens
aatctctctattgga

SEQ ID NO: 668630 - DNA, 15 bp, Homo sapiens
atctctctattggag

SEQ ID NO: 668631 - DNA, 15 bp, Homo sapiens
tctctctattggaga

SEQ ID NO: 668632 - DNA, 15 bp, Homo sapiens
ctctctattggagac

SEQ ID NO: 668633 - DNA, 15 bp, Homo sapiens
tctctattggagaca

SEQ ID NO: 668634 - DNA, 15 bp, Homo sapiens
ctctattggagacaa

SEQ ID NO: 668635 - DNA, 15 bp, Homo sapiens
tctattggagacaaa

SEQ ID NO: 668636 - DNA, 15 bp, Homo sapiens
ctattggagacaaaa

SEQ ID NO: 668637 - DNA, 15 bp, Homo sapiens
tattggagacaaaaa

SEQ ID NO: 668638 - DNA, 15 bp, Homo sapiens
attggagacaaaaaa

SEQ ID NO: 668639 - DNA, 15 bp, Homo sapiens
ttggagacaaaaaat

SEQ ID NO: 668640 - DNA, 15 bp, Homo sapiens
tggagacaaaaaata

SEQ ID NO: 668641 - DNA, 15 bp, Homo sapiens
ggagacaaaaaatag

SEQ ID NO: 668642 - DNA, 15 bp, Homo sapiens
gagacaaaaaatagg

SEQ ID NO: 668643 - DNA, 15 bp, Homo sapiens
agacaaaaaatagga

SEQ ID NO: 668644 - DNA, 15 bp, Homo sapiens
gacaaaaaataggat

SEQ ID NO: 668645 - DNA, 15 bp, Homo sapiens
acaaaaaataggatg

SEQ ID NO: 668646 - DNA, 15 bp, Homo sapiens
caaaaaataggatgt

SEQ ID NO: 668647 - DNA, 15 bp, Homo sapiens
aaaaaataggatgta

SEQ ID NO: 668648 - DNA, 15 bp, Homo sapiens
aaaaataggatgtat

SEQ ID NO: 668649 - DNA, 15 bp, Homo sapiens
aaaataggatgtatg

SEQ ID NO: 668650 - DNA, 15 bp, Homo sapiens
aaataggatgtatgt

SEQ ID NO: 668651 - DNA, 15 bp, Homo sapiens
aataggatgtatgtg

SEQ ID NO: 668652 - DNA, 15 bp, Homo sapiens
ataggatgtatgtgg

SEQ ID NO: 668653 - DNA, 15 bp, Homo sapiens
taggatgtatgtggt

SEQ ID NO: 668654 - DNA, 15 bp, Homo sapiens
aggatgtatgtggtt

SEQ ID NO: 668655 - DNA, 15 bp, Homo sapiens
ggatgtatgtggttg

SEQ ID NO: 668656 - DNA, 15 bp, Homo sapiens
gatgtatgtggttgg

SEQ ID NO: 668657 - DNA, 15 bp, Homo sapiens
atgtatgtggttggt

SEQ ID NO: 668658 - DNA, 15 bp, Homo sapiens
tgtatgtggttggtc

SEQ ID NO: 668659 - DNA, 15 bp, Homo sapiens
gtatgtggttggtca

SEQ ID NO: 668660 - DNA, 15 bp, Homo sapiens
tatgtggttggtcaa

SEQ ID NO: 668661 - DNA, 15 bp, Homo sapiens
atgtggttggtcaat

SEQ ID NO: 668662 - DNA, 15 bp, Homo sapiens
tgtggttggtcaatc

SEQ ID NO: 668663 - DNA, 15 bp, Homo sapiens
gtggttggtcaatct

SEQ ID NO: 668664 - DNA, 15 bp, Homo sapiens
tggttggtcaatcta

SEQ ID NO: 668665 - DNA, 15 bp, Homo sapiens
ggttggtcaatctaa

SEQ ID NO: 668666 - DNA, 15 bp, Homo sapiens
gttggtcaatctaac

SEQ ID NO: 668667 - DNA, 15 bp, Homo sapiens
ttggtcaatctaacc

SEQ ID NO: 668668 - DNA, 15 bp, Homo sapiens
tggtcaatctaacct

SEQ ID NO: 668669 - DNA, 15 bp, Homo sapiens
ggtcaatctaacctc

SEQ ID NO: 668670 - DNA, 15 bp, Homo sapiens
gtcaatctaacctca

SEQ ID NO: 668671 - DNA, 15 bp, Homo sapiens
tcaatctaacctcaa

SEQ ID NO: 668672 - DNA, 15 bp, Homo sapiens
caatctaacctcaat

SEQ ID NO: 668673 - DNA, 15 bp, Homo sapiens
aatctaacctcaatt

SEQ ID NO: 668674 - DNA, 15 bp, Homo sapiens
atctaacctcaattc

SEQ ID NO: 668675 - DNA, 15 bp, Homo sapiens
tctaacctcaattct

SEQ ID NO: 668676 - DNA, 15 bp, Homo sapiens
ctaacctcaattctt

SEQ ID NO: 668677 - DNA, 15 bp, Homo sapiens
taacctcaattcttt

SEQ ID NO: 668678 - DNA, 15 bp, Homo sapiens
aacctcaattctttt

SEQ ID NO: 668679 - DNA, 15 bp, Homo sapiens
acctcaattcttttt

SEQ ID NO: 668680 - DNA, 15 bp, Homo sapiens
cctcaattctttttg

SEQ ID NO: 668681 - DNA, 15 bp, Homo sapiens
ctcaattctttttgc

SEQ ID NO: 668682 - DNA, 15 bp, Homo sapiens
tcaattctttttgct

SEQ ID NO: 668683 - DNA, 15 bp, Homo sapiens
caattctttttgcta

SEQ ID NO: 668684 - DNA, 15 bp, Homo sapiens
aattctttttgctat

SEQ ID NO: 668685 - DNA, 15 bp, Homo sapiens
attctttttgctata

SEQ ID NO: 668686 - DNA, 15 bp, Homo sapiens
ttctttttgctatag

SEQ ID NO: 668687 - DNA, 15 bp, Homo sapiens
tctttttgctatagc

SEQ ID NO: 668688 - DNA, 15 bp, Homo sapiens
ctttttgctatagcc

SEQ ID NO: 668689 - DNA, 15 bp, Homo sapiens
tttttgctatagccc

SEQ ID NO: 668690 - DNA, 15 bp, Homo sapiens
ttttgctatagcccc

SEQ ID NO: 668691 - DNA, 15 bp, Homo sapiens
tttgctatagccccc

SEQ ID NO: 668692 - DNA, 15 bp, Homo sapiens
ttgctatagcccccc

SEQ ID NO: 668693 - DNA, 15 bp, Homo sapiens
tgctatagccccccg

SEQ ID NO: 668694 - DNA, 15 bp, Homo sapiens
gctatagccccccgc

SEQ ID NO: 668695 - DNA, 15 bp, Homo sapiens
ctatagccccccgct

SEQ ID NO: 668696 - DNA, 15 bp, Homo sapiens
tatagccccccgcta

SEQ ID NO: 668697 - DNA, 15 bp, Homo sapiens
atagccccccgctaa

SEQ ID NO: 668698 - DNA, 15 bp, Homo sapiens
tagccccccgctaat

SEQ ID NO: 668699 - DNA, 15 bp, Homo sapiens
agccccccgctaatt

SEQ ID NO: 668700 - DNA, 15 bp, Homo sapiens
gccccccgctaattt

SEQ ID NO: 668701 - DNA, 15 bp, Homo sapiens
ccccccgctaattta

SEQ ID NO: 668702 - DNA, 15 bp, Homo sapiens
cccccgctaatttaa

SEQ ID NO: 668703 - DNA, 15 bp, Homo sapiens
ccccgctaatttaaa

SEQ ID NO: 668704 - DNA, 15 bp, Homo sapiens
cccgctaatttaaag

SEQ ID NO: 668705 - DNA, 15 bp, Homo sapiens
ccgctaatttaaaga

SEQ ID NO: 668706 - DNA, 15 bp, Homo sapiens
cgctaatttaaagag

SEQ ID NO: 668707 - DNA, 15 bp, Homo sapiens
gctaatttaaagagt

SEQ ID NO: 668708 - DNA, 15 bp, Homo sapiens
ctaatttaaagagtg

SEQ ID NO: 668709 - DNA, 15 bp, Homo sapiens
taatttaaagagtga

SEQ ID NO: 668710 - DNA, 15 bp, Homo sapiens
aatttaaagagtgaa

SEQ ID NO: 668711 - DNA, 15 bp, Homo sapiens
atttaaagagtgaag

SEQ ID NO: 668712 - DNA, 15 bp, Homo sapiens
tttaaagagtgaagc

SEQ ID NO: 668713 - DNA, 15 bp, Homo sapiens
ttaaagagtgaagca

SEQ ID NO: 668714 - DNA, 15 bp, Homo sapiens
taaagagtgaagcat

SEQ ID NO: 668715 - DNA, 15 bp, Homo sapiens
aaagagtgaagcata

SEQ ID NO: 668716 - DNA, 15 bp, Homo sapiens
aagagtgaagcatag

SEQ ID NO: 668717 - DNA, 15 bp, Homo sapiens
agagtgaagcataga

SEQ ID NO: 668718 - DNA, 15 bp, Homo sapiens
gagtgaagcatagat

SEQ ID NO: 668719 - DNA, 15 bp, Homo sapiens
agtgaagcatagatg

SEQ ID NO: 668720 - DNA, 15 bp, Homo sapiens
gtgaagcatagatgg

SEQ ID NO: 668721 - DNA, 15 bp, Homo sapiens
tgaagcatagatggt

SEQ ID NO: 668722 - DNA, 15 bp, Homo sapiens
gaagcatagatggta

SEQ ID NO: 668723 - DNA, 15 bp, Homo sapiens
aagcatagatggtat

SEQ ID NO: 668724 - DNA, 15 bp, Homo sapiens
agcatagatggtatc

SEQ ID NO: 668725 - DNA, 15 bp, Homo sapiens
gcatagatggtatct

SEQ ID NO: 668726 - DNA, 15 bp, Homo sapiens
catagatggtatctt

SEQ ID NO: 668727 - DNA, 15 bp, Homo sapiens
atagatggtatctta

SEQ ID NO: 668728 - DNA, 15 bp, Homo sapiens
tagatggtatcttaa

SEQ ID NO: 668729 - DNA, 15 bp, Homo sapiens
agatggtatcttaat

SEQ ID NO: 668730 - DNA, 15 bp, Homo sapiens
gatggtatcttaatg

SEQ ID NO: 668731 - DNA, 15 bp, Homo sapiens
atggtatcttaatgt

SEQ ID NO: 668732 - DNA, 15 bp, Homo sapiens
tggtatcttaatgtt

SEQ ID NO: 668733 - DNA, 15 bp, Homo sapiens
ggtatcttaatgttt

SEQ ID NO: 668734 - DNA, 15 bp, Homo sapiens
gtatcttaatgtttt

SEQ ID NO: 668735 - DNA, 15 bp, Homo sapiens
tatcttaatgttttc

SEQ ID NO: 668736 - DNA, 15 bp, Homo sapiens
atcttaatgttttct

SEQ ID NO: 668737 - DNA, 15 bp, Homo sapiens
tcttaatgttttctt

SEQ ID NO: 668738 - DNA, 15 bp, Homo sapiens
cttaatgttttcttg

SEQ ID NO: 668739 - DNA, 15 bp, Homo sapiens
ttaatgttttcttgt

SEQ ID NO: 668740 - DNA, 15 bp, Homo sapiens
taatgttttcttgta

SEQ ID NO: 668741 - DNA, 15 bp, Homo sapiens
aatgttttcttgtag

SEQ ID NO: 668742 - DNA, 15 bp, Homo sapiens
atgttttcttgtaga

SEQ ID NO: 668743 - DNA, 15 bp, Homo sapiens
tgttttcttgtagaa

SEQ ID NO: 668744 - DNA, 15 bp, Homo sapiens
gttttcttgtagaaa

SEQ ID NO: 668745 - DNA, 15 bp, Homo sapiens
ttttcttgtagaaat

SEQ ID NO: 668746 - DNA, 15 bp, Homo sapiens
tttcttgtagaaatt

SEQ ID NO: 668747 - DNA, 15 bp, Homo sapiens
ttcttgtagaaattt

SEQ ID NO: 668748 - DNA, 15 bp, Homo sapiens
tcttgtagaaatttg

SEQ ID NO: 668749 - DNA, 15 bp, Homo sapiens
cttgtagaaatttgg

SEQ ID NO: 668750 - DNA, 15 bp, Homo sapiens
ttgtagaaatttggg

SEQ ID NO: 668751 - DNA, 15 bp, Homo sapiens
tgtagaaatttggga

SEQ ID NO: 668752 - DNA, 15 bp, Homo sapiens
gtagaaatttgggat

SEQ ID NO: 668753 - DNA, 15 bp, Homo sapiens
tagaaatttgggatt

SEQ ID NO: 668754 - DNA, 15 bp, Homo sapiens
agaaatttgggatta

SEQ ID NO: 668755 - DNA, 15 bp, Homo sapiens
gaaatttgggattaa

SEQ ID NO: 668756 - DNA, 15 bp, Homo sapiens
aaatttgggattaat

SEQ ID NO: 668757 - DNA, 15 bp, Homo sapiens
aatttgggattaatt

SEQ ID NO: 668758 - DNA, 15 bp, Homo sapiens
atttgggattaattt

SEQ ID NO: 668759 - DNA, 15 bp, Homo sapiens
tttgggattaatttg

SEQ ID NO: 668760 - DNA, 15 bp, Homo sapiens
ttgggattaatttgg

SEQ ID NO: 668761 - DNA, 15 bp, Homo sapiens
tgggattaatttggc

SEQ ID NO: 668762 - DNA, 15 bp, Homo sapiens
gggattaatttggct

SEQ ID NO: 668763 - DNA, 15 bp, Homo sapiens
ggattaatttggctt

SEQ ID NO: 668764 - DNA, 15 bp, Homo sapiens
gattaatttggcttg

SEQ ID NO: 668765 - DNA, 15 bp, Homo sapiens
attaatttggcttga

SEQ ID NO: 668766 - DNA, 15 bp, Homo sapiens
ttaatttggcttgag

SEQ ID NO: 668767 - DNA, 15 bp, Homo sapiens
taatttggcttgaga

SEQ ID NO: 668768 - DNA, 15 bp, Homo sapiens
aatttggcttgagag

SEQ ID NO: 668769 - DNA, 15 bp, Homo sapiens
atttggcttgagagg

SEQ ID NO: 668770 - DNA, 15 bp, Homo sapiens
tttggcttgagagga

SEQ ID NO: 668771 - DNA, 15 bp, Homo sapiens
ttggcttgagaggaa

SEQ ID NO: 668772 - DNA, 15 bp, Homo sapiens
tggcttgagaggaag

SEQ ID NO: 668773 - DNA, 15 bp, Homo sapiens
ggcttgagaggaaga

SEQ ID NO: 668774 - DNA, 15 bp, Homo sapiens
gcttgagaggaagaa

SEQ ID NO: 668775 - DNA, 15 bp, Homo sapiens
cttgagaggaagaat

SEQ ID NO: 668776 - DNA, 15 bp, Homo sapiens
ttgagaggaagaatg

SEQ ID NO: 668777 - DNA, 15 bp, Homo sapiens
tgagaggaagaatgg

SEQ ID NO: 668778 - DNA, 15 bp, Homo sapiens
gagaggaagaatgga

SEQ ID NO: 668779 - DNA, 15 bp, Homo sapiens
agaggaagaatggag

SEQ ID NO: 668780 - DNA, 15 bp, Homo sapiens
gaggaagaatggaga

SEQ ID NO: 668781 - DNA, 15 bp, Homo sapiens
aggaagaatggagat

SEQ ID NO: 668782 - DNA, 15 bp, Homo sapiens
ggaagaatggagatt

SEQ ID NO: 668783 - DNA, 15 bp, Homo sapiens
gaagaatggagatta

SEQ ID NO: 668784 - DNA, 15 bp, Homo sapiens
aagaatggagattaa

SEQ ID NO: 668785 - DNA, 15 bp, Homo sapiens
agaatggagattaaa

SEQ ID NO: 668786 - DNA, 15 bp, Homo sapiens
gaatggagattaaac

SEQ ID NO: 668787 - DNA, 15 bp, Homo sapiens
aatggagattaaacg

SEQ ID NO: 668788 - DNA, 15 bp, Homo sapiens
atggagattaaacgc

SEQ ID NO: 668789 - DNA, 15 bp, Homo sapiens
tggagattaaacgct

SEQ ID NO: 668790 - DNA, 15 bp, Homo sapiens
ggagattaaacgctt

SEQ ID NO: 668791 - DNA, 15 bp, Homo sapiens
gagattaaacgcttt

SEQ ID NO: 668792 - DNA, 15 bp, Homo sapiens
agattaaacgcttta

SEQ ID NO: 668793 - DNA, 15 bp, Homo sapiens
gattaaacgctttat

SEQ ID NO: 668794 - DNA, 15 bp, Homo sapiens
attaaacgctttatg

SEQ ID NO: 668795 - DNA, 15 bp, Homo sapiens
ttaaacgctttatga

SEQ ID NO: 668796 - DNA, 15 bp, Homo sapiens
taaacgctttatgag

SEQ ID NO: 668797 - DNA, 15 bp, Homo sapiens
aaacgctttatgagg

SEQ ID NO: 668798 - DNA, 15 bp, Homo sapiens
aacgctttatgaggc

SEQ ID NO: 668799 - DNA, 15 bp, Homo sapiens
acgctttatgaggct

SEQ ID NO: 668800 - DNA, 15 bp, Homo sapiens
cgctttatgaggctt

SEQ ID NO: 668801 - DNA, 15 bp, Homo sapiens
gctttatgaggcttt

SEQ ID NO: 668802 - DNA, 15 bp, Homo sapiens
ctttatgaggctttc

SEQ ID NO: 668803 - DNA, 15 bp, Homo sapiens
tttatgaggctttct

SEQ ID NO: 668804 - DNA, 15 bp, Homo sapiens
ttatgaggctttctt

SEQ ID NO: 668805 - DNA, 15 bp, Homo sapiens
tatgaggctttcttt

SEQ ID NO: 668806 - DNA, 15 bp, Homo sapiens
atgaggctttctttt

SEQ ID NO: 668807 - DNA, 15 bp, Homo sapiens
tgaggctttctttta

SEQ ID NO: 668808 - DNA, 15 bp, Homo sapiens
gaggctttcttttaa

SEQ ID NO: 668809 - DNA, 15 bp, Homo sapiens
aggctttcttttaat

SEQ ID NO: 668810 - DNA, 15 bp, Homo sapiens
ggctttcttttaatt

SEQ ID NO: 668811 - DNA, 15 bp, Homo sapiens
gctttcttttaattt

SEQ ID NO: 668812 - DNA, 15 bp, Homo sapiens
ctttcttttaatttg

SEQ ID NO: 668813 - DNA, 15 bp, Homo sapiens
tttcttttaatttgt

SEQ ID NO: 668814 - DNA, 15 bp, Homo sapiens
ttcttttaatttgtt

SEQ ID NO: 668815 - DNA, 15 bp, Homo sapiens
tcttttaatttgttc

SEQ ID NO: 668816 - DNA, 15 bp, Homo sapiens
cttttaatttgttcc

SEQ ID NO: 668817 - DNA, 15 bp, Homo sapiens
ttttaatttgttccc

SEQ ID NO: 668818 - DNA, 15 bp, Homo sapiens
tttaatttgttccca

SEQ ID NO: 668819 - DNA, 15 bp, Homo sapiens
ttaatttgttcccat

SEQ ID NO: 668820 - DNA, 15 bp, Homo sapiens
taatttgttcccatt

SEQ ID NO: 668821 - DNA, 15 bp, Homo sapiens
aatttgttcccattt

SEQ ID NO: 668822 - DNA, 15 bp, Homo sapiens
atttgttcccatttc

SEQ ID NO: 668823 - DNA, 15 bp, Homo sapiens
tttgttcccatttca

SEQ ID NO: 668824 - DNA, 15 bp, Homo sapiens
ttgttcccatttcat

SEQ ID NO: 668825 - DNA, 15 bp, Homo sapiens
tgttcccatttcatt

SEQ ID NO: 668826 - DNA, 15 bp, Homo sapiens
gttcccatttcattc

SEQ ID NO: 668827 - DNA, 15 bp, Homo sapiens
ttcccatttcattcc

SEQ ID NO: 668828 - DNA, 15 bp, Homo sapiens
tcccatttcattcct

SEQ ID NO: 668829 - DNA, 15 bp, Homo sapiens
cccatttcattcctg

SEQ ID NO: 668830 - DNA, 15 bp, Homo sapiens
ccatttcattcctga

SEQ ID NO: 668831 - DNA, 15 bp, Homo sapiens
catttcattcctgaa

SEQ ID NO: 668832 - DNA, 15 bp, Homo sapiens
atttcattcctgaat

SEQ ID NO: 668833 - DNA, 15 bp, Homo sapiens
tttcattcctgaata

SEQ ID NO: 668834 - DNA, 15 bp, Homo sapiens
ttcattcctgaatat

SEQ ID NO: 668835 - DNA, 15 bp, Homo sapiens
tcattcctgaatatt

SEQ ID NO: 668836 - DNA, 15 bp, Homo sapiens
cattcctgaatattt

SEQ ID NO: 668837 - DNA, 15 bp, Homo sapiens
attcctgaatatttt

SEQ ID NO: 668838 - DNA, 15 bp, Homo sapiens
ttcctgaatattttc

SEQ ID NO: 668839 - DNA, 15 bp, Homo sapiens
cacctccatccccaa

SEQ ID NO: 668840 - DNA, 15 bp, Homo sapiens
acctccatccccaac

SEQ ID NO: 668841 - DNA, 15 bp, Homo sapiens
cctccatccccaaca

SEQ ID NO: 668842 - DNA, 15 bp, Homo sapiens
ctccatccccaacac

SEQ ID NO: 668843 - DNA, 15 bp, Homo sapiens
tccatccccaacacc

SEQ ID NO: 668844 - DNA, 15 bp, Homo sapiens
ccatccccaacacct

SEQ ID NO: 668845 - DNA, 15 bp, Homo sapiens
catccccaacaccta

SEQ ID NO: 668846 - DNA, 15 bp, Homo sapiens
atccccaacacctat

SEQ ID NO: 668847 - DNA, 15 bp, Homo sapiens
tccccaacacctatt

SEQ ID NO: 668848 - DNA, 15 bp, Homo sapiens
ccccaacacctattc

SEQ ID NO: 668849 - DNA, 15 bp, Homo sapiens
cccaacacctattcc

SEQ ID NO: 668850 - DNA, 15 bp, Homo sapiens
ccaacacctattccc

SEQ ID NO: 668851 - DNA, 15 bp, Homo sapiens
caacacctattcccc

SEQ ID NO: 668852 - DNA, 15 bp, Homo sapiens
aacacctattccccc

SEQ ID NO: 668853 - DNA, 15 bp, Homo sapiens
acacctattccccca

SEQ ID NO: 668854 - DNA, 15 bp, Homo sapiens
cacctattcccccaa

SEQ ID NO: 668855 - DNA, 15 bp, Homo sapiens
acctattcccccaaa

SEQ ID NO: 668856 - DNA, 15 bp, Homo sapiens
cctattcccccaaac

SEQ ID NO: 668857 - DNA, 15 bp, Homo sapiens
ctattcccccaaact

SEQ ID NO: 668858 - DNA, 15 bp, Homo sapiens
tattcccccaaactt

SEQ ID NO: 668859 - DNA, 15 bp, Homo sapiens
attcccccaaactta

SEQ ID NO: 668860 - DNA, 15 bp, Homo sapiens
ttcccccaaacttaa

SEQ ID NO: 668861 - DNA, 15 bp, Homo sapiens
tcccccaaacttaaa

SEQ ID NO: 668862 - DNA, 15 bp, Homo sapiens
cccccaaacttaaat

SEQ ID NO: 668863 - DNA, 15 bp, Homo sapiens
ccccaaacttaaatt

SEQ ID NO: 668864 - DNA, 15 bp, Homo sapiens
cccaaacttaaattc

SEQ ID NO: 668865 - DNA, 15 bp, Homo sapiens
ccaaacttaaattct

SEQ ID NO: 668866 - DNA, 15 bp, Homo sapiens
caaacttaaattctt

SEQ ID NO: 668867 - DNA, 15 bp, Homo sapiens
aaacttaaattctta

SEQ ID NO: 668868 - DNA, 15 bp, Homo sapiens
aacttaaattcttaa

SEQ ID NO: 668869 - DNA, 15 bp, Homo sapiens
acttaaattcttaag

SEQ ID NO: 668870 - DNA, 15 bp, Homo sapiens
cttaaattcttaaga

SEQ ID NO: 668871 - DNA, 15 bp, Homo sapiens
ttaaattcttaagag

SEQ ID NO: 668872 - DNA, 15 bp, Homo sapiens
taaattcttaagaga

SEQ ID NO: 668873 - DNA, 15 bp, Homo sapiens
aaattcttaagagaa

SEQ ID NO: 668874 - DNA, 15 bp, Homo sapiens
aattcttaagagaat

SEQ ID NO: 668875 - DNA, 15 bp, Homo sapiens
attcttaagagaatc

SEQ ID NO: 668876 - DNA, 15 bp, Homo sapiens
ttcttaagagaatcc

SEQ ID NO: 668877 - DNA, 15 bp, Homo sapiens
tcttaagagaatcct

SEQ ID NO: 668878 - DNA, 15 bp, Homo sapiens
cttaagagaatccta

SEQ ID NO: 668879 - DNA, 15 bp, Homo sapiens
ttaagagaatcctag

SEQ ID NO: 668880 - DNA, 15 bp, Homo sapiens
taagagaatcctaga

SEQ ID NO: 668881 - DNA, 15 bp, Homo sapiens
aagagaatcctagat

SEQ ID NO: 668882 - DNA, 15 bp, Homo sapiens
agagaatcctagatc

SEQ ID NO: 668883 - DNA, 15 bp, Homo sapiens
gagaatcctagatca

SEQ ID NO: 668884 - DNA, 15 bp, Homo sapiens
agaatcctagatcaa

SEQ ID NO: 668885 - DNA, 15 bp, Homo sapiens
gaatcctagatcaag

SEQ ID NO: 668886 - DNA, 15 bp, Homo sapiens
aatcctagatcaagc

SEQ ID NO: 668887 - DNA, 15 bp, Homo sapiens
atcctagatcaagcc

SEQ ID NO: 668888 - DNA, 15 bp, Homo sapiens
tcctagatcaagcca

SEQ ID NO: 668889 - DNA, 15 bp, Homo sapiens
cctagatcaagccat

SEQ ID NO: 668890 - DNA, 15 bp, Homo sapiens
ctagatcaagccatg

SEQ ID NO: 668891 - DNA, 15 bp, Homo sapiens
tagatcaagccatgg

SEQ ID NO: 668892 - DNA, 15 bp, Homo sapiens
agatcaagccatggg

SEQ ID NO: 668893 - DNA, 15 bp, Homo sapiens
gatcaagccatgggt

SEQ ID NO: 668894 - DNA, 15 bp, Homo sapiens
atcaagccatgggtt

SEQ ID NO: 668895 - DNA, 15 bp, Homo sapiens
tcaagccatgggttt

SEQ ID NO: 668896 - DNA, 15 bp, Homo sapiens
caagccatgggtttg

SEQ ID NO: 668897 - DNA, 15 bp, Homo sapiens
aagccatgggtttgg

SEQ ID NO: 668898 - DNA, 15 bp, Homo sapiens
agccatgggtttggt

SEQ ID NO: 668899 - DNA, 15 bp, Homo sapiens
gccatgggtttggtg

SEQ ID NO: 668900 - DNA, 15 bp, Homo sapiens
ccatgggtttggtga

SEQ ID NO: 668901 - DNA, 15 bp, Homo sapiens
catgggtttggtgag

SEQ ID NO: 668902 - DNA, 15 bp, Homo sapiens
atgggtttggtgagt

SEQ ID NO: 668903 - DNA, 15 bp, Homo sapiens
tgggtttggtgagtt

SEQ ID NO: 668904 - DNA, 15 bp, Homo sapiens
gggtttggtgagtta

SEQ ID NO: 668905 - DNA, 15 bp, Homo sapiens
ggtttggtgagttaa

SEQ ID NO: 668906 - DNA, 15 bp, Homo sapiens
gtttggtgagttaag

SEQ ID NO: 668907 - DNA, 15 bp, Homo sapiens
tttggtgagttaagc

SEQ ID NO: 668908 - DNA, 15 bp, Homo sapiens
ttggtgagttaagct

SEQ ID NO: 668909 - DNA, 15 bp, Homo sapiens
tggtgagttaagcta

SEQ ID NO: 668910 - DNA, 15 bp, Homo sapiens
ggtgagttaagctaa

SEQ ID NO: 668911 - DNA, 15 bp, Homo sapiens
gtgagttaagctaag

SEQ ID NO: 668912 - DNA, 15 bp, Homo sapiens
tgagttaagctaagc

SEQ ID NO: 668913 - DNA, 15 bp, Homo sapiens
gagttaagctaagcc

SEQ ID NO: 668914 - DNA, 15 bp, Homo sapiens
agttaagctaagcca

SEQ ID NO: 668915 - DNA, 15 bp, Homo sapiens
gttaagctaagccag

SEQ ID NO: 668916 - DNA, 15 bp, Homo sapiens
ttaagctaagccaga

SEQ ID NO: 668917 - DNA, 15 bp, Homo sapiens
taagctaagccagat

SEQ ID NO: 668918 - DNA, 15 bp, Homo sapiens
aagctaagccagatg

SEQ ID NO: 668919 - DNA, 15 bp, Homo sapiens
agctaagccagatga

SEQ ID NO: 668920 - DNA, 15 bp, Homo sapiens
gctaagccagatgat

SEQ ID NO: 668921 - DNA, 15 bp, Homo sapiens
ctaagccagatgata

SEQ ID NO: 668922 - DNA, 15 bp, Homo sapiens
taagccagatgatac

SEQ ID NO: 668923 - DNA, 15 bp, Homo sapiens
aagccagatgataca

SEQ ID NO: 668924 - DNA, 15 bp, Homo sapiens
agccagatgatacag

SEQ ID NO: 668925 - DNA, 15 bp, Homo sapiens
gccagatgatacagt

SEQ ID NO: 668926 - DNA, 15 bp, Homo sapiens
ccagatgatacagta

SEQ ID NO: 668927 - DNA, 15 bp, Homo sapiens
cagatgatacagtaa

SEQ ID NO: 668928 - DNA, 15 bp, Homo sapiens
agatgatacagtaaa

SEQ ID NO: 668929 - DNA, 15 bp, Homo sapiens
gatgatacagtaaat

SEQ ID NO: 668930 - DNA, 15 bp, Homo sapiens
atgatacagtaaatg

SEQ ID NO: 668931 - DNA, 15 bp, Homo sapiens
tgatacagtaaatgt

SEQ ID NO: 668932 - DNA, 15 bp, Homo sapiens
gatacagtaaatgtg

SEQ ID NO: 668933 - DNA, 15 bp, Homo sapiens
atacagtaaatgtgc

SEQ ID NO: 668934 - DNA, 15 bp, Homo sapiens
tacagtaaatgtgca

SEQ ID NO: 668935 - DNA, 15 bp, Homo sapiens
acagtaaatgtgcag

SEQ ID NO: 668936 - DNA, 15 bp, Homo sapiens
cagtaaatgtgcagg

SEQ ID NO: 668937 - DNA, 15 bp, Homo sapiens
agtaaatgtgcagga

SEQ ID NO: 668938 - DNA, 15 bp, Homo sapiens
gtaaatgtgcaggaa

SEQ ID NO: 668939 - DNA, 15 bp, Homo sapiens
taaatgtgcaggaaa

SEQ ID NO: 668940 - DNA, 15 bp, Homo sapiens
aaatgtgcaggaaac

SEQ ID NO: 668941 - DNA, 15 bp, Homo sapiens
aatgtgcaggaaacc

SEQ ID NO: 668942 - DNA, 15 bp, Homo sapiens
atgtgcaggaaacct

SEQ ID NO: 668943 - DNA, 15 bp, Homo sapiens
tgtgcaggaaacctg

SEQ ID NO: 668944 - DNA, 15 bp, Homo sapiens
gtgcaggaaacctgc

SEQ ID NO: 668945 - DNA, 15 bp, Homo sapiens
tgcaggaaacctgcc

SEQ ID NO: 668946 - DNA, 15 bp, Homo sapiens
gcaggaaacctgcct

SEQ ID NO: 668947 - DNA, 15 bp, Homo sapiens
caggaaacctgcctt

SEQ ID NO: 668948 - DNA, 15 bp, Homo sapiens
aggaaacctgcctta

SEQ ID NO: 668949 - DNA, 15 bp, Homo sapiens
ggaaacctgccttat

SEQ ID NO: 668950 - DNA, 15 bp, Homo sapiens
gaaacctgccttata

SEQ ID NO: 668951 - DNA, 15 bp, Homo sapiens
aaacctgccttataa

SEQ ID NO: 668952 - DNA, 15 bp, Homo sapiens
aacctgccttataaa

SEQ ID NO: 668953 - DNA, 15 bp, Homo sapiens
acctgccttataaag

SEQ ID NO: 668954 - DNA, 15 bp, Homo sapiens
cctgccttataaagt

SEQ ID NO: 668955 - DNA, 15 bp, Homo sapiens
ctgccttataaagta

SEQ ID NO: 668956 - DNA, 15 bp, Homo sapiens
tgccttataaagtaa

SEQ ID NO: 668957 - DNA, 15 bp, Homo sapiens
gccttataaagtaaa

SEQ ID NO: 668958 - DNA, 15 bp, Homo sapiens
ccttataaagtaaat

SEQ ID NO: 668959 - DNA, 15 bp, Homo sapiens
cttataaagtaaatg

SEQ ID NO: 668960 - DNA, 15 bp, Homo sapiens
ttataaagtaaatgc

SEQ ID NO: 668961 - DNA, 15 bp, Homo sapiens
tataaagtaaatgcg

SEQ ID NO: 668962 - DNA, 15 bp, Homo sapiens
ataaagtaaatgcgt

SEQ ID NO: 668963 - DNA, 15 bp, Homo sapiens
taaagtaaatgcgtt

SEQ ID NO: 668964 - DNA, 15 bp, Homo sapiens
aaagtaaatgcgttc

SEQ ID NO: 668965 - DNA, 15 bp, Homo sapiens
aagtaaatgcgttct

SEQ ID NO: 668966 - DNA, 15 bp, Homo sapiens
agtaaatgcgttctc

SEQ ID NO: 668967 - DNA, 15 bp, Homo sapiens
gtaaatgcgttctct

SEQ ID NO: 668968 - DNA, 15 bp, Homo sapiens
taaatgcgttctctc

SEQ ID NO: 668969 - DNA, 15 bp, Homo sapiens
aaatgcgttctctct

SEQ ID NO: 668970 - DNA, 15 bp, Homo sapiens
aatgcgttctctctc

SEQ ID NO: 668971 - DNA, 15 bp, Homo sapiens
atgcgttctctctcg

SEQ ID NO: 668972 - DNA, 15 bp, Homo sapiens
tgcgttctctctcgt

SEQ ID NO: 668973 - DNA, 15 bp, Homo sapiens
gcgttctctctcgtg

SEQ ID NO: 668974 - DNA, 15 bp, Homo sapiens
cgttctctctcgtgc

SEQ ID NO: 668975 - DNA, 15 bp, Homo sapiens
gttctctctcgtgct

SEQ ID NO: 668976 - DNA, 15 bp, Homo sapiens
ttctctctcgtgctg

SEQ ID NO: 668977 - DNA, 15 bp, Homo sapiens
tctctctcgtgctga

SEQ ID NO: 668978 - DNA, 15 bp, Homo sapiens
ctctctcgtgctgag

SEQ ID NO: 668979 - DNA, 15 bp, Homo sapiens
tctctcgtgctgaga

SEQ ID NO: 668980 - DNA, 15 bp, Homo sapiens
ctctcgtgctgagaa

SEQ ID NO: 668981 - DNA, 15 bp, Homo sapiens
tctcgtgctgagaaa

SEQ ID NO: 668982 - DNA, 15 bp, Homo sapiens
ctcgtgctgagaaac

SEQ ID NO: 668983 - DNA, 15 bp, Homo sapiens
tcgtgctgagaaact

SEQ ID NO: 668984 - DNA, 15 bp, Homo sapiens
cgtgctgagaaactt

SEQ ID NO: 668985 - DNA, 15 bp, Homo sapiens
gtgctgagaaactta

SEQ ID NO: 668986 - DNA, 15 bp, Homo sapiens
tgctgagaaacttat

SEQ ID NO: 668987 - DNA, 15 bp, Homo sapiens
gctgagaaacttata

SEQ ID NO: 668988 - DNA, 15 bp, Homo sapiens
ctgagaaacttataa

SEQ ID NO: 668989 - DNA, 15 bp, Homo sapiens
tgagaaacttataag

SEQ ID NO: 668990 - DNA, 15 bp, Homo sapiens
gagaaacttataaga

SEQ ID NO: 668991 - DNA, 15 bp, Homo sapiens
agaaacttataagat

SEQ ID NO: 668992 - DNA, 15 bp, Homo sapiens
gaaacttataagatc

SEQ ID NO: 668993 - DNA, 15 bp, Homo sapiens
aaacttataagatcc

SEQ ID NO: 668994 - DNA, 15 bp, Homo sapiens
aacttataagatcct

SEQ ID NO: 668995 - DNA, 15 bp, Homo sapiens
acttataagatcctg

SEQ ID NO: 668996 - DNA, 15 bp, Homo sapiens
cttataagatcctgc

SEQ ID NO: 668997 - DNA, 15 bp, Homo sapiens
ttataagatcctgct

SEQ ID NO: 668998 - DNA, 15 bp, Homo sapiens
tataagatcctgctg

SEQ ID NO: 668999 - DNA, 15 bp, Homo sapiens
ataagatcctgctgg

SEQ ID NO: 669000 - DNA, 15 bp, Homo sapiens
taagatcctgctggc

SEQ ID NO: 669001 - DNA, 15 bp, Homo sapiens
aagatcctgctggcg

SEQ ID NO: 669002 - DNA, 15 bp, Homo sapiens
agatcctgctggcgc

SEQ ID NO: 669003 - DNA, 15 bp, Homo sapiens
gatcctgctggcgct

SEQ ID NO: 669004 - DNA, 15 bp, Homo sapiens
atcctgctggcgctc

SEQ ID NO: 669005 - DNA, 15 bp, Homo sapiens
tcctgctggcgctct

SEQ ID NO: 669006 - DNA, 15 bp, Homo sapiens
cctgctggcgctcta

SEQ ID NO: 669007 - DNA, 15 bp, Homo sapiens
ctgctggcgctctat

SEQ ID NO: 669008 - DNA, 15 bp, Homo sapiens
tgctggcgctctata

SEQ ID NO: 669009 - DNA, 15 bp, Homo sapiens
gctggcgctctatac

SEQ ID NO: 669010 - DNA, 15 bp, Homo sapiens
ctggcgctctatact

SEQ ID NO: 669011 - DNA, 15 bp, Homo sapiens
tggcgctctatactt

SEQ ID NO: 669012 - DNA, 15 bp, Homo sapiens
ggcgctctatacttt

SEQ ID NO: 669013 - DNA, 15 bp, Homo sapiens
gcgctctatacttta

SEQ ID NO: 669014 - DNA, 15 bp, Homo sapiens
cgctctatactttat

SEQ ID NO: 669015 - DNA, 15 bp, Homo sapiens
gctctatactttatt

SEQ ID NO: 669016 - DNA, 15 bp, Homo sapiens
ctctatactttattg

SEQ ID NO: 669017 - DNA, 15 bp, Homo sapiens
tctatactttattgg

SEQ ID NO: 669018 - DNA, 15 bp, Homo sapiens
ctatactttattggc

SEQ ID NO: 669019 - DNA, 15 bp, Homo sapiens
tatactttattggct

SEQ ID NO: 669020 - DNA, 15 bp, Homo sapiens
atactttattggcta

SEQ ID NO: 669021 - DNA, 15 bp, Homo sapiens
tactttattggctag

SEQ ID NO: 669022 - DNA, 15 bp, Homo sapiens
actttattggctagg

SEQ ID NO: 669023 - DNA, 15 bp, Homo sapiens
ctttattggctagga

SEQ ID NO: 669024 - DNA, 15 bp, Homo sapiens
tttattggctaggag

SEQ ID NO: 669025 - DNA, 15 bp, Homo sapiens
ttattggctaggaga

SEQ ID NO: 669026 - DNA, 15 bp, Homo sapiens
tattggctaggagaa

SEQ ID NO: 669027 - DNA, 15 bp, Homo sapiens
attggctaggagaag

SEQ ID NO: 669028 - DNA, 15 bp, Homo sapiens
ttggctaggagaagt

SEQ ID NO: 669029 - DNA, 15 bp, Homo sapiens
tggctaggagaagta

SEQ ID NO: 669030 - DNA, 15 bp, Homo sapiens
ggctaggagaagtaa

SEQ ID NO: 669031 - DNA, 15 bp, Homo sapiens
gctaggagaagtaaa

SEQ ID NO: 669032 - DNA, 15 bp, Homo sapiens
ctaggagaagtaaag

SEQ ID NO: 669033 - DNA, 15 bp, Homo sapiens
taggagaagtaaaga

SEQ ID NO: 669034 - DNA, 15 bp, Homo sapiens
aggagaagtaaagaa

SEQ ID NO: 669035 - DNA, 15 bp, Homo sapiens
ggagaagtaaagaaa

SEQ ID NO: 669036 - DNA, 15 bp, Homo sapiens
gagaagtaaagaaat

SEQ ID NO: 669037 - DNA, 15 bp, Homo sapiens
agaagtaaagaaatg

SEQ ID NO: 669038 - DNA, 15 bp, Homo sapiens
gaagtaaagaaatgt

SEQ ID NO: 669039 - DNA, 15 bp, Homo sapiens
aagtaaagaaatgtc

SEQ ID NO: 669040 - DNA, 15 bp, Homo sapiens
agtaaagaaatgtct

SEQ ID NO: 669041 - DNA, 15 bp, Homo sapiens
gtaaagaaatgtctg

SEQ ID NO: 669042 - DNA, 15 bp, Homo sapiens
taaagaaatgtctga

SEQ ID NO: 669043 - DNA, 15 bp, Homo sapiens
aaagaaatgtctgat

SEQ ID NO: 669044 - DNA, 15 bp, Homo sapiens
aagaaatgtctgatt

SEQ ID NO: 669045 - DNA, 15 bp, Homo sapiens
agaaatgtctgattc

SEQ ID NO: 669046 - DNA, 15 bp, Homo sapiens
gaaatgtctgattcg

SEQ ID NO: 669047 - DNA, 15 bp, Homo sapiens
aaatgtctgattcga

SEQ ID NO: 669048 - DNA, 15 bp, Homo sapiens
aatgtctgattcgag

SEQ ID NO: 669049 - DNA, 15 bp, Homo sapiens
atgtctgattcgagg

SEQ ID NO: 669050 - DNA, 15 bp, Homo sapiens
tgtctgattcgaggt

SEQ ID NO: 669051 - DNA, 15 bp, Homo sapiens
gtctgattcgaggtg

SEQ ID NO: 669052 - DNA, 15 bp, Homo sapiens
tctgattcgaggtga

SEQ ID NO: 669053 - DNA, 15 bp, Homo sapiens
ctgattcgaggtgaa

SEQ ID NO: 669054 - DNA, 15 bp, Homo sapiens
tgattcgaggtgaag

SEQ ID NO: 669055 - DNA, 15 bp, Homo sapiens
gattcgaggtgaaga

SEQ ID NO: 669056 - DNA, 15 bp, Homo sapiens
attcgaggtgaagat

SEQ ID NO: 669057 - DNA, 15 bp, Homo sapiens
ttcgaggtgaagatg

SEQ ID NO: 669058 - DNA, 15 bp, Homo sapiens
tcgaggtgaagatgc

SEQ ID NO: 669059 - DNA, 15 bp, Homo sapiens
cgaggtgaagatgct

SEQ ID NO: 669060 - DNA, 15 bp, Homo sapiens
gaggtgaagatgctc

SEQ ID NO: 669061 - DNA, 15 bp, Homo sapiens
aggtgaagatgctcc

SEQ ID NO: 669062 - DNA, 15 bp, Homo sapiens
ggtgaagatgctccc

SEQ ID NO: 669063 - DNA, 15 bp, Homo sapiens
gtgaagatgctcccc

SEQ ID NO: 669064 - DNA, 15 bp, Homo sapiens
tgaagatgctcccca

SEQ ID NO: 669065 - DNA, 15 bp, Homo sapiens
gaagatgctccccat

SEQ ID NO: 669066 - DNA, 15 bp, Homo sapiens
aagatgctccccatg

SEQ ID NO: 669067 - DNA, 15 bp, Homo sapiens
agatgctccccatgc

SEQ ID NO: 669068 - DNA, 15 bp, Homo sapiens
gatgctccccatgcc

SEQ ID NO: 669069 - DNA, 15 bp, Homo sapiens
atgctccccatgcct

SEQ ID NO: 669070 - DNA, 15 bp, Homo sapiens
tgctccccatgcctt

SEQ ID NO: 669071 - DNA, 15 bp, Homo sapiens
gctccccatgccttg

SEQ ID NO: 669072 - DNA, 15 bp, Homo sapiens
ctccccatgccttgc

SEQ ID NO: 669073 - DNA, 15 bp, Homo sapiens
tccccatgccttgca

SEQ ID NO: 669074 - DNA, 15 bp, Homo sapiens
ccccatgccttgcag

SEQ ID NO: 669075 - DNA, 15 bp, Homo sapiens
cccatgccttgcagc

SEQ ID NO: 669076 - DNA, 15 bp, Homo sapiens
ccatgccttgcagca

SEQ ID NO: 669077 - DNA, 15 bp, Homo sapiens
catgccttgcagcag

SEQ ID NO: 669078 - DNA, 15 bp, Homo sapiens
atgccttgcagcagg

SEQ ID NO: 669079 - DNA, 15 bp, Homo sapiens
tgccttgcagcaggg

SEQ ID NO: 669080 - DNA, 15 bp, Homo sapiens
gccttgcagcaggga

SEQ ID NO: 669081 - DNA, 15 bp, Homo sapiens
ccttgcagcagggaa

SEQ ID NO: 669082 - DNA, 15 bp, Homo sapiens
cttgcagcagggaaa

SEQ ID NO: 669083 - DNA, 15 bp, Homo sapiens
ttgcagcagggaaat

SEQ ID NO: 669084 - DNA, 15 bp, Homo sapiens
tgcagcagggaaatt

SEQ ID NO: 669085 - DNA, 15 bp, Homo sapiens
gcagcagggaaattt

SEQ ID NO: 669086 - DNA, 15 bp, Homo sapiens
cagcagggaaattta

SEQ ID NO: 669087 - DNA, 15 bp, Homo sapiens
agcagggaaatttaa

SEQ ID NO: 669088 - DNA, 15 bp, Homo sapiens
gcagggaaatttaaa

SEQ ID NO: 669089 - DNA, 15 bp, Homo sapiens
cagggaaatttaaat

SEQ ID NO: 669090 - DNA, 15 bp, Homo sapiens
agggaaatttaaatt

SEQ ID NO: 669091 - DNA, 15 bp, Homo sapiens
gggaaatttaaattg

SEQ ID NO: 669092 - DNA, 15 bp, Homo sapiens
ggaaatttaaattgc

SEQ ID NO: 669093 - DNA, 15 bp, Homo sapiens
gaaatttaaattgcc

SEQ ID NO: 669094 - DNA, 15 bp, Homo sapiens
aaatttaaattgcct

SEQ ID NO: 669095 - DNA, 15 bp, Homo sapiens
aatttaaattgcctc

SEQ ID NO: 669096 - DNA, 15 bp, Homo sapiens
atttaaattgcctct

SEQ ID NO: 669097 - DNA, 15 bp, Homo sapiens
tttaaattgcctctg

SEQ ID NO: 669098 - DNA, 15 bp, Homo sapiens
ttaaattgcctctgc

SEQ ID NO: 669099 - DNA, 15 bp, Homo sapiens
taaattgcctctgct

SEQ ID NO: 669100 - DNA, 15 bp, Homo sapiens
aaattgcctctgctt

SEQ ID NO: 669101 - DNA, 15 bp, Homo sapiens
aattgcctctgctta

SEQ ID NO: 669102 - DNA, 15 bp, Homo sapiens
attgcctctgcttag

SEQ ID NO: 669103 - DNA, 15 bp, Homo sapiens
ttgcctctgcttaga

SEQ ID NO: 669104 - DNA, 15 bp, Homo sapiens
tgcctctgcttagag

SEQ ID NO: 669105 - DNA, 15 bp, Homo sapiens
gcctctgcttagagc

SEQ ID NO: 669106 - DNA, 15 bp, Homo sapiens
cctctgcttagagcg

SEQ ID NO: 669107 - DNA, 15 bp, Homo sapiens
ctctgcttagagcgt

SEQ ID NO: 669108 - DNA, 15 bp, Homo sapiens
tctgcttagagcgtt

SEQ ID NO: 669109 - DNA, 15 bp, Homo sapiens
ctgcttagagcgttt

SEQ ID NO: 669110 - DNA, 15 bp, Homo sapiens
tgcttagagcgtttc

SEQ ID NO: 669111 - DNA, 15 bp, Homo sapiens
gcttagagcgtttcc

SEQ ID NO: 669112 - DNA, 15 bp, Homo sapiens
cttagagcgtttcca

SEQ ID NO: 669113 - DNA, 15 bp, Homo sapiens
ttagagcgtttccag

SEQ ID NO: 669114 - DNA, 15 bp, Homo sapiens
tagagcgtttccaga

SEQ ID NO: 669115 - DNA, 15 bp, Homo sapiens
agagcgtttccagac

SEQ ID NO: 669116 - DNA, 15 bp, Homo sapiens
gagcgtttccagacc

SEQ ID NO: 669117 - DNA, 15 bp, Homo sapiens
agcgtttccagacct

SEQ ID NO: 669118 - DNA, 15 bp, Homo sapiens
gcgtttccagacctg

SEQ ID NO: 669119 - DNA, 15 bp, Homo sapiens
cgtttccagacctga

SEQ ID NO: 669120 - DNA, 15 bp, Homo sapiens
gtttccagacctgaa

SEQ ID NO: 669121 - DNA, 15 bp, Homo sapiens
tttccagacctgaaa

SEQ ID NO: 669122 - DNA, 15 bp, Homo sapiens
ttccagacctgaaag

SEQ ID NO: 669123 - DNA, 15 bp, Homo sapiens
tccagacctgaaaga

SEQ ID NO: 669124 - DNA, 15 bp, Homo sapiens
ccagacctgaaagac

SEQ ID NO: 669125 - DNA, 15 bp, Homo sapiens
cagacctgaaagacc

SEQ ID NO: 669126 - DNA, 15 bp, Homo sapiens
agacctgaaagacca

SEQ ID NO: 669127 - DNA, 15 bp, Homo sapiens
gacctgaaagaccag

SEQ ID NO: 669128 - DNA, 15 bp, Homo sapiens
acctgaaagaccagt

SEQ ID NO: 669129 - DNA, 15 bp, Homo sapiens
cctgaaagaccagtg

SEQ ID NO: 669130 - DNA, 15 bp, Homo sapiens
ctgaaagaccagtgg

SEQ ID NO: 669131 - DNA, 15 bp, Homo sapiens
tgaaagaccagtggt

SEQ ID NO: 669132 - DNA, 15 bp, Homo sapiens
gaaagaccagtggtt

SEQ ID NO: 669133 - DNA, 15 bp, Homo sapiens
aaagaccagtggttt

SEQ ID NO: 669134 - DNA, 15 bp, Homo sapiens
aagaccagtggttta

SEQ ID NO: 669135 - DNA, 15 bp, Homo sapiens
agaccagtggtttag

SEQ ID NO: 669136 - DNA, 15 bp, Homo sapiens
gaccagtggtttagg

SEQ ID NO: 669137 - DNA, 15 bp, Homo sapiens
accagtggtttaggg

SEQ ID NO: 669138 - DNA, 15 bp, Homo sapiens
ccagtggtttaggga

SEQ ID NO: 669139 - DNA, 15 bp, Homo sapiens
cagtggtttagggaa

SEQ ID NO: 669140 - DNA, 15 bp, Homo sapiens
agtggtttagggaag

SEQ ID NO: 669141 - DNA, 15 bp, Homo sapiens
gtggtttagggaagc

SEQ ID NO: 669142 - DNA, 15 bp, Homo sapiens
tggtttagggaagca

SEQ ID NO: 669143 - DNA, 15 bp, Homo sapiens
ggtttagggaagcac

SEQ ID NO: 669144 - DNA, 15 bp, Homo sapiens
gtttagggaagcact

SEQ ID NO: 669145 - DNA, 15 bp, Homo sapiens
tttagggaagcactc

SEQ ID NO: 669146 - DNA, 15 bp, Homo sapiens
ttagggaagcactct

SEQ ID NO: 669147 - DNA, 15 bp, Homo sapiens
tagggaagcactcta

SEQ ID NO: 669148 - DNA, 15 bp, Homo sapiens
agggaagcactctac

SEQ ID NO: 669149 - DNA, 15 bp, Homo sapiens
gggaagcactctaca

SEQ ID NO: 669150 - DNA, 15 bp, Homo sapiens
ggaagcactctacat

SEQ ID NO: 669151 - DNA, 15 bp, Homo sapiens
gaagcactctacatg

SEQ ID NO: 669152 - DNA, 15 bp, Homo sapiens
aagcactctacatga

SEQ ID NO: 669153 - DNA, 15 bp, Homo sapiens
agcactctacatgag

SEQ ID NO: 669154 - DNA, 15 bp, Homo sapiens
gcactctacatgagg

SEQ ID NO: 669155 - DNA, 15 bp, Homo sapiens
cactctacatgaggg

SEQ ID NO: 669156 - DNA, 15 bp, Homo sapiens
actctacatgaggga

SEQ ID NO: 669157 - DNA, 15 bp, Homo sapiens
ctctacatgagggaa

SEQ ID NO: 669158 - DNA, 15 bp, Homo sapiens
tctacatgagggaaa

SEQ ID NO: 669159 - DNA, 15 bp, Homo sapiens
ctacatgagggaaac

SEQ ID NO: 669160 - DNA, 15 bp, Homo sapiens
tacatgagggaaacc

SEQ ID NO: 669161 - DNA, 15 bp, Homo sapiens
acatgagggaaacct

SEQ ID NO: 669162 - DNA, 15 bp, Homo sapiens
catgagggaaacctg

SEQ ID NO: 669163 - DNA, 15 bp, Homo sapiens
atgagggaaacctgc

SEQ ID NO: 669164 - DNA, 15 bp, Homo sapiens
tgagggaaacctgca

SEQ ID NO: 669165 - DNA, 15 bp, Homo sapiens
gagggaaacctgcat

SEQ ID NO: 669166 - DNA, 15 bp, Homo sapiens
agggaaacctgcatt

SEQ ID NO: 669167 - DNA, 15 bp, Homo sapiens
gggaaacctgcatta

SEQ ID NO: 669168 - DNA, 15 bp, Homo sapiens
ggaaacctgcattag

SEQ ID NO: 669169 - DNA, 15 bp, Homo sapiens
gaaacctgcattaga

SEQ ID NO: 669170 - DNA, 15 bp, Homo sapiens
aaacctgcattagaa

SEQ ID NO: 669171 - DNA, 15 bp, Homo sapiens
aacctgcattagaag

SEQ ID NO: 669172 - DNA, 15 bp, Homo sapiens
acctgcattagaagg

SEQ ID NO: 669173 - DNA, 15 bp, Homo sapiens
cctgcattagaagga

SEQ ID NO: 669174 - DNA, 15 bp, Homo sapiens
ctgcattagaaggag

SEQ ID NO: 669175 - DNA, 15 bp, Homo sapiens
tgcattagaaggagc

SEQ ID NO: 669176 - DNA, 15 bp, Homo sapiens
gcattagaaggagct

SEQ ID NO: 669177 - DNA, 15 bp, Homo sapiens
cattagaaggagctt

SEQ ID NO: 669178 - DNA, 15 bp, Homo sapiens
attagaaggagcttc

SEQ ID NO: 669179 - DNA, 15 bp, Homo sapiens
ttagaaggagcttct

SEQ ID NO: 669180 - DNA, 15 bp, Homo sapiens
tagaaggagcttctt

SEQ ID NO: 669181 - DNA, 15 bp, Homo sapiens
agaaggagcttctta

SEQ ID NO: 669182 - DNA, 15 bp, Homo sapiens
gaaggagcttcttaa

SEQ ID NO: 669183 - DNA, 15 bp, Homo sapiens
aaggagcttcttaat

SEQ ID NO: 669184 - DNA, 15 bp, Homo sapiens
aggagcttcttaatc

SEQ ID NO: 669185 - DNA, 15 bp, Homo sapiens
ggagcttcttaatcc

SEQ ID NO: 669186 - DNA, 15 bp, Homo sapiens
gagcttcttaatccc

SEQ ID NO: 669187 - DNA, 15 bp, Homo sapiens
agcttcttaatccct

SEQ ID NO: 669188 - DNA, 15 bp, Homo sapiens
gcttcttaatccctg

SEQ ID NO: 669189 - DNA, 15 bp, Homo sapiens
cttcttaatccctgg

SEQ ID NO: 669190 - DNA, 15 bp, Homo sapiens
ttcttaatccctggg

SEQ ID NO: 669191 - DNA, 15 bp, Homo sapiens
tcttaatccctggga

SEQ ID NO: 669192 - DNA, 15 bp, Homo sapiens
cttaatccctgggat

SEQ ID NO: 669193 - DNA, 15 bp, Homo sapiens
ttaatccctgggatc

SEQ ID NO: 669194 - DNA, 15 bp, Homo sapiens
taatccctgggatct

SEQ ID NO: 669195 - DNA, 15 bp, Homo sapiens
aatccctgggatctt

SEQ ID NO: 669196 - DNA, 15 bp, Homo sapiens
atccctgggatcttt

SEQ ID NO: 669197 - DNA, 15 bp, Homo sapiens
tccctgggatctttc

SEQ ID NO: 669198 - DNA, 15 bp, Homo sapiens
ccctgggatctttcc

SEQ ID NO: 669199 - DNA, 15 bp, Homo sapiens
cctgggatctttcca

SEQ ID NO: 669200 - DNA, 15 bp, Homo sapiens
ctgggatctttccaa

SEQ ID NO: 669201 - DNA, 15 bp, Homo sapiens
tgggatctttccaag

SEQ ID NO: 669202 - DNA, 15 bp, Homo sapiens
gggatctttccaagc

SEQ ID NO: 669203 - DNA, 15 bp, Homo sapiens
ggatctttccaagct

SEQ ID NO: 669204 - DNA, 15 bp, Homo sapiens
gatctttccaagcta

SEQ ID NO: 669205 - DNA, 15 bp, Homo sapiens
atctttccaagctaa

SEQ ID NO: 669206 - DNA, 15 bp, Homo sapiens
tctttccaagctaaa

SEQ ID NO: 669207 - DNA, 15 bp, Homo sapiens
ctttccaagctaaac

SEQ ID NO: 669208 - DNA, 15 bp, Homo sapiens
tttccaagctaaact

SEQ ID NO: 669209 - DNA, 15 bp, Homo sapiens
ttccaagctaaactg

SEQ ID NO: 669210 - DNA, 15 bp, Homo sapiens
tccaagctaaactgg

SEQ ID NO: 669211 - DNA, 15 bp, Homo sapiens
ccaagctaaactgga

SEQ ID NO: 669212 - DNA, 15 bp, Homo sapiens
caagctaaactggat

SEQ ID NO: 669213 - DNA, 15 bp, Homo sapiens
aagctaaactggatg

SEQ ID NO: 669214 - DNA, 15 bp, Homo sapiens
agctaaactggatgt

SEQ ID NO: 669215 - DNA, 15 bp, Homo sapiens
gctaaactggatgtc

SEQ ID NO: 669216 - DNA, 15 bp, Homo sapiens
ctaaactggatgtct

SEQ ID NO: 669217 - DNA, 15 bp, Homo sapiens
taaactggatgtcta

SEQ ID NO: 669218 - DNA, 15 bp, Homo sapiens
aaactggatgtctac

SEQ ID NO: 669219 - DNA, 15 bp, Homo sapiens
aactggatgtctaca

SEQ ID NO: 669220 - DNA, 15 bp, Homo sapiens
actggatgtctacag

SEQ ID NO: 669221 - DNA, 15 bp, Homo sapiens
ctggatgtctacagt

SEQ ID NO: 669222 - DNA, 15 bp, Homo sapiens
tggatgtctacagtg

SEQ ID NO: 669223 - DNA, 15 bp, Homo sapiens
ggatgtctacagtgg

SEQ ID NO: 669224 - DNA, 15 bp, Homo sapiens
gatgtctacagtggg

SEQ ID NO: 669225 - DNA, 15 bp, Homo sapiens
atgtctacagtgggg

SEQ ID NO: 669226 - DNA, 15 bp, Homo sapiens
tgtctacagtgggga

SEQ ID NO: 669227 - DNA, 15 bp, Homo sapiens
gtctacagtggggag

SEQ ID NO: 669228 - DNA, 15 bp, Homo sapiens
tctacagtggggaga

SEQ ID NO: 669229 - DNA, 15 bp, Homo sapiens
ctacagtggggagaa

SEQ ID NO: 669230 - DNA, 15 bp, Homo sapiens
tacagtggggagaaa

SEQ ID NO: 669231 - DNA, 15 bp, Homo sapiens
acagtggggagaaag

SEQ ID NO: 669232 - DNA, 15 bp, Homo sapiens
cagtggggagaaaga

SEQ ID NO: 669233 - DNA, 15 bp, Homo sapiens
agtggggagaaagaa

SEQ ID NO: 669234 - DNA, 15 bp, Homo sapiens
gtggggagaaagaaa

SEQ ID NO: 669235 - DNA, 15 bp, Homo sapiens
tggggagaaagaaaa

SEQ ID NO: 669236 - DNA, 15 bp, Homo sapiens
ggggagaaagaaaag

SEQ ID NO: 669237 - DNA, 15 bp, Homo sapiens
gggagaaagaaaagc

SEQ ID NO: 669238 - DNA, 15 bp, Homo sapiens
ggagaaagaaaagca

SEQ ID NO: 669239 - DNA, 15 bp, Homo sapiens
gagaaagaaaagcag

SEQ ID NO: 669240 - DNA, 15 bp, Homo sapiens
agaaagaaaagcaga

SEQ ID NO: 669241 - DNA, 15 bp, Homo sapiens
gaaagaaaagcagag

SEQ ID NO: 669242 - DNA, 15 bp, Homo sapiens
aaagaaaagcagaga

SEQ ID NO: 669243 - DNA, 15 bp, Homo sapiens
aagaaaagcagagaa

SEQ ID NO: 669244 - DNA, 15 bp, Homo sapiens
agaaaagcagagaac

SEQ ID NO: 669245 - DNA, 15 bp, Homo sapiens
gaaaagcagagaaca

SEQ ID NO: 669246 - DNA, 15 bp, Homo sapiens
aaaagcagagaacag

SEQ ID NO: 669247 - DNA, 15 bp, Homo sapiens
aaagcagagaacagg

SEQ ID NO: 669248 - DNA, 15 bp, Homo sapiens
aagcagagaacagga

SEQ ID NO: 669249 - DNA, 15 bp, Homo sapiens
agcagagaacaggac

SEQ ID NO: 669250 - DNA, 15 bp, Homo sapiens
gcagagaacaggaca

SEQ ID NO: 669251 - DNA, 15 bp, Homo sapiens
cagagaacaggacat

SEQ ID NO: 669252 - DNA, 15 bp, Homo sapiens
agagaacaggacatg

SEQ ID NO: 669253 - DNA, 15 bp, Homo sapiens
gagaacaggacatga

SEQ ID NO: 669254 - DNA, 15 bp, Homo sapiens
agaacaggacatgag

SEQ ID NO: 669255 - DNA, 15 bp, Homo sapiens
gaacaggacatgagg

SEQ ID NO: 669256 - DNA, 15 bp, Homo sapiens
aacaggacatgaggg

SEQ ID NO: 669257 - DNA, 15 bp, Homo sapiens
acaggacatgagggg

SEQ ID NO: 669258 - DNA, 15 bp, Homo sapiens
caggacatgaggggg

SEQ ID NO: 669259 - DNA, 15 bp, Homo sapiens
aggacatgagggggg

SEQ ID NO: 669260 - DNA, 15 bp, Homo sapiens
ggacatgaggggggc

SEQ ID NO: 669261 - DNA, 15 bp, Homo sapiens
gacatgaggggggct

SEQ ID NO: 669262 - DNA, 15 bp, Homo sapiens
acatgaggggggctc

SEQ ID NO: 669263 - DNA, 15 bp, Homo sapiens
catgaggggggctca

SEQ ID NO: 669264 - DNA, 15 bp, Homo sapiens
atgaggggggctcaa

SEQ ID NO: 669265 - DNA, 15 bp, Homo sapiens
tgaggggggctcaag

SEQ ID NO: 669266 - DNA, 15 bp, Homo sapiens
gaggggggctcaagg

SEQ ID NO: 669267 - DNA, 15 bp, Homo sapiens
aggggggctcaaggc

SEQ ID NO: 669268 - DNA, 15 bp, Homo sapiens
ggggggctcaaggcc

SEQ ID NO: 669269 - DNA, 15 bp, Homo sapiens
gggggctcaaggccc

SEQ ID NO: 669270 - DNA, 15 bp, Homo sapiens
ggggctcaaggcccc

SEQ ID NO: 669271 - DNA, 15 bp, Homo sapiens
gggctcaaggccccg

SEQ ID NO: 669272 - DNA, 15 bp, Homo sapiens
ggctcaaggccccga

SEQ ID NO: 669273 - DNA, 15 bp, Homo sapiens
gctcaaggccccgaa

SEQ ID NO: 669274 - DNA, 15 bp, Homo sapiens
ctcaaggccccgaag

SEQ ID NO: 669275 - DNA, 15 bp, Homo sapiens
tcaaggccccgaagg

SEQ ID NO: 669276 - DNA, 15 bp, Homo sapiens
caaggccccgaaggg

SEQ ID NO: 669277 - DNA, 15 bp, Homo sapiens
aaggccccgaagggt

SEQ ID NO: 669278 - DNA, 15 bp, Homo sapiens
aggccccgaagggtt

SEQ ID NO: 669279 - DNA, 15 bp, Homo sapiens
ggccccgaagggttg

SEQ ID NO: 669280 - DNA, 15 bp, Homo sapiens
gccccgaagggttga

SEQ ID NO: 669281 - DNA, 15 bp, Homo sapiens
ccccgaagggttgac

SEQ ID NO: 669282 - DNA, 15 bp, Homo sapiens
cccgaagggttgaca

SEQ ID NO: 669283 - DNA, 15 bp, Homo sapiens
ccgaagggttgacat

SEQ ID NO: 669284 - DNA, 15 bp, Homo sapiens
cgaagggttgacata

SEQ ID NO: 669285 - DNA, 15 bp, Homo sapiens
gaagggttgacatag

SEQ ID NO: 669286 - DNA, 15 bp, Homo sapiens
aagggttgacatagg

SEQ ID NO: 669287 - DNA, 15 bp, Homo sapiens
agggttgacataggt

SEQ ID NO: 669288 - DNA, 15 bp, Homo sapiens
gggttgacataggtg

SEQ ID NO: 669289 - DNA, 15 bp, Homo sapiens
ggttgacataggtgt

SEQ ID NO: 669290 - DNA, 15 bp, Homo sapiens
gttgacataggtgtc

SEQ ID NO: 669291 - DNA, 15 bp, Homo sapiens
ttgacataggtgtcc

SEQ ID NO: 669292 - DNA, 15 bp, Homo sapiens
tgacataggtgtccc

SEQ ID NO: 669293 - DNA, 15 bp, Homo sapiens
gacataggtgtccct

SEQ ID NO: 669294 - DNA, 15 bp, Homo sapiens
acataggtgtccctt

SEQ ID NO: 669295 - DNA, 15 bp, Homo sapiens
cataggtgtccctta

SEQ ID NO: 669296 - DNA, 15 bp, Homo sapiens
ataggtgtcccttaa

SEQ ID NO: 669297 - DNA, 15 bp, Homo sapiens
taggtgtcccttaaa

SEQ ID NO: 669298 - DNA, 15 bp, Homo sapiens
aggtgtcccttaaag

SEQ ID NO: 669299 - DNA, 15 bp, Homo sapiens
ggtgtcccttaaagc

SEQ ID NO: 669300 - DNA, 15 bp, Homo sapiens
gtgtcccttaaagcc

SEQ ID NO: 669301 - DNA, 15 bp, Homo sapiens
tgtcccttaaagccg

SEQ ID NO: 669302 - DNA, 15 bp, Homo sapiens
gtcccttaaagccga

SEQ ID NO: 669303 - DNA, 15 bp, Homo sapiens
tcccttaaagccgaa

SEQ ID NO: 669304 - DNA, 15 bp, Homo sapiens
cccttaaagccgaat

SEQ ID NO: 669305 - DNA, 15 bp, Homo sapiens
ccttaaagccgaatg

SEQ ID NO: 669306 - DNA, 15 bp, Homo sapiens
cttaaagccgaatgt

SEQ ID NO: 669307 - DNA, 15 bp, Homo sapiens
ttaaagccgaatgta

SEQ ID NO: 669308 - DNA, 15 bp, Homo sapiens
taaagccgaatgtag

SEQ ID NO: 669309 - DNA, 15 bp, Homo sapiens
aaagccgaatgtagc

SEQ ID NO: 669310 - DNA, 15 bp, Homo sapiens
aagccgaatgtagct

SEQ ID NO: 669311 - DNA, 15 bp, Homo sapiens
agccgaatgtagctc

SEQ ID NO: 669312 - DNA, 15 bp, Homo sapiens
gccgaatgtagctcc

SEQ ID NO: 669313 - DNA, 15 bp, Homo sapiens
ccgaatgtagctccg

SEQ ID NO: 669314 - DNA, 15 bp, Homo sapiens
cgaatgtagctccgc

SEQ ID NO: 669315 - DNA, 15 bp, Homo sapiens
gaatgtagctccgca

SEQ ID NO: 669316 - DNA, 15 bp, Homo sapiens
aatgtagctccgcag

SEQ ID NO: 669317 - DNA, 15 bp, Homo sapiens
atgtagctccgcaga

SEQ ID NO: 669318 - DNA, 15 bp, Homo sapiens
tgtagctccgcagaa

SEQ ID NO: 669319 - DNA, 15 bp, Homo sapiens
gtagctccgcagaaa

SEQ ID NO: 669320 - DNA, 15 bp, Homo sapiens
tagctccgcagaaag

SEQ ID NO: 669321 - DNA, 15 bp, Homo sapiens
agctccgcagaaaga

SEQ ID NO: 669322 - DNA, 15 bp, Homo sapiens
gctccgcagaaagaa

SEQ ID NO: 669323 - DNA, 15 bp, Homo sapiens
ctccgcagaaagaag

SEQ ID NO: 669324 - DNA, 15 bp, Homo sapiens
tccgcagaaagaaga

SEQ ID NO: 669325 - DNA, 15 bp, Homo sapiens
ccgcagaaagaagac

SEQ ID NO: 669326 - DNA, 15 bp, Homo sapiens
cgcagaaagaagacc

SEQ ID NO: 669327 - DNA, 15 bp, Homo sapiens
gcagaaagaagacca

SEQ ID NO: 669328 - DNA, 15 bp, Homo sapiens
cagaaagaagaccag

SEQ ID NO: 669329 - DNA, 15 bp, Homo sapiens
agaaagaagaccagg

SEQ ID NO: 669330 - DNA, 15 bp, Homo sapiens
gaaagaagaccagga

SEQ ID NO: 669331 - DNA, 15 bp, Homo sapiens
aaagaagaccaggac

SEQ ID NO: 669332 - DNA, 15 bp, Homo sapiens
aagaagaccaggact

SEQ ID NO: 669333 - DNA, 15 bp, Homo sapiens
agaagaccaggactg

SEQ ID NO: 669334 - DNA, 15 bp, Homo sapiens
gaagaccaggactga

SEQ ID NO: 669335 - DNA, 15 bp, Homo sapiens
aagaccaggactgag

SEQ ID NO: 669336 - DNA, 15 bp, Homo sapiens
agaccaggactgagt

SEQ ID NO: 669337 - DNA, 15 bp, Homo sapiens
gaccaggactgagtc

SEQ ID NO: 669338 - DNA, 15 bp, Homo sapiens
accaggactgagtca

SEQ ID NO: 669339 - DNA, 15 bp, Homo sapiens
ccaggactgagtcaa

SEQ ID NO: 669340 - DNA, 15 bp, Homo sapiens
caggactgagtcaag

SEQ ID NO: 669341 - DNA, 15 bp, Homo sapiens
aggactgagtcaagc

SEQ ID NO: 669342 - DNA, 15 bp, Homo sapiens
ggactgagtcaagct

SEQ ID NO: 669343 - DNA, 15 bp, Homo sapiens
gactgagtcaagctt

SEQ ID NO: 669344 - DNA, 15 bp, Homo sapiens
actgagtcaagcttc

SEQ ID NO: 669345 - DNA, 15 bp, Homo sapiens
ctgagtcaagcttct

SEQ ID NO: 669346 - DNA, 15 bp, Homo sapiens
tgagtcaagcttctg

SEQ ID NO: 669347 - DNA, 15 bp, Homo sapiens
gagtcaagcttctgc

SEQ ID NO: 669348 - DNA, 15 bp, Homo sapiens
agtcaagcttctgct

SEQ ID NO: 669349 - DNA, 15 bp, Homo sapiens
gtcaagcttctgctt

SEQ ID NO: 669350 - DNA, 15 bp, Homo sapiens
tcaagcttctgcttt

SEQ ID NO: 669351 - DNA, 15 bp, Homo sapiens
caagcttctgctttc

SEQ ID NO: 669352 - DNA, 15 bp, Homo sapiens
aagcttctgctttcc

SEQ ID NO: 669353 - DNA, 15 bp, Homo sapiens
agcttctgctttccc

SEQ ID NO: 669354 - DNA, 15 bp, Homo sapiens
gcttctgctttccct

SEQ ID NO: 669355 - DNA, 15 bp, Homo sapiens
cttctgctttccctt

SEQ ID NO: 669356 - DNA, 15 bp, Homo sapiens
ttctgctttcccttc

SEQ ID NO: 669357 - DNA, 15 bp, Homo sapiens
tctgctttcccttca

SEQ ID NO: 669358 - DNA, 15 bp, Homo sapiens
ctgctttcccttcaa

SEQ ID NO: 669359 - DNA, 15 bp, Homo sapiens
tgctttcccttcaaa

SEQ ID NO: 669360 - DNA, 15 bp, Homo sapiens
gctttcccttcaaaa

SEQ ID NO: 669361 - DNA, 15 bp, Homo sapiens
ctttcccttcaaaat

SEQ ID NO: 669362 - DNA, 15 bp, Homo sapiens
tttcccttcaaaatc

SEQ ID NO: 669363 - DNA, 15 bp, Homo sapiens
ttcccttcaaaatcg

SEQ ID NO: 669364 - DNA, 15 bp, Homo sapiens
tcccttcaaaatcgg

SEQ ID NO: 669365 - DNA, 15 bp, Homo sapiens
cccttcaaaatcggc

SEQ ID NO: 669366 - DNA, 15 bp, Homo sapiens
ccttcaaaatcggcc

SEQ ID NO: 669367 - DNA, 15 bp, Homo sapiens
cttcaaaatcggcca

SEQ ID NO: 669368 - DNA, 15 bp, Homo sapiens
ttcaaaatcggccag

SEQ ID NO: 669369 - DNA, 15 bp, Homo sapiens
tcaaaatcggccaga

SEQ ID NO: 669370 - DNA, 15 bp, Homo sapiens
caaaatcggccagat

SEQ ID NO: 669371 - DNA, 15 bp, Homo sapiens
aaaatcggccagatt

SEQ ID NO: 669372 - DNA, 15 bp, Homo sapiens
aaatcggccagattt

SEQ ID NO: 669373 - DNA, 15 bp, Homo sapiens
aatcggccagatttt

SEQ ID NO: 669374 - DNA, 15 bp, Homo sapiens
atcggccagattttt

SEQ ID NO: 669375 - DNA, 15 bp, Homo sapiens
tcggccagatttttt

SEQ ID NO: 669376 - DNA, 15 bp, Homo sapiens
cggccagatttttta

SEQ ID NO: 669377 - DNA, 15 bp, Homo sapiens
ggccagattttttaa

SEQ ID NO: 669378 - DNA, 15 bp, Homo sapiens
gccagattttttaaa

SEQ ID NO: 669379 - DNA, 15 bp, Homo sapiens
ccagattttttaaat

SEQ ID NO: 669380 - DNA, 15 bp, Homo sapiens
cagattttttaaata

SEQ ID NO: 669381 - DNA, 15 bp, Homo sapiens
agattttttaaataa

SEQ ID NO: 669382 - DNA, 15 bp, Homo sapiens
gattttttaaataac

SEQ ID NO: 669383 - DNA, 15 bp, Homo sapiens
attttttaaataact

SEQ ID NO: 669384 - DNA, 15 bp, Homo sapiens
ttttttaaataactt

SEQ ID NO: 669385 - DNA, 15 bp, Homo sapiens
tttttaaataacttg

SEQ ID NO: 669386 - DNA, 15 bp, Homo sapiens
ttttaaataacttga

SEQ ID NO: 669387 - DNA, 15 bp, Homo sapiens
tttaaataacttgac

SEQ ID NO: 669388 - DNA, 15 bp, Homo sapiens
ttaaataacttgact

SEQ ID NO: 669389 - DNA, 15 bp, Homo sapiens
taaataacttgactc

SEQ ID NO: 669390 - DNA, 15 bp, Homo sapiens
aaataacttgactct

SEQ ID NO: 669391 - DNA, 15 bp, Homo sapiens
aataacttgactctg

SEQ ID NO: 669392 - DNA, 15 bp, Homo sapiens
ataacttgactctga

SEQ ID NO: 669393 - DNA, 15 bp, Homo sapiens
taacttgactctgag

SEQ ID NO: 669394 - DNA, 15 bp, Homo sapiens
aacttgactctgagg

SEQ ID NO: 669395 - DNA, 15 bp, Homo sapiens
acttgactctgagga

SEQ ID NO: 669396 - DNA, 15 bp, Homo sapiens
cttgactctgaggag

SEQ ID NO: 669397 - DNA, 15 bp, Homo sapiens
ttgactctgaggagg

SEQ ID NO: 669398 - DNA, 15 bp, Homo sapiens
tgactctgaggagga

SEQ ID NO: 669399 - DNA, 15 bp, Homo sapiens
gactctgaggaggag

SEQ ID NO: 669400 - DNA, 15 bp, Homo sapiens
actctgaggaggagg

SEQ ID NO: 669401 - DNA, 15 bp, Homo sapiens
ctctgaggaggagga

SEQ ID NO: 669402 - DNA, 15 bp, Homo sapiens
tctgaggaggaggac

SEQ ID NO: 669403 - DNA, 15 bp, Homo sapiens
ctgaggaggaggacc

SEQ ID NO: 669404 - DNA, 15 bp, Homo sapiens
tgaggaggaggacct

SEQ ID NO: 669405 - DNA, 15 bp, Homo sapiens
gaggaggaggacctg

SEQ ID NO: 669406 - DNA, 15 bp, Homo sapiens
aggaggaggacctga

SEQ ID NO: 669407 - DNA, 15 bp, Homo sapiens
ggaggaggacctgat

SEQ ID NO: 669408 - DNA, 15 bp, Homo sapiens
gaggaggacctgatt

SEQ ID NO: 669409 - DNA, 15 bp, Homo sapiens
aggaggacctgattt

SEQ ID NO: 669410 - DNA, 15 bp, Homo sapiens
ggaggacctgattta

SEQ ID NO: 669411 - DNA, 15 bp, Homo sapiens
gaggacctgatttaa

SEQ ID NO: 669412 - DNA, 15 bp, Homo sapiens
aggacctgatttaag

SEQ ID NO: 669413 - DNA, 15 bp, Homo sapiens
ggacctgatttaagt

SEQ ID NO: 669414 - DNA, 15 bp, Homo sapiens
gacctgatttaagtg

SEQ ID NO: 669415 - DNA, 15 bp, Homo sapiens
acctgatttaagtga

SEQ ID NO: 669416 - DNA, 15 bp, Homo sapiens
cctgatttaagtgat

SEQ ID NO: 669417 - DNA, 15 bp, Homo sapiens
ctgatttaagtgatg

SEQ ID NO: 669418 - DNA, 15 bp, Homo sapiens
tgatttaagtgatgg

SEQ ID NO: 669419 - DNA, 15 bp, Homo sapiens
gatttaagtgatggt

SEQ ID NO: 669420 - DNA, 15 bp, Homo sapiens
atttaagtgatggtc

SEQ ID NO: 669421 - DNA, 15 bp, Homo sapiens
tttaagtgatggtcc

SEQ ID NO: 669422 - DNA, 15 bp, Homo sapiens
ttaagtgatggtccc

SEQ ID NO: 669423 - DNA, 15 bp, Homo sapiens
taagtgatggtccca

SEQ ID NO: 669424 - DNA, 15 bp, Homo sapiens
aagtgatggtcccat

SEQ ID NO: 669425 - DNA, 15 bp, Homo sapiens
agtgatggtcccatc

SEQ ID NO: 669426 - DNA, 15 bp, Homo sapiens
gtgatggtcccatca

SEQ ID NO: 669427 - DNA, 15 bp, Homo sapiens
tgatggtcccatcac

SEQ ID NO: 669428 - DNA, 15 bp, Homo sapiens
gatggtcccatcact

SEQ ID NO: 669429 - DNA, 15 bp, Homo sapiens
atggtcccatcactg

SEQ ID NO: 669430 - DNA, 15 bp, Homo sapiens
tggtcccatcactgt

SEQ ID NO: 669431 - DNA, 15 bp, Homo sapiens
ggtcccatcactgtt

SEQ ID NO: 669432 - DNA, 15 bp, Homo sapiens
gtcccatcactgttg

SEQ ID NO: 669433 - DNA, 15 bp, Homo sapiens
tcccatcactgttga

SEQ ID NO: 669434 - DNA, 15 bp, Homo sapiens
cccatcactgttgaa

SEQ ID NO: 669435 - DNA, 15 bp, Homo sapiens
ccatcactgttgaat

SEQ ID NO: 669436 - DNA, 15 bp, Homo sapiens
catcactgttgaatc

SEQ ID NO: 669437 - DNA, 15 bp, Homo sapiens
atcactgttgaatcc

SEQ ID NO: 669438 - DNA, 15 bp, Homo sapiens
tcactgttgaatcct

SEQ ID NO: 669439 - DNA, 15 bp, Homo sapiens
cactgttgaatcctc

SEQ ID NO: 669440 - DNA, 15 bp, Homo sapiens
actgttgaatcctct

SEQ ID NO: 669441 - DNA, 15 bp, Homo sapiens
ctgttgaatcctctg

SEQ ID NO: 669442 - DNA, 15 bp, Homo sapiens
tgttgaatcctctgt

SEQ ID NO: 669443 - DNA, 15 bp, Homo sapiens
gttgaatcctctgtt

SEQ ID NO: 669444 - DNA, 15 bp, Homo sapiens
ttgaatcctctgttt

SEQ ID NO: 669445 - DNA, 15 bp, Homo sapiens
tgaatcctctgtttt

SEQ ID NO: 669446 - DNA, 15 bp, Homo sapiens
gaatcctctgttttt

SEQ ID NO: 669447 - DNA, 15 bp, Homo sapiens
aatcctctgttttta

SEQ ID NO: 669448 - DNA, 15 bp, Homo sapiens
atcctctgtttttaa

SEQ ID NO: 669449 - DNA, 15 bp, Homo sapiens
tcctctgtttttaaa

SEQ ID NO: 669450 - DNA, 15 bp, Homo sapiens
cctctgtttttaaaa

SEQ ID NO: 669451 - DNA, 15 bp, Homo sapiens
ctctgtttttaaaac

SEQ ID NO: 669452 - DNA, 15 bp, Homo sapiens
tctgtttttaaaact

SEQ ID NO: 669453 - DNA, 15 bp, Homo sapiens
ctgtttttaaaactc

SEQ ID NO: 669454 - DNA, 15 bp, Homo sapiens
tgtttttaaaactcc

SEQ ID NO: 669455 - DNA, 15 bp, Homo sapiens
gtttttaaaactccc

SEQ ID NO: 669456 - DNA, 15 bp, Homo sapiens
tttttaaaactcccc

SEQ ID NO: 669457 - DNA, 15 bp, Homo sapiens
ttttaaaactcccct

SEQ ID NO: 669458 - DNA, 15 bp, Homo sapiens
tttaaaactcccctt

SEQ ID NO: 669459 - DNA, 15 bp, Homo sapiens
ttaaaactccccttt

SEQ ID NO: 669460 - DNA, 15 bp, Homo sapiens
taaaactcccctttt

SEQ ID NO: 669461 - DNA, 15 bp, Homo sapiens
aaaactccccttttg

SEQ ID NO: 669462 - DNA, 15 bp, Homo sapiens
aaactccccttttga

SEQ ID NO: 669463 - DNA, 15 bp, Homo sapiens
aactccccttttgat

SEQ ID NO: 669464 - DNA, 15 bp, Homo sapiens
actccccttttgatt

SEQ ID NO: 669465 - DNA, 15 bp, Homo sapiens
ctccccttttgattt

SEQ ID NO: 669466 - DNA, 15 bp, Homo sapiens
tccccttttgatttt

SEQ ID NO: 669467 - DNA, 15 bp, Homo sapiens
ccccttttgattttt

SEQ ID NO: 669468 - DNA, 15 bp, Homo sapiens
cccttttgatttttt

SEQ ID NO: 669469 - DNA, 15 bp, Homo sapiens
ccttttgattttttt

SEQ ID NO: 669470 - DNA, 15 bp, Homo sapiens
cttttgatttttttg

SEQ ID NO: 669471 - DNA, 15 bp, Homo sapiens
ttttgatttttttgg

SEQ ID NO: 669472 - DNA, 15 bp, Homo sapiens
tttgatttttttggg

SEQ ID NO: 669473 - DNA, 15 bp, Homo sapiens
ttgatttttttgggc

SEQ ID NO: 669474 - DNA, 15 bp, Homo sapiens
tgatttttttgggcc

SEQ ID NO: 669475 - DNA, 15 bp, Homo sapiens
gatttttttgggcca

SEQ ID NO: 669476 - DNA, 15 bp, Homo sapiens
atttttttgggccag

SEQ ID NO: 669477 - DNA, 15 bp, Homo sapiens
tttttttgggccaga

SEQ ID NO: 669478 - DNA, 15 bp, Homo sapiens
ttttttgggccagag

SEQ ID NO: 669479 - DNA, 15 bp, Homo sapiens
tttttgggccagagc

SEQ ID NO: 669480 - DNA, 15 bp, Homo sapiens
ttttgggccagagcc

SEQ ID NO: 669481 - DNA, 15 bp, Homo sapiens
tttgggccagagcca

SEQ ID NO: 669482 - DNA, 15 bp, Homo sapiens
ttgggccagagccaa

SEQ ID NO: 669483 - DNA, 15 bp, Homo sapiens
tgggccagagccaat

SEQ ID NO: 669484 - DNA, 15 bp, Homo sapiens
gggccagagccaatt

SEQ ID NO: 669485 - DNA, 15 bp, Homo sapiens
ggccagagccaattt

SEQ ID NO: 669486 - DNA, 15 bp, Homo sapiens
gccagagccaatttt

SEQ ID NO: 669487 - DNA, 15 bp, Homo sapiens
ccagagccaatttta

SEQ ID NO: 669488 - DNA, 15 bp, Homo sapiens
cagagccaattttat

SEQ ID NO: 669489 - DNA, 15 bp, Homo sapiens
agagccaattttatt

SEQ ID NO: 669490 - DNA, 15 bp, Homo sapiens
gagccaattttattt

SEQ ID NO: 669491 - DNA, 15 bp, Homo sapiens
agccaattttattta

SEQ ID NO: 669492 - DNA, 15 bp, Homo sapiens
gccaattttatttaa

SEQ ID NO: 669493 - DNA, 15 bp, Homo sapiens
ccaattttatttaaa

SEQ ID NO: 669494 - DNA, 15 bp, Homo sapiens
caattttatttaaaa

SEQ ID NO: 669495 - DNA, 15 bp, Homo sapiens
aattttatttaaaaa

SEQ ID NO: 669496 - DNA, 15 bp, Homo sapiens
attttatttaaaaaa

SEQ ID NO: 669497 - DNA, 15 bp, Homo sapiens
ttttatttaaaaaaa

SEQ ID NO: 669498 - DNA, 15 bp, Homo sapiens
tttatttaaaaaaaa

SEQ ID NO: 669499 - DNA, 15 bp, Homo sapiens
ttatttaaaaaaaaa

SEQ ID NO: 669500 - DNA, 15 bp, Homo sapiens
tatttaaaaaaaaaa

SEQ ID NO: 669501 - DNA, 15 bp, Homo sapiens
atttaaaaaaaaaaa

SEQ ID NO: 669502 - DNA, 15 bp, Homo sapiens
tttaaaaaaaaaaat

SEQ ID NO: 669503 - DNA, 15 bp, Homo sapiens
ttaaaaaaaaaaatc

SEQ ID NO: 669504 - DNA, 15 bp, Homo sapiens
taaaaaaaaaaatct

SEQ ID NO: 669505 - DNA, 15 bp, Homo sapiens
aaaaaaaaaaatctc

SEQ ID NO: 669506 - DNA, 15 bp, Homo sapiens
aaaaaaaaaatctct

SEQ ID NO: 669507 - DNA, 15 bp, Homo sapiens
aaaaaaaaatctcta

SEQ ID NO: 669508 - DNA, 15 bp, Homo sapiens
aaaaaaaatctctaa

SEQ ID NO: 669509 - DNA, 15 bp, Homo sapiens
aaaaaaatctctaaa

SEQ ID NO: 669510 - DNA, 15 bp, Homo sapiens
aaaaaatctctaaat

SEQ ID NO: 669511 - DNA, 15 bp, Homo sapiens
aaaaatctctaaatg

SEQ ID NO: 669512 - DNA, 15 bp, Homo sapiens
aaaatctctaaatga

SEQ ID NO: 669513 - DNA, 15 bp, Homo sapiens
aaatctctaaatgaa

SEQ ID NO: 669514 - DNA, 15 bp, Homo sapiens
aatctctaaatgaaa

SEQ ID NO: 669515 - DNA, 15 bp, Homo sapiens
atctctaaatgaaag

SEQ ID NO: 669516 - DNA, 15 bp, Homo sapiens
tctctaaatgaaagg

SEQ ID NO: 669517 - DNA, 15 bp, Homo sapiens
ctctaaatgaaaggg

SEQ ID NO: 669518 - DNA, 15 bp, Homo sapiens
tctaaatgaaagggc

SEQ ID NO: 669519 - DNA, 15 bp, Homo sapiens
ctaaatgaaagggca

SEQ ID NO: 669520 - DNA, 15 bp, Homo sapiens
taaatgaaagggcat

SEQ ID NO: 669521 - DNA, 15 bp, Homo sapiens
aaatgaaagggcatc

SEQ ID NO: 669522 - DNA, 15 bp, Homo sapiens
aatgaaagggcatca

SEQ ID NO: 669523 - DNA, 15 bp, Homo sapiens
atgaaagggcatcaa

SEQ ID NO: 669524 - DNA, 15 bp, Homo sapiens
tgaaagggcatcaaa

SEQ ID NO: 669525 - DNA, 15 bp, Homo sapiens
gaaagggcatcaaaa

SEQ ID NO: 669526 - DNA, 15 bp, Homo sapiens
aaagggcatcaaaaa

SEQ ID NO: 669527 - DNA, 15 bp, Homo sapiens
aagggcatcaaaaag

SEQ ID NO: 669528 - DNA, 15 bp, Homo sapiens
agggcatcaaaaaga

SEQ ID NO: 669529 - DNA, 15 bp, Homo sapiens
gggcatcaaaaagac

SEQ ID NO: 669530 - DNA, 15 bp, Homo sapiens
ggcatcaaaaagacc

SEQ ID NO: 669531 - DNA, 15 bp, Homo sapiens
gcatcaaaaagaccg

SEQ ID NO: 669532 - DNA, 15 bp, Homo sapiens
catcaaaaagaccgc

SEQ ID NO: 669533 - DNA, 15 bp, Homo sapiens
atcaaaaagaccgca

SEQ ID NO: 669534 - DNA, 15 bp, Homo sapiens
tcaaaaagaccgcat

SEQ ID NO: 669535 - DNA, 15 bp, Homo sapiens
caaaaagaccgcatt

SEQ ID NO: 669536 - DNA, 15 bp, Homo sapiens
aaaaagaccgcattt

SEQ ID NO: 669537 - DNA, 15 bp, Homo sapiens
aaaagaccgcatttc

SEQ ID NO: 669538 - DNA, 15 bp, Homo sapiens
aaagaccgcatttca

SEQ ID NO: 669539 - DNA, 15 bp, Homo sapiens
aagaccgcatttcag

SEQ ID NO: 669540 - DNA, 15 bp, Homo sapiens
agaccgcatttcagt

SEQ ID NO: 669541 - DNA, 15 bp, Homo sapiens
gaccgcatttcagtt

SEQ ID NO: 669542 - DNA, 15 bp, Homo sapiens
accgcatttcagtta

SEQ ID NO: 669543 - DNA, 15 bp, Homo sapiens
ccgcatttcagttat

SEQ ID NO: 669544 - DNA, 15 bp, Homo sapiens
cgcatttcagttatt

SEQ ID NO: 669545 - DNA, 15 bp, Homo sapiens
gcatttcagttattt

SEQ ID NO: 669546 - DNA, 15 bp, Homo sapiens
catttcagttatttc

SEQ ID NO: 669547 - DNA, 15 bp, Homo sapiens
atttcagttatttcc

SEQ ID NO: 669548 - DNA, 15 bp, Homo sapiens
tttcagttatttccc

SEQ ID NO: 669549 - DNA, 15 bp, Homo sapiens
ttcagttatttcccc

SEQ ID NO: 669550 - DNA, 15 bp, Homo sapiens
tcagttatttcccca

SEQ ID NO: 669551 - DNA, 15 bp, Homo sapiens
cagttatttccccaa

SEQ ID NO: 669552 - DNA, 15 bp, Homo sapiens
agttatttccccaaa

SEQ ID NO: 669553 - DNA, 15 bp, Homo sapiens
gttatttccccaaac

SEQ ID NO: 669554 - DNA, 15 bp, Homo sapiens
ttatttccccaaacc

SEQ ID NO: 669555 - DNA, 15 bp, Homo sapiens
tatttccccaaacct

SEQ ID NO: 669556 - DNA, 15 bp, Homo sapiens
atttccccaaacctc

SEQ ID NO: 669557 - DNA, 15 bp, Homo sapiens
tttccccaaacctca

SEQ ID NO: 669558 - DNA, 15 bp, Homo sapiens
ttccccaaacctcaa

SEQ ID NO: 669559 - DNA, 15 bp, Homo sapiens
tccccaaacctcaag

SEQ ID NO: 669560 - DNA, 15 bp, Homo sapiens
ccccaaacctcaagt

SEQ ID NO: 669561 - DNA, 15 bp, Homo sapiens
cccaaacctcaagtt

SEQ ID NO: 669562 - DNA, 15 bp, Homo sapiens
ccaaacctcaagttc

SEQ ID NO: 669563 - DNA, 15 bp, Homo sapiens
caaacctcaagttca

SEQ ID NO: 669564 - DNA, 15 bp, Homo sapiens
aaacctcaagttcat

SEQ ID NO: 669565 - DNA, 15 bp, Homo sapiens
aacctcaagttcatt

SEQ ID NO: 669566 - DNA, 15 bp, Homo sapiens
acctcaagttcattc

SEQ ID NO: 669567 - DNA, 15 bp, Homo sapiens
cctcaagttcattct

SEQ ID NO: 669568 - DNA, 15 bp, Homo sapiens
ctcaagttcattctc

SEQ ID NO: 669569 - DNA, 15 bp, Homo sapiens
tcaagttcattctcc

SEQ ID NO: 669570 - DNA, 15 bp, Homo sapiens
caagttcattctcct

SEQ ID NO: 669571 - DNA, 15 bp, Homo sapiens
aagttcattctcctt

SEQ ID NO: 669572 - DNA, 15 bp, Homo sapiens
agttcattctccttt

SEQ ID NO: 669573 - DNA, 15 bp, Homo sapiens
gttcattctcctttt

SEQ ID NO: 669574 - DNA, 15 bp, Homo sapiens
ttcattctccttttg

SEQ ID NO: 669575 - DNA, 15 bp, Homo sapiens
tcattctccttttgt

SEQ ID NO: 669576 - DNA, 15 bp, Homo sapiens
cattctccttttgtt

SEQ ID NO: 669577 - DNA, 15 bp, Homo sapiens
attctccttttgttc

SEQ ID NO: 669578 - DNA, 15 bp, Homo sapiens
ttctccttttgttct

SEQ ID NO: 669579 - DNA, 15 bp, Homo sapiens
tctccttttgttctt

SEQ ID NO: 669580 - DNA, 15 bp, Homo sapiens
ctccttttgttcttc

SEQ ID NO: 669581 - DNA, 15 bp, Homo sapiens
tccttttgttcttcc

SEQ ID NO: 669582 - DNA, 15 bp, Homo sapiens
ccttttgttcttcct

SEQ ID NO: 669583 - DNA, 15 bp, Homo sapiens
cttttgttcttcctg

SEQ ID NO: 669584 - DNA, 15 bp, Homo sapiens
ttttgttcttcctgc

SEQ ID NO: 669585 - DNA, 15 bp, Homo sapiens
tttgttcttcctgca

SEQ ID NO: 669586 - DNA, 15 bp, Homo sapiens
ttgttcttcctgcag

SEQ ID NO: 669587 - DNA, 15 bp, Homo sapiens
tgttcttcctgcagc

SEQ ID NO: 669588 - DNA, 15 bp, Homo sapiens
gttcttcctgcagca

SEQ ID NO: 669589 - DNA, 15 bp, Homo sapiens
ttcttcctgcagcaa

SEQ ID NO: 669590 - DNA, 15 bp, Homo sapiens
tcttcctgcagcaaa

SEQ ID NO: 669591 - DNA, 15 bp, Homo sapiens
cttcctgcagcaaat

SEQ ID NO: 669592 - DNA, 15 bp, Homo sapiens
ttcctgcagcaaatg

SEQ ID NO: 669593 - DNA, 15 bp, Homo sapiens
tcctgcagcaaatga

SEQ ID NO: 669594 - DNA, 15 bp, Homo sapiens
cctgcagcaaatgaa

SEQ ID NO: 669595 - DNA, 15 bp, Homo sapiens
ctgcagcaaatgaag

SEQ ID NO: 669596 - DNA, 15 bp, Homo sapiens
tgcagcaaatgaagg

SEQ ID NO: 669597 - DNA, 15 bp, Homo sapiens
gcagcaaatgaagga

SEQ ID NO: 669598 - DNA, 15 bp, Homo sapiens
cagcaaatgaaggat

SEQ ID NO: 669599 - DNA, 15 bp, Homo sapiens
agcaaatgaaggatc

SEQ ID NO: 669600 - DNA, 15 bp, Homo sapiens
gcaaatgaaggatca

SEQ ID NO: 669601 - DNA, 15 bp, Homo sapiens
caaatgaaggatcag

SEQ ID NO: 669602 - DNA, 15 bp, Homo sapiens
aaatgaaggatcagc

SEQ ID NO: 669603 - DNA, 15 bp, Homo sapiens
aatgaaggatcagct

SEQ ID NO: 669604 - DNA, 15 bp, Homo sapiens
atgaaggatcagctg

SEQ ID NO: 669605 - DNA, 15 bp, Homo sapiens
tgaaggatcagctgg

SEQ ID NO: 669606 - DNA, 15 bp, Homo sapiens
gaaggatcagctgga

SEQ ID NO: 669607 - DNA, 15 bp, Homo sapiens
aaggatcagctggac

SEQ ID NO: 669608 - DNA, 15 bp, Homo sapiens
aggatcagctggaca

SEQ ID NO: 669609 - DNA, 15 bp, Homo sapiens
ggatcagctggacaa

SEQ ID NO: 669610 - DNA, 15 bp, Homo sapiens
gatcagctggacaac

SEQ ID NO: 669611 - DNA, 15 bp, Homo sapiens
atcagctggacaact

SEQ ID NO: 669612 - DNA, 15 bp, Homo sapiens
tcagctggacaactt

SEQ ID NO: 669613 - DNA, 15 bp, Homo sapiens
cagctggacaacttg

SEQ ID NO: 669614 - DNA, 15 bp, Homo sapiens
agctggacaacttgt

SEQ ID NO: 669615 - DNA, 15 bp, Homo sapiens
gctggacaacttgtt

SEQ ID NO: 669616 - DNA, 15 bp, Homo sapiens
ctggacaacttgttg

SEQ ID NO: 669617 - DNA, 15 bp, Homo sapiens
tggacaacttgttgt

SEQ ID NO: 669618 - DNA, 15 bp, Homo sapiens
ggacaacttgttgtt

SEQ ID NO: 669619 - DNA, 15 bp, Homo sapiens
gacaacttgttgtta

SEQ ID NO: 669620 - DNA, 15 bp, Homo sapiens
acaacttgttgttaa

SEQ ID NO: 669621 - DNA, 15 bp, Homo sapiens
caacttgttgttaaa

SEQ ID NO: 669622 - DNA, 15 bp, Homo sapiens
aacttgttgttaaag

SEQ ID NO: 669623 - DNA, 15 bp, Homo sapiens
acttgttgttaaagg

SEQ ID NO: 669624 - DNA, 15 bp, Homo sapiens
cttgttgttaaagga

SEQ ID NO: 669625 - DNA, 15 bp, Homo sapiens
ttgttgttaaaggag

SEQ ID NO: 669626 - DNA, 15 bp, Homo sapiens
tgttgttaaaggagt

SEQ ID NO: 669627 - DNA, 15 bp, Homo sapiens
gttgttaaaggagtc

SEQ ID NO: 669628 - DNA, 15 bp, Homo sapiens
ttgttaaaggagtcc

SEQ ID NO: 669629 - DNA, 15 bp, Homo sapiens
tgttaaaggagtcct

SEQ ID NO: 669630 - DNA, 15 bp, Homo sapiens
gttaaaggagtcctt

SEQ ID NO: 669631 - DNA, 15 bp, Homo sapiens
ttaaaggagtccttg

SEQ ID NO: 669632 - DNA, 15 bp, Homo sapiens
taaaggagtccttgc

SEQ ID NO: 669633 - DNA, 15 bp, Homo sapiens
aaaggagtccttgct

SEQ ID NO: 669634 - DNA, 15 bp, Homo sapiens
aaggagtccttgctg

SEQ ID NO: 669635 - DNA, 15 bp, Homo sapiens
aggagtccttgctgg

SEQ ID NO: 669636 - DNA, 15 bp, Homo sapiens
ggagtccttgctgga

SEQ ID NO: 669637 - DNA, 15 bp, Homo sapiens
gagtccttgctggag

SEQ ID NO: 669638 - DNA, 15 bp, Homo sapiens
agtccttgctggagg

SEQ ID NO: 669639 - DNA, 15 bp, Homo sapiens
gtccttgctggagga

SEQ ID NO: 669640 - DNA, 15 bp, Homo sapiens
tccttgctggaggac

SEQ ID NO: 669641 - DNA, 15 bp, Homo sapiens
ccttgctggaggact

SEQ ID NO: 669642 - DNA, 15 bp, Homo sapiens
cttgctggaggactt

SEQ ID NO: 669643 - DNA, 15 bp, Homo sapiens
ttgctggaggacttt

SEQ ID NO: 669644 - DNA, 15 bp, Homo sapiens
tgctggaggacttta

SEQ ID NO: 669645 - DNA, 15 bp, Homo sapiens
gctggaggactttaa

SEQ ID NO: 669646 - DNA, 15 bp, Homo sapiens
ctggaggactttaag

SEQ ID NO: 669647 - DNA, 15 bp, Homo sapiens
tggaggactttaagg

SEQ ID NO: 669648 - DNA, 15 bp, Homo sapiens
ggaggactttaaggt

SEQ ID NO: 669649 - DNA, 15 bp, Homo sapiens
gaggactttaaggtg

SEQ ID NO: 669650 - DNA, 15 bp, Homo sapiens
aggactttaaggtga

SEQ ID NO: 669651 - DNA, 15 bp, Homo sapiens
ggactttaaggtgag

SEQ ID NO: 669652 - DNA, 15 bp, Homo sapiens
gactttaaggtgaga

SEQ ID NO: 669653 - DNA, 15 bp, Homo sapiens
actttaaggtgagag

SEQ ID NO: 669654 - DNA, 15 bp, Homo sapiens
ctttaaggtgagagc

SEQ ID NO: 669655 - DNA, 15 bp, Homo sapiens
tttaaggtgagagca

SEQ ID NO: 669656 - DNA, 15 bp, Homo sapiens
ttaaggtgagagcag

SEQ ID NO: 669657 - DNA, 15 bp, Homo sapiens
taaggtgagagcagg

SEQ ID NO: 669658 - DNA, 15 bp, Homo sapiens
aaggtgagagcaggg

SEQ ID NO: 669659 - DNA, 15 bp, Homo sapiens
aggtgagagcagggg

SEQ ID NO: 669660 - DNA, 15 bp, Homo sapiens
ggtgagagcaggggc

SEQ ID NO: 669661 - DNA, 15 bp, Homo sapiens
gtgagagcaggggcg

SEQ ID NO: 669662 - DNA, 15 bp, Homo sapiens
tgagagcaggggcgg

SEQ ID NO: 669663 - DNA, 15 bp, Homo sapiens
gagagcaggggcggg

SEQ ID NO: 669664 - DNA, 15 bp, Homo sapiens
agagcaggggcgggg

SEQ ID NO: 669665 - DNA, 15 bp, Homo sapiens
gagcaggggcggggt

SEQ ID NO: 669666 - DNA, 15 bp, Homo sapiens
agcaggggcggggtg

SEQ ID NO: 669667 - DNA, 15 bp, Homo sapiens
gcaggggcggggtgc

SEQ ID NO: 669668 - DNA, 15 bp, Homo sapiens
caggggcggggtgct

SEQ ID NO: 669669 - DNA, 15 bp, Homo sapiens
aggggcggggtgctg

SEQ ID NO: 669670 - DNA, 15 bp, Homo sapiens
ggggcggggtgctgg

SEQ ID NO: 669671 - DNA, 15 bp, Homo sapiens
gggcggggtgctggg

SEQ ID NO: 669672 - DNA, 15 bp, Homo sapiens
ggcggggtgctgggg

SEQ ID NO: 669673 - DNA, 15 bp, Homo sapiens
gcggggtgctggggg

SEQ ID NO: 669674 - DNA, 15 bp, Homo sapiens
cggggtgctggggga

SEQ ID NO: 669675 - DNA, 15 bp, Homo sapiens
ggggtgctgggggag

SEQ ID NO: 669676 - DNA, 15 bp, Homo sapiens
gggtgctgggggagt

SEQ ID NO: 669677 - DNA, 15 bp, Homo sapiens
ggtgctgggggagtg

SEQ ID NO: 669678 - DNA, 15 bp, Homo sapiens
gtgctgggggagtgt

SEQ ID NO: 669679 - DNA, 15 bp, Homo sapiens
tgctgggggagtgtg

SEQ ID NO: 669680 - DNA, 15 bp, Homo sapiens
gctgggggagtgtgc

SEQ ID NO: 669681 - DNA, 15 bp, Homo sapiens
ctgggggagtgtgca

SEQ ID NO: 669682 - DNA, 15 bp, Homo sapiens
tgggggagtgtgcag

SEQ ID NO: 669683 - DNA, 15 bp, Homo sapiens
gggggagtgtgcagc

SEQ ID NO: 669684 - DNA, 15 bp, Homo sapiens
ggggagtgtgcagca

SEQ ID NO: 669685 - DNA, 15 bp, Homo sapiens
gggagtgtgcagcat

SEQ ID NO: 669686 - DNA, 15 bp, Homo sapiens
ggagtgtgcagcatg

SEQ ID NO: 669687 - DNA, 15 bp, Homo sapiens
gagtgtgcagcatga

SEQ ID NO: 669688 - DNA, 15 bp, Homo sapiens
agtgtgcagcatgat

SEQ ID NO: 669689 - DNA, 15 bp, Homo sapiens
gtgtgcagcatgatt

SEQ ID NO: 669690 - DNA, 15 bp, Homo sapiens
tgtgcagcatgatta

SEQ ID NO: 669691 - DNA, 15 bp, Homo sapiens
gtgcagcatgattaa

SEQ ID NO: 669692 - DNA, 15 bp, Homo sapiens
tgcagcatgattaag

SEQ ID NO: 669693 - DNA, 15 bp, Homo sapiens
gcagcatgattaagg

SEQ ID NO: 669694 - DNA, 15 bp, Homo sapiens
cagcatgattaaggg

SEQ ID NO: 669695 - DNA, 15 bp, Homo sapiens
agcatgattaaggga

SEQ ID NO: 669696 - DNA, 15 bp, Homo sapiens
gcatgattaagggaa

SEQ ID NO: 669697 - DNA, 15 bp, Homo sapiens
catgattaagggaag

SEQ ID NO: 669698 - DNA, 15 bp, Homo sapiens
atgattaagggaagg

SEQ ID NO: 669699 - DNA, 15 bp, Homo sapiens
tgattaagggaaggg

SEQ ID NO: 669700 - DNA, 15 bp, Homo sapiens
gattaagggaaggga

SEQ ID NO: 669701 - DNA, 15 bp, Homo sapiens
attaagggaagggag

SEQ ID NO: 669702 - DNA, 15 bp, Homo sapiens
ttaagggaagggaga

SEQ ID NO: 669703 - DNA, 15 bp, Homo sapiens
taagggaagggagac

SEQ ID NO: 669704 - DNA, 15 bp, Homo sapiens
aagggaagggagact

SEQ ID NO: 669705 - DNA, 15 bp, Homo sapiens
agggaagggagactc

SEQ ID NO: 669706 - DNA, 15 bp, Homo sapiens
gggaagggagactct

SEQ ID NO: 669707 - DNA, 15 bp, Homo sapiens
ggaagggagactctg

SEQ ID NO: 669708 - DNA, 15 bp, Homo sapiens
gaagggagactctgc

SEQ ID NO: 669709 - DNA, 15 bp, Homo sapiens
aagggagactctgct

SEQ ID NO: 669710 - DNA, 15 bp, Homo sapiens
agggagactctgctt

SEQ ID NO: 669711 - DNA, 15 bp, Homo sapiens
gggagactctgcttc

SEQ ID NO: 669712 - DNA, 15 bp, Homo sapiens
ggagactctgcttcc

SEQ ID NO: 669713 - DNA, 15 bp, Homo sapiens
gagactctgcttcct

SEQ ID NO: 669714 - DNA, 15 bp, Homo sapiens
agactctgcttcctg

SEQ ID NO: 669715 - DNA, 15 bp, Homo sapiens
gactctgcttcctga

SEQ ID NO: 669716 - DNA, 15 bp, Homo sapiens
actctgcttcctgat

SEQ ID NO: 669717 - DNA, 15 bp, Homo sapiens
ctctgcttcctgatt

SEQ ID NO: 669718 - DNA, 15 bp, Homo sapiens
tctgcttcctgattg

SEQ ID NO: 669719 - DNA, 15 bp, Homo sapiens
ctgcttcctgattgc

SEQ ID NO: 669720 - DNA, 15 bp, Homo sapiens
tgcttcctgattgca

SEQ ID NO: 669721 - DNA, 15 bp, Homo sapiens
gcttcctgattgcag

SEQ ID NO: 669722 - DNA, 15 bp, Homo sapiens
cttcctgattgcagg

SEQ ID NO: 669723 - DNA, 15 bp, Homo sapiens
ttcctgattgcaggg

SEQ ID NO: 669724 - DNA, 15 bp, Homo sapiens
tcctgattgcaggga

SEQ ID NO: 669725 - DNA, 15 bp, Homo sapiens
cctgattgcagggaa

SEQ ID NO: 669726 - DNA, 15 bp, Homo sapiens
ctgattgcagggaat

SEQ ID NO: 669727 - DNA, 15 bp, Homo sapiens
tgattgcagggaatt

SEQ ID NO: 669728 - DNA, 15 bp, Homo sapiens
gattgcagggaattg

SEQ ID NO: 669729 - DNA, 15 bp, Homo sapiens
attgcagggaattgg

SEQ ID NO: 669730 - DNA, 15 bp, Homo sapiens
ttgcagggaattggg

SEQ ID NO: 669731 - DNA, 15 bp, Homo sapiens
tgcagggaattgggt

SEQ ID NO: 669732 - DNA, 15 bp, Homo sapiens
gcagggaattgggtt

SEQ ID NO: 669733 - DNA, 15 bp, Homo sapiens
cagggaattgggttt

SEQ ID NO: 669734 - DNA, 15 bp, Homo sapiens
agggaattgggtttg

SEQ ID NO: 669735 - DNA, 15 bp, Homo sapiens
gggaattgggtttgt

SEQ ID NO: 669736 - DNA, 15 bp, Homo sapiens
ggaattgggtttgtt

SEQ ID NO: 669737 - DNA, 15 bp, Homo sapiens
gaattgggtttgttt

SEQ ID NO: 669738 - DNA, 15 bp, Homo sapiens
aattgggtttgtttc

SEQ ID NO: 669739 - DNA, 15 bp, Homo sapiens
attgggtttgtttcc

SEQ ID NO: 669740 - DNA, 15 bp, Homo sapiens
ttgggtttgtttcct

SEQ ID NO: 669741 - DNA, 15 bp, Homo sapiens
tgggtttgtttcctt

SEQ ID NO: 669742 - DNA, 15 bp, Homo sapiens
gggtttgtttccttc

SEQ ID NO: 669743 - DNA, 15 bp, Homo sapiens
ggtttgtttccttcg

SEQ ID NO: 669744 - DNA, 15 bp, Homo sapiens
gtttgtttccttcgc

SEQ ID NO: 669745 - DNA, 15 bp, Homo sapiens
tttgtttccttcgct

SEQ ID NO: 669746 - DNA, 15 bp, Homo sapiens
ttgtttccttcgctt

SEQ ID NO: 669747 - DNA, 15 bp, Homo sapiens
tgtttccttcgcttt

SEQ ID NO: 669748 - DNA, 15 bp, Homo sapiens
gtttccttcgctttg

SEQ ID NO: 669749 - DNA, 15 bp, Homo sapiens
tttccttcgctttga

SEQ ID NO: 669750 - DNA, 15 bp, Homo sapiens
ttccttcgctttgaa

SEQ ID NO: 669751 - DNA, 15 bp, Homo sapiens
tccttcgctttgaaa

SEQ ID NO: 669752 - DNA, 15 bp, Homo sapiens
ccttcgctttgaaaa

SEQ ID NO: 669753 - DNA, 15 bp, Homo sapiens
cttcgctttgaaaag

SEQ ID NO: 669754 - DNA, 15 bp, Homo sapiens
ttcgctttgaaaagg

SEQ ID NO: 669755 - DNA, 15 bp, Homo sapiens
tcgctttgaaaagga

SEQ ID NO: 669756 - DNA, 15 bp, Homo sapiens
cgctttgaaaaggag

SEQ ID NO: 669757 - DNA, 15 bp, Homo sapiens
gctttgaaaaggaga

SEQ ID NO: 669758 - DNA, 15 bp, Homo sapiens
ctttgaaaaggagaa

SEQ ID NO: 669759 - DNA, 15 bp, Homo sapiens
tttgaaaaggagaag

SEQ ID NO: 669760 - DNA, 15 bp, Homo sapiens
ttgaaaaggagaagt

SEQ ID NO: 669761 - DNA, 15 bp, Homo sapiens
tgaaaaggagaagtg

SEQ ID NO: 669762 - DNA, 15 bp, Homo sapiens
gaaaaggagaagtgg

SEQ ID NO: 669763 - DNA, 15 bp, Homo sapiens
aaaaggagaagtggg

SEQ ID NO: 669764 - DNA, 15 bp, Homo sapiens
aaaggagaagtggga

SEQ ID NO: 669765 - DNA, 15 bp, Homo sapiens
aaggagaagtgggaa

SEQ ID NO: 669766 - DNA, 15 bp, Homo sapiens
aggagaagtgggaag

SEQ ID NO: 669767 - DNA, 15 bp, Homo sapiens
ggagaagtgggaaga

SEQ ID NO: 669768 - DNA, 15 bp, Homo sapiens
gagaagtgggaagat

SEQ ID NO: 669769 - DNA, 15 bp, Homo sapiens
agaagtgggaagatg

SEQ ID NO: 669770 - DNA, 15 bp, Homo sapiens
gaagtgggaagatgt

SEQ ID NO: 669771 - DNA, 15 bp, Homo sapiens
aagtgggaagatgtt

SEQ ID NO: 669772 - DNA, 15 bp, Homo sapiens
agtgggaagatgtta

SEQ ID NO: 669773 - DNA, 15 bp, Homo sapiens
gtgggaagatgttaa

SEQ ID NO: 669774 - DNA, 15 bp, Homo sapiens
tgggaagatgttaac

SEQ ID NO: 669775 - DNA, 15 bp, Homo sapiens
gggaagatgttaact

SEQ ID NO: 669776 - DNA, 15 bp, Homo sapiens
ggaagatgttaactc

SEQ ID NO: 669777 - DNA, 15 bp, Homo sapiens
gaagatgttaactca

SEQ ID NO: 669778 - DNA, 15 bp, Homo sapiens
aagatgttaactcag

SEQ ID NO: 669779 - DNA, 15 bp, Homo sapiens
agatgttaactcagc

SEQ ID NO: 669780 - DNA, 15 bp, Homo sapiens
gatgttaactcagca

SEQ ID NO: 669781 - DNA, 15 bp, Homo sapiens
atgttaactcagcac

SEQ ID NO: 669782 - DNA, 15 bp, Homo sapiens
tgttaactcagcaca

SEQ ID NO: 669783 - DNA, 15 bp, Homo sapiens
gttaactcagcacat

SEQ ID NO: 669784 - DNA, 15 bp, Homo sapiens
ttaactcagcacatc

SEQ ID NO: 669785 - DNA, 15 bp, Homo sapiens
taactcagcacatcc

SEQ ID NO: 669786 - DNA, 15 bp, Homo sapiens
aactcagcacatcca

SEQ ID NO: 669787 - DNA, 15 bp, Homo sapiens
actcagcacatccag

SEQ ID NO: 669788 - DNA, 15 bp, Homo sapiens
ctcagcacatccagc

SEQ ID NO: 669789 - DNA, 15 bp, Homo sapiens
tcagcacatccagca

SEQ ID NO: 669790 - DNA, 15 bp, Homo sapiens
cagcacatccagcag

SEQ ID NO: 669791 - DNA, 15 bp, Homo sapiens
agcacatccagcagc

SEQ ID NO: 669792 - DNA, 15 bp, Homo sapiens
gcacatccagcagcc

SEQ ID NO: 669793 - DNA, 15 bp, Homo sapiens
cacatccagcagcca

SEQ ID NO: 669794 - DNA, 15 bp, Homo sapiens
acatccagcagccag

SEQ ID NO: 669795 - DNA, 15 bp, Homo sapiens
catccagcagccaga

SEQ ID NO: 669796 - DNA, 15 bp, Homo sapiens
atccagcagccagag

SEQ ID NO: 669797 - DNA, 15 bp, Homo sapiens
tccagcagccagagg

SEQ ID NO: 669798 - DNA, 15 bp, Homo sapiens
ccagcagccagaggg

SEQ ID NO: 669799 - DNA, 15 bp, Homo sapiens
cagcagccagagggt

SEQ ID NO: 669800 - DNA, 15 bp, Homo sapiens
agcagccagagggtt

SEQ ID NO: 669801 - DNA, 15 bp, Homo sapiens
gcagccagagggttt

SEQ ID NO: 669802 - DNA, 15 bp, Homo sapiens
cagccagagggttta

SEQ ID NO: 669803 - DNA, 15 bp, Homo sapiens
agccagagggtttac

SEQ ID NO: 669804 - DNA, 15 bp, Homo sapiens
gccagagggtttaca

SEQ ID NO: 669805 - DNA, 15 bp, Homo sapiens
ccagagggtttacaa

SEQ ID NO: 669806 - DNA, 15 bp, Homo sapiens
cagagggtttacaaa

SEQ ID NO: 669807 - DNA, 15 bp, Homo sapiens
agagggtttacaaag

SEQ ID NO: 669808 - DNA, 15 bp, Homo sapiens
gagggtttacaaagg

SEQ ID NO: 669809 - DNA, 15 bp, Homo sapiens
agggtttacaaaggg

SEQ ID NO: 669810 - DNA, 15 bp, Homo sapiens
gggtttacaaagggc

SEQ ID NO: 669811 - DNA, 15 bp, Homo sapiens
ggtttacaaagggct

SEQ ID NO: 669812 - DNA, 15 bp, Homo sapiens
gtttacaaagggctc

SEQ ID NO: 669813 - DNA, 15 bp, Homo sapiens
tttacaaagggctca

SEQ ID NO: 669814 - DNA, 15 bp, Homo sapiens
ttacaaagggctcag

SEQ ID NO: 669815 - DNA, 15 bp, Homo sapiens
tacaaagggctcagt

SEQ ID NO: 669816 - DNA, 15 bp, Homo sapiens
acaaagggctcagtc

SEQ ID NO: 669817 - DNA, 15 bp, Homo sapiens
caaagggctcagtcc

SEQ ID NO: 669818 - DNA, 15 bp, Homo sapiens
aaagggctcagtccc

SEQ ID NO: 669819 - DNA, 15 bp, Homo sapiens
aagggctcagtccct

SEQ ID NO: 669820 - DNA, 15 bp, Homo sapiens
agggctcagtccctt

SEQ ID NO: 669821 - DNA, 15 bp, Homo sapiens
gggctcagtcccttc

SEQ ID NO: 669822 - DNA, 15 bp, Homo sapiens
ggctcagtcccttcg

SEQ ID NO: 669823 - DNA, 15 bp, Homo sapiens
gctcagtcccttcgg

SEQ ID NO: 669824 - DNA, 15 bp, Homo sapiens
ctcagtcccttcggg

SEQ ID NO: 669825 - DNA, 15 bp, Homo sapiens
tcagtcccttcgggg

SEQ ID NO: 669826 - DNA, 15 bp, Homo sapiens
cagtcccttcgggga

SEQ ID NO: 669827 - DNA, 15 bp, Homo sapiens
agtcccttcggggag

SEQ ID NO: 669828 - DNA, 15 bp, Homo sapiens
gtcccttcggggagg

SEQ ID NO: 669829 - DNA, 15 bp, Homo sapiens
tcccttcggggaggc

SEQ ID NO: 669830 - DNA, 15 bp, Homo sapiens
cccttcggggaggct

SEQ ID NO: 669831 - DNA, 15 bp, Homo sapiens
ccttcggggaggctt

SEQ ID NO: 669832 - DNA, 15 bp, Homo sapiens
cttcggggaggcttc

SEQ ID NO: 669833 - DNA, 15 bp, Homo sapiens
ttcggggaggcttct

SEQ ID NO: 669834 - DNA, 15 bp, Homo sapiens
tcggggaggcttctg

SEQ ID NO: 669835 - DNA, 15 bp, Homo sapiens
cggggaggcttctgg

SEQ ID NO: 669836 - DNA, 15 bp, Homo sapiens
ggggaggcttctggt

SEQ ID NO: 669837 - DNA, 15 bp, Homo sapiens
gggaggcttctggtg

SEQ ID NO: 669838 - DNA, 15 bp, Homo sapiens
ggaggcttctggtga

SEQ ID NO: 669839 - DNA, 15 bp, Homo sapiens
gaggcttctggtgaa

SEQ ID NO: 669840 - DNA, 15 bp, Homo sapiens
aggcttctggtgaag

SEQ ID NO: 669841 - DNA, 15 bp, Homo sapiens
ggcttctggtgaagg

SEQ ID NO: 669842 - DNA, 15 bp, Homo sapiens
gcttctggtgaagga

SEQ ID NO: 669843 - DNA, 15 bp, Homo sapiens
cttctggtgaaggag

SEQ ID NO: 669844 - DNA, 15 bp, Homo sapiens
ttctggtgaaggagg

SEQ ID NO: 669845 - DNA, 15 bp, Homo sapiens
tctggtgaaggagga

SEQ ID NO: 669846 - DNA, 15 bp, Homo sapiens
ctggtgaaggaggat

SEQ ID NO: 669847 - DNA, 15 bp, Homo sapiens
tggtgaaggaggatc

SEQ ID NO: 669848 - DNA, 15 bp, Homo sapiens
ggtgaaggaggatcg

SEQ ID NO: 669849 - DNA, 15 bp, Homo sapiens
gtgaaggaggatcgc

SEQ ID NO: 669850 - DNA, 15 bp, Homo sapiens
tgaaggaggatcgct

SEQ ID NO: 669851 - DNA, 15 bp, Homo sapiens
gaaggaggatcgcta

SEQ ID NO: 669852 - DNA, 15 bp, Homo sapiens
aaggaggatcgctag

SEQ ID NO: 669853 - DNA, 15 bp, Homo sapiens
aggaggatcgctaga

SEQ ID NO: 669854 - DNA, 15 bp, Homo sapiens
ggaggatcgctagaa

SEQ ID NO: 669855 - DNA, 15 bp, Homo sapiens
gaggatcgctagaac

SEQ ID NO: 669856 - DNA, 15 bp, Homo sapiens
aggatcgctagaacc

SEQ ID NO: 669857 - DNA, 15 bp, Homo sapiens
ggatcgctagaacca

SEQ ID NO: 669858 - DNA, 15 bp, Homo sapiens
gatcgctagaaccaa

SEQ ID NO: 669859 - DNA, 15 bp, Homo sapiens
atcgctagaaccaag

SEQ ID NO: 669860 - DNA, 15 bp, Homo sapiens
tcgctagaaccaagc

SEQ ID NO: 669861 - DNA, 15 bp, Homo sapiens
cgctagaaccaagct

SEQ ID NO: 669862 - DNA, 15 bp, Homo sapiens
gctagaaccaagctg

SEQ ID NO: 669863 - DNA, 15 bp, Homo sapiens
ctagaaccaagctgt

SEQ ID NO: 669864 - DNA, 15 bp, Homo sapiens
tagaaccaagctgtc

SEQ ID NO: 669865 - DNA, 15 bp, Homo sapiens
agaaccaagctgtcc

SEQ ID NO: 669866 - DNA, 15 bp, Homo sapiens
gaaccaagctgtcct

SEQ ID NO: 669867 - DNA, 15 bp, Homo sapiens
aaccaagctgtcctc

SEQ ID NO: 669868 - DNA, 15 bp, Homo sapiens
accaagctgtcctct

SEQ ID NO: 669869 - DNA, 15 bp, Homo sapiens
ccaagctgtcctctt

SEQ ID NO: 669870 - DNA, 15 bp, Homo sapiens
caagctgtcctctta

SEQ ID NO: 669871 - DNA, 15 bp, Homo sapiens
aagctgtcctcttaa

SEQ ID NO: 669872 - DNA, 15 bp, Homo sapiens
agctgtcctcttaag

SEQ ID NO: 669873 - DNA, 15 bp, Homo sapiens
gctgtcctcttaagc

SEQ ID NO: 669874 - DNA, 15 bp, Homo sapiens
ctgtcctcttaagct

SEQ ID NO: 669875 - DNA, 15 bp, Homo sapiens
tgtcctcttaagcta

SEQ ID NO: 669876 - DNA, 15 bp, Homo sapiens
gtcctcttaagctag

SEQ ID NO: 669877 - DNA, 15 bp, Homo sapiens
tcctcttaagctagt

SEQ ID NO: 669878 - DNA, 15 bp, Homo sapiens
cctcttaagctagtt

SEQ ID NO: 669879 - DNA, 15 bp, Homo sapiens
ctcttaagctagttg

SEQ ID NO: 669880 - DNA, 15 bp, Homo sapiens
tcttaagctagttgc

SEQ ID NO: 669881 - DNA, 15 bp, Homo sapiens
cttaagctagttgca

SEQ ID NO: 669882 - DNA, 15 bp, Homo sapiens
ttaagctagttgcag

SEQ ID NO: 669883 - DNA, 15 bp, Homo sapiens
taagctagttgcagc

SEQ ID NO: 669884 - DNA, 15 bp, Homo sapiens
aagctagttgcagca

SEQ ID NO: 669885 - DNA, 15 bp, Homo sapiens
agctagttgcagcag

SEQ ID NO: 669886 - DNA, 15 bp, Homo sapiens
gctagttgcagcagc

SEQ ID NO: 669887 - DNA, 15 bp, Homo sapiens
ctagttgcagcagcc

SEQ ID NO: 669888 - DNA, 15 bp, Homo sapiens
tagttgcagcagccc

SEQ ID NO: 669889 - DNA, 15 bp, Homo sapiens
agttgcagcagcccc

SEQ ID NO: 669890 - DNA, 15 bp, Homo sapiens
gttgcagcagcccct

SEQ ID NO: 669891 - DNA, 15 bp, Homo sapiens
ttgcagcagcccctc

SEQ ID NO: 669892 - DNA, 15 bp, Homo sapiens
tgcagcagcccctcc

SEQ ID NO: 669893 - DNA, 15 bp, Homo sapiens
gcagcagcccctcct

SEQ ID NO: 669894 - DNA, 15 bp, Homo sapiens
cagcagcccctcctc

SEQ ID NO: 669895 - DNA, 15 bp, Homo sapiens
agcagcccctcctcc

SEQ ID NO: 669896 - DNA, 15 bp, Homo sapiens
gcagcccctcctccc

SEQ ID NO: 669897 - DNA, 15 bp, Homo sapiens
cagcccctcctccca

SEQ ID NO: 669898 - DNA, 15 bp, Homo sapiens
agcccctcctcccag

SEQ ID NO: 669899 - DNA, 15 bp, Homo sapiens
gcccctcctcccagc

SEQ ID NO: 669900 - DNA, 15 bp, Homo sapiens
cccctcctcccagcc

SEQ ID NO: 669901 - DNA, 15 bp, Homo sapiens
ccctcctcccagcca

SEQ ID NO: 669902 - DNA, 15 bp, Homo sapiens
cctcctcccagccac

SEQ ID NO: 669903 - DNA, 15 bp, Homo sapiens
ctcctcccagccacc

SEQ ID NO: 669904 - DNA, 15 bp, Homo sapiens
tcctcccagccacct

SEQ ID NO: 669905 - DNA, 15 bp, Homo sapiens
cctcccagccacctc

SEQ ID NO: 669906 - DNA, 15 bp, Homo sapiens
ctcccagccacctcc

SEQ ID NO: 669907 - DNA, 15 bp, Homo sapiens
tcccagccacctccg

SEQ ID NO: 669908 - DNA, 15 bp, Homo sapiens
cccagccacctccgc

SEQ ID NO: 669909 - DNA, 15 bp, Homo sapiens
ccagccacctccgcc

SEQ ID NO: 669910 - DNA, 15 bp, Homo sapiens
cagccacctccgcca

SEQ ID NO: 669911 - DNA, 15 bp, Homo sapiens
agccacctccgccaa

SEQ ID NO: 669912 - DNA, 15 bp, Homo sapiens
gccacctccgccaat

SEQ ID NO: 669913 - DNA, 15 bp, Homo sapiens
ccacctccgccaatc

SEQ ID NO: 669914 - DNA, 15 bp, Homo sapiens
cacctccgccaatct

SEQ ID NO: 669915 - DNA, 15 bp, Homo sapiens
acctccgccaatctc

SEQ ID NO: 669916 - DNA, 15 bp, Homo sapiens
cctccgccaatctct

SEQ ID NO: 669917 - DNA, 15 bp, Homo sapiens
ctccgccaatctctc

SEQ ID NO: 669918 - DNA, 15 bp, Homo sapiens
tccgccaatctctca

SEQ ID NO: 669919 - DNA, 15 bp, Homo sapiens
ccgccaatctctcac

SEQ ID NO: 669920 - DNA, 15 bp, Homo sapiens
cgccaatctctcact

SEQ ID NO: 669921 - DNA, 15 bp, Homo sapiens
gccaatctctcactc

SEQ ID NO: 669922 - DNA, 15 bp, Homo sapiens
ccaatctctcactca

SEQ ID NO: 669923 - DNA, 15 bp, Homo sapiens
caatctctcactcac

SEQ ID NO: 669924 - DNA, 15 bp, Homo sapiens
aatctctcactcacc

SEQ ID NO: 669925 - DNA, 15 bp, Homo sapiens
atctctcactcacct

SEQ ID NO: 669926 - DNA, 15 bp, Homo sapiens
tctctcactcacctt

SEQ ID NO: 669927 - DNA, 15 bp, Homo sapiens
ctctcactcaccttt

SEQ ID NO: 669928 - DNA, 15 bp, Homo sapiens
tctcactcacctttg

SEQ ID NO: 669929 - DNA, 15 bp, Homo sapiens
ctcactcacctttgg

SEQ ID NO: 669930 - DNA, 15 bp, Homo sapiens
tcactcacctttggc

SEQ ID NO: 669931 - DNA, 15 bp, Homo sapiens
cactcacctttggct

SEQ ID NO: 669932 - DNA, 15 bp, Homo sapiens
actcacctttggctc

SEQ ID NO: 669933 - DNA, 15 bp, Homo sapiens
ctcacctttggctcc

SEQ ID NO: 669934 - DNA, 15 bp, Homo sapiens
tcacctttggctcct

SEQ ID NO: 669935 - DNA, 15 bp, Homo sapiens
cacctttggctcctg

SEQ ID NO: 669936 - DNA, 15 bp, Homo sapiens
acctttggctcctgc

SEQ ID NO: 669937 - DNA, 15 bp, Homo sapiens
cctttggctcctgcc

SEQ ID NO: 669938 - DNA, 15 bp, Homo sapiens
ctttggctcctgccc

SEQ ID NO: 669939 - DNA, 15 bp, Homo sapiens
tttggctcctgccct

SEQ ID NO: 669940 - DNA, 15 bp, Homo sapiens
ttggctcctgccctt

SEQ ID NO: 669941 - DNA, 15 bp, Homo sapiens
tggctcctgccctta

SEQ ID NO: 669942 - DNA, 15 bp, Homo sapiens
ggctcctgcccttag

SEQ ID NO: 669943 - DNA, 15 bp, Homo sapiens
gctcctgcccttagg

SEQ ID NO: 669944 - DNA, 15 bp, Homo sapiens
ctcctgcccttaggg

SEQ ID NO: 669945 - DNA, 15 bp, Homo sapiens
tcctgcccttagggt

SEQ ID NO: 669946 - DNA, 15 bp, Homo sapiens
cctgcccttagggtt

SEQ ID NO: 669947 - DNA, 15 bp, Homo sapiens
ctgcccttagggtta

SEQ ID NO: 669948 - DNA, 15 bp, Homo sapiens
tgcccttagggttac

SEQ ID NO: 669949 - DNA, 15 bp, Homo sapiens
gcccttagggttacc

SEQ ID NO: 669950 - DNA, 15 bp, Homo sapiens
cccttagggttacct

SEQ ID NO: 669951 - DNA, 15 bp, Homo sapiens
ccttagggttacctg

SEQ ID NO: 669952 - DNA, 15 bp, Homo sapiens
cttagggttacctgg

SEQ ID NO: 669953 - DNA, 15 bp, Homo sapiens
ttagggttacctggg

SEQ ID NO: 669954 - DNA, 15 bp, Homo sapiens
tagggttacctgggt

SEQ ID NO: 669955 - DNA, 15 bp, Homo sapiens
agggttacctgggtt

SEQ ID NO: 669956 - DNA, 15 bp, Homo sapiens
gggttacctgggttg

SEQ ID NO: 669957 - DNA, 15 bp, Homo sapiens
ggttacctgggttgc

SEQ ID NO: 669958 - DNA, 15 bp, Homo sapiens
gttacctgggttgcc

SEQ ID NO: 669959 - DNA, 15 bp, Homo sapiens
ttacctgggttgcca

SEQ ID NO: 669960 - DNA, 15 bp, Homo sapiens
tacctgggttgccaa

SEQ ID NO: 669961 - DNA, 15 bp, Homo sapiens
acctgggttgccaag

SEQ ID NO: 669962 - DNA, 15 bp, Homo sapiens
cctgggttgccaagc

SEQ ID NO: 669963 - DNA, 15 bp, Homo sapiens
ctgggttgccaagcc

SEQ ID NO: 669964 - DNA, 15 bp, Homo sapiens
tgggttgccaagcct

SEQ ID NO: 669965 - DNA, 15 bp, Homo sapiens
gggttgccaagcctt

SEQ ID NO: 669966 - DNA, 15 bp, Homo sapiens
ggttgccaagccttg

SEQ ID NO: 669967 - DNA, 15 bp, Homo sapiens
gttgccaagccttgt

SEQ ID NO: 669968 - DNA, 15 bp, Homo sapiens
ttgccaagccttgtc

SEQ ID NO: 669969 - DNA, 15 bp, Homo sapiens
tgccaagccttgtct

SEQ ID NO: 669970 - DNA, 15 bp, Homo sapiens
gccaagccttgtctg

SEQ ID NO: 669971 - DNA, 15 bp, Homo sapiens
ccaagccttgtctga

SEQ ID NO: 669972 - DNA, 15 bp, Homo sapiens
caagccttgtctgag

SEQ ID NO: 669973 - DNA, 15 bp, Homo sapiens
aagccttgtctgaga

SEQ ID NO: 669974 - DNA, 15 bp, Homo sapiens
agccttgtctgagat

SEQ ID NO: 669975 - DNA, 15 bp, Homo sapiens
gccttgtctgagatg

SEQ ID NO: 669976 - DNA, 15 bp, Homo sapiens
ccttgtctgagatga

SEQ ID NO: 669977 - DNA, 15 bp, Homo sapiens
cttgtctgagatgat

SEQ ID NO: 669978 - DNA, 15 bp, Homo sapiens
ttgtctgagatgatc

SEQ ID NO: 669979 - DNA, 15 bp, Homo sapiens
tgtctgagatgatcc

SEQ ID NO: 669980 - DNA, 15 bp, Homo sapiens
gtctgagatgatcca

SEQ ID NO: 669981 - DNA, 15 bp, Homo sapiens
tctgagatgatccag

SEQ ID NO: 669982 - DNA, 15 bp, Homo sapiens
ctgagatgatccagt

SEQ ID NO: 669983 - DNA, 15 bp, Homo sapiens
tgagatgatccagtt

SEQ ID NO: 669984 - DNA, 15 bp, Homo sapiens
gagatgatccagttt

SEQ ID NO: 669985 - DNA, 15 bp, Homo sapiens
agatgatccagtttt

SEQ ID NO: 669986 - DNA, 15 bp, Homo sapiens
gatgatccagtttta

SEQ ID NO: 669987 - DNA, 15 bp, Homo sapiens
atgatccagttttac

SEQ ID NO: 669988 - DNA, 15 bp, Homo sapiens
tgatccagttttacc

SEQ ID NO: 669989 - DNA, 15 bp, Homo sapiens
gatccagttttacct

SEQ ID NO: 669990 - DNA, 15 bp, Homo sapiens
atccagttttacctg

SEQ ID NO: 669991 - DNA, 15 bp, Homo sapiens
tccagttttacctgg

SEQ ID NO: 669992 - DNA, 15 bp, Homo sapiens
ccagttttacctgga

SEQ ID NO: 669993 - DNA, 15 bp, Homo sapiens
cagttttacctggag

SEQ ID NO: 669994 - DNA, 15 bp, Homo sapiens
agttttacctggagg

SEQ ID NO: 669995 - DNA, 15 bp, Homo sapiens
gttttacctggagga

SEQ ID NO: 669996 - DNA, 15 bp, Homo sapiens
ttttacctggaggag

SEQ ID NO: 669997 - DNA, 15 bp, Homo sapiens
tttacctggaggagg

SEQ ID NO: 669998 - DNA, 15 bp, Homo sapiens
ttacctggaggaggt

SEQ ID NO: 669999 - DNA, 15 bp, Homo sapiens
tacctggaggaggtg

SEQ ID NO: 670000 - DNA, 15 bp, Homo sapiens
acctggaggaggtga

SEQ ID NO: 670001 - DNA, 15 bp, Homo sapiens
cctggaggaggtgat

SEQ ID NO: 670002 - DNA, 15 bp, Homo sapiens
ctggaggaggtgatg

SEQ ID NO: 670003 - DNA, 15 bp, Homo sapiens
tggaggaggtgatgc

SEQ ID NO: 670004 - DNA, 15 bp, Homo sapiens
ggaggaggtgatgcc

SEQ ID NO: 670005 - DNA, 15 bp, Homo sapiens
gaggaggtgatgccc

SEQ ID NO: 670006 - DNA, 15 bp, Homo sapiens
aggaggtgatgcccc

SEQ ID NO: 670007 - DNA, 15 bp, Homo sapiens
ggaggtgatgcccca

SEQ ID NO: 670008 - DNA, 15 bp, Homo sapiens
gaggtgatgccccaa

SEQ ID NO: 670009 - DNA, 15 bp, Homo sapiens
aggtgatgccccaag

SEQ ID NO: 670010 - DNA, 15 bp, Homo sapiens
ggtgatgccccaagc

SEQ ID NO: 670011 - DNA, 15 bp, Homo sapiens
gtgatgccccaagct

SEQ ID NO: 670012 - DNA, 15 bp, Homo sapiens
tgatgccccaagctg

SEQ ID NO: 670013 - DNA, 15 bp, Homo sapiens
gatgccccaagctga

SEQ ID NO: 670014 - DNA, 15 bp, Homo sapiens
atgccccaagctgag

SEQ ID NO: 670015 - DNA, 15 bp, Homo sapiens
tgccccaagctgaga

SEQ ID NO: 670016 - DNA, 15 bp, Homo sapiens
gccccaagctgagaa

SEQ ID NO: 670017 - DNA, 15 bp, Homo sapiens
ccccaagctgagaac

SEQ ID NO: 670018 - DNA, 15 bp, Homo sapiens
cccaagctgagaacc

SEQ ID NO: 670019 - DNA, 15 bp, Homo sapiens
ccaagctgagaacca

SEQ ID NO: 670020 - DNA, 15 bp, Homo sapiens
caagctgagaaccaa

SEQ ID NO: 670021 - DNA, 15 bp, Homo sapiens
aagctgagaaccaag

SEQ ID NO: 670022 - DNA, 15 bp, Homo sapiens
agctgagaaccaaga

SEQ ID NO: 670023 - DNA, 15 bp, Homo sapiens
gctgagaaccaagac

SEQ ID NO: 670024 - DNA, 15 bp, Homo sapiens
ctgagaaccaagacc

SEQ ID NO: 670025 - DNA, 15 bp, Homo sapiens
tgagaaccaagaccc

SEQ ID NO: 670026 - DNA, 15 bp, Homo sapiens
gagaaccaagaccca

SEQ ID NO: 670027 - DNA, 15 bp, Homo sapiens
agaaccaagacccag

SEQ ID NO: 670028 - DNA, 15 bp, Homo sapiens
gaaccaagacccaga

SEQ ID NO: 670029 - DNA, 15 bp, Homo sapiens
aaccaagacccagac

SEQ ID NO: 670030 - DNA, 15 bp, Homo sapiens
accaagacccagaca

SEQ ID NO: 670031 - DNA, 15 bp, Homo sapiens
ccaagacccagacat

SEQ ID NO: 670032 - DNA, 15 bp, Homo sapiens
caagacccagacatc

SEQ ID NO: 670033 - DNA, 15 bp, Homo sapiens
aagacccagacatca

SEQ ID NO: 670034 - DNA, 15 bp, Homo sapiens
agacccagacatcaa

SEQ ID NO: 670035 - DNA, 15 bp, Homo sapiens
gacccagacatcaag

SEQ ID NO: 670036 - DNA, 15 bp, Homo sapiens
acccagacatcaagg

SEQ ID NO: 670037 - DNA, 15 bp, Homo sapiens
cccagacatcaaggc

SEQ ID NO: 670038 - DNA, 15 bp, Homo sapiens
ccagacatcaaggcg

SEQ ID NO: 670039 - DNA, 15 bp, Homo sapiens
cagacatcaaggcgc

SEQ ID NO: 670040 - DNA, 15 bp, Homo sapiens
agacatcaaggcgca

SEQ ID NO: 670041 - DNA, 15 bp, Homo sapiens
gacatcaaggcgcat

SEQ ID NO: 670042 - DNA, 15 bp, Homo sapiens
acatcaaggcgcatg

SEQ ID NO: 670043 - DNA, 15 bp, Homo sapiens
catcaaggcgcatgt

SEQ ID NO: 670044 - DNA, 15 bp, Homo sapiens
atcaaggcgcatgtg

SEQ ID NO: 670045 - DNA, 15 bp, Homo sapiens
tcaaggcgcatgtga

SEQ ID NO: 670046 - DNA, 15 bp, Homo sapiens
caaggcgcatgtgaa

SEQ ID NO: 670047 - DNA, 15 bp, Homo sapiens
aaggcgcatgtgaac

SEQ ID NO: 670048 - DNA, 15 bp, Homo sapiens
aggcgcatgtgaact

SEQ ID NO: 670049 - DNA, 15 bp, Homo sapiens
ggcgcatgtgaactc

SEQ ID NO: 670050 - DNA, 15 bp, Homo sapiens
gcgcatgtgaactcc

SEQ ID NO: 670051 - DNA, 15 bp, Homo sapiens
cgcatgtgaactccc

SEQ ID NO: 670052 - DNA, 15 bp, Homo sapiens
gcatgtgaactccct

SEQ ID NO: 670053 - DNA, 15 bp, Homo sapiens
catgtgaactccctg

SEQ ID NO: 670054 - DNA, 15 bp, Homo sapiens
atgtgaactccctgg

SEQ ID NO: 670055 - DNA, 15 bp, Homo sapiens
tgtgaactccctggg

SEQ ID NO: 670056 - DNA, 15 bp, Homo sapiens
gtgaactccctgggg

SEQ ID NO: 670057 - DNA, 15 bp, Homo sapiens
tgaactccctggggg

SEQ ID NO: 670058 - DNA, 15 bp, Homo sapiens
gaactccctggggga

SEQ ID NO: 670059 - DNA, 15 bp, Homo sapiens
aactccctgggggag

SEQ ID NO: 670060 - DNA, 15 bp, Homo sapiens
actccctgggggaga

SEQ ID NO: 670061 - DNA, 15 bp, Homo sapiens
ctccctgggggagaa

SEQ ID NO: 670062 - DNA, 15 bp, Homo sapiens
tccctgggggagaac

SEQ ID NO: 670063 - DNA, 15 bp, Homo sapiens
ccctgggggagaacc

SEQ ID NO: 670064 - DNA, 15 bp, Homo sapiens
cctgggggagaacct

SEQ ID NO: 670065 - DNA, 15 bp, Homo sapiens
ctgggggagaacctg

SEQ ID NO: 670066 - DNA, 15 bp, Homo sapiens
tgggggagaacctga

SEQ ID NO: 670067 - DNA, 15 bp, Homo sapiens
gggggagaacctgaa

SEQ ID NO: 670068 - DNA, 15 bp, Homo sapiens
ggggagaacctgaag

SEQ ID NO: 670069 - DNA, 15 bp, Homo sapiens
gggagaacctgaaga

SEQ ID NO: 670070 - DNA, 15 bp, Homo sapiens
ggagaacctgaagac

SEQ ID NO: 670071 - DNA, 15 bp, Homo sapiens
gagaacctgaagacc

SEQ ID NO: 670072 - DNA, 15 bp, Homo sapiens
agaacctgaagaccc

SEQ ID NO: 670073 - DNA, 15 bp, Homo sapiens
gaacctgaagaccct

SEQ ID NO: 670074 - DNA, 15 bp, Homo sapiens
aacctgaagaccctc

SEQ ID NO: 670075 - DNA, 15 bp, Homo sapiens
acctgaagaccctca

SEQ ID NO: 670076 - DNA, 15 bp, Homo sapiens
cctgaagaccctcag

SEQ ID NO: 670077 - DNA, 15 bp, Homo sapiens
ctgaagaccctcagg

SEQ ID NO: 670078 - DNA, 15 bp, Homo sapiens
tgaagaccctcaggc

SEQ ID NO: 670079 - DNA, 15 bp, Homo sapiens
gaagaccctcaggct

SEQ ID NO: 670080 - DNA, 15 bp, Homo sapiens
aagaccctcaggctg

SEQ ID NO: 670081 - DNA, 15 bp, Homo sapiens
agaccctcaggctga

SEQ ID NO: 670082 - DNA, 15 bp, Homo sapiens
gaccctcaggctgag

SEQ ID NO: 670083 - DNA, 15 bp, Homo sapiens
accctcaggctgagg

SEQ ID NO: 670084 - DNA, 15 bp, Homo sapiens
ccctcaggctgaggc

SEQ ID NO: 670085 - DNA, 15 bp, Homo sapiens
cctcaggctgaggct

SEQ ID NO: 670086 - DNA, 15 bp, Homo sapiens
ctcaggctgaggcta

SEQ ID NO: 670087 - DNA, 15 bp, Homo sapiens
tcaggctgaggctac

SEQ ID NO: 670088 - DNA, 15 bp, Homo sapiens
caggctgaggctacg

SEQ ID NO: 670089 - DNA, 15 bp, Homo sapiens
aggctgaggctacgg

SEQ ID NO: 670090 - DNA, 15 bp, Homo sapiens
ggctgaggctacggc

SEQ ID NO: 670091 - DNA, 15 bp, Homo sapiens
gctgaggctacggcg

SEQ ID NO: 670092 - DNA, 15 bp, Homo sapiens
ctgaggctacggcgc

SEQ ID NO: 670093 - DNA, 15 bp, Homo sapiens
tgaggctacggcgct

SEQ ID NO: 670094 - DNA, 15 bp, Homo sapiens
gaggctacggcgctg

SEQ ID NO: 670095 - DNA, 15 bp, Homo sapiens
aggctacggcgctgt

SEQ ID NO: 670096 - DNA, 15 bp, Homo sapiens
ggctacggcgctgtg

SEQ ID NO: 670097 - DNA, 15 bp, Homo sapiens
gctacggcgctgtgt

SEQ ID NO: 670098 - DNA, 15 bp, Homo sapiens
ctacggcgctgtgta

SEQ ID NO: 670099 - DNA, 15 bp, Homo sapiens
tacggcgctgtgtaa

SEQ ID NO: 670100 - DNA, 15 bp, Homo sapiens
acggcgctgtgtaag

SEQ ID NO: 670101 - DNA, 15 bp, Homo sapiens
cggcgctgtgtaagt

SEQ ID NO: 670102 - DNA, 15 bp, Homo sapiens
ggcgctgtgtaagta

SEQ ID NO: 670103 - DNA, 15 bp, Homo sapiens
gcgctgtgtaagtag

SEQ ID NO: 670104 - DNA, 15 bp, Homo sapiens
cgctgtgtaagtagc

SEQ ID NO: 670105 - DNA, 15 bp, Homo sapiens
gctgtgtaagtagca

SEQ ID NO: 670106 - DNA, 15 bp, Homo sapiens
ctgtgtaagtagcag

SEQ ID NO: 670107 - DNA, 15 bp, Homo sapiens
tgtgtaagtagcaga

SEQ ID NO: 670108 - DNA, 15 bp, Homo sapiens
gtgtaagtagcagat

SEQ ID NO: 670109 - DNA, 15 bp, Homo sapiens
tgtaagtagcagatc

SEQ ID NO: 670110 - DNA, 15 bp, Homo sapiens
gtaagtagcagatca

SEQ ID NO: 670111 - DNA, 15 bp, Homo sapiens
taagtagcagatcag

SEQ ID NO: 670112 - DNA, 15 bp, Homo sapiens
aagtagcagatcagt

SEQ ID NO: 670113 - DNA, 15 bp, Homo sapiens
agtagcagatcagtt

SEQ ID NO: 670114 - DNA, 15 bp, Homo sapiens
gtagcagatcagttt

SEQ ID NO: 670115 - DNA, 15 bp, Homo sapiens
tagcagatcagtttt

SEQ ID NO: 670116 - DNA, 15 bp, Homo sapiens
agcagatcagttttt

SEQ ID NO: 670117 - DNA, 15 bp, Homo sapiens
gcagatcagtttttt

SEQ ID NO: 670118 - DNA, 15 bp, Homo sapiens
cagatcagttttttc

SEQ ID NO: 670119 - DNA, 15 bp, Homo sapiens
agatcagttttttcc

SEQ ID NO: 670120 - DNA, 15 bp, Homo sapiens
gatcagttttttccc

SEQ ID NO: 670121 - DNA, 15 bp, Homo sapiens
atcagttttttccct

SEQ ID NO: 670122 - DNA, 15 bp, Homo sapiens
tcagttttttccctt

SEQ ID NO: 670123 - DNA, 15 bp, Homo sapiens
cagttttttcccttg

SEQ ID NO: 670124 - DNA, 15 bp, Homo sapiens
agttttttcccttgc

SEQ ID NO: 670125 - DNA, 15 bp, Homo sapiens
gttttttcccttgca

SEQ ID NO: 670126 - DNA, 15 bp, Homo sapiens
ttttttcccttgcag

SEQ ID NO: 670127 - DNA, 15 bp, Homo sapiens
tttttcccttgcagc

SEQ ID NO: 670128 - DNA, 15 bp, Homo sapiens
ttttcccttgcagct

SEQ ID NO: 670129 - DNA, 15 bp, Homo sapiens
tttcccttgcagctg

SEQ ID NO: 670130 - DNA, 15 bp, Homo sapiens
ttcccttgcagctgc

SEQ ID NO: 670131 - DNA, 15 bp, Homo sapiens
tcccttgcagctgcc

SEQ ID NO: 670132 - DNA, 15 bp, Homo sapiens
cccttgcagctgccc

SEQ ID NO: 670133 - DNA, 15 bp, Homo sapiens
ccttgcagctgcccc

SEQ ID NO: 670134 - DNA, 15 bp, Homo sapiens
cttgcagctgccccc

SEQ ID NO: 670135 - DNA, 15 bp, Homo sapiens
ttgcagctgccccca

SEQ ID NO: 670136 - DNA, 15 bp, Homo sapiens
tgcagctgcccccaa

SEQ ID NO: 670137 - DNA, 15 bp, Homo sapiens
gcagctgcccccaaa

SEQ ID NO: 670138 - DNA, 15 bp, Homo sapiens
cagctgcccccaaaa

SEQ ID NO: 670139 - DNA, 15 bp, Homo sapiens
agctgcccccaaaat

SEQ ID NO: 670140 - DNA, 15 bp, Homo sapiens
gctgcccccaaaata

SEQ ID NO: 670141 - DNA, 15 bp, Homo sapiens
ctgcccccaaaatac

SEQ ID NO: 670142 - DNA, 15 bp, Homo sapiens
tgcccccaaaatacc

SEQ ID NO: 670143 - DNA, 15 bp, Homo sapiens
gcccccaaaatacca

SEQ ID NO: 670144 - DNA, 15 bp, Homo sapiens
cccccaaaataccat

SEQ ID NO: 670145 - DNA, 15 bp, Homo sapiens
ccccaaaataccatc

SEQ ID NO: 670146 - DNA, 15 bp, Homo sapiens
cccaaaataccatct

SEQ ID NO: 670147 - DNA, 15 bp, Homo sapiens
ccaaaataccatctc

SEQ ID NO: 670148 - DNA, 15 bp, Homo sapiens
caaaataccatctcc

SEQ ID NO: 670149 - DNA, 15 bp, Homo sapiens
aaaataccatctcct

SEQ ID NO: 670150 - DNA, 15 bp, Homo sapiens
aaataccatctccta

SEQ ID NO: 670151 - DNA, 15 bp, Homo sapiens
aataccatctcctac

SEQ ID NO: 670152 - DNA, 15 bp, Homo sapiens
ataccatctcctaca

SEQ ID NO: 670153 - DNA, 15 bp, Homo sapiens
taccatctcctacag

SEQ ID NO: 670154 - DNA, 15 bp, Homo sapiens
accatctcctacaga

SEQ ID NO: 670155 - DNA, 15 bp, Homo sapiens
ccatctcctacagac

SEQ ID NO: 670156 - DNA, 15 bp, Homo sapiens
catctcctacagacc

SEQ ID NO: 670157 - DNA, 15 bp, Homo sapiens
atctcctacagacca

SEQ ID NO: 670158 - DNA, 15 bp, Homo sapiens
tctcctacagaccag

SEQ ID NO: 670159 - DNA, 15 bp, Homo sapiens
ctcctacagaccagc

SEQ ID NO: 670160 - DNA, 15 bp, Homo sapiens
tcctacagaccagca

SEQ ID NO: 670161 - DNA, 15 bp, Homo sapiens
cctacagaccagcag

SEQ ID NO: 670162 - DNA, 15 bp, Homo sapiens
ctacagaccagcagg

SEQ ID NO: 670163 - DNA, 15 bp, Homo sapiens
tacagaccagcaggg

SEQ ID NO: 670164 - DNA, 15 bp, Homo sapiens
acagaccagcaggga

SEQ ID NO: 670165 - DNA, 15 bp, Homo sapiens
cagaccagcagggac

SEQ ID NO: 670166 - DNA, 15 bp, Homo sapiens
agaccagcagggaca

SEQ ID NO: 670167 - DNA, 15 bp, Homo sapiens
gaccagcagggacac

SEQ ID NO: 670168 - DNA, 15 bp, Homo sapiens
accagcagggacact

SEQ ID NO: 670169 - DNA, 15 bp, Homo sapiens
ccagcagggacactc

SEQ ID NO: 670170 - DNA, 15 bp, Homo sapiens
cagcagggacactca

SEQ ID NO: 670171 - DNA, 15 bp, Homo sapiens
agcagggacactcac

SEQ ID NO: 670172 - DNA, 15 bp, Homo sapiens
gcagggacactcaca

SEQ ID NO: 670173 - DNA, 15 bp, Homo sapiens
cagggacactcacat

SEQ ID NO: 670174 - DNA, 15 bp, Homo sapiens
agggacactcacatc

SEQ ID NO: 670175 - DNA, 15 bp, Homo sapiens
gggacactcacatcc

SEQ ID NO: 670176 - DNA, 15 bp, Homo sapiens
ggacactcacatcca

SEQ ID NO: 670177 - DNA, 15 bp, Homo sapiens
gacactcacatccac

SEQ ID NO: 670178 - DNA, 15 bp, Homo sapiens
acactcacatccaca

SEQ ID NO: 670179 - DNA, 15 bp, Homo sapiens
cactcacatccacag

SEQ ID NO: 670180 - DNA, 15 bp, Homo sapiens
actcacatccacaga

SEQ ID NO: 670181 - DNA, 15 bp, Homo sapiens
ctcacatccacagac

SEQ ID NO: 670182 - DNA, 15 bp, Homo sapiens
tcacatccacagaca

SEQ ID NO: 670183 - DNA, 15 bp, Homo sapiens
cacatccacagacac

SEQ ID NO: 670184 - DNA, 15 bp, Homo sapiens
acatccacagacaca

SEQ ID NO: 670185 - DNA, 15 bp, Homo sapiens
catccacagacacag

SEQ ID NO: 670186 - DNA, 15 bp, Homo sapiens
atccacagacacagc

SEQ ID NO: 670187 - DNA, 15 bp, Homo sapiens
tccacagacacagca

SEQ ID NO: 670188 - DNA, 15 bp, Homo sapiens
ccacagacacagcaa

SEQ ID NO: 670189 - DNA, 15 bp, Homo sapiens
cacagacacagcaaa

SEQ ID NO: 670190 - DNA, 15 bp, Homo sapiens
acagacacagcaaag

SEQ ID NO: 670191 - DNA, 15 bp, Homo sapiens
cagacacagcaaaga

SEQ ID NO: 670192 - DNA, 15 bp, Homo sapiens
agacacagcaaagac

SEQ ID NO: 670193 - DNA, 15 bp, Homo sapiens
gacacagcaaagaca

SEQ ID NO: 670194 - DNA, 15 bp, Homo sapiens
acacagcaaagacac

SEQ ID NO: 670195 - DNA, 15 bp, Homo sapiens
cacagcaaagacaca

SEQ ID NO: 670196 - DNA, 15 bp, Homo sapiens
acagcaaagacacag

SEQ ID NO: 670197 - DNA, 15 bp, Homo sapiens
cagcaaagacacaga

SEQ ID NO: 670198 - DNA, 15 bp, Homo sapiens
agcaaagacacagac

SEQ ID NO: 670199 - DNA, 15 bp, Homo sapiens
gcaaagacacagact

SEQ ID NO: 670200 - DNA, 15 bp, Homo sapiens
caaagacacagactg

SEQ ID NO: 670201 - DNA, 15 bp, Homo sapiens
aaagacacagactgg

SEQ ID NO: 670202 - DNA, 15 bp, Homo sapiens
aagacacagactggc

SEQ ID NO: 670203 - DNA, 15 bp, Homo sapiens
agacacagactggca

SEQ ID NO: 670204 - DNA, 15 bp, Homo sapiens
gacacagactggcag

SEQ ID NO: 670205 - DNA, 15 bp, Homo sapiens
acacagactggcaga

SEQ ID NO: 670206 - DNA, 15 bp, Homo sapiens
cacagactggcagag

SEQ ID NO: 670207 - DNA, 15 bp, Homo sapiens
acagactggcagagc

SEQ ID NO: 670208 - DNA, 15 bp, Homo sapiens
cagactggcagagct

SEQ ID NO: 670209 - DNA, 15 bp, Homo sapiens
agactggcagagcta

SEQ ID NO: 670210 - DNA, 15 bp, Homo sapiens
gactggcagagctag

SEQ ID NO: 670211 - DNA, 15 bp, Homo sapiens
actggcagagctagc

SEQ ID NO: 670212 - DNA, 15 bp, Homo sapiens
ctggcagagctagct

SEQ ID NO: 670213 - DNA, 15 bp, Homo sapiens
tggcagagctagctg

SEQ ID NO: 670214 - DNA, 15 bp, Homo sapiens
ggcagagctagctgt

SEQ ID NO: 670215 - DNA, 15 bp, Homo sapiens
gcagagctagctgta

SEQ ID NO: 670216 - DNA, 15 bp, Homo sapiens
cagagctagctgtaa

SEQ ID NO: 670217 - DNA, 15 bp, Homo sapiens
agagctagctgtaaa

SEQ ID NO: 670218 - DNA, 15 bp, Homo sapiens
gagctagctgtaaat

SEQ ID NO: 670219 - DNA, 15 bp, Homo sapiens
agctagctgtaaatg

SEQ ID NO: 670220 - DNA, 15 bp, Homo sapiens
gctagctgtaaatga

SEQ ID NO: 670221 - DNA, 15 bp, Homo sapiens
ctagctgtaaatgag

SEQ ID NO: 670222 - DNA, 15 bp, Homo sapiens
tagctgtaaatgagg

SEQ ID NO: 670223 - DNA, 15 bp, Homo sapiens
agctgtaaatgagga

SEQ ID NO: 670224 - DNA, 15 bp, Homo sapiens
gctgtaaatgaggaa

SEQ ID NO: 670225 - DNA, 15 bp, Homo sapiens
ctgtaaatgaggaaa

SEQ ID NO: 670226 - DNA, 15 bp, Homo sapiens
tgtaaatgaggaaag

SEQ ID NO: 670227 - DNA, 15 bp, Homo sapiens
gtaaatgaggaaaga

SEQ ID NO: 670228 - DNA, 15 bp, Homo sapiens
taaatgaggaaagac

SEQ ID NO: 670229 - DNA, 15 bp, Homo sapiens
aaatgaggaaagact

SEQ ID NO: 670230 - DNA, 15 bp, Homo sapiens
aatgaggaaagactc

SEQ ID NO: 670231 - DNA, 15 bp, Homo sapiens
atgaggaaagactcc

SEQ ID NO: 670232 - DNA, 15 bp, Homo sapiens
tgaggaaagactcct

SEQ ID NO: 670233 - DNA, 15 bp, Homo sapiens
gaggaaagactcctg

SEQ ID NO: 670234 - DNA, 15 bp, Homo sapiens
aggaaagactcctgg

SEQ ID NO: 670235 - DNA, 15 bp, Homo sapiens
ggaaagactcctgga

SEQ ID NO: 670236 - DNA, 15 bp, Homo sapiens
gaaagactcctggag

SEQ ID NO: 670237 - DNA, 15 bp, Homo sapiens
aaagactcctggagt

SEQ ID NO: 670238 - DNA, 15 bp, Homo sapiens
aagactcctggagtc

SEQ ID NO: 670239 - DNA, 15 bp, Homo sapiens
agactcctggagtca

SEQ ID NO: 670240 - DNA, 15 bp, Homo sapiens
gactcctggagtcag

SEQ ID NO: 670241 - DNA, 15 bp, Homo sapiens
actcctggagtcaga

SEQ ID NO: 670242 - DNA, 15 bp, Homo sapiens
ctcctggagtcagat

SEQ ID NO: 670243 - DNA, 15 bp, Homo sapiens
tcctggagtcagatc

SEQ ID NO: 670244 - DNA, 15 bp, Homo sapiens
cctggagtcagatct

SEQ ID NO: 670245 - DNA, 15 bp, Homo sapiens
ctggagtcagatctc

SEQ ID NO: 670246 - DNA, 15 bp, Homo sapiens
tggagtcagatctct

SEQ ID NO: 670247 - DNA, 15 bp, Homo sapiens
ggagtcagatctctt

SEQ ID NO: 670248 - DNA, 15 bp, Homo sapiens
gagtcagatctcttg

SEQ ID NO: 670249 - DNA, 15 bp, Homo sapiens
agtcagatctcttgc

SEQ ID NO: 670250 - DNA, 15 bp, Homo sapiens
gtcagatctcttgct

SEQ ID NO: 670251 - DNA, 15 bp, Homo sapiens
tcagatctcttgctc

SEQ ID NO: 670252 - DNA, 15 bp, Homo sapiens
cagatctcttgctca

SEQ ID NO: 670253 - DNA, 15 bp, Homo sapiens
agatctcttgctcat

SEQ ID NO: 670254 - DNA, 15 bp, Homo sapiens
gatctcttgctcatt

SEQ ID NO: 670255 - DNA, 15 bp, Homo sapiens
atctcttgctcattt

SEQ ID NO: 670256 - DNA, 15 bp, Homo sapiens
tctcttgctcatttc

SEQ ID NO: 670257 - DNA, 15 bp, Homo sapiens
ctcttgctcatttct

SEQ ID NO: 670258 - DNA, 15 bp, Homo sapiens
tcttgctcatttctc

SEQ ID NO: 670259 - DNA, 15 bp, Homo sapiens
cttgctcatttctct

SEQ ID NO: 670260 - DNA, 15 bp, Homo sapiens
ttgctcatttctctt

SEQ ID NO: 670261 - DNA, 15 bp, Homo sapiens
tgctcatttctcttt

SEQ ID NO: 670262 - DNA, 15 bp, Homo sapiens
gctcatttctctttg

SEQ ID NO: 670263 - DNA, 15 bp, Homo sapiens
ctcatttctctttga

SEQ ID NO: 670264 - DNA, 15 bp, Homo sapiens
tcatttctctttgag

SEQ ID NO: 670265 - DNA, 15 bp, Homo sapiens
catttctctttgagc

SEQ ID NO: 670266 - DNA, 15 bp, Homo sapiens
atttctctttgagca

SEQ ID NO: 670267 - DNA, 15 bp, Homo sapiens
tttctctttgagcag

SEQ ID NO: 670268 - DNA, 15 bp, Homo sapiens
ttctctttgagcagg

SEQ ID NO: 670269 - DNA, 15 bp, Homo sapiens
tctctttgagcaggc

SEQ ID NO: 670270 - DNA, 15 bp, Homo sapiens
ctctttgagcaggcg

SEQ ID NO: 670271 - DNA, 15 bp, Homo sapiens
tctttgagcaggcgt

SEQ ID NO: 670272 - DNA, 15 bp, Homo sapiens
ctttgagcaggcgtt

SEQ ID NO: 670273 - DNA, 15 bp, Homo sapiens
tttgagcaggcgttg

SEQ ID NO: 670274 - DNA, 15 bp, Homo sapiens
ttgagcaggcgttgg

SEQ ID NO: 670275 - DNA, 15 bp, Homo sapiens
tgagcaggcgttggg

SEQ ID NO: 670276 - DNA, 15 bp, Homo sapiens
gagcaggcgttgggg

SEQ ID NO: 670277 - DNA, 15 bp, Homo sapiens
agcaggcgttggggg

SEQ ID NO: 670278 - DNA, 15 bp, Homo sapiens
gcaggcgttgggggt

SEQ ID NO: 670279 - DNA, 15 bp, Homo sapiens
caggcgttgggggtg

SEQ ID NO: 670280 - DNA, 15 bp, Homo sapiens
aggcgttgggggtgg

SEQ ID NO: 670281 - DNA, 15 bp, Homo sapiens
ggcgttgggggtggc

SEQ ID NO: 670282 - DNA, 15 bp, Homo sapiens
gcgttgggggtggct

SEQ ID NO: 670283 - DNA, 15 bp, Homo sapiens
cgttgggggtggctg

SEQ ID NO: 670284 - DNA, 15 bp, Homo sapiens
gttgggggtggctgc

SEQ ID NO: 670285 - DNA, 15 bp, Homo sapiens
ttgggggtggctgct

SEQ ID NO: 670286 - DNA, 15 bp, Homo sapiens
tgggggtggctgcta

SEQ ID NO: 670287 - DNA, 15 bp, Homo sapiens
gggggtggctgctag

SEQ ID NO: 670288 - DNA, 15 bp, Homo sapiens
ggggtggctgctagg

SEQ ID NO: 670289 - DNA, 15 bp, Homo sapiens
gggtggctgctaggc

SEQ ID NO: 670290 - DNA, 15 bp, Homo sapiens
ggtggctgctaggca

SEQ ID NO: 670291 - DNA, 15 bp, Homo sapiens
gtggctgctaggcat

SEQ ID NO: 670292 - DNA, 15 bp, Homo sapiens
tggctgctaggcatt

SEQ ID NO: 670293 - DNA, 15 bp, Homo sapiens
ggctgctaggcattt

SEQ ID NO: 670294 - DNA, 15 bp, Homo sapiens
gctgctaggcattta

SEQ ID NO: 670295 - DNA, 15 bp, Homo sapiens
ctgctaggcatttac

SEQ ID NO: 670296 - DNA, 15 bp, Homo sapiens
tgctaggcatttaca

SEQ ID NO: 670297 - DNA, 15 bp, Homo sapiens
gctaggcatttacat

SEQ ID NO: 670298 - DNA, 15 bp, Homo sapiens
ctaggcatttacatg

SEQ ID NO: 670299 - DNA, 15 bp, Homo sapiens
taggcatttacatgt

SEQ ID NO: 670300 - DNA, 15 bp, Homo sapiens
aggcatttacatgtg

SEQ ID NO: 670301 - DNA, 15 bp, Homo sapiens
ggcatttacatgtga

SEQ ID NO: 670302 - DNA, 15 bp, Homo sapiens
gcatttacatgtgaa

SEQ ID NO: 670303 - DNA, 15 bp, Homo sapiens
catttacatgtgaaa

SEQ ID NO: 670304 - DNA, 15 bp, Homo sapiens
atttacatgtgaaat

SEQ ID NO: 670305 - DNA, 15 bp, Homo sapiens
tttacatgtgaaatt

SEQ ID NO: 670306 - DNA, 15 bp, Homo sapiens
ttacatgtgaaattt

SEQ ID NO: 670307 - DNA, 15 bp, Homo sapiens
tacatgtgaaatttg

SEQ ID NO: 670308 - DNA, 15 bp, Homo sapiens
acatgtgaaatttgc

SEQ ID NO: 670309 - DNA, 15 bp, Homo sapiens
catgtgaaatttgca

SEQ ID NO: 670310 - DNA, 15 bp, Homo sapiens
atgtgaaatttgcaa

SEQ ID NO: 670311 - DNA, 15 bp, Homo sapiens
tgtgaaatttgcaaa

SEQ ID NO: 670312 - DNA, 15 bp, Homo sapiens
gtgaaatttgcaaac

SEQ ID NO: 670313 - DNA, 15 bp, Homo sapiens
tgaaatttgcaaaca

SEQ ID NO: 670314 - DNA, 15 bp, Homo sapiens
gaaatttgcaaacag

SEQ ID NO: 670315 - DNA, 15 bp, Homo sapiens
aaatttgcaaacagc

SEQ ID NO: 670316 - DNA, 15 bp, Homo sapiens
aatttgcaaacagct

SEQ ID NO: 670317 - DNA, 15 bp, Homo sapiens
atttgcaaacagctt

SEQ ID NO: 670318 - DNA, 15 bp, Homo sapiens
tttgcaaacagcttt

SEQ ID NO: 670319 - DNA, 15 bp, Homo sapiens
ttgcaaacagctttc

SEQ ID NO: 670320 - DNA, 15 bp, Homo sapiens
tgcaaacagctttcc

SEQ ID NO: 670321 - DNA, 15 bp, Homo sapiens
gcaaacagctttcct

SEQ ID NO: 670322 - DNA, 15 bp, Homo sapiens
caaacagctttcctg

SEQ ID NO: 670323 - DNA, 15 bp, Homo sapiens
aaacagctttcctgt

SEQ ID NO: 670324 - DNA, 15 bp, Homo sapiens
aacagctttcctgtt

SEQ ID NO: 670325 - DNA, 15 bp, Homo sapiens
acagctttcctgtta

SEQ ID NO: 670326 - DNA, 15 bp, Homo sapiens
cagctttcctgttat

SEQ ID NO: 670327 - DNA, 15 bp, Homo sapiens
agctttcctgttatt

SEQ ID NO: 670328 - DNA, 15 bp, Homo sapiens
gctttcctgttattt

SEQ ID NO: 670329 - DNA, 15 bp, Homo sapiens
ctttcctgttatttg

SEQ ID NO: 670330 - DNA, 15 bp, Homo sapiens
tttcctgttatttgt

SEQ ID NO: 670331 - DNA, 15 bp, Homo sapiens
ttcctgttatttgtg

SEQ ID NO: 670332 - DNA, 15 bp, Homo sapiens
tcctgttatttgtga

SEQ ID NO: 670333 - DNA, 15 bp, Homo sapiens
cctgttatttgtgag

SEQ ID NO: 670334 - DNA, 15 bp, Homo sapiens
ctgttatttgtgagt

SEQ ID NO: 670335 - DNA, 15 bp, Homo sapiens
tgttatttgtgagtc

SEQ ID NO: 670336 - DNA, 15 bp, Homo sapiens
gttatttgtgagtca

SEQ ID NO: 670337 - DNA, 15 bp, Homo sapiens
ttatttgtgagtcat

SEQ ID NO: 670338 - DNA, 15 bp, Homo sapiens
tatttgtgagtcatt

SEQ ID NO: 670339 - DNA, 15 bp, Homo sapiens
atttgtgagtcattt

SEQ ID NO: 670340 - DNA, 15 bp, Homo sapiens
tttgtgagtcatttg

SEQ ID NO: 670341 - DNA, 15 bp, Homo sapiens
ttgtgagtcatttgt

SEQ ID NO: 670342 - DNA, 15 bp, Homo sapiens
tgtgagtcatttgtg

SEQ ID NO: 670343 - DNA, 15 bp, Homo sapiens
gtgagtcatttgtgg

SEQ ID NO: 670344 - DNA, 15 bp, Homo sapiens
tgagtcatttgtggg

SEQ ID NO: 670345 - DNA, 15 bp, Homo sapiens
gagtcatttgtgggt

SEQ ID NO: 670346 - DNA, 15 bp, Homo sapiens
agtcatttgtgggtt

SEQ ID NO: 670347 - DNA, 15 bp, Homo sapiens
gtcatttgtgggtta

SEQ ID NO: 670348 - DNA, 15 bp, Homo sapiens
tcatttgtgggttat

SEQ ID NO: 670349 - DNA, 15 bp, Homo sapiens
catttgtgggttatt

SEQ ID NO: 670350 - DNA, 15 bp, Homo sapiens
atttgtgggttatta

SEQ ID NO: 670351 - DNA, 15 bp, Homo sapiens
tttgtgggttattaa

SEQ ID NO: 670352 - DNA, 15 bp, Homo sapiens
ttgtgggttattaac

SEQ ID NO: 670353 - DNA, 15 bp, Homo sapiens
tgtgggttattaact

SEQ ID NO: 670354 - DNA, 15 bp, Homo sapiens
gtgggttattaacta

SEQ ID NO: 670355 - DNA, 15 bp, Homo sapiens
tgggttattaactac

SEQ ID NO: 670356 - DNA, 15 bp, Homo sapiens
gggttattaactact

SEQ ID NO: 670357 - DNA, 15 bp, Homo sapiens
ggttattaactactc

SEQ ID NO: 670358 - DNA, 15 bp, Homo sapiens
gttattaactactcc

SEQ ID NO: 670359 - DNA, 15 bp, Homo sapiens
ttattaactactccc

SEQ ID NO: 670360 - DNA, 15 bp, Homo sapiens
tattaactactcccc

SEQ ID NO: 670361 - DNA, 15 bp, Homo sapiens
attaactactcccct

SEQ ID NO: 670362 - DNA, 15 bp, Homo sapiens
ttaactactcccctc

SEQ ID NO: 670363 - DNA, 15 bp, Homo sapiens
taactactcccctct

SEQ ID NO: 670364 - DNA, 15 bp, Homo sapiens
aactactcccctctc

SEQ ID NO: 670365 - DNA, 15 bp, Homo sapiens
actactcccctctct

SEQ ID NO: 670366 - DNA, 15 bp, Homo sapiens
ctactcccctctctc

SEQ ID NO: 670367 - DNA, 15 bp, Homo sapiens
tactcccctctctct

SEQ ID NO: 670368 - DNA, 15 bp, Homo sapiens
actcccctctctctt

SEQ ID NO: 670369 - DNA, 15 bp, Homo sapiens
ctcccctctctcttc

SEQ ID NO: 670370 - DNA, 15 bp, Homo sapiens
tcccctctctcttca

SEQ ID NO: 670371 - DNA, 15 bp, Homo sapiens
cccctctctcttcat

SEQ ID NO: 670372 - DNA, 15 bp, Homo sapiens
ccctctctcttcata

SEQ ID NO: 670373 - DNA, 15 bp, Homo sapiens
cctctctcttcataa

SEQ ID NO: 670374 - DNA, 15 bp, Homo sapiens
ctctctcttcataaa

SEQ ID NO: 670375 - DNA, 15 bp, Homo sapiens
tctctcttcataaaa

SEQ ID NO: 670376 - DNA, 15 bp, Homo sapiens
ctctcttcataaaag

SEQ ID NO: 670377 - DNA, 15 bp, Homo sapiens
tctcttcataaaagg

SEQ ID NO: 670378 - DNA, 15 bp, Homo sapiens
ctcttcataaaagga

SEQ ID NO: 670379 - DNA, 15 bp, Homo sapiens
tcttcataaaaggag

SEQ ID NO: 670380 - DNA, 15 bp, Homo sapiens
cttcataaaaggagc

SEQ ID NO: 670381 - DNA, 15 bp, Homo sapiens
ttcataaaaggagcc

SEQ ID NO: 670382 - DNA, 15 bp, Homo sapiens
tcataaaaggagccc

SEQ ID NO: 670383 - DNA, 15 bp, Homo sapiens
cataaaaggagccca

SEQ ID NO: 670384 - DNA, 15 bp, Homo sapiens
ataaaaggagcccag

SEQ ID NO: 670385 - DNA, 15 bp, Homo sapiens
taaaaggagcccaga

SEQ ID NO: 670386 - DNA, 15 bp, Homo sapiens
aaaaggagcccagag

SEQ ID NO: 670387 - DNA, 15 bp, Homo sapiens
aaaggagcccagagc

SEQ ID NO: 670388 - DNA, 15 bp, Homo sapiens
aaggagcccagagct

SEQ ID NO: 670389 - DNA, 15 bp, Homo sapiens
aggagcccagagctt

SEQ ID NO: 670390 - DNA, 15 bp, Homo sapiens
ggagcccagagcttc

SEQ ID NO: 670391 - DNA, 15 bp, Homo sapiens
gagcccagagcttca

SEQ ID NO: 670392 - DNA, 15 bp, Homo sapiens
agcccagagcttcag

SEQ ID NO: 670393 - DNA, 15 bp, Homo sapiens
gcccagagcttcagt

SEQ ID NO: 670394 - DNA, 15 bp, Homo sapiens
cccagagcttcagtc

SEQ ID NO: 670395 - DNA, 15 bp, Homo sapiens
ccagagcttcagtca

SEQ ID NO: 670396 - DNA, 15 bp, Homo sapiens
cagagcttcagtcag

SEQ ID NO: 670397 - DNA, 15 bp, Homo sapiens
agagcttcagtcagg

SEQ ID NO: 670398 - DNA, 15 bp, Homo sapiens
gagcttcagtcaggc

SEQ ID NO: 670399 - DNA, 15 bp, Homo sapiens
agcttcagtcaggcc

SEQ ID NO: 670400 - DNA, 15 bp, Homo sapiens
gcttcagtcaggcct

SEQ ID NO: 670401 - DNA, 15 bp, Homo sapiens
cttcagtcaggcctc

SEQ ID NO: 670402 - DNA, 15 bp, Homo sapiens
ttcagtcaggcctcc

SEQ ID NO: 670403 - DNA, 15 bp, Homo sapiens
tcagtcaggcctcca

SEQ ID NO: 670404 - DNA, 15 bp, Homo sapiens
cagtcaggcctccac

SEQ ID NO: 670405 - DNA, 15 bp, Homo sapiens
agtcaggcctccact

SEQ ID NO: 670406 - DNA, 15 bp, Homo sapiens
gtcaggcctccactg

SEQ ID NO: 670407 - DNA, 15 bp, Homo sapiens
tcaggcctccactgc

SEQ ID NO: 670408 - DNA, 15 bp, Homo sapiens
caggcctccactgcc

SEQ ID NO: 670409 - DNA, 15 bp, Homo sapiens
aggcctccactgcct

SEQ ID NO: 670410 - DNA, 15 bp, Homo sapiens
ggcctccactgcctc

SEQ ID NO: 670411 - DNA, 15 bp, Homo sapiens
gcctccactgcctct

SEQ ID NO: 670412 - DNA, 15 bp, Homo sapiens
cctccactgcctctt

SEQ ID NO: 670413 - DNA, 15 bp, Homo sapiens
ctccactgcctcttt

SEQ ID NO: 670414 - DNA, 15 bp, Homo sapiens
tccactgcctctttg

SEQ ID NO: 670415 - DNA, 15 bp, Homo sapiens
ccactgcctctttgt

SEQ ID NO: 670416 - DNA, 15 bp, Homo sapiens
cactgcctctttgta

SEQ ID NO: 670417 - DNA, 15 bp, Homo sapiens
actgcctctttgtaa

SEQ ID NO: 670418 - DNA, 15 bp, Homo sapiens
ctgcctctttgtaac

SEQ ID NO: 670419 - DNA, 15 bp, Homo sapiens
tgcctctttgtaact

SEQ ID NO: 670420 - DNA, 15 bp, Homo sapiens
gcctctttgtaacta

SEQ ID NO: 670421 - DNA, 15 bp, Homo sapiens
cctctttgtaactag

SEQ ID NO: 670422 - DNA, 15 bp, Homo sapiens
ctctttgtaactaga

SEQ ID NO: 670423 - DNA, 15 bp, Homo sapiens
tctttgtaactagac

SEQ ID NO: 670424 - DNA, 15 bp, Homo sapiens
ctttgtaactagacc

SEQ ID NO: 670425 - DNA, 15 bp, Homo sapiens
tttgtaactagaccc

SEQ ID NO: 670426 - DNA, 15 bp, Homo sapiens
ttgtaactagaccct

SEQ ID NO: 670427 - DNA, 15 bp, Homo sapiens
tgtaactagaccctg

SEQ ID NO: 670428 - DNA, 15 bp, Homo sapiens
gtaactagaccctgg

SEQ ID NO: 670429 - DNA, 15 bp, Homo sapiens
taactagaccctggg

SEQ ID NO: 670430 - DNA, 15 bp, Homo sapiens
aactagaccctgggc

SEQ ID NO: 670431 - DNA, 15 bp, Homo sapiens
actagaccctgggcg

SEQ ID NO: 670432 - DNA, 15 bp, Homo sapiens
ctagaccctgggcgg

SEQ ID NO: 670433 - DNA, 15 bp, Homo sapiens
tagaccctgggcggg

SEQ ID NO: 670434 - DNA, 15 bp, Homo sapiens
agaccctgggcgggg

SEQ ID NO: 670435 - DNA, 15 bp, Homo sapiens
gaccctgggcgggga

SEQ ID NO: 670436 - DNA, 15 bp, Homo sapiens
accctgggcggggag

SEQ ID NO: 670437 - DNA, 15 bp, Homo sapiens
ccctgggcggggagc

SEQ ID NO: 670438 - DNA, 15 bp, Homo sapiens
cctgggcggggagct

SEQ ID NO: 670439 - DNA, 15 bp, Homo sapiens
ctgggcggggagcta

SEQ ID NO: 670440 - DNA, 15 bp, Homo sapiens
tgggcggggagctaa

SEQ ID NO: 670441 - DNA, 15 bp, Homo sapiens
gggcggggagctaag

SEQ ID NO: 670442 - DNA, 15 bp, Homo sapiens
ggcggggagctaagg

SEQ ID NO: 670443 - DNA, 15 bp, Homo sapiens
gcggggagctaaggt

SEQ ID NO: 670444 - DNA, 15 bp, Homo sapiens
cggggagctaaggtt

SEQ ID NO: 670445 - DNA, 15 bp, Homo sapiens
ggggagctaaggttc

SEQ ID NO: 670446 - DNA, 15 bp, Homo sapiens
gggagctaaggttcc

SEQ ID NO: 670447 - DNA, 15 bp, Homo sapiens
ggagctaaggttccc

SEQ ID NO: 670448 - DNA, 15 bp, Homo sapiens
gagctaaggttccca

SEQ ID NO: 670449 - DNA, 15 bp, Homo sapiens
agctaaggttcccaa

SEQ ID NO: 670450 - DNA, 15 bp, Homo sapiens
gctaaggttcccaag

SEQ ID NO: 670451 - DNA, 15 bp, Homo sapiens
ctaaggttcccaagc

SEQ ID NO: 670452 - DNA, 15 bp, Homo sapiens
taaggttcccaagca

SEQ ID NO: 670453 - DNA, 15 bp, Homo sapiens
aaggttcccaagcag

SEQ ID NO: 670454 - DNA, 15 bp, Homo sapiens
aggttcccaagcaga

SEQ ID NO: 670455 - DNA, 15 bp, Homo sapiens
ggttcccaagcagag

SEQ ID NO: 670456 - DNA, 15 bp, Homo sapiens
gttcccaagcagagg

SEQ ID NO: 670457 - DNA, 15 bp, Homo sapiens
ttcccaagcagagga

SEQ ID NO: 670458 - DNA, 15 bp, Homo sapiens
tcccaagcagaggaa

SEQ ID NO: 670459 - DNA, 15 bp, Homo sapiens
cccaagcagaggaaa

SEQ ID NO: 670460 - DNA, 15 bp, Homo sapiens
ccaagcagaggaaac

SEQ ID NO: 670461 - DNA, 15 bp, Homo sapiens
caagcagaggaaaca

SEQ ID NO: 670462 - DNA, 15 bp, Homo sapiens
aagcagaggaaacat

SEQ ID NO: 670463 - DNA, 15 bp, Homo sapiens
agcagaggaaacatc

SEQ ID NO: 670464 - DNA, 15 bp, Homo sapiens
gcagaggaaacatca

SEQ ID NO: 670465 - DNA, 15 bp, Homo sapiens
cagaggaaacatcat

SEQ ID NO: 670466 - DNA, 15 bp, Homo sapiens
agaggaaacatcatt

SEQ ID NO: 670467 - DNA, 15 bp, Homo sapiens
gaggaaacatcattc

SEQ ID NO: 670468 - DNA, 15 bp, Homo sapiens
aggaaacatcattca

SEQ ID NO: 670469 - DNA, 15 bp, Homo sapiens
ggaaacatcattcac

SEQ ID NO: 670470 - DNA, 15 bp, Homo sapiens
gaaacatcattcacc

SEQ ID NO: 670471 - DNA, 15 bp, Homo sapiens
aaacatcattcacct

SEQ ID NO: 670472 - DNA, 15 bp, Homo sapiens
aacatcattcacctc

SEQ ID NO: 670473 - DNA, 15 bp, Homo sapiens
acatcattcacctct

SEQ ID NO: 670474 - DNA, 15 bp, Homo sapiens
catcattcacctctt

SEQ ID NO: 670475 - DNA, 15 bp, Homo sapiens
atcattcacctcttt

SEQ ID NO: 670476 - DNA, 15 bp, Homo sapiens
tcattcacctctttt

SEQ ID NO: 670477 - DNA, 15 bp, Homo sapiens
cattcacctctttta

SEQ ID NO: 670478 - DNA, 15 bp, Homo sapiens
attcacctcttttaa

SEQ ID NO: 670479 - DNA, 15 bp, Homo sapiens
ttcacctcttttaat

SEQ ID NO: 670480 - DNA, 15 bp, Homo sapiens
tcacctcttttaatc

SEQ ID NO: 670481 - DNA, 15 bp, Homo sapiens
cacctcttttaatct

SEQ ID NO: 670482 - DNA, 15 bp, Homo sapiens
acctcttttaatctc

SEQ ID NO: 670483 - DNA, 15 bp, Homo sapiens
cctcttttaatctca

SEQ ID NO: 670484 - DNA, 15 bp, Homo sapiens
ctcttttaatctcaa

SEQ ID NO: 670485 - DNA, 15 bp, Homo sapiens
tcttttaatctcaat

SEQ ID NO: 670486 - DNA, 15 bp, Homo sapiens
cttttaatctcaatg

SEQ ID NO: 670487 - DNA, 15 bp, Homo sapiens
ttttaatctcaatgt

SEQ ID NO: 670488 - DNA, 15 bp, Homo sapiens
tttaatctcaatgtt

SEQ ID NO: 670489 - DNA, 15 bp, Homo sapiens
ttaatctcaatgttt

SEQ ID NO: 670490 - DNA, 15 bp, Homo sapiens
taatctcaatgtttt

SEQ ID NO: 670491 - DNA, 15 bp, Homo sapiens
aatctcaatgttttg

SEQ ID NO: 670492 - DNA, 15 bp, Homo sapiens
atctcaatgttttga

SEQ ID NO: 670493 - DNA, 15 bp, Homo sapiens
tctcaatgttttgaa

SEQ ID NO: 670494 - DNA, 15 bp, Homo sapiens
ctcaatgttttgaaa

SEQ ID NO: 670495 - DNA, 15 bp, Homo sapiens
tcaatgttttgaaag

SEQ ID NO: 670496 - DNA, 15 bp, Homo sapiens
caatgttttgaaagc

SEQ ID NO: 670497 - DNA, 15 bp, Homo sapiens
aatgttttgaaagca

SEQ ID NO: 670498 - DNA, 15 bp, Homo sapiens
atgttttgaaagcaa

SEQ ID NO: 670499 - DNA, 15 bp, Homo sapiens
tgttttgaaagcaaa

SEQ ID NO: 670500 - DNA, 15 bp, Homo sapiens
gttttgaaagcaaag

SEQ ID NO: 670501 - DNA, 15 bp, Homo sapiens
ttttgaaagcaaagc

SEQ ID NO: 670502 - DNA, 15 bp, Homo sapiens
tttgaaagcaaagct

SEQ ID NO: 670503 - DNA, 15 bp, Homo sapiens
ttgaaagcaaagctc

SEQ ID NO: 670504 - DNA, 15 bp, Homo sapiens
tgaaagcaaagctct

SEQ ID NO: 670505 - DNA, 15 bp, Homo sapiens
gaaagcaaagctcta

SEQ ID NO: 670506 - DNA, 15 bp, Homo sapiens
aaagcaaagctctaa

SEQ ID NO: 670507 - DNA, 15 bp, Homo sapiens
aagcaaagctctaag

SEQ ID NO: 670508 - DNA, 15 bp, Homo sapiens
agcaaagctctaaga

SEQ ID NO: 670509 - DNA, 15 bp, Homo sapiens
gcaaagctctaagaa

SEQ ID NO: 670510 - DNA, 15 bp, Homo sapiens
caaagctctaagaag

SEQ ID NO: 670511 - DNA, 15 bp, Homo sapiens
aaagctctaagaagg

SEQ ID NO: 670512 - DNA, 15 bp, Homo sapiens
aagctctaagaaggg

SEQ ID NO: 670513 - DNA, 15 bp, Homo sapiens
agctctaagaagggc

SEQ ID NO: 670514 - DNA, 15 bp, Homo sapiens
gctctaagaagggcc

SEQ ID NO: 670515 - DNA, 15 bp, Homo sapiens
ctctaagaagggccc

SEQ ID NO: 670516 - DNA, 15 bp, Homo sapiens
tctaagaagggccca

SEQ ID NO: 670517 - DNA, 15 bp, Homo sapiens
ctaagaagggcccaa

SEQ ID NO: 670518 - DNA, 15 bp, Homo sapiens
taagaagggcccaat

SEQ ID NO: 670519 - DNA, 15 bp, Homo sapiens
aagaagggcccaatt

SEQ ID NO: 670520 - DNA, 15 bp, Homo sapiens
agaagggcccaattg

SEQ ID NO: 670521 - DNA, 15 bp, Homo sapiens
gaagggcccaattga

SEQ ID NO: 670522 - DNA, 15 bp, Homo sapiens
aagggcccaattgac

SEQ ID NO: 670523 - DNA, 15 bp, Homo sapiens
agggcccaattgact

SEQ ID NO: 670524 - DNA, 15 bp, Homo sapiens
gggcccaattgactg

SEQ ID NO: 670525 - DNA, 15 bp, Homo sapiens
ggcccaattgactga

SEQ ID NO: 670526 - DNA, 15 bp, Homo sapiens
gcccaattgactgac

SEQ ID NO: 670527 - DNA, 15 bp, Homo sapiens
cccaattgactgaca

SEQ ID NO: 670528 - DNA, 15 bp, Homo sapiens
ccaattgactgacag

SEQ ID NO: 670529 - DNA, 15 bp, Homo sapiens
caattgactgacagg

SEQ ID NO: 670530 - DNA, 15 bp, Homo sapiens
aattgactgacagga

SEQ ID NO: 670531 - DNA, 15 bp, Homo sapiens
attgactgacaggat

SEQ ID NO: 670532 - DNA, 15 bp, Homo sapiens
ttgactgacaggatt

SEQ ID NO: 670533 - DNA, 15 bp, Homo sapiens
tgactgacaggattt

SEQ ID NO: 670534 - DNA, 15 bp, Homo sapiens
gactgacaggatttc

SEQ ID NO: 670535 - DNA, 15 bp, Homo sapiens
actgacaggatttcc

SEQ ID NO: 670536 - DNA, 15 bp, Homo sapiens
ctgacaggatttccc

SEQ ID NO: 670537 - DNA, 15 bp, Homo sapiens
tgacaggatttcccc

SEQ ID NO: 670538 - DNA, 15 bp, Homo sapiens
gacaggatttcccct

SEQ ID NO: 670539 - DNA, 15 bp, Homo sapiens
acaggatttcccctg

SEQ ID NO: 670540 - DNA, 15 bp, Homo sapiens
caggatttcccctgg

SEQ ID NO: 670541 - DNA, 15 bp, Homo sapiens
aggatttcccctggc

SEQ ID NO: 670542 - DNA, 15 bp, Homo sapiens
ggatttcccctggca

SEQ ID NO: 670543 - DNA, 15 bp, Homo sapiens
gatttcccctggcat

SEQ ID NO: 670544 - DNA, 15 bp, Homo sapiens
atttcccctggcatt

SEQ ID NO: 670545 - DNA, 15 bp, Homo sapiens
tttcccctggcattt

SEQ ID NO: 670546 - DNA, 15 bp, Homo sapiens
ttcccctggcatttt

SEQ ID NO: 670547 - DNA, 15 bp, Homo sapiens
tcccctggcatttta

SEQ ID NO: 670548 - DNA, 15 bp, Homo sapiens
cccctggcattttag

SEQ ID NO: 670549 - DNA, 15 bp, Homo sapiens
ccctggcattttaga

SEQ ID NO: 670550 - DNA, 15 bp, Homo sapiens
cctggcattttagaa

SEQ ID NO: 670551 - DNA, 15 bp, Homo sapiens
ctggcattttagaag

SEQ ID NO: 670552 - DNA, 15 bp, Homo sapiens
tggcattttagaagg

SEQ ID NO: 670553 - DNA, 15 bp, Homo sapiens
ggcattttagaaggg

SEQ ID NO: 670554 - DNA, 15 bp, Homo sapiens
gcattttagaaggga

SEQ ID NO: 670555 - DNA, 15 bp, Homo sapiens
cattttagaagggac

SEQ ID NO: 670556 - DNA, 15 bp, Homo sapiens
attttagaagggaca

SEQ ID NO: 670557 - DNA, 15 bp, Homo sapiens
ttttagaagggacaa

SEQ ID NO: 670558 - DNA, 15 bp, Homo sapiens
tttagaagggacaag

SEQ ID NO: 670559 - DNA, 15 bp, Homo sapiens
ttagaagggacaagg

SEQ ID NO: 670560 - DNA, 15 bp, Homo sapiens
tagaagggacaaggg

SEQ ID NO: 670561 - DNA, 15 bp, Homo sapiens
agaagggacaagggg

SEQ ID NO: 670562 - DNA, 15 bp, Homo sapiens
gaagggacaaggggg

SEQ ID NO: 670563 - DNA, 15 bp, Homo sapiens
aagggacaagggggc

SEQ ID NO: 670564 - DNA, 15 bp, Homo sapiens
agggacaagggggct

SEQ ID NO: 670565 - DNA, 15 bp, Homo sapiens
gggacaagggggcta

SEQ ID NO: 670566 - DNA, 15 bp, Homo sapiens
ggacaagggggctat

SEQ ID NO: 670567 - DNA, 15 bp, Homo sapiens
gacaagggggctatt

SEQ ID NO: 670568 - DNA, 15 bp, Homo sapiens
acaagggggctattc

SEQ ID NO: 670569 - DNA, 15 bp, Homo sapiens
caagggggctattca

SEQ ID NO: 670570 - DNA, 15 bp, Homo sapiens
aagggggctattcat

SEQ ID NO: 670571 - DNA, 15 bp, Homo sapiens
agggggctattcatc

SEQ ID NO: 670572 - DNA, 15 bp, Homo sapiens
gggggctattcatcc

SEQ ID NO: 670573 - DNA, 15 bp, Homo sapiens
ggggctattcatccc

SEQ ID NO: 670574 - DNA, 15 bp, Homo sapiens
gggctattcatcccc

SEQ ID NO: 670575 - DNA, 15 bp, Homo sapiens
ggctattcatcccca

SEQ ID NO: 670576 - DNA, 15 bp, Homo sapiens
gctattcatccccag

SEQ ID NO: 670577 - DNA, 15 bp, Homo sapiens
ctattcatccccagg

SEQ ID NO: 670578 - DNA, 15 bp, Homo sapiens
tattcatccccaggc

SEQ ID NO: 670579 - DNA, 15 bp, Homo sapiens
attcatccccaggct

SEQ ID NO: 670580 - DNA, 15 bp, Homo sapiens
ttcatccccaggcta

SEQ ID NO: 670581 - DNA, 15 bp, Homo sapiens
tcatccccaggctag

SEQ ID NO: 670582 - DNA, 15 bp, Homo sapiens
catccccaggctagt

SEQ ID NO: 670583 - DNA, 15 bp, Homo sapiens
atccccaggctagtg

SEQ ID NO: 670584 - DNA, 15 bp, Homo sapiens
tccccaggctagtgt

SEQ ID NO: 670585 - DNA, 15 bp, Homo sapiens
ccccaggctagtgtc

SEQ ID NO: 670586 - DNA, 15 bp, Homo sapiens
cccaggctagtgtct

SEQ ID NO: 670587 - DNA, 15 bp, Homo sapiens
ccaggctagtgtcta

SEQ ID NO: 670588 - DNA, 15 bp, Homo sapiens
caggctagtgtctat

SEQ ID NO: 670589 - DNA, 15 bp, Homo sapiens
aggctagtgtctatg

SEQ ID NO: 670590 - DNA, 15 bp, Homo sapiens
ggctagtgtctatga

SEQ ID NO: 670591 - DNA, 15 bp, Homo sapiens
gctagtgtctatgag

SEQ ID NO: 670592 - DNA, 15 bp, Homo sapiens
ctagtgtctatgagt

SEQ ID NO: 670593 - DNA, 15 bp, Homo sapiens
tagtgtctatgagta

SEQ ID NO: 670594 - DNA, 15 bp, Homo sapiens
agtgtctatgagtaa

SEQ ID NO: 670595 - DNA, 15 bp, Homo sapiens
gtgtctatgagtaat

SEQ ID NO: 670596 - DNA, 15 bp, Homo sapiens
tgtctatgagtaatt

SEQ ID NO: 670597 - DNA, 15 bp, Homo sapiens
gtctatgagtaattc

SEQ ID NO: 670598 - DNA, 15 bp, Homo sapiens
tctatgagtaattcc

SEQ ID NO: 670599 - DNA, 15 bp, Homo sapiens
ctatgagtaattcct

SEQ ID NO: 670600 - DNA, 15 bp, Homo sapiens
tatgagtaattcctc

SEQ ID NO: 670601 - DNA, 15 bp, Homo sapiens
atgagtaattcctcc

SEQ ID NO: 670602 - DNA, 15 bp, Homo sapiens
tgagtaattcctcca

SEQ ID NO: 670603 - DNA, 15 bp, Homo sapiens
gagtaattcctccag

SEQ ID NO: 670604 - DNA, 15 bp, Homo sapiens
agtaattcctccagg

SEQ ID NO: 670605 - DNA, 15 bp, Homo sapiens
gtaattcctccaggt

SEQ ID NO: 670606 - DNA, 15 bp, Homo sapiens
taattcctccaggta

SEQ ID NO: 670607 - DNA, 15 bp, Homo sapiens
aattcctccaggtaa

SEQ ID NO: 670608 - DNA, 15 bp, Homo sapiens
attcctccaggtaat

SEQ ID NO: 670609 - DNA, 15 bp, Homo sapiens
ttcctccaggtaatt

SEQ ID NO: 670610 - DNA, 15 bp, Homo sapiens
tcctccaggtaattt

SEQ ID NO: 670611 - DNA, 15 bp, Homo sapiens
cctccaggtaattta

SEQ ID NO: 670612 - DNA, 15 bp, Homo sapiens
ctccaggtaatttat

SEQ ID NO: 670613 - DNA, 15 bp, Homo sapiens
tccaggtaatttatt

SEQ ID NO: 670614 - DNA, 15 bp, Homo sapiens
ccaggtaatttattt

SEQ ID NO: 670615 - DNA, 15 bp, Homo sapiens
caggtaatttatttc

SEQ ID NO: 670616 - DNA, 15 bp, Homo sapiens
aggtaatttatttct

SEQ ID NO: 670617 - DNA, 15 bp, Homo sapiens
ggtaatttatttctc

SEQ ID NO: 670618 - DNA, 15 bp, Homo sapiens
gtaatttatttctcc

SEQ ID NO: 670619 - DNA, 15 bp, Homo sapiens
taatttatttctcca

SEQ ID NO: 670620 - DNA, 15 bp, Homo sapiens
aatttatttctccaa

SEQ ID NO: 670621 - DNA, 15 bp, Homo sapiens
atttatttctccaac

SEQ ID NO: 670622 - DNA, 15 bp, Homo sapiens
tttatttctccaact

SEQ ID NO: 670623 - DNA, 15 bp, Homo sapiens
ttatttctccaactg

SEQ ID NO: 670624 - DNA, 15 bp, Homo sapiens
tatttctccaactga

SEQ ID NO: 670625 - DNA, 15 bp, Homo sapiens
atttctccaactgaa

SEQ ID NO: 670626 - DNA, 15 bp, Homo sapiens
tttctccaactgaaa

SEQ ID NO: 670627 - DNA, 15 bp, Homo sapiens
ttctccaactgaaat

SEQ ID NO: 670628 - DNA, 15 bp, Homo sapiens
tctccaactgaaatg

SEQ ID NO: 670629 - DNA, 15 bp, Homo sapiens
ctccaactgaaatga

SEQ ID NO: 670630 - DNA, 15 bp, Homo sapiens
tccaactgaaatgat

SEQ ID NO: 670631 - DNA, 15 bp, Homo sapiens
ccaactgaaatgatg

SEQ ID NO: 670632 - DNA, 15 bp, Homo sapiens
caactgaaatgatgc

SEQ ID NO: 670633 - DNA, 15 bp, Homo sapiens
aactgaaatgatgcc

SEQ ID NO: 670634 - DNA, 15 bp, Homo sapiens
actgaaatgatgccc

SEQ ID NO: 670635 - DNA, 15 bp, Homo sapiens
ctgaaatgatgccct

SEQ ID NO: 670636 - DNA, 15 bp, Homo sapiens
tgaaatgatgccctc

SEQ ID NO: 670637 - DNA, 15 bp, Homo sapiens
gaaatgatgccctca

SEQ ID NO: 670638 - DNA, 15 bp, Homo sapiens
aaatgatgccctcac

SEQ ID NO: 670639 - DNA, 15 bp, Homo sapiens
aatgatgccctcact

SEQ ID NO: 670640 - DNA, 15 bp, Homo sapiens
atgatgccctcacta

SEQ ID NO: 670641 - DNA, 15 bp, Homo sapiens
tgatgccctcactac

SEQ ID NO: 670642 - DNA, 15 bp, Homo sapiens
gatgccctcactact

SEQ ID NO: 670643 - DNA, 15 bp, Homo sapiens
atgccctcactacta

SEQ ID NO: 670644 - DNA, 15 bp, Homo sapiens
tgccctcactactaa

SEQ ID NO: 670645 - DNA, 15 bp, Homo sapiens
gccctcactactaat

SEQ ID NO: 670646 - DNA, 15 bp, Homo sapiens
ccctcactactaatg

SEQ ID NO: 670647 - DNA, 15 bp, Homo sapiens
cctcactactaatgg

SEQ ID NO: 670648 - DNA, 15 bp, Homo sapiens
ctcactactaatggt

SEQ ID NO: 670649 - DNA, 15 bp, Homo sapiens
tcactactaatggtt

SEQ ID NO: 670650 - DNA, 15 bp, Homo sapiens
cactactaatggttt

SEQ ID NO: 670651 - DNA, 15 bp, Homo sapiens
actactaatggtttc

SEQ ID NO: 670652 - DNA, 15 bp, Homo sapiens
ctactaatggtttcc

SEQ ID NO: 670653 - DNA, 15 bp, Homo sapiens
tactaatggtttccc

SEQ ID NO: 670654 - DNA, 15 bp, Homo sapiens
actaatggtttcccc

SEQ ID NO: 670655 - DNA, 15 bp, Homo sapiens
ctaatggtttcccct

SEQ ID NO: 670656 - DNA, 15 bp, Homo sapiens
taatggtttcccctg

SEQ ID NO: 670657 - DNA, 15 bp, Homo sapiens
aatggtttcccctgt

SEQ ID NO: 670658 - DNA, 15 bp, Homo sapiens
atggtttcccctgtt

SEQ ID NO: 670659 - DNA, 15 bp, Homo sapiens
tggtttcccctgttc

SEQ ID NO: 670660 - DNA, 15 bp, Homo sapiens
ggtttcccctgttct

SEQ ID NO: 670661 - DNA, 15 bp, Homo sapiens
gtttcccctgttctg

SEQ ID NO: 670662 - DNA, 15 bp, Homo sapiens
tttcccctgttctgt

SEQ ID NO: 670663 - DNA, 15 bp, Homo sapiens
ttcccctgttctgtc

SEQ ID NO: 670664 - DNA, 15 bp, Homo sapiens
tcccctgttctgtca

SEQ ID NO: 670665 - DNA, 15 bp, Homo sapiens
cccctgttctgtcac

SEQ ID NO: 670666 - DNA, 15 bp, Homo sapiens
ccctgttctgtcacc

SEQ ID NO: 670667 - DNA, 15 bp, Homo sapiens
cctgttctgtcacca

SEQ ID NO: 670668 - DNA, 15 bp, Homo sapiens
ctgttctgtcaccaa

SEQ ID NO: 670669 - DNA, 15 bp, Homo sapiens
tgttctgtcaccaat

SEQ ID NO: 670670 - DNA, 15 bp, Homo sapiens
gttctgtcaccaata

SEQ ID NO: 670671 - DNA, 15 bp, Homo sapiens
ttctgtcaccaatat

SEQ ID NO: 670672 - DNA, 15 bp, Homo sapiens
tctgtcaccaatatt

SEQ ID NO: 670673 - DNA, 15 bp, Homo sapiens
ctgtcaccaatattg

SEQ ID NO: 670674 - DNA, 15 bp, Homo sapiens
tgtcaccaatattgg

SEQ ID NO: 670675 - DNA, 15 bp, Homo sapiens
gtcaccaatattgga

SEQ ID NO: 670676 - DNA, 15 bp, Homo sapiens
tcaccaatattggaa

SEQ ID NO: 670677 - DNA, 15 bp, Homo sapiens
caccaatattggaaa

SEQ ID NO: 670678 - DNA, 15 bp, Homo sapiens
accaatattggaaaa

SEQ ID NO: 670679 - DNA, 15 bp, Homo sapiens
ccaatattggaaaat

SEQ ID NO: 670680 - DNA, 15 bp, Homo sapiens
caatattggaaaatc

SEQ ID NO: 670681 - DNA, 15 bp, Homo sapiens
aatattggaaaatca

SEQ ID NO: 670682 - DNA, 15 bp, Homo sapiens
atattggaaaatcag

SEQ ID NO: 670683 - DNA, 15 bp, Homo sapiens
tattggaaaatcagt

SEQ ID NO: 670684 - DNA, 15 bp, Homo sapiens
attggaaaatcagtt

SEQ ID NO: 670685 - DNA, 15 bp, Homo sapiens
ttggaaaatcagttg

SEQ ID NO: 670686 - DNA, 15 bp, Homo sapiens
tggaaaatcagttgg

SEQ ID NO: 670687 - DNA, 15 bp, Homo sapiens
ggaaaatcagttggt

SEQ ID NO: 670688 - DNA, 15 bp, Homo sapiens
gaaaatcagttggtg

SEQ ID NO: 670689 - DNA, 15 bp, Homo sapiens
aaaatcagttggtgt

SEQ ID NO: 670690 - DNA, 15 bp, Homo sapiens
aaatcagttggtgtc

SEQ ID NO: 670691 - DNA, 15 bp, Homo sapiens
aatcagttggtgtct

SEQ ID NO: 670692 - DNA, 15 bp, Homo sapiens
atcagttggtgtcta

SEQ ID NO: 670693 - DNA, 15 bp, Homo sapiens
tcagttggtgtctat

SEQ ID NO: 670694 - DNA, 15 bp, Homo sapiens
cagttggtgtctatt

SEQ ID NO: 670695 - DNA, 15 bp, Homo sapiens
agttggtgtctattt

SEQ ID NO: 670696 - DNA, 15 bp, Homo sapiens
gttggtgtctatttg

SEQ ID NO: 670697 - DNA, 15 bp, Homo sapiens
ttggtgtctatttgt

SEQ ID NO: 670698 - DNA, 15 bp, Homo sapiens
tggtgtctatttgta

SEQ ID NO: 670699 - DNA, 15 bp, Homo sapiens
ggtgtctatttgtag

SEQ ID NO: 670700 - DNA, 15 bp, Homo sapiens
gtgtctatttgtagg

SEQ ID NO: 670701 - DNA, 15 bp, Homo sapiens
tgtctatttgtagga

SEQ ID NO: 670702 - DNA, 15 bp, Homo sapiens
gtctatttgtaggac

SEQ ID NO: 670703 - DNA, 15 bp, Homo sapiens
tctatttgtaggaca

SEQ ID NO: 670704 - DNA, 15 bp, Homo sapiens
ctatttgtaggacaa

SEQ ID NO: 670705 - DNA, 15 bp, Homo sapiens
tatttgtaggacaag

SEQ ID NO: 670706 - DNA, 15 bp, Homo sapiens
atttgtaggacaagg

SEQ ID NO: 670707 - DNA, 15 bp, Homo sapiens
tttgtaggacaaggc

SEQ ID NO: 670708 - DNA, 15 bp, Homo sapiens
ttgtaggacaaggct

SEQ ID NO: 670709 - DNA, 15 bp, Homo sapiens
tgtaggacaaggcta

SEQ ID NO: 670710 - DNA, 15 bp, Homo sapiens
gtaggacaaggctat

SEQ ID NO: 670711 - DNA, 15 bp, Homo sapiens
taggacaaggctatg

SEQ ID NO: 670712 - DNA, 15 bp, Homo sapiens
aggacaaggctatgt

SEQ ID NO: 670713 - DNA, 15 bp, Homo sapiens
ggacaaggctatgtg

SEQ ID NO: 670714 - DNA, 15 bp, Homo sapiens
gacaaggctatgtga

SEQ ID NO: 670715 - DNA, 15 bp, Homo sapiens
acaaggctatgtgaa

SEQ ID NO: 670716 - DNA, 15 bp, Homo sapiens
caaggctatgtgaag

SEQ ID NO: 670717 - DNA, 15 bp, Homo sapiens
aaggctatgtgaagg

SEQ ID NO: 670718 - DNA, 15 bp, Homo sapiens
aggctatgtgaaggg

SEQ ID NO: 670719 - DNA, 15 bp, Homo sapiens
ggctatgtgaagggt

SEQ ID NO: 670720 - DNA, 15 bp, Homo sapiens
gctatgtgaagggtt

SEQ ID NO: 670721 - DNA, 15 bp, Homo sapiens
ctatgtgaagggttt

SEQ ID NO: 670722 - DNA, 15 bp, Homo sapiens
tatgtgaagggtttg

SEQ ID NO: 670723 - DNA, 15 bp, Homo sapiens
atgtgaagggtttgg

SEQ ID NO: 670724 - DNA, 15 bp, Homo sapiens
tgtgaagggtttggt

SEQ ID NO: 670725 - DNA, 15 bp, Homo sapiens
gtgaagggtttggtc

SEQ ID NO: 670726 - DNA, 15 bp, Homo sapiens
tgaagggtttggtcc

SEQ ID NO: 670727 - DNA, 15 bp, Homo sapiens
gaagggtttggtccc

SEQ ID NO: 670728 - DNA, 15 bp, Homo sapiens
aagggtttggtccca

SEQ ID NO: 670729 - DNA, 15 bp, Homo sapiens
agggtttggtcccag

SEQ ID NO: 670730 - DNA, 15 bp, Homo sapiens
gggtttggtcccagt

SEQ ID NO: 670731 - DNA, 15 bp, Homo sapiens
ggtttggtcccagta

SEQ ID NO: 670732 - DNA, 15 bp, Homo sapiens
gtttggtcccagtag

SEQ ID NO: 670733 - DNA, 15 bp, Homo sapiens
tttggtcccagtagc

SEQ ID NO: 670734 - DNA, 15 bp, Homo sapiens
ttggtcccagtagct

SEQ ID NO: 670735 - DNA, 15 bp, Homo sapiens
tggtcccagtagctt

SEQ ID NO: 670736 - DNA, 15 bp, Homo sapiens
ggtcccagtagcttc

SEQ ID NO: 670737 - DNA, 15 bp, Homo sapiens
gtcccagtagcttcc

SEQ ID NO: 670738 - DNA, 15 bp, Homo sapiens
tcccagtagcttccc

SEQ ID NO: 670739 - DNA, 15 bp, Homo sapiens
cccagtagcttccct

SEQ ID NO: 670740 - DNA, 15 bp, Homo sapiens
ccagtagcttccctc

SEQ ID NO: 670741 - DNA, 15 bp, Homo sapiens
cagtagcttccctcc

SEQ ID NO: 670742 - DNA, 15 bp, Homo sapiens
agtagcttccctcct

SEQ ID NO: 670743 - DNA, 15 bp, Homo sapiens
gtagcttccctcctc

SEQ ID NO: 670744 - DNA, 15 bp, Homo sapiens
tagcttccctcctca

SEQ ID NO: 670745 - DNA, 15 bp, Homo sapiens
agcttccctcctcag

SEQ ID NO: 670746 - DNA, 15 bp, Homo sapiens
gcttccctcctcaga

SEQ ID NO: 670747 - DNA, 15 bp, Homo sapiens
cttccctcctcagat

SEQ ID NO: 670748 - DNA, 15 bp, Homo sapiens
ttccctcctcagatg

SEQ ID NO: 670749 - DNA, 15 bp, Homo sapiens
tccctcctcagatgc

SEQ ID NO: 670750 - DNA, 15 bp, Homo sapiens
ccctcctcagatgct

SEQ ID NO: 670751 - DNA, 15 bp, Homo sapiens
cctcctcagatgctt

SEQ ID NO: 670752 - DNA, 15 bp, Homo sapiens
ctcctcagatgctta

SEQ ID NO: 670753 - DNA, 15 bp, Homo sapiens
tcctcagatgcttag

SEQ ID NO: 670754 - DNA, 15 bp, Homo sapiens
cctcagatgcttaga

SEQ ID NO: 670755 - DNA, 15 bp, Homo sapiens
ctcagatgcttagaa

SEQ ID NO: 670756 - DNA, 15 bp, Homo sapiens
tcagatgcttagaag

SEQ ID NO: 670757 - DNA, 15 bp, Homo sapiens
cagatgcttagaagt

SEQ ID NO: 670758 - DNA, 15 bp, Homo sapiens
agatgcttagaagtg

SEQ ID NO: 670759 - DNA, 15 bp, Homo sapiens
gatgcttagaagtgt

SEQ ID NO: 670760 - DNA, 15 bp, Homo sapiens
atgcttagaagtgtt

SEQ ID NO: 670761 - DNA, 15 bp, Homo sapiens
tgcttagaagtgttc

SEQ ID NO: 670762 - DNA, 15 bp, Homo sapiens
gcttagaagtgttcc

SEQ ID NO: 670763 - DNA, 15 bp, Homo sapiens
cttagaagtgttcct

SEQ ID NO: 670764 - DNA, 15 bp, Homo sapiens
ttagaagtgttcctc

SEQ ID NO: 670765 - DNA, 15 bp, Homo sapiens
tagaagtgttcctcg

SEQ ID NO: 670766 - DNA, 15 bp, Homo sapiens
agaagtgttcctcgg

SEQ ID NO: 670767 - DNA, 15 bp, Homo sapiens
gaagtgttcctcggt

SEQ ID NO: 670768 - DNA, 15 bp, Homo sapiens
aagtgttcctcggtg

SEQ ID NO: 670769 - DNA, 15 bp, Homo sapiens
agtgttcctcggtgg

SEQ ID NO: 670770 - DNA, 15 bp, Homo sapiens
gtgttcctcggtggc

SEQ ID NO: 670771 - DNA, 15 bp, Homo sapiens
tgttcctcggtggct

SEQ ID NO: 670772 - DNA, 15 bp, Homo sapiens
gttcctcggtggctg

SEQ ID NO: 670773 - DNA, 15 bp, Homo sapiens
ttcctcggtggctgt

SEQ ID NO: 670774 - DNA, 15 bp, Homo sapiens
tcctcggtggctgtg

SEQ ID NO: 670775 - DNA, 15 bp, Homo sapiens
cctcggtggctgtga

SEQ ID NO: 670776 - DNA, 15 bp, Homo sapiens
ctcggtggctgtgac

SEQ ID NO: 670777 - DNA, 15 bp, Homo sapiens
tcggtggctgtgact

SEQ ID NO: 670778 - DNA, 15 bp, Homo sapiens
cggtggctgtgactg

SEQ ID NO: 670779 - DNA, 15 bp, Homo sapiens
ggtggctgtgactga

SEQ ID NO: 670780 - DNA, 15 bp, Homo sapiens
gtggctgtgactgac

SEQ ID NO: 670781 - DNA, 15 bp, Homo sapiens
tggctgtgactgacg

SEQ ID NO: 670782 - DNA, 15 bp, Homo sapiens
ggctgtgactgacgg

SEQ ID NO: 670783 - DNA, 15 bp, Homo sapiens
gctgtgactgacggg

SEQ ID NO: 670784 - DNA, 15 bp, Homo sapiens
ctgtgactgacgggg

SEQ ID NO: 670785 - DNA, 15 bp, Homo sapiens
tgtgactgacgggga

SEQ ID NO: 670786 - DNA, 15 bp, Homo sapiens
gtgactgacggggag

SEQ ID NO: 670787 - DNA, 15 bp, Homo sapiens
tgactgacggggagg

SEQ ID NO: 670788 - DNA, 15 bp, Homo sapiens
gactgacggggagga

SEQ ID NO: 670789 - DNA, 15 bp, Homo sapiens
actgacggggaggaa

SEQ ID NO: 670790 - DNA, 15 bp, Homo sapiens
ctgacggggaggaac

SEQ ID NO: 670791 - DNA, 15 bp, Homo sapiens
tgacggggaggaaca

SEQ ID NO: 670792 - DNA, 15 bp, Homo sapiens
gacggggaggaacag

SEQ ID NO: 670793 - DNA, 15 bp, Homo sapiens
acggggaggaacagg

SEQ ID NO: 670794 - DNA, 15 bp, Homo sapiens
cggggaggaacagga

SEQ ID NO: 670795 - DNA, 15 bp, Homo sapiens
ggggaggaacaggag

SEQ ID NO: 670796 - DNA, 15 bp, Homo sapiens
gggaggaacaggaga

SEQ ID NO: 670797 - DNA, 15 bp, Homo sapiens
ggaggaacaggagag

SEQ ID NO: 670798 - DNA, 15 bp, Homo sapiens
gaggaacaggagaga

SEQ ID NO: 670799 - DNA, 15 bp, Homo sapiens
aggaacaggagagag

SEQ ID NO: 670800 - DNA, 15 bp, Homo sapiens
ggaacaggagagaga

SEQ ID NO: 670801 - DNA, 15 bp, Homo sapiens
gaacaggagagagag

SEQ ID NO: 670802 - DNA, 15 bp, Homo sapiens
aacaggagagagagg

SEQ ID NO: 670803 - DNA, 15 bp, Homo sapiens
acaggagagagaggc

SEQ ID NO: 670804 - DNA, 15 bp, Homo sapiens
caggagagagaggca

SEQ ID NO: 670805 - DNA, 15 bp, Homo sapiens
aggagagagaggcag

SEQ ID NO: 670806 - DNA, 15 bp, Homo sapiens
ggagagagaggcaga

SEQ ID NO: 670807 - DNA, 15 bp, Homo sapiens
gagagagaggcagaa

SEQ ID NO: 670808 - DNA, 15 bp, Homo sapiens
agagagaggcagaaa

SEQ ID NO: 670809 - DNA, 15 bp, Homo sapiens
gagagaggcagaaaa

SEQ ID NO: 670810 - DNA, 15 bp, Homo sapiens
agagaggcagaaaag

SEQ ID NO: 670811 - DNA, 15 bp, Homo sapiens
gagaggcagaaaagg

SEQ ID NO: 670812 - DNA, 15 bp, Homo sapiens
agaggcagaaaagga

SEQ ID NO: 670813 - DNA, 15 bp, Homo sapiens
gaggcagaaaaggac

SEQ ID NO: 670814 - DNA, 15 bp, Homo sapiens
aggcagaaaaggaca

SEQ ID NO: 670815 - DNA, 15 bp, Homo sapiens
ggcagaaaaggacag

SEQ ID NO: 670816 - DNA, 15 bp, Homo sapiens
gcagaaaaggacagg

SEQ ID NO: 670817 - DNA, 15 bp, Homo sapiens
cagaaaaggacaggc

SEQ ID NO: 670818 - DNA, 15 bp, Homo sapiens
agaaaaggacaggct

SEQ ID NO: 670819 - DNA, 15 bp, Homo sapiens
gaaaaggacaggctg

SEQ ID NO: 670820 - DNA, 15 bp, Homo sapiens
aaaaggacaggctga

SEQ ID NO: 670821 - DNA, 15 bp, Homo sapiens
aaaggacaggctgaa

SEQ ID NO: 670822 - DNA, 15 bp, Homo sapiens
aaggacaggctgaag

SEQ ID NO: 670823 - DNA, 15 bp, Homo sapiens
aggacaggctgaaga

SEQ ID NO: 670824 - DNA, 15 bp, Homo sapiens
ggacaggctgaagaa

SEQ ID NO: 670825 - DNA, 15 bp, Homo sapiens
gacaggctgaagaat

SEQ ID NO: 670826 - DNA, 15 bp, Homo sapiens
acaggctgaagaatg

SEQ ID NO: 670827 - DNA, 15 bp, Homo sapiens
caggctgaagaatgc

SEQ ID NO: 670828 - DNA, 15 bp, Homo sapiens
aggctgaagaatgcc

SEQ ID NO: 670829 - DNA, 15 bp, Homo sapiens
ggctgaagaatgcct

SEQ ID NO: 670830 - DNA, 15 bp, Homo sapiens
gctgaagaatgcctc

SEQ ID NO: 670831 - DNA, 15 bp, Homo sapiens
ctgaagaatgcctcg

SEQ ID NO: 670832 - DNA, 15 bp, Homo sapiens
tgaagaatgcctcgc

SEQ ID NO: 670833 - DNA, 15 bp, Homo sapiens
gaagaatgcctcgct

SEQ ID NO: 670834 - DNA, 15 bp, Homo sapiens
aagaatgcctcgctc

SEQ ID NO: 670835 - DNA, 15 bp, Homo sapiens
agaatgcctcgctca

SEQ ID NO: 670836 - DNA, 15 bp, Homo sapiens
gaatgcctcgctcag

SEQ ID NO: 670837 - DNA, 15 bp, Homo sapiens
aatgcctcgctcagc

SEQ ID NO: 670838 - DNA, 15 bp, Homo sapiens
atgcctcgctcagca

SEQ ID NO: 670839 - DNA, 15 bp, Homo sapiens
tgcctcgctcagcac

SEQ ID NO: 670840 - DNA, 15 bp, Homo sapiens
gcctcgctcagcact

SEQ ID NO: 670841 - DNA, 15 bp, Homo sapiens
cctcgctcagcactg

SEQ ID NO: 670842 - DNA, 15 bp, Homo sapiens
ctcgctcagcactgc

SEQ ID NO: 670843 - DNA, 15 bp, Homo sapiens
tcgctcagcactgca

SEQ ID NO: 670844 - DNA, 15 bp, Homo sapiens
cgctcagcactgcag

SEQ ID NO: 670845 - DNA, 15 bp, Homo sapiens
gctcagcactgcagg

SEQ ID NO: 670846 - DNA, 15 bp, Homo sapiens
ctcagcactgcagga

SEQ ID NO: 670847 - DNA, 15 bp, Homo sapiens
tcagcactgcaggag

SEQ ID NO: 670848 - DNA, 15 bp, Homo sapiens
cagcactgcaggaga

SEQ ID NO: 670849 - DNA, 15 bp, Homo sapiens
agcactgcaggagat

SEQ ID NO: 670850 - DNA, 15 bp, Homo sapiens
gcactgcaggagata

SEQ ID NO: 670851 - DNA, 15 bp, Homo sapiens
cactgcaggagatac

SEQ ID NO: 670852 - DNA, 15 bp, Homo sapiens
actgcaggagatact

SEQ ID NO: 670853 - DNA, 15 bp, Homo sapiens
ctgcaggagatactg

SEQ ID NO: 670854 - DNA, 15 bp, Homo sapiens
tgcaggagatactgt

SEQ ID NO: 670855 - DNA, 15 bp, Homo sapiens
gcaggagatactgta

SEQ ID NO: 670856 - DNA, 15 bp, Homo sapiens
caggagatactgtag

SEQ ID NO: 670857 - DNA, 15 bp, Homo sapiens
aggagatactgtaga

SEQ ID NO: 670858 - DNA, 15 bp, Homo sapiens
ggagatactgtagag

SEQ ID NO: 670859 - DNA, 15 bp, Homo sapiens
gagatactgtagagt

SEQ ID NO: 670860 - DNA, 15 bp, Homo sapiens
agatactgtagagtt

SEQ ID NO: 670861 - DNA, 15 bp, Homo sapiens
gatactgtagagttc

SEQ ID NO: 670862 - DNA, 15 bp, Homo sapiens
atactgtagagttct

SEQ ID NO: 670863 - DNA, 15 bp, Homo sapiens
tactgtagagttctg

SEQ ID NO: 670864 - DNA, 15 bp, Homo sapiens
actgtagagttctgg

SEQ ID NO: 670865 - DNA, 15 bp, Homo sapiens
ctgtagagttctggg

SEQ ID NO: 670866 - DNA, 15 bp, Homo sapiens
tgtagagttctgggg

SEQ ID NO: 670867 - DNA, 15 bp, Homo sapiens
gtagagttctggggg

SEQ ID NO: 670868 - DNA, 15 bp, Homo sapiens
tagagttctggggga

SEQ ID NO: 670869 - DNA, 15 bp, Homo sapiens
agagttctgggggag

SEQ ID NO: 670870 - DNA, 15 bp, Homo sapiens
gagttctgggggagg

SEQ ID NO: 670871 - DNA, 15 bp, Homo sapiens
agttctgggggagga

SEQ ID NO: 670872 - DNA, 15 bp, Homo sapiens
actcgggaggctgaa

SEQ ID NO: 670873 - DNA, 15 bp, Homo sapiens
ctcgggaggctgaag

SEQ ID NO: 670874 - DNA, 15 bp, Homo sapiens
tcgggaggctgaagc

SEQ ID NO: 670875 - DNA, 15 bp, Homo sapiens
cgggaggctgaagca

SEQ ID NO: 670876 - DNA, 15 bp, Homo sapiens
gggaggctgaagcaa

SEQ ID NO: 670877 - DNA, 15 bp, Homo sapiens
ggaggctgaagcaag

SEQ ID NO: 670878 - DNA, 15 bp, Homo sapiens
gaggctgaagcaaga

SEQ ID NO: 670879 - DNA, 15 bp, Homo sapiens
aggctgaagcaagag

SEQ ID NO: 670880 - DNA, 15 bp, Homo sapiens
ggctgaagcaagaga

SEQ ID NO: 670881 - DNA, 15 bp, Homo sapiens
gctgaagcaagagaa

SEQ ID NO: 670882 - DNA, 15 bp, Homo sapiens
ctgaagcaagagaat

SEQ ID NO: 670883 - DNA, 15 bp, Homo sapiens
tgaagcaagagaatc

SEQ ID NO: 670884 - DNA, 15 bp, Homo sapiens
gaagcaagagaatcg

SEQ ID NO: 670885 - DNA, 15 bp, Homo sapiens
aagcaagagaatcgt

SEQ ID NO: 670886 - DNA, 15 bp, Homo sapiens
agcaagagaatcgtt

SEQ ID NO: 670887 - DNA, 15 bp, Homo sapiens
gcaagagaatcgttt

SEQ ID NO: 670888 - DNA, 15 bp, Homo sapiens
caagagaatcgtttg

SEQ ID NO: 670889 - DNA, 15 bp, Homo sapiens
aagagaatcgtttga

SEQ ID NO: 670890 - DNA, 15 bp, Homo sapiens
agagaatcgtttgaa

SEQ ID NO: 670891 - DNA, 15 bp, Homo sapiens
gagaatcgtttgaac

SEQ ID NO: 670892 - DNA, 15 bp, Homo sapiens
agaatcgtttgaacc

SEQ ID NO: 670893 - DNA, 15 bp, Homo sapiens
gaatcgtttgaaccc

SEQ ID NO: 670894 - DNA, 15 bp, Homo sapiens
aatcgtttgaaccca

SEQ ID NO: 670895 - DNA, 15 bp, Homo sapiens
atcgtttgaacccag

SEQ ID NO: 670896 - DNA, 15 bp, Homo sapiens
tcgtttgaacccagg

SEQ ID NO: 670897 - DNA, 15 bp, Homo sapiens
cgtttgaacccagga

SEQ ID NO: 670898 - DNA, 15 bp, Homo sapiens
gtttgaacccaggag

SEQ ID NO: 670899 - DNA, 15 bp, Homo sapiens
tttgaacccaggagg

SEQ ID NO: 670900 - DNA, 15 bp, Homo sapiens
acccaggaggtggac

SEQ ID NO: 670901 - DNA, 15 bp, Homo sapiens
cccaggaggtggacg

SEQ ID NO: 670902 - DNA, 15 bp, Homo sapiens
ccaggaggtggacgt

SEQ ID NO: 670903 - DNA, 15 bp, Homo sapiens
caggaggtggacgtt

SEQ ID NO: 670904 - DNA, 15 bp, Homo sapiens
aggaggtggacgttg

SEQ ID NO: 670905 - DNA, 15 bp, Homo sapiens
ggaggtggacgttgc

SEQ ID NO: 670906 - DNA, 15 bp, Homo sapiens
gaggtggacgttgca

SEQ ID NO: 670907 - DNA, 15 bp, Homo sapiens
aggtggacgttgcag

SEQ ID NO: 670908 - DNA, 15 bp, Homo sapiens
ggtggacgttgcagt

SEQ ID NO: 670909 - DNA, 15 bp, Homo sapiens
gtggacgttgcagtg

SEQ ID NO: 670910 - DNA, 15 bp, Homo sapiens
tggacgttgcagtga

SEQ ID NO: 670911 - DNA, 15 bp, Homo sapiens
ggacgttgcagtgag

SEQ ID NO: 670912 - DNA, 15 bp, Homo sapiens
gacgttgcagtgagc

SEQ ID NO: 670913 - DNA, 15 bp, Homo sapiens
acgttgcagtgagcc

SEQ ID NO: 670914 - DNA, 15 bp, Homo sapiens
cgttgcagtgagccg

SEQ ID NO: 670915 - DNA, 15 bp, Homo sapiens
gtgagccgagattgg

SEQ ID NO: 670916 - DNA, 15 bp, Homo sapiens
tgagccgagattggg

SEQ ID NO: 670917 - DNA, 15 bp, Homo sapiens
gagccgagattgggc

SEQ ID NO: 670918 - DNA, 15 bp, Homo sapiens
agccgagattgggcc

SEQ ID NO: 670919 - DNA, 15 bp, Homo sapiens
gccgagattgggcca

SEQ ID NO: 670920 - DNA, 15 bp, Homo sapiens
ccgagattgggccac

SEQ ID NO: 670921 - DNA, 15 bp, Homo sapiens
cgagattgggccact

SEQ ID NO: 670922 - DNA, 15 bp, Homo sapiens
gagattgggccactg

SEQ ID NO: 670923 - DNA, 15 bp, Homo sapiens
agattgggccactgt

SEQ ID NO: 670924 - DNA, 15 bp, Homo sapiens
gattgggccactgta

SEQ ID NO: 670925 - DNA, 15 bp, Homo sapiens
attgggccactgtac

SEQ ID NO: 670926 - DNA, 15 bp, Homo sapiens
ttgggccactgtact

SEQ ID NO: 670927 - DNA, 15 bp, Homo sapiens
tgggccactgtactc

SEQ ID NO: 670928 - DNA, 15 bp, Homo sapiens
gggccactgtactcc

SEQ ID NO: 670929 - DNA, 15 bp, Homo sapiens
ggccactgtactcca

SEQ ID NO: 670930 - DNA, 15 bp, Homo sapiens
agcctgggcaacaaa

SEQ ID NO: 670931 - DNA, 15 bp, Homo sapiens
gcctgggcaacaaaa

SEQ ID NO: 670932 - DNA, 15 bp, Homo sapiens
cctgggcaacaaaag

SEQ ID NO: 670933 - DNA, 15 bp, Homo sapiens
ctgggcaacaaaagt

SEQ ID NO: 670934 - DNA, 15 bp, Homo sapiens
tgggcaacaaaagtg

SEQ ID NO: 670935 - DNA, 15 bp, Homo sapiens
gggcaacaaaagtga

SEQ ID NO: 670936 - DNA, 15 bp, Homo sapiens
ggcaacaaaagtgaa

SEQ ID NO: 670937 - DNA, 15 bp, Homo sapiens
gcaacaaaagtgaaa

SEQ ID NO: 670938 - DNA, 15 bp, Homo sapiens
caacaaaagtgaaac

SEQ ID NO: 670939 - DNA, 15 bp, Homo sapiens
aacaaaagtgaaact

SEQ ID NO: 670940 - DNA, 15 bp, Homo sapiens
acaaaagtgaaactc

SEQ ID NO: 670941 - DNA, 15 bp, Homo sapiens
caaaagtgaaactct

SEQ ID NO: 670942 - DNA, 15 bp, Homo sapiens
aaaagtgaaactctg

SEQ ID NO: 670943 - DNA, 15 bp, Homo sapiens
aaagtgaaactctgt

SEQ ID NO: 670944 - DNA, 15 bp, Homo sapiens
aagtgaaactctgtc

SEQ ID NO: 670945 - DNA, 15 bp, Homo sapiens
agtgaaactctgtct

SEQ ID NO: 670946 - DNA, 15 bp, Homo sapiens
gtgaaactctgtctg

SEQ ID NO: 670947 - DNA, 15 bp, Homo sapiens
tgaaactctgtctga

SEQ ID NO: 670948 - DNA, 15 bp, Homo sapiens
gaaactctgtctgaa

SEQ ID NO: 670949 - DNA, 15 bp, Homo sapiens
aaactctgtctgaaa

SEQ ID NO: 670950 - DNA, 15 bp, Homo sapiens
aactctgtctgaaac

SEQ ID NO: 670951 - DNA, 15 bp, Homo sapiens
actctgtctgaaaca

SEQ ID NO: 670952 - DNA, 15 bp, Homo sapiens
ctctgtctgaaacaa

SEQ ID NO: 670953 - DNA, 15 bp, Homo sapiens
tctgtctgaaacaaa

SEQ ID NO: 670954 - DNA, 15 bp, Homo sapiens
ctgtctgaaacaaac

SEQ ID NO: 670955 - DNA, 15 bp, Homo sapiens
tgtctgaaacaaaca

SEQ ID NO: 670956 - DNA, 15 bp, Homo sapiens
gtctgaaacaaacaa

SEQ ID NO: 670957 - DNA, 15 bp, Homo sapiens
tctgaaacaaacaaa

SEQ ID NO: 670958 - DNA, 15 bp, Homo sapiens
ctgaaacaaacaaac

SEQ ID NO: 670959 - DNA, 15 bp, Homo sapiens
tgaaacaaacaaaca

SEQ ID NO: 670960 - DNA, 15 bp, Homo sapiens
gaaacaaacaaacaa

SEQ ID NO: 670961 - DNA, 15 bp, Homo sapiens
aaacaaacaaacaaa

SEQ ID NO: 670962 - DNA, 15 bp, Homo sapiens
aacaaacaaacaaac

SEQ ID NO: 670963 - DNA, 15 bp, Homo sapiens
acaaacaaacaaaca

SEQ ID NO: 670964 - DNA, 15 bp, Homo sapiens
caaacaaacaaacaa

SEQ ID NO: 670965 - DNA, 15 bp, Homo sapiens
caaacaaacaaacag

SEQ ID NO: 670966 - DNA, 15 bp, Homo sapiens
aaacaaacaaacaga

SEQ ID NO: 670967 - DNA, 15 bp, Homo sapiens
aacaaacaaacagac

SEQ ID NO: 670968 - DNA, 15 bp, Homo sapiens
acaaacaaacagaca

SEQ ID NO: 670969 - DNA, 15 bp, Homo sapiens
caaacaaacagacaa

SEQ ID NO: 670970 - DNA, 15 bp, Homo sapiens
aaacaaacagacaaa

SEQ ID NO: 670971 - DNA, 15 bp, Homo sapiens
aacaaacagacaaac

SEQ ID NO: 670972 - DNA, 15 bp, Homo sapiens
acaaacagacaaaca

SEQ ID NO: 670973 - DNA, 15 bp, Homo sapiens
caaacagacaaacaa

SEQ ID NO: 670974 - DNA, 15 bp, Homo sapiens
aaacagacaaacaaa

SEQ ID NO: 670975 - DNA, 15 bp, Homo sapiens
aacagacaaacaaaa

SEQ ID NO: 670976 - DNA, 15 bp, Homo sapiens
acagacaaacaaaaa

SEQ ID NO: 670977 - DNA, 15 bp, Homo sapiens
cagacaaacaaaaaa

SEQ ID NO: 670978 - DNA, 15 bp, Homo sapiens
agacaaacaaaaaaa

SEQ ID NO: 670979 - DNA, 15 bp, Homo sapiens
gacaaacaaaaaaac

SEQ ID NO: 670980 - DNA, 15 bp, Homo sapiens
acaaacaaaaaaact

SEQ ID NO: 670981 - DNA, 15 bp, Homo sapiens
caaacaaaaaaacta

SEQ ID NO: 670982 - DNA, 15 bp, Homo sapiens
aaacaaaaaaactag

SEQ ID NO: 670983 - DNA, 15 bp, Homo sapiens
aacaaaaaaactagt

SEQ ID NO: 670984 - DNA, 15 bp, Homo sapiens
acaaaaaaactagtt

SEQ ID NO: 670985 - DNA, 15 bp, Homo sapiens
caaaaaaactagttg

SEQ ID NO: 670986 - DNA, 15 bp, Homo sapiens
aaaaaaactagttgt

SEQ ID NO: 670987 - DNA, 15 bp, Homo sapiens
aaaaaactagttgtg

SEQ ID NO: 670988 - DNA, 15 bp, Homo sapiens
aaaactagttgtgga

SEQ ID NO: 670989 - DNA, 15 bp, Homo sapiens
aaactagttgtggag

SEQ ID NO: 670990 - DNA, 15 bp, Homo sapiens
aactagttgtggaga

SEQ ID NO: 670991 - DNA, 15 bp, Homo sapiens
actagttgtggagag

SEQ ID NO: 670992 - DNA, 15 bp, Homo sapiens
ctagttgtggagaga

SEQ ID NO: 670993 - DNA, 15 bp, Homo sapiens
tagttgtggagagag

SEQ ID NO: 670994 - DNA, 15 bp, Homo sapiens
agttgtggagagagg

SEQ ID NO: 670995 - DNA, 15 bp, Homo sapiens
gttgtggagagaggg

SEQ ID NO: 670996 - DNA, 15 bp, Homo sapiens
ttgtggagagagggt

SEQ ID NO: 670997 - DNA, 15 bp, Homo sapiens
tgtggagagagggtg

SEQ ID NO: 670998 - DNA, 15 bp, Homo sapiens
gtggagagagggtgg

SEQ ID NO: 670999 - DNA, 15 bp, Homo sapiens
tggagagagggtggc

SEQ ID NO: 671000 - DNA, 15 bp, Homo sapiens
ggagagagggtggcc

SEQ ID NO: 671001 - DNA, 15 bp, Homo sapiens
gagagagggtggcct

SEQ ID NO: 671002 - DNA, 15 bp, Homo sapiens
agagagggtggcctg

SEQ ID NO: 671003 - DNA, 15 bp, Homo sapiens
gagagggtggcctgt

SEQ ID NO: 671004 - DNA, 15 bp, Homo sapiens
agagggtggcctgtg

SEQ ID NO: 671005 - DNA, 15 bp, Homo sapiens
gagggtggcctgtgt

SEQ ID NO: 671006 - DNA, 15 bp, Homo sapiens
agggtggcctgtgtc

SEQ ID NO: 671007 - DNA, 15 bp, Homo sapiens
gggtggcctgtgtct

SEQ ID NO: 671008 - DNA, 15 bp, Homo sapiens
ggtggcctgtgtctc

SEQ ID NO: 671009 - DNA, 15 bp, Homo sapiens
gtggcctgtgtctca

SEQ ID NO: 671010 - DNA, 15 bp, Homo sapiens
tggcctgtgtctcat

SEQ ID NO: 671011 - DNA, 15 bp, Homo sapiens
ggcctgtgtctcatc

SEQ ID NO: 671012 - DNA, 15 bp, Homo sapiens
gcctgtgtctcatcc

SEQ ID NO: 671013 - DNA, 15 bp, Homo sapiens
cctgtgtctcatccc

SEQ ID NO: 671014 - DNA, 15 bp, Homo sapiens
ctgtgtctcatccca

SEQ ID NO: 671015 - DNA, 15 bp, Homo sapiens
tgtgtctcatcccag

SEQ ID NO: 671016 - DNA, 15 bp, Homo sapiens
gtgtctcatcccagt

SEQ ID NO: 671017 - DNA, 15 bp, Homo sapiens
tgtctcatcccagtg

SEQ ID NO: 671018 - DNA, 15 bp, Homo sapiens
gtctcatcccagtgt

SEQ ID NO: 671019 - DNA, 15 bp, Homo sapiens
tctcatcccagtgtt

SEQ ID NO: 671020 - DNA, 15 bp, Homo sapiens
ctcatcccagtgttt

SEQ ID NO: 671021 - DNA, 15 bp, Homo sapiens
tcatcccagtgttta

SEQ ID NO: 671022 - DNA, 15 bp, Homo sapiens
catcccagtgtttaa

SEQ ID NO: 671023 - DNA, 15 bp, Homo sapiens
atcccagtgtttaac

SEQ ID NO: 671024 - DNA, 15 bp, Homo sapiens
tcccagtgtttaacg

SEQ ID NO: 671025 - DNA, 15 bp, Homo sapiens
cccagtgtttaacgg

SEQ ID NO: 671026 - DNA, 15 bp, Homo sapiens
ccagtgtttaacggg

SEQ ID NO: 671027 - DNA, 15 bp, Homo sapiens
cagtgtttaacggga

SEQ ID NO: 671028 - DNA, 15 bp, Homo sapiens
agtgtttaacgggat

SEQ ID NO: 671029 - DNA, 15 bp, Homo sapiens
gtgtttaacgggatt

SEQ ID NO: 671030 - DNA, 15 bp, Homo sapiens
tgtttaacgggattt

SEQ ID NO: 671031 - DNA, 15 bp, Homo sapiens
gtttaacgggatttg

SEQ ID NO: 671032 - DNA, 15 bp, Homo sapiens
tttaacgggatttgt

SEQ ID NO: 671033 - DNA, 15 bp, Homo sapiens
ttaacgggatttgtc

SEQ ID NO: 671034 - DNA, 15 bp, Homo sapiens
taacgggatttgtca

SEQ ID NO: 671035 - DNA, 15 bp, Homo sapiens
aacgggatttgtcat

SEQ ID NO: 671036 - DNA, 15 bp, Homo sapiens
acgggatttgtcatc

SEQ ID NO: 671037 - DNA, 15 bp, Homo sapiens
cgggatttgtcatct

SEQ ID NO: 671038 - DNA, 15 bp, Homo sapiens
gggatttgtcatctt

SEQ ID NO: 671039 - DNA, 15 bp, Homo sapiens
ggatttgtcatcttc

SEQ ID NO: 671040 - DNA, 15 bp, Homo sapiens
gatttgtcatcttcc

SEQ ID NO: 671041 - DNA, 15 bp, Homo sapiens
atttgtcatcttcct

SEQ ID NO: 671042 - DNA, 15 bp, Homo sapiens
tttgtcatcttcctt

SEQ ID NO: 671043 - DNA, 15 bp, Homo sapiens
ttgtcatcttccttg

SEQ ID NO: 671044 - DNA, 15 bp, Homo sapiens
tgtcatcttccttgc

SEQ ID NO: 671045 - DNA, 15 bp, Homo sapiens
gtcatcttccttgct

SEQ ID NO: 671046 - DNA, 15 bp, Homo sapiens
tcatcttccttgctg

SEQ ID NO: 671047 - DNA, 15 bp, Homo sapiens
catcttccttgctgc

SEQ ID NO: 671048 - DNA, 15 bp, Homo sapiens
atcttccttgctgcc

SEQ ID NO: 671049 - DNA, 15 bp, Homo sapiens
tcttccttgctgcct

SEQ ID NO: 671050 - DNA, 15 bp, Homo sapiens
cttccttgctgcctg

SEQ ID NO: 671051 - DNA, 15 bp, Homo sapiens
ttccttgctgcctgt

SEQ ID NO: 671052 - DNA, 15 bp, Homo sapiens
tccttgctgcctgtt

SEQ ID NO: 671053 - DNA, 15 bp, Homo sapiens
ccttgctgcctgttt

SEQ ID NO: 671054 - DNA, 15 bp, Homo sapiens
cttgctgcctgttta

SEQ ID NO: 671055 - DNA, 15 bp, Homo sapiens
ttgctgcctgtttag

SEQ ID NO: 671056 - DNA, 15 bp, Homo sapiens
tgctgcctgtttagg

SEQ ID NO: 671057 - DNA, 15 bp, Homo sapiens
gctgcctgtttagga

SEQ ID NO: 671058 - DNA, 15 bp, Homo sapiens
ctgcctgtttaggac

SEQ ID NO: 671059 - DNA, 15 bp, Homo sapiens
tgcctgtttaggaca

SEQ ID NO: 671060 - DNA, 15 bp, Homo sapiens
gcctgtttaggacaa

SEQ ID NO: 671061 - DNA, 15 bp, Homo sapiens
cctgtttaggacaaa

SEQ ID NO: 671062 - DNA, 15 bp, Homo sapiens
ctgtttaggacaaag

SEQ ID NO: 671063 - DNA, 15 bp, Homo sapiens
tgtttaggacaaagt

SEQ ID NO: 671064 - DNA, 15 bp, Homo sapiens
gtttaggacaaagta

SEQ ID NO: 671065 - DNA, 15 bp, Homo sapiens
tttaggacaaagtat

SEQ ID NO: 671066 - DNA, 15 bp, Homo sapiens
ttaggacaaagtatt

SEQ ID NO: 671067 - DNA, 15 bp, Homo sapiens
taggacaaagtattt

SEQ ID NO: 671068 - DNA, 15 bp, Homo sapiens
aggacaaagtatttt

SEQ ID NO: 671069 - DNA, 15 bp, Homo sapiens
ggacaaagtattttg

SEQ ID NO: 671070 - DNA, 15 bp, Homo sapiens
gacaaagtattttgg

SEQ ID NO: 671071 - DNA, 15 bp, Homo sapiens
acaaagtattttgga

SEQ ID NO: 671072 - DNA, 15 bp, Homo sapiens
caaagtattttggac

SEQ ID NO: 671073 - DNA, 15 bp, Homo sapiens
aaagtattttggaca

SEQ ID NO: 671074 - DNA, 15 bp, Homo sapiens
aagtattttggacag

SEQ ID NO: 671075 - DNA, 15 bp, Homo sapiens
agtattttggacaga

SEQ ID NO: 671076 - DNA, 15 bp, Homo sapiens
gtattttggacagat

SEQ ID NO: 671077 - DNA, 15 bp, Homo sapiens
tattttggacagata

SEQ ID NO: 671078 - DNA, 15 bp, Homo sapiens
attttggacagatat

SEQ ID NO: 671079 - DNA, 15 bp, Homo sapiens
ttttggacagatatc

SEQ ID NO: 671080 - DNA, 15 bp, Homo sapiens
tttggacagatatca

SEQ ID NO: 671081 - DNA, 15 bp, Homo sapiens
ttggacagatatcat

SEQ ID NO: 671082 - DNA, 15 bp, Homo sapiens
tggacagatatcatc

SEQ ID NO: 671083 - DNA, 15 bp, Homo sapiens
ggacagatatcatca

SEQ ID NO: 671084 - DNA, 15 bp, Homo sapiens
gacagatatcatcaa

SEQ ID NO: 671085 - DNA, 15 bp, Homo sapiens
acagatatcatcaac

SEQ ID NO: 671086 - DNA, 15 bp, Homo sapiens
cagatatcatcaacg

SEQ ID NO: 671087 - DNA, 15 bp, Homo sapiens
agatatcatcaacga

SEQ ID NO: 671088 - DNA, 15 bp, Homo sapiens
gatatcatcaacgaa

SEQ ID NO: 671089 - DNA, 15 bp, Homo sapiens
atatcatcaacgaag

SEQ ID NO: 671090 - DNA, 15 bp, Homo sapiens
tatcatcaacgaagc

SEQ ID NO: 671091 - DNA, 15 bp, Homo sapiens
atcatcaacgaagcc

SEQ ID NO: 671092 - DNA, 15 bp, Homo sapiens
tcatcaacgaagcca

SEQ ID NO: 671093 - DNA, 15 bp, Homo sapiens
catcaacgaagccat

SEQ ID NO: 671094 - DNA, 15 bp, Homo sapiens
atcaacgaagccatt

SEQ ID NO: 671095 - DNA, 15 bp, Homo sapiens
tcaacgaagccattt

SEQ ID NO: 671096 - DNA, 15 bp, Homo sapiens
caacgaagccatttt

SEQ ID NO: 671097 - DNA, 15 bp, Homo sapiens
aacgaagccattttc

SEQ ID NO: 671098 - DNA, 15 bp, Homo sapiens
acgaagccattttca

SEQ ID NO: 671099 - DNA, 15 bp, Homo sapiens
cgaagccattttcag

SEQ ID NO: 671100 - DNA, 15 bp, Homo sapiens
gaagccattttcagt

SEQ ID NO: 671101 - DNA, 15 bp, Homo sapiens
aagccattttcagtg

SEQ ID NO: 671102 - DNA, 15 bp, Homo sapiens
agccattttcagtgc

SEQ ID NO: 671103 - DNA, 15 bp, Homo sapiens
gccattttcagtgcc

SEQ ID NO: 671104 - DNA, 15 bp, Homo sapiens
ccattttcagtgcca

SEQ ID NO: 671105 - DNA, 15 bp, Homo sapiens
cattttcagtgccaa

SEQ ID NO: 671106 - DNA, 15 bp, Homo sapiens
attttcagtgccaac

SEQ ID NO: 671107 - DNA, 15 bp, Homo sapiens
ttttcagtgccaacc

SEQ ID NO: 671108 - DNA, 15 bp, Homo sapiens
tttcagtgccaaccg

SEQ ID NO: 671109 - DNA, 15 bp, Homo sapiens
ttcagtgccaaccgc

SEQ ID NO: 671110 - DNA, 15 bp, Homo sapiens
tcagtgccaaccgcc

SEQ ID NO: 671111 - DNA, 15 bp, Homo sapiens
cagtgccaaccgcct

SEQ ID NO: 671112 - DNA, 15 bp, Homo sapiens
agtgccaaccgcctc

SEQ ID NO: 671113 - DNA, 15 bp, Homo sapiens
gtgccaaccgcctca

SEQ ID NO: 671114 - DNA, 15 bp, Homo sapiens
tgccaaccgcctcac

SEQ ID NO: 671115 - DNA, 15 bp, Homo sapiens
gccaaccgcctcaca

SEQ ID NO: 671116 - DNA, 15 bp, Homo sapiens
ccaaccgcctcacag

SEQ ID NO: 671117 - DNA, 15 bp, Homo sapiens
caaccgcctcacagg

SEQ ID NO: 671118 - DNA, 15 bp, Homo sapiens
aaccgcctcacaggt

SEQ ID NO: 671119 - DNA, 15 bp, Homo sapiens
accgcctcacaggtt

SEQ ID NO: 671120 - DNA, 15 bp, Homo sapiens
cgcctcacaggttcc

SEQ ID NO: 671121 - DNA, 15 bp, Homo sapiens
gcctcacaggttccg

SEQ ID NO: 671122 - DNA, 15 bp, Homo sapiens
cctcacaggttccga

SEQ ID NO: 671123 - DNA, 15 bp, Homo sapiens
ctcacaggttccgat

SEQ ID NO: 671124 - DNA, 15 bp, Homo sapiens
tcacaggttccgatg

SEQ ID NO: 671125 - DNA, 15 bp, Homo sapiens
cacaggttccgatgt

SEQ ID NO: 671126 - DNA, 15 bp, Homo sapiens
acaggttccgatgtc

SEQ ID NO: 671127 - DNA, 15 bp, Homo sapiens
caggttccgatgtca

SEQ ID NO: 671128 - DNA, 15 bp, Homo sapiens
aggttccgatgtcaa

SEQ ID NO: 671129 - DNA, 15 bp, Homo sapiens
ggttccgatgtcaac

SEQ ID NO: 671130 - DNA, 15 bp, Homo sapiens
gttccgatgtcaact

SEQ ID NO: 671131 - DNA, 15 bp, Homo sapiens
ttccgatgtcaactt

SEQ ID NO: 671132 - DNA, 15 bp, Homo sapiens
tccgatgtcaacttg

SEQ ID NO: 671133 - DNA, 15 bp, Homo sapiens
ccgatgtcaacttgt

SEQ ID NO: 671134 - DNA, 15 bp, Homo sapiens
cgatgtcaacttgtt

SEQ ID NO: 671135 - DNA, 15 bp, Homo sapiens
gatgtcaacttgttg

SEQ ID NO: 671136 - DNA, 15 bp, Homo sapiens
atgtcaacttgttgg

SEQ ID NO: 671137 - DNA, 15 bp, Homo sapiens
tgtcaacttgttggc

SEQ ID NO: 671138 - DNA, 15 bp, Homo sapiens
gtcaacttgttggct

SEQ ID NO: 671139 - DNA, 15 bp, Homo sapiens
tcaacttgttggctg

SEQ ID NO: 671140 - DNA, 15 bp, Homo sapiens
caacttgttggctga

SEQ ID NO: 671141 - DNA, 15 bp, Homo sapiens
aacttgttggctgaa

SEQ ID NO: 671142 - DNA, 15 bp, Homo sapiens
acttgttggctgaaa

SEQ ID NO: 671143 - DNA, 15 bp, Homo sapiens
cttgttggctgaaaa

SEQ ID NO: 671144 - DNA, 15 bp, Homo sapiens
ttgttggctgaaaac

SEQ ID NO: 671145 - DNA, 15 bp, Homo sapiens
tgttggctgaaaacc

SEQ ID NO: 671146 - DNA, 15 bp, Homo sapiens
gttggctgaaaacct

SEQ ID NO: 671147 - DNA, 15 bp, Homo sapiens
ttggctgaaaaccta

SEQ ID NO: 671148 - DNA, 15 bp, Homo sapiens
tggctgaaaacctac

SEQ ID NO: 671149 - DNA, 15 bp, Homo sapiens
ggctgaaaacctact

SEQ ID NO: 671150 - DNA, 15 bp, Homo sapiens
gctgaaaacctactg

SEQ ID NO: 671151 - DNA, 15 bp, Homo sapiens
ctgaaaacctactgt

SEQ ID NO: 671152 - DNA, 15 bp, Homo sapiens
tgaaaacctactgtc

SEQ ID NO: 671153 - DNA, 15 bp, Homo sapiens
gaaaacctactgtcc

SEQ ID NO: 671154 - DNA, 15 bp, Homo sapiens
aaaacctactgtccc

SEQ ID NO: 671155 - DNA, 15 bp, Homo sapiens
aaacctactgtcccc

SEQ ID NO: 671156 - DNA, 15 bp, Homo sapiens
aacctactgtcccca

SEQ ID NO: 671157 - DNA, 15 bp, Homo sapiens
acctactgtccccag

SEQ ID NO: 671158 - DNA, 15 bp, Homo sapiens
cctactgtccccaga

SEQ ID NO: 671159 - DNA, 15 bp, Homo sapiens
ctactgtccccagag

SEQ ID NO: 671160 - DNA, 15 bp, Homo sapiens
tactgtccccagagg

SEQ ID NO: 671161 - DNA, 15 bp, Homo sapiens
actgtccccagagga

SEQ ID NO: 671162 - DNA, 15 bp, Homo sapiens
ctgtccccagaggat

SEQ ID NO: 671163 - DNA, 15 bp, Homo sapiens
tgtccccagaggata

SEQ ID NO: 671164 - DNA, 15 bp, Homo sapiens
gtccccagaggatat

SEQ ID NO: 671165 - DNA, 15 bp, Homo sapiens
tccccagaggatatg

SEQ ID NO: 671166 - DNA, 15 bp, Homo sapiens
ccccagaggatatgg

SEQ ID NO: 671167 - DNA, 15 bp, Homo sapiens
cccagaggatatggt

SEQ ID NO: 671168 - DNA, 15 bp, Homo sapiens
ccagaggatatggtt

SEQ ID NO: 671169 - DNA, 15 bp, Homo sapiens
cagaggatatggttc

SEQ ID NO: 671170 - DNA, 15 bp, Homo sapiens
agaggatatggttct

SEQ ID NO: 671171 - DNA, 15 bp, Homo sapiens
gaggatatggttctc

SEQ ID NO: 671172 - DNA, 15 bp, Homo sapiens
aggatatggttctct

SEQ ID NO: 671173 - DNA, 15 bp, Homo sapiens
ggatatggttctctt

SEQ ID NO: 671174 - DNA, 15 bp, Homo sapiens
gatatggttctcttc

SEQ ID NO: 671175 - DNA, 15 bp, Homo sapiens
atatggttctcttcc

SEQ ID NO: 671176 - DNA, 15 bp, Homo sapiens
tatggttctcttcca

SEQ ID NO: 671177 - DNA, 15 bp, Homo sapiens
atggttctcttccac

SEQ ID NO: 671178 - DNA, 15 bp, Homo sapiens
tggttctcttccaca

SEQ ID NO: 671179 - DNA, 15 bp, Homo sapiens
ggttctcttccacaa

SEQ ID NO: 671180 - DNA, 15 bp, Homo sapiens
gttctcttccacaac

SEQ ID NO: 671181 - DNA, 15 bp, Homo sapiens
ttctcttccacaacc

SEQ ID NO: 671182 - DNA, 15 bp, Homo sapiens
tctcttccacaacct

SEQ ID NO: 671183 - DNA, 15 bp, Homo sapiens
ctcttccacaacctc

SEQ ID NO: 671184 - DNA, 15 bp, Homo sapiens
tcttccacaacctca

SEQ ID NO: 671185 - DNA, 15 bp, Homo sapiens
cttccacaacctcac

SEQ ID NO: 671186 - DNA, 15 bp, Homo sapiens
ttccacaacctcacc

SEQ ID NO: 671187 - DNA, 15 bp, Homo sapiens
tccacaacctcaccc

SEQ ID NO: 671188 - DNA, 15 bp, Homo sapiens
ccacaacctcaccca

SEQ ID NO: 671189 - DNA, 15 bp, Homo sapiens
cacaacctcacccag

SEQ ID NO: 671190 - DNA, 15 bp, Homo sapiens
acaacctcacccagc

SEQ ID NO: 671191 - DNA, 15 bp, Homo sapiens
caacctcacccagcc

SEQ ID NO: 671192 - DNA, 15 bp, Homo sapiens
aacctcacccagcca

SEQ ID NO: 671193 - DNA, 15 bp, Homo sapiens
acctcacccagccaa

SEQ ID NO: 671194 - DNA, 15 bp, Homo sapiens
cctcacccagccaag

SEQ ID NO: 671195 - DNA, 15 bp, Homo sapiens
ctcacccagccaaga

SEQ ID NO: 671196 - DNA, 15 bp, Homo sapiens
tcacccagccaagag

SEQ ID NO: 671197 - DNA, 15 bp, Homo sapiens
cacccagccaagagg

SEQ ID NO: 671198 - DNA, 15 bp, Homo sapiens
acccagccaagaggt

SEQ ID NO: 671199 - DNA, 15 bp, Homo sapiens
cccagccaagaggta

SEQ ID NO: 671200 - DNA, 15 bp, Homo sapiens
ccagccaagaggtaa

SEQ ID NO: 671201 - DNA, 15 bp, Homo sapiens
cagccaagaggtaag

SEQ ID NO: 671202 - DNA, 15 bp, Homo sapiens
agccaagaggtaagg

SEQ ID NO: 671203 - DNA, 15 bp, Homo sapiens
gccaagaggtaaggg

SEQ ID NO: 671204 - DNA, 15 bp, Homo sapiens
ccaagaggtaagggt

SEQ ID NO: 671205 - DNA, 15 bp, Homo sapiens
caagaggtaagggtg

SEQ ID NO: 671206 - DNA, 15 bp, Homo sapiens
aagaggtaagggtgg

SEQ ID NO: 671207 - DNA, 15 bp, Homo sapiens
agaggtaagggtggg

SEQ ID NO: 671208 - DNA, 15 bp, Homo sapiens
gaggtaagggtgggt

SEQ ID NO: 671209 - DNA, 15 bp, Homo sapiens
aggtaagggtgggtc

SEQ ID NO: 671210 - DNA, 15 bp, Homo sapiens
ggtaagggtgggtca

SEQ ID NO: 671211 - DNA, 15 bp, Homo sapiens
gtaagggtgggtcag

SEQ ID NO: 671212 - DNA, 15 bp, Homo sapiens
taagggtgggtcagc

SEQ ID NO: 671213 - DNA, 15 bp, Homo sapiens
aagggtgggtcagcc

SEQ ID NO: 671214 - DNA, 15 bp, Homo sapiens
agggtgggtcagccc

SEQ ID NO: 671215 - DNA, 15 bp, Homo sapiens
gggtgggtcagcccc

SEQ ID NO: 671216 - DNA, 15 bp, Homo sapiens
ggtgggtcagcccca

SEQ ID NO: 671217 - DNA, 15 bp, Homo sapiens
gtgggtcagccccac

SEQ ID NO: 671218 - DNA, 15 bp, Homo sapiens
tgggtcagccccacc

SEQ ID NO: 671219 - DNA, 15 bp, Homo sapiens
gggtcagccccaccc

SEQ ID NO: 671220 - DNA, 15 bp, Homo sapiens
ggtcagccccacccc

SEQ ID NO: 671221 - DNA, 15 bp, Homo sapiens
gtcagccccaccccc

SEQ ID NO: 671222 - DNA, 15 bp, Homo sapiens
tcagccccacccccc

SEQ ID NO: 671223 - DNA, 15 bp, Homo sapiens
cagccccaccccccc

SEQ ID NO: 671224 - DNA, 15 bp, Homo sapiens
agccccaccccccca

SEQ ID NO: 671225 - DNA, 15 bp, Homo sapiens
gccccacccccccaa

SEQ ID NO: 671226 - DNA, 15 bp, Homo sapiens
ccccacccccccaac

SEQ ID NO: 671227 - DNA, 15 bp, Homo sapiens
cccacccccccaacc

SEQ ID NO: 671228 - DNA, 15 bp, Homo sapiens
ccacccccccaacct

SEQ ID NO: 671229 - DNA, 15 bp, Homo sapiens
cacccccccaacctt

SEQ ID NO: 671230 - DNA, 15 bp, Homo sapiens
acccccccaaccttg

SEQ ID NO: 671231 - DNA, 15 bp, Homo sapiens
cccccccaaccttga

SEQ ID NO: 671232 - DNA, 15 bp, Homo sapiens
ccccccaaccttgaa

SEQ ID NO: 671233 - DNA, 15 bp, Homo sapiens
cccccaaccttgaaa

SEQ ID NO: 671234 - DNA, 15 bp, Homo sapiens
ccccaaccttgaaac

SEQ ID NO: 671235 - DNA, 15 bp, Homo sapiens
cccaaccttgaaacc

SEQ ID NO: 671236 - DNA, 15 bp, Homo sapiens
ccaaccttgaaacct

SEQ ID NO: 671237 - DNA, 15 bp, Homo sapiens
caaccttgaaacctc

SEQ ID NO: 671238 - DNA, 15 bp, Homo sapiens
aaccttgaaacctcc

SEQ ID NO: 671239 - DNA, 15 bp, Homo sapiens
accttgaaacctcct

SEQ ID NO: 671240 - DNA, 15 bp, Homo sapiens
ccttgaaacctcctt

SEQ ID NO: 671241 - DNA, 15 bp, Homo sapiens
cttgaaacctccttg

SEQ ID NO: 671242 - DNA, 15 bp, Homo sapiens
ttgaaacctccttgt

SEQ ID NO: 671243 - DNA, 15 bp, Homo sapiens
tgaaacctccttgtg

SEQ ID NO: 671244 - DNA, 15 bp, Homo sapiens
gaaacctccttgtgg

SEQ ID NO: 671245 - DNA, 15 bp, Homo sapiens
aaacctccttgtgga

SEQ ID NO: 671246 - DNA, 15 bp, Homo sapiens
aacctccttgtggaa

SEQ ID NO: 671247 - DNA, 15 bp, Homo sapiens
acctccttgtggaaa

SEQ ID NO: 671248 - DNA, 15 bp, Homo sapiens
cctccttgtggaaac

SEQ ID NO: 671249 - DNA, 15 bp, Homo sapiens
ctccttgtggaaact

SEQ ID NO: 671250 - DNA, 15 bp, Homo sapiens
tccttgtggaaactc

SEQ ID NO: 671251 - DNA, 15 bp, Homo sapiens
ccttgtggaaactct

SEQ ID NO: 671252 - DNA, 15 bp, Homo sapiens
cttgtggaaactctg

SEQ ID NO: 671253 - DNA, 15 bp, Homo sapiens
ttgtggaaactctgg

SEQ ID NO: 671254 - DNA, 15 bp, Homo sapiens
tgtggaaactctgga

SEQ ID NO: 671255 - DNA, 15 bp, Homo sapiens
gtggaaactctggaa

SEQ ID NO: 671256 - DNA, 15 bp, Homo sapiens
tggaaactctggaat

SEQ ID NO: 671257 - DNA, 15 bp, Homo sapiens
ggaaactctggaatg

SEQ ID NO: 671258 - DNA, 15 bp, Homo sapiens
gaaactctggaatgt

SEQ ID NO: 671259 - DNA, 15 bp, Homo sapiens
aaactctggaatgtt

SEQ ID NO: 671260 - DNA, 15 bp, Homo sapiens
aactctggaatgttc

SEQ ID NO: 671261 - DNA, 15 bp, Homo sapiens
actctggaatgttct

SEQ ID NO: 671262 - DNA, 15 bp, Homo sapiens
ctctggaatgttctg

SEQ ID NO: 671263 - DNA, 15 bp, Homo sapiens
tctggaatgttctgg

SEQ ID NO: 671264 - DNA, 15 bp, Homo sapiens
ctggaatgttctgga

SEQ ID NO: 671265 - DNA, 15 bp, Homo sapiens
tggaatgttctggaa

SEQ ID NO: 671266 - DNA, 15 bp, Homo sapiens
ggaatgttctggaaa

SEQ ID NO: 671267 - DNA, 15 bp, Homo sapiens
gaatgttctggaaat

SEQ ID NO: 671268 - DNA, 15 bp, Homo sapiens
aatgttctggaaatt

SEQ ID NO: 671269 - DNA, 15 bp, Homo sapiens
atgttctggaaattt

SEQ ID NO: 671270 - DNA, 15 bp, Homo sapiens
tgttctggaaatttc

SEQ ID NO: 671271 - DNA, 15 bp, Homo sapiens
gttctggaaatttct

SEQ ID NO: 671272 - DNA, 15 bp, Homo sapiens
ttctggaaatttctg

SEQ ID NO: 671273 - DNA, 15 bp, Homo sapiens
tctggaaatttctgg

SEQ ID NO: 671274 - DNA, 15 bp, Homo sapiens
ctggaaatttctgga

SEQ ID NO: 671275 - DNA, 15 bp, Homo sapiens
tggaaatttctggaa

SEQ ID NO: 671276 - DNA, 15 bp, Homo sapiens
ggaaatttctggaat

SEQ ID NO: 671277 - DNA, 15 bp, Homo sapiens
gaaatttctggaatc

SEQ ID NO: 671278 - DNA, 15 bp, Homo sapiens
aaatttctggaatct

SEQ ID NO: 671279 - DNA, 15 bp, Homo sapiens
aatttctggaatctt

SEQ ID NO: 671280 - DNA, 15 bp, Homo sapiens
atttctggaatcttc

SEQ ID NO: 671281 - DNA, 15 bp, Homo sapiens
tttctggaatcttct

SEQ ID NO: 671282 - DNA, 15 bp, Homo sapiens
ttctggaatcttctg

SEQ ID NO: 671283 - DNA, 15 bp, Homo sapiens
tctggaatcttctgg

SEQ ID NO: 671284 - DNA, 15 bp, Homo sapiens
ctggaatcttctggt

SEQ ID NO: 671285 - DNA, 15 bp, Homo sapiens
tggaatcttctggta

SEQ ID NO: 671286 - DNA, 15 bp, Homo sapiens
ggaatcttctggtat

SEQ ID NO: 671287 - DNA, 15 bp, Homo sapiens
gaatcttctggtata

SEQ ID NO: 671288 - DNA, 15 bp, Homo sapiens
aatcttctggtatag

SEQ ID NO: 671289 - DNA, 15 bp, Homo sapiens
atcttctggtatagc

SEQ ID NO: 671290 - DNA, 15 bp, Homo sapiens
tcttctggtatagct

SEQ ID NO: 671291 - DNA, 15 bp, Homo sapiens
cttctggtatagctg

SEQ ID NO: 671292 - DNA, 15 bp, Homo sapiens
ttctggtatagctga

SEQ ID NO: 671293 - DNA, 15 bp, Homo sapiens
tctggtatagctgat

SEQ ID NO: 671294 - DNA, 15 bp, Homo sapiens
ctggtatagctgatg

SEQ ID NO: 671295 - DNA, 15 bp, Homo sapiens
tggtatagctgatga

SEQ ID NO: 671296 - DNA, 15 bp, Homo sapiens
ggtatagctgatgat

SEQ ID NO: 671297 - DNA, 15 bp, Homo sapiens
gtatagctgatgatc

SEQ ID NO: 671298 - DNA, 15 bp, Homo sapiens
tatagctgatgatct

SEQ ID NO: 671299 - DNA, 15 bp, Homo sapiens
atagctgatgatctc

SEQ ID NO: 671300 - DNA, 15 bp, Homo sapiens
tagctgatgatctcg

SEQ ID NO: 671301 - DNA, 15 bp, Homo sapiens
agctgatgatctcgt

SEQ ID NO: 671302 - DNA, 15 bp, Homo sapiens
gctgatgatctcgtt

SEQ ID NO: 671303 - DNA, 15 bp, Homo sapiens
ctgatgatctcgttc

SEQ ID NO: 671304 - DNA, 15 bp, Homo sapiens
tgatgatctcgttcc

SEQ ID NO: 671305 - DNA, 15 bp, Homo sapiens
gatgatctcgttcct

SEQ ID NO: 671306 - DNA, 15 bp, Homo sapiens
atgatctcgttcctg

SEQ ID NO: 671307 - DNA, 15 bp, Homo sapiens
tgatctcgttcctgc

SEQ ID NO: 671308 - DNA, 15 bp, Homo sapiens
gatctcgttcctgcc

SEQ ID NO: 671309 - DNA, 15 bp, Homo sapiens
atctcgttcctgccc

SEQ ID NO: 671310 - DNA, 15 bp, Homo sapiens
tctcgttcctgccct

SEQ ID NO: 671311 - DNA, 15 bp, Homo sapiens
ctcgttcctgccctg

SEQ ID NO: 671312 - DNA, 15 bp, Homo sapiens
tcgttcctgccctga

SEQ ID NO: 671313 - DNA, 15 bp, Homo sapiens
cgttcctgccctgac

SEQ ID NO: 671314 - DNA, 15 bp, Homo sapiens
gttcctgccctgact

SEQ ID NO: 671315 - DNA, 15 bp, Homo sapiens
ttcctgccctgactc

SEQ ID NO: 671316 - DNA, 15 bp, Homo sapiens
tcctgccctgactcc

SEQ ID NO: 671317 - DNA, 15 bp, Homo sapiens
cctgccctgactccg

SEQ ID NO: 671318 - DNA, 15 bp, Homo sapiens
ctgccctgactccgc

SEQ ID NO: 671319 - DNA, 15 bp, Homo sapiens
tgccctgactccgct

SEQ ID NO: 671320 - DNA, 15 bp, Homo sapiens
gccctgactccgctt

SEQ ID NO: 671321 - DNA, 15 bp, Homo sapiens
ccctgactccgcttc

SEQ ID NO: 671322 - DNA, 15 bp, Homo sapiens
cctgactccgcttct

SEQ ID NO: 671323 - DNA, 15 bp, Homo sapiens
ctgactccgcttctt

SEQ ID NO: 671324 - DNA, 15 bp, Homo sapiens
tgactccgcttcttc

SEQ ID NO: 671325 - DNA, 15 bp, Homo sapiens
gactccgcttcttct

SEQ ID NO: 671326 - DNA, 15 bp, Homo sapiens
actccgcttcttctg

SEQ ID NO: 671327 - DNA, 15 bp, Homo sapiens
ctccgcttcttctgc

SEQ ID NO: 671328 - DNA, 15 bp, Homo sapiens
tccgcttcttctgcc

SEQ ID NO: 671329 - DNA, 15 bp, Homo sapiens
ccgcttcttctgccc

SEQ ID NO: 671330 - DNA, 15 bp, Homo sapiens
cgcttcttctgcccc

SEQ ID NO: 671331 - DNA, 15 bp, Homo sapiens
gcttcttctgcccca

SEQ ID NO: 671332 - DNA, 15 bp, Homo sapiens
cttcttctgccccag

SEQ ID NO: 671333 - DNA, 15 bp, Homo sapiens
ttcttctgccccagg

SEQ ID NO: 671334 - DNA, 15 bp, Homo sapiens
tcttctgccccagga

SEQ ID NO: 671335 - DNA, 15 bp, Homo sapiens
cttctgccccaggag

SEQ ID NO: 671336 - DNA, 15 bp, Homo sapiens
ttctgccccaggagt

SEQ ID NO: 671337 - DNA, 15 bp, Homo sapiens
tctgccccaggagtg

SEQ ID NO: 671338 - DNA, 15 bp, Homo sapiens
ctgccccaggagtga

SEQ ID NO: 671339 - DNA, 15 bp, Homo sapiens
tgccccaggagtgaa

SEQ ID NO: 671340 - DNA, 15 bp, Homo sapiens
gccccaggagtgaac

SEQ ID NO: 671341 - DNA, 15 bp, Homo sapiens
ccccaggagtgaact

SEQ ID NO: 671342 - DNA, 15 bp, Homo sapiens
cccaggagtgaactg

SEQ ID NO: 671343 - DNA, 15 bp, Homo sapiens
ccaggagtgaactgg

SEQ ID NO: 671344 - DNA, 15 bp, Homo sapiens
caggagtgaactggt

SEQ ID NO: 671345 - DNA, 15 bp, Homo sapiens
aggagtgaactggtg

SEQ ID NO: 671346 - DNA, 15 bp, Homo sapiens
ggagtgaactggtgt

SEQ ID NO: 671347 - DNA, 15 bp, Homo sapiens
gagtgaactggtgtg

SEQ ID NO: 671348 - DNA, 15 bp, Homo sapiens
agtgaactggtgtga

SEQ ID NO: 671349 - DNA, 15 bp, Homo sapiens
gtgaactggtgtgag

SEQ ID NO: 671350 - DNA, 15 bp, Homo sapiens
tgaactggtgtgaga

SEQ ID NO: 671351 - DNA, 15 bp, Homo sapiens
gaactggtgtgagag

SEQ ID NO: 671352 - DNA, 15 bp, Homo sapiens
aactggtgtgagagg

SEQ ID NO: 671353 - DNA, 15 bp, Homo sapiens
actggtgtgagagga

SEQ ID NO: 671354 - DNA, 15 bp, Homo sapiens
ctggtgtgagaggac

SEQ ID NO: 671355 - DNA, 15 bp, Homo sapiens
tggtgtgagaggacc

SEQ ID NO: 671356 - DNA, 15 bp, Homo sapiens
ggtgtgagaggacca

SEQ ID NO: 671357 - DNA, 15 bp, Homo sapiens
gtgtgagaggaccac

SEQ ID NO: 671358 - DNA, 15 bp, Homo sapiens
tgtgagaggaccacc

SEQ ID NO: 671359 - DNA, 15 bp, Homo sapiens
gtgagaggaccaccc

SEQ ID NO: 671360 - DNA, 15 bp, Homo sapiens
tgagaggaccaccct

SEQ ID NO: 671361 - DNA, 15 bp, Homo sapiens
gagaggaccaccctg

SEQ ID NO: 671362 - DNA, 15 bp, Homo sapiens
agaggaccaccctga

SEQ ID NO: 671363 - DNA, 15 bp, Homo sapiens
gaggaccaccctgag

SEQ ID NO: 671364 - DNA, 15 bp, Homo sapiens
aggaccaccctgagc

SEQ ID NO: 671365 - DNA, 15 bp, Homo sapiens
ggaccaccctgagca

SEQ ID NO: 671366 - DNA, 15 bp, Homo sapiens
gaccaccctgagcaa

SEQ ID NO: 671367 - DNA, 15 bp, Homo sapiens
accaccctgagcaat

SEQ ID NO: 671368 - DNA, 15 bp, Homo sapiens
ccaccctgagcaatg

SEQ ID NO: 671369 - DNA, 15 bp, Homo sapiens
caccctgagcaatgg

SEQ ID NO: 671370 - DNA, 15 bp, Homo sapiens
accctgagcaatggc

SEQ ID NO: 671371 - DNA, 15 bp, Homo sapiens
ccctgagcaatggcg

SEQ ID NO: 671372 - DNA, 15 bp, Homo sapiens
cctgagcaatggcgg

SEQ ID NO: 671373 - DNA, 15 bp, Homo sapiens
ctgagcaatggcggc

SEQ ID NO: 671374 - DNA, 15 bp, Homo sapiens
tgagcaatggcggct

SEQ ID NO: 671375 - DNA, 15 bp, Homo sapiens
gagcaatggcggctg

SEQ ID NO: 671376 - DNA, 15 bp, Homo sapiens
agcaatggcggctgc

SEQ ID NO: 671377 - DNA, 15 bp, Homo sapiens
gcaatggcggctgcc

SEQ ID NO: 671378 - DNA, 15 bp, Homo sapiens
caatggcggctgcca

SEQ ID NO: 671379 - DNA, 15 bp, Homo sapiens
aatggcggctgccag

SEQ ID NO: 671380 - DNA, 15 bp, Homo sapiens
atggcggctgccagt

SEQ ID NO: 671381 - DNA, 15 bp, Homo sapiens
tggcggctgccagta

SEQ ID NO: 671382 - DNA, 15 bp, Homo sapiens
ggcggctgccagtat

SEQ ID NO: 671383 - DNA, 15 bp, Homo sapiens
gcggctgccagtatc

SEQ ID NO: 671384 - DNA, 15 bp, Homo sapiens
cggctgccagtatct

SEQ ID NO: 671385 - DNA, 15 bp, Homo sapiens
ggctgccagtatctg

SEQ ID NO: 671386 - DNA, 15 bp, Homo sapiens
gctgccagtatctgt

SEQ ID NO: 671387 - DNA, 15 bp, Homo sapiens
ctgccagtatctgtg

SEQ ID NO: 671388 - DNA, 15 bp, Homo sapiens
tgccagtatctgtgc

SEQ ID NO: 671389 - DNA, 15 bp, Homo sapiens
gccagtatctgtgcc

SEQ ID NO: 671390 - DNA, 15 bp, Homo sapiens
ccagtatctgtgcct

SEQ ID NO: 671391 - DNA, 15 bp, Homo sapiens
cagtatctgtgcctc

SEQ ID NO: 671392 - DNA, 15 bp, Homo sapiens
agtatctgtgcctcc

SEQ ID NO: 671393 - DNA, 15 bp, Homo sapiens
gtatctgtgcctccc

SEQ ID NO: 671394 - DNA, 15 bp, Homo sapiens
tatctgtgcctccct

SEQ ID NO: 671395 - DNA, 15 bp, Homo sapiens
atctgtgcctccctg

SEQ ID NO: 671396 - DNA, 15 bp, Homo sapiens
tctgtgcctccctgc

SEQ ID NO: 671397 - DNA, 15 bp, Homo sapiens
ctgtgcctccctgcc

SEQ ID NO: 671398 - DNA, 15 bp, Homo sapiens
tgtgcctccctgccc

SEQ ID NO: 671399 - DNA, 15 bp, Homo sapiens
gtgcctccctgcccc

SEQ ID NO: 671400 - DNA, 15 bp, Homo sapiens
tgcctccctgccccg

SEQ ID NO: 671401 - DNA, 15 bp, Homo sapiens
gcctccctgccccgc

SEQ ID NO: 671402 - DNA, 15 bp, Homo sapiens
cctccctgccccgca

SEQ ID NO: 671403 - DNA, 15 bp, Homo sapiens
ctccctgccccgcag

SEQ ID NO: 671404 - DNA, 15 bp, Homo sapiens
tccctgccccgcaga

SEQ ID NO: 671405 - DNA, 15 bp, Homo sapiens
ccctgccccgcagat

SEQ ID NO: 671406 - DNA, 15 bp, Homo sapiens
cctgccccgcagatc

SEQ ID NO: 671407 - DNA, 15 bp, Homo sapiens
ctgccccgcagatca

SEQ ID NO: 671408 - DNA, 15 bp, Homo sapiens
tgccccgcagatcaa

SEQ ID NO: 671409 - DNA, 15 bp, Homo sapiens
gccccgcagatcaac

SEQ ID NO: 671410 - DNA, 15 bp, Homo sapiens
ccccgcagatcaacc

SEQ ID NO: 671411 - DNA, 15 bp, Homo sapiens
cccgcagatcaaccc

SEQ ID NO: 671412 - DNA, 15 bp, Homo sapiens
ccgcagatcaacccc

SEQ ID NO: 671413 - DNA, 15 bp, Homo sapiens
cgcagatcaaccccc

SEQ ID NO: 671414 - DNA, 15 bp, Homo sapiens
gcagatcaaccccca

SEQ ID NO: 671415 - DNA, 15 bp, Homo sapiens
cagatcaacccccac

SEQ ID NO: 671416 - DNA, 15 bp, Homo sapiens
agatcaacccccact

SEQ ID NO: 671417 - DNA, 15 bp, Homo sapiens
gatcaacccccactc

SEQ ID NO: 671418 - DNA, 15 bp, Homo sapiens
atcaacccccactcg

SEQ ID NO: 671419 - DNA, 15 bp, Homo sapiens
tcaacccccactcgc

SEQ ID NO: 671420 - DNA, 15 bp, Homo sapiens
caacccccactcgcc

SEQ ID NO: 671421 - DNA, 15 bp, Homo sapiens
aacccccactcgccc

SEQ ID NO: 671422 - DNA, 15 bp, Homo sapiens
acccccactcgccca

SEQ ID NO: 671423 - DNA, 15 bp, Homo sapiens
cccccactcgcccaa

SEQ ID NO: 671424 - DNA, 15 bp, Homo sapiens
ccccactcgcccaag

SEQ ID NO: 671425 - DNA, 15 bp, Homo sapiens
cccactcgcccaagt

SEQ ID NO: 671426 - DNA, 15 bp, Homo sapiens
ccactcgcccaagtt

SEQ ID NO: 671427 - DNA, 15 bp, Homo sapiens
cactcgcccaagttt

SEQ ID NO: 671428 - DNA, 15 bp, Homo sapiens
actcgcccaagttta

SEQ ID NO: 671429 - DNA, 15 bp, Homo sapiens
ctcgcccaagtttac

SEQ ID NO: 671430 - DNA, 15 bp, Homo sapiens
tcgcccaagtttacc

SEQ ID NO: 671431 - DNA, 15 bp, Homo sapiens
cgcccaagtttacct

SEQ ID NO: 671432 - DNA, 15 bp, Homo sapiens
gcccaagtttacctg

SEQ ID NO: 671433 - DNA, 15 bp, Homo sapiens
cccaagtttacctgc

SEQ ID NO: 671434 - DNA, 15 bp, Homo sapiens
ccaagtttacctgcg

SEQ ID NO: 671435 - DNA, 15 bp, Homo sapiens
caagtttacctgcgc

SEQ ID NO: 671436 - DNA, 15 bp, Homo sapiens
aagtttacctgcgcc

SEQ ID NO: 671437 - DNA, 15 bp, Homo sapiens
agtttacctgcgcct

SEQ ID NO: 671438 - DNA, 15 bp, Homo sapiens
gtttacctgcgcctg

SEQ ID NO: 671439 - DNA, 15 bp, Homo sapiens
tttacctgcgcctgc

SEQ ID NO: 671440 - DNA, 15 bp, Homo sapiens
ttacctgcgcctgcc

SEQ ID NO: 671441 - DNA, 15 bp, Homo sapiens
tacctgcgcctgccc

SEQ ID NO: 671442 - DNA, 15 bp, Homo sapiens
acctgcgcctgcccg

SEQ ID NO: 671443 - DNA, 15 bp, Homo sapiens
cctgcgcctgcccgg

SEQ ID NO: 671444 - DNA, 15 bp, Homo sapiens
ctgcgcctgcccgga

SEQ ID NO: 671445 - DNA, 15 bp, Homo sapiens
tgcgcctgcccggac

SEQ ID NO: 671446 - DNA, 15 bp, Homo sapiens
gcgcctgcccggacg

SEQ ID NO: 671447 - DNA, 15 bp, Homo sapiens
cgcctgcccggacgg

SEQ ID NO: 671448 - DNA, 15 bp, Homo sapiens
gcctgcccggacggc

SEQ ID NO: 671449 - DNA, 15 bp, Homo sapiens
cctgcccggacggca

SEQ ID NO: 671450 - DNA, 15 bp, Homo sapiens
ctgcccggacggcat

SEQ ID NO: 671451 - DNA, 15 bp, Homo sapiens
tgcccggacggcatg

SEQ ID NO: 671452 - DNA, 15 bp, Homo sapiens
gcccggacggcatgc

SEQ ID NO: 671453 - DNA, 15 bp, Homo sapiens
cccggacggcatgct

SEQ ID NO: 671454 - DNA, 15 bp, Homo sapiens
ccggacggcatgctg

SEQ ID NO: 671455 - DNA, 15 bp, Homo sapiens
cggacggcatgctgc

SEQ ID NO: 671456 - DNA, 15 bp, Homo sapiens
ggacggcatgctgct

SEQ ID NO: 671457 - DNA, 15 bp, Homo sapiens
gacggcatgctgctg

SEQ ID NO: 671458 - DNA, 15 bp, Homo sapiens
acggcatgctgctgg

SEQ ID NO: 671459 - DNA, 15 bp, Homo sapiens
cggcatgctgctggc

SEQ ID NO: 671460 - DNA, 15 bp, Homo sapiens
ggcatgctgctggcc

SEQ ID NO: 671461 - DNA, 15 bp, Homo sapiens
gcatgctgctggcca

SEQ ID NO: 671462 - DNA, 15 bp, Homo sapiens
catgctgctggccag

SEQ ID NO: 671463 - DNA, 15 bp, Homo sapiens
atgctgctggccagg

SEQ ID NO: 671464 - DNA, 15 bp, Homo sapiens
tgctgctggccaggg

SEQ ID NO: 671465 - DNA, 15 bp, Homo sapiens
gctgctggccaggga

SEQ ID NO: 671466 - DNA, 15 bp, Homo sapiens
ctgctggccagggac

SEQ ID NO: 671467 - DNA, 15 bp, Homo sapiens
tgctggccagggaca

SEQ ID NO: 671468 - DNA, 15 bp, Homo sapiens
gctggccagggacat

SEQ ID NO: 671469 - DNA, 15 bp, Homo sapiens
ctggccagggacatg

SEQ ID NO: 671470 - DNA, 15 bp, Homo sapiens
tggccagggacatga

SEQ ID NO: 671471 - DNA, 15 bp, Homo sapiens
ggccagggacatgag

SEQ ID NO: 671472 - DNA, 15 bp, Homo sapiens
gccagggacatgagg

SEQ ID NO: 671473 - DNA, 15 bp, Homo sapiens
ccagggacatgagga

SEQ ID NO: 671474 - DNA, 15 bp, Homo sapiens
cagggacatgaggag

SEQ ID NO: 671475 - DNA, 15 bp, Homo sapiens
agggacatgaggagc

SEQ ID NO: 671476 - DNA, 15 bp, Homo sapiens
gggacatgaggagct

SEQ ID NO: 671477 - DNA, 15 bp, Homo sapiens
ggacatgaggagctg

SEQ ID NO: 671478 - DNA, 15 bp, Homo sapiens
gacatgaggagctgc

SEQ ID NO: 671479 - DNA, 15 bp, Homo sapiens
acatgaggagctgcc

SEQ ID NO: 671480 - DNA, 15 bp, Homo sapiens
catgaggagctgcct

SEQ ID NO: 671481 - DNA, 15 bp, Homo sapiens
atgaggagctgcctc

SEQ ID NO: 671482 - DNA, 15 bp, Homo sapiens
tgaggagctgcctca

SEQ ID NO: 671483 - DNA, 15 bp, Homo sapiens
gaggagctgcctcac

SEQ ID NO: 671484 - DNA, 15 bp, Homo sapiens
aggagctgcctcaca

SEQ ID NO: 671485 - DNA, 15 bp, Homo sapiens
ggagctgcctcacag

SEQ ID NO: 671486 - DNA, 15 bp, Homo sapiens
gagctgcctcacagg

SEQ ID NO: 671487 - DNA, 15 bp, Homo sapiens
agctgcctcacaggt

SEQ ID NO: 671488 - DNA, 15 bp, Homo sapiens
gctgcctcacaggtg

SEQ ID NO: 671489 - DNA, 15 bp, Homo sapiens
ctgcctcacaggtgt

SEQ ID NO: 671490 - DNA, 15 bp, Homo sapiens
tgcctcacaggtgtg

SEQ ID NO: 671491 - DNA, 15 bp, Homo sapiens
gcctcacaggtgtgg

SEQ ID NO: 671492 - DNA, 15 bp, Homo sapiens
cctcacaggtgtggc

SEQ ID NO: 671493 - DNA, 15 bp, Homo sapiens
ctcacaggtgtggca

SEQ ID NO: 671494 - DNA, 15 bp, Homo sapiens
tcacaggtgtggcac

SEQ ID NO: 671495 - DNA, 15 bp, Homo sapiens
cacaggtgtggcaca

SEQ ID NO: 671496 - DNA, 15 bp, Homo sapiens
acaggtgtggcacac

SEQ ID NO: 671497 - DNA, 15 bp, Homo sapiens
caggtgtggcacacg

SEQ ID NO: 671498 - DNA, 15 bp, Homo sapiens
aggtgtggcacacgc

SEQ ID NO: 671499 - DNA, 15 bp, Homo sapiens
ggtgtggcacacgcc

SEQ ID NO: 671500 - DNA, 15 bp, Homo sapiens
gtgtggcacacgcct

SEQ ID NO: 671501 - DNA, 15 bp, Homo sapiens
tgtggcacacgcctt

SEQ ID NO: 671502 - DNA, 15 bp, Homo sapiens
gtggcacacgccttg

SEQ ID NO: 671503 - DNA, 15 bp, Homo sapiens
tggcacacgccttgt

SEQ ID NO: 671504 - DNA, 15 bp, Homo sapiens
ggcacacgccttgtt

SEQ ID NO: 671505 - DNA, 15 bp, Homo sapiens
gcacacgccttgttt

SEQ ID NO: 671506 - DNA, 15 bp, Homo sapiens
cacacgccttgtttc

SEQ ID NO: 671507 - DNA, 15 bp, Homo sapiens
acacgccttgtttct

SEQ ID NO: 671508 - DNA, 15 bp, Homo sapiens
cacgccttgtttctg

SEQ ID NO: 671509 - DNA, 15 bp, Homo sapiens
acgccttgtttctgc

SEQ ID NO: 671510 - DNA, 15 bp, Homo sapiens
cgccttgtttctgcg

SEQ ID NO: 671511 - DNA, 15 bp, Homo sapiens
gccttgtttctgcgt

SEQ ID NO: 671512 - DNA, 15 bp, Homo sapiens
ccttgtttctgcgtc

SEQ ID NO: 671513 - DNA, 15 bp, Homo sapiens
cttgtttctgcgtcc

SEQ ID NO: 671514 - DNA, 15 bp, Homo sapiens
ttgtttctgcgtcct

SEQ ID NO: 671515 - DNA, 15 bp, Homo sapiens
tgtttctgcgtcctg

SEQ ID NO: 671516 - DNA, 15 bp, Homo sapiens
gtttctgcgtcctgt

SEQ ID NO: 671517 - DNA, 15 bp, Homo sapiens
tttctgcgtcctgtg

SEQ ID NO: 671518 - DNA, 15 bp, Homo sapiens
ttctgcgtcctgtgt

SEQ ID NO: 671519 - DNA, 15 bp, Homo sapiens
tctgcgtcctgtgtc

SEQ ID NO: 671520 - DNA, 15 bp, Homo sapiens
ctgcgtcctgtgtcc

SEQ ID NO: 671521 - DNA, 15 bp, Homo sapiens
tgcgtcctgtgtcct

SEQ ID NO: 671522 - DNA, 15 bp, Homo sapiens
gcgtcctgtgtcctc

SEQ ID NO: 671523 - DNA, 15 bp, Homo sapiens
cgtcctgtgtcctcc

SEQ ID NO: 671524 - DNA, 15 bp, Homo sapiens
gtcctgtgtcctcca

SEQ ID NO: 671525 - DNA, 15 bp, Homo sapiens
tcctgtgtcctccaa

SEQ ID NO: 671526 - DNA, 15 bp, Homo sapiens
cctgtgtcctccaac

SEQ ID NO: 671527 - DNA, 15 bp, Homo sapiens
ctgtgtcctccaact

SEQ ID NO: 671528 - DNA, 15 bp, Homo sapiens
tgtgtcctccaactg

SEQ ID NO: 671529 - DNA, 15 bp, Homo sapiens
gtgtcctccaactgc

SEQ ID NO: 671530 - DNA, 15 bp, Homo sapiens
tgtcctccaactgcc

SEQ ID NO: 671531 - DNA, 15 bp, Homo sapiens
gtcctccaactgccc

SEQ ID NO: 671532 - DNA, 15 bp, Homo sapiens
tcctccaactgcccc

SEQ ID NO: 671533 - DNA, 15 bp, Homo sapiens
cctccaactgccccc

SEQ ID NO: 671534 - DNA, 15 bp, Homo sapiens
ctccaactgccccct

SEQ ID NO: 671535 - DNA, 15 bp, Homo sapiens
tccaactgccccctc

SEQ ID NO: 671536 - DNA, 15 bp, Homo sapiens
ccaactgccccctcc

SEQ ID NO: 671537 - DNA, 15 bp, Homo sapiens
caactgccccctcct

SEQ ID NO: 671538 - DNA, 15 bp, Homo sapiens
aactgccccctcctg

SEQ ID NO: 671539 - DNA, 15 bp, Homo sapiens
actgccccctcctga

SEQ ID NO: 671540 - DNA, 15 bp, Homo sapiens
ctgccccctcctgag

SEQ ID NO: 671541 - DNA, 15 bp, Homo sapiens
tgccccctcctgagc

SEQ ID NO: 671542 - DNA, 15 bp, Homo sapiens
gccccctcctgagcc

SEQ ID NO: 671543 - DNA, 15 bp, Homo sapiens
ccccctcctgagcct

SEQ ID NO: 671544 - DNA, 15 bp, Homo sapiens
cccctcctgagcctc

SEQ ID NO: 671545 - DNA, 15 bp, Homo sapiens
ccctcctgagcctct

SEQ ID NO: 671546 - DNA, 15 bp, Homo sapiens
cctcctgagcctctc

SEQ ID NO: 671547 - DNA, 15 bp, Homo sapiens
ctcctgagcctctct

SEQ ID NO: 671548 - DNA, 15 bp, Homo sapiens
tcctgagcctctctc

SEQ ID NO: 671549 - DNA, 15 bp, Homo sapiens
cctgagcctctctct

SEQ ID NO: 671550 - DNA, 15 bp, Homo sapiens
ctgagcctctctctg

SEQ ID NO: 671551 - DNA, 15 bp, Homo sapiens
tgagcctctctctgc

SEQ ID NO: 671552 - DNA, 15 bp, Homo sapiens
gagcctctctctgct

SEQ ID NO: 671553 - DNA, 15 bp, Homo sapiens
agcctctctctgctc

SEQ ID NO: 671554 - DNA, 15 bp, Homo sapiens
gcctctctctgctca

SEQ ID NO: 671555 - DNA, 15 bp, Homo sapiens
cctctctctgctcat

SEQ ID NO: 671556 - DNA, 15 bp, Homo sapiens
ctctctctgctcatc

SEQ ID NO: 671557 - DNA, 15 bp, Homo sapiens
tctctctgctcatct

SEQ ID NO: 671558 - DNA, 15 bp, Homo sapiens
ctctctgctcatctg

SEQ ID NO: 671559 - DNA, 15 bp, Homo sapiens
tctctgctcatctgt

SEQ ID NO: 671560 - DNA, 15 bp, Homo sapiens
ctctgctcatctgtc

SEQ ID NO: 671561 - DNA, 15 bp, Homo sapiens
tctgctcatctgtca

SEQ ID NO: 671562 - DNA, 15 bp, Homo sapiens
ctgctcatctgtcaa

SEQ ID NO: 671563 - DNA, 15 bp, Homo sapiens
tgctcatctgtcaaa

SEQ ID NO: 671564 - DNA, 15 bp, Homo sapiens
gctcatctgtcaaat

SEQ ID NO: 671565 - DNA, 15 bp, Homo sapiens
ctcatctgtcaaatg

SEQ ID NO: 671566 - DNA, 15 bp, Homo sapiens
tcatctgtcaaatgg

SEQ ID NO: 671567 - DNA, 15 bp, Homo sapiens
catctgtcaaatggg

SEQ ID NO: 671568 - DNA, 15 bp, Homo sapiens
atctgtcaaatgggt

SEQ ID NO: 671569 - DNA, 15 bp, Homo sapiens
tctgtcaaatgggta

SEQ ID NO: 671570 - DNA, 15 bp, Homo sapiens
ctgtcaaatgggtac

SEQ ID NO: 671571 - DNA, 15 bp, Homo sapiens
tgtcaaatgggtacc

SEQ ID NO: 671572 - DNA, 15 bp, Homo sapiens
gtcaaatgggtacct

SEQ ID NO: 671573 - DNA, 15 bp, Homo sapiens
tcaaatgggtacctc

SEQ ID NO: 671574 - DNA, 15 bp, Homo sapiens
caaatgggtacctca

SEQ ID NO: 671575 - DNA, 15 bp, Homo sapiens
aaatgggtacctcaa

SEQ ID NO: 671576 - DNA, 15 bp, Homo sapiens
aatgggtacctcaag

SEQ ID NO: 671577 - DNA, 15 bp, Homo sapiens
atgggtacctcaagg

SEQ ID NO: 671578 - DNA, 15 bp, Homo sapiens
tgggtacctcaaggt

SEQ ID NO: 671579 - DNA, 15 bp, Homo sapiens
gggtacctcaaggtc

SEQ ID NO: 671580 - DNA, 15 bp, Homo sapiens
ggtacctcaaggtcg

SEQ ID NO: 671581 - DNA, 15 bp, Homo sapiens
gtacctcaaggtcgt

SEQ ID NO: 671582 - DNA, 15 bp, Homo sapiens
tacctcaaggtcgtt

SEQ ID NO: 671583 - DNA, 15 bp, Homo sapiens
acctcaaggtcgttg

SEQ ID NO: 671584 - DNA, 15 bp, Homo sapiens
cctcaaggtcgttgt

SEQ ID NO: 671585 - DNA, 15 bp, Homo sapiens
ctcaaggtcgttgta

SEQ ID NO: 671586 - DNA, 15 bp, Homo sapiens
tcaaggtcgttgtaa

SEQ ID NO: 671587 - DNA, 15 bp, Homo sapiens
caaggtcgttgtaag

SEQ ID NO: 671588 - DNA, 15 bp, Homo sapiens
aaggtcgttgtaagg

SEQ ID NO: 671589 - DNA, 15 bp, Homo sapiens
aggtcgttgtaagga

SEQ ID NO: 671590 - DNA, 15 bp, Homo sapiens
ggtcgttgtaaggac

SEQ ID NO: 671591 - DNA, 15 bp, Homo sapiens
gtcgttgtaaggact

SEQ ID NO: 671592 - DNA, 15 bp, Homo sapiens
tcgttgtaaggactc

SEQ ID NO: 671593 - DNA, 15 bp, Homo sapiens
cgttgtaaggactca

SEQ ID NO: 671594 - DNA, 15 bp, Homo sapiens
gttgtaaggactcat

SEQ ID NO: 671595 - DNA, 15 bp, Homo sapiens
ttgtaaggactcatg

SEQ ID NO: 671596 - DNA, 15 bp, Homo sapiens
tgtaaggactcatga

SEQ ID NO: 671597 - DNA, 15 bp, Homo sapiens
gtaaggactcatgag

SEQ ID NO: 671598 - DNA, 15 bp, Homo sapiens
taaggactcatgagt

SEQ ID NO: 671599 - DNA, 15 bp, Homo sapiens
aaggactcatgagtc

SEQ ID NO: 671600 - DNA, 15 bp, Homo sapiens
aggactcatgagtcg

SEQ ID NO: 671601 - DNA, 15 bp, Homo sapiens
ggactcatgagtcgg

SEQ ID NO: 671602 - DNA, 15 bp, Homo sapiens
gactcatgagtcggg

SEQ ID NO: 671603 - DNA, 15 bp, Homo sapiens
actcatgagtcggga

SEQ ID NO: 671604 - DNA, 15 bp, Homo sapiens
ctcatgagtcgggat

SEQ ID NO: 671605 - DNA, 15 bp, Homo sapiens
tcatgagtcgggata

SEQ ID NO: 671606 - DNA, 15 bp, Homo sapiens
catgagtcgggataa

SEQ ID NO: 671607 - DNA, 15 bp, Homo sapiens
atgagtcgggataac

SEQ ID NO: 671608 - DNA, 15 bp, Homo sapiens
tgagtcgggataacc

SEQ ID NO: 671609 - DNA, 15 bp, Homo sapiens
gagtcgggataacca

SEQ ID NO: 671610 - DNA, 15 bp, Homo sapiens
agtcgggataaccat

SEQ ID NO: 671611 - DNA, 15 bp, Homo sapiens
gtcgggataaccata

SEQ ID NO: 671612 - DNA, 15 bp, Homo sapiens
tcgggataaccatac

SEQ ID NO: 671613 - DNA, 15 bp, Homo sapiens
cgggataaccatact

SEQ ID NO: 671614 - DNA, 15 bp, Homo sapiens
gggataaccatactt

SEQ ID NO: 671615 - DNA, 15 bp, Homo sapiens
ggataaccatacttt

SEQ ID NO: 671616 - DNA, 15 bp, Homo sapiens
gataaccatactttt

SEQ ID NO: 671617 - DNA, 15 bp, Homo sapiens
ataaccatacttttc

SEQ ID NO: 671618 - DNA, 15 bp, Homo sapiens
taaccatacttttct

SEQ ID NO: 671619 - DNA, 15 bp, Homo sapiens
aaccatacttttctt

SEQ ID NO: 671620 - DNA, 15 bp, Homo sapiens
accatacttttcttg

SEQ ID NO: 671621 - DNA, 15 bp, Homo sapiens
ccatacttttcttgg

SEQ ID NO: 671622 - DNA, 15 bp, Homo sapiens
catacttttcttgga

SEQ ID NO: 671623 - DNA, 15 bp, Homo sapiens
atacttttcttggat

SEQ ID NO: 671624 - DNA, 15 bp, Homo sapiens
tacttttcttggatg

SEQ ID NO: 671625 - DNA, 15 bp, Homo sapiens
acttttcttggatgg

SEQ ID NO: 671626 - DNA, 15 bp, Homo sapiens
cttttcttggatgga

SEQ ID NO: 671627 - DNA, 15 bp, Homo sapiens
ttttcttggatggac

SEQ ID NO: 671628 - DNA, 15 bp, Homo sapiens
tttcttggatggaca

SEQ ID NO: 671629 - DNA, 15 bp, Homo sapiens
ttcttggatggacac

SEQ ID NO: 671630 - DNA, 15 bp, Homo sapiens
tcttggatggacaca

SEQ ID NO: 671631 - DNA, 15 bp, Homo sapiens
cttggatggacacat

SEQ ID NO: 671632 - DNA, 15 bp, Homo sapiens
ttggatggacacatc

SEQ ID NO: 671633 - DNA, 15 bp, Homo sapiens
tggatggacacatca

SEQ ID NO: 671634 - DNA, 15 bp, Homo sapiens
ggatggacacatcag

SEQ ID NO: 671635 - DNA, 15 bp, Homo sapiens
gatggacacatcagc

SEQ ID NO: 671636 - DNA, 15 bp, Homo sapiens
atggacacatcagca

SEQ ID NO: 671637 - DNA, 15 bp, Homo sapiens
tggacacatcagcac

SEQ ID NO: 671638 - DNA, 15 bp, Homo sapiens
ggacacatcagcacc

SEQ ID NO: 671639 - DNA, 15 bp, Homo sapiens
gacacatcagcaccg

SEQ ID NO: 671640 - DNA, 15 bp, Homo sapiens
acacatcagcaccgg

SEQ ID NO: 671641 - DNA, 15 bp, Homo sapiens
cacatcagcaccggg

SEQ ID NO: 671642 - DNA, 15 bp, Homo sapiens
acatcagcaccgggc

SEQ ID NO: 671643 - DNA, 15 bp, Homo sapiens
catcagcaccgggct

SEQ ID NO: 671644 - DNA, 15 bp, Homo sapiens
atcagcaccgggctt

SEQ ID NO: 671645 - DNA, 15 bp, Homo sapiens
tcagcaccgggcttg

SEQ ID NO: 671646 - DNA, 15 bp, Homo sapiens
cagcaccgggcttga

SEQ ID NO: 671647 - DNA, 15 bp, Homo sapiens
agcaccgggcttgac

SEQ ID NO: 671648 - DNA, 15 bp, Homo sapiens
gcaccgggcttgaca

SEQ ID NO: 671649 - DNA, 15 bp, Homo sapiens
caccgggcttgacat

SEQ ID NO: 671650 - DNA, 15 bp, Homo sapiens
accgggcttgacatt

SEQ ID NO: 671651 - DNA, 15 bp, Homo sapiens
ccgggcttgacattt

SEQ ID NO: 671652 - DNA, 15 bp, Homo sapiens
cgggcttgacattta

SEQ ID NO: 671653 - DNA, 15 bp, Homo sapiens
gggcttgacatttac

SEQ ID NO: 671654 - DNA, 15 bp, Homo sapiens
ggcttgacatttacc

SEQ ID NO: 671655 - DNA, 15 bp, Homo sapiens
gcttgacatttaccc

SEQ ID NO: 671656 - DNA, 15 bp, Homo sapiens
cttgacatttaccca

SEQ ID NO: 671657 - DNA, 15 bp, Homo sapiens
ttgacatttacccag

SEQ ID NO: 671658 - DNA, 15 bp, Homo sapiens
tgacatttacccagt

SEQ ID NO: 671659 - DNA, 15 bp, Homo sapiens
gacatttacccagtt

SEQ ID NO: 671660 - DNA, 15 bp, Homo sapiens
acatttacccagttc

SEQ ID NO: 671661 - DNA, 15 bp, Homo sapiens
catttacccagttcc

SEQ ID NO: 671662 - DNA, 15 bp, Homo sapiens
atttacccagttccc

SEQ ID NO: 671663 - DNA, 15 bp, Homo sapiens
tttacccagttcccc

SEQ ID NO: 671664 - DNA, 15 bp, Homo sapiens
ttacccagttcccct

SEQ ID NO: 671665 - DNA, 15 bp, Homo sapiens
tacccagttcccctt

SEQ ID NO: 671666 - DNA, 15 bp, Homo sapiens
acccagttccccttt

SEQ ID NO: 671667 - DNA, 15 bp, Homo sapiens
cccagttcccctttg

SEQ ID NO: 671668 - DNA, 15 bp, Homo sapiens
ccagttcccctttga

SEQ ID NO: 671669 - DNA, 15 bp, Homo sapiens
cagttcccctttgat

SEQ ID NO: 671670 - DNA, 15 bp, Homo sapiens
agttcccctttgatg

SEQ ID NO: 671671 - DNA, 15 bp, Homo sapiens
gttcccctttgatgc

SEQ ID NO: 671672 - DNA, 15 bp, Homo sapiens
ttcccctttgatgcc

SEQ ID NO: 671673 - DNA, 15 bp, Homo sapiens
tcccctttgatgcct

SEQ ID NO: 671674 - DNA, 15 bp, Homo sapiens
cccctttgatgcctg

SEQ ID NO: 671675 - DNA, 15 bp, Homo sapiens
ccctttgatgcctgg

SEQ ID NO: 671676 - DNA, 15 bp, Homo sapiens
cctttgatgcctggt

SEQ ID NO: 671677 - DNA, 15 bp, Homo sapiens
ctttgatgcctggtt

SEQ ID NO: 671678 - DNA, 15 bp, Homo sapiens
tttgatgcctggttt

SEQ ID NO: 671679 - DNA, 15 bp, Homo sapiens
ttgatgcctggtttc

SEQ ID NO: 671680 - DNA, 15 bp, Homo sapiens
tgatgcctggtttcc

SEQ ID NO: 671681 - DNA, 15 bp, Homo sapiens
gatgcctggtttcct

SEQ ID NO: 671682 - DNA, 15 bp, Homo sapiens
atgcctggtttcctc

SEQ ID NO: 671683 - DNA, 15 bp, Homo sapiens
tgcctggtttcctct

SEQ ID NO: 671684 - DNA, 15 bp, Homo sapiens
gcctggtttcctctt

SEQ ID NO: 671685 - DNA, 15 bp, Homo sapiens
cctggtttcctcttt

SEQ ID NO: 671686 - DNA, 15 bp, Homo sapiens
ctggtttcctctttc

SEQ ID NO: 671687 - DNA, 15 bp, Homo sapiens
tggtttcctctttcc

SEQ ID NO: 671688 - DNA, 15 bp, Homo sapiens
ggtttcctctttccc

SEQ ID NO: 671689 - DNA, 15 bp, Homo sapiens
gtttcctctttcccg

SEQ ID NO: 671690 - DNA, 15 bp, Homo sapiens
tttcctctttcccgg

SEQ ID NO: 671691 - DNA, 15 bp, Homo sapiens
ttcctctttcccggc

SEQ ID NO: 671692 - DNA, 15 bp, Homo sapiens
tcctctttcccggcc

SEQ ID NO: 671693 - DNA, 15 bp, Homo sapiens
cctctttcccggccc

SEQ ID NO: 671694 - DNA, 15 bp, Homo sapiens
ctctttcccggcccc

SEQ ID NO: 671695 - DNA, 15 bp, Homo sapiens
tctttcccggccccc

SEQ ID NO: 671696 - DNA, 15 bp, Homo sapiens
ctttcccggccccct

SEQ ID NO: 671697 - DNA, 15 bp, Homo sapiens
tttcccggccccctg

SEQ ID NO: 671698 - DNA, 15 bp, Homo sapiens
ttcccggccccctga

SEQ ID NO: 671699 - DNA, 15 bp, Homo sapiens
tcccggccccctgaa

SEQ ID NO: 671700 - DNA, 15 bp, Homo sapiens
cccggccccctgaag

SEQ ID NO: 671701 - DNA, 15 bp, Homo sapiens
ccggccccctgaaga

SEQ ID NO: 671702 - DNA, 15 bp, Homo sapiens
cggccccctgaagag

SEQ ID NO: 671703 - DNA, 15 bp, Homo sapiens
ggccccctgaagagg

SEQ ID NO: 671704 - DNA, 15 bp, Homo sapiens
gccccctgaagaggt

SEQ ID NO: 671705 - DNA, 15 bp, Homo sapiens
ccccctgaagaggtg

SEQ ID NO: 671706 - DNA, 15 bp, Homo sapiens
cccctgaagaggtga

SEQ ID NO: 671707 - DNA, 15 bp, Homo sapiens
ccctgaagaggtgat

SEQ ID NO: 671708 - DNA, 15 bp, Homo sapiens
cctgaagaggtgatc

SEQ ID NO: 671709 - DNA, 15 bp, Homo sapiens
ctgaagaggtgatct

SEQ ID NO: 671710 - DNA, 15 bp, Homo sapiens
tgaagaggtgatctg

SEQ ID NO: 671711 - DNA, 15 bp, Homo sapiens
gaagaggtgatctga

SEQ ID NO: 671712 - DNA, 15 bp, Homo sapiens
aagaggtgatctgat

SEQ ID NO: 671713 - DNA, 15 bp, Homo sapiens
agaggtgatctgatt

SEQ ID NO: 671714 - DNA, 15 bp, Homo sapiens
gaggtgatctgattt

SEQ ID NO: 671715 - DNA, 15 bp, Homo sapiens
aggtgatctgatttc

SEQ ID NO: 671716 - DNA, 15 bp, Homo sapiens
ggtgatctgatttct

SEQ ID NO: 671717 - DNA, 15 bp, Homo sapiens
gtgatctgatttctg

SEQ ID NO: 671718 - DNA, 15 bp, Homo sapiens
tgatctgatttctga

SEQ ID NO: 671719 - DNA, 15 bp, Homo sapiens
gatctgatttctgac

SEQ ID NO: 671720 - DNA, 15 bp, Homo sapiens
atctgatttctgaca

SEQ ID NO: 671721 - DNA, 15 bp, Homo sapiens
tctgatttctgacag

SEQ ID NO: 671722 - DNA, 15 bp, Homo sapiens
ctgatttctgacagg

SEQ ID NO: 671723 - DNA, 15 bp, Homo sapiens
tgatttctgacagga

SEQ ID NO: 671724 - DNA, 15 bp, Homo sapiens
gatttctgacaggag

SEQ ID NO: 671725 - DNA, 15 bp, Homo sapiens
atttctgacaggagc

SEQ ID NO: 671726 - DNA, 15 bp, Homo sapiens
tttctgacaggagcc

SEQ ID NO: 671727 - DNA, 15 bp, Homo sapiens
ttctgacaggagccc

SEQ ID NO: 671728 - DNA, 15 bp, Homo sapiens
tctgacaggagccct

SEQ ID NO: 671729 - DNA, 15 bp, Homo sapiens
ctgacaggagccctg

SEQ ID NO: 671730 - DNA, 15 bp, Homo sapiens
tgacaggagccctga

SEQ ID NO: 671731 - DNA, 15 bp, Homo sapiens
gacaggagccctgag

SEQ ID NO: 671732 - DNA, 15 bp, Homo sapiens
acaggagccctgagg

SEQ ID NO: 671733 - DNA, 15 bp, Homo sapiens
caggagccctgaggg

SEQ ID NO: 671734 - DNA, 15 bp, Homo sapiens
aggagccctgaggga

SEQ ID NO: 671735 - DNA, 15 bp, Homo sapiens
ggagccctgagggag

SEQ ID NO: 671736 - DNA, 15 bp, Homo sapiens
gagccctgagggagg

SEQ ID NO: 671737 - DNA, 15 bp, Homo sapiens
agccctgagggagga

SEQ ID NO: 671738 - DNA, 15 bp, Homo sapiens
gccctgagggaggaa

SEQ ID NO: 671739 - DNA, 15 bp, Homo sapiens
ccctgagggaggaaa

SEQ ID NO: 671740 - DNA, 15 bp, Homo sapiens
cctgagggaggaaat

SEQ ID NO: 671741 - DNA, 15 bp, Homo sapiens
ctgagggaggaaatg

SEQ ID NO: 671742 - DNA, 15 bp, Homo sapiens
tgagggaggaaatgg

SEQ ID NO: 671743 - DNA, 15 bp, Homo sapiens
gagggaggaaatggt

SEQ ID NO: 671744 - DNA, 15 bp, Homo sapiens
agggaggaaatggtc

SEQ ID NO: 671745 - DNA, 15 bp, Homo sapiens
gggaggaaatggtcc

SEQ ID NO: 671746 - DNA, 15 bp, Homo sapiens
ggaggaaatggtccc

SEQ ID NO: 671747 - DNA, 15 bp, Homo sapiens
gaggaaatggtcccc

SEQ ID NO: 671748 - DNA, 15 bp, Homo sapiens
aggaaatggtcccct

SEQ ID NO: 671749 - DNA, 15 bp, Homo sapiens
ggaaatggtcccctt

SEQ ID NO: 671750 - DNA, 15 bp, Homo sapiens
gaaatggtccccttt

SEQ ID NO: 671751 - DNA, 15 bp, Homo sapiens
aaatggtcccctttg

SEQ ID NO: 671752 - DNA, 15 bp, Homo sapiens
aatggtcccctttgt

SEQ ID NO: 671753 - DNA, 15 bp, Homo sapiens
atggtcccctttgtt

SEQ ID NO: 671754 - DNA, 15 bp, Homo sapiens
tggtcccctttgttg

SEQ ID NO: 671755 - DNA, 15 bp, Homo sapiens
ggtcccctttgttga

SEQ ID NO: 671756 - DNA, 15 bp, Homo sapiens
gtcccctttgttgac

SEQ ID NO: 671757 - DNA, 15 bp, Homo sapiens
tcccctttgttgact

SEQ ID NO: 671758 - DNA, 15 bp, Homo sapiens
cccctttgttgactt

SEQ ID NO: 671759 - DNA, 15 bp, Homo sapiens
ccctttgttgacttt

SEQ ID NO: 671760 - DNA, 15 bp, Homo sapiens
cctttgttgactttt

SEQ ID NO: 671761 - DNA, 15 bp, Homo sapiens
ctttgttgacttttc

SEQ ID NO: 671762 - DNA, 15 bp, Homo sapiens
tttgttgacttttct

SEQ ID NO: 671763 - DNA, 15 bp, Homo sapiens
ttgttgacttttctt

SEQ ID NO: 671764 - DNA, 15 bp, Homo sapiens
tgttgacttttcttt

SEQ ID NO: 671765 - DNA, 15 bp, Homo sapiens
gttgacttttctttt

SEQ ID NO: 671766 - DNA, 15 bp, Homo sapiens
ttgacttttcttttt

SEQ ID NO: 671767 - DNA, 15 bp, Homo sapiens
tgacttttctttttc

SEQ ID NO: 671768 - DNA, 15 bp, Homo sapiens
gacttttctttttct

SEQ ID NO: 671769 - DNA, 15 bp, Homo sapiens
acttttctttttctt

SEQ ID NO: 671770 - DNA, 15 bp, Homo sapiens
cttttctttttcttt

SEQ ID NO: 671771 - DNA, 15 bp, Homo sapiens
ttttctttttcttta

SEQ ID NO: 671772 - DNA, 15 bp, Homo sapiens
tttctttttctttat

SEQ ID NO: 671773 - DNA, 15 bp, Homo sapiens
ttctttttctttatt

SEQ ID NO: 671774 - DNA, 15 bp, Homo sapiens
tctttttctttattt

SEQ ID NO: 671775 - DNA, 15 bp, Homo sapiens
ctttttctttatttt

SEQ ID NO: 671776 - DNA, 15 bp, Homo sapiens
tttttctttattttt

SEQ ID NO: 671777 - DNA, 15 bp, Homo sapiens
ttttctttatttttt

SEQ ID NO: 671778 - DNA, 15 bp, Homo sapiens
tttctttattttttt

SEQ ID NO: 671779 - DNA, 15 bp, Homo sapiens
ttctttatttttttc

SEQ ID NO: 671780 - DNA, 15 bp, Homo sapiens
tctttatttttttct

SEQ ID NO: 671781 - DNA, 15 bp, Homo sapiens
ctttatttttttctt

SEQ ID NO: 671782 - DNA, 15 bp, Homo sapiens
tttatttttttcttt

SEQ ID NO: 671783 - DNA, 15 bp, Homo sapiens
ttatttttttctttt

SEQ ID NO: 671784 - DNA, 15 bp, Homo sapiens
tatttttttcttttg

SEQ ID NO: 671785 - DNA, 15 bp, Homo sapiens
atttttttcttttga

SEQ ID NO: 671786 - DNA, 15 bp, Homo sapiens
tttttttcttttgag

SEQ ID NO: 671787 - DNA, 15 bp, Homo sapiens
ttttttcttttgaga

SEQ ID NO: 671788 - DNA, 15 bp, Homo sapiens
tttttcttttgagat

SEQ ID NO: 671789 - DNA, 15 bp, Homo sapiens
ttttcttttgagatt

SEQ ID NO: 671790 - DNA, 15 bp, Homo sapiens
tttcttttgagattt

SEQ ID NO: 671791 - DNA, 15 bp, Homo sapiens
ttcttttgagatttg

SEQ ID NO: 671792 - DNA, 15 bp, Homo sapiens
tcttttgagatttgc

SEQ ID NO: 671793 - DNA, 15 bp, Homo sapiens
cttttgagatttgct

SEQ ID NO: 671794 - DNA, 15 bp, Homo sapiens
ttttgagatttgctg

SEQ ID NO: 671795 - DNA, 15 bp, Homo sapiens
tttgagatttgctgt

SEQ ID NO: 671796 - DNA, 15 bp, Homo sapiens
ttgagatttgctgtc

SEQ ID NO: 671797 - DNA, 15 bp, Homo sapiens
tgagatttgctgtca

SEQ ID NO: 671798 - DNA, 15 bp, Homo sapiens
gagatttgctgtcac

SEQ ID NO: 671799 - DNA, 15 bp, Homo sapiens
agatttgctgtcacc

SEQ ID NO: 671800 - DNA, 15 bp, Homo sapiens
gatttgctgtcaccc

SEQ ID NO: 671801 - DNA, 15 bp, Homo sapiens
atttgctgtcaccca

SEQ ID NO: 671802 - DNA, 15 bp, Homo sapiens
tttgctgtcacccag

SEQ ID NO: 671803 - DNA, 15 bp, Homo sapiens
ttgctgtcacccagc

SEQ ID NO: 671804 - DNA, 15 bp, Homo sapiens
tgctgtcacccagcc

SEQ ID NO: 671805 - DNA, 15 bp, Homo sapiens
gctgtcacccagcct

SEQ ID NO: 671806 - DNA, 15 bp, Homo sapiens
ctgtcacccagcctg

SEQ ID NO: 671807 - DNA, 15 bp, Homo sapiens
tgtcacccagcctgg

SEQ ID NO: 671808 - DNA, 15 bp, Homo sapiens
gtcacccagcctgga

SEQ ID NO: 671809 - DNA, 15 bp, Homo sapiens
tcacccagcctggaa

SEQ ID NO: 671810 - DNA, 15 bp, Homo sapiens
cacccagcctggaat

SEQ ID NO: 671811 - DNA, 15 bp, Homo sapiens
acccagcctggaatg

SEQ ID NO: 671812 - DNA, 15 bp, Homo sapiens
cccagcctggaatgc

SEQ ID NO: 671813 - DNA, 15 bp, Homo sapiens
ccagcctggaatgca

SEQ ID NO: 671814 - DNA, 15 bp, Homo sapiens
cagcctggaatgcag

SEQ ID NO: 671815 - DNA, 15 bp, Homo sapiens
agcctggaatgcagt

SEQ ID NO: 671816 - DNA, 15 bp, Homo sapiens
gcctggaatgcagtg

SEQ ID NO: 671817 - DNA, 15 bp, Homo sapiens
cctggaatgcagtgg

SEQ ID NO: 671818 - DNA, 15 bp, Homo sapiens
ctggaatgcagtggt

SEQ ID NO: 671819 - DNA, 15 bp, Homo sapiens
tggaatgcagtggtg

SEQ ID NO: 671820 - DNA, 15 bp, Homo sapiens
ggaatgcagtggtgc

SEQ ID NO: 671821 - DNA, 15 bp, Homo sapiens
gaatgcagtggtgcc

SEQ ID NO: 671822 - DNA, 15 bp, Homo sapiens
aatgcagtggtgcca

SEQ ID NO: 671823 - DNA, 15 bp, Homo sapiens
atgcagtggtgccat

SEQ ID NO: 671824 - DNA, 15 bp, Homo sapiens
tgcagtggtgccatc

SEQ ID NO: 671825 - DNA, 15 bp, Homo sapiens
gcagtggtgccatct

SEQ ID NO: 671826 - DNA, 15 bp, Homo sapiens
cagtggtgccatctt

SEQ ID NO: 671827 - DNA, 15 bp, Homo sapiens
agtggtgccatcttg

SEQ ID NO: 671828 - DNA, 15 bp, Homo sapiens
gtggtgccatcttgg

SEQ ID NO: 671829 - DNA, 15 bp, Homo sapiens
tggtgccatcttggc

SEQ ID NO: 671830 - DNA, 15 bp, Homo sapiens
ggtgccatcttggct

SEQ ID NO: 671831 - DNA, 15 bp, Homo sapiens
gtgccatcttggctc

SEQ ID NO: 671832 - DNA, 15 bp, Homo sapiens
tgccatcttggctca

SEQ ID NO: 671833 - DNA, 15 bp, Homo sapiens
gccatcttggctcac

SEQ ID NO: 671834 - DNA, 15 bp, Homo sapiens
ccatcttggctcact

SEQ ID NO: 671835 - DNA, 15 bp, Homo sapiens
catcttggctcactg

SEQ ID NO: 671836 - DNA, 15 bp, Homo sapiens
tcttggctcactgct

SEQ ID NO: 671837 - DNA, 15 bp, Homo sapiens
cttggctcactgcta

SEQ ID NO: 671838 - DNA, 15 bp, Homo sapiens
ttggctcactgctac

SEQ ID NO: 671839 - DNA, 15 bp, Homo sapiens
tggctcactgctacc

SEQ ID NO: 671840 - DNA, 15 bp, Homo sapiens
ggctcactgctacct

SEQ ID NO: 671841 - DNA, 15 bp, Homo sapiens
gctcactgctacctc

SEQ ID NO: 671842 - DNA, 15 bp, Homo sapiens
ctcactgctacctct

SEQ ID NO: 671843 - DNA, 15 bp, Homo sapiens
tcactgctacctctc

SEQ ID NO: 671844 - DNA, 15 bp, Homo sapiens
cactgctacctctcc

SEQ ID NO: 671845 - DNA, 15 bp, Homo sapiens
actgctacctctccc

SEQ ID NO: 671846 - DNA, 15 bp, Homo sapiens
ctgctacctctccca

SEQ ID NO: 671847 - DNA, 15 bp, Homo sapiens
tgctacctctcccac

SEQ ID NO: 671848 - DNA, 15 bp, Homo sapiens
gctacctctcccact

SEQ ID NO: 671849 - DNA, 15 bp, Homo sapiens
ctacctctcccactg

SEQ ID NO: 671850 - DNA, 15 bp, Homo sapiens
tacctctcccactgg

SEQ ID NO: 671851 - DNA, 15 bp, Homo sapiens
acctctcccactggg

SEQ ID NO: 671852 - DNA, 15 bp, Homo sapiens
cctctcccactgggt

SEQ ID NO: 671853 - DNA, 15 bp, Homo sapiens
ctctcccactgggtt

SEQ ID NO: 671854 - DNA, 15 bp, Homo sapiens
tctcccactgggttc

SEQ ID NO: 671855 - DNA, 15 bp, Homo sapiens
ctcccactgggttca

SEQ ID NO: 671856 - DNA, 15 bp, Homo sapiens
tcccactgggttcaa

SEQ ID NO: 671857 - DNA, 15 bp, Homo sapiens
cccactgggttcaag

SEQ ID NO: 671858 - DNA, 15 bp, Homo sapiens
ccactgggttcaagc

SEQ ID NO: 671859 - DNA, 15 bp, Homo sapiens
cactgggttcaagca

SEQ ID NO: 671860 - DNA, 15 bp, Homo sapiens
actgggttcaagcaa

SEQ ID NO: 671861 - DNA, 15 bp, Homo sapiens
ctgggttcaagcaat

SEQ ID NO: 671862 - DNA, 15 bp, Homo sapiens
tgggttcaagcaatt

SEQ ID NO: 671863 - DNA, 15 bp, Homo sapiens
gggttcaagcaattc

SEQ ID NO: 671864 - DNA, 15 bp, Homo sapiens
ggattacaagcatgc

SEQ ID NO: 671865 - DNA, 15 bp, Homo sapiens
gattacaagcatgcg

SEQ ID NO: 671866 - DNA, 15 bp, Homo sapiens
attacaagcatgcgc

SEQ ID NO: 671867 - DNA, 15 bp, Homo sapiens
ttacaagcatgcgcc

SEQ ID NO: 671868 - DNA, 15 bp, Homo sapiens
tacaagcatgcgcca

SEQ ID NO: 671869 - DNA, 15 bp, Homo sapiens
acaagcatgcgccac

SEQ ID NO: 671870 - DNA, 15 bp, Homo sapiens
caagcatgcgccacc

SEQ ID NO: 671871 - DNA, 15 bp, Homo sapiens
aagcatgcgccacca

SEQ ID NO: 671872 - DNA, 15 bp, Homo sapiens
agcatgcgccaccat

SEQ ID NO: 671873 - DNA, 15 bp, Homo sapiens
gcatgcgccaccatg

SEQ ID NO: 671874 - DNA, 15 bp, Homo sapiens
catgcgccaccatgc

SEQ ID NO: 671875 - DNA, 15 bp, Homo sapiens
atgcgccaccatgcc

SEQ ID NO: 671876 - DNA, 15 bp, Homo sapiens
tgcgccaccatgcct

SEQ ID NO: 671877 - DNA, 15 bp, Homo sapiens
gcgccaccatgcctg

SEQ ID NO: 671878 - DNA, 15 bp, Homo sapiens
ccatgcctggctaag

SEQ ID NO: 671879 - DNA, 15 bp, Homo sapiens
catgcctggctaagt

SEQ ID NO: 671880 - DNA, 15 bp, Homo sapiens
atgcctggctaagtt

SEQ ID NO: 671881 - DNA, 15 bp, Homo sapiens
tgcctggctaagttt

SEQ ID NO: 671882 - DNA, 15 bp, Homo sapiens
gcctggctaagtttt

SEQ ID NO: 671883 - DNA, 15 bp, Homo sapiens
cctggctaagttttg

SEQ ID NO: 671884 - DNA, 15 bp, Homo sapiens
ctggctaagttttgt

SEQ ID NO: 671885 - DNA, 15 bp, Homo sapiens
tggctaagttttgta

SEQ ID NO: 671886 - DNA, 15 bp, Homo sapiens
ggctaagttttgtat

SEQ ID NO: 671887 - DNA, 15 bp, Homo sapiens
gctaagttttgtatt

SEQ ID NO: 671888 - DNA, 15 bp, Homo sapiens
ctaagttttgtattt

SEQ ID NO: 671889 - DNA, 15 bp, Homo sapiens
taagttttgtatttt

SEQ ID NO: 671890 - DNA, 15 bp, Homo sapiens
aagttttgtattttt

SEQ ID NO: 671891 - DNA, 15 bp, Homo sapiens
agttttgtattttta

SEQ ID NO: 671892 - DNA, 15 bp, Homo sapiens
gttttgtatttttag

SEQ ID NO: 671893 - DNA, 15 bp, Homo sapiens
ttgtatttttagtac

SEQ ID NO: 671894 - DNA, 15 bp, Homo sapiens
tgtatttttagtaca

SEQ ID NO: 671895 - DNA, 15 bp, Homo sapiens
gtatttttagtacag

SEQ ID NO: 671896 - DNA, 15 bp, Homo sapiens
tatttttagtacaga

SEQ ID NO: 671897 - DNA, 15 bp, Homo sapiens
atttttagtacagac

SEQ ID NO: 671898 - DNA, 15 bp, Homo sapiens
tttttagtacagaca

SEQ ID NO: 671899 - DNA, 15 bp, Homo sapiens
ttttagtacagacag

SEQ ID NO: 671900 - DNA, 15 bp, Homo sapiens
tttagtacagacagg

SEQ ID NO: 671901 - DNA, 15 bp, Homo sapiens
ttagtacagacaggg

SEQ ID NO: 671902 - DNA, 15 bp, Homo sapiens
tagtacagacagggt

SEQ ID NO: 671903 - DNA, 15 bp, Homo sapiens
agtacagacagggtt

SEQ ID NO: 671904 - DNA, 15 bp, Homo sapiens
gtacagacagggttt

SEQ ID NO: 671905 - DNA, 15 bp, Homo sapiens
tacagacagggtttc

SEQ ID NO: 671906 - DNA, 15 bp, Homo sapiens
acagacagggtttct

SEQ ID NO: 671907 - DNA, 15 bp, Homo sapiens
cagacagggtttctc

SEQ ID NO: 671908 - DNA, 15 bp, Homo sapiens
agggtttctccatgg

SEQ ID NO: 671909 - DNA, 15 bp, Homo sapiens
gggtttctccatggt

SEQ ID NO: 671910 - DNA, 15 bp, Homo sapiens
ggtttctccatggtg

SEQ ID NO: 671911 - DNA, 15 bp, Homo sapiens
gtttctccatggtgg

SEQ ID NO: 671912 - DNA, 15 bp, Homo sapiens
tttctccatggtggc

SEQ ID NO: 671913 - DNA, 15 bp, Homo sapiens
ttctccatggtggcc

SEQ ID NO: 671914 - DNA, 15 bp, Homo sapiens
tctccatggtggcca

SEQ ID NO: 671915 - DNA, 15 bp, Homo sapiens
ctccatggtggccag

SEQ ID NO: 671916 - DNA, 15 bp, Homo sapiens
tccatggtggccagg

SEQ ID NO: 671917 - DNA, 15 bp, Homo sapiens
ccatggtggccaggc

SEQ ID NO: 671918 - DNA, 15 bp, Homo sapiens
catggtggccaggct

SEQ ID NO: 671919 - DNA, 15 bp, Homo sapiens
atggtggccaggctg

SEQ ID NO: 671920 - DNA, 15 bp, Homo sapiens
tggtggccaggctgg

SEQ ID NO: 671921 - DNA, 15 bp, Homo sapiens
ggtggccaggctggt

SEQ ID NO: 671922 - DNA, 15 bp, Homo sapiens
gtggccaggctggtc

SEQ ID NO: 671923 - DNA, 15 bp, Homo sapiens
acctcaggtgatcct

SEQ ID NO: 671924 - DNA, 15 bp, Homo sapiens
cctcaggtgatcctc

SEQ ID NO: 671925 - DNA, 15 bp, Homo sapiens
ctcaggtgatcctcc

SEQ ID NO: 671926 - DNA, 15 bp, Homo sapiens
tcaggtgatcctccc

SEQ ID NO: 671927 - DNA, 15 bp, Homo sapiens
caggtgatcctccca

SEQ ID NO: 671928 - DNA, 15 bp, Homo sapiens
aggtgatcctcccac

SEQ ID NO: 671929 - DNA, 15 bp, Homo sapiens
ggtgatcctcccacc

SEQ ID NO: 671930 - DNA, 15 bp, Homo sapiens
cacctctgcctcccg

SEQ ID NO: 671931 - DNA, 15 bp, Homo sapiens
acctctgcctcccga

SEQ ID NO: 671932 - DNA, 15 bp, Homo sapiens
cctctgcctcccgaa

SEQ ID NO: 671933 - DNA, 15 bp, Homo sapiens
ctctgcctcccgaag

SEQ ID NO: 671934 - DNA, 15 bp, Homo sapiens
tctgcctcccgaagt

SEQ ID NO: 671935 - DNA, 15 bp, Homo sapiens
ctgcctcccgaagtg

SEQ ID NO: 671936 - DNA, 15 bp, Homo sapiens
tgcctcccgaagtgc

SEQ ID NO: 671937 - DNA, 15 bp, Homo sapiens
gcctcccgaagtgct

SEQ ID NO: 671938 - DNA, 15 bp, Homo sapiens
cctcccgaagtgcta

SEQ ID NO: 671939 - DNA, 15 bp, Homo sapiens
ctcccgaagtgctac

SEQ ID NO: 671940 - DNA, 15 bp, Homo sapiens
tcccgaagtgctacg

SEQ ID NO: 671941 - DNA, 15 bp, Homo sapiens
cccgaagtgctacga

SEQ ID NO: 671942 - DNA, 15 bp, Homo sapiens
ccgaagtgctacgat

SEQ ID NO: 671943 - DNA, 15 bp, Homo sapiens
cgaagtgctacgatt

SEQ ID NO: 671944 - DNA, 15 bp, Homo sapiens
gaagtgctacgatta

SEQ ID NO: 671945 - DNA, 15 bp, Homo sapiens
aagtgctacgattac

SEQ ID NO: 671946 - DNA, 15 bp, Homo sapiens
agtgctacgattaca

SEQ ID NO: 671947 - DNA, 15 bp, Homo sapiens
gtgctacgattacag

SEQ ID NO: 671948 - DNA, 15 bp, Homo sapiens
tgctacgattacagg

SEQ ID NO: 671949 - DNA, 15 bp, Homo sapiens
gctacgattacaggc

SEQ ID NO: 671950 - DNA, 15 bp, Homo sapiens
ctacgattacaggca

SEQ ID NO: 671951 - DNA, 15 bp, Homo sapiens
tacgattacaggcat

SEQ ID NO: 671952 - DNA, 15 bp, Homo sapiens
acgattacaggcatg

SEQ ID NO: 671953 - DNA, 15 bp, Homo sapiens
cgattacaggcatga

SEQ ID NO: 671954 - DNA, 15 bp, Homo sapiens
aggcatgagccaccg

SEQ ID NO: 671955 - DNA, 15 bp, Homo sapiens
ggcatgagccaccgc

SEQ ID NO: 671956 - DNA, 15 bp, Homo sapiens
gcatgagccaccgcg

SEQ ID NO: 671957 - DNA, 15 bp, Homo sapiens
catgagccaccgcgc

SEQ ID NO: 671958 - DNA, 15 bp, Homo sapiens
atgagccaccgcgcc

SEQ ID NO: 671959 - DNA, 15 bp, Homo sapiens
agccaccgcgcccat

SEQ ID NO: 671960 - DNA, 15 bp, Homo sapiens
gccaccgcgcccatc

SEQ ID NO: 671961 - DNA, 15 bp, Homo sapiens
ccaccgcgcccatcc

SEQ ID NO: 671962 - DNA, 15 bp, Homo sapiens
caccgcgcccatccc

SEQ ID NO: 671963 - DNA, 15 bp, Homo sapiens
accgcgcccatcccc

SEQ ID NO: 671964 - DNA, 15 bp, Homo sapiens
ccgcgcccatccccc

SEQ ID NO: 671965 - DNA, 15 bp, Homo sapiens
cgcgcccatccccct

SEQ ID NO: 671966 - DNA, 15 bp, Homo sapiens
gcgcccatccccctt

SEQ ID NO: 671967 - DNA, 15 bp, Homo sapiens
cgcccatcccccttt

SEQ ID NO: 671968 - DNA, 15 bp, Homo sapiens
gcccatccccctttg

SEQ ID NO: 671969 - DNA, 15 bp, Homo sapiens
cccatccccctttgt

SEQ ID NO: 671970 - DNA, 15 bp, Homo sapiens
ccatccccctttgtt

SEQ ID NO: 671971 - DNA, 15 bp, Homo sapiens
catccccctttgttg

SEQ ID NO: 671972 - DNA, 15 bp, Homo sapiens
atccccctttgttga

SEQ ID NO: 671973 - DNA, 15 bp, Homo sapiens
tccccctttgttgac

SEQ ID NO: 671974 - DNA, 15 bp, Homo sapiens
ccccctttgttgact

SEQ ID NO: 671975 - DNA, 15 bp, Homo sapiens
ttgttgacttttctc

SEQ ID NO: 671976 - DNA, 15 bp, Homo sapiens
tgttgacttttctca

SEQ ID NO: 671977 - DNA, 15 bp, Homo sapiens
gttgacttttctcat

SEQ ID NO: 671978 - DNA, 15 bp, Homo sapiens
ttgacttttctcatc

SEQ ID NO: 671979 - DNA, 15 bp, Homo sapiens
tgacttttctcatcc

SEQ ID NO: 671980 - DNA, 15 bp, Homo sapiens
gacttttctcatcct

SEQ ID NO: 671981 - DNA, 15 bp, Homo sapiens
acttttctcatcctc

SEQ ID NO: 671982 - DNA, 15 bp, Homo sapiens
cttttctcatcctct

SEQ ID NO: 671983 - DNA, 15 bp, Homo sapiens
ttttctcatcctctg

SEQ ID NO: 671984 - DNA, 15 bp, Homo sapiens
tttctcatcctctga

SEQ ID NO: 671985 - DNA, 15 bp, Homo sapiens
ttctcatcctctgag

SEQ ID NO: 671986 - DNA, 15 bp, Homo sapiens
tctcatcctctgaga

SEQ ID NO: 671987 - DNA, 15 bp, Homo sapiens
ctcatcctctgagaa

SEQ ID NO: 671988 - DNA, 15 bp, Homo sapiens
tcatcctctgagaaa

SEQ ID NO: 671989 - DNA, 15 bp, Homo sapiens
catcctctgagaaag

SEQ ID NO: 671990 - DNA, 15 bp, Homo sapiens
atcctctgagaaagt

SEQ ID NO: 671991 - DNA, 15 bp, Homo sapiens
tcctctgagaaagtc

SEQ ID NO: 671992 - DNA, 15 bp, Homo sapiens
cctctgagaaagtct

SEQ ID NO: 671993 - DNA, 15 bp, Homo sapiens
ctctgagaaagtctc

SEQ ID NO: 671994 - DNA, 15 bp, Homo sapiens
tctgagaaagtctca

SEQ ID NO: 671995 - DNA, 15 bp, Homo sapiens
ctgagaaagtctcag

SEQ ID NO: 671996 - DNA, 15 bp, Homo sapiens
tgagaaagtctcagt

SEQ ID NO: 671997 - DNA, 15 bp, Homo sapiens
gagaaagtctcagtt

SEQ ID NO: 671998 - DNA, 15 bp, Homo sapiens
agaaagtctcagttg

SEQ ID NO: 671999 - DNA, 15 bp, Homo sapiens
gaaagtctcagttga

SEQ ID NO: 672000 - DNA, 15 bp, Homo sapiens
aaagtctcagttgag

SEQ ID NO: 672001 - DNA, 15 bp, Homo sapiens
aagtctcagttgagg

SEQ ID NO: 672002 - DNA, 15 bp, Homo sapiens
agtctcagttgaggc

SEQ ID NO: 672003 - DNA, 15 bp, Homo sapiens
gtctcagttgaggcc

SEQ ID NO: 672004 - DNA, 15 bp, Homo sapiens
tctcagttgaggcca

SEQ ID NO: 672005 - DNA, 15 bp, Homo sapiens
ctcagttgaggccag

SEQ ID NO: 672006 - DNA, 15 bp, Homo sapiens
tcagttgaggccagc

SEQ ID NO: 672007 - DNA, 15 bp, Homo sapiens
cagttgaggccagca

SEQ ID NO: 672008 - DNA, 15 bp, Homo sapiens
agttgaggccagcac

SEQ ID NO: 672009 - DNA, 15 bp, Homo sapiens
gttgaggccagcacc

SEQ ID NO: 672010 - DNA, 15 bp, Homo sapiens
ttgaggccagcacct

SEQ ID NO: 672011 - DNA, 15 bp, Homo sapiens
tgaggccagcacctc

SEQ ID NO: 672012 - DNA, 15 bp, Homo sapiens
gaggccagcacctcc

SEQ ID NO: 672013 - DNA, 15 bp, Homo sapiens
aggccagcacctccc

SEQ ID NO: 672014 - DNA, 15 bp, Homo sapiens
ggccagcacctccct

SEQ ID NO: 672015 - DNA, 15 bp, Homo sapiens
gccagcacctccctc

SEQ ID NO: 672016 - DNA, 15 bp, Homo sapiens
ccagcacctccctca

SEQ ID NO: 672017 - DNA, 15 bp, Homo sapiens
cagcacctccctcaa

SEQ ID NO: 672018 - DNA, 15 bp, Homo sapiens
agcacctccctcaag

SEQ ID NO: 672019 - DNA, 15 bp, Homo sapiens
gcacctccctcaagt

SEQ ID NO: 672020 - DNA, 15 bp, Homo sapiens
cacctccctcaagtg

SEQ ID NO: 672021 - DNA, 15 bp, Homo sapiens
acctccctcaagtga

SEQ ID NO: 672022 - DNA, 15 bp, Homo sapiens
cctccctcaagtgaa

SEQ ID NO: 672023 - DNA, 15 bp, Homo sapiens
ctccctcaagtgaat

SEQ ID NO: 672024 - DNA, 15 bp, Homo sapiens
tccctcaagtgaatt

SEQ ID NO: 672025 - DNA, 15 bp, Homo sapiens
ccctcaagtgaattg

SEQ ID NO: 672026 - DNA, 15 bp, Homo sapiens
cctcaagtgaattga

SEQ ID NO: 672027 - DNA, 15 bp, Homo sapiens
ctcaagtgaattgaa

SEQ ID NO: 672028 - DNA, 15 bp, Homo sapiens
tcaagtgaattgaat

SEQ ID NO: 672029 - DNA, 15 bp, Homo sapiens
caagtgaattgaatc

SEQ ID NO: 672030 - DNA, 15 bp, Homo sapiens
aagtgaattgaatct

SEQ ID NO: 672031 - DNA, 15 bp, Homo sapiens
agtgaattgaatctc

SEQ ID NO: 672032 - DNA, 15 bp, Homo sapiens
gtgaattgaatctcc

SEQ ID NO: 672033 - DNA, 15 bp, Homo sapiens
tgaattgaatctccc

SEQ ID NO: 672034 - DNA, 15 bp, Homo sapiens
gaattgaatctccct

SEQ ID NO: 672035 - DNA, 15 bp, Homo sapiens
aattgaatctccctt

SEQ ID NO: 672036 - DNA, 15 bp, Homo sapiens
attgaatctcccttt

SEQ ID NO: 672037 - DNA, 15 bp, Homo sapiens
ttgaatctccctttt

SEQ ID NO: 672038 - DNA, 15 bp, Homo sapiens
tgaatctcccttttg

SEQ ID NO: 672039 - DNA, 15 bp, Homo sapiens
gaatctcccttttga

SEQ ID NO: 672040 - DNA, 15 bp, Homo sapiens
aatctcccttttgaa

SEQ ID NO: 672041 - DNA, 15 bp, Homo sapiens
atctcccttttgaac

SEQ ID NO: 672042 - DNA, 15 bp, Homo sapiens
tctcccttttgaaca

SEQ ID NO: 672043 - DNA, 15 bp, Homo sapiens
ctcccttttgaacaa

SEQ ID NO: 672044 - DNA, 15 bp, Homo sapiens
tcccttttgaacaac

SEQ ID NO: 672045 - DNA, 15 bp, Homo sapiens
cccttttgaacaaca

SEQ ID NO: 672046 - DNA, 15 bp, Homo sapiens
ccttttgaacaacaa

SEQ ID NO: 672047 - DNA, 15 bp, Homo sapiens
cttttgaacaacaac

SEQ ID NO: 672048 - DNA, 15 bp, Homo sapiens
ttttgaacaacaaca

SEQ ID NO: 672049 - DNA, 15 bp, Homo sapiens
tttgaacaacaacaa

SEQ ID NO: 672050 - DNA, 15 bp, Homo sapiens
ttgaacaacaacaaa

SEQ ID NO: 672051 - DNA, 15 bp, Homo sapiens
tgaacaacaacaaat

SEQ ID NO: 672052 - DNA, 15 bp, Homo sapiens
gaacaacaacaaata

SEQ ID NO: 672053 - DNA, 15 bp, Homo sapiens
aacaacaacaaataa

SEQ ID NO: 672054 - DNA, 15 bp, Homo sapiens
acaacaacaaataac

SEQ ID NO: 672055 - DNA, 15 bp, Homo sapiens
caacaacaaataaca

SEQ ID NO: 672056 - DNA, 15 bp, Homo sapiens
aacaacaaataacaa

SEQ ID NO: 672057 - DNA, 15 bp, Homo sapiens
acaacaaataacaat

SEQ ID NO: 672058 - DNA, 15 bp, Homo sapiens
caacaaataacaata

SEQ ID NO: 672059 - DNA, 15 bp, Homo sapiens
aacaaataacaatat

SEQ ID NO: 672060 - DNA, 15 bp, Homo sapiens
acaaataacaatatg

SEQ ID NO: 672061 - DNA, 15 bp, Homo sapiens
caaataacaatatga

SEQ ID NO: 672062 - DNA, 15 bp, Homo sapiens
aaataacaatatgac

SEQ ID NO: 672063 - DNA, 15 bp, Homo sapiens
aataacaatatgacc

SEQ ID NO: 672064 - DNA, 15 bp, Homo sapiens
ataacaatatgaccc

SEQ ID NO: 672065 - DNA, 15 bp, Homo sapiens
taacaatatgaccca

SEQ ID NO: 672066 - DNA, 15 bp, Homo sapiens
aacaatatgacccag

SEQ ID NO: 672067 - DNA, 15 bp, Homo sapiens
acaatatgacccaga

SEQ ID NO: 672068 - DNA, 15 bp, Homo sapiens
caatatgacccagac

SEQ ID NO: 672069 - DNA, 15 bp, Homo sapiens
aatatgacccagacg

SEQ ID NO: 672070 - DNA, 15 bp, Homo sapiens
atatgacccagacgt

SEQ ID NO: 672071 - DNA, 15 bp, Homo sapiens
tatgacccagacgtg

SEQ ID NO: 672072 - DNA, 15 bp, Homo sapiens
atgacccagacgtgg

SEQ ID NO: 672073 - DNA, 15 bp, Homo sapiens
tgacccagacgtggt

SEQ ID NO: 672074 - DNA, 15 bp, Homo sapiens
gacccagacgtggtg

SEQ ID NO: 672075 - DNA, 15 bp, Homo sapiens
acccagacgtggtgg

SEQ ID NO: 672076 - DNA, 15 bp, Homo sapiens
cccagacgtggtggc

SEQ ID NO: 672077 - DNA, 15 bp, Homo sapiens
ccagacgtggtggct

SEQ ID NO: 672078 - DNA, 15 bp, Homo sapiens
cagacgtggtggctc

SEQ ID NO: 672079 - DNA, 15 bp, Homo sapiens
agacgtggtggctca

SEQ ID NO: 672080 - DNA, 15 bp, Homo sapiens
gacgtggtggctcac

SEQ ID NO: 672081 - DNA, 15 bp, Homo sapiens
acgtggtggctcaca

SEQ ID NO: 672082 - DNA, 15 bp, Homo sapiens
cgtggtggctcacac

SEQ ID NO: 672083 - DNA, 15 bp, Homo sapiens
gtggtggctcacacc

SEQ ID NO: 672084 - DNA, 15 bp, Homo sapiens
tggctcacacctgtg

SEQ ID NO: 672085 - DNA, 15 bp, Homo sapiens
ggctcacacctgtgg

SEQ ID NO: 672086 - DNA, 15 bp, Homo sapiens
gctcacacctgtggt

SEQ ID NO: 672087 - DNA, 15 bp, Homo sapiens
ctcacacctgtggtc

SEQ ID NO: 672088 - DNA, 15 bp, Homo sapiens
tcacacctgtggtcc

SEQ ID NO: 672089 - DNA, 15 bp, Homo sapiens
ggtcccagctactcg

SEQ ID NO: 672090 - DNA, 15 bp, Homo sapiens
tcgggaggctgaggt

SEQ ID NO: 672091 - DNA, 15 bp, Homo sapiens
cgggaggctgaggtg

SEQ ID NO: 672092 - DNA, 15 bp, Homo sapiens
gggaggctgaggtgt

SEQ ID NO: 672093 - DNA, 15 bp, Homo sapiens
ggaggctgaggtgtg

SEQ ID NO: 672094 - DNA, 15 bp, Homo sapiens
gaggctgaggtgtga

SEQ ID NO: 672095 - DNA, 15 bp, Homo sapiens
aggctgaggtgtgag

SEQ ID NO: 672096 - DNA, 15 bp, Homo sapiens
ggctgaggtgtgagg

SEQ ID NO: 672097 - DNA, 15 bp, Homo sapiens
gctgaggtgtgagga

SEQ ID NO: 672098 - DNA, 15 bp, Homo sapiens
ctgaggtgtgaggat

SEQ ID NO: 672099 - DNA, 15 bp, Homo sapiens
tgaggtgtgaggatt

SEQ ID NO: 672100 - DNA, 15 bp, Homo sapiens
gaggtgtgaggattg

SEQ ID NO: 672101 - DNA, 15 bp, Homo sapiens
aggtgtgaggattgc

SEQ ID NO: 672102 - DNA, 15 bp, Homo sapiens
ggtgtgaggattgct

SEQ ID NO: 672103 - DNA, 15 bp, Homo sapiens
gtgtgaggattgctt

SEQ ID NO: 672104 - DNA, 15 bp, Homo sapiens
tgtgaggattgcttg

SEQ ID NO: 672105 - DNA, 15 bp, Homo sapiens
gtgaggattgcttga

SEQ ID NO: 672106 - DNA, 15 bp, Homo sapiens
tgaggattgcttgag

SEQ ID NO: 672107 - DNA, 15 bp, Homo sapiens
attgcttgagcccag

SEQ ID NO: 672108 - DNA, 15 bp, Homo sapiens
ttgcttgagcccagg

SEQ ID NO: 672109 - DNA, 15 bp, Homo sapiens
tgcttgagcccagga

SEQ ID NO: 672110 - DNA, 15 bp, Homo sapiens
gcttgagcccaggag

SEQ ID NO: 672111 - DNA, 15 bp, Homo sapiens
tgagcccaggaggtc

SEQ ID NO: 672112 - DNA, 15 bp, Homo sapiens
gagcccaggaggtca

SEQ ID NO: 672113 - DNA, 15 bp, Homo sapiens
agcccaggaggtcaa

SEQ ID NO: 672114 - DNA, 15 bp, Homo sapiens
gcccaggaggtcaag

SEQ ID NO: 672115 - DNA, 15 bp, Homo sapiens
cccaggaggtcaagg

SEQ ID NO: 672116 - DNA, 15 bp, Homo sapiens
ccaggaggtcaaggc

SEQ ID NO: 672117 - DNA, 15 bp, Homo sapiens
caggaggtcaaggct

SEQ ID NO: 672118 - DNA, 15 bp, Homo sapiens
aggaggtcaaggcta

SEQ ID NO: 672119 - DNA, 15 bp, Homo sapiens
ggaggtcaaggctac

SEQ ID NO: 672120 - DNA, 15 bp, Homo sapiens
gaggtcaaggctaca

SEQ ID NO: 672121 - DNA, 15 bp, Homo sapiens
aggtcaaggctacag

SEQ ID NO: 672122 - DNA, 15 bp, Homo sapiens
ggtcaaggctacaga

SEQ ID NO: 672123 - DNA, 15 bp, Homo sapiens
gtcaaggctacagag

SEQ ID NO: 672124 - DNA, 15 bp, Homo sapiens
tcaaggctacagaga

SEQ ID NO: 672125 - DNA, 15 bp, Homo sapiens
caaggctacagagag

SEQ ID NO: 672126 - DNA, 15 bp, Homo sapiens
aaggctacagagagc

SEQ ID NO: 672127 - DNA, 15 bp, Homo sapiens
aggctacagagagct

SEQ ID NO: 672128 - DNA, 15 bp, Homo sapiens
ggctacagagagcta

SEQ ID NO: 672129 - DNA, 15 bp, Homo sapiens
gctacagagagctat

SEQ ID NO: 672130 - DNA, 15 bp, Homo sapiens
ctacagagagctata

SEQ ID NO: 672131 - DNA, 15 bp, Homo sapiens
tacagagagctataa

SEQ ID NO: 672132 - DNA, 15 bp, Homo sapiens
acagagagctataat

SEQ ID NO: 672133 - DNA, 15 bp, Homo sapiens
cagagagctataatc

SEQ ID NO: 672134 - DNA, 15 bp, Homo sapiens
agagagctataatca

SEQ ID NO: 672135 - DNA, 15 bp, Homo sapiens
gagagctataatcac

SEQ ID NO: 672136 - DNA, 15 bp, Homo sapiens
agagctataatcaca

SEQ ID NO: 672137 - DNA, 15 bp, Homo sapiens
gagctataatcacac

SEQ ID NO: 672138 - DNA, 15 bp, Homo sapiens
agctataatcacacc

SEQ ID NO: 672139 - DNA, 15 bp, Homo sapiens
gctataatcacacca

SEQ ID NO: 672140 - DNA, 15 bp, Homo sapiens
ctataatcacaccac

SEQ ID NO: 672141 - DNA, 15 bp, Homo sapiens
tataatcacaccact

SEQ ID NO: 672142 - DNA, 15 bp, Homo sapiens
ataatcacaccactt

SEQ ID NO: 672143 - DNA, 15 bp, Homo sapiens
taatcacaccacttc

SEQ ID NO: 672144 - DNA, 15 bp, Homo sapiens
aatcacaccacttca

SEQ ID NO: 672145 - DNA, 15 bp, Homo sapiens
atcacaccacttcac

SEQ ID NO: 672146 - DNA, 15 bp, Homo sapiens
tcacaccacttcact

SEQ ID NO: 672147 - DNA, 15 bp, Homo sapiens
cacaccacttcactc

SEQ ID NO: 672148 - DNA, 15 bp, Homo sapiens
acaccacttcactcc

SEQ ID NO: 672149 - DNA, 15 bp, Homo sapiens
caccacttcactcca

SEQ ID NO: 672150 - DNA, 15 bp, Homo sapiens
accacttcactccag

SEQ ID NO: 672151 - DNA, 15 bp, Homo sapiens
ccacttcactccagc

SEQ ID NO: 672152 - DNA, 15 bp, Homo sapiens
cacttcactccagcc

SEQ ID NO: 672153 - DNA, 15 bp, Homo sapiens
acttcactccagcct

SEQ ID NO: 672154 - DNA, 15 bp, Homo sapiens
cttcactccagcctg

SEQ ID NO: 672155 - DNA, 15 bp, Homo sapiens
ttcactccagcctgg

SEQ ID NO: 672156 - DNA, 15 bp, Homo sapiens
tcactccagcctggg

SEQ ID NO: 672157 - DNA, 15 bp, Homo sapiens
agcctgggggacaaa

SEQ ID NO: 672158 - DNA, 15 bp, Homo sapiens
gcctgggggacaaag

SEQ ID NO: 672159 - DNA, 15 bp, Homo sapiens
cctgggggacaaagt

SEQ ID NO: 672160 - DNA, 15 bp, Homo sapiens
ctgggggacaaagtg

SEQ ID NO: 672161 - DNA, 15 bp, Homo sapiens
tgggggacaaagtga

SEQ ID NO: 672162 - DNA, 15 bp, Homo sapiens
gggggacaaagtgaa

SEQ ID NO: 672163 - DNA, 15 bp, Homo sapiens
ggggacaaagtgaaa

SEQ ID NO: 672164 - DNA, 15 bp, Homo sapiens
gggacaaagtgaaac

SEQ ID NO: 672165 - DNA, 15 bp, Homo sapiens
ggacaaagtgaaacc

SEQ ID NO: 672166 - DNA, 15 bp, Homo sapiens
gacaaagtgaaaccc

SEQ ID NO: 672167 - DNA, 15 bp, Homo sapiens
acaaagtgaaaccct

SEQ ID NO: 672168 - DNA, 15 bp, Homo sapiens
caaagtgaaaccctg

SEQ ID NO: 672169 - DNA, 15 bp, Homo sapiens
aaagtgaaaccctgt

SEQ ID NO: 672170 - DNA, 15 bp, Homo sapiens
aagtgaaaccctgtc

SEQ ID NO: 672171 - DNA, 15 bp, Homo sapiens
agtgaaaccctgtct

SEQ ID NO: 672172 - DNA, 15 bp, Homo sapiens
gtgaaaccctgtctg

SEQ ID NO: 672173 - DNA, 15 bp, Homo sapiens
tgaaaccctgtctga

SEQ ID NO: 672174 - DNA, 15 bp, Homo sapiens
gaaaccctgtctgaa

SEQ ID NO: 672175 - DNA, 15 bp, Homo sapiens
aaaccctgtctgaaa

SEQ ID NO: 672176 - DNA, 15 bp, Homo sapiens
aaccctgtctgaaaa

SEQ ID NO: 672177 - DNA, 15 bp, Homo sapiens
accctgtctgaaaaa

SEQ ID NO: 672178 - DNA, 15 bp, Homo sapiens
ccctgtctgaaaaaa

SEQ ID NO: 672179 - DNA, 15 bp, Homo sapiens
cctgtctgaaaaaaa

SEQ ID NO: 672180 - DNA, 15 bp, Homo sapiens
ctgtctgaaaaaaac

SEQ ID NO: 672181 - DNA, 15 bp, Homo sapiens
tgtctgaaaaaaaca

SEQ ID NO: 672182 - DNA, 15 bp, Homo sapiens
gtctgaaaaaaacaa

SEQ ID NO: 672183 - DNA, 15 bp, Homo sapiens
tctgaaaaaaacaaa

SEQ ID NO: 672184 - DNA, 15 bp, Homo sapiens
ctgaaaaaaacaaaa

SEQ ID NO: 672185 - DNA, 15 bp, Homo sapiens
tgaaaaaaacaaaaa

SEQ ID NO: 672186 - DNA, 15 bp, Homo sapiens
gaaaaaaacaaaaaa

SEQ ID NO: 672187 - DNA, 15 bp, Homo sapiens
aaaaaacaaaaaaag

SEQ ID NO: 672188 - DNA, 15 bp, Homo sapiens
aaaaacaaaaaaaga

SEQ ID NO: 672189 - DNA, 15 bp, Homo sapiens
aaaacaaaaaaagaa

SEQ ID NO: 672190 - DNA, 15 bp, Homo sapiens
aaacaaaaaaagaaa

SEQ ID NO: 672191 - DNA, 15 bp, Homo sapiens
aacaaaaaaagaaaa

SEQ ID NO: 672192 - DNA, 15 bp, Homo sapiens
acaaaaaaagaaaaa

SEQ ID NO: 672193 - DNA, 15 bp, Homo sapiens
caaaaaaagaaaaag

SEQ ID NO: 672194 - DNA, 15 bp, Homo sapiens
aaaaaaagaaaaagg

SEQ ID NO: 672195 - DNA, 15 bp, Homo sapiens
aaaaaagaaaaagga

SEQ ID NO: 672196 - DNA, 15 bp, Homo sapiens
aaaaagaaaaaggaa

SEQ ID NO: 672197 - DNA, 15 bp, Homo sapiens
aaaagaaaaaggaaa

SEQ ID NO: 672198 - DNA, 15 bp, Homo sapiens
aaagaaaaaggaaaa

SEQ ID NO: 672199 - DNA, 15 bp, Homo sapiens
aagaaaaaggaaaaa

SEQ ID NO: 672200 - DNA, 15 bp, Homo sapiens
agaaaaaggaaaaag

SEQ ID NO: 672201 - DNA, 15 bp, Homo sapiens
gaaaaaggaaaaaga

SEQ ID NO: 672202 - DNA, 15 bp, Homo sapiens
aaaaaggaaaaagaa

SEQ ID NO: 672203 - DNA, 15 bp, Homo sapiens
aaaaggaaaaagaaa

SEQ ID NO: 672204 - DNA, 15 bp, Homo sapiens
aaaggaaaaagaaac

SEQ ID NO: 672205 - DNA, 15 bp, Homo sapiens
aaggaaaaagaaaca

SEQ ID NO: 672206 - DNA, 15 bp, Homo sapiens
aggaaaaagaaacaa

SEQ ID NO: 672207 - DNA, 15 bp, Homo sapiens
ggaaaaagaaacaat

SEQ ID NO: 672208 - DNA, 15 bp, Homo sapiens
gaaaaagaaacaata

SEQ ID NO: 672209 - DNA, 15 bp, Homo sapiens
aaaaagaaacaatac

SEQ ID NO: 672210 - DNA, 15 bp, Homo sapiens
aaaagaaacaatacg

SEQ ID NO: 672211 - DNA, 15 bp, Homo sapiens
aaagaaacaatacga

SEQ ID NO: 672212 - DNA, 15 bp, Homo sapiens
aagaaacaatacgat

SEQ ID NO: 672213 - DNA, 15 bp, Homo sapiens
agaaacaatacgatc

SEQ ID NO: 672214 - DNA, 15 bp, Homo sapiens
gaaacaatacgatca

SEQ ID NO: 672215 - DNA, 15 bp, Homo sapiens
aaacaatacgatcac

SEQ ID NO: 672216 - DNA, 15 bp, Homo sapiens
aacaatacgatcaca

SEQ ID NO: 672217 - DNA, 15 bp, Homo sapiens
acaatacgatcacaa

SEQ ID NO: 672218 - DNA, 15 bp, Homo sapiens
caatacgatcacaaa

SEQ ID NO: 672219 - DNA, 15 bp, Homo sapiens
aatacgatcacaaag

SEQ ID NO: 672220 - DNA, 15 bp, Homo sapiens
atacgatcacaaagt

SEQ ID NO: 672221 - DNA, 15 bp, Homo sapiens
tacgatcacaaagta

SEQ ID NO: 672222 - DNA, 15 bp, Homo sapiens
acgatcacaaagtag

SEQ ID NO: 672223 - DNA, 15 bp, Homo sapiens
cgatcacaaagtaga

SEQ ID NO: 672224 - DNA, 15 bp, Homo sapiens
gatcacaaagtagat

SEQ ID NO: 672225 - DNA, 15 bp, Homo sapiens
atcacaaagtagata

SEQ ID NO: 672226 - DNA, 15 bp, Homo sapiens
tcacaaagtagatat

SEQ ID NO: 672227 - DNA, 15 bp, Homo sapiens
cacaaagtagatatt

SEQ ID NO: 672228 - DNA, 15 bp, Homo sapiens
acaaagtagatattc

SEQ ID NO: 672229 - DNA, 15 bp, Homo sapiens
caaagtagatattca

SEQ ID NO: 672230 - DNA, 15 bp, Homo sapiens
aaagtagatattcat

SEQ ID NO: 672231 - DNA, 15 bp, Homo sapiens
aagtagatattcata

SEQ ID NO: 672232 - DNA, 15 bp, Homo sapiens
agtagatattcatag

SEQ ID NO: 672233 - DNA, 15 bp, Homo sapiens
gtagatattcatagt

SEQ ID NO: 672234 - DNA, 15 bp, Homo sapiens
tagatattcatagtg

SEQ ID NO: 672235 - DNA, 15 bp, Homo sapiens
agatattcatagtgt

SEQ ID NO: 672236 - DNA, 15 bp, Homo sapiens
gatattcatagtgtt

SEQ ID NO: 672237 - DNA, 15 bp, Homo sapiens
atattcatagtgttt

SEQ ID NO: 672238 - DNA, 15 bp, Homo sapiens
tattcatagtgttta

SEQ ID NO: 672239 - DNA, 15 bp, Homo sapiens
attcatagtgtttat

SEQ ID NO: 672240 - DNA, 15 bp, Homo sapiens
ttcatagtgtttatt

SEQ ID NO: 672241 - DNA, 15 bp, Homo sapiens
tcatagtgtttattt

SEQ ID NO: 672242 - DNA, 15 bp, Homo sapiens
catagtgtttatttt

SEQ ID NO: 672243 - DNA, 15 bp, Homo sapiens
atagtgtttattttc

SEQ ID NO: 672244 - DNA, 15 bp, Homo sapiens
tagtgtttattttca

SEQ ID NO: 672245 - DNA, 15 bp, Homo sapiens
agtgtttattttcag

SEQ ID NO: 672246 - DNA, 15 bp, Homo sapiens
gtgtttattttcagt

SEQ ID NO: 672247 - DNA, 15 bp, Homo sapiens
tgtttattttcagta

SEQ ID NO: 672248 - DNA, 15 bp, Homo sapiens
gtttattttcagtac

SEQ ID NO: 672249 - DNA, 15 bp, Homo sapiens
tttattttcagtact

SEQ ID NO: 672250 - DNA, 15 bp, Homo sapiens
ttattttcagtactc

SEQ ID NO: 672251 - DNA, 15 bp, Homo sapiens
tattttcagtactct

SEQ ID NO: 672252 - DNA, 15 bp, Homo sapiens
attttcagtactctt

SEQ ID NO: 672253 - DNA, 15 bp, Homo sapiens
ttttcagtactcttt

SEQ ID NO: 672254 - DNA, 15 bp, Homo sapiens
tttcagtactctttt

SEQ ID NO: 672255 - DNA, 15 bp, Homo sapiens
ttcagtactcttttt

SEQ ID NO: 672256 - DNA, 15 bp, Homo sapiens
tcagtactctttttt

SEQ ID NO: 672257 - DNA, 15 bp, Homo sapiens
cagtactcttttttt

SEQ ID NO: 672258 - DNA, 15 bp, Homo sapiens
agtactctttttttt

SEQ ID NO: 672259 - DNA, 15 bp, Homo sapiens
gtactcttttttttt

SEQ ID NO: 672260 - DNA, 15 bp, Homo sapiens
tactctttttttttt

SEQ ID NO: 672261 - DNA, 15 bp, Homo sapiens
actcttttttttttt

SEQ ID NO: 672262 - DNA, 15 bp, Homo sapiens
cagtggcacgatctt

SEQ ID NO: 672263 - DNA, 15 bp, Homo sapiens
agtggcacgatcttg

SEQ ID NO: 672264 - DNA, 15 bp, Homo sapiens
gtggcacgatcttgg

SEQ ID NO: 672265 - DNA, 15 bp, Homo sapiens
tggcacgatcttggc

SEQ ID NO: 672266 - DNA, 15 bp, Homo sapiens
ggcacgatcttggct

SEQ ID NO: 672267 - DNA, 15 bp, Homo sapiens
gcacgatcttggctc

SEQ ID NO: 672268 - DNA, 15 bp, Homo sapiens
cacgatcttggctca

SEQ ID NO: 672269 - DNA, 15 bp, Homo sapiens
acgatcttggctcac

SEQ ID NO: 672270 - DNA, 15 bp, Homo sapiens
cgatcttggctcact

SEQ ID NO: 672271 - DNA, 15 bp, Homo sapiens
cagcctctgcctccc

SEQ ID NO: 672272 - DNA, 15 bp, Homo sapiens
agcctctgcctccca

SEQ ID NO: 672273 - DNA, 15 bp, Homo sapiens
gcctctgcctcccag

SEQ ID NO: 672274 - DNA, 15 bp, Homo sapiens
cccaggttcaagcgc

SEQ ID NO: 672275 - DNA, 15 bp, Homo sapiens
ccaggttcaagcgct

SEQ ID NO: 672276 - DNA, 15 bp, Homo sapiens
caggttcaagcgctt

SEQ ID NO: 672277 - DNA, 15 bp, Homo sapiens
aggttcaagcgcttg

SEQ ID NO: 672278 - DNA, 15 bp, Homo sapiens
ggttcaagcgcttgg

SEQ ID NO: 672279 - DNA, 15 bp, Homo sapiens
gttcaagcgcttggc

SEQ ID NO: 672280 - DNA, 15 bp, Homo sapiens
ttcaagcgcttggct

SEQ ID NO: 672281 - DNA, 15 bp, Homo sapiens
tcaagcgcttggctc

SEQ ID NO: 672282 - DNA, 15 bp, Homo sapiens
caagcgcttggctca

SEQ ID NO: 672283 - DNA, 15 bp, Homo sapiens
aagcgcttggctcac

SEQ ID NO: 672284 - DNA, 15 bp, Homo sapiens
agcgcttggctcact

SEQ ID NO: 672285 - DNA, 15 bp, Homo sapiens
gcgcttggctcactg

SEQ ID NO: 672286 - DNA, 15 bp, Homo sapiens
cgcttggctcactgc

SEQ ID NO: 672287 - DNA, 15 bp, Homo sapiens
gcttggctcactgca

SEQ ID NO: 672288 - DNA, 15 bp, Homo sapiens
caacctccgcctcct

SEQ ID NO: 672289 - DNA, 15 bp, Homo sapiens
aacctccgcctcctg

SEQ ID NO: 672290 - DNA, 15 bp, Homo sapiens
acctccgcctcctgg

SEQ ID NO: 672291 - DNA, 15 bp, Homo sapiens
cctccgcctcctggg

SEQ ID NO: 672292 - DNA, 15 bp, Homo sapiens
cctgggttcaagcgc

SEQ ID NO: 672293 - DNA, 15 bp, Homo sapiens
ctgggttcaagcgct

SEQ ID NO: 672294 - DNA, 15 bp, Homo sapiens
tgggttcaagcgctt

SEQ ID NO: 672295 - DNA, 15 bp, Homo sapiens
gggttcaagcgcttc

SEQ ID NO: 672296 - DNA, 15 bp, Homo sapiens
ggttcaagcgcttct

SEQ ID NO: 672297 - DNA, 15 bp, Homo sapiens
gttcaagcgcttctt

SEQ ID NO: 672298 - DNA, 15 bp, Homo sapiens
ttcaagcgcttcttc

SEQ ID NO: 672299 - DNA, 15 bp, Homo sapiens
tcaagcgcttcttct

SEQ ID NO: 672300 - DNA, 15 bp, Homo sapiens
caagcgcttcttctg

SEQ ID NO: 672301 - DNA, 15 bp, Homo sapiens
aagcgcttcttctgc

SEQ ID NO: 672302 - DNA, 15 bp, Homo sapiens
agcgcttcttctgcc

SEQ ID NO: 672303 - DNA, 15 bp, Homo sapiens
gcgcttcttctgcct

SEQ ID NO: 672304 - DNA, 15 bp, Homo sapiens
cgcttcttctgcctc

SEQ ID NO: 672305 - DNA, 15 bp, Homo sapiens
gcttcttctgcctca
